United States Patent Application Publication US 2023/0026259 A1 - sequence listing, part 10

SEQ ID NO: 44046 - protein, 304 aa, Homo sapiens
  Payload ID: 8984
  Gene Symbol: KIR2DS2
  Gene Name: killer cell immunoglobulin-like receptor, two domains, short cytoplasmic tail, 2
  Uniprot ID: P43631
  ENSP ID: ENSP00000477892
MSLMVVSMACVGFFLLQGAWPHEGVHRKPSLLAHPGPLVKSEETVILQCWSDVRFEHFLLHREGKYKDTLHLIGEHHDGVSKANFSIGPMMQDLAGTYRCYGSVTHSPYQLSAPSDPLDIVITGLYEKPSLSAQPGPTVLAGESVTLSCSSRSSYDMYHLSREGEAHERRFSAGPKVNGTFQADFPLGPATHGGTYRCFGSFRDSPYEWSNSSDPLLVSVTGNPSNSWPSPTEPSSKTGNPRHLHVLIGTSVVKIPFTILLFFLLHRWCSNKKNAAVMDQEPAGNRTVNSEDSDEQDHQEVSYA

SEQ ID NO: 44047 - protein, 304 aa, Homo sapiens; identical to SEQ ID NO: 44046
  Payload ID: 8984
  Gene Symbol: KIR2DS2
  Gene Name: killer cell immunoglobulin-like receptor, two domains, short cytoplasmic tail, 2
  Uniprot ID: P43631
  ENSP ID: ENSP00000478014

SEQ ID NO: 44048 - protein, 304 aa, Homo sapiens; identical to SEQ ID NO: 44046
  Payload ID: 8984
  Gene Symbol: KIR2DS2
  Gene Name: killer cell immunoglobulin-like receptor, two domains, short cytoplasmic tail, 2
  Uniprot ID: P43631
  ENSP ID: ENSP00000478509

SEQ ID NO: 44049 - protein, 304 aa, Homo sapiens; identical to SEQ ID NO: 44046
  Payload ID: 8984
  Gene Symbol: KIR2DS2
  Gene Name: killer cell immunoglobulin-like receptor, two domains, short cytoplasmic tail, 2
  Uniprot ID: P43631
  ENSP ID: ENSP00000479565

SEQ ID NO: 44050 - protein, 304 aa, Homo sapiens; identical to SEQ ID NO: 44046
  Payload ID: 8984
  Gene Symbol: KIR2DS2
  Gene Name: killer cell immunoglobulin-like receptor, two domains, short cytoplasmic tail, 2
  Uniprot ID: P43631
  ENSP ID: ENSP00000479980

SEQ ID NO: 44051 - protein, 287 aa, Homo sapiens; identical to SEQ ID NO: 44045
  Payload ID: 8984
  Gene Symbol: KIR2DS2
  Gene Name: killer cell immunoglobulin-like receptor, two domains, short cytoplasmic tail, 2
  ENSP ID: ENSP00000481218

SEQ ID NO: 44052 - protein, 304 aa, Homo sapiens; identical to SEQ ID NO: 44046
  Payload ID: 8984
  Gene Symbol: KIR2DS2
  Gene Name: killer cell immunoglobulin-like receptor, two domains, short cytoplasmic tail, 2
  Uniprot ID: P43631
  ENSP ID: ENSP00000481307

SEQ ID NO: 44053 - protein, 304 aa, Homo sapiens; identical to SEQ ID NO: 44046
  Payload ID: 8984
  Gene Symbol: KIR2DS2
  Gene Name: killer cell immunoglobulin-like receptor, two domains, short cytoplasmic tail, 2
  Uniprot ID: P43631
  ENSP ID: ENSP00000482637

SEQ ID NO: 44054 - protein, 304 aa, Homo sapiens; identical to SEQ ID NO: 44046
  Payload ID: 8984
  Gene Symbol: KIR2DS2
  Gene Name: killer cell immunoglobulin-like receptor, two domains, short cytoplasmic tail, 2
  Uniprot ID: P43631
  ENSP ID: ENSP00000482725

SEQ ID NO: 44055 - protein, 304 aa, Homo sapiens; identical to SEQ ID NO: 44046
  Payload ID: 8984
  Gene Symbol: KIR2DS2
  Gene Name: killer cell immunoglobulin-like receptor, two domains, short cytoplasmic tail, 2
  Uniprot ID: P43631
  ENSP ID: ENSP00000482770

SEQ ID NO: 44056 - protein, 304 aa, Homo sapiens; identical to SEQ ID NO: 44046
  Payload ID: 8984
  Gene Symbol: KIR2DS2
  Gene Name: killer cell immunoglobulin-like receptor, two domains, short cytoplasmic tail, 2
  Uniprot ID: P43631
  ENSP ID: ENSP00000483792

SEQ ID NO: 44057 - protein, 304 aa, Homo sapiens; identical to SEQ ID NO: 44046
  Payload ID: 8984
  Gene Symbol: KIR2DS2
  Gene Name: killer cell immunoglobulin-like receptor, two domains, short cytoplasmic tail, 2
  Uniprot ID: P43631
  ENSP ID: ENSP00000483804

SEQ ID NO: 44058 - protein, 204 aa, Homo sapiens
  Payload ID: 8984
  Gene Symbol: KIR2DS2
  Gene Name: killer cell immunoglobulin-like receptor, two domains, short cytoplasmic tail, 2
  ENSP ID: ENSP00000483805
MSLMVVSMACVGFFLLQGAWPHEGLYEKPSLSAQPGPTVLAGESVTLSCSSRSSYDMYHLSREGEAHERRFSAGPKVNGTFQADFPLGPATHGGTYRCFGSFRDSPYEWSNSSDPLLVSVTGNPSNSWPSPTEPSSKTGNPRHLHVLIGTSVVKIPFTILLFFLLHRWCSNKKNAAVMDQEPAGNRTVNSEDSDEQDHQEVSYA

SEQ ID NO: 44059 - protein, 304 aa, Homo sapiens; identical to SEQ ID NO: 44046
  Payload ID: 8984
  Gene Symbol: KIR2DS2
  Gene Name: killer cell immunoglobulin-like receptor, two domains, short cytoplasmic tail, 2
  Uniprot ID: P43631
  ENSP ID: ENSP00000484082

SEQ ID NO: 44060 - protein, 287 aa, Homo sapiens; identical to SEQ ID NO: 44045
  Payload ID: 8984
  Gene Symbol: KIR2DS2
  Gene Name: killer cell immunoglobulin-like receptor, two domains, short cytoplasmic tail, 2
  ENSP ID: ENSP00000484133

SEQ ID NO: 44061 - protein, 304 aa, Homo sapiens; identical to SEQ ID NO: 44046
  Payload ID: 8984
  Gene Symbol: KIR2DS2
  Gene Name: killer cell immunoglobulin-like receptor, two domains, short cytoplasmic tail, 2
  Uniprot ID: P43631
  ENSP ID: ENSP00000484281

SEQ ID NO: 44062 - protein, 304 aa, Homo sapiens; identical to SEQ ID NO: 44046
  Payload ID: 8984
  Gene Symbol: KIR2DS2
  Gene Name: killer cell immunoglobulin-like receptor, two domains, short cytoplasmic tail, 2
  Uniprot ID: P43631
  ENSP ID: ENSP00000484400

SEQ ID NO: 44063 - protein, 304 aa, Homo sapiens; identical to SEQ ID NO: 44046
  Payload ID: 8984
  Gene Symbol: KIR2DS2
  Gene Name: killer cell immunoglobulin-like receptor, two domains, short cytoplasmic tail, 2
  Uniprot ID: P43631
  ENSP ID: ENSP00000484771

SEQ ID NO: 44064 - protein, 304 aa, Homo sapiens
  Payload ID: 8985
  Gene Symbol: KIR2DS3
  Gene Name: killer cell immunoglobulin-like receptor, two domains, short cytoplasmic tail, 3
  Uniprot ID: Q14952
  ENSP ID: ENSP00000479108
MSLMVISMACVGFFWLQGAWPHEGFRRKPSLLAHPGRLVKSEETVILQCWSDVMFEHFLLHREGTFNDTLRLIGEHIDGVSKANFSIGRMRQDLAGTYRCYGSVPHSPYQFSAPSDPLDIVITGLYEKPSLSAQPGPTVLAGESVTLSCSSWSSYDMYHLSTEGEAHERRFSAGPKVNGTFQADFPLGPATQGGTYRCFGSFHDSPYEWSKSSDPLLVSVTGNPSNSWPSPTEPSSKTGNPRHLHVLIGTSVVKLPFTILLFFLLHRWCSDKKNASVMDQGPAGNRTVNREDSDEQDHQEVSYA

SEQ ID NO: 44065 - protein, 304 aa, Homo sapiens; identical to SEQ ID NO: 36731
  Payload ID: 8985
  Gene Symbol: KIR2DS3
  Gene Name: killer cell immunoglobulin-like receptor, two domains, short cytoplasmic tail, 3
  ENSP ID: ENSP00000479929

SEQ ID NO: 44066 - protein, 304 aa, Homo sapiens; identical to SEQ ID NO: 44064
  Payload ID: 8985
  Gene Symbol: KIR2DS3
  Gene Name: killer cell immunoglobulin-like receptor, two domains, short cytoplasmic tail, 3
  Uniprot ID: Q14952
  ENSP ID: ENSP00000480969

SEQ ID NO: 44067 - protein, 304 aa, Homo sapiens; identical to SEQ ID NO: 36731
  Payload ID: 8985
  Gene Symbol: KIR2DS3
  Gene Name: killer cell immunoglobulin-like receptor, two domains, short cytoplasmic tail, 3
  ENSP ID: ENSP00000482047

SEQ ID NO: 44068 - protein, 304 aa, Homo sapiens; identical to SEQ ID NO: 44064
  Payload ID: 8985
  Gene Symbol: KIR2DS3
  Gene Name: killer cell immunoglobulin-like receptor, two domains, short cytoplasmic tail, 3
  Uniprot ID: Q14952
  ENSP ID: ENSP00000483315

SEQ ID NO: 44069 - protein, 294 aa, Homo sapiens
  Payload ID: 8986
  Gene Symbol: KIR2DS4
  Gene Name: killer cell immunoglobulin-like receptor, two domains, short cytoplasmic tail, 4
  ENSP ID: ENSP00000340011
MSLMVIIMACVGFFLLQGAWPQEGVHRKPSFLALPGHLVKSEETVILQCWSDVMFEHFLLHREGKFNNTLHLIGEHHDGVSKANFSIGPMMPVLAGTYRCYGSVPHSPYQLSAPSDPLDMVIIGLYEKPSLSAQPGPTVQAGENVTLSCSSIYPGKGRPMNVGSLQCAASTEHSRPTFLWALPPTEGPTDASALSVTLPTSGQTRVIHCLFPSQETLQIVGLHPLNQAPKPVTPDTYMFLGPQWSKSLSPSSSSFSFIAGAPTKKMLLWTKSLQGTEQTARILMNKTIRRCHTH

SEQ ID NO: 44070 - protein, 224 aa, Homo sapiens
  Payload ID: 8986
  Gene Symbol: KIR2DS4
  Gene Name: killer cell immunoglobulin-like receptor, two domains, short cytoplasmic tail, 4
  ENSP ID: ENSP00000375609
MSLMVIIMACVGFFLLQGAWPQEGVHRKPSFLALPGHLVKSEETVILQCWSDVMFEHFLLHREGKFNNTLHLIGEHHDGVSKANFSIGPMMPVLAGTYRCYGSVPHSPYQLSAPSDPLDMVIIGLYEKPSLSAQPGPTVQAGENVTLSCSSIYPGKGRPMNVGSLQCAASTEHSRPTFLWALPPTEGPTDASALSVTLPTSGQTRVIHCLFPSQVTPDTYMFLG

SEQ ID NO: 44071 - protein, 304 aa, Homo sapiens
  Payload ID: 8986
  Gene Symbol: KIR2DS4
  Gene Name: killer cell immunoglobulin-like receptor, two domains, short cytoplasmic tail, 4
  Uniprot ID: P43632
  ENSP ID: ENSP00000477744
MSLMVIIMACVGFFLLQGAWPQEGVHRKPSFLALPGHLVKSEETVILQCWSDVMFEHFLLHREGKFNNTLHLIGEHHDGVSKANFSIGPMMPVLAGTYRCYGSVPHSPYQLSAPSDPLDMVIIGLYEKPSLSAQPGPTVQAGENVTLSCSSRSSYDMYHLSREGEAHERRLPAVRSINGTFQADFPLGPATHGGTYRCFGSFRDAPYEWSNSSDPLLVSVTGNPSNSWPSPTEPSSKTGNPRHLHVLIGTSVVKIPFTILLFFLLHRWCSDKKNAAVMDQEPAGNRTVNSEDSDEQDHQEVSYA

SEQ ID NO: 44072 - protein, 304 aa, Homo sapiens; identical to SEQ ID NO: 44071
  Payload ID: 8986
  Gene Symbol: KIR2DS4
  Gene Name: killer cell immunoglobulin-like receptor, two domains, short cytoplasmic tail, 4
  Uniprot ID: P43632
  ENSP ID: ENSP00000478241

SEQ ID NO: 44073 - protein, 294 aa, Homo sapiens
  Payload ID: 8986
  Gene Symbol: KIR2DS4
  Gene Name: killer cell immunoglobulin-like receptor, two domains, short cytoplasmic tail, 4
  ENSP ID: ENSP00000478383
MSLMVIIMACVGFFLLQGAWPQEEVHRKPSFLALPGHLVKSEETVILQCWSDVMFEHFLLHREGKFNNTLHLIGEHHDGVSKANFSIGPMMPVLAGTYRCYGSVTHSPYQLSAPSDPLDMVIIGLYEKPSLSAQPGPTVQAGENVTLSCSSIYPGKGRPMNVGSLQCAASTEHSRPTFLWALPPTEGPTDASALSVTLPTSGQTRVIHCLFPSQETLQIVGLHPLNQAPKPVTPDTYMFLGPQWSKSLSPSSSSFSFIAGAPTKKMLLWTKSLQGTEQTARILMNKTIRRCHTH

SEQ ID NO: 44074 - protein, 294 aa, Homo sapiens
  Payload ID: 8986
  Gene Symbol: KIR2DS4
  Gene Name: killer cell immunoglobulin-like receptor, two domains, short cytoplasmic tail, 4
  ENSP ID: ENSP00000478998
MSLMVIIMACVGFFLLQGAWPQEGVHRKPSFLALPGHLVKSEETVILQCWSDVMFEHFLLHREGKFNNTLHLIGEHHDGVSKANFSIGPMMPVLAGTYRCYGSVPHSPYQLSAPSDPLDMVIIGLYEKPSLSAQPGPTVQAGENVTLSCSSIYPGRGRPMNVGSLQCAASTEHSRPTFLWALPPTEGPTDASALSVTLPTSGQTRVIHCLFPSQETLQIVGLHPLNQAPKPVTPDTYMFLGPQWSKSLSPSSSSFSFIAGAPTKKMLLWTKSLQGTEQTARILMNKTIRRCHTH

SEQ ID NO: 44075 - protein, 224 aa, Homo sapiens
  Payload ID: 8986
  Gene Symbol: KIR2DS4
  Gene Name: killer cell immunoglobulin-like receptor, two domains, short cytoplasmic tail, 4
  ENSP ID: ENSP00000479129
MSLMVIIMACVGFFLLQGAWPQEGVHRKPSFLALPGHLVKSEETVILQCWSDVMFEHFLLHREGKFNNTLHLIGEHHDGVSKANFSIGPMMPVLAGTYRCYGSVPHSPYQLSAPSDPLDMVIIGLYEKPSLSAQPGPTVQAGENVTLSCSSIYPGRGRPMNVGSLQCAASTEHSRPTFLWALPPTEGPTDASALSVTLPTSGQTRVIHCLFPSQVTPDTYMFLG

SEQ ID NO: 44076 - protein, 294 aa, Homo sapiens; identical to SEQ ID NO: 44073
  Payload ID: 8986
  Gene Symbol: KIR2DS4
  Gene Name: killer cell immunoglobulin-like receptor, two domains, short cytoplasmic tail, 4
  ENSP ID: ENSP00000479356

SEQ ID NO: 44077 - protein, 294 aa, Homo sapiens; identical to SEQ ID NO: 44069
  Payload ID: 8986
  Gene Symbol: KIR2DS4
  Gene Name: killer cell immunoglobulin-like receptor, two domains, short cytoplasmic tail, 4
  ENSP ID: ENSP00000479369

SEQ ID NO: 44078 - protein, 370 aa, Homo sapiens
  Payload ID: 8986
  Gene Symbol: KIR2DS4
  Gene Name: killer cell immunoglobulin-like receptor, two domains, short cytoplasmic tail, 4
  ENSP ID: ENSP00000479404
MSLMVIIMACVGFFLLQGAWPQEGVHRKPSFLALPGHLVKSEETVILQCWSDVMFEHFLLHREGKFNNTLHLIGEHHDGVSKANFSIGPMMPVLAGTYRCYGSVPHSPYQLSAPSDPLDMVIIGLYEKPSLSAQPGPTVQAGENVTLSCSSIYPGRGRPMNVGSLQCAASTEHSRPTFLWALPPTEGPTDASALSVTLPTSGQTRVIHCLFPSQETLQIVGLHPLNQAPKPVTPDTYMFLGPQWSKSLSPSSSSFSFIAGAPTKKMLLWTKSLQGTEQTARILMNKTIRRCHTHNWITVFSHREKSLALLRGPRHPQQIPACTNFQMLSPDPKLSSVHEHHSQALRGSSRETTALSQNRVASSHVPAAGI

SEQ ID NO: 44079 - protein, 239 aa, Homo sapiens
  Payload ID: 8986
  Gene Symbol: KIR2DS4
  Gene Name: killer cell immunoglobulin-like receptor, two domains, short cytoplasmic tail, 4
  ENSP ID: ENSP00000479749
MSLMVIIMACVGFFLLQGAWPQEGVHRKPSFLALPGHLVKSEETVILQCWSDVMFEHFLLHREGKFNNTLHLIGEHHDGVSKANFSIGPMMPVLAGTYRCYGSVPHSPYQLSAPSDPLDMVIIGLYEKPSLSAQPGPTVQAGENVTLSCSSIYPGKGRPMNVGSLQCAASTEHSRPTFLWALPPTEGPTDASALSVTLPTSGQTRVIHCLFPSQETLQIVGLHPLNQAPKPVTPDTYMF

SEQ ID NO: 44080 - protein, 304 aa, Homo sapiens; identical to SEQ ID NO: 44071
  Payload ID: 8986
  Gene Symbol: KIR2DS4
  Gene Name: killer cell immunoglobulin-like receptor, two domains, short cytoplasmic tail, 4
  Uniprot ID: P43632
  ENSP ID: ENSP00000479843

SEQ ID NO: 44081 - protein, 304 aa, Homo sapiens; identical to SEQ ID NO: 44071
  Payload ID: 8986
  Gene Symbol: KIR2DS4
  Gene Name: killer cell immunoglobulin-like receptor, two domains, short cytoplasmic tail, 4
  Uniprot ID: P43632
  ENSP ID: ENSP00000480062

SEQ ID NO: 44082 - protein, 171 aa, Homo sapiens
  Payload ID: 8986
  Gene Symbol: KIR2DS4
  Gene Name: killer cell immunoglobulin-like receptor, two domains, short cytoplasmic tail, 4
  ENSP ID: ENSP00000480110
TLHLIGEHHDGVSKANFSIGPMMPVLAGTYRCYGSVTHSPYQLSAPSDPLDMVIIGLYEKPSLSAQPGPTVQAGENVTLSCSSIYPGKGRPMNVGSLQCAASTEHSRPTFLWALPPTEGPTDASALSVTLPTSGQTRVIHCLFPSQETLQIVGLHPLNQAPKPVTPDTYMF

SEQ ID NO: 44083 - protein, 294 aa, Homo sapiens
  Payload ID: 8986
  Gene Symbol: KIR2DS4
  Gene Name: killer cell immunoglobulin-like receptor, two domains, short cytoplasmic tail, 4
  ENSP ID: ENSP00000481139
MSLMVIIMACVGFFLLQGAWPQEGVHRKPSFLALPGHLVKSEETVILQCWSDVMFEHFLLHREGKFNNTLHLIGEHHDGVSKANFSIGPMMPVLAGTYRCYSSVPHSPYQLSAPSDPLDMVIIGLYEKPSLSAQPGPTVQAGENVSLSCSSIYPGRGRPMNVGSLQCAASTEHSRPTFLWALPPTEGPTDASALSVTLPTSGQTRVIHCLFPSQETLQIVGLHPLNQAPKPVTPDTYMFLGPQWSKSLSPSSSSFSFIAGAPTKKMLLWTKSLQGTEQTARILMNKTIRRCHTH

SEQ ID NO: 44084 - protein, 398 aa, Homo sapiens
  Payload ID: 8986
  Gene Symbol: KIR2DS4
  Gene Name: killer cell immunoglobulin-like receptor, two domains, short cytoplasmic tail, 4
  ENSP ID: ENSP00000481214
MSLMVIIMACVGFFLLQGAWPQEGGQDKPLLSTWPSLVVPPEHVTLQCHSNLGFNNFSLYKDDGVPVPELYNRIFWKSLFMGPVTPSHAGTYRCRGSHTHSPSGWSAPSNPLVIMVTGVHRKPSFLALPGHLVKSEETVILQCWSDVMFEHFLLHREGKFNNTLHLIGEHHDGVSKANFSIGPMMPVLAGTYRCYGSVPHSPYQLSAPSDPLDMVIIGLYEKPSLSAQPGPTVQAGENVTLSCSSRSSYDMYHLSREGEAHERRLPAVRSINGTFQADFPLGPATHGGTYRCFGSFRDAPYEWSNSSDPLLVSVTGNPSNSWPSPTEPSSKTGNPRHLHVLIGTSVVKIPFTILLFFLLHRWCSDKKNAAVMDQEPAGNRTVNSEDSDEQDHQEVSYA

SEQ ID NO: 44085 - protein, 370 aa, Homo sapiens
  Payload ID: 8986
  Gene Symbol: KIR2DS4
  Gene Name: killer cell immunoglobulin-like receptor, two domains, short cytoplasmic tail, 4
  ENSP ID: ENSP00000481279
MSLMVIIMACVGFFLLQGAWPQEEVHRKPSFLALPGHLVKSEETVILQCWSDVMFEHFLLHREGKFNNTLHLIGEHHDGVSKANFSIGPMMPVLAGTYRCYGSVTHSPYQLSAPSDPLDMVIIGLYEKPSLSAQPGPTVQAGENVTLSCSSIYPGKGRPMNVGSLQCAASTEHSRPTFLWALPPTEGPTDASALSVTLPTSGQTRVIHCLFPSQETLQIVGLHPLNQAPKPVTPDTYMFLGPQWSKSLSPSSSSFSFIAGAPTKKMLLWTKSLQGTEQTARILMNKTIRRCHTHNWITVFSHREKSLALLRGPRHPQQIPACTNFQMLSPDPKLSSVHEHHSQALRGSSRETTALSQNRVASSHVPAAGI

SEQ ID NO: 44086 - protein, 301 aa, Homo sapiens
  Payload ID: 8986
  Gene Symbol: KIR2DS4
  Gene Name: killer cell immunoglobulin-like receptor, two domains, short cytoplasmic tail, 4
  Uniprot ID: P43632
  ENSP ID: ENSP00000481319
MVIIMACVGFFLLQGAWPQEGVHRKPSFLALPGHLVKSEETVILQCWSDVMFEHFLLHREGKFNNTLHLIGEHHDGVSKANFSIGPMMPVLAGTYRCYGSVPHSPYQLSAPSDPLDMVIIGLYEKPSLSAQPGPTVQAGENVTLSCSSRSSYDMYHLSREGEAHERRLPAVRSINGTFQADFPLGPATHGGTYRCFGSFRDAPYEWSNSSDPLLVSVTGNPSNSWPSPTEPSSKTGNPRHLHVLIGTSVVKIPFTILLFFLLHRWCSDKKNAAVMDQEPAGNRTVNSEDSDEQDHQEVSYA

SEQ ID NO: 44087 - protein, 294 aa, Homo sapiens; identical to SEQ ID NO: 44069
  Payload ID: 8986
  Gene Symbol: KIR2DS4
  Gene Name: killer cell immunoglobulin-like receptor, two domains, short cytoplasmic tail, 4
  ENSP ID: ENSP00000481428

SEQ ID NO: 44088 - protein, 304 aa, Homo sapiens; identical to SEQ ID NO: 44071
  Payload ID: 8986
  Gene Symbol: KIR2DS4
  Gene Name: killer cell immunoglobulin-like receptor, two domains, short cytoplasmic tail, 4
  Uniprot ID: P43632
  ENSP ID: ENSP00000481753

SEQ ID NO: 44089 - protein, 304 aa, Homo sapiens; identical to SEQ ID NO: 44071
  Payload ID: 8986
  Gene Symbol: KIR2DS4
  Gene Name: killer cell immunoglobulin-like receptor, two domains, short cytoplasmic tail, 4
  Uniprot ID: P43632
  ENSP ID: ENSP00000483112

SEQ ID NO: 44090 - protein, 304 aa, Homo sapiens; identical to SEQ ID NO: 44071
  Payload ID: 8986
  Gene Symbol: KIR2DS4
  Gene Name: killer cell immunoglobulin-like receptor, two domains, short cytoplasmic tail, 4
  Uniprot ID: P43632
  ENSP ID: ENSP00000483274

SEQ ID NO: 44091 - protein, 222 aa, Homo sapiens
  Payload ID: 8986
  Gene Symbol: KIR2DS4
  Gene Name: killer cell immunoglobulin-like receptor, two domains, short cytoplasmic tail, 4
  ENSP ID: ENSP00000483571
MSLMVIIMACVGFFLLQGAWPQEGVHRKPSFLALPGHLVKSEETVILQCWSDVMFEHFLLHREGKFNNTLHLIGEHHDGVSKANFSIGPMMPVLAGTYRCYSSVPHSPYQLSAPSDPLDMVIIGLYEKPSLSAQPGPTVQAGENVSLSCSSIYPGRGRPMNVGSLQCAASTEHSRPTFLWALPPTEGPTDASALSVTLPTSGQTRVIHCLFPSQVTPDTYMF

SEQ ID NO: 44092 - protein, 294 aa, Homo sapiens; identical to SEQ ID NO: 44069
  Payload ID: 8986
  Gene Symbol: KIR2DS4
  Gene Name: killer cell immunoglobulin-like receptor, two domains, short cytoplasmic tail, 4
  ENSP ID: ENSP00000483620

SEQ ID NO: 44093 - protein, 304 aa, Homo sapiens; identical to SEQ ID NO: 44071
  Payload ID: 8986
  Gene Symbol: KIR2DS4
  Gene Name: killer cell immunoglobulin-like receptor, two domains, short cytoplasmic tail, 4
  Uniprot ID: P43632
  ENSP ID: ENSP00000484123

SEQ ID NO: 44094 - protein, 304 aa, Homo sapiens
  Payload ID: 8987
  Gene Symbol: KIR2DS5
  Gene Name: killer cell immunoglobulin-like receptor, two domains, short cytoplasmic tail, 5
  ENSP ID: ENSP00000477721
MSLMVISMACVAFFLLQGAWPHEGFRRKPSLLAHPGPLVKSEETVILQCWSDVMFEHFLLHREGTFNHTLRLIGEHIDGVSKGNFSIGRMTQDLAGTYRCYGSVTHSPYQLSAPSDPLDIVITGLYEKPSLSAQPGPTVLAGESVTLSCSSRSSYDMYHLSREGEAHERRLPAGPKVNGTFQADFPLDPATHGGTYRCFGSFRDSPYEWSKSSDPLLVSVTGNSSNSWPSPTEPSSKTGNPRHLHVLIGTSVVKLPFTILLFFLLHRWCSNKKNASVMDQGPAGNRTVNREDSDEQDHQEVSYA

SEQ ID NO: 44095 - protein, 304 aa, Homo sapiens
  Payload ID: 8987
  Gene Symbol: KIR2DS5
  Gene Name: killer cell immunoglobulin-like receptor, two domains, short cytoplasmic tail, 5
  ENSP ID: ENSP00000481293
MSLMVISMACVAFFLLQGAWPHEGFRRKPSLLAHPGPLVKSEETVILQCWSDVMFEHFLLHREGTFNHTLRLIGEHIDGVSKGNFSIGRMTQDLAGTYRCYGSVTHSPYQLSAPSDPLDIVITGLYEKPSLSAQPGPTVLAGESVTLFCSSRSSYDMYHLSREGEAHERRLPAGPKVNGTFQADFPLDPATHGGTYRCFGSFHDSPYEWSKSSDPLLVSVTGNSSNSWPSPTEPSSETGNPRHLHVLIGTSVVKLPFTILLFFLLHRWCSNKKNASVMDQGPAGNRTVNREDSDEQDHQEVSYA

SEQ ID NO: 44096 - protein, 304 aa, Homo sapiens
  Payload ID: 8987
  Gene Symbol: KIR2DS5
  Gene Name: killer cell immunoglobulin-like receptor, two domains, short cytoplasmic tail, 5
  ENSP ID: ENSP00000482547
MSLMVISMACVAFFLLQGAWPHEGFRRKPSLLAHPGPLVKSEETVILQCWSDVMFEHFLLHREGTFNHTLRLIGEHIDGVSKGNFSIGRMTQDLAGTYRCYGSVTHSPYQLSAPSDPLDIVITGLYEKPSLSAQPGPTVLAGESVTLSCSSRSSYDMYHLSREGEAHERRLPAGPKVNRTFQADFPLDPATHGGTYRCFGSFRDSPYEWSKSSDPLLVSVTGNSSNSWPSPTEPSSETGNPRHLHVLIGTSVVKLPFTILLFFLLHRWCSNKKNASVMDQGPAGNRTVNREDSDEQDHQEVSYA

SEQ ID NO: 44097 - protein, 304 aa, Homo sapiens; identical to SEQ ID NO: 44096
  Payload ID: 8987
  Gene Symbol: KIR2DS5
  Gene Name: killer cell immunoglobulin-like receptor, two domains, short cytoplasmic tail, 5
  ENSP ID: ENSP00000483733

SEQ ID NO: 44098 - protein, 349 aa, Homo sapiens
  Payload ID: 8987
  Gene Symbol: KIR2DS5
  Gene Name: killer cell immunoglobulin-like receptor, two domains, short cytoplasmic tail, 5
  ENSP ID: ENSP00000483901
MSLMVVSMACVGFFLLQGAWTHEGFRRKPSLLAHPGPLVKSEETVILQCWSDVMFEHFLLHREGTFNHTLRLIGEHIDGVSKGNFSIGRMTQDLAGTYRCYGSVTHSPYQLSAPSDPLDIVITGLYEKPSLSAQPGPTVLAGESVTLSCSSRSSYDMYHLSREGEAHERRLPAGPKVNGTFQADFPLDPATHGGTYRCFGSFRDSPYEWSKSSDPLLVSVTGNPSNSWPSPTEPSSKTGNPRHLHVLIGTSVVIILFILLLFFLLHRWCSNKKNAAVMDQEPAGNRTANSEDSDEQDPQEVTYVQLDHCVFTQRKITRPSQRPKTPPTDTRVYTELPNAESRSNVVSCP

SEQ ID NO: 44099 - protein, 304 aa, Homo sapiens; identical to SEQ ID NO: 44096
  Payload ID: 8987
  Gene Symbol: KIR2DS5
  Gene Name: killer cell immunoglobulin-like receptor, two domains, short cytoplasmic tail, 5
  ENSP ID: ENSP00000484843

SEQ ID NO: 44100 - protein, 225 aa, Homo sapiens
  Payload ID: 8988
  Gene Symbol: KLRB1
  Gene Name: killer cell lectin-like receptor subfamily B, member 1
  Uniprot ID: Q12918
  ENSP ID: ENSP00000229402
MDQQAIYAELNLPTDSGPESSSPSSLPRDVCQGSPWHQFALKLSCAGIILLVLVVTGLSVSVTSLIQKSSIEKCSVDIQQSRNKTTERPGLLNCPIYWQQLREKCLLFSHTVNPWNNSLADCSTKESSLLLIRDKDELIHTQNLIRDKAILFWIGLNFSLSEKNWKWINGSFLNSNDLEIRGDAKENSCISISQTSVYSEYCSTEIRWICQKELTPVRNKVYPDS

SEQ ID NO: 44101 - protein, 215 aa, Homo sapiens
  Payload ID: 8989
  Gene Symbol: KLRC1
  Gene Name: killer cell lectin-like receptor subfamily C, member 1
  Uniprot ID: P26715
  ENSP ID: ENSP00000256965
MDNQGVIYSDLNLPPNPKRQQRKPKGNKNSILATEQEITYAELNLQKASQDFQGNDKTYHCKDLPSAPEKLIVGILGIICLILMASVVTIVVIPSRHCGHCPEEWITYSNSCYYIGKERRTWEESLLACTSKNSSLLSIDNEEEMKFLSIISPSSWIGVFRNSSHHPWVTMNGLAFKHEIKDSDNAELNCAVLQVNRLKSAQCGSSIIYHCKHKL

SEQ ID NO: 44102 - protein, 233 aa, Homo sapiens
  Payload ID: 8989
  Gene Symbol: KLRC1
  Gene Name: killer cell lectin-like receptor subfamily C, member 1
  Uniprot ID: P26715
  ENSP ID: ENSP00000352064
MDNQGVIYSDLNLPPNPKRQQRKPKGNKNSILATEQEITYAELNLQKASQDFQGNDKTYHCKDLPSAPEKLIVGILGIICLILMASVVTIVVIPSTLIQRHNNSSLNTRTQKARHCGHCPEEWITYSNSCYYIGKERRTWEESLLACTSKNSSLLSIDNEEEMKFLSIISPSSWIGVFRNSSHHPWVTMNGLAFKHEIKDSDNAELNCAVLQVNRLKSAQCGSSIIYHCKHKL

SEQ ID NO: 44103 - protein, 215 aa, Homo sapiens; identical to SEQ ID NO: 44101
  Payload ID: 8989
  Gene Symbol: KLRC1
  Gene Name: killer cell lectin-like receptor subfamily C, member 1
  Uniprot ID: P26715
  ENSP ID: ENSP00000385304

SEQ ID NO: 44104 - protein, 233 aa, Homo sapiens; identical to SEQ ID NO: 44102
  Payload ID: 8989
  Gene Symbol: KLRC1
  Gene Name: killer cell lectin-like receptor subfamily C, member 1
  Uniprot ID: P26715
  ENSP ID: ENSP00000438038

SEQ ID NO: 44105 - protein, 228 aa, Homo sapiens
  Payload ID: 8989
  Gene Symbol: KLRC1
  Gene Name: killer cell lectin-like receptor subfamily C, member 1
  ENSP ID: ENSP00000441432
MDNQGVIYSDLNLPPNPKRQQRKPKGNKNSILATEQEITYAELNLQKASQDFQGNDKTYHCKDLPSAPEKLIVGILGIICLILMASVVTIVVIPSTLIQRHNNSSLNTRTQKARHCGHCPEEWITYSNSCYYIGKERRTWEESLLACTSKNSSLLSIDNEEEMKFLSIISPSSWIGVFRNSSHHPWVTMNGLAFKHEIKDSDNAELNCAVLQVNRLKSAQCGSSIIYH

SEQ ID NO: 44106 - protein, 77 aa, Homo sapiens
  Payload ID: 8989
  Gene Symbol: KLRC1
  Gene Name: killer cell lectin-like receptor subfamily C, member 1
  ENSP ID: ENSP00000442545
  MOD_RES (1)..(1): Any amino acid
XEWITYSNSCYYIGKERRTWEESLLACTSKNSSLLSIDNEEEMKFLSIISPSSWIGVFRNSSHHPWVTMNGLAFKHE

SEQ ID NO: 44107 - protein, 231 aa, Homo sapiens
  Payload ID: 8990
  Gene Symbol: KLRC2
  Gene Name: killer cell lectin-like receptor subfamily C, member 2
  ENSP ID: ENSP00000371326
MNKQRGTFSEVSLAQDPKRQQRKPKGNKSSISGTEQEIFQVELNLQNPSLNHQGIDKIYDCQGLLPPPEKLTAEVLGIICIVLMATVLKTIVLIPFLEQNNSSPNTRTQKTRHCGHCPEEWITYSNSCYYIGKERRTWEESLLACTSKNSSLLSIDNEEEMKFLASILPSSWIGVFRNSSHHPWVTINGLAFKHKIKDSDNAELNCAVLQVNRLKSAQCGSSMIYHCKHKL

SEQ ID NO: 44108 - protein, 231 aa, Homo sapiens
  Payload ID: 8990
  Gene Symbol: KLRC2
  Gene Name: killer cell lectin-like receptor subfamily C, member 2
  Uniprot ID: P26717
  ENSP ID: ENSP00000371327
MNKQRGTFSEVSLAQDPKRQQRKPKGNKSSISGTEQEIFQVELNLQNPSLNHQGIDKIYDCQGLLPPPEKLTAEVLGIICIVLMATVLKTIVLIPFLEQNNFSPNTRTQKARHCGHCPEEWITYSNSCYYIGKERRTWEESLLACTSKNSSLLSIDNEEEMKFLASILPSSWIGVFRNSSHHPWVTINGLAFKHKIKDSDNAELNCAVLQVNRLKSAQCGSSMIYHCKHKL

SEQ ID NO: 44109 - protein, 103 aa, Homo sapiens
  Payload ID: 8990
  Gene Symbol: KLRC2
  Gene Name: killer cell lectin-like receptor subfamily C, member 2
  ENSP ID: ENSP00000438983
KSSISGTEQEIFQVELNLQNPSLNHQGIDKIYDCQGLLPPPEKLTAEVLGIICIVLMATVLKTIVLIPFLEQNNFSPNTRTQKEELGKRVCWPVLRRTPVCFL

SEQ ID NO: 44110 - protein, 172 aa, Homo sapiens
  Payload ID: 8990
  Gene Symbol: KLRC2
  Gene Name: killer cell lectin-like receptor subfamily C, member 2
  ENSP ID: ENSP00000444754
MTVGLLPPPEKLTAEVLGIICIVLMATVLKTIVLIPFLEQNNFSPNTRTQKARHCGHCPEEWITYSNSCYYIGKERRTWEESLLACTSKNSSLLSIDNEEEMKFLASILPSSWIGVFRNSSHHPWVTINGLAFKHKIKDSDNAELNCAVLQVNRLKSAQCGSSMIYHCKHKL

SEQ ID NO: 44111 - protein, 85 aa, Homo sapiens
  Payload ID: 8990
  Gene Symbol: KLRC2
  Gene Name: killer cell lectin-like receptor subfamily C, member 2
  ENSP ID: ENSP00000445240
  MOD_RES (1)..(1): Any amino acid
XYSNSCYYIGKERRTWEESLLACTSKNSSLLSIDNEEEMKFLASILPSSWIGVFRNSSHHPWVTINGLAFKHNTWKMLSSHESFA

SEQ ID NO: 44112 - protein, 124 aa, Homo sapiens
  Payload ID: 8990
  Gene Symbol: KLRC2
  Gene Name: killer cell lectin-like receptor subfamily C, member 2
  ENSP ID: ENSP00000479152
MIPTRHCGHCPEEWITYSNSCYYIGKERRTWEESLLACTSKNSSLLSIDNEEEMKFLASILPSSWIGVFRNSSHHPWVTINGLAFKHKIKDSDNAELNCAVLQVNRLKSAQCGSSMIYHCKHKL

SEQ ID NO: 44113 - protein, 257 aa, Homo sapiens
  Payload ID: 8991
  Gene Symbol: KLRC3
  Gene Name: killer cell lectin-like receptor subfamily C, member 3
  Uniprot ID: Q07444
  ENSP ID: ENSP00000371328
MSKQRGTFSEVSLAQDPKWQQRKPKGNKSSISGTEQEIFQVELNLQNASLNHQGIDKIYDCQGLLPPPEKLTAEVLGIICIVLMATVLKTIVLIPFLEQNNSSPNARTQKARHCGHCPEEWITYSNSCYYIGKERRTWEESLQACASKNSSSLLCIDNEEEMKFLASILPSSWIGVFRNSSHHPWVTINGLAFKHEIKDSDHAERNCAMLHVRGLISDQCGSSRIIVSISFRIKALELAVHQIKFYICSNRNDIMIA

SEQ ID NO: 44114 - protein, 240 aa, Homo sapiens
  Payload ID: 8991
  Gene Symbol: KLRC3
  Gene Name: killer cell lectin-like receptor subfamily C, member 3
  Uniprot ID: Q07444
  ENSP ID: ENSP00000379716
MSKQRGTFSEVSLAQDPKWQQRKPKGNKSSISGTEQEIFQVELNLQNASLNHQGIDKIYDCQGLLPPPEKLTAEVLGIICIVLMATVLKTIVLIPFLEQNNSSPNARTQKARHCGHCPEEWITYSNSCYYIGKERRTWEESLQACASKNSSSLLCIDNEEEMKFLASILPSSWIGVFRNSSHHPWVTINGLAFKHEIKDSDHAERNCAMLHVRGLISDQCGSSRIIRRGFIMLTRLVLNS

SEQ ID NO: 44115 - protein, 158 aa, Homo sapiens
  Payload ID: 8992
  Gene Symbol: KLRC4
  Gene Name: killer cell lectin-like receptor subfamily C, member 4
  Uniprot ID: O43908
  ENSP ID: ENSP00000310216
MNKQRGTYSEVSLAQDPKRQQRKLKGNKISISGTKQEIFQVELNLQNASSDHQGNDKTYHCKGLLPPPEKLTAEVLGIICIVLMATVLKTIVLIPCIGVLEQNNFSLNRRMQKARHCGHCPEEWITYSNSCYYIGKERRTWEERVCWPVLRRTLICFL

SEQ ID NO: 44116 - protein, 148 aa, Homo sapiens
  Payload ID: 8993
  Gene Symbol: KLRD1
  Gene Name: killer cell lectin-like receptor subfamily D, member 1
  Uniprot ID: Q13241
  ENSP ID: ENSP00000310929
MAAFTKLSIEPAFTPGPNIELQKDSDCCSCQEKWVGYRCNCYFISSEQKTWNESRHLCASQKSSLLQLQNTDELDFMSSSQQFYWIGLSYSEEHTAWLWENGSALSQYLFPSFETFNTKNCIAYNPNGNALDESCEDKNRYICKQQLI

SEQ ID NO: 44117 - protein, 179 aa, Homo sapiens
  Payload ID: 8993
  Gene Symbol: KLRD1
  Gene Name: killer cell lectin-like receptor subfamily D, member 1
  Uniprot ID: Q13241
  ENSP ID: ENSP00000338130
MAVFKTTLWRLISGTLGIICLSLMSTLGILLKNSFTKLSIEPAFTPGPNIELQKDSDCCSCQEKWVGYRCNCYFISSEQKTWNESRHLCASQKSSLLQLQNTDELDFMSSSQQFYWIGLSYSEEHTAWLWENGSALSQYLFPSFETFNTKNCIAYNPNGNALDESCEDKNRYICKQQLI

SEQ ID NO: 44118 - protein, 72 aa, Homo sapiens
  Payload ID: 8993
  Gene Symbol: KLRD1
  Gene Name: killer cell lectin-like receptor subfamily D, member 1
  ENSP ID: ENSP00000344858
MAVFKTTLWRLISGTLGIICLSLMSTLGILLKNSFTKLSIEPAFTPGPNIELQKAGFYELQSTILLDWTLLQ

SEQ ID NO: 44119 - protein, 179 aa, Homo sapiens; identical to SEQ ID NO: 44117
  Payload ID: 8993
  Gene Symbol: KLRD1
  Gene Name: killer cell lectin-like receptor subfamily D, member 1
  Uniprot ID: Q13241
  ENSP ID: ENSP00000371333

SEQ ID NO: 44120 - protein, 51 aa, Homo sapiens
  Payload ID: 8993
  Gene Symbol: KLRD1
  Gene Name: killer cell lectin-like receptor subfamily D, member 1
  ENSP ID: ENSP00000437880
SALSQYLFPSFETFNTKNCIAYNPNGNALDESCEDKNRYIYKVLLCCPGWS

SEQ ID NO: 44121 - protein, 106 aa, Homo sapiens
  Payload ID: 8993
  Gene Symbol: KLRD1
  Gene Name: killer cell lectin-like receptor subfamily D, member 1
  ENSP ID: ENSP00000438514
MAVFKTTLWRLISGTLGIICLSLMSTLGILLKNSFTKLSIEPAFTPGPNIELQKDSDCCSCQEKWVGYRCNCYFISSEQKTWNESRHLCASQKSSLLQLQNTDELA

SEQ ID NO: 44122 - protein, 139 aa, Homo sapiens
  Payload ID: 8993
  Gene Symbol: KLRD1
  Gene Name: killer cell lectin-like receptor subfamily D, member 1
  ENSP ID: ENSP00000438669
MAAFTKLSIEPAFTPGPNIELQKDSDCCSCQEKWVGYRCNCYFISSEQKTWNESRHLCASQKSSLLQLQNTDELDFMSSSQQFYWIGLSYSEEHTAWLWENGSALSQYLFPSFETFNTKNCIAYNPNGNALDESCEDKN

SEQ ID NO: 44123 - protein, 106 aa, Homo sapiens; identical to SEQ ID NO: 44121
  Payload ID: 8993
  Gene Symbol: KLRD1
  Gene Name: killer cell lectin-like receptor subfamily D, member 1
  ENSP ID: ENSP00000441074

SEQ ID NO: 44124 - protein, 158 aa, Homo sapiens
  Payload ID: 8993
  Gene Symbol: KLRD1
  Gene Name: killer cell lectin-like receptor subfamily D, member 1
  ENSP ID: ENSP00000443584
MAVFKTTLWRLISGTLGIICLSLMSTLGILLKNYSDCCSCQEKWVGYRCNCYFISSEQKTWNESRHLCASQKSSLLQLQNTDELDFMSSSQQFYWIGLSYSEEHTAWLWENGSALSQYLFPSFETFNTKNCIAYNPNGNALDESCEDKNRYICKQQLI

SEQ ID NO: 44125 - protein, 181 aa, Homo sapiens
  Payload ID: 8994
  Gene Symbol: KLRF1
  Gene Name: killer cell lectin-like receptor subfamily F, member 1
  ENSP ID: ENSP00000279545
MQDEERYMTLNVQSKKRSSAQTSQLTFKDYSVTLHWYKILLGISGTVNGILTLTLISLILLVLCQSEWLKYQGKCYWFSNEMKSWSDSYVYCLERKSHLLIIHDQLEMAFIQKNLRQLNYVWIGLNFTSLKMTWTWVDGSPIDSKIFFIKGPAKENSCAAIKESKIFSETCSSVFKWICQY

SEQ ID NO: 44126 - protein, 64 aa, Homo sapiens
  Payload ID: 8994
  Gene Symbol: KLRF1
  Gene Name: killer cell lectin-like receptor subfamily F, member 1
  Uniprot ID: Q9NZS2
  ENSP ID: ENSP00000346919
MQDEERYMTLNVQSKKRSSAQTSQLTFKDYSVTLHWYKILLGISGTVNGILTLTLISLILLDSS

SEQ ID NO: 44127 - protein, 114 aa, Homo sapiens
  Payload ID: 8994
  Gene Symbol: KLRF1
  Gene Name: killer cell lectin-like receptor subfamily F, member 1
  ENSP ID: ENSP00000443054
MQDEERYMTLNVQSKKRSSAQTSQLTFKDYSVTLHWYKILLGISGTVNGILTLTLISLILLVSQGVLLKCQKGSCSNATQYEDTGDLKVNNGTRRNISNKDLCASRSADQTDSS

SEQ ID NO: 44128 - protein, 124 aa, Homo sapiens
  Payload ID: 8994
  Gene Symbol: KLRF1
  Gene Name: killer cell lectin-like receptor subfamily F, member 1
  ENSP ID: ENSP00000445022
MQDEERYMTLNVQSKKRSSAQTSQLTFKDYSVTLHWYKILLGISGTVNGILTLTLISLILLVSQGVLLKCQKGSCSNATQYEDTGDLKVNNGTRRNISNKDLCASRSADQTVPRPHFRLLYRKT

SEQ ID NO: 44129 - protein, 231 aa, Homo sapiens
  Payload ID: 8994
  Gene Symbol: KLRF1
  Gene Name: killer cell lectin-like receptor subfamily F, member 1
  ENSP ID: ENSP00000483713
MQDEERYMTLNVQSKKRSSAQTSQLTFKDYSVTLHWYKILLGISGTVNGILTLTLISLILLVSQGVLLKCQKGSCSNATQYEDTGDLKVNNGTRRNISNKDLCASRSADQTVLCQSEWLKYQGKCYWFSNEMKSWSDSYVYCLERKSHLLIIHDQLEMAFIQKNLRQLNYVWIGLNFTSLKMTWTWVDGSPIDSKIFFIKGPAKENSCAAIKESKIFSETCSSVFKWICQY

SEQ ID NO: 44130 - protein, 78 aa, Homo sapiens
  Payload ID: 8994
  Gene Symbol: KLRF1
  Gene Name: killer cell lectin-like receptor subfamily F, member 1
  Uniprot ID: Q9NZS2
  ENSP ID: ENSP00000483880
MQDEERYMTLNVQSKKRSSAQTSQLTFKDYSVTLHWYKILLGISGTVNGILTLTLISLILLGFYTEKPKTIKLRMDWA

SEQ ID NO: 44131 - protein, 128 aa, Homo sapiens
  Payload ID: 8994
  Gene Symbol: KLRF1
  Gene Name: killer cell lectin-like receptor subfamily F, member 1
  ENSP ID: ENSP00000484826
MQDEERYMTLNVQSKKRSSAQTSQLTFKDYSVTLHWYKILLGISGTVNGILTLTLISLILLVSQGVLLKCQKGSCSNATQYEDTGDLKVNNGTRRNISNKDLCASRSADQTGFYTEKPKTIKLRMDWA

SEQ ID NO: 44132 - protein, 207 aa, Homo sapiens
  Payload ID: 8995
  Gene Symbol: KLRF2
  Gene Name: killer cell lectin-like receptor subfamily F, member 2
  Uniprot ID: D3W0D1
  ENSP ID: ENSP00000438244
MENEDGYMTLSFKNRCKSKQKSKDFSLYPQYYCLLLIFGCIVILIFIMTGIDLKFWHKKMDFSQNVNVSSLSGHNYLCPNDWLLNEGKCYWFSTSFKTWKESQRDCTQLQAHLLVIQNLDELEFIQNSLKPGHFGWIGLYVTFQGNLWMWIDEHFLVPELFSVIGPTDDRSCAVITGNWVYSEDCSSTFKGICQRDAILTHNGTSGV

SEQ ID NO: 44133 - protein, 195 aa, Homo sapiens
  Payload ID: 8996
  Gene Symbol: KLRG1
  Gene Name: killer cell lectin-like receptor subfamily G, member 1
  Uniprot ID: Q96E93
  ENSP ID: ENSP00000266551
MTDSVIYSMLELPTATQAQNDYGPQQKSSSSRPSCSCLVAIALGLLTAVLLSVLLYQWILCQGSNYSTCASCPSCPDRWMKYGNHCYYFSVEEKDWNSSLEFCLARDSHLLVITDNQEMSLLQVFLSEAFCWIGLRNNSGWRWEDGSPLNFSRISSNSFVQTCGAINKNGLQASSCEVPLHWVCKKCPFADQALF

SEQ ID NO: 44134 - protein, 189 aa, Homo sapiens
  Payload ID: 8996
  Gene Symbol: KLRG1
  Gene Name: killer cell lectin-like receptor subfamily G, member 1
  Uniprot ID: Q96E93
  ENSP ID: ENSP00000349477
MTDSVIYSMLELPTATQAQNDYGPQQKSSSSRPSCSCLVAIALGLLTAVLLSVLLYQWILCQGSNYSTCASCPSCPDRWMKYGNHCYYFSVEEKDWNSSLEFCLARDSHLLVITDNQEMSLLQVFLSEAFCWIGLRNNSGWRWEDGSPLNFSRISSNSFVQTCGAINKNGLQASSCEVPLHWVCKKVRL

SEQ ID NO: 44135 - protein, 80 aa, Homo sapiens
  Payload ID: 8996
  Gene Symbol: KLRG1
  Gene Name: killer cell lectin-like receptor subfamily G, member 1
  ENSP ID: ENSP00000443658
MKYGNHCYYFSVEEKDWNSSLEFCLARDSHLLVITDNQEMSLLQVFLSEAFCWIGLRNNSGWRWEDGSPLNFSRISSNSF

SEQ ID NO: 44136 - protein, 81 aa, Homo sapiens
  Payload ID: 8996
  Gene Symbol: KLRG1
  Gene Name: killer cell lectin-like receptor subfamily G, member 1
  ENSP ID: ENSP00000445627
MKYGNHCYYFSVEEKDWNSSLEFCLARDSHLLVITDNQEMSLLQVFLSEAFCWIGLRNNSGWRWEDGSPLNFSRISSNSFV

SEQ ID NO: 44137 - protein, 409 aa, Homo sapiens
  Payload ID: 8997
  Gene Symbol: KLRG2
  Gene Name: killer cell lectin-like receptor subfamily G, member 2
  Uniprot ID: A4D1S0
  ENSP ID: ENSP00000339356
MEESWEAAPGGQAGAELPMEPVGSLVPTLEQPQVPAKVRQPEGPESSPSPAGAVEKAAGAGLEPSSKKKPPSPRPGSPRVPPLSLGYGVCPEPPSPGPALVKLPRNGEAPGAEPAPSAWAPMELQVDVRVKPVGAAGGSSTPSPRPSTRFLKVPVPESPAFSRHADPAHQLLLRAPSQGGTWGRRSPLAAARTESGCDAEGRASPAEGSAGSPGSPTCCRCKELGLEKEDAALLPRAGLDGDEKLPRAVTLTGLPMYVKSLYWALAFMAVLLAVSGVVIVVLASRAGARCQQCPPGWVLSEEHCYYFSAEAQAWEASQAFCSAYHATLPLLSHTQDFLGRYPVSRHSWVGAWRGPQGWHWIDEAPLPPQLLPEDGEDNLDINCGALEEGTLVAANCSTPRPWVCAKGTQ

SEQ ID NO: 44138 - protein, 314 aa, Homo sapiens
  Payload ID: 8997
  Gene Symbol: KLRG2
  Gene Name: killer cell lectin-like receptor subfamily G, member 2
  Uniprot ID: A4D1S0
  ENSP ID: ENSP00000376759
MEESWEAAPGGQAGAELPMEPVGSLVPTLEQPQVPAKVRQPEGPESSPSPAGAVEKAAGAGLEPSSKKKPPSPRPGSPRVPPLSLGYGVCPEPPSPGPALVKLPRNGEAPGAEPAPSAWAPMELQVDVRVKPVGAAGGSSTPSPRPSTRFLKVPVPESPAFSRHADPAHQLLLRAPSQGGTWGRRSPLAAARTESGCDAEGRASPAEGSAGSPGSPTCCRCKELGLEKEDAALLPRAGLDGDEKLPRAVTLTDSLRTARTIWISTVGPWRKARWWLQTAALQDPGSVPRGPSDLGSAWSSACQADAAPPTGEAS

SEQ ID NO: 44139 - protein, 216 aa, Homo sapiens
  Payload ID: 8998
  Gene Symbol: KLRK1
  Gene Name: killer cell lectin-like receptor subfamily K, member 1
  Uniprot ID: P26718
  ENSP ID: ENSP00000240618
MGWIRGRRSRHSWEMSEFHNYNLDLKKSDFSTRWQKQRCPVVKSKCRENASPFFFCCFIAVAMGIRFIIMVTIWSAVFLNSLFNQEVQIPLTESYCGPCPKNWICYKNNCYQFFDESKNWYESQASCMSQNASLLKVYSKEDQDLLKLVKSYHWMGLVHIPTNGSWQWEDGSILSPNLLTIIEMQKGDCALYASSFKGYIENCSTPNTYICMQRTV

SEQ ID NO: 44140 - protein, 80 aa, Homo sapiens
  Payload ID: 8998
  Gene Symbol: KLRK1
  Gene Name: killer cell lectin-like receptor subfamily K, member 1
  ENSP ID: ENSP00000379726
MGWIRGRRSRHSWEMSEFHNYNLDLKKSDFSTRWQKQRCPVVKSKCRENASPFFFCCFIAVAMGIRFIIMVTIWSAVFLN

SEQ ID NO: 44141 - protein, 216 aa, Homo sapiens; identical to SEQ ID NO: 44139
  Payload ID: 8998
  Gene Symbol: KLRK1
  Gene Name: killer cell lectin-like receptor subfamily K, member 1
  Uniprot ID: P26718
  ENSP ID: ENSP00000446003

SEQ ID NO: 44142 - protein, 178 aa, Homo sapiens
  Payload ID: 8999
  Gene Symbol: KLLN
  Gene Name: killin, p53-regulated DNA replication inhibitor
  Uniprot ID: B2CW77
  ENSP ID: ENSP00000392204
MDRPGPGSARPGRTVHVWGYRVEWKVRNGRKLQPSEWAGRGDLGGFKRRWKDTRATVGTTFRRRSRVSLVGELSKFPLPSDSSGGKSSSSFARGALAWCRQRNPNPSCAAAETGARTSLPKERCRGWRLGNWLHKHPHPNTCPRLPACWLPPILTERGERVPKLVPLLACYPKSKPKD

SEQ ID NO: 44143 - protein, 178 aa, Homo sapiens; identical to SEQ ID NO: 44142
  Payload ID: 8999
  Gene Symbol: KLLN
  Gene Name: Killin, p53-regulated DNA replication inhibitor
  ENSP ID: ENSP00000489239

SEQ ID NO: 44144 - protein, 757 aa, Homo sapiens
  Payload ID: 9000
  Gene Symbol: KIRREL
  Gene Name: kin of IRRE like (Drosophila)
  Uniprot ID: Q96J84
  ENSP ID: ENSP00000352138
MLSLLVWILTLSDTFSQGTQTRFSQEPADQTVVAGQRAVLPCVLLNYSGIVQWTKDGLALGMGQGLKAWPRYRVVGSADAGQYNLEITDAELSDDASYECQATEAALRSRRAKLTVLIPPEDTRIDGGPVILLQAGTPHNLTCRAFNAKPAATIIWFRDGTQQEGAVASTELLKDGKRETTVSQLLINPTDLDIGRVFTCRSMNEAIPSGKETSIELDVHHPPTVTLSIEPQTVQEGERVVFTCQATANPEILGYRWAKGGFLIEDAHESRYETNVDYSFFTEPVSCEVHNKVGSTNVSTLVNVHFAPRIVVDPKPTTTDIGSDVTLTCVWVGNPPLTLTWTKKDSNMVLSNSNQLLLKSVTQADAGTYTCRAIVPRIGVAEREVPLYVNGPPIISSEAVQYAVRGDGGKVECFIGSTPPPDRIAWAWKENFLEVGTLERYTVERTNSGSGVLSTLTINNVMEADFQTHYNCTAWNSFGPGTAIIQLEEREVLPVGIIAGATIGASILLIFFFIALVFFLYRRRKGSRKDVTLRKLDIKVETVNREPLTMHSDREDDTASVSTATRVMKAIYSSFKDDVDLKQDLRCDTIDTREEYEMKDPTNGYYNVRAHEDRPSSRAVLYADYRAPGPARFDGRPSSRLSHSSGYAQLNTYSRGPASDYGPEPTPPGPAAPAGTDTTSQLSYENYEKFNSHPFPGAAGYPTYRLGYPQAPPSGLERTPYEAYDPIGKYATATRFSYTSQHSDYGQRFQQRMQTHV

SEQ ID NO: 44145 - protein, 593 aa, Homo sapiens
  Payload ID: 9000
  Gene Symbol: KIRREL
  Gene Name: kin of IRRE like (Drosophila)
  ENSP ID: ENSP00000353202
MGQGLKAWPRYRVVGSADAGQYNLEITDAELSDDASYECQATEAALRSRRAKLTVLNPPTVTLSIEPQTVQEGERVVFTCQATANPEILGYRWAKGGFLIEDAHESRYETNVDYSFFTEPVSCEVHNKVGSTNVSTLVNVHFAPRIVVDPKPTTTDIGSDVTLTCVWVGNPPLTLTWTKKDSNMVLSNSNQLLLKSVTQADAGTYTCRAIVPRIGVAEREVPLYVNGPPIISSEAVQYAVRGDGGKVECFIGSTPPPDRIAWAWKENFLEVGTLERYTVERTNSGSGVLSTLTINNVMEADFQTHYNCTAWNSFGPGTAIIQLEEREVLPVGIIAGATIGASILLIFFFIALVFFLYRRRKGSRKDVTLRKLDIKVETVNREPLTMHSDREDDTASVSTATRVMKAIYSSFKDDVDLKQDLRCDTIDTREEYEMKDPTNGYYNVRAHEDRPSSRAVLYADYRAPGPARFDGRPSSRLSHSSGYAQLNTYSRGPASDYGPEPTPPGPAAPAGTDTTSQLSYENYEKFNSHPFPGAAGYPTYRLGYPQAPPSGLERTPYEAYDPIGKYATATRFSYTSQHSDYGQRFQQRMQTHV

SEQ ID NO: 44146 - protein, 571 aa, Homo sapiens
  Payload ID: 9000
  Gene Symbol: KIRREL
  Gene Name: kin of IRRE like (Drosophila)
  ENSP ID: ENSP00000357154
MNEAIPSGKETSIELDVHHPPTVTLSIEPQTVQEGERVVFTCQATANPEILGYRWAKGGFLIEDAHESRYETNVDYSFFTEPVSCEVHNKVGSTNVSTLVNVHFAPRIVVDPKPTTTDIGSDVTLTCVWVGNPPLTLTWTKKDSNMGPRPPGSPPEAALSAQVLSNSNQLLLKSVTQADAGTYTCRAIVPRIGVAEREVPLYVNGPPIISSEAVQYAVRGDGGKVECFIGSTPPPDRIAWAWKENFLEVGTLERYTVERTNSGSGVLSTLTINNVMEADFQTHYNCTAWNSFGPGTAIIQLEEREVLPVGIIAGATIGASILLIFFFIALVFFLYRRRKGSRKDVTLRKLDIKVETVNREPLTMHSDREDDTASVSTATRVMKAIYSSFKDDVDLKQDLRCDTIDTREEYEMKDPTNGYYNVRAHEDRPSSRAVLYADYRAPGPARFDGRPSSRLSHSSGYAQLNTYSRGPASDYGPEPTPPGPAAPAGTDTTSQLSYENYEKFNSHPFPGAAGYPTYRLGYPQAPPSGLERTPYEAYDPIGKYATATRFSYTSQHSDYGQRFQQRMQTHV

SEQ ID NO: 44147 - protein, 657 aa, Homo sapiens
  Payload ID: 9000
  Gene Symbol: KIRREL
  Gene Name: kin of IRRE like (Drosophila)
  ENSP ID: ENSP00000357155
MLSLLVWILTLSDTFSQVPPEDTRIDGGPVILLQAGTPHNLTCRAFNAKPAATIIWFRDGTQQEGAVASTELLKDGKRETTVSQLLINPTDLDIGRVFTCRSMNEAIPSGKETSIELDVHHPPTVTLSIEPQTVQEGERVVFTCQATANPEILGYRWAKGGFLIEDAHESRYETNVDYSFFTEPVSCEVHNKVGSTNVSTLVNVHFAPRIVVDPKPTTTDIGSDVTLTCVWVGNPPLTLTWTKKDSNMVLSNSNQLLLKSVTQADAGTYTCRAIVPRIGVAEREVPLYVNGPPIISSEAVQYAVRGDGGKVECFIGSTPPPDRIAWAWKENFLEVGTLERYTVERTNSGSGVLSTLTINNVMEADFQTHYNCTAWNSFGPGTAIIQLEEREVLPVGIIAGATIGASILLIFFFIALVFFLYRRRKGSRKDVTLRKLDIKVETVNREPLTMHSDREDDTASVSTATRVMKAIYSSFKDDVDLKQDLRCDTIDTREEYEMKDPTNGYYNVRAHEDRPSSRAVLYADYRAPGPARFDGRPSSRLSHSSGYAQLNTYSRGPASDYGPEPTPPGPAAPAGTDTTSQLSYENYEKFNSHPFPGAAGYPTYRLGYPQAPPSGLERTPYEAYDPIGKYATATRFSYTSQHSDYGQRFQQRMQTHV

SEQ ID NO: 44148 - protein, 633 aa, Homo sapiens
  Payload ID: 9001
  Gene Symbol: KIRREL2
  Gene Name: kin of IRRE like 2 (Drosophila)
  ENSP ID: ENSP00000262625
MLRMRVPALLVLLFCFRGRAGPSPHFLQQPEDLVVLLGEEARLPCALGAYWGLVQWTKSGLALGGQRDLPGWSRYWISGNAANGQHDLHIRPVELEDEASYECQATQAGLRSRPAQLHVLVPPEAPQVLGGPSVSLVAGVPANLTCRSRGDARPTPELLWFRDGVLLDGATFHQTLLKEGTPGSVESTLTLTPFSHDDGATFVCRARSQALPTGRDTAITLSLQYPPEVTLSASPHTVQEGEKVIFLCQATAQPPVTGYRWAKGGSPVLGARGPRLEVVADASFLTEPVSCEVSNAVGSANRSTALDVLFGPILQAKPEPVSVDVGEDASFSCAWRGNPLPRVTWTRRGGAQVLGSGATLRLPSVGPEDAGDYVCRAEAGLSGLRGGAAEARLTVNAPPVVTALHSAPAFLRGPARLQCLVFASPAPDAVVWSWDEGFLEAGSQGRFLVETFPAPESRGGLGPGLISVLHISGTQESDFSRSFNCSARNRLGEGGAQASLGRRDLLPTVRIVAGVAAATTTLLMVITGVALCCWRHSKASASFSEQKNLMRIPGSSDGSSSRGPEEEETGSREDRGPIVHTDHSDLVLEEEGTLETKDPTNGYYKVRGVSPPASPDSRVTSFQWKSPGISNLP

SEQ ID NO: 44149 - protein, 583 aa, Homo sapiens
  Payload ID: 9001
  Gene Symbol: KIRREL2
  Gene Name: kin of IRRE like 2 (Drosophila)
  ENSP ID: ENSP00000345067
MLRMRVPALLVLLFCFRGRAGWSRYWISGNAANGQHDLHIRPVELEDEASYECQATQAGLRSRPAQLHVLVPPEAPQVLGGPSVSLVAGVPANLTCRSRGDARPTPELLWFRDGVLLDGATFHQTLLKEGTPGSVESTLTLTPFSHDDGATFVCRARSQALPTGRDTAITLSLQYPPEVTLSASPHTVQEGEKVIFLCQATAQPPVTGYRWAKGGSPVLGARGPRLEVVADASFLTEPVSCEVSNAVGSANRSTALDVLFGPILQAKPEPVSVDVGEDASFSCAWRGNPLPRVTWTRRGGAQVLGSGATLRLPSVGPEDAGDYVCRAEAGLSGLRGGAAEARLTVNAPPVVTALHSAPAFLRGPARLQCLVFASPAPDAVVWSWDEGFLEAGSQGRFLVETFPAPESRGGLGPGLISVLHISGTQESDFSRSFNCSARNRLGEGGAQASLGRRDLLPTVRIVAGVAAATTTLLMVITGVALCCWRHSKASASFSEQKNLMRIPGSSDGSSSRGPEEEETGSREDRGPIVHTDHSDLVLEEEGTLETKDPTNGYYKVRGVSPPASPDSRVTSFQWKSPGISNLP

SEQ ID NO: 44150 - protein, 708 aa, Homo sapiens
  Payload ID: 9001
  Gene Symbol: KIRREL2
  Gene Name: kin of IRRE like 2 (Drosophila)
  Uniprot ID: Q6UWL6
  ENSP ID: ENSP00000353331
MLRMRVPALLVLLFCFRGRAGPSPHFLQQPEDLVVLLGEEARLPCALGAYWGLVQWTKSGLALGGQRDLPGWSRYWISGNAANGQHDLHIRPVELEDEASYECQATQAGLRSRPAQLHVLVPPEAPQVLGGPSVSLVAGVPANLTCRSRGDARPTPELLWFRDGVLLDGATFHQTLLKEGTPGSVESTLTLTPFSHDDGATFVCRARSQALPTGRDTAITLSLQYPPEVTLSASPHTVQEGEKVIFLCQATAQPPVTGYRWAKGGSPVLGARGPRLEVVADASFLTEPVSCEVSNAVGSANRSTALDVLFGPILQAKPEPVSVDVGEDASFSCAWRGNPLPRVTWTRRGGAQVLGSGATLRLPSVGPEDAGDYVCRAEAGLSGLRGGAAEARLTVNAPPVVTALHSAPAFLRGPARLQCLVFASPAPDAVVWSWDEGFLEAGSQGRFLVETFPAPESRGGLGPGLISVLHISGTQESDFSRSFNCSARNRLGEGGAQASLGRRDLLPTVRIVAGVAAATTTLLMVITGVALCCWRHSKASASFSEQKNLMRIPGSSDGSSSRGPEEEETGSREDRGPIVHTDHSDLVLEEEGTLETKDPTNGYYKVRGVSVSLSLGEAPGGGLFLPPPSPLGPPGTPTFYDFNPHLGMVPPCRLYRARAGYLTTPHPRAFTSYIKPTSFGPPDLAPGTPPFPYAAFPTPSHPRLQTHV

SEQ ID NO: 44151 - protein, 673 aa, Homo sapiens
  Payload ID: 9001
  Gene Symbol: KIRREL2
  Gene Name: kin of IRRE like 2 (Drosophila)
  ENSP ID: ENSP00000465305
MLRMRVPALLVLLFCFRGRAGPSPHFLQQPEDLVVLLGEEARLPCALGAYWGLVQWTKSGLALGGQRDLPGWSRYWISGNAANGQHDLHIRPVELEDEASYECQATQAGLRSRPAQLHVLVPPEAPQVLGGPSVSLVAGVPANLTCRSRGDARPTPELLWFRDGVLLDGATFHQTLLKEGTPGSVESTLTLTPFSHDDGATFVCRARSQALPTGRDTAITLSLQYPPEVTLSASPHTVQEGEKVIFLCQATAQPPVTGYRWAKGGSPVLGARGPRLEVVADASFLTEPVSCEVSNAVGSANRSTALDVLFGPILQAKPEPVSVDVGEDASFSCAWRGNPLPRVTWTRRGGAQVLGSGATLRLPSVGPEDAGDYVCRAEAGLSGLRGGAAEARLTVNAPPVVTALHSAPAFLRGPARLQCLVFASPAPDAVVWSWDEGFLEAGSQGRFLVETFPAPESRGGLGPGLISVLHISGTQESDFSRSFNCSARNRLGEGGAQASLGRRASASFSEQKNLMRIPGSSDGSSSRGPEEEETGSREDRGPIVHTDHSDLVLEEEGTLETKDPTNGYYKVRGVSVSLSLGEAPGGGLFLPPPSPLGPPGTPTFYDFNPHLGMVPPCRLYRARAGYLTTPHPRAFTSYIKPTSFGPPDLAPGTPPFPYAAFPTPSHPRLQTHV

SEQ ID NO: 44152 - protein, 191 aa, Homo sapiens
  Payload ID: 9001
  Gene Symbol: KIRREL2
  Gene Name: kin of IRRE like 2 (Drosophila)
  ENSP ID: ENSP00000466460
MLRMRVPALLVLLFCFRGRAGPSPHFLQQPEDLVVLLGEEARLPCALGAYWGLVQWTKSGLALGGQRDLPGWSRYWISGNAANGQHDLHIRPVELEDEASYECQATQAGLRSRPAQLHVLVPPEAPQVLGGPSVSLVAGVPANLTCRSRGDARPTPELLWFRDGVLLDGATFHQTLLKEGTPGSVESTLTL

SEQ ID NO: 44153 - protein, 737 aa, Homo sapiens
  Payload ID: 9002
  Gene Symbol: KIRREL3
  Gene Name: kin of IRRE like 3 (Drosophila)
  ENSP ID: ENSP00000408692
MNEGQVYSFSQQPQDQVVVSGQPVTLLCAIPEYDGFVLWIKDGLALGVGRDLSSYPQYLVVGNHLSGEHHLKILRAELQDDAVYECQAIQAAIRSRPARLTVLVPPDDPVILGGPVISLRAGDPLNLTCHADNAKPAASIIWLRKGEVINGATYSKTLLRDGKRESIVSTLFISPGDVENGQSIVCRATNKAIPGGKETSVTIDIQHPPLVNLSVEPQPVLEDNVVTFHCSAKANPAVTQYRWAKRGQIIKEASGEVYRTTVDYTYFSEPVSCEVTNALGSTNLSRTVDVYFGPRMTTEPQSLLVDLGSDAIFSCAWTGNPSLTIVWMKRGSGVVLSNEKTLTLKSVRQEDAGKYVCRAVVPRVGAGEREVTLTVNGPPIISSTQTQHALHGEKGQIKCFIRSTPPPDRIAWSWKENVLESGTSGRYTVETISTEEGVISTLTISNIVRADFQTIYNCTAWNSFGSDTEIIRLKEQGSEMKSGAGLEAESVPMAVIIGVAVGAGVAFLVLMATIVAFCCARSQRNLKGVVSAKNDIRVEIVHKEPASGREGEEHSTIKQLMMDRGEFQQDSVLKQLEVLKEEEKEFQNLKDPTNGYYSVNTFKEHHSTPTISLSSCQPDLRPAGKQRVPTGMSFTNIYSTLSGQGRLYDYGQRFVLGMGSSSIELCEREFQRGSLSDSSSFLDTQCDSSVSSSGKQDGYVQFDKASKASASSSHHSQSSSQNSDPSRPLQRRMQTHV

SEQ ID NO: 44154 - protein, 766 aa, Homo sapiens
  Payload ID: 9002
  Gene Symbol: KIRREL3
  Gene Name: kin of IRRE like 3 (Drosophila)
  ENSP ID: ENSP00000434081
MKPFQLDLLFVCFFLFSQELGLQKRGCCLVLGYMAKDKFRRMNEGQVYSFSQQPQDQVVVSGQPVTLLCAIPEYDGFVLWIKDGLALGVGRDLSSYPQYLVVGNHLSGEHHLKILRAELQDDAVYECQAIQAAIRSRPARLTVLVPPDDPVILGGPVISLRAGDPLNLTCHADNAKPAASIIWLRKGEVINGATYSKTLLRDGKRESIVSTLFISPGDVENGQSIVCRATNKAIPGGKETSVTIDIQHPPLVNLSVEPQPVLEDNVVTFHCSAKANPAVTQYRWAKRGQIIKEASGEVYRTTVDYTYFSEPVSCEVTNALGSTNLSRTVDVYFGPRMTTEPQSLLVDLGSDAIFSCAWTGNPSLTIVWMKRGSGVVLSNEKTLTLKSVRQEDAGKYVCRAVVPRVGAGEREVTLTVNGPPIISSTQTQHALHGEKGQIKCFIRSTPPPDRIAWSWKENVLESGTSGRYTVETISTEEGVISTLTISNIVRADFQTIYNCTAWNSFGSDTEIIRLKEQESVPMAVIIGVAVGAGVAFLVLMATIVAFCCARSQRNLKGVVSAKNDIRVEIVHKEPASGREGEEHSTIKQLMMDRGEFQQDSVLKQLEVLKEEEKEFQNLKDPTNGYYSVNTFKEHHSTPTISLSSCQPDLRPAGKQRVPTGMSFTNIYSTLSGQGRLYDYGQRFVLGMGSSSIELCEREFQRGSLSDSSSFLDTQCDSSVSSSGKQDGYVQFDKASKASASSSHHSQSSSQNSDPSRPLQRRMQTHV

SEQ ID NO: 44155 - protein, 600 aa, Homo sapiens
  Payload ID: 9002
  Gene Symbol: KIRREL3
  Gene Name: kin of IRRE like 3 (Drosophila)
  Uniprot ID: Q8IZU9
  ENSP ID: ENSP00000435094
MKPFQLDLLFVCFFLFSQELGLQKRGCCLVLGYMAKDKFRRMNEGQVYSFSQQPQDQVVVSGQPVTLLCAIPEYDGFVLWIKDGLALGVGRDLSSYPQYLVVGNHLSGEHHLKILRAELQDDAVYECQAIQAAIRSRPARLTVLVPPDDPVILGGPVISLRAGDPLNLTCHADNAKPAASIIWLRKGEVINGATYSKTLLRDGKRESIVSTLFISPGDVENGQSIVCRATNKAIPGGKETSVTIDIQHPPLVNLSVEPQPVLEDNVVTFHCSAKANPAVTQYRWAKRGQIIKEASGEVYRTTVDYTYFSEPVSCEVTNALGSTNLSRTVDVYFGPRMTTEPQSLLVDLGSDAIFSCAWTGNPSLTIVWMKRGSGVVLSNEKTLTLKSVRQEDAGKYVCRAVVPRVGAGEREVTLTVNGPPIISSTQTQHALHGEKGQIKCFIRSTPPPDRIAWSWKENVLESGTSGRYTVETISTEEGVISTLTISNIVRADFQTIYNCTAWNSFGSDTEIIRLKEQGSEMKSGAGLEAESVPMAVIIGVAVGAGVAFLVLMATIVAFCCARSQRSTGGRSGISGRGTEKKARLRLPRRASKQECNEQGS

SEQ ID NO: 44156 - protein, 778 aa, Homo sapiens
  Payload ID: 9002
  Gene Symbol: KIRREL3
  Gene Name: kin of IRRE like 3 (Drosophila)
  Uniprot ID: Q8IZU9
  ENSP ID: ENSP00000435466
MKPFQLDLLFVCFFLFSQELGLQKRGCCLVLGYMAKDKFRRMNEGQVYSFSQQPQDQVVVSGQPVTLLCAIPEYDGFVLWIKDGLALGVGRDLSSYPQYLVVGNHLSGEHHLKILRAELQDDAVYECQAIQAAIRSRPARLTVLVPPDDPVILGGPVISLRAGDPLNLTCHADNAKPAASIIWLRKGEVINGATYSKTLLRDGKRESIVSTLFISPGDVENGQSIVCRATNKAIPGGKETSVTIDIQHPPLVNLSVEPQPVLEDNVVTFHCSAKANPAVTQYRWAKRGQIIKEASGEVYRTTVDYTYFSEPVSCEVTNALGSTNLSRTVDVYFGPRMTTEPQSLLVDLGSDAIFSCAWTGNPSLTIVWMKRGSGVVLSNEKTLTLKSVRQEDAGKYVCRAVVPRVGAGEREVTLTVNGPPIISSTQTQHALHGEKGQIKCFIRSTPPPDRIAWSWKENVLESGTSGRYTVETISTEEGVISTLTISNIVRADFQTIYNCTAWNSFGSDTEIIRLKEQGSEMKSGAGLEAESVPMAVIIGVAVGAGVAFLVLMATIVAFCCARSQRNLKGVVSAKNDIRVEIVHKEPASGREGEEHSTIKQLMMDRGEFQQDSVLKQLEVLKEEEKEFQNLKDPTNGYYSVNTFKEHHSTPTISLSSCQPDLRPAGKQRVPTGMSFTNIYSTLSGQGRLYDYGQRFVLGMGSSSIELCEREFQRGSLSDSSSFLDTQCDSSVSSSGKQDGYVQFDKASKASASSSHHSQSSSQNSDPSRPLQRRMQTHV

SEQ ID NO: 44157 - protein, 393 aa, Homo sapiens
  Payload ID: 9003
  Gene Symbol: KIN
  Gene Name: Kin17 DNA and RNA binding protein
  Uniprot ID: O60870
  ENSP ID: ENSP00000368881
MGKSDFLTPKAIANRIKSKGLQKLRWYCQMCQKQCRDENGFKCHCMSESHQRQLLLASENPQQFMDYFSEEFRNDFLELLRRRFGTKRVHNNIVYNEYISHREHIHMNATQWETLTDFTKWLGREGLCKVDETPKGWYIQYIDRDPETIRRQLELEKKKKQDLDDEEKTAKFIEEQVRRGLEGKEQEVPTFTELSRENDEEKVTFNLSKGACSSSGATSSKSSTLGPSALKTIGSSASVKRKESSQSSTQSKEKKKKKSALDEIMEIEEEKKRTARTDYWLQPEIIVKIITKKLGEKYHKKKAIVKEVIDKYTAVVKMIDSGDKLKLDQTHLETVIPAPGKRILVLNGGYRGNEGTLESINEKTFSATIVIETGPLKGRRVEGIQYEDISKLA

SEQ ID NO: 44158 - protein, 108 aa, Homo sapiens
  Payload ID: 9003
  Gene Symbol: KIN
  Gene Name: Kin17 DNA and RNA binding protein
  ENSP ID: ENSP00000473950
IEEEKKRTARTDYWLQPEIIVKIITKKLGEKYHKKKAIVKEVIDKYTAVVKMIDSGDKLKLDQTHLETVIPAPGKRILVLNGGYRGNEGTLESINEKTFSATIVIETV

SEQ ID NO: 44159 - protein, 1771 aa, Homo sapiens
  Payload ID: 9004
  Gene Symbol: KIDINS220
  Gene Name: kinase D-interacting substrate, 220kDa
  Uniprot ID: Q9ULH0
  ENSP ID: ENSP00000256707
MSVLISQSVINYVEEENIPALKALLEKCKDVDERNECGQTPLMIAAEQGNLEIVKELIKNGANCNLEDLDNWTALISASKEGHVHIVEELLKCGVNLEHRDMGGWTALMWACYKGRTDVVELLLSHGANPSVTGLYSVYPIIWAAGRGHADIVHLLLQNGAKVNCSDKYGTTPLVWAARKGHLECVKHLLAMGADVDQEGANSMTALIVAVKGGYTQSVKEILKRNPNVNLTDKDGNTALMIASKEGHTEIVQDLLDAGTYVNIPDRSGDTVLIGAVRGGHVEIVRALLQKYADIDIRGQDNKTALYWAVEKGNATMVRDILQCNPDTEICTKDGETPLIKATKMRNIEVVELLLDKGAKVSAVDKKGDTPLHIAIRGRSRKLAELLLRNPKDGRLLYRPNKAGETPYNIDCSHQKSILTQIFGARHLSPTETDGDMLGYDLYSSALADILSEPTMQPPICVGLYAQWGSGKSFLLKKLEDEMKTFAGQQIEPLFQFSWLIVFLTLLLCGGLGLLFAFTVHPNLGIAVSLSFLALLYIFFIVIYFGGRREGESWNWAWVLSTRLARHIGYLELLLKLMFVNPPELPEQTTKALPVRFLFTDYNRLSSVGGETSLAEMIATLSDACEREFGFLATRLFRVFKTEDTQGKKKWKKTCCLPSFVIFLFIIGCIISGITLLAIFRVDPKHLTVNAVLISIASVVGLAFVLNCRTWWQVLDSLLNSQRKRLHNAASKLHKLKSEGFMKVLKCEVELMARMAKTIDSFTQNQTRLVVIIDGLDACEQDKVLQMLDTVRVLFSKGPFIAIFASDPHIIIKAINQNLNSVLRDSNINGHDYMRNIVHLPVFLNSRGLSNARKFLVTSATNGDVPCSDTTGIQEDADRRVSQNSLGEMTKLGSKTALNRRDTYRRRQMQRTITRQMSFDLTKLLVTEDWFSDISPQTMRRLLNIVSVTGRLLRANQISFNWDRLASWINLTEQWPYRTSWLILYLEETEGIPDQMTLKTIYERISKNIPTTKDVEPLLEIDGDIRNFEVFLSSRTPVLVARDVKVFLPCTVNLDPKLREIIADVRAAREQISIGGLAYPPLPLHEGPPRAPSGYSQPPSVCSSTSFNGPFAGGVVSPQPHSSYYSGMTGPQHPFYNRPFFAPYLYTPRYYPGGSQHLISRPSVKTSLPRDQNNGLEVIKEDAAEGLSSPTDSSRGSGPAPGPVVLLNSLNVDAVCEKLKQIEGLDQSMLPQYCTTIKKANINGRVLAQCNIDELKKEMNMNFGDWHLFRSTVLEMRNAESHVVPEDPRFLSESSSGPAPHGEPARRASHNELPHTELSSQTPYTLNFSFEELNTLGLDEGAPRHSNLSWQSQTRRTPSLSSLNSQDSSIEISKLTDKVQAEYRDAYREYIAQMSQLEGGPGSTTISGRSSPHSTYYMGQSSSGGSIHSNLEQEKGKDSEPKPDDGRKSFLMKRGDVIDYSSSGVSTNDASPLDPITEEDEKSDQSGSKLLPGKKSSERSSLFQTDLKLKGSGLRYQKLPSDEDESGTEESDNTPLLKDDKDRKAEGKVERVPKSPEHSAEPIRTFIKAKEYLSDALLDKKDSSDSGVRSSESSPNHSLHNEVADDSQLEKANLIELEDDSHSGKRGIPHSLSGLQDPIIARMSICSEDKKSPSECSLIASSPEENWPACQKAYNLNRTPSTVTLNNNSAPANRANQNFDEMEGIRETSQVILRPSSSPNPTTIQNENLKSMTHKRSQRSSYTRLSKDPPELHAAASSESTGFGEERESIL

SEQ ID NO: 44160 - protein, 1031 aa, Homo sapiens
  Payload ID: 9004
  Gene Symbol: KIDINS220
  Gene Name: kinase D-interacting substrate, 220kDa
  Uniprot ID: Q9ULH0
  ENSP ID: ENSP00000319947
MSVLISQSVINYVEEENIPALKALLEKCKDVDERNECGQTPLMIAAEQGNLEIVKELIKNGANCNLEDLDNWTALISASKEGHVHIVEELLKCGVNLEHRDMGGWTALMWACYKGRTDVVELLLSHGANPSVTGLQYSVYPIIWAAGRGHADIVHLLLQNGAKVNCSDKYGTTPLVWAARKGHLECVKHLLAMGADVDQEGANSMTALIVAVKGGYTQSVKEILKRNPNVNLTDKDGNTALMIASKEGHTEIVQDLLDAGTYVNIPDRSGDTVLIGAVRGGHVEIVRALLQKYADIDIRGQDNKTALYWAVEKGNATMVRDILQCNPDTEICTKDGETPLIKATKMRNIEVVELLLDKGAKVSAVDKKGDTPLHIAIRGRSRKLAELLLRNPKDGRLLYRPNKAGETPYNIDCSHQKSILTQIFGARHLSPTETDGDMLGYDLYSSALADILSEPTMQPPICVGLYAQWGSGKSFLLKKLEDEMKTFAGQQIEPLFQFSWLIVFLTLLLCGGLGLLFAFTVHPNLGIAVSLSFLALLYIFFIVIYFGGRREGESWNWAWVLSTRLARHIGYLELLLKLMFVNPPELPEQTTKALPVRFLFTDYNRLSSVGGETSLAEMIATLSDACEREFGFLATRLFRVFKTEDTQGKKKWKKTCCLPSFVIFLFIIGCIISGITLLAIFRVDPKHLTVNAVLISIASVVGLAFVLNCRTWWQVLDSLLNSQRKRLHNAASKLHKLKSEGFMKVLKCEVELMARMAKTIDSFTQNQTRLVVIIDGLDACEQDKVLQMLDTVRVLFSKGPFIAIFASDPHIIIKAINQNLNSVLRDSNINGHDYMRNIVHLPVFLNSRGLSNARKFLVTSATNGDVPCSDTTGIQEDADRRVSQNSLGEMTKLGSKTALNRRDTYRRRQMQRTITRQMSFDLTKLLVTEDWFSDISPQTMRRLLNIVSVTGRLLRANQISFNWDRLASWINLTEQWPYRTSWLILYLEETEGIPDQMTLKTIYERCCGADSCDRDRIGISKSVLVAMLMES

SEQ ID NO: 44161 - protein, 36 aa, Homo sapiens
  Payload ID: 9004
  Gene Symbol: KIDINS220
  Gene Name: kinase D-interacting substrate, 220kDa
  ENSP ID: ENSP00000417390
MSVLISQSVINYVEEENIPALKALLEKCKDVDERNE

SEQ ID NO: 44162 - protein, 1752 aa, Homo sapiens
  Payload ID: 9004
  Gene Symbol: KIDINS220
  Gene Name: kinase D-interacting substrate, 220kDa
  Uniprot ID: Q9ULH0
  ENSP ID: ENSP00000418974
MSVLISQSVINYVEEENIPALKALLEKCKDVDERNECGQTPLMIAAEQGNLEIVKELIKNGANCNLEDLDNWTALISASKEGHVHIVEELLKCGVNLEHRDMGGWTALMWACYKGRTDVVELLLSHGANPSVTGLYSVYPIIWAAGRGHADIVHLLLQNGAKVNCSDKYGTTPLVWAARKGHLECVKHLLAMGADVDQEGANSMTALIVAVKGGYTQSVKEILKRNPNVNLTDKDGNTALMIASKEGHTEIVQDLLDAGTYVNIPDRSGDTVLIGAVRGGHVEIVRALLQKYADIDIRGQDNKTALYWAVEKGNATMVRDILQCNPDTEICTKDGETPLIKATKMRNIEVVELLLDKGAKVSAVDKKGDTPLHIAIRGRSRKLAELLLRNPKDGRLLYRPNKAGETPYNIDCSHQKSILTQIFGARHLSPTETDGDMLGYDLYSSALADILSEPTMQPPICVGLYAQWGSGKSFLLKKLEDEMKTFAGQQIEPLFQFSWLIVFLTLLLCGGLGLLFAFTVHPNLGIAVSLSFLALLYIFFIVIYFGGRREGESWNWAWVLSTRLARHIGYLELLLKLMFVNPPELPEQTTKALPVRFLFTDYNRLSSVGGETSLAEMIATLSDACEREFGFLATRLFRVFKTEDTQGKKKWKKTCCLPSFVIFLFIIGCIISGITLLAIFRVDPKHLTVNAVLISIASVVGLAFVLNCRTWWQVLDSLLNSQRKRLHNAASKLHKLKSEGFMKVLKCEVELMARMAKTIDSFTQNQTRLVVIIDGLDACEQDKVLQMLDTVRVLFSKGPFIAIFASDPHIIIKAINQNLNSVLRDSNINGHDYMRNIVHLPVFLNSRGLSNARKFLVTSATNGDVPCSDTTGIQEDADRRVSQNSLGEMTKLGSKTALNRRDTYRRRQMQRTITRQMSFDLTKLLVTEDWFSDISPQTMRRLLNIVSVTGRLLRANQISFNWDRLASWINLTEQWPYRTSWLILYLEETEGIPDQMTLKTIYERISKNIPTTKDVEPLLEIDGDIRNFEVFLSSRTPVLVARDVKVFLPCTVNLDPKLREIIADVRAAREQISIGGLAYPPLPLHEGPPRAPSGYSQPPSVCSSTSFNGPFAGGVVSPQPHSSYYSGMTGPQHPFYNRPFFAPYLYTPRYYPGGSQHLISRPSVKTSLPRDQNNGLGSGPAPGPVVLLNSLNVDAVCEKLKQIEGLDQSMLPQYCTTIKKANINGRVLAQCNIDELKKEMNMNFGDWHLFRSTVLEMRNAESHVVPEDPRFLSESSSGPAPHGEPARRASHNELPHTELSSQTPYTLNFSFEELNTLGLDEGAPRHSNLSWQSQTRRTPSLSSLNSQDSSIEISKLTDKVQAEYRDAYREYIAQMSQLEGGPGSTTISGRSSPHSTYYMGQSSSGGSIHSNLEQEKGKDSEPKPDDGRKSFLMKRGDVIDYSSSGVSTNDASPLDPITEEDEKSDQSGSKLLPGKKSSERSSLFQTDLKLKGSGLRYQKLPSDEDESGTEESDNTPLLKDDKDRKAEGKVERVPKSPEHSAEPIRTFIKAKEYLSDALLDKKDSSDSGVRSSESSPNHSLHNEVADDSQLEKANLIELEDDSHSGKRGIPHSLSGLQDPIIARMSICSEDKKSPSECSLIASSPEENWPACQKAYNLNRTPSTVTLNNNSAPANRANQNFDEMEGIRETSQVILRPSSSPNPTTIQNENLKSMTHKRSQRSSYTRLSKDPPELHAAASSESTGFGEERESIL

SEQ ID NO: 44163 - protein, 151 aa, Homo sapiens
  Payload ID: 9004
  Gene Symbol: KIDINS220
  Gene Name: kinase D-interacting substrate, 220kDa
  ENSP ID: ENSP00000419232
IPDQMTLKTIYERISKNIPTTKDVEPLLEIDGDIRNFEVFLSSRTPVLVARDVKVFLPCTVNLDPKLREIIADVRAAREQISIGGLAYPPLPLHEGPPRAPSGYSQPPSVCSSTSFNGPFAGGVVSPQPHSSYYSGMTGPQHPFYNRENGA

SEQ ID NO: 44164 - protein, 1305 aa, Homo sapiens
  Payload ID: 9004
  Gene Symbol: KIDINS220
  Gene Name: kinase D-interacting substrate, 220kDa
  ENSP ID: ENSP00000419964
MSVLISQSVINYVEEENIPALKALLEKCKDVDERNECGQTPLMIAAEQGNLEIVKELIKNGANCNLEDLDNWTALISASKEGHVHIVEELLKCGVNLEHRDMGGWTALMWACYKGRTDVVELLLSHGANPSVTGLQYSVYPIIWAAGRGHADIVHLLLQNGAKVNCSDKYGTTPLVWAARKGHLECVKHLLAMGADVDQEGANSMTALIVAVKGGYTQSVKEILKRNPNVNLTDKDGNTALMIASKEGHTEIVQDLLDAGTYVNIPDRSGDTVLIGAVRGGHVEIVRALLQKYADIDIRGQDNKTALYWAVEKGNATMVRDILQCNPDTEICTKDGETPLIKATKMRNIEVVELLLDKGAKVSAVDKKGDTPLHIAIRGRSRKLAELLLRNPKDGRLLYRPNKAGETPYNIDCSHQKSILTQIFGARHLSPTETDGDMLGYDLYSSALADILSEPTMQPPICVGLYAQWGSGKSFLLKKLEDEMKTFAGQQIEPLFQFSWLIVFLTLLLCGGLGLLFAFTVHPNLGIAVSLSFLALLYIFFIVIYFGGRREGESWNWAWVLSTRLARHIGYLELLLKLMFVNPPELPEQTTKALPVRFLFTDYNRLSSVGGETSLAEMIATLSDACEREFGFLATRLFRVFKTEDTQGKKKWKKTCCLPSFVIFLFIIGCIISGITLLAIFRVDPKHLTVNAVLISIASVVGLAFVLNCRTWWQVLDSLLNSQRKRLHNAASKLHKLKSEGFMKVLKCEVELMARMAKTIDSFTQNQTRLVVIIDGLDACEQDKVLQMLDTVRVLFSKGPFIAIFASDPHIIIKAINQNLNSVLRDSNINGHDYMRNIVHLPVFLNSRGLSNARKFLVTSATNGDVPCSDTTGIQEDADRRVSQNSLGEMTKLGSKTALNRRDTYRRRQMQRTITRQMSFDLTKLLVTEDWFSDISPQTMRRLLNIVSVTGRLLRANQISFNWDRLASWINLTEQWPYRTSWLILYLEETEGIPDQMTLKTIYERISKNIPTTKDVEPLLEIDGDIRNFEVFLSSRTPVLVARDVKVFLPCTVNLDPKLREIIADVRAAREQISIGGLAYPPLPLHEGPPRAPSGYSQPPSVCSSTSFNGPFAGGVVSPQPHSSYYSGMTGPQHPFYNRGSGPAPGPVVLLNSLNVDAVCEKLKQIEGLDQSMLPQYCTTIKKANINGRVLAQCNIDELKKEMNMNFGDWHLFRSTVLEMRNAESHVVPEDPRFLSESSSGPAPHGEPARRASHNELPHTELSSQTPYTLNFSFEELNTLGLDEGAPRHSNLSWQSQTRRTPSLS

SEQ ID NO: 44165 - protein, 1057 aa, Homo sapiens
  Payload ID: 9004
  Gene Symbol: KIDINS220
  Gene Name: kinase D-interacting substrate, 220kDa
  ENSP ID: ENSP00000420364
DLLDAGTYVNIPDRSGDTVLIGAVRGGHVEIVRALLQKYADIDIRGQDNKTALYWAVEKGNATMVRDILQCNPDTEICTKDGETPLIKATKMRNIEVVELLLDKGAKVSAVDKKGDTPLHIAIRGRSRKLAELLLRNPKDGRLLYRPNKAGETPYNIDCSHQKSILTQIFGARHLSPTETDGDMLGYDLYSSALADILSEPTMQPPICVGLYAQWGSGKSFLLKKLEDEMKTFAGQQIEPLFQFSWLIVFLTLLLCGGLGLLFAFTVHPNLGIAVSLSFLALLYIFFIVIYFGGRREGESWNWAWVLSTRLARHIGYLELLLKLMFVNPPELPEQTTKALPVRFLFTDYNRLSSVGGETSLAEMIATLSDACEREFGFLATRLFRVFKTEDTQGKKKWKKTCCLPSFVIFLFIIGCIISGITLLAIFRVDPKHLTVNAVLISIASVVGLAFVLNCRTWWQVLDSLLNSQRKRLHNAASKLHKLKSEGFMKVLKCEVELMARMAKTIDSFTQNQTRLVVIIDGLDACEQDKVLQMLDTVRVLFSKGPFIAIFASDPHIIIKAINQNLNSVLRDSNINGHDYMRNIVHLPVFLNSRGLSNARKFLVTSATNGDVPCSDTTGIQEDADRRVSQNSLGEMTKLGSKTALNRRDTYRRRQMQRTITRQMSFDLTKLLVTEDWFSDISPQTMRRLLNIVSVTGRLLRANQISFNWDRLASWINLTEQWPYRTSWLILYLEETEGIPDQMTLKTIYERISKNIPTTKDVEPLLEIDGDIRNFEVFLSSRTPVLVARDVKVFLPCTVNLDPKLREIIADVRAAREQISIGGLAYPPLPLHEGPPRAPSGYSQPPSVCSSTSFNGPFAGGVVSPQPHSSYYSGMTGPQHPFYNRGSGPAPGPVVLLNSLNVDAVCEKLKQIEGLDQSMLPQYCTTIKKANINGRVLAQCNIDELKKEMNMNFGDWHLFRSTVLEMRNAESHVVPEDPRFLSESSSGPAPHGEPARRASHNELPHTELSSQTPYTLNFSFEELNTLGLDEGAPRHSNLSWQEENAGLEIDSSSEDPD

SEQ ID NO: 44166 - protein, 1356 aa, Homo sapiens
  Payload ID: 9005
  Gene Symbol: KDR
  Gene Name: kinase insert domain receptor
  Uniprot ID: P35968
  ENSP ID: ENSP00000263923
MQSKVLLAVALWLCVETRAASVGLPSVSLDLPRLSIQKDILTIKANTTLQITCRGQRDLDWLWPNNQSGSEQRVEVTECSDGLFCKTLTIPKVIGNDTGAYKCFYRETDLASVIYVYVQDYRSPFIASVSDQHGVVYITENKNKTVVIPCLGSISNLNVSLCARYPEKRFVPDGNRISWDSKKGFTIPSYMISYAGMVFCEAKINDESYQSIMYIVVVVGYRIYDVVLSPSHGIELSVGEKLVLNCTARTELNVGIDFNWEYPSSKHQHKKLVNRDLKTQSGSEMKKFLSTLTIDGVTRSDQGLYTCAASSGLMTKKNSTFVRVHEKPFVAFGSGMESLVEATVGERVRIPAKYLGYPPPEIKWYKNGIPLESNHTIKAGHVLTIMEVSERDTGNYTVILTNPISKEKQSHVVSLVVYVPPQIGEKSLISPVDSYQYGTTQTLTCTVYAIPPPHHIHWYWQLEEECANEPSQAVSVTNPYPCEEWRSVEDFQGGNKIEVNKNQFALIEGKNKTVSTLVIQAANVSALYKCEAVNKVGRGERVISFHVTRGPEITLQPDMQPTEQESVSLWCTADRSTFENLTWYKLGPQPLPIHVGELPTPVCKNLDTLWKLNATMFSNSTNDILIMELKNASLQDQGDYVCLAQDRKTKKRHCVVRQLTVLERVAPTITGNLENQTTSIGESIEVSCTASGNPPPQIMWFKDNETLVEDSGIVLKDGNRNLTIRRVRKEDEGLYTCQACSVLGCAKVEAFFIIEGAQEKTNLEIIILVGTAVIAMFFWLLLVIILRTVKRANGGELKTGYLSIVMDPDELPLDEHCERLPYDASKWEFPRDRLKLGKPLGRGAFGQVIEADAFGIDKTATCRTVAVKMLKEGATHSEHRALMSELKILIHIGHHLNVVNLLGACTKPGGPLMVIVEFCKFGNLSTYLRSKRNEFVPYKTKGARFRQGKDYVGAIPVDLKRRLDSITSSQSSASSGFVEEKSLSDVEEEEAPEDLYKDFLTLEHLICYSFQVAKGMEFLASRKCIHRDLAARNILLSEKNVVKICDFGLARDIYKDPDYVRKGDARLPLKWMAPETIFDRVYTIQSDVWSFGVLLWEIFSLGASPYPGVKIDEEFCRRLKEGTRMRAPDYTTPEMYQTMLDCWHGEPSQRPTFSELVEHLGNLLQANAQQDGKDYIVLPISETLSMEEDSGLSLPTSPVSCMEEEEVCDPKFHYDNTAGISQYLQNSKRKSRPVSVKTFEDIPLEEPEVKVIPDDNQTDSGMVLASEELKTLEDRTKLSPSFGGMVPSKSRESVASEGSNQTSGYQSGYHSDDTDTTVYSSEEAELLKLIEIGVQTGSTAQILQPDSGTTLSSPPV

SEQ ID NO: 44167 - protein, 1749 aa, Homo sapiens
  Payload ID: 9006
  Gene Symbol: KNDC1
  Gene Name: kinase non-catalytic C-lobe domain (KIND) containing 1
  Uniprot ID: Q76NI1
  ENSP ID: ENSP00000304437
MQAMDPAAADLYEEDGKDLDFYDFEPLPTLPEDEENVSLADILSLRDRGLSEQEAWAVCLECSLSMRSVAHAAIFQSLCITPDTLAFNTSGNVCFMEQLSDDPEGAFVPPEFDVTGNTFEAHIYSLGATLKAALEYVAEPTLEPRLSQDLEALLSRMQAEDPGDRPDLESIIALCEEKLQLTSSCRVCRSLSAVGRRVLSIESFGALQDVSESSWRERPAPGNAGPRRPPGDPSTDPEVLPTPEGPESETSRGPRASPTKALLSTPVRNGESHSREGLAGLVLDAERTLGELDRDALRRSRLRKVQTFPRLLSDSPEATLCLPLTRGKSQLPISELFSPDPRKAFLDRKNGLSSFQAQPKCRLWPEQEPEHQLGRVPCAGRSTDRGPGVPGSPGQPETSHPSQGPAEAPADPRDASGEAQTPRDDERIPEGARQLESAAAEQWVSLQDLLSQLGRPFREYELWALCLACLRALQTRPEHPAYLCLDSVLVAEDGAVLFQPPPANGSYDSFFLAPELAEERLVTEKASVYCVAAVLWTAAKFSVPRNHKLALPRRLKTLLLDMARRSAPERPSAAEAIKVCGSYLLQRGMDSRKILAHLRASICQVYQEEETISLQNAFSVVELKPSVAPAPEPSPGFLPVNSDTGLVAVPGPVPGQHPCGEEATQLPAAFTSEATHFKPIVLAQNASVARDQPALAQEESEERGGQREGEGEEKLSLEAHAGSPSLKTPDGPVPGPGPQGAAPEPLGASVQRDSAQGRPCPPPQAPANQPEGASSAAPGSPVPAPPTKASALPVEQGPAEPIPPGVASGGLRPDALGPTTAHHGPRHPPKPPRSKATERPGQEPEGPGATPAGERDDQSPDSVPERPRPADRRLCLPCVDASPLPGRTACPSLQEATRLIQEEFAFDGYLDNGLEALIMGEYIFALKDLTFATFCGAISEKFCDLYWDEKLLQNLFKVVNGQASPSPSTAEEAGSQLEGSQSPRSPSSKRPSLHRLGKEKPAMARTSSRAPCSPTSVSDVDSDALSRGNFEVGFRPQRSVKAERAQQPEAGEDRRPAGGASDVEAVTRLARSKGVGPALSPGPAGFQSCSPGWCSAFYEADCFGADVHNYVKDLGRQQADGALPDAQSPELEQQLMMEKRNYRKTLKFYQKLLQKEKRNKGSDVKTMLSKLKGQLEEMKSRVQFLSLVKKYLQVMYAERWGLEPCTLPVIVNIAAAPCDTLDFSPLDESSSLIFYNVNKHPGGRQKARILQAGTPLGLMAYLYSSDAFLEGYVQQFLYTFRYFCTPHDFLHFLLDRINSTLTRAHQDPTSTFTKIYRRSLCVLQAWVEDCYAVDFPRNSGLLGKLEDFISSKILPLDGSAKHLLGLLEVGMDRRAEGNPRGTDLENPREAEEDARPFNALCKRLSEDGISRKSFPWRLPRGNGLVLPPHKERPYTIAAALPKPCFLEDFYGPCAKTSEKGPYFLTEYSTHQLFSQLTLLQQELFQKCHPVHFLNSRALGVMDKSTAIPKASSSESLSAKTCSLFLPNYVQDKYLLQLLRNADDVSTWVAAEIVTSHTSKLQVNLLSKFLLIAKSCYEQRNFATAMQILSGLEHLAVRQSPAWRILPAKIAEVMEELKAVEVFLKSDSLCLMEGRRFRAQPTLPSAHLLAMHIQQLETGGFTMTNGAHRWSKLRNIAKVVSQVHAFQENPYTFSPDPKLQSYLKQRIARFSGADISTLAADSRANFHQVSSEKHSRKIQDKLRRMKATFQ

SEQ ID NO: 44168 - protein, 1141 aa, Homo sapiens
  Payload ID: 9006
  Gene Symbol: KNDC1
  Gene Name: kinase non-catalytic C-lobe domain (KIND) containing 1
  Uniprot ID: Q76NI1
  ENSP ID: ENSP00000357560
MRSVAHAAIFQSLCITPDTLAFNTSGNVCFMEQLSDDPEGAFVPPEFDVTGNTFEAHIYSLGATLKAALEYVAEPTLEPRLSQDLEALLSRMQAEDPGDRPDLESIIALCEEKLQLTSSCRVCRSLSAVGRRVLSIESFGALQDVSESSWRERPAPGNAGPRRPPGDPSTDPEVLPTPEGPESETSRGPRASPTKALLSTPVRNGESHSREGLAGLVLDAERTLGELDRDALRRSRLRKVQTFPRLLSDSPEATLCLPLTRGKSQLPISELFSPDPRKAFLDRKNGLSSFQAQPKCRLWPEQEPEHQLGRVPCAGRSTDRGPGVPGSPGQPETSHPSQGPAEAPADPRDASGEAQTPRDDERIPEGARQLESAAAEQWVSLQDLLSQLGRPFREYELWALCLACLRALQTRPEHPAYLCLDSVLVAEDGAVLFQPPPANGSYDSFFLAPELAEERLVTEKASVYCVAAVLWTAAKFSVPRNHKLALPRRLKTLLLDMARRSAPERPSAAEAIKVCGSYLLQRGMDSRKILAHLRASICQVYQEEETISLQNAFSVVELKPSVAPAPEPSPGFLPVNSDTGLVAVPGPVPGQHPCGEEATQLPAAFTSEATHFKPIVLAQNASVARDQPALAQEESEERGGQREGEGEEKLSLEAHAGSPSLKTPDGPVPGPGPQGAAPEPLGASVQRDSAQGRPCPPPQAPANQPEGASSAAPGSPVPAPPTKASALPVEQGPAEPIPPGVASGGLRPDALGPTTAHHGPRHPPKPPRSKATERPGQEPEGPGATPAGERDDQSPDSVPERPRPADRRLCLPCVDASPLPGRTACPSLQEATRLIQEEFAFDGYLDNGLEALIMGEYIFALKDLTFATFCGAISEKFCDLYWDEKLLQNLFKVVNGQASPSPSTAEEAGSQLEGSQSPRSPSSKRPSLHRLGKEKPAMARTSSRAPCSPTSVSDVDSDALSRGNFEVGFRPQRSVKAERAQQPEAGEDRRPAGGASDVEAVTRLARSKGVGPALSPGPAGFQSCSPGWCSAFYEADCFGADVHNYVKDLGRQQADGALPDAQSPELEQQLMMEKRNYRKTLKFYQKLLQKEKRNKGSDVKTMLSKLKGQLEEMKSRVQFLSLVKKYLQASGLRAPLCPVRQ

SEQ ID NO: 44169 - protein, 846 aa, Homo sapiens
  Payload ID: 9007
  Gene Symbol: KSR1
  Gene Name: kinase suppressor of ras 1
  ENSP ID: ENSP00000268763
AKLVRYICKQRQCKLSVAPGERTPELNSYPRFSDWLYTFNVRPEVVQEIPRDLTLDALLEMNEAKVKETLRRCGASGDECGRLQYALTCLRKVTGLGGEHKEDSSWSSLDARRESGSGPSTDTLSAASLPWPPGSSQLGRAGNSAQGPRSISVSALPASDSPTPSFSEGLSDTCIPLHASGRLTPRALHSFITPPTTPQLRRHTKLKPPRTPPPPSRKVFQLLPSFPTLTRSKSHESQLGNRIDDVSSMRFDLSHGSPQMVRRDIGLSVTHRFSTKSWLSQVCHVCQKSMIFGVKCKHCRLKCHNKCTKEAPACRISFLPLTRLRRTESVPSDINNPVDRAAEPHFGTLPKALTKKEHPPAMNHLDSSSNPSSTTSSTPSSPAPFPTSSNPSSATTPPNPSPGQRDSRFNFPAAYFIHHRQQFIFPVPSAGHCWKCLLIAESLKENAFNISAFAHAAPLPEAADGTRLDDQPKADVLEAHEAEAEEPEAGKSEAEDDEDEVDDLPSSRRPWRGPISRKASQTSVYLQEWDIPFEQVELGEPIGQGRWGRVHRGRWHGEVAIRLLEMDGHNQDHLKLFKKEVMNYRQTRHENVVLFMGACMNPPHLAIITSFCKGRTLHSFVRDPKTSLDINKTRQIAQEIIKGMGYLHAKGIVHKDLKSKNVFYDNGKVVITDFGLFGISGVVREGRRENQLKLSHDWLCYLAPEIVREMTPGKDEDQLPFSKAADVYAFGTVWYELQARDWPLKNQAAEASIWQIGSGEGMKRVLTSVSLGKEVSEILSACWAFDLQERPSFSLLMDMLEKLPKLNRRLSHPGHFWKSADINSSKVVPRFERFGLGVLESSNPKM

SEQ ID NO: 44170 - protein, 612 aa, Homo sapiens
  Payload ID: 9007
  Gene Symbol: KSR1
  Gene Name: kinase suppressor of ras 1
  ENSP ID: ENSP00000381952
HSFITPPTTPQLRRHTKLKPPRTPPPPSRKVFQLLPSFPTLTRSKSHESQLGNRIDDVSSMRFDLSHGSPQMVRRDIGLSVTHRFSTKSWLSQVCHVCQKSMIFGVKCKHCRLKCHNKCTKEAPACRISFLPLTRLRRTESVPSDINNPVDRAAEPHFGTLPKALTKKEHPPAMNHLDSSSNPSSTTSSTPSSPAPFPTSSNPSSATTPPNPSPGQRDSRFNFPAAYFIHHRQQFIFPDISAFAHAAPLPEAADGTRLDDQPKADVLEAHEAEAEEPEAGKSEAEDDEDEVDDLPSSRRPWRGPISRKASQTSVYLQEWDIPFEQVELGEPIGQGRWGRVHRGRWHGEVAIRLLEMDGHNQDHLKLFKKEVMNYRQTRHENVVLFMGACMNPPHLAIITSFCKGRTLHSFVRDPKTSLDINKTRQIAQEIIKGMGYLHAKGIVHKDLKSKNVFYDNGKVVITDFGLFGISGVVREGRRENQLKLSHDWLCYLAPEIVREMTPGKDEDQLPFSKAADVYAFGTVWYELQARDWPLKNQAAEASIWQIGSGEGMKRVLTSVSLGKEVSEILSACWAFDLQERPSFSLLMDMLEKLPKLNRRLSHPGHFWKSAEL

SEQ ID NO: 44171 - protein, 762 aa, Homo sapiens
  Payload ID: 9007
  Gene Symbol: KSR1
  Gene Name: kinase suppressor of ras 1
  Uniprot ID: Q8IVT5
  ENSP ID: ENSP00000381958
MNEAKVKETLRRCGASGDECGRLQYALTCLRKVTGLGGEHKEDSSWSSLDARRESGSGPSTDTLSAASLPWPPGSSQLGRAGNSAQGPRSISVSALPASDSPTPSFSEGLSDTCIPLHASGRLTPRALHSFITPPTTPQLRRHTKLKPPRTPPPPSRKVFQLLPSFPTLTRSKSHESQLGNRIDDVSSMRFDLSHGSPQMVRRDIGLSVTHRFSTKSWLSQVCHVCQKSMIFGVKCKHCRLKCHNKCTKEAPACRISFLPLTRLRRTESVPSDINNPVDRAAEPHFGTLPKALTKKEHPPAMNHLDSSSNPSSTTSSTPSSPAPFPTSSNPSSATTPPNPSPGQRDSRFNFPAAYFIHHRQQFIFPVPSAGHCWKCLLIAESLKENAFNISAFAHAAPLPEAADGTRLDDQPKADVLEAHEAEAEEPEAGKSEAEDDEDEVDDLPSSRRPWRGPISRKASQTSVYLQEWDIPFEQVELGEPIGQGRWGRVHRGRWHGEVAIRLLEMDGHNQDHLKLFKKEVMNYRQTRHENVVLFMGACMNPPHLAIITSFCKGRTLHSFVRDPKTSLDINKTRQIAQEIIKGMGYLHAKGIVHKDLKSKNVFYDNGKVVITDFGLFGISGVVREGRRENQLKLSHDWLCYLAPEIVREMTPGKDEDQLPFSKAADVYAFGTVWYELQARDWPLKNQAAEASIWQIGSGEGMKRVLTSVSLGKEVSEILSACWAFDLQERPSFSLLMDMLEKLPKLNRRLSHPGHFWKSAEL

SEQ ID NO: 44172 - protein, 762 aa, Homo sapiens; identical to SEQ ID NO: 44171
  Payload ID: 9007
  Gene Symbol: KSR1
  Gene Name: kinase suppressor of ras 1
  Uniprot ID: Q8IVT5
  ENSP ID: ENSP00000438795

SEQ ID NO: 44173 - protein, 46 aa, Homo sapiens
  Payload ID: 9007
  Gene Symbol: KSR1
  Gene Name: kinase suppressor of ras 1
  ENSP ID: ENSP00000463204
MNEAKVKETLRRCGASGDECGRLQYALTCLRKVTGLGGEHKEDSSW

SEQ ID NO: 44174 - protein, 98 aa, Homo sapiens
  Payload ID: 9007
  Gene Symbol: KSR1
  Gene Name: kinase suppressor of ras 1
  ENSP ID: ENSP00000463554
  MOD_RES (1)..(1): Any amino acid
XVFQLLPSFPTLTRSKSHESQLGNRIDDVSSMRFACLLPHLETSQGQLTEPSSEARSKLEDQARRGEPHHATGLAWPAPVLMDIDQGDAYIINHCAPL

SEQ ID NO: 44175 - protein, 130 aa, Homo sapiens
  Payload ID: 9007
  Gene Symbol: KSR1
  Gene Name: kinase suppressor of ras 1
  ENSP ID: ENSP00000463779
MEKDATATLTLRAPVRFWRNTLTAAKLYPGLKGLAWASWSPVIQRCSQPYGFSLLISFFLKCVSETSQQPPRQKNTACPALQTRSTRPRFRLLAINPTREMELHLLFLKMTPPTTKPVMTDSKCLHVYFS

SEQ ID NO: 44176 - protein, 139 aa, Homo sapiens
  Payload ID: 9007
  Gene Symbol: KSR1
  Gene Name: kinase suppressor of ras 1
  ENSP ID: ENSP00000463790
REMTPGKDEDQLPFSKAADVYAFGTVWYELQARDWPLKNQAAEASIWQIGSGEGMKRVLTSVSLGKEVSEILSACWAFDLQERPSFSLLMDMLEKLPKLNRRLSHPGHFWKSADINSSKVVPRFERFGLGVLESSNPKM

SEQ ID NO: 44177 - protein, 155 aa, Homo sapiens
  Payload ID: 9007
  Gene Symbol: KSR1
  Gene Name: kinase suppressor of ras 1
  ENSP ID: ENSP00000464081
MNEAKVKETLRRCGASGDECGRLQYALTCLRKVTGLGGEHKEDSSWSSLDARRESGSGPSTDTLSAASLPWPPGSSQLGRAGNSAQGPRSISVSALPASDSPTPSFSEGLSDTCIPLHASGRLTPRALHSFITPPTTPQLRRHTKLKPPRTPPPP

SEQ ID NO: 44178 - protein, 113 aa, Homo sapiens
  Payload ID: 9007
  Gene Symbol: KSR1
  Gene Name: kinase suppressor of ras 1
  ENSP ID: ENSP00000464680
MTPGKDEDQLPFSKAADVYAFGTVWYELQARDWPLKNQAAEASIWQIGSGEGMKRVLTSVSLGKEVSEILSACWAFDLQERPSFSLLMDMLEKLPKLNRRLSHPGHFWKSAEL

SEQ ID NO: 44179 - protein, 950 aa, Homo sapiens [sequence omitted]

SEQ ID NO: 44180 - protein, 921 aa, Homo sapiens
  Payload ID: 9008
  Gene Symbol: KSR2
  Gene Name: kinase suppressor of ras 2
  ENSP ID: ENSP00000389715
MIDLSISNLEGLRTKCATSNDLTQKEIRTLESKLVKYFSRQLSCKKKVALQERNAELDGFPQLRHWFRIVDVRKEVLEEISPGQLSLEDLLEMTDEQVCETVEKYGANREECARLNASLSCLRNVHMSGGNLSKQDWTIQWPTTETGKENNPVCPPEPTPWIRTHLSQSPRVPSKCVQHYCHTSPTPGAPVYTHVDRLTVDAYPGLCPPPPLESGHRSLPPSPRQRHAVRTPPRTPNIVTTVTPPGTPPMRKKNKLKPPGTPPPSSRKLIHLIPGFTALHRSKSHEFQLGHRVDEAHTPKAKKKSKPLNLKIHSSVGSCENIPSQQRSPLLSERSLRSFFVGHAPFLPSTPPVHTEANFSANTLSVPRWSPQIPRRDLGNSIKHRFSTKYWMSQTCTVCGKGMLFGLKCKNCKLKCHNKCTKEAPPCHLLIIHRGDPARLVRTESVPCDINNPLRKPPRYSDLHISQTLPKTNKINKDHIPVPYQPDSSSNPSSTTSSTPSSPAPPLPPSATPPSPLHPSPQCTRQQKNFNLPASHYYKYKQQFIFPDVVPVPETPTRAPQVILHPVTSNPILEGNPLLQIEVEPTSENEEVHDEAEESEDDFEEMNLSLLSARSFPRKASQTSIFLQEWDIPFEQLEIGELIGKGRFGQVYHGRWHGEVAIRLIDIERDNEDQLKAFKREVMAYRQTRHENVVLFMGACMSPPHLAIITSLCKGRTLYSVVRDAKIVLDVNKTRQIAQEIVKGMGYLHAKGILHKDLKSKNVFYDNGKVVITDFGLFSISGVLQAGRREDKLRIQNGWLCHLAPEIIRQLSPDTEEDKLPFSKHSDVFALGTIWYELHAREWPFKTQPAEAIIWQMGTGMKPNLSQIGMGKEISDILLFCWAFEQEERPTFTKLMDMLEKLPKRNRRLSHPGHFWKSAEL

SEQ ID NO: 44181 - protein, 1306 aa, Homo sapiens
  Payload ID: 9009
  Gene Symbol: KTN1
  Gene Name: kinectin 1 (kinesin receptor)
  Uniprot ID: Q86UP2
  ENSP ID: ENSP00000378719
MEFYESAYFIVLIPSIVITVIFLFFWLFMKETLYDEVLAKQKREQKLIPTKTDKKKAEKKKNKKKEIQNGNLHESDSESVPRDFKLSDALAVEDDQVAPVPLNVVETSSSVRERKKKEKKQKPVLEEQVIKESDASKIPGKKVEPVPVTKQPTPPSEAAASKKKPGQKKSKNGSDDQDKKVETLMVPSKRQEALPLHQETKQESGSGKKKASSKKQKTENVFVDEPLIHATTYIPLMDNADSSPVVDKREVIDLLKPDQVEGIQKSGTKKLKTETDKENAEVKFKDFLLSLKTMMFSEDEALCVVDLLKEKSGVIQDALKKSSKGELTTLIHQLQEKDKLLAAVKEDAAATKDRCKQLTQEMMTEKERSNVVITRMKDRIGTLEKEHNVFQNKIHVSYQETQQMQMKFQQVREQMEAEIAHLKQENGILRDAVSNTTNQLESKQSAELNKLRQDYARLVNELTEKTGKLQQEEVQKKNAEQAATQLKVQLQEAERRWEEVQSYIRKRTAEHEAAQQDLQSKFVAKENEVQSLHSKLTDTLVSKQQLEQRLMQLMESEQKRVNKEESLQMQVQDILEQNEALKAQIQQFHSQIAAQTSASVLAEELHKVIAEKDKQIKQTEDSLASERDRLTSKEEELKDIQNMNFLLKAEVQKLQALANEQAAAAHELEKMQQSVYVKDDKIRLLEEQLQHEISNKMEEFKILNDQNKALKSEVQKLQTLVSEQPNKDVVEQMEKCIQEKDEKLKTVEELLETGLIQVATKEEELNAIRTENSSLTKEVQDLKAKQNDQVSFASLVEELKKVIHEKDGKIKSVEELLEAELLKVANKEKTVQLSITSKVQELQNLLKGKEEQMNTMKAVLEEKEKDLANTGKWLQDLQEENESLKAHVQEVAQHNLKEASSASQFEELEIVLKEKENELKRLEAMLKERESDLSSKTQLLQDVQDENKLFKSQIEQLKQQNYQQASSFPPHEELLKVISEREKEISGLWNELDSLKDAVEHQRKKNNDLREKNWEAMEALASTEKMLQDKVNKTSKERQQQVEAVELEAKEVLKKLFPKVSVPSNLSYGEWLHGFEKKAKECMAGTSGSEEVKVLEHKLKEADEMHTLLQLECEKYKSVLAETEGILQKLQRSVEQEENKWKVKVDESHKTIKQMQSSFTSSEQELERLRSENKDIENLRREREHLEMELEKAEMERSTYVTEVRELKAQLNETLTKLRTEQNERQKVAGDLHKAQQSLELIQSKIVKAAGDTTVIENSDVSPETESSEKETMSVSLNQTVTQLQQLLQAVNQQLTKEKEHYQVLE

SEQ ID NO: 44182 - protein, 1306 aa, Homo sapiens; identical to SEQ ID NO: 44181
  Payload ID: 9009
  Gene Symbol: KTN1
  Gene Name: kinectin 1 (kinesin receptor)
  Uniprot ID: Q86UP2
  ENSP ID: ENSP00000378720

SEQ ID NO: 44183 - protein, 1306 aa, Homo sapiens; identical to SEQ ID NO: 44181
  Payload ID: 9009
  Gene Symbol: KTN1
  Gene Name: kinectin 1 (kinesin receptor)
  Uniprot ID: Q86UP2
  ENSP ID: ENSP00000378722

SEQ ID NO: 44184 - protein, 1357 aa, Homo sapiens
  Payload ID: 9009
  Gene Symbol: KTN1
  Gene Name: kinectin 1 (kinesin receptor)
  Uniprot ID: Q86UP2
  ENSP ID: ENSP00000378725
MEFYESAYFIVLIPSIVITVIFLFFWLFMKETLYDEVLAKQKREQKLIPTKTDKKKAEKKKNKKKEIQNGNLHESDSESVPRDFKLSDALAVEDDQVAPVPLNVVETSSSVRERKKKEKKQKPVLEEQVIKESDASKIPGKKVEPVPVTKQPTPPSEAAASKKKPGQKKSKNGSDDQDKKVETLMVPSKRQEALPLHQETKQESGSGKKKASSKKQKTENVFVDEPLIHATTYIPLMDNADSSPVVDKREVIDLLKPDQVEGIQKSGTKKLKTETDKENAEVKFKDFLLSLKTMMFSEDEALCVVDLLKEKSGVIQDALKKSSKGELTTLIHQLQEKDKLLAAVKEDAAATKDRCKQLTQEMMTEKERSNVVITRMKDRIGTLEKEHNVFQNKIHVSYQETQQMQMKFQQVREQMEAEIAHLKQENGILRDAVSNTTNQLESKQSAELNKLRQDYARLVNELTEKTGKLQQEEVQKKNAEQAATQLKVQLQEAERRWEEVQSYIRKRTAEHEAAQQDLQSKFVAKENEVQSLHSKLTDTLVSKQQLEQRLMQLMESEQKRVNKEESLQMQVQDILEQNEALKAQIQQFHSQIAAQTSASVLAEELHKVIAEKDKQIKQTEDSLASERDRLTSKEEELKDIQNMNFLLKAEVQKLQALANEQAAAAHELEKMQQSVYVKDDKIRLLEEQLQHEISNKMEEFKILNDQNKALKSEVQKLQTLVSEQPNKDVVEQMEKCIQEKDEKLKTVEELLETGLIQVATKEEELNAIRTENSSLTKEVQDLKAKQNDQVSFASLVEELKKVIHEKDGKIKSVEELLEAELLKVANKEKTVQDLKQEIKALKEEIGNVQLEKAQQLSITSKVQELQNLLKGKEEQMNTMKAVLEEKEKDLANTGKWLQDLQEENESLKAHVQEVAQHNLKEASSASQFEELEIVLKEKENELKRLEAMLKERESDLSSKTQLLQDVQDENKLFKSQIEQLKQQNYQQASSFPPHEELLKVISEREKEISGLWNELDSLKDAVEHQRKKNNDLREKNWEAMEALASTEKMLQDKVNKTSKERQQQVEAVELEAKEVLKKLFPKVSVPSNLSYGEWLHGFEKKAKECMAGTSGSEEVKVLEHKLKEADEMHTLLQLECEKYKSVLAETEGILQKLQRSVEQEENKWKVKVDESHKTIKQMQSSFTSSEQELERLRSENKDIENLRREREHLEMELEKAEMERSTYVTEVRELKDLLTELQKKLDDSYSEAVRQNEELNLLKAQLNETLTKLRTEQNERQKVAGDLHKAQQSLELIQSKIVKAAGDTTVIENSDVSPETESSEKETMSVSLNQTVTQLQQLLQAVNQQLTKEKEHYQVLE

SEQ ID NO: 44185 - protein, 1300 aa, Homo sapiens
  Payload ID: 9009
  Gene Symbol: KTN1
  Gene Name: kinectin 1 (kinesin receptor)
  Uniprot ID: Q86UP2
  ENSP ID: ENSP00000391964
MEFYESAYFIVLIPSIVITVIFLFFWLFMKETLYDEVLAKQKREQKLIPTKTDKKKAEKKKNKKKEIQNGNLHESDSESVPRDFKLSDALAVEDDQVAPVPLNVVETSSSVRERKKKEKKQKPVLEEQVIKESDASKIPGKKVEPVPVTKQPTPPSEAAASKKKPGQKKSKNGSDDQDKKVETLMVPSKRQEALPLHQETKQESGSGKKKASSKKQKTENVFVDEPLIHATTYIPLMDNADSSPVVDKREVIDLLKPDQVEGIQKSGTKKLKTETDKENAEVKFKDFLLSLKTMMFSEDEALCVVDLLKEKSGVIQDALKKSSKGELTTLIHQLQEKDKLLAAVKEDAAATKDRCKQLTQEMMTEKERSNVVITRMKDRIGTLEKEHNVFQNKIHVSYQETQQMQMKFQQVREQMEAEIAHLKQENGILRDAVSNTTNQLESKQSAELNKLRQDYARLVNELTEKTGKLQQEEVQKKNAEQAATQLKVQLQEAERRWEEVQSYIRKRTAEHEAAQQDLQSKFVAKENEVQSLHSKLTDTLVSKQQLEQRLMQLMESEQKRVNKEESLQMQVQDILEQNEALKAQIQQFHSQIAAQTSASVLAEELHKVIAEKDKQIKQTEDSLASERDRLTSKEEELKDIQNMNFLLKAEVQKLQALANEQAAAAHELEKMQQSVYVKDDKIRLLEEQLQHEISNKMEEFKILNDQNKALKSEVQKLQTLVSEQPNKDVVEQMEKCIQEKDEKLKTVEELLETGLIQVATKEEELNAIRTENSSLTKEVQDLKAKQNDQVSFASLVEELKKVIHEKDGKIKSVEELLEAELLKVANKEKTVQDLKQEIKALKEEIGNVQLEKAQQLSITSKVQELQNLLKGKEEQMNTMKAVLEEKEKDLANTGKWLQDLQEENESLKAHVQEVAQHNLKEASSASQFEELEIVLKEKENELKRLEAMLKERESDLSSKTQLLQDVQDENKLFKSQIEQLKQQNYQQASSFPPHEELLKVISEREKEISGLWNELDSLKDAVEHQRKKNNERQQQVEAVELEAKEVLKKLFPKVSVPSNLSYGEWLHGFEKKAKECMAGTSGSEEVKVLEHKLKEADEMHTLLQLECEKYKSVLAETEGILQKLQRSVEQEENKWKVKVDESHKTIKQMQSSFTSSEQELERLRSENKDIENLRREREHLEMELEKAEMERSTYVTEVRELKAQLNETLTKLRTEQNERQKVAGDLHKAQQSLELIQSKIVKAAGDTTVIENSDVSPETESSEKETMSVSLNQTVTQLQQLLQAVNQQLTKEKEHYQVLE

SEQ ID NO: 44186 - protein, 1306 aa, Homo sapiens; identical to SEQ ID NO: 44181
  Payload ID: 9009
  Gene Symbol: KTN1
  Gene Name: kinectin 1 (kinesin receptor)
  Uniprot ID: Q86UP2
  ENSP ID: ENSP00000394992

SEQ ID NO: 44187 - protein, 1357 aa, Homo sapiens; identical to SEQ ID NO: 44184
  Payload ID: 9009
  Gene Symbol: KTN1
  Gene Name: kinectin 1 (kinesin receptor)
  Uniprot ID: Q86UP2
  ENSP ID: ENSP00000432149

SEQ ID NO: 44188 - protein, 16 aa, Homo sapiens
  Payload ID: 9009
  Gene Symbol: KTN1
  Gene Name: kinectin 1 (kinesin receptor)
  ENSP ID: ENSP00000451139
  MOD_RES (1)..(1): Any amino acid
XKEHYQVLGAFCLTLE

SEQ ID NO: 44189 - protein, 60 aa, Homo sapiens
  Payload ID: 9009
  Gene Symbol: KTN1
  Gene Name: kinectin 1 (kinesin receptor)
  ENSP ID: ENSP00000451641
MEFYESAYFIVLIPSIVITVIFLFFWLFMKETLYDEVLAKQKREQKLIPTKTDKKKAEKK

SEQ ID NO: 44190 - protein, 334 aa, Homo sapiens
  Payload ID: 9009
  Gene Symbol: KTN1
  Gene Name: kinectin 1 (kinesin receptor)
  ENSP ID: ENSP00000451698
MFWFRISEREKEISGLWNELDSLKDAVEHQRKKNNDLREKNWEAMEALASTEKMLQDKVNKTSKERQQQVEAVELEAKEVLKKLFPKVSVPSNLSYGEWLHGFEKKAKECMAGTSGSEEVKVLEHKLKEADEMHTLLQLECEKYKSVLAETEGILQKLQRSVEQEENKWKVKVDESHKTIKQMQSSFTSSEQELERLRSENKDIENLRREREHLEMELEKAEMERSTYVTEVRELKAQLNETLTKLRTEQNERQKVAGDLHKAQQSLELIQSKIVKAAGDTTVIENSDVSPETESSEKETMSVSLNQTVTQLQQLLQAVNQQLTKEKEHYQVLE

SEQ ID NO: 44191 - protein, 138 aa, Homo sapiens
  Payload ID: 9009
  Gene Symbol: KTN1
  Gene Name: kinectin 1 (kinesin receptor)
  ENSP ID: ENSP00000451876
  MOD_RES (1)..(1): Any amino acid
XRREREHLEMELEKAEMERSTYVTEVRELKAQLNETLTKLRTEQNERQKVAGDLHKAQQSLELIQSKIVKAAGDTTVIENSDVSPETESSEKETMSVSLNQTVTQLQQLLQAVNQQLTKEKEHYQVLDTMVGDAAAIL

SEQ ID NO: 44192 - protein, 75 aa, Homo sapiens
  Payload ID: 9009
  Gene Symbol: KTN1
  Gene Name: kinectin 1 (kinesin receptor)
  ENSP ID: ENSP00000451878
MEFYESAYFIVLIPSIVITVIFLFFWLFMKETLYDEVLAKQKREQKLIPTKTDKKKAEKKKNKKKEIQNGNLHES

SEQ ID NO: 44193 - protein, 595 aa, Homo sapiens
  Payload ID: 9009
  Gene Symbol: KTN1
  Gene Name: kinectin 1 (kinesin receptor)
  ENSP ID: ENSP00000452073
MVPSCCFFRCRKQKDNRYQPNKDVVEQMEKCIQEKDEKLKTVEELLETGLIQVATKEEELNAIRTENSSLTKEVQDLKAKQNDQVSFASLVEELKKVIHEKDGKIKSVEELLEAELLKVANKEKTVQDLKQEIKALKEEIGNVQLEKAQQLSITSKVQELQNLLKGKEEQMNTMKAVLEEKEKDLANTGKWLQDLQEENESLKAHVQEVAQHNLKEASSASQFEELEIVLKEKENELKRLEAMLKERESDLSSKTQLLQDVQDENKLFKSQIEQLKQQNYQQASSFPPHEELLKVISEREKEISGLWNELDSLKDAVEHQRKKNNERQQQVEAVELEAKEVLKKLFPKVSVPSNLSYGEWLHGFEKKAKECMAGTSGSEEVKVLEHKLKEADEMHTLLQLECEKYKSVLAETEGILQKLQRSVEQEENKWKVKVDESHKTIKQMQSSFTSSEQELERLRSENKDIENLRREREHLEMELEKAEMERSTYVTEVRELKAQLNETLTKLRTEQNERQKVAGDLHKAQQSLELIQSKIVKAAGDTTVIENSDVSPETESSEKETMSVSLNQTVTQLQQLLQAVNQQLTKEKEHYQVLE

SEQ ID NO: 44194 - protein, 91 aa, Homo sapiens
  Payload ID: 9009
  Gene Symbol: KTN1
  Gene Name: kinectin 1 (kinesin receptor)
  ENSP ID: ENSP00000452205
  MOD_RES (1)..(1): Any amino acid
XDLSSKTQLLQDVQDENKLFKSQIEQLKQQNYQQASSFPPHEELLKVISEREKEISGLWNELDSLKDAVEHQRKKNNEGMVMQQQQQRWRH

SEQ ID NO: 44195 - protein, 162 aa, Homo sapiens
  Payload ID: 9009
  Gene Symbol: KTN1
  Gene Name: kinectin 1 (kinesin receptor)
  ENSP ID: ENSP00000452337
MVPSCCFFRCRKQKDNRYQPNKDVVEQMEKCIQEKDEKLKTVEELLETGLIQAIRTENSSLTKEVQDLKAKQNDQVSFASLVEELKKVIHEKDGKIKSVEELLEAELLKVANKEKTVQDLKQEIKALKEEIGNVQLEKAQQLSITSKVQELQNLLKGKEEQM

SEQ ID NO: 44196 - protein, 160 aa, Homo sapiens
  Payload ID: 9009
  Gene Symbol: KTN1
  Gene Name: kinectin 1 (kinesin receptor)
  ENSP ID: ENSP00000452445
MEALASTEKMLQDKVNKTSKERQQQVEAVELEAKEVLKKLFPKVSVPSNLSYGEWLHGFEKKAKECMAGTSGSEEVKVLEHKLKEADEMHTLLQLECEKYKSVLAETEGILQKLQRSVEQEENKWKVKVDESHKTIKQMQSSFTSSEQELERLRSENKDI

SEQ ID NO: 44197 - protein, 14 aa, Homo sapiens
  Payload ID: 9009
  Gene Symbol: KTN1
  Gene Name: kinectin 1 (kinesin receptor)
  ENSP ID: ENSP00000452459
MQLMESEQKRVNKE

SEQ ID NO: 44198 - protein, 153 aa, Homo sapiens
  Payload ID: 9009
  Gene Symbol: KTN1
  Gene Name: kinectin 1 (kinesin receptor)
  ENSP ID: ENSP00000452576
VSEQPNKDVVEQMEKCIQEKDEKLKTVEELLETGLIQVATKEEELNAIRTENSSLTKEVQDLKAKQNDQVSFASLVEELKKVIHEKDGKIKSVEELLEAELLKVANKEKTVQDLKQEIKALKEEIGNVQLEKAQQIESSGKSSPEELTSKPRI

SEQ ID NO: 44199 - protein, 1056 aa, Homo sapiens
  Payload ID: 9010
  Gene Symbol: KIF11
  Gene Name: kinesin family member 11
  Uniprot ID: P52732
  ENSP ID: ENSP00000260731
MASQPNSSAKKKEEKGKNIQVVVRCRPFNLAERKASAHSIVECDPVRKEVSVRTGGLADKSSRKTYTFDMVFGASTKQIDVYRSVVCPILDEVIMGYNCTIFAYGQTGTGKTFTMEGERSPNEEYTWEEDPLAGIIPRTLHQIFEKLTDNGTEFSVKVSLLEIYNEELFDLLNPSSDVSERLQMFDDPRNKRGVIIKGLEEITVHNKDEVYQILEKGAAKRTTAATLMNAYSSRSHSVFSVTIHMKETTIDGEELVKIGKLNLVDLAGSENIGRSGAVDKRAREAGNINQSLLTLGRVITALVERTPHVPYRESKLTRILQDSLGGRTRTSIIATISPASLNLEETLSTLEYAHRAKNILNKPEVNQKLTKKALIKEYTEEIERLKRDLAAAREKNGVYISEENFRVMSGKLTVQEEQIVELIEKIGAVEEELNRVTELFMDNKNELDQCKSDLQNKTQELETTQKHLQETKLQLVKEEYITSALESTEEKLHDAASKLLNTVEETTKDVSGLHSKLDRKKAVDQHNAEAQDIFGKNLNSLFNNMEELIKDGSSKQKAMLEVHKTLFGNLLSSSVSALDTITTVALGSLTSIPENVSTHVSQIFNMILKEQSLAAESKTVLQELINVLKTDLLSSLEMILSPTVVSILKINSQLKHIFKTSLTVADKIEDQKKELDGFLSILCNNLHELQENTICSLVESQKQCGNLTEDLKTIKQTHSQELCKLMNLWTERFCALEEKCENIQKPLSSVQENIQQKSKDIVNKMTFHSQKFCADSDGFSQELRNFNQEGTKLVEESVKHSDKLNGNLEKISQETEQRCESLNTRTVYFSEQWVSSLNEREQELHNLLEVVSQCCEASSSDITEKSDGRKAAHEKQHNIFLDQMTIDEDKLIAQNLELNETIKIGLTKLNCFLEQDLKLDIPTGTTPQRKSYLYPSTLVRTEPREHLLDQLKRKQPELLMMLNCSENNKEETIPDVDVEEAVLGQYTEEPLSQEPSVDAGVDCSSIGGVPFFQHKKSHGKDKENRGINTLERSKVEETTEHLVTKSRLPLRAQINL

SEQ ID NO: 44200 - protein, 513 aa, Homo sapiens
  Payload ID: 9011
  Gene Symbol: KIF12
  Gene Name: kinesin family member 12
  ENSP ID: ENSP00000363232
MQRTFAWLLDRVQHLGAPVTLRASYLEIYNEQVRDLLSLGSPRPLPVRWNKTRGFYVEQLRVVEFGSLEALMELLQTGLSRRRNSAHTLNQASSRSHALLTLYISRQTAQQMPSVDPGEPPVGGKLCFVDLAGSEKVAATGSRGELMLEANSINRSLLALGHCISLLLDPQRKQSHIPFRDSKLTKLLADSLGGRGVTLMVACVSPSAQCLPETLSTLRYASRAQRVTTRPQAPKSPVAKQPQRLETEMLQLQEENRRLQFQLDQMDCKASGLSGARVAWAQRNLYGMLQEFMLENERLRKEKSQLQNSRDLAQNEQRILAQQVHALERRLLSACYHHQQGPGLTPPCPCLMAPAPPCHALPPLYSCPCCHICPLCRVPLAHWACLPGEHHLPQVLDPEASGGRPPSARPPPWAPPCSPGSAKCPRERSHSDWTQTRVLAEMLTEEEVVPSAPPLPVRPPKTSPGLRGGAGVPNLAQRLEALRDQIGSSLRRGRSQPPCSEGARSPGQVLPPH

SEQ ID NO: 44201 - protein, 333 aa, Homo sapiens
  Payload ID: 9011
  Gene Symbol: KIF12
  Gene Name: kinesin family member 12
  ENSP ID: ENSP00000473459
MELLQTGLSRRRNSAHTLNQASSRSHALLTLYISRQTAQQMPSVDPGEPPVGGKLCFVDLAGSEKVAATGSRGELMLEANSINRSLLALGHCISLLLDPQRKQSHIPFRDSKLTKLLADSLGGRGVTLMVACVSPSAQCLPETLSTLRYASRAQRVTTRPQAPKSPVAKQPQRLETEMLQLQEENRRLQFQLDQMDCKASGLSGARVAWAQRNLYGMLQEFMLENERLRKEKSQLQNSRDLAQNEQRILAQQVHALERRLLSACYHHQQGPGLTPPCPCLMAPAPPCHALPPLYSCPCCHICPLCRVPLAHWACLPGEHHLPQPLFWALRSQK

SEQ ID NO: 44202 - protein, 1805 aa, Homo sapiens
  Payload ID: 9012
  Gene Symbol: KIF13A
  Gene Name: kinesin family member 13A
  Uniprot ID: Q9H1H9
  ENSP ID: ENSP00000259711
MSDTKVKVAVRVRPMNRRELELNTKCVVEMEGNQTVLHPPPSNTKQGERKPPKVFAFDYCFWSMDESNTTKYAGQEVVFKCLGEGILEKAFQGYNACIFAYGQTGSGKSFSMMGHAEQLGLIPRLCCALFKRISLEQNESQTFKVEVSYMEIYNEKVRDLLDPKGSRQSLKVREHKVLGPYVDGLSQLAVTSFEDIESLMSEGNKSRTVAATNMNEESSRSHAVFNIIITQTLYDLQSGNSGEKVSKVSLVDLAGSERVSKTGAAGERLKEGSNINKSLTTLGLVISSLADQAAGKGKSKFVPYRDSVLTWLLKDNLGGNSQTSMIATISPAADNYEETLSTLRYADRAKRIVNHAVVNEDPNAKVIRELREEVEKLREQLSQAEAMKAPELKEKLEESEKLIKELTVTWEEKLRKTEEIAQERQRQLESMGISLEMSGIKVGDDKCYLVNLNADPALNELLVYYLKDHTRVGADTSQDIQLFGIGIQPQHCEIDIASDGDVTLTPKENARSCVNGTLVCSTTQLWHGDRILWGNNHFFRINLPKRKRRDWLKDFEKETGPPEHDLDAASEASSEPDYNYEFAQMEVIMKTLNSNDPVQNVVQVLEKQYLEEKRSALEEQRLMYERELEQLRQQLSPDRQPQSSGPDRLAYSSQTAQQKVTQWAEERDELFRQSLAKLREQLVKANTLVREANFLAEEMSKLTDYQVTLQIPAANLSANRKRGAIVSEPAIQVRRKGKSTQVWTIEKLENKLIDMRDLYQEWKEKVPEAKRLYGKRGDPFYEAQENHNLIGVANVFLECLFCDVKLQYAVPIISQQGEVAGRLHVEVMRVTGAVPERVVEDDSSENSSESGSLEVVDSSGEIIHRVKKLTCRVKIKEATGLPLNLSNFVFCQYTFWDQCESTVAAPVVDPEVPSPQSKDAQYTVTFSHCKDYVVNVTEEFLEFISDGALAIEVWGHRCAGNGSSIWEVDSLHAKTRTLHDRWNEVTRRIEMWISILELNELGEYAAVELHQAKDVNTGGIFQLRQGHSRRVQVTVKPVQHSGTLPLMVEAILSVSIGCVTARSTKLQRGLDSYQRDDEDGDDMDSYQEEDLNCVRERWSDALIKRREYLDEQIKKVSNKTEKTEDDVEREAQLVEQWVGLTEERNAVLVPAPGSGIPGAPADWIPPPGMETHIPVLFLDLNADDLSANEQLVGPHASGVNSILPKEHGSQFFYLPIIKHSDDEVSATASWDSSVHDSVHLNRVTPQNERIYLIVKTTVQLSHPAAMELVLRKRIAANIYNKQSFTQSLKRRISLKNIFYSCGVTYEIVSNIPKATEEIEDRETLALLAARSENEGTSDGETYIEKYTRGVLQVENILSLERLRQAVTVKEALSTKARHIRRSLSTPNVHNVSSSRPDLSGFDEDDKGWPENQLDMSDYSSSYQDVACYGTLPRDSPRRNKEGCTSETPHALTVSPFKAFSPQPPKFFKPLMPVKEEHKKRIALEARPLLSQESMPPPQAHNPGCIVPSGSNGSSMPVEHNSKREKKIDSEEEENELEAINRKLISSQPYVPVEFADFSVYNASLENREWFSSKVDLSNSRVLEKEVSRSPTTSSITSGYFSHSASNATLSDMVVPSSDSSDQLAIQTKDADSTEHSTPSLVHDFRPSSNKELTEVEKGLVKDKIIVVPLKENSALAKGSPSSQSIPEKNSKSLCRTGSCSELDACPSKISQPARGFCPREVTVEHTTNILEDHSFTEFMGVSEGKDFDGLTDSSAGELSSRRSLPNKTGGKTVSDGLHHPSQLHSKLENDQVIIPEAAFWVLCCQ

SEQ ID NO: 44203 - protein, 889 aa, Homo sapiens
  Payload ID: 9012
  Gene Symbol: KIF13A
  Gene Name: kinesin family member 13A
  ENSP ID: ENSP00000351150
  MOD_RES (1)..(1): Any amino acid
XQYLEEKRSALEEQRLMYERELEQLRQQLSPDRQPQSSGPDRLAYSSQTAQQKVTQWAEERDELFRQSLAKLREQLVKANTLVREANFLAEEMSKLTDYQVTLQIPAANLSANRKRGAIVSEPAIQVRRKGKSTQVWTIEKLENKLIDMRDLYQEWKEKVPEAKRLYGKRGDPFYEAQENHNLIGVANVFLECLFCDVKLQYAVPIISQQGEVAGRLHVEVMRVTGAVPERVVEDDSSENSSESGSLEVVDSSGEIIHRVKKLTCRVKIKEATGLPLNLSNFVFCQYTFWDQCESTVAAPVVDPEVPSPQSKDAQYTVTFSHCKDYVVNVTEEFLEFISDGALAIEVWGHRCAGNGSSIWEVDSLHAKTRTLHDRWNEVTRRIEMWISILELNELGEYAAVELHQAKDVNTGGIFQLRQGHSRRVQVTVKPVQHSGTLPLMVEAILSVSIGCVTARSTKLQRGLDSYQRDDEDGDDMDSYQEEDLNCVRERWSDALIKRREYLDEQIKKVSNKTEKTEDDVEREAQLVEQWVGLTEERNAVLVPAPGSGIPGAPADWIPPPGMETHIPVLFLDLNADDLSANEQLVGPHASGVNSILPKEHGSQFFYLPIIKHSDDEVSATASWDSSVHDSVHLNRVTPQNERIYLIVKTTVQLSHPAAMELVLRKRIAANIYNKQSFTQSLKRRISLKNIFYSCGVTYEIVSNIPKATEEIEDRETLALLAARSENEGTSDGETYIEKYTRGVLQVENILSLERLRQAVTVKEALSTKARHIRRSLSTPNVHNVSSSRPDLSGFDEDDKGWPENQLDMSDYSSSYQDVACYGTLPRDSPRRNKEGCTSETPHALTVSPFKAFSPQPPKFFKPLMPVKEEHKKRIALEARPLLSQEVNA

SEQ ID NO: 44204 - protein, 1749 aa, Homo sapiens
  Payload ID: 9012
  Gene Symbol: KIF13A
  Gene Name: kinesin family member 13A
  Uniprot ID: Q9H1H9
  ENSP ID: ENSP00000368091
MSDTKVKVAVRVRPMNRRELELNTKCVVEMEGNQTVLHPPPSNTKQGERKPPKVFAFDYCFWSMDESNTTKYAGQEVVFKCLGEGILEKAFQGYNACIFAYGQTGSGKSFSMMGHAEQLGLIPRLCCALFKRISLEQNESQTFKVEVSYMEIYNEKVRDLLDPKGSRQSLKVREHKVLGPYVDGLSQLAVTSFEDIESLMSEGNKSRTVAATNMNEESSRSHAVFNIIITQTLYDLQSGNSGEKVSKVSLVDLAGSERVSKTGAAGERLKEGSNINKSLTTLGLVISSLADQAAGKGKSKFVPYRDSVLTWLLKDNLGGNSQTSMIATISPAADNYEETLSTLRYADRAKRIVNHAVVNEDPNAKVIRELREEVEKLREQLSQAEAMKAPELKEKLEESEKLIKELTVTWEEKLRKTEEIAQERQRQLESMGISLEMSGIKVGDDKCYLVNLNADPALNELLVYYLKDHTRVGADTSQDIQLFGIGIQPQHCEIDIASDGDVTLTPKENARSCVNGTLVCSTTQLWHGDRILWGNNHFFRINLPKRKRRDWLKDFEKETGPPEHDLDAASEASSEPDYNYEFAQMEVIMKTLNSNDPVQNVVQVLEKQYLEEKRSALEEQRLMYERELEQLRQQLSPDRQPQSSGPDRLAYSSQTAQQKVTQWAEERDELFRQSLAKLREQLVKANTLVREANFLAEEMSKLTDYQVTLQIPAANLSANRKRGAIVSEPAIQVRRKGKSTQVWTIEKLENKLIDMRDLYQEWKEKVPEAKRLYGKRGDPFYEAQENHNLIGVANVFLECLFCDVKLQYAVPIISQQGEVAGRLHVEVMRVTGAVPERVVEDDSSENSSESGSLEVVDSSGEIIHRVKKLTCRVKIKEATGLPLNLSNFVFCQYTFWDQCESTVAAPVVDPEVPSPQSKDAQYTVTFSHCKDYVVNVTEEFLEFISDGALAIEVWGHRCAGNGSSIWEVDSLHAKTRTLHDRWNEVTRRIEMWISILELNELGEYAAVELHQAKDVNTGGIFQLRQGHSRRVQVTVKPVQHSGTLPLMVEAILSVSIGCVTARSTKLQRGLDSYQEEDLNCVRERWSDALIKRREYLDEQIKKVSNKTEKTEDDVEREAQLVEQWVGLTEERNAVLVPAPGSGIPGAPADWIPPPGMETHIPVLFLDLNADDLSANEQLVGPHASGVNSILPKEHGSQFFYLPIIKHSDDEVSATASWDSSVHDSVHLNRVTPQNERIYLIVKTTVQLSHPAAMELVLRKRIAANIYNKQSFTQSLKRRISLKNIFYSCGVTYEIVSNIPKATEEIEDRETLALLAARSENEGTSDGETYIEKYTRGVLQVENILSLERLRQAVTVKEALSTKARHIRRSLSTPNVHNVSSSRPDLSGFDEDDKGWPENQLDMSDYSSSYQDVACYGTLPRDSPRRNKEGCTSETPHALTVSPFKAFSPQPPKFFKPLMPVKEEHKKRIALEARPLLSQEDSEEEENELEAINRKLISSQPYVPVEFADFSVYNASLENREWFSSKVDLSNSRVLEKEVSRSPTTSSITSGYFSHSASNATLSDMVVPSSDSSDQLAIQTKDADSTEHSTPSLVHDFRPSSNKELTEVEKGLVKDKIIVVPLKENSALAKGSPSSQSIPEKNSKSLCRTGSCSELDACPSKISQPARGFCPREVTVEHTTNILEDHSFTEFMGVSEGKDFDGLTDSSAGELSSRRSLPNKTGGKTVSDGLHHPSQLHSKLENDQGGTTSR

SEQ ID NO: 44205 - protein, 1770 aa, Homo sapiens
  Payload ID: 9012
  Gene Symbol: KIF13A
  Gene Name: kinesin family member 13A
  Uniprot ID: Q9H1H9
  ENSP ID: ENSP00000368103
MSDTKVKVAVRVRPMNRRELELNTKCVVEMEGNQTVLHPPPSNTKQGERKPPKVFAFDYCFWSMDESNTTKYAGQEVVFKCLGEGILEKAFQGYNACIFAYGQTGSGKSFSMMGHAEQLGLIPRLCCALFKRISLEQNESQTFKVEVSYMEIYNEKVRDLLDPKGSRQSLKVREHKVLGPYVDGLSQLAVTSFEDIESLMSEGNKSRTVAATNMNEESSRSHAVFNIIITQTLYDLQSGNSGEKVSKVSLVDLAGSERVSKTGAAGERLKEGSNINKSLTTLGLVISSLADQAAGKGKSKFVPYRDSVLTWLLKDNLGGNSQTSMIATISPAADNYEETLSTLRYADRAKRIVNHAVVNEDPNAKVIRELREEVEKLREQLSQAEAMKAPELKEKLEESEKLIKELTVTWEEKLRKTEEIAQERQRQLESMGISLEMSGIKVGDDKCYLVNLNADPALNELLVYYLKDHTRVGADTSQDIQLFGIGIQPQHCEIDIASDGDVTLTPKENARSCVNGTLVCSTTQLWHGDRILWGNNHFFRINLPKRKRRDWLKDFEKETGPPEHDLDAASEASSEPDYNYEFAQMEVIMKTLNSNDPVQNVVQVLEKQYLEEKRSALEEQRLMYERELEQLRQQLSPDRQPQSSGPDRLAYSSQTAQQKVTQWAEERDELFRQSLAKLREQLVKANTLVREANFLAEEMSKLTDYQVTLQIPAANLSANRKRGAIVSEPAIQVRRKGKSTQVWTIEKLENKLIDMRDLYQEWKEKVPEAKRLYGKRGDPFYEAQENHNLIGVANVFLECLFCDVKLQYAVPIISQQGEVAGRLHVEVMRVTGAVPERVVEDDSSENSSESGSLEVVDSSGEIIHRVKKLTCRVKIKEATGLPLNLSNFVFCQYTFWDQCESTVAAPVVDPEVPSPQSKDAQYTVTFSHCKDYVVNVTEEFLEFISDGALAIEVWGHRCAGNGSSIWEVDSLHAKTRTLHDRWNEVTRRIEMWISILELNELGEYAAVELHQAKDVNTGGIFQLRQGHSRRVQVTVKPVQHSGTLPLMVEAILSVSIGCVTARSTKLQRGLDSYQRDDEDGDDMDSYQEEDLNCVRERWSDALIKRREYLDEQIKKVSNKTEKTEDDVEREAQLVEQWVGLTEERNAVLVPAPGSGIPGAPADWIPPPGMETHIPVLFLDLNADDLSANEQLVGPHASGVNSILPKEHGSQFFYLPIIKHSDDEVSATASWDSSVHDSVHLNRVTPQNERIYLIVKTTVQLSHPAAMELVLRKRIAANIYNKQSFTQSLKRRISLKNIFYSCGVTYEIVSNIPKATEEIEDRETLALLAARSENEGTSDGETYIEKYTRGVLQVENILSLERLRQAVTVKEALSTKARHIRRSLSTPNVHNVSSSRPDLSGFDEDDKGWPENQLDMSDYSSSYQDVACYGTLPRDSPRRNKEGCTSETPHALTVSPFKAFSPQPPKFFKPLMPVKEEHKKRIALEARPLLSQEDSEEEENELEAINRKLISSQPYVPVEFADFSVYNASLENREWFSSKVDLSNSRVLEKEVSRSPTTSSITSGYFSHSASNATLSDMVVPSSDSSDQLAIQTKDADSTEHSTPSLVHDFRPSSNKELTEVEKGLVKDKIIVVPLKENSALAKGSPSSQSIPEKNSKSLCRTGSCSELDACPSKISQPARGFCPREVTVEHTTNILEDHSFTEFMGVSEGKDFDGLTDSSAGELSSRRSLPNKTGGKTVSDGLHHPSQLHSKLENDQVIIPEAAFWVLCCQ

SEQ ID NO: 44206 - protein, 1757 aa, Homo sapiens
  Payload ID: 9012
  Gene Symbol: KIF13A
  Gene Name: kinesin family member 13A
  Uniprot ID: Q9H1H9
  ENSP ID: ENSP00000368120
MSDTKVKVAVRVRPMNRRELELNTKCVVEMEGNQTVLHPPPSNTKQGERKPPKVFAFDYCFWSMDESNTTKYAGQEVVFKCLGEGILEKAFQGYNACIFAYGQTGSGKSFSMMGHAEQLGLIPRLCCALFKRISLEQNESQTFKVEVSYMEIYNEKVRDLLDPKGSRQSLKVREHKVLGPYVDGLSQLAVTSFEDIESLMSEGNKSRTVAATNMNEESSRSHAVFNIIITQTLYDLQSGNSGEKVSKVSLVDLAGSERVSKTGAAGERLKEGSNINKSLTTLGLVISSLADQAAGKGKSKFVPYRDSVLTWLLKDNLGGNSQTSMIATISPAADNYEETLSTLRYADRAKRIVNHAVVNEDPNAKVIRELREEVEKLREQLSQAEAMKAPELKEKLEESEKLIKELTVTWEEKLRKTEEIAQERQRQLESMGISLEMSGIKVGDDKCYLVNLNADPALNELLVYYLKDHTRVGADTSQDIQLFGIGIQPQHCEIDIASDGDVTLTPKENARSCVNGTLVCSTTQLWHGDRILWGNNHFFRINLPKRKRRDWLKDFEKETGPPEHDLDAASEASSEPDYNYEFAQMEVIMKTLNSNDPVQNVVQVLEKQYLEEKRSALEEQRLMYERELEQLRQQLSPDRQPQSSGPDRLAYSSQTAQQKVTQWAEERDELFRQSLAKLREQLVKANTLVREANFLAEEMSKLTDYQVTLQIPAANLSANRKRGAIVSEPAIQVRRKGKSTQVWTIEKLENKLIDMRDLYQEWKEKVPEAKRLYGKRGDPFYEAQENHNLIGVANVFLECLFCDVKLQYAVPIISQQGEVAGRLHVEVMRVTGAVPERVVEDDSSENSSESGSLEVVDSSGEIIHRVKKLTCRVKIKEATGLPLNLSNFVFCQYTFWDQCESTVAAPVVDPEVPSPQSKDAQYTVTFSHCKDYVVNVTEEFLEFISDGALAIEVWGHRCAGNGSSIWEVDSLHAKTRTLHDRWNEVTRRIEMWISILELNELGEYAAVELHQAKDVNTGGIFQLRQGHSRRVQVTVKPVQHSGTLPLMVEAILSVSIGCVTARSTKLQRGLDSYQEEDLNCVRERWSDALIKRREYLDEQIKKVSNKTEKTEDDVEREAQLVEQWVGLTEERNAVLVPAPGSGIPGAPADWIPPPGMETHIPVLFLDLNADDLSANEQLVGPHASGVNSILPKEHGSQFFYLPIIKHSDDEVSATASWDSSVHDSVHLNRVTPQNERIYLIVKTTVQLSHPAAMELVLRKRIAANIYNKQSFTQSLKRRISLKNIFYSCGVTYEIVSNIPKATEEIEDRETLALLAARSENEGTSDGETYIEKYTRGVLQVENILSLERLRQAVTVKEALSTKARHIRRSLSTPNVHNVSSSRPDLSGFDEDDKGWPENQLDMSDYSSSYQDVACYGTLPRDSPRRNKEGCTSETPHALTVSPFKAFSPQPPKFFKPLMPVKEEHKKRIALEARPLLSQEDSEEEENELEAINRKLISSQPYVPVEFADFSVYNASLENREWFSSKVDLSNSRVLEKEVSRSPTTSSITSGYFSHSASNATLSDMVVPSSDSSDQLAIQTKDADSTEHSTPSLVHDFRPSSNKELTEVEKGLVKDKIIVVPLKENSALAKGSPSSQSIPEKNSKSLCRTGSCSELDACPSKISQPARGFCPREVTVEHTTNILEDHSFTEFMGVSEGKDFDGLTDSSAGELSSRRSLPNKTGGKTVSDGLHHPSQLHSKLENDQVIIPEAAFWVLCCQ

SEQ ID NO: 44207 - protein, 270 aa, Homo sapiens
  Payload ID: 9012
  Gene Symbol: KIF13A
  Gene Name: kinesin family member 13A
  ENSP ID: ENSP00000422808
LEFISDGALAIEVWGHRCAGNGSSIWEVDSLHAKTRTLHDRWNEVTRRIEMWISILELNELGEYAAVELHQAKDVNTGGIFQLRQEEDLNCVRERWSDALIKRREYLDEQIKKVSNKTEKTEDDVEREAQLVEQWVGLTEERNAVLVPAPGSGIPGAPADWIPPPGMETHIPVLFLDLNADDLSANEQLVGPHASGVNSILPKEHGSQFFYLPIIKHSDDEVSATASWDSSVHDSVHLNRVTPQNERIYLIVKTTVQLSHPAAMELVLRK

SEQ ID NO: 44208 - protein, 70 aa, Homo sapiens
  Payload ID: 9012
  Gene Symbol: KIF13A
  Gene Name: kinesin family member 13A
  Uniprot ID: Q9H1H9
  ENSP ID: ENSP00000425453
MSDTKVKVAVRVRPMNRRELELNTKCVVEMEGNQTVLHPPPSNTKQGERLVTVAHISNSSTLGGQGKRIT

SEQ ID NO: 44209 - protein, 801 aa, Homo sapiens
  Payload ID: 9012
  Gene Symbol: KIF13A
  Gene Name: kinesin family member 13A
  ENSP ID: ENSP00000425616
EVTRRIEMWISILELNELGEYAAVELHQAKDVNTGGIFQLRQGHSRRVQVTVKPVQHSGTLPLMVEAILSVSIGCVTARSTKLQRGLDSYQEEDLNCVRERWSDALIKRREYLDEQIKKVSNKTEKTEDDVEREAQLVEQWVGLTEERNAVLVPAPGSGIPGAPADWIPPPGMETHIPVLFLDLNADDLSANEQLVGPHASGVNSILPKEHGSQFFYLPIIKHSDDEVSATASWDSSVHDSVHLNRVTPQNERIYLIVKTTVQLSHPAAMELVLRKRIAANIYNKQSFTQSLKRRISLKNIFYSCGVTYEIVSNIPKATEEIEDRETLALLAARSENEGTSDGETYIEKYTRGVLQVENILSLERLRQAVTVKEALSTKARHIRRSLSTPNVHNVSSSRPDLSGFDEDDKGWPENQLDMSDYSSSYQDVACYGTLPRDSPRRNKEGCTSETPHALTVSPFKAFSPQPPKFFKPLMPVKEEHKKRIALEARPLLSQESMPPPQAHNPGCIVPSGSNGSSMPVEHNSKREKKIDSEEEENELEAINRKLISSQPYVPVEFADFSVYNASLENREWFSSKVDLSNSRVLEKEVSRSPTTSSITSGYFSHSASNATLSDMVVPSSDSSDQLAIQTKDADSTEHSTPSLVHDFRPSSNKELTEVEKGLVKDKIIVVPLKENSALAKGSPSSQSIPEKNSKSLCRTGSCSELDACPSKISQPARGFCPREVTVEHTTNILEDHSFTEFMGVSEGKDFDGLTDSSAGELSSRRSLPNKTGGKTVSDGLHHPSQLHSKLENDQGGTTSR

SEQ ID NO: 44210 - protein, 1826 aa, Homo sapiens
  Payload ID: 9013
  Gene Symbol: KIF13B
  Gene Name: kinesin family member 13B
  Uniprot ID: Q9NQT8
  ENSP ID: ENSP00000427900
MGDSKVKVAVRIRPMNRRETDLHTKCVVDVDANKVILNPVNTNLSKGDARGQPKVFAYDHCFWSMDESVKEKYAGQDIVFKCLGENILQNAFDGYNACIFAYGQTGSGKSYTMMGTADQPGLIPRLCSGLFERTQKEENEEQSFKVEVSYMEIYNEKVRDLLDPKGSRQTLKVREHSVLGPYVDGLSKLAVTSYKDIESLMSEGNKSRTVAATNMNEESSRSHAVFKITLTHTLYDVKSGTSGEKVGKLSLVDLAGSERATKTGAAGDRLKEGSNINKSLTTLGLVISALADQSAGKNKNKFVPYRDSVLTWLLKDSLGGNSKTAMVATVSPAADNYDETLSTLRYADRAKHIVNHAVVNEDPNARIIRDLREEVEKLREQLTKAEAMKSPELKDRLEESEKLIQEMTVTWEEKLRKTEEIAQERQKQLESLGISLQSSGIKVGDDKCFLVNLNADPALNELLVYYLKEHTLIGSANSQDIQLCGMGILPEHCIIDITSEGQVMLTPQKNTRTFVNGSSVSSPIQLHHGDRILWGNNHFFRLNLPKKKKKAEREDEDQDPSMKNENSSEQLDVDGDSSSEVSSEVNFNYEYAQMEVTMKALGSNDPMQSILNSLEQQHEEEKRSALERQRLMYEHELEQLRRRLSPEKQNCRSMDRFSFHSPSAQQRLRQWAEEREATLNNSLMRLREQIVKANLLVREANYIAEELDKRTEYKVTLQIPASSLDANRKRGSLLSEPAIQVRRKGKGKQIWSLEKLDNRLLDMRDLYQEWKECEEDNPVIRSYFKRADPFYDEQENHSLIGVANVFLESLFYDVKLQYAVPIINQKGEVAGRLHVEVMRLSGDVGERIAGGDEVAEVSFEKETQENKLVCMVKILQATGLPQHLSHFVFCKYSFWDQQEPVIVAPEVDTSSSSVSKEPHCMVVFDHCNEFSVNITEDFIEHLSEGALAIEVYGHKINDPRKNPALWDLGIIQAKTRSLRDRWSEVTRKLEFWVQILEQNENGEYCPVEVISAKDVPTGGIFQLRQGQSRRVQVEVKSVQESGTLPLMEECILSVGIGCVKVRPLRAPRTHETFHEEEEDMDSYQDRDLERLRRKWLNALTKRQEYLDQQLQKLVSKRDKTEDDADREAQLLEMRLTLTEERNAVMVPSAGSGIPGAPAEWTPVPGMETHIPVIFLDLNADDFSSQDNLDDPEAGGWDATLTGEEEEEFFELQIVKQHDGEVKAEASWDSAVHGCPQLSRGTPVDERLFLIVRVTVQLSHPADMQLVLRKRICVNVHGRQGFAQSLLKKMSHRSSIPGCGVTFEIVSNIPEDAQGVEEREALARMAANVENPASADSEAYIEKYLRSVLAVENLLTLDRLRQEVAVKEQLTGKGKLSRRSISSPNVNRLSGSRQDLIPSYSLGSNKGRWESQQDVSQTTVSRGIAPAPALSVSPQNNHSPDPGLSNLAASYLNPVKSFVPQMPKLLKSLFPVRDEKRGKRPSPLAHQPVPRIMVQSASPDIRVTRMEEAQPEMGPDVLVQTMGAPALKICDKPAKVPSPPPVIAVTAVTPAPEAQDGPPSPLSEASSGYFSHSVSTATLSDALGPGLDAAAPPGSMPTAPEAEPEAPISHPPPPTAVPAEEPPGPQQLVSPGRERPDLEAPAPGSPFRVRRVRASELRSFSRMLAGDPGCSPGAEGNAPAPGAGGQALASDSEEADEVPEWLREGEFVTVGAHKTGVVRYVGPADFQEGTWVGVELDLPSGKNDGSIGGKQYFRCNPGYGLLVRPSRVRRATGPVRRRSTGLRLGAPEARRSATLSGSATNLASLTAALAKADRSHKNPENRKSWAS

SEQ ID NO: 44211 - protein, 61 aa, Homo sapiens
  Payload ID: 9013
  Gene Symbol: KIF13B
  Gene Name: kinesin family member 13B
  ENSP ID: ENSP00000429027
MGDSKVKVAVRIRPMNRRETDLHTKCVVDVDANKVILNPVNTNLSKGDARLWKILYHDGHS

SEQ ID NO: 44212 - protein, 418 aa, Homo sapiens
  Payload ID: 9013
  Gene Symbol: KIF13B
  Gene Name: kinesin family member 13B
  ENSP ID: ENSP00000429106
LSGSRQDLIPSYSLGSNKGRWESQQDVSQTTVSRGIAPAPALSVSPQNNHSPDPGLSNLAASYLNPVKSFVPQMPKLLKSLFPVRDEKRGKRPSPLAHQAQPEMGPDVLVQTMGAPALKICDKPAKVPSPPPVIAVTAVTPAPEAQDGPPSPLSEASSGYFSHSVSTATLSDALGPGLDAAAPPGSMPTAPEAEPEAPISHPPPPTAVPAEEPPGPQQLVSPGRERPDLEAPAPGSPFRVRRVRASELRSFSRMLAGDPGCSPGAEGNAPAPGAGGQALASDSEEADEVPEWLREGEFVTVGAHKTGVVRYVGPADFQEGTWVGVELDLPSGKNDGSIGGKQYFRCNPGYGLLVRPSRVRRATGPVRRRSTGLRLGAPEARRSATLSGSATNLASLTAALAKADRSHKNPENRKSWAS

SEQ ID NO: 44213 - protein, 743 aa, Homo sapiens
  Payload ID: 9013
  Gene Symbol: KIF13B
  Gene Name: kinesin family member 13B
  ENSP ID: ENSP00000429201
MGDSKVKVAVRIRPMNRRETDLHTKCVVDVDANKVILNPVNTNLSKGDARGQPKVFAYDHCFWSMDESVKEKYAGQDIVFKCLGENILQNAFDGYNACIFAYGQTGSGKSYTMMGTADQPGLIPRLCSGLFERTQKEENEEQSFKVEVSYMEIYNEKVRDLLDPKGSRQTLKVREHSVLGPYVDGLSKLAVTSYKDIESLMSEGNKSRTVAATNMNEESSRSHAVFKITLTHTLYDVKSGTSGEKVGKLSLVDLAGSERATKTGAAGDRLKEGSNINKSLTTLGLVISALADQSAGKNKNKFVPYRDSVLTWLLKDSLGGNSKTAMVATVSPAADNYDETLSTLRYADRAKHIVNHAVVNEDPNARIIRDLREEVEKLREQLTKAEAMKSPELKDRLEESEKLIQEMTVTWEEKLRKTEEIAQERQKQLESLGISLQSSGIKVGDDKCFLVNLNADPALNELLVYYLKEHTLIGSANSQDIQLCGMGILPEHCIIDITSEGQVMLTPQKNTRTFVNGSSVSSPIQLHHGDRILWGNNHFFRLNLPKKKKKAEREDEDQDPSMKNENSSEQLDVDGDSSSEVSSEVNFNYEYAQMEVTMKALGSNDPMQSILNSLEQQHEEEKRSALERQRLMYEHELEQLRRRLSPEKQNCRSMDRFSFHSPSAQQRLRQWAEEREATLNNSLMRLREQIVKANLLVREANYIAEELDKRTEYKVTLQIPASSLDANRKVRLPFLEKNKDLIG

SEQ ID NO: 44214 - protein, 53 aa, Homo sapiens
  Payload ID: 9013
  Gene Symbol: KIF13B
  Gene Name: kinesin family member 13B
  ENSP ID: ENSP00000431006
MGDSKVKVAVRIRPMNRRDLTVRSQLIQYGQIPLSSGFKKLSWTSGPEEVKRD

SEQ ID NO: 44215 - protein, 1648 aa, Homo sapiens
  Payload ID: 9014
  Gene Symbol: KIF14
  Gene Name: kinesin family member 14
  Uniprot ID: Q15058
  ENSP ID: ENSP00000356319
MSLHSTHNRNNSGDILDIPSSQNSSSLNALTHSSRLKLHLKSDMSECENDDPLLRSAGKVRDINRTYVISASRKTADMPLTPNPVGRLALQRRTTRNKESSLLVSELEDTTEKTAETRLTLQRRAKTDSAEKWKTAEIDSVKMTLNVGGETENNGVSKESRTNVRIVNNAKNSFVASSVPLDEDPQVIEMMADKKYKETFSAPSRANENVALKYSSNRPPIASLSQTEVVRSGHLTTKPTQSKLDIKVLGTGNLYHRSIGKEIAKTSNKFGSLEKRTPTKCTTEHKLTTKCSLPQLKSPAPSILKNRMSNLQVKQRPKSSFLANKQERSAENTILPEEETVVQNTSAGKDPLKVENSQVTVAVRVRPFTKREKIEKASQVVFMSGKEITVEHPDTKQVYNFIYDVSFWSFDECHPHYASQTTVYEKLAAPLLERAFEGFNTCLFAYGQTGSGKSYTMMGFSEEPGIIPRFCEDLFSQVARKQTQEVSYHIEMSFFEVYNEKIHDLLVCKDENGQRKQPLRVREHPVYGPYVEALSMNIVSSYADIQSWLELGNKQRATAATGMNDKSSRSHSVFTLVMTQTKTEFVEGEEHDHRITSRINLIDLAGSERCSTAHTNGDRLKEGVSINKSLLTLGKVISALSEQANQRSVFIPYRESVLTWLLKESLGGNSKTAMIATISPAASNIEETLSTLRYANQARLIVNIAKVNEDMNAKLIRELKAEIAKLKAAQRNSRNIDPERYRLCRQEITSLRMKLHQQERDMAEMQRVWKEKFEQAEKRKLQETKELQKAGIMFQMDNHLPNLVNLNEDPQLSEMLLYMIKEGTTTVGKYKPNSSHDIQLSGVLIADDHCTIKNFGGTVSIIPVGEAKTYVNGKHILEITVLRHGDRVILGGDHYFRFNHPVEVQKGKRPSGRDTPISEGPKDFEFAKNELLMAQRSQLEAEIKEAQLKAKEEMMQGIQIAKEMAQQELSSQKAAYESKIKALEAELREESQRKKMQEINNQKANHKIEELEKAKQHLEQEIYVNKKRLEMETLATKQALEDHSIRHARILEALETEKQKIAKEVQILQQNRNNRDKTFTVQTTWSSMKLSMMIQEANAISSKLKTYYVFGRHDISDKSSSDTSIRVRNLKLGISTFWSLEKFESKLAAMKELYESNGSNRGEDAFCDPEDEWEPDITDAPVSSLSRRRSRSLMKNRRISGCLHDIQVHPIKNLHSSHSSGLMDKSSTIYSNSAESFLPGICKELIGSSLDFFGQSYDEERTIADSLINSFLKIYNGLFAISKAHEEQDEESQDNLFSSDRAIQSLTIQTACAFEQLVVLMKHWLSDLLPCTNIARLEDELRQEVKKLGGYLQLFLQGCCLDISSMIKEAQKNAIQIVQQAVKYVGQLAVLKGSKLHFLENGNNKAASVQEEFMDAVCDGVGLGMKILLDSGLEKAKELQHELFRQCTKNEVTKEMKTNAMGLIRSLENIFAESKIKSFRRQVQEENFEYQDFKRMVNRAPEFLKLKHCLEKAIEIIISALKGCHSDINLLQTCVESIRNLASDFYSDFSVPSTSVGSYESRVTHIVHQELESLAKSLLFCFESEESPDLLKPWETYNQNTKEEHQQSKSSGIDGSKNKGVPKRVYELHGSSPAVSSEECTPSRIQWV

SEQ ID NO: 44216 - protein, 1648 aa, Homo sapiens; identical to SEQ ID NO: 44215
  Payload ID: 9014
  Gene Symbol: KIF14
  Gene Name: kinesin family member 14
  Uniprot ID: Q15058
  ENSP ID: ENSP00000483069

SEQ ID NO: 44217 - protein, 1388 aa, Homo sapiens
  Payload ID: 9015
  Gene Symbol: KIF15
  Gene Name: kinesin family member 15
  Uniprot ID: Q9NS87
  ENSP ID: ENSP00000324020
MAPGCKTELRSVTNGQSNQPSNEGDAIKVFVRIRPPAERSGSADGEQNLCLSVLSSTSLRLHSNPEPKTFTFDHVADVDTTQESVFATVAKSIVESCMSGYNGTIFAYGQTGSGKTFTMMGPSESDNFSHNLRGVIPRSFEYLFSLIDREKEKAGAGKSFLCKCSFIEIYNEQIYDLLDSASAGLYLREHIKKGVFVVGAVEQVVTSAAEAYQVLSGGWRNRRVASTSMNRESSRSHAVFTITIESMEKSNEIVNIRTSLLNLVDLAGSERQKDTHAEGMRLKEAGNINRSLSCLGQVITALVDVGNGKQRHVCYRDSKLTFLLRDSLGGNAKTAIIANVHPGSRCFGETLSTLNFAQRAKLIKNKAVVNEDTQGNVSQLQAEVKRLKEQLAELASGQTPPESFLTRDKKKTNYMEYFQEAMLFFKKSEQEKKSLIEKVTQLEDLTLKKEKFIQSNKMIVKFREDQIIRLEKLHKESRGGFLPEEQDRLLSELRNEIQTLREQIEHHPRVAKYAMENHSLREENRRLRLLEPVKRAQEMDAQTIAKLEKAFSEISGMEKSDKNQQGFSPKAQKEPCLFANTEKLKAQLLQIQTELNNSKQEYEEFKELTRKRQLELESELQSLQKANLNLENLLEATKACKRQEVSQLNKIHAETLKIITTPTKAYQLHSRPVPKLSPEMGSFGSLYTQNSSILDNDILNEPVPPEMNEQAFEAISEELRTVQEQMSALQAKLDEEEHKNLKLQQHVDKLEHHSTQMQELFSSERIDWTKQQEELLSQLNVLEKQLQETQTKNDFLKSEVHDLRVVLHSADKELSSVKLEYSSFKTNQEKEFNKLSERHMHVQLQLDNLRLENEKLLESKACLQDSYDNLQEIMKFEIDQLSRNLQNFKKENETLKSDLNNLMELLEAEKERNNKLSLQFEEDKENSSKEILKVLEAVRQEKQKETAKCEQQMAKVQKLEESLLATEKVISSLEKSRDSDKKVVADLMNQIQELRTSVCEKTETIDTLKQELKDINCKYNSALVDREESRVLIKKQEVDILDLKETLRLRILSEDIERDMLCEDLAHATEQLNMLTEASKKHSGLLQSAQEELTKKEALIQELQHKLNQKKEEVEQKKNEYNFKMRQLEHVMDSAAEDPQSPKTPPHFQTHLAKLLETQEQEIEDGRASKTSLEHLVTKLNEDREVKNAEILRMKEQLREMENLRLESQQLIEKNWLLQGQLDDIKRQKENSDQNHPDNQQLKNEQEESIKERLAKSKIVEEMLKMKADLEEVQSALYNKEMECLRMTDEVERTQTLESKAFQEKEQLRSKLEEMYEERERTSQEMEMLRKQVECLAEENGKLVGHQNLHQKIQYVVRLKKENVRLAEETEKLRAENVFLKEKKRSES

SEQ ID NO: 44218 - protein, 1023 aa, Homo sapiens
  Payload ID: 9015
  Gene Symbol: KIF15
  Gene Name: kinesin family member 15
  ENSP ID: ENSP00000389982
MAVVNEDTQGNVSQLQAEVKRLKEQLAELASGQTPPESFLTRDKKKTNYMEYFQEAMLFFKKSEQEKKSLIEKVTQLEDLTLKKEKFIQSNKMIVKFREDQIIRLEKLHKESRGGFLPEEQDRLLSELRNEIQTLREQIEHHPRVAKYAMENHSLREENRRLRLLEPVKRAQEMDAQTIAKLEKAFSEISGMEKSDKNQQGFSPKAQKEPCLFANTEKLKAQLLQIQTELNNSKQEYEEFKELTRKRQLELESELQSLQKANLNLENLLEATKACKRQEVSQLNKIHAETLKIITTPTKAYQLHSRPVPKLSPEMGSFGSLYTQNSSILDNDILNEPVPPEMNEQAFEAISEELRTVQEQMSALQAKLDEEEHKNLKLQQHVDKLEHHSTQMQELFSSERIDWTKQQEELLSQLNVLEKQLQETQTKNDFLKSEVHDLRVVLHSADKELSSVKLEYSSFKTNQEKEFNKLSERHMHVQLQLDNLRLENEKLLESKACLQDSYDNLQEIMKFEIDQLSRNLQNFKKENETLKSDLNNLMELLEAEKERNNKLSLQFEEDKENSSKEILKVLEAVRQEKQKETAKCEQQMAKVQKLEESLLATEKVISSLEKSRDSDKKVVADLMNQIQELRTSVCEKTETIDTLKQELKDINCKYNSALVDREESRVLIKKQEVDILDLKETLRLRILSEDIERDMLCEDLAHATEQLNMLTEASKKHSGLLQSAQEELTKKEALIQELQHKLNQKKEEVEQKKNEYNFKMRQLEHVMDSAAEDPQSPKTPPHFQTHLAKLLETQEQEIEDGRASKTSLEHLVTKLNEDREVKNAEILRMKEQLREMENLRLESQQLIEKNWLLQGQLDDIKRQKENSDQNHPDNQQLKNEQEESIKERLAKSKIVEEMLKMKADLEEVQSALYNKEMECLRMTDEVERTQTLESKAFQEKEQLRSKLEEMYEERERTSQEMEMLRKQVECLAEENGKLVGHQNLHQKIQYVVRLKKENVRLAEETEKLRAENVFLKEKKRSES

SEQ ID NO: 44219 - protein, 194 aa, Homo sapiens
  Payload ID: 9015
  Gene Symbol: KIF15
  Gene Name: kinesin family member 15
  ENSP ID: ENSP00000391205
  MOD_RES (1)..(1): Any amino acid
XEQLREMENLRLESQQLIEKNWLLQGQLDDIKRQKENSDQNHPDNQQLKNEQEESIKERLAKSKIVEEMLKMKADLEEVQSALYNKEMECLRMTDEVERTQTLESKAFQEKEQLRSKLEEMYEERERTSQEMEMLRKQVECLAEENGKLVGHQNLHQKIQYVVRLKKENVRLAEETEKLRAENVFLKEKKRSES

SEQ ID NO: 44220 - protein, 128 aa, Homo sapiens
  Payload ID: 9015
  Gene Symbol: KIF15
  Gene Name: kinesin family member 15
  ENSP ID: ENSP00000400802
  MOD_RES (1)..(1): Any amino acid
XSVKLEYSSFKTNQEKEFNKLSERHMHVQLQLDNLRLENEKLLESKACLQDSYDNLQEIMKFEIDQLSRNLQNFKKENETLKSDLNNLMELLEAEKERNNKLSLQFEEDKENSSKPWYTVVNVELTSS

SEQ ID NO: 44221 - protein, 83 aa, Homo sapiens
  Payload ID: 9015
  Gene Symbol: KIF15
  Gene Name: kinesin family member 15
  ENSP ID: ENSP00000406939
MAPGCKIMKVMPSKFLCEFVLLQKDLGQLMESRTYAYLCCPPRVSGCTPTLSPRPSRLIMLQMWIPLRNLYSQLWLKALWSLA

SEQ ID NO: 44222 - protein, 711 aa, Homo sapiens
  Payload ID: 9015
  Gene Symbol: KIF15
  Gene Name: kinesin family member 15
  ENSP ID: ENSP00000425499
MNRESSRSHAVFTITIESMEKSNEIVNIRTSLLNLVDLAGSERQKDTHAEGMRLKEAGNINRSLSCLGQVITALVDVGNGKQRHVCYRDSKLTFLLRDSLGGNAKTAIIANVHPGSRCFGETLSTLNFAQRAKLIKNKAVVNEDTQGNVSQLQAEVKRLKEQLAELASGQTPPESFLTRDKKKTNYMEYFQEAMLFFKKSEQEKKSLIEKVTQLEDLTLKKEKFIQSNKMIVKFREDQIIRLEKLHKESRGGFLPEEQDRLLSELRNEIQTLREQIEHHPRVAKYAMENHSLREENRRLRLLEPVKRAQEMDAQTIAKLEKAFSEISGMEKSDKNQQGFSPKAQKEPCLFANTEKLKAQLLQIQTELNNSKQEYEEFKELTRKRQLELESELQSLQKANLNLENLLEATKACKRQEVSQLNKIHAETLKIITTPTKAYQLHSRPVPKLSPEMGSFGSLYTQNSSILDNDILNEPVPPEMNEQAFEAISEELRTVQEQMSALQAKLDEEEHKNLKLQQHVDKLEHHSTQMQELFSSERIDWTKQQEELLSQLNVLEKQLQETQTKNDFLKSEVHDLRVVLHSADKELSSVKLEYSSFKTNQEKEFNKLSERHMHVQLQLDNLRLENEKLLESKACLQDSYDNLQEIMKFEIDQLSRNLQNFKKENETLKSDLNNLMELLEAEKERNNKLSLQFEEDKENSSKEILKVLEAVR

SEQ ID NO: 44223 - protein, 128 aa, Homo sapiens; identical to SEQ ID NO: 44220
  Payload ID: 9015
  Gene Symbol: KIF15
  Gene Name: Kinesin family member 15
  ENSP ID: ENSP00000485853
  MOD_RES (1)..(1): Any amino acid

SEQ ID NO: 44224 - protein, 1388 aa, Homo sapiens; identical to SEQ ID NO: 44217
  Payload ID: 9015
  Gene Symbol: KIF15
  Gene Name: Kinesin family member 15
  ENSP ID: ENSP00000486004

SEQ ID NO: 44225 - protein, 83 aa, Homo sapiens; identical to SEQ ID NO: 44221
  Payload ID: 9015
  Gene Symbol: KIF15
  Gene Name: Kinesin family member 15
  ENSP ID: ENSP00000486282

SEQ ID NO: 44226 - protein, 194 aa, Homo sapiens; identical to SEQ ID NO: 44219
  Payload ID: 9015
  Gene Symbol: KIF15
  Gene Name: Kinesin family member 15
  ENSP ID: ENSP00000486350
  MOD_RES (1)..(1): Any amino acid

SEQ ID NO: 44227 - protein, 711 aa, Homo sapiens; identical to SEQ ID NO: 44222
  Payload ID: 9015
  Gene Symbol: KIF15
  Gene Name: Kinesin family member 15
  ENSP ID: ENSP00000486999

SEQ ID NO: 44228 - protein, 1023 aa, Homo sapiens; identical to SEQ ID NO: 44218
  Payload ID: 9015
  Gene Symbol: KIF15
  Gene Name: Kinesin family member 15
  ENSP ID: ENSP00000487255

SEQ ID NO: 44229 - protein, 1317 aa, Homo sapiens
  Payload ID: 9016
  Gene Symbol: KIF16B
  Gene Name: kinesin family member 16B
  Uniprot ID: Q96L93
  ENSP ID: ENSP00000347076
MASVKVAVRVRPMNRREKDLEAKFIIQMEKSKTTITNLKIPEGGTGDSGRERTKTFTYDFSFYSADTKSPDYVSQEMVFKTLGTDVVKSAFEGYNACVFAYGQTGSGKSYTMMGNSGDSGLIPRICEGLFSRINETTRWDEASFRTEVSYLEIYNERVRDLLRRKSSKTFNLRVREHPKEGPYVEDLSKHLVQNYGDVEELMDAGNINRTTAATGMNDVSSRSHAIFTIKFTQAKFDSEMPCETVSKIHLVDLAGSERADATGATGVRLKEGGNINKSLVTLGNVISALADLSQDAANTLAKKKQVFVPYRDSVLTWLLKDSLGGNSKTIMIATISPADVNYGETLSTLRYANRAKNIINKPTINEDANVKLIRELRAEIARLKTLLAQGNQIALLDSPTALSMEEKLQQNEARVQELTKEWTNKWNETQNILKEQTLALRKEGIGVVLDSELPHLIGIDDDLLSTGIILYHLKEGQTYVGRDDASTEQDIVLHGLDLESEHCIFENIGGTVTLIPLSGSQCSVNGVQIVEATHLNQGAVILLGRTNMFRFNHPKEAAKLREKRKSGLLSSFSLSMTDLSKSRENLSAVMLYNPGLEFERQQREELEKLESKRKLIEEMEEKQKSDKAELERMQQEVETQRKETEIVQLQIRKQEESLKRRSFHIENKLKDLLAEKEKFEEERLREQQEIELQKKRQEEETFLRVQEELQRLKELNNNEKAEKFQIFQELDQLQKEKDEQYAKLELEKKRLEEQEKEQVMLVAHLEEQLREKQEMIQLLRRGEVQWVEEEKRDLEGIRESLLRVKEARAGGDEDGEELEKAQLRFFEFKRRQLVKLVNLEKDLVQQKDILKKEVQEEQEILECLKCEHDKESRLLEKHDESVTDVTEVPQDFEKIKPVEYRLQYKERQLQYLLQNHLPTLLEEKQRAFEILDRGPLSLDNTLYQVEKEMEEKEEQLAQYQANANQLQKLQATFEFTANIARQEEKVRKKEKEILESREKQQREALERALARLERRHSALQRHSTLGMEIEEQRQKLASLNSGSREQSGLQASLEAEQEALEKDQERLEYEIQQLKQKIYEVDGVQKDHHGTLEGKVASSSLPVSAEKSHLVPLMDARINAYIEEEVQRRLQDLHRVISEGCSTSADTMKDNEKLHNGTIQRKLKYERMVSRSLGANPDDLKDPIKISIPRYVLCGQGKDAHFEFEVKITVLDETWTVFRRYSRFREMHKTLKLKYAELAALEFPPKKLFGNKDERVIAERRSHLEKYLRDFFSVMLQSATSPLHINKVGLTLSKHTICEFSPFFKKGVFDYSSHGTG

SEQ ID NO: 44230 - protein, 201 aa, Homo sapiens
  Payload ID: 9016
  Gene Symbol: KIF16B
  Gene Name: kinesin family member 16B
  ENSP ID: ENSP00000347995
RINAYIEEEVQRRLQDLHRVISEGCSTSADTMKDNEKLHNGTIQRKLKYERMVSRSLGANPDDLKDPIKISIPRYVLCGQGKDAHFEFEVKITVLDETWTVFRRYSRFREMHKTLKLKYAELAALEFPPKKLFGNKDERVIAERRSHLEKYLRDFFSVMLQSATSPLHINKVGLTLSKHTICEFSPFFKKGVFDYSSHGTG

SEQ ID NO: 44231 - protein, 1392 aa, Homo sapiens
  Payload ID: 9016
  Gene Symbol: KIF16B
  Gene Name: kinesin family member 16B
  Uniprot ID: Q96L93
  ENSP ID: ENSP00000384164
MASVKVAVRVRPMNRREKDLEAKFIIQMEKSKTTITNLKIPEGGTGDSGRERTKTFTYDFSFYSADTKSPDYVSQEMVFKTLGTDVVKSAFEGYNACVFAYGQTGSGKSYTMMGNSGDSGLIPRICEGLFSRINETTRWDEASFRTEVSYLEIYNERVRDLLRRKSSKTFNLRVREHPKEGPYVEDLSKHLVQNYGDVEELMDAGNINRTTAATGMNDVSSRSHAIFTIKFTQAKFDSEMPCETVSKIHLVDLAGSERADATGATGVRLKEGGNINKSLVTLGNVISALADLSQDAANTLAKKKQVFVPYRDSVLTWLLKDSLGGNSKTIMIATISPADVNYGETLSTLRYANRAKNIINKPTINEDANVKLIRELRAEIARLKTLLAQGNQIALLDSPTALSMEEKLQQNEARVQELTKEWTNKWNETQNILKEQTLALRKEGIGVVLDSELPHLIGIDDDLLSTGIILYHLKEGQTYVGRDDASTEQDIVLHGLDLESEHCIFENIGGTVTLIPLSGSQCSVNGVQIVEATHLNQGAVILLGRTNMFRFNHPKEAAKLREKRKSGLLSSFSLSMTDLSKSRENLSAVMLYNPGLEFERQQREELEKLESKRKLIEEMEEKQKSDKAELERMQQEVETQRKETEIVQLQIRKQEESLKRRSFHIENKLKDLLAEKEKFEEERLREQQEIELQKKRQEEETFLRVQEELQRLKELNNNEKAEKFQIFQELDQLQKEKDEQYAKLELEKKRLEEQEKEQVMLVAHLEEQLREKQEMIQLLRRGEVQWVEEEKRDLEGIRESLLRVKEARAGGDEDGEELEKAQLRFFEFKRRQLVKLVNLEKDLVQQKDILKKEVQEEQEILECLKCEHDKESRLLEKHDESVTDVTEVPQDFEKIKPVEYRLQYKERQLQYLLQNHLPTLLEEKQRAFEILDRGPLSLDNTLYQVEKEMEEKEEQLAQYQANANQLQKLQATFEFTANIARQEEKVRKKEKEILESREKQQREALERALARLERRHSALQRHSTLGMEIEEQRQKLASLNSGSREQSGLQASLEAEQEALEKDQERLEYEIQQLKQKIYEVDGVQKDHHGTLEGKVASSSLPVSAEKSHLVPLMDARINAYIEEEVQRRLQDLHRVISEGCSTSADTMKDNEKLHNGTIQRKLKYELCRDLLCVLMPEPDAAACANHPLLQQDLVQLSLDWKTEIPDLVLPNGVQVSSKFQTTLVDMIYFLHGNMEVNVPSLAEVQLLLYTTVKVMGDSGHDQCQSLVLLNTHIALVKEDCVFYPRIRSRNIPPPGAQFDVIKCHALSEFRCVVVPEKKNVSTVELVFLQKLKPSVGSRNSPPEHLQEAPNVQLFTTPLYLQGSQNVAPEVWKLTFNSQDEALWLISHLTRL

SEQ ID NO: 44232 - protein, 185 aa, Homo sapiens
  Payload ID: 9016
  Gene Symbol: KIF16B
  Gene Name: kinesin family member 16B
  ENSP ID: ENSP00000396264
  MOD_RES (1)..(1): Any amino acid
XDLSKSRENLSAVMLYNPGLFPIKGPICLRLEFERQQREELEKLESKRKLIEEMEEKQKSDKAELERMQQEVETQRKETEIVQLQIRKQEESLKRRSFHIENKLKDLLAEKEKFEEERLREQQEIELQKKRQEEETFLRVQEELQRLKELNNNEKAEKFQIFQELDQLQKEKDEQYAKLELEKKR

SEQ ID NO: 44233 - protein, 1029 aa, Homo sapiens
  Payload ID: 9017
  Gene Symbol: KIF17
  Gene Name: kinesin family member 17
  Uniprot ID: Q9P2E2
  ENSP ID: ENSP00000247986
MASEAVKVVVRCRPMNQRERELRCQPVVTVDCARAQCCIQNPGAADEPPKQFTFDGAYHVDHVTEQIYNEIAYPLVEGVTEGYNGTIFAYGQTGSGKSFTMQGLPDPPSQRGIIPRAFEHVFESVQCAENTKFLVRASYLEIYNEDVRDLLGADTKQKLELKEHPEKGVYVKGLSMHTVHSVAQCEHIMETGWKNRSVGYTLMNKDSSRSHSIFTISIEMSAVDERGKDHLRAGKLNLVDLAGSERQSKTGATGERLKEATKINLSLSALGNVISALVDGRCKHVPYRDSKLTRLLQDSLGGNTKTLMVACLSPADNNYDETLSTLRYANRAKNIRNKPRINEDPKDALLREYQEEIKKLKAILTQQMSPSSLSALLSRQVPPDPVQVEEKLLPQPVIQHDVEAEKQLIREEYEERLARLKADYKAEQESRARLEEDITAMRNSYDVRLSTLEENLRKETEAVLQVGVLYKAEVMSRAEFASSAEYPPAFQYETVVKPKVFSTTDTLPSDDVSKTQVSSRFAELPKVEPSKSEISLGSSESSSLEETSVSEAFPGPEEPSNVEVSMPTEESRSRYFLDECLGQEAAGHLLGEQNYLPQEEPQEVPLQGLLGLQDPFAEVEAKLARLSSTVARTDAPQADVPKVPVQVPAPTDLLEPSDARPEAEAADDFPPRPEVDLASEVALEVVRTAEPGVWLEAQAPVALVAQPEPLPATAGVKRESVGMEVAVLTDDPLPVVDQQQVLARLQLLEQQVVGGEQAKNKDLKEKHKRRKRYADERRKQLVAALQNSDEDSGDWVLLNVYDSIQEEVRAKSKLLEKMQRKLRAAEVEIKDLQSEFQLEKIDYLATIRRQERDSMLLQQLLEQVQPLIRRDCNYSNLEKILRESCWDEDNGFWKIPHPVITKTSLPVAVSTGPQNKPARKTSAADNGEPNMEDDRYRLMLSRSNSENIASNYFRSKRASQILSTDARKSLTHHNSPPGLSCPLSNNSAIPPTQAPEMPQPRPFRLESLDIPFTKAKRKKSKSNFGSEPL

SEQ ID NO: 44234 - protein, 929 aa, Homo sapiens
  Payload ID: 9017
  Gene Symbol: KIF17
  Gene Name: kinesin family member 17
  ENSP ID: ENSP00000364184
MQGLPDPPSQRGIIPRAFEHVFESVQCAENTKFLVRASYLEIYNEDVRDLLGADTKQKLELKEHPEKGVYVKGLSMHTVHSVAQCEHIMETGWKNRSVGYTLMNKDSSRSHSIFTISIEMSAVDERGKDHLRAGKLNLVDLAGSERQSKTGATGERLKEATKINLSLSALGNVISALVDGRCKHVPYRDSKLTRLLQDSLGGNTKTLMVACLSPADNNYDETLSTLRYANRAKNIRNKPRINEDPKDALLREYQEEIKKLKAILTQQMSPSSLSALLSRQVPPDPVQVEEKLLPQPVIQHDVEAEKQLIREEYEERLARLKADYKAEQESRARLEEDITAMRNSYDVRLSTLEENLRKETEAVLQVGVLYKAEVMSRAEFASSAEYPPAFQYETVVKPKVFSTTDTLPSDDVSKTQVSSRFAELPKVEPSKSEISLGSSESSSLEETSVSEAFPGPEEPSNVEVSMPTEESRSRYFLDECLGQEAAGHLLGEQNYLPQEEPQEVPLQGLLGLQDPFAEVEAKLARLSSTVARTDAPQADVPKVPVQVPAPTDLLEPSDARPEAEAADDFPPRPEVDLASEVALEVVRTAEPGVWLEAQAPVALVAQPEPLPATAGVKRESVGMEVAVLTDDPLPVVDQQQVLARLQLLEQQVVGGEQAKNKDLKEKHKRRKRYADERRKQLVAALQNSDEDSGDWVLLNVYDSIQEEVRAKSKLLEKMQRKLRAAEVEIKDLQSEFQLEKIDYLATIRRQERDSMLLQQLLEQVQPLIRRDCNYSNLEKILRESCWDEDNGFWKIPHPVITKTSLPVAVSTGPQNKPARKTSAADNGEPNMEDDRYRLMLSRSNSENIASNYFRSKRASQILSTDARKSLTHHNSPPGLSCPLSNNSAIPPTQAPEMPQPRPFRLESLDIPFTKAKRKKSKSNFGSEPL

SEQ ID NO: 44235 - protein, 1028 aa, Homo sapiens
  Payload ID: 9017
  Gene Symbol: KIF17
  Gene Name: kinesin family member 17
  Uniprot ID: Q9P2E2
  ENSP ID: ENSP00000383311
MASEAVKVVVRCRPMNQRERELRCQPVVTVDCARAQCCIQNPGAADEPPKQFTFDGAYHVDHVTEQIYNEIAYPLVEGVTEGYNGTIFAYGQTGSGKSFTMQGLPDPPSQRGIIPRAFEHVFESVQCAENTKFLVRASYLEIYNEDVRDLLGADTKQKLELKEHPEKGVYVKGLSMHTVHSVAQCEHIMETGWKNRSVGYTLMNKDSSRSHSIFTISIEMSAVDERGKDHLRAGKLNLVDLAGSERQSKTGATGERLKEATKINLSLSALGNVISALVDGRCKHVPYRDSKLTRLLQDSLGGNTKTLMVACLSPADNNYDETLSTLRYANRAKNIRNKPRINEDPKDALLREYQEEIKKLKAILTQQMSPSSLSALLSRQVPPDPVQVEEKLLPQPVIQHDVEAEKQLIREEYEERLARLKADYKAEQESRARLEEDITAMRNSYDVRLSTLEENLRKETEAVLQVGVLYKAEVMSRAEFASSAEYPPAFQYETVVKPKVFSTTDTLPSDDVSKTQVSSRFAELPKVEPSKSEISLGSSESSSLEETSVSEAFPGPEEPSNVEVSMPTEESRSRYFLDECLGQEAAGHLLGEQNYLPQEEPQEVPLQGLLGLQDPFAEVEAKLARLSSTVARTDAPQADVPKVPVQVPAPTDLLEPSDARPEAEAADDFPPRPEVDLASEVALEVVRTAEPGVWLEAQAPVALVAQPEPLPATAGVKRESVGMEVAVLTDDPLPVVDQQQVLARLQLLEQQVVGGEQAKNKDLKEKHKRRKRYADERRKQLVAALQNSDEDSGDWVLLNVYDSIQEEVRAKSKLLEKMQRKLRAAEVEIKDLQSEFQLEKIDYLATIRRQERDSMLLQQLLEQVQPLIRRDCNYSNLEKILRESCWDEDNGFWKIPHPVITKTSLPVVSTGPQNKPARKTSAADNGEPNMEDDRYRLMLSRSNSENIASNYFRSKRASQILSTDARKSLTHHNSPPGLSCPLSNNSAIPPTQAPEMPQPRPFRLESLDIPFTKAKRKKSKSNFGSEPL

SEQ ID NO: 44236 - protein, 898 aa, Homo sapiens
  Payload ID: 9018
  Gene Symbol: KIF18A
  Gene Name: kinesin family member 18A
  Uniprot ID: Q8NI77
  ENSP ID: ENSP00000263181
MSVTEEDLCHHMKVVVRVRPENTKEKAAGFHKVVHVVDKHILVFDPKQEEVSFFHGKKTTNQNVIKKQNKDLKFVFDAVFDETSTQSEVFEHTTKPILRSFLNGYNCTVLAYGATGAGKTHTMLGSADEPGVMYLTMLHLYKCMDEIKEEKICSTAVSYLEVYNEQIRDLLVNSGPLAVREDTQKGVVVHGLTLHQPKSSEEILHLLDNGNKNRTQHPTDMNATSSRSHAVFQIYLRQQDKTASINQNVRIAKMSLIDLAGSERASTSGAKGTRFVEGTNINRSLLALGNVINALADSKRKNQHIPYRNSKLTRLLKDSLGGNCQTIMIAAVSPSSVFYDDTYNTLKYANRAKDIKSSLKSNVLNVNNHITQYVKICNEQKAEILLLKEKLKAYEEQKAFTNENDQAKLMISNPQEKEIERFQEILNCLFQNREEIRQEYLKLEMLLKENELKSFYQQQCHKQIEMMCSEDKVEKATGKRDHRLAMLKTRRSYLEKRREEELKQFDENTNWLHRVEKEMGLLSQNGHIPKELKKDLHCHHLHLQNKDLKAQIRHMMDLACLQEQQHRQTEAVLNALLPTLRKQYCTLKEAGLSNAAFESDFKEIEHLVERKKVVVWADQTAEQPKQNDLPGISVLMTFPQLGPVQPIPCCSSSGGTNLVKIPTEKRTRRKLMPSPLKGQHTLKSPPSQSVQLNDSLSKELQPIVYTPEDCRKAFQNPSTVTLMKPSSFTTSFQAISSNINSDNCLKMLCEVAIPHNRRKECGQEDLDSTFTICEDIKSSKCKLPEQESLPNDNKDILQRLDPSSFSTKHSMPVPSMVPSYMAMTTAAKRKRKLTSSTSNSSLTADVNSGFAKRVRQDNSSEKHLQENKPTMEHKRNICKINPSMVRKFGRNISKGNLR

SEQ ID NO: 44237 - protein, 833 aa, Homo sapiens
  Payload ID: 9019
  Gene Symbol: KIF18B
  Gene Name: kinesin family member 18B
  ENSP ID: ENSP00000465377
MAVEDSTLQVVVRVRPPTPRELDSQRRPVVQVVDERVLVFNPEEPDGGFPGLKWGGTHDGPKKKGKDLTFVFDRVFGEAATQQDVFQHTTHSVLDSFLQGYNCSVFAYGATGAGKTHTMLGREGDPGIMYLTTVELYRRLEARQQEKHFEVLISYQEVYNEQIHDLLEPKGPLAIREDPDKGVVVQGLSFHQPASAEQLLEILTRGNRNRTQHPTDANATSSRSHAIFQIFVKQQDRVPGLTQAVQVAKMSLIDLAGSERASSTHAKGERLREGANINRSLLALINVLNALADAKGRKTHVPYRDSKLTRLLKDSLGGNCRTVMIAAISPSSLTYEDTYNTLKYADRAKEIRLSLKSNVTSLDCHISQYATICQQLQAEVAALRKKLQVYEGGGQPPPQDLPGSPKSGPPPEHLPSSPLPPHPPSQPCTPELPAGPRALQEESLGMEAQVERAMEGNSSDQEQSPEDEDEGPAEEVPTQMPEQNPTHALPESPRLTLQPKPVVGHFSARELDGDRSKQLALKVLCVAQRQYSLLQAANLLTPDMITEFETLQQLVQEEKIEPGAEALRTSGLARGAPLAQELCSESIPVPSPLCPEPPGYTGPVTRTMARRLSGPLHTLGIPPGPNCTPAQGSRWPMEKKRRRPSALEADSPMAPKRGTKRQRQSFLPCLRRGSLPDTQPSQGPSTPKGERASSPCHSPRVCPATVIKSRVPLGPSAMQNCSTPLALPTRDLNATFDLSEEPPSKPSFHECIGWDKIPQELSRLDQPFIPRAPVPLFTMKGPKPTSSLPGTSACKKKRVASSSVSHGRSRIARLPSSTLKRPAGPLVLPGDWH

SEQ ID NO: 44238 - protein, 842 aa, Homo sapiens
  Payload ID: 9019
  Gene Symbol: KIF18B
  Gene Name: kinesin family member 18B
  Uniprot ID: Q86Y91
  ENSP ID: ENSP00000465501
MSHPGVTTVMAVEDSTLQVVVRVRPPTPRELDSQRRPVVQVVDERVLVFNPEEPDGGFPGLKWGGTHDGPKKKGKDLTFVFDRVFGEAATQQDVFQHTTHSVLDSFLQGYNCSVFAYGATGAGKTHTMLGREGDPGIMYLTTVELYRRLEARQQEKHFEVLISYQEVYNEQIHDLLEPKGPLAIREDPDKGVVVQGLSFHQPASAEQLLEILTRGNRNRTQHPTDANATSSRSHAIFQIFVKQQDRVPGLTQAVQVAKMSLIDLAGSERASSTHAKGERLREGANINRSLLALINVLNALADAKGRKTHVPYRDSKLTRLLKDSLGGNCRTVMIAAISPSSLTYEDTYNTLKYADRAKEIRLSLKSNVTSLDCHISQYATICQQLQAEVAALRKKLQVYEGGGQPPPQDLPGSPKSGPPPEHLPSSPLPPHPPSQPCTPELPAGPRALQEESLGMEAQVERAMEGNSSDQEQSPEDEDEGPAEEVPTQMPEQNPTHALPESPRLTLQPKPVVGHFSARELDGDRSKQLALKVLCVAQRQYSLLQAANLLTPDMITEFETLQQLVQEEKIEPGAEALRTSGLARGAPLAQELCSESIPVPSPLCPEPPGYTGPVTRTMARRLSGPLHTLGIPPGPNCTPAQGSRWPMEKKRRRPSALEADSPMAPKRGTKRQRQSFLPCLRRGSLPDTQPSQGPSTPKGERASSPCHSPRVCPATVIKSRVPLGPSAMQNCSTPLALPTRDLNATFDLSEEPPSKPSFHECIGWDKIPQELSRLDQPFIPRAPVPLFTMKGPKPTSSLPGTSACKKKRVASSSVSHGRSRIARLPSSTLKRPAGPLVLPGDWH

SEQ ID NO: 44239 - protein, 852 aa, Homo sapiens
  Payload ID: 9019
  Gene Symbol: KIF18B
  Gene Name: kinesin family member 18B
  ENSP ID: ENSP00000465992
MAVEDSTLQVVVRVRPPTPRELDSQRRPVVQVVDERVLVFNPEEPDGGFPGLKWGGTHDGPKKKGKDLTFVFDRVFGEAATQQDVFQHTTHSVLDSFLQGYNCSVFAYGATGAGKTHTMLGREGDPGIMYLTTVELYRRLEARQQEKHFEVLISYQEVYNEQIHDLLEPKGPLAIREDPDKGVVVQGLSFHQPASAEQLLEILTRGNRNRTQHPTDANATSSRSHAIFQIFVKQQDRVPGLTQAVQVAKMSLIDLAGSERASSTHAKGERLREGANINRSLLALINVLNALADAKGRKTHVPYRDSKLTRLLKDSLGGNCRTVMIAAISPSSLTYEDTYNTLKYADRAKEIRLSLKSNVTSLDCHISQYATICQQLQAEVAALRKKLQVYEGGGQPPPQDLPGSPKSGPPPEHQPCTPELPAGPRALQEESLGMEAQVERAMEGNSSDQEQSPEDEDEGPAEEVPTQMPEQNPTHALPESPRLTLQPKPVVGHFSARELDGDRSKQLALKVLCVAQRQYSLLQAANLLTPDMITEFETLQQLVQEEKIEPGAEALRTSGLARGAPLAQELCSESIPVPSPLCPEPPGYTGPVTRTMARRLSGPLHTLGIPPGPNCTPAQGSRWPMEKKRRRPSALEADSPMAPKRGTKRQRQSFLPCLRRGSLPDTQPSQGPSTPKGERASSPCHSPRVCPATVIKSRVPLGPSAMQNCSTPLALPTRDLNATFDLSEEPPSKPSFHECIGWDKIPQELSRLDQPFIPRAPVPLFTMKGPKPTSSLPGTSACKKKRVASSSVSHGRSRIARLPSSTLKRPAGPLVLPELPLSPLCPSNRRNGKDLIRVGRALSAGNGVTKVS

SEQ ID NO: 44240 - protein, 998 aa, Homo sapiens
  Payload ID: 9020
  Gene Symbol: KIF19
  Gene Name: kinesin family member 19
  Uniprot ID: Q2TAC6
  ENSP ID: ENSP00000374566
MKDSGDSKDQQLMVALRVRPISVAELEEGATLIAHKVDEQMVVLMDPMEDPDDILRAHRSREKSYLFDVAFDFTATQEMVYQATTKSLIEGVISGYNATVFAYGPTGCGKTYTMLGTDQEPGIYVQTLNDLFRAIEETSNDMEYEVSMSYLEIYNEMIRDLLNPSLGYLELREDSKGVIQVAGITEVSTINAKEIMQLLMKGNRQRTQEPTAANQTSSRSHAVLQVTVRQRSRVKNILQEVRQGRLFMIDLAGSERASQTQNRGQRMKEGAHINRSLLALGNCINALSDKGSNKYINYRDSKLTRLLKDSLGGNSRTVMIAHISPASSAFEESRNTLTYAGRAKNIKTRVKQNLLNVSYHIAQYTSIIADLRGEIQRLKRKIDEQTGRGQARGRQDRGDIRHIQAEVQLHSGQGEKAGMGQLREQLASAFQEQMDVRRRLLELENRAMEVQIDTSRHLLTIAGWKHEKSRRALKWREEQRKECYAKDDSEKDSDTGDDQPDILEPPEVAAARESIAALVDEQKQLRKQKLALEQRCRELRARGRRLEETLPRRIGSEEQREVLSLLCRVHELEVENTEMQSHALLRDGALRHRHEAVRRLEQHRSLCDEIIQGQRQIIDDYNLAVPQRLEELYEVYLRELEEGSLEQATIMDQVASRALQDSSLPKITPAGTSLTPDSDLESVKTLSSDAQHLQNSALPPLSTESEGHHVFKAGTGAWQAKSSSVPTPPPIQLGSLVTQEAPAQDSLGSWINSSPDSSENLSEIPLSHKERKEILTGTKCIWVKAARRRSRALGTEGRHLLAPATERSSLSLHSLSEGDDARPPGPLACKRPPSPTLQHAASEDNLSSSTGEAPSRAVGHHGDGPRPWLRGQKKSLGKKREESLEAKRRKRRSRSFEVTGQGLSHPKTHLLGPHQAERISDHRMPVCRHPAPGIRHLGKVTLPLAKVKLPPSQNTGPGDSSPLAVPPNPGGGSRRATRGPRLPHGTSTHGKDGCSRHN

SEQ ID NO: 44241 - protein, 613 aa, Homo sapiens
  Payload ID: 9020
  Gene Symbol: KIF19
  Gene Name: kinesin family member 19
  ENSP ID: ENSP00000449134
MKDSGDSKDQQLMVALRVRPISVAELEEGATLIAHKVDEQMVVLMDPMEDPDDILRAHRSREKSYLFDVAFDFTATQEMVYQATTKSLIEGVISGYNATVFAYGPTGCGKTYTMLGTDQEPGIYVQTLNDLFRAIEETSNDMEYEVSMSYLEIMQLLMKGNRQRTQEPTAANQTSSRSHAVLQVTVRQRSRVKNILQEVRQGRLFMIDLAGSERASQTQNRGQRMKEGAHINRSLLALGNCINALSDKGSNKYINYRDSKLTRLLKDSLGGNSRTVMIAHISPASSAFEESRNTLTYAGRAKNIKTRVKQNLLNVSYHIAQYTSIIADLRGEIQRLKRKIDEQTGRGQARGRQDRGDIRHIQAEVQLHSGQGEKAGMGQLREQLASAFQEQMDVRRRLLELENRAMEVQIDTSRHLLTIAGWKHEKSRRALKWREEQRKECYAKDDSEKDSDTGDDQPDILEPPEVAAARESIAALVDEQKQLRKQKLALEQRCRELRARGRRLEETLPRRIGSEEQREVLSLLCRVHELEVENTEMQSHALLRDGALRHRHEAVRRLEQHRSLCDEIIQGQRQIIDDYNLAVPQRLEELYEVYLRELEEGSLEQATIMDQVA

SEQ ID NO: 44242 - protein, 1690 aa, Homo sapiens
  Payload ID: 9021
  Gene Symbol: KIF1A
  Gene Name: kinesin family member 1A
  Uniprot ID: Q12756
  ENSP ID: ENSP00000322791
MAGASVKVAVRVRPFNSREMSRDSKCIIQMSGSTTTIVNPKQPKETPKSFSFDYSYWSHTSPEDINYASQKQVYRDIGEEMLQHAFEGYNVCIFAYGQTGAGKSYTMMGKQEKDQQGIIPQLCEDLFSRINDTTNDNMSYSVEVSYMEIYCERVRDLLNPKNKGNLRVREHPLLGPYVEDLSKLAVTSYNDIQDLMDSGNKARTVAATNMNETSSRSHAVFNIIFTQKRHDAETNITTEKVSKISLVDLAGSERADSTGAKGTRLKEGANINKSLTTLGKVISALAEMDSGPNKNKKKKKTDFIPYRDSVLTWLLRENLGGNSRTAMVAALSPADINYDETLSTLRYADRAKQIRCNAVINEDPNNKLIRELKDEVTRLRDLLYAQGLGDITDMTNALVGMSPSSSLSALSSRAASVSSLHERILFAPGSEEAIERLKETEKIIAELNETWEEKLRRTEAIRMEREALLAEMGVAMREDGGTLGVFSPKKTPHLVNLNEDPLMSECLLYYIKDGITRVGREDGERRQDIVLSGHFIKEEHCVFRSDSRGGSEAVVTLEPCEGADTYVNGKKVTEPSILRSGNRIIMGKSHVFRFNHPEQARQERERTPCAETPAEPVDWAFAQRELLEKQGIDMKQEMEQRLQELEDQYRREREEATYLLEQQRLDYESKLEALQKQMDSRYYPEVNEEEEEPEDEVQWTERECELALWAFRKWKWYQFTSLRDLLWGNAIFLKEANAISVELKKKVQFQFVLLTDTLYSPLPPDLLPPEAAKDRETRPFPRTIVAVEVQDQKNGATHYWTLEKLRQRLDLMREMYDRAAEVPSSVIEDCDNVVTGGDPFYDRFPWFRLVGRAFVYLSNLLYPVPLVHRVAIVSEKGEVKGFLRVAVQAISADEEAPDYGSGVRQSGTAKISFDDQHFEKFQSESCPVVGMSRSGTSQEELRIVEGQGQGADVGPSADEVNNNTCSAVPPEGLLLDSSEKAALDGPLDAALDHLRLGNTFTFRVTVLQASSISAEYADIFCQFNFIHRHDEAFSTEPLKNTGRGPPLGFYHVQNIAVEVTKSFIEYIKSQPIVFEVFGHYQQHPFPPLCKDVLSPLRPSRRHFPRVMPLSKPVPATKLSTLTRPCPGPCHCKYDLLVYFEICELEANGDYIPAVVDHRGGMPCMGTFLLHQGIQRRITVTLLHETGSHIRWKEVRELVVGRIRNTPETDESLIDPNILSLNILSSGYIHPAQDDRTFYQFEAAWDSSMHNSLLLNRVTPYREKIYMTLSAYIEMENCTQPAVVTKDFCMVFYSRDAKLPASRSIRNLFGSGSLRASESNRVTGVYELSLCHVADAGSPGMQRRRRRVLDTSVAYVRGEENLAGWRPRSDSLILDHQWELEKLSLLQEVEKTRHYLLLREKLETAQRPVPEALSPAFSEDSESHGSSSASSPLSAEGRPSPLEAPNERQRELAVKCLRLLTHTFNREYTHSHVCVSASESKLSEMSVTLLRDPSMSPLGVATLTPSSTCPSLVEGRYGATDLRTPQPCSRPASPEPELLPEADSKKLPSPARATETDKEPQRLLVPDIQEIRVSPIVSKKGYLHFLEPHTSGWARRFVVVRRPYAYMYNSDKDTVERFVLNLATAQVEYSEDQQAMLKTPNTFAVCTEHRGILLQAASDKDMHDWLYAFNPLLAGTIRSKLSRRRSAQMRV

SEQ ID NO: 44243 - protein, 1471 aa, Homo sapiens
  Payload ID: 9021
  Gene Symbol: KIF1A
  Gene Name: kinesin family member 1A
  ENSP ID: ENSP00000384231
MAGASVKVAVRVRPFNSREMSRDSKCIIQMSGSTTTIVNPKQPKETPKSFSFDYSYWSHTSPEDINYASQKQVYRDIGEEMLQHAFEGYNVCIFAYGQTGAGKSYTMMGKQEKDQQGIIPQLCEDLFSRINDTTNDNMSYSVEVSYMEIYCERVRDLLNPKNKGNLRVREHPLLGPYVEDLSKLAVTSYNDIQDLMDSGNKARTVAATNMNETSSRSHAVFNIIFTQKRHDAETNITTEKVSKISLVDLAGSERADSTGAKGTRLKEGANINKSLTTLGKVISALAEMDSGPNKNKKKKKTDFIPYRDSVLTWLLRENLGGNSRTAMVAALSPADINYDETLSTLRYADRAKQIRCNAVINEDPNNKLIRELKDEVTRLRDLLYAQGLGDITDTNTVPGGPKLTNALVGMSPSSSLSALSSRAASVSSLHERILFAPGSEEAIERLKETEKIIAELNETWEEKLRRTEAIRMEREALLAEMGVAMREDGGTLGVFSPKKTPHLVNLNEDPLMSECLLYYIKDGITRVGREDGERRQDIVLSGHFIKEEHCVFRSDSRGGSEAVVTLEPCEGADTYVNGKKVTEPSILRSGNRIIMGKSHVFRFNHPEQARQERERTPCAETPAEPVDWAFAQRELLEKQGIDMKQEMEQRLQELEDQYRREREEATYLLEQQRLDYESKLEALQKQMDSRYYPEVNEEEEEPEDEVQWTERECELALWAFRKWKWYQFTSLRDLLWGNAIFLKEANAISVELKKKVQFQFVLLTDTLYSPLPPDLLPPEAAKDRETRPFPRTIVAVEVQDQKNGATHYWTLEKLRQRLDLMREMYDRAAEVPSSVIEDCDNVVTGGDPFYDRFPWFRLVGSSAISGCNSYPLLNTCMSERMAALTPSPTFSSPDSDATEPAEEQSVGEEEEEEEEEEDEEEEDLEDDVFPEHALCDGRDPFYDRPPLFSLVGRAFVYLSNLLYPVPLVHRVAIVSEKGEVKGFLRVAVQAISADEEAPDYGSGVRQSGTAKISFDDQHFEKFQSESCPVVGMSRSGTSQEELRIVEGQGQGADVGPSADEVNNNTCSAVPPEGLLLDSSEKAALDGPLDAALDHLRLGNTFTFRVTVLQASSISAEYADIFCQFNFIHRHDEAFSTEPLKNTGRGPPLGFYHVQNIAVEVTKSFIEYIKSQPIVFEVFGHYQQHPFPPLCKDVLSPLRPSRRHFPRVMPLSKPVPATKLSTLTRPCPGPCHCKYDLLVYFEICELEANGDYIPAVVDHRGGMPCMGTFLLHQGIQRRITVTLLHETGSHIRWKEVRELVVGRIRNTPETDESLIDPNILSLNILSSGYIHPAQDDRVSLGNDTRTFYQFEAAWDSSMHNSLLLNRVTPYREKIYMTLSAYIEMENCTQPAVVTKDFCMVFYSRDAKLPASRSIRNLFGSGSLRASESNRVTGVYELSLCHVADAGSPGMQRRRRRVLDTSVAYVRGEENLA

SEQ ID NO: 44244 - protein, 227 aa, Homo sapiens
  Payload ID: 9021
  Gene Symbol: KIF1A
  Gene Name: kinesin family member 1A
  ENSP ID: ENSP00000395443
  MOD_RES (1)..(1): Any amino acid
XDLMDSGNKARTVAATNMNETSSRSHAVFNIIFTQKRHDAETNITTEKVSKISLVDLAGSERADSTGAKGTRLKEGANINKSLTTLGKVISALAEMDSGPNKNKKKKKTDFIPYRDSVLTWLLRENLGGNSRTAMVAALSPADINYDETLSTLRYADRAKQIRCNAVINEDPNNKLIRELKDEVTRLRDLLYAQGLGDITDTNTVPGGPKYVSDLENNNLNRGGTVN

SEQ ID NO: 44245 - protein, 38 aa, Homo sapiens
  Payload ID: 9021
  Gene Symbol: KIF1A
  Gene Name: kinesin family member 1A
  ENSP ID: ENSP00000398686
MAGASVKVAVRVRPFNSREMSRDSKCIIQMSGSTTTIV

SEQ ID NO: 44246 - protein, 357 aa, Homo sapiens
  Payload ID: 9021
  Gene Symbol: KIF1A
  Gene Name: kinesin family member 1A
  ENSP ID: ENSP00000414613
  MOD_RES (1)..(1): Any amino acid
XGHYQQHPFPPLCKDVLSPLRPSRRHFPRVMPLSKPVPATKLSTLTRPCPGPCHCKYDLLVYFEICELEANGDYIPAVVDHRGGMPCMGTFLLHQGIQRRITVTLLHETGSHIRWKEVRELVVGRIRNTPETDESLIDPNILSLNILSSGYIHPAQDDRQFLDSDIPRTFYQFEAAWDSSMHNSLLLNRVTPYREKIYMTLSAYIEMENCTQPAVVTKDFCMVFYSRDAKLPASRSIRNLFGSGSLRASESNRVTGVYELSLCHVADAGSPGMQRRRRRVLDTSVAYVRGEENLAGWRPRSDSLILDHQWELEKLSLLQEVEKTRHYLLLREKLETAQRPVPEALSPAFSEDSESHG

SEQ ID NO: 44247 - protein, 183 aa, Homo sapiens
  Payload ID: 9021
  Gene Symbol: KIF1A
  Gene Name: kinesin family member 1A
  ENSP ID: ENSP00000415367
  MOD_RES (1)..(1): Any amino acid
XLGSEGEHQGRAPALLLEADEEAPDYGSGVRQSGTAKISFDDQHFEKFQSESCPVVGMSRSGTSQEELRIVEGQGQGADVGPSADEVNNNTCSAVPPEGLLLDSSEKAALDGPLDAALDHLRLGNTFTFRVTVLQASSISAEYADIFCQFNFIHRHDEAFSTEPLKNTGRGPPLGFYHVQNIA

SEQ ID NO: 44248 - protein, 1791 aa, Homo sapiens
  Payload ID: 9021
  Gene Symbol: KIF1A
  Gene Name: kinesin family member 1A
  Uniprot ID: Q12756
  ENSP ID: ENSP00000438388
MAGASVKVAVRVRPFNSREMSRDSKCIIQMSGSTTTIVNPKQPKETPKSFSFDYSYWSHTSPEDINYASQKQVYRDIGEEMLQHAFEGYNVCIFAYGQTGAGKSYTMMGKQEKDQQGIIPQLCEDLFSRINDTTNDNMSYSVEVSYMEIYCERVRDLLNPKNKGNLRVREHPLLGPYVEDLSKLAVTSYNDIQDLMDSGNKARTVAATNMNETSSRSHAVFNIIFTQKRHDAETNITTEKVSKISLVDLAGSERADSTGAKGTRLKEGANINKSLTTLGKVISALAEMDSGPNKNKKKKKTDFIPYRDSVLTWLLRENLGGNSRTAMVAALSPADINYDETLSTLRYADRAKQIRCNAVINEDPNNKLIRELKDEVTRLRDLLYAQGLGDITDTNTVPGGPKLTNALVGMSPSSSLSALSSRAASVSSLHERILFAPGSEEAIERLKETEKIIAELNETWEEKLRRTEAIRMEREALLAEMGVAMREDGGTLGVFSPKKTPHLVNLNEDPLMSECLLYYIKDGITRVGREDGERRQDIVLSGHFIKEEHCVFRSDSRGGSEAVVTLEPCEGADTYVNGKKVTEPSILRSGNRIIMGKSHVFRFNHPEQARQERERTPCAETPAEPVDWAFAQRELLEKQGIDMKQEMEQRLQELEDQYRREREEATYLLEQQRLDYESKLEALQKQMDSRYYPEVNEEEEEPEDEVQWTERECELALWAFRKWKWYQFTSLRDLLWGNAIFLKEANAISVELKKKVQFQFVLLTDTLYSPLPPDLLPPEAAKDRETRPFPRTIVAVEVQDQKNGATHYWTLEKLRQRLDLMREMYDRAAEVPSSVIEDCDNVVTGGDPFYDRFPWFRLVGSSAISGCNSYPLLNTCMSERMAALTPSPTFSSPDSDATEPAEEQSVGEEEEEEEEEEDEEEEDLEDDVFPEHALCDGRDPFYDRPPLFSLVGRAFVYLSNLLYPVPLVHRVAIVSEKGEVKGFLRVAVQAISADEEAPDYGSGVRQSGTAKISFDDQHFEKFQSESCPVVGMSRSGTSQEELRIVEGQGQGADVGPSADEVNNNTCSAVPPEGLLLDSSEKAALDGPLDAALDHLRLGNTFTFRVTVLQASSISAEYADIFCQFNFIHRHDEAFSTEPLKNTGRGPPLGFYHVQNIAVEVTKSFIEYIKSQPIVFEVFGHYQQHPFPPLCKDVLSPLRPSRRHFPRVMPLSKPVPATKLSTLTRPCPGPCHCKYDLLVYFEICELEANGDYIPAVVDHRGGMPCMGTFLLHQGIQRRITVTLLHETGSHIRWKEVRELVVGRIRNTPETDESLIDPNILSLNILSSGYIHPAQDDRTFYQFEAAWDSSMHNSLLLNRVTPYREKIYMTLSAYIEMENCTQPAVVTKDFCMVFYSRDAKLPASRSIRNLFGSGSLRASESNRVTGVYELSLCHVADAGSPGMQRRRRRVLDTSVAYVRGEENLAGWRPRSDSLILDHQWELEKLSLLQEVEKTRHYLLLREKLETAQRPVPEALSPAFSEDSESHGSSSASSPLSAEGRPSPLEAPNERQRELAVKCLRLLTHTFNREYTHSHVCVSASESKLSEMSVTLLRDPSMSPLGVATLTPSSTCPSLVEGRYGATDLRTPQPCSRPASPEPELLPEADSKKLPSPARATETDKEPQRLLVPDIQEIRVSPIVSKKGYLHFLEPHTSGWARRFVVVRRPYAYMYNSDKDTVERFVLNLATAQVEYSEDQQAMLKTPNTFAVCTEHRGILLQAASDKDMHDWLYAFNPLLAGTIRSKLSRRRSAQMRV

SEQ ID NO: 44249 - protein, 1770 aa, Homo sapiens
  Payload ID: 9022
  Gene Symbol: KIF1B
  Gene Name: kinesin family member 1B
  Uniprot ID: O60333
  ENSP ID: ENSP00000263934
MSGASVKVAVRVRPFNSRETSKESKCIIQMQGNSTSIINPKNPKEAPKSFSFDYSYWSHTSPEDPCFASQNRVYNDIGKEMLLHAFEGYNVCIFAYGQTGAGKSYTMMGKQEESQAGIIPQLCEELFEKINDNCNEEMSYSVEVSYMEIYCERVRDLLNPKNKGNLRVREHPLLGPYVEDLSKLAVTSYTDIADLMDAGNKARTVAATNMNETSSRSHAVFTIVFTQKKHDNETNLSTEKVSKISLVDLAGSERADSTGAKGTRLKEGANINKSLTTLGKVISALAEVSKKKKKTDFIPYRDSVLTWLLRENLGGNSRTAMVAALSPADINYDETLSTLRYADRAKQIKCNAVINEDPNAKLVRELKEEVTRLKDLLRAQGLGDIIDTSMGSLTSSPSSCSLSSQVGLTSVTSIQERIMSTPGGEEAIERLKESEKIIAELNETWEEKLRKTEAIRMEREALLAEMGVAIREDGGTLGVFSPKKTPHLVNLNEDPLMSECLLYYIKDGITRVGQADAERRQDIVLSGAHIKEEHCIFRSERSNSGEVIVTLEPCERSETYVNGKRVSQPVQLRSGNRIIMGKNHVFRFNHPEQARAEREKTPSAETPSEPVDWTFAQRELLEKQGIDMKQEMEKRLQEMEILYKKEKEEADLLLEQQRLDYESKLQALQKQVETRSLAAETTEEEEEEEEVPWTQHEFELAQWAFRKWKSHQFTSLRDLLWGNAVYLKEANAISVELKKKVQFQFVLLTDTLYSPLPPELLPTEMEKTHEDRPFPRTVVAVEVQDLKNGATHYWSLEKLKQRLDLMREMYDRAGEMASSAQDESETTVTGSDPFYDRFHWFKLVGSSPIFHGCVNERLADRTPSPTFSTADSDITELADEQQDEMEDFDDEAFVDDAGSDAGTEEGSDLFSDGHDPFYDRSPWFILVGRAFVYLSNLLYPVPLIHRVAIVSEKGEVRGFLRVAVQAIAADEEAPDYGSGIRQSGTAKISFDNEYFNQSDFSSVAMTRSGLSLEELRIVEGQGQSSEVITPPEEISRINDLDLKSSTLLDGKMVMEGFSEEIGNHLKLGSAFTFRVTVLQASGILPEYADIFCQFNFLHRHDEAFSTEPLKNNGRGSPLAFYHVQNIAVEITESFVDYIKTKPIVFEVFGHYQQHPLHLQGQELNSPPQPCRRFFPPPMPLSKPVPATKLNTMSKTSLGQSMSKYDLLVWFEISELEPTGEYIPAVVDHTAGLPCQGTFLLHQGIQRRITVTIIHEKGSELHWKDVRELVVGRIRNKPEVDEAAVDAILSLNIISAKYLKSSHNSSRTFYRFEAVWDSSLHNSLLLNRVTPYGEKIYMTLSAYLELDHCIQPAVITKDVCMVFYSRDAKISPPRSLRSLFGSGYSKSPDSNRVTGIYELSLCKMSDTGSPGMQRRRRKILDTSVAYVRGEENLAGWRPRGDSLILEHQWELEKLELLHEVEKTRHFLLLRERLGDSIPKSLSDSLSPSLSSGTLSTSTSISSQISTTTFESAITPSESSGYDSGDIESLVDREKELATKCLQLLTHTFNREFSQVHGSVSDCKLSDISPIGRDPSESSFSSATLTPSSTCPSLVDSRSNSLDQKTPEANSRASSPCPEFEQFQIVPAVETPYLARAGKNEFLNLVPDIEEIRPSSVVSKKGYLHFKEPLYSNWAKHFVVVRRPYVFIYNSDKDPVERGIINLSTAQVEYSEDQQAMVKTPNTFAVCTKHRGVLLQALNDKDMNDWLYAFNPLLAGTIRSKLSRRCPSQSKY

SEQ ID NO: 44250 - protein, 1823 aa, Homo sapiens
  Payload ID: 9022
  Gene Symbol: KIF1B
  Gene Name: kinesin family member 1B
  Uniprot ID: O60333
  ENSP ID: ENSP00000366284
MSGASVKVAVRVRPFNSRETSKESKCIIQMQGNSTSIINPKNPKEAPKSFSFDYSYWSHTSPEDPCFASQNRVYNDIGKEMLLHAFEGYNVCIFAYGQTGAGKSYTMMGKQEESQAGIIPQLCEELFEKINDNCNEEMSYSVEVSYMEIYCERVRDLLNPKNKGNLRVREHPLLGPYVEDLSKLAVTSYTDIADLMDAGNKARTVAATNMNETSSRSHAVFTIVFTQKKHDNETNLSTEKVSKISLVDLAGSERADSTGAKGTRLKEGANINKSLTTLGKVISALAEVDNCTSKSKKKKKTDFIPYRDSVLTWLLRENLGGNSRTAMVAALSPADINYDETLSTLRYADRAKQIKCNAVINEDPNAKLVRELKEEVTRLKDLLRAQGLGDIIDIDPLIDDYSGSGSKYLKDFQNNKHRYLLASENQRPGHFSTASMGSLTSSPSSCSLSSQVGLTSVTSIQERIMSTPGGEEAIERLKESEKIIAELNETWEEKLRKTEAIRMEREALLAEMGVAIREDGGTLGVFSPKKTPHLVNLNEDPLMSECLLYYIKDGITRVGQADAERRQDIVLSGAHIKEEHCIFRSERSNSGEVIVTLEPCERSETYVNGKRVSQPVQLRSGNRIIMGKNHVFRFNHPEQARAEREKTPSAETPSEPVDWTFAQRELLEKQGIDMKQEMEKRLQEMEILYKKEKEEADLLLEQQRLDYESKLQALQKQVETRSLAAETTEEEEEEEEVPWTQHEFELAQWAFRKWKSHQFTSLRDLLWGNAVYLKEANAISVELKKKVQFQFVLLTDTLYSPLPPELLPTEMEKTHEDRPFPRTVVAVEVQDLKNGATHYWSLEKLKQRLDLMREMYDRAGEMASSAQDESETTVTGSDPFYDRFHWFKLVGSSPIFHGCVNERLADRTPSPTFSTADSDITELADEQQDEMEDFDDEAFVDDAGSDAGTEEGSDLFSDGHDPFYDRSPWFILVGRAFVYLSNLLYPVPLIHRVAIVSEKGEVRGFLRVAVQAIAADEEAPDYGSGIRQSGTAKISFDNEYFNQSDFSSVAMTRSGLSLEELRIVEGQGQSSEVITPPEEISRINDLDLKSSTLLDGKMVMEGFSEEIGNHLKLGSAFTFRVTVLQASGILPEYADIFCQFNFLHRHDEAFSTEPLKNNGRGSPLAFYHVQNIAVEITESFVDYIKTKPIVFEVFGHYQQHPLHLQGQELNSPPQPCRRFFPPPMPLSKPVPATKLNTMSKTSLGQSMSKYDLLVWFEISELEPTGEYIPAVVDHTAGLPCQGTFLLHQGIQRRITVTIIHEKGSELHWKDVRELVVGRIRNKPEVDEAAVDAILSLNIISAKYLKSSHNSSRTFYRFEAVWDSSLHNSLLLNRVTPYGEKIYMTLSAYLELDHCIQPAVITKDVCMVFYSRDAKISPPRSLRSLFGSGYSKSPDSNRVTGIYELSLCKMSDTGSPGMQRRRRKILDTSVAYVRGEENLAGWRPRGDSLILEHQWELEKLELLHEVEKTRHFLLLRERLGDSIPKSLSDSLSPSLSSGTLSTSTSISSQISTTTFESAITPSESSGYDSGDIESLVDREKELATKCLQLLTHTFNREFSQVHGSVSDCKLSDISPIGRDPSESSFSSATLTPSSTCPSLVDSRSNSLDQKTPEANSRASSPCPEFEQFQIVPAVETPYLARAGKNEFLNLVPDIEEIRPSSVVSKKGYLHFKEPLYSNWAKHFVVVRRPYVFIYNSDKDPVERGIINLSTAQVEYSEDQQAMVKTPNTFAVCTKHRGVLLQALNDKDMNDWLYAFNPLLAGTIRPGHLASEIIREDKSVSFSCQ

SEQ ID NO: 44251 - protein, 1153 aa, Homo sapiens
  Payload ID: 9022
  Gene Symbol: KIF1B
  Gene Name: kinesin family member 1B
  Uniprot ID: O60333
  ENSP ID: ENSP00000366287
MSGASVKVAVRVRPFNSRETSKESKCIIQMQGNSTSIINPKNPKEAPKSFSFDYSYWSHTSPEDPCFASQNRVYNDIGKEMLLHAFEGYNVCIFAYGQTGAGKSYTMMGKQEESQAGIIPQLCEELFEKINDNCNEEMSYSVEVSYMEIYCERVRDLLNPKNKGNLRVREHPLLGPYVEDLSKLAVTSYTDIADLMDAGNKARTVAATNMNETSSRSHAVFTIVFTQKKHDNETNLSTEKVSKISLVDLAGSERADSTGAKGTRLKEGANINKSLTTLGKVISALAEVSKKKKKTDFIPYRDSVLTWLLRENLGGNSRTAMVAALSPADINYDETLSTLRYADRAKQIKCNAVINEDPNAKLVRELKEEVTRLKDLLRAQGLGDIIDTSMGSLTSSPSSCSLSSQVGLTSVTSIQERIMSTPGGEEAIERLKESEKIIAELNETWEEKLRKTEAIRMEREALLAEMGVAIREDGGTLGVFSPKKTPHLVNLNEDPLMSECLLYYIKDGITRVGQADAERRQDIVLSGAHIKEEHCIFRSERSNSGEVIVTLEPCERSETYVNGKRVSQPVQLRSGNRIIMGKNHVFRFNHPEQARAEREKTPSAETPSEPVDWTFAQRELLEKQGIDMKQEMEKRLQEMEILYKKEKEEADLLLEQQRLDADSDSGDDSDKRSCEESWKLITSLREKLPPSKLQTIVKKCGLPSSGKKREPIKMYQIPQRRRLSKDSKWVTISDLKIQAVKEICYEVALNDFRHSRQEIEALAIVKMKELCAMYGKKDPNERDSWRAVARDVWDTVGVGDEKIEDVMATGKGSTDVDDLKVHIDKLEDILQEVKKQNNMKDEEIKVLRNKMLKMEKVLPLIGSQEQKSPGSHKAKEPVGAGVSSTSENNVSKGDNGELAKEERVSQLMNGDPAFRRGRLRWMRQEQIRFKNLQQQEITKQLRRQNVPHRFIPPENRKPRFPFKSNPKHRNSWSPGTHIIITEDEVIELRIPKDDEARKGNKEESQEKGGKGAFKDPQFPWGSQGMRSQDHIQVSKQHINNQQQPPQLRWRSNSLNNGQPKSTRCQASASAESLNSHSGHPTADVQTFQAKRHIHQHRQSYCNYNTGGQLEGNAATSYQKQTDKPSHCSQFVTPPRMRRQFSAPNLKAGRETTV

SEQ ID NO: 44252 - protein, 1816 aa, Homo sapiens
  Payload ID: 9022
  Gene Symbol: KIF1B
  Gene Name: kinesin family member 1B
  Uniprot ID: O60333
  ENSP ID: ENSP00000366290
MSGASVKVAVRVRPFNSRETSKESKCIIQMQGNSTSIINPKNPKEAPKSFSFDYSYWSHTSPEDPCFASQNRVYNDIGKEMLLHAFEGYNVCIFAYGQTGAGKSYTMMGKQEESQAGIIPQLCEELFEKINDNCNEEMSYSVEVSYMEIYCERVRDLLNPKNKGNLRVREHPLLGPYVEDLSKLAVTSYTDIADLMDAGNKARTVAATNMNETSSRSHAVFTIVFTQKKHDNETNLSTEKVSKISLVDLAGSERADSTGAKGTRLKEGANINKSLTTLGKVISALAEVDNCTSKSKKKKKTDFIPYRDSVLTWLLRENLGGNSRTAMVAALSPADINYDETLSTLRYADRAKQIKCNAVINEDPNAKLVRELKEEVTRLKDLLRAQGLGDIIDIDPLIDDYSGSGSKYLKDFQNNKHRYLLASENQRPGHFSTASMGSLTSSPSSCSLSSQVGLTSVTSIQERIMSTPGGEEAIERLKESEKIIAELNETWEEKLRKTEAIRMEREALLAEMGVAIREDGGTLGVFSPKKTPHLVNLNEDPLMSECLLYYIKDGITRVGQADAERRQDIVLSGAHIKEEHCIFRSERSNSGEVIVTLEPCERSETYVNGKRVSQPVQLRSGNRIIMGKNHVFRFNHPEQARAEREKTPSAETPSEPVDWTFAQRELLEKQGIDMKQEMEKRLQEMEILYKKEKEEADLLLEQQRLDYESKLQALQKQVETRSLAAETTEEEEEEEEVPWTQHEFELAQWAFRKWKSHQFTSLRDLLWGNAVYLKEANAISVELKKKVQFQFVLLTDTLYSPLPPELLPTEMEKTHEDRPFPRTVVAVEVQDLKNGATHYWSLEKLKQRLDLMREMYDRAGEMASSAQDESETTVTGSDPFYDRFHWFKLVGSSPIFHGCVNERLADRTPSPTFSTADSDITELADEQQDEMEDFDDEAFVDDAGSDAGTEEGSDLFSDGHDPFYDRSPWFILVGRAFVYLSNLLYPVPLIHRVAIVSEKGEVRGFLRVAVQAIAADEEAPDYGSGIRQSGTAKISFDNEYFNQSDFSSVAMTRSGLSLEELRIVEGQGQSSEVITPPEEISRINDLDLKSSTLLDGKMVMEGFSEEIGNHLKLGSAFTFRVTVLQASGILPEYADIFCQFNFLHRHDEAFSTEPLKNNGRGSPLAFYHVQNIAVEITESFVDYIKTKPIVFEVFGHYQQHPLHLQGQELNSPPQPCRRFFPPPMPLSKPVPATKLNTMSKTSLGQSMSKYDLLVWFEISELEPTGEYIPAVVDHTAGLPCQGTFLLHQGIQRRITVTIIHEKGSELHWKDVRELVVGRIRNKPEVDEAAVDAILSLNIISAKYLKSSHNSSRTFYRFEAVWDSSLHNSLLLNRVTPYGEKIYMTLSAYLELDHCIQPAVITKDVCMVFYSRDAKISPPRSLRSLFGSGYSKSPDSNRVTGIYELSLCKMSDTGSPGMQRRRRKILDTSVAYVRGEENLAGWRPRGDSLILEHQWELEKLELLHEVEKTRHFLLLRERLGDSIPKSLSDSLSPSLSSGTLSTSTSISSQISTTTFESAITPSESSGYDSGDIESLVDREKELATKCLQLLTHTFNREFSQVHGSVSDCKLSDISPIGRDPSESSFSSATLTPSSTCPSLVDSRSNSLDQKTPEANSRASSPCPEFEQFQIVPAVETPYLARAGKNEFLNLVPDIEEIRPSSVVSKKGYLHFKEPLYSNWAKHFVVVRRPYVFIYNSDKDPVERGIINLSTAQVEYSEDQQAMVKTPNTFAVCTKHRGVLLQALNDKDMNDWLYAFNPLLAGTIRSKLSRRCPSQSKY

SEQ ID NO: 44253 - protein, 1153 aa, Homo sapiens; identical to SEQ ID NO: 44251
  Payload ID: 9022
  Gene Symbol: KIF1B
  Gene Name: kinesin family member 1B
  Uniprot ID: O60333
  ENSP ID: ENSP00000366297

SEQ ID NO: 44254 - protein, 1809 aa, Homo sapiens
  Payload ID: 9022
  Gene Symbol: KIF1B
  Gene Name: kinesin family member 1B
  ENSP ID: ENSP00000478500
MSGASVKVAVRVRPFNSRETSKESKCIIQMQGNSTSIINPKNPKEAPKSFSFDYSYWSHTSPEDPCFASQNRVYNDIGKEMLLHAFEGYNVCIFAYGQTGAGKSYTMMGKQEESQAGIIPQLCEELFEKINDNCNEEMSYSVEVSYMEIYCERVRDLLNPKNKGNLRVREHPLLGPYVEDLSKLAVTSYTDIADLMDAGNKARTVAATNMNETSSRSHAVFTIVFTQKKHDNETNLSTEKVSKISLVDLAGSERADSTGAKGTRLKEGANINKSLTTLGKVISALAEVDNCTSKSKKKKKTDFIPYRDSVLTWLLRENLGGNSRTAMVAALSPADINYDETLSTLRYADRAKQIKCNAVINEDPNAKLVRELKEEVTRLKDLLRAQGLGDIIDNLKDFQNNKHRYLLASENQRPGHFSTASMGSLTSSPSSCSLSSQVGLTSVTSIQERIMSTPGGEEAIERLKESEKIIAELNETWEEKLRKTEAIRMEREALLAEMGVAIREDGGTLGVFSPKKTPHLVNLNEDPLMSECLLYYIKDGITRVGQADAERRQDIVLSGAHIKEEHCIFRSERSNSGEVIVTLEPCERSETYVNGKRVSQPVQLRSGNRIIMGKNHVFRFNHPEQARAEREKTPSAETPSEPVDWTFAQRELLEKQGIDMKQEMEKRLQEMEILYKKEKEEADLLLEQQRLDYESKLQALQKQVETRSLAAETTEEEEEEEEVPWTQHEFELAQWAFRKWKSHQFTSLRDLLWGNAVYLKEANAISVELKKKVQFQFVLLTDTLYSPLPPELLPTEMEKTHEDRPFPRTVVAVEVQDLKNGATHYWSLEKLKQRLDLMREMYDRAGEMASSAQDESETTVTGSDPFYDRFHWFKLVGSSPIFHGCVNERLADRTPSPTFSTADSDITELADEQQDEMEDFDDEAFVDDAGSDAGTEEGSDLFSDGHDPFYDRSPWFILVGRAFVYLSNLLYPVPLIHRVAIVSEKGEVRGFLRVAVQAIAADEEAPDYGSGIRQSGTAKISFDNEYFNQSDFSSVAMTRSGLSLEELRIVEGQGQSSEVITPPEEISRINDLDLKSSTLLDGKMVMEGFSEEIGNHLKLGSAFTFRVTVLQASGILPEYADIFCQFNFLHRHDEAFSTEPLKNNGRGSPLAFYHVQNIAVEITESFVDYIKTKPIVFEVFGHYQQHPLHLQGQELNSPPQPCRRFFPPPMPLSKPVPATKLNTMSKTSLGQSMSKYDLLVWFEISELEPTGEYIPAVVDHTAGLPCQGTFLLHQGIQRRITVTIIHEKGSELHWKDVRELVVGRIRNKPEVDEAAVDAILSLNIISAKYLKSSHNSSRTFYRFEAVWDSSLHNSLLLNRVTPYGEKIYMTLSAYLELDHCIQPAVITKDVCMVFYSRDAKISPPRSLRSLFGSGYSKSPDSNRVTGIYELSLCKMSDTGSPGMQRRRRKILDTSVAYVRGEENLAGWRPRGDSLILEHQWELEKLELLHEVEKTRHFLLLRERLGDSIPKSLSDSLSPSLSSGTLSTSTSISSQISTTTFESAITPSESSGYDSGDIESLVDREKELATKCLQLLTHTFNREFSQVHGSVSDCKLSDISPIGRDPSESSFSSATLTPSSTCPSLVDSRSNSLDQKTPEANSRASSPCPEFEQFQIVPAVETPYLARAGKNEFLNLVPDIEEIRPSSVVSKKGYLHFKEPLYSNWAKHFVVVRRPYVFIYNSDKDPVERGIINLSTAQVEYSEDQQAMVKTPNTFAVCTKHRGVLLQALNDKDMNDWLYAFNPLLAGTIRPGHLASEIIREDKSVSFSCQ

SEQ ID NO: 44255 - protein, 1797 aa, Homo sapiens
  Payload ID: 9022
  Gene Symbol: KIF1B
  Gene Name: kinesin family member 1B
  ENSP ID: ENSP00000480063
MSGASVKVAVRVRPFNSRETSKESKCIIQMQGNSTSIINPKNPKEAPKSFSFDYSYWSHTSPEDPCFASQNRVYNDIGKEMLLHAFEGYNVCIFAYGQTGAGKSYTMMGKQEESQAGIIPQLCEELFEKINDNCNEEMSYSVEVSYMEIYCERVRDLLNPKNKGNLRVREHPLLGPYVEDLSKLAVTSYTDIADLMDAGNKARTVAATNMNETSSRSHAVFTIVFTQKKHDNETNLSTEKVSKISLVDLAGSERADSTGAKGTRLKEGANINKSLTTLGKVISALAEVDNCTSKSKKKKKTDFIPYRDSVLTWLLRENLGGNSRTAMVAALSPADINYDETLSTLRYADRAKQIKCNAVINEDPNAKLVRELKEEVTRLKDLLRAQGLGDIIDIDPLIDDYSGSGSKSSMGSLTSSPSSCSLSSQVGLTSVTSIQERIMSTPGGEEAIERLKESEKIIAELNETWEEKLRKTEAIRMEREALLAEMGVAIREDGGTLGVFSPKKTPHLVNLNEDPLMSECLLYYIKDGITRVGQADAERRQDIVLSGAHIKEEHCIFRSERSNSGEVIVTLEPCERSETYVNGKRVSQPVQLRSGNRIIMGKNHVFRFNHPEQARAEREKTPSAETPSEPVDWTFAQRELLEKQGIDMKQEMEKRLQEMEILYKKEKEEADLLLEQQRLDYESKLQALQKQVETRSLAAETTEEEEEEEEVPWTQHEFELAQWAFRKWKSHQFTSLRDLLWGNAVYLKEANAISVELKKKVQFQFVLLTDTLYSPLPPELLPTEMEKTHEDRPFPRTVVAVEVQDLKNGATHYWSLEKLKQRLDLMREMYDRAGEMASSAQDESETTVTGSDPFYDRFHWFKLVGSSPIFHGCVNERLADRTPSPTFSTADSDITELADEQQDEMEDFDDEAFVDDAGSDAGTEEGSDLFSDGHDPFYDRSPWFILVGRAFVYLSNLLYPVPLIHRVAIVSEKGEVRGFLRVAVQAIAADEEAPDYGSGIRQSGTAKISFDNEYFNQSDFSSVAMTRSGLSLEELRIVEGQGQSSEVITPPEEISRINDLDLKSSTLLDGKMVMEGFSEEIGNHLKLGSAFTFRVTVLQASGILPEYADIFCQFNFLHRHDEAFSTEPLKNNGRGSPLAFYHVQNIAVEITESFVDYIKTKPIVFEVFGHYQQHPLHLQGQELNSPPQPCRRFFPPPMPLSKPVPATKLNTMSKTSLGQSMSKYDLLVWFEISELEPTGEYIPAVVDHTAGLPCQGTFLLHQGIQRRITVTIIHEKGSELHWKDVRELVVGRIRNKPEVDEAAVDAILSLNIISAKYLKSSHNSSRTFYRFEAVWDSSLHNSLLLNRVTPYGEKIYMTLSAYLELDHCIQPAVITKDVCMVFYSRDAKISPPRSLRSLFGSGYSKSPDSNRVTGIYELSLCKMSDTGSPGMQRRRRKILDTSVAYVRGEENLAGWRPRGDSLILEHQWELEKLELLHEVEKTRHFLLLRERLGDSIPKSLSDSLSPSLSSGTLSTSTSISSQISTTTFESAITPSESSGYDSGDIESLVDREKELATKCLQLLTHTFNREFSQVHGSVSDCKLSDISPIGRDPSESSFSSATLTPSSTCPSLVDSRSNSLDQKTPEANSRASSPCPEFEQFQIVPAVETPYLARAGKNEFLNLVPDIEEIRPSSVVSKKGYLHFKEPLYSNWAKHFVVVRRPYVFIYNSDKDPVERGIINLSTAQVEYSEDQQAMVKTPNTFAVCTKHRGVLLQALNDKDMNDWLYAFNPLLAGTIRPGHLASEIIREDKSVSFSCQ

SEQ ID NO: 44256 - protein, 498 aa, Homo sapiens
  Payload ID: 9022
  Gene Symbol: KIF1B
  Gene Name: kinesin family member 1B
  ENSP ID: ENSP00000489057
  MOD_RES (1)..(1): Any amino acid
XAVDAILSLNIISAKYLKSSHNSSRLFLDKDIPRTFYRFEAVWDSSLHNSLLLNRVTPYGEKIYMTLSAYLELDHCIQPAVITKDVCMVFYSRDAKISPPRSLRSLFGSGYSKSPDSNRVTGIYELSLCKMSDTGSPGMQRRRRKILDTSVAYVRGEENLAGWRPRGDSLILEHQWELEKLELLHEVEKTRHFLLLRERLGDSIPKSLSDSLSPSLSSGTLSTSTSISSQISTTTFESAITPSESSGYDSGDIESLVDREKELATKCLQLLTHTFNREFSQVHGSVSDCKLSDISPIGRDPSESSFSSATLTPSSTCPSLVDSRSNSLDQKTPEANSRASSPCPEFEQFQIVPAVETPYLARAGKNEFLNLVPDIEEIRPSSVVSKKGYLHFKEPLYSNWAKHFVVVRRPYVFIYNSDKDPVERGIINLSTAQVEYSEDQQAMVKTPNTFAVCTKHRGVLLQALNDKDMNDWLYAFNPLLAGTIRSKLSRRCPSQSKY

SEQ ID NO: 44257 - protein, 1103 aa, Homo sapiens
  Payload ID: 9023
  Gene Symbol: KIF1C
  Gene Name: kinesin family member 1C
  Uniprot ID: O43896
  ENSP ID: ENSP00000320821
MAGASVKVAVRVRPFNARETSQDAKCVVSMQGNTTSIINPKQSKDAPKSFTFDYSYWSHTSTEDPQFASQQQVYRDIGEEMLLHAFEGYNVCIFAYGQTGAGKSYTMMGRQEPGQQGIVPQLCEDLFSRVSENQSAQLSYSVEVSYMEIYCERVRDLLNPKSRGSLRVREHPILGPYVQDLSKLAVTSYADIADLMDCGNKARTVAATNMNETSSRSHAVFTIVFTQRCHDQLTGLDSEKVSKISLVDLAGSERADSSGARGMRLKEGANINKSLTTLGKVISALADMQSKKRKSDFIPYRDSVLTWLLKENLGGNSRTAMIAALSPADINYEETLSTLRYADRTKQIRCNAIINEDPNARLIRELQEEVARLRELLMAQGLSASALEGLKTEEGSVRGALPAVSSPPAPVSPSSPTTHNGELEPSFSPNTESQIGPEEAMERLQETEKIIAELNETWEEKLRKTEALRMEREALLAEMGVAVREDGGTVGVFSPKKTPHLVNLNEDPLMSECLLYHIKDGVTRVGQVDMDIKLTGQFIREQHCLFRSIPQPDGEVVVTLEPCEGAETYVNGKLVTEPLVLKSGNRIVMGKNHVFRFNHPEQARLERERGVPPPPGPPSEPVDWNFAQKELLEQQGIDIKLEMEKRLQDLENQYRKEKEEADLLLEQQRLYADSDSGDDSDKRSCEESWRLISSLREQLPPTTVQTIVKRCGLPSSGKRRAPRRVYQIPQRRRLQGKDPRWATMADLKMQAVKEICYEVALADFRHGRAEIEALAALKMRELCRTYGKPDGPGDAWRAVARDVWDTVGEEEGGGAGSGGGSEEGARGAEVEDLRAHIDKLTGILQEVKLQNSSKDRELQALRDRMLRMERVIPLAQDHEDENEEGGEVPWAPPEGSEAAEEAAPSDRMPSARPPSPPLSSWERVSRLMEEDPAFRRGRLRWLKQEQLRLQGLQGSGGRGGGLRRPPARFVPPHDCKLRFPFKSNPQHRESWPGMGSGEAPTPLQPPEEVTPHPATPARRPPSPRRSHHPRRNSLDGGGRSRGAGSAQPEPQHFQPKKHNSYPQPPQPYPAQRPPGPRYPPYTTPPRMRRQRSAPDLKESGAAV

SEQ ID NO: 44258 - protein, 138 aa, Homo sapiens
  Payload ID: 9023
  Gene Symbol: KIF1C
  Gene Name: kinesin family member 1C
  ENSP ID: ENSP00000458697
MAGASVKVAVRVRPFNARETSQDAKCVVSMQGNTTSIINPKQSKDAPKSFTFDYSYWSHTSTEDPQFASQQQVYRDIGEEMLLHAFEGYNVCIFAYGQTGAGKSYTMMGRQEPGQQGIVPQLCEDLFSRVSENQSAQL

SEQ ID NO: 44259 - protein, 890 aa, Homo sapiens
  Payload ID: 9024
  Gene Symbol: KIF20A
  Gene Name: kinesin family member 20A
  Uniprot ID: O95235
  ENSP ID: ENSP00000378356
MSQGILSPPAGLLSDDDVVVSPMFESTAADLGSVVRKNLLSDCSVVSTSLEDKQQVPSEDSMEKVKVYLRVRPLLPSELERQEDQGCVRIENVETLVLQAPKDSFALKSNERGIGQATHRFTFSQIFGPEVGQASFFNLTVKEMVKDVLKGQNWLIYTYGVTNSGKTHTIQGTIKDGGILPRSLALIFNSLQGQLHPTPDLKPLLSNEVIWLDSKQIRQEEMKKLSLLNGGLQEEELSTSLKRSVYIESRIGTSTSFDSGIAGLSSISQCTSSSQLDETSHRWAQPDTAPLPVPANIRFSIWISFFEIYNELLYDLLEPPSQQRKRQTLRLCEDQNGNPYVKDLNWIHVQDAEEAWKLLKVGRKNQSFASTHLNQNSSRSHSIFSIRILHLQGEGDIVPKISELSLCDLAGSERCKDQKSGERLKEAGNINTSLHTLGRCIAALRQNQQNRSKQNLVPFRDSKLTRVFQGFFTGRGRSCMIVNVNPCASTYDETLHVAKFSAIASQLVHAPPMQLGFPSLHSFIKEHSLQVSPSLEKGAKADTGLDDDIENEADISMYGKEELLQVVEAMKTLLLKERQEKLQLEMHLRDEICNEMVEQMQQREQWCSEHLDTQKELLEEMYEEKLNILKESLTSFYQEEIQERDEKIEELEALLQEARQQSVAHQQSGSELALRRSQRLAASASTQQLQEVKAKLQQCKAELNSTTEELHKYQKMLEPPPSAKPFTIDVDKKLEEGQKNIRLLRTELQKLGESLQSAERACCHSTGAGKLRQALTTCDDILIKQDQTLAELQNNMVLVKLDLRKKAACIAEQYHTVLKLQGQVSAKKRLGTNQENQQPNQQPPGKKPFLRNLLPRTPTCQSSTDCSPYARILRSRRSPLLKSGPFGKKY

SEQ ID NO: 44260 - protein, 872 aa, Homo sapiens
  Payload ID: 9024
  Gene Symbol: KIF20A
  Gene Name: kinesin family member 20A
  Uniprot ID: O95235
  ENSP ID: ENSP00000420880
MSQGILSPPAGLLSDDDVVVSPMFESTAADLGSVVRKNLLSDCSVVSTSLEDKQQVPSEDSMEKEDQGCVRIENVETLVLQAPKDSFALKSNERGIGQATHRFTFSQIFGPEVGQASFFNLTVKEMVKDVLKGQNWLIYTYGVTNSGKTHTIQGTIKDGGILPRSLALIFNSLQGQLHPTPDLKPLLSNEVIWLDSKQIRQEEMKKLSLLNGGLQEEELSTSLKRSVYIESRIGTSTSFDSGIAGLSSISQCTSSSQLDETSHRWAQPDTAPLPVPANIRFSIWISFFEIYNELLYDLLEPPSQQRKRQTLRLCEDQNGNPYVKDLNWIHVQDAEEAWKLLKVGRKNQSFASTHLNQNSSRSHSIFSIRILHLQGEGDIVPKISELSLCDLAGSERCKDQKSGERLKEAGNINTSLHTLGRCIAALRQNQQNRSKQNLVPFRDSKLTRVFQGFFTGRGRSCMIVNVNPCASTYDETLHVAKFSAIASQLVHAPPMQLGFPSLHSFIKEHSLQVSPSLEKGAKADTGLDDDIENEADISMYGKEELLQVVEAMKTLLLKERQEKLQLEMHLRDEICNEMVEQMQQREQWCSEHLDTQKELLEEMYEEKLNILKESLTSFYQEEIQERDEKIEELEALLQEARQQSVAHQQSGSELALRRSQRLAASASTQQLQEVKAKLQQCKAELNSTTEELHKYQKMLEPPPSAKPFTIDVDKKLEEGQKNIRLLRTELQKLGESLQSAERACCHSTGAGKLRQALTTCDDILIKQDQTLAELQNNMVLVKLDLRKKAACIAEQYHTVLKLQGQVSAKKRLGTNQENQQPNQQPPGKKPFLRNLLPRTPTCQSSTDCSPYARILRSRRSPLLKSGPFGKKY

SEQ ID NO: 44261 - protein, 159 aa, Homo sapiens
  Payload ID: 9024
  Gene Symbol: KIF20A
  Gene Name: kinesin family member 20A
  ENSP ID: ENSP00000422928
MSQGILSPPAGLLSDDDVVVSPMFESTAADLGSVVRKNLLSDCSVVSTSLEDKQQVPSEDSMEKVKVYLRVRPLLPSELERQEDQGCVRIENVETLVLQAPKDSFALKSNERGIGQATHRFTFSQIFGPEVGQASFFNLTVKEMVKDVLKGQNWLIYTY

SEQ ID NO: 44262 - protein, 225 aa, Homo sapiens
  Payload ID: 9024
  Gene Symbol: KIF20A
  Gene Name: kinesin family member 20A
  ENSP ID: ENSP00000424056
MSQGILSPPAGLLSDDDVVVSPMFESTAADLGSVVRKNLLSDCSVVSTSLEDKQQVPSEDSMEKVKVYLRVRPLLPSELERQEDQGCVRIENVETLVLQAPKDSFALKSNERGIGQATHRFTFSQIFGPEVGQASFFNLTVKEMVKDVLKGQNWLIYTYGVTNSGKTHTIQGTIKDGGILPRSLALIFNSLQGQLHPTPDLKPLLSNEVIWLDSKQIRQEEMKKL

SEQ ID NO: 44263 - protein, 82 aa, Homo sapiens
  Payload ID: 9024
  Gene Symbol: KIF20A
  Gene Name: kinesin family member 20A
  ENSP ID: ENSP00000426704
AMKTLLLKERQEKLQLEMHLRDEICNEMVEQMQQREQWCSEHLDTQKELLEEMYEEKLNILKESLTSFYQEEIQSCISIRKC

SEQ ID NO: 44264 - protein, 1780 aa, Homo sapiens
  Payload ID: 9025
  Gene Symbol: KIF20B
  Gene Name: kinesin family member 20B
  Uniprot ID: Q96Q89
  ENSP ID: ENSP00000260753
MESNFNQEGVPRPSYVFSADPIARPSEINFDGIKLDLSHEFSLVAPNTEANSFESKDYLQVCLRIRPFTQSEKELESEGCVHILDSQTVVLKEPQCILGRLSEKSSGQMAQKFSFSKVFGPATTQKEFFQGCIMQPVKDLLKGQSRLIFTYGLTNSGKTYTFQGTEENIGILPRTLNVLFDSLQERLYTKMNLKPHRSREYLRLSSEQEKEEIASKSALLRQIKEVTVHNDSDDTLYGSLTNSLNISEFEESIKDYEQANLNMANSIKFSVWVSFFEIYNEYIYDLFVPVSSKFQKRKMLRLSQDVKGYSFIKDLQWIQVSDSKEAYRLLKLGIKHQSVAFTKLNNASSRSHSIFTVKILQIEDSEMSRVIRVSELSLCDLAGSERTMKTQNEGERLRETGNINTSLLTLGKCINVLKNSEKSKFQQHVPFRESKLTHYFQSFFNGKGKICMIVNISQCYLAYDETLNVLKFSAIAQKVCVPDTLNSSQEKLFGPVKSSQDVSLDSNSNSKILNVKRATISWENSLEDLMEDEDLVEELENAEETQNVETKLLDEDLDKTLEENKAFISHEEKRKLLDLIEDLKKKLINEKKEKLTLEFKIREEVTQEFTQYWAQREADFKETLLQEREILEENAERRLAIFKDLVGKCDTREEAAKDICATKVETEEATACLELKFNQIKAELAKTKGELIKTKEELKKRENESDSLIQELETSNKKIITQNQRIKELINIIDQKEDTINEFQNLKSHMENTFKCNDKADTSSLIINNKLICNETVEVPKDSKSKICSERKRVNENELQQDEPPAKKGSIHVSSAITEDQKKSEEVRPNIAEIEDIRVLQENNEGLRAFLLTIENELKNEKEEKAELNKQIVHFQQELSLSEKKNLTLSKEVQQIQSNYDIAIAELHVQKSKNQEQEEKIMKLSNEIETATRSITNNVSQIKLMHTKIDELRTLDSVSQISNIDLLNLRDLSNGSEEDNLPNTQLDLLGNDYLVSKQVKEYRIQEPNRENSFHSSIEAIWEECKEIVKASSKKSHQIEELEQQIEKLQAEVKGYKDENNRLKEKEHKNQDDLLKEKETLIQQLKEELQEKNVTLDVQIQHVVEGKRALSELTQGVTCYKAKIKELETILETQKVECSHSAKLEQDILEKESIILKLERNLKEFQEHLQDSVKNTKDLNVKELKLKEEITQLTNNLQDMKHLLQLKEEEEETNRQETEKLKEELSASSARTQNLKADLQRKEEDYADLKEKLTDAKKQIKQVQKEVSVMRDEDKLLRIKINELEKKKNQCSQELDMKQRTIQQLKEQLNNQKVEEAIQQYERACKDLNVKEKIIEDMRMTLEEQEQTQVEQDQVLEAKLEEVERLATELEKWKEKCNDLETKNNQRSNKEHENNTDVLGKLTNLQDELQESEQKYNADRKKWLEEKMMLITQAKEAENIRNKEMKKYAEDRERFFKQQNEMEILTAQLTEKDSDLQKWREERDQLVAALEIQLKALISSNVQKDNEIEQLKRIISETSKIETQIMDIKPKRISSADPDKLQTEPLSTSFEISRNKIEDGSVVLDSCEVSTENDQSTRFPKPELEIQFTPLQPNKMAVKHPGCTTPVTVKIPKARKRKSNEMEEDLVKCENKKNATPRTNLKFPISDDRNSSVKKEQKVAIRPSSKKTYSLRSQASIIGVNLATKKKEGTLQKFGDFLQHSPSILQSKAKKIIETMSSSKLSNVEASKENVSQPKRAKRKLYTSEISSPIDISGQVILMDQKMKESDHQIIKRRLRTKTAK

SEQ ID NO: 44265 - protein, 1820 aa, Homo sapiens
  Payload ID: 9025
  Gene Symbol: KIF20B
  Gene Name: kinesin family member 20B
  Uniprot ID: Q96Q89
  ENSP ID: ENSP00000360793
MESNFNQEGVPRPSYVFSADPIARPSEINFDGIKLDLSHEFSLVAPNTEANSFESKDYLQVCLRIRPFTQSEKELESEGCVHILDSQTVVLKEPQCILGRLSEKSSGQMAQKFSFSKVFGPATTQKEFFQGCIMQPVKDLLKGQSRLIFTYGLTNSGKTYTFQGTEENIGILPRTLNVLFDSLQERLYTKMNLKPHRSREYLRLSSEQEKEEIASKSALLRQIKEVTVHNDSDDTLYGSLTNSLNISEFEESIKDYEQANLNMANSIKFSVWVSFFEIYNEYIYDLFVPVSSKFQKRKMLRLSQDVKGYSFIKDLQWIQVSDSKEAYRLLKLGIKHQSVAFTKLNNASSRSHSIFTVKILQIEDSEMSRVIRVSELSLCDLAGSERTMKTQNEGERLRETGNINTSLLTLGKCINVLKNSEKSKFQQHVPFRESKLTHYFQSFFNGKGKICMIVNISQCYLAYDETLNVLKFSAIAQKVCVPDTLNSSQEKLFGPVKSSQDVSLDSNSNSKILNVKRATISWENSLEDLMEDEDLVEELENAEETQNVETKLLDEDLDKTLEENKAFISHEEKRKLLDLIEDLKKKLINEKKEKLTLEFKIREEVTQEFTQYWAQREADFKETLLQEREILEENAERRLAIFKDLVGKCDTREEAAKDICATKVETEETHNYVGFEDIIDSLQDNVADIKKQAEIAHLYIASLPDPQEATACLELKFNQIKAELAKTKGELIKTKEELKKRENESDSLIQELETSNKKIITQNQRIKELINIIDQKEDTINEFQNLKSHMENTFKCNDKADTSSLIINNKLICNETVEVPKDSKSKICSERKRVNENELQQDEPPAKKGSIHVSSAITEDQKKSEEVRPNIAEIEDIRVLQENNEGLRAFLLTIENELKNEKEEKAELNKQIVHFQQELSLSEKKNLTLSKEVQQIQSNYDIAIAELHVQKSKNQEQEEKIMKLSNEIETATRSITNNVSQIKLMHTKIDELRTLDSVSQISNIDLLNLRDLSNGSEEDNLPNTQLDLLGNDYLVSKQVKEYRIQEPNRENSFHSSIEAIWEECKEIVKASSKKSHQIEELEQQIEKLQAEVKGYKDENNRLKEKEHKNQDDLLKEKETLIQQLKEELQEKNVTLDVQIQHVVEGKRALSELTQGVTCYKAKIKELETILETQKVECSHSAKLEQDILEKESIILKLERNLKEFQEHLQDSVKNTKDLNVKELKLKEEITQLTNNLQDMKHLLQLKEEEEETNRQETEKLKEELSASSARTQNLKADLQRKEEDYADLKEKLTDAKKQIKQVQKEVSVMRDEDKLLRIKINELEKKKNQCSQELDMKQRTIQQLKEQLNNQKVEEAIQQYERACKDLNVKEKIIEDMRMTLEEQEQTQVEQDQVLEAKLEEVERLATELEKWKEKCNDLETKNNQRSNKEHENNTDVLGKLTNLQDELQESEQKYNADRKKWLEEKMMLITQAKEAENIRNKEMKKYAEDRERFFKQQNEMEILTAQLTEKDSDLQKWREERDQLVAALEIQLKALISSNVQKDNEIEQLKRIISETSKIETQIMDIKPKRISSADPDKLQTEPLSTSFEISRNKIEDGSVVLDSCEVSTENDQSTRFPKPELEIQFTPLQPNKMAVKHPGCTTPVTVKIPKARKRKSNEMEEDLVKCENKKNATPRTNLKFPISDDRNSSVKKEQKVAIRPSSKKTYSLRSQASIIGVNLATKKKEGTLQKFGDFLQHSPSILQSKAKKIIETMSSSKLSNVEASKENVSQPKRAKRKLYTSEISSPIDISGQVILMDQKMKESDHQIIKRRLRTKTAK

SEQ ID NO: 44266 - protein, 206 aa, Homo sapiens
  Payload ID: 9025
  Gene Symbol: KIF20B
  Gene Name: kinesin family member 20B
  ENSP ID: ENSP00000390946
MESNFNQEGVPRPSYVFSADPIARPSEINFDGIKLDLSHEFSLVAPNTEANSFESKDYLQVCLRIRPFTQSEKELESEGCVHILDSQTVVLKEPQCILGRLSEKSSGQMAQKFSFSKVFGPATTQKEFFQGCIMQPVKDLLKGQSRLIFTYGLTNSGKTYTFQGTEENIGILPRTLNVLFDSLQERLYTKMNLKPHRSREYLRLSS

SEQ ID NO: 44267 - protein, 1661 aa, Homo sapiens
  Payload ID: 9026
  Gene Symbol: KIF21A
  Gene Name: kinesin family member 21A
  Uniprot ID: Q7Z4S6
  ENSP ID: ENSP00000354851
MLGAPDESSVRVAVRIRPQLAKEKIEGCHICTSVTPGEPQVFLGKDKAFTFDYVFDIDSQQEQIYIQCIEKLIEGCFEGYNATVFAYGQTGAGKTYTMGTGFDVNIVEEELGIISRAVKHLFKSIEEKKHIAIKNGLPAPDFKVNAQFLELYNEEVLDLFDTTRDIDAKSKKSNIRIHEDSTGGIYTVGVTTRTVNTESEMMQCLKLGALSRTTASTQMNVQSSRSHAIFTIHVCQTRVCPQIDADNATDNKIISESAQMNEFETLTAKFHFVDLAGSERLKRTGATGERAKEGISINCGLLALGNVISALGDKSKRATHVPYRDSKLTRLLQDSLGGNSQTIMIACVSPSDRDFMETLNTLKYANRARNIKNKVMVNQDRASQQINALRSEITRLQMELMEYKTGKRIIDEEGVESINDMFHENAMLQTENNNLRVRIKAMQETVDALRSRITQLVSDQANHVLARAGEGNEEISNMIHSYIKEIEDLRAKLLESEAVNENLRKNLTRATARAPYFSGSSTFSPTILSSDKETIEIIDLAKKDLEKLKRKEKRKKKSVAGKEDNTDTDQEKKEEKGVSERENNELEVEESQEVSDHEDEEEEEEEEEDDIDGGESSDESDSESDEKANYQADLANITCEIAIKQKLIDELENSQKRLQTLKKQYEEKLMMLQHKIRDTQLERDQVLQNLGSVESYSEEKAKKVRSEYEKKLQAMNKELQRLQAAQKEHARLLKNQSQYEKQLKKLQQDVMEMKKTKVRLMKQMKEEQEKARLTESRRNREIAQLKKDQRKRDHQLRLLEAQKRNQEVVLRRKTEEVTALRRQVRPMSDKVAGKVTRKLSSSDAPAQDTGSSAAAVETDASRTGAQQKMRIPVARVQALPTPATNGNRKKYQRKGLTGRVFISKTARMKWQLLERRVTDIIMQKMTISNMEADMNRLLKQREELTKRREKLSKRREKIVKENGEGDKNVANINEEMESLTANIDYINDSISDCQANIMQMEEAKEEGETLDVTAVINACTLTEARYLLDHFLSMGINKGLQAAQKEAQIKVLEGRLKQTEITSATQNQLLFHMLKEKAELNPELDALLGHALQDLDSVPLENVEDSTDEDAPLNSPGSEGSTLSSDLMKLCGEVKPKNKARRRTTTQMELLYADSSELASDTSTGDASLPGPLTPVAEGQEIGMNTETSGTSAREKELSPPPGLPSKIGSISRQSSLSEKKIPEPSPVTRRKAYEKAEKSKAKEQKHSDSGTSEASLSPPSSPPSRPRNELNVFNRLTVSQGNTSVQQDKSDESDSSLSEVHRSSRRGIINPFPASKGIRAFPLQCIHIAEGHTKAVLCVDSTDDLLFTGSKDRTCKVWNLVTGQEIMSLGGHPNNVVSVKYCNYTSLVFTVSTSYIKVWDIRDSAKCIRTLTSSGQVTLGDACSASTSRTVAIPSGENQINQIALNPTGTFLYAASGNAVRMWDLKRFQSTGKLTGHLGPVMCLTVDQISSGQDLIITGSKDHYIKMFDVTEGALGTVSPTHNFEPPHYDGIEALTIQGDNLFSGSRDNGIKKWDLTQKDLLQQVPNAHKDWVCALGVVPDHPVLLSGCRGGILKVWNMDTFMPVGEMKGHDSPINAICVNSTHIFTAADDRTVRIWKARNLQDGQISDTGDLGEDIASN

SEQ ID NO: 44268 - protein, 1674 aa, Homo sapiens
  Payload ID: 9026
  Gene Symbol: KIF21A
  Gene Name: kinesin family member 21A
  Uniprot ID: Q7Z4S6
  ENSP ID: ENSP00000354878
MLGAPDESSVRVAVRIRPQLAKEKIEGCHICTSVTPGEPQVFLGKDKAFTFDYVFDIDSQQEQIYIQCIEKLIEGCFEGYNATVFAYGQTGAGKTYTMGTGFDVNIVEEELGIISRAVKHLFKSIEEKKHIAIKNGLPAPDFKVNAQFLELYNEEVLDLFDTTRDIDAKSKKSNIRIHEDSTGGIYTVGVTTRTVNTESEMMQCLKLGALSRTTASTQMNVQSSRSHAIFTIHVCQTRVCPQIDADNATDNKIISESAQMNEFETLTAKFHFVDLAGSERLKRTGATGERAKEGISINCGLLALGNVISALGDKSKRATHVPYRDSKLTRLLQDSLGGNSQTIMIACVSPSDRDFMETLNTLKYANRARNIKNKVMVNQDRASQQINALRSEITRLQMELMEYKTGKRIIDEEGVESINDMFHENAMLQTENNNLRVRIKAMQETVDALRSRITQLVSDQANHVLARAGEGNEEISNMIHSYIKEIEDLRAKLLESEAVNENLRKNLTRATARAPYFSGSSTFSPTILSSDKETIEIIDLAKKDLEKLKRKEKRKKKRLQKLEESNREERSVAGKEDNTDTDQEKKEEKGVSERENNELEVEESQEVSDHEDEEEEEEEEEDDIDGGESSDESDSESDEKANYQADLANITCEIAIKQKLIDELENSQKRLQTLKKQYEEKLMMLQHKIRDTQLERDQVLQNLGSVESYSEEKAKKVRSEYEKKLQAMNKELQRLQAAQKEHARLLKNQSQYEKQLKKLQQDVMEMKKTKVRLMKQMKEEQEKARLTESRRNREIAQLKKDQRKRDHQLRLLEAQKRNQEVVLRRKTEEVTALRRQVRPMSDKVAGKVTRKLSSSDAPAQDTGSSAAAVETDASRTGAQQKMRIPVARVQALPTPATNGNRKKYQRKGLTGRVFISKTARMKWQLLERRVTDIIMQKMTISNMEADMNRLLKQREELTKRREKLSKRREKIVKENGEGDKNVANINEEMESLTANIDYINDSISDCQANIMQMEEAKEEGETLDVTAVINACTLTEARYLLDHFLSMGINKGLQAAQKEAQIKVLEGRLKQTEITSATQNQLLFHMLKEKAELNPELDALLGHALQDLDSVPLENVEDSTDEDAPLNSPGSEGSTLSSDLMKLCGEVKPKNKARRRTTTQMELLYADSSELASDTSTGDASLPGPLTPVAEGQEIGMNTETSGTSAREKELSPPPGLPSKIGSISRQSSLSEKKIPEPSPVTRRKAYEKAEKSKAKEQKHSDSGTSEASLSPPSSPPSRPRNELNVFNRLTVSQGNTSVQQDKSDESDSSLSEVHRSSRRGIINPFPASKGIRAFPLQCIHIAEGHTKAVLCVDSTDDLLFTGSKDRTCKVWNLVTGQEIMSLGGHPNNVVSVKYCNYTSLVFTVSTSYIKVWDIRDSAKCIRTLTSSGQVTLGDACSASTSRTVAIPSGENQINQIALNPTGTFLYAASGNAVRMWDLKRFQSTGKLTGHLGPVMCLTVDQISSGQDLIITGSKDHYIKMFDVTEGALGTVSPTHNFEPPHYDGIEALTIQGDNLFSGSRDNGIKKWDLTQKDLLQQVPNAHKDWVCALGVVPDHPVLLSGCRGGILKVWNMDTFMPVGEMKGHDSPINAICVNSTHIFTAADDRTVRIWKARNLQDGQISDTGDLGEDIASN

SEQ ID NO: 44269 - protein, 1621 aa, Homo sapiens
  Payload ID: 9026
  Gene Symbol: KIF21A
  Gene Name: kinesin family member 21A
  Uniprot ID: Q7Z4S6
  ENSP ID: ENSP00000438075
MLGAPDESSVRVAVRIRPQLAKEKIEGCHICTSVTPGEPQVFLGKDKAFTFDYVFDIDSQQEQIYIQCIEKLIEGCFEGYNATVFAYGQTGAGKTYTMGTGFDVNIVEEELGIISRAVKHLFKSIEEKKHIAIKNGLPAPDFKVNAQFLELYNEEVLDLFDTTRDIDAKSKKSNIRIHEDSTGGIYTVGVTTRTVNTESEMMQCLKLGALSRTTASTQMNVQSSRSHAIFTIHVCQTRVCPQIDADNATDNKIISESAQMNEFETLTAKFHFVDLAGSERLKRTGATGERAKEGISINCGLLALGNVISALGDKSKRATHVPYRDSKLTRLLQDSLGGNSQTIMIACVSPSDRDFMETLNTLKYANRARNIKNKVMVNQDRASQQINALRSEITRLQMELMEYKTGKRIIDEEGVESINDMFHENAMLQTENNNLRVRIKAMQETVDALRSRITQLVSDQANHVLARAGEGNEEISNMIHSYIKEIEDLRAKLLESEAVNENLRKNLTRATARAPYFSGSSTFSPTILSSDKETIEIIDLAKKDLEKLKRKEKRKKKSVAGKEDNTDTDQEKKEEKGVSERENNELEVEESQEVSDHEDEEEEEEEEEDDIDGGESSDESDSESDEKANYQADLANITCEIAIKQKLIDELENSQKRLQTLKKQYEEKLMMLQHKIRDTQLERDQVLQNLGSVESYSEEKAKKVRSEYEKKLQAMNKELQRLQAAQKEHARLLKNQSQYEKQLKKLQQDVMEMKKTKVRLMKQMKEEQEKARLTESRRNREIAQLKKDQRKRDVTALRRQVRPMSDKVAGKVTRKLSSSDAPAQDTGSSAAAVETDASRTGAQQKMRIPVARVQALPTPATNGNRKKYQRKGLTGRVFISKTARMKWQLLERRVTDIIMQKMTISNMEADMNRLLKQREELTKRREKLSKRREKIVKENGEGDKNVANINEEMESLTANIDYINDSISDCQANIMQMEEAKEEGETLDVTAVINACTLTEARYLLDHFLSMGINKGLQAAQKEAQIKVLEGRLKQTEITSATQNQLLFHMLKEKAELNPELDALLGHALQDLDSVPLENVEDSTDEDAPLNSPGSEGSTLSSDLMKLCGEVKPKNKARRRTTTQMELLYADSSELASDTSTGDASLPGPLTPVAEGQEIGMNTETSGTSAREKELSPPPGLPSKIGSISRQSSLSEKKIPEPSPVTRRKAYEKAEKSKAKEQKHSDSGTSEASLSPPSSPPSRPRNELNVFNRLTVSQGNTSVQQDKGIINPFPASKGIRAFPLQCIHIAEGHTKAVLCVDSTDDLLFTGSKDRTCKVWNLVTGQEIMSLGGHPNNVVSVKYCNYTSLVFTVSTSYIKVWDIRDSAKCIRTLTSSGQVTLGDACSASTSRTVAIPSGENQINQIALNPTGTFLYAASGNAVRMWDLKRFQSTGKLTGHLGPVMCLTVDQISSGQDLIITGSKDHYIKMFDVTEGALGTVSPTHNFEPPHYDGIEALTIQGDNLFSGSRDNGIKKWDLTQKDLLQQVPNAHKDWVCALGVVPDHPVLLSGCRGGILKVWNMDTFMPVGEMKGHDSPINAICVNSTHIFTAADDRTVRIWKARNLQDGQISDTGDLGEDIASN

SEQ ID NO: 44270 - protein, 1637 aa, Homo sapiens
  Payload ID: 9026
  Gene Symbol: KIF21A
  Gene Name: kinesin family member 21A
  Uniprot ID: Q7Z4S6
  ENSP ID: ENSP00000445606
MLGAPDESSVRVAVRIRPQLAKEKIEGCHICTSVTPGEPQVFLGKDKAFTFDYVFDIDSQQEQIYIQCIEKLIEGCFEGYNATVFAYGQTGAGKTYTMGTGFDVNIVEEELGIISRAVKHLFKSIEEKKHIAIKNGLPAPDFKVNAQFLELYNEEVLDLFDTTRDIDAKSKKSNIRIHEDSTGGIYTVGVTTRTVNTESEMMQCLKLGALSRTTASTQMNVQSSRSHAIFTIHVCQTRVCPQIDADNATDNKIISESAQMNEFETLTAKFHFVDLAGSERLKRTGATGERAKEGISINCGLLALGNVISALGDKSKRATHVPYRDSKLTRLLQDSLGGNSQTIMIACVSPSDRDFMETLNTLKYANRARNIKNKVMVNQDRASQQINALRSEITRLQMELMEYKTGKRIIDEEGVESINDMFHENAMLQTENNNLRVRIKAMQETVDALRSRITQLVSDQANHVLARAGEGNEEISNMIHSYIKEIEDLRAKLLESEAVNENLRKNLTRATARAPYFSGSSTFSPTILSSDKETIEIIDLAKKDLEKLKRKEKRKKKSVAGKEDNTDTDQEKKEEKGVSERENNELEVEESQEVSDHEDEEEEEEEEEDDIDGGESSDESDSESDEKANYQADLANITCEIAIKQKLIDELENSQKRLQTLKKQYEEKLMMLQHKIRDTQLERDQVLQNLGSVESYSEEKAKKVRSEYEKKLQAMNKELQRLQAAQKEHARLLKNQSQYEKQLKKLQQDVMEMKKTKVRLMKQMKEEQEKARLTESRRNREIAQLKKDQRKRDHQLRLLEAQKRNQEVVLRRKTEEVTALRRQVRPMSDKVAGKVTRKLSSSDAPAQDTGSSAAAVETDASRTGAQQKMRIPVARVQALPTPATNGNRKKYQRKGLTGRVFISKTARMKWQLLERRVTDIIMQKMTISNMEADMNRLLKQREELTKRREKLSKRREKIVKENGEGDKNVANINEEMESLTANIDYINDSISDCQANIMQMEEAKEEGETLDVTAVINACTLTEARYLLDHFLSMGINKGLQAAQKEAQIKVLEGRLKQTEITSATQNQLLFHMLKEKAELNPELDALLGHALQENVEDSTDEDAPLNSPGSEGSTLSSDLMKLCGEVKPKNKARRRTTTQMELLYADSSELASDTSTGDASLPGPLTPVAEGQEIGMNTETSGTSAREKELSPPPGLPSKIGSISRQSSLSEKKIPEPSPVTRRKAYEKAEKSKAKEQKHSDSGTSEASLSPPSSPPSRPRNELNVFNRLTVSQGNTSVQQDKGIINPFPASKGIRAFPLQCIHIAEGHTKAVLCVDSTDDLLFTGSKDRTCKVWNLVTGQEIMSLGGHPNNVVSVKYCNYTSLVFTVSTSYIKVWDIRDSAKCIRTLTSSGQVTLGDACSASTSRTVAIPSGENQINQIALNPTGTFLYAASGNAVRMWDLKRFQSTGKLTGHLGPVMCLTVDQISSGQDLIITGSKDHYIKMFDVTEGALGTVSPTHNFEPPHYDGIEALTIQGDNLFSGSRDNGIKKWDLTQKDLLQQVPNAHKDWVCALGVVPDHPVLLSGCRGGILKVWNMDTFMPVGEMKGHDSPINAICVNSTHIFTAADDRTVRIWKARNLQDGQISDTGDLGEDIASN

SEQ ID NO: 44271 - protein, 138 aa, Homo sapiens
  Payload ID: 9026
  Gene Symbol: KIF21A
  Gene Name: kinesin family member 21A
  ENSP ID: ENSP00000447070
KNVANINEEMESLTANIDYINDSISDCQANIMQMEEAKEEGETLDVTAVINACTLTEARYLLDHFLSMGINKGLQAAQKEAQIKVLEGRLKQTEITSATQNQLLFHMLKEKAELNPELDALLGHALQDLDSVPLGKYV

SEQ ID NO: 44272 - protein, 975 aa, Homo sapiens
  Payload ID: 9026
  Gene Symbol: KIF21A
  Gene Name: kinesin family member 21A
  ENSP ID: ENSP00000447765
  MOD_RES (1)..(1): Any amino acid
XIAIKQKLIDELENSQKRLQTLKKQYEEKLMMLQHKIRDTQLERDQVLQNLGSVESYSEEKAKKVRSEYEKKLQAMNKELQRLQAAQKEHARLLKNQSQYEKQLKKLQQDVMEMKKTKVRLMKQMKEEQEKARLTESRRNREIAQLKKDQRKRDHQLRLLEAQKRNQEVVLRRKTEEVTALRRQVRPMSDKVAGKVTRKLSSSDAPAQDTGSSAAAVETDASRTGAQQKMRIPVARVQALPTPATNGNRKKYQRKGLTGRVFISKTARMKWQLLERRVTDIIMQKMTISNMEADMNRLLKQREELTKRREKLSKRREKIVKENGEGDKNVANINEEMESLTANIDYINDSISDCQANIMQMEEAKEEGETLDVTAVINACTLTEARYLLDHFLSMGINKGLQAAQKEAQIKVLEGRLKQTEITSATQNQLLFHMLKEKAELNPELDALLGHALQDLDSVPLENVEDSTDEDAPLNSPGSEGSTLSSDLMKLCGEVKPKNKARRRTTTQMELLYADSSELASDTSTGDASLPGPLTPVAEGQEIGMNTETSGTSAREKELSPPPGLPSKIGSISRQSSLSEKKIPEPSPVTRRKAYEKAEKSKAKEQKQSDESDSSLSEVHRGIINPFPASKGIRAFPLQCIHIAEGHTKAVLCVDSTDDLLFTGSKDRTCKVWNLVTGQEIMSLGGHPNNVVSVKYCNYTSLVFTVSTSYIKVWDIRDSAKCIRTLTSSGQVTLGDACSASTSRTVAIPSGENQINQIALNPTGTFLYAASGNAVRMWDLKRFQSTGKLTGHLGPVMCLTVDQISSGQDLIITGSKDHYIKMFDVTEGALGTVSPTHNFEPPHYDGIEALTIQGDNLFSGSRDNGIKKWDLTQKDLLQQVPNAHKDWVCALGVVPDHPVLLSGCRGGILKVWNMDTFMPVGEMKGHDSPINAICVNSTHIFTAADDRTVRIWKARNLQDGQISDTGDLGEDIASN

SEQ ID NO: 44273 - protein, 655 aa, Homo sapiens
  Payload ID: 9026
  Gene Symbol: KIF21A
  Gene Name: kinesin family member 21A
  ENSP ID: ENSP00000448792
QREELTKRREKLSKRREKIVKENGEGDKNVANINEEMESLTANIDYINDSISDCQANIMQMEEAKEEGETLDVTAVINACTLTEARYLLDHFLSMGINKGLQAAQKEAQIKVLEGRLKQTEITSATQNQLLFHMLKEKAELNPELDALLGHALQENVEDSTDEDAPLNSPGSEGSTLSSDLMKLCGEVKPKNKARRRTTTQMELLYADSSELASDTSTGDASLPGPLTPVAEGQEIGMNTETSGTSAREKELSPPPGLPSKIGSISRQSSLSEKKIPEPSPVTRRKAYEKAEKSKAKEQKQGIINPFPASKGIRAFPLQCIHIAEGHTKAVLCVDSTDDLLFTGSKDRTCKVWNLVTGQEIMSLGGHPNNVVSVKYCNYTSLVFTVSTSYIKVWDIRDSAKCIRTLTSSGQVTLGDACSASTSRTVAIPSGENQINQIALNPTGTFLYAASGNAVRMWDLKRFQSTGKLTGHLGPVMCLTVDQISSGQDLIITGSKDHYIKMFDVTEGALGTVSPTHNFEPPHYDGIEALTIQGDNLFSGSRDNGIKKWDLTQKDLLQQVPNAHKDWVCALGVVPDHPVLLSGCRGGILKVWNMDTFMPVGEMKGHDSPINAICVNSTHIFTAADDRTVRIWKARNLQDGQISDTGDLGEDIASN

SEQ ID NO: 44274 - protein, 475 aa, Homo sapiens
  Payload ID: 9026
  Gene Symbol: KIF21A
  Gene Name: kinesin family member 21A
  ENSP ID: ENSP00000449698
  MOD_RES (1)..(1): Any amino acid
XRLLKNQSQYEKQLKKLQQDVMEMKKTKVRLMKQMKEEQEKARLTESRRNREIAQLKKDQRKRDHQLRLLEAQKRNQEVVLRRKTEEVTALRRQVRPMSDKVAGKVTRKLSSSDAPAQDTGSSAAAVETDASRTGAQQKMRIPVARVQALPTPATNGNRKKYQRKGLTGRVFISKTARMKWQLLERRVTDIIMQKMTISNMEADMNRLLKQREELTKRREKLSKRREKIVKENGEGDKNVANINEEMESLTANIDYINDSISDCQANIMQMEEAKEEGETLDVTAVINACTLTEARYLLDHFLSMGINKGLQAAQKEAQIKVLEGRLKQTEITSATQNQLLFHMLKEKAELNPELDALLGHALQENVEDSTDEDAPLNSPGSEGSTLSSDLMKLCGEVKPKNKARRRTTTQMELLYADSSELASDTSTGDASLPGPLTPVAEGQEIGMNTETSGTSAREKELSPPPGLPSKIGSM

SEQ ID NO: 44275 - protein, 290 aa, Homo sapiens
  Payload ID: 9026
  Gene Symbol: KIF21A
  Gene Name: kinesin family member 21A
  ENSP ID: ENSP00000449700
YTVGVTTRTVNTESESLFLPLFQMMQCLKLGALSRTTASTQMNVQSSRSHAIFTIHVCQTRVCPQIDADNATDNKIISESAQMNEFETLTAKFHFVDLAGSERLKRTGATGERAKEGISINCGLLALGNVISALGDKSKRATHVPYRDSKLTRLLQDSLGGNSQTIMIACVSPSDRDFMETLNTLKYANRARNIKNKVMVNQDRASQQINALRSEITRLQMELMEYKTGKRIIDEEGVESINDMFHENAMLQTENNNLRVRIKAMQETVDALRSRITQLVSDQANHVLAR

SEQ ID NO: 44276 - protein, 1624 aa, Homo sapiens
  Payload ID: 9027
  Gene Symbol: KIF21B
  Gene Name: kinesin family member 21B
  Uniprot ID: O75037
  ENSP ID: ENSP00000328494
MAGQGDCCVKVAVRIRPQLSKEKIEGCHICTSVTPGEPQVLLGKDKAFTYDFVFDLDTWQEQIYSTCVSKLIEGCFEGYNATVLAYGQTGAGKTYTMGTGFDMATSEEEQGIIPRAIAHLFGGIAERKRRAQEQGVAGPEFKVSAQFLELYNEEILDLFDSTRDPDTRHRRSNIKIHEDANGGIYTTGVTSRLIHSQEELIQCLKQGALSRTTASTQMNVQSSRSHAIFTIHLCQMRMCTQPDLVNEAVTGLPDGTPPSSEYETLTAKFHFVDLAGSERLKRTGATGERAKEGISINCGLLALGNVISALGDQSKKVVHVPYRDSKLTRLLQDSLGGNSQTIMIACVSPSDRDFMETLNTLKYANRARNIKNKVVVNQDKTSQQISALRAEIARLQMELMEYKAGKRVIGEDGAEGYSDLFRENAMLQKENGALRLRVKAMQEAIDAINNRVTQLMSQEANLLLAKAGDGNEAIGALIQNYIREIEELRTKLLESEAMNESLRRSLSRASARSPYSLGASPAAPAFGGSPASSMEDASEVIRRAKQDLERLKKKEVRQRRKSPEKEAFKKRAKLQQENSEETDENEAEEEEEERDESGCEEEEGREDEDEDSGSEESLVDSDSDPEEKEVNFQADLADLTCEIEIKQKLIDELENSQRRLQTLKHQYEEKLILLQNKIRDTQLERDRVLQNLSTMECYTEEKANKIKADYEKRLREMNRDLQKLQAAQKEHARLLKNQSRYERELKKLQAEVAEMKKAKVALMKQMREEQQRRRLVETKRNREIAQLKKEQRRQEFQIRALESQKRQQEMVLRRKTQEVSALRRLAKPMSERVAGRAGLKPPMLDSGAEVSASTTSSEAESGARSVSSIVRQWNRKINHFLGDHPAPTVNGTRPARKKFQKKGASQSFSKAARLKWQSLERRIIDIVMQRMTIVNLEADMERLIKKREELFLLQEALRRKRERLQAESPEEEKGLQELAEEIEVLAANIDYINDGITDCQATIVQLEETKEELDSTDTSVVISSCSLAEARLLLDNFLKASIDKGLQVAQKEAQIRLLEGRLRQTDMAGSSQNHLLLDALREKAEAHPELQALIYNVQQENGYASTDEEISEFSEGSFSQSFTMKGSTSHDDFKFKSEPKLSAQMKAVSAECLGPPLDISTKNITKSLASLVEIKEDGVGFSVRDPYYRDRVSRTVSLPTRGSTFPRQSRATETSPLTRRKSYDRGQPIRSTDVGFTPPSSPPTRPRNDRNVFSRLTSNQSQGSALDKGIISPVGGAKGARTAPLQCVSMAEGHTKPILCLDATDELLFTGSKDRSCKMWNLVTGQEIAALKGHPNNVVSIKYCSHSGLVFSVSTSYIKVWDIRDSAKCIRTLTSSGQVISGDACAATSTRAITSAQGEHQINQIALSPSGTMLYAASGNAVRIWELSRFQPVGKLTGHIGPVMCLTVTQTASQHDLVVTGSKDHYVKMFELGECVTGTIGPTHNFEPPHYDGIECLAIQGDILFSGSRDNGIKKWDLDQQELIQQIPNAHKDWVCALAFIPGRPMLLSACRAGVIKVWNVDNFTPIGEIKGHDSPINAICTNAKHIFTASSDCRVKLWNYVPGLTPCLPRRVLAIKGRATTLP

SEQ ID NO: 44277 - protein, 1610 aa, Homo sapiens
  Payload ID: 9027
  Gene Symbol: KIF21B
  Gene Name: kinesin family member 21B
  Uniprot ID: O75037
  ENSP ID: ENSP00000353724
MAGQGDCCVKVAVRIRPQLSKEKIEGCHICTSVTPGEPQVLLGKDKAFTYDFVFDLDTWQEQIYSTCVSKLIEGCFEGYNATVLAYGQTGAGKTYTMGTGFDMATSEEEQGIIPRAIAHLFGGIAERKRRAQEQGVAGPEFKVSAQFLELYNEEILDLFDSTRDPDTRHRRSNIKIHEDANGGIYTTGVTSRLIHSQEELIQCLKQGALSRTTASTQMNVQSSRSHAIFTIHLCQMRMCTQPDLVNEAVTGLPDGTPPSSEYETLTAKFHFVDLAGSERLKRTGATGERAKEGISINCGLLALGNVISALGDQSKKVVHVPYRDSKLTRLLQDSLGGNSQTIMIACVSPSDRDFMETLNTLKYANRARNIKNKVVVNQDKTSQQISALRAEIARLQMELMEYKAGKRVIGEDGAEGYSDLFRENAMLQKENGALRLRVKAMQEAIDAINNRVTQLMSQEANLLLAKAGDGNEAIGALIQNYIREIEELRTKLLESEAMNESLRRSLSRASARSPYSLGASPAAPAFGGSPASSMEDASEVIRRAKQDLERLKKKEVRQRRKSPEKEAFKKRAKLQQENSEETDENEAEEEEEERDESGCEEEEGREDEDEDSGSEESLVDSDSDPEEKEVNFQADLADLTCEIEIKQKLIDELENSQRRLQTLKHQYEEKLILLQNKIRDTQLERDRVLQNLSTMECYTEEKANKIKADYEKRLREMNRDLQKLQAAQKEHARLLKNQSRYERELKKLQAEVAEMKKAKVALMKQMREEQQRRRLVETKRNREIAQLKKEQRRQEFQIRALESQKRQQEMVLRRKTQEVSALRRLAKPMSERVAGRAGLKPPMLDSGAEVSASTTSSEAESGARSVSSIVRQWNRKINHFLGDHPAPTVNGTRPARKKFQKKGASQSFSKAARLKWQSLERRIIDIVMQRMTIVNLEADMERLIKKREELFLLQEALRRKRERLQAESPEEEKGLQELAEEIEVLAANIDYINDGITDCQATIVQLEETKEELDSTDTSVVISSCSLAEARLLLDNFLKASIDKGLQVAQKEAQIRLLEGRLRQTDMAGSSQNHLLLDALREKAEAHPELQALIYNVQQENGYASTDEEISEFSEGSFSQSFTMKGSTSHDDFKFKSEPKLSAQMKAVSAECLGPPLDISTKNITKSLASLVEIKEDGVGFSVRDPYYRDRVSRTVSLPTRGSTFPRQSRATETSPLTRRKSYDRGQPIRSTDVGFTPPSSPPTRPRNDRNVFSRLTSNQSQGSALDKGIISPVGGAKGARTAPLQCVSMAEGHTKPILCLDATDELLFTGSKDRSCKMWNLVTGQEIAALKGHPNNVVSIKYCSHSGLVFSVSTSYIKVWDIRDSAKCIRTLTSSGQVISGDACAATSTRAITSAQGEHQINQIALSPSGTMLYAASGNAVRIWELSRFQPVGKLTGHIGPVMCLTVTQTASQHDLVVTGSKDHYVKMFELGECVTGTIGPTHNFEPPHYDGIECLAIQGDILFSGSRDNGIKKWDLDQQELIQQIPNAHKDWVCALAFIPGRPMLLSACRAGVIKVWNVDNFTPIGEIKGHDSPINAICTNAKHIFTASSDLTVKFWSVRRLPHSGPP

SEQ ID NO: 44278 - protein, 1637 aa, Homo sapiens
  Payload ID: 9027
  Gene Symbol: KIF21B
  Gene Name: kinesin family member 21B
  Uniprot ID: O75037
  ENSP ID: ENSP00000411831
MAGQGDCCVKVAVRIRPQLSKEKIEGCHICTSVTPGEPQVLLGKDKAFTYDFVFDLDTWQEQIYSTCVSKLIEGCFEGYNATVLAYGQTGAGKTYTMGTGFDMATSEEEQGIIPRAIAHLFGGIAERKRRAQEQGVAGPEFKVSAQFLELYNEEILDLFDSTRDPDTRHRRSNIKIHEDANGGIYTTGVTSRLIHSQEELIQCLKQGALSRTTASTQMNVQSSRSHAIFTIHLCQMRMCTQPDLVNEAVTGLPDGTPPSSEYETLTAKFHFVDLAGSERLKRTGATGERAKEGISINCGLLALGNVISALGDQSKKVVHVPYRDSKLTRLLQDSLGGNSQTIMIACVSPSDRDFMETLNTLKYANRARNIKNKVVVNQDKTSQQISALRAEIARLQMELMEYKAGKRVIGEDGAEGYSDLFRENAMLQKENGALRLRVKAMQEAIDAINNRVTQLMSQEANLLLAKAGDGNEAIGALIQNYIREIEELRTKLLESEAMNESLRRSLSRASARSPYSLGASPAAPAFGGSPASSMEDASEVIRRAKQDLERLKKKEVRQRRKSPEKEAFKKRAKLQQENSEETDENEAEEEEEERDESGCEEEEGREDEDEDSGSEESLVDSDSDPEEKEVNFQADLADLTCEIEIKQKLIDELENSQRRLQTLKHQYEEKLILLQNKIRDTQLERDRVLQNLSTMECYTEEKANKIKADYEKRLREMNRDLQKLQAAQKEHARLLKNQSRYERELKKLQAEVAEMKKAKVALMKQMREEQQRRRLVETKRNREIAQLKKEQRRQEFQIRALESQKRQQEMVLRRKTQEVSALRRLAKPMSERVAGRAGLKPPMLDSGAEVSASTTSSEAESGARSVSSIVRQWNRKINHFLGDHPAPTVNGTRPARKKFQKKGASQSFSKAARLKWQSLERRIIDIVMQRMTIVNLEADMERLIKKREELFLLQEALRRKRERLQAESPEEEKGLQELAEEIEVLAANIDYINDGITDCQATIVQLEETKEELDSTDTSVVISSCSLAEARLLLDNFLKASIDKGLQVAQKEAQIRLLEGRLRQTDMAGSSQNHLLLDALREKAEAHPELQALIYNVQQENGYASTDEEISEFSEGSFSQSFTMKGSTSHDDFKFKSEPKLSAQMKAVSAECLGPPLDISTKNITKSLASLVEIKEDGVGFSVRDPYYRDRVSRTVSLPTRGSTFPRQSRATETSPLTRRKSYDRGQPIRSTDVGFTPPSSPPTRPRNDRNVFSRLTSNQSQGSALDKSDDSDSSLSEVLRGIISPVGGAKGARTAPLQCVSMAEGHTKPILCLDATDELLFTGSKDRSCKMWNLVTGQEIAALKGHPNNVVSIKYCSHSGLVFSVSTSYIKVWDIRDSAKCIRTLTSSGQVISGDACAATSTRAITSAQGEHQINQIALSPSGTMLYAASGNAVRIWELSRFQPVGKLTGHIGPVMCLTVTQTASQHDLVVTGSKDHYVKMFELGECVTGTIGPTHNFEPPHYDGIECLAIQGDILFSGSRDNGIKKWDLDQQELIQQIPNAHKDWVCALAFIPGRPMLLSACRAGVIKVWNVDNFTPIGEIKGHDSPINAICTNAKHIFTASSDCRVKLWNYVPGLTPCLPRRVLAIKGRATTLP

SEQ ID NO: 44279 - protein, 1623 aa, Homo sapiens
  Payload ID: 9027
  Gene Symbol: KIF21B
  Gene Name: kinesin family member 21B
  Uniprot ID: O75037
  ENSP ID: ENSP00000433808
MAGQGDCCVKVAVRIRPQLSKEKIEGCHICTSVTPGEPQVLLGKDKAFTYDFVFDLDTWQEQIYSTCVSKLIEGCFEGYNATVLAYGQTGAGKTYTMGTGFDMATSEEEQGIIPRAIAHLFGGIAERKRRAQEQGVAGPEFKVSAQFLELYNEEILDLFDSTRDPDTRHRRSNIKIHEDANGGIYTTGVTSRLIHSQEELIQCLKQGALSRTTASTQMNVQSSRSHAIFTIHLCQMRMCTQPDLVNEAVTGLPDGTPPSSEYETLTAKFHFVDLAGSERLKRTGATGERAKEGISINCGLLALGNVISALGDQSKKVVHVPYRDSKLTRLLQDSLGGNSQTIMIACVSPSDRDFMETLNTLKYANRARNIKNKVVVNQDKTSQQISALRAEIARLQMELMEYKAGKRVIGEDGAEGYSDLFRENAMLQKENGALRLRVKAMQEAIDAINNRVTQLMSQEANLLLAKAGDGNEAIGALIQNYIREIEELRTKLLESEAMNESLRRSLSRASARSPYSLGASPAAPAFGGSPASSMEDASEVIRRAKQDLERLKKKEVRQRRKSPEKEAFKKRAKLQQENSEETDENEAEEEEEERDESGCEEEEGREDEDEDSGSEESLVDSDSDPEEKEVNFQADLADLTCEIEIKQKLIDELENSQRRLQTLKHQYEEKLILLQNKIRDTQLERDRVLQNLSTMECYTEEKANKIKADYEKRLREMNRDLQKLQAAQKEHARLLKNQSRYERELKKLQAEVAEMKKAKVALMKQMREEQQRRRLVETKRNREIAQLKKEQRRQEFQIRALESQKRQQEMVLRRKTQEVSALRRLAKPMSERVAGRAGLKPPMLDSGAEVSASTTSSEAESGARSVSSIVRQWNRKINHFLGDHPAPTVNGTRPARKKFQKKGASQSFSKAARLKWQSLERRIIDIVMQRMTIVNLEADMERLIKKREELFLLQEALRRKRERLQAESPEEEKGLQELAEEIEVLAANIDYINDGITDCQATIVQLEETKEELDSTDTSVVISSCSLAEARLLLDNFLKASIDKGLQVAQKEAQIRLLEGRLRQTDMAGSSQNHLLLDALREKAEAHPELQALIYNVQQENGYASTDEEISEFSEGSFSQSFTMKGSTSHDDFKFKSEPKLSAQMKAVSAECLGPPLDISTKNITKSLASLVEIKEDGVGFSVRDPYYRDRVSRTVSLPTRGSTFPRQSRATETSPLTRRKSYDRGQPIRSTDVGFTPPSSPPTRPRNDRNVFSRLTSNQSQGSALDKSDDSDSSLSEVLRGIISPVGGAKGARTAPLQCVSMAEGHTKPILCLDATDELLFTGSKDRSCKMWNLVTGQEIAALKGHPNNVVSIKYCSHSGLVFSVSTSYIKVWDIRDSAKCIRTLTSSGQVISGDACAATSTRAITSAQGEHQINQIALSPSGTMLYAASGNAVRIWELSRFQPVGKLTGHIGPVMCLTVTQTASQHDLVVTGSKDHYVKMFELGECVTGTIGPTHNFEPPHYDGIECLAIQGDILFSGSRDNGIKKWDLDQQELIQQIPNAHKDWVCALAFIPGRPMLLSACRAGVIKVWNVDNFTPIGEIKGHDSPINAICTNAKHIFTASSDLTVKFWSVRRLPHSGPP

SEQ ID NO: 44280 - protein, 665 aa, Homo sapiens
  Payload ID: 9028
  Gene Symbol: KIF22
  Gene Name: kinesin family member 22
  Uniprot ID: Q14807
  ENSP ID: ENSP00000160827
MAAGGSTQQRRREMAAASAAAISGAGRCRLSKIGATRRPPPARVRVAVRLRPFVDGTAGASDPPCVRGMDSCSLEIANWRNHQETLKYQFDAFYGERSTQQDIYAGSVQPILRHLLEGQNASVLAYGPTGAGKTHTMLGSPEQPGVIPRALMDLLQLTREEGAEGRPWALSVTMSYLEIYQEKVLDLLDPASGDLVIREDCRGNILIPGLSQKPISSFADFERHFLPASRNRTVGATRLNQRSSRSHAVLLVKVDQRERLAPFRQREGKLYLIDLAGSEDNRRTGNKGLRLKESGAINTSLFVLGKVVDALNQGLPRVPYRDSKLTRLLQDSLGGSAHSILIANIAPERRFYLDTVSALNFAARSKEVINRPFTNESLQPHALGPVKLSQKELLGPPEAKRARGPEEEEIGSPEPMAAPASASQKLSPLQKLSSMDPAMLERLLSLDRLLASQGSQGAPLLSTPKRERMVLMKTVEEKDLEIERLKTKQKELEAKMLAQKAEEKENHCPTMLRPLSHRTVTGAKPLKKAVVMPLQLIQEQAASPNAEIHILKNKGRKRKLESLDALEPEEKAEDCWELQISPELLAHGRQKILDLLNEGSARDLRSLQRIGPKKAQLIVGWRELHGPFSQVEDLERVEGITGKQMESFLKANILGLAAGQRCGAS

SEQ ID NO: 44281 - protein, 597 aa, Homo sapiens
  Payload ID: 9028
  Gene Symbol: KIF22
  Gene Name: kinesin family member 22
  Uniprot ID: Q14807
  ENSP ID: ENSP00000383562
MDSCSLEIANWRNHQETLKYQFDAFYGERSTQQDIYAGSVQPILRHLLEGQNASVLAYGPTGAGKTHTMLGSPEQPGVIPRALMDLLQLTREEGAEGRPWALSVTMSYLEIYQEKVLDLLDPASGDLVIREDCRGNILIPGLSQKPISSFADFERHFLPASRNRTVGATRLNQRSSRSHAVLLVKVDQRERLAPFRQREGKLYLIDLAGSEDNRRTGNKGLRLKESGAINTSLFVLGKVVDALNQGLPRVPYRDSKLTRLLQDSLGGSAHSILIANIAPERRFYLDTVSALNFAARSKEVINRPFTNESLQPHALGPVKLSQKELLGPPEAKRARGPEEEEIGSPEPMAAPASASQKLSPLQKLSSMDPAMLERLLSLDRLLASQGSQGAPLLSTPKRERMVLMKTVEEKDLEIERLKTKQKELEAKMLAQKAEEKENHCPTMLRPLSHRTVTGAKPLKKAVVMPLQLIQEQAASPNAEIHILKNKGRKRKLESLDALEPEEKAEDCWELQISPELLAHGRQKILDLLNEGSARDLRSLQRIGPKKAQLIVGWRELHGPFSQVEDLERVEGITGKQMESFLKANILGLAAGQRCGAS

SEQ ID NO: 44282 - protein, 597 aa, Homo sapiens; identical to SEQ ID NO: 44281
  Payload ID: 9028
  Gene Symbol: KIF22
  Gene Name: kinesin family member 22
  Uniprot ID: Q14807
  ENSP ID: ENSP00000454957

SEQ ID NO: 44283 - protein, 89 aa, Homo sapiens
  Payload ID: 9028
  Gene Symbol: KIF22
  Gene Name: kinesin family member 22
  ENSP ID: ENSP00000455702
MAAGGSTQQRRREMAAASAAAISGAGRCRLSKIGATRRPPPARVRVAVRLRPFVDGTAGASDPPCVRGMDSCSLEIANWRNHQETLKYQ

SEQ ID NO: 44284 - protein, 611 aa, Homo sapiens
  Payload ID: 9028
  Gene Symbol: KIF22
  Gene Name: kinesin family member 22
  ENSP ID: ENSP00000456165
MDSCSLEIANWRNHQETLKYQFDAFYGERSTQQDIYAGSVQPILRHLLEGQNASVLAYGPTGAGKTHTMLGSPEQPGVIPRALMDLLQLTREEGAEGRPWALSVTMSYLEIYQEKVLDLLDPASGDLVIREDCRGNILIPGLSQKPISSFADFERHFLPASRNRTVGATRLNQRSSRSHAVLLVKVDQRERLAPFRQREGKLYLIDLAGSEDNRRTGNKGLRLKESGAINTSLFVLGKVVDALNQGLPRVPYRDSKLTRLLQDSLGGSAHSILIANIAPERRFYLDTVSALNFAARSKEVINRPFTNESLQPHALGPVKLSQKELLGPPEAKRARGPEEEEIGSPEPMAAPASASQKLSPLQKLSSMDPAMLERLLSLDRLLASQGSQGAPLLSTPKRERMVLMKTVEEKDLEIERLKTKQKELEAKMLAQKAEEKENHCPTMLRPLSHRTVTGAKPLKKAVVMPLQLIQEQAASPNAEIHILKNKGRKRKVKVAGGLGYTWSPELESLDALEPEEKAEDCWELQISPELLAHGRQKILDLLNEGSARDLRSLQRIGPKKAQLIVGWRELHGPFSQVEDLERVEGITGKQMESFLKANILGLAAGQRCGAS

SEQ ID NO: 44285 - protein, 185 aa, Homo sapiens
  Payload ID: 9028
  Gene Symbol: KIF22
  Gene Name: kinesin family member 22
  ENSP ID: ENSP00000457176
MDSCSLEIANWRNHQETLKYQFDAFYGERSTQQDIYAGSVQPILRHLLEGQNASVLAYGPTGAGKTHTMLGSPEQPGVIPRALMDLLQLTREEGAEGRPWALSVTMSYLEIYQEKVLDLLDPASGDLVIREDCRGNILIPGLSQKPISSFADFERHFLPASRNRTVGATRLNQRSSRSHAVLLVK

SEQ ID NO: 44286 - protein, 72 aa, Homo sapiens
  Payload ID: 9028
  Gene Symbol: KIF22
  Gene Name: kinesin family member 22
  ENSP ID: ENSP00000460077
AEEKENHCPTMLRPLSHRTVTGAKPLKKAVVMPLQLIQEQAASPNAEIHILKNKGRKRKQLHEKGANITTGY

SEQ ID NO: 44287 - protein, 960 aa, Homo sapiens
  Payload ID: 9029
  Gene Symbol: KIF23
  Gene Name: kinesin family member 23
  Uniprot ID: Q02241
  ENSP ID: ENSP00000260363
MKSARAKTPRKPTVKKGSQTNLKDPVGVYCRVRPLGFPDQECCIEVINNTTVQLHTPEGYRLNRNGDYKETQYSFKQVFGTHTTQKELFDVVANPLVNDLIHGKNGLLFTYGVTGSGKTHTMTGSPGEGGLLPRCLDMIFNSIGSFQAKRYVFKSNDRNSMDIQCEVDALLERQKREAMPNPKTSSSKRQVDPEFADMITVQEFCKAEEVDEDSVYGVFVSYIEIYNNYIYDLLEEVPFDPIKPKPPQSKLLREDKNHNMYVAGCTEVEVKSTEEAFEVFWRGQKKRRIANTHLNRESSRSHSVFNIKLVQAPLDADGDNVLQEKEQITISQLSLVDLAGSERTNRTRAEGNRLREAGNINQSLMTLRTCMDVLRENQMYGTNKMVPYRDSKLTHLFKNYFDGEGKVRMIVCVNPKAEDYEENLQVMRFAEVTQEVEVARPVDKAICGLTPGRRYRNQPRGPVGNEPLVTDVVLQSFPPLPSCEILDINDEQTLPRLIEALEKRHNLRQMMIDEFNKQSNAFKALLQEFDNAVLSKENHMQGKLNEKEKMISGQKLEIERLEKKNKTLEYKIEILEKTTTIYEEDKRNLQQELETQNQKLQRQFSDKRRLEARLQGMVTETTMKWEKECERRVAAKQLEMQNKLWVKDEKLKQLKAIVTEPKTEKPERPSRERDREKVTQRSVSPSPVPLSSNYIAQISNGQQLMSQPQLHRRSNSCSSISVASCISEWEQKIPTYNTPLKVTSIARRRQQEPGQSKTCIVSDRRRGMYWTEGREVVPTFRNEIEIEEDHCGRLLFQPDQNAPPIRLRHRRSRSAGDRWVDHKPASNMQTETVMQPHVPHAITVSVANEKALAKCEKYMLTHQELASDGEIETKLIKGDIYKTRGGGQSVQFTDIETLKQESPNGSRKRRSSTVAPAQPDGAESEWTDVETRCSVAVEMRAGSQLGPGYQHHAQPKRKKP

SEQ ID NO: 44288 - protein, 856 aa, Homo sapiens
  Payload ID: 9029
  Gene Symbol: KIF23
  Gene Name: kinesin family member 23
  Uniprot ID: Q02241
  ENSP ID: ENSP00000304978
MKSARAKTPRKPTVKKGSQTNLKDPVGVYCRVRPLGFPDQECCIEVINNTTVQLHTPEGYRLNRNGDYKETQYSFKQVFGTHTTQKELFDVVANPLVNDLIHGKNGLLFTYGVTGSGKTHTMTGSPGEGGLLPRCLDMIFNSIGSFQAKRYVFKSNDRNSMDIQCEVDALLERQKREAMPNPKTSSSKRQVDPEFADMITVQEFCKAEEVDEDSVYGVFVSYIEIYNNYIYDLLEEVPFDPIKPKPPQSKLLREDKNHNMYVAGCTEVEVKSTEEAFEVFWRGQKKRRIANTHLNRESSRSHSVFNIKLVQAPLDADGDNVLQEKEQITISQLSLVDLAGSERTNRTRAEGNRLREAGNINQSLMTLRTCMDVLRENQMYGTNKMVPYRDSKLTHLFKNYFDGEGKVRMIVCVNPKAEDYEENLQVMRFAEVTQEVEVARPVDKAICGLTPGRRYRNQPRGPVGNEPLVTDVVLQSFPPLPSCEILDINDEQTLPRLIEALEKRHNLRQMMIDEFNKQSNAFKALLQEFDNAVLSKENHMQGKLNEKEKMISGQKLEIERLEKKNKTLEYKIEILEKTTTIYEEDKRNLQQELETQNQKLQRQFSDKRRLEARLQGMVTETTMKWEKECERRVAAKQLEMQNKLWVKDEKLKQLKAIVTEPKTEKPERPSRERDREKVTQRSVSPSPVPLLFQPDQNAPPIRLRHRRSRSAGDRWVDHKPASNMQTETVMQPHVPHAITVSVANEKALAKCEKYMLTHQELASDGEIETKLIKGDIYKTRGGGQSVQFTDIETLKQESPNGSRKRRSSTVAPAQPDGAESEWTDVETRCSVAVEMRAGSQLGPGYQHHAQPKRKKP

SEQ ID NO: 44289 - protein, 952 aa, Homo sapiens
  Payload ID: 9029
  Gene Symbol: KIF23
  Gene Name: kinesin family member 23
  ENSP ID: ENSP00000378790
MKSARAKTPRKPTVKKGSQTNLKDPVGVYCRVRPLGFPDQECCIEVINNTTVQLHTPEGYRLNRNGDYKETQYSFKQVFGTHTTQKELFDVVANPLVNDLIHGKNGLLFTYGVTGSGKTHTMTGSPGEGGLLPRCLDMIFNSIGSFQAKRYVFKSNDRNSMDIQCEVDALLERQKREAMPNPKTSSSKRQVDPEFADMITVQEFCKAEEVDEDSVYGVFVSYIEIYNNYIYDLLEEVPFDPIKPKPPQSKLLREDKNHNMYVAGCTEVEVKSTEEAFEVFWRGQKKRRIANTHLNRESSRSHSVFNIKLVQAPLDADGDNVLQEKEQITISQLSLVDLAGSERTNRTRAEGNRLREAGNINQSLMTLRTCMDVLRENQMYGTNKMVPYRDSKLTHLFKNYFDGEGKVRMIVCVNPKAEDYEENLQVMRFAEVTQEVEVARPVDKAICGLTPGRRYRNQPRGPVGNEPLVTDVVLQSFPPLPSCEILDINDEQTLPRLIEALEKRHNLRQMMIDEFNKQSNAFKALLQEFDNAVLSKENHMQGKLNEKEKMISGQKLEIERLEKKNKTLEYKIEILEKTTTIYEEDKRNLQQELETQNQKLQRQFSDKRRLEARLQGMVTETTMKWEKECERRVAAKQLEMQNKLWVKDEKLKQLKAIVTEPKTEKPERPSRERDREKVTQRSVSPSPVPLSSNYIAQISNGQQLMSQPQLHRRSNSCSSISVASCISEWEQKIPTYNTPLKVTSIARRRQQEPGQSKTCIVSDRRRGMYWTEGREVVPTFRNEIEIEEDHCGRNAPPIRLRHRRSRSAGDRWVDHKPASNMQTETVMQPHVPHAITVSVANEKALAKCEKYMLTHQELASDGEIETKLIKGDIYKTRGGGQSVQFTDIETLKQESPNGRKRRSSTVAPAQPDGAESEWTDVETRCSVAVEMRAGSQLGPGYQHHAQPKRKKP

SEQ ID NO: 44290 - protein, 267 aa, Homo sapiens
  Payload ID: 9029
  Gene Symbol: KIF23
  Gene Name: kinesin family member 23
  ENSP ID: ENSP00000452901
MITVQEFCKAEEVDEDSVYGVFVSYIEIYNNYIYDLLEEVPFDPIKPKPPQSKLLREDKNHNMYVAGCTEVEVKSTEEAFEVFWRGQKKRRIANTHLNRESSRSHSVFNIKLVQAPLDADGDNVLQEKEQITISQLSLVDLAGSERTNRTRAEGNRLREAGNINQSLMTLRTCMDVLRENQMYGTNKMVPYRDSKLTHLFKNYFDGEGKVRMIVCVNPKAEDYEENLVILIFAEVTQEVEVARPVDKAICGLTPGRRYRNQPRGPVG

SEQ ID NO: 44291 - protein, 673 aa, Homo sapiens
  Payload ID: 9029
  Gene Symbol: KIF23
  Gene Name: kinesin family member 23
  Uniprot ID: Q02241
  ENSP ID: ENSP00000453102
MITVQEFCKAEEVDEDSVYGVFVSYIEIYNNYIYDLLEEVPFDPIKPKWNSCSTPMRNTDFVPPQSKLLREDKNHNMYVAGCTEVEVKSTEEAFEVFWRGQKKRRIANTHLNRESSRSHSVFNIKLVQAPLDADGDNVLQEKEQITISQLSLVDLAGSERTNRTRAEGNRLREAGNINQSLMTLRTCMDVLRENQMYGTNKMVPYRDSKLTHLFKNYFDGEGKVRMIVCVNPKAEDYEENLQVMRFAEVTQEVEVARPVDKAICGLTPGRRYRNQPRGPVGNEPLVTDVVLQSFPPLPSCEILDINDEQTLPRLIEALEKRHNLRQMMIDEFNKQSNAFKALLQEFDNAVLSKENHMQGKLNEKEKMISGQKLEIERLEKKNKTLEYKIEILEKTTTIYEEDKRNLQQELETQNQKLQRQFSDKRRLEARLQGMVTETTMKWEKECERRVAAKQLEMQNKLWVKDEKLKQLKAIVTEPKTEKPERPSRERDREKVTQRSVSPSPVPLLFQPDQNAPPIRLRHRRSRSAGDRWVDHKPASNMQTETVMQPHVPHAITVSVANEKALAKCEKYMLTHQELASDGEIETKLIKGDIYKTRGGGQSVQFTDIETLKQESPNGSRKRRSSTVAPAQPDGAESEWTDVETRCSVAVEMRAGSQLGPGYQHHAQPKRKKP

SEQ ID NO: 44292 - protein, 856 aa, Homo sapiens; identical to SEQ ID NO: 44288
  Payload ID: 9029
  Gene Symbol: KIF23
  Gene Name: kinesin family member 23
  Uniprot ID: Q02241
  ENSP ID: ENSP00000453386

SEQ ID NO: 44293 - protein, 371 aa, Homo sapiens
  Payload ID: 9029
  Gene Symbol: KIF23
  Gene Name: kinesin family member 23
  ENSP ID: ENSP00000453576
MKSARAKTPRKPTVKKGSQTNLKDPVGVYCRVRPLGFPDQECCIEVINNTTVQLHTPEGYRLNRNGDYKETQYSFKQVFGTHTTQKELFDVVANPLVNDLIHGKNGLLFTYGVTGSGKTHTMTGSPGEGGLLPRCLDMIFNSIGSFQAKRYVFKSNDRNSMDIQCEVDALLERQKREAMPNPKTSSSKRQVDPEFADMITVQEFCKAEEVDEDSVYGVFVSYIEIYNNYIYDLLEEVPFDPIKPKWNSCSTPMRNTDFVPPQSKLLREDKNHNMYVAGCTEVEVKSTEEAFEVFWRGQKKRRIANTHLNRESSRSHSVFNIKLVQAPLDADGDNVLQFWEAGYRILEPEFCCEKSLQIFKNPFGRSDKIRL

SEQ ID NO: 44294 - protein, 109 aa, Homo sapiens
  Payload ID: 9029
  Gene Symbol: KIF23
  Gene Name: kinesin family member 23
  ENSP ID: ENSP00000453629
MKSARAKTPRKPTVKKGSQTNLKDPVGVYCRVRPLGFPDQECCIEVINNTTVQLHTPEGYRLNRNGDYKETQYSFKQVFGTHTTQKELFDVVANPLVNDLIHGKNGFQI

SEQ ID NO: 44295 - protein, 1368 aa, Homo sapiens
  Payload ID: 9030
  Gene Symbol: KIF24
  Gene Name: kinesin family member 24
  Uniprot ID: Q5T7B8
  ENSP ID: ENSP00000368464
MASWLYECLCEAELAQYYSHFTALGLQKIDELAKITMKDYSKLGVHDMNDRKRLFQLIKIIKIMQEEDKAVSIPERHLQTSSLRIKSQELRSGPRRQLNFDSPADNKDRNASNDGFEMCSLSDFSANEQKSTYLKVLEHMLPDDSQYHTKTGILNATAGDSYVQTEISTSLFSPNYLSAILGDCDIPIIQRISHVSGYNYGIPHSCIRQNTSEKQNPWTEMEKIRVCVRKRPLGMREVRRGEINIITVEDKETLLVHEKKEAVDLTQYILQHVFYFDEVFGEACTNQDVYMKTTHPLIQHIFNGGNATCFAYGQTGAGKTYTMIGTHENPGLYALAAKDIFRQLEVSQPRKHLFVWISFYEIYCGQLYDLLNRRKRLFAREDSKHMVQIVGLQELQVDSVELLLEVILKGSKERSTGATGVNADSSRSHAVIQIQIKDSAKRTFGRISFIDLAGSERAADARDSDRQTKMEGAEINQSLLALKECIRALDQEHTHTPFRQSKLTQVLKDSFIGNAKTCMIANISPSHVATEHTLNTLRYADRVKELKKGIKCCTSVTSRNRTSGNSSPKRIQSSPGALSEDKCSPKKVKLGFQQSLTVAAPGSTRGKVHPLTSHPPNIPFTSAPKVSGKRGGSRGSPSQEWVIHASPVKGTVRSGHVAKKKPEESAPLCSEKNRMGNKTVLGWESRASGPGEGLVRGKLSTKCKKVQTVQPVQKQLVSRVELSFGNAHHRAEYSQDSQRGTPARPASEAWTNIPPHQKEREEHLRFYHQQFQQPPLLQQKLKYQPLKRSLRQYRPPEGQLTNETPPLFHSYSENHDGAQVEELDDSDFSEDSFSHISSQRATKQRNTLENSEDSFFLHQTWGQGPEKQVAERQQSLFSSPRTGDKKDLTKSWVDSRDPINHRRAALDHSCSPSKGPVDWSRENSTSSGPSPRDSLAEKPYCSQVDFIYRQERGGGSSFDLRKDASQSEVSGENEGNLPSPEEDGFTISLSHVAVPGSPDQRDTVTTPLREVSADGPIQVTSTVKNGHAVPGEDPRGQLGTHAEYASGLMSPLTMSLLENPDNEGSPPSEQLVQDGATHSLVAESTGGPVVSHTVPSGDQEAALPVSSATRHLWLSSSPPDNKPGGDLPALSPSPIRQHPADKLPSREADLGEACQSRETVLFSHEHMGSEQYDADAEETGLDGSWGFPGKPFTTIHMGVPHSGPTLTPRTGSSDVADQLWAQERKHPTRLGWQEFGLSTDPIKLPCNSENVTWLKPRPISRCLARPSSPLVPSCSPKTAGTLRQPTLEQAQQVVIRAHQEQLDEMAELGFKEETLMSQLASNDFEDFVTQLDEIMVLKSKCIQSLRSQLQLYLTCHGPTAAPEGTVPS

SEQ ID NO: 44296 - protein, 1234 aa, Homo sapiens
  Payload ID: 9030
  Gene Symbol: KIF24
  Gene Name: kinesin family member 24
  Uniprot ID: Q5T7B8
  ENSP ID: ENSP00000368472
MASWLYECLCEAELAQYYSHFTALGLQKIDELAKITMKDYSKLGVHDMNDRKRLFQLIKIIKIMQEEDKAVSIPERHLQTSSLRIKSQELRSGPRRQLNFDSPADNKDRNASNDGFEMCSLSDFSANEQKSTYLKVLEHMLPDDSQYHTKTGILNATAGDSYVQTEISTSLFSPNYLSAILGDCDIPIIQRISHVSGYNYGIPHSCIRQNTSEKQNPWTEMEKIRVCVRKRPLGMREVRRGEINIITVEDKETLLVHEKKEAVDLTQYILQVILKGSKERSTGATGVNADSSRSHAVIQIQIKDSAKRTFGRISFIDLAGSERAADARDSDRQTKMEGAEINQSLLALKECIRALDQEHTHTPFRQSKLTQVLKDSFIGNAKTCMIANISPSHVATEHTLNTLRYADRVKELKKGIKCCTSVTSRNRTSGNSSPKRIQSSPGALSEDKCSPKKVKLGFQQSLTVAAPGSTRGKVHPLTSHPPNIPFTSAPKVSGKRGGSRGSPSQEWVIHASPVKGTVRSGHVAKKKPEESAPLCSEKNRMGNKTVLGWESRASGPGEGLVRGKLSTKCKKVQTVQPVQKQLVSRVELSFGNAHHRAEYSQDSQRGTPARPASEAWTNIPPHQKEREEHLRFYHQQFQQPPLLQQKLKYQPLKRSLRQYRPPEGQLTNETPPLFHSYSENHDGAQVEELDDSDFSEDSFSHISSQRATKQRNTLENSEDSFFLHQTWGQGPEKQVAERQQSLFSSPRTGDKKDLTKSWVDSRDPINHRRAALDHSCSPSKGPVDWSRENSTSSGPSPRDSLAEKPYCSQVDFIYRQERGGGSSFDLRKDASQSEVSGENEGNLPSPEEDGFTISLSHVAVPGSPDQRDTVTTPLREVSADGPIQVTSTVKNGHAVPGEDPRGQLGTHAEYASGLMSPLTMSLLENPDNEGSPPSEQLVQDGATHSLVAESTGGPVVSHTVPSGDQEAALPVSSATRHLWLSSSPPDNKPGGDLPALSPSPIRQHPADKLPSREADLGEACQSRETVLFSHEHMGSEQYDADAEETGLDGSWGFPGKPFTTIHMGVPHSGPTLTPRTGSSDVADQLWAQERKHPTRLGWQEFGLSTDPIKLPCNSENVTWLKPRPISRCLARPSSPLVPSCSPKTAGTLRQPTLEQAQQVVIRAHQEQLDEMAELGFKEETLMSQLASNDFEDFVTQLDEIMVLKSKCIQSLRSQLQLYLTCHGPTAAPEGTVPS

SEQ ID NO: 44297 - protein, 1368 aa, Homo sapiens; identical to SEQ ID NO: 44295
  Payload ID: 9030
  Gene Symbol: KIF24
  Gene Name: kinesin family member 24
  Uniprot ID: Q5T7B8
  ENSP ID: ENSP00000384433

SEQ ID NO: 44298 - protein, 332 aa, Homo sapiens
  Payload ID: 9031
  Gene Symbol: KIF25
  Gene Name: kinesin family member 25
  Uniprot ID: Q9UIL4
  ENSP ID: ENSP00000252688
MTWTSGQLQREKQARPGSGAVLAFPDDKDLRVYGPAESQSAVFGDVCPLLTSLLDGYNVCVMAYGQTGSGKSYTMLGRHSDDGPVLPLDPQSDLGIIPRVAEELFRLILENTSRSPKVEVSIVEVYNNDIFDLLAKDSIAAVSGVKREVVTAKDGRTEVALLASEAVGSASKLMELVHGGLQLRAKHPTLVHADSSRSHLIITVTLTTASCSDSTADQACSATLPREQTEAGRAGRSRRASQGALAPQLVPGNPAGHAEQVQARLQLVDSAGSECVGGDAKLLVILCISPSQRHLAQTLQGLGFGIRARQVQRGPARKKPPSSQTEGKRRPD

SEQ ID NO: 44299 - protein, 384 aa, Homo sapiens
  Payload ID: 9031
  Gene Symbol: KIF25
  Gene Name: kinesin family member 25
  Uniprot ID: Q9UIL4
  ENSP ID: ENSP00000346401
MTWTSGQLQREKQARPGSGAVLAFPDDKDLRVYGPAESQSAVFGDVCPLLTSLLDGYNVCVMAYGQTGSGKSYTMLGRHSDDGPVLPLDPQSDLGIIPRVAEELFRLILENTSRSPKVEVSIVEVYNNDIFDLLAKDSIAAVSGVKREVVTAKDGRTEVALLASEAVGSASKLMELVHGGLQLRAKHPTLVHADSSRSHLIITVTLTTASCSDSTADQACSATLPREQTEAGRAGRSRRASQGALAPQLVPGNPAGHAEQVQARLQLVDSAGSECVGVSGVTGLALREMACISRSLAALAGVLGALLEHRGHAPYRNSRLTHLLQDCLGGDAKLLVILCISPSQRHLAQTLQGLGFGIRARQVQRGPARKKPPSSQTEGKRRPD

SEQ ID NO: 44300 - protein, 384 aa, Homo sapiens; identical to SEQ ID NO: 44299
  Payload ID: 9031
  Gene Symbol: KIF25
  Gene Name: kinesin family member 25
  Uniprot ID: Q9UIL4
  ENSP ID: ENSP00000388878

SEQ ID NO: 44301 - protein, 14 aa, Homo sapiens
  Payload ID: 9031
  Gene Symbol: KIF25
  Gene Name: kinesin family member 25
  ENSP ID: ENSP00000427464
  MOD_RES (1)..(1): Any amino acid
XIIPRVAEELFRAQ

SEQ ID NO: 44302 - protein, 1743 aa, Homo sapiens
  Payload ID: 9032
  Gene Symbol: KIF26A
  Gene Name: kinesin family member 26A
  ENSP ID: ENSP00000325452
MHLLQAPASHEDLDAPHGGPSLAPPSTTTSSRDTPGPAGPAGRQPGRAGPDRTKGLAWSPGPSVQVSVAPAGLGGALSTVTIQAQQCLEGMWSVSRVNSFLPPACLAEAAVAAVAVADTVRECPPVAGPDGLSKAWGRGGVCTSALVTPTPGSVGGSTGPSAAASFFIRAMQKLSLASKRKKPHPPPPPATRGTSTYPTDFSGVLQLWPPPAPPCLLRAASKTKDNPGSIGKVKVMLRIWPAQGAQRSAEAMSFLKVDPRKKQVILYDPAAGPPGSAGPRRAATAAVPKMFAFDAVFPQDSEQAEVCSGTVADVLQSVVSGADGCIFSFGHMSLGKSYTMIGKDSSPQSLGIVPCAISWLFRLIEERRERTGTRFSVRVSAVEVCGRDQSLRDLLAEVAPGSLQDTQSPGVYLREDPVCGAQLQNQSELRAPTAEKAAFYLDAALAARSTSRAGCGEDARRSSHMLFTLHVYQYRMEKCGRGGMSGGRSRLHLIDLGSCEAAAGRAGEAAGGPLCLSLSALGSVILALVNGAKHVPYRDHRLTMLLRESLATAGCRTTMIAHVSDAPAQHAETLSTVQLAARIHRLRRKKAKYASSSSGGESSCEEGRARRPPHLRPFHPRTVALDPDRTPPCLPGDPDYSSSSEQSCDTVIYVGPGGAALSDRELTDNEGPPDFVPIIPALSRHRPSKGPRDADHFRCSTFAELQERLECMDGNEGPSGGPGGTDGAQASPARGGRKPSPPEAASPRKAVGTPMAASTPRGSSGPDTHQGTPEPCKAIVWGDQREDSSAWPELLVPEKAAVSGGRRPLPSPAPPPPQLLEACRAPEEPGGGGTDGVARTPPVGMSGQVAGSPMLPGATCPRLAAGSRCPERGLLTTTVTLQRPVELNGEDELVFTVVEELSLGALAGAGRPTSLASFDSDCSLRALASGSRPVSIISSINDEFDAYTSQAPEGGPLEGAAWAGSSHGSSISSWLSEVSVCTADSRDPTPQPRFSPDSLAGLDPGGPPALDGSLGDGSSGFLGPDRPDSPGPTWGPCPGEVAAVAPSRPGREPQAGPSRWASAAQTIHSSLPRKPRTASATTRVGCARLGQSPPGRGGLFEDPWLLRVGECDTQAASAGRAPSPTLGSPRLPEAQVMLACAQRVVDGCEVAARAARRPEAVARIPPLRRGATTLGVTTPAVSWGDAPTEVVACSGSLKASPTSKKGLAPKAGFLPRPSGAAPPAPPTRKSSLEQRSSPASAPPHAVNPARVGAAAVLRGEEEPRPSSRADHSVPRATSSLKARASKVEAAHRLAGHASLERYEGLAHSSSKGREAPGRPPRAVPKLGVPPSSPTHGPAPACRSGAAKAVGAPKPPVGGGKGRGLVAGGSRALGPSVKLSTASVTGRSPGGPVAGPRAAPRAGPSVGAKAGRGTVMGTKQALRAAHSRVHELSASGAPGRGGSSWGSADSDSGHDSGVNVGEERPPTGPALPSPYSKVTAPRRPQRYSSGHGSDNSSVLSGELPPAMGRTALFHHSGGSSGYESLRRDSEATGSASSAPDSMSESGAASPGARTRSLKSPKKRATGLQRRRLIPAPLPDTTALGRKPSLPGQWVDLPPPLAGSLKEPFEIKVYEIDDVERLQRPRPTPREAPTQGLACVSTRLRLAERRQQRLREVQAKHKHLCEELAETQGRLMLEPGRWLEQFEVDPELEPESAEYLAALERATAALEQCVNLCKAHVMMVTCFDISVAASAAIPGPQEVDV

SEQ ID NO: 44303 - protein, 1882 aa, Homo sapiens
  Payload ID: 9032
  Gene Symbol: KIF26A
  Gene Name: kinesin family member 26A
  Uniprot ID: Q9ULI4
  ENSP ID: ENSP00000388241
MVGRGVPLCAAQPAVAEGGPAREPPPLLEVSPRKRLPAGPDQDPCGSRPAPEGAGAGPEQGHSAGGGGWCRHCHTKLVELKRQAWKLVSGPGTTLRDPCLSALLLDKLPAPGALPACRPEAERRCDVCATHLQQLTREAMHLLQAPASHEDLDAPHGGPSLAPPSTTTSSRDTPGPAGPAGRQPGRAGPDRTKGLAWSPGPSVQVSVAPAGLGGALSTVTIQAQQCLEGMWSVSRVNSFLPPACLAEAAVAAVAVADTVRECPPVAGPDGLSKAWGRGGVCTSALVTPTPGSVGGSTGPSAAASFFIRAMQKLSLASKRKKPHPPPPPATRGTSTYPTDFSGVLQLWPPPAPPCLLRAASKTKDNPGSIGKVKVMLRIWPAQGAQRSAEAMSFLKVDPRKKQVILYDPAAGPPGSAGPRRAATAAVPKMFAFDAVFPQDSEQAEVCSGTVADVLQSVVSGADGCIFSFGHMSLGKSYTMIGKDSSPQSLGIVPCAISWLFRLIEERRERTGTRFSVRVSAVEVCGRDQSLRDLLAEVAPGSLQDTQSPGVYLREDPVCGAQLQNQSELRAPTAEKAAFYLDAALAARSTSRAGCGEDARRSSHMLFTLHVYQYRMEKCGRGGMSGGRSRLHLIDLGSCEAAAGRAGEAAGGPLCLSLSALGSVILALVNGAKHVPYRDHRLTMLLRESLATAGCRTTMIAHVSDAPAQHAETLSTVQLAARIHRLRRKKAKYASSSSGGESSCEEGRARRPPHLRPFHPRTVALDPDRTPPCLPGDPDYSSSSEQSCDTVIYVGPGGAALSDRELTDNEGPPDFVPIIPALSRHRPSKGPRDADHFRCSTFAELQERLECMDGNEGPSGGPGGTDGAQASPARGGRKPSPPEAASPRKAVGTPMAASTPRGSSGPDTHQGTPEPCKAIVWGDQREDSSAWPELLVPEKAAVSGGRRPLPSPAPPPPQLLEACRAPEEPGGGGTDGVARTPPVGMSGQVAGSPMLPGATCPRLAAGSRCPERGLLTTTVTLQRPVELNGEDELVFTVVEELSLGALAGAGRPTSLASFDSDCSLRALASGSRPVSIISSINDEFDAYTSQAPEGGPLEGAAWAGSSHGSSISSWLSEVSVCTADSRDPTPQPRFSPDSLAGLDPGGPPALDGSLGDGSSGFLGPDRPDSPGPTWGPCPGEVAAVAPSRPGREPQAGPSRWASAAQTIHSSLPRKPRTASATTRVGCARLGQSPPGRGGLFEDPWLLRVGECDTQAASAGRAPSPTLGSPRLPEAQVMLACAQRVVDGCEVAARAARRPEAVARIPPLRRGATTLGVTTPAVSWGDAPTEVVACSGSLKASPTSKKGLAPKAGFLPRPSGAAPPAPPTRKSSLEQRSSPASAPPHAVNPARVGAAAVLRGEEEPRPSSRADHSVPRATSSLKARASKVEAAHRLAGHASLERYEGLAHSSSKGREAPGRPPRAVPKLGVPPSSPTHGPAPACRSGAAKAVGAPKPPVGGGKGRGLVAGGSRALGPSVKLSTASVTGRSPGGPVAGPRAAPRAGPSVGAKAGRGTVMGTKQALRAAHSRVHELSASGAPGRGGSSWGSADSDSGHDSGVNVGEERPPTGPALPSPYSKVTAPRRPQRYSSGHGSDNSSVLSGELPPAMGRTALFHHSGGSSGYESLRRDSEATGSASSAPDSMSESGAASPGARTRSLKSPKKRATGLQRRRLIPAPLPDTTALGRKPSLPGQWVDLPPPLAGSLKEPFEIKVYEIDDVERLQRPRPTPREAPTQGLACVSTRLRLAERRQQRLREVQAKHKHLCEELAETQGRLMLEPGRWLEQFEVDPELEPESAEYLAALERATAALEQCVNLCKAHVMMVTCFDISVAASAAIPGPQEVDV

SEQ ID NO: 44304 - protein, 1727 aa, Homo sapiens
  Payload ID: 9033
  Gene Symbol: KIF26B
  Gene Name: kinesin family member 26B
  ENSP ID: ENSP00000355475
MMMDWKAVAAQKLNLSSKKKKHRPSTSSAAEPPLFATSFSGILQTSPPPAPPCLLRAVNKVKDTPGLGKVKVMLRICSTLARDTSESSSFLKVDPRKKQITLYDPLTCGGQNAFQKRGNQVPPKMFAFDAVFPQDASQAEVCAGTVAEVIQSVVNGADGCVFCFGHAKLGKSYTMIGKDDSMQNLGIIPCAISWLFKLINERKEKTGARFSVRVSAVEVWGKEENLRDLLSEVATGSLQDGQSPGVYLCEDPICGTQLQNQSELRAPTAEKAAFFLDAAIASRRSHQQDCDEDDHRNSHVFFTLHIYQYRMEKSGKGGMSGGRSRLHLIDLGSCVKALSKNREGGSGLCLSLSALGNVILALVNGSKHIPYKESKLAMLLRESLGNMNCRTTMIAHISAAVGSYAETLSTIQIASRVLRMKKKKTKYTSSSSGGESSCEEGRMRRPTQLRPFHTRATVDPDFPIAHLSSDPDYSSSSEQSCDTVIYIGPNGTALSDKELTDNEGPPDFVPIVPALQKTRGDSRPAEAGEAAAGKSERDCLKCNTFAELQERLDCIDGSEEPSSFPFEELPAQFGPEQASRGPRLSQAAGASPLSESDKEDNGSEGQLTNREGPELPASKMQRSHSPVPAAAPAHSPSPASPRSVPGSSSQHSASPLVQSPSLQSSRESLNSCGFVEGKPRPMGSPRLGIASLSKTSEYKPPSSPSQRCKVYTQKGVLPSPAPLPPSSKDSGVASRESLLQPEVRTPPVGMSPQVLKKSMSAGSEGFPETPVDDEQQAATPSESKKEILSTTMVTVQQPLELNGEDELVFTLVEELTISGVLDSGRPTSIISFNSDCSARALASGSRPVSIISSISEDLECYSSTAPVSEVSITQFLPLPKMSLDEKAQDAGSRRSSISSWLSEMSAGSEGEQSCHSFIAQTCFGHGEAMAEPVASEFVSSLQNTAVVCREKPKASPDNLLILSEMGDDSFNKAAPIKGCKISTVSKAMVTISNTANLSSCEGYIPMKTNITVYPCIAMSPRNIQEPEAPTATPKAGPTLAQSRESKENSAKKEMKFEDPWLKREEEVKKETAHPNEEGMMRCETATGPSNAETRAEQEQDGKPSPGDRLSSSSGEVSASPVTDNFRRVVDGCEMALPGLATQSPVHPNKSVKSSSLPRAFQKASRQEEPDSLSYYCAAETNGVGAASGTPPSKATLEGKVASPKHCVLARPKGTPPLPPVRKSSLDQKNRASPQHSASGSGTSSPLNQPAAFPAGLPDEPSGKTKDASSSSKLFSAKLEQLASRSNSLGRATVSHYECLSLERAESLSSVSSRLHAGKDGTMPRAGRSLGRSAGTSPPSSGASPKAGQSKISAVSRLLLASPRARGPSASTTKTLSFSTKSLPQAVGQGSSSPPGGKHTPWSTQSLSRNRSSGLASKLPLRAVSGRISELLQGGAGARGLQLRAGPEAEARGGALAEDEPAAAHLLPSPYSKITPPRRPHRCSSGHGSDNSSVLSGELPPAMGKTALFYHSGGSSGYESVMRDSEATGSASSAQDSTSENSSSVGGRCRSLKTPKKRSNPGSQRRRLIPALSLDTSSPVRKPPNSTGVRWVDGPLRSSPRGLGEPFEIKVYEIDDVERLQRRRGGASKEAMCFNAKLKILEHRQQRIAEVRAKYEWLMKELEATKQYLMLDPNKWLSEFDLEQVWELDSLEYLEALECVTERLESRVNFCKAHLMMITCFDITSRRR

SEQ ID NO: 44305 - protein, 2108 aa, Homo sapiens
  Payload ID: 9033
  Gene Symbol: KIF26B
  Gene Name: kinesin family member 26B
  Uniprot ID: Q2KJY2
  ENSP ID: ENSP00000385545
MNSVAGNKERLAVSTRGKKYGVNEVCSPTKPAAPFSPESWYRKAYEESRAGSRPTPEGAGSALGSSGTPSPGSGTSSPSSFTGSPGPASPGIGTSSPGSLGGSPGFGTGSPGSGSGGGSSPGSDRGVWCENCNARLVELKRQALRLLLPGPFPGKDPAFSAVIHDKLQVPNTIRKAWNDRDNRCDICATHLNQLKQEAIQMVLTLEQAAGSEHYDASPCSPPPLSNIPTLVGSRHVGGLQQPRDWAFVPAPCATSNYTGFANKHGSKPSSLGVSNGAEKKSGSPTHQAKVSLQMATSPSNGNILNSVAIQAHQYLDGTWSLSRTNGVTLYPYQISQLMTESSREGLTEAVLNRYNADKPSACSVPASQGSCVASETSTGTSVAASFFARAAQKLNLSSKKKKHRPSTSSAAEPPLFATSFSGILQTSPPPAPPCLLRAVNKVKDTPGLGKVKVMLRICSTLARDTSESSSFLKVDPRKKQITLYDPLTCGGQNAFQKRGNQVPPKMFAFDAVFPQDASQAEVCAGTVAEVIQSVVNGADGCVFCFGHAKLGKSYTMIGKDDSMQNLGIIPCAISWLFKLINERKEKTGARFSVRVSAVEVWGKEENLRDLLSEVATGSLQDGQSPGVYLCEDPICGTQLQNQSELRAPTAEKAAFFLDAAIASRRSHQQDCDEDDHRNSHVFFTLHIYQYRMEKSGKGGMSGGRSRLHLIDLGSCVKALSKNREGGSGLCLSLSALGNVILALVNGSKHIPYKESKLAMLLRESLGNMNCRTTMIAHISAAVGSYAETLSTIQIASRVLRMKKKKTKYTSSSSGGESSCEEGRMRRPTQLRPFHTRATVDPDFPIAHLSSDPDYSSSSEQSCDTVIYIGPNGTALSDKELTDNEGPPDFVPIVPALQKTRGDSRPAEAGEAAAGKSERDCLKCNTFAELQERLDCIDGSEEPSSFPFEELPAQFGPEQASRGPRLSQAAGASPLSESDKEDNGSEGQLTNREGPELPASKMQRSHSPVPAAAPAHSPSPASPRSVPGSSSQHSASPLVQSPSLQSSRESLNSCGFVEGKPRPMGSPRLGIASLSKTSEYKPPSSPSQRCKVYTQKGVLPSPAPLPPSSKDSGVASRESLLQPEVRTPPVGMSPQVLKKSMSAGSEGFPETPVDDEQQAATPSESKKEILSTTMVTVQQPLELNGEDELVFTLVEELTISGVLDSGRPTSIISFNSDCSARALASGSRPVSIISSISEDLECYSSTAPVSEVSITQFLPLPKMSLDEKAQDAGSRRSSISSWLSEMSAGSEGEQSCHSFIAQTCFGHGEAMAEPVASEFVSSLQNTAVVCREKPKASPDNLLILSEMGDDSFNKAAPIKGCKISTVSKAMVTISNTANLSSCEGYIPMKTNITVYPCIAMSPRNIQEPEAPTATPKAGPTLAQSRESKENSAKKEMKFEDPWLKREEEVKKETAHPNEEGMMRCETATGPSNAETRAEQEQDGKPSPGDRLSSSSGEVSASPVTDNFRRVVDGCEMALPGLATQSPVHPNKSVKSSSLPRAFQKASRQEEPDSLSYYCAAETNGVGAASGTPPSKATLEGKVASPKHCVLARPKGTPPLPPVRKSSLDQKNRASPQHSASGSGTSSPLNQPAAFPAGLPDEPSGKTKDASSSSKLFSAKLEQLASRSNSLGRATVSHYECLSLERAESLSSVSSRLHAGKDGTMPRAGRSLGRSAGTSPPSSGASPKAGQSKISAVSRLLLASPRARGPSASTTKTLSFSTKSLPQAVGQGSSSPPGGKHTPWSTQSLSRNRSSGLASKLPLRAVSGRISELLQGGAGARGLQLRAGPEAEARGGALAEDEPAAAHLLPSPYSKITPPRRPHRCSSGHGSDNSSVLSGELPPAMGKTALFYHSGGSSGYESVMRDSEATGSASSAQDSTSENSSSVGGRCRSLKTPKKRSNPGSQRRRLIPALSLDTSSPVRKPPNSTGVRWVDGPLRSSPRGLGEPFEIKVYEIDDVERLQRRRGGASKEAMCFNAKLKILEHRQQRIAEVRAKYEWLMKELEATKQYLMLDPNKWLSEFDLEQVWELDSLEYLEALECVTERLESRVNFCKAHLMMITCFDITSRRR

SEQ ID NO: 44306 - protein, 1954 aa, Homo sapiens
  Payload ID: 9033
  Gene Symbol: KIF26B
  Gene Name: kinesin family member 26B
  ENSP ID: ENSP00000486478
  MOD_RES (1)..(1): Any amino acid
XDPAFSAVIHDKLQVPNTIRKAWNDRDNRCDICATHLNQLKQEAIQMVLTLEQAAGSEHYDASPCSPPPLSNIPTLVGSRHVGGLQQPRDWAFVPAPCATSNYTGFANKHGSKPSSLGVSNGAEKKSGSPTHQAKVSLQMATSPSNGNILNSVAIQAHQYLDGTWSLSRTNGVTLYPYQISQLMTESSREGLTEAVLNRYNADKPSACSVPASQGSCVASETSTGTSVAASFFARAAQKLNLSSKKKKHRPSTSSAAEPPLFATSFSGILQTSPPPAPPCLLRAVNKVKDTPGLGKVKVMLRICSTLARDTSESSSFLKVDPRKKQITLYDPLTCGGQNAFQKRGNQVPPKMFAFDAVFPQDASQAEVCAGTVAEVIQSVVNGADGCVFCFGHAKLGKSYTMIGKDDSMQNLGIIPCAISWLFKLINERKEKTGARFSVRVSAVEVWGKEENLRDLLSEVATGSLQDGQSPGVYLCEDPICGTQLQNQSELRAPTAEKAAFFLDAAIASRRSHQQDCDEDDHRNSHVFFTLHIYQYRMEKSGKGGMSGGRSRLHLIDLGSCVKALSKNREGGSGLCLSLSALGNVILALVNGSKHIPYKESKLAMLLRESLGNMNCRTTMIAHISAAVGSYAETLSTIQIASRVLRMKKKKTKYTSSSSGGESSCEEGRMRRPTQLRPFHTRATVDPDFPIAHLSSDPDYSSSSEQSCDTVIYIGPNGTALSDKELTDNEGPPDFVPIVPALQKTRGDSRPAEAGEAAAGKSERDCLKCNTFAELQERLDCIDGSEEPSSFPFEELPAQFGPEQASRGPRLSQAAGASPLSESDKEDNGSEGQLTNREGPELPASKMQRSHSPVPAAAPAHSPSPASPRSVPGSSSQHSASPLVQSPSLQSSRESLNSCGFVEGKPRPMGSPRLGIASLSKTSEYKPPSSPSQRCKVYTQKGVLPSPAPLPPSSKDSGVASRESLLQPEVRTPPVGMSPQVLKKSMSAGSEGFPETPVDDEQQAATPSESKKEILSTTMVTVQQPLELNGEDELVFTLVEELTISGVLDSGRPTSIISFNSDCSARALASGSRPVSIISSISEDLECYSSTAPVSEVSITQFLPLPKMSLDEKAQDAGSRRSSISSWLSEMSAGSEGEQSCHSFIAQTCFGHGEAMAEPVASEFVSSLQNTAVVCREKPKASPDNLLILSEMGDDSFNKAAPIKGCKISTVSKAMVTISNTANLSSCEGYIPMKTNITVYPCIAMSPRNIQEPEAPTATPKAGPTLAQSRESKENSAKKEMKFEDPWLKREEEVKKETAHPNEEGMMRCETATGPSNAETRAEQEQDGKPSPGDRLSSSSGEVSASPVTDNFRRVVDGCEMALPGLATQSPVHPNKSVKSSSLPRAFQKASRQEEPDSLSYYCAAETNGVGAASGTPPSKATLEGKVASPKHCVLARPKGTPPLPPVRKSSLDQKNRASPQHSASGSGTSSPLNQPAAFPAGLPDEPSGKTKDASSSSKLFSAKLEQLASRSNSLGRATVSHYECLSLERAESLSSVSSRLHAGKDGTMPRAGRSLGRSAGTSPPSSGASPKAGQSKISAVSRLLLASPRARGPSASTTKTLSFSTKSLPQAVGQGSSSPPGGKHTPWSTQSLSRNRSSGLASKLPLRAVSGRISELLQGGAGARGLQLRAGPEAEARGGALAEDEPAAAHLLPSPYSKITPPRRPHRCSSGHGSDNSSVLSGELPPAMGKTALFYHSGGSSGYESVMRDSEATGSASSAQDSTSENSSSVGGRCRSLKTPKKRSNPGSQRRRLIPALSLDTSSPVRKPPNSTGVRWVDGPLRSSPRGLGEPFEIKVYEIDDVERLQRRRGGASKEAMCFNAKLKILEHRQQRIAEVRAKYEWLMKELEATKQYLMLDPNKWLSEFDLEQVWELDSLEYLEALECVTERLESRVNFCKAHLMMITCFDITSRRR

SEQ ID NO: 44307 - protein, 1401 aa, Homo sapiens
  Payload ID: 9034
  Gene Symbol: KIF27
  Gene Name: kinesin family member 27
  Uniprot ID: Q86VH2
  ENSP ID: ENSP00000297814
MEEIPVKVAVRIRPLLCKEALHNHQVCVRVIPNSQQVIIGRDRVFTFDFVFGKNSTQDEVYNTCIKPLVLSLIEGYNATVFAYGQTGSGKTYTIGGGHIASVVEGQKGIIPRAIQEIFQSISEHPSIDFNVKVSYIEVYKEDLRDLLELETSMKDLHIREDEKGNTVIVGAKECHVESAGEVMSLLEMGNAARHTGTTQMNEHSSRSHAIFTISICQVHKNMEAAEDGSWYSPRHIVSKFHFVDLAGSERVTKTGNTGERFKESIQINSGLLALGNVISALGDPRRKSSHIPYRDAKITRLLKDSLGGSAKTVMITCVSPSSSNFDESLNSLKYANRARNIRNKPTVNFSPESDRIDEMEFEIKLLREALQSQQAGVSQTTQINREGSPDTNRIHSLEEQVAQLQGECLGYQCCVEEAFTFLVDLKDTVRLNEKQQHKLQEWFNMIQEVRKAVLTSFRGIGGTASLEEGPQHVTVLQLKRELKKCQCVLAADEVVFNQKELEVKELKNQVQMMVQENKGHAVSLKEAQKVNRLQNEKIIEQQLLVDQLSEELTKLNLSVTSSAKENCGDGPDARIPERRPYTVPFDTHLGHYIYIPSRQDSRKVHTSPPMYSLDRIFAGFRTRSQMLLGHIEEQDKVLHCQFSDNSDDEESEGQEKSGTRCRSRSWIQKPDSVCSLVELSDTQDETQKSDLENEDLKIDCLQESQELNLQKLKNSERILTEAKQKMRELTINIKMKEDLIKELIKTGNDAKSVSKQYSLKVTKLEHDAEQAKVELIETQKQLQELENKDLSDVAMKVKLQKEFRKKMDAAKLRVQVLQKKQQDSKKLASLSIQNEKRANELEQSVDHMKYQKIQLQRKLREENEKRKQLDAVIKRDQQKIKEIQLKTGQEEGLKPKAEDLDACNLKRRKGSFGSIDHLQKLDEQKKWLDEEVEKVLNQRQELEELEADLKKREAIVSKKEALLQEKSHLENKKLRSSQALNTDSLKISTRLNLLEQELSEKNVQLQTSTAEEKTKISEQVEVLQKEKDQLQKRRHNVDEKLKNGRVLSPEEEHVLFQLEEGIEALEAAIEYRNESIQNRQKSLRASFHNLSRGEANVLEKLACLSPVEIRTILFRYFNKVVNLREAERKQQLYNEEMKMKVLERDNMVRELESALDHLKLQCDRRLTLQQKEHEQKMQLLLHHFKEQDGEGIMETFKTYEDKIQQLEKDLYFYKKTSRDHKKKLKELVGEAIRRQLAPSEYQEAGDGVLKPEGGGMLSEELKWASRPESMKLSGREREMDSSASSLRTQPNPQKLWEDIPELPPIHSSLAPPSGHMLGNENKTETDDNQFTKSHSRLSSQIQVVGNVGRLHGVTPVKLCRKELRQISALELSLRRSSLGVGIGSMAADSIEVSRKPRDLKT

SEQ ID NO: 44308 - protein, 1304 aa, Homo sapiens
  Payload ID: 9034
  Gene Symbol: KIF27
  Gene Name: kinesin family member 27
  Uniprot ID: Q86VH2
  ENSP ID: ENSP00000333928
MEEIPVKVAVRIRPLLCKEALHNHQVCVRVIPNSQQVIIGRDRVFTFDFVFGKNSTQDEVYNTCIKPLVLSLIEGYNATVFAYGQTGSGKTYTIGGGHIASVVEGQKGIIPRAIQEIFQSISEHPSIDFNVKVSYIEVYKEDLRDLLELETSMKDLHIREDEKGNTVIVGAKECHVESAGEVMSLLEMGNAARHTGTTQMNEHSSRSHAIFTISICQVHKNMEAAEDGSWYSPRHIVSKFHFVDLAGSERVTKTGNTGERFKESIQINSGLLALGNVISALGDPRRKSSHIPYRDAKITRLLKDSLGGSAKTVMITCVSPSSSNFDESLNSLKYANRARNIRNKPTVNFSPESDRIDEMEFEIKLLREALQSQQAGVSQTTQINREGSPDTNRIHSLEEQVAQLQGECLGYQCCVEEAFTFLVDLKDTVRLNEKQQHKLQEWFNMIQEVRKAVLTSFRGIGGTASLEEGPQHVTVLQLKRELKKCQCVLAADEVVFNQKELEVKELKNQVQMMVQENKGHAVSLKEAQKVNRLQNEKIIEQQLLVDQLSEELTKLNLSVTSSAKENCGDGPDARIPERRPYTVPFDTHLGHYIYIPSRQDSRKVHTSPPMYSLDRIFAGFRTRSQMLLGHIEEQDKVLHCQFSDNSDDEESEGQEKSGTRCRSRSWIQKPDSVCSLVELSDTQDETQKSDLENEDLKIDCLQESQELNLQKLKNSERILTEAKQKMRELTINIKMKEDLIKELIKTGNDAKSVSKQYSLKVTKLEHDAEQAKVELIETQKQLQELENKDLSDVAMKVKLQKEFRKKMDAAKLRVQVLQKKQQDSKKLASLSIQNEKRANELEQSVDHMKYQKIQLQRKLREENEKRKQLDAVIKRDQQKIKALNTDSLKISTRLNLLEQELSEKNVQLQTSTAEEKTKISEQVEVLQKEKDQLQKRRHNVDEKLKNGRVLSPEEEHVLFQLEEGIEALEAAIEYRNESIQNRQKSLRASFHNLSRGEANVLEKLACLSPVEIRTILFRYFNKVVNLREAERKQQLYNEEMKMKVLERDNMVRELESALDHLKLQCDRRLTLQQKEHEQKMQLLLHHFKEQDGEGIMETFKTYEDKIQQLEKDLYFYKKTSRDHKKKLKELVGEAIRRQLAPSEYQEAGDGVLKPEGGGMLSEELKWASRPESMKLSGREREMDSSASSLRTQPNPQKLWEDIPELPPIHSSLAPPSGHMLGNENKTETDDNQFTKSHSRLSSQIQVVGNVGRLHGVTPVKLCRKELRQISALELSLRRSSLGVGIGSMAADSIEVSRKPRDLKT

SEQ ID NO: 44309 - protein, 286 aa, Homo sapiens
  Payload ID: 9034
  Gene Symbol: KIF27
  Gene Name: kinesin family member 27
  Uniprot ID: Q86VH2
  ENSP ID: ENSP00000365525
MYSLDRIFAGFRTRSQMLLGHIEEQDKVLHCQFSDNSDDEESEGQEKSGTRCRSRSWIQKPDSVCSLVELSDTQDETQKSDLENEDLKIDCLQESQELNLQKLKNSERILTEAKQKMRELTINIKMKEDLIKELIKTGNDAKSVSKQYSLKVTKLEHDAEQAKVELIETQKQLQELENKDLSDVAMKVKLQKEFRKKMDAAKLRVQVLQKKQQDSKKLASLSIQNEKRANELEQSVDHMKYQKIQLQRKLREENEKRKQLDAVIKRDQQKIKVILSYIPAKYNMKC

SEQ ID NO: 44310 - protein, 1335 aa, Homo sapiens
  Payload ID: 9034
  Gene Symbol: KIF27
  Gene Name: kinesin family member 27
  Uniprot ID: Q86VH2
  ENSP ID: ENSP00000401688
MEEIPVKVAVRIRPLLCKEALHNHQVCVRVIPNSQQVIIGRDRVFTFDFVFGKNSTQDEVYNTCIKPLVLSLIEGYNATVFAYGQTGSGKTYTIGGGHIASVVEGQKGIIPRAIQEIFQSISEHPSIDFNVKVSYIEVYKEDLRDLLELETSMKDLHIREDEKGNTVIVGAKECHVESAGEVMSLLEMGNAARHTGTTQMNEHSSRSHAIFTISICQVHKNMEAAEDGSWYSPRHIVSKFHFVDLAGSERVTKTGNTGERFKESIQINSGLLALGNVISALGDPRRKSSHIPYRDAKITRLLKDSLGGSAKTVMITCVSPSSSNFDESLNSLKYANRARNIRNKPTVNFSPESDRIDEMEFEIKLLREALQSQQAGVSQTTQINREGSPDTNRIHSLEEQVAQLQGECLGYQCCVEEAFTFLVDLKDTVRLNEKQQHKLQEWFNMIQEVRKAVLTSFRGIGGTASLEEGPQHVTVLQLKRELKKCQCVLAADEVVFNQKELEVKELKNQVQMMVQENKGHAVSLKEAQKVNRLQNEKIIEQQLLVDQLSEELTKLNLSVTSSAKENCGDGPDARIPERRPYTVPFDTHLGHYIYIPSRQDSRKVHTSPPMYSLDRIFAGFRTRSQMLLGHIEEQDKVLHCQFSDNSDDEESEGQEKSGTRCRSRSWIQKPDSVCSLVELSDTQDETQKSDLENEDLKIDCLQESQELNLQKLKNSERILTEAKQKMRELTINIKMKEDLIKELIKTGNDAKSVSKQYSLKVTKLEHDAEQAKVELIETQKQLQELENKDLSDVAMKVKLQKEFRKKMDAAKLRVQEIQLKTGQEEGLKPKAEDLDACNLKRRKGSFGSIDHLQKLDEQKKWLDEEVEKVLNQRQELEELEADLKKREAIVSKKEALLQEKSHLENKKLRSSQALNTDSLKISTRLNLLEQELSEKNVQLQTSTAEEKTKISEQVEVLQKEKDQLQKRRHNVDEKLKNGRVLSPEEEHVLFQLEEGIEALEAAIEYRNESIQNRQKSLRASFHNLSRGEANVLEKLACLSPVEIRTILFRYFNKVVNLREAERKQQLYNEEMKMKVLERDNMVRELESALDHLKLQCDRRLTLQQKEHEQKMQLLLHHFKEQDGEGIMETFKTYEDKIQQLEKDLYFYKKTSRDHKKKLKELVGEAIRRQLAPSEYQEAGDGVLKPEGGGMLSEELKWASRPESMKLSGREREMDSSASSLRTQPNPQKLWEDIPELPPIHSSLAPPSGHMLGNENKTETDDNQFTKSHSRLSSQIQVVGNVGRLHGVTPVKLCRKELRQISALELSLRRSSLGVGIGSMAADSIEVSRKPRDLKT

SEQ ID NO: 44311 - protein, 171 aa, Homo sapiens
  Payload ID: 9034
  Gene Symbol: KIF27
  Gene Name: kinesin family member 27
  ENSP ID: ENSP00000431390
MEEIPVKVAVRIRPLLCKEALHNHQVCVRVIPNSQQVIIGRDRVFTFDFVFGKNSTQDEVYNTCIKPLVLSLIEGYNATVFAYGQTGSGKTYTIGGGHIASVVEGQKGIIPRAIQEIFQSISEHPSIDFNVKVSYIEVYKEDLRDLLELETSMKDLHIREDEKGNTVCACC

SEQ ID NO: 44312 - protein, 673 aa, Homo sapiens
  Payload ID: 9035
  Gene Symbol: KIF2B
  Gene Name: kinesin family member 2B
  Uniprot ID: Q8N4N8
  ENSP ID: ENSP00000268919
MASQFCLPESPCLSPLKPLKPHFGDIQEGIYVAIQRSDKRIHLAVVTEINRENYWVTVEWVEKAVKKGKKIDLETILLLNPALDSAEHPMPPPPLSPLALAPSSAIRDQRTATKWVAMIPQKNQTASGDSLDVRVPSKPCLMKQKKSPCLWEIQKLQEQREKRRRLQQEIRARRALDVNTRNPNYEIMHMIEEYRRHLDSSKISVLEPPQEHRICVCVRKRPLNQRETTLKDLDIITVPSDNVVMVHESKQKVDLTRYLQNQTFCFDHAFDDKASNELVYQFTAQPLVESIFRKGMATCFAYGQTGSGKTYTMGGDFSGTAQDCSKGIYALVAQDVFLLLRNSTYEKLDLKVYGTFFEIYGGKVYDLLNWKKKLQVLEDGNQQIQVVGLQEKEVCCVEEVLNLVEIGNSCRTSRQTPVNAHSSRSHAVFQIILKSGRIMHGKFSLVDLAGNERGADTTKASRKRQLEGAEINKSLLALKECILALGQNKPHTPFRASKLTLVLRDSFIGQNSSTCMIATISPGMTSCENTLNTLRYANRVKKLNVDVRPYHRGHYPIGHEAPRMLKSHIGNSEMSLQRDEFIKIPYVQSEEQKEIEEVETLPTLLGKDTTISGKGSSQWLENIQERAGGVHHDIDFCIARSLSILEQKIDALTEIQKKLKLLLADLHVKSKVE

SEQ ID NO: 44313 - protein, 671 aa, Homo sapiens
  Payload ID: 9036
  Gene Symbol: KIF2C
  Gene Name: kinesin family member 2C
  Uniprot ID: Q99661
  ENSP ID: ENSP00000361291
MIDFDDVAAINPELLQLLPLHPKDNLPLQENVTIQKQKRRSVNSKIPAPKESLRSRSTRMSTVSELRITAQENDMEVELPAAANSRKQFSVPPAPTRPSCPAVAEIPLRMVSEEMEEQVHSIRGSSSANPVNSVRRKSCLVKEVEKMKNKREEKKAQNSEMRMKRAQEYDSSFPNWEFARMIKEFRATLECHPLTMTDPIEEHRICVCVRKRPLNKQELAKKEIDVISIPSKCLLLVHEPKLKVDLTKYLENQAFCFDFAFDETASNEVVYRFTARPLVQTIFEGGKATCFAYGQTGSGKTHTMGGDLSGKAQNASKGIYAMASRDVFLLKNQPCYRKLGLEVYVTFFEIYNGKLFDLLNKKAKLRVLEDGKQQVQVVGLQEHLVNSADDVIKMIDMGSACRTSGQTFANSNSSRSHACFQIILRAKGRMHGKFSLVDLAGNERGADTSSADRQTRMEGAEINKSLLALKECIRALGQNKAHTPFRESKLTQVLRDSFIGENSRTCMIATISPGISSCEYTLNTLRYADRVKELSPHSGPSGEQLIQMETEEMEACSNGALIPGNLSKEEEELSSQMSSFNEAMTQIRELEEKAMEELKEIIQQGPDWLELSEMTEQPDYDLETFVNKAESALAQQAKHFSALRDVIKALRLAMQLEEQASRQISSKKRPQ

SEQ ID NO: 44314 - protein, 725 aa, Homo sapiens
  Payload ID: 9036
  Gene Symbol: KIF2C
  Gene Name: kinesin family member 2C
  Uniprot ID: Q99661
  ENSP ID: ENSP00000361298
MAMDSSLQARLFPGLAIKIQRSNGLIHSANVRTVNLEKSCVSVEWAEGGATKGKEIDFDDVAAINPELLQLLPLHPKDNLPLQENVTIQKQKRRSVNSKIPAPKESLRSRSTRMSTVSELRITAQENDMEVELPAAANSRKQFSVPPAPTRPSCPAVAEIPLRMVSEEMEEQVHSIRGSSSANPVNSVRRKSCLVKEVEKMKNKREEKKAQNSEMRMKRAQEYDSSFPNWEFARMIKEFRATLECHPLTMTDPIEEHRICVCVRKRPLNKQELAKKEIDVISIPSKCLLLVHEPKLKVDLTKYLENQAFCFDFAFDETASNEVVYRFTARPLVQTIFEGGKATCFAYGQTGSGKTHTMGGDLSGKAQNASKGIYAMASRDVFLLKNQPCYRKLGLEVYVTFFEIYNGKLFDLLNKKAKLRVLEDGKQQVQVVGLQEHLVNSADDVIKMIDMGSACRTSGQTFANSNSSRSHACFQIILRAKGRMHGKFSLVDLAGNERGADTSSADRQTRMEGAEINKSLLALKECIRALGQNKAHTPFRESKLTQVLRDSFIGENSRTCMIATISPGISSCEYTLNTLRYADRVKELSPHSGPSGEQLIQMETEEMEACSNGALIPGNLSKEEEELSSQMSSFNEAMTQIRELEEKAMEELKEIIQQGPDWLELSEMTEQPDYDLETFVNKAESALAQQAKHFSALRDVIKALRLAMQLEEQASRQISSKKRPQ

SEQ ID NO: 44315 - protein, 287 aa, Homo sapiens
  Payload ID: 9036
  Gene Symbol: KIF2C
  Gene Name: kinesin family member 2C
  ENSP ID: ENSP00000395050
MVRSGVPRSRGLVSGLIHSANVRTVNLEKSCVSVEWAEGGATKGKEIDFDDVAAINPELLQLLPLHPKDNLPLQENVTIQKQKRRSVNSKIPAPKESLRSRSTRMSTVSELRITAQENDMEVELPAAANSRKQFSVPPAPTRPSCPAVAEIPLRMVSEEMEEQVHSIRGSSSANPVNSVRRKSCLVKEVEKMKNKREEKKAQNSEMRMKRAQEYDSSFPNWEFARMIKEFRATLECHPLTMTDPIEEHRICVCVRKRPLNKQELAKKEIDVISIPSKCLLLVHEPKL

SEQ ID NO: 44316 - protein, 107 aa, Homo sapiens
  Payload ID: 9036
  Gene Symbol: KIF2C
  Gene Name: kinesin family member 2C
  ENSP ID: ENSP00000402172
  MOD_RES (1)..(1): Any amino acid
XKECIRALGQNKAHTPFRESKLTQVLRDSFIGENSRTCMIATISPGISSCEYTLNTLRYADRQGCHSIPLEPQASKPGRCHIPLLSKEEEELSSQMSSFNEAMTQIR

SEQ ID NO: 44317 - protein, 336 aa, Homo sapiens
  Payload ID: 9036
  Gene Symbol: KIF2C
  Gene Name: kinesin family member 2C
  ENSP ID: ENSP00000410346
MAMDSSLQARLFPGLAIKIQRSNGLIHSANVRTVNLEKSCVSVEWAEGGATKGKEIDFDDVAAINPELLQLLPLHPKDNLPLQENVTIQKQKRRSVNSKIPAPKESLRSRSTRMSTVSELRITAQENDMEVELPAAANSRKQFSVPLRRKSCLVKEVEKMKNKREEKKAQNSEMRMKRAQEYDSSFPNWEFARMIKEFRATLECHPLTMTDPIEEHRICVCVRKRPLNKQELAKKEIDVISIPSKCLLLVHEPKLKVDLTKYLENQAFCFDFAFDETASNEVVYRFTARPLVQTIFEGGKATCFAYGQTGSGKTHTMGGDLSGKAQNASKGIYAMA

SEQ ID NO: 44318 - protein, 702 aa, Homo sapiens
  Payload ID: 9037
  Gene Symbol: KIF3A
  Gene Name: kinesin family member 3A
  ENSP ID: ENSP00000368009
MPINKSEKPESCDNVKVVVRCRPLNEREKSMCYKQAVSVDEMRGTITVHKTDSSNEPPKTFTFDTVFGPESKQLDVYNLTARPIIDSVLEGYNGTIFAYGQTGTGKTFTMEGVRAIPELRGIIPNSFAHIFGHIAKAEGDTRFLVRVSYLEIYNEEVRDLLGKDQTQRLEVKERPDVGVYIKDLSAYVVNNADDMDRIMTLGHKNRSVGATNMNEHSSRSHAIFTITIECSEKGIDGNMHVRMGKLHLVDLAGSERQAKTGATGQRLKEATKINLSLSTLGNVISALVDGKSTHVPYRNSKLTRLLQDSLGGNSKTMMCANIGPADYNYDETISTLRYANRAKNIKNKARINEDPKDALLRQFQKEIEELKKKLEEGEEISGSDISGSEEDDDEEGEVGEDGEKRKKRRDQAGKKKVSPDKMIEMQAKIDEERKALETKLDMEEEERNKARAELEKREKDLLKAQQEHQSLLEKLSALEKKVIVGGVDLLAKAEEQEKLLEESNMELEERRKRAEQLRRELEEKEQERLDIEEKYTSLQEEAQGKTKKLKKVWTMLMAAKSEMADLQQEHQREIEGLLENIRQLSRELRLQMLIIDNFIPRDYQEMIENYVHWNEDIGEWQLKCVAYTGNNMRKQTPVPDKKEKDPFEVDLSHVYLAYTEESLRQSLMKLERPRTSKGKARPKTGRRKRSAKPETVIDSLLQ

SEQ ID NO: 44319 - protein, 699 aa, Homo sapiens
  Payload ID: 9037
  Gene Symbol: KIF3A
  Gene Name: kinesin family member 3A
  Uniprot ID: Q9Y496
  ENSP ID: ENSP00000368020
MPINKSEKPESCDNVKVVVRCRPLNEREKSMCYKQAVSVDEMRGTITVHKTDSSNEPPKTFTFDTVFGPESKQLDVYNLTARPIIDSVLEGYNGTIFAYGQTGTGKTFTMEGVRAIPELRGIIPNSFAHIFGHIAKAEGDTRFLVRVSYLEIYNEEVRDLLGKDQTQRLEVKERPDVGVYIKDLSAYVVNNADDMDRIMTLGHKNRSVGATNMNEHSSRSHAIFTITIECSEKGIDGNMHVRMGKLHLVDLAGSERQAKTGATGQRLKEATKINLSLSTLGNVISALVDGKSTHVPYRNSKLTRLLQDSLGGNSKTMMCANIGPADYNYDETISTLRYANRAKNIKNKARINEDPKDALLRQFQKEIEELKKKLEEGEEISGSDISGSEEDDDEEGEVGEDGEKRKKRRGKKKVSPDKMIEMQAKIDEERKALETKLDMEEEERNKARAELEKREKDLLKAQQEHQSLLEKLSALEKKVIVGGVDLLAKAEEQEKLLEESNMELEERRKRAEQLRRELEEKEQERLDIEEKYTSLQEEAQGKTKKLKKVWTMLMAAKSEMADLQQEHQREIEGLLENIRQLSRELRLQMLIIDNFIPRDYQEMIENYVHWNEDIGEWQLKCVAYTGNNMRKQTPVPDKKEKDPFEVDLSHVYLAYTEESLRQSLMKLERPRTSKGKARPKTGRRKRSAKPETVIDSLLQ

SEQ ID NO: 44320 - protein, 726 aa, Homo sapiens
  Payload ID: 9037
  Gene Symbol: KIF3A
  Gene Name: kinesin family member 3A
  ENSP ID: ENSP00000385808
MPINKSEKPESCDNVKVVVRCRPLNEREKSMCYKQAVSVDEMRGTITVHKTDSSNEPPKTFTFDTVFGPESKQLDVYNLTARPIIDSVLEGYNGTIFAYGQTGTGKTFTMEGVRAIPELRGIIPNSFAHIFGHIAKAEGDTRFLVRVSYLEIYNEEVRDLLGKDQTQRLEVKERPDVGVYIKDLSAYVVNNADDMDRIMTLGHKNRSVGATNMNEHSSRSHAIFTITIECSEKGIDGNMHVRMGKLHLVDLAGSERQAKTGATGQRLKEATKINLSLSTLGNVISALVDGKSTHVPYRNSKLTRLLQDSLGGNSKTMMCANIGPADYNYDETISTLRYANRAKNIKNKARINEDPKDALLRQFQKEIEELKKKLEEGEEISGSDISGSEEDDDEEGEVGEDGEKRKKRRGSSSSSSSDSTCSVIEKPLDKFLPNQAGKKKVSPDKMIEMQAKIDEERKALETKLDMEEEERNKARAELEKREKDLLKAQQEHQSLLEKLSALEKKVIVGGVDLLAKAEEQEKLLEESNMELEERRKRAEQLRRELEEKEQERLDIEEKYTSLQEEAQGKTKKLKKVWTMLMAAKSEMADLQQEHQREIEGLLENIRQLSRELRLQMLIIDNFIPRDYQEMIENYVHWNEDIGEWQLKCVAYTGNNMRKQTPVPDKKEKDPFEVDLSHVYLAYTEESLRQSLMKLERPRTSKGKARPKTGRRKRSAKPETVIDSLLQ

SEQ ID NO: 44321 - protein, 169 aa, Homo sapiens
  Payload ID: 9037
  Gene Symbol: KIF3A
  Gene Name: kinesin family member 3A
  ENSP ID: ENSP00000391863
MINKSEKPESCDNVKVVVRCRPLNEREKSMCYKQAVSVDEMRGTITVHKTDSSNEPPKTFTFDTVFGPESKQLDVYNLTARPIIDSVLEGYNGTIFAYGQTGTGKTFTMEGVRAIPELRGIIPNSFAHIFGHIAKAEGDTRFLVRVSYLEIYNEEVRDLLGKDQTQRLE

SEQ ID NO: 44322 - protein, 185 aa, Homo sapiens
  Payload ID: 9037
  Gene Symbol: KIF3A
  Gene Name: kinesin family member 3A
  ENSP ID: ENSP00000405619
SALEKKVIVGGVDLLAKAEEQEKLLEESNMELEERRKRAEQLRRELEEKEQERLDIEEKYTSLQEEAQGKTKKLKKVWTMLMAAKSEEMIENYVHWNEDIGEWQLKCVAYTGNNMRKQTPVPDKKEKDPFEVDLSHVYLAYTEESLRQSLMKLERPRTSKGKARPKTGRRKRSAKPETVIDSLLQ

SEQ ID NO: 44323 - protein, 725 aa, Homo sapiens
  Payload ID: 9037
  Gene Symbol: KIF3A
  Gene Name: kinesin family member 3A
  ENSP ID: ENSP00000483023
MPINKSEKPESCDNVKVVVRCRPLNEREKSMCYKQAVSVDEMRGTITVHKTDSSNEPPKTFTFDTVFGPESKQLDVYNLTARPIIDSVLEGYNGTIFAYGQTGTGKTFTMEGVRAIPELRGIIPNSFAHIFGHIAKAEGDTRFLVRVSYLEIYNEEVRDLLGKDQTQRLEVKERPDVGVYIKDLSAYVVNNADDMDRIMTLGHKNRSVGATNMNEHSSRSHAIFTITIECSEKGIDGNMHVRMGKLHLVDLAGSERQAKTGATGQRLKEATKINLSLSTLGNVISALVDGKSTHVPYRNSKLTRLLQDSLGGNSKTMMCANIGPADYNYDETISTLRYANRAKNIKNKARINEDPKDALLRQFQKEIEELKKKLEEEEISGSDISGSEEDDDEEGEVGEDGEKRKKRRGNSSSSSSDSTCSVIEKPLDKFLPNQAGKKKVSPDKMIEMQAKIDEERKALETKLDMEEEERNKARAELEKREKDLLKAQQEHQSLLEKLSALEKKVIVGGVDLLAKAEEQEKLLEESNMELEERRKRAEQLRRELEEKEQERLDIEEKYTSLQEEAQGKTKKLKKVWTMLMAAKSEMADLQQEHQREIEGLLENIRQLSRELRLQMLIIDNFIPRDYQEMIENYVHWNEDIGEWQLKCVAYTGNNMRKQTPVPDKKEKDPFEVDLSHVYLAYTEESLRQSLMKLERPRTSKGKARPKTGRRKRSAKPETVIDSLLQ

SEQ ID NO: 44324 - protein, 747 aa, Homo sapiens
  Payload ID: 9038
  Gene Symbol: KIF3B
  Gene Name: kinesin family member 3B
  Uniprot ID: O15066
  ENSP ID: ENSP00000364864
MSKLKSSESVRVVVRCRPMNGKEKAASYDKVVDVDVKLGQVSVKNPKGTAHEMPKTFTFDAVYDWNAKQFELYDETFRPLVDSVLQGFNGTIFAYGQTGTGKTYTMEGIRGDPEKRGVIPNSFDHIFTHISRSQNQQYLVRASYLEIYQEEIRDLLSKDQTKRLELKERPDTGVYVKDLSSFVTKSVKEIEHVMNVGNQNRSVGATNMNEHSSRSHAIFVITIECSEVGLDGENHIRVGKLNLVDLAGSERQAKTGAQGERLKEATKINLSLSALGNVISALVDGKSTHIPYRDSKLTRLLQDSLGGNAKTVMVANVGPASYNVEETLTTLRYANRAKNIKNKPRVNEDPKDALLREFQEEIARLKAQLEKRSIGRRKRREKRREGGGSGGGGEEEEEEGEEGEEEGDDKDDYWREQQEKLEIEKRAIVEDHSLVAEEKMRLLKEKEKKMEDLRREKDAAEMLGAKIKAMESKLLVGGKNIVDHTNEQQKILEQKRQEIAEQKRREREIQQQMESRDEETLELKETYSSLQQEVDIKTKKLKKLFSKLQAVKAEIHDLQEEHIKERQELEQTQNELTRELKLKHLIIENFIPLEEKSKIMNRAFFDEEEDHWKLHPITRLENQQMMKRPVSAVGYKRPLSQHARMSMMIRPEARYRAENIVLLELDMPSRTTRDYEGPAIAPKVQAALDAALQDEDEIQVDASSFESTANKKSKARPKSGRKSGSSSSSSGTPASQLYPQSRGLVPK

SEQ ID NO: 44325 - protein, 793 aa, Homo sapiens
  Payload ID: 9039
  Gene Symbol: KIF3C
  Gene Name: kinesin family member 3C
  Uniprot ID: O14782
  ENSP ID: ENSP00000264712
MASKTKASEALKVVARCRPLSRKEEAAGHEQILTMDVKLGQVTLRNPRAAPGELPKTFTFDAVYDASSKQADLYDETVRPLIDSVLQGFNGTVFAYGQTGTGKTYTMQGTWVEPELRGVIPNAFEHIFTHISRSQNQQYLVRASYLEIYQEEIRDLLSKEPGKRLELKENPETGVYIKDLSSFVTKNVKEIEHVMNLGNQTRAVGSTHMNEVSSRSHAIFIITVECSERGSDGQDHIRVGKLNLVDLAGSERQNKAGPNTAGGAATPSSGGGGGGGGSGGGAGGERPKEASKINLSLSALGNVIAALAGNRSTHIPYRDSKLTRLLQDSLGGNAKTIMVATLGPASHSYDESLSTLRFANRAKNIKNKPRVNEDPKDTLLREFQEEIARLKAQLEKRGMLGKRPRRKSSRRKKAVSAPPGYPEGPVIEAWVAEEEDDNNNNHRPPQPILESALEKNMENYLQEQKERLEEEKAAIQDDRSLVSEEKQKLLEEKEKMLEDLRREQQATELLAAKYKAMESKLLIGGRNIMDHTNEQQKMLELKRQEIAEQKRREREMQQEMMLRDEETMELRGTYTSLQQEVEVKTKKLKKLYAKLQAVKAEIQDQHDEYIRVRQDLEEAQNEQTRELKLKYLIIENFIPPEEKNKIMNRLFLDCEEEQWKFQPLVPAGVSSSQMKKRPTSAVGYKRPISQYARVAMAMGSHPRYRAENIMFLELDVSPPAVFEMEFSHDQEQDPRALHMERLMRLDSFLERPSTSKVRKSRSWCQSPQRPPPSTTHASLASASLRPATVADHE

SEQ ID NO: 44326 - protein, 793 aa, Homo sapiens; identical to SEQ ID NO: 44325
  Payload ID: 9039
  Gene Symbol: KIF3C
  Gene Name: kinesin family member 3C
  Uniprot ID: O14782
  ENSP ID: ENSP00000385030

SEQ ID NO: 44327 - protein, 685 aa, Homo sapiens
  Payload ID: 9039
  Gene Symbol: KIF3C
  Gene Name: kinesin family member 3C
  ENSP ID: ENSP00000393676
MASKTKASEALKVVARCRPLSRKEEAAGHEQILTMDVKLGQVTLRNPRAAPGELPKTFTFDAVYDASSKQADLYDETVRPLIDSVLQGFNGTVFAYGQTGTGKTYTMQGTWVEPELRGVIPNAFEHIFTHISRSQNQQYLVRASYLEIYQEEIRDLLSKEPGKRLELKENPETGVYIKDLSSFVTKNVKEIEHVMNLGNQTRAVGSTHMNEVSSRSHAIFIITVECSERGSDGQDHIRVGKLNLVDLAGSERQNKAGPNTAGGAATPSSGGGGGGGGSGGGAGGERPKEASKINLSLSALGNVIAALAGNRSTHIPYRDSKLTRLLQDSLGGNAKTIMVATLGPASHSYDESLSTLRFANRAKNIKNKPRVNEDPKDTLLREFQEEIARLKAQLEKRGMLGKRPRRKSSRRKKAVSAPPGYPEGPVIEAWVAEEEDDNNNNHRPPQPILESALEKNMENYLQEQKERLEEEKAAIQDDRSLVSEEKQKLLEEKEKMLEDLRREQQATELLAAKYKAMESKLLIGGRNIMDHTNEQQKMLELKRQEIAEQKRREREMQQEMMLRDEETMELRGTYTSLQQEVEVKTKKLKKLYAKLQAVKAEIQDQHDEYIRVRQDLEEAQNEQTRELKLKYLIIENFIPPEEKNKIMNRLFLDCEEEQWKFQPLVPAGVLTLSPRLKCSGTISAH

SEQ ID NO: 44328 - protein, 672 aa, Homo sapiens
  Payload ID: 9039
  Gene Symbol: KIF3C
  Gene Name: kinesin family member 3C
  ENSP ID: ENSP00000410407
MASKTKASEALKVVARCRPLSRKEEAAGHEQILTMDVKLGQVTLRNPRAAPGELPKTFTFDAVYDASSKQADLYDETVRPLIDSVLQGFNGTVFAYGQTGTGKTYTMQGTWVEPELRGVIPNAFEHIFTHISRSQNQQYLVRASYLEIYQEEIRDLLSKEPGKRLELKENPETGVYIKDLSSFVTKNVKEIEHVMNLGNQTRAVGSTHMNEVSSRSHAIFIITVECSERGSDGQDHIRVGKLNLVDLAGSERQNKAGPNTAGGAATPSSGGGGGGGGSGGGAGGERPKEASKINLSLSALGNVIAALAGNRSTHIPYRDSKLTRLLQDSLGGNAKTIMVATLGPASHSYDESLSTLRFANRAKNIKNKPRVNEDPKDTLLREFQEEIARLKAQLEKRGMLGKRPRRKSSRRKKAVSAPPGYPEGPVIEAWVAEEEDDNNNNHRPPQPILESALEKNMENYLQEQKERLEEEKAAIQDDRSLVSEEKQKLLEEKEKMLEDLRREQQATELLAAKYKAMESKLLIGGRNIMDHTNEQQKMLELKRQEIAEQKRREREMQQEMMLRDEETMELRGTYTSLQQEVEVKTKKLKKLYAKLQAVKAEIQDQHDEYIRVRQDLEEAQNEQTRELKLKYLIIENFIPPEEKNKIMNRLFLDCEEEQWKFQPLVPAGVYFM

SEQ ID NO: 44329 - protein, 792 aa, Homo sapiens
  Payload ID: 9039
  Gene Symbol: KIF3C
  Gene Name: kinesin family member 3C
  ENSP ID: ENSP00000480682
MASKTKASEALKVVARCRPLSRKEEAAGHEQILTMDVKLGQVTLRNPRAAPGELPKTFTFDAVYDASSKQADLYDEREPLIDSVLQGFNGTVFAYGQTGTGKTYTMQGTWVEPELRGVIPNAFEHIFTHISRSQNQQYLVRASYLEIYQEEIRDLLSKEPGKRLELKENPETGVYIKDLSSFVTKNVKEIEHVMNLGNQTRAVGSTHMNEVSSRSHAIFIITVECSERGSDGQDHIRVGKLNLVDLAGSERQNKAGPNTAGGAATPSSGGGGGGGGSGGGAGGERPKEASKINLSLSALGNVIAALAGNRSTHIPYRDSKLTRLLQDSLGGNAKTIMVATLGPASHSYDESLSTLRFANRAKNIKNKPRVNEDPKDTLLREFQEEIARLKAQLEKRGMLGKRPRRKSSRRKKAVSAPPGYPEGPVIEAWVAEEEDDNNNNHRPPQPILESALEKNMENYLQEQKERLEEEKAAIQDDRSLVSEEKQKLLEEKEKMLEDLRREQQATELLAAKYKAMESKLLIGGRNIMDHTNEQQKMLELKRQEIAEQKRREREMQQEMMLRDEETMELRGTYTSLQQEVEVKTKKLKKLYAKLQAVKAEIQDQHDEYIRVRQDLEEAQNEQTRELKLKYLIIENFIPPEEKNKIMNRLFLDCEEEQWKFQPLVPAGVSSSQMKKRPTSAVGYKRPISQYARVAMAMGSHPRYRAENIMFLELDVSPPAVFEMEFSHDQEQDPRALHMERLMRLDSFLERPSTSKVRKSRSWCQSPQRPPPSTTHASLASASLRPATVADHE

SEQ ID NO: 44330 - protein, 1232 aa, Homo sapiens
  Payload ID: 9040
  Gene Symbol: KIF4A
  Gene Name: kinesin family member 4A
  Uniprot ID: O95239
  ENSP ID: ENSP00000363524
MKEEVKGIPVRVALRCRPLVPKEISEGCQMCLSFVPGEPQVVVGTDKSFTYDFVFDPSTEQEEVFNTAVAPLIKGVFKGYNATVLAYGQTGSGKTYSMGGAYTAEQENEPTVGVIPRVIQLLFKEIDKKSDFEFTLKVSYLEIYNEEILDLLCPSREKAQINIREDPKEGIKIVGLTEKTVLVALDTVSCLEQGNNSRTVASTAMNSQSSRSHAIFTISLEQRKKSDKNSSFRSKLHLVDLAGSERQKKTKAEGDRLKEGININRGLLCLGNVISALGDDKKGGFVPYRDSKLTRLLQDSLGGNSHTLMIACVSPADSNLEETLNTLRYADRARKIKNKPIVNIDPQTAELNHLKQQVQQLQVLLLQAHGGTLPGSITVEPSENLQSLMEKNQSLVEENEKLSRGLSEAAGQTAQMLERIILTEQANEKMNAKLEELRQHAACKLDLQKLVETLEDQELKENVEIICNLQQLITQLSDETVACMAAAIDTAVEQEAQVETSPETSRSSDAFTTQHALRQAQMSKELVELNKALALKEALARKMTQNDSQLQPIQYQYQDNIKELELEVINLQKEKEELVLELQTAKKDANQAKLSERRRKRLQELEGQIADLKKKLNEQSKLLKLKESTERTVSKLNQEIRMMKNQRVQLMRQMKEDAEKFRQWKQKKDKEVIQLKERDRKRQYELLKLERNFQKQSNVLRRKTEEAAAANKRLKDALQKQREVADKRKETQSRGMEGTAARVKNWLGNEIEVMVSTEEAKRHLNDLLEDRKILAQDVAQLKEKKESGENPPPKLRRRTFSLTEVRGQVSESEDSITKQIESLETEMEFRSAQIADLQQKLLDAESEDRPKQRWENIATILEAKCALKYLIGELVSSKIQVSKLESSLKQSKTSCADMQKMLFEERNHFAEIETELQAELVRMEQQHQEKVLYLLSQLQQSQMAEKQLEESVSEKEQQLLSTLKCQDEELEKMREVCEQNQQLLRENEIIKQKLTLLQVASRQKHLPKDTLLSPDSSFEYVPPKPKPSRVKEKFLEQSMDIEDLKYCSEHSVNEHEDGDGDDDEGDDEEWKPTKLVKVSRKNIQGCSCKGWCGNKQCGCRKQKSDCGVDCCCDPTKCRNRQQGKDSLGTVERTQDSEGSFKLEDPTEVTPGLSFFNPVCATPNSKILKEMCDVEQVLSKKTPPAPSPFDLPELKHVATEYQENKAPGKKKKRALASNTSFFSGCSPIEEEAH

SEQ ID NO: 44331 - protein, 1234 aa, Homo sapiens
  Payload ID: 9041
  Gene Symbol: KIF4B
  Gene Name: kinesin family member 4B
  Uniprot ID: Q2VIQ3
  ENSP ID: ENSP00000387875
MKEEVKGIPVRVALRCRPLVPKEISEGCQMCLSFVPGETQVVVGTDKSFTYDFVFDPCTEQEEVFNKAVAPLIKGIFKGYNATVLAYGQTGSGKTYSMGGAYTAEQENEPTVGIIPRVIQLLFKEIDKKSDFEFTLKVSYLEIYNEEILDLLCPSREKAQINIREDPKEGIKIVGLTEKTVLVALDTVSCLEQGNNSRTVASTAMNSQSSRSHAIFTISIEQRKKSDKNCSFRSKLHLVDLAGSERQKKTKAEGDRLKEGININRGLLCLGNVISALGDDKKGSFVPYRDSKLTRLLQDSLGGNSHTLMIACVSPADSNLEETLSTLRYADRARKIKNKPIVNIDPHTAELNHLKQQVQQLQVLLLQAHGGTLPGSINAEPSENLQSLMEKNQSLVEENEKLSRCLSKAAGQTAQMLERIILTEQVNEKLNAKLEELRQHVACKLDLQKLVETLEDQELKENVEIICNLQQLITQLSDETVACTAAAIDTAVEEEAQVETSPETSRSSDAFTTQHALHQAQMSKEVVELNNALALKEALVRKMTQNDNQLQPIQFQYQDNIKNLELEVINLQKEKEELVRELQTAKKNVNQAKLSEHRHKLLQELEGQIADLKKKLNEQSKLLKLKESTERTVSKLNQEIWMMKNQRVQLMRQMKEDAEKFRQWKQKKDKEVIQLKERDRKRQYELLKLERNFQKQSSVLRRKTEEAAAANKRLKDALQKQREVTDKRKETQSHGKEGIAARVRNWLGNEIEVMVSTEEAKRHLNDLLEDRKILAQDVVQLKEKKESRENPPPKLRKCTFSLSEVHGQVLESEDCITKQIESLETEMELRSAQIADLQQKLLDAESEDRPKQCWENIATILEAKCALKYLIGELVSSKIHVTKLENSLRQSKASCADMQKMLFEEQNHFSEIETELQAELVRMEQQHQEKVLYLVSQLQESQMAEKQLEKSASEKEQQLVSTLQCQDEELEKMREVCEQNQQLLQENEIIKQKLILLQVASRQKHLPNDTLLSPDSSFEYIPPKPKPSRVKEKFLEQSMDIEDLKYCSEHSVNEHEDGDGDGDSDEGDDEEWKPTKLVKVSRKNIQGCSCKGWCGNKQCGCRKQKSDCGVDCSCDPTKCRNRQQGKDSLGTVEQTQDSEGSFKLEDPTEVTPGLSFFNPVCATPNSKILKEMCDMEQVLSKKTAPAPSPFDLPESKHGATEYQQNKPPGKKKKRALASNTSFFSGCSPIEEEAH

SEQ ID NO: 44332 - protein, 943 aa, Homo sapiens
  Payload ID: 9042
  Gene Symbol: KIF5A
  Gene Name: kinesin family member 5A
  ENSP ID: ENSP00000286452
MAETNNECSIKVLCRFRPLNQAEILRGDKFIPIFQGDDSVVIGVSYFEIYLDKIRDLLDVTKTNLSVHEDKNRVPFVKGCTERFVSSPEEILDVIDEGKSNRHVAVTNMNEHSSRSHSIFLINIKQENMETEQKLSGKLYLVDLAGSEKVSKTGAEGAVLDEAKNINKSLSALGNVISALAEGTKSYVPYRDSKMTRILQDSLGGNCRTTMFICCSPSSYNDAETKSTLMFGQRAKTIKNTASVNLELTAEQWKKKYEKEKEKTKAQKETIAKLEAELSRWRNGENVPETERLAGEEAALGAELCEETPVNDNSSIVVRIAPEERQKYEEEIRRLYKQLDDKDDEINQQSQLIEKLKQQMLDQEELLVSTRGDNEKVQRELSHLQSENDAAKDEVKEVLQALEELAVNYDQKSQEVEEKSQQNQLLVDELSQKVATMLSLESELQRLQEVSGHQRKRIAEVLNGLMKDLSEFSVIVGNGEIKLPVEISGAIEEEFTVARLYISKIKSEVKSVVKRCRQLENLQVECHRKMEVTGRELSSCQLLISQHEAKIRSLTEYMQSVELKKRHLEESYDSLSDELAKLQAQETVHEVALKDKEPDTQDADEVKKALELQMESHREAHHRQLARLRDEINEKQKTIDELKDLNQKLQLELEKLQADYEKLKSEEHEKSTKLQELTFLYERHEQSKQDLKGLEETVARELQTLHNLRKLFVQDVTTRVKKSAEMEPEDSGGIHSQKQKISFLENNLEQLTKVHKQLVRDNADLRCELPKLEKRLRATAERVKALEGALKEAKEGAMKDKRRYQQEVDRIKEAVRYKSSGKRGHSAQIAKPVRPGHYPASSPTNPYGTRSPECISYTNSLFQNYQNLYLQATPSSTSDMYFANSCTSSGATSSGGPLASYQKANMDNGNATDINDNRSDLPCGYEAEDQAKLFPLHQETAAS

SEQ ID NO: 44333 - protein, 1032 aa, Homo sapiens
  Payload ID: 9042
  Gene Symbol: KIF5A
  Gene Name: kinesin family member 5A
  Uniprot ID: Q12840
  ENSP ID: ENSP00000408979
MAETNNECSIKVLCRFRPLNQAEILRGDKFIPIFQGDDSVVIGGKPYVFDRVFPPNTTQEQVYHACAMQIVKDVLAGYNGTIFAYGQTSSGKTHTMEGKLHDPQLMGIIPRIARDIFNHIYSMDENLEFHIKVSYFEIYLDKIRDLLDVTKTNLSVHEDKNRVPFVKGCTERFVSSPEEILDVIDEGKSNRHVAVTNMNEHSSRSHSIFLINIKQENMETEQKLSGKLYLVDLAGSEKVSKTGAEGAVLDEAKNINKSLSALGNVISALAEGTKSYVPYRDSKMTRILQDSLGGNCRTTMFICCSPSSYNDAETKSTLMFGQRAKTIKNTASVNLELTAEQWKKKYEKEKEKTKAQKETIAKLEAELSRWRNGENVPETERLAGEEAALGAELCEETPVNDNSSIVVRIAPEERQKYEEEIRRLYKQLDDKDDEINQQSQLIEKLKQQMLDQEELLVSTRGDNEKVQRELSHLQSENDAAKDEVKEVLQALEELAVNYDQKSQEVEEKSQQNQLLVDELSQKVATMLSLESELQRLQEVSGHQRKRIAEVLNGLMKDLSEFSVIVGNGEIKLPVEISGAIEEEFTVARLYISKIKSEVKSVVKRCRQLENLQVECHRKMEVTGRELSSCQLLISQHEAKIRSLTEYMQSVELKKRHLEESYDSLSDELAKLQAQETVHEVALKDKEPDTQDADEVKKALELQMESHREAHHRQLARLRDEINEKQKTIDELKDLNQKLQLELEKLQADYEKLKSEEHEKSTKLQELTFLYERHEQSKQDLKGLEETVARELQTLHNLRKLFVQDVTTRVKKSAEMEPEDSGGIHSQKQKISFLENNLEQLTKVHKQLVRDNADLRCELPKLEKRLRATAERVKALEGALKEAKEGAMKDKRRYQQEVDRIKEAVRYKSSGKRGHSAQIAKPVRPGHYPASSPTNPYGTRSPECISYTNSLFQNYQNLYLQATPSSTSDMYFANSCTSSGATSSGGPLASYQKANMDNGNATDINDNRSDLPCGYEAEDQAKLFPLHQETAAS

SEQ ID NO: 44334 - protein, 963 aa, Homo sapiens
  Payload ID: 9043
  Gene Symbol: KIF5B
  Gene Name: kinesin family member 5B
  Uniprot ID: P33176
  ENSP ID: ENSP00000307078
MADLAECNIKVMCRFRPLNESEVNRGDKYIAKFQGEDTVVIASKPYAFDRVFQSSTSQEQVYNDCAKKIVKDVLEGYNGTIFAYGQTSSGKTHTMEGKLHDPEGMGIIPRIVQDIFNYIYSMDENLEFHIKVSYFEIYLDKIRDLLDVSKTNLSVHEDKNRVPYVKGCTERFVCSPDEVMDTIDEGKSNRHVAVTNMNEHSSRSHSIFLINVKQENTQTEQKLSGKLYLVDLAGSEKVSKTGAEGAVLDEAKNINKSLSALGNVISALAEGSTYVPYRDSKMTRILQDSLGGNCRTTIVICCSPSSYNESETKSTLLFGQRAKTIKNTVCVNVELTAEQWKKKYEKEKEKNKILRNTIQWLENELNRWRNGETVPIDEQFDKEKANLEAFTVDKDITLTNDKPATAIGVIGNFTDAERRKCEEEIAKLYKQLDDKDEEINQQSQLVEKLKTQMLDQEELLASTRRDQDNMQAELNRLQAENDASKEEVKEVLQALEELAVNYDQKSQEVEDKTKEYELLSDELNQKSATLASIDAELQKLKEMTNHQKKRAAEMMASLLKDLAEIGIAVGNNDVKQPEGTGMIDEEFTVARLYISKMKSEVKTMVKRCKQLESTQTESNKKMEENEKELAACQLRISQHEAKIKSLTEYLQNVEQKKRQLEESVDALSEELVQLRAQEKVHEMEKEHLNKVQTANEVKQAVEQQIQSHRETHQKQISSLRDEVEAKAKLITDLQDQNQKMMLEQERLRVEHEKLKATDQEKSRKLHELTVMQDRREQARQDLKGLEETVAKELQTLHNLRKLFVQDLATRVKKSAEIDSDDTGGSAAQKQKISFLENNLEQLTKVHKQLVRDNADLRCELPKLEKRLRATAERVKALESALKEAKENASRDRKRYQQEVDRIKEAVRSKNMARRGHSAQIAKPIRPGQHPAASPTHPSAIRGGGAFVQNSQPVAVRGGGGKQV

SEQ ID NO: 44335 - protein, 76 aa, Homo sapiens
  Payload ID: 9044
  Gene Symbol: KIF5C
  Gene Name: kinesin family member 5C
  ENSP ID: ENSP00000393270
MTRILQDSLGGNCRTTIVICCSPSVFNEAETKSTLMFGQRAKTIKNTVSVNLELTAEEWKKKYEKEKEKNKTLKNV

SEQ ID NO: 44336 - protein, 957 aa, Homo sapiens
  Payload ID: 9044
  Gene Symbol: KIF5C
  Gene Name: kinesin family member 5C
  Uniprot ID: O60282
  ENSP ID: ENSP00000393379
MADPAECSIKVMCRFRPLNEAEILRGDKFIPKFKGDETVVIGQGKPYVFDRVLPPNTTQEQVYNACAKQIVKDVLEGYNGTIFAYGQTSSGKTHTMEGKLHDPQLMGIIPRIAHDIFDHIYSMDENLEFHIKVSYFEIYLDKIRDLLDVSKTNLAVHEDKNRVPYVKGCTERFVSSPEEVMDVIDEGKANRHVAVTNMNEHSSRSHSIFLINIKQENVETEKKLSGKLYLVDLAGSEKVSKTGAEGAVLDEAKNINKSLSALGNVISALAEGTKTHVPYRDSKMTRILQDSLGGNCRTTIVICCSPSVFNEAETKSTLMFGQRAKTIKNTVSVNLELTAEEWKKKYEKEKEKNKTLKNVIQHLEMELNRWRNGEAVPEDEQISAKDQKNLEPCDNTPIIDNIAPVVAGISTEEKEKYDEEISSLYRQLDDKDDEINQQSQLAEKLKQQMLDQDELLASTRRDYEKIQEELTRLQIENEAAKDEVKEVLQALEELAVNYDQKSQEVEDKTRANEQLTDELAQKTTTLTTTQRELSQLQELSNHQKKRATEILNLLLKDLGEIGGIIGTNDVKTLADVNGVIEEEFTMARLYISKMKSEVKSLVNRSKQLESAQMDSNRKMNASERELAACQLLISQHEAKIKSLTDYMQNMEQKRRQLEESQDSLSEELAKLRAQEKMHEVSFQDKEKEHLTRLQDAEEMKKALEQQMESHREAHQKQLSRLRDEIEEKQKIIDEIRDLNQKLQLEQEKLSSDYNKLKIEDQEREMKLEKLLLLNDKREQAREDLKGLEETVSRELQTLHNLRKLFVQDLTTRVKKSVELDNDDGGGSAAQKQKISFLENNLEQLTKVHKQLVRDNADLRCELPKLEKRLRATAERVKALESALKEAKENAMRDRKRYQQEVDRIKEAVRAKNMARRAHSAQIAKPIRPGHYPASSPTAVHAIRGGGGSSSNSTHYQK

SEQ ID NO: 44337 - protein, 860 aa, Homo sapiens
  Payload ID: 9044
  Gene Symbol: KIF5C
  Gene Name: kinesin family member 5C
  ENSP ID: ENSP00000480293
GKLHDPQLMGIIPRIAHDIFDHIYSMDENLEFHIKVSYFEIYLDKIRDLLDVSKTNLAVHEDKNRVPYVKGCTERFVSSPEEVMDVIDEGKANRHVAVTNMNEHSSRSHSIFLINIKQENVETEKKLSGKLYLVDLAGSEKVSKTGAEGAVLDEAKNINKSLSALGNVISALAEGTKTHVPYRDSKMTRILQDSLGGNCRTTIVICCSPSVFNEAETKSTLMFGQRAKTIKNTVSVNLELTAEEWKKKYEKEKEKNKTLKNVIQHLEMELNRWRNGEAVPEDEQISAKDQKNLEPCDNTPIIDNIAPVVAGISTEEKEKYDEEISSLYRQLDDKDDEINQQSQLAEKLKQQMLDQDELLASTRRDYEKIQEELTRLQIENEAAKDEVKEVLQALEELAVNYDQKSQEVEDKTRANEQLTDELAQKTTTLTTTQRELSQLQELSNHQKKRATEILNLLLKDLGEIGGIIGTNDVKTLADVNGVIEEEFTMARLYISKMKSEVKSLVNRSKQLESAQMDSNRKMNASERELAACQLLISQHEAKIKSLTDYMQNMEQKRRQLEESQDSLSEELAKLRAQEKMHEVSFQDKEKEHLTRLQDAEEMKKALEQQMESHREAHQKQLSRLRDEIEEKQKIIDEIRDLNQKLQLEQEKLSSDYNKLKIEDQEREMKLEKLLLLNDKREQAREDLKGLEETVSRELQTLHNLRKLFVQDLTTRVKKSVELDNDDGGGSAAQKQKISFLENNLEQLTKVHKQLVRDNADLRCELPKLEKRLRATAERVKALESALKEAKENAMRDRKRYQQEVDRIKEAVRAKNMARRAHSAQIAKPIRPGHYPASSPTAVHAIRGGGGSSSNSTHYQK

SEQ ID NO: 44338 - protein, 265 aa, Homo sapiens
  Payload ID: 9045
  Gene Symbol: KIF6
  Gene Name: kinesin family member 6
  Uniprot ID: Q6ZMV9
  ENSP ID: ENSP00000229913
MREEMSLGCQEAFEIFKRDHADSVTIDDNKQILKQRFSEAKALGESINEARSKIGHLKEEITQRHIQQVALGISENMAVPLMPDQQEEKLRSQLEEEKRRYKTMFTRLKALKVEIEHLQLLMDKAKVKLQKEFEVWWAEEATNLQVNSPAVNSLDHTKPFLQTSDSQHEWSQLLSNKSSGGWEVQDQGTGRFDVCDVNARKILPSPCPSPHSQKQSSTSTPLEDSIPKRPVSSIPLTGDSQTDSDIIAFIKARQSILQKQCLGSN

SEQ ID NO: 44339 - protein, 814 aa, Homo sapiens
  Payload ID: 9045
  Gene Symbol: KIF6
  Gene Name: kinesin family member 6
  Uniprot ID: Q6ZMV9
  ENSP ID: ENSP00000287152
MVKQTIQIFARVKPPVRKHQQGIYSIDEDEKLIPSLEIILPRDLADGFVNNKRESYKFKFQRIFDQDANQETVFENIAKPVAGSVLAGYNGTIFAYGQTGSGKTFTITGGAERYSDRGIIPRTLSYIFEQLQKDSSKIYTTHISYLEIYNECGYDLLDPRHEASSLEDLPKVTILEDPDQNIHLKNLTLHQATTEEEALNLLFLGDTNRMIAETPMNQASTRSHCIFTIHLSSKEPGSATVRHAKLHLVDLAGSERVAKTGVGGHLLTEAKYINLSLHYLEQVIIALSEKHRSHIPYRNSMMTSVLRDSLGGNCMTTMIATLSLEKRNLDESISTCRFAQRVALIKNEAVLNEEINPRLVIKRLQKEIQELKDELAMVTGEQRTEALTEAELLQLEKLITSFLEDQDSDSRLEVGADMRKVHHCFHHLKKLLNDKKILENNTVSSESKDQDCQEPLKEEEYRKLRDILKQRDNEINILVNMLKKEKKKAQEALHLAGMDRREFRQSQSPPFRLGNPEEGQRMRLSSAPSQAQDFSILGKRSSLLHKKIGMREEMSLGCQEAFEIFKRDHADSVTIDDNKQILKQRFSEAKALGESINEARSKIGHLKEEITQRHIQQVALGISENMAVPLMPDQQEEKLRSQLEEEKRRYKTMFTRLKALKVEIEHLQLLMDKAKVKLQKEFEVWWAEEATNLQVNSPAVNSLDHTKPFLQTSDSQHEWSQLLSNKSSGGWEVQDQGTGRFDVCDVNARKILPSPCPSPHSQKQSSTSTPLEDSIPKRPVSSIPLTGDSQTDSDIIAFIKARQSILQKQCLGSN

SEQ ID NO: 44340 - protein, 248 aa, Homo sapiens
  Payload ID: 9045
  Gene Symbol: KIF6
  Gene Name: kinesin family member 6
  ENSP ID: ENSP00000377889
MREEMSLGCQEAFEIFKRDHADSVTIDDNKQILKQRFSEAKALGESINEARSKIGHLKEEITQRHIQQVALGISENMAVPLMPDQQEEKLRSQLEEEKRRYKTMFTRLKALKVEIEHLQLLMDKAKVKLQKEFEVWWAEEATNLQVNSPAVNSLDHTKPFLQTSDSQHEWSQLLSNKSDVNARKILPSPCPSPHSQKQSSTSTPLEDSIPKRPVSSIPLTGDSQTDSDIIAFIKARQSILQKQCLGSN

SEQ ID NO: 44341 - protein, 161 aa, Homo sapiens
  Payload ID: 9045
  Gene Symbol: KIF6
  Gene Name: kinesin family member 6
  ENSP ID: ENSP00000404856
TPMNQASTRSHCIFTIHLSSKEPGSATVRHAKLHLVDLAGSERVAKTGVGGHLLTEAKYINLSLHYLEQVIIALSEKHRSHIPYRNSMMTSVLRDSLGGNCMTTMIATLSLEKRNLDESISTCRFAQRVALIKNEAVLNEEINPRLKAPSSSDGVLFCRNQ

SEQ ID NO: 44342 - protein, 689 aa, Homo sapiens
  Payload ID: 9045
  Gene Symbol: KIF6
  Gene Name: kinesin family member 6
  ENSP ID: ENSP00000409417
  MOD_RES (1)..(1): Any amino acid
XGAERYSDRGIIPRTLSYIFEQLQKDSSKIYTTHISYLEIYNECGYDLLDPRHEASSLEDLPKVTILEDPDQNIHLKNLTLHQATTEEEALNLLFLGDTNRMIAETPMNQASTRSHCIFTIHLSSKEPGSATVRHAKLHLVDLAGSERVAKTGVGGHLLTEAKYINLSLHYLEQVIIALSEKHRSHIPYRNSMMTSVLRDSLGGNCMTTMIATLSLEKRNLDESISTCRFAQRVALIKNEAVLNEEINPRLVIKRLQKEIQELKDELAMVTGEQRTEALTEAELLQLEKLITSFLEDQDSDSRLEVGADMRKVHHCFHHLKKLLNDKKILENNTVSSESKDQDCQEPLKEEEYRKLRDILKQRDNEINILVNMLKKEKKKAQEALHLAGMDRREFRQSQSPPFRLGNPEEGQRMRLSSAPSQAQDFSILGKRSSLLHKKIGMREEMSLGCQEAFEIFKRDHADSVTIDDNKQILKQRFSEAKALGESINEARSKIGHLKEEITQRHIQQVALGISENMAVPLMPDQQEEKLRSQLEEEKRRYKTMFTRLKALKVEIEHLQLLMDKAKVKLQKEFEVWWAEEATNLQVNSPAVNSLDHTKPFLQTSDSQHEWSQLLSNKSDVNARKILPSPCPSPHSQKQSSTSTPLEDSIPKRPVSSIPLTGDSQTDSDIIAFIKARQSILQKQCLGSN

SEQ ID NO: 44343 - protein, 293 aa, Homo sapiens
  Payload ID: 9045
  Gene Symbol: KIF6
  Gene Name: kinesin family member 6
  ENSP ID: ENSP00000441435
MREEMSLGCQEAFEIFKRDHADSVTIDDNKQILKQRFSEAKALGESINEARSKIGHLKEEITQRHIQQVALGISENMAVPLMPDQQEEKLRSQLEEEKRRYKTMFTRLKALKVEIEHLQLLMDKAKVKLQKEFEVWWAEEATNLQVNSPAVNSLDHTKPFLQTSDSQHEWSQLLSNKSSGGWEVQDQGTGRFDVCDVNARKILPSPCPSPHSQKQSSTSTPLEDSIPKRPVSSIPLTGDSQTDSDIIAFIKARQSILQKQYLQLLCSLFPKSAVSSAQASTNRKGLSDVLVTR

SEQ ID NO: 44344 - protein, 1343 aa, Homo sapiens
  Payload ID: 9046
  Gene Symbol: KIF7
  Gene Name: kinesin family member 7
  Uniprot ID: Q2M1P5
  ENSP ID: ENSP00000377934
MGLEAQRLPGAEEAPVRVALRVRPLLPKELLHGHQSCLQVEPGLGRVTLGRDRHFGFHVVLAEDAGQEAVYQACVQPLLEAFFEGFNATVFAYGQTGSGKTYTMGEASVASLLEDEQGIVPRAMAEAFKLIDENDLLDCLVHVSYLEVYKEEFRDLLEVGTASRDIQLREDERGNVVLCGVKEVDVEGLDEVLSLLEMGNAARHTGATHLNHLSSRSHTVFTVTLEQRGRAPSRLPRPAPGQLLVSKFHFVDLAGSERVLKTGSTGERLKESIQINSSLLALGNVISALGDPQRRGSHIPYRDSKITRILKDSLGGNAKTVMIACVSPSSSDFDETLNTLNYASRAQNIRNRATVNWRPEAERPPEETASGARGPPRHRSETRIIHRGRRAPGPATASAAAAMRLGAECARYRACTDAAYSLLRELQAEPGLPGAAARKVRDWLCAVEGERSALSSASGPDSGIESASVEDQAAQGAGGRKEDEGAQQLLTLQNQVARLEEENRDFLAALEDAMEQYKLQSDRLREQQEEMVELRLRLELVRPGWGGPRLLNGLPPGSFVPRPHTAPLGGAHAHVLGMVPPACLPGDEVGSEQRGEQVTNGREAGAELLTEVNRLGSGSSAASEEEEEEEEPPRRTLHLRRNRISNCSQRAGARPGSLPERKGPELCLEELDAAIPGSRAVGGSKARVQARQVPPATASEWRLAQAQQKIRELAINIRMKEELIGELVRTGKAAQALNRQHSQRIRELEQEAEQVRAELSEGQRQLRELEGKELQDAGERSRLQEFRRRVAAAQSQVQVLKEKKQATERLVSLSAQSEKRLQELERNVQLMRQQQGQLQRRLREETEQKRRLEAEMSKRQHRVKELELKHEQQQKILKIKTEEIAAFQRKRRSGSNGSVVSLEQQQKIEEQKKWLDQEMEKVLQQRRALEELGEELHKREAILAKKEALMQEKTGLESKRLRSSQALNEDIVRVSSRLEHLEKELSEKSGQLRQGSAQSQQQIRGEIDSLRQEKDSLLKQRLEIDGKLRQGSLLSPEEERTLFQLDEAIEALDAAIEYKNEAITCRQRVLRASASLLSQCEMNLMAKLSYLSSSETRALLCKYFDKVVTLREEQHQQQIAFSELEMQLEEQQRLVYWLEVALERQRLEMDRQLTLQQKEHEQNMQLLLQQSRDHLGEGLADSRRQYEARIQALEKELGRYMWINQELKQKLGGVNAVGHSRGGEKRSLCSEGRQAPGNEDELHLAPELLWLSPLTEGAPRTREETRDLVHAPLPLTWKRSSLCGEEQGSPEELRQREAAEPLVGRVLPVGEAGLPWNFGPLSKPRRELRRASPGMIDVRKNPL

SEQ ID NO: 44345 - protein, 147 aa, Homo sapiens
  Payload ID: 9046
  Gene Symbol: KIF7
  Gene Name: kinesin family member 7
  ENSP ID: ENSP00000395906
MGLEAQRLPGAEEAPVRVALRVRPLLPKELLHGHQSCLQVEPGLGRVTLGRDRHFGFHVVLAEDAGQEAVYQACVQPLLEAFFEGFNATVFAYGQTGSGKTYTMGEASVEHHPPALAGAYELPGLGAMGRVQLKWQEALRCLPSLPP

SEQ ID NO: 44346 - protein, 790 aa, Homo sapiens
  Payload ID: 9047
  Gene Symbol: KIF9
  Gene Name: kinesin family member 9
  Uniprot ID: Q9HAQ2
  ENSP ID: ENSP00000265529
MGTRKKVHAFVRVKPTDDFAHEMIRYGDDKRSIDIHLKKDIRRGVVNNQQTDWSFKLDGVLHDASQDLVYETVAKDVVSQALDGYNGTIMCYGQTGAGKTYTMMGATENYKHRGILPRALQQVFRMIEERPTHAITVRVSYLEIYNESLFDLLSTLPYVGPSVTPMTIVENPQGVFIKGLSVHLTSQEEDAFSLLFEGETNRIIASHTMNKNSSRSHCIFTIYLEAHSRTLSEEKYITSKINLVDLAGSERLGKSGSEGQVLKEATYINKSLSFLEQAIIALGDQKRDHIPFRQCKLTHALKDSLGGNCNMVLVTNIYGEAAQLEETLSSLRFASRMKLVTTEPAINEKYDAERMVKNLEKELALLKQELAIHDSLTNRTFVTYDPMDEIQIAEINSQVRRYLEGTLDEIDIISLRQIKEVFNQFRVVLSQQEQEVESTLRRKYTLIDRNDFAAISAIQKAGLVDVDGHLVGEPEGQNFGLGVAPFSTKPGKKAKSKKTFKEPLSSLARKEGASSPVNGKDLDYVSTSKTQLVPSSKDGDVKDMLSRDRETSSIEPLPSDSPKEELRPIRPDTPPSKPVAFEEFKNEQGSEINRIFKENKSILNERRKRASETTQHINAIKREIDVTKEALNFQKSLREKQGKYENKGLMIIDEEEFLLILKLKDLKKQYRSEYQDLRDLRAEIQYCQHLVDQCRHRLLMEFDIWYNESFVIPEDMQMALKPGGSIRPGMVPVNRIVSLGEDDQDKFSQLQQRVLPEGPDSISFYNAKVKIEQKHNYLKTMMGLQQAHRK

SEQ ID NO: 44347 - protein, 790 aa, Homo sapiens; identical to SEQ ID NO: 44346
  Payload ID: 9047
  Gene Symbol: KIF9
  Gene Name: kinesin family member 9
  Uniprot ID: Q9HAQ2
  ENSP ID: ENSP00000333942

SEQ ID NO: 44348 - protein, 159 aa, Homo sapiens
  Payload ID: 9047
  Gene Symbol: KIF9
  Gene Name: kinesin family member 9
  ENSP ID: ENSP00000387959
MGTRKKVHAFVRVKPTDDFAHEMIRYGDDKRSIDIHLKKDIRRGVVNNQQTDWSFKLDGVLHDASQDLVYETVAKDVVSQALDGYNGTIMCYGQTGAGKTYTMMGATENYKHRGILPRALQQGETNRIIASHTMNKNSSRSHCIFTIYLEAHSRTLSEE

SEQ ID NO: 44349 - protein, 91 aa, Homo sapiens
  Payload ID: 9047
  Gene Symbol: KIF9
  Gene Name: kinesin family member 9
  ENSP ID: ENSP00000391099
MGTRKKVHAFVRVKPTDDFAHEMIRYGDDKRSIDIHLKKDIRRGVVNNQQTDWSFKLDGVLHDASQDLVYETVAKDVVSQALDGYNGNLIN

SEQ ID NO: 44350 - protein, 790 aa, Homo sapiens; identical to SEQ ID NO: 44346
  Payload ID: 9047
  Gene Symbol: KIF9
  Gene Name: kinesin family member 9
  Uniprot ID: Q9HAQ2
  ENSP ID: ENSP00000391100

SEQ ID NO: 44351 - protein, 333 aa, Homo sapiens
  Payload ID: 9047
  Gene Symbol: KIF9
  Gene Name: kinesin family member 9
  ENSP ID: ENSP00000405774
MGTRKKVHAFVRVKPTDDFAHEMIRYGDDKRSIDIHLKKDIRRGVVNNQQTDWSFKLDGVLHDASQDLVYETVAKDVVSQALDGYNGTIMCYGQTGAGKTYTMMGATENYKHRGILPRALQQVFRMIEERPTHAITVRVSYLEIYNESLFDLLSTLPYVGPSVTPMTIVENPQGVFIKGLSVHLTSQEEDAFSLLFEGETNRIIASHTMNKNSSRSHCIFTIYLEAHSRTLSEEKYITSKINLVDLAGSERLGKSGSEGQVLKEATYINKSLSFLEQAIIALGDQKRDHIPFRQCKLTHALKDSLGGNCNMVLVTNIYGEAAQLEETGSRLWL

SEQ ID NO: 44352 - protein, 105 aa, Homo sapiens
  Payload ID: 9047
  Gene Symbol: KIF9
  Gene Name: kinesin family member 9
  ENSP ID: ENSP00000406603
MKRRKNGNKQYFTRMGTRKKVHAFVRVKPTDDFAHEMIRYGDDKRSIDIHLKKDIRRGVVNNQQTDWSFKLDGVLHDASQDLVYETVAKDVVSQALDGYNGNLIN

SEQ ID NO: 44353 - protein, 91 aa, Homo sapiens; identical to SEQ ID NO: 44349
  Payload ID: 9047
  Gene Symbol: KIF9
  Gene Name: kinesin family member 9
  ENSP ID: ENSP00000406815

SEQ ID NO: 44354 - protein, 725 aa, Homo sapiens
  Payload ID: 9047
  Gene Symbol: KIF9
  Gene Name: kinesin family member 9
  Uniprot ID: Q9HAQ2
  ENSP ID: ENSP00000414987
MGTRKKVHAFVRVKPTDDFAHEMIRYGDDKRSIDIHLKKDIRRGVVNNQQTDWSFKLDGVLHDASQDLVYETVAKDVVSQALDGYNGTIMCYGQTGAGKTYTMMGATENYKHRGILPRALQQVFRMIEERPTHAITVRVSYLEIYNESLFDLLSTLPYVGPSVTPMTIVENPQGVFIKGLSVHLTSQEEDAFSLLFEGETNRIIASHTMNKNSSRSHCIFTIYLEAHSRTLSEEKYITSKINLVDLAGSERLGKSGSEGQVLKEATYINKSLSFLEQAIIALGDQKRDHIPFRQCKLTHALKDSLGGNCNMVLVTNIYGEAAQLEETLSSLRFASRMKLVTTEPAINEKYDAERMVKNLEKELALLKQELAIHDSLTNRTFVTYDPMDEIQIAEINSQVRRYLEGTLDEIDIISLRQIKEVFNQFRVVLSQQEQEVESTLRRKYTLIDRNDFAAISAIQKAGLVDVDGHLVGEPEGQNFGLGVAPFSTKPGKKAKSKKTFKEPLRPDTPPSKPVAFEEFKNEQGSEINRIFKENKSILNERRKRASETTQHINAIKREIDVTKEALNFQKSLREKQGKYENKGLMIIDEEEFLLILKLKDLKKQYRSEYQDLRDLRAEIQYCQHLVDQCRHRLLMEFDIWYNESFVIPEDMQMALKPGGSIRPGMVPVNRIVSLGEDDQDKFSQLQQRVLPEGPDSISFYNAKVKIEQKHNYLKTMMGLQQAHRK

SEQ ID NO: 44355 - protein, 673 aa, Homo sapiens
  Payload ID: 9048
  Gene Symbol: KIFC1
  Gene Name: kinesin family member C1
  Uniprot ID: Q9BW19
  ENSP ID: ENSP00000363647
MDPQRSPLLEVKGNIELKRPLIKAPSQLPLSGSRLKRRPDQMEDGLEPEKKRTRGLGATTKITTSHPRVPSLTTVPQTQGQTTAQKVSKKTGPRCSTAIATGLKNQKPVPAVPVQKSGTSGVPPMAGGKKPSKRPAWDLKGQLCDLNAELKRCRERTQTLDQENQQLQDQLRDAQQQVKALGTERTTLEGHLAKVQAQAEQGQQELKNLRACVLELEERLSTQEGLVQELQKKQVELQEERRGLMSQLEEKERRLQTSEAALSSSQAEVASLRQETVAQAALLTEREERLHGLEMERRRLHNQLQELKGNIRVFCRVRPVLPGEPTPPPGLLLFPSGPGGPSDPPTRLSLSRSDERRGTLSGAPAPPTRHDFSFDRVFPPGSGQDEVFEEIAMLVQSALDGYPVCIFAYGQTGSGKTFTMEGGPGGDPQLEGLIPRALRHLFSVAQELSGQGWTYSFVASYVEIYNETVRDLLATGTRKGQGGECEIRRAGPGSEELTVTNARYVPVSCEKEVDALLHLARQNRAVARTAQNERSSRSHSVFQLQISGEHSSRGLQCGAPLSLVDLAGSERLDPGLALGPGERERLRETQAINSSLSTLGLVIMALSNKESHVPYRNSKLTYLLQNSLGGSAKMLMFVNISPLEENVSESLNSLRFASKVNQCVIGTAQANRK

SEQ ID NO: 44356 - protein, 673 aa, Homo sapiens; identical to SEQ ID NO: 44355
  Payload ID: 9048
  Gene Symbol: KIFC1
  Gene Name: kinesin family member C1
  Uniprot ID: Q9BW19
  ENSP ID: ENSP00000393963

SEQ ID NO: 44357 - protein, 203 aa, Homo sapiens
  Payload ID: 9048
  Gene Symbol: KIFC1
  Gene Name: kinesin family member C1
  ENSP ID: ENSP00000400323
MDPQRSPLLEVKGNIELKRPLIKAPSQLPLSGSRLKRRPDQMEDGLEPEKKRTRGLGATTKITTSHPRVPSLTTVPQTQGQTTGPSSHPLPWQCHHQPFLVTDPGGRSWGPGQKWHRLHLWCTSAQKVSKKTGPRCSTAIATGLKNQKPVPAVPVQKSGTSGVPPMAGGKKPSKRPAWDLKGQLCDLNAELKRCRERTQTLDQ

SEQ ID NO: 44358 - protein, 673 aa, Homo sapiens; identical to SEQ ID NO: 44355
  Payload ID: 9048
  Gene Symbol: KIFC1
  Gene Name: kinesin family member C1
  Uniprot ID: Q9BW19
  ENSP ID: ENSP00000407885

SEQ ID NO: 44359 - protein, 203 aa, Homo sapiens
  Payload ID: 9048
  Gene Symbol: KIFC1
  Gene Name: kinesin family member C1
  ENSP ID: ENSP00000409539
MDPQRSPLLEVKGNIELKRPLIKAPSQLPLSGSRLKRRPDQMEDGLEPEKKRTRGLGATTKITTSHPRVPSLTTVPQTQGQTTGPSSHPLPWQCHHQPFLETDPGGRSWGPGQKWHRLHLWCTSAQKVSKKTGPRCSTAIATGLKNQKPVPAVPVQKSGTSGVPPMAGGKKPSKRPAWDLKGQLCDLNAELKRCRERTQTLDQ

SEQ ID NO: 44360 - protein, 203 aa, Homo sapiens; identical to SEQ ID NO: 44359
  Payload ID: 9048
  Gene Symbol: KIFC1
  Gene Name: kinesin family member C1
  ENSP ID: ENSP00000415907

SEQ ID NO: 44361 - protein, 154 aa, Homo sapiens
  Payload ID: 9048
  Gene Symbol: KIFC1
  Gene Name: kinesin family member C1
  ENSP ID: ENSP00000484508
  MOD_RES (1)..(1): Any amino acid
XQNRAVARTAQNERSSRSHSVFQLQISGEHSSRGLQCGAPLSLVDLAGSERLDPGLALGPGERERLRETQAINSSLSTLGLVIMALSNKESHVPYRNSKLTYLLQNSLGGSAKMLMFVNISPLEENVSESLNSLRFASKVRLPPVSLVRTRGWL

SEQ ID NO: 44362 - protein, 838 aa, Homo sapiens
  Payload ID: 9049
  Gene Symbol: KIFC2
  Gene Name: kinesin family member C2
  Uniprot ID: Q96AC6
  ENSP ID: ENSP00000301332
MYAFYSLLIYIFYSLFRRDGGAAAAAEPGDPAQRARKPRGRRRPDLPAPELWTELTGLAASSEPEDGSEGAAEGRAAAVSLEEALLRLAEFLSVQLGAEESCGGPADLGQSGEVPSLLTVTSQLLALLAWLRSPRGRQALLQGTQPAPRVRPPSPDGSTSQEESPSHFTAVPGEPLGDETQGQQPLQLEEDQRAWQRLEQLILGQLEELKQQLEQQEEELGRLRLGVGATDSEKRVQHLTLENEALKQSLSLMRDLLLHWGPGPPIRAPQEEAEALLELQGRLQEAQDTTEALRAQLGVQEVQLQGLQGALQQLQQETEQNCRRELQQMHGQLAGLRARMASLRQGCGDLRGLVSTFTQSCQGSLSEARGQVSWALGALSSGGPGTQLPEGQQGPPAGCPGRLPELKGNIRVLCRLRPGTSSSLVSVEPGPGGTVTTCYRGRHRRFRLDWVFPPDASQEEVFRELEPAVLSCLRGYSVCIFTYGQTGTGKTYSMEGPPEDPGIVPRALQSLFREMGAGRQHRVTLSMVEIYNEAVRDLLAPGPPERLAVRQGPEGQGGIQVAGLTHWDVPNLETLHQMLKLGRSNRATAATAMNQRSSRSHALVTLTLRAASPPRAPGTAGTLHLVDLAGSERARKAGAAGPPRGDPDGARRLREAQTINRSLLALGGVMAALRAHRPHVPFRDSQLTRLLQPALGPGTTAVLLLQVGAGAGQVCACRSPPTRARPPAPLARRSPRGRRISGRQSAPSSSPTEWVKWSWGQPGAAGSRAPPGRLLPSAPTLRSPGPPAPLRRPLAVLHAPVPTTARARLSRPQRACPSSPGSRPCPWGLRPGLCWQRR

SEQ ID NO: 44363 - protein, 833 aa, Homo sapiens
  Payload ID: 9050
  Gene Symbol: KIFC3
  Gene Name: kinesin family member C3
  Uniprot ID: Q9BVG8
  ENSP ID: ENSP00000368976
MVPSRRTWNLGATPSLRGLWRVGRAPEPEPGMARPAPAPASPAARPFPHTGPGRLRTGRGKDTPVCGDEDSSARSAARPALAQCRALSVDWAGPGSPHGLYLTLQVEHLKEKLISQAQEVSRLRSELGGTDLEKHRDLLMVENERLRQEMRRCEAELQELRTKPAGPCPGCEHSQESAQLRDKLSQLQLEMAESKGMLSELNLEVQQKTDRLAEVELRLKDCLAEKAQEEERLSRRLRDSHETIASLRAQSPPVKYVIKTVEVESSKTKQALSESQARNQHLQEQVAMQRQVLKEMEQQLQSSHQLTARLRAQIAMYESELERAHGQMLEEMQSLEEDKNRAIEEAFARAQVEMKAVHENLAGVRTNLLTLQPALRTLTNDYNGLKRQVRGFPLLLQEALRSVKAEIGQAIEEVNSNNQELLRKYRRELQLRKKCHNELVRLKGNIRVIARVRPVTKEDGEGPEATNAVTFDADDDSIIHLLHKGKPVSFELDKVFSPQASQQDVFQEVQALVTSCIDGFNVCIFAYGQTGAGKTYTMEGTAENPGINQRALQLLFSEVQEKASDWEYTITVSAAEIYNEVLRDLLGKEPQEKLEIRLCPDGSGQLYVPGLTEFQVQSVDDINKVFEFGHTNRTTEFTNLNEHSSRSHALLIVTVRGVDCSTGLRTTGKLNLVDLAGSERVGKSGAEGSRLREAQHINKSLSALGDVIAALRSRQGHVPFRNSKLTYLLQDSLSGDSKTLMVVQVSPVEKNTSETLYSLKFAERVRSVELGPGLRRAELGSWSSQEHLEWEPACQTPQPSARAHSAPSSGTSSRPGSIRRKLQPSGKSRPLPV

SEQ ID NO: 44364 - protein, 687 aa, Homo sapiens
  Payload ID: 9050
  Gene Symbol: KIFC3
  Gene Name: kinesin family member C3
  Uniprot ID: Q9BVG8
  ENSP ID: ENSP00000396399
MVENERLRQEMRRCEAELQELRTKPAGPCPGCEHSQESAQLRDKLSQLQLEMAESKGMLSELNLEVQQKTDRLAEVELRLKDCLAEKAQEEERLSRRLRDSHETIASLRAQSPPVKYVIKTVEVESSKTKQALSESQARNQHLQEQVAMQRQVLKEMEQQLQSSHQLTARLRAQIAMYESELERAHGQMLEEMQSLEEDKNRAIEEAFARAQVEMKAVHENLAGVRTNLLTLQPALRTLTNDYNGLKRQVRGFPLLLQEALRSVKAEIGQAIEEVNSNNQELLRKYRRELQLRKKCHNELVRLKGNIRVIARVRPVTKEDGEGPEATNAVTFDADDDSIIHLLHKGKPVSFELDKVFSPQASQQDVFQEVQALVTSCIDGFNVCIFAYGQTGAGKTYTMEGTAENPGINQRALQLLFSEVQEKASDWEYTITVSAAEIYNEVLRDLLGKEPQEKLEIRLCPDGSGQLYVPGLTEFQVQSVDDINKVFEFGHTNRTTEFTNLNEHSSRSHALLIVTVRGVDCSTGLRTTGKLNLVDLAGSERVGKSGAEGSRLREAQHINKSLSALGDVIAALRSRQGHVPFRNSKLTYLLQDSLSGDSKTLMVVQVSPVEKNTSETLYSLKFAERVRSVELGPGLRRAELGSWSSQEHLEWEPACQTPQPSARAHSAPSSGTSSRPGSIRRKLQPSA

SEQ ID NO: 44365 - protein, 826 aa, Homo sapiens
  Payload ID: 9050
  Gene Symbol: KIFC3
  Gene Name: kinesin family member C3
  Uniprot ID: Q9BVG8
  ENSP ID: ENSP00000401696
MVPSRRTWNLGATPSLRGLWRVGRAPEPEPGMARPAPAPASPAARPFPHTGPGRLRTGRGKDTPVCGDEDSSARSAARPALAQCRALSVDWAGPGSPHGLYLTLQVEHLKEKLISQAQEVSRLRSELGGTDLEKHRDLLMVENERLRQEMRRCEAELQELRTKPAGPCPGCEHSQESAQLRDKLSQLQLEMAESKGMLSELNLEVQQKTDRLAEVELRLKDCLAEKAQEEERLSRRLRDSHETIASLRAQSPPVKYVIKTVEVESSKTKQALSESQARNQHLQEQVAMQRQVLKEMEQQLQSSHQLTARLRAQIAMYESELERAHGQMLEEMQSLEEDKNRAIEEAFARAQVEMKAVHENLAGVRTNLLTLQPALRTLTNDYNGLKRQVRGFPLLLQEALRSVKAEIGQAIEEVNSNNQELLRKYRRELQLRKKCHNELVRLKGNIRVIARVRPVTKEDGEGPEATNAVTFDADDDSIIHLLHKGKPVSFELDKVFSPQASQQDVFQEVQALVTSCIDGFNVCIFAYGQTGAGKTYTMEGTAENPGINQRALQLLFSEVQEKASDWEYTITVSAAEIYNEVLRDLLGKEPQEKLEIRLCPDGSGQLYVPGLTEFQVQSVDDINKVFEFGHTNRTTEFTNLNEHSSRSHALLIVTVRGVDCSTGLRTTGKLNLVDLAGSERVGKSGAEGSRLREAQHINKSLSALGDVIAALRSRQGHVPFRNSKLTYLLQDSLSGDSKTLMVVQVSPVEKNTSETLYSLKFAERVRSVELGPGLRRAELGSWSSQEHLEWEPACQTPQPSARAHSAPSSGTSSRPGSIRRKLQPSA

SEQ ID NO: 44366 - protein, 724 aa, Homo sapiens
  Payload ID: 9050
  Gene Symbol: KIFC3
  Gene Name: kinesin family member C3
  ENSP ID: ENSP00000438805
MIKVEHLKEKLISQAQEVSRLRSELGGTDLEKHRDLLMVENERLRQEMRRCEAELQELRTKPAGPCPGCEHSQESAQLRDKLSQLQLEMAESKGMLSELNLEVQQKTDRLAEVELRLKDCLAEKAQEEERLSRRLRDSHETIASLRAQSPPVKYVIKTVEVESSKTKQALSESQARNQHLQEQVAMQRQVLKEMEQQLQSSHQLTARLRAQIAMYESELERAHGQMLEEMQSLEEDKNRAIEEAFARAQVEMKAVHENLAGVRTNLLTLQPALRTLTNDYNGLKRQVRGFPLLLQEALRSVKAEIGQAIEEVNSNNQELLRKYRRELQLRKKCHNELVRLKGNIRVIARVRPVTKEDGEGPEATNAVTFDADDDSIIHLLHKGKPVSFELDKVFSPQASQQDVFQEVQALVTSCIDGFNVCIFAYGQTGAGKTYTMEGTAENPGINQRALQLLFSEVQEKASDWEYTITVSAAEIYNEVLRDLLGKEPQEKLEIRLCPDGSGQLYVPGLTEFQVQSVDDINKVFEFGHTNRTTEFTNLNEHSSRSHALLIVTVRGVDCSTGLRTTGKLNLVDLAGSERVGKSGAEGSRLREAQHINKSLSALGDVIAALRSRQGHVPFRNSKLTYLLQDSLSGDSKTLMVVQVSPVEKNTSETLYSLKFAERVRSVELGPGLRRAELGSWSSQEHLEWEPACQTPQPSARAHSAPSSGTSSRPGSIRRKLQPSA

SEQ ID NO: 44367 - protein, 848 aa, Homo sapiens
  Payload ID: 9050
  Gene Symbol: KIFC3
  Gene Name: kinesin family member C3
  Uniprot ID: Q9BVG8
  ENSP ID: ENSP00000442008
MCASACKDTAAWCPEEAAEPQAMVPSRRTWNLGATPSLRGLWRVGRAPEPEPGMARPAPAPASPAARPFPHTGPGRLRTGRGKDTPVCGDEDSSARSAARPALAQCRALSVDWAGPGSPHGLYLTLQVEHLKEKLISQAQEVSRLRSELGGTDLEKHRDLLMVENERLRQEMRRCEAELQELRTKPAGPCPGCEHSQESAQLRDKLSQLQLEMAESKGMLSELNLEVQQKTDRLAEVELRLKDCLAEKAQEEERLSRRLRDSHETIASLRAQSPPVKYVIKTVEVESSKTKQALSESQARNQHLQEQVAMQRQVLKEMEQQLQSSHQLTARLRAQIAMYESELERAHGQMLEEMQSLEEDKNRAIEEAFARAQVEMKAVHENLAGVRTNLLTLQPALRTLTNDYNGLKRQVRGFPLLLQEALRSVKAEIGQAIEEVNSNNQELLRKYRRELQLRKKCHNELVRLKGNIRVIARVRPVTKEDGEGPEATNAVTFDADDDSIIHLLHKGKPVSFELDKVFSPQASQQDVFQEVQALVTSCIDGFNVCIFAYGQTGAGKTYTMEGTAENPGINQRALQLLFSEVQEKASDWEYTITVSAAEIYNEVLRDLLGKEPQEKLEIRLCPDGSGQLYVPGLTEFQVQSVDDINKVFEFGHTNRTTEFTNLNEHSSRSHALLIVTVRGVDCSTGLRTTGKLNLVDLAGSERVGKSGAEGSRLREAQHINKSLSALGDVIAALRSRQGHVPFRNSKLTYLLQDSLSGDSKTLMVVQVSPVEKNTSETLYSLKFAERVRSVELGPGLRRAELGSWSSQEHLEWEPACQTPQPSARAHSAPSSGTSSRPGSIRRKLQPSA

SEQ ID NO: 44368 - protein, 684 aa, Homo sapiens
  Payload ID: 9050
  Gene Symbol: KIFC3
  Gene Name: kinesin family member C3
  ENSP ID: ENSP00000444012
MVENERLRQEMRRCEAELQELRTKPAGPCPGCEHSQESAQLRDKLSQLQLEMAESKGMLSELNLEVQQKTDRLAEVELRLKDCLAEKAQEEERLSRRLRDSHETIASLRAQSPPVKYVIKTVEVESSKTKQALSESQARNQHLQEQVAMQRQVLKEMEQQLQSSHQLTARLRAQIAMYESELERAHGQMLEEMQSLEEDKNRAIEEAFARAQVEMKAVHENLAGVRTNLLTLQPALRTLTNDYNGLKRQVRGFPLLLQEALRSVKAEIGQAIEEVNSNNQELLRKYRRELQLRKKCHNELVRLKGNIRVIARVRPVTKEDGEGPEATNAVTFDADDDSIIHLLHKGKPVSFELDKVFSPQASQQDEVQALVTSCIDGFNVCIFAYGQTGAGKTYTMEGTAENPGINQRALQLLFSEVQEKASDWEYTITVSAAEIYNEVLRDLLGKEPQEKLEIRLCPDGSGQLYVPGLTEFQVQSVDDINKVFEFGHTNRTTEFTNLNEHSSRSHALLIVTVRGVDCSTGLRTTGKLNLVDLAGSERVGKSGAEGSRLREAQHINKSLSALGDVIAALRSRQGHVPFRNSKLTYLLQDSLSGDSKTLMVVQVSPVEKNTSETLYSLKFAERVRSVELGPGLRRAELGSWSSQEHLEWEPACQTPQPSARAHSAPSSGTSSRPGSIRRKLQPSA

SEQ ID NO: 44369 - protein, 59 aa, Homo sapiens
  Payload ID: 9050
  Gene Symbol: KIFC3
  Gene Name: kinesin family member C3
  ENSP ID: ENSP00000454403
MVENERLRQEMRRCEAELQELRTKPAGPCPGCEHSQESAQLRDKLSQLQLEMAESKGML

SEQ ID NO: 44370 - protein, 167 aa, Homo sapiens
  Payload ID: 9050
  Gene Symbol: KIFC3
  Gene Name: kinesin family member C3
  ENSP ID: ENSP00000454493
MVLRMVEAMSQLQDEKTQLQEELVVLQERLALRDSDQQATSTQLQNQVEHLKEKLISQAQEVSRLRSELGGTDLEKHRDLLMVENERLRQEMRRCEAELQELRTKPAGPCPGCEHSQESAQLRDKLSQLQLEMAESKGMLSELNLEVQQKTDRLAEVELRLKDCLAE

SEQ ID NO: 44371 - protein, 70 aa, Homo sapiens
  Payload ID: 9050
  Gene Symbol: KIFC3
  Gene Name: kinesin family member C3
  ENSP ID: ENSP00000454501
MVENERLRQEMRRCEAELQELRTKPAGPCPGCEHSQESAQLRDKLSQLQLEMAESKGMLSELNLEVQQKT

SEQ ID NO: 44372 - protein, 88 aa, Homo sapiens
  Payload ID: 9050
  Gene Symbol: KIFC3
  Gene Name: kinesin family member C3
  ENSP ID: ENSP00000454615
MVLRMVEAMSQLQDEKTQLQEELVVLQERLALRDSDQQATSTQLQNQVEHLKEKLISQAQEVSRLRSELGGTDLEKHRDLLMVENERL

SEQ ID NO: 44373 - protein, 5 aa, Homo sapiens
  Payload ID: 9050
  Gene Symbol: KIFC3
  Gene Name: kinesin family member C3
  ENSP ID: ENSP00000454632
MVENE

SEQ ID NO: 44374 - protein, 687 aa, Homo sapiens; identical to SEQ ID NO: 44364
  Payload ID: 9050
  Gene Symbol: KIFC3
  Gene Name: kinesin family member C3
  Uniprot ID: Q9BVG8
  ENSP ID: ENSP00000454659

SEQ ID NO: 44375 - protein, 105 aa, Homo sapiens
  Payload ID: 9050
  Gene Symbol: KIFC3
  Gene Name: kinesin family member C3
  ENSP ID: ENSP00000455067
MVPSRRTWNLGATPSLRGLWRVGRAPEPEPGMARPAPAPASPAARPFPHTGPGRLRTGRGKDTPVCGDEDSSARSAARPALAQCRALSVDWAGPGSPHGLYLTLQ

SEQ ID NO: 44376 - protein, 132 aa, Homo sapiens
  Payload ID: 9050
  Gene Symbol: KIFC3
  Gene Name: kinesin family member C3
  ENSP ID: ENSP00000455276
MVPSRRTWNLGATPSLRGLWRVGRAPEPEPGMARPAPAPASPAARPFPHTGPGRLRTGRGKDTPVCGDEDSSARSAARPALAQCRALSVDWAGPGSPHGLYLTLQVEHLKEKLISQAQEVSRLRSELGGTDL

SEQ ID NO: 44377 - protein, 687 aa, Homo sapiens; identical to SEQ ID NO: 44364
  Payload ID: 9050
  Gene Symbol: KIFC3
  Gene Name: kinesin family member C3
  Uniprot ID: Q9BVG8
  ENSP ID: ENSP00000456239

SEQ ID NO: 44378 - protein, 154 aa, Homo sapiens
  Payload ID: 9050
  Gene Symbol: KIFC3
  Gene Name: kinesin family member C3
  ENSP ID: ENSP00000456354
MAQMEFLFRKNTLTAAWKPRHQETLRLEAGVPEQCKAAWCPEEAAEPQAMVPSRRTWNLGATPSLRGLWRVGRAPEPEPGMARPAPAPASPAARPFPHTGPGRLRTGRGKDTPVCGDEDSSARSAARPALAQCRALSVDWAGPGSPHGLYLTLQ

SEQ ID NO: 44379 - protein, 5 aa, Homo sapiens
  Payload ID: 9050
  Gene Symbol: KIFC3
  Gene Name: kinesin family member C3
  ENSP ID: ENSP00000456402
MVENE

SEQ ID NO: 44380 - protein, 190 aa, Homo sapiens
  Payload ID: 9050
  Gene Symbol: KIFC3
  Gene Name: kinesin family member C3
  ENSP ID: ENSP00000456780
MLPLFGRQRTEWLLQAAWCPEEAAEPQAMVPSRRTWNLGATPSLRGLWRVGRAPEPEPGMARPAPAPASPAARPFPHTGPGRLRTGRGKDTPVCGDEDSSARSAARPALAQCRALSVDWAGPGSPHGLYLTLQVEHLKEKLISQAQEVSRLRSELGGTDLEKHRDLLMVENERLRQEMRRCEAELQELRT

SEQ ID NO: 44381 - protein, 165 aa, Homo sapiens
  Payload ID: 9050
  Gene Symbol: KIFC3
  Gene Name: kinesin family member C3
  ENSP ID: ENSP00000457144
MCASACKDTAAWCPEEAAEPQAMVPSRRTWNLGATPSLRGLWRVGRAPEPEPGMARPAPAPASPAARPFPHTGPGRLRTGRGKDTPVCGDEDSSARSAARPALAQCRALSVDWAGPGSPHGLYLTLQQALQDKGCKSQSQGTKEEKLWKRQAPAPRRAREAREAG

SEQ ID NO: 44382 - protein, 280 aa, Homo sapiens
  Payload ID: 9050
  Gene Symbol: KIFC3
  Gene Name: kinesin family member C3
  ENSP ID: ENSP00000457232
MEGTAENPGINQRALQLLFSEVQEKASDWEYTITVSAAEIYNEVLRDLLGKEPQEKLEIRLCPDGSGQLYVPGLTEFQVQSVDDINKVFEFGHTNRTTEFTNLNEHSSRSHALLIVTVRGVDCSTGLRTTGKLNLVDLAGSERVGKSGAEGSRLREAQHINKSLSALGDVIAALRSRQGHVPFRNSKLTYLLQDSLSGDSKTLMVVQVSPVEKNTSETLYSLKFAERVRSVELGPGLRRAELGSWSSQEHLEWEPACQTPQPSARAHSAPSSGTSSRPGS

SEQ ID NO: 44383 - protein, 60 aa, Homo sapiens
  Payload ID: 9050
  Gene Symbol: KIFC3
  Gene Name: kinesin family member C3
  ENSP ID: ENSP00000457247
MVENERLRQEMRRCEAELQELRTKPAGPCPGCEHSQESAQLRDKLSQLQLEMAESKGMLS

SEQ ID NO: 44384 - protein, 147 aa, Homo sapiens
  Payload ID: 9050
  Gene Symbol: KIFC3
  Gene Name: kinesin family member C3
  ENSP ID: ENSP00000457326
MVENERLRQEMRRCEAELQELRTKPAGPCPGCEHSQESAQLRDKLSQLQLEMAESKGMLSELNLEVQQKTDRLAEVELRLKDCLAEKAQEEERLSRRLRDSHETIASLRAQSPPVKYVIKTVEVESSKTKQALSESQARNQHLQEQV

SEQ ID NO: 44385 - protein, 196 aa, Homo sapiens
  Payload ID: 9050
  Gene Symbol: KIFC3
  Gene Name: kinesin family member C3
  ENSP ID: ENSP00000457568
  MOD_RES (1)..(1): Any amino acid
XLVDLAGSERVGKSGAEGSRLREAQHINKSLSALGDVIAALRSRQGHVPFRNSKLTYLLQDSLSGDSKTLMVVQGSRGHCLCDGCDPAGPEAGPSLACPCCSARTPGGRGESGGSSSAPSPLKDEKHVQKETVSLGCGSECKLHGRKGGGGCSSWQAWAISELGPVRRAGVWRRVGLSPRLSRPLSSACRAGQPPP

SEQ ID NO: 44386 - protein, 104 aa, Homo sapiens
  Payload ID: 9050
  Gene Symbol: KIFC3
  Gene Name: kinesin family member C3
  ENSP ID: ENSP00000457948
MIKVEHLKEKLISQAQEVSRLRSELHRDLLMVENERLRQEMRRCEAELQELRTKPAGPCPGCEHSQESAQLRDKLSQLQLEMAESKGMLSELNLEVQQKTDRLA

SEQ ID NO: 44387 - protein, 498 aa, Homo sapiens
  Payload ID: 9050
  Gene Symbol: KIFC3
  Gene Name: kinesin family member C3
  ENSP ID: ENSP00000458009
MVENERLRQEMRRCEAELQELRTKPAGPCPGCEHSQESAQLRDKLSQLQLEMAESKGMLSELNLEVQQKTDRLAEVELRLKDCLAEKAQEEERLSRRLRDSHETIASLRAQSPPVKYVIKTVEVESSKTKQALSESQARNQHLQEQVAMQRQVLKEMEQQLQSSHQLTARLRAQIAMYESELERAHGQMLEEMQSLEEDKNRAIEEAFARAQVEMKAVHENLAGVRTNLLTLQPALRTLTNDYNGLKRQVRGFPLLLQEALRSVKAEIGQAIEEVNSNNQELLRKYRRELQLRKKCHNELVRLKGNIRVIARVRPVTKEDGEGPEATNAVTFDADDDSIIHLLHKGKPVSFELDKVFSPQASQQDVFQEVQALVTSCIDGFNVCIFAYGQTGAGKTYTMEGTAENPGINQRALQLLFSEVQEKASDWEYTITVSAAEIYNEVLRDLLGKEPQEKLEIRLCPDGSGQLYVPGLTEFQVQSVDDINKVWRREPLTTATLL

SEQ ID NO: 44388 - protein, 686 aa, Homo sapiens
  Payload ID: 9051
  Gene Symbol: KIF2A
  Gene Name: kinesin heavy chain member 2A
  Uniprot ID: O00139
  ENSP ID: ENSP00000370493
MGRIHQAMVTSLNEDNESVTVEWIENGDTKGKEIDLESIFSLNPDLVPDEEIEPSPETPPPPASSAKVNKIVKNRRTVASIKNDPPSRDNRVVGSARARPSQFPEQSSSAQQNGSVSDISPVQAAKKEFGPPSRRKSNCVKEVEKLQEKREKRRLQQQELREKRAQDVDATNPNYEIMCMIRDFRGSLDYRPLTTADPIDEHRICVCVRKRPLNKKETQMKDLDVITIPSKDVVMVHEPKQKVDLTRYLENQTFRFDYAFDDSAPNEMVYRFTARPLVETIFERGMATCFAYGQTGSGKTHTMGGDFSGKNQDCSKGIYALAARDVFLMLKKPNYKKLELQVYATFFEIYSGKVFDLLNRKTKLRVLEDGKQQVQVVGLQEREVKCVEDVLKLIDIGNSCRTSGQTSANAHSSRSHAVFQIILRRKGKLHGKFSLIDLAGNERGADTSSADRQTRLEGAEINKSLLALKECIRALGRNKPHTPFRASKLTQVLRDSFIGENSRTCMIATISPGMASCENTLNTLRYANRVKELTVDPTAAGDVRPIMHHPPNQIDDLETQWGVGSSPQRDDLKLLCEQNEEEVSPQLFTFHEAVSQMVEMEEQVVEDHRAVFQESIRWLEDEKALLEMTEEVDYDVDSYATQLEAILEQKIDILTELRDKVKSFRAALQEEEQASKQINPKRPRAL

SEQ ID NO: 44389 - protein, 744 aa, Homo sapiens
  Payload ID: 9051
  Gene Symbol: KIF2A
  Gene Name: kinesin heavy chain member 2A
  Uniprot ID: O00139
  ENSP ID: ENSP00000385000
MATANFGKIQIGIYVEIKRSDGRIHQAMVTSLNEDNESVTVEWIENGDTKGKEIDLESIFSLNPDLVPDEEIEPSPETPPPPASSAKVNKIVKNRRTVASIKNDPPSRDNRVVGSARARPSQFPEQSSSAQQNGSVSDISPVQAAKKEFGPPSRRKSNCVKEVEKLQEKREKRRLQQQELREKRAQDVDATNPNYEIMCMIRDFRGSLDYRPLTTADPIDEHRICVCVRKRPLNKKETQMKDLDVITIPSKDVVMVHEPKQKVDLTRYLENQTFRFDYAFDDSAPNEMVYRFTARPLVETIFERGMATCFAYGQTGSGKTHTMGGDFSGKNQDCSKGIYALAARDVFLMLKKPNYKKLELQVYATFFEIYSGKVFDLLNRKTKLRVLEDGKQQVQVVGLQEREVKCVEDVLKLIDIGNSCRTSGQTSANAHSSRSHAVFQIILRRKGKLHGKFSLIDLAGNERGADTSSADRQTRLEGAEINKSLLALKECIRALGRNKPHTPFRASKLTQVLRDSFIGENSRTCMIATISPGMASCENTLNTLRYANRVKEFGISPSDIPFSQGSGSRPDLSPSYEYDDFSPSVTRVKELTVDPTAAGDVRPIMHHPPNQIDDLETQWGVGSSPQRDDLKLLCEQNEEEVSPQLFTFHEAVSQMVEMEEQVVEDHRAVFQESIRWLEDEKALLEMTEEVDYDVDSYATQLEAILEQKIDILTELRDKVKSFRAALQEEEQASKQINPKRPRAL

SEQ ID NO: 44390 - protein, 706 aa, Homo sapiens
  Payload ID: 9051
  Gene Symbol: KIF2A
  Gene Name: kinesin heavy chain member 2A
  Uniprot ID: O00139
  ENSP ID: ENSP00000385622
MATANFGKIQIGIYVEIKRSDGRIHQAMVTSLNEDNESVTVEWIENGDTKGKEIDLESIFSLNPDLVPDEEIEPSPETPPPPASSAKVNKIVKNRRTVASIKNDPPSRDNRVVGSARARPSQFPEQSSSAQQNGSVSDISPVQAAKKEFGPPSRRKSNCVKEVEKLQEKREKRRLQQQELREKRAQDVDATNPNYEIMCMIRDFRGSLDYRPLTTADPIDEHRICVCVRKRPLNKKETQMKDLDVITIPSKDVVMVHEPKQKVDLTRYLENQTFRFDYAFDDSAPNEMVYRFTARPLVETIFERGMATCFAYGQTGSGKTHTMGGDFSGKNQDCSKGIYALAARDVFLMLKKPNYKKLELQVYATFFEIYSGKVFDLLNRKTKLRVLEDGKQQVQVVGLQEREVKCVEDVLKLIDIGNSCRTSGQTSANAHSSRSHAVFQIILRRKGKLHGKFSLIDLAGNERGADTSSADRQTRLEGAEINKSLLALKECIRALGRNKPHTPFRASKLTQVLRDSFIGENSRTCMIATISPGMASCENTLNTLRYANRVKELTVDPTAAGDVRPIMHHPPNQIDDLETQWGVGSSPQRDDLKLLCEQNEEEVSPQLFTFHEAVSQMVEMEEQVVEDHRAVFQESIRWLEDEKALLEMTEEVDYDVDSYATQLEAILEQKIDILTELRDKVKSFRAALQEEEQASKQINPKRPRAL

SEQ ID NO: 44391 - protein, 130 aa, Homo sapiens
  Payload ID: 9051
  Gene Symbol: KIF2A
  Gene Name: kinesin heavy chain member 2A
  ENSP ID: ENSP00000421041
GQTGSGKTHVFDLLNRKTKLRVLEDGKQQVQVVGLQEREVKCVEDVLKLIDIGNSCRVKELTVDPTAAGDVRPIMHHPPNQIDDLETQWGVGSSPQRDDLKLLCEQNEEEVSPQLFTFHEAVSQMVEMEE

SEQ ID NO: 44392 - protein, 284 aa, Homo sapiens
  Payload ID: 9051
  Gene Symbol: KIF2A
  Gene Name: kinesin heavy chain member 2A
  ENSP ID: ENSP00000423542
MATANFGKIQIGIYVEIKRSDGRIHQAMVTSLNEDNESVTVEWIENGDTKGKEIDLESIFSLNPDLVPDEEIEPSPETPPPPASSAKVNKIVKNRRTVASIKNDPPSRDNRVVGSARARPSQFPEQSSSAQQNARRKSNCVKEVEKLQEKREKRRLQQQELREKRAQDVDATNPNYEIMCMIRDFRGSLDYRPLTTADPIDEHRICVCVRKRPLNKKETQMKDLDVITIPSKDVVMVHEPKQKVDLTRYLENQTFRFDYAFDDSAPNEMVYRFTARPLVETIFE

SEQ ID NO: 44393 - protein, 660 aa, Homo sapiens
  Payload ID: 9051
  Gene Symbol: KIF2A
  Gene Name: kinesin heavy chain member 2A
  Uniprot ID: O00139
  ENSP ID: ENSP00000423772
MVTSLNEDNESVTVEWIENGDTKGKEIDLESIFSLNPDLVPDEEIEPSPETPPPPASSAKVNKIVKNRRTVASIKNDPPSRDNRVVGSARARPSQFPEQSSSAQQNARRKSNCVKEVEKLQEKREKRRLQQQELREKRAQDVDATNPNYEIMCMIRDFRGSLDYRPLTTADPIDEHRICVCVRKRPLNKKETQMKDLDVITIPSKDVVMVHEPKQKVDLTRYLENQTFRFDYAFDDSAPNEMVYRFTARPLVETIFERGMATCFAYGQTGSGKTHTMGGDFSGKNQDCSKGIYALAARDVFLMLKKPNYKKLELQVYATFFEIYSGKVFDLLNRKTKLRVLEDGKQQVQVVGLQEREVKCVEDVLKLIDIGNSCRTSGQTSANAHSSRSHAVFQIILRRKGKLHGKFSLIDLAGNERGADTSSADRQTRLEGAEINKSLLALKECIRALGRNKPHTPFRASKLTQVLRDSFIGENSRTCMIATISPGMASCENTLNTLRYANRVKELTVDPTAAGDVRPIMHHPPNQIDDLETQWGVGSSPQRDDLKLLCEQNEEEVSPQLFTFHEAVSQMVEMEEQVVEDHRAVFQESIRWLEDEKALLEMTEEVDYDVDSYATQLEAILEQKIDILTELRDKVKSFRAALQEEEQASKQINPKRPRAL

SEQ ID NO: 44394 - protein, 80 aa, Homo sapiens
  Payload ID: 9051
  Gene Symbol: KIF2A
  Gene Name: kinesin heavy chain member 2A
  ENSP ID: ENSP00000425411
MVTSLNEDNESVTVEWIENGDTKGKEIDLESIFSLNPDLVPDEEIEPSPETPPPPASSAKVNKIVKNRRTVASIKNDPPS

SEQ ID NO: 44395 - protein, 637 aa, Homo sapiens
  Payload ID: 9052
  Gene Symbol: KLC1
  Gene Name: kinesin light chain 1
  Uniprot ID: Q07866
  ENSP ID: ENSP00000246489
MYDNMSTMVYIKEDKLEKLTQDEIISKTKQVIQGLEALKNEHNSILQSLLETLKCLKKDDESNLVEEKSNMIRKSLEMLELGLSEAQVMMALSNHLNAVESEKQKLRAQVRRLCQENQWLRDELANTQQKLQKSEQSVAQLEEEKKHLEFMNQLKKYDDDISPSEDKDTDSTKEPLDDLFPNDEDDPGQGIQQQHSSAAAAAQQGGYEIPARLRTLHNLVIQYASQGRYEVAVPLCKQALEDLEKTSGHDHPDVATMLNILALVYRDQNKYKDAANLLNDALAIREKTLGKDHPAVAATLNNLAVLYGKRGKYKEAEPLCKRALEIREKVLGKDHPDVAKQLNNLALLCQNQGKYEEVEYYYQRALEIYQTKLGPDDPNVAKTKNNLASCYLKQGKFKQAETLYKEILTRAHEREFGSVDDENKPIWMHAEEREECKGKQKDGTSFGEYGGWYKACKVDSPTVTTTLKNLGALYRRQGKFEAAETLEEAAMRSRKQGLDNVHKQRVAEVLNDPENMEKRRSRESLNVDVVKYESGPDGGEEVSMSVEWNGDGTGSLKRSGSFSKLRASIRRSSEKLVRKLKGGSSRESEPKNPGMKRASSLNVLNVGGKAAEDRFQERNNCLADSRALSASHTDLAH

SEQ ID NO: 44396 - protein, 639 aa, Homo sapiens
  Payload ID: 9052
  Gene Symbol: KLC1
  Gene Name: kinesin light chain 1
  Uniprot ID: Q07866
  ENSP ID: ENSP00000334523
MYDNMSTMVYIKEDKLEKLTQDEIISKTKQVIQGLEALKNEHNSILQSLLETLKCLKKDDESNLVEEKSNMIRKSLEMLELGLSEAQVMMALSNHLNAVESEKQKLRAQVRRLCQENQWLRDELANTQQKLQKSEQSVAQLEEEKKHLEFMNQLKKYDDDISPSEDKDTDSTKEPLDDLFPNDEDDPGQGIQQQHSSAAAAAQQGGYEIPARLRTLHNLVIQYASQGRYEVAVPLCKQALEDLEKTSGHDHPDVATMLNILALVYRDQNKYKDAANLLNDALAIREKTLGKDHPAVAATLNNLAVLYGKRGKYKEAEPLCKRALEIREKVLGKDHPDVAKQLNNLALLCQNQGKYEEVEYYYQRALEIYQTKLGPDDPNVAKTKNNLASCYLKQGKFKQAETLYKEILTRAHEREFGSVDDENKPIWMHAEEREECKGKQKDGTSFGEYGGWYKACKVDSPTVTTTLKNLGALYRRQGKFEAAETLEEAAMRSRKQGLDNVHKQRVAEVLNDPENMEKRRSRESLNVDVVKYESGPDGGEEVSMSVEWNGDGTGSLKRSGSFSKLRASIRRSSEKLVRKLKGGSSRESEPKNPGMKRASSLNVLNVGGKAAEDRFQGVSGRASFCGKRQQQQWPGRRHR

SEQ ID NO: 44397 - protein, 628 aa, Homo sapiens
  Payload ID: 9052
  Gene Symbol: KLC1
  Gene Name: kinesin light chain 1
  Uniprot ID: Q07866
  ENSP ID: ENSP00000334618
MYDNMSTMVYIKEDKLEKLTQDEIISKTKQVIQGLEALKNEHNSILQSLLETLKCLKKDDESNLVEEKSNMIRKSLEMLELGLSEAQVMMALSNHLNAVESEKQKLRAQVRRLCQENQWLRDELANTQQKLQKSEQSVAQLEEEKKHLEFMNQLKKYDDDISPSEDKDTDSTKEPLDDLFPNDEDDPGQGIQQQHSSAAAAAQQGGYEIPARLRTLHNLVIQYASQGRYEVAVPLCKQALEDLEKTSGHDHPDVATMLNILALVYRDQNKYKDAANLLNDALAIREKTLGKDHPAVAATLNNLAVLYGKRGKYKEAEPLCKRALEIREKVLGKDHPDVAKQLNNLALLCQNQGKYEEVEYYYQRALEIYQTKLGPDDPNVAKTKNNLASCYLKQGKFKQAETLYKEILTRAHEREFGSVDDENKPIWMHAEEREECKGKQKDGTSFGEYGGWYKACKVDSPTVTTTLKNLGALYRRQGKFEAAETLEEAAMRSRKQGLDNVHKQRVAEVLNDPENMEKRRSRESLNVDVVKYESGPDGGEEDGTGSLKRSGSFSKLRASIRRSSEKLVRKLKGGSSRESEPKNPGMKRASSLNVLNVGGKAAEDRFQERNNCLADSRALSASHTDLAH

SEQ ID NO: 44398 - protein, 573 aa, Homo sapiens
  Payload ID: 9052
  Gene Symbol: KLC1
  Gene Name: kinesin light chain 1
  Uniprot ID: Q07866
  ENSP ID: ENSP00000341154
MYDNMSTMVYIKEDKLEKLTQDEIISKTKQVIQGLEALKNEHNSILQSLLETLKCLKKDDESNLVEEKSNMIRKSLEMLELGLSEAQVMMALSNHLNAVESEKQKLRAQVRRLCQENQWLRDELANTQQKLQKSEQSVAQLEEEKKHLEFMNQLKKYDDDISPSEDKDTDSTKEPLDDLFPNDEDDPGQGIQQQHSSAAAAAQQGGYEIPARLRTLHNLVIQYASQGRYEVAVPLCKQALEDLEKTSGHDHPDVATMLNILALVYRDQNKYKDAANLLNDALAIREKTLGKDHPAVAATLNNLAVLYGKRGKYKEAEPLCKRALEIREKVLGKDHPDVAKQLNNLALLCQNQGKYEEVEYYYQRALEIYQTKLGPDDPNVAKTKNNLASCYLKQGKFKQAETLYKEILTRAHEREFGSVDDENKPIWMHAEEREECKGKQKDGTSFGEYGGWYKACKVDSPTVTTTLKNLGALYRRQGKFEAAETLEEAAMRSRKQGLDNVHKQRVAEVLNDPENMEKRRSRESLNVDVVKYESGPDGGEEVSMSVEWNGGVSGRASFCGKRQQQQWPGRRHR

SEQ ID NO: 44399 - protein, 576 aa, Homo sapiens
  Payload ID: 9052
  Gene Symbol: KLC1
  Gene Name: kinesin light chain 1
  ENSP ID: ENSP00000369377
MYDNMSTMVYIKEDKLEKLTQDEIISKTKQVIQGLEALKNEHNSILQSLLETLKCLKKDDESNLVEEKSNMIRKSLEMLELGLSEAQVMMALSNHLNAVESEKQKLRAQVRRLCQENQWLRDELANTQQKLQKSEQSVAQLEEEKKHLEFMNQLKKYDDDISPSEDKDTDSTKEPLDDLFPNDEDDPGQGIQQQHSSAAAAAQQGGYEIPARLRTLHNLVIQYASQGRYEVAVPLCKQALEDLEKTSGHDHPDVATMLNILALVYRDQNKYKDAANLLNDALAIREKTLGKDHPAVAATLNNLAVLYGKRGKYKEAEPLCKRALEIREKVLGKDHPDVAKQLNNLALLCQNQGKYEEVEYYYQRALEIYQTKLGPDDPNVAKTKNNLASCYLKQGKFKQAETLYKEILTRAHEREFGSVDDENKPIWMHAEEREECKGKQKDGTSFGEYGGWYKACKVDSPTVTTTLKNLGALYRRQGKFEAAETLEEAAMRSRKQRSISEIPKKILSANGSNHFPLPGSQGLDNVHKQRVAEVLNDPENMEKRRSRESLNVDVVKYESGPDGGEEMRKMKLGLVN

SEQ ID NO: 44400 - protein, 560 aa, Homo sapiens
  Payload ID: 9052
  Gene Symbol: KLC1
  Gene Name: kinesin light chain 1
  Uniprot ID: Q07866
  ENSP ID: ENSP00000374394
MYDNMSTMVYIKEDKLEKLTQDEIISKTKQVIQGLEALKNEHNSILQSLLETLKCLKKDDESNLVEEKSNMIRKSLEMLELGLSEAQVMMALSNHLNAVESEKQKLRAQVRRLCQENQWLRDELANTQQKLQKSEQSVAQLEEEKKHLEFMNQLKKYDDDISPSEDKDTDSTKEPLDDLFPNDEDDPGQGIQQQHSSAAAAAQQGGYEIPARLRTLHNLVIQYASQGRYEVAVPLCKQALEDLEKTSGHDHPDVATMLNILALVYRDQNKYKDAANLLNDALAIREKTLGKDHPAVAATLNNLAVLYGKRGKYKEAEPLCKRALEIREKVLGKDHPDVAKQLNNLALLCQNQGKYEEVEYYYQRALEIYQTKLGPDDPNVAKTKNNLASCYLKQGKFKQAETLYKEILTRAHEREFGSVDDENKPIWMHAEEREECKGKQKDGTSFGEYGGWYKACKVDSPTVTTTLKNLGALYRRQGKFEAAETLEEAAMRSRKQGLDNVHKQRVAEVLNDPENMEKRRSRESLNVDVVKYESGPDGGEEVSMSVEWNGMRKMKLGLVN

SEQ ID NO: 44401 - protein, 549 aa, Homo sapiens
  Payload ID: 9052
  Gene Symbol: KLC1
  Gene Name: kinesin light chain 1
  ENSP ID: ENSP00000412693
MYDNMSTMVYIKEDKLEKLTQDEIISKTKQVIQGLEALKNEHNSILQSLLETLKCLKKDDESNLVEEKSNMIRKSLEMLELGLSEAQVMMALSNHLNAVESEKQKLRAQVRRLCQENQWLRDELANTQQKLQKSEQSVAQLEEEKKHLEFMNQLKKYDDDISPSEDKDTDSTKEPLDDLFPNDEDDPGQGIQQQHSSAAAAAQQGGYEIPARLRTLHNLVIQYASQGRYEVAVPLCKQALEDLEKTSGHDHPDVATMLNILALVDQNKYKDAANLLNDALAIREKTLGKDHPAVAATLNNLAVLYGKRGKYKEAEPLCKRALEIREKVLGKDHPDVAKQLNNLALLCQNQGKYEEVEYYYQRALEIYQTKLGPDDPNVAKTKNNLASCYLKQGKFKQAETLYKEILTRAHEREFGSVDDENKPIWMHAEEREECKGKQKDGTSFGEYGGWYKACKVDSPTVTTTLKNLGALYRRQGKFEAAETLEEAAMRSRKQGLDNVHKQRVAEVLNDPENMEKRRSRESLNVDVVKYESGPDGGEEMRKMKLGLVN

SEQ ID NO: 44402 - protein, 618 aa, Homo sapiens
  Payload ID: 9052
  Gene Symbol: KLC1
  Gene Name: kinesin light chain 1
  Uniprot ID: Q07866
  ENSP ID: ENSP00000414982
MYDNMSTMVYIKEDKLEKLTQDEIISKTKQVIQGLEALKNEHNSILQSLLETLKCLKKDDESNLVEEKSNMIRKSLEMLELGLSEAQVMMALSNHLNAVESEKQKLRAQVRRLCQENQWLRDELANTQQKLQKSEQSVAQLEEEKKHLEFMNQLKKYDDDISPSEDKDTDSTKEPLDDLFPNDEDDPGQGIQQQHSSAAAAAQQGGYEIPARLRTLHNLVIQYASQGRYEVAVPLCKQALEDLEKTSGHDHPDVATMLNILALVYRDQNKYKDAANLLNDALAIREKTLGKDHPAVAATLNNLAVLYGKRGKYKEAEPLCKRALEIREKVLGKDHPDVAKQLNNLALLCQNQGKYEEVEYYYQRALEIYQTKLGPDDPNVAKTKNNLASCYLKQGKFKQAETLYKEILTRAHEREFGSVDDENKPIWMHAEEREECKGKQKDGTSFGEYGGWYKACKVDSPTVTTTLKNLGALYRRQGKFEAAETLEEAAMRSRKQGLDNVHKQRVAEVLNDPENMEKRRSRESLNVDVVKYESGPDGGEEVSMSVEWNGDGTGSLKRSGSFSKLRASIRRSSEKLVRKLKGGSSRESEPKNPGASLAEPLFVENDSSSSGLEDATAN

SEQ ID NO: 44403 - protein, 268 aa, Homo sapiens
  Payload ID: 9052
  Gene Symbol: KLC1
  Gene Name: kinesin light chain 1
  ENSP ID: ENSP00000441347
  MOD_RES (1)..(1): Any amino acid
XKFKQAETLYKEILTRAHEREFGSVDDENKPIWMHAEEREECKGKQKDGTSFGEYGGWYKACKVDSPTVTTTLKNLGALYRRQGKFEAAETLEEAAMRSRKQRSISEIPKKILSANGSNHFPLPGSQGLDNVHKQRVAEVLNDPENMEKRRSRESLNVDVVKYESGPDGGEEVSMSVEWNGDGTGSLKRSGSFSKLRASIRRSSEKLVRKLKGGSSRESEPKNPGMKRASSLNVLNVGGKAAEDRFQERNNCLADSRALSASHTDLAH

SEQ ID NO: 44404 - protein, 60 aa, Homo sapiens
  Payload ID: 9052
  Gene Symbol: KLC1
  Gene Name: kinesin light chain 1
  ENSP ID: ENSP00000442554
  MOD_RES (1)..(1): Any amino acid
XHKQRVAEVLNDPENMEKRRSRESLNVDVVKYESGPDGGEEVSMSVEWNGHEACQLSECP

SEQ ID NO: 44405 - protein, 560 aa, Homo sapiens; identical to SEQ ID NO: 44400
  Payload ID: 9052
  Gene Symbol: KLC1
  Gene Name: kinesin light chain 1
  Uniprot ID: Q07866
  ENSP ID: ENSP00000450616

SEQ ID NO: 44406 - protein, 551 aa, Homo sapiens
  Payload ID: 9052
  Gene Symbol: KLC1
  Gene Name: kinesin light chain 1
  ENSP ID: ENSP00000450617
MYDNMSTMVYIKEDKLEKLTQDEIISKTKQVIQGLEALKNEHNSILQSLLETLKCLKKDDESNLVEEKSNMIRKSLEMLELGLSEAQVMMALSNHLNAVESEKQKLRAQVRRLCQENQWLRDELANTQQKLQKSEQSVAQLEEEKKHLEFMNQLKKYDDDISPSEDKDTDSTKEPLDDLFPNDEDDPGQGIQQQHSSAAAAAQQGGYEIPARLRTLHNLVIQYASQGRYEVAVPLCKQALEDLEKTSGHDHPDVATMLNILALVYRDQNKYKDAANLLNDALAIREKTLGKDHPAVAATLNNLAVLYGKRGKYKEAEPLCKRALEIREKVLGKDHPDVAKQLNNLALLCQNQGKYEEVEYYYQRALEIYQTKLGPDDPNVAKTKNNLASCYLKQGKFKQAETLYKEILTRAHEREFGSVDDENKPIWMHAEEREECKGKQKDGTSFGEYGGWYKACKVDSPTVTTTLKNLGALYRRQGKFEAAETLEEAAMRSRKQGLDNVHKQRVAEVLNDPENMEKRRSRESLNVDVVKYESGPDGGEEVSMSVEWNGA

SEQ ID NO: 44407 - protein, 564 aa, Homo sapiens
  Payload ID: 9052
  Gene Symbol: KLC1
  Gene Name: kinesin light chain 1
  Uniprot ID: Q07866
  ENSP ID: ENSP00000450648
MYDNMSTMVYIKEDKLEKLTQDEIISKTKQVIQGLEALKNEHNSILQSLLETLKCLKKDDESNLVEEKSNMIRKSLEMLELGLSEAQVMMALSNHLNAVESEKQKLRAQVRRLCQENQWLRDELANTQQKLQKSEQSVAQLEEEKKHLEFMNQLKKYDDDISPSEDKDTDSTKEPLDDLFPNDEDDPGQGIQQQHSSAAAAAQQGGYEIPARLRTLHNLVIQYASQGRYEVAVPLCKQALEDLEKTSGHDHPDVATMLNILALVYRDQNKYKDAANLLNDALAIREKTLGKDHPAVAATLNNLAVLYGKRGKYKEAEPLCKRALEIREKVLGKDHPDVAKQLNNLALLCQNQGKYEEVEYYYQRALEIYQTKLGPDDPNVAKTKNNLASCYLKQGKFKQAETLYKEILTRAHEREFGSVDDENKPIWMHAEEREECKGKQKDGTSFGEYGGWYKACKVDSPTVTTTLKNLGALYRRQGKFEAAETLEEAAMRSRKQGLDNVHKQRVAEVLNDPENMEKRRSRESLNVDVVKYESGPDGGEEGVSGRASFCGKRQQQQWPGRRHR

SEQ ID NO: 44408 - protein, 150 aa, Homo sapiens
  Payload ID: 9052
  Gene Symbol: KLC1
  Gene Name: kinesin light chain 1
  ENSP ID: ENSP00000450786
MYDNMSTMVYIKEDKLEKLTQDEIISKTKQVIQGLEALKNEHNSILQSLLETLKCLKKDDESNLVEEKSNMIRKSLEMLELGLSEAQVMMALSNHLNAVESEKQKLRAQVRRLCQENQWLRDELANTQQKLQKSEQSVAQLEEEKKHLEF

SEQ ID NO: 44409 - protein, 609 aa, Homo sapiens
  Payload ID: 9052
  Gene Symbol: KLC1
  Gene Name: kinesin light chain 1
  ENSP ID: ENSP00000451242
MYDNMSTMVYIKEDKLEKLTQDEIISKTKQVIQGLEALKNEHNSILQSLLETLKCLKKDDESNLVEEKSNMIRKSLEMLELGLSEAQVMMALSNHLNAVESEKQKLRAQVRRLCQENQWLRDELANTQQKLQKSEQSVAQLEEEKKHLEFMNQLKKYDDDISPSEDKDTDSTKEPLDDLFPNDEDDPGQGIQQQHSSAAAAAQQGGYEIPARLRTLHNLVIQYASQGRYEVAVPLCKQALEDLEKTSGHDHPDVATMLNILALVYRDQNKYKDAANLLNDALAIREKTLGKDHPAVAATLNNLAVLYGKRGKYKEAEPLCKRALEIREKVLGKDHPDVAKQLNNLALLCQNQGKYEEVEYYYQRALEIYQTKLGPDDPNVAKTKNNLASCYLKQGKFKQAETLYKEILTRAHEREFGSVDDENKPIWMHAEEREECKGKQKDGTSFGEYGGWYKACKVDSPTVTTTLKNLGALYRRQGKFEAAETLEEAAMRSRKQGLDNVHKQRVAEVLNDPENMEKRRSRESLNVDVVKYESGPDGGEEDGTGSLKRSGSFSKLRASIRRSSEKLVRKLKGGSSRESEPKNPGASLAEPLFVENDSSSSGLEDATAN

SEQ ID NO: 44410 - protein, 44 aa, Homo sapiens
  Payload ID: 9052
  Gene Symbol: KLC1
  Gene Name: kinesin light chain 1
  ENSP ID: ENSP00000451691
  MOD_RES (1)..(1): Any amino acid
XMKRASSLNVLNVGGKAAEDRFQERNNCLADSRALSASHTDLAH

SEQ ID NO: 44411 - protein, 150 aa, Homo sapiens
  Payload ID: 9052
  Gene Symbol: KLC1
  Gene Name: kinesin light chain 1
  ENSP ID: ENSP00000451732
  MOD_RES (1)..(1): Any amino acid
XMHAEEREECKGKQKDGTSFGEYGGWYKACKVDSPTVTTTLKNLGALYRRQGKFEAAETLEEAAMRSRKQRSISEIPKKILSANGSNHFPLPGSQGLDNVHKQRVAEVLNDPENMEKRRSRESLNVDVVKYESGPDGGEEMRKMKLGLVN

SEQ ID NO: 44412 - protein, 161 aa, Homo sapiens
  Payload ID: 9052
  Gene Symbol: KLC1
  Gene Name: kinesin light chain 1
  ENSP ID: ENSP00000452095
  MOD_RES (1)..(1): Any amino acid
XIWMHAEEREECKGKQKDGTSFGEYGGWYKACKVDSPTVTTTLKNLGALYRRQGKFEAAETLEEAAMRSRKQGLDNVHKQRVAEVLNDPENMEKRRSRESLNVDVVKYESGPDGGEEVSMSVEWNGVSTVHSGHVLREAPPSGACQAFLLSHVLDLLLFSN

SEQ ID NO: 44413 - protein, 131 aa, Homo sapiens
  Payload ID: 9052
  Gene Symbol: KLC1
  Gene Name: kinesin light chain 1
  ENSP ID: ENSP00000452167
  MOD_RES (1)..(1): Any amino acid
XENKPIWMHAEEREECKGKQKDGTSFGEYGGWYKACKVDSPTVTTTLKNLGALYRRQGKFEAAETLEEAAMRSRKQGLDNVHKQRVAEVLNDPENMEKRRSRESLNVDVVKYESGPDGGEEMRKMKLGLVN

SEQ ID NO: 44414 - protein, 630 aa, Homo sapiens
  Payload ID: 9052
  Gene Symbol: KLC1
  Gene Name: kinesin light chain 1
  ENSP ID: ENSP00000452481
MYDNMSTMVYIKEDKLEKLTQDEIISKTKQVIQGLEALKNEHNSILQSLLETLKCLKKDDESNLVEEKSNMIRKSLEMLELGLSEAQVMMALSNHLNAVESEKQKLRAQVRRLCQENQWLRDELANTQQKLQKSEQSVAQLEEEKKHLEFMNQLKKYDDDISPSEDKDTDSTKEPLDDLFPNDEDDPGQGIQQQHSSAAAAAQQGGYEIPARLRTLHNLVIQYASQGRYEVAVPLCKQALEDLEKTSGHDHPDVATMLNILALVYRDQNKYKDAANLLNDALAIREKTLGKDHPAVAATLNNLAVLYGKRGKYKEAEPLCKRALEIREKVLGKDHPDVAKQLNNLALLCQNQGKYEEVEYYYQRALEIYQTKLGPDDPNVAKTKNNLASCYLKQGKFKQAETLYKEILTRAHEREFGSVDDENKPIWMHAEEREECKGKQKDGTSFGEYGGWYKACKVDSPTVTTTLKNLGALYRRQGKFEAAETLEEAAMRSRKQGLDNVHKQRVAEVLNDPENMEKRRSRESLNVDVVKYESGPDGGEEDGTGSLKRSGSFSKLRASIRRSSEKLVRKLKGGSSRESEPKNPGMKRASSLNVLNVGGKAAEDRFQGVSGRASFCGKRQQQQWPGRRHR

SEQ ID NO: 44415 - protein, 560 aa, Homo sapiens; identical to SEQ ID NO: 44400
  Payload ID: 9052
  Gene Symbol: KLC1
  Gene Name: kinesin light chain 1
  Uniprot ID: Q07866
  ENSP ID: ENSP00000452487

SEQ ID NO: 44416 - protein, 584 aa, Homo sapiens
  Payload ID: 9052
  Gene Symbol: KLC1
  Gene Name: kinesin light chain 1
  ENSP ID: ENSP00000488938
MYDNMSTMVYIKEDKLEKLTQDEIISKTKQVIQGLEALKNEHNSILQSLLETLKCLKKDDESNLVEEKSNMIRKSLEMLELGLSEAQVMMALSNHLNAVESEKQKLRAQVRRLCQENQWLRDELANTQQKLQKSEQSVAQLEEEKKHLEFMNQLKKYDDDISPSEDKDTDSTKEPLDDLFPNDEDDPGQGIQQQHSSAAAAAQQGGYEIPARLRTLHNLVIQYASQGRYEVAVPLCKQALEDLEKTSGHDHPDVATMLNILALVYRDQNKYKDAANLLNDALAIREKTLGKDHPAVAATLNNLAVLYGKRGKYKEAEPLCKRALEIREKVLGKDHPDVAKQLNNLALLCQNQGKYEEVEYYYQRALEIYQTKLGPDDPNVAKTKNNLASCYLKQGKFKQAETLYKEILTRAHEREFGSVDDENKPIWMHAEEREECKGKQKDGTSFGEYGGWYKACKVDSPTVTTTLKNLGALYRRQGKFEAAETLEEAAMRSRKQGLDNVHKQRVAEVLNDPENMEKRRSRESLNVDVVKYESGPDGGEEMKRASSLNVLNVGGKAAEDRFQERNNCLADSRALSASHTDLAH

SEQ ID NO: 44417 - protein, 622 aa, Homo sapiens
  Payload ID: 9053
  Gene Symbol: KLC2
  Gene Name: kinesin light chain 2
  Uniprot ID: Q9H0B6
  ENSP ID: ENSP00000314837
MAMMVFPREEKLSQDEIVLGTKAVIQGLETLRGEHRALLAPLVAPEAGEAEPGSQERCILLRRSLEAIELGLGEAQVILALSSHLGAVESEKQKLRAQVRRLVQENQWLREELAGTQQKLQRSEQAVAQLEEEKQHLLFMSQIRKLDEDASPNEEKGDVPKDTLDDLFPNEDEQSPAPSPGGGDVSGQHGGYEIPARLRTLHNLVIQYASQGRYEVAVPLCKQALEDLEKTSGHDHPDVATMLNILALVYRDQNKYKEAAHLLNDALAIREKTLGKDHPAVAATLNNLAVLYGKRGKYKEAEPLCKRALEIREKVLGKFHPDVAKQLSNLALLCQNQGKAEEVEYYYRRALEIYATRLGPDDPNVAKTKNNLASCYLKQGKYQDAETLYKEILTRAHEKEFGSVNGDNKPIWMHAEEREESKDKRRDSAPYGEYGSWYKACKVDSPTVNTTLRSLGALYRRQGKLEAAHTLEDCASRNRKQGLDPASQTKVVELLKDGSGRRGDRRSSRDMAGGAGPRSESDLEDVGPTAEWNGDGSGSLRRSGSFGKLRDALRRSSEMLVKKLQGGTPQEPPNPRMKRASSLNFLNKSVEEPTQPGGTGLSDSRTLSSSSMDLSRRSSLVG

SEQ ID NO: 44418 - protein, 521 aa, Homo sapiens
  Payload ID: 9053
  Gene Symbol: KLC2
  Gene Name: kinesin light chain 2
  ENSP ID: ENSP00000377629
MSQIRKLDEDASPNEEKGDVPKDTLDDLFPNEDEQSPAPSPGGGDVSGQHGGYEIPARLRTLHNLVIQYASQGRYEVAVPLCKQALEDLEKTSGHDHPDVATMLNILALVYRDQNKYKEAAHLLNDALAIREKTLGKDHPAVAATLNNLAVLYGKRGKYKEAEPLCKRALEIREKVLGKFHPDVAKQLSNLALLCQNQGKAEEVEYYYRRALEIYATRLGPDDPNVAKTKNNLASCYLKQGKYQDAETLYKEILTRAHEKEFGSVNGDNKPIWMHAEEREESKDKRRDSAPYGEYGSWYKACKVDSPTVNTTLRSLGALYRRQGKLEAAHTLEDCASRNRKQGLDPASQTKVVELLKDGSGRRGDRRSSRDMAGGAGPRSESDLEDVGPTAEWNGDGSGSLRRSGSFGKLRDALRRSSEMLVKKLQGGTPQEPPNPRMKRASSLNFLNKSVEEPTQVGAGGCLGTGQLRPGLHACCQASLQHASSSSNSSWLCLRPTLGWTTGRHEGNPASPGGGRVNGQC

SEQ ID NO: 44419 - protein, 545 aa, Homo sapiens
  Payload ID: 9053
  Gene Symbol: KLC2
  Gene Name: kinesin light chain 2
  Uniprot ID: Q9H0B6
  ENSP ID: ENSP00000377630
MAMMVFPREEKLSQDEIVLGTKAVIQGLETLRGEHRALLAPLVAPEAGEAEPGSQERCILLRRSLEAIELGLGEAQEEKGDVPKDTLDDLFPNEDEQSPAPSPGGGDVSGQHGGYEIPARLRTLHNLVIQYASQGRYEVAVPLCKQALEDLEKTSGHDHPDVATMLNILALVYRDQNKYKEAAHLLNDALAIREKTLGKDHPAVAATLNNLAVLYGKRGKYKEAEPLCKRALEIREKVLGKFHPDVAKQLSNLALLCQNQGKAEEVEYYYRRALEIYATRLGPDDPNVAKTKNNLASCYLKQGKYQDAETLYKEILTRAHEKEFGSVNGDNKPIWMHAEEREESKDKRRDSAPYGEYGSWYKACKVDSPTVNTTLRSLGALYRRQGKLEAAHTLEDCASRNRKQGLDPASQTKVVELLKDGSGRRGDRRSSRDMAGGAGPRSESDLEDVGPTAEWNGDGSGSLRRSGSFGKLRDALRRSSEMLVKKLQGGTPQEPPNPRMKRASSLNFLNKSVEEPTQPGGTGLSDSRTLSSSSMDLSRRSSLVG

SEQ ID NO: 44420 - protein, 622 aa, Homo sapiens; identical to SEQ ID NO: 44417
  Payload ID: 9053
  Gene Symbol: KLC2
  Gene Name: kinesin light chain 2
  Uniprot ID: Q9H0B6
  ENSP ID: ENSP00000377631

SEQ ID NO: 44421 - protein, 333 aa, Homo sapiens
  Payload ID: 9053
  Gene Symbol: KLC2
  Gene Name: kinesin light chain 2
  ENSP ID: ENSP00000377641
MAMMVFPREEKLSQDEIVLGTKAVIQGLETLRGEHRALLAPLVAPEAGEAEPGSQERCILLRRSLEAIELGLGEAQVILALSSHLGAVESEKQKLRAQVRRLVQENQWLREELAGTQQKLQRSEQAVAQLEEEKQHLLFMSQIRKLDEDASPNEEKGDVPKDTLDDLFPNEDEQSPAPSPGGGDVSGQHGGYEIPARLRTLHNLVIQYASQGRYEVAVPLCKQALEDLEKTSGHDHPDVATMLNILALVYRFGPAGGAGWSLHHRLSGLASPDPRAKNTKHSPALRHPRPPSRLNPAVASVYREISYWPRASLQSTVLPGPPLVPLLVVPPRP

SEQ ID NO: 44422 - protein, 166 aa, Homo sapiens
  Payload ID: 9053
  Gene Symbol: KLC2
  Gene Name: kinesin light chain 2
  ENSP ID: ENSP00000396952
MAMMVFPREEKLSQDEIVLGTKAVIQGLETLRGEHRALLAPLVAPEAGEAEPGSQERCILLRRSLEAIELGLGEAQVILALSSHLGAVESEKQKLRAQVRRLVQENQWLREELAGTQQKLQRSEQAVAQLEEEKQHLLFMSQIRKLDEDASPNEEKGDVPKDTLDD

SEQ ID NO: 44423 - protein, 622 aa, Homo sapiens; identical to SEQ ID NO: 44417
  Payload ID: 9053
  Gene Symbol: KLC2
  Gene Name: kinesin light chain 2
  Uniprot ID: Q9H0B6
  ENSP ID: ENSP00000399403

SEQ ID NO: 44424 - protein, 545 aa, Homo sapiens; identical to SEQ ID NO: 44419
  Payload ID: 9053
  Gene Symbol: KLC2
  Gene Name: kinesin light chain 2
  Uniprot ID: Q9H0B6
  ENSP ID: ENSP00000408484

SEQ ID NO: 44425 - protein, 171 aa, Homo sapiens
  Payload ID: 9053
  Gene Symbol: KLC2
  Gene Name: kinesin light chain 2
  ENSP ID: ENSP00000431253
MAMMVFPREEKLSQDEIVLGTKAVIQGLETLRGEHRALLAPLVAPEAGEAEPGSQERCILLRRSLEAIELGLGEAQVILALSSHLGAVESEKQKLRAQVRRLVQENQWLREELAGTQQKLQRSEQAVAQLEEEKQHLLFMSQIRKLDEDASPNEEKGDVPKDTLDDLFPNE

SEQ ID NO: 44426 - protein, 189 aa, Homo sapiens
  Payload ID: 9053
  Gene Symbol: KLC2
  Gene Name: kinesin light chain 2
  ENSP ID: ENSP00000434538
MAMMVFPREEKLSQDEIVLGTKAVIQGLETLRGEHRALLAPLVAPEAGEAEPGSQERCILLRRSLEAIELGLGEAQEEKGDVPKDTLDDLFPNEDEQSPAPSPGGGDVSGQHGGYEIPARLRTLHNLVIQYASQGRYEVAVPLCKQALEDLEKTSGHDHPDVATMLNILALVYRDQNKYKEAAHLLNDA

SEQ ID NO: 44427 - protein, 105 aa, Homo sapiens
  Payload ID: 9053
  Gene Symbol: KLC2
  Gene Name: kinesin light chain 2
  ENSP ID: ENSP00000436577
MAMMVFPREEKLSQDEIVLGTKAVIQGLETLRGEHRALLAPLVAPEAGEAEPGSQERCILLRRSLEAIELGLGEAQVILALSSHLGAVESEKQKLRAQVRRLVQE

SEQ ID NO: 44428 - protein, 145 aa, Homo sapiens
  Payload ID: 9053
  Gene Symbol: KLC2
  Gene Name: kinesin light chain 2
  ENSP ID: ENSP00000437026
MAMMVFPREEKLSQDEIVLGTKAVIQGLETLRGEHRALLAPLVAPEAGEAEPGSQERCILLRRSLEAIELGLGEAQVILALSSHLGAVESEKQKLRAQVRRLVQENQWLREELAGTQQKLQRSEQAVAQLEEEKQHLLFMSQIRK

SEQ ID NO: 44429 - protein, 504 aa, Homo sapiens
  Payload ID: 9054
  Gene Symbol: KLC3
  Gene Name: kinesin light chain 3
  Uniprot ID: Q6P597
  ENSP ID: ENSP00000375810
MSVQVAAPGSAGLGPERLSPEELVRQTRQVVQGLEALRAEHHGLAGHLAEALAGQGPAAGLEMLEEKQQVVSHSLEAIELGLGEAQVLLALSAHVGALEAEKQRLRSQARRLAQENVWLREELEETQRRLRASEESVAQLEEEKRHLEFLGQLRQYDPPAESQQSESPPRRDSLASLFPSEEEERKGPEAAGAAAAQQGGYEIPARLRTLHNLVIQYAGQGRYEVAVPLCRQALEDLERSSGHCHPDVATMLNILALVYRDQNKYKEATDLLHDALQIREQTLGPEHPAVAATLNNLAVLYGKRGRYREAEPLCQRALEIREKVLGADHPDVAKQLNNLALLCQNQGKFEDVERHYARALSIYEALGGPHDPNVAKTKNNLASAYLKQNKYQQAEELYKEILHKEDLPAPLGAPNTGTAGDAEQALRRSSSLSKIRESIRRGSEKLVSRLRGEAAAGAAGMKRAMSLNTLNVDAPRAPGTQFPSWHLDKAPRTLSASTQDLSPH

SEQ ID NO: 44430 - protein, 518 aa, Homo sapiens
  Payload ID: 9054
  Gene Symbol: KLC3
  Gene Name: kinesin light chain 3
  Uniprot ID: Q6P597
  ENSP ID: ENSP00000436019
MIPQTPHHCSPGAAMSVQVAAPGSAGLGPERLSPEELVRQTRQVVQGLEALRAEHHGLAGHLAEALAGQGPAAGLEMLEEKQQVVSHSLEAIELGLGEAQVLLALSAHVGALEAEKQRLRSQARRLAQENVWLREELEETQRRLRASEESVAQLEEEKRHLEFLGQLRQYDPPAESQQSESPPRRDSLASLFPSEEEERKGPEAAGAAAAQQGGYEIPARLRTLHNLVIQYAGQGRYEVAVPLCRQALEDLERSSGHCHPDVATMLNILALVYRDQNKYKEATDLLHDALQIREQTLGPEHPAVAATLNNLAVLYGKRGRYREAEPLCQRALEIREKVLGADHPDVAKQLNNLALLCQNQGKFEDVERHYARALSIYEALGGPHDPNVAKTKNNLASAYLKQNKYQQAEELYKEILHKEDLPAPLGAPNTGTAGDAEQALRRSSSLSKIRESIRRGSEKLVSRLRGEAAAGAAGMKRAMSLNTLNVDAPRAPGTQFPSWHLDKAPRTLSASTQDLSPH

SEQ ID NO: 44431 - protein, 396 aa, Homo sapiens
  Payload ID: 9054
  Gene Symbol: KLC3
  Gene Name: kinesin light chain 3
  ENSP ID: ENSP00000465950
MSVQVAAPGSAGLGPERLSPEELVRQTRQVVQGLEALRAEHHGLAGHLAEALAGQGPAAGLEMLEEKQQVVSHSLEAIELGLGEAQVLLALSAHVGALEAEKQRLRSQARRLAQENVWLREELEETQRRLRASEESVAQLEEEKRHLEFLGQLRQYDPPAESQQSESPPRRDSLASLFPSEEEERKGPEAAGAAAAQQGGYEIPARLRTLHNLVIQYAGQGRYEVAVPLCRQALEDLERSSGHCHPDVATMLNILALVYRDQNKYKEATDLLHDALQIREQTLGPEHPAVAATLNNLAVLYGKRGRYREAEPLCQRALEIREKVLGADHPDVAKQLNNLALLCQNQGKFEDVERHYARALSIYEALGGPHDPNVAKTKNNLASAYLKQNKYQQAEE

SEQ ID NO: 44432 - protein, 503 aa, Homo sapiens
  Payload ID: 9054
  Gene Symbol: KLC3
  Gene Name: kinesin light chain 3
  Uniprot ID: Q6P597
  ENSP ID: ENSP00000466067
MSVQVAAPGSAGLGPERLSPEELVRQTRQVVQGLEALRAEHHGLAGHLAEALAGQGPAAGLEMLEEKQQVVSHSLEAIELGLGEAQVLLALSAHVGALEAEKQRLRSQARRLAQENVWLREELEETQRRLRASEESVAQLEEEKRHLEFLGQLRQYDPPAESQSESPPRRDSLASLFPSEEEERKGPEAAGAAAAQQGGYEIPARLRTLHNLVIQYAGQGRYEVAVPLCRQALEDLERSSGHCHPDVATMLNILALVYRDQNKYKEATDLLHDALQIREQTLGPEHPAVAATLNNLAVLYGKRGRYREAEPLCQRALEIREKVLGADHPDVAKQLNNLALLCQNQGKFEDVERHYARALSIYEALGGPHDPNVAKTKNNLASAYLKQNKYQQAEELYKEILHKEDLPAPLGAPNTGTAGDAEQALRRSSSLSKIRESIRRGSEKLVSRLRGEAAAGAAGMKRAMSLNTLNVDAPRAPGTQFPSWHLDKAPRTLSASTQDLSPH

SEQ ID NO: 44433 - protein, 157 aa, Homo sapiens
  Payload ID: 9054
  Gene Symbol: KLC3
  Gene Name: kinesin light chain 3
  ENSP ID: ENSP00000466168
MSVQVAAPGSAGLGPERLSPEELVRQTRQVVQGLEALRAEHHGLAGHLAEALAGQGPAAGLEMLEEKQQVVSHSLEAIELGLGEAQVLLALSAHVGALEAEKQRLRSQARRLAQENVWLREELEETQRRLRASEESVAQLEEEKRHLEFLGQLRQYD

SEQ ID NO: 44434 - protein, 297 aa, Homo sapiens
  Payload ID: 9054
  Gene Symbol: KLC3
  Gene Name: kinesin light chain 3
  ENSP ID: ENSP00000466974
MSVQVAAPGSAGLGPERLSPEELVRQTRQVVQGLEALRAEHHGLAGHLAEALAGQGPAAGLEMLEEKQQVVLLALSAHVGALEAEKQRLRSQARRLAQENVWLREELEETQRRLRASEESVAQLEEEKRHLEFLGQLRQYDPPAESQQSESPPRRDSLASLFPSEEEERKGPEAAGAAAAQQGGYEIPARLRTLHNLVIQYAGQGRYEVAVPLCRQALEDLERSSGHCHPDVATMLNILALVYRDQNKYKEATDLLHDALQIREQTLGPEHPAVAATLNNLAVLYGKRGRYREAEPL

SEQ ID NO: 44435 - protein, 637 aa, Homo sapiens
  Payload ID: 9055
  Gene Symbol: KLC4
  Gene Name: kinesin light chain 4
  Uniprot ID: Q9NSK0
  ENSP ID: ENSP00000259708
MEVTGFGVTRPGKVPQARMSGLVLGQRDEPAGHRLSQEEILGSTRLVSQGLEALRSEHQAVLQSLSQTIECLQQGGHEEGLVHEKARQLRRSMENIELGLSEAQVMLALASHLSTVESEKQKLRAQVRRLCQENQWLRDELAGTQQRLQRSEQAVAQLEEEKKHLEFLGQLRQYDEDGHTSEEKEGDATKDSLDDLFPNEEEEDPSNGLSRGQGATAAQQGGYEIPARLRTLHNLVIQYAAQGRYEVAVPLCKQALEDLERTSGRGHPDVATMLNILALVYRDQNKYKEAAHLLNDALSIRESTLGPDHPAVAATLNNLAVLYGKRGKYKEAEPLCQRALEIREKVLGTNHPDVAKQLNNLALLCQNQGKYEAVERYYQRALAIYEGQLGPDNPNVARTKNNLASCYLKQGKYAEAETLYKEILTRAHVQEFGSVDDDHKPIWMHAEEREEMSKSRHHEGGTPYAEYGGWYKACKVSSPTVNTTLRNLGALYRRQGKLEAAETLEECALRSRRQGTDPISQTKVAELLGESDGRRTSQEGPGDSVKFEGGEDASVAVEWSGDGSGTLQRSGSLGKIRDVLRRSSELLVRKLQGTEPRPSSSNMKRAASLNYLNQPSAAPLQVSRGLSASTMDLSSSS

SEQ ID NO: 44436 - protein, 619 aa, Homo sapiens
  Payload ID: 9055
  Gene Symbol: KLC4
  Gene Name: kinesin light chain 4
  Uniprot ID: Q9NSK0
  ENSP ID: ENSP00000340221
MSGLVLGQRDEPAGHRLSQEEILGSTRLVSQGLEALRSEHQAVLQSLSQTIECLQQGGHEEGLVHEKARQLRRSMENIELGLSEAQVMLALASHLSTVESEKQKLRAQVRRLCQENQWLRDELAGTQQRLQRSEQAVAQLEEEKKHLEFLGQLRQYDEDGHTSEEKEGDATKDSLDDLFPNEEEEDPSNGLSRGQGATAAQQGGYEIPARLRTLHNLVIQYAAQGRYEVAVPLCKQALEDLERTSGRGHPDVATMLNILALVYRDQNKYKEAAHLLNDALSIRESTLGPDHPAVAATLNNLAVLYGKRGKYKEAEPLCQRALEIREKVLGTNHPDVAKQLNNLALLCQNQGKYEAVERYYQRALAIYEGQLGPDNPNVARTKNNLASCYLKQGKYAEAETLYKEILTRAHVQEFGSVDDDHKPIWMHAEEREEMSKSRHHEGGTPYAEYGGWYKACKVSSPTVNTTLRNLGALYRRQGKLEAAETLEECALRSRRQGTDPISQTKVAELLGESDGRRTSQEGPGDSVKFEGGEDASVAVEWSGDGSGTLQRSGSLGKIRDVLRRSSELLVRKLQGTEPRPSSSNMKRAASLNYLNQPSAAPLQVSRGLSASTMDLSSSS

SEQ ID NO: 44437 - protein, 619 aa, Homo sapiens; identical to SEQ ID NO: 44436
  Payload ID: 9055
  Gene Symbol: KLC4
  Gene Name: kinesin light chain 4
  Uniprot ID: Q9NSK0
  ENSP ID: ENSP00000377620

SEQ ID NO: 44438 - protein, 542 aa, Homo sapiens
  Payload ID: 9055
  Gene Symbol: KLC4
  Gene Name: kinesin light chain 4
  Uniprot ID: Q9NSK0
  ENSP ID: ENSP00000395806
MSGLVLGQRDEPAGHRLSQEEILGSTRLVSQGLEALRSEHQAVLQSLSQTIECLQQGGHEEGLVHEKARQLRRSMENIELGLSEAQEEKEGDATKDSLDDLFPNEEEEDPSNGLSRGQGATAAQQGGYEIPARLRTLHNLVIQYAAQGRYEVAVPLCKQALEDLERTSGRGHPDVATMLNILALVYRDQNKYKEAAHLLNDALSIRESTLGPDHPAVAATLNNLAVLYGKRGKYKEAEPLCQRALEIREKVLGTNHPDVAKQLNNLALLCQNQGKYEAVERYYQRALAIYEGQLGPDNPNVARTKNNLASCYLKQGKYAEAETLYKEILTRAHVQEFGSVDDDHKPIWMHAEEREEMSKSRHHEGGTPYAEYGGWYKACKVSSPTVNTTLRNLGALYRRQGKLEAAETLEECALRSRRQGTDPISQTKVAELLGESDGRRTSQEGPGDSVKFEGGEDASVAVEWSGDGSGTLQRSGSLGKIRDVLRRSSELLVRKLQGTEPRPSSSNMKRAASLNYLNQPSAAPLQVSRGLSASTMDLSSSS

SEQ ID NO: 44439 - protein, 315 aa, Homo sapiens
  Payload ID: 9055
  Gene Symbol: KLC4
  Gene Name: kinesin light chain 4
  Uniprot ID: Q9NSK0
  ENSP ID: ENSP00000410358
MSGLVLGQRDEPAGHRLSQEEILGSTRLVSQGLEALRSEHQAVLQSLSQTIECLQQGGHEEGLVHEKARQLRRSMENIELGLSEAQVMLALASHLSTVESEKQKLRAQVRRLCQENQWLRDELAGTQQRLQRSEQAVAQLEEEKKHLEFLGQLRQYDEDGHTSEEKEGDATKDSLDDLFPNEEEEDPSNGLSRGQGATAAQQGGYEIPARLRTLHNLVIQYAAQGRYEVAVPLCKQALEDLERTSGRGHPDVATMLNILALVYRDQNKYKEAAHLLNDALSIRESTLGPDHPAVSIPCPPHPTPRTPHHCCFGLS

SEQ ID NO: 44440 - protein, 159 aa, Homo sapiens
  Payload ID: 9055
  Gene Symbol: KLC4
  Gene Name: kinesin light chain 4
  ENSP ID: ENSP00000417620
  MOD_RES (1)..(1): Any amino acid
XAVAATLNNLAVLYGKRGKYKEAEPLCQRALEIREKVLGTNHPDVAKQLNNLALLCQNQGKYEAVERYYQRALAIYEGQLGPDNPNVARTKNNLASCYLKQGKYAEAETLYKEILTRAHVQEFGSVDDDHKPIWMHAEEREEMSKPHSEHYSEKPGSSV

SEQ ID NO: 44441 - protein, 271 aa, Homo sapiens
  Payload ID: 9055
  Gene Symbol: KLC4
  Gene Name: kinesin light chain 4
  ENSP ID: ENSP00000417652
MSGLVLGQRDEPAGHRLSQEEILGSTRLVSQGLEALRSEHQAVLQSLSQTIECLQQGGHEEGLVHEKARQLRRSMENIELGLSEAQVRRLCQENQWLRDELAGTQQRLQRSEQAVAQLEEEKKHLEFLGQLRQYDEDGHTSEEKEGDATKDSLDDLFPNEEEEDPSNGLSRGQGATAAQQGGYEIPARLRTLHNLVIQYAAQGRYEVAVPLCKQALEDLERTSGRGHPDVATMLNILALVYRDQNKYKEAAHLLNDALSIRESTLGPDHPA

SEQ ID NO: 44442 - protein, 619 aa, Homo sapiens; identical to SEQ ID NO: 44436
  Payload ID: 9055
  Gene Symbol: KLC4
  Gene Name: kinesin light chain 4
  Uniprot ID: Q9NSK0
  ENSP ID: ENSP00000418031

SEQ ID NO: 44443 - protein, 45 aa, Homo sapiens
  Payload ID: 9055
  Gene Symbol: KLC4
  Gene Name: kinesin light chain 4
  ENSP ID: ENSP00000418546
MEVTGFGVTRCSSLPFPRHASCCRSLVKSLSLIPFLGDSSSLGLQ

SEQ ID NO: 44444 - protein, 131 aa, Homo sapiens
  Payload ID: 9055
  Gene Symbol: KLC4
  Gene Name: kinesin light chain 4
  Uniprot ID: Q9NSK0
  ENSP ID: ENSP00000418759
MSGLVLGQRDEPAGHRLSQEEILGSTRLVSQGLEALRSEHQAVLQSLSQTIECLQQGGHEEGLVHEKARQLRRSMENIELGLSEAQNLELRGCAHLGDAGSSQPPEHSGVGETEAAGSGAAAMPGEPVAAG

SEQ ID NO: 44445 - protein, 82 aa, Homo sapiens
  Payload ID: 9055
  Gene Symbol: KLC4
  Gene Name: kinesin light chain 4
  ENSP ID: ENSP00000419102
MSGLVLGQRDEPAGHRLSQEEILGSTRLVSQGLEALRSEHQAVLQSLSQTIECLQQGGHEEGLVHEKARQLRRSMENIELGL

SEQ ID NO: 44446 - protein, 91 aa, Homo sapiens
  Payload ID: 9055
  Gene Symbol: KLC4
  Gene Name: kinesin light chain 4
  ENSP ID: ENSP00000419634
MSGLVLGQRDEPAGHRLSQEEILGSTRLVSQGLEALRSEHQAVLQSLSQTIECLQQGGHEEGLVHEKARQLRRSMENIELGLSEAQVMLAL

SEQ ID NO: 44447 - protein, 162 aa, Homo sapiens
  Payload ID: 9055
  Gene Symbol: KLC4
  Gene Name: kinesin light chain 4
  ENSP ID: ENSP00000419784
MLALASHLSTVESEKQKLRAQVRRLCQENQWLRDELAGTQQRLQRSEQAVAQLEEEKKHLEFLGQLRQYDEDGHTSEEKEGDATKDSLDDLFPNEEEEDPSNGLSRGQGATAAQQGGYEIPARLRTLHNLVIQYAAQGRYEVAVPLCKQALEDLERTSGRGH

SEQ ID NO: 44448 - protein, 84 aa, Homo sapiens
  Payload ID: 9055
  Gene Symbol: KLC4
  Gene Name: kinesin light chain 4
  ENSP ID: ENSP00000420144
MSGLVLGQRDEPAGHRLSQEEILGSTRLVSQGLEALRSEHQAVLQSLSQTIECLQQGGHEEGLVHEKARQLRRSMENIELGLSE

SEQ ID NO: 44449 - protein, 792 aa, Homo sapiens
  Payload ID: 9056
  Gene Symbol: KIFAP3
  Gene Name: kinesin-associated protein 3
  Uniprot ID: Q92845
  ENSP ID: ENSP00000354560
MQGEDARYLKRKVKGGNIDVHPSEKALIVHYEVEATILGEMGDPMLGERKECQKIIRLKSLNANTDITSLARKVVEECKLIHPSKLNEVEQLLYYLQNRRDSLSGKEKKEKSSKPKDPPPFEGMEIDEVANINDMDEYIELLYEDIPDKVRGSALILQLARNPDNLEELLLNETALGALARVLREDWKQSVELATNIIYIFFCFSSFSQFHGLITHYKIGALCMNIIDHELKRHELWQEELSKKKKAVDEDPENQTLRKDYEKTFKKYQGLVVKQEQLLRVALYLLLNLAEDTRTELKMRNKNIVHMLVKALDRDNFELLILVVSFLKKLSIFMENKNDMVEMDIVEKLVKMIPCEHEDLLNITLRLLLNLSFDTGLRNKMVQVGLLPKLTALLGNDNYKQIAMCVLYHISMDDRFKSMFAYTDCIPQLMKMLFECSDERIDLELISFCINLAANKRNVQLICEGNGLKMLMKRALKFKDPLLMKMIRNISQHDGPTKNLFIDYVGDLAAQISNDEEEEFVIECLGTLANLTIPDLDWELVLKEYKLVPYLKDKLKPGAAEDDLVLEVVIMIGTVSMDDSCAALLAKSGIIPALIELLNAQQEDDEFVCQIIYVFYQMVFHQATRDVIIKETQAPAYLIDLMHDKNNEIRKVCDNTLDIIAEYDEEWAKKIQSEKFRWHNSQWLEMVESRQMDESEQYLYGDDRIEPYIHEGDILERPDLFYNSDGLIASEGAISPDFFNDYHLQNGDVVGQHSFPGSLGMDGFGQPVGILGRPATAYGFRPDEPYYYGYGS

SEQ ID NO: 44450 - protein, 752 aa, Homo sapiens
  Payload ID: 9056
  Gene Symbol: KIFAP3
  Gene Name: kinesin-associated protein 3
  Uniprot ID: Q92845
  ENSP ID: ENSP00000356739
MGDPMLGERKECQKIIRLKSLNANTDITSLARKVVEECKLIHPSKLNEVEQLLYYLQNRRDSLSGKEKKEKSSKPKDPPPFEGMEIDEVANINDMDEYIELLYEDIPDKVRGSALILQLARNPDNLEELLLNETALGALARVLREDWKQSVELATNIIYIFFCFSSFSQFHGLITHYKIGALCMNIIDHELKRHELWQEELSKKKKAVDEDPENQTLRKDYEKTFKKYQGLVVKQEQLLRVALYLLLNLAEDTRTELKMRNKNIVHMLVKALDRDNFELLILVVSFLKKLSIFMENKNDMVEMDIVEKLVKMIPCEHEDLLNITLRLLLNLSFDTGLRNKMVQVGLLPKLTALLGNDNYKQIAMCVLYHISMDDRFKSMFAYTDCIPQLMKMLFECSDERIDLELISFCINLAANKRNVQLICEGNGLKMLMKRALKFKDPLLMKMIRNISQHDGPTKNLFIDYVGDLAAQISNDEEEEFVIECLGTLANLTIPDLDWELVLKEYKLVPYLKDKLKPGAAEDDLVLEVVIMIGTVSMDDSCAALLAKSGIIPALIELLNAQQEDDEFVCQIIYVFYQMVFHQATRDVIIKETQAPAYLIDLMHDKNNEIRKVCDNTLDIIAEYDEEWAKKIQSEKFRWHNSQWLEMVESRQMDESEQYLYGDDRIEPYIHEGDILERPDLFYNSDGLIASEGAISPDFFNDYHLQNGDVVGQHSFPGSLGMDGFGQPVGILGRPATAYGFRPDEPYYYGYGS

SEQ ID NO: 44451 - protein, 748 aa, Homo sapiens
  Payload ID: 9056
  Gene Symbol: KIFAP3
  Gene Name: kinesin-associated protein 3
  Uniprot ID: Q92845
  ENSP ID: ENSP00000356741
MQGEDARYLKSIRLKSLNANTDITSLARKVVEECKLIHPSKLNEVEQLLYYLQNRRDSLSGKEKKEKSSKPKDPPPFEGMEIDEVANINDMDEYIELLYEDIPDKVRGSALILQLARNPDNLEELLLNETALGALARVLREDWKQSVELATNIIYIFFCFSSFSQFHGLITHYKIGALCMNIIDHELKRHELWQEELSKKKKAVDEDPENQTLRKDYEKTFKKYQGLVVKQEQLLRVALYLLLNLAEDTRTELKMRNKNIVHMLVKALDRDNFELLILVVSFLKKLSIFMENKNDMVEMDIVEKLVKMIPCEHEDLLNITLRLLLNLSFDTGLRNKMVQVGLLPKLTALLGNDNYKQIAMCVLYHISMDDRFKSMFAYTDCIPQLMKMLFECSDERIDLELISFCINLAANKRNVQLICEGNGLKMLMKRALKFKDPLLMKMIRNISQHDGPTKNLFIDYVGDLAAQISNDEEEEFVIECLGTLANLTIPDLDWELVLKEYKLVPYLKDKLKPGAAEDDLVLEVVIMIGTVSMDDSCAALLAKSGIIPALIELLNAQQEDDEFVCQIIYVFYQMVFHQATRDVIIKETQAPAYLIDLMHDKNNEIRKVCDNTLDIIAEYDEEWAKKIQSEKFRWHNSQWLEMVESRQMDESEQYLYGDDRIEPYIHEGDILERPDLFYNSDGLIASEGAISPDFFNDYHLQNGDVVGQHSFPGSLGMDGFGQPVGILGRPATAYGFRPDEPYYYGYGS

SEQ ID NO: 44452 - protein, 714 aa, Homo sapiens
  Payload ID: 9056
  Gene Symbol: KIFAP3
  Gene Name: kinesin-associated protein 3
  Uniprot ID: Q92845
  ENSP ID: ENSP00000444622
MSIALGNTYRRSLSDSETVSVLQASLCEEKKEKSSKPKDPPPFEGMEIDEVANINDMDEYIELLYEDIPDKVRGSALILQLARNPDNLEELLLNETALGALARVLREDWKQSVELATNIIYIFFCFSSFSQFHGLITHYKIGALCMNIIDHELKRHELWQEELSKKKKAVDEDPENQTLRKDYEKTFKKYQGLVVKQEQLLRVALYLLLNLAEDTRTELKMRNKNIVHMLVKALDRDNFELLILVVSFLKKLSIFMENKNDMVEMDIVEKLVKMIPCEHEDLLNITLRLLLNLSFDTGLRNKMVQVGLLPKLTALLGNDNYKQIAMCVLYHISMDDRFKSMFAYTDCIPQLMKMLFECSDERIDLELISFCINLAANKRNVQLICEGNGLKMLMKRALKFKDPLLMKMIRNISQHDGPTKNLFIDYVGDLAAQISNDEEEEFVIECLGTLANLTIPDLDWELVLKEYKLVPYLKDKLKPGAAEDDLVLEVVIMIGTVSMDDSCAALLAKSGIIPALIELLNAQQEDDEFVCQIIYVFYQMVFHQATRDVIIKETQAPAYLIDLMHDKNNEIRKVCDNTLDIIAEYDEEWAKKIQSEKFRWHNSQWLEMVESRQMDESEQYLYGDDRIEPYIHEGDILERPDLFYNSDGLIASEGAISPDFFNDYHLQNGDVVGQHSFPGSLGMDGFGQPVGILGRPATAYGFRPDEPYYYGYGS

SEQ ID NO: 44453 - protein, 2209 aa, Homo sapiens
  Payload ID: 9057
  Gene Symbol: KNTC1
  Gene Name: kinetochore associated 1
  Uniprot ID: P50748
  ENSP ID: ENSP00000328236
MWNDIELLTNDDTGSGYLSVGSRKEHGTALYQVDLLVKISSEKASLNPKIQACSLSDGFIIVADQSVILLDSICRSLQLHLVFDTEVDVVGLCQEGKFLLVGERSGNLHLIHVTSKQTLLTNAFVQKANDENRRTYQNLVIEKDGSNEGTYYMLLLTYSGFFCITNLQLLKIQQAIENVDFSTAKKLQGQIKSSFISTENYHTLGCLSLVAGDLASEVPVIIGGTGNCAFSKWEPDSSKKGMTVKNLIDAEIIKGAKKFQLIDNLLFVLDTDNVLSLWDIYTLTPVWNWPSLHVEEFLLTTEADSPSSVTWQGITNLKLIALTASANKKMKNLMVYSLPTMEILYSLEVSSVSSLVQTGISTDTIYLLEGVCKNDPKLSEDSVSVLVLRCLTEALPENRLSRLLHKHRFAEAESFAIQFGLDVELVYKVKSNHILEKLALSSVDASEQTEWQQLVDDAKENLHKIQDDEFVVNYCLKAQWITYETTQEMLNYAKTRLLKKEDKTALIYSDGLKEVLRAHAKLTTFYGAFGPEKFSGSSWIEFLNNEDDLKDIFLQLKEGNLVCAQYLWLRHRANFESRFDVKMLESLLNSMSASVSLQKLCPWFKNDVIPFVRRTVPEGQIILAKWLEQAARNLELTDKANWPENGLQLAEIFFTAEKTDELGLASSWHWISLKDYQNTEEVCQLRTLVNNLRELITLHRKYNCKLALSDFEKENTTTIVFRMFDKVLAPELIPSILEKFIRVYMREHDLQEEELLLLYIEDLLNRCSSKSTSLFETAWEAKAMAVIACLSDTDLIFDAVLKIMYAAVVPWSAAVEQLVKQHLEMDHPKVKLLQESYKLMEMKKLLRGYGIREVNLLNKEIMRVVRYILKQDVPSSLEDALKVAQAFMLSDDEIYSLRIIDLIDREQGEDCLLLLKSLPPAEAEKTAERVIIWARLALQEEPDHSKEGKAWRMSVAKTSVDILKILCDIQKDNLQKKDECEEMLKLFKEVASLQENFEVFLSFEDYSNSSLVADLREQHIKAHEVAQAKHKPGSTPEPIAAEVRSPSMESKLHRQALALQMSKQELEAELTLRALKDGNIKTALKKCSDLFKYHCNADTGKLLFLTCQKLCQMLADNVPVTVPVGLNLPSMIHDLASQAATICSPDFLLDALELCKHTLMAVELSRQCQMDDCGILMKASFGTHKDPYEEWSYSDFFSEDGIVLESQMVLPVIYELISSLVPLAESKRYPLESTSLPYCSLNEGDGLVLPVINSISALLQNLQESSQWELALRFVVGSFGTCLQHSVSNFMNATLSEKLFGETTLVKSRHVVMELKEKAVIFIRENATTLLHKVFNCRLVDLDLALGYCTLLPQKDVFENLWKLIDKAWQNYDKILAISLVGSELASLYQEIEMGLKFRELSTDAQWGIRLGKLGISFQPVFRQHFLTKKDLIKALVENIDMDTSLILEYCSTFQLDCDAVLQLFIETLLHNTNAGQGQGDASMDSAKRRHPKLLAKALEMVPLLTSTKDLVISLSGILHKLDPYDYEMIEVVLKVIERADEKITNININQALSILKHLKSYRRISPPVDLEYQYMLEHVITLPSAAQTRLPFHLIFFGTAQNFWKILSTELSEESFPTLLLISKLMKFSLDTLYVSTAKHVFEKKLKPKLLKLTQAKSSTLINKEITKITQTIESCLLSIVNPEWAVAIAISLAQDIPEGSFKISALKFCLYLAERWLQNIPSQDEKREKAEALLKKLHIQYRRSGTEAVLIAHKLNTEEYLRVIGKPAHLIVSLYEHPSINQRIQNSSGTDYPDIHAAAKEIAEVNEINLEKVWDMLLEKWLCPSTKPGEKPSELFELQEDEALRRVQYLLLSRPIDYSSRMLFVFATSTTTTLGMHQLTFAHRTRALQCLFYLADKETIESLFKKPIEEVKSYLRCITFLASFETLNIPITYELFCSSPKEGMIKGLWKNHSHESMAVRLVTELCLEYKIYDLQLWNGLLQKLLGFNMIPYLRKVLKAISSIHSLWQVPYFSKAWQRVIQIPLLSASCPLSPDQLSDCSESLIAVLECPVSGDLDLIGVARQYIQLELPAFALACLMLMPHSEKRHQQIKNFLGSCDPQVILKQLEEHMNTGQLAGFSHQIRSLILNNIINKKEFGILAKTKYFQMLKMHAMNTNNITELVNYLANDLSLDEASVLITEYSKHCGKPVPPDTAPCEILKMFLSGLS

SEQ ID NO: 44454 - protein, 104 aa, Homo sapiens
  Payload ID: 9057
  Gene Symbol: KNTC1
  Gene Name: kinetochore associated 1
  ENSP ID: ENSP00000397140
MDTSLILEYCSTFQLDCDAVLQLFIETLLHNTNAGQGQGDASMDSAKRRHPKLLAKALEMVPLLTSTKDLVISLSGILHKLDPYDYEMIEVVLKVIERADEKIT

SEQ ID NO: 44455 - protein, 1134 aa, Homo sapiens
  Payload ID: 9057
  Gene Symbol: KNTC1
  Gene Name: kinetochore associated 1
  ENSP ID: ENSP00000397992
MWNDIELLTNDDTGSGYLSVGSRKEHGTALYQVDLLVKISSEKASLNPKIQACSLSDGFIIVADQSVILLDSICRSLQLHLVFDTEVDVVGLCQEGKFLLVGERSGNLHLIHVTSKQTLLTNAFVQKANDENRRTYQNLVIEKDGSNEGTYYMLLLTYSGFFCITNLQLLKIQQAIENVDFSTAKKGTGNCAFSKWEPDSSKKGMTVKNLIDAEIIKGAKKFQLIDNLLFVLDTDNVLSLWDIYTLTPVWNWPSLHVEEFLLTTEADSPSSVTWQGITNLKLIALTASANKKMKNLMVYSLPTMEILYSLEVSSVSSLVQTGISTDTIYLLEGVCKNDPKLSEDSVSVLVLRCLTEALPENRLSRLLHKHRFAEAESFAIQFGLDVELVYKVKSNHILEKLALSSVDASEQTEWQQLVDDAKENLHKIQDDEFVVNYCLKAQWITYETTQEMLNYAKTRLLKKEDKTALIYSDGLKEVLRAHAKLTTFYGAFGPEKFSGSSWIEFLNNEDDLKDIFLQLKEGNLVCAQYLWLRHRANFESRFDVKMLESLLNSMSASVSLQKLCPWFKNDVIPFVRRTVPEGQIILAKWLEQAARNLELTDKANWPENGLQLAEIFFTAEKTDELGLASSWHWISLKDYQNTEEVCQLRTLVNNLRELITLHRKYNCKLALSDFEKENTTTIVFRMFDKVLAPELIPSILEKFIRVYMREHDLQEEELLLLYIEDLLNRCSSKSTSLFETAWEAKAMAVIACLSDTDKPSELFELQEDEALRRVQYLLLSRPIDYSSRMLFVFATSTTTTLGMHQLTFAHRTRALQCLFYLADKETIESLFKKPIEEVKSYLRCITFLASFETLNIPITYELFCSSPKEGMIKGLWKNHSHESMAVRLVTELCLEYKIYDLQLWNGLLQKLLGFNMIPYLRKVLKAISSIHSLWQVPYFSKAWQRVIQIPLLSASCPLSPDQLSDCSESLIAVLECPVSGDLDLIGVARQYIQLELPAFALACLMLMPHSEKRHQQIKNFLGSCDPQVILKQLEEHMNTGQLAGFSHQIRSLILNNIINKKEFGILAKTKYFQMLKMHAMNTNNITELVNYLANDLSLDEASVLITEYSKHCGKPVPPDTAPCEILKMFLSGLS

SEQ ID NO: 44456 - protein, 130 aa, Homo sapiens
  Payload ID: 9057
  Gene Symbol: KNTC1
  Gene Name: kinetochore associated 1
  ENSP ID: ENSP00000408760
MLMPHSEKRHQQIKNFLGSCDPQVILKQLEEHMNTGQLAGFSHQIRSLILNNIINKKEFGILAKTKYFQMLKMHAMNTNNITELVNYLANDLSLDEASVLITEYSKHCGKPVPPDTAPCEILKMFLSGLS

SEQ ID NO: 44457 - protein, 130 aa, Homo sapiens; identical to SEQ ID NO: 44456
  Payload ID: 9057
  Gene Symbol: KNTC1
  Gene Name: kinetochore associated 1
  ENSP ID: ENSP00000437344

SEQ ID NO: 44458 - protein, 208 aa, Homo sapiens
  Payload ID: 9057
  Gene Symbol: KNTC1
  Gene Name: kinetochore associated 1
  ENSP ID: ENSP00000439119
KVWDMLLEKWLCPSTKPGEKPSELFELQEDEALRRVQYLLLSRPIDYSSRMLFVFATSTTTTLGMHQLTFAHRTRALQCLFYLADKETIESLFKKPIEEVNSPKEGMIKGLWKNHSHESMAVRLVTELCLEYKIYDLQLWNGLLQKLLGFNMIPYLRKVLKAISSIHSLWQVPYFSKAWQRVIQIPLLSASCPLSPDQLSDCSESLIA

SEQ ID NO: 44459 - protein, 316 aa, Homo sapiens
  Payload ID: 9058
  Gene Symbol: KNSTRN
  Gene Name: kinetochore-localized astrin/SPAG5 binding protein
  Uniprot ID: Q9Y448
  ENSP ID: ENSP00000249776
MAAPEAPPLDRVFRTTWLSTECDSHPLPPSYRKFLFETQAADLAGGTTVAAGNLLNESEKDCGQDRRAPGVQPCRLVTMTSVVKTVYSLQPPSALSGGQPADTQTRATSKSLLPVRSKEVDVSKQLHSGGPENDVTKITKLRRENGQMKATDTATRRNVRKGYKPLSKQKSEEELKDKNQLLEAVNKQLHQKLTETQGELKDLTQKVELLEKFRDNCLAILESKGLDPALGSETLASRQESTTDHMDSMLLLETLQEELKLFNETAKKQMEELQALKVKLEMKEERVRFLEQQTLCNNQVNDLTTALKEMEQLLEM

SEQ ID NO: 44460 - protein, 286 aa, Homo sapiens
  Payload ID: 9058
  Gene Symbol: KNSTRN
  Gene Name: kinetochore-localized astrin/SPAG5 binding protein
  Uniprot ID: Q9Y448
  ENSP ID: ENSP00000391233
MAAPEAPPLDRVFRTTWLSTECDSHPLPPSYRKFLFETQAADLAGGTTVAAGNLLNESEKDCGQDRRAPGVQPCRLVTMTSVVKTVYSLQPPSALSGGQPADTQTRATSKSLLPVRSKEVDVSKQLHSGGPENDVTKITKLRRENGQMKATDTATRRNVRKGYKPLSKQKSEEELKDKNQLLEAVNKQLHQKLTETQGELKDLTQKVELLEKFRDNCLAILESKGLDPALGSETLASRQESTTDHMDSMLLLETLQEELKLFNETAKKQMEELQIAWMNHGILHQM

SEQ ID NO: 44461 - protein, 241 aa, Homo sapiens
  Payload ID: 9058
  Gene Symbol: KNSTRN
  Gene Name: kinetochore-localized astrin/SPAG5 binding protein
  Uniprot ID: Q9Y448
  ENSP ID: ENSP00000393001
MAAPEAPPLDRVFRTTWLSTECDSHPLPPSYRKFLFETQAADLAGGTTVAAGNLLNESEKDCGQDRRAPGVQPCRLVTMTSVVKTVYSLQPPSALSGGQPADTQTRATSKSLLPVRSKEVDVSKQLHSGGPENDVTKITKLRRENGQMKATDTATRRNVRKGYKPLSKQKSEEELKDKNQLLEAVNKQLHQKLTETQGELKDLTQKVELLEKFRDNCLAILESKGLDPVAVRNFARGAEAF

SEQ ID NO: 44462 - protein, 64 aa, Homo sapiens
  Payload ID: 9058
  Gene Symbol: KNSTRN
  Gene Name: kinetochore-localized astrin/SPAG5 binding protein
  ENSP ID: ENSP00000452758
VAAGNLLNESEKDCGQDRRAPGVQPCRLVTMTSVVKTVYSLQPPSALSGGQPAVQLLLQLQTTE

SEQ ID NO: 44463 - protein, 124 aa, Homo sapiens
  Payload ID: 9058
  Gene Symbol: KNSTRN
  Gene Name: kinetochore-localized astrin/SPAG5 binding protein
  ENSP ID: ENSP00000452788
  MOD_RES (1)..(1): Any amino acid
XVAAGNLLNESEKDCGQDRRAPGVQPCRLVTMTSVVKTVYSLQPPSALSGGQPADTQTRATSKSLLPVRSKEVDVSKQLHSGGPENDVTKITKLRRENGQMKATDTATRRNVRKGTTIITATNH

SEQ ID NO: 44464 - protein, 128 aa, Homo sapiens
  Payload ID: 9058
  Gene Symbol: KNSTRN
  Gene Name: kinetochore-localized astrin/SPAG5 binding protein
  ENSP ID: ENSP00000453126
  MOD_RES (1)..(1): Any amino acid
XFETQAADLAGGTTVAAGNLLNESEKDCGQDRRAPGVQPCRLVTMTSVVKTVYSLQPPSALSGGQPADTQTRATSKSLLPVRSKEVDVSKQLHSGGPENDVTKITKLRRENGQMKATDTATRRNVRKG

SEQ ID NO: 44465 - protein, 126 aa, Homo sapiens
  Payload ID: 9058
  Gene Symbol: KNSTRN
  Gene Name: kinetochore-localized astrin/SPAG5 binding protein
  ENSP ID: ENSP00000453213
MAAPEAPPLDRVFRTTWLSTECDSHPLPPSYRKFLFETQAADLAGGTTVAAGNLLNESEKDCGQDRRAPGVQPCRLVTMTSVVKTVYSLQPPSALSGGQPAGPKKSMFPNSFIQEVQRMMLQKSPN

SEQ ID NO: 44466 - protein, 217 aa, Homo sapiens
  Payload ID: 9058
  Gene Symbol: KNSTRN
  Gene Name: kinetochore-localized astrin/SPAG5 binding protein
  ENSP ID: ENSP00000453421
  MOD_RES (1)..(1): Any amino acid
XLNESEKDCGQDRRAPGVQPCRLVTMTSVVKTVYSLQPPSALSGGQPADTQTRATSKSLLPVRSKEVDVSKQLHSGGPENDVTKITKLRRENGQMKATDTATRRNVRKGRSFALVATQAGVQWRNLSSPQPPPPGFKRLSCLSLPNTWDYSYKPLSKQKSEEELKDKNQLLEAVNKQLHQKLTETQGELKDLTQKVELLEKFRDNCLAILESKGLDP

SEQ ID NO: 44467 - protein, 27 aa, Homo sapiens
  Payload ID: 9058
  Gene Symbol: KNSTRN
  Gene Name: kinetochore-localized astrin/SPAG5 binding protein
  ENSP ID: ENSP00000453867
  MOD_RES (1)..(1): Any amino acid
XTSVVKTVYSLQPPSALSGGQPAATNH

SEQ ID NO: 44468 - protein, 67 aa, Homo sapiens
  Payload ID: 9058
  Gene Symbol: KNSTRN
  Gene Name: kinetochore-localized astrin/SPAG5 binding protein
  ENSP ID: ENSP00000454086
  MOD_RES (1)..(1): Any amino acid
XTVAAGNLLNESEKDCGQDRRAPGVQPCRLVTMTSVVKTVYSLQPPSALSGGQPAEHLNGNPGTSGD

SEQ ID NO: 44469 - protein, 238 aa, Homo sapiens
  Payload ID: 9058
  Gene Symbol: KNSTRN
  Gene Name: kinetochore-localized astrin/SPAG5 binding protein
  ENSP ID: ENSP00000476263
MTSVVKTVYSLQPPSALSGGQPADTQTRATSKSLLPVRSKEVDVSKQLHSGGPENDVTKITKLRRENGQMKATDTATRRNVRKGYKPLSKQKSEEELKDKNQLLEAVNKQLHQKLTETQGELKDLTQKVELLEKFRDNCLAILESKGLDPALGSETLASRQESTTDHMDSMLLLETLQEELKLFNETAKKQMEELQALKVKLEMKEERVRFLEQQTLCNNQVNDLTTALKEMEQLLEM

SEQ ID NO: 44470 - protein, 644 aa, Homo sapiens
  Payload ID: 9059
  Gene Symbol: KNG1
  Gene Name: kininogen 1
  Uniprot ID: P01042
  ENSP ID: ENSP00000265023
MKLITILFLCSRLLLSLTQESQSEEIDCNDKDLFKAVDAALKKYNSQNQSNNQFVLYRITEATKTVGSDTFYSFKYEIKEGDCPVQSGKTWQDCEYKDAAKAATGECTATVGKRSSTKFSVATQTCQITPAEGPVVTAQYDCLGCVHPISTQSPDLEPILRHGIQYFNNNTQHSSLFMLNEVKRAQRQVVAGLNFRITYSIVQTNCSKENFLFLTPDCKSLWNGDTGECTDNAYIDIQLRIASFSQNCDIYPGKDFVQPPTKICVGCPRDIPTNSPELEETLTHTITKLNAENNATFYFKIDNVKKARVQVVAGKKYFIDFVARETTCSKESNEELTESCETKKLGQSLDCNAEVYVVPWEKKIYPTVNCQPLGMISLMKRPPGFSPFRSSRIGEIKEETTVSPPHTSMAPAQDEERDSGKEQGHTRRHDWGHEKQRKHNLGHGHKHERDQGHGHQRGHGLGHGHEQQHGLGHGHKFKLDDDLEHQGGHVLDHGHKHKHGHGHGKHKNKGKKNGKHNGWKTEHLASSSEDSTTPSAQTQEKTEGPTPIPSLAKPGVTVTFSDFQDSDLIATMMPPISPAPIQSDDDWIPDIQIDPNGLSFNPISDFPDTTSPKCPGRPWKSVSEINPTTQMKESYYFDLTDGLS

SEQ ID NO: 44471 - protein, 427 aa, Homo sapiens
  Payload ID: 9059
  Gene Symbol: KNG1
  Gene Name: kininogen 1
  Uniprot ID: P01042
  ENSP ID: ENSP00000287611
MKLITILFLCSRLLLSLTQESQSEEIDCNDKDLFKAVDAALKKYNSQNQSNNQFVLYRITEATKTVGSDTFYSFKYEIKEGDCPVQSGKTWQDCEYKDAAKAATGECTATVGKRSSTKFSVATQTCQITPAEGPVVTAQYDCLGCVHPISTQSPDLEPILRHGIQYFNNNTQHSSLFMLNEVKRAQRQVVAGLNFRITYSIVQTNCSKENFLFLTPDCKSLWNGDTGECTDNAYIDIQLRIASFSQNCDIYPGKDFVQPPTKICVGCPRDIPTNSPELEETLTHTITKLNAENNATFYFKIDNVKKARVQVVAGKKYFIDFVARETTCSKESNEELTESCETKKLGQSLDCNAEVYVVPWEKKIYPTVNCQPLGMISLMKRPPGFSPFRSSRIGEIKEETTSHLRSCEYKGRPPKAGAEPASEREVS

SEQ ID NO: 44472 - protein, 391 aa, Homo sapiens
  Payload ID: 9059
  Gene Symbol: KNG1
  Gene Name: kininogen 1
  Uniprot ID: P01042
  ENSP ID: ENSP00000396025
MKLITILFLCSRLLLSLTQESQSEEIDCNDKDLFKAVDAALKKYNSQNQSNNQFVLYRITEATKTVGSDTFYSFKYEIKEGDCPVQSGKTWQDCEYKDAAKAATGECTATVGKRSSTKFSVATQTCQITPAEGPVVTAQYDCLGCVHPISTQSPDLEPILRHGIQYFNNNTQHSSLFMLNEVKRAQRQDTGECTDNAYIDIQLRIASFSQNCDIYPGKDFVQPPTKICVGCPRDIPTNSPELEETLTHTITKLNAENNATFYFKIDNVKKARVQVVAGKKYFIDFVARETTCSKESNEELTESCETKKLGQSLDCNAEVYVVPWEKKIYPTVNCQPLGMISLMKRPPGFSPFRSSRIGEIKEETTSHLRSCEYKGRPPKAGAEPASEREVS

SEQ ID NO: 44473 - protein, 101 aa, Homo sapiens
  Payload ID: 9060
  Gene Symbol: KNCN
  Gene Name: kinocilin
  Uniprot ID: A6PVL3
  ENSP ID: ENSP00000379607
MDIPISSRDFRGLQLACVALGLVAGSIIIGISVSKAAAAMGGVFIGAAVLGSLRIHPHPGADHGEGRSSTNGNKEGARSSLSTVSRTLEKLKPGTRGAEEC

SEQ ID NO: 44474 - protein, 124 aa, Homo sapiens
  Payload ID: 9060
  Gene Symbol: KNCN
  Gene Name: kinocilin
  Uniprot ID: A6PVL3
  ENSP ID: ENSP00000419705
MDIPISSRDFRGLQLACVALGLVAGSIIIGISVSKAAAAMGGVFIGAAVLGLLILAYPFLKARFNLDHILPTIGSLRIHPHPGADHGEGRSSTNGNKEGARSSLSTVSRTLEKLKPGTRGAEEC

SEQ ID NO: 44475 - protein, 189 aa, Homo sapiens [sequence omitted]

SEQ ID NO: 44476 - protein, 188 aa, Homo sapiens [sequence omitted]

SEQ ID NO: 44477 - protein, 43 aa, Homo sapiens
  Payload ID: 9061
  Gene Symbol: KRAS
  Gene Name: Kirsten rat sarcoma viral oncogene homolog
  ENSP ID: ENSP00000451856
MTEYKLVVVGAGGVGKSALTIQLIQNHFVDEYDPTIEVLLSSM

SEQ ID NO: 44478 - protein, 75 aa, Homo sapiens
  Payload ID: 9061
  Gene Symbol: KRAS
  Gene Name: Kirsten rat sarcoma viral oncogene homolog
  ENSP ID: ENSP00000452512
MTEYKLVVVGAGGVGKSALTIQLIQNHFVDEYDPTIEGVDDAFYTLVREIRKHKEKMSKDGKKKKKKSKTKCVIM

SEQ ID NO: 44479 - protein, 138 aa, Homo sapiens
  Payload ID: 9062
  Gene Symbol: KISS1
  Gene Name: KiSS-1 metastasis-suppressor
  Uniprot ID: Q15726
  ENSP ID: ENSP00000356162
MNSLVSWQLLLFLCATHFGEPLEKVASVGNSRPTGQQLESLGLLAPGEQSLPCTERKPAATARLSRRGTSLSPPPESSGSPQQPGLSAPHSRQIPAPQGAVLVQREKDLPNYNWNSFGLRFGKREAAPGNHGRSAGRG

SEQ ID NO: 44480 - protein, 144 aa, Homo sapiens [sequence omitted]

SEQ ID NO: 44481 - protein, 398 aa, Homo sapiens
  Payload ID: 9063
  Gene Symbol: KISS1R
  Gene Name: KISS1 receptor
  Uniprot ID: Q969F8
  ENSP ID: ENSP00000234371
MHTVATSGPNASWGAPANASGCPGCGANASDGPVPSPRAVDAWLVPLFFAALMLLGLVGNSLVIYVICRHKPMRTVTNFYIANLAATDVTFLLCCVPFTALLYPLPGWVLGDFMCKFVNYIQQVSVQATCATLTAMSVDRWYVTVFPLRALHRRTPRLALAVSLSIWVGSAAVSAPVLALHRLSPGPRAYCSEAFPSRALERAFALYNLLALYLLPLLATCACYAAMLRHLGRVAVRPAPADSALQGQVLAERAGAVRAKVSRLVAAVVLLFAACWGPIQLFLVLQALGPAGSWHPRSYAAYALKTWAHCMSYSNSALNPLLYAFLGSHFRQAFRRVCPCAPRRPRRPRRPGPSDPAAPHAELLRLGSHPAPARAQKPGSSGLAARGLCVLGEDNAPL

SEQ ID NO: 44482 - protein, 97 aa, Homo sapiens
  Payload ID: 9063
  Gene Symbol: KISS1R
  Gene Name: KISS1 receptor
  ENSP ID: ENSP00000467666
MHTVATSGPNASWGAPANASGCPGCGANASDGPVPSPRAVDAWLVPLFFAALMLLGLVGNSLVIYVICRHKPMRTVTNFYIGLGAGHVCHSDRHECG

SEQ ID NO: 44483 - protein, 226 aa, Homo sapiens
  Payload ID: 9063
  Gene Symbol: KISS1R
  Gene Name: KISS1 receptor
  ENSP ID: ENSP00000475639
MHTVATSGPNASWGAPANASGCPGCGANASDGPVPSPRAVDAWLVPLFFAALMLLGLVGNSLVIYVICRHKPMRTVTNFYIANLAATDVTFLLCCVPFTALLYPLPGWVLGDFMCKFVNYIQQVSVQATCATLTAMSVDRWYVTVFPLRALHRRTPRLALAVSLSIWVGAGAGRARRRRAGQGLAAGGGRGPALRRLLGPHPAVPGAAGAGPRGLLAPTQLRRLRA

SEQ ID NO: 44484 - protein, 245 aa, Homo sapiens
  Payload ID: 9064
  Gene Symbol: KITLG
  Gene Name: KIT ligand
  Uniprot ID: P21583
  ENSP ID: ENSP00000054216
MKKTQTWILTCIYLQLLLFNPLVKTEGICRNRVTNNVKDVTKLVANLPKDYMITLKYVPGMDVLPSHCWISEMVVQLSDSLTDLLDKFSNISEGLSNYSIIDKLVNIVDDLVECVKENSSKDLKKSFKSPEPRLFTPEEFFRIFNRSIDAFKDFVVASETSDCVVSSTLSPEKGKAKNPPGDSSLHWAAMALPALFSLIIGFAFGALYWKKRQPSLTRAVENIQINEEDNEISMLQEKEREFQEV

SEQ ID NO: 44485 - protein, 273 aa, Homo sapiens
  Payload ID: 9064
  Gene Symbol: KITLG
  Gene Name: KIT ligand
  Uniprot ID: P21583
  ENSP ID: ENSP00000228280
MKKTQTWILTCIYLQLLLFNPLVKTEGICRNRVTNNVKDVTKLVANLPKDYMITLKYVPGMDVLPSHCWISEMVVQLSDSLTDLLDKFSNISEGLSNYSIIDKLVNIVDDLVECVKENSSKDLKKSFKSPEPRLFTPEEFFRIFNRSIDAFKDFVVASETSDCVVSSTLSPEKDSRVSVTKPFMLPPVAASSLRNDSSSSNRKAKNPPGDSSLHWAAMALPALFSLIIGFAFGALYWKKRQPSLTRAVENIQINEEDNEISMLQEKEREFQEV

SEQ ID NO: 44486 - protein, 56 aa, Homo sapiens
  Payload ID: 9064
  Gene Symbol: KITLG
  Gene Name: KIT ligand
  ENSP ID: ENSP00000474021
MALPALFSLIIGFAFGALYWKKRQPSLTRAVENIQINEEDNEISMLQEKEREFQEV

SEQ ID NO: 44487 - protein, 24 aa, Homo sapiens
  Payload ID: 9064
  Gene Symbol: KITLG
  Gene Name: KIT ligand
  ENSP ID: ENSP00000475042
MITLKYVPGMDVLPSHCWISEMVV

SEQ ID NO: 44488 - protein, 44 aa, Homo sapiens
  Payload ID: 9064
  Gene Symbol: KITLG
  Gene Name: KIT ligand
  ENSP ID: ENSP00000479271
ENSSKCFSVCCKRKRESFKKCNCGLYQHCYFRTLAGNSSCLLHK

SEQ ID NO: 44489 - protein, 538 aa, Homo sapiens
  Payload ID: 9065
  Gene Symbol: KIZ
  Gene Name: kizuna centrosomal protein
  ENSP ID: ENSP00000477873
KMLCSKDSLGLKEELTDEDREKVAVHEGINSGTAMSRGLYQPATIFMGRQMSAILSMRDFSTEHKSPQPTKNFSIPDPHSHRQTAQSSNVTDSCVVQTSNDTQCLNKSDNIDGKASLQIGEKMPVTASVLSEEEQTHCLEIGSNTRHGKSNLSEGKKSAELNSPLRERLSPENRTTDLKCDSSSGSEGEILTREHIEVEEKRASPPVSPIPVSEYCESENKWSQEKHSPWEGVSDHLAHREPKSQKPFRKMQEEEEESWSTSSDLTISISEDDLILESPEPQPNPGGKMEGEDGIEALKLIHAEQERVALSTEKNCILQTLSSPDSEKESSTNAPTREPGQTPDSDVPRAQVGQHVATLKEHDNSVKEEATALLRKALTEECGRRSAIHSSESSCSLPSILNDNSGIKEAKPAVWLNSVPTREQETEAYQLLKKATLQDNTNQTENRFQKTDASVSHLSGLNIGSGAFETKTANKIASEASFSSSEGSPLSRHENKKKPVINLKSNALWDESDDSNSEIEAALRPRNHNTDDSDDFYD

SEQ ID NO: 44490 - protein, 570 aa, Homo sapiens
  Payload ID: 9065
  Gene Symbol: KIZ
  Gene Name: kizuna centrosomal protein
  Uniprot ID: Q2M2Z5
  ENSP ID: ENSP00000478019
MQLEYETQIKKMLCSKDSLGLKEELTDEDREKVAVHEGINSGTAMSRGLYQPATIFMGRQMSAILSMRDFSTEHKSPQPTKNFSIPDPHSHRQTAQSSNVTDSCVVQTSNDTQCLNKSDNIDGKASLQIGEKMPVTASVLSEEEQTHCLEIGSNTRHGKSNLSEGKKSAELNSPLRERLSPENRTTDLKCDSSSGSEGEILTREHIEVEEKRASPPVSPIPVSEYCESENKWSQEKHSPWEGVSDHLAHREPKSQKPFRKMQEEEEESWSTSSDLTISISEDDLILESPEPQPNPGGKMEGEDGIEALKLIHAEQERVALSTEKNCILQTLSSPDSEKESSTNAPTREPGQTPDSDVPRAQVGQHVATLKEHDNSVKEEATALLRKALTEECGRRSAIHSSESSCSLPSILNDNSGIKEAKPAVWLNSVPTREQEVSSGCGDKSKKENVAADIPITETEAYQLLKKATLQDNTNQTENRFQKTDASVSHLSGLNIGSGAFETKTANKIASEASFSSSEGSPLSRHENKKKPVINLKSNALWDESDDSNSEIEAALRPRNHNTDDSDDFYD

SEQ ID NO: 44491 - protein, 673 aa, Homo sapiens
  Payload ID: 9065
  Gene Symbol: KIZ
  Gene Name: kizuna centrosomal protein
  Uniprot ID: Q2M2Z5
  ENSP ID: ENSP00000479542
MSRTLASAVPLSSPDYYERLGQLQHGLRDSEKKRLDLEKKLYEYNQSDTCRVKLKYVKLKNYLKEICESEKKAHTRNQEYLKRFERVQAHVVHFTTNTEKLQKLKLEYETQIKKMLCSKDSLGLKEELTDEDREKVAVHEGINSGTAMSRGLYQPATIFMGRQMSAILSMRDFSTEHKSPQPTKNFSIPDPHSHRQTAQSSNVTDSCVVQTSNDTQCLNKSDNIDGKASLQIGEKMPVTASVLSEEEQTHCLEIGSNTRHGKSNLSEGKKSAELNSPLRERLSPENRTTDLKCDSSSGSEGEILTREHIEVEEKRASPPVSPIPVSEYCESENKWSQEKHSPWEGVSDHLAHREPKSQKPFRKMQEEEEESWSTSSDLTISISEDDLILESPEPQPNPGGKMEGEDGIEALKLIHAEQERVALSTEKNCILQTLSSPDSEKESSTNAPTREPGQTPDSDVPRAQVGQHVATLKEHDNSVKEEATALLRKALTEECGRRSAIHSSESSCSLPSILNDNSGIKEAKPAVWLNSVPTREQEVSSGCGDKSKKENVAADIPITETEAYQLLKKATLQDNTNQTENRFQKTDASVSHLSGLNIGSGAFETKTANKIASEASFSSSEGSPLSRHENKKKPVINLKSNALWDESDDSNSEIEAALRPRNHNTDDSDDFYD

SEQ ID NO: 44492 - protein, 540 aa, Homo sapiens
  Payload ID: 9065
  Gene Symbol: KIZ
  Gene Name: kizuna centrosomal protein
  Uniprot ID: Q2M2Z5
  ENSP ID: ENSP00000480612
MQVAVHEGINSGTAMSRGLYQPATIFMGRQMSAILSMRDFSTEHKSPQPTKNFSIPDPHSHRQTAQSSNVTDSCVVQTSNDTQCLNKSDNIDGKASLQIGEKMPVTASVLSEEEQTHCLEIGSNTRHGKSNLSEGKKSAELNSPLRERLSPENRTTDLKCDSSSGSEGEILTREHIEVEEKRASPPVSPIPVSEYCESENKWSQEKHSPWEGVSDHLAHREPKSQKPFRKMQEEEEESWSTSSDLTISISEDDLILESPEPQPNPGGKMEGEDGIEALKLIHAEQERVALSTEKNCILQTLSSPDSEKESSTNAPTREPGQTPDSDVPRAQVGQHVATLKEHDNSVKEEATALLRKALTEECGRRSAIHSSESSCSLPSILNDNSGIKEAKPAVWLNSVPTREQEVSSGCGDKSKKENVAADIPITETEAYQLLKKATLQDNTNQTENRFQKTDASVSHLSGLNIGSGAFETKTANKIASEASFSSSEGSPLSRHENKKKPVINLKSNALWDESDDSNSEIEAALRPRNHNTDDSDDFYD

SEQ ID NO: 44493 - protein, 450 aa, Homo sapiens
  Payload ID: 9065
  Gene Symbol: KIZ
  Gene Name: kizuna centrosomal protein
  ENSP ID: ENSP00000480652
  MOD_RES (1)..(1): Any amino acid
XCVVQTSNDTQCLNKSDNIDGKASLQIGEKMPVTASVLSEEEQTHCLEIGSNTRHGKSNLSEGKKSAELNSPLRERLSPENRTTDLKCDSSSGSEGEILTREHIEVEEKRASPPVSPIPVSEYCESENKWSQEKHSPWEGVSDHLAHREPKSQKPFRKMQEEEEESWSTSSDLTISISEDDLILESPEPQPNPGGKMEGEDGIEALKLIHAEQERVALSTEKNCILQTLSSPDSEKESSTNAPTREPGQTPDSDVPRAQATALLRKALTEECGRRSAIHSSESSCSLPSILNDNSGIKEAKPAVWLNSVPTREQEVSSGCGDKSKKENVAADIPITETEAYQLLKKATLQDNTNQTENRFQKTDASVSHLSGLNIGSGAFETKTANKIASEASFSSSEGSPLSRHENKKKPVINLKSNALWDESDDSNSEIEAALRPRNHNTDDSDDFYD

SEQ ID NO: 44494 - protein, 61 aa, Homo sapiens
  Payload ID: 9065
  Gene Symbol: KIZ
  Gene Name: kizuna centrosomal protein
  ENSP ID: ENSP00000480859
MSRTLASAVPLSSPDYYERLGQLQHGLRDRFPWRLLHTFVPFVLDASGIFCFLDQRSIFTK

SEQ ID NO: 44495 - protein, 521 aa, Homo sapiens
  Payload ID: 9065
  Gene Symbol: KIZ
  Gene Name: kizuna centrosomal protein
  ENSP ID: ENSP00000483065
KKMLCSKDSLGLKEELTDEDREKVAVHEGINSGTAMSRGLYQPATIFMGRQMSAILSMRDFSTEHKSPQPTKNFSIPDPHSHRQTAQSSNVTDSCVVQTSNDTQCLNKSDNIDGKASLQIGEKMPVTASVLSEEEQTHCLEIGSNTRHGKSNLSEGKKSAELNSPLRERLSPENRTTDLKCDSSSGSEGEILTREHIEVEEKRASPPVSPIPVSEYCESENKWSQEKHSPWEGVSDHLAHREPKSQKPFRKMQEEEEESWSTSSDLTISISEDDLILESPEPQPNPGGKMEGEDGIEALKLIHAEQERVALSTEKNCILQTLSSPDSEKESSTNAPTREPGQTPDSDVPRAQVGQHVATLKEHDNSVKEEATALLRKALTEECGRRSAIHSSESSCSLPSILNDNSGIKEAKPAVWLNSVPTREQETEAYQLLKKATLQDNTNQTENRFQKTDASVSHLSGLNIGSGAFETKTANKIASEASFSSSEGSPLSRHENKKKPVINLKSNGERDNRTLDFLFLF

SEQ ID NO: 44496 - protein, 624 aa, Homo sapiens
  Payload ID: 9065
  Gene Symbol: KIZ
  Gene Name: kizuna centrosomal protein
  ENSP ID: ENSP00000483644
  MOD_RES (1)..(1): Any amino acid
XVGRSPSATPAERPPRGCAELAQRQQHEPDPRIGRAPVESRLLREAGPTPARAAGQLEYETQIKKMLCSKDSLGLKEELTDEDREKVAVHEGINSGTAMSRGLYQPATIFMGRQMSAILSMRDFSTEHKSPQPTKNFSIPDPHSHRQTAQSSNVTDSCVVQTSNDTQCLNKSDNIDGKASLQIGEKMPVTASVLSEEEQTHCLEIGSNTRHGKSNLSEGKKSAELNSPLRERLSPENRTTDLKCDSSSGSEGEILTREHIEVEEKRASPPVSPIPVSEYCESENKWSQEKHSPWEGVSDHLAHREPKSQKPFRKMQEEEEESWSTSSDLTISISEDDLILESPEPQPNPGGKMEGEDGIEALKLIHAEQERVALSTEKNCILQTLSSPDSEKESSTNAPTREPGQTPDSDVPRAQVGQHVATLKEHDNSVKEEATALLRKALTEECGRRSAIHSSESSCSLPSILNDNSGIKEAKPAVWLNSVPTREQEVSSGCGDKSKKENVAADIPITETEAYQLLKKATLQDNTNQTENRFQKTDASVSHLSGLNIGSGAFETKTANKIASEASFSSSEGSPLSRHENKKKPVINLKSNALWDESDDSNSEIEAALRPRNHNTDDSDDFYD

SEQ ID NO: 44497 - protein, 624 aa, Homo sapiens
  Payload ID: 9065
  Gene Symbol: KIZ
  Gene Name: kizuna centrosomal protein
  ENSP ID: ENSP00000484706
MVGRSPSATPAERPPRGCAELAQRQQHEPDPRIGRAPVESRLLREAGPTPARAAGQLEYETQIKKMLCSKDSLGLKEELTDEDREKVAVHEGINSGTAMSRGLYQPATIFMGRQMSAILSMRDFSTEHKSPQPTKNFSIPDPHSHRQTAQSSNVTDSCVVQTSNDTQCLNKSDNIDGKASLQIGEKMPVTASVLSEEEQTHCLEIGSNTRHGKSNLSEGKKSAELNSPLRERLSPENRTTDLKCDSSSGSEGEILTREHIEVEEKRASPPVSPIPVSEYCESENKWSQEKHSPWEGVSDHLAHREPKSQKPFRKMQEEEEESWSTSSDLTISISEDDLILESPEPQPNPGGKMEGEDGIEALKLIHAEQERVALSTEKNCILQTLSSPDSEKESSTNAPTREPGQTPDSDVPRAQVGQHVATLKEHDNSVKEEATALLRKALTEECGRRSAIHSSESSCSLPSILNDNSGIKEAKPAVWLNSVPTREQEVSSGCGDKSKKENVAADIPITETEAYQLLKKATLQDNTNQTENRFQKTDASVSHLSGLNIGSGAFETKTANKIASEASFSSSEGSPLSRHENKKKPVINLKSNALWDESDDSNSEIEAALRPRNHNTDDSDDFYD

SEQ ID NO: 44498 - protein, 1012 aa, Homo sapiens
  Payload ID: 9066
  Gene Symbol: KL
  Gene Name: klotho
  Uniprot ID: Q9UEF7
  ENSP ID: ENSP00000369442
MPASAPPRRPRPPPPSLSLLLVLLGLGGRRLRAEPGDGAQTWARFSRPPAPEAAGLFQGTFPDGFLWAVGSAAYQTEGGWQQHGKGASIWDTFTHHPLAPPGDSRNASLPLGAPSPLQPATGDVASDSYNNVFRDTEALRELGVTHYRFSISWARVLPNGSAGVPNREGLRYYRRLLERLRELGVQPVVTLYHWDLPQRLQDAYGGWANRALADHFRDYAELCFRHFGGQVKYWITIDNPYVVAWHGYATGRLAPGIRGSPRLGYLVAHNLLLAHAKVWHLYNTSFRPTQGGQVSIALSSHWINPRRMTDHSIKECQKSLDFVLGWFAKPVFIDGDYPESMKNNLSSILPDFTESEKKFIKGTADFFALCFGPTLSFQLLDPHMKFRQLESPNLRQLLSWIDLEFNHPQIFIVENGWFVSGTTKRDDAKYMYYLKKFIMETLKAIKLDGVDVIGYTAWSLMDGFEWHRGYSIRRGLFYVDFLSQDKMLLPKSSALFYQKLIEKNGFPPLPENQPLEGTFPCDFAWGVVDNYIQVDTTLSQFTDLNVYLWDVHHSKRLIKVDGVVTKKRKSYCVDFAAIQPQIALLQEMHVTHFRFSLDWALILPLGNQSQVNHTILQYYRCMASELVRVNITPVVALWQPMAPNQGLPRLLARQGAWENPYTALAFAEYARLCFQELGHHVKLWITMNEPYTRNMTYSAGHNLLKAHALAWHVYNEKFRHAQNGKISIALQADWIEPACPFSQKDKEVAERVLEFDIGWLAEPIFGSGDYPWVMRDWLNQRNNFLLPYFTEDEKKLIQGTFDFLALSHYTTILVDSEKEDPIKYNDYLEVQEMTDITWLNSPSQVAVVPWGLRKVLNWLKFKYGDLPMYIISNGIDDGLHAEDDQLRVYYMQNYINEALKAHILDGINLCGYFAYSFNDRTAPRFGLYRYAADQFEPKASMKHYRKIIDSNGFPGPETLERFCPEEFTVCTECSFFHTRKSLLAFIAFLFFASIISLSLIFYYSKKGRRSYK

SEQ ID NO: 44499 - protein, 1044 aa, Homo sapiens
  Payload ID: 9067
  Gene Symbol: KLB
  Gene Name: klotho beta
  Uniprot ID: Q86Z14
  ENSP ID: ENSP00000257408
MKPGCAAGSPGNEWIFFSTDEITTRYRNTMSNGGLQRSVILSALILLRAVTGFSGDGRAIWSKNPNFTPVNESQLFLYDTFPKNFFWGIGTGALQVEGSWKKDGKGPSIWDHFIHTHLKNVSSTNGSSDSYIFLEKDLSALDFIGVSFYQFSISWPRLFPDGIVTVANAKGLQYYSTLLDALVLRNIEPIVTLYHWDLPLALQEKYGGWKNDTIIDIFNDYATYCFQMFGDRVKYWITIHNPYLVAWHGYGTGMHAPGEKGNLAAVYTVGHNLIKAHSKVWHNYNTHFRPHQKGWLSITLGSHWIEPNRSENTMDIFKCQQSMVSVLGWFANPIHGDGDYPEGMRKKLFSVLPIFSEAEKHEMRGTADFFAFSFGPNNFKPLNTMAKMGQNVSLNLREALNWIKLEYNNPRILIAENGWFTDSRVKTEDTTAIYMMKNFLSQVLQAIRLDEIRVFGYTAWSLLDGFEWQDAYTIRRGLFYVDFNSKQKERKPKSSAHYYKQIIRENGFSLKESTPDVQGQFPCDFSWGVTESVLKPESVASSPQFSDPHLYVWNATGNRLLHRVEGVRLKTRPAQCTDFVNIKKQLEMLARMKVTHYRFALDWASVLPTGNLSAVNRQALRYYRCVVSEGLKLGISAMVTLYYPTHAHLGLPEPLLHADGWLNPSTAEAFQAYAGLCFQELGDLVKLWITINEPNRLSDIYNRSGNDTYGAAHNLLVAHALAWRLYDRQFRPSQRGAVSLSLHADWAEPANPYADSHWRAAERFLQFEIAWFAEPLFKTGDYPAAMREYIASKHRRGLSSSALPRLTEAERRLLKGTVDFCALNHFTTRFVMHEQLAGSRYDSDRDIQFLQDITRLSSPTRLAVIPWGVRKLLRWVRRNYGDMDIYITASGIDDQALEDDRLRKYYLGKYLQEVLKAYLIDKVRIKGYYAFKLAEEKSKPRFGFFTSDFKAKSSIQFYNKVISSRGFPFENSSSRCSQTQENTECTVCLFLVQKKPLIFLGCCFFSTLVLLLSIAIFQRQKRRKFWKAKNLQHIPLKKGKRVVS

SEQ ID NO: 44500 - protein, 150 aa, Homo sapiens
  Payload ID: 9068
  Gene Symbol: KLRC4-KLRK1
  Gene Name: KLRC4-KLRK1 readthrough
  ENSP ID: ENSP00000455951
  MOD_RES (1)..(1): Any amino acid
XEVSLAQDPKRQQRKLKGNKISISGTKQEIFQVELNLQNASSDHQGNDKTYHCKGLLPPPEKLTAEVLGIICIVLMATVLKTIVLIPCIGVLEQNNFSLNRRMQKARHCGHCPEEWITYSNSCYYIGKERRTWEERVCWPVLRRTLICFL

SEQ ID NO: 44501 - protein, 37 aa, Homo sapiens
  Payload ID: 9068
  Gene Symbol: KLRC4-KLRK1
  Gene Name: KLRC4-KLRK1 readthrough
  ENSP ID: ENSP00000456286
EEWITYSNSCYYIGKERRTWEERVCWPVLRRTLICFL

SEQ ID NO: 44502 - protein, 75 aa, Homo sapiens
  Payload ID: 9068
  Gene Symbol: KLRC4-KLRK1
  Gene Name: KLRC4-KLRK1 readthrough
  ENSP ID: ENSP00000457500
MATVLKTIVLIPCIGVLEQNNFSLNRRMQKARHCGHCPEEWITYSNSCYYIGKERRTWEERVCWPVLRRTLICFL

SEQ ID NO: 44503 - protein, 75 aa, Homo sapiens; identical to SEQ ID NO: 44502
  Payload ID: 9068
  Gene Symbol: KLRC4-KLRK1
  Gene Name: KLRC4-KLRK1 readthrough
  ENSP ID: ENSP00000465254

SEQ ID NO: 44504 - protein, 75 aa, Homo sapiens; identical to SEQ ID NO: 44502
  Payload ID: 9068
  Gene Symbol: KLRC4-KLRK1
  Gene Name: KLRC4-KLRK1 readthrough
  ENSP ID: ENSP00000465434

SEQ ID NO: 44505 - protein, 75 aa, Homo sapiens; identical to SEQ ID NO: 44502
  Payload ID: 9068
  Gene Symbol: KLRC4-KLRK1
  Gene Name: KLRC4-KLRK1 readthrough
  ENSP ID: ENSP00000466326

SEQ ID NO: 44506 - protein, 75 aa, Homo sapiens; identical to SEQ ID NO: 44502
  Payload ID: 9068
  Gene Symbol: KLRC4-KLRK1
  Gene Name: KLRC4-KLRK1 readthrough
  ENSP ID: ENSP00000467152

SEQ ID NO: 44507 - protein, 150 aa, Homo sapiens; identical to SEQ ID NO: 44500
  Payload ID: 9068
  Gene Symbol: KLRC4-KLRK1
  Gene Name: KLRC4-KLRK1 readthrough
  ENSP ID: ENSP00000467228
  MOD_RES (1)..(1): Any amino acid

SEQ ID NO: 44508 - protein, 35 aa, Homo sapiens
  Payload ID: 9068
  Gene Symbol: KLRC4-KLRK1
  Gene Name: KLRC4-KLRK1 readthrough
  ENSP ID: ENSP00000467316
  MOD_RES (1)..(1): Any amino acid
XITYSNSCYYIGKERRTWEERVCWPVLRRTLICFL

SEQ ID NO: 44509 - protein, 75 aa, Homo sapiens; identical to SEQ ID NO: 44502
  Payload ID: 9068
  Gene Symbol: KLRC4-KLRK1
  Gene Name: KLRC4-KLRK1 readthrough
  ENSP ID: ENSP00000467880

SEQ ID NO: 44510 - protein, 75 aa, Homo sapiens; identical to SEQ ID NO: 44502
  Payload ID: 9068
  Gene Symbol: KLRC4-KLRK1
  Gene Name: KLRC4-KLRK1 readthrough
  ENSP ID: ENSP00000468074

SEQ ID NO: 44511 - protein, 75 aa, Homo sapiens; identical to SEQ ID NO: 44502
  Payload ID: 9068
  Gene Symbol: KLRC4-KLRK1
  Gene Name: KLRC4-KLRK1 readthrough
  ENSP ID: ENSP00000468432

SEQ ID NO: 44512 - protein, 283 aa, Homo sapiens
  Payload ID: 9069
  Gene Symbol: KANK1
  Gene Name: KN motif and ankyrin repeat domains 1
  ENSP ID: ENSP00000371723
  MOD_RES (1)..(1): Any amino acid
XYELSEKMLSACNLLKNTINDPKALTSKDMRFCLNTLQHEWFRVSSQKSAIPAMVGDYIAAFEAISPDVLRYVINLADGNGNTALHYSVSHSNFEIVKLLLDADVCNVDHQNKAGYTPIMLAALAAVEAEKDMRIVEELFGCGDVNAKASQAGQTALMLAVSHGRIDMVKGLLACGADVNIQDDEGSTALMCASEHGHVEIVKLLLAQPGCNGHLEDNDGSTALSIALEAGHKDIAVLLYAHVNFAKAQSPVSVVHLAFVNRLKSTRLVDPLPPGIDGRQILC

SEQ ID NO: 44513 - protein, 352 aa, Homo sapiens
  Payload ID: 9069
  Gene Symbol: KANK1
  Gene Name: KN motif and ankyrin repeat domains 1
  ENSP ID: ENSP00000371726
ECDVIEYPLEEEEEEEDEDTRGMAEGHHAVNIEGLKSARVEDEMQVQECEPEKVEIRERYELSEKMLSACNLLKNTINDPKALTSKDMGQVQWLTPMIPTLREADAGGSHERFCLNTLQHEWFRVSSQKSAIPAMVGDYIAAFEAISPDVLRYVINLADGNGNTALHYSVSHSNFEIVKLLLDADVCNVDHQNKAGYTPIMLAALAAVEAEKDMRIVEELFGCGDVNAKASQAGQTALMLAVSHGRIDMVKGLLACGADVNIQDDEGSTALMCASEHGHVEIVKLLLAQPGCNGHLEDNDGSTALSIALEAGHKDIAVLLYAHVNFAKAQSPGTPRLGRKTSPGPTHRGSFD

SEQ ID NO: 44514 - protein, 1194 aa, Homo sapiens
  Payload ID: 9069
  Gene Symbol: KANK1
  Gene Name: KN motif and ankyrin repeat domains 1
  Uniprot ID: Q14678
  ENSP ID: ENSP00000371730
METRRRLEQERATMQMTPGEFRRPRLASFGGMGTTSSLPSFVGSGNHNPAKHQLQNGYQGNGDYGSYAPAAPTTSSMGSSIRHSPLSSGISTPVTNVSPMHLQHIREQMAIALKRLKELEEQVRTIPVLQVKISVLQEEKRQLVSQLKNQRAASQINVCGVRKRSYSAGNASQLEQLSRARRSGGELYIDYEEEEMETVEQSTQRIKEFRQLTADMQALEQKIQDSSCEASSELRENGECRSVAVGAEENMNDIVVYHRGSRSCKDAAVGTLVEMRNCGVSVTEAMLGVMTEADKEIELQQQTIESLKEKIYRLEVQLRETTHDREMTKLKQELQAAGSRKKVDKATMAQPLVFSKVVEAVVQTRDQMVGSHMDLVDTCVGTSVETNSVGISCQPECKNKVVGPELPMNWWIVKERVEMHDRCAGRSVEMCDKSVSVEVSVCETGSNTEESVNDLTLLKTNLNLKEVRSIGCGDCSVDVTVCSPKECASRGVNTEAVSQVEAAVMAVPRTADQDTSTDLEQVHQFTNTETATLIESCTNTCLSTLDKQTSTQTVETRTVAVGEGRVKDINSSTKTRSIGVGTLLSGHSGFDRPSAVKTKESGVGQININDNYLVGLKMRTIACGPPQLTVGLTASRRSVGVGDDPVGESLENPQPQAPLGMMTGLDHYIERIQKLLAEQQTLLAENYSELAEAFGEPHSQMGSLNSQLISTLSSINSVMKSASTEELRNPDFQKTSLGKITGNYLGYTCKCGGLQSGSPLSSQTSQPEQEVGTSEGKPISSLDAFPTQEGTLSPVNLTDDQIAAGLYACTNNESTLKSIMKKKDGNKDSNGAKKNLQFVGINGGYETTSSDDSSSDESSSSESDDECDVIEYPLEEEEEEEDEDTRGMAEGHHAVNIEGLKSARVEDEMQVQECEPEKVEIRERYELSEKMLSACNLLKNTINDPKALTSKDMRFCLNTLQHEWFRVSSQKSAIPAMVGDYIAAFEAISPDVLRYVINLADGNGNTALHYSVSHSNFEIVKLLLDADVCNVDHQNKAGYTPIMLAALAAVEAEKDMRIVEELFGCGDVNAKASQAGQTALMLAVSHGRIDMVKGLLACGADVNIQDDEGSTALMCASEHGHVEIVKLLLAQPGCNGHLEDNDGSTALSIALEAGHKDIAVLLYAHVNFAKAQSPGTPRLGRKTSPGPTHRGSFD

SEQ ID NO: 44515 - protein, 1352 aa, Homo sapiens
  Payload ID: 9069
  Gene Symbol: KANK1
  Gene Name: KN motif and ankyrin repeat domains 1
  Uniprot ID: Q14678
  ENSP ID: ENSP00000371734
MAHTTKVNGSASGKAGDILSGDQDKEQKDPYFVETPYGYQLDLDFLKYVDDIQKGNTIKRLNIQKRRKPSVPCPEPRTTSGQQGIWTSTESLSSSNSDDNKQCPNFLIARSQVTSTPISKPPPPLETSLPFLTIPENRQLPPPSPQLPKHNLHVTKTLMETRRRLEQERATMQMTPGEFRRPRLASFGGMGTTSSLPSFVGSGNHNPAKHQLQNGYQGNGDYGSYAPAAPTTSSMGSSIRHSPLSSGISTPVTNVSPMHLQHIREQMAIALKRLKELEEQVRTIPVLQVKISVLQEEKRQLVSQLKNQRAASQINVCGVRKRSYSAGNASQLEQLSRARRSGGELYIDYEEEEMETVEQSTQRIKEFRQLTADMQALEQKIQDSSCEASSELRENGECRSVAVGAEENMNDIVVYHRGSRSCKDAAVGTLVEMRNCGVSVTEAMLGVMTEADKEIELQQQTIESLKEKIYRLEVQLRETTHDREMTKLKQELQAAGSRKKVDKATMAQPLVFSKVVEAVVQTRDQMVGSHMDLVDTCVGTSVETNSVGISCQPECKNKVVGPELPMNWWIVKERVEMHDRCAGRSVEMCDKSVSVEVSVCETGSNTEESVNDLTLLKTNLNLKEVRSIGCGDCSVDVTVCSPKECASRGVNTEAVSQVEAAVMAVPRTADQDTSTDLEQVHQFTNTETATLIESCTNTCLSTLDKQTSTQTVETRTVAVGEGRVKDINSSTKTRSIGVGTLLSGHSGFDRPSAVKTKESGVGQININDNYLVGLKMRTIACGPPQLTVGLTASRRSVGVGDDPVGESLENPQPQAPLGMMTGLDHYIERIQKLLAEQQTLLAENYSELAEAFGEPHSQMGSLNSQLISTLSSINSVMKSASTEELRNPDFQKTSLGKITGNYLGYTCKCGGLQSGSPLSSQTSQPEQEVGTSEGKPISSLDAFPTQEGTLSPVNLTDDQIAAGLYACTNNESTLKSIMKKKDGNKDSNGAKKNLQFVGINGGYETTSSDDSSSDESSSSESDDECDVIEYPLEEEEEEEDEDTRGMAEGHHAVNIEGLKSARVEDEMQVQECEPEKVEIRERYELSEKMLSACNLLKNTINDPKALTSKDMRFCLNTLQHEWFRVSSQKSAIPAMVGDYIAAFEAISPDVLRYVINLADGNGNTALHYSVSHSNFEIVKLLLDADVCNVDHQNKAGYTPIMLAALAAVEAEKDMRIVEELFGCGDVNAKASQAGQTALMLAVSHGRIDMVKGLLACGADVNIQDDEGSTALMCASEHGHVEIVKLLLAQPGCNGHLEDNDGSTALSIALEAGHKDIAVLLYAHVNFAKAQSPGTPRLGRKTSPGPTHRGSFD

SEQ ID NO: 44516 - protein, 1352 aa, Homo sapiens; identical to SEQ ID NO: 44515
  Payload ID: 9069
  Gene Symbol: KANK1
  Gene Name: KN motif and ankyrin repeat domains 1
  Uniprot ID: Q14678
  ENSP ID: ENSP00000371740

SEQ ID NO: 44517 - protein, 1352 aa, Homo sapiens; identical to SEQ ID NO: 44515
  Payload ID: 9069
  Gene Symbol: KANK1
  Gene Name: KN motif and ankyrin repeat domains 1
  Uniprot ID: Q14678
  ENSP ID: ENSP00000477725

SEQ ID NO: 44518 - protein, 2 aa, Homo sapiens
  Payload ID: 9070
  Gene Symbol: KANK2
  Gene Name: KN motif and ankyrin repeat domains 2
  ENSP ID: ENSP00000464861
MA

SEQ ID NO: 44519 - protein, 221 aa, Homo sapiens
  Payload ID: 9070
  Gene Symbol: KANK2
  Gene Name: KN motif and ankyrin repeat domains 2
  ENSP ID: ENSP00000464896
  MOD_RES (1)..(1): Any amino acid
XEKYLDNPNALTERELKVAYTTVLQEWLRLACRSDAHPELVRRHLVTFRAMSARLLDYVVNIADSNGNTALHYSVSHANFPVVQQLLDSGVCKVDKQNRAGYSPIMLTALATLKTQDDIETVLQLFRLGNINAKASQAGQTALMLAVSHGRVDVVKALLACEADVNVQDDDGSTALMCACEHGHKEIAGLLLAVPSCDISLTDRFAPMSDDESPTSSSAEE

SEQ ID NO: 44520 - protein, 851 aa, Homo sapiens
  Payload ID: 9070
  Gene Symbol: KANK2
  Gene Name: KN motif and ankyrin repeat domains 2
  Uniprot ID: Q63ZY3
  ENSP ID: ENSP00000465650
MAQVLHVPAPFPGTPGPASPPAFPAKDPDPPYSVETPYGYRLDLDFLKYVDDIEKGHTLRRVAVQRRPRLSSLPRGPGSWWTSTESLCSNASGDSRHSAYSYCGRGFYPQYGALETRGGFNPRVERTLLDARRRLEDQAATPTGLGSLTPSAAGSTASLVGVGLPPPTPRSSGLSTPVPPSAGHLAHVREQMAGALRKLRQLEEQVKLIPVLQVKLSVLQEEKRQLTVQLKSQKFLGHPTAGRGRSELCLDLPDPPEDPVALETRSVGTWVRERDLGMPDGEAALAAKVAVLETQLKKALQELQAAQARQADPQPQAWPPPDSPVRVDTVRVVEGPREVEVVASTAAGAPAQRAQSLEPYGTGLRALAMPGRPESPPVFRSQEVVETMCPVPAAATSNVHMVKKISITERSCDGAAGLPEVPAESSSSPPGSEVASLTQPEKSTGRVPTQEPTHREPTRQAASQESEEAGGTGGPPAGVRSIMKRKEEVADPTAHRRSLQFVGVNGGYESSSEDSSTAENISDNDSTENEAPEPRERVPSVAEAPQLRPAGTAAAKTSRQECQLSRESQHIPTAEGASGSNTEEEIRMELSPDLISACLALEKYLDNPNALTERELKVAYTTVLQEWLRLACRSDAHPELVRRHLVTFRAMSARLLDYVVNIADSNGNTALHYSVSHANFPVVQQLLDSGVCKVDKQNRAGYSPIMLTALATLKTQDDIETVLQLFRLGNINAKASQAGQTALMLAVSHGRVDVVKALLACEADVNVQDDDGSTALMCACEHGHKEIAGLLLAVPSCDISLTDRDGSTALMVALDAGQSEIASMLYSRMNIKCSFAPMSDDESPTSSSAEE

SEQ ID NO: 44521 - protein, 44 aa, Homo sapiens
  Payload ID: 9070
  Gene Symbol: KANK2
  Gene Name: KN motif and ankyrin repeat domains 2
  ENSP ID: ENSP00000465914
MAQVLHVPAPFPGTPGPASPPAFPAKDPDPPYSVETPYGYRLDL

SEQ ID NO: 44522 - protein, 841 aa, Homo sapiens
  Payload ID: 9070
  Gene Symbol: KANK2
  Gene Name: KN motif and ankyrin repeat domains 2
  Uniprot ID: Q63ZY3
  ENSP ID: ENSP00000467029
MAQVLHVPAPFPGTPGPASPPAFPAKDPDPPYSVETPYGYRLDLDFLKYVDDIEKGHTLRRVAVQRRPRLSSLPRGPGSWWTSTESLCSNASGDSRHSAYSYCGRGFYPQYGALETRGGFNPRVERTLLDARRRLEDQAATPTGLGSLTPSAAGSTASLVGVGLPPPTPRSSGLSTPVPPSAGHLAHVREQMAGALRKLRQLEEQVKLIPVLQVKLSVLQEEKRQLTVQLKSQKFLGHPTAGRGRSELCLDLPDPPEDPVALETRSVGTWVRERDLGMPDGEAALAAKVAVLETQLKKALQELQAAQARQADPQPQAWPPPDSPVRVDTVRVVEGPREVEVVASTAAGAPAQRAQSLEPYGTGLRALAMPGRPESPPVFRSQEVVETMCPVPAAATSNVHMVKKISITERSCDGAAGLPEVPAESSSSPPGSEVASLTQPEKSTGRVPTQEPTHREPTRQAASQESEEAGGTGGPPAGVRSIMKRKEEVADPTAHRRSLQFVGVNGGYESSSEDSSTAENISDNDSTENEAPEPRERVPSVAEAPQLRPAGTAAAKTSRQECQLSRESQHIPTAEGASGSNTEEEIRMELSPDLISACLALEKYLDNPNALTERELKVAYTTVLQEWLRLACRSDAHPELVRRHLVTFRAMSARLLDYVVNIADSNGNTALHYSVSHANFPVVQQLLDSGVCKVDKQNRAGYSPIMLTALATLKTQDDIETVLQLFRLGNINAKASQAGQTALMLAVSHGRVDVVKALLACEADVNVQDDDGSTALMCACEHGHKEIAGLLLAVPSCDISLTDRDGSTALMVALDAGQSEIASMLYSRMNIKCSVSLNPAG

SEQ ID NO: 44523 - protein, 859 aa, Homo sapiens
  Payload ID: 9070
  Gene Symbol: KANK2
  Gene Name: KN motif and ankyrin repeat domains 2
  Uniprot ID: Q63ZY3
  ENSP ID: ENSP00000468002
MAQVLHVPAPFPGTPGPASPPAFPAKDPDPPYSVETPYGYRLDLDFLKYVDDIEKGHTLRRVAVQRRPRLSSLPRGPGSWWTSTESLCSNASGDSRHSAYSYCGRGFYPQYGALETRGGFNPRVERTLLDARRRLEDQAATPTGLGSLTPSAAGSTASLVGVGLPPPTPRSSGLSTPVPPSAGHLAHVREQMAGALRKLRQLEEQVKLIPVLQVKLSVLQEEKRQLTVQLKSQKFLGHPTAGRGRSELCLDLPDPPEDPVALETRSVGTWVRERDLGMPDGEAALAAKVAVLETQLKKALQELQAAQARQADPQPQAWPPPDSPVRVDTVRVVEGPREVEVVASTAAGAPAQRAQSLEPYGTGLRALAMPGRPESPPVFRSQEVVETMCPVPAAATSNVHMVKKISITERSCDGAAGLPEVPAESSSSPPGSEVASLTQPEKSTGRVPTQEPTHREPTRQAASQESEEAGGTAPPLSSPPGGPPAGVRSIMKRKEEVADPTAHRRSLQFVGVNGGYESSSEDSSTAENISDNDSTENEAPEPRERVPSVAEAPQLRPAGTAAAKTSRQECQLSRESQHIPTAEGASGSNTEEEIRMELSPDLISACLALEKYLDNPNALTERELKVAYTTVLQEWLRLACRSDAHPELVRRHLVTFRAMSARLLDYVVNIADSNGNTALHYSVSHANFPVVQQLLDSGVCKVDKQNRAGYSPIMLTALATLKTQDDIETVLQLFRLGNINAKASQAGQTALMLAVSHGRVDVVKALLACEADVNVQDDDGSTALMCACEHGHKEIAGLLLAVPSCDISLTDRDGSTALMVALDAGQSEIASMLYSRMNIKCSFAPMSDDESPTSSSAEE

SEQ ID NO: 44524 - protein, 122 aa, Homo sapiens
  Payload ID: 9070
  Gene Symbol: KANK2
  Gene Name: KN motif and ankyrin repeat domains 2
  ENSP ID: ENSP00000468409
MPDGEAALAAKVAVLETQLKKALQELQAAQARQADPQPQAWPPPDSPVRVDTVRVVEGPREVEVVASTAAGAPAQRAQSLEPYGTGLRALAMPGRPESPPVFRSQEVVETMCPVPAAATSNV

SEQ ID NO: 44525 - protein, 147 aa, Homo sapiens
  Payload ID: 9070
  Gene Symbol: KANK2
  Gene Name: KN motif and ankyrin repeat domains 2
  ENSP ID: ENSP00000468490
MAQVLHVPAPFPGTPGPASPPAFPAKDPDPPYSVETPYGYRLDLDFLKYVDDIEKGHTLRRVAVQRRPRLSSLPRGPGSWWTSTESLCSNASGDSRHSAYSYCGRGFYPQYGALETRGGFNPRVERTLLDARRRLEDQAATPTGLGS

SEQ ID NO: 44526 - protein, 821 aa, Homo sapiens
  Payload ID: 9071
  Gene Symbol: KANK3
  Gene Name: KN motif and ankyrin repeat domains 3
  Uniprot ID: Q6NY19
  ENSP ID: ENSP00000328923
MAKFALNQNLPDLGGPRLCPVPAAGGARSPSSPYSVETPYGFHLDLDFLKYIEELERGPAARRAPGPPTSRRPRAPRPGLAGARSPGAWTSSESLASDDGGAPGILSQGAPSGLLMQPLSPRAPVRNPRVEHTLRETSRRLELAQTHERAPSPGRGVPRSPRGSGRSSPAPNLAPASPGPAQLQLVREQMAAALRRLRELEDQARTLPELQEQVRALRAEKARLLAGRAQPEPDGEAETRPDKLAQLRRLTERLATSERGGRARASPRADSPDGLAAGRSEGALQVLDGEVGSLDGTPQTREVAAEAVPETREAGAQAVPETREAGVEAAPETVEADAWVTEALLGLPAAAERELELLRASLEHQRGVSELLRGRLRELEEAREAAEEAAAGARAQLREATTQTPWSCAEKAAQTESPAEAPSLTQESSPGSMDGDRAVAPAGILKSIMKKRDGTPGAQPSSGPKSLQFVGVLNGEYESSSSEDASDSDGDSENGGAEPPGSSSGSGDDSGGGSDSGTPGPPSGGDIRDPEPEAEAEPQQVAQGRCELSPRLREACVALQRQLSRPRGVASDGGAVRLVAQEWFRVSSQRRSQAEPVARMLEGVRRLGPELLAHVVNLADGNGNTALHYSVSHGNLAIASLLLDTGACEVNRQNRAGYSALMLAALTSVRQEEEDMAVVQRLFCMGDVNAKASQTGQTALMLAISHGRQDMVATLLACGADVNAQDADGATALMCASEYGRLDTVRLLLTQPGCDPAILDNEGTSALAIALEAEQDEVAALLHAHLSSGQPDTQSESPPGSQTATPGEGECGDNGENPQVQ

SEQ ID NO: 44527 - protein, 146 aa, Homo sapiens
  Payload ID: 9071
  Gene Symbol: KANK3
  Gene Name: KN motif and ankyrin repeat domains 3
  ENSP ID: ENSP00000470585
MAKFALNQNLPGILKSIMKKRDGTPGAQPSSGPKSLQFVGVLNGEYESSSSEDASDSDGDSENGGAEPPGSSSGSGDDSGGGSDSGTPGPPSGGDIRDPEPEAEAEPQQVAQGRCELSPRLREACVALQRQLSRPRGVASDGGAVR

SEQ ID NO: 44528 - protein, 840 aa, Homo sapiens
  Payload ID: 9071
  Gene Symbol: KANK3
  Gene Name: KN motif and ankyrin repeat domains 3
  Uniprot ID: Q6NY19
  ENSP ID: ENSP00000470728
MAKFALNQNLPDLGGPRLCPVPAAGGARSPSSPYSVETPYGFHLDLDFLKYIEELERGPAARRAPGPPTSRRPRAPRPGLAGARSPGAWTSSESLASDDGGAPGILSQGAPSGLLMQPLSPRAPVRNPRVEHTLRETSRRLELAQTHERAPSPGRGVPRSPRGSGRSSPAPNLAPASPGPAQLQLVREQMAAALRRLRELEDQARTLPELQEQVRALRAEKARLLAGRAQPEPDGEAETRPDKLAQLRRLTERLATSERGGRARASPRADSPDGLAAGRSEGALQVLDGEVGSLDGTPQTREVAAEAVPETREAGAQAVPETREAGVEAAPETVEADAWVTEALLGLPAAAERELELLRASLEHQRGVSELLRGRLRELEEAREAAEEAAAGARAQLREATTQTPWSCAEKAAQTESPAEAPSLTQESSPGSMDGDRAVAPAGILKSIMKKRDGTPGAQPSSGPKSLQFVGVLNGEYESSSSEDASDSDGDSENGGAEPPGSSSGSGDDSGGGSDSGTPGPPSGGDIRDPEPEAEAEPQQVAQGRCELSPRLREACVALQRQLSRPRGVASDGGAVRLVAQEWFRVSSQRRSQAEPVARMLEGVRRLGPELLAHVVNLADGNGNTALHYSVSHGNLAIASLLLDTGACEVNRQNRAGYSALMLAALTSVRQEEEDMAVVQRLFCMGDVNAKASQTGQTALMLAISHGRQDMVATLLACGADVNAQDADGATALMCASEYGRLDTVRLLLTQPGCDPAILDNEGTSALAIALEAEQDEVAALLHAHLSSGQPDTQAGVQRHNLSSLQPPPPRFKKFSCLSLPSSWDYNSCEPSRLAQLTIF

SEQ ID NO: 44529 - protein, 212 aa, Homo sapiens
  Payload ID: 9071
  Gene Symbol: KANK3
  Gene Name: KN motif and ankyrin repeat domains 3
  ENSP ID: ENSP00000484877
MATARTVAPSPRVAPRAPGMTAAGDPTRAPLALPAAGTSGTLSPRRRQSLSRWHRGGERRSLVVWRGGGCPPPGRRCPRSILSLSWPPLQVRAEPASEGGVRSAAAAAEPAPRSASDGGAVRLVAQEWFRVSSQRRSQAEPVARMLEGVRRLGPELLAHVVNLADGNGNTALHYSVSHGNLAIASLLLDTGQSQGRVGGHQEMGGGRGQGLT

SEQ ID NO: 44530 - protein, 133 aa, Homo sapiens
  Payload ID: 9072
  Gene Symbol: KANK4
  Gene Name: KN motif and ankyrin repeat domains 4
  ENSP ID: ENSP00000321161
MITPLASAETNEDMAVVWKLLREGNVNIQATQGGQTALMLGVSHDREDMVQALLSCQADVNLQDHDGSSALMVACHHGNVDLVRLLLAHPACDSSLTDKAGRTALSIALKSPTHMEIAGLLRAHAEQGRSLGL

SEQ ID NO: 44531 - protein, 367 aa, Homo sapiens
  Payload ID: 9072
  Gene Symbol: KANK4
  Gene Name: KN motif and ankyrin repeat domains 4
  Uniprot ID: Q5T7N3
  ENSP ID: ENSP00000346352
MEKTDEISPSTSLKSIMKKKDYGFRAGGNGTKKNLQFVGVNGGYETTSSEETSGEDSTPEDLSDSEAEKKCDGPDHKHVKDAHLTCEAGQGIPEGTCHAAQESGPGEEVPHSKAERYKPSEEFLNACRALSQHLPETGTTTDQLLRQSLNTISQEWFRVSSRKSSSPAVVASYLHEVQPHSPHFLKLLVNLADHNGNTALHYSVSHSNFSIVKLLLETGVCNVDHQNKAGYTAVMITPLASAETNEDMAVVWKLLREGNVNIQATQGGQTALMLGVSHDREDMVQALLSCQADVNLQDHDGSSALMVACHHGNVDLVRLLLAHPACDSSLTDKAGRTALSIALKSPTHMEIAGLLRAHAEQGRSLGL

SEQ ID NO: 44532 - protein, 351 aa, Homo sapiens
  Payload ID: 9072
  Gene Symbol: KANK4
  Gene Name: KN motif and ankyrin repeat domains 4
  ENSP ID: ENSP00000360192
MKKKDYGFRAGGNGTKKNLQFVGVNGGYETTSSEETSGEDSTPEDLSDSEAEKKCDGPDHKHVKDAHLTCEAGQGIPEGTCHAAQESGPGEEVPHSKAERYKPSEEFLNACRALSQHLPETGTTTDQLLRQSLNTISQEWFRVSSRKSSSPAVVASYLHEVQPHSPHFLKLLVNLADHNGNTALHYSVSHSNFSIVKLLLETGVCNVDHQNKAGYTAVMITPLASAETNEDMAVVWKLLREGNVNIQATQGGQTALMLGVSHDREDMVQALLSCQADVNLQDHDGSSALMVACHHGNVDLVRLLLAHPACDSSLTDKAGRTALSIALKSPTHMEIAGLLRAHAEQGRSLGL

SEQ ID NO: 44533 - protein, 995 aa, Homo sapiens
  Payload ID: 9072
  Gene Symbol: KANK4
  Gene Name: KN motif and ankyrin repeat domains 4
  Uniprot ID: Q5T7N3
  ENSP ID: ENSP00000360195
MEKTDAKDQSSQGDEEKDPPKSHPYSVETPYGFHLDLDFLKYVDDIEKGNTIKRIPIHRRAKQAKFSTLPRNFSLPDSGARPPAAPPLQNWSPVVPREASLGTQEQNQSPPLGNAPQASTSRSEVSYHRKALLAEATRQLEAAEPEDAELTFGSGRPQLLRASSMPATLLHSRASEEPGLSLGPPAPPALPPLQGEGSVCDGTFEPAEGLAGFHSSSPRASTRIPELVQEGAEPPEGVVKVPNHLPLPGPPFSFQNVLVVLEDKEDEHNAREAEVLFTPGSPTPSPPPLPSPIPENELLLEEIELNISEIPPPPPVEVDMRSIGIRVTEESLGLARVDPGSISSLKQQVSALEGELSGRTEELAQVRTALQQQEEEIKAREQRIRELEFTVAQLEGQFHQENAKDTQGQTDVMVNTDPVHGLLTRESCDKGIEVNLLGSMESESWGHRGEENGLLWGPDGHKQGNQSPAERVLLPQLSLPQGPEQVLTSSVHSFLSTELRIEEAGTEQEGGPQGGTRGAGGFLWGSDRKTPPAGREETSSNLPGKEHPGRPPSSPTDATIGQYVKKIQELLQEQWNCLEHGYPELASAIKQPASKLSSIQSQLLSSLNLLLSAYSAQAHPPKEPPASSSSPPVEISPSTSLKSIMKKKDYGFRAGGNGTKKNLQFVGVNGGYETTSSEETSGEDSTPEDLSDSEAEKKCDGPDHKHVKDAHLTCEAGQGIPEGTCHAAQESGPGEEVPHSKAERYKPSEEFLNACRALSQHLPETGTTTDQLLRQSLNTISQEWFRVSSRKSSSPAVVASYLHEVQPHSPHFLKLLVNLADHNGNTALHYSVSHSNFSIVKLLLETGVCNVDHQNKAGYTAVMITPLASAETNEDMAVVWKLLREGNVNIQATQGGQTALMLGVSHDREDMVQALLSCQADVNLQDHDGSSALMVACHHGNVDLVRLLLAHPACDSSLTDKAGRTALSIALKSPTHMEIAGLLRAHAEQGRSLGL

SEQ ID NO: 44534 - protein, 128 aa, Homo sapiens
  Payload ID: 9073
  Gene Symbol: KRBOX1
  Gene Name: KRAB box domain containing 1
  Uniprot ID: C9JBD0
  ENSP ID: ENSP00000373254
MMTAVSLTTRPQESVAFEDVAVYFTTKEWAIMVPAERALYRDVMLENYEAVAFVVPPTSKPALVSHLEQGKESCFTQPQGVLSRNDWRAGWIGYLELRRYTYLAKAVLRRIVSKIFRNRQCWEDRRKA

SEQ ID NO: 44535 - protein, 128 aa, Homo sapiens; identical to SEQ ID NO: 44534
  Payload ID: 9073
  Gene Symbol: KRBOX1
  Gene Name: KRAB box domain containing 1
  Uniprot ID: C9JBD0
  ENSP ID: ENSP00000388094

SEQ ID NO: 44536 - protein, 128 aa, Homo sapiens; identical to SEQ ID NO: 44534
  Payload ID: 9073
  Gene Symbol: KRBOX1
  Gene Name: KRAB box domain containing 1
  Uniprot ID: C9JBD0
  ENSP ID: ENSP00000413859

SEQ ID NO: 44537 - protein, 166 aa, Homo sapiens
  Payload ID: 9074
  Gene Symbol: KRBOX4
  Gene Name: KRAB box domain containing 4
  Uniprot ID: Q5JUW0
  ENSP ID: ENSP00000298190
MAMSQESLTFKDVFVDFTLEEWQQLDSAQKNLYRDVMLENYSHLVSVGYLVAKPDVIFRLGPGEESWMADGGTPVRTCAEVWQVDEQIDHYKESQDKLPWQAAFIGKETLKDESGQESRTCRKSIYLSTEFDSVRQRLPKYYSWEKAFKTSFKLSWSKWKLCKKER

SEQ ID NO: 44538 - protein, 171 aa, Homo sapiens
  Payload ID: 9074
  Gene Symbol: KRBOX4
  Gene Name: KRAB box domain containing 4
  Uniprot ID: Q5JUW0
  ENSP ID: ENSP00000345797
MAMSQESLTFKDVFVDFTLEEWQQLDSAQKNLYRDVMLENYSHLVSVGYLVAKPDVIFRLGPGEESWMADGGTPVRTCAGEDRPEVWQVDEQIDHYKESQDKLPWQAAFIGKETLKDESGQESRTCRKSIYLSTEFDSVRQRLPKYYSWEKAFKTSFKLSWSKWKLCKKER

SEQ ID NO: 44539 - protein, 98 aa, Homo sapiens
  Payload ID: 9074
  Gene Symbol: KRBOX4
  Gene Name: KRAB box domain containing 4
  Uniprot ID: Q5JUW0
  ENSP ID: ENSP00000367152
MAMSQESLTFKDVFVDFTLEEWQQLDSAQKNLYRDVMLENYSHLVSVGYLVAKPDVIFRLGPGEESWMADGGTPVRTCAGEDRPDVSIFASCILKCCY

SEQ ID NO: 44540 - protein, 98 aa, Homo sapiens; identical to SEQ ID NO: 44539
  Payload ID: 9074
  Gene Symbol: KRBOX4
  Gene Name: KRAB box domain containing 4
  Uniprot ID: Q5JUW0
  ENSP ID: ENSP00000418076

SEQ ID NO: 44541 - protein, 93 aa, Homo sapiens
  Payload ID: 9074
  Gene Symbol: KRBOX4
  Gene Name: KRAB box domain containing 4
  ENSP ID: ENSP00000418146
MAMSQESLTFKDVFVDFTLEEWQQLDSAQKNLYRDVMLENYSHLVSVGYLVAKPDVIFRLGPGEESWMADGGTPVRTCAGTVLQRFQLKACGI

SEQ ID NO: 44542 - protein, 131 aa, Homo sapiens
  Payload ID: 9074
  Gene Symbol: KRBOX4
  Gene Name: KRAB box domain containing 4
  ENSP ID: ENSP00000418205
MAMSQESLTFKDVFVDFTLEEWQQLDSAQKNLYRDVMLENYSHLVSVGYLVAKPDVIFRLGPGEESWMADGGTPVRTCAGEDRPGESGRGKETRLVGESLASGMCSGALLRASDLWTCLGSDEQNCCHVQM

SEQ ID NO: 44543 - protein, 1030 aa, Homo sapiens
  Payload ID: 9075
  Gene Symbol: KRBA1
  Gene Name: KRAB-A domain containing 1
  Uniprot ID: A5PL33
  ENSP ID: ENSP00000317165
MRENYETLVSVGTAELLPLSAFLSPSEPGRAVGGGSHADEGQEPAGCGDPQGGQPRHSLHLTALVQLVKEIPEFLFGEVKGAMDSPESESRGASLDGERASPEAAAAREPCPLRGLLSCLPDGPTSQPHLATTPTDSSCSSGPTGDGVQGSPLPIKTADKPWPTRKEGPGALGGEPSPPTHSPSRRKSHRGQERGTSEAGISPGNSPLQGLINCLKEILVPGPRHPETSPSFLPPLPSLGTSRLTRADLGPGSPPWAVKTEAVSGDCPLQGLLHCLKELPEAQDRHPSPSGVGNRRLQENPGAWKRGSGGPGYLLTPPPHPDLGAGGLLSVKMENSWVQSPPGPASCQPGRQPLSPSATGDTRGVPQPSWGPEAQAASASSSPLEALEACLKGIPPNGSSPSQLPPTSCSQNPQPGDSRSQKPELQPHRSHSEEATREPVLPLGLQSCVRDGPSRPLAPRGTPTSFSSSSSTDWDLDFGSPVGNQGQHPGKGSPPGSSPLQGLENCLKEIPVPVLRPAWPCSSAADRGPRRAEPRNWTADKEGLRAEACESARLGQGRGEAPTRSLHLVSPQVFTSSCVPACHQRGFKDPGATRPGVWRWLPEGSAPKPSPLHCLESALRGILPVRPLRFACVGGPSPSPSPGSSSSFSGSEGEDPRPEPDLWKPLPQERDRLPSCKPPVPLSPCPGGTPAGSSGGSPGEDPRRTEPRYCSGLGAGTAQDPCPVSQLEKRPRVSEASRGLELGHGRPRVAAKTHERLLPQGPPELPSESPPPELPPPEAAPPVLPASSLQPPCHCGKPLQQELHSLGAALAEKLDRLATALAGLAQEVATMRTQVNRLGRRPQGPGPMGQASWMWTLPRGPRWAHGPGHRHLPYWRQKGPTRPKPKILRGQGESCRAGDLQGLSRGTARRARPLPPDAPPAEPPGLHCSSSQQLLSSTPSCHAAPPAHPLLAHTGGHQSPLPPLVPAALPLQGASPPAASADADVPTSGVAPDGIPERPKEPSSLLGGVQRALQEELWGGEHRDPRWGAH

SEQ ID NO: 44544 - protein, 103 aa, Homo sapiens
  Payload ID: 9075
  Gene Symbol: KRBA1
  Gene Name: KRAB-A domain containing 1
  ENSP ID: ENSP00000417921
MRENYETLVSVGTAELLPLSAFLSPSEPGRAVGGGSHADEGQEPAGCGDPQGGQPRHSLHLTALVQLVKEIPEFLFGEVKGAMDSPESESRGASLDGERASPE

SEQ ID NO: 44545 - protein, 1064 aa, Homo sapiens
  Payload ID: 9075
  Gene Symbol: KRBA1
  Gene Name: KRAB-A domain containing 1
  ENSP ID: ENSP00000418647
MARQVSITFKDLAVRFSEEEWRLLEEGQREFYRDVMRENYETLVSVGTAELLPLSAFLSPSEPGRAVGGGSHADEGQEPAGCGDPQGGQPRHSLHLTALVQLVKEIPEFLFGEVKGAMDSPESESRGASLDGERASPEAAAREPCPLRGLLSCLPDGPTSQPHLATTPTDSSCSSGPTGDGVQGSPLPIKTADKPWPTRKEGPGALGGEPSPPTHSPSRRKSHRGQERGTSEAGISPGNSPLQGLINCLKEILVPGPRHPETSPSFLPPLPSLGTSRLTRADLGPGSPPWAVKTEAVSGDCPLQGLLHCLKELPEAQDRHPSPSGVGNRRLQENPGAWKRGSGGPGYLLTPPPHPDLGAGGLLSVKMENSWVQSPPGPASCQPGRQPLSPSATGDTRGVPQPSWGPEAQAASASSSPLEALEACLKGIPPNGSSPSQLPPTSCSQNPQPGDSRSQKPELQPHRSHSEEATREPVLPLGLQSCVRDGPSRPLAPRGTPTSFSSSSSTDWDLDFGSPVGNQGQHPGKGSPPGSSPLQGLENCLKEIPVPVLRPAWPCSSAADRGPRRAEPRNWTADKEGLRAEACESARLGQGRGEAPTRSLHLVSPQVFTSSCVPACHQRGFKDPGATRPGVWRWLPEGSAPKPSPLHCLESALRGILPVRPLRFACVGGPSPSPSPGSSSSFSGSEGEDPRPEPDLWKPLPQERDRLPSCKPPVPLSPCPGGTPAGSSGGSPGEDPRRTEPRYCSGLGAGTAQDPCPVSQLEKRPRVSEASRGLELGHGRPRVAAKTHERLLPQGPPELPSESPPPELPPPEAAPPVLPASSLQPPCHCGKPLQQELHSLGAALAEKLDRLATALAGLAQEVATMRTQVNRLGRRPQGPGPMGQASWMWTLPRGPRWAHGPGHRHLPYWRQKGPTRPKPKILRGQGESCRAGDLQGLSRGTARRARPLPPDAPPAEPPGLHCSSSQQLLSSTPSCHAAPPAHPLLAHTGGHQSPLPPLVPAALPLQGASPPAASADADVPTSGVAPDGIPERPKEPSSLLGGVQRALQEELWGGEHRDPRWGAH

SEQ ID NO: 44546 - protein, 167 aa, Homo sapiens
  Payload ID: 9075
  Gene Symbol: KRBA1
  Gene Name: KRAB-A domain containing 1
  ENSP ID: ENSP00000418841
  MOD_RES (1)..(1): Any amino acid
XRGASLDGERASPEAAAREPCPLRGLLSCLPDGPTSQPHLATTPTDSSCSSGPTGDGVQGSPLPISESDTAGTGRTSISKALIVASEDLDPVPSSFFSRTQFPCCAVLLLTKYAREQDNIFSLWCNHQRGGMMLSPWGACHPAPITEHFVHRKSPAVSNMQAHGQQH

SEQ ID NO: 44547 - protein, 35 aa, Homo sapiens
  Payload ID: 9075
  Gene Symbol: KRBA1
  Gene Name: KRAB-A domain containing 1
  ENSP ID: ENSP00000419900
MRENYETLVSVEPGRAVGGGSHADEGQEPAGCGDP

SEQ ID NO: 44548 - protein, 969 aa, Homo sapiens
  Payload ID: 9075
  Gene Symbol: KRBA1
  Gene Name: KRAB-A domain containing 1
  Uniprot ID: A5PL33
  ENSP ID: ENSP00000420112
MRENYETLVSVGTAELLPLSAFLSPSEPGRAVGGGSHADEGQEPAGCGDPQGGQPRHSLHLTALVQLVKEIPEFLFGEVKGAMDSPESESRGASLDGERASPEAAAAREPCPLRGLLSCLPDGPTSQPHLATTPTDSSCSSGPTGDGVQGSPLPIKTADKPWPTRKEGPGALGGEPSPPTHSPSRRKSHRGQERGTSEAGISPGNSPLQGLINCLKEILVPGPRHPETSPSFLPPLPSLGTSRLTRADLGPGSPPWAVKTEAVSGDCPLQGLLHCLKELPEAQDRHPSPSGVGNRRLQENPGAWKRGSGGPGYLLTPPPHPDLGAGGLLSVKMENSWVQSPPGPASCQPGRQPLSPSATGDTRGVPQPSWGPEAQAASASSSPLEALEACLKGIPPNGSSPSQLPPTSCSQNPQPGDSRSQKPELQPHRSHSEEATREPVLPLGLQSCVRDGPSRPLAPRGTPTSFSSSSSTDWDLDFGSPVGNQGQHPGKGSPPGSSPLQGLENCLKEIPVPVLRPAWPCSSAADRGPRRAEPRNWTADKEGSAPKPSPLHCLESALRGILPVRPLRFACVGGPSPSPSPGSSSSFSGSEGEDPRPEPDLWKPLPQERDRLPSCKPPVPLSPCPGGTPAGSSGGSPGEDPRRTEPRYCSGLGAGTAQDPCPVSQLEKRPRVSEASRGLELGHGRPRVAAKTHERLLPQGPPELPSESPPPELPPPEAAPPVLPASSLQPPCHCGKPLQQELHSLGAALAEKLDRLATALAGLAQEVATMRTQVNRLGRRPQGPGPMGQASWMWTLPRGPRWAHGPGHRHLPYWRQKGPTRPKPKILRGQGESCRAGDLQGLSRGTARRARPLPPDAPPAEPPGLHCSSSQQLLSSTPSCHAAPPAHPLLAHTGGHQSPLPPLVPAALPLQGASPPAASADADVPTSGVAPDGIPERPKEPSSLLGGVQRALQEELWGGEHRDPRWGAH

SEQ ID NO: 44549 - protein, 617 aa, Homo sapiens
  Payload ID: 9075
  Gene Symbol: KRBA1
  Gene Name: KRAB-A domain containing 1
  ENSP ID: ENSP00000479341
  MOD_RES (1)..(1): Any amino acid
XPAGCGDPQGGQPRHSLHLTALVQLVKEIPEFLFGEVKGAMDSPESESRGASLDGERASPEAAAREPCPLRGLLSCLPDGPTSQPHLATTPTDSSCSSGPTGDGVQGSPLPIKTADKPWPTRKEGPGALGGEPSPPTHSPSRRKSHRGQERGTSEAGISPGNSPLQGLINCLKEILVPGPRHPETSPSFLPPLPSLGTSRLTRADLGPGSPPWAVKTEAVSGDCPLQGLLHCLKELPEAQDRHPSPSGVGNRRLQENPGAWKRGSGGPGYLLTPPPHPDLGAGGLLSVKMENSWVQSPPGPASCQPGRQPLSPSATGDTRGVPQPSWGPEAQAASASSSPLEALEACLKGIPPNGSSPSQLPPTSCSQNPQPGDSRSQKPELQPHRSHSEEATREPVLPLGLQSCVRDGPSRPLAPRGTPTSFSSSSSTDWDLDFGSPVGNQGQHPGKGSPPGSSPLQGLENCLKEIPVPVLRPAWPCSSAADRGPRRAEPRNWTADKEGSAPKPSPLHCLESALRGILPVRPLRFACVGGPSPSPSPGSSSSFSGSEGEDPRPEPDLWKPLPQERDRLPSCKPPVPLSPCPGGTPAGSSGGSPGEDPRRTEPRYCSGLGAGEPGVS

SEQ ID NO: 44550 - protein, 492 aa, Homo sapiens
  Payload ID: 9076
  Gene Symbol: KRBA2
  Gene Name: KRAB-A domain containing 2
  Uniprot ID: Q6ZNG9
  ENSP ID: ENSP00000328017
MPSFLVPSLVSSPVLLKLLFSPGPKTIWSLWQQPMLFQEATAFENMTKDWNYLEGSQKDCYRDTMLDSYENTVPQGSFLQLSMMPQRAGNDPPGVSNASEMEMEISNMREKFLMSVTKLVESKSYNSKVFSKEKYFQTIKEVKEAKEKGKKSSRDYRRAAKYDVISVQGTEKLIEATHGERDRIRYYVHKEELFDILHDTHLSIGHGGRTRMLKELQGKYGNVTKEVIVLYLTLCKQCHQKNPVPKRGLAPKPMTFKDIDSTCQVEILDMQSSADGEFKFILYYQDHSTKFIILRPLRTKQAHEVVSVLLDIFTILGTPSVLDSDSGVEFTNQVVHELNELWPDLKIVSGKYHPGQSQGSLEGASRDVKNMISTWMQSNHSCHWAKGLRFMQMVRNQAFDVSLQQSPFEAMFGYKAKFGLYSSNLPRETVATLQTEEELEIAEEQLENSLWIRQEERAEIGADRSDMDDDMDPTPEASEPSTSQGTSGLLCW

SEQ ID NO: 44551 - protein, 410 aa, Homo sapiens
  Payload ID: 9076
  Gene Symbol: KRBA2
  Gene Name: KRAB-A domain containing 2
  ENSP ID: ENSP00000379565
MMPQRAGNDPPGVSNASEMEMEISNMREKFLMSVTKLVESKSYNSKVFSKEKYFQTIKEVKEAKEKGKKSSRDYRRAAKYDVISVQGTEKLIEATHGERDRIRYYVHKEELFDILHDTHLSIGHGGRTRMLKELQGKYGNVTKEVIVLYLTLCKQCHQKNPVPKRGLAPKPMTFKDIDSTCQVEILDMQSSADGEFKFILYYQDHSTKFIILRPLRTKQAHEVVSVLLDIFTILGTPSVLDSDSGVEFTNQVVHELNELWPDLKIVSGKYHPGQSQGSLEGASRDVKNMISTWMQSNHSCHWAKGLRFMQMVRNQAFDVSLQQSPFEAMFGYKAKFGLYSSNLPRETVATLQTEEELEIAEEQLENSLWIRQEERAEIGADRSDMDDDMDPTPEASEPSTSQGTSGLLCW

SEQ ID NO: 44552 - protein, 709 aa, Homo sapiens
  Payload ID: 9077
  Gene Symbol: KRI1
  Gene Name: KRI1 homolog
  Uniprot ID: Q8N9T8
  ENSP ID: ENSP00000320917
MGHRTAMPEPRGSSQLRVNAAFAARYNRYREREELQRLKDRYGDRDSSSDSSSESDSSDERVEFDPQQERDFYKTLSLLKKKDPRIYQKDATFYNRTASSSDSEEDPEALEKQKKVRPMYLKDYERKVILEKAGKYVDEENSDGETSNHRLQETSSQSYVEEQKQLKESFRAFVEDSEDEDGAGEGGSSLLQKRAKTRQEKAQEEADYIEWLKGQKEIRNPDSLKELTHLKEYWNDPELDEGERFLRDYILNKRYEEEEEEEEDEEEMEEEEGVHGPPVQLAVDDSSDEGELFLKKQEDFEQKYNFRFEEPDSASVKTYPRSIASSVRRKDERRKEKREETRERKKREKAKKQEELKQLKNLKRKEILAKLEKLRKVTGNEMLGLEEGDLEDDFDPAQHDQLMQKCFGDEYYGAVEEEKPQFEEEEGLEDDWNWDTWDGPEQEGDWSQQELHCEDPNFNMDADYDPSQPRKKKREAPLTGKKKRKSPFAAAVGQEKPVFEPGDKTFEEYLDEYYRLDYEDIIDDLPCRFKYRTVVPCDFGLSTEEILAADDKELNRWCSLKKTCMYRSEQEELRDKRAYSQKAQNSWKKRQVFKSLCREEAETPAEATGKPQRDEAGPQRQLPALDGSLMGPESPPAQEEEAPVSPHKKPAPQKRRRAKKARLLGPTVMLGGCEFSRQRLQAFGLNPKRLHFRQLGRQRRKQQGPKNSS

SEQ ID NO: 44553 - protein, 197 aa, Homo sapiens
  Payload ID: 9077
  Gene Symbol: KRI1
  Gene Name: KRI1 homolog
  ENSP ID: ENSP00000412919
MYLKDYERKVILEKAGKYVDEENSDGETSNHRLQETSSQSYVEEQKQLKESFRAFVEDSEDEDGAGEGGSSLLQKRAKTRQEKAQEEADYIEWLKGQKEIRNPDSLKELTHLKEYWNDPELDEGERFLRDYILNKRYEEEEEEEEDEEEMEEEEGVHGPPVQLAVDDSSDEGELFLKKQEDFEQKYNFRFEEPDSAS

SEQ ID NO: 44554 - protein, 190 aa, Homo sapiens
  Payload ID: 9077
  Gene Symbol: KRI1
  Gene Name: KRI1 homolog
  ENSP ID: ENSP00000438000
  MOD_RES (1)..(1): Any amino acid
XRTAMPEPRGSSQLRVNAAFAARYNRYREREELQRPSSSDSEEDPEALEKQKKVRPMYLKDYERKVILEKAGKYVDEENSDGETSNHRLQETSSQSYVEEQKQLKESFRAFVEDSEDEDGAGEGGSSLLQKRAKTRQEKAQEEADYIEWLKGQKEIRNPDSLKELTHLKEYWNDPELDEGERFLRDYILN

SEQ ID NO: 44555 - protein, 112 aa, Homo sapiens
  Payload ID: 9077
  Gene Symbol: KRI1
  Gene Name: KRI1 homolog
  ENSP ID: ENSP00000442213
RTAMPEPRGSSQLRVNAAFAARYNRYREREELQRLKDRYGDRDSSSDSSSESDSSDERVEFDPQQERDFYKTLSLLKKKDPRIYQKDATFYNRTVRRTQKPWRSRRKCGPCT

SEQ ID NO: 44556 - protein, 194 aa, Homo sapiens
  Payload ID: 9077
  Gene Symbol: KRI1
  Gene Name: KRI1 homolog
  ENSP ID: ENSP00000445789
PRGSSQLRVNAAFAARYNRYREREELQRLKDRYGDRDSSSDSSSESDSSDERVEFDPQQERDFYKTLSLLKKKDPRIYQKDATFYNRTASSSDSEEDPEALEKQKKVRPMYLKDYERKVILEKAGKYVDEENSDGETSNHRLQEKPVFEPGDKTFEEYLDEYYRLDYEDIIDDLPCRFKYRTVVPCDFGLSTEE

SEQ ID NO: 44557 - protein, 492 aa, Homo sapiens
  Payload ID: 9078
  Gene Symbol: KREMEN1
  Gene Name: kringle containing transmembrane protein 1
  Uniprot ID: Q96MU8
  ENSP ID: ENSP00000331242
MAPPAARLALLSAAALTLAARPAPSPGLGPGPECFTANGADYRGTQNWTALQGGKPCLFWNETFQHPYNTLKYPNGEGGLGEHNYCRNPDGDVSPWCYVAEHEDGVYWKYCEIPACQMPGNLGCYKDHGNPPPLTGTSKTSNKLTIQTCISFCRSQRFKFAGMESGYACFCGNNPDYWKYGEAASTECNSVCFGDHTQPCGGDGRIILFDTLVGACGGNYSAMSSVVYSPDFPDTYATGRVCYWTIRVPGASHIHFSFPLFDIRDSADMVELLDGYTHRVLARFHGRSRPPLSFNVSLDFVILYFFSDRINQAQGFAVLYQAVKEELPQERPAVNQTVAEVITEQANLSVSAARSSKVLYVITTSPSHPPQTVPGSNSWAPPMGAGSHRVEGWTVYGLATLLILTVTAIVAKILLHVTFKSHRVPASGDLRDCHQPGTSGEIWSIFYKPSTSISIFKKKLKGQSQQDDRNPLAIQDSEVTSLIWSQGQPRSI

SEQ ID NO: 44558 - protein, 458 aa, Homo sapiens
  Payload ID: 9078
  Gene Symbol: KREMEN1
  Gene Name: kringle containing transmembrane protein 1
  Uniprot ID: Q96MU8
  ENSP ID: ENSP00000383189
MAPPAARLALLSAAALTLAARPAPSPGLGPGPECFTANGADYRGTQNWTALQGGKPCLFWNETFQHPYNTLKYPNGEGGLGEHNYCRNPDGDVSPWCYVAEHEDGVYWKYCEIPACQMPGNLGCYKDHGNPPPLTGTSKTSNKLTIQTCISFCRSQRFKFAGMESGYACFCGNNPDYWKYGEAASTECNSVCFGDHTQPCGGDGRIILFDTLVGACGGNYSAMSSVVYSPDFPDTYATGRVCYWTIRVPGASHIHFSFPLFDIRDSADMVELLDGYTHRVLARFHGRSRPPLSFNVSLDFVILYFFSDRINQAQGFAVLYQAVKEELPQERPAVNQTVAEVITEQANLSVSAARSSKVLYVITTSPSHPPQTVPGWTVYGLATLLILTVTAIVAKILLHVTFKSHRVPASGDLRDCHQPGTSGEIWSIFYKPSTSISIFKKKLKGQSQQDDRNPLVSD

SEQ ID NO: 44559 - protein, 473 aa, Homo sapiens
  Payload ID: 9078
  Gene Symbol: KREMEN1
  Gene Name: kringle containing transmembrane protein 1
  Uniprot ID: Q96MU8
  ENSP ID: ENSP00000385431
MAPPAARLALLSAAALTLAARPAPSPGLGPECFTANGADYRGTQNWTALQGGKPCLFWNETFQHPYNTLKYPNGEGGLGEHNYCRNPDGDVSPWCYVAEHEDGVYWKYCEIPACQMPGNLGCYKDHGNPPPLTGTSKTSNKLTIQTCISFCRSQRFKFAGMESGYACFCGNNPDYWKYGEAASTECNSVCFGDHTQPCGGDGRIILFDTLVGACGGNYSAMSSVVYSPDFPDTYATGRVCYWTIRVPGASHIHFSFPLFDIRDSADMVELLDGYTHRVLARFHGRSRPPLSFNVSLDFVILYFFSDRINQAQGFAVLYQAVKEELPQERPAVNQTVAEVITEQANLSVSAARSSKVLYVITTSPSHPPQTVPGSNSWAPPMGAGSHRVEGWTVYGLATLLILTVTAIVAKILLHVTFKSHRVPASGDLRDCHQPGTSGEIWSIFYKPSTSISIFKKKLKGQSQQDDRNPLVSD

SEQ ID NO: 44560 - protein, 82 aa, Homo sapiens
  Payload ID: 9078
  Gene Symbol: KREMEN1
  Gene Name: kringle containing transmembrane protein 1
  ENSP ID: ENSP00000388228
  MOD_RES (1)..(1): Any amino acid
XQTCISFCRSQRFKFAGMESGYACFCGNNPDYWKYGEAASTECNSVCFGDHTQPCGGDGRIILFDRTRRTWWSFWMATPTVS

SEQ ID NO: 44561 - protein, 462 aa, Homo sapiens
  Payload ID: 9079
  Gene Symbol: KREMEN2
  Gene Name: kringle containing transmembrane protein 2
  Uniprot ID: Q8NCW0
  ENSP ID: ENSP00000304422
MGTQALQGFLFLLFLPLLQPRGASAGSLHSPGLSECFQVNGADYRGHQNRTGPRGAGRPCLFWDQTQQHSYSSASDPHGRWGLGAHNFCRNPDGDVQPWCYVAETEEGIYWRYCDIPSCHMPGYLGCFVDSGAPPALSGPSGTSTKLTVQVCLRFCRMKGYQLAGVEAGYACFCGSESDLARGRLAPATDCDQICFGHPGQLCGGDGRLGVYEVSVGSCQGNWTAPQGVIYSPDFPDEYGPDRNCSWALGPPGAALELTFRLFELADPRDRLELRDAASGSLLRAFDGARPPPSGPLRLGTAALLLTFRSDARGHAQGFALTYRGLQDAAEDPEAPEGSAQTPAAPLDGANVSCSPRPGAPPAAIGARVFSTVTAVSVLLLLLLGLLRPLRRRSCLLAPGKGPPALGASRGPRRSWAVWYQQPRGVALPCSPGDPQAEGSAAGYRPLSASSQSSLRSLISAL

SEQ ID NO: 44562 - protein, 420 aa, Homo sapiens
  Payload ID: 9079
  Gene Symbol: KREMEN2
  Gene Name: kringle containing transmembrane protein 2
  Uniprot ID: Q8NCW0
  ENSP ID: ENSP00000322079
MGTQALQGFLFLLFLPLLQPRGASAGSLHSPGLSECFQVNGADYRGHQNRTGPRGAGRPCLFWDQTQQHSYSSASDPHGRWGLGAHNFCRNPDGDVQPWCYVAETEEGIYWRYCDIPSCHMPGYLGCFVDSGAPPALSGPSGTSTKLTVQVCLRFCRMKGYQLAGVEAGYACFCGSESDLARGRLAPATDCDQICFGHPGQLCGGDGRLGVYEVSVGSCQGNWTAPQGVIYSPDFPDEYGPDRNCSWALGPPGAALELTFRLFELADPRDRLELRDAASGSLLRAFDGARPPPSGPLRLGTAALLLTFRSDARGHAQGFALTYRGLQDAAEDPEAPEGSAQTPAAPLDGANVSCSPRPGAPPAAIGGAVCWLREKGPRRWGLPGAPGEAGLCGTNSPEGWPCPAPPGTPRLRVLPRATGL

SEQ ID NO: 44563 - protein, 381 aa, Homo sapiens
  Payload ID: 9079
  Gene Symbol: KREMEN2
  Gene Name: kringle containing transmembrane protein 2
  Uniprot ID: Q8NCW0
  ENSP ID: ENSP00000459878
MGTQALQGFLFLLFLPLLQPRGASAGSLHSPGLSECFQVNGADYRGHQNRTGPRGAGRPCLFWDQTQQHSYSSASDPHGRWGLGAHNFCRNPDGDVQPWCYVAETEEGIYWRYCDIPSCHMPGYLGCFVDSGAPPALSGPSGTSTKLTVQVCLRFCRMKGYQLCGGDGRLGVYEVSVGSCQGNWTAPQGVIYSPDFPDEYGPDRNCSWALGPPGAALELTFRLFELADPRDRLELRDAASGSLLRAFDGARPPPSGPLRLGTAALLLTFRSDARGHAQGFALTYRGLQDAAEDPEAPEGSAQTPAAPLDGANVSCSPRPGAPPAAIGGAVCWLREKGPRRWGLPGAPGEAGLCGTNSPEGWPCPAPPGTPRLRVLPRATGL

SEQ ID NO: 44564 - protein, 399 aa, Homo sapiens
  Payload ID: 9079
  Gene Symbol: KREMEN2
  Gene Name: kringle containing transmembrane protein 2
  Uniprot ID: Q8NCW0
  ENSP ID: ENSP00000460578
MGTQALQGFLFLLFLPLLQPRGASAGSLHSPGLSECFQVNGADYRGHQNRTGPRGAGRPCLFWDQTQQHSYSSASDPHGRWGLGAHNFCRNPDGDVQPWCYVAETEEGIYWRYCDIPSCHMPGYLGCFVDSGAPPALSGPSGTSTKLTVQVCLRFCRMKGYQLAGVEAGYACFCGSESDLARGRLAPATDCDQICFGHPGQLCGGDGRLGVYEVSVGSCQGNWTAPQGVIYSPDFPDEYGPDRNCSWALGPPGAALELTFRLFELADPRDRLELRDAASGSLLRAFDGARPPPSGPLRLGTAALLLTFRSDARGHAQGFALTYRGLQDAAEDPEAPEGSAQTPAAPLDGANVSCSPRPGAPPAAIGGEAGARDGSESGSRPLAPILTAAVCPQPGSSRR

SEQ ID NO: 44565 - protein, 424 aa, Homo sapiens
  Payload ID: 9079
  Gene Symbol: KREMEN2
  Gene Name: kringle containing transmembrane protein 2
  Uniprot ID: Q8NCW0
  ENSP ID: ENSP00000460917
MGTQALQGFLFLLFLPLLQPRGASAGSLHSPGLSECFQVNGADYRGHQNRTGPRGAGRPCLFWDQTQQHSYSSASDPHGRWGLGAHNFCRNPDGDVQPWCYVAETEEGIYWRYCDIPSCHMPGYLGCFVDSGAPPALSGPSGTSTKLTVQVCLRFCRMKGYQLAGVEAGYACFCGSESDLARGRLAPATDCDQICFGHPGQLCGGDGRLGVYEVSVGSCQGNWTAPQGVIYSPDFPDEYGPDRNCSWALGPPGAALELTFRLFELADPRDRLELRDAASGSLLRAFDGARPPPSGPLRLGTAALLLTFRSDARGHAQGFALTYRGLQDAAEDPEAPEGSAQTPAAPLDGANVSCSPRPGAPPAAIGARVFSTVTAVSVLLLLLLGLLRPLRRRCGALGQGLRADRWWGAGAPEGNRARKELLGS

SEQ ID NO: 44566 - protein, 423 aa, Homo sapiens
  Payload ID: 9079
  Gene Symbol: KREMEN2
  Gene Name: kringle containing transmembrane protein 2
  Uniprot ID: Q8NCW0
  ENSP ID: ENSP00000461860
MGTQALQGFLFLLFLPLLQPRGASAGSLHSPGLSECFQVNGADYRGHQNRTGPRGAGRPCLFWDQTQQHSYSSASDPHGRWGLGAHNFCRNPDGDVQPWCYVAETEEGIYWRYCDIPSCHMPGYLGCFVDSGAPPALSGPSGTSTKLTVQVCLRFCRMKGYQLCGGDGRLGVYEVSVGSCQGNWTAPQGVIYSPDFPDEYGPDRNCSWALGPPGAALELTFRLFELADPRDRLELRDAASGSLLRAFDGARPPPSGPLRLGTAALLLTFRSDARGHAQGFALTYRGLQDAAEDPEAPEGSAQTPAAPLDGANVSCSPRPGAPPAAIGARVFSTVTAVSVLLLLLLGLLRPLRRRSCLLAPGKGPPALGASRGPRRSWAVWYQQPRGVALPCSPGDPQAEGSAAGYRPLSASSQSSLRSLISAL

SEQ ID NO: 44567 - protein, 736 aa, Homo sapiens
  Payload ID: 9080
  Gene Symbol: KRIT1
  Gene Name: KRIT1, ankyrin repeat containing
  Uniprot ID: O00522
  ENSP ID: ENSP00000344668
MGNPENIEDAYVAVIRPKNTASLNSREYRAKSYEILLHEVPIEGQKKKRKKVLLETKLQGNSEITQGILDYVVETTKPISPANQGIRGKRVVLMKKFPLDGEKMGREASLFIVPSVVKDNTKYTYTPGCPIFYCLQDIMRVCSESSTHFATLTARMLIALDKWLDERHAQSHFIPALFRPSPLERIKTNVINPAYATESGQTENSLHMGYSALEIKSKMLALEKADTCIYNPLFGSDLQYTNRVDKVVINPYFGLGAPDYSKIQIPKQEKWQRSMSSVTEDKERQWVDDFPLHRSACEGDSELLSRLLSERFSVNQLDSDHWAPIHYACWYGKVEATRILLEKGKCNPNLLNGQLSSPLHFAAGGGHAEIVQILLNHPETDRHITDQQGRSPLNICEENKQNNWEEAAKLLKEAINKPYEKVRIYRMDGSYRSVELKHGNNTTVQQIMEGMRLSQETQQYFTIWICSENLSLQLKPYHKPLQHVRDWPEILAELTNLDPQRETPQLFLRRDVRLPLEVEKQIEDPLAILILFDEARYNLLKGFYTAPDAKLITLASLLLQIVYGNYESKKHKQGFLNEENLKSIVPVTKLKSKAPHWTNRILHEYKNLSTSEGVSKEMHHLQRMFLQNCWEIPTYGAAFFTGQIFTKASPSNHKVIPVYVGVNIKGLHLLNMETKALLISLKYGCFMWQLGDTDTCFQIHSMENKMSFIVHTKQAGLVVKLLMKLNGQLMPTERNS

SEQ ID NO: 44568 - protein, 688 aa, Homo sapiens
  Payload ID: 9080
  Gene Symbol: KRIT1
  Gene Name: KRIT1, ankyrin repeat containing
  Uniprot ID: O00522
  ENSP ID: ENSP00000378011
MGNPENIEDAYVAVIRPKNTASLNSREYRAKSYEILLHEVPIEGQKKKRKKVLLETKLQGNSEITQGILDYVVETTKPISPANQGIRGKRVVLMKKFPLDGEKMGREASLFIVPSVVKDNTKYTYTPGCPIFYCLQDIMRVCSESSTHFATLTARMLIALDKWLDERHAQSHFIPALFRPSPLERIKTNVINPAYATESGQTENSLHMGYSALEIKSKMLALEKADTCIYNPLFGSDLQYTNRVDKVVINPYFGLGAPDYSKIQIPKQEKWQRSMSSVTEDKYGKVEATRILLEKGKCNPNLLNGQLSSPLHFAAGGGHAEIVQILLNHPETDRHITDQQGRSPLNICEENKQNNWEEAAKLLKEAINKPYEKVRIYRMDGSYRSVELKHGNNTTVQQIMEGMRLSQETQQYFTIWICSENLSLQLKPYHKPLQHVRDWPEILAELTNLDPQRETPQLFLRRDVRLPLEVEKQIEDPLAILILFDEARYNLLKGFYTAPDAKLITLASLLLQIVYGNYESKKHKQGFLNEENLKSIVPVTKLKSKAPHWTNRILHEYKNLSTSEGVSKEMHHLQRMFLQNCWEIPTYGAAFFTGQIFTKASPSNHKVIPVYVGVNIKGLHLLNMETKALLISLKYGCFMWQLGDTDTCFQIHSMENKMSFIVHTKQAGLVVKLLMKLNGQLMPTERNS

SEQ ID NO: 44569 - protein, 736 aa, Homo sapiens; identical to SEQ ID NO: 44567
  Payload ID: 9080
  Gene Symbol: KRIT1
  Gene Name: KRIT1, ankyrin repeat containing
  Uniprot ID: O00522
  ENSP ID: ENSP00000378013

SEQ ID NO: 44570 - protein, 736 aa, Homo sapiens; identical to SEQ ID NO: 44567
  Payload ID: 9080
  Gene Symbol: KRIT1
  Gene Name: KRIT1, ankyrin repeat containing
  Uniprot ID: O00522
  ENSP ID: ENSP00000378015

SEQ ID NO: 44571 - protein, 34 aa, Homo sapiens
  Payload ID: 9080
  Gene Symbol: KRIT1
  Gene Name: KRIT1, ankyrin repeat containing
  ENSP ID: ENSP00000388076
MGNPENIEDAYVAVIRPKNTASLNSREYRAKSYE

SEQ ID NO: 44572 - protein, 97 aa, Homo sapiens
  Payload ID: 9080
  Gene Symbol: KRIT1
  Gene Name: KRIT1, ankyrin repeat containing
  ENSP ID: ENSP00000391540
MGNPENIEDAYVAVIRPKNTASLNSREYRAKSYEILLHEVPIEGQKKKRKKVLLETKLQGNSEITQGILDYVVETTKPISPANQGIRGKRVVLMKKF

SEQ ID NO: 44573 - protein, 243 aa, Homo sapiens
  Payload ID: 9080
  Gene Symbol: KRIT1
  Gene Name: KRIT1, ankyrin repeat containing
  ENSP ID: ENSP00000391675
MGNPENIEDAYVAVIRPKNTASLNSREYRAKSYEILLHEVPIEGQKKKRKKVLLETKLQGNSEITQGILDYVVETTKPISPANQGIRGKRVVLMKKFPLDGEKMGREASLFIVPSVVKDNTKYTYTPGCPIFYCLQDIMRVCSESSTHFATLTARMLIALDKWLDERHAQSHFIPALFRPSPLERIKTNVINPAYATESGQTENSLHMGYSALEIKSKMLALEKADTCIYNPLFGSDLQYTNR

SEQ ID NO: 44574 - protein, 58 aa, Homo sapiens
  Payload ID: 9080
  Gene Symbol: KRIT1
  Gene Name: KRIT1, ankyrin repeat containing
  ENSP ID: ENSP00000395346
MGNPENIEDAYVAVIRPKNTASLNSREYRAKSYEILLHEVPIEGQKKKRKKVLLETKL

SEQ ID NO: 44575 - protein, 25 aa, Homo sapiens
  Payload ID: 9080
  Gene Symbol: KRIT1
  Gene Name: KRIT1, ankyrin repeat containing
  ENSP ID: ENSP00000395604
MGNPENIEDAYVAVIRPKNTASLNS

SEQ ID NO: 44576 - protein, 112 aa, Homo sapiens
  Payload ID: 9080
  Gene Symbol: KRIT1
  Gene Name: KRIT1, ankyrin repeat containing
  ENSP ID: ENSP00000396042
MGNPENIEDAYVAVIRPKNTASLNSREYRAKSYEILLHEVPIEGQKKKRKKVLLETKLQGNSEITQGILDYVVETTKPISPANQGIRGKRVVLMKKFPLDGEKMGREASLFI

SEQ ID NO: 44577 - protein, 65 aa, Homo sapiens
  Payload ID: 9080
  Gene Symbol: KRIT1
  Gene Name: KRIT1, ankyrin repeat containing
  ENSP ID: ENSP00000396352
MGNPENIEDAYVAVIRPKNTASLNSREYRAKSYEILLHEVPIEGQKKKRKKVLLETKLQGNSEIT

SEQ ID NO: 44578 - protein, 164 aa, Homo sapiens
  Payload ID: 9080
  Gene Symbol: KRIT1
  Gene Name: KRIT1, ankyrin repeat containing
  ENSP ID: ENSP00000404084
MLLNQVDKVVINPYFGLGAPDYSKIQIPKQEKWQRSMSSVTEDKERQWVDDFPLHRSACEGDSELLSRLLSERFSVNQLDSDHWAPIHYACWYGKVEATRILLEKGKCNPNLLNGQLSSPLHFAAGGGHAEIVQILLNHPETDRHITDQQGRSPLNICEENKQN

SEQ ID NO: 44579 - protein, 11 aa, Homo sapiens
  Payload ID: 9080
  Gene Symbol: KRIT1
  Gene Name: KRIT1, ankyrin repeat containing
  ENSP ID: ENSP00000404790
MGNPENIEDAY

SEQ ID NO: 44580 - protein, 162 aa, Homo sapiens
  Payload ID: 9080
  Gene Symbol: KRIT1
  Gene Name: KRIT1, ankyrin repeat containing
  ENSP ID: ENSP00000405835
MGNPENIEDAYVAVIRPKNTASLNSREYRAKSYEILLHEVPIEGQKKKRKKVLLETKLQGNSEITQGILDYVVETTKPISPANQGIRGKRVVLMKKFPLDGEKMGREASLFIVPSVVKDNTKYTYTPGCPIFYCLQDIMRVCSESSTHFATLTARMLIALDK

SEQ ID NO: 44581 - protein, 184 aa, Homo sapiens
  Payload ID: 9080
  Gene Symbol: KRIT1
  Gene Name: KRIT1, ankyrin repeat containing
  ENSP ID: ENSP00000410104
MGNPENIEDAYVAVIRPKNTASLNSREYRAKSYEILLHEVPIEGQKKKRKKVLLETKLQGNSEITQGILDYVVETTKPISPANQGIRGKRVVLMKKFPLDGEKMGREASLFIVPSVVKDNTKYTYTPGCPIFYCLQDIMRVCSESSTHFATLTARMLIALDKWLDERHAQSHFIPALFRPSPLE

SEQ ID NO: 44582 - protein, 69 aa, Homo sapiens
  Payload ID: 9080
  Gene Symbol: KRIT1
  Gene Name: KRIT1, ankyrin repeat containing
  ENSP ID: ENSP00000410467
MGNPENIEDAYVAVIRPKNTASLNSREYRAKSYEILLHEVPIEGQKKKRKKVLLETKLQGNSEITQGIL

SEQ ID NO: 44583 - protein, 736 aa, Homo sapiens; identical to SEQ ID NO: 44567
  Payload ID: 9080
  Gene Symbol: KRIT1
  Gene Name: KRIT1, ankyrin repeat containing
  Uniprot ID: O00522
  ENSP ID: ENSP00000410909

SEQ ID NO: 44584 - protein, 38 aa, Homo sapiens
  Payload ID: 9080
  Gene Symbol: KRIT1
  Gene Name: KRIT1, ankyrin repeat containing
  ENSP ID: ENSP00000414694
MGNPENIEDAYVAVIRPKNTASLNSREYRAKSYEILLH

SEQ ID NO: 44585 - protein, 565 aa, Homo sapiens
  Payload ID: 9080
  Gene Symbol: KRIT1
  Gene Name: KRIT1, ankyrin repeat containing
  ENSP ID: ENSP00000478777
MGNPENIEDAYVAVIRPKNTASLNSREYRAKSYEILLHEVPIEGQKKKRKKVLLETKLQGNSEITQGILDYVVETTKPISPANQGIRGKRVVLMKKFPLDGEKMGREASLFIVPSVVKDNTKYTYTPGCPIFYCLQDIMRVCSESSTHFATLTARMLIALDKWLDERHAQSHFIPALFRPSPLERIKTNVINPAYATESGQTENSLHMGYSALEIKSKMLALEKADTCIYNPLFGSDLQYTNRVDKVVINPYFGLGAPDYSKIQIPKQEKWQRSMSSVTEDKERQWVDDFPLHRSACEGDSELLSRLLSERFSVNQLDSDHWAPIHYACWYGKVEATRILLEKGKCNPNLLNGQLSSPLHFAAGGGHAEIVQILLNHPETDRHITDQQGRSPLNICEENKQNNWEEAAKLLKEAINKPYEKVRIYRMDGSYRSVELKHGNNTTVQQIMEGMRLSQETQQYFTIWICSENLSLQLKPYHKPLQHVRDWPEILAELTNLDPQRETPQLFLRRDVRLPLEVEKQIEDPLAILILFDEARYNLLKGFYTAPDAKLITLASLLLQSLWKL

SEQ ID NO: 44586 - protein, 381 aa, Homo sapiens
  Payload ID: 9081
  Gene Symbol: KRR1
  Gene Name: KRR1, small subunit (SSU) processome component, homolog (yeast)
  Uniprot ID: Q13601
  ENSP ID: ENSP00000229214
MASPSLERPEKGAGKSEFRNQKPKPENQDESELLTVPDGWKEPAFSKEDNPRGLLEESSFATLFPKYREAYLKECWPLVQKALNEHHVNATLDLIEGSMTVCTTKKTFDPYIIIRARDLIKLLARSVSFEQAVRILQDDVACDIIKIGSLVRNKERFVKRRQRLIGPKGSTLKALELLTNCYIMVQGNTVSAIGPFSGLKEVRKVVLDTMKNIHPIYNIKSLMIKRELAKDSELRSQSWERFLPQFKHKNVNKRKEPKKKTVKKEYTPFPPPQPESQIDKELASGEYFLKANQKKRQKMEAIKAKQAEAISKRQEERNKAFIPPKEKPIVKPKEASTETKIDVASIKEKVKKAKNKKLGALTAEEIALKMEADEKKKKKKK

SEQ ID NO: 44587 - protein, 324 aa, Homo sapiens
  Payload ID: 9081
  Gene Symbol: KRR1
  Gene Name: KRR1, small subunit (SSU) processome component, homolog (yeast)
  Uniprot ID: Q13601
  ENSP ID: ENSP00000411740
MASPSLERPEKGAGKSEFRNQKPKPENQDESELLTVPDGWKEPAFSKEDNPRGLLEESSFATLFPKYREAYLKECWPLVQKALNEHHVNATLDLIEGSMTVCTTKKTFDPYIIIRARDLIKLLARSVSFEQAVRILQDDVACDIIKIGSLVRNKERFVKRRQRLIGPKGSTLKALELLTNCYIMVQGNTVSAIGPFSGLKEVRKVVLDTMKNIHPIYNIKIDKELASGEYFLKANQKKRQKMEAIKAKQAEAISKRQEERNKAFIPPKEKPIVKPKEASTETKIDVASIKEKVKKAKNKKLGALTAEEIALKMEADEKKKKKKK

SEQ ID NO: 44588 - protein, 288 aa, Homo sapiens
  Payload ID: 9081
  Gene Symbol: KRR1
  Gene Name: KRR1, small subunit (SSU) processome component, homolog (yeast)
  ENSP ID: ENSP00000482557
MASPSLERPEKGAGKSEFRNQKPKPENQDESELLTVPDGWKEPAFSKEDNPRGLLEESSFATLFPKYREAYLKECWPLVQKALNEHHVNATLDLIEGSMTVCTTKKTFDPYIIIRARDLIKLLARSVSFEQAVRILQDDVACDIIKIGSLVRNKERFVKRRQRLIGPKGSTLKALELLTNCYIMVQGNTVSAIGPFSGLKEVRKVVLDTMKNIHPIYNIKSLMIKRELAKDSELRSQSWERFLPQFKHKNVNKRKEPKKKTVKKNIRHSHHHNQKVRSIKNWLVVNTF

SEQ ID NO: 44589 - protein, 362 aa, Homo sapiens
  Payload ID: 9082
  Gene Symbol: KLF1
  Gene Name: Kruppel-like factor 1 (erythroid)
  Uniprot ID: Q13351
  ENSP ID: ENSP00000264834
MATAETALPSISTLTALGPFPDTQDDFLKWWRSEEAQDMGPGPPDPTEPPLHVKSEDQPGEEEDDERGADATWDLDLLLTNFSGPEPGGAPQTCALAPSEASGAQYPPPPETLGAYAGGPGLVAGLLGSEDHSGWVRPALRARAPDAFVGPALAPAPAPEPKALALQPVYPGPGAGSSGGYFPRTGLSVPAASGAPYGLLSGYPAMYPAPQYQGHFQLFRGLQGPAPGPATSPSFLSCLGPGTVGTGLGGTAEDPGVIAETAPSKRGRRSWARKRQAAHTCAHPGCGKSYTKSSHLKAHLRTHTGEKPYACTWEGCGWRFARSDELTRHYRKHTGQRPFRCQLCPRAFSRSDHLALHMKRHL

SEQ ID NO: 44590 - protein, 480 aa, Homo sapiens
  Payload ID: 9083
  Gene Symbol: KLF10
  Gene Name: Kruppel-like factor 10
  Uniprot ID: Q13118
  ENSP ID: ENSP00000285407
MLNFGASLQQTAEERMEMISERPKESMYSWNKTAEKSDFEAVEALMSMSCSWKSDFKKYVENRPVTPVSDLSEEENLLPGTPDFHTIPAFCLTPPYSPSDFEPSQVSNLMAPAPSTVHFKSLSDTAKPHIAAPFKEEEKSPVSAPKLPKAQATSVIRHTADAQLCNHQTCPMKAASILNYQNNSFRRRTHLNVEAARKNIPCAAVSPNRSKCERNTVADVDEKASAALYDFSVPSSETVICRSQPAPVSPQQKSVLVSPPAVSAGGVPPMPVICQMVPLPANNPVVTTVVPSTPPSQPPAVCPPVVFMGTQVPKGAVMFVVPQPVVQSSKPPVVSPNGTRLSPIAPAPGFSPSAAKVTPQIDSSRIRSHICSHPGCGKTYFKSSHLKAHTRTHTGEKPFSCSWKGCERRFARSDELSRHRRTHTGEKKFACPMCDRRFMRSDHLTKHARRHLSAKKLPNWQMEVSKLNDIALPPTPAPTQ

SEQ ID NO: 44591 - protein, 469 aa, Homo sapiens
  Payload ID: 9083
  Gene Symbol: KLF10
  Gene Name: Kruppel-like factor 10
  Uniprot ID: Q13118
  ENSP ID: ENSP00000379222
MEERMEMISERPKESMYSWNKTAEKSDFEAVEALMSMSCSWKSDFKKYVENRPVTPVSDLSEEENLLPGTPDFHTIPAFCLTPPYSPSDFEPSQVSNLMAPAPSTVHFKSLSDTAKPHIAAPFKEEEKSPVSAPKLPKAQATSVIRHTADAQLCNHQTCPMKAASILNYQNNSFRRRTHLNVEAARKNIPCAAVSPNRSKCERNTVADVDEKASAALYDFSVPSSETVICRSQPAPVSPQQKSVLVSPPAVSAGGVPPMPVICQMVPLPANNPVVTTVVPSTPPSQPPAVCPPVVFMGTQVPKGAVMFVVPQPVVQSSKPPVVSPNGTRLSPIAPAPGFSPSAAKVTPQIDSSRIRSHICSHPGCGKTYFKSSHLKAHTRTHTGEKPFSCSWKGCERRFARSDELSRHRRTHTGEKKFACPMCDRRFMRSDHLTKHARRHLSAKKLPNWQMEVSKLNDIALPPTPAPTQ

SEQ ID NO: 44592 - protein, 512 aa, Homo sapiens
  Payload ID: 9084
  Gene Symbol: KLF11
  Gene Name: Kruppel-like factor 11
  Uniprot ID: O14901
  ENSP ID: ENSP00000307023
MHTPDFAGPDDARAVDIMDICESILERKRHDSERSTCSILEQTDMEAVEALVCMSSWGQRSQKGDLLRIRPLTPVSDSGDVTTTVHMDAATPELPKDFHSLSTLCITPPQSPDLVEPSTRTPVSPQVTDSKACTATDVLQSSAVVARALSGGAERGLLGLEPVPSSPCRAKGTSVIRHTGESPAACFPTIQTPDCRLSDSREGEEQLLGHFETLQDTHLTDSLLSTNLVSCQPCLHKSGGLLLTDKGQQAGWPGAVQTCSPKNYENDLPRKTTPLISVSVPAPPVLCQMIPVTGQSSMLPAFLKPPPQLSVGTVRPILAQAAPAPQPVFVGPAVPQGAVMLVLPQGALPPPAPCAANVMAAGNTKLLPLAPAPVFITSSQNCVPQVDFSRRRNYVCSFPGCRKTYFKSSHLKAHLRTHTGEKPFNCSWDGCDKKFARSDELSRHRRTHTGEKKFVCPVCDRRFMRSDHLTKHARRHMTTKKIPGWQAEVGKLNRIASAESPGSPLVSMPASA

SEQ ID NO: 44593 - protein, 127 aa, Homo sapiens
  Payload ID: 9084
  Gene Symbol: KLF11
  Gene Name: Kruppel-like factor 11
  ENSP ID: ENSP00000386058
MDICESILERKRHDSERSTCSILEQTDMEAVEALVCMSSWGQRSQKGDLLRIRPLTPVSDSGDVTTTVHMDAATPELPKDFHSLSTLCITPPQSPDLVEPSTRTPVSPQVTDSKACTATDVLQSSAV

SEQ ID NO: 44594 - protein, 163 aa, Homo sapiens
  Payload ID: 9084
  Gene Symbol: KLF11
  Gene Name: Kruppel-like factor 11
  ENSP ID: ENSP00000387866
MDICESILERKRHDSERSTCSILEQTDMEAVEALVCMSSWGQRSQKGDLLRIRPLTPVSDSGDVTTTVHMDAATPELPKDFHSLSTLCITPPQSPDLVEPSTRTPVSPQVTDSKACTATDVLQSSAVVARALSGGAERGLLGLEPVPSSPCRAKGTSVIRHTG

SEQ ID NO: 44595 - protein, 122 aa, Homo sapiens
  Payload ID: 9084
  Gene Symbol: KLF11
  Gene Name: Kruppel-like factor 11
  ENSP ID: ENSP00000388263
MDICESILERKRHDSERSTCSILEQTDMEAVEALVCMSSWGQRSQKGDLLRIRPLTPVSDSGDVTTTVHMDAATPELPKDFHSLSTLCITPPQSPDLVEPSTRTPVSPQVTDSKACTATDVL

SEQ ID NO: 44596 - protein, 495 aa, Homo sapiens
  Payload ID: 9084
  Gene Symbol: KLF11
  Gene Name: Kruppel-like factor 11
  Uniprot ID: O14901
  ENSP ID: ENSP00000442722
MDICESILERKRHDSERSTCSILEQTDMEAVEALVCMSSWGQRSQKGDLLRIRPLTPVSDSGDVTTTVHMDAATPELPKDFHSLSTLCITPPQSPDLVEPSTRTPVSPQVTDSKACTATDVLQSSAVVARALSGGAERGLLGLEPVPSSPCRAKGTSVIRHTGESPAACFPTIQTPDCRLSDSREGEEQLLGHFETLQDTHLTDSLLSTNLVSCQPCLHKSGGLLLTDKGQQAGWPGAVQTCSPKNYENDLPRKTTPLISVSVPAPPVLCQMIPVTGQSSMLPAFLKPPPQLSVGTVRPILAQAAPAPQPVFVGPAVPQGAVMLVLPQGALPPPAPCAANVMAAGNTKLLPLAPAPVFITSSQNCVPQVDFSRRRNYVCSFPGCRKTYFKSSHLKAHLRTHTGEKPFNCSWDGCDKKFARSDELSRHRRTHTGEKKFVCPVCDRRFMRSDHLTKHARRHMTTKKIPGWQAEVGKLNRIASAESPGSPLVSMPASA

SEQ ID NO: 44597 - protein, 495 aa, Homo sapiens; identical to SEQ ID NO: 44596
  Payload ID: 9084
  Gene Symbol: KLF11
  Gene Name: Kruppel-like factor 11
  Uniprot ID: O14901
  ENSP ID: ENSP00000444690

SEQ ID NO: 44598 - protein, 377 aa, Homo sapiens [sequence omitted]

SEQ ID NO: 44599 - protein, 402 aa, Homo sapiens
  Payload ID: 9085
  Gene Symbol: KLF12
  Gene Name: Kruppel-like factor 12
  Uniprot ID: Q9Y4X4
  ENSP ID: ENSP00000366897
MNIHMKRKTIKNINTFENRMLMLDGMPAVRVKTELLESEQGSPNVHNYPDMEAVPLLLNNVKGEPPEDSLSVDHFQTQTEPVDLSINKARTSPTAVSSSPVSMTASASSPSSTSTSSSSSSRLASSPTVITSVSSASSSSTVLTPGPLVASASGVGGQQFLHIIHPVPPSSPMNLQSNKLSHVHRIPVVVQSVPVVYTAVRSPGNVNNTIVVPLLEDGRGHGKAQMDPRGLSPRQSKSDSDDDDLPNVTLDSVNETGSTALSIARAVQEVHPSPVSRVRGNRMNNQKFPCSISPFSIESTRRQRRSESPDSRKRRIHRCDFEGCNKVYTKSSHLKAHRRTHTGEKPYKCTWEGCTWKFARSDELTRHYRKHTGVKPFKCADCDRSFSRSDHLALHRRRHMLV

SEQ ID NO: 44600 - protein, 288 aa, Homo sapiens
  Payload ID: 9086
  Gene Symbol: KLF13
  Gene Name: Kruppel-like factor 13
  Uniprot ID: Q9Y2Y9
  ENSP ID: ENSP00000302456
MAAAAYVDHFAAECLVSMSSRAVVHGPREGPESRPEGAAVAATPTLPRVEERRDGKDSASLFVVARILADLNQQAPAPAPAERREGAAARKARTPCRLPPPAPEPTSPGAEGAAAAPPSPAWSEPEPEAGLEPEREPGPAGSGEPGLRQRVRRGRSRADLESPQRKHKCHYAGCEKVYGKSSHLKAHLRTHTGERPFACSWQDCNKKFARSDELARHYRTHTGEKKFSCPICEKRFMRSDHLTKHARRHANFHPGMLQRRGGGSRTGSLSDYSRSDASSPTISPASSP

SEQ ID NO: 44601 - protein, 100 aa, Homo sapiens
  Payload ID: 9086
  Gene Symbol: KLF13
  Gene Name: Kruppel-like factor 13
  ENSP ID: ENSP00000452609
MEEPGERPFACSWQDCNKKFARSDELARHYRTHTGEKKFSCPICEKRFMRSDHLTKHARRHANFHPGMLQRRGGGSRTGSLSDYSRSDASSPTISPASSP

SEQ ID NO: 44602 - protein, 14 aa, Homo sapiens
  Payload ID: 9086
  Gene Symbol: KLF13
  Gene Name: Kruppel-like factor 13
  ENSP ID: ENSP00000452867
MRSDHLTKHARRHA

SEQ ID NO: 44603 - protein, 286 aa, Homo sapiens
  Payload ID: 9086
  Gene Symbol: KLF13
  Gene Name: Kruppel-like factor 13
  ENSP ID: ENSP00000481494
MAAAAYVDHFAAECLVSMSSRAVVHGPREGPESRPEGAAVAATPTLPRVEERRDGKDSASLFVVARILADLNQQAPAPAPAERREGAAARKARTPCRLPPPPSPPPPAPKARRAPPSPAWSEPEPEAGLEPEREPGPAGSGEPGLRQRVRRGRSRADLESPQRKHKCHYAGCEKVYGKSSHLKAHLRTHTGERPFACSWQDCNKKFARSDELARHYRTHTGEKKFSCPICEKRFMRSDHLTKHARRHANFHPGMLQRRGGGSRTGSLSDYSRSDASSPTISPASSP

SEQ ID NO: 44604 - protein, 286 aa, Homo sapiens; identical to SEQ ID NO: 44603
  Payload ID: 9086
  Gene Symbol: KLF13
  Gene Name: Kruppel-like factor 13
  ENSP ID: ENSP00000484274

SEQ ID NO: 44605 - protein, 288 aa, Homo sapiens; identical to SEQ ID NO: 44600
  Payload ID: 9086
  Gene Symbol: KLF13
  Gene Name: Kruppel-like factor 13
  Uniprot ID: Q9Y2Y9
  ENSP ID: ENSP00000484904

SEQ ID NO: 44606 - protein, 323 aa, Homo sapiens
  Payload ID: 9087
  Gene Symbol: KLF14
  Gene Name: Kruppel-like factor 14
  ENSP ID: ENSP00000463287
MSAAVACLDYFAAECLVSMSAGAVVHRRPPDPEGAGGAAGSEVGAAPPESALPGPGPPGPASVPQLPQVPAPSPGAGGAAPHLLAASVWADLRGSSGEGSWENSGEAPRASSGFSDPIPCSVQTPCSELAPASGAAAVCAPESSSDAPAVPSAPAAPGAPAASGGFSGGALGAGPAPAADQAPRRRSVTPAAKRHQCPFPGCTKAYYKSSHLKSHQRTHTGERPFSCDWLDCDKKFTRSDELARHYRTHTGEKRFSCPLCPKQFSRSDHLTKHARRHPTYHPDMIEYRGRRRTPRIDPPLTSEVESSASGSGPGPAPSFTTCL

SEQ ID NO: 44607 - protein, 416 aa, Homo sapiens
  Payload ID: 9088
  Gene Symbol: KLF15
  Gene Name: Kruppel-like factor 15
  Uniprot ID: Q9UIH9
  ENSP ID: ENSP00000296233
MVDHLLPVDENFSSPKCPVGYLGDRLVGRRAYHMLPSPVSEDDSDASSPCSCSSPDSQALCSCYGGGLGTESQDSILDFLLSQATLGSGGGSGSSIGASSGPVAWGPWRRAAAPVKGEHFCLPEFPLGDPDDVPRPFQPTLEEIEEFLEENMEPGVKEVPEGNSKDLDACSQLSAGPHKSHLHPGSSGRERCSPPPGGASAGGAQGPGGGPTPDGPIPVLLQIQPVPVKQESGTGPASPGQAPENVKVAQLLVNIQGQTFALVPQVVPSSNLNLPSKFVRIAPVPIAAKPVGSGPLGPGPAGLLMGQKFPKNPAAELIKMHKCTFPGCSKMYTKSSHLKAHLRRHTGEKPFACTWPGCGWRFSRSDELSRHRRSHSGVKPYQCPVCEKKFARSDHLSKHIKVHRFPRSSRSVRSVN

SEQ ID NO: 44608 - protein, 252 aa, Homo sapiens
  Payload ID: 9089
  Gene Symbol: KLF16
  Gene Name: Kruppel-like factor 16
  Uniprot ID: Q9BXK1
  ENSP ID: ENSP00000250916
MSAAVACVDYFAADVLMAISSGAVVHRGRPGPEGAGPAAGLDVRAARREAASPGTPGPPPPPPAASGPGPGAAAAPHLLAASILADLRGGPGAAPGGASPASSSSAASSPSSGRAPGAAPSAAAKSHRCPFPDCAKAYYKSSHLKSHLRTHTGERPFACDWQGCDKKFARSDELARHHRTHTGEKRFSCPLCSKRFTRSDHLAKHARRHPGFHPDLLRRPGARSTSPSDSLPCSLAGSPAPSPAPSPAPAGL

SEQ ID NO: 44609 - protein, 252 aa, Homo sapiens; identical to SEQ ID NO: 44608
  Payload ID: 9089
  Gene Symbol: KLF16
  Gene Name: Kruppel-like factor 16
  Uniprot ID: Q9BXK1
  ENSP ID: ENSP00000439973

SEQ ID NO: 44610 - protein, 115 aa, Homo sapiens
  Payload ID: 9089
  Gene Symbol: KLF16
  Gene Name: Kruppel-like factor 16
  ENSP ID: ENSP00000480570
MAAPAAVAGAPGAQRGERPFACDWQGCDKKFARSDELARHHRTHTGEKRFSCPLCSKRFTRSDHLAKHARRHPGFHPDLLRRPGARSTSPSDSLPCSLAGSPAPSPAPSPAPAGL

SEQ ID NO: 44611 - protein, 252 aa, Homo sapiens; identical to SEQ ID NO: 44608
  Payload ID: 9089
  Gene Symbol: KLF16
  Gene Name: Kruppel-like factor 16
  Uniprot ID: Q9BXK1
  ENSP ID: ENSP00000483701

SEQ ID NO: 44612 - protein, 389 aa, Homo sapiens
  Payload ID: 9090
  Gene Symbol: KLF17
  Gene Name: Kruppel-like factor 17
  Uniprot ID: Q5JT82
  ENSP ID: ENSP00000361373
MYGRPQAEMEQEAGELSRWQAAHQAAQDNENSAPILNMSSSSGSSGVHTSWNQGLPSIQHFPHSAEMLGSPLVSVEAPGQNVNEGGPQFSMPLPERGMSYCPQATLTPSRMIYCQRMSPPQQEMTIFSGPQLMPVGEPNIPRVARPFGGNLRMPPNGLPVSASTGIPIMSHTGNPPVPYPGLSTVPSDETLLGPTVPSTEAQAVLPSMAQMLPPQDAHDLGMPPAESQSLLVLGSQDSLVSQPDSQEGPFLPEQPGPAPQTVEKNSRPQEGTGRRGSSEARPYCCNYENCGKAYTKRSHLVSHQRKHTGERPYSCNWESCSWSFFRSDELRRHMRVHTRYRPYKCDQCSREFMRSDHLKQHQKTHRPGPSDPQANNNNGEQDSPPAAGP

SEQ ID NO: 44613 - protein, 115 aa, Homo sapiens
  Payload ID: 9090
  Gene Symbol: KLF17
  Gene Name: Kruppel-like factor 17
  ENSP ID: ENSP00000489364
MYGRPQAEMEQEAGELSRWQAAHQAAQDNENSAPILNMSSSSGSSGVHTSWNQGLPSIQHFPHSAEMLGSPLVSVEAPGQNVNEGGPQFSMPLPERARTCSTDSREELQASGRDW

SEQ ID NO: 44614 - protein, 1052 aa, Homo sapiens
  Payload ID: 9091
  Gene Symbol: KLF18
  Gene Name: Kruppel-like factor 18
  ENSP ID: ENSP00000489024
MDSSLLQAIEEIEKFFQHLSERHTEQAETPDAPEPQNCMPLTAHAEESQHESTQSKTMPPLGSTMMTSACTNIPGTVLTQDLTMHPLKALEDLSETYSMGQKVTSFDQVKHTAGSQMTDVTVTPKSSPTDCQKTTITASNMTISNESSQLNTPSSDQTLNESQIPALLGDQMKTLSDNQTLCGDQVTFSSDQTLTDGHTVTSGSDETLSGGQMTTSLDLYGGQMMTSIDNQTLCGEQMTTSSGNQAFYGRQMTTSTGNQTLCGEQMTTSTGNQALYGGQMTTSASNQTLCGEQMTTSTSNQTLCGEQVMTSTGNQALCGGQMTTSTGNQNLYGGQMMTSTGNQTLYWGQMMTSTGNQNLCGEQVMTSTGNQALCGGQMTTSTGNQNLYGGQMMTSTGNQTLYWGQMMTSTGNQNLCGEQVMTSTGNQALCGGQMTTSTGNQNLCGEQVMTSTSNQTLCGEQTTTSTSNQTLCGEQVTTSTGNQALYGGQMMTSTGNQTLYWGQMMTSTGNQNLCGEQMTTSTGNQALYGGQMTTSTSNQTLCGEQMTTPTSNQTLCGEQVTTSTGNQALYGGQITTSTSNQTLCGEQMTTSTSNQTLCGEQVTTSTGNQALYGGQMMTSTGNQALYGGQMTTSASNQTLCGEQMTTSTSNQTLCEEQVMTSTGNQALCGEQMTTSTGNQALYGGQMTTSTSNQTLCGEQTTTSTSNQTLCGEQVTTSTGNQALYGGQMMTSTGNQTLYWGQMMTSTGNQNLCGEQMTTSTGNQALYGGQMTTSTSNQTLCGEQMTTPTSNQTLCGEQVTTSTGNQALYRGQITTSTSNQTLCGEQMTTSTSNQTLCGEQVTTSTGNQALYGGQMMTSTGNQNLYGGQNMTSTDNQALYGGQMATYSGNQTLYGDQMLTLQVGNMTTLTDDHSLYGGYMMSHQFSSLPYPGFLCFSSSHLIQGQLPKQKTQSCQFWKNPEVSRPYVCTYEDCKMSYSKACHLRTHMRKHTGEKPYVCDVEGCTWKFARSDELNRHKKRHTGERPYLCSICSKNFARSDHLKQHAKVHNIRPGL

SEQ ID NO: 44615 - protein, 355 aa, Homo sapiens
  Payload ID: 9092
  Gene Symbol: KLF2
  Gene Name: Kruppel-like factor 2
  Uniprot ID: Q9Y5W3
  ENSP ID: ENSP00000248071
MALSEPILPSFSTFASPCRERGLQERWPRAEPESGGTDDDLNSVLDFILSMGLDGLGAEAAPEPPPPPPPPAFYYPEPGAPPPYSAPAGGLVSELLRPELDAPLGPALHGRFLLAPPGRLVKAEPPEADGGGGYGCAPGLTRGPRGLKREGAPGPAASCMRGPGGRPPPPPDTPPLSPDGPARLPAPGPRASFPPPFGGPGFGAPGPGLHYAPPAPPAFGLFDDAAAAAAALGLAPPAARGLLTPPASPLELLEAKPKRGRRSWPRKRTATHTCSYAGCGKTYTKSSHLKAHLRTHTGEKPYHCNWDGCGWKFARSDELTRHYRKHTGHRPFQCHLCDRAFSRSDHLALHMKRHM

SEQ ID NO: 44616 - protein, 78 aa, Homo sapiens
  Payload ID: 9092
  Gene Symbol: KLF2
  Gene Name: Kruppel-like factor 2
  ENSP ID: ENSP00000465035
MALSEPILPSFSTFASPCRERGLQEVRSPTTATGTAAAGSLRAQTSSRATTESTRATGHSSAICAIVPSRAPITWRCT

SEQ ID NO: 44617 - protein, 345 aa, Homo sapiens
  Payload ID: 9093
  Gene Symbol: KLF3
  Gene Name: Kruppel-like factor 3 (basic)
  Uniprot ID: P57682
  ENSP ID: ENSP00000261438
MLMFDPVPVKQEAMDPVSVSYPSNYMESMKPNKYGVIYSTPLPEKFFQTPEGLSHGIQMEPVDLTVNKRSSPPSAGNSPSSLKFPSSHRRASPGLSMPSSSPPIKKYSPPSPGVQPFGVPLSMPPVMAAALSRHGIRSPGILPVIQPVVVQPVPFMYTSHLQQPLMVSLSEEMENSSSSMQVPVIESYEKPISQKKIKIEPGIEPQRTDYYPEEMSPPLMNSVSPPQALLQENHPSVIVQPGKRPLPVESPDTQRKRRIHRCDYDGCNKVYTKSSHLKAHRRTHTGEKPYKCTWEGCTWKFARSDELTRHFRKHTGIKPFQCPDCDRSFSRSDHLALHRKRHMLV

SEQ ID NO: 44618 - protein, 232 aa, Homo sapiens
  Payload ID: 9093
  Gene Symbol: KLF3
  Gene Name: Kruppel-like factor 3 (basic)
  Uniprot ID: P57682
  ENSP ID: ENSP00000421252
MLMFDPVPVKQEAMDPVSVSYPSNYMESMKPNKYGVIYSTPLPEKFFQTPEGLSHGIQMEPVDLTVNKRSSPPSAGNSPSSLKFPSSHRRASPGLSMPSSSPPIKKYSPPSPGVQPFGVPLSMPPVMAAALSRHGIRSPGILPVIQPVVVQPVPFMYTSHLQQPLMVSLSEEMENSSSSMQVPVIESYEKPISQKKIKIEPGIEPQRTDYYPEEMSPPLMNSVSPPQALLQE

SEQ ID NO: 44619 - protein, 479 aa, Homo sapiens
  Payload ID: 9094
  Gene Symbol: KLF4
  Gene Name: Kruppel-like factor 4 (gut)
  Uniprot ID: O43474
  ENSP ID: ENSP00000363804
MRQPPGESDMAVSDALLPSFSTFASGPAGREKTLRQAGAPNNRWREELSHMKRLPPVLPGRPYDLAAATVATDLESGGAGAACGGSNLAPLPRRETEEFNDLLDLDFILSNSLTHPPESVAATVSSSASASSSSSPSSSGPASAPSTCSFTYPIRAGNDPGVAPGGTGGGLLYGRESAPPPTAPFNLADINDVSPSGGFVAELLRPELDPVYIPPQQPQPPGGGLMGKFVLKASLSAPGSEYGSPSVISVSKGSPDGSHPVVVAPYNGGPPRTCPKIKQEAVSSCTHLGAGPPLSNGHRPAAHDFPLGRQLPSRTTPTLGLEEVLSSRDCHPALPLPPGFHPHPGPNYPSFLPDQMQPQVPPLHYQELMPPGSCMPEEPKPKRGRRSWPRKRTATHTCDYAGCGKTYTKSSHLKAHLRTHTGEKPYHCDWDGCGWKFARSDELTRHYRKHTGHRPFQCQKCDRAFSRSDHLALHMKRHF

SEQ ID NO: 44620 - protein, 232 aa, Homo sapiens
  Payload ID: 9094
  Gene Symbol: KLF4
  Gene Name: Kruppel-like factor 4 (gut)
  ENSP ID: ENSP00000399921
MAVSDALLPSFSTFASGPAGREKTLRQAGAPNNRWREELSHMKRLPPVLPGRPYDLAAATVATDLESGGAGAACGGSNLAPLPRRETEEFNDLLDLDFILSNSLTHPPESVAATVSSSASASSSSSPSSSGPASAPSTCSFTYPIRAGNDPGVAPGGTGGGLLYGRESAPPPTAPFNLADINDVSPSGGFVAELLRPELDPVYIPPQQPQPPGGGLMGKFVLKASLSAPGSE

SEQ ID NO: 44621 - protein, 22 aa, Homo sapiens
  Payload ID: 9094
  Gene Symbol: KLF4
  Gene Name: Kruppel-like factor 4 (gut)
  ENSP ID: ENSP00000404922
MRQPPGESDMAVSDALLPSFST

SEQ ID NO: 44622 - protein, 145 aa, Homo sapiens
  Payload ID: 9094
  Gene Symbol: KLF4
  Gene Name: Kruppel-like factor 4 (gut)
  ENSP ID: ENSP00000483629
MAVSDALLPSFSTFASGPAGREKTLRQAGAPNNLMPPGSCMPEEPKPKRGRRSWPRKRTATHTCDYAGCGKTYTKSSHLKAHLRTHTGEKPYHCDWDGCGWKFARSDELTRHYRKHTGHRPFQCQKCDRAFSRSDHLALHMKRHF

SEQ ID NO: 44623 - protein, 457 aa, Homo sapiens
  Payload ID: 9095
  Gene Symbol: KLF5
  Gene Name: Kruppel-like factor 5 (intestinal)
  Uniprot ID: Q13887
  ENSP ID: ENSP00000366915
MATRVLSMSARLGPVPQPPAPQDEPVFAQLKPVLGAANPARDAALFPGEELKHAHHRPQAQPAPAQAPQPAQPPATGPRLPPEDLVQTRCEMEKYLTPQLPPVPIIPEHKKYRRDSASVVDQFFTDTEGLPYSINMNVFLPDITHLRTGLYKSQRPCVTHIKTEPVAIFSHQSETTAPPPAPTQALPEFTSIFSSHQTAAPEVNNIFIKQELPTPDLHLSVPTQQGHLYQLLNTPDLDMPSSTNQTAAMDTLNVSMSAAMAGLNTHTSAVPQTAVKQFQGMPPCTYTMPSQFLPQQATYFPPSPPSSEPGSPDRQAEMLQNLTPPPSYAATIASKLAIHNPNLPTTLPVNSQNIQPVRYNRRSNPDLEKRRIHYCDYPGCTKVYTKSSHLKAHLRTHTGEKPYKCTWEGCDWRFARSDELTRHYRKHTGAKPFQCGVCNRSFSRSDHLALHMKRHQN

SEQ ID NO: 44624 - protein, 366 aa, Homo sapiens
  Payload ID: 9095
  Gene Symbol: KLF5
  Gene Name: Kruppel-like factor 5 (intestinal)
  Uniprot ID: Q13887
  ENSP ID: ENSP00000440407
MEKYLTPQLPPVPIIPEHKKYRRDSASVVDQFFTDTEGLPYSINMNVFLPDITHLRTGLYKSQRPCVTHIKTEPVAIFSHQSETTAPPPAPTQALPEFTSIFSSHQTAAPEVNNIFIKQELPTPDLHLSVPTQQGHLYQLLNTPDLDMPSSTNQTAAMDTLNVSMSAAMAGLNTHTSAVPQTAVKQFQGMPPCTYTMPSQFLPQQATYFPPSPPSSEPGSPDRQAEMLQNLTPPPSYAATIASKLAIHNPNLPTTLPVNSQNIQPVRYNRRSNPDLEKRRIHYCDYPGCTKVYTKSSHLKAHLRTHTGEKPYKCTWEGCDWRFARSDELTRHYRKHTGAKPFQCGVCNRSFSRSDHLALHMKRHQN

SEQ ID NO: 44625 - protein, 281 aa, Homo sapiens
  Payload ID: 9096
  Gene Symbol: KLF6
  Gene Name: Kruppel-like factor 6
  Uniprot ID: Q99612
  ENSP ID: ENSP00000419079
MDVLPMCSIFQELQIVHETGYFSALPSLEEYWQQTCLELERYLQSEPCYVSASEIKFDSQEDLWTKIILAREKKEESELKISSSPPEDTLISPSFCYNLETNSLNSDVSSESSDSSEELSPTAKFTSDPIGEVLVSSGKLSSSVTSTPPSSPELSREPSQLWGCVPGELPSPGKVRSGTSGKPGDKGNGDASPDGRRRVHRCHFNGCRKVYTKSSHLKAHQRTHTGQCPRGPRRAAAGGRHCIAPALEGAGPGCTGCGQGRQILTSSDVFHQSIRSFWSSE

SEQ ID NO: 44626 - protein, 283 aa, Homo sapiens
  Payload ID: 9096
  Gene Symbol: KLF6
  Gene Name: Kruppel-like factor 6
  Uniprot ID: Q99612
  ENSP ID: ENSP00000419923
MDVLPMCSIFQELQIVHETGYFSALPSLEEYWQQTCLELERYLQSEPCYVSASEIKFDSQEDLWTKIILAREKKEESELKISSSPPEDTLISPSFCYNLETNSLNSDVSSESSDSSEELSPTAKFTSDPIGEVLVSSGKLSSSVTSTPPSSPELSREPSQLWGCVPGELPSPGKVRSGTSGKPGDKGNGDASPDGRRRVHRCHFNGCRKVYTKSSHLKAHQRTHTGEKPYRCSWEGCEWRFARSDELTRHFRKHTGAKPFKCSHCDRCFSRSDHLALHMKRHL

SEQ ID NO: 44627 - protein, 237 aa, Homo sapiens
  Payload ID: 9096
  Gene Symbol: KLF6
  Gene Name: Kruppel-like factor 6
  Uniprot ID: Q99612
  ENSP ID: ENSP00000445301
MDVLPMCSIFQELQIVHETGYFSALPSLEEYWQQTCLELERYLQSEPCYVSASEIKFDSQEDLWTKIILAREKKEESELKISSSPPEDTLISPSFCYNLETNSLNSDVSSESSDSSEELSPTAKFTSDPIGEVLVSSGKLSSSVTSTPPSSPELSREPSQLWGCVPGELPSPGKVRSGTSGKPGDKGNGDASPDGRRRVHRCHFNGCRKVYTKSSHLKAHQRTHTGVFPGLTTWPCT

SEQ ID NO: 44628 - protein, 302 aa, Homo sapiens
  Payload ID: 9097
  Gene Symbol: KLF7
  Gene Name: Kruppel-like factor 7 (ubiquitous)
  Uniprot ID: O75840
  ENSP ID: ENSP00000309570
MDVLASYSIFQELQLVHDTGYFSALPSLEETWQQTCLELERYLQTEPRRISETFGEDLDCFLHASPPPCIEESFRRLDPLLLPVEAAICEKSSAVDILLSRDKLLSETCLSLQPASSSLDSYTAVNQAQLNAVTSLTPPSSPELSRHLVKTSQTLSAVDGTVTLKLVAKKAALSSVKVGGVATAAAAVTAAGAVKSGQSDSDQGGLGAEACPENKKRVHRCQFNGCRKVYTKSSHLKAHQRTHTGEKPYKCSWEGCEWRFARSDELTRHYRKHTGAKPFKCNHCDRCFSRSDHLALHMKRHI

SEQ ID NO: 44629 - protein, 269 aa, Homo sapiens
  Payload ID: 9097
  Gene Symbol: KLF7
  Gene Name: Kruppel-like factor 7 (ubiquitous)
  Uniprot ID: O75840
  ENSP ID: ENSP00000387510
MTCLELERYLQTEPRRISETFGEDLDCFLHASPPPCIEESFRRLDPLLLPVEAAICEKSSAVDILLSRDKLLSETCLSLQPASSSLDSYTAVNQAQLNAVTSLTPPSSPELSRHLVKTSQTLSAVDGTVTLKLVAKKAALSSVKVGGVATAAAAVTAAGAVKSGQSDSDQGGLGAEACPENKKRVHRCQFNGCRKVYTKSSHLKAHQRTHTGEKPYKCSWEGCEWRFARSDELTRHYRKHTGAKPFKCNHCDRCFSRSDHLALHMKRHI

SEQ ID NO: 44630 - protein, 60 aa, Homo sapiens
  Payload ID: 9097
  Gene Symbol: KLF7
  Gene Name: Kruppel-like factor 7 (ubiquitous)
  ENSP ID: ENSP00000392015
MDVLASYSIFQELQLVHDTGYFSALPSLEETWQQTCLELERYLQTEPRRISETFGEDLDC

SEQ ID NO: 44631 - protein, 112 aa, Homo sapiens
  Payload ID: 9097
  Gene Symbol: KLF7
  Gene Name: Kruppel-like factor 7 (ubiquitous)
  Uniprot ID: O75840
  ENSP ID: ENSP00000393268
MDVLASYSIFQELQLVHDTGYFSALPSLEETWQQTCLELERYLQTEPRRISETFGEKPYKCSWEGCEWRFARSDELTRHYRKHTGAKPFKCNHCDRCFSRSDHLALHMKRHI

SEQ ID NO: 44632 - protein, 112 aa, Homo sapiens
  Payload ID: 9097
  Gene Symbol: KLF7
  Gene Name: Kruppel-like factor 7 (ubiquitous)
  ENSP ID: ENSP00000397245
MDVLASYSIFQELQLVHDTGYFSALPSLEETWQQTCLELERYLQTEPRRISETFGEDLDCFLHASPPPCIEESFRRLDPLLLPVEAAICEKSSAVDILLSRDKLLSETCLSL

SEQ ID NO: 44633 - protein, 230 aa, Homo sapiens
  Payload ID: 9097
  Gene Symbol: KLF7
  Gene Name: Kruppel-like factor 7 (ubiquitous)
  Uniprot ID: O75840
  ENSP ID: ENSP00000398572
MDVLASYSIFQELQLVHDTGYFSALPSLEETWQQTCLELERYLQTEPRRISETFGEDLDCFLHASPPPCIEESFRRLDPLLLPVEAAICEKSSAVDILLSRDKLLSETCLSLQPASSSLDSYTAVNQAQLNAVTSLTPPSSPELSRHLVKTSQTLSAVDGTVTLKLVAKKAALSSVKVRSLISAHGRDVSGVLHEAMSSRGTTGNTQVQSPSNATTATGVFPGLTILPST

SEQ ID NO: 44634 - protein, 274 aa, Homo sapiens
  Payload ID: 9097
  Gene Symbol: KLF7
  Gene Name: Kruppel-like factor 7 (ubiquitous)
  Uniprot ID: O75840
  ENSP ID: ENSP00000403284
MFPSWPTCLELERYLQTEPRRISETFGEDLDCFLHASPPPCIEESFRRLDPLLLPVEAAICEKSSAVDILLSRDKLLSETCLSLQPASSSLDSYTAVNQAQLNAVTSLTPPSSPELSRHLVKTSQTLSAVDGTVTLKLVAKKAALSSVKVGGVATAAAAVTAAGAVKSGQSDSDQGGLGAEACPENKKRVHRCQFNGCRKVYTKSSHLKAHQRTHTGEKPYKCSWEGCEWRFARSDELTRHYRKHTGAKPFKCNHCDRCFSRSDHLALHMKRHI

SEQ ID NO: 44635 - protein, 51 aa, Homo sapiens
  Payload ID: 9097
  Gene Symbol: KLF7
  Gene Name: Kruppel-like factor 7 (ubiquitous)
  ENSP ID: ENSP00000412950
MDVLASYSIFQELQLVHDTGYFSALPSLEETWQQKIIEDHLQKENTPVSYY

SEQ ID NO: 44636 - protein, 175 aa, Homo sapiens
  Payload ID: 9097
  Gene Symbol: KLF7
  Gene Name: Kruppel-like factor 7 (ubiquitous)
  ENSP ID: ENSP00000413590
MFPSWPTCLELERYLQTEPRRISETFGEDLDCFLHASPPPCIEESFRRLDPLLLPVEAAICEKSSAVDILLSRDKLLSETCLSLQPASSSLDSYTAVNQAQLNAVTSLTPPSSPELSRHLVKTSQTLSAVDGTVTLKLVAKKAALSSVKVGGVATAAAAVTAAGAVKSGQSDSDQ

SEQ ID NO: 44637 - protein, 257 aa, Homo sapiens
  Payload ID: 9098
  Gene Symbol: KLF8
  Gene Name: Kruppel-like factor 8
  Uniprot ID: O95600
  ENSP ID: ENSP00000364063
MVDMDKLINNLEVQLNSEGGSMQVFKQVTASVRNRDPPEIEYRSNMTSPTLLDANPMENPALFNDIKIEPPEELLASDFSLPQVEPVDLSFHKPKAPLQPASMLQAPIRPPKPQSSPQTLVVSTSTSDMSTSANIPTVLTPGSVLTSSQSTGSQQILHVIHTIPSVSLPNKMGGLKTIPVVVQSLPMVYTTLPADGGPAAITVPLIGGDGKNAGSVKVDPTSMSPLEIPSDSEESTIESGSSALQSLQGLQQEREAL

SEQ ID NO: 44638 - protein, 359 aa, Homo sapiens
  Payload ID: 9098
  Gene Symbol: KLF8
  Gene Name: Kruppel-like factor 8
  Uniprot ID: O95600
  ENSP ID: ENSP00000417303
MVDMDKLINNLEVQLNSEGGSMQVFKQVTASVRNRDPPEIEYRSNMTSPTLLDANPMENPALFNDIKIEPPEELLASDFSLPQVEPVDLSFHKPKAPLQPASMLQAPIRPPKPQSSPQTLVVSTSTSDMSTSANIPTVLTPGSVLTSSQSTGSQQILHVIHTIPSVSLPNKMGGLKTIPVVVQSLPMVYTTLPADGGPAAITVPLIGGDGKNAGSVKVDPTSMSPLEIPSDSEESTIESGSSALQSLQGLQQEPAAMAQMQGEESLDLKRRRIHQCDFAGCSKVYTKSSHLKAHRRIHTGEKPYKCTWDGCSWKFARSDELTRHFRKHTGIKPFRCTDCNRSFSRSDHLSLHRRRHDTM

SEQ ID NO: 44639 - protein, 228 aa, Homo sapiens
  Payload ID: 9098
  Gene Symbol: KLF8
  Gene Name: Kruppel-like factor 8
  ENSP ID: ENSP00000431911
MVDMDKLINNLEVQLNSEGGSMQVFKQVTASVRNRDPPEIEYRSNMTSPTLLDANPMENPALFNDIKIEPPEELLASDFSLPQVEPVDLSFHKPKAPLQPASMLQAPIRPPKPQSSPQTLVVSTSTSDMSTSANIPTVLTPGSVLTSSQSTGSQQILHVIHTIPSVSLPNKMGGLKTIPVVVQSLPMVYTTLPADGGPAAITVPLIGGDGKNAGSGAQRPRWMFSHLD

SEQ ID NO: 44640 - protein, 252 aa, Homo sapiens
  Payload ID: 9098
  Gene Symbol: KLF8
  Gene Name: Kruppel-like factor 8
  ENSP ID: ENSP00000489260
MSLPEDGMSSGHFRSPQLVTWSVTASVRNRDPPEIEYRSNMTSPTLLDANPMENPALFNDIKIEPPEELLASDFSLPQVEPVDLSFHKPKAPLQPASMLQAPIRPPKPQSSPQTLVVSTSTSDMSTSANIPTVLTPGSVLTSSQSTGSQQILHVIHTIPSVSLPNKMGGLKTIPVVVQSLPMVYTTLPADGGPAAITVPLIGGDGKNAGSVKVDPTSMSPLEIPSDSEESTIESGSSALQSLQGLQQEREAL

SEQ ID NO: 44641 - protein, 244 aa, Homo sapiens
  Payload ID: 9099
  Gene Symbol: KLF9
  Gene Name: Kruppel-like factor 9
  Uniprot ID: Q13886
  ENSP ID: ENSP00000366330
MSAAAYMDFVAAQCLVSISNRAAVPEHGVAPDAERLRLPEREVTKEHGDPGDTWKDYCTLVTIAKSLLDLNKYRPIQTPSVCSDSLESPDEDMGSDSDVTTESGSSPSHSPEERQDPGSAPSPLSLLHPGVAAKGKHASEKRHKCPYSGCGKVYGKSSHLKAHYRVHTGERPFPCTWPDCLKKFSRSDELTRHYRTHTGEKQFRCPLCEKRFMRSDHLTKHARRHTEFHPSMIKRSKKALANAL

SEQ ID NO: 44642 - protein, 354 aa, Homo sapiens
  Payload ID: 9100
  Gene Symbol: KTI12
  Gene Name: KTI12 chromatin associated homolog
  Uniprot ID: Q96EK9
  ENSP ID: ENSP00000360676
MPLVVFCGLPYSGKSRRAEELRVALAAEGRAVYVVDDAAVLGAEDPAVYGDSAREKALRGALRASVERRLSRHDVVILDSLNYIKGFRYELYCLARAARTPLCLVYCVRPGGPIAGPQVAGANENPGRNVSVSWRPRAEEDGRAQAAGSSVLRELHTADSVVNGSAQADVPKELEREESGAAESPALVTPDSEKSAKHGSGAFYSPELLEALTLRFEAPDSRNRWDRPLFTLVGLEEPLPLAGIRSALFENRAPPPHQSTQSQPLASGSFLHQLDQVTSQVLAGLMEAQKSAVPGDLLTLPGTTEHLRFTRPLTMAELSRLRRQFISYTKMHPNNENLPQLANMFLQYLSQSLH

SEQ ID NO: 44643 - protein, 216 aa, Homo sapiens
  Payload ID: 9101
  Gene Symbol: KCNIP1
  Gene Name: Kv channel interacting protein 1
  ENSP ID: ENSP00000329686
MGAVMGTFSSLQTKQRRPSKDKIEDELEMTMVCHRPEGLEQLEAQTNFTKRELQVLYRGFKNECPSGVVNEDTFKQIYAQFFPHGDASTYAHYLFNAFDTTQTGSVKFEDFVTALSILLRGTVHEKLRWTFNLYDINKDGYINKEEMMDIVKAIYDMMGKYTYPVLKEDTPRQHVDVFFQKMDKNKDGIVTLDEFLESCQEDDNIMRSLQLFQNVM

SEQ ID NO: 44644 - protein, 225 aa, Homo sapiens
  Payload ID: 9101
  Gene Symbol: KCNIP1
  Gene Name: Kv channel interacting protein 1
  Uniprot ID: Q9NZI2
  ENSP ID: ENSP00000366577
MSGCSKRCKLGFVKFAQTIFKLITGTLSKDKIEDELEMTMVCHRPEGLEQLEAQTNFTKRELQVLYRGFKNECPSGVVNEDTFKQIYAQFFPHGDASTYAHYLFNAFDTTQTGSVKFEDFVTALSILLRGTVHEKLRWTFNLYDINKDGYINKEEMMDIVKAIYDMMGKYTYPVLKEDTPRQHVDVFFQKMDKNKDGIVTLDEFLESCQEDDNIMRSLQLFQNVM

SEQ ID NO: 44645 - protein, 220 aa, Homo sapiens
  Payload ID: 9101
  Gene Symbol: KCNIP1
  Gene Name: Kv channel interacting protein 1
  ENSP ID: ENSP00000375071
KIEDELEMTMVCHRPEGLEQLEAQTNFTKRELQVLYRGFKNECPSGVVNEDTFKQIYAQFFPHGALPCLEGSPCVEFLPPSPALLFCLVDASTYAHYLFNAFDTTQTGSVKFEDFVTALSILLRGTVHEKLRWTFNLYDINKDGYINKEEMMDIVKAIYDMMGKYTYPVLKEDTPRQHVDVFFQKMDKNKDGIVTLDEFLESCQEDDNIMRSLQLFQNVM

SEQ ID NO: 44646 - protein, 227 aa, Homo sapiens
  Payload ID: 9101
  Gene Symbol: KCNIP1
  Gene Name: Kv channel interacting protein 1
  Uniprot ID: Q9NZI2
  ENSP ID: ENSP00000395323
MGAVMGTFSSLQTKQRRPSKDIAWWYYQYQRDKIEDELEMTMVCHRPEGLEQLEAQTNFTKRELQVLYRGFKNECPSGVVNEDTFKQIYAQFFPHGDASTYAHYLFNAFDTTQTGSVKFEDFVTALSILLRGTVHEKLRWTFNLYDINKDGYINKEEMMDIVKAIYDMMGKYTYPVLKEDTPRQHVDVFFQKMDKNKDGIVTLDEFLESCQEDDNIMRSLQLFQNVM

SEQ ID NO: 44647 - protein, 241 aa, Homo sapiens
  Payload ID: 9101
  Gene Symbol: KCNIP1
  Gene Name: Kv channel interacting protein 1
  Uniprot ID: Q9NZI2
  ENSP ID: ENSP00000414886
MGAVMGTFSSLQTKQRRPSKDKIEDELEMTMVCHRPEGLEQLEAQTNFTKRELQVLYRGFKNECPSGVVNEDTFKQIYAQFFPHGALPCLEGSPCVEFLPPSPALLFCLVDASTYAHYLFNAFDTTQTGSVKFEDFVTALSILLRGTVHEKLRWTFNLYDINKDGYINKEEMMDIVKAIYDMMGKYTYPVLKEDTPRQHVDVFFQKMDKNKDGIVTLDEFLESCQEDDNIMRSLQLFQNVM

SEQ ID NO: 44648 - protein, 42 aa, Homo sapiens
  Payload ID: 9101
  Gene Symbol: KCNIP1
  Gene Name: Kv channel interacting protein 1
  ENSP ID: ENSP00000431053
MSGCSKRCKLGFVKFAQTIFKLITGTLSKDGVKSGTGARRAG

SEQ ID NO: 44649 - protein, 188 aa, Homo sapiens
  Payload ID: 9101
  Gene Symbol: KCNIP1
  Gene Name: Kv channel interacting protein 1
  Uniprot ID: Q9NZI2
  ENSP ID: ENSP00000431102
MTMVCHRPEGLEQLEAQTNFTKRELQVLYRGFKNECPSGVVNEDTFKQIYAQFFPHGDASTYAHYLFNAFDTTQTGSVKFEDFVTALSILLRGTVHEKLRWTFNLYDINKDGYINKEEMMDIVKAIYDMMGKYTYPVLKEDTPRQHVDVFFQKMDKNKDGIVTLDEFLESCQEDDNIMRSLQLFQNVM

SEQ ID NO: 44650 - protein, 207 aa, Homo sapiens
  Payload ID: 9101
  Gene Symbol: KCNIP1
  Gene Name: Kv channel interacting protein 1
  ENSP ID: ENSP00000478151
DIAWWYYQYQRDKIEDELEMTMVCHRPEGLEQLEAQTNFTKRELQVLYRGFKNECPSGVVNEDTFKQIYAQFFPHGDASTYAHYLFNAFDTTQTGSVKFEDFVTALSILLRGTVHEKLRWTFNLYDINKDGYINKEEMMDIVKAIYDMMGKYTYPVLKEDTPRQHVDVFFQKMDKNKDGIVTLDEFLESCQEDDNIMRSLQLFQNVM

SEQ ID NO: 44651 - protein, 184 aa, Homo sapiens
  Payload ID: 9102
  Gene Symbol: KCNIP2
  Gene Name: Kv channel interacting protein 2
  Uniprot ID: Q9NS61
  ENSP ID: ENSP00000239117
MRGQGRKESLSDSRDLDGSYDQLTDSVDDEFELSTVCHRPEGLEQLQEQTKFTRKELQVLYRGFKNECPSGIVNEENFKQIYSQFFPQGDSSTYATFLFNAFDTNHDGSVSFEEMLDIMKSIYDMMGKYTYPALREEAPREHVESFFQKMDRNKDGVVTIEEFIESCQKVQLPALYITLTWTQA

SEQ ID NO: 44652 - protein, 225 aa, Homo sapiens
  Payload ID: 9102
  Gene Symbol: KCNIP2
  Gene Name: Kv channel interacting protein 2
  Uniprot ID: Q9NS61
  ENSP ID: ENSP00000239118
MNRCPRRCRSPLGQAARSLYQLVTGSLSPDSVDDEFELSTVCHRPEGLEQLQEQTKFTRKELQVLYRGFKNECPSGIVNEENFKQIYSQFFPQGDSSTYATFLFNAFDTNHDGSVSFEDFVAGLSVILRGTVDDRLNWAFNLYDLNKDGCITKEEMLDIMKSIYDMMGKYTYPALREEAPREHVESFFQKMDRNKDGVVTIEEFIESCQKDENIMRSMQLFDNVI

SEQ ID NO: 44653 - protein, 227 aa, Homo sapiens
  Payload ID: 9102
  Gene Symbol: KCNIP2
  Gene Name: Kv channel interacting protein 2
  Uniprot ID: Q9NS61
  ENSP ID: ENSP00000341624
MRGQGRKESLSDSRDLDGSYDQLTDSVDDEFELSTVCHRPEGLEQLQEQTKFTRKELQVLYRGFKNPGALSFQECPSGIVNEENFKQIYSQFFPQGDSSTYATFLFNAFDTNHDGSVSFEDFVAGLSVILRGTVDDRLNWAFNLYDLNKDGCITKEEMLDIMKSIYDMMGKYTYPALREEAPREHVESFFQKMDRNKDGVVTIEEFIESCQKDENIMRSMQLFDNVI

SEQ ID NO: 44654 - protein, 220 aa, Homo sapiens
  Payload ID: 9102
  Gene Symbol: KCNIP2
  Gene Name: Kv channel interacting protein 2
  Uniprot ID: Q9NS61
  ENSP ID: ENSP00000344169
MRGQGRKESLSDSRDLDGSYDQLTDSVDDEFELSTVCHRPEGLEQLQEQTKFTRKELQVLYRGFKNECPSGIVNEENFKQIYSQFFPQGDSSTYATFLFNAFDTNHDGSVSFEDFVAGLSVILRGTVDDRLNWAFNLYDLNKDGCITKEEMLDIMKSIYDMMGKYTYPALREEAPREHVESFFQKMDRNKDGVVTIEEFIESCQKDENIMRSMQLFDNVI

SEQ ID NO: 44655 - protein, 270 aa, Homo sapiens
  Payload ID: 9102
  Gene Symbol: KCNIP2
  Gene Name: Kv channel interacting protein 2
  Uniprot ID: Q9NS61
  ENSP ID: ENSP00000349055
MRGQGRKESLSDSRDLDGSYDQLTGHPPGPTKKALKQRFLKLLPCCGPQALPSVSETLAAPASLRPHRPRLLDPDSVDDEFELSTVCHRPEGLEQLQEQTKFTRKELQVLYRGFKNECPSGIVNEENFKQIYSQFFPQGDSSTYATFLFNAFDTNHDGSVSFEDFVAGLSVILRGTVDDRLNWAFNLYDLNKDGCITKEEMLDIMKSIYDMMGKYTYPALREEAPREHVESFFQKMDRNKDGVVTIEEFIESCQKDENIMRSMQLFDNVI

SEQ ID NO: 44656 - protein, 252 aa, Homo sapiens
  Payload ID: 9102
  Gene Symbol: KCNIP2
  Gene Name: Kv channel interacting protein 2
  Uniprot ID: Q9NS61
  ENSP ID: ENSP00000350733
MRGQGRKESLSDSRDLDGSYDQLTGHPPGPTKKALKQRFLKLLPCCGPQALPSVSENSVDDEFELSTVCHRPEGLEQLQEQTKFTRKELQVLYRGFKNECPSGIVNEENFKQIYSQFFPQGDSSTYATFLFNAFDTNHDGSVSFEDFVAGLSVILRGTVDDRLNWAFNLYDLNKDGCITKEEMLDIMKSIYDMMGKYTYPALREEAPREHVESFFQKMDRNKDGVVTIEEFIESCQKDENIMRSMQLFDNVI

SEQ ID NO: 44657 - protein, 184 aa, Homo sapiens
  Payload ID: 9102
  Gene Symbol: KCNIP2
  Gene Name: Kv channel interacting protein 2
  ENSP ID: ENSP00000359063
MRGQGRKESLSDSRDLDGSYDQLTDSVDDEFELSTVCHRPEGLEQLQEQTKFTRKELQVLYRGFKNECPSGIVNEENFKQIYSQFFPQGDSSTYATFLFNAFDTNHDGSVSFEEMLDIMKSIYDMMGKYTYPALREEAPREHVESFFQKMDRNKDGVVTIEEFIESCQKDENIMRSMQLFDNVI

SEQ ID NO: 44658 - protein, 177 aa, Homo sapiens
  Payload ID: 9102
  Gene Symbol: KCNIP2
  Gene Name: Kv channel interacting protein 2
  Uniprot ID: Q9NS61
  ENSP ID: ENSP00000411679
MWLSWTAWTMNLNCPPCVTGLRVWSSCRSKPNSRARSCRSCTGASRTNVPAELSMRRTSSRFTPSSFLKEDFVAGLSVILRGTVDDRLNWAFNLYDLNKDGCITKEEMLDIMKSIYDMMGKYTYPALREEAPREHVESFFQKMDRNKDGVVTIEEFIESCQKDENIMRSMQLFDNVI

SEQ ID NO: 44659 - protein, 285 aa, Homo sapiens
  Payload ID: 9102
  Gene Symbol: KCNIP2
  Gene Name: Kv channel interacting protein 2
  Uniprot ID: Q9NS61
  ENSP ID: ENSP00000420040
MRGQGRKESLSDSRDLDGSYDQLTGHPPGPTKKALKQRFLKLLPCCGPQALPSVSEIGRVFRFLGDSSLPSALAAPASLRPHRPRLLDPDSVDDEFELSTVCHRPEGLEQLQEQTKFTRKELQVLYRGFKNECPSGIVNEENFKQIYSQFFPQGDSSTYATFLFNAFDTNHDGSVSFEDFVAGLSVILRGTVDDRLNWAFNLYDLNKDGCITKEEMLDIMKSIYDMMGKYTYPALREEAPREHVESFFQKMDRNKDGVVTIEEFIESCQKDENIMRSMQLFDNVI

SEQ ID NO: 44660 - protein, 256 aa, Homo sapiens
  Payload ID: 9103
  Gene Symbol: KCNIP3
  Gene Name: Kv channel interacting protein 3, calsenilin
  Uniprot ID: Q9Y2W7
  ENSP ID: ENSP00000295225
MQPAKEVTKASDGSLLGDLGHTPLSKKEGIKWQRPRLSRQALMRCCLVKWILSSTAPQGSDSSDSELELSTVRHQPEGLDQLQAQTKFTKKELQSLYRGFKNECPTGLVDEDTFKLIYAQFFPQGDATTYAHFLFNAFDADGNGAIHFEDFVVGLSILLRGTVHEKLKWAFNLYDINKDGYITKEEMLAIMKSIYDMMGRHTYPILREDAPAEHVERFFEKMDRNQDGVVTIEEFLEACQKDENIMSSMQLFENVI

SEQ ID NO: 44661 - protein, 256 aa, Homo sapiens
  Payload ID: 9103
  Gene Symbol: KCNIP3
  Gene Name: Kv channel interacting protein 3, calsenilin
  ENSP ID: ENSP00000354261
MQPRKEVTKASDGSLLGDLGHTPLSKKEGIKWQRPRLSRQALMRCCLVKWILSSTAPQGSDSSDSELELSTVRHQPEGLDQLQAQTKFTKKELQSLYRGFKNECPTGLVDEDTFKLIYAQFFPQGDATTYAHFLFNAFDADGNGAIHFEDFVVGLSILLRGTVHEKLKWAFNLYDINKDGYITKEEMLAIMKSIYDMMGRHTYPILREDAPAEHVERFFEKMDRNQDGVVTIEEFLEACQKDENIMSSMQLFENVI

SEQ ID NO: 44662 - protein, 230 aa, Homo sapiens
  Payload ID: 9103
  Gene Symbol: KCNIP3
  Gene Name: Kv channel interacting protein 3, calsenilin
  Uniprot ID: Q9Y2W7
  ENSP ID: ENSP00000417499
MGIQGMELCAMAVVVLLFIAVLKQFGILEPISMEDSSDSELELSTVRHQPEGLDQLQAQTKFTKKELQSLYRGFKNECPTGLVDEDTFKLIYAQFFPQGDATTYAHFLFNAFDADGNGAIHFEDFVVGLSILLRGTVHEKLKWAFNLYDINKDGYITKEEMLAIMKSIYDMMGRHTYPILREDAPAEHVERFFEKMDRNQDGVVTIEEFLEACQKDENIMSSMQLFENVI

SEQ ID NO: 44663 - protein, 188 aa, Homo sapiens
  Payload ID: 9104
  Gene Symbol: KCNIP4
  Gene Name: Kv channel interacting protein 4
  Uniprot ID: Q6PIL6
  ENSP ID: ENSP00000351892
MATVRHRPEALELLEAQSKFTKKELQILYRGFKNECPSGVVNEETFKEIYSQFFPQGDSTTYAHFLFNAFDTDHNGAVSFEDFIKGLSILLRGTVQEKLNWAFNLYDINKDGYITKEEMLDIMKAIYDMMGKCTYPVLKEDAPRQHVETFFQKMDKNKDGVVTIDEFIESCQKDENIMRSMQLFENVI

SEQ ID NO: 44664 - protein, 225 aa, Homo sapiens
  Payload ID: 9104
  Gene Symbol: KCNIP4
  Gene Name: Kv channel interacting protein 4
  Uniprot ID: Q6PIL6
  ENSP ID: ENSP00000371583
MSGCRKRCKREILKFAQYLLRLLTGSLHTDSVEDELEMATVRHRPEALELLEAQSKFTKKELQILYRGFKNECPSGVVNEETFKEIYSQFFPQGDSTTYAHFLFNAFDTDHNGAVSFEDFIKGLSILLRGTVQEKLNWAFNLYDINKDGYITKEEMLDIMKAIYDMMGKCTYPVLKEDAPRQHVETFFQKMDKNKDGVVTIDEFIESCQKDENIMRSMQLFENVI

SEQ ID NO: 44665 - protein, 229 aa, Homo sapiens
  Payload ID: 9104
  Gene Symbol: KCNIP4
  Gene Name: Kv channel interacting protein 4
  Uniprot ID: Q6PIL6
  ENSP ID: ENSP00000371585
MNLEGLEMIAVLIVIVLFVKLLEQFGLIEAGLEDSVEDELEMATVRHRPEALELLEAQSKFTKKELQILYRGFKNECPSGVVNEETFKEIYSQFFPQGDSTTYAHFLFNAFDTDHNGAVSFEDFIKGLSILLRGTVQEKLNWAFNLYDINKDGYITKEEMLDIMKAIYDMMGKCTYPVLKEDAPRQHVETFFQKMDKNKDGVVTIDEFIESCQKDENIMRSMQLFENVI

SEQ ID NO: 44666 - protein, 250 aa, Homo sapiens
  Payload ID: 9104
  Gene Symbol: KCNIP4
  Gene Name: Kv channel interacting protein 4
  Uniprot ID: Q6PIL6
  ENSP ID: ENSP00000371587
MNVRRVESISAQLEEASSTGGFLYAQNSTKRSIKERLMKLLPCSAAKTSSPAIQNSVEDELEMATVRHRPEALELLEAQSKFTKKELQILYRGFKNECPSGVVNEETFKEIYSQFFPQGDSTTYAHFLFNAFDTDHNGAVSFEDFIKGLSILLRGTVQEKLNWAFNLYDINKDGYITKEEMLDIMKAIYDMMGKCTYPVLKEDAPRQHVETFFQKMDKNKDGVVTIDEFIESCQKDENIMRSMQLFENVI

SEQ ID NO: 44667 - protein, 216 aa, Homo sapiens
  Payload ID: 9104
  Gene Symbol: KCNIP4
  Gene Name: Kv channel interacting protein 4
  Uniprot ID: Q6PIL6
  ENSP ID: ENSP00000399080
MNVRRVESISAQLEEASSTGDSVEDELEMATVRHRPEALELLEAQSKFTKKELQILYRGFKNECPSGVVNEETFKEIYSQFFPQGDSTTYAHFLFNAFDTDHNGAVSFEDFIKGLSILLRGTVQEKLNWAFNLYDINKDGYITKEEMLDIMKAIYDMMGKCTYPVLKEDAPRQHVETFFQKMDKNKDGVVTIDEFIESCQKDENIMRSMQLFENVI

SEQ ID NO: 44668 - protein, 188 aa, Homo sapiens; identical to SEQ ID NO: 44663
  Payload ID: 9104
  Gene Symbol: KCNIP4
  Gene Name: Kv channel interacting protein 4
  Uniprot ID: Q6PIL6
  ENSP ID: ENSP00000423257

SEQ ID NO: 44669 - protein, 34 aa, Homo sapiens
  Payload ID: 9104
  Gene Symbol: KCNIP4
  Gene Name: Kv channel interacting protein 4
  ENSP ID: ENSP00000445321
MNVRRVESISAQLEEASSTGEAVIEHSLCTKCCP

SEQ ID NO: 44670 - protein, 29 aa, Homo sapiens
  Payload ID: 9104
  Gene Symbol: KCNIP4
  Gene Name: Kv channel interacting protein 4
  ENSP ID: ENSP00000486886
MSGCRKRCKREILKFAQYLLRLLTGSLHT

SEQ ID NO: 44671 - protein, 176 aa, Homo sapiens
  Payload ID: 9105
  Gene Symbol: KXD1
  Gene Name: KxDL motif containing 1
  Uniprot ID: Q9BQD3
  ENSP ID: ENSP00000222307
MDLPDSASRVFCGRILSMVNTDDVNAIILAQKNMLDRFEKTNEMLLNFNNLSSARLQQMSERFLHHTRTLVEMKRDLDSIFRRIRTLKGKLARQHPEAFSHIPEASFLEEEDEDPIPPSTTTTIATSEQSTGSCDTSPDTVSPSLSPGFEDLSHVQPGSPAINGRSQTDDEEMTGE

SEQ ID NO: 44672 - protein, 176 aa, Homo sapiens; identical to SEQ ID NO: 44671
  Payload ID: 9105
  Gene Symbol: KXD1
  Gene Name: KxDL motif containing 1
  Uniprot ID: Q9BQD3
  ENSP ID: ENSP00000438903

SEQ ID NO: 44673 - protein, 176 aa, Homo sapiens; identical to SEQ ID NO: 44671
  Payload ID: 9105
  Gene Symbol: KXD1
  Gene Name: KxDL motif containing 1
  Uniprot ID: Q9BQD3
  ENSP ID: ENSP00000443549

SEQ ID NO: 44674 - protein, 128 aa, Homo sapiens
  Payload ID: 9105
  Gene Symbol: KXD1
  Gene Name: KxDL motif containing 1
  ENSP ID: ENSP00000468857
MDLPDSASRVFCGRILSMVNTDDVNAIILAQKNMLDRFEKTNEMLLNFNNLSSARLQQMSERFLHHTRTLVEMKRDLDSIFRRIRTLKGKLARQHPEAFSRKCHAGFLLPSTSALSTQGRLLEGHLGA

SEQ ID NO: 44675 - protein, 136 aa, Homo sapiens
  Payload ID: 9105
  Gene Symbol: KXD1
  Gene Name: KxDL motif containing 1
  ENSP ID: ENSP00000468949
MDLPDSASRVFCGRILSMVNTDDVNAIILAQKNMLDRFEKTNEMLLNFNNLSSARLQQMSERFLHHTRTLVEMKRDLDSIFRRIRTLKGKLARQHPEAFSHIPEASFLEEEDEDPIPPSTTTTIATSEQSTGSCDT

SEQ ID NO: 44676 - protein, 176 aa, Homo sapiens; identical to SEQ ID NO: 44671
  Payload ID: 9105
  Gene Symbol: KXD1
  Gene Name: KxDL motif containing 1
  Uniprot ID: Q9BQD3
  ENSP ID: ENSP00000468990

SEQ ID NO: 44677 - protein, 74 aa, Homo sapiens
  Payload ID: 9105
  Gene Symbol: KXD1
  Gene Name: KxDL motif containing 1
  ENSP ID: ENSP00000469288
MDLPDSASRVFCGRILSMVNTDDVNAIILAQKNMLDRFEKTNEMLLNFNNLSSARLQQMSERFLHHTRTLVEMK

SEQ ID NO: 44678 - protein, 167 aa, Homo sapiens
  Payload ID: 9105
  Gene Symbol: KXD1
  Gene Name: KxDL motif containing 1
  ENSP ID: ENSP00000469294
MDLPDSASRVFCGRILSMVNTDDVNAIILAQKNMLDRFEKTNEMLLNFNNLSSARLQQMSERFLHHTRTLVEMKRDLDSIFRRIRTLKGKLARQHPEAFSHIPEASFLEEEDEDPIPPSTTTTIATSEQSTGSCDTSPDTVSPSLSPGFEDLSHVQPGSPAINGRSQ

SEQ ID NO: 44679 - protein, 195 aa, Homo sapiens
  Payload ID: 9105
  Gene Symbol: KXD1
  Gene Name: KxDL motif containing 1
  ENSP ID: ENSP00000469648
MDLPDSASRVFCGRILSMVNTDDVNAIILAQKNMLDRFEKTNEMLLNFNNLSSARLQQMSERFLHHTRTLVEMKRDLDSIFRRIRLHCALKCLGQFQPWDKILTTLKGKLARQHPEAFSHIPEASFLEEEDEDPIPPSTTTTIATSEQSTGSCDTSPDTVSPSLSPGFEDLSHVQPGSPAINGRSQTDDEEMTGE

SEQ ID NO: 44680 - protein, 85 aa, Homo sapiens
  Payload ID: 9105
  Gene Symbol: KXD1
  Gene Name: KxDL motif containing 1
  ENSP ID: ENSP00000471127
  MOD_RES (1)..(1): Any amino acid
XGRILSMVNTDDVNAIILAQKNMLDRFEKTNEMLLNFNNLSSARLQQMSERFLHHTRTLVEMKRDLDSIFRRIRYPRGILPGGRG

SEQ ID NO: 44681 - protein, 176 aa, Homo sapiens; identical to SEQ ID NO: 44671
  Payload ID: 9105
  Gene Symbol: KXD1
  Gene Name: KxDL motif containing 1
  Uniprot ID: Q9BQD3
  ENSP ID: ENSP00000471554

SEQ ID NO: 44682 - protein, 131 aa, Homo sapiens
  Payload ID: 9105
  Gene Symbol: KXD1
  Gene Name: KxDL motif containing 1
  ENSP ID: ENSP00000472268
MDLPDSASRVFCGRILSMVNTDDVNAIILAQKNMLDRFEKTNEMLLNFNNLSSARLQQMSERFLHHTRTLVEMKRDLDSIFRRIRTLKGKLARQHPEAFSHIPEASFLEEEDEDPIPPSTTTTIATSEQST

SEQ ID NO: 44683 - protein, 128 aa, Homo sapiens; identical to SEQ ID NO: 44674
  Payload ID: 9105
  Gene Symbol: KXD1
  Gene Name: KxDL motif containing 1
  ENSP ID: ENSP00000472535

SEQ ID NO: 44684 - protein, 176 aa, Homo sapiens; identical to SEQ ID NO: 44671
  Payload ID: 9105
  Gene Symbol: KXD1
  Gene Name: KxDL motif containing 1
  Uniprot ID: Q9BQD3
  ENSP ID: ENSP00000472678

SEQ ID NO: 44685 - protein, 176 aa, Homo sapiens; identical to SEQ ID NO: 44671
  Payload ID: 9105
  Gene Symbol: KXD1
  Gene Name: KxDL motif containing 1
  Uniprot ID: Q9BQD3
  ENSP ID: ENSP00000472836

SEQ ID NO: 44686 - protein, 5 aa, Homo sapiens
  Payload ID: 9105
  Gene Symbol: KXD1
  Gene Name: KxDL motif containing 1
  ENSP ID: ENSP00000473057
MDLPD

SEQ ID NO: 44687 - protein, 465 aa, Homo sapiens
  Payload ID: 9106
  Gene Symbol: KYNU
  Gene Name: kynureninase
  Uniprot ID: Q16719
  ENSP ID: ENSP00000264170
MEPSSLELPADTVQRIAAELKCHPTDERVALHLDEEDKLRHFRECFYIPKIQDLPPVDLSLVNKDENAIYFLGNSLGLQPKMVKTYLEEELDKWAKIAAYGHEVGKRPWITGDESIVGLMKDIVGANEKEIALMNALTVNLHLLMLSFFKPTPKRYKILLEAKAFPSDHYAIESQLQLHGLNIEESMRMIKPREGEETLRIEDILEVIEKEGDSIAVILFSGVHFYTGQHFNIPAITKAGQAKGCYVGFDLAHAVGNVELYLHDWGVDFACWCSYKYLNAGAGGIAGAFIHEKHAHTIKPALVGWFGHELSTRFKMDNKLQLIPGVCGFRISNPPILLVCSLHASLEIFKQATMKALRKKSVLLTGYLEYLIKHNYGKDKAATKKPVVNIITPSHVEERGCQLTITFSVPNKDVFQELEKRGVVCDKRNPNGIRVAPVPLYNSFHDVYKFTNLLTSILDSAETKN

SEQ ID NO: 44688 - protein, 307 aa, Homo sapiens
  Payload ID: 9106
  Gene Symbol: KYNU
  Gene Name: kynureninase
  Uniprot ID: Q16719
  ENSP ID: ENSP00000364928
MEPSSLELPADTVQRIAAELKCHPTDERVALHLDEEDKLRHFRECFYIPKIQDLPPVDLSLVNKDENAIYFLGNSLGLQPKMVKTYLEEELDKWAKIAAYGHEVGKRPWITGDESIVGLMKDIVGANEKEIALMNALTVNLHLLMLSFFKPTPKRYKILLEAKAFPSDHYAIESQLQLHGLNIEESMRMIKPREGEETLRIEDILEVIEKEGDSIAVILFSGVHFYTGQHFNIPAITKAGQAKGCYVGFDLAHAVGNVELYLHDWGVDFACWCSYKYLNAGAGGIAGAFIHEKHAHTIKPARSEFFN

SEQ ID NO: 44689 - protein, 465 aa, Homo sapiens; identical to SEQ ID NO: 44687
  Payload ID: 9106
  Gene Symbol: KYNU
  Gene Name: kynureninase
  Uniprot ID: Q16719
  ENSP ID: ENSP00000386731

SEQ ID NO: 44690 - protein, 148 aa, Homo sapiens
  Payload ID: 9106
  Gene Symbol: KYNU
  Gene Name: kynureninase
  ENSP ID: ENSP00000387296
MEPSSLELPADTVQRIAAELKCHPTDERVALHLDEEDKLRHFRECFYIPKIQDLPPVDLSLVNKDENAIYFLGNSLGLQPKMVKTYLEEELDKWAKIAAYGHEVGKRPWITGDESIVGLMKDIVATLTDPQHNQPGNDLSMCNLKSSC

SEQ ID NO: 44691 - protein, 76 aa, Homo sapiens
  Payload ID: 9106
  Gene Symbol: KYNU
  Gene Name: kynureninase
  ENSP ID: ENSP00000401190
MEPSSLELPADTVQRIAAELKCHPTDERVALHLDEEDKLRHFRECFYIPKIQDLPPEQPMVMKWGSVLGLQEMRVL

SEQ ID NO: 44692 - protein, 168 aa, Homo sapiens
  Payload ID: 9106
  Gene Symbol: KYNU
  Gene Name: kynureninase
  ENSP ID: ENSP00000481930
  MOD_RES (1)..(1): Any amino acid
XKMVKTYLEEELDKWAKIAAYGHEVGKRPWITGDESIVGLMKDIVGANEKEIALMNALTVNLHLLMLSFFKPTPKRYKILLEAKAFPSDHYAIESQLQLHGLNIEESMRMIKPREGEETLRIEDILEVIEKEGDSIAVILFSGVHFYTGQHFNIPAITKAGQAKLTKS

SEQ ID NO: 44693 - protein, 157 aa, Homo sapiens
  Payload ID: 9106
  Gene Symbol: KYNU
  Gene Name: kynureninase
  ENSP ID: ENSP00000482009
  MOD_RES (1)..(1): Any amino acid
XAAYGHEVGKRPWITGDESIVGLMKDIVGANEKEIALMNALTVNLHLLMLSFFKPTPKRYKILLEAKAFPSDHYAIESQLQLHGLNIEESMRMIKPREGEETLRIEDILEVIEKEGDSIAVILFSGVHFYTGQHFNIPAITKAGQAKVATLGSSSVP

SEQ ID NO: 44694 - protein, 236 aa, Homo sapiens
  Payload ID: 9106
  Gene Symbol: KYNU
  Gene Name: kynureninase
  ENSP ID: ENSP00000484801
ADTVQRIAAELKCHPTDERVALHLDEEDKLRHFRECFYIPKIQDLPPVDLSLVNKDENAIYFLGNSLGLQPKMVKTYLEEELDKWAKIAAYGHEVGKRPWITGDESIVGLMKDIVGANEKEIALMNALTVNLHLLMLSFFKPTPKRYKILLEAKAFPSDHYAIESQLQLHGLNIEESMRMIKPREGEETLRIEDILEVIEKEGDSIAVILFSGVHFYTGQHFNIPAITKAGQAKVV

SEQ ID NO: 44695 - protein, 182 aa, Homo sapiens
  Payload ID: 9107
  Gene Symbol: KMO
  Gene Name: kynurenine 3-monooxygenase (kynurenine 3-hydroxylase)
  ENSP ID: ENSP00000355513
  MOD_RES (1)..(1): Any amino acid
XGMNAGFEDCLVFDELMDKFSNDLSLCLPVFSRLRIPDDHAISDLSMYNYIEMRAHVNSSWFIFQKNMERFLHAIMPSTFIPLYTMVTFSRIRYHEAVQRWHWQKKVINKGLFFLGSLIAISSTYLLIHYMSPRSFLRLRRPWNWIAHFRNTTCFPAKAVDSLEQISNLISRLLSHSEILQT

SEQ ID NO: 44696 - protein, 452 aa, Homo sapiens
  Payload ID: 9107
  Gene Symbol: KMO
  Gene Name: kynurenine 3-monooxygenase (kynurenine 3-hydroxylase)
  Uniprot ID: O15229
  ENSP ID: ENSP00000355515
MDSSVIQRKKVAVIGGGLVGSLQACFLAKRNFQIDVYEAREDTRVATFTRGRSINLALSHRGRQALKAVGLEDQIVSQGIPMRARMIHSLSGKKSAIPYGTKSQYILSVSRENLNKDLLTAAEKYPNVKMHFNHRLLKCNPEEGMITVLGSDKVPKDVTCDLIVGCDGAYSTVRSHLMKKPRFDYSQQYIPHGYMELTIPPKNGDYAMEPNYLHIWPRNTFMMIALPNMNKSFTCTLFMPFEEFEKLLTSNDVVDFFQKYFPDAIPLIGEKLLVQDFFLLPAQPMISVKCSSFHFKSHCVLLGDAAHAIVPFFGQGMNAGFEDCLVFDELMDKFSNDLSLCLPVFSRLRIPDDHAISDLSMYNYIEVTFSRIRYHEAVQRWHWQKKVINKGLFFLGSLIAISSTYLLIHYMSPRSFLRLRRPWNWIAHFRNTTCFPAKAVDSLEQISNLISR

SEQ ID NO: 44697 - protein, 473 aa, Homo sapiens
  Payload ID: 9107
  Gene Symbol: KMO
  Gene Name: kynurenine 3-monooxygenase (kynurenine 3-hydroxylase)
  Uniprot ID: O15229
  ENSP ID: ENSP00000355516
MDSSVIQRKKVAVIGGGLVGSLQACFLAKRNFQIDVYEAREDTRVATFTRGRSINLALSHRGRQALKAVGLEDQIVSQGIPMRARMIHSLSGKKSAIPYGTKSQYILSVSRENLNKDLLTAAEKYPNVKMHFNHRLLKCNPEEGMITVLGSDKVPKDVTCDLIVGCDGAYSTVRSHLMKKPRFDYSQQYIPHGYMELTIPPKNGDYAMEPNYLHIWPRNTFMMIALPNMNKSFTCTLFMPFEEFEKLLTSNDVVDFFQKYFPDAIPLIGEKLLVQDFFLLPAQPMISVKCSSFHFKSHCVLLGDAAHAIVPFFGQGMNAGFEDCLVFDELMDKFSNDLSLCLPVFSRLRIPDDHAISDLSMYNYIEKNMERFLHAIMPSTFIPLYTMVTFSRIRYHEAVQRWHWQKKVINKGLFFLGSLIAISSTYLLIHYMSPRSFLRLRRPWNWIAHFRNTTCFPAKAVDSLEQISNLISR

SEQ ID NO: 44698 - protein, 486 aa, Homo sapiens
  Payload ID: 9107
  Gene Symbol: KMO
  Gene Name: kynurenine 3-monooxygenase (kynurenine 3-hydroxylase)
  Uniprot ID: O15229
  ENSP ID: ENSP00000355517
MDSSVIQRKKVAVIGGGLVGSLQACFLAKRNFQIDVYEAREDTRVATFTRGRSINLALSHRGRQALKAVGLEDQIVSQGIPMRARMIHSLSGKKSAIPYGTKSQYILSVSRENLNKDLLTAAEKYPNVKMHFNHRLLKCNPEEGMITVLGSDKVPKDVTCDLIVGCDGAYSTVRSHLMKKPRFDYSQQYIPHGYMELTIPPKNGDYAMEPNYLHIWPRNTFMMIALPNMNKSFTCTLFMPFEEFEKLLTSNDVVDFFQKYFPDAIPLIGEKLLVQDFFLLPAQPMISVKCSSFHFKSHCVLLGDAAHAIVPFFGQGMNAGFEDCLVFDELMDKFSNDLSLCLPVFSRLRIPDDHAISDLSMYNYIEMRAHVNSSWFIFQKNMERFLHAIMPSTFIPLYTMVTFSRIRYHEAVQRWHWQKKVINKGLFFLGSLIAISSTYLLIHYMSPRSFLRLRRPWNWIAHFRNTTCFPAKAVDSLEQISNLISR

SEQ ID NO: 44699 - protein, 661 aa, Homo sapiens
  Payload ID: 9108
  Gene Symbol: KY
  Gene Name: kyphoscoliosis peptidase
  Uniprot ID: Q8NBH2
  ENSP ID: ENSP00000397598
MELKKDINAVSIDMLLIVHSEKRRAAQGTLSDQQANPSSLLQRGGGFQGVGNGVRRWQKLEGNDFHENLVEKQHPQQPQVITSYNSQGTQLTVEVHPRDAMPQLLKKFSLAKRLQGDKNGNTRPRQPGGKDAHAYPWDRSSLKSMSLDLQQFEKLDIYASQVTAKSGLDELVSDLLQEAHTDLERVRAIWIWICHHIEYDIAAAQEKDRQAFKPTDILRTQKTNCDGYAGLFERMCRLAGVQCMTVPGYSKGFGYQTGQSFSGEFDHAWNAVYLEGRWHLVDSTWGSGLVDTITSKFTFLYNEFYFLTHPALFIEDHFPDNKNWQLLKPPQSLRQFENNMYHKSEFYNKGMLSAHPETSMIRTVNGKATVTIESCAPTLFMFMLNGKQEHGLLSLRKNGMKLEVYPPTMGTHKLQIFAKGNSDIYSSVLEYTLKCNYVDMGVQLPAELHQPVGPSWFSEQMGIMKPSHPDPIIHTSDGRCSISFSVEEGINVLASLHGDDGPITEETQRRYIFQLHREKQTELKVQLPHAGKFALKIFVKKRQEPGNYIFVFNYLVCCANTKVNWPMFPESFGNWGQDNELLEPLSGVLPANRNVPFKLKLHGIAKVLVKGQDTWPLTLNHEGYWEGSCSTAGCQEVYVMVLENANHNFYSYILKYKVNAQ

SEQ ID NO: 44700 - protein, 640 aa, Homo sapiens
  Payload ID: 9108
  Gene Symbol: KY
  Gene Name: kyphoscoliosis peptidase
  Uniprot ID: Q8NBH2
  ENSP ID: ENSP00000421297
MELKKDINAVSIDMLLIVHSEKRRAAQGTLSDQQANPSSLLQRGGGFQGVGNGVRRWQKLEGNDFHGTQLTVEVHPRDAMPQLLKKFSLAKRLQGDKNGNTRPRQPGGKDAHAYPWDRSSLKSMSLDLQQFEKLDIYASQVTAKSGLDELVSDLLQEAHTDLERVRAIWIWICHHIEYDIAAAQEKDRQAFKPTDILRTQKTNCDGYAGLFERMCRLAGVQCMTVPGYSKGFGYQTGQSFSGEFDHAWNAVYLEGRWHLVDSTWGSGLVDTITSKFTFLYNEFYFLTHPALFIEDHFPDNKNWQLLKPPQSLRQFENNMYHKSEFYNKGMLSAHPETSMIRTVNGKATVTIESCAPTLFMFMLNGKQEHGLLSLRKNGMKLEVYPPTMGTHKLQIFAKGNSDIYSSVLEYTLKCNYVDMGVQLPAELHQPVGPSWFSEQMGIMKPSHPDPIIHTSDGRCSISFSVEEGINVLASLHGDDGPITEETQRRYIFQLHREKQTELKVQLPHAGKFALKIFVKKRQEPGNYIFVFNYLVCCANTKVNWPMFPESFGNWGQDNELLEPLSGVLPANRNVPFKLKLHGIAKVLVKGQDTWPLTLNHEGYWEGSCSTAGCQEVYVMVLENANHNFYSYILKYKVNAQ

SEQ ID NO: 44701 - protein, 308 aa, Homo sapiens
  Payload ID: 9108
  Gene Symbol: KY
  Gene Name: kyphoscoliosis peptidase
  ENSP ID: ENSP00000426777
MELKKDINAVSIDMLLIVHSEKRRAAQGTLSDQQANPSSLLQRGGGFQGVGNGVRRWQKLEGNDFHENLVEKQHPQQPQVITSYNSQGTQLTVEVHPRDAMPQLLKKFSLAKRLQGDKNGNTRPRQPGGKDAHAYPWDRSSLKSMSLDLQQFEKLDIYASQVTAKSGLDELVSDLLQEAHTDLERVRAIWIWICHHIEYDIAAAQEKDRQAFKPTDILRTQKTNCDGYAGLFERMCRLAGVQCMTVPGYSKGFGYQTGQSFSGEFDHAWNAVYLEGRWHLVDSTWGSGLVDTITSKFTFLEWEGHGHH

SEQ ID NO: 44702 - protein, 143 aa, Homo sapiens
  Payload ID: 9109
  Gene Symbol: LAGE3
  Gene Name: L antigen family, member 3
  Uniprot ID: Q14657
  ENSP ID: ENSP00000349923
MRDADADAGGGADGGDGRGGHSCRGGVDTAAAPAGGAPPAHAPGPGRDAASAARGSRMRPHIFTLSVPFPTPLEAEIAHGSLAPDAEPHQRVVGKDLTVSGRILVVRWKAEDCRLLRISVINFLDQLSLVVRTMQRFGPPVSR

SEQ ID NO: 44703 - protein, 105 aa, Homo sapiens
  Payload ID: 9109
  Gene Symbol: LAGE3
  Gene Name: L antigen family, member 3
  ENSP ID: ENSP00000478022
MQTQAEALTAGMAGVATAAAGAWTQPQLRPVELPQRTRQVRAETPRLRQGVTNAAAHIHPQRAFPDPLGGGNRPWVPGTRCRAPPKGGWEGSHSEWQDPGRPLES

SEQ ID NO: 44704 - protein, 743 aa, Homo sapiens
  Payload ID: 9110
  Gene Symbol: L3MBTL1
  Gene Name: l(3)mbt-like 1 (Drosophila)
  ENSP ID: ENSP00000362226
MRRREGHGTDSEMGQGPVRESQSSDPPALQFRISEYKPLNMAGVEQPPSPELRQEGVTEYEDGGAPAGDGEAGPQQAEDHPQNPPEDPNQDPPEDDSTCQCQACGPHQAAGPDLGSSNDGCPQLFQERSVIVENSSGSTSASELLKPMKKRKRREYQSPSEEESEPEAMEKQEEGKDPEGQPTASTPESEEWSSSQPATGEKKECWSWESYLEEQKAITAPVSLFQDSQAVTHNKNGFKLGMKLEGIDPQHPSMYFILTVAEVCGYRLRLHFDGYSECHDFWVNANSPDIHPAGWFEKTGHKLQPPKGYKEEEFSWSQYLRSTRAQAAPKHLFVSQSHSPPPLGFQVGMKLEAVDRMNPSLVCVASVTDVVDSRFLVHFDNWDDTYDYWCDPSSPYIHPVGWCQKQGKPLTPPQDYPDPDNFCWEKYLEETGASAVPTWAFKVRPPHSFLVNMKLEAVDRRNPALIRVASVEDVEDHRIKIHFDGWSHGYDFWIDADHPDIHPAGWCSKTGHPLQPPLGPREPSSASPGGCPPLSYRSLPHTRTSKYSFHHRLFFPRKCPTPGCDGSGHVTGKFTAHHCLSGCPLAERNQSRLKAELSDSEASARKKNLSGFSPRKKPRHHGRIGRPPKYRKIPQEDFQTLTPDVVHQSLFMSALSAHPDRSLSVCWEQHCKLLPGVAGISASTVAKWTIDEVFGFVQTLTGCEDQARLFKDEVRCKCRVGDRAGVTVLKTAGSRCPPQRHFC

SEQ ID NO: 44705 - protein, 772 aa, Homo sapiens
  Payload ID: 9110
  Gene Symbol: L3MBTL1
  Gene Name: l(3)mbt-like 1 (Drosophila)
  Uniprot ID: Q9Y468
  ENSP ID: ENSP00000362227
MRRREGHGTDSEMGQGPVRESQSSDPPALQFRISEYKPLNMAGVEQPPSPELRQEGVTEYEDGGAPAGDGEAGPQQAEDHPQNPPEDPNQDPPEDDSTCQCQACGPHQAAGPDLGSSNDGCPQLFQERSVIVENSSGSTSASELLKPMKKRKRREYQSPSEEESEPEAMEKQEEGKDPEGQPTASTPESEEWSSSQPATGEKKECWSWESYLEEQKAITAPVSLFQDSQAVTHNKNGFKLGMKLEGIDPQHPSMYFILTVAEVCGYRLRLHFDGYSECHDFWVNANSPDIHPAGWFEKTGHKLQPPKGYKEEEFSWSQYLRSTRAQAAPKHLFVSQSHSPPPLGFQVGMKLEAVDRMNPSLVCVASVTDVVDSRFLVHFDNWDDTYDYWCDPSSPYIHPVGWCQKQGKPLTPPQDYPDPDNFCWEKYLEETGASAVPTWAFKVRPPHSFLVNMKLEAVDRRNPALIRVASVEDVEDHRIKIHFDGWSHGYDFWIDADHPDIHPAGWCSKTGHPLQPPLGPREPSSASPGGCPPLSYRSLPHTRTSKYSFHHRKCPTPGCDGSGHVTGKFTAHHCLSGCPLAERNQSRLKAELSDSEASARKKNLSGFSPRKKPRHHGRIGRPPKYRKIPQEDFQTLTPDVVHQSLFMSALSAHPDRSLSVCWEQHCKLLPGVAGISASTVAKWTIDEVFGFVQTLTGCEDQARLFKDEARIVRVTHVSGKTLVWTVAQLGDLVCSDHLQEGKGILETGVHSLLCSLPTHLLAKLSFASDSQY

SEQ ID NO: 44706 - protein, 138 aa, Homo sapiens
  Payload ID: 9110
  Gene Symbol: L3MBTL1
  Gene Name: l(3)mbt-like 1 (Drosophila)
  ENSP ID: ENSP00000387971
MHLVAGDSPGSGPHLPATAFIIPASSATLGLPSSALDVSCFPREPIHVGAPEQVAGCEPVSATVLPQLSAGPASSSTSTVRLLEWTEAAAPPPGGGLRFRISEYKPLNMAGVEQPPSPELRQEGVTEYEDGGAPAGDG

SEQ ID NO: 44707 - protein, 840 aa, Homo sapiens
  Payload ID: 9110
  Gene Symbol: L3MBTL1
  Gene Name: l(3)mbt-like 1 (Drosophila)
  Uniprot ID: Q9Y468
  ENSP ID: ENSP00000398516
MHLVAGDSPGSGPHLPATAFIIPASSATLGLPSSALDVSCFPREPIHVGAPEQVAGCEPVSATVLPQLSAGPASSSTSTVRLLEWTEAAAPPPGGGLRFRISEYKPLNMAGVEQPPSPELRQEGVTEYEDGGAPAGDGEAGPQQAEDHPQNPPEDPNQDPPEDDSTCQCQACGPHQAAGPDLGSSNDGCPQLFQERSVIVENSSGSTSASELLKPMKKRKRREYQSPSEEESEPEAMEKQEEGKDPEGQPTASTPESEEWSSSQPATGEKKECWSWESYLEEQKAITAPVSLFQDSQAVTHNKNGFKLGMKLEGIDPQHPSMYFILTVAEVCGYRLRLHFDGYSECHDFWVNANSPDIHPAGWFEKTGHKLQPPKGYKEEEFSWSQYLRSTRAQAAPKHLFVSQSHSPPPLGFQVGMKLEAVDRMNPSLVCVASVTDVVDSRFLVHFDNWDDTYDYWCDPSSPYIHPVGWCQKQGKPLTPPQDYPDPDNFCWEKYLEETGASAVPTWAFKVRPPHSFLVNMKLEAVDRRNPALIRVASVEDVEDHRIKIHFDGWSHGYDFWIDADHPDIHPAGWCSKTGHPLQPPLGPREPSSASPGGCPPLSYRSLPHTRTSKYSFHHRKCPTPGCDGSGHVTGKFTAHHCLSGCPLAERNQSRLKAELSDSEASARKKNLSGFSPRKKPRHHGRIGRPPKYRKIPQEDFQTLTPDVVHQSLFMSALSAHPDRSLSVCWEQHCKLLPGVAGISASTVAKWTIDEVFGFVQTLTGCEDQARLFKDEARIVRVTHVSGKTLVWTVAQLGDLVCSDHLQEGKGILETGVHSLLCSLPTHLLAKLSFASDSQY

SEQ ID NO: 44708 - protein, 840 aa, Homo sapiens; identical to SEQ ID NO: 44707
  Payload ID: 9110
  Gene Symbol: L3MBTL1
  Gene Name: l(3)mbt-like 1 (Drosophila)
  Uniprot ID: Q9Y468
  ENSP ID: ENSP00000402107

SEQ ID NO: 44709 - protein, 538 aa, Homo sapiens
  Payload ID: 9110
  Gene Symbol: L3MBTL1
  Gene Name: l(3)mbt-like 1 (Drosophila)
  ENSP ID: ENSP00000410139
QKAITAPVSLFQDSQAVTHNKNGFKLGMKLEGIDPQHPSMYFILTVAEVCGYRLRLHFDGYSECHDFWVNANSPDIHPAGWFEKTGHKLQPPKGYKEEEFSWSQYLRSTRAQAAPKHLFVSQSHSPPPLGFQVGMKLEAVDRMNPSLVCVASVTDVVDSRFLVHFDNWDDTYDYWCDPSSPYIHPVGWCQKQGKPLTPPQDYPDPDNFCWEKYLEETGASAVPTWAFKVRPPHSFLVNMKLEAVDRRNPALIRVASVEDVEDHRIKIHFDGWSHGYDFWIDADHPDIHPAGWCSKTGHPLQPPLGPREPSSASPGGCPPLSYRSLPHTRTSKYSFHHRKCPTPGCDGSGHVTGKFTAHHCLSGCPLAERNQSRLKAELSDSEASARKKNLSGFSPRKKPRHHGRIGRPPKYRKIPQEDFQTLTPDVVHQSLFMSALSAHPDRSLSVCWEQHCKLLPGVAGISASTVAKWTIDEVFGFVQTLTGCEDQARLFKDEMIDGEAFLLLTQADIVKIMSVKLGPALKIYNAILMFKNADDTLK

SEQ ID NO: 44710 - protein, 45 aa, Homo sapiens
  Payload ID: 9110
  Gene Symbol: L3MBTL1
  Gene Name: l(3)mbt-like 1 (Drosophila)
  ENSP ID: ENSP00000412938
  MOD_RES (1)..(1): Any amino acid
XDFWVNANSPDIHPAGWFEKTGHKLQPPKESPTPGLPGGHEAGGC

SEQ ID NO: 44711 - protein, 84 aa, Homo sapiens
  Payload ID: 9110
  Gene Symbol: L3MBTL1
  Gene Name: l(3)mbt-like 1 (Drosophila)
  ENSP ID: ENSP00000415971
MAGVEQPPSPELRQEGVTEYEDGGAPAGDGEAGPQQAEDHPQNPPEDPNQDPPEDDSTCQCQACGPHQAAGPDLGSSNDGCPQL

SEQ ID NO: 44712 - protein, 705 aa, Homo sapiens
  Payload ID: 9111
  Gene Symbol: L3MBTL2
  Gene Name: l(3)mbt-like 2 (Drosophila)
  Uniprot ID: Q969R5
  ENSP ID: ENSP00000216237
MEKPRSIEETPSSEPMEEEEDDDLELFGGYDSFRSYNSSVGSESSSYLEESSEAENEDREAGELPTSPLHLLSPGTPRSLDGSGSEPAVCEMCGIVGTREAFFSKTKRFCSVSCSRSYSSNSKKASILARLQGKPPTKKAKVLHKAAWSAKIGAFLHSQGTGQLADGTPTGQDALVLGFDWGKFLKDHSYKAAPVSCFKHVPLYDQWEDVMKGMKVEVLNSDAVLPSRVYWIASVIQTAGYRVLLRYEGFENDASHDFWCNLGTVDVHPIGWCAINSKILVPPRTIHAKFTDWKGYLMKRLVGSRTLPVDFHIKMVESMKYPFRQGMRLEVVDKSQVSRTRMAVVDTVIGGRLRLLYEDGDSDDDFWCHMWSPLIHPVGWSRRVGHGIKMSERRSDMAHHPTFRKIYCDAVPYLFKKVRAVYTEGGWFEEGMKLEAIDPLNLGNICVATVCKVLLDGYLMICVDGGPSTDGLDWFCYHASSHAIFPATFCQKNDIELTPPKGYEAQTFNWENYLEKTKSKAAPSRLFNMDCPNHGFKVGMKLEAVDLMEPRLICVATVKRVVHRLLSIHFDGWDSEYDQWVDCESPDIYPVGWCELTGYQLQPPVAAEPATPLKAKEATKKKKKQFGKKRKRIPPTKTRPLRQGSKKPLLEDDPQGARKISSEPVPGEIIAVRVKEEHLDVASPDKASSPELPVSVENIKQETDD

SEQ ID NO: 44713 - protein, 288 aa, Homo sapiens
  Payload ID: 9111
  Gene Symbol: L3MBTL2
  Gene Name: l(3)mbt-like 2 (Drosophila)
  ENSP ID: ENSP00000399405
  MOD_RES (1)..(1): Any amino acid
XRPHLQNQWRKRKMTTWSCLVAMIVSGVITAVWAVRAAPIWRSQVKQKMRIGKQGNCRPPRCICSALGLLAPWMAVVLSQGKPPTKKAKVLHKAAWSAKIGAFLHSQGTGQLADGTPTGQDALVLGFDWGKFLKDHSYKAAPVSCFKHVPLYDQWEDVMKGMKVEVLNSDAVLPSRVYWIASVIQTAGYRVLLRYEGFENDASHDFWCNLGTVDVHPIGWCAINSKILVPPRTIHAKFTDWKGYLMKRLVGSRTLPVDFHIKVGSEPLTDVPPSALPFFCILHATHWS

SEQ ID NO: 44714 - protein, 232 aa, Homo sapiens
  Payload ID: 9111
  Gene Symbol: L3MBTL2
  Gene Name: l(3)mbt-like 2 (Drosophila)
  ENSP ID: ENSP00000403767
ETPSSEPMEEEEDDDLELFGGYDSFRSYNSSVGSESSSYLEESSEAENEDREAGELPTSPLHLLSPGTPRSLDGSGSEPAVCEMCGIVGTREAFFSKTKRFCSVSCSRSYSSNSKKASILARLQGKPPTKKAKVLHKAAWSAKIGAFLHSQGTGQLADGTPTGQDALVLGFDWGKFLKDHSYKAAPVSCFKHGIGCCFGMKALKMTPAMTSGATWEQWMSTPLAGVPSTARS

SEQ ID NO: 44715 - protein, 40 aa, Homo sapiens
  Payload ID: 9111
  Gene Symbol: L3MBTL2
  Gene Name: l(3)mbt-like 2 (Drosophila)
  ENSP ID: ENSP00000405849
MEKPRSIERWGVAVLPRLVSNSWVQAIHLPQPPKVLGLQM

SEQ ID NO: 44716 - protein, 614 aa, Homo sapiens
  Payload ID: 9111
  Gene Symbol: L3MBTL2
  Gene Name: l(3)mbt-like 2 (Drosophila)
  Uniprot ID: Q969R5
  ENSP ID: ENSP00000414423
MEKPRSIEETPSSEPMEEEEDDDLELFGGYDSFRSYNSSVGSESSSYLEESSEAENEDREAGELPTSPLHLLSPGTPRSLDGSGSEPAVCEMCGIVGTREAFFSKTKRFCSVSCSRSYSSNSKKASILARLQGKPPTKKAKVLHKAAWSAKIGAFLHSQGTGQLADGTPTGQDALVLGFDWGKFLKDHSYKAAPVSCFKHVPLYDQWEDVMKGMKVEVLNSDAVLPSRVYWIASVIQTAGYRVLLRYEGFENDASHDFWCNLGTVDVHPIGWCAINSKILVPPRTIHAKFTDWKGYLMKRLVGSRTLPVDFHIKMVESMKYPFRQGMRLEVVDKSQVSRTRMAVVDTVIGGRLRLLYEDGDSDDDFWCHMWSPLIHPVGWSRRVGHGIKMSERRSDMAHHPTFRKIYCDAVPYLFKKVRAVYTEGGWFEEGMKLEAIDPLNLGNICVATVCKVLLDGYLMICVDGGPSTDGLDWFCYHASSHAIFPATFCQKNDIELTPPKGYEAQTFNWENYLEKTKSKAAPSRLFNMDCPNHGFKVGMKLEAVDLMEPRLICVATVKRVVHRLLSIHFDGWDSEYDQWVDCESPDIYPVGWCELTGYQLQPPVAAGKLPRSL

SEQ ID NO: 44717 - protein, 780 aa, Homo sapiens
  Payload ID: 9112
  Gene Symbol: L3MBTL3
  Gene Name: l(3)mbt-like 3 (Drosophila)
  Uniprot ID: Q96JM7
  ENSP ID: ENSP00000354526
MTESASSTSGQEFDVFSVMDWKDGVGTLPGSDLKFRVNEFGALEVITDENEMENVKKATATTTWMVPTAQEAPTSPPSSRPVFPPAYWTSPPGCPTVFSEKTGMPFRLKDPVKVEGLQFCENCCQYGNVDECLSGGNYCSQNCARHIKDKDQKEERDVEEDNEEEDPKCSRKKKPKLSLKADTKEDGEERDDEMENKQDVRILRGSQRARRKRRGDSAVLKQGLPPKGKKAWCWASYLEEEKAVAVPAKLFKEHQSFPYNKNGFKVGMKLEGVDPEHQSVYCVLTVAEVCGYRIKLHFDGYSDCYDFWVNADALDIHPVGWCEKTGHKLHPPKGYKEEEFNWQTYLKTCKAQAAPKSLFENQNITVIPSGFRVGMKLEAVDKKNPSFICVATVTDMVDNRFLVHFDNWDESYDYWCEASSPHIHPVGWCKEHRRTLITPPGYPNVKHFSWDKYLEETNSLPAPARAFKVKPPHGFQKKMKLEVVDKRNPMFIRVATVADTDDHRVKVHFDGWNNCYDYWIDADSPDIHPVGWCSKTGHPLQPPLSPLELMEASEHGGCSTPGCKGIGHFKRARHLGPHSAANCPYSEINLNKDRIFPDRLSGEMPPASPSFPRNKRTDANESSSSPEIRDQHADDVKEDFEERTESEMRTSHEARGAREEPTVQQAQRRSAVFLSFKSPIPCLPLRWEQQSKLLPTVAGIPASKVSKWSTDEVSEFIQSLPGCEEHGKVFKDEQIDGEAFLLMTQTDIVKIMSIKLGPALKIFNSILMFKAAEKNSHNEL

SEQ ID NO: 44718 - protein, 780 aa, Homo sapiens; identical to SEQ ID NO: 44717
  Payload ID: 9112
  Gene Symbol: L3MBTL3
  Gene Name: l(3)mbt-like 3 (Drosophila)
  Uniprot ID: Q96JM7
  ENSP ID: ENSP00000357118

SEQ ID NO: 44719 - protein, 755 aa, Homo sapiens
  Payload ID: 9112
  Gene Symbol: L3MBTL3
  Gene Name: l(3)mbt-like 3 (Drosophila)
  Uniprot ID: Q96JM7
  ENSP ID: ENSP00000357121
MTESASSTSGQEFDVFSVMDWKDGVGTLPGSDLKFRVNEFGALEVITDENEMENVKKATATTTWMVPTAQEVFSEKTGMPFRLKDPVKVEGLQFCENCCQYGNVDECLSGGNYCSQNCARHIKDKDQKEERDVEEDNEEEDPKCSRKKKPKLSLKADTKEDGEERDDEMENKQDVRILRGSQRARRKRRGDSAVLKQGLPPKGKKAWCWASYLEEEKAVAVPAKLFKEHQSFPYNKNGFKVGMKLEGVDPEHQSVYCVLTVAEVCGYRIKLHFDGYSDCYDFWVNADALDIHPVGWCEKTGHKLHPPKGYKEEEFNWQTYLKTCKAQAAPKSLFENQNITVIPSGFRVGMKLEAVDKKNPSFICVATVTDMVDNRFLVHFDNWDESYDYWCEASSPHIHPVGWCKEHRRTLITPPGYPNVKHFSWDKYLEETNSLPAPARAFKVKPPHGFQKKMKLEVVDKRNPMFIRVATVADTDDHRVKVHFDGWNNCYDYWIDADSPDIHPVGWCSKTGHPLQPPLSPLELMEASEHGGCSTPGCKGIGHFKRARHLGPHSAANCPYSEINLNKDRIFPDRLSGEMPPASPSFPRNKRTDANESSSSPEIRDQHADDVKEDFEERTESEMRTSHEARGAREEPTVQQAQRRSAVFLSFKSPIPCLPLRWEQQSKLLPTVAGIPASKVSKWSTDEVSEFIQSLPGCEEHGKVFKDEQIDGEAFLLMTQTDIVKIMSIKLGPALKIFNSILMFKAAEKNSHNEL

SEQ ID NO: 44720 - protein, 780 aa, Homo sapiens; identical to SEQ ID NO: 44717
  Payload ID: 9112
  Gene Symbol: L3MBTL3
  Gene Name: l(3)mbt-like 3 (Drosophila)
  Uniprot ID: Q96JM7
  ENSP ID: ENSP00000431962

SEQ ID NO: 44721 - protein, 190 aa, Homo sapiens
  Payload ID: 9112
  Gene Symbol: L3MBTL3
  Gene Name: l(3)mbt-like 3 (Drosophila)
  ENSP ID: ENSP00000433257
MTESASSTSGQEFDVFSVMDWKDGVGTLPGSDLKFRVNEFGALEVITDENEMENVKKATATTTWMVPTAQEAPTSPPSSRPVFPPAYWTSPPGCPTVFSEKTGMPFRLKDPVKVEGLQFCENCCQYGNVDECLSGGNYCSQNCARHIKDKDQKEERDVEEDNEEEDPKCSRKKKPKLSLKADTKEDGEER

SEQ ID NO: 44722 - protein, 163 aa, Homo sapiens
  Payload ID: 9112
  Gene Symbol: L3MBTL3
  Gene Name: l(3)mbt-like 3 (Drosophila)
  ENSP ID: ENSP00000436617
MTESASSTSGQEFDVFSVMDWKDGVGTLPGSDLKFRVNEFGALEVITDENEMENVKKATATTTWMVPTAQEAYTGDLAKSLPLFFSSTPMVVTNTYMLMTPKSTSPAPTSPPSSRPVFPPAYWTSPPGCPTVFSEKTGMPFRLKDPVKVEGLQFCENCCQYGN

SEQ ID NO: 44723 - protein, 755 aa, Homo sapiens; identical to SEQ ID NO: 44719
  Payload ID: 9112
  Gene Symbol: L3MBTL3
  Gene Name: l(3)mbt-like 3 (Drosophila)
  Uniprot ID: Q96JM7
  ENSP ID: ENSP00000436706

SEQ ID NO: 44724 - protein, 755 aa, Homo sapiens; identical to SEQ ID NO: 44719
  Payload ID: 9112
  Gene Symbol: L3MBTL3
  Gene Name: l(3)mbt-like 3 (Drosophila)
  Uniprot ID: Q96JM7
  ENSP ID: ENSP00000437185

SEQ ID NO: 44725 - protein, 623 aa, Homo sapiens
  Payload ID: 9113
  Gene Symbol: L3MBTL4
  Gene Name: l(3)mbt-like 4 (Drosophila)
  Uniprot ID: Q8NA19
  ENSP ID: ENSP00000284898
MKQPNRKRKLNMDSKERLDQDGRLEQAEEEKKPKDSTTPLSHVPSAAAQGAWSWEWYLKEQKAVAAPVELFSKDQSFPEHENGFQIGMRLEGIDPRHPSVFCVLSVAEVCGYRLRLHFDGYLSCYDFWTNAGSPDIHPVGWCEKTKHELHIPKGYRKDKFVWMDYLKACKLQNAPKKLFRNRSPNGPMSKEFQVGMKLEAVDRKNPSLVCVATIADIVEDRLLVHFDNWDDSYDYWCDVNSPYVQPVGWCQENGRTLIAPQGYPNPENFSWTEYLEATQTNAVPAKVFKMRLPHGFLPNMKLEVVDKRNPRLIRVATIVDVDDQRVKVHFDGWDHKYDYWVEADSPDIHPIGWCDVTGHPLEVPQRTNDLKILPGQAVCPTPGCRGIGHIRGPRYSGHHSAFGCPYSDMNLKKEATLHDRLREQTQANLESDSSHSKSKSLCSLNFNGKHEKVNSQPRLVQQAKCLKIKGKEDIDLDNLFRVLVLHPRGLEYSVEQAQQVLHQSVSMSTVSAHPFRDLPLGREQHCKLLPGVADIRASQVARWTVDEVAEFVQSLLGCEEHAKCFKKEQIDGKAFLLLTQTDIVKVMKIKLGPALKIYNSILMFRHSQELPEEDIASGQEVRG

SEQ ID NO: 44726 - protein, 614 aa, Homo sapiens
  Payload ID: 9113
  Gene Symbol: L3MBTL4
  Gene Name: l(3)mbt-like 4 (Drosophila)
  ENSP ID: ENSP00000318543
MKQPNRKRKLNMDSKERLDQDGRLEQAEEEKKPKDSTTPLSHVPSAAAQGAWSWEWYLKEQKAVAAPVELFSKDQSFPEHENGFQIGMRLEGIDPRHPSVFCVLSVAEVCGYRLRLHFDGYLSCYDFWTNAGSPDIHPVGWCEKTKHELHIPKGYRKDKFVWMDYLKACKLQNAPKKLFRNRSPNGPMSKEFQVGMKLEAVDRKNPSLVCVATIADIVEDRLLVHFDNWDDSYDYWCDVNSPYVQPVGWCQENGRTLIAPQGYPNPENFSWTEYLEATQTNAVPAKVFKMRLPHGFLPNMKLEVVDKRNPRLIRVATIVDVDDQRVKVHFDGWDHKYDYWVEADSPDIHPIGWCDVTGHPLEVPQRTNDLKILPGQAVCPTPGCRGIGHIRGPRYSGHHSAFGCPYSDMNLKKEATLHDRLREQTQANLESDSSHSKSKSLCSLNFNGKHEKVNSQPRLVQQAKCLKIKGKEDIDLDNLFREYSVEQAQQVLHQSVSMSTVSAHPFRDLPLGREQHCKLLPGVADIRASQVARWTVDEVAEFVQSLLGCEEHAKCFKKEQIDGKAFLLLTQTDIVKVMKIKLGPALKIYNSILMFRHSQELPEEDIASGQEVRG

SEQ ID NO: 44727 - protein, 534 aa, Homo sapiens
  Payload ID: 9113
  Gene Symbol: L3MBTL4
  Gene Name: l(3)mbt-like 4 (Drosophila)
  Uniprot ID: Q8NA19
  ENSP ID: ENSP00000382975
MKQPNRKRKLNMDSKERLDQDGRLEQAEEEKKPKDSTTPLSHVPSAAAQGAWSWEWYLKEQKAVAAPVELFSKDQSFPEHENGFQIGMRLEGIDPRHPSVFCVLSVAEVCGYRLRLHFDGYLSCYDFWTNAGSPDIHPVGWCEKTKHELHIPKGYRKDKFVWMDYLKACKLQNAPKKLFRNRSPNGPMSKEFQVGMKLEAVDRKNPSLVCVATIADIVEDRLLVHFDNWDDSYDYWCDVNSPYVQPVGWCQENGRTLIAPQGYPNPENFSWTEYLEATQTNAVPAKVFKMRLPHGFLPNMKLEVVDKRNPRLIRVATIVDVDDQRVKVHFDGWDHKYDYWVEADSPDIHPIGWCDVTGHPLEVPQRTNDLKILPGQAVCPTPGCRGIGHIRGPRYSGHHSAFGCPYSDMNLKKEATLHDRLREQTQANLESDSSHSKSKSLCSLNFNGKHEKVNSQPRLVQQAKCLKIKGKEDIDLDNLFRGRVRWLMPVIPALWEAEAGRSRDQEIKTILANAVKPRLYQKYKKLARRGGGCL

SEQ ID NO: 44728 - protein, 623 aa, Homo sapiens; identical to SEQ ID NO: 44725
  Payload ID: 9113
  Gene Symbol: L3MBTL4
  Gene Name: l(3)mbt-like 4 (Drosophila)
  Uniprot ID: Q8NA19
  ENSP ID: ENSP00000382976

SEQ ID NO: 44729 - protein, 122 aa, Homo sapiens
  Payload ID: 9113
  Gene Symbol: L3MBTL4
  Gene Name: l(3)mbt-like 4 (Drosophila)
  ENSP ID: ENSP00000462090
MKQPNRKRKLNMDSKERLDQDGRLEQAEEEKKPKDSTTPLSHVPSAAAQGAWSWEWYLKEQKAVAAPVELFSKDQSFPEHENGFQIGMRLEGIDPRHPSVFCVLSVAEVCGYRLRLHFDGYL

SEQ ID NO: 44730 - protein, 80 aa, Homo sapiens
  Payload ID: 9113
  Gene Symbol: L3MBTL4
  Gene Name: l(3)mbt-like 4 (Drosophila)
  ENSP ID: ENSP00000462295
MKQPNRKRKLNMDSKERLDQDGRLEQAEEEKKPKDSTTPLSHVPSAAAQGAWSWEWYLKEQKAVAAPVELFSKDQSFPEH

SEQ ID NO: 44731 - protein, 208 aa, Homo sapiens
  Payload ID: 9113
  Gene Symbol: L3MBTL4
  Gene Name: l(3)mbt-like 4 (Drosophila)
  ENSP ID: ENSP00000463600
MKQPNRKRKLNMDSKERLDQDGRLEQAEEEKKPKDSTTPLSHVPSAAAQGAWSWEWYLKEQKAVAAPVELFSKDQSFPEHENGFQIGMRLEGIDPRHPSVFCVLSVAEVCGYRLRLHFDGYLSCYDFWTNAGSPDIHPVGWCEKTKHELHIPKGYRKDKFVWMDYLKACKLQNAPKKLFRNRSPNGPMSKEFQVGMKLEAVDRKNPSL

SEQ ID NO: 44732 - protein, 1248 aa, Homo sapiens
  Payload ID: 9114
  Gene Symbol: L1CAM
  Gene Name: L1 cell adhesion molecule
  Uniprot ID: P32004
  ENSP ID: ENSP00000354712
MVVALRYVWPLLLCSPCLLIQIPEELMEPPVITEQSPRRLVVFPTDDISLKCEASGKPEVQFRWTRDGVHFKPKEELGVTVYQSPHSGSFTITGNNSNFAQRFQGIYRCFASNKLGTAMSHEIRLMAEGAPKWPKETVKPVEVEEGESVVLPCNPPPSAEPLRIYWMNSKILHIKQDERVTMGQNGNLYFANVLTSDNHSDYICHAHFPGTRTIIQKEPIDLRVKATNSMIDRKPRLLFPTNSSSHLVALQGQPLVLECIAEGFPTPTIKWLRPSGPMPADRVTYQNHNKTLQLLKVGEEDDGEYRCLAENSLGSARHAYYVTVEAAPYWLHKPQSHLYGPGETARLDCQVQGRPQPEVTWRINGIPVEELAKDQKYRIQRGALILSNVQPSDTMVTQCEARNRHGLLLANAYIYVVQLPAKILTADNQTYMAVQGSTAYLLCKAFGAPVPSVQWLDEDGTTVLQDERFFPYANGTLGIRDLQANDTGRYFCLAANDQNNVTIMANLKVKDATQITQGPRSTIEKKGSRVTFTCQASFDPSLQPSITWRGDGRDLQELGDSDKYFIEDGRLVIHSLDYSDQGNYSCVASTELDVVESRAQLLVVGSPGPVPRLVLSDLHLLTQSQVRVSWSPAEDHNAPIEKYDIEFEDKEMAPEKWYSLGKVPGNQTSTTLKLSPYVHYTFRVTAINKYGPGEPSPVSETVVTPEAAPEKNPVDVKGEGNETTNMVITWKPLRWMDWNAPQVQYRVQWRPQGTRGPWQEQIVSDPFLVVSNTSTFVPYEIKVQAVNSQGKGPEPQVTIGYSGEDYPQAIPELEGIEILNSSAVLVKWRPVDLAQVKGHLRGYNVTYWREGSQRKHSKRHIHKDHVVVPANTTSVILSGLRPYSSYHLEVQAFNGRGSGPASEFTFSTPEGVPGHPEALHLECQSNTSLLLRWQPPLSHNGVLTGYVLSYHPLDEGGKGQLSFNLRDPELRTHNLTDLSPHLRYRFQLQATTKEGPGEAIVREGGTMALSGISDFGNISATAGENYSVVSWVPKEGQCNFRFHILFKALGEEKGGASLSPQYVSYNQSSYTQWDLQPDTDYEIHLFKERMFRHQMAVKTNGTGRVRLPPAGFATEGWFIGFVSAIILLLLVLLILCFIKRSKGGKYSVKDKEDTQVDSEARPMKDETFGEYSDNEEKAFGSSQPSLNGDIKPLGSDDSLADYGGSVDVQFNEDGSFIGQYSGKKEKEAAGGNDSSGATSPINPAVALE

SEQ ID NO: 44733 - protein, 1253 aa, Homo sapiens
  Payload ID: 9114
  Gene Symbol: L1CAM
  Gene Name: L1 cell adhesion molecule
  Uniprot ID: P32004
  ENSP ID: ENSP00000355380
MVVALRYVWPLLLCSPCLLIQIPEEYEGHHVMEPPVITEQSPRRLVVFPTDDISLKCEASGKPEVQFRWTRDGVHFKPKEELGVTVYQSPHSGSFTITGNNSNFAQRFQGIYRCFASNKLGTAMSHEIRLMAEGAPKWPKETVKPVEVEEGESVVLPCNPPPSAEPLRIYWMNSKILHIKQDERVTMGQNGNLYFANVLTSDNHSDYICHAHFPGTRTIIQKEPIDLRVKATNSMIDRKPRLLFPTNSSSHLVALQGQPLVLECIAEGFPTPTIKWLRPSGPMPADRVTYQNHNKTLQLLKVGEEDDGEYRCLAENSLGSARHAYYVTVEAAPYWLHKPQSHLYGPGETARLDCQVQGRPQPEVTWRINGIPVEELAKDQKYRIQRGALILSNVQPSDTMVTQCEARNRHGLLLANAYIYVVQLPAKILTADNQTYMAVQGSTAYLLCKAFGAPVPSVQWLDEDGTTVLQDERFFPYANGTLGIRDLQANDTGRYFCLAANDQNNVTIMANLKVKDATQITQGPRSTIEKKGSRVTFTCQASFDPSLQPSITWRGDGRDLQELGDSDKYFIEDGRLVIHSLDYSDQGNYSCVASTELDVVESRAQLLVVGSPGPVPRLVLSDLHLLTQSQVRVSWSPAEDHNAPIEKYDIEFEDKEMAPEKWYSLGKVPGNQTSTTLKLSPYVHYTFRVTAINKYGPGEPSPVSETVVTPEAAPEKNPVDVKGEGNETTNMVITWKPLRWMDWNAPQVQYRVQWRPQGTRGPWQEQIVSDPFLVVSNTSTFVPYEIKVQAVNSQGKGPEPQVTIGYSGEDYPQAIPELEGIEILNSSAVLVKWRPVDLAQVKGHLRGYNVTYWREGSQRKHSKRHIHKDHVVVPANTTSVILSGLRPYSSYHLEVQAFNGRGSGPASEFTFSTPEGVPGHPEALHLECQSNTSLLLRWQPPLSHNGVLTGYVLSYHPLDEGGKGQLSFNLRDPELRTHNLTDLSPHLRYRFQLQATTKEGPGEAIVREGGTMALSGISDFGNISATAGENYSVVSWVPKEGQCNFRFHILFKALGEEKGGASLSPQYVSYNQSSYTQWDLQPDTDYEIHLFKERMFRHQMAVKTNGTGRVRLPPAGFATEGWFIGFVSAIILLLLVLLILCFIKRSKGGKYSVKDKEDTQVDSEARPMKDETFGEYSDNEEKAFGSSQPSLNGDIKPLGSDDSLADYGGSVDVQFNEDGSFIGQYSGKKEKEAAGGNDSSGATSPINPAVALE

SEQ ID NO: 44734 - protein, 1248 aa, Homo sapiens; identical to SEQ ID NO: 44732
  Payload ID: 9114
  Gene Symbol: L1CAM
  Gene Name: L1 cell adhesion molecule
  Uniprot ID: P32004
  ENSP ID: ENSP00000359072

SEQ ID NO: 44735 - protein, 153 aa, Homo sapiens
  Payload ID: 9114
  Gene Symbol: L1CAM
  Gene Name: L1 cell adhesion molecule
  ENSP ID: ENSP00000359075
EEKGGASLSPQYVSYNQSSYTQWDLQPDTDYEIHLFKERMFRHQMAVKTNGTVKDKEDTQVDSEARPMKDETFGEYSDNEEKAFGSSQPSLNGDIKPLGSDDSLADYGGSVDVQFNEDGSFIGQYSGKKEKEAAGGNDSSGATSPINPAVALE

SEQ ID NO: 44736 - protein, 1257 aa, Homo sapiens
  Payload ID: 9114
  Gene Symbol: L1CAM
  Gene Name: L1 cell adhesion molecule
  Uniprot ID: P32004
  ENSP ID: ENSP00000359077
MVVALRYVWPLLLCSPCLLIQIPEEYEGHHVMEPPVITEQSPRRLVVFPTDDISLKCEASGKPEVQFRWTRDGVHFKPKEELGVTVYQSPHSGSFTITGNNSNFAQRFQGIYRCFASNKLGTAMSHEIRLMAEGAPKWPKETVKPVEVEEGESVVLPCNPPPSAEPLRIYWMNSKILHIKQDERVTMGQNGNLYFANVLTSDNHSDYICHAHFPGTRTIIQKEPIDLRVKATNSMIDRKPRLLFPTNSSSHLVALQGQPLVLECIAEGFPTPTIKWLRPSGPMPADRVTYQNHNKTLQLLKVGEEDDGEYRCLAENSLGSARHAYYVTVEAAPYWLHKPQSHLYGPGETARLDCQVQGRPQPEVTWRINGIPVEELAKDQKYRIQRGALILSNVQPSDTMVTQCEARNRHGLLLANAYIYVVQLPAKILTADNQTYMAVQGSTAYLLCKAFGAPVPSVQWLDEDGTTVLQDERFFPYANGTLGIRDLQANDTGRYFCLAANDQNNVTIMANLKVKDATQITQGPRSTIEKKGSRVTFTCQASFDPSLQPSITWRGDGRDLQELGDSDKYFIEDGRLVIHSLDYSDQGNYSCVASTELDVVESRAQLLVVGSPGPVPRLVLSDLHLLTQSQVRVSWSPAEDHNAPIEKYDIEFEDKEMAPEKWYSLGKVPGNQTSTTLKLSPYVHYTFRVTAINKYGPGEPSPVSETVVTPEAAPEKNPVDVKGEGNETTNMVITWKPLRWMDWNAPQVQYRVQWRPQGTRGPWQEQIVSDPFLVVSNTSTFVPYEIKVQAVNSQGKGPEPQVTIGYSGEDYPQAIPELEGIEILNSSAVLVKWRPVDLAQVKGHLRGYNVTYWREGSQRKHSKRHIHKDHVVVPANTTSVILSGLRPYSSYHLEVQAFNGRGSGPASEFTFSTPEGVPGHPEALHLECQSNTSLLLRWQPPLSHNGVLTGYVLSYHPLDEGGKGQLSFNLRDPELRTHNLTDLSPHLRYRFQLQATTKEGPGEAIVREGGTMALSGISDFGNISATAGENYSVVSWVPKEGQCNFRFHILFKALGEEKGGASLSPQYVSYNQSSYTQWDLQPDTDYEIHLFKERMFRHQMAVKTNGTGRVRLPPAGFATEGWFIGFVSAIILLLLVLLILCFIKRSKGGKYSVKDKEDTQVDSEARPMKDETFGEYRSLESDNEEKAFGSSQPSLNGDIKPLGSDDSLADYGGSVDVQFNEDGSFIGQYSGKKEKEAAGGNDSSGATSPINPAVALE

SEQ ID NO: 44737 - protein, 128 aa, Homo sapiens
  Payload ID: 9114
  Gene Symbol: L1CAM
  Gene Name: L1 cell adhesion molecule
  ENSP ID: ENSP00000384902
MVVALRYVWPLLLCSPCLLIQIPEELMEPPVITEQSPRRLVVFPTDDISLKCEASGKPEVQFRWTRDGVHFKPKEELGVTVYQSPHSGSFTITGNNSNFAQRFQGIYRCFASNKLGTAMSHEIRLMAE

SEQ ID NO: 44738 - protein, 90 aa, Homo sapiens
  Payload ID: 9114
  Gene Symbol: L1CAM
  Gene Name: L1 cell adhesion molecule
  ENSP ID: ENSP00000392524
MVVALRYVWPLLLCSPCLLIQIPEELMEPPVITEQSPRRLVVFPTDDISLKCEASGKPEVQFRWTRDGVHFKPKEELGVTVYQSPHSGSF

SEQ ID NO: 44739 - protein, 83 aa, Homo sapiens
  Payload ID: 9114
  Gene Symbol: L1CAM
  Gene Name: L1 cell adhesion molecule
  ENSP ID: ENSP00000396079
MVVALRYVWPLLLCSPCLLIQIPEEYEGHHVMEPPVITEQSPRRLVVFPTDDISLKCEASGKPEVQFRWTRDGVHFKPKEELG

SEQ ID NO: 44740 - protein, 190 aa, Homo sapiens
  Payload ID: 9114
  Gene Symbol: L1CAM
  Gene Name: L1 cell adhesion molecule
  ENSP ID: ENSP00000397792
  MOD_RES (1)..(1): Any amino acid
XDPSLQPSITWRGDGRDLQELGDSDKYFIEDGRLVIHSLDYSDQGNYSCVASTELDVVESRAQLLVVEYDIEFEDKEMAPEKWYSLGKVPGNQTSTTLKLSPYVHYTFRVTAINKYGPGEPSPVSETVVTPEAAPEKNPVDVKGEGNETTNMVITWKPLRWMDWNAPQVQYRVQWRPQGTRGPWQEQIVS

SEQ ID NO: 44741 - protein, 150 aa, Homo sapiens
  Payload ID: 9114
  Gene Symbol: L1CAM
  Gene Name: L1 cell adhesion molecule
  ENSP ID: ENSP00000402407
MVVALRYVWPLLLCSPCLLIQIPEEYEGHHVMEPPVITEQSPRRLVVFPTDDISLKCEASGKPEVQFRWTRDGVHFKPKEELGVTVYQSPHSGSFTITGNNSNFAQRFQGIYRCFASNKLGTAMSHEIRLMAEGAPKWPKETVKPVEVEE

SEQ ID NO: 44742 - protein, 441 aa, Homo sapiens
  Payload ID: 9115
  Gene Symbol: L2HGDH
  Gene Name: L-2-hydroxyglutarate dehydrogenase
  ENSP ID: ENSP00000261699
MVPALRYLVGACGRARGLFAGGSPGACGFASGRPRPLCGGSRSASTSSFDIVIVGGGIVGLASARALILRHPSLSIGVLEKEKDLAVHQTGHNSGVIHSGIYYKPESLKAKLCVQGAALLYEYCQQKGISYKQCGKLIVAVEQEEIPRLQALYEKGLQNGVPGLRLIQQEDIKKKEPYCRGLMAIDCPHTGIVDYRQVALSFAQDFQEAGGSVLTNFEVKGIEMAKESPSRSIDGMQYPIVIKNTKGEEIRCQYVVTCAGLYSDRISELSGCTPDPRIVPFRGDYLLLKPEKCYLVKGNIYPVPDSRFPFLGVHFTPRMDGSIWLGPNAVLAFKREGYRPFDFSATDVMDIIINSGLIKLASQNFSYGVTEMYKACFLGATVKYLQKFIPEITISDILRQVAVRGPSWLWQQPMKVSDNNIYCFLWRCFALLLTGSACSFK

SEQ ID NO: 44743 - protein, 463 aa, Homo sapiens
  Payload ID: 9115
  Gene Symbol: L2HGDH
  Gene Name: L-2-hydroxyglutarate dehydrogenase
  Uniprot ID: Q9H9P8
  ENSP ID: ENSP00000267436
MVPALRYLVGACGRARGLFAGGSPGACGFASGRPRPLCGGSRSASTSSFDIVIVGGGIVGLASARALILRHPSLSIGVLEKEKDLAVHQTGHNSGVIHSGIYYKPESLKAKLCVQGAALLYEYCQQKGISYKQCGKLIVAVEQEEIPRLQALYEKGLQNGVPGLRLIQQEDIKKKEPYCRGLMAIDCPHTGIVDYRQVALSFAQDFQEAGGSVLTNFEVKGIEMAKESPSRSIDGMQYPIVIKNTKGEEIRCQYVVTCAGLYSDRISELSGCTPDPRIVPFRGDYLLLKPEKCYLVKGNIYPVPDSRFPFLGVHFTPRMDGSIWLGPNAVLAFKREGYRPFDFSATDVMDIIINSGLIKLASQNFSYGVTEMYKACFLGATVKYLQKFIPEITISDILRGPAGVRAQALDRDGNLVEDFVFDAGVGDIGNRILHVRNAPSPAATSSIAISGMIADEVQQRFEL

SEQ ID NO: 44744 - protein, 463 aa, Homo sapiens; identical to SEQ ID NO: 44743
  Payload ID: 9115
  Gene Symbol: L2HGDH
  Gene Name: L-2-hydroxyglutarate dehydrogenase
  Uniprot ID: Q9H9P8
  ENSP ID: ENSP00000405559

SEQ ID NO: 44745 - protein, 236 aa, Homo sapiens
  Payload ID: 9115
  Gene Symbol: L2HGDH
  Gene Name: L-2-hydroxyglutarate dehydrogenase
  ENSP ID: ENSP00000450494
MVPALRYLVGACGRARGLFAGGSPGACGFASGRPRPLCGGSRSASTSSFDIVIVGGGIVGLASARALILRHPSLSIGVLEKEKDLAVHQTGHNSGVIHSGIYYKPESLKAKLCVQGAALLYEYCQQKGISYKQCGKLIVAVEQEEIPRLQALYEKGLQNGVPGLRLIQQEDIKKKEPYCRGLMAIDCPHTGIVDYRQVALSFAQDFQEAGGSVLTNFEVKGIEMAKESPSRSIDAE

SEQ ID NO: 44746 - protein, 66 aa, Homo sapiens
  Payload ID: 9115
  Gene Symbol: L2HGDH
  Gene Name: L-2-hydroxyglutarate dehydrogenase
  ENSP ID: ENSP00000451194
MVPALRYLVGACGRARGLFAGGSPGACGFASGRPRPLCGGSRSASTRRNSLCEGCKAWRGFGYFDD

SEQ ID NO: 44747 - protein, 211 aa, Homo sapiens
  Payload ID: 9115
  Gene Symbol: L2HGDH
  Gene Name: L-2-hydroxyglutarate dehydrogenase
  ENSP ID: ENSP00000452483
MVPALRYLVGACGRARGLFAGGSPGACGFASGRPRPLCGGSRSASTSSFDIVIVGGGIVGLASARALILRHPSLSIGVLEKEKDLAVHQTGHNSGVIHSGIYYKPESLKAKLCVQGAALLYEYCQQKGISYKQCGKLIVAVEQEEIPRLQALYEKGLQNGVPGLRLIQQEDIKKKEPYCRISSCVSITYQKTIIFPLCCSIAFMISGSNGY

SEQ ID NO: 44748 - protein, 131 aa, Homo sapiens
  Payload ID: 9116
  Gene Symbol:
  Gene Name: L34079.2
  ENSP ID: ENSP00000472698
  MOD_RES (1)..(1): Any amino acid
XRPPPLTQRTTTPSSSSPLGPPLRRTGPRSRPCCYQMRLLSACAQTARARIRSVWEKLEKEEQIHSVDIGNDGSAFVEVLVGSSAGGAGEQDYEVLLVTSSFMSPSESRSGSNPNRVRMFGPDKLVRAAAE

SEQ ID NO: 44749 - protein, 354 aa, Homo sapiens
  Payload ID: 9117
  Gene Symbol: L3HYPDH
  Gene Name: L-3-hydroxyproline dehydratase (trans-)
  Uniprot ID: Q96EM0
  ENSP ID: ENSP00000247194
MESALAVPRLPPHDPGTPVLSVVDMHTGGEPLRIVLAGCPEVSGPTLLAKRRYMRQHLDHVRRRLMFEPRGHRDMYGAVLVPSELPDAHLGVLFLHNEGYSSMCGHAVLALGRFALDFGLVPAPPAGTREARVNIHCPCGLVTAFVACEDGRSHGPVRFHSVPAFVLATDLMVDVPGHGKVMVDIAYGGAFYAFVTAEKLGLDICSAKTRDLVDAASAVTEAVKAQFKINHPDSEDLAFLYGTILTDGKDAYTKEPTTNICVFADEQVDRSPTGSGVTARIALQYHKGLLELNQMRAFKSSATGSVFTGKAVREAKCGDFKAVIVEVSGQAHYTGTASFIIEDDDPLRDGFLLK

SEQ ID NO: 44750 - protein, 142 aa, Homo sapiens
  Payload ID: 9117
  Gene Symbol: L3HYPDH
  Gene Name: L-3-hydroxyproline dehydratase (trans-)
  ENSP ID: ENSP00000423874
MVDVPGHGKVMVDIAYGGAFYAFVTAEKLGLDICSAKTRDLVDAASAVTEAVKAQFKINHPDSEDLAFLYGTILTDGKDAYTKEPTTNICVFADEQVDRSPTGSGVTARIALQYHKGLLELNQMRAFKSSATGSVFTGKAVR

SEQ ID NO: 44751 - protein, 145 aa, Homo sapiens
  Payload ID: 9117
  Gene Symbol: L3HYPDH
  Gene Name: L-3-hydroxyproline dehydratase (trans-)
  ENSP ID: ENSP00000431608
MVDVPGHGKVMVDIAYGGAFYAFVTAEKLGLDICSAKTRDLVDAASAVTEAVKAQFKINHPDSEDLAFLYGTILTDGKDAYTKEPTTNICVFADEQVDRSPTGSGVTARIALQYHKGLLELNQMRAFKSSATGSVFTGKAVRELL

SEQ ID NO: 44752 - protein, 1019 aa, Homo sapiens
  Payload ID: 9118
  Gene Symbol: LARP1
  Gene Name: La ribonucleoprotein domain family, member 1
  Uniprot ID: Q6PKG0
  ENSP ID: ENSP00000336721
MLWRVLLSKRPPFPHPELDFQEAPIPSCPGRLPGRKNSVALAAAPRKEPTGDREKPLPFPVLAPFSNPEHSAPAKVVRAAVPKQRKGSKVGDFGDAINWPTPGEIAHKSVQPQSHKPQPTRKLPPKKDMKEQEKGEGSDSKESPKTKSDESGEEKNGDEDCQRGGQKKKGNKHKWVPLQIDMKPEVPREKLASRPTRPPEPRHIPANRGEIKGSESATYVPVAPPTPAWQPEIKPEPAWHDQDETSSVKSDGAGGARASFRGRGRGRGRGRGRGRGGTRTHFDYQFGYRKFDGVEGPRTPKYMNNITYYFDNVSSTELYSVDQELLKDYIKRQIEYYFSVDNLERDFFLRRKMDADGFLPITLIASFHRVQALTTDISLIFAALKDSKVVEIVDEKVRRREEPEKWPLPPIVDYSQTDFSQLLNCPEFVPRQHYQKETESAPGSPRAVTPVPTKTEEVSNLKTLPKGLSASLPDLDSENWIEVKKRPRPSPARPKKSEESRFSHLTSLPQQLPSQQLMSKDQDEQEELDFLFDEEMEQMDGRKNTFTAWSDEESDYEIDDRDVNKILIVTQTPHYMRRHPGGDRTGNHTSRAKMSAELAKVINDGLFYYEQDLWAEKFEPEYSQIKQEVENFKKVNMISREQFDTLTPEPPVDPNQEVPPGPPRFQQVPTDALANKLFGAPEPSTIARSLPTTVPESPNYRNTRTPRTPRTPQLKDSSQTSRFYPVVKEGRTLDAKMPRKRKTRHSSNPPLESHVGWVMDSREHRPRTASISSSPSEGTPTVGSYGCTPQSLPKFQHPSHELLKENGFTQHVYHKYRRRCLNERKRLGIGQSQEMNTLFRFWSFFLRDHFNKKMYEEFKQLALEDAKEGYRYGLECLFRYYSYGLEKKFRLDIFKDFQEETVKDYEAGQLYGLEKFWAFLKYSKAKNLDIDPKLQEYLGKFRRLEDFRVDPPMGEEGNHKRHSVVAGGGGGEGRKRCPSQSSSRPAAMISQPPTPPTGQPVREDAKWTSQHSNTQTLGK

SEQ ID NO: 44753 - protein, 150 aa, Homo sapiens
  Payload ID: 9118
  Gene Symbol: LARP1
  Gene Name: La ribonucleoprotein domain family, member 1
  ENSP ID: ENSP00000427731
  MOD_RES (1)..(1): Any amino acid
XRGGQKKKGNKHKWVPLQIDMKPEVPREKLASRPTRPPEPRHIPANRGEIKGSESATYVPVAPPTPAWQPEIKPEPAWHDQDETSSVKSDGAAHFDYQFGYRKFDGVEGPRTPKYMNNITYYFDNVSSTELYSVDQELLKDYIKRQIEYY

SEQ ID NO: 44754 - protein, 61 aa, Homo sapiens
  Payload ID: 9118
  Gene Symbol: LARP1
  Gene Name: La ribonucleoprotein domain family, member 1
  ENSP ID: ENSP00000428251
  MOD_RES (1)..(1): Any amino acid
XNGQSPPEHSAPAKVVRAAVPKQRKGSKVGDFGDAINWPTPGEIAHKSVQMKLLRLAEVNY

SEQ ID NO: 44755 - protein, 815 aa, Homo sapiens
  Payload ID: 9118
  Gene Symbol: LARP1
  Gene Name: La ribonucleoprotein domain family, member 1
  ENSP ID: ENSP00000428589
MATQVEPLLPGGATLLQAEEHGGLVRKKPPPAPEGKGEPGPNDVRGGEPDGSARRPRPPCAKPHKEGTGQQERESPRPLQLPGAEGPAISDGEEGGGEPGAGGGAAGAAGAGRRDFVEAPPPKVNPWTKNALPPVLTTVNGQSPPEHSAPAKVVRAAVPKQRKGSKVGDFGDAINWPTPGEIAHKSVQPQSHKPQPTRKLPPKKDMKEQEKGEGSDSKESPKTKSDESGEEKNGDEDCQRGGQKKKGNKHKWVPLQIDMKPEVPREKLASRPTRPPEPRHIPANRGEIKGSESATYVPVAPPTPAWQPEIKPEPAWHDQDETSSVKSDGAGGARASFRGRGRGRGRGRGRGRGGTRTHFDYQFGYRKFDGVEGPRTPKYMNNITYYFDNVSSTELYSVDQELLKDYIKRQIEYYFSVDNLERDFFLRRKMDADGFLPITLIASFHRVQALTTDISLIFAALKDSKVVEIVDEKVRRREEPEKWPLPPIVDYSQTDFSQLLNCPEFVPRQHYQKETESAPGSPRAVTPVPTKTEEVSNLKTLPKGLSASLPDLDSENWIEVKKRPRPSPARPKKSEESRFSHLTSLPQQLPSQQLMSKDQDEQEELDFLFDEEMEQMDGRKNTFTAWSDEESDYEIDDRDVNKILIVTQTPHYMRRHPGGDRTGNHTSRAKMSAELAKVINDGLFYYEQDLWAEKFEPEYSQIKQEVENFKKVNMISREQFDTLTPEPPVDPNQEVPPGPPRFQQVPTDALANKLFGAPEPSTIARSLPTTVPESPNYRNTRTPRTPRTPQLKDSSQTSRFYPVVKEGRTLDAKMP

SEQ ID NO: 44756 - protein, 67 aa, Homo sapiens
  Payload ID: 9118
  Gene Symbol: LARP1
  Gene Name: La ribonucleoprotein domain family, member 1
  ENSP ID: ENSP00000429624
  MOD_RES (1)..(1): Any amino acid
XGAEGPAISDGEEGGGEPGAGGGAAGAAGAGRRDFVEAPPPKVNPWTKNALPPVLTTVNGQSPPDTL

SEQ ID NO: 44757 - protein, 92 aa, Homo sapiens
  Payload ID: 9118
  Gene Symbol: LARP1
  Gene Name: La ribonucleoprotein domain family, member 1
  ENSP ID: ENSP00000429710
MKEQEKGEGSDSKESPKTKSDESGEEKNGDEDCQRGGQKKKGNKHKWVPLQIDMKPEVPREKLASRPTRPPEPRHIPANRGEIKGSESATYV

SEQ ID NO: 44758 - protein, 167 aa, Homo sapiens
  Payload ID: 9118
  Gene Symbol: LARP1
  Gene Name: La ribonucleoprotein domain family, member 1
  ENSP ID: ENSP00000429852
  MOD_RES (1)..(1): Any amino acid
XRPLQLPGAEGPAISDGEEGGGEPGAGGGAAGAAGAGRRDFVEAPPPKVNPWTKNALPPVLTTVNGQSPPEHSAPAKVVRAAVPKQRKGSKPQSHKPQPTRKLPPKKDMKEQEKGEGSDSKESPKTKSDESGEEKNGDEDCQRGGQKKKGNKHKWVPLQIDMKPEVP

SEQ ID NO: 44759 - protein, 610 aa, Homo sapiens
  Payload ID: 9118
  Gene Symbol: LARP1
  Gene Name: La ribonucleoprotein domain family, member 1
  ENSP ID: ENSP00000429904
MKEQEKGEGSDSKESPKTKSDESGEEKNGDEDCQRGGQKKKGNKHKWVPLQIDMKPEVPREKLASRPTRPPEPRHIPANRGEIKGSESATYVPVAPPTPAWQPEIKPEPAWHDQDETSSVKSDGAGGARASFRGRGRGRGRGRGRGRGGTRTHFDYQFGYRKFDGVEGPRTPKYMNNITYYFDNVSSTELYSVDQELLKDYIKRQIEYYFSVDNLERDFFLRRKMDADGFLPITLIASFHRVQALTTDISLIFAALKDSKVVEIVDEKVRRREEPEKWPLPPIVDYSQTDFSQLLNCPEFVPRQHYQKETESAPGSPRAVTPVPTKTEEVSNLKTLPKGLSASLPDLDSENWIEVKKRPRPSPARPKKSEESRFSHLTSLPQQLPSQQLMSKDQDEQEELDFLFDEEMEQMDGRKNTFTAWSDEESDYEIDDRDVNKILIVTQTPHYMRRHPGGDRTGNHTSRAKMSAELAKVINDGLFYYEQDLWAEKFEPEYSQIKQEVENFKKVNMISREQFDTLTPEPPVDPNQEVPPGPPRFQQVPTDALANKLFGAPEPSTIARSLPTTVPESPNYRNTRTPRTPRTPQLKDSSQTSRFYPVVKEGRTLDAKMP

SEQ ID NO: 44760 - protein, 36 aa, Homo sapiens
  Payload ID: 9118
  Gene Symbol: LARP1
  Gene Name: La ribonucleoprotein domain family, member 1
  ENSP ID: ENSP00000430169
  MOD_RES (1)..(1): Any amino acid
XRHSSNPPLESHVGWVMDSREHRPRTASIRDGTDCK

SEQ ID NO: 44761 - protein, 281 aa, Homo sapiens
  Payload ID: 9118
  Gene Symbol: LARP1
  Gene Name: La ribonucleoprotein domain family, member 1
  ENSP ID: ENSP00000430438
DESGEEKNGDEDCQRGGQKKKGNKHKWVPLQIDMKPEVPREKLASRPTRPPEPRHIPANRGEIKAHFDYQFGYRKFDGVEGPRTPKYMNNITYYFDNVSSTELYSVDQELLKDYIKRQIEYYFSVDNLERDFFLRRKMDADGFLPITLIASFHRVQALTTDISLIFAALKDSKVVEIVDEKVRRREEPEKWPLPPIVDYSQTDFSQLLNCPEFVPRQHYQKETESAPGSPRAVTPVPTKTEEVSNLKTLPKGLSASLPDLDSENWIEVKKRPRPSPARPKK

SEQ ID NO: 44762 - protein, 183 aa, Homo sapiens
  Payload ID: 9118
  Gene Symbol: LARP1
  Gene Name: La ribonucleoprotein domain family, member 1
  ENSP ID: ENSP00000430815
  MOD_RES (1)..(1): Any amino acid
XQDLWAEKFEPEYSQIKQEVENFKKVNMISREQFDTLTPEPPVDPNQEVPPGPPRFQQVPTDALANKLFGAPEPSTIARSLPTTVPESPNYRNTRTPRTPRTPQLKDSSQTSRFYPVVKEGRTLDAKMPRKRKTRHSSNPPLESHVGWVMDSREHRPRTASISKMAPVCVSCFPKQALRATYL

SEQ ID NO: 44763 - protein, 195 aa, Homo sapiens
  Payload ID: 9118
  Gene Symbol: LARP1
  Gene Name: La ribonucleoprotein domain family, member 1
  ENSP ID: ENSP00000431072
ELYSVDQELLKDYIKRQIEYYFSVDNLERDFFLRRKMDADGFLPITLIASFHRVQALTTDISLIFAALKDSKVVEIVDEKVRRREEPEKWPLPPIVDYSQTDFSQLLNCPEFVPRQHYQKETVTPVPTKTEEVSNLKTLPKGLSASLPDLDSENWIEVKKRPRPSPARPKKSEESRFSHLTSLPQQLPSQQLMSK

SEQ ID NO: 44764 - protein, 914 aa, Homo sapiens
  Payload ID: 9119
  Gene Symbol: LARP1B
  Gene Name: La ribonucleoprotein domain family, member 1B
  Uniprot ID: Q659C4
  ENSP ID: ENSP00000321997
MENWPTPSELVNTGFQSVLSQGNKKPQNRKEKEEKVEKRSNSDSKENRETKLNGPGENVSEDEAQSSNQRKRANKHKWVPLHLDVVRSESQERPGSRNSSRCQPEANKPTHNNRRNDTRSWKRDREKRDDQDDVSSVRSEGGNIRGSFRGRGRGRGRGRGRGRGNPRLNFDYSYGYQEHGERTDQPFQTELNTSMMYYYDDGTGVQVYPVEEALLKEYIKRQIEYYFSVENLERDFFLRGKMDEQGFLPISLIAGFQRVQALTTNLNLILEALKDSTEVEIVDEKMRKKIEPEKWPIPGPPPRSVPPTDFSQLIDCPEFVPGQAFCSHTESAPNSPRIGSPLSPKKNSETSILQAMSRGLSTSLPDLDSEPWIEVKKRHQPAPVKLRESVSVPEGSLNQLCSSEEPEQEELDFLFDEEIEQIGRKNTFTDWSDNDSDYEIDDQDLNKILIVTQTPPYVKKHPGGDRTGTHMSRAKITSELAKVINDGLYYYEQDLWMEEDENKHTAIKQEVENFKKLNLISKEQFENLTPELPFEPNQEVPVAPSQSRQGGVQGVLHIPKKDLTDELAQKLFDVSEITSAAMVHSLPTAVPESPRIHPTRTPKTPRTPRLQDPNKTPRFYPVVKEPKAIDVKSPRKRKTRHSTNPPLECHVGWVMDSRDRGPGTSSVSTSNASPSEGAPLAGSYGCTPHSFPKFQHPSHELLKENGFTQQVYHKYRRRCLSERKRLGIGQSQEMNTLFRFWSFFLRDHFNKKMYEEFRQLAWEDAKENYRYGLECLFRFYSYGLEKKFRREIFQDFQEETKKDYESGQLYGLEKFWAYLKYSQSKTQSIDPKLQEYLCSFKRLEDFRVDPPISDEFGRKRHSSTSGEESNRHRLPPNSSTKPPNAAKPTSTSELQVPINSPRRNISPESSDNSH

SEQ ID NO: 44765 - protein, 335 aa, Homo sapiens
  Payload ID: 9119
  Gene Symbol: LARP1B
  Gene Name: La ribonucleoprotein domain family, member 1B
  Uniprot ID: Q659C4
  ENSP ID: ENSP00000377829
MENWPTPSELVNTGFQSVLSQGNKKPQNRKEKEEKVEKRSNSDSKENRETKLNGPGENVSEDEAQSSNQRKRANKHKWVPLHLDVVRSESQERPGSRNSSRCQPEANKPTHNNRRNDTRSWKRDREKRDDQDDVSSVRSEGGNIRGSFRGRGRGRGRGRGRGRGNPRLNFDYSYGYQEHGERTDQPFQTELNTSMMYYYDDGTGVQVYPVEEALLKEYIKRQIEYYFSVENLERDFFLRGKMDEQGFLPISLIAGFQRVQALTTNLNLILEALKDSTEVEIVDEKMRKKIEPEKWPIPGPPPRSVPPTDFSQLIDCPEFVPGQAFCSHTVRVMIF

SEQ ID NO: 44766 - protein, 358 aa, Homo sapiens
  Payload ID: 9119
  Gene Symbol: LARP1B
  Gene Name: La ribonucleoprotein domain family, member 1B
  ENSP ID: ENSP00000390395
MENWPTPSELVNTGFQSVLSQGNKKPQNRKEKEEKVEKRSNSDSKENRETKLNGPGENVSEDEAQSSNQRKRANKHKWVPLHLDVVRSESQERPGSRNSSRCQPEANKPTHNNRRNDTRSWKRDREKRDDQDDVSSVRSEGGNIRGSFRGRGRGRGRGRGRGRGNPRLNFDYSYGYQEHGERTDQPFQTELNTSMMYYYDDGTGVQVYPVEEALLKEYIKRQIEYYFSVENLERDFFLRGKMDEQGFLPISLIAGFQRVQALTTNLNLILEALKDSTEVEIVDEKMRKKIEPEKWPIPGPPPRSVPPTDFSQLIDCPEFVPGQAFCSHTGNIFSSRANDVTVGYLVQFTYLFIYFQFI

SEQ ID NO: 44767 - protein, 518 aa, Homo sapiens
  Payload ID: 9119
  Gene Symbol: LARP1B
  Gene Name: La ribonucleoprotein domain family, member 1B
  ENSP ID: ENSP00000422850
MENWPTPSELVNTGFQSVLSQGNKKPQNRKEKEEKVEKRSNSDSKENRETKLNGPGENVSEDEAQSSNQRKRANKHKWVPLHLDVVRSESQERPGSRNSSRCQPEANKPTHNNRRNDTRSWKRDREKRDDQDDVSSVRSEGGNIRGSFRGRGRGRGRGRGRGRGNPRLNFDYSYGYQEHGERTDQPFQTELNTSMMYYYDDGTGVQVYPVEEALLKEYIKRQIEYYFSVENLERDFFLRGKMDEQGFLPISLIAGFQRVQALTTNLNLILEALKDSTEVEIVDEKMRKKIEPEKWPIPGPPPRSVPPTDFSQLIDCPEFVPGQAFCSHTESAPNSPRIGSPLSPKKNSETSILQAMSRGLSTSLPDLDSEPWIEVKKRHQPAPVKLRESVSVPEGSLNQLCSSEEPEQEELDFLFDEEIEQIGRKNTFTDWSDNDSDYEIDDQDLNKILIVTQTPPYVKKHPGGDRTGTHMSRAKITSELAKVINDGLYYYEQDLWMEEDENKHTAIKVTILRTPFLV

SEQ ID NO: 44768 - protein, 25 aa, Homo sapiens
  Payload ID: 9119
  Gene Symbol: LARP1B
  Gene Name: La ribonucleoprotein domain family, member 1B
  ENSP ID: ENSP00000423686
NDGLYYYEQDLWMEEDENKHTAIKI

SEQ ID NO: 44769 - protein, 491 aa, Homo sapiens
  Payload ID: 9119
  Gene Symbol: LARP1B
  Gene Name: La ribonucleoprotein domain family, member 1B
  ENSP ID: ENSP00000424383
  MOD_RES (1)..(1): Any amino acid
XEEKVEKRSNSDSKENRETKLNGPGENVSEDEAQSSNQRKRANKHKWVPLHLDVVRSESQERPGSRNSSRCQPEANKPTHNNRRNDTRSWKRDREKRDDQDDVSSVRSEGGNIRGSFRGRGRGRGRGRGRGRGNPRLNFDYSYGYQEHGERTDQPFQTELNTSMMYYYDDGTGVQVYPVEEALLKEYIKRQIEYYFSVENLERDFFLRGKMDEQGFLPISLIAGFQRVQALTTNLNLILEALKDSTEVEIVDEKMRKKIEPEKWPIPGPPPRSVPPTDFSQLIDCPEFVPGQAFCSHTESAPNSPRIGSPLSPKKNSETSILQAMSRGLSTSLPDLDSEPWIEVKKRHQPAPVKLRESVSVPEGSLNQLCSSEEPEQEELDFLFDEEIEQIGRKNTFTDWSDNDSDYEIDDQDLNKILIVTQTPPYVKKHPGGDRTGTHMSRAKITSELAKVINDGLYYYEQDLWMEEDENKHTAIKVIVSGQHLSTDALF

SEQ ID NO: 44770 - protein, 574 aa, Homo sapiens
  Payload ID: 9119
  Gene Symbol: LARP1B
  Gene Name: La ribonucleoprotein domain family, member 1B
  ENSP ID: ENSP00000427281
MENWPTPSELVNTGFQSVLSQGNKKPQNRKEKEEKVEKRSNSDSKENRETKLNGPGENVSEDEAQSSNQRKRGWKRDREKRDDQDDVSSVRSEGGNIRGSFRGRGRGRGRGRGRGRGNPRLNFDYSYGYQEHGERTDQPFQTELNTSMMYYYDDGTGVQVYPVEEALLKEYIKRQIEYYFSVENLERDFFLRGKMDEQGFLPISLIAGFQRVQALTTNLNLILEALKDSTEVEIVDEKMRKKIEPEKWPIPGPPPRSVPPTDFSQLIDCPEFVPGQAFCSHTESAPNSPRIGSPLSPKKNSETSILQAMSRGLSTSLPDLDSEPWIEVKKRHQPAPVKLRESVSVPEGSLNQLCSSEEPEQEELDFLFDEEIEQIGRKNTFTDWSDNDSDYEIDDQDLNKILIVTQTPPYVKKHPGGDRTGTHMSRAKITSELAKVINDGLYYYEQDLWMEEDENKHTAIKQEVENFKKLNLISKEQFENLTPELPFEPNQEVPVAPSQSRQDLTDELAQKLFDVSEITSAAMVHSLPTAVPESPRIHPTRTPKTPRTPRLQDPNKTPRFYPVVKEPKAIDVKS

SEQ ID NO: 44771 - protein, 653 aa, Homo sapiens
  Payload ID: 9120
  Gene Symbol: LARP4
  Gene Name: La ribonucleoprotein domain family, member 4
  Uniprot ID: Q71RC2
  ENSP ID: ENSP00000293618
MLLFVEQVASKGTGLNPNAKVWQEIAPGNTDATPVTHGTESSWHEIAATSGAHPEGNAELSEDICKEYEVMYSSSCETTRNTTGIEESTDGMILGPEDLSYQIYDVSGESNSAVSTEDLKECLKKQLEFCFSRENLSKDLYLISQMDSDQFIPIWTVANMEEIKKLTTDPDLILEVLRSSPMVQVDEKGEKVRPSHKRCIVILREIPETTPIEEVKGLFKSENCPKVISCEFAHNSNWYITFQSDTDAQQAFKYLREEVKTFQGKPIMARIKAINTFFAKNGYRLMDSSIYSHPIQTQAQYASPVFMQPVYNPHQQYSVYSIVPQSWSPNPTPYFETPLAPFPNGSFVNGFNSPGSYKTNAAAMNMGRPFQKNRRTLFRGRRRREDDRISRPHPSTAESKAPTPKFDLLASNFPPLPGSSSRMPGELVLENRMSDVVKGVYKEKDNEELTISCPVPADEQTECTSAQQLNMSTSSPCAAELTALSTTQQEKDLIEDSSVQKDGLNQTTIPVSPPSTTKPSRASTASPCNNNINAATAVALQEPRKLSYAEVCQKPPKEPSSVLVQPLRELRSNVVSPTKNEDNGAPENSVEKPHEKPEARASKDYSGFRGNIIPRGAAGKIREQRRQFSHRAIPQGVTRRNGKEQYVPPRSPK

SEQ ID NO: 44772 - protein, 653 aa, Homo sapiens
  Payload ID: 9120
  Gene Symbol: LARP4
  Gene Name: La ribonucleoprotein domain family, member 4
  Uniprot ID: Q71RC2
  ENSP ID: ENSP00000340901
MLLFVEQVASKGTGLNPNAKVWQEIAPGNTDATPVTHGTESSWHEIAATSGAHPEGNAELSEDICKEYEVMYSSSCETTRNTTGIEESTDGMILGPEDLSYQIYDVSGESNSAVSTEDLKECLKKQLEFCFSRENLSKDLYLISQMDSDQFIPIWTVANMEEIKKLTTDPDLILEVLRSSPMVQVDEKGEKVRPSHKRCIVILREIPETTPIEEVKGLFKSENCPKVISCEFAHNSNWYITFQSDTDAQQAFKYLREEVKTFQGKPIMAPFPNGSFVNGFNSPGSYKTNAAAMNMGRPFQKNRVKPQFRSSGGSEHSTEGSVSLGDGQLNRYSSRNFPAERHNPTVTGHQEQTYLQKETSTLQVEQNGDYGRGRRTLFRGRRRREDDRISRPHPSTAESKAPTPKFDLLASNFPPLPGSSSRMPGELVLENRMSDVVKGVYKEKDNEELTISCPVPADEQTECTSAQQLNMSTSSPCAAELTALSTTQQEKDLIEDSSVQKDGLNQTTIPVSPPSTTKPSRASTASPCNNNINAATAVALQEPRKLSYAEVCQKPPKEPSSVLVQPLRELRSNVVSPTKNEDNGAPENSVEKPHEKPEARASKDYSGFRGNIIPRGAAGKIREQRRQFSHRAIPQGVTRRNGKEQYVPPRSPK

SEQ ID NO: 44773 - protein, 724 aa, Homo sapiens
  Payload ID: 9120
  Gene Symbol: LARP4
  Gene Name: La ribonucleoprotein domain family, member 4
  Uniprot ID: Q71RC2
  ENSP ID: ENSP00000381490
MLLFVEQVASKGTGLNPNAKVWQEIAPGNTDATPVTHGTESSWHEIAATSGAHPEGNAELSEDICKEYEVMYSSSCETTRNTTGIEESTDGMILGPEDLSYQIYDVSGESNSAVSTEDLKECLKKQLEFCFSRENLSKDLYLISQMDSDQFIPIWTVANMEEIKKLTTDPDLILEVLRSSPMVQVDEKGEKVRPSHKRCIVILREIPETTPIEEVKGLFKSENCPKVISCEFAHNSNWYITFQSDTDAQQAFKYLREEVKTFQGKPIMARIKAINTFFAKNGYRLMDSSIYSHPIQTQAQYASPVFMQPVYNPHQQYSVYSIVPQSWSPNPTPYFETPLAPFPNGSFVNGFNSPGSYKTNAAAMNMGRPFQKNRVKPQFRSSGGSEHSTEGSVSLGDGQLNRYSSRNFPAERHNPTVTGHQEQTYLQKETSTLQVEQNGDYGRGRRTLFRGRRRREDDRISRPHPSTAESKAPTPKFDLLASNFPPLPGSSSRMPGELVLENRMSDVVKGVYKEKDNEELTISCPVPADEQTECTSAQQLNMSTSSPCAAELTALSTTQQEKDLIEDSSVQKDGLNQTTIPVSPPSTTKPSRASTASPCNNNINAATAVALQEPRKLSYAEVCQKPPKEPSSVLVQPLRELRSNVVSPTKNEDNGAPENSVEKPHEKPEARASKDYSGFRGNIIPRGAAGKIREQRRQFSHRAIPQGVTRRNGKEQYVPPRSPK

SEQ ID NO: 44774 - protein, 730 aa, Homo sapiens
  Payload ID: 9120
  Gene Symbol: LARP4
  Gene Name: La ribonucleoprotein domain family, member 4
  Uniprot ID: Q71RC2
  ENSP ID: ENSP00000415464
MLLFVEQVASKGTGLNPNAKVWQEIAPGNTDATPVTHGTESSWHEIAATSGAHPEVSVFNTGNAELSEDICKEYEVMYSSSCETTRNTTGIEESTDGMILGPEDLSYQIYDVSGESNSAVSTEDLKECLKKQLEFCFSRENLSKDLYLISQMDSDQFIPIWTVANMEEIKKLTTDPDLILEVLRSSPMVQVDEKGEKVRPSHKRCIVILREIPETTPIEEVKGLFKSENCPKVISCEFAHNSNWYITFQSDTDAQQAFKYLREEVKTFQGKPIMARIKAINTFFAKNGYRLMDSSIYSHPIQTQAQYASPVFMQPVYNPHQQYSVYSIVPQSWSPNPTPYFETPLAPFPNGSFVNGFNSPGSYKTNAAAMNMGRPFQKNRVKPQFRSSGGSEHSTEGSVSLGDGQLNRYSSRNFPAERHNPTVTGHQEQTYLQKETSTLQVEQNGDYGRGRRTLFRGRRRREDDRISRPHPSTAESKAPTPKFDLLASNFPPLPGSSSRMPGELVLENRMSDVVKGVYKEKDNEELTISCPVPADEQTECTSAQQLNMSTSSPCAAELTALSTTQQEKDLIEDSSVQKDGLNQTTIPVSPPSTTKPSRASTASPCNNNINAATAVALQEPRKLSYAEVCQKPPKEPSSVLVQPLRELRSNVVSPTKNEDNGAPENSVEKPHEKPEARASKDYSGFRGNIIPRGAAGKIREQRRQFSHRAIPQGVTRRNGKEQYVPPRSPK

SEQ ID NO: 44775 - protein, 84 aa, Homo sapiens
  Payload ID: 9120
  Gene Symbol: LARP4
  Gene Name: La ribonucleoprotein domain family, member 4
  ENSP ID: ENSP00000428516
MYSSSCETTRNTTGIEESTDGMILGPEDLSYQIYDVSGESNSAVSTEDLKECLKKQLEFCFSRENLSKDLYLISQMDSDQFIPI

SEQ ID NO: 44776 - protein, 723 aa, Homo sapiens
  Payload ID: 9120
  Gene Symbol: LARP4
  Gene Name: La ribonucleoprotein domain family, member 4
  Uniprot ID: Q71RC2
  ENSP ID: ENSP00000429077
MLLFVEVASKGTGLNPNAKVWQEIAPGNTDATPVTHGTESSWHEIAATSGAHPEGNAELSEDICKEYEVMYSSSCETTRNTTGIEESTDGMILGPEDLSYQIYDVSGESNSAVSTEDLKECLKKQLEFCFSRENLSKDLYLISQMDSDQFIPIWTVANMEEIKKLTTDPDLILEVLRSSPMVQVDEKGEKVRPSHKRCIVILREIPETTPIEEVKGLFKSENCPKVISCEFAHNSNWYITFQSDTDAQQAFKYLREEVKTFQGKPIMARIKAINTFFAKNGYRLMDSSIYSHPIQTQAQYASPVFMQPVYNPHQQYSVYSIVPQSWSPNPTPYFETPLAPFPNGSFVNGFNSPGSYKTNAAAMNMGRPFQKNRVKPQFRSSGGSEHSTEGSVSLGDGQLNRYSSRNFPAERHNPTVTGHQEQTYLQKETSTLQVEQNGDYGRGRRTLFRGRRRREDDRISRPHPSTAESKAPTPKFDLLASNFPPLPGSSSRMPGELVLENRMSDVVKGVYKEKDNEELTISCPVPADEQTECTSAQQLNMSTSSPCAAELTALSTTQQEKDLIEDSSVQKDGLNQTTIPVSPPSTTKPSRASTASPCNNNINAATAVALQEPRKLSYAEVCQKPPKEPSSVLVQPLRELRSNVVSPTKNEDNGAPENSVEKPHEKPEARASKDYSGFRGNIIPRGAAGKIREQRRQFSHRAIPQGVTRRNGKEQYVPPRSPK

SEQ ID NO: 44777 - protein, 491 aa, Homo sapiens
  Payload ID: 9120
  Gene Symbol: LARP4
  Gene Name: La ribonucleoprotein domain family, member 4
  ENSP ID: ENSP00000429631
EVKGLFKSENCPKVISCEFAHNSNWYITFQSDTDAQQAFKYLREEVKTFQGKPIMARIKAINTFFAKNGYRLMDSSIYSHPIQTQAQYASPVFMQPVYNPHQQYSVYSIVPQSWSPNPTPYFETPLAPFPNGSFVNGFNSPGSYKTNAAAMNMGRPFQKNRVKPQFRSSGGSEHSTEGSVSLGDGQLNRYSSRNFPAERHNPTVTGHQEQTYLQKETSTLQVEQNGDYGRGRRTLFRGRRRREDDRISRPHPSTAESKAPTPKFDLLASNFPPLPGSSSRMPGELVLENRMSDVVKGVYKEKDNEELTISCPVPADEQTECTSAQQLNMSTSSPCAAELTALSTTQQEKDLIEDSSVQKDGLNQTTIPVSPPSTTKPSREPRKLSYAEVCQKPPKEPSSVLVQPLRELRSNVVSPTKNEDNGAPENSVEKPHEKPEARASKDYSGFRGNIIPRGAAGKIREQRRQFSHRAIPQGVTRRNGKEQYVPPRSPK

SEQ ID NO: 44778 - protein, 445 aa, Homo sapiens
  Payload ID: 9120
  Gene Symbol: LARP4
  Gene Name: La ribonucleoprotein domain family, member 4
  Uniprot ID: Q71RC2
  ENSP ID: ENSP00000429781
MLLFVEQVASKGTGLNPNAKVWQEIAPGNTDATPVTHGTESSWHEIAATSGAHPEGNAELSEDICKEYEVMYSSSCETTRNTTGIEESTDGMILGPEDLSYQIYDVSGESNSAVSTEDLKECLKKQLEFCFSRENLSKDLYLISQMDSDQFIPIWTVANMEEIKKLTTDPDLILEVLRSSPMVQVDEKGEKVRPSHKRCIVILREIPETTPIEEVKGLFKSENCPKVISCEFAHNSNWYITFQSDTDAQQAFKYLREEVKTFQGKPIMARIKAINTFFAKNGYRLMDSSIYSHPIQTQAQYASPVFMQPVYNPHQQYSVYSIVPQSWSPNPTPYFETPLAPFPNGSFVNGFNSPGSYKTNAAAMNMGRPFQKNRVKPQFRSSGGSEHSTEGSVSLGDGQLNRYSSRNFPAERHNPTVTGHQEQTYLQKETSTLQVEQNGDYGRGR

SEQ ID NO: 44779 - protein, 37 aa, Homo sapiens
  Payload ID: 9120
  Gene Symbol: LARP4
  Gene Name: La ribonucleoprotein domain family, member 4
  ENSP ID: ENSP00000430551
MYSSSCETTRNTTGIEESTDGMILGPEDLSYQIYDVS

SEQ ID NO: 44780 - protein, 375 aa, Homo sapiens
  Payload ID: 9120
  Gene Symbol: LARP4
  Gene Name: La ribonucleoprotein domain family, member 4
  ENSP ID: ENSP00000430851
MYSSSCETTRNTTGIEESTDGMILGPEDLSYQIYDVSGESNSAVSTEDLKECLKKQLEFCFSRENLSKDLYLISQMDSDQFIPIWTVANMEEIKKLTTDPDLILEVLRSSPMVQVDEKGEKVRPSHKRCIVILREIPETTPIEEVKGLFKSENCPKVISCEFAHNSNWYITFQSDTDAQQAFKYLREEVKTFQGKPIMARIKAINTFFAKNGYRLMDSSIYSHPIQTQAQYASPVFMQPVYNPHQQYSVYSIVPQSWSPNPTPYFETPLAPFPNGSFVNGFNSPGSYKTNAAAMNMGRPFQKNRVKPQFRSSGGSEHSTEGSVSLGDGQLNRYSSRNFPAERHNPTVTGHQEQTYLQKETSTLQVEQNGDYGRGR

SEQ ID NO: 44781 - protein, 115 aa, Homo sapiens
  Payload ID: 9120
  Gene Symbol: LARP4
  Gene Name: La ribonucleoprotein domain family, member 4
  ENSP ID: ENSP00000446540
MDGMLAIQACPTPQQVASKGTGLNPNAKVWQEIAPGNTDATPVTHGTESSWHEIAATSGAHPEGNAELSEDICKEYEVMYSSSCETTRNTTGIEESTDGMILGPEDLSYQIYDVS

SEQ ID NO: 44782 - protein, 125 aa, Homo sapiens
  Payload ID: 9120
  Gene Symbol: LARP4
  Gene Name: La ribonucleoprotein domain family, member 4
  ENSP ID: ENSP00000446966
MYSSSCETTRNTTGIEESTDGMILGPEDLSYQIYDVSGESNSAVSTEDLKECLKKQLEFCFSRENLSKDLYLISQMDSDQFIPIWTVANMEEIKKLTTDPDLILEVLRSSPMVQVDEKGEKVRPS

SEQ ID NO: 44783 - protein, 61 aa, Homo sapiens
  Payload ID: 9120
  Gene Symbol: LARP4
  Gene Name: La ribonucleoprotein domain family, member 4
  ENSP ID: ENSP00000447397
MYSSSCETTRNTTGIEESTDGMILGPEDLSYQIYDVSGESNSAVSTEDLKECLKKQLEFCF

SEQ ID NO: 44784 - protein, 169 aa, Homo sapiens
  Payload ID: 9120
  Gene Symbol: LARP4
  Gene Name: La ribonucleoprotein domain family, member 4
  ENSP ID: ENSP00000447408
MLLFVEQVASKGTGLNPNAKVWQEIAPGNTDATPVTHGTESSWHEIAATSGAHPEGNAELSEDICKEYEVMYSSSCETTRNTTGIEESTDGMILGPEDLSYQIYDVSESNSAVSTEDLKECLKKQLEFCFSRENLSKDLYLISQMDSDQFIPIWTVANMEEIKKLTTDP

SEQ ID NO: 44785 - protein, 56 aa, Homo sapiens
  Payload ID: 9120
  Gene Symbol: LARP4
  Gene Name: La ribonucleoprotein domain family, member 4
  ENSP ID: ENSP00000448180
MYSSSCETTRNTTGIEESTDGMILGPEDLSYQIYDVSGESNSAVSTEDLKECLKKQ

SEQ ID NO: 44786 - protein, 191 aa, Homo sapiens
  Payload ID: 9120
  Gene Symbol: LARP4
  Gene Name: La ribonucleoprotein domain family, member 4
  ENSP ID: ENSP00000448756
MLLFVEVASKGTGLNPNAKVWQEIAPGNTDATPVTHGTESSWHEIAATSGAHPEGNAELSEDICKEYEVMYSSSCETTRNTTGIEESTDGMILGPEDLSYQIYDVSESNSAVSTEDLKECLKKQLEFCFSRENLSKDLYLISQMDSDQFIPIWTVANMEEIKKLTTDPDLILEVLRSSPMVQVDEKGEKVR

SEQ ID NO: 44787 - protein, 36 aa, Homo sapiens
  Payload ID: 9120
  Gene Symbol: LARP4
  Gene Name: La ribonucleoprotein domain family, member 4
  ENSP ID: ENSP00000449090
MYSSSCETTRNTTGIEESTDGMILGPEDLSYQIYDV

SEQ ID NO: 44788 - protein, 374 aa, Homo sapiens [sequence omitted]

SEQ ID NO: 44789 - protein, 188 aa, Homo sapiens [sequence omitted]

SEQ ID NO: 44790 - protein, 188 aa, Homo sapiens
  Payload ID: 9120
  Gene Symbol: LARP4
  Gene Name: La ribonucleoprotein domain family, member 4
  ENSP ID: ENSP00000482977
MYSSSCETTRNTTGIEESTDGMILGPEDLSYQIYDVSGESNSAVSTEDLKECLKKQLEFCFSRENLSKDLYLISQMDSDQFIPIWTVANMEEIKKLTTDPDLILEVLRSSPMVQVDEKGEKVRPSHKRCIVILREIPETTPIEEVKGLFKSENCPKVISCEFAHNSNWYITFQSDTDAQQAFILKRRS

SEQ ID NO: 44791 - protein, 738 aa, Homo sapiens
  Payload ID: 9121
  Gene Symbol: LARP4B
  Gene Name: La ribonucleoprotein domain family, member 4B
  Uniprot ID: Q92615
  ENSP ID: ENSP00000326128
MTSDQDAKVVAEPQTQRVQEGKDSAHLMNGPISQTTSQTSSIPPLSQVPATKVSELNPNAEVWGAPVLHLEASSAADGVSAAWEEVAGHHADRGPQGSDANGDGDQGHENAALPDPQESDPADMNALALGPSEYDSLPENSETGGNESQPDSQEDPREVLKKTLEFCLSRENLASDMYLISQMDSDQYVPITTVANLDHIKKLSTDVDLIVEVLRSLPLVQVDEKGEKVRPNQNRCIVILREISESTPVEEVEALFKGDNLPKFINCEFAYNDNWFITFETEADAQQAYKYLREEVKTFQGKPIKARIKAKAIAINTFLPKNGFRPLDVSLYAQQRYATSFYFPPMYSPQQQFPLYSLITPQTWSATHSYLDPPLVTPFPNTGFINGFTSPAFKPAASPLTSLRQYPPRSRNPSKSHLRHAIPSAERGPGLLESPSIFNFTADRLINGVRSPQTRQAGQTRTRIQNPSAYAKREAGPGRVEPGSLESSPGLGRGRKNSFGYRKKREEKFTSSQTQSPTPPKPPSPSFELGLSSFPPLPGAAGNLKTEDLFENRLSSLIIGPSKERTLSADASVNTLPVVVSREPSVPASCAVSATYERSPSPAHLPDDPKVAEKQRETHSVDRLPSALTATACKSVQVNGAATELRKPSYAEICQRTSKEPPSSPLQPQKEQKPNTVGCGKEEKKLAEPAERYREPPALKSTPGAPRDQRRPAGGRPSPSAMGKRLSREQSTPPKSPQ

SEQ ID NO: 44792 - protein, 131 aa, Homo sapiens
  Payload ID: 9121
  Gene Symbol: LARP4B
  Gene Name: La ribonucleoprotein domain family, member 4B
  ENSP ID: ENSP00000385229
MTSDQDAKVVAEPQTQRVQEGKDSAHLMNGPISQTTSQTSSIPPLSQVPATKVSELNPNAEVWGAPVLHLEASSAADGVSAAWEEVAGHHADRGPQGSDANGDGDQGHENAALPDPQESDPADMNALALGP

SEQ ID NO: 44793 - protein, 57 aa, Homo sapiens
  Payload ID: 9121
  Gene Symbol: LARP4B
  Gene Name: La ribonucleoprotein domain family, member 4B
  ENSP ID: ENSP00000390556
MTSDQDAKVVAEPQTQRVQEGKDSAHLMNGPISQTTSQTSSIPPLSQVPATKVSELN

SEQ ID NO: 44794 - protein, 339 aa, Homo sapiens
  Payload ID: 9121
  Gene Symbol: LARP4B
  Gene Name: La ribonucleoprotein domain family, member 4B
  ENSP ID: ENSP00000394545
  MOD_RES (1)..(1): Any amino acid
XSIFNFTADRLINGVRSPQTRQAGQTRTRIQNPSAYAKREAGPGRVEPGSLESSPGLGRGRKNSFGYRKKREEKFTSSQTQSPTPPKPPSPSFELGLSSFPPLPGAAGNLKTEDLFENRLSSLIIGPSKERTLSADASVNTLPVVVSREPSVPASCAVSATYERSPSPAHLPDDPKVAEKQRETHSVDRLPSALTATACKSVQVNGAATVRTSCLPSCTTAARLWCEQTLRTPAPARFLITSNLELRKPSYAEICQRTSKEPPSSPLQPQKEQKPNTVGCGKEEKKLAEPAERYREPPALKSTPGAPRDQRRPAGGRPSPSAMGKRLSREQSTPPKSPQ

SEQ ID NO: 44795 - protein, 190 aa, Homo sapiens
  Payload ID: 9121
  Gene Symbol: LARP4B
  Gene Name: La ribonucleoprotein domain family, member 4B
  ENSP ID: ENSP00000403018
  MOD_RES (1)..(1): Any amino acid
XSFELGLSSFPPLPGAAGNLKTEDLFENRLSSLIIGPSKERTLSADASVNTLPVVVSREPSVPASCAVSATYERSPSPAHLPDDPKVAEKQRETHSVDRLPSALTATACKSVQVNGAATVRTSCLPSCTTAARLWCEQTLRTPAPARFLITSNLVGFYLRLSVLCFLYKIPLIFANNFPLTTLVLSQTTM

SEQ ID NO: 44796 - protein, 79 aa, Homo sapiens
  Payload ID: 9121
  Gene Symbol: LARP4B
  Gene Name: La ribonucleoprotein domain family, member 4B
  ENSP ID: ENSP00000476786
MTSDQDAKVVAEPQTQRVQEGKDSAHLMNGPISQTTSQTSSIPPLSQKTLLSYRCQRTVLFGDGMIETDSSYQQLRFQS

SEQ ID NO: 44797 - protein, 738 aa, Homo sapiens; identical to SEQ ID NO: 44791
  Payload ID: 9121
  Gene Symbol: LARP4B
  Gene Name: La ribonucleoprotein domain family, member 4B
  Uniprot ID: Q92615
  ENSP ID: ENSP00000482767

SEQ ID NO: 44798 - protein, 153 aa, Homo sapiens
  Payload ID: 9121
  Gene Symbol: LARP4B
  Gene Name: La ribonucleoprotein domain family, member 4B
  ENSP ID: ENSP00000483973
VPASCAVSATYERSPSPAHLPDDPKVAEKQRETHSVDRLPSALTATACKSVQVNGAATELRKPSYAEICQRTSKEPPSSPLQPQKEQKPNTVGCGKEEKKLAEPAERYREPPALKSTPGAPRDQRRPAGGRPSPSAMGKRLSREQSTPPKSPQ

SEQ ID NO: 44799 - protein, 491 aa, Homo sapiens
  Payload ID: 9122
  Gene Symbol: LARP6
  Gene Name: La ribonucleoprotein domain family, member 6
  Uniprot ID: Q9BRS8
  ENSP ID: ENSP00000299213
MAQSGGEARPGPKTAVQIRVAIQEAEDVDELEDEEEGAETRGAGDPARYLSPGWGSASEEEPSRGHSGTTASGGENEREDLEQEWKPPDEELIKKLVDQIEFYFSDENLEKDAFLLKHVRRNKLGYVSVKLLTSFKKVKHLTRDWRTTAHALKYSVVLELNEDHRKVRRTTPVPLFPNENLPSKMLLVYDLYLSPKLWALATPQKNGRVQEKVMEHLLKLFGTFGVISSVRILKPGRELPPDIRRISSRYSQVGTQECAIVEFEEVEAAIKAHEFMITESQGKENMKAVLIGMKPPKKKPAKDKNHDEEPTASIHLNKSLNKRVEELQYMGDESSANSSSDPESNPTSPMAGRRHAATNKLSPSGHQNLFLSPNASPCTSPWSSPLAQRKGVSRKSPLAEEGRLNCSTSPEIFRKCMDYSSDSSVTPSGSPWVRRRRQAEMGTQEKSPGTSPLLSRKMQTADGLPVGVLRLPRGPDNTRGFHGHERSRACV

SEQ ID NO: 44800 - protein, 93 aa, Homo sapiens
  Payload ID: 9122
  Gene Symbol: LARP6
  Gene Name: La ribonucleoprotein domain family, member 6
  Uniprot ID: Q9BRS8
  ENSP ID: ENSP00000343869
MAQSGGEARPGPKTAVQIRVAIQEAEDVDELEDEEEGAETRGAGDPARYLSPGWGSASEEEPSRGHRNRSSVNSRTMLASFIVSSAPSTAPST

SEQ ID NO: 44801 - protein, 78 aa, Homo sapiens
  Payload ID: 9122
  Gene Symbol: LARP6
  Gene Name: La ribonucleoprotein domain family, member 6
  ENSP ID: ENSP00000453551
  MOD_RES (1)..(1): Any amino acid
XVDELEDEEEGAETRGAGDPARYLSPGWGSASEEEPSRGHRTAQLPWLESQQVFSLKPFLLPTGIELTPENPWGSSVS

SEQ ID NO: 44802 - protein, 31 aa, Homo sapiens
  Payload ID: 9122
  Gene Symbol: LARP6
  Gene Name: La ribonucleoprotein domain family, member 6
  ENSP ID: ENSP00000467334
MLLVYDLYLSPKLWALATPQKNGRVQEKVME

SEQ ID NO: 44803 - protein, 582 aa, Homo sapiens
  Payload ID: 9123
  Gene Symbol: LARP7
  Gene Name: La ribonucleoprotein domain family, member 7
  Uniprot ID: Q4G0J3
  ENSP ID: ENSP00000314311
METESGNQEKVMEEESTEKKKEVEKKKRSRVKQVLADIAKQVDFWFGDANLHKDRFLREQIEKSRDGYVDISLLVSFNKMKKLTTDGKLIARALRSSAVVELDLEGTRIRRKKPLGERPKDEDERTVYVELLPKNVNHSWIERVFGKCGNVVYISIPHYKSTGDPKGFAFVEFETKEQAAKAIEFLNNPPEEAPRKPGIFPKTVKNKPIPALRVVEEKKKKKKKKGRMKKEDNIQAKEENMDTSNTSISKMKRSRPTSEGSDIESTEPQKQCSKKKKKRDRVEASSLPEVRTGKRKRSSSEDAESLAPRSKVKKIIQKDIIKEASEASKENRDIEISTEEEKDTGDLKDSSLLKTKRKHKKKHKERHKMGEEVIPLRVLSKSEWMDLKKEYLALQKASMASLKKTISQIKSESEMETDSGVPQNTGMKNEKTANREECRTQEKVNATGPQFVSGVIVKIISTEPLPGRKQVRDTLAAISEVLYVDLLEGDTECHARFKTPEDAQAVINAYTEINKKHCWKLEILSGDHEQRYWQKILVDRQAKLNQPREKKRGTEKLITKAEKIRLAKTQQASKHIRFSEYD

SEQ ID NO: 44804 - protein, 582 aa, Homo sapiens; identical to SEQ ID NO: 44803
  Payload ID: 9123
  Gene Symbol: LARP7
  Gene Name: La ribonucleoprotein domain family, member 7
  Uniprot ID: Q4G0J3
  ENSP ID: ENSP00000344950

SEQ ID NO: 44805 - protein, 299 aa, Homo sapiens
  Payload ID: 9123
  Gene Symbol: LARP7
  Gene Name: La ribonucleoprotein domain family, member 7
  ENSP ID: ENSP00000421541
METESGNQEKVMEEESTEKKKEVEKKKRSRVKQVLADIAKQVDFWFGDANLHKDRFLREQIEKSRDGYVDISLLVSFNKMKKLTTDGKLIARALRSSAVVELDLEGTRIRRKKPLGERPKDEDERTVYVELLPKNVNHSWIERVFGKCGNVVYISIPHYKSTGDPKGFAFVEFETKEQAAKAIEFLNNPPEEAPRKPGIFPKTVKNKPIPALRVVEEKKKKKKKKGRMKKEDNIQAKEENMDTSNTSISKMKRSRPTSEGSDIESTEPQKQCSKKKKKRDRVEASSLPEVRTGKRKRSS

SEQ ID NO: 44806 - protein, 129 aa, Homo sapiens
  Payload ID: 9123
  Gene Symbol: LARP7
  Gene Name: La ribonucleoprotein domain family, member 7
  ENSP ID: ENSP00000421963
METESGNQEKVMEEESTEKKKEVEKKKRSRVKQVLADIAKQVDFWFGDANLHKDRFLREQIEKSRDGYVDISLLVSFNKMKKLTTDGKLIARALRSSAVVELDLEGTRIRRKKPLGERPKDEDERTVYV

SEQ ID NO: 44807 - protein, 155 aa, Homo sapiens
  Payload ID: 9123
  Gene Symbol: LARP7
  Gene Name: La ribonucleoprotein domain family, member 7
  ENSP ID: ENSP00000422013
METESGNQEKDTGDLKDSSLLKTKRKHKKKHKERHKMGEEVIPLRVLSKSEWMDLKKEYLALQKASMASLKKTISQIKSESEMETDSGVPQNTGMKNEKTANREECRTQEKVNATGPQFVSGVIVKIISTEPLPGRKQVRDTLAAISEVLYVDLL

SEQ ID NO: 44808 - protein, 45 aa, Homo sapiens
  Payload ID: 9123
  Gene Symbol: LARP7
  Gene Name: La ribonucleoprotein domain family, member 7
  ENSP ID: ENSP00000422451
METESGNQEKVMEEESTEKKKEVEKKKRSRVKQMLIYHYLCLLTK

SEQ ID NO: 44809 - protein, 589 aa, Homo sapiens
  Payload ID: 9123
  Gene Symbol: LARP7
  Gene Name: La ribonucleoprotein domain family, member 7
  Uniprot ID: Q4G0J3
  ENSP ID: ENSP00000422626
MIPNIEGMETESGNQEKVMEEESTEKKKEVEKKKRSRVKQVLADIAKQVDFWFGDANLHKDRFLREQIEKSRDGYVDISLLVSFNKMKKLTTDGKLIARALRSSAVVELDLEGTRIRRKKPLGERPKDEDERTVYVELLPKNVNHSWIERVFGKCGNVVYISIPHYKSTGDPKGFAFVEFETKEQAAKAIEFLNNPPEEAPRKPGIFPKTVKNKPIPALRVVEEKKKKKKKKGRMKKEDNIQAKEENMDTSNTSISKMKRSRPTSEGSDIESTEPQKQCSKKKKKRDRVEASSLPEVRTGKRKRSSSEDAESLAPRSKVKKIIQKDIIKEASEASKENRDIEISTEEEKDTGDLKDSSLLKTKRKHKKKHKERHKMGEEVIPLRVLSKSEWMDLKKEYLALQKASMASLKKTISQIKSESEMETDSGVPQNTGMKNEKTANREECRTQEKVNATGPQFVSGVIVKIISTEPLPGRKQVRDTLAAISEVLYVDLLEGDTECHARFKTPEDAQAVINAYTEINKKHCWKLEILSGDHEQRYWQKILVDRQAKLNQPREKKRGTEKLITKAEKIRLAKTQQASKHIRFSEYD

SEQ ID NO: 44810 - protein, 45 aa, Homo sapiens; identical to SEQ ID NO: 44808
  Payload ID: 9123
  Gene Symbol: LARP7
  Gene Name: La ribonucleoprotein domain family, member 7
  ENSP ID: ENSP00000424116

SEQ ID NO: 44811 - protein, 334 aa, Homo sapiens
  Payload ID: 9123
  Gene Symbol: LARP7
  Gene Name: La ribonucleoprotein domain family, member 7
  ENSP ID: ENSP00000426376
  MOD_RES (1)..(1): Any amino acid
XKKKKKGRMKKEDNIQAKEENMDTSNTSISKMKRSRPTSEGSDIESTEPQKQCSKKKKKRDRVEASSLPEVRTGKRKRSSSEDAESLAPRSKVKKIIQKDIIKEASEASKENRAPCLNGELFYLFQDIEISTEEEKDTGDLKDSSLLKTKRKHKKKHKERHKMGEEVIPLRVLSKSEWMDLKKEYLALQKASMASLKKTISQIKSESEMETDSGVPQNTGMKNEKTANREECRTQEKVNATGPQFVSGVIVKIISTEPLPGRKQVRDTLAAISEVLYVDLLEGDTECHARFKTPEDAQAVINAYTEINKKHCWKLEILSGDHEQRYWQKILVDR

SEQ ID NO: 44812 - protein, 119 aa, Homo sapiens
  Payload ID: 9123
  Gene Symbol: LARP7
  Gene Name: La ribonucleoprotein domain family, member 7
  ENSP ID: ENSP00000426646
METESGNQEKVMEEESTEKKKEVEKKKRSRVKQVLADIAKQVDFWFGDANLHKDRFLREQIEKSRDGYVDISLLVSFNKMKKLTTDGKLIARALRSSAVVELDLEGTRIRRKKPLGERP

SEQ ID NO: 44813 - protein, 101 aa, Homo sapiens
  Payload ID: 9123
  Gene Symbol: LARP7
  Gene Name: La ribonucleoprotein domain family, member 7
  ENSP ID: ENSP00000426709
METESGNQEKVMEEESTEKKKEVEKKKRSRVKQVLADIAKQVDFWFGDANLHKDRFLREQIEKSRDGCRNALAPCLLTPTSAPTSTPSAPPKRSSISLPSS

SEQ ID NO: 44814 - protein, 96 aa, Homo sapiens
  Payload ID: 9124
  Gene Symbol:
  Gene Name: LA16c-306E5.2
  ENSP ID: ENSP00000477472
MQGQKVLLEKTGSQLGEQELPDFQPQTPRRDLRESSPAEPSQAGAYDRLSPHHWEKSPLLQEPTPKLAGTAYRKAVPGGRKCGASLSWEKSSRECE

SEQ ID NO: 44815 - protein, 111 aa, Homo sapiens [sequence omitted]

SEQ ID NO: 44816 - protein, 536 aa, Homo sapiens
  Payload ID: 9125
  Gene Symbol:
  Gene Name: LA16c-380H5.3
  ENSP ID: ENSP00000488558
MGAWAFPAALFLLCLTSESLQGGLPLLPPGLGKVYGPHSGLGAGYDGGVKPQKPGFVVRHGLGTQPDTEGGMKPQNLGFRTFAGAAAQPGYGNGLGAAAFPVAGAQSGPAAQNGFGPGFGGGGKPQKPGPTTQNGYRPGYVGAVKPQKPGFQYRIGLGAQPGFRGDMKAQEPGLGNGNGLSAQPVLTAQNRFGFGAGLGGNVKPLKPGYGKRLRAGAFPGAGTQPEYGHGNGPGVQPGLGAGMKPQMPGLGAPNGYGPGRGRAGVPGGPERRPWVPHLLPFSSPGYLGVMKAQKPGPLAQNGYRAGAGEGMKPQKPGLRGTLKPQKSGHGHENGPWPGPCNARVAPMLLPRLPTPGVPSDKEGGWGLKSQPPSAVQNGKLPAPMPAIQWGLKPQKAGHQPPNGYGPGAEPGFNGGLEPQKIGLGYGNGVLGARVFPEAHPQPGFHGANGFRNRDGVEALVYPKAAALAPEGNGQAGVLWNSRWPTLQAWGAGLKPGYQAGDEYAEARSQPGGPDVKRGSNGQLGNGYGGRCPLGKC

SEQ ID NO: 44817 - protein, 122 aa, Homo sapiens
  Payload ID: 9126
  Gene Symbol:
  Gene Name: LA16c-431H6.6
  ENSP ID: ENSP00000399780
  MOD_RES (1)..(1): Any amino acid
XKKKGKPASMVKNKEQVRHFYYRTWHKITKYIDFDHVFSRGLKKSSQELYGLICYGELRKKIGGCMDDKNATKLNELIQVGRSFTMLARLVLNSRPQETCQGPPLYVTKGGTCGSKRPCAGP

SEQ ID NO: 44818 - protein, 430 aa, Homo sapiens
  Payload ID: 9127
  Gene Symbol: LACC1
  Gene Name: laccase (multicopper oxidoreductase) domain containing 1
  Uniprot ID: Q8IV20
  ENSP ID: ENSP00000317619
MAEAVLIDLFGLKLNSQKNCHQTLLKTLNAVQYHHAAKAKFLCIMCCSNISYERDGEQDNCEIETSNGLSALLEEFEIVSCPSMAATLYTIKQKIDEKNLSSIKVIVPRHRKTLMKAFIDQLFTDVYNFEFEDLQVTFRGGLFKQSIEINVITAQELRGIQNEIETFLRSLPALRGKLTIITSSLIPDIFIHGFTTRTGGISYIPTLSSFNLFSSSKRRDPKVVVQENLRRLANAAGFNVEKFYRIKTHHSNDIWIMGRKEPDSYDGITTNQRGVTIAALGADCIPIVFADPVKKACGVAHAGWKGTLLGVAMATVNAMIAEYGCSLEDIVVVLGPSVGPCCFTLPRESAEAFHNLHPACVQLFDSPNPCIDIRKATRILLEQGGILPQNIQDQNQDLNLCTSCHPDKFFSHVRDGLNFGTQIGFISIKE

SEQ ID NO: 44819 - protein, 430 aa, Homo sapiens; identical to SEQ ID NO: 44818
  Payload ID: 9127
  Gene Symbol: LACC1
  Gene Name: laccase (multicopper oxidoreductase) domain containing 1
  Uniprot ID: Q8IV20
  ENSP ID: ENSP00000391747

SEQ ID NO: 44820 - protein, 164 aa, Homo sapiens
  Payload ID: 9127
  Gene Symbol: LACC1
  Gene Name: laccase (multicopper oxidoreductase) domain containing 1
  ENSP ID: ENSP00000394179
MAEAVLIDLFGLKLNSQKNCHQTLLKTLNAVQYHHAAKAKFLCIMCCSNISYERDGEQDNCEIETSNGLSALLEEFEIVSCPSMAATLYTIKQKIDEKNLSSIKVIVPRHRKTLMKAFIDQLFTDVYNFEFEDLQVTFRGGLFKQSIEINVITAQELRGIQNEI

SEQ ID NO: 44821 - protein, 138 aa, Homo sapiens
  Payload ID: 9128
  Gene Symbol: LACRT
  Gene Name: lacritin
  Uniprot ID: Q9GZZ8
  ENSP ID: ENSP00000257867
MKFTTLLFLAAVAGALVYAEDASSDSTGADPAQEAGTSKPNEEISGPAEPASPPETTTTAQETSAAAVQGTAKVTSSRQELNPLKSIVEKSILLTEQALAKAGKGMHGGVPGGKQFIENGSEFAQKLLKKFSLLKPWA

SEQ ID NO: 44822 - protein, 127 aa, Homo sapiens
  Payload ID: 9128
  Gene Symbol: LACRT
  Gene Name: lacritin
  ENSP ID: ENSP00000447536
MKFTTLLFLAAVAGALVYAEDASSDSTGADPAQEAGTSKPNEEISGPAEPASPPETTTTAQETSAAAVQGTAKVTSSRQELNPLKQALAKAGKGMHGGVPGGKQFIENGSEFAQKLLKKFSLLKPWA

SEQ ID NO: 44823 - protein, 85 aa, Homo sapiens
  Payload ID: 9128
  Gene Symbol: LACRT
  Gene Name: lacritin
  ENSP ID: ENSP00000448193
PAQEAGTSKPNEEISGPAEPASPPETTTTAQETSAAAVQGTAKVTSSRQELNPLKQALAKAGKGMHGGVPGGKQFIESECIPRWK

SEQ ID NO: 44824 - protein, 142 aa, Homo sapiens
  Payload ID: 9129
  Gene Symbol: LALBA
  Gene Name: lactalbumin, alpha-
  Uniprot ID: P00709
  ENSP ID: ENSP00000301046
MRFFVPLFLVGILFPAILAKQFTKCELSQLLKDIDGYGGIALPELICTMFHTSGYDTQAIVENNESTEYGLFQISNKLWCKSSQVPQSRNICDISCDKFLDDDITDDIMCAKKILDIKGIDYWLAHKALCTEKLEQWLCEKL

SEQ ID NO: 44825 - protein, 123 aa, Homo sapiens
  Payload ID: 9129
  Gene Symbol: LALBA
  Gene Name: lactalbumin, alpha-
  ENSP ID: ENSP00000449780
MRFFVPLFLVGILFPAILAKQFTKCELSQLLKDIDGYGGIALPELICTMFHTSGYDTQAIVENNESTEYGLFQISNKLWCKSSQVPQSRNICDISCDKFLDDDITDDIMCAKKILDIKGIDYW

SEQ ID NO: 44826 - protein, 547 aa, Homo sapiens
  Payload ID: 9130
  Gene Symbol: LACTB
  Gene Name: lactamase, beta
  Uniprot ID: P83111
  ENSP ID: ENSP00000261893
MYRLMSAVTARAAAPGGLASSCGRRGVHQRAGLPPLGHGWVGGLGLGLGLALGVKLAGGLRGAAPAQSPAAPDPEASPLAEPPQEQSLAPWSPQTPAPPCSRCFARAIESSRDLLHRIKDEVGAPGIVVGVSVDGKEVWSEGLGYADVENRVPCKPETVMRIASISKSLTMVALAKLWEAGKLDLDIPVQHYVPEFPEKEYEGEKVSVTTRLLISHLSGIRHYEKDIKKVKEEKAYKALKMMKENVAFEQEKEGKSNEKNDFTKFKTEQENEAKCRNSKPGKKKNDFEQGELYLREKFENSIESLRLFKNDPLFFKPGSQFLYSTFGYTLLAAIVERASGCKYLDYMQKIFHDLDMLTTVQEENEPVIYNRARFYVYNKKKRLVNTPYVDNSYKWAGGGFLSTVGDLLKFGNAMLYGYQVGLFKNSNENLLPGYLKPETMVMMWTPVPNTEMSWDKEGKYAMAWGVVERKQTYGSCRKQRHYASHTGGAVGASSVLLVLPEELDTETINNKVPPRGIIVSIICNMQSVGLNSTALKIALEFDKDRSD

SEQ ID NO: 44827 - protein, 373 aa, Homo sapiens
  Payload ID: 9130
  Gene Symbol: LACTB
  Gene Name: lactamase, beta
  Uniprot ID: P83111
  ENSP ID: ENSP00000392956
MYRLMSAVTARAAAPGGLASSCGRRGVHQRAGLPPLGHGWVGGLGLGLGLALGVKLAGGLRGAAPAQSPAAPDPEASPLAEPPQEQSLAPWSPQTPAPPCSRCFARAIESSRDLLHRIKDEVGAPGIVVGVSVDGKEVWSEGLGYADVENRVPCKPETVMRIASISKSLTMVALAKLWEAGKLDLDIPVQHYVPEFPEKEYEGEKVSVTTRLLISHLSGIRHYEKDIKKVKEEKAYKALKMMKENVAFEQEKEGKSNEKNDFTKFKTEQENEAKCRNSKPGKKKNDFEQGELYLREKFENSIESLRLFKNDPLFFKPGSQFLYSTFGYTLLAAIVERASGCKYLDYMQKIFHDLDMLTTVQEENEPVIYNRAR

SEQ ID NO: 44828 - protein, 126 aa, Homo sapiens
  Payload ID: 9130
  Gene Symbol: LACTB
  Gene Name: lactamase, beta
  ENSP ID: ENSP00000454085
MRIASISKSLTMVALAKLWEAGKLDLDIPVQHYVPEFPEKEYEGEKVSVTTRLLISHLSGIRHYEKDIKKVKEEKAYKALKMMKENVAFEQEKEGKSNEKNDFTKFKTEQENEAKCRNSKPGKKKN

SEQ ID NO: 44829 - protein, 288 aa, Homo sapiens
  Payload ID: 9131
  Gene Symbol: LACTB2
  Gene Name: lactamase, beta 2
  Uniprot ID: Q53H82
  ENSP ID: ENSP00000276590
MAAVLQRVERLSNRVVRVLGCNPGPMTLQGTNTYLVGTGPRRILIDTGEPAIPEYISCLKQALTEFNTAIQEIVVTHWHRDHSGGIGDICKSINNDTTYCIKKLPRNPQREEIIGNGEQQYVYLKDGDVIKTEGATLRVLYTPGHTDDHMALLLEEENAIFSGDCILGEGTTVFEDLYDYMNSLKELLKIKADIIYPGHGPVIHNAEAKIQQYISHRNIREQQILTLFRENFEKSFTVMELVKIIYKNTPENLHEMAKHNLLLHLKKLEKEGKIFSNTDPDKKWKAHL

SEQ ID NO: 44830 - protein, 288 aa, Homo sapiens; identical to SEQ ID NO: 44829
  Payload ID: 9131
  Gene Symbol: LACTB2
  Gene Name: lactamase, beta 2
  Uniprot ID: Q53H82
  ENSP ID: ENSP00000428801

SEQ ID NO: 44831 - protein, 546 aa, Homo sapiens
  Payload ID: 9132
  Gene Symbol: LACTBL1
  Gene Name: lactamase, beta-like 1
  ENSP ID: ENSP00000402297
MTGCFLWQYHLPKLKTGSLGPEETSAPVRMCPRHPEPVPLAHPLPVLKEALEKVDQILRQAMSAPGVAAMSAVVIHNDTVLWTGNFGKKNGSDPASGAPNEYTMYRISSISKIFPVLMLYRLWEEGIVASLDDPLERYASTFTINNPLGLASAEQQGLMDGLEQVGPAPRPSPVTLRRMASQLSGLPRRLRSTSLLWKGSTQEALNLLKDDVLVVDPGTRCHYSTLAFSLLAHVLAAHTAQGDYQRWVSENVLEPLGMADTGFDLTPDVRARLAAGFYGSGRPAPLYDLGWYRPSGQMYSTAADLAKLAVALLGGGPRRLLRPDAAKTLLAPLLACPGAYFANETGTPWEFHAQRGYRVVRKDGDLDGYAATFSLVPPLRLGLVLLLAGPRPPGPDLVARAYDELLPALERALREAEPGPAPPPTAHPFAGYFTFANLTFYEVRAGPAGELRLRQFGPRVEALVPPAFRTLALRHLHGRVFQLHVAHEFPCALPLGDAWLSLEAQHGQLVNFYPLDHHGLSPGFDVPGLNTYRVLRLRGKPVFKTQ

SEQ ID NO: 44832 - protein, 500 aa, Homo sapiens
  Payload ID: 9132
  Gene Symbol: LACTBL1
  Gene Name: lactamase, beta-like 1
  Uniprot ID: A8MY62
  ENSP ID: ENSP00000483725
MCPRHPEPVPLAHPLPVLKEALEKVDQILRQAMSAPGVAAMSAVVIHNDTVLWTGNFGKKNGSDPASGAPNEYTMYRISSISKIFPVLMLYRLWEEGIVASLDDPLERYASTFTINNPLGLASAEQQGLILRRMASQLSGLPRRLRSTSLLWKGSTQEALNLLKDDVLVVDPGTRCHYSTLAFSLLAHVLAAHTAQGDYQRWVSENVLEPLGMADTGFDLTPDVRARLAAGFYGSGRPAPLYDLGWYRPSGQMYSTAADLAKLAVALLGGGPRRLLRPDAAKTLLAPLLACPGAYFANETGTPWEFHAQRGYRVVRKDGDLDGYAATFSLVPPLRLGLVLLLAGPRPPGPDLVARAYDELLPALERALREAEPGPAPPPTAHPFAGYFTFANLTFYEVRAGPAGELRLRQFGPRVEALVPPAFRTLALRHLHGRVFQLHVAHEFPCALPLGDAWLSLEAQHGQLVNFYPLDHHGLSPGFDVPGLNTYRVLRLRGKPVFKT

SEQ ID NO: 44833 - protein, 1927 aa, Homo sapiens
  Payload ID: 9133
  Gene Symbol: LCT
  Gene Name: lactase
  Uniprot ID: P09848
  ENSP ID: ENSP00000264162
MELSWHVVFIALLSFSCWGSDWESDRNFISTAGPLTNDLLHNLSGLLGDQSSNFVAGDKDMYVCHQPLPTFLPEYFSSLHASQITHYKVFLSWAQLLPAGSTQNPDEKTVQCYRRLLKALKTARLQPMVILHHQTLPASTLRRTEAFADLFADYATFAFHSFGDLVGIWFTFSDLEEVIKELPHQESRASQLQTLSDAHRKAYEIYHESYAFQGGKLSVVLRAEDIPELLLEPPISALAQDTVDFLSLDLSYECQNEASLRQKLSKLQTIEPKVKVFIFNLKLPDCPSTMKNPASLLFSLFEAINKDQVLTIGFDINEFLSCSSSSKKSMSCSLTGSLALQPDQQQDHETTDSSPASAYQRIWEAFANQSRAERDAFLQDTFPEGFLWGASTGAFNVEGGWAEGGRGVSIWDPRRPLNTTEGQATLEVASDSYHKVASDVALLCGLRAQVYKFSISWSRIFPMGHGSSPSLPGVAYYNKLIDRLQDAGIEPMATLFHWDLPQALQDHGGWQNESVVDAFLDYAAFCFSTFGDRVKLWVTFHEPWVMSYAGYGTGQHPPGISDPGVASFKVAHLVLKAHARTWHHYNSHHRPQQQGHVGIVLNSDWAEPLSPERPEDLRASERFLHFMLGWFAHPVFVDGDYPATLRTQIQQMNRQCSHPVAQLPEFTEAEKQLLKGSADFLGLSHYTSRLISNAPQNTCIPSYDTIGGFSQHVNHVWPQTSSSWIRVVPWGIRRLLQFVSLEYTRGKVPIYLAGNGMPIGESENLFDDSLRVDYFNQYINEVLKAIKEDSVDVRSYIARSLIDGFEGPSGYSQRFGLHHVNFSDSSKSRTPRKSAYFFTSIIEKNGFLTKGAKRLLPPNTVNLPSKVRAFTFPSEVPSKAKVVWEKFSSQPKFERDLFYHGTFRDDFLWGVSSSAYQIEGAWDADGKGPSIWDNFTHTPGSNVKDNATGDIACDSYHQLDADLNMLRALKVKAYRFSISWSRIFPTGRNSSINSHGVDYYNRLINGLVASNIFPMVTLFHWDLPQALQDIGGWENPALIDLFDSYADFCFQTFGDRVKFWMTFNEPMYLAWLGYGSGEFPPGVKDPGWAPYRIAHAVIKAHARVYHTYDEKYRQEQKGVISLSLSTHWAEPKSPGVPRDVEAADRMLQFSLGWFAHPIFRNGDYPDTMKWKVGNRSELQHLATSRLPSFTEEEKRFIRATADVFCLNTYYSRIVQHKTPRLNPPSYEDDQEMAEEEDPSWPSTAMNRAAPWGTRRLLNWIKEEYGDIPIYITENGVGLTNPNTEDTDRIFYHKTYINEALKAYRLDGIDLRGYVAWSLMDNFEWLNGYTVKFGLYHVDFNNTNRPRTARASARYYTEVITNNGMPLAREDEFLYGRFPEGFIWSAASAAYQIEGAWRADGKGLSIWDTFSHTPLRVENDAIGDVACDSYHKIAEDLVTLQNLGVSHYRFSISWSRILPDGTTRYINEAGLNYYVRLIDTLLAASIQPQVTIYHWDLPQTLQDVGGWENETIVQRFKEYADVLFQRLGDKVKFWITLNEPFVIAYQGYGYGTAAPGVSNRPGTAPYIVGHNLIKAHAEAWHLYNDVYRASQGGVISITISSDWAEPRDPSNQEDVEAARRYVQFMGGWFAHPIFKNGDYNEVMKTRIRDRSLAAGLNKSRLPEFTESEKRRINGTYDFFGFNHYTTVLAYNLNYATAISSFDADRGVASIADRSWPDSGSFWLKMTPFGFRRILNWLKEEYNDPPIYVTENGVSQREETDLNDTARIYYLRTYINEALKAVQDKVDLRGYTVWSAMDNFEWATGFSERFGLHFVNYSDPSLPRIPKASAKFYASVVRCNGFPDPATGPHACLHQPDAGPTISPVRQEEVQFLGLMLGTTEAQTALYVLFSLVLLGVCGLAFLSYKYCKRSKQGKTQRSQQELSPVSSF

SEQ ID NO: 44834 - protein, 1003 aa, Homo sapiens
  Payload ID: 9133
  Gene Symbol: LCT
  Gene Name: lactase
  ENSP ID: ENSP00000391231
KVAHLVLKAHARTWHHYNSHHRPQQQGHVGIVLNSDWAEPLSPERPEDLRASERFLHFMLGWFAHPVFVDGDYPATLRTQIQQMNRQCSHPVAQLPEFTEAEKQLLKGSADFLGLSHYTSRLISNAPQNTCIPSYDTIGGFSQHVNHVWPQTSSSWIRVVPWGIRRLLQFVSLEYTRGKVPIYLAGNGMPIGESENLFDDSLRVDYFNQYINEVLKAIKEDSVDVRSYIARSLIDGFEGPSGYSQRFGLHHVNFSDSSKSRTPRKSAYFFTSIIEKNGFLTKGAKRLLPPNTVNLPSKVRAFTFPSEVPSKAKVVWEKFSSQPKFERDLFYHGTFRDDFLWGVSSSAYQIEGAWDADGKGPSIWDNFTHTPGSNVKDNATGDIACDSYHQLDADLNMLRALKVKAYRFSISWSRIFPTGRNSSINSHGVDYYNRLINGLVASNIFPMVTLFHWDLPQALQDIGGWENPALIDLFDSYADFCFQTFGDRVKFWMTFNEPMYLAWLGYGSGEFPPGVKDPGWAPYRIAHAVIKAHARVYHTYDEKYRQEQKGVISLSLSTHWAEPKSPGVPRDVEAADRMLQFSLGWFAHPIFRNGDYPDTMKWKVGNRSELQHLATSRLPSFTEEEKRFIRATADVFCLNTYYSRIVQHKTPRLNPPSYEDDQEMAEEEDPSWPSTAMNRAAPWGTRRLLNWIKEEYGDIPIYITENGVGLTNPNTEDTDRIFYHKTYINEALKAYRLDGIDLRGYVAWSLMDNFEWLNGYTVKFGLYHVDFNNTNRPRTARASARYYTEVITNNGMPLAREDEFLYGRFPEGFIWSAASAAYQIEGAWRADGKGLSIWDTFSHTPLRVENDAIGDVACDSYHKIAEDLVTLQNLGVSHYRFSISWSRILPDGTTRYINEAGLNYYVRLIDTLLAASIQPQVTIYHWDLPQTLQDVGGWENETIVQRFKEYADVLFQRLGDKVKFWITLNEPFVIAYQGYGYGTAAPVHGRLVCTSYFQEWRLQ

SEQ ID NO: 44835 - protein, 567 aa, Homo sapiens
  Payload ID: 9134
  Gene Symbol: LCTL
  Gene Name: lactase-like
  Uniprot ID: Q6UWM7
  ENSP ID: ENSP00000343490
MKPVWVATLLWMLLLVPRLGAARKGSPEEASFYYGTFPLGFSWGVGSSAYQTEGAWDQDGKGPSIWDVFTHSGKGKVLGNETADVACDGYYKVQEDIILLRELHVNHYRFSLSWPRLLPTGIRAEQVNKKGIEFYSDLIDALLSSNITPIVTLHHWDLPQLLQVKYGGWQNVSMANYFRDYANLCFEAFGDRVKHWITFSDPRAMAEKGYETGHHAPGLKLRGTGLYKAAHHIIKAHAKAWHSYNTTWRSKQQGLVGISLNCDWGEPVDISNPKDLEAAERYLQFCLGWFANPIYAGDYPQVMKDYIGRKSAEQGLEMSRLPVFSLQEKSYIKGTSDFLGLGHFTTRYITERNYPSRQGPSYQNDRDLIELVDPNWPDLGSKWLYSVPWGFRRLLNFAQTQYGDPPIYVMENGASQKFHCTQLCDEWRIQYLKGYINEMLKAIKDGANIKGYTSWSLLDKFEWEKGYSDRYGFYYVEFNDRNKPRYPKASVQYYKKIIIANGFPNPREVESWYLKALETCSINNQMLAAEPLLSHMQMVTEIVVPTVCSLCVLITAVLLMLLLRRQS

SEQ ID NO: 44836 - protein, 394 aa, Homo sapiens
  Payload ID: 9134
  Gene Symbol: LCTL
  Gene Name: lactase-like
  Uniprot ID: Q6UWM7
  ENSP ID: ENSP00000445419
MANYFRDYANLCFEAFGDRVKHWITFSDPRAMAEKGYETGHHAPGLKLRGTGLYKAAHHIIKAHAKAWHSYNTTWRSKQQGLVGISLNCDWGEPVDISNPKDLEAAERYLQFCLGWFANPIYAGDYPQVMKDYIGRKSAEQGLEMSRLPVFSLQEKSYIKGTSDFLGLGHFTTRYITERNYPSRQGPSYQNDRDLIELVDPNWPDLGSKWLYSVPWGFRRLLNFAQTQYGDPPIYVMENGASQKFHCTQLCDEWRIQYLKGYINEMLKAIKDGANIKGYTSWSLLDKFEWEKGYSDRYGFYYVEFNDRNKPRYPKASVQYYKKIIIANGFPNPREVESWYLKALETCSINNQMLAAEPLLSHMQMVTEIVVPTVCSLCVLITAVLLMLLLRRQS

SEQ ID NO: 44837 - protein, 36 aa, Homo sapiens
  Payload ID: 9134
  Gene Symbol: LCTL
  Gene Name: lactase-like
  ENSP ID: ENSP00000455793
MANYFRDYANLCFEAFGDRVKHWITFSDPRVWWEFH

SEQ ID NO: 44838 - protein, 241 aa, Homo sapiens
  Payload ID: 9135
  Gene Symbol: LDHA
  Gene Name: lactate dehydrogenase A
  Uniprot ID: P00338
  ENSP ID: ENSP00000227157
MATLKDQLIYNLLKEEQTPQNKITVVGVGAVGMACAISILMKDLADELALVDVIEDKLKGEMMDLQHGSLFLRTPKIVSGKDYNVTANSKLVIITAGARQQEGESRLNLVQRNVNIFKFIIPNVVKYSPNCKLLIVSNPVDILTYVAWKISGFPKNRVIGSGCNLDSARFRYLMGERLGVHPLSCHGWVLGEHGDSSVPVWSGMNVAGVSLKTLHPDLGTDKDKEQWKEVHKQVVERVFTE

SEQ ID NO: 44839 - protein, 332 aa, Homo sapiens
  Payload ID: 9135
  Gene Symbol: LDHA
  Gene Name: lactate dehydrogenase A
  Uniprot ID: P00338
  ENSP ID: ENSP00000368722
MATLKDQLIYNLLKEEQTPQNKITVVGVGAVGMACAISILMKDLADELALVDVIEDKLKGEMMDLQHGSLFLRTPKIVSGKDYNVTANSKLVIITAGARQQEGESRLNLVQRNVNIFKFIIPNVVKYSPNCKLLIVSNPVDILTYVAWKISGFPKNRVIGSGCNLDSARFRYLMGERLGVHPLSCHGWVLGEHGDSSVPVWSGMNVAGVSLKTLHPDLGTDKDKEQWKEVHKQVVESAYEVIKLKGYTSWAIGLSVADLAESIMKNLRRVHPVSTMIKGLYGIKDDVFLSVPCILGQNGISDLVKVTLTSEEEARLKKSADTLWGIQKELQF

SEQ ID NO: 44840 - protein, 274 aa, Homo sapiens
  Payload ID: 9135
  Gene Symbol: LDHA
  Gene Name: lactate dehydrogenase A
  Uniprot ID: P00338
  ENSP ID: ENSP00000379524
MATLKDQLIYNLLKEEQTPQNKITVVGVGAVGMACAISILMKDLADELALVDVIEDKLKGEMMDLQHGSLFLRTPKIVSGKDYNVTANSKLVIITAGARQQEGESRLNLVQRNVNIFKFIIPNVVKYSPNCKLLIVSNPVDILTYVAWKISGFPKNRVIGSGCNLDSARFRYLMGERLGVHPLSCHGWVLGEHGDSSVPVWSGMNVAGVSLKTLHPDLGTDKDKEQWKECRYTLGDPKGAAILKSSDVISFHCLGYNRILGGGCACCPFYLICD

SEQ ID NO: 44841 - protein, 332 aa, Homo sapiens; identical to SEQ ID NO: 44839
  Payload ID: 9135
  Gene Symbol: LDHA
  Gene Name: lactate dehydrogenase A
  Uniprot ID: P00338
  ENSP ID: ENSP00000395337

SEQ ID NO: 44842 - protein, 274 aa, Homo sapiens
  Payload ID: 9135
  Gene Symbol: LDHA
  Gene Name: lactate dehydrogenase A
  Uniprot ID: P00338
  ENSP ID: ENSP00000406172
MATLKDQLIYNLLKEEQTPQNKITVVGVGAVGMACAISILMKDLADELALVDVIEDKLKGEMMDLQHGSLFLRTPKIVSGKVDILTYVAWKISGFPKNRVIGSGCNLDSARFRYLMGERLGVHPLSCHGWVLGEHGDSSVPVWSGMNVAGVSLKTLHPDLGTDKDKEQWKEVHKQVVESAYEVIKLKGYTSWAIGLSVADLAESIMKNLRRVHPVSTMIKGLYGIKDDVFLSVPCILGQNGISDLVKVTLTSEEEARLKKSADTLWGIQKELQF

SEQ ID NO: 44843 - protein, 156 aa, Homo sapiens
  Payload ID: 9135
  Gene Symbol: LDHA
  Gene Name: lactate dehydrogenase A
  ENSP ID: ENSP00000440161
MATLKDQLIYNLLKEEQTPQNKITVVGVGAVGMACAISILMKDLADELALVDVIEDKLKGEMMDLQHGSLFLRTPKIVSGKDYNVTANSKLVIITAGARQQEGESRLNLVQRNVNIFKFIIPNVVKYSPNCKLLIVSNPVDILTYVAWKISGFPKN

SEQ ID NO: 44844 - protein, 46 aa, Homo sapiens
  Payload ID: 9135
  Gene Symbol: LDHA
  Gene Name: lactate dehydrogenase A
  ENSP ID: ENSP00000440368
MATLKDQLIYNLLKEEQTPQNKITVVGVGAVGMACAITVLIWSSVT

SEQ ID NO: 44845 - protein, 45 aa, Homo sapiens
  Payload ID: 9135
  Gene Symbol: LDHA
  Gene Name: lactate dehydrogenase A
  ENSP ID: ENSP00000441058
MATLKDQLIYNLLKEEQTPQNKITVVGVGAVGMACAISILMKWIS

SEQ ID NO: 44846 - protein, 144 aa, Homo sapiens
  Payload ID: 9135
  Gene Symbol: LDHA
  Gene Name: lactate dehydrogenase A
  ENSP ID: ENSP00000441241
MATLKDQLIYNLLKEEQTPQNKITVVGVGAVGMACAISILMKDLADELALVDVIEDKLKGEMMDLQHGSLFLRTPKIVSGKDYNVTANSKLVIITAGARQQEGESRLNLVQRNVNIFKFIIPNVVKYSPNCKLLIVSNPGEAFD

SEQ ID NO: 44847 - protein, 45 aa, Homo sapiens
  Payload ID: 9135
  Gene Symbol: LDHA
  Gene Name: lactate dehydrogenase A
  ENSP ID: ENSP00000441699
MATLKDQLIYNLLKEEQTPQNKITVVGVGAVGMACAISILMKTIM

SEQ ID NO: 44848 - protein, 45 aa, Homo sapiens; identical to SEQ ID NO: 44847
  Payload ID: 9135
  Gene Symbol: LDHA
  Gene Name: lactate dehydrogenase A
  ENSP ID: ENSP00000442637

SEQ ID NO: 44849 - protein, 94 aa, Homo sapiens
  Payload ID: 9135
  Gene Symbol: LDHA
  Gene Name: lactate dehydrogenase A
  ENSP ID: ENSP00000442979
MATLKDQLIYNLLKEEQTPQNKITVVGVGAVGMACAISILMKDLADELALVDVIEDKLKGEMMDLQHGSLFLRTPKIVSGKALPNCSYIKLQLD

SEQ ID NO: 44850 - protein, 89 aa, Homo sapiens
  Payload ID: 9135
  Gene Symbol: LDHA
  Gene Name: lactate dehydrogenase A
  ENSP ID: ENSP00000443362
MATLKDQLIYNLLKEEQTPQNKITVVGVGAVGMACAISILMKDLADELALVDVIEDKLKGEMMDLQHGSLFLRTPKIVSGKDSAPRFRD

SEQ ID NO: 44851 - protein, 42 aa, Homo sapiens
  Payload ID: 9135
  Gene Symbol: LDHA
  Gene Name: lactate dehydrogenase A
  ENSP ID: ENSP00000443545
MATLKDQLIYNLLKEEQTPQNKITVVGVGAVGMACAISILMK

SEQ ID NO: 44852 - protein, 72 aa, Homo sapiens
  Payload ID: 9135
  Gene Symbol: LDHA
  Gene Name: lactate dehydrogenase A
  ENSP ID: ENSP00000444292
MATLKDQLIYNLLKEEQTPQNKITVVGVGAVGMACAISILMKDLADELALVDVIEDKLKGEMMDLQHGSLFL

SEQ ID NO: 44853 - protein, 361 aa, Homo sapiens
  Payload ID: 9135
  Gene Symbol: LDHA
  Gene Name: lactate dehydrogenase A
  Uniprot ID: P00338
  ENSP ID: ENSP00000445175
MGEPSGGYTYTQTSIFLFHAKIPFGSKSNMATLKDQLIYNLLKEEQTPQNKITVVGVGAVGMACAISILMKDLADELALVDVIEDKLKGEMMDLQHGSLFLRTPKIVSGKDYNVTANSKLVIITAGARQQEGESRLNLVQRNVNIFKFIIPNVVKYSPNCKLLIVSNPVDILTYVAWKISGFPKNRVIGSGCNLDSARFRYLMGERLGVHPLSCHGWVLGEHGDSSVPVWSGMNVAGVSLKTLHPDLGTDKDKEQWKEVHKQVVESAYEVIKLKGYTSWAIGLSVADLAESIMKNLRRVHPVSTMIKGLYGIKDDVFLSVPCILGQNGISDLVKVTLTSEEEARLKKSADTLWGIQKELQF

SEQ ID NO: 44854 - protein, 332 aa, Homo sapiens; identical to SEQ ID NO: 44839
  Payload ID: 9135
  Gene Symbol: LDHA
  Gene Name: lactate dehydrogenase A
  Uniprot ID: P00338
  ENSP ID: ENSP00000445331

SEQ ID NO: 44855 - protein, 114 aa, Homo sapiens
  Payload ID: 9135
  Gene Symbol: LDHA
  Gene Name: lactate dehydrogenase A
  ENSP ID: ENSP00000446415
MATLKDQLIYNLLKEEQTPQNKITVVGVGAVGMACAISILMKDLADELALVDVIEDKLKGEMMDLQHGSLFLRTPKIVSGKDYNVTANSKLVIITAGARQQEGESRLNLVQRNV

SEQ ID NO: 44856 - protein, 46 aa, Homo sapiens; identical to SEQ ID NO: 44844
  Payload ID: 9135
  Gene Symbol: LDHA
  Gene Name: lactate dehydrogenase A
  ENSP ID: ENSP00000486249

SEQ ID NO: 44857 - protein, 332 aa, Homo sapiens
  Payload ID: 9136
  Gene Symbol: LDHAL6A
  Gene Name: lactate dehydrogenase A-like 6A
  Uniprot ID: Q6ZMR3
  ENSP ID: ENSP00000280706
MATIKSELIKNFAEEEAIHHNKISIVGTGSVGVACAISILLKGLSDELVLVDVDEGKLKGETMDLQHGSPFMKMPNIVSSKDYLVTANSNLVIITAGARQKKGETRLDLVQRNVSIFKLMIPNITQYSPHCKLLIVTNPVDILTYVAWKLSGFPKNRVIGSGCNLDSARFRYFIGQRLGIHSESCHGLILGEHGDSSVPVWSGVNIAGVPLKDLNPDIGTDKDPEQWENVHKKVISSGYEMVKMKGYTSWGISLSVADLTESILKNLRRVHPVSTLSKGLYGINEDIFLSVPCILGENGITDLIKVKLTLEEEACLQKSAETLWEIQKELKL

SEQ ID NO: 44858 - protein, 332 aa, Homo sapiens; identical to SEQ ID NO: 44857
  Payload ID: 9136
  Gene Symbol: LDHAL6A
  Gene Name: lactate dehydrogenase A-like 6A
  Uniprot ID: Q6ZMR3
  ENSP ID: ENSP00000379516

SEQ ID NO: 44859 - protein, 233 aa, Homo sapiens
  Payload ID: 9136
  Gene Symbol: LDHAL6A
  Gene Name: lactate dehydrogenase A-like 6A
  ENSP ID: ENSP00000478764
MATIKSELIKNFAEEEAIHHNKISIVGTGSVGVACAISILLKGLSDELVLVDVDEGKLKGETMDLQHGSPFMKMPNIVSSKDYLVTANSNLVIITAGARQKKGETRLDLVQRNVSIFKLMIPNITQYSPHCKLLIVTNPVDILTYVAWKLSGFPKNRVIGSGCNLDSARFRYFIGQRLGIHSESCHGLILGEHGDSSVPVWSGVNIAGVPLKDLNPDIGTDKDPEQWENVHKK

SEQ ID NO: 44860 - protein, 381 aa, Homo sapiens
  Payload ID: 9137
  Gene Symbol: LDHAL6B
  Gene Name: lactate dehydrogenase A-like 6B
  Uniprot ID: Q9BYZ2
  ENSP ID: ENSP00000302393
MSWTVPVVRASQRVSSVGANFLCLGMALCPRQATRIPLNGTWLFTPVSKMATVKSELIERFTSEKPVHHSKVSIIGTGSVGMACAISILLKGLSDELALVDLDEDKLKGETMDLQHGSPFTKMPNIVCSKDYFVTANSNLVIITAGARQEKGETRLNLVQRNVAIFKLMISSIVQYSPHCKLIIVSNPVDILTYVAWKLSAFPKNRIIGSGCNLDTARFRFLIGQKLGIHSESCHGWILGEHGDSSVPVWSGVNIAGVPLKDLNSDIGTDKDPEQWKNVHKEVTATAYEIIKMKGYTSWAIGLSVADLTESILKNLRRIHPVSTIIKGLYGIDEEVFLSIPCILGENGITNLIKIKLTPEEEAHLKKSAKTLWEIQNKLKL

SEQ ID NO: 44861 - protein, 334 aa, Homo sapiens
  Payload ID: 9138
  Gene Symbol: LDHB
  Gene Name: lactate dehydrogenase B
  Uniprot ID: P07195
  ENSP ID: ENSP00000229319
MATLKEKLIAPVAEEEATVPNNKITVVGVGQVGMACAISILGKSLADELALVDVLEDKLKGEMMDLQHGSLFLQTPKIVADKDYSVTANSKIVVVTAGVRQQEGESRLNLVQRNVNVFKFIIPQIVKYSPDCIIIVVSNPVDILTYVTWKLSGLPKHRVIGSGCNLDSARFRYLMAEKLGIHPSSCHGWILGEHGDSSVAVWSGVNVAGVSLQELNPEMGTDNDSENWKEVHKMVVESAYEVIKLKGYTNWAIGLSVADLIESMLKNLSRIHPVSTMVKGMYGIENEVFLSLPCILNARGLTSVINQKLKDDEVAQLKKSADTLWDIQKDLKDL

SEQ ID NO: 44862 - protein, 232 aa, Homo sapiens
  Payload ID: 9138
  Gene Symbol: LDHB
  Gene Name: lactate dehydrogenase B
  ENSP ID: ENSP00000379385
MATLKEKLIAPVAEEEATVPNNKITVVGVGQVGMACAISILGKSLADELALVDVLEDKLKGEMMDLQHGSLFLQTPKIVADKDYSVTANSKIVVVTAGVRQQEGESRLNLVQRNVNVFKFIIPQIVKYSPDCIIIVVSNPVDILTYVTWKLSGLPKHRVIGSGCNLDSARFRYLMAEKLGIHPSSCHGWILGEHGDSSVAVWSGVNVAGVSLQELNPEMGTDNDSENWKEVH

SEQ ID NO: 44863 - protein, 334 aa, Homo sapiens; identical to SEQ ID NO: 44861
  Payload ID: 9138
  Gene Symbol: LDHB
  Gene Name: lactate dehydrogenase B
  Uniprot ID: P07195
  ENSP ID: ENSP00000379386

SEQ ID NO: 44864 - protein, 136 aa, Homo sapiens
  Payload ID: 9138
  Gene Symbol: LDHB
  Gene Name: lactate dehydrogenase B
  ENSP ID: ENSP00000398015
MATLKEKLIAPVAEEEATVPNNKITVVGVGQVGMACAISILGKSLADELALVDVLEDKLKGEMMDLQHGSLFLQTPKIVADKDYSVTANSKIVVVTAGVRQQEGESRLNLVQRNVNVFKFIIPQIVKYSPDCIIIV

SEQ ID NO: 44865 - protein, 102 aa, Homo sapiens
  Payload ID: 9138
  Gene Symbol: LDHB
  Gene Name: lactate dehydrogenase B
  ENSP ID: ENSP00000442680
MATLKEKLIAPVAEEEATVPNNKITVVGVGQVGMACAISILGKSLADELALVDVLEDKLKGEMMDLQHGSLFLQTPKIVADKDYSVTANSKIVVVTAGVRQQ

SEQ ID NO: 44866 - protein, 332 aa, Homo sapiens
  Payload ID: 9139
  Gene Symbol: LDHC
  Gene Name: lactate dehydrogenase C
  Uniprot ID: P07864
  ENSP ID: ENSP00000280704
MSTVKEQLIEKLIEDDENSQCKITIVGTGAVGMACAISILLKDLADELALVDVALDKLKGEMMDLQHGSLFFSTSKITSGKDYSVSANSRIVIVTAGARQQEGETRLALVQRNVAIMKSIIPAIVHYSPDCKILVVSNPVDILTYIVWKISGLPVTRVIGSGCNLDSARFRYLIGEKLGVHPTSCHGWIIGEHGDSSVPLWSGVNVAGVALKTLDPKLGTDSDKEHWKNIHKQVIQSAYEIIKLKGYTSWAIGLSVMDLVGSILKNLRRVHPVSTMVKGLYGIKEELFLSIPCVLGRNGVSDVVKINLNSEEEALFKKSAETLWNIQKDLIF

SEQ ID NO: 44867 - protein, 51 aa, Homo sapiens
  Payload ID: 9139
  Gene Symbol: LDHC
  Gene Name: lactate dehydrogenase C
  ENSP ID: ENSP00000379518
MSTVKEQLIEKLIEDDENSQCKITIVGTGAVGMACAISILLKITVYLQTPE

SEQ ID NO: 44868 - protein, 332 aa, Homo sapiens; identical to SEQ ID NO: 44866
  Payload ID: 9139
  Gene Symbol: LDHC
  Gene Name: lactate dehydrogenase C
  Uniprot ID: P07864
  ENSP ID: ENSP00000437783

SEQ ID NO: 44869 - protein, 51 aa, Homo sapiens; identical to SEQ ID NO: 44867
  Payload ID: 9139
  Gene Symbol: LDHC
  Gene Name: lactate dehydrogenase C
  ENSP ID: ENSP00000438196

SEQ ID NO: 44870 - protein, 241 aa, Homo sapiens
  Payload ID: 9139
  Gene Symbol: LDHC
  Gene Name: lactate dehydrogenase C
  ENSP ID: ENSP00000439060
MSTVKEQLIEKLIEDDENSQCKITIVGTGAVGMACAISILLKDLADELALVDVALDKLKGEMMDLQHGSLFFSTSKITSGKDYSVSANSRIVIVTAGARQQEGETRLALVQRNVAIMKSIIPAIVHYSPDCKILVVSNPVDILTYIVWKISGLPVTRVIGSGCNLDSARFRYLIGEKLGVHPTSCHGWIIGEHGDSSVPLWSGVNVAGVALKTLDPKLGTDSDKEHWKNIHKQVIQRDYME

SEQ ID NO: 44871 - protein, 318 aa, Homo sapiens
  Payload ID: 9139
  Gene Symbol: LDHC
  Gene Name: lactate dehydrogenase C
  ENSP ID: ENSP00000439555
MSTVKEQLIEKLIEDDENSQCKITIVGTGAVGMACAISILLKDLADELALVDVALDKLKGEMMDLQHGSLFFSTSKITSGKAGARQQEGETRLALVQRNVAIMKSIIPAIVHYSPDCKILVVSNPVDILTYIVWKISGLPVTRVIGSGCNLDSARFRYLIGEKLGVHPTSCHGWIIGEHGDSSVPLWSGVNVAGVALKTLDPKLGTDSDKEHWKNIHKQVIQSAYEIIKLKGYTSWAIGLSVMDLVGSILKNLRRVHPVSTMVKGLYGIKEELFLSIPCVLGRNGVSDVVKINLNSEEEALFKKSAETLWNIQKDLIF

SEQ ID NO: 44872 - protein, 167 aa, Homo sapiens
  Payload ID: 9139
  Gene Symbol: LDHC
  Gene Name: lactate dehydrogenase C
  ENSP ID: ENSP00000441478
MSTVKEQLIEKLIEDDENSQCKITIVGTGAVGMACAISILLKDLADELALVDVALDKLKGEMMDLQHGSLFFSTSKITSGKDYSVSANSRIVIVTAGARQQEGETRLALVQRNVAIMKSIIPAIVHYSPDCKILVVSNPGIIWNKRRTLSQYPLCLGAEWCLRCCEN

SEQ ID NO: 44873 - protein, 45 aa, Homo sapiens
  Payload ID: 9139
  Gene Symbol: LDHC
  Gene Name: lactate dehydrogenase C
  ENSP ID: ENSP00000441991
MSTVKEQLIEKLIEDDENSQCKITIVGTGAVGMACAISILLKWIF

SEQ ID NO: 44874 - protein, 183 aa, Homo sapiens
  Payload ID: 9139
  Gene Symbol: LDHC
  Gene Name: lactate dehydrogenase C
  ENSP ID: ENSP00000443414
MSTVKEQLIEKLIEDDENSQCKITIVGTGAVGMACAISILLKDLADELALVDVALDKLKGEMMDLQHGSLFFSTSKITSGKVDILTYIVWKISGLPVTRVIGSGCNLDSARFRYLIGEKLGVHPTSCHGWIIGEHGDSSVPLWSGVNVAGVALKTLDPKLGTDSDKEHWKNIHKQVIQRDYME

SEQ ID NO: 44875 - protein, 225 aa, Homo sapiens
  Payload ID: 9139
  Gene Symbol: LDHC
  Gene Name: lactate dehydrogenase C
  ENSP ID: ENSP00000443997
MSTVKEQLIEKLIEDDENSQCKITIVGTGAVGMACAISILLKDLADELALVDVALDKLKGEMMDLQHGSLFFSTSKITSGKDYSVSANSRIVIVTAGARQQEGETRLALVQRNVAIMKSIIPAIVHYSPDCKILVVSNPVDILTYIVWKISGLPVTRVIGSGCNLDSARFRYLIGEKLGVHPTSCHGWIIGEHGDSSGIIWNKRRTLSQYPLCLGAEWCLRCCEN

SEQ ID NO: 44876 - protein, 507 aa, Homo sapiens
  Payload ID: 9140
  Gene Symbol: LDHD
  Gene Name: lactate dehydrogenase D
  Uniprot ID: Q86WU2
  ENSP ID: ENSP00000300051
MARLLRSATWELFPWRGYCSQKAKGELCRDFVEALKAVVGGSHVSTAAVVREQHGRDESVHRCEPPDAVVWPQNVEQVSRLAALCYRQGVPIIPFGTGTGLEGGVCAVQGGVCVNLTHMDRILELNQEDFSVVVEPGVTRKALNAHLRDSGLWFPVDPGADASLCGMAATGASGTNAVRYGTMRDNVLNLEVVLPDGRLLHTAGRGRHFRFGFWPEIPHHTAWYSPCVSLGRRKSAAGYNLTGLFVGSEGTLGLITATTLRLHPAPEATVAATCAFPSVQAAVDSTVHILQAAVPVARIEFLDEVMMDACNRYSKLNCLVAPTLFLEFHGSQQALEEQLQRTEEIVQQNGASDFSWAKEAEERSRLWTARHNAWYAALATRPGCKGYSTDVCVPISRLPEIVVQTKEDLNASGLTGSIVGHVGDGNFHCILLVNPDDAEELGRVKAFAEQLGRRALALHGTCTGEHGIGMGKRQLLQEEVGAVGVETMRQLKAVLDPQGLMNPGKVL

SEQ ID NO: 44877 - protein, 484 aa, Homo sapiens
  Payload ID: 9140
  Gene Symbol: LDHD
  Gene Name: lactate dehydrogenase D
  Uniprot ID: Q86WU2
  ENSP ID: ENSP00000417011
MARLLRSATWELFPWRGYCSQKAKGELCRDFVEALKAVVGGSHVSTAAVVREQHGRDESVHRCEPPDAVVWPQNVEQVSRLAALCYRQGVPIIPFGTGTGLEGGVCAVQGGVCVNLTHMDRILELNQEDFSVVVEPGVTRKALNAHLRDSGLWFPVDPGADASLCGMAATGASGTNAVRYGTMRDNVLNLEVVLPDGRLLHTAGRGRHFRKSAAGYNLTGLFVGSEGTLGLITATTLRLHPAPEATVAATCAFPSVQAAVDSTVHILQAAVPVARIEFLDEVMMDACNRYSKLNCLVAPTLFLEFHGSQQALEEQLQRTEEIVQQNGASDFSWAKEAEERSRLWTARHNAWYAALATRPGCKGYSTDVCVPISRLPEIVVQTKEDLNASGLTGSIVGHVGDGNFHCILLVNPDDAEELGRVKAFAEQLGRRALALHGTCTGEHGIGMGKRQLLQEEVGAVGVETMRQLKAVLDPQGLMNPGKVL

SEQ ID NO: 44878 - protein, 35 aa, Homo sapiens
  Payload ID: 9140
  Gene Symbol: LDHD
  Gene Name: lactate dehydrogenase D
  ENSP ID: ENSP00000454260
MARLLRSATWELFPWRGYCSQKAKVPGEKRSPLEG

SEQ ID NO: 44879 - protein, 481 aa, Homo sapiens
  Payload ID: 9141
  Gene Symbol: LACE1
  Gene Name: lactation elevated 1
  Uniprot ID: Q8WV93
  ENSP ID: ENSP00000357973
MAASWSLLVTLRPLAQSPLRGRCVGCGAWAAALAPLATAPGKPFWKAYTVQTSESMTPTATSETYLKALAVCHGPLDHYDFLIKAHELKDDEHQRRVIQCLQKLHEDLKGYNIEAEGLFSKLFSRSKPPRGLYVYGDVGTGKTMVMDMFYAYVEMKRKKRVHFHGFMLDVHKRIHRLKQSLPKRKPGFMAKSYDPIAPIAEEISEEACLLCFDEFQVTDIADAMILKQLFENLFKNGVVVVATSNRPPEDLYKNGLQRANFVPFIAVLKEYCNTVQLDSGIDYRKRELPAAGKLYYLTSEADVEAVMDKLFDELAQKQNDLTRPRILKVQGRELRLNKACGTVADCTFEELCERPLGASDYLELSKNFDTIFLRNIPQFTLANRTQGRRFITLIDNFYDLKVRIICSASTPISSLFLHQHHDSELEQSRILMDDLGLSQDSAEGLSMFTGEEEIFAFQRTISRLTEMQTEQYWNEGDRTKK

SEQ ID NO: 44880 - protein, 160 aa, Homo sapiens
  Payload ID: 9141
  Gene Symbol: LACE1
  Gene Name: lactation elevated 1
  ENSP ID: ENSP00000392085
MCATPPSLNFKKLAYTVQTSESMTPTATSETYLKALAVCHGPLDHYDFLIKAHELKDDEHQRRVIQCLQKLHEDLKGYNIEAEGLFSKLFSRSKPPRGLYVYGDVGTGKTMVMDMFYAYVEMKRKKRVHFHGFMLDVHKRIHRLKQSLPKRKPGFMAKSY

SEQ ID NO: 44881 - protein, 349 aa, Homo sapiens
  Payload ID: 9141
  Gene Symbol: LACE1
  Gene Name: lactation elevated 1
  ENSP ID: ENSP00000398225
  MOD_RES (1)..(1): Any amino acid
XKPFWKGTGKTMVMDMFYAYVEMKRKKRVHFHGFMLDVHKRIHRLKQSLPKRKPGFMAKSYDPIAPIAEEISEEACLLCFDEFQVTDIADAMILKQLFENLFKNGVVVVATSNRPPEDLYKNGLQRANFVPFIAVLKEYCNTVQLDSGIDYRKRELPAAGKLYYLTSEADVEAVMDKLFDELAQKQNDLTRPRILKVQGRELRLNKACGTVADCTFEELCERPLGASDYLELSKNFDTIFLRNIPQFTLANRTQGRRFITLIDNFYDLKVRIICSASTPISSLFLHQHHDSELEQSRILMDDLGLSQDSAEGLSMFTGEEEIFAFQRTISRLTEMQTEQYWNEGDRTKK

SEQ ID NO: 44882 - protein, 80 aa, Homo sapiens
  Payload ID: 9141
  Gene Symbol: LACE1
  Gene Name: lactation elevated 1
  ENSP ID: ENSP00000415484
  MOD_RES (1)..(1): Any amino acid
XIHRLKQSLPKRKPGFMAKSYDPIAPIAEEISEEACLLCFDEFQVTDIADAMILKQLFENLFKNGVVVVATSNRPPEGIL

SEQ ID NO: 44883 - protein, 712 aa, Homo sapiens
  Payload ID: 9142
  Gene Symbol: LPO
  Gene Name: lactoperoxidase
  Uniprot ID: P22079
  ENSP ID: ENSP00000262290
MRVLLHLPALLASLILLQAAASTTRAQTTRTSAISDTVSQAKVQVNKAFLDSRTRLKTAMSSETPTSRQLSEYLKHAKGRTRTAIRNGQVWEESLKRLRQKASLTNVTDPSLDLTSLSLEVGCGAPAPVVRCDPCSPYRTITGDCNNRRKPALGAANRALARWLPAEYEDGLSLPFGWTPGKTRNGFPLPLAREVSNKIVGYLNEEGVLDQNRSLLFMQWGQIVDHDLDFAPDTELGSSEYSKAQCDEYCIQGDNCFPIMFPPNDPKAGTQGKCMPFFRAGFVCPTPPYKSLAREQINALTSFLDASFVYSSEPSLASRLRNLSSPLGLMAVNQEVSDHGLPYLPYDSKKPSPCEFINTTARVPCFLAGDSRASEHILLATSHTLFLREHNRLARELKRLNPQWDGEKLYQEARKILGAFVQIITFRDYLPILLGDHMQKWIPPYQGYSESVDPRISNVFTFAFRFGHLEVPSSMFRLDENYQPWGPEPELPLHTLFFNTWRMVKDGGIDPLVRGLLAKKSKLMKQNKMMTGELRNKLFQPTHRIHGFDLAAINTQRCRDHGQPGYNSWRAFCDLSQPQTLEELNTVLKSKMLAKKLLGLYGTPDNIDIWIGAIAEPLVERGRVGPLLACLLGKQFQQIRDGDRFWWENPGVFTNEQKDSLQKMSFSRLVCDNTRITKVPRDPFWANSYPYDFVDCSAIDKLDLSPWASVKN

SEQ ID NO: 44884 - protein, 117 aa, Homo sapiens
  Payload ID: 9142
  Gene Symbol: LPO
  Gene Name: lactoperoxidase
  ENSP ID: ENSP00000374227
FPPNDPKAGTQGKCMPFFRAGFVCPTPPYKSLAREQINALTSFLDASFVYSSEPSLASRLRNLSSPLGLMAVNQEVSDHGLPYLPYDSKKPSPCEFINTTARVPCFLAGKETEAQKC

SEQ ID NO: 44885 - protein, 629 aa, Homo sapiens
  Payload ID: 9142
  Gene Symbol: LPO
  Gene Name: lactoperoxidase
  Uniprot ID: P22079
  ENSP ID: ENSP00000400245
MRVLLHLPALLASLILLQAAASTTRDPSLDLTSLSLEVGCGAPAPVVRCDPCSPYRTITGDCNNRRKPALGAANRALARWLPAEYEDGLSLPFGWTPGKTRNGFPLPLAREVSNKIVGYLNEEGVLDQNRSLLFMQWGQIVDHDLDFAPDTELGSSEYSKAQCDEYCIQGDNCFPIMFPPNDPKAGTQGKCMPFFRAGFVCPTPPYKSLAREQINALTSFLDASFVYSSEPSLASRLRNLSSPLGLMAVNQEVSDHGLPYLPYDSKKPSPCEFINTTARVPCFLAGDSRASEHILLATSHTLFLREHNRLARELKRLNPQWDGEKLYQEARKILGAFVQIITFRDYLPILLGDHMQKWIPPYQGYSESVDPRISNVFTFAFRFGHLEVPSSMFRLDENYQPWGPEPELPLHTLFFNTWRMVKDGGIDPLVRGLLAKKSKLMKQNKMMTGELRNKLFQPTHRIHGFDLAAINTQRCRDHGQPGYNSWRAFCDLSQPQTLEELNTVLKSKMLAKKLLGLYGTPDNIDIWIGAIAEPLVERGRVGPLLACLLGKQFQQIRDGDRFWWENPGVFTNEQKDSLQKMSFSRLVCDNTRITKVPRDPFWANSYPYDFVDCSAIDKLDLSPWASVKN

SEQ ID NO: 44886 - protein, 653 aa, Homo sapiens
  Payload ID: 9142
  Gene Symbol: LPO
  Gene Name: lactoperoxidase
  ENSP ID: ENSP00000445344
MSSETPTSRQLSEYLKHAKGRTRTAIRNGQVWEESLKRLRQKASLTNVTDPSLDLTSLSLEVGCGAPAPVVRCDPCSPYRTITGDCNNRRKPALGAANRALARWLPAEYEDGLSLPFGWTPGKTRNGFPLPLAREVSNKIVGYLNEEGVLDQNRSLLFMQWGQIVDHDLDFAPDTELGSSEYSKAQCDEYCIQGDNCFPIMFPPNDPKAGTQGKCMPFFRAGFVCPTPPYKSLAREQINALTSFLDASFVYSSEPSLASRLRNLSSPLGLMAVNQEVSDHGLPYLPYDSKKPSPCEFINTTARVPCFLAGDSRASEHILLATSHTLFLREHNRLARELKRLNPQWDGEKLYQEARKILGAFVQIITFRDYLPILLGDHMQKWIPPYQGYSESVDPRISNVFTFAFRFGHLEVPSSMFRLDENYQPWGPEPELPLHTLFFNTWRMVKDGGIDPLVRGLLAKKSKLMKQNKMMTGELRNKLFQPTHRIHGFDLAAINTQRCRDHGQPGYNSWRAFCDLSQPQTLEELNTVLKSKMLAKKLLGLYGTPDNIDIWIGAIAEPLVERGRVGPLLACLLGKQFQQIRDGDRFWWENPGVFTNEQKDSLQKMSFSRLVCDNTRITKVPRDPFWANSYPYDFVDCSAIDKLDLSPWASVKN

SEQ ID NO: 44887 - protein, 95 aa, Homo sapiens
  Payload ID: 9142
  Gene Symbol: LPO
  Gene Name: lactoperoxidase
  ENSP ID: ENSP00000462752
GCGAPAPVVRCDPCSPYRTITGDCNNRRKPALGAANRALARWLPAEYEDGLSLPFGWTPGKTRNGFPLPLAREVSNKIVGYLNEEGVLDQNRSTL

SEQ ID NO: 44888 - protein, 629 aa, Homo sapiens; identical to SEQ ID NO: 44885
  Payload ID: 9142
  Gene Symbol: LPO
  Gene Name: lactoperoxidase
  Uniprot ID: P22079
  ENSP ID: ENSP00000464636

SEQ ID NO: 44889 - protein, 123 aa, Homo sapiens
  Payload ID: 9142
  Gene Symbol: LPO
  Gene Name: lactoperoxidase
  ENSP ID: ENSP00000464643
MSSETPTSRQLSEYLKHAKGRTRTAIRNGQVWEESLKRLRQKASLTNVTDPSLDLTSLSLEVGCGAPAPVVRCDPCSPYRTITGDCNNRRKPALGAANRALARWLPAEYEDGLSLPFGWTPGK

SEQ ID NO: 44890 - protein, 710 aa, Homo sapiens
  Payload ID: 9143
  Gene Symbol: LTF
  Gene Name: lactotransferrin
  Uniprot ID: P02788
  ENSP ID: ENSP00000231751
MKLVFLVLLFLGALGLCLAGRRRSVQWCAVSQPEATKCFQWQRNMRKVRGPPVSCIKRDSPIQCIQAIAENRADAVTLDGGFIYEAGLAPYKLRPVAAEVYGTERQPRTHYYAVAVVKKGGSFQLNELQGLKSCHTGLRRTAGWNVPIGTLRPFLNWTGPPEPIEAAVARFFSASCVPGADKGQFPNLCRLCAGTGENKCAFSSQEPYFSYSGAFKCLRDGAGDVAFIRESTVFEDLSDEAERDEYELLCPDNTRKPVDKFKDCHLARVPSHAVVARSVNGKEDAIWNLLRQAQEKFGKDKSPKFQLFGSPSGQKDLLFKDSAIGFSRVPPRIDSGLYLGSGYFTAIQNLRKSEEEVAARRARVVWCAVGEQELRKCNQWSGLSEGSVTCSSASTTEDCIALVLKGEADAMSLDGGYVYTAGKCGLVPVLAENYKSQQSSDPDPNCVDRPVEGYLAVAVVRRSDTSLTWNSVKGKKSCHTAVDRTAGWNIPMGLLFNQTGSCKFDEYFSQSCAPGSDPRSNLCALCIGDEQGENKCVPNSNERYYGYTGAFRCLAENAGDVAFVKDVTVLQNTDGNNNEAWAKDLKLADFALLCLDGKRKPVTEARSCHLAMAPNHAVVSRMDKVERLKQVLLHQQAKFGRNGSDCPDKFCLFQSETKNLLFNDNTECLARLHGKTTYEKYLGPQYVAGITNLKKCSTSPLLEACEFLRK

SEQ ID NO: 44891 - protein, 182 aa, Homo sapiens
  Payload ID: 9143
  Gene Symbol: LTF
  Gene Name: lactotransferrin
  ENSP ID: ENSP00000395234
MKLVFLVLLFLGALGFLWMPFIRQPGLCLAGRRRSVQWCAVSQPEATKCFQWQRNMRKVRGPPVSCIKRDSPIQCIQAIAENRADAVTLDGGFIYEAGLAPYKLRPVAAEVYGTERQPRTHYYAVAVVKKGGSFQLNELQGLKSCHTGLRRTAGWNVPIGTLRPFLNWTGPPEPIEAAVARF

SEQ ID NO: 44892 - protein, 696 aa, Homo sapiens
  Payload ID: 9143
  Gene Symbol: LTF
  Gene Name: lactotransferrin
  ENSP ID: ENSP00000397427
MGLCLAGRRRSVQWCAVSQPEATKCFQWQRNMRKVRGPPVSCIKRDSPIQCIQAIAENRADAVTLDGGFIYEAGLAPYKLRPVAAEVYGTERQPRTHYYAVAVVKKGGSFQLNELQGLKSCHTGLRRTAGWNVPIGTLRPFLNWTGPPEPIEAAVARFFSASCVPGADKGQFPNLCRLCAGTGENKCAFSSQEPYFSYSGAFKCLRDGAGDVAFIRESTVFEDLSDEAERDEYELLCPDNTRKPVDKFKDCHLARVPSHAVVARSVNGKEDAIWNLLRQAQEKFGKDKSPKFQLFGSPSGQKDLLFKDSAIGFSRVPPRIDSGLYLGSGYFTAIQNLRKSEEEVAARRARVVWCAVGEQELRKCNQWSGLSEGSVTCSSASTTEDCIALVLKGEADAMSLDGGYVYTAGKCGLVPVLAENYKSQQSSDPDPNCVDRPVEGYLAVAVVRRSDTSLTWNSVKGKKSCHTAVDRTAGWNIPMGLLFNQTGSCKFDEYFSQSCAPGSDPRSNLCALCIGDEQGENKCVPNSNERYYGYTGAFRCLAENAGDVAFVKDVTVLQNTDGNNNEAWAKDLKLADFALLCLDGKRKPVTEARSCHLAMAPNHAVVSRMDKVERLKQVLLHQQAKFGRNGSDCPDKFCLFQSETKNLLFNDNTECLARLHGKTTYEKYLGPQYVAGITNLKKCSTSPLLEACEFLR

SEQ ID NO: 44893 - protein, 708 aa, Homo sapiens
  Payload ID: 9143
  Gene Symbol: LTF
  Gene Name: lactotransferrin
  ENSP ID: ENSP00000405546
MKLVFLVLLFLGALGLCLAGRRRSVQWCAVSQPEATKCFQWQRNMRKVRGPPVSCIKRDSPIQCIQAIAENRADAVTLDGGFIYEAGLAPYKLRPVAAEVYGTERQPRTHYYAVAVVKKGGSFQLNELQGLKSCHTGLRRTAGWNVPIGTLRPFLNWTGPPEPIEAAVARFFSASCVPGADKGQFPNLCRLCAGTGENKCAFSSQEPYFSYSGAFKCLRDGAGDVAFIRESTVFEDLSDEAERDEYELLCPDNTRKPVDKFKDCHLARVPSHAVVARSVNGKEDAIWNLLRQAQEKFGKDKSPKFQLFGSPSGQKDLLFKDSAIGFSRVPPRIDSGLYLGSGYFTAIQNLRKSEEEVAARRARVVWCAVGEQELRKCNQWSGLSEGSVTCSSASTTEDCIALKGEADAMSLDGGYVYTAGKCGLVPVLAENYKSQQSSDPDPNCVDRPVEGYLAVAVVRRSDTSLTWNSVKGKKSCHTAVDRTAGWNIPMGLLFNQTGSCKFDEYFSQSCAPGSDPRSNLCALCIGDEQGENKCVPNSNERYYGYTGAFRCLAENAGDVAFVKDVTVLQNTDGNNNEAWAKDLKLADFALLCLDGKRKPVTEARSCHLAMAPNHAVVSRMDKVERLKQVLLHQQAKFGRNGSDCPDKFCLFQSETKNLLFNDNTECLARLHGKTTYEKYLGPQYVAGITNLKKCSTSPLLEACEFLRK

SEQ ID NO: 44894 - protein, 666 aa, Homo sapiens
  Payload ID: 9143
  Gene Symbol: LTF
  Gene Name: lactotransferrin
  Uniprot ID: P02788
  ENSP ID: ENSP00000405719
MRKVRGPPVSCIKRDSPIQCIQAIAENRADAVTLDGGFIYEAGLAPYKLRPVAAEVYGTERQPRTHYYAVAVVKKGGSFQLNELQGLKSCHTGLRRTAGWNVPIGTLRPFLNWTGPPEPIEAAVARFFSASCVPGADKGQFPNLCRLCAGTGENKCAFSSQEPYFSYSGAFKCLRDGAGDVAFIRESTVFEDLSDEAERDEYELLCPDNTRKPVDKFKDCHLARVPSHAVVARSVNGKEDAIWNLLRQAQEKFGKDKSPKFQLFGSPSGQKDLLFKDSAIGFSRVPPRIDSGLYLGSGYFTAIQNLRKSEEEVAARRARVVWCAVGEQELRKCNQWSGLSEGSVTCSSASTTEDCIALVLKGEADAMSLDGGYVYTAGKCGLVPVLAENYKSQQSSDPDPNCVDRPVEGYLAVAVVRRSDTSLTWNSVKGKKSCHTAVDRTAGWNIPMGLLFNQTGSCKFDEYFSQSCAPGSDPRSNLCALCIGDEQGENKCVPNSNERYYGYTGAFRCLAENAGDVAFVKDVTVLQNTDGNNNEAWAKDLKLADFALLCLDGKRKPVTEARSCHLAMAPNHAVVSRMDKVERLKQVLLHQQAKFGRNGSDCPDKFCLFQSETKNLLFNDNTECLARLHGKTTYEKYLGPQYVAGITNLKKCSTSPLLEACEFLRK

SEQ ID NO: 44895 - protein, 531 aa, Homo sapiens
  Payload ID: 9144
  Gene Symbol: LAD1
  Gene Name: ladinin 1
  ENSP ID: ENSP00000356282
MRLCLGRPHPRGHSRVGKSERGRGARGLARQRTLEDEEEQERERRRRHRNLSSTTDDEAPRLSQNGDRQASASERLPSVEEAEVPKPLPPASKDEDEDIQSILRTRQERRQRRQVVEAAQAPIQERLEAEEGRNSLSPVQATQKPLVSKKELEIPPRRRLSREQRGPWALEEESLVGREPEERKKGVPEKSPVLEKSSMPKKTAPEKSLVSDKTSISEKVLASEKTSLSEKIAVSEKRNSSEKKSVLEKTSVSEKSLAPGMALGSGRRLVSEKASIFEKALASEKSPTADAKPAPKRATASEQPLAQEPPASGGSPATTKEQRGRALPGKNLPSLAKQGASDPPTVASRLPPVTLQVKIPSKEEEADMSSPTQRTYSSSLKRSSPRTISFRMKPKKENSETTLTRSASMKLPDNTVKLGEKLERYHTAIRRSESVKSRGLPCTELFVAPVGVASKRHLFEKELAGQSRAEPASSRKENLRLSGVVTSRLNLWISRTQESGDQDPQEAQKASSATERTQWGQKSDSSLDAEV

SEQ ID NO: 44896 - protein, 517 aa, Homo sapiens
  Payload ID: 9144
  Gene Symbol: LAD1
  Gene Name: ladinin 1
  Uniprot ID: O00515
  ENSP ID: ENSP00000375829
MAVSRKDWSALSSLARQRTLEDEEEQERERRRRHRNLSSTTDDEAPRLSQNGDRQASASERLPSVEEAEVPKPLPPASKDEDEDIQSILRTRQERRQRRQVVEAAQAPIQERLEAEEGRNSLSPVQATQKPLVSKKELEIPPRRRLSREQRGPWALEEESLVGREPEERKKGVPEKSPVLEKSSMPKKTAPEKSLVSDKTSISEKVLASEKTSLSEKIAVSEKRNSSEKKSVLEKTSVSEKSLAPGMALGSGRRLVSEKASIFEKALASEKSPTADAKPAPKRATASEQPLAQEPPASGGSPATTKEQRGRALPGKNLPSLAKQGASDPPTVASRLPPVTLQVKIPSKEEEADMSSPTQRTYSSSLKRSSPRTISFRMKPKKENSETTLTRSASMKLPDNTVKLGEKLERYHTAIRRSESVKSRGLPCTELFVAPVGVASKRHLFEKELAGQSRAEPASSRKENLRLSGVVTSRLNLWISRTQESGDQDPQEAQKASSATERTQWGQKSDSSLDAEV

SEQ ID NO: 44897 - protein, 192 aa, Homo sapiens
  Payload ID: 9144
  Gene Symbol: LAD1
  Gene Name: ladinin 1
  ENSP ID: ENSP00000422687
EEADMSSPTQRTYSSSLKRSSPRTISFRMKPKKENSETTLTRSASMKLPDNTVKLGEKLERYHTAIRRSESVKSRGLPCTELFVAPVGVASKRHLFEKELAGQSRAEPASSRKENLRLSGVVTSRLNLWISRTQESGDQDPQEAQKASSATERTQWGQKSDSSLDAESPLRLSRRLQDLSAAAVLRESRDHV

SEQ ID NO: 44898 - protein, 178 aa, Homo sapiens
  Payload ID: 9144
  Gene Symbol: LAD1
  Gene Name: ladinin 1
  ENSP ID: ENSP00000487726
MAQLFPRSSFHLKGEGGSKSPWEVKGRRYWSFFHGLARQRTLEDEEEQERERRRRHRNLSSTTDDEAPRLSQNGDRQASASERLPSVEEAEVPKPLPPASKDEDEDIQSILRTRQERRQRRQVVEAAQAPIQERLEAEEGRNSLSPVQATQKPLVSKKELEIPPRRRLSREQRGPWAL

SEQ ID NO: 44899 - protein, 188 aa, Homo sapiens
  Payload ID: 9144
  Gene Symbol: LAD1
  Gene Name: ladinin 1
  ENSP ID: ENSP00000487828
SHPDEAPGTEDRSRSAPWVNKPQRAGRKGLLARQRTLEDEEEQERERRRRHRNLSSTTDDEAPRLSQNGDRQASASERLPSVEEAEVPKPLPPASKDEDEDIQSILRTRQERRQRRQVVEAAQAPIQERLEAEEGRNSLSPVQATQKPLVSKKELEIPPRRRLSREQRGPWALEEESLVGREPEERKK

SEQ ID NO: 44900 - protein, 183 aa, Homo sapiens
  Payload ID: 9144
  Gene Symbol: LAD1
  Gene Name: ladinin 1
  ENSP ID: ENSP00000488829
IHLSEAYWDGGPGLARQRTLEDEEEQERERRRRHRNLSSTTDDEAPRLSQNGDRQASASERLPSVEEAEVPKPLPPASKDEDEDIQSILRTRQERRQRRQVVEAAQAPIQERLEAEEGRNSLSPVQATQKPLVSKKELEIPPRRRLSREQRGPWALEEESLVGREPEERKKGVPEKSPVLEKS

SEQ ID NO: 44901 - protein, 281 aa, Homo sapiens
  Payload ID: 9145
  Gene Symbol: LBX1
  Gene Name: ladybird homeobox 1
  Uniprot ID: P52954
  ENSP ID: ENSP00000359212
MTSKEDGKAAPGEERRRSPLDHLPPPANSNKPLTPFSIEDILNKPSVRRSYSLCGAAHLLAAADKHAQGGLPLAGRALLSQTSPLCALEELASKTFKGLEVSVLQAAEGRDGMTIFGQRQTPKKRRKSRTAFTNHQIYELEKRFLYQKYLSPADRDQIAQQLGLTNAQVITWFQNRRAKLKRDLEEMKADVESAKKLGPSGQMDIVALAELEQNSEATAGGGGGCGRAKSRPGSPVLPPGAPKAPGAGALQLSPASPLTDQPASSQDCSEDEEDEEIDVDD

SEQ ID NO: 44902 - protein, 198 aa, Homo sapiens
  Payload ID: 9146
  Gene Symbol: LBX2
  Gene Name: ladybird homeobox 2
  Uniprot ID: Q6XYB7
  ENSP ID: ENSP00000366789
MNSGREPRTPRTLLSIADILAPRMVPRAPSAPQLPESGPGPTSPLCALEELTSKTFRGLDARALQPSEGRAGPDALGPGPFGRKRRKSRTAFTAQQVLELERRFVFQKYLAPSERDGLATRLGLANAQVVTWFQNRRAKLKRDVEEMRADVASLRALSPEVLCSLALPEGAPDPGLCLGPAGPDSRPHLSDEEIQVDD

SEQ ID NO: 44903 - protein, 194 aa, Homo sapiens
  Payload ID: 9146
  Gene Symbol: LBX2
  Gene Name: ladybird homeobox 2
  Uniprot ID: Q6XYB7
  ENSP ID: ENSP00000417116
MGKRTSLEVSLGELGGEKCRGGRRSFPPLAASRPARPGGWRWARRDLCKTASRAENNSQACRPQRRAGPDALGPGPFGRKRRKSRTAFTAQQVLELERRFVFQKYLAPSERDGLATRLGLANAQVVTWFQNRRAKLKRDVEEMRADVASLRALSPEVLCSLALPEGAPDPGLCLGPAGPDSRPHLSDEEIQVDD

SEQ ID NO: 44904 - protein, 57 aa, Homo sapiens
  Payload ID: 9146
  Gene Symbol: LBX2
  Gene Name: ladybird homeobox 2
  ENSP ID: ENSP00000450229
MGKRTSLEGGQVRTRWALVPSAANGASHALRSPRNRCWSWSGASSSRSTWRRPSETG

SEQ ID NO: 44905 - protein, 990 aa, Homo sapiens
  Payload ID: 9147
  Gene Symbol: LVRN
  Gene Name: laeverin
  Uniprot ID: Q6Q4G3
  ENSP ID: ENSP00000350541
MGPPSSSGFYVSRAVALLLAGLVAALLLALAVLAALYGHCERVPPSELPGLRDLEAESSPPLRQKPTPTPKPSSARELAVTTTPSNWRPPGPWDQLRLPPWLVPLHYDLELWPQLRPDELPAGSLPFTGRVNITVRCTVATSRLLLHSLFQDCERAEVRGPLSPGTGNATVGRVPVDDVWFALDTEYMVLELSEPLKPGSSYELQLSFSGLVKEDLREGLFLNVYTDQGERRALLASQLEPTFARYVFPCFDEPALKATFNITMIHHPSYVALSNMPKLGQSEKEDVNGSKWTVTTFSTTPHMPTYLVAFVICDYDHVNRTERGKEIRIWARKDAIANGSADFALNITGPIFSFLEDLFNISYSLPKTDIIALPSFDNHAMENWGLMIFDESGLLLEPKDQLTEKKTLISYVVSHEIGHQWFGNLVTMNWWNNIWLNEGFASYFEFEVINYFNPKLPRNEIFFSNILHNILREDHALVTRAVAMKVENFKTSEIQELFDIFTYSKGASMARMLSCFLNEHLFVSALKSYLKTFSYSNAEQDDLWRHFQMAIDDQSTVILPATIKNIMDSWTHQSGFPVITLNVSTGVMKQEPFYLENIKNRTLLTSNDTWIVPILWIKNGTTQPLVWLDQSSKVFPEMQVSDSDHDWVILNLNMTGYYRVNYDKLGWKKLNQQLEKDPKAIPVIHRLQLIDDAFSLSKNNYIEIETALELTKYLAEEDEIIVWHTVLVNLVTRDLVSEVNIYDIYSLLKRYLLKRLNLIWNIYSTIIRENVLALQDDYLALISLEKLFVTACWLGLEDCLQLSKELFAKWVDHPENEIPYPIKDVVLCYGIALGSDKEWDILLNTYTNTTNKEEKIQLAYAMSCSKDPWILNRYMEYAISTSPFTSNETNIIEVVASSEVGRYVAKDFLVNNWQAVSKRYGTQSLINLIYTIGRTVTTDLQIVELQQFFSNMLEEHQRIRVHANLQTIKNENLKNKKLSARIAAWLRRNT

SEQ ID NO: 44906 - protein, 978 aa, Homo sapiens
  Payload ID: 9147
  Gene Symbol: LVRN
  Gene Name: laeverin
  ENSP ID: ENSP00000378899
MGPPSSSGFYVSRAVALLLAGLVAALLLALAVLAALYGHCERVPPSELPGLRDLEAESSPPLRQKPTPTPKPSSARELAVTTTPSNWRPPGPWDQLRLPPWLVPLHYDLELWPQLRPDELPAGSLPFTGRVNITVRCTVATSRLLLHSLFQDCERAEVRGPLSPDDVWFALDTEYMVLELSEPLKPGSSYELQLSFSGLVKEDLREGLFLNVYTDQGERRALLASQLEPTFARYVFPCFDEPALKATFNITMIHHPSYVALSNMPKLGQSEKEDVNGSKWTVTTFSTTPHMPTYLVAFVICDYDHVNRTERGKEIRIWARKDAIANGSADFALNITGPIFSFLEDLFNISYSLPKTDIIALPSFDNHAMENWGLMIFDESGLLLEPKDQLTEKKTLISYVVSHEIGHQWFGNLVTMNWWNNIWLNEGFASYFEFEVINYFNPKLPRNEIFFSNILHNILREDHALVTRAVAMKVENFKTSEIQELFDIFTYSKGASMARMLSCFLNEHLFVSALKSYLKTFSYSNAEQDDLWRHFQMAIDDQSTVILPATIKNIMDSWTHQSGFPVITLNVSTGVMKQEPFYLENIKNRTLLTSNDTWIVPILWIKNGTTQPLVWLDQSSKVFPEMQVSDSDHDWVILNLNMTGYYRVNYDKLGWKKLNQQLEKDPKAIPVIHRLQLIDDAFSLSKNNYIEIETALELTKYLAEEDEIIVWHTVLVNLVTRDLVSEVNIYDIYSLLKRYLLKRLNLIWNIYSTIIRENVLALQDDYLALISLEKLFVTACWLGLEDCLQLSKELFAKWVDHPENEIPYPIKDVVLCYGIALGSDKEWDILLNTYTNTTNKEEKIQLAYAMSCSKDPWILNRYMEYAISTSPFTSNETNIIEVVASSEVGRYVAKDFLVNNWQAVSKRYGTQSLINLIYTIGRTVTTDLQIVELQQFFSNMLEEHQRIRVHANLQTIKNENLKNKKLSARIAAWLRRNT

SEQ ID NO: 44907 - protein, 701 aa, Homo sapiens
  Payload ID: 9147
  Gene Symbol: LVRN
  Gene Name: laeverin
  Uniprot ID: Q6Q4G3
  ENSP ID: ENSP00000423604
MGPPSSSGFYVSRAVALLLAGLVAALLLALAVLAALYGHCERVPPSELPGLRDLEAESSPPLRQKPTPTPKPSSARELAVTTTPSNWRPPGPWDQLRLPPWLVPLHYDLELWPQLRPDELPAGSLPFTGRVNITVRCTVATSRLLLHSLFQDCERAEVRGPLSPGTGNATVGRVPVDDVWFALDTEYMVLELSEPLKPGSSYELQLSFSGLVKEDLREGLFLNVYTDQGERRALLASQLEPTFARYVFPCFDEPALKATFNITMIHHPSYVALSNMPKLGQSEKEDVNGSKWTVTTFSTTPHMPTYLVAFVICDYDHVNRTERGKEIRIWARKDAIANGSADFALNITGPIFSFLEDLFNISYSLPKTDIIALPSFDNHAMENWGLMIFDESGLLLEPKDQLTEKKTLISYVVSHEIGHQWFGNLVTMNWWNNIWLNEGFASYFEFEVINYFNPKLPRNEIFFSNILHNILREDHALVTRAVAMKVENFKTSEIQELFDIFTYSKGASMARMLSCFLNEHLFVSALKSYLKTFSYSNAEQDDLWRHFQMAIDDQSTVILPATIKNIMDSWTHQSGFPVITLNVSTGVMKQEPFYLENIKNRTLLTSNDTWIVPILWIKNGTTQPLVWLDQSSKVFPEMQVSDSDHDWVILNLNMTGYYRVNYDKLGWKKLNQQLEKDPKAIPVIHRLQLIDDAFSLSKGTY

SEQ ID NO: 44908 - protein, 198 aa, Homo sapiens
  Payload ID: 9147
  Gene Symbol: LVRN
  Gene Name: laeverin
  Uniprot ID: Q6Q4G3
  ENSP ID: ENSP00000427418
MKVENFKTSEIQELFDIFTYSKGASMARMLSCFLNEHLFVSALKSYLKTFSYSNAEQDDLWRHFQMAIDDQSTVILPATIKNIMDSWTHQSGFPVITLNVSTGVMKQEPFYLENIKNRTLLTSNDTWIVPILWIKNGTTQPLVWLDQSSKVFPEMQVSDSDHDWVILNLNMTGYYRVNYDKLGWKKLNQQLEKDPKMR

SEQ ID NO: 44909 - protein, 198 aa, Homo sapiens; identical to SEQ ID NO: 44908
  Payload ID: 9147
  Gene Symbol: LVRN
  Gene Name: laeverin
  Uniprot ID: Q6Q4G3
  ENSP ID: ENSP00000427500

SEQ ID NO: 44910 - protein, 226 aa, Homo sapiens
  Payload ID: 9147
  Gene Symbol: LVRN
  Gene Name: laeverin
  Uniprot ID: Q6Q4G3
  ENSP ID: ENSP00000427574
MKVENFKTSEIQELFDIFTYSKGASMARMLSCFLNEHLFVSALKSYLKTFSYSNAEQDDLWRHFQMAIDDQSTVILPATIKNIMDSWTHQSGFPVITLNVSTGVMKQEPFYLENIKNRTLLTSNDTWIVPILWIKNGTTQPLVWLDQSSKVFPEMQVSDSDHDWVILNLNMTGYYRVNYDKLGWKKLNQQLEKDPKAIPVIHRLQLIDDAFSLSNLQDFGHLKVPN

SEQ ID NO: 44911 - protein, 634 aa, Homo sapiens
  Payload ID: 9148
  Gene Symbol: LMNA
  Gene Name: lamin A/C
  Uniprot ID: P02545
  ENSP ID: ENSP00000292304
METPSQRRATRSGAQASSTPLSPTRITRLQEKEDLQELNDRLAVYIDRVRSLETENAGLRLRITESEEVVSREVSGIKAAYEAELGDARKTLDSVAKERARLQLELSKVREEFKELKARNTKKEGDLIAAQARLKDLEALLNSKEAALSTALSEKRTLEGELHDLRGQVAKLEAALGEAKKQLQDEMLRRVDAENRLQTMKEELDFQKNIYSEELRETKRRHETRLVEIDNGKQREFESRLADALQELRAQHEDQVEQYKKELEKTYSAKLDNARQSAERNSNLVGAAHEELQQSRIRIDSLSAQLSQLQKQLAAKEAKLRDLEDSLARERDTSRRLLAEKEREMAEMRARMQQQLDEYQELLDIKLALDMEIHAYRKLLEGEEERLRLSPSPTSQRSRGRASSHSSQTQGGGSVTKKRKLESTESRSSFSQHARTSGRVAVEEVDEEGKFVRLRNKSNEDQSMGNWQIKRQNGDDPLLTYRFPPKFTLKAGQVVTIWAAGAGATHSPPTDLVWKAQNTWGCGNSLRTALINSTGEGSHCSSSGDPAEYNLRSRTVLCGTCGQPADKASASGSGAQVGGPISSGSSASSVTVTRSYRSVGGSGGGSFGDNLVTRSYLLGNSSPRTQSPQNCSIM

SEQ ID NO: 44912 - protein, 487 aa, Homo sapiens
  Payload ID: 9148
  Gene Symbol: LMNA
  Gene Name: lamin A/C
  ENSP ID: ENSP00000355292
METPSQRRATRSGAQASSTPLSPTRITRLQEKEDLQELNDRLAVYIDRVRSLETENAGLRLRITESEEVVSREVSGIKAAYEAELGDARKTLDSVAKERARLQLELSKVREEFKELKARNTKKEGDLIAAQARLKDLEALLNSKEAALSTALSEKRTLEGELHDLRGQVAKLEAALGEAKKQLQDEMLRRVDAENRLQTMKEELDFQKNIYSEELRETKRRHETRLVEIDNGKQREFESRLADALQELRAQHEDQVEQYKKELEKTYSAKLDNARQSAERNSNLVGAAHEELQQSRIRIDSLSAQLSQLQKQLAAKEAKLRDLEDSLARERDTSRRLLAEKEREMAEMRARMQQQLDEYQELLDIKLALDMEIHAYRKLLEGEEERLRLSPSPTSQRSRGRASSHSSQTQGGGSVTKKRKLESTESRSSFSQHARTSGNSLRTALINSTGEEVAMRKLVRSVTVVEDDEDEDGDDLLHHHHVSGSRR

SEQ ID NO: 44913 - protein, 491 aa, Homo sapiens
  Payload ID: 9148
  Gene Symbol: LMNA
  Gene Name: lamin A/C
  ENSP ID: ENSP00000357280
MQPLLCLGNLEDARERTGTLLAQHPAWGRTRAKPGSPLNTKKEGDLIAAQARLKDLEALLNSKEAALSTALSEKRTLEGELHDLRGQVAKLEAALGEAKKQLQDEMLRRVDAENRLQTMKEELDFQKNIYSEELRETKRRHETRLVEIDNGKQREFESRLADALQELRAQHEDQVEQYKKELEKTYSAKLDNARQSAERNSNLVGAAHEELQQSRIRIDSLSAQLSQLQKQLAAKEAKLRDLEDSLARERDTSRRLLAEKEREMAEMRARMQQQLDEYQELLDIKLALDMEIHAYRKLLEGEEERLRLSPSPTSQRSRGRASSHSSQTQGGGSVTKKRKLESTESRSSFSQHARTSGRVAVEEVDEEGKFVRLRNKSNEDQSMGNWQIKRQNGDDPLLTYRFPPKFTLKAGQVVTIWAAGAGATHSPPTDLVWKAQNTWGCGNSLRTALINSTGEEVAMRKLVRSVTVVEDDEDEDGDDLLHHHHVSGSRR

SEQ ID NO: 44914 - protein, 614 aa, Homo sapiens
  Payload ID: 9148
  Gene Symbol: LMNA
  Gene Name: lamin A/C
  Uniprot ID: P02545
  ENSP ID: ENSP00000357282
METPSQRRATRSGAQASSTPLSPTRITRLQEKEDLQELNDRLAVYIDRVRSLETENAGLRLRITESEEVVSREVSGIKAAYEAELGDARKTLDSVAKERARLQLELSKVREEFKELKARNTKKEGDLIAAQARLKDLEALLNSKEAALSTALSEKRTLEGELHDLRGQVAKLEAALGEAKKQLQDEMLRRVDAENRLQTMKEELDFQKNIYSEELRETKRRHETRLVEIDNGKQREFESRLADALQELRAQHEDQVEQYKKELEKTYSAKLDNARQSAERNSNLVGAAHEELQQSRIRIDSLSAQLSQLQKQLAAKEAKLRDLEDSLARERDTSRRLLAEKEREMAEMRARMQQQLDEYQELLDIKLALDMEIHAYRKLLEGEEERLRLSPSPTSQRSRGRASSHSSQTQGGGSVTKKRKLESTESRSSFSQHARTSGRVAVEEVDEEGKFVRLRNKSNEDQSMGNWQIKRQNGDDPLLTYRFPPKFTLKAGQVVTIWAAGAGATHSPPTDLVWKAQNTWGCGNSLRTALINSTGEEVAMRKLVRSVTVVEDDEDEDGDDLLHHHHGSHCSSSGDPAEYNLRSRTVLCGTCGQPADKASASGSGAQSPQNCSIM

SEQ ID NO: 44915 - protein, 664 aa, Homo sapiens
  Payload ID: 9148
  Gene Symbol: LMNA
  Gene Name: lamin A/C
  Uniprot ID: P02545
  ENSP ID: ENSP00000357283
METPSQRRATRSGAQASSTPLSPTRITRLQEKEDLQELNDRLAVYIDRVRSLETENAGLRLRITESEEVVSREVSGIKAAYEAELGDARKTLDSVAKERARLQLELSKVREEFKELKARNTKKEGDLIAAQARLKDLEALLNSKEAALSTALSEKRTLEGELHDLRGQVAKLEAALGEAKKQLQDEMLRRVDAENRLQTMKEELDFQKNIYSEELRETKRRHETRLVEIDNGKQREFESRLADALQELRAQHEDQVEQYKKELEKTYSAKLDNARQSAERNSNLVGAAHEELQQSRIRIDSLSAQLSQLQKQLAAKEAKLRDLEDSLARERDTSRRLLAEKEREMAEMRARMQQQLDEYQELLDIKLALDMEIHAYRKLLEGEEERLRLSPSPTSQRSRGRASSHSSQTQGGGSVTKKRKLESTESRSSFSQHARTSGRVAVEEVDEEGKFVRLRNKSNEDQSMGNWQIKRQNGDDPLLTYRFPPKFTLKAGQVVTIWAAGAGATHSPPTDLVWKAQNTWGCGNSLRTALINSTGEEVAMRKLVRSVTVVEDDEDEDGDDLLHHHHGSHCSSSGDPAEYNLRSRTVLCGTCGQPADKASASGSGAQVGGPISSGSSASSVTVTRSYRSVGGSGGGSFGDNLVTRSYLLGNSSPRTQSPQNCSIM

SEQ ID NO: 44916 - protein, 572 aa, Homo sapiens
  Payload ID: 9148
  Gene Symbol: LMNA
  Gene Name: lamin A/C
  Uniprot ID: P02545
  ENSP ID: ENSP00000357284
METPSQRRATRSGAQASSTPLSPTRITRLQEKEDLQELNDRLAVYIDRVRSLETENAGLRLRITESEEVVSREVSGIKAAYEAELGDARKTLDSVAKERARLQLELSKVREEFKELKARNTKKEGDLIAAQARLKDLEALLNSKEAALSTALSEKRTLEGELHDLRGQVAKLEAALGEAKKQLQDEMLRRVDAENRLQTMKEELDFQKNIYSEELRETKRRHETRLVEIDNGKQREFESRLADALQELRAQHEDQVEQYKKELEKTYSAKLDNARQSAERNSNLVGAAHEELQQSRIRIDSLSAQLSQLQKQLAAKEAKLRDLEDSLARERDTSRRLLAEKEREMAEMRARMQQQLDEYQELLDIKLALDMEIHAYRKLLEGEEERLRLSPSPTSQRSRGRASSHSSQTQGGGSVTKKRKLESTESRSSFSQHARTSGRVAVEEVDEEGKFVRLRNKSNEDQSMGNWQIKRQNGDDPLLTYRFPPKFTLKAGQVVTIWAAGAGATHSPPTDLVWKAQNTWGCGNSLRTALINSTGEEVAMRKLVRSVTVVEDDEDEDGDDLLHHHHVSGSRR

SEQ ID NO: 44917 - protein, 574 aa, Homo sapiens
  Payload ID: 9148
  Gene Symbol: LMNA
  Gene Name: lamin A/C
  Uniprot ID: P02545
  ENSP ID: ENSP00000395597
MGNSEGCNTKKEGDLIAAQARLKDLEALLNSKEAALSTALSEKRTLEGELHDLRGQVAKLEAALGEAKKQLQDEMLRRVDAENRLQTMKEELDFQKNIYSEELRETKRRHETRLVEIDNGKQREFESRLADALQELRAQHEDQVEQYKKELEKTYSAKLDNARQSAERNSNLVGAAHEELQQSRIRIDSLSAQLSQLQKQLAAKEAKLRDLEDSLARERDTSRRLLAEKEREMAEMRARMQQQLDEYQELLDIKLALDMEIHAYRKLLEGEEERLRLSPSPTSQRSRGRASSHSSQTQGGGSVTKKRKLESTESRSSFSQHARTSGRVAVEEVDEEGKFVRLRNKSNEDQSMGNWQIKRQNGDDPLLTYRFPPKFTLKAGQVVTIWAAGAGATHSPPTDLVWKAQNTWGCGNSLRTALINSTGEEVAMRKLVRSVTVVEDDEDEDGDDLLHHHHGSHCSSSGDPAEYNLRSRTVLCGTCGQPADKASASGSGAQVGGPISSGSSASSVTVTRSYRSVGGSGGGSFGDNLVTRSYLLGNSSPRTQSPQNCSIIQEMGMRWEVEEGRRKVSLSCLP

SEQ ID NO: 44918 - protein, 565 aa, Homo sapiens
  Payload ID: 9148
  Gene Symbol: LMNA
  Gene Name: lamin A/C
  Uniprot ID: P02545
  ENSP ID: ENSP00000421821
MDLEAWDPHLEPDAEAMVDGNTKKEGDLIAAQARLKDLEALLNSKEAALSTALSEKRTLEGELHDLRGQVAKLEAALGEAKKQLQDEMLRRVDAENRLQTMKEELDFQKNIYSEELRETKRRHETRLVEIDNGKQREFESRLADALQELRAQHEDQVEQYKKELEKTYSAKLDNARQSAERNSNLVGAAHEELQQSRIRIDSLSAQLSQLQKQLAAKEAKLRDLEDSLARERDTSRRLLAEKEREMAEMRARMQQQLDEYQELLDIKLALDMEIHAYRKLLEGEEERLRLSPSPTSQRSRGRASSHSSQTQGGGSVTKKRKLESTESRSSFSQHARTSGRVAVEEVDEEGKFVRLRNKSNEDQSMGNWQIKRQNGDDPLLTYRFPPKFTLKAGQVVTIWAAGAGATHSPPTDLVWKAQNTWGCGNSLRTALINSTGEEVAMRKLVRSVTVVEDDEDEDGDDLLHHHHGSHCSSSGDPAEYNLRSRTVLCGTCGQPADKASASGSGAQVGGPISSGSSASSVTVTRSYRSVGGSGGGSFGDNLVTRSYLLGNSSPRTQSPQNCSIM

SEQ ID NO: 44919 - protein, 38 aa, Homo sapiens
  Payload ID: 9148
  Gene Symbol: LMNA
  Gene Name: lamin A/C
  ENSP ID: ENSP00000424518
MQPLLCLGNLEDARERTGTLLAQHPAWGRTRAKPGSPL

SEQ ID NO: 44920 - protein, 260 aa, Homo sapiens
  Payload ID: 9148
  Gene Symbol: LMNA
  Gene Name: lamin A/C
  ENSP ID: ENSP00000424977
AYRKLLEGEEERLRLSPSPTSQRSRGRASSHSSQTQGGGSVTKKRKLESTESRSSFSQHARTSGRVAVEEVDEEGKFVRLRNKSNEDQSMGNWQIKRQNGDDPLLTYRFPPKFTLKAGQVVTIWAAGAGATHSPPTDLVWKAQNTWGCGNSLRTALINSTGEGSHCSSSGDPAEYNLRSRTVLCGTCGQPADKASASGSGAQVGGPISSGSSASSVTVTRSYRSVGGSGGGSFGDNLVTRSYLLGNSSPRTQSPQNCSIM

SEQ ID NO: 44921 - protein, 182 aa, Homo sapiens
  Payload ID: 9148
  Gene Symbol: LMNA
  Gene Name: lamin A/C
  ENSP ID: ENSP00000426535
FLPQTAPRARACCSWGAGLPCPTRHSSSDPCLGSHFNTKKEGDLIAAQARLKDLEALLNSKEAALSTALSEKRTLEGELHDLRGQVAKLEAALGEAKKQLQDEMLRRVDAENRLQTMKEELDFQKNIYSEELRETKRRHETRLVEIDNGKQREFESRLADALQELRAQHEDQVEQYKKELEK

SEQ ID NO: 44922 - protein, 615 aa, Homo sapiens
  Payload ID: 9149
  Gene Symbol: LBR
  Gene Name: lamin B receptor
  Uniprot ID: Q14739
  ENSP ID: ENSP00000272163
MPSRKFADGEVVRGRWPGSSLYYEVEILSHDSTSQLYTVKYKDGTELELKENDIKPLTSFRQRKGGSTSSSPSRRRGSRSRSRSRSPGRPPKSARRSASASHQADIKEARREVEVKLTPLILKPFGNSISRYNGEPEHIERNDAPHKNTQEKFSLSQESSYIATQYSLRPRREEVKLKEIDSKEEKYVAKELAVRTFEVTPIRAKDLEFGGVPGVFLIMFGLPVFLFLLLLMCKQKDPSLLNFPPPLPALYELWETRVFGVYLLWFLIQVLFYLLPIGKVVEGTPLIDGRRLKYRLNGFYAFILTSAVIGTSLFQGVEFHYVYSHFLQFALAATVFCVVLSVYLYMRSLKAPRNDLSPASSGNAVYDFFIGRELNPRIGTFDLKYFCELRPGLIGWVVINLVMLLAEMKIQDRAVPSLAMILVNSFQLLYVVDALWNEEALLTTMDIIHDGFGFMLAFGDLVWVPFIYSFQAFYLVSHPNEVSWPMASLIIVLKLCGYVIFRGANSQKNAFRKNPSDPKLAHLKTIHTSTGKNLLVSGWWGFVRHPNYLGDLIMALAWSLPCGFNHILPYFYIIYFTMLLVHREARDEYHCKKKYGVAWEKYCQRVPYRIFPYIY

SEQ ID NO: 44923 - protein, 615 aa, Homo sapiens; identical to SEQ ID NO: 44922
  Payload ID: 9149
  Gene Symbol: LBR
  Gene Name: lamin B receptor
  Uniprot ID: Q14739
  ENSP ID: ENSP00000339883

SEQ ID NO: 44924 - protein, 213 aa, Homo sapiens
  Payload ID: 9149
  Gene Symbol: LBR
  Gene Name: lamin B receptor
  ENSP ID: ENSP00000388059
MPSRKFADGEVVRGRWPGSSLYYEVEILSHDSTSQLYTVKYKDGTELELKENDIKPLTSFRQRKGGSTSSSPSRRRGSRSRSRSRSPGRPPKSARRSASASHQADIKEARREVEVKLTPLILKPFGNSISRYNGEPEHIERNDAPHKNTQEKFSLSQESSYIATQYSLRPRREEVKLKEIDSKEEKYVAKELAVRTFEVTPIRAKDLEFGGVP

SEQ ID NO: 44925 - protein, 51 aa, Homo sapiens
  Payload ID: 9149
  Gene Symbol: LBR
  Gene Name: lamin B receptor
  ENSP ID: ENSP00000416554
MPSRKFADGEVVRGRWPGSSLYYEVEILSHDSTSQLYTVKYKDGTELELKE

SEQ ID NO: 44926 - protein, 586 aa, Homo sapiens
  Payload ID: 9150
  Gene Symbol: LMNB1
  Gene Name: lamin B1
  Uniprot ID: P20700
  ENSP ID: ENSP00000261366
MATATPVPPRMGSRAGGPTTPLSPTRLSRLQEKEELRELNDRLAVYIDKVRSLETENSALQLQVTEREEVRGRELTGLKALYETELADARRALDDTARERAKLQIELGKCKAEHDQLLLNYAKKESDLNGAQIKLREYEAALNSKDAALATALGDKKSLEGDLEDLKDQIAQLEASLAAAKKQLADETLLKVDLENRCQSLTEDLEFRKSMYEEEINETRRKHETRLVEVDSGRQIEYEYKLAQALHEMREQHDAQVRLYKEELEQTYHAKLENARLSSEMNTSTVNSAREELMESRMRIESLSSQLSNLQKESRACLERIQELEDLLAKEKDNSRRMLTDKEREMAEIRDQMQQQLNDYEQLLDVKLALDMEISAYRKLLEGEEERLKLSPSPSSRVTVSRASSSRSVRTTRGKRKRVDVEESEASSSVSISHSASATGNVCIEEIDVDGKFIRLKNTSEQDQPMGGWEMIRKIGDTSVSYKYTSRYVLKAGQTVTIWAANAGVTASPPTDLIWKNQNSWGTGEDVKVILKNSQGEEVAQRSTVFKTTIPEEEEEEEEAAGVVVEEELFHQQGTPRASNRSCAIM

SEQ ID NO: 44927 - protein, 387 aa, Homo sapiens
  Payload ID: 9150
  Gene Symbol: LMNB1
  Gene Name: lamin B1
  ENSP ID: ENSP00000378761
MATATPVPPRMGSRAGGPTTPLSPTRLSRLQEKEELRELNDRLAVYIDKVRSLETENSALQLQVTEREEVRGRELTGLKALYETELADARRALDDTARERAKLQIELGKCKAEHDQLLLNYAKKESDLNGAQIKLREYEAALNSKDAALATALGDKKSLEGDLEDLKDQIAQLEASLAAAKKQLADETLLKVDLENRCQSLTEDLEFRKSMYEEEINETRRKHETRLVEVDSGRQIEYEYKLAQALHEMREQHDAQVRLYKEELEQTYHAKLENARLSSEMNTSTVNSAREELMESRMRIESLSSQLSNLQKESRACLERIQELEDLLAKEKDNSRRMLTDKEREMAEIRDQMQQQLNDYEQLLDVKLALDMEISAYRKLLEGEEER

SEQ ID NO: 44928 - protein, 329 aa, Homo sapiens
  Payload ID: 9150
  Gene Symbol: LMNB1
  Gene Name: lamin B1
  ENSP ID: ENSP00000486528
MATATPVPPRMGSRAGGPTTPLSPTRLSRLQEKEELRELNDRLAVYIDKVRSLETENSALQLQVTEREEVRGRELTGLKALYETELADARRALDDTARERAKLQIELGKCKAEHDQLLLNYAKKESDLNGAQIKLREYEAALNSKDAALATALGDKKSLEGDLEDLKDQIAQLEASLAAAKKQLADETLLKVDLENRCQSLTEDLEFRKSMYEEEINETRRKHETRLVEVDSGRQIEYEYKLAQALHEMREQHDAQVRLYKEELEQTYHAKLENARLSSEMNTSTVNSAREELMESRMRIESLSSQLSNLQKECLLLSHISFIMLPIRP

SEQ ID NO: 44929 - protein, 166 aa, Homo sapiens
  Payload ID: 9150
  Gene Symbol: LMNB1
  Gene Name: lamin B1
  ENSP ID: ENSP00000486992
MATATPVPPRMGSRAGGPTTPLSPTRLSRLQEKEELRELNDRLAVYIDKVRSLETENSALQLQVTEREEVRGRELTGLKALYETELADARRALDDTARERAKLQIELGKCKAEHDQLLLNYAKKESDLNGAQIKLREYEAALNSKDAALATALGDKKSLEGDLEDL

SEQ ID NO: 44930 - protein, 620 aa, Homo sapiens
  Payload ID: 9151
  Gene Symbol: LMNB2
  Gene Name: lamin B2
  ENSP ID: ENSP00000327054
MSPPSPGRRREQRRPRAAATMATPLPGRAGGPATPLSPTRLSRLQEKEELRELNDRLAHYIDRVRALELENDRLLLKISEKEEVTTREVSGIKALYESELADARRVLDETARERARLQIEIGKLRAELDEVNKSAKKREGELTVAQGRVKDLESLFHRSEVELAAALSDKRGLESDVAELRAQLAKAEDGHAVAKKQLEKETLMRVDLENRCQSLQEELDFRKSVFEEEVRETRRRHERRLVEVDSSRQQEYDFKMAQALEELRSQHDEQVRLYKLELEQTYQAKLDSAKLSSDQNDKAASAAREELKEARMRLESLSYQLSGLQKQASAAEDRIRELEEAMAGERDKFRKMLDAKEQEMTEMRDVMQQQLAEYQELLDVKLALDMEINAYRKLLEGEEERLKLSPSPSSRVTVSRATSSSSGSLSATGRLGRSKRKRLEVEEPLGSGPSVLGTGTGGSGGFHLAQQASASGSVSIEEIDLEGKFVQLKNNSDKDQSLGNWRIKRQVLEGEEIAYKFTPKYILRAGQMVTVWAAGAGVAHSPPSTLVWKGQSSWGTGESFRTVLVNADGEEVAMRTVKKSSVMRENENGEEEEEEAEFGEEDLFHQQGDPRTTSRGCYVM

SEQ ID NO: 44931 - protein, 388 aa, Homo sapiens
  Payload ID: 9152
  Gene Symbol: LMNTD1
  Gene Name: lamin tail domain containing 1
  Uniprot ID: Q8N9Z9
  ENSP ID: ENSP00000282881
MLEGSWINRREDKLGVYSLVHFSPKMLGSVATTLPLSSSNSSGMPLGYYLSSPQISRVTISTTGQLTSKATVGSCSRVENSLDASPFSVPKKQDESPMIGDGEDYFLSLFGDSKKLTAHSNYTQKTLKYFSMILEEVGQFTSSSLGDVEIAEVNVKGLFVKLINSSLDKEMAIGDHILQQNVNGQTISLYRFLPNIVMQANSTVTVWAAASEAKHQPPSDFLWKEQDKFRASPDCITILCKPNGQAIAWYTPIHWKQAWEKLDADVEFNRCSVVSPTFRKRVFQWTASTATITKEKQDQPKKDISNYQVEQAQVLLKREKEIPPTVFPNRSPWCQNPYVSAHPYCPLIEPHNTSTAGGRLDRQPRTRSTRPNRASGSKKKKTSESQKQ

SEQ ID NO: 44932 - protein, 369 aa, Homo sapiens
  Payload ID: 9152
  Gene Symbol: LMNTD1
  Gene Name: lamin tail domain containing 1
  Uniprot ID: Q8N9Z9
  ENSP ID: ENSP00000393150
MKDTQDIQEASKAMQNKVHEQEDKNEKQKQREDKLGVYSLVHFSPKMLGSVATTLPLSSSNSSGMPLGYYLSSPQISRVTISTTGQLTSKATVGSCSRVENSLDASPFSVPKKQDESPMIGDGEDYFLSLFGDSKKLTAHSNYTQKTLKYFSMILEEVGQFTSSSLGDVEIAEVNVKGLFVKLINSSLDKEMAIGDHILQQNVNGQTISLYRFLPNIVMQANSTVTAIAWYTPIHWKQAWEKLDADVEFNRCSVVSPTFRKRVFQWTASTATITKEKQDQPKKDISNYQVEQAQVLLKREKEIPPTVFPNRSPWCQNPYVSAHPYCPLIEPHNTSTAGGRLDRQPRTRSTRPNRASGSKKKKTSESQKQ

SEQ ID NO: 44933 - protein, 325 aa, Homo sapiens
  Payload ID: 9152
  Gene Symbol: LMNTD1
  Gene Name: lamin tail domain containing 1
  Uniprot ID: Q8N9Z9
  ENSP ID: ENSP00000407043
MQQPVRAGDIGVSRVQTHHNASPFSVPKKQDESPMIGDGEDYFLSLFGDSKKLTAHSNYTQKTLKYFSMILEEVGQFTSSSLGDVEIAEVNVKGLFVKLINSSLDKEMAIGDHILQQNVNGQTISLYRFLPNIVMQANSTVTVWAAASEAKHQPPSDFLWKEQDKFRASPDCITILCKPNGQAIAWYTPIHWKQAWEKLDADVEFNRCSVVSPTFRKRVFQWTASTATITKEKQDQPKKDISNYQVEQAQVLLKREKEIPPTVFPNRSPWCQNPYVSAHPYCPLIEPHNTSTAGGRLDRQPRTRSTRPNRASGSKKKKTSESQKQ

SEQ ID NO: 44934 - protein, 409 aa, Homo sapiens
  Payload ID: 9152
  Gene Symbol: LMNTD1
  Gene Name: lamin tail domain containing 1
  Uniprot ID: Q8N9Z9
  ENSP ID: ENSP00000407353
MKDTQDIQEASKAMQNKVHEQEDKNEKQKQREDKLGVYSLVHFSPKMLGSVATTLPLSSSNSSGMPLGYYLSSPQISRVTISTTGQLTSKATVGSCSRVENSLDASPFSVPKKQDESPMIGDGEDYFLSLFGDSKKLTAHSNYTQKTLKYFSMILEEVGQFTSSSLGDVEIAEVNVKGLFVKLINSSLDKEMAIGDHILQQNVNGQTISLYRFLPNIVMQANSTVTVWAAASEAKHQPPSDFLWKEQDKFRASPDCITILCKPNGQAIAWYTPIHWKQAWEKLDADVEFNRCSVVSPTFRKRVFQWTASTATITKEKQDQPKKDISNYQVEQAQVLLKREKEIPPTVFPNRSPWCQNPYVSAHPYCPLIEPHNTSTAGGRLDRQPRTRSTRPNRASGSKKKKTSESQKQ

SEQ ID NO: 44935 - protein, 105 aa, Homo sapiens
  Payload ID: 9152
  Gene Symbol: LMNTD1
  Gene Name: lamin tail domain containing 1
  ENSP ID: ENSP00000438160
QWTASTATITKEKQDQPKKDISNYQVEQAQVLLKREKEIPPTVFPNRSPWCQNPYVSAHPYCPLIEPHNTSTAGGRLDRQPRTRSTRPNRASGSKKKKTSESQKQ

SEQ ID NO: 44936 - protein, 163 aa, Homo sapiens
  Payload ID: 9152
  Gene Symbol: LMNTD1
  Gene Name: lamin tail domain containing 1
  ENSP ID: ENSP00000438645
  MOD_RES (1)..(1): Any amino acid
XDKFRASPDCITILCKPNGQAIAWYTPIHWKQAWEKLDADVEFNRCSVVSPTFRKRVFQWTASTATITKEKQDQPKKDISNYQVEQAQVLLKREKEIPPTVFPNRSPWCQNPYVSAHPYCPLIEPHNTSTAGGRLDRQPRTRSTRPNRASGSKKKKTSESQKQ

SEQ ID NO: 44937 - protein, 170 aa, Homo sapiens
  Payload ID: 9152
  Gene Symbol: LMNTD1
  Gene Name: lamin tail domain containing 1
  ENSP ID: ENSP00000442871
MLGSVATTLPLSSSNSSGMPLGYYLSSPQISRVTISTTGQLTSKATVGSCSRVENSLDASPFSVPKKQDESPMIGDGEDYFLSLFGDSKKLTAHSNYTQKTLKYFSMILEEVGQFTSSSLGDVEIAEVNVKGLFVKLINSSLDKEMAIGDHILQQNVNGQTISLYRFLPN

SEQ ID NO: 44938 - protein, 291 aa, Homo sapiens
  Payload ID: 9152
  Gene Symbol: LMNTD1
  Gene Name: lamin tail domain containing 1
  Uniprot ID: Q8N9Z9
  ENSP ID: ENSP00000443132
MIGDGEDYFLSLFGDSKKLTAHSNYTQKTLKYFSMILEEVGQFTSSSLGDVEIAEVNVKGLFVKLINSSLDKEMAIGDHILQQNVNGQTISLYRFLPNIVMQANSTVTVWAAASEAKHQPPSDFLWKEQDKFRASPDCITILCKPNGQAIAWYTPIHWKQAWEKLDADVEFNRCSVVSPTFRKRVFQWTASTATITKEKQDQPKKDISNYQVEQAQVLLKREKEIPPTVFPNRSPWCQNPYVSAHPYCPLIEPHNTSTAGGRLDRQPRTRSTRPNRASGSKKKKTSESQKQ

SEQ ID NO: 44939 - protein, 72 aa, Homo sapiens
  Payload ID: 9152
  Gene Symbol: LMNTD1
  Gene Name: lamin tail domain containing 1
  ENSP ID: ENSP00000443387
MLGSVATTLPLSSSNSSGMPLGYYLSSPQISRVTISTTGQLTSKATVGSCSRVENSLDASPFSVPKKQDESP

SEQ ID NO: 44940 - protein, 143 aa, Homo sapiens
  Payload ID: 9152
  Gene Symbol: LMNTD1
  Gene Name: lamin tail domain containing 1
  ENSP ID: ENSP00000443596
MAIGDHILQQNVNGQTISLYRFLPNIVMQANSTVTVWAAASEAKHQPPSDFLWKEQDKFRASPDCITILCKPNGQAIAWYTPIHWKQAWEKLDADVEFNRCSVVSPTFRKRVFQWTASTATITKEKQDQPKKDISNYQVEQAQ

SEQ ID NO: 44941 - protein, 165 aa, Homo sapiens
  Payload ID: 9152
  Gene Symbol: LMNTD1
  Gene Name: lamin tail domain containing 1
  ENSP ID: ENSP00000445242
MLGSVATTLPLSSSNSSGMPLGYYLSSPQISRVTISTTGQLTSKATVGSCSRVENSLDASPFSVPKKQDESPMIGDGEDYFLSLFGDSKKLTAHSNYTQKTLKYFSMILEEVGQFTSSSLGDVEIAEVNVKGLFVKLINSSLDKEMAIGDHILQQNVNGQTISLY

SEQ ID NO: 44942 - protein, 634 aa, Homo sapiens
  Payload ID: 9153
  Gene Symbol: LMNTD2
  Gene Name: lamin tail domain containing 2
  Uniprot ID: Q8IXW0
  ENSP ID: ENSP00000331167
MRWLRPAGRRREQESVSGHLGPPAGAPAAPETPTCLPDTTPHPAPVVCSADPQLALESLDPRTLRLLWRQRELEIQALRWAIQNGEDARLCHILEEVAGLPPKRSSHSQEKLLQNQVQKLIQELKEQKERAQWEKEHLEERLLQTTRTLQEMEAELQNLQKSCLLQLARSSWVGRMLRSQTGSVEVVTAETLMDPSDLSENIQAPTGEGFRLEDVDWNSVARRYPNLFTNMEPSSKQKQPRPWPQLDTGSPESSGKHSERHHKTVEWGSLPCLNTSSSGGADSDSSSCRPGLPSFVQVIGHPPRDHRASSEQALVQAGSYSRDSEDLQKTHSPRHGEPVLSPQPCTDPDHWSPELLQSPTGLKIVAVSCREKFVRIFNPSQESTADLSGMVLKQLVRGFPERLYRFPPGTLLAPRHHVTVWGEATRSAKKPLRASSSREPVPLLSIRGCATLLLSPKGEVLSEHRIPRRETPAPRVFADGTDLSIDRFPLPEAGPGADTRKPPRPPRPLRKGRVREPRVSRRRPGTRGLLPPVSSGKLFHAREGPARPENPEIPAPQHLPAIPGDPTLPSPPAEAGLGLEDCRLQKEHRVRVCRKSVDRSCPLVALSVQNTAESRFGFRFLSCLPVTADTCRGA

SEQ ID NO: 44943 - protein, 302 aa, Homo sapiens
  Payload ID: 9153
  Gene Symbol: LMNTD2
  Gene Name: lamin tail domain containing 2
  ENSP ID: ENSP00000393529
MATVYSPSLPGLLGGRASEQESVSGHLGPPAGAPAAPETPTCLPDTTPHPAPVVCSADPQLALESLDPRTLRLLWRQRELEIQALRWAIQNGEDARLCHILEEVAGLPPKRSSHSQEKLLQNQVQKLIQELKEQKERAQWEKEHLEERLLQTTRTLQEMEAELQNLQKSCLLQLARSSWVGRMLRSQTGSVEVVTAETLMDPSDLSENIQAPTGEGFRLEDVDWNSVARRYPNLFTNMEPSSKQKQPRPWPQLDTGSPESSGKHSERHHKTVEWGSLPCLNTSSSGGADSDSSSCRPGLPSF

SEQ ID NO: 44944 - protein, 247 aa, Homo sapiens
  Payload ID: 9153
  Gene Symbol: LMNTD2
  Gene Name: lamin tail domain containing 2
  ENSP ID: ENSP00000435529
MAPKSGQEVEETEEEALLSPTEQESVSGHLGPPAGAPAAPETPTCLPDTTPHPAPVVCSADPQLALESLDPRTLRLLWRQRELEIQALRWAIQNGEDARLCHILEEVAGLPPKRSSHSQEKLLQNQVQKLIQELKEQKERAQWEKEHLEERLLQTTRTLQEMEAELQNLQKSCLLQLARSSWVGRMLRSQTGSVEVVTAETLMDPSDLSENIQAPTGEGFRLEDVDWNSVARRYPNLFTNMEPSSKQ

SEQ ID NO: 44945 - protein, 634 aa, Homo sapiens
  Payload ID: 9153
  Gene Symbol: LMNTD2
  Gene Name: lamin tail domain containing 2
  Uniprot ID: Q8IXW0
  ENSP ID: ENSP00000478197
MRWLRPAGRRREQESVSGHLGPPAGAPAAPETPTCLPDTTPHPTPVVCSADPQLALESLDPRTLRLLWRQRELEIQALRWAIQNGEDARLCHILEEVAGLPPKRSSHSQEKLLQNQVQKLIQELKEQKERAQWEKEHLEERLLQTTRTLQEMEAELQNLQKSCLLQLARSSWVGRMLRSQTGSVEVVTAETLMDPSDLSENIQAPTGEGFRLEDVDWNSVARRYPNLFTNMEPSSKQKQPRPWPQLDTGSPESSGKHSERHHKTVEWGSLPCLNTSSSGGADSDSSSCRPGLPSFVQVIGHPPRDHRASSEQALVQAGSYSRDSEDLQKTHSPRHGEPVLSPQPCTDPDHWSPELLQSPTGLKIVAVSCREKFVRIFNPSQESTADLSGMVLKQLVRGFPERLYRFPPGTLLAPRHHVTVWGEATRSAKKPLRASSSREPVPLLSIRGCATLLLSPKGEVLSEHRIPRRETPAPRVFADGTDLSIDRFPLPEAGPGADTRKPPRPPRPLRKGRVREPRVSRRRPGTRGLLPPVSSGKLFHAREGPARPENPEIPAPQHLPAIPGDPTLPSPPAEAGLGLEDCRLQKEHRVRVCRKSVDRSCPLVALSVQNTAESRFGFRFLSCLPVTADTCRGA

SEQ ID NO: 44946 - protein, 302 aa, Homo sapiens
  Payload ID: 9153
  Gene Symbol: LMNTD2
  Gene Name: lamin tail domain containing 2
  ENSP ID: ENSP00000488238
MATVYSPSLPGLLGGRASEQESVSGHLGPPAGAPAAPETPTCLPDTTPHPTPVVCSADPQLALESLDPRTLRLLWRQRELEIQALRWAIQNGEDARLCHILEEVAGLPPKRSSHSQEKLLQNQVQKLIQELKEQKERAQWEKEHLEERLLQTTRTLQEMEAELQNLQKSCLLQLARSSWVGRMLRSQTGSVEVVTAETLMDPSDLSENIQAPTGEGFRLEDVDWNSVARRYPNLFTNMEPSSKQKQPRPWPQLDTGSPESSGKHSERHHKTVEWGSLPCLNTSSSGGADSDSSSCRPGLPSF

SEQ ID NO: 44947 - protein, 247 aa, Homo sapiens
  Payload ID: 9153
  Gene Symbol: LMNTD2
  Gene Name: lamin tail domain containing 2
  ENSP ID: ENSP00000488391
MAPKSGQEVKETEEEALLSPTEQESVSGHLGPPAGAPAAPETPTCLPDTTPHPTPVVCSADPQLALESLDPRTLRLLWRQRELEIQALRWAIQNGEDARLCHILEEVAGLPPKRSSHSQEKLLQNQVQKLIQELKEQKERAQWEKEHLEERLLQTTRTLQEMEAELQNLQKSCLLQLARSSWVGRMLRSQTGSVEVVTAETLMDPSDLSENIQAPTGEGFRLEDVDWNSVARRYPNLFTNMEPSSKQ

SEQ ID NO: 44948 - protein, 3075 aa, Homo sapiens
  Payload ID: 9154
  Gene Symbol: LAMA1
  Gene Name: laminin, alpha 1
  Uniprot ID: P25391
  ENSP ID: ENSP00000374309
MRGGVLLVLLLCVAAQCRQRGLFPAILNLASNAHISTNATCGEKGPEMFCKLVEHVPGRPVRNPQCRICDGNSANPRERHPISHAIDGTNNWWQSPSIQNGREYHWVTITLDLRQVFQVAYVIIKAANAPRPGNWILERSLDGTTFSPWQYYAVSDSECLSRYNITPRRGPPTYRADDEVICTSYYSRLVPLEHGEIHTSLINGRPSADDLSPKLLEFTSARYIRLRLQRIRTLNADLMTLSHREPKELDPIVTRRYYYSIKDISVGGMCICYGHASSCPWDETTKKLQCQCEHNTCGESCNRCCPGYHQQPWRPGTVSSGNTCEACNCHNKAKDCYYDESVAKQKKSLNTAGQFRGGGVCINCLQNTMGINCETCIDGYYRPHKVSPYEDEPCRPCNCDPVGSLSSVCIKDDLHSDLHNGKQPGQCPCKEGYTGEKCDRCQLGYKDYPTCVSCGCNPVGSASDEPCTGPCVCKENVEGKACDRCKPGFYNLKEKNPRGCSECFCFGVSDVCSSLSWPVGQVNSMSGWLVTDLISPRKIPSQQDALGGRHQVSINNTAVMQRLAPKYYWAAPEAYLGNKLTAFGGFLKYTVSYDIPVETVDSNLMSHADVIIKGNGLTLSTQAEGLSLQPYEEYLNVVRLVPENFQDFHSKRQIDRDQLMTVLANVTHLLIRANYNSAKMALYRLESVSLDIASSNAIDLVVAADVEHCECPQGYTGTSCESCLSGYYRVDGILFGGICQPCECHGHAAECNVHGVCIACAHNTTGVHCEQCLPGFYGEPSRGTPGDCQPCACPLTIASNNFSPTCHLNDGDEVVCDWCAPGYSGAWCERCADGYYGNPTVPGESCVPCDCSGNVDPSEAGHCDSVTGECLKCLGNTDGAHCERCADGFYGDAVTAKNCRACECHVKGSHSAVCHLETGLCDCKPNVTGQQCDQCLHGYYGLDSGHGCRPCNCSVAGSVSDGCTDEGQCHCVPGVAGKRCDRCAHGFYAYQDGSCTPCDCPHTQNTCDPETGECVCPPHTQGVKCEECEDGHWGYDAEVGCQACNCSLVGSTHHRCDVVTGHCQCKSKFGGRACDQCSLGYRDFPDCVPCDCDLRGTSGDACNLEQGLCGCVEETGACPCKENVFGPQCNECREGTFALRADNPLGCSPCFCSGLSHLCSELEDYVRTPVTLGSDQPLLRVVSQSNLRGTTEGVYYQAPDFLLDAATVRQHIRAEPFYWRLPQQFQGDQLMAYGGKLKYSVAFYSLDGVGTSNFEPQVLIKGGRIRKQVIYMDAPAPENGVRQEQEVAMRENFWKYFNSVSEKPVTREDFMSVLSDIEYILIKASYGQGLQQSRISDISMEVGRKAEKLHPEEEVASLLENCVCPPGTVGFSCQDCAPGYHRGKLPAGSDRGPRPLVAPCVPCSCNNHSDTCDPNTGKCLNCGDNTAGDHCDVCTSGYYGKVTGSASDCALCACPHSPPASFSPTCVLEGDHDFRCDACLLGYEGKHCERCSSSYYGNPQTPGGSCQKCDCNPHGSVHGDCDRTSGQCVCRLGASGLRCDECEPRHILMETDCVSCDDECVGVLLNDLDEIGDAVLSLNLTGIIPVPYGILSNLENTTKYLQESLLKENMQKDLGKIKLEGVAEETDNLQKKLTRMLASTQKVNRATERIFKESQDLAIAIERLQMSITEIMEKTTLNQTLDEDFLLPNSTLQNMQQNGTSLLEIMQIRDFTQLHQNATLELKAAEDLLSQIQENYQKPLEELEVLKEAASHVLSKHNNELKAAEALVREAEAKMQESNHLLLMVNANLREFSDKKLHVQEEQNLTSELIVQGRGLIDAAAAQTDAVQDALEHLEDHQDKLLLWSAKIRHHIDDLVMHMSQRNAVDLVYRAEDHAAEFQRLADVLYSGLENIRNVSLNATSAAYVHYNIQSLIEESEELARDAHRTVTETSLLSESLVSNGKAAVQRSSRFLKEGNNLSRKLPGIALELSELRNKTNRFQENAVEITRQTNESLLILRAIPKGIRDKGAKTKELATSASQSAVSTLRDVAGLSQELLNTSASLSRVNTTLRETHQLLQDSTMATLLAGRKVKDVEIQANLLFDRLKPLKMLEENLSRNLSEIKLLISQARKQAASIKVAVSADRDCIRAYQPQISSTNYNTLTLNVKTQEPDNLLFYLGSSTASDFLAVEMRRGRVAFLWDLGSGSTRLEFPDFPIDDNRWHSIHVARFGNIGSLSVKEMSSNQKSPTKTSKSPGTANVLDVNNSTLMFVGGLGGQIKKSPAVKVTHFKGCLGEAFLNGKSIGLWNYIEREGKCRGCFGSSQNEDPSFHFDGSGYSVVEKSLPATVTQIIMLFNTFSPNGLLLYLGSYGTKDFLSIELFRGRVKVMTDLGSGPITLLTDRRYNNGTWYKIAFQRNRKQGVLAVIDAYNTSNKETKQGETPGASSDLNRLDKDPIYVGGLPRSRVVRRGVTTKSFVGCIKNLEISRSTFDLLRNSYGVRKGCLLEPIRSVSFLKGGYIELPPKSLSPESEWLVTFATTNSSGIILAALGGDVEKRGDREEAHVPFFSVMLIGGNIEVHVNPGDGTGLRKALLHAPTGTCSDGQAHSISLVRNRRIITVQLDENNPVEMKLGTLVESRTINVSNLYVGGIPEGEGTSLLTMRRSFHGCIKNLIFNLELLDFNSAVGHEQVDLDTCWLSERPKLAPDAEDSKLLPEPRAFPEQCVVDAALEYVPGAHQFGLTQNSHFILPFNQSAVRKKLSVELSIRTFASSGLIYYMAHQNQADYAVLQLHGGRLHFMFDLGKGRTKVSHPALLSDGKWHTVKTDYVKRKGFITVDGRESPMVTVVGDGTMLDVEGLFYLGGLPSQYQARKIGNITHSIPACIGDVTVNSKQLDKDSPVSAFTVNRCYAVAQEGTYFDGSGYAALVKEGYKVQSDVNITLEFRTSSQNGVLLGISTAKVDAIGLELVDGKVLFHVNNGAGRITAAYEPKTATVLCDGKWHTLQANKSKHRITLIVDGNAVGAESPHTQSTSVDTNNPIYVGGYPAGVKQKCLRSQTSFRGCLRKLALIKSPQVQSFDFSRAFELHGVFLHSCPGTES

SEQ ID NO: 44949 - protein, 3122 aa, Homo sapiens
  Payload ID: 9155
  Gene Symbol: LAMA2
  Gene Name: laminin, alpha 2
  Uniprot ID: P24043
  ENSP ID: ENSP00000400365
MPGAAGVLLLLLLSGGLGGVQAQRPQQQRQSQAHQQRGLFPAVLNLASNALITTNATCGEKGPEMYCKLVEHVPGQPVRNPQCRICNQNSSNPNQRHPITNAIDGKNTWWQSPSIKNGIEYHYVTITLDLQQVFQIAYVIVKAANSPRPGNWILERSLDDVEYKPWQYHAVTDTECLTLYNIYPRTGPPSYAKDDEVICTSFYSKIHPLENGEIHISLINGRPSADDPSPELLEFTSARYIRLRFQRIRTLNADLMMFAHKDPREIDPIVTRRYYYSVKDISVGGMCICYGHARACPLDPATNKSRCECEHNTCGDSCDQCCPGFHQKPWRAGTFLTKTECEACNCHGKAEECYYDENVARRNLSLNIRGKYIGGGVCINCTQNTAGINCETCTDGFFRPKGVSPNYPRPCQPCHCDPIGSLNEVCVKDEKHARRGLAPGSCHCKTGFGGVSCDRCARGYTGYPDCKACNCSGLGSKNEDPCFGPCICKENVEGGDCSRCKSGFFNLQEDNWKGCDECFCSGVSNRCQSSYWTYGKIQDMSGWYLTDLPGRIRVAPQQDDLDSPQQISISNAEARQALPHSYYWSAPAPYLGNKLPAVGGQLTFTISYDLEEEEEDTERVLQLMIILEGNDLSISTAQDEVYLHPSEEHTNVLLLKEESFTIHGTHFPVRRKEFMTVLANLKRVLLQITYSFGMDAIFRLSSVNLESAVSYPTDGSIAAAVEVCQCPPGYTGSSCESCWPRHRRVNGTIFGGICEPCQCFGHAESCDDVTGECLNCKDHTGGPYCDKCLPGFYGEPTKGTSEDCQPCACPLNIPSNNFSPTCHLDRSLGLICDGCPVGYTGPRCERCAEGYFGQPSVPGGSCQPCQCNDNLDFSIPGSCDSLSGSCLICKPGTTGRYCELCADGYFGDAVDAKNCQPCRCNAGGSFSEVCHSQTGQCECRANVQGQRCDKCKAGTFGLQSARGCVPCNCNSFGSKSFDCEESGQCWCQPGVTGKKCDRCAHGYFNFQEGGCTACECSHLGNNCDPKTGRCICPPNTIGEKCSKCAPNTWGHSITTGCKACNCSTVGSLDFQCNVNTGQCNCHPKFSGAKCTECSRGHWNYPRCNLCDCFLPGTDATTCDSETKKCSCSDQTGQCTCKVNVEGIHCDRCRPGKFGLDAKNPLGCSSCYCFGTTTQCSEAKGLIRTWVTLKAEQTILPLVDEALQHTTTKGIVFQHPEIVAHMDLMREDLHLEPFYWKLPEQFEGKKLMAYGGKLKYAIYFEAREETGFSTYNPQVIIRGGTPTHARIIVRHMAAPLIGQLTRHEIEMTEKEWKYYGDDPRVHRTVTREDFLDILYDIHYILIKATYGNFMRQSRISEISMEVAEQGRGTTMTPPADLIEKCDCPLGYSGLSCEACLPGFYRLRSQPGGRTPGPTLGTCVPCQCNGHSSLCDPETSICQNCQHHTAGDFCERCALGYYGIVKGLPNDCQQCACPLISSSNNFSPSCVAEGLDDYRCTACPRGYEGQYCERCAPGYTGSPGNPGGSCQECECDPYGSLPVPCDPVTGFCTCRPGATGRKCDGCKHWHAREGWECVFCGDECTGLLLGDLARLEQMVMSINLTGPLPAPYKMLYGLENMTQELKHLLSPQRAPERLIQLAEGNLNTLVTEMNELLTRATKVTADGEQTGQDAERTNTRAKSLGEFIKELARDAEAVNEKAIKLNETLGTRDEAFERNLEGLQKEIDQMIKELRRKNLETQKEIAEDELVAAEALLKKVKKLFGESRGENEEMEKDLREKLADYKNKVDDAWDLLREATDKIREANRLFAVNQKNMTALEKKKEAVESGKRQIENTLKEGNDILDEANRLADEINSIIDYVEDIQTKLPPMSEELNDKIDDLSQEIKDRKLAEKVSQAESHAAQLNDSSAVLDGILDEAKNISFNATAAFKAYSNIKDYIDEAEKVAKEAKDLAHEATKLATGPRGLLKEDAKGCLQKSFRILNEAKKLANDVKENEDHLNGLKTRIENADARNGDLLRTLNDTLGKLSAIPNDTAAKLQAVKDKARQANDTAKDVLAQITELHQNLDGLKKNYNKLADSVAKTNAVVKDPSKNKIIADADATVKNLEQEADRLIDKLKPIKELEDNLKKNISEIKELINQARKQANSIKVSVSSGGDCIRTYKPEIKKGSYNNIVVNVKTAVADNLLFYLGSAKFIDFLAIEMRKGKVSFLWDVGSGVGRVEYPDLTIDDSYWYRIVASRTGRNGTISVRALDGPKASIVPSTHHSTSPPGYTILDVDANAMLFVGGLTGKLKKADAVRVITFTGCMGETYFDNKPIGLWNFREKEGDCKGCTVSPQVEDSEGTIQFDGEGYALVSRPIRWYPNISTVMFKFRTFSSSALLMYLATRDLRDFMSVELTDGHIKVSYDLGSGMASVVSNQNHNDGKWKSFTLSRIQKQANISIVDIDTNQEENIATSSSGNNFGLDLKADDKIYFGGLPTLRNLSMKARPEVNLKKYSGCLKDIEISRTPYNILSSPDYVGVTKGCSLENVYTVSFPKPGFVELSPVPIDVGTEINLSFSTKNESGIILLGSGGTPAPPRRKRRQTGQAYYAILLNRGRLEVHLSTGARTMRKIVIRPEPNLFHDGREHSVHVERTRGIFTVQVDENRRYMQNLTVEQPIEVKKLFVGGAPPEFQPSPLRNIPPFEGCIWNLVINSVPMDFARPVSFKNADIGRCAHQKLREDEDGAAPAEIVIQPEPVPTPAFPTPTPVLTHGPCAAESEPALLIGSKQFGLSRNSHIAIAFDDTKVKNRLTIELEVRTEAESGLLFYMARINHADFATVQLRNGLPYFSYDLGSGDTHTMIPTKINDGQWHKIKIMRSKQEGILYVDGASNRTISPKKADILDVVGMLYVGGLPINYTTRRIGPVTYSIDGCVRNLHMAEAPADLEQPTSSFHVGTCFANAQRGTYFDGTGFAKAVGGFKVGLDLLVEFEFRTTTTTGVLLGISSQKMDGMGIEMIDEKLMFHVDNGAGRFTAVYDAGVPGHLCDGQWHKVTANKIKHRIELTVDGNQVEAQSPNPASTSADTNDPVFVGGFPDDLKQFGLTTSIPFRGCIRSLKLTKGTGKPLEVNFAKALELRGVQPVSCPAN

SEQ ID NO: 44950 - protein, 3121 aa, Homo sapiens
  Payload ID: 9155
  Gene Symbol: LAMA2
  Gene Name: laminin, alpha 2
  ENSP ID: ENSP00000480802
MPGAAGVLLLLLLSGGLGGVQAQRPQQQRQSQAHQQRGLFPAVLNLASNALITTNATCGEKGPEMYCKLVEHVPGQPVRNPQCRICNQNSSNPNQRHPITNAIDGKNTWWQSPSIKNGIEYHYVTITLDLQQVFQIAYVIVKAANSPRPGNWILERSLDDVEYKPWQYHAVTDTECLTLYNIYPRTGPPSYAKDDEVICTSFYSKIHPLENGEIHISLINGRPSADDPSPELLEFTSARYIRLRFQRIRTLNADLMMFAHKDPREIDPIVTRRYYYSVKDISVGGMCICYGHARACPLDPATNKSRCECEHNTCGDSCDQCCPGFHQKPWRAGTFLTKTECEACNCHGKAEECYYDENVARRNLSLNIRGKYIGGGVCINCTQNTAGINCETCTDGFFRPKGVSPNYPRPCQPCHCDPIGSLNEVCVKDEKHARRGLAPGSCHCKTGFGGVSCDRCARGYTGYPDCKACNCSGLGSKNEDPCFGPCICKENVEGGDCSRCKSGFFNLQEDNWKGCDECFCSGVSNRCQSSYWTYGKIQDMSGWYLTDLPGRIRVAPQQDDLDSPQQISISNAEARQALPHSYYWSAPAPYLGNKLPAVGGQLTFTISYDLEEEEEDTERVLQLMIILEGNDLSISTAQDEVYLHPSEEHTNVLLLKEESFTIHGTHFPVRRKEFMTVLANLKRVLLQITYSFGMDAIFRLSSVNLESAVSYPTDGSIAAAVEVCQCPPGYTGSSCESCWPRHRRVNGTIFGGICEPCQCFGHAESCDDVTGECLNCKDHTGGPYCDKCLPGFYGEPTKGTSEDCQPCACPLNIPSNNFSPTCHLDRSLGLICDGCPVGYTGPRCERCAEGYFGQPSVPGGSCQPCQCNDNLDFSIPGSCDSLSGSCLICKPGTTGRYCELCADGYFGDAVDAKNCQPCRCNAGGSFSEVCHSQTGQCECRANVQGQRCDKCKAGTFGLQSARGCVPCNCNSFGSKSFDCEESGQCWCQPGVTGKKCDRCAHGYFNFQEGGCTACECSHLGNNCDPKTGRCICPPNTIGEKCSKCAPNTWGHSITTGCKACNCSTVGSLDFQCNVNTGQCNCHPKFSGAKCTECSRGHWNYPRCNLCDCFLPGTDATTCDSETKKCSCSDQTGQCTCKVNVEGIHCDRCRPGKFGLDAKNPLGCSSCYCFGTTTQCSEAKGLIRTWVTLKAEQTILPLVDEALQHTTTKGIVFQHPEIVAHMDLMREDLHLEPFYWKLPEQFEGKKLMAYGGKLKYAIYFEAREETGFSTYNPQVIIRGGTPTHARIIVRHMAAPLIGQLTRHEIEMTEKEWKYYGDDPRVHRTVTREDFLDILYDIHYILIKATYGNFMRQSRISEISMEVAEQGRGTTMTPPADLIEKCDCPLGYSGLSCEACLPGFYRLRSQPGGRTPGPTLGTCVPCQCNGHSSLCDPETSICQNCQHHTAGDFCERCALGYYGIVKGLPNDCQQCACPLISSSNNFSPSCVAEGLDDYRCTACPRGYEGQYCERCAPGYTGSPGNPGGSCQECECDPYGSLPVPCDPVTGFCTCRPGATGRKCDGCKHWHAREGWECVFCGDECTGLLLGDLARLEQMVMSINLTGPLPAPYKMLYGLENMTQELKHLLSPQRAPERLIQLAEGNLNTLVTEMNELLTRATKVTADGEQTGQDAERTNTRAKSLGEFIKELARDAEAVNEKAIKLNETLGTRDEAFERNLEGLQKEIDQMIKELRRKNLETQKEIAEDELVAAEALLKKVKKLFGESRGENEEMEKDLREKLADYKNKVDDAWDLLREATDKIREANRLFAVNQKNMTALEKKKEAVESGKRQIENTLKEGNDILDEANRLADEINSIIDYVEDIQTKLPPMSEELNDKIDDLSQEIKDRKLAEKVSQAESHAAQLNDSSAVLDGILDEAKNISFNATAAFKAYSNIKDYIDEAEKVAKEAKDLAHEATKLATGPRGLLKEDAKGCLQKSFRILNEAKKLANDVKENEDHLNGLKTRIENADARNGDLLRTLNDTLGKLSAIPNDTAAKLQAVKDKARQANDTAKDVLAQITELHQNLDGLKKNYNKLADSVAKTNAVVKDPSKNTVADADATVKNLEQEADRLIDKLKPIKELEDNLKKNISEIKELINQARKQANSIKVSVSSGGDCIRTYKPEIKKGSYNNIVVNVKTAVADNLLFYLGSAKFIDFLAIEMRKGKVSFLWDVGSGVGRVEYPDLTIDDSYWYRIVASRTGRNGTISVRALDGPKASIVPSTHHSTSPPGYTILDVDANAMLFVGGLTGKLKKADAVRVITFTGCMGETYFDNKPIGLWNFREKEGDCKGCTVSPQVEDSEGTIQFDGEGYALVSRPIRWYPNISTVMFKFRTFSSSALLMYLATRDLRDFMSVELTDGHIKVSYDLGSGMASVVSNQNHNDGKWKSFTLSRIQKQANISIVDIDTNQEENIATSSSGNNFGLDLKADDKIYFGGLPTLRNLSMKARPEVNLKKYSGCLKDIEISRTPYNILSSPDYVGVTKGCSLENVYTVSFPKPGFVELSPVPIDVGTEINLSFSTKNESGIILLGSGGTPAPPRRKRRQTGQAYYAILLNRGRLEVHLSTGARTMRKIVIRPEPNLFHDGREHSVHVERTRGIFTVQVDENRRYMQNLTVEQPIEVKKLFVGGAPPEFQPSPLRNIPPFEGCIWNLVINSVPMDFARPVSFKNADIGRCAHQKLREDEDGAAPAEIVIQPEPVPTPAFPTPTPVLTHGPCAAESEPALLIGSKQFGLSRNSHIAIAFDDTKVKNRLTIELEVRTEAESGLLFYMARINHADFATVQLRNGLPYFSYDLGSGDTHTMIPTKINDGQWHKIKIMRSKQEGILYVDGASNRTISPKKADILDVVGMLYVGGLPINYTTRRIGPVTYSIDGCVRNLHMAEAPADLEQPTSSFHVGTCFANAQRGTYFDGTGFAKAVGGFKVGLDLLVEFEFRTTTTTGVLLGISSQKMDGMGIEMIDEKLMFHVDNGAGRFTAVYDAGVPGHLCDGQWHKVTANKIKHRIELTVDGNQVEAQSPNPASTSADTNDPVFVGGFPDDLKQFGLTTSIPFRGCIRSLKLTKGTGKPLEVNFAKALELRGVQPVSCPAN

SEQ ID NO: 44951 - protein, 3118 aa, Homo sapiens
  Payload ID: 9155
  Gene Symbol: LAMA2
  Gene Name: laminin, alpha 2
  ENSP ID: ENSP00000481744
MPGAAGVLLLLLLSGGLGGVQAQRPQQQRQSQAHQQRGLFPAVLNLASNALITTNATCGEKGPEMYCKLVEHVPGQPVRNPQCRICNQNSSNPNQRHPITNAIDGKNTWWQSPSIKNGIEYHYVTITLDLQQVFQIAYVIVKAANSPRPGNWILERSLDDVEYKPWQYHAVTDTECLTLYNIYPRTGPPSYAKDDEVICTSFYSKIHPLENGEIHISLINGRPSADDPSPELLEFTSARYIRLRFQRIRTLNADLMMFAHKDPREIDPIVTRRYYYSVKDISVGGMCICYGHARACPLDPATNKSRCECEHNTCGDSCDQCCPGFHQKPWRAGTFLTKTECEACNCHGKAEECYYDENVARRNLSLNIRGKYIGGGVCINCTQNTAGINCETCTDGFFRPKGVSPNYPRPCQPCHCDPIGSLNEVCVKDEKHARRGLAPGSCHCKTGFGGVSCDRCARGYTGYPDCKACNCSGLGSKNEDPCFGPCICKENVEGGDCSRCKSGFFNLQEDNWKGCDECFCSGVSNRCQSSYWTYGKIQDMSGWYLTDLPGRIRVAPQQDDLDSPQQISISNAEARQALPHSYYWSAPAPYLGNKLPAVGGQLTFTISYDLEEEEEDTERVLQLMIILEGNDLSISTAQDEVYLHPSEEHTNVLLLKEESFTIHGTHFPVRRKEFMTVLANLKRVLLQITYSFGMDAIFRLSSVNLESAVSYPTDGSIAAAVEVCQCPPGYTGSSCESCWPRHRRVNGTIFGGICEPCQCFGHAESCDDVTGECLNCKDHTGGPYCDKCLPGFYGEPTKGTSEDCQPCACPLNIPSNNFSPTCHLDRSLGLICDGCPVGYTGPRCERCAEGYFGQPSVPGGSCQPCQCNDNLDFSIPGSCDSLSGSCLICKPGTTGRYCELCADGYFGDAVDAKNCQPCRCNAGGSFSEVCHSQTGQCECRANVQGQRCDKCKAGTFGLQSARGCVPCNCNSFGSKSFDCEESGQCWCQPGVTGKKCDRCAHGYFNFQEGGCTACECSHLGNNCDPKTGRCICPPNTIGEKCSKCAPNTWGHSITTGCKACNCSTVGSLDFQCNVNTGQCNCHPKFSGAKCTECSRGHWNYPRCNLCDCFLPGTDATTCDSETKKCSCSDQTGQCTCKVNVEGIHCDRCRPGKFGLDAKNPLGCSSCYCFGTTTQCSEAKGLIRTWVTLKAEQTILPLVDEALQHTTTKGIVFQHPEIVAHMDLMREDLHLEPFYWKLPEQFEGKKLMAYGGKLKYAIYFEAREETGFSTYNPQVIIRGGTPTHARIIVRHMAAPLIGQLTRHEIEMTEKEWKYYGDDPRVHRTVTREDFLDILYDIHYILIKATYGNFMRQSRISEISMEVAEQGRGTTMTPPADLIEKCDCPLGYSGLSCEACLPGFYRLRSQPGGRTPGPTLGTCVPCQCNGHSSLCDPETSICQNCQHHTAGDFCERCALGYYGIVKGLPNDCQQCACPLISSSNNFSPSCVAEGLDDYRCTACPRGYEGQYCERCAPGYTGSPGNPGGSCQECECDPYGSLPVPCDPVTGFCTCRPGATGRKCDGCKHWHAREGWECVFCGDECTGLLLGDLARLEQMVMSINLTGPLPAPYKMLYGLENMTQELKHLLSPQRAPERLIQLAEGNLNTLVTEMNELLTRATKVTADGEQTGQDAERTNTRAKSLGEFIKELARDAEAVNEKAIKLNETLGTRDEAFERNLEGLQKEIDQMIKELRRKNLETQKEIAEDELVAAEALLKKVKKLFGESRGENEEMEKDLREKLADYKNKVDDAWDLLREATDKIREANRLFAVNQKNMTALEKKKEAVESGKRQIENTLKEGNDILDEANRLADEINSIIDYVEDIQTKLPPMSEELNDKIDDLSQEIKDRKLAEKVSQAESHAAQLNDSSAVLDGILDEAKNISFNATAAFKAYSNIKDYIDEAEKVAKEAKDLAHEATKLATGPRGLLKEDAKGCLQKSFRILNEAKKLANDVKENEDHLNGLKTRIENADARNGDLLRTLNDTLGKLSAIPNDTAAKLQAVKDKARQANDTAKDVLAQITELHQNLDGLKKNYNKLADSVAKTNAVVKDPSKNNAVADADATVKNLEQEADRLIDKLKPIKELEDNLKKNISEIKELINQARKQANSIKVSVSSGGDCIRTYKPEIKKGSYNNIVVNVKTAVADNLLFYLGSAKFIDFLAIEMRKGKVSFLWDVGSGVGRVEYPDLTIDDSYWYRIVASRTGRNGTISVRALDGPKASIVPSTHHSTSPPGYTILDVDANAMLFVGGLTGKLKKADAVRVITFTGCMGETYFDNKPIGLWNFREKEGDCKGCTVSPQVEDSEGTIQFDGEGYALVSRPIRWYPNISTVMFKFRTFSSSALLMYLATRDLRDFMSVELTDGHIKVSYDLGSGMASVVSNQNHNDGKWKSFTLSRIQKQANISIVDIDTNQEENIATSSSGNNFGLDLKADDKIYFGGLPTLRNLRPEVNLKKYSGCLKDIEISRTPYNILSSPDYVGVTKGCSLENVYTVSFPKPGFVELSPVPIDVGTEINLSFSTKNESGIILLGSGGTPAPPRRKRRQTGQAYYAILLNRGRLEVHLSTGARTMRKIVIRPEPNLFHDGREHSVHVERTRGIFTVQVDENRRYMQNLTVEQPIEVKKLFVGGAPPEFQPSPLRNIPPFEGCIWNLVINSVPMDFARPVSFKNADIGRCAHQKLREDEDGAAPAEIVIQPEPVPTPAFPTPTPVLTHGPCAAESEPALLIGSKQFGLSRNSHIAIAFDDTKVKNRLTIELEVRTEAESGLLFYMARINHADFATVQLRNGLPYFSYDLGSGDTHTMIPTKINDGQWHKIKIMRSKQEGILYVDGASNRTISPKKADILDVVGMLYVGGLPINYTTRRIGPVTYSIDGCVRNLHMAEAPADLEQPTSSFHVGTCFANAQRGTYFDGTGFAKAVGGFKVGLDLLVEFEFRTTTTTGVLLGISSQKMDGMGIEMIDEKLMFHVDNGAGRFTAVYDAGVPGHLCDGQWHKVTANKIKHRIELTVDGNQVEAQSPNPASTSADTNDPVFVGGFPDDLKQFGLTTSIPFRGCIRSLKLTKGTGKPLEVNFAKALELRGVQPVSCPAN

SEQ ID NO: 44952 - protein, 1724 aa, Homo sapiens
  Payload ID: 9156
  Gene Symbol: LAMA3
  Gene Name: laminin, alpha 3
  ENSP ID: ENSP00000269217
MPPAVRRSACSMGWLWIFGAALGQCLGYSSQQQRVPFLQPPGQSQLQASYVEFRPSQGCSPGYYRDHKGLYTGRCVPCNCNGHSNQCQDGSGICVNCQHNTAGEHCERCQEGYYGNAVHGSCRACPCPHTNSFATGCVVNGGDVRCSCKAGYTGTQCERCAPGYFGNPQKFGGSCQPCSCNSNGQLGSCHPLTGDCINQEPKDSSPAEECDDCDSCVMTLLNDLATMGEQLRLVKSQLQGLSASAGLLEQMRHMETQAKDLRNQLLNYRSAISNHGSKIEGLERELTDLNQEFETLQEKAQVNSRKAQTLNNNVNRATQSAKELDVKIKNVIRNVHILLKQISGTDGEGNNVPSGDFSREWAEAQRMMRELRNRNFGKHLREAEADKRESQLLLNRIRTWQKTHQGENNGLANSIRDSLNEYEAKLSDLRARLQEAAAQAKQANGLNQENERALGAIQRQVKEINSLQSDFTKYLTTADSSLLQTNIALQLMEKSQKEYEKLAASLNEARQELSDKVRELSRSAGKTSLVEEAEKHARSLQELAKQLEEIKRNASGDELVRCAVDAATAYENILNAIKAAEDAANRAASASESALQTVIKEDLPRKAKTLSSNSDKLLNEAKMTQKKLKQEVSPALNNLQQTLNIVTVQKEVIDTNLTTLRDGLHGIQRGDIDAMISSAKSMVRKANDITDEVLDGLNPIQTDVERIKDTYGRTQNEDFKKALTDADNSVNKLTNKLPDLWRKIESINQQLLPLGNISDNMDRIRELIQQARDAASKVAVPMRFNGKSGVEVRLPNDLEDLKGYTSLSLFLQRPNSRENGGTENMFVMYLGNKDASRDYIGMAVVDGQLTCVYNLGDREAELQVDQILTKSETKEAVMDRVKFQRIYQFARLNYTKGATSSKPETPGVYDMDGRNSNTLLNLDPENVVFYVGGYPPDFKLPSRLSFPPYKGCIELDDLNENVLSLYNFKKTFNLNTTEVEPCRRRKEESDKNYFEGTGYARVPTQPHAPIPTFGQTIQTTVDRGLLFFAENGDRFISLNIEDGKLMVRYKLNSELPKERGVGDAINNGRDHSIQIKIGKLQKRMWINVDVQNTIIDGEVFDFSTYYLGGIPIAIRERFNISTPAFRGCMKNLKKTSGVVRLNDTVGVTKKCSEDWKLVRSASFSRGGQLSFTDLGLPPTDHLQASFGFQTFQPSGILLDHQTWTRNLQVTLEDGYIELSTSDSGGPIFKSPQTYMDGLLHYVSVISDNSGLRLLIDDQLLRNSKRLKHISSSRQSLRLGGSNFEGCISNVFVQRLSLSPEVLDLTSNSLKRDVSLGGCSLNKPPFLMLLKGSTRFNKTKTFRINQLLQDTPVASPRSVKVWQDACSPLPKTQANHGALQFGDIPTSHLLFKLPQELLKPRSQFAVDMQTTSSRGLVFHTGTKNSFMALYLSKGRLVFALGTDGKKLRIKSKEKCNDGKWHTVVFGHDGEKGRLVVDGLRAREGSLPGNSTISIRAPVYLGSPPSGKPKSLPTNSFVGCLKNFQLDSKPLYTPSSSFGVSSCLGGPLEKGIYFSEEGGHVVLAHSVLLGPEFKLVFSIRPRSLTGILIHIGSQPGKHLCVYLEAGKVTASMDSGAGGTSTSVTPKQSLCDGQWHSVAVTIKQHILHLELDTDSSYTAGQIPFPPASTQEPLHLGGAPANLTTLRIPVWKSFFGCLRNIHVNHIPVPVTEALEVQGPVSLNGCPDQ

SEQ ID NO: 44953 - protein, 3333 aa, Homo sapiens
  Payload ID: 9156
  Gene Symbol: LAMA3
  Gene Name: laminin, alpha 3
  Uniprot ID: Q16787
  ENSP ID: ENSP00000324532
MAAAARPRGRALGPVLPPTPLLLLVLRVLPACGATARDPGAAAGLSLHPTYFNLAEAARIWATATCGERGPGEGRPQPELYCKLVGGPTAPGSGHTIQGQFCDYCNSEDPRKAHPVTNAIDGSERWWQSPPLSSGTQYNRVNLTLDLGQLFHVAYILIKFANSPRPDLWVLERSVDFGSTYSPWQYFAHSKVDCLKEFGREANMAVTRDDDVLCVTEYSRIVPLENGEVVVSLINGRPGAKNFTFSHTLREFTKATNIRLRFLRTNTLLGHLISKAQRDPTVTRRYYYSIKDISIGGQCVCNGHAEVCNINNPEKLFRCECQHHTCGETCDRCCTGYNQRRWRPAAWEQSHECEACNCHGHASNCYYDPDVERQQASLNTQGIYAGGGVCINCQHNTAGVNCEQCAKGYYRPYGVPVDAPDGCIPCSCDPEHADGCEQGSGRCHCKPNFHGDNCEKCAIGYYNFPFCLRIPIFPVSTPSSEDPVAGDIKGCDCNLEGVLPEICDAHGRCLCRPGVEGPRCDTCRSGFYSFPICQACWCSALGSYQMPCSSVTGQCECRPGVTGQRCDRCLSGAYDFPHCQGSSSACDPAGTINSNLGYCQCKLHVEGPTCSRCKLLYWNLDKENPSGCSECKCHKAGTVSGTGECRQGDGDCHCKSHVGGDSCDTCEDGYFALEKSNYFGCQGCQCDIGGALSSMCSGPSGVCQCREHVVGKVCQRPENNYYFPDLHHMKYEIEDGSTPNGRDLRFGFDPLAFPEFSWRGYAQMTSVQNDVRITLNVGKSSGSLFRVILRYVNPGTEAVSGHITIYPSWGAAQSKEIIFLPSKEPAFVTVPGNGFADPFSITPGIWVACIKAEGVLLDYLVLLPRDYYEASVLQLPVTEPCAYAGPPQENCLLYQHLPVTRFPCTLACEARHFLLDGEPRPVAVRQPTPAHPVMVDLSGREVELHLRLRIPQVGHYVVVVEYSTEAAQLFVVDVNVKSSGSVLAGQVNIYSCNYSVLCRSAVIDHMSRIAMYELLADADIQLKGHMARFLLHQVCIIPIEEFSAEYVRPQVHCIASYGRFVNQSATCVSLAHETPPTALILDVLSGRPFPHLPQQSSPSVDVLPGVTLKAPQNQVTLRGRVPHLGRYVFVIHFYQAAHPTFPAQVSVDGGWPRAGSFHASFCPHVLGCRDQVIAEGQIEFDISEPEVAATVKVPEGKSLVLVRVLVVPAENYDYQILHKKSMDKSLEFITNCGKNSFYLDPQTASRFCKNSARSLVAFYHKGALPCECHPTGATGPHCSPEGGQCPCQPNVIGRQCTRCATGHYGFPRCKPCSCGRRLCEEMTGQCRCPPRTVRPQCEVCETHSFSFHPMAGCEGCNCSRRGTIEAAMPECDRDSGQCRCKPRITGRQCDRCASGFYRFPECVPCNCNRDGTEPGVCDPGTGACLCKENVEGTECNVCREGSFHLDPANLKGCTSCFCFGVNNQCHSSHKRRTKFVDMLGWHLETADRVDIPVSFNPGSNSMVADLQELPATIHSASWVAPTSYLGDKVSSYGGYLTYQAKSFGLPGDMVLLEKKPDVQLTGQHMSIIYEETNTPRPDRLHHGRVHVVEGNFRHASSRAPVSREELMTVLSRLADVRIQGLYFTETQRLTLSEVGLEEASDTGSGRIALAVEICACPPAYAGDSCQGCSPGYYRDHKGLYTGRCVPCNCNGHSNQCQDGSGICVNCQHNTAGEHCERCQEGYYGNAVHGSCRACPCPHTNSFATGCVVNGGDVRCSCKAGYTGTQCERCAPGYFGNPQKFGGSCQPCSCNSNGQLGSCHPLTGDCINQEPKDSSPAEECDDCDSCVMTLLNDLATMGEQLRLVKSQLQGLSASAGLLEQMRHMETQAKDLRNQLLNYRSAISNHGSKIEGLERELTDLNQEFETLQEKAQVNSRKAQTLNNNVNRATQSAKELDVKIKNVIRNVHILLKQISGTDGEGNNVPSGDFSREWAEAQRMMRELRNRNFGKHLREAEADKRESQLLLNRIRTWQKTHQGENNGLANSIRDSLNEYEAKLSDLRARLQEAAAQAKQANGLNQENERALGAIQRQVKEINSLQSDFTKYLTTADSSLLQTNIALQLMEKSQKEYEKLAASLNEARQELSDKVRELSRSAGKTSLVEEAEKHARSLQELAKQLEEIKRNASGDELVRCAVDAATAYENILNAIKAAEDAANRAASASESALQTVIKEDLPRKAKTLSSNSDKLLNEAKMTQKKLKQEVSPALNNLQQTLNIVTVQKEVIDTNLTTLRDGLHGIQRGDIDAMISSAKSMVRKANDITDEVLDGLNPIQTDVERIKDTYGRTQNEDFKKALTDADNSVNKLTNKLPDLWRKIESINQQLLPLGNISDNMDRIRELIQQARDAASKVAVPMRFNGKSGVEVRLPNDLEDLKGYTSLSLFLQRPNSRENGGTENMFVMYLGNKDASRDYIGMAVVDGQLTCVYNLGDREAELQVDQILTKSETKEAVMDRVKFQRIYQFARLNYTKGATSSKPETPGVYDMDGRNSNTLLNLDPENVVFYVGGYPPDFKLPSRLSFPPYKGCIELDDLNENVLSLYNFKKTFNLNTTEVEPCRRRKEESDKNYFEGTGYARVPTQPHAPIPTFGQTIQTTVDRGLLFFAENGDRFISLNIEDGKLMVRYKLNSELPKERGVGDAINNGRDHSIQIKIGKLQKRMWINVDVQNTIIDGEVFDFSTYYLGGIPIAIRERFNISTPAFRGCMKNLKKTSGVVRLNDTVGVTKKCSEDWKLVRSASFSRGGQLSFTDLGLPPTDHLQASFGFQTFQPSGILLDHQTWTRNLQVTLEDGYIELSTSDSGGPIFKSPQTYMDGLLHYVSVISDNSGLRLLIDDQLLRNSKRLKHISSSRQSLRLGGSNFEGCISNVFVQRLSLSPEVLDLTSNSLKRDVSLGGCSLNKPPFLMLLKGSTRFNKTKTFRINQLLQDTPVASPRSVKVWQDACSPLPKTQANHGALQFGDIPTSHLLFKLPQELLKPRSQFAVDMQTTSSRGLVFHTGTKNSFMALYLSKGRLVFALGTDGKKLRIKSKEKCNDGKWHTVVFGHDGEKGRLVVDGLRAREGSLPGNSTISIRAPVYLGSPPSGKPKSLPTNSFVGCLKNFQLDSKPLYTPSSSFGVSSCLGGPLEKGIYFSEEGGHVVLAHSVLLGPEFKLVFSIRPRSLTGILIHIGSQPGKHLCVYLEAGKVTASMDSGAGGTSTSVTPKQSLCDGQWHSVAVTIKQHILHLELDTDSSYTAGQIPFPPASTQEPLHLGGAPANLTTLRIPVWKSFFGCLRNIHVNHIPVPVTEALEVQGPVSLNGCPDQ

SEQ ID NO: 44954 - protein, 3277 aa, Homo sapiens
  Payload ID: 9156
  Gene Symbol: LAMA3
  Gene Name: laminin, alpha 3
  ENSP ID: ENSP00000382432
MAAAARPRGRALGPVLPPTPLLLLVLRVLPACGATARDPGAAAGLSLHPTYFNLAEAARIWATATCGERGPGEGRPQPELYCKLVGGPTAPGSGHTIQGQFCDYCNSEDPRKAHPVTNAIDGSERWWQSPPLSSGTQYNRVNLTLDLGQLFHVAYILIKFANSPRPDLWVLERSVDFGSTYSPWQYFAHSKVDCLKEFGREANMAVTRDDDVLCVTEYSRIVPLENGEVVVSLINGRPGAKNFTFSHTLREFTKATNIRLRFLRTNTLLGHLISKAQRDPTVTRRYYYSIKDISIGGQCVCNGHAEVCNINNPEKLFRCECQHHTCGETCDRCCTGYNQRRWRPAAWEQSHECEACNCHGHASNCYYDPDVERQQASLNTQGIYAGGGVCINCQHNTAGVNCEQCAKGYYRPYGVPVDAPDGCIPCSCDPEHADGCEQGSGRCHCKPNFHGDNCEKCAIGYYNFPFCLRIPIFPVSTPSSEDPVAGDIKGCDCNLEGVLPEICDAHGRCLCRPGVEGPRCDTCRSGFYSFPICQACWCSALGSYQMPCSSVTGQCECRPGVTGQRCDRCLSGAYDFPHCQGSSSACDPAGTINSNLGYCQCKLHVEGPTCSRCKLLYWNLDKENPSGCSECKCHKAGTVSGTGECRQGDGDCHCKSHVGGDSCDTCEDGYFALEKSNYFGCQGCQCDIGGALSSMCSGPSGVCQCREHVVGKVCQRPENNYYFPDLHHMKYEIEDGSTPNGRDLRFGFDPLAFPEFSWRGYAQMTSVQNDVRITLNVGKSSGSLFRVILRYVNPGTEAVSGHITIYPSWGAAQSKEIIFLPSKEPAFVTVPGNGFADPFSITPGIWVACIKAEGVLLDYLVLLPRDYYEASVLQLPVTEPCAYAGPPQENCLLYQHLPVTRFPCTLACEARHFLLDGEPRPVAVRQPTPAHPVMVDLSGREVELHLRLRIPQVGHYVVVVEYSTEAAQLFVVDVNVKSSGSVLAGQVNIYSCNYSVLCRSAVIDHMSRIAMYELLADADIQLKGHMARFLLHQVCIIPIEEFSAEYVRPQVHCIASYGRFVNQSATCVSLAHETPPTALILDVLSGRPFPHLPQQSSPSVDVLPGVTLKAPQNQVTLRGRVPHLGRYVFVIHFYQAAHPTFPAQVSVDGGWPRAGSFHASFCPHVLGCRDQVIAEGQIEFDISEPEVAATVKVPEGKSLVLVRVLVVPAENYDYQILHKKSMDKSLEFITNCGKNSFYLDPQTASRFCKNSARSLVAFYHKGALPCECHPTGATGPHCSPEGGQCPCQPNVIGRQCTRCATGHYGFPRCKPCSCGRRLCEEMTGQCRCPPRTVRPQCEVCETHSFSFHPMAGCEGCNCSRRGTIEAAMPECDRDSGQCRCKPRITGRQCDRCASGFYRFPECVPCNCNRDGTEPGVCDPGTGACLCKENVEGTECNVCREGSFHLDPANLKGCTSCFCFGVNNQCHSSHKRRTKFVDMLGWHLETADRVDIPVSFNPGSNSMVADLQELPATIHSASWVAPTSYLGDKVSSYGGYLTYQAKSFGLPGDMVLLEKKPDVQLTGQHMSIIYEETNTPRPDRLHHGRVHVVEGNFRHASSRAPVSREELMTVLSRLADVRIQGLYFTETQRLTLSEVGLEEASDTGSGRIALAVEICACPPAYAGDSCQGCSPGYYRDHKGLYTGRCVPCNCNGHSNQCQDGSGICVNCQHNTAGEHCERCQEGYYGNAVHGSCRACPCPHTNSFATGCVVNGGDVRCSCKAGYTGTQCERCAPGYFGNPQKFGGSCQPCSCNSNGQLGSCHPLTGDCINQEPKDSSPAEECDDCDSCVMTLLNDLATMGEQLRLVKSQLQGLSASAGLLEQMRHMETQAKDLRNQLLNYRSAISNHGSKIEGLERELTDLNQEFETLQEKAQVNSRKAQTLNNNVNRATQSAKELDVKIKNVIRNVHMLNRIRTWQKTHQGENNGLANSIRDSLNEYEAKLSDLRARLQEAAAQAKQANGLNQENERALGAIQRQVKEINSLQSDFTKYLTTADSSLLQTNIALQLMEKSQKEYEKLAASLNEARQELSDKVRELSRSAGKTSLVEEAEKHARSLQELAKQLEEIKRNASGDELVRCAVDAATAYENILNAIKAAEDAANRAASASESALQTVIKEDLPRKAKTLSSNSDKLLNEAKMTQKKLKQEVSPALNNLQQTLNIVTVQKEVIDTNLTTLRDGLHGIQRGDIDAMISSAKSMVRKANDITDEVLDGLNPIQTDVERIKDTYGRTQNEDFKKALTDADNSVNKLTNKLPDLWRKIESINQQLLPLGNISDNMDRIRELIQQARDAASKVAVPMRFNGKSGVEVRLPNDLEDLKGYTSLSLFLQRPNSRENGGTENMFVMYLGNKDASRDYIGMAVVDGQLTCVYNLGDREAELQVDQILTKSETKEAVMDRVKFQRIYQFARLNYTKGATSSKPETPGVYDMDGRNSNTLLNLDPENVVFYVGGYPPDFKLPSRLSFPPYKGCIELDDLNENVLSLYNFKKTFNLNTTEVEPCRRRKEESDKNYFEGTGYARVPTQPHAPIPTFGQTIQTTVDRGLLFFAENGDRFISLNIEDGKLMVRYKLNSELPKERGVGDAINNGRDHSIQIKIGKLQKRMWINVDVQNTIIDGEVFDFSTYYLGGIPIAIRERFNISTPAFRGCMKNLKKTSGVVRLNDTVGVTKKCSEDWKLVRSASFSRGGQLSFTDLGLPPTDHLQASFGFQTFQPSGILLDHQTWTRNLQVTLEDGYIELSTSDSGGPIFKSPQTYMDGLLHYVSVISDNSGLRLLIDDQLLRNSKRLKHISSSRQSLRLGGSNFEGCISNVFVQRLSLSPEVLDLTSNSLKRDVSLGGCSLNKPPFLMLLKGSTRFNKTKTFRINQLLQDTPVASPRSVKVWQDACSPLPKTQANHGALQFGDIPTSHLLFKLPQELLKPRSQFAVDMQTTSSRGLVFHTGTKNSFMALYLSKGRLVFALGTDGKKLRIKSKEKCNDGKWHTVVFGHDGEKGRLVVDGLRAREGSLPGNSTISIRAPVYLGSPPSGKPKSLPTNSFVGCLKNFQLDSKPLYTPSSSFGVSSCLGGPLEKGIYFSEEGGHVVLAHSVLLGPEFKLVFSIRPRSLTGILIHIGSQPGKHLCVYLEAGKVTASMDSGAGGTSTSVTPKQSLCDGQWHSVAVTIKQHILHLELDTDSSYTAGQIPFPPASTQEPLHLGGAPANLTTLRIPVWKSFFGCLRNIHVNHIPVPVTEALEVQGPVSLNGCPDQ

SEQ ID NO: 44955 - protein, 1147 aa, Homo sapiens
  Payload ID: 9156
  Gene Symbol: LAMA3
  Gene Name: laminin, alpha 3
  ENSP ID: ENSP00000464836
  MOD_RES (1)..(1): Any amino acid
XFATGCVVNGGDVRCSCKAGYTGTQCERCAPGYFGNPQKFGGSCQPCSCNSNGQLGSCHPLTGDCINQEPKDSSPAEECDDCDSCVMTLLNDLATMGEQLRLVKSQLQGLSASAGLLEQMRHMETQAKDLRNQLLNYRSAISNHGSKIEGLERELTDLNQEFETLQEKAQVNSRKAQTLNNNVNRATQSAKELDVKIKNVIRNVHILLKQISGTDGEGNNVPSGDFSREWAEAQRMMRELRNRNFGKHLREAEADKRESQLLLNRIRTWQKTHQGENNGLANSIRDSLNEYEAKLSDLRARLQEAAAQAKQANGLNQENERALGAIQRQVKEINSLQSDFTKYLTTADSSLLQTNIALQLMEKSQKEYEKLAASLNEARQELSDKVRELSRSAGKTSLVEEAEKHARSLQELAKQLEEIKRNASGDELVRCAVDAATAYENILNAIKAAEDAANRAASASESALQTVIKEDLPRKAKTLSSNSDKLLNEAKMTQKKLKQEVSPALNNLQQTLNIVTVQKEVIDTNLTTLRDGLHGIQRGDIDAMISSAKSMVRKANDITDEVLDGLNPIQTDVERIKDTYGRTQNEDFKKALTDADNSVNKLTNKLPDLWRKIESINQQLLPLGNISDNMDRIRELIQQARDAASKVAVPMRFNGKSGVEVRLPNDLEDLKGYTSLSLFLQRPNSRENGGTENMFVMYLGNKDASRDYIGMAVVDGQLTCVYNLGDREAELQVDQILTKSETKEAVMDRVKFQRIYQFARLNYTKGATSSKPETPGVYDMDGRNSNTLLNLDPENVVFYVGGYPPDFKLPSRLSFPPYKGCIELDDLNENVLSLYNFKKTFNLNTTEVEPCRRRKEESDKNYFEGTGYARVPTQPHAPIPTFGQTIQTTVDRGLLFFAENGDRFISLNIEDGKLMVRYKLNSELPKERGVGDAINNGRDHSIQIKIGKLQKRMWINVDVQNTIIDGEVFDFSTYYLGGIPIAIRERFNISTPAFRGCMKNLKKTSGVVRLNDTVGVTKKCSEDWKLVRSASFSRGGQLSFTDLGLPPTDHLQASFGFQTFQPSGILLDHQTWTRNLQVTLEDGYIELSTSDSGGPIFKSPQTYMDGLLHYVSVISDNSGLRQEGCLRPRVRDQSWKHSETMSLRKLK

SEQ ID NO: 44956 - protein, 1668 aa, Homo sapiens
  Payload ID: 9156
  Gene Symbol: LAMA3
  Gene Name: laminin, alpha 3
  ENSP ID: ENSP00000466557
MPPAVRRSACSMGWLWIFGAALGQCLGYSSQQQRVPFLQPPGQSQLQASYVEFRPSQGCSPGYYRDHKGLYTGRCVPCNCNGHSNQCQDGSGICVNCQHNTAGEHCERCQEGYYGNAVHGSCRACPCPHTNSFATGCVVNGGDVRCSCKAGYTGTQCERCAPGYFGNPQKFGGSCQPCSCNSNGQLGSCHPLTGDCINQEPKDSSPAEECDDCDSCVMTLLNDLATMGEQLRLVKSQLQGLSASAGLLEQMRHMETQAKDLRNQLLNYRSAISNHGSKIEGLERELTDLNQEFETLQEKAQVNSRKAQTLNNNVNRATQSAKELDVKIKNVIRNVHMLNRIRTWQKTHQGENNGLANSIRDSLNEYEAKLSDLRARLQEAAAQAKQANGLNQENERALGAIQRQVKEINSLQSDFTKYLTTADSSLLQTNIALQLMEKSQKEYEKLAASLNEARQELSDKVRELSRSAGKTSLVEEAEKHARSLQELAKQLEEIKRNASGDELVRCAVDAATAYENILNAIKAAEDAANRAASASESALQTVIKEDLPRKAKTLSSNSDKLLNEAKMTQKKLKQEVSPALNNLQQTLNIVTVQKEVIDTNLTTLRDGLHGIQRGDIDAMISSAKSMVRKANDITDEVLDGLNPIQTDVERIKDTYGRTQNEDFKKALTDADNSVNKLTNKLPDLWRKIESINQQLLPLGNISDNMDRIRELIQQARDAASKVAVPMRFNGKSGVEVRLPNDLEDLKGYTSLSLFLQRPNSRENGGTENMFVMYLGNKDASRDYIGMAVVDGQLTCVYNLGDREAELQVDQILTKSETKEAVMDRVKFQRIYQFARLNYTKGATSSKPETPGVYDMDGRNSNTLLNLDPENVVFYVGGYPPDFKLPSRLSFPPYKGCIELDDLNENVLSLYNFKKTFNLNTTEVEPCRRRKEESDKNYFEGTGYARVPTQPHAPIPTFGQTIQTTVDRGLLFFAENGDRFISLNIEDGKLMVRYKLNSELPKERGVGDAINNGRDHSIQIKIGKLQKRMWINVDVQNTIIDGEVFDFSTYYLGGIPIAIRERFNISTPAFRGCMKNLKKTSGVVRLNDTVGVTKKCSEDWKLVRSASFSRGGQLSFTDLGLPPTDHLQASFGFQTFQPSGILLDHQTWTRNLQVTLEDGYIELSTSDSGGPIFKSPQTYMDGLLHYVSVISDNSGLRLLIDDQLLRNSKRLKHISSSRQSLRLGGSNFEGCISNVFVQRLSLSPEVLDLTSNSLKRDVSLGGCSLNKPPFLMLLKGSTRFNKTKTFRINQLLQDTPVASPRSVKVWQDACSPLPKTQANHGALQFGDIPTSHLLFKLPQELLKPRSQFAVDMQTTSSRGLVFHTGTKNSFMALYLSKGRLVFALGTDGKKLRIKSKEKCNDGKWHTVVFGHDGEKGRLVVDGLRAREGSLPGNSTISIRAPVYLGSPPSGKPKSLPTNSFVGCLKNFQLDSKPLYTPSSSFGVSSCLGGPLEKGIYFSEEGGHVVLAHSVLLGPEFKLVFSIRPRSLTGILIHIGSQPGKHLCVYLEAGKVTASMDSGAGGTSTSVTPKQSLCDGQWHSVAVTIKQHILHLELDTDSSYTAGQIPFPPASTQEPLHLGGAPANLTTLRIPVWKSFFGCLRNIHVNHIPVPVTEALEVQGPVSLNGCPDQ

SEQ ID NO: 44957 - protein, 37 aa, Homo sapiens
  Payload ID: 9156
  Gene Symbol: LAMA3
  Gene Name: laminin, alpha 3
  ENSP ID: ENSP00000466658
  MOD_RES (1)..(1): Any amino acid
XGWTEGPGGKFAWKLHHQHQSASLPGITSIRETKGAG

SEQ ID NO: 44958 - protein, 94 aa, Homo sapiens
  Payload ID: 9156
  Gene Symbol: LAMA3
  Gene Name: laminin, alpha 3
  ENSP ID: ENSP00000467473
LVRSASFSRGGQLSFTDLGLPPTDHLQASFGFQTFQPSGILLDHQTWTRNLQVTLEDGYIELSTSDSGGPIFKSPQTYMDGLLHYVSVISDNSG

SEQ ID NO: 44959 - protein, 59 aa, Homo sapiens
  Payload ID: 9156
  Gene Symbol: LAMA3
  Gene Name: laminin, alpha 3
  ENSP ID: ENSP00000467662
  MOD_RES (1)..(1): Any amino acid
XAGQVNIYSCNYRCDAMNSLLSPQRLCQVPGCIAQGKRLILSNVRGCTPTFATHLQNWG

SEQ ID NO: 44960 - protein, 134 aa, Homo sapiens
  Payload ID: 9156
  Gene Symbol: LAMA3
  Gene Name: laminin, alpha 3
  ENSP ID: ENSP00000468315
  MOD_RES (1)..(1): Any amino acid
XFSEEGGHVVLAHSVLLGPEFKLVFSIRPRSLTGILIHIGSQPGKHLCVYLEAGKVTASMDSGAGGTSTSVTPKQSLCDGQWHSVAANLTTLRIPVWKSFFGCLRNIHVNHIPVPVTEALEVQGPVSLNGCPDQ

SEQ ID NO: 44961 - protein, 576 aa, Homo sapiens
  Payload ID: 9156
  Gene Symbol: LAMA3
  Gene Name: laminin, alpha 3
  ENSP ID: ENSP00000468316
MAAAARPRGRALGPVLPPTPLLLLVLRVLPACGATARDPGAAAGLSLHPTYFNLAEAARIWATATCGERGPGEGRPQPELYCKLVGGPTAPGSGHTIQGQFCDYCNSEDPRKAHPVTNAIDGSERWWQSPPLSSGTQYNRVNLTLDLGQLFHVAYILIKFANSPRPDLWVLERSVDFGSTYSPWQYFAHSKVDCLKEFGREANMAVTRDDDVLCVTEYSRIVPLENGEVVVSLINGRPGAKNFTFSHTLREFTKATNIRLRFLRTNTLLGHLISKAQRDPTVTRRYYYSIKDISIGGQCVCNGHAEVCNINNPEKLFRCECQHHTCGETCDRCCTGYNQRRWRPAAWEQSHECEACNCHGHASNCYYDPDVERQQASLNTQGIYAGGGVCINCQHNTAGVNCEQCAKGYYRPYGVPVDAPDGCIPCSCDPEHADGCEQGSGRCHCKPNFHGDNCEKCAIGYYNFPFCLRIPIFPVSTPSSEDPVAGDIKGCDCNLEGVLPEICDAHGRCLCRPGVEGPRCDTCRSGFYSFPICQGPSEKVAIYKPESRPSAETEPASTWILDFPASRTGEINFYCL

SEQ ID NO: 44962 - protein, 1823 aa, Homo sapiens
  Payload ID: 9157
  Gene Symbol: LAMA4
  Gene Name: laminin, alpha 4
  ENSP ID: ENSP00000230538
MALSSAWRSVLPLWLLWSAACSRAASGDDNAFPFDIEGSSAVGRQDPPETSEPRVALGRLPPAAEKCNAGFFHTLSGECVPCDCNGNSNECLDGSGYCVHCQRNTTGEHCEKCLDGYIGDSIRGAPQFCQPCPCPLPHLANFAESCYRKNGAVRCICNENYAGPNCERCAPGYYGNPLLIGSTCKKCDCSGNSDPNLIFEDCDEVTGQCRNCLRNTTGFKCERCAPGYYGDARIAKNCAVCNCGGGPCDSVTGECLEEGFEPPTGMDCPTISCDKCVWDLTDDLRLAALSIEEGKSGVLSVSSGAAAHRHVNEINATIYLLKTKLSERENQYALRKIQINNAENTMKSLLSDVEELVEKENQASRKGQLVQKESMDTINHASQLVEQAHDMRDKIQEINNKMLYYGEEHELSPKEISEKLVLAQKMLEEIRSRQPFFTQRELVDEEADEAYELLSQAESWQRLHNETRTLFPVVLEQLDDYNAKLSDLQEALDQALNYVRDAEDMNRATAARQRDHEKQQERVREQMEVVNMSLSTSADSLTTPRLTLSELDDIIKNASGIYAEIDGAKSELQVKLSNLSNLSHDLVQEAIDHAQDLQQEANELSRKLHSSDMNGLVQKALDASNVYENIVNYVSEANETAEFALNTTDRIYDAVSGIDTQIIYHKDESENLLNQARELQAKAESSSDEAVADTSRRVGGALARKSALKTRLSDAVKQLQAAERGDAQQRLGQSRLITEEANRTTMEVQQATAPMANNLTNWSQNLQHFDSSAYNTAVNSARDAVRNLTEVVPQLLDQLRTVEQKRPASNVSASIQRIRELIAQTRSVASKIQVSMMFDGQSAVEVHSRTSMDDLKAFTSLSLYMKPPVKRPELTETADQFILYLGSKNAKKEYMGLAIKNDNLVYVYNLGTKDVEIPLDSKPVSSWPAYFSIVKIERVGKHGKVFLTVPSLSSTAEEKFIKKGEFSGDDSLLDLDPEDTVFYVGGVPSNFKLPTSLNLPGFVGCLELATLNNDVISLYNFKHIYNMDPSTSVPCARDKLAFTQSRAASYFFDGSGYAVVRDITRRGKFGQVTRFDIEVRTPADNGLILLMVNGSMFFRLEMRNGYLHVFYDFGFSGGPVHLEDTLKKAQINDAKYHEISIIYHNDKKMILVVDRRHVKSMDNEKMKIPFTDIYIGGAPPEILQSRALRAHLPLDINFRGCMKGFQFQKKDFNLLEQTETLGVGYGCPEDSLISRRAYFNGQSFIASIQKISFFDGFEGGFNFRTLQPNGLLFYYASGSDVFSISLDNGTVIMDVKGIKVQSVDKQYNDGLSHFVISSVSPTRYELIVDKSRVGSKNPTKGKIEQTQASEKKFYFGGSPISAQYANFTGCISNAYFTRVDRDVEVEDFQRYTEKVHTSLYECPIESSPLFLLHKKGKNLSKPKASQNKKGGKSKDAPSWDPVALKLPERNTPRNSHCHLSNSPRAIEHAYQYGGTANSRQEFEHLKGDFGAKSQFSIRLRTRSSHGMIFYVSDQEENDFMTLFLAHGRLVYMFNVGHKKLKIRSQEKYNDGLWHDVIFIRERSSGRLVIDGLRVLEESLPPTEATWKIKGPIYLGGVAPGKAVKNVQINSIYSFSGCLSNLQLNGASITSASQTFSVTPCFEGPMETGTYFSTEGGYVVLDESFNIGLKFEIAFEVRPRSSSGTLVHGHSVNGEYLNVHMKNGQVIVKVNNGIRDFSTSVTPKQSLCDGRWHRITVIRDSNVVQLDVDSEVNHVVGPLNPKPIDHREPVFVGGVPESLLTPRLAPSKPFTGCIRHFVIDGHPVSFSKAALVSGAVSINSCPAA

SEQ ID NO: 44963 - protein, 87 aa, Homo sapiens
  Payload ID: 9157
  Gene Symbol: LAMA4
  Gene Name: laminin, alpha 4
  ENSP ID: ENSP00000243219
MALSSAWRSVLPLWLLWSAACSRAASGDDNAFPFDIEGSSAVGRQDPPETSEPRVALGRLPPAAEKCNAGFFHTLSGECVPCDCNGN

SEQ ID NO: 44964 - protein, 120 aa, Homo sapiens
  Payload ID: 9157
  Gene Symbol: LAMA4
  Gene Name: laminin, alpha 4
  Uniprot ID: Q16363
  ENSP ID: ENSP00000357627
MALSSAWRSVLPLWLLWSAACSRAASGDDNAFPFDIEGSSAVGRQDPPETSEPRVALGRLPPAAEVQCPCHCHPAGAPAPPRAVPHSSFSLSPPLSSPQCLESFTWARSVRKLEIKSFPL

SEQ ID NO: 44965 - protein, 178 aa, Homo sapiens
  Payload ID: 9157
  Gene Symbol: LAMA4
  Gene Name: laminin, alpha 4
  ENSP ID: ENSP00000357629
  MOD_RES (1)..(1): Any amino acid
XIFEDCDEVTGQCRNCLRNTTGFKCERCAPGYYGDARIAKNCAVCNCGGGPCDSVTGECLEEGFEPPTGMDCPTISCDKCVWDLTDDLRLAALSIEEGKSGVLSVSSGAAAHRHVNEINATIYLLKTKLSERENQYALRKIQINNAENTMKSLLSDVEELVEKHWNKPRRRLELQEGV

SEQ ID NO: 44966 - protein, 1816 aa, Homo sapiens
  Payload ID: 9157
  Gene Symbol: LAMA4
  Gene Name: laminin, alpha 4
  ENSP ID: ENSP00000374114
MALSSAWRSVLPLWLLWSAACSRAASGDDNAFPFDIEGSSAVGRQDPPETSEPRVALGRLPPAAEKCNAGFFHTLSGECVPCDCNGNSNECLDGSGYCVHCQRNTTGEHCEKCLDGYIGDSIRGAPQFCQPCPCPLPHLANFAESCYRKNGAVRCICNENYAGPNCERCAPGYYGNPLLIGSTCKKCDCSGNSDPNLIFEDCDEVTGQCRNCLRNTTGFKCERCAPGYYGDARIAKNCAVCNCGGGPCDSVTGECLEEGFEPPTGCDKCVWDLTDDLRLAALSIEEGKSGVLSVSSGAAAHRHVNEINATIYLLKTKLSERENQYALRKIQINNAENTMKSLLSDVEELVEKENQASRKGQLVQKESMDTINHASQLVEQAHDMRDKIQEINNKMLYYGEEHELSPKEISEKLVLAQKMLEEIRSRQPFFTQRELVDEEADEAYELLSQAESWQRLHNETRTLFPVVLEQLDDYNAKLSDLQEALDQALNYVRDAEDMNRATAARQRDHEKQQERVREQMEVVNMSLSTSADSLTTPRLTLSELDDIIKNASGIYAEIDGAKSELQVKLSNLSNLSHDLVQEAIDHAQDLQQEANELSRKLHSSDMNGLVQKALDASNVYENIVNYVSEANETAEFALNTTDRIYDAVSGIDTQIIYHKDESENLLNQARELQAKAESSSDEAVADTSRRVGGALARKSALKTRLSDAVKQLQAAERGDAQQRLGQSRLITEEANRTTMEVQQATAPMANNLTNWSQNLQHFDSSAYNTAVNSARDAVRNLTEVVPQLLDQLRTVEQKRPASNVSASIQRIRELIAQTRSVASKIQVSMMFDGQSAVEVHSRTSMDDLKAFTSLSLYMKPPVKRPELTETADQFILYLGSKNAKKEYMGLAIKNDNLVYVYNLGTKDVEIPLDSKPVSSWPAYFSIVKIERVGKHGKVFLTVPSLSSTAEEKFIKKGEFSGDDSLLDLDPEDTVFYVGGVPSNFKLPTSLNLPGFVGCLELATLNNDVISLYNFKHIYNMDPSTSVPCARDKLAFTQSRAASYFFDGSGYAVVRDITRRGKFGQVTRFDIEVRTPADNGLILLMVNGSMFFRLEMRNGYLHVFYDFGFSGGPVHLEDTLKKAQINDAKYHEISIIYHNDKKMILVVDRRHVKSMDNEKMKIPFTDIYIGGAPPEILQSRALRAHLPLDINFRGCMKGFQFQKKDFNLLEQTETLGVGYGCPEDSLISRRAYFNGQSFIASIQKISFFDGFEGGFNFRTLQPNGLLFYYASGSDVFSISLDNGTVIMDVKGIKVQSVDKQYNDGLSHFVISSVSPTRYELIVDKSRVGSKNPTKGKIEQTQASEKKFYFGGSPISAQYANFTGCISNAYFTRVDRDVEVEDFQRYTEKVHTSLYECPIESSPLFLLHKKGKNLSKPKASQNKKGGKSKDAPSWDPVALKLPERNTPRNSHCHLSNSPRAIEHAYQYGGTANSRQEFEHLKGDFGAKSQFSIRLRTRSSHGMIFYVSDQEENDFMTLFLAHGRLVYMFNVGHKKLKIRSQEKYNDGLWHDVIFIRERSSGRLVIDGLRVLEESLPPTEATWKIKGPIYLGGVAPGKAVKNVQINSIYSFSGCLSNLQLNGASITSASQTFSVTPCFEGPMETGTYFSTEGGYVVLDESFNIGLKFEIAFEVRPRSSSGTLVHGHSVNGEYLNVHMKNGQVIVKVNNGIRDFSTSVTPKQSLCDGRWHRITVIRDSNVVQLDVDSEVNHVVGPLNPKPIDHREPVFVGGVPESLLTPRLAPSKPFTGCIRHFVIDGHPVSFSKAALVSGAVSINSCPAA

SEQ ID NO: 44967 - protein, 120 aa, Homo sapiens; identical to SEQ ID NO: 44964
  Payload ID: 9157
  Gene Symbol: LAMA4
  Gene Name: laminin, alpha 4
  Uniprot ID: Q16363
  ENSP ID: ENSP00000398226

SEQ ID NO: 44968 - protein, 120 aa, Homo sapiens; identical to SEQ ID NO: 44964
  Payload ID: 9157
  Gene Symbol: LAMA4
  Gene Name: laminin, alpha 4
  Uniprot ID: Q16363
  ENSP ID: ENSP00000408604

SEQ ID NO: 44969 - protein, 129 aa, Homo sapiens
  Payload ID: 9157
  Gene Symbol: LAMA4
  Gene Name: laminin, alpha 4
  ENSP ID: ENSP00000412136
MALSSAWRSVLPLWLLWSAACSRAASGDDNAFPFDIEGSSAVGRQDPPETSEPRVALGRLPPAAEKCNAGFFHTLSGECVPCDCNGNSNECLDGSGYCVTTDGEDPGFSASALSFILSSQGAREARAPT

SEQ ID NO: 44970 - protein, 1816 aa, Homo sapiens; identical to SEQ ID NO: 44966
  Payload ID: 9157
  Gene Symbol: LAMA4
  Gene Name: laminin, alpha 4
  ENSP ID: ENSP00000416470

SEQ ID NO: 44971 - protein, 188 aa, Homo sapiens
  Payload ID: 9157
  Gene Symbol: LAMA4
  Gene Name: laminin, alpha 4
  ENSP ID: ENSP00000427837
  MOD_RES (1)..(1): Any amino acid
XKNASGIYAEIDGAKSELQVKLSNLSNLSHDLVQEAIDHAQDLQQEANELSRKLHSSDMNGLVQKALDASNVYENIVNYVSEANETAEFALNTTDRIYDAVSGIDTQIIYHKDESENLLNQARELQAKAESSSDEAVADTSRRVGGALARKSALKTRLSDAVKQLQAAERGKHQRELKSHLLIHWSVR

SEQ ID NO: 44972 - protein, 187 aa, Homo sapiens
  Payload ID: 9157
  Gene Symbol: LAMA4
  Gene Name: laminin, alpha 4
  ENSP ID: ENSP00000427865
  MOD_RES (1)..(1): Any amino acid
XSTCKKCDCSGNSDPNLIFEDCDEVTGQCRNCLRNTTGFKCERCAPGYYGDARIAKNCAVCNCGGGPCDSVTGECLEEGFEPPTGCDKCVWDLTDDLRLAALSIEEGKSGVLSVSSGAAAHRHVNEINATIYLLKTKLSERENQYALRKIQINNAENTMKSLLSDVEELVEKHWNKPRRRLELQEGV

SEQ ID NO: 44973 - protein, 106 aa, Homo sapiens
  Payload ID: 9157
  Gene Symbol: LAMA4
  Gene Name: laminin, alpha 4
  ENSP ID: ENSP00000428583
MALSSAWRSVLPLWLLWSAACSRAASGDDNAFPFDIEGSSAVGRQDPPETSEPRVALGRLPPAAEKCNAGFFHTLSGECVPCDCNGNSNECLDGSGYCVHCQRNTT

SEQ ID NO: 44974 - protein, 1816 aa, Homo sapiens; identical to SEQ ID NO: 44966
  Payload ID: 9157
  Gene Symbol: LAMA4
  Gene Name: laminin, alpha 4
  ENSP ID: ENSP00000429488

SEQ ID NO: 44975 - protein, 331 aa, Homo sapiens
  Payload ID: 9157
  Gene Symbol: LAMA4
  Gene Name: laminin, alpha 4
  ENSP ID: ENSP00000430336
MALSSAWRSVLPLWLLWSAACSRAASGDDNAFPFDIEGSSAVGRQDPPETSEPRVALGRLPPAAEKCNAGFFHTLSGECVPCDCNGNSNECLDGSGYCVHCQRNTTGEHCEKCLDGYIGDSIRGAPQFCQPCPCPLPHLANFAESCYRKNGAVRCICNENYAGPNCERCAPGYYGNPLLIGSTCKKCDCSGNSDPNLIFEDCDEVTGQCRNCLRNTTGFKCERCAPGYYGDARIAKNCAVCNCGGGPCDSVTGECLEEGFEPPTGMDCPTISCDKCVWDLTDDLRLAALSIEEGKSGVLSVSSGAAAHRHVNEINATIYLLKTKLSERENQ

SEQ ID NO: 44976 - protein, 81 aa, Homo sapiens
  Payload ID: 9157
  Gene Symbol: LAMA4
  Gene Name: laminin, alpha 4
  ENSP ID: ENSP00000430415
MALSSAWRSVLPLWLLWSAACSRAASGDDNAFPFDIEGSSAVGRQDPPETSEPRVALGRLPPAAEKCNAGFFHTLSGECVP

SEQ ID NO: 44977 - protein, 3695 aa, Homo sapiens
  Payload ID: 9158
  Gene Symbol: LAMA5
  Gene Name: laminin, alpha 5
  Uniprot ID: O15230
  ENSP ID: ENSP00000252999
MAKRLCAGSALCVRGPRGPAPLLLVGLALLGAARAREEAGGGFSLHPPYFNLAEGARIAASATCGEEAPARGSPRPTEDLYCKLVGGPVAGGDPNQTIRGQYCDICTAANSNKAHPASNAIDGTERWWQSPPLSRGLEYNEVNVTLDLGQVFHVAYVLIKFANSPRPDLWVLERSMDFGRTYQPWQFFASSKRDCLERFGPQTLERITRDDAAICTTEYSRIVPLENGEIVVSLVNGRPGAMNFSYSPLLREFTKATNVRLRFLRTNTLLGHLMGKALRDPTVTRRYYYSIKDISIGGRCVCHGHADACDAKDPTDPFRLQCTCQHNTCGGTCDRCCPGFNQQPWKPATANSANECQSCNCYGHATDCYYDPEVDRRRASQSLDGTYQGGGVCIDCQHHTTGVNCERCLPGFYRSPNHPLDSPHVCRRCNCESDFTDGTCEDLTGRCYCRPNFSGERCDVCAEGFTGFPSCYPTPSSSNDTREQVLPAGQIVNCDCSAAGTQGNACRKDPRVGRCLCKPNFQGTHCELCAPGFYGPGCQPCQCSSPGVADDRCDPDTGQCRCRVGFEGATCDRCAPGYFHFPLCQLCGCSPAGTLPEGCDEAGRCLCQPEFAGPHCDRCRPGYHGFPNCQACTCDPRGALDQLCGAGGLCRCRPGYTGTACQECSPGFHGFPSCVPCHCSAEGSLHAACDPRSGQCSCRPRVTGLRCDTCVPGAYNFPYCEAGSCHPAGLAPVDPALPEAQVPCMCRAHVEGPSCDRCKPGFWGLSPSNPEGCTRCSCDLRGTLGGVAECQPGTGQCFCKPHVCGQACASCKDGFFGLDQADYFGCRSCRCDIGGALGQSCEPRTGVCRCRPNTQGPTCSEPARDHYLPDLHHLRLELEEAATPEGHAVRFGFNPLEFENFSWRGYAQMAPVQPRIVARLNLTSPDLFWLVFRYVNRGAMSVSGRVSVREEGRSATCANCTAQSQPVAFPPSTEPAFITVPQRGFGEPFVLNPGTWALRVEAEGVLLDYVVLLPSAYYEAALLQLRVTEACTYRPSAQQSGDNCLLYTHLPLDGFPSAAGLEALCRQDNSLPRPCPTEQLSPSHPPLITCTGSDVDVQLQVAVPQPGRYALVVEYANEDARQEVGVAVHTPQRAPQQGLLSLHPCLYSTLCRGTARDTQDHLAVFHLDSEASVRLTAEQARFFLHGVTLVPIEEFSPEFVEPRVSCISSHGAFGPNSAACLPSRFPKPPQPIILRDCQVIPLPPGLPLTHAQDLTPAMSPAGPRPRPPTAVDPDAEPTLLREPQATVVFTTHVPTLGRYAFLLHGYQPAHPTFPVEVLINAGRVWQGHANASFCPHGYGCRTLVVCEGQALLDVTHSELTVTVRVPKGRWLWLDYVLVVPENVYSFGYLREEPLDKSYDFISHCAAQGYHISPSSSSLFCRNAAASLSLFYNNGARPCGCHEVGATGPTCEPFGGQCPCHAHVIGRDCSRCATGYWGFPNCRPCDCGARLCDELTGQCICPPRTIPPDCLLCQPQTFGCHPLVGCEECNCSGPGIQELTDPTCDTDSGQCKCRPNVTGRRCDTCSPGFHGYPRCRPCDCHEAGTAPGVCDPLTGQCYCKENVQGPKCDQCSLGTFSLDAANPKGCTRCFCFGATERCRSSSYTRQEFVDMEGWVLLSTDRQVVPHERQPGTEMLRADLRHVPEAVPEAFPELYWQAPPSYLGDRVSSYGGTLRYELHSETQRGDVFVPMESRPDVVLQGNQMSITFLEPAYPTPGHVHRGQLQLVEGNFRHTETRNTVSREELMMVLASLEQLQIRALFSQISSAVFLRRVALEVASPAGQGALASNVELCLCPASYRGDSCQECAPGFYRDVKGLFLGRCVPCQCHGHSDRCLPGSGVCVDCQHNTEGAHCERCQAGFVSSRDDPSAPCVSCPCPLSVPSNNFAEGCVLRGGRTQCLCKPGYAGASCERCAPGFFGNPLVLGSSCQPCDCSGNGDPNLLFSDCDPLTGACRGCLRHTTGPRCEICAPGFYGNALLPGNCTRCDCTPCGTEACDPHSGHCLCKAGVTGRRCDRCQEGHFGFDGCGGCRPCACGPAAEGSECHPQSGQCHCRPGTMGPQCRECAPGYWGLPEQGCRRCQCPGGRCDPHTGRCNCPPGLSGERCDTCSQQHQVPVPGGPVGHSIHCEVCDHCVVLLLDDLERAGALLPAIHEQLRGINASSMAWARLHRLNASIADLQSQLRSPLGPRHETAQQLEVLEQQSTSLGQDARRLGGQAVGTRDQASQLLAGTEATLGHAKTLLAAIRAVDRTLSELMSQTGHLGLANASAPSGEQLLRTLAEVERLLWEMRARDLGAPQAAAEAELAAAQRLLARVQEQLSSLWEENQALATQTRDRLAQHEAGLMDLREALNRAVDATREAQELNSRNQERLEEALQRKQELSRDNATLQATLHAARDTLASVFRLLHSLDQAKEELERLAASLDGARTPLLQRMQTFSPAGSKLRLVEAAEAHAQQLGQLALNLSSIILDVNQDRLTQRAIEASNAYSRILQAVQAAEDAAGQALQQADHTWATVVRQGLVDRAQQLLANSTALEEAMLQEQQRLGLVWAALQGARTQLRDVRAKKDQLEAHIQAAQAMLAMDTDETSKKIAHAKAVAAEAQDTATRVQSQLQAMQENVERWQGQYEGLRGQDLGQAVLDAGHSVSTLEKTLPQLLAKLSILENRGVHNASLALSASIGRVRELIAQARGAASKVKVPMKFNGRSGVQLRTPRDLADLAAYTALKFYLQGPEPEPGQGTEDRFVMYMGSRQATGDYMGVSLRDKKVHWVYQLGEAGPAVLSIDEDIGEQFAAVSLDRTLQFGHMSVTVERQMIQETKGDTVAPGAEGLLNLRPDDFVFYVGGYPSTFTPPPLLRFPGYRGCIEMDTLNEEVVSLYNFERTFQLDTAVDRPCARSKSTGDPWLTDGSYLDGTGFARISFDSQISTTKRFEQELRLVSYSGVLFFLKQQSQFLCLAVQEGSLVLLYDFGAGLKKAVPLQPPPPLTSASKAIQVFLLGGSRKRVLVRVERATVYSVEQDNDLELADAYYLGGVPPDQLPPSLRRLFPTGGSVRGCVKGIKALGKYVDLKRLNTTGVSAGCTADLLVGRAMTFHGHGFLRLALSNVAPLTGNVYSGFGFHSAQDSALLYYRASPDGLCQVSLQQGRVSLQLLRTEVKTQAGFADGAPHYVAFYSNATGVWLYVDDQLQQMKPHRGPPPELQPQPEGPPRLLLGGLPESGTIYNFSGCISNVFVQRLLGPQRVFDLQQNLGSVNVSTGCAPALQAQTPGLGPRGLQATARKASRRSRQPARHPACMLPPHLRTTRDSYQFGGSLSSHLEFVGILARHRNWPSLSMHVLPRSSRGLLLFTARLRPGSPSLALFLSNGHFVAQMEGLGTRLRAQSRQRSRPGRWHKVSVRWEKNRILLVTDGARAWSQEGPHRQHQGAEHPQPHTLFVGGLPASSHSSKLPVTVGFSGCVKRLRLHGRPLGAPTRMAGVTPCILGPLEAGLFFPGSGGVITLDLPGATLPDVGLELEVRPLAVTGLIFHLGQARTPPYLQLQVTEKQVLLRADDGAGEFSTSVTRPSVLCDGQWHRLAVMKSGNVLRLEVDAQSNHTVGPLLAAAAGAPAPLYLGGLPEPMAVQPWPPAYCGCMRRLAVNRSPVAMTRSVEVHGAVGASGCPAA

SEQ ID NO: 44978 - protein, 38 aa, Homo sapiens
  Payload ID: 9158
  Gene Symbol: LAMA5
  Gene Name: laminin, alpha 5
  ENSP ID: ENSP00000420069
CVPGAYNFPYCEGAVWWDGTSVAAEGAGRCVFSGRPCG

SEQ ID NO: 44979 - protein, 241 aa, Homo sapiens
  Payload ID: 9158
  Gene Symbol: LAMA5
  Gene Name: laminin, alpha 5
  ENSP ID: ENSP00000481814
RLRFLRTNTLLGHLMGKALRDPTVTRRYYYSIKDISIGGRCVCHGHADACDAKDPTDPFSSPNLSGHNRQLPCCPSPDLHSSQAGTKAQDGDGRVGAANTPHLLCPVCLLSGAAEGTAEHPPPGSPSQDGQQPWCWHRHIPGPHPESSVRLQCTCQHNTCGGTCDRCCPGFNQQPWKPATANSANECQSCNCYGHATDCYYDPEVDRRRASQSLDGTYQGGGVCIDCQHHTTGVNCERCLP

SEQ ID NO: 44980 - protein, 1786 aa, Homo sapiens
  Payload ID: 9159
  Gene Symbol: LAMB1
  Gene Name: laminin, beta 1
  Uniprot ID: P07942
  ENSP ID: ENSP00000222399
MGLLQLLAFSFLALCRARVRAQEPEFSYGCAEGSCYPATGDLLIGRAQKLSVTSTCGLHKPEPYCIVSHLQEDKKCFICNSQDPYHETLNPDSHLIENVVTTFAPNRLKIWWQSENGVENVTIQLDLEAEFHFTHLIMTFKTFRPAAMLIERSSDFGKTWGVYRYFAYDCEASFPGISTGPMKKVDDIICDSRYSDIEPSTEGEVIFRALDPAFKIEDPYSPRIQNLLKITNLRIKFVKLHTLGDNLLDSRMEIREKYYYAVYDMVVRGNCFCYGHASECAPVDGFNEEVEGMVHGHCMCRHNTKGLNCELCMDFYHDLPWRPAEGRNSNACKKCNCNEHSISCHFDMAVYLATGNVSGGVCDDCQHNTMGRNCEQCKPFYYQHPERDIRDPNFCERCTCDPAGSQNEGICDSYTDFSTGLIAGQCRCKLNVEGEHCDVCKEGFYDLSSEDPFGCKSCACNPLGTIPGGNPCDSETGHCYCKRLVTGQHCDQCLPEHWGLSNDLDGCRPCDCDLGGALNNSCFAESGQCSCRPHMIGRQCNEVEPGYYFATLDHYLYEAEEANLGPGVSIVERQYIQDRIPSWTGAGFVRVPEGAYLEFFIDNIPYSMEYDILIRYEPQLPDHWEKAVITVQRPGRIPTSSRCGNTIPDDDNQVVSLSPGSRYVVLPRPVCFEKGTNYTVRLELPQYTSSDSDVESPYTLIDSLVLMPYCKSLDIFTVGGSGDGVVTNSAWETFQRYRCLENSRSVVKTPMTDVCRNIIFSISALLHQTGLACECDPQGSLSSVCDPNGGQCQCRPNVVGRTCNRCAPGTFGFGPSGCKPCECHLQGSVNAFCNPVTGQCHCFQGVYARQCDRCLPGHWGFPSCQPCQCNGHADDCDPVTGECLNCQDYTMGHNCERCLAGYYGDPIIGSGDHCRPCPCPDGPDSGRQFARSCYQDPVTLQLACVCDPGYIGSRCDDCASGYFGNPSEVGGSCQPCQCHNNIDTTDPEACDKETGRCLKCLYHTEGEHCQFCRFGYYGDALQQDCRKCVCNYLGTVQEHCNGSDCQCDKATGQCLCLPNVIGQNCDRCAPNTWQLASGTGCDPCNCNAAHSFGPSCNEFTGQCQCMPGFGGRTCSECQELFWGDPDVECRACDCDPRGIETPQCDQSTGQCVCVEGVEGPRCDKCTRGYSGVFPDCTPCHQCFALWDVIIAELTNRTHRFLEKAKALKISGVIGPYRETVDSVERKVSEIKDILAQSPAAEPLKNIGNLFEEAEKLIKDVTEMMAQVEVKLSDTTSQSNSTAKELDSLQTEAESLDNTVKELAEQLEFIKNSDIRGALDSITKYFQMSLEAEERVNASTTEPNSTVEQSALMRDRVEDVMMERESQFKEKQEEQARLLDELAGKLQSLDLSAAAEMTCGTPPGASCSETECGGPNCRTDEGERKCGGPGCGGLVTVAHNAWQKAMDLDQDVLSALAEVEQLSKMVSEAKLRADEAKQSAEDILLKTNATKEKMDKSNEELRNLIKQIRNFLTQDSADLDSIEAVANEVLKMEMPSTPQQLQNLTEDIRERVESLSQVEVILQHSAADIARAEMLLEEAKRASKSATDVKVTADMVKEALEEAEKAQVAAEKAIKQADEDIQGTQNLLTSIESETAASEETLFNASQRISELERNVEELKRKAAQNSGEAEYIEKVVYTVKQSAEDVKKTLDGELDEKYKKVENLIAKKTEESADARRKAEMLQNEAKTLLAQANSKLQLLKDLERKYEDNQRYLEDKAQELARLEGEVRSLLKDISQKVAVYSTCL

SEQ ID NO: 44981 - protein, 91 aa, Homo sapiens
  Payload ID: 9159
  Gene Symbol: LAMB1
  Gene Name: laminin, beta 1
  ENSP ID: ENSP00000377189
MGLLQLLAFSFLALCRARVRAQEPEFSYGCAEGSCYPATGDLLIGRAQKLSVTSTCGLHKPEPYCIVSHLQEDKKCFICNSQDPYHETLNP

SEQ ID NO: 44982 - protein, 850 aa, Homo sapiens
  Payload ID: 9159
  Gene Symbol: LAMB1
  Gene Name: laminin, beta 1
  ENSP ID: ENSP00000377190
MGLLQLLAFSFLALCRARVRAQEPEFSYGCAEGSCYPATGDLLIGRAQKLSVTSTCGLHKPEPYCIVSHLQEDKKCFICNSQDPYHETLNPDSHLIENVVTTFAPNRLKIWWQSENGVENVTIQLDLEAEFHFTHLIMTFKTFRPAAMLIERSSDFGKTWGVYRYFAYDCEASFPGISTGPMKKVDDIICDSRYSDIEPSTEGEVIFRALDPAFKIEDPYSPRIQNLLKITNLRIKFVKLHTLGDNLLDSRMEIREKYYYAVYDMVVRGNCFCYGHASECAPVDGFNEEVEGMVHGHCMCRHNTKGLNCELCMDFYHDLPWRPAEGRNSNACKKCNCNEHSISCHFDMAVYLATGNVSGGVCDDCQHNTMGRNCEQCKPFYYQHPERDIRDPNFCERCTCDPAGSQNEGICDSYTDFSTGLIAGQCRCKLNVEGEHCDVCKEGFYDLSSEDPFGCKSCACNPLGTIPGGNPCDSETGHCYCKRLVTGQHCDQCLPEHWGLSNDLDGCRPCDCDLGGALNNSCFAESGQCSCRPHMIGRQCNEVEPGYYFATLDHYLYEAEEANLGPGVSIVERQYIQDRIPSWTGAGFVRVPEGAYLEFFIDNIPYSMEYDILIRYEPQLPDHWEKAVITVQRPGRIPTSSRCGNTIPDDDNQVVSLSPGSRYVVLPRPVCFEKGTNYTVRLELPQYTSSDSDVESPYTLIDSLVLMPYCKSLDIFTVGGSGDGVVTNSAWETFQRYRCLENSRSVVKTPMTDVCRNIIFSISALLHQTGLACECDPQGSLSSVCDPNGGQCQCRPNVVGRTCNRCAPGTFGFGPSGCKRRFLKSIVMHSFRLTQPLWQGSIAAEPMLPS

SEQ ID NO: 44983 - protein, 1810 aa, Homo sapiens
  Payload ID: 9159
  Gene Symbol: LAMB1
  Gene Name: laminin, beta 1
  ENSP ID: ENSP00000377191
MDCPLSAPTPPPPLVRFFRAPLPACVPPTLLPVLPAALCRARVRAQEPEFSYGCAEGSCYPATGDLLIGRAQKLSVTSTCGLHKPEPYCIVSHLQEDKKCFICNSQDPYHETLNPDSHLIENVVTTFAPNRLKIWWQSENGVENVTIQLDLEAEFHFTHLIMTFKTFRPAAMLIERSSDFGKTWGVYRYFAYDCEASFPGISTGPMKKVDDIICDSRYSDIEPSTEGEVIFRALDPAFKIEDPYSPRIQNLLKITNLRIKFVKLHTLGDNLLDSRMEIREKYYYAVYDMVVRGNCFCYGHASECAPVDGFNEEVEGMVHGHCMCRHNTKGLNCELCMDFYHDLPWRPAEGRNSNACKKCNCNEHSISCHFDMAVYLATGNVSGGVCDDCQHNTMGRNCEQCKPFYYQHPERDIRDPNFCERCTCDPAGSQNEGICDSYTDFSTGLIAGQCRCKLNVEGEHCDVCKEGFYDLSSEDPFGCKSCACNPLGTIPGGNPCDSETGHCYCKRLVTGQHCDQCLPEHWGLSNDLDGCRPCDCDLGGALNNSCFAESGQCSCRPHMIGRQCNEVEPGYYFATLDHYLYEAEEANLGPGVSIVERQYIQDRIPSWTGAGFVRVPEGAYLEFFIDNIPYSMEYDILIRYEPQLPDHWEKAVITVQRPGRIPTSSRCGNTIPDDDNQVVSLSPGSRYVVLPRPVCFEKGTNYTVRLELPQYTSSDSDVESPYTLIDSLVLMPYCKSLDIFTVGGSGDGVVTNSAWETFQRYRCLENSRSVVKTPMTDVCRNIIFSISALLHQTGLACECDPQGSLSSVCDPNGGQCQCRPNVVGRTCNRCAPGTFGFGPSGCKPCECHLQGSVNAFCNPVTGQCHCFQGVYARQCDRCLPGHWGFPSCQPCQCNGHADDCDPVTGECLNCQDYTMGHNCERCLAGYYGDPIIGSGDHCRPCPCPDGPDSGRQFARSCYQDPVTLQLACVCDPGYIGSRCDDCASGYFGNPSEVGGSCQPCQCHNNIDTTDPEACDKETGRCLKCLYHTEGEHCQFCRFGYYGDALQQDCRKCVCNYLGTVQEHCNGSDCQCDKATGQCLCLPNVIGQNCDRCAPNTWQLASGTGCDPCNCNAAHSFGPSCNEFTGQCQCMPGFGGRTCSECQELFWGDPDVECRACDCDPRGIETPQCDQSTGQCVCVEGVEGPRCDKCTRGYSGVFPDCTPCHQCFALWDVIIAELTNRTHRFLEKAKALKISGVIGPYRETVDSVERKVSEIKDILAQSPAAEPLKNIGNLFEEAEKLIKDVTEMMAQVEVKLSDTTSQSNSTAKELDSLQTEAESLDNTVKELAEQLEFIKNSDIRGALDSITKYFQMSLEAEERVNASTTEPNSTVEQSALMRDRVEDVMMERESQFKEKQEEQARLLDELAGKLQSLDLSAAAEMTCGTPPGASCSETECGGPNCRTDEGERKCGGPGCGGLVTVAHNAWQKAMDLDQDVLSALAEVEQLSKMVSEAKLRADEAKQSAEDILLKTNATKEKMDKSNEELRNLIKQIRNFLTQDSADLDSIEAVANEVLKMEMPSTPQQLQNLTEDIRERVESLSQVEVILQHSAADIARAEMLLEEAKRASKSATDVKVTADMVKEALEEAEKAQVAAEKAIKQADEDIQGTQNLLTSIESETAASEETLFNASQRISELERNVEELKRKAAQNSGEAEYIEKVVYTVKQSAEDVKKTLDGELDEKYKKVENLIAKKTEESADARRKAEMLQNEAKTLLAQANSKLQLLKDLERKYEDNQRYLEDKAQELARLEGEVRSLLKDISQKVAVYSTCL

SEQ ID NO: 44984 - protein, 183 aa, Homo sapiens
  Payload ID: 9159
  Gene Symbol: LAMB1
  Gene Name: laminin, beta 1
  ENSP ID: ENSP00000412686
MGLLQLLAFSFLETAGPGASLEWRSLETTPEPQGLSMGSPSSGKRRPPRAPAPRPQRSAGDPRACTHTHSRFPSSQISTRTLTPRMRGLPRARGFTCVALCRARVRAQEPEFSYGCAEGSCYPATGDLLIGRAQKLSVTSTCGLHKPEPYCIVSHLQEDKKCFICNSQDPYHETLNPDSHLIE

SEQ ID NO: 44985 - protein, 1798 aa, Homo sapiens
  Payload ID: 9160
  Gene Symbol: LAMB2
  Gene Name: laminin, beta 2 (laminin S)
  Uniprot ID: P55268
  ENSP ID: ENSP00000307156
MELTSRERGRGQPLPWELRLGLLLSVLAATLAQAPAPDVPGCSRGSCYPATGDLLVGRADRLTASSTCGLNGPQPYCIVSHLQDEKKCFLCDSRRPFSARDNPHSHRIQNVVTSFAPQRRAAWWQSENGIPAVTIQLDLEAEFHFTHLIMTFKTFRPAAMLVERSADFGRTWHVYRYFSYDCGADFPGVPLAPPRHWDDVVCESRYSEIEPSTEGEVIYRVLDPAIPIPDPYSSRIQNLLKITNLRVNLTRLHTLGDNLLDPRREIREKYYYALYELVVRGNCFCYGHASECAPAPGAPAHAEGMVHGACICKHNTRGLNCEQCQDFYRDLPWRPAEDGHSHACRKCECHGHTHSCHFDMAVYLASGNVSGGVCDGCQHNTAGRHCELCRPFFYRDPTKDLRDPAVCRSCDCDPMGSQDGGRCDSHDDPALGLVSGQCRCKEHVVGTRCQQCRDGFFGLSISDRLGCRRCQCNARGTVPGSTPCDPNSGSCYCKRLVTGRGCDRCLPGHWGLSHDLLGCRPCDCDVGGALDPQCDEGTGQCHCRQHMVGRRCEQVQPGYFRPFLDHLIWEAEDTRGQVLDVVERLVTPGETPSWTGSGFVRLQEGQTLEFLVASVPKAMDYDLLLRLEPQVPEQWAELELIVQRPGPVPAHSLCGHLVPKDDRIQGTLQPHARYLIFPNPVCLEPGISYKLHLKLVRTGGSAQPETPYSGPGLLIDSLVLLPRVLVLEMFSGGDAAALERQATFERYQCHEEGLVPSKTSPSEACAPLLISLSTLIYNGALPCQCNPQGSLSSECNPHGGQCLCKPGVVGRRCDLCAPGYYGFGPTGCQACQCSHEGALSSLCEKTSGQCLCRTGAFGLRCDRCQRGQWGFPSCRPCVCNGHADECNTHTGACLGCRDHTGGEHCERCIAGFHGDPRLPYGGQCRPCPCPEGPGSQRHFATSCHQDEYSQQIVCHCRAGYTGLRCEACAPGHFGDPSRPGGRCQLCECSGNIDPMDPDACDPHTGQCLRCLHHTEGPHCAHCKPGFHGQAARQSCHRCTCNLLGTNPQQCPSPDQCHCDPSSGQCPCLPNVQGPSCDRCAPNFWNLTSGHGCQPCACHPSRARGPTCNEFTGQCHCRAGFGGRTCSECQELHWGDPGLQCHACDCDSRGIDTPQCHRFTGHCSCRPGVSGVRCDQCARGFSGIFPACHPCHACFGDWDRVVQDLAARTQRLEQRAQELQQTGVLGAFESSFWHMQEKLGIVQGIVGARNTSAASTAQLVEATEELRREIGEATEHLTQLEADLTDVQDENFNANHALSGLERDRLALNLTLRQLDQHLDLLKHSNFLGAYDSIRHAHSQSAEAERRANTSALAVPSPVSNSASARHRTEALMDAQKEDFNSKHMANQRALGKLSAHTHTLSLTDINELVCGAPGDAPCATSPCGGAGCRDEDGQPRCGGLSCNGAAATADLALGRARHTQAELQRALAEGGSILSRVAETRRQASEAQQRAQAALDKANASRGQVEQANQELQELIQSVKDFLNQEGADPDSIEMVATRVLELSIPASAEQIQHLAGAIAERVRSLADVDAILARTVGDVRRAEQLLQDARRARSWAEDEKQKAETVQAALEEAQRAQGIAQGAIRGAVADTRDTEQTLYQVQERMAGAERALSSAGERARQLDALLEALKLKRAGNSLAASTAEETAGSAQGRAQEAEQLLRGPLGDQYQTVKALAERKAQGVLAAQARAEQLRDEARDLLQAAQDKLQRLQELEGTYEENERALESKAAQLDGLEARMRSVLQAINLQVQIYNTCQ

SEQ ID NO: 44986 - protein, 1798 aa, Homo sapiens; identical to SEQ ID NO: 44985
  Payload ID: 9160
  Gene Symbol: LAMB2
  Gene Name: laminin, beta 2 (laminin S)
  Uniprot ID: P55268
  ENSP ID: ENSP00000388325

SEQ ID NO: 44987 - protein, 151 aa, Homo sapiens
  Payload ID: 9160
  Gene Symbol: LAMB2
  Gene Name: laminin, beta 2 (laminin S)
  ENSP ID: ENSP00000444751
MTFKTFRPAAMLVERSADFGRTWHVYRYFSYDCGADFPGVPLAPPRHWDDVVCESRYSEIEPSTEGEVIYRVLDPAIPIPDPYSSRIQNLLKITNLRVNLTRLHTLGDNLLDPRREIREKYYYALYELVVRGNCFCYGHASECAPAPGAPA

SEQ ID NO: 44988 - protein, 1172 aa, Homo sapiens [sequence omitted]

SEQ ID NO: 44989 - protein, 1172 aa, Homo sapiens [sequence omitted]

SEQ ID NO: 44990 - protein, 1172 aa, Homo sapiens [sequence omitted]

SEQ ID NO: 44991 - protein, 188 aa, Homo sapiens
  Payload ID: 9161
  Gene Symbol: LAMB3
  Gene Name: laminin, beta 3
  ENSP ID: ENSP00000388960
MRPFFLLCFALPGLLHAQQACSRGACYPPVGDLLVGRTRFLRASSTCGLTKPETYCTQYGEWQMKCCKCDSRQPHNYYSHRVENVASSSGPMRWWQSQNDVNPVSLQLDLDRRFQLQEVMMEFQGPMPAGMLIERSSDFGKTWRVYQYLAADCTSTFPRVRQGRPQSWQDVRCQSLPQRPNARLNGGK

SEQ ID NO: 44992 - protein, 159 aa, Homo sapiens
  Payload ID: 9161
  Gene Symbol: LAMB3
  Gene Name: laminin, beta 3
  ENSP ID: ENSP00000398683
MNEIQAIAARLPNVDLVLSQTKQDIARARRLQAEAEEARSRAHAVEGQVEDVVGNLRQGTVALQEAQDTMQGTSRSLRLIQDRVAEVQQVLRPAEKLVTSMTKQLGDFWTRMEELRHQARQQGAEAVQAQQLAEGASEQALSAQEGFERIKQKYAELKD

SEQ ID NO: 44993 - protein, 1761 aa, Homo sapiens
  Payload ID: 9162
  Gene Symbol: LAMB4
  Gene Name: laminin, beta 4
  Uniprot ID: A4D0S4
  ENSP ID: ENSP00000205386
MQFQLTLFLHLGWLSYSKAQDDCNRGACHPTTGDLLVGRNTQLMASSTCGLSRAQKYCILSYLEGEQKCFICDSRFPYDPYDQPNSHTIENVIVSFEPDREKKWWQSENGLDHVSIRLDLEALFRFSHLILTFKTFRPAAMLVERSTDYGHNWKVFKYFAKDCATSFPNITSGQAQGVGDIVCDSKYSDIEPSTGGEVVLKVLDPSFEIENPYSPYIQDLVTLTNLRINFTKLHTLGDALLGRRQNDSLDKYYYALYEMIVRGSCFCNGHASECRPMQKMRGDVFSPPGMVHGQCVCQHNTDGPNCERCKDFFQDAPWRPAADLQDNACRSCSCNSHSSRCHFDMTTYLASGGLSGGVCEDCQHNTEGQHCDRCRPLFYRDPLKTISDPYACIPCECDPDGTISGGICVSHSDPALGSVAGQCLCKENVEGAKCDQCKPNHYGLSATDPLGCQPCDCNPLGSLPFLTCDVDTGQCLCLSYVTGAHCEECTVGYWGLGNHLHGCSPCDCDIGGAYSNVCSPKNGQCECRPHVTGRSCSEPAPGYFFAPLNFYLYEAEEATTLQGLAPLGSETFGQSPAVHVVLGEPVPGNPVTWTGPGFARVLPGAGLRFAVNNIPFPVDFTIAIHYETQSAADWTVQIVVNPPGGSEHCIPKTLQSKPQSFALPAATRIMLLPTPICLEPDVQYSIDVYFSQPLQGESHAHSHVLVDSLGLIPQINSLENFCSKQDLDEYQLHNCVEIASAMGPQVLPGACERLIISMSAKLHDGAVACKCHPQGSVGSSCSRLGGQCQCKPLVVGRCCDRCSTGSYDLGHHGCHPCHCHPQGSKDTVCDQVTGQCPCHGEVSGRRCDRCLAGYFGFPSCHPCPCNRFAELCDPETGSCFNCGGFTTGRNCERCIDGYYGNPSSGQPCRPCLCPDDPSSNQYFAHSCYQNLWSSDVICNCLQGYTGTQCGECSTGFYGNPRISGAPCQPCACNNNIDVTDPESCSRVTGECLRCLHNTQGANCQLCKPGHYGSALNQTCRRCSCHASGVSPMECPPGGGACLCDPVTGACPCLPNVTGLACDRCADGYWNLVPGRGCQSCDCDPRTSQSSHCDQLTGQCPCKLGYGGKRCSECQENYYGDPPGRCIPCDCNRAGTQKPICDPDTGMCRCREGVSGQRCDRCARGHSQEFPTCLQCHLCFDQWDHTISSLSKAVQGLMRLAANMEDKRETLPVCEADFKDLRGNVSEIERILKHPVFPSGKFLKVKDYHDSVRRQIMQLNEQLKAVYEFQDLKDTIERAKNEADLLLEDLQEEIDLQSSVLNASIADSSENIKKYYHISSSAEKKINETSSTINTSANTRNDLLTILDTLTSKGNLSLERLKQIKIPDIQILNEKVCGDPGNVPCVPLPCGGALCTGRKGHRKCRGPGCHGSLTLSTNALQKAQEAKSIIRNLDKQVRGLKNQIESISEQAEVSKNNALQLREKLGNIRNQSDSEEENINLFIKKVKNFLLEENVPPEDIEKVANGVLDIHLPIPSQNLTDELVKIQKHMQLCEDYRTDENRLNEEADGAQKLLVKAKAAEKAANILLNLDKTLNQLQQAQITQGRANSTITQLTANITKIKKNVLQAENQTREMKSELELAKQRSGLEDGLSLLQTKLQRHQDHAVNAKVQAESAQHQAGSLEKEFVELKKQYAILQRKTSTTGLTKETLGKVKQLKDAAEKLAGDTEAKIRRITDLERKIQDLNLSRQAKADQLRILEDQVVAIKNEIVEQEKKYARCYS

SEQ ID NO: 44994 - protein, 1761 aa, Homo sapiens; identical to SEQ ID NO: 44993
  Payload ID: 9162
  Gene Symbol: LAMB4
  Gene Name: laminin, beta 4
  Uniprot ID: A4D0S4
  ENSP ID: ENSP00000373433

SEQ ID NO: 44995 - protein, 772 aa, Homo sapiens
  Payload ID: 9162
  Gene Symbol: LAMB4
  Gene Name: laminin, beta 4
  ENSP ID: ENSP00000402353
MQFQLTLFLHLGWLSYSKAQDDCNRGACHPTTGDLLVGRNTQLMASSTCGLSRAQKYCILSYLEGEQKCFICDSRFPYDPYDQPNSHTIENVIVSFEPDREKKWWQSENGLDHVSIRLDLEALFRFSHLILTFKTFRPAAMLVERSTDYGHNWKVFKYFAKDCATSFPNITSGQAQGVGDIVCDSKYSDIEPSTGGEVVLKVLDPSFEIENPYSPYIQDLVTLTNLRINFTKLHTLGDALLGRRQNDSLDKYYYALYEMIVRGSCFCNGHASECRPMQKMRGDVFSPPGMVHGQCVCQHNTDGPNCERCKDFFQDAPWRPAADLQDNACRSCSCNSHSSRCHFDMTTYLASGGLSGGVCEDCQHNTEGQHCDRCRPLFYRDPLKTISDPYACIPCECDPDGTISGGICVSHSDPALGSVAGQCLCKENVEGAKCDQCKPNHYGLSATDPLGCQPCDCNPLGSLPFLTCDVDTGQCLCLSYVTGAHCEECTVGYWGLGNHLHGCSPCDCDIGGAYSNVCSPKNGQCECRPHVTGRSCSEPAPGYFFAPLNFYLYEAEEATTLQGLAPLGSETFGQSPAVHVVLGEPVPGNPVTWTGPGFARVLPGAGLRFAVNNIPFPVDFTIAIHYETQSAADWTVQIVVNPPGGSEHCIPKTLQSKPQSFALPAATRIMLLPTPICLEPDVQYSIDVYFSQPLQGESHAHSHVLVDSAAVQWHNLGSLQPPPPECKQFSCFSFPSSWDYRHPPPHLANFCIFSRDGVSPHWPGWSQTPDLR

SEQ ID NO: 44996 - protein, 749 aa, Homo sapiens
  Payload ID: 9162
  Gene Symbol: LAMB4
  Gene Name: laminin, beta 4
  ENSP ID: ENSP00000416562
NIDVTDPESCSRVTGECLRCLHNTQGANCQLCKPGHYGSALNQTCRRCSCHASGVSPMECPPGGGACLCDPVTGACPCLPNVTGLACDRCADGYWNLVPGRGCQSCDCDPRTSQSSHCDQLTGQCPCKLGYGGKRCSECQENYYGDPPGRCIPCDCNRAGTQKPICDPDTGMCRCREGVSGQRCDRCARGHSQEFPTCLQCHLCFDQWDHTISSLSKAVQGLMRLAANMEDKRETLPVCEADFKDLRGNVSEIERILKHPVFPSGKFLKVKDYHDSVRRQIMQLNEQLKAVYEFQDLKDTIERAKNEADLLLEDLQEEIDLQSSVLNASIADSSENIKKYYHISSSAEKKINETSSTINTSANTRNDLLTILDTLTSKGNLSLERLKQIKIPDIQILNEKVCGDPGNVPCVPLPCGGALCTGRKGHRKCRGPGCHGSLTLSTNALQKAQEAKSIIRNLDKQVRGLKNQIESISEQAEVSKNNALQLREKLGNIRNQSDSEEENINLFIKKVKNFLLEENVPPEDIEKVANGVLDIHLPIPSQNLTDELVKIQKHMQLCEDYRTDENRLNEEADGAQKLLVKAKAAEKAANILLNLDKTLNQLQQAQITQGRANSTITQLTANITKIKKNVLQAENQTREMKSELELAKQRSGLEDGLSLLQTKLQRHQDHAVNAKVQAESAQHQAGSLEKEFVELKKQYAILQRKTSTTGLTKETLGKVKQLKDAAEKLAGDTEAKIRRITGCFQNSAR

SEQ ID NO: 44997 - protein, 1609 aa, Homo sapiens
  Payload ID: 9163
  Gene Symbol: LAMC1
  Gene Name: laminin, gamma 1 (formerly LAMB2)
  Uniprot ID: P11047
  ENSP ID: ENSP00000258341
MRGSHRAAPALRPRGRLWPVLAVLAAAAAAGCAQAAMDECTDEGGRPQRCMPEFVNAAFNVTVVATNTCGTPPEEYCVQTGVTGVTKSCHLCDAGQPHLQHGAAFLTDYNNQADTTWWQSQTMLAGVQYPSSINLTLHLGKAFDITYVRLKFHTSRPESFAIYKRTREDGPWIPYQYYSGSCENTYSKANRGFIRTGGDEQQALCTDEFSDISPLTGGNVAFSTLEGRPSAYNFDNSPVLQEWVTATDIRVTLNRLNTFGDEVFNDPKVLKSYYYAISDFAVGGRCKCNGHASECMKNEFDKLVCNCKHNTYGVDCEKCLPFFNDRPWRRATAESASECLPCDCNGRSQECYFDPELYRSTGHGGHCTNCQDNTDGAHCERCRENFFRLGNNEACSSCHCSPVGSLSTQCDSYGRCSCKPGVMGDKCDRCQPGFHSLTEAGCRPCSCDPSGSIDECNIETGRCVCKDNVEGFNCERCKPGFFNLESSNPRGCTPCFCFGHSSVCTNAVGYSVYSISSTFQIDEDGWRAEQRDGSEASLEWSSERQDIAVISDSYFPRYFIAPAKFLGKQVLSYGQNLSFSFRVDRRDTRLSAEDLVLEGAGLRVSVPLIAQGNSYPSETTVKYVFRLHEATDYPWRPALTPFEFQKLLNNLTSIKIRGTYSERSAGYLDDVTLASARPGPGVPATWVESCTCPVGYGGQFCEMCLSGYRRETPNLGPYSPCVLCACNGHSETCDPETGVCNCRDNTAGPHCEKCSDGYYGDSTAGTSSDCQPCPCPGGSSCAVVPKTKEVVCTNCPTGTTGKRCELCDDGYFGDPLGRNGPVRLCRLCQCSDNIDPNAVGNCNRLTGECLKCIYNTAGFYCDRCKDGFFGNPLAPNPADKCKACNCNLYGTMKQQSSCNPVTGQCECLPHVTGQDCGACDPGFYNLQSGQGCERCDCHALGSTNGQCDIRTGQCECQPGITGQHCERCEVNHFGFGPEGCKPCDCHPEGSLSLQCKDDGRCECREGFVGNRCDQCEENYFYNRSWPGCQECPACYRLVKDKVADHRVKLQELESLIANLGTGDEMVTDQAFEDRLKEAEREVMDLLREAQDVKDVDQNLMDRLQRVNNTLSSQISRLQNIRNTIEETGNLAEQARAHVENTERLIEIASRELEKAKVAAANVSVTQPESTGDPNNMTLLAEEARKLAERHKQEADDIVRVAKTANDTSTEAYNLLLRTLAGENQTAFEIEELNRKYEQAKNISQDLEKQAARVHEEAKRAGDKAVEIYASVAQLSPLDSETLENEANNIKMEAENLEQLIDQKLKDYEDLREDMRGKELEVKNLLEKGKTEQQTADQLLARADAAKALAEEAAKKGRDTLQEANDILNNLKDFDRRVNDNKTAAEEALRKIPAINQTITEANEKTREAQQALGSAAADATEAKNKAHEAERIASAVQKNATSTKAEAERTFAEVTDLDNEVNNMLKQLQEAEKELKRKQDDADQDMMMAGMASQAAQEAEINARKAKNSVTSLLSIINDLLEQLGQLDTVDLNKLNEIEGTLNKAKDEMKVSDLDRKVSDLENEAKKQEAAIMDYNRDIEEIMKDIRNLEDIRKTLPSGCFNTPSIEKP

SEQ ID NO: 44998 - protein, 37 aa, Homo sapiens
  Payload ID: 9163
  Gene Symbol: LAMC1
  Gene Name: laminin, gamma 1 (formerly LAMB2)
  ENSP ID: ENSP00000473583
MKNEFDKLVCNCKHNTYGVDCEKCLPFFNDRPWRRAT

SEQ ID NO: 44999 - protein, 1193 aa, Homo sapiens
  Payload ID: 9164
  Gene Symbol: LAMC2
  Gene Name: laminin, gamma 2
  Uniprot ID: Q13753
  ENSP ID: ENSP00000264144
MPALWLGCCLCFSLLLPAARATSRREVCDCNGKSRQCIFDRELHRQTGNGFRCLNCNDNTDGIHCEKCKNGFYRHRERDRCLPCNCNSKGSLSARCDNSGRCSCKPGVTGARCDRCLPGFHMLTDAGCTQDQRLLDSKCDCDPAGIAGPCDAGRCVCKPAVTGERCDRCRSGYYNLDGGNPEGCTQCFCYGHSASCRSSAEYSVHKITSTFHQDVDGWKAVQRNGSPAKLQWSQRHQDVFSSAQRLDPVYFVAPAKFLGNQQVSYGQSLSFDYRVDRGGRHPSAHDVILEGAGLRITAPLMPLGKTLPCGLTKTYTFRLNEHPSNNWSPQLSYFEYRRLLRNLTALRIRATYGEYSTGYIDNVTLISARPVSGAPAPWVEQCICPVGYKGQFCQDCASGYKRDSARLGPFGTCIPCNCQGGGACDPDTGDCYSGDENPDIECADCPIGFYNDPHDPRSCKPCPCHNGFSCSVMPETEEVVCNNCPPGVTGARCELCADGYFGDPFGEHGPVRPCQPCQCNNNVDPSASGNCDRLTGRCLKCIHNTAGIYCDQCKAGYFGDPLAPNPADKCRACNCNPMGSEPVGCRSDGTCVCKPGFGGPNCEHGAFSCPACYNQVKIQMDQFMQQLQRMEALISKAQGGDGVVPDTELEGRMQQAEQALQDILRDAQISEGASRSLGLQLAKVRSQENSYQSRLDDLKMTVERVRALGSQYQNRVRDTHRLITQMQLSLAESEASLGNTNIPASDHYVGPNGFKSLAQEATRLAESHVESASNMEQLTRETEDYSKQALSLVRKALHEGVGSGSGSPDGAVVQGLVEKLEKTKSLAQQLTREATQAEIEADRSYQHSLRLLDSVSRLQGVSDQSFQVEEAKRIKQKADSLSSLVTRHMDEFKRTQKNLGNWKEEAQQLLQNGKSGREKSDQLLSRANLAKSRAQEALSMGNATFYEVESILKNLREFDLQVDNRKAEAEEAMKRLSYISQKVSDASDKTQQAERALGSAAADAQRAKNGAGEALEISSEIEQEIGSLNLEANVTADGALAMEKGLASLKSEMREVEGELERKELEFDTNMDAVQMVITEAQKVDTRAKNAGVTIQDTLNTLDGLLHLMDQPLSVDEEGLVLLEQKLSRAKTQINSQLRPMMSELEERARQQRGHLHLLETSIDGILADVKNLENIRDNLPPGCYNTQALEQQ

SEQ ID NO: 45000 - protein, 1111 aa, Homo sapiens
  Payload ID: 9164
  Gene Symbol: LAMC2
  Gene Name: laminin, gamma 2
  Uniprot ID: Q13753
  ENSP ID: ENSP00000432063
MPALWLGCCLCFSLLLPAARATSRREVCDCNGKSRQCIFDRELHRQTGNGFRCLNCNDNTDGIHCEKCKNGFYRHRERDRCLPCNCNSKGSLSARCDNSGRCSCKPGVTGARCDRCLPGFHMLTDAGCTQDQRLLDSKCDCDPAGIAGPCDAGRCVCKPAVTGERCDRCRSGYYNLDGGNPEGCTQCFCYGHSASCRSSAEYSVHKITSTFHQDVDGWKAVQRNGSPAKLQWSQRHQDVFSSAQRLDPVYFVAPAKFLGNQQVSYGQSLSFDYRVDRGGRHPSAHDVILEGAGLRITAPLMPLGKTLPCGLTKTYTFRLNEHPSNNWSPQLSYFEYRRLLRNLTALRIRATYGEYSTGYIDNVTLISARPVSGAPAPWVEQCICPVGYKGQFCQDCASGYKRDSARLGPFGTCIPCNCQGGGACDPDTGDCYSGDENPDIECADCPIGFYNDPHDPRSCKPCPCHNGFSCSVMPETEEVVCNNCPPGVTGARCELCADGYFGDPFGEHGPVRPCQPCQCNNNVDPSASGNCDRLTGRCLKCIHNTAGIYCDQCKAGYFGDPLAPNPADKCRACNCNPMGSEPVGCRSDGTCVCKPGFGGPNCEHGAFSCPACYNQVKIQMDQFMQQLQRMEALISKAQGGDGVVPDTELEGRMQQAEQALQDILRDAQISEGASRSLGLQLAKVRSQENSYQSRLDDLKMTVERVRALGSQYQNRVRDTHRLITQMQLSLAESEASLGNTNIPASDHYVGPNGFKSLAQEATRLAESHVESASNMEQLTRETEDYSKQALSLVRKALHEGVGSGSGSPDGAVVQGLVEKLEKTKSLAQQLTREATQAEIEADRSYQHSLRLLDSVSRLQGVSDQSFQVEEAKRIKQKADSLSSLVTRHMDEFKRTQKNLGNWKEEAQQLLQNGKSGREKSDQLLSRANLAKSRAQEALSMGNATFYEVESILKNLREFDLQVDNRKAEAEEAMKRLSYISQKVSDASDKTQQAERALGSAAADAQRAKNGAGEALEISSEIEQEIGSLNLEANVTADGALAMEKGLASLKSEMREVEGELERKELEFDTNMDAVQMVITEAQKVDTRAKNAGVTIQDTLNTLDGLLHLMGM

SEQ ID NO: 45001 - protein, 257 aa, Homo sapiens
  Payload ID: 9165
  Gene Symbol: LAMC3
  Gene Name: laminin, gamma 3
  ENSP ID: ENSP00000347627
  MOD_RES (1)..(1): Any amino acid
XTLQTAAQATLRQTEPLTKLHQEARAALTQASSSVQAATVTVMGARTLLADLEDTRKKTKQAERMLGNAAPLSSSAKKKGREAEVLAKDSAKLAKALLRERKQAHRRASRLTSQTQATLQQASQQVLASEARRQELEEAERVGAGLSEMEQQIRESRISLEKDIETLSELLARLGSLDTHQAPAQALNETQWALERLRLQLGSPGSLQRKLSLLEQESQQQELQIQGFESDLAEIRADKQNLEAILHSLPENCASWQ

SEQ ID NO: 45002 - protein, 1575 aa, Homo sapiens
  Payload ID: 9165
  Gene Symbol: LAMC3
  Gene Name: laminin, gamma 3
  Uniprot ID: Q9Y6N6
  ENSP ID: ENSP00000354360
MAAAALLLGLALLAPRAAGAGMGACYDGAGRPQRCLPVFENAAFGRLAQASHTCGSPPEDFCPHVGAAGAGAHCQRCDAADPQRHHNASYLTDFHSQDESTWWQSPSMAFGVQYPTSVNITLRLGKAYEITYVRLKFHTSRPESFAIYKRSRADGPWEPYQFYSASCQKTYGRPEGQYLRPGEDERVAFCTSEFSDISPLSGGNVAFSTLEGRPSAYNFEESPGLQEWVTSTELLISLDRLNTFGDDIFKDPKVLQSYYYAVSDFSVGGRCKCNGHASECGPDVAGQLACRCQHNTTGTDCERCLPFFQDRPWARGTAEAAHECLPCNCSGRSEECTFDRELFRSTGHGGRCHHCRDHTAGPHCERCQENFYHWDPRMPCQPCDCQSAGSLHLQCDDTGTCACKPTVTGWKCDRCLPGFHSLSEGGCRPCTCNPAGSLDTCDPRSGRCPCKENVEGNLCDRCRPGTFNLQPHNPAGCSSCFCYGHSKVCASTAQFQVHHILSDFHQGAEGWWARSVGGSEHPPQWSPNGVLLSPEDEEELTAPEKFLGDQRFSYGQPLILTFRVPPGDSPLPVQLRLEGTGLALSLRHSSLSGPQDAGHPREVELRFHLQETSEDVAPPLPPFHFQRLLANLTSLRLRVSPGPSPAGPVFLTEVRLTSARPGLSPPASWVEICSCPTGYTGQFCESCAPGYKREMPQGGPYASCVPCTCNQHGTCDPNTGICVCSHHTEGPSCERCLPGFYGNPFAGQADDCQPCPCPGQSACTTIPESREVVCTHCPPGQRGRRCEVCDDGFFGDPLGLFGHPQPCHQCQCSGNVDPNAVGNCDPLSGHCLRCLHNTTGDHCEHCQEGFYGSALAPRPADKCMPCSCHPQGSVSEQMPCDPVTGQCSCLPHVTARDCSRCYPGFFDLQPGRGCRSCKCHPLGSQEDQCHPKTGQCTCRPGVTGQACDRCQLGFFGFSIKGCRACRCSPLGAASAQCHENGTCVCRPGFEGYKCDRCHDNFFLTADGTHCQQCPSCYALVKEEAAKLKARLTLTEGWLQGSDCGSPWGPLDILLGEAPRGDVYQGHHLLPGAREAFLEQMMSLEGAVKAAREQLQRLNKGARCAQAGSQKTCTQLADLEAVLESSEEEILHAAAILASLEIPQEGPSQPTKWSHLATEARALARSHRDTATKIAATAWRALLASNTSYALLWNLLEGRVALETQRDLEDRYQEVQAAQKALRTAVAEVLPEAESVLATVQQVGADTAPYLALLASPGALPQKSRAEDLGLKAKALEKTVASWQHMATEAARTLQTAAQATLRQTEPLTKLHQEARAALTQASSSVQAATVTVMGARTLLADLEGMKLQFPRPKDQAALQRKADSVSDRLLADTRKKTKQAERMLGNAAPLSSSAKKKGREAEVLAKDSAKLAKALLRERKQAHRRASRLTSQTQATLQQASQQVLASEARRQELEEAERVGAGLSEMEQQIRESRISLEKDIETLSELLARLGSLDTHQAPAQALNETQWALERLRLQLGSPGSLQRKLSLLEQESQQQELQIQGFESDLAEIRADKQNLEAILHSLPENCASWQ

SEQ ID NO: 45003 - protein, 399 aa, Homo sapiens
  Payload ID: 9166
  Gene Symbol: LANCL1
  Gene Name: LanC lantibiotic synthetase component C-like 1 (bacterial)
  Uniprot ID: O43813
  ENSP ID: ENSP00000233714
MAQRAFPNPYADYNKSLAEGYFDAAGRLTPEFSQRLTNKIRELLQQMERGLKSADPRDGTGYTGWAGIAVLYLHLYDVFGDPAYLQLAHGYVKQSLNCLTKRSITFLCGDAGPLAVAAVLYHKMNNEKQAEDCITRLIHLNKIDPHAPNEMLYGRIGYIYALLFVNKNFGVEKIPQSHIQQICETILTSGENLARKRNFTAKSPLMYEWYQEYYVGAAHGLAGIYYYLMQPSLQVSQGKLHSLVKPSVDYVCQLKFPSGNYPPCIGDNRDLLVHWCHGAPGVIYMLIQAYKVFREEKYLCDAYQCADVIWQYGLLKKGYGLCHGSAGNAYAFLTLYNLTQDMKYLYRACKFAEWCLEYGEHGCRTPDTPFSLFEGMAGTIYFLADLLVPTKARFPAFEL

SEQ ID NO: 45004 - protein, 399 aa, Homo sapiens; identical to SEQ ID NO: 45003
  Payload ID: 9166
  Gene Symbol: LANCL1
  Gene Name: LanC lantibiotic synthetase component C-like 1 (bacterial)
  Uniprot ID: O43813
  ENSP ID: ENSP00000388713

SEQ ID NO: 45005 - protein, 399 aa, Homo sapiens; identical to SEQ ID NO: 45003
  Payload ID: 9166
  Gene Symbol: LANCL1
  Gene Name: LanC lantibiotic synthetase component C-like 1 (bacterial)
  Uniprot ID: O43813
  ENSP ID: ENSP00000393323

SEQ ID NO: 45006 - protein, 399 aa, Homo sapiens; identical to SEQ ID NO: 45003
  Payload ID: 9166
  Gene Symbol: LANCL1
  Gene Name: LanC lantibiotic synthetase component C-like 1 (bacterial)
  Uniprot ID: O43813
  ENSP ID: ENSP00000393597

SEQ ID NO: 45007 - protein, 82 aa, Homo sapiens
  Payload ID: 9166
  Gene Symbol: LANCL1
  Gene Name: LanC lantibiotic synthetase component C-like 1 (bacterial)
  ENSP ID: ENSP00000395442
MAQRAFPNPYADYNKSLAEGYFDAAGRLTPEFSQRLTNKIRELLQQMERGLKSADPRDGTGYTGWAVGRIGKSSKIQCLKRR

SEQ ID NO: 45008 - protein, 196 aa, Homo sapiens
  Payload ID: 9166
  Gene Symbol: LANCL1
  Gene Name: LanC lantibiotic synthetase component C-like 1 (bacterial)
  ENSP ID: ENSP00000396518
MAQRAFPNPYADYNKSLAEGYFDAAGRLTPEFSQRLTNKIRELLQQMERGLKSADPRDGTGYTGWAGIAVLYLHLYDVFGDPAYLQLAHGYVKQSLNCLTKRSITFLCGDAGPLAVAAVLYHKMNNEKQAEDCITRLIHLNKIDPHAPNEMLYGRIGYIYALLFVNKNFGVEKIPQSHIQQICETILTSGENLARK

SEQ ID NO: 45009 - protein, 399 aa, Homo sapiens; identical to SEQ ID NO: 45003
  Payload ID: 9166
  Gene Symbol: LANCL1
  Gene Name: LanC lantibiotic synthetase component C-like 1 (bacterial)
  Uniprot ID: O43813
  ENSP ID: ENSP00000397646

SEQ ID NO: 45010 - protein, 147 aa, Homo sapiens
  Payload ID: 9166
  Gene Symbol: LANCL1
  Gene Name: LanC lantibiotic synthetase component C-like 1 (bacterial)
  ENSP ID: ENSP00000405364
  MOD_RES (1)..(1): Any amino acid
XICETILTSGENLARKRNFTAKSPLMYEWYQEYYVGAAHGLAGIYYYLMQVFREEKYLCDAYQCADVIWQYGLLKKGYGLCHGSAGNAYAFLTLYNLTQDMKYLYRACKFAEWCLEYGEHGCRTPDTPFSLFEGMAGTIYFLADLLV

SEQ ID NO: 45011 - protein, 450 aa, Homo sapiens
  Payload ID: 9167
  Gene Symbol: LANCL2
  Gene Name: LanC lantibiotic synthetase component C-like 2 (bacterial)
  Uniprot ID: Q9NS86
  ENSP ID: ENSP00000254770
MGETMSKRLKLHLGGEAEMEERAFVNPFPDYEAAAGALLASGAAEETGCVRPPATTDEPGLPFHQDGKIIHNFIRRIQTKIKDLLQQMEEGLKTADPHDCSAYTGWTGIALLYLQLYRVTCDQTYLLRSLDYVKRTLRNLNGRRVTFLCGDAGPLAVGAVIYHKLRSDCESQECVTKLLQLQRSVVCQESDLPDELLYGRAGYLYALLYLNTEIGPGTVCESAIKEVVNAIIESGKTLSREERKTERCPLLYQWHRKQYVGAAHGMAGIYYMLMQPAAKVDQETLTEMVKPSIDYVRHKKFRSGNYPSSLSNETDRLVHWCHGAPGVIHMLMQAYKVFKEEKYLKEAMECSDVIWQRGLLRKGYGICHGTAGNGYSFLSLYRLTQDKKYLYRACKFAEWCLDYGAHGCRIPDRPYSLFEGMAGAIHFLSDVLGPETSRFPAFELDSSKRD

SEQ ID NO: 45012 - protein, 40 aa, Homo sapiens
  Payload ID: 9167
  Gene Symbol: LANCL2
  Gene Name: LanC lantibiotic synthetase component C-like 2 (bacterial)
  ENSP ID: ENSP00000387598
  MOD_RES (1)..(1): Any amino acid
XDYEAAAGALLASGAAEETGCVRPPATTDEPGLPFHQDGK

SEQ ID NO: 45013 - protein, 420 aa, Homo sapiens
  Payload ID: 9168
  Gene Symbol: LANCL3
  Gene Name: LanC lantibiotic synthetase component C-like 3 (bacterial)
  Uniprot ID: Q6ZV70
  ENSP ID: ENSP00000367882
MDTKRCFANRFDDYQGSLLAGQCEEAVAPLVTATIERILQELPPLGGGAEARGATAGASACQGGLYGGVAGVAYMLYHVSQSPLFATARERYLRSAKRLIDACARAEEWGEPDADTRAAFLLGGAGVYAVATLVYHALGRSDYVQPLGKFRALCAVCAPVSFLECGSDELFVGRAGYLCAALVLKQKLAQEVLTPAQIKSICQAILDSGKQYAIKKRKPFPLMYSYYGTEYLGAAHGLSSILQMLLSYHEHLKPSDRELVWQSVDFLMEQEQNCNWPPELGETIERENELVHWCHGAPGIAYLFAKAYLVSKKPQYLDTCIRCGELTWQKGLLKKGPGICHGVAGSAYVFLLLYRLTGNSKYIYRAQRFAQFLFTEEFKAGSRVLESIYSLYEGFSGTVCFLIDLLQPNQAEFPLFSVFV

SEQ ID NO: 45014 - protein, 388 aa, Homo sapiens
  Payload ID: 9168
  Gene Symbol: LANCL3
  Gene Name: LanC lantibiotic synthetase component C-like 3 (bacterial)
  Uniprot ID: Q6ZV70
  ENSP ID: ENSP00000367885
MDTKRCFANRFDDYQGSLLAGQCEEAVAPLVTATIERILQELPPLGGGAEARGATAGASACQGGLYGGVAGVAYMLYHVSQSPLFATARERYLRSAKRLIDACARAEEWGEPDADTRAAFLLGGAGVYAVATLVYHALGRSDYVQPLGKFRALCAVCAPVSFLECGSDELFVGRAGYLCAALVLKQKLAQEVLTPAQIKSICQAILDSGKQYAIKKRKPFPLMYSYYGTEYLGAAHGLSSILQMLLSYHEHLKPSDRELVWQSVDFLMEQEQNCNWPPELGETIERENELVHWCHGAPGIAYLFAKAYLVSKKPQYLDTCIRCGELTWQKGLLKKGPGICHGVAGSAYVFLLLYRLTGNSKYIYRAQSSFPVNLIKMEHLLYTRQHCF

SEQ ID NO: 45015 - protein, 388 aa, Homo sapiens; identical to SEQ ID NO: 45014
  Payload ID: 9168
  Gene Symbol: LANCL3
  Gene Name: LanC lantibiotic synthetase component C-like 3 (bacterial)
  Uniprot ID: Q6ZV70
  ENSP ID: ENSP00000479231

SEQ ID NO: 45016 - protein, 732 aa, Homo sapiens
  Payload ID: 9169
  Gene Symbol: LSS
  Gene Name: lanosterol synthase (2,3-oxidosqualene-lanosterol cyclase)
  Uniprot ID: P48449
  ENSP ID: ENSP00000348762
MTEGTCLRRRGGPYKTEPATDLGRWRLNCERGRQTWTYLQDERAGREQTGLEAYALGLDTKNYFKDLPKAHTAFEGALNGMTFYVGLQAEDGHWTGDYGGPLFLLPGLLITCHVARIPLPAGYREEIVRYLRSVQLPDGGWGLHIEDKSTVFGTALNYVSLRILGVGPDDPDLVRARNILHKKGGAVAIPSWGKFWLAVLNVYSWEGLNTLFPEMWLFPDWAPAHPSTLWCHCRQVYLPMSYCYAVRLSAAEDPLVQSLRQELYVEDFASIDWLAQRNNVAPDELYTPHSWLLRVVYALLNLYEHHHSAHLRQRAVQKLYEHIVADDRFTKSISIGPISKTINMLVRWYVDGPASTAFQEHVSRIPDYLWMGLDGMKMQGTNGSQIWDTAFAIQALLEAGGHHRPEFSSCLQKAHEFLRLSQVPDNPPDYQKYYRQMRKGGFSFSTLDCGWIVSDCTAEALKAVLLLQEKCPHVTEHIPRERLCDAVAVLLNMRNPDGGFATYETKRGGHLLELLNPSEVFGDIMIDYTYVECTSAVMQALKYFHKRFPEHRAAEIRETLTQGLEFCRRQQRADGSWEGSWGVCFTYGTWFGLEAFACMGQTYRDGTACAEVSRACDFLLSRQMADGGWGEDFESCEERRYLQSAQSQIHNTCWAMMGLMAVRHPDIEAQERGVRCLLEKQLPNGDWPQENIAGVFNKSCAISYTSYRNIFPIWALGRFSQLYPERALAGHP

SEQ ID NO: 45017 - protein, 732 aa, Homo sapiens; identical to SEQ ID NO: 45016
  Payload ID: 9169
  Gene Symbol: LSS
  Gene Name: lanosterol synthase (2,3-oxidosqualene-lanosterol cyclase)
  Uniprot ID: P48449
  ENSP ID: ENSP00000380837

SEQ ID NO: 45018 - protein, 262 aa, Homo sapiens
  Payload ID: 9169
  Gene Symbol: LSS
  Gene Name: lanosterol synthase (2,3-oxidosqualene-lanosterol cyclase)
  ENSP ID: ENSP00000391368
MRGGPRCLRRRGGPYKTEPATDLGRWRLNCERGRQTWTYLQDERAGREQTGLEAYALGLDTKNYFKDLPKAHTAFEGALNGMTFYVGLQAEDGHWTGDYGGPLFLLPGLLITCHVARIPLPAGYREEIVRYLRSVQLPDGGWGLHIEDKSTVFGTALNYVSLRILGVGPDDPDLVRARNILHKKGGAVAIPSWGKFWLAVLNVYSWEGLNTLFPEMWLFPDWAPAHPSTLWCHCRQVYLPMSYCYAVRLSAAEDPLVQSLRQ

SEQ ID NO: 45019 - protein, 652 aa, Homo sapiens
  Payload ID: 9169
  Gene Symbol: LSS
  Gene Name: lanosterol synthase (2,3-oxidosqualene-lanosterol cyclase)
  Uniprot ID: P48449
  ENSP ID: ENSP00000409191
MTFYVGLQAEDGHWTGDYGGPLFLLPGLLITCHVARIPLPAGYREEIVRYLRSVQLPDGGWGLHIEDKSTVFGTALNYVSLRILGVGPDDPDLVRARNILHKKGGAVAIPSWGKFWLAVLNVYSWEGLNTLFPEMWLFPDWAPAHPSTLWCHCRQVYLPMSYCYAVRLSAAEDPLVQSLRQELYVEDFASIDWLAQRNNVAPDELYTPHSWLLRVVYALLNLYEHHHSAHLRQRAVQKLYEHIVADDRFTKSISIGPISKTINMLVRWYVDGPASTAFQEHVSRIPDYLWMGLDGMKMQGTNGSQIWDTAFAIQALLEAGGHHRPEFSSCLQKAHEFLRLSQVPDNPPDYQKYYRQMRKGGFSFSTLDCGWIVSDCTAEALKAVLLLQEKCPHVTEHIPRERLCDAVAVLLNMRNPDGGFATYETKRGGHLLELLNPSEVFGDIMIDYTYVECTSAVMQALKYFHKRFPEHRAAEIRETLTQGLEFCRRQQRADGSWEGSWGVCFTYGTWFGLEAFACMGQTYRDGTACAEVSRACDFLLSRQMADGGWGEDFESCEERRYLQSAQSQIHNTCWAMMGLMAVRHPDIEAQERGVRCLLEKQLPNGDWPQENIAGVFNKSCAISYTSYRNIFPIWALGRFSQLYPERALAGHP

SEQ ID NO: 45020 - protein, 136 aa, Homo sapiens
  Payload ID: 9169
  Gene Symbol: LSS
  Gene Name: lanosterol synthase (2,3-oxidosqualene-lanosterol cyclase)
  ENSP ID: ENSP00000410678
  MOD_RES (1)..(1): Any amino acid
XESCEERRYLQSAQSQIHNTCWAMMGLMAVRHPDIEAQERGVRCLLEKQLPNGDWPQWPSSHRTQRFPALFGVITQAGLQCQYPCLQSSLEITSVFNPLFRGSVFFLFHEEDFLFTIGSQCRGVCSSPVGFSVLGG

SEQ ID NO: 45021 - protein, 721 aa, Homo sapiens
  Payload ID: 9169
  Gene Symbol: LSS
  Gene Name: lanosterol synthase (2,3-oxidosqualene-lanosterol cyclase)
  Uniprot ID: P48449
  ENSP ID: ENSP00000429133
MTEGTCLRRRGGPYKTEPATDLGRWRLNCERGRQTWTYLQDERAGREQTGLEAYALGLDTKNYFKDLPKAHTAFEGALNGMTFYVGLQAEDGHWTGDYGGPLFLLPGLLITCHVARIPLPAGYREEIVRYLRHIEDKSTVFGTALNYVSLRILGVGPDDPDLVRARNILHKKGGAVAIPSWGKFWLAVLNVYSWEGLNTLFPEMWLFPDWAPAHPSTLWCHCRQVYLPMSYCYAVRLSAAEDPLVQSLRQELYVEDFASIDWLAQRNNVAPDELYTPHSWLLRVVYALLNLYEHHHSAHLRQRAVQKLYEHIVADDRFTKSISIGPISKTINMLVRWYVDGPASTAFQEHVSRIPDYLWMGLDGMKMQGTNGSQIWDTAFAIQALLEAGGHHRPEFSSCLQKAHEFLRLSQVPDNPPDYQKYYRQMRKGGFSFSTLDCGWIVSDCTAEALKAVLLLQEKCPHVTEHIPRERLCDAVAVLLNMRNPDGGFATYETKRGGHLLELLNPSEVFGDIMIDYTYVECTSAVMQALKYFHKRFPEHRAAEIRETLTQGLEFCRRQQRADGSWEGSWGVCFTYGTWFGLEAFACMGQTYRDGTACAEVSRACDFLLSRQMADGGWGEDFESCEERRYLQSAQSQIHNTCWAMMGLMAVRHPDIEAQERGVRCLLEKQLPNGDWPQENIAGVFNKSCAISYTSYRNIFPIWALGRFSQLYPERALAGHP

SEQ ID NO: 45022 - protein, 549 aa, Homo sapiens
  Payload ID: 9169
  Gene Symbol: LSS
  Gene Name: lanosterol synthase (2,3-oxidosqualene-lanosterol cyclase)
  ENSP ID: ENSP00000485757
  MOD_RES (1)..(1): Any amino acid
XGAVAIPSWGKFWLAVLNVYSWEGLNTLFPEMWLFPDWAPAHPSTLWCHCRQVYLPMSYCYAVRLSAAEDPLVQSLRQELYVEDFASIDWLAQRNNVAPDELYTPHSWLLRVVYALLNLYEHHHSAHLRQRAVQKLYEHIVADDRFTKSISIGPISKTINMLVRWYVDGPASTAFQEHVSRIPDYLWMGLDGMKMQGTNGSQIWDTAFAIQALLEAGGHHRPEFSSCLQKAHEFLRLSQVPDNPPDYQKYYRQMRKGGFSFSTLDCGWIVSDCTAEALKAVLLLQEKCPHVTEHIPRERLCDAVAVLLNMRNPDGGFATYETKRGGHLLELLNPSEVFGDIMIDYTYVECTSAVMQALKYFHKRFPEHRAAEIRETLTQGLEFCRRQQRADGSWEGSWGVCFTYGTWFGLEAFACMGQTYRDGTACAEVSRACDFLLSRQMADGGWGEDFESCEERRYLQSAQSQIHNTCWAMMGLMAVRHPDIEAQERGVRCLLEKQLPNGDWPQENIAGVFNKSCAISYTSYRNIFPIWALGRFSQLYPERALAGHP

SEQ ID NO: 45023 - protein, 549 aa, Homo sapiens; identical to SEQ ID NO: 45022
  Payload ID: 9169
  Gene Symbol: LSS
  Gene Name: lanosterol synthase (2,3-oxidosqualene-lanosterol cyclase)
  ENSP ID: ENSP00000486113
  MOD_RES (1)..(1): Any amino acid

SEQ ID NO: 45024 - protein, 549 aa, Homo sapiens; identical to SEQ ID NO: 45022
  Payload ID: 9169
  Gene Symbol: LSS
  Gene Name: lanosterol synthase (2,3-oxidosqualene-lanosterol cyclase)
  ENSP ID: ENSP00000487109
  MOD_RES (1)..(1): Any amino acid

SEQ ID NO: 45025 - protein, 136 aa, Homo sapiens; identical to SEQ ID NO: 45020
  Payload ID: 9169
  Gene Symbol: LSS
  Gene Name: lanosterol synthase (2,3-oxidosqualene-lanosterol cyclase)
  ENSP ID: ENSP00000487196
  MOD_RES (1)..(1): Any amino acid

SEQ ID NO: 45026 - protein, 78 aa, Homo sapiens
  Payload ID: 9169
  Gene Symbol: LSS
  Gene Name: lanosterol synthase (2,3-oxidosqualene-lanosterol cyclase)
  ENSP ID: ENSP00000487418
  MOD_RES (1)..(1): Any amino acid
XGAVAIPSWGKFWLAVLNVYSWEGLNTLFPEMWLFPDWAPAHPSTLWCHCRQVYLPMSYCYAVRLSAAEDPLVQSLRQ

SEQ ID NO: 45027 - protein, 658 aa, Homo sapiens
  Payload ID: 9170
  Gene Symbol: LSG1
  Gene Name: large 60S subunit nuclear export GTPase 1
  Uniprot ID: Q9H089
  ENSP ID: ENSP00000265245
MGRRRAPAGGSLGRALMRHQTQRSRSHRHTDSWLHTSELNDGYDWGRLNLQSVTEQSSLDDFLATAELAGTEFVAEKLNIKFVPAEARTGLLSFEESQRIKKLHEENKQFLCIPRRPNWNQNTTPEELKQAEKDNFLEWRRQLVRLEEEQKLILTPFERNLDFWRQLWRVIERSDIVVQIVDARNPLLFRCEDLECYVKEMDANKENVILINKADLLTAEQRSAWAMYFEKEDVKVIFWSALAGAIPLNGDSEEEANRDDRQSNTTKFGHSSFDQAEISHSESEHLPARDSPSLSENPTTDEDDSEYEDCPEEEEDDWQTCSEEDGPKEEDCSQDWKESSTADSEARSRKTPQKRQIHNFSHLVSKQELLELFKELHTGRKVKDGQLTVGLVGYPNVGKSSTINTIMGNKKVSVSATPGHTKHFQTLYVEPGLCLCDCPGLVMPSFVSTKAEMTCSGILPIDQMRDHVPPVSLVCQNIPRHVLEATYGINIITPREDEDPHRPPTSEELLTAYGYMRGFMTAHGQPDQPRSARYILKDYVSGKLLYCHPPPGRDPVTFQHQHQRLLENKMNSDEIKMQLGRNKKAKQIENIVDKTFFHQENVRALTKGVQAVMGYKPGSGVVTASTASSENGAGKPWKKHGNRNKKEKSRRLYKHLDM

SEQ ID NO: 45028 - protein, 178 aa, Homo sapiens
  Payload ID: 9170
  Gene Symbol: LSG1
  Gene Name: large 60S subunit nuclear export GTPase 1
  ENSP ID: ENSP00000400903
MGRRRAPAGGSLGRALMRHQTQRSRSHRHTDSWLHTSELNDGYDWGRLNLQSVTEQSSLDDFLATAELAGTEFVAEKLNIKFVPAEARTGLLSFEESQRIKKLHEENKQFLCIPRRPNWNQNTTPEELKQAEKDNFLEWRRQLVRLEEEQKLILTPFERNLDFWRQLWRVIERSAGHL

SEQ ID NO: 45029 - protein, 285 aa, Homo sapiens
  Payload ID: 9170
  Gene Symbol: LSG1
  Gene Name: large 60S subunit nuclear export GTPase 1
  ENSP ID: ENSP00000408264
  MOD_RES (1)..(1): Any amino acid
XFGHSSFDQAEISHSESEHLPARDSPSLSENPTTDEDDSEYEDCPEEEEDDWQTCSEEDGPKEEDCSQDWKESSTADSEARSRKTPQKRQIHNFSHLVSKQELLELFKELHTGRKVKDGQLTVGLVGYPNVGKSSTINTIMGNKKVSVSATPGHTKHFQTLYVEPGLCLCDCPGLVMPSFVSTKAEMTCSGILPIDQMRDHVPPVSLIITPREDEDPHRPPTSEELLTAYGYMRGFMTAHGQPDQPRSARYILKDYVSGKLLYCHPPPGRDPVTFQHQHQRLLEN

SEQ ID NO: 45030 - protein, 1130 aa, Homo sapiens
  Payload ID: 9171
  Gene Symbol: LATS1
  Gene Name: large tumor suppressor kinase 1
  Uniprot ID: O95835
  ENSP ID: ENSP00000253339
MKRSEKPEGYRQMRPKTFPASNYTVSSRQMLQEIRESLRNLSKPSDAAKAEHNMSKMSTEDPRQVRNPPKFGTHHKALQEIRNSLLPFANETNSSRSTSEVNPQMLQDLQAAGFDEDMVIQALQKTNNRSIEAAIEFISKMSYQDPRREQMAAAAARPINASMKPGNVQQSVNRKQSWKGSKESLVPQRHGPPLGESVAYHSESPNSQTDVGRPLSGSGISAFVQAHPSNGQRVNPPPPPQVRSVTPPPPPRGQTPPPRGTTPPPPSWEPNSQTKRYSGNMEYVISRISPVPPGAWQEGYPPPPLNTSPMNPPNQGQRGISSVPVGRQPIIMQSSSKFNFPSGRPGMQNGTGQTDFMIHQNVVPAGTVNRQPPPPYPLTAANGQSPSALQTGGSAAPSSYTNGSIPQSMMVPNRNSHNMELYNISVPGLQTNWPQSSSAPAQSSPSSGHEIPTWQPNIPVRSNSFNNPLGNRASHSANSQPSATTVTAITPAPIQQPVKSMRVLKPELQTALAPTHPSWIPQPIQTVQPSPFPEGTASNVTVMPPVAEAPNYQGPPPPYPKHLLHQNPSVPPYESISKPSKEDQPSLPKEDESEKSYENVDSGDKEKKQITTSPITVRKNKKDEERRESRIQSYSPQAFKFFMEQHVENVLKSHQQRLHRKKQLENEMMRVGLSQDAQDQMRKMLCQKESNYIRLKRAKMDKSMFVKIKTLGIGAFGEVCLARKVDTKALYATKTLRKKDVLLRNQVAHVKAERDILAEADNEWVVRLYYSFQDKDNLYFVMDYIPGGDMMSLLIRMGIFPESLARFYIAELTCAVESVHKMGFIHRDIKPDNILIDRDGHIKLTDFGLCTGFRWTHDSKYYQSGDHPRQDSMDFSNEWGDPSSCRCGDRLKPLERRAARQHQRCLAHSLVGTPNYIAPEVLLRTGYTQLCDWWSVGVILFEMLVGQPPFLAQTPLETQMKVINWQTSLHIPPQAKLSPEASDLIIKLCRGPEDRLGKNGADEIKAHPFFKTIDFSSDLRQQSASYIPKITHPTDTSNFDPVDPDKLWSDDNEEENVNDTLNGWYKNGKHPEHAFYEFTFRRFFDDNGYPYNYPKPIEYEYINSQGSEQQSDEDDQNTGSEIKNRDLVYV

SEQ ID NO: 45031 - protein, 135 aa, Homo sapiens
  Payload ID: 9171
  Gene Symbol: LATS1
  Gene Name: large tumor suppressor kinase 1
  ENSP ID: ENSP00000403815
MKRSEKPEGYRQMRPKTFPASNYTVSSRQMLQEIRESLRNLSKPSDAAKAEHNMSKMSTEDPRQVRNPPKFGTHHKALQEIRNSLLPFANETNSSRSTSEVNPQMLQDLQAAGFDEEDHLSVACSPISLTKPFLI

SEQ ID NO: 45032 - protein, 1130 aa, Homo sapiens; identical to SEQ ID NO: 45030
  Payload ID: 9171
  Gene Symbol: LATS1
  Gene Name: large tumor suppressor kinase 1
  Uniprot ID: O95835
  ENSP ID: ENSP00000437550

SEQ ID NO: 45033 - protein, 200 aa, Homo sapiens
  Payload ID: 9171
  Gene Symbol: LATS1
  Gene Name: large tumor suppressor kinase 1
  ENSP ID: ENSP00000441265
VKGRARSSRPLGRAALARGSPPVRLPALPHQGYLGLLGRTLAASASALRPVAAVQELCSPLQDMVIQALQKTNNRSIEAAIEFISKMSYQDPRREQMAAAAARPINASMKPGNVQQSVNRKQSWKGSKESLVPQRHGPPLGESVAYHSESPNSQTDVGRPLSGSGISAFVQAHPSNGQRVNPPPPPQVRSVTPPPPPRGQ

SEQ ID NO: 45034 - protein, 135 aa, Homo sapiens; identical to SEQ ID NO: 45031
  Payload ID: 9171
  Gene Symbol: LATS1
  Gene Name: large tumor suppressor kinase 1
  ENSP ID: ENSP00000444535

SEQ ID NO: 45035 - protein, 690 aa, Homo sapiens
  Payload ID: 9171
  Gene Symbol: LATS1
  Gene Name: large tumor suppressor kinase 1
  Uniprot ID: O95835
  ENSP ID: ENSP00000444678
MKRSEKPEGYRQMRPKTFPASNYTVSSRQMLQEIRESLRNLSKPSDAAKAEHNMSKMSTEDPRQVRNPPKFGTHHKALQEIRNSLLPFANETNSSRSTSEVNPQMLQDLQAAGFDEDMVIQALQKTNNRSIEAAIEFISKMSYQDPRREQMAAAAARPINASMKPGNVQQSVNRKQSWKGSKESLVPQRHGPPLGESVAYHSESPNSQTDVGRPLSGSGISAFVQAHPSNGQRVNPPPPPQVRSVTPPPPPRGQTPPPRGTTPPPPSWEPNSQTKRYSGNMEYVISRISPVPPGAWQEGYPPPPLNTSPMNPPNQGQRGISSVPVGRQPIIMQSSSKFNFPSGRPGMQNGTGQTDFMIHQNVVPAGTVNRQPPPPYPLTAANGQSPSALQTGGSAAPSSYTNGSIPQSMMVPNRNSHNMELYNISVPGLQTNWPQSSSAPAQSSPSSGHEIPTWQPNIPVRSNSFNNPLGNRASHSANSQPSATTVTAITPAPIQQPVKSMRVLKPELQTALAPTHPSWIPQPIQTVQPSPFPEGTASNVTVMPPVAEAPNYQGPPPPYPKHLLHQNPSVPPYESISKPSKEDQPSLPKEDESEKSYENVDSGDKEKKQITTSPITVRKNKKDEERRESRIQSYSPQAFKFFMEQHVENVLKSHQQRLHRKKQLENEMMRVKPFKMSIFILNHLFAWCLF

SEQ ID NO: 45036 - protein, 1088 aa, Homo sapiens
  Payload ID: 9172
  Gene Symbol: LATS2
  Gene Name: large tumor suppressor kinase 2
  Uniprot ID: Q9NRM7
  ENSP ID: ENSP00000372035
MRPKTFPATTYSGNSRQRLQEIREGLKQPSKSSVQGLPAGPNSDTSLDAKVLGSKDATRQQQQMRATPKFGPYQKALREIRYSLLPFANESGTSAAAEVNRQMLQELVNAGCDQEMAGRALKQTGSRSIEAALEYISKMGYLDPRNEQIVRVIKQTSPGKGLMPTPVTRRPSFEGTGDSFASYHQLSGTPYEGPSFGADGPTALEEMPRPYVDYLFPGVGPHGPGHQHQHPPKGYGASVEAAGAHFPLQGAHYGRPHLLVPGEPLGYGVQRSPSFQSKTPPETGGYASLPTKGQGGPPGAGLAFPPPAAGLYVPHPHHKQAGPAAHQLHVLGSRSQVFASDSPPQSLLTPSRNSLNVDLYELGSTSVQQWPAATLARRDSLQKPGLEAPPRAHVAFRPDCPVPSRTNSFNSHQPRPGPPGKAEPSLPAPNTVTAVTAAHILHPVKSVRVLRPEPQTAVGPSHPAWVPAPAPAPAPAPAPAAEGLDAKEEHALALGGAGAFPLDVEYGGPDRRCPPPPYPKHLLLRSKSEQYDLDSLCAGMEQSLRAGPNEPEGGDKSRKSAKGDKGGKDKKQIQTSPVPVRKNSRDEEKRESRIKSYSPYAFKFFMEQHVENVIKTYQQKVNRRLQLEQEMAKAGLCEAEQEQMRKILYQKESNYNRLKRAKMDKSMFVKIKTLGIGAFGEVCLACKVDTHALYAMKTLRKKDVLNRNQVAHVKAERDILAEADNEWVVKLYYSFQDKDSLYFVMDYIPGGDMMSLLIRMEVFPEHLARFYIAELTLAIESVHKMGFIHRDIKPDNILIDLDGHIKLTDFGLCTGFRWTHNSKYYQKGSHVRQDSMEPSDLWDDVSNCRCGDRLKTLEQRARKQHQRCLAHSLVGTPNYIAPEVLLRKGYTQLCDWWSVGVILFEMLVGQPPFLAPTPTETQLKVINWENTLHIPAQVKLSPEARDLITKLCCSADHRLGRNGADDLKAHPFFSAIDFSSDIRKQPAPYVPTISHPMDTSNFDPVDEESPWNDASEGSTKAWDTLTSPNNKHPEHAFYEFTFRRFFDDNGYPFRCPKPSGAEASQAESSDLESSDLVDQTEGCQPVYV

SEQ ID NO: 45037 - protein, 675 aa, Homo sapiens
  Payload ID: 9173
  Gene Symbol: LAS1L
  Gene Name: LAS1-like, ribosome biogenesis factor
  Uniprot ID: Q9Y4W2
  ENSP ID: ENSP00000363937
MSWESGAGPGLGSQGMDLVWSAWYGKCVKGKGSLPLSAHGIVVAWLSRAEWDQVTVYLFCDDHKLQRYALNRITVWRSRFVNLISERKTKFAKVPLKCLAQEVNIPDWIVDLRHELTHKKMPHINDCRRGCYFVLDWLQKTYWCRQLENSLRETWELEEFREGIEEEDQEEDKNIVVDDITEQKPEPQDDGKSTESDVKADGDSKGSEEVDSHCKKALSHKELYERARELLVSYEEEQFTVLEKFRYLPKAIKAWNNPSPRVECVLAELKGVTCENREAVLDAFLDDGFLVPTFEQLAALQIEYEENVDLNDVLVPKPFSQFWQPLLRGLHSQNFTQALLERMLSELPALGISGIRPTYILRWTVELIVANTKTGRNARRFSAGQWEARRGWRLFNCSASLDWPRMVESCLGSPCWASPQLLRIIFKAMGQGLPDEEQEKLLRICSIYTQSGENSLVQEGSEASPIGKSPYTLDSLYWSVKPASSSFGSEAKAQQQEEQGSVNDVKEEEKEEKEVLPDQVEEEEENDDQEEEEEDEDDEDDEEEDRMEVGPFSTGQESPTAENARLLAQKRGALQGSAWQVSSEDVRWDTFPLGRMPGQTEDPAELMLENYDTMYLLDQPVLEQRLEPSTCKTDTLGLSCGVGSGNCSNSSSSNFEGLLWSQGQLHGLKTGLQLF

SEQ ID NO: 45038 - protein, 717 aa, Homo sapiens
  Payload ID: 9173
  Gene Symbol: LAS1L
  Gene Name: LAS1-like, ribosome biogenesis factor
  Uniprot ID: Q9Y4W2
  ENSP ID: ENSP00000363940
MSWESGAGPGLGSQGMDLVWSAWYGKCVKGKGSLPLSAHGIVVAWLSRAEWDQVTVYLFCDDHKLQRYALNRITVWRSRSGNELPLAVASTADLIRCKLLDVTGGLGTDELRLLYGMALVRFVNLISERKTKFAKVPLKCLAQEVNIPDWIVDLRHELTHKKMPHINDCRRGCYFVLDWLQKTYWCRQLENSLRETWELEEFREGIEEEDQEEDKNIVVDDITEQKPEPQDDGKSTESDVKADGDSKGSEEVDSHCKKALSHKELYERARELLVSYEEEQFTVLEKFRYLPKAIKAWNNPSPRVECVLAELKGVTCENREAVLDAFLDDGFLVPTFEQLAALQIEYEENVDLNDVLVPKPFSQFWQPLLRGLHSQNFTQALLERMLSELPALGISGIRPTYILRWTVELIVANTKTGRNARRFSAGQWEARRGWRLFNCSASLDWPRMVESCLGSPCWASPQLLRIIFKAMGQGLPDEEQEKLLRICSIYTQSGENSLVQEGSEASPIGKSPYTLDSLYWSVKPASSSFGSEAKAQQQEEQGSVNDVKEEEKEEKEVLPDQVEEEEENDDQEEEEEDEDDEDDEEEDRMEVGPFSTGQESPTAENARLLAQKRGALQGSAWQVSSEDVRWDTFPLGRMPGQTEDPAELMLENYDTMYLLDQPVLEQRLEPSTCKTDTLGLSCGVGSGNCSNSSSSNFEGLLWSQGQLHGLKTGLQLF

SEQ ID NO: 45039 - protein, 734 aa, Homo sapiens
  Payload ID: 9173
  Gene Symbol: LAS1L
  Gene Name: LAS1-like, ribosome biogenesis factor
  Uniprot ID: Q9Y4W2
  ENSP ID: ENSP00000363944
MSWESGAGPGLGSQGMDLVWSAWYGKCVKGKGSLPLSAHGIVVAWLSRAEWDQVTVYLFCDDHKLQRYALNRITVWRSRSGNELPLAVASTADLIRCKLLDVTGGLGTDELRLLYGMALVRFVNLISERKTKFAKVPLKCLAQEVNIPDWIVDLRHELTHKKMPHINDCRRGCYFVLDWLQKTYWCRQLENSLRETWELEEFREGIEEEDQEEDKNIVVDDITEQKPEPQDDGKSTESDVKADGDSKGSEEVDSHCKKALSHKELYERARELLVSYEEEQFTVLEKFRYLPKAIKAWNNPSPRVECVLAELKGVTCENREAVLDAFLDDGFLVPTFEQLAALQIEYEDGQTEVQRGEGTDPKSHKNVDLNDVLVPKPFSQFWQPLLRGLHSQNFTQALLERMLSELPALGISGIRPTYILRWTVELIVANTKTGRNARRFSAGQWEARRGWRLFNCSASLDWPRMVESCLGSPCWASPQLLRIIFKAMGQGLPDEEQEKLLRICSIYTQSGENSLVQEGSEASPIGKSPYTLDSLYWSVKPASSSFGSEAKAQQQEEQGSVNDVKEEEKEEKEVLPDQVEEEEENDDQEEEEEDEDDEDDEEEDRMEVGPFSTGQESPTAENARLLAQKRGALQGSAWQVSSEDVRWDTFPLGRMPGQTEDPAELMLENYDTMYLLDQPVLEQRLEPSTCKTDTLGLSCGVGSGNCSNSSSSNFEGLLWSQGQLHGLKTGLQLF

SEQ ID NO: 45040 - protein, 291 aa, Homo sapiens
  Payload ID: 9173
  Gene Symbol: LAS1L
  Gene Name: LAS1-like, ribosome biogenesis factor
  Uniprot ID: Q9Y4W2
  ENSP ID: ENSP00000473471
MSWESGAGPGLGSQGMDLVWSAWYGKCVKGKGSLPLSAHGIVVAWLSRAEWDQVTVYLFCDDHKLQRYALNRITVWRSRSGNELPLAVASTADLIRCKLLDVTGGLGTDELRLLYGMALVRFVNLISERKTKFAKVPLKCLAQEVNIPDWIVDLRHELTHKKMPHINDCRRGCYFVLDWLQKTYWCRQLENSLRETWELEEFREGIEEEDQEEDKNIVVDDITEQKPEPQDDGKSTESDVKADGDSKGSEEVDSHCKKALSHKELYERARELLVSYEEEQFTGGCAGCFSG

SEQ ID NO: 45041 - protein, 73 aa, Homo sapiens
  Payload ID: 9173
  Gene Symbol: LAS1L
  Gene Name: LAS1-like, ribosome biogenesis factor
  ENSP ID: ENSP00000473630
  MOD_RES (1)..(1): Any amino acid
XMVESCLGSPCWASPQLLRIACRVEAAGLGEVWTTEIFSQPKHTRGMRHMPAVTAAHLGTISCAQILPFPDKQ

SEQ ID NO: 45042 - protein, 110 aa, Homo sapiens
  Payload ID: 9174
  Gene Symbol: LCE1A
  Gene Name: late cornified envelope 1A
  Uniprot ID: Q5T7P2
  ENSP ID: ENSP00000334869
MSCQQSQQQCQPPPKCTPKCPPKCPTPKCPPKCPPKCPPVSSCCSVSSGGCCGSSSGGGCSSGGGGCCLSHHRRHRSHRHRLQSSGCCSQPSGGSSCCGGDSGQHSGGCC

SEQ ID NO: 45043 - protein, 118 aa, Homo sapiens
  Payload ID: 9175
  Gene Symbol: LCE1B
  Gene Name: late cornified envelope 1B
  Uniprot ID: Q5T7P3
  ENSP ID: ENSP00000353203
MSCQQNQQQCQPPPKCIPKCPPKCLTPRCPPKCPPKCPPVSSCCSVSSGGCCGSSSGGSCGSSSGGCCSSGGGGCCLSHHRRRRSHCHRPQSSGCCSQPSGGSSCCGGGSGQHSGGCC

SEQ ID NO: 45044 - protein, 118 aa, Homo sapiens
  Payload ID: 9176
  Gene Symbol: LCE1C
  Gene Name: late cornified envelope 1C
  Uniprot ID: Q5T751
  ENSP ID: ENSP00000475270
MSCQQSQQQCQPPPKCTPKCPPKCPTPKCPPKCPPKCPPVSSCCSVSSGGCCGSSSGGSCGSSSGGCCSSGGGGCCLSHHRRRRSHCHRPQSSGCCSQPSGGSSCCGGGSGQHSGGCC

SEQ ID NO: 45045 - protein, 54 aa, Homo sapiens
  Payload ID: 9176
  Gene Symbol: LCE1C
  Gene Name: late cornified envelope 1C
  ENSP ID: ENSP00000476034
MSCQQSQQQCQPPPNVSSGGCCGSSSGGSCGSSSGGCCSSGGGGCCLSHHRRRR

SEQ ID NO: 45046 - protein, 114 aa, Homo sapiens
  Payload ID: 9177
  Gene Symbol: LCE1D
  Gene Name: late cornified envelope 1D
  Uniprot ID: Q5T752
  ENSP ID: ENSP00000316737
MSCQQSQQQCQPPPKCTPKCTPKCPAPKCPPKCPPVSSCCSVSSGGCCGSSSGGGCGSNSGGCCSSGGGGCCLSHHRRHRSHRRRPQSSDCCSQPSGGSSCCGGGSSQHSGGCC

SEQ ID NO: 45047 - protein, 118 aa, Homo sapiens
  Payload ID: 9178
  Gene Symbol: LCE1E
  Gene Name: late cornified envelope 1E
  Uniprot ID: Q5T753
  ENSP ID: ENSP00000357759
MSCQQSQQQCQPPPKCTPKCPPKCPTPKCPPKCPPKCPPVSSCCSVSSGGCCGSSSGGSCGSSSGGCCSSGGGGCCLSHHRHHRSHRHRPQSSDCCSQPSGGSSCCGGGSGQHSGGCC

SEQ ID NO: 45048 - protein, 118 aa, Homo sapiens; identical to SEQ ID NO: 45047
  Payload ID: 9178
  Gene Symbol: LCE1E
  Gene Name: late cornified envelope 1E
  Uniprot ID: Q5T753
  ENSP ID: ENSP00000357760

SEQ ID NO: 45049 - protein, 88 aa, Homo sapiens
  Payload ID: 9178
  Gene Symbol: LCE1E
  Gene Name: late cornified envelope 1E
  ENSP ID: ENSP00000480425
MSCQQSQQQCQPPPNVSSGGCCGSSSGGSCGSSSGGCCSSGGGGCCLSHHRHHRSHRHRPQSSDCCSQPSGGSSCCGGGSGQHSGGCC

SEQ ID NO: 45050 - protein, 118 aa, Homo sapiens
  Payload ID: 9179
  Gene Symbol: LCE1F
  Gene Name: late cornified envelope 1F
  Uniprot ID: Q5T754
  ENSP ID: ENSP00000334187
MSCQQSQQQCQPPPKCTPKCPPKCPTPKCPPKCPPKCPPVSSCCSVSSGGCCGSSSGGCCSSGGGGCCSSGGGGCCLSHHRRRRSHRHRPQSSDCCSQPSAGSSCCGGGSGQHSGGCC

SEQ ID NO: 45051 - protein, 106 aa, Homo sapiens
  Payload ID: 9180
  Gene Symbol: LCE2A
  Gene Name: late cornified envelope 2A
  Uniprot ID: Q5TA79
  ENSP ID: ENSP00000357768
MSCQQNQQQCQPPPKCPPKCPPKCPPKCRPQCPAPCPPPVSSCCGPSSGGCCGSSSGGCCSSGGGGCCLSHHRPRLFHRHRHQSPDCCECEPSGGSGCCHSSGDCC

SEQ ID NO: 45052 - protein, 110 aa, Homo sapiens
  Payload ID: 9181
  Gene Symbol: LCE2B
  Gene Name: late cornified envelope 2B
  Uniprot ID: O14633
  ENSP ID: ENSP00000357769
MSCQQNQQQCQPPPKCPPKCTPKCPPKCPPKCLPQCPAPCSPAVSSCCGPISGGCCGPSSGGCCNSGAGGCCLSHHRPRLFHRRRHQSPDCCESEPSGGSGCCHSSGGCC

SEQ ID NO: 45053 - protein, 110 aa, Homo sapiens
  Payload ID: 9182
  Gene Symbol: LCE2C
  Gene Name: late cornified envelope 2C
  Uniprot ID: Q5TA81
  ENSP ID: ENSP00000357772
MSCQQNQQQCQPPPKCPPKCTPKCPPKCPPKCPPQCPAPCFPAVSSCCGPSSGSCCGPSSGGCCSSGAGGCSLSHHRPRLFHRRRHQSPDCCESEPSGGSGCCHSSGGCC

SEQ ID NO: 45054 - protein, 110 aa, Homo sapiens
  Payload ID: 9183
  Gene Symbol: LCE2D
  Gene Name: late cornified envelope 2D
  Uniprot ID: Q5TA82
  ENSP ID: ENSP00000357773
MSCQQNQQQCQPPPKCPPKCTPKCPPKCPPKCPPQCPAPCSPAVSSCCGPSSGSCCGPSSGGCCSSGGGGCCLSHHRPRLFHRRRHQSPDCCESEPSGASGCCHSSGGCC

SEQ ID NO: 45055 - protein, 89 aa, Homo sapiens
  Payload ID: 9184
  Gene Symbol: LCE3A
  Gene Name: late cornified envelope 3A
  Uniprot ID: Q5TA76
  ENSP ID: ENSP00000335006
MSCQQNQQQCQPPPKCPAKSPAQCLPPASSSCAPSSGGCGPSSERSCCLSHHRCRRSHRCRCQSSNSCDRGSGQQGGSSSCGHSSAGCC

SEQ ID NO: 45056 - protein, 95 aa, Homo sapiens
  Payload ID: 9185
  Gene Symbol: LCE3B
  Gene Name: late cornified envelope 3B
  Uniprot ID: Q5TA77
  ENSP ID: ENSP00000335358
MSCQQNQQQCQPLPKCPSPKCPPKSSAQCLPPASSCCAPRPGCCGGPSSEGGCCLSHHRCCRSHRCRRQSSNSCDRGSGQQDGASDCGYGSGGCC

SEQ ID NO: 45057 - protein, 94 aa, Homo sapiens
  Payload ID: 9186
  Gene Symbol: LCE3C
  Gene Name: late cornified envelope 3C
  Uniprot ID: Q5T5A8
  ENSP ID: ENSP00000334644
MSCQQNQQQCQPPPSCPSPKCPPKSPAQCLPPPSSDCALSSGGCGPSSESGCCLSHHRHFRSHQCRRQRSNSCDRGSGQQGGGSCRGHGSGGCC

SEQ ID NO: 45058 - protein, 89 aa, Homo sapiens
  Payload ID: 9186
  Gene Symbol: LCE3C
  Gene Name: late cornified envelope 3C
  ENSP ID: ENSP00000482477
MSCQQSQQQCQPPPKCPPKSPAQCLPPPSSDCALSSGGCGPSSESGCCLSHHRHFRSHQCRRQRSNSCDRGSGQQGGGSCRGHGSGGCC

SEQ ID NO: 45059 - protein, 92 aa, Homo sapiens
  Payload ID: 9187
  Gene Symbol: LCE3D
  Gene Name: late cornified envelope 3D
  Uniprot ID: Q9BYE3
  ENSP ID: ENSP00000357776
MSCQQNQQQCQPPPKCPSPKCPPKSPVQCLPPASSGCAPSSGGCGPSSEGGCFLNHHRRHHRCRRQRPNSCDRGSGQQGGGSGCGHGSGGCC

SEQ ID NO: 45060 - protein, 92 aa, Homo sapiens
  Payload ID: 9188
  Gene Symbol: LCE3E
  Gene Name: late cornified envelope 3E
  Uniprot ID: Q5T5B0
  ENSP ID: ENSP00000357778
MSCQQNQKQCQPPPKCPSPKCPPKNPVQCLPPASSGCAPSSGGCGPSSEGGCFLNHHRRHHRCRRQRSNSCDRGSGQQGGGSGCCHGSGGCC

SEQ ID NO: 45061 - protein, 99 aa, Homo sapiens
  Payload ID: 9189
  Gene Symbol: LCE4A
  Gene Name: late cornified envelope 4A
  Uniprot ID: Q5TA78
  ENSP ID: ENSP00000335223
MSCQQNQQQCQPPPKCPIPKYPPKCPSKCASSCPPPISSCCGSSSGGCGCCSSEGGGCCLSHHRHHRSHCHRPKSSNCYGSGSGQQSGGSGCCSGGGCC

SEQ ID NO: 45062 - protein, 99 aa, Homo sapiens; identical to SEQ ID NO: 45061
  Payload ID: 9189
  Gene Symbol: LCE4A
  Gene Name: late cornified envelope 4A
  Uniprot ID: Q5TA78
  ENSP ID: ENSP00000357766

SEQ ID NO: 45063 - protein, 118 aa, Homo sapiens
  Payload ID: 9190
  Gene Symbol: LCE5A
  Gene Name: late cornified envelope 5A
  Uniprot ID: Q5TCM9
  ENSP ID: ENSP00000333952
MSCQQSQQQCQPPPKCTPKCPPKCTPKCPPKCPPKCPPQCSAPCPPPVSSCCGSSSGGCCSSEGGGCCLSHHRPRQSLRRRPQSSSCCGSGSGQQSGGSSCCHSSGGSGCCHSSGGCC

SEQ ID NO: 45064 - protein, 80 aa, Homo sapiens
  Payload ID: 9191
  Gene Symbol: LCE6A
  Gene Name: late cornified envelope 6A
  Uniprot ID: A0A183
  ENSP ID: ENSP00000411070
MSQQKQQSWKPPNVPKCSPPQRSNPCLAPYSTPCGAPHSEGCHSSSQRPEVQKPRRARQKLRCLSRGTTYHCKEEECEGD

SEQ ID NO: 45065 - protein, 98 aa, Homo sapiens
  Payload ID: 9192
  Gene Symbol: LELP1
  Gene Name: late cornified envelope-like proline-rich 1
  Uniprot ID: Q5T871
  ENSP ID: ENSP00000357736
MSSDDKSKSNDPKTEPKNCDPKCEQKCESKCQPSCLKKLLQRCFEKCPWEKCPAPPKCLPCPSQSPSSCPPQPCTKPCPPKCPSSCPHACPPPCPPPE

SEQ ID NO: 45066 - protein, 161 aa, Homo sapiens
  Payload ID: 9193
  Gene Symbol: LAMTOR1
  Gene Name: late endosomal/lysosomal adaptor, MAPK and MTOR activator 1
  Uniprot ID: Q6IAA8
  ENSP ID: ENSP00000278671
MGCCYSSENEDSDQDREERKLLLDPSSPPTKALNGAEPNYHSLPSARTDEQALLSSILAKTASNIIDVSAADSQGMEQHEYMDRARQYSTRLAVLSSSLTHWKKLPPLPSLTSQPHQVLASEPIPFSDLQQVSRIAAYAYSALSQIRVDAKEELVVQFGIP

SEQ ID NO: 45067 - protein, 79 aa, Homo sapiens
  Payload ID: 9193
  Gene Symbol: LAMTOR1
  Gene Name: late endosomal/lysosomal adaptor, MAPK and MTOR activator 1
  ENSP ID: ENSP00000438717
  MOD_RES (1)..(1): Any amino acid
XDREERKLLLDPSSPPTKALNGAEPNYHSLPSARTDEQALLSSILAKTASNIIDVSAADSQGMEQHEYMDRARQYRSPG

SEQ ID NO: 45068 - protein, 160 aa, Homo sapiens
  Payload ID: 9193
  Gene Symbol: LAMTOR1
  Gene Name: late endosomal/lysosomal adaptor, MAPK and MTOR activator 1
  ENSP ID: ENSP00000439011
MGCCYSSENEDSDQDREERKLLLDPSSPPTKALNGAEPNYHSLPSARTDEQALLSSILAKTASNIIDVSAADSQGMEQHEYMDRARQYSTRLAVLSSSLTHWKKLPPLPSLTSQPHQVLASEPIPFSDLQQVRHPSPAPAHPSHTAQGMAEGSPTLPQRR

SEQ ID NO: 45069 - protein, 76 aa, Homo sapiens
  Payload ID: 9193
  Gene Symbol: LAMTOR1
  Gene Name: late endosomal/lysosomal adaptor, MAPK and MTOR activator 1
  ENSP ID: ENSP00000439482
MGCCWTLAAPLPKLSMEPSPTTTACLPLALMSRPCSLPSLPRQPATSLMCLLQTHRAWSSMSTWTVPGSTAPAWLC

SEQ ID NO: 45070 - protein, 142 aa, Homo sapiens
  Payload ID: 9193
  Gene Symbol: LAMTOR1
  Gene Name: late endosomal/lysosomal adaptor, MAPK and MTOR activator 1
  ENSP ID: ENSP00000440738
MGCCYSSENEDSDQDREERKLLLDPSSPPTKALNGAEPNYHSLPSARTDEQALLSSILAKTASNIIDVSAADSQGMEQHEYMDRARQYSTRLAVLSSSLTHWKKLPPLPSLTSQPHQVLASEPIPFSDLQQVQLFQSTPCSQ

SEQ ID NO: 45071 - protein, 99 aa, Homo sapiens
  Payload ID: 9193
  Gene Symbol: LAMTOR1
  Gene Name: late endosomal/lysosomal adaptor, MAPK and MTOR activator 1
  ENSP ID: ENSP00000445170
MGCCYSSENEDSDQDREERKLLLDPSSPPTKALNGAEPNYHSLPSARTDEQALLSSILAKTASNIIDVSAADSQGMEQHEYMDRARQYRHTGHHTEKEL

SEQ ID NO: 45072 - protein, 150 aa, Homo sapiens
  Payload ID: 9194
  Gene Symbol: LAMTOR2
  Gene Name: late endosomal/lysosomal adaptor, MAPK and MTOR activator 2
  Uniprot ID: Q9Y2Q5
  ENSP ID: ENSP00000357285
MLRPKALTQVLSQANTGGVQSTLLLNNEGSLLAYSGYGDTDARVTAAIASNIWAAYDRNGNQAFNEDNLKFILMDCMEGRVAITRVANLLLCMYAKETVGFGMLKAKAVCGTDLCSPSAGPGFGAVPGGAPHPSGGILTALVEAGVRKEK

SEQ ID NO: 45073 - protein, 95 aa, Homo sapiens
  Payload ID: 9194
  Gene Symbol: LAMTOR2
  Gene Name: late endosomal/lysosomal adaptor, MAPK and MTOR activator 2
  Uniprot ID: Q9Y2Q5
  ENSP ID: ENSP00000357287
MLRPKALTQVLSQANTGGVQSTLLLNNEGSLLAYSGYGDTDARVTAAIASNIWAAYDRNGNQAFNEDNLKFILMDCMAQALVQYLEEPLTQVAAS

SEQ ID NO: 45074 - protein, 125 aa, Homo sapiens
  Payload ID: 9194
  Gene Symbol: LAMTOR2
  Gene Name: late endosomal/lysosomal adaptor, MAPK and MTOR activator 2
  Uniprot ID: Q9Y2Q5
  ENSP ID: ENSP00000357288
MLRPKALTQVLSQANTGGVQSTLLLNNEGSLLAYSGYGDTDARVTAAIASNIWAAYDRNGNQAFNEDNLKFILMDCMEGRVAITRVANLLLCMYAKETVGFGMLKAKAQALVQYLEEPLTQVAAS

SEQ ID NO: 45075 - protein, 117 aa, Homo sapiens
  Payload ID: 9195
  Gene Symbol: LAMTOR3
  Gene Name: late endosomal/lysosomal adaptor, MAPK and MTOR activator 3
  Uniprot ID: Q9UHA4
  ENSP ID: ENSP00000226522
MADDLKRFLYKKLPSVEGLHAIVVSDRDGVPVIKEHALRPGFLSTFALATDQGSKLGLSKNKSIICYYNTYQVVQFNRLPLVVSFIASSSANTGLIVSLEKELAPLFEELRQVVEVS

SEQ ID NO: 45076 - protein, 124 aa, Homo sapiens
  Payload ID: 9195
  Gene Symbol: LAMTOR3
  Gene Name: late endosomal/lysosomal adaptor, MAPK and MTOR activator 3
  Uniprot ID: Q9UHA4
  ENSP ID: ENSP00000424183
MADDLKRFLYKKLPSVEGLHAIVVSDRDGVPVIKVANDNAPEHALRPGFLSTFALATDQGSKLGLSKNKSIICYYNTYQVVQFNRLPLVVSFIASSSANTGLIVSLEKELAPLFEELRQVVEVS

SEQ ID NO: 45077 - protein, 99 aa, Homo sapiens
  Payload ID: 9196
  Gene Symbol: LAMTOR4
  Gene Name: late endosomal/lysosomal adaptor, MAPK and MTOR activator 4
  Uniprot ID: Q0VGL1
  ENSP ID: ENSP00000343118
MTSALTQGLERIPDQLGYLVLSEGAVLASSGDLENDEQAASAISELVSTACGFRLHRGMNVPFKRLSVVFGEHTLLVTVSGQRVFVVKRQNRGREPIDV

SEQ ID NO: 45078 - protein, 137 aa, Homo sapiens
  Payload ID: 9196
  Gene Symbol: LAMTOR4
  Gene Name: late endosomal/lysosomal adaptor, MAPK and MTOR activator 4
  ENSP ID: ENSP00000387926
MTSALTQGLERIPDQLGYLVLSEGAVLASSGDLENDEQAASAISELVSTACGFRLHRGMNVPFKRLSGEPLPLPLVVVLGAGGYFQGLLGFSSSSLLPSPGVSGLATFLPLGLPGIRIVNEKARERRSSRGHSSSNL

SEQ ID NO: 45079 - protein, 72 aa, Homo sapiens
  Payload ID: 9196
  Gene Symbol: LAMTOR4
  Gene Name: late endosomal/lysosomal adaptor, MAPK and MTOR activator 4
  ENSP ID: ENSP00000477680
MSSGDLENDEQAASAISELVSTACGFRLHRGMNVPFKRLSVVFGEHTLLVTVSGQRVFVVKRQNRGREPIDV

SEQ ID NO: 45080 - protein, 41 aa, Homo sapiens
  Payload ID: 9196
  Gene Symbol: LAMTOR4
  Gene Name: late endosomal/lysosomal adaptor, MAPK and MTOR activator 4
  ENSP ID: ENSP00000478095
MNVPFKRLSVVFGEHTLLVTVSGQRVFVVKRQNRGREPIDV

SEQ ID NO: 45081 - protein, 82 aa, Homo sapiens
  Payload ID: 9196
  Gene Symbol: LAMTOR4
  Gene Name: late endosomal/lysosomal adaptor, MAPK and MTOR activator 4
  ENSP ID: ENSP00000479176
MTSALTQGLERIPDQLGYLVLSEGAVLASSGDLENDEQAASAISELVSTACGFRLHRGMNVPFKRLSGVSLLQWSLENTHCW

SEQ ID NO: 45082 - protein, 24 aa, Homo sapiens
  Payload ID: 9196
  Gene Symbol: LAMTOR4
  Gene Name: late endosomal/lysosomal adaptor, MAPK and MTOR activator 4
  ENSP ID: ENSP00000479500
MNVPFKRLSGVSLLQWSLENTHCW

SEQ ID NO: 45083 - protein, 41 aa, Homo sapiens; identical to SEQ ID NO: 45080
  Payload ID: 9196
  Gene Symbol: LAMTOR4
  Gene Name: late endosomal/lysosomal adaptor, MAPK and MTOR activator 4
  ENSP ID: ENSP00000479685

SEQ ID NO: 45084 - protein, 20 aa, Homo sapiens
  Payload ID: 9196
  Gene Symbol: LAMTOR4
  Gene Name: late endosomal/lysosomal adaptor, MAPK and MTOR activator 4
  ENSP ID: ENSP00000480432
MNVPFKRLSVVFGEHTLLVT

SEQ ID NO: 45085 - protein, 19 aa, Homo sapiens
  Payload ID: 9196
  Gene Symbol: LAMTOR4
  Gene Name: late endosomal/lysosomal adaptor, MAPK and MTOR activator 4
  ENSP ID: ENSP00000481202
  MOD_RES (1)..(1): Any amino acid
XGMNVPFKRLSAFYFIPKI

SEQ ID NO: 45086 - protein, 173 aa, Homo sapiens
  Payload ID: 9197
  Gene Symbol: LAMTOR5
  Gene Name: late endosomal/lysosomal adaptor, MAPK and MTOR activator 5
  ENSP ID: ENSP00000256644
MEPGAGHLDGHRAGSPSLRQALCDGSAVMFSSKERGRCTVINFVPLEAPLRSTPRSRQVTEACGGEGRAVPLGSEPEWSVGGMEATLEQHLEDTMKNPSIVGVLCTDSQGLNLGCRGTLSDEHAGVISVLAQQAAKLTSDPTDIPVVCLESDNGNIMIQKHDGITVAVHKMAS

SEQ ID NO: 45087 - protein, 90 aa, Homo sapiens
  Payload ID: 9197
  Gene Symbol: LAMTOR5
  Gene Name: late endosomal/lysosomal adaptor, MAPK and MTOR activator 5
  ENSP ID: ENSP00000434828
MSLSFHLPSRRMKNPSIVGVLCTDSQGLNLGCRGTLSDEHAGVISVLAQQAAKLTSDPTDIPVVCLESDNGNIMIQKHDGITVAVHKMAS

SEQ ID NO: 45088 - protein, 90 aa, Homo sapiens; identical to SEQ ID NO: 45087
  Payload ID: 9197
  Gene Symbol: LAMTOR5
  Gene Name: late endosomal/lysosomal adaptor, MAPK and MTOR activator 5
  ENSP ID: ENSP00000435085

SEQ ID NO: 45089 - protein, 79 aa, Homo sapiens [sequence omitted]

SEQ ID NO: 45090 - protein, 91 aa, Homo sapiens
  Payload ID: 9197
  Gene Symbol: LAMTOR5
  Gene Name: late endosomal/lysosomal adaptor, MAPK and MTOR activator 5
  Uniprot ID: O43504
  ENSP ID: ENSP00000473439
MEATLEQHLEDTMKNPSIVGVLCTDSQGLNLGCRGTLSDEHAGVISVLAQQAAKLTSDPTDIPVVCLESDNGNIMIQKHDGITVAVHKMAS

SEQ ID NO: 45091 - protein, 173 aa, Homo sapiens; identical to SEQ ID NO: 45086
  Payload ID: 9197
  Gene Symbol: LAMTOR5
  Gene Name: late endosomal/lysosomal adaptor, MAPK and MTOR activator 5
  ENSP ID: ENSP00000480529

SEQ ID NO: 45092 - protein, 1395 aa, Homo sapiens
  Payload ID: 9198
  Gene Symbol: LTBP1
  Gene Name: latent transforming growth factor beta binding protein 1
  Uniprot ID: Q14766
  ENSP ID: ENSP00000384091
MDTKLMCLLFFFSLPPLLVSNHTGRIKVVFTPSICKVTCTKGSCQNSCEKGNTTTLISENGHAADTLTATNFRVVICHLPCMNGGQCSSRDKCQCPPNFTGKLCQIPVHGASVPKLYQHSQQPGKALGTHVIHSTHTLPLTVTSQQGVKVKFPPNIVNIHVKHPPEASVQIHQVSRIDGPTGQKTKEAQPGQSQVSYQGLPVQKTQTIHSTYSHQQVIPHVYPVAAKTQLGRCFQETIGSQCGKALPGLSKQEDCCGTVGTSWGFNKCQKCPKKPSYHGYNQMMECLPGYKRVNNTFCQDINECQLQGVCPNGECLNTMGSYRCTCKIGFGPDPTFSSCVPDPPVISEEKGPCYRLVSSGRQCMHPLSVHLTKQLCCCSVGKAWGPHCEKCPLPGTAAFKEICPGGMGYTVSGVHRRRPIHHHVGKGPVFVKPKNTQPVAKSTHPPPLPAKEEPVEALTFSREHGPGVAEPEVATAPPEKEIPSLDQEKTKLEPGQPQLSPGISTIHLHPQFPVVIEKTSPPVPVEVAPEASTSSASQVIAPTQVTEINECTVNPDICGAGHCINLPVRYTCICYEGYRFSEQQRKCVDIDECTQVQHLCSQGRCENTEGSFLCICPAGFMASEEGTNCIDVDECLRPDVCGEGHCVNTVGAFRCEYCDSGYRMTQRGRCEDIDECLNPSTCPDEQCVNSPGSYQCVPCTEGFRGWNGQCLDVDECLEPNVCANGDCSNLEGSYMCSCHKGYTRTPDHKHCRDIDECQQGNLCVNGQCKNTEGSFRCTCGQGYQLSAAKDQCEDIDECQHRHLCAHGQCRNTEGSFQCVCDQGYRASGLGDHCEDINECLEDKSVCQRGDCINTAGSYDCTCPDGFQLDDNKTCQDINECEHPGLCGPQGECLNTEGSFHCVCQQGFSISADGRTCEDIDECVNNTVCDSHGFCDNTAGSFRCLCYQGFQAPQDGQGCVDVNECELLSGVCGEAFCENVEGSFLCVCADENQEYSPMTGQCRSRTSTDLDVDVDQPKEEKKECYYNLNDASLCDNVLAPNVTKQECCCTSGVGWGDNCEIFPCPVLGTAEFTEMCPKGKGFVPAGESSSEAGGENYKDADECLLFGQEICKNGFCLNTRPGYECYCKQGTYYDPVKLQCFDMDECQDPSSCIDGQCVNTEGSYNCFCTHPMVLDASEKRCIRPAESNEQIEETDVYQDLCWEHLSDEYVCSRPLVGKQTTYTECCCLYGEAWGMQCALCPLKDSDDYAQLCNIPVTGRRQPYGRDALVDFSEQYTPEADPYFIQDRFLNSFEELQAEECGILNGCENGRCVRVQEGYTCDCFDGYHLDTAKMTCVDVNECDELNNRMSLCKNAKCINTDGSYKCLCLPGYVPSDKPNYCTPLNTALNLEKDSDLE

SEQ ID NO: 45093 - protein, 1340 aa, Homo sapiens
  Payload ID: 9198
  Gene Symbol: LTBP1
  Gene Name: latent transforming growth factor beta binding protein 1
  ENSP ID: ENSP00000384373
MDTKLMCLLFFFSLPPLLVSNHTGRIKVVFTPSICKVTCTKGSCQNSCEKGNTTTLISENGHAADTLTATNFRVVICHLPCMNGGQCSSRDKCQCPPNFTGKLCQIPVHGASVPKLYQHSQQPGKALGTHVIHSTHTLPLTVTSQQGVKVKFPPNIVNIHVKHPPEASVQIHQVSRIDGPTGQKTKEAQPGQSQVSYQGLPVQKTQTIHSTYSHQQVIPHVYPVAAKTQLGRCFQETIGSQCGKALPGLSKQEDCCGTVGTSWGFNKCQKCPKKPSYHGYNQMMECLPGYKRVNNTFCQDINECQLQGVCPNGECLNTMGSYRCTCKIGFGPDPTFSSCVPDPPVISEEKGPCYRLVSSGRQCMHPLSVHLTKQLCCCSVGKAWGPHCEKCPLPGTAKEEPVEALTFSREHGPGVAEPEVATAPPEKEIPSLDQEKTKLEPGQPQLSPGISTIHLHPQFPVVIEKTSPPVPVEVAPEASTSSASQVIAPTQVTEINECTVNPDICGAGHCINLPVRYTCICYEGYRFSEQQRKCVDIDECTQVQHLCSQGRCENTEGSFLCICPAGFMASEEGTNCIDVDECLRPDVCGEGHCVNTVGAFRCEYCDSGYRMTQRGRCEDIDECLNPSTCPDEQCVNSPGSYQCVPCTEGFRGWNGQCLDVDECLEPNVCANGDCSNLEGSYMCSCHKGYTRTPDHKHCRDIDECQQGNLCVNGQCKNTEGSFRCTCGQGYQLSAAKDQCEDIDECQHRHLCAHGQCRNTEGSFQCVCDQGYRASGLGDHCEDINECLEDKSVCQRGDCINTAGSYDCTCPDGFQLDDNKTCQDINECEHPGLCGPQGECLNTEGSFHCVCQQGFSISADGRTCEDIDECVNNTVCDSHGFCDNTAGSFRCLCYQGFQAPQDGQGCVDVNECELLSGVCGEAFCENVEGSFLCVCADENQEYSPMTGQCRSRTSTDVDVDQPKEEKKECYYNLNDASLCDNVLAPNVTKQECCCTSGVGWGDNCEIFPCPVLGTAEFTEMCPKGKGFVPAGESSSEAGGENYKDADECLLFGQEICKNGFCLNTRPGYECYCKQGTYYDPVKLQCFDMDECQDPSSCIDGQCVNTEGSYNCFCTHPMVLDASEKRCIRPAESNEQIEETDVYQDLCWEHLSDEYVCSRPLVGKQTTYTECCCLYGEAWGMQCALCPLKDSDDYAQLCNIPVTGRRQPYGRDALVDFSEQYTPEADPYFIQDRFLNSFEELQAEECGILNGCENGRCVRVQEGYTCDCFDGYHLDTAKMTCVDVNECDELNNRMSLCKNAKCINTDGSYKCLCLPGYVPSDKPNYCTPLNTALNLEKDSDLE

SEQ ID NO: 45094 - protein, 1342 aa, Homo sapiens
  Payload ID: 9198
  Gene Symbol: LTBP1
  Gene Name: latent transforming growth factor beta binding protein 1
  Uniprot ID: Q14766
  ENSP ID: ENSP00000385359
MDTKLMCLLFFFSLPPLLVSNHTGRIKVVFTPSICKVTCTKGSCQNSCEKGNTTTLISENGHAADTLTATNFRVVICHLPCMNGGQCSSRDKCQCPPNFTGKLCQIPVHGASVPKLYQHSQQPGKALGTHVIHSTHTLPLTVTSQQGVKVKFPPNIVNIHVKHPPEASVQIHQVSRIDGPTGQKTKEAQPGQSQVSYQGLPVQKTQTIHSTYSHQQVIPHVYPVAAKTQLGRCFQETIGSQCGKALPGLSKQEDCCGTVGTSWGFNKCQKCPKKPSYHGYNQMMECLPGYKRVNNTFCQDINECQLQGVCPNGECLNTMGSYRCTCKIGFGPDPTFSSCVPDPPVISEEKGPCYRLVSSGRQCMHPLSVHLTKQLCCCSVGKAWGPHCEKCPLPGTAKEEPVEALTFSREHGPGVAEPEVATAPPEKEIPSLDQEKTKLEPGQPQLSPGISTIHLHPQFPVVIEKTSPPVPVEVAPEASTSSASQVIAPTQVTEINECTVNPDICGAGHCINLPVRYTCICYEGYRFSEQQRKCVDIDECTQVQHLCSQGRCENTEGSFLCICPAGFMASEEGTNCIDVDECLRPDVCGEGHCVNTVGAFRCEYCDSGYRMTQRGRCEDIDECLNPSTCPDEQCVNSPGSYQCVPCTEGFRGWNGQCLDVDECLEPNVCANGDCSNLEGSYMCSCHKGYTRTPDHKHCRDIDECQQGNLCVNGQCKNTEGSFRCTCGQGYQLSAAKDQCEDIDECQHRHLCAHGQCRNTEGSFQCVCDQGYRASGLGDHCEDINECLEDKSVCQRGDCINTAGSYDCTCPDGFQLDDNKTCQDINECEHPGLCGPQGECLNTEGSFHCVCQQGFSISADGRTCEDIDECVNNTVCDSHGFCDNTAGSFRCLCYQGFQAPQDGQGCVDVNECELLSGVCGEAFCENVEGSFLCVCADENQEYSPMTGQCRSRTSTDLDVDVDQPKEEKKECYYNLNDASLCDNVLAPNVTKQECCCTSGVGWGDNCEIFPCPVLGTAEFTEMCPKGKGFVPAGESSSEAGGENYKDADECLLFGQEICKNGFCLNTRPGYECYCKQGTYYDPVKLQCFDMDECQDPSSCIDGQCVNTEGSYNCFCTHPMVLDASEKRCIRPAESNEQIEETDVYQDLCWEHLSDEYVCSRPLVGKQTTYTECCCLYGEAWGMQCALCPLKDSDDYAQLCNIPVTGRRQPYGRDALVDFSEQYTPEADPYFIQDRFLNSFEELQAEECGILNGCENGRCVRVQEGYTCDCFDGYHLDTAKMTCVDVNECDELNNRMSLCKNAKCINTDGSYKCLCLPGYVPSDKPNYCTPLNTALNLEKDSDLE

SEQ ID NO: 45095 - protein, 1721 aa, Homo sapiens
  Payload ID: 9198
  Gene Symbol: LTBP1
  Gene Name: latent transforming growth factor beta binding protein 1
  Uniprot ID: Q14766
  ENSP ID: ENSP00000386043
MAGAWLRWGLLLWAGLLASSAHGRLRRITYVVHPGPGLAAGALPLSGPPRSRTFNVALNARYSRSSAAAGAPSRASPGVPSERTRRTSKPGGAALQGLRPPPPPPPEPARPAVPGGQLHPNPGGHPAAAPFTKQGRQVVRSKVPQETQSGGGSRLQVHQKQQLQGVNVCGGRCCHGWSKAPGSQRCTKPSCVPPCQNGGMCLRPQLCVCKPGTKGKACETIAAQDTSSPVFGGQSPGAASSWGPPEQAAKHTSSKKADTLPRVSPVAQMTLTLKPKPSVGLPQQIHSQVTPLSSQSVVIHHGQTQEYVLKPKYFPAQKGISGEQSTEGSFPLRYVQDQVAAPFQLSNHTGRIKVVFTPSICKVTCTKGSCQNSCEKGNTTTLISENGHAADTLTATNFRVVICHLPCMNGGQCSSRDKCQCPPNFTGKLCQIPVHGASVPKLYQHSQQPGKALGTHVIHSTHTLPLTVTSQQGVKVKFPPNIVNIHVKHPPEASVQIHQVSRIDGPTGQKTKEAQPGQSQVSYQGLPVQKTQTIHSTYSHQQVIPHVYPVAAKTQLGRCFQETIGSQCGKALPGLSKQEDCCGTVGTSWGFNKCQKCPKKPSYHGYNQMMECLPGYKRVNNTFCQDINECQLQGVCPNGECLNTMGSYRCTCKIGFGPDPTFSSCVPDPPVISEEKGPCYRLVSSGRQCMHPLSVHLTKQLCCCSVGKAWGPHCEKCPLPGTAAFKEICPGGMGYTVSGVHRRRPIHHHVGKGPVFVKPKNTQPVAKSTHPPPLPAKEEPVEALTFSREHGPGVAEPEVATAPPEKEIPSLDQEKTKLEPGQPQLSPGISTIHLHPQFPVVIEKTSPPVPVEVAPEASTSSASQVIAPTQVTEINECTVNPDICGAGHCINLPVRYTCICYEGYRFSEQQRKCVDIDECTQVQHLCSQGRCENTEGSFLCICPAGFMASEEGTNCIDVDECLRPDVCGEGHCVNTVGAFRCEYCDSGYRMTQRGRCEDIDECLNPSTCPDEQCVNSPGSYQCVPCTEGFRGWNGQCLDVDECLEPNVCANGDCSNLEGSYMCSCHKGYTRTPDHKHCRDIDECQQGNLCVNGQCKNTEGSFRCTCGQGYQLSAAKDQCEDIDECQHRHLCAHGQCRNTEGSFQCVCDQGYRASGLGDHCEDINECLEDKSVCQRGDCINTAGSYDCTCPDGFQLDDNKTCQDINECEHPGLCGPQGECLNTEGSFHCVCQQGFSISADGRTCEDIDECVNNTVCDSHGFCDNTAGSFRCLCYQGFQAPQDGQGCVDVNECELLSGVCGEAFCENVEGSFLCVCADENQEYSPMTGQCRSRTSTDLDVDVDQPKEEKKECYYNLNDASLCDNVLAPNVTKQECCCTSGVGWGDNCEIFPCPVLGTAEFTEMCPKGKGFVPAGESSSEAGGENYKDADECLLFGQEICKNGFCLNTRPGYECYCKQGTYYDPVKLQCFDMDECQDPSSCIDGQCVNTEGSYNCFCTHPMVLDASEKRCIRPAESNEQIEETDVYQDLCWEHLSDEYVCSRPLVGKQTTYTECCCLYGEAWGMQCALCPLKDSDDYAQLCNIPVTGRRQPYGRDALVDFSEQYTPEADPYFIQDRFLNSFEELQAEECGILNGCENGRCVRVQEGYTCDCFDGYHLDTAKMTCVDVNECDELNNRMSLCKNAKCINTDGSYKCLCLPGYVPSDKPNYCTPLNTALNLEKDSDLE

SEQ ID NO: 45096 - protein, 266 aa, Homo sapiens
  Payload ID: 9198
  Gene Symbol: LTBP1
  Gene Name: latent transforming growth factor beta binding protein 1
  ENSP ID: ENSP00000388154
  MOD_RES (1)..(1): Any amino acid
XGRCEDIDECLNPSTCPDEQCVNSPGSYQCVPCTEGFRGWNGQCLDIDECQQGNLCVNGQCKNTEGSFRCTCGQGYQLSAAKDQCEDIDECQHRHLCAHGQCRNTEGSFQCVCDQGYRASGLGDHCEDINECLEDKSVCQRGDCINTAGSYDCTCPDGFQLDDNKTCQDINECEHPGLCGPQGECLNTEGSFHCVCQQGFSISADGRTCEDIDECVNNTVCDSHGFCDNTAGSFRCLCYQGFQAPQDGQGCVDVNECELLSGVCGE

SEQ ID NO: 45097 - protein, 1353 aa, Homo sapiens
  Payload ID: 9198
  Gene Symbol: LTBP1
  Gene Name: latent transforming growth factor beta binding protein 1
  ENSP ID: ENSP00000393057
MDTKLMCLLFFFSLPPLLVSNHTGRIKVVFTPSICKVTCTKGSCQNSCEKGNTTTLISENGHAADTLTATNFRVVICHLPCMNGGQCSSRDKCQCPPNFTGKLCQIPVHGASVPKLYQHSQQPGKALGTHVIHSTHTLPLTVTSQQGVKVKFPPNIVNIHVKHPPEASVQIHQVSRIDGPTGQKTKEAQPGQSQVSYQGLPVQKTQTIHSTYSHQQVIPHVYPVAAKTQLGRCFQETIGSQCGKALPGLSKQEDCCGTVGTSWGFNKCQKCPKKPSYHGYNQMMECLPGYKRVNNTFCQDINECQLQGVCPNGECLNTMGSYRCTCKIGFGPDPTFSSCVPDPPVISEEKGPCYRLVSSGRQCMHPLSVHLTKQLCCCSVGKAWGPHCEKCPLPGTAAFKEICPGGMGYTVSGVHRRRPIHHHVGKGPVFVKPKNTQPVAKSTHPPPLPAKEEPVEALTFSREHGPGVAEPEVATAPPEKEIPSLDQEKTKLEPGQPQLSPGISTIHLHPQFPVVIEKTSPPVPVEVAPEASTSSASQVIAPTQVTEINECTVNPDICGAGHCINLPVRYTCICYEGYRFSEQQRKCVDIDECTQVQHLCSQGRCENTEGSFLCICPAGFMASEEGTNCIDVDECLRPDVCGEGHCVNTVGAFRCEYCDSGYRMTQRGRCEDIDECLNPSTCPDEQCVNSPGSYQCVPCTEGFRGWNGQCLDVDECLEPNVCANGDCSNLEGSYMCSCHKGYTRTPDHKHCRDIDECQQGNLCVNGQCKNTEGSFRCTCGQGYQLSAAKDQCEDIDECQHRHLCAHGQCRNTEGSFQCVCDQGYRASGLGDHCEDINECLEDKSVCQRGDCINTAGSYDCTCPDGFQLDDNKTCQDINECEHPGLCGPQGECLNTEGSFHCVCQQGFSISADGRTCEDVNECELLSGVCGEAFCENVEGSFLCVCADENQEYSPMTGQCRSRTSTDLDVDVDQPKEEKKECYYNLNDASLCDNVLAPNVTKQECCCTSGVGWGDNCEIFPCPVLGTAEFTEMCPKGKGFVPAGESSSEAGGENYKDADECLLFGQEICKNGFCLNTRPGYECYCKQGTYYDPVKLQCFDMDECQDPSSCIDGQCVNTEGSYNCFCTHPMVLDASEKRCIRPAESNEQIEETDVYQDLCWEHLSDEYVCSRPLVGKQTTYTECCCLYGEAWGMQCALCPLKDSDDYAQLCNIPVTGRRQPYGRDALVDFSEQYTPEADPYFIQDRFLNSFEELQAEECGILNGCENGRCVRVQEGYTCDCFDGYHLDTAKMTCVDVNECDELNNRMSLCKNAKCINTDGSYKCLCLPGYVPSDKPNYCTPLNTALNLEKDSDLE

SEQ ID NO: 45098 - protein, 270 aa, Homo sapiens
  Payload ID: 9198
  Gene Symbol: LTBP1
  Gene Name: latent transforming growth factor beta binding protein 1
  ENSP ID: ENSP00000395211
ECQHRHLCAHGQCRNTEGSFQCVCDQGYRASGLGDHCEDINECLEDKSVCQRGDCINTAGSYDCTCPDGFQLDDNKTCQDINECEHPGLCGPQGECLNTEGSFHCVCQQGFSISADGRTCEDVNECELLSGVCGEAFCENVEGSFLCVCADENQEYSPMTGQCRSRTSTDLDVDVDQPKEEKKECYYNLNDASLCDNVLAPNVTKQECCCTSGVGWGDNCEIFPCPVLGTAEFTEMCPKGKGFVPAGESSSEAGGENYKDADECLLFGQE

SEQ ID NO: 45099 - protein, 101 aa, Homo sapiens
  Payload ID: 9198
  Gene Symbol: LTBP1
  Gene Name: latent transforming growth factor beta binding protein 1
  ENSP ID: ENSP00000405993
MNGGQCSSRDKCQCPPNFTGKLCQIPVHGASVPKLYQHSQQPGKALGTHVIHSTHTLPLTVTSQQGVKVKFPPNIVNIHVKHPPEASVQIHQVSRIDGPTG

SEQ ID NO: 45100 - protein, 219 aa, Homo sapiens
  Payload ID: 9198
  Gene Symbol: LTBP1
  Gene Name: latent transforming growth factor beta binding protein 1
  ENSP ID: ENSP00000415412
MGSYRCTCKIGFGPDPTFSSCVPDPPVISEEKGPCYRLVSSGRQCMHPLSVHLTKQLCCCSVGKAWGPHCEKCPLPGTGKGPVFVKPKNTQPVAKSTHPPPLPAKEEPVEALTFSREHGPGVAEPEVATAPPEKEIPSLDQEKTKLEPGQPQLSPGISTIHLHPQFPVVIEKTSPPVPVEVAPEASTSSASQVIAPTQVTEINECTVNPDICGAGHCIN

SEQ ID NO: 45101 - protein, 220 aa, Homo sapiens
  Payload ID: 9198
  Gene Symbol: LTBP1
  Gene Name: latent transforming growth factor beta binding protein 1
  ENSP ID: ENSP00000417591
SSGRQCMHPLSVHLTKQLCCCSVGKAWGPHCEKCPLPGTAAFKEICPGGMGYTVSGVHRRRPIHHHVGKGPVFVKPKNTQPVAKSTHPPPLPAKEEPVEALTFSREHGPGVAEPEVATAPPEKEIPSLDQEKTKLEPGQPQLSPGISTIHLHPQFPGIVIEKTSPPVPVEVAPEASTSSASQVIAPTQVTEINECTVNPDICGAGHCINLPVRYTCICYE

SEQ ID NO: 45102 - protein, 1821 aa, Homo sapiens
  Payload ID: 9199
  Gene Symbol: LTBP2
  Gene Name: latent transforming growth factor beta binding protein 2
  Uniprot ID: Q14767
  ENSP ID: ENSP00000261978
MRPRTKARSPGRALRNPWRGFLPLTLALFVGAGHAQRDPVGRYEPAGGDANRLRRPGGSYPAAAAAKVYSLFREQDAPVAGLQPVERAQPGWGSPRRPTEAEARRPSRAQQSRRVQPPAQTRRSTPLGQQQPAPRTRAAPALPRLGTPQRSGAAPPTPPRGRLTGRNVCGGQCCPGWTTANSTNHCIKPVCEPPCQNRGSCSRPQLCVCRSGFRGARCEEVIPDEEFDPQNSRLAPRRWAERSPNLRRSSAAGEGTLARAQPPAPQSPPAPQSPPAGTLSGLSQTHPSQQHVGLSRTVRLHPTATASSQLSSNALPPGPGLEQRDGTQQAVPLEHPSSPWGLNLTEKIKKIKIVFTPTICKQTCARGHCANSCERGDTTTLYSQGGHGHDPKSGFRIYFCQIPCLNGGRCIGRDECWCPANSTGKFCHLPIPQPDREPPGRGSRPRALLEAPLKQSTFTLPLSNQLASVNPSLVKVHIHHPPEASVQIHQVAQVRGGVEEALVENSVETRPPPWLPASPGHSLWDSNNIPARSGEPPRPLPPAAPRPRGLLGRCYLNTVNGQCANPLLELTTQEDCCGSVGAFWGVTLCAPCPPRPASPVIENGQLECPQGYKRLNLTHCQDINECLTLGLCKDAECVNTRGSYLCTCRPGLMLDPSRSRCVSDKAISMLQGLCYRSLGPGTCTLPLAQRITKQICCCSRVGKAWGSECEKCPLPGTEAFREICPAGHGYTYASSDIRLSMRKAEEEELARPPREQGQRSSGALPGPAERQPLRVVTDTWLEAGTIPDKGDSQAGQVTTSVTHAPAWVTGNATTPPMPEQGIAEIQEEQVTPSTDVLVTLSTPGIDRCAAGATNVCGPGTCVNLPDGYRCVCSPGYQLHPSQAYCTDDNECLRDPCKGKGRCINRVGSYSCFCYPGYTLATSGATQECQDINECEQPGVCSGGQCTNTEGSYHCECDQGYIMVRKGHCQDINECRHPGTCPDGRCVNSPGSYTCLACEEGYRGQSGSCVDVNECLTPGVCAHGKCTNLEGSFRCSCEQGYEVTSDEKGCQDVDECASRASCPTGLCLNTEGSFACSACENGYWVNEDGTACEDLDECAFPGVCPSGVCTNTAGSFSCKDCDGGYRPSPLGDSCEDVDECEDPQSSCLGGECKNTVGSYQCLCPQGFQLANGTVCEDVNECMGEEHCAPHGECLNSHGSFFCLCAPGFVSAEGGTSCQDVDECATTDPCVGGHCVNTEGSFNCLCETGFQPSPESGECVDIDECEDYGDPVCGTWKCENSPGSYRCVLGCQPGFHMAPNGDCIDIDECANDTMCGSHGFCDNTDGSFRCLCDQGFEISPSGWDCVDVNECELMLAVCGAALCENVEGSFLCLCASDLEEYDAQEGHCRPRGAGGQSMSEAPTGDHAPAPTRMDCYSGQKGHAPCSSVLGRNTTQAECCCTQGASWGDACDLCPSEDSAEFSEICPSGKGYIPVEGAWTFGQTMYTDADECVIFGPGLCPNGRCLNTVPGYVCLCNPGFHYDASHKKCEDHDECQDLACENGECVNTEGSFHCFCSPPLTLDLSQQRCMNSTSSTEDLPDHDIHMDICWKKVTNDVCSEPLRGHRTTYTECCCQDGEAWSQQCALCPPRSSEVYAQLCNVARIEAEREAGVHFRPGYEYGPGPDDLHYSIYGPDGAPFYNYLGPEDTVPEPAFPNTAGHSADRTPILESPLQPSELQPHYVASHPEPPAGFEGLQAEECGILNGCENGRCVRVREGYTCDCFEGFQLDAAHMACVDVNECDDLNGPAVLCVHGYCENTEGSYRCHCSPGYVAEAGPPHCTAKE

SEQ ID NO: 45103 - protein, 233 aa, Homo sapiens
  Payload ID: 9199
  Gene Symbol: LTBP2
  Gene Name: latent transforming growth factor beta binding protein 2
  ENSP ID: ENSP00000450668
  MOD_RES (1)..(1): Any amino acid
XTEGSFACSACENGYWVNEDGTACEDLDECAFPGVCPSGVCTNTAGSFSCKDCDGGYRPSPLGDSCEDVDECEDPQSSCLGGECKNTVGSYQCLCPQGFQLANGTVCEDVNECMGEEHCAPHGECLNSHGSFFCLCAPGFVSAEGGTSCQDIDECEDYGDPVCGTWKCENSPGSYRCVLGCQPGFHMAPNGDCIDIDECANDTMCGSHGFCDNTDGSFRCLCDQGFEISPSGW

SEQ ID NO: 45104 - protein, 1777 aa, Homo sapiens
  Payload ID: 9199
  Gene Symbol: LTBP2
  Gene Name: latent transforming growth factor beta binding protein 2
  ENSP ID: ENSP00000451477
MRPRTKARSPGRALRNPWRGFLPLTLALFVGAGHAQRDPVGRYEPAGGDANRLRRPGGSYPAAAAAKVYSLFREQDAPVAGLQPVERAQPGWGSPRRPTEAEARRPSRAQQSRRVQPPAQTRRSTPLGQQQPAPRTRAAPALPRLGTPQRSGAAPPTPPRGRLTGRNVCGGQCCPGWTTANSTNHCIKPVCEPPCQNRGSCSRPQLCVCRSGFRGARCEEVIPDEEFDPQNSRLAPRRWAERSPNLRRSSAAGEGTLARAQPPAPQSPPAPQSPPAGTLSGLSQTHPSQQHVGLSRTVRLHPTATASSQLSSNALPPGPGLEQRDGTQQAVPLEHPSSPWGLNLTEKIKKIKIVFTPTICKQTCARGHCANSCERGDTTTLYSQGGHGHDPKSGFRIYFCQIPCLNGGRCIGRDECWCPANSTGKFCHLPIPQPDREPPGRGSRPRALLEAPLKQSTFTLPLSNQLASVNPSLVKVHIHHPPEASVQIHQVAQVRGGVEEALVENSVETRPPPWLPASPGHSLWDSNNIPARSGEPPRPLPPAAPRPRGLLGRCYLNTVNGQCANPLLELTTQEDCCGSVGAFWGVTLCAPCPPRPASPVIENGQLECPQGYKRLNLTHCQDINECLTLGLCKDAECVNTRGSYLCTCRPGLMLDPSRSRCVSDKAISMLQGLCYRSLGPGTCTLPLAQRITKQICCCSRVGKAWGSECEKCPLPGTEAFREICPAGHGYTYASSDIRLSMRKAEEEELARPPREQGQRSSGALPGPAERQPLRVVTDTWLEAGTIPDKGDSQAGQVTTSVTHAPAWVTGNATTPPMPEQGIAEIQEEQVTPSTDVLVTLSTPGIDRCAAGATNVCGPGTCVNLPDGYRCVCSPGYQLHPSQAYCTDDNECLRDPCKGKGRCINRVGSYSCFCYPGYTLATSGATQECQDINECEQPGVCSGGQCTNTEGSYHCECDQGYIMVRKGHCQDINECRHPGTCPDGRCVNSPGSYTCLACEEGYRGQSGSCVDVNECLTPGVCAHGKCTNLEGSFRCSCEQGYEVTSDEKGCQDVDECASRASCPTGLCLNTEGSFACSACENGYWVNEDGTACEDLDECAFPGVCPSGVCTNTAGSFSCKDCDGGYRPSPLGDSCEDVDECEDPQSSCLGGECKNTVGSYQCLCPQGFQLANGTVCEDVNECMGEEHCAPHGECLNSHGSFFCLCAPGFVSAEGGTSCQDVDECATTDPCVGGHCVNTEGSFNCLCETGFQPSPESGECVDIDECANDTMCGSHGFCDNTDGSFRCLCDQGFEISPSGWDCVDVNECELMLAVCGAALCENVEGSFLCLCASDLEEYDAQEGHCRPRGAGGQSMSEAPTGDHAPAPTRMDCYSGQKGHAPCSSVLGRNTTQAECCCTQGASWGDACDLCPSEDSAEFSEICPSGKGYIPVEGAWTFGQTMYTDADECVIFGPGLCPNGRCLNTVPGYVCLCNPGFHYDASHKKCEDHDECQDLACENGECVNTEGSFHCFCSPPLTLDLSQQRCMNSTSSTEDLPDHDIHMDICWKKVTNDVCSEPLRGHRTTYTECCCQDGEAWSQQCALCPPRSSEVYAQLCNVARIEAEREAGVHFRPGYEYGPGPDDLHYSIYGPDGAPFYNYLGPEDTVPEPAFPNTAGHSADRTPILESPLQPSELQPHYVASHPEPPAGFEGLQAEECGILNGCENGRCVRVREGYTCDCFEGFQLDAAHMACVDVNECDDLNGPAVLCVHGYCENTEGSYRCHCSPGYVAEAGPPHCTAKE

SEQ ID NO: 45105 - protein, 1769 aa, Homo sapiens
  Payload ID: 9199
  Gene Symbol: LTBP2
  Gene Name: latent transforming growth factor beta binding protein 2
  ENSP ID: ENSP00000452110
MRPRTKARSPGRALRNPWRGFLPLTLALFVGAGHAQRDPVGRYEPAGGDANRLRRPGGSYPAAAAAKVYSLFREQDAPVAGLQPVERAQPGWGSPRRPTEAEARRPSRAQQSRRVQPPAQTRRSTPLGQQQPAPRTRAAPALPRLGTPQRSGAAPPTPPRGRLTGRNVCGGQCCPGWTTANSTNHCIKPVCEPPCQNRGSCSRPQLCVCRSGFRGARCEEVIPDEEFDPQNSRLAPRRWAERSPNLRRSSAAGEGTLARAQPPAPQSPPAPQSPPAGTLSGLSQTHPSQQHVGLSRTVRLHPTATASSQLSSNALPPGPGLEQRDGTQQAVPLEHPSSPWGLNLTEKIKKIKIVFTPTICKQTCARGHCANSCERGDTTTLYSQGGHGHDPKSGFRIYFCQIPCLNGGRCIGRDECWCPANSTGKFCHLPIPQPDREPPGRGSRPRALLEAPLKQSTFTLPLSNQLASVNPSLVKVHIHHPPEASVQIHQVAQVRGGVEEALVENSVETRPPPWLPASPGHSLWDSNNIPARSGEPPRPLPPAAPRPRGLLGRCYLNTVNGQCANPLLELTTQEDCCGSVGAFWGVTLCAPCPPRPASPVIENGQLECPQGYKRLNLTHCQDINECLTLGLCKDAECVNTRGSYLCTCRPGLMLDPSRSRCVSDKAISMLQGLCYRSLGPGTCTLPLAQRITKQICCCSRVGKAWGSECEKCPLPGTEAFREICPAGHGYTYASSDIRLSMRKAEEEELARPPREQGQRSSGALPGPAERQPLRVVTDTWLEAGTIPDKGDSQAGQVTTSVTHAPAWVTGNATTPPMPEQGIAEIQEEQVTPSTDVLVTLSTPGIDRCAAGATNVCGPGTCVNLPDGYRCVCSPGYQLHPSQAYCTDDNECLRDPCKGKGRCINRVGSYSCFCYPGYTLATSGATQECQDINECEQPGVCSGGQCTNTEGSYHCECDQGYIMVRKGHCQDINECRHPGTCPDGRCVNSPGSYTCLACEEGYRGQSGSCVDVNECLTPGVCAHGKCTNLEGSFRCSCEQGYEVTSDEKGCQDVDECASRASCPTGLCLNTEGSFACSACENGYWVNEDGTACEDLDECAFPGVCPSGVCTNTAGSFSCKDCDGGYRPSPLGDSCEDVDECEDPQSSCLGGECKNTVGSYQCLCPQGFQLANGTVCEDVNECMGEEHCAPHGECLNSHGSFFCLCAPGFVSAEGGTSCQDVDECATTDPCVGGHCVNTEGSFNCLCETGFQPSPESGECVDIDECEDYGDPVCGTWKCENSPGSYRCVLGCQPGFHMAPNGDCIDIDECANDTMCGSHGFCDNTDGSFRCLCDQGFEISPSGWDCVDVNECELMLAVCGAALCENVEGSFLCLCASDLEEYDAQEGHCRPRGAGGQSMSEAPTGDHAPAPTRMDCYSGQKGHAPCSSVLGRNTTQAECCCTQGASWGDACDLCPSEDSAEFSEICPSGKGYIPVEGAWTFGQTMYTDADECVIFGPGLCPNGRCLNTVPGYVCLCNPGFHYDASHKKCEDHDECQDLACENGECVNTEGSFHCFCSPPLTLDLSQQRCMNSTSSTEDLPDHDIHMDICWKKVTNDVCSEPLRGHRTTYTECCCQDGEAWSQQCALCPPRSSEVYAQLCNVARIEAEREAGVHFRPGYEYGPGPDDLHYSIYGPDGAPFYNYLGPEDTVPEPAFPNTAGHSADRTPILESPLQPSELQPHYVASHPGLCCCKTGEEVGTKAVSLPSPPPASHIASRSPQPASKGFRRRSAAS

SEQ ID NO: 45106 - protein, 1303 aa, Homo sapiens
  Payload ID: 9200
  Gene Symbol: LTBP3
  Gene Name: latent transforming growth factor beta binding protein 3
  Uniprot ID: Q9NS15
  ENSP ID: ENSP00000301873
MPGPRGAAGGLAPEMRGAGAAGLLALLLLLLLLLLGLGGRVEGGPAGERGAGGGGALARERFKVVFAPVICKRTCLKGQCRDSCQQGSNMTLIGENGHSTDTLTGSGFRVVVCPLPCMNGGQCSSRNQCLCPPDFTGRFCQVPAGGAGGGTGGSGPGLSRTGALSTGALPPLAPEGDSVASKHAIYAVQVIADPPGPGEGPPAQHAAFLVPLGPGQISAEVQAPPPVVNVRVHHPPEASVQVHRIESSNAESAAPSQHLLPHPKPSHPRPPTQKPLGRCFQDTLPKQPCGSNPLPGLTKQEDCCGSIGTAWGQSKCHKCPQLQYTGVQKPGPVRGEVGADCPQGYKRLNSTHCQDINECAMPGVCRHGDCLNNPGSYRCVCPPGHSLGPSRTQCIADKPEEKSLCFRLVSPEHQCQHPLTTRLTRQLCCCSVGKAWGARCQRCPTDGTAAFKEICPAGKGYHILTSHQTLTIQGESDFSLFLHPDGPPKPQQLPESPSQAPPPEDTEEERGVTTDSPVSEERSVQQSHPTATTTPARPYPELISRPSPPTMRWFLPDLPPSRSAVEIAPTQVTETDECRLNQNICGHGECVPGPPDYSCHCNPGYRSHPQHRYCVDVNECEAEPCGPGRGICMNTGGSYNCHCNRGYRLHVGAGGRSCVDLNECAKPHLCGDGGFCINFPGHYKCNCYPGYRLKASRPPVCEDIDECRDPSSCPDGKCENKPGSFKCIACQPGYRSQGGGACRDVNECAEGSPCSPGWCENLPGSFRCTCAQGYAPAPDGRSCLDVDECEAGDVCDNGICSNTPGSFQCQCLSGYHLSRDRSHCEDIDECDFPAACIGGDCINTNGSYRCLCPQGHRLVGGRKCQDIDECSQDPSLCLPHGACKNLQGSYVCVCDEGFTPTQDQHGCEEVEQPHHKKECYLNFDDTVFCDSVLATNVTQQECCCSLGAGWGDHCEIYPCPVYSSAEFHSLCPDGKGYTQDNNIVNYGIPAHRDIDECMLFGSEICKEGKCVNTQPGYECYCKQGFYYDGNLLECVDVDECLDESNCRNGVCENTRGGYRCACTPPAEYSPAQRQCLSPEEMDVDECQDPAACRPGRCVNLPGSYRCECRPPWVPGPSGRDCQLPESPAERAPERRDVCWSQRGEDGMCAGPLAGPALTFDDCCCRQGRGWGAQCRPCPPRGAGSHCPTSQSESNSFWDTSPLLLGKPPRDEDSSEEDSDECRCVSGRCVPRPGGAVCECPGGFQLDASRARCVDIDECRELNQRGLLCKSERCVNTSGSFRCVCKAGFARSRPHGACVPQRRR

SEQ ID NO: 45107 - protein, 1256 aa, Homo sapiens
  Payload ID: 9200
  Gene Symbol: LTBP3
  Gene Name: latent transforming growth factor beta binding protein 3
  Uniprot ID: Q9NS15
  ENSP ID: ENSP00000326647
MPGPRGAAGGLAPEMRGAGAAGLLALLLLLLLLLLGLGGRVEGGPAGERGAGGGGALARERFKVVFAPVICKRTCLKGQCRDSCQQGSNMTLIGENGHSTDTLTGSGFRVVVCPLPCMNGGQCSSRNQCLCPPDFTGRFCQVPAGGAGGGTGGSGPGLSRTGALSTGALPPLAPEGDSVASKHAIYAVQVIADPPGPGEGPPAQHAAFLVPLGPGQISAEVQAPPPVVNVRVHHPPEASVQVHRIESSNAESAAPSQHLLPHPKPSHPRPPTQKPLGRCFQDTLPKQPCGSNPLPGLTKQEDCCGSIGTAWGQSKCHKCPQLQYTGVQKPGPVRGEVGADCPQGYKRLNSTHCQDINECAMPGVCRHGDCLNNPGSYRCVCPPGHSLGPSRTQCIADKPEEKSLCFRLVSPEHQCQHPLTTRLTRQLCCCSVGKAWGARCQRCPTDGTAAFKEICPAGKGYHILTSHQTLTIQGESDFSLFLHPDGPPKPQQLPESPSQAPPPEDTEEERGVTTDSPVSEERSVQQSHPTATTTPARPYPELISRPSPPTMRWFLPDLPPSRSAVEIAPTQVTETDECRLNQNICGHGECVPGPPDYSCHCNPGYRSHPQHRYCVDVNECEAEPCGPGRGICMNTGGSYNCHCNRGYRLHVGAGGRSCVDLNECAKPHLCGDGGFCINFPGHYKCNCYPGYRLKASRPPVCEDIDECRDPSSCPDGKCENKPGSFKCIACQPGYRSQGGGACRDVNECAEGSPCSPGWCENLPGSFRCTCAQGYAPAPDGRSCLDVDECEAGDVCDNGICSNTPGSFQCQCLSGYHLSRDRSHCEDIDECDFPAACIGGDCINTNGSYRCLCPQGHRLVGGRKCQDIDECSQDPSLCLPHGACKNLQGSYVCVCDEGFTPTQDQHGCEEVEQPHHKKECYLNFDDTVFCDSVLATNVTQQECCCSLGAGWGDHCEIYPCPVYSSAEFHSLCPDGKGYTQDNNIVNYGIPAHRDIDECMLFGSEICKEGKCVNTQPGYECYCKQGFYYDGNLLECVDVDECLDESNCRNGVCENTRGGYRCACTPPAEYSPAQRQCLSPEEMERAPERRDVCWSQRGEDGMCAGPLAGPALTFDDCCCRQGRGWGAQCRPCPPRGAGSHCPTSQSESNSFWDTSPLLLGKPPRDEDSSEEDSDECRCVSGRCVPRPGGAVCECPGGFQLDASRARCVDIDECRELNQRGLLCKSERCVNTSGSFRCVCKAGFARSRPHGACVPQRRR

SEQ ID NO: 45108 - protein, 907 aa, Homo sapiens
  Payload ID: 9200
  Gene Symbol: LTBP3
  Gene Name: latent transforming growth factor beta binding protein 3
  ENSP ID: ENSP00000431219
  MOD_RES (1)..(1): Any amino acid
XFAPVICKRTCLKGQCRDSCQQGSNMTLIGENGHSTDTLTGSGFRVADKPEEKSLCFRLVSPEHQCQHPLTTRLTRQLCCCSVGKAWGARCQRCPTDGTAAFKEICPAGKGYHILTSHQTLTIQGESDFSLFLHPDGPPKPQQLPESPSQAPPPEDTEEERGVTTDSPVSEERSVQQSHPTATTTPARPYPELISRPSPPTMRWFLPDLPPSRSAVEIAPTQVTETDECRLNQNICGHGECVPGPPDYSCHCNPGYRSHPQHRYCVDVNECEAEPCGPGRGICMNTGGSYNCHCNRGYRLHVGAGGRSCVDLNECAKPHLCGDGGFCINFPGHYKCNCYPGYRLKASRPPVCEDIDECRDPSSCPDGKCENKPGSFKCIACQPGYRSQGGGACRDVNECAEGSPCSPGWCENLPGSFRCTCAQGYAPAPDGRSCLDVDECEAGDVCDNGICSNTPGSFQCQCLSGYHLSRDRSHCEDIDECDFPAACIGGDCINTNGSYRCLCPQGHRLVGGRKCQDIDECSQDPSLCLPHGACKNLQGSYVCVCDEGFTPTQDQHGCEEVEQPHHKKECYLNFDDTVFCDSVLATNVTQQECCCSLGAGWGDHCEIYPCPVYSSAEFHSLCPDGKGYTQDNNIVNYGIPAHRDIDECMLFGSEICKEGKCVNTQPGYECYCKQGFYYDGNLLECVDVDECLDESNCRNGVCENTRGGYRCACTPPAEYSPAQRQCLSPEEMERAPERRDVCWSQRGEDGMCAGPLAGPALTFDDCCCRQGRGWGAQCRPCPPRGAGSHCPTSQSESNSFWDTSPLLLGKPPRDEDSSEEDSDECRCVSGRCVPRPGGAVCECPGGFQLDASRARCVDIDECRELNQRGLLCKSERCVNTSGSFRCVCKAGFARSRPHGACVPQRRR

SEQ ID NO: 45109 - protein, 140 aa, Homo sapiens
  Payload ID: 9200
  Gene Symbol: LTBP3
  Gene Name: latent transforming growth factor beta binding protein 3
  ENSP ID: ENSP00000432121
LNECAKPHLCGDGGFCINFPGHYKCNCYPGYRLKASRPPVCEDIDECRDPSSCPDGKCENKPGSFKCIACQPGYRSQGGGACRDVNECAEGSPCSPGWCENLPGSFRCTCAQGYAPAPDGRSCLGERQHPRPGPPPPPTR

SEQ ID NO: 45110 - protein, 116 aa, Homo sapiens
  Payload ID: 9200
  Gene Symbol: LTBP3
  Gene Name: latent transforming growth factor beta binding protein 3
  ENSP ID: ENSP00000432350
MPGPRGAAGGLAPEMRGAGAAGLLALLLLLLLLLLGLGGRVEGGPAGERGAGGGGALARERFKVVFAPVICKRTCLKGQCRDSCQQGSNMTLIGENGHSTDTLTGSGFRWCALSPA

SEQ ID NO: 45111 - protein, 143 aa, Homo sapiens
  Payload ID: 9200
  Gene Symbol: LTBP3
  Gene Name: latent transforming growth factor beta binding protein 3
  ENSP ID: ENSP00000432476
FQDTLPKQPCGSNPLPGLTKQEDCCGSIGTAWGQSKCHKCPQLQYTGVQKPGPVRGEVGADCPQGYKRLNSTHCQADKPEEKSLCFRLVSPEHQCQHPLTTRLTRQLCCCSVGKAWGARCQRCPTDGTAAFKEICPAGKGYHI

SEQ ID NO: 45112 - protein, 306 aa, Homo sapiens
  Payload ID: 9200
  Gene Symbol: LTBP3
  Gene Name: latent transforming growth factor beta binding protein 3
  ENSP ID: ENSP00000434315
MLFGSEICKEGKCVNTQPGYECYCKQGFYYDGNLLECVDVDECLDESNCRNGVCENTRGGYRCACTPPAEYSPAQRQCLSPEEMDVDECQDPAACRPGRCVNLPGSYRCECRPPWVPGPSGRDCQLPESPAERAPERRDVCWSQRGEDGMCAGPLAGPALTFDDCCCRQGRGWGAQCRPCPPRGAGSHCPTSQSESNSFWDTSPLLLGKPPRDEDSSEEDSDECRCVSGRCVPRPGGAVCECPGGFQLDASRARCVDIDECRELNQRGLLCKSERCVNTSGSFRCVCKAGFARSRPHGACVPQRRR

SEQ ID NO: 45113 - protein, 259 aa, Homo sapiens
  Payload ID: 9200
  Gene Symbol: LTBP3
  Gene Name: latent transforming growth factor beta binding protein 3
  ENSP ID: ENSP00000434406
MLFGSEICKEGKCVNTQPGYECYCKQGFYYDGNLLECVDVDECLDESNCRNGVCENTRGGYRCACTPPAEYSPAQRQCLSPEEMERAPERRDVCWSQRGEDGMCAGPLAGPALTFDDCCCRQGRGWGAQCRPCPPRGAGSHCPTSQSESNSFWDTSPLLLGKPPRDEDSSEEDSDECRCVSGRCVPRPGGAVCECPGGFQLDASRARCVDIDECRELNQRGLLCKSERCVNTSGSFRCVCKAGFARSRPHGACVPQRRR

SEQ ID NO: 45114 - protein, 69 aa, Homo sapiens
  Payload ID: 9200
  Gene Symbol: LTBP3
  Gene Name: latent transforming growth factor beta binding protein 3
  ENSP ID: ENSP00000435146
  MOD_RES (1)..(1): Any amino acid
XFAPVICKRTCLKGQCRDSCQQGSNMTLIGENGHSTDTLTGSGFRVGPAPRGECARPSPARGLSPGAPH

SEQ ID NO: 45115 - protein, 1136 aa, Homo sapiens
  Payload ID: 9200
  Gene Symbol: LTBP3
  Gene Name: latent transforming growth factor beta binding protein 3
  ENSP ID: ENSP00000435276
MTLIGENGHSTDTLTGSGFRVVVCPLPCMNGGQCSSRNQCLCPPDFTGRFCQVPAGGAGGGTGGSGPGLSRTGALSTGALPPLAPEGDSVASKHAIYAVQVIADPPGPGEGPPAQHAAFLVPLGPGQISAEVQAPPPVVNVRVHHPPEASVQVHRIESSNAESAAPSQHLLPHPKPSHPRPPTQKPLGRCFQDTLPKQPCGSNPLPGLTKQEDCCGSIGTAWGQSKCHKCPQLQYTGVQKPGPVRGEVGADCPQGYKRLNSTHCQDINECAMPGVCRHGDCLNNPGSYRCVCPPGHSLGPSRTQCIADKPEEKSLCFRLVSPEHQCQHPLTTRLTRQLCCCSVGKAWGARCQRCPTDGTAAFKEICPAGKGYHILTSHQTLTIQGESDFSLFLHPDGPPKPQQLPESPSQAPPPEDTEEERGVTTDSPVSEERSVQQSHPTATTTPARPYPELISRPSPPTMRWFLPDLPPSRSAVEIAPTQVTETDECRLNQNICGHGECVPGPPDYSCHCNPGYRSHPQHRYCVDVNECEAEPCGPGRGICMNTGGSYNCHCNRGYRLHVGAGGRSCVDLNECAKPHLCGDGGFCINFPGHYKCNCYPGYRLKASRPPVCEDIDECRDPSSCPDGKCENKPGSFKCIACQPGYRSQGGGACRDVNECAEGSPCSPGWCENLPGSFRCTCAQGYAPAPDGRSCLDVDECEAGDVCDNGICSNTPGSFQCQCLSGYHLSRDRSHCEDIDECDFPAACIGGDCINTNGSYRCLCPQGHRLVGGRKCQDIDECSQDPSLCLPHGACKNLQGSYVCVCDEGFTPTQDQHGCEEVEQPHHKKECYLNFDDTVFCDSVLATNVTQQECCCSLGAGWGDHCEIYPCPVYSSAEFHSLCPDGKGYTQDNNIVNYGIPAHRDIDECMLFGSEICKEGKCVNTQPGYECYCKQGFYYDGNLLECVDVDECLDESNCRNGVCENTRGGYRCACTPPAEYSPAQRQCLSPEEMDVDECQDPAACRPGRCVNLPGSYRCECRPPWVPGPSGRDCQLPESPAERAPERRDVCWSQRGEDGMCAGPLAGPALTFDDCCCRQGRGWGAQCRPCPPRGAGSHCPTSQSESNSFWDTSPLLLGKPPRDEDSSEEDSDECRCVS

SEQ ID NO: 45116 - protein, 733 aa, Homo sapiens
  Payload ID: 9200
  Gene Symbol: LTBP3
  Gene Name: latent transforming growth factor beta binding protein 3
  ENSP ID: ENSP00000435530
MPAETDECRLNQNICGHGECVPGPPDYSCHCNPGYRSHPQHRYCVDVNECEAEPCGPGRGICMNTGGSYNCHCNRGYRLHVGAGGRSCVDLNECAKPHLCGDGGFCINFPGHYKCNCYPGYRLKASRPPVCEDIDECRDPSSCPDGKCENKPGSFKCIACQPGYRSQGGGACRDVNECAEGSPCSPGWCENLPGSFRCTCAQGYAPAPDGRSCLDVDECEAGDVCDNGICSNTPGSFQCQCLSGYHLSRDRSHCEDIDECDFPAACIGGDCINTNGSYRCLCPQGHRLVGGRKCQDIDECSQDPSLCLPHGACKNLQGSYVCVCDEGFTPTQDQHGCEEVEQPHHKKECYLNFDDTVFCDSVLATNVTQQECCCSLGAGWGDHCEIYPCPVYSSAEFHSLCPDGKGYTQDNNIVNYGIPAHRDIDECMLFGSEICKEGKCVNTQPGYECYCKQGFYYDGNLLECVDVDECLDESNCRNGVCENTRGGYRCACTPPAEYSPAQRQCLSPEEMDVDECQDPAACRPGRCVNLPGSYRCECRPPWVPGPSGRDCQLPESPAERAPERRDVCWSQRGEDGMCAGPLAGPALTFDDCCCRQGRGWGAQCRPCPPRGAGSHCPTSQSESNSFWDTSPLLLGKPPRDEDSSEEDSDECRCVSGRCVPRPGGAVCECPGGFQLDASRARCVDIDECRELNQRGLLCKSERCVNTSGSFRCVCKAGFARSRPHGACVPQRRR

SEQ ID NO: 45117 - protein, 123 aa, Homo sapiens
  Payload ID: 9200
  Gene Symbol: LTBP3
  Gene Name: latent transforming growth factor beta binding protein 3
  ENSP ID: ENSP00000436032
MERAPERRDVCWSQRGEDGMCAGPLAGPALTFDDCCCRQGRGWGAQCRPCPPRGAGSHCPTSQSESNSFWDTSPLLLGKPPRDEDSSEEDSDECRCVSGRCVPRPGGAVCECPGGFQLDASRA

SEQ ID NO: 45118 - protein, 221 aa, Homo sapiens
  Payload ID: 9200
  Gene Symbol: LTBP3
  Gene Name: latent transforming growth factor beta binding protein 3
  ENSP ID: ENSP00000436341
MLFGSEICKEGKCVNTQPGYECYCKQGFYYDGNLLECVDVDECLDESNCRNGVCENTRGGYRCACTPPAEYSPAQRQCLSPEEMERAPERRDVCWSQRGEDGMCAGPLAGPALTFDDCCCRQGRGWGAQCRPCPPRGAGSHCPTSQSESNSFWDTSPLLLGKPPRDEDSSEEDSDECRCVSGRCVPRPGGAVCECPGGFQLDASRARCVDIDECRELNQRG

SEQ ID NO: 45119 - protein, 263 aa, Homo sapiens
  Payload ID: 9200
  Gene Symbol: LTBP3
  Gene Name: latent transforming growth factor beta binding protein 3
  ENSP ID: ENSP00000441912
MLFGSEICKEGKCVNTQPGYECYCKQGFYYDGNLLECVDVDECLDESNCRNGVCENTRGGYRCACTPPAEYSPAQRQCLSPEEMDVDECQDPAACRPGRCVNLPGSYRCECRPPWVPGPSGRDCQLPESPAERAPERRDVCWSQRGEDGMCAGPLAGPALTFDDCCCRQGRGWGAQCRPCPPRGAGSHCPTSQSESNSFWDTSPLLLGKPPRDEDSSEEDSDECRCVSAAACRGRAAPCASVPAASSSTPPAPAAWISTSAES

SEQ ID NO: 45120 - protein, 1587 aa, Homo sapiens
  Payload ID: 9201
  Gene Symbol: LTBP4
  Gene Name: latent transforming growth factor beta binding protein 4
  ENSP ID: ENSP00000204005
MGDVKALLFVAAARARRLGGAAASESLAVSEAFCRVRSCQPKKCAGPQRCLNPVPAVPSPSPSVRKRQVSLNWQPLTLQEARALLKRRRPRGPGGRGLLRRRPPQRAPAGKAPVLCPLICHNGGVCVKPDRCLCPPDFAGKFCQLHSSGARPPAPAVPGLTRSVYTMPLANHRDDEHGVASMVSVHVEHPQEASVVVHQVERVSGPWEEADAEAVARAEAAARAEAAAPYTVLAQSAPREDGYSDASGFGYCFRELRGGECASPLPGLRTQEVCCRGAGLAWGVHDCQLCSERLGNSERVSAPDGPCPTGFERVNGSCEDVDECATGGRCQHGECANTRGGYTCVCPDGFLLDSSRSSCISQHVISEAKGPCFRVLRDGGCSLPILRNITKQICCCSRVGKAWGRGCQLCPPFGSEGFREICPAGPGYHYSASDLRYNTRPLGQEPPRVSLSQPRTLPATSRPSAGFLPTHRLEPRPEPRPDPRPGPELPLPSIPAWTGPEIPESGPSSGMCQRNPQVCGPGRCISRPSGYTCACDSGFRLSPQGTRCIDVDECRRVPPPCAPGRCENSPGSFRCVCGPGFRAGPRAAECLDVDECHRVPPPCDLGRCENTPGSFLCVCPAGYQAAPHGASCQDVDECTQSPGLCGRGACKNLPGSFRCVCPAGFRGSACEEDVDECAQEPPPCGPGRCDNTAGSFHCACPAGFRSRGPGAPCQDVDECARSPPPCTYGRCENTEGSFQCVCPMGFQPNTAGSECEDVDECENHLACPGQECVNSPGSFQCRTCPSGHHLHRGRCTDVDECSSGAPPCGPHGHCTNTEGSFRCSCAPGYRAPSGRPGPCADVNECLEGDFCFPHGECLNTDGSFACTCAPGYRPGPRGASCLDVDECSEEDLCQSGICTNTDGSFECICPPGHRAGPDLASCLDVDECRERGPALCGSQRCENSPGSYRCVRDCDPGYHAGPEGTCDDVDECQEYGPEICGAQRCENTPGSYRCTPACDPGYQPTPGGGCQDVDECRNRSFCGAHAVCQNLPGSFQCLCDQGYEGARDGRHCVDVNECETLQGVCGAALCENVEGSFLCVCPNSPEEFDPMTGRCVPPRTSAGTFPGSQPQAPASPVLPARPPPPPLPRRPSTPRQGPVGSGRRECYFDTAAPDACDNILARNVTWQECCCTVGEGWGSGCRIQQCPGTETAEYQSLCPHGRGYLAPSGDLSLRRDVDECQLFRDQVCKSGVCVNTAPGYSCYCSNGYYYHTQRLECIDNDECADEEPACEGGRCVNTVGSYHCTCEPPLVLDGSQRRCVSNESQSLDDNLGVCWQEVGADLVCSHPRLDRQATYTECCCLYGEAWGMDCALCPAQDSDDFEALCNVLRPPAYSPPRPGGFGLPYEYGPDLGPPYQGLPYGPELYPPPALPYDPYPPPPGPFARREAPYGAPRFDMPDFEDDGGPYGESEAPAPPGPGTRWPYRSRDTRRSFPEPEEPPEGGSYAGSLAEPYEELEAEECGILDGCTNGRCVRVPEGFTCRCFDGYRLDMTRMACVDINECDEAEAASPLCVNARCLNTDGSFRCICRPGFAPTHQPHHCAPARPRA

SEQ ID NO: 45121 - protein, 957 aa, Homo sapiens
  Payload ID: 9201
  Gene Symbol: LTBP4
  Gene Name: latent transforming growth factor beta binding protein 4
  ENSP ID: ENSP00000243562
  MOD_RES (1)..(1): Any amino acid
XVDECRRVPPPCAPGRCENSPGSFRCVCGPGFRAGPRAAECLDVDECHRVPPPCDLGRCENTPGSFLCVCPAGYQAAPHGASCQDVDECARSPPPCTYGRCENTEGSFQCVCPMGFQPNTAGSECEDVDECENHLACPGQECVNSPGSFQCRTCPSGHHLHRGRCTDVDECSSGAPPCGPHGHCTNTEGSFRCSCAPGYRAPSGRPGPCADVNECLEGDFCFPHGECLNTDGSFACTCAPGYRPGPRGASCLDVDECSEEDLCQSGICTNTDGSFECICPPGHRAGPDLASCLDVDECRERGPALCGSQRCENSPGSYRCVRDCDPGYHAGPEGTCDDVDECQEYGPEICGAQRCENTPGSYRCTPACDPGYQPTPGGGCQDVDECRNRSFCGAHAVCQNLPGSFQCLCDQGYEGARDGRHCVDVNECETLQGVCGAALCENVEGSFLCVCPNSPEEFDPMTGRCVPPRTSAGTFPGSQPQAPASPVLPARPPPPPLPRRPSTPRQGPVGSGRRECYFDTAAPDACDNILARNVTWQECCCTVGEGWGSGCRIQQCPGTETAEYQSLCPHGRGYLAPSGDLSLRRDVDECQLFRDQVCKSGVCVNTAPGYSCYCSNGYYYHTQRLECIDNDECADEEPACEGGRCVNTVGSYHCTCEPPLVLDGSQRRCVSNESQSLDDNLGVCWQEVGADLVCSHPRLDRQATYTECCCLYGEAWGMDCALCPAQDSDDFEALCNVLRPPAYSPPRPGGFGLPYEYGPDLGPPYQGLPYGPELYPPPALPYDPYPPPPGPFARREAPYGAPRFDMPDFEDDGGPYGESEAPAPPGPGTRWPYRSRDTRRSFPEPEEPPEGGSYAGSLAEPYEELEAEECGILDGCTNGRCVRVPEGFTCRCFDGYRLDMTRMACVDINECDEAEAASPLCVNARCLNTDGSFRCICRPGFAPTHQPHHCAPARPRA

SEQ ID NO: 45122 - protein, 1624 aa, Homo sapiens
  Payload ID: 9201
  Gene Symbol: LTBP4
  Gene Name: latent transforming growth factor beta binding protein 4
  Uniprot ID: Q8N2S1
  ENSP ID: ENSP00000311905
MPRPGTSGRRPLLLVLLLPLFAAATSAASPSPSPSQVVEVPGVPSRPASVAVCRCCPGQTSRRSRCIRAFCRVRSCQPKKCAGPQRCLNPVPAVPSPSPSVRKRQVSLNWQPLTLQEARALLKRRRPRGPGGRGLLRRRPPQRAPAGKAPVLCPLICHNGGVCVKPDRCLCPPDFAGKFCQLHSSGARPPAPAVPGLTRSVYTMPLANHRDDEHGVASMVSVHVEHPQEASVVVHQVERVSGPWEEADAEAVARAEAAARAEAAAPYTVLAQSAPREDGYSDASGFGYCFRELRGGECASPLPGLRTQEVCCRGAGLAWGVHDCQLCSERLGNSERVSAPDGPCPTGFERVNGSCEDVDECATGGRCQHGECANTRGGYTCVCPDGFLLDSSRSSCISQHVISEAKGPCFRVLRDGGCSLPILRNITKQICCCSRVGKAWGRGCQLCPPFGSEGFREICPAGPGYHYSASDLRYNTRPLGQEPPRVSLSQPRTLPATSRPSAGFLPTHRLEPRPEPRPDPRPGPELPLPSIPAWTGPEIPESGPSSGMCQRNPQVCGPGRCISRPSGYTCACDSGFRLSPQGTRCIDVDECRRVPPPCAPGRCENSPGSFRCVCGPGFRAGPRAAECLDVDECHRVPPPCDLGRCENTPGSFLCVCPAGYQAAPHGASCQDVDECTQSPGLCGRGACKNLPGSFRCVCPAGFRGSACEEDVDECAQEPPPCGPGRCDNTAGSFHCACPAGFRSRGPGAPCQDVDECARSPPPCTYGRCENTEGSFQCVCPMGFQPNTAGSECEDVDECENHLACPGQECVNSPGSFQCRTCPSGHHLHRGRCTDVDECSSGAPPCGPHGHCTNTEGSFRCSCAPGYRAPSGRPGPCADVNECLEGDFCFPHGECLNTDGSFACTCAPGYRPGPRGASCLDVDECSEEDLCQSGICTNTDGSFECICPPGHRAGPDLASCLDVDECRERGPALCGSQRCENSPGSYRCVRDCDPGYHAGPEGTCDDVDECQEYGPEICGAQRCENTPGSYRCTPACDPGYQPTPGGGCQDVDECRNRSFCGAHAVCQNLPGSFQCLCDQGYEGARDGRHCVDVNECETLQGVCGAALCENVEGSFLCVCPNSPEEFDPMTGRCVPPRTSAGTFPGSQPQAPASPVLPARPPPPPLPRRPSTPRQGPVGSGRRECYFDTAAPDACDNILARNVTWQECCCTVGEGWGSGCRIQQCPGTETAEYQSLCPHGRGYLAPSGDLSLRRDVDECQLFRDQVCKSGVCVNTAPGYSCYCSNGYYYHTQRLECIDNDECADEEPACEGGRCVNTVGSYHCTCEPPLVLDGSQRRCVSNESQSLDDNLGVCWQEVGADLVCSHPRLDRQATYTECCCLYGEAWGMDCALCPAQDSDDFEALCNVLRPPAYSPPRPGGFGLPYEYGPDLGPPYQGLPYGPELYPPPALPYDPYPPPPGPFARREAPYGAPRFDMPDFEDDGGPYGESEAPAPPGPGTRWPYRSRDTRRSFPEPEEPPEGGSYAGSLAEPYEELEAEECGILDGCTNGRCVRVPEGFTCRCFDGYRLDMTRMACVDINECDEAEAASPLCVNARCLNTDGSFRCICRPGFAPTHQPHHCAPARPRA

SEQ ID NO: 45123 - protein, 1557 aa, Homo sapiens
  Payload ID: 9201
  Gene Symbol: LTBP4
  Gene Name: latent transforming growth factor beta binding protein 4
  Uniprot ID: Q8N2S1
  ENSP ID: ENSP00000380031
MAGGVRLLWVSLLVLLAQLGPQPGLGRLGERLRVRFTPVVCGLRCVHGPTGSRCTPTCAPRNATSVDSGAPGGAAPGGPGFRAFLCPLICHNGGVCVKPDRCLCPPDFAGKFCQLHSSGARPPAPAVPGLTRSVYTMPLANHRDDEHGVASMVSVHVEHPQEASVVVHQVERVSGPWEEADAEAVARAEAAARAEAAAPYTVLAQSAPREDGYSDASGFGYCFRELRGGECASPLPGLRTQEVCCRGAGLAWGVHDCQLCSERLGNSERVSAPDGPCPTGFERVNGSCEDVDECATGGRCQHGECANTRGGYTCVCPDGFLLDSSRSSCISQHVISEAKGPCFRVLRDGGCSLPILRNITKQICCCSRVGKAWGRGCQLCPPFGSEGFREICPAGPGYHYSASDLRYNTRPLGQEPPRVSLSQPRTLPATSRPSAGFLPTHRLEPRPEPRPDPRPGPELPLPSIPAWTGPEIPESGPSSGMCQRNPQVCGPGRCISRPSGYTCACDSGFRLSPQGTRCIDVDECRRVPPPCAPGRCENSPGSFRCVCGPGFRAGPRAAECLDVDECHRVPPPCDLGRCENTPGSFLCVCPAGYQAAPHGASCQDVDECTQSPGLCGRGACKNLPGSFRCVCPAGFRGSACEEDVDECAQEPPPCGPGRCDNTAGSFHCACPAGFRSRGPGAPCQDVDECARSPPPCTYGRCENTEGSFQCVCPMGFQPNTAGSECEDVDECENHLACPGQECVNSPGSFQCRTCPSGHHLHRGRCTDVDECSSGAPPCGPHGHCTNTEGSFRCSCAPGYRAPSGRPGPCADVNECLEGDFCFPHGECLNTDGSFACTCAPGYRPGPRGASCLDVDECSEEDLCQSGICTNTDGSFECICPPGHRAGPDLASCLDVDECRERGPALCGSQRCENSPGSYRCVRDCDPGYHAGPEGTCDDVDECQEYGPEICGAQRCENTPGSYRCTPACDPGYQPTPGGGCQDVDECRNRSFCGAHAVCQNLPGSFQCLCDQGYEGARDGRHCVDVNECETLQGVCGAALCENVEGSFLCVCPNSPEEFDPMTGRCVPPRTSAGTFPGSQPQAPASPVLPARPPPPPLPRRPSTPRQGPVGSGRRECYFDTAAPDACDNILARNVTWQECCCTVGEGWGSGCRIQQCPGTETAEYQSLCPHGRGYLAPSGDLSLRRDVDECQLFRDQVCKSGVCVNTAPGYSCYCSNGYYYHTQRLECIDNDECADEEPACEGGRCVNTVGSYHCTCEPPLVLDGSQRRCVSNESQSLDDNLGVCWQEVGADLVCSHPRLDRQATYTECCCLYGEAWGMDCALCPAQDSDDFEALCNVLRPPAYSPPRPGGFGLPYEYGPDLGPPYQGLPYGPELYPPPALPYDPYPPPPGPFARREAPYGAPRFDMPDFEDDGGPYGESEAPAPPGPGTRWPYRSRDTRRSFPEPEEPPEGGSYAGSLAEPYEELEAEECGILDGCTNGRCVRVPEGFTCRCFDGYRLDMTRMACVDINECDEAEAASPLCVNARCLNTDGSFRCICRPGFAPTHQPHHCAPARPRA

SEQ ID NO: 45124 - protein, 191 aa, Homo sapiens
  Payload ID: 9201
  Gene Symbol: LTBP4
  Gene Name: latent transforming growth factor beta binding protein 4
  ENSP ID: ENSP00000469406
  MOD_RES (1)..(1): Any amino acid
XVDECSEEDLCQSGICTNTDGSFECICPPGHRAGPDLASCLDVDECRERGPALCGSQRCENSPGSYRCVRDCDPGYHAGPEGTCDDVDECQEYGPEICGAQRCENTPGSYRCTPACDPGYQPTPGGGCQDVNECETLQGVCGAALCENVEGSFLCVCPNSPEEFDPMTGRCVPPRTSADVDECQLFRDQVC

SEQ ID NO: 45125 - protein, 303 aa, Homo sapiens
  Payload ID: 9201
  Gene Symbol: LTBP4
  Gene Name: latent transforming growth factor beta binding protein 4
  ENSP ID: ENSP00000469785
ECLNTDGSFACTCAPGYRPGPRGASCLDVDECSEEDLCQSGICTNTDGSFECICPPGHRAGPDLASCLDVDECRERGPALCGSQRCENSPGSYRCVRDCDPGYHAGPEGTCDDVNECETLQGVCGAALCENVEGSFLCVCPNSPEEFDPMTGRCVPPRTSADVDECQLFRDQVCKSGVCVNTAPGYSCYCSNGYYYHTQRLECIDNDECADEEPACEGGRCVNTVGSYHCTCEPPLVLDGSQRRCVSNESQSLDDNLGVCWQEVGADLVCSHPRLDRQATYTECCCLYGEAWGMDCALCPAQD

SEQ ID NO: 45126 - protein, 673 aa, Homo sapiens
  Payload ID: 9201
  Gene Symbol: LTBP4
  Gene Name: latent transforming growth factor beta binding protein 4
  ENSP ID: ENSP00000470824
  MOD_RES (1)..(1): Any amino acid
XNTEGSFQCVCPMGFQPNTAGSECEDVDECENHLACPGQECVNSPGSFQCRTCPSGHHLHRGRCTDVDECSSGAPPCGPHGHCTNTEGSFRCSCAPGYRAPSGRPGPCADVNECLEGDFCFPHGECLNTDGSFACTCAPGYRPGPRGASCLDVDECSEEDLCQSGICTNTDGSFECICPPGHRAGPDLASCLDVDECRERGPALCGSQRCENSPGSYRCVRDCDPGYHAGPEGTCDDVNECETLQGVCGAALCENVEGSFLCVCPNSPEEFDPMTGRCVPPRTSAGTFPGSQPQAPASPVLPARPPPPPLPRRPSTPRQGPVGSGRRECYFDTAAPDACDNILARNVTWQECCCTVGEGWGSGCRIQQCPGTETAEYQSLCPHGRGYLAPSGDLSLRRDVDECQLFRDQVCKSGVCVNTAPGYSCYCSNGYYYHTQRLECIDNDECADEEPACEGGRCVNTVGSYHCTCEPPLVLDGSQRRCVSNESQSLDDNLGVCWQEVGADLVCSHPRLDRQATYTECCCLYGEAWGMDCALCPAQDSDDFEALCNVLRPPAYSPPRPGGFGLPYEYGPDLGPPYQGLPYGPELYPPPALPYDPYPPPPGPFARREAPYGAPRFDMPDFEDDGGPYGESEAPAPPGPGTRWPYRSRDTRRSFPEPEEPPEGGSYAGSLAE

SEQ ID NO: 45127 - protein, 224 aa, Homo sapiens
  Payload ID: 9201
  Gene Symbol: LTBP4
  Gene Name: latent transforming growth factor beta binding protein 4
  ENSP ID: ENSP00000472995
  MOD_RES (1)..(1): Any amino acid
XNTDGSFACTCAPGYRPGPRGASCLDVDECSEEDLCQSGICTNTDGSFECICPPGHRAGPDLASCLDVDECRERGPALCGSQRCENSPGSYRCVRDCDPGYHAGPEGTCDDVDECQEYGPEICGAQRCENTPGSYRCTPACDPGYQPTPGGGCQDVNECETLQGVCGAALCENVEGSFLCVCPNSPEEFDPMTGRCVPPRTSAGTFPGSQPQAPASPVLPARPP

SEQ ID NO: 45128 - protein, 182 aa, Homo sapiens
  Payload ID: 9201
  Gene Symbol: LTBP4
  Gene Name: latent transforming growth factor beta binding protein 4
  ENSP ID: ENSP00000478928
  MOD_RES (1)..(1): Any amino acid
XGPEICGAQRCENTPGSYRCTPACDPGYQPTPGGGCQDVDECRNRSFCGAHAVCQNLPGSFQCLCDQGYEGARDGRHCVDVNECETLQGVCGAALCENVEGSFLCVCPNSPEEFDPMTGRCVPPRTSADVDECQLFRDQVCKSGVCVNTAPGYSCYCSNGYYYHTQRLECIDNDECADEEPA

SEQ ID NO: 45129 - protein, 94 aa, Homo sapiens
  Payload ID: 9201
  Gene Symbol: LTBP4
  Gene Name: latent transforming growth factor beta binding protein 4
  ENSP ID: ENSP00000479612
  MOD_RES (1)..(1): Any amino acid
XRFDMPDFEDDGGPYGESEAEECGILDGCTNGRCVRVPEGFTCRCFDGYRLDMTRMACVDINECDEAEAASPLCVNARCLNTDGSFRCICRPGF

SEQ ID NO: 45130 - protein, 252 aa, Homo sapiens
  Payload ID: 9201
  Gene Symbol: LTBP4
  Gene Name: latent transforming growth factor beta binding protein 4
  ENSP ID: ENSP00000479712
  MOD_RES (1)..(1): Any amino acid
XFRCSCAPGYRAPSGRPGPCADVNECLEGDFCFPHGECLNTDGSFACTCAPGYRPGPRGASCLDVDECSEEDLCQSGICTNTDGSFECICPPGHRAGPDLASCLDVDECRERGPALCGSQRCENSPGSYRCVRDCDPGYHAGPEGTCDDVDECRNRSFCGAHAVCQNLPGSFQCLCDQGYEGARDGRHCVDVNECETLQGVCGAALCENVEGSFLCVCPNSPEEFDPMTGRCVPPRTSAGTFPGSQPQAPAS

SEQ ID NO: 45131 - protein, 70 aa, Homo sapiens
  Payload ID: 9201
  Gene Symbol: LTBP4
  Gene Name: latent transforming growth factor beta binding protein 4
  ENSP ID: ENSP00000480629
MSARTAPFSWSGGKLRPKDQETLASGHTSWKALLFVAAARARRLGGAAASEPSAGSEAASPKSVQAPSGA

SEQ ID NO: 45132 - protein, 189 aa, Homo sapiens
  Payload ID: 9201
  Gene Symbol: LTBP4
  Gene Name: latent transforming growth factor beta binding protein 4
  ENSP ID: ENSP00000480888
  MOD_RES (1)..(1): Any amino acid
XVDECSEEDLCQSGICTNTDGSFECICPPGHRAGPDLASCLDVDECRERGPALCGSQRCENSPGSYRCVRDCDPGYHAGPEGTCDDVDECRNRSFCGAHAVCQNLPGSFQCLCDQGYEGARDGRHCVDVNECETLQGVCGAALCENVEGSFLCVCPNSPEEFDPMTGRCVPPRTSAGTFPGSQPQAPAS

SEQ ID NO: 45133 - protein, 145 aa, Homo sapiens
  Payload ID: 9201
  Gene Symbol: LTBP4
  Gene Name: latent transforming growth factor beta binding protein 4
  ENSP ID: ENSP00000481081
PPGPGTRWPYRSRDTRRSFPEPEEPPEGGSYAGSLAEPYEELEAEECGILDGCTNGRCVRVPEGFTCRCFDGYRLDMTRMACVAFSSDRCLPSADINECDEAEAASPLCVNARCLNTDGSFRCICRPGFAPTHQPHHCAPARPRA

SEQ ID NO: 45134 - protein, 44 aa, Homo sapiens
  Payload ID: 9201
  Gene Symbol: LTBP4
  Gene Name: latent transforming growth factor beta binding protein 4
  ENSP ID: ENSP00000482179
MLQPQALLFVAAARARRLGGAAASEPSAGSEAASPKSVQAPSGA

SEQ ID NO: 45135 - protein, 44 aa, Homo sapiens
  Payload ID: 9201
  Gene Symbol: LTBP4
  Gene Name: latent transforming growth factor beta binding protein 4
  ENSP ID: ENSP00000483230
MGDVKALLFVAAARARRLGGAAASEPSAGSEAASPKSVQAPSGA

SEQ ID NO: 45136 - protein, 222 aa, Homo sapiens
  Payload ID: 9202
  Gene Symbol: LXN
  Gene Name: latexin
  Uniprot ID: Q9BS40
  ENSP ID: ENSP00000264265
MEIPPTNYPASRAALVAQNYINYQQGTPHRVFEVQKVKQASMEDIPGRGHKYHLKFAVEEIIQKQVKVNCTAEVLYPSTGQETAPEVNFTFEGETGKNPDEEDNTFYQRLKSMKEPLEAQNIPDNFGNVSPEMTLVLHLAWVACGYIIWQNSTEDTWYKMVKIQTVKQVQRNDDFIELDYTILLHNIASQEIIPWQMQVLWHPQYGTKVKHNSRLPKEVQLE

SEQ ID NO: 45137 - protein, 157 aa, Homo sapiens
  Payload ID: 9202
  Gene Symbol: LXN
  Gene Name: latexin
  ENSP ID: ENSP00000419373
  MOD_RES (1)..(1): Any amino acid
XTAEVLYPSTGQETAPEVNFTFEGETGKNPDEEDNTFYQRLKSMKEPLEAQNIPDNFGNVSPEMTLVLHLAWVACGYIIWQNSTEDTWYKMVKIQTVKQVQRNDDFIELDYTILLHNIASQFHGIHDSTNSIFTFHLNTSTAIQTFSVPAFQEGKKS

SEQ ID NO: 45138 - protein, 374 aa, Homo sapiens
  Payload ID: 9203
  Gene Symbol: LAYN
  Gene Name: layilin
  Uniprot ID: Q6UX15
  ENSP ID: ENSP00000364764
MRPGTALQAVLLAVLLVGLRAATGRLLSGQPVCRGGTQRPCYKVIYFHDTSRRLNFEEAKEACRRDGGQLVSIESEDEQKLIEKFIENLLPSDGDFWIGLRRREEKQSNSTACQDLYAWTDGSISQFRNWYVDEPSCGSEVCVVMYHQPSAPAGIGGPYMFQWNDDRCNMKNNFICKYSDEKPAVPSREAEGEETELTTPVLPEETQEEDAKKTFKESREAALNLAYILIPSIPLLLLLVVTTVVCWVWICRKRKREQPDPSTKKQHTIWPSPHQGNSPDLEVYNVIRKQSEADLAETRPDLKNISFRVCSGEATPDDMSCDYDNMAVNPSESGFVTLVSVESGFVTNDIYEFSPDQMGRSKESGWVENEIYGY

SEQ ID NO: 45139 - protein, 382 aa, Homo sapiens
  Payload ID: 9203
  Gene Symbol: LAYN
  Gene Name: layilin
  Uniprot ID: Q6UX15
  ENSP ID: ENSP00000364765
MRPGTALQAVLLAVLLVGLRAATGRLLSASDLDLRGGQPVCRGGTQRPCYKVIYFHDTSRRLNFEEAKEACRRDGGQLVSIESEDEQKLIEKFIENLLPSDGDFWIGLRRREEKQSNSTACQDLYAWTDGSISQFRNWYVDEPSCGSEVCVVMYHQPSAPAGIGGPYMFQWNDDRCNMKNNFICKYSDEKPAVPSREAEGEETELTTPVLPEETQEEDAKKTFKESREAALNLAYILIPSIPLLLLLVVTTVVCWVWICRKRKREQPDPSTKKQHTIWPSPHQGNSPDLEVYNVIRKQSEADLAETRPDLKNISFRVCSGEATPDDMSCDYDNMAVNPSESGFVTLVSVESGFVTNDIYEFSPDQMGRSKESGWVENEIYGY

SEQ ID NO: 45140 - protein, 229 aa, Homo sapiens
  Payload ID: 9203
  Gene Symbol: LAYN
  Gene Name: layilin
  Uniprot ID: Q6UX15
  ENSP ID: ENSP00000392942
MVTSGLGSGGVRRNKAIAQPARTFMLGLMAAYHNLEKPAVPSREAEGEETELTTPVLPEETQEEDAKKTFKESREAALNLAYILIPSIPLLLLLVVTTVVCWVWICRKRKREQPDPSTKKQHTIWPSPHQGNSPDLEVYNVIRKQSEADLAETRPDLKNISFRVCSGEATPDDMSCDYDNMAVNPSESGFVTLVSVESGFVTNDIYEFSPDQMGRSKESGWVENEIYGY

SEQ ID NO: 45141 - protein, 109 aa, Homo sapiens
  Payload ID: 9203
  Gene Symbol: LAYN
  Gene Name: layilin
  ENSP ID: ENSP00000431627
MYHQPSAPAGIGGPYMFQWNDDRCNMKNNFICKYSDEKPAVPSREAEGEETELTTPVLPEETQEEDAKKTFKESREAALNLAYILIPSIPLLLLLVVTTVVCWVWICRK

SEQ ID NO: 45142 - protein, 49 aa, Homo sapiens
  Payload ID: 9203
  Gene Symbol: LAYN
  Gene Name: layilin
  ENSP ID: ENSP00000432434
MYHQPSAPAGIGGPYMFQWNDDRCNMKNNFICKYSDEKPAVPSREAEGE

SEQ ID NO: 45143 - protein, 134 aa, Homo sapiens
  Payload ID: 9203
  Gene Symbol: LAYN
  Gene Name: layilin
  ENSP ID: ENSP00000434300
MRPGTALQAVLLAVLLVGLRAATGRLLSGQPVCRGGTQRPCYKVIYFHDTSRRLNFEEAKEACRRDGGQLVSIESEDEQKLIEKFIENLLPSDGDFWIGLRRREEKQSNSTACQDLYAWTDGSISQFRETSSSF

SEQ ID NO: 45144 - protein, 270 aa, Homo sapiens
  Payload ID: 9203
  Gene Symbol: LAYN
  Gene Name: layilin
  ENSP ID: ENSP00000434328
MRPGTALQAVLLAVLLVGLRAATGRLLSASDLDLRGGQPVCRGGTQRPCYKVIYFHDTSRRLNFEEAKEACRRDGGQLVSIESEDEQKLIEKFIENLLPSDGDFWIGLRRREEKQSNSTACQDLYAWTDGSISQFRNWYVDEPSCGSEVCVVMYHQPSAPAGIGGPYMFQWNDDRCNMKNNFICKYSDEKPAVPSREAEGEETELTTPVLPEETQEEDAKKTFKESREAALNLAYILIPSIPLLLLLVVTTVVCWVWICRKRQKTGAARP

SEQ ID NO: 45145 - protein, 262 aa, Homo sapiens
  Payload ID: 9203
  Gene Symbol: LAYN
  Gene Name: layilin
  ENSP ID: ENSP00000434972
MRPGTALQAVLLAVLLVGLRAATGRLLSGQPVCRGGTQRPCYKVIYFHDTSRRLNFEEAKEACRRDGGQLVSIESEDEQKLIEKFIENLLPSDGDFWIGLRRREEKQSNSTACQDLYAWTDGSISQFRNWYVDEPSCGSEVCVVMYHQPSAPAGIGGPYMFQWNDDRCNMKNNFICKYSDEKPAVPSREAEGEETELTTPVLPEETQEEDAKKTFKESREAALNLAYILIPSIPLLLLLVVTTVVCWVWICRKRQKTGAARP

SEQ ID NO: 45146 - protein, 108 aa, Homo sapiens
  Payload ID: 9203
  Gene Symbol: LAYN
  Gene Name: layilin
  ENSP ID: ENSP00000486561
MVTSGLGSGGVRRNKAIAQPARTFMLGLMAAYHNLEKPAVPSREAEGEETELTTPVLPEETQEEDAKKTFKESREAALNLAYILIPSIPLLLLLVVTTVVCWVWICRK

SEQ ID NO: 45147 - protein, 263 aa, Homo sapiens
  Payload ID: 9204
  Gene Symbol: LBHD1
  Gene Name: LBH domain containing 1
  Uniprot ID: Q9BQE6
  ENSP ID: ENSP00000346600
MALVPGRSKEDGLWTRNSPGSSQHPESPRLPNPLWDRGKIGKVEGHQHIQDFSQKSHLPSIVVESSEVNEESGDLHLPHEELLLLTDGEEEDAEAFFQDQSEEPGWAWSPQDPRSPLRTFNAGLSWGQDQDEEDACWILEDTACLEATNHCPFWDSTGSRVCRSGFVEYSHLLPPNSFEGAEEEAVQTPAGVESGAASEAPGGRGCDRPRADHAAPPQEAGVQCTCQHYTVREEAQKTPPADPACPEREDSHGSGSPFKASQD

SEQ ID NO: 45148 - protein, 264 aa, Homo sapiens
  Payload ID: 9204
  Gene Symbol: LBHD1
  Gene Name: LBH domain containing 1
  ENSP ID: ENSP00000410979
MAACTASGAPTGAPRSRKLLPRGLTTPWRRLERPIAETIDKRPAREDLLEETFGIRSAWISGRSKEDGLWTRNSPGSSQHPESPRLPNPLWDRGKIGKVEGHQHIQDFSQKSHLPSIVVESSEVNEESGDLHLPHEELLLLTDGEEEDAEAFFQDQSEEPGWAWSPQDPRSPLRTFNAGLSWGQDQDEEDACWILEDTACLEATNHCPFWDSTGSRVCRSGFVEYSHLLPPNSFEGAEEEAVQTPAGVESGAASEAPGGRGCDR

SEQ ID NO: 45149 - protein, 289 aa, Homo sapiens
  Payload ID: 9204
  Gene Symbol: LBHD1
  Gene Name: LBH domain containing 1
  Uniprot ID: Q9BQE6
  ENSP ID: ENSP00000416856
MALVPGRSKEDGLWTRNSPGSSQHPESPRLPNPLWDRGKIGKVEGHQHIQVSTSSACVWQLAYPPVWPNLPAVPIQDFSQKSHLPSIVVESSEVNEESGDLHLPHEELLLLTDGEEEDAEAFFQDQSEEPGWAWSPQDPRSPLRTFNAGLSWGQDQDEEDACWILEDTACLEATNHCPFWDSTGSRVCRSGFVEYSHLLPPNSFEGAEEEAVQTPAGVESGAASEAPGGRGCDRPRADHAAPPQEAGVQCTCQHYTVREEAQKTPPADPACPEREDSHGSGSPFKASQD

SEQ ID NO: 45150 - protein, 122 aa, Homo sapiens
  Payload ID: 9204
  Gene Symbol: LBHD1
  Gene Name: LBH domain containing 1
  ENSP ID: ENSP00000434489
MVSRSGLSAGPTKEKGCLGFLRPSQGPAPTEDFSQKSHLPSIVVESSEVNEESGDLHLPHEELLLLTDGEEEDAEAFFQDQSEEPGWAWSPQDPRSPLRTFNAGLSWGQDQDEEDACWILED

SEQ ID NO: 45151 - protein, 263 aa, Homo sapiens; identical to SEQ ID NO: 45147
  Payload ID: 9204
  Gene Symbol: LBHD1
  Gene Name: LBH domain containing 1
  Uniprot ID: Q9BQE6
  ENSP ID: ENSP00000436848

SEQ ID NO: 45152 - protein, 121 aa, Homo sapiens
  Payload ID: 9204
  Gene Symbol: LBHD1
  Gene Name: LBH domain containing 1
  ENSP ID: ENSP00000437582
MEGIYTHTHPSPSPQLWNKHSKSSILVGEMGRSKEDGLWTRNSPGSSQHPESPRLPNPLWDRGKIGKVEGHQHIQDFSQKSHLPSIVVESSEVNEESGDLHLPHEELLLLTDGEEEDAEAF

SEQ ID NO: 45153 - protein, 295 aa, Homo sapiens
  Payload ID: 9205
  Gene Symbol: LIME1
  Gene Name: Lck interacting transmembrane adaptor 1
  Uniprot ID: Q9H400
  ENSP ID: ENSP00000309521
MGLPVSWAPPALWVLGCCALLLSLWALCTACRRPEDAVAPRKRARRQRARLQGSATAAEASLLRRTHLCSLSKSDTRLHELHRGPRSSRALRPASMDLLRPHWLEVSRDITGPQAAPSAFPHQELPRALPAAAATAGCAGLEATYSNVGLAALPGVSLAASPVVAEYARVQKRKGTHRSPQEPQQGKTEVTPAAQVDVLYSRVCKPKRRDPGPTTDPLDPKGQGAILALAGDLAYQTLPLRALDVDSGPLENVYESIRELGDPAGRSSTCGAGTPPASSCPSLGRGWRPLPASLP

SEQ ID NO: 45154 - protein, 106 aa, Homo sapiens
  Payload ID: 9205
  Gene Symbol: LIME1
  Gene Name: Lck interacting transmembrane adaptor 1
  ENSP ID: ENSP00000414506
MGLPVSWAPPALWVLGCCALLLSLWALCTACRRPEDAVAPRKRARRQRARLQGSATAAEASLLRRTHLCSLSKSDTRLHELHRGPRSSRALRPASMDLLRPHWLEV

SEQ ID NO: 45155 - protein, 131 aa, Homo sapiens
  Payload ID: 9205
  Gene Symbol: LIME1
  Gene Name: Lck interacting transmembrane adaptor 1
  ENSP ID: ENSP00000476772
MGLPVSWAPPALWVLGCCALLLSLWALCTACRRPEDAVAPRKRARRQRARLQGSATAAEAQVGHQTARAAPGPAQQQGPAACQHGSPAPTLAGGVQGHHRTAGSPLCLPTPGAAPGSAGSCSHRRVRWPRG

SEQ ID NO: 45156 - protein, 176 aa, Homo sapiens
  Payload ID: 9205
  Gene Symbol: LIME1
  Gene Name: Lck interacting transmembrane adaptor 1
  ENSP ID: ENSP00000477561
MGLPVSWAPPALWVLGCCALLLSLWALCTACRRPEDAVAPRKRARRQRARLQGSATAAEAQVGHQTARAAPGPAQQQGPAACQHGSPAPTLAGGVQGHHRTAGSPLCLPTPGAAPGSAGSCSHRRVRWPRGHLFQRGAGGPSRGQPGGQPCGGRVCPRPEAQRDPSQSPRATAGED

SEQ ID NO: 45157 - protein, 252 aa, Homo sapiens
  Payload ID: 9205
  Gene Symbol: LIME1
  Gene Name: Lck interacting transmembrane adaptor 1
  ENSP ID: ENSP00000478705
MGLPVSWAPPALWVLGCCALLLSLWALCTACRRKRARRQRARLQGSATAAEASLLRRTHLCSLSKSDTRLHELHRGPRSSRALRPASMDLLRPHWLEVSRDITGPQAAPSAFPHQELPRALPAAAATAGCAGLEATYSNVGLAALPGVSLAASPVVAEYARVQKRKGTHRSPQEPQQGKTEVTPAAQVDVLYSRVCKPKRRDPGPTTDPLDPKGQGAILALAGDLAYQTLPLRALDVDSGPLENVYESIREL

SEQ ID NO: 45158 - protein, 211 aa, Homo sapiens
  Payload ID: 9205
  Gene Symbol: LIME1
  Gene Name: Lck interacting transmembrane adaptor 1
  ENSP ID: ENSP00000482812
MGLPVSWAPPALWVLGCCALLLSLWALCTACRRPEDAVAPRKRARRQRARLQGSATAAEAVSARLSRGPGWGPQGTDQPSSPPVPTEADPPLLPQQVGHQTARAAPGPAQQQGPAACQHGSPAPTLAGGVQGHHRTAGSPLCLPTPGAAPGSAGSCSHRRVRWPRGHLFQRGAGGPSRGQPGGQPCGGRVCPRPEAQRDPSQSPRATAGED

SEQ ID NO: 45159 - protein, 539 aa, Homo sapiens
  Payload ID: 9206
  Gene Symbol: LCK
  Gene Name: LCK proto-oncogene, Src family tyrosine kinase
  Uniprot ID: P06239
  ENSP ID: ENSP00000328213
MGCGCSSHPEDDWMENIDVCENCHYPIVPLDGKGTLLIRNGSEVRDPLVTYEGSNPPASPLQDNLVIALHSYEPSHDGDLGFEKGEQLRILEQSGEWWKAQSLTTGQEGFIPFNFVAKANSLEPEPWFFKNLSRKDAERQLLAPGNTHGSFLIRESESTAGSFSLSVRDFDQNQGEVVKHYKIRNLDNGGFYISPRITFPGLHELVRHYTNASDGLCTRLSRPCQTQKPQKPWWEDEWEVPRETLKLVERLGAGQFGEVWMGYYNGHTKVAVKSLKQGSMSPDAFLAEANLMKQLQHQRLVRLYAVVTQEPIYIITEYMENDTLLDSQLEEKGLGASPWGNLGQQLLLLPTGSLVDFLKTPSGIKLTINKLLDMAAQIAEGMAFIEERNYIHRDLRAANILVSDTLSCKIADFGLARLIEDNEYTAREGAKFPIKWTAPEAINYGTFTIKSDVWSFGILLTEIVTHGRIPYPGMTNPEVIQNLERGYRMVRPDNCPEELYQLMRLCWKERPEDRPTFDYLRSVLEDFFTATEGQYQPQP

SEQ ID NO: 45160 - protein, 509 aa, Homo sapiens
  Payload ID: 9206
  Gene Symbol: LCK
  Gene Name: LCK proto-oncogene, Src family tyrosine kinase
  Uniprot ID: P06239
  ENSP ID: ENSP00000337825
MGCGCSSHPEDDWMENIDVCENCHYPIVPLDGKGTLLIRNGSEVRDPLVTYEGSNPPASPLQDNLVIALHSYEPSHDGDLGFEKGEQLRILEQSGEWWKAQSLTTGQEGFIPFNFVAKANSLEPEPWFFKNLSRKDAERQLLAPGNTHGSFLIRESESTAGSFSLSVRDFDQNQGEVVKHYKIRNLDNGGFYISPRITFPGLHELVRHYTNASDGLCTRLSRPCQTQKPQKPWWEDEWEVPRETLKLVERLGAGQFGEVWMGYYNGHTKVAVKSLKQGSMSPDAFLAEANLMKQLQHQRLVRLYAVVTQEPIYIITEYMENGSLVDFLKTPSGIKLTINKLLDMAAQIAEGMAFIEERNYIHRDLRAANILVSDTLSCKIADFGLARLIEDNEYTAREGAKFPIKWTAPEAINYGTFTIKSDVWSFGILLTEIVTHGRIPYPGMTNPEVIQNLERGYRMVRPDNCPEELYQLMRLCWKERPEDRPTFDYLRSVLEDFFTATEGQYQPQP

SEQ ID NO: 45161 - protein, 285 aa, Homo sapiens
  Payload ID: 9206
  Gene Symbol: LCK
  Gene Name: LCK proto-oncogene, Src family tyrosine kinase
  ENSP ID: ENSP00000362658
MGIPGSHNLRYFWNFPGQGPIISDVGGADLGGAPSAPSSIPSGTMGCGCSSHPEDDWMENIDVCENCHYPIVPLDGKGTLLIRNGSEVRDPLVTYEGSNPPASPLQDNLVIALHSYEPSHDGDLGFEKGEQLRILEQSGEWWKAQSLTTGQEGFIPFNFVAKANSLEPEPWFFKNLSRKDAERQLLAPGNTHGSFLIRESESTAGSFSLSVRDFDQNQGEVVKHYKIRNLDNGGFYISPRITFPGLHELVRHYTNASDGLCTRLSRPCQTQKPQKPWWEDEWEVP

SEQ ID NO: 45162 - protein, 137 aa, Homo sapiens
  Payload ID: 9206
  Gene Symbol: LCK
  Gene Name: LCK proto-oncogene, Src family tyrosine kinase
  ENSP ID: ENSP00000362663
MGCGCSSHPEDDWMENIDVCENCHYPIVPLDGKGTLLIRNGSEVRDPLVTYEGSNPPASPLQDNLVIALHSYEPSHDGDLGFEKGEQLRILEQSGEWWKAQSLTTGQEGFIPFNFVAKANSLEPEPWFFKNLSRKDA

SEQ ID NO: 45163 - protein, 516 aa, Homo sapiens
  Payload ID: 9206
  Gene Symbol: LCK
  Gene Name: LCK proto-oncogene, Src family tyrosine kinase
  ENSP ID: ENSP00000362665
MGCGCSSHPEDDWMENIDVCENCHYPIVPLDGKGTLLIRNGSEVRDPLVTYEGSNPPASPLQGDPRQQGLKDKACGSLAVGFHLSPTYFLPGLAFLVPHPVTPGFLPIPARFSLMPLVFTDNLVIALHSYEPSHDGDLGFEKGEQLRILEQSGEWWKAQSLTTGQEGFIPFNFVAKANSLEPEPWFFKNLSRKDAERQLLAPGNTHGSFLIRESESTAGSFSLSVRDFDQNQGEVVKHYKIRNLDNGGFYISPRITFPGLHELVRHYTRYYNGHTKVAVKSLKQGSMSPDAFLAEANLMKQLQHQRLVRLYAVVTQEPIYIITEYMENGSLVDFLKTPSGIKLTINKLLDMAAQIAEGMAFIEERNYIHRDLRAANILVSDTLSCKIADFGLARLIEDNEYTAREGAKFPIKWTAPEAINYGTFTIKSDVWSFGILLTEIVTHGRIPYPGMTNPEVIQNLERGYRMVRPDNCPEELYQLMRLCWKERPEDRPTFDYLRSVLEDFFTATEGQYQPQP

SEQ ID NO: 45164 - protein, 200 aa, Homo sapiens
  Payload ID: 9206
  Gene Symbol: LCK
  Gene Name: LCK proto-oncogene, Src family tyrosine kinase
  ENSP ID: ENSP00000431517
MGCGCSSHPEDDWMENIDVCENCHYPIVPLDGKGTLLIRNGSEVRDPLVTYEGSNPPASPLQGDPRQQGLKDKACGSLAVGFHLSPTYFLPGLAFLVPHPVTPGFLPIPARFSLMPLVFTDNLVIALHSYEPSHDGDLGFEKGEQLRILEQSGEWWKAQSLTTGQEGFIPFNFVAKANSLEPEPWFFKNLSRKDAERQLL

SEQ ID NO: 45165 - protein, 149 aa, Homo sapiens
  Payload ID: 9206
  Gene Symbol: LCK
  Gene Name: LCK proto-oncogene, Src family tyrosine kinase
  ENSP ID: ENSP00000434525
MGCGCSSHPEDDWMENIDVCENCHYPIVPLDGKGTLLIRNGSEVRDPLVTYEGSNPPASPLQGDPRQQGLKDKACGSLAVGFHLSPTYFLPGLAFLVPHPVTPGFLPIPARFSLMPLVFTDNLVIALHSYEPSHDGDLGFEKGEQLRIL

SEQ ID NO: 45166 - protein, 319 aa, Homo sapiens
  Payload ID: 9206
  Gene Symbol: LCK
  Gene Name: LCK proto-oncogene, Src family tyrosine kinase
  ENSP ID: ENSP00000435605
MGCGCSSHPEDDWMENIDVCENCHYPIVPLDGKGTLLIRNGSEVRDPLVTYEGSNPPASPLQDNLVIALHSYEPSHDGDLGFEKGEQLRILEQSGEWWKAQSLTTGQEGFIPFNFVAKANSLEPEPWFFKNLSRKDAERQLLAPGNTHGSFLIRESESTAGSFSLSVRDFDQNQGEVVKHYKIRNLDNGGFYISPRITFPGLHELVRHYTRYYNGHTKVAVKSLKQGSMSPDAFLAEANLMKQLQHQRLVRLYAVVTQEPIYIITEYMENGSLVDFLKTPSGIKLTINKLLDMAAQIAEGMAFIEERNYIHRDLRAANI

SEQ ID NO: 45167 - protein, 167 aa, Homo sapiens
  Payload ID: 9206
  Gene Symbol: LCK
  Gene Name: LCK proto-oncogene, Src family tyrosine kinase
  ENSP ID: ENSP00000436554
MGIPGSHNLRYFWNFPGQGPIISDVGGADLGGAPSAPSSIPSGTMGCGCSSHPEDDWMENIDVCENCHYPIVPLDGKGTLLIRNGSEVRDPLVTYEGSNPPASPLQGDPRQQGLKDKACGSLAVGFHLSPTYFLPGLAFLVPHPVTPGFLPIPARFSLMPLVFTDNL

SEQ ID NO: 45168 - protein, 509 aa, Homo sapiens; identical to SEQ ID NO: 45160
  Payload ID: 9206
  Gene Symbol: LCK
  Gene Name: LCK proto-oncogene, Src family tyrosine kinase
  Uniprot ID: P06239
  ENSP ID: ENSP00000477713

SEQ ID NO: 45169 - protein, 697 aa, Homo sapiens
  Payload ID: 9207
  Gene Symbol: LCA5
  Gene Name: Leber congenital amaurosis 5
  Uniprot ID: Q86VQ0
  ENSP ID: ENSP00000358861
MGERAGSPGTDQERKAGKHHYSYLSDFETPQSSGRSSLVSSSPASVRRKNPKRQTSDGQVHHQAPRKPSPKGLPNRKGVRVGFRSQSLNREPLRKDTDLVTKRILSARLLKINELQNEVSELQVKLAELLKENKSLKRLQYRQEKALNKFEDAENEISQLIFRHNNEITALKERLRKSQEKERATEKRVKDTESELFRTKFSLQKLKEISEARHLPERDDLAKKLVSAELKLDDTERRIKELSKNLELSTNSFQRQLLAERKRAYEAHDENKVLQKEVQRLYHKLKEKERELDIKNIYSNRLPKSSPNKEKELALRKNAACQSDFADLCTKGVQTMEDFKPEEYPLTPETIMCYENKWEEPGHLTLDLQSQKQDRHGEAGILNPIMEREEKFVTDEELHVVKQEVEKLEDEWEREELDKKQKEKASLLEREEKPEWETGRYQLGMYPIQNMDKLQGEEEERLKREMLLAKLNEIDRELQDSRNLKYPVLPLLPDFESKLHSPERSPKTYRFSESSERLFNGHHLQDISFSTPKGEGQNSGNVRSPASPNEFAFGSYVPSFAKTSERSNPFSQKSSFLDFQRNSMEKLSKDGVDLITRKEKKANLMEQLFGASGSSTISSKSSDPNSVASSKGDIDPLNFLPGNKGSRDQEHDEDEGFFLSEGRSFNPNRHRLKHADDKPAVKAADSVEDEIEEVALR

SEQ ID NO: 45170 - protein, 697 aa, Homo sapiens; identical to SEQ ID NO: 45169
  Payload ID: 9207
  Gene Symbol: LCA5
  Gene Name: Leber congenital amaurosis 5
  Uniprot ID: Q86VQ0
  ENSP ID: ENSP00000376686

SEQ ID NO: 45171 - protein, 430 aa, Homo sapiens
  Payload ID: 9207
  Gene Symbol: LCA5
  Gene Name: Leber congenital amaurosis 5
  ENSP ID: ENSP00000474463
MGERAGSPGTDQERKAGKHHYSYLSDFETPQSSGRSSLVSSSPASVRRKNPKRQTSDGQVHHQAPRKPSPKGLPNRKGVRVGFRSQSLNREPLRKDTDLVTKRILSARLLKINELQNEVSELQVKLAELLKENKSLKRLQYRQEKALNKFEDAENEISQLIFRHNNEITALKERLRKSQEKERATEKRVKDTESELFRTKFSLQKLKEISEARHLPERDDLAKKLVSAELKLDDTERRIKELSKNLELSTNSFQRQLLAERKRAYEAHDENKVLQKEVQRLYHKLKEKERELDIKNIYSNRLPKSSPNKEKELALRKNAACQSDFADLCTKGVQTMEDFKPEEYPLTPETIMCYENKWEEPGHLTLDLQSQKQDRHGEAGILNPIMEREEKFVTDEELHVVKQEVEKLEDGKKKSLFKHVTSQHPLRKKE

SEQ ID NO: 45172 - protein, 670 aa, Homo sapiens
  Payload ID: 9208
  Gene Symbol: LCA5L
  Gene Name: Leber congenital amaurosis 5-like
  Uniprot ID: O95447
  ENSP ID: ENSP00000288350
MSLADLTKTNIDEHFFGVALENNRRSAACKRSPGTGDFSRNSNASNKSVDYSRSQCSCGSLSSQYDYSEDFLCDCSEKAINRNYLKQPVVKEKEKKKYNVSKISQSKGQKEISVEKKHTWNASLFNSQIHMIAQRRDAMAHRILSARLHKIKGLKNELADMHHKLEAILTENQFLKQLQLRHLKAIGKYENSQNNLPQIMAKHQNEVKNLRQLLRKSQEKERTLSRKLRETDSQLLKTKDILQALQKLSEDKNLAEREELTHKLSIITTKMDANDKKIQSLEKQLRLNCRAFSRQLAIETRKTLAAQTATKTLQVEVKHLQQKLKEKDRELEIKNIYSHRILKNLHDTEDYPKVSSTKSVQADRKILPFTSMRHQGTQKSDVPPLTTKGKKATGNIDHKEKSTEINHEIPHCVNKLPKQEDSKRKYEDLSGEEKHLEVQILLENTGRQKDKKEDQEKKNIFVKEEQELPPKIIEVIHPERESNQEDVLVREKFKRSMQRNGVDDTLGKGTAPYTKGPLRQRRHYSFTEATENLHHGLPASGGPANAGNMRYSHSTGKHLSNREEMELEHSDSGYEPSFGKSSRIKVKDTTFRDKKSSLMEELFGSGYVLKTDQSSPGVAKGSEEPLQSKESHPLPPSQASTSHAFGDSKVTVVNSIKPSSPTEGKRKIII

SEQ ID NO: 45173 - protein, 670 aa, Homo sapiens; identical to SEQ ID NO: 45172
  Payload ID: 9208
  Gene Symbol: LCA5L
  Gene Name: Leber congenital amaurosis 5-like
  Uniprot ID: O95447
  ENSP ID: ENSP00000351008

SEQ ID NO: 45174 - protein, 670 aa, Homo sapiens; identical to SEQ ID NO: 45172
  Payload ID: 9208
  Gene Symbol: LCA5L
  Gene Name: Leber congenital amaurosis 5-like
  Uniprot ID: O95447
  ENSP ID: ENSP00000370046

SEQ ID NO: 45175 - protein, 69 aa, Homo sapiens
  Payload ID: 9208
  Gene Symbol: LCA5L
  Gene Name: Leber congenital amaurosis 5-like
  ENSP ID: ENSP00000395593
MSLADLTKTNIDEHFFGVALENNRRSAACKRSPGTGDFSRNSNASNKSVDYSRSQCSCGSLSSQYDYSE

SEQ ID NO: 45176 - protein, 95 aa, Homo sapiens
  Payload ID: 9208
  Gene Symbol: LCA5L
  Gene Name: Leber congenital amaurosis 5-like
  ENSP ID: ENSP00000400086
MSLADLTKTNIDEHFFGVALENNRRSAACKRSPGTGDFSRNSNASNKSVDYSRSQCSCGSLSSQYDYSEDFLCDCSEKAINRNYLKQPVVKEKEK

SEQ ID NO: 45177 - protein, 10 aa, Homo sapiens
  Payload ID: 9208
  Gene Symbol: LCA5L
  Gene Name: Leber congenital amaurosis 5-like
  ENSP ID: ENSP00000401084
MSLADLTKTN

SEQ ID NO: 45178 - protein, 189 aa, Homo sapiens
  Payload ID: 9208
  Gene Symbol: LCA5L
  Gene Name: Leber congenital amaurosis 5-like
  ENSP ID: ENSP00000404521
MSLADLTKTNIDEHFFGVALENNRRSAACKRSPGTGDFSRNSNASNKSVDYSRSQCSCGSLSSQYDYSEDFLCDCSEKAINRNYLKQPVVKEKEKKKYNVSKISQSKGQKEISVEKKHTWNASLFNSQIHMIAQRRDAMAHRILSARLHKIKGLKNELADMHHKLEAILTENQFLKQLQLRHLKAIGKY

SEQ ID NO: 45179 - protein, 94 aa, Homo sapiens
  Payload ID: 9208
  Gene Symbol: LCA5L
  Gene Name: Leber congenital amaurosis 5-like
  ENSP ID: ENSP00000405130
MSLADLTKTNIDEHFFGVALENNRRSAACKRSPGTGDFSRNSNASNKSVDYSRSQCSCGSLSSQYDYSEDFLCDCSEKAINRNYLKQPVVKEKE

SEQ ID NO: 45180 - protein, 107 aa, Homo sapiens
  Payload ID: 9208
  Gene Symbol: LCA5L
  Gene Name: Leber congenital amaurosis 5-like
  ENSP ID: ENSP00000405598
MSLADLTKTNIDEHFFGVALENNRRSAACKRSPGTGDFSRNSNASNKSVDYSRSQCSCGSLSSQYDYSEDFLCDCSEKAINRNYLKQPVVKEKEKKKYNVSKISQSK

SEQ ID NO: 45181 - protein, 30 aa, Homo sapiens
  Payload ID: 9208
  Gene Symbol: LCA5L
  Gene Name: Leber congenital amaurosis 5-like
  ENSP ID: ENSP00000407065
MSLADLTKTNIDEHFFGVALENNRRSAACK

SEQ ID NO: 45182 - protein, 93 aa, Homo sapiens
  Payload ID: 9208
  Gene Symbol: LCA5L
  Gene Name: Leber congenital amaurosis 5-like
  ENSP ID: ENSP00000412691
MSLADLTKTNIDEHFFGVALENNRRSAACKRSPGTGDFSRNSNASNKSVDYSRSQCSCGSLSSQYDYSEDFLCDCSEKAINRNYLKQPVVKEK

SEQ ID NO: 45183 - protein, 63 aa, Homo sapiens
  Payload ID: 9208
  Gene Symbol: LCA5L
  Gene Name: Leber congenital amaurosis 5-like
  ENSP ID: ENSP00000414784
MSLADLTKTNIDEHFFGVALENNRRSAACKRSPGTGDFSRNSNASNKSVDYSRSQCSCGSLSS

SEQ ID NO: 45184 - protein, 288 aa, Homo sapiens
  Payload ID: 9208
  Gene Symbol: LCA5L
  Gene Name: Leber congenital amaurosis 5-like
  ENSP ID: ENSP00000475187
MSLADLTKTNIDEHFFGVALENNRRSAACKRSPGTGDFSRNSNASNKSVDYSRSQCSCGSLSSQYDYSEDFLCDCSEKAINRNYLKQPVVKEKEKKKYNVSKISQSKGQKEISVEKKHTWNASLFNSQIHMIAQRRDAMAHRILSARLHKIKGLKNELADMHHKLEAILTENQFLKQLQLRHLKAIGKYENSQNNLPQIMAKHQNEVKNLRQLLRKSQEKERTLSRKLRETDSQLLKTKDILQALQKLSEDKNLAEREELTHKLSIITTKMDANDKKIQVCISGAQTV

SEQ ID NO: 45185 - protein, 230 aa, Homo sapiens
  Payload ID: 9209
  Gene Symbol: LRAT
  Gene Name: lecithin retinol acyltransferase (phosphatidylcholine--retinol O-acyltransferase)
  Uniprot ID: O95237
  ENSP ID: ENSP00000337224
MKNPMLEVVSLLLEKLLLISNFTLFSSGAAGEDKGRNSFYETSSFHRGDVLEVPRTHLTHYGIYLGDNRVAHMMPDILLALTDDMGRTQKVVSNKRLILGVIVKVASIRVDTVEDFAYGANILVNHLDESLQKKALLNEEVARRAEKLLGFTPYSLLWNNCEHFVTYCRYGTPISPQSDKFCETVKIIIRDQRSVLASAVLGLASIVCTGLVSYTTLPAIFIPFFLWMAG

SEQ ID NO: 45186 - protein, 69 aa, Homo sapiens
  Payload ID: 9209
  Gene Symbol: LRAT
  Gene Name: lecithin retinol acyltransferase (phosphatidylcholine--retinol O-acyltransferase)
  ENSP ID: ENSP00000422324
MKNPMLEVVSLLLEKLLLISNFTLFSSGAAGEDKGRNSFYETSSFHRGDVLEVPRTHLTHYGIYLGDNR

SEQ ID NO: 45187 - protein, 230 aa, Homo sapiens; identical to SEQ ID NO: 45185
  Payload ID: 9209
  Gene Symbol: LRAT
  Gene Name: lecithin retinol acyltransferase (phosphatidylcholine--retinol O-acyltransferase)
  Uniprot ID: O95237
  ENSP ID: ENSP00000426761

SEQ ID NO: 45188 - protein, 440 aa, Homo sapiens
  Payload ID: 9210
  Gene Symbol: LCAT
  Gene Name: lecithin-cholesterol acyltransferase
  Uniprot ID: P04180
  ENSP ID: ENSP00000264005
MGPPGSPWQWVTLLLGLLLPPAAPFWLLNVLFPPHTTPKAELSNHTRPVILVPGCLGNQLEAKLDKPDVVNWMCYRKTEDFFTIWLDLNMFLPLGVDCWIDNTRVVYNRSSGLVSNAPGVQIRVPGFGKTYSVEYLDSSKLAGYLHTLVQNLVNNGYVRDETVRAAPYDWRLEPGQQEEYYRKLAGLVEEMHAAYGKPVFLIGHSLGCLHLLYFLLRQPQAWKDRFIDGFISLGAPWGGSIKPMLVLASGDNQGIPIMSSIKLKEEQRITTTSPWMFPSRMAWPEDHVFISTPSFNYTGRDFQRFFADLHFEEGWYMWLQSRDLLAGLPAPGVEVYCLYGVGLPTPRTYIYDHGFPYTDPVGVLYEDGDDTVATRSTELCGLWQGRQPQPVHLLPLHGIQHLNMVFSNLTLEHINAILLGAYRQGPPASPTASPEPPPPE

SEQ ID NO: 45189 - protein, 80 aa, Homo sapiens
  Payload ID: 9210
  Gene Symbol: LCAT
  Gene Name: lecithin-cholesterol acyltransferase
  ENSP ID: ENSP00000458141
  MOD_RES (1)..(1): Any amino acid
XEYYRKLAGLVEEMHAAYGKPVFLIGHSLGCLHLLYFLLRQPQAWKDRFIDGFISLGAPWGGSIKPMLVLASGSGTRAQH

SEQ ID NO: 45190 - protein, 107 aa, Homo sapiens
  Payload ID: 9210
  Gene Symbol: LCAT
  Gene Name: lecithin-cholesterol acyltransferase
  ENSP ID: ENSP00000459014
  MOD_RES (1)..(1): Any amino acid
XLPLGVDCWIDNTRVVYNRSSGLVSNAPGVQIRVPGFGKTYSVEYLDSSKLAGPPATACAPAAPARDTASQHGLQQPDPGAHQCHPAGCLPPGSPCIPDCQPRAPAS

SEQ ID NO: 45191 - protein, 61 aa, Homo sapiens
  Payload ID: 9210
  Gene Symbol: LCAT
  Gene Name: lecithin-cholesterol acyltransferase
  ENSP ID: ENSP00000459291
SPRPGRTALLMASSLLGLPGVAPSSPCWSWPQECLCPGMCFTEDGSARARARPPEAPPALP

SEQ ID NO: 45192 - protein, 93 aa, Homo sapiens
  Payload ID: 9210
  Gene Symbol: LCAT
  Gene Name: lecithin-cholesterol acyltransferase
  ENSP ID: ENSP00000460653
MGPPGSPWQWVTLLLGLLLPPAAPFWLLNVLFPPHTTPKAELSNHTRPVILARSQAGQTRCGELDVLPQDRGLLHHLAGSQHVPTPWGRLLDR

SEQ ID NO: 45193 - protein, 138 aa, Homo sapiens
  Payload ID: 9210
  Gene Symbol: LCAT
  Gene Name: lecithin-cholesterol acyltransferase
  ENSP ID: ENSP00000463220
VQIRVPGFGKTYSVEYLDSSKLAGYLHTLVQNLVNNGYVRDETVRAAPYDWRLEPGQQEEYYRKLAGLVEEMHAAYGKPVFLIGHSLGCLHLLYFLLRQPQAWKDRFIDGFISLGAPWGGSIKPMLVLASETGSHCIA

SEQ ID NO: 45194 - protein, 255 aa, Homo sapiens
  Payload ID: 9210
  Gene Symbol: LCAT
  Gene Name: lecithin-cholesterol acyltransferase
  ENSP ID: ENSP00000464651
MCYRKTEDFFTIWLDLNMFLPLGVDCWIDNTRVVYNRSSGLVSNAPGVQIRVPGFGKTYSVEYLDSSKLAGYLHTLVQNLVNNGYVRDETVRAAPYDWRLEPGQQEEYYRKLAGLVEEMHAAYGKPVFLIGHSLGCLHLLYFLLRQPQAWKDRFIDGFISLGAPWGGSIKPMLVLASGDNQGIPIMSSIKLKEEQRITTTSPWMFPSRMAWPEDHVFISTPSFNYTGRDFQRFFADLHFEEGWYMWLQSRDLLAG

SEQ ID NO: 45195 - protein, 135 aa, Homo sapiens
  Payload ID: 9211
  Gene Symbol: LGALS1
  Gene Name: lectin, galactoside-binding, soluble, 1
  Uniprot ID: P09382
  ENSP ID: ENSP00000215909
MACGLVASNLNLKPGECLRVRGEVAPDAKSFVLNLGKDSNNLCLHFNPRFNAHGDANTIVCNSKDGGAWGTEQREAVFPFQPGSVAEVCITFDQANLTVKLPDGYEFKFPNRLNLEAINYMAADGDFKIKCVAFD

SEQ ID NO: 45196 - protein, 38 aa, Homo sapiens
  Payload ID: 9211
  Gene Symbol: LGALS1
  Gene Name: lectin, galactoside-binding, soluble, 1
  ENSP ID: ENSP00000388296
MACGLVASNLNLKPGECLRVRGEVAPDAKSEFFQQASC

SEQ ID NO: 45197 - protein, 69 aa, Homo sapiens
  Payload ID: 9211
  Gene Symbol: LGALS1
  Gene Name: lectin, galactoside-binding, soluble, 1
  ENSP ID: ENSP00000404414
MACASPWLGQRMPGGNNPTPTPSHPRTLRAVEALSSNPAGPGLVCAGSGRQQPESQTWRVPSSARRGGS

SEQ ID NO: 45198 - protein, 327 aa, Homo sapiens
  Payload ID: 9212
  Gene Symbol: LGALS12
  Gene Name: lectin, galactoside-binding, soluble, 12
  Uniprot ID: Q96DT0
  ENSP ID: ENSP00000255684
MSQPSGGRAPGTRIYSWSCPTVMSPGEKLDPIPDSFILQPPVFHPVVPYVTTIFGGLHAGKMVMLQGVVPLDAHRFQVDFQCGCSLCPRPDIAFHFNPRFHTTKPHVICNTLHGGRWQREARWPHLALRRGSSFLILFLFGNEEVKVSVNGQHFLHFRYRLPLSHVDTLGIFGDILVEAVGFLNINPFVEGSREYPAGHEVPCSHALPQGLSPGQVIIVRGLVLQEPKHFTVSLRDQAAHAPVTLRASFADRTLAWISRWGQKKLISAPFLFYPQRFFEVLLLFQEGGLKLALNGQGLGATSMNQQALEQLRELRISGSVQLYCVHS

SEQ ID NO: 45199 - protein, 337 aa, Homo sapiens
  Payload ID: 9212
  Gene Symbol: LGALS12
  Gene Name: lectin, galactoside-binding, soluble, 12
  Uniprot ID: Q96DT0
  ENSP ID: ENSP00000339374
MSQPSGGRAPGTRIYSWSCPTVMSPGEKLDPIPDSFILQPPVFHPVVPYVTTIFGGLHAGKMVMLQGVVPLDAHSRFQVDFQCGCSLCPRPDIAFHFNPRFHTTKPHVICNTLHGGRWQREARWPHLALRRGSSFLILFLFGNEEVKVSVNGQHFLHFRYRLPLSHVDTLGIFGDILVEAVGFLNINPFVEGSREYPAGHPFLLMSPRLEVPCSHALPQGLSPGQVIIVRGLVLQEPKHFTVSLRDQAAHAPVTLRASFADRTLAWISRWGQKKLISAPFLFYPQRFFEVLLLFQEGGLKLALNGQGLGATSMNQQALEQLRELRISGSVQLYCVHS

SEQ ID NO: 45200 - protein, 336 aa, Homo sapiens
  Payload ID: 9212
  Gene Symbol: LGALS12
  Gene Name: lectin, galactoside-binding, soluble, 12
  Uniprot ID: Q96DT0
  ENSP ID: ENSP00000378116
MSQPSGGRAPGTRIYSWSCPTVMSPGEKLDPIPDSFILQPPVFHPVVPYVTTIFGGLHAGKMVMLQGVVPLDAHRFQVDFQCGCSLCPRPDIAFHFNPRFHTTKPHVICNTLHGGRWQREARWPHLALRRGSSFLILFLFGNEEVKVSVNGQHFLHFRYRLPLSHVDTLGIFGDILVEAVGFLNINPFVEGSREYPAGHPFLLMSPRLEVPCSHALPQGLSPGQVIIVRGLVLQEPKHFTVSLRDQAAHAPVTLRASFADRTLAWISRWGQKKLISAPFLFYPQRFFEVLLLFQEGGLKLALNGQGLGATSMNQQALEQLRELRISGSVQLYCVHS

SEQ ID NO: 45201 - protein, 275 aa, Homo sapiens
  Payload ID: 9212
  Gene Symbol: LGALS12
  Gene Name: lectin, galactoside-binding, soluble, 12
  Uniprot ID: Q96DT0
  ENSP ID: ENSP00000394659
MVMLQGVVPLDAHRFQVDFQCGCSLCPRPDIAFHFNPRFHTTKPHVICNTLHGGRWQREARWPHLALRRGSSFLILFLFGNEEVKVSVNGQHFLHFRYRLPLSHVDTLGIFGDILVEAVGFLNINPFVEGSREYPAGHPFLLMSPRLEVPCSHALPQGLSPGQVIIVRGLVLQEPKHFTVSLRDQAAHAPVTLRASFADRTLAWISRWGQKKLISAPFLFYPQRFFEVLLLFQEGGLKLALNGQGLGATSMNQQALEQLRELRISGSVQLYCVHS

SEQ ID NO: 45202 - protein, 266 aa, Homo sapiens
  Payload ID: 9212
  Gene Symbol: LGALS12
  Gene Name: lectin, galactoside-binding, soluble, 12
  Uniprot ID: Q96DT0
  ENSP ID: ENSP00000399093
MVMLQGVVPLDAHRFQVDFQCGCSLCPRPDIAFHFNPRFHTTKPHVICNTLHGGRWQREARWPHLALRRGSSFLILFLFGNEEVKVSVNGQHFLHFRYRLPLSHVDTLGIFGDILVEAVGFLNINPFVEGSREYPAGHEVPCSHALPQGLSPGQVIIVRGLVLQEPKHFTVSLRDQAAHAPVTLRASFADRTLAWISRWGQKKLISAPFLFYPQRFFEVLLLFQEGGLKLALNGQGLGATSMNQQALEQLRELRISGSVQLYCVHS

SEQ ID NO: 45203 - protein, 139 aa, Homo sapiens
  Payload ID: 9213
  Gene Symbol: LGALS13
  Gene Name: lectin, galactoside-binding, soluble, 13
  Uniprot ID: Q9UHV8
  ENSP ID: ENSP00000221797
MSSLPVPYKLPVSLSVGSCVIIKGTPIHSFINDPQLQVDFYTDMDEDSDIAFRFRVHFGNHVVMNRREFGIWMLEETTDYVPFEDGKQFELCIYVHYNEYEIKVNGIRIYGFVHRIPPSFVKMVQVSRDISLTSVCVCN

SEQ ID NO: 45204 - protein, 83 aa, Homo sapiens
  Payload ID: 9213
  Gene Symbol: LGALS13
  Gene Name: lectin, galactoside-binding, soluble, 13
  ENSP ID: ENSP00000470928
MSSLPLQVDFYTDMDEDSDIAFRFRVHFGNHVVMNRREFGIWMLEETTDYVPFEDGKQFELCIYVHYNEYEIKVNGIRIYGFV

SEQ ID NO: 45205 - protein, 141 aa, Homo sapiens
  Payload ID: 9213
  Gene Symbol: LGALS13
  Gene Name: lectin, galactoside-binding, soluble, 13
  ENSP ID: ENSP00000483444
MSSLPVPYKLPVSLSVGSCVIIKGTPIHSFINDPQLQVDFYTDMDEDSDIAFRFRVHFGNHVVMNRREFGIWMLEETTDYVPFEDGKQFELCIYVHYNEYEIKVNGIRIYGFVHRIPPSFVKMVQVSRDISLTSVCVCNGR

SEQ ID NO: 45206 - protein, 168 aa, Homo sapiens
  Payload ID: 9214
  Gene Symbol: LGALS14
  Gene Name: lectin, galactoside-binding, soluble, 14
  Uniprot ID: Q8TCE9
  ENSP ID: ENSP00000353893
MSLTHRLHLCKYWGCAVSNVCRFWEGRPLPLMIVVPYTLPVSLPVGSCVIITGTPILTFVKDPQLEVNFYTGMDEDSDIAFQFRLHFGHPAIMNSCVFGIWRYEEKCYYLPFEDGKPFELCIYVRHKEYKVMVNGQRIYNFAHRFPPASVKMLQVFRDISLTRVLISD

SEQ ID NO: 45207 - protein, 139 aa, Homo sapiens
  Payload ID: 9214
  Gene Symbol: LGALS14
  Gene Name: lectin, galactoside-binding, soluble, 14
  Uniprot ID: Q8TCE9
  ENSP ID: ENSP00000375905
MSSLPVPYTLPVSLPVGSCVIITGTPILTFVKDPQLEVNFYTGMDEDSDIAFQFRLHFGHPAIMNSCVFGIWRYEEKCYYLPFEDGKPFELCIYVRHKEYKVMVNGQRIYNFAHRFPPASVKMLQVFRDISLTRVLISD

SEQ ID NO: 45208 - protein, 123 aa, Homo sapiens
  Payload ID: 9214
  Gene Symbol: LGALS14
  Gene Name: lectin, galactoside-binding, soluble, 14
  ENSP ID: ENSP00000471660
  MOD_RES (1)..(1): Any amino acid
XEELPRRREQCHHYPKDPQLEVNFYTGMDEDSDIAFQFRLHFGHPAIMNSCVFGIWRYEEKCYYLPFEDGKPFELCIYVRHKEYKVMVNGQRIYNFAHRFPPASVKMLQVFRDISLTRVLISD

SEQ ID NO: 45209 - protein, 142 aa, Homo sapiens
  Payload ID: 9215
  Gene Symbol: LGALS16
  Gene Name: lectin, galactoside-binding, soluble, 16
  Uniprot ID: A8MUM7
  ENSP ID: ENSP00000375904
MSFLTVPYKLPVSLSVGSCVIIKGTLIDSSINEPQLQVDFYTEMNEDSEIAFHLRVHLGRRVVMNSREFGIWMLEENLHYVPFEDGKPFDLRIYVCHNEYEVKVNGEYIYAFVHRIPPSYVKMIQVWRDVSLDSVLVNNGRR

SEQ ID NO: 45210 - protein, 60 aa, Homo sapiens
  Payload ID: 9215
  Gene Symbol: LGALS16
  Gene Name: lectin, galactoside-binding, soluble, 16
  ENSP ID: ENSP00000471564
MSFLTEGRLHLTLHLSLILNTLAGAIQTACVFVCWFLRDNQRDTDRLFYQRTTAAGGFLH

SEQ ID NO: 45211 - protein, 132 aa, Homo sapiens
  Payload ID: 9216
  Gene Symbol: LGALS2
  Gene Name: lectin, galactoside-binding, soluble, 2
  Uniprot ID: P05162
  ENSP ID: ENSP00000215886
MTGELEVKNMDMKPGSTLKITGSIADGTDGFVINLGQGTDKLNLHFNPRFSESTIVCNSLDGSNWGQEQREDHLCFSPGSEVKFTVTFESDKFKVKLPDGHELTFPNRLGHSHLSYLSVRGGFNMSSFKLKE

SEQ ID NO: 45212 - protein, 29 aa, Homo sapiens
  Payload ID: 9216
  Gene Symbol: LGALS2
  Gene Name: lectin, galactoside-binding, soluble, 2
  ENSP ID: ENSP00000407351
MTGELEVKNMDMKPGSTLKITGSIADGTD

SEQ ID NO: 45213 - protein, 250 aa, Homo sapiens [sequence omitted]

SEQ ID NO: 45214 - protein, 233 aa, Homo sapiens
  Payload ID: 9217
  Gene Symbol: LGALS3
  Gene Name: lectin, galactoside-binding, soluble, 3
  ENSP ID: ENSP00000451381
MADNFSLHDALSGSGNPNPQGWPGAWGNQPAGAGGYPGASYPGAYPGQAPPGAYPGQAPPGAYPGAPGAYPGAPAPGVYPGPPSGPGAYPSSGQPSATGAYPATGPYGAPAGPLIVPYNLPLPGGVVPRMLITILGTVKPNANRIALDFQRGNDVAFHFNPRFNENNRRVIVCNTKLDNNWGREERQSVFPFESGKPFKSLALSPGWSTVARSWLTTTSASWVQAMLLPQPPK

SEQ ID NO: 45215 - protein, 88 aa, Homo sapiens
  Payload ID: 9217
  Gene Symbol: LGALS3
  Gene Name: lectin, galactoside-binding, soluble, 3
  ENSP ID: ENSP00000451526
MADNFSLHDALSGSGNPNPQGWPGAWGNQPAGAGGYPGASYPGAYPGQAPPGAYPGQAPPGAYPGAPGAYPGAPAPGVYPGPPSGPGA

SEQ ID NO: 45216 - protein, 585 aa, Homo sapiens
  Payload ID: 9218
  Gene Symbol: LGALS3BP
  Gene Name: lectin, galactoside-binding, soluble, 3 binding protein
  Uniprot ID: Q08380
  ENSP ID: ENSP00000262776
MTPPRLFWVWLLVAGTQGVNDGDMRLADGGATNQGRVEIFYRGQWGTVCDNLWDLTDASVVCRALGFENATQALGRAAFGQGSGPIMLDEVQCTGTEASLADCKSLGWLKSNCRHERDAGVVCTNETRSTHTLDLSRELSEALGQIFDSQRGCDLSISVNVQGEDALGFCGHTVILTANLEAQALWKEPGSNVTMSVDAECVPMVRDLLRYFYSRRIDITLSSVKCFHKLASAYGARQLQGYCASLFAILLPQDPSFQMPLDLYAYAVATGDALLEKLCLQFLAWNFEALTQAEAWPSVPTDLLQLLLPRSDLAVPSELALLKAVDTWSWGERASHEEVEGLVEKIRFPMMLPEELFELQFNLSLYWSHEALFQKKTLQALEFHTVPFQLLARYKGLNLTEDTYKPRIYTSPTWSAFVTDSSWSARKSQLVYQSRRGPLVKYSSDYFQAPSDYRYYPYQSFQTPQHPSFLFQDKRVSWSLVYLPTIQSCWNYGFSCSSDELPVLGLTKSGGSDRTIAYENKALMLCEGLFVADVTDFEGWKAAIPSALDTNSSKSTSSFPCPAGHFNGFRTVIRPFYLTNSSGVD

SEQ ID NO: 45217 - protein, 205 aa, Homo sapiens
  Payload ID: 9218
  Gene Symbol: LGALS3BP
  Gene Name: lectin, galactoside-binding, soluble, 3 binding protein
  ENSP ID: ENSP00000465120
MTPPRLFWVWLLVAGTQGVNDGDMRLADGGATNQGRVEIFYRGQWGTVCDNLWDLTDASVVCRALGFENATQALGRAAFGQGSGPIMLDEVQCTGTEASLADCKSLGWLKSNCRHERDAGVVCTNGTSTPEGLTSPCRQSSASTSWPLPMGPGSCRATAQASLPSSSPRTPRSRCPWTCMPMQWPQGTPCWRSSAYSSWPGTSRP

SEQ ID NO: 45218 - protein, 144 aa, Homo sapiens
  Payload ID: 9218
  Gene Symbol: LGALS3BP
  Gene Name: lectin, galactoside-binding, soluble, 3 binding protein
  ENSP ID: ENSP00000465380
MTPPRLFWVWLLVAGTQGSGPIMLDEVQCTGTEASLADCKSLGWLKSNCRHERDAGVVCTNETRSTHTLDLSRELSEALGQIFDSQRGCDLSISVNVQGEDALGFCGHTVILTANLEAQALWKEPGSNVTMSVDAECVPMVRDL

SEQ ID NO: 45219 - protein, 210 aa, Homo sapiens
  Payload ID: 9218
  Gene Symbol: LGALS3BP
  Gene Name: lectin, galactoside-binding, soluble, 3 binding protein
  ENSP ID: ENSP00000465729
MTPPRLFWVWLLVAGTQGVNDGDMRLADGGATNQGRVEIFYRGQWGTVCDNLWDLTDASVVCRALGFENATQALGRAAFGQGSGPIMLDEVQCTGTEASLADCKSLGWLKSNCRHERDAGVVCTNETRSTHTLDLSRELSEALGQIFDSQRGCDLSISVNVQGEDALGFCGHTVILTANLEAQALWKEPGSNVTMSVDAECVPMVRDLLR

SEQ ID NO: 45220 - protein, 18 aa, Homo sapiens
  Payload ID: 9218
  Gene Symbol: LGALS3BP
  Gene Name: lectin, galactoside-binding, soluble, 3 binding protein
  ENSP ID: ENSP00000465982
MTPPRLFWVWLLVAGTQA

SEQ ID NO: 45221 - protein, 62 aa, Homo sapiens
  Payload ID: 9218
  Gene Symbol: LGALS3BP
  Gene Name: lectin, galactoside-binding, soluble, 3 binding protein
  ENSP ID: ENSP00000466318
MTPPRLFWVWLLVAGTQGELSPWEIPKAEVWKAGAPWGCSELQGDILPGARGPAVSQIFSPA

SEQ ID NO: 45222 - protein, 41 aa, Homo sapiens
  Payload ID: 9218
  Gene Symbol: LGALS3BP
  Gene Name: lectin, galactoside-binding, soluble, 3 binding protein
  ENSP ID: ENSP00000466333
MTPPRLFWVWLLVAGTQAPGIPSDDDLEVPGGSPGFRRERW

SEQ ID NO: 45223 - protein, 113 aa, Homo sapiens
  Payload ID: 9218
  Gene Symbol: LGALS3BP
  Gene Name: lectin, galactoside-binding, soluble, 3 binding protein
  ENSP ID: ENSP00000466850
MTPPRLFWVWLLVAGTQGVNDGDMRLADGGATNQGRVEIFYRGQWGTVCDNLWDLTDASVVCRALGFENATQALGRAAFGQGRACCLTGRLQVPGLAEEQLQARERRWCGLHQ

SEQ ID NO: 45224 - protein, 259 aa, Homo sapiens
  Payload ID: 9218
  Gene Symbol: LGALS3BP
  Gene Name: lectin, galactoside-binding, soluble, 3 binding protein
  ENSP ID: ENSP00000467211
MTPPRLFWVWLLVAGTQGVNDGDMRLADGGATNQGRVEIFYRGQWGTVCDNLWDLTDASVVCRALGFENATQALGRAAFGQGSGPIMLDEVQCTGTEASLADCKSLGWLKSNCRHERDAGVVCTNETRSTHTLDLSRELSEALGQIFDSQRGCDLSISVNVQGEDALGFCGHTVILTANLEAQALWKEPGSNVTMSVDAECVPMVRDLLRYFYSRRIDITLSSVKCFHKLASAYGARQLQGYCASLFAILLPQDPSFQM

SEQ ID NO: 45225 - protein, 62 aa, Homo sapiens; identical to SEQ ID NO: 45221
  Payload ID: 9218
  Gene Symbol: LGALS3BP
  Gene Name: lectin, galactoside-binding, soluble, 3 binding protein
  ENSP ID: ENSP00000467646

SEQ ID NO: 45226 - protein, 48 aa, Homo sapiens
  Payload ID: 9218
  Gene Symbol: LGALS3BP
  Gene Name: lectin, galactoside-binding, soluble, 3 binding protein
  ENSP ID: ENSP00000467976
MTPPRLFWVWLLVAGTQGVNDGDMRLADGGATNQGRVEIFYRGPWPDL

SEQ ID NO: 45227 - protein, 41 aa, Homo sapiens; identical to SEQ ID NO: 45222
  Payload ID: 9218
  Gene Symbol: LGALS3BP
  Gene Name: lectin, galactoside-binding, soluble, 3 binding protein
  ENSP ID: ENSP00000468131

SEQ ID NO: 45228 - protein, 131 aa, Homo sapiens
  Payload ID: 9218
  Gene Symbol: LGALS3BP
  Gene Name: lectin, galactoside-binding, soluble, 3 binding protein
  ENSP ID: ENSP00000468480
MTPPRLFWVWLLVAGTQGVNDGDMRLADGGATNQGRVEIFYRGQWGTVCDNLWDLTDASVVCRALGFENATQALGRAAFGQGSGPIMLDEVQCTGTEASLADCKSLGWLKSNCRHERDAGVVCTNGAFQSE

SEQ ID NO: 45229 - protein, 88 aa, Homo sapiens
  Payload ID: 9218
  Gene Symbol: LGALS3BP
  Gene Name: lectin, galactoside-binding, soluble, 3 binding protein
  ENSP ID: ENSP00000468586
MTPPRLFWVWLLVAGTQGVNDGDMRLADGGATNQGRVEIFYRGQWGTVCDNLWDLTDASVVCRALGFENATQALGRAAFGQGSGPIML

SEQ ID NO: 45230 - protein, 209 aa, Homo sapiens
  Payload ID: 9218
  Gene Symbol: LGALS3BP
  Gene Name: lectin, galactoside-binding, soluble, 3 binding protein
  ENSP ID: ENSP00000468774
MTPPRLFWVWLLVAGTQGVNDGDMRLADGGATNQGRVEIFYRGQWGTVCDNLWDLTDASVVCRALGFENATQALGRAAFGQGSGPIMLDEVQCTGTEASLADCKSLGWLKSNCRHERDAGVVCTNETRSTHTLDLSRELSEALGQIFDSQRGCDLSISVNVQGEDALGFCGHTVILTANLEAQALWKEPGSNVTMSVDAECVPMVRDLL

SEQ ID NO: 45231 - protein, 323 aa, Homo sapiens
  Payload ID: 9219
  Gene Symbol: LGALS4
  Gene Name: lectin, galactoside-binding, soluble, 4
  Uniprot ID: P56470
  ENSP ID: ENSP00000302100
MAYVPAPGYQPTYNPTLPYYQPIPGGLNVGMSVYIQGVASEHMKRFFVNFVVGQDPGSDVAFHFNPRFDGWDKVVFNTLQGGKWGSEERKRSMPFKKGAAFELVFIVLAEHYKVVVNGNPFYEYGHRLPLQMVTHLQVDGDLQLQSINFIGGQPLRPQGPPMMPPYPGPGHCHQQLNSLPTMEGPPTFNPPVPYFGRLQGGLTARRTIIIKGYVPPTGKSFAINFKVGSSGDIALHINPRMGNGTVVRNSLLNGSWGSEEKKITHNPFGPGQFFDLSIRCGLDRFKVYANGQHLFDFAHRLSAFQRVDTLEIQGDVTLSYVQI

SEQ ID NO: 45232 - protein, 218 aa, Homo sapiens
  Payload ID: 9219
  Gene Symbol: LGALS4
  Gene Name: lectin, galactoside-binding, soluble, 4
  ENSP ID: ENSP00000470387
  MOD_RES (1)..(1): Any amino acid
XPFKKGAAFELVFIVLAEHYKVVVNGNPFYEYGHRLPLQMVTHLQVDGDLQLQSINFIGGQPLRPQGPPMMPPYPTMEGPPTFNPPVPYFGRLQGGLTARRTIIIKGYVPPTGKSFAINFKVGSSGDIALHINPRMGNGTVVRNSLLNGSWGSEEKKITHNPFGPGQFFDLSIRCGLDRFKVYANGQHLFDFAHRLSAFQRVDTLEIQGDVTLSYVQI

SEQ ID NO: 45233 - protein, 38 aa, Homo sapiens
  Payload ID: 9219
  Gene Symbol: LGALS4
  Gene Name: lectin, galactoside-binding, soluble, 4
  ENSP ID: ENSP00000471757
NFNQSTSSEASPSGPRGVAAQGVLTQHLEKRRSLMGVS

SEQ ID NO: 45234 - protein, 31 aa, Homo sapiens
  Payload ID: 9219
  Gene Symbol: LGALS4
  Gene Name: lectin, galactoside-binding, soluble, 4
  ENSP ID: ENSP00000472990
MSVYIQGVASEHMKRFFVNFVVGQDPGSDVA

SEQ ID NO: 45235 - protein, 31 aa, Homo sapiens; identical to SEQ ID NO: 45234
  Payload ID: 9219
  Gene Symbol: LGALS4
  Gene Name: Lectin, galactoside-binding, soluble, 4
  ENSP ID: ENSP00000489031

SEQ ID NO: 45236 - protein, 38 aa, Homo sapiens; identical to SEQ ID NO: 45233
  Payload ID: 9219
  Gene Symbol: LGALS4
  Gene Name: Lectin, galactoside-binding, soluble, 4
  ENSP ID: ENSP00000489125

SEQ ID NO: 45237 - protein, 218 aa, Homo sapiens; identical to SEQ ID NO: 45232
  Payload ID: 9219
  Gene Symbol: LGALS4
  Gene Name: Lectin, galactoside-binding, soluble, 4
  ENSP ID: ENSP00000489325
  MOD_RES (1)..(1): Any amino acid

SEQ ID NO: 45238 - protein, 323 aa, Homo sapiens; identical to SEQ ID NO: 45231
  Payload ID: 9219
  Gene Symbol: LGALS4
  Gene Name: Lectin, galactoside-binding, soluble, 4
  ENSP ID: ENSP00000489411

SEQ ID NO: 45239 - protein, 136 aa, Homo sapiens
  Payload ID: 9220
  Gene Symbol: LGALS7
  Gene Name: lectin, galactoside-binding, soluble, 7
  Uniprot ID: P47929
  ENSP ID: ENSP00000367891
MSNVPHKSSLPEGIRPGTVLRIRGLVPPNASRFHVNLLCGEEQGSDAALHFNPRLDTSEVVFNSKEQGSWGREERGPGVPFQRGQPFEVLIIASDDGFKAVVGDAQYHHFRHRLPLARVRLVEVGGDVQLDSVRIF

SEQ ID NO: 45240 - protein, 35 aa, Homo sapiens
  Payload ID: 9220
  Gene Symbol: LGALS7
  Gene Name: lectin, galactoside-binding, soluble, 7
  ENSP ID: ENSP00000472380
MPRCISTPGWTRRRWSSTARSKAPGAARSAGRAFL

SEQ ID NO: 45241 - protein, 136 aa, Homo sapiens; identical to SEQ ID NO: 45239
  Payload ID: 9220
  Gene Symbol: LGALS7
  Gene Name: Lectin, galactoside-binding, soluble, 7
  ENSP ID: ENSP00000489395

SEQ ID NO: 45242 - protein, 136 aa, Homo sapiens; identical to SEQ ID NO: 45239
  Payload ID: 9221
  Gene Symbol: LGALS7B
  Gene Name: lectin, galactoside-binding, soluble, 7B
  Uniprot ID: P47929
  ENSP ID: ENSP00000313571

SEQ ID NO: 45243 - protein, 35 aa, Homo sapiens
  Payload ID: 9221
  Gene Symbol: LGALS7B
  Gene Name: Lectin, galactoside-binding, soluble, 7B
  ENSP ID: ENSP00000489179
MPPCISTPGWTRRRWSSTARSKAPGAARSAGRAFL

SEQ ID NO: 45244 - protein, 136 aa, Homo sapiens; identical to SEQ ID NO: 45239
  Payload ID: 9221
  Gene Symbol: LGALS7B
  Gene Name: Lectin, galactoside-binding, soluble, 7B
  ENSP ID: ENSP00000489582

SEQ ID NO: 45245 - protein, 175 aa, Homo sapiens
  Payload ID: 9222
  Gene Symbol: LGALS8
  Gene Name: lectin, galactoside-binding, soluble, 8
  ENSP ID: ENSP00000238181
MMLSLNNLQNIIYNPVIPFVGTIPDQLDPGTLIVIRGHVPSDADRFQVDLQNGSSMKPRADVAFHFNPRFKRAGCIVCNTLINEKWGREEITYDTPFKREKSFEIVIMVLKDKFQVPKSGTPQLRLPFAARLNTPMGPGRTVVVKGEVNANAKSFNVDLLAGKSKDIALHLNPRL

SEQ ID NO: 45246 - protein, 359 aa, Homo sapiens
  Payload ID: 9222
  Gene Symbol: LGALS8
  Gene Name: lectin, galactoside-binding, soluble, 8
  Uniprot ID: O00214
  ENSP ID: ENSP00000309576
MMLSLNNLQNIIYNPVIPFVGTIPDQLDPGTLIVIRGHVPSDADRFQVDLQNGSSMKPRADVAFHFNPRFKRAGCIVCNTLINEKWGREEITYDTPFKREKSFEIVIMVLKDKFQVAVNGKHTLLYGHRIGPEKIDTLGIYGKVNIHSIGFSFSSDLQSTQASSLELTEISRENVPKSGTPQLPSNRGGDISKIAPRTVYTKSKDSTVNHTLTCTKIPPMNYVSKRLPFAARLNTPMGPGRTVVVKGEVNANAKSFNVDLLAGKSKDIALHLNPRLNIKAFVRNSFLQESWGEEERNITSFPFSPGMYFEMIIYCDVREFKVAVNGVHSLEYKHRFKELSSIDTLEINGDIHLLEVRSW

SEQ ID NO: 45247 - protein, 317 aa, Homo sapiens
  Payload ID: 9222
  Gene Symbol: LGALS8
  Gene Name: lectin, galactoside-binding, soluble, 8
  Uniprot ID: O00214
  ENSP ID: ENSP00000342139
MMLSLNNLQNIIYNPVIPFVGTIPDQLDPGTLIVIRGHVPSDADRFQVDLQNGSSMKPRADVAFHFNPRFKRAGCIVCNTLINEKWGREEITYDTPFKREKSFEIVIMVLKDKFQVAVNGKHTLLYGHRIGPEKIDTLGIYGKVNIHSIGFSFSSDLQSTQASSLELTEISRENVPKSGTPQLRLPFAARLNTPMGPGRTVVVKGEVNANAKSFNVDLLAGKSKDIALHLNPRLNIKAFVRNSFLQESWGEEERNITSFPFSPGMYFEMIIYCDVREFKVAVNGVHSLEYKHRFKELSSIDTLEINGDIHLLEVRSW

SEQ ID NO: 45248 - protein, 317 aa, Homo sapiens; identical to SEQ ID NO: 45247
  Payload ID: 9222
  Gene Symbol: LGALS8
  Gene Name: lectin, galactoside-binding, soluble, 8
  Uniprot ID: O00214
  ENSP ID: ENSP00000355543

SEQ ID NO: 45249 - protein, 208 aa, Homo sapiens
  Payload ID: 9222
  Gene Symbol: LGALS8
  Gene Name: lectin, galactoside-binding, soluble, 8
  ENSP ID: ENSP00000385999
MMLSLNNLQNIIYNPVIPFVGTIPDQLDPGTLIVIRGHVPSDADRFQVDLQNGSSMKPRADVAFHFNPRFKRAGCIVCNTLINEKWGREEITYDTPFKREKSFEIVIMVLKDKFQVAVNGKHTLLYGHRIGPEKIDTLGIYGKVNIHSIGFSFSSDLQSTQASSLELTEISRENVPKSGTPQLPSNRGGDISKIAPRTVYTKSKDSTV

SEQ ID NO: 45250 - protein, 121 aa, Homo sapiens
  Payload ID: 9222
  Gene Symbol: LGALS8
  Gene Name: lectin, galactoside-binding, soluble, 8
  ENSP ID: ENSP00000398630
MMLSLNNLQNIIYNPVIPFVGTIPDQLDPGTLIVIRGHVPSDADRFQVDLQNGSSMKPRADVAFHFNPRFKRAGCIVCNTLINEKWGREEITYDTPFKREKSFEIVIMVLKDKFQDLQSTQ

SEQ ID NO: 45251 - protein, 167 aa, Homo sapiens
  Payload ID: 9222
  Gene Symbol: LGALS8
  Gene Name: lectin, galactoside-binding, soluble, 8
  ENSP ID: ENSP00000405504
MMLSLNNLQNIIYNPVIPFVGTIPDQLDPGTLIVIRGHVPSDADRFQVDLQNGSSMKPRADVAFHFNPRFKRAGCIVCNTLINEKWGREEITYDTPFKREKSFEIVIMVLKDKFQVAVNGKHTLLYGHRIGPEKIDTLGIYGKVNIHSIGFSFSSDLQSTQASSLEL

SEQ ID NO: 45252 - protein, 53 aa, Homo sapiens
  Payload ID: 9222
  Gene Symbol: LGALS8
  Gene Name: lectin, galactoside-binding, soluble, 8
  ENSP ID: ENSP00000407428
MMLSLNNLQNIIYNPIPGGSAEWQQHETSSRCGLSFQSSFQKGRLHCLQYFDK

SEQ ID NO: 45253 - protein, 359 aa, Homo sapiens; identical to SEQ ID NO: 45246
  Payload ID: 9222
  Gene Symbol: LGALS8
  Gene Name: lectin, galactoside-binding, soluble, 8
  Uniprot ID: O00214
  ENSP ID: ENSP00000408657

SEQ ID NO: 45254 - protein, 300 aa, Homo sapiens
  Payload ID: 9222
  Gene Symbol: LGALS8
  Gene Name: lectin, galactoside-binding, soluble, 8
  ENSP ID: ENSP00000410843
MMLSLNNLQNIIYNPVIPFVGTIPDQLDPGTLIVIRGHVPSDADRFQVDLQNGSSMKPRADVAFHFNPRFKRAGCIVCNTLINEKWGREEITYDTPFKREKSFEIVIMVLKDKFQVPKSGTPQLPSNRGGDISKIAPRTVYTKSKDSTVNHTLTCTKIPPMNYVSKRLPFAARLNTPMGPGRTVVVKGEVNANAKSFNVDLLAGKSKDIALHLNPRLNIKAFVRNSFLQESWGEEERNITSFPFSPGMYFEMIIYCDVREFKVAVNGVHSLEYKHRFKELSSIDTLEINGDIHLLEVRSW

SEQ ID NO: 45255 - protein, 53 aa, Homo sapiens
  Payload ID: 9222
  Gene Symbol: LGALS8
  Gene Name: lectin, galactoside-binding, soluble, 8
  ENSP ID: ENSP00000413278
MMLSLNNLQNIIYNPVIPFVGTIPDQLDPGTLIVIRGHVPSDADRWICRMAAA

SEQ ID NO: 45256 - protein, 359 aa, Homo sapiens; identical to SEQ ID NO: 45246
  Payload ID: 9222
  Gene Symbol: LGALS8
  Gene Name: lectin, galactoside-binding, soluble, 8
  Uniprot ID: O00214
  ENSP ID: ENSP00000431398

SEQ ID NO: 45257 - protein, 300 aa, Homo sapiens; identical to SEQ ID NO: 45254
  Payload ID: 9222
  Gene Symbol: LGALS8
  Gene Name: lectin, galactoside-binding, soluble, 8
  ENSP ID: ENSP00000431884

SEQ ID NO: 45258 - protein, 290 aa, Homo sapiens
  Payload ID: 9222
  Gene Symbol: LGALS8
  Gene Name: lectin, galactoside-binding, soluble, 8
  ENSP ID: ENSP00000434860
MMLSLNNLQNIIYNPVIPFVGTIPDQLDPGTLIVIRGHVPSDADRAGCIVCNTLINEKWGREEITYDTPFKREKSFEIVIMVLKDKFQVAVNGKHTLLYGHRIGPEKIDTLGIYGKVNIHSIGFSFSSDLQSTQASSLELTEISRENVPKSGTPQLRLPFAARLNTPMGPGRTVVVKGEVNANAKSFNVDLLAGKSKDIALHLNPRLNIKAFVRNSFLQESWGEEERNITSFPFSPGMYFEMIIYCDVREFKVAVNGVHSLEYKHRFKELSSIDTLEINGDIHLLEVRSW

SEQ ID NO: 45259 - protein, 359 aa, Homo sapiens; identical to SEQ ID NO: 45246
  Payload ID: 9222
  Gene Symbol: LGALS8
  Gene Name: lectin, galactoside-binding, soluble, 8
  Uniprot ID: O00214
  ENSP ID: ENSP00000435460

SEQ ID NO: 45260 - protein, 106 aa, Homo sapiens
  Payload ID: 9222
  Gene Symbol: LGALS8
  Gene Name: lectin, galactoside-binding, soluble, 8
  ENSP ID: ENSP00000435632
MMLSLNNLQNIIYNPVIPFVGTIPDQLDPGTLIVIRGHVPSDADRFQVDLQNGSSMKPRADVAFHFNPRFKRAGCIVCNTLINEKWGREEITYDTPFKREKSFEIV

SEQ ID NO: 45261 - protein, 43 aa, Homo sapiens
  Payload ID: 9222
  Gene Symbol: LGALS8
  Gene Name: lectin, galactoside-binding, soluble, 8
  ENSP ID: ENSP00000437007
MMLSLNNLQNIIYNPVIPFVGTIPDQLDPGTLIVIRGHVPSDA

SEQ ID NO: 45262 - protein, 317 aa, Homo sapiens; identical to SEQ ID NO: 45247
  Payload ID: 9222
  Gene Symbol: LGALS8
  Gene Name: lectin, galactoside-binding, soluble, 8
  Uniprot ID: O00214
  ENSP ID: ENSP00000437040

SEQ ID NO: 45263 - protein, 323 aa, Homo sapiens
  Payload ID: 9223
  Gene Symbol: LGALS9
  Gene Name: lectin, galactoside-binding, soluble, 9
  Uniprot ID: O00182
  ENSP ID: ENSP00000306228
MAFSGSQAPYLSPAVPFSGTIQGGLQDGLQITVNGTVLSSSGTRFAVNFQTGFSGNDIAFHFNPRFEDGGYVVCNTRQNGSWGPEERKTHMPFQKGMPFDLCFLVQSSDFKVMVNGILFVQYFHRVPFHRVDTISVNGSVQLSYISFQPPGVWPANPAPITQTVIHTVQSAPGQMFSTPAIPPMMYPHPAYPMPFITTILGGLYPSKSILLSGTVLPSAQRFHINLCSGNHIAFHLNPRFDENAVVRNTQIDNSWGSEERSLPRKMPFVRGQSFSVWILCEAHCLKVAVDGQHLFEYYHRLRNLPTINRLEVGGDIQLTHVQT

SEQ ID NO: 45264 - protein, 246 aa, Homo sapiens
  Payload ID: 9223
  Gene Symbol: LGALS9
  Gene Name: lectin, galactoside-binding, soluble, 9
  Uniprot ID: O00182
  ENSP ID: ENSP00000318214
MAFSGSQAPYLSPAVPFSGTIQGGLQDGLQITVNGTVLSSSGTRFAVNFQTGFSGNDIAFHFNPRFEDGGYVVCNTRQNGSWGPEERKTHMPFQKGMPFDLCFLVQSSDFKVMVNGILFVQYFHRVPFHRVDTISVNGSVQLSYISFQPPGVWPANPAPITQTVIHTVQSAPGQMFSTPAIPPMMYPHPAYPMPFITTILGGLYPSKSILLSGTVLPSAQRCGSCVKLTASRWPWMVSTCLNTTIA

SEQ ID NO: 45265 - protein, 355 aa, Homo sapiens
  Payload ID: 9223
  Gene Symbol: LGALS9
  Gene Name: lectin, galactoside-binding, soluble, 9
  Uniprot ID: O00182
  ENSP ID: ENSP00000378856
MAFSGSQAPYLSPAVPFSGTIQGGLQDGLQITVNGTVLSSSGTRFAVNFQTGFSGNDIAFHFNPRFEDGGYVVCNTRQNGSWGPEERKTHMPFQKGMPFDLCFLVQSSDFKVMVNGILFVQYFHRVPFHRVDTISVNGSVQLSYISFQNPRTVPVQPAFSTVPFSQPVCFPPRPRGRRQKPPGVWPANPAPITQTVIHTVQSAPGQMFSTPAIPPMMYPHPAYPMPFITTILGGLYPSKSILLSGTVLPSAQRFHINLCSGNHIAFHLNPRFDENAVVRNTQIDNSWGSEERSLPRKMPFVRGQSFSVWILCEAHCLKVAVDGQHLFEYYHRLRNLPTINRLEVGGDIQLTHVQT

SEQ ID NO: 45266 - protein, 175 aa, Homo sapiens
  Payload ID: 9223
  Gene Symbol: LGALS9
  Gene Name: lectin, galactoside-binding, soluble, 9
  ENSP ID: ENSP00000462359
MAFSGSQAPYLSPAVPFSGTIQGGLQDGLQITVNGTVLSSSGTRFAVNFQTGFSGNDIAFHFNPRFEDGGYVVCNTRQNGSWGPEERKTHMPFQKGMPFDLCFLVQSSDFKVMVNGILFVQYFHRVPFHRVDTISVNGSVQLSYISFQPMPFITTILGGLYPSKSILLSGTVLPS

SEQ ID NO: 45267 - protein, 137 aa, Homo sapiens
  Payload ID: 9223
  Gene Symbol: LGALS9
  Gene Name: lectin, galactoside-binding, soluble, 9
  ENSP ID: ENSP00000462382
  MOD_RES (1)..(1): Any amino acid
XFDLCFLVQSSDFKVMVNGILFVQYFHRVPFHRVDTISVNGSVQLSYISFQTQTVIHTVQSAPGQMFSTPAIPPMMYPHPAYPMPFITTILGGLYPSKSILLSGTVLPSAQRCGSCVKLTASRWPWMVSTCLNTTIA

SEQ ID NO: 45268 - protein, 75 aa, Homo sapiens
  Payload ID: 9223
  Gene Symbol: LGALS9
  Gene Name: lectin, galactoside-binding, soluble, 9
  ENSP ID: ENSP00000462668
MAFSGSQAPYLSPAVPFSGTIQGGLQDGLQITVNGTVLSSSGTRWRVRGVQHEAERKLGARGEEDTHAFPEGDAL

SEQ ID NO: 45269 - protein, 75 aa, Homo sapiens; identical to SEQ ID NO: 45268
  Payload ID: 9223
  Gene Symbol: LGALS9
  Gene Name: lectin, galactoside-binding, soluble, 9
  ENSP ID: ENSP00000463125

SEQ ID NO: 45270 - protein, 125 aa, Homo sapiens
  Payload ID: 9223
  Gene Symbol: LGALS9
  Gene Name: lectin, galactoside-binding, soluble, 9
  ENSP ID: ENSP00000464581
PVQPAFSTVPFSQPVCFPPRPRGRRQKTQTVIHTVQSAPGQMFSTPAIPPMMYPHPAYPMPFITTILGGLYPSKSILLSGTVLPSAQRFHINLCSGNHIAFHLNPRFDENAVVRNTQIDNSWGSE

SEQ ID NO: 45271 - protein, 115 aa, Homo sapiens
  Payload ID: 9223
  Gene Symbol: LGALS9
  Gene Name: lectin, galactoside-binding, soluble, 9
  ENSP ID: ENSP00000467505
MPFQKGMPFDLCFLVQSSDFKVMVNGILFVQYFHRVPFHRVDTISVNGSVQLSYISFQNPRTVPVQPAFSTVPFSQPVCFPPRPRGRRQKPPGVWPANPAPITQTVIHTVQSAPG

SEQ ID NO: 45272 - protein, 355 aa, Homo sapiens
  Payload ID: 9224
  Gene Symbol: LGALS9B
  Gene Name: lectin, galactoside-binding, soluble, 9B
  Uniprot ID: Q3B8N2
  ENSP ID: ENSP00000315564
MAFSGSQAPYLSPAVPFSGTIQGGLQDGFQITVNGAVLSSSGTRFAVDFQTGFSGNDIAFHFNPRFEDGGYVVCNTRQKGRWGPEERKMHMPFQKGMPFDLCFLVQSSDFKVMVNGSLFVQYFHRVPFHRVDTISVNGSVQLSYISFQNPRTVPVQPAFSTVPFSQPVCFPPRPRGRRQKPPSVRPANPAPITQTVIHTVQSASGQMFSTPAIPPMMYPHPAYPMPFITTIPGGLYPSKSIILSGTVLPSAQRFHINLCSGSHIAFHMNPRFDENAVVRNTQINNSWGSEERSLPRKMPFVRGQSFSVWILCEAHCLKVAVDGQHVFEYYHRLRNLPTINKLEVGGDIQLTHVQT

SEQ ID NO: 45273 - protein, 356 aa, Homo sapiens
  Payload ID: 9224
  Gene Symbol: LGALS9B
  Gene Name: lectin, galactoside-binding, soluble, 9B
  Uniprot ID: Q3B8N2
  ENSP ID: ENSP00000388841
MAFSGSQAPYLSPAVPFSGTIQGGLQDGFQITVNGAVLSSSGTRFAVDFQTGFSGNDIAFHFNPRFEDGGYVVCNTRQKGRWGPEERKMHMPFQKGMPFDLCFLVQSSDFKVMVNGSLFVQYFHRVPFHRVDTISVNGSVQLSYISFQNPRTVPVQPAFSTVPFSQPVCFPPRPRGRRQKPPSVRPANPAPITQTVIHTVQSASGQMFSQTPAIPPMMYPHPAYPMPFITTIPGGLYPSKSIILSGTVLPSAQRFHINLCSGSHIAFHMNPRFDENAVVRNTQINNSWGSEERSLPRKMPFVRGQSFSVWILCEAHCLKVAVDGQHVFEYYHRLRNLPTINKLEVGGDIQLTHVQT

SEQ ID NO: 45274 - protein, 51 aa, Homo sapiens
  Payload ID: 9224
  Gene Symbol: LGALS9B
  Gene Name: lectin, galactoside-binding, soluble, 9B
  ENSP ID: ENSP00000464309
ERKMHMPFQKGMPFDLCFLVQSSDFKEHGWSWKPLQEQKTKHRKFSLISRS

SEQ ID NO: 45275 - protein, 35 aa, Homo sapiens
  Payload ID: 9224
  Gene Symbol: LGALS9B
  Gene Name: lectin, galactoside-binding, soluble, 9B
  ENSP ID: ENSP00000464627
MAFSGSQAPYLSPVCCGLSDGLQWKRHCLPLQPSV

SEQ ID NO: 45276 - protein, 356 aa, Homo sapiens
  Payload ID: 9225
  Gene Symbol: LGALS9C
  Gene Name: lectin, galactoside-binding, soluble, 9C
  Uniprot ID: Q6DKI2
  ENSP ID: ENSP00000329932
MAFSGCQAPYLSPAVPFSGTIQGGLQDGFQITVNGAVLSCSGTRFAVDFQTGFSGNDIAFHFNPRFEDGGYVVCNTRQKGTWGPEERKMHMPFQKGMPFDLCFLVQSSDFKVMVNGSLFVQYFHRVPFHRVDTISVNGSVQLSYISFQNPRAVPVQPAFSTVPFSQPVCFPPRPRGRRQKPPSVRPANPAPITQTVIHTVQSASGQMFSQTPAIPPMMYPHPAYPMPFITTIPGGLYPSKSIILSGTVLPSAQRFHINLCSGSHIAFHMNPRFDENAVVRNTQINNSWGSEERSLPRKMPFVRGQSFSVWILCEAHCLKVAVDGQHVFEYYHRLRNLPTINKLEVGGDIQLTHVQT

SEQ ID NO: 45277 - protein, 75 aa, Homo sapiens
  Payload ID: 9225
  Gene Symbol: LGALS9C
  Gene Name: lectin, galactoside-binding, soluble, 9C
  ENSP ID: ENSP00000461967
MAFSGCQAPYLSPAVPFSGTIQGGLQDGFQITVNGAVLSCSGTRRRVCGVQHEAERNMGARGEEDAHALPEGDAL

SEQ ID NO: 45278 - protein, 53 aa, Homo sapiens
  Payload ID: 9225
  Gene Symbol: LGALS9C
  Gene Name: lectin, galactoside-binding, soluble, 9C
  ENSP ID: ENSP00000462660
PEERKMHMPFQKGMPFDLCFLVQSSDFKEHGWSWKPLQEQKTKHRKFSLISRS

SEQ ID NO: 45279 - protein, 323 aa, Homo sapiens
  Payload ID: 9225
  Gene Symbol: LGALS9C
  Gene Name: lectin, galactoside-binding, soluble, 9C
  ENSP ID: ENSP00000462708
MAFSGCQAPYLSPAVPFSGTIQGGLQDGFQITVNGAVLSCSGTRFAVDFQTGFSGNDIAFHFNPRFEDGGYVVCNTRQKGTWGPEERKMHMPFQKGMPFDLCFLVQSSDFKVMVNGSLFVQYFHRVPFHRVDTISVNGSVQLSYISFQPPSVRPANPAPITQTVIHTVQSASGQMFSTPAIPPMMYPHPAYPMPFITTIPGGLYPSKSIILSGTVLPSAQRFHINLCSGSHIAFHMNPRFDENAVVRNTQINNSWGSEERSLPRKMPFVRGQSFSVWILCEAHCLKVAVDGQHVFEYYHRLRNLPTINKLEVGGDIQLTHVQT

SEQ ID NO: 45280 - protein, 234 aa, Homo sapiens
  Payload ID: 9225
  Gene Symbol: LGALS9C
  Gene Name: lectin, galactoside-binding, soluble, 9C
  ENSP ID: ENSP00000462760
MAFSGCQAPYLSPAVPFSGTIQGGLQDGFQITVNGAVLSCSGTRFAVDFQTGFSGNDIAFHFNPRFEDGGYVVCNTRQKGTWGPEERKMHMPFQKGMPFDLCFLVQSSDFKVMVNGSLFVQYFHRVPFHRVDTISVNGSVQLSYISFQTQTVIHTVQSASGQMFSTPAIPPMMYPHPAYPMPFITTIPGGLYPSKSIILSGTVLPSAQRCGSCVKLTASRWPWMVSTCLNTTIA

SEQ ID NO: 45281 - protein, 75 aa, Homo sapiens; identical to SEQ ID NO: 45277
  Payload ID: 9225
  Gene Symbol: LGALS9C
  Gene Name: lectin, galactoside-binding, soluble, 9C
  ENSP ID: ENSP00000462967

SEQ ID NO: 45282 - protein, 35 aa, Homo sapiens
  Payload ID: 9225
  Gene Symbol: LGALS9C
  Gene Name: lectin, galactoside-binding, soluble, 9C
  ENSP ID: ENSP00000463209
MAFSGCQAPYLSPVCCGLSDGLQWKRHCLPLQPSV

SEQ ID NO: 45283 - protein, 246 aa, Homo sapiens
  Payload ID: 9225
  Gene Symbol: LGALS9C
  Gene Name: lectin, galactoside-binding, soluble, 9C
  ENSP ID: ENSP00000464108
MAFSGCQAPYLSPAVPFSGTIQGGLQDGFQITVNGAVLSCSGTRFAVDFQTGFSGNDIAFHFNPRFEDGGYVVCNTRQKGTWGPEERKMHMPFQKGMPFDLCFLVQSSDFKVMVNGSLFVQYFHRVPFHRVDTISVNGSVQLSYISFQPPSVRPANPAPITQTVIHTVQSASGQMFSTPAIPPMMYPHPAYPMPFITTIPGGLYPSKSIILSGTVLPSAQRCGSCVKLTASRWPWMVSTCLNTTIA

SEQ ID NO: 45284 - protein, 175 aa, Homo sapiens
  Payload ID: 9225
  Gene Symbol: LGALS9C
  Gene Name: lectin, galactoside-binding, soluble, 9C
  ENSP ID: ENSP00000464682
MAFSGCQAPYLSPAVPFSGTIQGGLQDGFQITVNGAVLSCSGTRFAVDFQTGFSGNDIAFHFNPRFEDGGYVVCNTRQKGTWGPEERKMHMPFQKGMPFDLCFLVQSSDFKVMVNGSLFVQYFHRVPFHRVDTISVNGSVQLSYISFQPMPFITTIPGGLYPSKSIILSGTVLPS

SEQ ID NO: 45285 - protein, 172 aa, Homo sapiens
  Payload ID: 9226
  Gene Symbol: LGALSL
  Gene Name: lectin, galactoside-binding-like
  Uniprot ID: Q3ZCW2
  ENSP ID: ENSP00000238875
MAGSVADSDAVVKLDDGHLNNSLSSPVQADVYFPRLIVPFCGHIKGGMRPGKKVLVMGIVDLNPESFAISLTCGDSEDPPADVAIELKAVFTDRQLLRNSCISGERGEEQSAIPYFPFIPDQPFRVEILCEHPRFRVFVDGHQLFDFYHRIQTLSAIDTIKINGDLQITKLG

SEQ ID NO: 45286 - protein, 100 aa, Homo sapiens
  Payload ID: 9226
  Gene Symbol: LGALSL
  Gene Name: lectin, galactoside-binding-like
  ENSP ID: ENSP00000386242
MAGSVADSDAVVKLDDGHLNNSLSSPVQADVYFPRLIVPFCGHIKGGMRPGKKVLVMGIVDLNPERWKFFVSTHVSECLWMDTNFLIFTIAFKRYLQLTP

SEQ ID NO: 45287 - protein, 77 aa, Homo sapiens
  Payload ID: 9226
  Gene Symbol: LGALSL
  Gene Name: lectin, galactoside-binding-like
  ENSP ID: ENSP00000407486
MAGSVADSDAVVKLDDGHLNNSLSSPVQADVYFPRLIVPFCGHIKGGMRPGKKVLVMGIVDLNPESGMIFFSALQSA

SEQ ID NO: 45288 - protein, 125 aa, Homo sapiens
  Payload ID: 9226
  Gene Symbol: LGALSL
  Gene Name: lectin, galactoside-binding-like
  ENSP ID: ENSP00000475643
MAGSVADSDAVVKLDDGHLNNSLSSPVQADVYFPRLIVPFCGHIKGGMRPGKKVLVMGIVDLNPESFAISLTCGDSEDPPADVAIELKAVFTDRQLLRNSCISGERGEEQSAIPYFPFIPDQPFR

SEQ ID NO: 45289 - protein, 53 aa, Homo sapiens
  Payload ID: 9226
  Gene Symbol: LGALSL
  Gene Name: lectin, galactoside-binding-like
  ENSP ID: ENSP00000476226
MAGSVADSDAVVLCNQLDLWGLRRPSCRCGNRTQSCVHRSAATQKFLYIWGEG

SEQ ID NO: 45290 - protein, 356 aa, Homo sapiens
  Payload ID: 9227
  Gene Symbol: LMAN2
  Gene Name: lectin, mannose-binding 2
  Uniprot ID: Q12907
  ENSP ID: ENSP00000303366
MAAEGWIWRWGWGRRCLGRPGLLGPGPGPTTPLFLLLLLGSVTADITDGNSEHLKREHSLIKPYQGVGSSSMPLWDFQGSTMLTSQYVRLTPDERSKEGSIWNHQPCFLKDWEMHVHFKVHGTGKKNLHGDGIALWYTRDRLVPGPVFGSKDNFHGLAIFLDTYPNDETTERVFPYISVMVNNGSLSYDHSKDGRWTELAGCTADFRNRDHDTFLAVRYSRGRLTVMTDLEDKNEWKNCIDITGVRLPTGYYFGASAGTGDLSDNHDIISMKLFQLMVEHTPDEESIDWTKIEPSVNFLKSPKDNVDDPTGNFRSGPLTGWRVFLLLLCALLGIVVCAVVGAVVFQKRQERNKRFY

SEQ ID NO: 45291 - protein, 325 aa, Homo sapiens
  Payload ID: 9227
  Gene Symbol: LMAN2
  Gene Name: lectin, mannose-binding 2
  ENSP ID: ENSP00000423998
MAAEGWIWRWGWGRRCLGRPGLLGPGPGPTTPLFLLLLLGSVTADITDGNSEHLKREHSLIKPYQGVGSSSMPLWDFQGSTMLTSQYVRLTPDERSKEGSIWNHQPCFLKDWEMHVHFKVHGTGKKNLHGDGIALWYTRDRLVPGPVFGSKDNFHGLAIFLDTYPNDETTERVFPYISVMVNNGSLSYDHSKDGRWTELAGCTADFRNRDHDTFLAVRYSRGRLTVMTDLEDKNEWKNCIDITGVRLPTGYYFGASAGTGDLSDNHDIISMKLFQLMVEHTPDEESIDWTKIEPSVNFLKSPKAPPFLLPQTTWTTPRGTSAAGP

SEQ ID NO: 45292 - protein, 203 aa, Homo sapiens
  Payload ID: 9227
  Gene Symbol: LMAN2
  Gene Name: lectin, mannose-binding 2
  ENSP ID: ENSP00000424132
MAAEGWIWRWGWGRRCLGRPGLLGPGPGPTTPLFLLLLLGSVTADITDGNSEHLKREHSLIKPYQGVGSSSMPLWDFQGSTMLTSQYVRLTPDERSKEGSIWNHQPCFLKDWEMHVHFKVHGTGKKNLHGDGIALWYTRDRLVPGPVFGSKDNFHGLAIFLDTYPNDETTEHRLDQDRAQRQLPQVAQRQRGRPHGELPQRAP

SEQ ID NO: 45293 - protein, 288 aa, Homo sapiens
  Payload ID: 9227
  Gene Symbol: LMAN2
  Gene Name: lectin, mannose-binding 2
  ENSP ID: ENSP00000425229
MAAEGWIWRWGWGRRCLGRPGLLGPGPGPTTPLFLLLLLGSVTADITDGNSEHLKREHSLIKPYQGVGSSSMPLWDFQGSTMLTSQYVRLTPDERSKEGSIWNHQPCFLKDWEMHVHFKVHGTGKKNLHGDGIALWYTRDRLVPDNFHGLAIFLDTYPNDETTERVFPYISVMVNNGSLSYDHSKDGRWTELAGCTADFRNRDHDTFLAVRYSRGRLTVMTDLEDKNEWKNCIDITGVRLPTGYYFGASAGTGDLSDNHDIISMKLFQLMVEHTPDEESIDWTKIEPS

SEQ ID NO: 45294 - protein, 191 aa, Homo sapiens
  Payload ID: 9227
  Gene Symbol: LMAN2
  Gene Name: lectin, mannose-binding 2
  ENSP ID: ENSP00000427377
MPLWDFQGSTMLTSQYVRLTPDERSKEGSIWNHQPCFLKDWEMHVHFKVHGTGKKNLHGDGIALWYTRDRLVPGPVFGSKDNFHGLAIFLDTYPNDETTERVFPYISVMVNNGSLSYDHSKDGRWTELAGCTADFRNRDHDTFLAVRYSRGRLTVMTDLEDKNEWKNCIDITGVRLPTGYYFGASAGTGDL

SEQ ID NO: 45295 - protein, 348 aa, Homo sapiens
  Payload ID: 9228
  Gene Symbol: LMAN2L
  Gene Name: lectin, mannose-binding 2-like
  Uniprot ID: Q9H0V9
  ENSP ID: ENSP00000264963
MAATLGPLGSWQQWRRCLSARDGSRMLLLLLLLGSGQGPQQVGAGQTFEYLKREHSLSKPYQGVGTGSSSLWNLMGNAMVMTQYIRLTPDMQSKQGALWNRVPCFLRDWELQVHFKIHGQGKKNLHGDGLAIWYTKDRMQPGPVFGNMDKFVGLGVFVDTYPNEEKQQERVFPYISAMVNNGSLSYDHERDGRPTELGGCTAIVRNLHYDTFLVIRYVKRHLTIMMDIDGKHEWRDCIEVPGVRLPRGYYFGTSSITGDLSDNHDVISLKLFELTVERTPEEEKLHRDVFLPSVDNMKLPEMTAPLPPLSGLALFLIVFFSLVFSVFAIVIGIILYNKWQEQSRKRFY

SEQ ID NO: 45296 - protein, 359 aa, Homo sapiens
  Payload ID: 9228
  Gene Symbol: LMAN2L
  Gene Name: lectin, mannose-binding 2-like
  Uniprot ID: Q9H0V9
  ENSP ID: ENSP00000366280
MAATLGPLGSWQQWRRCLSARDGSRMLLLLLLLGSGQGPQQVGAGQTFEYLKREHSLSKPYQGVGTGSSSLWNLMGNAMVMTQYIRLTPDMQSKQGALWNRVPCFLRDWELQVHFKIHGQGKKNLHGDGLAIWYTKDRMQPGPVFGNMDKFVGLGVFVDTYPNEEKQQEAQKRRYSPGVQRVFPYISAMVNNGSLSYDHERDGRPTELGGCTAIVRNLHYDTFLVIRYVKRHLTIMMDIDGKHEWRDCIEVPGVRLPRGYYFGTSSITGDLSDNHDVISLKLFELTVERTPEEEKLHRDVFLPSVDNMKLPEMTAPLPPLSGLALFLIVFFSLVFSVFAIVIGIILYNKWQEQSRKRFY

SEQ ID NO: 45297 - protein, 123 aa, Homo sapiens
  Payload ID: 9228
  Gene Symbol: LMAN2L
  Gene Name: lectin, mannose-binding 2-like
  ENSP ID: ENSP00000387717
MAATLGPLGSWQQWRRCLSARDGSRMLLLLLLLGSGQGPQQVGAGQTFEYLKREHSLSKPYQAMFPERLGVAGALQNPWTRKEESAWGWLGNLVHKGSDAARACVWKHGQICGAGSICRHLPQ

SEQ ID NO: 45298 - protein, 123 aa, Homo sapiens; identical to SEQ ID NO: 45297
  Payload ID: 9228
  Gene Symbol: LMAN2L
  Gene Name: lectin, mannose-binding 2-like
  ENSP ID: ENSP00000390197

SEQ ID NO: 45299 - protein, 111 aa, Homo sapiens
  Payload ID: 9228
  Gene Symbol: LMAN2L
  Gene Name: lectin, mannose-binding 2-like
  ENSP ID: ENSP00000403283
MAATLGPLGSWQQWRRCLSARDGSRMLLLLLLLGSGQGPQQVGAGQTFEYLKREHSLSKPYQAMFPERLGVAGALQNPWTRKEESAWGWLGNLVHKGSDAASGYSPTSQPW

SEQ ID NO: 45300 - protein, 107 aa, Homo sapiens
  Payload ID: 9228
  Gene Symbol: LMAN2L
  Gene Name: lectin, mannose-binding 2-like
  ENSP ID: ENSP00000413533
MAATLGPLGSWQQWRRCLSARDGSRMLLLLLLLGSGQGPQQVGAGQTFEYLKREHSLSKPYQGVGTGSSSLWNLMGNAMVMTQYIRLTPDMQSKQGALWNRVLHCLP

SEQ ID NO: 45301 - protein, 169 aa, Homo sapiens
  Payload ID: 9228
  Gene Symbol: LMAN2L
  Gene Name: lectin, mannose-binding 2-like
  ENSP ID: ENSP00000417037
MAATLGPLGSWQQWRRCLSARDGSRMLLLLLLLGSGQGPQQVGAGQTFEYLKREHSLSKPYQGVGTGSSSLWNLMGNAMVMTQYIRLTPDMQSKQGALWNRVPCFLRDWELQVHFKIHGQGKKNLHGDGLAIWYTKDRMQPGPEEAIFSRSPAGIPLHLSHGEQRLPQL

SEQ ID NO: 45302 - protein, 510 aa, Homo sapiens
  Payload ID: 9229
  Gene Symbol: LMAN1
  Gene Name: lectin, mannose-binding, 1
  Uniprot ID: P49257
  ENSP ID: ENSP00000251047
MAGSRQRGLRARVRPLFCALLLSLGRFVRGDGVGGDPAVALPHRRFEYKYSFKGPHLVQSDGTVPFWAHAGNAIPSSDQIRVAPSLKSQRGSVWTKTKAAFENWEVEVTFRVTGRGRIGADGLAIWYAENQGLEGPVFGSADLWNGVGIFFDSFDNDGKKNNPAIVIIGNNGQIHYDHQNDGASQALASCQRDFRNKPYPVRAKITYYQNTLTVMINNGFTPDKNDYEFCAKVENMIIPAQGHFGISAATGGLADDHDVLSFLTFQLTEPGKEPPTPDKEISEKEKEKYQEEFEHFQQELDKKKEEFQKGHPDLQGQPAEEIFESVGDRELRQVFEGQNRIHLEIKQLNRQLDMILDEQRRYVSSLTEEISKRGAGMPGQHGQITQQELDTVVKTQHEILRQVNEMKNSMSETVRLVSGMQHPGSAGGVYETTQHFIDIKEHLHIVKRDIDNLVQRNMPSNEKPKCPELPPFPSCLSTVHFIIFVVVQTVLFIGYIMYRSQQEAAAKKFF

SEQ ID NO: 45303 - protein, 526 aa, Homo sapiens
  Payload ID: 9230
  Gene Symbol: LMAN1L
  Gene Name: lectin, mannose-binding, 1 like
  Uniprot ID: Q9HAT1
  ENSP ID: ENSP00000310431
MPAVSGPGPLFCLLLLLLDPHSPETGCPPLRRFEYKLSFKGPRLALPGAGIPFWSHHGDAILGLEEVRLTPSMRNRSGAVWSRASVPFSAWEVEVQMRVTGLGRRGAQGMAVWYTRGRGHVGSVLGGLASWDGIGIFFDSPAEDTQDSPAIRVLASDGHIPSEQPGDGASQGLGSCHWDFRNRPHPFRARITYWGQRLRMSLNSGLTPSDPGEFCVDVGPLLLVPGGFFGVSAATGTLADDHDVLSFLTFSLSEPSPEVPPQPFLEMQQLRLARQLEGLWARLGLGTREDVTPKSDSEAQGEGERLFDLEETLGRHRRILQALRGLSKQLAQAERQWKKQLGPPGQARPDGGWALDASCQIPSTPGRGGHLSMSLNKDSAKVGALLHGQWTLLQALQEMRDAAVRMAAEAQVSYLPVGIEHHFLELDHILGLLQEELRGPAKAAAKAPRPPGQPPRASSCLQPGIFLFYLLIQTVGFFGYVHFRQELNKSLQECLSTGSLPLGPAPHTPRALGILRRQPLPASMPA

SEQ ID NO: 45304 - protein, 514 aa, Homo sapiens
  Payload ID: 9230
  Gene Symbol: LMAN1L
  Gene Name: lectin, mannose-binding, 1 like
  Uniprot ID: Q9HAT1
  ENSP ID: ENSP00000369031
MPAVSGPGPLFCLLLLLLDPHSPETGCPPLRRFEYKLSFKGPRLALPGAGIPFWSHHGDAILGLEEVRLTPSMRNRSGAVWSRASVPFSAWEVEVQMRVTGLGRRGAQGMAVWYTRGRGHVGSVLGGLASWDGIGIFFDSPAEDTQDSPAIRVLASDGHIPSEQPGDGASQGLGSCHWDFRNRPHPFRARITYWGQRLRMSLNSGLTPSDPGEFCVDVGPLLLVPGGFFGVSAATGTLAGEDPTGQVPPQPFLEMQQLRLARQLEGLWARLGLGTREDVTPKSDSEAQGEGERLFDLEETLGRHRRILQALRGLSKQLAQAERQWKKQLGPPGQARPDGGWALDASCQIPSTPGRGGHLSMSLNKDSAKVGALLHGQWTLLQALQEMRDAAVRMAAEAQVSYLPVGIEHHFLELDHILGLLQEELRGPAKAAAKAPRPPGQPPRASSCLQPGIFLFYLLIQTVGFFGYVHFRQELNKSLQECLSTGSLPLGPAPHTPRALGILRRQPLPASMPA

SEQ ID NO: 45305 - protein, 123 aa, Homo sapiens
  Payload ID: 9230
  Gene Symbol: LMAN1L
  Gene Name: lectin, mannose-binding, 1 like
  ENSP ID: ENSP00000454716
LQALRGLSKQLAQAERQWKKQLGPPGQARPDGGWALDASCQIPSTPGRGGHLSMSLNKDSAKVGALLHGQWTLLQALQEMRQELNKSLQECLSTGSLPLGPAPHTPRALGILRRQPLPASMPA

SEQ ID NO: 45306 - protein, 109 aa, Homo sapiens
  Payload ID: 9230
  Gene Symbol: LMAN1L
  Gene Name: lectin, mannose-binding, 1 like
  ENSP ID: ENSP00000456650
MRTGGYLEGSILIPDAILGLEEVRLTPSMRNRSGAVWSRASVPFSAWEVEVQMRVTGLGRRGAQGMAVWYTRGRGHVGSVLGGLASWDGIGIFFDSPAEDTQDSPAIRV

SEQ ID NO: 45307 - protein, 366 aa, Homo sapiens
  Payload ID: 9231
  Gene Symbol: LEFTY1
  Gene Name: left-right determination factor 1
  Uniprot ID: O75610
  ENSP ID: ENSP00000272134
MQPLWLCWALWVLPLASPGAALTGEQLLGSLLRQLQLKEVPTLDRADMEELVIPTHVRAQYVALLQRSHGDRSRGKRFSQSFREVAGRFLALEASTHLLVFGMEQRLPPNSELVQAVLRLFQEPVPKAALHRHGRLSPRSARARVTVEWLRVRDDGSNRTSLIDSRLVSVHESGWKAFDVTEAVNFWQQLSRPRQPLLLQVSVQREHLGPLASGAHKLVRFASQGAPAGLGEPQLELHTLDLGDYGAQGDCDPEAPMTEGTRCCRQEMYIDLQGMKWAENWVLEPPGFLAYECVGTCRQPPEALAFKWPFLGPRQCIASETDSLPMIVSIKEGGRTRPQVVSLPNMRVQKCSCASDGALVPRRLQP

SEQ ID NO: 45308 - protein, 64 aa, Homo sapiens
  Payload ID: 9231
  Gene Symbol: LEFTY1
  Gene Name: left-right determination factor 1
  ENSP ID: ENSP00000479837
MEQRLPPNSELVQAVLRLFQEPVPKAALHRHGRLSPRSARARVTVEWLRVRDDGSNRTSLIDSR

SEQ ID NO: 45309 - protein, 366 aa, Homo sapiens
  Payload ID: 9232
  Gene Symbol: LEFTY2
  Gene Name: left-right determination factor 2
  Uniprot ID: O00292
  ENSP ID: ENSP00000355785
MWPLWLCWALWVLPLAGPGAALTEEQLLGSLLRQLQLSEVPVLDRADMEKLVIPAHVRAQYVVLLRRSHGDRSRGKRFSQSFREVAGRFLASEASTHLLVFGMEQRLPPNSELVQAVLRLFQEPVPKAALHRHGRLSPRSAQARVTVEWLRVRDDGSNRTSLIDSRLVSVHESGWKAFDVTEAVNFWQQLSRPRQPLLLQVSVQREHLGPLASGAHKLVRFASQGAPAGLGEPQLELHTLDLRDYGAQGDCDPEAPMTEGTRCCRQEMYIDLQGMKWAKNWVLEPPGFLAYECVGTCQQPPEALAFNWPFLGPRQCIASETASLPMIVSIKEGGRTRPQVVSLPNMRVQKCSCASDGALVPRRLQP

SEQ ID NO: 45310 - protein, 332 aa, Homo sapiens
  Payload ID: 9232
  Gene Symbol: LEFTY2
  Gene Name: left-right determination factor 2
  Uniprot ID: O00292
  ENSP ID: ENSP00000388009
MWPLWLCWALWVLPLAGPGAALTEEQLLGSLLRQLQLSEVPVLDRADMEKLVIPAHVRAQYVVLLRRSHGDRSRGKRFSQSFREVAGRFLASEAALHRHGRLSPRSAQARVTVEWLRVRDDGSNRTSLIDSRLVSVHESGWKAFDVTEAVNFWQQLSRPRQPLLLQVSVQREHLGPLASGAHKLVRFASQGAPAGLGEPQLELHTLDLRDYGAQGDCDPEAPMTEGTRCCRQEMYIDLQGMKWAKNWVLEPPGFLAYECVGTCQQPPEALAFNWPFLGPRQCIASETASLPMIVSIKEGGRTRPQVVSLPNMRVQKCSCASDGALVPRRLQP

SEQ ID NO: 45311 - protein, 372 aa, Homo sapiens
  Payload ID: 9232
  Gene Symbol: LEFTY2
  Gene Name: left-right determination factor 2
  ENSP ID: ENSP00000484300
MWPLWLCWALWVLPLAGPGAALTEEQLLGSLLRQLQLSEVPVLDRADMEKLVIPAHVRAQYVVLLRRSHGDRSRGKRFSQSFREVAGRFLASEASTHLLVFGMEQRLPPNSELVQAVLRLFQEPVPKAALHRHGRLSPRSAQARVTVEWLRVRDDGSNRTSLIDSRLVSVHESGWKAFDVTEAVNFWQQLSRPRQPLLLQVSVQREHLGPLASGAHKLVRFASQGAPAGLGEPQLELHTLDLRDYGAQGDCDPEAPMTEGTRCCRQEMYIDLQGMKWAKNWVLEPPGFLAYECVGTCQQPPEALAFNWPFLGPRQCIASETASLPMIVSIKEGGRTRPQVVSLPNMRVQKCSCASDGALVPRRLQHRAWCIH

SEQ ID NO: 45312 - protein, 433 aa, Homo sapiens
  Payload ID: 9233
  Gene Symbol: LGMN
  Gene Name: legumain
  Uniprot ID: Q99538
  ENSP ID: ENSP00000334052
MVWKVAVFLSVALGIGAVPIDDPEDGGKHWVVIVAGSNGWYNYRHQADACHAYQIIHRNGIPDEQIVVMMYDDIAYSEDNPTPGIVINRPNGTDVYQGVPKDYTGEDVTPQNFLAVLRGDAEAVKGIGSGKVLKSGPQDHVFIYFTDHGSTGILVFPNEDLHVKDLNETIHYMYKHKMYRKMVFYIEACESGSMMNHLPDNINVYATTAANPRESSYACYYDEKRSTYLGDWYSVNWMEDSDVEDLTKETLHKQYHLVKSHTNTSHVMQYGNKTISTMKVMQFQGMKRKASSPVPLPPVTHLDLTPSPDVPLTIMKRKLMNTNDLEESRQLTEEIQRHLDARHLIEKSVRKIVSLLAASEAEVEQLLSERAPLTGHSCYPEALLHFRTHCFNWHSPTYEYALRHLYVLVNLCEKPYPLHRIKLSMDHVCLGHY

SEQ ID NO: 45313 - protein, 433 aa, Homo sapiens; identical to SEQ ID NO: 45312
  Payload ID: 9233
  Gene Symbol: LGMN
  Gene Name: legumain
  Uniprot ID: Q99538
  ENSP ID: ENSP00000376911

SEQ ID NO: 45314 - protein, 48 aa, Homo sapiens
  Payload ID: 9233
  Gene Symbol: LGMN
  Gene Name: legumain
  ENSP ID: ENSP00000450483
MVWKVAVFLSVALGIGAVPIDDPEDGGKHWVVIVAGSNGWYNYRHQEL

SEQ ID NO: 45315 - protein, 19 aa, Homo sapiens
  Payload ID: 9233
  Gene Symbol: LGMN
  Gene Name: legumain
  ENSP ID: ENSP00000450619
MVWKVAVFLSVALGIGAVP

SEQ ID NO: 45316 - protein, 78 aa, Homo sapiens
  Payload ID: 9233
  Gene Symbol: LGMN
  Gene Name: legumain
  ENSP ID: ENSP00000450677
MVWKVAVFLSVALGIGAVPIDDPEDGGKHWVVIVAGSNGWYNYRHQADACHAYQIIHRNGIPDEQIVVMMYDDIAYSE

SEQ ID NO: 45317 - protein, 135 aa, Homo sapiens
  Payload ID: 9233
  Gene Symbol: LGMN
  Gene Name: legumain
  ENSP ID: ENSP00000450854
MVWKVAVFLSVALGIGAVPIDDPEDGGKHWVVIVAGSNGWYNYRHQADACHAYQIIHRNGIPDEQIVVMINPTPGIVINRPNGTDVYQGVPKDYTGEDVTPQNFLAVLRGDAEAVKGIGSGKVLKSGPQDHVFIY

SEQ ID NO: 45318 - protein, 117 aa, Homo sapiens
  Payload ID: 9233
  Gene Symbol: LGMN
  Gene Name: legumain
  ENSP ID: ENSP00000451507
MVWKVAVFLSVALGIGAVPIDDPEDGGKHWVVIVAGSNGWYNYRHQADACHAYQIIHRNGIPDEQIVVMMYDDIAYSEDNPTPGIVINRPNGTDVYQGVPKDYTGEWPPGSRVHLLH

SEQ ID NO: 45319 - protein, 223 aa, Homo sapiens
  Payload ID: 9233
  Gene Symbol: LGMN
  Gene Name: legumain
  ENSP ID: ENSP00000451746
MVWKVAVFLSVALGIGAVPIDDPEDGGKHWVVIVAGSNGWYNYRHQADACHAYQIIHRNGIPDEQIVVMMYDDIAYSEDNPTPGIVINRPNGTDVYQGVPKDYTGEDVTPQNFLAVLRGDAEAVKGIGSGKVLKSGPQDHVFIYFTDHGSTGILVFPNEDLHVKDLNETIHYMYKHKMYRKMVFYIEACESGSMMNHLPDNINGRWLGRRPRPGLASRLLRHR

SEQ ID NO: 45320 - protein, 57 aa, Homo sapiens
  Payload ID: 9233
  Gene Symbol: LGMN
  Gene Name: legumain
  ENSP ID: ENSP00000451797
MVWKVAVFLSVALGIGAVPIDDPEDGGKHWVVIVAGSNGWYNYRHQADACHAYQIIH

SEQ ID NO: 45321 - protein, 91 aa, Homo sapiens
  Payload ID: 9233
  Gene Symbol: LGMN
  Gene Name: legumain
  ENSP ID: ENSP00000451854
  MOD_RES (1)..(1): Any amino acid
XPTPGIVINRPNGTDVYQGVPKDYTGEDVTPQNFLAVLRGGVRSLRCSGPPGEPPLQGSLQDLLHKMTCSLLPASPVFSEKLQIRVGKALY

SEQ ID NO: 45322 - protein, 372 aa, Homo sapiens
  Payload ID: 9233
  Gene Symbol: LGMN
  Gene Name: legumain
  Uniprot ID: Q99538
  ENSP ID: ENSP00000451861
MVWKVAVFLSVALGIGAVPIDDPEDGGKHWVVIVAGSNGWYNYRHQADACHAYQIIHRNGIPDEQIVVMMYDDIAYSEDNPTPGIVINRPNGTDVYQGVPKDYTGEDVTPQNFLAVLRGDAEAVKGIGSGKVLKSGPQDHVFIYFTDHGSTGILVFPNEDLHVKDLNETIHYMYKHKMYRKMVFYIEACESGSMMNHLPDNINVYATTAANPRESSYACYYDEKRSTYLGDWYSVNWMEDSDVEDLTKETLHKQYHLVKSHTNTSHVMQYGNKTISTMKVMQFQGMKRKASSPVPLPPVTHLDLTPSPDVPLTIMKRKLMNTNDLEESRQLTEEIQRHLDDKIVHGPRVPWSLLKSCLLEAFPSVSAPPTVC

SEQ ID NO: 45323 - protein, 78 aa, Homo sapiens; identical to SEQ ID NO: 45316
  Payload ID: 9233
  Gene Symbol: LGMN
  Gene Name: legumain
  ENSP ID: ENSP00000451916

SEQ ID NO: 45324 - protein, 57 aa, Homo sapiens; identical to SEQ ID NO: 45320
  Payload ID: 9233
  Gene Symbol: LGMN
  Gene Name: legumain
  ENSP ID: ENSP00000452268

SEQ ID NO: 45325 - protein, 376 aa, Homo sapiens
  Payload ID: 9233
  Gene Symbol: LGMN
  Gene Name: legumain
  Uniprot ID: Q99538
  ENSP ID: ENSP00000452572
MVWKVAVFLSVALGIGAVPIDDPEDGGKHWVVIVAGSNGWYNYRHQADACHAYQIIHRNGIPDEQIVVMMYDDIAYSEDNPTPGIVINRPNGTDVYQGVPKDYTGEDVTPQNFLAVLRGDAEAVKGIGSGKVLKSGPQDHVFIYFTDHGSTGILVFPNEDLHVKDLNETIHYMYKHKMYRKMVFYIEACESGSMMNHLPDNINVYATTAANPRESSYACYYDEKRSTYLGDWYSVNWMEDSDVEDLTKETLHKQYHLVKSHTNTSHVMQYGNKTISTMKVMQFQGMKRKASSPVPLPPVTHLDLTPSPDVPLTIMKRKLMNTNDLEESRQLTEEIQRHLDYEYALRHLYVLVNLCEKPYPLHRIKLSMDHVCLGHY

SEQ ID NO: 45326 - protein, 600 aa, Homo sapiens
  Payload ID: 9234
  Gene Symbol: LMOD1
  Gene Name: leiomodin 1 (smooth muscle)
  Uniprot ID: P29536
  ENSP ID: ENSP00000356257
MSRVAKYRRQVSEDPDIDSLLETLSPEEMEELEKELDVVDPDGSVPVGLRQRNQTEKQSTGVYNREAMLNFCEKETKKLMQREMSMDESKQVETKTDAKNGEERGRDASKKALGPRRDSDLGKEPKRGGLKKSFSRDRDEAGGKSGEKPKEEKIIRGIDKGRVRAAVDKKEAGKDGRGEERAVATKKEEEKKGSDRNTGLSRDKDKKREEMKEVAKKEDDEKVKGERRNTDTRKEGEKMKRAGGNTDMKKEDEKVKRGTGNTDTKKDDEKVKKNEPLHEKEAKDDSKTKTPEKQTPSGPTKPSEGPAKVEEEAAPSIFDEPLERVKNNDPEMTEVNVNNSDCITNEILVRFTEALEFNTVVKLFALANTRADDHVAFAIAIMLKANKTITSLNLDSNHITGKGILAIFRALLQNNTLTELRFHNQRHICGGKTEMEIAKLLKENTTLLKLGYHFELAGPRMTVTNLLSRNMDKQRQKRLQEQRQAQEAKGEKKDLLEVPKAGAVAKGSPKPSPQPSPKPSPKNSPKKGGAPAAPPPPPPPLAPPLIMENLKNSLSPATQRKMGDKVLPAQEKNSRDQLLAAIRSSNLKQLKKVEVPKLLQ

SEQ ID NO: 45327 - protein, 269 aa, Homo sapiens
  Payload ID: 9234
  Gene Symbol: LMOD1
  Gene Name: leiomodin 1 (smooth muscle)
  ENSP ID: ENSP00000480209
MEELEKELDVVDPDGSVPVGLRQRNQTEKQSTGVYNREAMLNFCEKETKKLMQREMSMDESKQVETKTDAKNGEERGRDASKKALGPRRDSDLGKEPKRGGLKKSFSRDRDEAGGKSGEKPKEEKIIRGIDKGRVRAAVDKKEAGKDGRGEERAVATKKEEEKKGSDRNTGLSRDKDKKREEMKEVAKKEDDEKVKGGAPAAPPPPPPPLAPPLIMENLKNSLSPATQRKMGDKVLPAQEKNSRDQLLAAIRSSNLKQLKKVEVPKLLQ

SEQ ID NO: 45328 - protein, 159 aa, Homo sapiens
  Payload ID: 9235
  Gene Symbol: LMOD2
  Gene Name: leiomodin 2 (cardiac)
  ENSP ID: ENSP00000398975
MSTFGYRRGLSKYESIDEDELLASLSAEELKELERELEDIEPDRNLPVGLRQKSLTEKTPTGTFSREALMAYWEKESQKLLEKERLGECGKVKKQPNSILKEIKNSLRSVQEKKMEDSSRPSTPQRSAHENLMEAIRGSSIKQLKRVSNQRTDIGAQIK

SEQ ID NO: 45329 - protein, 547 aa, Homo sapiens
  Payload ID: 9235
  Gene Symbol: LMOD2
  Gene Name: leiomodin 2 (cardiac)
  Uniprot ID: Q6P5Q4
  ENSP ID: ENSP00000411932
MSTFGYRRGLSKYESIDEDELLASLSAEELKELERELEDIEPDRNLPVGLRQKSLTEKTPTGTFSREALMAYWEKESQKLLEKERLGECGKVAEDKEESEEELIFTESNSEVSEEVYTEEEEEESQEEEEEEDSDEEERTIETAKGINGTVNYDSVNSDNSKPKIFKSQIENINLTNGSNGRNTESPAAIHPCGNPTVIEDALDKIKSNDPDTTEVNLNNIENITTQTLTRFAEALKDNTVVKTFSLANTHADDSAAMAIAEMLKVNEHITNVNVESNFITGKGILAIMRALQHNTVLTELRFHNQRHIMGSQVEMEIVKLLKENTTLLRLGYHFELPGPRMSMTSILTRNMDKQRQKRLQEQKQQEGYDGGPNLRTKVWQRGTPSSSPYVSPRHSPWSSPKLPKKVQTVRSRPLSPVATPPPPPPPPPPPPPSSQRLPPPPPPPPPPLPEKKLITRNIAEVIKQQESAQRALQNGQKKKKGKKVKKQPNSILKEIKNSLRSVQEKKMEDSSRPSTPQRSAHENLMEAIRGSSIKQLKRVEVPEALR

SEQ ID NO: 45330 - protein, 560 aa, Homo sapiens
  Payload ID: 9236
  Gene Symbol: LMOD3
  Gene Name: leiomodin 3 (fetal)
  Uniprot ID: Q0VAK6
  ENSP ID: ENSP00000414670
MSEHSRNSDQEELLDEEINEDEILANLSAEELKELQSEMEVMAPDPSLPVGMIQKDQTDKPPTGNFNHKSLVDYMYWEKASRRMLEEERVPVTFVKSEEKTQEEHEEIEKRNKNMAQYLKEKLNNEIVANKRESKGSSNIQETDEEDEEEEDDDDDDEGEDDGEESEETNREEEGKAKEQIRNCENNCQQVTDKAFKEQRDRPEAQEQSEKKISKLDPKKLALDTSFLKVSTRPSGNQTDLDGSLRRVRKNDPDMKELNLNNIENIPKEMLLDFVNAMKKNKHIKTFSLANVGADENVAFALANMLRENRSITTLNIESNFITGKGIVAIMRCLQFNETLTELRFHNQRHMLGHHAEMEIARLLKANNTLLKMGYHFELPGPRMVVTNLLTRNQDKQRQKRQEEQKQQQLKEQKKLIAMLENGLGLPPGMWELLGGPKPDSRMQEFFQPPPPRPPNPQNVPFSQRSEMMKKPSQAPKYRTDPDSFRVVKLKRIQRKSRMPEAREPPEKTNLKDVIKTLKPVPRNRPPPLVEITPRDQLLNDIRHSSVAYLKPVQLPKELA

SEQ ID NO: 45331 - protein, 560 aa, Homo sapiens; identical to SEQ ID NO: 45330
  Payload ID: 9236
  Gene Symbol: LMOD3
  Gene Name: leiomodin 3 (fetal)
  Uniprot ID: Q0VAK6
  ENSP ID: ENSP00000417210

SEQ ID NO: 45332 - protein, 560 aa, Homo sapiens; identical to SEQ ID NO: 45330
  Payload ID: 9236
  Gene Symbol: LMOD3
  Gene Name: leiomodin 3 (fetal)
  Uniprot ID: Q0VAK6
  ENSP ID: ENSP00000418645

SEQ ID NO: 45333 - protein, 603 aa, Homo sapiens
  Payload ID: 9237
  Gene Symbol: LMLN
  Gene Name: leishmanolysin-like (metallopeptidase M8 family)
  ENSP ID: ENSP00000328611
MGRRSGLLGLRPGPEPVALERVINKVHLKANHVVKRDVDEHLRIKTVYDKSVEELLPEKKNLVKNKLFPQAISYLEKTFQVRRPAGTILLSRQCATNQYLRKENDPHRYCTGECAAHTKCGPVIVPEEHLQQCRVYRGGKWPHGAVGVPDQEGISDADFVLYVGALATERCSHENIISYAAYCQQEANMDRPIAGYANLCPNMISTQPQEFVGMLSTVKHEVIHALGFSAGLFAFYHDKDGNPLTSRFADGLPPFNYSLGLYQWSDKVVRKVERLWDVRDNKIVRHTVYLLVTPRVVEEARKHFDCPVLEGMELENQGGVGTELNHWEKRLLENEAMTGSHTQNRVLSRITLALMEDTGRQMLSPYCDTLRSNPLQLTCRQDQRAVAVCNLQKFPKPLPQEYQYFDELSGIPAEDLPYYGGSVEIADYCPFSQEFSWHLSGEYQRSSDCRILENQPEIFKNYGAEKYGPHSVCLIQKSAFVMEKCERKLSYPDWGSGCYQVSCSPQGLKVWVQDTSYLCSRAGQVLPVSIQMNGWIHDGNLLCPSCWDFCELCPPETDPPATNLTRALPLDLCSCSSSLVVTLWLLLGNLFPLLAGFLLCIWH

SEQ ID NO: 45334 - protein, 655 aa, Homo sapiens
  Payload ID: 9237
  Gene Symbol: LMLN
  Gene Name: leishmanolysin-like (metallopeptidase M8 family)
  Uniprot ID: Q96KR4
  ENSP ID: ENSP00000328829
MVTTLGPKMAAEWGGGVGYSGSGPGRSRWRWSGSVWVRSVLLLLGGLRASATSTPVSLGSSPPCRHHVPSDTEVINKVHLKANHVVKRDVDEHLRIKTVYDKSVEELLPEKKNLVKNKLFPQAISYLEKTFQVRRPAGTILLSRQCATNQYLRKENDPHRYCTGECAAHTKCGPVIVPEEHLQQCRVYRGGKWPHGAVGVPDQEGISDADFVLYVGALATERCSHENIISYAAYCQQEANMDRPIAGYANLCPNMISTQPQEFVGMLSTVKHEVIHALGFSAGLFAFYHDKDGNPLTSRFADGLPPFNYSLGLYQWSDKVVRKVERLWDVRDNKIVRHTVYLLVTPRVVEEARKHFDCPVLEGMELENQGGVGTELNHWEKRLLENEAMTGSHTQNRVLSRITLALMEDTGRQMLSPYCDTLRSNPLQLTCRQDQRAVAVCNLQKFPKPLPQEYQYFDELSGIPAEDLPYYGGSVEIADYCPFSQEFSWHLSGEYQRSSDCRILENQPEIFKNYGAEKYGPHSVCLIQKSAFVMEKCERKLSYPDWGSGCYQVSCSPQGLKVWVQDTSYLCSRAGQVLPVSIQMNGWIHDGNLLCPSCWDFCELCPPETDPPATNLTRALPLDLCSCSSSLVVTLWLLLGNLFPLLAGFLLCIWH

SEQ ID NO: 45335 - protein, 151 aa, Homo sapiens
  Payload ID: 9237
  Gene Symbol: LMLN
  Gene Name: leishmanolysin-like (metallopeptidase M8 family)
  ENSP ID: ENSP00000390872
MVINKVHLKANHVVKRDVDEHLRIKTVYDKSVEELLPEKKNLVKNKLFPQAISYLEKTFQVRRPAGTILLSRQCATNQYLRKENDPHRYCTGECAAHTKCGPVIVPEEHLQQCRVYRGGKWPHGAVGVPDQEGISDADFVLYVGALATERC

SEQ ID NO: 45336 - protein, 692 aa, Homo sapiens
  Payload ID: 9237
  Gene Symbol: LMLN
  Gene Name: leishmanolysin-like (metallopeptidase M8 family)
  Uniprot ID: Q96KR4
  ENSP ID: ENSP00000410926
MVTTLGPKMAAEWGGGVGYSGSGPGRSRWRWSGSVWVRSVLLLLGGLRASATSTPVSLGSSPPCRHHVPSDTEVINKVHLKANHVVKRDVDEHLRIKTVYDKSVEELLPEKKNLVKNKLFPQAISYLEKTFQVRRPAGTILLSRQCATNQYLRKENDPHRYCTGECAAHTKCGPVIVPEEHLQQCRVYRGGKWPHGAVGVPDQEGISDADFVLYVGALATERCSHENIISYAAYCQQEANMDRPIAGYANLCPNMISTQPQEFVGMLSTVKHEVIHALGFSAGLFAFYHDKDGNPLTSRFADGLPPFNYSLGLYQWSDKVVRKVERLWDVRDNKIVRHTVYLLVTPRVVEEARKHFDCPVLEGMELENQGGVGTELNHWEKRLLENEAMTGSHTQNRVLSRITLALMEDTGWYKANYSMAEKLDWGRGMGCDFVRKSCKFWIDQQRQKRQMLSPYCDTLRSNPLQLTCRQDQRAVAVCNLQKFPKPLPQEYQYFDELSGIPAEDLPYYGGSVEIADYCPFSQEFSWHLSGEYQRSSDCRILENQPEIFKNYGAEKYGPHSVCLIQKSAFVMEKCERKLSYPDWGSGCYQVSCSPQGLKVWVQDTSYLCSRAGQVLPVSIQMNGWIHDGNLLCPSCWDFCELCPPETDPPATNLTRALPLDLCSCSSSLVVTLWLLLGNLFPLLAGFLLCIWH

SEQ ID NO: 45337 - protein, 640 aa, Homo sapiens
  Payload ID: 9237
  Gene Symbol: LMLN
  Gene Name: leishmanolysin-like (metallopeptidase M8 family)
  Uniprot ID: Q96KR4
  ENSP ID: ENSP00000418324
MGRRSGLLGLRPGPEPVALERVINKVHLKANHVVKRDVDEHLRIKTVYDKSVEELLPEKKNLVKNKLFPQAISYLEKTFQVRRPAGTILLSRQCATNQYLRKENDPHRYCTGECAAHTKCGPVIVPEEHLQQCRVYRGGKWPHGAVGVPDQEGISDADFVLYVGALATERCSHENIISYAAYCQQEANMDRPIAGYANLCPNMISTQPQEFVGMLSTVKHEVIHALGFSAGLFAFYHDKDGNPLTSRFADGLPPFNYSLGLYQWSDKVVRKVERLWDVRDNKIVRHTVYLLVTPRVVEEARKHFDCPVLEGMELENQGGVGTELNHWEKRLLENEAMTGSHTQNRVLSRITLALMEDTGWYKANYSMAEKLDWGRGMGCDFVRKSCKFWIDQQRQKRQMLSPYCDTLRSNPLQLTCRQDQRAVAVCNLQKFPKPLPQEYQYFDELSGIPAEDLPYYGGSVEIADYCPFSQEFSWHLSGEYQRSSDCRILENQPEIFKNYGAEKYGPHSVCLIQKSAFVMEKCERKLSYPDWGSGCYQVSCSPQGLKVWVQDTSYLCSRAGQVLPVSIQMNGWIHDGNLLCPSCWDFCELCPPETDPPATNLTRALPLDLCSCSSSLVVTLWLLLGNLFPLLAGFLLCIWH

SEQ ID NO: 45338 - protein, 67 aa, Homo sapiens
  Payload ID: 9238
  Gene Symbol: LEMD1
  Gene Name: LEM domain containing 1
  Uniprot ID: Q68G75
  ENSP ID: ENSP00000356117
MVDVKCLSDCKLQNQLEKLGFSPGPILRGLQEHQAPESHMGLSPKRETTARKTRLSRAGEKKVSQWA

SEQ ID NO: 45339 - protein, 181 aa, Homo sapiens
  Payload ID: 9238
  Gene Symbol: LEMD1
  Gene Name: LEM domain containing 1
  Uniprot ID: Q68G75
  ENSP ID: ENSP00000356119
MVDVKCLSDCKLQNQLEKLGFSPGPILPSTRKLYEKKLVQLLVSPPCAPPVMNGPRELDGAQDSDDSEELNIILQGNIILSTEKSKKLKKWPEASTTKRKAVDTYCLDYKPSKGRRWAARAPSTRITYGTITKERDYCAEDQTIESWREEGFPVGLKLAVLGIFIIVVFVYLTVENKSLFG

SEQ ID NO: 45340 - protein, 140 aa, Homo sapiens
  Payload ID: 9238
  Gene Symbol: LEMD1
  Gene Name: LEM domain containing 1
  Uniprot ID: Q68G75
  ENSP ID: ENSP00000356120
MVDVKCLSDCKLQNQLEKLGFSPGPILQLNIILQGNIILSTEKSKKLKKWPEASTTKRKAVDTYCLDYKPSKGRRWAARAPSTRITYGTITKERDYCAEDQTIESWREEGFPVGLKLAVLGIFIIVVFVYLTVENKSLFG

SEQ ID NO: 45341 - protein, 181 aa, Homo sapiens; identical to SEQ ID NO: 45339
  Payload ID: 9238
  Gene Symbol: LEMD1
  Gene Name: LEM domain containing 1
  Uniprot ID: Q68G75
  ENSP ID: ENSP00000356121

SEQ ID NO: 45342 - protein, 108 aa, Homo sapiens
  Payload ID: 9238
  Gene Symbol: LEMD1
  Gene Name: LEM domain containing 1
  Uniprot ID: Q68G75
  ENSP ID: ENSP00000356122
MVDVKCLSDCKLQNQLEKLGFSPGPILPSTRKLYEKKLVQLLVSPPCAPPVMNGPRELDGAQDSDDSEGGLQEHQAPESHMGLSPKRETTARKTRLSRAGEKKVSQWA

SEQ ID NO: 45343 - protein, 108 aa, Homo sapiens; identical to SEQ ID NO: 45342
  Payload ID: 9238
  Gene Symbol: LEMD1
  Gene Name: LEM domain containing 1
  Uniprot ID: Q68G75
  ENSP ID: ENSP00000375801

SEQ ID NO: 45344 - protein, 67 aa, Homo sapiens; identical to SEQ ID NO: 45338
  Payload ID: 9238
  Gene Symbol: LEMD1
  Gene Name: LEM domain containing 1
  Uniprot ID: Q68G75
  ENSP ID: ENSP00000479306

SEQ ID NO: 45345 - protein, 503 aa, Homo sapiens
  Payload ID: 9239
  Gene Symbol: LEMD2
  Gene Name: LEM domain containing 2
  Uniprot ID: Q8NC56
  ENSP ID: ENSP00000293760
MAGLSDLELRRELQALGFQPGPITDTTRDVYRNKLRRLRGEARLRDEERLREEARPRGEERLREEARLREDAPLRARPAAASPRAEPWLSQPASGSAYATPGAYGDIRPSAASWVGSRGLAYPARPAQLRRRASVRGSSEEDEDARTPDRATQGPGLAARRWWAASPAPARLPSSLLGPDPRPGLRATRAGPAGAARARPEVGRRLERWLSRLLLWASLGLLLVFLGILWVKMGKPSAPQEAEDNMKLLPVDCERKTDEFCQAKQKAALLELLHELYNFLAIQAGNFECGNPENLKSKCIPVMEAQEYIANVTSSSSAKFEAALTWILSSNKDVGIWLKGEDQSELVTTVDKVVCLESAHPRMGVGCRLSRALLTAVTNVLIFFWCLAFLWGLLILLKYRWRKLEEEEQAMYEMVKKIIDVVQDHYVDWEQDMERYPYVGILHVRDSLIPPQSRRRMKRVWDRAVEFLASNESRIQTESHRVAGEDMLVWRWTKPSSFSDSER

SEQ ID NO: 45346 - protein, 114 aa, Homo sapiens
  Payload ID: 9239
  Gene Symbol: LEMD2
  Gene Name: LEM domain containing 2
  ENSP ID: ENSP00000398733
MAGLSDLELRRELQALGFQPGPITDTTRDVYRNKLRRLRGEARLRDEERLREEARPRGEERLREEARLREDAPLRARPAAASPRAEPWLSQPASGSAYATPGAYGDIRPSAASW

SEQ ID NO: 45347 - protein, 280 aa, Homo sapiens
  Payload ID: 9239
  Gene Symbol: LEMD2
  Gene Name: LEM domain containing 2
  ENSP ID: ENSP00000408524
  MOD_RES (1)..(1): Any amino acid
XAYATPGAYGDIRPSAASWVGSRGLAYPARPAQLRRRASVRGSSEEDEDARTPDRATQGPGLAARRWWAASPAPARLPSSLLGPDPRPGLRATRAGPAGAARARPEVGRRLERWLSRLLLWASLGLLLVFLGILWVKMGKPSAPQEAEDNSNFECGNPENLKSKCIPVMEAQEYIANVTSSSSAKFEAALTWILSSNKDVGIWLKGEDQSELVTTVDKVVCLESAHPRMGVGCRLSRALLTAVTNVLIFFWCLAFLWGLLILLKYRWRKLEEEEQAMYEM

SEQ ID NO: 45348 - protein, 102 aa, Homo sapiens
  Payload ID: 9239
  Gene Symbol: LEMD2
  Gene Name: LEM domain containing 2
  ENSP ID: ENSP00000421112
  MOD_RES (1)..(1): Any amino acid
XVCLESAHPRMGVGCRLSRALLTAVTNVLIFFWCLAFLWGLLILLKYRWRKLEEEEQAMYEMVKKIIDVVQDHYVDWEQDMERYPYVGILHVRDSLIPPQSR

SEQ ID NO: 45349 - protein, 201 aa, Homo sapiens
  Payload ID: 9239
  Gene Symbol: LEMD2
  Gene Name: LEM domain containing 2
  Uniprot ID: Q8NC56
  ENSP ID: ENSP00000421704
MEAQEYIANVTSSSSAKFEAALTWILSSNKDVGIWLKGEDQSELVTTVDKVVCLESAHPRMGVGCRLSRALLTAVTNVLIFFWCLAFLWGLLILLKYRWRKLEEEEQAMYEMVKKIIDVVQDHYVDWEQDMERYPYVGILHVRDSLIPPQSRRRMKRVWDRAVEFLASNESRIQTESHRVAGEDMLVWRWTKPSSFSDSER

SEQ ID NO: 45350 - protein, 53 aa, Homo sapiens
  Payload ID: 9239
  Gene Symbol: LEMD2
  Gene Name: LEM domain containing 2
  ENSP ID: ENSP00000423619
MEAQEYIANVTSSSSAKFEAALTWILSSNKDVGIWLKGEDQSELVTTVDKVVC

SEQ ID NO: 45351 - protein, 85 aa, Homo sapiens
  Payload ID: 9239
  Gene Symbol: LEMD2
  Gene Name: LEM domain containing 2
  ENSP ID: ENSP00000423715
IIDVVQDHYVDWEQDMERYPYVGILHVRDSLIPPQSRRMKRVWDRAVEFLASNESRIQTESHRVAGEDMLVWRWTKPSSFSDSER

SEQ ID NO: 45352 - protein, 503 aa, Homo sapiens; identical to SEQ ID NO: 45345
  Payload ID: 9239
  Gene Symbol: LEMD2
  Gene Name: LEM domain containing 2
  Uniprot ID: Q8NC56
  ENSP ID: ENSP00000478539

SEQ ID NO: 45353 - protein, 911 aa, Homo sapiens
  Payload ID: 9240
  Gene Symbol: LEMD3
  Gene Name: LEM domain containing 3
  Uniprot ID: Q9Y2U8
  ENSP ID: ENSP00000308369
MAAAAASAPQQLSDEELFSQLRRYGLSPGPVTESTRPVYLKKLKKLREEEQQQHRSGGRGNKTRNSNNNNTAAATVAAAGPAAAAAAGMGVRPVSGDLSYLRTPGGLCRISASGPESLLGGPGGASAAPAAGSKVLLGFSSDESDVEASPRDQAGGGGRKDRASLQYRGLKAPPAPLAASEVTNSNSAERRKPHSWWGARRPAGPELQTPPGKDGAVEDEEGEGEDGEERDPETEEPLWASRTVNGSRLVPYSCRENYSDSEEEDDDDVASSRQVLKDDSLSRHRPRRTHSKPLPPLTAKSAGGRLETSVQGGGGLAMNDRAAAAGSLDRSRNLEEAAAAEQGGGCDQVDSSPVPRYRVNAKKLTPLLPPPLTDMDSTLDSSTGSLLKTNNHIGGGAFSVDSPRIYSNSLPPSAAVAASSSLRINHANHTGSNHTYLKNTYNKPKLSEPEEELLQQFKREEVSPTGSFSAHYLSMFLLTAACLFFLILGLTYLGMRGTGVSEDGELSIENPFGETFGKIQESEKTLMMNTLYKLHDRLAQLAGDHECGSSSQRTLSVQEAAAYLKDLGPEYEGIFNTSLQWILENGKDVGIRCVGFGPEEELTNITDVQFLQSTRPLMSFWCRFRRAFVTVTHRLLLLCLGVVMVCVVLRYMKYRWTKEEEETRQMYDMVVKIIDVLRSHNEACQENKDLQPYMPIPHVRDSLIQPHDRKKMKKVWDRAVDFLAANESRVRTETRRIGGADFLVWRWIQPSASCDKILVIPSKVWQGQAFHLDRRNSPPNSLTPCLKIRNMFDPVMEIGDQWHLAIQEAILEKCSDNDGIVHIAVDKNSREGCVYVKCLSPEYAGKAFKALHGSWFDGKLVTVKYLRLDRYHHRFPQALTSNTPLKPSNKHMNSMSHLRLRTGLTNSQGSS

SEQ ID NO: 45354 - protein, 1503 aa, Homo sapiens
  Payload ID: 9241
  Gene Symbol: LMTK2
  Gene Name: lemur tyrosine kinase 2
  Uniprot ID: Q8IWU2
  ENSP ID: ENSP00000297293
MPGPPALRRRLLLLLLVLLIAGSAGAAPLPQTGAGEAPPAAEVSSSFVILCVCSLIILIVLIANCVSCCKDPEIDFKEFEDNFDDEIDFTPPAEDTPSVQSPAEVFTLSVPNISLPAPSQFQPSVEGLKSQVARHSLNYIQEIGNGWFGKVLLGEIYTGTSVARVIVKELKASANPKEQDTFLKNGEPYYILQHPNILQCVGQCVEAIPYLLVFEFCDLGDLKAYLRSEQEHMRGDSQTMLLQRMACEVAAGLAAMHKLHFLHSDLALRNCFLTSDLNVKVGDYGIGFSRYKEDYIETDDKKVFPLRWTAPELVTSFQDRLLTADQTKYSNIWSLGVTLWELFDNAAQPYSNLSNLDVLNQVIRERDTKLPKPQLEQPYSDRWYEVLQFCWLSPEKRPAAEDVHRLLTYLRLQSQRDSEVDFEQQWNALKPNTNSRDSSNNAAFPILDHFARDRLGREMEEVLTVTETSQGLSFEYVWEAAKHDHFDERSRGHLDEGLSYTSIFYPVEVFESSLSDPGPGKQDDSGQDVPLRVPGVVPVFDAHNLSVGSDYYIQLEEKSGSNLELDYPPALLTTDMDNPERTGPELSQLTALRSVELEESSTDEDFFQSSTDPKDSSLPGDLHVTSGPESPFNNIFNDVDKSEDLPSHQKIFDLMELNGVQADFKPATLSSSLDNPKESVITGHFEKEKPRKIFDSEPLCLSDNLMHQDNFDPLNVQELSENFLFLQEKNLLKGSLSSKEHINDLQTELKNAGFTEAMLETSCRNSLDTELQFAENKPGLSLLQENVSTKGDDTDVMLTGDTLSTSLQSSPEVQVPPTSFETEETPRRVPPDSLPTQGETQPTCLDVIVPEDCLHQDISPDAVTVPVEILSTDARTHSLDNRSQDSPGESEETLRLTESDSVLADDILASRVSVGSSLPELGQELHNKPFSEDHHSHRRLEKNLEAVETLNQLNSKDAAKEAGLVSALSSDSTSQDSLLEDSLSAPFPASEPSLETPDSLESVDVHEALLDSLGSHTPQKLVPPDKPADSGYETENLESPEWTLHPAPEGTADSEPATTGDGGHSGLPPNPVIVISDAGDGHRGTEVTPETFTAGSQGSYRDSAYFSDNDSEPEKRSEEVPGTSPSALVLVQEQPLPEPVLPEQSPAAQDSCLEARKSQPDESCLSALHNSSDLELRATPEPAQTGVPQQVHPTEDEASSPWSVLNAELSSGDDFETQDDRPCTLASTGTNTNELLAYTNSALDKSLSSHSEGPKLKEPDIEGKYLGKLGVSGMLDLSEDGMDADEEDENSDDSDEDLRAFNLHSLSSESEDETEHPVPIILSNEDGRHLRSLLKPTAANAPDPLPEDWKKEKKAVTFFDDVTVYLFDQETPTKELGPCGGEACGPDLSGPAPASGSPYLSRCINSESSTDEEGGGFEWDDDFSPDPFMSKTTSNLLSSKPSLQTSKYFSPPPPARSTEQSWPHSAPYSRFSISPANIASFSLTHLTDSDIEQGGSSEDGEKD

SEQ ID NO: 45355 - protein, 1489 aa, Homo sapiens
  Payload ID: 9242
  Gene Symbol: LMTK3
  Gene Name: lemur tyrosine kinase 3
  ENSP ID: ENSP00000270238
MRQVLWLCNVCVTARETRHHLHLPAILDKMPAPGALILLAAVSASGCLASPAHPDGFALGRAPLAPPYAVVLISCSGLLAFIFLLLTCLCCKRGDVGFKEFENPEGEDCSGEYTPPAEETSSSQSLPDVYILPLAEVSLPMPAPQPSHSDMTTPLGLSRQHLSYLQEIGSGWFGKVILGEIFSDYTPAQVVVKELRASAGPLEQRKFISEAQPYRSLQHPNVLQCLGLCVETLPFLLIMEFCQLGDLKRYLRAQRPPEGLSPELPPRDLRTLQRMGLEIARGLAHLHSHNYVHSDLALRNCLLTSDLTVRIGDYGLAHSNYKEDYYLTPERLWIPLRWAAPELLGELHGTFMVVDQSRESNIWSLGVTLWELFEFGAQPYRHLSDEEVLAFVVRQQHVKLARPRLKLPYADYWYDILQSCWRPPAQRPSASDLQLQLTYLLSERPPRPPPPPPPPRDGPFPWPWPPAHSAPRPGTLSSPFPLLDGFPGADPDDVLTVTESSRGLNLECLWEKARRGAGRGGGAPAWQPASAPPAPHANPSNPFYEALSTPSVLPVISARSPSVSSEYYIRLEEHGSPPEPLFPNDWDPLDPGVPAPQAPQAPSEVPQLVSETWASPLFPAPRPFPAQSSASGSFLLSGWDPEGRGAGETLAGDPAEVLGERGTAPWVEEEEEEEEGSSPGEDSSSLGGGPSRRGPLPCPLCSREGACSCLPLERGDAVAGWGGHPALGCPHPPEDDSSLRAERGSLADLPMAPPASAPPEFLDPLMGAAAPQYPGRGPPPAPPPPPPPPRAPADPAASPDPPSAVASPGSGLSSPGPKPGDSGYETETPFSPEGAFPGGGAAEEEGVPRPRAPPEPPDPGAPRPPPDPGPLPLPGPREKPTFVVQVSTEQLLMSLREDVTRNLLGEKGATARETGPRKAGRGPGNREKVPGLNRDPTVLGNGKQAPSLSLPVNGVTVLENGDQRAPGIEEKAAENGALGSPEREEKVLENGELTPPRREEKALENGELRSPEAGEKVLVNGGLTPPKSEDKVSENGGLRFPRNTERPPETGPWRAPGPWEKTPESWGPAPTIGEPAPETSLERAPAPSAVVSSRNGGETAPGPLGPAPKNGTLEPGTERRAPETGGAPRAPGAGRLDLGSGGRAPVGTGTAPGGGPGSGVDAKAGWVDNTRPQPPPPPLPPPPEAQPRRLEPAPPRARPEVAPEGEPGAPDSRAGGDTALSGDGDPPKPERKGPEMPRLFLDLGPPQGNSEQIKARLSRLSLALPPLTLTPFPGPGPRRPPWEGADAGAAGGEAGGAGAPGPAEEDGEDEDEDEEEDEEAAAPGAAAGPRGPGRARAAPVPVVVSSADADAARPLRGLLKSPRGADEPEDSELERKRKMVSFHGDVTVYLFDQETPTNELSVQAPPEGDTDPSTPPAPPTPPHPATPGDGFPSNDSGFGGSFEWAEDFPLLPPPGPPLCFSRFSVSPALETPGPPARAPDARPAGPVEN

SEQ ID NO: 45356 - protein, 1460 aa, Homo sapiens
  Payload ID: 9242
  Gene Symbol: LMTK3
  Gene Name: lemur tyrosine kinase 3
  Uniprot ID: Q96Q04
  ENSP ID: ENSP00000472020
MPAPGALILLAAVSASGCLASPAHPDGFALGRAPLAPPYAVVLISCSGLLAFIFLLLTCLCCKRGDVGFKEFENPEGEDCSGEYTPPAEETSSSQSLPDVYILPLAEVSLPMPAPQPSHSDMTTPLGLSRQHLSYLQEIGSGWFGKVILGEIFSDYTPAQVVVKELRASAGPLEQRKFISEAQPYRSLQHPNVLQCLGLCVETLPFLLIMEFCQLGDLKRYLRAQRPPEGLSPELPPRDLRTLQRMGLEIARGLAHLHSHNYVHSDLALRNCLLTSDLTVRIGDYGLAHSNYKEDYYLTPERLWIPLRWAAPELLGELHGTFMVVDQSRESNIWSLGVTLWELFEFGAQPYRHLSDEEVLAFVVRQQHVKLARPRLKLPYADYWYDILQSCWRPPAQRPSASDLQLQLTYLLSERPPRPPPPPPPPRDGPFPWPWPPAHSAPRPGTLSSPFPLLDGFPGADPDDVLTVTESSRGLNLECLWEKARRGAGRGGGAPAWQPASAPPAPHANPSNPFYEALSTPSVLPVISARSPSVSSEYYIRLEEHGSPPEPLFPNDWDPLDPGVPAPQAPQAPSEVPQLVSETWASPLFPAPRPFPAQSSASGSFLLSGWDPEGRGAGETLAGDPAEVLGERGTAPWVEEEEEEEEGSSPGEDSSSLGGGPSRRGPLPCPLCSREGACSCLPLERGDAVAGWGGHPALGCPHPPEDDSSLRAERGSLADLPMAPPASAPPEFLDPLMGAAAPQYPGRGPPPAPPPPPPPPRAPADPAASPDPPSAVASPGSGLSSPGPKPGDSGYETETPFSPEGAFPGGGAAEEEGVPRPRAPPEPPDPGAPRPPPDPGPLPLPGPREKPTFVVQVSTEQLLMSLREDVTRNLLGEKGATARETGPRKAGRGPGNREKVPGLNRDPTVLGNGKQAPSLSLPVNGVTVLENGDQRAPGIEEKAAENGALGSPEREEKVLENGELTPPRREEKALENGELRSPEAGEKVLVNGGLTPPKSEDKVSENGGLRFPRNTERPPETGPWRAPGPWEKTPESWGPAPTIGEPAPETSLERAPAPSAVVSSRNGGETAPGPLGPAPKNGTLEPGTERRAPETGGAPRAPGAGRLDLGSGGRAPVGTGTAPGGGPGSGVDAKAGWVDNTRPQPPPPPLPPPPEAQPRRLEPAPPRARPEVAPEGEPGAPDSRAGGDTALSGDGDPPKPERKGPEMPRLFLDLGPPQGNSEQIKARLSRLSLALPPLTLTPFPGPGPRRPPWEGADAGAAGGEAGGAGAPGPAEEDGEDEDEDEEEDEEAAAPGAAAGPRGPGRARAAPVPVVVSSADADAARPLRGLLKSPRGADEPEDSELERKRKMVSFHGDVTVYLFDQETPTNELSVQAPPEGDTDPSTPPAPPTPPHPATPGDGFPSNDSGFGGSFEWAEDFPLLPPPGPPLCFSRFSVSPALETPGPPARAPDARPAGPVEN

SEQ ID NO: 45357 - protein, 509 aa, Homo sapiens
  Payload ID: 9243
  Gene Symbol: LGSN
  Gene Name: lengsin, lens protein with glutamine synthetase domain
  Uniprot ID: Q5TDP6
  ENSP ID: ENSP00000359691
MNNEEDLLQEDSTRDEGNETEANSMNTLRRTRKKVTKPYVCSTEVGETDMSNSNDCMRDSSQILTPPQLSSRMKHIRQAMAKNRLQFVRFEATDLHGVSRSKTIPAHFFQEKVSHGVCMPRGYLEVIPNPKDNEMNNIRATCFNSDIVLMPELSTFRVLPWADRTARVICDTFTVTGEPLLTSPRYIAKRQLSHLQASGFSLLSAFIYDFCIFGVPEILNSKIISFPALTFLNNHDQPFMQELVDGLYHTGANVESFSSSTRPGQMEISFLPEFGISSADNAFTLRTGVKEVARKYNYIASFFIETGFCDSGILSHSLWDVDRKKNMFCSTSGTEQLTITGKKWLAGLLKHSAALSCLMAPSVSCRKRYSKDRKDLKKSVPTTWGYNDNSCIFNIKCHGEKGTRIENKLGSATANPYLVLAATVAAGLDGLHSSNEVLAGPDESTDFYQVEPSEIPLKLEDALVALEEDQCLRQALGETFIRYFVAMKKYELENEEIAAERNKFLEYFI

SEQ ID NO: 45358 - protein, 208 aa, Homo sapiens
  Payload ID: 9243
  Gene Symbol: LGSN
  Gene Name: lengsin, lens protein with glutamine synthetase domain
  Uniprot ID: Q5TDP6
  ENSP ID: ENSP00000359692
MNNEEDLLQEDSTRDEGNETEANSMNTLRRTRKKVTKPYVCSTEVGETDMSNSNDCMRDSSQILTPPQLSSRMKHIRQAMAKNRLQFVRFEATDLHGVSRSKTIPAHFFQEKVSHGVCMPRGYLEVIPNPKDNEMNNIRATCFNSDIVLMPELSTFRVLPWADRTARVICDTFTVTVSGMSIGRKTCSAALLELSSSRSLGKNGWQDS

SEQ ID NO: 45359 - protein, 191 aa, Homo sapiens
  Payload ID: 9243
  Gene Symbol: LGSN
  Gene Name: lengsin, lens protein with glutamine synthetase domain
  ENSP ID: ENSP00000431246
MNNEEDLLQEDSTRDEGNETEANSMNTLRRTRKKVTKPYVCSTEVGETDMSNSNDCMRDSSQILTPPQLSSRMKHIRQAMAKNRLQFVRFEATDLHGVSRSKTIPAHFFQEKVSHGVCMPRGYLEVIPNPKDNEMNNIRATCFNSDIVLMPELSTFRVLPWADRTARVICDTFTVTAPEKLMNFKVIMSSR

SEQ ID NO: 45360 - protein, 118 aa, Homo sapiens
  Payload ID: 9243
  Gene Symbol: LGSN
  Gene Name: lengsin, lens protein with glutamine synthetase domain
  Uniprot ID: Q5TDP6
  ENSP ID: ENSP00000479173
MNNEEDLLQEDSTRDEGNETEANSMNTLRRTRKKVTKPYVCSTEVGETDMSNSNERIRNQMVCHKLGNTSKPIMGPGSAESHLSYDDKDSQDETTVIKPLPPRTTTNVPGGEFNPNSE

SEQ ID NO: 45361 - protein, 61 aa, Homo sapiens
  Payload ID: 9244
  Gene Symbol: LENEP
  Gene Name: lens epithelial protein
  Uniprot ID: Q9Y5L5
  ENSP ID: ENSP00000357412
MQPRTQPLAQTLPFFLGGAPRDTGLRVPVIKMGTGWEGFQRTLKEVAYILLCCWCIKELLD

SEQ ID NO: 45362 - protein, 61 aa, Homo sapiens; identical to SEQ ID NO: 45361
  Payload ID: 9244
  Gene Symbol: LENEP
  Gene Name: lens epithelial protein
  Uniprot ID: Q9Y5L5
  ENSP ID: ENSP00000376278

SEQ ID NO: 45363 - protein, 215 aa, Homo sapiens
  Payload ID: 9245
  Gene Symbol: LIM2
  Gene Name: lens intrinsic membrane protein 2, 19kDa
  Uniprot ID: P55344
  ENSP ID: ENSP00000221973
MYSFMGGGLFCAWVGTILLVVAMATDHWMQYRLSGSFAHQGLWRYCLGNKCYLQTDSIGEPPGQGPGRAWGKSRADLGAQGHLYSRWRTLRLKEGKGATQAYWNATRAFMILSALCAISGIIMGIMAFAHQPTFSRISRPFSAGIMFFSSTLFVVLALAIYTGVTVSFLGRRFGDWRFSWSYILGWVAVLMTFFAGIFYMCAYRVHECRRLSTPR

SEQ ID NO: 45364 - protein, 173 aa, Homo sapiens
  Payload ID: 9245
  Gene Symbol: LIM2
  Gene Name: lens intrinsic membrane protein 2, 19kDa
  Uniprot ID: P55344
  ENSP ID: ENSP00000472090
MYSFMGGGLFCAWVGTILLVVAMATDHWMQYRLSGSFAHQGLWRYCLGNKCYLQTDSIAYWNATRAFMILSALCAISGIIMGIMAFAHQPTFSRISRPFSAGIMFFSSTLFVVLALAIYTGVTVSFLGRRFGDWRFSWSYILGWVAVLMTFFAGIFYMCAYRVHECRRLSTPR

SEQ ID NO: 45365 - protein, 666 aa, Homo sapiens
  Payload ID: 9246
  Gene Symbol: LEO1
  Gene Name: LEO1 homolog, Paf1/RNA polymerase II complex component
  Uniprot ID: Q8WVC0
  ENSP ID: ENSP00000299601
MADMEDLFGSDADSEAERKDSDSGSDSDSDQENAASGSNASGSESDQDERGDSGQPSNKELFGDDSEDEGASHHSGSDNHSERSDNRSEASERSDHEDNDPSDVDQHSGSEAPNDDEDEGHRSDGGSHHSEAEGSEKAHSDDEKWGREDKSDQSDDEKIQNSDDEERAQGSDEDKLQNSDDDEKMQNTDDEERPQLSDDERQQLSEEEKANSDDERPVASDNDDEKQNSDDEEQPQLSDEEKMQNSDDERPQASDEEHRHSDDEEEQDHKSESARGSDSEDEVLRMKRKNAIASDSEADSDTEVPKDNSGTMDLFGGADDISSGSDGEDKPPTPGQPVDENGLPQDQQEEEPIPETRIEVEIPKVNTDLGNDLYFVKLPNFLSVEPRPFDPQYYEDEFEDEEMLDEEGRTRLKLKVENTIRWRIRRDEEGNEIKESNARIVKWSDGSMSLHLGNEVFDVYKAPLQGDHNHLFIRQGTGLQGQAVFKTKLTFRPHSTDSATHRKMTLSLADRCSKTQKIRILPMAGRDPECQRTEMIKKEEERLRASIRRESQQRRMREKQHQRGLSASYLEPDRYDEEEEGEESISLAAIKNRYKGGIREERARIYSSDSDEGSEEDKAQRLLKAKKLTSDEEGEPSGKRKAEDDDKANKKHKKYVISDEEEEDDD

SEQ ID NO: 45366 - protein, 606 aa, Homo sapiens
  Payload ID: 9246
  Gene Symbol: LEO1
  Gene Name: LEO1 homolog, Paf1/RNA polymerase II complex component
  Uniprot ID: Q8WVC0
  ENSP ID: ENSP00000314610
MADMEDLFGSDADSEAERKDSDSGSDSDSDQENAASGSNASGSESDQDERGDSGQPSNKELFGDDSEDEGASHHSGSDNHSERSDNRSEASERSDHEDNDPSDVDQHSGSEAPNDDEDEGHRSDGGSHHSEAEGSEKAHSDDEKWGREDKSDQSDDEKIQNSDDEERAQGSDEDKLQNSDDDEKMQNTDDEERPQLSDDERQQLSEEEKANSDDERPVASDNDDEKQNSDDEEQPQLSDEEKMQNSDDERPQASDEEHRHSDDEEEQDHKSESARGSDSEDEVLRMKRKNAIASDSEADSDTEVPKDNSGTMDLFGGADDISSGSDGEDKPPTPGQPVDENGLPQDQQEEEPIPETRIEVEIPKVNTDLGNDLYFVKLPNFLSVEPSMSLHLGNEVFDVYKAPLQGDHNHLFIRQGTGLQGQAVFKTKLTFRPHSTDSATHRKMTLSLADRCSKTQKIRILPMAGRDPECQRTEMIKKEEERLRASIRRESQQRRMREKQHQRGLSASYLEPDRYDEEEEGEESISLAAIKNRYKGGIREERARIYSSDSDEGSEEDKAQRLLKAKKLTSDEEGEPSGKRKAEDDDKANKKHKKYVISDEEEEDDD

SEQ ID NO: 45367 - protein, 167 aa, Homo sapiens
  Payload ID: 9247
  Gene Symbol: LEP
  Gene Name: leptin
  Uniprot ID: P41159
  ENSP ID: ENSP00000312652
MHWGTLCGFLWLWPYLFYVQAVPIQKVQDDTKTLIKTIVTRINDISHTQSVSSKQKVTGLDFIPGLHPILTLSKMDQTLAVYQQILTSMPSRNVIQISNDLENLRDLLHVLAFSKSCHLPWASGLETLDSLGGVLEASGYSTEVVALSRLQGSLQDMLWQLDLSPGC

SEQ ID NO: 45368 - protein, 1165 aa, Homo sapiens
  Payload ID: 9248
  Gene Symbol: LEPR
  Gene Name: leptin receptor
  Uniprot ID: P48357
  ENSP ID: ENSP00000330393
MICQKFCVVLLHWEFIYVITAFNLSYPITPWRFKLSCMPPNSTYDYFLLPAGLSKNTSNSNGHYETAVEPKFNSSGTHFSNLSKTTFHCCFRSEQDRNCSLCADNIEGKTFVSTVNSLVFQQIDANWNIQCWLKGDLKLFICYVESLFKNLFRNYNYKVHLLYVLPEVLEDSPLVPQKGSFQMVHCNCSVHECCECLVPVPTAKLNDTLLMCLKITSGGVIFQSPLMSVQPINMVKPDPPLGLHMEITDDGNLKISWSSPPLVPFPLQYQVKYSENSTTVIREADKIVSATSLLVDSILPGSSYEVQVRGKRLDGPGIWSDWSTPRVFTTQDVIYFPPKILTSVGSNVSFHCIYKKENKIVPSKEIVWWMNLAEKIPQSQYDVVSDHVSKVTFFNLNETKPRGKFTYDAVYCCNEHECHHRYAELYVIDVNINISCETDGYLTKMTCRWSTSTIQSLAESTLQLRYHRSSLYCSDIPSIHPISEPKDCYLQSDGFYECIFQPIFLLSGYTMWIRINHSLGSLDSPPTCVLPDSVVKPLPPSSVKAEITINIGLLKISWEKPVFPENNLQFQIRYGLSGKEVQWKMYEVYDAKSKSVSLPVPDLCAVYAVQVRCKRLDGLGYWSNWSNPAYTVVMDIKVPMRGPEFWRIINGDTMKKEKNVTLLWKPLMKNDSLCSVQRYVINHHTSCNGTWSEDVGNHTKFTFLWTEQAHTVTVLAINSIGASVANFNLTFSWPMSKVNIVQSLSAYPLNSSCVIVSWILSPSDYKLMYFIIEWKNLNEDGEIKWLRISSSVKKYYIHDHFIPIEKYQFSLYPIFMEGVGKPKIINSFTQDDIEKHQSDAGLYVIVPVIISSSILLLGTLLISHQRMKKLFWEDVPNPKNCSWAQGLNFQKPETFEHLFIKHTASVTCGPLLLEPETISEDISVDTSWKNKDEMMPTTVVSLLSTTDLEKGSVCISDQFNSVNFSEAEGTEVTYEDESQRQPFVKYATLISNSKPSETGEEQGLINSSVTKCFSSKNSPLKDSFSNSSWEIEAQAFFILSDQHPNIISPHLTFSEGLDELLKLEGNFPEENNDKKSIYYLGVTSIKKRESGVLLTDKSRVSCPFPAPCLFTDIRVLQDSCSHFVENNINLGTSSKKTFASYMPQFQTCSTQTHKIMENKMCDLTV

SEQ ID NO: 45369 - protein, 906 aa, Homo sapiens
  Payload ID: 9248
  Gene Symbol: LEPR
  Gene Name: leptin receptor
  Uniprot ID: P48357
  ENSP ID: ENSP00000340884
MICQKFCVVLLHWEFIYVITAFNLSYPITPWRFKLSCMPPNSTYDYFLLPAGLSKNTSNSNGHYETAVEPKFNSSGTHFSNLSKTTFHCCFRSEQDRNCSLCADNIEGKTFVSTVNSLVFQQIDANWNIQCWLKGDLKLFICYVESLFKNLFRNYNYKVHLLYVLPEVLEDSPLVPQKGSFQMVHCNCSVHECCECLVPVPTAKLNDTLLMCLKITSGGVIFQSPLMSVQPINMVKPDPPLGLHMEITDDGNLKISWSSPPLVPFPLQYQVKYSENSTTVIREADKIVSATSLLVDSILPGSSYEVQVRGKRLDGPGIWSDWSTPRVFTTQDVIYFPPKILTSVGSNVSFHCIYKKENKIVPSKEIVWWMNLAEKIPQSQYDVVSDHVSKVTFFNLNETKPRGKFTYDAVYCCNEHECHHRYAELYVIDVNINISCETDGYLTKMTCRWSTSTIQSLAESTLQLRYHRSSLYCSDIPSIHPISEPKDCYLQSDGFYECIFQPIFLLSGYTMWIRINHSLGSLDSPPTCVLPDSVVKPLPPSSVKAEITINIGLLKISWEKPVFPENNLQFQIRYGLSGKEVQWKMYEVYDAKSKSVSLPVPDLCAVYAVQVRCKRLDGLGYWSNWSNPAYTVVMDIKVPMRGPEFWRIINGDTMKKEKNVTLLWKPLMKNDSLCSVQRYVINHHTSCNGTWSEDVGNHTKFTFLWTEQAHTVTVLAINSIGASVANFNLTFSWPMSKVNIVQSLSAYPLNSSCVIVSWILSPSDYKLMYFIIEWKNLNEDGEIKWLRISSSVKKYYIHDHFIPIEKYQFSLYPIFMEGVGKPKIINSFTQDDIEKHQSDAGLYVIVPVIISSSILLLGTLLISHQRMKKLFWEDVPNPKNCSWAQGLNFQKKMPGTKELLGGGWLT

SEQ ID NO: 45370 - protein, 906 aa, Homo sapiens; identical to SEQ ID NO: 45369
  Payload ID: 9248
  Gene Symbol: LEPR
  Gene Name: leptin receptor
  Uniprot ID: P48357
  ENSP ID: ENSP00000360097

SEQ ID NO: 45371 - protein, 958 aa, Homo sapiens
  Payload ID: 9248
  Gene Symbol: LEPR
  Gene Name: leptin receptor
  Uniprot ID: P48357
  ENSP ID: ENSP00000360098
MICQKFCVVLLHWEFIYVITAFNLSYPITPWRFKLSCMPPNSTYDYFLLPAGLSKNTSNSNGHYETAVEPKFNSSGTHFSNLSKTTFHCCFRSEQDRNCSLCADNIEGKTFVSTVNSLVFQQIDANWNIQCWLKGDLKLFICYVESLFKNLFRNYNYKVHLLYVLPEVLEDSPLVPQKGSFQMVHCNCSVHECCECLVPVPTAKLNDTLLMCLKITSGGVIFQSPLMSVQPINMVKPDPPLGLHMEITDDGNLKISWSSPPLVPFPLQYQVKYSENSTTVIREADKIVSATSLLVDSILPGSSYEVQVRGKRLDGPGIWSDWSTPRVFTTQDVIYFPPKILTSVGSNVSFHCIYKKENKIVPSKEIVWWMNLAEKIPQSQYDVVSDHVSKVTFFNLNETKPRGKFTYDAVYCCNEHECHHRYAELYVIDVNINISCETDGYLTKMTCRWSTSTIQSLAESTLQLRYHRSSLYCSDIPSIHPISEPKDCYLQSDGFYECIFQPIFLLSGYTMWIRINHSLGSLDSPPTCVLPDSVVKPLPPSSVKAEITINIGLLKISWEKPVFPENNLQFQIRYGLSGKEVQWKMYEVYDAKSKSVSLPVPDLCAVYAVQVRCKRLDGLGYWSNWSNPAYTVVMDIKVPMRGPEFWRIINGDTMKKEKNVTLLWKPLMKNDSLCSVQRYVINHHTSCNGTWSEDVGNHTKFTFLWTEQAHTVTVLAINSIGASVANFNLTFSWPMSKVNIVQSLSAYPLNSSCVIVSWILSPSDYKLMYFIIEWKNLNEDGEIKWLRISSSVKKYYIHDHFIPIEKYQFSLYPIFMEGVGKPKIINSFTQDDIEKHQSDAGLYVIVPVIISSSILLLGTLLISHQRMKKLFWEDVPNPKNCSWAQGLNFQKMLEGSMFVKSHHHSLISSTQGHKHCGRPQGPLHRKTRDLCSLVYLLTLPPLLSYDPAKSPSVRNTQE

SEQ ID NO: 45372 - protein, 896 aa, Homo sapiens
  Payload ID: 9248
  Gene Symbol: LEPR
  Gene Name: leptin receptor
  Uniprot ID: P48357
  ENSP ID: ENSP00000360099
MICQKFCVVLLHWEFIYVITAFNLSYPITPWRFKLSCMPPNSTYDYFLLPAGLSKNTSNSNGHYETAVEPKFNSSGTHFSNLSKTTFHCCFRSEQDRNCSLCADNIEGKTFVSTVNSLVFQQIDANWNIQCWLKGDLKLFICYVESLFKNLFRNYNYKVHLLYVLPEVLEDSPLVPQKGSFQMVHCNCSVHECCECLVPVPTAKLNDTLLMCLKITSGGVIFQSPLMSVQPINMVKPDPPLGLHMEITDDGNLKISWSSPPLVPFPLQYQVKYSENSTTVIREADKIVSATSLLVDSILPGSSYEVQVRGKRLDGPGIWSDWSTPRVFTTQDVIYFPPKILTSVGSNVSFHCIYKKENKIVPSKEIVWWMNLAEKIPQSQYDVVSDHVSKVTFFNLNETKPRGKFTYDAVYCCNEHECHHRYAELYVIDVNINISCETDGYLTKMTCRWSTSTIQSLAESTLQLRYHRSSLYCSDIPSIHPISEPKDCYLQSDGFYECIFQPIFLLSGYTMWIRINHSLGSLDSPPTCVLPDSVVKPLPPSSVKAEITINIGLLKISWEKPVFPENNLQFQIRYGLSGKEVQWKMYEVYDAKSKSVSLPVPDLCAVYAVQVRCKRLDGLGYWSNWSNPAYTVVMDIKVPMRGPEFWRIINGDTMKKEKNVTLLWKPLMKNDSLCSVQRYVINHHTSCNGTWSEDVGNHTKFTFLWTEQAHTVTVLAINSIGASVANFNLTFSWPMSKVNIVQSLSAYPLNSSCVIVSWILSPSDYKLMYFIIEWKNLNEDGEIKWLRISSSVKKYYIHDHFIPIEKYQFSLYPIFMEGVGKPKIINSFTQDDIEKHQSDAGLYVIVPVIISSSILLLGTLLISHQRMKKLFWEDVPNPKNCSWAQGLNFQKRTDIL

SEQ ID NO: 45373 - protein, 232 aa, Homo sapiens
  Payload ID: 9248
  Gene Symbol: LEPR
  Gene Name: leptin receptor
  ENSP ID: ENSP00000384025
MMPTTVVSLLSTTDLEKGSVCISDQFNSVNFSEAEGTEVTYEDESQRQPFVKYATLISNSKPSETGEEQGLINSSVTKCFSSKNSPLKDSFSNSSWEIEAQAFFILSDQHPNIISPHLTFSEGLDELLKLEGNFPEENNDKKSIYYLGVTSIKKRESGVLLTDKSRVSCPFPAPCLFTDIRVLQDSCSHFVENNINLGTSSKKTFASYMPQFQTCSTQTHKIMENKMCDLTV

SEQ ID NO: 45374 - protein, 896 aa, Homo sapiens; identical to SEQ ID NO: 45372
  Payload ID: 9248
  Gene Symbol: LEPR
  Gene Name: leptin receptor
  Uniprot ID: P48357
  ENSP ID: ENSP00000483390

SEQ ID NO: 45375 - protein, 131 aa, Homo sapiens
  Payload ID: 9249
  Gene Symbol: LEPROT
  Gene Name: leptin receptor overlapping transcript
  Uniprot ID: O15243
  ENSP ID: ENSP00000360104
MAGVKALVALSFSGAIGLTFLMLGCALEDYGVYWPLFVLIFHAISPIPHFIAKRVTYDSDATSSACRELAYFFTTGIVVSAFGFPVILARVAVIKWGACGLVLAGNAVIFLTIQGFFLIFGRGDDFSWEQW

SEQ ID NO: 45376 - protein, 140 aa, Homo sapiens
  Payload ID: 9249
  Gene Symbol: LEPROT
  Gene Name: leptin receptor overlapping transcript
  ENSP ID: ENSP00000483521
MRDGKGFLQGFLYFALVALSFSGAIGLTFLMLGCALEDYGVYWPLFVLIFHAISPIPHFIAKRVTYDSDATSSACRELAYFFTTGIVVSAFGFPVILARVAVIKWGACGLVLAGNAVIFLTIQGFFLIFGRGDDFSWEQW

SEQ ID NO: 45377 - protein, 131 aa, Homo sapiens
  Payload ID: 9250
  Gene Symbol: LEPROTL1
  Gene Name: leptin receptor overlapping transcript-like 1
  Uniprot ID: O95214
  ENSP ID: ENSP00000314625
MAGIKALISLSFGGAIGLMFLMLGCALPIYNKYWPLFVLFFYILSPIPYCIARRLVDDTDAMSNACKELAIFLTTGIVVSAFGLPIVFARAHLIEWGACALVLTGNTVIFATILGFFLVFGSNDDFSWQQW

SEQ ID NO: 45378 - protein, 144 aa, Homo sapiens
  Payload ID: 9250
  Gene Symbol: LEPROTL1
  Gene Name: leptin receptor overlapping transcript-like 1
  ENSP ID: ENSP00000412803
MAGIKALISLSFGGAIGLMFLMLGCALPIYNKYWPLFVLFFYILSPIPYCIARRLVDDTDAMSNACKELAIFLTTGIVVSAFGLPIVFARAHLGPDVCIGDISLLSRALTKLRPKARCVEEGVVQDPVGVVDGAPTLLQQDGNS

SEQ ID NO: 45379 - protein, 154 aa, Homo sapiens
  Payload ID: 9250
  Gene Symbol: LEPROTL1
  Gene Name: leptin receptor overlapping transcript-like 1
  ENSP ID: ENSP00000428196
MKWLAVSEESRRDLDGHTRFAGVCIRERALISLSFGGAIGLMFLMLGCALPIYNKYWPLFVLFFYILSPIPYCIARRLVDDTDAMSNACKELAIFLTTGIVVSAFGLPIVFARAHLIEWGACALVLTGNTVIFATILGFFLVFGSNDDFSWQQW

SEQ ID NO: 45380 - protein, 169 aa, Homo sapiens
  Payload ID: 9250
  Gene Symbol: LEPROTL1
  Gene Name: leptin receptor overlapping transcript-like 1
  Uniprot ID: O95214
  ENSP ID: ENSP00000428281
MAGIKALISLSFGGAIGLMFLMLGCALPIYNKYWPLFVLFFYILSPIPYCIARRLVDDTDAMSNACKELAIFLTTGIVVSAFGLPIVFARAHLMGRLPFFSKMGTAESEGRETLTQQLPLPAAAMRRLLPASRVSTQPVLRLADSAESLLGRPALWALGFLLCPPSQAQ

SEQ ID NO: 45381 - protein, 136 aa, Homo sapiens
  Payload ID: 9250
  Gene Symbol: LEPROTL1
  Gene Name: leptin receptor overlapping transcript-like 1
  ENSP ID: ENSP00000429155
  MOD_RES (1)..(1): Any amino acid
XLMLGCALPIYNKYWPLFVLFFYILSPIPYCIARRLVDDTDAMSNACKELAIFLTTGIVVSAFGLPIVFARAHLMESCSVAQPGVQWRDLTSLQALPPGFTPFSCLSLPSSWDYRCPPPRPADIFCVFSGDEVSPC

SEQ ID NO: 45382 - protein, 106 aa, Homo sapiens
  Payload ID: 9250
  Gene Symbol: LEPROTL1
  Gene Name: leptin receptor overlapping transcript-like 1
  ENSP ID: ENSP00000429398
MAGIKALISLSFGGAIGLMFLMLGCALPIYNKYWPLFVLFFYILSPIPYCIARRLVDDTDAMSNACKELAIFLTTGIVVSAFGLPIVFARAHLCEDCSWSSCMCRK

SEQ ID NO: 45383 - protein, 162 aa, Homo sapiens
  Payload ID: 9250
  Gene Symbol: LEPROTL1
  Gene Name: leptin receptor overlapping transcript-like 1
  ENSP ID: ENSP00000429656
MAGIKALISLSFGGAIGLMFLMLGCALPIYNKYWPLFVLFFYILSPIPYCIARRLVDDTDAMSNACKELAIFLTTGIVVSAFGLPIVFARAHLQKQNTVHHGKDTVVRITEQPERGETPDLHSQHDVGNDQLGVGPGEGSIEQPHRPGSDKLIGKGVNQVVS

SEQ ID NO: 45384 - protein, 70 aa, Homo sapiens
  Payload ID: 9250
  Gene Symbol: LEPROTL1
  Gene Name: leptin receptor overlapping transcript-like 1
  ENSP ID: ENSP00000430702
MSNACKELAIFLTTGIVVSAFGLPIVFARAHLIEWGACALVLTGNTVIFATILGFFLVFGSNDDFSWQQW

SEQ ID NO: 45385 - protein, 1064 aa, Homo sapiens
  Payload ID: 9251
  Gene Symbol: LLGL1
  Gene Name: lethal giant larvae homolog 1 (Drosophila)
  Uniprot ID: Q15334
  ENSP ID: ENSP00000321537
MMKFRFRRQGADPQREKLKQELFAFNKTVEHGFPNQPSALAFDPELRIMAIGTRSGAVKIYGAPGVEFTGLHRDAATVTQMHFLTGQGRLLSLLDDSSLHLWEIVHHNGCAHLEEALSFQLPSRPGFDGASAPLSLTRVTVVLLVAASDIAALGTEGSSVFFLDVTTLTLLEGQTLAPGEVLRSVPDDYRCGKALGPVESLQGHLRDPTKILIGYSRGLLVIWNQASQCVDHIFLGNQQLESLCWGRDSSTVVSSHSDGSYAVWSVDAGSFPTLQPTVATTPYGPFPCKAINKILWRNCESGGHFIIFSGGMPRASYGDRHCVSVLRAETLVTLDFTSRIIDFFTVHSTRPEDEFDDPQALAVLLEEELVVLDLQTPGWPAVPAPYLAPLHSSAITCSAHVASVPAKLWARIVSAGEQQSPQPVSSALSWPITGGRNLAQEPSQRGLLLTGHEDGTVRFWDASGVALRPLYKLSTAGLFQTDCEHADSLAQAAEDDWPPFRKVGCFDPYSDDPRLGVQKVALCKYTAQMVVAGTAGQVLVLELSDVPVEQAVSVAIIDLLQDREGFTWKGHERLSPRTGPLPWPAGFQPRVLVQCLPPAAVTAVTLHTEWSLVAFGTSHGFGLFDYQRKSPVLARCTLHPNDSLAMEGPLSRVKSLKKSLRQSFRRIRKSRVSGKKRAANASSKLQEANAQLAEQACPHDVEMTPVQRRIEPRSADDSLSGVVRCLYFADTFLRDGAHHGPTMWAGTNSGSVFAYALEVPAAAVGGEKRPEQAVEAVLGKEVQLMHRAPVVAIAVLDGRGRPLPEPYEASRDLAQAPDMQGGHAVLIASEEQFKVFTLPKVSAKTKFKLTAHEGCRVRKVALATFASVACEDYAETCLACLTNLGDVHVFSVPGLRPQVHYSCIRKEDISGIASCVFTRHGQGFYLISPSEFERFSLSARNITEPLCSLDINWPRDATQASYRIRESPKLSQANGTPSILLAPQSLDGSPDPAHSMGPDTPEPPEAALSPMSIDSATSADTTLDTTGDVTVEDVKDFLGSSEESEKNLRNLAEDEAHACAILIK

SEQ ID NO: 45386 - protein, 1056 aa, Homo sapiens
  Payload ID: 9251
  Gene Symbol: LLGL1
  Gene Name: lethal giant larvae homolog 1 (Drosophila)
  ENSP ID: ENSP00000480006
MMKFRFRRQGADPQREKLKQELFAFNKTVEHGFPNQPSALAFDPELRIMAIGTRSGAVKIYGAPGVEFTGLHRDAATVTQMHFLTGQGRLLSLLDDSSLHLWEIVHHNGCAHLEEALSFQLPSRPGFDGASAPLSLTRVTVVLLVAASDIAALGTEGSSVFFLDVTTLTLLEGQTLAPGEVLRSVPDDYRCGKALGPVESLQGHLRDPTKILIGYSRGLLVIWNQASQCVDHIFLGNQQLESLCWGRDSSTVVSSHSDGSYAVWSVDAGSFPTLQPTVATTPYGPFPCKAINKILWRNCESGGHFIIFSGGMPRASYGDRHCVSVLRAETLVTLDFTSRIIDFFTVHSTRPEDEFDDPQALAVLLEEELVVLDLQTPGWPAVPAPYLAPLHSSAITCSAHVASVPAKLWARIVSAGEQQSPQPVSSALSWPITGGRNLAQEPSQRGLLLTGHEDGTVRFWDASGVALRPLYKLSTAGLFQTDCEHADSLAQAAEDDWPPFRKVGCFDPYSDDPRLGVQKVALCKYTAQMVVAGTAGQVLVLELSDVPVEQAVSVAIIDLLQDREGFTWKGHERLSPRTGPLPWPAGFQPRVLVQCLPPAAVTAVTLHTEWSLVAFGTSHGFGLLDPVFPRCTLHPNDSLAMEGPLSRVKSLKKSLRQSFRRIRKSRVSGKKRAANASSKLQEANAQLAEQACPHDVEMTPVQRRIEPRSADDSLSGVVRCLYFADTFLRDGAHHGPTMWAGTNSGSVFAYALEVPAAAVGGEKRPEQAVEAVLGKEVQLMHRAPVVAIAVLDGRGRPLPEPYEASRDLAQAPDMQGGHAVLIASEEQFKVFTLPKVSAKTKFKLTAHEGCRVRKVALATFASVACEDYAETCLACLTNLGDVHVFSVPGLRPQVHYSCIRKEDISGIASCVFTRHGQGFYLISPSEFERFSLSARNITEPLCSLDINWPRDATQASYRIRESPKLSQANGTPSILLAPQSLDGSPDPAHSMGPDTPEPPEAALSPMSIDSATSADTTLDTTGDVTVEDVKDFLGSSEESEKNLRNLAEDEAHACAI

SEQ ID NO: 45387 - protein, 1015 aa, Homo sapiens
  Payload ID: 9252
  Gene Symbol: LLGL2
  Gene Name: lethal giant larvae homolog 2 (Drosophila)
  Uniprot ID: Q6P1M3
  ENSP ID: ENSP00000167462
MRRFLRPGHDPVRERLKRDLFQFNKTVEHGFPHQPSALGYSPSLRILAIGTRSGAIKLYGAPGVEFMGLHQENNAVTQIHLLPGQCQLVTLLDDNSLHLWSLKVKGGASELQEDESFTLRGPPGAAPSATQITVVLPHSSCELLYLGTESGNVFVVQLPAFRALEDRTISSDAVLQRLPEEARHRRVFEMVEALQEHPRDPNQILIGYSRGLVVIWDLQGSRVLYHFLSSQQLENIWWQRDGRLLVSCHSDGSYCQWPVSSEAQQPEPLRSLVPYGPFPCKAITRILWLTTRQGLPFTIFQGGMPRASYGDRHCISVIHDGQQTAFDFTSRVIGFTVLTEADPAATFDDPYALVVLAEEELVVIDLQTAGWPPVQLPYLASLHCSAITCSHHVSNIPLKLWERIIAAGSRQNAHFSTMEWPIDGGTSLTPAPPQRDLLLTGHEDGTVRFWDASGVCLRLLYKLSTVRVFLTDTDPNENFSAQGEDEWPPLRKVGSFDPYSDDPRLGIQKIFLCKYSGYLAVAGTAGQVLVLELNDEAAEQAVEQVEADLLQDQEGYRWKGHERLAARSGPVRFEPGFQPFVLVQCQPPAVVTSLALHSEWRLVAFGTSHGFGLFDHQQRRQVFVKCTLHPSDQLALEGPLSRVKSLKKSLRQSFRRMRRSRVSSRKRHPAGPPGEAQEGSAKAERPGLQNMELAPVQRKIEARSAEDSFTGFVRTLYFADTYLKDSSRHCPSLWAGTNGGTIYAFSLRVPPAERRMDEPVRAEQAKEIQLMHRAPVVGILVLDGHSVPLPEPLEVAHDLSKSPDMQGSHQLLVVSEEQFKVFTLPKVSAKLKLKLTALEGSRVRRVSVAHFGSRRAEDYGEHHLAVLTNLGDIQVVSLPLLKPQVRYSCIRREDVSGIASCVFTKYGQGFYLISPSEFERFSLSTKWLVEPRCLVDSAETKNHRPGNGAGPKKAPSRARNSGTQSDGEEKQPGLVMERALLSDERAATGVHIEPPWGAASAMAEQSEWLSVQAAR

SEQ ID NO: 45388 - protein, 356 aa, Homo sapiens
  Payload ID: 9252
  Gene Symbol: LLGL2
  Gene Name: lethal giant larvae homolog 2 (Drosophila)
  Uniprot ID: Q6P1M3
  ENSP ID: ENSP00000364375
MRRFLRPGHDPVRERLKRDLFQFNKTVEHGFPHQPSALGYSPSLRILAIGTRSGAIKLYGAPGVEFMGLHQENNAVTQIHLLPGQCQLVTLLDDNSLHLWSLKVKGGASELQEDESFTLRGPPGAAPSATQITVVLPHSSCELLYLGTESGNVFVVQLPAFRALEDRTISSDAVLQRLPEEARHRRVFEMVEALQEHPRDPNQILIGYSRGLVVIWDLQGSRVLYHFLSSQQLENIWWQRDGRLLVSCHSDGSYCQWPVSSEAQQPEPLRSLVPYGPFPCKAITRILWLTTRQGLPFTIFQGGMPRASYGDRHCISVIHDGQQTAFDFTSRVIGFTVLTEADPAASRRASGVGAQG

SEQ ID NO: 45389 - protein, 1020 aa, Homo sapiens
  Payload ID: 9252
  Gene Symbol: LLGL2
  Gene Name: lethal giant larvae homolog 2 (Drosophila)
  Uniprot ID: Q6P1M3
  ENSP ID: ENSP00000376333
MRRFLRPGHDPVRERLKRDLFQFNKTVEHGFPHQPSALGYSPSLRILAIGTRSGAIKLYGAPGVEFMGLHQENNAVTQIHLLPGQCQLVTLLDDNSLHLWSLKVKGGASELQEDESFTLRGPPGAAPSATQITVVLPHSSCELLYLGTESGNVFVVQLPAFRALEDRTISSDAVLQRLPEEARHRRVFEMVEALQEHPRDPNQILIGYSRGLVVIWDLQGSRVLYHFLSSQQLENIWWQRDGRLLVSCHSDGSYCQWPVSSEAQQPEPLRSLVPYGPFPCKAITRILWLTTRQGLPFTIFQGGMPRASYGDRHCISVIHDGQQTAFDFTSRVIGFTVLTEADPAATFDDPYALVVLAEEELVVIDLQTAGWPPVQLPYLASLHCSAITCSHHVSNIPLKLWERIIAAGSRQNAHFSTMEWPIDGGTSLTPAPPQRDLLLTGHEDGTVRFWDASGVCLRLLYKLSTVRVFLTDTDPNENFSAQGEDEWPPLRKVGSFDPYSDDPRLGIQKIFLCKYSGYLAVAGTAGQVLVLELNDEAAEQAVEQVEADLLQDQEGYRWKGHERLAARSGPVRFEPGFQPFVLVQCQPPAVVTSLALHSEWRLVAFGTSHGFGLFDHQQRRQVFVKCTLHPSDQLALEGPLSRVKSLKKSLRQSFRRMRRSRVSSRKRHPAGPPGEAQEGSAKAERPGLQNMELAPVQRKIEARSAEDSFTGFVRTLYFADTYLKDSSRHCPSLWAGTNGGTIYAFSLRVPPAERRMDEPVRAEQAKEIQLMHRAPVVGILVLDGHSVPLPEPLEVAHDLSKSPDMQGSHQLLVVSEEQFKVFTLPKVSAKLKLKLTALEGSRVRRVSVAHFGSRRAEDYGEHHLAVLTNLGDIQVVSLPLLKPQVRYSCIRREDVSGIASCVFTKYGQGFYLISPSEFERFSLSTKWLVEPRCLVDSAETKNHRPGNGAGPKKAPSRARNSGTQSDGEEKQPGLVMERALLSDERVLKEIQSTLEGDRGSGNWRSHRAAVGCSLSNGGAE

SEQ ID NO: 45390 - protein, 39 aa, Homo sapiens
  Payload ID: 9252
  Gene Symbol: LLGL2
  Gene Name: lethal giant larvae homolog 2 (Drosophila)
  ENSP ID: ENSP00000461953
MRRFLRPGHDPVRERLKRDLFQFNKTVEHGFPHQPSALG

SEQ ID NO: 45391 - protein, 62 aa, Homo sapiens
  Payload ID: 9252
  Gene Symbol: LLGL2
  Gene Name: lethal giant larvae homolog 2 (Drosophila)
  ENSP ID: ENSP00000462439
LVDSAETKNHRPGNGAGPKKAPSRARNSGTQSDGEALGPGLPHPDLSKERESQAEEGPGGAP

SEQ ID NO: 45392 - protein, 105 aa, Homo sapiens
  Payload ID: 9252
  Gene Symbol: LLGL2
  Gene Name: lethal giant larvae homolog 2 (Drosophila)
  ENSP ID: ENSP00000463150
  MOD_RES (1)..(1): Any amino acid
XRDLLLTGWVLPTGTRTARCGSGMPRVSACGCSTNSALCACSSPTRTPTRTSVPRARTSGPHSARWAPLTPTVMTPGWASRRSSSASTAATWLWQARQGRCWYWN

SEQ ID NO: 45393 - protein, 139 aa, Homo sapiens
  Payload ID: 9252
  Gene Symbol: LLGL2
  Gene Name: lethal giant larvae homolog 2 (Drosophila)
  ENSP ID: ENSP00000463390
MRRFLRPGHDPVRERLKRDLFQFNKTVEHGFPHQPSALGYSPSLRILAIGTRSGAIKLYGAPGVEFMGLHQENNAVTQIHLLPGQCQLVTLLDDNSLHLWSLKVKGGASELQEDESFTLRGPPGAAPSATQITVVLPHS

SEQ ID NO: 45394 - protein, 86 aa, Homo sapiens
  Payload ID: 9252
  Gene Symbol: LLGL2
  Gene Name: lethal giant larvae homolog 2 (Drosophila)
  ENSP ID: ENSP00000463501
  MOD_RES (1)..(1): Any amino acid
XTRILWLTTRQGLPFTIFQGGMPRASYGDRHCISVIHDGQQTAFDFTSRVIGFTVLTEADPAATVGADHCRRQPAERTLLHHGVAN

SEQ ID NO: 45395 - protein, 103 aa, Homo sapiens
  Payload ID: 9252
  Gene Symbol: LLGL2
  Gene Name: lethal giant larvae homolog 2 (Drosophila)
  ENSP ID: ENSP00000463721
MRRFLRPGHDPVRERLKRDLFQFNKTVEHGFPHQPSALGYSPSLRILAIGTRSGAIKLYGAPGVEFMGLHQENNAVTQIHLLPGQCQLVTLLDDNSLHLWSLK

SEQ ID NO: 45396 - protein, 1019 aa, Homo sapiens
  Payload ID: 9252
  Gene Symbol: LLGL2
  Gene Name: lethal giant larvae homolog 2 (Drosophila)
  ENSP ID: ENSP00000464397
MRRFLRPGHDPVRERLKRDLFQFNKTVEHGFPHQPSALGYSPSLRILAIGTRSGAIKLYGAPGVEFMGLHQENNAVTQIHLLPGQCQLVTLLDDNSLHLWSLKVKGGASELQEDESFTLRGPPGAAPSATQITVVLPHSSCELLYLGTESGNVFVVQLPAFRALEDRTISSDAVLQRLPEEARHRRVFEMVEALQEHPRDPNQILIGYSRGLVVIWDLQGSRVLYHFLSSQQLENIWWQRDGRLLVSCHSDGSYCQWPVSSEAQQPEPLRSLVPYGPFPCKAITRILWLTTRQGLPFTIFQGGMPRASYGDRHCISVIHDGQQTAFDFTSRVIGFTVLTEADPAATFDDPYALVVLAEEELVVIDLQTAGWPPVQLPYLASLHCSAITCSHHVSNIPLKLWERIIAAGSRQNAHFSTMEWPIDGGTSLTPAPPQRDLLLTGHEDGTVRFWDASGVCLRLLYKLSTVRVFLTDTDPNENFSAQGEDEWPPLRKVGSFDPYSDDPRLGIQKIFLCKYSGYLAVAGTAGQVLVLELNDEAAEQAVEQVEADLLQDQEGYRWKGHERLAARSGPVRFEPGFQPFVLVQCQPPAVVTSLALHSEWRLVAFGTSHGFGLFDHQQRRQVFVKCTLHPSDQLALEGPLSRVKSLKKSLRQSFRRMRRSRVSSRKRHPAGPPGEAQEGSAKAERPGLQNMELAPVQRKIEARSAEDSFTGFVRTLYFADTYLKDSSRHCPSLWAGTNGGTIYAFSLRVPPAERRMDEPVRAEQAKEIQLMHRAPVVGILVLDGHSVPLPEPLEVAHDLSKSPDMQGSHQLLVVSEEQFKVFTLPKVSAKLKLKLTALEGSRVRRVSVAHFGSRRAEDYGEHHLAVLTNLGDIQVVSLPLLKPQVRYSCIRREDVSGIASCVFTKYGQGFYLISPSEFERFSLSTKWLVEPRCLVDSAETKNHRPGNGAGPKKAPSRARNSGTQSDGEEKQPGLVMERALLSDERVLKEIQSTLEGDRGSGNWRSHRAAVGCSLSNGGE

SEQ ID NO: 45397 - protein, 105 aa, Homo sapiens
  Payload ID: 9252
  Gene Symbol: LLGL2
  Gene Name: lethal giant larvae homolog 2 (Drosophila)
  ENSP ID: ENSP00000464451
MRRFLRPGHDPVRERLKRDLFQFNKTVEHGFPHQPSALGYSPSLRILAIGTRSGAIKLYGAPGVEFMGLHQENNAVTQIHLLPGQCQLVTLLDDNSLHLWSLKVK

SEQ ID NO: 45398 - protein, 156 aa, Homo sapiens
  Payload ID: 9252
  Gene Symbol: LLGL2
  Gene Name: lethal giant larvae homolog 2 (Drosophila)
  ENSP ID: ENSP00000464483
MYFDRFDLDTIATTVLSIFGEAACPETVEHGFPHQPSALGYSPSLRILAIGTRSGAIKLYGAPGVEFMGLHQENNAVTQIHLLPGQCQLVTLLDDNSLHLWSLKVKGGASELQEDESFTLRGPPGAAPSATQITVVLPHSSCELLYLGTESGNVFV

SEQ ID NO: 45399 - protein, 150 aa, Homo sapiens
  Payload ID: 9252
  Gene Symbol: LLGL2
  Gene Name: lethal giant larvae homolog 2 (Drosophila)
  ENSP ID: ENSP00000464598
MRRFLRPGHDPVRERLKRDLFQFNKTVEHGFPHQPSALGYSPSLRILAIGTRSGAIKLYGAPGVEFMGLHQENNAVTQIHLLPGQCQLVTLLDDNSLHLWSLKVKGGASELQEDESFTLRGPPGAAPSATQITVVLPHSSCELLYLGTES

SEQ ID NO: 45400 - protein, 356 aa, Homo sapiens; identical to SEQ ID NO: 45388
  Payload ID: 9252
  Gene Symbol: LLGL2
  Gene Name: lethal giant larvae homolog 2 (Drosophila)
  Uniprot ID: Q6P1M3
  ENSP ID: ENSP00000464603

SEQ ID NO: 45401 - protein, 360 aa, Homo sapiens
  Payload ID: 9253
  Gene Symbol: LETMD1
  Gene Name: LETM1 domain containing 1
  Uniprot ID: Q6P1Q0
  ENSP ID: ENSP00000262055
MALSRVCWARSAVWGSAVTPGHFVTRRLQLGRSGLAWGAPRSSKLHLSPKADVKNLMSYVVTKTKAINGKYHRFLGRHFPRFYVLYTIFMKGLQMLWADAKKARRIKTNMWKHNIKFHQLPYREMEHLRQFRQDVTKCLFLGIISIPPFANYLVFLLMYLFPRQLLIRHFWTPKQQTDFLDIYHAFRKQSHPEIISYLEKVIPLISDAGLRWRLTDLCTKIQRGTHPAIHDILALRECFSNHPLGMNQLQALHVKALSRAMLLTSYLPPPLLRHRLKTHTTVIHQLDKALAKLGIGQLTAQEVKSACYLRGLNSTHIGEDRCRTWLGEWLQISCSLKEAELSLLLHNVVLLSTNYLGTRR

SEQ ID NO: 45402 - protein, 147 aa, Homo sapiens
  Payload ID: 9253
  Gene Symbol: LETMD1
  Gene Name: LETM1 domain containing 1
  ENSP ID: ENSP00000369478
MALSRVCWARSAVWGSAVTPGHFVTRRLQLGRSGLAWGAPRSSKLHLSPKADVKNLMSYVVTKTKAINGKYHRFLGRHFPRFYVLYTIFMKESLEPGHASHILPASSLVETSFEDSYNCDSPTGQGFGKAGDWPADCSGSKIGPFLF

SEQ ID NO: 45403 - protein, 373 aa, Homo sapiens
  Payload ID: 9253
  Gene Symbol: LETMD1
  Gene Name: LETM1 domain containing 1
  Uniprot ID: Q6P1Q0
  ENSP ID: ENSP00000389903
MALSRVCWARSAVWGSAVTPGHFVTRRLQLGRSGLAWGAPRSSKLHLSPKADVKNLMSYVVTKTKAINGKYHRFLGRHFPRFYVLYTIFMKGLQMLWADAKKARRIKTNMWKHNIKFHQLPYREMEHLRQVWARGRYPEVHGEFRQDVTKCLFLGIISIPPFANYLVFLLMYLFPRQLLIRHFWTPKQQTDFLDIYHAFRKQSHPEIISYLEKVIPLISDAGLRWRLTDLCTKIQRGTHPAIHDILALRECFSNHPLGMNQLQALHVKALSRAMLLTSYLPPPLLRHRLKTHTTVIHQLDKALAKLGIGQLTAQEVKSACYLRGLNSTHIGEDRCRTWLGEWLQISCSLKEAELSLLLHNVVLLSTNYLGTRR

SEQ ID NO: 45404 - protein, 110 aa, Homo sapiens
  Payload ID: 9253
  Gene Symbol: LETMD1
  Gene Name: LETM1 domain containing 1
  ENSP ID: ENSP00000446551
  MOD_RES (1)..(1): Any amino acid
XMSYVVTKTKAINGKYHRFLGRHFPRFYVLYTIFMKESLEPGHASHILPASSLVETSFEDSYNCDSPTGQGFGKAGDWPADCSGSKIEAELSLLLHNVVLLSTNYLGTRR

SEQ ID NO: 45405 - protein, 290 aa, Homo sapiens
  Payload ID: 9253
  Gene Symbol: LETMD1
  Gene Name: LETM1 domain containing 1
  ENSP ID: ENSP00000446862
MRLRTNATSSKLHLSPKADVKNLMSYVVTKTKAINGKYHRFLGRHFPRFYVLYTIFMKGLQMLWADAKKARRIKTNMWKHNIKFHQLPYREMEHLRQFRQDVTKCLFLGIISIPPFANYLVFLLMYLFPRQLLIRHFWTPKQQTDFLDIYHAFRKQSHPEIISYLEKVIPLISDAGLRWRLTDLCTKIQRGTHPAIHDILALRECFSNHPLGMNQLQALHVKALSRAMLLTSYLPPPLLRHRLKTHTTVIHQLDKALAKLGIGQLTAQEVKSACYLRGLNSTHIGEDRCR

SEQ ID NO: 45406 - protein, 98 aa, Homo sapiens
  Payload ID: 9253
  Gene Symbol: LETMD1
  Gene Name: LETM1 domain containing 1
  ENSP ID: ENSP00000446967
  MOD_RES (1)..(1): Any amino acid
XLALRECFSNHPLGMNQLQALHVKALSRAMLLTSYLPPPLLRHRLKTHTTVIHQLDKALAKLGIGQLTAQEVKSKLSCLSCCTTWSCSPPTTLGQGAE

SEQ ID NO: 45407 - protein, 155 aa, Homo sapiens
  Payload ID: 9253
  Gene Symbol: LETMD1
  Gene Name: LETM1 domain containing 1
  Uniprot ID: Q6P1Q0
  ENSP ID: ENSP00000447047
MALSRVCWARSAVWGSAVTPGHFVTRRLQLGRSGLAWGAPRSSKLHLSPKADVKNLMSYVVTKTKAINGKYHRFLGRHFPRFYVLYTIFMKESLEPGHASHILPASSLVETSFEDSYNCDSPTGQGFGKAGDWPADCSGSKIGLLSPWPEFYAYW

SEQ ID NO: 45408 - protein, 184 aa, Homo sapiens
  Payload ID: 9253
  Gene Symbol: LETMD1
  Gene Name: LETM1 domain containing 1
  ENSP ID: ENSP00000447166
MALSRVCWARSAVWGSAVTPGHFVTRRLQLGRSGLAWGAPRSSKLHLSPKADVKNLMSYVVTKTKAINGKYHRFLGRHFPRFYVLYTIFMKGLRWRLTDLCTKIQRGTHPAIHDILALRECFSNHPLGMNQLQALHVKALSRAMLLTSYLPPPLLRHRLKTHTTVIHQLDKALAKLGIGQLTAQ

SEQ ID NO: 45409 - protein, 236 aa, Homo sapiens
  Payload ID: 9253
  Gene Symbol: LETMD1
  Gene Name: LETM1 domain containing 1
  ENSP ID: ENSP00000447419
MALSRVCWARSAVWGSAVTPGHFVTRRLQLGRSGLAWGAPRSSKLHLSPKADVKNLMSYVVTKTKAINGKYHRFLGRHFPRFYVLYTIFMKGLQMLWADAKKARRIKTNMWKHNIKFHQLPYREMEHLRQKALSRAMLLTSYLPPPLLRHRLKTHTTVIHQLDKALAKLGIGQLTAQEVKSACYLRGLNSTHIGEDRCRTWLGEWLQISCSLKEAELSLLLHNVVLLSTNYLGTRR

SEQ ID NO: 45410 - protein, 43 aa, Homo sapiens
  Payload ID: 9253
  Gene Symbol: LETMD1
  Gene Name: LETM1 domain containing 1
  ENSP ID: ENSP00000447420
MALSRVCWARSAVWGSAVTPGHFVTRRLQLGRSGLAWGAPRKP

SEQ ID NO: 45411 - protein, 144 aa, Homo sapiens
  Payload ID: 9253
  Gene Symbol: LETMD1
  Gene Name: LETM1 domain containing 1
  ENSP ID: ENSP00000448110
MALSRVCWARSAVWGSAVTPGHFVTRRLQLGRSGLAWGAPRSSKLHLSPKADVKNLMSYVVTKTKAINGKYHRFLGRHFPRFYVLYTIFMKGLQMLWADAKKARRIKTNMWKHNIKFHQLPYREMEHLRQKALSRAMLLTSYLP

SEQ ID NO: 45412 - protein, 158 aa, Homo sapiens
  Payload ID: 9253
  Gene Symbol: LETMD1
  Gene Name: LETM1 domain containing 1
  ENSP ID: ENSP00000448222
MSYVVTKTKAINGKYHRFLGRHFPRFYVLYTIFMKVPPRRHQVSFPRYYFHSTFCQLPGLLANRGTHPAIHDILALRECFSNHPLGMNQLQALHVKALSRAMLLTSYLPPPLLRHRLKTHTTVIHQLDKALAKLGIGQLTAQEVKSACYLRGLNSTHI

SEQ ID NO: 45413 - protein, 138 aa, Homo sapiens
  Payload ID: 9253
  Gene Symbol: LETMD1
  Gene Name: LETM1 domain containing 1
  ENSP ID: ENSP00000448442
MALSRVCWARSAVWGSAVTPGHFVTRRLQLGRSGLAWGAPRSSKLHLSPKADVKNLMSYVVTKTKAINGKYHRFLGRHFPRFYVLYTIFMKVPPRRHQVSFPRYYFHSTFCQLPGLLANVPVSQATTDQAFLDPKTTN

SEQ ID NO: 45414 - protein, 99 aa, Homo sapiens
  Payload ID: 9253
  Gene Symbol: LETMD1
  Gene Name: LETM1 domain containing 1
  ENSP ID: ENSP00000448800
MALSRVCWARSAVWGSAVTPGHFVTRRLQLGRSGLAWGAPRSSKLHLSPKADVKNLMSYVVTKTKAINGKYHRFLGRHFPRFYVLYTIFMKGRIADVMG

SEQ ID NO: 45415 - protein, 43 aa, Homo sapiens
  Payload ID: 9253
  Gene Symbol: LETMD1
  Gene Name: LETM1 domain containing 1
  ENSP ID: ENSP00000449681
MSYVVTKTKAINGKYHRFLGRHFPRFYVLYTIFMKGRIADVMG

SEQ ID NO: 45416 - protein, 260 aa, Homo sapiens
  Payload ID: 9253
  Gene Symbol: LETMD1
  Gene Name: LETM1 domain containing 1
  ENSP ID: ENSP00000449896
MALSRVCWARSAVWGSAVTPGHFVTRRLQLGRSGLAWGAPRSSKLHLSPKADVKNLMSYVVTKTKAINGKYHRFLGRHFPRFYVLYTIFMKGIISIPPFANYLVFLLMYLFPRQLLIRHFWTPKQQTDFLDIYHAFRKQSHPEIISYLEKVIPLISDAGLRWRLTDLCTKIQRGTHPAIHDILALRECFSNHPLGMNQLQALHVKALSRAMLLTSYLPPPLLRHRLKTHTTVIHQLDKALAKLGIGQLTAQEVKSACYLR

SEQ ID NO: 45417 - protein, 135 aa, Homo sapiens
  Payload ID: 9253
  Gene Symbol: LETMD1
  Gene Name: LETM1 domain containing 1
  ENSP ID: ENSP00000450082
MALSRVCWARSAVWGSAVTPGHFVTRRLQLGRSGLAWGAPRLFDLPCRSSKLHLSPKADVKNLMSYVVTKTKAINGKYHRFLGRHFPRFYVLYTIFMKGLQMLWADAKKARRIKTNMWKHNIKFHQLPYREMEHL

SEQ ID NO: 45418 - protein, 304 aa, Homo sapiens
  Payload ID: 9253
  Gene Symbol: LETMD1
  Gene Name: LETM1 domain containing 1
  Uniprot ID: Q6P1Q0
  ENSP ID: ENSP00000450163
MSYVVTKTKAINGKYHRFLGRHFPRFYVLYTIFMKGLQMLWADAKKARRIKTNMWKHNIKFHQLPYREMEHLRQFRQDVTKCLFLGIISIPPFANYLVFLLMYLFPRQLLIRHFWTPKQQTDFLDIYHAFRKQSHPEIISYLEKVIPLISDAGLRWRLTDLCTKIQRGTHPAIHDILALRECFSNHPLGMNQLQALHVKALSRAMLLTSYLPPPLLRHRLKTHTTVIHQLDKALAKLGIGQLTAQEVKSACYLRGLNSTHIGEDRCRTWLGEWLQISCSLKEAELSLLLHNVVLLSTNYLGTRR

SEQ ID NO: 45419 - protein, 144 aa, Homo sapiens
  Payload ID: 9253
  Gene Symbol: LETMD1
  Gene Name: LETM1 domain containing 1
  ENSP ID: ENSP00000450251
  MOD_RES (1)..(1): Any amino acid
XHAFRKQSHPEIISYLEKVIPLISDAGLRWRLTDLCTKKALSRAMLLTSYLPPPLLRHRLKTHTTVIHQLDKALAKLGIGQLTAQEVKSACYLRGLNSTHIGEDRCRTWLGEWLQISCSLKEAELSLLLHNVVLLSTNYLGTRR

SEQ ID NO: 45420 - protein, 179 aa, Homo sapiens
  Payload ID: 9253
  Gene Symbol: LETMD1
  Gene Name: LETM1 domain containing 1
  ENSP ID: ENSP00000450275
MALSRVCWARSAVWGSAVTPGHFVTRRLQLGRSGLAWGAPRSSKLHLSPKADVKNLMSYVVTKTKAINGKYHRFLGRHFPRFYVLYTIFMKVPPRRHQVSFPRYYFHSTFCQLPGLLANIQRGTHPAIHDILALRECFSNHPLGMNQLQALHVKALSRAMLLTSYLPPPLLRHRLKTHT

SEQ ID NO: 45421 - protein, 243 aa, Homo sapiens
  Payload ID: 9253
  Gene Symbol: LETMD1
  Gene Name: LETM1 domain containing 1
  ENSP ID: ENSP00000450333
MALSRVCWARSAVWGSAVTPGHFVTRRLQLGRSGLAWGAPRYLFPRQLLIRHFWTPKQQTDFLDIYHAFRKQSHPEIISYLEKVIPLISDAGLRWRLTDLCTKIQRGTHPAIHDILALRECFSNHPLGMNQLQALHVKALSRAMLLTSYLPPPLLRHRLKTHTTVIHQLDKALAKLGIGQLTAQEVKSACYLRGLNSTHIGEDRCRTWLGEWLQISCSLKEAELSLLLHNVVLLSTNYLGTRR

SEQ ID NO: 45422 - protein, 41 aa, Homo sapiens
  Payload ID: 9253
  Gene Symbol: LETMD1
  Gene Name: LETM1 domain containing 1
  ENSP ID: ENSP00000450390
MALSRVCWARSAVWGSAVTPGHFVTRRLQLGRSGLAWGAPR

SEQ ID NO: 45423 - protein, 109 aa, Homo sapiens
  Payload ID: 9253
  Gene Symbol: LETMD1
  Gene Name: LETM1 domain containing 1
  ENSP ID: ENSP00000450391
MNQLQALHVKALSRAMLLTSYLPPPLLRHRLKTHTTVIHQLDKALAKLGIGQLTAQEVKSACYLRGLNSTHIGEDRCRTWLGEWLQISCSLKEAELSLLLHNVVLLSTN

SEQ ID NO: 45424 - protein, 519 aa, Homo sapiens
  Payload ID: 9254
  Gene Symbol: LAP3
  Gene Name: leucine aminopeptidase 3
  Uniprot ID: P28838
  ENSP ID: ENSP00000226299
MFLLPLPAAGRVVVRRLAVRRFGSRSLSTADMTKGLVLGIYSKEKEDDVPQFTSAGENFDKLLAGKLRETLNISGPPLKAGKTRTFYGLHQDFPSVVLVGLGKKAAGIDEQENWHEGKENIRAAVAAGCRQIQDLELSSVEVDPCGDAQAAAEGAVLGLYEYDDLKQKKKMAVSAKLYGSGDQEAWQKGVLFASGQNLARQLMETPANEMTPTRFAEIIEKNLKSASSKTEVHIRPKSWIEEQAMGSFLSVAKGSDEPPVFLEIHYKGSPNANEPPLVFVGKGITFDSGGISIKASANMDLMRADMGGAATICSAIVSAAKLNLPINIIGLAPLCENMPSGKANKPGDVVRAKNGKTIQVDNTDAEGRLILADALCYAHTFNPKVILNAATLTGAMDVALGSGATGVFTNSSWLWNKLFEASIETGDRVWRMPLFEHYTRQVVDCQLADVNNIGKYRSAGACTAAAFLKEFVTHPKWAHLDIAGVMTNKDEVPYLRKGMTGRPTRTLIEFLLRFSQDNA

SEQ ID NO: 45425 - protein, 119 aa, Homo sapiens
  Payload ID: 9254
  Gene Symbol: LAP3
  Gene Name: leucine aminopeptidase 3
  ENSP ID: ENSP00000423350
  MOD_RES (1)..(1): Any amino acid
XVVVRRLAVRRFGSRSLSTADMTKGLVLGIYSKEKEDDVPQFTSAGENFDKLLAGKLRETLNISGPPLKAGKTRTFYGLHQRGAGRFKTWSSRLWRWIPVETLRLLRRERCLVSMNTMT

SEQ ID NO: 45426 - protein, 208 aa, Homo sapiens
  Payload ID: 9254
  Gene Symbol: LAP3
  Gene Name: leucine aminopeptidase 3
  ENSP ID: ENSP00000424724
QKKKMAVSAKLYGSGDQEAWQKGVLFASGQNLARQLMETPANEMTPTRFAEIIEKNLKSASSKTEVHIRPKSWIEEQAMGSFLSVAKGSDEPPVFLEIHYKGSPNANEPPLVFVGKGITFDSGGISIKASANMDLMRADMGGAATICSAIVSAAKLNLPINIIGAMDVALGSGATGVFTNSSWLWNKLFEASIETGDRVWRMPLFEHY

SEQ ID NO: 45427 - protein, 488 aa, Homo sapiens
  Payload ID: 9254
  Gene Symbol: LAP3
  Gene Name: leucine aminopeptidase 3
  Uniprot ID: P28838
  ENSP ID: ENSP00000476028
MTKGLVLGIYSKEKEDDVPQFTSAGENFDKLLAGKLRETLNISGPPLKAGKTRTFYGLHQDFPSVVLVGLGKKAAGIDEQENWHEGKENIRAAVAAGCRQIQDLELSSVEVDPCGDAQAAAEGAVLGLYEYDDLKQKKKMAVSAKLYGSGDQEAWQKGVLFASGQNLARQLMETPANEMTPTRFAEIIEKNLKSASSKTEVHIRPKSWIEEQAMGSFLSVAKGSDEPPVFLEIHYKGSPNANEPPLVFVGKGITFDSGGISIKASANMDLMRADMGGAATICSAIVSAAKLNLPINIIGLAPLCENMPSGKANKPGDVVRAKNGKTIQVDNTDAEGRLILADALCYAHTFNPKVILNAATLTGAMDVALGSGATGVFTNSSWLWNKLFEASIETGDRVWRMPLFEHYTRQVVDCQLADVNNIGKYRSAGACTAAAFLKEFVTHPKWAHLDIAGVMTNKDEVPYLRKGMTGRPTRTLIEFLLRFSQDNA

SEQ ID NO: 45428 - protein, 519 aa, Homo sapiens; identical to SEQ ID NO: 45424
  Payload ID: 9254
  Gene Symbol: LAP3
  Gene Name: leucine aminopeptidase 3
  Uniprot ID: P28838
  ENSP ID: ENSP00000481000

SEQ ID NO: 45429 - protein, 101 aa, Homo sapiens
  Payload ID: 9255
  Gene Symbol: LCMT1
  Gene Name: leucine carboxyl methyltransferase 1
  ENSP ID: ENSP00000370349
MATRQRESSITSCCSTSSCDADDEGVRGTCEDASLCKRTAISSARQHSPPHCPTLGGKSFHLGHSDRLDSEVLLPRAHGNLLQSPGFAEWEEVCSKHWLLA

SEQ ID NO: 45430 - protein, 279 aa, Homo sapiens
  Payload ID: 9255
  Gene Symbol: LCMT1
  Gene Name: leucine carboxyl methyltransferase 1
  Uniprot ID: Q9UIC8
  ENSP ID: ENSP00000370353
MATRQRESSITSCCSTSSCDADDEGVRGTCEDASLCKRFAVSIGYWHDPYIQHFVRLSKERKAPEINRGYFARVHGVSQLIKAFLRKTECHCQIVNLGAGMDTTFWRLKDEDLLPSKYFEVDFPMIVTRKLHSIKLPTLLIAECVLVYMTPEQSANLLKWAANSFERAMFINYEQVNMGDRFGQIMIENLRRRQCDLAGVETCKSLESQKERLLSNGWETASAVDMMELYNRLPRAEVSRIESLEFLDEMELLEQLMRHYCLCWATKGGNELGLKEITY

SEQ ID NO: 45431 - protein, 334 aa, Homo sapiens
  Payload ID: 9255
  Gene Symbol: LCMT1
  Gene Name: leucine carboxyl methyltransferase 1
  Uniprot ID: Q9UIC8
  ENSP ID: ENSP00000382021
MATRQRESSITSCCSTSSCDADDEGVRGTCEDASLCKRFAVSIGYWHDPYIQHFVRLSKERKAPEINRGYFARVHGVSQLIKAFLRKTECHCQIVNLGAGMDTTFWRLKDEDLLPSKYFEVDFPMIVTRKLHSIKCKPPLSSPILELHSEDTLQMDGHILDSKRYAVIGADLRDLSELEEKLKKCNMNTQLPTLLIAECVLVYMTPEQSANLLKWAANSFERAMFINYEQVNMGDRFGQIMIENLRRRQCDLAGVETCKSLESQKERLLSNGWETASAVDMMELYNRLPRAEVSRIESLEFLDEMELLEQLMRHYCLCWATKGGNELGLKEITY

SEQ ID NO: 45432 - protein, 111 aa, Homo sapiens
  Payload ID: 9255
  Gene Symbol: LCMT1
  Gene Name: leucine carboxyl methyltransferase 1
  ENSP ID: ENSP00000457741
MATRQRESSITSCCSTSSCDADDEGVRGTCEDASLCKRFAVSIGYWHDPYIQHFVRLSKERKAPEINRGKIFCSSPWCQSAYKGISTEDRMSLSNCQPWGRHGYHLLEIKG

SEQ ID NO: 45433 - protein, 93 aa, Homo sapiens
  Payload ID: 9255
  Gene Symbol: LCMT1
  Gene Name: leucine carboxyl methyltransferase 1
  ENSP ID: ENSP00000459604
  MOD_RES (1)..(1): Any amino acid
XLPTLLIAECVLVYMTPEQSANLLKWAANSFERAMFINYEQVNMGDRFGQIMIENLRRRQCDLAGVETCKSLESQVREQGLGYPFGPLVNQDI

SEQ ID NO: 45434 - protein, 119 aa, Homo sapiens
  Payload ID: 9255
  Gene Symbol: LCMT1
  Gene Name: leucine carboxyl methyltransferase 1
  ENSP ID: ENSP00000459851
SSCDADDEGVRGTCEDASLCKRFAVSIGYWHDPYIQHFVRLSKERKAPEINRGYFARVHGVSQLIKAFLRKTECHCQIVNLGAGMDTTFWRLKDEDLLPSKYFEVDFPMIVTRKLHSIK

SEQ ID NO: 45435 - protein, 158 aa, Homo sapiens
  Payload ID: 9255
  Gene Symbol: LCMT1
  Gene Name: leucine carboxyl methyltransferase 1
  ENSP ID: ENSP00000461100
  MOD_RES (1)..(1): Any amino acid
XDLLPSKYFEVDFPMIVTRKLHSIKCKPPLSSPILELHSEDTLQMDGHILDSKRYAVIGADLRDLSELEEKLKKCNMNTQLPTLLIAECVLVYMTPEQSANLLKWAANSFERAMFINYEQVNMGDRFGQIMIENLRRRQCDLAGVETCKSLESQDRIT

SEQ ID NO: 45436 - protein, 138 aa, Homo sapiens
  Payload ID: 9255
  Gene Symbol: LCMT1
  Gene Name: leucine carboxyl methyltransferase 1
  ENSP ID: ENSP00000461754
  MOD_RES (1)..(1): Any amino acid
XRAMFINYEQVNMGDRFGQIMIENLRRRQCDLAGVETCKSLESQKERLLSNGWETASAVDMMELYNRLPRAEVSRAEGDNLLICRRLMPSQKPKPLALLEETCKLPERWAGLVRRSHPTLLRSLGHYSGRTCSSSCSC

SEQ ID NO: 45437 - protein, 686 aa, Homo sapiens
  Payload ID: 9256
  Gene Symbol: LCMT2
  Gene Name: leucine carboxyl methyltransferase 2
  Uniprot ID: O60294
  ENSP ID: ENSP00000307214
MGPRSRERRAGAVQNTNDSSALSKRSLAARGYVQDPFAALLVPGAARRAPLIHRGYYVRARAVRHCVRAFLEQIGAPQAALRAQILSLGAGFDSLYFRLKTAGRLARAAVWEVDFPDVARRKAERIGETPELCALTGPFERGEPASALCFESADYCILGLDLRQLQRVEEALGAAGLDAASPTLLLAEAVLTYLEPESAAALIAWAAQRFPNALFVVYEQMRPQDAFGQFMLQHFRQLNSPLHGLERFPDVEAQRRRFLQAGWTACGAVDMNEFYHCFLPAEERRRVENIEPFDEFEEWHLKCAHYFILAASRGDTLSHTLVFPSSEAFPRVNPASPSGVFPASVVSSEGQVPNLKRYGHASVFLSPDVILSAGGFGEQEGRHCRVSQFHLLSRDCDSEWKGSQIGSCGTGVQWDGRLYHTMTRLSESRVLVLGGRLSPVSPALGVLQLHFFKSEDNNTEDLKVTITKAGRKDDSTLCCWRHSTTEVSCQNQEYLFVYGGRSVVEPVLSDWHFLHVGTMAWVRIPVEGEVPEARHSHSACTWQGGALIAGGLGASEEPLNSVLFLRPISCGFLWESVDIQPPITPRYSHTAHVLNGKLLLVGGIWIHSSSFPGVTVINLTTGLSSEYQIDTTYVPWPLMLHNHTSILLPEEQQLLLLGGGGNCFSFGTYFNPHTVTLDLSSLSAGQ

SEQ ID NO: 45438 - protein, 39 aa, Homo sapiens
  Payload ID: 9256
  Gene Symbol: LCMT2
  Gene Name: leucine carboxyl methyltransferase 2
  ENSP ID: ENSP00000457403
MGPRSRERRAGAVQNTNDSSALSKRSLAARGRTPAGGKY

SEQ ID NO: 45439 - protein, 239 aa, Homo sapiens
  Payload ID: 9257
  Gene Symbol: LURAP1
  Gene Name: leucine rich adaptor protein 1
  Uniprot ID: Q96LR2
  ENSP ID: ENSP00000361048
MEGTVESQTPDLRDVEGKVGRKTPEGLLRGLRGECELGTSGALLLPGASSTGHDLGDKIMALKMELAYLRAIDVKILQQLVTLNEGIEAVRWLLEERGTLTSHCSSLTSSQYSLTGGSPGRSRRGSWDSLPDTSTTDRLDSVSIGSFLDTVAPSELDEQGPPGAPRSEMDWAKVIAGGERARTEVDVAATRLGSLRAVWKPPGERLQGGPPESPEDESAKLGFEAHWFWEQCQDDVTFL

SEQ ID NO: 45440 - protein, 228 aa, Homo sapiens
  Payload ID: 9258
  Gene Symbol: LURAP1L
  Gene Name: leucine rich adaptor protein 1-like
  Uniprot ID: Q8IV03
  ENSP ID: ENSP00000321026
MEDSPLPDLRDIELKLGRKVPESLVRSLRGEEPVPRERDRDPCGGSGGGGGGGGGCSSSSSYCSFPPSLSSSSSSSPTSGSPRGSHSSALERLETKLHLLRQEMVNLRATDVRLMRQLLVINESIESIKWMIEEKATITSRGSSLSGSLCSLLESQSTSLRGSYNSLHDGSDGLDGISVGSYLDTLADDVPGHQTPSDLDQFSDSSLIEDSQALHKRPKLDSEYYCFG

SEQ ID NO: 45441 - protein, 46 aa, Homo sapiens
  Payload ID: 9259
  Gene Symbol: LRCOL1
  Gene Name: leucine rich colipase-like 1
  ENSP ID: ENSP00000477635
MAGPGWTLLLLLLLLLLLGSMAGYGPQKKLNLSHKKLLRKPKFEGW

SEQ ID NO: 45442 - protein, 159 aa, Homo sapiens
  Payload ID: 9259
  Gene Symbol: LRCOL1
  Gene Name: leucine rich colipase-like 1
  Uniprot ID: A6NCL2
  ENSP ID: ENSP00000479730
MAGPGWTLLLLLLLLLLLGSMAGYGPQKKLNLSHKGIGEPCRRHEECQSNCCTINSLAPHTLCTPKTIFLQCLPWRKPNGYRCSHDSECQSSCCVRNNSPQELCTPQSVFLQCVPWRKPNGDFCSSHQECHSQCCIQLREYSPFRCIPRTGILAQCLPL

SEQ ID NO: 45443 - protein, 61 aa, Homo sapiens
  Payload ID: 9259
  Gene Symbol: LRCOL1
  Gene Name: leucine rich colipase-like 1
  ENSP ID: ENSP00000481713
MAGPGWTLLLLLLLLLLLGSMAGYGPQKKLNLSHKPRAPSTDLPEPRQSGFVPETSQETQV

SEQ ID NO: 45444 - protein, 139 aa, Homo sapiens
  Payload ID: 9259
  Gene Symbol: LRCOL1
  Gene Name: leucine rich colipase-like 1
  ENSP ID: ENSP00000482471
MAGPGWTLLLLLLLLLLLGSMAGYGPQKKLNLSHKGIGEPCRRHEECQSNCCTINSLAPHTLCTPKTIFLQCLPWRKVSPMGTDARTTQSARAAAASATTARRSCARPKASSCSVCPGASPTATSAAAIRSVTASAASS

SEQ ID NO: 45445 - protein, 784 aa, Homo sapiens
  Payload ID: 9260
  Gene Symbol: LRRFIP1
  Gene Name: leucine rich repeat (in FLII) interacting protein 1
  Uniprot ID: Q32MZ4
  ENSP ID: ENSP00000244815
MTSPAAAQSREIDCLSPEAQKLAEARLAAKRAARAEAREIRMKELERQQKEEDSERYSRRSRRNTSASDEDERMSVGSRGSLRVEERPEKDFTEKGSRNMPGLSAATLASLGGTSSRRGSGDTSISIDTEASIREIKDSLAEVEEKYKKAMVSNAQLDNEKTNFMYQVDTLKDMLLELEEQLAESRRQYEEKNKEFEREKHAHSILQFQFAEVKEALKQREEMLEKHGIILNSEIATNGETSDTLNNVGYQGPTKMTKEELNALKSTGDGTLGRASEVEVKNEIVANVGKREILHNTEKEQHTEDTVKDCVDIEVFPAGENTEDQKSSEDTAPFLGTLAGATYEEQVQSQILESSSLPENTVQVESNEVMGAPDDRTRTPLEPSNCWSDLDGGNHTENVGEAAVTQVEEQAGTVASCPLGHSDDTVYHDDKCMVEVPQELETSTGHSLEKEFTNQEAAEPKEVPAHSTEVGRDHNEEEGEETGLRDEKPIKTEVPGSPAGTEGNCQEATGPSTVDTQNEPLDMKEPDEEKSDQQGEALDSSQKKTKNKKKKNKKKKSPVPVETLKDVKKELTYQNTDLSEIKEEEQVKSTDRKSAVEAQNEVTENPKQKIAAESSENVDCPENPKIKLDGKLDQEGDDVQTAAEEVLADGDTLDFEDDTVQSSGPRAGGEELDEGVAKDNAKIDGATQSSPAEPKSEDADRCTLPEHESPSQDISDACEAESTERCEMSEHPSQTVRKALDSNSLENDDLSAPGREPGHFNPESREDTRGGNEKGKSKEDCTMS

SEQ ID NO: 45446 - protein, 752 aa, Homo sapiens
  Payload ID: 9260
  Gene Symbol: LRRFIP1
  Gene Name: leucine rich repeat (in FLII) interacting protein 1
  Uniprot ID: Q32MZ4
  ENSP ID: ENSP00000289175
MTSPAAAQSREIDCLSPEAQKLAEARLAAKRAARAEAREIRMKELERQQKEVEERPEKDFTEKGSRNMPGLSAATLASLGGTSSRRGSGDTSISIDTEASIREIKDSLAEVEEKYKKAMVSNAQLDNEKTNFMYQVDTLKDMLLELEEQLAESRRQYEEKNKEFEREKHAHSILQFQFAEVKEALKQREEMLEKHGIILNSEIATNGETSDTLNNVGYQGPTKMTKEELNALKSTGDGTLGRASEVEVKNEIVANVGKREILHNTEKEQHTEDTVKDCVDIEVFPAGENTEDQKSSEDTAPFLGTLAGATYEEQVQSQILESSSLPENTVQVESNEVMGAPDDRTRTPLEPSNCWSDLDGGNHTENVGEAAVTQVEEQAGTVASCPLGHSDDTVYHDDKCMVEVPQELETSTGHSLEKEFTNQEAAEPKEVPAHSTEVGRDHNEEEGEETGLRDEKPIKTEVPGSPAGTEGNCQEATGPSTVDTQNEPLDMKEPDEEKSDQQGEALDSSQKKTKNKKKKNKKKKSPVPVETLKDVKKELTYQNTDLSEIKEEEQVKSTDRKSAVEAQNEVTENPKQKIAAESSENVDCPENPKIKLDGKLDQEGDDVQTAAEEVLADGDTLDFEDDTVQSSGPRAGGEELDEGVAKDNAKIDGATQSSPAEPKSEDADRCTLPEHESPSQDISDACEAESTERCEMSEHPSQTVRKALDSNSLENDDLSAPGREPGHFNPESREDTRGGNEKGKSKEDCTMS

SEQ ID NO: 45447 - protein, 640 aa, Homo sapiens
  Payload ID: 9260
  Gene Symbol: LRRFIP1
  Gene Name: leucine rich repeat (in FLII) interacting protein 1
  Uniprot ID: Q32MZ4
  ENSP ID: ENSP00000310109
MDMGTQGSGRKRLPNRERLTAEDDALNQIAREAEARLAAKRAARAEAREIRMKELERQQKEIYQVQKKYYGLDTKWGDIEQWMEDSERYSRRSRRNTSASDEDERMSVGSRGSLRSQPDLEYGGPYAWTNGYDGELYGSQSLNRRSGRPSCLYSAARPSGSYRASVLDEGSFGGTRRGSTSGSRAPSEYSGHLNSSSRASSRASSARASPVVEERPEKDFTEKGSRNMPGLSAATLASLGGTSSRRGSGDTSISIDTEASIREIKELNELKDQIQDVEGKYMQGLKEMKDSLAEVEEKYKKAMVSNAQLDNEKTNFMYQVDTLKDMLLELEEQLAESRRQYEEKNKEFEREKHAHSILQFQFAEVKEALKQREEMLEEIRQLQQKQASSIREISDLQETIEWKDKKIGALERQKEFFDSVRSERDDLREEVVMLKEELKKHGIILNSEIATNGETSDTLNNVGYQGPTKMTKEELNALKSTGDGTLDIRLKKLVDERECLLEQIKKLKGQLEERQKIGKLDNLRSEDDVLENGTDMHVMDLQRDANRQISDLKFKLAKSEQEITALEQNVIRLESQVSRYKSAAENAEKIEDELKAEKRKLQRELRSALDKTEELEVSNGHLVKRLEKMKANRSALLSQQ

SEQ ID NO: 45448 - protein, 808 aa, Homo sapiens
  Payload ID: 9260
  Gene Symbol: LRRFIP1
  Gene Name: leucine rich repeat (in FLII) interacting protein 1
  Uniprot ID: Q32MZ4
  ENSP ID: ENSP00000375857
MTSPAAAQSREIDCLSPEAQKLAEARLAAKRAARAEAREIRMKELERQQKEEDSERYSRRSRRNTSASDEDERMSVGSRGSLRVEERPEKDFTEKGSRNMPGLSAATLASLGGTSSRRGSGDTSISIDTEASIREIKELNELKDQIQDVEGKYMQGLKEMKDSLAEVEEKYKKAMVSNAQLDNEKTNFMYQVDTLKDMLLELEEQLAESRRQYEEKNKEFEREKHAHSILQFQFAEVKEALKQREEMLEKHGIILNSEIATNGETSDTLNNVGYQGPTKMTKEELNALKSTGDGTLGRASEVEVKNEIVANVGKREILHNTEKEQHTEDTVKDCVDIEVFPAGENTEDQKSSEDTAPFLGTLAGATYEEQVQSQILESSSLPENTVQVESNEVMGAPDDRTRTPLEPSNCWSDLDGGNHTENVGEAAVTQVEEQAGTVASCPLGHSDDTVYHDDKCMVEVPQELETSTGHSLEKEFTNQEAAEPKEVPAHSTEVGRDHNEEEGEETGLRDEKPIKTEVPGSPAGTEGNCQEATGPSTVDTQNEPLDMKEPDEEKSDQQGEALDSSQKKTKNKKKKNKKKKSPVPVETLKDVKKELTYQNTDLSEIKEEEQVKSTDRKSAVEAQNEVTENPKQKIAAESSENVDCPENPKIKLDGKLDQEGDDVQTAAEEVLADGDTLDFEDDTVQSSGPRAGGEELDEGVAKDNAKIDGATQSSPAEPKSEDADRCTLPEHESPSQDISDACEAESTERCEMSEHPSQTVRKALDSNSLENDDLSAPGREPGHFNPESREDTRGGNEKGKSKEDCTMS

SEQ ID NO: 45449 - protein, 149 aa, Homo sapiens
  Payload ID: 9260
  Gene Symbol: LRRFIP1
  Gene Name: leucine rich repeat (in FLII) interacting protein 1
  ENSP ID: ENSP00000409431
MTSPAAAQSREIDCLSPEAQKLAEARLAAKRAARAEAREIRMKELERQQKEEDSERYSRRSRRNTSASDEDERMSVGSRGSLRTNGYDGELYGSQSLNRRSGRVEERPEKDFTEKGSRNMPGLSAATLASLGGTSSRRGSGDTSISIDT

SEQ ID NO: 45450 - protein, 721 aa, Homo sapiens
  Payload ID: 9261
  Gene Symbol: LRRFIP2
  Gene Name: leucine rich repeat (in FLII) interacting protein 2
  Uniprot ID: Q9Y608
  ENSP ID: ENSP00000338727
MGTPASGRKRTPVKDRFSAEDEALSNIAREAEARLAAKRAARAEARDIRMRELERQQKEYSLHSFDRKWGQIQKWLEDSERARYSHRSSHHRPYLGVEDALSIRSVGSHRYDMFKDRSSRLSSLNHSYSHSHGMKKRSSDSHKDLLSGLYFDQRNYSSLRHSKPTSAYYTRQSSSLYSDPLATYKSDRASPTANSGLLRSASLASLYNGGLYNPYGPRTPSECSYYSSRISSARSSPGFTNDDTASIVSSDRASRGRRESVVSAADYFSRSNRRGSVVSEVDDISIPDLSSLDEKSDKQYAENYTRPSSRNSASATTPLSGNSSRRGSGDTSSLIDPDTSLSELRDIYDLKDQIQDVEGRYMQGLKELKESLSEVEEKYKKAMVSNAQLDNEKNNLIYQVDTLKDVIEEQEEQMAEFYRENEEKSKELERQKHMCSVLQHKMEELKEGLRQRDELIEEKQRMQQKIDTMTKEVFDLQETLLWKDKKIGALEKQKEYIACLRNERDMLREELADLQETVKTGEKHGLVIIPDGTPNGDVSHEPVAGAITVVSQEAAQVLESAGEGPLDVRLRKLAGEKEELLSQIRKLKLQLEEERQKCSRNDGTVGDLAGLQNGSDLQFIEMQRDANRQISEYKFKLSKAEQDITTLEQSISRLEGQVLRYKTAAENAEKVEDELKAEKRKLQRELRTALDKIEEMEMTNSHLAKRLEKMKANRTALLAQQ

SEQ ID NO: 45451 - protein, 400 aa, Homo sapiens
  Payload ID: 9261
  Gene Symbol: LRRFIP2
  Gene Name: leucine rich repeat (in FLII) interacting protein 2
  Uniprot ID: Q9Y608
  ENSP ID: ENSP00000346349
MGTPASGRKRTPVKDRFSAEDEALSNIAREAEARLAAKRAARAEARDIRMRELERQQKELDEKSDKQYAENYTRPSSRNSASATTPLSGNSSRRGSGDTSSLIDPDTSLSELRESLSEVEEKYKKAMVSNAQLDNEKNNLIYQVDTLKDVIEEQEEQMAEFYRENEEKSKELERQKHMCSVLQHKMEELKEGLRQRDELIEKHGLVIIPDGTPNGDVSHEPVAGAITVVSQEAAQVLESAGEGPLDVRLRKLAGEKEELLSQIRKLKLQLEEERQKCSRNDGTVGDLAGLQNGSDLQFIEMQRDANRQISEYKFKLSKAEQDITTLEQSISRLEGQVLRYKTAAENAEKVEDELKAEKRKLQRELRTALDKIEEMEMTNSHLAKRLEKMKANRTALLAQQ

SEQ ID NO: 45452 - protein, 503 aa, Homo sapiens
  Payload ID: 9261
  Gene Symbol: LRRFIP2
  Gene Name: leucine rich repeat (in FLII) interacting protein 2
  Uniprot ID: Q9Y608
  ENSP ID: ENSP00000379705
MGTPASGRKRTPVKDRFSAEDEALSNIAREAEARLAAKRAARAEARDIRMRELERQQKEEDSERARYSHRSSHHRPYLGVEDALSIRSVGSHRNHSYSHSHGMKKRSSDSHKDLLASLYNGGLYNPYGPRTLDEKSDKQYAENYTRPSSRNSASATTPLSGNSSRRGSGDTSSLIDPDTSLSELRESLSEVEEKYKKAMVSNAQLDNEKNNLIYQVDTLKDVIEEQEEQMAEFYRENEEKSKELERQKHMCSVLQHKMEELKEGLRQRDELIEEKQRMQQKIDTMTKEVFDLQETLLWKDKKIGKHGLVIIPDGTPNGDVSHEPVAGAITVVSQEAAQVLESAGEGPLDVRLRKLAGEKEELLSQIRKLKLQLEEERQKCSRNDGTVGDLAGLQNGSDLQFIEMQRDANRQISEYKFKLSKAEQDITTLEQSISRLEGQVLRYKTAAENAEKVEDELKAEKRKLQRELRTALDKIEEMEMTNSHLAKRLEKMKANRTALLAQQ

SEQ ID NO: 45453 - protein, 59 aa, Homo sapiens
  Payload ID: 9261
  Gene Symbol: LRRFIP2
  Gene Name: leucine rich repeat (in FLII) interacting protein 2
  ENSP ID: ENSP00000391360
MGTPASGRKRTPVKDRFSAEDEALSNIAREAEARLAAKRAARAEARDIRMRELERQQKE

SEQ ID NO: 45454 - protein, 424 aa, Homo sapiens
  Payload ID: 9261
  Gene Symbol: LRRFIP2
  Gene Name: leucine rich repeat (in FLII) interacting protein 2
  Uniprot ID: Q9Y608
  ENSP ID: ENSP00000405480
MGTPASGRKRTPVKDRFSAEDEALSNIAREAEARLAAKRAARAEARDIRMRELERQQKELDEKSDKQYAENYTRPSSRNSASATTPLSGNSSRRGSGDTSSLIDPDTSLSELRDIYDLKDQIQDVEGRYMQGLKELKESLSEVEEKYKKAMVSNAQLDNEKNNLIYQVDTLKDVIEEQEEQMAEFYRENEEKSKELERQKHMCSVLQHKMEELKEGLRQRDELIEKHGLVIIPDGTPNGDVSHEPVAGAITVVSQEAAQVLESAGEGPLDVRLRKLAGEKEELLSQIRKLKLQLEEERQKCSRNDGTVGDLAGLQNGSDLQFIEMQRDANRQISEYKFKLSKAEQDITTLEQSISRLEGQVLRYKTAAENAEKVEDELKAEKRKLQRELRTALDKIEEMEMTNSHLAKRLEKMKANRTALLAQQ

SEQ ID NO: 45455 - protein, 225 aa, Homo sapiens
  Payload ID: 9261
  Gene Symbol: LRRFIP2
  Gene Name: leucine rich repeat (in FLII) interacting protein 2
  ENSP ID: ENSP00000409574
MGTPASGRKRTPVKDRFSAEDEALSNIAREAEARLAAKRAARAEARDIRMRELERQQKELDEKSDKQYAENYTRPSSRNSASATTPLSGNSSRRGSGDTSSLIDPDTSLSELRDIYDLKDQIQDVEGRYMQGLKELKESLSEVEEKYKKAMVSNAQLDNEKNNLIYQVDTLKDVIEEQEEQMAEFYRENEEKSKELERQKHMCSVLQHKMEELKEGLRQRDELIE

SEQ ID NO: 45456 - protein, 67 aa, Homo sapiens
  Payload ID: 9261
  Gene Symbol: LRRFIP2
  Gene Name: leucine rich repeat (in FLII) interacting protein 2
  ENSP ID: ENSP00000412206
MGTPASGRKRTPVKDRFSAEDEALSNIAREAEARLAAKRAARAEARDIRMRELERQQKEEDSERARY

SEQ ID NO: 45457 - protein, 182 aa, Homo sapiens
  Payload ID: 9261
  Gene Symbol: LRRFIP2
  Gene Name: leucine rich repeat (in FLII) interacting protein 2
  ENSP ID: ENSP00000413026
  MOD_RES (1)..(1): Any amino acid
XLDNEKNNLIYQVDTLKDVIEEQEEQMAEFYRENEEKSKELERQKHMCSVLQHKMEELKEGLRQRDELIEALEKQKEYIACLRNERDMLREELADLQETVKTGEKHGLVIIPDGTPNGDVSHEPVAGAITVVSQEAAQVLESAGEGPLDVRLRKLAGEKEELLSQIRKLKLQLEEERQKCSR

SEQ ID NO: 45458 - protein, 59 aa, Homo sapiens; identical to SEQ ID NO: 45453
  Payload ID: 9261
  Gene Symbol: LRRFIP2
  Gene Name: leucine rich repeat (in FLII) interacting protein 2
  ENSP ID: ENSP00000416013

SEQ ID NO: 45459 - protein, 424 aa, Homo sapiens; identical to SEQ ID NO: 45454
  Payload ID: 9261
  Gene Symbol: LRRFIP2
  Gene Name: leucine rich repeat (in FLII) interacting protein 2
  Uniprot ID: Q9Y608
  ENSP ID: ENSP00000416364

SEQ ID NO: 45460 - protein, 59 aa, Homo sapiens; identical to SEQ ID NO: 45453
  Payload ID: 9261
  Gene Symbol: LRRFIP2
  Gene Name: leucine rich repeat (in FLII) interacting protein 2
  ENSP ID: ENSP00000416907

SEQ ID NO: 45461 - protein, 1032 aa, Homo sapiens
  Payload ID: 9262
  Gene Symbol: LRRCC1
  Gene Name: leucine rich repeat and coiled-coil centrosomal protein 1
  Uniprot ID: Q9C099
  ENSP ID: ENSP00000353538
MEAAAAVVAAEAEVENEDGDSSCGDVCFMDKGLQSISELSLDSTLHAVNLHCNNISKIEAIDHIWNLQHLDLSSNQISRIEGLNTLTKLCTLNLSCNLITKVEGLEELINLTRLNVSYNHIDDLSGLIPLHGIKHKLRYIDLHSNRIDSIHHLLQCMVGLHFLTNLILEKDGDDNPVCRLPGYRAVILQTLPQLRILDCKNIFGEPVNLTEINSSQLQCLEGLLDNLVSSDSPLNISEDEIIDRMPVITAPIDELVPLEQFASTPSDAVLTSFMSVCQSSEPEKNNHENDLQNEIKLQKLDDQILQLLNETSNSIDNVLEKDPRPKRDTDITSESDYGNRKECNRKVPRRSKIPYDAKTIQTIKHHNKNYNSFVSCNRKMKPPYLKELYVSSSLANCPMLQESEKPKTEIIKVDQSHSEDNTYQSLVEQLDQEREKRWRAEQAENKLMDYIDELHKHANEKEDIHSLALLTTDRLKEIIFRERNSKGQLEVMVHKLQNEIKKLTVELMKAKDQQEDHLKHLRTLEKTLEKMERQKRQQQAAQIRLIQEVELKASAADREIYLLRTSLHREREQAQQLHQLLALKEQEHRKELETREFFTDADFQDALAKEIAKEEKKHEQMIKEYQEKIDVLSQQYMDLENEFRIALTVEARRFQDVKDGFENVATELAKSKHALIWAQRKENESSSLIKDLTCMVKEQKTKLAEVSKLKQETAANLQNQINTLEILIEDDKQKSIQIELLKHEKVQLISELAAKESLIFGLRTERKVWGHELAQQGSSLAQNRGKLEAQIESLSRENECLRKTNESDSDALRIKCKIIDDQTETIRKLKDCLQEKDEHIKRLQEKITEIEKCTQEQLDEKSSQLDEVLEKLERHNERKEKLKQQLKGKEVELEEIRKAYSTLNRKWHDKGELLCHLETQVKEVKEKFENKEKKLKAERDKSIELQKNAMEKLHSMDDAFKRQVDAIVEAHQAEIAQLANEKQKCIDSANLKVHQIEKEMRELLEETCKNKKTMEAKIKQLAFALNEIQQDM

SEQ ID NO: 45462 - protein, 1012 aa, Homo sapiens
  Payload ID: 9262
  Gene Symbol: LRRCC1
  Gene Name: leucine rich repeat and coiled-coil centrosomal protein 1
  Uniprot ID: Q9C099
  ENSP ID: ENSP00000394695
MLLKSIFIVYIFFYSISELSLDSTLHAVNLHCNNISKIEAIDHIWNLQHLDLSSNQISRIEGLNTLTKLCTLNLSCNLITKVEGLEELINLTRLNVSYNHIDDLSGLIPLHGIKHKLRYIDLHSNRIDSIHHLLQCMVGLHFLTNLILEKDGDDNPVCRLPGYRAVILQTLPQLRILDCKNIFGEPVNLTEINSSQLQCLEGLLDNLVSSDSPLNISEDEIIDRMPVITAPIDELVPLEQFASTPSDAVLTSFMSVCQSSEPEKNNHENDLQNEIKLQKLDDQILQLLNETSNSIDNVLEKDPRPKRDTDITSESDYGNRKECNRKVPRRSKIPYDAKTIQTIKHHNKNYNSFVSCNRKMKPPYLKELYVSSSLANCPMLQESEKPKTEIIKVDQSHSEDNTYQSLVEQLDQEREKRWRAEQAENKLMDYIDELHKHANEKEDIHSLALLTTDRLKEIIFRERNSKGQLEVMVHKLQNEIKKLTVELMKAKDQQEDHLKHLRTLEKTLEKMERQKRQQQAAQIRLIQEVELKASAADREIYLLRTSLHREREQAQQLHQLLALKEQEHRKELETREFFTDADFQDALAKEIAKEEKKHEQMIKEYQEKIDVLSQQYMDLENEFRIALTVEARRFQDVKDGFENVATELAKSKHALIWAQRKENESSSLIKDLTCMVKEQKTKLAEVSKLKQETAANLQNQINTLEILIEDDKQKSIQIELLKHEKVQLISELAAKESLIFGLRTERKVWGHELAQQGSSLAQNRGKLEAQIESLSRENECLRKTNESDSDALRIKCKIIDDQTETIRKLKDCLQEKDEHIKRLQEKITEIEKCTQEQLDEKSSQLDEVLEKLERHNERKEKLKQQLKGKEVELEEIRKAYSTLNRKWHDKGELLCHLETQVKEVKEKFENKEKKLKAERDKSIELQKNAMEKLHSMDDAFKRQVDAIVEAHQAEIAQLANEKQKCIDSANLKVHQIEKEMRELLEETCKNKKTMEAKIKQLAFALNEIQQDM

SEQ ID NO: 45463 - protein, 35 aa, Homo sapiens
  Payload ID: 9262
  Gene Symbol: LRRCC1
  Gene Name: leucine rich repeat and coiled-coil centrosomal protein 1
  ENSP ID: ENSP00000428506
MEAAAAVVAAEAEVENEDGDSSCGDVCFMDKGLQR

SEQ ID NO: 45464 - protein, 36 aa, Homo sapiens
  Payload ID: 9262
  Gene Symbol: LRRCC1
  Gene Name: leucine rich repeat and coiled-coil centrosomal protein 1
  ENSP ID: ENSP00000428794
MEAAAAVVAAEAEVENEDGDSSCGDVCFMDKGLQRT

SEQ ID NO: 45465 - protein, 36 aa, Homo sapiens; identical to SEQ ID NO: 45464
  Payload ID: 9262
  Gene Symbol: LRRCC1
  Gene Name: leucine rich repeat and coiled-coil centrosomal protein 1
  ENSP ID: ENSP00000430878

SEQ ID NO: 45466 - protein, 36 aa, Homo sapiens; identical to SEQ ID NO: 45464
  Payload ID: 9262
  Gene Symbol: LRRCC1
  Gene Name: leucine rich repeat and coiled-coil centrosomal protein 1
  ENSP ID: ENSP00000430960

SEQ ID NO: 45467 - protein, 771 aa, Homo sapiens
  Payload ID: 9263
  Gene Symbol: LRFN1
  Gene Name: leucine rich repeat and fibronectin type III domain containing 1
  Uniprot ID: Q9P244
  ENSP ID: ENSP00000248668
MAPGPFSSALLSPPPAALPFLLLLWAGASRGQPCPGRCICQNVAPTLTMLCAKTGLLFVPPAIDRRVVELRLTDNFIAAVRRRDFANMTSLVHLTLSRNTIGQVAAGAFADLRALRALHLDSNRLAEVRGDQLRGLGNLRHLILGNNQIRRVESAAFDAFLSTVEDLDLSYNNLEALPWEAVGQMVNLNTLTLDHNLIDHIAEGTFVQLHKLVRLDMTSNRLHKLPPDGLFLRSQGTGPKPPTPLTVSFGGNPLHCNCELLWLRRLTREDDLETCATPEHLTDRYFWSIPEEEFLCEPPLITRQAGGRALVVEGQAVSLRCRAVGDPEPVVHWVAPDGRLLGNSSRTRVRGDGTLDVTITTLRDSGTFTCIASNAAGEATAPVEVCVVPLPLMAPPPAAPPPLTEPGSSDIATPGRPGANDSAAERRLVAAELTSNSVLIRWPAQRPVPGIRMYQVQYNSSVDDSLVYRMIPSTSQTFLVNDLAAGRAYDLCVLAVYDDGATALPATRVVGCVQFTTAGDPAPCRPLRAHFLGGTMIIAIGGVIVASVLVFIVLLMIRYKVYGDGDSRRVKGSRSLPRVSHVCSQTNGAGTGAAQAPALPAQDHYEALREVESQAAPAVAVEAKAMEAETASAEPEVVLGRSLGGSATSLCLLPSEETSGEESRAAVGPRRSRSGALEPPTSAPPTLALVPGGAAARPRPQQRYSFDGDYGALFQSHSYPRRARRTKRHRSTPHLDGAGGGAAGEDGDLGLGSARACLAFTSTEWMLESTV

SEQ ID NO: 45468 - protein, 789 aa, Homo sapiens
  Payload ID: 9264
  Gene Symbol: LRFN2
  Gene Name: leucine rich repeat and fibronectin type III domain containing 2
  Uniprot ID: Q9ULH4
  ENSP ID: ENSP00000345985
METLLGGLLAFGMAFAVVDACPKYCVCQNLSESLGTLCPSKGLLFVPPDIDRRTVELRLGGNFIIHISRQDFANMTGLVDLTLSRNTISHIQPFSFLDLESLRSLHLDSNRLPSLGEDTLRGLVNLQHLIVNNNQLGGIADEAFEDFLLTLEDLDLSYNNLHGLPWDSVRRMVNLHQLSLDHNLLDHIAEGTFADLQKLARLDLTSNRLQKLPPDPIFARSQASALTATPFAPPLSFSFGGNPLHCNCELLWLRRLERDDDLETCGSPGGLKGRYFWHVREEEFVCEPPLITQHTHKLLVLEGQAATLKCKAIGDPSPLIHWVAPDDRLVGNSSRTAVYDNGTLDIFITTSQDSGAFTCIAANAAGEATAMVEVSIVQLPHLSNSTSRTAPPKSRLSDITGSSKTSRGGGGSGGGEPPKSPPERAVLVSEVTTTSALVKWSVSKSAPRVKMYQLQYNCSDDEVLIYRMIPASNKAFVVNNLVSGTGYDLCVLAMWDDTATTLTATNIVGCAQFFTKADYPQCQSMHSQILGGTMILVIGGIIVATLLVFIVILMVRYKVCNHEAPSKMAAAVSNVYSQTNGAQPPPPSSAPAGAPPQGPPKVVVRNELLDFTASLARASDSSSSSSLGSGEAAGLGRAPWRIPPSAPRPKPSLDRLMGAFASLDLKSQRKEELLDSRTPAGRGAGTSARGHHSDREPLLGPPAARARSLLPLPLEGKAKRSHSFDMGDFAAAAAGGVVPGGYSPPRKVSNIWTKRSLSVNGMLLPFEESDLVGARGTFGSSEWVMESTV

SEQ ID NO: 45469 - protein, 628 aa, Homo sapiens
  Payload ID: 9265
  Gene Symbol: LRFN3
  Gene Name: leucine rich repeat and fibronectin type III domain containing 3
  Uniprot ID: Q9BTN0
  ENSP ID: ENSP00000246529
MAILPLLLCLLPLAPASSPPQSATPSPCPRRCRCQTQSLPLSVLCPGAGLLFVPPSLDRRAAELRLADNFIASVRRRDLANMTGLLHLSLSRNTIRHVAAGAFADLRALRALHLDGNRLTSLGEGQLRGLVNLRHLILSNNQLAALAAGALDDCAETLEDLDLSYNNLEQLPWEALGRLGNVNTLGLDHNLLASVPAGAFSRLHKLARLDMTSNRLTTIPPDPLFSRLPLLARPRGSPASALVLAFGGNPLHCNCELVWLRRLAREDDLEACASPPALGGRYFWAVGEEEFVCEPPVVTHRSPPLAVPAGRPAALRCRAVGDPEPRVRWVSPQGRLLGNSSRARAFPNGTLELLVTEPGDGGIFTCIAANAAGEATAAVELTVGPPPPPQLANSTSCDPPRDGDPDALTPPSAASASAKVADTGPPTDRGVQVTEHGATAALVQWPDQRPIPGIRMYQIQYNSSADDILVYRMIPAESRSFLLTDLASGRTYDLCVLAVYEDSATGLTATRPVGCARFSTEPALRPCGAPHAPFLGGTMIIALGGVIVASVLVFIFVLLMRYKVHGGQPPGKAKIPAPVSSVCSQTNGALGPTPTPAPPAPEPAALRAHTVVQLDCEPWGPGHEPVGP

SEQ ID NO: 45470 - protein, 628 aa, Homo sapiens; identical to SEQ ID NO: 45469
  Payload ID: 9265
  Gene Symbol: LRFN3
  Gene Name: leucine rich repeat and fibronectin type III domain containing 3
  Uniprot ID: Q9BTN0
  ENSP ID: ENSP00000466989

SEQ ID NO: 45471 - protein, 635 aa, Homo sapiens
  Payload ID: 9266
  Gene Symbol: LRFN4
  Gene Name: leucine rich repeat and fibronectin type III domain containing 4
  Uniprot ID: Q6PJG9
  ENSP ID: ENSP00000312535
MAPPLLLLLLASGAAACPLPCVCQNLSESLSTLCAHRGLLFVPPNVDRRTVELRLADNFIQALGPPDFRNMTGLVDLTLSRNAITRIGARAFGDLESLRSLHLDGNRLVELGTGSLRGPVNLQHLILSGNQLGRIAPGAFDDFLESLEDLDLSYNNLRQVPWAGIGAMPALHTLNLDHNLIDALPPGAFAQLGQLSRLDLTSNRLATLAPDPLFSRGRDAEASPAPLVLSFSGNPLHCNCELLWLRRLARPDDLETCASPPGLAGRYFWAVPEGEFSCEPPLIARHTQRLWVLEGQRATLRCRALGDPAPTMHWVGPDDRLVGNSSRARAFPNGTLEIGVTGAGDAGGYTCIATNPAGEATARVELRVLALPHGGNSSAEGGRPGPSDIAASARTAAEGEGTLESEPAVQVTEVTATSGLVSWGPGRPADPVWMFQIQYNSSEDETLIYRIVPASSHHFLLKHLVPGADYDLCLLALSPAAGPSDLTATRLLGCAHFSTLPASPLCHALQAHVLGGTLTVAVGGVLVAALLVFTVALLVRGRGAGNGRLPLKLSHVQSQTNGGPSPTPKAHPPRSPPPRPQRSCSLDLGDAGCYGYARRLGGAWARRSHSVHGGLLGAGCRGVGGSAERLEESVV

SEQ ID NO: 45472 - protein, 418 aa, Homo sapiens
  Payload ID: 9266
  Gene Symbol: LRFN4
  Gene Name: leucine rich repeat and fibronectin type III domain containing 4
  ENSP ID: ENSP00000377524
MAPPLLLLLLASGAAACPLPCVCQNLSESLSTLCAHRGLLFVPPNVDRRTVELRLADNFIQALGPPDFRNMTGLVDLTLSRNAITRIGARAFGDLESLRSLHLDGNRLVELGTGSLRGPVNLQHLILSGNQLGRIAPGAFDDFLESLEDLDLSYNNLRQVPWAGIGAMPALHTLNLDHNLIDALPPGAFAQLGQLSRLDLTSNRLATLAPDPLFSRGRDAEASPAPLVLSFSGNPLHCNCELLWLRRLARPDDLETCASPPGLAGRYFWAVPEGEFSCEPPLIARHTQRLWVLEGQRATLRCRALGDPAPTMHWVGPDDRLVGNSSRARAFPNGTLEIGVTGAGDAGGYTCIATNPAGEATARVELRVLALPHGGNSRPGAAAWPGSPSLVFILSTSGSPVYLEGQGALSSVLASRPG

SEQ ID NO: 45473 - protein, 719 aa, Homo sapiens
  Payload ID: 9267
  Gene Symbol: LRFN5
  Gene Name: leucine rich repeat and fibronectin type III domain containing 5
  Uniprot ID: Q96NI6
  ENSP ID: ENSP00000298119
MEKILFYLFLIGIAVKAQICPKRCVCQILSPNLATLCAKKGLLFVPPNIDRRTVELRLADNFVTNIKRKDFANMTSLVDLTLSRNTISFITPHAFADLRNLRALHLNSNRLTKITNDMFSGLSNLHHLILNNNQLTLISSTAFDDVFALEELDLSYNNLETIPWDAVEKMVSLHTLSLDHNMIDNIPKGTFSHLHKMTRLDVTSNKLQKLPPDPLFQRAQVLATSGIISPSTFALSFGGNPLHCNCELLWLRRLSREDDLETCASPPLLTGRYFWSIPEEEFLCEPPLITRHTHEMRVLEGQRATLRCKARGDPEPAIHWISPEGKLISNATRSLVYDNGTLDILITTVKDTGAFTCIASNPAGEATQIVDLHIIKLPHLLNSTNHIHEPDPGSSDISTSTKSGSNTSSSNGDTKLSQDKIVVAEATSSTALLKFNFQRNIPGIRMFQIQYNGTYDDTLVYRMIPPTSKTFLVNNLAAGTMYDLCVLAIYDDGITSLTATRVVGCIQFTTEQDYVRCHFMQSQFLGGTMIIIIGGIIVASVLVFIIILMIRYKVCNNNGQHKVTKVSNVYSQTNGAQIQGCSVTLPQSVSKQAVGHEENAQCCKATSDNVIQSSETCSSQDSSTTTSALPPSWTSSTSVSQKQKRKTGTKPSTEPQNEAVTNVESQNTNRNNSTALQLASRPPDSVTEGPTSKRAHIKPNALLTNVDQIVQETQRLELI

SEQ ID NO: 45474 - protein, 466 aa, Homo sapiens
  Payload ID: 9267
  Gene Symbol: LRFN5
  Gene Name: leucine rich repeat and fibronectin type III domain containing 5
  ENSP ID: ENSP00000451067
MEKILFYLFLIGIAVKAQICPKRCVCQILSPNLATLCAKKGLLFVPPNIDRRTVELRLADNFVTNIKRKDFANMTSLVDLTLSRNTISFITPHAFADLRNLRALHLNSNRLTKITNDMFSGLSNLHHLILNNNQLTLISSTAFDDVFALEELDLSYNNLETIPWDAVEKMVSLHTLSLDHNMIDNIPKGTFSHLHKMTRLDVTSNKLQKLPPDPLFQRAQVLATSGIISPSTFALSFGGNPLHCNCELLWLRRLSREDDLETCASPPLLTGRYFWSIPEEEFLCEPPLITRHTHEMRVLEGQRATLRCKARGDPEPAIHWISPEGKLISNATRSLVYDNGTLDILITTVKDTGAFTCIASNPAGEATQIVDLHIIKLPHLLNSTNHIHEPDPGSSDISTSTKSGSNTSSSNGDTKLSQDKIVVAEATSSTALLKFNFQRNIPGIRMFQIQYNGTYDDTLVYRCFAD

SEQ ID NO: 45475 - protein, 465 aa, Homo sapiens
  Payload ID: 9267
  Gene Symbol: LRFN5
  Gene Name: leucine rich repeat and fibronectin type III domain containing 5
  ENSP ID: ENSP00000451897
MEKILFYLFLIGIAVKAQICPKRCVCQILSPNLATLCAKKGLLFVPPNIDRRTVELRLADNFVTNIKRKDFANMTSLVDLTLSRNTISFITPHAFADLRNLRALHLNSNRLTKITNDMFSGLSNLHHLILNNNQLTLISSTAFDDVFALEELDLSYNNLETIPWDAVEKMVSLHTLSLDHNMIDNIPKGTFSHLHKMTRLDVTSNKLQKLPPDPLFQRAQVLATSGIISPSTFALSFGGNPLHCNCELLWLRRLSREDDLETCASPPLLTGRYFWSIPEEEFLCEPPLITRHTHEMRVLEGQRATLRCKARGDPEPAIHWISPEGKLISNATRSLVYDNGTLDILITTVKDTGAFTCIASNPAGEATQIVDLHIIKLPHLLNSTNHIHEPDPGSSDISTSTKSGSNTSSSNGDTKLSQDKIVVAEATSSTALLKFNFQRNIPGIRMFQIQYNGTYDDTLVYRGWS

SEQ ID NO: 45476 - protein, 620 aa, Homo sapiens
  Payload ID: 9268
  Gene Symbol: LINGO1
  Gene Name: leucine rich repeat and Ig domain containing 1
  Uniprot ID: Q96FE5
  ENSP ID: ENSP00000347451
MQVSKRMLAGGVRSMPSPLLACWQPILLLVLGSVLSGSATGCPPRCECSAQDRAVLCHRKRFVAVPEGIPTETRLLDLGKNRIKTLNQDEFASFPHLEELELNENIVSAVEPGAFNNLFNLRTLGLRSNRLKLIPLGVFTGLSNLTKLDISENKIVILLDYMFQDLYNLKSLEVGDNDLVYISHRAFSGLNSLEQLTLEKCNLTSIPTEALSHLHGLIVLRLRHLNINAIRDYSFKRLYRLKVLEISHWPYLDTMTPNCLYGLNLTSLSITHCNLTAVPYLAVRHLVYLRFLNLSYNPISTIEGSMLHELLRLQEIQLVGGQLAVVEPYAFRGLNYLRVLNVSGNQLTTLEESVFHSVGNLETLILDSNPLACDCRLLWVFRRRWRLNFNRQQPTCATPEFVQGKEFKDFPDVLLPNYFTCRRARIRDRKAQQVFVDEGHTVQFVCRADGDPPPAILWLSPRKHLVSAKSNGRLTVFPDGTLEVRYAQVQDNGTYLCIAANAGGNDSMPAHLHVRSYSPDWPHQPNKTFAFISNQPGEGEANSTRATVPFPFDIKTLIIATTMGFISFLGVVLFCLVLLFLWSRGKGNTKHNIEIEYVPRKSDAGISSADAPRKFNMKMI

SEQ ID NO: 45477 - protein, 326 aa, Homo sapiens
  Payload ID: 9268
  Gene Symbol: LINGO1
  Gene Name: leucine rich repeat and Ig domain containing 1
  ENSP ID: ENSP00000453780
MVQLEQKVSKRMLAGGVRSMPSPLLACWQPILLLVLGSVLSGSATGCPPRCECSAQDRAVLCHRKRFVAVPEGIPTETRLLDLGKNRIKTLNQDEFASFPHLEELELNENIVSAVEPGAFNNLFNLRTLGLRSNRLKLIPLGVFTGLSNLTKLDISENKIVILLDYMFQDLYNLKSLEVGDNDLVYISHRAFSGLNSLEQLTLEKCNLTSIPTEALSHLHGLIVLRLRHLNINAIRDYSFKRLYRLKVLEISHWPYLDTMTPNCLYGLNLTSLSITHCNLTAVPYLAVRHLVYLRFLNLSYNPISTIEGSMLHELLRLQEIQLVGG

SEQ ID NO: 45478 - protein, 614 aa, Homo sapiens
  Payload ID: 9268
  Gene Symbol: LINGO1
  Gene Name: leucine rich repeat and Ig domain containing 1
  Uniprot ID: Q96FE5
  ENSP ID: ENSP00000453853
MLAGGVRSMPSPLLACWQPILLLVLGSVLSGSATGCPPRCECSAQDRAVLCHRKRFVAVPEGIPTETRLLDLGKNRIKTLNQDEFASFPHLEELELNENIVSAVEPGAFNNLFNLRTLGLRSNRLKLIPLGVFTGLSNLTKLDISENKIVILLDYMFQDLYNLKSLEVGDNDLVYISHRAFSGLNSLEQLTLEKCNLTSIPTEALSHLHGLIVLRLRHLNINAIRDYSFKRLYRLKVLEISHWPYLDTMTPNCLYGLNLTSLSITHCNLTAVPYLAVRHLVYLRFLNLSYNPISTIEGSMLHELLRLQEIQLVGGQLAVVEPYAFRGLNYLRVLNVSGNQLTTLEESVFHSVGNLETLILDSNPLACDCRLLWVFRRRWRLNFNRQQPTCATPEFVQGKEFKDFPDVLLPNYFTCRRARIRDRKAQQVFVDEGHTVQFVCRADGDPPPAILWLSPRKHLVSAKSNGRLTVFPDGTLEVRYAQVQDNGTYLCIAANAGGNDSMPAHLHVRSYSPDWPHQPNKTFAFISNQPGEGEANSTRATVPFPFDIKTLIIATTMGFISFLGVVLFCLVLLFLWSRGKGNTKHNIEIEYVPRKSDAGISSADAPRKFNMKMI

SEQ ID NO: 45479 - protein, 55 aa, Homo sapiens
  Payload ID: 9268
  Gene Symbol: LINGO1
  Gene Name: leucine rich repeat and Ig domain containing 1
  ENSP ID: ENSP00000454051
MLAGGVRSMPSPLLACWQPILLLVLGSVLSGSATGCPPRCECSAQDRAVLCHRKR

SEQ ID NO: 45480 - protein, 35 aa, Homo sapiens
  Payload ID: 9268
  Gene Symbol: LINGO1
  Gene Name: leucine rich repeat and Ig domain containing 1
  ENSP ID: ENSP00000454245
MLAGGVRSMPSPLLACWQPILLLVLGSVLSGSATG

SEQ ID NO: 45481 - protein, 125 aa, Homo sapiens
  Payload ID: 9268
  Gene Symbol: LINGO1
  Gene Name: leucine rich repeat and Ig domain containing 1
  ENSP ID: ENSP00000454465
MLAGGVRSMPSPLLACWQPILLLVLGSVLSGSATGCPPRCECSAQDRAVLCHRKRFVAVPEGIPTETRLLDLGKNRIKTLNQDEFASFPHLEELELNENIVSAVEPGAFNNLFNLRTLGLRSNRL

SEQ ID NO: 45482 - protein, 18 aa, Homo sapiens
  Payload ID: 9268
  Gene Symbol: LINGO1
  Gene Name: leucine rich repeat and Ig domain containing 1
  ENSP ID: ENSP00000454577
MLAGGVRSMPSPLLACWQ

SEQ ID NO: 45483 - protein, 72 aa, Homo sapiens
  Payload ID: 9268
  Gene Symbol: LINGO1
  Gene Name: leucine rich repeat and Ig domain containing 1
  ENSP ID: ENSP00000454687
MLAGGVRSMPSPLLACWQPILLLVLGSVLSGSATGCPPRCECSAQDRAVLCHRKRFVAVPEGIPTETRLLDL

SEQ ID NO: 45484 - protein, 178 aa, Homo sapiens
  Payload ID: 9268
  Gene Symbol: LINGO1
  Gene Name: leucine rich repeat and Ig domain containing 1
  ENSP ID: ENSP00000455605
MLAGGVRSMPSPLLACWQPILLLVLGSVLSGSATGCPPRCECSAQDRAVLCHRKRFVAVPEGIPTETRLLDLGKNRIKTLNQDEFASFPHLEELELNENIVSAVEPGAFNNLFNLRTLGLRSNRLKLIPLGVFTGLSNLTKLDISENKIVILLDYMFQDLYNLKSLEVGDNDLVYISH

SEQ ID NO: 45485 - protein, 11 aa, Homo sapiens
  Payload ID: 9268
  Gene Symbol: LINGO1
  Gene Name: leucine rich repeat and Ig domain containing 1
  ENSP ID: ENSP00000456516
MLAGGVRSMPS

SEQ ID NO: 45486 - protein, 4 aa, Homo sapiens
  Payload ID: 9268
  Gene Symbol: LINGO1
  Gene Name: leucine rich repeat and Ig domain containing 1
  ENSP ID: ENSP00000457101
MLAG

SEQ ID NO: 45487 - protein, 606 aa, Homo sapiens
  Payload ID: 9269
  Gene Symbol: LINGO2
  Gene Name: leucine rich repeat and Ig domain containing 2
  Uniprot ID: Q7L985
  ENSP ID: ENSP00000310126
MLHTAISCWQPFLGLAVVLIFMGSTIGCPARCECSAQNKSVSCHRRRLIAIPEGIPIETKILDLSKNRLKSVNPEEFISYPLLEEIDLSDNIIANVEPGAFNNLFNLRSLRLKGNRLKLVPLGVFTGLSNLTKLDISENKIVILLDYMFQDLHNLKSLEVGDNDLVYISHRAFSGLLSLEQLTLEKCNLTAVPTEALSHLRSLISLHLKHLNINNMPVYAFKRLFHLKHLEIDYWPLLDMMPANSLYGLNLTSLSVTNTNLSTVPFLAFKHLVYLTHLNLSYNPISTIEAGMFSDLIRLQELHIVGAQLRTIEPHSFQGLRFLRVLNVSQNLLETLEENVFSSPRALEVLSINNNPLACDCRLLWILQRQPTLQFGGQQPMCAGPDTIRERSFKDFHSTALSFYFTCKKPKIREKKLQHLLVDEGQTVQLECSADGDPQPVISWVTPRRRFITTKSNGRATVLGDGTLEIRFAQDQDSGMYVCIASNAAGNDTFTASLTVKGFASDRFLYANRTPMYMTDSNDTISNGTNANTFSLDLKTILVSTAMGCFTFLGVVLFCFLLLFVWSRGKGKHKNSIDLEYVPRKNNGAVVEGEVAGPRRFNMKMI

SEQ ID NO: 45488 - protein, 606 aa, Homo sapiens; identical to SEQ ID NO: 45487
  Payload ID: 9269
  Gene Symbol: LINGO2
  Gene Name: leucine rich repeat and Ig domain containing 2
  Uniprot ID: Q7L985
  ENSP ID: ENSP00000369328

SEQ ID NO: 45489 - protein, 606 aa, Homo sapiens; identical to SEQ ID NO: 45487
  Payload ID: 9269
  Gene Symbol: LINGO2
  Gene Name: leucine rich repeat and Ig domain containing 2
  Uniprot ID: Q7L985
  ENSP ID: ENSP00000479634

SEQ ID NO: 45490 - protein, 592 aa, Homo sapiens
  Payload ID: 9270
  Gene Symbol: LINGO3
  Gene Name: leucine rich repeat and Ig domain containing 3
  Uniprot ID: P0C6S8
  ENSP ID: ENSP00000467753
MTCWLCVLSLPLLLLPAAPPPAGGCPARCECTVQTRAVACTRRRLTAVPDGIPAETRLLELSRNRIRCLNPGDLAALPALEELDLSENAIAHVEPGAFANLPRLRVLRLRGNQLKLIPPGVFTRLDNLTLLDLSENKLVILLDYTFQDLHSLRRLEVGDNDLVFVSRRAFAGLLALEELTLERCNLTALSGESLGHLRSLGALRLRHLAIASLEDQNFRRLPGLLHLEIDNWPLLEEVAAGSLRGLNLTSLSVTHTNITAVPAAALRHQAHLTCLNLSHNPISTVPRGSFRDLVRLRELHLAGALLAVVEPQAFLGLRQIRLLNLSNNLLSTLEESTFHSVNTLETLRVDGNPLACDCRLLWIVQRRKTLNFDGRLPACATPAEVRGDALRNLPDSVLFEYFVCRKPKIRERRLQRVTATAGEDVRFLCRAEGEPAPTVAWVTPQHRPVTATSAGRARVLPGGTLEIQDARPQDSGTYTCVASNAGGNDTYFATLTVRPEPAANRTPGEAHNETLAALRAPLDLTTILVSTAMGCITFLGVVLFCFVLLFVWSRGRGQHKNNFSVEYSFRKVDGPAAAAGQGGARKFNMKMI

SEQ ID NO: 45491 - protein, 593 aa, Homo sapiens
  Payload ID: 9271
  Gene Symbol: LINGO4
  Gene Name: leucine rich repeat and Ig domain containing 4
  Uniprot ID: Q6UY18
  ENSP ID: ENSP00000357810
MDAATAPKQAWPPWPPLLFLLLLPGGSGGSCPAVCDCTSQPQAVLCGHRQLEAVPGGLPLDTELLDLSGNRLWGLQQGMLSRLSLLQELDLSYNQLSTLEPGAFHGLQSLLTLRLQGNRLRIMGPGVFSGLSALTLLDLRLNQIVLFLDGAFGELGSLQKLEVGDNHLVFVAPGAFAGLAKLSTLTLERCNLSTVPGLALARLPALVALRLRELDIGRLPAGALRGLGQLKELEIHLWPSLEALDPGSLVGLNLSSLAITRCNLSSVPFQALYHLSFLRVLDLSQNPISAIPARRLSPLVRLQELRLSGACLTSIAAHAFHGLTAFHLLDVADNALQTLEETAFPSPDKLVTLRLSGNPLTCDCRLLWLLRLRRHLDFGMSPPACAGPHHVQGKSLKEFSDILPPGHFTCKPALIRKSGPRWVIAEEGGHAVFSCSGDGDPAPTVSWMRPHGAWLGRAGRVRVLEDGTLEIRSVQLRDRGAYVCVVSNVAGNDSLRTWLEVIQVEPPNGTLSDPNITVPGIPGPFFLDSRGVAMVLAVGFLPFLTSVTLCFGLIALWSKGKGRVKHHMTFDFVAPRPSGDKNSGGNRVTAKLF

SEQ ID NO: 45492 - protein, 723 aa, Homo sapiens
  Payload ID: 9272
  Gene Symbol: LRSAM1
  Gene Name: leucine rich repeat and sterile alpha motif containing 1
  Uniprot ID: Q6UWE0
  ENSP ID: ENSP00000300417
MPLFFRKRKPSEEARKRLEYQMCLAKEAGADDILDISKCELSEIPFGAFATCKVLQKKVLIVHTNHLTSLLPKSCSLLSLATIKVLDLHDNQLTALPDDLGQLTALQVLNVERNQLMQLPRSIGNLTQLQTLNVKDNKLKELPDTVGELRSLRTLNISGNEIQRLPQMLAHVRTLEMLSLDASAMVYPPREVCGAGTAAILQFLCKESGLEYYPPSQYLLPILEQDGIENSRDSPDGPTDRFSREELEWQNRFSDYEKRKEQKMLEKLEFERRLELGQREHTQLLQQSSSQKDEILQTVKEEQSRLEQGLSEHQRHLNAERQRLQEQLKQTEQNISSRIQKLLQDNQRQKKSSEILKSLENERIRMEQLMSITQEETESLRRRDVASAMQQMLTESCKNRLIQMAYESQRQNLVQQACSSMAEMDERFQQILSWQQMDQNKAISQILQESAMQKAAFEALQVKKDLMHRQIRSQIKLIETELLQLTQLELKRKSLDTESLQEMISEQRWALSSLLQQLLKEKQQREEELREILTELEAKSETRQENYWLIQYQRLLNQKPLSLKLQEEGMERQLVALLEELSAEHYLPIFAHHRLSLDLLSQMSPGDLAKVGVSEAGLQHEILRRVQELLDAARIQPELKPPMGEVVTPTAPQEPPESVRPSAPPAELEVQASECVVCLEREAQMIFLNCGHVCCCQQCCQPLRTCPLCRQDIAQRLRIYHSS

SEQ ID NO: 45493 - protein, 723 aa, Homo sapiens; identical to SEQ ID NO: 45492
  Payload ID: 9272
  Gene Symbol: LRSAM1
  Gene Name: leucine rich repeat and sterile alpha motif containing 1
  Uniprot ID: Q6UWE0
  ENSP ID: ENSP00000322937

SEQ ID NO: 45494 - protein, 723 aa, Homo sapiens; identical to SEQ ID NO: 45492
  Payload ID: 9272
  Gene Symbol: LRSAM1
  Gene Name: leucine rich repeat and sterile alpha motif containing 1
  Uniprot ID: Q6UWE0
  ENSP ID: ENSP00000362419

SEQ ID NO: 45495 - protein, 696 aa, Homo sapiens
  Payload ID: 9272
  Gene Symbol: LRSAM1
  Gene Name: leucine rich repeat and sterile alpha motif containing 1
  Uniprot ID: Q6UWE0
  ENSP ID: ENSP00000362421
MPLFFRKRKPSEEARKRLEYQMCLAKEAGADDILDISKCELSEIPFGAFATCKVLQKKVLIVHTNHLTSLLPKSCSLLSLATIKVLDLHDNQLTALPDDLGQLTALQVLNVERNQLMQLPRSIGNLTQLQTLNVKDNKLKELPDTVGELRSLRTLNISGNEIQRLPQMLAHVRTLEMLSLDASAMVYPPREVCGAGTAAILQFLCKESGLEYYPPSQYLLPILEQDGIENSRDSPDGPTDRFSREELEWQNRFSDYEKRKEQKMLEKLEFERRLELGQREHTQLLQQSSSQKDEILQTVKEEQSRLEQGLSEHQRHLNAERQRLQEQLKQTEQNISSRIQKLLQDNQRQKKSSEILKSLENERIRMEQLMSITQEETESLRRRDVASAMQQMLTESCKNRLIQMAYESQRQNLVQQACSSMAEMDERFQQILSWQQMDQNKAISQILQESAMQKAAFEALQVKKDLMHRQIRSQEMISEQRWALSSLLQQLLKEKQQREEELREILTELEAKSETRQENYWLIQYQRLLNQKPLSLKLQEEGMERQLVALLEELSAEHYLPIFAHHRLSLDLLSQMSPGDLAKVGVSEAGLQHEILRRVQELLDAARIQPELKPPMGEVVTPTAPQEPPESVRPSAPPAELEVQASECVVCLEREAQMIFLNCGHVCCCQQCCQPLRTCPLCRQDIAQRLRIYHSS

SEQ ID NO: 45496 - protein, 154 aa, Homo sapiens
  Payload ID: 9273
  Gene Symbol: LRRC1
  Gene Name: leucine rich repeat containing 1
  ENSP ID: ENSP00000359919
MFHCIPLWRCNRHVESIDKRHCSLVYVPEEIYRYARSLEELLLDANQLRELPEQFFQLVKLRKLGLSDNEIQRLPPEIANFMQLVELDVSRNEIPEIPESISFCKALQVADFSGNPLTRLPESFPELQNLTCLSVNDISLQSLPENIGKQKTTS

SEQ ID NO: 45497 - protein, 524 aa, Homo sapiens
  Payload ID: 9273
  Gene Symbol: LRRC1
  Gene Name: leucine rich repeat containing 1
  Uniprot ID: Q9BTT6
  ENSP ID: ENSP00000359925
MFHCIPLWRCNRHVESIDKRHCSLVYVPEEIYRYARSLEELLLDANQLRELPEQFFQLVKLRKLGLSDNEIQRLPPEIANFMQLVELDVSRNEIPEIPESISFCKALQVADFSGNPLTRLPESFPELQNLTCLSVNDISLQSLPENIGNLYNLASLELRENLLTYLPDSLTQLRRLEELDLGNNEIYNLPESIGALLHLKDLWLDGNQLSELPQEIGNLKNLLCLDVSENRLERLPEEISGLTSLTDLVISQNLLETIPDGIGKLKKLSILKVDQNRLTQLPEAVGECESLTELVLTENQLLTLPKSIGKLKKLSNLNADRNKLVSLPKEIGGCCSLTVFCVRDNRLTRIPAEVSQATELHVLDVAGNRLLHLPLSLTALKLKALWLSDNQSQPLLTFQTDTDYTTGEKILTCVLLPQLPSEPTCQENLPRCGALENLVNDVSDEAWNERAVNRVSAIRFVEDEKDEEDNETRTLLRRATPHPGELKHMKKTVENLRNDMNAAKGLDSNKNEVNHAIDRVTTSV

SEQ ID NO: 45498 - protein, 197 aa, Homo sapiens
  Payload ID: 9273
  Gene Symbol: LRRC1
  Gene Name: leucine rich repeat containing 1
  Uniprot ID: Q9BTT6
  ENSP ID: ENSP00000435217
MFHCIPLWRCNRHVESIDKRHCSLVYVPEEIYRYARSLEELLLDANQLRELPEQFFQLVKLRKLGLSDNEIQRLPPEIANFMQLVELDVSRNEIPEIPESISFCKALQVADFSGNPLTRLPESFPELQNLTCLSVNDISLQSLPENIGNLYNLASLELRENLLTYLPDSLTQLRRLEELDLGNNEIYNLNQLEPSYI

SEQ ID NO: 45499 - protein, 277 aa, Homo sapiens
  Payload ID: 9274
  Gene Symbol: LRRC10
  Gene Name: leucine rich repeat containing 10
  Uniprot ID: Q5BKY1
  ENSP ID: ENSP00000355166
MGNTIRALVAFIPADRCQNYVVRDLREMPLDKMVDLSGSQLRRFPLHVCSFRELVKLYLSDNHLNSLPPELGQLQNLQILALDFNNFKALPQVVCTLKQLCILYLGNNKLCDLPSELSLLQNLRTLWIEANCLTQLPDVVCELSLLKTLHAGSNALRLLPGQLRRLQELRTIWLSGNRLTDFPTVLLHMPFLEVIDVDWNSIRYFPSLAHLSSLKLVIYDHNPCRNAPKVAKGVRRVGRWAEETPEPDPRKARRYALVREESQELQAPVPLLPPTNS

SEQ ID NO: 45500 - protein, 292 aa, Homo sapiens
  Payload ID: 9275
  Gene Symbol: LRRC10B
  Gene Name: leucine rich repeat containing 10B
  Uniprot ID: A6NIK2
  ENSP ID: ENSP00000367315
MGIAESTPDELPSDAEEQLRSGDQQLELSGRRLRRLPSAVCALSRLQKLYVSGTGLRELPEEIEELRELRILALDFNKLERLPDGLCRLPRLTRLYLGGNRLLALPADFAQLQSLRCLWIEGNFLRRFPRPLLRLVALQSLQMGDNRLRALPAELPRMTGLRGLWLYGNRFEEFPPALLRMGRLHILDLDRNRLGGFPDLHPLRALRVFSYDHNPVTGPPRVADTVFLVGEGAVERMAERDEPTPRPPPRRPARAFEDEEEEDLLIGGAGSRALGAPGGSFRALEAAPGLGT

SEQ ID NO: 45501 - protein, 493 aa, Homo sapiens
  Payload ID: 9276
  Gene Symbol: LRRC14
  Gene Name: leucine rich repeat containing 14
  Uniprot ID: Q15048
  ENSP ID: ENSP00000292524
MHTLVFLSTRQVLQCQPAACQALPLLPRELFPLLFKVAFMDKKTVVLRELVHTWPFPLLSFQQLLQECAHCSRALLQERPSTESMQAVILGLTARLHTSEPGASTQPLCRKHALRVLDMTGLLDDGVEQDPGTMSMWDCTAAVARTCIAQQQGGAAEPGPAPIPVEVRVDLRVNRASYAFLREALRSSVGSPLRLCCRDLRAEDLPMRNTVALLQLLDAGCLRRVDLRFNNLGLRGLSVIIPHVARFQHLASLRLHYVHGDSRQPSVDGEDNFRYFLAQMGRFTCLRELSMGSSLLSGRLDQLLSTLQSPLESLELAFCALLPEDLRFLARSPHAAHLKKLDLSGNDLSGSQLAPFQGLLQASAATLLHLELTECQLADTQLLATLPILTQCASLRYLGLYGNPLSMAGLKELLRDSVAQAELRTVVHPFPVDCYEGLPWPPPASVLLEASINEEKFARVEAELHQLLLASGRAHVLWTTDIYGRLAADYFSL

SEQ ID NO: 45502 - protein, 159 aa, Homo sapiens
  Payload ID: 9276
  Gene Symbol: LRRC14
  Gene Name: leucine rich repeat containing 14
  ENSP ID: ENSP00000434738
MHTLVFLSTRQVLQCQPAACQALPLLPRELFPLLFKVAFMDKKTVVLRELVHTWPFPLLSFQQLLQECAHCSRALLQERPSTESMQAVILGLTARLHTSEPGASTQPLCRKHALRVLDMTGLLDDGVEQDPGTMSMWDCTAAVARTCIAQQQGGAAEPG

SEQ ID NO: 45503 - protein, 493 aa, Homo sapiens; identical to SEQ ID NO: 45501
  Payload ID: 9276
  Gene Symbol: LRRC14
  Gene Name: leucine rich repeat containing 14
  Uniprot ID: Q15048
  ENSP ID: ENSP00000434768

SEQ ID NO: 45504 - protein, 86 aa, Homo sapiens
  Payload ID: 9276
  Gene Symbol: LRRC14
  Gene Name: leucine rich repeat containing 14
  ENSP ID: ENSP00000435985
MHTLVFLSTRQVLQCQPAACQALPLLPRELFPLLFKVAFMDKKTVVLRELVHTWPFPLLSFQQLLQECAHCSRALLQERPSTESMQ

SEQ ID NO: 45505 - protein, 301 aa, Homo sapiens
  Payload ID: 9276
  Gene Symbol: LRRC14
  Gene Name: leucine rich repeat containing 14
  ENSP ID: ENSP00000436452
MHTLVFLSTRQVLQCQPAACQALPLLPRELFPLLFKVAFMDKKTVVLRELVHTWPFPLLSFQQLLQECAHCSRALLQERPSTESMQAVILGLTARLHTSEPGASTQPLCRKHALRVLDMTGLLDDGVEQDPGTMSMWDCTAAVARTCIAQQQGGAAEPGPAPIPVEVRVDLRVNRASYAFLREALRSSVGSPLRLCCRDLRAEDLPMRNTVALLQLLDAGCLRRVDLRFNNLGLRGLSVIIPHVARFQHLASLRLHYVHGDSRQPSVDGEDNFRYFLAQMGRFTCLRELSMGSSLLSGRLD

SEQ ID NO: 45506 - protein, 514 aa, Homo sapiens
  Payload ID: 9277
  Gene Symbol: LRRC14B
  Gene Name: leucine rich repeat containing 14B
  Uniprot ID: A6NHZ5
  ENSP ID: ENSP00000327675
MDTMRSLRFISAEALVSHPQVARQSLDSVAHNLYPLLFKASYLLEQAEVTRAVLGRWPLEEFRLGALLGPGADHPQDLRDRTCRACLEALVRGLADHVLQDRSRRRLRVADLTGIRDVQVQRCPCGRALGRWGRTQLLARTCCELQAEPLAAGRPVEVLADLFVTEGNFEAVVQALRPAGPAPLRVHCPSFRADSLSPSQLLHVLRLAGPGALRKLEVVHNVRLHAGHVQQLLAQVGFPRLASLTLPTKAFDAPPTYASTPDGEDPLLASIARELSKMAQLTELSVAFSTLTGKIPTLLGPLQTPLRVLDLANCALNHTDMAFLADCAHAAHLEVLDLSGHNLVSLYPSTFFRLLSQASRTLRILTLEECGIVDSHVGMLILGLSPCHRLRQLKFLGNPLSARALRRLFTALCELPELRCIEFPVPKDCYPEGAAYPQDELAMSKFNQQKYDEIAEELRAVLLRADREDIQVSTPLFGSFDPDIQETSNELGAFLLQAFKTALENFSRALKQIE

SEQ ID NO: 45507 - protein, 581 aa, Homo sapiens
  Payload ID: 9278
  Gene Symbol: LRRC15
  Gene Name: leucine rich repeat containing 15
  Uniprot ID: Q8TF66
  ENSP ID: ENSP00000306276
MPLKHYLLLLVGCQAWGAGLAYHGCPSECTCSRASQVECTGARIVAVPTPLPWNAMSLQILNTHITELNESPFLNISALIALRIEKNELSRITPGAFRNLGSLRYLSLANNKLQVLPIGLFQGLDSLESLLLSSNQLLQIQPAHFSQCSNLKELQLHGNHLEYIPDGAFDHLVGLTKLNLGKNSLTHISPRVFQHLGNLQVLRLYENRLTDIPMGTFDGLVNLQELALQQNQIGLLSPGLFHNNHNLQRLYLSNNHISQLPPSVFMQLPQLNRLTLFGNSLKELSPGIFGPMPNLRELWLYDNHISSLPDNVFSNLRQLQVLILSRNQISFISPGAFNGLTELRELSLHTNALQDLDGNVFRMLANLQNISLQNNRLRQLPGNIFANVNGLMAIQLQNNQLENLPLGIFDHLGKLCELRLYDNPWRCDSDILPLRNWLLLNQPRLGTDTVPVCFSPANVRGQSLIIINVNVAVPSVHVPEVPSYPETPWYPDTPSYPDTTSVSSTTELTSPVEDYTDLTTIQVTDDRSVWGMTQAQSGLAIAAIVIGIVALACSLAACVGCCCCKKRSQAVLMQMKAPNEC

SEQ ID NO: 45508 - protein, 587 aa, Homo sapiens
  Payload ID: 9278
  Gene Symbol: LRRC15
  Gene Name: leucine rich repeat containing 15
  Uniprot ID: Q8TF66
  ENSP ID: ENSP00000413707
MPLDKAMPLKHYLLLLVGCQAWGAGLAYHGCPSECTCSRASQVECTGARIVAVPTPLPWNAMSLQILNTHITELNESPFLNISALIALRIEKNELSRITPGAFRNLGSLRYLSLANNKLQVLPIGLFQGLDSLESLLLSSNQLLQIQPAHFSQCSNLKELQLHGNHLEYIPDGAFDHLVGLTKLNLGKNSLTHISPRVFQHLGNLQVLRLYENRLTDIPMGTFDGLVNLQELALQQNQIGLLSPGLFHNNHNLQRLYLSNNHISQLPPSVFMQLPQLNRLTLFGNSLKELSPGIFGPMPNLRELWLYDNHISSLPDNVFSNLRQLQVLILSRNQISFISPGAFNGLTELRELSLHTNALQDLDGNVFRMLANLQNISLQNNRLRQLPGNIFANVNGLMAIQLQNNQLENLPLGIFDHLGKLCELRLYDNPWRCDSDILPLRNWLLLNQPRLGTDTVPVCFSPANVRGQSLIIINVNVAVPSVHVPEVPSYPETPWYPDTPSYPDTTSVSSTTELTSPVEDYTDLTTIQVTDDRSVWGMTQAQSGLAIAAIVIGIVALACSLAACVGCCCCKKRSQAVLMQMKAPNEC

SEQ ID NO: 45509 - protein, 1371 aa, Homo sapiens
  Payload ID: 9279
  Gene Symbol: LRRC16A
  Gene Name: leucine rich repeat containing 16A
  Uniprot ID: Q5VZK9
  ENSP ID: ENSP00000331983
MTEESSDVPRELIESIKDVIGRKIKISVKKKVKLEVKGDKVENKVLVLTSCRAFLVTARIPTKLELTFSYLEIHGVVCSKSAQMIVETEKCSISMKMASPEDVSEVLAHIGTCLRKIFPGLSPVRIMKKVSMEPSERLASLQALWDSQTVAEQGPCGGFSQMYACVCDWLGFSYREEVQWDVDTIYLTQDTRELNLQDFSHLDHRDLIPIIAALEYNQWFTKLSSKDLKLSTDVCEQILRVVSRSNRLEELVLENAGLRTDFAQKLASALAHNPNSGLHTINLAGNPLEDRGVSSLSIQFAKLPKGLKHLNLSKTSLSPKGVNSLSQSLSANPLTASTLVHLDLSGNVLRGDDLSHMYNFLAQPNAIVHLDLSNTECSLDMVCGALLRGCLQYLAVLNLSRTVFSHRKGKEVPPSFKQFFSSSLALMHINLSGTKLSPEPLKALLLGLACNHNLKGVSLDLSNCELRSGGAQVLEGCIAEIHNITSLDISDNGLESDLSTLIVWLSKNRSIQHLALGKNFNNMKSKNLTPVLDNLVQMIQDEESPLQSLSLADSKLKTEVTIIINALGSNTSLTKVDISGNGMGDMGAKMLAKALQINTKLRTVIWDKNNITAQGFQDIAVAMEKNYTLRFMPIPMYDASQALKTNPEKTEDALQKIENYLLRNHETRKYLQEQAYRLQQGIVTSTTQQMIDRICVKVQDHLNSLRNCGGDAIQEDLKSAERLMRDAKNSKTLLPNLYHVGGASWAGASGLLSSPIQETLESMAGEVTRVVDEQLKALLESMVDAAENLCPNVMKKAHIRQDLIHASTEKISIPRTFVKNVLLEQSGIDILNKISEVKLTVASFLSDRIVDEILDALSHCHHKLADHFSRRGKTLPQQESLEIELAEEKPVKRSIITVEELTEIERLEDLDTCMMTPKSKRKSIHSRMLRPVSRAFEMEFDLDKALEEVPIHIEDPPFPSLRQEKRSSGFISELPSEEGKKLEHFTKLRPKRNKKQQPTQAAVCAANIVSQDGEQNGLMGRVDEGVDEFFTKKVTKMDSKKWSTRGSESHELNEGGDEKKKRDSRKSSGFLNLIKSRSKSERPPTILMTEEPSSPKGAVRSPPVDCPRKDTKAAEHNGNSERIEEIKTPDSFEESQGEEIGKVERSDSKSSPQAGRRYGVQVMGSGLLAEMKAKQEKRAACAQKKLGNDAVSQDSSSPALSGVERSDGGGAVPKLHPGLPENRFGLGTPEKNTKAEPKAEAGSRSRSSSSTPTSPKPLLQSPKPSLAARPVIPQKPRTASRPDDIPDSPSSPKVALLPPVLKKVPSDKERDGQSSPQPSPRTFSQEVSRRSWGQQAQEYQEQKQRSSSKDGHQGSKSNDSGEEAEKEFIFV

SEQ ID NO: 45510 - protein, 932 aa, Homo sapiens
  Payload ID: 9279
  Gene Symbol: LRRC16A
  Gene Name: leucine rich repeat containing 16A
  ENSP ID: ENSP00000489114
EVPPSFKQFFSSSLALMHINLSGTKLSPEPLKALLLGLACNHNLKGVSLDLSNCELGHCLRSGGAQVLEGCIAEIHNITSLDISDNGLESDLSTLIVWLSKNRSIQHLALGKNFNNMKSKNLTPVLDNLVQMIQDEESPLQSLSLADSKLKTEVTIIINALGSNTSLTKVDISGNGMGDMGAKMLAKALQINTKLRTVIWDKNNITAQGFQDIAVAMEKNYTLRFMPIPMYDASQALKTNPEKTEDALQKIENYLLRNHETRKYLQEQAYRLQQGIVTSTTQQMIDRICVKVQDHLNSLRNCGGDAIQEDLKSAERLMRDAKNSKTLLPNLYHVGGASWAGASGLLSSPIQETLESMAGEVTRVVDEQLKALLESMVDAAENLCPNVMKKAHIRQDLIHASTEKISIPRTFVKNVLLEQSGIDILNKISEVKLTVASFLSDRIVDEILDALSHCHHKLADHFSRRGKTLPQQESLEIELAEEKPVKRSIITVEELTEIERLEDLDTCMTLCCTSMTPKSKRKSIHSRMLRPVSRAFEMEFDLDKALEEVPIHIEDPPFPSLRQEKRSSGFISELPSEEGKKLEHFTKLRPKRNKKQQPTQAAVCAANIVSQDGEQNGLMGRVDEGVDEFFTKKVTKMDSKKWSTRGSESHELNEGGDEKKKRDSRKSSGFLNLIKSRSKSERPPTILMTEEPSSPKGAVRSPPVDCPRKDTKAAEHNGNSERIEEIKTPDSFEESQGEEIGKVERSDSKSSPQAGRRYGVQVMGSGLLAEMKAKQEKRAACAQKKLGNDAVSQDSSSPALSGVERSDGGGAVPKLHPGLPENRFGLGTPEKNTKAEPKAEAGSRSRSSSSTPTSPKPLLQSPKPSLAARPVIPQKPRTASRPDDIPDSPSSPKVALLPPVLKKVPSDKERDGQSSPQPSPRTFSQEACPTNF

SEQ ID NO: 45511 - protein, 196 aa, Homo sapiens
  Payload ID: 9279
  Gene Symbol: LRRC16A
  Gene Name: leucine rich repeat containing 16A
  ENSP ID: ENSP00000489403
MIVETEKCSISMKMASPEDVSEVLAHIGTCLRKIFPGLSPVRIMKKVSMEPSERLASLQALWDSQTVAEQGPCGGFSQMYACVCDWLGFSYREEVQWDVDTIYLTQDTRELNLQDFSHLDHRKSRIAVWSLKSSSQLNRPGKKYTSWIYLLFAQPGTTEDGEAGSAVSVVVADGPKASSSQAIFFFSCLEQFSFFL

SEQ ID NO: 45512 - protein, 1372 aa, Homo sapiens
  Payload ID: 9280
  Gene Symbol: LRRC16B
  Gene Name: leucine rich repeat containing 16B
  Uniprot ID: Q8ND23
  ENSP ID: ENSP00000340467
MAKPSVELTRELQDSIRRCLSQGAVLQQHHVKLETKPKKFEDRVLALTSWRLHLFLLKVPAKVESSFNVLEIRAFNTLSQNQILVETERGMVSMRLPSAESVDQVTRHVSSALSKVCPGPGCLIRRGNADTPEGPRDTSPNSETSTSTTHSVCGGFSETYAALCDYNGLHCREEVQWDVDTIYHAEDNREFNLLDFSHLESRDLALMVAALAYNQWFTKLYCKDLRLGSEVLEQVLHTLSKSGSLEELVLDNAGLKTDFVQKLAGVFGENGSCVLHALTLSHNPIEDKGFLSLSQQLLCFPSGLTKLCLAKTAISPRGLQALGQTFGANPAFASSLRYLDLSKNPGLLATDEANALYSFLAQPNALVHLDLSGTDCVIDLLLGALLHGCCSHLTYLNLARNSCSHRKGREAPPAFKQFFSSAYTLSHVNLSATKLPLEALRALLQGLSLNSHLSDLHLDLSSCELRSAGAQALQEQLGAVTCVGSLDLSDNGFDSDLLTLVPALGKNKSLKHLFLGKNFNVKAKTLEEILHKLVQLIQEEDCSLQSLSVADSRLKLRTSILINALGSNTCLAKVDLSGNGMEDIGAKMLSKALQINSSLRTILWDRNNTSALGFLDIARALESNHTLRFMSFPVSDISQAYRSAPERTEDVWQKIQWCLVRNNHSQTCPQEQAFRLQQGLVTSSAEQMLQRLCGRVQEEVRALRLCPLEPVQDELLYARDLIKDAKNSRALFPSLYELGHVLANDGPVRQRLESVASEVSKAVDKELQVILESMVSLTQELCPVAMRVAEGHNKMLSNVAERVTVPRNFIRGALLEQAGQDIQNKLDEVKLSVVTYLTSSIVDEILQELYHSHKSLARHLTQLRTLSDPPGCPGQGQDLSSRGRGRNHDHEETTDDELGTNIDTMAIKKQKRCRKIRPVSAFISGSPQDMESQLGNLGIPPGWFSGLGGSQPTASGSWEGLSELPTHGYKLRHQTQGRPRPPRTTPPGPGRPSMPAPGTRQENGMATRLDEGLEDFFSRRVLEESSSYPRTLRTVRPGLSEAPLPPLQKKRRRGLFHFRRPRSFKGDRGPGSPTTGLLLPPPPPPPPTQESPPSPDPPSLGNNSSPCWSPEEESSLLPGFGGGRGPSFRRKMGTEGSEPGEGGPAPGTAQQPRVHGVALPGLERAKGWSFDGKREGPGPDQEGSTQAWQKRRSSDDAGPGSWKPPPPPQSTKPSFSAMRRAEATWHIAEESAPNHSCQSPSPASQDGEEEKEGTLFPERTLPARNAKLQDPALAPWPPKPVAVPRGRQPPQEPGVREEAEAGDAAPGVNKPRLRLSSQQDQEEPEVQGPPDPGRRTAPLKPKRTRRAQSCDKLEPDRRRPPDPTGTSEPGTD

SEQ ID NO: 45513 - protein, 313 aa, Homo sapiens
  Payload ID: 9281
  Gene Symbol: LRRC17
  Gene Name: leucine rich repeat containing 17
  Uniprot ID: Q8N6Y2
  ENSP ID: ENSP00000249377
MRVVTIVILLCFCKAAELRKASPGSVRSRVNHGRAGGGRRGSNPVKRYAPGLPCDVYTYLHEKYLDCQERKLVYVLPGWPQDLLHMLLARNKIRTLKNNMFSKFKKLKSLDLQQNEISKIESEAFFGLNKLTTLLLQHNQIKVLTEEVFIYTPLLSYLRLYDNPWHCTCEIETLISMLQIPRNRNLGNYAKCESPQEQKNKKLRQIKSEQLCNEEEKEQLDPKPQVSGRPPVIKPEVDSTFCHNYVFPIQTLDCKRKELKKVPNNIPPDIVKLDLSYNKINQLRPKEFEDVHELKKLNLSSNGIEFIDPGSLR

SEQ ID NO: 45514 - protein, 441 aa, Homo sapiens
  Payload ID: 9281
  Gene Symbol: LRRC17
  Gene Name: leucine rich repeat containing 17
  Uniprot ID: Q8N6Y2
  ENSP ID: ENSP00000344242
MRVVTIVILLCFCKAAELRKASPGSVRSRVNHGRAGGGRRGSNPVKRYAPGLPCDVYTYLHEKYLDCQERKLVYVLPGWPQDLLHMLLARNKIRTLKNNMFSKFKKLKSLDLQQNEISKIESEAFFGLNKLTTLLLQHNQIKVLTEEVFIYTPLLSYLRLYDNPWHCTCEIETLISMLQIPRNRNLGNYAKCESPQEQKNKKLRQIKSEQLCNEEEKEQLDPKPQVSGRPPVIKPEVDSTFCHNYVFPIQTLDCKRKELKKVPNNIPPDIVKLDLSYNKINQLRPKEFEDVHELKKLNLSSNGIEFIDPAAFLGLTHLEELDLSNNSLQNFDYGVLEDLYFLKLLWLRDNPWRCDYNIHYLYYWLKHHYNVHFNGLECKTPEEYKGWSVGKYIRSYYEECPKDKLPAYPESFDQDTEDDEWEKKHRDHTAKKQSVIITIVG

SEQ ID NO: 45515 - protein, 104 aa, Homo sapiens
  Payload ID: 9281
  Gene Symbol: LRRC17
  Gene Name: leucine rich repeat containing 17
  ENSP ID: ENSP00000394194
MRVVTIVILLCFCKAAELRKASPGSVRSRVNHGRAGGGRRGSNPVKRYAPGLPCDVYTYLHEKYLDCQERKLVYVLPGWPQDLLHMLLARNKIRTLKNNMFSKF

SEQ ID NO: 45516 - protein, 261 aa, Homo sapiens
  Payload ID: 9282
  Gene Symbol: LRRC18
  Gene Name: leucine rich repeat containing 18
  Uniprot ID: Q8N456
  ENSP ID: ENSP00000298124
MVKGEKGPKGKKITLKVARNCIKITFDGKKRLDLSKMGITTFPKCILRLSDMDELDLSRNLIRKIPDSISKFQNLRWLDLHSNYIDKLPESIGQMTSLLYLNVSNNRLTSNGLPVELKQLKNIRAVNLGLNHLDSVPTTLGALKELHEVGLHDNLLNNIPVSISKLPKLKKLNIKRNPFPKPGESEIFIDSIRRLENLYVVEEKDLCAACLRKCQNARDNLNRIKNMATTTPRKTIFPNLISPNSMAKDSWEDWRIRLTSS

SEQ ID NO: 45517 - protein, 261 aa, Homo sapiens; identical to SEQ ID NO: 45516
  Payload ID: 9282
  Gene Symbol: LRRC18
  Gene Name: leucine rich repeat containing 18
  Uniprot ID: Q8N456
  ENSP ID: ENSP00000363275

SEQ ID NO: 45518 - protein, 370 aa, Homo sapiens
  Payload ID: 9283
  Gene Symbol: LRRC19
  Gene Name: leucine rich repeat containing 19
  Uniprot ID: Q9H756
  ENSP ID: ENSP00000369395
MKVTGITILFWPLSMILLSDKIQSSKREVQCNFTEKNYTLIPADIKKDVTILDLSYNQITLNGTDTRVLQTYFLLTELYLIENKVTILHNNGFGNLSSLEILNICRNSIYVIQQGAFLGLNKLKQLYLCQNKIEQLNADVFVPLRSLKLLNLQGNLISYLDVPPLFHLELITLYGNLWNCSCSLFNLQNWLNTSNVTLENENITMCSYPNSLQSYNIKTVPHKAECHSKFPSSVTEDLYIHFQPISNSIFNSSSNNLTRNSEHEPLGKSWAFLVGVVVTVLTTSLLIFIAIKCPIWYNILLSYNHHRLEEHEAETYEDGFTGNPSSLSQIPETNSEETTVIFEQLHSFVVDDDGFIEDKYIDIHELCEEN

SEQ ID NO: 45519 - protein, 371 aa, Homo sapiens
  Payload ID: 9284
  Gene Symbol: LRRC2
  Gene Name: leucine rich repeat containing 2
  Uniprot ID: Q9BYS8
  ENSP ID: ENSP00000296144
MGHKVVVFDISVIRALWETRVKKHKAWQKKEVERLEKSALEKIKEEWNFVAECRRKGIPQAVYCKNGFIDTSVRLLDKIERNTLTRQSSLPKDRGKRSSAFVFELSGEHWTELPDSLKEQTHLREWYISNTLIQIIPTYIQLFQAMRILDLPKNQISHLPAEIGCLKNLKELNVGFNYLKSIPPELGDCENLERLDCSGNLELMELPFELSNLKQVTFVDISANKFSSVPICVLRMSNLQWLDISSNNLTDLPQDIDRLEELQSFLLYKNKLTYLPYSMLNLKKLTLLVVSGDHLVELPTALCDSSTPLKFVSLMDNPIDNAQCEDGNEIMESERDRQHFDKEVMKAYIEDLKERESVPSYTTKVSFSLQL

SEQ ID NO: 45520 - protein, 371 aa, Homo sapiens; identical to SEQ ID NO: 45519
  Payload ID: 9284
  Gene Symbol: LRRC2
  Gene Name: leucine rich repeat containing 2
  Uniprot ID: Q9BYS8
  ENSP ID: ENSP00000379241

SEQ ID NO: 45521 - protein, 184 aa, Homo sapiens
  Payload ID: 9285
  Gene Symbol: LRRC20
  Gene Name: leucine rich repeat containing 20
  Uniprot ID: Q8TCA0
  ENSP ID: ENSP00000348043
MLKKMGEAVARVARKVNETVESGSDTLDLAECKLVSFPIGIYKVLRNVSGQIHLITLANNELKSLTSKFMTTFSQLRELHLEGNFLHRLPSEVSALQHLKAIDLSRNQFQDFPEQLTALPALETINLEENEIVDVPVEKLAAMPALRSINLRFNPLNAEVRVIAPPLIKFDMLMSPEGARAPLP

SEQ ID NO: 45522 - protein, 128 aa, Homo sapiens
  Payload ID: 9285
  Gene Symbol: LRRC20
  Gene Name: leucine rich repeat containing 20
  Uniprot ID: Q8TCA0
  ENSP ID: ENSP00000350255
MLKKMGEAVARVARKVNETVESGSDTLDLAECKLVSFPIGIYKVLRNVSGQIHLITLANNELKSLTSKFMTTFSQLRDVPVEKLAAMPALRSINLRFNPLNAEVRVIAPPLIKFDMLMSPEGARAPLP

SEQ ID NO: 45523 - protein, 134 aa, Homo sapiens
  Payload ID: 9285
  Gene Symbol: LRRC20
  Gene Name: leucine rich repeat containing 20
  Uniprot ID: Q8TCA0
  ENSP ID: ENSP00000350860
MLKKMGEAVARVARKVNETVESGSDTLELHLEGNFLHRLPSEVSALQHLKAIDLSRNQFQDFPEQLTALPALETINLEENEIVDVPVEKLAAMPALRSINLRFNPLNAEVRVIAPPLIKFDMLMSPEGARAPLP

SEQ ID NO: 45524 - protein, 184 aa, Homo sapiens; identical to SEQ ID NO: 45521
  Payload ID: 9285
  Gene Symbol: LRRC20
  Gene Name: leucine rich repeat containing 20
  Uniprot ID: Q8TCA0
  ENSP ID: ENSP00000362321

SEQ ID NO: 45525 - protein, 115 aa, Homo sapiens
  Payload ID: 9285
  Gene Symbol: LRRC20
  Gene Name: leucine rich repeat containing 20
  ENSP ID: ENSP00000378457
MTTFSQLRELHLEGNFLHRLPSEVSALQHLKAIDLSRNQFQDFPEQLTALPALETINLEENEIVDVPVEKLAAMPALRSINLRFNPLNAEVRVIAPPLIKFDMLMSPEGARAPLP

SEQ ID NO: 45526 - protein, 134 aa, Homo sapiens; identical to SEQ ID NO: 45523
  Payload ID: 9285
  Gene Symbol: LRRC20
  Gene Name: leucine rich repeat containing 20
  Uniprot ID: Q8TCA0
  ENSP ID: ENSP00000378458

SEQ ID NO: 45527 - protein, 174 aa, Homo sapiens
  Payload ID: 9285
  Gene Symbol: LRRC20
  Gene Name: leucine rich repeat containing 20
  ENSP ID: ENSP00000413745
MLKKMGEAVARVARKVNETVESGSDTLDLAECKLVSFPIGIYKVLRNVSGQIHLITLANNELKSLTSKFMTTFSQLRELHLEGNFLHRLPSEVSALQHLKAIDLSRNQFQDFPEQLTALPALETINLEENEIVDVPVEKLAAMPALRSINLRFNPLNAEVRVIAPPLIKFDMLM

SEQ ID NO: 45528 - protein, 343 aa, Homo sapiens
  Payload ID: 9286
  Gene Symbol: LRRC23
  Gene Name: leucine rich repeat containing 23
  Uniprot ID: Q53EV4
  ENSP ID: ENSP00000007969
MSDEDDLEDSEPDQDDSEKEEDEKETEEGEDYRKEGEEFPEEWLPTPLTEDMMKEGLSLLCKTGNGLAHAYVKLEVKERDLTDIYLLRSYIHLRYVDISENHLTDLSPLNYLTHLLWLKADGNRLRSAQMNELPYLQIASFAYNQITDTEGISHPRLETLNLKGNSIHMVTGLDPEKLISLHTVELRGNQLESTLGINLPKLKNLYLAQNMLKKVEGLEDLSNLTTLHLRDNQIDTLSGFSREMKSLQYLNLRGNMVANLGELAKLRDLPKLRALVLLDNPCTDETSYRQEALVQMPYLERLDKEFYEEEERAEADVIRQRLKEEKEQEPEPQRDLEPEQSLI

SEQ ID NO: 45529 - protein, 312 aa, Homo sapiens
  Payload ID: 9286
  Gene Symbol: LRRC23
  Gene Name: leucine rich repeat containing 23
  Uniprot ID: Q53EV4
  ENSP ID: ENSP00000317464
MSDEDDLEDSEPDQDDSEKEEDEKETEEGEDYRKEGEEFPEEWLPTPLTEDMMKEGLSLLCKTGNGLAHAYVKLEVKERDLTDIYLLRSYIHLRYVDISENHLTDLSPLNYLTHLLWLKADGNRLRSAQMNELPYLQIASFAYNQITDTEGISHPRLETLNLKGNSIHMVTGLDPEKLISLHTVELRGNQLESTLGINLPKLKNLYLAQNMLKKVEGLEDLSNLTTLHLRDNQIDTLSGFSREMKSLQYLNLRRSKTLAFRPDQTPRGSHHMYDREQRMPVFAPKLEIHHNLRPRICSVPVLWAVWGAEWGA

SEQ ID NO: 45530 - protein, 343 aa, Homo sapiens; identical to SEQ ID NO: 45528
  Payload ID: 9286
  Gene Symbol: LRRC23
  Gene Name: leucine rich repeat containing 23
  Uniprot ID: Q53EV4
  ENSP ID: ENSP00000390932

SEQ ID NO: 45531 - protein, 62 aa, Homo sapiens
  Payload ID: 9286
  Gene Symbol: LRRC23
  Gene Name: leucine rich repeat containing 23
  ENSP ID: ENSP00000392623
MSDEDDLEDSEPDQDDSEKEEDEKETEEGEDYRKEGEEFPEEGPDRHLLAALLHPSALCGYF

SEQ ID NO: 45532 - protein, 62 aa, Homo sapiens; identical to SEQ ID NO: 45531
  Payload ID: 9286
  Gene Symbol: LRRC23
  Gene Name: leucine rich repeat containing 23
  ENSP ID: ENSP00000394566

SEQ ID NO: 45533 - protein, 216 aa, Homo sapiens
  Payload ID: 9286
  Gene Symbol: LRRC23
  Gene Name: leucine rich repeat containing 23
  ENSP ID: ENSP00000396049
MSDEDDLEDSEPDQDDSEKEEDEKETEEGEDYRKEGEEFPEEWLPTPLTEDMMKEGLSLLCKTGNGLAHAYVKLEVKERDLTDIYLLRSYIHLRYVDISENHLTDLSPLNYLTHLLWLKADGNRLRSAQMNELPYLQIASFAYNQITDTEGISHPRLETLNLKGNSIHMVTGLDPEKLISLHTVELRGNQLESTLGINLPKLKNLYLEIKDAGLQT

SEQ ID NO: 45534 - protein, 202 aa, Homo sapiens
  Payload ID: 9286
  Gene Symbol: LRRC23
  Gene Name: leucine rich repeat containing 23
  ENSP ID: ENSP00000397192
MSDEDDLEDSEPDQDDSEKEEDEKETEEGEDYRKEGEEFPEEWLPTPLTEDMMKEGLSLLCKTGNGLAHAYVKLEVKERDLTDIYLLRSYIHLRYVDISENHLTDLSPLNYLTHLLWLKADGNRLRSAQMNELPYLQIASFAYNQITDTEGISHPRLETLNLKGDQRRWPSDLIRLPGAATTCMTENRGCLFLPQSWKFITT

SEQ ID NO: 45535 - protein, 230 aa, Homo sapiens
  Payload ID: 9286
  Gene Symbol: LRRC23
  Gene Name: leucine rich repeat containing 23
  ENSP ID: ENSP00000402554
MSDEDDLEDSEPDQDDSEKEEDEKETEEGEDYRKEGEEFPEEWLPTPLTEDMMKEGLSLLCKTGNGLAHAYVKLEVKERDLTDIYLLRSYIHLRYVDISENHLTDLSPLNYLTHLLWLKADGNRLRSAQMNELPYLQIASFAYNQITDTEGISHPRLETLNLKGNSIHMVTGLDPEKLISLHTVELRGNQLESTLGINLPKLKNLYLVAHWVRGWCREEGTVLGVRMPAF

SEQ ID NO: 45536 - protein, 94 aa, Homo sapiens
  Payload ID: 9286
  Gene Symbol: LRRC23
  Gene Name: leucine rich repeat containing 23
  ENSP ID: ENSP00000408066
MSDEDDLEDSEPDQDDSEKEEDEKETEEGEDYRKEGEEFPEEWLPTPLTEDMMKEGLSLLCKTGNGLAHAYVKLEVKERDLTDIYLLRSYIHLR

SEQ ID NO: 45537 - protein, 62 aa, Homo sapiens; identical to SEQ ID NO: 45531
  Payload ID: 9286
  Gene Symbol: LRRC23
  Gene Name: leucine rich repeat containing 23
  ENSP ID: ENSP00000412744

SEQ ID NO: 45538 - protein, 202 aa, Homo sapiens; identical to SEQ ID NO: 45534
  Payload ID: 9286
  Gene Symbol: LRRC23
  Gene Name: leucine rich repeat containing 23
  ENSP ID: ENSP00000479128

SEQ ID NO: 45539 - protein, 513 aa, Homo sapiens
  Payload ID: 9287
  Gene Symbol: LRRC24
  Gene Name: leucine rich repeat containing 24
  Uniprot ID: Q50LG9
  ENSP ID: ENSP00000434849
MALRAPALLPLLLLLLPLRAAGCPAACRCYSATVECGALRLRVVPLGIPPGTQTLFLQDNNIARLEPGALAPLAALRRLYLHNNSLRALEAGAFRAQPRLLELALTSNRLRGLRSGAFVGLAQLRVLYLAGNQLARLLDFTFLHLPRLQELHLQENSIELLEDQALAGLSSLALLDLSRNQLGTISREALQPLASLQVLRLTENPWRCDCALHWLGAWIKEGGQRLLTSRDRKIMCAEPPRLALQSLLDVSHSSLICIPPSVHVQPLELTANLGEDLRVACQASGYPQPLVTWRKVPQPREGRPRAQAQLEGGLLGLGGHSASDTGSGMLFLSNITLAHAGKYECEASNAGGAARVPFRLLVNASRQQPQQPAQPPPPAARPAGSEPRPEAGSMAFRALGVATQTAIAAAIALLALTALLLVAMICRRRRRRKKARGPPGEGALFVNDYLDGPCTFAQLEELRDERGHEMFVINRSKPLFAEGPAEAPADCGPEQGAGPGLRVPPPVAYEIHC

SEQ ID NO: 45540 - protein, 510 aa, Homo sapiens
  Payload ID: 9287
  Gene Symbol: LRRC24
  Gene Name: leucine rich repeat containing 24
  ENSP ID: ENSP00000435653
MALRAPALLPLLLLLLPLRAAGCPAACRCYSATVECGALRLRVVPLGIPPGTQTLFLQDNNIARLEPGALAPLAALRRLYLHNNSLRALEAGAFRAQPRLLELALTSNRLRGLRSGAFVGLAQLRVLYLAGNQLARLLDFTFLHLPELHLQENSIELLEDQALAGLSSLALLDLSRNQLGTISREALQPLASLQVLRLTENPWRCDCALHWLGAWIKEGGQRLLTSRDRKIMCAEPPRLALQSLLDVSHSSLICIPPSVHVQPLELTANLGEDLRVACQASGYPQPLVTWRKVPQPREGRPRAQAQLEGGLLGLGGHSASDTGSGMLFLSNITLAHAGKYECEASNAGGAARVPFRLLVNASRQQPQQPAQPPPPAARPAGSEPRPEAGSMAFRALGVATQTAIAAAIALLALTALLLVAMICRRRRRRKKARGPPGEGALFVNDYLDGPCTFAQLEELRDERGHEMFVINRSKPLFAEGPAEAPADCGPEQGAGPGLRVPPPVAYEIHC

SEQ ID NO: 45541 - protein, 305 aa, Homo sapiens
  Payload ID: 9288
  Gene Symbol: LRRC25
  Gene Name: leucine rich repeat containing 25
  Uniprot ID: Q8N386
  ENSP ID: ENSP00000340983
MGGTLAWTLLLPLLLRESDSLEPSCTVSSADVDWNAEFSATCLNFSGLSLSLPHNQSLRASNVILLDLSGNGLRELPVTFFAHLQKLEVLNVLRNPLSRVDGALAARCDLDLQADCNCALESWHDIRRDNCSGQKPLLCWDTTSSQHNLSAFLEVSCAPGLASATIGAVVVSGCLLLGLAIAGPVLAWRLWRCRVARSRELNKPWAAQDGPKPGLGLQPRYGSRSAPKPQVAVPSCPSTPDYENMFVGQPAAEHQWDEQGAHPSEDNDFYINYKDIDLASQPVYCNLQSLGQAPMDEEEYVIPGH

SEQ ID NO: 45542 - protein, 305 aa, Homo sapiens; identical to SEQ ID NO: 45541
  Payload ID: 9288
  Gene Symbol: LRRC25
  Gene Name: leucine rich repeat containing 25
  Uniprot ID: Q8N386
  ENSP ID: ENSP00000472290

SEQ ID NO: 45543 - protein, 334 aa, Homo sapiens
  Payload ID: 9289
  Gene Symbol: LRRC26
  Gene Name: leucine rich repeat containing 26
  Uniprot ID: Q2I0M4
  ENSP ID: ENSP00000360597
MRGPSWSRPRPLLLLLLLLSPWPVWAQVSATASPSGSLGAPDCPEVCTCVPGGLASCSALSLPAVPPGLSLRLRALLLDHNRVRALPPGAFAGAGALQRLDLRENGLHSVHVRAFWGLGALQLLDLSANQLEALAPGTFAPLRALRNLSLAGNRLARLEPAALGALPLLRSLSLQDNELAALAPGLLGRLPALDALHLRGNPWGCGCALRPLCAWLRRHPLPASEAETVLCVWPGRLTLSPLTAFSDAAFSHCAQPLALRDLAVVYTLGPASFLVSLASCLALGSGLTACRARRRRLRTAALRPPRPPDPNPDPDPHGCASPADPGSPAAAAQA

SEQ ID NO: 45544 - protein, 383 aa, Homo sapiens
  Payload ID: 9290
  Gene Symbol: LRRC27
  Gene Name: leucine rich repeat containing 27
  Uniprot ID: Q9C0I9
  ENSP ID: ENSP00000342641
MEGSSSYEVPSVAAADLEEGAGQTRSLPATPSKDVHKGVGGIIFSSSPILDLSESGLCRLEEVFRIPSLQQLHLQRNALCVIPQDFFQLLPNLTWLDLRYNRIKALPSGIGAHQHLKTLLLERNPIKMLPVELGSVTTLKALNLRHCPLEFPPQLVVQKGLVAIQRFLRMWAVEHSLPRNPTSQEAPPVREMTLRDLPSPGLELSGDHASNQGAVNAQDPEGAVMKEKASFLPPVEKPDLSELRKSADSSENWPSEEEIRRFWKLRQEIVEHVKADVLGDQLLTRELPPNLKAALNIEKELPKPRHVFRTRVPRKQALQRLHERKTRIMGVVGRAPTHMGEGRQPPPGASYPTSCHRTKWRSEQKDWKRAERRRSESSRRSRL

SEQ ID NO: 45545 - protein, 468 aa, Homo sapiens
  Payload ID: 9290
  Gene Symbol: LRRC27
  Gene Name: leucine rich repeat containing 27
  Uniprot ID: Q9C0I9
  ENSP ID: ENSP00000357601
MDINTYNNQLHLQRNALCVIPQDFFQLLPNLTWLDLRYNRIKALPSGIGAHQHLKTLLLERNPIKMLPVELGSVTTLKALNLRHCPLEFPPQLVVQKGLVAIQRFLRMWAVEHSLPRNPTSQEAPPVREMTLRDLPSPGLELSGDHASNQGAVNAQDPEGAVMKEKASFLPPVEKPDLSELRKSADSSENWPSEEEIRRFWKLRQEIVEHVKADVLGDQLLTRELPPNLKAALNIEKELPKPRHVFRRKTASSRSILPDLLSPYQMAIRAKRLEESRAAALRELQEKQALMEQQRREKRALQEWRERAQRMRKRKEELSKLLPPRRSMVASKIPSATDLIDNRKVPLNPPGKMKPSKEKSPQASKEMSALQERNLEEKIKQHVLQMREQRRFHGQAPLEEMRKAAEDLEIATELQDEVLKLKLGLTLNKDRRRAALTGNLSLGLPAAQPQNTFFNTKYGESGNVRRYQ

SEQ ID NO: 45546 - protein, 530 aa, Homo sapiens
  Payload ID: 9290
  Gene Symbol: LRRC27
  Gene Name: leucine rich repeat containing 27
  Uniprot ID: Q9C0I9
  ENSP ID: ENSP00000357602
MEGSSSYEVPSVAAADLEEGAGQTRSLPATPSKDVHKGVGGIIFSSSPILDLSESGLCRLEEVFRIPSLQQLHLQRNALCVIPQDFFQLLPNLTWLDLRYNRIKALPSGIGAHQHLKTLLLERNPIKMLPVELGSVTTLKALNLRHCPLEFPPQLVVQKGLVAIQRFLRMWAVEHSLPRNPTSQEAPPVREMTLRDLPSPGLELSGDHASNQGAVNAQDPEGAVMKEKASFLPPVEKPDLSELRKSADSSENWPSEEEIRRFWKLRQEIVEHVKADVLGDQLLTRELPPNLKAALNIEKELPKPRHVFRRKTASSRSILPDLLSPYQMAIRAKRLEESRAAALRELQEKQALMEQQRREKRALQEWRERAQRMRKRKEELSKLLPPRRSMVASKIPSATDLIDNRKVPLNPPGKMKPSKEKSPQASKEMSALQERNLEEKIKQHVLQMREQRRFHGQAPLEEMRKAAEDLEIATELQDEVLKLKLGLTLNKDRRRAALTGNLSLGLPAAQPQNTFFNTKYGESGNVRRYQ

SEQ ID NO: 45547 - protein, 530 aa, Homo sapiens; identical to SEQ ID NO: 45546
  Payload ID: 9290
  Gene Symbol: LRRC27
  Gene Name: leucine rich repeat containing 27
  Uniprot ID: Q9C0I9
  ENSP ID: ENSP00000357603

SEQ ID NO: 45548 - protein, 383 aa, Homo sapiens
  Payload ID: 9290
  Gene Symbol: LRRC27
  Gene Name: leucine rich repeat containing 27
  Uniprot ID: Q9C0I9
  ENSP ID: ENSP00000486582
MEGSSSYEVPSVAAADLEEGAGQTRSLPATPSKDVHKGVGGIIFSSSPILDLSESGLCRLEEVFRIPSLQQLHLQRNALCVIPQDFFQLLPNLTWLDLRYNRIKALPSGIGAHQHLKTLLLERNPIKMLPVELGSVTTLKALNLRHCPLEFPPQLVVQKGLVAIQRFLRMWAVEHSLPRNPTSQEAPPVREMTLRDLPSPGLELSGDHASNQGAVNAQDPEGAVMKEKASFLPPVEKPDLSELRKSADSSENWPSEEEIRRFWKLRQEIVEHVKADVLGDQLLTRELPPNLKAALNIEKELPKPRHVFRRKTASSRSILPDLLSPYQMAIRAKRLEESRAAALRELQEKQALMEQQRRPFLLIFPRVFQALTRSSGRFILVLL

SEQ ID NO: 45549 - protein, 367 aa, Homo sapiens
  Payload ID: 9291
  Gene Symbol: LRRC28
  Gene Name: leucine rich repeat containing 28
  Uniprot ID: Q86X40
  ENSP ID: ENSP00000304923
MASELCKTISVARLEKHKNLFLNYRNLHHFPLELLKDEGLQYLERLYMKRNSLTSLPENLAQKLPNLVELYLHSNNIVVVPEAIGSLVKLQCLDLSDNALEIVCPEIGRLRALRHLRLANNQLQFLPPEVGDLKELQTLDISTNRLLTLPERLHMCLSLQYLTVDRNRLWYVPRHLCQLPSLNELSMAGNRLAFLPLDLGRSRELQYVYVDNNIHLKGLPSYLYNKVIGCSGCGAPIQVSEVKLLSFSSGQRTVFLPAEVKAIGTEHDHVLPLQELAMRGLYHTYHSLLKDLNFLSPISLPRSLLELLHCPLGHCHRCSEPMFTIVYPKLFPLRETPMAGLHQWKTTVSFVAYCCSTQCLQTFDLLS

SEQ ID NO: 45550 - protein, 93 aa, Homo sapiens
  Payload ID: 9291
  Gene Symbol: LRRC28
  Gene Name: leucine rich repeat containing 28
  ENSP ID: ENSP00000332035
MASELCKTISVARLEKHKNLFLNYRNLHHFPLELLKDEGLQYLERLYMKRNSLTSLPENLAQKLPNLVELKTTVSFVAYCCSTQCLQTFDLLS

SEQ ID NO: 45551 - protein, 312 aa, Homo sapiens
  Payload ID: 9291
  Gene Symbol: LRRC28
  Gene Name: leucine rich repeat containing 28
  Uniprot ID: Q86X40
  ENSP ID: ENSP00000404520
MASELCKTISVARLEKHKNLFLNYRNLHHFPLELLKDEGLQYLERLYMKRNSLTSLPENLAQKLPNLVELYLHSNNIVVVPEAIGSLVKLQCLDLSDNALEIVCPEIGRLRALRHLRLANNQLQFLPPEVGDLKELQTLDISTNRLLTLPERLHMCLSLQYLTVDRNRLWYVPRHLCQLPSLNELSMAGNRLAFLPLDLGRSRELQYVYVDNNIHLKGLPSYLYNKVIGCSGCGAPIQVSEVKLLSFSSGQRTVFLPAEVKAIGTEHDHVLPLQELAMRGLYHTYHSLLKGRQLLVLWLTAAPPSVCRLLTC

SEQ ID NO: 45552 - protein, 74 aa, Homo sapiens
  Payload ID: 9291
  Gene Symbol: LRRC28
  Gene Name: leucine rich repeat containing 28
  ENSP ID: ENSP00000452709
MASELCKTISVARLEKHKNLFLNYRNLHHFPLELLKDEGLQYLERLYMKRNSLTSLPENLAQKLPNLVELWNLN

SEQ ID NO: 45553 - protein, 170 aa, Homo sapiens
  Payload ID: 9291
  Gene Symbol: LRRC28
  Gene Name: leucine rich repeat containing 28
  ENSP ID: ENSP00000452785
MASELCKTISVARLEKHKNLFLNYRNLHHFPLELLKDEGLQYLERLYMKRNSLTSLPENLAQKLPNLVELYLHSNNIVVVPEAIGSLVKLQCLDLSDNALEIVCPEIGRLRALRHLRLANNQLQFLPPEVGDLKELQTLDISTNRLLTLPERLHMCLSLQYLTVDRNRLW

SEQ ID NO: 45554 - protein, 300 aa, Homo sapiens
  Payload ID: 9291
  Gene Symbol: LRRC28
  Gene Name: leucine rich repeat containing 28
  ENSP ID: ENSP00000452863
MGYIQSWRPNFPENLAQKLPNLVELYLHSNNIVVVPEAIGSLVKLQCLDLSDNALEIVCPEIGRLRALRHLRLANNQLQFLPPEVGDLKELQTLDISTNRLLTLPERLHMCLSLQYLTVDRNRLWYVPRHLCQLPSLNELSMAGNRLAFLPLDLGRSRELQYVYVDNNIHLKGLPSYLYNKVIGCSGCGAPIQVSEVKLLSFSSGQRTVFLPAEVKAIGTEHDHVLPLQELAMRGLYHTYHSLLKDLNFLSPISLPRSLLELLHCPLGHCHRCSEPMFTIVYPKLFPLRETPMAGLHQWK

SEQ ID NO: 45555 - protein, 60 aa, Homo sapiens
  Payload ID: 9291
  Gene Symbol: LRRC28
  Gene Name: leucine rich repeat containing 28
  ENSP ID: ENSP00000452927
MASELCKTISVARLEKHKNLFLNYRNLHHFPLELLKDEGLQYLERLYMKRNSLTSLRLAI

SEQ ID NO: 45556 - protein, 60 aa, Homo sapiens
  Payload ID: 9291
  Gene Symbol: LRRC28
  Gene Name: leucine rich repeat containing 28
  ENSP ID: ENSP00000453313
MASELCKTISVARLEKHKNLFLNYRNLHHFPLELLKDEGLQYLERLYMKRNSLTSLEDNC

SEQ ID NO: 45557 - protein, 61 aa, Homo sapiens
  Payload ID: 9291
  Gene Symbol: LRRC28
  Gene Name: leucine rich repeat containing 28
  ENSP ID: ENSP00000453469
MASELCKTISVARLEKHKNLFLNYRNLHHFPLELLKDEGLQYLERLYMKRNSLTSLIPALK

SEQ ID NO: 45558 - protein, 185 aa, Homo sapiens
  Payload ID: 9291
  Gene Symbol: LRRC28
  Gene Name: leucine rich repeat containing 28
  ENSP ID: ENSP00000453504
MASELCKTISVARLEKHKNLFLNYRNLHHFPLELLKDEGLQYLERLYMKRNSLTSLYLTVDRNRLWYVPRHLCQLPSLNELSMAGNRLAFLPLDLGRSRELQYVYVDNNIHLKGLPSYLYNKVIGCSGCGAPIQVSEVKLLSFSSGQRTVFLPAEVKAIGTEHDHVLPLQELAMRGLYHTYHSLL

SEQ ID NO: 45559 - protein, 37 aa, Homo sapiens
  Payload ID: 9291
  Gene Symbol: LRRC28
  Gene Name: leucine rich repeat containing 28
  ENSP ID: ENSP00000454182
FPLRETPMAGLHQWKTTVSFVAYCCSTQCLQTFDLLS

SEQ ID NO: 45560 - protein, 223 aa, Homo sapiens
  Payload ID: 9292
  Gene Symbol: LRRC29
  Gene Name: leucine rich repeat containing 29
  Uniprot ID: Q8WV35
  ENSP ID: ENSP00000377561
MYSSGWPAGAAEPRHGRGRELAQALGCMHGAPSQLASLSLAHCSSLKSRPELEHQASGTKDACPEPQGPSLLTLRALQELDLTACSKLTDASLAKVLQFLQLRQLSLSLLPELTDNGLVAVARGCPSLEHLALSHCSRLSDKGWAQAASSWPRLQHLNLSSCSQLIEQTLDAIGQACRQLRVLDVATCPGINMAAVRRFQAQLPQVSCVQSRFVGGADLTLTL

SEQ ID NO: 45561 - protein, 223 aa, Homo sapiens; identical to SEQ ID NO: 45560
  Payload ID: 9292
  Gene Symbol: LRRC29
  Gene Name: leucine rich repeat containing 29
  Uniprot ID: Q8WV35
  ENSP ID: ENSP00000386622

SEQ ID NO: 45562 - protein, 223 aa, Homo sapiens; identical to SEQ ID NO: 45560
  Payload ID: 9292
  Gene Symbol: LRRC29
  Gene Name: leucine rich repeat containing 29
  Uniprot ID: Q8WV35
  ENSP ID: ENSP00000387318

SEQ ID NO: 45563 - protein, 165 aa, Homo sapiens
  Payload ID: 9292
  Gene Symbol: LRRC29
  Gene Name: leucine rich repeat containing 29
  ENSP ID: ENSP00000409459
MYSSGWPAGAAEPRHGRGRELAQALGCMHGAPSQLASLSLAHCSSLKSRPELEHQASGTKDACPEPQGPSLLTLRALQELDLTACSKLTDASLAKVLQFLQLRQLSLSLLPELTDNGLVAVARGCPSLEHLALSHCSRLSDKGWAQAASSWPRLQHLNLSSCSQL

SEQ ID NO: 45564 - protein, 161 aa, Homo sapiens
  Payload ID: 9292
  Gene Symbol: LRRC29
  Gene Name: leucine rich repeat containing 29
  ENSP ID: ENSP00000413129
MYSSGWPAGAAEPRHGRGRELAQALGCMHGAPSQLASLSLAHCSSLKVLQFLQLRQLSLSLLPELTDNGLVAVARGCPSLEHLALSHCSRLSDKGWAQAASSWPRLQHLNLSSCSQLIEQTLDAIGQACRQLRVLDVATCPGINMAAVRRFQAQLPQVSCV

SEQ ID NO: 45565 - protein, 182 aa, Homo sapiens
  Payload ID: 9292
  Gene Symbol: LRRC29
  Gene Name: leucine rich repeat containing 29
  ENSP ID: ENSP00000414023
MYSSGWPAGAAEPRHGRGRELAQALGCMHGAPSQLASLSLAHCSSLKDASVLSMIPALGLSLRVLDLSSCVALTNRTLQAICTYLTHLSVLRLAWCRELCDWGLRGLGEPVQGTQVWDPRGLGGRGGPWDQLPSCPSQVSVGVFKGKLRRNLRSKGFFPQSRPELEHQASGTKDACPEPQGP

SEQ ID NO: 45566 - protein, 223 aa, Homo sapiens; identical to SEQ ID NO: 45560
  Payload ID: 9292
  Gene Symbol: LRRC29
  Gene Name: leucine rich repeat containing 29
  Uniprot ID: Q8WV35
  ENSP ID: ENSP00000486223

SEQ ID NO: 45567 - protein, 257 aa, Homo sapiens
  Payload ID: 9293
  Gene Symbol: LRRC3
  Gene Name: leucine rich repeat containing 3
  Uniprot ID: Q9BY71
  ENSP ID: ENSP00000291592
MGTVRPPRPSLLLVSTRESCLFLLFCLHLGAACPQPCRCPDHAGAVAVFCSLRGLQEVPEDIPANTVLLKLDANKISHLPDGAFQHLHRLRELDLSHNAIEAIGSATFAGLAGGLRLLDLSYNRIQRIPKDALGKLSAKIRLSHNPLHCECALQEALWELKLDPDSVDEIACHTSVQEEFVGKPLVQALDAGASLCSVPHRTTDVAMLVTMFGWFAMVIAYVVYYVRHNQEDARRHLEYLKSLPSAPASKDPIGPGP

SEQ ID NO: 45568 - protein, 301 aa, Homo sapiens
  Payload ID: 9294
  Gene Symbol: LRRC30
  Gene Name: leucine rich repeat containing 30
  Uniprot ID: A6NM36
  ENSP ID: ENSP00000372959
MGARQSRASSKDKGPKRMLFTGRRQKFSPWDDALLSGRDPRSLLKRGMHHVSFSLVTRGMTDIPDFLWGLSEVQKLNLSHNQLRVLPPEVGKLTRIVVLNLCGNRLKSLPREVSLLQCLKVLFVNMNCLTEVPAELSLCRKLEVLSLSHNCLSQLPACFADLSRLRKLNLSNNFFAHIPMCVFSLKELIFLHVGSNRLENIAESIQHLASLQIFIAEGNNIHSFPRSLCLVTSLELLNLNNNDIQTLPSELHLLCRLVRIAWNPMDKGLHISHNPLSKPLPELVEGGLEMLFGYLKDKKHT

SEQ ID NO: 45569 - protein, 496 aa, Homo sapiens
  Payload ID: 9295
  Gene Symbol: LRRC31
  Gene Name: leucine rich repeat containing 31
  Uniprot ID: Q6UY01
  ENSP ID: ENSP00000264676
MSQTRKKTSSEGETKPQTSTVNKFLRGSNAESRKEDNDLKTSDSQPSDWIQKTATSETAKPLSSEMEWRSSMEKNEHFLQKLGKKAVNKCLDLNNCGLTTADMKEMGEAFEMIPELEELNLSWNSKVGGNLPLILQKFQKGSKIQMIELVDCSLTSEDGTFLGQLLPMLQSLEVLDLSINRDIVGSLNSIAQGLKSTSNLKVLKLHSCGLSQKSVKILDAAFRYLGELRKLDLSCNKDLGGGFEDSPAQLVMLKHLQVLDLHQCSLTADDVMSLTQVIPLLSNLQELDLSANKKMGSSSENLLSRLRFLPALKSLVINNCALESETFTALAEASVHLSALEVFNLSWNKCVGGNLKLLLETLKLSMSLQVLRLSSCSLVTEDVALLASVIQTGHLAKLQKLDLSYNDSICDAGWTMFCQNVRFLKELIELDISLRPSNFRDCGQWFRHLLYAVTKLPQITEIGMKRWILPASQEEELECFDQDKKRSIHFDHGGFQ

SEQ ID NO: 45570 - protein, 552 aa, Homo sapiens
  Payload ID: 9295
  Gene Symbol: LRRC31
  Gene Name: leucine rich repeat containing 31
  Uniprot ID: Q6UY01
  ENSP ID: ENSP00000325978
MSQTRKKTSSEGETKPQTSTVNKFLRGSNAESRKEDNDLKTSDSQPSDWIQKTATSETAKPLSSEMEWRSSMEKNEHFLQKLGKKAVNKCLDLNNCGLTTADMKEMVALLPFLPDLEELDISWNGFVGGTLLSITQQMHLVSKLKILRLGSCRLTTDDVQALGEAFEMIPELEELNLSWNSKVGGNLPLILQKFQKGSKIQMIELVDCSLTSEDGTFLGQLLPMLQSLEVLDLSINRDIVGSLNSIAQGLKSTSNLKVLKLHSCGLSQKSVKILDAAFRYLGELRKLDLSCNKDLGGGFEDSPAQLVMLKHLQVLDLHQCSLTADDVMSLTQVIPLLSNLQELDLSANKKMGSSSENLLSRLRFLPALKSLVINNCALESETFTALAEASVHLSALEVFNLSWNKCVGGNLKLLLETLKLSMSLQVLRLSSCSLVTEDVALLASVIQTGHLAKLQKLDLSYNDSICDAGWTMFCQNVRFLKELIELDISLRPSNFRDCGQWFRHLLYAVTKLPQITEIGMKRWILPASQEEELECFDQDKKRSIHFDHGGFQ

SEQ ID NO: 45571 - protein, 443 aa, Homo sapiens
  Payload ID: 9295
  Gene Symbol: LRRC31
  Gene Name: leucine rich repeat containing 31
  Uniprot ID: Q6UY01
  ENSP ID: ENSP00000429145
MSQTRKKTSSEGETKPQTSTVNKFLRGSNAESRKEDNDLKTSDSQPSDWIQKTATSETAKPLSSEMEWRSSMEKNEHFLQKLGKKAVNKCLDLNNCGLTTADMKEMVALLPFLPDLEELDISWNGFVGGTLLSITQQMHLVSKLKILRLGSCRLTTDDVQALGEAFEMIPELEELNLSWNSKVGGNLPLILQKFQKGSKIQMIELVDCSLTSEDGTFLGQLLPMLQSLEVLDLSINRDIVGSLNSIAQGLKSTSNLKVLKLHSCGLSQKSVKILDAAFRYLGELRKLDLSCNKDLGGGFEDSPAQLVMLKHLQVLDLHQCSLTADDVMSLTQVIPLLSNLQELDLSANKKMGSSSENLLSRLRFLPALKSLVINNCALESETFTALAEASVHLSALEVFNLSWNKCVGGNLKLLLETLKLSMSLQVLRLSSCSLVTEDVALLE

SEQ ID NO: 45572 - protein, 662 aa, Homo sapiens
  Payload ID: 9296
  Gene Symbol: LRRC32
  Gene Name: leucine rich repeat containing 32
  Uniprot ID: Q14392
  ENSP ID: ENSP00000260061
MRPQILLLLALLTLGLAAQHQDKVPCKMVDKKVSCQVLGLLQVPSVLPPDTETLDLSGNQLRSILASPLGFYTALRHLDLSTNEISFLQPGAFQALTHLEHLSLAHNRLAMATALSAGGLGPLPRVTSLDLSGNSLYSGLLERLLGEAPSLHTLSLAENSLTRLTRHTFRDMPALEQLDLHSNVLMDIEDGAFEGLPRLTHLNLSRNSLTCISDFSLQQLRVLDLSCNSIEAFQTASQPQAEFQLTWLDLRENKLLHFPDLAALPRLIYLNLSNNLIRLPTGPPQDSKGIHAPSEGWSALPLSAPSGNASGRPLSQLLNLDLSYNEIELIPDSFLEHLTSLCFLNLSRNCLRTFEARRLGSLPCLMLLDLSHNALETLELGARALGSLRTLLLQGNALRDLPPYTFANLASLQRLNLQGNRVSPCGGPDEPGPSGCVAFSGITSLRSLSLVDNEIELLRAGAFLHTPLTELDLSSNPGLEVATGALGGLEASLEVLALQGNGLMVLQVDLPCFICLKRLNLAENRLSHLPAWTQAVSLEVLDLRNNSFSLLPGSAMGGLETSLRRLYLQGNPLSCCGNGWLAAQLHQGRVDVDATQDLICRFSSQEEVSLSHVRPEDCEKGGLKNINLIIILTFILVSAILLTTLAACCCVRRQKFNQQYKA

SEQ ID NO: 45573 - protein, 662 aa, Homo sapiens; identical to SEQ ID NO: 45572
  Payload ID: 9296
  Gene Symbol: LRRC32
  Gene Name: leucine rich repeat containing 32
  Uniprot ID: Q14392
  ENSP ID: ENSP00000384126

SEQ ID NO: 45574 - protein, 662 aa, Homo sapiens; identical to SEQ ID NO: 45572
  Payload ID: 9296
  Gene Symbol: LRRC32
  Gene Name: leucine rich repeat containing 32
  Uniprot ID: Q14392
  ENSP ID: ENSP00000385766

SEQ ID NO: 45575 - protein, 186 aa, Homo sapiens
  Payload ID: 9296
  Gene Symbol: LRRC32
  Gene Name: leucine rich repeat containing 32
  ENSP ID: ENSP00000413331
MRPQILLLLALLTLGLAAQHQDKVPCKMVDKKVSCQVLGLLQVPSVLPPDTETLDLSGNQLRSILASPLGFYTALRHLDLSTNEISFLQPGAFQALTHLEHLSLAHNRLAMATALSAGGLGPLPRVTSLDLSGNSLYSGLLERLLGEAPSLHTLSLAENSLTRLTRHTFRDMPALEQLDLHSNVLM

SEQ ID NO: 45576 - protein, 464 aa, Homo sapiens
  Payload ID: 9297
  Gene Symbol: LRRC34
  Gene Name: leucine rich repeat containing 34
  Uniprot ID: Q8IZ02
  ENSP ID: ENSP00000414635
MAAQPPRPVGERSMGSSREAARAPARSPAWASTQASTPGAALAVQRESPESGLQKHYSNLCMEKSQKINPFILHILQEVDEEIKKGLAAGITLNIAGNNRLVPVERVTGEDFWILSKILKNCLYINGLDVGYNLLCDVGAYYAAKLLQKQLNLIYLNLMFNDIGPEGGELIAKVLHKNRTLKYLRMTGNKIENKGGMFFAAMLQINSSLEKLDLGDCDLGMQSVIAFATVLTQNQAIKAINLNRPILYSEQEESTVHVGRMLKENHCLVALHMCKHDIKNSGIQQLCDALYLNSSLRYLDVSCNKITHDGMVYLADVLKSNTTLEVIDLSFNRIENAGANYLSETLTSHNRSLKALSVVSNNIEGEGLVALSQSMKTNLTFSHIYIWGNKFDEATCIAYSDLIQMGCLKPDNTDVEPFVVDGRVYLAEVSNGLKKHYYWTSTYGESYDHSSNAGFALVPVGQQP

SEQ ID NO: 45577 - protein, 432 aa, Homo sapiens
  Payload ID: 9297
  Gene Symbol: LRRC34
  Gene Name: leucine rich repeat containing 34
  Uniprot ID: Q8IZ02
  ENSP ID: ENSP00000429278
MAAQPPRPVGERSMGSSREAARAPARSPAWASTQASTPGAALAVQRESPESGLQKHYSNLCMEKSQKINPFILHILQEVDEEIKKGLAAGITLNIAGNNRLVPVERVTGEDFWILSKILKNCLYINGLDVGYNLLCDVGAYYAAKLLQKQLNLIYLNLMFNDIGPEGGELIAKVLHKNRTLKYLRMTGNKIENKGGMFFAAMLQINSSLEKLDLGDCDLEESTVHVGRMLKENHCLVALHMCKHDIKNSGIQQLCDALYLNSSLRYLDVSCNKITHDGMVYLADVLKSNTTLEVIDLSFNRIENAGANYLSETLTSHNRSLKALSVVSNNIEGEGLVALSQSMKTNLTFSHIYIWGNKFDEATCIAYSDLIQMGCLKPDNTDVEPFVVDGRVYLAEVSNGLKKHYYWTSTYGESYDHSSNAGFALVPVGQQP

SEQ ID NO: 45578 - protein, 403 aa, Homo sapiens
  Payload ID: 9297
  Gene Symbol: LRRC34
  Gene Name: leucine rich repeat containing 34
  ENSP ID: ENSP00000429593
MEKSQKINPFILHILQEVDEEIKKGLAAGITLNIAGNNRLVPVERVTGEDFWILSKILKNCLYINGLDVGYNLLCDVGAYYAAKLLQKQLNLIYLNLMFNDIGPEGGELIAKVLHKNRTLKYLRMTGNKIENKGGMFFAAMLQINSSLEKLDLGDCDLGMQSVIAFATVLTQNQAIKAINLNRPILYSEQEESTVHVGRMLKENHCLVALHMCKHDIKNSGIQQLCDALYLNSSLRYLDVSCNKITHDGMVYLADVLKSNTTLEVIDLSFNRIENAGANYLSETLTSHNRSLKALSVVSNNIEGEGLVALSQSMKTNLTFSHIYIWGNKFDEATCIAYSDLIQMGCLKPDNTDVEPFVVDGRVYLAEVSNGLKKHYYWTSTYGESYDHSSNAGFALVPVGQQP

SEQ ID NO: 45579 - protein, 56 aa, Homo sapiens
  Payload ID: 9297
  Gene Symbol: LRRC34
  Gene Name: leucine rich repeat containing 34
  ENSP ID: ENSP00000436883
EESTVHVGRMLKENHCLVALHMCKHDIKNSGIQQLCDALYLNSSLRYLDVSWHIQT

SEQ ID NO: 45580 - protein, 754 aa, Homo sapiens
  Payload ID: 9298
  Gene Symbol: LRRC36
  Gene Name: leucine rich repeat containing 36
  Uniprot ID: Q1X8D7
  ENSP ID: ENSP00000329943
MAEQWELDEEGIRRLGALTLEQPELVESLSLQGSYAGKIHSIGDAFRNFKNLRSLDLSRNLITSLKGIQYLCSLQDLNLYYNNIPSLVEVSRLQPLPFLKELDLRLNPVVRKDTDYRLFAVYTLQTLEKLDDRTVREGERKAAKLHFSQLGNSENFLLEVEKSSREKTMKNCVTGESSASKVSANVDSRIEMDSNKGLFIPFPNREIKDSLSTSATQGNGTRDQKLDTFPLGTQTQEVARREMPSDNHQEDEFRHYSPRQSTVRSPEKMTREGYQVSFLDNKSSGSSPEKELIPKPDTFHLTHDASLSKCLDVGDSSQIHPYQLPSDVGLENYDSCYSQTLSLHGSLGKRPQRSKNYQEYSIKPSNDIKTTASHSCGDLLTSLSNPDSSTGRLLKLSSDLYATTHFNSDPAVLVNVEQQLSTSLDDLTPAHGSVPNNAVLGNRTTPLRTLLLSPGTSEHRKIFTKRSLSPSKRGFKWKDNILANLNLKHGFQDATGSEPLSSDLGSLHGLAGNHSPPISARTPHVATVLRQLLELVDKHWNGSGSLLLNKKFLGPARDLLLSLVVPAPSQPRCCSHPEDTMKAFCRRELELKEAAQLVPNDMESLKQKLVRVLEENLILSEKIQQLEEGAAISIVSGQQSHTYDDLLHKNQQLTMQVACLNQELAQLKKLEKTVAILHESQRSLVVTNEYLLQQLNKEPKGYSGKALLPPEKGHHLGRSSPFGKSTLSSSSPVAHETGQYLIQSVLDAAPEPGL

SEQ ID NO: 45581 - protein, 529 aa, Homo sapiens
  Payload ID: 9298
  Gene Symbol: LRRC36
  Gene Name: leucine rich repeat containing 36
  Uniprot ID: Q1X8D7
  ENSP ID: ENSP00000411122
MLRPRFLPPDDRTVREGERKAAKLHFSQLGNSENFLLEVEKSSREKTMKNCVTGESSASKVSANVDSRIEMDSNKGLFIPFPNREIKDSLSTSATQGNGTRDQKLDTFPLGTQTQEVARREMPSDNHQEDEFRHYSPRQSTVRSPEKMTREGYQVSFLDNKSSGSSPEKELIPKPDTFHLTHDASLSKCLDVGDSSQIHPYQLPSDVGLENYDSCYSQTLSLHGSLGKRPQRSKNYQEYSIKPSNDIKTTASHSCGDLLTSLSNPDSSTGRLLKLSSDLYATTHFNSDPAVLVNVEQQLSTSLDDLTPAHGSVPNNAVLGNRTTPLRTLLLSPGTSEHRKIFTKRSLSPSKRGFKWKDNILANLNLKHGFQDATGSEESLKQKLVRVLEENLILSEKIQQLEEGAAISIVSGQQSHTYDDLLHKNQQLTMQVACLNQELAQLKKLEKTVAILHESQRSLVVTNEYLLQQLNKEPKGYSGKALLPPEKGHHLGRSSPFGKSTLSSSSPVAHETGQYLIQSVLDAAPEPGL

SEQ ID NO: 45582 - protein, 22 aa, Homo sapiens
  Payload ID: 9298
  Gene Symbol: LRRC36
  Gene Name: leucine rich repeat containing 36
  ENSP ID: ENSP00000454309
MLRPRFLPPDDRTVREALGRRQ

SEQ ID NO: 45583 - protein, 38 aa, Homo sapiens
  Payload ID: 9298
  Gene Symbol: LRRC36
  Gene Name: leucine rich repeat containing 36
  ENSP ID: ENSP00000454794
MAEQWELDEEGIRRLGALTLEQPGNPVFMFTPRPEFIL

SEQ ID NO: 45584 - protein, 130 aa, Homo sapiens
  Payload ID: 9298
  Gene Symbol: LRRC36
  Gene Name: leucine rich repeat containing 36
  ENSP ID: ENSP00000455018
MLRPRFLPPDDRTVREGERKAAKLHFSQLGNSENFLLEVEKSSREKTMKNCVTGESSASKVSANVDSRIEMDSNKGLFIPFPNREIKDSLSTSATQGNGTRDQKLDTFPLGTQICMPQPISTVTLLYLSM

SEQ ID NO: 45585 - protein, 633 aa, Homo sapiens
  Payload ID: 9298
  Gene Symbol: LRRC36
  Gene Name: leucine rich repeat containing 36
  Uniprot ID: Q1X8D7
  ENSP ID: ENSP00000455103
MLRPRFLPPDDRTVREGERKAAKLHFSQLGNSENFLLEVEKSSREKTMKNCVTGESSASKVSANVDSRIEMDSNKGLFIPFPNREIKDSLSTSATQGNGTRDQKLDTFPLGTQTQEVARREMPSDNHQEDEFRHYSPRQSTVRSPEKMTREGYQVSFLDNKSSGSSPEKELIPKPDTFHLTHDASLSKCLDVGDSSQIHPYQLPSDVGLENYDSCYSQTLSLHGSLGKRPQRSKNYQEYSIKPSNDIKTTASHSCGDLLTSLSNPDSSTGRLLKLSSDLYATTHFNSDPAVLVNVEQQLSTSLDDLTPAHGSVPNNAVLGNRTTPLRTLLLSPGTSEHRKIFTKRSLSPSKRGFKWKDNILANLNLKHGFQDATGSEPLSSDLGSLHGLAGNHSPPISARTPHVATVLRQLLELVDKHWNGSGSLLLNKKFLGPARDLLLSLVVPAPSQPRCCSHPEDTMKAFCRRELELKEAAQLVPNDMESLKQKLVRVLEENLILSEKIQQLEEGAAISIVSGQQSHTYDDLLHKNQQLTMQVACLNQELAQLKKLEKTVAILHESQRSLVVTNEYLLQQLNKEPKGYSGKALLPPEKGHHLGRSSPFGKSTLSSSSPVAHETGQYLIQSVLDAAPEPGL

SEQ ID NO: 45586 - protein, 22 aa, Homo sapiens
  Payload ID: 9298
  Gene Symbol: LRRC36
  Gene Name: leucine rich repeat containing 36
  ENSP ID: ENSP00000455211
MLRPRFLPPDDRTVREALGRRQ

SEQ ID NO: 45587 - protein, 126 aa, Homo sapiens
  Payload ID: 9298
  Gene Symbol: LRRC36
  Gene Name: leucine rich repeat containing 36
  ENSP ID: ENSP00000455799
MLRPRFLPPDDRTVREGERKAAKLHFSQLGNSENFLLEVEKSSREKTMKNCVTGESSASKVSANVDSRIEMERVLLCRPDWSAVARSRLTATSTSWVQAVLLPQPSEQLGLQTQTKDFLFPSPTGK

SEQ ID NO: 45588 - protein, 74 aa, Homo sapiens
  Payload ID: 9298
  Gene Symbol: LRRC36
  Gene Name: leucine rich repeat containing 36
  ENSP ID: ENSP00000456164
MLRPRFLPPDDRTVREGERKAAKLHFSQLGNSENFLLEVEKSSREKTMKNCVTGESSASKVSANVDSRIEMASL

SEQ ID NO: 45589 - protein, 64 aa, Homo sapiens
  Payload ID: 9298
  Gene Symbol: LRRC36
  Gene Name: leucine rich repeat containing 36
  ENSP ID: ENSP00000456347
MAEQWELDEEGIRRLGALTLEQPDSNKGLFIPFPNREIKDSLSTSATQGNGTRDQKLDTFPLGT

SEQ ID NO: 45590 - protein, 22 aa, Homo sapiens
  Payload ID: 9298
  Gene Symbol: LRRC36
  Gene Name: leucine rich repeat containing 36
  ENSP ID: ENSP00000456517
MLRPRFLPPDDRTVREALGRRQ

SEQ ID NO: 45591 - protein, 83 aa, Homo sapiens
  Payload ID: 9298
  Gene Symbol: LRRC36
  Gene Name: leucine rich repeat containing 36
  ENSP ID: ENSP00000456814
MKNCVTGESSASKVSANVDSRIEMDSNKGLFIPFPNREIKDSLSTSATQGNGTRDQKLDTFPLGTQTQEVARREMPSDNHQED

SEQ ID NO: 45592 - protein, 29 aa, Homo sapiens
  Payload ID: 9298
  Gene Symbol: LRRC36
  Gene Name: leucine rich repeat containing 36
  ENSP ID: ENSP00000464367
MKNCVTGESSASKVSANVDSRIEMDSNKG

SEQ ID NO: 45593 - protein, 275 aa, Homo sapiens
  Payload ID: 9298
  Gene Symbol: LRRC36
  Gene Name: leucine rich repeat containing 36
  ENSP ID: ENSP00000464675
  MOD_RES (1)..(1): Any amino acid
XDEEGIRRLGALTLEQPETGSCYVAQAGLELLDSSNPVSASPVTETTELVESLSLQGSYAGKIHSIGDAFRNFKNLRSLDLSRNLITSLKGIQYLCSLQDLNLYYNNIPSLVEVSRLQPLPFLKELDLRLNPVVRKDTDYRLFAVYTLQTLEKLDDRTVREGERKAAKLHFSQLGNSENFLLEVEKSSREKTMKNCVTGESSASKVSANVDSRIEMDSNKGLFIPFPNREIKDSLSTSATQGNGTRDQKLDTFPLGTQICMPQPISTVTLLYLSM

SEQ ID NO: 45594 - protein, 1700 aa, Homo sapiens
  Payload ID: 9299
  Gene Symbol: LRRC37A2
  Gene Name: leucine rich repeat containing 37, member A2
  Uniprot ID: A6NM11
  ENSP ID: ENSP00000333071
MSSAQCPALVCVMSRLRFWGPWPLLMWQLLWLLVKEAQPLEWVKDPLQLTSNPLGPPDSWSSHSSHFPRESPHAPTLPADPWDFDHLGPSASSEMPAPPQESTENLVPFLDTWDSAGEQPLEPEQFLASQQDLKDKLSPQERLPVSPKKLKKDPAQRWSLAEIIGITRQLSTPQSQKQTLQNEYSSTDTPYPGSLPPELRVKSDEPPGPSEQVGPSQFHLEPETQNPETLEDIQSSSLQQEAPAQLPQLLEEEPSSMQQEAPALPPESSMESLTLPNHEVSVQPPGEDQAYYHLPNITVKPADVEVTITSEPTNETESSQAQQETPIQFPEEVEPSATQQEAPIEPPVPPMEHELSISEQQQPVQPSESPREVESSPTQQETPGQPPEHHEVTVSPPGHHQTHHLASPSVSVKPPDVQLTIAAEPSAEVGTSLVHQEATTRLSGSGNDVEPPAIQHGGPPLLPESSEEAGPLAVQQETSFQSPEPINNENPSPTQQEAAAEHPQTAEEGESSLTHQEAPAQTPEFPNVVVAQPPEHSHLTQATVQPLDLGFTITPESKTEVELSPTMKETPTQPPKKVVPQLRVYQGVTNPTPGQDQAQHPVSPSVTVQLLDLGLTITPEPTTEVGHSTPPKRTIVSPKHPEVTLPHPDQVQTQHSHLTRATVQPLDLGFTITPKSMTEVEPSTALMTTAPPPGHPEVTLPPSDKGQAQHSHLTQATVQPLDLELTITTKPTTEVKPSPTTEETSTQPPDLGLAIIPEPTTETRHSTALEKTTAPRPDRVQTLHRSLTEVTGPPTELEPAQDSLVQSESYTQNKALTAPEEHKASTSTNICELCTCGDEMLSCIDLNPEQRLRQVPVPEPNTHNGTFTILNFQGNYISYIDGNVWKAYSWTEKLILRENNLTELHKDSFEGLLSLQYLDLSCNKIQSIERHTFEPLPFLKFINLSCNVITELSFGTFQAWHGMQFLHKLILNHNPLTTVEDPYLFKLPALKYLDMGTTLVPLTTLKNILMMTVELEKLILPSHMACCLCQFKNSIEAVCKTVKLHCNSACLTNTTHCPEEASVGNPEGAFMKVLQARKNYTSTELIVEPEEPSDSSGINLSGFGSEQLDTNDESDFISTLSYILPYFSAVNLDVKSLLLPFIKLPTTGNSLAKIQTVGQNRQRVKRVLMGPRSIQKRHFKEVGRQSIRREQGAQASVENAAEEKRLGSPAPREVEQPHTQQGPEKLAGNAVYTKPSFTQEHKAAVSVLKPFSKGAPSTSSPAKALPQVRDRWKDLTHAISILESAKARVTNTKTSKPIVHARKKYRFHKTRSHVTHRTPKVKKSPKVRKKSYLSRLMLANRLPFSAAKSLINSPSQGAFSSLGDLSPQENPFLEVSAPSEHFIENNNTKHTTARNAFEENDFMENTNMPEGTISENTNYNHPHEADSAGTAFNLGPTVKQTETKWEYNNVGTDLSPEPKSFNYPLLSSPGDQFEIQLTQQLQSLIPNNNVRRLIAHVIRTLKMDCSGAHVQVTCAKLISRTGHLMKLLSGQQEVKASKIEWDTDQWKIENYINESTEAQSEQKEKSLELKKEVPGYGYTDKLILALIVTGILTILIILFCLIVICCHRRSLQEDEEGFSRGIFRFLPWRGCSSRRESQDGLSSFGQPLWFKDMYKPLSATRINNHAWKLHKKSSNEDKILNRDPGDSEAPTEEEESEALP

SEQ ID NO: 45595 - protein, 1700 aa, Homo sapiens; identical to SEQ ID NO: 45594
  Payload ID: 9299
  Gene Symbol: LRRC37A2
  Gene Name: leucine rich repeat containing 37, member A2
  Uniprot ID: A6NM11
  ENSP ID: ENSP00000459551

SEQ ID NO: 45596 - protein, 1700 aa, Homo sapiens
  Payload ID: 9299
  Gene Symbol: LRRC37A2
  Gene Name: leucine rich repeat containing 37, member A2
  ENSP ID: ENSP00000481827
MTSAQCPALACVMSPLRFWGPWPLLMWQLLWLLVKEAQPLEWVKDPLQLTSNPLGPPEPWSSHSSHFPRESPHAPTLPADPWDFDHLGPSASSEMPAPPQESTENLVPFLDTWDSAGELPLEPEQFLASQQDLKDKLSPQERLPVSPKKLKKDPAQRWSLAEIIGIIRQLSTPQSQKQTLQNEYSSTDTPYPGSLPPELRVKSDEPPGPSEQVGPSQFHLEPETQNPETLEDIQSSSLQQEAPAQLPQLLEEEPSSMQQEAPALPPESSMESLTLPNHEVSVQPPGEDQAYYHLPNITVKPADVEVTITSEPTNETESSQAQQETPIQFPEEVEPSATQQEAPIEPPVPPMEHELSISEQQQPVQPSESPREVESSPTQQETPGQPPEHHEVTVSPPGHHQTHHLASPSVSVKPPDVQLTIAAEPSAEVGTSLVHQEATTRLSGSGNDVEPPAIQHGGPPLLPESSEEAGPLAVQQETSFQSPEPINNENPSPTQQEAAAEHPQTAEEGESSLTHQEAPAQTPEFPNVVVAQPPEHSHLTQATVQPLDLGFTITPESKTEVELSPTMKETPTQPPKKVVPQLRVYQGVTNPTPGQDQAQHPVSPSVTVQLLDLGLTITPEPTTEVGHSTPPKRTIVSPKHPEVTLPHPDQVQTQHSHLTRATVQPLDLGFTITPKSMTEVEPSTALMTTAPPPGHPEVTLPPSDKGQAQHSHLTQATVQPLDLELTITTKPTTEVKPSPTTEETSTQPPDLGLAIIPEPTTETGHSTALEKTTAPRPDRVQTLHRSLTEVTGPPTELEPAQDSLVQSESYTQNKALTAPEEHKASTSTNICELCTCGDEMLSCIDLNPEQRLRQVPVPEPNTHNGTFTILNFQGNYISYIDGNVWKAYSWTEKLILRENNLTELHKDSFEGLLSLQYLDLSCNKIQSIERHTFEPLPFLKFINLSCNVITELSFGTFQAWHGMQFLHKLILNHNPLTTVEDPYLFKLPALKYLDMGTTLVPLTTLKNILMMTVELEKLILPSHMACCLCQFKNSIEAVCKTVKLHCNSACLTNTTHCPEEASVGNPEGAFMKVLQARKNYTSTELIVEPEEPSDSSGINLSGFGSEQLDTNDESDFISTLRYILPYFSAVNLDVKSLLLPLIKLPTTGNSLAKIQTVGQNRQRVKRVLMGPRSIQKRHFKEVGRQSIRREQGAQASVENAAEEKRLGSPAPREVEQPHTQQGPEKLAGNAVYTKPSFTQEHKAAVSVLKPFSKGAPSTSSPAKALPQVRDRWKDLTHAISTLESAKARVTNTKTSKPIVHARKKYRFHKTRSHVTHRTPKVKKSPKVRKKSYLSRLMLANRLPFSAAKSLINSPSQGAFSSLGDLSPQENPFLEVSAPSEHFIEKNNTKHTTARNAFEENDFMENTNMPEGTISENTNYNHPPEADSAGTAFNLGPTVKQTETKWEYNNVGTDLSPEPKSFNYPLLSSPGDQFEIQLTQQLQSLIPNNNVRRLIAHVIRTLKMDCSGTHVQVTCAKLISRTGHLMKLLSGQQEVKASKIEWDTDQWKIENYINESTEAQSEQKEKSLELKKEVPGYGYTDKLILALIVTGILTILIILFCLIVICCHRRSLQEDEEGFSRGIFRFLPRRGCSSRRESQDGLSSFGQPLWFKDMYKPLSATRINNHAWKLHKKSSNEDKILNRDPGDSEAPTEEEESEALP

SEQ ID NO: 45597 - protein, 1700 aa, Homo sapiens
  Payload ID: 9299
  Gene Symbol: LRRC37A2
  Gene Name: leucine rich repeat containing 37, member A2
  ENSP ID: ENSP00000482650
MTSAQCPALACVMSPLRFWGPWPLLMWQLLWLLVKEAQPLEWVKDPLQLTSNPLGPPEPWSSHSSHFPRESPHAPTLPADPWDFDHLGPSASSEMPAPPQESTENLVPFLDTWDSAGELPLEPEQFLASQQDLKDKLSPQERLPVSPKKLKKDPAQRWSLAEIIGIIRQLSTPQSQKQTLQNEYSSTDTPYPGSLPPELRVKSDEPPGPSEQVGPSQFHLEPETQNPETLEDIQSSSLQQEAPAQLPQLLEEEPSSMQQEAPALPPESSMESLTLPNHEVSVQPPGEDQAYYHLPNITVKPADVEVTITSEATNETESSQAQQETPIQFPEEVEPSATQQEAPIEPPVPPMEHELSISEQQQPVQPSETSREVESSPTQQETPGQPPEHHEVTVSPPGDHQTHHLDSPSVSVKPPDVQLTIAAEPSAEVGTSLVQQEATTRLSGSGNDIEPPAIQHGGPPLLSESSEEAGPLAVQQETSFQSPEPINNENPSPTQQEAAAEHPQTAEEGESSLTHQEAPAQTPEFPNVVVAQPPEHSHLTQATVQPLDLGFTITPESMTEVELSPTMKETPTQPPKKVVPQLRVYQGVTNPTPGQDQAQHPVSPSVTVQLLDLGLTITPEPTTEVGHSTPPKRTIVSPKHPEVTLPHPDQVQTQHSHLTRATVQPLDLGFTITPKSMTEVEPSTALMTTAPPPGHPEVTLPPSDKGQAQHSHLTQATVQPLDLELTITTKPTTEVKPSPTTEETSTQPPDLGLAIIPEPTTETGHSTALEKTTAPRPDRVQTLHRSLTEVTGPPTELEPAQDSLVQSESYTQNKALTAPEEHKASTSTNICELCTCGDEMLSCIDLNPEQRLRQVPVPEPNTHNGTFTILNFQGNYISYIDGNVWKAYSWTEKLILRENNLTELHKDSFEGLLSLQYLDLSCNKIQSIERHTFEPLPFLKFINLSCNVITELSFGTFQAWHGMQFLHKLILNHNPLTTVEDPYLFKLPALKYLDMGTTLVPLTTLKNILMMTVELEKLILPSHMACCLCQFKNSIEAVCKTVKLHCNSACLTNTTHCPEEASVGNPEGAFMKVLQARKNYTSTELIVEPEEPSDSSGINLSGFGSEQLDTNDESDFISTLSYILPYFSAVNLDVKSLLLPLIKLPTTGNSLAKIQTVGQNRQRVKRVLMGPRSIQKRHFKEVGRQSIRREQGAQASVENAAEEKRLGSPAPREVEQPHTQQGPEKLAGNAVYTKPSFTQEHKAAVSVLKPFSKGAPSTSSPAKALPQVRDRWKDLTHAISILESAKARVTNTKTSKPIVHARKKYRFHKTRSHVTHRTPKVKKSPKVRKKSYLSRLMLANRLPFSAAKSLINSPSQGAFSSLGDLSPQENPFLEVSAPSEHFIEKNNTKHTTARNAFEENDFMENTNMPEGTISENTNYNHPPEADSAGTAFNLGPTVKQTETKWEYNNVGTDLSPEPKSFNYPLLSSPGDQFEIQLTQQLQSLIPNNNVRRLIAHVIRTLKMDCSGAHVQVTCAKLISRTGHLMKLLSGQQEVKASEIEWDTDQWKIENYINESTEAQSEQKEKSLELKKEVPGYGYTDKLILALIVTGILTILIILFCLIVICCHRRSLQEDEEGFSRGIFRFLPRRGCSSRRESQDGLSSFGQPLWFKDMYKPLSATRINNHAWKLHKKSSNEDKILNRDPGDSEAPTEEEESEALP

SEQ ID NO: 45598 - protein, 738 aa, Homo sapiens
  Payload ID: 9299
  Gene Symbol: LRRC37A2
  Gene Name: leucine rich repeat containing 37, member A2
  ENSP ID: ENSP00000486567
MQFLHKLILNHNPLTTVEDPYLFKLPALKYLDMGTTLVPLTTLKNILMMTVELEKLILPSHMACCLCQFKNSIEAVCKTVKLHCNSACLTNTTHCPEEASVGNPEGAFMKVLQARKNYTSTELIVEPEEPSDSSGINLSGFGSEQLDTNDESDFISTLRYILPYFSAVNLDVKSLLLPLIKLPTTGNSLAKIQTVGQNRQRVKRVLMGPRSIQKRHFKEVGRQSIRREQGAQASVENAAEEKRLGSPAPREVEQPHTQQGPEKLAGNAVYTKPSFTQEHKAAVSVLKPFSKGAPSTSSPAKALPQVRDRWKDLTHAISTLESAKARVTNTKTSKPIVHARKKYRFHKTRSHVTHRTPKVKKSPKVRKKSYLSRLMLANRLPFSAAKSLINSPSQGAFSSLGDLSPQENPFLEVSAPSEHFIEKNNTKHTTARNAFEENDFMENTNMPEGTISENTNYNHPPEADSAGTAFNLGPTVKQTETKWEYNNVGTDLSPEPKSFNYPLLSSPGDQFEIQLTQQLQSLIPNNNVRRLIAHVIRTLKMDCSGTHVQVTCAKLISRTGHLMKLLSGQQEVKASKIEWDTDQWKIENYINESTEAQSEQKEKSLELKKEVPGYGYTDKLILALIVTGILTILIILFCLIVICCHRRSLQEDEEGFSRGIFRFLPRRGCSSRRESQDGLSSFGQPLWFKDMYKPLSATRINNHAWKLHKKSSNEDKILNRDPGDSEAPTEEEESEALP

SEQ ID NO: 45599 - protein, 1635 aa, Homo sapiens
  Payload ID: 9299
  Gene Symbol: LRRC37A2
  Gene Name: leucine rich repeat containing 37, member A2
  ENSP ID: ENSP00000487340
MTSAQCPALACVMSPLRFWGPWPLLMWQLLWLLVKEAQPLEWVKDPLQLTSNPLGPPEPWSSHSSHFPRESPHAPTLPADPWDFDHLGPSASSEMPAPPQESTENLVPFLDTWDSAGELPLEPEQFLASQQDLKDKLSPQERLPVSPKKLKKDPAQRWSLAEIIGIIRQLSTPQSQKQTLQNEYSSTDTPYPGSLPPELRVKSDEPPGPSEQVGPSQFHLEPETQNPETLEDIQSSSLQQEAPAQLPQLLEEEPSSMQQEAPALPPESSMESLTLPNHEVSVQPPGEDQAYYHLPNITVKPADVEVTITSEPTNETESSQAQQETPIQFPEEVEPSATQQEAPIEPPVPPMEHELSISEQQQPVQPSESPREVESSPTQQETPGQPPEHHEVTVSPPGHHQTHHLASPSVSVKPPDVQLTIAAEPSAEVGTSLVHQEATTRLSGSGNDVEPPAIQHGGPPLLPESSEEAGPLAVQQETSFQSPEPINNENPSPTQQEAAAEHPQTAEEGESSLTHQEAPAQTPEFPNVVVAQPPEHSHLTQATVQPLDLGFTITPESKTEVELSPTMKETPTQPPKKVVPQLRVYQGVTNPTPGQDQAQHPVSPSVTVQLLDLGLTITPEPTTEVGHSTPPKRTIVSPKHPEVTLPHPDQVQTQHSHLTRATVQPLDLGFTITPKSMTEVEPSTALMTTAPPPGHPEVTLPPSDKGQAQHSHLTQATVQPLDLELTITTKPTTEVKPSPTTEETSTQPPDLGLAIIPEPTTETGHSTALEKTTAPRPDRVQTLHRSLTEVTGPPTELEPAQDSLVQSESYTQNKALTAPEEHKASTSTNICELCTCGDEMLSCIDLNPEQRLRQVPVPEPNTHNGTFTILNFQGNYISYIDGNVWKAYSWTEKLILRENNLTELHKDSFEGLLSLQYLDLSCNKIQSIERHTFEPLPFLKFINLSCNVITELSFGTFQAWHGMQFLHKLILNHNPLTTVEDPYLFKLPALKYLDMGTTLVPLTTLKNILMMTVELEKLILPSHMACCLCQFKNSIEAVCKTVKLHCNSACLTNTTHCPEEASVGNPEGAFMKVLQARKNYTSTELIVEPEEPSDSSGINLSGFGSEQLDTNDESDFISTLRYILPYFSAVNLDVKSLLLPLIKLPTTGNSLAKIQTVGQNRQRVKRVLMGPRSIQKRHFKEVGRQSIRREQGAQASVENAAEEKRLGSPAPREVEQPHTQQGPEKLAGNAVYTKPSFTQEHKAAVSVLKPFSKGAPSTSSPAKALPQVRDRWKDLTHAISTLESAKARVTNTKTSKPIVHARKKYRFHKTRSHVTHRTPKVKKSPKVRKKSYLSRLMLANRLPFSAAKSLINSPSQGAFSSLGDLSPQENPFLEVSAPSEHFIEKNNTKHTTARNAFEENDFMENTNMPEGTISENTNYNHPPEADSAGTAFNLGPTVKQTETKWEYNNVGTDLSPEPKSFNYPLLSSPGDQFEIQLTQQLQSLIPNNNVRRLIAHVIRTLKMDCSGTHVQVTCAKLISRTGHLMKLLSGQQEVKASKIEWDTDQWKIENYINESTEAQSEQKEKSLELKKEVPGYGYTDKLILALIVTGILTILIILFCLIVICCHRRSLQEDEEGFSRDSEAPTEEEESEALP

SEQ ID NO: 45600 - protein, 1676 aa, Homo sapiens
  Payload ID: 9299
  Gene Symbol: LRRC37A2
  Gene Name: leucine rich repeat containing 37, member A2
  ENSP ID: ENSP00000487612
MTSAQCPALACVMSPLRFWGPWPLLMWQLLWLLVKEAQPLEWVKDPLQLTSNPLGPPEPWSSHSSHFPRESPHAPTLPADPWDFDHLGPSASSEMPAPPQESTENLVPFLDTWDSAGELPLEPEQFLASQQDLKDKLSPQERLPVSPKKLKKDPAQRWSLAEIIGIIRQLSTPQSQKQTLQNEYSSTDTPYPGSLPPELRVKSDEPPGPSEQVGPSQFHLEPETQNPETLEDIQSSSLQQEAPAQLPQLLEEEPSSMQQEAPALPPESSMESLTLPNHEVSVQPPGEDQAYYHLPNITVKPADVEVTITSEATNETESSQAQQETPIQFPEEVEPSATQQEAPIEPPVPPMEHELSISEQQQPVQPSETSREVESSPTQQETPGQPPEHHEVTVSPPGDHQTHHLDSPSVSVKPPDVQLTIAAEPSAEVGTSLVQQEATTRLSGSGNDIEPPAIQHGGPPLLSESSEEAGPLAVQQETSFQSPEPINNENPSPTQQEAAAEHPQTAEEGESSLTHQEAPAQTPEFPNVVVAQPPEHSHLTQATVQPLDLGFTITPESMTEVELSPTMKETPTQPPKKVVPQLRVYQGVTNPTPGQDQAQHPVSPSVTVQLLDLGLTITPEPTTEVGHSTPPKRTIVSPKHPEVTLPHPDQVQTQHSHLTRATVQPLDLGFTITPKSMTEVEPSTALMTTAPPPGHPEVTLPPSDKGQAQHSHLTQATVQPLDLELTITTKPTTEVKPSPTTEETSTQPPDLGLAIIPEPTTETGHSTALEKTTAPRPDRVQTLHRSLTEVTGPPTELEPAQDSLVQSESYTQNKALTAPEEHKASTSTNICELCTCGDEMLSCIDLNPEQRLRQVPVPEPNTHNGTFTILILRENNLTELHKDSFEGLLSLQYLDLSCNKIQSIERHTFEPLPFLKFINLSCNVITELSFGTFQAWHGMQFLHKLILNHNPLTTVEDPYLFKLPALKYLDMGTTLVPLTTLKNILMMTVELEKLILPSHMACCLCQFKNSIEAVCKTVKLHCNSACLTNTTHCPEEASVGNPEGAFMKVLQARKNYTSTELIVEPEEPSDSSGINLSGFGSEQLDTNDESDFISTLSYILPYFSAVNLDVKSLLLPLIKLPTTGNSLAKIQTVGQNRQRVKRVLMGPRSIQKRHFKEVGRQSIRREQGAQASVENAAEEKRLGSPAPREVEQPHTQQGPEKLAGNAVYTKPSFTQEHKAAVSVLKPFSKGAPSTSSPAKALPQVRDRWKDLTHAISILESAKARVTNTKTSKPIVHARKKYRFHKTRSHVTHRTPKVKKSPKVRKKSYLSRLMLANRLPFSAAKSLINSPSQGAFSSLGDLSPQENPFLEVSAPSEHFIEKNNTKHTTARNAFEENDFMENTNMPEGTISENTNYNHPPEADSAGTAFNLGPTVKQTETKWEYNNVGTDLSPEPKSFNYPLLSSPGDQFEIQLTQQLQSLIPNNNVRRLIAHVIRTLKMDCSGAHVQVTCAKLISRTGHLMKLLSGQQEVKASEIEWDTDQWKIENYINESTEAQSEQKEKSLELKKEVPGYGYTDKLILALIVTGILTILIILFCLIVICCHRRSLQEDEEGFSRGIFRFLPRRGCSSRRESQDGLSSFGQPLWFKDMYKPLSATRINNHAWKLHKKSSNEDKILNRDPGDSEAPTEEEESEALP

SEQ ID NO: 45601 - protein, 738 aa, Homo sapiens
  Payload ID: 9299
  Gene Symbol: LRRC37A2
  Gene Name: leucine rich repeat containing 37, member A2
  ENSP ID: ENSP00000487663
MQFLHKLILNHNPLTTVEDPYLFKLPALKYLDMGTTLVPLTTLKNILMMTVELEKLILPSHMACCLCQFKNSIEAVCKTVKLHCNSACLTNTTHCPEEASVGNPEGAFMKVLQARKNYTSTELIVEPEEPSDSSGINLSGFGSEQLDTNDESDFISTLSYILPYFSAVNLDVKSLLLPLIKLPTTGNSLAKIQTVGQNRQRVKRVLMGPRSIQKRHFKEVGRQSIRREQGAQASVENAAEEKRLGSPAPREVEQPHTQQGPEKLAGNAVYTKPSFTQEHKAAVSVLKPFSKGAPSTSSPAKALPQVRDRWKDLTHAISILESAKARVTNTKTSKPIVHARKKYRFHKTRSHVTHRTPKVKKSPKVRKKSYLSRLMLANRLPFSAAKSLINSPSQGAFSSLGDLSPQENPFLEVSAPSEHFIEKNNTKHTTARNAFEENDFMENTNMPEGTISENTNYNHPPEADSAGTAFNLGPTVKQTETKWEYNNVGTDLSPEPKSFNYPLLSSPGDQFEIQLTQQLQSLIPNNNVRRLIAHVIRTLKMDCSGAHVQVTCAKLISRTGHLMKLLSGQQEVKASEIEWDTDQWKIENYINESTEAQSEQKEKSLELKKEVPGYGYTDKLILALIVTGILTILIILFCLIVICCHRRSLQEDEEGFSRGIFRFLPRRGCSSRRESQDGLSSFGQPLWFKDMYKPLSATRINNHAWKLHKKSSNEDKILNRDPGDSEAPTEEEESEALP

SEQ ID NO: 45602 - protein, 1611 aa, Homo sapiens
  Payload ID: 9299
  Gene Symbol: LRRC37A2
  Gene Name: leucine rich repeat containing 37, member A2
  ENSP ID: ENSP00000488106
MTSAQCPALACVMSPLRFWGPWPLLMWQLLWLLVKEAQPLEWVKDPLQLTSNPLGPPEPWSSHSSHFPRESPHAPTLPADPWDFDHLGPSASSEMPAPPQESTENLVPFLDTWDSAGELPLEPEQFLASQQDLKDKLSPQERLPVSPKKLKKDPAQRWSLAEIIGIIRQLSTPQSQKQTLQNEYSSTDTPYPGSLPPELRVKSDEPPGPSEQVGPSQFHLEPETQNPETLEDIQSSSLQQEAPAQLPQLLEEEPSSMQQEAPALPPESSMESLTLPNHEVSVQPPGEDQAYYHLPNITVKPADVEVTITSEATNETESSQAQQETPIQFPEEVEPSATQQEAPIEPPVPPMEHELSISEQQQPVQPSETSREVESSPTQQETPGQPPEHHEVTVSPPGDHQTHHLDSPSVSVKPPDVQLTIAAEPSAEVGTSLVQQEATTRLSGSGNDIEPPAIQHGGPPLLSESSEEAGPLAVQQETSFQSPEPINNENPSPTQQEAAAEHPQTAEEGESSLTHQEAPAQTPEFPNVVVAQPPEHSHLTQATVQPLDLGFTITPESMTEVELSPTMKETPTQPPKKVVPQLRVYQGVTNPTPGQDQAQHPVSPSVTVQLLDLGLTITPEPTTEVGHSTPPKRTIVSPKHPEVTLPHPDQVQTQHSHLTRATVQPLDLGFTITPKSMTEVEPSTALMTTAPPPGHPEVTLPPSDKGQAQHSHLTQATVQPLDLELTITTKPTTEVKPSPTTEETSTQPPDLGLAIIPEPTTETGHSTALEKTTAPRPDRVQTLHRSLTEVTGPPTELEPAQDSLVQSESYTQNKALTAPEEHKASTSTNICELCTCGDEMLSCIDLNPEQRLRQVPVPEPNTHNGTFTILILRENNLTELHKDSFEGLLSLQYLDLSCNKIQSIERHTFEPLPFLKFINLSCNVITELSFGTFQAWHGMQFLHKLILNHNPLTTVEDPYLFKLPALKYLDMGTTLVPLTTLKNILMMTVELEKLILPSHMACCLCQFKNSIEAVCKTVKLHCNSACLTNTTHCPEEASVGNPEGAFMKVLQARKNYTSTELIVEPEEPSDSSGINLSGFGSEQLDTNDESDFISTLSYILPYFSAVNLDVKSLLLPLIKLPTTGNSLAKIQTVGQNRQRVKRVLMGPRSIQKRHFKEVGRQSIRREQGAQASVENAAEEKRLGSPAPREVEQPHTQQGPEKLAGNAVYTKPSFTQEHKAAVSVLKPFSKGAPSTSSPAKALPQVRDRWKDLTHAISILESAKARVTNTKTSKPIVHARKKYRFHKTRSHVTHRTPKVKKSPKVRKKSYLSRLMLANRLPFSAAKSLINSPSQGAFSSLGDLSPQENPFLEVSAPSEHFIEKNNTKHTTARNAFEENDFMENTNMPEGTISENTNYNHPPEADSAGTAFNLGPTVKQTETKWEYNNVGTDLSPEPKSFNYPLLSSPGDQFEIQLTQQLQSLIPNNNVRRLIAHVIRTLKMDCSGAHVQVTCAKLISRTGHLMKLLSGQQEVKASEIEWDTDQWKIENYINESTEAQSEQKEKSLELKKEVPGYGYTDKLILALIVTGILTILIILFCLIVICCHRRSLQEDEEGFSRDSEAPTEEEESEALP

SEQ ID NO: 45603 - protein, 1634 aa, Homo sapiens
  Payload ID: 9300
  Gene Symbol: LRRC37A3
  Gene Name: leucine rich repeat containing 37, member A3
  Uniprot ID: O60309
  ENSP ID: ENSP00000325713
MTSAQCPALACVMSPLRFWGPWPLLMWQLLWLLVKEAQPLEWVKDPLQLTSNPLGPPEPWSSHSSHFPRESPHAPTLPADPWDFDHLGPSASSEMPAPPQESTENLVPFLDTWDSAGELPLEPEQFLASQQDLKDKLSPQERLPVSPKKLKKDPAQRWSLAEIIGIIHQLSTPQSQKQTLQNEYSSTDTPYPGSLPPELRVKSDEPPGPSEQVGPSQFHLEPETQNPETLEDIQSSSLQQEAPAQLPQLLEEEPSSMQQEAPALPPESSMESLTLPNHEVSVQPPGEDQAYYHLPNITVKPADVEVTITSEPTNETESSQAQQETPIQFPEEVEPSATQQEAPIEPPVPPMEHELSISEQQQPVQPSESSREVESSPTQQETPGQPPEHHEVTVSPPGHHQTHHLASPSVSVKPPDVQLTIAAEPSAEVGTSLVHQEATTRLSGSGNDVEPPAIQHGGPPLLPESSEEAGPLAVQQETSFQSPEPINNENPSPTQQEAAAEHPQTAEEGESSLTHQEAPAQTPEFPNVVVAQPPEHSHLTQATVQPLDLGFTITPESMTEVELSPTMKETPTQPPKKVVPQLRVYQGVTNPTPGQDQAQHPVSPSVTVQLLDLGLTITPEPTTEVGHSTPPKRTIVSPKHPEVTLPHPDQVQTQHSHLTRATVQPLDLGFTITPKSMTEVEPSTALMTTAPPPGHPEVTLPPSDKGQAQHSHLTQATVQPLDLELTITTKPTTEVKPSPTTEETSTQLPDLGLAIIPEPTTETGHSTALEKTTAPRPDRVQTLHRSLTEVTGPPTELEPAQDSLVQSESYTQNKALTAPEEHKASTSTNICELCTCGDEMLSCIDLNPEQRLRQVPVPEPNTHNGTFTILNFQGNYISYIDGNVWKAYSWTEKLILRENNLTELHKDSFEGLLSLQYLDLSCNKIQSIERHTFEPLPFLKFINLSCNVITELSFGTFQAWHGMQFLHKLILNHNPLTTVEDPYLFKLPALKYLDMGTTLVPLTTLKNILMMTVELEKLIVPSHMACCLCQFKNSIEAVCKTVKLHCNSACLTNTTHCPEEASVGNPEGAFMKVLQARKNYTSTELIIEPEEPSDSSGINLSGFGSEQLDTNDESDVTSTLSYILPYFSAVNLDVKSLLLPFIKLPTTGNSLAKIQTVGKNRQRLNRVLMGPRSIQKRHFKEVGRQSIRREQGAQASVENTAEEKRLGSPAPRELKQPHTQQGPEKLAGNAVYTKPSFTQEHKAAVSVLKPFSKGAPSTSSPAKALPQVRDRWKDLTHAISILESAKARVTNMKTSKPIVHSRKKYRFHKTRSRMTHRTPKVKKSPKVRKKSYLSRLMLSNRLPFSAAKSLINSPSQGAFSSLRDLSPQENPFLEVSAPSEHFIENNNTKDTTARNAFEENVFMENTNMPEGTISENTNYNHPPEADSAGTAFNLGPTVKQTETKWEYNNVGTDLSPEPKSFNYPLLSSPGDQFEIQLTQQLQSVIPNNNVRRLIAHVIRTLKMDCSGAHVQVTCAKLVSRTGHLMKLLSGQQEVKASKIEWDTDQWKTENYINESTEAQSEQKEKSLEFTKELPGYGYTKKLILALIVTGILTILIILLCLIEICCHRRSLQEDEEGFSRDSEAPTEEESEALP

SEQ ID NO: 45604 - protein, 611 aa, Homo sapiens
  Payload ID: 9300
  Gene Symbol: LRRC37A3
  Gene Name: leucine rich repeat containing 37, member A3
  ENSP ID: ENSP00000335617
MACCLCQFKNSIEAVCKTVKLHCNSACLTNTTHCPEEASVGNPEGAFMKVLQARKNYTSTELIIEPEEPSDSSGINLSGFGSEQLDTNDESDVTSTLSYILPYFSAVNLDVKSLLLPFIKLPTTGNSLAKIQTVGKNRQRLNRVLMGPRSIQKRHFKEVGRQSIRREQGAQASVENTAEEKRLGSPAPRELKQPHTQQGPEKLAGNAVYTKPSFTQEHKAAVSVLKPFSKGAPSTSSPAKALPQVRDRWKDLTHAISILESAKARVTNMKTSKPIVHSRKKYRFHKTRSRMTHRTPKVKKSPKVRKKSYLSRLMLSNRLPFSAAKSLINSPSQGAFSSLRDLSPQENPFLEVSAPSEHFIENNNTKDTTARNAFEENVFMENTNMPEGTISENTNYNHPPEADSAGTAFNLGPTVKQTETKWEYNNVGTDLSPEPKSFNYPLLSSPGDQFEIQLTQQLQSVIPNNNVRRLIAHVIRTLKMDCSGAHVQVTCAKLVSRTGHLMKLLSGQQEVKASKIEWDTDQWKTENYINESTEAQSEQKEKSLEFTKELPGYGYTKKLILALIVTGILTILIILLCLIEICCHRRSLQEDEEGFSRDSEAPTEEESEALP

SEQ ID NO: 45605 - protein, 752 aa, Homo sapiens
  Payload ID: 9300
  Gene Symbol: LRRC37A3
  Gene Name: leucine rich repeat containing 37, member A3
  ENSP ID: ENSP00000344298
MEFHRVAQAGVELLSSGDPPASASQSVGIIGVSHCTWHRNFQGNYISYIDGNVWKAYSWTEKLILRENNLTELHKDSFEGLLSLQYLILNHNPLTTVEDPYLFKLPALKYLDMGTTLVPLTTLKNILMMTVELEKLIVPSHMACCLCQFKNSIEAVCKTVKLHCNSACLTNTTHCPEEASVGNPEGAFMKVLQARKNYTSTELIIEPEEPSDSSGINLSGFGSEQLDTNDESDVTSTLSYILPYFSAVNLDVKSLLLPFIKLPTTGNSLAKIQTVGKNRQRLNRVLMGPRSIQKRHFKEVGRQSIRREQGAQASVENTAEEKRLGSPAPRELKQPHTQQGPEKLAGNAVYTKPSFTQEHKAAVSVLKPFSKGAPSTSSPAKALPQVRDRWKDLTHAISILESAKARVTNMKTSKPIVHSRKKYRFHKTRSRMTHRTPKVKKSPKVRKKSYLSRLMLSNRLPFSAAKSLINSPSQGAFSSLRDLSPQENPFLEVSAPSEHFIENNNTKDTTARNAFEENVFMENTNMPEGTISENTNYNHPPEADSAGTAFNLGPTVKQTETKWEYNNVGTDLSPEPKSFNYPLLSSPGDQFEIQLTQQLQSVIPNNNVRRLIAHVIRTLKMDCSGAHVQVTCAKLVSRTGHLMKLLSGQQEVKASKIEWDTDQWKTENYINESTEAQSEQKEKSLEFTKELPGYGYTKKLILALIVTGILTILIILLCLIEICCHRRSLQEDEEGFSRDSEAPTEEESEALP

SEQ ID NO: 45606 - protein, 672 aa, Homo sapiens
  Payload ID: 9300
  Gene Symbol: LRRC37A3
  Gene Name: leucine rich repeat containing 37, member A3
  ENSP ID: ENSP00000383674
MQFLHKLILNHNPLTTVEDPYLFKLPALKYLDMGTTLVPLTTLKNILMMTVELEKLIVPSHMACCLCQFKNSIEAVCKTVKLHCNSACLTNTTHCPEEASVGNPEGAFMKVLQARKNYTSTELIIEPEEPSDSSGINLSGFGSEQLDTNDESDVTSTLSYILPYFSAVNLDVKSLLLPFIKLPTTGNSLAKIQTVGKNRQRLNRVLMGPRSIQKRHFKEVGRQSIRREQGAQASVENTAEEKRLGSPAPRELKQPHTQQGPEKLAGNAVYTKPSFTQEHKAAVSVLKPFSKGAPSTSSPAKALPQVRDRWKDLTHAISILESAKARVTNMKTSKPIVHSRKKYRFHKTRSRMTHRTPKVKKSPKVRKKSYLSRLMLSNRLPFSAAKSLINSPSQGAFSSLRDLSPQENPFLEVSAPSEHFIENNNTKDTTARNAFEENVFMENTNMPEGTISENTNYNHPPEADSAGTAFNLGPTVKQTETKWEYNNVGTDLSPEPKSFNYPLLSSPGDQFEIQLTQQLQSVIPNNNVRRLIAHVIRTLKMDCSGAHVQVTCAKLVSRTGHLMKLLSGQQEVKASKIEWDTDQWKTENYINESTEAQSEQKEKSLEFTKELPGYGYTKKLILALIVTGILTILIILLCLIEICCHRRSLQEDEEGFSRDSEAPTEEESEALP

SEQ ID NO: 45607 - protein, 231 aa, Homo sapiens
  Payload ID: 9300
  Gene Symbol: LRRC37A3
  Gene Name: leucine rich repeat containing 37, member A3
  ENSP ID: ENSP00000462864
  MOD_RES (1)..(1): Any amino acid
XALEKTTAPRPDRVQTLHRSLTEVTGPPTELEPAQDSLVQSESYTQNKALTAPEEHKASTSTNICELCTCGDEMLSCIDLNPEQRLRQVPVPEPNTHNGTFTILNFQGNYISYIDGNVWKAYSWTEKLILRENNLTELHKDSFEGLLSLQYLDLSCNKIQSIERHTFEPLPFLKFINLSCNVITELSFGTFQAWHGMQFLHKLIVPSHMACCLCQFKNSIEAVCKTVKLHC

SEQ ID NO: 45608 - protein, 93 aa, Homo sapiens
  Payload ID: 9300
  Gene Symbol: LRRC37A3
  Gene Name: leucine rich repeat containing 37, member A3
  ENSP ID: ENSP00000462872
GAHVQVTCAKLVSRTGHLMKLLSGQQEVKASKIEWDTDQWKTENYINESTEAQSEQKEKSLEICCHRRSLQEDEEGFSRDSEAPTEEESEALP

SEQ ID NO: 45609 - protein, 197 aa, Homo sapiens
  Payload ID: 9300
  Gene Symbol: LRRC37A3
  Gene Name: leucine rich repeat containing 37, member A3
  ENSP ID: ENSP00000463186
  MOD_RES (1)..(1): Any amino acid
XVKPSPTTEETSTQLPDLGLAIIPEPTTETGHSTALEKTTAPRPDRVQTLHRSLTEVTGPPTELEPAQDSLVQSESYTQNKALTAPEEHKASTSTNICELCTCGDEMLSCIDLNPEQRLRQVPVPEPNTHNGTFTILNFQGNYISYIDGNVWKAYSWTEKLILNHNPLTTVEDPYLFKLPALKYLDMGTTLVPLTTL

SEQ ID NO: 45610 - protein, 236 aa, Homo sapiens
  Payload ID: 9300
  Gene Symbol: LRRC37A3
  Gene Name: leucine rich repeat containing 37, member A3
  ENSP ID: ENSP00000463346
MAAEGDPQNFQGNYISYIDGNVWKAYSWTEKLILRENNLTELHKDSFEGLLSLQYLDLSCNKIQSIERHTFEPLPFLKFINLSCNVITELSFGTFQAWHGMQFLHKLILNHNPLTTVEDPYLFKLPALKYLDMGTTLVPLTTLKNILMMTVELEKLIVPSHMACCLCQFKNSIEAVCKTVKLHCNSACLTNTTHCPEEASVGNPEGAFMKVLQARKNYTSTELIIEPEEPSDSSGI

SEQ ID NO: 45611 - protein, 1634 aa, Homo sapiens; identical to SEQ ID NO: 45603
  Payload ID: 9300
  Gene Symbol: LRRC37A3
  Gene Name: leucine rich repeat containing 37, member A3
  Uniprot ID: O60309
  ENSP ID: ENSP00000464535

SEQ ID NO: 45612 - protein, 1700 aa, Homo sapiens
  Payload ID: 9301
  Gene Symbol: LRRC37A
  Gene Name: leucine rich repeat containing 37A
  Uniprot ID: A6NMS7
  ENSP ID: ENSP00000326324
MSSAQCPALVCVMSRLRFWGPWPLLMWQLLWLLVKEAQPLEWVKDPLQLTSNPLGPPESWSSHSSHFPRESPHAPTLPADPWDFDHLGPSASSEMPAPPQESTENLVPFLDTWDSAGEQPLEPEQFLASQQDLKDKLSPQERLPVSPKKLKKDPAQRWSLAEIIGITRQLSTPQSQKQTLQNEYSSTDTPYPGSLPPELRVKSDEPPGPSEQVGPSQFHLEPETQNPETLEDIQSSSLQQEAPAQLPQLLEEEPSSMQQEAPALPPESSMESLTLPNHEVSVQPPGEDQAYYHLPNITVKPADVEVTITSEPTNETESSQAQQETPIQFPEEVEPSATQQEAPIEPPVPPMEHELSISEQQQPVQPSESPREVESSPTQQETPGQPPEHHEVTVSPPGHHQTHHLASPSVSVKPPDVQLTIAAEPSAEVGTSLVHQEATTRLSGSGNDVEPPAIQHGGPPLLPESSEEAGPLAVQQETSFQSPEPINNENPSPTQQEAAAEHPQTAEEGESSLTHQEAPAQTPEFPNVVVAQPPEHSHLTQATVQPLDLGFTITPESKTEVELSPTMKETPTQPPKKVVPQLRVYQGVTNPTPGQDQAQHPVSPSVTVQLLDLGLTITPEPTTEVGHSTPPKRTIVSPKHPEVTLPHPDQVQTQHSHLTRATVQPLDLGFTITPKSMTEVEPSTALMTTAPPPGHPEVTLPPSDKGQAQHSHLTQATVQPLDLELTITTKPTTEVKPSPTTEETSTQPPDLGLAIIPEPTTETGHSTALEKTTAPRPDRVQTLHRSLTEVTGPPTELEPAQDSLVQSESYTQNKALTAPEEHKASTSTNICELCTCGDEMLSCIDLNPEQRLRQVPVPEPNTHNGTFTILNFQGNYISYIDGNVWKAYSWTEKLILRENNLTELHKDSFEGLLSLQYLDLSCNKIQSIERHTFEPLPFLKFINLSCNVITELSFGTFQAWHGMQFLHKLILNHNPLTTVEDPYLFKLPALKYLDMGTTLVPLTTLKNILMMTVELEKLILPSHMACCLCQFKNSIEAVCKTVKLHCNSACLTNTTHCPEEASVGNPEGAFMKVLQARKNYTSTELIVEPEEPSDSSGINLSGFGSEQLDTNDESDFISTLSYILPYFSAVNLDVKSLLLPFIKLPTTGNSLAKIQTVGQNRQRVKRVLMGPRSIQKRHFKEVGRQSIRREQGAQASVENAAEEKRLTSPAPREVEQPHTQQGPEKLAGNAVYTKPSFTQEHKAAVSVLKPFSKGTPSTSSPAKALPQVRDRSKDLTHAISILESAKARVTNTKTSKPIVHARKKYRFHKTRSHVTHRTTKVKKSPKVRKKSYLSRLMLANRLPFSAAKSLINSPSQGAFSSLGDLSPQENPFLEVSALSEHFIEKNNTKHTTARNAFEENDFMENTNMPEGTISENTNYNHPPEADSAGTAFNLGPTVKQTETKWEYNNVGTDLSPEPKSFNYPLLSSPGDQFEIQLTQQLQSLIPNNNVRRLIAHVIRTLKMDCSGAHVQVTCAKLISRTGHLMKLLSGQQEVKASKIEWDTDQWKIENYINESTEAQSEQKEKSLELKKEVPGYGYTDKLILALIVTGILTILIILFCLIVICCHRRSLQEDEEGFSRGIFRFLPWRGCSSRRESQDGLSSFGQPLWFKDLYKPLSATRINNHAWKLHKKSSNEDKILNRDPGDSEAPTEEEESEALP

SEQ ID NO: 45613 - protein, 1635 aa, Homo sapiens
  Payload ID: 9301
  Gene Symbol: LRRC37A
  Gene Name: leucine rich repeat containing 37A
  ENSP ID: ENSP00000377108
MSSAQCPALVCVMSRLRFWGPWPLLMWQLLWLLVKEAQPLEWVKDPLQLTSNPLGPPESWSSHSSHFPRESPHAPTLPADPWDFDHLGPSASSEMPAPPQESTENLVPFLDTWDSAGEQPLEPEQFLASQQDLKDKLSPQERLPVSPKKLKKDPAQRWSLAEIIGITRQLSTPQSQKQTLQNEYSSTDTPYPGSLPPELRVKSDEPPGPSEQVGPSQFHLEPETQNPETLEDIQSSSLQQEAPAQLPQLLEEEPSSMQQEAPALPPESSMESLTLPNHEVSVQPPGEDQAYYHLPNITVKPADVEVTITSEPTNETESSQAQQETPIQFPEEVEPSATQQEAPIEPPVPPMEHELSISEQQQPVQPSESPREVESSPTQQETPGQPPEHHEVTVSPPGHHQTHHLASPSVSVKPPDVQLTIAAEPSAEVGTSLVHQEATTRLSGSGNDVEPPAIQHGGPPLLPESSEEAGPLAVQQETSFQSPEPINNENPSPTQQEAAAEHPQTAEEGESSLTHQEAPAQTPEFPNVVVAQPPEHSHLTQATVQPLDLGFTITPESKTEVELSPTMKETPTQPPKKVVPQLRVYQGVTNPTPGQDQAQHPVSPSVTVQLLDLGLTITPEPTTEVGHSTPPKRTIVSPKHPEVTLPHPDQVQTQHSHLTRATVQPLDLGFTITPKSMTEVEPSTALMTTAPPPGHPEVTLPPSDKGQAQHSHLTQATVQPLDLELTITTKPTTEVKPSPTTEETSTQPPDLGLAIIPEPTTETGHSTALEKTTAPRPDRVQTLHRSLTEVTGPPTELEPAQDSLVQSESYTQNKALTAPEEHKASTSTNICELCTCGDEMLSCIDLNPEQRLRQVPVPEPNTHNGTFTILNFQGNYISYIDGNVWKAYSWTEKLILRENNLTELHKDSFEGLLSLQYLDLSCNKIQSIERHTFEPLPFLKFINLSCNVITELSFGTFQAWHGMQFLHKLILNHNPLTTVEDPYLFKLPALKYLDMGTTLVPLTTLKNILMMTVELEKLILPSHMACCLCQFKNSIEAVCKTVKLHCNSACLTNTTHCPEEASVGNPEGAFMKVLQARKNYTSTELIVEPEEPSDSSGINLSGFGSEQLDTNDESDFISTLSYILPYFSAVNLDVKSLLLPFIKLPTTGNSLAKIQTVGQNRQRVKRVLMGPRSIQKRHFKEVGRQSIRREQGAQASVENAAEEKRLTSPAPREVEQPHTQQGPEKLAGNAVYTKPSFTQEHKAAVSVLKPFSKGTPSTSSPAKALPQVRDRSKDLTHAISILESAKARVTNTKTSKPIVHARKKYRFHKTRSHVTHRTTKVKKSPKVRKKSYLSRLMLANRLPFSAAKSLINSPSQGAFSSLGDLSPQENPFLEVSALSEHFIEKNNTKHTTARNAFEENDFMENTNMPEGTISENTNYNHPPEADSAGTAFNLGPTVKQTETKWEYNNVGTDLSPEPKSFNYPLLSSPGDQFEIQLTQQLQSLIPNNNVRRLIAHVIRTLKMDCSGAHVQVTCAKLISRTGHLMKLLSGQQEVKASKIEWDTDQWKIENYINESTEAQSEQKEKSLELKKEVPGYGYTDKLILALIVTGILTILIILFCLIVICCHRRSLQEDEEGFSRDSEAPTEEEESEALP

SEQ ID NO: 45614 - protein, 738 aa, Homo sapiens
  Payload ID: 9301
  Gene Symbol: LRRC37A
  Gene Name: leucine rich repeat containing 37A
  ENSP ID: ENSP00000437021
MQFLHKLILNHNPLTTVEDPYLFKLPALKYLDMGTTLVPLTTLKNILMMTVELEKLILPSHMACCLCQFKNSIEAVCKTVKLHCNSACLTNTTHCPEEASVGNPEGAFMKVLQARKNYTSTELIVEPEEPSDSSGINLSGFGSEQLDTNDESDFISTLSYILPYFSAVNLDVKSLLLPFIKLPTTGNSLAKIQTVGQNRQRVKRVLMGPRSIQKRHFKEVGRQSIRREQGAQASVENAAEEKRLTSPAPREVEQPHTQQGPEKLAGNAVYTKPSFTQEHKAAVSVLKPFSKGTPSTSSPAKALPQVRDRSKDLTHAISILESAKARVTNTKTSKPIVHARKKYRFHKTRSHVTHRTTKVKKSPKVRKKSYLSRLMLANRLPFSAAKSLINSPSQGAFSSLGDLSPQENPFLEVSALSEHFIEKNNTKHTTARNAFEENDFMENTNMPEGTISENTNYNHPPEADSAGTAFNLGPTVKQTETKWEYNNVGTDLSPEPKSFNYPLLSSPGDQFEIQLTQQLQSLIPNNNVRRLIAHVIRTLKMDCSGAHVQVTCAKLISRTGHLMKLLSGQQEVKASKIEWDTDQWKIENYINESTEAQSEQKEKSLELKKEVPGYGYTDKLILALIVTGILTILIILFCLIVICCHRRSLQEDEEGFSRGIFRFLPWRGCSSRRESQDGLSSFGQPLWFKDLYKPLSATRINNHAWKLHKKSSNEDKILNRDPGDSEAPTEEEESEALP

SEQ ID NO: 45615 - protein, 1700 aa, Homo sapiens
  Payload ID: 9301
  Gene Symbol: LRRC37A
  Gene Name: leucine rich repeat containing 37A
  ENSP ID: ENSP00000481100
MTSAQCPALACVMSPLRFWGPWPLLMWQLLWLLVKEAQPLEWVKDPLQLTSNPLGPPEPWSSHSSHFPRESPHAPTLPADPWDFDHLGPSASSEMPAPPQESTENLVPFLDTWDSAGELPLEPEQFLASQQDLKDKLSPQERLPVSPKKLKKDPAQRWSLAEIIGIIRQLSTPQSQKQTLQNEYSSTDTPYPGSLPPELRVKSDEPPGPSEQVGPSQFHLEPETQNPETLEDIQSSSLQQEAPAQLPQLLEEEPSSMQQEAPALPPESSMESLTLPNHEVSVQPPGEDQAYYHLPNITVKPADVEVTITSEPTNETESSQAQQETPIQFPEEVEPSATQQEAPIEPPVPPMEHELSISEQQQPVQPSESPREVESSPTQQETPGQPPEHHEVTVSPPGHHQTHHLASPSVSVKPPDVQLTIAAEPSAEVGTSLVHQEATTRLSGSGNDVEPPAIQHGGPPLLPESSEEAGPLAVQQETSFQSPEPINNENPSPTQQEAAAEHPQTAEEGESSLTHQEAPAQTPEFPNVVVAQPPEHSHLTQATVQPLDLGFTITPESKTEVELSPTMKETPTQPPKKVVPQLRVYQGVTNPTPGQDQAQHPVSPSVTVQLLDLGLTITPEPTTEVGHSTPPKRTIVSPKHPEVTLPHPDQVQTQHSHLTRATVQPLDLGFTITPKSMTEVEPSTALMTTAPPPGHPEVTLPPSDKGQAQHSHLTQATVQPLDLELTITTKPTTEVKPSPTTEETSTQPPDLGLAIIPEPTTETGHSTALEKTTAPRPDRVQTLHRSLTEVTGPPTELEPAQDSLVQSESYTQNKALTAPEEHKASTSTNICELCTCGDEMLSCIDLNPEQRLRQVPVPEPNTHNGTFTILNFQGNYISYIDGNVWKAYSWTEKLILRENNLTELHKDSFEGLLSLQYLDLSCNKIQSIERHTFEPLPFLKFINLSCNVITELSFGTFQAWHGMQFLHKLILNHNPLTTVEDPYLFKLPALKYLDMGTTLVPLTTLKNILMMTVELEKLILPSHMACCLCQFKNSIEAVCKTVKLHCNSACLTNTTHCPEEASVGNPEGAFMKVLQARKNYTSTELIVEPEEPSDSSGINLSGFGSEQLDTNDESDFISTLRYILPYFSAVNLDVKSLLLPLIKLPTTGNSLAKIQTVGQNRQRVKRVLMGPRSIQKRHFKEVGRQSIRREQGAQASVENAAEEKRLGSPAPREVEQPHTQQGPEKLAGNAVYTKPSFTQEHKAAVSVLKPFSKGAPSTSSPAKALPQVRDRWKDLTHAISTLESAKARVTNTKTSKPIVHARKKYRFHKTRSHVTHRTPKVKKSPKVRKKSYLSRLMLANRLPFSAAKSLINSPSQGAFSSLGDLSPQENPFLEVSAPSEHFIEKNNTKHTTARNAFEENDFMENTNMPEGTISENTNYNHPPEADSAGTAFNLGPTVKQTETKWEYNNVGTDLSPEPKSFNYPLLSSPGDQFEIQLTQQLQSLIPNNNVRRLIAHVIRTLKMDCSGAHVQVTCAKLISRTGHLMKLLSGQQEVKASKIEWDTDQWKIENYINESTEAQSEQKEKSLELKKEVPGYGYTDKLILALIVTGILTILIILFCLIVICCHRRSLQEDEEGFSRGIFRFLPRRGCSSRRESQDGLSSFGQPLWFKDMYKPLSATRINNHAWKLHKKSSNEDKILNRDPGDSEAPTEEEESEALP

SEQ ID NO: 45616 - protein, 738 aa, Homo sapiens
  Payload ID: 9301
  Gene Symbol: LRRC37A
  Gene Name: leucine rich repeat containing 37A
  ENSP ID: ENSP00000486192
MQFLHKLILNHNPLTTVEDPYLFKLPALKYLDMGTTLVPLTTLKNILMMTVELEKLILPSHMACCLCQFKNSIEAVCKTVKLHCNSACLTNTTHCPEEASVGNPEGAFMKVLQARKNYTSTELIVEPEEPSDSSGINLSGFGSEQLDTNDESDFISTLRYILPYFSAVNLDVKSLLLPLIKLPTTGNSLAKIQTVGQNRQRVKRVLMGPRSIQKRHFKEVGRQSIRREQGAQASVENAAEEKRLGSPAPREVEQPHTQQGPEKLAGNAVYTKPSFTQEHKAAVSVLKPFSKGAPSTSSPAKALPQVRDRWKDLTHAISTLESAKARVTNTKTSKPIVHARKKYRFHKTRSHVTHRTPKVKKSPKVRKKSYLSRLMLANRLPFSAAKSLINSPSQGAFSSLGDLSPQENPFLEVSAPSEHFIEKNNTKHTTARNAFEENDFMENTNMPEGTISENTNYNHPPEADSAGTAFNLGPTVKQTETKWEYNNVGTDLSPEPKSFNYPLLSSPGDQFEIQLTQQLQSLIPNNNVRRLIAHVIRTLKMDCSGAHVQVTCAKLISRTGHLMKLLSGQQEVKASKIEWDTDQWKIENYINESTEAQSEQKEKSLELKKEVPGYGYTDKLILALIVTGILTILIILFCLIVICCHRRSLQEDEEGFSRGIFRFLPRRGCSSRRESQDGLSSFGQPLWFKDMYKPLSATRINNHAWKLHKKSSNEDKILNRDPGDSEAPTEEEESEALP

SEQ ID NO: 45617 - protein, 1635 aa, Homo sapiens
  Payload ID: 9301
  Gene Symbol: LRRC37A
  Gene Name: leucine rich repeat containing 37A
  ENSP ID: ENSP00000486596
MTSAQCPALACVMSPLRFWGPWPLLMWQLLWLLVKEAQPLEWVKDPLQLTSNPLGPPEPWSSHSSHFPRESPHAPTLPADPWDFDHLGPSASSEMPAPPQESTENLVPFLDTWDSAGELPLEPEQFLASQQDLKDKLSPQERLPVSPKKLKKDPAQRWSLAEIIGIIRQLSTPQSQKQTLQNEYSSTDTPYPGSLPPELRVKSDEPPGPSEQVGPSQFHLEPETQNPETLEDIQSSSLQQEAPAQLPQLLEEEPSSMQQEAPALPPESSMESLTLPNHEVSVQPPGEDQAYYHLPNITVKPADVEVTITSEPTNETESSQAQQETPIQFPEEVEPSATQQEAPIEPPVPPMEHELSISEQQQPVQPSESPREVESSPTQQETPGQPPEHHEVTVSPPGHHQTHHLASPSVSVKPPDVQLTIAAEPSAEVGTSLVHQEATTRLSGSGNDVEPPAIQHGGPPLLPESSEEAGPLAVQQETSFQSPEPINNENPSPTQQEAAAEHPQTAEEGESSLTHQEAPAQTPEFPNVVVAQPPEHSHLTQATVQPLDLGFTITPESKTEVELSPTMKETPTQPPKKVVPQLRVYQGVTNPTPGQDQAQHPVSPSVTVQLLDLGLTITPEPTTEVGHSTPPKRTIVSPKHPEVTLPHPDQVQTQHSHLTRATVQPLDLGFTITPKSMTEVEPSTALMTTAPPPGHPEVTLPPSDKGQAQHSHLTQATVQPLDLELTITTKPTTEVKPSPTTEETSTQPPDLGLAIIPEPTTETGHSTALEKTTAPRPDRVQTLHRSLTEVTGPPTELEPAQDSLVQSESYTQNKALTAPEEHKASTSTNICELCTCGDEMLSCIDLNPEQRLRQVPVPEPNTHNGTFTILNFQGNYISYIDGNVWKAYSWTEKLILRENNLTELHKDSFEGLLSLQYLDLSCNKIQSIERHTFEPLPFLKFINLSCNVITELSFGTFQAWHGMQFLHKLILNHNPLTTVEDPYLFKLPALKYLDMGTTLVPLTTLKNILMMTVELEKLILPSHMACCLCQFKNSIEAVCKTVKLHCNSACLTNTTHCPEEASVGNPEGAFMKVLQARKNYTSTELIVEPEEPSDSSGINLSGFGSEQLDTNDESDFISTLRYILPYFSAVNLDVKSLLLPLIKLPTTGNSLAKIQTVGQNRQRVKRVLMGPRSIQKRHFKEVGRQSIRREQGAQASVENAAEEKRLGSPAPREVEQPHTQQGPEKLAGNAVYTKPSFTQEHKAAVSVLKPFSKGAPSTSSPAKALPQVRDRWKDLTHAISTLESAKARVTNTKTSKPIVHARKKYRFHKTRSHVTHRTPKVKKSPKVRKKSYLSRLMLANRLPFSAAKSLINSPSQGAFSSLGDLSPQENPFLEVSAPSEHFIEKNNTKHTTARNAFEENDFMENTNMPEGTISENTNYNHPPEADSAGTAFNLGPTVKQTETKWEYNNVGTDLSPEPKSFNYPLLSSPGDQFEIQLTQQLQSLIPNNNVRRLIAHVIRTLKMDCSGAHVQVTCAKLISRTGHLMKLLSGQQEVKASKIEWDTDQWKIENYINESTEAQSEQKEKSLELKKEVPGYGYTDKLILALIVTGILTILIILFCLIVICCHRRSLQEDEEGFSRDSEAPTEEEESEALP

SEQ ID NO: 45618 - protein, 974 aa, Homo sapiens
  Payload ID: 9302
  Gene Symbol: LRRC37B
  Gene Name: leucine rich repeat containing 37B
  ENSP ID: ENSP00000332536
MAHAYKGHEHLRAARMAFAECIAPACVMSWLRFWGPWPLLTWQLLSLLVKEAQPLVWVKDPLQLTSNPLGPPEPWSSRSSHLPWESPHAPAPPAAPGDFDYLGPSASSQMSALPQEPTENLAPFLKELDSAGELPLGPEPFLAAHQDLNDKRTPEERLPEVVPLLNRDQNQALVQLPRLKWVQTTDLDRAAGHQADEILVPLDSKVSRPTKFVVSPKNLKKDLAERWSLPEIVGIPHQLSKPQRQKQTLPDDYLSMDTLYPGSLPPELRVNADEPPGPPEQVGLSQFHLEPKSQNPETLEDIQSSSLQEEAPAQLLQLPQEVEPSTQQEAPALPPESSMESLAQTPLNHEVTVQPPGEDQAHYNLPKFTVKPADVEVTMTSEPKNETESTQAQQEAPIQPPEEAEPSSTALRTTDPPPEHPEVTLPPSDKGQAQHSHLTEATVQPLDLELSITTEPTTEVKPSPTTEETSAQPPDPGLAITPEPTTEIGHSTALEKTRAPHPDQVQTLHRSLTEVTGPPTKLESSQDSLVQSETAPEEQKASTSTNICELCTCGDETLSCVGLSPKQRLRQVPVPEPDTYNGIFTTLNFQGNYISYLDGNVWKAYSWTEKLILSENYLTELPKDSFEGLLYLQYLDLSCNKIRYIERQTFESLPFLQYINLGCNLITKLSLGTFQAWHGMQFLHNLILNRNPLTTVEDPYLFELPALKYLDMGTTHITLTTLKNILTMTVELEKLILPSHMACCLCQFKNSIEAVCKTVKLHCNTACLTNSIHCPEEASVGNPEGAFMKMLQARKQHMSTQLTIESEAPSDSSGINLSGFGGDQLEIQLTEQLRSLIPNEDVRKFMSHVIRTLKMECSETHVQGSCAKLMLRTGLLMKLLSEQQEAKALNVEWDTDQQKTNYINENMEQNEQKEQKSSELMKEVPGDDYKNKLIFAISVTVILIILIIIFCLIEVNSHKRASEKYKDNPSISGA

SEQ ID NO: 45619 - protein, 947 aa, Homo sapiens
  Payload ID: 9302
  Gene Symbol: LRRC37B
  Gene Name: leucine rich repeat containing 37B
  Uniprot ID: Q96QE4
  ENSP ID: ENSP00000340519
MSWLRFWGPWPLLTWQLLSLLVKEAQPLVWVKDPLQLTSNPLGPPEPWSSRSSHLPWESPHAPAPPAAPGDFDYLGPSASSQMSALPQEPTENLAPFLKELDSAGELPLGPEPFLAAHQDLNDKRTPEERLPEVVPLLNRDQNQALVQLPRLKWVQTTDLDRAAGHQADEILVPLDSKVSRPTKFVVSPKNLKKDLAERWSLPEIVGIPHQLSKPQRQKQTLPDDYLSMDTLYPGSLPPELRVNADEPPGPPEQVGLSQFHLEPKSQNPETLEDIQSSSLQEEAPAQLLQLPQEVEPSTQQEAPALPPESSMESLAQTPLNHEVTVQPPGEDQAHYNLPKFTVKPADVEVTMTSEPKNETESTQAQQEAPIQPPEEAEPSSTALRTTDPPPEHPEVTLPPSDKGQAQHSHLTEATVQPLDLELSITTEPTTEVKPSPTTEETSAQPPDPGLAITPEPTTEIGHSTALEKTRAPHPDQVQTLHRSLTEVTGPPTKLESSQDSLVQSETAPEEQKASTSTNICELCTCGDETLSCVGLSPKQRLRQVPVPEPDTYNGIFTTLNFQGNYISYLDGNVWKAYSWTEKLILSENYLTELPKDSFEGLLYLQYLDLSCNKIRYIERQTFESLPFLQYINLGCNLITKLSLGTFQAWHGMQFLHNLILNRNPLTTVEDPYLFELPALKYLDMGTTHITLTTLKNILTMTVELEKLILPSHMACCLCQFKNSIEAVCKTVKLHCNTACLTNSIHCPEEASVGNPEGAFMKMLQARKQHMSTQLTIESEAPSDSSGINLSGFGGDQLEIQLTEQLRSLIPNEDVRKFMSHVIRTLKMECSETHVQGSCAKLMLRTGLLMKLLSEQQEAKALNVEWDTDQQKTNYINENMEQNEQKEQKSSELMKEVPGDDYKNKLIFAISVTVILIILIIIFCLIEVNSHKRASEKYKDNPSISGA

SEQ ID NO: 45620 - protein, 947 aa, Homo sapiens; identical to SEQ ID NO: 45619
  Payload ID: 9302
  Gene Symbol: LRRC37B
  Gene Name: leucine rich repeat containing 37B
  Uniprot ID: Q96QE4
  ENSP ID: ENSP00000378202

SEQ ID NO: 45621 - protein, 865 aa, Homo sapiens
  Payload ID: 9302
  Gene Symbol: LRRC37B
  Gene Name: leucine rich repeat containing 37B
  ENSP ID: ENSP00000443345
MSALPQEPTENLAPFLKELDSAGELPLGPEPFLAAHQDLNDKRTPEERLPEVVPLLNRDQNQALVQLPRLKWVQTTDLDRAAGHQADEILVPLDSKVSRPTKFVVSPKNLKKDLAERWSLPEIVGIPHQLSKPQRQKQTLPDDYLSMDTLYPGSLPPELRVNADEPPGPPEQVGLSQFHLEPKSQNPETLEDIQSSSLQEEAPAQLLQLPQEVEPSTQQEAPALPPESSMESLAQTPLNHEVTVQPPGEDQAHYNLPKFTVKPADVEVTMTSEPKNETESTQAQQEAPIQPPEEAEPSSTALRTTDPPPEHPEVTLPPSDKGQAQHSHLTEATVQPLDLELSITTEPTTEVKPSPTTEETSAQPPDPGLAITPEPTTEIGHSTALEKTRAPHPDQVQTLHRSLTEVTGPPTKLESSQDSLVQSETAPEEQKASTSTNICELCTCGDETLSCVGLSPKQRLRQVPVPEPDTYNGIFTTLNFQGNYISYLDGNVWKAYSWTEKLILSENYLTELPKDSFEGLLYLQYLDLSCNKIRYIERQTFESLPFLQYINLGCNLITKLSLGTFQAWHGMQFLHNLILNRNPLTTVEDPYLFELPALKYLDMGTTHITLTTLKNILTMTVELEKLILPSHMACCLCQFKNSIEAVCKTVKLHCNTACLTNSIHCPEEASVGNPEGAFMKMLQARKQHMSTQLTIESEAPSDSSGINLSGFGGDQLEIQLTEQLRSLIPNEDVRKFMSHVIRTLKMECSETHVQGSCAKLMLRTGLLMKLLSEQQEAKALNVEWDTDQQKTNYINENMEQNEQKEQKSSELMKEVPGDDYKNKLIFAISVTVILIILIIIFCLIEVNSHKRASEKYKDNPSISGA

SEQ ID NO: 45622 - protein, 908 aa, Homo sapiens
  Payload ID: 9302
  Gene Symbol: LRRC37B
  Gene Name: leucine rich repeat containing 37B
  ENSP ID: ENSP00000463081
MAFAECIAPACVMSWLRFWGPWPLLTWQLLSLLVKEAQPLVWVKDPLQLTSNPLGPPEPWSSRSSHLPWESPHAPAPPAAPGDFDYLGPSASSQMSALPQEPTENLAPFLKELDSAGELPLGPEPFLAAHQDLNDKRTPEERLPEVVPLLNRDQNQALVQLPRLKWVQTTDLDRAAGHQADEILVPLDSKVSRPTKFVVSPKNLKKDLAERWSLPEIVGIPHQLSKPQRQKQTLPDDYLSMDTLYPGSLPPELRVNADEPPGPPEQVGLSQFHLEPKSQNPETLEDIQSSSLQEEAPAQLLQLPQEVEPSTQQEAPALPPESSMESLAQTPLNHEVTVQPPGEDQAHYNLPKFTVKPADVEVTMTSEPKNETESTQAQQEAPIQPPEEAEPSSTALRTTDPPPEHPEVTLPPSDKGQAQHSHLTEATVQPLDLELSITTEPTTEVKPSPTTEETSAQPPDPGLAITPEPTTEIGHSTALEKTRAPHPDQVQTLHRSLTEVTGPPTKLESSQDSLVQSETAPEEQKASTSTNICELCTCGDETLSCVGLSPKQRLRQVPVPEPDTYNGIFTTLNFQGNYISYLDGNVWKAYSWTEKLILSENYLTELPKDSFEGLLYLQYLILNRNPLTTVEDPYLFELPALKYLDMGTTHITLTTLKNILTMTVELEKLILPSHMACCLCQFKNSIEAVCKTVKLHCNTACLTNSIHCPEEASVGNPEGAFMKMLQARKQHMSTQLTIESEAPSDSSGINLSGFGGDQLEIQLTEQLRSLIPNEDVRKFMSHVIRTLKMECSETHVQGSCAKLMLRTGLLMKLLSEQQEAKALNVEWDTDQQKTNYINENMEQNEQKEQKSSELMKEVPGDDYKNKLIFAISVTVILIILIIIFCLIEVNSHKRASEKYKDNPSISGA

SEQ ID NO: 45623 - protein, 236 aa, Homo sapiens
  Payload ID: 9302
  Gene Symbol: LRRC37B
  Gene Name: leucine rich repeat containing 37B
  ENSP ID: ENSP00000463146
  MOD_RES (1)..(1): Any amino acid
XEEASVGNPEGAFMKMLQARKQHMSTQLTIESEAPSDSSGINLSGFGGDQLEIQLTEQLRSLIPNEDVRKFMSHVIRTLKMECSETHVQGSCAKLMLRTGLLMKLLSEQQEAKALNVEWDTDQQKTNYINENMEQNEQKEQKSSELMKEVPGDDYKNKLIFAISVTVILIILIIIFCLIEVRTIINSGFQNTILCLCGFRIHKLKTNVTFPLDILLLSFKAEVCFVLLLQCIFQDC

SEQ ID NO: 45624 - protein, 155 aa, Homo sapiens
  Payload ID: 9302
  Gene Symbol: LRRC37B
  Gene Name: leucine rich repeat containing 37B
  ENSP ID: ENSP00000463323
MSALPQEPTENLAPFLKELDSAGELPLGPEPFLAAHQDLNDKRTPEERLPEVVPLLNRDQNQALVQLPRLKWVQTTDLDRAAGHQADEILVPLDSKVSRPTKFVVSPKNLKKDLAERWSLPEIVGIPHQLSKPQRQKQTLPDDYLSMDTLYPGSL

SEQ ID NO: 45625 - protein, 218 aa, Homo sapiens
  Payload ID: 9302
  Gene Symbol: LRRC37B
  Gene Name: leucine rich repeat containing 37B
  ENSP ID: ENSP00000463513
MMTTRARRRSKRRGAAMPRRPRSLRTTRRMTWRRTTMTPIIRRSWKMTTRTPVTPRKAASAALQMSALPQEPTENLAPFLKELDSAGELPLGPEPFLAAHQDLNDKRTPEERLPEVVPLLNRDQNQALVQLPRLKWVQTTDLDRAAGHQADEILVPLDSKVSRPTKFVVSPKNLKKDLAERWSLPEIVGIPHQLSKPQRQKQTLPDDYLSMDTLYPGS

SEQ ID NO: 45626 - protein, 720 aa, Homo sapiens
  Payload ID: 9302
  Gene Symbol: LRRC37B
  Gene Name: leucine rich repeat containing 37B
  ENSP ID: ENSP00000463564
MAFAECIAPACVMSWLRFWGPWPLLTWQLLSLLVKEAQPLVWVKDPLQLTSNPLGPPEPWSSRSSHLPWESPHAPAPPAAPGDFDYLGPSASSQMSALPQEPTENLAPFLKELDSAGELPLGPEPFLAAHQDLNDKRTPEERLPEVVPLLNRDQNQALVQLPRLKWVQTTDLDRAAGHQADEILVPLDSKVSRPTKFVVSPKNLKKDLAERWSLPEIVGIPHQLSKPQRQKQTLPDDYLSMDTLYPGSLPPELRVNADEPPGPPEQVGLSQFHLEPKSQNPETLEDIQSSSLQEEAPAQLLQLPQEVEPSTQQEAPALPPESSMESLAQTPLNHEVTVQPPGEDQAHYNLPKFTVKPADVEVTMTSEPKNETESTQAQQEAPIQPPEEAEPSSTALRTTDPPPEHPEVTLPPSDKGQAQHSHLTEATVQPLDLELSITTEPTTEVKPSPTTEETSAQPPDPGLAITPEPTTEIGHSTALEKTRAPHPDQVQTLHRSLTEVTGPPTKLESSQDSLVQSETAPEEQKASTSTNICELCTCGDETLSCVGLSPKQRLRQVPVPEPDTYNGIFTTLNFQGNYISYLDGNVWKAYSWTEKLILSENYLTELPKDSFEGLLYLQYLDLSCNKIRYIERQTFESLPFLQYINLGCNLITKLSLGTFQAWHGMQFLHNLILNRNPLTTVEDPYLFELPALKYLDMGTTHITLTTLKNILTMTVELEKL

SEQ ID NO: 45627 - protein, 294 aa, Homo sapiens
  Payload ID: 9303
  Gene Symbol: LRRC38
  Gene Name: leucine rich repeat containing 38
  Uniprot ID: Q5VT99
  ENSP ID: ENSP00000365253
MRPRAPACAAAALGLCSLLLLLAPGHACPAGCACTDPHTVDCRDRGLPSVPDPFPLDVRKLLVAGNRIQRIPEDFFIFYGDLVYLDFRNNSLRSLEEGTFSGSAKLVFLDLSYNNLTQLGAGAFRSAGRLVKLSLANNNLVGVHEDAFETLESLQVLELNDNNLRSLSVAALAALPALRSLRLDGNPWLCDCDFAHLFSWIQENASKLPKGLDEIQCSLPMESRRISLRELSEASFSECRFSLSLTDLCIIIFSGVAVSIAAIISSFFLATVVQCLQRCAPNKDAEDEDEDKDD

SEQ ID NO: 45628 - protein, 335 aa, Homo sapiens
  Payload ID: 9304
  Gene Symbol: LRRC39
  Gene Name: leucine rich repeat containing 39
  Uniprot ID: Q96DD0
  ENSP ID: ENSP00000344470
MTENVVCTGAVNAVKEVWEKRIKKLNEDLKREKEFQHKLVRIWEERVSLTKLREKVTREDGRVILKIEKEEWKTLPSSLLKLNQLQEWQLHRTGLLKIPEFIGRFQNLIVLDLSRNTISEIPPGIGLLTRLQELILSYNKIKTVPKELSNCASLEKLELAVNRDICDLPQELSNLLKLTHLDLSMNDFTTIPLAVLNMPALEWLDMGSNKLEQLPDTIERMQNLHTLWLQRNEITCLPQTISNMKNLGTLVLSNNKLQDIPVCMEEMANLRFVNFRDNPLKLKVSLPPSEGTDEEEERELFGLQFMHTYIQESRRRADHQVNGSTTLPISINTDG

SEQ ID NO: 45629 - protein, 335 aa, Homo sapiens; identical to SEQ ID NO: 45628
  Payload ID: 9304
  Gene Symbol: LRRC39
  Gene Name: leucine rich repeat containing 39
  Uniprot ID: Q96DD0
  ENSP ID: ENSP00000359156

SEQ ID NO: 45630 - protein, 339 aa, Homo sapiens
  Payload ID: 9304
  Gene Symbol: LRRC39
  Gene Name: leucine rich repeat containing 39
  Uniprot ID: Q96DD0
  ENSP ID: ENSP00000359157
MTENVVCTGAVNAVKEVWEKRIKKLNEDLKREKEFQHKLVRIWEERVSLTKLREKVTREDGRVILKIEKEEWKTLPSSLLKLNQLQEWQLHRTGLLKIPEFIGRFQNLIVLDLSRNTISEIPPGIGLLTRLQELILSYNKIKTVPKELSNCASLEKLELAVNRDICDLPQELSNLLKLTHLDLSMNDFTTIPLAVLNMPALEWLDMGSNKLEQLPDTIERMQNLHTLWLQRNEITCLPQTISNMKNLGTLVLSNNKLQDIPVCMEEMANLRFVNFRDNPLKLKVSLPPSEGTDEEEERELFGLQFMHTYIQESRRRAALQFCVCHGQILTIYTCMALEI

SEQ ID NO: 45631 - protein, 339 aa, Homo sapiens; identical to SEQ ID NO: 45630
  Payload ID: 9304
  Gene Symbol: LRRC39
  Gene Name: leucine rich repeat containing 39
  Uniprot ID: Q96DD0
  ENSP ID: ENSP00000480740

SEQ ID NO: 45632 - protein, 259 aa, Homo sapiens
  Payload ID: 9305
  Gene Symbol: LRRC3B
  Gene Name: leucine rich repeat containing 3B
  Uniprot ID: Q96PB8
  ENSP ID: ENSP00000379880
MNLVDLWLTRSLSMCLLLQSFVLMILCFHSASMCPKGCLCSSSGGLNVTCSNANLKEIPRDLPPETVLLYLDSNQITSIPNEIFKDLHQLRVLNLSKNGIEFIDEHAFKGVAETLQTLDLSDNRIQSVHKNAFNNLKARARIANNPWHCDCTLQQVLRSMASNHETAHNVICKTSVLDEHAGRPFLNAANDADLCNLPKKTTDYAMLVTMFGWFTMVISYVVYYVRQNQEDARRHLEYLKSLPSRQKKADEPDDISTVV

SEQ ID NO: 45633 - protein, 54 aa, Homo sapiens
  Payload ID: 9305
  Gene Symbol: LRRC3B
  Gene Name: leucine rich repeat containing 3B
  ENSP ID: ENSP00000389764
MNLVDLWLTRSLSMCLLLQSFVLMILCFHSASMCPKGCLCSSSGGLNVTCSNAN

SEQ ID NO: 45634 - protein, 259 aa, Homo sapiens; identical to SEQ ID NO: 45632
  Payload ID: 9305
  Gene Symbol: LRRC3B
  Gene Name: leucine rich repeat containing 3B
  Uniprot ID: Q96PB8
  ENSP ID: ENSP00000394940

SEQ ID NO: 45635 - protein, 163 aa, Homo sapiens
  Payload ID: 9305
  Gene Symbol: LRRC3B
  Gene Name: leucine rich repeat containing 3B
  ENSP ID: ENSP00000398184
MNLVDLWLTRSLSMCLLLQSFVLMILCFHSASMCPKGCLCSSSGGLNVTCSNANLKEIPRDLPPETVLLYLDSNQITSIPNEIFKDLHQLRVLNLSKNGIEFIDEHAFKGVAETLQTLDLSDNRIQSVHKNAFNNLKARARIANNPWHCDCTLQQVLRSMASN

SEQ ID NO: 45636 - protein, 259 aa, Homo sapiens; identical to SEQ ID NO: 45632
  Payload ID: 9305
  Gene Symbol: LRRC3B
  Gene Name: leucine rich repeat containing 3B
  Uniprot ID: Q96PB8
  ENSP ID: ENSP00000406370

SEQ ID NO: 45637 - protein, 275 aa, Homo sapiens
  Payload ID: 9306
  Gene Symbol: LRRC3C
  Gene Name: leucine rich repeat containing 3C
  Uniprot ID: A6NJW4
  ENSP ID: ENSP00000367157
MRMTSSSFVSYCTPGLCQFMAMLPTAGHLLPLLLVIGTGGTVPSPQVPPRGCYVAKEAGERTFRCSQAGLSAVPSGIPNDTRKLYLDANQLASVPAGAFQHLPVLEELDLSHNALAHLSGAAFQGLEGTLRHLDLSANQLASVPVEAFVGLQIQVNLSANPWHCDCALQEVLRQVRLVPGTGTGIVCGSGARPDLVGQEFLLLAGEEELCGSGWGGARRSTDVALLVTMGGWLTLMVAYLVHYVWQNRDETRRSLKRAPVLPVRSEDSSILSTVV

SEQ ID NO: 45638 - protein, 653 aa, Homo sapiens
  Payload ID: 9307
  Gene Symbol: LRRC4
  Gene Name: leucine rich repeat containing 4
  Uniprot ID: Q9HBW1
  ENSP ID: ENSP00000249363
MKLLWQVTVHHHTWNAILLPFVYLTAQVWILCAAIAAAASAGPQNCPSVCSCSNQFSKVVCTRRGLSEVPQGIPSNTRYLNLMENNIQMIQADTFRHLHHLEVLQLGRNSIRQIEVGAFNGLASLNTLELFDNWLTVIPSGAFEYLSKLRELWLRNNPIESIPSYAFNRVPSLMRLDLGELKKLEYISEGAFEGLFNLKYLNLGMCNIKDMPNLTPLVGLEELEMSGNHFPEIRPGSFHGLSSLKKLWVMNSQVSLIERNAFDGLASLVELNLAHNNLSSLPHDLFTPLRYLVELHLHHNPWNCDCDILWLAWWLREYIPTNSTCCGRCHAPMHMRGRYLVEVDQASFQCSAPFIMDAPRDLNISEGRMAELKCRTPPMSSVKWLLPNGTVLSHASRHPRISVLNDGTLNFSHVLLSDTGVYTCMVTNVAGNSNASAYLNVSTAELNTSNYSFFTTVTVETTEISPEDTTRKYKPVPTTSTGYQPAYTTSTTVLIQTTRVPKQVAVPATDTTDKMQTSLDEVMKTTKIIIGCFVAVTLLAAAMLIVFYKLRKRHQQRSTVTAARTVEIIQVDEDIPAATSAAATAAPSGVSGEGAVVLPTIHDHINYNTYKPAHGAHWTENSLGNSLHPTVTTISEPYIIQTHTKDKVQETQI

SEQ ID NO: 45639 - protein, 50 aa, Homo sapiens
  Payload ID: 9307
  Gene Symbol: LRRC4
  Gene Name: leucine rich repeat containing 4
  ENSP ID: ENSP00000417795
MKLLWQVTVHHHTWNAILLPFVYLTAQVWILCAAIAAAASAGPQNCPSVC

SEQ ID NO: 45640 - protein, 94 aa, Homo sapiens
  Payload ID: 9307
  Gene Symbol: LRRC4
  Gene Name: leucine rich repeat containing 4
  ENSP ID: ENSP00000418093
MKLLWQVTVHHHTWNAILLPFVYLTAQVWILCAAIAAAASAGPQNCPSVCSCSNQFSKVVCTRRGLSEVPQGIPSNTRYLNLMENNIQMIQADT

SEQ ID NO: 45641 - protein, 78 aa, Homo sapiens
  Payload ID: 9307
  Gene Symbol: LRRC4
  Gene Name: leucine rich repeat containing 4
  ENSP ID: ENSP00000418254
MENNIQMIQADTFRHLHHLEVLQLGRNSIRQIEVGAFNGLASLNTLELFDNWLTVIPSGAFEYLSKLRELWLRNNPIE

SEQ ID NO: 45642 - protein, 602 aa, Homo sapiens
  Payload ID: 9308
  Gene Symbol: LRRC40
  Gene Name: leucine rich repeat containing 40
  Uniprot ID: Q9H9A6
  ENSP ID: ENSP00000359990
MSRLKRIAGQDLRAGFKAGGRDCGTSVPQGLLKAARKSGQLNLSGRNLSEVPQCVWRINVDIPEEANQNLSFGATERWWEQTDLTKLIISNNKLQSLTDDLRLLPALTVLDIHDNQLTSLPSAIRELENLQKLNVSHNKLKILPEEITNLRNLKCLYLQHNELTCISEGFEQLSNLEDLDLSNNHLTTVPASFSSLSSLVRLNLSSNELKSLPAEINRMKRLKHLDCNSNLLETIPPELAGMESLELLYLRRNKLRFLPEFPSCSLLKELHVGENQIEMLEAEHLKHLNSILVLDLRDNKLKSVPDEIILLRSLERLDLSNNDISSLPYSLGNLHLKFLALEGNPLRTIRREIISKGTQEVLKYLRSKIKDDGPSQSESATETAMTLPSESRVNIHAIITLKILDYSDKQATLIPDEVFDAVKSNIVTSINFSKNQLCEIPKRMVELKEMVSDVDLSFNKLSFISLELCVLQKLTFLDLRNNFLNSLPEEMESLVRLQTINLSFNRFKMLPEVLYRIFTLETILISNNQVGSVDPQKMKMMENLTTLDLQNNDLLQIPPELGNCVNLRTLLLDGNPFRVPRAAILMKGTAAILEYLRDRIPT

SEQ ID NO: 45643 - protein, 812 aa, Homo sapiens
  Payload ID: 9309
  Gene Symbol: LRRC41
  Gene Name: leucine rich repeat containing 41
  Uniprot ID: Q15345
  ENSP ID: ENSP00000343298
MAAPEAWRARSCWFCEVAAATTMEATSREAAPAKSSASGPNAPPALFELCGRAVSAHMGVLESGVWALPGPILQSILPLLNIYYLERIEETALKKGLSTQAIWRRLWDELMKTRPSSLESVTCWRAKFMEAFFSHVLRGTIDVSSDRRLCDQRFSPLLHSSRHVRQLTICNMLQGATELVAEPNRRVLETLASSLHTLKFRHLLFSDVAAQQSLRQLLHQLIHHGAVSQVSLYSWPVPESALFILILTMSAGFWQPGPGGPPCRLCGEASRGRAPSRDEGSLLLGSRRPRRDAAERCAAALMASRRKSEAKQMPRAAPATRVTRRSTQESLTAGGTDLKRELHPPATSHEAPGTKRSPSAPAATSSASSSTSSYKRAPASSAPQPKPLKRFKRAAGKKGARTRQGPGAESEDLYDFVFIVAGEKEDGEEMEIGEVACGALDGSDPSCLGLPALEASQRFRSISTLELFTVPLSTEAALTLCHLLSSWVSLESLTLSYNGLGSNIFRLLDSLRALSGQAGCRLRALHLSDLFSPLPILELTRAIVRALPLLRVLSIRVDHPSQRDNPGVPGNAGPPSHIIGDEEIPENCLEQLEMGFPRGAQPAPLLCSVLKASGSLQQLSLDSATFASPQDFGLVLQTLKEYNLALKRLSFHDMNLADCQSEVLFLLQNLTLQEITFSFCRLFEKRPAQFLPEMVAAMKGNSTLKGLRLPGNRLGNAGLLALADVFSEDSSSSLCQLDISSNCIKPDGLLEFAKRLERWGRGAFGHLRLFQNWLDQDAVTAREAIRRLRATCHVVSDSWDSSQAFADYVSTM

SEQ ID NO: 45644 - protein, 812 aa, Homo sapiens; identical to SEQ ID NO: 45643
  Payload ID: 9309
  Gene Symbol: LRRC41
  Gene Name: leucine rich repeat containing 41
  Uniprot ID: Q15345
  ENSP ID: ENSP00000477792

SEQ ID NO: 45645 - protein, 227 aa, Homo sapiens
  Payload ID: 9309
  Gene Symbol: LRRC41
  Gene Name: leucine rich repeat containing 41
  ENSP ID: ENSP00000477909
PPSHIIGDEEIPENCLEQLEMGFPRGAQPAPLLCSVLKASGSLQQLSLDSATFASPQDFGLVLQTLKEYNLALKRLSFHDMNLADCQSEVLFLLQNLTLQEITFSFCRLFEKRPAQFLPEMVAAMKGNSTLKGLRLPGNRLGNAGLLALADVFSEDSSSSLCQLDISWSYTPKDKAGLLSDVANKARFLPRMPELTKCTKLKYSSRSFWMGVPEMSTRRLVFKLSRA

SEQ ID NO: 45646 - protein, 620 aa, Homo sapiens
  Payload ID: 9309
  Gene Symbol: LRRC41
  Gene Name: leucine rich repeat containing 41
  ENSP ID: ENSP00000478135
MKTRPSSLESVTCWRAKFMEAFFSHVLRGTIDVSSDRRLCDQRFSPLLHSSRHVRQLTICNMLQGATELVAEPNRRVLETLASSLHTLKFRHLLFSDVAAQQSLRQLLHQLIHHGAVSQVSLYSWPVPESALFILILTMSAGFWQPGPGGPPCRLCGEASRGRAPSRDEGSLLLGSRRPRRDAAERCAAALMASRRKSEAKQMPRAAPATRVTRRSTQESLTAGGTDLKRELHPPATSHEAPGTKRSPSAPAATSSASSSTSSYKRAPASSAPQPKPLKRFKRAAGKKGARTRQGPGAESEDLYDFVFIVAGEKEDGEEMEIGEVACGALDGSDPSCLGLPALEASQRFRSISTLELFTVPLSTEAALTLCHLLSSWVSLESLTLSYNGLGSNIFRLLDSLRALSGQAGCRLRALHLSDLFSPLPILELTRAIVRALPLLRVLSIRVDHPSQRDNPGVPGNAGPPSHIIGDEEIPENCLEQLEMGFPRGAQPAPLLCSVLKASGSLQQLSLDSATFASPQDFGLVLQTLKEYNLALKRLSFHDMNLADCQSEVLFLLQNLTLQEITFSFCRLFEKRPAQFLPEMVAAMKGNSTLKGLRLPGNRLGGGQTLGRERGKELGL

SEQ ID NO: 45647 - protein, 521 aa, Homo sapiens
  Payload ID: 9309
  Gene Symbol: LRRC41
  Gene Name: leucine rich repeat containing 41
  ENSP ID: ENSP00000483633
MEATSREAAPAKSSASGPNAPPALFELCGRAVSAHMGVLESGVWALPGPILQSILPLLNIYYLERIEETALKKGLSTQAIWRRLWDELMKTRPSSLESVTCWRAKFMEAFFSHVLRGTIDVSSDRRLCDQRFSPLLHSSRHVRQLTICNMLQGATELVAEPNRRVLETLASSLHTLKFRHLLFSDVAAQQSLRQLLHQLIHHGAVSQVSLYSWPVPESALFILILTMSAGFWQPGPGGPPCRLCGEASRGRAPSRDEGSLLLGSRRPRRDAAERCAAALMASRRKSEAKQMPRAAPATRVTRRSTQESLTAGGTDLKRELHPPATSHEAPGTKRSPSAPAATSSASSSTSSYKRAPASSAPQPKPLKRFKRAAGKKGARTRQGPGAESEDLYDFVFIVAGEKEDGEEMEIGEVACGALDGSDPSCLGLPALEASQRFRSISTLELFTVPLSTEAALTLCHLLSSWVSLESLTLSYNGEHPGVAGIGLRLPSSTSCVPNSREVGGANWGYDQEVREEGLYAS

SEQ ID NO: 45648 - protein, 617 aa, Homo sapiens
  Payload ID: 9309
  Gene Symbol: LRRC41
  Gene Name: leucine rich repeat containing 41
  ENSP ID: ENSP00000484558
MSAGFWQPGPGGPPCRLCGEASRGRAPSRDEGSLLLGSRRPRRDAAERCAAALMASRRKSEAKQMPRAAPATRVTRRSTQESLTAGGTDLKRELHPPATSHEAPGTKRSPSAPAATSSASSSTSSYKRAPASSAPQPKPLKRFKRAAGKKGARTRQGPGAESEDLYDFVFIVAGEKEDGEEMEIGEVACGALDGSDPSCLGLPALEASQRFRSISTLELFTVPLSTEAALTLCHLLSSWVSLESLTLSYNGLGSNIFRLLDSLRALSGQAGCRLRALHLSDLFSPLPILELTRAIVRALPLLRVLSIRVDHPSQRDNPGVPGNAGPPSHIIGDEEIPENCLEQLEMGFPRGAQPAPLLCSVLKASGSLQQLSLDSATFASPQDFGLVLQTLKEYNLALKRLSFHDMNLADCQSEVLFLLQNLTLQEITFSFCRLFEKRPAQFLPEMVAAMKGNSTLKGLRLPGNRLGNAGLLALADVFSEDSSSSLCQLDISSNCIKPDGLLEFAKRLERWGRGAFGHLRLFQNWLDQDAVTAREAIRRLRATCHVVSDSWTHPRPSQIMLAPCDGARTSQSHARYHQLAGAEAWAAQNPNHQFYLSLSVTFFLFFPSSLALRSWRP

SEQ ID NO: 45649 - protein, 790 aa, Homo sapiens
  Payload ID: 9309
  Gene Symbol: LRRC41
  Gene Name: leucine rich repeat containing 41
  ENSP ID: ENSP00000484752
MEATSREAAPAKSSASGPNAPPALFELCGRAVSAHMGVLESGVWALPGPILQSILPLLNIYYLERIEETALKKGLSTQAIWRRLWDELMKTRPSSLESVTCWRAKFMEAFFSHVLRGTIDVSSDRRLCDQRFSPLLHSSRHVRQLTICNMLQGATELVAEPNRRVLETLASSLHTLKFRHLLFSDVAAQQSLRQLLHQLIHHGAVSQVSLYSWPVPESALFILILTMSAGFWQPGPGGPPCRLCGEASRGRAPSRDEGSLLLGSRRPRRDAAERCAAALMASRRKSEAKQMPRAAPATRVTRRSTQESLTAGGTDLKRELHPPATSHEAPGTKRSPSAPAATSSASSSTSSYKRAPASSAPQPKPLKRFKRAAGKKGARTRQGPGAESEDLYDFVFIVAGEKEDGEEMEIGEVACGALDGSDPSCLGLPALEASQRFRSISTLELFTVPLSTEAALTLCHLLSSWVSLESLTLSYNGLGSNIFRLLDSLRALSGQAGCRLRALHLSDLFSPLPILELTRAIVRALPLLRVLSIRVDHPSQRDNPGVPGNAGPPSHIIGDEEIPENCLEQLEMGFPRGAQPAPLLCSVLKASGSLQQLSLDSATFASPQDFGLVLQTLKEYNLALKRLSFHDMNLADCQSEVLFLLQNLTLQEITFSFCRLFEKRPAQFLPEMVAAMKGNSTLKGLRLPGNRLGNAGLLALADVFSEDSSSSLCQLDISSNCIKPDGLLEFAKRLERWGRGAFGHLRLFQNWLDQDAVTAREAIRRLRATCHVVSDSWDSSQAFADYVSTM

SEQ ID NO: 45650 - protein, 428 aa, Homo sapiens
  Payload ID: 9310
  Gene Symbol: LRRC42
  Gene Name: leucine rich repeat containing 42
  Uniprot ID: Q9Y546
  ENSP ID: ENSP00000318185
MSYYLSSENHLDPGPIYMRENGQLHMVNLALDGVRSSLQKPRPFRLFPKGFSVELCMNREDDTARKEKTDHFIFTYTREGNLRYSAKSLFSLVLGFISDNVDHIDSLIGFPEQIAEKLFSAAEARQKFTEPGAGLRALQKFTEAYGSLVLCSLCLRNRYLVISEKLEEIKSFRELTCLDLSCCKLGDEHELLEHLTNEALSSVTQLHLKDNCLSDAGVRKMTAPVRVMKRGLENLTLLDLSCNPEITDAGIGYLFSFRKLNCLDISGTGLKDIKTVKHKLQTHIGLVHSKVPLKEFDHSNCKTEGWADQIVLQWERVTAEAVKPRETSEPRAAAQRFYGKRSRAEAPLKCPLADTHMNSSEKLQFYKEKAPDCHGPVLKHEAISSQESKKSKKRPFEESETEQNNSSQPSKQKYVCLAVEDWDLLNSY

SEQ ID NO: 45651 - protein, 192 aa, Homo sapiens
  Payload ID: 9310
  Gene Symbol: LRRC42
  Gene Name: leucine rich repeat containing 42
  ENSP ID: ENSP00000360419
MSYYLSSENHLDPGPIYMRENGQLHMVNLALDGVRSSLQKPRPFRLFPKGFSVELCMNREDDTARKEKTDHFIFTYTREGNLRYSAKSLFSLVLGFISDNVDHIDSLIGFPEQIAEKLFSAAEARQKFTEPGAGLRALQKFTEAYGSLVLCSLCLRNRYLVISEKLEEIKSFRELTCLDLSCCKLGDEHELL

SEQ ID NO: 45652 - protein, 428 aa, Homo sapiens; identical to SEQ ID NO: 45650
  Payload ID: 9310
  Gene Symbol: LRRC42
  Gene Name: leucine rich repeat containing 42
  Uniprot ID: Q9Y546
  ENSP ID: ENSP00000360421

SEQ ID NO: 45653 - protein, 239 aa, Homo sapiens
  Payload ID: 9310
  Gene Symbol: LRRC42
  Gene Name: leucine rich repeat containing 42
  ENSP ID: ENSP00000389368
MSYYLSSENHLDPGPIYMRENGQLHMVNLALDGVRSSLQKPRPFRLFPKGFSVELCMNREDDTARKEKTDHFIFTYTREGNLRYSAKSLFSLVLGFISDNVDHIDSLIGFPEQIAEKLFSAAEARQKFTEPGAGLRALQKFTEAYGSLVLCSLCLRNRYLVISEKLEEIKSFRELTCLDLSCCKLGDEHELLEHLTNEALSSVTQLHLKDNCLSDAGVRKMTAPVRVMKRGLENLTLLD

SEQ ID NO: 45654 - protein, 656 aa, Homo sapiens
  Payload ID: 9311
  Gene Symbol: LRRC43
  Gene Name: leucine rich repeat containing 43
  Uniprot ID: Q8N309
  ENSP ID: ENSP00000344233
MEASYESESESESEAGPGTQRPGTGTVSAAVREHLRKLCLREFPCGAGSWNKSRFLPQTWRTWRELVPREEDVVSPGEETVEALLGLVRSRHSPWALLNNSNAEDSFLRELAIRNPLTITDTFFYSYFRSLRVIDKKVTLVDKDLLKFLKLEELVLSANRIKEVDATNLPPTLKVLELYGNEISSMECLCAHPPAGLQHLGLGHNKLLGPLESLYVTANHWPNLVSLDLGFNDLTDLQSMVTSLRTLRHLRLLVLQGNPLALVPYYRGLTIDSLAQLCVLDDITVSPNEKHLFRGLSLNGDLLAQEAQFVVTIGNIRGVLDTSVLDPEPRPEGPFITYNYYVTYDFVKDEEGEMNESAGVLAEIVKPSPSLELLVEESPEEVVEDVIEDIVEEVTEEVEGSLESEVEESGESELSVISGPSTILQMPRASAEELAKLRLRIDPRLCPSPGTVLFSTAHKPWAEVIPCSYEMQHSLRDLVPLKAFLLAGTTVTIVEEKILSWPVVLPAVDSPLSAKKGKGEKDKKGKEKDRTGKGEKEPAKEWKVLKKKKEPPKELRQDPPILQVLGRGLVILEPLLAGEPLVSTVCNFGVVRTLTSDRLTLARDSKKIKKVAKKEKPKAVIPIYEGDYHPEPLTVEVQIQLNQCRSAEEALRMFAV

SEQ ID NO: 45655 - protein, 147 aa, Homo sapiens
  Payload ID: 9311
  Gene Symbol: LRRC43
  Gene Name: leucine rich repeat containing 43
  ENSP ID: ENSP00000438751
MECLCAHPPAGLQHLGLGHNKLLGPLESLYVTANHWPNLVSLDLGFNDLTDLQSMVTSLRTLRHLRLLVLQGNPLALVPYYRGLTIDSLAQLCVLDDITVSPNEKHLFRGLSLNGDLLAQEAQFVVTIGNIRGVLDTSVLDPEPRPE

SEQ ID NO: 45656 - protein, 670 aa, Homo sapiens
  Payload ID: 9312
  Gene Symbol: LRRC45
  Gene Name: leucine rich repeat containing 45
  Uniprot ID: Q96CN5
  ENSP ID: ENSP00000306760
MEEFRRSYSRLCRESGAEPQEAVLQQLHQLPRGRLDLATQSLTVETCRALGKLLPRETLCTELVLSDCMLSEEGATLLLRGLCANTVLRFLDLKGNNLRAAGAEALGKLLQQNKSIQSLTLEWNSLGTWDDAFATFCGGLAANGALQRLDLRNNQISHKGAEELALALKGNTTLQQLDLRWNNVGLLGGRALMNCLPSNRTLWRLDLAGNNIPGDVLRAVEQAMGHSQDRLTTFQENQARTHVLSKEVQHLREEKSKQFLDLMETIDKQREEMAKSSRASAARVGQLQEALNERHSIINALKAKLQMTEAALALSEQKAQDLGELLATAEQEQLSLSQRQAKELKLEQQEAAERESKLLRDLSAANEKNLLLQNQVDELERKFRCQQEQLFQTRQEMTSMSAELKMRAIQAEERLDMEKRRCRQSLEDSESLRIKEVEHMTRHLEESEKAMQERVQRLEAARLSLEEELSRVKAAALSERGQAEEELIKAKSQARLEEQQRLAHLEDKLRLLAQARDEAQGACLQQKQVVAEAQTRVSQLGLQVEGLRRRLEELQQELSLKDQERVAEVSRVRVELQEQNGRLQAELAAQEALREKAAALERQLKVMASDHREALLDRESENASLREKLRLREAEIARIRDEEAQRASFLQNAVLAYVQASPVRTLSPPK

SEQ ID NO: 45657 - protein, 6 aa, Homo sapiens
  Payload ID: 9312
  Gene Symbol: LRRC45
  Gene Name: leucine rich repeat containing 45
  ENSP ID: ENSP00000462276
MNCLPS

SEQ ID NO: 45658 - protein, 188 aa, Homo sapiens
  Payload ID: 9312
  Gene Symbol: LRRC45
  Gene Name: leucine rich repeat containing 45
  ENSP ID: ENSP00000462928
  MOD_RES (1)..(1): Any amino acid
XQFLDLMETIDKQREEMAKSSRASAARVGQLQEALNERHSIINALKAKLQMTEAALALSEQKAQDLGELLATAEQEQLSLSQRQAKELKLEQQEAAERESKLLRDLSAANEKNLLLQNQVDELERKFRCQQEQLFQTRQEMTSMSAELKMRAIQAEERLDMEKRRCRQSLEDSESLRIKEGGESVRRR

SEQ ID NO: 45659 - protein, 321 aa, Homo sapiens
  Payload ID: 9313
  Gene Symbol: LRRC46
  Gene Name: leucine rich repeat containing 46
  Uniprot ID: Q96FV0
  ENSP ID: ENSP00000269025
MSGGKSAQGPEEGGVCITEALITKRNLTFPEDGELSEKMFHTLDELQTVRLDREGITTIRNLEGLQNLHSLYLQGNKIQQIENLACIPSLRFLSLAGNQIRQVENLLDLPCLQFLDLSENLIETLKLDEFPQSLLILNLSGNSCTNQDGYRELVTEALPLLLDLDGQPVVERWISDEEDEASSDEEFPELSGPFCSERGFLKELEQELSRHREHRQQTALTEHLLRMEMQPTLTDLPLLPGVPMAGDSSPSATPAQGEETVPEAVSSPQASSPTKKPCSLIPRGHQSSFWGRKGARAATAPKASVAEAPSTTKTTAKRSKK

SEQ ID NO: 45660 - protein, 98 aa, Homo sapiens
  Payload ID: 9313
  Gene Symbol: LRRC46
  Gene Name: leucine rich repeat containing 46
  ENSP ID: ENSP00000462585
MSGGKSAQGPEEGGVCITEALITKRNLTFPEDGELSEKMFHTLDELQTVRLDREGITTIRNLEGLQNLHSLYLQGLQPISCFEEEETMKIPVHHSDPT

SEQ ID NO: 45661 - protein, 47 aa, Homo sapiens
  Payload ID: 9313
  Gene Symbol: LRRC46
  Gene Name: leucine rich repeat containing 46
  ENSP ID: ENSP00000463232
MSGGKSAQGPEEGGVCITEALITKRNLTFPEDGELSEKMHSAMLWNE

SEQ ID NO: 45662 - protein, 47 aa, Homo sapiens; identical to SEQ ID NO: 45661
  Payload ID: 9313
  Gene Symbol: LRRC46
  Gene Name: leucine rich repeat containing 46
  ENSP ID: ENSP00000463930

SEQ ID NO: 45663 - protein, 583 aa, Homo sapiens
  Payload ID: 9314
  Gene Symbol: LRRC47
  Gene Name: leucine rich repeat containing 47
  Uniprot ID: Q8N1G4
  ENSP ID: ENSP00000367498
MAAAAVSESWPELELAERERRRELLLTGPGLEERVRAAGGQLPPRLFTLPLLHYLEVSGCGSLRAPGPGLAQGLPQLHSLVLRRNALGPGLSPELGPLPALRVLDLSGNALEALPPGQGLGPAEPPGLPQLQSLNLSGNRLRELPADLARCAPRLQSLNLTGNCLDSFPAELFRPGALPLLSELAAADNCLRELSPDIAHLASLKTLDLSNNQLSEIPAELADCPKLKEINFRGNKLRDKRLEKMVSGCQTRSILEYLRVGGRGGGKGKGRAEGSEKEESRRKRRERKQRREGGDGEEQDVGDAGRLLLRVLHVSENPVPLTVRVSPEVRDVRPYIVGAVVRGMDLQPGNALKRFLTSQTKLHEDLCEKRTAATLATHELRAVKGPLLYCARPPQDLKIVPLGRKEAKAKELVRQLQLEAEEQRKQKKRQSVSGLHRYLHLLDGNENYPCLVDADGDVISFPPITNSEKTKVKKTTSDLFLEVTSATSLQICKDVMDALILKMAEMKKYTLENKEEGSLSDTEADAVSGQLPDPTTNPSAGKDGPSLLVVEQVRVVDLEGSLKVVYPSKADLATAPPHVTVVR

SEQ ID NO: 45664 - protein, 50 aa, Homo sapiens
  Payload ID: 9314
  Gene Symbol: LRRC47
  Gene Name: leucine rich repeat containing 47
  ENSP ID: ENSP00000462103
  MOD_RES (1)..(1): Any amino acid
XEEQRKQKKRQSVSGLHRNRLMLPEPRSFLTGYKESILFPKETLWNQSVI

SEQ ID NO: 45665 - protein, 686 aa, Homo sapiens
  Payload ID: 9315
  Gene Symbol: LRRC49
  Gene Name: leucine rich repeat containing 49
  Uniprot ID: Q8IUZ0
  ENSP ID: ENSP00000260382
MIPGKYRSVSGRAANNVNCGLHLVIQTSSLPEKNKVEFKLNKDTSSFPGRLLQHDLERNYSSRQGDHINLVSSSLSSFPILQRSSEEKILYSDRLSLERQKLTVCPIINGEDHLRLLNFQHNFITRIQNISNLQKLISLDLYDNQIEEISGLSTLRCLRVLLLGKNRIKKISNLENLKSLDVLDLHGNQITKIENINHLCELRVLNLARNFLSHVDNLNGLDSLTELNLRHNQITFVRDVDNLPCLQHLFLSFNNISSFDSVSCLADSSSLSDITFDGNPIAQESWYKHTVLQNMMQLRQLDMKRITEEERRMASVLAKKEEEKKRESHKQSLLKEKKRLTINNVARQWDLQQQRVANIATNEDRKDSDSPQDPCQIDGSTLSAFPEETGPLDSGLNNALQGLSVIDTYLVEVDGDTLSLYGSGALESLDRNWSVQTAGMITTVSFTFIEFDEIVQVLPKLKIKFPNSLHLKFKETNLVMLQQFNALAQLRRIDQLTIDPQGNPVVNFTLWKYYVLFRLSHFSMQKINGTEVTQNDMIMAERLFGILAHVASSELPQYRLISILGDARKKQFRYLLESKGKKPGIINEENNDSKRLVGENTNRATLNYTTRDFYNEKLEEIKEKKKFCKTYIEDLVKEATEINMKNEALQKLWPQMFIELVRDAVIEIRNKNSYMKLCLQQITDQK

SEQ ID NO: 45666 - protein, 642 aa, Homo sapiens
  Payload ID: 9315
  Gene Symbol: LRRC49
  Gene Name: leucine rich repeat containing 49
  Uniprot ID: Q8IUZ0
  ENSP ID: ENSP00000414065
MRSITQGACRFIWEDKGYISGDHINLVSSSLSSFPILQRSSEEKILYSDRLSLERQKLTVCPIINGEDHLRLLNFQHNFITRIQNISNLQKLISLDLYDNQIEEISGLSTLRCLRVLLLGKNRIKKISNLENLKSLDVLDLHGNQITKIENINHLCELRVLNLARNFLSHVDNLNGLDSLTELNLRHNQITFVRDVDNLPCLQHLFLSFNNISSFDSVSCLADSSSLSDITFDGNPIAQESWYKHTVLQNMMQLRQLDMKRITEEERRMASVLAKKEEEKKRESHKQSLLKEKKRLTINNVARQWDLQQQRVANIATNEDRKDSDSPQDPCQIDGSTLSAFPEETGPLDSGLNNALQGLSVIDTYLVEVDGDTLSLYGSGALESLDRNWSVQTAGMITTVSFTFIEFDEIVQVLPKLKIKFPNSLHLKFKETNLVMLQQFNALAQLRRIDQLTIDPQGNPVVNFTLWKYYVLFRLSHFSMQKINGTEVTQNDMIMAERLFGILAHVASSELPQYRLISILGDARKKQFRYLLESKGKKPGIINEENNDSKRLVGENTNRATLNYTTRDFYNEKLEEIKEKKKFCKTYIEDLVKEATEINMKNEALQKLWPQMFIELVRDAVIEIRNKNSYMKLCLQQITDQK

SEQ ID NO: 45667 - protein, 676 aa, Homo sapiens
  Payload ID: 9315
  Gene Symbol: LRRC49
  Gene Name: leucine rich repeat containing 49
  Uniprot ID: Q8IUZ0
  ENSP ID: ENSP00000439600
MDCQAEVNCGLHLVIQTSSLPEKNKVEFKLNKDTSSFPGRLLQHDLERNYSSRQGDHINLVSSSLSSFPILQRSSEEKILYSDRLSLERQKLTVCPIINGEDHLRLLNFQHNFITRIQNISNLQKLISLDLYDNQIEEISGLSTLRCLRVLLLGKNRIKKISNLENLKSLDVLDLHGNQITKIENINHLCELRVLNLARNFLSHVDNLNGLDSLTELNLRHNQITFVRDVDNLPCLQHLFLSFNNISSFDSVSCLADSSSLSDITFDGNPIAQESWYKHTVLQNMMQLRQLDMKRITEEERRMASVLAKKEEEKKRESHKQSLLKEKKRLTINNVARQWDLQQQRVANIATNEDRKDSDSPQDPCQIDGSTLSAFPEETGPLDSGLNNALQGLSVIDTYLVEVDGDTLSLYGSGALESLDRNWSVQTAGMITTVSFTFIEFDEIVQVLPKLKIKFPNSLHLKFKETNLVMLQQFNALAQLRRIDQLTIDPQGNPVVNFTLWKYYVLFRLSHFSMQKINGTEVTQNDMIMAERLFGILAHVASSELPQYRLISILGDARKKQFRYLLESKGKKPGIINEENNDSKRLVGENTNRATLNYTTRDFYNEKLEEIKEKKKFCKTYIEDLVKEATEINMKNEALQKLWPQMFIELVRDAVIEIRNKNSYMKLCLQQITDQK

SEQ ID NO: 45668 - protein, 374 aa, Homo sapiens
  Payload ID: 9315
  Gene Symbol: LRRC49
  Gene Name: leucine rich repeat containing 49
  ENSP ID: ENSP00000452775
MASVLAKKEEEKKRESHKQSLLKEKKRLTINNVARQWDLQQQRVANIATNEDRKDSDSPQDPCQIDGSTLSAFPEETGPLDSGLNNALQGLSVIDTYLVEVDGDTLSLYGSGALESLDRNWSVQTAGMITTVSFTFIEFDEIVQVLPKLKIKFPNSLHLKFKETNLVMLQQFNALAQLRRIDQLTIDPQGNPVVNFTLWKYYVLFRLSHFSMQKINGTEVTQNDMIMAERLFGILAHVASSELPQYRLISILGDARKKQFRYLLESKGKKPGIINEENNDSKRLVGENTNRATLNYTTRDFYNEKLEEIKEKKKFCKTYIEDLVKEATEINMKNEALQKLWPQMFIELVRDAVIEIRNKNSYMKLCLQQITDQK

SEQ ID NO: 45669 - protein, 96 aa, Homo sapiens
  Payload ID: 9315
  Gene Symbol: LRRC49
  Gene Name: leucine rich repeat containing 49
  ENSP ID: ENSP00000452821
MMQLRQLDMKRITEEERRMASVLAKKEEEKKRESHKQSLLKEKKRLTINNVARQWDLQQQRVANIATNEDRKDSDSPQDPCQIDGSTLSAFPEETG

SEQ ID NO: 45670 - protein, 117 aa, Homo sapiens
  Payload ID: 9315
  Gene Symbol: LRRC49
  Gene Name: leucine rich repeat containing 49
  ENSP ID: ENSP00000452894
MIPGKYRSVSGRAANNVNCGLHLVIQTSSLPEKNKVEFKLNKDTSSFPGRLLQHDLERNYSSRQELYGLEMKTATRSLSAFGDSSIKTPSKSRIQQGCHSAGPNISGDHINLVSSSL

SEQ ID NO: 45671 - protein, 30 aa, Homo sapiens
  Payload ID: 9315
  Gene Symbol: LRRC49
  Gene Name: leucine rich repeat containing 49
  ENSP ID: ENSP00000452925
MSSCPSVGEKQNQENLKSGESKKLRCLGSS

SEQ ID NO: 45672 - protein, 62 aa, Homo sapiens
  Payload ID: 9315
  Gene Symbol: LRRC49
  Gene Name: leucine rich repeat containing 49
  ENSP ID: ENSP00000453038
MIPGKYRSVSGRAANNVNCGLHLVIQTSSLPEKNKHLYLPTFYTLCLKTQHDFSSFDQVGNL

SEQ ID NO: 45673 - protein, 691 aa, Homo sapiens
  Payload ID: 9315
  Gene Symbol: LRRC49
  Gene Name: leucine rich repeat containing 49
  Uniprot ID: Q8IUZ0
  ENSP ID: ENSP00000453273
MIPGKYRSVSGRAANNVNCGLHLVIQTSSLPEKNKVRFKKVEFKLNKDTSSFPGRLLQHDLERNYSSRQGDHINLVSSSLSSFPILQRSSEEKILYSDRLSLERQKLTVCPIINGEDHLRLLNFQHNFITRIQNISNLQKLISLDLYDNQIEEISGLSTLRCLRVLLLGKNRIKKISNLENLKSLDVLDLHGNQITKIENINHLCELRVLNLARNFLSHVDNLNGLDSLTELNLRHNQITFVRDVDNLPCLQHLFLSFNNISSFDSVSCLADSSSLSDITFDGNPIAQESWYKHTVLQNMMQLRQLDMKRITEEERRMASVLAKKEEEKKRESHKQSLLKEKKRLTINNVARQWDLQQQRVANIATNEDRKDSDSPQDPCQIDGSTLSAFPEETGPLDSGLNNALQGLSVIDTYLVEVDGDTLSLYGSGALESLDRNWSVQTAGMITTVSFTFIEFDEIVQVLPKLKIKFPNSLHLKFKETNLVMLQQFNALAQLRRIDQLTIDPQGNPVVNFTLWKYYVLFRLSHFSMQKINGTEVTQNDMIMAERLFGILAHVASSELPQYRLISILGDARKKQFRYLLESKGKKPGIINEENNDSKRLVGENTNRATLNYTTRDFYNEKLEEIKEKKKFCKTYIEDLVKEATEINMKNEALQKLWPQMFIELVRDAVIEIRNKNSYMKLCLQQITDQK

SEQ ID NO: 45674 - protein, 115 aa, Homo sapiens
  Payload ID: 9315
  Gene Symbol: LRRC49
  Gene Name: leucine rich repeat containing 49
  ENSP ID: ENSP00000453300
MMQLRQLDMKRITEEERRMASVLAKKEEEKKRESHKQSLLKEKKRLTINNVARQWDLQQQRVANIATNEDRKDSDSPQDPCQIDGSTLSAFPEETGPLDSGLNNALQGLSVIDTY

SEQ ID NO: 45675 - protein, 91 aa, Homo sapiens
  Payload ID: 9315
  Gene Symbol: LRRC49
  Gene Name: leucine rich repeat containing 49
  ENSP ID: ENSP00000453402
MMQLRQLDMKRITEKKRLTINNVARQWDLQQQRVANIATNEDRKDSDSPQDPCQIDGSTLSAFPEETGPLDSGLNNALQGLSVIDTYLVEV

SEQ ID NO: 45676 - protein, 62 aa, Homo sapiens; identical to SEQ ID NO: 45672
  Payload ID: 9315
  Gene Symbol: LRRC49
  Gene Name: leucine rich repeat containing 49
  ENSP ID: ENSP00000453456

SEQ ID NO: 45677 - protein, 74 aa, Homo sapiens
  Payload ID: 9315
  Gene Symbol: LRRC49
  Gene Name: leucine rich repeat containing 49
  ENSP ID: ENSP00000453728
MIPGKYRSVSGRAANNVNCGLHLVIQTSSLPEKNKVEFKLNKDTSSFPGRLLQHDLERNYSSRQDFTKNIKNVK

SEQ ID NO: 45678 - protein, 67 aa, Homo sapiens
  Payload ID: 9315
  Gene Symbol: LRRC49
  Gene Name: leucine rich repeat containing 49
  ENSP ID: ENSP00000453731
MIPGKYRSVSGRAANNVNCGLHLVIQTSSLPEKNKTKADRMSYHQWGRPPSFVELSTQFYNSDTKYF

SEQ ID NO: 45679 - protein, 67 aa, Homo sapiens
  Payload ID: 9315
  Gene Symbol: LRRC49
  Gene Name: leucine rich repeat containing 49
  ENSP ID: ENSP00000453807
MIPGKYRSVSGRAANNVNCGLHLVIQTSSLPEKNKVEFKLNKDTSSFPGRLLQHDLERNYSSRQDKS

SEQ ID NO: 45680 - protein, 78 aa, Homo sapiens
  Payload ID: 9315
  Gene Symbol: LRRC49
  Gene Name: leucine rich repeat containing 49
  ENSP ID: ENSP00000454026
MMQLRQLDMKRITEEERRMASVLAKKEEEKKRESHKQSLLKEKKRLTINNVARQWDLQQQRVANIATNEDRKDSDSPQ

SEQ ID NO: 45681 - protein, 392 aa, Homo sapiens
  Payload ID: 9315
  Gene Symbol: LRRC49
  Gene Name: leucine rich repeat containing 49
  ENSP ID: ENSP00000454170
MMQLRQLDMKRITEEERRMASVLAKKEEEKKRESHKQSLLKEKKRLTINNVARQWDLQQQRVANIATNEDRKDSDSPQDPCQIDGSTLSAFPEETGPLDSGLNNALQGLSVIDTYLVEVDGDTLSLYGSGALESLDRNWSVQTAGMITTVSFTFIEFDEIVQVLPKLKIKFPNSLHLKFKETNLVMLQQFNALAQLRRIDQLTIDPQGNPVVNFTLWKYYVLFRLSHFSMQKINGTEVTQNDMIMAERLFGILAHVASSELPQYRLISILGDARKKQFRYLLESKGKKPGIINEENNDSKRLVGENTNRATLNYTTRDFYNEKLEEIKEKKKFCKTYIEDLVKEATEINMKNEALQKLWPQMFIELVRDAVIEIRNKNSYMKLCLQQITDQK

SEQ ID NO: 45682 - protein, 62 aa, Homo sapiens; identical to SEQ ID NO: 45672
  Payload ID: 9315
  Gene Symbol: LRRC49
  Gene Name: leucine rich repeat containing 49
  ENSP ID: ENSP00000454196

SEQ ID NO: 45683 - protein, 21 aa, Homo sapiens
  Payload ID: 9315
  Gene Symbol: LRRC49
  Gene Name: leucine rich repeat containing 49
  ENSP ID: ENSP00000454760
MSSCPSVGEKQNQENLKSGES

SEQ ID NO: 45684 - protein, 713 aa, Homo sapiens
  Payload ID: 9316
  Gene Symbol: LRRC4B
  Gene Name: leucine rich repeat containing 4B
  Uniprot ID: Q9NT99
  ENSP ID: ENSP00000373853
MARARGSPCPPLPPGRMSWPHGALLFLWLFSPPLGAGGGGVAVTSAAGGGSPPATSCPVACSCSNQASRVICTRRDLAEVPASIPVNTRYLNLQENGIQVIRTDTFKHLRHLEILQLSKNLVRKIEVGAFNGLPSLNTLELFDNRLTTVPTQAFEYLSKLRELWLRNNPIESIPSYAFNRVPSLRRLDLGELKRLEYISEAAFEGLVNLRYLNLGMCNLKDIPNLTALVRLEELELSGNRLDLIRPGSFQGLTSLRKLWLMHAQVATIERNAFDDLKSLEELNLSHNNLMSLPHDLFTPLHRLERVHLNHNPWHCNCDVLWLSWWLKETVPSNTTCCARCHAPAGLKGRYIGELDQSHFTCYAPVIVEPPTDLNVTEGMAAELKCRTGTSMTSVNWLTPNGTLMTHGSYRVRISVLHDGTLNFTNVTVQDTGQYTCMVTNSAGNTTASATLNVSAVDPVAAGGTGSGGGGPGGSGGVGGGSGGYTYFTTVTVETLETQPGEEALQPRGTEKEPPGPTTDGVWGGGRPGDAAGPASSSTTAPAPRSSRPTEKAFTVPITDVTENALKDLDDVMKTTKIIIGCFVAITFMAAVMLVAFYKLRKQHQLHKHHGPTRTVEIINVEDELPAASAVSVAAAAAVASGGGVGGDSHLALPALERDHLNHHHYVAAAFKAHYSSNPSGGGCGGKGPPGLNSIHEPLLFKSGSKENVQETQI

SEQ ID NO: 45685 - protein, 713 aa, Homo sapiens; identical to SEQ ID NO: 45684
  Payload ID: 9316
  Gene Symbol: LRRC4B
  Gene Name: leucine rich repeat containing 4B
  Uniprot ID: Q9NT99
  ENSP ID: ENSP00000471502

SEQ ID NO: 45686 - protein, 238 aa, Homo sapiens
  Payload ID: 9316
  Gene Symbol: LRRC4B
  Gene Name: leucine rich repeat containing 4B
  ENSP ID: ENSP00000472528
MARARGSPCPPLPPGRMSWPHGALLFLWLFSPPLGAGGGGVAVTSAAGGGSPPATSCPVACSCSNQASRVICTRRDLAEVPASIPVNTRYLNLQENGIQVIRTDTFKHLRHLEILQLSKNLVRKIEVGAFNGLPSLNTLELFDNRLTTVPTQAFEYLSKLRELWLRNNPIESIPSYAFNRVPSLRRLDLGELKRLEYISEAAFEGLVNLRYLNLGMCNLKDIPNLTALVRLEELELSG

SEQ ID NO: 45687 - protein, 640 aa, Homo sapiens
  Payload ID: 9317
  Gene Symbol: LRRC4C
  Gene Name: leucine rich repeat containing 4C
  Uniprot ID: Q9HCJ2
  ENSP ID: ENSP00000278198
MLNKMTLHPQQIMIGPRFNRALFDPLLVVLLALQLLVVAGLVRAQTCPSVCSCSNQFSKVICVRKNLREVPDGISTNTRLLNLHENQIQIIKVNSFKHLRHLEILQLSRNHIRTIEIGAFNGLANLNTLELFDNRLTTIPNGAFVYLSKLKELWLRNNPIESIPSYAFNRIPSLRRLDLGELKRLSYISEGAFEGLSNLRYLNLAMCNLREIPNLTPLIKLDELDLSGNHLSAIRPGSFQGLMHLQKLWMIQSQIQVIERNAFDNLQSLVEINLAHNNLTLLPHDLFTPLHHLERIHLHHNPWNCNCDILWLSWWIKDMAPSNTACCARCNTPPNLKGRYIGELDQNYFTCYAPVIVEPPADLNVTEGMAAELKCRASTSLTSVSWITPNGTVMTHGAYKVRIAVLSDGTLNFTNVTVQDTGMYTCMVSNSVGNTTASATLNVTAATTTPFSYFSTVTVETMEPSQDEARTTDNNVGPTPVVDWETTNVTTSLTPQSTRSTEKTFTIPVTDINSGIPGIDEVMKTTKIIIGCFVAITLMAAVMLVIFYKMRKQHHRQNHHAPTRTVEIINVDDEITGDTPMESHLPMPAIEHEHLNHYNSYKSPFNHTTTVNTINSIHSSVHEPLLIRMNSKDNVQETQI

SEQ ID NO: 45688 - protein, 41 aa, Homo sapiens
  Payload ID: 9317
  Gene Symbol: LRRC4C
  Gene Name: leucine rich repeat containing 4C
  ENSP ID: ENSP00000431363
MLNKMTLHPQQIMIGPRFNRALFDPLLVVLLALQLLVVAGL

SEQ ID NO: 45689 - protein, 640 aa, Homo sapiens; identical to SEQ ID NO: 45687
  Payload ID: 9317
  Gene Symbol: LRRC4C
  Gene Name: leucine rich repeat containing 4C
  Uniprot ID: Q9HCJ2
  ENSP ID: ENSP00000434761

SEQ ID NO: 45690 - protein, 640 aa, Homo sapiens; identical to SEQ ID NO: 45687
  Payload ID: 9317
  Gene Symbol: LRRC4C
  Gene Name: leucine rich repeat containing 4C
  Uniprot ID: Q9HCJ2
  ENSP ID: ENSP00000436976

SEQ ID NO: 45691 - protein, 640 aa, Homo sapiens; identical to SEQ ID NO: 45687
  Payload ID: 9317
  Gene Symbol: LRRC4C
  Gene Name: leucine rich repeat containing 4C
  Uniprot ID: Q9HCJ2
  ENSP ID: ENSP00000437132

SEQ ID NO: 45692 - protein, 640 aa, Homo sapiens; identical to SEQ ID NO: 45687
  Payload ID: 9317
  Gene Symbol: LRRC4C
  Gene Name: leucine rich repeat containing 4C
  Uniprot ID: Q9HCJ2
  ENSP ID: ENSP00000480903

SEQ ID NO: 45693 - protein, 313 aa, Homo sapiens
  Payload ID: 9318
  Gene Symbol: LRRC52
  Gene Name: leucine rich repeat containing 52
  Uniprot ID: Q8N7C0
  ENSP ID: ENSP00000294818
MSLASGPGPGWLLFSFGMGLVSGSKCPNNCLCQAQEVICTGKQLTEYPLDIPLNTRRLFLNENRITSLPAMHLGLLSDLVYLDCQNNRIREVMDYTFIGVFKLIYLDLSSNNLTSISPFTFSVLSNLVQLNIANNPHLLSLHKFTFANTTSLRYLDLRNTGLQTLDSAALYHLTTLETLFLSGNPWKCNCSFLDFAIFLIVFHMDPSDDLNATCVEPTELTGWPITRVGNPLRYMCITHLDHKDYIFLLLIGFCIFAAGTVAAWLTGVCAVLYQNTRHKSSEEDEDEAGTRVEVSRRIFQTQTSSVQEFPQLI

SEQ ID NO: 45694 - protein, 1247 aa, Homo sapiens
  Payload ID: 9319
  Gene Symbol: LRRC53
  Gene Name: leucine rich repeat containing 53
  Uniprot ID: A6NM62
  ENSP ID: ENSP00000294635
MLRLVAACPESCVVCTKDVTLCHQLTYIVAAPMTTRVLIITDGYLSSIESTNLSLLFNLALLSLSRNGIEDVQEDALHGLTMLRTLLLEHNQISSSSLTDHTFSKLHSLQVLVLSNNALRTLRGSWFRNTSGLTRLQLDGNQITNLTDSSFGGTNLHSLRYLDLSNNFISYIGKDAFRPLPQLQEVDLSRNRLAHMPDVFTPLKQLILLSLDKNQWSCTCDLHPLARFLRNYIKSSAHTLRNAKDLNCQPSTAAVAAAQSVLRLSETNCDSKAPNFTLVLKDRSPLLPGPDVALLTVLGFAGAVGLTCLGLVVFNWKLHQGKANEHTSENLCCRTFDEPLCAHEARNYHTKGYCNCHLTQENEIKVMSTVGSRKEMPLLQENSHQATSASESATLDGSFRNLKKKDRGVGSTLFCQDGRLLHSECSEPPGNMRAFNEAGLLTTYNPRKVQKLWNLEPGEVQPQTLQHHIIRTEDISSDIFRRRYATPASALAGESLEKRLTNESWQPPIEKEDNGLHPHRQRHFITSSSSKPCEPEEHYVQKIVQKNRSKYDDPCGLLKQSKPRYFQPNNSLICKYVPCEQFEDYMKEKKPNRRQHSKPEKEQIQINSAIEKFLMSEDNIDLSGLSTKTKKAYSPKRVIFHDPDLVEINRSMMSPKISTPWKRQKNQSNQLTKLDVKKFSNTGERNKGEKWFTNSWVLKRKRTPQSDLKGKIKGQNLKLNLHPFRKVRVHPEKSLSSLPKQCKQVLLPPKKLSKTSETEAKINTVCSADFLQQSESSNYVRLTSKRLPLKHDSKQTPYYQRNTKRAPLLSANNLRVVNQSSIESSCYSAGHIPDGNTSKLPQPTPTDAEHRHSHSQFSTEQMEDATQLESKVLSYLATTWENTGSDVLPFQHSRRATDQGTTESTEHMGQNVSKTSELNQFSLSPRNQTQLLDAHKTDSYNKEYTLDQNEALQHREQNSSHAQLENKEKTLMTKPQISHQIVENCIMDKEENDVEKKLSKTETYDSSLIPQTQSKNNLSFMKTNSIPYQNRIELPKDISTSPVSSQAVWHLTNSSEKGIDSTNALPRNDGTEALEIKIVGKEEKNMLDESKTDSSMLTQISQMTLKGITKERQQTWENGTSEKYILHDASSAEETITAKDLSITSSHETQNRILCSEVDPEVNSNVHNFREVQNIQPDKDSAHKEGAMTVETHEALSFLPGLKDSFEAENEVFLVPSRINEAENSAPKPVLYPPSAEYATTSPLETE

SEQ ID NO: 45695 - protein, 341 aa, Homo sapiens
  Payload ID: 9320
  Gene Symbol: LRRC55
  Gene Name: leucine rich repeat containing 55
  Uniprot ID: Q6ZSA7
  ENSP ID: ENSP00000419542
MLRSPTFTDAGPRCSCLPVSQTLDSMDTVLMGSLQHCCCLLPKMGDTWAQLPWPGPPHPAMLLISLLLAAGLMHSDAGTSCPVLCTCRNQVVDCSSQRLFSVPPDLPMDTRNLSLAHNRITAVPPGYLTCYMELQVLDLHNNSLMELPRGLFLHAKRLAHLDLSYNNFSHVPADMFQEAHGLVHIDLSHNPWLRRVHPQAFQGLMQLRDLDLSYGGLAFLSLEALEGLPGLVTLQIGGNPWVCGCTMEPLLKWLRNRIQRCTADSQLAECRGPPEVEGAPLFSLTEESFKACHLTLTLDDYLFIAFVGFVVSIASVATNFLLGITANCCHRWSKASEEEEI

SEQ ID NO: 45696 - protein, 542 aa, Homo sapiens
  Payload ID: 9321
  Gene Symbol: LRRC56
  Gene Name: leucine rich repeat containing 56
  Uniprot ID: Q8IYG6
  ENSP ID: ENSP00000270115
MDLGWDRSRGPRRSTSSVRVRELSWQGLHNPCPQSKGPGSQRDRLGEQLVEEYLSPARLQALARVDDLRLVRTLEMCVDTREGSLGNFGVHLPNLDQLKLNGSHLGSLRDLGTSLGHLQVLWLARCGLADLDGIASLPALKELYASYNNISDLSPLCLLEQLEVLDLEGNSVEDLGQVRYLQLCPRLAMLTLEGNLVCLQPAPGPTNKVPRGYNYRAEVRKLIPQLQVLDEVPAAHTGPPAPPRLSQDWLAVKEAIKKGNGLPPLDCPRGAPIRRLDPELSLPETQSRASRPWPFSLLVRGGPLPEGLLSEDLAPEDNTSSLTHGAGQVLCGNPTKGLRERRHQCQAREPPEQLPQHRPGDPAASTSTPEPDPADSSDFLALAGLRAWREHGVRPLPYRHPESQQEGAVAPWGPRRVPEEQVHQAEPKTPSSPPSLASEPSGTSSQHLVPSPPKHPRPRDSGSSSPRWSTDLQSRGRRLRVLGSWGPGLGDGVAAVPVLRALEVASRLSPRAQGCPGPKPAPDAAARPPRAAELSHPSPVPT

SEQ ID NO: 45697 - protein, 542 aa, Homo sapiens
  Payload ID: 9321
  Gene Symbol: LRRC56
  Gene Name: leucine rich repeat containing 56
  ENSP ID: ENSP00000477831
MDLGWDRSRGPRRSTSSVRVRELSWQGLHNPCPQSKGPGSQRDRLGEQLVEEYLSPARLQALARVDDLRLVRTLEMCVDTREGSLGNFGVHLPNLDQLKLNGSHLGSLRDLGTSLGHLQVLWLARCGLADLDGIASLPALKELYASYNNISDLSPLCLLEQLEVLDLEGNSVEDLGQVRYLQLCPRLAMLTLEGNLVCLQPAPGPTNKVPRGYNYRAEVRKLIPQLQVLDEVPAAHTGPPAPPRLSQDWLAVKEAIKKGNGLPPLDCPRGAPIRRLDPELSLPETQSRASRPWPFSLLVHGGPLPEGLLSEDLAPEDNTSSLTHGAGQVLCGNPTKGLRERRHQCQAREPPEQLPQHRPGDPAASTSTPEPDPADSSDFLALAGLRAWREHGVRPLPYRHPESQQEGAVAPWGPRRVPEEQVHQAEPKTPSSPPSLASEPSGTSSQHLVPSPPKHPRPRDSGSSSPRWSTDLQSRGRRLRVLGSWGPGLGDGVAAVPVLRALEVASGLSPRAQGCPGPKPAPHAAARPPRAAELSHPSPVPT

SEQ ID NO: 45698 - protein, 239 aa, Homo sapiens
  Payload ID: 9322
  Gene Symbol: LRRC57
  Gene Name: leucine rich repeat containing 57
  Uniprot ID: Q8N9N7
  ENSP ID: ENSP00000326817
MGNSALRAHVETAQKTGVFQLKDRGLTEFPADLQKLTSNLRTIDLSNNKIESLPPLLIGKFTLLKSLSLNNNKLTVLPDEICNLKKLETLSLNNNHLRELPSTFGQLSALKTLSLSGNQLGALPPQLCSLRHLDVMDLSKNQIRSIPDSVGELQVIELNLNQNQISQISVKISCCPRLKILRLEENCLELSMLPQSILSDSQICLLAVEGNLFEIKKLRELEGYDKYMERFTATKKKFA

SEQ ID NO: 45699 - protein, 239 aa, Homo sapiens; identical to SEQ ID NO: 45698
  Payload ID: 9322
  Gene Symbol: LRRC57
  Gene Name: leucine rich repeat containing 57
  Uniprot ID: Q8N9N7
  ENSP ID: ENSP00000380319

SEQ ID NO: 45700 - protein, 239 aa, Homo sapiens; identical to SEQ ID NO: 45698
  Payload ID: 9322
  Gene Symbol: LRRC57
  Gene Name: leucine rich repeat containing 57
  Uniprot ID: Q8N9N7
  ENSP ID: ENSP00000455445

SEQ ID NO: 45701 - protein, 148 aa, Homo sapiens
  Payload ID: 9322
  Gene Symbol: LRRC57
  Gene Name: leucine rich repeat containing 57
  ENSP ID: ENSP00000456900
MGNSALRAHVETAQKTGVFQLKDRGLTEFPADLQKLTSNLRTIDLSNNKIESLPPLLIGKFTLLKSLSLNNNKLTVLPDEICNLKKLETLSLNNNHLRELPSTFGQLSALKTLSLSGNQLGALPPQLCSLRHLDVMDLSKNQIRSIPD

SEQ ID NO: 45702 - protein, 371 aa, Homo sapiens
  Payload ID: 9323
  Gene Symbol: LRRC58
  Gene Name: leucine rich repeat containing 58
  Uniprot ID: Q96CX6
  ENSP ID: ENSP00000295628
MEEAGAAVVTAGEAELNWSRLSVSTETLESELEARGEERRGAREALLRLLLPHNRLVSLPRALGSGFPHLQLLDVSGNALTALGPELLALRGLRTLLAKNNRLGGPSALPKGLAQSPLCRSLQVLNLSGNCFQEVPASLLELRALQTLSLGGNQLQSIPAEIENLQSLECLYLGGNFIKEIPPELGNLPSLNYLVLCDNKIQSIPPQLSQLHSLRSLSLHNNLLTYLPREILNLIHLEELSLRGNPLVVRFVRDLTYDPPTLLELAARTIKIRNISYTPYDLPGNLLRYLGSASNCPNPKCGGVYFDCCVRQIKFVDFCGKYRLPLMHYLCSPECSSPCSSASHSSTSQSESDSEDEASVAARRMQKVLLG

SEQ ID NO: 45703 - protein, 307 aa, Homo sapiens
  Payload ID: 9324
  Gene Symbol: LRRC59
  Gene Name: leucine rich repeat containing 59
  Uniprot ID: Q96AG4
  ENSP ID: ENSP00000225972
MTKAGSKGGNLRDKLDGNELDLSLSDLNEVPVKELAALPKATILDLSCNKLTTLPSDFCGLTHLVKLDLSKNKLQQLPADFGRLVNLQHLDLLNNKLVTLPVSFAQLKNLKWLDLKDNPLDPVLAKVAGDCLDEKQCKQCANKVLQHMKAVQADQERERQRRLEVEREAEKKREAKQRAKEAQERELRKREKAEEKERRRKEYDALKAAKREQEKKPKKEANQAPKSKSGSRPRKPPPRKHTRSWAVLKLLLLLLLFGVAGGLVACRVTELQQQPLCTSVNTIYDNAVQGLRRHEILQWVLQTDSQQ

SEQ ID NO: 45704 - protein, 62 aa, Homo sapiens
  Payload ID: 9324
  Gene Symbol: LRRC59
  Gene Name: leucine rich repeat containing 59
  ENSP ID: ENSP00000459305
MTKAGSKGGNLRDKLDGNELDLSLSDLNEVPVKELVSIVPRGPGAHLRRALAPTWATYFPLL

SEQ ID NO: 45705 - protein, 57 aa, Homo sapiens
  Payload ID: 9324
  Gene Symbol: LRRC59
  Gene Name: leucine rich repeat containing 59
  ENSP ID: ENSP00000459616
  MOD_RES (1)..(1): Any amino acid
XANQAPRCFPSALLVSAAGIRVSLFPGPSDSAWFSSGVEGCQNLFWLLPSCCSGQGR

SEQ ID NO: 45706 - protein, 411 aa, Homo sapiens
  Payload ID: 9325
  Gene Symbol: LRRC6
  Gene Name: leucine rich repeat containing 6
  ENSP ID: ENSP00000250173
MGWITEDLIRRNAEHNDCVIFSLEELSLHQQEIERLEHIDKWCRDLKILYLQNNLIGKIENVSKLKKLEYLNLALNNIEKIENLEGCEELAKLDLTVNFIGELSSIKNLQHNIHLKELFLMGNPCASFDHYREFVVATLPQLKWLDGKEIEPSERIKALQDYSVIEPQIREQEKDHCLKRAKLKEEAQRKHQEEDKNEDKRSNAGFDGRWYTDINATLSSLESKDHLQAPDTEEHNTKKLDNSEDDLEFWNKPCLFTPESRLETLRHMEKQRKKQEKLSEKKKKVKPPRTLITEDGKALNVNEPKIDFSLKDNEKQIILDLAVYRYMDTSLIDVDVQPTYVRVMIKGKLVLPAEVKPDSSSAKRSQTTGHLVICMPKVGEVITGGQRAFKSMKTTSDRSREQTNTSYSTGF

SEQ ID NO: 45707 - protein, 206 aa, Homo sapiens
  Payload ID: 9325
  Gene Symbol: LRRC6
  Gene Name: leucine rich repeat containing 6
  ENSP ID: ENSP00000428015
DNSEDDLEFWNKPCLFTPESRLETLRHMEKQRKKQEKLSEKKKKVKPPRTLITEDGKALNVNEPKYMDTSLIDVDVQPTYVRVMIKGKPFQLVLPAEVKPDSSSAKRSQTTGHLVICMPKVGEVITGGQRAFKSMKTTSDRSREQTNTRSKHMEKLEVDPSKHSFPDVTNIVQEKKHTPRRRPEPKIIPSEEDPTFEDNPEVPPLI

SEQ ID NO: 45708 - protein, 411 aa, Homo sapiens; identical to SEQ ID NO: 45706
  Payload ID: 9325
  Gene Symbol: LRRC6
  Gene Name: leucine rich repeat containing 6
  ENSP ID: ENSP00000428610

SEQ ID NO: 45709 - protein, 140 aa, Homo sapiens
  Payload ID: 9325
  Gene Symbol: LRRC6
  Gene Name: leucine rich repeat containing 6
  ENSP ID: ENSP00000429158
  MOD_RES (1)..(1): Any amino acid
XEKKKKVKPPRTLITEDGKALNVNEPKIDFSLKDNEKQIILDLAVYRYMDTSLIDVDVQPTYVRVMIKGKPFQLVLPAEVKPDSSSAKRSQTTGHLVICMPKGANQLMRKALLSLFMSLKQLQHSFPLFLYVFNLSKFFT

SEQ ID NO: 45710 - protein, 466 aa, Homo sapiens
  Payload ID: 9325
  Gene Symbol: LRRC6
  Gene Name: leucine rich repeat containing 6
  Uniprot ID: Q86X45
  ENSP ID: ENSP00000429791
MGWITEDLIRRNAEHNDCVIFSLEELSLHQQEIERLEHIDKWCRDLKILYLQNNLIGKIENVSKLKKLEYLNLALNNIEKIENLEGCEELAKLDLTVNFIGELSSIKNLQHNIHLKELFLMGNPCASFDHYREFVVATLPQLKWLDGKEIEPSERIKALQDYSVIEPQIREQEKDHCLKRAKLKEEAQRKHQEEDKNEDKRSNAGFDGRWYTDINATLSSLESKDHLQAPDTEEHNTKKLDNSEDDLEFWNKPCLFTPESRLETLRHMEKQRKKQEKLSEKKKKVKPPRTLITEDGKALNVNEPKIDFSLKDNEKQIILDLAVYRYMDTSLIDVDVQPTYVRVMIKGKPFQLVLPAEVKPDSSSAKRSQTTGHLVICMPKVGEVITGGQRAFKSMKTTSDRSREQTNTRSKHMEKLEVDPSKHSFPDVTNIVQEKKHTPRRRPEPKIIPSEEDPTFEDNPEVPPLI

SEQ ID NO: 45711 - protein, 89 aa, Homo sapiens
  Payload ID: 9325
  Gene Symbol: LRRC6
  Gene Name: leucine rich repeat containing 6
  ENSP ID: ENSP00000429811
MGWITEDLIRRNAEHNDCVIFSLEELSLHQQEIERLEHIDKWCRDLKILYLQNNLIGKIENVSKLKKLEYLNLALNNIEKIENLEDVIY

SEQ ID NO: 45712 - protein, 466 aa, Homo sapiens; identical to SEQ ID NO: 45710
  Payload ID: 9325
  Gene Symbol: LRRC6
  Gene Name: leucine rich repeat containing 6
  Uniprot ID: Q86X45
  ENSP ID: ENSP00000484634

SEQ ID NO: 45713 - protein, 466 aa, Homo sapiens
  Payload ID: 9325
  Gene Symbol: LRRC6
  Gene Name: leucine rich repeat containing 6
  ENSP ID: ENSP00000484802
MGTVTEDLIRRNAEHNDCVIFSLEELSLHQQEIERLEHIDKWCRDLKILYLQNNLIGKIENVSKLKKLEYLNLALNNIEKIENLEGCEELAKLDLTVNFIGELSSIKNLQHNIHLKELFLMGNPCASFDHYREFVVATLPQLKWLDGKEIEPSERIKALQDYSVIEPQIREQEKDHCLKRAKLKEEAQRKHQEEDKNEDKRSNAGFDGRWYTDINATLSSLESKDHLQAPDTEEHNTKKLDNSEDDLEFWNKPCLFTPESRLETLRHMEKQRKKQEKLSEKKKKVKPPRTLITEDGKALNVNEPKIDFSLKDNEKQIILDLAVYRYMDTSLIDVDVQPTYVRVMIKGKPFQLVLPAEVKPDSSSAKRSQTTGHLVICMPKVGEVITGGQRAFKSMKTTSDRSREQTNTRSKHMEKLEVDPSKHSFPDVTNIVQEKKHTPRRRPEPKIIPSEEDPTFEDNPEVPPLI

SEQ ID NO: 45714 - protein, 259 aa, Homo sapiens
  Payload ID: 9326
  Gene Symbol: LRRC61
  Gene Name: leucine rich repeat containing 61
  Uniprot ID: Q9BV99
  ENSP ID: ENSP00000339047
MDPPAEKPGEAGGLQITPQLLKSRTGEFSLESILLLKLRGLGLADLGCLGECLGLEWLDLSGNALTHLGPLASLRQLAVLNVSNNRLTGLEPLATCENLQSLNAAGNLLATPGQLQCLAGLPCLEYLRLRDPLARLSNPLCANPSYWAAVRELLPGLKVIDGERVIGRGSEFYQLCRDLDSSLRPSSSPGPRATEAQPWVEPGYWESWPSRSSSILEEACRQFQDTLQECWDLDRQASDSLAQAEQVLSSAGPTSSFVF

SEQ ID NO: 45715 - protein, 259 aa, Homo sapiens; identical to SEQ ID NO: 45714
  Payload ID: 9326
  Gene Symbol: LRRC61
  Gene Name: leucine rich repeat containing 61
  Uniprot ID: Q9BV99
  ENSP ID: ENSP00000352642

SEQ ID NO: 45716 - protein, 259 aa, Homo sapiens; identical to SEQ ID NO: 45714
  Payload ID: 9326
  Gene Symbol: LRRC61
  Gene Name: leucine rich repeat containing 61
  Uniprot ID: Q9BV99
  ENSP ID: ENSP00000420560

SEQ ID NO: 45717 - protein, 506 aa, Homo sapiens
  Payload ID: 9327
  Gene Symbol: LRRC63
  Gene Name: leucine rich repeat containing 63
  Uniprot ID: Q05C16
  ENSP ID: ENSP00000368082
MQKPPLLLRRPLPPKFTKLSLHEKKTHTAKTGKIESLHVAFTEDETTSIKMDRTRFPDVLRNQSLTPINIQNIFLDHCVQERVTAISSPQKSTKHVREQIPDTATGSIFFPHCNSASTRIFGKQTNKMESSRKFKTMKDVYTEKRLENILILSSKFSKPKSTPGSVIAQKLEKMHPKHQPLPESPGYTYQHISRDLSATVPSPPPMTVSMKPEGQWPEHFKSTATLTLRVTEFPGFVSLPTPVLPRKPHRQSVIETLVTENGNIESVPKQIPPRPPEGLTKTEKIESEIHVVRGEGFKTVAATRYETITAMTNLAIVNCQVYGRNALNLKGFFILNCPDLTPLAFQLIYLNLSFNDLHYFPTEILCLKNLQILKLRNNPIKEIPSEIQQLEFLRIFTIAFNLITVLPIGLFSLSYLEELDVSYNELTFIPNEIQKLRSLEKLTVDGNELSFFPHGILKLNLTKIQFENNFTHPCFWRDNYLNNPQQLTQIISLFIVQNKLHKFYDK

SEQ ID NO: 45718 - protein, 587 aa, Homo sapiens
  Payload ID: 9327
  Gene Symbol: LRRC63
  Gene Name: leucine rich repeat containing 63
  ENSP ID: ENSP00000408828
MQKPPLLLRRPLPPKFTKLSLHEKKTHTAKTGKIESLHVAFTEDETTSIKMDRTRFPDVLRNQSLTPINIQNIFLDHCVQERVTAISSPQKSTKHVREQIPDTATGSIFFPHCNSASTRIFGKQTNKMESSRKFKTMKDVYTEKRLENILILSSKFSKPKSTPGSVIAQKLEKMHPKHQPLPESPGYTYQHISRDLSATVPSPPPMTVSMKPEGQWPEHFKSTATLTLRVTEFPGFVSLPTPVLPRKPHRQSVIETLVTENGNIESVPKQIPPRPPEGLTKTEKIESEIHVVRGEGFKTVAATRYETITAMTNLAIVNCQVYGRNALNLKGFFILNCPDLTPLAFQLIYLNLSFNDLHYFPTEILCLKNLQILKLRNNPIKEIPSEIQQLEFLRIFTIAFNLITVLPIGLFSLSYLEELDVSYNELTFIPNEIQKLRSLEKLTVDGNELSFFPHGILKLNLTKIQFENNFTHPCFWRDNYLNNPQQLTQIISLFIVQNKLHKFYDKIPVEVQKLLKCTSRCEWCHGPKFGEGFRVIRSCDIFGASQLPVMFYVCSPSCYRRIKESSFVLDGSPSRRIALDVELSKEL

SEQ ID NO: 45719 - protein, 587 aa, Homo sapiens; identical to SEQ ID NO: 45718
  Payload ID: 9327
  Gene Symbol: LRRC63
  Gene Name: leucine rich repeat containing 63
  ENSP ID: ENSP00000469337

SEQ ID NO: 45720 - protein, 880 aa, Homo sapiens
  Payload ID: 9328
  Gene Symbol: LRRC66
  Gene Name: leucine rich repeat containing 66
  Uniprot ID: Q68CR7
  ENSP ID: ENSP00000341944
MKNLYFRVITIVIGLYFTGIMTNASRKSNILFNSECQWNEYILTNCSFTGKCDIPVDISQTAATVDVSFNFFRVLLQSHTKKEEWKIKHLDLSNNLISKITLSPFAYLHALEVLNLSNNAIHSLSLDLLSPKSSWVKRHRSSFRNRFPLLKVLILQRNKLSDTPKGLWKLKSLQSLDLSFNGILQIGWSDFHNCLQLENLCLKSNKIFKIPPQAFKDLKKLQVIDLSNNALITILPMMIIALEFPHLVVDLADNNWQCDDSVAVFQNFISESWRKKWNVICNRSIGSEEANGGTPQSRISRETRLPPIHLHRMKSLIRSKAERPQGGRHTGISTLGKKAKAGSGLRKKQRRLPRSVRSTRDVQAAGKKEDAPQDLALAVCLSVFITFLVAFSLGAFTRPYVDRLWQKKCQSKSPGLDNAYSNEGFYDDMEAAGHTPHPETHLRQVFPHLSLYENQTPFWVTQPHPHATVIPDRTLGRSRKDPGSSQSPGQCGDNTGAGSGNDGAVYSILQRHPHAGNRELMSAAQDHIHRNDILGEWTYETVAQEEPLSAHSVGVSSVAGTSHAVSGSSRYDSNELDPSLSGEITASLCKMLTHAEAQRTGDSKERGGTEQSLWDSQMEFSKERQVSSSIDLLSIQQPRLSGARAEEALSAHYSEVPYGDPRDTGPSVFPPRWDSGLDVTPANKEPVQKSTPSDTCCELESDCDSDEGSLFTLSSISSESARSKTEEAVPDEESLQDESSGASKDNVTAVDSLEENVTFQTIPGKCKNQEDPFEKPLISAPDSGMYKTHLENASDTDRSEGLSPWPRSPGNSPLGDEFPGMFTYDYDTALQSKAAEWHCSLRDLEFSNVDVLQQTPPCSAEVPSDPDKAAFHERDSDILK

SEQ ID NO: 45721 - protein, 191 aa, Homo sapiens
  Payload ID: 9329
  Gene Symbol: LRRC69
  Gene Name: leucine rich repeat containing 69
  Uniprot ID: Q6ZNQ3
  ENSP ID: ENSP00000343221
MTERLLIKALSGGKNTKIITLNGKKMTKMPSALGKLPGLKTLVLQNNLIPKVCPELCNLTQFQDLKLREFYCEGNPLFLQQPVISTQQENVWSLQEITSRFVMNQLAENNPFLMDDIERYPQVRSMISQGKTCAICGQYFITVWLECVRFVPPPKDWKISKNLKLVPLQVLICSYKCFTQRDPNLFGIAQV

SEQ ID NO: 45722 - protein, 347 aa, Homo sapiens
  Payload ID: 9329
  Gene Symbol: LRRC69
  Gene Name: leucine rich repeat containing 69
  Uniprot ID: Q6ZNQ3
  ENSP ID: ENSP00000400803
MTERLLIKALSGGKNTKIITLNGKKMTKMPSALGKLPGLKTLVLQNNLIPKVCPELCNLTQLTTLNLGNNLLEEVPEEMKYLTSLKNLHLSGNRICRFAPGACDGLQNLILLNLNNNHLTQLPQEVSRLKSLTYMSINYNQLASIPRELCFLENLVELQLNYNQLICIPEEIKFLKKLQKLLLARNNIGVLPEELCDLKKLRILDIAGNIIQIFPSGFQDLKLREFYCEGNPLFLQQPVISTQQENVWSLQEITSRFVMNQLAENNPFLMDDIERYPQVRSMISQGKTCAICGQYFITVWLECVRFVPPPKDWKISKNLKLVPLQVLICSYKCFTQRDPNLFGIAQV

SEQ ID NO: 45723 - protein, 50 aa, Homo sapiens
  Payload ID: 9329
  Gene Symbol: LRRC69
  Gene Name: leucine rich repeat containing 69
  ENSP ID: ENSP00000428285
MTERLLIKALSGGKNTKIITLNGKKMTKMPSALGKLPGLKTLVLQNNLIP

SEQ ID NO: 45724 - protein, 69 aa, Homo sapiens
  Payload ID: 9329
  Gene Symbol: LRRC69
  Gene Name: leucine rich repeat containing 69
  ENSP ID: ENSP00000428537
MTERLLIKALSGGKNTKIITLNGKKMTKMPSALGKLPGLKTLVLQNNLIPKVCPELCNLTQAGCGGSCL

SEQ ID NO: 45725 - protein, 1537 aa, Homo sapiens
  Payload ID: 9330
  Gene Symbol: LRRC7
  Gene Name: leucine rich repeat containing 7
  Uniprot ID: Q96NW7
  ENSP ID: ENSP00000035383
MTTKRKIIGRLVPCRCFRGEEEIISVLDYSHCSLQQVPKEVFNFERTLEELYLDANQIEELPKQLFNCQALRKLSIPDNDLSNLPTTIASLVNLKELDISKNGVQEFPENIKCCKCLTIIEASVNPISKLPDGFTQLLNLTQLYLNDAFLEFLPANFGRLVKLRILELRENHLKTLPKSMHKLAQLERLDLGNNEFGELPEVLDQIQNLRELWMDNNALQVLPGSIGKLKMLVYLDMSKNRIETVDMDISGCEALEDLLLSSNMLQQLPDSIGLLKKLTTLKVDDNQLTMLPNTIGNLSLLEEFDCSCNELESLPSTIGYLHSLRTLAVDENFLPELPREIGSCKNVTVMSLRSNKLEFLPEEIGQMQKLRVLNLSDNRLKNLPFSFTKLKELAALWLSDNQSKALIPLQTEAHPETKQRVLTNYMFPQQPRGDEDFQSDSDSFNPTLWEEQRQQRMTVAFEFEDKKEDDENAGKVKDLSCQAPWERGQRGITLQPARLSGDCCTPWARCDQQIQDMPVPQNDPQLAWGCISGLQQERSMCTPLPVAAQSTTLPSLSGRQVEINLKRYPTPYPEDLKNMVKSVQNLVGKPSHGVRVENSNPTANTEQTVKEKYEHKWPVAPKEITVEDSFVHPANEMRIGELHPSLAETPLYPPKLVLLGKDKKESTDESEVDKTHCLNNSVSSGTYSDYSPSQASSGSSNTRVKVGSLQTTAKDAVHNSLWGNRIAPSFPQPLDSKPLLSQREAVPPGNIPQRPDRLPMSDTFTDNWTDGSHYDNTGFVAEETTAENANSNPLLSSKSRSTSSHGRRPLIRQDRIVGVPLELEQSTHRHTPETEVPPSNPWQNWTRTPSPFEDRTAFPSKLETTPTTSPLPERKEHIKESTEIPSPFSPGVPWEYHDSNPNRSLSNVFSQIHCRPESSKGVISISKSTERLSPLMKDIKSNKFKKSQSIDEIDIGTYKVYNIPLENYASGSDHLGSHERPDKMLGPEHGMSSMSRSQSVPMLDDEMLTYGSSKGPQQQKASMTKKVYQFDQSFNPQGSVEVKAEKRIPPPFQHNPEYVQQASKNIAKDLISPRAYRGYPPMEQMFSFSQPSVNEDAVVNAQFASQGARAGFLRRADSLVSATEMAMFRRVNEPHELPPTDRYGRPPYRGGLDRQSSVTVTESQFLKRNGRYEDEHPSYQEVKAQAGSFPVKNLTQRRPLSARSYSTESYGASQTRPVSARPTMAALLEKIPSDYNLGNYGDKPSDNSDLKTRPTPVKGEESCGKMPADWRQQLLRHIEARRLDRNAAYKHNTVNLGMLPYGGISAMHAGRSMTLNLQTKSKFDHQELPLQKTPSQQSNILDNGQEDVSPSGQWNPYPLGRRDVPPDTITKKAGSHIQTLMGSQSLQHRSREQQPYEGNINKVTIQQFQSPLPIQIPSSQATRGPQPGRCLIQTKGQRSMDGYPEQFCVRIEKNPGLGFSISGGISGQGNPFKPSDKGIFVTRVQPDGPASNLLQPGDKILQANGHSFVHMEHEKAVLLLKSFQNTVDLVIQRELTV

SEQ ID NO: 45726 - protein, 1495 aa, Homo sapiens
  Payload ID: 9330
  Gene Symbol: LRRC7
  Gene Name: leucine rich repeat containing 7
  ENSP ID: ENSP00000309245
MQCLEMTTKRKIIGRLVPCRCFRGEEEIISVLDYSHCSLQQVPKEVFNFERTLEELYLDANQIEELPKQLFNCQALRKLSIPDNDLSNLPTTIASLVNLKELDISKNGVQEFPENIKCCKCLTIIEASVNPISKLPDGFTQLLNLTQLYLNDAFLEFLPANFGRLVKLRILELRENHLKTLPKSMHKLAQLERLDLGNNEFGELPEVLDQIQNLRELWMDNNALQVLPGSIGKLKMLVYLDMSKNRIETVDMDISGCEALEDLLLSSNMLQQLPDSIGLLKKLTTLKVDDNQLTMLPNTIGNLSLLEEFDCSCNELESLPSTIGYLHSLRTLAVDENFLPELPREIGSCKNVTVMSLRSNKLEFLPEEIGQMQKLRVLNLSDNRLKNLPFSFTKLKELAALWLSDNQSKALIPLQTEAHPETKQRVLTNYMFPQQPRGDEDFQSDSDSFNPTLWEEQRQQRMTVAFEFEDKKEDDENAGKVKDLSCQAPWERGQRGITLQPARLSGDCCTPWARCDQQIQDMPVPQNDPQLAWGCISGLQQERSMCTPLPVAAQSTTLPSLSGRQVEINLKRYPTPYPEDLKNMVKSVQNLVGKPSHGVRVENSNPTANTEQTVKEKYEHKWPVAPKEITVEDSFVHPANEMRIGELHPSLAETPLYPPKLVLLGKDKKESTDESEVDKTHCLNNSVSSGTYSDYSPSQASSGSSNTRVKVGSLQTTAKDAVHNSLWGNRIAPSFPQPLDSKPLLSQREAVPPGNIPQRPDRLPMSDTFTDNWTDGSHYDNTGFVAEETTAENANSNPLLSSKSRSTSSHGRRPLIRQDRIVGVPLELEQSTHRHTPETEVPPSNPWQNWTRTPSPFEDRTAFPSKLETTPTTSPLPERKEHIKESTEIPSPFSPGVPWEYHDSNPNRSLSNVFSQIHCRPESSKGVISISKSTERLSPLMKDIKSNKFKKSQSIDEIDIGTYKVYNIPLENYASGSDHLGSHERPDKMLGPEHGMSSMSRSQSVPMLDDEMLTYGSSKGPQQQKASMTKKVYQFDQSFNPQGSVEVKAEKRIPPPFQHNPEYVQQASKNIAKDLISPRAYRGYPPMEQMFSFSQPSVNEDAVVNAQFASQGARAGFLRRADSLVSATEMAMFRRVNEPHELPPTDRYGRPPYRGGLDRQSSVTVTESQFLKRNGRYEDEHPSYQEVKAQAGSFPVKNLTQRRPLSARSYSTESYGASQTRPVSARPTMAALLEKIPSDYNLGNYGDKPSDNSDLKTRPTPVKGEESCGKMPADWRQQLLRHIEARRLDRTPSQQSNILDNGQEDVSPSGQWNPYPLGRRDVPPDTITKKAGSHIQTLMGSQSLQHRSREQQPYEGNINKVTIQQFQSPLPIQIPSSQATRGPQPGRCLIQTKGQRSMDGYPEQFCVRIEKNPGLGFSISGGISGQGNPFKPSDKGIFVTRVQPDGPASNLLQPGDKILQANGHSFVHMEHEKAVLLLKSFQNTVDLVIQRELTV

SEQ ID NO: 45727 - protein, 217 aa, Homo sapiens
  Payload ID: 9330
  Gene Symbol: LRRC7
  Gene Name: leucine rich repeat containing 7
  ENSP ID: ENSP00000359997
MMENLIRGRNPPQYQRSPCKEVRAALRKRPEEELQCLEMTTKRKIIGRLVPCRCFRGEEEIISVLDYSHCSLQQVPKEVFNFERTLEELYLDANQIEELPKQLFNCQALRKLSIPDNDLSNLPTTIASLVNLKELDISKNGVQEFPENIKCCKCLTIIEASVNPISKLPDGFTQLLNLTQLYLNDAFLEFLPANFGRLVKLRILELRENHLKTLPNI

SEQ ID NO: 45728 - protein, 821 aa, Homo sapiens
  Payload ID: 9330
  Gene Symbol: LRRC7
  Gene Name: leucine rich repeat containing 7
  ENSP ID: ENSP00000394867
MTKMLGKLRIAPSFPQPLDSKPLLSQREAVPPGNIPQRPDRLPMSDTFTDNWTDGSHYDNTGFVAEETTAENANSNPLLSSKSRSTSSHGRRPLIRQDRIVGVPLELEQSTHRHTPETEVPPSNPWQNWTRTPSPFEDRTAFPSKLETTPTTSPLPERKEHIKESTEIPSPFSPGVPWEYHDSNPNRSLSNVFSQIHCRPESSKGVISISKSTERLSPLMKDIKSNKFKKSQSIDEIDIGTYKVYNIPLENYASGSDHLGSHERPDKMLGPEHGMSSMSRSQSVPMLDDEMLTYGSSKGPQQQKASMTKKVYQFDQSFNPQGSVEVKAEKRIPPPFQHNPEYVQQASKNIAKDLISPRAYRGYPPMEQMFSFSQPSVNEDAVVNAQFASQGARAGFLRRADSLVSATEMAMFRRVNEPHELPPTDRYGRPPYRGGLDRQSSVTVTESQFLKRNGRYEDEHPSYQEVKAQAGSFPVKNLTQRRPLSARSYSTESYGASQTRPVSARPTMAALLEKIPSDYNLGNYGDKPSDNSDLKTRPTPVKGEESCGKMPADWRQQLLRHIEARRLDRNAAYKHNTVNLGMLPYGGISAMHAGRSMTLNLQTKSKFDHQELPLQKTPSQQSNILDNGQEDVSPSGQWNPYPLGRRDVPPDTITKKAGSHIQTLMGSQSLQHRSREQQPYEGNINKVTIQQFQSPLPIQIPSSQATRGPQPGRCLIQTKGQRSMDGYPEQFCVRIEKNPGLGFSISGGISGQGNPFKPSDKGIFVTRVQPDGPASNLLQPGDKILQANGHSFVHMEHEKAVLLLKSFQNTVDLVIQRELTV

SEQ ID NO: 45729 - protein, 61 aa, Homo sapiens
  Payload ID: 9330
  Gene Symbol: LRRC7
  Gene Name: leucine rich repeat containing 7
  ENSP ID: ENSP00000466082
  MOD_RES (1)..(1): Any amino acid
XGIFVTRVQPDGPASNLLQPGDKILQANGHSFVHMEHEKAVLLLKSFQNTVDLVIQRKHLL

SEQ ID NO: 45730 - protein, 32 aa, Homo sapiens
  Payload ID: 9330
  Gene Symbol: LRRC7
  Gene Name: leucine rich repeat containing 7
  ENSP ID: ENSP00000476307
  MOD_RES (1)..(1): Any amino acid
XSFVHMEHEKAVLLLKSFQNTVDLVIQRKHLL

SEQ ID NO: 45731 - protein, 36 aa, Homo sapiens
  Payload ID: 9330
  Gene Symbol: LRRC7
  Gene Name: leucine rich repeat containing 7
  ENSP ID: ENSP00000476660
  MOD_RES (1)..(1): Any amino acid
XANGHSFVHMEHEKAVLLLKSFQNTVDLVIQRKHLL

SEQ ID NO: 45732 - protein, 25 aa, Homo sapiens
  Payload ID: 9330
  Gene Symbol: LRRC7
  Gene Name: leucine rich repeat containing 7
  ENSP ID: ENSP00000477399
  MOD_RES (1)..(1): Any amino acid
XEKAVLLLKSFQNTVDLVIQRKHLL

SEQ ID NO: 45733 - protein, 622 aa, Homo sapiens
  Payload ID: 9331
  Gene Symbol: LRRC70
  Gene Name: leucine rich repeat containing 70
  Uniprot ID: Q7Z2Q7
  ENSP ID: ENSP00000399441
MCGLQFSLPCLRLFLVVTCYLLLLLHKEILGCSSVCQLCTGRQINCRNLGLSSIPKNFPESTVFLYLTGNNISYINESELTGLHSLVALYLDNSNILYVYPKAFVQLRHLYFLFLNNNFIKRLDPGIFKGLLNLRNLYLQYNQVSFVPRGVFNDLVSVQYLNLQRNRLTVLGSGTFVGMVALRILDLSNNNILRISESGFQHLENLACLYLGSNNLTKVPSNAFEVLKSLRRLSLSHNPIEAIQPFAFKGLANLEYLLLKNSRIRNVTRDGFSGINNLKHLILSHNDLENLNSDTFSLLKNLIYLKLDRNRIISIDNDTFENMGASLKILNLSFNNLTALHPRVLKPLSSLIHLQANSNPWECNCKLLGLRDWLASSAITLNIYCQNPPSMRGRALRYINITNCVTSSINVSRAWAVVKSPHIHHKTTALMMAWHKVTTNGSPLENTETENITFWERIPTSPAGRFFQENAFGNPLETTAVLPVQIQLTTSVTLNLEKNSALPNDAASMSGKTSLICTQEVEKLNEAFDILLAFFILACVLIIFLIYKVVQFKQKLKASENSRENRLEYYSFYQSARYNVTASICNTSPNSLESPGLEQIRLHKQIVPENEAQVILFEHSAL

SEQ ID NO: 45734 - protein, 71 aa, Homo sapiens
  Payload ID: 9331
  Gene Symbol: LRRC70
  Gene Name: leucine rich repeat containing 70
  ENSP ID: ENSP00000427117
MCGLQFSLPCLRLFLVVTCYLLLLLHKEILGCSSVCQLCTGRQINCRNLGLSSIPKNFPESTVFLLASKGP

SEQ ID NO: 45735 - protein, 559 aa, Homo sapiens
  Payload ID: 9332
  Gene Symbol: LRRC71
  Gene Name: leucine rich repeat containing 71
  Uniprot ID: Q8N4P6
  ENSP ID: ENSP00000336661
MSSEQSAPGASPRAPRPGTQKSSGAVTKKGERAAKEKPATVLPPVGEEEPKSPEEYQCSGVLETDFAELCTRWGYTDFPKVVNRPRPHPPFVPSASLSEKATLDDPRLSGSCSLNSLESKYVFFRPTIQVELEQEDSKSVKEIYIRGWKVEERILGVFSKCLPPLTQLQAINLWKVGLTDKTLTTFIELLPLCSSTLRKVSLEGNPLPEQSYHKLMALDSTIAHLSLRNNNIDDRGAQLLGQALSTLHSCNRTLVSLNLGFNHIGDEGAGYIADGLRLNRSLLWLSLAHNRIQDKGALKLAEVLRAFELTHTEVVERRRLLLEKGTQERSRSPSSSRHGDSKTDREKSQMVGISNSALVDKTDKTQTMKTPKGLGKKKEKSWELAKKEEKLGSGQSPTQGTPKKEDATKAGKGKVTIPEQKPSRAKGIKIGSREKRSILLESELVVEATEVVNPLLEPVEHRDGKVFMPGNKVLLHLNLIRNRITEVGLEGFLATVQYQMQFSKAKSASKGPVGLLWLSLAKNCFAPQCPAYAIIQELMLPRDPIKAKLREDEAMAFFP

SEQ ID NO: 45736 - protein, 57 aa, Homo sapiens
  Payload ID: 9333
  Gene Symbol: LRRC72
  Gene Name: leucine rich repeat containing 72
  ENSP ID: ENSP00000371558
MSWDPNPVPRTLRCWRLRRASETALQSSRRAVEDQLKICGHRRDADVFELFLSKKTG

SEQ ID NO: 45737 - protein, 287 aa, Homo sapiens
  Payload ID: 9333
  Gene Symbol: LRRC72
  Gene Name: leucine rich repeat containing 72
  Uniprot ID: A6NJI9
  ENSP ID: ENSP00000384971
MSWDPNPVPRTLRCWRLRRASETALQSSRRAVEDQLKICGHRRDADVFELFLSKKELTEVIDLSRFKKLKYLWLHHNKLHGITFLTRNYCLTELYLNNNAIFEIEGLHYLPSLHILLLHHNELTNIDATVKELKGMLNLKILSLYQNPLCQYNLYRLYIIYHLPGVELLDRNQVTEKERRSMITIFNHKKAHIVQSIAFGGKVDASWDPKSPFKQKPAQRVPSDFAFANNVDKTVLDDPEDAVFVRSMKRSVMTLTSMNWDTVPTREERYLEEEGTETAQMLTVTLR

SEQ ID NO: 45738 - protein, 316 aa, Homo sapiens
  Payload ID: 9334
  Gene Symbol: LRRC73
  Gene Name: leucine rich repeat containing 73
  Uniprot ID: Q5JTD7
  ENSP ID: ENSP00000361518
MLPSSIQISGEPLSGAEVRDICRGLRDNAVRLLSLRGCRLCDRDFGRICRALAGATSLAQLNLNLGVVSSPSRIKQLAEALRTNRSIQSLFLHGSPLTDAGLALLNPALALHPALVALDLGDCMLGDEAINLICGLLPPDGAKSGLKELTLSANPGITPKGWSRLAIAVAHSSQVRVLNLDYNPLGDHVAGMLAVAVASSRTLEVLDLEGTGLTNQSAQTLLDMVENYPTALRSLVLAENSISPELQQQICDLLSEGEEEEEVAGGAGDTQEWERGREPAAHQRGSSSWMCPSDPSSQMVLMTSGLGDSLLAETEM

SEQ ID NO: 45739 - protein, 200 aa, Homo sapiens
  Payload ID: 9335
  Gene Symbol: LRRC74A
  Gene Name: leucine rich repeat containing 74A
  ENSP ID: ENSP00000216450
MHIQFPSKPTLPRACWEGRITAGSPGMPPDEIEIEPVRQSSDKMLYCEAESPPTVEKVKPARENSETDLEIEDDEKFFTTGQKELYLEACKLMGVVPVSYFIRNMEESYVNLNHHGLGPRGTKAIAIALVSNMAVTKLELEDNCIMEEGVLSLVEMLQENYYLQEMEMTSRKTPQHCSAKPCRPITKLKSWISVTTNSLM

SEQ ID NO: 45740 - protein, 488 aa, Homo sapiens
  Payload ID: 9335
  Gene Symbol: LRRC74A
  Gene Name: leucine rich repeat containing 74A
  Uniprot ID: Q0VAA2
  ENSP ID: ENSP00000377369
MHIQFPSKPTLPRACWEGRITAGSPGMPPDEIEIEPVRQSSDKMLYCEAESPPTVEKVKPARENSETDLEIEDDEKFFTTGQKELYLEACKLMGVVPVSYFIRNMEESYVNLNHHGLGPRGTKAIAIALVSNMAVTKLELEDNCIMEEGVLSLVEMLQENYYLQEMNISNNHLGLEGARIISDFFERNSSSIWSLELSGNDFKEDSAALLCQALSTNYQIKKLDLSHNQFSDVGGEHLGQMLAINVGLTSLDLSWNNFHTRGAVALCNGLRGNVTLTKLDLSMNGFGNEVALALGEVLRLNRCLVYLDIGGNDIGNEGASKISKGLESNESLRVLKLFLNPINMDGAILLILAIKRNPKSRMEELDISNVLVSEQFMKTLDGVYAVHPQLDVVFKAVQGLSPKKTIFLLTNPMKLIQSYADQHKITIVDFFKSLNPTGTMKMSVDEFQKVMIEQNKVPLNQYQVREVIKKLDEKTGMVNFSFLNTMKP

SEQ ID NO: 45741 - protein, 155 aa, Homo sapiens
  Payload ID: 9335
  Gene Symbol: LRRC74A
  Gene Name: leucine rich repeat containing 74A
  ENSP ID: ENSP00000451057
MHIQFPSKPTLPRACWEGRITAGSPGMPPDEIEIEPVRQSSDKMLYCEAESPPTVEKVKPARENSETDLEIEGEHGHLGAVRAASPQKLEKSGFQELSSHSFPESALRMACGGNVAERPARFCLESSSGLAGESSCSFPRLSPASGAVPSRRLVK

SEQ ID NO: 45742 - protein, 40 aa, Homo sapiens
  Payload ID: 9335
  Gene Symbol: LRRC74A
  Gene Name: leucine rich repeat containing 74A
  ENSP ID: ENSP00000452348
MHIQFPSKPTLPRACWEGRITAGSPGMPPGEGSSQSLRQR

SEQ ID NO: 45743 - protein, 40 aa, Homo sapiens; identical to SEQ ID NO: 45742
  Payload ID: 9335
  Gene Symbol: LRRC74A
  Gene Name: leucine rich repeat containing 74A
  ENSP ID: ENSP00000452427

SEQ ID NO: 45744 - protein, 392 aa, Homo sapiens
  Payload ID: 9336
  Gene Symbol: LRRC74B
  Gene Name: leucine rich repeat containing 74B
  Uniprot ID: Q6ZQY2
  ENSP ID: ENSP00000394078
MRGSCERSGEDEEQKEEAMVACGRLSGVPEAEQGPEANWDSDLETEGTDGLGELVRDTLYLRSCRAHSVVPISCFLRQGSAQELNLRHRGLGPQGARALASSLSSNPYVKRLDLRDNGLCGAGAEALAGALSKSSSIHDVDLSENQLGVAGAQALCAALTVNQAMRKMQLSGNGLEEQAAQHLAELLLAHTDLKSLDLSYNQLNDQAGETLGPALAENTGLTELNVSWNHLRGPGAVAFARGLEANIFLKVLDISYNGFGDPGASAVGEALKANNVLEELNMSNNRISAMGALSLGLGLRVNQTLRILVVSRNPMRSEGCFGLLKSVQDNPASALELLDFSDIQVNAEFDGLASSVRGILPELCIKTGACRVEYKKELLPVFRSALPASVPK

SEQ ID NO: 45745 - protein, 212 aa, Homo sapiens
  Payload ID: 9337
  Gene Symbol: LRRC75A
  Gene Name: leucine rich repeat containing 75A
  Uniprot ID: Q8NAA5
  ENSP ID: ENSP00000386504
MGTRQTKGSLAERASPGAAPGPRRERPDFWASLLLRAGDKAGRAGAGMPPYHRRVGMVQELLRMVRQGRREEAGTLLQHLRQDLGMESTSLDDVLYRYASFRNLVDPITHDLIISLARYIHCPKPPQGCPGRKPPRQHSGPVGNPTDLPRPGAGDQLPTALWGAGRQRGAGLHRPHGRHGPAAAASTQHPAPPHHTGTQWQPVDPGRAARPH

SEQ ID NO: 45746 - protein, 344 aa, Homo sapiens
  Payload ID: 9337
  Gene Symbol: LRRC75A
  Gene Name: leucine rich repeat containing 75A
  Uniprot ID: Q8NAA5
  ENSP ID: ENSP00000419502
MGTRQTKGSLAERASPGAAPGPRRERPDFWASLLLRAGDKAGRAGAGMPPYHRRVGMVQELLRMVRQGRREEAGTLLQHLRQDLGMESTSLDDVLYRYASFRNLVDPITHDLIISLARYIHCPKPEGDALGAMEKLCRQLTYHLSPHSQWRRHRGLVKRKPQACLKAVLAGSPPDNTVDLSGIPLTSRDLERVTSYLQRCGEQVDSVELGFTGLTDDMVLQLLPALSTLPRLTTLALNGNRLTRAVLRDLTDILKDPSKFPNVTWIDLGNNVDIFSLPQPFLLSLRKRSPKQGHLPTILELGEGPGSGEEVREGTVGQEDPGGGPVAPAEDHHEGKETVAAAQT

SEQ ID NO: 45747 - protein, 315 aa, Homo sapiens
  Payload ID: 9338
  Gene Symbol: LRRC75B
  Gene Name: leucine rich repeat containing 75B
  Uniprot ID: Q2VPJ9
  ENSP ID: ENSP00000320520
MGARLGRRAGPEAGSEAGAAAGCGPAPYERRVRWLREIQSTLRERRPERARQLLRLLRQDLGLERTLLPDILYRDVAFLNPVDPISHDLLVNLARDLQCPKKDYELWKSSDKICRQLIYHLTPHSKQQQGSSLRQRKTQSCLKSSLQKTLLAGETVDLSGIPLSTQDVQHITRYLSSHGAVLAVLDLSFTGLSDELLHLLLPSLWALPRLTQLLLNGNRLTRATARKLTDAIKDTTKFPALAWVDLGNNVDVASLPQPLLVGLRRRLSQRTSLPTIYEGLDLEPEGSAAGATTPASTWDSTAAGLGPEPQACCAR

SEQ ID NO: 45748 - protein, 74 aa, Homo sapiens
  Payload ID: 9338
  Gene Symbol: LRRC75B
  Gene Name: leucine rich repeat containing 75B
  ENSP ID: ENSP00000384130
MGARLGRRAGPEAGSEAGAAAGCGPAPYERRVRWLREIQSTLRERRPERARQLLRLLRQDPGDSGPWREDPGLV

SEQ ID NO: 45749 - protein, 108 aa, Homo sapiens
  Payload ID: 9338
  Gene Symbol: LRRC75B
  Gene Name: leucine rich repeat containing 75B
  ENSP ID: ENSP00000400102
MGARLGRRAGPEAGSEAGAAAGCGPAPYERRVRWLREIQSTLRERRPERARQLLRLLRQDLGLERTLLPDILYRDVAFLNPVDPISHDLLVNLARDLQCPKKLPRTPC

SEQ ID NO: 45750 - protein, 810 aa, Homo sapiens
  Payload ID: 9339
  Gene Symbol: LRRC8A
  Gene Name: leucine rich repeat containing 8 family, member A
  Uniprot ID: Q8IWT6
  ENSP ID: ENSP00000259324
MIPVTELRYFADTQPAYRILKPWWDVFTDYISIVMLMIAVFGGTLQVTQDKMICLPCKWVTKDSCNDSFRGWAAPGPEPTYPNSTILPTPDTGPTGIKYDLDRHQYNYVDAVCYENRLHWFAKYFPYLVLLHTLIFLACSNFWFKFPRTSSKLEHFVSILLKCFDSPWTTRALSETVVEESDPKPAFSKMNGSMDKKSSTVSEDVEATVPMLQRTKSRIEQGIVDRSETGVLDKKEGEQAKALFEKVKKFRTHVEEGDIVYRLYMRQTIIKVIKFILIICYTVYYVHNIKFDVDCTVDIESLTGYRTYRCAHPLATLFKILASFYISLVIFYGLICMYTLWWMLRRSLKKYSFESIREESSYSDIPDVKNDFAFMLHLIDQYDPLYSKRFAVFLSEVSENKLRQLNLNNEWTLDKLRQRLTKNAQDKLELHLFMLSGIPDTVFDLVELEVLKLELIPDVTIPPSIAQLTGLKELWLYHTAAKIEAPALAFLRENLRALHIKFTDIKEIPLWIYSLKTLEELHLTGNLSAENNRYIVIDGLRELKRLKVLRLKSNLSKLPQVVTDVGVHLQKLSINNEGTKLIVLNSLKKMANLTELELIRCDLERIPHSIFSLHNLQEIDLKDNNLKTIEEIISFQHLHRLTCLKLWYNHIAYIPIQIGNLTNLERLYLNRNKIEKIPTQLFYCRKLRYLDLSHNNLTFLPADIGLLQNLQNLAITANRIETLPPELFQCRKLRALHLGNNVLQSLPSRVGELTNLTQIELRGNRLECLPVELGECPLLKRSGLVVEEDLFNTLPPEVKERLWRADKEQA

SEQ ID NO: 45751 - protein, 810 aa, Homo sapiens; identical to SEQ ID NO: 45750
  Payload ID: 9339
  Gene Symbol: LRRC8A
  Gene Name: leucine rich repeat containing 8 family, member A
  Uniprot ID: Q8IWT6
  ENSP ID: ENSP00000361680

SEQ ID NO: 45752 - protein, 810 aa, Homo sapiens; identical to SEQ ID NO: 45750
  Payload ID: 9339
  Gene Symbol: LRRC8A
  Gene Name: leucine rich repeat containing 8 family, member A
  Uniprot ID: Q8IWT6
  ENSP ID: ENSP00000361682

SEQ ID NO: 45753 - protein, 803 aa, Homo sapiens
  Payload ID: 9340
  Gene Symbol: LRRC8B
  Gene Name: leucine rich repeat containing 8 family, member B
  Uniprot ID: Q6P9F7
  ENSP ID: ENSP00000332674
MITLTELKCLADAQSSYHILKPWWDVFWYYITLIMLLVAVLAGALQLTQSRVLCCLPCKVEFDNHCAVPWDILKASMNTSSNPGTPLPLPLRIQNDLHRQQYSYIDAVCYEKQLHWFAKFFPYLVLLHTLIFAACSNFWLHYPSTSSRLEHFVAILHKCFDSPWTTRALSETVAEQSVRPLKLSKSKILLSSSGCSADIDSGKQSLPYPQPGLESAGIESPTSSVLDKKEGEQAKAIFEKVKRFRMHVEQKDIIYRVYLKQIIVKVILFVLIITYVPYFLTHITLEIDCSVDVQAFTGYKRYQCVYSLAEIFKVLASFYVILVILYGLTSSYSLWWMLRSSLKQYSFEALREKSNYSDIPDVKNDFAFILHLADQYDPLYSKRFSIFLSEVSENKLKQINLNNEWTVEKLKSKLVKNAQDKIELHLFMLNGLPDNVFELTEMEVLSLELIPEVKLPSAVSQLVNLKELRVYHSSLVVDHPALAFLEENLKILRLKFTEMGKIPRWVFHLKNLKELYLSGCVLPEQLSTMQLEGFQDLKNLRTLYLKSSLSRIPQVVTDLLPSLQKLSLDNEGSKLVVLNNLKKMVNLKSLELISCDLERIPHSIFSLNNLHELDLRENNLKTVEEIISFQHLQNLSCLKLWHNNIAYIPAQIGALSNLEQLSLDHNNIENLPLQLFLCTKLHYLDLSYNHLTFIPEEIQYLSNLQYFAVTNNNIEMLPDGLFQCKKLQCLLLGKNSLMNLSPHVGELSNLTHLELIGNYLETLPPELEGCQSLKRNCLIVEENLLNTLPLPVTERLQTCLDKC

SEQ ID NO: 45754 - protein, 230 aa, Homo sapiens [sequence omitted]

SEQ ID NO: 45755 - protein, 103 aa, Homo sapiens
  Payload ID: 9340
  Gene Symbol: LRRC8B
  Gene Name: leucine rich repeat containing 8 family, member B
  ENSP ID: ENSP00000395832
MITLTELKCLADAQSSYHILKPWWDVFWYYITLIMLLVAVLAGALQLTQSRVLCCLPCKVEFDNHCAVPWDILKASMNTSSNPGTPLPLPLRIQNDLHRQQYS

SEQ ID NO: 45756 - protein, 803 aa, Homo sapiens; identical to SEQ ID NO: 45753
  Payload ID: 9340
  Gene Symbol: LRRC8B
  Gene Name: leucine rich repeat containing 8 family, member B
  Uniprot ID: Q6P9F7
  ENSP ID: ENSP00000400704

SEQ ID NO: 45757 - protein, 803 aa, Homo sapiens
  Payload ID: 9341
  Gene Symbol: LRRC8C
  Gene Name: leucine rich repeat containing 8 family, member C
  Uniprot ID: Q8TDW0
  ENSP ID: ENSP00000359483
MIPVTEFRQFSEQQPAFRVLKPWWDVFTDYLSVAMLMIGVFGCTLQVMQDKIICLPKRVQPAQNHSSLSNVSQAVASTTPLPPPKPSPANPITVEMKGLKTDLDLQQYSFINQMCYERALHWYAKYFPYLVLIHTLVFMLCSNFWFKFPGSSSKIEHFISILGKCFDSPWTTRALSEVSGEDSEEKDNRKNNMNRSNTIQSGPEDSLVNSQSLKSIPEKFVVDKSTAGALDKKEGEQAKALFEKVKKFRLHVEEGDILYAMYVRQTVLKVIKFLIIIAYNSALVSKVQFTVDCNVDIQDMTGYKNFSCNHTMAHLFSKLSFCYLCFVSIYGLTCLYTLYWLFYRSLREYSFEYVRQETGIDDIPDVKNDFAFMLHMIDQYDPLYSKRFAVFLSEVSENKLKQLNLNNEWTPDKLRQKLQTNAHNRLELPLIMLSGLPDTVFEITELQSLKLEIIKNVMIPATIAQLDNLQELSLHQCSVKIHSAALSFLKENLKVLSVKFDDMRELPPWMYGLRNLEELYLVGSLSHDISRNVTLESLRDLKSLKILSIKSNVSKIPQAVVDVSSHLQKMCIHNDGTKLVMLNNLKKMTNLTELELVHCDLERIPHAVFSLLSLQELDLKENNLKSIEEIVSFQHLRKLTVLKLWHNSITYIPEHIKKLTSLERLSFSHNKIEVLPSHLFLCNKIRYLDLSYNDIRFIPPEIGVLQSLQYFSITCNKVESLPDELYFCKKLKTLKIGKNSLSVLSPKIGNLLFLSYLDVKGNHFEILPPELGDCRALKRAGLVVEDALFETLPSDVREQMKTE

SEQ ID NO: 45758 - protein, 58 aa, Homo sapiens
  Payload ID: 9341
  Gene Symbol: LRRC8C
  Gene Name: leucine rich repeat containing 8 family, member C
  ENSP ID: ENSP00000436638
MIPVTEFRQFSEQQPAFRVLKPWWDVFTDYLSVAMLMIGVFGCTLQAVSLKLSGFILF

SEQ ID NO: 45759 - protein, 858 aa, Homo sapiens
  Payload ID: 9342
  Gene Symbol: LRRC8D
  Gene Name: leucine rich repeat containing 8 family, member D
  Uniprot ID: Q7L1W4
  ENSP ID: ENSP00000338887
MFTLAEVASLNDIQPTYRILKPWWDVFMDYLAVVMLMVAIFAGTMQLTKDQVVCLPVLPSPVNSKAHTPPGNAEVTTNIPKMEAATNQDQDGRTTNDISFGTSAVTPDIPLRATYPRTDFALPNQEAKKEKKDPTGRKTNLDFQQYVFINQMCYHLALPWYSKYFPYLALIHTIILMVSSNFWFKYPKTCSKVEHFVSILGKCFESPWTTKALSETACEDSEENKQRITGAQTLPKHVSTSSDEGSPSASTPMINKTGFKFSAEKPVIEVPSMTILDKKDGEQAKALFEKVRKFRAHVEDSDLIYKLYVVQTVIKTAKFIFILCYTANFVNAISFEHVCKPKVEHLIGYEVFECTHNMAYMLKKLLISYISIICVYGFICLYTLFWLFRIPLKEYSFEKVREESSFSDIPDVKNDFAFLLHMVDQYDQLYSKRFGVFLSEVSENKLREISLNHEWTFEKLRQHISRNAQDKQELHLFMLSGVPDAVFDLTDLDVLKLELIPEAKIPAKISQMTNLQELHLCHCPAKVEQTAFSFLRDHLRCLHVKFTDVAEIPAWVYLLKNLRELYLIGNLNSENNKMIGLESLRELRHLKILHVKSNLTKVPSNITDVAPHLTKLVIHNDGTKLLVLNSLKKMMNVAELELQNCELERIPHAIFSLSNLQELDLKSNNIRTIEEIISFQHLKRLTCLKLWHNKIVTIPPSITHVKNLESLYFSNNKLESLPVAVFSLQKLRCLDVSYNNISMIPIEIGLLQNLQHLHITGNKVDILPKQLFKCIKLRTLNLGQNCITSLPEKVGQLSQLTQLELKGNCLDRLPAQLGQCRMLKKSGLVVEDHLFDTLPLEVKEALNQDINIPFANGI

SEQ ID NO: 45760 - protein, 858 aa, Homo sapiens; identical to SEQ ID NO: 45759
  Payload ID: 9342
  Gene Symbol: LRRC8D
  Gene Name: leucine rich repeat containing 8 family, member D
  Uniprot ID: Q7L1W4
  ENSP ID: ENSP00000378093

SEQ ID NO: 45761 - protein, 274 aa, Homo sapiens
  Payload ID: 9342
  Gene Symbol: LRRC8D
  Gene Name: leucine rich repeat containing 8 family, member D
  ENSP ID: ENSP00000405784
MFTLAEVASLNDIQPTYRILKPWWDVFMDYLAVVMLMVAIFAGTMQLTKDQVVCLPVLPSPVNSKAHTPPGNAEVTTNIPKMEAATNQDQDGRTTNDISFGTSAVTPDIPLRATYPRTDFALPNQEAKKEKKDPTGRKTNLDFQQYVFINQMCYHLALPWYSKYFPYLALIHTIILMVSSNFWFKYPKTCSKVEHFVSILGKCFESPWTTKALSETACEDSEENKQRITGAQTLPKHVSTSSDEGSPSASTPMINKTGFKFSAEKPVIEVPSMT

SEQ ID NO: 45762 - protein, 116 aa, Homo sapiens
  Payload ID: 9342
  Gene Symbol: LRRC8D
  Gene Name: leucine rich repeat containing 8 family, member D
  ENSP ID: ENSP00000415117
MFTLAEVASLNDIQPTYRILKPWWDVFMDYLAVVMLMVAIFAGTMQLTKDQVVCLPVLPSPVNSKAHTPPGNAEVTTNIPKMEAATNQDQDGRTTNDISFGTSAVTPDIPLRATYP

SEQ ID NO: 45763 - protein, 186 aa, Homo sapiens
  Payload ID: 9342
  Gene Symbol: LRRC8D
  Gene Name: leucine rich repeat containing 8 family, member D
  ENSP ID: ENSP00000433422
MFTLAEVASLNDIQPTYRILKPWWDVFMDYLAVVMLMVAIFAGTMQLTKDQVVCLPVLPSPVNSKAHTPPGNAEVTTNIPKMEAATNQDQDGRTTNDISFGTSAVTPDIPLRATYPRTDFALPNQEAKKEKKDPTGRKTNLDFQQYVFINQMCYHLALPWYSKYFPYLALIHTIILMVSSNFWFKY

SEQ ID NO: 45764 - protein, 121 aa, Homo sapiens
  Payload ID: 9342
  Gene Symbol: LRRC8D
  Gene Name: leucine rich repeat containing 8 family, member D
  ENSP ID: ENSP00000435504
MFTLAEVASLNDIQPTYRILKPWWDVFMDYLAVVMLMVAIFAGTMQLTKDQVVCLPVLPSPVNSKAHTPPGNAEVTTNIPKMEAATNQDQDGRTTNDISFGTSAVTPDIPLRATYPRTDFA

SEQ ID NO: 45765 - protein, 30 aa, Homo sapiens
  Payload ID: 9342
  Gene Symbol: LRRC8D
  Gene Name: leucine rich repeat containing 8 family, member D
  ENSP ID: ENSP00000435609
MFTLAEVASLNDIQPTYRILKPWWDVFMDY

SEQ ID NO: 45766 - protein, 796 aa, Homo sapiens
  Payload ID: 9343
  Gene Symbol: LRRC8E
  Gene Name: leucine rich repeat containing 8 family, member E
  Uniprot ID: Q6NSJ5
  ENSP ID: ENSP00000306524
MIPVAEFKQFTEQQPAFKVLKPWWDVLAEYLTVAMLMIGVFGCTLQVTQDKIICLPNHELQENLSEAPCQQLLPRGIPEQIGALQEVKGLKNNLDLQQYSFINQLCYETALHWYAKYFPYLVVIHTLIFMVCTSFWFKFPGTSSKIEHFISILGKCFDSPWTTRALSEVSGENQKGPAATERAAATIVAMAGTGPGKAGEGEKEKVLAEPEKVVTEPPVVTLLDKKEGEQAKALFEKVKKFRMHVEEGDILYTMYIRQTVLKVCKFLAILVYNLVYVEKISFLVACRVETSEVTGYASFCCNHTKAHLFSKLAFCYISFVCIYGLTCIYTLYWLFHRPLKEYSFRSVREETGMGDIPDVKNDFAFMLHLIDQYDSLYSKRFAVFLSEVSESRLKQLNLNHEWTPEKLRQKLQRNAAGRLELALCMLPGLPDTVFELSEVESLRLEAICDITFPPGLSQLVHLQELSLLHSPARLPFSLQVFLRDHLKVMRVKCEELREVPLWVFGLRGLEELHLEGLFPQELARAATLESLRELKQLKVLSLRSNAGKVPASVTDVAGHLQRLSLHNDGARLVALNSLKKLAALRELELVACGLERIPHAVFSLGALQELDLKDNHLRSIEEILSFQHCRKLVTLRLWHNQIAYVPEHVRKLRSLEQLYLSYNKLETLPSQLGLCSGLRLLDVSHNGLHSLPPEVGLLQNLQHLALSYNALEALPEELFFCRKLRTLLLGDNQLSQLSPHVGALRALSRLELKGNRLEALPEELGNCGGLKKAGLLVEDTLYQGLPAEVRDKMEEE

SEQ ID NO: 45767 - protein, 187 aa, Homo sapiens
  Payload ID: 9343
  Gene Symbol: LRRC8E
  Gene Name: leucine rich repeat containing 8 family, member E
  ENSP ID: ENSP00000470302
MIPVAEFKQFTEQQPAFKVLKPWWDVLAEYLTVAMLMIGVFGCTLQVTQDKIICLPNHELQENLSEAPCQQLLPRGIPEQIGALQEVKGLKNNLDLQQYSFINQLCYETALHWYAKYFPYLVVIHTLIFMVCTSFWFKFPGTSSKIEHFISILGKCFDSPWTTRALSEVSGENQKGPAATERAAATI

SEQ ID NO: 45768 - protein, 137 aa, Homo sapiens
  Payload ID: 9343
  Gene Symbol: LRRC8E
  Gene Name: leucine rich repeat containing 8 family, member E
  ENSP ID: ENSP00000472491
MIPVAEFKQFTEQQPAFKVLKPWWDVLAEYLTVAMLMIGVFGCTLQVTQDKIICLPNHELQENLSEAPCQQLLPRGIPEQIGALQEVKGLKNNLDLQQYSFINQLCYETALHWYAKYFPYLVVIHTLIFMVCTSFWF

SEQ ID NO: 45769 - protein, 95 aa, Homo sapiens
  Payload ID: 9343
  Gene Symbol: LRRC8E
  Gene Name: leucine rich repeat containing 8 family, member E
  ENSP ID: ENSP00000472642
MIPVAEFKQFTEQQPAFKVLKPWWDVLAEYLTVAMLMIGVFGCTLQVTQDKIICLPNHELQENLSEAPCQQLLPRGIPEQIGALQEVKGLKNNLD

SEQ ID NO: 45770 - protein, 73 aa, Homo sapiens
  Payload ID: 9343
  Gene Symbol: LRRC8E
  Gene Name: leucine rich repeat containing 8 family, member E
  ENSP ID: ENSP00000473127
MVCTSFWFKFPGTSSKIEHFISILGKCFDSPWTTRALSEVSGENQKGPAATERAAATIVAMAGTGPGKAGEGE

SEQ ID NO: 45771 - protein, 796 aa, Homo sapiens; identical to SEQ ID NO: 45766
  Payload ID: 9343
  Gene Symbol: LRRC8E
  Gene Name: leucine rich repeat containing 8 family, member E
  Uniprot ID: Q6NSJ5
  ENSP ID: ENSP00000479953

SEQ ID NO: 45772 - protein, 1453 aa, Homo sapiens
  Payload ID: 9344
  Gene Symbol: LRRC9
  Gene Name: leucine rich repeat containing 9
  Uniprot ID: Q6ZRR7
  ENSP ID: ENSP00000454748
MIESENLNQEEIIKELCLCNGLSYEMVGQEGSDTSKLEMFFLGYPRIVGLSLFPNLTSLTIVAQDIKEISGLEPCLQLKELWIAECCIEKIEGLQECRNLEKLYLYFNKISKIENLEKLIKLKVLWLNHNTIKNIEGLQTLKNLKDLNLAGNLINSIGRCLDSNEQLERLNLSGNQICSFKELTNLTRLPCLKDLCLNDPQYTTNPVCLLCNYSTHVLYHLPCLQRFDTLDVSAKQIKELADTTAMKKIMYYNMRIKTLQRHLKEDLEKLNDQKCKLQKLPEERVKLFSFVKKTLERELAELKGSGKGHSDGSNNSKVTDPETLKSCETVTEEPSLQQKILAKLNALNERVTFWNKKLDEIEAIYHIEVKQKKKSHGLLIPLLLIELETVGNFHFEEGTRSDDWFNFCYELILSRFCAWDFRTYGITGVKVKRIIKVNNRILRLKFEEKFQKFLENEDMHDSESYRRMLECLFYVFDPEVSVKKKHLLQILEKGFKDSETSKLPLKKEAIIVSNSLSISECPRIEFLQQKHKDEKKISLKHELFRHGILLITKVFLGQSVQAHEKESISQSNYPMVNSVFIPRKYLLNSVMGQRNCDCSVRQCKWFVFDHDLVLPEYVVEFEYITMVKAPSLFSVFNNVILEESKKNPEVSVFSKDLKFDDEVIKMEPRIKARPKLISLDDKTILSLAKTSVYSHIVSLNLHGNSLSKLRDLSKLTGLRKLNISFNEFTCLDDVYHLYNLEYLDASHNHVITLEGFRGLMKLKHLDLSWNQLKKSGNEINMLCKHTTSLLTLDIQHNPWQKPATLRLSVIGRLKTLTHLNGVFISEEEATAAMKFIAGTRITQLSLLRHSSTKEERPRILSIWPSAKILTQVSKLGPHLHLSGNCYLKITALNLDGQHLFEITNLEKLENLKWASFSNNNLTKMEGLESCINLEELTLDGNCISKIEGISKMTKLTRLSINNNLLTGWEEHTFDNMLHLHSLSLENNRITSLSGLQKSFTLVELYISNNYIAVNQEMHNLKGLCNLVILDMCGNIIIWNQENYRLFVIFHLPELKALDGIPIEPSETDSAKDLFGGRLTSDMIAERQGHSNFKQMQELNWTSSSIRTVDLIPVDQFRNVCNVNLQNNHLTSFSGLIYLPNVKVLCLNYNHIESIMPRLKPQTHLTSRQLLYQKVPSSGYGQQGISKTNRDIMSSENLPPIMHSLEVLHLGYNGICNLIQLQLNRLRNLKFLFLQGNEISQVEGLDNLVVLQELVVDHNRIRSFNDSAFAKPSSLLALHLEENRLRELGKLQSLVKLEKLFLGYNKIQDITELEKLDVISTLRELTVYGNPICRKMLHRHMLIFRLPNLQMLDGSPVNSDDRAKAEFHLAELQAKKNSLIPVTHSPMDGRSFGQVKTPPIEITNVLLPSGFSHYLGSDVTLTPEVEEFLGATFQDQIECNCLKRNEHTPRNSPV

SEQ ID NO: 45773 - protein, 1111 aa, Homo sapiens
  Payload ID: 9344
  Gene Symbol: LRRC9
  Gene Name: leucine rich repeat containing 9
  Uniprot ID: Q6ZRR7
  ENSP ID: ENSP00000454848
MIESENLNQEEIIKELCLCNGLSYEMVGQEGSDTSKLEMFFLGYPRIVGLSLFPNLTSLTIVAQDIKEISGLEPCLQLKELWIAECCIEKIEGLQECRNLEKLYLYFNKISKIENLEKLIKLKVLWLNHNTIKNIEGLQTLKNLKDLNLAGNLINSIGRCLDSNEQLERLNLSGNQICSFKELTNLTRLPCLKDLCLNDPQYTTNPVCLLCNYSTHVLYHLPCLQRFDTLDVSAKQIKELADTTAMKKIMYYNMRIKTLQRHLKEDLEKLNDQKCKLQKLPEERVKLFSFVKKTLERELAELKGSGKGHSDGSNNSKVTDPETLKSCETVTEEPSLQQKILAKLNALNERVTFWNKKLDEIEAIYHIEVKQKKKSHGLLIPLLLIELETVGNFHFEEGTRSDDWFNFCYELILSRFCAWDFRTYGITGVKVKRIIKVNNRILRLKFEEKFQKFLENEDMHDSESYRRMLECLFYVFDPEVSVKKKHLLQILEKGFKDSETSKLPLKKEAIIVSNSLSISECPRIEFLQQKHKDEKKISLKHELFRHGILLITKVFLGQSVQAHEKESISQSNYPMVNSVFIPRKYLLNSVMGQRNCDCSVRQCKWFVFDHDLVLPEYVVEFEYITMVKAPSLFSVFNNVILEESKKNPEVSVFSKDLKFDDEVIKMEPRIKARPKLISLDDKTILSLAKTSVYSHIVSLNLHGNSLSKLRDLSKLTGLRKLNISFNEFTCLDDVYHLYNLEYLDASHNHVITLEGFRGLMKLKHLDLSWNQLKKSGNEINMLCKHTTSLLTLDIQHNPWQKPATLRLSVIGRLKTLTHLNGVFISEEEATAAMKFIAGTRITQLSLLRHSSTKEERPRILSIWPSAKILTQVSKLGPHLHLSGNCYLKITALNLDGQHLFEITNLEKLENLKWASFSNNNLTKMEGLESCINLEELTLDGNCISKIEGISKMTKLTRLSINNNLLTGWEEHTFDNMLHLHSLSLENNRITSLSGLQKSFTLVELYISNNYIAVNQEMHNLKGLCNLVILDMCGNIIIWNQENYRLFVIFHLPELKALDGIPIEPSETDSAKDLFGGRLTSDMIAERQGHSNFKQMQELNWTSSSISCIYFV

SEQ ID NO: 45774 - protein, 112 aa, Homo sapiens
  Payload ID: 9344
  Gene Symbol: LRRC9
  Gene Name: leucine rich repeat containing 9
  ENSP ID: ENSP00000457559
  MOD_RES (1)..(1): Any amino acid
XLVKLEKLFLGYNKIQDITELEKLDVISTLRELTVYGNPICRKMLHRHMLIFRLPNLQMLDGSPVNSDDRAKAEFHLAELQAKKNSRSNIIRMLWFEKKRGWREKGNQLRGF

SEQ ID NO: 45775 - protein, 114 aa, Homo sapiens
  Payload ID: 9344
  Gene Symbol: LRRC9
  Gene Name: leucine rich repeat containing 9
  ENSP ID: ENSP00000457773
MIESENLNQEEIIKELCLCNGLSYEMVGQEGSDTSKLEMFFLGYPRIVGLSLFPNLTSLTIVAQDIKEISGLEPCLQLKELWIAECCIEKIEGLQECRNLEKLYLYFNKISKIE

SEQ ID NO: 45776 - protein, 716 aa, Homo sapiens
  Payload ID: 9345
  Gene Symbol: LRRN1
  Gene Name: leucine rich repeat neuronal 1
  Uniprot ID: Q6UXK5
  ENSP ID: ENSP00000314901
MARMSFVIAACQLVLGLLMTSLTESSIQNSECPQLCVCEIRPWFTPQSTYREATTVDCNDLRLTRIPSNLSSDTQVLLLQSNNIAKTVDELQQLFNLTELDFSQNNFTNIKEVGLANLTQLTTLHLEENQITEMTDYCLQDLSNLQELYINHNQISTISAHAFAGLKNLLRLHLNSNKLKVIDSRWFDSTPNLEILMIGENPVIGILDMNFKPLANLRSLVLAGMYLTDIPGNALVGLDSLESLSFYDNKLVKVPQLALQKVPNLKFLDLNKNPIHKIQEGDFKNMLRLKELGINNMGELVSVDRYALDNLPELTKLEATNNPKLSYIHRLAFRSVPALESLMLNNNALNAIYQKTVESLPNLREISIHSNPLRCDCVIHWINSNKTNIRFMEPLSMFCAMPPEYKGHQVKEVLIQDSSEQCLPMISHDSFPNRLNVDIGTTVFLDCRAMAEPEPEIYWVTPIGNKITVETLSDKYKLSSEGTLEISNIQIEDSGRYTCVAQNVQGADTRVATIKVNGTLLDGTQVLKIYVKQTESHSILVSWKVNSNVMTSNLKWSSATMKIDNPHITYTARVPVDVHEYNLTHLQPSTDYEVCLTVSNIHQQTQKSCVNVTTKNAAFAVDISDQETSTALAAVMGSMFAVISLASIAVYFAKRFKRKNYHHSLKKYMQKTSSIPLNELYPPLINLWEGDSEKDKDGSADTKPTQVDTSRSYYMW

SEQ ID NO: 45777 - protein, 713 aa, Homo sapiens
  Payload ID: 9346
  Gene Symbol: LRRN2
  Gene Name: leucine rich repeat neuronal 2
  Uniprot ID: O75325
  ENSP ID: ENSP00000356143
MRLLVAPLLLAWVAGATAAVPVVPWHVPCPPQCACQIRPWYTPRSSYREATTVDCNDLFLTAVPPALPAGTQTLLLQSNSIVRVDQSELGYLANLTELDLSQNSFSDARDCDFHALPQLLSLHLEENQLTRLEDHSFAGLASLQELYLNHNQLYRIAPRAFSGLSNLLRLHLNSNLLRAIDSRWFEMLPNLEILMIGGNKVDAILDMNFRPLANLRSLVLAGMNLREISDYALEGLQSLESLSFYDNQLARVPRRALEQVPGLKFLDLNKNPLQRVGPGDFANMLHLKELGLNNMEELVSIDKFALVNLPELTKLDITNNPRLSFIHPRAFHHLPQMETLMLNNNALSALHQQTVESLPNLQEVGLHGNPIRCDCVIRWANATGTRVRFIEPQSTLCAEPPDLQRLPVREVPFREMTDHCLPLISPRSFPPSLQVASGESMVLHCRALAEPEPEIYWVTPAGLRLTPAHAGRRYRVYPEGTLELRRVTAEEAGLYTCVAQNLVGADTKTVSVVVGRALLQPGRDEGQGLELRVQETHPYHILLSWVTPPNTVSTNLTWSSASSLRGQGATALARLPRGTHSYNITRLLQATEYWACLQVAFADAHTQLACVWARTKEATSCHRALGDRPGLIAILALAVLLLAAGLAAHLGTGQPRKGVGGRRPLPPAWAFWGWSAPSVRVVSAPLVLPWNPGRKLPRSSEGETLLPPLSQNS

SEQ ID NO: 45778 - protein, 713 aa, Homo sapiens; identical to SEQ ID NO: 45777
  Payload ID: 9346
  Gene Symbol: LRRN2
  Gene Name: leucine rich repeat neuronal 2
  Uniprot ID: O75325
  ENSP ID: ENSP00000356144

SEQ ID NO: 45779 - protein, 713 aa, Homo sapiens; identical to SEQ ID NO: 45777
  Payload ID: 9346
  Gene Symbol: LRRN2
  Gene Name: leucine rich repeat neuronal 2
  Uniprot ID: O75325
  ENSP ID: ENSP00000356145

SEQ ID NO: 45780 - protein, 708 aa, Homo sapiens
  Payload ID: 9347
  Gene Symbol: LRRN3
  Gene Name: leucine rich repeat neuronal 3
  Uniprot ID: Q9H3W5
  ENSP ID: ENSP00000312001
MKDMPLRIHVLLGLAITTLVQAVDKKVDCPRLCTCEIRPWFTPRSIYMEASTVDCNDLGLLTFPARLPANTQILLLQTNNIAKIEYSTDFPVNLTGLDLSQNNLSSVTNINVKKMPQLLSVYLEENKLTELPEKCLSELSNLQELYINHNLLSTISPGAFIGLHNLLRLHLNSNRLQMINSKWFDALPNLEILMIGENPIIRIKDMNFKPLINLRSLVIAGINLTEIPDNALVGLENLESISFYDNRLIKVPHVALQKVVNLKFLDLNKNPINRIRRGDFSNMLHLKELGINNMPELISIDSLAVDNLPDLRKIEATNNPRLSYIHPNAFFRLPKLESLMLNSNALSALYHGTIESLPNLKEISIHSNPIRCDCVIRWMNMNKTNIRFMEPDSLFCVDPPEFQGQNVRQVHFRDMMEICLPLIAPESFPSNLNVEAGSYVSFHCRATAEPQPEIYWITPSGQKLLPNTLTDKFYVHSEGTLDINGVTPKEGGLYTCIATNLVGADLKSVMIKVDGSFPQDNNGSLNIKIRDIQANSVLVSWKASSKILKSSVKWTAFVKTENSHAAQSARIPSDVKVYNLTHLNPSTEYKICIDIPTIYQKNRKKCVNVTTKGLHPDQKEYEKNNTTTLMACLGGLLGIIGVICLISCLSPEMNCDGGHSYVRNYLQKPTFALGELYPPLINLWEAGKEKSTSLKVKATVIGLPTNMS

SEQ ID NO: 45781 - protein, 708 aa, Homo sapiens; identical to SEQ ID NO: 45780
  Payload ID: 9347
  Gene Symbol: LRRN3
  Gene Name: leucine rich repeat neuronal 3
  Uniprot ID: Q9H3W5
  ENSP ID: ENSP00000397312

SEQ ID NO: 45782 - protein, 273 aa, Homo sapiens
  Payload ID: 9347
  Gene Symbol: LRRN3
  Gene Name: leucine rich repeat neuronal 3
  ENSP ID: ENSP00000407927
MKDMPLRIHVLLGLAITTLVQAVDKKVDCPRLCTCEIRPWFTPRSIYMEASTVDCNDLGLLTFPARLPANTQILLLQTNNIAKIEYSTDFPVNLTGLDLSQNNLSSVTNINVKKMPQLLSVYLEENKLTELPEKCLSELSNLQELYINHNLLSTISPGAFIGLHNLLRLHLNSNRLQMINSKWFDALPNLEILMIGENPIIRIKDMNFKPLINLRSLVIAGINLTEIPDNALVGLENLESISFYDNRLIKVPHVALQKVVNLKFLDLNKNPIN

SEQ ID NO: 45783 - protein, 708 aa, Homo sapiens; identical to SEQ ID NO: 45780
  Payload ID: 9347
  Gene Symbol: LRRN3
  Gene Name: leucine rich repeat neuronal 3
  Uniprot ID: Q9H3W5
  ENSP ID: ENSP00000412417

SEQ ID NO: 45784 - protein, 740 aa, Homo sapiens
  Payload ID: 9348
  Gene Symbol: LRRN4
  Gene Name: leucine rich repeat neuronal 4
  Uniprot ID: Q8WUT4
  ENSP ID: ENSP00000368135
MRQTLPLLLLTVLRPSWADPPQEKVPLFRVTQQGPWGSSGSNATDSPCEGLPAADATALTLANRNLERLPGCLPRTLRSLDASHNLLRALSTSELGHLEQLQVLTLRHNRIAALRWGPGGPAGLHTLDLSYNQLAALPPCTGPALSSLRALALAGNPLRALQPRAFACFPALQLLNLSCTALGRGAQGGIAEAAFAGEDGAPLVTLEVLDLSGTFLERVESGWIRDLPKLTSLYLRKMPRLTTLEGDIFKMTPNLQQLDCQDSPALASVATHIFQDTPHLQVLLFQNCNLSSFPPWTLDSSQVLSINLFGNPLTCSCDLSWLLTDAKRTVLSRAADTMCAPAAGSSGPFSASLSLSQLPGVCQSDQSTTLGASHPPCFNRSTYAQGTTVAPSAAPATRPAGDQQSVSKAPNVGSRTIAAWPHSDAREGTAPSTTNSVAGHSNSSVFPRAASTTRTQHRGEHAPELVLEPDISAASTPLASKLLGPFPTSWDRSISSPQPGQRTHATPQAPNPSLSEGEIPVLLLDDYSEEEEGRKEEVGTPHQDVPCDYHPCKHLQTPCAELQRRWRCRCPGLSGEDTIPDPPRLQGVTETTDTSALVHWCAPNSVVHGYQIRYSAEGWAGNQSVVGVIYATARQHPLYGLSPGTTYRVCVLAANRAGLSQPRSSGWRSPCAAFTTKPSFALLLSGLCAASGLLLASTVVLSACLCRRGQTLGLQRCDTHLVAYKNPAFDDYPLGLQTVS

SEQ ID NO: 45785 - protein, 414 aa, Homo sapiens
  Payload ID: 9349
  Gene Symbol: LRR1
  Gene Name: leucine rich repeat protein 1
  Uniprot ID: Q96L50
  ENSP ID: ENSP00000298288
MKLHCEVEVISRHLPALGLRNRGKGVRAVLSLCQQTSRSQPPVRAFLLISTLKDKRGTRYELRENIEQFFTKFVDEGKATVRLKEPPVDICLSKAISSSLKGFLSAMRLAHRGCNVDTPVSTLTPVKTSEFENFKTKMVITSKKDYPLSKNFPYSLEHLQTSYCGLVRVDMRMLCLKSLRKLDLSHNHIKKLPATIGDLIHLQELNLNDNHLESFSVALCHSTLQKSLRSLDLSKNKIKALPVQFCQLQELKNLKLDDNELIQFPCKIGQLINLRFLSAARNKLPFLPSEFRNLSLEYLDLFGNTFEQPKVLPVIKLQAPLTLLESSARTILHNRIPYGSHIIPFHLCQDLDTAKICVCGRFCLNSFIQGTTTMNLHSVAHTVVLVDNLGGTEAPIISYFCSLGCYVNSSDMLK

SEQ ID NO: 45786 - protein, 146 aa, Homo sapiens
  Payload ID: 9349
  Gene Symbol: LRR1
  Gene Name: leucine rich repeat protein 1
  Uniprot ID: Q96L50
  ENSP ID: ENSP00000315628
MKLHCEVEVISRHLPALGLRNRGKGVRAVLSLCQQTSRSQPPVRAFLLISTLKDKRGTRYELRENIEQFFTKFVDEGKATVRLKEPPVDICLSKDSIWLSYHSIPSLPRFGYRKNLCLWKILSELFHSRNYYHESAFCCPHCGLSR

SEQ ID NO: 45787 - protein, 64 aa, Homo sapiens
  Payload ID: 9349
  Gene Symbol: LRR1
  Gene Name: leucine rich repeat protein 1
  ENSP ID: ENSP00000439452
MKLHCEVEVISRHLPALGLRNRGKGVRAVLSLCQQTSRSQPPVRAFLLISTLKDKRGTRYEHSG

SEQ ID NO: 45788 - protein, 133 aa, Homo sapiens
  Payload ID: 9349
  Gene Symbol: LRR1
  Gene Name: leucine rich repeat protein 1
  ENSP ID: ENSP00000452355
MKLHCEVEVISRHLPALGLRNRGKGVRAVLSLCQQTSRSQPPVRAFLLISTLKDKRGTRYELRENIEQFFTKFVDEGKATVRLKEPPVDICLSKMESHSVTQVGVQWEELGSLQPTGHFQQFKRFPFSYETGS

SEQ ID NO: 45789 - protein, 522 aa, Homo sapiens
  Payload ID: 9350
  Gene Symbol: LRRTM1
  Gene Name: leucine rich repeat transmembrane neuronal 1
  Uniprot ID: Q86UE6
  ENSP ID: ENSP00000295057
MDFLLLGLCLYWLLRRPSGVVLCLLGACFQMLPAAPSGCPQLCRCEGRLLYCEALNLTEAPHNLSGLLGLSLRYNSLSELRAGQFTGLMQLTWLYLDHNHICSVQGDAFQKLRRVKELTLSSNQITQLPNTTFRPMPNLRSVDLSYNKLQALAPDLFHGLRKLTTLHMRANAIQFVPVRIFQDCRSLKFLDIGYNQLKSLARNSFAGLFKLTELHLEHNDLVKVNFAHFPRLISLHSLCLRRNKVAIVVSSLDWVWNLEKMDLSGNEIEYMEPHVFETVPHLQSLQLDSNRLTYIEPRILNSWKSLTSITLAGNLWDCGRNVCALASWLNNFQGRYDGNLQCASPEYAQGEDVLDAVYAFHLCEDGAEPTSGHLLSAVTNRSDLGPPASSATTLADGGEGQHDGTFEPATVALPGGEHAENAVQIHKVVTGTMALIFSFLIVVLVLYVSWKCFPASLRQLRQCFVTQRRKQKQKQTMHQMAAMSAQEYYVDYKPNHIEGALVIINEYGSCTCHQQPARECEV

SEQ ID NO: 45790 - protein, 522 aa, Homo sapiens; identical to SEQ ID NO: 45789
  Payload ID: 9350
  Gene Symbol: LRRTM1
  Gene Name: leucine rich repeat transmembrane neuronal 1
  Uniprot ID: Q86UE6
  ENSP ID: ENSP00000386646

SEQ ID NO: 45791 - protein, 183 aa, Homo sapiens
  Payload ID: 9350
  Gene Symbol: LRRTM1
  Gene Name: leucine rich repeat transmembrane neuronal 1
  ENSP ID: ENSP00000389473
MDFLLLGLCLYWLLRRPSGVVLCLLGACFQMLPAAPSGCPQLCRCEGRLLYCEALNLTEAPHNLSGLLGLSLRYNSLSELRAGQFTGLMQLTWLYLDHNHICSVQGDAFQKLRRVKELTLSSNQITQLPNTTFRPMPNLRSVDLSYNKLQALAPDLFHGLRKLTTLHMRANAIQFVPVRIFQD

SEQ ID NO: 45792 - protein, 522 aa, Homo sapiens; identical to SEQ ID NO: 45789
  Payload ID: 9350
  Gene Symbol: LRRTM1
  Gene Name: leucine rich repeat transmembrane neuronal 1
  Uniprot ID: Q86UE6
  ENSP ID: ENSP00000393562

SEQ ID NO: 45793 - protein, 109 aa, Homo sapiens
  Payload ID: 9350
  Gene Symbol: LRRTM1
  Gene Name: leucine rich repeat transmembrane neuronal 1
  ENSP ID: ENSP00000404557
MDFLLLGLCLYWLLRRPSGVVLCLLGACFQMLPAAPSGCPQLCRCEGRLLYCEALNLTEAPHNLSGLLGLSLRYNSLSELRAGQFTGLMQLTWLYLDHNHICSVQGDAF

SEQ ID NO: 45794 - protein, 522 aa, Homo sapiens; identical to SEQ ID NO: 45789
  Payload ID: 9350
  Gene Symbol: LRRTM1
  Gene Name: leucine rich repeat transmembrane neuronal 1
  Uniprot ID: Q86UE6
  ENSP ID: ENSP00000414523

SEQ ID NO: 45795 - protein, 223 aa, Homo sapiens
  Payload ID: 9350
  Gene Symbol: LRRTM1
  Gene Name: leucine rich repeat transmembrane neuronal 1
  ENSP ID: ENSP00000415368
MDFLLLGLCLYWLLRRPSGVVLCLLGACFQMLPAAPSGCPQLCRCEGRLLYCEALNLTEAPHNLSGLLGLSLRYNSLSELRAGQFTGLMQLTWLYLDHNHICSVQGDAFQKLRRVKELTLSSNQITQLPNTTFRPMPNLRSVDLSYNKLQALAPDLFHGLRKLTTLHMRANAIQFVPVRIFQDCRSLKFLDIGYNQLKSLARNSFAGLFKLTELHLEHNDLVK

SEQ ID NO: 45796 - protein, 516 aa, Homo sapiens
  Payload ID: 9351
  Gene Symbol: LRRTM2
  Gene Name: leucine rich repeat transmembrane neuronal 2
  Uniprot ID: O43300
  ENSP ID: ENSP00000274711
MGLHFKWPLGAPMLAAIYAMSMVLKMLPALGMACPPKCRCEKLLFYCDSQGFHSVPNATDKGSLGLSLRHNHITELERDQFASFSQLTWLHLDHNQISTVKEDAFQGLYKLKELILSSNKIFYLPNTTFTQLINLQNLDLSFNQLSSLHPELFYGLRKLQTLHLRSNSLRTIPVRLFWDCRSLEFLDLSTNRLRSLARNGFAGLIKLRELHLEHNQLTKINFAHFLRLSSLHTLFLQWNKISNLTCGMEWTWGTLEKLDLTGNEIKAIDLTVFETMPNLKILLMDNNKLNSLDSKILNSLRSLTTVGLSGNLWECSARICALASWLGSFQGRWEHSILCHSPDHTQGEDILDAVHGFQLCWNLSTTVTVMATTYRDPTTEYTKRISSSSYHVGDKEIPTTAGIAVTTEEHFPEPDNAIFTQRVITGTMALLFSFFFIIFIVFISRKCCPPTLRRIRQCSMVQNHRQLRSQTRLHMSNMSDQGPYNEYEPTHEGPFIIINGYGQCKCQQLPYKECEV

SEQ ID NO: 45797 - protein, 38 aa, Homo sapiens
  Payload ID: 9351
  Gene Symbol: LRRTM2
  Gene Name: leucine rich repeat transmembrane neuronal 2
  ENSP ID: ENSP00000428398
MAVISAPRALLWPSEAADLAFTFQLPADYPSTPVLGLS

SEQ ID NO: 45798 - protein, 77 aa, Homo sapiens
  Payload ID: 9351
  Gene Symbol: LRRTM2
  Gene Name: leucine rich repeat transmembrane neuronal 2
  ENSP ID: ENSP00000430902
MVFISRKCCPPTLRRIRQCSMVQNHRQLRSQTRLHMSNMSDQGPYNEYEPTHEGPFIIINGYGQCKCQQLPYKECEV

SEQ ID NO: 45799 - protein, 581 aa, Homo sapiens
  Payload ID: 9352
  Gene Symbol: LRRTM3
  Gene Name: leucine rich repeat transmembrane neuronal 3
  Uniprot ID: Q86VH5
  ENSP ID: ENSP00000355187
MGFNVIRLLSGSAVALVIAPTVLLTMLSSAERGCPKGCRCEGKMVYCESQKLQEIPSSISAGCLGLSLRYNSLQKLKYNQFKGLNQLTWLYLDHNHISNIDENAFNGIRRLKELILSSNRISYFLNNTFRPVTNLRNLDLSYNQLHSLGSEQFRGLRKLLSLHLRSNSLRTIPVRIFQDCRNLELLDLGYNRIRSLARNVFAGMIRLKELHLEHNQFSKLNLALFPRLVSLQNLYLQWNKISVIGQTMSWTWSSLQRLDLSGNEIEAFSGPSVFQCVPNLQRLNLDSNKLTFIGQEILDSWISLNDISLAGNIWECSRNICSLVNWLKSFKGLRENTIICASPKELQGVNVIDAVKNYSICGKSTTERFDLARALPKPTFKPKLPRPKHESKPPLPPTVGATEPGPETDADAEHISFHKIIAGSVALFLSVLVILLVIYVSWKRYPASMKQLQQRSLMRRHRKKKRQSLKQMTPSTQEFYVDYKPTNTETSEMLLNGTGPCTYNKSGSRECEIPLSMNVSTFLAYDQPTISYCGVHHELLSHKSFETNAQEDTMETHLETELDLSTITTAGRISDHKQQLA

SEQ ID NO: 45800 - protein, 518 aa, Homo sapiens
  Payload ID: 9353
  Gene Symbol: LRRTM4
  Gene Name: leucine rich repeat transmembrane neuronal 4
  Uniprot ID: Q86VH4
  ENSP ID: ENSP00000386236
MGFHLITQLKGMSVVLVLLPTLLLVMLTGAQRACPKNCRCDGKIVYCESHAFADIPENISGGSQGLSLRFNSIQKLKSNQFAGLNQLIWLYLDHNYISSVDEDAFQGIRRLKELILSSNKITYLHNKTFHPVPNLRNLDLSYNKLQTLQSEQFKGLRKLIILHLRSNSLKTVPIRVFQDCRNLDFLDLGYNRLRSLSRNAFAGLLKLKELHLEHNQFSKINFAHFPRLFNLRSIYLQWNRIRSISQGLTWTWSSLHNLDLSGNDIQGIEPGTFKCLPNLQKLNLDSNKLTNISQETVNAWISLISITLSGNMWECSRSICPLFYWLKNFKGNKESTMICAGPKHIQGEKVSDAVETYNICSEVQVVNTERSHLVPQTPQKPLIIPRPTIFKPDVTQSTFETPSPSPGFQIPGAEQEYEHVSFHKIIAGSVALFLSVAMILLVIYVSWKRYPASMKQLQQHSLMKRRRKKARESERQMNSPLQEYYVDYKPTNSETMDISVNGSGPCTYTISGSRECEV

SEQ ID NO: 45801 - protein, 519 aa, Homo sapiens
  Payload ID: 9353
  Gene Symbol: LRRTM4
  Gene Name: leucine rich repeat transmembrane neuronal 4
  ENSP ID: ENSP00000386286
MPGFHLITQLKGMSVVLVLLPTLLLVMLTGAQRACPKNCRCDGKIVYCESHAFADIPENISGGSQGLSLRFNSIQKLKSNQFAGLNQLIWLYLDHNYISSVDEDAFQGIRRLKELILSSNKITYLHNKTFHPVPNLRNLDLSYNKLQTLQSEQFKGLRKLIILHLRSNSLKTVPIRVFQDCRNLDFLDLGYNRLRSLSRNAFAGLLKLKELHLEHNQFSKINFAHFPRLFNLRSIYLQWNRIRSISQGLTWTWSSLHNLDLSGNDIQGIEPGTFKCLPNLQKLNLDSNKLTNISQETVNAWISLISITLSGNMWECSRSICPLFYWLKNFKGNKESTMICAGPKHIQGEKVSDAVETYNICSEVQVVNTERSHLVPQTPQKPLIIPRPTIFKPDVTQSTFETPSPSPGFQIPGAEQEYEHVSFHKIIAGSVALFLSVAMILLVIYVSWKRYPASMKQLQQHSLMKRRRKKARESERQMNSPLQEYYVDYKPTNSETMDISVNGSGPCTYTISGSRECEV

SEQ ID NO: 45802 - protein, 590 aa, Homo sapiens
  Payload ID: 9353
  Gene Symbol: LRRTM4
  Gene Name: leucine rich repeat transmembrane neuronal 4
  Uniprot ID: Q86VH4
  ENSP ID: ENSP00000386357
MGFHLITQLKGMSVVLVLLPTLLLVMLTGAQRACPKNCRCDGKIVYCESHAFADIPENISGGSQGLSLRFNSIQKLKSNQFAGLNQLIWLYLDHNYISSVDEDAFQGIRRLKELILSSNKITYLHNKTFHPVPNLRNLDLSYNKLQTLQSEQFKGLRKLIILHLRSNSLKTVPIRVFQDCRNLDFLDLGYNRLRSLSRNAFAGLLKLKELHLEHNQFSKINFAHFPRLFNLRSIYLQWNRIRSISQGLTWTWSSLHNLDLSGNDIQGIEPGTFKCLPNLQKLNLDSNKLTNISQETVNAWISLISITLSGNMWECSRSICPLFYWLKNFKGNKESTMICAGPKHIQGEKVSDAVETYNICSEVQVVNTERSHLVPQTPQKPLIIPRPTIFKPDVTQSTFETPSPSPGFQIPGAEQEYEHVSFHKIIAGSVALFLSVAMILLVIYVSWKRYPASMKQLQQHSLMKRRRKKARESERQMNSPLQEYYVDYKPTNSETMDISVNGSGPCTYTISGSRECEMPHHMKPLPYYSYDQPVIGYCQAHQPLHVTKGYETVSPEQDESPGLELGRDHSFIATIARSAAPAIYLERIAN

SEQ ID NO: 45803 - protein, 591 aa, Homo sapiens
  Payload ID: 9353
  Gene Symbol: LRRTM4
  Gene Name: leucine rich repeat transmembrane neuronal 4
  ENSP ID: ENSP00000387228
MPGFHLITQLKGMSVVLVLLPTLLLVMLTGAQRACPKNCRCDGKIVYCESHAFADIPENISGGSQGLSLRFNSIQKLKSNQFAGLNQLIWLYLDHNYISSVDEDAFQGIRRLKELILSSNKITYLHNKTFHPVPNLRNLDLSYNKLQTLQSEQFKGLRKLIILHLRSNSLKTVPIRVFQDCRNLDFLDLGYNRLRSLSRNAFAGLLKLKELHLEHNQFSKINFAHFPRLFNLRSIYLQWNRIRSISQGLTWTWSSLHNLDLSGNDIQGIEPGTFKCLPNLQKLNLDSNKLTNISQETVNAWISLISITLSGNMWECSRSICPLFYWLKNFKGNKESTMICAGPKHIQGEKVSDAVETYNICSEVQVVNTERSHLVPQTPQKPLIIPRPTIFKPDVTQSTFETPSPSPGFQIPGAEQEYEHVSFHKIIAGSVALFLSVAMILLVIYVSWKRYPASMKQLQQHSLMKRRRKKARESERQMNSPLQEYYVDYKPTNSETMDISVNGSGPCTYTISGSRECEMPHHMKPLPYYSYDQPVIGYCQAHQPLHVTKGYETVSPEQDESPGLELGRDHSFIATIARSAAPAIYLERIAN

SEQ ID NO: 45804 - protein, 590 aa, Homo sapiens; identical to SEQ ID NO: 45802
  Payload ID: 9353
  Gene Symbol: LRRTM4
  Gene Name: leucine rich repeat transmembrane neuronal 4
  Uniprot ID: Q86VH4
  ENSP ID: ENSP00000387297

SEQ ID NO: 45805 - protein, 24 aa, Homo sapiens
  Payload ID: 9353
  Gene Symbol: LRRTM4
  Gene Name: leucine rich repeat transmembrane neuronal 4
  ENSP ID: ENSP00000408722
MSVVLVLLPTLLLVMLTGAQRACP

SEQ ID NO: 45806 - protein, 192 aa, Homo sapiens
  Payload ID: 9354
  Gene Symbol: LRTOMT
  Gene Name: leucine rich transmembrane and O-methyltransferase domain containing
  Uniprot ID: Q96E66
  ENSP ID: ENSP00000289488
MNKRDYMNTSVQEPPLDYSFRSIHVIQDLVNEEPRTGLRPLKRSKSGKSLTQSLWLNNNVLNDLRDFNQVASQLLEHPENLAWIDLSFNDLTSIDPVLTTFFNLSVLYLHGNSIQRLGEVNKLAVLPRLRSLTLHGNPMEEEKGYRQYVLCTLSRITTFDFSGVTKADRTTAEVWKRMNIKPKKAWTKQNTL

SEQ ID NO: 45807 - protein, 291 aa, Homo sapiens
  Payload ID: 9354
  Gene Symbol: LRTOMT
  Gene Name: leucine rich transmembrane and O-methyltransferase domain containing
  Uniprot ID: Q8WZ04
  ENSP ID: ENSP00000305742
MGTPWRKRKGIAGPGLPDLSCALVLQPRAQVGTMSPAIALAFLPLVVTLLVRYRHYFRLLVRTVLLRSLRDCLSGLRIEERAFSYVLTHALPGDPGHILTTLDHWSSRCEYLSHMGPVKGQILMRLVEEKAPACVLELGTYCGYSTLLIARALPPGGRLLTVERDPRTAAVAEKLIRLAGFDEHMVELIVGSSEDVIPCLRTQYQLSRADLVLLAHRPRCYLRDLQLLEAHALLPAGATVLADHVLFPGAPRFLQYAKSCGRYRCRLHHTGLPDFPAIKDGIAQLTYAGPG

SEQ ID NO: 45808 - protein, 47 aa, Homo sapiens
  Payload ID: 9354
  Gene Symbol: LRTOMT
  Gene Name: leucine rich transmembrane and O-methyltransferase domain containing
  ENSP ID: ENSP00000390485
MGTPWRKRKGIDGVSLCHTGWSAVARSWLTATSASQVQEILLPQPPQ

SEQ ID NO: 45809 - protein, 155 aa, Homo sapiens
  Payload ID: 9354
  Gene Symbol: LRTOMT
  Gene Name: leucine rich transmembrane and O-methyltransferase domain containing
  ENSP ID: ENSP00000392233
MGTPWRKRKGIAGPGLPDLSCALVLQPSLRDCLSGLRIEERAFSYVLTHALPGDPGHILTTLDHWSSRCEYLSHMGPVKGQILMRLVEEKPLLVCWNWEPTVDTLPCLLPEPCPLGVAFLLWSGTHARQQWLKNSSAWPALMSTWWSSSWAAQRT

SEQ ID NO: 45810 - protein, 156 aa, Homo sapiens
  Payload ID: 9354
  Gene Symbol: LRTOMT
  Gene Name: leucine rich transmembrane and O-methyltransferase domain containing
  ENSP ID: ENSP00000395139
MNKRDYMNTSVQEPPLDYSFRSIHVIQDLVNEEPRTGLRPLKRSKSGKSLTQSLWLNNNVLNDLRDFNQVASQLLEHPENLAWIDLSFNDLTSIDPVLTTFFNLSVLYLHGNSIQRLGEVNKLAVLPRLRSLTLHGNPMEEEKGYRWSSSWAAQRT

SEQ ID NO: 45811 - protein, 227 aa, Homo sapiens
  Payload ID: 9354
  Gene Symbol: LRTOMT
  Gene Name: leucine rich transmembrane and O-methyltransferase domain containing
  Uniprot ID: Q96E66
  ENSP ID: ENSP00000409403
MNKRDYMNTSVQEPPLDYSFRSIHVIQDLVNEEPRTGLRPLKRSKSGKSLTQSLWLNNNVLNDLRDFNQVASQLLEHPENLAWIDLSFNDLTSIDPVLTTFFNLSVLYLHGNSIQRLGEVNKLAVLPRLRSLTLHGNPMEEEKGYSRPWTPRPVLCSGPPAQGPGRDHVPCHCIGLPATGGNIAGAVPALLPIAGAHGLAAKPPRLPVRAADRGAGLQLRAHPCPAR

SEQ ID NO: 45812 - protein, 291 aa, Homo sapiens; identical to SEQ ID NO: 45807
  Payload ID: 9354
  Gene Symbol: LRTOMT
  Gene Name: leucine rich transmembrane and O-methyltransferase domain containing
  Uniprot ID: Q8WZ04
  ENSP ID: ENSP00000409789

SEQ ID NO: 45813 - protein, 192 aa, Homo sapiens; identical to SEQ ID NO: 45806
  Payload ID: 9354
  Gene Symbol: LRTOMT
  Gene Name: leucine rich transmembrane and O-methyltransferase domain containing
  Uniprot ID: Q96E66
  ENSP ID: ENSP00000414271

SEQ ID NO: 45814 - protein, 38 aa, Homo sapiens
  Payload ID: 9354
  Gene Symbol: LRTOMT
  Gene Name: leucine rich transmembrane and O-methyltransferase domain containing
  ENSP ID: ENSP00000437561
MNKRDYMNTSVQEPPLDYSFRSIHVIQANLKGNRGLSQ

SEQ ID NO: 45815 - protein, 43 aa, Homo sapiens
  Payload ID: 9354
  Gene Symbol: LRTOMT
  Gene Name: leucine rich transmembrane and O-methyltransferase domain containing
  ENSP ID: ENSP00000437649
MGTPWRKRKGIGNMCCAPCPVSPRSTSVGSPKQTAPQLKSGNA

SEQ ID NO: 45816 - protein, 65 aa, Homo sapiens
  Payload ID: 9354
  Gene Symbol: LRTOMT
  Gene Name: leucine rich transmembrane and O-methyltransferase domain containing
  ENSP ID: ENSP00000437985
MNKRDYMNTSVQEPPLDYSFRSIHVIQGQPPEHSTPLTKAAGPVWSLGRNHNLLKSLKRFFPYAC

SEQ ID NO: 45817 - protein, 158 aa, Homo sapiens
  Payload ID: 9354
  Gene Symbol: LRTOMT
  Gene Name: leucine rich transmembrane and O-methyltransferase domain containing
  Uniprot ID: Q96E66
  ENSP ID: ENSP00000438522
MNKRDYMNTSVQEPPLDYSFRSIHVIQDLVNEEPRTGLRPLKRSKSGKSLTQSLWLNNNVLNDLRDFNQVASQLLEHPENLAWIDLSFNDLTSIDPVLTTFFNLSVLYLHGNSIQRLGEVNKLAVLPRLRSLTLHGNPMEEEKGYRVPGSVEMPHRPP

SEQ ID NO: 45818 - protein, 92 aa, Homo sapiens
  Payload ID: 9354
  Gene Symbol: LRTOMT
  Gene Name: leucine rich transmembrane and O-methyltransferase domain containing
  ENSP ID: ENSP00000438762
MNKRDYMNTSVQEPPLDYSFRSIHVIQDLVNEEPRTGLRPLKRSKSGKSLTQSLWLNNNVLNDLRDFNQVASQLLEHPENLAWIDLSFNDLT

SEQ ID NO: 45819 - protein, 103 aa, Homo sapiens
  Payload ID: 9354
  Gene Symbol: LRTOMT
  Gene Name: leucine rich transmembrane and O-methyltransferase domain containing
  ENSP ID: ENSP00000440248
MNKRDYMNTSVQEPPLDYSFRSIHVIQDLVNEEPRTGLRPLKRSKSGKSLTQSLWLNNNVLNDLRDFNQVASQLLEHPENLAWIDLSFNDLTSIDPVLTTFFN

SEQ ID NO: 45820 - protein, 146 aa, Homo sapiens
  Payload ID: 9354
  Gene Symbol: LRTOMT
  Gene Name: leucine rich transmembrane and O-methyltransferase domain containing
  Uniprot ID: Q96E66
  ENSP ID: ENSP00000440693
MNKRDYMNTSVQEPPLDYSFRSIHVIQDLVNEEPRTGLRPLKRSKSGKSLTQSLWLNNNVLNDLRDFNQVASQLLEHPENLAWIDLSFNDLTSIDPVLTTFFNLSVLYLHGNSIQRLGEVNKLAVLPRLRSLTLHGNPMEEEKGYR

SEQ ID NO: 45821 - protein, 187 aa, Homo sapiens
  Payload ID: 9354
  Gene Symbol: LRTOMT
  Gene Name: leucine rich transmembrane and O-methyltransferase domain containing
  Uniprot ID: Q96E66
  ENSP ID: ENSP00000440969
MNKRDYMNTSVQEPPLDYSFRSIHVIQDLVNEEPRTGLRPLKRSKSGKSLTQSLWLNNNVLNDLRDFNQVASQLLEHPENLAWIDLSFNDLTSIDPVLTTFFNLSVLYLHGNSIQRLGEVNKLAVLPRLRSLTLHGNPMEEEKGYSRPWTPRPVLCSGPPAQPPRLPVRAADRGAGLQLRAHPCPAR

SEQ ID NO: 45822 - protein, 174 aa, Homo sapiens
  Payload ID: 9354
  Gene Symbol: LRTOMT
  Gene Name: leucine rich transmembrane and O-methyltransferase domain containing
  Uniprot ID: Q96E66
  ENSP ID: ENSP00000441249
MVEFQPSVTDLVNEEPRTGLRPLKRSKSGKSLTQSLWLNNNVLNDLRDFNQVASQLLEHPENLAWIDLSFNDLTSIDPVLTTFFNLSVLYLHGNSIQRLGEVNKLAVLPRLRSLTLHGNPMEEEKGYRQYVLCTLSRITTFDFSGVTKADRTTAEVWKRMNIKPKKAWTKQNTL

SEQ ID NO: 45823 - protein, 43 aa, Homo sapiens; identical to SEQ ID NO: 45815
  Payload ID: 9354
  Gene Symbol: LRTOMT
  Gene Name: leucine rich transmembrane and O-methyltransferase domain containing
  ENSP ID: ENSP00000442267

SEQ ID NO: 45824 - protein, 146 aa, Homo sapiens; identical to SEQ ID NO: 45820
  Payload ID: 9354
  Gene Symbol: LRTOMT
  Gene Name: leucine rich transmembrane and O-methyltransferase domain containing
  Uniprot ID: Q96E66
  ENSP ID: ENSP00000443421

SEQ ID NO: 45825 - protein, 192 aa, Homo sapiens; identical to SEQ ID NO: 45806
  Payload ID: 9354
  Gene Symbol: LRTOMT
  Gene Name: leucine rich transmembrane and O-methyltransferase domain containing
  Uniprot ID: Q96E66
  ENSP ID: ENSP00000444583

SEQ ID NO: 45826 - protein, 174 aa, Homo sapiens; identical to SEQ ID NO: 45822
  Payload ID: 9354
  Gene Symbol: LRTOMT
  Gene Name: leucine rich transmembrane and O-methyltransferase domain containing
  Uniprot ID: Q96E66
  ENSP ID: ENSP00000482923

SEQ ID NO: 45827 - protein, 168 aa, Homo sapiens
  Payload ID: 9355
  Gene Symbol: LEUTX
  Gene Name: leucine twenty homeobox
  Uniprot ID: A8MZ59
  ENSP ID: ENSP00000380053
MHPSLATMGKLASKLQLDLSVVKIWFKNQRAKWKRQQRQQMQTRPSLGPANQTTSVKKEETPSAITTANIRPVSPGISDANDHDLREPSGIKNPGGASASARVSSWDSQSYDIEQICLGASNPPWASTLFEIDEFVKIYDLPGEDDTSSLNQYLFPVCLEYDQLQSSV

SEQ ID NO: 45828 - protein, 168 aa, Homo sapiens; identical to SEQ ID NO: 45827
  Payload ID: 9355
  Gene Symbol: LEUTX
  Gene Name: leucine twenty homeobox
  Uniprot ID: A8MZ59
  ENSP ID: ENSP00000486698

SEQ ID NO: 45829 - protein, 190 aa, Homo sapiens
  Payload ID: 9356
  Gene Symbol: LZIC
  Gene Name: leucine zipper and CTNNBIP1 domain containing
  Uniprot ID: Q8WZA0
  ENSP ID: ENSP00000366418
MASRGKTETSKLKQNLEEQLDRLMQQLQDLEECREELDTDEYEETKKETLEQLSEFNDSLKKIMSGNMTLVDELSGMQLAIQAAISQAFKTPEVIRLFAKKQPGQLRTRLAEMDRDLMVGKLERDLYTQQKVEILTALRKLGEKLTADDEAFLSANAGAILSQFEKVSTDLGSGDKILALASFEVEKTKK

SEQ ID NO: 45830 - protein, 190 aa, Homo sapiens; identical to SEQ ID NO: 45829
  Payload ID: 9356
  Gene Symbol: LZIC
  Gene Name: leucine zipper and CTNNBIP1 domain containing
  Uniprot ID: Q8WZA0
  ENSP ID: ENSP00000366430

SEQ ID NO: 45831 - protein, 190 aa, Homo sapiens; identical to SEQ ID NO: 45829
  Payload ID: 9356
  Gene Symbol: LZIC
  Gene Name: leucine zipper and CTNNBIP1 domain containing
  Uniprot ID: Q8WZA0
  ENSP ID: ENSP00000383695

SEQ ID NO: 45832 - protein, 169 aa, Homo sapiens
  Payload ID: 9356
  Gene Symbol: LZIC
  Gene Name: leucine zipper and CTNNBIP1 domain containing
  ENSP ID: ENSP00000468610
LDTDEYEETKKETLEQLSEFNDSLKKIMSGNMTLVDELSGMQLAIQAAISQAFKTPEVIRLFAKKQPGQLRTRLAEMDRDLMVGKLERDLYTQQKVEILTALRKLGEKLTADDEAFLSANAGAILSQFEKVSTDLGRPPSYMNYLLDSHPSKNIDVPSKISFLLKIQDL

SEQ ID NO: 45833 - protein, 1076 aa, Homo sapiens
  Payload ID: 9357
  Gene Symbol: LUZP1
  Gene Name: leucine zipper protein 1
  Uniprot ID: Q86V48
  ENSP ID: ENSP00000303758
MAEFTSYKETASSRHLRFKLQSLSRRLDELEEATKNLQKAEDELLDLQDKVIQAEGSNSSMLAEIEVLRQRVLRIEGKDEEIKRAEDLCRLMKEKLEEEENLTRELKSEIERLQKRMAELEKLEEAFSRSKNDCTQLCLSLNEERNLTKKISSELEMLRVKVKELESSEDRLDKTEQSLASELEKLKSLTLSFVSERKYLNEKEKENEKLIKELTQKLEQNKKMNRDYTRNASNLERNDLRIEDGISSTLPSKESRRKGGLDYLKQVENETRNKSENEKNRNQEDNKVKDLNQEIEKLKTQIKHFESLEEELKKMKSKNNDLQDNYLSEQNKNKLLASQLEEIKLQIKKQKELENGEVEGEDAFLSSKGRHERTKFRGHGSEASVSKHTARELSPQHKRERLRNREFALNNENYSLSNRQVSSPSFTNRRAAKASHMGVSTDSGTQETKKTEDRFVPGSSQSEGKKSREQPSVLSRYPPAAQEHSKAWKGTSKPGTESGLKGKVEKTTRTFSDTTHGSVPSDPLGRADKASDTSSETVFGKRGHVLGNGSQVTQAANSGCSKAIGALASSRRSSSEGLSKGKKAANGLEADNSCPNSKAPVLSKYPYSCRSQENILQGFSTSHKEGVNQPAAVVMEDSSPHEALRCRVIKSSGREKPDSDDDLDIASLVTAKLVNTTITPEPEPKPQPNSREKAKTRGAPRTSLFENDKDAGMENESVKSVRASTNTMELPDTNGAGVKSQRPFSPREALRSRAIIKPVIVDKDVKKIMGGSGTETTLEKQKPVSKPGPNKVTSSITIYPSDSSSPRAAPGEALRERHTSTSNIQVGLAELTSVSNHVSSPFELSIHKHDITLQLAEAERMADGPLKDRPETVVSRSSIIIKPSDPVERNSHAPPAETIRWKSHSAPSEVGFSDARHVTVRNAWKSRRDLKSLEDPPTRIGKNVESTNSNAYTQRSSTDFSELEQPRSCLFEQGTRRVGPSSGDAPEPSSRRTQSSLTVSEVLTRRNRVGDTITVAAWNHSASMEEEGEDCTLSVYRQLHNSLDPSELPGKQGLPESGRVRAEERLRPTRPCAEEN

SEQ ID NO: 45834 - protein, 1026 aa, Homo sapiens
  Payload ID: 9357
  Gene Symbol: LUZP1
  Gene Name: leucine zipper protein 1
  Uniprot ID: Q86V48
  ENSP ID: ENSP00000313705
MAEFTSYKETASSRHLRFKLQSLSRRLDELEEATKNLQKAEDELLDLQDKVIQAEGSNSSMLAEIEVLRQRVLRIEGKDEEIKRAEDLCRLMKEKLEEEENLTRELKSEIERLQKRMAELEKLEEAFSRSKNDCTQLCLSLNEERNLTKKISSELEMLRVKVKELESSEDRLDKTEQSLASELEKLKSLTLSFVSERKYLNEKEKENEKLIKELTQKLEQNKKMNRDYTRNASNLERNDLRIEDGISSTLPSKESRRKGGLDYLKQVENETRNKSENEKNRNQEDNKVKDLNQEIEKLKTQIKHFESLEEELKKMKSKNNDLQDNYLSEQNKNKLLASQLEEIKLQIKKQKELENGEVEGEDAFLSSKGRHERTKFRGHGSEASVSKHTARELSPQHKRERLRNREFALNNENYSLSNRQVSSPSFTNRRAAKASHMGVSTDSGTQETKKTEDRFVPGSSQSEGKKSREQPSVLSRYPPAAQEHSKAWKGTSKPGTESGLKGKVEKTTRTFSDTTHGSVPSDPLGRADKASDTSSETVFGKRGHVLGNGSQVTQAANSGCSKAIGALASSRRSSSEGLSKGKKAANGLEADNSCPNSKAPVLSKYPYSCRSQENILQGFSTSHKEGVNQPAAVVMEDSSPHEALRCRVIKSSGREKPDSDDDLDIASLVTAKLVNTTITPEPEPKPQPNSREKAKTRGAPRTSLFENDKDAGMENESVKSVRASTNTMELPDTNGAGVKSQRPFSPREALRSRAIIKPVIVDKDVKKIMGGSGTETTLEKQKPVSKPGPNKVTSSITIYPSDSSSPRAAPGEALRERHTSTSNIQVGLAELTSVSNHVSSPFELSIHKHDITLQLAEAERMADGPLKDRPETVVSRSSIIIKPSDPVERNSHAPPAETIRWKSHSAPSEVGFSDARHVTVRNAWKSRRDLKSLEDPPTRIGKNVESTNSNAYTQRSSTDFSELEQPRSCLFEQGTRRVGPSSGDAPEPSSRRTQSSLTVSEVLTRRNRVGDTITVAAWNHSASMSS

SEQ ID NO: 45835 - protein, 1076 aa, Homo sapiens; identical to SEQ ID NO: 45833
  Payload ID: 9357
  Gene Symbol: LUZP1
  Gene Name: leucine zipper protein 1
  Uniprot ID: Q86V48
  ENSP ID: ENSP00000393460

SEQ ID NO: 45836 - protein, 273 aa, Homo sapiens
  Payload ID: 9357
  Gene Symbol: LUZP1
  Gene Name: leucine zipper protein 1
  ENSP ID: ENSP00000428061
MAEFTSYKETASSRHLRFKLQSLSRRLDELEEATKNLQKAEDELLDLQDKVIQAEGSNSSMLAEIEVLRQRVLRIEGKDEEIKRAEDLCRLMKEKLEEEENLTRELKSEIERLQKRMAELEKLEEAFSRSKNDCTQLCLSLNEERNLTKKISSELEMLRVKVKELESSEDRLDKTEQSLASELEKLKSLTLSFVSERKYLNEKEKENEKLIKELTQKLEQNKKMNRDYTRNASNLERNDLRIEDGISSTLPSKESRRKGGLDYLKQVENETRN

SEQ ID NO: 45837 - protein, 35 aa, Homo sapiens
  Payload ID: 9357
  Gene Symbol: LUZP1
  Gene Name: leucine zipper protein 1
  ENSP ID: ENSP00000429657
MAEFTSYKETASSRHLRFKLQSLSRRLDELEEATK

SEQ ID NO: 45838 - protein, 346 aa, Homo sapiens
  Payload ID: 9358
  Gene Symbol: LUZP2
  Gene Name: leucine zipper protein 2
  Uniprot ID: Q86TE4
  ENSP ID: ENSP00000336817
MKFSPAHYLLPLLPALVLSTRQDYEELEKQLKEVFKERSTILRQLTKTSRELDGIKVNLQSLKNDEQSAKTDVQKLLELGQKQREEMKSLQEALQNQLKETSEKAEKHQATINFLKTEVERKSKMIRDLQNENKSLKNKLLSGNKLCGIHAEESKKIQAQLKELRYGKKDLLFKAQQLTDLEQKLAVAKNELEKAALDRESQMKAMKETVQLCLTSVFRDQPPPPLSLITSNPTRMLLPPRNIASKLPDAAAKSKPQQSASGNNESSQVESTKEGNPSTTACDSQDEGRPCSMKHKESPPSNATAETEPIPQKLQMPPCSECEVKKAPEKPLTSFEGMAAREEKIL

SEQ ID NO: 45839 - protein, 260 aa, Homo sapiens
  Payload ID: 9358
  Gene Symbol: LUZP2
  Gene Name: leucine zipper protein 2
  Uniprot ID: Q86TE4
  ENSP ID: ENSP00000432952
MKSLQEALQNQLKETSEKAEKHQATINFLKTEVERKSKMIRDLQNENKSLKNKLLSGNKLCGIHAEESKKIQAQLKELRYGKKDLLFKAQQLTDLEQKLAVAKNELEKAALDRESQMKAMKETVQLCLTSVFRDQPPPPLSLITSNPTRMLLPPRNIASKLPDAAAKSKPQQSASGNNESSQVESTKEGNPSTTACDSQDEGRPCSMKHKESPPSNATAETEPIPQKLQMPPCSECEVKKAPEKPLTSFEGMAAREEKIL

SEQ ID NO: 45840 - protein, 176 aa, Homo sapiens
  Payload ID: 9358
  Gene Symbol: LUZP2
  Gene Name: leucine zipper protein 2
  ENSP ID: ENSP00000437032
MKFSPAHYLLPLLPALVLSTRQDYEELEKQLKEVFKERSTILRQLTKTSRELDGIKVNLQSLKNDEQSAKTDVQKLLELGQKQREEMKSLQEALQNQLKETSEKAEKHQATINFLKTEVERKSKMIRDLQNEAQQLTDLEQKLAVAKNELEKAALDRESQMKAMKETVQLCLTSVF

SEQ ID NO: 45841 - protein, 260 aa, Homo sapiens; identical to SEQ ID NO: 45839
  Payload ID: 9358
  Gene Symbol: LUZP2
  Gene Name: leucine zipper protein 2
  Uniprot ID: Q86TE4
  ENSP ID: ENSP00000480441

SEQ ID NO: 45842 - protein, 313 aa, Homo sapiens
  Payload ID: 9359
  Gene Symbol: LUZP4
  Gene Name: leucine zipper protein 4
  Uniprot ID: Q9P127
  ENSP ID: ENSP00000360988
MASFRKLTLSEKVPPNHPSRKKVNFLDMSLDDIIIYKELEGTNAEEEKNKRQNHSKKESPSRQQSKAHRHRHRRGYSRCRSNSEEGNHDKKPSQKPSGFKSGQHPLNGQPLIEQEKCSDNYEAQAEKNQGQSEGNQHQSEGNPDKSEESQGQPEENHHSERSRNHLERSLSQSDRSQGQLKRHHPQYERSHGQYKRSHGQSERSHGHSERSHGHSERSHGHSERSHGHSKRSRSQGDLVDTQSDLIATQRDLIATQKDLIATQRDLIATQRDLIVTQRDLVATERDLINQSGRSHGQSERHQRYSTGKNTITT

SEQ ID NO: 45843 - protein, 78 aa, Homo sapiens
  Payload ID: 9359
  Gene Symbol: LUZP4
  Gene Name: leucine zipper protein 4
  ENSP ID: ENSP00000360989
MASFRKLTLSEKVPPNHPSRKKVNFLDMSLDDIIIYKELEGTNAEEEKNKRQNHSKKESPSRQQSKAHRHRHRRGEVQ

SEQ ID NO: 45844 - protein, 58 aa, Homo sapiens
  Payload ID: 9360
  Gene Symbol: LUZP6
  Gene Name: leucine zipper protein 6
  Uniprot ID: Q538Z0
  ENSP ID: ENSP00000468007
IKSVISYALYQVQTGSLPVYSSVLTKSPLQLQTVIYRLIVQIQHLNIPSSSSTHSSPF

SEQ ID NO: 45845 - protein, 673 aa, Homo sapiens
  Payload ID: 9361
  Gene Symbol:
  Gene Name: Leucine zipper putative tumor suppressor 3 [Source:UniProtKB/Swiss-Prot
  Acc:O60299]
  Uniprot ID: O60299
  ENSP ID: ENSP00000332123
MAKLETLPVRADPGRDPLLAFAPRPSELGPPDPRLAMGSVGSGVAHAQEFAMKSVGTRTGGGGSQGSFPGPRGSGSGASRERPGRYPSEDKGLANSLYLNGELRGSDHTDVCGNVVGSSGGSSSSGGSDKAPPQYREPSHPPKLLATSGKLDQCSEPLVRPSAFKPVVPKNFHSMQNLCPPQTNGTPEGRQGPGGLKGGLDKSRTMTPAGGSGSGLSDSGRNSLTSLPTYSSSYSQHLAPLSASTSHINRIGTASYGSGSGGSSGGGSGYQDLGTSDSGRASSKSGSSSSMGRPGHLGSGEGGGGGLPFAACSPPSPSALIQELEERLWEKEQEVAALRRSLEQSEAAVAQVLEERQKAWERELAELRQGCSGKLQQVARRAQRAQQGLQLQVLRLQQDKKQLQEEAARLMRQREELEDKVAACQKEQADFLPRIEETKWEVCQKAGEISLLKQQLKDSQADVSQKLSEIVGLRSQLREGRASLREKEEQLLSLRDSFSSKQASLELGEGELPAACLKPALTPVDPAEPQDALATCESDEAKMRRQAGVAAAASLVSVDGEAEAGGESGTRALRREVGRLQAELAAERRARERQGASFAEERRVWLEEKEKVIEYQKQLQLSYVEMYQRNQQLERRLRERGAAGGASTPTPQHGEEKKAWTPSRLERIESTEI

SEQ ID NO: 45846 - protein, 673 aa, Homo sapiens; identical to SEQ ID NO: 45845
  Payload ID: 9361
  Gene Symbol:
  Gene Name: Leucine zipper putative tumor suppressor 3 [Source:UniProtKB/Swiss-Prot
  Acc:O60299]
  Uniprot ID: O60299
  ENSP ID: ENSP00000338166

SEQ ID NO: 45847 - protein, 627 aa, Homo sapiens
  Payload ID: 9361
  Gene Symbol:
  Gene Name: Leucine zipper putative tumor suppressor 3 [Source:UniProtKB/Swiss-Prot
  Acc:O60299]
  ENSP ID: ENSP00000353496
MAKLETLPVRADPGRDPLLAFAPRPSELGPPDPRLAMGSVGSGVAHAQEFAMKSVGTRTGGGGSQGSFPGPRGSGSGASRERPGRYPSEDKGLANSLYLNGELRGSDHTDVCGNVVGSSGGSSSSGGSDKAPPQYREPSHPPKLLATSGKLDQCSEPLVRPSAFKPVVPKNFHSMQNLCPPQTNGTPEGRQGPGGLKGGLDKSRTMTPAGGSGSGLSDSGRNSLTSLPTYSSSYSQHLAPLSASTSHINRIGTASYGSGSGGSSGGGSGYQDLGTSDSGRASSKSGSSSSMGRPGHLGSGEGGGGGLPFAACSPPSPSALIQELEERLWEKEQEVAALRRSLEQSEAAVAQQDKKQLQEEAARLMRQREELEDKVAACQKEQADFLPRIEETKWEVCQKAGEISLLKQQLKDSQADVSQKLSEIVGLRSQLREGRASLREKEEQLLSLRDSFSSKQASLELGEGELPAACLKPALTPVDPAEPQDALATCESDEAKMRRQAGVAAAASLVSVDGEAEAGGESGTRALRREVGRLQAELAAERRARERQGASFAEERRVWLEEKEKVIEYQKQLQLSYVEMYQRNQQLERRLRERGAAGGASTPTPQHGEEKKAWTPSRLERIESTEI

SEQ ID NO: 45848 - protein, 299 aa, Homo sapiens
  Payload ID: 9362
  Gene Symbol: LZTFL1
  Gene Name: leucine zipper transcription factor-like 1
  Uniprot ID: Q9NQ48
  ENSP ID: ENSP00000296135
MAELGLNEHHQNEVINYMRFARSKRGLRLKTVDSCFQDLKESRLVEDTFTIDEVSEVLNGLQAVVHSEVESELINTAYTNVLLLRQLFAQAEKWYLKLQTDISELENRELLEQVAEFEKAEITSSNKKPILDVTKPKLAPLNEGGTAELLNKEILRLQEENEKLKSRLKTIEIQATNALDEKSKLEKALQDLQLDQGNQKDFIKAQDLSNLENTVAALKSEFQKTLNDKTENQKSLEENLATAKHDLLRVQEQLHMAEKELEKKFQQTAAYRNMKEILTKKNDQIKDLRKRLAQYEPED

SEQ ID NO: 45849 - protein, 59 aa, Homo sapiens
  Payload ID: 9362
  Gene Symbol: LZTFL1
  Gene Name: leucine zipper transcription factor-like 1
  ENSP ID: ENSP00000397589
MKSLKSSMDYKLWFIVRWNLSSSTLPIPMCYFCDSCLHKLRSGILSYRQTSLNLKTENY

SEQ ID NO: 45850 - protein, 108 aa, Homo sapiens
  Payload ID: 9362
  Gene Symbol: LZTFL1
  Gene Name: leucine zipper transcription factor-like 1
  ENSP ID: ENSP00000400177
MHECPYQKEVLVSRTGLSSGLWVHRIITEKMISGGLPRFLLPRPTLTEPRRREGSHFWEAKTSVFQALAVSQPTFTDEEPRPREDGKAEKIHQVVPYPPFGDFSKKLG

SEQ ID NO: 45851 - protein, 90 aa, Homo sapiens
  Payload ID: 9362
  Gene Symbol: LZTFL1
  Gene Name: leucine zipper transcription factor-like 1
  ENSP ID: ENSP00000412240
MRFARSKRGLRLKTVDSCFQDLKESRLVEDTFTIDEVSEVLNGLQAVVHSEVESELINTAYTNVLLLRQLFAQAEKWYLKLQTDISELEN

SEQ ID NO: 45852 - protein, 235 aa, Homo sapiens
  Payload ID: 9362
  Gene Symbol: LZTFL1
  Gene Name: leucine zipper transcription factor-like 1
  ENSP ID: ENSP00000416083
  MOD_RES (1)..(1): Any amino acid
XLVEDTFTIDEVSEVLNGLQAVVHSEVESELINTAYTNVLLLRQLFAQAEKWYLKLQTDISELENRELLEQVAEFEKAEITSSNKKPILDVTKPKLAPLNEGGTAELLNKATNALDEKSKLEKALQDLQLDQGNQKDFIKAQDLSNLENTVAALKSEFQKTLNDKTENQKSLEENLATAKHDLLRVQEQLHMAEKELEKKFQQTAAYRNMKEILTKKNDQIKDLRKRLAQYEPED

SEQ ID NO: 45853 - protein, 108 aa, Homo sapiens; identical to SEQ ID NO: 45850
  Payload ID: 9362
  Gene Symbol: LZTFL1
  Gene Name: leucine zipper transcription factor-like 1
  ENSP ID: ENSP00000416427

SEQ ID NO: 45854 - protein, 282 aa, Homo sapiens
  Payload ID: 9362
  Gene Symbol: LZTFL1
  Gene Name: leucine zipper transcription factor-like 1
  Uniprot ID: Q9NQ48
  ENSP ID: ENSP00000439522
MRFARSKRGLRLKTVDSCFQDLKESRLVEDTFTIDEVSEVLNGLQAVVHSEVESELINTAYTNVLLLRQLFAQAEKWYLKLQTDISELENRELLEQVAEFEKAEITSSNKKPILDVTKPKLAPLNEGGTAELLNKEILRLQEENEKLKSRLKTIEIQATNALDEKSKLEKALQDLQLDQGNQKDFIKAQDLSNLENTVAALKSEFQKTLNDKTENQKSLEENLATAKHDLLRVQEQLHMAEKELEKKFQQTAAYRNMKEILTKKNDQIKDLRKRLAQYEPED

SEQ ID NO: 45855 - protein, 256 aa, Homo sapiens
  Payload ID: 9362
  Gene Symbol: LZTFL1
  Gene Name: leucine zipper transcription factor-like 1
  Uniprot ID: Q9NQ48
  ENSP ID: ENSP00000441784
MRNQDPGKMGRQRKSIKLYPTHPLVTFPRSWAKFQEKALLVEDTFTIDEVSEVLNGLQAVVHSEVESELINTAYTNVLLLRQLFAQAEKWYLKLQTDISELENRELLEQVAEFEKAEITSSNKKPILDVTKPKLAPLNEGGTAELLNKEILRLQEENEKLKSRLKTIEIQATNALDEKSKLEKALQDLQLDQGNQKDFIKAQDLSNLENTVAALKSEFQKTLNDKTENQKSLEENLATAKHDLLRVQEQLHMAEKI

SEQ ID NO: 45856 - protein, 146 aa, Homo sapiens
  Payload ID: 9363
  Gene Symbol: LDOC1
  Gene Name: leucine zipper, down-regulated in cancer 1
  Uniprot ID: O95751
  ENSP ID: ENSP00000359557
MVDELVLLLHALLMRHRALSIENSQLMEQLRLLVCERASLLRQVRPPSCPVPFPETFNGESSRLPEFIVQTASYMLVNENRFCNDAMKVAFLISLLTGEAEEWVVPYIEMDSPILGDYRAFLDEMKQCFGWDDDEDDDDEEEEDDY

SEQ ID NO: 45857 - protein, 239 aa, Homo sapiens
  Payload ID: 9364
  Gene Symbol: LDOC1L
  Gene Name: leucine zipper, down-regulated in cancer 1-like
  Uniprot ID: Q6ICC9
  ENSP ID: ENSP00000340434
MVQPQTSKAESPALAASPNAQMDDVIDTLTSLRLTNSALRREASTLRAEKANLTNMLESVMAELTLLRTRARIPGALQITPPISSITSNGTRPMTTPPTSLPEPFSGDPGRLAGFLMQMDRFMIFQASRFPGEAERVAFLVSRLTGEAEKWAIPHMQPDSPLRNNYQGFLAELRRTYKSPLRHARRAQIRKTSASNRAVRERQMLCRQLASAGTGPCPVHPASNGTSPAPALPARARNL

SEQ ID NO: 45858 - protein, 596 aa, Homo sapiens
  Payload ID: 9365
  Gene Symbol: LZTS1
  Gene Name: leucine zipper, putative tumor suppressor 1
  Uniprot ID: Q9Y250
  ENSP ID: ENSP00000265801
MGSVSSLISGHSFHSKHCRASQYKLRKSSHLKKLNRYSDGLLRFGFSQDSGHGKSSSKMGKSEDFFYIKVSQKARGSHHPDYTALSSGDLGGQAGVDFDPSTPPKLMPFSNQLEMGSEKGAVRPTAFKPVLPRSGAILHSSPESASHQLHPAPPDKPKEQELKPGLCSGALSDSGRNSMSSLPTHSTSSSYQLDPLVTPVGPTSRFGGSAHNITQGIVLQDSNMMSLKALSFSDGGSKLGHSNKADKGPSCVRSPISTDECSIQELEQKLLEREGALQKLQRSFEEKELASSLAYEERPRRCRDELEGPEPKGGNKLKQASQKSQRAQQVLHLQVLQLQQEKRQLRQELESLMKEQDLLETKLRSYEREKTSFGPALEETQWEVCQKSGEISLLKQQLKESQTEVNAKASEILGLKAQLKDTRGKLEGLELRTQDLEGALRTKGLELEVCENELQRKKNEAELLREKVNLLEQELQELRAQAALARDMGPPTFPEDVPALQRELERLRAELREERQGHDQMSSGFQHERLVWKEEKEKVIQYQKQLQQSYVAMYQRNQRLEKALQQLARGDSAGEPLEVDLEGADIPYEDIIATEI

SEQ ID NO: 45859 - protein, 596 aa, Homo sapiens; identical to SEQ ID NO: 45858
  Payload ID: 9365
  Gene Symbol: LZTS1
  Gene Name: leucine zipper, putative tumor suppressor 1
  Uniprot ID: Q9Y250
  ENSP ID: ENSP00000370981

SEQ ID NO: 45860 - protein, 537 aa, Homo sapiens
  Payload ID: 9365
  Gene Symbol: LZTS1
  Gene Name: leucine zipper, putative tumor suppressor 1
  Uniprot ID: Q9Y250
  ENSP ID: ENSP00000429263
MGSVSSLISGHSFHSKHCRASQYKLRKSSHLKKLNRYSDGLLRFGFSQDSGHGKSSSKMGKSEDFFYIKVSQKARGSHHPDYTALSSGDLGGQAGVDFDPSTPPKLMPFSNQLEMGSEKGAVRPTAFKPVLPRSGAILHSSPESASHQLHPAPPDKPKEQELKPGLCSGALSDSGRNSMSSLPTHSTSSSYQLDPLVTPVGPTSRFGGSAHNITQGIVLQDSNMMSLKALSFSDGGSKLGHSNKADKGPSCVRSPISTDECSIQELEQKLLEREGALQKLQRSFEEKELASSLAYEERPRRCRDELEGPEPKGGNKLKQASQKSQRAQQVLHLQVLQLQQEKRQLRQELESLMKEQDLLETKLRSYEREKTSFGPALEETQWEVCQKSGEISLLKQQLKESQTEVNAKASEILGLKAQLKDTRGKLEGLELRTQDLEGALRTKGLELEVCENELQRKKNEAELLREKHERLVWKEEKEKVIQYQKQLQQSYVAMYQRNQRLEKALQQLARGDSAGEPLEVDLEGADIPYEDIIATEI

SEQ ID NO: 45861 - protein, 76 aa, Homo sapiens
  Payload ID: 9365
  Gene Symbol: LZTS1
  Gene Name: leucine zipper, putative tumor suppressor 1
  Uniprot ID: Q9Y250
  ENSP ID: ENSP00000479534
MGSVSSLISGHSFHSKHCRASQYKLRKSSHLKKLNRYSDGLLRFGFSQDSGHGKAMTRCPRASSMSGSCGRRRRRR

SEQ ID NO: 45862 - protein, 669 aa, Homo sapiens
  Payload ID: 9366
  Gene Symbol: LZTS2
  Gene Name: leucine zipper, putative tumor suppressor 2
  Uniprot ID: Q9BRK4
  ENSP ID: ENSP00000359240
MAIVQTLPVPLEPAPEAATAPQAPVMGSVSSLISGRPCPGGPAPPRHHGPPGPTFFRQQDGLLRGGYEAQEPLCPAVPPRKAVPVTSFTYINEDFRTESPPSPSSDVEDAREQRAHNAHLRGPPPKLIPVSGKLEKNMEKILIRPTAFKPVLPKPRGAPSLPSFMGPRATGLSGSQGSLTQLFGGPASSSSSSSSSSAADKPLAFSGWASGCPSGTLSDSGRNSLSSLPTYSTGGAEPTTSSPGGHLPSHGSGRGALPGPARGVPTGPSHSDSGRSSSSKSTGSLGGRVAGGLLGSGTRASPDSSSCGERSPPPPPPPPSDEALLHCVLEGKLRDREAELQQLRDSLDENEATMCQAYEERQRHWQREREALREDCAAQAQRAQRAQQLLQLQVFQLQQEKRQLQDDFAQLLQEREQLERRCATLEREQRELGPRLEETKWEVCQKSGEISLLKQQLKESQAELVQKGSELVALRVALREARATLRVSEGRARGLQEAARARELELEACSQELQRHRQEAEQLREKAGQLDAEAAGLREPPVPPATADPFLLAESDEAKVQRAAAGVGGSLRAQVERLRVELQRERRRGEEQRDSFEGERLAWQAEKEQVIRYQKQLQHNYIQMYRRNRQLEQELQQLSLELEARELADLGLAEQAPCICLEEITATEI

SEQ ID NO: 45863 - protein, 669 aa, Homo sapiens; identical to SEQ ID NO: 45862
  Payload ID: 9366
  Gene Symbol: LZTS2
  Gene Name: leucine zipper, putative tumor suppressor 2
  Uniprot ID: Q9BRK4
  ENSP ID: ENSP00000359243

SEQ ID NO: 45864 - protein, 198 aa, Homo sapiens
  Payload ID: 9366
  Gene Symbol: LZTS2
  Gene Name: leucine zipper, putative tumor suppressor 2
  ENSP ID: ENSP00000402042
MAIVQTLPVPLEPAPEAATAPQAPVMGSVSSLISGRPCPGGPAPPRHHGPPGPTFFRQQDGLLRGGYEAQEPLCPAVPPRKAVPVTSFTYINEDFRTESPPSPSSDVEDAREQRAHNAHLRGPPPKLIPVSGKLEKNMEKILIRPTAFKPVLPKPRGAPSLPSFMGPRATGLSGSQGSLTQLFGGPASSSSSSSSSSA

SEQ ID NO: 45865 - protein, 240 aa, Homo sapiens
  Payload ID: 9366
  Gene Symbol: LZTS2
  Gene Name: leucine zipper, putative tumor suppressor 2
  ENSP ID: ENSP00000407713
MAIVQTLPVPLEPAPEAATAPQAPVMGSVSSLISGRPCPGGPAPPRHHGPPGPTFFRQQDGLLRGGYEAQEPLCPAVPPRKAVPVTSFTYINEDFRTESPPSPSSDVEDAREQRAHNAHLRGPPPKLIPVSGKLEKNMEKILIRPTAFKPVLPKPRGAPSLPSFMGPRATGLSGSQGSLTQLFGGPASSSSSSSSSSAADKPLAFSGWASGCPSGTLSDSGRNSLSSLPTYSTGGAEPTT

SEQ ID NO: 45866 - protein, 220 aa, Homo sapiens
  Payload ID: 9366
  Gene Symbol: LZTS2
  Gene Name: leucine zipper, putative tumor suppressor 2
  ENSP ID: ENSP00000416972
MAIVQTLPVPLEPAPEAATAPQAPVMGSVSSLISGRPCPGGPAPPRHHGPPGPTFFRQQDGLLRGGYEAQEPLCPAVPPRKAVPVTSFTYINEDFRTESPPSPSSDVEDAREQRAHNAHLRGPPPKLIPVSGKLEKNMEKILIRPTAFKPVLPKPRGAPSLPSFMGPRATGLSGSQGSLTQLFGGPASSSSSSSSSSAADKPLAFSGWASGCPSGTLSDS

SEQ ID NO: 45867 - protein, 136 aa, Homo sapiens
  Payload ID: 9366
  Gene Symbol: LZTS2
  Gene Name: leucine zipper, putative tumor suppressor 2
  ENSP ID: ENSP00000474819
MAIVQTLPVPLEPAPEAATAPQAPVMGSVSSLISGRPCPGGPAPPRHHGPPGPTFFRQQDGLLRGGYEAQEPLCPAVPPRKAVPVTSFTYINEDFRTESPPSPSSDVEDAREQRAHNAHLRGPPPKLIPVSGKLEK

SEQ ID NO: 45868 - protein, 739 aa, Homo sapiens
  Payload ID: 9367
  Gene Symbol: LETM1
  Gene Name: leucine zipper-EF-hand containing transmembrane protein 1
  Uniprot ID: O95202
  ENSP ID: ENSP00000305653
MASILLRSCRGRAPARLPPPPRYTVPRGSPGDPAHLSCASTLGLRNCLNVPFGCCTPIHPVYTSSRGDHLGCWALRPECLRIVSRAPWTSTSVGFVAVGPQCLPVRGWHSSRPVRDDSVVEKSLKSLKDKNKKLEEGGPVYSPPAEVVVKKSLGQRVLDELKHYYHGFRLLWIDTKIAARMLWRILNGHSLTRRERRQFLRICADLFRLVPFLVFVVVPFMEFLLPVAVKLFPNMLPSTFETQSLKEERLKKELRVKLELAKFLQDTIEEMALKNKAAKGSATKDFSVFFQKIRETGERPSNEEIMRFSKLFEDELTLDNLTRPQLVALCKLLELQSIGTNNFLRFQLTMRLRSIKADDKLIAEEGVDSLNVKELQAACRARGMRALGVTEDRLRGQLKQWLDLHLHQEIPTSLLILSRAMYLPDTLSPADQLKSTLQTLPEIVAKEAQVKVAEVEGEQVDNKAKLEATLQEEAAIQQEHREKELQKRSEVAKDFEPERVVAAPQRPGTEPQPEMPDTVLQSETLKDTAPVLEGLKEEEITKEEIDILSDACSKLQEQKKSLTKEKEELELLKEDVQDYSEDLQEIKKELSKTGEEKYVEESKASKRLTKRVQQMIGQIDGLISQLEMDQQAGKLAPANGMPTGENVISVAELINAMKQVKHIPESKLTSLAAALDENKDGKVNIDDLVKVIELVDKEDVHISTSQVAEIVATLEKEEKVEEKEKAKEKAEKEVAEVKS

SEQ ID NO: 45869 - protein, 396 aa, Homo sapiens
  Payload ID: 9368
  Gene Symbol: LETM2
  Gene Name: leucine zipper-EF-hand containing transmembrane protein 2
  Uniprot ID: Q2VYF4
  ENSP ID: ENSP00000297720
MKNYESKKYSDPSQPGNTVLHPGTRLIQKLHTSTCWLQEVPGKPQLEQATKHPQVTSPQATKETGMEIKEGKQSYRQKIMDELKYYYNGFYLLWIDAKVAARMVWRLLHGQVLTRRERRREEKQKKKMAVKLELAKFLQETMTEMARRNRAKMGDASTQLSSYVKQVQTGHKPSTKEIVRFSKLFEDQLALEHLDRPQLVALCKLLELQTFGTNNLLRFQLLMKLKSIKADDEIIAKEGVTALSVSELQAACRARGMRSLGLTEEQLRQQLTEWQDLHLKENVPPSLLLLSRTFYLIDVKPKPIEIPLSGEAPKTDILVELPTFTESKENMVDLAPQLKGTKDEDFIQPPPVTSSPITPSTPISLPKGPITSSEEPTLQAKSQMTAQNSKASSKGA

SEQ ID NO: 45870 - protein, 491 aa, Homo sapiens
  Payload ID: 9368
  Gene Symbol: LETM2
  Gene Name: leucine zipper-EF-hand containing transmembrane protein 2
  Uniprot ID: Q2VYF4
  ENSP ID: ENSP00000369291
MAFYSYNSVLAIARTRFPSHFVHPTCSSYSPSCAFLHLPDSHLNKTCMKNYESKKYSDPSQPGNTVLHPGTRLIQKLHTSTCWLQEVPGKPQLEQATKHPQVTSPQATKETGMEIKEGKQSYRQKIMDELKYYYNGFYLLWIDAKVAARMVWRLLHGQVLTRRERRRLLRTCVDFFRLVPFMVFLIVPFMEFLLPVFLKLFPEMLPSTFESESKKEEKQKKKMAVKLELAKFLQETMTEMARRNRAKMGDASTQLSSYVKQVQTGHKPSTKEIVRFSKLFEDQLALEHLDRPQLVALCKLLELQTFGTNNLLRFQLLMKLKSIKADDEIIAKEGVTALSVSELQAACRARGMRSLGLTEEQLRQQLTEWQDLHLKENVPPSLLLLSRTFYLIDVKPKPIEIPLSGEAPKTDILVELPTFTESKENMVDLAPQLKGTKDEDFIQPPPVTSSPITPSTPISLPKGPITSSEEPTLQAKSQMTAQNSKASSKGA

SEQ ID NO: 45871 - protein, 444 aa, Homo sapiens
  Payload ID: 9368
  Gene Symbol: LETM2
  Gene Name: leucine zipper-EF-hand containing transmembrane protein 2
  Uniprot ID: Q2VYF4
  ENSP ID: ENSP00000428765
MKNYESKKYSDPSQPGNTVLHPGTRLIQKLHTSTCWLQEVPGKPQLEQATKHPQVTSPQATKETGMEIKEGKQSYRQKIMDELKYYYNGFYLLWIDAKVAARMVWRLLHGQVLTRRERRRLLRTCVDFFRLVPFMVFLIVPFMEFLLPVFLKLFPEMLPSTFESESKKEEKQKKKMAVKLELAKFLQETMTEMARRNRAKMGDASTQLSSYVKQVQTGHKPSTKEIVRFSKLFEDQLALEHLDRPQLVALCKLLELQTFGTNNLLRFQLLMKLKSIKADDEIIAKEGVTALSVSELQAACRARGMRSLGLTEEQLRQQLTEWQDLHLKENVPPSLLLLSRTFYLIDVKPKPIEIPLSGEAPKTDILVELPTFTESKENMVDLAPQLKGTKDEDFIQPPPVTSSPITPSTPISLPKGPITSSEEPTLQAKSQMTAQNSKASSKGA

SEQ ID NO: 45872 - protein, 169 aa, Homo sapiens
  Payload ID: 9368
  Gene Symbol: LETM2
  Gene Name: leucine zipper-EF-hand containing transmembrane protein 2
  ENSP ID: ENSP00000428944
MAFYSYNSVLAIARTRFPSHFVHPTCSSYSPSCAFLHLPDSHLNKTCMKNYESKKYSDPSQPGNTVLHPGTRLIQKLHTSTCWLQEVPGKPQLEQATKHPQVTSPQATKETGMEIKEGKQSYRQKIMDELKYYYNGFYLLWIDAKVAARMVWRLLHGQVLTRRERRRCF

SEQ ID NO: 45873 - protein, 122 aa, Homo sapiens
  Payload ID: 9368
  Gene Symbol: LETM2
  Gene Name: leucine zipper-EF-hand containing transmembrane protein 2
  ENSP ID: ENSP00000429019
MKNYESKKYSDPSQPGNTVLHPGTRLIQKLHTSTCWLQEVPGKPQLEQATKHPQVTSPQATKETGMEIKEGKQSYRQKIMDELKYYYNGFYLLWIDAKVAARMVWRLLHGQVLTRRERRRCF

SEQ ID NO: 45874 - protein, 173 aa, Homo sapiens
  Payload ID: 9368
  Gene Symbol: LETM2
  Gene Name: leucine zipper-EF-hand containing transmembrane protein 2
  ENSP ID: ENSP00000429269
MAFYSYNSVLAIARTRFPSHFVHPTCSSYSPSCAFLHLPDSHLNKTCMKNYESKKYSDPSQPGNTVLHPGTRLIQKLHTSTCWLQEVPGKPQLEQATKHPQVTSPQATKETGMEIKEGKQSYRQKIMDELKYYYNGFYLLWIDAKVAARMVWRLLHGQVLTRRERRRVGKNHI

SEQ ID NO: 45875 - protein, 443 aa, Homo sapiens
  Payload ID: 9368
  Gene Symbol: LETM2
  Gene Name: leucine zipper-EF-hand containing transmembrane protein 2
  ENSP ID: ENSP00000431211
MAFYSYNSVLAIARTRFPSHFVHPTCSSYSPSCAFLHLPDSHLNKTCMKNYESKKYSDPSQPGNTVLHPGTRLIQKLHTSTCWLQEVPGKPQLEQATKHPQVTSPQATKETGMEIKEGKQSYRQKIMDELKYYYNGFYLLWIDAKVAARMVWRLLHGQVLTRRERRREEKQKKKMAVKLELAKFLQETMTEMARRNRAKMGDASTQLSSYVKQVQTGHKPSTKEIVRFSKLFEDQLALEHLDRPQLVALCKLLELQTFGTNNLLRFQLLMKLKSIKADDEIIAKEGVTALSVSELQAACRARGMRSLGLTEEQLRQQLTEWQDLHLKENVPPSLLLLSRTFYLIDVKPKPIEIPLSGEAPKTDILVELPTFTESKENMVDLAPQLKGTKDEDFIQPPPVTSSPITPSTPISLPKGPITSSEEPTLQAKSQMTAQNSKASSKGA

SEQ ID NO: 45876 - protein, 116 aa, Homo sapiens
  Payload ID: 9368
  Gene Symbol: LETM2
  Gene Name: leucine zipper-EF-hand containing transmembrane protein 2
  ENSP ID: ENSP00000432080
MAFYSYNSVLAIARTRFPSHFVHPTCSSYSPSCAFLHLPDSHLNKTCMKNYESKKYSDPSQPGNTVLHPGTRLIQKLHTSTCWLQEVPGKPQLEQATKHPQVTSPQATKETGMEIK

SEQ ID NO: 45877 - protein, 86 aa, Homo sapiens
  Payload ID: 9368
  Gene Symbol: LETM2
  Gene Name: leucine zipper-EF-hand containing transmembrane protein 2
  ENSP ID: ENSP00000432607
  MOD_RES (1)..(1): Any amino acid
XENVPPSLLLLSRTFYLIDVKPKPIEIPLSGEDEDFIQPPPVTSSPITPSTPISLPKGPITSSEEPTLQAKSQMTAQNSKASSKGA

SEQ ID NO: 45878 - protein, 142 aa, Homo sapiens
  Payload ID: 9368
  Gene Symbol: LETM2
  Gene Name: leucine zipper-EF-hand containing transmembrane protein 2
  ENSP ID: ENSP00000432955
MAFYSYNSVLAIARTRFPSHFVHPTCSSYSPSCAFLHLPDSHLNKTCMKNYESKKYSDPSQPGNTVLHPGTRLIQKLHTSTCWLQEVPGKPQLEQATKHPQVTSPQATKETGMEIKEGKQSYRQKIMDELKYYYNGFYLLWI

SEQ ID NO: 45879 - protein, 277 aa, Homo sapiens
  Payload ID: 9368
  Gene Symbol: LETM2
  Gene Name: leucine zipper-EF-hand containing transmembrane protein 2
  Uniprot ID: Q2VYF4
  ENSP ID: ENSP00000434867
MEEKQKKKMAVKLELAKFLQETMTEMARRNRAKMGDASTQLSSYVKQVQTGHKPSTKEIVRFSKLFEDQLALEHLDRPQLVALCKLLELQTFGTNNLLRFQLLMKLKSIKADDEIIAKEGVTALSVSELQAACRARGMRSLGLTEEQLRQQLTEWQDLHLKENVPPSLLLLSRTFYLIDVKPKPIEIPLSGEAPKTDILVELPTFTESKENMVDLAPQLKGTKDEDFIQPPPVTSSPITPSTPISLPKGPITSSEEPTLQAKSQMTAQNSKASSKGA

SEQ ID NO: 45880 - protein, 692 aa, Homo sapiens
  Payload ID: 9369
  Gene Symbol: LEKR1
  Gene Name: leucine, glutamate and lysine rich 1
  ENSP ID: ENSP00000348936
MDHHIPMHALPEEIQKMLPEEKVCKYCGVSYLILHEFKAMEEKVKAMEKEMKFYQGSVDREKRLQEKLHSLSQELEQYKIDNKSKTERIYDVGMQLKSQQNEFQKVKKQLSHLQDELKIKYRQSYIFSQRLSEYKYFWNKTLSLLTFTKRELTSIKNEVYDNYQNWTSLKGAVFLQIKSISETALTEIDILNKSLTVSQRNKVCLEKEMKNLKLLSDAAILRSQQIRTSRQQEVNLQTRCYDLQKEVLDLQCLVEALGLKLQKAVTEMDNYKEMLMNKSNEADDCQRELKKLKFESIISESQHTMLLKEKEDSLMTCQQIYKALQEELTVKEKQEEDIKRRINLAENELEITKTLLNQTREEVLTLKNERELMLISHQKSIEQLQETLRQKLLSDDNWKEKIEAELAKERAQHLVEFEEQALLFKEETKLQLDIEKEKHQDVIQKYKKEQEELQMKISDLITGATRDLRQEVTTLKEKLHKSHIRYTEESNSKEKEIENLKNLVAEFESRLKKEIDSNDSVSENLRKEMEQKSDELKRVMLAQTQLIEQFNQSQEENTFLQETVRRECEERFELTEALSQAREQLLELSKLRGSLPFSPCSLSKGSLTSPAAAVSNHGERSLARLNSEKGIQIPNLRGVSKPTTFPTSDKPKRVRSGVPILPQPHPPRGGASSANETRQRLAAILRRRRSQQ

SEQ ID NO: 45881 - protein, 388 aa, Homo sapiens [sequence omitted]

SEQ ID NO: 45882 - protein, 123 aa, Homo sapiens
  Payload ID: 9369
  Gene Symbol: LEKR1
  Gene Name: leucine, glutamate and lysine rich 1
  ENSP ID: ENSP00000421730
MDHHIPMHALPEEIQKMLPEEKVCKYCGVSYLILHEFKAMEEKVKAMEKEMKFYQGSVDREKRLQEKLHSLSQELEQYKIDNKSKTESKIYFRLMLRLEVEHCQLKERMPDLQHSVTEPYIGL

SEQ ID NO: 45883 - protein, 132 aa, Homo sapiens
  Payload ID: 9369
  Gene Symbol: LEKR1
  Gene Name: leucine, glutamate and lysine rich 1
  ENSP ID: ENSP00000425282
MDHHIPMHALPEEIQKMLPEEKVCKYCGVSYLILHEFKAMEEKVKAMEKEMKFYQGSVDREKRLQEKLHSLSQELEQYKIDNKSKTERIYDVGMQLKSQQNEFQKVKKQLSHLQDELKIKYRQSYIFRLCFC

SEQ ID NO: 45884 - protein, 110 aa, Homo sapiens
  Payload ID: 9369
  Gene Symbol: LEKR1
  Gene Name: leucine, glutamate and lysine rich 1
  ENSP ID: ENSP00000425746
MDHHIPMHALPEEIQKMLPEEKVCKYCGVSYLILHEFKAMEEKVKAMEKEMKFYQGSVDREKRLQEKLHSLSQELEQYKIDNKSKTERLSMFFFSIIYLVERQLQEINTL

SEQ ID NO: 45885 - protein, 132 aa, Homo sapiens; identical to SEQ ID NO: 45883
  Payload ID: 9369
  Gene Symbol: LEKR1
  Gene Name: leucine, glutamate and lysine rich 1
  ENSP ID: ENSP00000474182

SEQ ID NO: 45886 - protein, 347 aa, Homo sapiens
  Payload ID: 9370
  Gene Symbol: LRG1
  Gene Name: leucine-rich alpha-2-glycoprotein 1
  Uniprot ID: P02750
  ENSP ID: ENSP00000302621
MSSWSRQRPKSPGGIQPHVSRTLFLLLLLAASAWGVTLSPKDCQVFRSDHGSSISCQPPAEIPGYLPADTVHLAVEFFNLTHLPANLLQGASKLQELHLSSNGLESLSPEFLRPVPQLRVLDLTRNALTGLPPGLFQASATLDTLVLKENQLEVLEVSWLHGLKALGHLDLSGNRLRKLPPGLLANFTLLRTLDLGENQLETLPPDLLRGPLQLERLHLEGNKLQVLGKDLLLPQPDLRYLFLNGNKLARVAAGAFQGLRQLDMLDLSNNSLASVPEGLWASLGQPNWDMRDGFDISGNPWICDQNLSDLYRWLQAQKDKMFSQNDTRCAGPEAVKGQTLLAVAKSQ

SEQ ID NO: 45887 - protein, 1394 aa, Homo sapiens
  Payload ID: 9371
  Gene Symbol: LRPPRC
  Gene Name: leucine-rich pentatricopeptide repeat containing
  Uniprot ID: P42704
  ENSP ID: ENSP00000260665
MAALLRSARWLLRAGAAPRLPLSLRLLPGGPGRLHAASYLPAARAGPVAGGLLSPARLYAIAAKEKDIQEESTFSSRKISNQFDWALMRLDLSVRRTGRIPKKLLQKVFNDTCRSGGLGGSHALLLLRSCGSLLPELKLEERTEFAHRIWDTLQKLGAVYDVSHYNALLKVYLQNEYKFSPTDFLAKMEEANIQPNRVTYQRLIASYCNVGDIEGASKILGFMKTKDLPVTEAVFSALVTGHARAGDMENAENILTVMRDAGIEPGPDTYLALLNAYAEKGDIDHVKQTLEKVEKSELHLMDRDLLQIIFSFSKAGYPQYVSEILEKVTCERRYIPDAMNLILLLVTEKLEDVALQILLACPVSKEDGPSVFGSFFLQHCVTMNTPVEKLTDYCKKLKEVQMHSFPLQFTLHCALLANKTDLAKALMKAVKEEGFPIRPHYFWPLLVGRRKEKNVQGIIEILKGMQELGVHPDQETYTDYVIPCFDSVNSARAILQENGCLSDSDMFSQAGLRSEAANGNLDFVLSFLKSNTLPISLQSIRSSLLLGFRRSMNINLWSEITELLYKDGRYCQEPRGPTEAVGYFLYNLIDSMSDSEVQAKEEHLRQYFHQLEKMNVKIPENIYRGIRNLLESYHVPELIKDAHLLVESKNLDFQKTVQLTSSELESTLETLKAENQPIRDVLKQLILVLCSEENMQKALELKAKYESDMVTGGYAALINLCCRHDKVEDALNLKEEFDRLDSSAVLDTGKYVGLVRVLAKHGKLQDAINILKEMKEKDVLIKDTTALSFFHMLNGAALRGEIETVKQLHEAIVTLGLAEPSTNISFPLVTVHLEKGDLSTALEVAIDCYEKYKVLPRIHDVLCKLVEKGETDLIQKAMDFVSQEQGEMVMLYDLFFAFLQTGNYKEAKKIIETPGIRARSARLQWFCDRCVANNQVETLEKLVELTQKLFECDRDQMYYNLLKLYKINGDWQRADAVWNKIQEENVIPREKTLRLLAEILREGNQEVPFDVPELWYEDEKHSLNSSSASTTEPDFQKDILIACRLNQKKGAYDIFLNAKEQNIVFNAETYSNLIKLLMSEDYFTQAMEVKAFAETHIKGFTLNDAANSRLIITQVRRDYLKEAVTTLKTVLDQQQTPSRLAVTRVIQALAMKGDVENIEVVQKMLNGLEDSIGLSKMVFINNIALAQIKNNNIDAAIENIENMLTSENKVIEPQYFGLAYLFRKVIEEQLEPAVEKISIMAERLANQFAIYKPVTDFFLQLVDAGKVDDARALLQRCGAIAEQTPILLLFLLRNSRKQGKASTVKSVLELIPELNEKEEAYNSLMKSYVSEKDVTSAKALYEHLTAKNTKLDDLFLKRYASLLKYAGEPVPFIEPPESFEFYAQQLRKLRENSS

SEQ ID NO: 45888 - protein, 531 aa, Homo sapiens
  Payload ID: 9371
  Gene Symbol: LRPPRC
  Gene Name: leucine-rich pentatricopeptide repeat containing
  ENSP ID: ENSP00000386234
MAALLRSARWLLRAGAAPRLPLSLRLLPGGPGRLHAASYLPAARAGPVAGGLLSPARLYAIAAKEKDIQEESTFSSRKISNQFDWALMRLDLSVRRTGRIPKKLLQKVFNDTCRSGGLGGSHALLLLRSCGSLLPELKLEERTEFAHRIWDTLQKLGAVYDVSHYNALLKVYLQNEYKFSPTDFLAKMEEANIQPNRVTYQRLIASYCNVGDIEGASKILGFMKTKDLPVTEAVFSALVTGHARAGDMENAENILTVMRDAGIEPGPDTYLALLNAYAEKGDIDHVKQTLEKVEKSELHLMDRDLLQIIFSFSKAGYPQYVSEILEKVTCERRYIPDAMNLILLLVTEKLEDVALQILLACPVSKEDGPSVFGSFFLQHCVTMNTPVEKLTDYCKKLKEVQMHSFPLQFTLHCALLANKTDLAKALMKAVKEEGFPIRPHYFWPLLVGRRKEKNVQGIIEILKGMQELGVHPDQETYTDYVIPCFDSVNSARAILQENGCLSDSDMFSQAGLRSEAANGNLDFVLSFYFPI

SEQ ID NO: 45889 - protein, 504 aa, Homo sapiens
  Payload ID: 9371
  Gene Symbol: LRPPRC
  Gene Name: leucine-rich pentatricopeptide repeat containing
  ENSP ID: ENSP00000386562
MAALLRSARWLLRAGAAPRLPLSLRLLPGGPGRLHAASYLPAARAGPVAGGLLSPARLYAIAAKEKDIQEESTFSSRKISNQFDWALMRLDLSVRRTGRIPKKLLQKVFNDTCRSGGLGGSHALLLLRSCGSLLPELKLEERTEFAHRIWDTLQKLGAVYDVSHYNALLKVYLQNEYKFSPTDFLAKMEEANIQPNRVTYQRLIASYCNVGDIEGASKILGFMKTKDLPVTEAVFSALVTGHARAGDMENAENILTVMRDAGIEPGPDTYLALLNAYAEKGDIDHVKQTLEKVEKSELHLMDRDLLQIIFSFSKAGYPQYVSEILEKVTCERRYIPDAMNLILLLVTEKLEDVALQILLACPVSKEDGPSVFGSFFLQHCVTMNTPVEKLTDYCKKLKEVQMHSFPLQFTLHCALLANKTDLAKALMKAVKEEGFPIRPHYFWPLLVGRRKEKNVQGIIEILKGMQELGVHPDQETYTDYVIPCFDSVNSARAILQVSTSVVLI

SEQ ID NO: 45890 - protein, 359 aa, Homo sapiens
  Payload ID: 9371
  Gene Symbol: LRPPRC
  Gene Name: leucine-rich pentatricopeptide repeat containing
  ENSP ID: ENSP00000403637
MPPPICPPLAPGPWPGECPGPFSRGLLSPARLYAIAAKEKDIQEESTFSSRKISNQFDWALMRLDLSVRRTGRIPKKLLQKVFNDTCRSGGLGGSHALLLLRSCGSLLPELKLEERTEFAHRIWDTLQKLGAVYDVSHYNALLKVYLQNEYKFSPTDFLAKMEEANIQPNRVTYQRLIASYCNVGDIEGASKILGFMKTKDLPVTEAVFSALVTGHARAGDMENAENILTVMRDAGIEPGPDTYLALLNAYAEKGDIDHVKQTLEKVEKSELHLMDRDLLQIIFSFSKAGYPQYVSEILEKVTCERRYIPDAMNLILLLVTEKLEDVALQILLACPVSKEDGPSVFGSFFLQHCVTMNT

SEQ ID NO: 45891 - protein, 77 aa, Homo sapiens
  Payload ID: 9371
  Gene Symbol: LRPPRC
  Gene Name: leucine-rich pentatricopeptide repeat containing
  ENSP ID: ENSP00000414207
VTDFFLQLVDAGKVDDARALLQRCGAIAEQTPILLLFLLRNSRKQGKASTVKSVLELIPELNEKEEAYNSLMKSYEK

SEQ ID NO: 45892 - protein, 951 aa, Homo sapiens
  Payload ID: 9372
  Gene Symbol: LGR4
  Gene Name: leucine-rich repeat containing G protein-coupled receptor 4
  Uniprot ID: Q9BXB1
  ENSP ID: ENSP00000368516
MPGPLGLLCFLALGLLGSAGPSGAAPPLCAAPCSCDGDRRVDCSGKGLTAVPEGLSAFTQALDISMNNITQLPEDAFKNFPFLEELQLAGNDLSFIHPKALSGLKELKVLTLQNNQLKTVPSEAIRGLSALQSLRLDANHITSVPEDSFEGLVQLRHLWLDDNSLTEVPVHPLSNLPTLQALTLALNKISSIPDFAFTNLSSLVVLHLHNNKIRSLSQHCFDGLDNLETLDLNYNNLGEFPQAIKALPSLKELGFHSNSISVIPDGAFDGNPLLRTIHLYDNPLSFVGNSAFHNLSDLHSLVIRGASMVQQFPNLTGTVHLESLTLTGTKISSIPNNLCQEQKMLRTLDLSYNNIRDLPSFNGCHALEEISLQRNQIYQIKEGTFQGLISLRILDLSRNLIHEIHSRAFATLGPITNLDVSFNELTSFPTEGLNGLNQLKLVGNFKLKEALAAKDFVNLRSLSVPYAYQCCAFWGCDSYANLNTEDNSLQDHSVAQEKGTADAANVTSTLENEEHSQIIIHCTPSTGAFKPCEYLLGSWMIRLTVWFIFLVALFFNLLVILTTFASCTSLPSSKLFIGLISVSNLFMGIYTGILTFLDAVSWGRFAEFGIWWETGSGCKVAGFLAVFSSESAIFLLMLATVERSLSAKDIMKNGKSNHLKQFRVAALLAFLGATVAGCFPLFHRGEYSASPLCLPFPTGETPSLGFTVTLVLLNSLAFLLMAVIYTKLYCNLEKEDLSENSQSSMIKHVAWLIFTNCIFFCPVAFFSFAPLITAISISPEIMKSVTLIFFPLPACLNPVLYVFFNPKFKEDWKLLKRRVTKKSGSVSVSISSQGGCLEQDFYYDCGMYSHLQGNLTVCDCCESFLLTKPVSCKHLIKSHSCPALAVASCQRPEGYWSDCGTQSAHSDYADEEDSFVSDSSDQVQACGRACFYQSRGFPLVRYAYNLPRVKD

SEQ ID NO: 45893 - protein, 927 aa, Homo sapiens
  Payload ID: 9372
  Gene Symbol: LGR4
  Gene Name: leucine-rich repeat containing G protein-coupled receptor 4
  Uniprot ID: Q9BXB1
  ENSP ID: ENSP00000374508
MPGPLGLLCFLALGLLGSAGPSGAAPPLCAAPCSCDGDRRVDCSGKGLTAVPEGLSAFTQALQLAGNDLSFIHPKALSGLKELKVLTLQNNQLKTVPSEAIRGLSALQSLRLDANHITSVPEDSFEGLVQLRHLWLDDNSLTEVPVHPLSNLPTLQALTLALNKISSIPDFAFTNLSSLVVLHLHNNKIRSLSQHCFDGLDNLETLDLNYNNLGEFPQAIKALPSLKELGFHSNSISVIPDGAFDGNPLLRTIHLYDNPLSFVGNSAFHNLSDLHSLVIRGASMVQQFPNLTGTVHLESLTLTGTKISSIPNNLCQEQKMLRTLDLSYNNIRDLPSFNGCHALEEISLQRNQIYQIKEGTFQGLISLRILDLSRNLIHEIHSRAFATLGPITNLDVSFNELTSFPTEGLNGLNQLKLVGNFKLKEALAAKDFVNLRSLSVPYAYQCCAFWGCDSYANLNTEDNSLQDHSVAQEKGTADAANVTSTLENEEHSQIIIHCTPSTGAFKPCEYLLGSWMIRLTVWFIFLVALFFNLLVILTTFASCTSLPSSKLFIGLISVSNLFMGIYTGILTFLDAVSWGRFAEFGIWWETGSGCKVAGFLAVFSSESAIFLLMLATVERSLSAKDIMKNGKSNHLKQFRVAALLAFLGATVAGCFPLFHRGEYSASPLCLPFPTGETPSLGFTVTLVLLNSLAFLLMAVIYTKLYCNLEKEDLSENSQSSMIKHVAWLIFTNCIFFCPVAFFSFAPLITAISISPEIMKSVTLIFFPLPACLNPVLYVFFNPKFKEDWKLLKRRVTKKSGSVSVSISSQGGCLEQDFYYDCGMYSHLQGNLTVCDCCESFLLTKPVSCKHLIKSHSCPALAVASCQRPEGYWSDCGTQSAHSDYADEEDSFVSDSSDQVQACGRACFYQSRGFPLVRYAYNLPRVKD

SEQ ID NO: 45894 - protein, 158 aa, Homo sapiens
  Payload ID: 9372
  Gene Symbol: LGR4
  Gene Name: leucine-rich repeat containing G protein-coupled receptor 4
  ENSP ID: ENSP00000431650
MPGPLGLLCFLALGLLGSAGPSGAAPPLCAAPCSCDGDRRVDCSGKGLTAVPEGLSAFTQALDISMNNITQLPEDAFKNFPFLEELRLDANHITSVPEDSFEGLVQLRHLWLDDNSLTEVPVHPLSNLPTLQALTLALNKISSIPDFAFTNLSSLVVL

SEQ ID NO: 45895 - protein, 907 aa, Homo sapiens
  Payload ID: 9373
  Gene Symbol: LGR5
  Gene Name: leucine-rich repeat containing G protein-coupled receptor 5
  Uniprot ID: O75473
  ENSP ID: ENSP00000266674
MDTSRLGVLLSLPVLLQLATGGSSPRSGVLLRGCPTHCHCEPDGRMLLRVDCSDLGLSELPSNLSVFTSYLDLSMNNISQLLPNPLPSLRFLEELRLAGNALTYIPKGAFTGLYSLKVLMLQNNQLRHVPTEALQNLRSLQSLRLDANHISYVPPSCFSGLHSLRHLWLDDNALTEIPVQAFRSLSALQAMTLALNKIHHIPDYAFGNLSSLVVLHLHNNRIHSLGKKCFDGLHSLETLDLNYNNLDEFPTAIRTLSNLKELGFHSNNIRSIPEKAFVGNPSLITIHFYDNPIQFVGRSAFQHLPELRTLTLNGASQITEFPDLTGTANLESLTLTGAQISSLPQTVCNQLPNLQVLDLSYNLLEDLPSFSVCQKLQKIDLRHNEIYEIKVDTFQQLLSLRSLNLAWNKIAIIHPNAFSTLPSLIKLDLSSNLLSSFPITGLHGLTHLKLTGNHALQSLISSENFPELKVIEMPYAYQCCAFGVCENAYKISNQWNKGDNSSMDDLHKKDAGMFQAQDERDLEDFLLDFEEDLKALHSVQCSPSPGPFKPCEHLLDGWLIRIGVWTIAVLALTCNALVTSTVFRSPLYISPIKLLIGVIAAVNMLTGVSSAVLAGVDAFTFGSFARHGAWWENGVGCHVIGFLSIFASESSVFLLTLAALERGFSVKYSAKFETKAPFSSLKVIILLCALLALTMAAVPLLGGSKYGASPLCLPLPFGEPSTMGYMVALILLNSLCFLMMTIAYTKLYCNLDKGDLENIWDCSMVKHIALLLFTNCILNCPVAFLSFSSLINLTFISPEVIKFILLVVVPLPACLNPLLYILFNPHFKEDLVSLRKQTYVWTRSKHPSLMSINSDDVEKQSCDSTQALVTFTSSSITYDLPPSSVPSPAYPVTESCHLSSVAFVPCL

SEQ ID NO: 45896 - protein, 883 aa, Homo sapiens
  Payload ID: 9373
  Gene Symbol: LGR5
  Gene Name: leucine-rich repeat containing G protein-coupled receptor 5
  Uniprot ID: O75473
  ENSP ID: ENSP00000441035
MDTSRLGVLLSLPVLLQLATGGSSPRSGVLLRGCPTHCHCEPDGRMLLRVDCSDLGLSELPSNLSVFTSYLDLSMNNISQLLPNPLPSLRFLEELRLAGNALTYIPKGAFTGLYSLKVLMLQNNQLRHVPTEALQNLRSLQSLRLDANHISYVPPSCFSGLHSLRHLWLDDNALTEIPVQAFRSLSALQAMTLALNKIHHIPDYAFGNLSSLVVLHLHNNRIHSLGKKCFDGLHSLETLDLNYNNLDEFPTAIRTLSNLKELHFYDNPIQFVGRSAFQHLPELRTLTLNGASQITEFPDLTGTANLESLTLTGAQISSLPQTVCNQLPNLQVLDLSYNLLEDLPSFSVCQKLQKIDLRHNEIYEIKVDTFQQLLSLRSLNLAWNKIAIIHPNAFSTLPSLIKLDLSSNLLSSFPITGLHGLTHLKLTGNHALQSLISSENFPELKVIEMPYAYQCCAFGVCENAYKISNQWNKGDNSSMDDLHKKDAGMFQAQDERDLEDFLLDFEEDLKALHSVQCSPSPGPFKPCEHLLDGWLIRIGVWTIAVLALTCNALVTSTVFRSPLYISPIKLLIGVIAAVNMLTGVSSAVLAGVDAFTFGSFARHGAWWENGVGCHVIGFLSIFASESSVFLLTLAALERGFSVKYSAKFETKAPFSSLKVIILLCALLALTMAAVPLLGGSKYGASPLCLPLPFGEPSTMGYMVALILLNSLCFLMMTIAYTKLYCNLDKGDLENIWDCSMVKHIALLLFTNCILNCPVAFLSFSSLINLTFISPEVIKFILLVVVPLPACLNPLLYILFNPHFKEDLVSLRKQTYVWTRSKHPSLMSINSDDVEKQSCDSTQALVTFTSSSITYDLPPSSVPSPAYPVTESCHLSSVAFVPCL

SEQ ID NO: 45897 - protein, 835 aa, Homo sapiens
  Payload ID: 9373
  Gene Symbol: LGR5
  Gene Name: leucine-rich repeat containing G protein-coupled receptor 5
  Uniprot ID: O75473
  ENSP ID: ENSP00000443033
MDTSRLGVLLSLPVLLQLATGGSSPRSGVLLRGCPTHCHCEPDGRMLLRVDCSDLGLSELPSNLSVFTSYLDLSMNNISQLLPNPLPSLRFLEELRLAGNALTYIPKGAFTGLYSLKVLMLQNNQLRHVPTEALQNLRSLQSLHLHNNRIHSLGKKCFDGLHSLETLDLNYNNLDEFPTAIRTLSNLKELGFHSNNIRSIPEKAFVGNPSLITIHFYDNPIQFVGRSAFQHLPELRTLTLNGASQITEFPDLTGTANLESLTLTGAQISSLPQTVCNQLPNLQVLDLSYNLLEDLPSFSVCQKLQKIDLRHNEIYEIKVDTFQQLLSLRSLNLAWNKIAIIHPNAFSTLPSLIKLDLSSNLLSSFPITGLHGLTHLKLTGNHALQSLISSENFPELKVIEMPYAYQCCAFGVCENAYKISNQWNKGDNSSMDDLHKKDAGMFQAQDERDLEDFLLDFEEDLKALHSVQCSPSPGPFKPCEHLLDGWLIRIGVWTIAVLALTCNALVTSTVFRSPLYISPIKLLIGVIAAVNMLTGVSSAVLAGVDAFTFGSFARHGAWWENGVGCHVIGFLSIFASESSVFLLTLAALERGFSVKYSAKFETKAPFSSLKVIILLCALLALTMAAVPLLGGSKYGASPLCLPLPFGEPSTMGYMVALILLNSLCFLMMTIAYTKLYCNLDKGDLENIWDCSMVKHIALLLFTNCILNCPVAFLSFSSLINLTFISPEVIKFILLVVVPLPACLNPLLYILFNPHFKEDLVSLRKQTYVWTRSKHPSLMSINSDDVEKQSCDSTQALVTFTSSSITYDLPPSSVPSPAYPVTESCHLSSVAFVPCL

SEQ ID NO: 45898 - protein, 915 aa, Homo sapiens
  Payload ID: 9374
  Gene Symbol: LGR6
  Gene Name: leucine-rich repeat containing G protein-coupled receptor 6
  Uniprot ID: Q9HBX8
  ENSP ID: ENSP00000255432
MGRPRLTLVCQVSIIISARDLSMNNLTELQPGLFHHLRFLEELRLSGNHLSHIPGQAFSGLYSLKILMLQNNQLGGIPAEALWELPSLQSLRLDANLISLVPERSFEGLSSLRHLWLDDNALTEIPVRALNNLPALQAMTLALNRISHIPDYAFQNLTSLVVLHLHNNRIQHLGTHSFEGLHNLETLDLNYNKLQEFPVAIRTLGRLQELGFHNNNIKAIPEKAFMGNPLLQTIHFYDNPIQFVGRSAFQYLPKLHTLSLNGAMDIQEFPDLKGTTSLEILTLTRAGIRLLPSGMCQQLPRLRVLELSHNQIEELPSLHRCQKLEEIGLQHNRIWEIGADTFSQLSSLQALDLSWNAIRSIHPEAFSTLHSLVKLDLTDNQLTTLPLAGLGGLMHLKLKGNLALSQAFSKDSFPKLRILEVPYAYQCCPYGMCASFFKASGQWEAEDLHLDDEESSKRPLGLLARQAENHYDQDLDELQLEMEDSKPHPSVQCSPTPGPFKPCEYLFESWGIRLAVWAIVLLSVLCNGLVLLTVFAGGPVPLPPVKFVVGAIAGANTLTGISCGLLASVDALTFGQFSEYGARWETGLGCRATGFLAVLGSEASVLLLTLAAVQCSVSVSCVRAYGKSPSLGSVRAGVLGCLALAGLAAALPLASVGEYGASPLCLPYAPPEGQPAALGFTVALVMMNSFCFLVVAGAYIKLYCDLPRGDFEAVWDCAMVRHVAWLIFADGLLYCPVAFLSFASMLGLFPVTPEAVKSVLLVVLPLPACLNPLLYLLFNPHFRDDLRRLRPRAGDSGPLAYAAAGELEKSSCDSTQALVAFSDVDLILEASEAGRPPGLETYGFPSVTLISCQQPGAPRLEGSHCVEPEGNHFGNPQPSMDGELLLRAEGSTPAGGGLSGGGGFQPSGLAFASHV

SEQ ID NO: 45899 - protein, 967 aa, Homo sapiens
  Payload ID: 9374
  Gene Symbol: LGR6
  Gene Name: leucine-rich repeat containing G protein-coupled receptor 6
  Uniprot ID: Q9HBX8
  ENSP ID: ENSP00000356247
MPSPPGLRALWLCAALCASRRAGGAPQPGPGPTACPAPCHCQEDGIMLSADCSELGLSAVPGDLDPLTAYLDLSMNNLTELQPGLFHHLRFLEELRLSGNHLSHIPGQAFSGLYSLKILMLQNNQLGGIPAEALWELPSLQSLRLDANLISLVPERSFEGLSSLRHLWLDDNALTEIPVRALNNLPALQAMTLALNRISHIPDYAFQNLTSLVVLHLHNNRIQHLGTHSFEGLHNLETLDLNYNKLQEFPVAIRTLGRLQELGFHNNNIKAIPEKAFMGNPLLQTIHFYDNPIQFVGRSAFQYLPKLHTLSLNGAMDIQEFPDLKGTTSLEILTLTRAGIRLLPSGMCQQLPRLRVLELSHNQIEELPSLHRCQKLEEIGLQHNRIWEIGADTFSQLSSLQALDLSWNAIRSIHPEAFSTLHSLVKLDLTDNQLTTLPLAGLGGLMHLKLKGNLALSQAFSKDSFPKLRILEVPYAYQCCPYGMCASFFKASGQWEAEDLHLDDEESSKRPLGLLARQAENHYDQDLDELQLEMEDSKPHPSVQCSPTPGPFKPCEYLFESWGIRLAVWAIVLLSVLCNGLVLLTVFAGGPVPLPPVKFVVGAIAGANTLTGISCGLLASVDALTFGQFSEYGARWETGLGCRATGFLAVLGSEASVLLLTLAAVQCSVSVSCVRAYGKSPSLGSVRAGVLGCLALAGLAAALPLASVGEYGASPLCLPYAPPEGQPAALGFTVALVMMNSFCFLVVAGAYIKLYCDLPRGDFEAVWDCAMVRHVAWLIFADGLLYCPVAFLSFASMLGLFPVTPEAVKSVLLVVLPLPACLNPLLYLLFNPHFRDDLRRLRPRAGDSGPLAYAAAGELEKSSCDSTQALVAFSDVDLILEASEAGRPPGLETYGFPSVTLISCQQPGAPRLEGSHCVEPEGNHFGNPQPSMDGELLLRAEGSTPAGGGLSGGGGFQPSGLAFASHV

SEQ ID NO: 45900 - protein, 828 aa, Homo sapiens
  Payload ID: 9374
  Gene Symbol: LGR6
  Gene Name: leucine-rich repeat containing G protein-coupled receptor 6
  Uniprot ID: Q9HBX8
  ENSP ID: ENSP00000387869
MRLEGEGRSARAGQNLSRAGSARRGAPRDLSMNNLTELQPGLFHHLRFLEELRLSGNHLSHIPGQAFSGLYSLKILMLQNNQLGGIPAEALWELPSLQSLDLNYNKLQEFPVAIRTLGRLQELGFHNNNIKAIPEKAFMGNPLLQTIHFYDNPIQFVGRSAFQYLPKLHTLSLNGAMDIQEFPDLKGTTSLEILTLTRAGIRLLPSGMCQQLPRLRVLELSHNQIEELPSLHRCQKLEEIGLQHNRIWEIGADTFSQLSSLQALDLSWNAIRSIHPEAFSTLHSLVKLDLTDNQLTTLPLAGLGGLMHLKLKGNLALSQAFSKDSFPKLRILEVPYAYQCCPYGMCASFFKASGQWEAEDLHLDDEESSKRPLGLLARQAENHYDQDLDELQLEMEDSKPHPSVQCSPTPGPFKPCEYLFESWGIRLAVWAIVLLSVLCNGLVLLTVFAGGPVPLPPVKFVVGAIAGANTLTGISCGLLASVDALTFGQFSEYGARWETGLGCRATGFLAVLGSEASVLLLTLAAVQCSVSVSCVRAYGKSPSLGSVRAGVLGCLALAGLAAALPLASVGEYGASPLCLPYAPPEGQPAALGFTVALVMMNSFCFLVVAGAYIKLYCDLPRGDFEAVWDCAMVRHVAWLIFADGLLYCPVAFLSFASMLGLFPVTPEAVKSVLLVVLPLPACLNPLLYLLFNPHFRDDLRRLRPRAGDSGPLAYAAAGELEKSSCDSTQALVAFSDVDLILEASEAGRPPGLETYGFPSVTLISCQQPGAPRLEGSHCVEPEGNHFGNPQPSMDGELLLRAEGSTPAGGGLSGGGGFQPSGLAFASHV

SEQ ID NO: 45901 - protein, 232 aa, Homo sapiens
  Payload ID: 9374
  Gene Symbol: LGR6
  Gene Name: leucine-rich repeat containing G protein-coupled receptor 6
  ENSP ID: ENSP00000402284
MNNLTELQPGLFHHLRFLEELRLSGNHLSHIPGQAFSGLYSLKILMLQNNQLGGIPAEALWELPSLQSLRLDANLISLVPERSFEGLSSLRHLWLDDNALTEIPVRALNNLPALQAMTLALNRISHIPDYAFQNLTSLVVLDLNYNKLQEFPVAIRTLGRLQELSLNGAMDIQEFPDLKGTTSLEILTLTRAGIRLLPSGMCQQLPRLRVLELSHNQIEELPSLHRCQKLEE

SEQ ID NO: 45902 - protein, 348 aa, Homo sapiens
  Payload ID: 9374
  Gene Symbol: LGR6
  Gene Name: leucine-rich repeat containing G protein-coupled receptor 6
  ENSP ID: ENSP00000422143
MGRPRLTLVCQVSIIISARDLSMNNLTELQPGLFHHLRFLEELRLSGNHLSHIPGQAFSGLYSLKILMLQNNQLGGIPAEALWELPSLQSLRLDANLISLVPERSFEGLSSLRHLWLDDNALTEIPVRALNNLPALQAMTLALNRISHIPDYAFQNLTSLVVLHLHNNRIQHLGTHSFEGLHNLETLDLNYNKLQEFPVAIRTLGRLQELGFHNNNIKAIPEKAFMGNPLLQTIHFYDNPIQFVGRSAFQYLPKLHTLSLNGAMDIQEFPDLKGTTSLEILTLTRAGIRLLPSGMCQQLPRLRVLELSHNQIEELPSLHRCQKLEEMRSGGLYFLPPSARGAWSGARV

SEQ ID NO: 45903 - protein, 2015 aa, Homo sapiens
  Payload ID: 9375
  Gene Symbol: LRRK1
  Gene Name: leucine-rich repeat kinase 1
  Uniprot ID: Q38SD2
  ENSP ID: ENSP00000373600
MAGMSQRPPSMYWCVGPEESAVCPERAMETLNGAGDTGGKPSTRGGDPAARSRRTEGIRAAYRRGDRGGARDLLEEACDQCASQLEKGQLLSIPAAYGDLEMVRYLLSKRLVELPTEPTDDNPAVVAAYFGHTAVVQELLESLPGPCSPQRLLNWMLALACQRGHLGVVKLLVLTHGADPESYAVRKNEFPVIVRLPLYAAIKSGNEDIAIFLLRHGAYFCSYILLDSPDPSKHLLRKYFIEASPLPSSYPGKTALRVKWSHLRLPWVDLDWLIDISCQITELDLSANCLATLPSVIPWGLINLRKLNLSDNHLGELPGVQSSDEIICSRLLEIDISSNKLSHLPPGFLHLSKLQKLTASKNCLEKLFEEENATNWIGLRKLQELDISDNKLTELPALFLHSFKSLNSLNVSRNNLKVFPDPWACPLKCCKASRNALECLPDKMAVFWKNHLKDVDFSENALKEVPLGLFQLDALMFLRLQGNQLAALPPQEKWTCRQLKTLDLSRNQLGKNEDGLKTKRIAFFTTRGRQRSGTEAASVLEFPAFLSESLEVLCLNDNHLDTVPPSVCLLKSLSELYLGNNPGLRELPPELGQLGNLWQLDTEDLTISNVPAEIQKEGPKAMLSYLRAQLRKAEKCKLMKMIIVGPPRQGKSTLLEILQTGRAPQVVHGEATIRTTKWELQRPAGSRAKVESVEFNVWDIGGPASMATVNQCFFTDKALYVVVWNLALGEEAVANLQFWLLNIEAKAPNAVVLVVGTHLDLIEAKFRVERIATLRAYVLALCRSPSGSRATGFPDITFKHLHEISCKSLEGQEGLRQLIFHVTCSMKDVGSTIGCQRLAGRLIPRSYLSLQEAVLAEQQRRSRDDDVQYLTDRQLEQLVEQTPDNDIKDYEDLQSAISFLIETGTLLHFPDTSHGLRNLYFLDPIWLSECLQRIFNIKGSRSVAKNGVIRAEDLRMLLVGTGFTQQTEEQYFQFLAKFEIALPVANDSYLLPHLLPSKPGLDTHGMRHPTANTIQRVFKMSFVPVGFWQRFIARMLISLAEMDLQLFENKKNTKSRNRKVTIYSFTGNQRNRCSTFRVKRNQTIYWQEGLLVTFDGGYLSVESSDVNWKKKKSGGMKIVCQSEVRDFSAMAFITDHVNSLIDQWFPALTATESDGTPLMEQYVPCPVCETAWAQHTDPSEKSEDVQYFDMEDCVLTAIERDFISCPRHPDLPVPLQELVPELFMTDFPARLFLENSKLEHSEDEGSVLGQGGSGTVIYRARYQGQPVAVKRFHIKKFKNFANVPADTMLRHLRATDAMKNFSEFRQEASMLHALQHPCIVALIGISIHPLCFALELAPLSSLNTVLSENARDSSFIPLGHMLTQKIAYQIASGLAYLHKKNIIFCDLKSDNILVWSLDVKEHINIKLSDYGISRQSFHEGALGVEGTPGYQAPEIRPRIVYDEKVDMFSYGMVLYELLSGQRPALGHHQLQIAKKLSKGIRPVLGQPEEVQFRRLQALMMECWDTKPEKRPLALSVVSQMKDPTFATFMYELCCGKQTAFFSSQGQEYTVVFWDGKEESRNYTVVNTEKGLMEVQRMCCPGMKVSCQLQVQRSLWTATEDQKIYIYTLKGMCPLNTPQQALDTPAVVTCFLAVPVIKKNSYLVLAGLADGLVAVFPVVRGTPKDSCSYLCSHTANRSKFSIADEDARQNPYPVKAMEVVNSGSEVWYSNGPGLLVIDCASLEICRRLEPYMAPSMVTSVVCSSEGRGEEVVWCLDDKANSLVMYHSTTYQLCARYFCGVPSPLRDMFPVRPLDTEPPAASHTANPKVPEGDSIADVSIMYSEELGTQILIHQESLTDYCSMSSYSSSPPRQAARSPSSLPSSPASSSSVPFSTDCEDSDMLHTPGAASDRSEHDLTPMDGETFSQHLQAVKILAVRDLIWVPRRGGDVIVIGLEKDSGAQRGRVIAVLKARELTPHGVLVDAAVVAKDTVVCTFENENTEWCLAVWRGWGAREFDIFYQSYEELGRLEACTRKRR

SEQ ID NO: 45904 - protein, 650 aa, Homo sapiens
  Payload ID: 9375
  Gene Symbol: LRRK1
  Gene Name: leucine-rich repeat kinase 1
  ENSP ID: ENSP00000431668
MAGMSQRPPSMYWCVGPEESAVCPERAMETLNGAGDTGGKPSTRGGDPAARSRRTEGIRAAYRRGDRGGARDLLEEACDQCASQLEKGQLLSIPAAYGDLEMVRYLLSKRLVELPTEPTDDNPAVVAAYFGHTAVVQELLESLPGPCSPQRLLNWMLALACQRGHLGVVKLLVLTHGADPESYAVRKNEFPVIVRLPLYAAIKSGNEDIAIFLLRHGAYFCSYILLDSPDPSKHLLRKYFIEASPLPSSYPGKTALRVKWSHLRLPWVDLDWLIDISCQITELDLSANCLATLPSVIPWGLINLRKLNLSDNHLGELPGVQSSDEIICSRLLEIDISSNKLSHLPPGFLHLSKLQKLTASKNCLEKLFEEENATNWIGLRKLQELDISDNKLTELPALFLHSFKSLNSLNVSRNNLKVFPDPWACPLKCCKASRNALECLPDKMAVFWKNHLKDVDFSENALKEVPLGLFQLDALMFLRLQGNQLAALPPQEKWTCRQLKTLDLSRNQLGKNEDGLKTKRIAFFTTRGRQRSGTEAASVLEFPAFLSESLEVLCLNDNHLDTVPPSVCLLKSLSELYLGNNPGLRELPPELGQLGNLWQLDTEDLTISNVPAEIQKEGPKAMLSYLRAQLRKAEKCKLMKMIIVGPPRQG

SEQ ID NO: 45905 - protein, 689 aa, Homo sapiens
  Payload ID: 9375
  Gene Symbol: LRRK1
  Gene Name: leucine-rich repeat kinase 1
  ENSP ID: ENSP00000433069
MAGMSQRPPSMYWCVGPEESAVCPERAMETLNGAGDTGGKPSTRGGDPAARSRRTEGIRAAYRRGDRGGARDLLEEACDQCASQLEKGQLLSIPAAYGDLEMVRYLLSKRLVELPTEPTDDNPAVVAAYFGHTAVVQELLESLPGPCSPQRLLNWMLALACQRGHLGVVKLLVLTHGADPESYAVRKNEFPVIVRLPLYAAIKSGNEDIAIFLLRHGAYFCSYILLDSPDPSKHLLRKYFIEASPLPSSYPGKTALRVKWSHLRLPWVDLDWLIDISCQITELDLSANCLATLPSVIPWGLINLRKLNLSDNHLGELPGVQSSDEIICSRLLEIDISSNKLSHLPPGFLHLSKLQKLTASKNCLEKLFEEENATNWIGLRKLQELDISDNKLTELPALFLHSFKSLNSLNVSRNNLKVFPDPWACPLKCCKASRNALECLPDKMAVFWKNHLKDVDFSENALKEVPLGLFQLDALMFLRLQGNQLAALPPQEKWTCRQLKTLDLSRNQLGKNEDGLKTKRIAFFTTRGRQRSGTEAASVLEFPAFLSESLEVLCLNDNHLDTVPPSVCLLKSLSELYLGNNPGLRELPPELGQLGNLWQLDTEDLTISNVPAEIQKEGPKAMLSYLRAQLRKAEKCKLMKMIIVGPPRQGKSTLLEILQTGRAPQVVHGEATIRTTKWELQRPAGSRAK

SEQ ID NO: 45906 - protein, 264 aa, Homo sapiens
  Payload ID: 9375
  Gene Symbol: LRRK1
  Gene Name: leucine-rich repeat kinase 1
  Uniprot ID: Q38SD2
  ENSP ID: ENSP00000433268
MAGMSQRPPSMYWCVGPEESAVCPERAMETLNGAGDTGGKPSTRGGDPAARSRRTEGIRAAYRRGDRGGARDLLEEACDQCASQLEKGQLLSIPAAYGDLEMVRYLLSKRLVELPTEPTDDNPAVVAAYFGHTAVVQELLESLPGPCSPQRLLNWMLALACQRGHLGVVKLLVLTHGADPESYAVRKNEFPVIVRLPLYAAIKSGNEDIAIFLLRHGAYFCSYILLDSPDPSKHLLRKYFIEASPLPSSYPGKTVSSHCLWSVF

SEQ ID NO: 45907 - protein, 32 aa, Homo sapiens
  Payload ID: 9375
  Gene Symbol: LRRK1
  Gene Name: leucine-rich repeat kinase 1
  ENSP ID: ENSP00000435148
MAGMSQRPPSMYWCVGPEESAVCPERAMETLN

SEQ ID NO: 45908 - protein, 660 aa, Homo sapiens
  Payload ID: 9375
  Gene Symbol: LRRK1
  Gene Name: leucine-rich repeat kinase 1
  ENSP ID: ENSP00000436672
  MOD_RES (1)..(1): Any amino acid
XISIHPLCFALELAPLSSLNTVLSENARDSSFIPLGHMLTQKIAYQIASGLAYLHKKNIIFCDLKSDNILVWSLDVKEHINIKLSDYGISRQSFHEGALGVEGTPGYQAPEIRPRIVYDEKVDMFSYGMVLYELLSGQRPALGHHQLQIAKKLSKGIRPVLGQPEEVQFRRLQALMMECWDTKPEKRPLALSVVSQMKDPTFATFMYELCCGKQTAFFSSQGQEYTVVFWDGKEESRNYTVVNTEKGLMEVQRMCCPGMKVSCQLQVQRSLWTATEDQKIYIYTLKGMCPLNTPQQALDTPAVVTCFLAVPVIKKNSYLVLAGLADGLVAVFPVVRGTPKDSCSYLCSHTANRSKFSIADEDARQNPYPVKAMEVVNSGSEVWYSNGPGLLVIDCASLEICRRLEPYMAPSMVTSVVCSSEGRGEEVVWCLDDKANSLVMYHSTTYQLCARYFCGVPSPLRDMFPVRPLDTEPPAASHTANPKVPEGDSIADVSIMYSEELGTQILIHQESLTDYCSMSSYSSSPPRQAARSPSSLPSSPASSSSVPFSTDCEDSDMLHTPGAASDRSEHDLTPMDGETFSQHLQAVKILAVRDLIWVPRRGGDVIVIGLEKDSGAQRGRVIAVLKARELTPHGIMPVSSVKVCWAGWPVRDMVYMVAVM

SEQ ID NO: 45909 - protein, 2527 aa, Homo sapiens
  Payload ID: 9376
  Gene Symbol: LRRK2
  Gene Name: leucine-rich repeat kinase 2
  Uniprot ID: Q5S007
  ENSP ID: ENSP00000298910
MASGSCQGCEEDEETLKKLIVRLNNVQEGKQIETLVQILEDLLVFTYSERASKLFQGKNIHVPLLIVLDSYMRVASVQQVGWSLLCKLIEVCPGTMQSLMGPQDVGNDWEVLGVHQLILKMLTVHNASVNLSVIGLKTLDLLLTSGKITLLILDEESDIFMLIFDAMHSFPANDEVQKLGCKALHVLFERVSEEQLTEFVENKDYMILLSALTNFKDEEEIVLHVLHCLHSLAIPCNNVEVLMSGNVRCYNIVVEAMKAFPMSERIQEVSCCLLHRLTLGNFFNILVLNEVHEFVVKAVQQYPENAALQISALSCLALLTETIFLNQDLEEKNENQENDDEGEEDKLFWLEACYKALTWHRKNKHVQEAACWALNNLLMYQNSLHEKIGDEDGHFPAHREVMLSMLMHSSSKEVFQASANALSTLLEQNVNFRKILLSKGIHLNVLELMQKHIHSPEVAESGCKMLNHLFEGSNTSLDIMAAVVPKILTVMKRHETSLPVQLEALRAILHFIVPGMPEESREDTEFHHKLNMVKKQCFKNDIHKLVLAALNRFIGNPGIQKCGLKVISSIVHFPDALEMLSLEGAMDSVLHTLQMYPDDQEIQCLGLSLIGYLITKKNVFIGTGHLLAKILVSSLYRFKDVAEIQTKGFQTILAILKLSASFSKLLVHHSFDLVIFHQMSSNIMEQKDQQFLNLCCKCFAKVAMDDYLKNVMLERACDQNNSIMVECLLLLGADANQAKEGSSLICQVCEKESSPKLVELLLNSGSREQDVRKALTISIGKGDSQIISLLLRRLALDVANNSICLGGFCIGKVEPSWLGPLFPDKTSNLRKQTNIASTLARMVIRYQMKSAVEEGTASGSDGNFSEDVLSKFDEWTFIPDSSMDSVFAQSDDLDSEGSEGSFLVKKKSNSISVGEFYRDAVLQRCSPNLQRHSNSLGPIFDHEDLLKRKRKILSSDDSLRSSKLQSHMRHSDSISSLASEREYITSLDLSANELRDIDALSQKCCISVHLEHLEKLELHQNALTSFPQQLCETLKSLTHLDLHSNKFTSFPSYLLKMSCIANLDVSRNDIGPSVVLDPTVKCPTLKQFNLSYNQLSFVPENLTDVVEKLEQLILEGNKISGICSPLRLKELKILNLSKNHISSLSENFLEACPKVESFSARMNFLAAMPFLPPSMTILKLSQNKFSCIPEAILNLPHLRSLDMSSNDIQYLPGPAHWKSLNLRELLFSHNQISILDLSEKAYLWSRVEKLHLSHNKLKEIPPEIGCLENLTSLDVSYNLELRSFPNEMGKLSKIWDLPLDELHLNFDFKHIGCKAKDIIRFLQQRLKKAVPYNRMKLMIVGNTGSGKTTLLQQLMKTKKSDLGMQSATVGIDVKDWPIQIRDKRKRDLVLNVWDFAGREEFYSTHPHFMTQRALYLAVYDLSKGQAEVDAMKPWLFNIKARASSSPVILVGTHLDVSDEKQRKACMSKITKELLNKRGFPAIRDYHFVNATEESDALAKLRKTIINESLNFKIRDQLVVGQLIPDCYVELEKIILSERKNVPIEFPVIDRKRLLQLVRENQLQLDENELPHAVHFLNESGVLLHFQDPALQLSDLYFVEPKWLCKIMAQILTVKVEGCPKHPKGIISRRDVEKFLSKKRKFPKNYMSQYFKLLEKFQIALPIGEEYLLVPSSLSDHRPVIELPHCENSEIIIRLYEMPYFPMGFWSRLINRLLEISPYMLSGRERALRPNRMYWRQGIYLNWSPEAYCLVGSEVLDNHPESFLKITVPSCRKGCILLGQVVDHIDSLMEEWFPGLLEIDICGEGETLLKKWALYSFNDGEEHQKILLDDLMKKAEEGDLLVNPDQPRLTIPISQIAPDLILADLPRNIMLNNDELEFEQAPEFLLGDGSFGSVYRAAYEGEEVAVKIFNKHTSLRLLRQELVVLCHLHHPSLISLLAAGIRPRMLVMELASKGSLDRLLQQDKASLTRTLQHRIALHVADGLRYLHSAMIIYRDLKPHNVLLFTLYPNAAIIAKIADYGIAQYCCRMGIKTSEGTPGFRAPEVARGNVIYNQQADVYSFGLLLYDILTTGGRIVEGLKFPNEFDELEIQGKLPDPVKEYGCAPWPMVEKLIKQCLKENPQERPTSAQVFDILNSAELVCLTRRILLPKNVIVECMVATHHNSRNASIWLGCGHTDRGQLSFLDLNTEGYTSEEVADSRILCLALVHLPVEKESWIVSGTQSGTLLVINTEDGKKRHTLEKMTDSVTCLYCNSFSKQSKQKNFLLVGTADGKLAIFEDKTVKLKGAAPLKILNIGNVSTPLMCLSESTNSTERNVMWGGCGTKIFSFSNDFTIQKLIETRTSQLFSYAAFSDSNIITVVVDTALYIAKQNSPVVEVWDKKTEKLCGLIDCVHFLREVMVKENKESKHKMSYSGRVKTLCLQKNTALWIGTGGGHILLLDLSTRRLIRVIYNFCNSVRVMMTAQLGSLKNVMLVLGYNRKNTEGTQKQKEIQSCLTVWDINLPHEVQNLEKHIEVRKELAEKMRRTSVE

SEQ ID NO: 45910 - protein, 1271 aa, Homo sapiens
  Payload ID: 9376
  Gene Symbol: LRRK2
  Gene Name: leucine-rich repeat kinase 2
  ENSP ID: ENSP00000341930
MASGSCQGCEEDEETLKKLIVRLNNVQEGKQIETLVQILEDLLVFTYSERASKLFQGKNIHVPLLIVLDSYMRVASVQQVGWSLLCKLIEVCPGTMQSLMGPQDVGNDWEVLGVHQLILKMLTVHNASVNLSVIGLKTLDLLLTSGKITLLILDEESDIFMLIFDAMHSFPANDEVQKLGCKALHVLFERVSEEQLTEFVENKDYMILLSALTNFKDEEEIVLHVLHCLHSLAIPCNNVEVLMSGNVRCYNIVVEAMKAFPMSERIQEVSCCLLHRLTLGNFFNILVLNEVHEFVVKAVQQYPENAALQISALSCLALLTETIFLNQDLEEKNENQENDDEGEEDKLFWLEACYKALTWHRKNKHVQEAACWALNNLLMYQNSLHEKIGDEDGHFPAHREVMLSMLMHSSSKEVFQASANALSTLLEQNVNFRKILLSKGIHLNVLELMQKHIHSPEVAESGCKMLNHLFEGSNTSLDIMAAVVPKILTVMKRHETSLPVQLEALRAILHFIVPGMPEESREDTEFHHKLNMVKKQCFKNDIHKLVLAALNRFIGNPGIQKCGLKVISSIVHFPDALEMLSLEGAMDSVLHTLQMYPDDQEIQCLGLSLIGYLITKKNVFIGTGHLLAKILVSSLYRFKDVAEIQTKGFQTILAILKLSASFSKLLVHHSFDLVIFHQMSSNIMEQKDQQFLNLCCKCFAKVAMDDYLKNVMLERACDQNNSIMVECLLLLGADANQAKEGSSLICQVCEKESSPKLVELLLNSGSREQDVRKALTISIGKGDSQIISLLLRRLALDVANNSICLGGFCIGKVEPSWLGPLFPDKTSNLRKQTNIASTLARMVIRYQMKSAVEEGTASGSDGNFSEDVLSKFDEWTFIPDSSMDSVFAQSDDLDSEGSEGSFLVKKKSNSISVGEFYRDAVLQRCSPNLQRHSNSLGPIFDHEDLLKRKRKILSSDDSLRSSKLQSHMRHSDSISSLASEREYITSLDLSANELRDIDALSQKCCISVHLEHLEKLELHQNALTSFPQQLCETLKSLTHLDLHSNKFTSFPSYLLKMSCIANLDVSRNDIGPSVVLDPTVKCPTLKQFNLSYNQLSFVPENLTDVVEKLEQLILEGNKISGICSPLRLKELKILNLSKNHISSLSENFLEACPKVESFSARMNFLAAMPFLPPSMTILKLSQNKFSCIPEAILNLPHLRSLDMSSNDIQYLPGPAHWKSLNLRELLFSHNQISILDLSEKAYLWSRVEKLHLSHNKLKEVRRLLPLKKYTL

SEQ ID NO: 45911 - protein, 521 aa, Homo sapiens
  Payload ID: 9376
  Gene Symbol: LRRK2
  Gene Name: leucine-rich repeat kinase 2
  ENSP ID: ENSP00000398726
MRVASVQQVGWSLLCKLIEVCPGTMQSLMGPQDVGNDWEVLGVHQLILKMLTVHNASVNLSVIGLKTLDLLLTSGKITLLILDEESDIFMLIFDAMHSFPANDEVQKLGCKALHVLFERGNNVEVLMSGNVRCYNIVVEAMKAFPMSERIQEVSCCLLHRLTLGNFFNILVLNEVHEFVVKAVQQYPENAALQISALSCLALLRSFPGICECIVNSLRTKCNTSLDIMAAVVPKILTVMKRHETSLPVQLEALRAILHFIVPGMPEESREDTEFHHKLNMVKKQCFKNDIHKLVLAALNRFIGNPGIQKCGLKVISSIVHFPDALEMLSLEGAMDSVLHTLQMYPDDQEIQCLGLSLIGYLITKKNVFIGTGHLLAKILVSSLYRFKDVAEIQTKGFQTILAILKLSASFSKLLVHHSFDLVIFHQMSSNIMEQKDQQFLNLCCKCFAKVAMDDYLKNVMLERACDQNNSIMVECLLLLGADANQAKEGSSLICQVCEKESSPKLVELLLNSGSREQDVRK

SEQ ID NO: 45912 - protein, 207 aa, Homo sapiens
  Payload ID: 9376
  Gene Symbol: LRRK2
  Gene Name: leucine-rich repeat kinase 2
  ENSP ID: ENSP00000410821
  MOD_RES (1)..(1): Any amino acid
XLDLSANELRDIDALSQKCCISVHLEHLEKLELHQNALTSFPQQLCETLKSLTHLDLHSNKFTSFPSYLLKMSCIANLDVSRNDIGPSVVLDPTVKCPTLKQFNLSYNQLSFVPENLTDVVEKLEQLILEGNKISGICSPLRLKELKILNLSKNHISSLSENFLEACPKVESFSARMNFLVSGCSVVPQGNLIQTVESGKHFCACDI

SEQ ID NO: 45913 - protein, 545 aa, Homo sapiens
  Payload ID: 9377
  Gene Symbol: LGI2
  Gene Name: leucine-rich repeat LGI family, member 2
  Uniprot ID: Q8N0V4
  ENSP ID: ENSP00000371548
MALRRGGCGALGLLLLLLGAACLIPRSAQVRRLARCPATCSCTKESIICVGSSWVPRIVPGDISSLSLVNGTFSEIKDRMFSHLPSLQLLLLNSNSFTIIRDDAFAGLFHLEYLFIEGNKIETISRNAFRGLRDLTHLSLANNHIKALPRDVFSDLDSLIELDLRGNKFECDCKAKWLYLWLKMTNSTVSDVLCIGPPEYQEKKLNDVTSFDYECTTTDFVVHQTLPYQSVSVDTFNSKNDVYVAIAQPSMENCMVLEWDHIEMNFRSYDNITGQSIVGCKAILIDDQVFVVVAQLFGGSHIYKYDESWTKFVKFQDIEVSRISKPNDIELFQIDDETFFVIADSSKAGLSTVYKWNSKGFYSYQSLHEWFRDTDAEFVDIDGKSHLILSSRSQVPIILQWNKSSKKFVPHGDIPNMEDVLAVKSFRMQNTLYLSLTRFIGDSRVMRWNSKQFVEIQALPSRGAMTLQPFSFKDNHYLALGSDYTFSQIYQWDKEKQLFKKFKEIYVQAPRSFTAVSTDRRDFFFASSFKGKTKIFEHIIVDLSL

SEQ ID NO: 45914 - protein, 256 aa, Homo sapiens
  Payload ID: 9377
  Gene Symbol: LGI2
  Gene Name: leucine-rich repeat LGI family, member 2
  ENSP ID: ENSP00000426254
  MOD_RES (1)..(1): Any amino acid
XLGLLLLLLGAACLIPRSAQVRRLARCPATCSCTKESIICVGSSWVPRIVPGDISSLSLVNGTFSEIKDRMFSHLPSLQLLLLNSNSFTIIRDDAFAGLFHLEYLFIEGNKIETISRNAFRGLRDLTHLSLANNHIKALPRDVFSDLDSLIELDLRGNKFECDCKAKWLYLWLKMTNSTVSDVLCIGPPEYQEKKLNDVTSFDYECTTTDKQEEICEGKIQNLNARVVMNCSRPSSAFRKHTGNGRVAFFLPHGVR

SEQ ID NO: 45915 - protein, 548 aa, Homo sapiens
  Payload ID: 9378
  Gene Symbol: LGI3
  Gene Name: leucine-rich repeat LGI family, member 3
  Uniprot ID: Q8N145
  ENSP ID: ENSP00000302297
MAGLRARGGPGPGLLALSALGFCLMLQVSAKRPPKTPPCPPSCSCTRDTAFCVDSKAVPRNLPSEVISLTLVNAAFSEIQDGAFSHLPLLQFLLLNSNKFTLIGDNAFTGLSHLQYLFIENNDIWALSKFTFRGLKSLTHLSLANNNLQTLPRDIFRPLDILNDLDLRGNSLNCDCKVKWLVEWLAHTNTTVAPIYCASPPRFQEHKVQDLPLREFDCITTDFVLYQTLAFPAVSAEPFLYSSDLYLALAQPGVSACTILKWDYVERQLRDYDRIPAPSAVHCKPMVVDSQLYVVVAQLFGGSYIYHWDPNTTRFTRLQDIDPQRVRKPNDLEAFRIDGDWYFAVADSSKAGATSLYRWHQNGFYSHQALHPWHRDTDLEFVDGEGKPRLIVSSSSQAPVIYQWSRTQKQFVAQGEVTQVPDAQAVKHFRAGRDSYLCLSRYIGDSKILRWEGTRFSEVQALPSRGSLALQPFLVGGRRYLALGSDFSFTQIYQWDEGRQKFVRFQELAVQAPRAFCYMPAGDAQLLLAPSFKGQTLVYRHIVVDLSA

SEQ ID NO: 45916 - protein, 524 aa, Homo sapiens
  Payload ID: 9378
  Gene Symbol: LGI3
  Gene Name: leucine-rich repeat LGI family, member 3
  Uniprot ID: Q8N145
  ENSP ID: ENSP00000399121
MAGLRARGGPGPGLLALSALGFCLMLQVSAKRPPKTPPCPPSCSCTRDTAFCVDSKAVPRNLPSEVISLTLVNAAFSEIQDGAFSHLPLLQFLLLNSNKFTLIGDNAFTGLSHLQYLSLANNNLQTLPRDIFRPLDILNDLDLRGNSLNCDCKVKWLVEWLAHTNTTVAPIYCASPPRFQEHKVQDLPLREFDCITTDFVLYQTLAFPAVSAEPFLYSSDLYLALAQPGVSACTILKWDYVERQLRDYDRIPAPSAVHCKPMVVDSQLYVVVAQLFGGSYIYHWDPNTTRFTRLQDIDPQRVRKPNDLEAFRIDGDWYFAVADSSKAGATSLYRWHQNGFYSHQALHPWHRDTDLEFVDGEGKPRLIVSSSSQAPVIYQWSRTQKQFVAQGEVTQVPDAQAVKHFRAGRDSYLCLSRYIGDSKILRWEGTRFSEVQALPSRGSLALQPFLVGGRRYLALGSDFSFTQIYQWDEGRQKFVRFQELAVQAPRAFCYMPAGDAQLLLAPSFKGQTLVYRHIVVDLSA

SEQ ID NO: 45917 - protein, 198 aa, Homo sapiens
  Payload ID: 9378
  Gene Symbol: LGI3
  Gene Name: leucine-rich repeat LGI family, member 3
  ENSP ID: ENSP00000427817
MCPCRDRTLVNAAFSEIQDGAFSHLPLLQFLLLNSNKFTLIGDNAFTGLSHLQYLFIENNDIWALSKFTFRGLKSLTHLSLANNNLQTLPRDIFRPLDILNDLDLRGNSLNCDCKVKWLVEWLAHTNTTVAPIYCASPPRFQEHKVQDLPLREFDCITTDFVLYQTLAFPAVSAEPFLYSSDLYLALAQPGVSACTIL

SEQ ID NO: 45918 - protein, 134 aa, Homo sapiens
  Payload ID: 9378
  Gene Symbol: LGI3
  Gene Name: leucine-rich repeat LGI family, member 3
  ENSP ID: ENSP00000430653
MAGLRARGGPGPGLLALSALGFCLMLQVSAKRPPKTPPCPPSCSCTRDTAFCVDSKAVPRNLPSEVISLTALADPTVLTRVSPQDPGECRLLRDPGWSVLPPPAAAVLVTQLQQVYTDWRQRLHRTVAPAVSLH

SEQ ID NO: 45919 - protein, 537 aa, Homo sapiens
  Payload ID: 9379
  Gene Symbol: LGI4
  Gene Name: leucine-rich repeat LGI family, member 4
  Uniprot ID: Q8N135
  ENSP ID: ENSP00000312273
MGGAGILLLLLAGAGVVVAWRPPKGKCPLRCSCSKDSALCEGSPDLPVSFSPTLLSLSLVRTGVTQLKAGSFLRIPSLHLLLFTSNSFSVIEDDAFAGLSHLQYLFIEDNEIGSISKNALRGLRSLTHLSLANNHLETLPRFLFRGLDTLTHVDLRGNPFQCDCRVLWLLQWMPTVNASVGTGACAGPASLSHMQLHHLDPKTFKCRAIELSWFQTVGESALSVEPFSYQGEPHIVLAQPFAGRCLILSWDYSLQRFRPEEELPAASVVSCKPLVLGPSLFVLAARLWGGSQLWARPSPGLRLAPTQTLAPRRLLRPNDAELLWLEGQPCFVVADASKAGSTTLLCRDGPGFYPHQSLHAWHRDTDAEALELDGRPHLLLASASQRPVLFHWTGGRFERRTDIPEAEDVYATRHFQAGGDVFLCLTRYIGDSMVMRWDGSMFRLLQQLPSRGAHVFQPLLIARDQLAILGSDFAFSQVLRLEPDKGLLEPLQELGPPALVAPRAFAHITMAGRRFLFAACFKGPTQIYQHHEIDLSA

SEQ ID NO: 45920 - protein, 494 aa, Homo sapiens
  Payload ID: 9379
  Gene Symbol: LGI4
  Gene Name: leucine-rich repeat LGI family, member 4
  ENSP ID: ENSP00000376059
MGGAGILLLLLAGAGVVVAWRPPKGKCPLRCSCSKDSALCEGSPDLPVSFSPTLLSLSLVRTGVTQLKAGSFLRIPSLHLLLFTSNSFSVIEDDAFAGLSHLQYLFIEDNEIGSISKNALRGLRSLTHLSLANNHLETLPRFLFRGLDTLTHVDLRGNPFQCDCRVLWLLQWMPTVNASVGTGACAGPASLSHMQLHHLDPKTFKCRAIELSWFQTVGESALSVEPFSYQGEPHIVLAQPFAGRCLILSWDYSLQRFRPEEELPGEPPPRPSACPAACLAGLTCLPTSPQRPPWCPASHWCWARASSCWLPACGGAHSCGPGPVPACAWPQRRPWPRGGCCGPMTPSSCGWKGNPASWWPMPPRRAAPRCCAATGPAFTRTRACTPGTGTRTLRPWSWTAGPTCCWPRLPSGPCSSTGPVAASRDAQTSPRPRMSMPHATSRLVGTCSCASHATLGTPWSCAGTAPCFVCCSNFPRAVPTSSSHCSSPGTSWPS

SEQ ID NO: 45921 - protein, 378 aa, Homo sapiens
  Payload ID: 9379
  Gene Symbol: LGI4
  Gene Name: leucine-rich repeat LGI family, member 4
  ENSP ID: ENSP00000467044
  MOD_RES (1)..(1): Any amino acid
XVIEDDAFAGLSHLQYLFIEDNEIGSISKNALRGLRSLTHLSLANNHLETLPRFLFRGLDTLTHVDLRGNPFQCDCRVLWLLQWMPTVNASVGTGACAGPASLSHMQLHHLDPKTFKCRAIELSWFQTVGESALSVEPFSYQGEPHIVLAQPFAGRCLILSWDYSLQRFRPEEELPAASVVSCKPLVLGPSLFVLAARLWGGSQLWARPSPGLRLAPTQTLAPRRLLRPNDAELLWLEGQPCFVVADASKAGSTTLLCRDGPGFYPHQSLHAWHRDTDAEALELDGRPHLLLASASQRPVLFHWTGGRFERRTDIPEAEDVYATRHFQAGGDVFLCLTRYIGDSMVRLGLGAGGWLFSTDPILHTKPLNSDLPSHADL

SEQ ID NO: 45922 - protein, 261 aa, Homo sapiens
  Payload ID: 9379
  Gene Symbol: LGI4
  Gene Name: leucine-rich repeat LGI family, member 4
  Uniprot ID: Q8N135
  ENSP ID: ENSP00000467784
MGGAGILLLLLAGAGVVVAWRPPKGKCPLRCSCSKDSALCEGSPDLPVSFSPTLLSLSLVRTGVTQLKAGSFLRIPSLHLLLFTSNSFSVIEDDAFAGLSHLQYLFIEDNEIGSISKNALRGLRSLTHLSLANNHLETLPRFLFRGLDTLTHVDLRGNPFQCDCRVLWLLQWMPTVNASVGTGACAGPASLSHMQLHHLDPKTFKCRAIGGGLSRWGGRREIWGKGCQGQEARLTPCPAISRSGKTLSKQHCLPEPQFSHL

SEQ ID NO: 45923 - protein, 623 aa, Homo sapiens
  Payload ID: 9380
  Gene Symbol: LRIT1
  Gene Name: leucine-rich repeat, immunoglobulin-like and transmembrane domains 1
  Uniprot ID: Q9P2V4
  ENSP ID: ENSP00000361177
MRVALGMLWLLALAWPPQARGFCPSQCSCSLHIMGDGSKARTVVCNDPDMTLPPASIPPDTSRLRLERTAIRRVPGEAFRPLGRLEQLWLPYNALSELNALMLRGLRRLRELRLPGNRLAAFPWAALRDAPKLRLLDLQANRLSAVPAEAARFLENLTFLDLSSNQLMRLPQELIVSWAHLETGIFPPGHHPRRVLGLQDNPWACDCRLYDLVHLLDGWAPNLAFIETELRCASPRSLAGVAFSQLELRKCQGPELHPGVASIRSLLGGTALLRCGATGVPGPEMSWRRANGRPLNGTVHQEVSSDGTSWTLLGLPAVSHLDSGDYICQAKNFLGASETVISLIVTEPPTSTEHSGSPGALWARTGGGGEAAAYNNKLVARHVPQIPKPAVLATGPSVPSTKEELTLEHFQMDALGELSDGRAGPSEARMVRSVKVVGDTYHSVSLVWKAPQAKNTTAFSVLYAVFGQHSMRRVIVQPGKTRVTITGLLPKTKYVACVCVQGLVPRKEQCVIFSTNEVVDAENTQQLINVVVISVAIVIALPLTLLVCCSALQKRCRKCFNKDSTEATVTYVNLERLGYSEDGLEELSRHSVSEADRLLSARSSVDFQAFGVKGGRRINEYFC

SEQ ID NO: 45924 - protein, 550 aa, Homo sapiens
  Payload ID: 9381
  Gene Symbol: LRIT2
  Gene Name: leucine-rich repeat, immunoglobulin-like and transmembrane domains 2
  Uniprot ID: A6NDA9
  ENSP ID: ENSP00000361185
MASVFHYFLLVLVFLDTHAAQPFCLPGCTCSEESFGRTLQCTSVSLGKIPGNLSEEFKQVRIENSPLFEMPQGSFINMSTLEYLWLNFNNISVIHLGALEHLPELRELRLEGNKLCSVPWTAFRATPLLRVLDLKRNKIDALPELALQFLVSLTYLDLSSNRLTVVSKSVFLNWPAYQKCRQPDCGAEILSSLVVALHDNPWVCDCRLRGLVQFVKSITLPVILVNSYLICQGPLSKAGQLFHETELSACMKPQISTPSANITIRAGQNVTLRCLAQASPSPSIAWTYPLSMWREFDVLTSSTGEDTALSELAIPAAHLVDSGNYTCMASNSIGKSNLVISLHVQPAQALHAPDSLSIPSEGNAYIDLRVVKQTVHGILLEWLAVADTSKEEWFTLYIASDEAFRKEVVHIGPGINTYAVDDLLPGTKYEACLSLEGQPPHQGQCVAFVTGRDAGGLEAREHLLHVTVVLCVVLLAVPVGAYAWAAQGPCSCSKWVLRGCLHRRKAPSCTPAAPQSKDGSFREHPAVCDDGEGHIDTEGDKEKGGTEDNS

SEQ ID NO: 45925 - protein, 560 aa, Homo sapiens
  Payload ID: 9381
  Gene Symbol: LRIT2
  Gene Name: leucine-rich repeat, immunoglobulin-like and transmembrane domains 2
  Uniprot ID: A6NDA9
  ENSP ID: ENSP00000438264
MASVFHYFLLVLVFLDTHAAQPFCLPGCTCSEESFGRTLQCTSVSLGKIPGNLSEEFKQVRIENSPLFEMPQGSFINMSTLEYLWLNFNNISVIHLGALEHLPELRELRLEGNKLCSVPWTAFRATPLLRVLDLKRNKIDALPELALQFLVSLTYLDLSSNRLTVVSKSVFLNWPAYQKCRQPDCGAEILSSLVVALHDNPWVCDCRLRGLVQFVKSITLPVILVNSYLICQGPLSKAGQLFHETELSACMKPQISTPSANITIRAGQNVTLRCLAQASPSPSIAWTYPLSMWREFDGLLGGKHLTPVLTSSTGEDTALSELAIPAAHLVDSGNYTCMASNSIGKSNLVISLHVQPAQALHAPDSLSIPSEGNAYIDLRVVKQTVHGILLEWLAVADTSKEEWFTLYIASDEAFRKEVVHIGPGINTYAVDDLLPGTKYEACLSLEGQPPHQGQCVAFVTGRDAGGLEAREHLLHVTVVLCVVLLAVPVGAYAWAAQGPCSCSKWVLRGCLHRRKAPSCTPAAPQSKDGSFREHPAVCDDGEGHIDTEGDKEKGGTEDNS

SEQ ID NO: 45926 - protein, 496 aa, Homo sapiens
  Payload ID: 9382
  Gene Symbol: LRIT3
  Gene Name: leucine-rich repeat, immunoglobulin-like and transmembrane domains 3
  ENSP ID: ENSP00000328222
MVEPHQEPRHSKVGLQDNPWFCDCHISKMIELSKVVDPAIVLLDPLMTCSEPERLTGILFQRAELEHCLKPSVMTSATKIMSALGSNVLLRCDATGFPTPQITWTRSDSSPVNYTVIQESPEEGVRWSIMSLTGISSKDAGDYKCKAKNLAGMSEAVVTVTVLGITTTPIPPDTSERTGDHPEWDVQPGSGRSTSVSSASSYLWSSSFSPTSSFSASTLSPPSTASFSLSPFSSSTVSSTTTLSTSISASTTMANKRSFQLHQGGKRNLKVAKNGSKLPPASTSKKEELALLDQTMLTETNAAIENLRVVSETKESVTLTWNMINTTHNSAVTVLYSKYGGKDLLLLNADSSKNQVTIDGLEPGGQYMACVCPKGVPPQKDQCITFSTERVEGDDSQWSLLLVVTSTACVVILPLICFLLYKVCKLQCKSEPFWEDDLAKETYIQFETLFPRSQSVGELWTRSHRDDSEKLLLCSRSSVESQVTFKSEGSRPEYYC

SEQ ID NO: 45927 - protein, 679 aa, Homo sapiens
  Payload ID: 9382
  Gene Symbol: LRIT3
  Gene Name: leucine-rich repeat, immunoglobulin-like and transmembrane domains 3
  Uniprot ID: Q3SXY7
  ENSP ID: ENSP00000469759
MHLFACLCIVLSFLEGVGCLCPSQCTCDYHGRNDGSGSRLVLCNDMDMNELPTNLPVDTVKLRIEKTVIRRISAEAFYYLVELQYLWVTYNSVASIDPSSFYNLKQLHELRLDGNSLAAFPWASLLDMPLLRTLDLHNNKITSVPNEALRYLKNLAYLDLSSNRLTTLPPDFLESWTHLVSTPSGVLDLSPSRIILGLQDNPWFCDCHISKMIELSKVVDPAIVLLDPLMTCSEPERLTGILFQRAELEHCLKPSVMTSATKIMSALGSNVLLRCDATGFPTPQITWTRSDSSPVNYTVIQESPEEGVRWSIMSLTGISSKDAGDYKCKAKNLAGMSEAVVTVTVLGITTTPIPPDTSERTGDHPEWDVQPGSGRSTSVSSASSYLWSSSFSPTSSFSASTLSPPSTASFSLSPFSSSTVSSTTTLSTSISASTTMANKRSFQLHQGGKRNLKVAKNGSKLPPASTSKKEELALLDQTMLTETNAAIENLRVVSETKESVTLTWNMINTTHNSAVTVLYSKYGGKDLLLLNADSSKNQVTIDGLEPGGQYMACVCPKGVPPQKDQCITFSTERVEGDDSQWSLLLVVTSTACVVILPLICFLLYKVCKLQCKSEPFWEDDLAKETYIQFETLFPRSQSVGELWTRSHRDDSEKLLLCSRSSVESQVTFKSEGSRPEYYC

SEQ ID NO: 45928 - protein, 696 aa, Homo sapiens
  Payload ID: 9383
  Gene Symbol: LRCH1
  Gene Name: leucine-rich repeats and calponin homology (CH) domain containing 1
  Uniprot ID: Q9Y2L9
  ENSP ID: ENSP00000308493
MATPGSEPQPFVPALSVATLHPLHHPHHHHHHHQHHGGTGAPGGAGGGGGGSGGFNLPLNRGLERALEEAANSGGLNLSARKLKEFPRTAAPGHDLSDTVQADLSKNRLVEVPMELCHFVSLEILNLYHNCIRVIPEAIVNLQMLTYLNLSRNQLSALPACLCGLPLKVLIASNNKLGSLPEEIGQLKQLMELDVSCNEITALPQQIGQLKSLRELNVRRNYLKVLPQELVDLSLVKFDFSCNKVLVIPICFREMKQLQVLLLENNPLQSPPAQICTKGKVHIFKYLSIQACQIKTADSLYLHTMERPHLHQHVEDGKKDSDSGVGSDNGDKRLSATEPSDEDTVSLNVPMSNIMEEEQIIKEDSCHRLSPVKGEFHQEFQPEPSLLGDSTNSGEERDQFTDRADGLHSEFMNYKARAEDCEELLRIEEDVHWQTEGIISSSKDQDMDIAMIEQLREAVDLLQDPNGLSTDITERSVLNLYPMGSAEALELQDSALNGQIQLETSPVCEVQSDLTLQSNGSQYSPNEIRENSPAVSPTTNSTAPFGLKPRSVFLRPQRNLESIDPQFTIRRKMEQMREEKELVEQLRESIEMRLKVSLHEDLGAALMDGVVLCHLVNHIRPRSVASIHVPSPAVPKLSMAKCRRNVENFLEACRKLGVPEEKLCLPHHILEEKGLVKVGITIQALLDITVTKALFT

SEQ ID NO: 45929 - protein, 763 aa, Homo sapiens
  Payload ID: 9383
  Gene Symbol: LRCH1
  Gene Name: leucine-rich repeats and calponin homology (CH) domain containing 1
  Uniprot ID: Q9Y2L9
  ENSP ID: ENSP00000374447
MATPGSEPQPFVPALSVATLHPLHHPHHHHHHHQHHGGTGAPGGAGGGGGGSGGFNLPLNRGLERALEEAANSGGLNLSARKLKEFPRTAAPGHDLSDTVQADLSKNRLVEVPMELCHFVSLEILNLYHNCIRVIPEAIVNLQMLTYLNLSRNQLSALPACLCGLPLKVLIASNNKLGSLPEEIGQLKQLMELDVSCNEITALPQQIGQLKSLRELNVRRNYLKVLPQELVDLSLVKFDFSCNKVLVIPICFREMKQLQVLLLENNPLQSPPAQICTKGKVHIFKYLSIQACQIKTADSLYLHTMERPHLHQHVEDGKKDSDSGVGSDNGDKRLSATEPSDEDTVSLNVPMSNIMEEEQIIKEDSCHRLSPVKGEFHQEFQPEPSLLGDSTNSGEERDQFTDRADGLHSEFMNYKARAEDCEELLRIEEDVHWQTEGIISSSKDQDMDIAMIEQLREAVDLLQDPNGLSTDITERSVLNLYPMGSAEALELQDSALNGQIQLETSPVCEVQSDLTLQSNGSQYSPNEIRENSPAVSPTTNSTAPFGLKPRSDPALILPPISFNTLTQAQTWDSSSYSVPSEGDSDNVFLRPQRNLESIDPQFTIRRKMEQMREEKELVEQLRESIEMRLKVSLHEDLGAALMDGVVLCHLVNHIRPRSVASIHVPSPAVPKLSMAKCRRNVENFLEACRKLGVPEADLCSPCDILQLDFRHIRKTVDTLLALGEKAPPPTSALRSRDLIGFCLVHILFIVLVYITYHWNALSA

SEQ ID NO: 45930 - protein, 728 aa, Homo sapiens
  Payload ID: 9383
  Gene Symbol: LRCH1
  Gene Name: leucine-rich repeats and calponin homology (CH) domain containing 1
  Uniprot ID: Q9Y2L9
  ENSP ID: ENSP00000374448
MATPGSEPQPFVPALSVATLHPLHHPHHHHHHHQHHGGTGAPGGAGGGGGGSGGFNLPLNRGLERALEEAANSGGLNLSARKLKEFPRTAAPGHDLSDTVQADLSKNRLVEVPMELCHFVSLEILNLYHNCIRVIPEAIVNLQMLTYLNLSRNQLSALPACLCGLPLKVLIASNNKLGSLPEEIGQLKQLMELDVSCNEITALPQQIGQLKSLRELNVRRNYLKVLPQELVDLSLVKFDFSCNKVLVIPICFREMKQLQVLLLENNPLQSPPAQICTKGKVHIFKYLSIQACQIKTADSLYLHTMERPHLHQHVEDGKKDSDSGVGSDNGDKRLSATEPSDEDTVSLNVPMSNIMEEEQIIKEDSCHRLSPVKGEFHQEFQPEPSLLGDSTNSGEERDQFTDRADGLHSEFMNYKARAEDCEELLRIEEDVHWQTEGIISSSKDQDMDIAMIEQLREAVDLLQDPNGLSTDITERSVLNLYPMGSAEALELQDSALNGQIQLETSPVCEVQSDLTLQSNGSQYSPNEIRENSPAVSPTTNSTAPFGLKPRSVFLRPQRNLESIDPQFTIRRKMEQMREEKELVEQLRESIEMRLKVSLHEDLGAALMDGVVLCHLVNHIRPRSVASIHVPSPAVPKLSMAKCRRNVENFLEACRKLGVPEADLCSPCDILQLDFRHIRKTVDTLLALGEKAPPPTSALRSRDLIGFCLVHILFIVLVYITYHWNALSA

SEQ ID NO: 45931 - protein, 98 aa, Homo sapiens
  Payload ID: 9383
  Gene Symbol: LRCH1
  Gene Name: leucine-rich repeats and calponin homology (CH) domain containing 1
  ENSP ID: ENSP00000417121
MKQLQVLLLENNPLQSPPAQICTKGKVHIFKYLSIQACQIKTADSLYLHTMERPHLHQHVEDGKKDSDSGVGSDNGDKRLSATEPSDEDTVSLNVPMS

SEQ ID NO: 45932 - protein, 72 aa, Homo sapiens
  Payload ID: 9383
  Gene Symbol: LRCH1
  Gene Name: leucine-rich repeats and calponin homology (CH) domain containing 1
  ENSP ID: ENSP00000419256
MKQLQVLLLENNPLQSPPAQICTKGKVHIFKYLSIQACQIKTADSLYLHTMERPHLHQHVEDGKKDSDSGVG

SEQ ID NO: 45933 - protein, 765 aa, Homo sapiens
  Payload ID: 9384
  Gene Symbol: LRCH2
  Gene Name: leucine-rich repeats and calponin homology (CH) domain containing 2
  Uniprot ID: Q5VUJ6
  ENSP ID: ENSP00000325091
MAASQGGGGNSGGGGCGGGGSSGGCGTAGGGGGGAGGGGGGGGGTLVVPIPVPTLFGQPFPNGPPWNPGSLQPQHTVRSLDRALEEAGSSGILSLSGRKLRDFPGSGYDLTDTTQADLSRNRFTEIPSDVWLFAPLETLNLYHNCIKTIPEAIKNLQMLTYLNISRNLLSTLPKYLFDLPLKVLVVSNNKLVSIPEEIGKLKDLMELDISCNEIQVLPQQMGKLHSLRELNIRRNNLHVLPDELGDLPLVKLDFSCNKVTEIPVCYRKLHHLQVIILDNNPLQVPPAQICLKGKVHIFKYLNIQACCRMDKKPDSLDLPSLSKRMPSQPLTDSMEDFYPNKNHGPDSGIGSDNGEKRLSTTEPSDDDTVSLHSQVSESNREQTSRNDSHIIGSKTDSQKDQEVYDFVDPNTEDVAVPEQGNAHIGSFVSFFKGKEKCSEKSRKNEELGDEKRLEKEQLLAEEEDDDLKEVTDLRKIAAQLLQQEQKNRILNHSTSVMRNKPKQTVECEKSVSADEVNSPLSPLTWQPLENQKDQIDEQPWPESHPIIWQSEERRRSKQIRKEYFKYKSMRKSSSGNENDEQDSDNANMSTQSPVSSEEYDRTDGFSHSPFGLKPRSAFSRSSRQEYGAADPGFTMRRKMEHLREEREQIRQLRNNLESRLKVILPDDIGAALMDGVVLCHLANHIRPRSVASIHVPSPAVPKLSMAKCRRNVENFLDACKKLGVSQERLCLPHHILEERGLVKVGVTVQALLELPTTKASQLSVA

SEQ ID NO: 45934 - protein, 748 aa, Homo sapiens
  Payload ID: 9384
  Gene Symbol: LRCH2
  Gene Name: leucine-rich repeats and calponin homology (CH) domain containing 2
  Uniprot ID: Q5VUJ6
  ENSP ID: ENSP00000439366
MAASQGGGGNSGGGGCGGGGSSGGCGTAGGGGGGAGGGGGGGGGTLVVPIPVPTLFGQPFPNGPPWNPGSLQPQHTVRSLDRALEEAGSSGILSLSGRKLRDFPGSGYDLTDTTQADLSRNRFTEIPSDVWLFAPLETLNLYHNCIKTIPEAIKNLQMLTYLNISRNLLSTLPKYLFDLPLKVLVVSNNKLVSIPEEIGKLKDLMELDISCNEIQVLPQQMGKLHSLRELNIRRNNLHVLPDELGDLPLVKLDFSCNKVTEIPVCYRKLHHLQVIILDNNPLQVPPAQICLKGKVHIFKYLNIQACCRMDKKPDSLDLPSLSKRMPSQPLTDSMEDFYPNKNHGPDSGIGSDNGEKRLSTTEPSDDDTVSLHSQVSESNREQTSRNDSHIIGSKTDSQKDQEVYDFVDPNTEDVAVPEQGNAHIGSFVSFFKGKEKCSEKSRKNEELGDEKRLEKEQLLAEEEDDDLKEVTDLRKIAAQLLQQEQKNRILNHSTSVMRNKPKQTVECEKSVSADEVNSPLSPLTWQPLENQKDQIDEQPWPESHPIIWQSEERRRSKQIRKEYFKYKSMRKSSSGNENDEEYDRTDGFSHSPFGLKPRSAFSRSSRQEYGAADPGFTMRRKMEHLREEREQIRQLRNNLESRLKVILPDDIGAALMDGVVLCHLANHIRPRSVASIHVPSPAVPKLSMAKCRRNVENFLDACKKLGVSQERLCLPHHILEERGLVKVGVTVQALLELPTTKASQLSVA

SEQ ID NO: 45935 - protein, 712 aa, Homo sapiens
  Payload ID: 9385
  Gene Symbol: LRCH3
  Gene Name: leucine-rich repeats and calponin homology (CH) domain containing 3
  Uniprot ID: Q96II8
  ENSP ID: ENSP00000334375
MAAAGLVAVAAAAEYSGTVASGGNLPGVHCGPSSGAGPGFGPGSWSRSLDRALEEAAVTGVLSLSGRKLREFPRGAANHDLTDTTRADLSRNRLSEIPIEACHFVSLENLNLYQNCIRYIPEAILNLQALTFLNISRNQLSTLPVHLCNLPLKVLIASNNKLVSLPEEIGHLRHLMELDVSCNEIQTIPSQIGNLEALRDLNVRRNHLVHLPEELAELPLIRLDFSCNKITTIPVCYRNLRHLQTITLDNNPLQSPPAQICIKGKVHIFKYLNIQACKIAPDLPDYDRRPLGFGSCHEELYSSRPYGALDSGFNSVDSGDKRWSGNEPTDEFSDLPLRVAEITKEQRLRRESQYQENRGSLVVTNGGVEHDLDQIDYIDSCTAEEEEAEVRQPKGPDPDSLSSQFMAYIEQRRISHEGSPVKPVAIREFQKTEDMRRYLHQNRVPAEPSSLLSLSASHNQLSHTDLELHQRREQLVERTRREAQLAALQYEEEKIRTKQIQRDAVLDFVKQKASQSPQKQHPLLDGVDGECPFPSRRSQHTDDSALCMSLSGLNQVGCAATLPHSSAFTPLKSDDRPNALLSSPATETVHHSPAYSFPAAIQRNQPQRPESFLFRAGVRAETNKGHASPLPPSAAPTTDSTDSITGQNSRQREEELELIDQLRKHIEYRLKVSLPCDLGAALTDGVVLCHLANHVRPRSVPSIHVPSPAVVS

SEQ ID NO: 45936 - protein, 777 aa, Homo sapiens
  Payload ID: 9385
  Gene Symbol: LRCH3
  Gene Name: leucine-rich repeats and calponin homology (CH) domain containing 3
  Uniprot ID: Q96II8
  ENSP ID: ENSP00000393579
MAAAGLVAVAAAAEYSGTVASGGNLPGVHCGPSSGAGPGFGPGSWSRSLDRALEEAAVTGVLSLSGRKLREFPRGAANHDLTDTTRADLSRNRLSEIPIEACHFVSLENLNLYQNCIRYIPEAILNLQALTFLNISRNQLSTLPVHLCNLPLKVLIASNNKLVSLPEEIGHLRHLMELDVSCNEIQTIPSQIGNLEALRDLNVRRNHLVHLPEELAELPLIRLDFSCNKITTIPVCYRNLRHLQTITLDNNPLQSPPAQICIKGKVHIFKYLNIQACKIAPDLPDYDRRPLGFGSCHEELYSSRPYGALDSGFNSVDSGDKRWSGNEPTDEFSDLPLRVAEITKEQRLRRESQYQENRGSLVVTNGGVEHDLDQIDYIDSCTAEEEEAEVRQPKGPDPDSLSSQFMAYIEQRRISHEGSPVKPVAIREFQKTEDMRRYLHQNRVPAEPSSLLSLSASHNQLSHTDLELHQRREQLVERTRREAQLAALQYEEEKIRTKQIQRDAVLDFVKQKASQSPQKQHPLLDGVDGECPFPSRRSQHTDDSALCMSLSGLNQVGCAATLPHSSAFTPLKSDDRPNALLSSPATETVHHSPAYSFPAAIQRNQPQRPESFLFRAGVRAETNKGHASPLPPSAAPTTDSTDSITGQNSRQREEELELIDQLRKHIEYRLKVSLPCDLGAALTDGVVLCHLANHVRPRSVPSIHVPSPAVPKLTMAKCRRNVENFLEACRKIGVPQEQLCLPLHILEEKGLSQVAVTVQALLELAPPKQQQHQLSAV

SEQ ID NO: 45937 - protein, 623 aa, Homo sapiens
  Payload ID: 9385
  Gene Symbol: LRCH3
  Gene Name: leucine-rich repeats and calponin homology (CH) domain containing 3
  ENSP ID: ENSP00000394609
MAAAGLVAVAAAAEYSGTVASGGNLPGVHCGPSSGAGPGFGPGSWSRSLDRALEEAAVTGVLSLSGRKLREFPRGAANHDLTDTTRAELAELPLIRLDFSCNKITTIPVCYRNLRHLQTITLDNNPLQSPPAQICIKGKVHIFKYLNIQACKIAPDLPDYDRRPLGFGSCHEELYSSRPYGALDSGFNSVDSGDKRWSGNEPTDEFSDLPLRVAEITKEQRLRRESQYQENRGSLVVTNGGVEHDLDQIDYIDSCTAEEEEAEGSPVKPVAIREFQKTEDMRRYLHQNRVPAEPSSLLSLSASHNQLSHTDLELHQRREQLVERTRREAQLAALQYEEEKIRTKQIQRDAVLDFVKQKASQSPQKQHPLLDGVDGECPFPSRRSQHTDDSALCMSLSGLNQVGCAATLPHSSAFTPLKSDDRPNALLSSPATETVHHSPAYSFPAAIQRNQPQRPESFLFRAGVRAETNKGHASPLPPSAAPTTDSTDSITGQNSRQREEELELIDQLRKHIEYRLKVSLPCDLGAALTDGVVLCHLANHVRPRSVPSIHVPSPAVPKLTMAKCRRNVENFLEACRKIGVPQEQLCLPLHILEEKGLSQVAVTVQALLELAPPKQQQHQLSAV

SEQ ID NO: 45938 - protein, 181 aa, Homo sapiens
  Payload ID: 9385
  Gene Symbol: LRCH3
  Gene Name: leucine-rich repeats and calponin homology (CH) domain containing 3
  ENSP ID: ENSP00000394763
  MOD_RES (1)..(1): Any amino acid
XKGHASPLPPSAAPTTDSTDSITGQNSRQREEELELIDQLRKHIEYRLKVSLPCDLGAALTDGVVLCHLANHVRPRSVPSIHVPSPAVPKLTMAKCRRNVENFLEACRKIGVPQDNLCSPSDILQLNLSVKRTVETLLSLGAHSEESSFVCLSLQLLGFVAFYCTVMLTLCVLYYWLFPAR

SEQ ID NO: 45939 - protein, 725 aa, Homo sapiens
  Payload ID: 9385
  Gene Symbol: LRCH3
  Gene Name: leucine-rich repeats and calponin homology (CH) domain containing 3
  Uniprot ID: Q96II8
  ENSP ID: ENSP00000394965
MAAAGLVAVAAAAEYSGTVASGGNLPGVHCGPSSGAGPGFGPGSWSRSLDRALEEAAVTGVLSLSGRKLREFPRGAANHDLTDTTRADLSRNRLSEIPIEACHFVSLENLNLYQNCIRYIPEAILNLQALTFLNISRNQLSTLPVHLCNLPLKVLIASNNKLVSLPEEIGHLRHLMELDVSCNEIQTIPSQIGNLEALRDLNVRRNHLVHLPEELAELPLIRLDFSCNKITTIPVCYRNLRHLQTITLDNNPLQSPPAQICIKGKVHIFKYLNIQACKIAPDLPDYDRRPLGFGSCHEELYSSRPYGALDSGFNSVDSGDKRWSGNEPTDEFSDLPLRVAEITKEQRLRRESQYQENRGSLVVTNGGVEHDLDQIDYIDSCTAEEEEAEGSPVKPVAIREFQKTEDMRRYLHQNRVPAEPSSLLSLSASHNQLSHTDLELHQRREQLVERTRREAQLAALQYEEEKIRTKQIQRDAVLDFVKQKASQSPQKQHPLLDGVDGECPFPSRRSQHTDDSALCMSDDRPNALLSSPATETVHHSPAYSFPAAIQRNQPQRPESFLFRAGVRAETNKGHASPLPPSAAPTTDSTDSITGQNSRQREEELELIDQLRKHIEYRLKVSLPCDLGAALTDGVVLCHLANHVRPRSVPSIHVPSPAVPKLTMAKCRRNVENFLEACRKIGVPQEQLCLPLHILEEKGLSQVAVTVQALLELAPPKQQQHQLSAV

SEQ ID NO: 45940 - protein, 227 aa, Homo sapiens
  Payload ID: 9385
  Gene Symbol: LRCH3
  Gene Name: leucine-rich repeats and calponin homology (CH) domain containing 3
  ENSP ID: ENSP00000395309
YEEEKIRTKQIQRDAVLDFVKQKASQSPQKQHPLLDGVDGECPFPSRRSQHTDDSALCMSLSGLNQVGCAATLPHSSAFTPLKSDDRPNALLSSPATETGHASPLPPSAAPTTDSTDSITGQNSRQREEELELIDQLRKHIEYRLKVSLPCDLGAALTDGVVLCHLANHVRPRSVPSIHVPSPAVPKLTMAKCRRNVENFLEACRKIGVPQDNLCSPSDILQLNLSV

SEQ ID NO: 45941 - protein, 803 aa, Homo sapiens
  Payload ID: 9385
  Gene Symbol: LRCH3
  Gene Name: leucine-rich repeats and calponin homology (CH) domain containing 3
  Uniprot ID: Q96II8
  ENSP ID: ENSP00000399751
MAAAGLVAVAAAAEYSGTVASGGNLPGVHCGPSSGAGPGFGPGSWSRSLDRALEEAAVTGVLSLSGRKLREFPRGAANHDLTDTTRADLSRNRLSEIPIEACHFVSLENLNLYQNCIRYIPEAILNLQALTFLNISRNQLSTLPVHLCNLPLKVLIASNNKLVSLPEEIGHLRHLMELDVSCNEIQTIPSQIGNLEALRDLNVRRNHLVHLPEELAELPLIRLDFSCNKITTIPVCYRNLRHLQTITLDNNPLQSPPAQICIKGKVHIFKYLNIQACKIAPDLPDYDRRPLGFGSCHEELYSSRPYGALDSGFNSVDSGDKRWSGNEPTDEFSDLPLRVAEITKEQRLRRESQYQENRGSLVVTNGGVEHDLDQIDYIDSCTAEEEEAEVRQPKGPDPDSLSSQFMAYIEQRRISHEGSPVKPVAIREFQKTEDMRRYLHQNRVPAEPSSLLSLSASHNQLSHTDLELHQRREQLVERTRREAQLAALQYEEEKIRTKQIQRDAVLDFVKQKASQSPQKQHPLLDGVDGECPFPSRRSQHTDDSALCMSLSGLNQVGCAATLPHSSAFTPLKSDDRPNALLSSPATETVHHSPAYSFPAAIQRNQPQRPESFLFRAGVRAETNKGHASPLPPSAAPTTDSTDSITGQNSRQREEELELIDQLRKHIEYRLKVSLPCDLGAALTDGVVLCHLANHVRPRSVPSIHVPSPAVPKLTMAKCRRNVENFLEACRKIGVPQDNLCSPSDILQLNLSVKRTVETLLSLGAHSEESSFVCLSLQLLGFVAFYCTVMLTLCVLYYWLFPAR

SEQ ID NO: 45942 - protein, 214 aa, Homo sapiens
  Payload ID: 9385
  Gene Symbol: LRCH3
  Gene Name: leucine-rich repeats and calponin homology (CH) domain containing 3
  ENSP ID: ENSP00000400164
AVLDFVKQKASQSPQKQHPLLDGVDGECPFPSRRSQHTDDSALCMSDDRPNALLSSPATETGHASPLPPSAAPTTDSTDSITGQNSRQREEELELIDQLRKHIEYRLKVSLPCDLGAALTDGVVLCHLANHVRPRSVPSIHVPSPAVPKLTMAKCRRNVENFLEACRKIGVPQEQLCLPLHILEEKGLSQVAVTVQALLELAPPKQQQHQLSAV

SEQ ID NO: 45943 - protein, 92 aa, Homo sapiens
  Payload ID: 9385
  Gene Symbol: LRCH3
  Gene Name: leucine-rich repeats and calponin homology (CH) domain containing 3
  ENSP ID: ENSP00000412975
MAAAGLVAVAAAAEYSGTVASGGNLPGVHCGPSSGAGPGFGPGSWSRSLDRALEEAAVTGVLSLSGRKLREFPRGAANHDLTDTTRAGCELQ

SEQ ID NO: 45944 - protein, 683 aa, Homo sapiens
  Payload ID: 9386
  Gene Symbol: LRCH4
  Gene Name: leucine-rich repeats and calponin homology (CH) domain containing 4
  Uniprot ID: O75427
  ENSP ID: ENSP00000309689
MAAAVAAPLAAGGEEAAATTSVPGSPGLPGRRSAERALEEAVATGTLNLSNRRLKHFPRGAARSYDLSDITQADLSRNRFPEVPEAACQLVSLEGLSLYHNCLRCLNPALGNLTALTYLNLSRNQLSLLPPYICQLPLRVLIVSNNKLGALPPDIGTLGSLRQLDVSSNELQSLPSELCGLSSLRDLNVRRNQLSTLPEELGDLPLVRLDFSCNRVSRIPVSFCRLRHLQVILLDSNPLQSPPAQVCLKGKLHIFKYLSTEAGQRGSALGDLAPSRPPSFSPCPAEDLFPGHRYDGGLDSGFHSVDSGSKRWSGNESTDEFSELSFRISELAREPRGPRERKEDGSADGDPVQIDFIDSHVPGEDEERGTVEEQRPPELSPGAGDRERAPSSRREEPAGEERRRPDTLQLWQERERRQQQQSGAWGAPRKDSLLKPGLRAVVGGAAAVSTQAMHNGSPKSSASQAGAAAGQGAPAPAPASQEPLPIAGPATAPAPRPLGSIQRPNSFLFRSSSQSGSGPSSPDSVLRPRRYPQVPDEKDLMTQLRQVLESRLQRPLPEDLAEALASGVILCQLANQLRPRSVPFIHVPSPAVPKLSALKARKNVESFLEACRKMGVPEADLCSPSDLLQGTARGLRTALEAVKRVGGKALPPLWPPSGLGGFVVFYVVLMLLLYVTYTRLLGS

SEQ ID NO: 45945 - protein, 177 aa, Homo sapiens
  Payload ID: 9386
  Gene Symbol: LRCH4
  Gene Name: leucine-rich repeats and calponin homology (CH) domain containing 4
  ENSP ID: ENSP00000419674
  MOD_RES (1)..(1): Any amino acid
XAPASQEPLPIAGPATAPAPRPLGSIQRPNSFLFRSSSQSGSGPSSPDSVLRPRRYPQVPDEKDLMTQLRQVLESRLQRPLPEDLAEALASGVILCQLANQLRPRSVPFIHVPSPAVPKLSALKARKNVESFLEACRKMGVPEESLCQPHHILEEEGAPGRGLPYIAAVVHALLDRP

SEQ ID NO: 45946 - protein, 231 aa, Homo sapiens
  Payload ID: 9386
  Gene Symbol: LRCH4
  Gene Name: leucine-rich repeats and calponin homology (CH) domain containing 4
  ENSP ID: ENSP00000419870
MHNGSPKSSASQAGAAAGQGAPAPAPASQEPLPIAGPATAPAPRPLGSIQRPNSFLFRSSSQSGSGPSSPDSVLRPRRYPQVPDEKDLMTQLRQVLESRLQRPLPEDLAEALASGVILCQLANQLRPRSVPFIHVPSPAVPKLSALKARKNVESFLEACRKMGVPEADLCSPSDLLQGTARGLRTALEAVKRVGGKALPPLWPPSGLGGFVVFYVVLMLLLYVTYTRLLGS

SEQ ID NO: 45947 - protein, 142 aa, Homo sapiens [sequence omitted]

SEQ ID NO: 45948 - protein, 116 aa, Homo sapiens
  Payload ID: 9387
  Gene Symbol: LRRD1
  Gene Name: leucine-rich repeats and death domain containing 1
  Uniprot ID: A4D1F6
  ENSP ID: ENSP00000339642
MTQLKELDISNNAIREIPRNIGELRNLVSLHAYNNQISYLPPSLLSLNDLQQLNLSGNNLTALPSAIYNIFSLKEINFDDNPLLRPPVEICKGKQLYTIARYLQRADERDGLQLHS

SEQ ID NO: 45949 - protein, 59 aa, Homo sapiens
  Payload ID: 9387
  Gene Symbol: LRRD1
  Gene Name: leucine-rich repeats and death domain containing 1
  ENSP ID: ENSP00000387628
MSEKEGMSEVLEDTISQFRKESRSQSMKEPGFIKETSNLINEASDYLEGKSSNQIYETH

SEQ ID NO: 45950 - protein, 860 aa, Homo sapiens
  Payload ID: 9387
  Gene Symbol: LRRD1
  Gene Name: leucine-rich repeats and death domain containing 1
  Uniprot ID: A4D1F6
  ENSP ID: ENSP00000405987
MSEKEGMSEVLEDTISQFRKESRSQSMKEPGFIKETSNLINEASDYLEGKSSNQIYETHPRQNTLESTSSSGRKSKRNEEQKKNLQFSETSTRTGTSQSLSSLTGRTAEYQALVNFLSHETVGEVSPQVSEENQKQLGLGADNFTVNLEAKGLQEFPKDILKIKYVKYLYLDKNQIKTFQGADSGDLLGLEILSLQENGLSSLPSEIQLLHNLRILNVSHNHISHIPKEISQLGNIRQLFFYNNYIENFPSDLECLGNLEILSLGKNKLRHIPDTLPSLKTLRVLNLEYNQLTTFPKALCFLPKLISLDLTGNLISSLPKEIRELKNLETLLMDHNKLTFLAVEIFQLLKIKELQLADNKLEVISHKIENFRELRILILDKNLLKNIPEKISCCAMLECLSLSDNKLTELPKYIHKLNNLRKLHVNRNNMVKITDCISHLNNICSLEFSGNIITDVPIEIKNCQKIIKIELSYNKIMYFPLGLCALDSLYYLSVNGNYISEIPVDISFSKQLLHLELSENKLLIFSEHFCSLINLKYLDLGKNQIKKIPASISNMISLHVLILCCNKFETFPRELCTLENLQVLDLSENQLQKISSDICNLKGIQKLNFSSNQFIHFPIELCQLQSLEQLNISQIKGRKLTRLPGELSNMTQLKELDISNNAIREIPRNIGELRNLVSLHAYNNQISYLPPSLLSLNDLQQLNLSGNNLTALPSAIYNIFSLKEINFDDNPLLRPPVEICKGKQLYTIARYLQRADERDEKILEKIFKIVANNITETNFEFLCQKLNLANSETDMPTKSTVSLSERAHQALVIWKTQSNKLSLTAAALRDQLIRALTMIGAYEIMDKITALNLFTRAIKF

SEQ ID NO: 45951 - protein, 860 aa, Homo sapiens; identical to SEQ ID NO: 45950
  Payload ID: 9387
  Gene Symbol: LRRD1
  Gene Name: leucine-rich repeats and death domain containing 1
  Uniprot ID: A4D1F6
  ENSP ID: ENSP00000411568

SEQ ID NO: 45952 - protein, 825 aa, Homo sapiens
  Payload ID: 9388
  Gene Symbol: LRGUK
  Gene Name: leucine-rich repeats and guanylate kinase domain containing
  Uniprot ID: Q96M69
  ENSP ID: ENSP00000285928
MATSERALLRTRAASLLRGLGRSRTGARSLQFRAEKERQPCWSFPMGQKTKGSSNIASSYLLQQLMHRYQELDSDGDEDQGEGEAGSEESSESEMLNLEEEFDGVLREEAVAKALHHLGRSGSGTEQVYLNLTLSGCNLIDVSILCGYVHLQKLDLSANKIEDLSCVSCMPYLLELNASQNNLTTFFNFKPPKNLKKADFSHNQISEICDLSAYHALTKLILDGNEIEEISGLEMCNNLIHLSLANNKITTINGLNKLPIKILCLSNNQIEMITGLEDLKALQNLDLSHNQISSLQGLENHDLLEVINLEDNKIAELREIEYIKNLPILRVLNLLENPIQEKSEYWFFVIFMLLRLTELDQKKIKVEEKVSAVNKYDPPPEVVAAQDHLTHVVNSVMQPQRIFDSTLPSLDAPYPMLILAGPEACGKRELAHRLCRQFSTYFRYGACHTTRPPYFGEGDRVDYHFISQDVFDEMVNMGKFILTFSYGNHKYGLNRDTVEGIARDGLASCIHMEIEGVRSLKYSYFEPRYILVVPMNKEKYEGYLRRKGLFSRAEIEFAVSRVDLYIKINQNFPGYFDEVINADDLDVAYQKLSQLIREYLGLTEEPAKSLATTADVKTSHLKPEAHPTKYISSNMGDFLHSTDRNYLIKFWAKLSAKKTPAERDSIHRQHEAARQALMGRIRPDHTLLFQRGPVPAPLTSGLHYYTTLEELWKSFDLCEDYFKPPFGPYPEKSGKDSLVSMKCSLFRFCPWSKELPFQPPEGSISSHLGSGASDSETEETRKALPIQSFSHEKESHQHRQHSVPVISRPGSNVKPTLPPIPQGRR

SEQ ID NO: 45953 - protein, 1093 aa, Homo sapiens
  Payload ID: 9389
  Gene Symbol: LRIG1
  Gene Name: leucine-rich repeats and immunoglobulin-like domains 1
  Uniprot ID: Q96JA1
  ENSP ID: ENSP00000273261
MARPVRGGLGAPRRSPCLLLLWLLLLRLEPVTAAAGPRAPCAAACTCAGDSLDCGGRGLAALPGDLPSWTRSLNLSYNKLSEIDPAGFEDLPNLQEVYLNNNELTAVPSLGAASSHVVSLFLQHNKIRSVEGSQLKAYLSLEVLDLSLNNITEVRNTCFPHGPPIKELNLAGNRIGTLELGAFDGLSRSLLTLRLSKNRITQLPVRAFKLPRLTQLDLNRNRIRLIEGLTFQGLNSLEVLKLQRNNISKLTDGAFWGLSKMHVLHLEYNSLVEVNSGSLYGLTALHQLHLSNNSIARIHRKGWSFCQKLHELVLSFNNLTRLDEESLAELSSLSVLRLSHNSISHIAEGAFKGLRSLRVLDLDHNEISGTIEDTSGAFSGLDSLSKLTLFGNKIKSVAKRAFSGLEGLEHLNLGGNAIRSVQFDAFVKMKNLKELHISSDSFLCDCQLKWLPPWLIGRMLQAFVTATCAHPESLKGQSIFSVPPESFVCDDFLKPQIITQPETTMAMVGKDIRFTCSAASSSSSPMTFAWKKDNEVLTNADMENFVHVHAQDGEVMEYTTILHLRQVTFGHEGRYQCVITNHFGSTYSHKARLTVNVLPSFTKTPHDITIRTTTMARLECAATGHPNPQIAWQKDGGTDFPAARERRMHVMPDDDVFFITDVKIDDAGVYSCTAQNSAGSISANATLTVLETPSLVVPLEDRVVSVGETVALQCKATGNPPPRITWFKGDRPLSLTERHHLTPDNQLLVVQNVVAEDAGRYTCEMSNTLGTERAHSQLSVLPAAGCRKDGTTVGIFTIAVVSSIVLTSLVWVCIIYQTRKKSEEYSVTNTDETVVPPDVPSYLSSQGTLSDRQETVVRTEGGPQANGHIESNGVCPRDASHFPEPDTHSVACRQPKLCAGSAYHKEPWKAMEKAEGTPGPHKMEHGGRVVCSDCNTEVDCYSRGQAFHPQPVSRDSAQPSAPNGPEPGGSDQEHSPHHQCSRTAAGSCPECQGSLYPSNHDRMLTAVKKKPMASLDGKGDSSWTLARLYHPDSTELQPASSLTSGSPERAEAQYLLVSNGHLPKACDASPESTPLTGQLPGKQRVPLLLAPKS

SEQ ID NO: 45954 - protein, 1070 aa, Homo sapiens
  Payload ID: 9389
  Gene Symbol: LRIG1
  Gene Name: leucine-rich repeats and immunoglobulin-like domains 1
  Uniprot ID: Q96JA1
  ENSP ID: ENSP00000373208
MARPVRGGLGAPRRSPCLLLLWLLLLRLEPVTAAAGPRAPCAAACTCAGDSLDCGGRGLAALPGDLPSWTRSLNLSYNKLSEIDPAGFEDLPNLQEVYLNNNELTAVPSLGAASSHVVSLFLQHNKIRSVEGSQLKAYLSLEVLDLSLNNITEVRNTCFPHGPPIKELNLAGNRIGTLELGAFDGLSRSLLTLRLSKNRITQLPVRAFKLPRLTQLDLNRNRIRLIEGLTFQGLNSLEVLKLQRNNISKLTDGAFWGLSKMHVLHLEYNSLVEVNSGSLYGLTALHQLHLSNNSIARIHRKGWSFCQKLHELVLSFNNLTRLDEESLAELSSLSVLRLSHNSISHIAEGAFKGLRSLRVLDLDHNEISGTIEDTSGAFSGLDSLSKLLLLEPSQSAGCSSPSQPHMSAGGRTLFGNKIKSVAKRAFSGLEGLEHLNLGGNAIRSVQFDAFVKMKNLKELHISSDSFLCDCQLKWLPPWLIGRMLQAFVTATCAHPESLKGQSIFSVPPESFVCDDFLKPQIITQPETTMAMVGKDIRFTCSAASSSSSPMTFAWKKDNEVLTNADMENFVHVHAQDGEVMEYTTILHLRQVTFGHEGRYQCVITNHFGSTYSHKARLTVNVLPSFTKTPHDITIRTTTMARLECAATGHPNPQIAWQKDGGTDFPAAQTPSLVVPLEDRVVSVGETVALQCKATGNPPPRITWFKGDRPLSLTERHHLTPDNQLLVVQNVVAEDAGRYTCEMSNTLGTERAHSQLSVLPAAGCRKDGTTVGIFTIAVVSSIVLTSLVWVCIIYQTRKKSEEYSVTNTDETVVPPDVPSYLSSQGTLSDRQETVVRTEGGPQANGHIESNGVCPRDASHFPEPDTHSVACRQPKLCAGSAYHKEPWKAMEKAEGTPGPHKMEHGGRVVCSDCNTEVDCYSRGQAFHPQPVSRDSAQPSAPNGPEPGGSDQEHSPHHQCSRTAAGSCPECQGSLYPSNHDRMLTAVKKKPMASLDGKGDSSWTLARLYHPDSTELQPASSLTSGSPERAEAQYLLVSNGHLPKACDASPESTPLTGQLPGKQRVPLLLAPKS

SEQ ID NO: 45955 - protein, 1065 aa, Homo sapiens
  Payload ID: 9390
  Gene Symbol: LRIG2
  Gene Name: leucine-rich repeats and immunoglobulin-like domains 2
  Uniprot ID: O94898
  ENSP ID: ENSP00000355396
MAPAPLGVPEEQLLGCRSRVLSRLLFIAQTALLLLPAAGAGLCPAPCSCRIPLLDCSRRKLPAPSWRALSGLLPPDTAILDFSHNRLSNWNISLESQTLQEVKMNYNELTEIPYFGEPTSNITLLSLVHNIIPEINAQALQFYPALESLDLSSNIISEIKTSSFPRMQLKYLNLSNNRITTLEAGCFDNLSSSLLVVKLNRNRMSMIPPKIFKLPHLQFLELKRNRIKIVEGLTFQGLDSLRSLKMQRNGISKLKDGAFFGLNNMEELELEHNNLTRVNKGWLYGLRMLQQLYVSQNAIERISPDAWEFCQRLSELDLSYNQLTRLDESAFVGLSLLERLNLGDNRVTHIADGVFRFLSNLQTLDLRNNEISWAIEDASEAFAGLTSLTKLILQGNQIKSITKKAFIGLESLEHLDLNNNAIMSIQENAFSQTHLKELILNTSSLLCDCHLKWLLQWLVDNNFQHSVNVSCAHPEWLAGQSILNVDLKDFVCDDFLKPQIRTHPETIIALRGMNVTLTCTAVSSSDSPMSTVWRKDSEILYDVDTENFVRYWQQAGEALEYTSILHLFNVNFTDEGKYQCIVTNHFGSNYSQKAKLTVNEMPSFLKTPMDLTIRTGAMARLECAAEGHPAPQISWQKDGGTDFPAARERRMHVMPEDDVFFIANVKIEDMGIYSCMAQNTAGGLSANASLTVLETPSFIRPLEDKTVTRGETAVLQCIAGGSPAPRLNWTKDDGPLLVTERHFFAAANQLLIIVDAGLEDAGKYTCIMSNTLGTERGHIYLNVISSPNCDSSQSSIGHEDDGWTTVGIVIIVVVCCVVGTSLIWVIVIYHMRRKNEDYSITNTEELNLPADIPSYLSSQGTLSEPQEGYSNSEAGSHQQLMPPANGYIHKGTDGGTGTRVICSDCYDNANIYSRTREYCPYTYIAEEDVLDQTLSSLMVQMPKETYLVHPPQDTTALESLIPSANREPSAFPTNHERISEKKLPSTQMSGETLQRPVWNINRELGLPHPPFSQQPVHESPQLHQNEGLAGREPDCSASSMSCHRLQDHAFDFSRTRNIQDGSEGT

SEQ ID NO: 45956 - protein, 1119 aa, Homo sapiens
  Payload ID: 9391
  Gene Symbol: LRIG3
  Gene Name: leucine-rich repeats and immunoglobulin-like domains 3
  Uniprot ID: Q6UXM1
  ENSP ID: ENSP00000326759
MSAPSLRARAAGLGLLLCAVLGRAGRSDSGGRGELGQPSGVAAERPCPTTCRCLGDLLDCSRKRLARLPEPLPSWVARLDLSHNRLSFIKASSMSHLQSLREVKLNNNELETIPNLGPVSANITLLSLAGNRIVEILPEHLKEFQSLETLDLSSNNISELQTAFPALQLKYLYLNSNRVTSMEPGYFDNLANTLLVLKLNRNRISAIPPKMFKLPQLQHLELNRNKIKNVDGLTFQGLGALKSLKMQRNGVTKLMDGAFWGLSNMEILQLDHNNLTEITKGWLYGLLMLQELHLSQNAINRISPDAWEFCQKLSELDLTFNHLSRLDDSSFLGLSLLNTLHIGNNRVSYIADCAFRGLSSLKTLDLKNNEISWTIEDMNGAFSGLDKLRRLILQGNRIRSITKKAFTGLDALEHLDLSDNAIMSLQGNAFSQMKKLQQLHLNTSSLLCDCQLKWLPQWVAENNFQSFVNASCAHPQLLKGRSIFAVSPDGFVCDDFPKPQITVQPETQSAIKGSNLSFICSAASSSDSPMTFAWKKDNELLHDAEMENYAHLRAQGGEVMEYTTILRLREVEFASEGKYQCVISNHFGSSYSVKAKLTVNMLPSFTKTPMDLTIRAGAMARLECAAVGHPAPQIAWQKDGGTDFPAARERRMHVMPEDDVFFIVDVKIEDIGVYSCTAQNSAGSISANATLTVLETPSFLRPLLDRTVTKGETAVLQCIAGGSPPPKLNWTKDDSPLVVTERHFFAAGNQLLIIVDSDVSDAGKYTCEMSNTLGTERGNVRLSVIPTPTCDSPQMTAPSLDDDGWATVGVVIIAVVCCVVGTSLVWVVIIYHTRRRNEDCSITNTDETNLPADIPSYLSSQGTLADRQDGYVSSESGSHHQFVTSSGAGFFLPQHDSSGTCHIDNSSEADVEAATDLFLCPFLGSTGPMYLKGNVYGSDPFETYHTGCSPDPRTVLMDHYEPSYIKKKECYPCSHPSEESCERSFSNISWPSHVRKLLNTSYSHNEGPGMKNLCLNKSSLDFSANPEPASVASSNSFMGTFGKALRRPHLDAYSSFGQPSDCQPRAFYLKAHSSPDLDSGSEEDGKERTDFQEENHICTFKQTLENYRTPNFQSYDLDT

SEQ ID NO: 45957 - protein, 1059 aa, Homo sapiens
  Payload ID: 9391
  Gene Symbol: LRIG3
  Gene Name: leucine-rich repeats and immunoglobulin-like domains 3
  Uniprot ID: Q6UXM1
  ENSP ID: ENSP00000368436
MVDVLLLFSLCLLFHISRPDLSHNRLSFIKASSMSHLQSLREVKLNNNELETIPNLGPVSANITLLSLAGNRIVEILPEHLKEFQSLETLDLSSNNISELQTAFPALQLKYLYLNSNRVTSMEPGYFDNLANTLLVLKLNRNRISAIPPKMFKLPQLQHLELNRNKIKNVDGLTFQGLGALKSLKMQRNGVTKLMDGAFWGLSNMEILQLDHNNLTEITKGWLYGLLMLQELHLSQNAINRISPDAWEFCQKLSELDLTFNHLSRLDDSSFLGLSLLNTLHIGNNRVSYIADCAFRGLSSLKTLDLKNNEISWTIEDMNGAFSGLDKLRRLILQGNRIRSITKKAFTGLDALEHLDLSDNAIMSLQGNAFSQMKKLQQLHLNTSSLLCDCQLKWLPQWVAENNFQSFVNASCAHPQLLKGRSIFAVSPDGFVCDDFPKPQITVQPETQSAIKGSNLSFICSAASSSDSPMTFAWKKDNELLHDAEMENYAHLRAQGGEVMEYTTILRLREVEFASEGKYQCVISNHFGSSYSVKAKLTVNMLPSFTKTPMDLTIRAGAMARLECAAVGHPAPQIAWQKDGGTDFPAARERRMHVMPEDDVFFIVDVKIEDIGVYSCTAQNSAGSISANATLTVLETPSFLRPLLDRTVTKGETAVLQCIAGGSPPPKLNWTKDDSPLVVTERHFFAAGNQLLIIVDSDVSDAGKYTCEMSNTLGTERGNVRLSVIPTPTCDSPQMTAPSLDDDGWATVGVVIIAVVCCVVGTSLVWVVIIYHTRRRNEDCSITNTDETNLPADIPSYLSSQGTLADRQDGYVSSESGSHHQFVTSSGAGFFLPQHDSSGTCHIDNSSEADVEAATDLFLCPFLGSTGPMYLKGNVYGSDPFETYHTGCSPDPRTVLMDHYEPSYIKKKECYPCSHPSEESCERSFSNISWPSHVRKLLNTSYSHNEGPGMKNLCLNKSSLDFSANPEPASVASSNSFMGTFGKALRRPHLDAYSSFGQPSDCQPRAFYLKAHSSPDLDSGSEEDGKERTDFQEENHICTFKQTLENYRTPNFQSYDLDT

SEQ ID NO: 45958 - protein, 623 aa, Homo sapiens
  Payload ID: 9391
  Gene Symbol: LRIG3
  Gene Name: leucine-rich repeats and immunoglobulin-like domains 3
  ENSP ID: ENSP00000413143
MSAPSLRARAAGLGLLLCAVLGRAGRSDSGGRGELGQPSGVAAERPCPTTCRCLGDLLDCSRKRLARLPEPLPSWVARLDLSHNRLSFIKASSMSHLQSLREVKLNNNELETIPNLGPVSANITLLSLAGNRIVEILPEHLKEFQSLETLDLSSNNISELQTAFPALQLKYLYLNSNRVTSMEPGYFDNLANTLLVLKLNRNRISAIPPKMFKLPQLQHLELNRNKIKNVDGLTFQGLGALKSLKMQRNGVTKLMDGAFWGLSNMEILQLDHNNLTEITKGWLYGLLMLQELHLSQNAINRISPDAWEFCQKLSELDLTFNHLSRLDDSSFLGLSLLNTLHIGNNRVSYIADCAFRGLSSLKTLDLKNNEISWTIEDMNGAFSGLDKLRRLILQGNRIRSITKKAFTGLDALEHLDLSDNAIMSLQGNAFSQMKKLQQLHLNTSSLLCDCQLKWLPQWVAENNFQSFVNASCAHPQLLKGRSIFAVSPDGFVCDDFPKPQITVQPETQSAIKGSNLSFICSAASSSDSPMTFAWKKDNELLHDAEMENYAHLRAQGGEVMEYTTILRLREVEFASEGKYQCVISNHFGSSYSVKAKLTVNIPHLTLPFPTFHSTKLRFLVICI

SEQ ID NO: 45959 - protein, 156 aa, Homo sapiens
  Payload ID: 9391
  Gene Symbol: LRIG3
  Gene Name: leucine-rich repeats and immunoglobulin-like domains 3
  ENSP ID: ENSP00000449109
MSHLQSLREVKLNNNELETIPNLGPVSANITLLSLAGNRIVEILPEHLKEFQSLETLDLSSNNISELQTAFPALQLKYLYLNSNRVTSMEPGYFDNLANTLLVLKLNRNRISAIPPKMFKLPQLQHLELNRNKIKNVDGLTFQGLGALKSLKMQRN

SEQ ID NO: 45960 - protein, 163 aa, Homo sapiens
  Payload ID: 9391
  Gene Symbol: LRIG3
  Gene Name: leucine-rich repeats and immunoglobulin-like domains 3
  ENSP ID: ENSP00000449169
  MOD_RES (1)..(1): Any amino acid
XTCHIDNSSEADVEAATDLFLCPFLGSTGPMYLKGNVYGSDPFETYHTGCSPDPRTVLMDHYEPSYIKKKECYPCSHPSEESCERSFSNISWPSHVRKLLNTSYSHNEGPGMKNLCLNKSSLDFSANPEPASVASSNSFMGKFIKLSGTSSEDPYSKLCVREQ

SEQ ID NO: 45961 - protein, 164 aa, Homo sapiens
  Payload ID: 9392
  Gene Symbol: LRRIQ1
  Gene Name: leucine-rich repeats and IQ motif containing 1
  ENSP ID: ENSP00000376906
MDDDDAKLKAEIEAELDKLSISSLEKEDIESDAKSETQSDDSDTDSVELPESVLHCINIIKNRSKAVEELILQDLEDTDILSCSYGAVSNNHMHLRTGLSTEYEESSEQLIKILSEIEKEEFMRSKTDCATPDFVPEPSPHDLPMDEHVLPDDADINFGYCEVE

SEQ ID NO: 45962 - protein, 1722 aa, Homo sapiens
  Payload ID: 9392
  Gene Symbol: LRRIQ1
  Gene Name: leucine-rich repeats and IQ motif containing 1
  Uniprot ID: Q96JM4
  ENSP ID: ENSP00000376910
MDDDDAKLKAEIEAELDKLSISSLEKEDIESDAKSETQSDDSDTDSVELPESVLHCINIIKNRSKAVEELILQDLEDTDILSCSYGAVSNNHMHLRTGLSTEYEESSEQLIKILSEIEKEEFMRSKTDCATPDFVPEPSPHDLPMDEHVLPDDADINFGYCEVEEKCRQSFEAWQEKQKELEDKEKQTLKAQRDREEKQFQEEEEKRHCWMKQFKVEKKKLENIQKQEQDKMNDELYKEEKIWKEKFKQHEEYIRNLHLQMEEERTRFKDQQEKEKNSLLKQQNNAAVKIQAKYKAFVAYQKYGPIIKEQIESKKRKAQEWKEKEAKIRQKEEENRKRLEEEQRIKEERKKQKEEERKRREKEYEEKKNIVKQEREQLISKEKIILREDASQQLIISSALKKSGYNNKHLSLEDISNDKGDIAKNLVDENSKKQEDVLLWLVEESNMKENVDRQTILKESIQVKLKESISSQTILADFKMEEKNENLAKKRCSEELVKQERKYENTDNKTELGNSDLKGNLKEQFPLQELKSDAQKEEKIMKHVINENTGQKTQIILGHNQEISEVKTNEEQKIIKDNQQKKIQKVEKEEIQEQNGLLYKDKDTLVISVKQRSLSLTSENSKDVRENVILQEKEIYSKSKEIEENPKDNAWNSGIVIFNTTDTMINIEGKRNDQDYVLGRHAPCEGLSNYNAESSMVSKEVNSLKSEIRNISEKCHENAPEPDSMTCCVSESTLLYSIEERRLAWIKSFKPWLEIFKQNQQKKIVRRKRPVKCPANMTPALDKLEILRCGPWDTLQQVTTVTFQDLPGCVLSTLAECTNLQFLSLRRCGLTSLHSLSNCKKLKYIDAQENHIEAIECENLENLCVVLLNKNQLTSLHGLDGCTNIQCLELSYNKITRIGYSFFLEEKLVDNAGFCHHLGTSTSYLSLAQVWIPTGLCWSWIPITSLTKNSDCNFLISHLYWNCGLESLKNLQQLILDHNQLINTKGLCDTPTIVYLDCSHNHLTDVEGVENCGLLQILKLQGNYLSELPSLENLVLLRELHLDDNSISTVEAFSSYWLPLLQNITISQNSLTKIVPLFHFVSLEKLDVSHNCLSDLKSAIKWFDACYSLHELSLTGNPLLQETNWRDSLLKVLPALRILNGNILNSNSESRTEEHNQLGSAGFLALCQSQIREFNLLIENYITGKGDVFTLDTAENLCHYFKKLMILSTEYRHAHERGDVTITKKDESEAQKNHLAPTNSDSTLQNGVFYSCAREGEPDSPDIPEKWMDSVSSHSPLSKSATCENMEGRHQEILVCQKREDSKASSIPTIRIPFKEVVMTNSLLRNHQNIEPSEKIMAAVVIQSYWRGYLMRRQTHFSTRLHTAATEGLPNSSIKNQTILKKGKRENIVNIRKQREKAAILIQAVWKGFILRKKLTTALEAIKNEESDEEYREIDLEDFIFDEAALEEEWLALDSTRFPSQTLLLSNQLHWPKIPGNLKWDDTSFNLPSNPAQAWLCNDKENLSSSEHTQFNSRSENKTSSWTPESKTSRKSLLKSEKEKKISEEWGFKDISTAQQMLKRAQKMKSKKLKKKIDSTVRLALFKNNENKVSLPKSPKMVQPRRDGYFEGIEEDPIHKDTTANEKLERNREYTYQWLHTQVGVHETTSSRNMKCNHFLPELDPDVLNGGRVQLVARLVSREDTDLDLFSMTNGSALSVNREKKNQAHRHSAGSSSKLWFPSKLI

SEQ ID NO: 45963 - protein, 107 aa, Homo sapiens
  Payload ID: 9392
  Gene Symbol: LRRIQ1
  Gene Name: leucine-rich repeats and IQ motif containing 1
  ENSP ID: ENSP00000431756
  MOD_RES (1)..(1): Any amino acid
XLFKNNENKVSLPKSPKMVQPRRDGYFEGIEEDPIHKDTTANEKLERNREYTYQWLHTQVGVHETTSSRNMKCNHFLPELDPDVLNGGRVQLVVRNVLKVTEKCCRH

SEQ ID NO: 45964 - protein, 144 aa, Homo sapiens
  Payload ID: 9392
  Gene Symbol: LRRIQ1
  Gene Name: leucine-rich repeats and IQ motif containing 1
  ENSP ID: ENSP00000436898
  MOD_RES (1)..(1): Any amino acid
XEESSEQLIKILSEIEKEEFMRSKTDCATPDFVPEPSPHDLPMDEHVLPDDADINFGYCEVEEKCRQSFEAWQEKQKELEDKEKQTLKAQRDREEKQFQEEEEKRHCWMKQFKVEKKKLENIQKEYIRNLHLQMEEERTRFKDQ

SEQ ID NO: 45965 - protein, 624 aa, Homo sapiens
  Payload ID: 9393
  Gene Symbol: LRRIQ3
  Gene Name: leucine-rich repeats and IQ motif containing 3
  Uniprot ID: A6PVS8
  ENSP ID: ENSP00000346414
MFHGTVTEELTSHEEWSHYNENIREGQKDFVFVKFNGLHLKSMENLQSCISLRVCIFSNNFITDIHPLQSCIKLIKLDLHGNQIKSLPNTKFWNGLKNLKLLYLHDNGFAKLKNICVLSACPTLIALTMFDCPVSLKKGYRHVLVNSIWPLKALDHHVISDEEIIQNWHLPERFKACNHRLFFNFCPALRKGTTYEEEINNIKHITSKINAILAHNSPVLIVQRWIRGFLVRKNLSPVFFHKKKQQEKIIRGYEAKWIYITKGYEDKLLKDLFFKPETNIKGKLAYWKHNIYYPVDLKNSSEHRKHVSSILCELKPKDLGMKSKTSRHLIQKGQESEDEIVDEKLDTSFRISVFKLPIYTSGSLKNNAVLREKKQHFFPAYPQPIYTTHPKPIIKKDIRLERSMKEFFAPQRAGMKLRTFSDIDKYYTEQKKQEYHKEKVRVVAMAQVARERVRVAVNEHLNQKKYATQKLIEENKETIQNSLRQVWQNRFNYLEKARERKALFLKEKSQKASERLLVQNLNNERTLLTRGLLKIDRLEKNEAVLKEKSLIVKQKLKAEKYRKNLLKEMKKVRSQEIYKRHCEEKFVMDMIAFEKACERLQDAKTKVAIVKTNLDFKVPNGLIK

SEQ ID NO: 45966 - protein, 191 aa, Homo sapiens
  Payload ID: 9393
  Gene Symbol: LRRIQ3
  Gene Name: leucine-rich repeats and IQ motif containing 3
  ENSP ID: ENSP00000359946
MFHGTVTEELTSHEEWSHYNENIREGQKDFVFVKFNGLHLKSMENLQSCISLRVCIFSNNFITDIHPLQSCIKLIKLDLHGNQGTTYEEEINNIKHITSKINAILAHNSPVLIVQRWIRGFLVRKNLSPVFFHKKKQQEKIIRGYEAKWIYITKGYEDKLLKDLFFKPETNIKGKLAYWKHDKKKLWVNFH

SEQ ID NO: 45967 - protein, 199 aa, Homo sapiens
  Payload ID: 9393
  Gene Symbol: LRRIQ3
  Gene Name: leucine-rich repeats and IQ motif containing 3
  Uniprot ID: A6PVS8
  ENSP ID: ENSP00000359948
MFHGTVTEELTSHEEWSHYNENIREGQKDFVFVKFNGLHLKSMENLQSCISLRVCIFSNNFITDIHPLQSCIKLIKLDLHGNQIKSLPNTKFWNGLKNLKLLYLHDNGFAKLKNICVLSACPTLIALTMFDCPVSLKKGYRHVLVNSIWPLKALDHHVISDEEIIQNWHLPERFKACNHRLFFNFCPALRKEKMKHSEV

SEQ ID NO: 45968 - protein, 624 aa, Homo sapiens; identical to SEQ ID NO: 45965
  Payload ID: 9393
  Gene Symbol: LRRIQ3
  Gene Name: leucine-rich repeats and IQ motif containing 3
  Uniprot ID: A6PVS8
  ENSP ID: ENSP00000378524

SEQ ID NO: 45969 - protein, 60 aa, Homo sapiens
  Payload ID: 9393
  Gene Symbol: LRRIQ3
  Gene Name: leucine-rich repeats and IQ motif containing 3
  ENSP ID: ENSP00000390376
NIYYPVDLKNSSEHRKHVSSILCELKPKDLGMKSKTSRHLIQKDLKKYIKDIVKKNLLWI

SEQ ID NO: 45970 - protein, 105 aa, Homo sapiens
  Payload ID: 9393
  Gene Symbol: LRRIQ3
  Gene Name: leucine-rich repeats and IQ motif containing 3
  ENSP ID: ENSP00000398289
  MOD_RES (1)..(1): Any amino acid
XNNFITDIHPLQSCIKLIKLDLHGNQGTTYEEEINNIKHITSKINAILAHNSPVLIVQRWIRGFLVRKNLRLLQSSEFKDCLKMCPRKREKKNIFFLIFKLIEKY

SEQ ID NO: 45971 - protein, 299 aa, Homo sapiens
  Payload ID: 9393
  Gene Symbol: LRRIQ3
  Gene Name: leucine-rich repeats and IQ motif containing 3
  Uniprot ID: A6PVS8
  ENSP ID: ENSP00000415319
MFHGTVTEELTSHEEWSHYNENIREGQKDFVFVKFNGLHLKSMENLQSCISLRVCIFSNNFITDIHPLQSCIKLIKLDLHGNQIKSLPNTKFWNGLKNLKLLYLHDNGFAKLKNICVLSACPTLIALTMFDCPVSLKKGYRHVLVNSIWPLKALDHHVISDEEIIQNWHLPERFKACNHRLFFNFCPALRKGTTYEEEINNIKHITSKINAILAHNSPVLIVQRWIRGFLVRKNLSPVFFHKKKQQEKIIRGYEAKWIYITKGYEDKLLKDLFFKPETNIKGKLAYWKHDKKKLWVNFH

SEQ ID NO: 45972 - protein, 560 aa, Homo sapiens
  Payload ID: 9394
  Gene Symbol: LRRIQ4
  Gene Name: leucine-rich repeats and IQ motif containing 4
  Uniprot ID: A6NIV6
  ENSP ID: ENSP00000342188
MSKDIKSVEHSPKIHQRNDPQHVNDRTFFIDASNQSLTAIPLEIFTFTELEEVHLENNQIEEIPQEIQRLKNIRVLYLDKNNLRSLCPALGLLSSLESLDLSYNPIFSSSLVVVSFLHALRELRLYQTDLKEIPVVIFKNLHHLELLGLTGNHLKCLPKEIVNQTKLREIYLKRNQFEVFPQELCVLYTLEIIDLDENKIGAIPEEIGHLTGLQKFYMASNNLPVLPASLCQCSQLSVLDLSHNLLHSIPKSFAELRKMTEIGLSGNRLEKVPRLICRWTSLHLLYLGNTGLHRLRGSFRCLVNLRFLDLSQNHLHHCPLQICALKNLEVLGLDDNKIGQLPSELGSLSKLKILGLTGNEFLSFPEEVLSLASLEKLYIGQDQGFKLTYVPEHIRKLQSLKELYIENNHLEYLPVSLGSMPNLEVLDCRHNLLKQLPDAICQAQALKELRLEDNLLTHLPENLDSLVNLKVLTLMDNPMEEPPKEVCAEGNEAIWKYLKENRNRNIMATKIQAWWRGTMVQRGFGKFGELLKPQKKGKTSPKDKKGKKDVKGKPGKGKKK

SEQ ID NO: 45973 - protein, 345 aa, Homo sapiens
  Payload ID: 9395
  Gene Symbol: LRTM1
  Gene Name: leucine-rich repeats and transmembrane domains 1
  Uniprot ID: Q9HBL6
  ENSP ID: ENSP00000273286
MKGELLLFSSVIVLLQVVCSCPDKCYCQSSTNFVDCSQQGLAEIPSHLPPQTRTLHLQDNQIHHLPAFAFRSVPWLMTLNLSNNSLSNLAPGAFHGLQHLQVLNLTQNSLLSLESRLFHSLPQLRELDLSSNNISHLPTSLGETWENLTILAVQQNQLQQLDRALLESMPSVRLLLLKDNLWKCNCHLLGLKLWLEKFVYKGGLTDGIICESPDTWKGKDLLRIPHELYQPCPLPAPDPVSSQAQWPGSAHGVVLRPPENHNAGERELLECELKPKPRPANLRHAIATVIITGVVCGIVCLMMLAAAIYGCTYAAITAQYHGGPLAQTNDPGKVEEKERFDSSPA

SEQ ID NO: 45974 - protein, 269 aa, Homo sapiens
  Payload ID: 9395
  Gene Symbol: LRTM1
  Gene Name: leucine-rich repeats and transmembrane domains 1
  Uniprot ID: Q9HBL6
  ENSP ID: ENSP00000419772
MTLNLSNNSLSNLAPGAFHGLQHLQVLNLTQNSLLSLESRLFHSLPQLRELDLSSNNISHLPTSLGETWENLTILAVQQNQLQQLDRALLESMPSVRLLLLKDNLWKCNCHLLGLKLWLEKFVYKGGLTDGIICESPDTWKGKDLLRIPHELYQPCPLPAPDPVSSQAQWPGSAHGVVLRPPENHNAGERELLECELKPKPRPANLRHAIATVIITGVVCGIVCLMMLAAAIYGCTYAAITAQYHGGPLAQTNDPGKVEEKERFDSSPA

SEQ ID NO: 45975 - protein, 370 aa, Homo sapiens
  Payload ID: 9396
  Gene Symbol: LRTM2
  Gene Name: leucine-rich repeats and transmembrane domains 2
  Uniprot ID: Q8N967
  ENSP ID: ENSP00000299194
MLAPGSSPGQRGRLALQWRQVSWITCWIALYAVEALPTCPFSCKCDSRSLEVDCSGLGLTTVPPDVPAATRTLLLLNNKLSALPSWAFANLSSLQRLDLSNNFLDRLPRSIFGDLTNLTELQLRNNSIRTLDRDLLRHSPLLRHLDLSINGLAQLPPGLFDGLLALRSLSLRSNRLQNLDRLTFEPLANLQLLQVGDNPWECDCNLREFKHWMEWFSYRGGRLDQLACTLPKELRGKDMRMVPMEMFNYCSQLEDENSSAGLDIPGPPCTKASPEPAKPKPGAEPEPEPSTACPQKQRHRPASVRRAMGTVIIAGVVCGVVCIMMVVAAAYGCIYASLMAKYHRELKKRQPLMGDPEGEHEDQKQISSVA

SEQ ID NO: 45976 - protein, 93 aa, Homo sapiens
  Payload ID: 9396
  Gene Symbol: LRTM2
  Gene Name: leucine-rich repeats and transmembrane domains 2
  ENSP ID: ENSP00000438678
MLAPGSSPGQRGRLALQWRQVSWITCWIALYAVEALPTCPFSCKCDSRSLEVDCSGLGLTTVPPDVPAATRTLLLLNNKLSALPSWAFANLSS

SEQ ID NO: 45977 - protein, 95 aa, Homo sapiens
  Payload ID: 9396
  Gene Symbol: LRTM2
  Gene Name: leucine-rich repeats and transmembrane domains 2
  ENSP ID: ENSP00000444104
MLAPGSSPGQRGRLALQWRQVSWITCWIALYAVEALPTCPFSCKCDSRSLEVDCSGLGLTTVPPDVPAATRTLLLLNNKLSALPSWAFANLSSLQ

SEQ ID NO: 45978 - protein, 370 aa, Homo sapiens; identical to SEQ ID NO: 45975
  Payload ID: 9396
  Gene Symbol: LRTM2
  Gene Name: leucine-rich repeats and transmembrane domains 2
  Uniprot ID: Q8N967
  ENSP ID: ENSP00000444737

SEQ ID NO: 45979 - protein, 370 aa, Homo sapiens; identical to SEQ ID NO: 45975
  Payload ID: 9396
  Gene Symbol: LRTM2
  Gene Name: leucine-rich repeats and transmembrane domains 2
  Uniprot ID: Q8N967
  ENSP ID: ENSP00000446278

SEQ ID NO: 45980 - protein, 647 aa, Homo sapiens
  Payload ID: 9397
  Gene Symbol: LRWD1
  Gene Name: leucine-rich repeats and WD repeat domain containing 1
  Uniprot ID: Q9UFC0
  ENSP ID: ENSP00000292616
MGPLSARLLMQRGRPKSDRLGKIRSLDLSGLELLSEHLDPKLLCRLTQLQELDLSNNHLETLPDNLGLSHLRVLRCANNQLGDVTALCQFPKLEELSLEGNPFLTVNDNLKVSFLLPTLRKVNGKDASSTYSQVENLNRELTSRVTAHWEKFMATLGPEEEAEKAQADFVKSAVRDVRYGPESLSEFTQWRVRMISEELVAASRTQVQKANSPEKPPEAGAAHKPRARLAALKRPDDVPLSLSPSKRACASPSAQVEGSPVAGSDGSQPAVKLEPLHFLQCHSKNNSPQDLETQLWACAFEPAWEEGATSQTVATCGGEAVCVIDCQTGIVLHKYKAPGEEFFSVAWTALMVVTQAGHKKRWSVLAAAGLRGLVRLLHVRAGFCCGVIRAHKKAIATLCFSPAHETHLFTASYDKRIILWDIGVPNQDYEFQASQLLTLDTTSIPLRLCPVASCPDARLLAGCEGGCCCWDVRLDQPQKRRVCEVEFVFSEGSEASGRRVDGLAFVNEDIVASKGSGLGTICLWSWRQTWGGRGSQSTVAVVVLARLQWSSTELAYFSLSACPDKGIVLCGDEEGNVWLYDVSNILKQPPLLPAALQAPTQILKWPQPWALGQVVTKTMVNTVVANASFTYLTALTDSNIVAIWGRM

SEQ ID NO: 45981 - protein, 41 aa, Homo sapiens
  Payload ID: 9397
  Gene Symbol: LRWD1
  Gene Name: leucine-rich repeats and WD repeat domain containing 1
  ENSP ID: ENSP00000417913
  MOD_RES (1)..(1): Any amino acid
XARLLMQRGRPKSDRLGKIRSLDGVESGVVARASSPSYSRG

SEQ ID NO: 45982 - protein, 45 aa, Homo sapiens
  Payload ID: 9397
  Gene Symbol: LRWD1
  Gene Name: leucine-rich repeats and WD repeat domain containing 1
  ENSP ID: ENSP00000418204
MGPLSARLLMQRGRPKSDRLGKIRSLDGVESGVVARASSPSYSRG

SEQ ID NO: 45983 - protein, 242 aa, Homo sapiens
  Payload ID: 9397
  Gene Symbol: LRWD1
  Gene Name: leucine-rich repeats and WD repeat domain containing 1
  ENSP ID: ENSP00000420373
  MOD_RES (1)..(1): Any amino acid
XRIILWDIGVPNQDYEFQASQLLTLDTTSIPLRLCPVASCPDARLLAGCEGGCCCWDVRLDQPQKRRVCEVEFVFSEGSEASGRRVDGLAFVNEDIVASKGSGLGTICLWSWRQTWGGRGSQSTVAVVVLARLQWSSTELAYFSLSACPDKGIVLCGDEEGNVWLYDVSNILKQPPLLPAALQAPTQPSPPLSPHQILKWPQPWALGQVVTKTMVNTVVANASFTYLTALTDSNIVAIWGRM

SEQ ID NO: 45984 - protein, 154 aa, Homo sapiens
  Payload ID: 9397
  Gene Symbol: LRWD1
  Gene Name: leucine-rich repeats and WD repeat domain containing 1
  ENSP ID: ENSP00000420650
MATLGPEEEAEKAQADFVKSAVRDVRYGPESLSEFTQWRVRMISEELVAASRTQVQKANSPEKPPEAGAAHKPRARLAALKRPDDVPLSLSPSKRACASPSAQVEGSPVAGSDGSQPAVKLEPLHFLQCHSKNNSPQDLETQLWACAFEPAWEE

SEQ ID NO: 45985 - protein, 179 aa, Homo sapiens
  Payload ID: 9397
  Gene Symbol: LRWD1
  Gene Name: leucine-rich repeats and WD repeat domain containing 1
  ENSP ID: ENSP00000420729
  MOD_RES (1)..(1): Any amino acid
XSLDLSGLELLSEHLDPKLLCRLTQLQELDLSNNHLETLPDNLGLSHLRVLRCANNQLGDVTALCQFPKLEELSLEGNPFLTVNDNLKVSFLLPTLRKVNGKDASSTYSQVENLNRELTSRVTAHWEKFMATLGPEEEAEKAQADFVKSAVRDVRYGPESLSEFTQWRGWGHLGLCPAS

SEQ ID NO: 45986 - protein, 45 aa, Homo sapiens; identical to SEQ ID NO: 45982
  Payload ID: 9397
  Gene Symbol: LRWD1
  Gene Name: leucine-rich repeats and WD repeat domain containing 1
  ENSP ID: ENSP00000487494

SEQ ID NO: 45987 - protein, 131 aa, Homo sapiens
  Payload ID: 9398
  Gene Symbol: LSMEM1
  Gene Name: leucine-rich single-pass membrane protein 1
  Uniprot ID: Q8N8F7
  ENSP ID: ENSP00000323304
MTHSSQDTGSCGIQEDGKLYVVDSINDLNKLNLCPAGSQHLFPLEDKIPVLGTNSGNGSRSLFFVGLLIVLIVSLALVFFVIFLIVQTGNKMDDVSRRLTAEGKDIDDLKRINNMIVKRLNQLNQLDSEQN

SEQ ID NO: 45988 - protein, 131 aa, Homo sapiens; identical to SEQ ID NO: 45987
  Payload ID: 9398
  Gene Symbol: LSMEM1
  Gene Name: leucine-rich single-pass membrane protein 1
  Uniprot ID: Q8N8F7
  ENSP ID: ENSP00000389278

SEQ ID NO: 45989 - protein, 59 aa, Homo sapiens
  Payload ID: 9398
  Gene Symbol: LSMEM1
  Gene Name: leucine-rich single-pass membrane protein 1
  Uniprot ID: Q8N8F7
  ENSP ID: ENSP00000412823
MTHSSQDTGSCGIQEDGKLYVVDSINDLNKLNLCPAGSQHLFLLRQSSKNFPKRSKEIA

SEQ ID NO: 45990 - protein, 164 aa, Homo sapiens
  Payload ID: 9399
  Gene Symbol: LSMEM2
  Gene Name: leucine-rich single-pass membrane protein 2
  Uniprot ID: Q8N112
  ENSP ID: ENSP00000315081
MPSLAPDCPLLAMPEETQEDSVAPMMPSQRSRGPLAPNHVHEVCLHQVESISDLHSGAGTLRPYLTEEARPWDELLGVLPPSLCAQAGCSPVYRRGGFLLLLALLVLTCLVLALLAVYLSVLQSESLRILAHTLRTQEETLLKLRLASLSQLRRLNSSEAQAPS

SEQ ID NO: 45991 - protein, 291 aa, Homo sapiens
  Payload ID: 9400
  Gene Symbol: LGI1
  Gene Name: leucine-rich, glioma inactivated 1
  Uniprot ID: O95970
  ENSP ID: ENSP00000360467
MESERSKRMGNACIPLKRIAYFLCLLSALLLTEGKKPAKPKCPAVCTCTKDNALCENARSIPRTVPPDVISLSFVRSGFTEISEGSFLFTPSLQLLLFTSNSFDVISDDAFIGLPHLEYLFIENNNIKSISRHTFRGLKSLIHLSLANNNLQTLPKDIFKGLDSLTNVDLRGNSFNCDCKLKWLVEWLGHTNATVEDIYCEGPPEYKKRKINSLSSKDFDCIITEFAKSQDLPYQSLSIDTFSYLNDEYVVIAQPFTGKCIFLEWDHVEKTFRNYDNITVLREIHRFTNMS

SEQ ID NO: 45992 - protein, 557 aa, Homo sapiens
  Payload ID: 9400
  Gene Symbol: LGI1
  Gene Name: leucine-rich, glioma inactivated 1
  Uniprot ID: O95970
  ENSP ID: ENSP00000360472
MESERSKRMGNACIPLKRIAYFLCLLSALLLTEGKKPAKPKCPAVCTCTKDNALCENARSIPRTVPPDVISLSFVRSGFTEISEGSFLFTPSLQLLLFTSNSFDVISDDAFIGLPHLEYLFIENNNIKSISRHTFRGLKSLIHLSLANNNLQTLPKDIFKGLDSLTNVDLRGNSFNCDCKLKWLVEWLGHTNATVEDIYCEGPPEYKKRKINSLSSKDFDCIITEFAKSQDLPYQSLSIDTFSYLNDEYVVIAQPFTGKCIFLEWDHVEKTFRNYDNITGTSTVVCKPIVIETQLYVIVAQLFGGSHIYKRDSFANKFIKIQDIEILKIRKPNDIETFKIENNWYFVVADSSKAGFTTIYKWNGNGFYSHQSLHAWYRDTDVEYLEIVRTPQTLRTPHLILSSSSQRPVIYQWNKATQLFTNQTDIPNMEDVYAVKHFSVKGDVYICLTRFIGDSKVMKWGGSSFQDIQRMPSRGSMVFQPLQINNYQYAILGSDYSFTQVYNWDAEKAKFVKFQELNVQAPRSFTHVSINKRNFLFASSFKGNTQIYKHVIVDLSA

SEQ ID NO: 45993 - protein, 72 aa, Homo sapiens
  Payload ID: 9400
  Gene Symbol: LGI1
  Gene Name: leucine-rich, glioma inactivated 1
  ENSP ID: ENSP00000485868
MESERSKRMGNACIPLKRIAYFLCLLSALLLTEGKKPAKPKCPAVCTCTKDNALCENARSIPRTVPPDVISL

SEQ ID NO: 45994 - protein, 509 aa, Homo sapiens
  Payload ID: 9400
  Gene Symbol: LGI1
  Gene Name: leucine-rich, glioma inactivated 1
  Uniprot ID: O95970
  ENSP ID: ENSP00000485917
MESERSKRMGNACIPLKRIAYFLCLLSALLLTEGKKPAKPKCPAVCTCTKDNALCENARSIPRTVPPDVISLSFVRSGFTEISEGSFLFTPSLQLLSLANNNLQTLPKDIFKGLDSLTNVDLRGNSFNCDCKLKWLVEWLGHTNATVEDIYCEGPPEYKKRKINSLSSKDFDCIITEFAKSQDLPYQSLSIDTFSYLNDEYVVIAQPFTGKCIFLEWDHVEKTFRNYDNITGTSTVVCKPIVIETQLYVIVAQLFGGSHIYKRDSFANKFIKIQDIEILKIRKPNDIETFKIENNWYFVVADSSKAGFTTIYKWNGNGFYSHQSLHAWYRDTDVEYLEIVRTPQTLRTPHLILSSSSQRPVIYQWNKATQLFTNQTDIPNMEDVYAVKHFSVKGDVYICLTRFIGDSKVMKWGGSSFQDIQRMPSRGSMVFQPLQINNYQYAILGSDYSFTQVYNWDAEKAKFVKFQELNVQAPRSFTHVSINKRNFLFASSFKGNTQIYKHVIVDLSA

SEQ ID NO: 45995 - protein, 96 aa, Homo sapiens
  Payload ID: 9400
  Gene Symbol: LGI1
  Gene Name: leucine-rich, glioma inactivated 1
  ENSP ID: ENSP00000486517
MESERSKRMGNACIPLKRIAYFLCLLSALLLTEGKKPAKPKCPAVCTCTKDNALCENARSIPRTVPPDVISLSFVRSGFTEISEGSFLFTPSLQLL

SEQ ID NO: 45996 - protein, 168 aa, Homo sapiens
  Payload ID: 9400
  Gene Symbol: LGI1
  Gene Name: leucine-rich, glioma inactivated 1
  ENSP ID: ENSP00000486607
MESERSKRMGNACIPLKRIAYFLCLLSALLLTEGKKPAKPKCPAVCTCTKDNALCENARSIPRTVPPDVISLSFVRSGFTEISEGSFLFTPSLQLLLFTSNSFDVISDDAFIGLPHLEYLFIENNNIKSISRHTFRGLKSLIHLSLANNNLQTLPKDIFKGLDSLTNV

SEQ ID NO: 45997 - protein, 72 aa, Homo sapiens; identical to SEQ ID NO: 45993
  Payload ID: 9400
  Gene Symbol: LGI1
  Gene Name: leucine-rich, glioma inactivated 1
  ENSP ID: ENSP00000486859

SEQ ID NO: 45998 - protein, 533 aa, Homo sapiens
  Payload ID: 9400
  Gene Symbol: LGI1
  Gene Name: leucine-rich, glioma inactivated 1
  ENSP ID: ENSP00000486908
MESERSKRMGNACIPLKRIAYFLCLLSALLLTEGKKPAKPKCPAVCTCTKDNALCENARSIPRTVPPDVISLLFTSNSFDVISDDAFIGLPHLEYLFIENNNIKSISRHTFRGLKSLIHLSLANNNLQTLPKDIFKGLDSLTNVDLRGNSFNCDCKLKWLVEWLGHTNATVEDIYCEGPPEYKKRKINSLSSKDFDCIITEFAKSQDLPYQSLSIDTFSYLNDEYVVIAQPFTGKCIFLEWDHVEKTFRNYDNITGTSTVVCKPIVIETQLYVIVAQLFGGSHIYKRDSFANKFIKIQDIEILKIRKPNDIETFKIENNWYFVVADSSKAGFTTIYKWNGNGFYSHQSLHAWYRDTDVEYLEIVRTPQTLRTPHLILSSSSQRPVIYQWNKATQLFTNQTDIPNMEDVYAVKHFSVKGDVYICLTRFIGDSKVMKWGGSSFQDIQRMPSRGSMVFQPLQINNYQYAILGSDYSFTQVYNWDAEKAKFVKFQELNVQAPRSFTHVSINKRNFLFASSFKGNTQIYKHVIVDLSA

SEQ ID NO: 45999 - protein, 72 aa, Homo sapiens; identical to SEQ ID NO: 45993
  Payload ID: 9400
  Gene Symbol: LGI1
  Gene Name: leucine-rich, glioma inactivated 1
  ENSP ID: ENSP00000487116

SEQ ID NO: 46000 - protein, 840 aa, Homo sapiens
  Payload ID: 9401
  Gene Symbol: LZTR1
  Gene Name: leucine-zipper-like transcription regulator 1
  Uniprot ID: Q8N653
  ENSP ID: ENSP00000215739
MAGPGSTGGQIGAAALAGGARSKVAPSVDFDHSCSDSVEYLTLNFGPFETVHRWRRLPPCDEFVGARRSKHTVVAYKDAIYVFGGDNGKTMLNDLLRFDVKDCSWCRAFTTGTPPAPRYHHSAVVYGSSMFVFGGYTGDIYSNSNLKNKNDLFEYKFATGQWTEWKIEGRLPVARSAHGATVYSDKLWIFAGYDGNARLNDMWTIGLQDRELTCWEEVAQSGEIPPSCCNFPVAVCRDKMFVFSGQSGAKITNNLFQFEFKDKTWTRIPTEHLLRGSPPPPQRRYGHTMVAFDRHLYVFGGAADNTLPNELHCYDVDFQTWEVVQPSSDSEVGGAEVPERACASEEVPTLTYEERVGFKKSRDVFGLDFGTTSAKQPTQPASELPSGRLFHAAAVISDAMYIFGGTVDNNIRSGEMYRFQFSCYPKCTLHEDYGRLWESRQFCDVEFVLGEKEECVQGHVAIVTARSRWLRRKITQARERLAQKLEQEAAPVPREAPGVAAGGARPPLLHVAIREAEARPFEVLMQFLYTDKIKYPRKGHVEDVLLIMDVYKLALSFQLCRLEQLCRQYIEASVDLQNVLVVCESAARLQLSQLKEHCLNFVVKESHFNQVIMMKEFERLSSPLIVEIVRRKQQPPPRTPLDQPVDIGTSLIQDMKAYLEGAGAEFCDITLLLDGHPRPAHKAILAARSSYFEAMFRSFMPEDGQVNISIGEMVPSRQAFESMLRYIYYGEVNMPPEDSLYLFAAPYYYGFYNNRLQAYCKQNLEMNVTVQNVLQILEAADKTQALDMKRHCLHIIVHQFTKVSKLPTLRSLSQQLLLDIIDSLASHISDKQCAELGADI

SEQ ID NO: 46001 - protein, 111 aa, Homo sapiens
  Payload ID: 9401
  Gene Symbol: LZTR1
  Gene Name: leucine-zipper-like transcription regulator 1
  ENSP ID: ENSP00000390836
  MOD_RES (1)..(1): Any amino acid
XVDLQNVLVVCESAARLQLSQLKEHCLNFVVKESHFNQVIMMKEFERLSSPLIVEIVRRKQQPPPRTPLDQPVDIGPFIPPALPGACADPGCWLLVMSAGTRGHAVGLEGA

SEQ ID NO: 46002 - protein, 97 aa, Homo sapiens
  Payload ID: 9401
  Gene Symbol: LZTR1
  Gene Name: leucine-zipper-like transcription regulator 1
  ENSP ID: ENSP00000393765
MQFLYTDKIKYPRKERAGCVRECRPAAAEPTQGALPELRGKGVPLQPGDHDEGVRAPLLSTDSGDCAAEAAAAPSHSLGPASGHWPLHSPSSPWGLC

SEQ ID NO: 46003 - protein, 117 aa, Homo sapiens
  Payload ID: 9401
  Gene Symbol: LZTR1
  Gene Name: leucine-zipper-like transcription regulator 1
  ENSP ID: ENSP00000397247
MAGPGSTGGQIGAAALAGGARSKVAPSVDFDHSCSDSVEYLTLNFGPFETVHRWRRLPPCDEFVGARRSKHTVVAYKDAIYVFGGDNGKTMLNDLLRFDVKDCSWCRGLHWGHLFQF

SEQ ID NO: 46004 - protein, 158 aa, Homo sapiens
  Payload ID: 9401
  Gene Symbol: LZTR1
  Gene Name: leucine-zipper-like transcription regulator 1
  ENSP ID: ENSP00000397252
  MOD_RES (1)..(1): Any amino acid
XEDGQVNISIGEMVPSRQAFESMLRYIYYGEVNMPPEDSLYLFAAPYYYGFYNNRLQAYCKQNLEMNVTVQNVLQILEAADKTQALDMKRHCLHIIVHQFTKVRALASPSGLASPWQWPCPGREGAQALWSPAVVGPGGERSRAAHHWPHLASSLGPA

SEQ ID NO: 46005 - protein, 101 aa, Homo sapiens
  Payload ID: 9401
  Gene Symbol: LZTR1
  Gene Name: leucine-zipper-like transcription regulator 1
  ENSP ID: ENSP00000406466
MAGPGSTGGQIGAAALAGGARSKVAPSVDFDHSCSDSVEYLTLNFGPFETVHRWRRLPPCDEFVGARYGAASTQWWPIKMPFMYLVETMGRPCSMTSCGSM

SEQ ID NO: 46006 - protein, 54 aa, Homo sapiens
  Payload ID: 9401
  Gene Symbol: LZTR1
  Gene Name: leucine-zipper-like transcription regulator 1
  ENSP ID: ENSP00000408789
FNQVIMMKEFERLSSPLIVEIVRRKQQPPPRTPLDQPVDIGHEGIPGGSGRGIL

SEQ ID NO: 46007 - protein, 1025 aa, Homo sapiens
  Payload ID: 9402
  Gene Symbol: LNPEP
  Gene Name: leucyl/cystinyl aminopeptidase
  Uniprot ID: Q9UIQ6
  ENSP ID: ENSP00000231368
MEPFTNDRLQLPRNMIENSMFEEEPDVVDLAKEPCLHPLEPDEVEYEPRGSRLLVRGLGEHEMEEDEEDYESSAKLLGMSFMNRSSGLRNSATGYRQSPDGACSVPSARTMVVCAFVIVVAVSVIMVIYLLPRCTFTKEGCHKKNQSIGLIQPFATNGKLFPWAQIRLPTAVVPLRYELSLHPNLTSMTFRGSVTISVQALQVTWNIILHSTGHNISRVTFMSAVSSQEKQAEILEYAYHGQIAIVAPEALLAGHNYTLKIEYSANISSSYYGFYGFSYTDESNEKKYFAATQFEPLAARSAFPCFDEPAFKATFIIKIIRDEQYTALSNMPKKSSVVLDDGLVQDEFSESVKMSTYLVAFIVGEMKNLSQDVNGTLVSIYAVPEKIGQVHYALETTVKLLEFFQNYFEIQYPLKKLDLVAIPDFEAGAMENWGLLTFREETLLYDSNTSSMADRKLVTKIIAHELAHQWFGNLVTMKWWNDLWLNEGFATFMEYFSLEKIFKELSSYEDFLDARFKTMKKDSLNSSHPISSSVQSSEQIEEMFDSLSYFKGSSLLLMLKTYLSEDVFQHAVVLYLHNHSYASIQSDDLWDSFNEVTNQTLDVKRMMKTWTLQKGFPLVTVQKKGKELFIQQERFFLNMKPEIQPSDTSYLWHIPLSYVTEGRNYSKYQSVSLLDKKSGVINLTEEVLWVKVNINMNGYYIVHYADDDWEALIHQLKINPYVLSDKDRANLINNIFELAGLGKVPLKRAFDLINYLGNENHTAPITEALFQTDLIYNLLEKLGYMDLASRLVTRVFKLLQNQIQQQTWTDEGTPSMRELRSALLEFACTHNLGNCSTTAMKLFDDWMASNGTQSLPTDVMTTVFKVGAKTDKGWSFLLGKYISIGSEAEKNKILEALASSEDVRKLYWLMKSSLNGDNFRTQKLSFIIRTVGRHFPGHLLAWDFVKENWNKLVQKFPLGSYTIQNIVAGSTYLFSTKTHLSEVQAFFENQSEATFRLRCVQEALEVIQLNIQWMEKNLKSLTWWL

SEQ ID NO: 46008 - protein, 1011 aa, Homo sapiens
  Payload ID: 9402
  Gene Symbol: LNPEP
  Gene Name: leucyl/cystinyl aminopeptidase
  Uniprot ID: Q9UIQ6
  ENSP ID: ENSP00000379117
MIENSMFEEEPDVVDLAKEPCLHPLEPDEVEYEPRGSRLLVRGLGEHEMEEDEEDYESSAKLLGMSFMNRSSGLRNSATGYRQSPDGACSVPSARTMVVCAFVIVVAVSVIMVIYLLPRCTFTKEGCHKKNQSIGLIQPFATNGKLFPWAQIRLPTAVVPLRYELSLHPNLTSMTFRGSVTISVQALQVTWNIILHSTGHNISRVTFMSAVSSQEKQAEILEYAYHGQIAIVAPEALLAGHNYTLKIEYSANISSSYYGFYGFSYTDESNEKKYFAATQFEPLAARSAFPCFDEPAFKATFIIKIIRDEQYTALSNMPKKSSVVLDDGLVQDEFSESVKMSTYLVAFIVGEMKNLSQDVNGTLVSIYAVPEKIGQVHYALETTVKLLEFFQNYFEIQYPLKKLDLVAIPDFEAGAMENWGLLTFREETLLYDSNTSSMADRKLVTKIIAHELAHQWFGNLVTMKWWNDLWLNEGFATFMEYFSLEKIFKELSSYEDFLDARFKTMKKDSLNSSHPISSSVQSSEQIEEMFDSLSYFKGSSLLLMLKTYLSEDVFQHAVVLYLHNHSYASIQSDDLWDSFNEVTNQTLDVKRMMKTWTLQKGFPLVTVQKKGKELFIQQERFFLNMKPEIQPSDTSYLWHIPLSYVTEGRNYSKYQSVSLLDKKSGVINLTEEVLWVKVNINMNGYYIVHYADDDWEALIHQLKINPYVLSDKDRANLINNIFELAGLGKVPLKRAFDLINYLGNENHTAPITEALFQTDLIYNLLEKLGYMDLASRLVTRVFKLLQNQIQQQTWTDEGTPSMRELRSALLEFACTHNLGNCSTTAMKLFDDWMASNGTQSLPTDVMTTVFKVGAKTDKGWSFLLGKYISIGSEAEKNKILEALASSEDVRKLYWLMKSSLNGDNFRTQKLSFIIRTVGRHFPGHLLAWDFVKENWNKLVQKFPLGSYTIQNIVAGSTYLFSTKTHLSEVQAFFENQSEATFRLRCVQEALEVIQLNIQWMEKNLKSLTWWL

SEQ ID NO: 46009 - protein, 485 aa, Homo sapiens
  Payload ID: 9403
  Gene Symbol: LARS
  Gene Name: leucyl-tRNA synthetase
  Uniprot ID: Q9P2J5
  ENSP ID: ENSP00000274562
MWPEQSDKWPTAVRANGHLLLNSEKMSKSTGNFLTLTQAIDKFSADGMRLALADAGDTVEDANFVEAMADAGILRLYTWVEWVKEMVANWDSLRSGPASTFNDRVFASELNAGIIKTDQNYEKMMFKEALKTGFFEFQAAKDKYRELAVEGMHRELVFRFIEVQTLLLAPFCPHLCEHIWTLLGKPDSIMNASWPVAGPVNEVLIHSSQYLMEVTHDLRLRLKNYMMPAKGKKTDKQPLQKPSHCTIYVAKNYPPWQHTTLSVLRKHFEANNGKLPDNKVIASELGSMPELKKYMKKVMPFVAMIKENLEKMGPRILDLQLEFDEKAVLMENIVYLTNSLELEHIEVKFASEAEDKIREDCCPGKPLNVFRIEPGVSVSLVNPQPSNGHFSTKIEIRQGDNCDSIIRRLMKMNRGIKDLSKVKLMRFDDPLLGPRRVPVLGKEYTEKTPISEHAVFNVDLMSKKIHLTENGIRVDIGDTIIYLVH

SEQ ID NO: 46010 - protein, 1176 aa, Homo sapiens
  Payload ID: 9403
  Gene Symbol: LARS
  Gene Name: leucyl-tRNA synthetase
  Uniprot ID: Q9P2J5
  ENSP ID: ENSP00000377954
MAERKGTAKVDFLKKIEKEIQQKWDTERVFEVNASNLEKQTSKGKYFVTFPYPYMNGRLHLGHTFSLSKCEFAVGYQRLKGKCCLFPFGLHCTGMPIKACADKLKREIELYGCPPDFPDEEEEEEETSVKTEDIIIKDKAKGKKSKAAAKAGSSKYQWGIMKSLGLSDEEIVKFSEAEHWLDYFPPLAIQDLKRMGLKVDWRRSFITTDVNPYYDSFVRWQFLTLRERNKIKFGKRYTIYSPKDGQPCMDHDRQTGEGVGPQEYTLLKLKVLEPYPSKLSGLKGKNIFLVAATLRPETMFGQTNCWVRPDMKYIGFETVNGDIFICTQKAARNMSYQGFTKDNGVVPVVKELMGEEILGASLSAPLTSYKVIYVLPMLTIKEDKGTGVVTSVPSDSPDDIAALRDLKKKQALRAKYGIRDDMVLPFEPVPVIEIPGFGNLSAVTICDELKIQSQNDREKLAEAKEKIYLKGFYEGIMLVDGFKGQKVQDVKKTIQKKMIDAGDALIYMEPEKQVMSRSSDECVVALCDQWYLDYGEENWKKQTSQCLKNLETFCEETRRNFEATLGWLQEHACSRTYGLGTHLPWDEQWLIESLSDSTIYMAFYTVAHLLQGGNLHGQAESPLGIRPQQMTKEVWDYVFFKEAPFPKTQIAKEKLDQLKQEFEFWYPVDLRVSGKDLVPNHLSYYLYNHVAMWPEQSDKWPTAVRANGHLLLNSEKMSKSTGNFLTLTQAIDKFSADGMRLALADAGDTVEDANFVEAMADAGILRLYTWVEWVKEMVANWDSLRSGPASTFNDRVFASELNAGIIKTDQNYEKMMFKEALKTGFFEFQAAKDKYRELAVEGMHRELVFRFIEVQTLLLAPFCPHLCEHIWTLLGKPDSIMNASWPVAGPVNEVLIHSSQYLMEVTHDLRLRLKNYMMPAKGKKTDKQPLQKPSHCTIYVAKNYPPWQHTTLSVLRKHFEANNGKLPDNKVIASELGSMPELKKYMKKVMPFVAMIKENLEKMGPRILDLQLEFDEKAVLMENIVYLTNSLELEHIEVKFASEAEDKIREDCCPGKPLNVFRIEPGVSVSLVNPQPSNGHFSTKIEIRQGDNCDSIIRRLMKMNRGIKDLSKVKLMRFDDPLLGPRRVPVLGKEYTEKTPISEHAVFNVDLMSKKIHLTENGIRVDIGDTIIYLVH

SEQ ID NO: 46011 - protein, 1122 aa, Homo sapiens
  Payload ID: 9403
  Gene Symbol: LARS
  Gene Name: leucyl-tRNA synthetase
  Uniprot ID: Q9P2J5
  ENSP ID: ENSP00000426005
MNGRLHLGHTFSLSKCEFAVGYQRLKGKCCLFPFGLHCTGMPIKACADKLKREIELYGCPPDFPDEEEEEEETSVKTEDIIIKDKAKGKKSKAAAKAGSSKYQWGIMKSLGLSDEEIVKFSEAEHWLDYFPPLAIQDLKRMGLKVDWRRSFITTDVNPYYDSFVRWQFLTLRERNKIKFGKRYTIYSPKDGQPCMDHDRQTGEGVGPQEYTLLKLKVLEPYPSKLSGLKGKNIFLVAATLRPETMFGQTNCWVRPDMKYIGFETVNGDIFICTQKAARNMSYQGFTKDNGVVPVVKELMGEEILGASLSAPLTSYKVIYVLPMLTIKEDKGTGVVTSVPSDSPDDIAALRDLKKKQALRAKYGIRDDMVLPFEPVPVIEIPGFGNLSAVTICDELKIQSQNDREKLAEAKEKIYLKGFYEGIMLVDGFKGQKVQDVKKTIQKKMIDAGDALIYMEPEKQVMSRSSDECVVALCDQWYLDYGEENWKKQTSQCLKNLETFCEETRRNFEATLGWLQEHACSRTYGLGTHLPWDEQWLIESLSDSTIYMAFYTVAHLLQGGNLHGQAESPLGIRPQQMTKEVWDYVFFKEAPFPKTQIAKEKLDQLKQEFEFWYPVDLRVSGKDLVPNHLSYYLYNHVAMWPEQSDKWPTAVRANGHLLLNSEKMSKSTGNFLTLTQAIDKFSADGMRLALADAGDTVEDANFVEAMADAGILRLYTWVEWVKEMVANWDSLRSGPASTFNDRVFASELNAGIIKTDQNYEKMMFKEALKTGFFEFQAAKDKYRELAVEGMHRELVFRFIEVQTLLLAPFCPHLCEHIWTLLGKPDSIMNASWPVAGPVNEVLIHSSQYLMEVTHDLRLRLKNYMMPAKGKKTDKQPLQKPSHCTIYVAKNYPPWQHTTLSVLRKHFEANNGKLPDNKVIASELGSMPELKKYMKKVMPFVAMIKENLEKMGPRILDLQLEFDEKAVLMENIVYLTNSLELEHIEVKFASEAEDKIREDCCPGKPLNVFRIEPGVSVSLVNPQPSNGHFSTKIEIRQGDNCDSIIRRLMKMNRGIKDLSKVKLMRFDDPLLGPRRVPVLGKEYTEKTPISEHAVFNVDLMSKKIHLTENGIRVDIGDTIIYLVH

SEQ ID NO: 46012 - protein, 160 aa, Homo sapiens
  Payload ID: 9403
  Gene Symbol: LARS
  Gene Name: leucyl-tRNA synthetase
  ENSP ID: ENSP00000481381
MAERKGTAKVDFLKKIEKEIQQKWDTERVFEVNASNLEKQTSKGKYFVTFPYPYMNGRLHLGHTFSLSKCEFAVGYQRLKGKCCLFPFGLHCTGMPIKACADKLKREIELYGCPPDFPDEEEEEEETSVKTEDIIIKDKAKGKKSKAALKLDLLNTSGAL

SEQ ID NO: 46013 - protein, 903 aa, Homo sapiens
  Payload ID: 9404
  Gene Symbol: LARS2
  Gene Name: leucyl-tRNA synthetase 2, mitochondrial
  Uniprot ID: Q15031
  ENSP ID: ENSP00000265537
MASVWQRLGFYASLLKRQLNGGPDVIKWERRVIPGCTRSIYSATGKWTKEYTLQTRKDVEKWWHQRIKEQASKISEADKSKPKFYVLSMFPYPSGKLHMGHVRVYTISDTIARFQKMRGMQVINPMGWDAFGLPAENAAVERNLHPQSWTQSNIKHMRKQLDRLGLCFSWDREITTCLPDYYKWTQYLFIKLYEAGLAYQKEALVNWDPVDQTVLANEQVDEHGCSWRSGAKVEQKYLRQWFIKTTAYAKAMQDALADLPEWYGIKGMQAHWIGDCVGCHLDFTLKVHGQATGEKLTAYTATPEAIYGTSHVAISPSHRLLHGHSSLKEALRMALVPGKDCLTPVMAVNMLTQQEVPVVILAKADLEGSLDSKIGIPSTSSEDTILAQTLGLAYSEVIETLPDGTERLSSSAEFTGMTRQDAFLALTQKARGKRVGGDVTSDKLKDWLISRQRYWGTPIPIVHCPVCGPTPVPLEDLPVTLPNIASFTGKGGPPLAMASEWVNCSCPRCKGAAKRETDTMDTFVDSAWYYFRYTDPHNPHSPFNTAVADYWMPVDLYIGGKEHAVMHLFYARFFSHFCHDQKMVKHREPFHKLLAQGLIKGQTFRLPSGQYLQREEVDLTGSVPVHAKTKEKLEVTWEKMSKSKHNGVDPEEVVEQYGIDTIRLYILFAAPPEKDILWDVKTDALPGVLRWQQRLWTLTTRFIEARASGKSPQPQLLSNKEKAEARKLWEYKNSVISQVTTHFTEDFSLNSAISQLMGLSNALSQASQSVILHSPEFEDALCALMVMAAPLAPHVTSEIWAGLALVPRKLCAHYTWDASVLLQAWPAVDPEFLQQPEVVQMAVLINNKACGKIPVPQQVARDQDKVHEFVLQSELGVRLLQGRSIKKSFLSPRTALINFLVQD

SEQ ID NO: 46014 - protein, 114 aa, Homo sapiens
  Payload ID: 9404
  Gene Symbol: LARS2
  Gene Name: leucyl-tRNA synthetase 2, mitochondrial
  ENSP ID: ENSP00000401388
MASVWQRLGFYASLLKRQLNGGPDVIKWERRVIPGCTRSIYSATGKWTKEYTLQTRKDVEKWWHQRIKEQASKISEADKSKPKFYVLSMFPYPSGKLHMGHVRVYTISDTIARF

SEQ ID NO: 46015 - protein, 144 aa, Homo sapiens
  Payload ID: 9404
  Gene Symbol: LARS2
  Gene Name: leucyl-tRNA synthetase 2, mitochondrial
  ENSP ID: ENSP00000406611
MASVWQRLGFYASLLKRQLNGGPDVIKWERRVIPGCTRSIYSATGKWTKEYTLQTRKDVEKWWHQRIKEQASKISEADVINPMGWDAFGLPAENAAVERNLHPQSWTQSNIKHMRKQLDRLGLCFSWDREITTCLPDYYKWTQY

SEQ ID NO: 46016 - protein, 903 aa, Homo sapiens; identical to SEQ ID NO: 46013
  Payload ID: 9404
  Gene Symbol: LARS2
  Gene Name: leucyl-tRNA synthetase 2, mitochondrial
  Uniprot ID: Q15031
  ENSP ID: ENSP00000408576

SEQ ID NO: 46017 - protein, 860 aa, Homo sapiens
  Payload ID: 9404
  Gene Symbol: LARS2
  Gene Name: leucyl-tRNA synthetase 2, mitochondrial
  ENSP ID: ENSP00000412893
MASVWQRLGFYASLLKRQLNGGPDVIKWERRVIPGCTRSIYSATGKWTKEYTLQTRKDVEKWWHQRIKEQASKISEADVINPMGWDAFGLPAENAAVERNLHPQSWTQSNIKHMRKQLDRLGLCFSWDREITTCLPDYYKWTQYLFIKLYEAGLAYQKEALVNWDPVDQTVLANEQVDEHGCSWRSGAKVEQKYLRQWFIKTTAYAKAMQDALADLPEWYGIKGMQAHWIGDCVGCHLDFTLKVHGQATGEKLTAYTATPEAIYGTSHVAISPSHRLLHGHSSLKEALRMALVPGKDCLTPVMAVNMLTQQEVPVVILAKADLEGSLDSKIGIPSTSSEDTILAQTLGLAYSEVIETLPDGTERLSSSAEFTGMTRQDAFLALTQKARGKRVGGDVTSDKLKDWLISRQRYWGTPIPIVHCPVCGPTPVPLEDLPVTLPNIASFTGKGGPPLAMASEWVNCSCPRCKGAAKRETDTMDTFVDSAWYYFRYTDPHNPHSPFNTAVADYWMPVDLYIGGKEHAVMHLFYARFFSHFCHDQKMVKHREPFHKLLAQGLIKGQTFRLPSGQYLQREEVDLTGSVPVHAKTKEKLEVTWEKMSKSKHNGVDPEEVVEQYGIDTIRLYILFAAPPEKDILWDVKTDALPGVLRWQQRLWTLTTRFIEARASGKSPQPQLLSNKEKAEARKLWEYKNSVISQVTTHFTEDFSLNSAISQLMGLSNALSQASQSVILHSPEFEDALCALMVMAAPLAPHVTSEIWAGLALVPRKLCAHYTWDASVLLQAWPAVDPEFLQQPEVVQMAVLINNKACGKIPVPQQVARDQDKVHEFVLQSELGVRLLQGRSIKKSFLSPRTALINFLVQD

SEQ ID NO: 46018 - protein, 202 aa, Homo sapiens
  Payload ID: 9405
  Gene Symbol: LIF
  Gene Name: leukemia inhibitory factor
  Uniprot ID: P15018
  ENSP ID: ENSP00000249075
MKVLAAGVVPLLLVLHWKHGAGSPLPITPVNATCAIRHPCHNNLMNQIRSQLAQLNGSANALFILYYTAQGEPFPNNLDKLCGPNVTDFPPFHANGTEKAKLVELYRIVVYLGTSLGNITRDQKILNPSALSLHSKLNATADILRGLLSNVLCRLCSKYHVGHVDVTYGPDTSGKDVFQKKKLGCQLLGKYKQIIAVLAQAF

SEQ ID NO: 46019 - protein, 88 aa, Homo sapiens
  Payload ID: 9405
  Gene Symbol: LIF
  Gene Name: leukemia inhibitory factor
  Uniprot ID: P15018
  ENSP ID: ENSP00000384450
MKVLAAVHSPGGAVPQQPGQAMWPQRDGLPALPRQRHGEGQAGGAVPHSRVPWHLPGQHHPGPEDPQPQCPQPPQQAQRHRRHPARPP

SEQ ID NO: 46020 - protein, 1097 aa, Homo sapiens
  Payload ID: 9406
  Gene Symbol: LIFR
  Gene Name: leukemia inhibitory factor receptor alpha
  Uniprot ID: P42702
  ENSP ID: ENSP00000263409
MMDIYVCLKRPSWMVDNKRMRTASNFQWLLSTFILLYLMNQVNSQKKGAPHDLKCVTNNLQVWNCSWKAPSGTGRGTDYEVCIENRSRSCYQLEKTSIKIPALSHGDYEITINSLHDFGSSTSKFTLNEQNVSLIPDTPEILNLSADFSTSTLYLKWNDRGSVFPHRSNVIWEIKVLRKESMELVKLVTHNTTLNGKDTLHHWSWASDMPLECAIHFVEIRCYIDNLHFSGLEEWSDWSPVKNISWIPDSQTKVFPQDKVILVGSDITFCCVSQEKVLSALIGHTNCPLIHLDGENVAIKIRNISVSASSGTNVVFTTEDNIFGTVIFAGYPPDTPQQLNCETHDLKEIICSWNPGRVTALVGPRATSYTLVESFSGKYVRLKRAEAPTNESYQLLFQMLPNQEIYNFTLNAHNPLGRSQSTILVNITEKVYPHTPTSFKVKDINSTAVKLSWHLPGNFAKINFLCEIEIKKSNSVQEQRNVTIKGVENSSYLVALDKLNPYTLYTFRIRCSTETFWKWSKWSNKKQHLTTEASPSKGPDTWREWSSDGKNLIIYWKPLPINEANGKILSYNVSCSSDEETQSLSEIPDPQHKAEIRLDKNDYIISVVAKNSVGSSPPSKIASMEIPNDDLKIEQVVGMGKGILLTWHYDPNMTCDYVIKWCNSSRSEPCLMDWRKVPSNSTETVIESDEFRPGIRYNFFLYGCRNQGYQLLRSMIGYIEELAPIVAPNFTVEDTSADSILVKWEDIPVEELRGFLRGYLFYFGKGERDTSKMRVLESGRSDIKVKNITDISQKTLRIADLQGKTSYHLVLRAYTDGGVGPEKSMYVVTKENSVGLIIAILIPVAVAVIVGVVTSILCYRKREWIKETFYPDIPNPENCKALQFQKSVCEGSSALKTLEMNPCTPNNVEVLETRSAFPKIEDTEIISPVAERPEDRSDAEPENHVVVSYCPPIIEEEIPNPAADEAGGTAQVIYIDVQSMYQPQAKPEEEQENDPVGGAGYKPQMHLPINSTVEDIAAEEDLDKTAGYRPQANVNTWNLVSPDSPRSIDSNSEIVSFGSPCSINSRQFLIPPKDEDSPKSNGGGWSFTNFFQNKPND

SEQ ID NO: 46021 - protein, 1097 aa, Homo sapiens; identical to SEQ ID NO: 46020
  Payload ID: 9406
  Gene Symbol: LIFR
  Gene Name: leukemia inhibitory factor receptor alpha
  Uniprot ID: P42702
  ENSP ID: ENSP00000398368

SEQ ID NO: 46022 - protein, 125 aa, Homo sapiens
  Payload ID: 9406
  Gene Symbol: LIFR
  Gene Name: leukemia inhibitory factor receptor alpha
  ENSP ID: ENSP00000426685
MMDIYVCLKRPSWMVDNKRMRTASNFQWLLSTFILLYLMNQVNSQKKGAPHDLKCVTNNLQVWNCSWKAPSGTGRGTDYEVCIENRSRSCYQLEKTSIKIPALSHGDYEITINSLHDFGSSTSKF

SEQ ID NO: 46023 - protein, 66 aa, Homo sapiens
  Payload ID: 9406
  Gene Symbol: LIFR
  Gene Name: leukemia inhibitory factor receptor alpha
  ENSP ID: ENSP00000426919
  MOD_RES (1)..(1): Any amino acid
XWSNKKQHLTTEASPSKGPDTWREWSSDGKNLIIYWKMRKHSPFLKSLILSTKQRYDLIRMTTSSA

SEQ ID NO: 46024 - protein, 74 aa, Homo sapiens
  Payload ID: 9406
  Gene Symbol: LIFR
  Gene Name: leukemia inhibitory factor receptor alpha
  ENSP ID: ENSP00000427310
MMDIYVCLKRPSWMVDNKRMRTASNFQWLLSTFILLYLMNQVNSQKKGAPHDLKCVTNNLQVWNCSWKAPSGTG

SEQ ID NO: 46025 - protein, 178 aa, Homo sapiens
  Payload ID: 9407
  Gene Symbol: LNP1
  Gene Name: leukemia NUP98 fusion partner 1
  Uniprot ID: A1A4G5
  ENSP ID: ENSP00000373191
MEHKDDDDDDVSFAKWMSSFWGHSWREEDQRGLRERHRLQATSHRKTSLPCPLPVLPRIPSSDCHPRRHSHEDQEFRCRSHVRDYRKYSEDGSFKEPLESKGRSHSKIEKFSESFERQLCFRTKRSASLGPESRKERNERECLRMEIKSRKKVEEERSSRKEEHGEAHMAPLFEKGPE

SEQ ID NO: 46026 - protein, 191 aa, Homo sapiens
  Payload ID: 9407
  Gene Symbol: LNP1
  Gene Name: leukemia NUP98 fusion partner 1
  ENSP ID: ENSP00000417985
MEHKDDDDDDVSFAKWMSSFWGHSWREEDQRGLRERHRLQATSHRKTSLPCPSFYTVNFFILYSQLPVLPRIPSSDCHPRRHSHEDQEFRCRSHVRDYRKYSEDGSFKEPLESKGRSHSKIEKFSESFERQLCFRTKRSASLGPESRKERNERECLRMEIKSRKKVEEERSSRKEEHGEAHMAPLFEKGPE

SEQ ID NO: 46027 - protein, 56 aa, Homo sapiens
  Payload ID: 9407
  Gene Symbol: LNP1
  Gene Name: leukemia NUP98 fusion partner 1
  ENSP ID: ENSP00000419213
MEHKDDDDDDVSFAKWMSSFWGHSWREEDQRGLRERHRLQATSHRKTSLPCPNSII

SEQ ID NO: 46028 - protein, 334 aa, Homo sapiens
  Payload ID: 9408
  Gene Symbol: LECT1
  Gene Name: leukocyte cell derived chemotaxin 1
  Uniprot ID: O75829
  ENSP ID: ENSP00000367198
MTENSDKVPIALVGPDDVEFCSPPAYATLTVKPSSPARLLKVGAVVLISGAVLLLFGAIGAFYFWKGSDSHIYNVHYTMSINGKLQDGSMEIDAGNNLETFKMGSGAEEAIAVNDFQNGITGIRFAGGEKCYIKAQVKARIPEVGAVTKQSISSKLEGKIMPVKYEENSLIWVAVDQPVKDNSFLSSKVLELCGDLPIFWLKPTYPKEIQRERREVVRKIVPTTTKRPHSGPRSNPGAGRLNNETRPSVQEDSQAFNPDNPYHQQEGESMTFDPRLDHEGICCIECRRSYTHCQKICEPLGGYYPWPYNYQGCRSACRVIMPCSWWVARILGMV

SEQ ID NO: 46029 - protein, 333 aa, Homo sapiens
  Payload ID: 9408
  Gene Symbol: LECT1
  Gene Name: leukocyte cell derived chemotaxin 1
  Uniprot ID: O75829
  ENSP ID: ENSP00000388576
MTENSDKVPIALVGPDDVEFCSPPAYATLTVKPSSPARLLKVGAVVLISGAVLLLFGAIGAFYFWKGSDSHIYNVHYTMSINGKLQDGSMEIDAGNNLETFKMGSGAEEAIAVNDFQNGITGIRFAGGEKCYIKAQVKARIPEVGAVTKQSISSKLEGKIMPVKYEENSLIWVAVDQPVKDNSFLSSKVLELCGDLPIFWLKPTYPKEIQRERREVVRKIVPTTTKRPHSGPRSNPGAGRLNNETRPSVQEDSQAFNPDNPYHQEGESMTFDPRLDHEGICCIECRRSYTHCQKICEPLGGYYPWPYNYQGCRSACRVIMPCSWWVARILGMV

SEQ ID NO: 46030 - protein, 129 aa, Homo sapiens
  Payload ID: 9408
  Gene Symbol: LECT1
  Gene Name: leukocyte cell derived chemotaxin 1
  ENSP ID: ENSP00000396035
MSINGKLQDGSMEIDAGNNLETFKMGSGAEEAIAVNDFQNGITGIRFAGGEKCYIKAQVKARIPEVGAVTKQSISSKLEGKIMPVKYEENSLIWVAVDQPVKDNSFLSSKVLELCGDLPIFWLKPTYPK

SEQ ID NO: 46031 - protein, 151 aa, Homo sapiens
  Payload ID: 9409
  Gene Symbol: LECT2
  Gene Name: leukocyte cell-derived chemotaxin 2
  Uniprot ID: O14960
  ENSP ID: ENSP00000274507
MFSTKALLLAGLISTALAGPWANICAGKSSNEIRTCDRHGCGQYSAQRSQRPHQGVDILCSAGSTVYAPFTGMIVGQEKPYQNKNAINNGVRISGRGFCVKMFYIKPIKYKGPIKKGEKLGTLLPLQKVYPGIQSHVHIENCDSSDPTAYL

SEQ ID NO: 46032 - protein, 111 aa, Homo sapiens
  Payload ID: 9409
  Gene Symbol: LECT2
  Gene Name: leukocyte cell-derived chemotaxin 2
  ENSP ID: ENSP00000421123
MFSTKALLLAGLISTALAGPWANICAGKSSNEIRTCDRHGCGQYSAQRSQRPHQGVDILCSAGSTVYAPFTGMIVGQEKPYQNKNAINNGVRISGRGKRGGVYTWGASWRC

SEQ ID NO: 46033 - protein, 79 aa, Homo sapiens
  Payload ID: 9409
  Gene Symbol: LECT2
  Gene Name: leukocyte cell-derived chemotaxin 2
  ENSP ID: ENSP00000427012
MIVGQEKPYQNKNAINNGVRISGRGFCVKMFYIKPIKYKGPIKKGEKLGTLLPLQKVYPGIQSHVHIENCDSSDPTAYL

SEQ ID NO: 46034 - protein, 131 aa, Homo sapiens
  Payload ID: 9409
  Gene Symbol: LECT2
  Gene Name: leukocyte cell-derived chemotaxin 2
  ENSP ID: ENSP00000429618
MFSTKALLLAGLISTALAGPWANICAGKSSNEIRTCDRHGCGQYSAQRSQRPHQGVDILCSAGSTVYAPFTGMIVGQEKPYQNKNAINNGVRISGREITTDTPIFNNYYPDQSAAVNIKTRSSTSKKMMTH

SEQ ID NO: 46035 - protein, 489 aa, Homo sapiens
  Payload ID: 9410
  Gene Symbol: LILRA1
  Gene Name: leukocyte immunoglobulin-like receptor, subfamily A (with TM domain), member 1
  Uniprot ID: O75019
  ENSP ID: ENSP00000251372
MTPIVTVLICLRLSLGPRTHVQAGTLPKPTLWAEPGSVITQGSPVTLWCQGILETQEYRLYREKKTAPWITRIPQEIVKKGQFPIPSITWEHTGRYRCFYGSHTAGWSEPSDPLELVVTGAYIKPTLSALPSPVVTSGGNVTLHCVSQVAFGSFILCKEGEDEHPQCLNSQPRTHGWSRAIFSVGPVSPSRRWSYRCYAYDSNSPHVWSLPSDLLELLVLGVSKKPSLSVQPGPIVAPGESLTLQCVSDVSYDRFVLYKEGERDFLQLPGPQPQAGLSQANFTLGPVSRSYGGQYRCSGAYNLSSEWSAPSDPLDILIAGQFRGRPFISVHPGPTVASGENVTLLCQSWGPFHTFLLTKAGAADAPLRLRSIHEYPKYQAEFPMSPVTSAHSGTYRCYGSLSSNPYLLSHPSDSLELMVSGAAETLSPPQNKSDSKAGAANTLSPSQNKTASHPQDYTVENLIRMGIAGLVLVVLGILLFEAQHSQRSL

SEQ ID NO: 46036 - protein, 289 aa, Homo sapiens
  Payload ID: 9410
  Gene Symbol: LILRA1
  Gene Name: leukocyte immunoglobulin-like receptor, subfamily A (with TM domain), member 1
  Uniprot ID: O75019
  ENSP ID: ENSP00000413715
MTPIVTVLICLRLSLGPRTHVQAGTLPKPTLWAEPGSVITQGSPVTLWCQGILETQEYRLYREKKTAPWITRIPQEIVKKGQFPIPSITWEHTGRYRCFYGSHTAGWSEPSDPLELVVTGAYIKPTLSALPSPVVTSGGNVTLHCVSQVAFGSFILCKEGEDEHPQCLNSQPRTHGWSRAIFSVGPVSPSRRWSYRCYAYDSNSPHVWSLPSDLLELLVLGAAETLSPPQNKSDSKAGAANTLSPSQNKTASHPQDYTVENLIRMGIAGLVLVVLGILLFEAQHSQRSL

SEQ ID NO: 46037 - protein, 489 aa, Homo sapiens; identical to SEQ ID NO: 46035
  Payload ID: 9410
  Gene Symbol: LILRA1
  Gene Name: leukocyte immunoglobulin-like receptor, subfamily A (with TM domain), member 1
  Uniprot ID: O75019
  ENSP ID: ENSP00000477637

SEQ ID NO: 46038 - protein, 289 aa, Homo sapiens; identical to SEQ ID NO: 46036
  Payload ID: 9410
  Gene Symbol: LILRA1
  Gene Name: leukocyte immunoglobulin-like receptor, subfamily A (with TM domain), member 1
  Uniprot ID: O75019
  ENSP ID: ENSP00000478666

SEQ ID NO: 46039 - protein, 439 aa, Homo sapiens
  Payload ID: 9410
  Gene Symbol: LILRA1
  Gene Name: leukocyte immunoglobulin-like receptor, subfamily A (with TM domain), member 1
  ENSP ID: ENSP00000479343
MTPILTVLICLGLSLGPRTHVQAGTLPKPTLWAEPGSVITQGSPVTLWCQGILETQEYRLYREKKTAPWITRIPQEIVKKGQFPIPSITWEHTGRYRCFYGSHTAGWSEPSDPLELVVTGAYIKPTLSALPSPVVTSGGNVTLHCVSQVAFGSFILCKEGEDEHPQCLNSQPRTHGWSRAIFSVGPVSPSRRWSYRCYAYDSNSPHVWSLPSDLLELLVLGVSKKPSLSVQPGPIVAPGESLTLQCVSDVSYDRFVLYKEGERDFLQLPGPQPQAGLSQANFTLGPVSRSYGGQYRCSGAYNLSSEWSAPSDPLDILIAGQFRGRPFISVHPGPTVASGENVTLLCQSWGPFHTFLLTKAGAADAPLRLRSIHEYPKYQAEFPMSPVTSAHSGTYRCYGSLSSNPYLLSHPSDSLELMVSGAAETLSPPQNKSDSKAGE

SEQ ID NO: 46040 - protein, 439 aa, Homo sapiens; identical to SEQ ID NO: 46039
  Payload ID: 9410
  Gene Symbol: LILRA1
  Gene Name: leukocyte immunoglobulin-like receptor, subfamily A (with TM domain), member 1
  ENSP ID: ENSP00000479482

SEQ ID NO: 46041 - protein, 506 aa, Homo sapiens
  Payload ID: 9410
  Gene Symbol: LILRA1
  Gene Name: leukocyte immunoglobulin-like receptor, subfamily A (with TM domain), member 1
  ENSP ID: ENSP00000480299
MHRGLIHPQSRAVGGDAMTPIVTVLICLRLSLGPRTHVQAGTLPKPTLWAEPGSVITQGSPVTLWCQGILETQEYRLYREKKTAPWITRIPQEIVKKGQFPIPSITWEHTGRYRCFYGSHTAGWSEPSDPLELVVTGAYIKPTLSALPSPVVTSGGNVTLHCVSQVAFGSFILCKEGEDEHPQCLNSQPRTHGWSRAIFSVGPVSPSRRWSYRCYAYDSNSPHVWSLPSDLLELLVLGVSKKPSLSVQPGPIVAPGESLTLQCVSDVSYDRFVLYKEGERDFLQLPGPQPQAGLSQANFTLGPVSRSYGGQYRCSGAYNLSSEWSAPSDPLDILIAGQFRGRPFISVHPGPTVASGENVTLLCQSWGPFHTFLLTKAGAADAPLRLRSIHEYPKYQAEFPMSPVTSAHSGTYRCYGSLSSNPYLLSHPSDSLELMVSGAAETLSPPQNKSDSKAGAANTLSPSQNKTASHPQDYTVENLIRMGIAGLVLVVLGILLFEAQHSQRSL

SEQ ID NO: 46042 - protein, 439 aa, Homo sapiens; identical to SEQ ID NO: 46039
  Payload ID: 9410
  Gene Symbol: LILRA1
  Gene Name: leukocyte immunoglobulin-like receptor, subfamily A (with TM domain), member 1
  ENSP ID: ENSP00000481162

SEQ ID NO: 46043 - protein, 506 aa, Homo sapiens; identical to SEQ ID NO: 46041
  Payload ID: 9410
  Gene Symbol: LILRA1
  Gene Name: leukocyte immunoglobulin-like receptor, subfamily A (with TM domain), member 1
  ENSP ID: ENSP00000483224

SEQ ID NO: 46044 - protein, 439 aa, Homo sapiens; identical to SEQ ID NO: 46039
  Payload ID: 9410
  Gene Symbol: LILRA1
  Gene Name: leukocyte immunoglobulin-like receptor, subfamily A (with TM domain), member 1
  ENSP ID: ENSP00000484160

SEQ ID NO: 46045 - protein, 289 aa, Homo sapiens; identical to SEQ ID NO: 46036
  Payload ID: 9410
  Gene Symbol: LILRA1
  Gene Name: leukocyte immunoglobulin-like receptor, subfamily A (with TM domain), member 1
  Uniprot ID: O75019
  ENSP ID: ENSP00000487011

SEQ ID NO: 46046 - protein, 289 aa, Homo sapiens; identical to SEQ ID NO: 46036
  Payload ID: 9410
  Gene Symbol: LILRA1
  Gene Name: leukocyte immunoglobulin-like receptor, subfamily A (with TM domain), member 1
  Uniprot ID: O75019
  ENSP ID: ENSP00000487229

SEQ ID NO: 46047 - protein, 466 aa, Homo sapiens
  Payload ID: 9411
  Gene Symbol: LILRA2
  Gene Name: leukocyte immunoglobulin-like receptor, subfamily A (with TM domain), member 2
  Uniprot ID: Q8N149
  ENSP ID: ENSP00000251376
MTPILTVLICLGLSLGPRTHVQAGHLPKPTLWAEPGSVIIQGSPVTLRCQGSLQAEEYHLYRENKSASWVRRIQEPGKNGQFPIPSITWEHAGRYHCQYYSHNHSSEYSDPLELVVTGAYSKPTLSALPSPVVTSGGNVTLQCVSQVAFDGFILCKEGEDEHPQRLNSHSHARGWSWAIFSVGPVSPSRRWSYRCYAYDSNSPYVWSLPSDLLELLVPGVSKKPSLSVQPGPMVAPGESLTLQCVSDVGYDRFVLYKEGERDFLQRPGWQPQAGLSQANFTLGPVSPSHGGQYRCYSAHNLSSEWSAPSDPLDILITGQFYDRPSLSVQPVPTVAPGKNVTLLCQSRGQFHTFLLTKEGAGHPPLHLRSEHQAQQNQAEFRMGPVTSAHVGTYRCYSSLSSNPYLLSLPSDPLELVVSASLGQHPQDYTVENLIRMGVAGLVLVVLGILLFEAQHSQRSLQDAAGR

SEQ ID NO: 46048 - protein, 483 aa, Homo sapiens
  Payload ID: 9411
  Gene Symbol: LILRA2
  Gene Name: leukocyte immunoglobulin-like receptor, subfamily A (with TM domain), member 2
  Uniprot ID: Q8N149
  ENSP ID: ENSP00000251377
MTPILTVLICLGLSLGPRTHVQAGHLPKPTLWAEPGSVIIQGSPVTLRCQGSLQAEEYHLYRENKSASWVRRIQEPGKNGQFPIPSITWEHAGRYHCQYYSHNHSSEYSDPLELVVTGAYSKPTLSALPSPVVTSGGNVTLQCVSQVAFDGFILCKEGEDEHPQRLNSHSHARGWSWAIFSVGPVSPSRRWSYRCYAYDSNSPYVWSLPSDLLELLVPGVSKKPSLSVQPGPMVAPGESLTLQCVSDVGYDRFVLYKEGERDFLQRPGWQPQAGLSQANFTLGPVSPSHGGQYRCYSAHNLSSEWSAPSDPLDILITGQFYDRPSLSVQPVPTVAPGKNVTLLCQSRGQFHTFLLTKEGAGHPPLHLRSEHQAQQNQAEFRMGPVTSAHVGTYRCYSSLSSNPYLLSLPSDPLELVVSEAAETLSPSQNKTDSTTTSLGQHPQDYTVENLIRMGVAGLVLVVLGILLFEAQHSQRSLQDAAGR

SEQ ID NO: 46049 - protein, 454 aa, Homo sapiens
  Payload ID: 9411
  Gene Symbol: LILRA2
  Gene Name: leukocyte immunoglobulin-like receptor, subfamily A (with TM domain), member 2
  ENSP ID: ENSP00000375617
MTPILTVLICLGHLPKPTLWAEPGSVIIQGSPVTLRCQGSLQAEEYHLYRENKSASWVRRIQEPGKNGQFPIPSITWEHAGRYHCQYYSHNHSSEYSDPLELVVTGAYSKPTLSALPSPVVTSGGNVTLQCVSQVAFDGFILCKEGEDEHPQRLNSHSHARGWSWAIFSVGPVSPSRRWSYRCYAYDSNSPYVWSLPSDLLELLVPGVSKKPSLSVQPGPMVAPGESLTLQCVSDVGYDRFVLYKEGERDFLQRPGWQPQAGLSQANFTLGPVSPSHGGQYRCYSAHNLSSEWSAPSDPLDILITGQFYDRPSLSVQPVPTVAPGKNVTLLCQSRGQFHTFLLTKEGAGHPPLHLRSEHQAQQNQAEFRMGPVTSAHVGTYRCYSSLSSNPYLLSLPSDPLELVVSASLGQHPQDYTVENLIRMGVAGLVLVVLGILLFEAQHSQRSLQDAAGR

SEQ ID NO: 46050 - protein, 483 aa, Homo sapiens; identical to SEQ ID NO: 46048
  Payload ID: 9411
  Gene Symbol: LILRA2
  Gene Name: leukocyte immunoglobulin-like receptor, subfamily A (with TM domain), member 2
  Uniprot ID: Q8N149
  ENSP ID: ENSP00000375618

SEQ ID NO: 46051 - protein, 327 aa, Homo sapiens
  Payload ID: 9411
  Gene Symbol: LILRA2
  Gene Name: leukocyte immunoglobulin-like receptor, subfamily A (with TM domain), member 2
  ENSP ID: ENSP00000388131
MTPILTVLICLGLSLGPRTHVQAGHLPKPTLWAEPGSVIIQGSPVTLRCQGSLQAEEYHLYRENKSASWVRRIQEPGKNGQFPIPSITWEHAGRYHCQYYSHNHSSEYSDPLELVVTGAYSKPTLSALPSPVVTSGGNVTLQCVSQVAFDGFILCKEGEDEHPQRLNSHSHARGWSWAIFSVGPVSPSRRWSYRCYAYDSNSPYVWSLPSDLLELLVPGVSKKPSLSVQPGPMVAPGESLTLQCVSDVGYDRFVLYKEGERDFLQRPGWQPQAGLSQANFTLGPVSPSHGGQYRCYSAHNLSSEWSAPSDPLDILITGQFYDRPSLS

SEQ ID NO: 46052 - protein, 85 aa, Homo sapiens
  Payload ID: 9411
  Gene Symbol: LILRA2
  Gene Name: leukocyte immunoglobulin-like receptor, subfamily A (with TM domain), member 2
  ENSP ID: ENSP00000477566
  MOD_RES (1)..(1): Any amino acid
XSLPSDPLELVVSEPLSISPSPTPAGSLGHLKTREEAAWASVGSDCDEAGVHPRCAPLERSTPAVGAAHTAPPVLTWRPLCSGHP

SEQ ID NO: 46053 - protein, 490 aa, Homo sapiens
  Payload ID: 9411
  Gene Symbol: LILRA2
  Gene Name: leukocyte immunoglobulin-like receptor, subfamily A (with TM domain), member 2
  ENSP ID: ENSP00000477712
MTPILTVLICLGLSLGPRTHVQAGHLPKPTLWAEPGSVIIQGSPVTLRCQGSLQAEEYHLYRENKSASWVRRIQEPGKNGQFPIPSITWEHAGRYHCQYYSHNHSSEYSDPLELVVTGAYSKPTLSALPSPVVTLGGNVTLQCVSQVAFDGFILCKEGEDEHPQRLNSHSHARGWSWAIFSVGPVSPSRRWSYRCYAYDSNSPYVWSLPSDLLELLVPGVSKKPSLSVQPGPMVAPGESLTLQCVSDVGYDRFVLYKEGERDFLQRPGWQPQAGLSQANFTLGPVSPSHGGQYRCYSAHNLSSEWSAPSDPLDILITGQFYDRPSLSVQPVPTVAPGKNVTLLCQSRGQFHTFLLTKEGAGHPPLHLRSEHQAQQNQAEFRMGPVTSAHVGTYRCYSSLSSNPYLLSLPSDPLELVVSEPLSISPSPTPAGSLGHLKTREEAAWASVGSDCDEAGVHPRCAPLERSTPAVGAAHTAPPVLTWRPLCSGHP

SEQ ID NO: 46054 - protein, 483 aa, Homo sapiens
  Payload ID: 9411
  Gene Symbol: LILRA2
  Gene Name: leukocyte immunoglobulin-like receptor, subfamily A (with TM domain), member 2
  Uniprot ID: Q8N149
  ENSP ID: ENSP00000478981
MTPILTVLICLGLSLGPRTHVQAGHLPKPTLWAEPGSVIIQGSPVTLRCQGSLQAEEYHLYRENKSASWVRRIQEPGKNGQFPIPSITWEHAGRYHCQYYSHNHSSEYSDPLELVVTGAYSKPTLSALPSPVVTLGGNVTLQCVSQVAFDGFILCKEGEDEHPQRLNSHSHARGWSWAIFSVGPVSPSRRWSYRCYAYDSNSPYVWSLPSDLLELLVPGVSKKPSLSVQPGPMVAPGESLTLQCVSDVGYDRFVLYKEGERDFLQRPGWQPQAGLSQANFTLGPVSPSHGGQYRCYSAHNLSSEWSAPSDPLDILITGQFYDRPSLSVQPVPTVAPGKNVTLLCQSRGQFHTFLLTKEGAGHPPLHLRSEHQAQQNQAEFRMGPVTSAHVGTYRCYSSLSSNPYLLSLPSDPLELVVSEAAETLSPSQNKTDSTTTSLGQHPQDYTVENLIRMGVAGLVLVVLGILLFEAQHSQRSLQDAAGR

SEQ ID NO: 46055 - protein, 490 aa, Homo sapiens; identical to SEQ ID NO: 46053
  Payload ID: 9411
  Gene Symbol: LILRA2
  Gene Name: leukocyte immunoglobulin-like receptor, subfamily A (with TM domain), member 2
  ENSP ID: ENSP00000478991

SEQ ID NO: 46056 - protein, 466 aa, Homo sapiens
  Payload ID: 9411
  Gene Symbol: LILRA2
  Gene Name: leukocyte immunoglobulin-like receptor, subfamily A (with TM domain), member 2
  Uniprot ID: Q8N149
  ENSP ID: ENSP00000479743
MTPILTVLICLGLSLGPRTHVQAGHLPKPTLWAEPGSVIIQGSPVTLRCQGSLQAEEYHLYRENKSASWVRRIQEPGKNGQFPIPSITWEHAGRYHCQYYSHNHSSEYSDPLELVVTGAYSKPTLSALPSPVVTLGGNVTLQCVSQVAFDGFILCKEGEDEHPQRLNSHSHARGWSWAIFSVGPVSPSRRWSYRCYAYDSNSPYVWSLPSDLLELLVPGVSKKPSLSVQPGPMVAPGESLTLQCVSDVGYDRFVLYKEGERDFLQRPGWQPQAGLSQANFTLGPVSPSHGGQYRCYSAHNLSSEWSAPSDPLDILITGQFYDRPSLSVQPVPTVAPGKNVTLLCQSRGQFHTFLLTKEGAGHPPLHLRSEHQAQQNQAEFRMGPVTSAHVGTYRCYSSLSSNPYLLSLPSDPLELVVSASLGQHPQDYTVENLIRMGVAGLVLVVLGILLFEAQHSQRSLQDAAGR

SEQ ID NO: 46057 - protein, 454 aa, Homo sapiens
  Payload ID: 9411
  Gene Symbol: LILRA2
  Gene Name: leukocyte immunoglobulin-like receptor, subfamily A (with TM domain), member 2
  ENSP ID: ENSP00000479769
MTPILTVLICLGHLPKPTLWAEPGSVIIQGSPVTLRCQGSLQAEEYHLYRENKSASWVRRIQEPGKNGQFPIPSITWEHAGRYHCQYYSHNHSSEYSDPLELVVTGAYSKPTLSALPSPVVTLGGNVTLQCVSQVAFDGFILCKEGEDEHPQRLNSHSHARGWSWAIFSVGPVSPSRRWSYRCYAYDSNSPYVWSLPSDLLELLVPGVSKKPSLSVQPGPMVAPGESLTLQCVSDVGYDRFVLYKEGERDFLQRPGWQPQAGLSQANFTLGPVSPSHGGQYRCYSAHNLSSEWSAPSDPLDILITGQFYDRPSLSVQPVPTVAPGKNVTLLCQSRGQFHTFLLTKEGAGHPPLHLRSEHQAQQNQAEFRMGPVTSAHVGTYRCYSSLSSNPYLLSLPSDPLELVVSASLGQHPQDYTVENLIRMGVAGLVLVVLGILLFEAQHSQRSLQDAAGR

SEQ ID NO: 46058 - protein, 327 aa, Homo sapiens
  Payload ID: 9411
  Gene Symbol: LILRA2
  Gene Name: leukocyte immunoglobulin-like receptor, subfamily A (with TM domain), member 2
  ENSP ID: ENSP00000479801
MTPILTVLICLGLSLGPRTHVQAGHLPKPTLWAEPGSVIIQGSPVTLRCQGSLQAEEYHLYRENKSASWVRRIQEPGKNGQFPIPSITWEHAGRYHCQYYSHNHSSEYSDPLELVVTGAYSKPTLSALPSPVVTLGGNVTLQCVSQVAFDGFILCKEGEDEHPQRLNSHSHARGWSWAIFSVGPVSPSRRWSYRCYAYDSNSPYVWSLPSDLLELLVPGVSKKPSLSVQPGPMVAPGESLTLQCVSDVGYDRFVLYKEGERDFLQRPGWQPQAGLSQANFTLGPVSPSHGGQYRCYSAHNLSSEWSAPSDPLDILITGQFYDRPSLS

SEQ ID NO: 46059 - protein, 483 aa, Homo sapiens; identical to SEQ ID NO: 46054
  Payload ID: 9411
  Gene Symbol: LILRA2
  Gene Name: leukocyte immunoglobulin-like receptor, subfamily A (with TM domain), member 2
  Uniprot ID: Q8N149
  ENSP ID: ENSP00000479914

SEQ ID NO: 46060 - protein, 454 aa, Homo sapiens; identical to SEQ ID NO: 46057
  Payload ID: 9411
  Gene Symbol: LILRA2
  Gene Name: leukocyte immunoglobulin-like receptor, subfamily A (with TM domain), member 2
  ENSP ID: ENSP00000480179

SEQ ID NO: 46061 - protein, 85 aa, Homo sapiens; identical to SEQ ID NO: 46052
  Payload ID: 9411
  Gene Symbol: LILRA2
  Gene Name: leukocyte immunoglobulin-like receptor, subfamily A (with TM domain), member 2
  ENSP ID: ENSP00000480320
  MOD_RES (1)..(1): Any amino acid

SEQ ID NO: 46062 - protein, 466 aa, Homo sapiens; identical to SEQ ID NO: 46056
  Payload ID: 9411
  Gene Symbol: LILRA2
  Gene Name: leukocyte immunoglobulin-like receptor, subfamily A (with TM domain), member 2
  Uniprot ID: Q8N149
  ENSP ID: ENSP00000480939

SEQ ID NO: 46063 - protein, 483 aa, Homo sapiens; identical to SEQ ID NO: 46054
  Payload ID: 9411
  Gene Symbol: LILRA2
  Gene Name: leukocyte immunoglobulin-like receptor, subfamily A (with TM domain), member 2
  Uniprot ID: Q8N149
  ENSP ID: ENSP00000481338

SEQ ID NO: 46064 - protein, 483 aa, Homo sapiens; identical to SEQ ID NO: 46054
  Payload ID: 9411
  Gene Symbol: LILRA2
  Gene Name: leukocyte immunoglobulin-like receptor, subfamily A (with TM domain), member 2
  Uniprot ID: Q8N149
  ENSP ID: ENSP00000483906

SEQ ID NO: 46065 - protein, 466 aa, Homo sapiens; identical to SEQ ID NO: 46056
  Payload ID: 9411
  Gene Symbol: LILRA2
  Gene Name: leukocyte immunoglobulin-like receptor, subfamily A (with TM domain), member 2
  Uniprot ID: Q8N149
  ENSP ID: ENSP00000484762

SEQ ID NO: 46066 - protein, 203 aa, Homo sapiens
  Payload ID: 9411
  Gene Symbol: LILRA2
  Gene Name: leukocyte immunoglobulin-like receptor, subfamily A (with TM domain), member 2
  ENSP ID: ENSP00000485801
MTPILTVLICLGLSLGPRTHVQAGHLPKPTLWAEPGSVIIQGSPVTLRCQGSLQAEEYHLYRENKSASWVRRIQEPGKNGQFPIPSITWEHAGRYHCQYYSHNHSSEHQAQQNQAEFRMGPVTSAHVGTYRCYSSLSSNPYLLSLPSDPLELVVSASLGQHPQDYTVENLIRMGVAGLVLVVLGILLFEAQHSQRSLQDAAGR

SEQ ID NO: 46067 - protein, 203 aa, Homo sapiens; identical to SEQ ID NO: 46066
  Payload ID: 9411
  Gene Symbol: LILRA2
  Gene Name: leukocyte immunoglobulin-like receptor, subfamily A (with TM domain), member 2
  ENSP ID: ENSP00000486317

SEQ ID NO: 46068 - protein, 203 aa, Homo sapiens; identical to SEQ ID NO: 46066
  Payload ID: 9411
  Gene Symbol: LILRA2
  Gene Name: leukocyte immunoglobulin-like receptor, subfamily A (with TM domain), member 2
  ENSP ID: ENSP00000486483

SEQ ID NO: 46069 - protein, 454 aa, Homo sapiens; identical to SEQ ID NO: 46057
  Payload ID: 9411
  Gene Symbol: LILRA2
  Gene Name: leukocyte immunoglobulin-like receptor, subfamily A (with TM domain), member 2
  ENSP ID: ENSP00000487398

SEQ ID NO: 46070 - protein, 203 aa, Homo sapiens; identical to SEQ ID NO: 46066
  Payload ID: 9411
  Gene Symbol: LILRA2
  Gene Name: leukocyte immunoglobulin-like receptor, subfamily A (with TM domain), member 2
  ENSP ID: ENSP00000487511

SEQ ID NO: 46071 - protein, 499 aa, Homo sapiens
  Payload ID: 9412
  Gene Symbol: LILRA4
  Gene Name: leukocyte immunoglobulin-like receptor, subfamily A (with TM domain), member 4
  Uniprot ID: P59901
  ENSP ID: ENSP00000291759
MTLILTSLLFFGLSLGPRTRVQAENLLKPILWAEPGPVITWHNPVTIWCQGTLEAQGYRLDKEGNSMSRHILKTLESENKVKLSIPSMMWEHAGRYHCYYQSPAGWSEPSDPLELVVTAYSRPTLSALPSPVVTSGVNVTLRCASRLGLGRFTLIEEGDHRLSWTLNSHQHNHGKFQALFPMGPLTFSNRGTFRCYGYENNTPYVWSEPSDPLQLLVSGVSRKPSLLTLQGPVVTPGENLTLQCGSDVGYIRYTLYKEGADGLPQRPGRQPQAGLSQANFTLSPVSRSYGGQYRCYGAHNVSSEWSAPSDPLDILIAGQISDRPSLSVQPGPTVTSGEKVTLLCQSWDPMFTFLLTKEGAAHPPLRLRSMYGAHKYQAEFPMSPVTSAHAGTYRCYGSRSSNPYLLSHPSEPLELVVSGATETLNPAQKKSDSKTAPHLQDYTVENLIRMGVAGLVLLFLGILLFEAQHSQRSPPRCSQEANSRKDNAPFRVVEPWEQI

SEQ ID NO: 46072 - protein, 140 aa, Homo sapiens
  Payload ID: 9412
  Gene Symbol: LILRA4
  Gene Name: leukocyte immunoglobulin-like receptor, subfamily A (with TM domain), member 4
  ENSP ID: ENSP00000471722
SSEWSAPSDPLDILIAGQISDRPSLSVQPGPTVTSGEKVTLLCQSWDPMFTFLLTKEGAAHPPLRLRSMYGAHKYQAEFPMSPVTSAHAGTYRCYGSRSSNPYLLSHPSEPLELVVSGEGADPVHSELKGVLGNEKGELP

SEQ ID NO: 46073 - protein, 499 aa, Homo sapiens
  Payload ID: 9412
  Gene Symbol: LILRA4
  Gene Name: leukocyte immunoglobulin-like receptor, subfamily A (with TM domain), member 4
  Uniprot ID: P59901
  ENSP ID: ENSP00000479979
MTLILTSLLFFGLSLGPRTRVQAENLPKPILWAEPGPVITWHNPVTIWCQGTLEAQGYRLDKEGNSMSRHILKTLESENKVKLSIPSMMWEHAGRYHCYYQSPAGWSEPSDPLELVVTAYSRPTLSALPSPVVTSGVNVTLRCASRLGLGRFTLIEEGDHRLSWTLNSHQHNHGKFQALFPMGPLTFSNRGTFRCYGYENNTPYVWSEPSDPLQLLVSGVSRKPSLLTLQGPVVTPGENLTLQCGSDVGYIRYTLYKEGADGLPQRPGRQPQAGLSQANFTLSPVSRSYGGQYRCYGAHNVSSEWSAPSDPLDILIAGQISDRPSLSVQPGPTVTSGEKVTLLCQSWDPMFTFLLTKEGAAHPPLRLRSMYGAHKYQAEFPMSPVTSAHAGTYRCYGSRSSNPYLLSHPSEPLELVVSGATETLNPAQKKSDSKTAPHLQDYTVENLIRMGVAGLVLLFLGILLFEAQHSQRSPPRCSQEANSRKDNAPFRVVEPWEQI

SEQ ID NO: 46074 - protein, 499 aa, Homo sapiens; identical to SEQ ID NO: 46073
  Payload ID: 9412
  Gene Symbol: LILRA4
  Gene Name: leukocyte immunoglobulin-like receptor, subfamily A (with TM domain), member 4
  Uniprot ID: P59901
  ENSP ID: ENSP00000481073

SEQ ID NO: 46075 - protein, 400 aa, Homo sapiens
  Payload ID: 9412
  Gene Symbol: LILRA4
  Gene Name: leukocyte immunoglobulin-like receptor, subfamily A (with TM domain), member 4
  ENSP ID: ENSP00000481298
MTLILTSLLFFGLSLGPRTRVQAENLPKPILWAEPGPVITWHNPVTIWCQGTLEAQGYRLDKEGNSMSRHILKTLESENKVKLSIPSMMWEHAGRYHCYYQSPAGWSEPSDPLELVVTAYSRPTLSALPSPVVTSGVNVTLRCASRLGLGRFTLIEEGDHRLSWTLNSHQHNHGKFQALFPMGPLTFSNRGTFRCYGYENNTPYVWSEPSDPLQLLVSGQISDRPSLSVQPGPTVTSGEKVTLLCQSWDPMFTFLLTKEGAAHPPLRLRSMYGAHKYQAEFPMSPVTSAHAGTYRCYGSRSSNPYLLSHPSEPLELVVSGATETLNPAQKKSDSKTAPHLQDYTVENLIRMGVAGLVLLFLGILLFEAQHSQRSPPRCSQEANSRKDNAPFRVVEPWEQI

SEQ ID NO: 46076 - protein, 499 aa, Homo sapiens; identical to SEQ ID NO: 46073
  Payload ID: 9412
  Gene Symbol: LILRA4
  Gene Name: leukocyte immunoglobulin-like receptor, subfamily A (with TM domain), member 4
  Uniprot ID: P59901
  ENSP ID: ENSP00000483846

SEQ ID NO: 46077 - protein, 299 aa, Homo sapiens
  Payload ID: 9413
  Gene Symbol: LILRA5
  Gene Name: leukocyte immunoglobulin-like receptor, subfamily A (with TM domain), member 5
  Uniprot ID: A6NI73
  ENSP ID: ENSP00000404236
MAPWSHPSAQLQPVGGDAVSPALMVLLCLGLSLGPRTHVQAGNLSKATLWAEPGSVISRGNSVTIRCQGTLEAQEYRLVKEGSPEPWDTQNPLEPKNKARFSIPSMTEHHAGRYRCYYYSPAGWSEPSDPLELVVTGFYNKPTLSALPSPVVTSGENVTLQCGSRLRFDRFILTEEGDHKLSWTLDSQLTPSGQFQALFPVGPVTPSHRWMLRCYGSRRHILQVWSEPSDLLEIPVSGAADNLSPSQNKSDSGTASHLQDYAVENLIRMGMAGLILVVLGILIFQDWHSQRSPQAAAGR

SEQ ID NO: 46078 - protein, 265 aa, Homo sapiens
  Payload ID: 9413
  Gene Symbol: LILRA5
  Gene Name: leukocyte immunoglobulin-like receptor, subfamily A (with TM domain), member 5
  Uniprot ID: A6NI73
  ENSP ID: ENSP00000477785
MAPWSHPSAQLQPVGGDAVSPALMVLLCLGLSLGPRTHVQAGNLSKATLWAEPGSVISRGNSVTIRCQGTLEAQEYRLVKEGSPEPWDTQNPLEPKNKARFSIPSMTEHHAGRYRCYYYSPAGWSEPSDPLELVVTGFYNKPTLSALPSPVVTSGENVTLQCGSRLRFDRFILTEEGDHKLSWTLDSQLTPSGQFQALFPVGPVTPSHRWMLRCYGSRRHILQVWSEPSDLLEIPVSGEEATVFSSTIQGSQTGCGELYRQGSPC

SEQ ID NO: 46079 - protein, 299 aa, Homo sapiens; identical to SEQ ID NO: 46077
  Payload ID: 9413
  Gene Symbol: LILRA5
  Gene Name: leukocyte immunoglobulin-like receptor, subfamily A (with TM domain), member 5
  Uniprot ID: A6NI73
  ENSP ID: ENSP00000478354

SEQ ID NO: 46080 - protein, 287 aa, Homo sapiens
  Payload ID: 9413
  Gene Symbol: LILRA5
  Gene Name: leukocyte immunoglobulin-like receptor, subfamily A (with TM domain), member 5
  Uniprot ID: A6NI73
  ENSP ID: ENSP00000480204
MAPWSHPSAQLQPVGGDAVSPALMVLLCLGNLSKATLWAEPGSVISRGNSVTIRCQGTLEAQEYRLVKEGSPEPWDTQNPLEPKNKARFSIPSMTEHHAGRYRCYYYSPAGWSEPSDPLELVVTGFYNKPTLSALPSPVVTSGENVTLQCGSRLRFDRFILTEEGDHKLSWTLDSQLTPSGQFQALFPVGPVTPSHRWMLRCYGSRRHILQVWSEPSDLLEIPVSGAADNLSPSQNKSDSGTASHLQDYAVENLIRMGMAGLILVVLGILIFQDWHSQRSPQAAAGR

SEQ ID NO: 46081 - protein, 253 aa, Homo sapiens
  Payload ID: 9413
  Gene Symbol: LILRA5
  Gene Name: leukocyte immunoglobulin-like receptor, subfamily A (with TM domain), member 5
  Uniprot ID: A6NI73
  ENSP ID: ENSP00000480382
MAPWSHPSAQLQPVGGDAVSPALMVLLCLGNLSKATLWAEPGSVISRGNSVTIRCQGTLEAQEYRLVKEGSPEPWDTQNPLEPKNKARFSIPSMTEHHAGRYRCYYYSPAGWSEPSDPLELVVTGFYNKPTLSALPSPVVTSGENVTLQCGSRLRFDRFILTEEGDHKLSWTLDSQLTPSGQFQALFPVGPVTPSHRWMLRCYGSRRHILQVWSEPSDLLEIPVSGEEATVFSSTIQGSQTGCGELYRQGSPC

SEQ ID NO: 46082 - protein, 253 aa, Homo sapiens; identical to SEQ ID NO: 46081
  Payload ID: 9413
  Gene Symbol: LILRA5
  Gene Name: leukocyte immunoglobulin-like receptor, subfamily A (with TM domain), member 5
  Uniprot ID: A6NI73
  ENSP ID: ENSP00000480436

SEQ ID NO: 46083 - protein, 299 aa, Homo sapiens; identical to SEQ ID NO: 46077
  Payload ID: 9413
  Gene Symbol: LILRA5
  Gene Name: leukocyte immunoglobulin-like receptor, subfamily A (with TM domain), member 5
  Uniprot ID: A6NI73
  ENSP ID: ENSP00000480458

SEQ ID NO: 46084 - protein, 287 aa, Homo sapiens; identical to SEQ ID NO: 46080
  Payload ID: 9413
  Gene Symbol: LILRA5
  Gene Name: leukocyte immunoglobulin-like receptor, subfamily A (with TM domain), member 5
  Uniprot ID: A6NI73
  ENSP ID: ENSP00000482658

SEQ ID NO: 46085 - protein, 299 aa, Homo sapiens; identical to SEQ ID NO: 46077
  Payload ID: 9413
  Gene Symbol: LILRA5
  Gene Name: leukocyte immunoglobulin-like receptor, subfamily A (with TM domain), member 5
  Uniprot ID: A6NI73
  ENSP ID: ENSP00000482882

SEQ ID NO: 46086 - protein, 265 aa, Homo sapiens; identical to SEQ ID NO: 46078
  Payload ID: 9413
  Gene Symbol: LILRA5
  Gene Name: leukocyte immunoglobulin-like receptor, subfamily A (with TM domain), member 5
  Uniprot ID: A6NI73
  ENSP ID: ENSP00000483958

SEQ ID NO: 46087 - protein, 287 aa, Homo sapiens; identical to SEQ ID NO: 46080
  Payload ID: 9413
  Gene Symbol: LILRA5
  Gene Name: leukocyte immunoglobulin-like receptor, subfamily A (with TM domain), member 5
  Uniprot ID: A6NI73
  ENSP ID: ENSP00000483992

SEQ ID NO: 46088 - protein, 253 aa, Homo sapiens; identical to SEQ ID NO: 46081
  Payload ID: 9413
  Gene Symbol: LILRA5
  Gene Name: leukocyte immunoglobulin-like receptor, subfamily A (with TM domain), member 5
  Uniprot ID: A6NI73
  ENSP ID: ENSP00000484062

SEQ ID NO: 46089 - protein, 287 aa, Homo sapiens; identical to SEQ ID NO: 46080
  Payload ID: 9413
  Gene Symbol: LILRA5
  Gene Name: leukocyte immunoglobulin-like receptor, subfamily A (with TM domain), member 5
  Uniprot ID: A6NI73
  ENSP ID: ENSP00000484372

SEQ ID NO: 46090 - protein, 265 aa, Homo sapiens; identical to SEQ ID NO: 46078
  Payload ID: 9413
  Gene Symbol: LILRA5
  Gene Name: leukocyte immunoglobulin-like receptor, subfamily A (with TM domain), member 5
  Uniprot ID: A6NI73
  ENSP ID: ENSP00000484775

SEQ ID NO: 46091 - protein, 299 aa, Homo sapiens; identical to SEQ ID NO: 46077
  Payload ID: 9413
  Gene Symbol: LILRA5
  Gene Name: leukocyte immunoglobulin-like receptor, subfamily A (with TM domain), member 5
  Uniprot ID: A6NI73
  ENSP ID: ENSP00000484785

SEQ ID NO: 46092 - protein, 287 aa, Homo sapiens; identical to SEQ ID NO: 46080
  Payload ID: 9413
  Gene Symbol: LILRA5
  Gene Name: leukocyte immunoglobulin-like receptor, subfamily A (with TM domain), member 5
  Uniprot ID: A6NI73
  ENSP ID: ENSP00000484869

SEQ ID NO: 46093 - protein, 464 aa, Homo sapiens
  Payload ID: 9414
  Gene Symbol: LILRA6
  Gene Name: leukocyte immunoglobulin-like receptor, subfamily A (with TM domain), member 6
  ENSP ID: ENSP00000245621
MTPTLAALLCLGLSLGPRTHVQAGPFPKPTLWAEPGSVISWGSPVTIWCQGSLEAQEYRLDKEGSPEPWDRNNPLEPKNKARFSIPSITEHHAGRYRCHYYSSAGWSEPSDPLELVMTGAYSKPTLSALPSPVVASGGNMTLQCGSQKGYHHFVLMKEGEHQLPRTLDSQQLHSGGFQALFPVGPVNPSHRWRFTCYYYYMNTPRVWSHPSDPLEILPSGVSRKPSLLTLQGPVLAPGQSLTLQCGSDVGYDRFVLYKEGERDFLQRPGQQPQAGLSQANFTLGPVSPSHGGQYRCYGAHNLSSEWSAPSDPLNILMAGQIYDTVSLSAQPGPTVASGENVTLLCQSWWQFDTFLLTKEGAAHPPLRLRSMYGAHKYQAEFPMSPVTSAHAGTYRCYGSYSSNPHLLSFPSEPLELMVSASHAKDYTVENLIRMGMAGLVLVFLGILLFEAQHSQRNPQDAAGR

SEQ ID NO: 46094 - protein, 481 aa, Homo sapiens
  Payload ID: 9414
  Gene Symbol: LILRA6
  Gene Name: leukocyte immunoglobulin-like receptor, subfamily A (with TM domain), member 6
  Uniprot ID: Q6PI73
  ENSP ID: ENSP00000379651
MTPTLAALLCLGLSLGPRTHVQAGPFPKPTLWAEPGSVISWGSPVTIWCQGSLEAQEYRLDKEGSPEPWDRNNPLEPKNKARFSIPSITEHHAGRYRCHYYSSAGWSEPSDPLELVMTGAYSKPTLSALPSPVVASGGNMTLQCGSQKGYHHFVLMKEGEHQLPRTLDSQQLHSGGFQALFPVGPVNPSHRWRFTCYYYYMNTPRVWSHPSDPLEILPSGVSRKPSLLTLQGPVLAPGQSLTLQCGSDVGYDRFVLYKEGERDFLQRPGQQPQAGLSQANFTLGPVSPSHGGQYRCYGAHNLSSEWSAPSDPLNILMAGQIYDTVSLSAQPGPTVASGENVTLLCQSWWQFDTFLLTKEGAAHPPLRLRSMYGAHKYQAEFPMSPVTSAHAGTYRCYGSYSSNPHLLSFPSEPLELMVSGHSGGSSLPPTGPPSTPASHAKDYTVENLIRMGMAGLVLVFLGILLFEAQHSQRNPQDAAGR

SEQ ID NO: 46095 - protein, 193 aa, Homo sapiens
  Payload ID: 9414
  Gene Symbol: LILRA6
  Gene Name: leukocyte immunoglobulin-like receptor, subfamily A (with TM domain), member 6
  Uniprot ID: Q6PI73
  ENSP ID: ENSP00000412929
MTPTLAALLCLGLSLGPRTHVQAGPFPKPTLWAEPGSVISWGSPVTIWCQGSLEAQEYRLDKEGSPEPWDRNNPLEPKNKARFSIPSITEHHAGRYRCHYYSSAGWSEPSDPLELVMTGAYSKPTLSALPSPVVASGGNMTLQCGSQKGYHHFVLMKEGEHQLPRTLDSQQLHSGGFQALFPVGPVNPSHRRV

SEQ ID NO: 46096 - protein, 382 aa, Homo sapiens
  Payload ID: 9414
  Gene Symbol: LILRA6
  Gene Name: leukocyte immunoglobulin-like receptor, subfamily A (with TM domain), member 6
  ENSP ID: ENSP00000478126
MTPALTALLCLGLSLGPRTRVQAGPFPKPTLWAEPGSVISWGSPVTIWCQGSLEAQEYQLDKEGSPEPLDRNNPLEPKNKARFSIPSMTQHHAGRYRCHYYSSAGWSEPSDPLELVMTGFYNKPTLSALPSPVVASGGNMTLRCGSQKGYHHFVLMKEGEHQLPRTLDSQQLHSGGFQALFPVGPVTPSHRWRFTCYYYYTNTPQVWSHPSDPLEILPSGQIYDTVSLSAQPGPTVASGENVTLLCQSRGYFDTFLLTKEGAAHPPLRLRSMYGAHKYQAEFPMSPVTSAHAGTYRCYGSRSSNPHLLSHPSEPLELMVSGHSGGSSLPPTGPPSTPASHAKDYTVENLIRMGMAGLVLVFLGILLFEAQHSQRNPQDAAGR

SEQ ID NO: 46097 - protein, 193 aa, Homo sapiens
  Payload ID: 9414
  Gene Symbol: LILRA6
  Gene Name: leukocyte immunoglobulin-like receptor, subfamily A (with TM domain), member 6
  Uniprot ID: Q6PI73
  ENSP ID: ENSP00000478128
MTPALTALLCLGLSLGPRTRVQAGPFPKPTLWAEPGSVISWGSPVTIWCQGSLEAQEYQLDKEGSPEPLDRNNPLEPKNKARFSIPSMTQHHAGRYRCHYYSSAGWSEPSDPLELVMTGFYNKPTLSALPSPVVASGGNMTLRCGSQKGYHHFVLMKEGEHQLPRTLDSQQLHSGGFQALFPVGPVTPSHRRV

SEQ ID NO: 46098 - protein, 193 aa, Homo sapiens; identical to SEQ ID NO: 46095
  Payload ID: 9414
  Gene Symbol: LILRA6
  Gene Name: leukocyte immunoglobulin-like receptor, subfamily A (with TM domain), member 6
  ENSP ID: ENSP00000478149

SEQ ID NO: 46099 - protein, 632 aa, Homo sapiens
  Payload ID: 9414
  Gene Symbol: LILRA6
  Gene Name: leukocyte immunoglobulin-like receptor, subfamily A (with TM domain), member 6
  ENSP ID: ENSP00000478681
MTPALTALLCLGLSLGPRTRVQAGPFPKPTLWAEPGSVISWGSPVTIWCQGSLEAQEYQLDKEGSPEPLDRNNPLEPKNKARFSIPSMTQHHAGRYRCHYYSSAGWSEPSDPLELVMTGFYNKPTLSALPSPVVASGGNMTLRCGSQKGYHHFVLMKEGEHQLPRTLDSQQLHSGGFQALFPVGPVTPSHRWRFTCYYYYTNTPQVWSHPSDPLEILPSGVSRKPSLLTLQGPVLAPGQSLTLQCGSDVGYDRFVLYKEGERDFLQRPGQQPQAGLSQANFTLGPVSPSHGGQYRCYGAHNLSSEWSAPSDPLNILMAGQIYDTVSLSAQPGPTVASGENVTLLCQSRGYFDTFLLTKEGAAHPPLRLRSMYGAHKYQAEFPMSPVTSAHAGTYRCYGSRSSNPHLLSHPSEPLELMVSGHSGGSSLPPTGPPSTPGLGRYLEVLIGVSVAFVLLLFLLLFLLLRRQRHSKHRTSDQRKTDFQRPAGAAETEPKDRGLLRRSSPAADVQEENLYAAVKDTQSEDRVELDSQQSPHDEDPQAVTYAPVKHSSPRREMASPPSSLSGEFLDTKDRQVEEDRQMDTEAAASEASQDVTYAQLHSLTLRRKATEPPPSQEGEPPAEPSIYATLAIH

SEQ ID NO: 46100 - protein, 193 aa, Homo sapiens
  Payload ID: 9414
  Gene Symbol: LILRA6
  Gene Name: leukocyte immunoglobulin-like receptor, subfamily A (with TM domain), member 6
  ENSP ID: ENSP00000478772
MTPALTALLCLGLSLGPRTRVQAGPFPKPTLWAEPGSVISWGSPVTIWCQGSLEAQEYQLDKEGSPEPWDRNNPLEPKNKARFSIPSMTQHHAGRYRCHYYSSAGWSEPSDPLELVMTGFYNKPTLSALPSPVVASGGNMTLRCGSQKGYHHFVLMKEGEHQLPRTLDSQQLHSGGFQALFPVGPVTPSHRRV

SEQ ID NO: 46101 - protein, 193 aa, Homo sapiens; identical to SEQ ID NO: 46097
  Payload ID: 9414
  Gene Symbol: LILRA6
  Gene Name: leukocyte immunoglobulin-like receptor, subfamily A (with TM domain), member 6
  Uniprot ID: Q6PI73
  ENSP ID: ENSP00000478896

SEQ ID NO: 46102 - protein, 512 aa, Homo sapiens
  Payload ID: 9414
  Gene Symbol: LILRA6
  Gene Name: leukocyte immunoglobulin-like receptor, subfamily A (with TM domain), member 6
  ENSP ID: ENSP00000479351
MTPALTALLCLGLSLGPRTRVQAGPFPKPTLWAEPGSVISWGSPVTIWCQGSLEAQEYQLDKEGSPEPLDRNNPLEPKNKARFSIPSMTQHHAGRYRCHYYSSAGWSEPSDPLELVMTGFYNKPTLSALPSPVVASGGNMTLRCGSQKGYHHFVLMKEGEHQLPRTLDSQQLHSGGFQALFPVGPVTPSHRWRFTCYYYYTNTPQVWSHPSDPLEILPSGVSRKPSLLTLQGPVLAPGQSLTLQCGSDVGYDRFVLYKEGERDFLQRPGQQPQAGLSQANFTLGPVSPSHGGQYRCYGAHNLSSEWSAPSDPLNILMAGQIYDTVSLSAQPGPTVASGENVTLLCQSRGYFDTFLLTKEGAAHPPLRLRSMYGAHKYQAEFPMSPVTSAHAGTYRCYGSRSSNPHLLSHPSEPLELMVSGHSGGSSLPPTGPPSTPGESLRPLGERGLPQGSLSLPKDPTPLPSRTGLCPRGSEAGLVKSGGQGRERCWGPARRRSRADVGSKVAPGFTSLS

SEQ ID NO: 46103 - protein, 193 aa, Homo sapiens; identical to SEQ ID NO: 46097
  Payload ID: 9414
  Gene Symbol: LILRA6
  Gene Name: leukocyte immunoglobulin-like receptor, subfamily A (with TM domain), member 6
  Uniprot ID: Q6PI73
  ENSP ID: ENSP00000479375

SEQ ID NO: 46104 - protein, 504 aa, Homo sapiens
  Payload ID: 9414
  Gene Symbol: LILRA6
  Gene Name: leukocyte immunoglobulin-like receptor, subfamily A (with TM domain), member 6
  ENSP ID: ENSP00000479640
MTPALTALLCLGLSLGPRTRVQAGPFPKPTLWAEPGSVISWGSPVTIWCQGSLEAQEYQLDKEGSPEPLDRNNPLEPKNKARFSIPSMTQHHAGRYRCHYYSSAGWSEPSDPLELVMTGFYNKPTLSALPSPVVASGGNMTLRCGSQKGYHHFVLMKEGEHQLPRTLDSQQLHSGGFQALFPVGPVTPSHRWRFTCYYYYTNTPRVWSHPSDPLEILPSGVSRKPSLLTLQGPVLAPGQSLTLQCGSDVGYDRFVLYKEGERDFLQRPGQQPQAGLSQANFTLGPVSPSHGGQYRCYGAHNLSSEWSAPSDPLNILMAGQIYDTVSLSAQPGPTVASGENVTLLCQSRGYFDTFLLTKEGAAHPPLRLRSMYGAHKYQAEFPMSPVTSAHAGTYRCYGSYSSNPHLLSFPSEPLELMVSGHSGGSSLPPTGPPSTPGESLRPRGERGLPQGSLSLPKDPTPLPSRTGLCPRGSEAGLVKSGGFKAERDVGAQPGGGAGLMWGAR

SEQ ID NO: 46105 - protein, 632 aa, Homo sapiens
  Payload ID: 9414
  Gene Symbol: LILRA6
  Gene Name: leukocyte immunoglobulin-like receptor, subfamily A (with TM domain), member 6
  ENSP ID: ENSP00000479666
MTPALTALLCLGLSLGPRTRVQAGPFPKPTLWAEPGSVISWGSPVTIWCQGSLEAQEYQLDKEGSPEPLDRNNPLEPKNKARFSIPSMTQHHAGRYRCHYYSSAGWSEPSDPLELVMTGFYNKPTLSALPSPVVASGGNMTLRCGSQKGYHHFVLMKEGEHQLPRTLDSQQLHSGGFQALFPVGPVTPSHRWRFTCYYYYTNTPRVWSHPSDPLEILPSGVSRKPSLLTLQGPVLAPGQSLTLQCGSDVGYDRFVLYKEGERDFLQRPGQQPQAGLSQANFTLGPVSPSHGGQYRCYGAHNLSSEWSAPSDPLNILMAGQIYDTVSLSAQPGPTVASGENVTLLCQSRGYFDTFLLTKEGAAHPPLRLRSMYGAHKYQAEFPMSPVTSAHAGTYRCYGSYSSNPHLLSFPSEPLELMVSGHSGGSSLPPTGPPSTPGLGRYLEVLIGVSVAFVLLLFLLLFLLLRRQRHSKHRTSDQRKTDFQRPAGAAETEPKDRGLLRRSSPAADVQEENLYAAVKDTQSEDRVELDSQQSPHDEDPQAVTYAPVKHSSPRREMASPPSSLSGEFLDTKDRQVEEDRQMDTEAAASEASQDVTYAQLHSLTLRRKATEPPPSQEGEPPAEPSIYATLAIH

SEQ ID NO: 46106 - protein, 382 aa, Homo sapiens
  Payload ID: 9414
  Gene Symbol: LILRA6
  Gene Name: leukocyte immunoglobulin-like receptor, subfamily A (with TM domain), member 6
  ENSP ID: ENSP00000480190
MTPALTALLCLGLSLGPRTRVQAGPFPKPTLWAEPGSVISWGSPVTIWCQGSLEAQEYQLDKEGSPEPWDRNNPLEPKNKARFSIPSMTQHHAGRYRCHYYSSAGWSEPSDPLELVMTGFYNKPTLSALPSPVVASGGNMTLRCGSQKGYHHFVLMKEGEHQLPRTLDSQQLHSGGFQALFPVGPVTPSHRWRFTCYYYYTNTPWVWSHPSDPLEILPSGQIYDTVSLSAQPGPTVASGENVTLLCQSRGYFDTFLLTKEGAAHPPLRLRSMYGAHKYQAEFPMSPVTSAHAGTYRCYGSRSSNPHLLSHPSEPLELMVSGPSGGSSLPPTGPPSTPASHAKDYTVENLIRMGMAGLVLVFLGILLFEAQHSQRNPQDAAGR

SEQ ID NO: 46107 - protein, 481 aa, Homo sapiens
  Payload ID: 9414
  Gene Symbol: LILRA6
  Gene Name: leukocyte immunoglobulin-like receptor, subfamily A (with TM domain), member 6
  Uniprot ID: Q6PI73
  ENSP ID: ENSP00000480300
MTPALTALLCLGLSLGPRTRVQAGPFPKPTLWAEPGSVISWGSPVTIWCQGSLEAQEYQLDKEGSPEPLDRNNPLEPKNKARFSIPSMTQHHAGRYRCHYYSSAGWSEPSDPLELVMTGFYNKPTLSALPSPVVASGGNMTLRCGSQKGYHHFVLMKEGEHQLPRTLDSQQLHSGGFQALFPVGPVTPSHRWRFTCYYYYTNTPRVWSHPSDPLEILPSGVSRKPSLLTLQGPVLAPGQSLTLQCGSDVGYDRFVLYKEGERDFLQRPGQQPQAGLSQANFTLGPVSPSHGGQYRCYGAHNLSSEWSAPSDPLNILMAGQIYDTVSLSAQPGPTVASGENVTLLCQSRGYFDTFLLTKEGAAHPPLRLRSMYGAHKYQAEFPMSPVTSAHAGTYRCYGSYSSNPHLLSFPSEPLELMVSGHSGGSSLPPTGPPSTPASHAKDYTVENLIRMGMAGLVLVFLGILLFEAQHSQRNPQDAAGR

SEQ ID NO: 46108 - protein, 382 aa, Homo sapiens
  Payload ID: 9414
  Gene Symbol: LILRA6
  Gene Name: leukocyte immunoglobulin-like receptor, subfamily A (with TM domain), member 6
  ENSP ID: ENSP00000480591
MTPALTALLCLGLSLGPRTRVQAGPFPKPTLWAEPGSVISWGSPVTIWCQGSLEAQEYQLDKEGSPEPLDRNNPLEPKNKARFSIPSMTQHHAGRYRCHYYSSAGWSEPSDPLELVMTGFYNKPTLSALPSPVVASGGNMTLRCGSQKGYHHFVLMKEGEHQLPRTLDSQQLHSGGFQALFPVGPVTPSHRWRFTCYYYYTNTPRVWSHPSDPLEILPSGQIYDTVSLSAQPGPTVASGENVTLLCQSRGYFDTFLLTKEGAAHPPLRLRSMYGAHKYQAEFPMSPVTSAHAGTYRCYGSYSSNPHLLSFPSEPLELMVSGHSGGSSLPPTGPPSTPASHAKDYTVENLIRMGMAGLVLVFLGILLFEAQHSQRNPQDAAGR

SEQ ID NO: 46109 - protein, 481 aa, Homo sapiens
  Payload ID: 9414
  Gene Symbol: LILRA6
  Gene Name: leukocyte immunoglobulin-like receptor, subfamily A (with TM domain), member 6
  ENSP ID: ENSP00000480624
MTPALTALLCLGLSLGPRTRVQAGPFPKPTLWAEPGSVISWGSPVTIWCQGSLEAQEYQLDKEGSPEPLDRNNPLEPKNKARFSIPSMTQHHAGRYRCHYYSSAGWSEPSDPLELVMTGFYNKPTLSALPSPVVASGGNMTLRCGSQKGYHHFVLMKEGEHQLPRTLDSQQLHSGGFQALFPVGPVTPSHRWRFTCYYYYTNTPQVWSHPSDPLEILPSGVSRKPSLLTLQGPVLAPGQSLTLQCGSDVGYDRFVLYKEGERDFLQRPGQQPQAGLSQANFTLGPVSPSHGGQYRCYGAHNLSSEWSAPSDPLNILMAGQIYDTVSLSAQPGPTVASGENVTLLCQSRGYFDTFLLTKEGAAHPPLRLRSMYGAHKYQAEFPMSPVTSAHAGTYRCYGSRSSNPHLLSHPSEPLELMVSGHSGGSSLPPTGPPSTPASHAKDYTVENLIRMGMAGLVLVFLGILLFEAQHSQRNPQDAAGR

SEQ ID NO: 46110 - protein, 648 aa, Homo sapiens
  Payload ID: 9414
  Gene Symbol: LILRA6
  Gene Name: leukocyte immunoglobulin-like receptor, subfamily A (with TM domain), member 6
  ENSP ID: ENSP00000481047
MTPALTALLCLGLSLGPRTRVQAGPFPKPTLWAEPGSVISWGSPVTIWCQGSLEAQEYQLDKEGSPEPWDRNNPLEPKNKARFSIPSMTQHHAGRYRCHYYSSAGWSEPSDPLELVMTGFYNKPTLSALPSPVVASGGNMTLRCGSQKGYHHFVLMKEGEHQLPRTLDSQQLHSGGFQALFPVGPVTPSHRWRFTCYYYYTNTPWVWSHPSDPLEILPSGVSRKPSLLTLQGPVLAPGQSLTLQCGSDVGYDRFVLYKEGERDFLQRPGQQPQAGLSQANFTLGPVSPSHGGQYRCYGAHNLSSEWSAPSDPLNILMAGQIYDTVSLSAQPGPTVASGENVTLLCQSRGYFDTFLLTKEGAAHPPLRLRSMYGAHKYQAEFPMSPVTSAHAGTYRCYGSRSSNPHLLSHPSEPLELMVSGHSGGSSLPPTGPPSTPGGPEDQPLNPPGSGPQNGLGRYLEVLIGVSVAFVLLLFLLLFLLLRRQRHSKHRTSDQRKTDFQRPAGAAETEPKDRGLLRRSSPAADVQEENLYAAVKDTQSEDRVELDSQSPHDEDPQAVTYAPVKHSSPRREMASPPSSLSGEFLDTKDRQVEEDRQMDTEAAASEASQDVTYAQLHSLTLRRKATEPPPSQEGEPPAEPSIYATLAIH

SEQ ID NO: 46111 - protein, 481 aa, Homo sapiens
  Payload ID: 9414
  Gene Symbol: LILRA6
  Gene Name: leukocyte immunoglobulin-like receptor, subfamily A (with TM domain), member 6
  ENSP ID: ENSP00000481288
MTPALTALLCLGLSLGPRTRVQAGPFPKPTLWAEPGSVISWGSPVTIWCQGSLEAQEYQLDKEGSPEPWDRNNPLEPKNKARFSIPSMTQHHAGRYRCHYYSSAGWSEPSDPLELVMTGFYNKPTLSALPSPVVASGGNMTLRCGSQKGYHHFVLMKEGEHQLPRTLDSQQLHSGGFQALFPVGPVTPSHRWRFTCYYYYTNTPWVWSHPSDPLEILPSGVSRKPSLLTLQGPVLAPGQSLTLQCGSDVGYDRFVLYKEGERDFLQRPGQQPQAGLSQANFTLGPVSPSHGGQYRCYGAHNLSSEWSAPSDPLNILMAGQIYDTVSLSAQPGPTVASGENVTLLCQSRGYFDTFLLTKEGAAHPPLRLRSMYGAHKYQAEFPMSPVTSAHAGTYRCYGSRSSNPHLLSHPSEPLELMVSGPSGGSSLPPTGPPSTPASHAKDYTVENLIRMGMAGLVLVFLGILLFEAQHSQRNPQDAAGR

SEQ ID NO: 46112 - protein, 504 aa, Homo sapiens
  Payload ID: 9414
  Gene Symbol: LILRA6
  Gene Name: leukocyte immunoglobulin-like receptor, subfamily A (with TM domain), member 6
  ENSP ID: ENSP00000482776
MTPALTALLCLGLSLGPRTRVQAGPFPKPTLWAEPGSVISWGSPVTIWCQGSLEAQEYQLDKEGSPEPWDRNNPLEPKNKARFSIPSMTQHHAGRYRCHYYSSAGWSEPSDPLELVMTGFYNKPTLSALPSPVVASGGNMTLRCGSQKGYHHFVLMKEGEHQLPRTLDSQQLHSGGFQALFPVGPVTPSHRWRFTCYYYYTNTPWVWSHPSDPLEILPSGVSRKPSLLTLQGPVLAPGQSLTLQCGSDVGYDRFVLYKEGERDFLQRPGQQPQAGLSQANFTLGPVSPSHGGQYRCYGAHNLSSEWSAPSDPLNILMAGQIYDTVSLSAQPGPTVASGENVTLLCQSRGYFDTFLLTKEGAAHPPLRLRSMYGAHKYQAEFPMSPVTSAHAGTYRCYGSRSSNPHLLSHPSEPLELMVSGPSGGSSLPPTGPPSTPGESLRPRGERGLPQGSLSLPKDPTPLPSRTGLCPRGSEAGLVKSGGFKAERDVGAQPGGGAGLMWGAR

SEQ ID NO: 46113 - protein, 504 aa, Homo sapiens; identical to SEQ ID NO: 46104
  Payload ID: 9414
  Gene Symbol: LILRA6
  Gene Name: leukocyte immunoglobulin-like receptor, subfamily A (with TM domain), member 6
  ENSP ID: ENSP00000482843

SEQ ID NO: 46114 - protein, 504 aa, Homo sapiens
  Payload ID: 9414
  Gene Symbol: LILRA6
  Gene Name: leukocyte immunoglobulin-like receptor, subfamily A (with TM domain), member 6
  ENSP ID: ENSP00000483257
MTPTLAALLCLGLSLGPRTHVQAGPFPKPTLWAEPGSVISWGSPVTIWCQGSLEAQEYRLDKEGSPEPWDRNNPLEPKNKARFSIPSITEHHAGRYRCHYYSSAGWSEPSDPLELVMTGAYSKPTLSALPSPVVASGGNMTLQCGSQKGYHHFVLMKEGEHQLPRTLDSQQLHSGGFQALFPVGPVNPSHRWRFTCYYYYMNTPRVWSHPSDPLEILPSGVSRKPSLLTLQGPVLAPGQSLTLQCGSDVGYDRFVLYKEGERDFLQRPGQQPQAGLSQANFTLGPVSPSHGGQYRCYGAHNLSSEWSAPSDPLNILMAGQIYDTVSLSAQPGPTVASGENVTLLCQSWWQFDTFLLTKEGAAHPPLRLRSMYGAHKYQAEFPMSPVTSAHAGTYRCYGSYSSNPHLLSFPSEPLELMVSGHSGGSSLPPTGPPSTPGESLRPRGERGLPQGSLSLPKDPTPLPSRTGLCPRGSEAGLVKSGGFKAERDVGAQPGGGAGLMWGAR

SEQ ID NO: 46115 - protein, 193 aa, Homo sapiens; identical to SEQ ID NO: 46095
  Payload ID: 9414
  Gene Symbol: LILRA6
  Gene Name: leukocyte immunoglobulin-like receptor, subfamily A (with TM domain), member 6
  ENSP ID: ENSP00000483476

SEQ ID NO: 46116 - protein, 512 aa, Homo sapiens
  Payload ID: 9414
  Gene Symbol: LILRA6
  Gene Name: leukocyte immunoglobulin-like receptor, subfamily A (with TM domain), member 6
  ENSP ID: ENSP00000483697
MTPALTALLCLGLSLGPRTRVQAGPFPKPTLWAEPGSVISWGSPVTIWCQGSLEAQEYQLDKEGSPEPLDRNNPLEPKNKARFSIPSMTQHHAGRYRCHYYSSAGWSEPSDPLELVMTGFYNKPTLSALPSPVVASGGNMTLRCGSQKGYHHFVLMKEGEHQLPRTLDSQQLHSGGFQALFPVGPVTPSHRWRFTCYYYYTNTPRVWSHPSDPLEILPSGVSRKPSLLTLQGPVLAPGQSLTLQCGSDVGYDRFVLYKEGERDFLQRPGQQPQAGLSQANFTLGPVSPSHGGQYRCYGAHNLSSEWSAPSDPLNILMAGQIYDTVSLSAQPGPTVASGENVTLLCQSRGYFDTFLLTKEGAAHPPLRLRSMYGAHKYQAEFPMSPVTSAHAGTYRCYGSYSSNPHLLSFPSEPLELMVSGHSGGSSLPPTGPPSTPGESLRPRGERRLPQGSLSLPKDPTPLPSRTGLCPRGSEAGLVKSGGRGRGRCWGPARRRSRADVGGKTAPAFTSLS

SEQ ID NO: 46117 - protein, 193 aa, Homo sapiens; identical to SEQ ID NO: 46097
  Payload ID: 9414
  Gene Symbol: LILRA6
  Gene Name: leukocyte immunoglobulin-like receptor, subfamily A (with TM domain), member 6
  Uniprot ID: Q6PI73
  ENSP ID: ENSP00000483909

SEQ ID NO: 46118 - protein, 191 aa, Homo sapiens
  Payload ID: 9414
  Gene Symbol: LILRA6
  Gene Name: leukocyte immunoglobulin-like receptor, subfamily A (with TM domain), member 6
  ENSP ID: ENSP00000483950
MTPALTALLCLGLSLGPRTRVQAGPFPKPTLWAEPGSVISWGSPVTIWCQGSLEAQEYQLDKEGSPEPLDRNNPLEPKNKARFSIPSMTQHHAGRYRCHYYSSAGWSEPSDPLELVMTGFYNKPTLSALPSPVVASGGNMTLRCGSQKGYHHFVLMKEGEHQLPRTLDSQQLHSGGFQALFPVGPVTPSHS

SEQ ID NO: 46119 - protein, 648 aa, Homo sapiens
  Payload ID: 9414
  Gene Symbol: LILRA6
  Gene Name: leukocyte immunoglobulin-like receptor, subfamily A (with TM domain), member 6
  ENSP ID: ENSP00000484147
MTPTLAALLCLGLSLGPRTHVQAGPFPKPTLWAEPGSVISWGSPVTIWCQGSLEAQEYRLDKEGSPEPWDRNNPLEPKNKARFSIPSITEHHAGRYRCHYYSSAGWSEPSDPLELVMTGAYSKPTLSALPSPVVASGGNMTLQCGSQKGYHHFVLMKEGEHQLPRTLDSQQLHSGGFQALFPVGPVNPSHRWRFTCYYYYMNTPRVWSHPSDPLEILPSGVSRKPSLLTLQGPVLAPGQSLTLQCGSDVGYDRFVLYKEGERDFLQRPGQQPQAGLSQANFTLGPVSPSHGGQYRCYGAHNLSSEWSAPSDPLNILMAGQIYDTVSLSAQPGPTVASGENVTLLCQSWWQFDTFLLTKEGAAHPPLRLRSMYGAHKYQAEFPMSPVTSAHAGTYRCYGSYSSNPHLLSHPSEPLELVVSGHSGGSSLPPTGPPSTPGGPEDQPLNPPGSGPQNRLGRYLEVLIGVSVAFVLLLFLLLFLLLRRQRHSKHRTSDQRKTDFQRPAGAAETEPKDRGLLRRSSPAADVQEENLYAAVKDTQSEDRVELDSQSPHDEDPQAVTYAPVKHSSPRREMASPPSSLSGEFLDTKDRQVEEDRQMDTEAAASEASQDVTYAQLHSLTLRRKATEPPPSQEGEPPAEPSIYATLAIH

SEQ ID NO: 46120 - protein, 632 aa, Homo sapiens
  Payload ID: 9414
  Gene Symbol: LILRA6
  Gene Name: leukocyte immunoglobulin-like receptor, subfamily A (with TM domain), member 6
  ENSP ID: ENSP00000484396
MTPTLAALLCLGLSLGPRTHVQAGPFPKPTLWAEPGSVISWGSPVTIWCQGSLEAQEYRLDKEGSPEPWDRNNPLEPKNKARFSIPSITEHHAGRYRCHYYSSAGWSEPSDPLELVMTGAYSKPTLSALPSPVVASGGNMTLQCGSQKGYHHFVLMKEGEHQLPRTLDSQQLHSGGFQALFPVGPVNPSHRWRFTCYYYYMNTPRVWSHPSDPLEILPSGVSRKPSLLTLQGPVLAPGQSLTLQCGSDVGYDRFVLYKEGERDFLQRPGQQPQAGLSQANFTLGPVSPSHGGQYRCYGAHNLSSEWSAPSDPLNILMAGQIYDTVSLSAQPGPTVASGENVTLLCQSWWQFDTFLLTKEGAAHPPLRLRSMYGAHKYQAEFPMSPVTSAHAGTYRCYGSYSSNPHLLSHPSEPLELVVSGHSGGSSLPPTGPPSTPGLGRYLEVLIGVSVAFVLLLFLLLFLLLRRQRHSKHRTSDQRKTDFQRPAGAAETEPKDRGLLRRSSPAADVQEENLYAAVKDTQSEDRVELDSQQSPHDEDPQAVTYAPVKHSSPRREMASPPSSLSGEFLDTKDRQVEEDRQMDTEAAASEASQDVTYAQLHSLTLRRKATEPPPSQEGEPPAEPSIYATLAIH

SEQ ID NO: 46121 - protein, 382 aa, Homo sapiens
  Payload ID: 9414
  Gene Symbol: LILRA6
  Gene Name: leukocyte immunoglobulin-like receptor, subfamily A (with TM domain), member 6
  ENSP ID: ENSP00000484399
MTPTLAALLCLGLSLGPRTHVQAGPFPKPTLWAEPGSVISWGSPVTIWCQGSLEAQEYRLDKEGSPEPWDRNNPLEPKNKARFSIPSITEHHAGRYRCHYYSSAGWSEPSDPLELVMTGAYSKPTLSALPSPVVASGGNMTLQCGSQKGYHHFVLMKEGEHQLPRTLDSQQLHSGGFQALFPVGPVNPSHRWRFTCYYYYMNTPRVWSHPSDPLEILPSGQIYDTVSLSAQPGPTVASGENVTLLCQSWWQFDTFLLTKEGAAHPPLRLRSMYGAHKYQAEFPMSPVTSAHAGTYRCYGSYSSNPHLLSFPSEPLELMVSGHSGGSSLPPTGPPSTPASHAKDYTVENLIRMGMAGLVLLFLGILLFEAQHSQRNPQDAAGR

SEQ ID NO: 46122 - protein, 481 aa, Homo sapiens
  Payload ID: 9414
  Gene Symbol: LILRA6
  Gene Name: leukocyte immunoglobulin-like receptor, subfamily A (with TM domain), member 6
  ENSP ID: ENSP00000484543
MTPTLAALLCLGLSLGPRTHVQAGPFPKPTLWAEPGSVISWGSPVTIWCQGSLEAQEYRLDKEGSPEPWDRNNPLEPKNKARFSIPSITEHHAGRYRCHYYSSAGWSEPSDPLELVMTGAYSKPTLSALPSPVVASGGNMTLQCGSQKGYHHFVLMKEGEHQLPRTLDSQQLHSGGFQALFPVGPVNPSHRWRFTCYYYYMNTPRVWSHPSDPLEILPSGVSRKPSLLTLQGPVLAPGQSLTLQCGSDVGYDRFVLYKEGERDFLQRPGQQPQAGLSQANFTLGPVSPSHGGQYRCYGAHNLSSEWSAPSDPLNILMAGQIYDTVSLSAQPGPTVASGENVTLLCQSWWQFDTFLLTKEGAAHPPLRLRSMYGAHKYQAEFPMSPVTSAHAGTYRCYGSYSSNPHLLSFPSEPLELMVSGHSGGSSLPPTGPPSTPASHAKDYTVENLIRMGMAGLVLLFLGILLFEAQHSQRNPQDAAGR

SEQ ID NO: 46123 - protein, 193 aa, Homo sapiens; identical to SEQ ID NO: 46097
  Payload ID: 9414
  Gene Symbol: LILRA6
  Gene Name: leukocyte immunoglobulin-like receptor, subfamily A (with TM domain), member 6
  Uniprot ID: Q6PI73
  ENSP ID: ENSP00000484617

SEQ ID NO: 46124 - protein, 512 aa, Homo sapiens
  Payload ID: 9414
  Gene Symbol: LILRA6
  Gene Name: leukocyte immunoglobulin-like receptor, subfamily A (with TM domain), member 6
  ENSP ID: ENSP00000484821
MTPTLAALLCLGLSLGPRTHVQAGPFPKPTLWAEPGSVISWGSPVTIWCQGSLEAQEYRLDKEGSPEPWDRNNPLEPKNKARFSIPSITEHHAGRYRCHYYSSAGWSEPSDPLELVMTGAYSKPTLSALPSPVVASGGNMTLQCGSQKGYHHFVLMKEGEHQLPRTLDSQQLHSGGFQALFPVGPVNPSHRWRFTCYYYYMNTPRVWSHPSDPLEILPSGVSRKPSLLTLQGPVLAPGQSLTLQCGSDVGYDRFVLYKEGERDFLQRPGQQPQAGLSQANFTLGPVSPSHGGQYRCYGAHNLSSEWSAPSDPLNILMAGQIYDTVSLSAQPGPTVASGENVTLLCQSWWQFDTFLLTKEGAAHPPLRLRSMYGAHKYQAEFPMSPVTSAHAGTYRCYGSYSSNPHLLSFPSEPLELMVSGHSGGSSLPPTGPPSTPGESLRPRGERRLPQGSLSLPKDPTPLPSRTGLCPRGSEAGLVKSGGRGRGRCWGPARRRSRADVGGKTAPAFTSLS

SEQ ID NO: 46125 - protein, 632 aa, Homo sapiens
  Payload ID: 9414
  Gene Symbol: LILRA6
  Gene Name: leukocyte immunoglobulin-like receptor, subfamily A (with TM domain), member 6
  ENSP ID: ENSP00000484822
MTPTLAALLCLGLSLGPRTHVQAGPFPKPTLWAEPGSVISWGSPVTIWCQGSLEAQEYRLDKEGSPEPWDRNNPLEPKNKARFSIPSITEHHAGRYRCHYYSSAGWSEPSDPLELVMTGAYSKPTLSALPSPVVASGGNMTLQCGSQKGYHHFVLMKEGEHQLPRTLDSQQLHSGGFQALFPVGPVNPSHRWRFTCYYYYMNTPRVWSHPSDPLEILPSGVSRKPSLLTLQGPVLAPGQSLTLQCGSDVGYDRFVLYKEGERDFLQRPGQQPQAGLSQANFTLGPVSPSHGGQYRCYGAHNLSSEWSAPSDPLNILMAGQIYDTVSLSAQPGPTVASGENVTLLCQSWWQFDTFLLTKEGAAHPPLRLRSMYGAHKYQAEFPMSPVTSAHAGTYRCYGSYSSNPHLLSFPSEPLELMVSGHSGGSSLPPTGPPSTPGLGRYLEVLIGVSVAFVLLLFLLLFLLLRRQRHSKHRTSDQRKTDFQRPAGAAETEPKDRGLLRRSSPAADVQEENLYAAVKDTQSEDRVELDSQQSPHDEDPQAVTYAPVKHSSPRREMASPPSSLSGEFLDTKDRQVEEDRQMDTEAAASEASQDVTYAQLHSLTLRRKATEPPPSQEGEPPAEPSIYATLAIH

SEQ ID NO: 46126 - protein, 481 aa, Homo sapiens
  Payload ID: 9414
  Gene Symbol: LILRA6
  Gene Name: leukocyte immunoglobulin-like receptor, subfamily A (with TM domain), member 6
  ENSP ID: ENSP00000484823
MTPTLAALLCLGLSLGPRTHVQAGPFPKPTLWAEPGSVISWGSPVTIWCQGSLEAQEYRLDKEGSPEPWDRNNPLEPKNKARFSIPSITEHHAGRYRCHYYSSAGWSEPSDPLELVMTGAYSKPTLSALPSPVVASGGNMTLQCGSQKGYHHFVLMKEGEHQLPRTLDSQQLHSGGFQALFPVGPVNPSHRWRFTCYYYYMNTPRVWSHPSDPLEILPSGVSRKPSLLTLQGPVLAPGQSLTLQCGSDVGYDRFVLYKEGERDFLQRPGQQPQAGLSQANFTLGPVSPSHGGQYRCYGAHNLSSEWSAPSDPLNILMAGQIYDTVSLSAQPGPTVASGENVTLLCQSWWQFDTFLLTKEGAAHPPLRLRSMYGAHKYQAEFPMSPVTSAHAGTYRCYGSYSSNPHLLSFPSEPLELMVSGTLWRLQPPTHRAALHTPASHAKDYTVENLIRMGMAGLVLLFLGILLFEAQHSQRNPQDAAG

SEQ ID NO: 46127 - protein, 375 aa, Homo sapiens
  Payload ID: 9415
  Gene Symbol: LILRA3
  Gene Name: leukocyte immunoglobulin-like receptor, subfamily A (without TM domain), member 3
  ENSP ID: ENSP00000477708
MTPILTVLICLGLSLDPRTHVQAGPLPKPTLWAEPGSVITQGSPVTLRCQGSLETQEYHLYREKKTALWITRIPQELVKKGQFPILSITWEHAGRYCCIYGSHTAGLSESSDPLELVVTGAYSKPTLSALPSPVVTSGGNVTIQCDSQVAFDGFILCVSKKPSLSVQPGPVVAPGEKLTFQCGSDAGYDRFVLYKEWGRDFLQRPGRQPQAGLSQANFTLGPVSRSYGGQYTCSGAYNLSSEWSAPSDPLDILITGQIRARPFLSVRPGPTVASGENVTLLCQSQGGMHTFLLTKEGAADSPLRLKSKRQSHKYQAEFPMSPVTSAHAGTYRCYGSLSSNPYLLTHPSDPLELVVSGAAETLSPPQNKSDSKAGE

SEQ ID NO: 46128 - protein, 105 aa, Homo sapiens
  Payload ID: 9415
  Gene Symbol: LILRA3
  Gene Name: leukocyte immunoglobulin-like receptor, subfamily A (without TM domain), member 3
  ENSP ID: ENSP00000478008
MTPILTVLICLGLSLDPRTHVQAGPLPKPTLWAEPGSVITQGSPVTLRCQGSLETQEYHLYREKKTALWITRIPQELVKKGQFPILSITWEHAGRYCCIYGSHTA

SEQ ID NO: 46129 - protein, 105 aa, Homo sapiens; identical to SEQ ID NO: 46128
  Payload ID: 9415
  Gene Symbol: LILRA3
  Gene Name: leukocyte immunoglobulin-like receptor, subfamily A (without TM domain), member 3
  ENSP ID: ENSP00000478021

SEQ ID NO: 46130 - protein, 489 aa, Homo sapiens
  Payload ID: 9415
  Gene Symbol: LILRA3
  Gene Name: leukocyte immunoglobulin-like receptor, subfamily A (without TM domain), member 3
  ENSP ID: ENSP00000478188
MTPILTVLICLGLSLDPRTHVQAGPLPKPTLWAEPGSVITQGSPVTLRCQGSLETQEYHLYREKKTALWITRIPQELVKKGQFPILSITWEHAGRYCCIYGSHTAGLSESSDPLELVVTGAYSKPTLSALPSPVVTSGGNVTIQCDSQVAFDGFILCKEGEDEHPQCLNSHSHARGSSRAIFSVGPVSPSRRWSYRCYGYDSRAPYVWSLPSDLLGLLVPGVSKKPSLSVQPGPVVAPGEKLTFQCGSDAGYDRFVLYKEWGRDFLQRPGRQPQAGLSQANFTLGPVSRSYGGQYTCSGAYNLSSEWSAPSDPLDILITGQIRARPFLSVRPGPTVASGENVTLLCQSQGGMHTFLLTKEGAADSPLRLKSKRQSHKYQAEFPMSPVTSAHAGTYRCYGSLSSNPYLLTHPSDPLELVVSGAAETLSPPQNKSDSKAGAADTLSPSQNNPTSHPQDYTVENLIHMGKAGLILVVLRILLFEAQHSQRSP

SEQ ID NO: 46131 - protein, 37 aa, Homo sapiens
  Payload ID: 9415
  Gene Symbol: LILRA3
  Gene Name: leukocyte immunoglobulin-like receptor, subfamily A (without TM domain), member 3
  ENSP ID: ENSP00000478798
MTPILTVLICLGLSLDPRTHVQAGPLPKPTLWAEPGS

SEQ ID NO: 46132 - protein, 254 aa, Homo sapiens
  Payload ID: 9415
  Gene Symbol: LILRA3
  Gene Name: leukocyte immunoglobulin-like receptor, subfamily A (without TM domain), member 3
  ENSP ID: ENSP00000478806
MHRGLIHPQSSAVGGDAMTPILTVLICLGLSLDPRTHVQAGPLPKPTLWAEPGSVITQGSPVTLRCQGSLETQEYHLYREKKTALWITRIPQELVKKGQFPILSITWEHAGRYCCIYGSHTAGLSESSDPLELVVTGAYSKPTLSALPSPVVTSGGNVTIQCDSQVAFDGFILCKEGEDEHPQCLNSHSHARGSSRAIFSVGPVSPSRRWSYRCYGYDSRAPYVWSLPSDLLGLLVPGAAETLSPPQNKSDSKA

SEQ ID NO: 46133 - protein, 105 aa, Homo sapiens; identical to SEQ ID NO: 46128
  Payload ID: 9415
  Gene Symbol: LILRA3
  Gene Name: leukocyte immunoglobulin-like receptor, subfamily A (without TM domain), member 3
  ENSP ID: ENSP00000478906

SEQ ID NO: 46134 - protein, 205 aa, Homo sapiens
  Payload ID: 9415
  Gene Symbol: LILRA3
  Gene Name: leukocyte immunoglobulin-like receptor, subfamily A (without TM domain), member 3
  ENSP ID: ENSP00000479345
MTPILTVLICLGLSLDPRTHVQAGPLPKPTLWAEPGSVITQGSPVTLRCQGSLETQEYHLYREKKTALWITRIPQELVKKGQFPILSITWEHAGRYCCIYGSHTAGLSSKRQSHKYQAEFPMSPVTSAHAGTYRCYGSLSSNPYLLTHPSDPLELVVSASPTSHPQDYTVENLIHMGKAGLILVVLRILLFEAQHSQRSPDAARR

SEQ ID NO: 46135 - protein, 37 aa, Homo sapiens; identical to SEQ ID NO: 46131
  Payload ID: 9415
  Gene Symbol: LILRA3
  Gene Name: leukocyte immunoglobulin-like receptor, subfamily A (without TM domain), member 3
  ENSP ID: ENSP00000479942

SEQ ID NO: 46136 - protein, 489 aa, Homo sapiens; identical to SEQ ID NO: 46130
  Payload ID: 9415
  Gene Symbol: LILRA3
  Gene Name: leukocyte immunoglobulin-like receptor, subfamily A (without TM domain), member 3
  ENSP ID: ENSP00000480252

SEQ ID NO: 46137 - protein, 37 aa, Homo sapiens; identical to SEQ ID NO: 46131
  Payload ID: 9415
  Gene Symbol: LILRA3
  Gene Name: leukocyte immunoglobulin-like receptor, subfamily A (without TM domain), member 3
  ENSP ID: ENSP00000480375

SEQ ID NO: 46138 - protein, 439 aa, Homo sapiens
  Payload ID: 9415
  Gene Symbol: LILRA3
  Gene Name: leukocyte immunoglobulin-like receptor, subfamily A (without TM domain), member 3
  Uniprot ID: Q8N6C8
  ENSP ID: ENSP00000480386
MTPILTVLICLGLSLDPRTHVQAGPLPKPTLWAEPGSVITQGSPVTLRCQGSLETQEYHLYREKKTALWITRIPQELVKKGQFPILSITWEHAGRYCCIYGSHTAGLSESSDPLELVVTGAYSKPTLSALPSPVVTSGGNVTIQCDSQVAFDGFILCKEGEDEHPQCLNSHSHARGSSRAIFSVGPVSPSRRWSYRCYGYDSRAPYVWSLPSDLLGLLVPGVSKKPSLSVQPGPVVAPGEKLTFQCGSDAGYDRFVLYKEWGRDFLQRPGRQPQAGLSQANFTLGPVSRSYGGQYTCSGAYNLSSEWSAPSDPLDILITGQIRARPFLSVRPGPTVASGENVTLLCQSQGGMHTFLLTKEGAADSPLRLKSKRQSHKYQAEFPMSPVTSAHAGTYRCYGSLSSNPYLLTHPSDPLELVVSGAAETLSPPQNKSDSKAGE

SEQ ID NO: 46139 - protein, 439 aa, Homo sapiens; identical to SEQ ID NO: 46138
  Payload ID: 9415
  Gene Symbol: LILRA3
  Gene Name: leukocyte immunoglobulin-like receptor, subfamily A (without TM domain), member 3
  ENSP ID: ENSP00000481818

SEQ ID NO: 46140 - protein, 439 aa, Homo sapiens; identical to SEQ ID NO: 46138
  Payload ID: 9415
  Gene Symbol: LILRA3
  Gene Name: leukocyte immunoglobulin-like receptor, subfamily A (without TM domain), member 3
  Uniprot ID: Q8N6C8
  ENSP ID: ENSP00000482971

SEQ ID NO: 46141 - protein, 489 aa, Homo sapiens; identical to SEQ ID NO: 46130
  Payload ID: 9415
  Gene Symbol: LILRA3
  Gene Name: leukocyte immunoglobulin-like receptor, subfamily A (without TM domain), member 3
  ENSP ID: ENSP00000483374

SEQ ID NO: 46142 - protein, 439 aa, Homo sapiens; identical to SEQ ID NO: 46138
  Payload ID: 9415
  Gene Symbol: LILRA3
  Gene Name: leukocyte immunoglobulin-like receptor, subfamily A (without TM domain), member 3
  Uniprot ID: Q8N6C8
  ENSP ID: ENSP00000484119

SEQ ID NO: 46143 - protein, 489 aa, Homo sapiens; identical to SEQ ID NO: 46130
  Payload ID: 9415
  Gene Symbol: LILRA3
  Gene Name: leukocyte immunoglobulin-like receptor, subfamily A (without TM domain), member 3
  ENSP ID: ENSP00000484564

SEQ ID NO: 46144 - protein, 652 aa, Homo sapiens
  Payload ID: 9416
  Gene Symbol: LILRB1
  Gene Name: leukocyte immunoglobulin-like receptor, subfamily B (with TM and ITIM domains), member 1
  ENSP ID: ENSP00000315997
MTPILTVLICLGLSLGPRTHVQAGHLPKPTLWAEPGSVITQGSPVTLRCQGGQETQEYRLYREKKTAPWITRIPQELVKKGQFPIPSITWEHTGRYRCYYGSDTAGRSESSDPLELVVTGAYIKPTLSAQPSPVVNSGGNVTLQCDSQVAFDGFILCKEGEDEHPQCLNSQPHARGSSRAIFSVGPVSPSRRWWYRCYAYDSNSPYEWSLPSDLLELLVLGVSKKPSLSVQPGPIVAPEETLTLQCGSDAGYNRFVLYKDGERDFLQLAGAQPQAGLSQANFTLGPVSRSYGGQYRCYGAHNLSSEWSAPSDPLDILIAGQFYDRVSLSVQPGPTVASGENVTLLCQSQGWMQTFLLTKEGAADDPWRLRSTYQSQKYQAEFPMGPVTSAHAGTYRCYGSQSSKPYLLTHPSDPLELVVSGPSGGPSSPTTGPTSTSAGPEDQPLTPTGSDPQSGLGRHLGVVIGILVAVILLLLLLLLLFLILRHRRQGKHWTSTQRKADFQHPAGAVGPEPTDRGLQWRSSPAADAQEENLYAAVKHTQPEDGVEMDTRQSPHDEDPQAVTYAEVKHSRPRREMASPPSPLSGEFLDTKDRQAEEDRQMDTEAAASEAPQDVTYAQLHSLTLRREATEPPPSQEGPSPAVPSIYATLAIH

SEQ ID NO: 46145 - protein, 652 aa, Homo sapiens; identical to SEQ ID NO: 46144
  Payload ID: 9416
  Gene Symbol: LILRB1
  Gene Name: leukocyte immunoglobulin-like receptor, subfamily B (with TM and ITIM domains), member 1
  ENSP ID: ENSP00000379608

SEQ ID NO: 46146 - protein, 634 aa, Homo sapiens
  Payload ID: 9416
  Gene Symbol: LILRB1
  Gene Name: leukocyte immunoglobulin-like receptor, subfamily B (with TM and ITIM domains), member 1
  ENSP ID: ENSP00000379610
MTPILTVLICLGLSLGPRTHVQAGHLPKPTLWAEPGSVITQGSPVTLRCQGGQETQEYRLYREKKTAPWITRIPQELVKKGQFPIPSITWEHTGRYRCYYGSDTAGRSESSDPLELVVTGAYIKPTLSAQPSPVVNSGGNVTLQCDSQVAFDGFILCKEGEDEHPQCLNSQPHARGSSRAIFSVGPVSPSRRWWYRCYAYDSNSPYEWSLPSDLLELLVLGVSKKPSLSVQPGPIVAPEETLTLQCGSDAGYNRFVLYKDGERDFLQLAGAQPQAGLSQANFTLGPVSRSYGGQYRCYGAHNLSSEWSAPSDPLDILIAGQFYDRVSLSVQPGPTVASGENVTLLCQSQGWMQTFLLTKEGAADDPWRLRSTYQSQKYQAEFPMGPVTSAHAGTYRCYGSQSSKPYLLTHPSDPLELVVSAGPEDQPLTPTGSDPQSGLGRHLGVVIGILVAVILLLLLLLLLFLILRHRRQGKHWTSTQRKADFQHPAGAVGPEPTDRGLQWRSSPAADAQEENLYAAVKHTQPEDGVEMDTRSPHDEDPQAVTYAEVKHSRPRREMASPPSPLSGEFLDTKDRQAEEDRQMDTEAAASEAPQDVTYAQLHSLTLRREATEPPPSQEGPSPAVPSIYATLAIH

SEQ ID NO: 46147 - protein, 651 aa, Homo sapiens
  Payload ID: 9416
  Gene Symbol: LILRB1
  Gene Name: leukocyte immunoglobulin-like receptor, subfamily B (with TM and ITIM domains), member 1
  ENSP ID: ENSP00000379618
MTPILTVLICLGLSLGPRTHVQAGHLPKPTLWAEPGSVITQGSPVTLRCQGGQETQEYRLYREKKTAPWITRIPQELVKKGQFPIPSITWEHTGRYRCYYGSDTAGRSESSDPLELVVTGAYIKPTLSAQPSPVVNSGGNVTLQCDSQVAFDGFILCKEGEDEHPQCLNSQPHARGSSRAIFSVGPVSPSRRWWYRCYAYDSNSPYEWSLPSDLLELLVLGVSKKPSLSVQPGPIVAPEETLTLQCGSDAGYNRFVLYKDGERDFLQLAGAQPQAGLSQANFTLGPVSRSYGGQYRCYGAHNLSSEWSAPSDPLDILIAGQFYDRVSLSVQPGPTVASGENVTLLCQSQGWMQTFLLTKEGAADDPWRLRSTYQSQKYQAEFPMGPVTSAHAGTYRCYGSQSSKPYLLTHPSDPLELVVSGPSGGPSSPTTGPTSTSAGPEDQPLTPTGSDPQSGLGRHLGVVIGILVAVILLLLLLLLLFLILRHRRQGKHWTSTQRKADFQHPAGAVGPEPTDRGLQWRSSPAADAQEENLYAAVKHTQPEDGVEMDTRSPHDEDPQAVTYAEVKHSRPRREMASPPSPLSGEFLDTKDRQAEEDRQMDTEAAASEAPQDVTYAQLHSLTLRREATEPPPSQEGPSPAVPSIYATLAIH

SEQ ID NO: 46148 - protein, 650 aa, Homo sapiens
  Payload ID: 9416
  Gene Symbol: LILRB1
  Gene Name: leukocyte immunoglobulin-like receptor, subfamily B (with TM and ITIM domains), member 1
  ENSP ID: ENSP00000379622
MTPILTVLICLGLSLGPRTHVQAGHLPKPTLWAEPGSVITQGSPVTLRCQGGQETQEYRLYREKKTAPWITRIPQELVKKGQFPIPSITWEHTGRYRCYYGSDTAGRSESSDPLELVVTGAYIKPTLSAQPSPVVNSGGNVTLQCDSQVAFDGFILCKEGEDEHPQCLNSQPHARGSSRAIFSVGPVSPSRRWWYRCYAYDSNSPYEWSLPSDLLELLVLGVSKKPSLSVQPGPIVAPEETLTLQCGSDAGYNRFVLYKDGERDFLQLAGAQPQAGLSQANFTLGPVSRSYGGQYRCYGAHNLSSEWSAPSDPLDILIAGQFYDRVSLSVQPGPTVASGENVTLLCQSQGWMQTFLLTKEGAADDPWRLRSTYQSQKYQAEFPMGPVTSAHAGTYRCYGSQSSKPYLLTHPSDPLELVVSGPSGGPSSPTTGPTSTSGPEDQPLTPTGSDPQSGLGRHLGVVIGILVAVILLLLLLLLLFLILRHRRQGKHWTSTQRKADFQHPAGAVGPEPTDRGLQWRSSPAADAQEENLYAAVKHTQPEDGVEMDTRSPHDEDPQAVTYAEVKHSRPRREMASPPSPLSGEFLDTKDRQAEEDRQMDTEAAASEAPQDVTYAQLHSLTLRREATEPPPSQEGPSPAVPSIYATLAIH

SEQ ID NO: 46149 - protein, 651 aa, Homo sapiens
  Payload ID: 9416
  Gene Symbol: LILRB1
  Gene Name: leukocyte immunoglobulin-like receptor, subfamily B (with TM and ITIM domains), member 1
  ENSP ID: ENSP00000379623
MTPILTVLICLGLSLGPRTHVQAGHLPKPTLWAEPGSVITQGSPVTLRCQGGQETQEYRLYREKKTAPWITRIPQELVKKGQFPIPSITWEHTGRYRCYYGSDTAGRSESSDPLELVVTGAYIKPTLSAQPSPVVNSGGNVTLQCDSQVAFDGFILCKEGEDEHPQCLNSQPHARGSSRAIFSVGPVSPSRRWWYRCYAYDSNSPYEWSLPSDLLELLVLGVSKKPSLSVQPGPIVAPEETLTLQCGSDAGYNRFVLYKDGERDFLQLAGAQPQAGLSQANFTLGPVSRSYGGQYRCYGAHNLSSEWSAPSDPLDILIAGQFYDRVSLSVQPGPTVASGENVTLLCQSQGWMQTFLLTKEGAADDPWRLRSTYQSQKYQAEFPMGPVTSAHAGTYRCYGSQSSKPYLLTHPSDPLELVVSGPSGGPSSPTTGPTSTSGPEDQPLTPTGSDPQSGLGRHLGVVIGILVAVILLLLLLLLLFLILRHRRQGKHWTSTQRKADFQHPAGAVGPEPTDRGLQWRSSPAADAQEENLYAAVKHTQPEDGVEMDTRQSPHDEDPQAVTYAEVKHSRPRREMASPPSPLSGEFLDTKDRQAEEDRQMDTEAAASEAPQDVTYAQLHSLTLRREATEPPPSQEGPSPAVPSIYATLAIH

SEQ ID NO: 46150 - protein, 701 aa, Homo sapiens
  Payload ID: 9416
  Gene Symbol: LILRB1
  Gene Name: leukocyte immunoglobulin-like receptor, subfamily B (with TM and ITIM domains), member 1
  ENSP ID: ENSP00000395004
MRRRTQPPIGHTLCVSLSCQHRGLIHPQSRAVGGDAMTPILTVLICLGLSLGPRTHVQAGHLPKPTLWAEPGSVITQGSPVTLRCQGGQETQEYRLYREKKTAPWITRIPQELVKKGQFPIPSITWEHTGRYRCYYGSDTAGRSESSDPLELVVTGAYIKPTLSAQPSPVVNSGGNVTLQCDSQVAFDGFILCKEGEDEHPQCLNSQPHARGSSRAIFSVGPVSPSRRWWYRCYAYDSNSPYEWSLPSDLLELLVLGVSKKPSLSVQPGPIVAPEETLTLQCGSDAGYNRFVLYKDGERDFLQLAGAQPQAGLSQANFTLGPVSRSYGGQYRCYGAHNLSSEWSAPSDPLDILIAGQFYDRVSLSVQPGPTVASGENVTLLCQSQGWMQTFLLTKEGAADDPWRLRSTYQSQKYQAEFPMGPVTSAHAGTYRCYGSQSSKPYLLTHPSDPLELVVSGPSGGPSSPTTGPTSTSAGPEDQPLTPTGSDPQSAPGLGSGAGTRAAGLGRHLGVVIGILVAVILLLLLLLLLFLILRHRRQGKHWTSTQRKADFQHPAGAVGPEPTDRGLQWRSSPAADAQEENLYAAVKHTQPEDGVEMDTRQSPHDEDPQAVTYAEVKHSRPRREMASPPSPLSGEFLDTKDRQAEEDRQMDTEAAASEAPQDVTYAQLHSLTLRREATEPPPSQEGPSPAVPSIYATLAIH

SEQ ID NO: 46151 - protein, 510 aa, Homo sapiens
  Payload ID: 9416
  Gene Symbol: LILRB1
  Gene Name: leukocyte immunoglobulin-like receptor, subfamily B (with TM and ITIM domains), member 1
  ENSP ID: ENSP00000410165
MTPILTVLICLGLSLGPRTHVQAGHLPKPTLWAEPGSVITQGSPVTLRCQGGQETQEYRLYREKKTAPWITRIPQELVKKGQFPIPSITWEHTGRYRCYYGSDTAGRSESSDPLELVVTGAYIKPTLSAQPSPVVNSGGNVTLQCDSQVAFDGFILCKEGEDEHPQCLNSQPHARGSSRAIFSVGPVSPSRRWWYRCYAYDSNSPYEWSLPSDLLELLVLGVSKKPSLSVQPGPIVAPEETLTLQCGSDAGYNRFVLYKDGERDFLQLAGAQPQAGLSQANFTLGPVSRSYGGQYRCYGAHNLSSEWSAPSDPLDILIAGQFYDRVSLSVQPGPTVASGENVTLLCQSQGWMQTFLLTKEGAADDPWRLRSTYQSQKYQAEFPMGPVTSAHAGTYRCYGSQSSKPYLLTHPSDPLELVVSGPSGGPSSPTTGPTSTSGPEDQPLTPTGSDPQSGLGRHLGVVIGILVAVILLLLLLLLLFLILRHRRQGKHWTSSPAQLPMPRKKTSMLP

SEQ ID NO: 46152 - protein, 684 aa, Homo sapiens
  Payload ID: 9416
  Gene Symbol: LILRB1
  Gene Name: leukocyte immunoglobulin-like receptor, subfamily B (with TM and ITIM domains), member 1
  ENSP ID: ENSP00000477838
  MOD_RES (1)..(1): Any amino acid
XCQHRGLIHPQSRAVGGDAMTPILTVLICLGLSLGPRTHVQAGHLPKPTLWAEPGSVITQGSPVTLRCQGGQETQEYRLYREKKTALWITRIPQELVKKGQFPIPSITWEHAGRYRCYYGSDTAGRSESSDPLELVVTGAYIKPTLSAQPSPVVNSGGNVILQCDSQVAFDGFSLCKEGEDEHPQCLNSQPHARGSSRAIFSVGPVSPSRRWWYRCYAYDSNSPYEWSLPSDLLELLVLGVSKKPSLSVQPGPIVAPEETLTLQCGSDAGYNRFVLYKDGERDFLQLAGAQPQAGLSQANFTLGPVSRSYGGQYRCYGAHNLSSEWSAPSDPLDILIAGQFYDRVSLSVQPGPTVASGENVTLLCQSQGWMQTFLLTKEGAADDPWRLRSTYQSQKYQAEFPMGPVTSAHAGTYRCYGSQSSKPYLLTHPSDPLELVVSGPSGGPSSPTTGPTSTSAGPEDQPLTPTGSDPQSAPGLGSGAGTRAAGLGRHLGVVIGILVAVILLLLLLLLLFLILRHRRQGKHWTSTQRKADFQHPAGAVGPEPTDRGLQWRSSPAADAQEENLYAAVKHTQPEDGVEMDTRQSPHDEDPQAVTYAEVKHSRPRREMASPPSPLSGEFLDTKDRQAEEDRQMDTEAAASEAPQDVTYAQLHSLTLRREATEPPPSQEGPSPAVPSIYATLAIH

SEQ ID NO: 46153 - protein, 651 aa, Homo sapiens
  Payload ID: 9416
  Gene Symbol: LILRB1
  Gene Name: leukocyte immunoglobulin-like receptor, subfamily B (with TM and ITIM domains), member 1
  Uniprot ID: Q8NHL6
  ENSP ID: ENSP00000478282
MTPILTVLICLGLSLGPRTHVQAGHLPKPTLWAEPGSVITQGSPVTLRCQGGQETQEYRLYREKKTALWITRIPQELVKKGQFPIPSITWEHAGRYRCYYGSDTAGRSESSDPLELVVTGAYIKPTLSAQPSPVVNSGGNVILQCDSQVAFDGFSLCKEGEDEHPQCLNSQPHARGSSRAIFSVGPVSPSRRWWYRCYAYDSNSPYEWSLPSDLLELLVLGVSKKPSLSVQPGPIVAPEETLTLQCGSDAGYNRFVLYKDGERDFLQLAGAQPQAGLSQANFTLGPVSRSYGGQYRCYGAHNLSSEWSAPSDPLDILIAGQFYDRVSLSVQPGPTVASGENVTLLCQSQGWMQTFLLTKEGAADDPWRLRSTYQSQKYQAEFPMGPVTSAHAGTYRCYGSQSSKPYLLTHPSDPLELVVSGPSGGPSSPTTGPTSTSGPEDQPLTPTGSDPQSGLGRHLGVVIGILVAVILLLLLLLLLFLILRHRRQGKHWTSTQRKADFQHPAGAVGPEPTDRGLQWRSSPAADAQEENLYAAVKHTQPEDGVEMDTRQSPHDEDPQAVTYAEVKHSRPRREMASPPSPLSGEFLDTKDRQAEEDRQMDTEAAASEAPQDVTYAQLHSLTLRREATEPPPSQEGPSPAVPSIYATLAIH

SEQ ID NO: 46154 - protein, 651 aa, Homo sapiens
  Payload ID: 9416
  Gene Symbol: LILRB1
  Gene Name: leukocyte immunoglobulin-like receptor, subfamily B (with TM and ITIM domains), member 1
  ENSP ID: ENSP00000478831
MTPILTVLICLGLSLGPRTHVQAGHLPKPTLWAEPGSVITQGSPVTLRCQGGQETQEYRLYREKKTAPWITRIPQELVKKGQFPIPSITWEHAGRYRCYYGSDTAGRSESSDPLELVVTGAYIKPTLSAQPSPVVNSGGNVTLQCDSQVAFDGFILCKEGEDEHPQCLNSQPHARGSSRAIFSVGPVSPSRRWWYRCYAYDSNSPYEWSLPSDLLELLVLGVSKKPSLSVQPGPIVAPEETLTLQCGSDAGYNRFVLYKDGERDFLQLAGAQPQAGLSQANFTLGPVSRSYGGQYRCYGAHNLSSEWSAPSDPLDILIAGQFYDRVSLSVQPGPTVASGENVTLLCQSQGWMQTFLLTKEGAADDPWRLRSTYQSQKYQAEFPMGPVTSAHAGTYRCYGSQSSKPYLLTHPSDPLELVVSGPSGGPSSPTTGPTSTSGPEDQPLTPTGSDPQSGLGRHLGVVIGILVAVILLLLLLLLLFLILRHRRQGKHWTSTQRKADFQHPAGAVGPEPTDRGLQWRSSPAADAQEENLYAAVKHTQPEDGVEMDTRQSPHDEDPQAVTYAEVKHSRPRREMASPPSPLSGEFLDTKDRQAEEDRQMDTEAAASEAPQDVTYAQLHSLTLRRKATEPPPSQEGPSPAVPSIYATLAIH

SEQ ID NO: 46155 - protein, 67 aa, Homo sapiens
  Payload ID: 9416
  Gene Symbol: LILRB1
  Gene Name: leukocyte immunoglobulin-like receptor, subfamily B (with TM and ITIM domains), member 1
  ENSP ID: ENSP00000479156
EFLDTKDRQAEEDRQMDTEAAASEAPQDVTYAQLHSLTLRREATEPPPSQEGPSPAVPSIYATLAIH

SEQ ID NO: 46156 - protein, 485 aa, Homo sapiens
  Payload ID: 9416
  Gene Symbol: LILRB1
  Gene Name: leukocyte immunoglobulin-like receptor, subfamily B (with TM and ITIM domains), member 1
  ENSP ID: ENSP00000479503
MTPILTVLICLGLSLGPRTHVQAGHLPKPTLWAEPGSVITQGSPVTLRCQGGQETQEYRLYREKKTALWITRIPQELVKKGQFPIPSITWEHAGRYRCYYGSDTAGRSESSDPLELVVTGAYIKPTLSAQPSPVVNSGGNVILQCDSQVAFDGFSLCKEGEDEHPQCLNSQPHARGSSRAIFSVGPVSPSRRWWYRCYAYDSNSPYEWSLPSDLLELLVLGVSKKPSLSVQPGPIVAPEETLTLQCGSDAGYNRFVLYKDGERDFLQLAGAQPQAGLSQANFTLGPVSRSYGGQYRCYGAHNLSSEWSAPSDPLDILIAGQFYDRVSLSVQPGPTVASGENVTLLCQSQGWMQTFLLTKEGAAHPLLHLRSEHGAQQHQAEFPMSPVTSVHGGTYRCFSSHGFSHYLLSHPSDPLELIVSGAADTLSPSQNKSDSETASPASHLQDYAVENLIHMGVAGLILVVLGILSFEAWHSQRSFQDAAGR

SEQ ID NO: 46157 - protein, 651 aa, Homo sapiens
  Payload ID: 9416
  Gene Symbol: LILRB1
  Gene Name: leukocyte immunoglobulin-like receptor, subfamily B (with TM and ITIM domains), member 1
  Uniprot ID: Q8NHL6
  ENSP ID: ENSP00000479753
MTPILTVLICLGLSLGPRTHVQAGHLPKPTLWAEPGSVITQGSPVTLRCQGGQETQEYRLYREKKTALWITRIPQELVKKGQFPIPSITWEHAGRYRCYYGSDTAGRSESSDPLELVVTGAYIKPTLSAQPSPVVNSGGNVILQCDSQVAFDGFSLCKEGEDEHPQCLNSQPHARGSSRAIFSVGPVSPSRRWWYRCYAYDSNSPYEWSLPSDLLELLVLGVSKKPSLSVQPGPIVAPEETLTLQCGSDAGYNRFVLYKDGERDFLQLAGAQPQAGLSQANFTLGPVSRSYGGQYRCYGAHNLSSEWSAPSDPLDILIAGQFYDRVSLSVQPGPTVASGENVTLLCQSQGWMQTFLLTKEGAADDPWRLRSTYQSQKYQAEFPMGPVTSAHAGTYRCYGSQSSKPYLLTHPSDPLELVVSGPSGGPSSPTTGPTSTSAGPEDQPLTPTGSDPQSGLGRHLGVVIGILVAVILLLLLLLLLFLILRHRRQGKHWTSTQRKADFQHPAGAVGPEPTDRGLQWRSSPAADAQEENLYAAVKHTQPEDGVEMDTRSPHDEDPQAVTYAEVKHSRPRREMASPPSPLSGEFLDTKDRQAEEDRQMDTEAAASEAPQDVTYAQLHSLTLRREATEPPPSQEGPSPAVPSIYATLAIH

SEQ ID NO: 46158 - protein, 652 aa, Homo sapiens
  Payload ID: 9416
  Gene Symbol: LILRB1
  Gene Name: leukocyte immunoglobulin-like receptor, subfamily B (with TM and ITIM domains), member 1
  Uniprot ID: Q8NHL6
  ENSP ID: ENSP00000479887
MTPILTVLICLGLSLGPRTHVQAGHLPKPTLWAEPGSVITQGSPVTLRCQGGQETQEYRLYREKKTALWITRIPQELVKKGQFPIPSITWEHAGRYRCYYGSDTAGRSESSDPLELVVTGAYIKPTLSAQPSPVVNSGGNVILQCDSQVAFDGFSLCKEGEDEHPQCLNSQPHARGSSRAIFSVGPVSPSRRWWYRCYAYDSNSPYEWSLPSDLLELLVLGVSKKPSLSVQPGPIVAPEETLTLQCGSDAGYNRFVLYKDGERDFLQLAGAQPQAGLSQANFTLGPVSRSYGGQYRCYGAHNLSSEWSAPSDPLDILIAGQFYDRVSLSVQPGPTVASGENVTLLCQSQGWMQTFLLTKEGAADDPWRLRSTYQSQKYQAEFPMGPVTSAHAGTYRCYGSQSSKPYLLTHPSDPLELVVSGPSGGPSSPTTGPTSTSAGPEDQPLTPTGSDPQSGLGRHLGVVIGILVAVILLLLLLLLLFLILRHRRQGKHWTSTQRKADFQHPAGAVGPEPTDRGLQWRSSPAADAQEENLYAAVKHTQPEDGVEMDTRQSPHDEDPQAVTYAEVKHSRPRREMASPPSPLSGEFLDTKDRQAEEDRQMDTEAAASEAPQDVTYAQLHSLTLRREATEPPPSQEGPSPAVPSIYATLAIH

SEQ ID NO: 46159 - protein, 485 aa, Homo sapiens
  Payload ID: 9416
  Gene Symbol: LILRB1
  Gene Name: leukocyte immunoglobulin-like receptor, subfamily B (with TM and ITIM domains), member 1
  ENSP ID: ENSP00000480162
MTPILTVLICLGLSLGPRTHVQAGHLPKPTLWAEPGSVITQGSPVTLRCQGGQETQEYRLYREKKTAPWITRIPQELVKKGQFPIPSITWEHAGRYRCYYGSDTAGRSESSDPLELVVTGAYIKPTLSAQPSPVVNSGGNVTLQCDSQVAFDGFILCKEGEDEHPQCLNSQPHARGSSRAIFSVGPVSPSRRWWYRCYAYDSNSPYEWSLPSDLLELLVLGVSKKPSLSVQPGPIVAPEETLTLQCGSDAGYNRFVLYKDGERDFLQLAGAQPQAGLSQANFTLGPVSRSYGGQYRCYGAHNLSSEWSAPSDPLDILIAGQFYDRVSLSVQPGPTVASGENVTLLCQSQGWMQTFLLTKEGAAHPLLHLRSEHGAQQHQAEFPMSPVTSVHGGTYRCFSSHGFSHYLLSHPSDPLELIVSGAADTLSPSQNKSDSETASPASHLQDYAVENLIHMGVAGLILVVLGILSFEAWHSQRSFQDAAGR

SEQ ID NO: 46160 - protein, 485 aa, Homo sapiens; identical to SEQ ID NO: 46156
  Payload ID: 9416
  Gene Symbol: LILRB1
  Gene Name: leukocyte immunoglobulin-like receptor, subfamily B (with TM and ITIM domains), member 1
  ENSP ID: ENSP00000480213

SEQ ID NO: 46161 - protein, 67 aa, Homo sapiens; identical to SEQ ID NO: 46155
  Payload ID: 9416
  Gene Symbol: LILRB1
  Gene Name: leukocyte immunoglobulin-like receptor, subfamily B (with TM and ITIM domains), member 1
  ENSP ID: ENSP00000480259

SEQ ID NO: 46162 - protein, 456 aa, Homo sapiens
  Payload ID: 9416
  Gene Symbol: LILRB1
  Gene Name: leukocyte immunoglobulin-like receptor, subfamily B (with TM and ITIM domains), member 1
  ENSP ID: ENSP00000480352
MTPILTVLICLGHLPKPTLWAEPGSVITQGSPVTLRCQGGQETQEYRLYREKKTAPWITRIPQELVKKGQFPIPSITWEHAGRYRCYYGSDTAGRSESSDPLELVVTGAYIKPTLSAQPSPVVNSGGNVTLQCDSQVAFDGFILCKEGEDEHPQCLNSQPHARGSSRAIFSVGPVSPSRRWWYRCYAYDSNSPYEWSLPSDLLELLVLGVSKKPSLSVQPGPIVAPEETLTLQCGSDAGYNRFVLYKDGERDFLQLAGAQPQAGLSQANFTLGPVSRSYGGQYRCYGAHNLSSEWSAPSDPLDILIAGQFYDRVSLSVQPGPTVASGENVTLLCQSQGWMQTFLLTKEGAAHPLLHLRSEHGAQQHQAEFPMSPVTSVHGGTYRCFSSHGFSHYLLSHPSDPLELIVSASPASHLQDYAVENLIHMGVAGLILVVLGILSFEAWHSQRSFQDAAGR

SEQ ID NO: 46163 - protein, 650 aa, Homo sapiens
  Payload ID: 9416
  Gene Symbol: LILRB1
  Gene Name: leukocyte immunoglobulin-like receptor, subfamily B (with TM and ITIM domains), member 1
  Uniprot ID: Q8NHL6
  ENSP ID: ENSP00000480365
MTPILTVLICLGLSLGPRTHVQAGHLPKPTLWAEPGSVITQGSPVTLRCQGGQETQEYRLYREKKTALWITRIPQELVKKGQFPIPSITWEHAGRYRCYYGSDTAGRSESSDPLELVVTGAYIKPTLSAQPSPVVNSGGNVILQCDSQVAFDGFSLCKEGEDEHPQCLNSQPHARGSSRAIFSVGPVSPSRRWWYRCYAYDSNSPYEWSLPSDLLELLVLGVSKKPSLSVQPGPIVAPEETLTLQCGSDAGYNRFVLYKDGERDFLQLAGAQPQAGLSQANFTLGPVSRSYGGQYRCYGAHNLSSEWSAPSDPLDILIAGQFYDRVSLSVQPGPTVASGENVTLLCQSQGWMQTFLLTKEGAADDPWRLRSTYQSQKYQAEFPMGPVTSAHAGTYRCYGSQSSKPYLLTHPSDPLELVVSGPSGGPSSPTTGPTSTSGPEDQPLTPTGSDPQSGLGRHLGVVIGILVAVILLLLLLLLLFLILRHRRQGKHWTSTQRKADFQHPAGAVGPEPTDRGLQWRSSPAADAQEENLYAAVKHTQPEDGVEMDTRSPHDEDPQAVTYAEVKHSRPRREMASPPSPLSGEFLDTKDRQAEEDRQMDTEAAASEAPQDVTYAQLHSLTLRREATEPPPSQEGPSPAVPSIYATLAIH

SEQ ID NO: 46164 - protein, 510 aa, Homo sapiens
  Payload ID: 9416
  Gene Symbol: LILRB1
  Gene Name: leukocyte immunoglobulin-like receptor, subfamily B (with TM and ITIM domains), member 1
  ENSP ID: ENSP00000481605
  MOD_RES (1)..(1): Any amino acid
XTPILTVLICLGLSLGPRTHVQAGHLPKPTLWAEPGSVITQGSPVTLRCQGGQETQEYRLYREKKTALWITRIPQELVKKGQFPIPSITWEHAGRYRCYYGSDTAGRSESSDPLELVVTGAYIKPTLSAQPSPVVNSGGNVILQCDSQVAFDGFSLCKEGEDEHPQCLNSQPHARGSSRAIFSVGPVSPSRRWWYRCYAYDSNSPYEWSLPSDLLELLVLGVSKKPSLSVQPGPIVAPEETLTLQCGSDAGYNRFVLYKDGERDFLQLAGAQPQAGLSQANFTLGPVSRSYGGQYRCYGAHNLSSEWSAPSDPLDILIAGQFYDRVSLSVQPGPTVASGENVTLLCQSQGWMQTFLLTKEGAADDPWRLRSTYQSQKYQAEFPMGPVTSAHAGTYRCYGSQSSKPYLLTHPSDPLELVVSGPSGGPSSPTTGPTSTSGPEDQPLTPTGSDPQSGLGRHLGVVIGILVAVILLLLLLLLLFLILRHRRQGKHWTSSPAQLPMPRKKTSMLP

SEQ ID NO: 46165 - protein, 650 aa, Homo sapiens
  Payload ID: 9416
  Gene Symbol: LILRB1
  Gene Name: leukocyte immunoglobulin-like receptor, subfamily B (with TM and ITIM domains), member 1
  Uniprot ID: Q8NHL6
  ENSP ID: ENSP00000481700
MTPILTVLICLGLSLGPRTHVQAGHLPKPTLWAEPGSVITQGSPVTLRCQGGQETQEYRLYREKKTAPWITRIPQELVKKGQFPIPSITWEHAGRYRCYYGSDTAGRSESSDPLELVVTGAYIKPTLSAQPSPVVNSGGNVTLQCDSQVAFDGFILCKEGEDEHPQCLNSQPHARGSSRAIFSVGPVSPSRRWWYRCYAYDSNSPYEWSLPSDLLELLVLGVSKKPSLSVQPGPIVAPEETLTLQCGSDAGYNRFVLYKDGERDFLQLAGAQPQAGLSQANFTLGPVSRSYGGQYRCYGAHNLSSEWSAPSDPLDILIAGQFYDRVSLSVQPGPTVASGENVTLLCQSQGWMQTFLLTKEGAADDPWRLRSTYQSQKYQAEFPMGPVTSAHAGTYRCYGSQSSKPYLLTHPSDPLELVVSGPSGGPSSPTTGPTSTSGPEDQPLTPTGSDPQSGLGRHLGVVIGILVAVILLLLLLLLLFLILRHRRQGKHWTSTQRKADFQHPAGAVGPEPTDRGLQWRSSPAADAQEENLYAAVKHTQPEDGVEMDTRSPHDEDPQAVTYAEVKHSRPRREMASPPSPLSGEFLDTKDRQAEEDRQMDTEAAASEAPQDVTYAQLHSLTLRRKATEPPPSQEGPSPAVPSIYATLAIH

SEQ ID NO: 46166 - protein, 667 aa, Homo sapiens
  Payload ID: 9416
  Gene Symbol: LILRB1
  Gene Name: leukocyte immunoglobulin-like receptor, subfamily B (with TM and ITIM domains), member 1
  ENSP ID: ENSP00000481701
MHRGLIHPQSRAVGGDAMTPILTVLICLGLSLGPRTHVQAGHLPKPTLWAEPGSVITQGSPVTLRCQGGQETQEYRLYREKKTALWITRIPQELVKKGQFPIPSITWEHAGRYRCYYGSDTAGRSESSDPLELVVTGAYIKPTLSAQPSPVVNSGGNVILQCDSQVAFDGFSLCKEGEDEHPQCLNSQPHARGSSRAIFSVGPVSPSRRWWYRCYAYDSNSPYEWSLPSDLLELLVLGVSKKPSLSVQPGPIVAPEETLTLQCGSDAGYNRFVLYKDGERDFLQLAGAQPQAGLSQANFTLGPVSRSYGGQYRCYGAHNLSSEWSAPSDPLDILIAGQFYDRVSLSVQPGPTVASGENVTLLCQSQGWMQTFLLTKEGAADDPWRLRSTYQSQKYQAEFPMGPVTSAHAGTYRCYGSQSSKPYLLTHPSDPLELVVSGPSGGPSSPTTGPTSTSGPEDQPLTPTGSDPQSGLGRHLGVVIGILVAVILLLLLLLLLFLILRHRRQGKHWTSTQRKADFQHPAGAVGPEPTDRGLQWRSSPAADAQEENLYAAVKHTQPEDGVEMDTRSPHDEDPQAVTYAEVKHSRPRREMASPPSPLSGEFLDTKDRQAEEDRQMDTEAAASEAPQDVTYAQLHSLTLRREATEPPPSQEGPSPAVPSIYATLAIH

SEQ ID NO: 46167 - protein, 652 aa, Homo sapiens
  Payload ID: 9416
  Gene Symbol: LILRB1
  Gene Name: leukocyte immunoglobulin-like receptor, subfamily B (with TM and ITIM domains), member 1
  ENSP ID: ENSP00000481891
MTPILTVLICLGLSLGPRTHVQAGHLPKPTLWAEPGSVITQGSPVTLRCQGGQETQEYRLYREKKTAPWITRIPQELVKKGQFPIPSITWEHAGRYRCYYGSDTAGRSESSDPLELVVTGAYIKPTLSAQPSPVVNSGGNVTLQCDSQVAFDGFILCKEGEDEHPQCLNSQPHARGSSRAIFSVGPVSPSRRWWYRCYAYDSNSPYEWSLPSDLLELLVLGVSKKPSLSVQPGPIVAPEETLTLQCGSDAGYNRFVLYKDGERDFLQLAGAQPQAGLSQANFTLGPVSRSYGGQYRCYGAHNLSSEWSAPSDPLDILIAGQFYDRVSLSVQPGPTVASGENVTLLCQSQGWMQTFLLTKEGAADDPWRLRSTYQSQKYQAEFPMGPVTSAHAGTYRCYGSQSSKPYLLTHPSDPLELVVSGPSGGPSSPTTGPTSTSAGPEDQPLTPTGSDPQSGLGRHLGVVIGILVAVILLLLLLLLLFLILRHRRQGKHWTSTQRKADFQHPAGAVGPEPTDRGLQWRSSPAADAQEENLYAAVKHTQPEDGVEMDTRQSPHDEDPQAVTYAEVKHSRPRREMASPPSPLSGEFLDTKDRQAEEDRQMDTEAAASEAPQDVTYAQLHSLTLRRKATEPPPSQEGPSPAVPSIYATLAIH

SEQ ID NO: 46168 - protein, 510 aa, Homo sapiens
  Payload ID: 9416
  Gene Symbol: LILRB1
  Gene Name: leukocyte immunoglobulin-like receptor, subfamily B (with TM and ITIM domains), member 1
  ENSP ID: ENSP00000481949
MTPILTVLICLGLSLGPRTHVQAGHLPKPTLWAEPGSVITQGSPVTLRCQGGQETQEYRLYREKKTALWITRIPQELVKKGQFPIPSITWEHAGRYRCYYGSDTAGRSESSDPLELVVTGAYIKPTLSAQPSPVVNSGGNVILQCDSQVAFDGFSLCKEGEDEHPQCLNSQPHARGSSRAIFSVGPVSPSRRWWYRCYAYDSNSPYEWSLPSDLLELLVLGVSKKPSLSVQPGPIVAPEETLTLQCGSDAGYNRFVLYKDGERDFLQLAGAQPQAGLSQANFTLGPVSRSYGGQYRCYGAHNLSSEWSAPSDPLDILIAGQFYDRVSLSVQPGPTVASGENVTLLCQSQGWMQTFLLTKEGAADDPWRLRSTYQSQKYQAEFPMGPVTSAHAGTYRCYGSQSSKPYLLTHPSDPLELVVSGPSGGPSSPTTGPTSTSGPEDQPLTPTGSDPQSGLGRHLGVVIGILVAVILLLLLLLLLFLILRHRRQGKHWTSSPAQLPMPRKKTSMLP

SEQ ID NO: 46169 - protein, 652 aa, Homo sapiens; identical to SEQ ID NO: 46167
  Payload ID: 9416
  Gene Symbol: LILRB1
  Gene Name: leukocyte immunoglobulin-like receptor, subfamily B (with TM and ITIM domains), member 1
  ENSP ID: ENSP00000481972

SEQ ID NO: 46170 - protein, 634 aa, Homo sapiens
  Payload ID: 9416
  Gene Symbol: LILRB1
  Gene Name: leukocyte immunoglobulin-like receptor, subfamily B (with TM and ITIM domains), member 1
  ENSP ID: ENSP00000482054
MTPILTVLICLGLSLGPRTHVQAGHLPKPTLWAEPGSVITQGSPVTLRCQGGQETQEYRLYREKKTALWITRIPQELVKKGQFPIPSITWEHAGRYRCYYGSDTAGRSESSDPLELVVTGAYIKPTLSAQPSPVVNSGGNVILQCDSQVAFDGFSLCKEGEDEHPQCLNSQPHARGSSRAIFSVGPVSPSRRWWYRCYAYDSNSPYEWSLPSDLLELLVLGVSKKPSLSVQPGPIVAPEETLTLQCGSDAGYNRFVLYKDGERDFLQLAGAQPQAGLSQANFTLGPVSRSYGGQYRCYGAHNLSSEWSAPSDPLDILIAGQFYDRVSLSVQPGPTVASGENVTLLCQSQGWMQTFLLTKEGAADDPWRLRSTYQSQKYQAEFPMGPVTSAHAGTYRCYGSQSSKPYLLTHPSDPLELVVSAGPEDQPLTPTGSDPQSGLGRHLGVVIGILVAVILLLLLLLLLFLILRHRRQGKHWTSTQRKADFQHPAGAVGPEPTDRGLQWRSSPAADAQEENLYAAVKHTQPEDGVEMDTRSPHDEDPQAVTYAEVKHSRPRREMASPPSPLSGEFLDTKDRQAEEDRQMDTEAAASEAPQDVTYAQLHSLTLRREATEPPPSQEGPSPAVPSIYATLAIH

SEQ ID NO: 46171 - protein, 67 aa, Homo sapiens; identical to SEQ ID NO: 46155
  Payload ID: 9416
  Gene Symbol: LILRB1
  Gene Name: leukocyte immunoglobulin-like receptor, subfamily B (with TM and ITIM domains), member 1
  ENSP ID: ENSP00000482125

SEQ ID NO: 46172 - protein, 668 aa, Homo sapiens
  Payload ID: 9416
  Gene Symbol: LILRB1
  Gene Name: leukocyte immunoglobulin-like receptor, subfamily B (with TM and ITIM domains), member 1
  ENSP ID: ENSP00000482978
MHRGLIHPQSRAVGGDAMTPILTVLICLGLSLGPRTHVQAGHLPKPTLWAEPGSVITQGSPVTLRCQGGQETQEYRLYREKKTALWITRIPQELVKKGQFPIPSITWEHAGRYRCYYGSDTAGRSESSDPLELVVTGAYIKPTLSAQPSPVVNSGGNVILQCDSQVAFDGFSLCKEGEDEHPQCLNSQPHARGSSRAIFSVGPVSPSRRWWYRCYAYDSNSPYEWSLPSDLLELLVLGVSKKPSLSVQPGPIVAPEETLTLQCGSDAGYNRFVLYKDGERDFLQLAGAQPQAGLSQANFTLGPVSRSYGGQYRCYGAHNLSSEWSAPSDPLDILIAGQFYDRVSLSVQPGPTVASGENVTLLCQSQGWMQTFLLTKEGAADDPWRLRSTYQSQKYQAEFPMGPVTSAHAGTYRCYGSQSSKPYLLTHPSDPLELVVSGPSGGPSSPTTGPTSTSGPEDQPLTPTGSDPQSGLGRHLGVVIGILVAVILLLLLLLLLFLILRHRRQGKHWTSTQRKADFQHPAGAVGPEPTDRGLQWRSSPAADAQEENLYAAVKHTQPEDGVEMDTRQSPHDEDPQAVTYAEVKHSRPRREMASPPSPLSGEFLDTKDRQAEEDRQMDTEAAASEAPQDVTYAQLHSLTLRREATEPPPSQEGPSPAVPSIYATLAIH

SEQ ID NO: 46173 - protein, 652 aa, Homo sapiens
  Payload ID: 9416
  Gene Symbol: LILRB1
  Gene Name: leukocyte immunoglobulin-like receptor, subfamily B (with TM and ITIM domains), member 1
  ENSP ID: ENSP00000483139
  MOD_RES (1)..(1): Any amino acid
XTPILTVLICLGLSLGPRTHVQAGHLPKPTLWAEPGSVITQGSPVTLRCQGGQETQEYRLYREKKTALWITRIPQELVKKGQFPIPSITWEHAGRYRCYYGSDTAGRSESSDPLELVVTGAYIKPTLSAQPSPVVNSGGNVILQCDSQVAFDGFSLCKEGEDEHPQCLNSQPHARGSSRAIFSVGPVSPSRRWWYRCYAYDSNSPYEWSLPSDLLELLVLGVSKKPSLSVQPGPIVAPEETLTLQCGSDAGYNRFVLYKDGERDFLQLAGAQPQAGLSQANFTLGPVSRSYGGQYRCYGAHNLSSEWSAPSDPLDILIAGQFYDRVSLSVQPGPTVASGENVTLLCQSQGWMQTFLLTKEGAADDPWRLRSTYQSQKYQAEFPMGPVTSAHAGTYRCYGSQSSKPYLLTHPSDPLELVVSGPSGGPSSPTTGPTSTSAGPEDQPLTPTGSDPQSGLGRHLGVVIGILVAVILLLLLLLLLFLILRHRRQGKHWTSTQRKADFQHPAGAVGPEPTDRGLQWRSSPAADAQEENLYAAVKHTQPEDGVEMDTRQSPHDEDPQAVTYAEVKHSRPRREMASPPSPLSGEFLDTKDRQAEEDRQMDTEAAASEAPQDVTYAQLHSLTLRREATEPPPSQEGPSPAVPSIYATLAIH

SEQ ID NO: 46174 - protein, 67 aa, Homo sapiens; identical to SEQ ID NO: 46155
  Payload ID: 9416
  Gene Symbol: LILRB1
  Gene Name: leukocyte immunoglobulin-like receptor, subfamily B (with TM and ITIM domains), member 1
  ENSP ID: ENSP00000484046

SEQ ID NO: 46175 - protein, 456 aa, Homo sapiens
  Payload ID: 9416
  Gene Symbol: LILRB1
  Gene Name: leukocyte immunoglobulin-like receptor, subfamily B (with TM and ITIM domains), member 1
  ENSP ID: ENSP00000484156
MTPILTVLICLGHLPKPTLWAEPGSVITQGSPVTLRCQGGQETQEYRLYREKKTALWITRIPQELVKKGQFPIPSITWEHAGRYRCYYGSDTAGRSESSDPLELVVTGAYIKPTLSAQPSPVVNSGGNVILQCDSQVAFDGFSLCKEGEDEHPQCLNSQPHARGSSRAIFSVGPVSPSRRWWYRCYAYDSNSPYEWSLPSDLLELLVLGVSKKPSLSVQPGPIVAPEETLTLQCGSDAGYNRFVLYKDGERDFLQLAGAQPQAGLSQANFTLGPVSRSYGGQYRCYGAHNLSSEWSAPSDPLDILIAGQFYDRVSLSVQPGPTVASGENVTLLCQSQGWMQTFLLTKEGAAHPLLHLRSEHGAQQHQAEFPMSPVTSVHGGTYRCFSSHGFSHYLLSHPSDPLELIVSASPASHLQDYAVENLIHMGVAGLILVVLGILSFEAWHSQRSFQDAAGR

SEQ ID NO: 46176 - protein, 668 aa, Homo sapiens
  Payload ID: 9416
  Gene Symbol: LILRB1
  Gene Name: leukocyte immunoglobulin-like receptor, subfamily B (with TM and ITIM domains), member 1
  ENSP ID: ENSP00000484746
MHRGLIHPQSRAVGGDAMTPILTVLICLGLSLGPRTHVQAGHLPKPTLWAEPGSVITQGSPVTLRCQGGQETQEYRLYREKKTALWITRIPQELVKKGQFPIPSITWEHAGRYRCYYGSDTAGRSESSDPLELVVTGAYIKPTLSAQPSPVVNSGGNVILQCDSQVAFDGFSLCKEGEDEHPQCLNSQPHARGSSRAIFSVGPVSPSRRWWYRCYAYDSNSPYEWSLPSDLLELLVLGVSKKPSLSVQPGPIVAPEETLTLQCGSDAGYNRFVLYKDGERDFLQLAGAQPQAGLSQANFTLGPVSRSYGGQYRCYGAHNLSSEWSAPSDPLDILIAGQFYDRVSLSVQPGPTVASGENVTLLCQSQGWMQTFLLTKEGAADDPWRLRSTYQSQKYQAEFPMGPVTSAHAGTYRCYGSQSSKPYLLTHPSDPLELVVSGPSGGPSSPTTGPTSTSAGPEDQPLTPTGSDPQSGLGRHLGVVIGILVAVILLLLLLLLLFLILRHRRQGKHWTSTQRKADFQHPAGAVGPEPTDRGLQWRSSPAADAQEENLYAAVKHTQPEDGVEMDTRSPHDEDPQAVTYAEVKHSRPRREMASPPSPLSGEFLDTKDRQAEEDRQMDTEAAASEAPQDVTYAQLHSLTLRREATEPPPSQEGPSPAVPSIYATLAIH

SEQ ID NO: 46177 - protein, 651 aa, Homo sapiens
  Payload ID: 9416
  Gene Symbol: LILRB1
  Gene Name: leukocyte immunoglobulin-like receptor, subfamily B (with TM and ITIM domains), member 1
  ENSP ID: ENSP00000484936
MTPILTVLICLGLSLGPRTHVQAGHLPKPTLWAEPGSVITQGSPVTLRCQGGQETQEYRLYREKKTAPWITRIPQELVKKGQFPIPSITWEHAGRYRCYYGSDTAGRSESSDPLELVVTGAYIKPTLSAQPSPVVNSGGNVTLQCDSQVAFDGFILCKEGEDEHPQCLNSQPHARGSSRAIFSVGPVSPSRRWWYRCYAYDSNSPYEWSLPSDLLELLVLGVSKKPSLSVQPGPIVAPEETLTLQCGSDAGYNRFVLYKDGERDFLQLAGAQPQAGLSQANFTLGPVSRSYGGQYRCYGAHNLSSEWSAPSDPLDILIAGQFYDRVSLSVQPGPTVASGENVTLLCQSQGWMQTFLLTKEGAADDPWRLRSTYQSQKYQAEFPMGPVTSAHAGTYRCYGSQSSKPYLLTHPSDPLELVVSGPSGGPSSPTTGPTSTSAGPEDQPLTPTGSDPQSGLGRHLGVVIGILVAVILLLLLLLLLFLILRHRRQGKHWTSTQRKADFQHPAGAVGPEPTDRGLQWRSSPAADAQEENLYAAVKHTQPEDGVEMDTRSPHDEDPQAVTYAEVKHSRPRREMASPPSPLSGEFLDTKDRQAEEDRQMDTEAAASEAPQDVTYAQLHSLTLRRKATEPPPSQEGPSPAVPSIYATLAIH

SEQ ID NO: 46178 - protein, 634 aa, Homo sapiens; identical to SEQ ID NO: 46170
  Payload ID: 9416
  Gene Symbol: LILRB1
  Gene Name: leukocyte immunoglobulin-like receptor, subfamily B (with TM and ITIM domains), member 1
  ENSP ID: ENSP00000484938

SEQ ID NO: 46179 - protein, 206 aa, Homo sapiens
  Payload ID: 9416
  Gene Symbol: LILRB1
  Gene Name: leukocyte immunoglobulin-like receptor, subfamily B (with TM and ITIM domains), member 1
  ENSP ID: ENSP00000486125
MTPILTVLICLGLSLGPRTHVQAGHLPKPTLWAEPGSVITQGSPVTLRCQGGQETQEYRLYREKKTALWITRIPQELVKKGQFPIPSITWEHAGRYRCYYGSDTAGRSSEHGAQQHQAEFPMSPVTSAHTGTYRCYGSLSSDPYLLSHPSGPVELVVSASPASHLQDYAVENLIHMGVAGLILVVLGILSFEAWHSQRSFQDAAGR

SEQ ID NO: 46180 - protein, 206 aa, Homo sapiens; identical to SEQ ID NO: 46179
  Payload ID: 9416
  Gene Symbol: LILRB1
  Gene Name: leukocyte immunoglobulin-like receptor, subfamily B (with TM and ITIM domains), member 1
  ENSP ID: ENSP00000486644

SEQ ID NO: 46181 - protein, 206 aa, Homo sapiens
  Payload ID: 9416
  Gene Symbol: LILRB1
  Gene Name: leukocyte immunoglobulin-like receptor, subfamily B (with TM and ITIM domains), member 1
  ENSP ID: ENSP00000487378
MTPILTVLICLGLSLGPRTHVQAGHLPKPTLWAEPGSVITQGSPVTLRCQGGQETQEYRLYREKKTAPWITRIPQELVKKGQFPIPSITWEHAGRYRCYYGSDTAGRSSEHGAQQHQAEFPMSPVTSAHTGTYRCYGSLSSDPYLLSHPSGPVELVVSASPASHLQDYAVENLIHMGVAGLILVVLGILSFEAWHSQRSFQDAAGR

SEQ ID NO: 46182 - protein, 456 aa, Homo sapiens; identical to SEQ ID NO: 46175
  Payload ID: 9416
  Gene Symbol: LILRB1
  Gene Name: leukocyte immunoglobulin-like receptor, subfamily B (with TM and ITIM domains), member 1
  ENSP ID: ENSP00000487401

SEQ ID NO: 46183 - protein, 597 aa, Homo sapiens
  Payload ID: 9417
  Gene Symbol: LILRB2
  Gene Name: leukocyte immunoglobulin-like receptor, subfamily B (with TM and ITIM domains), member 2
  Uniprot ID: Q8N423
  ENSP ID: ENSP00000319960
MTPIVTVLICLGLSLGPRTRVQTGTIPKPTLWAEPDSVITQGSPVTLSCQGSLEAQEYRLYREKKSASWITRIRPELVKNGQFHIPSITWEHTGRYGCQYYSRARWSELSDPLVLVMTGAYPKPTLSAQPSPVVTSGGRVTLQCESQVAFGGFILCKEGEDEHPQCLNSQPHARGSSRAIFSVGPVSPNRRWSHRCYGYDLNSPYVWSSPSDLLELLVPGVSKKPSLSVQPGPVMAPGESLTLQCVSDVGYDRFVLYKEGERDLRQLPGRQPQAGLSQANFTLGPVSRSYGGQYRCYGAHNLSSECSAPSDPLDILITGQIRGTPFISVQPGPTVASGENVTLLCQSWRQFHTFLLTKAGAADAPLRLRSIHEYPKYQAEFPMSPVTSAHAGTYRCYGSLNSDPYLLSHPSEPLELVVSGPSMGSSPPPTGPISTPGPEDQPLTPTGSDPQSGLGRHLGVVIGILVAVVLLLLLLLLLFLILRHRRQGKHWTSTQRKADFQHPAGAVGPEPTDRGLQWRSSPAADAQEENLYAAVKDTQPEDGVEMDTRAAASEAPQDVTYAQLHSLTLRRKATEPPPSQEREPPAEPSIYATLAIH

SEQ ID NO: 46184 - protein, 510 aa, Homo sapiens
  Payload ID: 9417
  Gene Symbol: LILRB2
  Gene Name: leukocyte immunoglobulin-like receptor, subfamily B (with TM and ITIM domains), member 2
  Uniprot ID: Q8N423
  ENSP ID: ENSP00000375626
MTPIVTVLICLGLSLGPRTRVQTGTIPKPTLWAEPDSVITQGSPVTLSCQGSLEAQEYRLYREKKSASWITRIRPELVKNGQFHIPSITWEHTGRYGCQYYSRARWSELSDPLVLVMTGAYPKPTLSAQPSPVVTSGGRVTLQCESQVAFGGFILCKEGEDEHPQCLNSQPHARGSSRAIFSVGPVSPNRRWSHRCYGYDLNSPYVWSSPSDLLELLVPGVSKKPSLSVQPGPVMAPGESLTLQCVSDVGYDRFVLYKEGERDLRQLPGRQPQAGLSQANFTLGPVSRSYGGQYRCYGAHNLSSECSAPSDPLDILITGQIRGTPFISVQPGPTVASGENVTLLCQSWRQFHTFLLTKAGAADAPLRLRSIHEYPKYQAEFPMSPVTSAHAGTYRCYGSLNSDPYLLSHPSEPLELVVSGPSMGSSPPPTGPISTPAGPEDQPLTPTGSDPQSGLGRHLGVVIGILVAVVLLLLLLLLLFLILRHRRQGKHWTSSPAQLPTPRKKTSMLP

SEQ ID NO: 46185 - protein, 597 aa, Homo sapiens; identical to SEQ ID NO: 46183
  Payload ID: 9417
  Gene Symbol: LILRB2
  Gene Name: leukocyte immunoglobulin-like receptor, subfamily B (with TM and ITIM domains), member 2
  Uniprot ID: Q8N423
  ENSP ID: ENSP00000375628

SEQ ID NO: 46186 - protein, 598 aa, Homo sapiens
  Payload ID: 9417
  Gene Symbol: LILRB2
  Gene Name: leukocyte immunoglobulin-like receptor, subfamily B (with TM and ITIM domains), member 2
  Uniprot ID: Q8N423
  ENSP ID: ENSP00000375629
MTPIVTVLICLGLSLGPRTRVQTGTIPKPTLWAEPDSVITQGSPVTLSCQGSLEAQEYRLYREKKSASWITRIRPELVKNGQFHIPSITWEHTGRYGCQYYSRARWSELSDPLVLVMTGAYPKPTLSAQPSPVVTSGGRVTLQCESQVAFGGFILCKEGEDEHPQCLNSQPHARGSSRAIFSVGPVSPNRRWSHRCYGYDLNSPYVWSSPSDLLELLVPGVSKKPSLSVQPGPVMAPGESLTLQCVSDVGYDRFVLYKEGERDLRQLPGRQPQAGLSQANFTLGPVSRSYGGQYRCYGAHNLSSECSAPSDPLDILITGQIRGTPFISVQPGPTVASGENVTLLCQSWRQFHTFLLTKAGAADAPLRLRSIHEYPKYQAEFPMSPVTSAHAGTYRCYGSLNSDPYLLSHPSEPLELVVSGPSMGSSPPPTGPISTPAGPEDQPLTPTGSDPQSGLGRHLGVVIGILVAVVLLLLLLLLLFLILRHRRQGKHWTSTQRKADFQHPAGAVGPEPTDRGLQWRSSPAADAQEENLYAAVKDTQPEDGVEMDTRAAASEAPQDVTYAQLHSLTLRRKATEPPPSQEREPPAEPSIYATLAIH

SEQ ID NO: 46187 - protein, 210 aa, Homo sapiens
  Payload ID: 9417
  Gene Symbol: LILRB2
  Gene Name: leukocyte immunoglobulin-like receptor, subfamily B (with TM and ITIM domains), member 2
  ENSP ID: ENSP00000394130
  MOD_RES (1)..(1): Any amino acid
XFISVQPGPTVASGENVTLLCQSWRQFHTFLLTKAGAADAPLRLRSIHEYPKYQAEFPMSPVTSAHAGTYRCYGSLNSDPYLLSHPSEPLELVVSGPSMGSSPPPTGPISTPAGPEDQPLTPTGSDPQSGLGRHLGVVIGILVAVVLLLLLLLLLFLILRHRRQGKHWTSTQRKADFQHPAGAVGPEPTDRGLQWRSSPAADAQEENLCE

SEQ ID NO: 46188 - protein, 482 aa, Homo sapiens
  Payload ID: 9417
  Gene Symbol: LILRB2
  Gene Name: leukocyte immunoglobulin-like receptor, subfamily B (with TM and ITIM domains), member 2
  Uniprot ID: Q8N423
  ENSP ID: ENSP00000410117
MTGAYPKPTLSAQPSPVVTSGGRVTLQCESQVAFGGFILCKEGEDEHPQCLNSQPHARGSSRAIFSVGPVSPNRRWSHRCYGYDLNSPYVWSSPSDLLELLVPGVSKKPSLSVQPGPVMAPGESLTLQCVSDVGYDRFVLYKEGERDLRQLPGRQPQAGLSQANFTLGPVSRSYGGQYRCYGAHNLSSECSAPSDPLDILITGQIRGTPFISVQPGPTVASGENVTLLCQSWRQFHTFLLTKAGAADAPLRLRSIHEYPKYQAEFPMSPVTSAHAGTYRCYGSLNSDPYLLSHPSEPLELVVSGPSMGSSPPPTGPISTPAGPEDQPLTPTGSDPQSGLGRHLGVVIGILVAVVLLLLLLLLLFLILRHRRQGKHWTSTQRKADFQHPAGAVGPEPTDRGLQWRSSPAADAQEENLYAAVKDTQPEDGVEMDTRAAASEAPQDVTYAQLHSLTLRRKATEPPPSQEREPPAEPSIYATLAIH

SEQ ID NO: 46189 - protein, 219 aa, Homo sapiens
  Payload ID: 9417
  Gene Symbol: LILRB2
  Gene Name: leukocyte immunoglobulin-like receptor, subfamily B (with TM and ITIM domains), member 2
  ENSP ID: ENSP00000477879
EFPMSPVTSAHAGTYRCYGSLNSDPYLLSHPSEPLELVVSGPSMGSSPPPTGPISTPAGPEDQPLTPTGSDPQSGLGRHLGVVIGILVAVVLLLLLLLLLFLILRHRRQGKHWTSTQRKADFQHPAGAVGPEPTDRGLQWRSSPAADAQEENLYAAVKDTQPEDGVEMDTRAAASEAPQDVTYAQLHSLTLRRKATEPPPSQEREPPAEPSIYATLAIH

SEQ ID NO: 46190 - protein, 218 aa, Homo sapiens
  Payload ID: 9417
  Gene Symbol: LILRB2
  Gene Name: leukocyte immunoglobulin-like receptor, subfamily B (with TM and ITIM domains), member 2
  ENSP ID: ENSP00000478328
EFPMSPVTSAHAGTYRCYGSLNSDPYLLSHPSEPLELVVSGPSMGSSPPPTGPISTPGPEDQPLTPTGSDPQSGLGRHLGVVIGILVAVVLLLLLLLLLFLILRHRRQGKHWTSTQRKADFQHPAGAVGPEPTDRGLQWRSSPAADAQEENLYAAVKDTQPEDGVEMDTRAAASEAPQDVTYAQLHSLTLRRKATEPPPSQEREPPAEPSIYATLAIH

SEQ ID NO: 46191 - protein, 597 aa, Homo sapiens
  Payload ID: 9417
  Gene Symbol: LILRB2
  Gene Name: leukocyte immunoglobulin-like receptor, subfamily B (with TM and ITIM domains), member 2
  ENSP ID: ENSP00000478648
MTPIVTVLICLGLSLGPRTHVQTGTIPKPTLWAEPDSVITQGSPVTLSCQGSLEAQEYRLYREKKSASWITRIRPELVKNGQFHIPSITWEHTGRYGCQYYSRARWSELSDPLVLVMTGAYPKPTLSAQPSPVVTSGGRVTLQCESQVAFGGFILCKEGEDEHPQCLNSQPHARGSSRAIFSVGPVSPNRRWSHRCYGYDLNSPYVWSSPSDLLELLVPGVSKKPSLSVQPGPVVAPGESLTLQCVSDVGYDRFVLYKEGERDLRQLPGRQPQAGLSQANFTLGPVSRSYGGQYRCYGAYNLSSEWSAPSDPLDILITGQIHGTPFISVQPGPTVASGENVTLLCQSWRQFHTFLLTKAGAADAPLRLRSIHEYPKYQAEFPMSPVTSAHAGTYRCYGSLNSDPYLLSHPSEPLELVVSGPSMGSSPPPTGPISTPGPEDQPLTPTGSDPQSGLGRHLGVVIGILVAVVLLLLLLLLLFLILRHRRQGKHWTSTQRKADFQHPAGAVGPEPTDRGLQWRSSPAADAQEENLYAAVKDTQPEDGVEMDTRAAASEAPQDVTYAQLHSLTLRRKATEPPPSQEGEPPAEPSIYATLAIH

SEQ ID NO: 46192 - protein, 210 aa, Homo sapiens; identical to SEQ ID NO: 46187
  Payload ID: 9417
  Gene Symbol: LILRB2
  Gene Name: leukocyte immunoglobulin-like receptor, subfamily B (with TM and ITIM domains), member 2
  ENSP ID: ENSP00000480022
  MOD_RES (1)..(1): Any amino acid

SEQ ID NO: 46193 - protein, 37 aa, Homo sapiens
  Payload ID: 9417
  Gene Symbol: LILRB2
  Gene Name: leukocyte immunoglobulin-like receptor, subfamily B (with TM and ITIM domains), member 2
  ENSP ID: ENSP00000480126
MTPIVTVLICLGLSLGPRTHVQTGTIPKPTLWAEPDS

SEQ ID NO: 46194 - protein, 598 aa, Homo sapiens
  Payload ID: 9417
  Gene Symbol: LILRB2
  Gene Name: leukocyte immunoglobulin-like receptor, subfamily B (with TM and ITIM domains), member 2
  Uniprot ID: Q8N423
  ENSP ID: ENSP00000480302
MTPIVTVLICLGLSLGPRTHVQTGTIPKPTLWAEPDSVITQGSPVTLSCQGSLEAQEYRLYREKKSASWITRIRPELVKNGQFHIPSITWEHTGRYGCQYYSRARWSELSDPLVLVMTGAYPKPTLSAQPSPVVTSGGRVTLQCESQVAFGGFILCKEGEDEHPQCLNSQPHARGSSRAIFSVGPVSPNRRWSHRCYGYDLNSPYVWSSPSDLLELLVPGVSKKPSLSVQPGPVVAPGESLTLQCVSDVGYDRFVLYKEGERDLRQLPGRQPQAGLSQANFTLGPVSRSYGGQYRCYGAYNLSSEWSAPSDPLDILITGQIHGTPFISVQPGPTVASGENVTLLCQSWRQFHTFLLTKAGAADAPLRLRSIHEYPKYQAEFPMSPVTSAHAGTYRCYGSLNSDPYLLSHPSEPLELVVSGPSMGSSPPPTGPISTPAGPEDQPLTPTGSDPQSGLGRHLGVVIGILVAVVLLLLLLLLLFLILRHRRQGKHWTSTQRKADFQHPAGAVGPEPTDRGLQWRSSPAADAQEENLYAAVKDTQPEDGVEMDTRAAASEAPQDVTYAQLHSLTLRRKATEPPPSQEGEPPAEPSIYATLAIH

SEQ ID NO: 46195 - protein, 602 aa, Homo sapiens
  Payload ID: 9417
  Gene Symbol: LILRB2
  Gene Name: leukocyte immunoglobulin-like receptor, subfamily B (with TM and ITIM domains), member 2
  ENSP ID: ENSP00000480587
MHRGLIHPQSRAVGGDAMTPIVTVLICLGTIPKPTLWAEPDSVITQGSPVTLSCQGSLEAQEYRLYREKKSASWITRIRPELVKNGQFHIPSITWEHTGRYGCQYYSRARWSELSDPLVLVMTGAYPKPTLSAQPSPVVTSGGRVTLQCESQVAFGGFILCKEGEEEHPQCLNSQPHARGSSRAIFSVGPVSPNRRWSHRCYGYDLNSPYVWSSPSDLLELLVPGVSKKPSLSVQPGPVVAPGESLTLQCVSDVGYDRFVLYKEGERDLRQLPGRQPQAGLSQANFTLGPVSRSYGGQYRCYGAHNLSSECSAPSDPLDILITGQIRGTPFISVQPGPTVASGENVTLLCQSWRQFHTFLLTKAGAADAPLRLRSIHEYPKYQAEFPMSPVTSAHAGTYRCYGSLNSDPYLLSHPSEPLELVVSGPSMGSSPPPTGPISTPGPEDQPLTPTGSDPQSGLGRHLGVVIGILVAVVLLLLLLLLLFLILRHRRQGKHWTSTQRKADFQHPAGAVGPEPTDRGLQWRSSPAADAQEENLYAAVKDTQPEDGVEMDTRAAASEAPQDVTYAQLHSLTLRRKATEPPPSQEREPPAEPSIYATLAIH

SEQ ID NO: 46196 - protein, 482 aa, Homo sapiens
  Payload ID: 9417
  Gene Symbol: LILRB2
  Gene Name: leukocyte immunoglobulin-like receptor, subfamily B (with TM and ITIM domains), member 2
  Uniprot ID: Q8N423
  ENSP ID: ENSP00000480841
MTGAYPKPTLSAQPSPVVTSGGRVTLQCESQVAFGGFILCKEGEEEHPQCLNSQPHARGSSRAIFSVGPVSPNRRWSHRCYGYDLNSPYVWSSPSDLLELLVPGVSKKPSLSVQPGPVVAPGESLTLQCVSDVGYDRFVLYKEGERDLRQLPGRQPQAGLSQANFTLGPVSRSYGGQYRCYGAHNLSSECSAPSDPLDILITGQIRGTPFISVQPGPTVASGENVTLLCQSWRQFHTFLLTKAGAADAPLRLRSIHEYPKYQAEFPMSPVTSAHAGTYRCYGSLNSDPYLLSHPSEPLELVVSGPSMGSSPPPTGPISTPAGPEDQPLTPTGSDPQSGLGRHLGVVIGILVAVVLLLLLLLLLFLILRHRRQGKHWTSTQRKADFQHPAGAVGPEPTDRGLQWRSSPAADAQEENLYAAVKDTQPEDGVEMDTRAAASEAPQDVTYAQLHSLTLRRKATEPPPSQEREPPAEPSIYATLAIH

SEQ ID NO: 46197 - protein, 598 aa, Homo sapiens
  Payload ID: 9417
  Gene Symbol: LILRB2
  Gene Name: leukocyte immunoglobulin-like receptor, subfamily B (with TM and ITIM domains), member 2
  Uniprot ID: Q8N423
  ENSP ID: ENSP00000481208
MTPIVTVLICLGLSLGPRTHVQTGTIPKPTLWAEPDSVITQGSPVTLSCQGSLEAQEYRLYREKKSASWITRIRPELVKNGQFHIPSITWEHTGRYGCQYYSRARWSELSDPLVLVMTGAYPKPTLSAQPSPVVTSGGRVTLQCESQVAFGGFILCKEGEEEHPQCLNSQPHARGSSRAIFSVGPVSPNRRWSHRCYGYDLNSPYVWSSPSDLLELLVPGVSKKPSLSVQPGPVVAPGESLTLQCVSDVGYDRFVLYKEGERDLRQLPGRQPQAGLSQANFTLGPVSRSYGGQYRCYGAHNLSSECSAPSDPLDILITGQIRGTPFISVQPGPTVASGENVTLLCQSWRQFHTFLLTKAGAADAPLRLRSIHEYPKYQAEFPMSPVTSAHAGTYRCYGSLNSDPYLLSHPSEPLELVVSGPSMGSSPPPTGPISTPAGPEDQPLTPTGSDPQSGLGRHLGVVIGILVAVVLLLLLLLLLFLILRHRRQGKHWTSTQRKADFQHPAGAVGPEPTDRGLQWRSSPAADAQEENLYAAVKDTQPEDGVEMDTRAAASEAPQDVTYAQLHSLTLRRKATEPPPSQEREPPAEPSIYATLAIH

SEQ ID NO: 46198 - protein, 498 aa, Homo sapiens
  Payload ID: 9417
  Gene Symbol: LILRB2
  Gene Name: leukocyte immunoglobulin-like receptor, subfamily B (with TM and ITIM domains), member 2
  ENSP ID: ENSP00000481228
MTPIVTVLICLGTIPKPTLWAEPDSVITQGSPVTLSCQGSLEAQEYRLYREKKSASWITRIRPELVKNGQFHIPSITWEHTGRYGCQYYSRARWSELSDPLVLVMTGAYPKPTLSAQPSPVVTSGGRVTLQCESQVAFGGFILCKEGEEEHPQCLNSQPHARGSSRAIFSVGPVSPNRRWSHRCYGYDLNSPYVWSSPSDLLELLVPGVSKKPSLSVQPGPVVAPGESLTLQCVSDVGYDRFVLYKEGERDLRQLPGRQPQAGLSQANFTLGPVSRSYGGQYRCYGAHNLSSECSAPSDPLDILITGQIRGTPFISVQPGPTVASGENVTLLCQSWRQFHTFLLTKAGAADAPLRLRSIHEYPKYQAEFPMSPVTSAHAGTYRCYGSLNSDPYLLSHPSEPLELVVSGPSMGSSPPPTGPISTPAGPEDQPLTPTGSDPQSGLGRHLGVVIGILVAVVLLLLLLLLLFLILRHRRQGKHWTSSPAQLPTPRKKTSMLP

SEQ ID NO: 46199 - protein, 510 aa, Homo sapiens
  Payload ID: 9417
  Gene Symbol: LILRB2
  Gene Name: leukocyte immunoglobulin-like receptor, subfamily B (with TM and ITIM domains), member 2
  ENSP ID: ENSP00000481364
MTPIVTVLICLGLSLGPRTHVQTGTIPKPTLWAEPDSVITQGSPVTLSCQGSLEAQEYRLYREKKSASWITRIRPELVKNGQFHIPSITWEHTGRYGCQYYSRARWSELSDPLVLVMTGAYPKPTLSAQPSPVVTSGGRVTLQCESQVAFGGFILCKEGEDEHPQCLNSQPHARGSSRAIFSVGPVSPNRRWSHRCYGYDLNSPYVWSSPSDLLELLVPGVSKKPSLSVQPGPVVAPGESLTLQCVSDVGYDRFVLYKEGERDLRQLPGRQPQAGLSQANFTLGPVSRSYGGQYRCYGAYNLSSEWSAPSDPLDILITGQIHGTPFISVQPGPTVASGENVTLLCQSWRQFHTFLLTKAGAADAPLRLRSIHEYPKYQAEFPMSPVTSAHAGTYRCYGSLNSDPYLLSHPSEPLELVVSGPSMGSSPPPTGPISTPAGPEDQPLTPTGSDPQSGLGRHLGVVIGILVAVVLLLLLLLLLFLILRHRRQGKHWTSSPAQLPTPRKKTSMLP

SEQ ID NO: 46200 - protein, 510 aa, Homo sapiens; identical to SEQ ID NO: 46199
  Payload ID: 9417
  Gene Symbol: LILRB2
  Gene Name: leukocyte immunoglobulin-like receptor, subfamily B (with TM and ITIM domains), member 2
  ENSP ID: ENSP00000481826

SEQ ID NO: 46201 - protein, 597 aa, Homo sapiens; identical to SEQ ID NO: 46191
  Payload ID: 9417
  Gene Symbol: LILRB2
  Gene Name: leukocyte immunoglobulin-like receptor, subfamily B (with TM and ITIM domains), member 2
  ENSP ID: ENSP00000481897

SEQ ID NO: 46202 - protein, 585 aa, Homo sapiens
  Payload ID: 9417
  Gene Symbol: LILRB2
  Gene Name: leukocyte immunoglobulin-like receptor, subfamily B (with TM and ITIM domains), member 2
  ENSP ID: ENSP00000482086
MTPIVTVLICLGTIPKPTLWAEPDSVITQGSPVTLSCQGSLEAQEYRLYREKKSASWITRIRPELVKNGQFHIPSITWEHTGRYGCQYYSRARWSELSDPLVLVMTGAYPKPTLSAQPSPVVTSGGRVTLQCESQVAFGGFILCKEGEEEHPQCLNSQPHARGSSRAIFSVGPVSPNRRWSHRCYGYDLNSPYVWSSPSDLLELLVPGVSKKPSLSVQPGPVVAPGESLTLQCVSDVGYDRFVLYKEGERDLRQLPGRQPQAGLSQANFTLGPVSRSYGGQYRCYGAHNLSSECSAPSDPLDILITGQIRGTPFISVQPGPTVASGENVTLLCQSWRQFHTFLLTKAGAADAPLRLRSIHEYPKYQAEFPMSPVTSAHAGTYRCYGSLNSDPYLLSHPSEPLELVVSGPSMGSSPPPTGPISTPGPEDQPLTPTGSDPQSGLGRHLGVVIGILVAVVLLLLLLLLLFLILRHRRQGKHWTSTQRKADFQHPAGAVGPEPTDRGLQWRSSPAADAQEENLYAAVKDTQPEDGVEMDTRAAASEAPQDVTYAQLHSLTLRRKATEPPPSQEREPPAEPSIYATLAIH

SEQ ID NO: 46203 - protein, 218 aa, Homo sapiens; identical to SEQ ID NO: 46190
  Payload ID: 9417
  Gene Symbol: LILRB2
  Gene Name: leukocyte immunoglobulin-like receptor, subfamily B (with TM and ITIM domains), member 2
  ENSP ID: ENSP00000482113

SEQ ID NO: 46204 - protein, 597 aa, Homo sapiens
  Payload ID: 9417
  Gene Symbol: LILRB2
  Gene Name: leukocyte immunoglobulin-like receptor, subfamily B (with TM and ITIM domains), member 2
  Uniprot ID: Q8N423
  ENSP ID: ENSP00000482933
MTPIVTVLICLGLSLGPRTHVQTGTIPKPTLWAEPDSVITQGSPVTLSCQGSLEAQEYRLYREKKSASWITRIRPELVKNGQFHIPSITWEHTGRYGCQYYSRARWSELSDPLVLVMTGAYPKPTLSAQPSPVVTSGGRVTLQCESQVAFGGFILCKEGEDEHPQCLNSQPHARGSSRAIFSVGPVSPNRRWSHRCYGYDLNSPYVWSSPSDLLELLVPGVSKKPSLSVQPGPVVAPGESLTLQCVSDVGYDRFVLYKEGERDLRQLPGRQPQAGLSQANFTLGPVSRSYGGQYRCYGAYNLSSEWSAPSDPLDILITGQIHGTPFISVQPGPTVASGENVTLLCQSWRQFHTFLLTKAGAADAPLRLRSIHEYPKYQAEFPMSPVTSAHAGTYRCYGSLNSDPYLLSHPSEPLELVVSGPSMGSSPPPTGPISTPGPEDQPLTPTGSDPQSGLGRHLGVVIGILVAVVLLLLLLLLLFLILRHRRQGKHWTSTQRKADFQHPAGAVGPEPTDRGLQWRSSPAADAQEENLYAAVKDTQPEDGVEMDTRAAASEAPQDVTYAQLHSLTLRRKATEPPPSQEREPPAEPSIYATLAIH

SEQ ID NO: 46205 - protein, 597 aa, Homo sapiens
  Payload ID: 9417
  Gene Symbol: LILRB2
  Gene Name: leukocyte immunoglobulin-like receptor, subfamily B (with TM and ITIM domains), member 2
  Uniprot ID: Q8N423
  ENSP ID: ENSP00000483014
MTPIVTVLICLGLSLGPRTHVQTGTIPKPTLWAEPDSVITQGSPVTLSCQGSLEAQEYRLYREKKSASWITRIRPELVKNGQFHIPSITWEHTGRYGCQYYSRARWSELSDPLVLVMTGAYPKPTLSAQPSPVVTSGGRVTLQCESQVAFGGFILCKEGEEEHPQCLNSQPHARGSSRAIFSVGPVSPNRRWSHRCYGYDLNSPYVWSSPSDLLELLVPGVSKKPSLSVQPGPVVAPGESLTLQCVSDVGYDRFVLYKEGERDLRQLPGRQPQAGLSQANFTLGPVSRSYGGQYRCYGAHNLSSECSAPSDPLDILITGQIRGTPFISVQPGPTVASGENVTLLCQSWRQFHTFLLTKAGAADAPLRLRSIHEYPKYQAEFPMSPVTSAHAGTYRCYGSLNSDPYLLSHPSEPLELVVSGPSMGSSPPPTGPISTPGPEDQPLTPTGSDPQSGLGRHLGVVIGILVAVVLLLLLLLLLFLILRHRRQGKHWTSTQRKADFQHPAGAVGPEPTDRGLQWRSSPAADAQEENLYAAVKDTQPEDGVEMDTRAAASEAPQDVTYAQLHSLTLRRKATEPPPSQEREPPAEPSIYATLAIH

SEQ ID NO: 46206 - protein, 510 aa, Homo sapiens
  Payload ID: 9417
  Gene Symbol: LILRB2
  Gene Name: leukocyte immunoglobulin-like receptor, subfamily B (with TM and ITIM domains), member 2
  Uniprot ID: Q8N423
  ENSP ID: ENSP00000483478
MTPIVTVLICLGLSLGPRTHVQTGTIPKPTLWAEPDSVITQGSPVTLSCQGSLEAQEYRLYREKKSASWITRIRPELVKNGQFHIPSITWEHTGRYGCQYYSRARWSELSDPLVLVMTGAYPKPTLSAQPSPVVTSGGRVTLQCESQVAFGGFILCKEGEEEHPQCLNSQPHARGSSRAIFSVGPVSPNRRWSHRCYGYDLNSPYVWSSPSDLLELLVPGVSKKPSLSVQPGPVVAPGESLTLQCVSDVGYDRFVLYKEGERDLRQLPGRQPQAGLSQANFTLGPVSRSYGGQYRCYGAHNLSSECSAPSDPLDILITGQIRGTPFISVQPGPTVASGENVTLLCQSWRQFHTFLLTKAGAADAPLRLRSIHEYPKYQAEFPMSPVTSAHAGTYRCYGSLNSDPYLLSHPSEPLELVVSGPSMGSSPPPTGPISTPAGPEDQPLTPTGSDPQSGLGRHLGVVIGILVAVVLLLLLLLLLFLILRHRRQGKHWTSSPAQLPTPRKKTSMLP

SEQ ID NO: 46207 - protein, 598 aa, Homo sapiens
  Payload ID: 9417
  Gene Symbol: LILRB2
  Gene Name: leukocyte immunoglobulin-like receptor, subfamily B (with TM and ITIM domains), member 2
  Uniprot ID: Q8N423
  ENSP ID: ENSP00000483553
MTPIVTVLICLGLSLGPRTHVQTGTIPKPTLWAEPDSVITQGSPVTLSCQGSLEAQEYRLYREKKSASWITRIRPELVKNGQFHIPSITWEHTGRYGCQYYSRARWSELSDPLVLVMTGAYPKPTLSAQPSPVVTSGGRVTLQCESQVAFGGFILCKEGEDEHPQCLNSQPHARGSSRAIFSVGPVSPNRRWSHRCYGYDLNSPYVWSSPSDLLELLVPGVSKKPSLSVQPGPVVAPGESLTLQCVSDVGYDRFVLYKEGERDLRQLPGRQPQAGLSQANFTLGPVSRSYGGQYRCYGAYNLSSEWSAPSDPLDILITGQIHGTPFISVQPGPTVASGENVTLLCQSWRQFHTFLLTKAGAADAPLRLRSIHEYPKYQAEFPMSPVTSAHAGTYRCYGSLNSDPYLLSHPSEPLELVVSGPSMGSSPPPTGPISTPAGPEDQPLTPTGSDPQSGLGRHLGVVIGILVAVVLLLLLLLLLFLILRHRRQGKHWTSTQRKADFQHPAGAVGPEPTDRGLQWRSSPAADAQEENLYAAVKDTQPEDGVEMDTRAAASEAPQDVTYAQLHSLTLRRKATEPPPSQEREPPAEPSIYATLAIH

SEQ ID NO: 46208 - protein, 603 aa, Homo sapiens
  Payload ID: 9417
  Gene Symbol: LILRB2
  Gene Name: leukocyte immunoglobulin-like receptor, subfamily B (with TM and ITIM domains), member 2
  ENSP ID: ENSP00000483646
MHRGLIHPQSRAVGGDAMTPIVTVLICLGTIPKPTLWAEPDSVITQGSPVTLSCQGSLEAQEYRLYREKKSASWITRIRPELVKNGQFHIPSITWEHTGRYGCQYYSRARWSELSDPLVLVMTGAYPKPTLSAQPSPVVTSGGRVTLQCESQVAFGGFILCKEGEEEHPQCLNSQPHARGSSRAIFSVGPVSPNRRWSHRCYGYDLNSPYVWSSPSDLLELLVPGVSKKPSLSVQPGPVVAPGESLTLQCVSDVGYDRFVLYKEGERDLRQLPGRQPQAGLSQANFTLGPVSRSYGGQYRCYGAHNLSSECSAPSDPLDILITGQIRGTPFISVQPGPTVASGENVTLLCQSWRQFHTFLLTKAGAADAPLRLRSIHEYPKYQAEFPMSPVTSAHAGTYRCYGSLNSDPYLLSHPSEPLELVVSGPSMGSSPPPTGPISTPAGPEDQPLTPTGSDPQSGLGRHLGVVIGILVAVVLLLLLLLLLFLILRHRRQGKHWTSTQRKADFQHPAGAVGPEPTDRGLQWRSSPAADAQEENLYAAVKDTQPEDGVEMDTRAAASEAPQDVTYAQLHSLTLRRKATEPPPSQEREPPAEPSIYATLAIH

SEQ ID NO: 46209 - protein, 455 aa, Homo sapiens
  Payload ID: 9417
  Gene Symbol: LILRB2
  Gene Name: leukocyte immunoglobulin-like receptor, subfamily B (with TM and ITIM domains), member 2
  ENSP ID: ENSP00000484266
MTPIVTVLICLGTIPKPTLWAEPDSVITQGSPVTLSCQGSLEAQEYRLYREKKSASWITRIRPELVKNGQFHIPSITWEHTGRYGCQYYSRARWSELSDPLVLVMTGAYPKPTLSAQPSPVVTSGGRVTLQCESQVAFGGFILCKEGEDEHPQCLNSQPHARGSSRAIFSVGPVSPNRRWSHRCYGYDLNSPYVWSSPSDLLELLVPGVSKKPSLSVQPGPVMAPGESLTLQCVSDVGYDRFVLYKEGERDFLQRPGQQPQAGLSQANFTLGPVSPSHGGQYRCYGAHNLSSEWSAPSDPLNILMAGQIYDTVSLSAQPGPTVASGENVTLLCQSWWQFDTFLLTKEGAAHPPLRLRSMYGAHKYQAEFPMSPVTSAHAGTYRCYGSYSSNPHLLSFPSEPLELMVSASPASHAKDYTVENLIRMGMAGLVLVFLGILLFEAQHSQRNPQDAAGR

SEQ ID NO: 46210 - protein, 597 aa, Homo sapiens; identical to SEQ ID NO: 46204
  Payload ID: 9417
  Gene Symbol: LILRB2
  Gene Name: leukocyte immunoglobulin-like receptor, subfamily B (with TM and ITIM domains), member 2
  Uniprot ID: Q8N423
  ENSP ID: ENSP00000484373

SEQ ID NO: 46211 - protein, 54 aa, Homo sapiens
  Payload ID: 9417
  Gene Symbol: LILRB2
  Gene Name: leukocyte immunoglobulin-like receptor, subfamily B (with TM and ITIM domains), member 2
  ENSP ID: ENSP00000484944
MHRGLIHPQSRAVGGDAMTPIVTVLICLGLSLGPRTHVQTGTIPKPTLWAEPDS

SEQ ID NO: 46212 - protein, 632 aa, Homo sapiens
  Payload ID: 9418
  Gene Symbol: LILRB3
  Gene Name: leukocyte immunoglobulin-like receptor, subfamily B (with TM and ITIM domains), member 3
  Uniprot ID: O75022
  ENSP ID: ENSP00000245620
MTPALTALLCLGLSLGPRTRMQAGPFPKPTLWAEPGSVISWGSPVTIWCQGSLEAQEYQLDKEGSPEPWDRNNPLEPKNKARFSIPSMTQHHAGRYRCHYYSSAGWSEPSDPLELVMTGFYNKPTLSALPSPVVASGGNMTLRCGSQKGYHHFVLMKEGEHQLPRTLDSQQLHSGGFQALFPVGPVTPSHRWRFTCYYYYTNTPWVWSHPSDPLEILPSGVSRKPSLLTLQGPVLAPGQSLTLQCGSDVGYDRFVLYKEGERDFLQRPGQQPQAGLSQANFTLGPVSRSYGGQYRCYGAHNLSSEWSAPSDPLDILITGQIYDTVSLSAQPGPTVASGENMTLLCQSRGYFDTFLLTKEGAAHPPLRLRSMYGAHKYQAEFPMSPVTSAHAGTYRCYGSRSSNPHLLSFPSEPLELMVSGHSGGSSLPPTGPPSTPGLGRYLEVLIGVSVAFVLLLFLLLFLLLLRQRHSKHRTSDQRKTDFQRPAGAAETEPKDRGLLRRSSPAADVQEENLYAAVKDTQSEDRVELDSQQSPHDEDPQAVTYAPVKHSSPRREMASPPSSLSGEFLDTKDRQVEEDRQMDTEAAASEASQDVTYAQLHSLTLRRKATEPPPSQEGEPPAEPSIYATLAIH

SEQ ID NO: 46213 - protein, 643 aa, Homo sapiens
  Payload ID: 9418
  Gene Symbol: LILRB3
  Gene Name: leukocyte immunoglobulin-like receptor, subfamily B (with TM and ITIM domains), member 3
  ENSP ID: ENSP00000345184
MTPALTALLCLGLSLGPRTRMQAGPFPKPTLWAEPGSVISWGSPVTIWCQGSLEAQEYQLDKEGSPEPWDRNNPLEPKNKARFSIPSMTQHHAGRYRCHYYSSAGWSEPSDPLELVMTGFYNKPTLSALPSPVVASGGNMTLRCGSQKGYHHFVLMKEGEHQLPRTLDSQQLHSGGFQALFPVGPVTPSHRWRFTCYYYYTNTPWVWSHPSDPLEILPSGVSRKPSLLTLQGPVLAPGQSLTLQCGSDVGYDRFVLYKEGERDFLQRPGQQPQAGLSQANFTLGPVSRSYGGQYRCYGAHNLSSEWSAPSDPLDILITGQIYDTVSLSAQPGPTVASGENMTLLCQSRGYFDTFLLTKEGAAHPPLRLRSMYGAHKYQAEFPMSPVTSAHAGTYRCYGSRSSNPHLLSFPSEPLELMVSGPEDQPLNPPGSGPQNAPGLGSGAGTRAAGLGRYLEVLIGVSVAFVLLLFLLLFLLLLRQRHSKHRTSDQRKTDFQRPAGAAETEPKDRGLLRRSSPAADVQEENLYAAVKDTQSEDRVELDSQSPHDEDPQAVTYAPVKHSSPRREMASPPSSLSGEFLDTKDRQVEEDRQMDTEAAASEASQDVTYAQLHSLTLRRKATEPPPSQEGEPPAEPSIYATLAIH

SEQ ID NO: 46214 - protein, 631 aa, Homo sapiens
  Payload ID: 9418
  Gene Symbol: LILRB3
  Gene Name: leukocyte immunoglobulin-like receptor, subfamily B (with TM and ITIM domains), member 3
  Uniprot ID: O75022
  ENSP ID: ENSP00000375630
MTPALTALLCLGLSLGPRTRMQAGPFPKPTLWAEPGSVISWGSPVTIWCQGSLEAQEYQLDKEGSPEPWDRNNPLEPKNKARFSIPSMTQHHAGRYRCHYYSSAGWSEPSDPLELVMTGFYNKPTLSALPSPVVASGGNMTLRCGSQKGYHHFVLMKEGEHQLPRTLDSQQLHSGGFQALFPVGPVTPSHRWRFTCYYYYTNTPWVWSHPSDPLEILPSGVSRKPSLLTLQGPVLAPGQSLTLQCGSDVGYDRFVLYKEGERDFLQRPGQQPQAGLSQANFTLGPVSRSYGGQYRCYGAHNLSSEWSAPSDPLDILITGQIYDTVSLSAQPGPTVASGENMTLLCQSRGYFDTFLLTKEGAAHPPLRLRSMYGAHKYQAEFPMSPVTSAHAGTYRCYGSRSSNPHLLSFPSEPLELMVSGHSGGSSLPPTGPPSTPGLGRYLEVLIGVSVAFVLLLFLLLFLLLLRQRHSKHRTSDQRKTDFQRPAGAAETEPKDRGLLRRSSPAADVQEENLYAAVKDTQSEDRVELDSQSPHDEDPQAVTYAPVKHSSPRREMASPPSSLSGEFLDTKDRQVEEDRQMDTEAAASEASQDVTYAQLHSLTLRRKATEPPPSQEGEPPAEPSIYATLAIH

SEQ ID NO: 46215 - protein, 158 aa, Homo sapiens
  Payload ID: 9418
  Gene Symbol: LILRB3
  Gene Name: leukocyte immunoglobulin-like receptor, subfamily B (with TM and ITIM domains), member 3
  ENSP ID: ENSP00000388199
MTPALTALLCLGLSLGPRTRMQAGPFPKPTLWAEPGSVISWGSPVTIWCQGSLEAQEYQLDKEGSPEPWDRNNPLEPKNKARFSIPSMTQHHAGRYRCHYYSSAGWSEPSDPLELVMTGFYNKPTLSALPSPVVASGGNMTLRCGSQKGYHHFVLMKE

SEQ ID NO: 46216 - protein, 191 aa, Homo sapiens
  Payload ID: 9418
  Gene Symbol: LILRB3
  Gene Name: leukocyte immunoglobulin-like receptor, subfamily B (with TM and ITIM domains), member 3
  ENSP ID: ENSP00000416920
MTPALTALLCLGLSLGPRTRMQAGPFPKPTLWAEPGSVISWGSPVTIWCQGSLEAQEYQLDKEGSPEPWDRNNPLEPKNKARFSIPSMTQHHAGRYRCHYYSSAGWSEPSDPLELVMTGFYNKPTLSALPSPVVASGGNMTLRCGSQKGYHHFVLMKEGEHQLPRTLDSQQLHSGGFQALFPVGPVTPSHS

SEQ ID NO: 46217 - protein, 631 aa, Homo sapiens
  Payload ID: 9418
  Gene Symbol: LILRB3
  Gene Name: leukocyte immunoglobulin-like receptor, subfamily B (with TM and ITIM domains), member 3
  ENSP ID: ENSP00000477806
MTPALTALLCLGLSLGPRTRVQAGPFPKPTLWAEPGSVISWGSPVTIWCQGSLEAQEYQLDKEGSPEPLDRNNPLEPKNKARFSIPSMTQHHAGRYRCHYYSSAGWSEPSDPLELVMTGFYNKPTLSALPSPVVASGGNMTLRCGSQKGYHHFVLMKEGEHQLPRTLDSQQLHSGGFQALFPVGPVTPSHRWRFTCYYYYTNTPRVWSHPSDPLEILPSGVSRKPSLLTLQGPVLAPGQSLTLQCGSDVGYDRFVLYKEGERDFLQRPGQQPQAGLSQANFTLGPVSPSHGGQYRCYGAHNLSSEWSAPSDPLNILMAGQIYDTVSLSAQPGPTVASGENVTLLCQSWWQFDTFLLTKEGAAHPPLRLRSMYGAHKYQAEFPMSPVTSAHAGTYRCYGSYSSNPHLLSHPSEPLELVVSGHSGGSSLPPTGPPSTPGLGRYLEVLIGVSVAFVLLLFLLLFLLLRRQRHSKHRTSDQRKTDFQRPAGAAETEPKDRGLLRRSSPAADVQEENLYAAVKDTQSEDRVELDSQSPHDEDPQAVTYAPVKHSSPRREMASPPSSLSGEFLDTKDRQVEEDRQMDTEAAASEASQDVTYAQLHSLTLRRKATEPPPSQEGEPPAEPSIYATLAIH

SEQ ID NO: 46218 - protein, 631 aa, Homo sapiens
  Payload ID: 9418
  Gene Symbol: LILRB3
  Gene Name: leukocyte immunoglobulin-like receptor, subfamily B (with TM and ITIM domains), member 3
  ENSP ID: ENSP00000477915
MTPALTALLCLGLSLGPRTRMQAGPFPKPTLWAEPGSVISWGSPVTIWCQGSLEAQEYQLDKEGSPEPWDRNNPLEPKNKARFSIPSMTQHHAGRYRCHYYSSAGWSEPSDPLELVMTGFYNKPTLSALPSPVVASGGNMTLRCGSQKGYHHFVLMKEGEHQLPRTLDSQQLHSGGFQALFPVGPVTPSHRWRFTCYYYYTNTPWVWSHPSDPLEILPSGVSRKPSLLTLQGPVLAPGQSLTLQCGSDVGYDRFVLYKEGERDFLQRPGQQPQAGLSQANFTLGPVSRSYGGQYRCYGAHNLSSEWSAPSDPLDILITGQIYDTVSLSAQPGPTVASGENVTLLCQSRGYFDTFLLTKEGAAHPPLRLRSMYGAHKYQAEFPMSPVTSAHAGTYRCYGSRSSNPHLLSFPSEPLELMVSGHSGGSSLPPTGPPSTPGLGRYLEVLIGVSVAFVLLLFLLLFLLLRRQRHSKHRTSDQRKTDFQRPAGAAETEPKDRGLLRRSSPAADVQEENLYAAVKDTQSEDRVELDSQSPHDEDPQAVTYAPVKHSSPRREMASPPSSLSGEFLDTKDRQVEEDRQMDTEAAASEASQDVTYAQLHSLTLRRKATEPPPSQEGEPPAEPSIYATLAIH

SEQ ID NO: 46219 - protein, 191 aa, Homo sapiens
  Payload ID: 9418
  Gene Symbol: LILRB3
  Gene Name: leukocyte immunoglobulin-like receptor, subfamily B (with TM and ITIM domains), member 3
  ENSP ID: ENSP00000477956
MTPALTALLCLGLSLGPRTRVQAGPFPKPTLWAEPGSVISWGSPVTIWCQGSQEAQEYRLHKEGSPEPLDRNNPLEPKNKARFSIPSMTEHHAGRYRCHYYSSAGWSEPSDPLEMVMTGAYSKPTLSALPSPVVASGGNMTLRCGSQKGYHHFVLMKEGEHQLPRTLDSQQLHSRGFQALFPVGPVTPSHS

SEQ ID NO: 46220 - protein, 632 aa, Homo sapiens
  Payload ID: 9418
  Gene Symbol: LILRB3
  Gene Name: leukocyte immunoglobulin-like receptor, subfamily B (with TM and ITIM domains), member 3
  ENSP ID: ENSP00000478015
MTPALTALLCLGLSLGPRTRMQAGPFPKPTLWAEPGSVISWGSPVTIWCQGSLEAQEYQLDKEGSPEPWDRNNPLEPKNKARFSIPSMTQHHAGRYRCHYYSSAGWSEPSDPLELVMTGFYNKPTLSALPSPVVASGGNMTLRCGSQKGYHHFVLMKEGEHQLPRTLDSQQLHSGGFQALFPVGPVTPSHRWRFTCYYYYTNTPWVWSHPSDPLEILPSGVSRKPSLLTLQGPVLAPGQSLTLQCGSDVGYDRFVLYKEGERDFLQRPGQQPQAGLSQANFTLGPVSRSYGGQYRCYGAHNLSSEWSAPSDPLDILITGQIYDTVSLSAQPGPTVASGENVTLLCQSRGYFDTFLLTKEGAAHPPLRLRSMYGAHKYQAEFPMSPVTSAHAGTYRCYGSRSSNPHLLSFPSEPLELMVSGHSGGSSLPPTGPPSTPGLGRYLEVLIGVSVAFVLLLFLLLFLLLRRQRHSKHRTSDQRKTDFQRPAGAAETEPKDRGLLRRSSPAADVQEENLYAAVKDTQSEDRVELDSQQSPHDEDPQAVTYAPVKHSSPRREMASPPSSLSGEFLDTKDRQVEEDRQMDTEAAASEASQDVTYAQLHSLTLRRKATEPPPSQEGEPPAEPSIYATLAIH

SEQ ID NO: 46221 - protein, 632 aa, Homo sapiens
  Payload ID: 9418
  Gene Symbol: LILRB3
  Gene Name: leukocyte immunoglobulin-like receptor, subfamily B (with TM and ITIM domains), member 3
  ENSP ID: ENSP00000478538
MTPALTALLCLGLSLGPRTRVQAGPFPKPTLWAEPGSVISWGSPVTIWCQGSLEAQEYRLDKEGSPEPLDRNNPLEPKNKARFSIPSMTEHHAGRYRCHYYSSAGWSEPSDPLELVMTGFYNKPTLSALPSPVVASGGNMTLRCGSQKGYHHFVLMKEGEHQLPRTLDSQQLHSGGFQALFPVGPVNPSHRWRFTCYYYYMNTPQVWSHPSDPLEILPSGVSRKPSLLTLQGPVLAPGQSLTLQCGSDVGYDRFVLYKEGERDFLQRPGQQPQAGLSQANFTLGPVSPSHGGQYRCYGAHNLSSEWSAPSDPLNILMAGQIYDTVSLSAQPGPTVASGENVTLLCQSWWQFDTFLLTKEGAAHPPLRLRSMYGAHKYQAEFPMSPVTSAHAGTYRCYGSYSSNPHLLSFPSEPLELMVSGHSGGSSLPPTGPPSTPGLGRYLEVLIGVSVAFVLLLFLLLFLLLRRQRHSKHRTSDQRKTDFQRPAGAAETEPKDRGLLRRSSPAADVQEENLYAAVKDTQSEDRVELDSQQSPHDEDPQAVTYAPVKHSSPRREMASPPSSLSGEFLDTKDRQVEEDRQMDTEAAASEASQDVTYAQLHSLTLRRKATEPPPSQEGEPPAEPSIYATLAIH

SEQ ID NO: 46222 - protein, 632 aa, Homo sapiens
  Payload ID: 9418
  Gene Symbol: LILRB3
  Gene Name: leukocyte immunoglobulin-like receptor, subfamily B (with TM and ITIM domains), member 3
  ENSP ID: ENSP00000478560
MTPALTALLCLGLSLGPRTRVQAGPFPKPTLWAEPGSVISWGSPVTIWCQGSLEAQEYQLDKEGSPEPLDRNNPLEPKNKARFSIPSMTQHHAGRYRCHYYSSAGWSEPSDPLELVMTGFYNKPTLSALPSPVVASGGNMTLRCGSQKGYHHFVLMKEGEHQLPRTLDSQQLHSGGFQALFPVGPVTPSHRWRFTCYYYYTNTPQVWSHPSDPLEILPSGVSRKPSLLTLQGPVLAPGQSLTLQCGSDVGYDRFVLYKEGERDFLQRPGQQPQAGLSQANFTLGPVSPSHGGQYRCYGAHNLSSEWSAPSDPLNILMAGQIYDTVSLSAQPGPTVASGENVTLLCQSWWQFDTFLLTKEGAAHPPLRLRSMYGAHKYQAEFPMSPVTSAHAGTYRCYGSYSSNPHLLSFPSEPLELMVSGHSGGSSLPPTGPPSTPGLGRYLEVLIGVSVAFVLLLFLLLFLLLRRQRHSKHRTSDQRKTDFQRPAGAAETEPKDRGLLRRSSPAADVQEENLYAAVKDTQSEDRVELDSQQSPHDEDPQAVTYAPVKHSSPRREMASPPSSLSGEFLDTKDRQVEEDRQMDTEAAASEASQDVTYAQLHSLTLRRKATEPPPSQEGEPPAEPSIYATLAIH

SEQ ID NO: 46223 - protein, 648 aa, Homo sapiens
  Payload ID: 9418
  Gene Symbol: LILRB3
  Gene Name: leukocyte immunoglobulin-like receptor, subfamily B (with TM and ITIM domains), member 3
  ENSP ID: ENSP00000479159
MTPALTALLCLGLSLGPRTRVQAGPFPKPTLWAEPGSVISWGSPVTIWCQGSLEAQEYQLDKEGSPEPLDRNNPLEPKNKARFSIPSMTQHHAGRYRCHYYSSAGWSEPSDPLELVMTGFYNKPTLSALPSPVVASGGNMTLRCGSQKGYHHFVLMKEGEHQLPRTLDSQQLHSGGFQALFPVGPVNPSHRWRFTCYYYYMNTPQVWSHPSDPLEILPSGVSRKPSLLTLQGPVLAPGQSLTLQCGSDVGYDRFVLYKEGERDFLQRPGQQPQAGLSQANFTLGPVSPSHGGQYRCYGAHNLSSEWSAPSDPLNILMAGQIYDTVSLSAQPGPTVASGENVTLLCQSWWQFDTFLLTKEGAAHPPLRLRSMYGAHKYQAEFPMSPVTSAHAGTYRCYGSYSSNPHLLSFPSEPLELMVSGHSGGSSLPPTGPPSTPGGPEDQPLNPPGSGPQNGLGRYLEVLIGVSVAFVLLLFLLLFLLLRRQRHSKHRTSDQRKTDFQRPAGAAETEPKDRGLLRRSSPAADVQEENLYAAVKDTQSEDRVELDSQSPHDEDPQAVTYAPVKHSSPRREMASPPSSLSGEFLDTKDRQVEEDRQMDTEAAASEASQDVTYAQLHSLTLRRKATEPPPSQEGEPPAEPSIYATLAIH

SEQ ID NO: 46224 - protein, 631 aa, Homo sapiens
  Payload ID: 9418
  Gene Symbol: LILRB3
  Gene Name: leukocyte immunoglobulin-like receptor, subfamily B (with TM and ITIM domains), member 3
  Uniprot ID: O75022
  ENSP ID: ENSP00000479234
MTPALTALLCLGLSLGPRTRVQAGPFPKPTLWAEPGSVISWGSPVTIWCQGSLEAQEYRLDKEGSPEPLDRNNPLEPKNKARFSIPSMTEHHAGRYRCHYYSSAGWSEPSDPLELVMTGFYNKPTLSALPSPVVASGGNMTLRCGSQKGYHHFVLMKEGEHQLPRTLDSQQLHSGGFQALFPVGPVNPSHRWRFTCYYYYMNTPQVWSHPSDPLEILPSGVSRKPSLLTLQGPVLAPGQSLTLQCGSDVGYDRFVLYKEGERDFLQRPGQQPQAGLSQANFTLGPVSPSHGGQYRCYGAHNLSSEWSAPSDPLNILMAGQIYDTVSLSAQPGPTVASGENVTLLCQSWWQFDTFLLTKEGAAHPPLRLRSMYGAHKYQAEFPMSPVTSAHAGTYRCYGSYSSNPHLLSFPSEPLELMVSGHSGGSSLPPTGPPSTPGLGRYLEVLIGVSVAFVLLLFLLLFLLLRRQRHSKHRTSDQRKTDFQRPAGAAETEPKDRGLLRRSSPAADVQEENLYAAVKDTQSEDRVELDSQSPHDEDPQAVTYAPVKHSSPRREMASPPSSLSGEFLDTKDRQVEEDRQMDTEAAASEASQDVTYAQLHSLTLRRKATEPPPSQEGEPPAEPSIYATLAIH

SEQ ID NO: 46225 - protein, 648 aa, Homo sapiens
  Payload ID: 9418
  Gene Symbol: LILRB3
  Gene Name: leukocyte immunoglobulin-like receptor, subfamily B (with TM and ITIM domains), member 3
  ENSP ID: ENSP00000479532
MTPALTALLCLGLSLGPRTRVQAGPFPKPTLWAEPGSVISWGSPVTIWCQGSQEAQEYRLHKEGSPEPLDRNNPLEPKNKARFSIPSMTEHHAGRYRCHYYSSAGWSEPSDPLEMVMTGAYSKPTLSALPSPVVASGGNMTLRCGSQKGYHHFVLMKEGEHQLPRTLDSQQLHSRGFQALFPVGPVTPSHRWRFTCYYYYTNTPWVWSHPSDPLEILPSGVSRKPSLLTLQGPVLAPGQSLTLQCGSDVGYNRFVLYKEGERDFLQRPGQQPQAGLSQANFTLGPVSPSNGGQYRCYGAHNLSSEWSAPSDPLNILMAGQIYDTVSLSAQPGPTVASGENVTLLCQSWWQFDTFLLTKEGAAHPPLRLRSMYGAHKYQAEFPMSPVTSAHAGTYRCYGSYSSNPHLLSHPSEPLELVVSGHSGGSSLPPTGPPSTPGGPEDQPLNPPGSGPQNRLGRYLEVLIGVSVAFVLLLFLLLFLLLRRQRHSKHRTSDQRKTDFQRPAGAAETEPKDRGLLRRSSPAADVQEENLYAAVKDTQSEDRVELDSQSPHDEDPQAVTYAPVKHSSPRREMASPPSSLSGEFLDTKDRQVEEDRQMDTEAAASEASQDVTYAQLHSLTLRRKATEPPPSQEGEPPAEPSIYATLAIH

SEQ ID NO: 46226 - protein, 195 aa, Homo sapiens
  Payload ID: 9418
  Gene Symbol: LILRB3
  Gene Name: leukocyte immunoglobulin-like receptor, subfamily B (with TM and ITIM domains), member 3
  ENSP ID: ENSP00000480236
MTPALTALLCLGLSLGPRTRVQAGPFPKPTLWAEPGSVISWGSPVTIWCQGSLEAQEYQLDKEGSPEPWDRNNPLEPKNKARFSIPSMTQHHAGRYRCHYYSSAGWSEPSDPLELVMTGFYNKPTLSALPSPVVASGGNMTLRCGSQKGYHHFVLMKEGEHQLPRTLDSQQLHSGGFQALFPVGPVTPSHRWRRV

SEQ ID NO: 46227 - protein, 649 aa, Homo sapiens
  Payload ID: 9418
  Gene Symbol: LILRB3
  Gene Name: leukocyte immunoglobulin-like receptor, subfamily B (with TM and ITIM domains), member 3
  ENSP ID: ENSP00000480276
MTPALTALLCLGLSLGPRTRVQAGPFPKPTLWAEPGSVISWGSPVTIWCQGSLEAQEYRLDKEGSPEPLDRNNPLEPKNKARFSIPSMTEHHAGRYRCHYYSSAGWSEPSDPLELVMTGFYNKPTLSALPSPVVASGGNMTLRCGSQKGYHHFVLMKEGEHQLPRTLDSQQLHSGGFQALFPVGPVNPSHRWRFTCYYYYMNTPQVWSHPSDPLEILPSGVSRKPSLLTLQGPVLAPGQSLTLQCGSDVGYDRFVLYKEGERDFLQRPGQQPQAGLSQANFTLGPVSPSHGGQYRCYGAHNLSSEWSAPSDPLNILMAGQIYDTVSLSAQPGPTVASGENVTLLCQSWWQFDTFLLTKEGAAHPPLRLRSMYGAHKYQAEFPMSPVTSAHAGTYRCYGSYSSNPHLLSFPSEPLELMVSGHSGGSSLPPTGPPSTPGGPEDQPLNPPGSGPQNGLGRYLEVLIGVSVAFVLLLFLLLFLLLRRQRHSKHRTSDQRKTDFQRPAGAAETEPKDRGLLRRSSPAADVQEENLYAAVKDTQSEDRVELDSQQSPHDEDPQAVTYAPVKHSSPRREMASPPSSLSGEFLDTKDRQVEEDRQMDTEAAASEASQDVTYAQLHSLTLRRKATEPPPSQEGEPPAEPSIYATLAIH

SEQ ID NO: 46228 - protein, 489 aa, Homo sapiens
  Payload ID: 9418
  Gene Symbol: LILRB3
  Gene Name: leukocyte immunoglobulin-like receptor, subfamily B (with TM and ITIM domains), member 3
  ENSP ID: ENSP00000480356
MTPALTALLCLGLSLGPRTRMQAGPFPKPTLWAEPGSVISWGSPVTIWCQGSLEAQEYQLDKEGSPEPWDRNNPLEPKNKARFSIPSMTQHHAGRYRCHYYSSAGWSEPSDPLELVMTGFYNKPTLSALPSPVVASGGNMTLRCGSQKGYHHFVLMKEGEHQLPRTLDSQQLHSGGFQALFPVGPVTPSHRWRFTCYYYYTNTPWVWSHPSDPLEILPSGVSRKPSLLTLQGPVLAPGQSLTLQCGSDVGYDRFVLYKEGERDFLQRPGQQPQAGLSQANFTLGPVSRSYGGQYRCYGAHNLSSEWSAPSDPLDILITGQIYDTVSLSAQPGPTVASGENVTLLCQSRGYFDTFLLTKEGAAHPPLRLRSMYGAHKYQAEFPMSPVTSAHAGTYRCYGSRSSNPHLLSFPSEPLELMVSGHSGGSSLPPTGPPSTPGLGRYLEVLIGVSVAFVLLLFLLLFLLLRRQRHSKHRTSGLRLCPSSPRPEKD

SEQ ID NO: 46229 - protein, 648 aa, Homo sapiens
  Payload ID: 9418
  Gene Symbol: LILRB3
  Gene Name: leukocyte immunoglobulin-like receptor, subfamily B (with TM and ITIM domains), member 3
  ENSP ID: ENSP00000480761
MTPALTALLCLGLSLGPRTRMQAGPFPKPTLWAEPGSVISWGSPVTIWCQGSLEAQEYQLDKEGSPEPWDRNNPLEPKNKARFSIPSMTQHHAGRYRCHYYSSAGWSEPSDPLELVMTGFYNKPTLSALPSPVVASGGNMTLRCGSQKGYHHFVLMKEGEHQLPRTLDSQQLHSGGFQALFPVGPVTPSHRWRFTCYYYYTNTPWVWSHPSDPLEILPSGVSRKPSLLTLQGPVLAPGQSLTLQCGSDVGYDRFVLYKEGERDFLQRPGQQPQAGLSQANFTLGPVSRSYGGQYRCYGAHNLSSEWSAPSDPLDILITGQIYDTVSLSAQPGPTVASGENVTLLCQSRGYFDTFLLTKEGAAHPPLRLRSMYGAHKYQAEFPMSPVTSAHAGTYRCYGSRSSNPHLLSFPSEPLELMVSGHSGGSSLPPTGPPSTPGGPEDQPLNPPGSGPQNGLGRYLEVLIGVSVAFVLLLFLLLFLLLRRQRHSKHRTSDQRKTDFQRPAGAAETEPKDRGLLRRSSPAADVQEENLYAAVKDTQSEDRVELDSQSPHDEDPQAVTYAPVKHSSPRREMASPPSSLSGEFLDTKDRQVEEDRQMDTEAAASEASQDVTYAQLHSLTLRRKATEPPPSQEGEPPAEPSIYATLAIH

SEQ ID NO: 46230 - protein, 632 aa, Homo sapiens; identical to SEQ ID NO: 46220
  Payload ID: 9418
  Gene Symbol: LILRB3
  Gene Name: leukocyte immunoglobulin-like receptor, subfamily B (with TM and ITIM domains), member 3
  ENSP ID: ENSP00000481019

SEQ ID NO: 46231 - protein, 191 aa, Homo sapiens; identical to SEQ ID NO: 46216
  Payload ID: 9418
  Gene Symbol: LILRB3
  Gene Name: leukocyte immunoglobulin-like receptor, subfamily B (with TM and ITIM domains), member 3
  ENSP ID: ENSP00000482101

SEQ ID NO: 46232 - protein, 191 aa, Homo sapiens
  Payload ID: 9418
  Gene Symbol: LILRB3
  Gene Name: leukocyte immunoglobulin-like receptor, subfamily B (with TM and ITIM domains), member 3
  ENSP ID: ENSP00000482207
MTPALTALLCLGLSLGPRTRVQAGPFPKPTLWAEPGSVISWGSPVTIWCQGSLEAQEYRLDKEGSPEPLDRNNPLEPKNKARFSIPSMTEHHAGRYRCHYYSSAGWSEPSDPLELVMTGFYNKPTLSALPSPVVASGGNMTLRCGSQKGYHHFVLMKEGEHQLPRTLDSQQLHSGGFQALFPVGPVNPSHS

SEQ ID NO: 46233 - protein, 631 aa, Homo sapiens
  Payload ID: 9418
  Gene Symbol: LILRB3
  Gene Name: leukocyte immunoglobulin-like receptor, subfamily B (with TM and ITIM domains), member 3
  ENSP ID: ENSP00000483441
MTPALTALLCLGLSLGPRTRVQAGPFPKPTLWAEPGSVISWGSPVTIWCQGSLEAQEYQLDKEGSPEPWDRNNPLEPKNKARFSIPSMTQHHAGRYRCHYYSSAGWSEPSDPLELVMTGFYNKPTLSALPSPVVASGGNMTLRCGSQKGYHHFVLMKEGEHQLPRTLDSQQLHSGGFQALFPVGPVTPSHRWRFTCYYYYTNTPWVWSHPSDPLEILPSGVSRKPSLLTLQGPVLAPGQSLTLQCGSDVGYDRFVLYKEGERDFLQRPGQQPQAGLSQANFTLGPVSPSHGGQYRCYGAHNLSSEWSAPSDPLNILMAGQIYDTVSLSAQPGPTVASGENVTLLCQSRGYFDTFLLTKEGAAHPPLRLRSMYGAHKYQAEFPMSPVTSAHAGTYRCYGSRSSNPHLLSFPSEPLELMVSGHSGGSSLPPTGPPSTPGLGRYLEVLIGVSVAFVLLLFLLLFLLLRRQRHSKHRTSDQRKTDFQRPAGAAETEPKDRGLLRRSSPAADVQEENLYAAVKDTQSEDRVELDSQSPHDEDPQAVTYAPVKHSSPRREMASPPSSLSGEFLDTKDRQVEEDRQMDTEAAASEASQDVTYAQLHSLTLRRKATEPPPSQEGEPPAEPSIYATLAIH

SEQ ID NO: 46234 - protein, 455 aa, Homo sapiens
  Payload ID: 9418
  Gene Symbol: LILRB3
  Gene Name: leukocyte immunoglobulin-like receptor, subfamily B (with TM and ITIM domains), member 3
  ENSP ID: ENSP00000483574
MTPALTALLCLGLSLGPRTRVQAGPFPKPTLWAEPGSVISWGSPVTIWCQGSQEAQEYRLHKEGSPEPLDRNNPLEPKNKARFSIPSMTEHHAGRYRCHYYSSAGWSEPSDPLEMVMTGAYSKPTLSALPSPVVASGGNMTLRCGSQKGYHHFVLMKEGEHQLPRTLDSQQLHSRGFQALFPVGPVTPSHRWRFTCYYYYTNTPWVWSHPSDPLEILPSGVSRKPSLLTLQGPVLAPGQSLTLQCGSDVGYNRFVLYKEGERDFLQRPGQQPQAGLSQANFTLGPVSPSNGGQYRCYGAHNLSSEWSAPSDPLNILMAGQIYDTVSLSAQPGPTVASGENVTLLCQSWWQFDTFLLTKEGAAHPPLRLRSMYGAHKYQAEFPMSPVTSAHAGTYRCYGSYSSNPHLLSHPSEPLELVVSGEGADPVLSELKGSAQAQAPRRALGWDGPREAVREA

SEQ ID NO: 46235 - protein, 193 aa, Homo sapiens
  Payload ID: 9418
  Gene Symbol: LILRB3
  Gene Name: leukocyte immunoglobulin-like receptor, subfamily B (with TM and ITIM domains), member 3
  ENSP ID: ENSP00000483616
MTPALTALLCLGLSLGPRTRMQAGPFPKPTLWAEPGSVISWGSPVTIWCQGSLEAQEYQLDKEGSPEPWDRNNPLEPKNKARFSIPSMTQHHAGRYRCHYYSSAGWSEPSDPLELVMTGFYNKPTLSALPSPVVASGGNMTLRCGSQKGYHHFVLMKEGEHQLPRTLDSQQLHSGGFQALFPVGPVTPSHRRV

SEQ ID NO: 46236 - protein, 631 aa, Homo sapiens
  Payload ID: 9418
  Gene Symbol: LILRB3
  Gene Name: leukocyte immunoglobulin-like receptor, subfamily B (with TM and ITIM domains), member 3
  Uniprot ID: O75022
  ENSP ID: ENSP00000483625
MTPALTALLCLGLSLGPRTRVQAGPFPKPTLWAEPGSVISWGSPVTIWCQGSQEAQEYRLHKEGSPEPLDRNNPLEPKNKARFSIPSMTEHHAGRYRCHYYSSAGWSEPSDPLEMVMTGAYSKPTLSALPSPVVASGGNMTLRCGSQKGYHHFVLMKEGEHQLPRTLDSQQLHSRGFQALFPVGPVTPSHRWRFTCYYYYTNTPWVWSHPSDPLEILPSGVSRKPSLLTLQGPVLAPGQSLTLQCGSDVGYNRFVLYKEGERDFLQRPGQQPQAGLSQANFTLGPVSPSNGGQYRCYGAHNLSSEWSAPSDPLNILMAGQIYDTVSLSAQPGPTVASGENVTLLCQSWWQFDTFLLTKEGAAHPPLRLRSMYGAHKYQAEFPMSPVTSAHAGTYRCYGSYSSNPHLLSHPSEPLELVVSGHSGGSSLPPTGPPSTPGLGRYLEVLIGVSVAFVLLLFLLLFLLLRRQRHSKHRTSDQRKTDFQRPAGAAETEPKDRGLLRRSSPAADVQEENLYAAVKDTQSEDRVELDSQSPHDEDPQAVTYAPVKHSSPRREMASPPSSLSGEFLDTKDRQVEEDRQMDTEAAASEASQDVTYAQLHSLTLRRKATEPPPSQEGEPPAEPSIYATLAIH

SEQ ID NO: 46237 - protein, 193 aa, Homo sapiens
  Payload ID: 9418
  Gene Symbol: LILRB3
  Gene Name: leukocyte immunoglobulin-like receptor, subfamily B (with TM and ITIM domains), member 3
  ENSP ID: ENSP00000483760
MTPALTALLCLGLSLGPRTRVQAGPFPKPTLWAEPGSVISWGSPVTIWCQGSQEAQEYRLHKEGSPEPLDRNNPLEPKNKARFSIPSMTEHHAGRYRCHYYSSAGWSEPSDPLEMVMTGAYSKPTLSALPSPVVASGGNMTLRCGSQKGYHHFVLMKEGEHQLPRTLDSQQLHSRGFQALFPVGPVTPSHRRV

SEQ ID NO: 46238 - protein, 489 aa, Homo sapiens
  Payload ID: 9418
  Gene Symbol: LILRB3
  Gene Name: leukocyte immunoglobulin-like receptor, subfamily B (with TM and ITIM domains), member 3
  ENSP ID: ENSP00000483815
MTPALTALLCLGLSLGPRTRVQAGPFPKPTLWAEPGSVISWGSPVTIWCQGSLEAQEYRLDKEGSPEPLDRNNPLEPKNKARFSIPSMTEHHAGRYRCHYYSSAGWSEPSDPLELVMTGFYNKPTLSALPSPVVASGGNMTLRCGSQKGYHHFVLMKEGEHQLPRTLDSQQLHSGGFQALFPVGPVNPSHRWRFTCYYYYMNTPQVWSHPSDPLEILPSGVSRKPSLLTLQGPVLAPGQSLTLQCGSDVGYDRFVLYKEGERDFLQRPGQQPQAGLSQANFTLGPVSPSHGGQYRCYGAHNLSSEWSAPSDPLNILMAGQIYDTVSLSAQPGPTVASGENVTLLCQSWWQFDTFLLTKEGAAHPPLRLRSMYGAHKYQAEFPMSPVTSAHAGTYRCYGSYSSNPHLLSFPSEPLELMVSGHSGGSSLPPTGPPSTPGLGRYLEVLIGVSVAFVLLLFLLLFLLLRRQRHSKHRTSGLRLCPSSPRPEKD

SEQ ID NO: 46239 - protein, 632 aa, Homo sapiens
  Payload ID: 9418
  Gene Symbol: LILRB3
  Gene Name: leukocyte immunoglobulin-like receptor, subfamily B (with TM and ITIM domains), member 3
  ENSP ID: ENSP00000484451
MTPALTALLCLGLSLGPRTRVQAGPFPKPTLWAEPGSVISWGSPVTIWCQGSLEAQEYQLDKEGSPEPLDRNNPLEPKNKARFSIPSMTQHHAGRYRCHYYSSAGWSEPSDPLELVMTGFYNKPTLSALPSPVVASGGNMTLRCGSQKGYHHFVLMKEGEHQLPRTLDSQQLHSGGFQALFPVGPVTPSHRWRFTCYYYYTNTPRVWSHPSDPLEILPSGVSRKPSLLTLQGPVLAPGQSLTLQCGSDVGYNRFVLYKEGERDFLQRPGQQPQAGLSQANFTLGPVSPSNGGQYRCYGAHNLSSEWSAPSDPLNILMAGQIYDTVSLSAQPGPTVASGENVTLLCQSWWQFDTFLLTKEGAAHPPLRLRSMYGAHKYQAEFPMSPVTSAHAGTYRCYGSYSSNPHLLSHPSEPLELVVSGHSGGSSLPPTGPPSTPGLGRYLEVLIGVSVAFVLLLFLLLFLLLRRQRHSKHRTSDQRKTDFQRPAGAAETEPKDRGLLRRSSPAADVQEENLYAAVKDTQSEDRVELDSQQSPHDEDPQAVTYAPVKHSSPRREMASPPSSLSGEFLDTKDRQVEEDRQMDTEAAASEASQDVTYAQLHSLTLRRKATEPPPSQEGEPPAEPSIYATLAIH

SEQ ID NO: 46240 - protein, 648 aa, Homo sapiens
  Payload ID: 9418
  Gene Symbol: LILRB3
  Gene Name: leukocyte immunoglobulin-like receptor, subfamily B (with TM and ITIM domains), member 3
  ENSP ID: ENSP00000484812
MTPALTALLCLGLSLGPRTRVQAGPFPKPTLWAEPGSVISWGSPVTIWCQGSLEAQEYQLDKEGSPEPLDRNNPLEPKNKARFSIPSMTQHHAGRYRCHYYSSAGWSEPSDPLELVMTGAYSKPTLSALPSPVVASGGNMTLRCGSQKGYHHFVLMKEGEHQLPRTLDSQQLHSRGFQALFPVGPVTPSHRWRFTCYYYYTNTPWVWSHPSDPLEILPSGVSRKPSLLTLQGPVLAPGQSLTLQCGSDVGYNRFVLYKEGERDFLQRPGQQPQAGLSQANFTLGPVSPSNGGQYRCYGAHNLSSEWSAPSDPLNILMAGQIYDTVSLSAQPGPTVASGENVTLLCQSWWQFDTFLLTKEGAAHPPLRLRSMYGAHKYQAEFPMSPVTSAHAGTYRCYGSYSSNPHLLSHPSEPLELVVSGHSGGSSLPPTGPPSTPGGPEDQPLNPPGSGPQNRLGRYLEVLIGVSVAFVLLLFLLLFLLLRRQRHSKHRTSDQRKTDFQRPAGAAETEPKDRGLLRRSSPAADVQEENLYAAVKDTQSEDRVELDSQSPHDEDPQAVTYAPVKHSSPRREMASPPSSLSGEFLDTKDRQVEEDRQMDTEAAASEASQDVTYAQLHSLTLRRKATEPPPSQEGEPPAEPSIYATLAIH

SEQ ID NO: 46241 - protein, 631 aa, Homo sapiens; identical to SEQ ID NO: 46224
  Payload ID: 9418
  Gene Symbol: LILRB3
  Gene Name: leukocyte immunoglobulin-like receptor, subfamily B (with TM and ITIM domains), member 3
  Uniprot ID: O75022
  ENSP ID: ENSP00000484925

SEQ ID NO: 46242 - protein, 131 aa, Homo sapiens
  Payload ID: 9419
  Gene Symbol: LILRB4
  Gene Name: leukocyte immunoglobulin-like receptor, subfamily B (with TM and ITIM domains), member 4
  ENSP ID: ENSP00000270452
MEQPHDEKDPASKRPHPVCLFVLPALRTHPSAQLGPLGGDAMIPTFTALLCLGLSLGPRTHMQAGPLPKPTLWAEPGSVISWGNSVTIWCQGTLEAREYRLDKEESPAPWDRQNPLEPKNKARFSIPSMTE

SEQ ID NO: 46243 - protein, 449 aa, Homo sapiens
  Payload ID: 9419
  Gene Symbol: LILRB4
  Gene Name: leukocyte immunoglobulin-like receptor, subfamily B (with TM and ITIM domains), member 4
  ENSP ID: ENSP00000375613
MIPTFTALLCLGLSLGPRTHMQAGPLPKPTLWAEPGSVISWGNSVTIWCQGTLEAREYRLDKEESPAPWDRQNPLEPKNKARFSIPSMTEDYAGRYRCYYRSPVGWSQPSDPLELVMTGAYSKPTLSALPSPLVTSGKSVTLLCQSRSPMDTFLLIKERAAHPLLHLRSEHGAQQHQAEFPMSPVTSVHGGTYRCFSSHGFSHYLLSHPSDPLELIVSGSLEGPRPSPTRSVSTAAGPEDQPLMPTGSVPHSGLRRHWEVLIGVLVVSILLLSLLLFLLLQHWRQGKHRTLAQRQADFQRPPGAAEPEPKDGGLQRRSSPAADVQGENFSGAAVKNTQPEDGVEMDTRQSPHDEDPQAVTYAKVKHSRPRREMASPPSPLSGEFLDTKDRQAEEDRQMDTEAAASEAPQDVTYARLHSFTLRQKATEPPPSQEGASPAEPSVYATLAIH

SEQ ID NO: 46244 - protein, 395 aa, Homo sapiens
  Payload ID: 9419
  Gene Symbol: LILRB4
  Gene Name: leukocyte immunoglobulin-like receptor, subfamily B (with TM and ITIM domains), member 4
  ENSP ID: ENSP00000375614
MIPTFTALLCLGLSLGPRTHMQAGPLPKPTLWAEPGSVISWGNSVTIWCQGTLEAREYRLDKEESPAPWDRQNPLEPKNKARFSIPSMTEDYAGRYRCYYRSPVGWSQPSDPLELVMTGAYSKPTLSALPSPLVTSGKSVTLLCQSRSPMDTFLLIKERAAHPLLHLRSEHGAQQHQAEFPMSPVTSVHGGTYRCFSSHGFSHYLLSHPSDPLELIVSGSLEGPRPSPTRSVSTAAGPEDQPLMPTGSVPHSGLRRHWEVLIGVLVVSILLLSLLLFLLLQHWRQGKHRTLAQRQADFQRPPGAAEPEPKDGGLQRRSSPAADVQGENFCAAVKNTQPEDGVEMDTRAAASEAPQDVTYARLHSFTLRQKATEPPPSQEGASPAEPSVYATLAIH

SEQ ID NO: 46245 - protein, 448 aa, Homo sapiens
  Payload ID: 9419
  Gene Symbol: LILRB4
  Gene Name: leukocyte immunoglobulin-like receptor, subfamily B (with TM and ITIM domains), member 4
  Uniprot ID: Q8NHJ6
  ENSP ID: ENSP00000375616
MIPTFTALLCLGLSLGPRTHMQAGPLPKPTLWAEPGSVISWGNSVTIWCQGTLEAREYRLDKEESPAPWDRQNPLEPKNKARFSIPSMTEDYAGRYRCYYRSPVGWSQPSDPLELVMTGAYSKPTLSALPSPLVTSGKSVTLLCQSRSPMDTFLLIKERAAHPLLHLRSEHGAQQHQAEFPMSPVTSVHGGTYRCFSSHGFSHYLLSHPSDPLELIVSGSLEGPRPSPTRSVSTAAGPEDQPLMPTGSVPHSGLRRHWEVLIGVLVVSILLLSLLLFLLLQHWRQGKHRTLAQRQADFQRPPGAAEPEPKDGGLQRRSSPAADVQGENFCAAVKNTQPEDGVEMDTRQSPHDEDPQAVTYAKVKHSRPRREMASPPSPLSGEFLDTKDRQAEEDRQMDTEAAASEAPQDVTYARLHSFTLRQKATEPPPSQEGASPAEPSVYATLAIH

SEQ ID NO: 46246 - protein, 399 aa, Homo sapiens
  Payload ID: 9419
  Gene Symbol: LILRB4
  Gene Name: leukocyte immunoglobulin-like receptor, subfamily B (with TM and ITIM domains), member 4
  ENSP ID: ENSP00000401962
MIPTFTALLCLGLSLGPRTHMQAGPLPKPTLWAEPGSVISWGNSVTIWCQGTLEAREYRLDKEESPAPWDRQNPLEPKNKARFSIPSMTEDYAGRYRCYYRSPVGWSQPSDPLELVMTGAYSKPTLSALPSPLVTSGKSVTLLCQSRSPMDTFLLIKERAAHPLLHLRSEHGAQQHQAEFPMSPVTSVHGGTYRCFSSHGFSHYLLSHPSDPLELIVSGSLEGPRPSPTRSVSTAGPEDQPLMPTGSVPHSGLRRHWEVLIGVLVVSILLLSLLLFLLLQHWRQGKHRTLAQRQADFQRPPGAAEPEPKDGGLQRRSSPAADVQGENFCAAVKNTQPEDGVEMDTRQSPHDEDPQAVTYAKVKHSRPRREMASPPSPLSGEFLDTKDRQAEEDRQMDTE

SEQ ID NO: 46247 - protein, 447 aa, Homo sapiens
  Payload ID: 9419
  Gene Symbol: LILRB4
  Gene Name: leukocyte immunoglobulin-like receptor, subfamily B (with TM and ITIM domains), member 4
  ENSP ID: ENSP00000408995
MIPTFTALLCLGLSLGPRTHMQAGPLPKPTLWAEPGSVISWGNSVTIWCQGTLEAREYRLDKEESPAPWDRQNPLEPKNKARFSIPSMTEDYAGRYRCYYRSPVGWSQPSDPLELVMTGAYSKPTLSALPSPLVTSGKSVTLLCQSRSPMDTFLLIKERAAHPLLHLRSEHGAQQHQAEFPMSPVTSVHGGTYRCFSSHGFSHYLLSHPSDPLELIVSGSLEGPRPSPTRSVSTAAGPEDQPLMPTGSVPHSGLRRHWEVLIGVLVVSILLLSLLLFLLLQHWRQGKHRTLAQRQADFQRPPGAAEPEPKDGGLQRRSSPAADVQGENFCAAVKNTQPEDGVEMDTRSPHDEDPQAVTYAKVKHSRPRREMASPPSPLSGEFLDTKDRQAEEDRQMDTEAAASEAPQDVTYARLHSFTLRQKATEPPPSQEGASPAEPSVYATLAIH

SEQ ID NO: 46248 - protein, 448 aa, Homo sapiens
  Payload ID: 9419
  Gene Symbol: LILRB4
  Gene Name: leukocyte immunoglobulin-like receptor, subfamily B (with TM and ITIM domains), member 4
  ENSP ID: ENSP00000478077
MIPTFTALLCLGLSLGPRTHMQAGPLPKPTLWAEPGSVISWGNSVTIWCQGTLEAREYRLDKEESPAPWDRQNPLEPKNKARFSIPSMTEDYAGRYRCYYRSPVGWSQPSDPLELVMTGAYSKPTLSALPSPLVTSGKSVTLLCQSRSPMDTFLLIKERAAHPLLHLRSEHGAQQHQAEFPMSPVTSVHGGTYRCFSSHGFSHYLLSHPSDPLELIVSGSLEGPRPSPTRSVSTAAGPEDQPLMPTGSVPHSGLRRHWEVLIGVLVVSILLLSLLLFLLLQHWRQGKHRTLAQRQADFQRPPGAAEPEPKDGGLQRRSSPAADVQGENFCAAVKDTQPEDGVEMDTRQSPHDEDPQAVTYAKVKHSRPRREMASPPSPLSGEFLDTKDRQAEEDRQMDTEAAASEAPQDVTYAQLHSFTLRQKATEPPPSQEGASPAEPSVYATLAIH

SEQ ID NO: 46249 - protein, 437 aa, Homo sapiens
  Payload ID: 9419
  Gene Symbol: LILRB4
  Gene Name: leukocyte immunoglobulin-like receptor, subfamily B (with TM and ITIM domains), member 4
  ENSP ID: ENSP00000478476
MIPTLTALLCLGPLPKPTLWAEPGSVISWGNSVTIWCQGTLEAREYRLDKEESPAPWDRQNPLEPKNKARFSIPSMTEDYAGRYRCYYRSPVGWSQPSDPLELVMTGAYSKPTLSALPSPLVTSGKSVTLLCQSRSPMDTFLLIKERAAHPLLHLRSEHGAQQHQAEFPMSPVTSVHGGTYRCFSSHGFSHYLLSHPSDPLELIVSGSLEGPRPSPTRSVSTAAGPEDQPLMPTGSVPHSGLRRHWEVLIGVLVVSILLLSLLLFLLLQHWRQGKHRTLAQRQADFQRPPGAAEPEPKDGGLQRRSSPAADVQGENFSGAAVKNTQPEDGVEMDTRQSPHDEDPQAVTYAKVKHSRPRREMASPPSPLSGEFLDTKDRQAEEDRQMDTEAAASEAPQDVTYARLHSFTLRQKATEPPPSQEGASPAEPSVYATLAIH

SEQ ID NO: 46250 - protein, 399 aa, Homo sapiens
  Payload ID: 9419
  Gene Symbol: LILRB4
  Gene Name: leukocyte immunoglobulin-like receptor, subfamily B (with TM and ITIM domains), member 4
  ENSP ID: ENSP00000478511
MIPTFTALLCLGLSLGPRTHMQAGPLPKPTLWAEPGSVISWGNSVTIWCQGTLEAREYRLDKEESPAPWDRQNPLEPKNKARFSIPSMTEDYAGRYRCYYRSPVGWSQPSDPLELVMTGAYSKPTLSALPSPLVTSGKSVTLLCQSRSPMDTFLLIKERAAHPLLHLRSEHGAQQHQAEFPMSPVTSVHGGTYRCFSSHGFSHYLLSHPSDPLELIVSGSLEDPRPSPTRSVSTAGPEDQPLMPTGSVPHSGLRRHWEVLIGVLVVSILLLSLLLFLLLQHWRQGKHRTLAQRQADFQRPPGAAEPEPKDGGLQRRSSPAADVQGENFCAAVKNTQPEDGVEMDTRQSPHDEDPQAVTYAKVKHSRPRREMASPPSPLSGEFLDTKDRQAEEDRQMDTE

SEQ ID NO: 46251 - protein, 449 aa, Homo sapiens
  Payload ID: 9419
  Gene Symbol: LILRB4
  Gene Name: leukocyte immunoglobulin-like receptor, subfamily B (with TM and ITIM domains), member 4
  Uniprot ID: Q8NHJ6
  ENSP ID: ENSP00000478542
MIPTFTALLCLGLSLGPRTHMQAGPLPKPTLWAEPGSVISWGNSVTIWCQGTLEAREYRLDKEESPAPWDRQNPLEPKNKARFSIPSMTEDYAGRYRCYYRSPVGWSQPSDPLELVMTGAYSKPTLSALPSPLVTSGKSVTLLCQSRSPMDTFLLIKERAAHPLLHLRSEHGAQQHQAEFPMSPVTSVHGGTYRCFSSHGFSHYLLSHPSDPLELIVSGSLEDPRPSPTRSVSTAAGPEDQPLMPTGSVPHSGLRRHWEVLIGVLVVSILLLSLLLFLLLQHWRQGKHRTLAQRQADFQRPPGAAEPEPKDGGLQRRSSPAADVQGENFSGAAVKNTQPEDGVEMDTRQSPHDEDPQAVTYAKVKHSRPRREMASPPSPLSGEFLDTKDRQAEEDRQMDTEAAASEAPQDVTYAQLHSFTLRQKATEPPPSQEGASPAEPSVYATLAIH

SEQ ID NO: 46252 - protein, 447 aa, Homo sapiens
  Payload ID: 9419
  Gene Symbol: LILRB4
  Gene Name: leukocyte immunoglobulin-like receptor, subfamily B (with TM and ITIM domains), member 4
  ENSP ID: ENSP00000478584
MIPTFTALLCLGLSLGPRTHMQAGPLPKPTLWAEPGSVISWGNSVTIWCQGTLEAREYRLDKEESPAPWDRQNPLEPKNKARFSIPSMTEDYAGRYRCYYRSPVGWSQPSDPLELVMTGAYSKPTLSALPSPLVTSGKSVTLLCQSRSPMDTFLLIKERAAHPLLHLRSEHGAQQHQAEFPMSPVTSVHGGTYRCFSSHGFSHYLLSHPSDPLELIVSGSLEGPRPSPTRSVSTAAGPEDQPLMPTGSVPHSGLRRHWEVLIGVLVVSILLLSLLLFLLLQHWRQGKHRTLAQRQADFQRPPGAAEPEPKDGGLQRRSSPAADVQGENFCAAVKDTQPEDGVEMDTRSPHDEDPQAVTYAKVKHSRPRREMASPPSPLSGEFLDTKDRQAEEDRQMDTEAAASEAPQDVTYAQLHSFTLRQKATEPPPSQEGASPAEPSVYATLAIH

SEQ ID NO: 46253 - protein, 448 aa, Homo sapiens
  Payload ID: 9419
  Gene Symbol: LILRB4
  Gene Name: leukocyte immunoglobulin-like receptor, subfamily B (with TM and ITIM domains), member 4
  ENSP ID: ENSP00000478727
MIPTFTALLCLGLSLGPRTHMQAGPLPKPTLWAEPGSVISWGNSVTIWCQGTLEAREYRLDKEESPAPWDRQNPLEPKNKARFSIPSMTEDYAGRYRCYYRSPVGWSQPSDPLELVMTGAYSKPTLSALPSPLVTSGKSVTLLCQSRSPMDTFLLIKERAAHPLLHLRSEHGAQQHQAEFPMSPVTSVHGGTYRCFSSHGFSHYLLSHPSDPLELIVSGSLEGPRPSPTRSVSTAAGPEDQPLMPTGSVPHSGLRRHWEVLIGVLVVSILLLSLLLFLLLQHWRQGKHRTLAQRQADFQRPPGAAEPEPKDGGLQRRSSPAADVQGENFSGAAVKDTQPEDGVEMDTRSPHDEDPQAVTYAKVKHSRPRREMASPPSPLSGEFLDTKDRQAEEDRQMDTEAAASEAPQDVTYAQLHSFTLRQKATEPPPSQEGASPAEPSVYATLAIH

SEQ ID NO: 46254 - protein, 449 aa, Homo sapiens
  Payload ID: 9419
  Gene Symbol: LILRB4
  Gene Name: leukocyte immunoglobulin-like receptor, subfamily B (with TM and ITIM domains), member 4
  ENSP ID: ENSP00000479289
MIPTFTALLCLGLSLGPRTHMQAGPLPKPTLWAEPGSVISWGNSVTIWCQGTLEAREYRLDKEESPAPWDRQNPLEPKNKARFSIPSMTEDYAGRYRCYYRSPVGWSQPSDPLELVMTGAYSKPTLSALPSPLVTSGKSVTLLCQSRSPMDTFLLIKERAAHPLLHLRSEHGAQQHQAEFPMSPVTSVHGGTYRCFSSHGFSHYLLSHPSDPLELIVSGSLEGPRPSPTRSVSTAAGPEDQPLMPTGSVPHSGLRRHWEVLIGVLVVSILLLSLLLFLLLQHWRQGKHRTLAQRQADFQRPPGAAEPEPKDGGLQRRSSPAADVQGENFSGAAVKDTQPEDGVEMDTRQSPHDEDPQAVTYAKVKHSRPRREMASPPSPLSGEFLDTKDRQAEEDRQMDTEAAASEAPQDVTYARLHSFTLRQKATEPPPSQEGASPAEPSVYATLAIH

SEQ ID NO: 46255 - protein, 448 aa, Homo sapiens; identical to SEQ ID NO: 46248
  Payload ID: 9419
  Gene Symbol: LILRB4
  Gene Name: leukocyte immunoglobulin-like receptor, subfamily B (with TM and ITIM domains), member 4
  ENSP ID: ENSP00000479497

SEQ ID NO: 46256 - protein, 448 aa, Homo sapiens
  Payload ID: 9419
  Gene Symbol: LILRB4
  Gene Name: leukocyte immunoglobulin-like receptor, subfamily B (with TM and ITIM domains), member 4
  Uniprot ID: Q8NHJ6
  ENSP ID: ENSP00000479829
MIPTFTALLCLGLSLGPRTHMQAGPLPKPTLWAEPGSVISWGNSVTIWCQGTLEAREYRLDKEESPAPWDRQNPLEPKNKARFSIPSMTEDYAGRYRCYYRSPVGWSQPSDPLELVMTGAYSKPTLSALPSPLVTSGKSVTLLCQSRSPMDTFLLIKERAAHPLLHLRSEHGAQQHQAEFPMSPVTSVHGGTYRCFSSHGFSHYLLSHPSDPLELIVSGSLEDPRPSPTRSVSTAAGPEDQPLMPTGSVPHSGLRRHWEVLIGVLVVSILLLSLLLFLLLQHWRQGKHRTLAQRQADFQRPPGAAEPEPKDGGLQRRSSPAADVQGENFCAAVKNTQPEDGVEMDTRQSPHDEDPQAVTYAKVKHSRPRREMASPPSPLSGEFLDTKDRQAEEDRQMDTEAAASEAPQDVTYAQLHSFTLRQKATEPPPSQEGASPAEPSVYATLAIH

SEQ ID NO: 46257 - protein, 280 aa, Homo sapiens
  Payload ID: 9419
  Gene Symbol: LILRB4
  Gene Name: leukocyte immunoglobulin-like receptor, subfamily B (with TM and ITIM domains), member 4
  ENSP ID: ENSP00000480977
MTEDYAGRYRCYYRSPVGWSQPSDPLELVMTGAYSKPTLSALPSPLVTSGKSVTLLCQSRSPMDTFLLIKERAAHPLLHLRSEHGAQQHQAEFPMSPVTSVHGGTYRCFSSHGFSHYLLSHPSDPLELIVSGSLEDPRPSPTRSVSTAAGPEDQPLMPTGSVPHSGLRRHWEVLIGVLVVSILLLSLLLFLLLQHWRQGKHRTLAQRQADFQRPPGAAEPEPKDGGLQRRSSPAADVQGENFCAAVKNTQPEDGVEMDTRSPHDEDPQAVTYAKVKHSRP

SEQ ID NO: 46258 - protein, 448 aa, Homo sapiens
  Payload ID: 9419
  Gene Symbol: LILRB4
  Gene Name: leukocyte immunoglobulin-like receptor, subfamily B (with TM and ITIM domains), member 4
  ENSP ID: ENSP00000481233
MIPTFTALLCLGLSLGPRTHMQAGPLPKPTLWAEPGSVISWGNSVTIWCQGTLEAREYRLDKEESPAPWDRQNPLEPKNKARFSIPSMTEDYAGRYRCYYRSPVGWSQPSDPLELVMTGAYSKPTLSALPSPLVTSGKSVTLLCQSRSPMDTFLLIKERAAHPLLHLRSEHGAQQHQAEFPMSPVTSVHGGTYRCFSSHGFSHYLLSHPSDPLELIVSGSLEGPRPSPTRSVSTAAGPEDQPLMPTGSVPHSGLRRHWEVLIGVLVVSILLLSLLLFLLLQHWRQGKHRTLAQRQADFQRPPGAAEPEPKDGGLQRRSSPAADVQGENFSGAAVKDTQPEDGVEMDTRSPHDEDPQAVTYAKVKHSRPRREMASPPSPLSGEFLDTKDRQAEEDRQMDTEAAASEAPQDVTYARLHSFTLRQKATEPPPSQEGASPAEPSVYATLAIH

SEQ ID NO: 46259 - protein, 478 aa, Homo sapiens
  Payload ID: 9419
  Gene Symbol: LILRB4
  Gene Name: leukocyte immunoglobulin-like receptor, subfamily B (with TM and ITIM domains), member 4
  ENSP ID: ENSP00000481609
MEQPHDEKDPASKRPHPVCLFVLPALRTHPSAQLGPLGGDAMIPTFTALLCLGPLPKPTLWAEPGSVISWGNSVTIWCQGTLEAREYRLDKEESPAPWDRQNPLEPKNKARFSIPSMTEDYAGRYRCYYRSPVGWSQPSDPLELVMTGAYSKPTLSALPSPLVTSGKSVTLLCQSRSPMDTFLLIKERAAHPLLHLRSEHGAQQHQAEFPMSPVTSVHGGTYRCFSSHGFSHYLLSHPSDPLELIVSGSLEDPRPSPTRSVSTAAGPEDQPLMPTGSVPHSGLRRHWEVLIGVLVVSILLLSLLLFLLLQHWRQGKHRTLAQRQADFQRPPGAAEPEPKDGGLQRRSSPAADVQGENFSGAAVKNTQPEDGVEMDTRQSPHDEDPQAVTYAKVKHSRPRREMASPPSPLSGEFLDTKDRQAEEDRQMDTEAAASEAPQDVTYAQLHSFTLRQKATEPPPSQEGASPAEPSVYATLAIH

SEQ ID NO: 46260 - protein, 447 aa, Homo sapiens
  Payload ID: 9419
  Gene Symbol: LILRB4
  Gene Name: leukocyte immunoglobulin-like receptor, subfamily B (with TM and ITIM domains), member 4
  Uniprot ID: Q8NHJ6
  ENSP ID: ENSP00000482234
MIPTFTALLCLGLSLGPRTHMQAGPLPKPTLWAEPGSVISWGNSVTIWCQGTLEAREYRLDKEESPAPWDRQNPLEPKNKARFSIPSMTEDYAGRYRCYYRSPVGWSQPSDPLELVMTGAYSKPTLSALPSPLVTSGKSVTLLCQSRSPMDTFLLIKERAAHPLLHLRSEHGAQQHQAEFPMSPVTSVHGGTYRCFSSHGFSHYLLSHPSDPLELIVSGSLEDPRPSPTRSVSTAAGPEDQPLMPTGSVPHSGLRRHWEVLIGVLVVSILLLSLLLFLLLQHWRQGKHRTLAQRQADFQRPPGAAEPEPKDGGLQRRSSPAADVQGENFCAAVKNTQPEDGVEMDTRSPHDEDPQAVTYAKVKHSRPRREMASPPSPLSGEFLDTKDRQAEEDRQMDTEAAASEAPQDVTYAQLHSFTLRQKATEPPPSQEGASPAEPSVYATLAIH

SEQ ID NO: 46261 - protein, 448 aa, Homo sapiens
  Payload ID: 9419
  Gene Symbol: LILRB4
  Gene Name: leukocyte immunoglobulin-like receptor, subfamily B (with TM and ITIM domains), member 4
  ENSP ID: ENSP00000482694
MIPTLTALLCLGLSLGPRTHMQAGPLPKPTLWAEPGSVISWGNSVTIWCQGTLEAREYRLDKEESPAPWDRQNPLEPKNKARFSIPSMTEDYAGRYRCYYRSPVGWSQPSDPLELVMTGAYSKPTLSALPSPLVTSGKSVTLLCQSRSPMDTFLLIKERAAHPLLHLRSEHGAQQHQAEFPMSPVTSVHGGTYRCFSSHGFSHYLLSHPSDPLELIVSGSLEGPRPSPTRSVSTAAGPEDQPLMPTGSVPHSGLRRHWEVLIGVLVVSILLLSLLLFLLLQHWRQGKHRTLAQRQADFQRPPGAAEPEPKDGGLQRRSSPAADVQGENFCAAVKNTQPEDGVEMDTRQSPHDEDPQAVTYAKVKHSRPRREMASPPSPLSGEFLDTKDRQAEEDRQMDTEAAASEAPQDVTYARLHSFTLRQKATEPPPSQEGASPAEPSVYATLAIH

SEQ ID NO: 46262 - protein, 447 aa, Homo sapiens
  Payload ID: 9419
  Gene Symbol: LILRB4
  Gene Name: leukocyte immunoglobulin-like receptor, subfamily B (with TM and ITIM domains), member 4
  ENSP ID: ENSP00000483171
MIPTLTALLCLGLSLGPRTHMQAGPLPKPTLWAEPGSVISWGNSVTIWCQGTLEAREYRLDKEESPAPWDRQNPLEPKNKARFSIPSMTEDYAGRYRCYYRSPVGWSQPSDPLELVMTGAYSKPTLSALPSPLVTSGKSVTLLCQSRSPMDTFLLIKERAAHPLLHLRSEHGAQQHQAEFPMSPVTSVHGGTYRCFSSHGFSHYLLSHPSDPLELIVSGSLEGPRPSPTRSVSTAAGPEDQPLMPTGSVPHSGLRRHWEVLIGVLVVSILLLSLLLFLLLQHWRQGKHRTLAQRQADFQRPPGAAEPEPKDGGLQRRSSPAADVQGENFCAAVKNTQPEDGVEMDTRSPHDEDPQAVTYAKVKHSRPRREMASPPSPLSGEFLDTKDRQAEEDRQMDTEAAASEAPQDVTYARLHSFTLRQKATEPPPSQEGASPAEPSVYATLAIH

SEQ ID NO: 46263 - protein, 395 aa, Homo sapiens
  Payload ID: 9419
  Gene Symbol: LILRB4
  Gene Name: leukocyte immunoglobulin-like receptor, subfamily B (with TM and ITIM domains), member 4
  ENSP ID: ENSP00000483296
MIPTFTALLCLGLSLGPRTHMQAGPLPKPTLWAEPGSVISWGNSVTIWCQGTLEAREYRLDKEESPAPWDRQNPLEPKNKARFSIPSMTEDYAGRYRCYYRSPVGWSQPSDPLELVMTGAYSKPTLSALPSPLVTSGKSVTLLCQSRSPMDTFLLIKERAAHPLLHLRSEHGAQQHQAEFPMSPVTSVHGGTYRCFSSHGFSHYLLSHPSDPLELIVSGSLEDPRPSPTRSVSTAAGPEDQPLMPTGSVPHSGLRRHWEVLIGVLVVSILLLSLLLFLLLQHWRQGKHRTLAQRQADFQRPPGAAEPEPKDGGLQRRSSPAADVQGENFCAAVKNTQPEDGVEMDTRAAASEAPQDVTYAQLHSFTLRQKATEPPPSQEGASPAEPSVYATLAIH

SEQ ID NO: 46264 - protein, 63 aa, Homo sapiens
  Payload ID: 9419
  Gene Symbol: LILRB4
  Gene Name: leukocyte immunoglobulin-like receptor, subfamily B (with TM and ITIM domains), member 4
  ENSP ID: ENSP00000483357
MEQPHDEKDPASKRPHPVCLFVLPALRTHPSAQLGPLGGDAMIPTFTALLCLGDPGGSGVPSG

SEQ ID NO: 46265 - protein, 447 aa, Homo sapiens
  Payload ID: 9419
  Gene Symbol: LILRB4
  Gene Name: leukocyte immunoglobulin-like receptor, subfamily B (with TM and ITIM domains), member 4
  ENSP ID: ENSP00000483376
MIPTFTALLCLGLSLGPRTHMQAGPLPKPTLWAEPGSVISWGNSVTIWCQGTLEAREYRLDKEESPAPWDRQNPLEPKNKARFSIPSMTEDYAGRYRCYYRSPVGWSQPSDPLELVMTGAYSKPTLSALPSPLVTSGKSVTLLCQSRSPMDTFLLIKERAAHPLLHLRSEHGAQQHQAEFPMSPVTSVHGGTYRCFSSHGFSHYLLSHPSDPLELIVSGSLEGPRPSPTRSVSTAAGPEDQPLMPTGSVPHSGLRRHWEVLIGVLVVSILLLSLLLFLLLQHWRQGKHRTLAQRQADFQRPPGAAEPEPKDGGLQRRSSPAADVQGENFCAAVKDTQPEDGVEMDTRSPHDEDPQAVTYAKVKHSRPRREMASPPSPLSGEFLDTKDRQAEEDRQMDTEAAASEAPQDVTYARLHSFTLRQKATEPPPSQEGASPAEPSVYATLAIH

SEQ ID NO: 46266 - protein, 168 aa, Homo sapiens
  Payload ID: 9419
  Gene Symbol: LILRB4
  Gene Name: leukocyte immunoglobulin-like receptor, subfamily B (with TM and ITIM domains), member 4
  ENSP ID: ENSP00000483708
MIPTLTALLCLGLSLGPRTHMQAGPLPKPTLWAEPGSVISWGNSVTIWCQGTLEAREYRLDKEESPAPWDRQNPLEPKNKARFSIPSMTEDYAGRYRCYYRSPVGWSQPSDPLELVMTGAYSKPTLSALPSPLVTSGKSVTLLCQSRSPMDTFLLIKERAAHPLLHLR

SEQ ID NO: 46267 - protein, 449 aa, Homo sapiens
  Payload ID: 9419
  Gene Symbol: LILRB4
  Gene Name: leukocyte immunoglobulin-like receptor, subfamily B (with TM and ITIM domains), member 4
  ENSP ID: ENSP00000484286
MIPTFTALLCLGLSLGPRTHMQAGPLPKPTLWAEPGSVISWGNSVTIWCQGTLEAREYRLDKEESPAPWDRQNPLEPKNKARFSIPSMTEDYAGRYRCYYRSPVGWSQPSDPLELVMTGAYSKPTLSALPSPLVTSGKSVTLLCQSRSPMDTFLLIKERAAHPLLHLRSEHGAQQHQAEFPMSPVTSVHGGTYRCFSSHGFSHYLLSHPSDPLELIVSGSLEGPRPSPTRSVSTAAGPEDQPLMPTGSVPHSGLRRHWEVLIGVLVVSILLLSLLLFLLLQHWRQGKHRTLAQRQADFQRPPGAAEPEPKDGGLQRRSSPAADVQGENFSGAAVKDTQPEDGVEMDTRQSPHDEDPQAVTYAKVKHSRPRREMASPPSPLSGEFLDTKDRQAEEDRQMDTEAAASEAPQDVTYAQLHSFTLRQKATEPPPSQEGASPAEPSVYATLAIH

SEQ ID NO: 46268 - protein, 25 aa, Homo sapiens
  Payload ID: 9419
  Gene Symbol: LILRB4
  Gene Name: leukocyte immunoglobulin-like receptor, subfamily B (with TM and ITIM domains), member 4
  ENSP ID: ENSP00000484348
  MOD_RES (1)..(1): Any amino acid
XEPKDGGLQRRSSPAADVQGENFCE

SEQ ID NO: 46269 - protein, 449 aa, Homo sapiens
  Payload ID: 9419
  Gene Symbol: LILRB4
  Gene Name: leukocyte immunoglobulin-like receptor, subfamily B (with TM and ITIM domains), member 4
  ENSP ID: ENSP00000484515
MIPTLTALLCLGLSLGPRTHMQAGPLPKPTLWAEPGSVISWGNSVTIWCQGTLEAREYRLDKEESPAPWDRQNPLEPKNKARFSIPSMTEDYAGRYRCYYRSPVGWSQPSDPLELVMTGAYSKPTLSALPSPLVTSGKSVTLLCQSRSPMDTFLLIKERAAHPLLHLRSEHGAQQHQAEFPMSPVTSVHGGTYRCFSSHGFSHYLLSHPSDPLELIVSGSLEGPRPSPTRSVSTAAGPEDQPLMPTGSVPHSGLRRHWEVLIGVLVVSILLLSLLLFLLLQHWRQGKHRTLAQRQADFQRPPGAAEPEPKDGGLQRRSSPAADVQGENFSGAAVKNTQPEDGVEMDTRQSPHDEDPQAVTYAKVKHSRPRREMASPPSPLSGEFLDTKDRQAEEDRQMDTEAAASEAPQDVTYARLHSFTLRQKATEPPPSQEGASPAEPSVYATLAIH

SEQ ID NO: 46270 - protein, 448 aa, Homo sapiens
  Payload ID: 9419
  Gene Symbol: LILRB4
  Gene Name: leukocyte immunoglobulin-like receptor, subfamily B (with TM and ITIM domains), member 4
  ENSP ID: ENSP00000484720
MIPTFTALLCLGLSLGPRTHMQAGPLPKPTLWAEPGSVISWGNSVTIWCQGTLEAREYRLDKEESPAPWDRQNPLEPKNKARFSIPSMTEDYAGRYRCYYRSPVGWSQPSDPLELVMTGAYSKPTLSALPSPLVTSGKSVTLLCQSRSPMDTFLLIKERAAHPLLHLRSEHGAQQHQAEFPMSPVTSVHGGTYRCFSSHGFSHYLLSHPSDPLELIVSGSLEGPRPSPTRSVSTAAGPEDQPLMPTGSVPHSGLRRHWEVLIGVLVVSILLLSLLLFLLLQHWRQGKHRTLAQRQADFQRPPGAAEPEPKDGGLQRRSSPAADVQGENFCAAVKDTQPEDGVEMDTRQSPHDEDPQAVTYAKVKHSRPRREMASPPSPLSGEFLDTKDRQAEEDRQMDTEAAASEAPQDVTYARLHSFTLRQKATEPPPSQEGASPAEPSVYATLAIH

SEQ ID NO: 46271 - protein, 448 aa, Homo sapiens
  Payload ID: 9419
  Gene Symbol: LILRB4
  Gene Name: leukocyte immunoglobulin-like receptor, subfamily B (with TM and ITIM domains), member 4
  ENSP ID: ENSP00000484809
MIPTLTALLCLGLSLGPRTHMQAGPLPKPTLWAEPGSVISWGNSVTIWCQGTLEAREYRLDKEESPAPWDRQNPLEPKNKARFSIPSMTEDYAGRYRCYYRSPVGWSQPSDPLELVMTGAYSKPTLSALPSPLVTSGKSVTLLCQSRSPMDTFLLIKERAAHPLLHLRSEHGAQQHQAEFPMSPVTSVHGGTYRCFSSHGFSHYLLSHPSDPLELIVSGSLEGPRPSPTRSVSTAAGPEDQPLMPTGSVPHSGLRRHWEVLIGVLVVSILLLSLLLFLLLQHWRQGKHRTLAQRQADFQRPPGAAEPEPKDGGLQRRSSPAADVQGENFSGAAVKNTQPEDGVEMDTRSPHDEDPQAVTYAKVKHSRPRREMASPPSPLSGEFLDTKDRQAEEDRQMDTEAAASEAPQDVTYARLHSFTLRQKATEPPPSQEGASPAEPSVYATLAIH

SEQ ID NO: 46272 - protein, 491 aa, Homo sapiens
  Payload ID: 9420
  Gene Symbol: LILRB5
  Gene Name: leukocyte immunoglobulin-like receptor, subfamily B (with TM and ITIM domains), member 5
  Uniprot ID: O75023
  ENSP ID: ENSP00000263430
MTLTLSVLICLGLSVGPRTCVQAGTLPKPTLWAEPASVIARGKPVTLWCQGPLETEEYRLDKEGLPWARKRQNPLEPGAKAKFHIPSTVYDSAGRYRCYYETPAGWSEPSDPLELVATGVSRKPSLLIPQGSVVARGGSLTLQCRSDVGYDIFVLYKEGEHDLVQGSGQQPQAGLSQANFTLGPVSRSHGGQYRCYGAHNLSPRWSAPSDPLDILIAGLIPDIPALSVQPGPKVASGENVTLLCQSWHQIDTFFLTKEGAAHPPLCLKSKYQSYRHQAEFSMSPVTSAQGGTYRCYSAIRSYPYLLSSPSYPQELVVSGPSGDPSLSPTGSTPTPAGPEDQPLTPTGLDPQSGLGRHLGVVTGVSVAFVLLLFLLLFLLLRHRHQSKHRTSAHFYRPAGAAGPEPKDQGLQKRASPVADIQEEILNAAVKDTQPKDGVEMDAPAAASEAPQDVTYAQLHSLTLRREATEPPPSQEREPPAEPSIYAPLAIH

SEQ ID NO: 46273 - protein, 590 aa, Homo sapiens
  Payload ID: 9420
  Gene Symbol: LILRB5
  Gene Name: leukocyte immunoglobulin-like receptor, subfamily B (with TM and ITIM domains), member 5
  Uniprot ID: O75023
  ENSP ID: ENSP00000320390
MTLTLSVLICLGLSVGPRTCVQAGTLPKPTLWAEPASVIARGKPVTLWCQGPLETEEYRLDKEGLPWARKRQNPLEPGAKAKFHIPSTVYDSAGRYRCYYETPAGWSEPSDPLELVATGFYAEPTLLALPSPVVASGGNVTLQCDTLDGLLTFVLVEEEQKLPRTLYSQKLPKGPSQALFPVGPVTPSCRWRFRCYYYYRKNPQVWSNPSDLLEILVPGVSRKPSLLIPQGSVVARGGSLTLQCRSDVGYDIFVLYKEGEHDLVQGSGQQPQAGLSQANFTLGPVSRSHGGQYRCYGAHNLSPRWSAPSDPLDILIAGLIPDIPALSVQPGPKVASGENVTLLCQSWHQIDTFFLTKEGAAHPPLCLKSKYQSYRHQAEFSMSPVTSAQGGTYRCYSAIRSYPYLLSSPSYPQELVVSGPSGDPSLSPTGSTPTPGPEDQPLTPTGLDPQSGLGRHLGVVTGVSVAFVLLLFLLLFLLLRHRHQSKHRTSAHFYRPAGAAGPEPKDQGLQKRASPVADIQEEILNAAVKDTQPKDGVEMDAPAAASEAPQDVTYAQLHSLTLRREATEPPPSQEREPPAEPSIYAPLAIH

SEQ ID NO: 46274 - protein, 591 aa, Homo sapiens
  Payload ID: 9420
  Gene Symbol: LILRB5
  Gene Name: leukocyte immunoglobulin-like receptor, subfamily B (with TM and ITIM domains), member 5
  Uniprot ID: O75023
  ENSP ID: ENSP00000406478
MTLTLSVLICLGLSVGPRTCVQAGTLPKPTLWAEPASVIARGKPVTLWCQGPLETEEYRLDKEGLPWARKRQNPLEPGAKAKFHIPSTVYDSAGRYRCYYETPAGWSEPSDPLELVATGFYAEPTLLALPSPVVASGGNVTLQCDTLDGLLTFVLVEEEQKLPRTLYSQKLPKGPSQALFPVGPVTPSCRWRFRCYYYYRKNPQVWSNPSDLLEILVPGVSRKPSLLIPQGSVVARGGSLTLQCRSDVGYDIFVLYKEGEHDLVQGSGQQPQAGLSQANFTLGPVSRSHGGQYRCYGAHNLSPRWSAPSDPLDILIAGLIPDIPALSVQPGPKVASGENVTLLCQSWHQIDTFFLTKEGAAHPPLCLKSKYQSYRHQAEFSMSPVTSAQGGTYRCYSAIRSYPYLLSSPSYPQELVVSGPSGDPSLSPTGSTPTPAGPEDQPLTPTGLDPQSGLGRHLGVVTGVSVAFVLLLFLLLFLLLRHRHQSKHRTSAHFYRPAGAAGPEPKDQGLQKRASPVADIQEEILNAAVKDTQPKDGVEMDAPAAASEAPQDVTYAQLHSLTLRREATEPPPSQEREPPAEPSIYAPLAIH

SEQ ID NO: 46275 - protein, 643 aa, Homo sapiens
  Payload ID: 9420
  Gene Symbol: LILRB5
  Gene Name: leukocyte immunoglobulin-like receptor, subfamily B (with TM and ITIM domains), member 5
  ENSP ID: ENSP00000478307
MTLTLSVLICLGLSVGPRTCVQAGTLPKPTLWAEPASVIARGKPVTLWCQGPLETEEYRLDKEGLPWARKRQNPLEPGAKAKFHIPSTVYDSAGRYRCYYETPAGWSEPSDPLELVATGFYAEPTLLALPSPVVASGGNVTLQCDTLDGLLTFVLVEEEQKLPRTLYSQKLPKGPSQALFPVGPVTPSCRWRFRCYYYYRKNPQVWSNPSDLLEILVPGVSRKPSLLIPQGSVVARGGSLTLQCRSDVGYDIFVLYKEGEHDLVQGSGQQPQAGLSQANFTLGPVSRSHGGQYRCYGAHNLSPRWSAPSDPLDILIAGLIPDIPALSVQPGPKVASGENVTLLCQSWHQIDTFFLTKEGAAHPPLCLKSKYQSYRHQAEFSMSPVTSAQGGTYRCYSAIRSYPYLLSSPSYPQELVVSGPSGDPSLSPTGSTPTPGPEDQPLTPTGLDPQSGLGRHLGVVTGVSVAFVLLLFLLLFLLLRHRHQSKHRTSAHFYRPAGAAGPEPKDQGLQKRASPVADIQEEILNAAVKDTQPKDGVEMDARQSPHDEDPQAVTYAPVKHSRPRREMASPPSPLSGEFLDTKDRQAEEDRQMDTEAAASEAPQDVTYAQLHSLTLRREATEPPPSQEREPPAEPSIYAPLAIH

SEQ ID NO: 46276 - protein, 590 aa, Homo sapiens
  Payload ID: 9420
  Gene Symbol: LILRB5
  Gene Name: leukocyte immunoglobulin-like receptor, subfamily B (with TM and ITIM domains), member 5
  Uniprot ID: O75023
  ENSP ID: ENSP00000478835
MTLTLSVLICLGLSVGPRTCVQAGTLPKPTLWAEPASVIARGKPVTLWCQGPLETEEYRLDKEGLPWARKRQNPLEPGAKAKFHIPSTVYDSAGRYRCYYETPAGWSEPSDPLELVATGFYAEPTLLALPSPVVASGGNVTLQCDTLDGLLTFVLVEEEQKLPRTLYSQKLPKGPSQALFPVGPVTPSCRWRFRCYYYYRKNPQVWSNPSDLLEILVPGVSRKPSLLIPQGSVVARGGSLTLQCRSDVGYDIFVLYKEGEHDLVQGSGQQPQAGLSQANFTLGPVSRSHGGQYRCYGAHNLSPRWSAPSDPLDILIAGLIPDIPALSVQPGPKVASGENVTLLCQSWHQIDTFFLTKEGAAHPPLCLKSKYQSYRHQAEFSMSPVTSAQGGTYRCYSAIRSYPYLLSSPSYPQELVVSGPSGDPSLSPTGSTPTPGPEDQPLTPTGLDPQSGLGRHLGVVTGVSVAFVLLLFLLLFLLLRHRHQSKHRTSAHFYRPAGAAGPEPKDQGLQKRASPVADIQEEILNAAVKDTQPKDGVEMDARAAASEAPQDVTYAQLHSLTLRREATEPPPSQEREPPAEPSIYAPLAIH

SEQ ID NO: 46277 - protein, 591 aa, Homo sapiens
  Payload ID: 9420
  Gene Symbol: LILRB5
  Gene Name: leukocyte immunoglobulin-like receptor, subfamily B (with TM and ITIM domains), member 5
  Uniprot ID: O75023
  ENSP ID: ENSP00000478912
MTLTLSVLICLGLSVGPRTCVQAGTLPKPTLWAEPASVIARGKPVTLWCQGPLETEEYRLDKEGLPWARKRQNPLEPGAKAKFHIPSTVYDSAGRYRCYYETPAGWSEPSDPLELVATGFYAEPTLLALPSPVVASGGNVTLQCDTLDGLLTFVLVEEEQKLPRTLYSQKLPKGPSQALFPVGPVTPSCRWRFRCYYYYRKNPQVWSNPSDLLEILVPGVSRKPSLLIPQGSVVARGGSLTLQCRSDVGYDIFVLYKEGEHDLVQGSGQQPQAGLSQANFTLGPVSRSHGGQYRCYGAHNLSPRWSAPSDPLDILIAGLIPDIPALSVQPGPKVASGENVTLLCQSWHQIDTFFLTKEGAAHPPLCLKSKYQSYRHQAEFSMSPVTSAQGGTYRCYSAIRSYPYLLSSPSYPQELVVSGPSGDPSLSPTGSTPTPAGPEDQPLTPTGLDPQSGLGRHLGVVTGVSVAFVLLLFLLLFLLLRHRHQSKHRTSAHFYRPAGAAGPEPKDQGLQKRASPVADIQEEILNAAVKDTQPKDGVEMDARAAASEAPQDVTYAQLHSLTLRREATEPPPSQEREPPAEPSIYAPLAIH

SEQ ID NO: 46278 - protein, 491 aa, Homo sapiens
  Payload ID: 9420
  Gene Symbol: LILRB5
  Gene Name: leukocyte immunoglobulin-like receptor, subfamily B (with TM and ITIM domains), member 5
  Uniprot ID: O75023
  ENSP ID: ENSP00000479022
MTLTLSVLICLGLSVGPRTCVQAGTLPKPTLWAEPASVIARGKPVTLWCQGPLETEEYRLDKEGLPWARKRQNPLEPGAKAKFHIPSTVYDSAGRYRCYYETPAGWSEPSDPLELVATGVSRKPSLLIPQGSVVARGGSLTLQCRSDVGYDIFVLYKEGEHDLVQGSGQQPQAGLSQANFTLGPVSRSHGGQYRCYGAHNLSPRWSAPSDPLDILIAGLIPDIPALSVQPGPKVASGENVTLLCQSWHQIDTFFLTKEGAAHPPLCLKSKYQSYRHQAEFSMSPVTSAQGGTYRCYSAIRSYPYLLSSPSYPQELVVSGPSGDPSLSPTGSTPTPAGPEDQPLTPTGLDPQSGLGRHLGVVTGVSVAFVLLLFLLLFLLLRHRHQSKHRTSAHFYRPAGAAGPEPKDQGLQKRASPVADIQEEILNAAVKDTQPKDGVEMDARAAASEAPQDVTYAQLHSLTLRREATEPPPSQEREPPAEPSIYAPLAIH

SEQ ID NO: 46279 - protein, 591 aa, Homo sapiens; identical to SEQ ID NO: 46277
  Payload ID: 9420
  Gene Symbol: LILRB5
  Gene Name: leukocyte immunoglobulin-like receptor, subfamily B (with TM and ITIM domains), member 5
  Uniprot ID: O75023
  ENSP ID: ENSP00000479413

SEQ ID NO: 46280 - protein, 158 aa, Homo sapiens
  Payload ID: 9420
  Gene Symbol: LILRB5
  Gene Name: leukocyte immunoglobulin-like receptor, subfamily B (with TM and ITIM domains), member 5
  ENSP ID: ENSP00000479798
MTLTLSVLICLGLSVGPRTCVQAGTLPKPTLWAEPASVIARGKPVTLWCQGPLETEEYRLDKEGLPWARKRQNPLEPGAKAKFHIPSTVYDSAGRYRCYYETPAGWSEPSDPLELVATGFYAEPTLLALPSPVVASGGNVTLQCDTLDGLLTFVLVEE

SEQ ID NO: 46281 - protein, 622 aa, Homo sapiens
  Payload ID: 9420
  Gene Symbol: LILRB5
  Gene Name: leukocyte immunoglobulin-like receptor, subfamily B (with TM and ITIM domains), member 5
  ENSP ID: ENSP00000480208
MTLTLSVLICLGLSVGPRTCVQAGTLPKPTLWAEPASVIARGKPVTLWCQGPLETEEYRLDKEGLPWARKRQNPLEPGAKAKFHIPSTVYDSAGRYRCYYETPAGWSEPSDPLELVATALPSPVVASGGNVTLQCDTLDGLLTFVLVEEEQKLPRTLYSQKLPKGPSQALFPVGPVTPSCRWRFRCYYYYRKNPQVWSNPSDLLEILVPGVSRKPSLLIPQGSVVARGGSLTLQCRSDVGYDIFVLYKEGEHDLVQGSGQQPQAGLSQANFTLGPVSRSHGGQYRCYGAHNLSPRWSAPSDPLDILIAGLIPDIPALSVQPGPKVASGENVTLLCQSWHQIDTFFLTKEGAAHPPLCLKSKYQSYRHQAEFSMSPVTSAQGGTYRCYSAIRSYPYLLSSPSYPQELVVSGPSGDPSLSPTGSTPTPAGPEDQPLTPTGLDPQSGLGRHLGVVTGVSVAFVLLLFLLLFLLLRHRHQSKHRTSAHFYRPAGAAGPEPKDQGLQKRASPVADIQEEILNAAVKDTQPKDGVEMDARQSPHDEDPQAVTYAEVKHSRPRREMASPPSPLSGEFLDTKDRQAEEDRQMDTERVLSSPGPQASPPPPRSLPLTLPRCRLLHLKPPRM

SEQ ID NO: 46282 - protein, 491 aa, Homo sapiens; identical to SEQ ID NO: 46278
  Payload ID: 9420
  Gene Symbol: LILRB5
  Gene Name: leukocyte immunoglobulin-like receptor, subfamily B (with TM and ITIM domains), member 5
  Uniprot ID: O75023
  ENSP ID: ENSP00000480909

SEQ ID NO: 46283 - protein, 591 aa, Homo sapiens; identical to SEQ ID NO: 46277
  Payload ID: 9420
  Gene Symbol: LILRB5
  Gene Name: leukocyte immunoglobulin-like receptor, subfamily B (with TM and ITIM domains), member 5
  Uniprot ID: O75023
  ENSP ID: ENSP00000481263

SEQ ID NO: 46284 - protein, 151 aa, Homo sapiens
  Payload ID: 9420
  Gene Symbol: LILRB5
  Gene Name: leukocyte immunoglobulin-like receptor, subfamily B (with TM and ITIM domains), member 5
  ENSP ID: ENSP00000481277
MTLTLSVLICLGLSVGPRTCVQAGTLPKPTLWAEPASVIARGKPVTLWCQGPLETEEYRLDKEGLPWARKRQNPLEPGAKAKFHIPSTVYDSAGRYRCYYETPAGWSEPSDPLELVATGFYAEPTLLALPSPVVASGGNVTLQCDTLDGLL

SEQ ID NO: 46285 - protein, 643 aa, Homo sapiens; identical to SEQ ID NO: 46275
  Payload ID: 9420
  Gene Symbol: LILRB5
  Gene Name: leukocyte immunoglobulin-like receptor, subfamily B (with TM and ITIM domains), member 5
  ENSP ID: ENSP00000481829

SEQ ID NO: 46286 - protein, 160 aa, Homo sapiens
  Payload ID: 9420
  Gene Symbol: LILRB5
  Gene Name: leukocyte immunoglobulin-like receptor, subfamily B (with TM and ITIM domains), member 5
  ENSP ID: ENSP00000481933
MTLTLSVLICLGLSVGPRTCVQAGTLPKPTLWAEPASVIARGKPVTLWCQGPLETEEYRLDKEGLPWARKRQNPLEPGAKAKFHIPSTVYDSAGRYRCYYETPAGWSEPSDPLELVATGFYAEPTLLALPSPVVASGGNVTLQCDTLDGLLTFVLVEEEQ

SEQ ID NO: 46287 - protein, 590 aa, Homo sapiens; identical to SEQ ID NO: 46276
  Payload ID: 9420
  Gene Symbol: LILRB5
  Gene Name: leukocyte immunoglobulin-like receptor, subfamily B (with TM and ITIM domains), member 5
  Uniprot ID: O75023
  ENSP ID: ENSP00000482062

SEQ ID NO: 46288 - protein, 490 aa, Homo sapiens
  Payload ID: 9420
  Gene Symbol: LILRB5
  Gene Name: leukocyte immunoglobulin-like receptor, subfamily B (with TM and ITIM domains), member 5
  ENSP ID: ENSP00000482365
MTLTLSVLICLGLSVGPRTCVQAGTLPKPTLWAEPASVIARGKPVTLWCQGPLETEEYRLDKEGLPWARKRQNPLEPGAKAKFHIPSTVYDSAGRYRCYYETPAGWSEPSDPLELVATGVSRKPSLLIPQGSVVARGGSLTLQCRSDVGYDIFVLYKEGEHDLVQGSGQQPQAGLSQANFTLGPVSRSHGGQYRCYGAHNLSPRWSAPSDPLDILIAGLIPDIPALSVQPGPKVASGENVTLLCQSWHQIDTFFLTKEGAAHPPLCLKSKYQSYRHQAEFSMSPVTSAQGGTYRCYSAIRSYPYLLSSPSYPQELVVSGPSGDPSLSPTGSTPTPGPEDQPLTPTGLDPQSGLGRHLGVVTGVSVAFVLLLFLLLFLLLRHRHQSKHRTSAHFYRPAGAAGPEPKDQGLQKRASPVADIQEEILNAAVKDTQPKDGVEMDARAAASEAPQDVTYAQLHSLTLRREATEPPPSQEREPPAEPSIYAPLAIH

SEQ ID NO: 46289 - protein, 491 aa, Homo sapiens; identical to SEQ ID NO: 46278
  Payload ID: 9420
  Gene Symbol: LILRB5
  Gene Name: leukocyte immunoglobulin-like receptor, subfamily B (with TM and ITIM domains), member 5
  Uniprot ID: O75023
  ENSP ID: ENSP00000482404

SEQ ID NO: 46290 - protein, 491 aa, Homo sapiens; identical to SEQ ID NO: 46278
  Payload ID: 9420
  Gene Symbol: LILRB5
  Gene Name: leukocyte immunoglobulin-like receptor, subfamily B (with TM and ITIM domains), member 5
  Uniprot ID: O75023
  ENSP ID: ENSP00000482535

SEQ ID NO: 46291 - protein, 590 aa, Homo sapiens; identical to SEQ ID NO: 46276
  Payload ID: 9420
  Gene Symbol: LILRB5
  Gene Name: leukocyte immunoglobulin-like receptor, subfamily B (with TM and ITIM domains), member 5
  Uniprot ID: O75023
  ENSP ID: ENSP00000483481

SEQ ID NO: 46292 - protein, 590 aa, Homo sapiens; identical to SEQ ID NO: 46276
  Payload ID: 9420
  Gene Symbol: LILRB5
  Gene Name: leukocyte immunoglobulin-like receptor, subfamily B (with TM and ITIM domains), member 5
  Uniprot ID: O75023
  ENSP ID: ENSP00000483502

SEQ ID NO: 46293 - protein, 591 aa, Homo sapiens; identical to SEQ ID NO: 46277
  Payload ID: 9420
  Gene Symbol: LILRB5
  Gene Name: leukocyte immunoglobulin-like receptor, subfamily B (with TM and ITIM domains), member 5
  Uniprot ID: O75023
  ENSP ID: ENSP00000483649

SEQ ID NO: 46294 - protein, 643 aa, Homo sapiens
  Payload ID: 9420
  Gene Symbol: LILRB5
  Gene Name: leukocyte immunoglobulin-like receptor, subfamily B (with TM and ITIM domains), member 5
  ENSP ID: ENSP00000483942
MTLTLSVLICLGLSVGPRTCVQAGTLPKPTLWAEPASVIARGKPVTLWCQGPLETEEYRLDKEGLPWARKRQNPLEPGAKAKFHIPSTVYDSAGRYRCYYETPAGWSEPSDPLELVATGFYAEPTLLALPSPVVASGGNVTLQCDTLDGLLTFVLVEEEQKLPRTLYSQKLPKGPSQALFPVGPVTPSCRWRFRCYYYYRKNPQVWSNPSDLLEILVPGVSRKPSLLIPQGSVVARGGSLTLQCRSDVGYDIFVLYKEGEHDLVQGSGQQPQAGLSQANFTLGPVSRSHGGQYRCYGAHNLSPRWSAPSDPLDILIAGLIPDIPALSVQPGPKVASGENVTLLCQSWHQIDTFFLTKEGAAHPPLCLKSKYQSYRHQAEFSMSPVTSAQGGTYRCYSAIRSYPYLLSSPSYPQELVVSGPSGDPSLSPTGSTPTPGPEDQPLTPTGLDPQSGLGRHLGVVTGVSVAFVLLLFLLLFLLLRHRHQSKHRTSAHFYRPAGAAGPEPKDQGLQKRASPVADIQEEILNAAVKDTQPKDGVEMDARQSPHDEDPQAVTYAEVKHSRPRREMASPPSPLSGEFLDTKDRQAEEDRQMDTEAAASEAPQDVTYAQLHSLTLRREATEPPPSQEREPPAEPSIYAPLAIH

SEQ ID NO: 46295 - protein, 264 aa, Homo sapiens
  Payload ID: 9421
  Gene Symbol: LENG1
  Gene Name: leukocyte receptor cluster (LRC) member 1
  Uniprot ID: Q96BZ8
  ENSP ID: ENSP00000222224
MNILPKKSWHVRNKDNVARVRRDEAQAREEEKERERRVLLAQQEARTEFLRKKARHQNSLPELEAAEAGAPGSGPVDLFRELLEEGKGVIRGNKEYKEEKRQEKERQEKALGILTYLGQSAAEAQTQPPWYQLPPGRGGPPPGPAPDEKIKSRLDPLREMQKHLGKKRQHGGDEGSRSRKEKEGSEKQRPKEPPSLDQLRAERLRREAAERSRAEALLARVQGRALQEGQPEEDETDDRRRRYNSQFNPQLARRPRQQDPHLTH

SEQ ID NO: 46296 - protein, 264 aa, Homo sapiens
  Payload ID: 9421
  Gene Symbol: LENG1
  Gene Name: leukocyte receptor cluster (LRC) member 1
  ENSP ID: ENSP00000477607
MNILPKKSWHVRNKDNVARVRRDEAQAREEEKERERRVLLAQQEARTEFLRKKARHQNSLPELEAAEAGAPGSGPVDLFRELLEEGKGVIRGNKEYEEEKRQEKERQEKALGILTYLGQSAAEAQTQPPWYQLPPGRGGPPPGPAPDEKIKSRLDPLREMQKHLGKKRQHGGDEGSRSRKEKEGSEKQRPKEPPSLDQLRAERLRREAAERSRAEALLARVQGRALQEGQPEEDETDDRRRRYNSQFNPQLARRPRQQDPHLTH

SEQ ID NO: 46297 - protein, 264 aa, Homo sapiens; identical to SEQ ID NO: 46296
  Payload ID: 9421
  Gene Symbol: LENG1
  Gene Name: leukocyte receptor cluster (LRC) member 1
  Uniprot ID: Q96BZ8
  ENSP ID: ENSP00000478485

SEQ ID NO: 46298 - protein, 264 aa, Homo sapiens; identical to SEQ ID NO: 46296
  Payload ID: 9421
  Gene Symbol: LENG1
  Gene Name: leukocyte receptor cluster (LRC) member 1
  ENSP ID: ENSP00000479538

SEQ ID NO: 46299 - protein, 264 aa, Homo sapiens; identical to SEQ ID NO: 46296
  Payload ID: 9421
  Gene Symbol: LENG1
  Gene Name: leukocyte receptor cluster (LRC) member 1
  ENSP ID: ENSP00000480516

SEQ ID NO: 46300 - protein, 264 aa, Homo sapiens; identical to SEQ ID NO: 46296
  Payload ID: 9421
  Gene Symbol: LENG1
  Gene Name: leukocyte receptor cluster (LRC) member 1
  ENSP ID: ENSP00000481079

SEQ ID NO: 46301 - protein, 264 aa, Homo sapiens; identical to SEQ ID NO: 46296
  Payload ID: 9421
  Gene Symbol: LENG1
  Gene Name: leukocyte receptor cluster (LRC) member 1
  Uniprot ID: Q96BZ8
  ENSP ID: ENSP00000481252

SEQ ID NO: 46302 - protein, 264 aa, Homo sapiens; identical to SEQ ID NO: 46296
  Payload ID: 9421
  Gene Symbol: LENG1
  Gene Name: leukocyte receptor cluster (LRC) member 1
  Uniprot ID: Q96BZ8
  ENSP ID: ENSP00000481386

SEQ ID NO: 46303 - protein, 264 aa, Homo sapiens; identical to SEQ ID NO: 46296
  Payload ID: 9421
  Gene Symbol: LENG1
  Gene Name: leukocyte receptor cluster (LRC) member 1
  Uniprot ID: Q96BZ8
  ENSP ID: ENSP00000481948

SEQ ID NO: 46304 - protein, 264 aa, Homo sapiens; identical to SEQ ID NO: 46296
  Payload ID: 9421
  Gene Symbol: LENG1
  Gene Name: leukocyte receptor cluster (LRC) member 1
  ENSP ID: ENSP00000483164

SEQ ID NO: 46305 - protein, 800 aa, Homo sapiens
  Payload ID: 9422
  Gene Symbol: LENG8
  Gene Name: leukocyte receptor cluster (LRC) member 8
  Uniprot ID: Q96PV6
  ENSP ID: ENSP00000318374
MAANVGDQRSTDWSSQYSMVAGAGRENGMETPMHENPEWEKARQALASISKSGAAGGSAKSSSNGPVASAQYVSQAEASALQQQQYYQWYQQYNYAYPYSYYYPMSMYQSYGSPSQYGMAGSYGSATPQQPSAPQHQGTLNQPPVPGMDESMSYQAPPQQLPSAQPPQPSNPPHGAHTLNSGPQPGTAPATQHSQAGPATGQAYGPHTYTEPAKPKKGQQLWNRMKPAPGTGGLKFNIQKRPFAVTTQSFGSNAEGQHSGFGPQPNPEKVQNHSGSSARGNLSGKPDDWPQDMKEYVERCFTACESEEDKDRTEKLLKEVLQARLQDGSAYTIDWSREPLPGLTREPVAESPKKKRWEAASSLHPPRGAGSATRGGGAPSQRGTPGAGGAGRARGNSFTKFGNRNVFMKDNSSSSSTDSRSRSSSRSPTRHFRRSDSHSDSDSSYSGNECHPVGRRNPPPKGRGGRGAHMDRGRGRAQRGKRHDLAPTKRSRKKMAALECEDPERELKKQKRAARFQHGHSRRLRLEPLVLQMSSLESSGADPDWQELQIVGTCPDITKHYLRLTCAPDPSTVRPVAVLKKSLCMVKCHWKEKQDYAFACEQMKSIRQDLTVQGIRTEFTVEVYETHARIALEKGDHEEFNQCQTQLKSLYAENLPGNVGEFTAYRILYYIFTKNSGDITTELAYLTRELKADPCVAHALALRTAWALGNYHRFFRLYCHAPCMSGYLVDKFADRERKVALKAMIKTFRPALPVSYLQAELAFEGEAACRAFLEPLGLAYTGPDNSSIDCRLSLAQLSAF

SEQ ID NO: 46306 - protein, 837 aa, Homo sapiens
  Payload ID: 9422
  Gene Symbol: LENG8
  Gene Name: leukocyte receptor cluster (LRC) member 8
  ENSP ID: ENSP00000365697
MAANVGDQRSTDWSSQYSMVAGAGRENGMETPMHENPEWEKARQALASISKSGAAGGSAKSSSNGPVASAQYVSQAEASALQQQQYYQWYQQYNYAYPYSYYYPMPPVPGMDESMSYQAPPQQLPSAQPPQPSNPPHGAHTLNSGPQPGTAPATQHSQAGPATGQAYGPHTYTEPAKPKKGQQLWNRMKPAPGTGGLKFNIQKRPFAVTTQSFGSNAEGQHSGFGPQPNPEKVQNHSGSSARGNLSGKPDDWPQDMKEYVERCFTACESEEDKDRTEKLLKEVLQARLQDGSAYTIDWSREPLPGLTREPVAESPKKKRWEAASSLHPPRGAGSATRGGGAPSQRGTPGAGGAGRARGNSFTKFGNRNVFMKDNSSSSSTDSRSRSSSRSPTRHFRRSDSHSDSDSSYSGNECHPVGRRNPPPKGRGGRGAHMDRGRGRAQRGKRHDLAPTKRSRKKMAALECEDPERELKKQKRAARFQHGHSRRLRLEPLVLQMSSLESSGADPDWQELQIVGTCPDITKHYLRLTCAPDPSTVRPVAVLKKSLCMVKCHWKEKQDYAFACEQMKSIRQDLTVQGIRTEFTVEVYETHARIALEKGDHEEFNQCQTQLKSLYAENLPGNVGEFTAYRILYYIFTKNSGDITTELAYLTRELKADPCVAHALALRTAWALGNYHRFFRLYCHAPCMSGYLVDKFADRERKVALKAMIKTYVVPSSLLPLLFPSFRLAPPLRPAPGRRPPPAPNPCPGPCFPIIFLHSALPSPVPLALLVGHLCVPGHSSPSPHCSQLTASGASSPPHLCVSSSCSLLPGPPSSLLALGFLRTLRSLLSQLVAVLPP

SEQ ID NO: 46307 - protein, 91 aa, Homo sapiens
  Payload ID: 9422
  Gene Symbol: LENG8
  Gene Name: leukocyte receptor cluster (LRC) member 8
  ENSP ID: ENSP00000390010
MAANVGDQRSTDWSSQYSMVAGAGRENGMETPMHENPEWEKARQALASISKSGAAGGSAKSSSNGPVASAQYVSQAEASALQQQQYYQWYQ

SEQ ID NO: 46308 - protein, 111 aa, Homo sapiens
  Payload ID: 9422
  Gene Symbol: LENG8
  Gene Name: leukocyte receptor cluster (LRC) member 8
  ENSP ID: ENSP00000390612
HRFFRLYCHAPCMSGYLVDKFADRERKVALKAMIKTVFSLSLSSLHSGTRPGALAHPMPGGQWKEDRPSSPCPPAAGAPSKPAHRPLPHLLRHRLLFPAPWGLRVWGGGAA

SEQ ID NO: 46309 - protein, 300 aa, Homo sapiens
  Payload ID: 9422
  Gene Symbol: LENG8
  Gene Name: leukocyte receptor cluster (LRC) member 8
  ENSP ID: ENSP00000399507
MAANVGDQRSTDWSSQYSMVAGAGRENGMETPMHENPEWEKARQALASISKSGAAGGSAKSSSNGPVASAQYVSQAEASALQQQQYYQWYQQYNYAYPYSYYYPMSMYQSYGSPSQYGMAGSYGSATPQQPSAPQHQGTLNQPPVPGMDESMSYQAPPQQLPSAQPPQPSNPPHGAHTLNSGPQPGTAPATQHSQAGPATGQAYGPHTYTEPAKPKKGQQLWNRMKPAPGTGGLKFNIQKRPFAVTTQSFGSNAEGQHSGFGPQPNPEKVQNHSGSSARGNLSGKPDDWPQDMKEYVERC

SEQ ID NO: 46310 - protein, 75 aa, Homo sapiens
  Payload ID: 9422
  Gene Symbol: LENG8
  Gene Name: leukocyte receptor cluster (LRC) member 8
  ENSP ID: ENSP00000412780
MVAGAGRENGMETPMHENPEWEKARQALASISKSGAAGGSAKSSSNGPVASAQYVSQAEASALQQQQYYQWYQQY

SEQ ID NO: 46311 - protein, 781 aa, Homo sapiens
  Payload ID: 9422
  Gene Symbol: LENG8
  Gene Name: leukocyte receptor cluster (LRC) member 8
  ENSP ID: ENSP00000477813
MAANVGDQRSTDWSSQYSMVAGAGRENGMETPMHENPEWEKARQALASISKSGAAGGSAKSSSNGPVASAQYVSQAEASALQQQQYYQWYQQYNYAYPYSYYYPMPPVPGMDESMSYQAPPQQLPSAQPPQPSNPPHGAHTLNSGPQPGTAPATQHSQAGPATGQAYGPHTYTEPAKPKKGQQLWNRMKPAPGTGGLKFNIQKRPFAVTTQSFGSNAEGQHSGFGPQPNPEKVQNHSGSSARGNLSGKPDDWPQDMKEYVERCFTACESEEDKDRTEKLLKEVLQARLQDGSAYTIDWSREPLPGLTREPVAESPKKKRWEAASSLHPPRGAGSATRGGGAPSQRGTPGAGGAGRARGNSFTKFGNRNVFMKDNSSSSSTDSRSRSSSRSPTRHFRRSDSHSDSDSSYSGNECHPVGRRNPPPKGRGGRGAHMDRGRGRAQRGKRHDLAPTKRSRKKMAALECEDPERELKKQKRAARFQHGHSRRLRLEPLVLQMSSLESSGADPDWQELQIVGTCPDITKHYLRLTCAPDPSTVRPVAVLKKSLCMVKCHWKEKQDYAFACEQMKSIRQDLTVQGIRTEFTVEVYETHARIALEKGDHEEFNQCQTQLKSLYAENLPGNVGEFTAYRILYYIFTKNSGDITTELAYLTRELKADPCVAHALALRTAWALGNYHRFFRLYCHAPCMSGYLVDKFADRERKVALKAMIKTYVVPSSLLPLLFPSFRLVSSCIKLSPCPLLPLPPVFLLIFFSPFPPSLSAFFPWFSTGKTVPPSLPPSSAM

SEQ ID NO: 46312 - protein, 91 aa, Homo sapiens; identical to SEQ ID NO: 46307
  Payload ID: 9422
  Gene Symbol: LENG8
  Gene Name: leukocyte receptor cluster (LRC) member 8
  ENSP ID: ENSP00000478323

SEQ ID NO: 46313 - protein, 800 aa, Homo sapiens; identical to SEQ ID NO: 46305
  Payload ID: 9422
  Gene Symbol: LENG8
  Gene Name: leukocyte receptor cluster (LRC) member 8
  Uniprot ID: Q96PV6
  ENSP ID: ENSP00000478337

SEQ ID NO: 46314 - protein, 874 aa, Homo sapiens
  Payload ID: 9422
  Gene Symbol: LENG8
  Gene Name: leukocyte receptor cluster (LRC) member 8
  ENSP ID: ENSP00000478590
MAANVGDQRSTDWSSQYSMVAGAGRENGMETPMHENPEWEKARQALASISKSGAAGGSAKSSSNGPVASAQYVSQAEASALQQQQYYQWYQQYNYAYPYSYYYPMSMYQSYGSPSQYGMAGSYGSATPQQPSAPQHQGTLNQPPVPGMDESMSYQAPPQQLPSAQPPQPSNPPHGAHTLNSGPQPGTAPATQHSQAGPATGQAYGPHTYTEPAKPKKGQQLWNRMKPAPGTGGLKFNIQKRPFAVTTQSFGSNAEGQHSGFGPQPNPEKVQNHSGSSARGNLSGKPDDWPQDMKEYVERCFTACESEEDKDRTEKLLKEVLQARLQDGSAYTIDWSREPLPGLTREPVAESPKKKRWEAASSLHPPRGAGSATRGGGAPSQRGTPGAGGAGRARGNSFTKFGNRNVFMKDNSSSSSTDSRSRSSSRSPTRHFRRSDSHSDSDSSYSGNECHPVGRRNPPPKGRGGRGAHMDRGRGRAQRGKRHDLAPTKRSRKKMAALECEDPERELKKQKRAARFQHGHSRRLRLEPLVLQMSSLESSGADPDWQELQIVGTCPDITKHYLRLTCAPDPSTVRPVAVLKKSLCMVKCHWKEKQDYAFACEQMKSIRQDLTVQGIRTEFTVEVYETHARIALEKGDHEEFNQCQTQLKSLYAENLPGNVGEFTAYRILYYIFTKNSGDITTELAYLTRELKADPCVAHALALRTAWALGNYHRFFRLYCHAPCMSGYLVDKFADRERKVALKAMIKTYVVPSSLLPLLFPSFRLAPPLRPAPGRRPPPAPNPCPGPCFPIIFLHSALPSPVPLALLVGHLCVPGHSSPSPHCSQLTASGASSPPHLCVSSSCSLLPGPPSSLLALGFLRTLRSLLSQLVAVLPP

SEQ ID NO: 46315 - protein, 800 aa, Homo sapiens; identical to SEQ ID NO: 46305
  Payload ID: 9422
  Gene Symbol: LENG8
  Gene Name: leukocyte receptor cluster (LRC) member 8
  Uniprot ID: Q96PV6
  ENSP ID: ENSP00000478975

SEQ ID NO: 46316 - protein, 781 aa, Homo sapiens; identical to SEQ ID NO: 46311
  Payload ID: 9422
  Gene Symbol: LENG8
  Gene Name: leukocyte receptor cluster (LRC) member 8
  ENSP ID: ENSP00000479293

SEQ ID NO: 46317 - protein, 800 aa, Homo sapiens; identical to SEQ ID NO: 46305
  Payload ID: 9422
  Gene Symbol: LENG8
  Gene Name: leukocyte receptor cluster (LRC) member 8
  Uniprot ID: Q96PV6
  ENSP ID: ENSP00000480663

SEQ ID NO: 46318 - protein, 151 aa, Homo sapiens
  Payload ID: 9422
  Gene Symbol: LENG8
  Gene Name: leukocyte receptor cluster (LRC) member 8
  ENSP ID: ENSP00000480782
MVAGAGRENGMETPMHENPEWEKARQALASISKSGAAGGSAKSSSNGPVASAQYVSQAEASALQQQQYYQWYQQYNYAYPYSYYYPMPPVPGMDESMSYQAPPQQLPSAQPPQPSNPPHGAHTLNSGPQPGTAPATQHSQAGPATGQAYGP

SEQ ID NO: 46319 - protein, 91 aa, Homo sapiens; identical to SEQ ID NO: 46307
  Payload ID: 9422
  Gene Symbol: LENG8
  Gene Name: leukocyte receptor cluster (LRC) member 8
  ENSP ID: ENSP00000480833

SEQ ID NO: 46320 - protein, 781 aa, Homo sapiens; identical to SEQ ID NO: 46311
  Payload ID: 9422
  Gene Symbol: LENG8
  Gene Name: leukocyte receptor cluster (LRC) member 8
  ENSP ID: ENSP00000481040

SEQ ID NO: 46321 - protein, 726 aa, Homo sapiens
  Payload ID: 9422
  Gene Symbol: LENG8
  Gene Name: leukocyte receptor cluster (LRC) member 8
  ENSP ID: ENSP00000481462
  MOD_RES (1)..(1): Any amino acid
XESMSYQAPPQQLPSAQPPQPSNPPHGAHTLNSGPQPGTAPATQHSQAGPATGQAYGPHTYTEPAKPKKGQQLWNRMKPAPGTGGLKFNIQKRPFAVTTQSFGSNAEGQHSGFGPQPNPEKVQNHSGSSARGNLSGKPDDWPQDMKEYVERCFTACESEEDKDRTEKLLKEVLQARLQDGSAYTIDWSREPLPGLTREPVAESPKKKRWEAASSLHPPRGAGSATRGGGAPSQRGTPGAGGAGRARGNSFTKFGNRNVFMKDNSSSSSTDSRSRSSSRSPTRHFRRSDSHSDSDSSYSGNECHPVGRRNPPPKGRGGRGAHMDRGRGRAQRGKRHDLAPTKRSRKKMAALECEDPERELKKQKRAARFQHGHSRRLRLEPLVLQMSSLESSGADPDWQELQIVGTCPDITKHYLRLTCAPDPSTVRPVAVLKKSLCMVKCHWKEKQDYAFACEQMKSIRQDLTVQGIRTEFTVEVYETHARIALEKGDHEEFNQCQTQLKSLYAENLPGNVGEFTAYRILYYIFTKNSGDITTELAYLTRELKADPCVAHALALRTAWALGNYHRFFRLYCHAPCMSGYLVDKFADRERKVALKAMIKTYVVPSSLLPLLFPSFRLAPPLRPAPGRRPPPAPNPCPGPCFPIIFLHSALPSPVPLALLVGHLCVPGHSSPSPHCSQLTASGASSPPHLCVSSSCSLLPGPPSSLLALGFLRTLRSLLSQLVAVLPP

SEQ ID NO: 46322 - protein, 726 aa, Homo sapiens; identical to SEQ ID NO: 46321
  Payload ID: 9422
  Gene Symbol: LENG8
  Gene Name: leukocyte receptor cluster (LRC) member 8
  ENSP ID: ENSP00000481768
  MOD_RES (1)..(1): Any amino acid

SEQ ID NO: 46323 - protein, 726 aa, Homo sapiens; identical to SEQ ID NO: 46321
  Payload ID: 9422
  Gene Symbol: LENG8
  Gene Name: leukocyte receptor cluster (LRC) member 8
  ENSP ID: ENSP00000482405
  MOD_RES (1)..(1): Any amino acid

SEQ ID NO: 46324 - protein, 91 aa, Homo sapiens; identical to SEQ ID NO: 46307
  Payload ID: 9422
  Gene Symbol: LENG8
  Gene Name: leukocyte receptor cluster (LRC) member 8
  ENSP ID: ENSP00000482778

SEQ ID NO: 46325 - protein, 199 aa, Homo sapiens
  Payload ID: 9422
  Gene Symbol: LENG8
  Gene Name: leukocyte receptor cluster (LRC) member 8
  ENSP ID: ENSP00000484429
MAANVGDQRSTDWSSQYSMVAGAGRENGMETPMHENPEWEKARQALASISKSGAAGGSAKSSSNGPVASAQYVSQAEASALQQQQYYQWYQQYNYAYPYSYYYPMSMYQSYGSPSQYGMAGSYGSATPQQPSAPQHQGTLNQPPVPGMDESMSYQAPPQQLPSAQPPQPSNPPHGAHTLNSGPQPGTAPATQHSQAGPA

SEQ ID NO: 46326 - protein, 781 aa, Homo sapiens; identical to SEQ ID NO: 46311
  Payload ID: 9422
  Gene Symbol: LENG8
  Gene Name: leukocyte receptor cluster (LRC) member 8
  ENSP ID: ENSP00000484494

SEQ ID NO: 46327 - protein, 111 aa, Homo sapiens; identical to SEQ ID NO: 46308
  Payload ID: 9422
  Gene Symbol: LENG8
  Gene Name: leukocyte receptor cluster (LRC) member 8
  ENSP ID: ENSP00000484735

SEQ ID NO: 46328 - protein, 501 aa, Homo sapiens
  Payload ID: 9423
  Gene Symbol: LENG9
  Gene Name: leukocyte receptor cluster (LRC) member 9
  Uniprot ID: Q96B70
  ENSP ID: ENSP00000477636
MGSRPPCGATSSARRACQFPAPMAAAREPELPQEAPATEPAPPPACRFFLEGRCRFGARCRQPHPGAPAPPGREAQPEAGAKKPPLRTAADVIQRIRWDPRLDPADFSVGYVDRFLGVREEPFSAFCWDQPLAALGPGVLAVPQHRVRFFRFHGRLVWDRASRTDLVFGSGSAAGRGPTILDAPNTEGAHGAEGAEWTLAGTGQEAQAAPKRGSTRPLCTGHQEPGVEEPGELEAAQERALGTAADLGTLAPRGRLAGVTEEALKPTAATRTTLLGGKEAQALGVPGGSAETTEAEWGPAAWPEDKRARLSVAAPCQPRPTHFVALMVTEPGLQAEVTKAQEYLVHVAPHCANFLVPSQNLHLTLALLRLAGAGEEAAAIGALRRALLAPGLNAPPRLSFRKLVLLGPHVLCAPPSPTLESMAQVLSQRLEAEGLSTLQSPGQLHPHLTVAKVPHGSQVHLPKLEFTLSQEVGCQPLQTLWLCRIGRTGGPFQPLAEIRLE

SEQ ID NO: 46329 - protein, 478 aa, Homo sapiens
  Payload ID: 9423
  Gene Symbol: LENG9
  Gene Name: leukocyte receptor cluster (LRC) member 9
  ENSP ID: ENSP00000478498
MAAAREPELPQEAPATEPAPPPACRFFLEGRCRFGARCRQPHPGAPAPPGREAQPEAGAKKPPLRTAADVIQRIRWDPRLDPADFSVGYVDRFLGVREEPFSAFCWDQPLAALGPGVLAVPQHRVRFFRFRGRLVWDRASRTDLVFGSGSAAGRGPTILDAPNTEGAHGAEGAEWTLAGTGQEAQAAPKRGSTRPLCTGHQEPGVEEPGELEAAQERALGTAADLGTLAPRGRLAGVTEALKPTAATRTTLLGGKEAQALGVPGGSAETTEAEWGPAAWPEDKRARLSVAAPCQPRPTHFVALMVTEPGLQAEVTKAQEYLVHVAPHCANFLVPSQNLHLTLALLRLAGAGEEAAAIGALRRALLAPGLNAPPRLSFRKLVLLGPHVLCAPPSPTLESMAQVLSQRLEAEGLSTLQSPGQLHPHLTVAKVPHGSQVHLPKLEFTLSQEVGCQPLQTLWLCRIGRTGGPFQPLAEIPLE

SEQ ID NO: 46330 - protein, 478 aa, Homo sapiens; identical to SEQ ID NO: 46329
  Payload ID: 9423
  Gene Symbol: LENG9
  Gene Name: leukocyte receptor cluster (LRC) member 9
  ENSP ID: ENSP00000479355

SEQ ID NO: 46331 - protein, 501 aa, Homo sapiens; identical to SEQ ID NO: 46328
  Payload ID: 9423
  Gene Symbol: LENG9
  Gene Name: leukocyte receptor cluster (LRC) member 9
  Uniprot ID: Q96B70
  ENSP ID: ENSP00000483600

SEQ ID NO: 46332 - protein, 864 aa, Homo sapiens
  Payload ID: 9424
  Gene Symbol: LTK
  Gene Name: leukocyte receptor tyrosine kinase
  Uniprot ID: P29376
  ENSP ID: ENSP00000263800
MGCWGQLLVWFGAAGAILCSSPGSQETFLRSSPLPLASPSPRDPKVSAPPSILEPASPLNSPGTEGSWLFSTCGASGRHGPTQTQCDGAYAGTSVVVTVGAAGQLRGVQLWRVPGPGQYLISAYGAAGGKGAKNHLSRAHGVFVSAIFSLGLGESLYILVGQQGEDACPGGSPESQLVCLGESRAVEEHAAMDGSEGVPGSRRWAGGGGGGGGATYVFRVRAGELEPLLVAAGGGGRAYLRPRDRGRTQASPEKLENRSEAPGSGGRGGAAGGGGGWTSRAPSPQAGRSLQEGAEGGQGCSEAWATLGWAAAGGFGGGGGACTAGGGGGGYRGGDASETDNLWADGEDGVSFIHPSSELFLQPLAVTENHGEVEIRRHLNCSHCPLRDCQWQAELQLAECLCPEGMELAVDNVTCMDLHKPPGPLVLMVAVVATSTLSLLMVCGVLILVKQKKWQGLQEMRLPSPELELSKLRTSAIRTAPNPYYCQVGLGPAQSWPLPPGVTEVSPANVTLLRALGHGAFGEVYEGLVIGLPGDSSPLQVAIKTLPELCSPQDELDFLMEALIISKFRHQNIVRCVGLSLRATPRLILLELMSGGDMKSFLRHSRPHLGQPSPLVMRDLLQLAQDIAQGCHYLEENHFIHRDIAARNCLLSCAGPSRVAKIGDFGMARDIYRASYYRRGDRALLPVKWMPPEAFLEGIFTSKTDSWSFGVLLWEIFSLGYMPYPGRTNQEVLDFVVGGGRMDPPRGCPGPVYRIMTQCWQHEPELRPSFASILERLQYCTQDPDVLNSLLPMELGPTPEEEGTSGLGNRSLECLRPPQPQELSPEKLKSWGGSPLGPWLSSGLKPLKSRGLQPQNLWNPTYRS

SEQ ID NO: 46333 - protein, 803 aa, Homo sapiens
  Payload ID: 9424
  Gene Symbol: LTK
  Gene Name: leukocyte receptor tyrosine kinase
  Uniprot ID: P29376
  ENSP ID: ENSP00000347293
MGCWGQLLVWFGAAGAILCSSPGSQETFLRSSPLPLASPSPRDPKVSAPPSILEPASPLNSPGTEGSWLFSTCGASGRHGPTQTQCDGAYAGTSVVVTVGAAGQLRGVQLWRVPGPGQYLISAYGAAGGKGAKNHLSRAHGVFVSAIFSLGLGESLYILVGQQGEDACPGGSPESQLVCLGESRAVEEHAAMDGSEGVPGSRRWAGGGGGGGGATYVFRVRAGELEPLLVAAGGGGRAYLRPRDRGRTQASPEKLENRSEAPGSGGRGGAAGGDASETDNLWADGEDGVSFIHPSSELFLQPLAVTENHGEVEIRRHLNCSHCPLRDCQWQAELQLAECLCPEGMELAVDNVTCMDLHKPPGPLVLMVAVVATSTLSLLMVCGVLILVKQKKWQGLQEMRLPSPELELSKLRTSAIRTAPNPYYCQVGLGPAQSWPLPPGVTEVSPANVTLLRALGHGAFGEVYEGLVIGLPGDSSPLQVAIKTLPELCSPQDELDFLMEALIISKFRHQNIVRCVGLSLRATPRLILLELMSGGDMKSFLRHSRPHLGQPSPLVMRDLLQLAQDIAQGCHYLEENHFIHRDIAARNCLLSCAGPSRVAKIGDFGMARDIYRASYYRRGDRALLPVKWMPPEAFLEGIFTSKTDSWSFGVLLWEIFSLGYMPYPGRTNQEVLDFVVGGGRMDPPRGCPGPVYRIMTQCWQHEPELRPSFASILERLQYCTQDPDVLNSLLPMELGPTPEEEGTSGLGNRSLECLRPPQPQELSPEKLKSWGGSPLGPWLSSGLKPLKSRGLQPQNLWNPTYRS

SEQ ID NO: 46334 - protein, 734 aa, Homo sapiens
  Payload ID: 9424
  Gene Symbol: LTK
  Gene Name: leukocyte receptor tyrosine kinase
  Uniprot ID: P29376
  ENSP ID: ENSP00000392196
MGCWGQLLVWFGAAGAILCSSPGSQETFLRSSPLPLASPSPRDPKVSAPPSILEPASPLNSPGTEGSWLFSTCGASGRHGPTQTQCDGAYAGTSVVVTVGAAGQLRGVQLWRVPGPGQYLISAYGAAGGKGAKNHLSRAHGVFVSAIFSLGLGESLYILVGQQGEDACPGGSPESQLVCLGESRAVEEHAAMDGSEGVPGSRRWAGGGGGGGGATYVFRVRAGELEPLLVAAGGGGRAYLRPRDRGRTQASPEKLENRSEAPGSGGRGGAAGGDASETDNLWADGEDGVSFIHPSSELFLQPLAVTENHGEVEIRRHLNCSHCPLRDCQWQAELQLAECLCPEGMELAVDNVTCMDLHKPPGPLVLMVAVVATSTLSLLMVCGVLILGGAWPGPVLASATRCHRGFPSQCYSAQTLPELCSPQDELDFLMEALIISKFRHQNIVRCVGLSLRATPRLILLELMSGGDMKSFLRHSRPHLGQPSPLVMRDLLQLAQDIAQGCHYLEENHFIHRDIAARNCLLSCAGPSRVAKIGDFGMARDIYRASYYRRGDRALLPVKWMPPEAFLEGIFTSKTDSWSFGVLLWEIFSLGYMPYPGRTNQEVLDFVVGGGRMDPPRGCPGPVYRIMTQCWQHEPELRPSFASILERLQYCTQDPDVLNSLLPMELGPTPEEEGTSGLGNRSLECLRPPQPQELSPEKLKSWGGSPLGPWLSSGLKPLKSRGLQPQNLWNPTYRS

SEQ ID NO: 46335 - protein, 562 aa, Homo sapiens
  Payload ID: 9424
  Gene Symbol: LTK
  Gene Name: leukocyte receptor tyrosine kinase
  ENSP ID: ENSP00000458111
MGCWGQLLVWFGAAGGDASETDNLWADGEDGVSFIHPSSELFLQPLAVTENHGEVEIRRHLNCSHCPLRDCQWQAELQLAECLCPEGMELAVDNVTCMDLHKPPGPLVLMVAVVATSTLSLLMVCGVLILGTKRLAGTVDSRLLLSMKQKKWQGLQEMRLPSPELELSKLRTSAIRTAPNPYYCQVGLGPAQSWPLPPGVTEVSPANVTLLRALGHGAFGEVYEGLVIGLPGDSSPLQVAIKTLPELCSPQDELDFLMEALIISKFRHQNIVRCVGLSLRATPRLILLELMSGGDMKSFLRHSRPHLGQPSPLVMRDLLQLAQDIAQGCHYLEENHFIHRDIAARNCLLSCAGPSRVAKIGDFGMARDIYRASYYRRGDRALLPVKWMPPEAFLEGIFTSKTDSWSFGVLLWEIFSLGYMPYPGRTNQEVLDFVVGGGRMDPPRGCPGPVYRIMTQCWQHEPELRPSFASILERLQYCTQDPDVLNSLLPMELGPTPEEEGTSGLGNRSLECLRPPQPQELSPEKLKSWGGSPLGPWLSSGLKPLKSRGLQPQNLWNPTYRS

SEQ ID NO: 46336 - protein, 28 aa, Homo sapiens
  Payload ID: 9425
  Gene Symbol: LST1
  Gene Name: leukocyte specific transcript 1
  ENSP ID: ENSP00000211921
MLSRNDGPGLLRAGTPLCISAEAASAQQ

SEQ ID NO: 46337 - protein, 59 aa, Homo sapiens
  Payload ID: 9425
  Gene Symbol: LST1
  Gene Name: leukocyte specific transcript 1
  Uniprot ID: O00453
  ENSP ID: ENSP00000303649
MLSRNDDICIYGGLGLGGLLLLAVVLLSACLCWLHRRGPGLLRAGTPLCISAEAASAQQ

SEQ ID NO: 46338 - protein, 66 aa, Homo sapiens
  Payload ID: 9425
  Gene Symbol: LST1
  Gene Name: leukocyte specific transcript 1
  Uniprot ID: O00453
  ENSP ID: ENSP00000339201
MLSRNDDICIYGGLGLGGLLLLAVVLLSACLCWLHRRAPSVLVPGPGLLRAGTPLCISAEAASAQQ

SEQ ID NO: 46339 - protein, 73 aa, Homo sapiens
  Payload ID: 9425
  Gene Symbol: LST1
  Gene Name: leukocyte specific transcript 1
  Uniprot ID: O00453
  ENSP ID: ENSP00000365254
MLSRNDVKRLERSWHLLSWSQAQGSSEQELHYASLQRLPVPSSEGPDLRGRDKRGTKEDPRADYACIAENKPT

SEQ ID NO: 46340 - protein, 66 aa, Homo sapiens
  Payload ID: 9425
  Gene Symbol: LST1
  Gene Name: leukocyte specific transcript 1
  Uniprot ID: O00453
  ENSP ID: ENSP00000365257
MLSRNDVKRLERSWAQGSSEQELHYASLQRLPVPSSEGPDLRGRDKRGTKEDPRADYACIAENKPT

SEQ ID NO: 46341 - protein, 28 aa, Homo sapiens
  Payload ID: 9425
  Gene Symbol: LST1
  Gene Name: leukocyte specific transcript 1
  ENSP ID: ENSP00000365258
MLSRNDGPGLLRAGTPLCISAEAASAQQ

SEQ ID NO: 46342 - protein, 35 aa, Homo sapiens
  Payload ID: 9425
  Gene Symbol: LST1
  Gene Name: leukocyte specific transcript 1
  Uniprot ID: O00453
  ENSP ID: ENSP00000365260
MLSRNDAPSVLVPGPGLLRAGTPLCISAEAASAQQ

SEQ ID NO: 46343 - protein, 104 aa, Homo sapiens
  Payload ID: 9425
  Gene Symbol: LST1
  Gene Name: leukocyte specific transcript 1
  Uniprot ID: O00453
  ENSP ID: ENSP00000365261
MLSRNDDICIYGGLGLGGLLLLAVVLLSACLCWLHRRVKRLERSWHLLSWSQAQGSSEQELHYASLQRLPVPSSEGPDLRGRDKRGTKEDPRADYACIAENKPT

SEQ ID NO: 46344 - protein, 13 aa, Homo sapiens
  Payload ID: 9425
  Gene Symbol: LST1
  Gene Name: leukocyte specific transcript 1
  Uniprot ID: O00453
  ENSP ID: ENSP00000365264
MLSRNDEAASAQQ

SEQ ID NO: 46345 - protein, 28 aa, Homo sapiens
  Payload ID: 9425
  Gene Symbol: LST1
  Gene Name: leukocyte specific transcript 1
  ENSP ID: ENSP00000365267
MLSRNDGPGLLRAGTPLCISAEAASAQQ

SEQ ID NO: 46346 - protein, 51 aa, Homo sapiens
  Payload ID: 9425
  Gene Symbol: LST1
  Gene Name: leukocyte specific transcript 1
  Uniprot ID: O00453
  ENSP ID: ENSP00000365278
MLSRNDVKRLERSWRLPVPSSEGPDLRGRDKRGTKEDPRADYACIAENKPT

SEQ ID NO: 46347 - protein, 73 aa, Homo sapiens; identical to SEQ ID NO: 46339
  Payload ID: 9425
  Gene Symbol: LST1
  Gene Name: leukocyte specific transcript 1
  Uniprot ID: O00453
  ENSP ID: ENSP00000372972

SEQ ID NO: 46348 - protein, 35 aa, Homo sapiens; identical to SEQ ID NO: 46342
  Payload ID: 9425
  Gene Symbol: LST1
  Gene Name: leukocyte specific transcript 1
  Uniprot ID: O00453
  ENSP ID: ENSP00000372974

SEQ ID NO: 46349 - protein, 66 aa, Homo sapiens; identical to SEQ ID NO: 46338
  Payload ID: 9425
  Gene Symbol: LST1
  Gene Name: leukocyte specific transcript 1
  Uniprot ID: O00453
  ENSP ID: ENSP00000372976

SEQ ID NO: 46350 - protein, 104 aa, Homo sapiens; identical to SEQ ID NO: 46343
  Payload ID: 9425
  Gene Symbol: LST1
  Gene Name: leukocyte specific transcript 1
  Uniprot ID: O00453
  ENSP ID: ENSP00000372978

SEQ ID NO: 46351 - protein, 44 aa, Homo sapiens
  Payload ID: 9425
  Gene Symbol: LST1
  Gene Name: leukocyte specific transcript 1
  ENSP ID: ENSP00000379408
MLSRNDDICIYGGLGLGGLLLLAVVLLSACLCWLHRREAASAQQ

SEQ ID NO: 46352 - protein, 66 aa, Homo sapiens
  Payload ID: 9425
  Gene Symbol: LST1
  Gene Name: leukocyte specific transcript 1
  ENSP ID: ENSP00000379418
MLSRNDDICIYGGLGLGGLLLLAVVLLSACLCWLHRRVKRLERSWRLPVPSSEGPDLRGRDKRGTK

SEQ ID NO: 46353 - protein, 59 aa, Homo sapiens; identical to SEQ ID NO: 46337
  Payload ID: 9425
  Gene Symbol: LST1
  Gene Name: leukocyte specific transcript 1
  Uniprot ID: O00453
  ENSP ID: ENSP00000383109

SEQ ID NO: 46354 - protein, 28 aa, Homo sapiens
  Payload ID: 9425
  Gene Symbol: LST1
  Gene Name: leukocyte specific transcript 1
  ENSP ID: ENSP00000383110
MLSRNDGPGLLRAGTPLCISAEAASAQQ

SEQ ID NO: 46355 - protein, 28 aa, Homo sapiens
  Payload ID: 9425
  Gene Symbol: LST1
  Gene Name: leukocyte specific transcript 1
  ENSP ID: ENSP00000383111
MLSRNDGPGLLRAGTPLCISAEAASAQQ

SEQ ID NO: 46356 - protein, 28 aa, Homo sapiens
  Payload ID: 9425
  Gene Symbol: LST1
  Gene Name: leukocyte specific transcript 1
  ENSP ID: ENSP00000383112
MLSRNDGPGLLRAGTPLCISAEAASAQQ

SEQ ID NO: 46357 - protein, 28 aa, Homo sapiens
  Payload ID: 9425
  Gene Symbol: LST1
  Gene Name: leukocyte specific transcript 1
  ENSP ID: ENSP00000383114
MLSRNDGPGLLRAGTPLCISAEAASAQQ

SEQ ID NO: 46358 - protein, 13 aa, Homo sapiens
  Payload ID: 9425
  Gene Symbol: LST1
  Gene Name: leukocyte specific transcript 1
  Uniprot ID: O00453
  ENSP ID: ENSP00000383116
MLSRNDEAASAQQ

SEQ ID NO: 46359 - protein, 82 aa, Homo sapiens
  Payload ID: 9425
  Gene Symbol: LST1
  Gene Name: leukocyte specific transcript 1
  ENSP ID: ENSP00000383120
MLSRNDDICIYGGLGLGGLLLLAVVLLSACLCWLHRRVKRLERSWRLPVPSSEGPDLRGRDKRGTKEDPRADYACIAENKPT

SEQ ID NO: 46360 - protein, 66 aa, Homo sapiens; identical to SEQ ID NO: 46340
  Payload ID: 9425
  Gene Symbol: LST1
  Gene Name: leukocyte specific transcript 1
  Uniprot ID: O00453
  ENSP ID: ENSP00000383121

SEQ ID NO: 46361 - protein, 66 aa, Homo sapiens; identical to SEQ ID NO: 46340
  Payload ID: 9425
  Gene Symbol: LST1
  Gene Name: leukocyte specific transcript 1
  Uniprot ID: O00453
  ENSP ID: ENSP00000383122

SEQ ID NO: 46362 - protein, 97 aa, Homo sapiens
  Payload ID: 9425
  Gene Symbol: LST1
  Gene Name: leukocyte specific transcript 1
  Uniprot ID: O00453
  ENSP ID: ENSP00000383123
MLSRNDDICIYGGLGLGGLLLLAVVLLSACLCWLHRRVKRLERSWAQGSSEQELHYASLQRLPVPSSEGPDLRGRDKRGTKEDPRADYACIAENKPT

SEQ ID NO: 46363 - protein, 51 aa, Homo sapiens; identical to SEQ ID NO: 46346
  Payload ID: 9425
  Gene Symbol: LST1
  Gene Name: leukocyte specific transcript 1
  Uniprot ID: O00453
  ENSP ID: ENSP00000383124

SEQ ID NO: 46364 - protein, 97 aa, Homo sapiens; identical to SEQ ID NO: 46362
  Payload ID: 9425
  Gene Symbol: LST1
  Gene Name: leukocyte specific transcript 1
  Uniprot ID: O00453
  ENSP ID: ENSP00000387560

SEQ ID NO: 46365 - protein, 28 aa, Homo sapiens
  Payload ID: 9425
  Gene Symbol: LST1
  Gene Name: leukocyte specific transcript 1
  ENSP ID: ENSP00000387689
MLSRNDGPGLLRAGTPLCISAEAASAQQ

SEQ ID NO: 46366 - protein, 43 aa, Homo sapiens
  Payload ID: 9425
  Gene Symbol: LST1
  Gene Name: leukocyte specific transcript 1
  ENSP ID: ENSP00000387723
  MOD_RES (1)..(1): Any amino acid
XSRNDDICIYGGLGLGGLLLLAVVLLSACLCWLHRREAASAQQ

SEQ ID NO: 46367 - protein, 28 aa, Homo sapiens
  Payload ID: 9425
  Gene Symbol: LST1
  Gene Name: leukocyte specific transcript 1
  ENSP ID: ENSP00000388397
MLSRNDGPGLLRAGTPLCISAEAASAQQ

SEQ ID NO: 46368 - protein, 28 aa, Homo sapiens
  Payload ID: 9425
  Gene Symbol: LST1
  Gene Name: leukocyte specific transcript 1
  ENSP ID: ENSP00000388514
MLSRNDGPGLLRAGTPLCISAEAASAQQ

SEQ ID NO: 46369 - protein, 97 aa, Homo sapiens; identical to SEQ ID NO: 46362
  Payload ID: 9425
  Gene Symbol: LST1
  Gene Name: leukocyte specific transcript 1
  Uniprot ID: O00453
  ENSP ID: ENSP00000388956

SEQ ID NO: 46370 - protein, 46 aa, Homo sapiens
  Payload ID: 9425
  Gene Symbol: LST1
  Gene Name: leukocyte specific transcript 1
  ENSP ID: ENSP00000389579
MLSRNDDICIYGGLGLGGLLLLAVVLLSACLCWLHRREHCLALEPL

SEQ ID NO: 46371 - protein, 13 aa, Homo sapiens
  Payload ID: 9425
  Gene Symbol: LST1
  Gene Name: leukocyte specific transcript 1
  Uniprot ID: O00453
  ENSP ID: ENSP00000389694
MLSRNDEAASAQQ

SEQ ID NO: 46372 - protein, 59 aa, Homo sapiens; identical to SEQ ID NO: 46337
  Payload ID: 9425
  Gene Symbol: LST1
  Gene Name: leukocyte specific transcript 1
  Uniprot ID: O00453
  ENSP ID: ENSP00000389795

SEQ ID NO: 46373 - protein, 66 aa, Homo sapiens; identical to SEQ ID NO: 46340
  Payload ID: 9425
  Gene Symbol: LST1
  Gene Name: leukocyte specific transcript 1
  Uniprot ID: O00453
  ENSP ID: ENSP00000390430

SEQ ID NO: 46374 - protein, 66 aa, Homo sapiens; identical to SEQ ID NO: 46340
  Payload ID: 9425
  Gene Symbol: LST1
  Gene Name: leukocyte specific transcript 1
  Uniprot ID: O00453
  ENSP ID: ENSP00000390587

SEQ ID NO: 46375 - protein, 35 aa, Homo sapiens; identical to SEQ ID NO: 46342
  Payload ID: 9425
  Gene Symbol: LST1
  Gene Name: leukocyte specific transcript 1
  Uniprot ID: O00453
  ENSP ID: ENSP00000390658

SEQ ID NO: 46376 - protein, 73 aa, Homo sapiens; identical to SEQ ID NO: 46339
  Payload ID: 9425
  Gene Symbol: LST1
  Gene Name: leukocyte specific transcript 1
  Uniprot ID: O00453
  ENSP ID: ENSP00000390885

SEQ ID NO: 46377 - protein, 51 aa, Homo sapiens; identical to SEQ ID NO: 46346
  Payload ID: 9425
  Gene Symbol: LST1
  Gene Name: leukocyte specific transcript 1
  Uniprot ID: O00453
  ENSP ID: ENSP00000391057

SEQ ID NO: 46378 - protein, 66 aa, Homo sapiens; identical to SEQ ID NO: 46340
  Payload ID: 9425
  Gene Symbol: LST1
  Gene Name: leukocyte specific transcript 1
  Uniprot ID: O00453
  ENSP ID: ENSP00000391420

SEQ ID NO: 46379 - protein, 97 aa, Homo sapiens; identical to SEQ ID NO: 46362
  Payload ID: 9425
  Gene Symbol: LST1
  Gene Name: leukocyte specific transcript 1
  Uniprot ID: O00453
  ENSP ID: ENSP00000391929

SEQ ID NO: 46380 - protein, 43 aa, Homo sapiens; identical to SEQ ID NO: 46366
  Payload ID: 9425
  Gene Symbol: LST1
  Gene Name: leukocyte specific transcript 1
  ENSP ID: ENSP00000391961
  MOD_RES (1)..(1): Any amino acid

SEQ ID NO: 46381 - protein, 66 aa, Homo sapiens; identical to SEQ ID NO: 46340
  Payload ID: 9425
  Gene Symbol: LST1
  Gene Name: leukocyte specific transcript 1
  Uniprot ID: O00453
  ENSP ID: ENSP00000391963

SEQ ID NO: 46382 - protein, 97 aa, Homo sapiens; identical to SEQ ID NO: 46362
  Payload ID: 9425
  Gene Symbol: LST1
  Gene Name: leukocyte specific transcript 1
  Uniprot ID: O00453
  ENSP ID: ENSP00000392949

SEQ ID NO: 46383 - protein, 43 aa, Homo sapiens; identical to SEQ ID NO: 46366
  Payload ID: 9425
  Gene Symbol: LST1
  Gene Name: leukocyte specific transcript 1
  ENSP ID: ENSP00000393046
  MOD_RES (1)..(1): Any amino acid

SEQ ID NO: 46384 - protein, 46 aa, Homo sapiens; identical to SEQ ID NO: 46370
  Payload ID: 9425
  Gene Symbol: LST1
  Gene Name: leukocyte specific transcript 1
  ENSP ID: ENSP00000393067

SEQ ID NO: 46385 - protein, 66 aa, Homo sapiens; identical to SEQ ID NO: 46338
  Payload ID: 9425
  Gene Symbol: LST1
  Gene Name: leukocyte specific transcript 1
  Uniprot ID: O00453
  ENSP ID: ENSP00000393282

SEQ ID NO: 46386 - protein, 66 aa, Homo sapiens; identical to SEQ ID NO: 46338
  Payload ID: 9425
  Gene Symbol: LST1
  Gene Name: leukocyte specific transcript 1
  Uniprot ID: O00453
  ENSP ID: ENSP00000393345

SEQ ID NO: 46387 - protein, 28 aa, Homo sapiens
  Payload ID: 9425
  Gene Symbol: LST1
  Gene Name: leukocyte specific transcript 1
  ENSP ID: ENSP00000393802
MLSRNDGPGLLRAGTPLCISAEAASAQQ

SEQ ID NO: 46388 - protein, 46 aa, Homo sapiens; identical to SEQ ID NO: 46370
  Payload ID: 9425
  Gene Symbol: LST1
  Gene Name: leukocyte specific transcript 1
  ENSP ID: ENSP00000393824

SEQ ID NO: 46389 - protein, 97 aa, Homo sapiens; identical to SEQ ID NO: 46362
  Payload ID: 9425
  Gene Symbol: LST1
  Gene Name: leukocyte specific transcript 1
  Uniprot ID: O00453
  ENSP ID: ENSP00000394614

SEQ ID NO: 46390 - protein, 73 aa, Homo sapiens; identical to SEQ ID NO: 46339
  Payload ID: 9425
  Gene Symbol: LST1
  Gene Name: leukocyte specific transcript 1
  Uniprot ID: O00453
  ENSP ID: ENSP00000394815

SEQ ID NO: 46391 - protein, 35 aa, Homo sapiens; identical to SEQ ID NO: 46342
  Payload ID: 9425
  Gene Symbol: LST1
  Gene Name: leukocyte specific transcript 1
  Uniprot ID: O00453
  ENSP ID: ENSP00000394834

SEQ ID NO: 46392 - protein, 51 aa, Homo sapiens; identical to SEQ ID NO: 46346
  Payload ID: 9425
  Gene Symbol: LST1
  Gene Name: leukocyte specific transcript 1
  Uniprot ID: O00453
  ENSP ID: ENSP00000394891

SEQ ID NO: 46393 - protein, 97 aa, Homo sapiens; identical to SEQ ID NO: 46362
  Payload ID: 9425
  Gene Symbol: LST1
  Gene Name: leukocyte specific transcript 1
  Uniprot ID: O00453
  ENSP ID: ENSP00000395409

SEQ ID NO: 46394 - protein, 46 aa, Homo sapiens; identical to SEQ ID NO: 46370
  Payload ID: 9425
  Gene Symbol: LST1
  Gene Name: leukocyte specific transcript 1
  ENSP ID: ENSP00000395652

SEQ ID NO: 46395 - protein, 36 aa, Homo sapiens
  Payload ID: 9425
  Gene Symbol: LST1
  Gene Name: leukocyte specific transcript 1
  ENSP ID: ENSP00000395821
MLSRNDDICIYGGLGLGGLLLLAVVLLSACLCWLHR

SEQ ID NO: 46396 - protein, 73 aa, Homo sapiens; identical to SEQ ID NO: 46339
  Payload ID: 9425
  Gene Symbol: LST1
  Gene Name: leukocyte specific transcript 1
  Uniprot ID: O00453
  ENSP ID: ENSP00000396004

SEQ ID NO: 46397 - protein, 104 aa, Homo sapiens; identical to SEQ ID NO: 46343
  Payload ID: 9425
  Gene Symbol: LST1
  Gene Name: leukocyte specific transcript 1
  Uniprot ID: O00453
  ENSP ID: ENSP00000396179

SEQ ID NO: 46398 - protein, 97 aa, Homo sapiens; identical to SEQ ID NO: 46362
  Payload ID: 9425
  Gene Symbol: LST1
  Gene Name: leukocyte specific transcript 1
  Uniprot ID: O00453
  ENSP ID: ENSP00000396181

SEQ ID NO: 46399 - protein, 66 aa, Homo sapiens; identical to SEQ ID NO: 46340
  Payload ID: 9425
  Gene Symbol: LST1
  Gene Name: leukocyte specific transcript 1
  Uniprot ID: O00453
  ENSP ID: ENSP00000396235

SEQ ID NO: 46400 - protein, 97 aa, Homo sapiens; identical to SEQ ID NO: 46362
  Payload ID: 9425
  Gene Symbol: LST1
  Gene Name: leukocyte specific transcript 1
  Uniprot ID: O00453
  ENSP ID: ENSP00000396378

SEQ ID NO: 46401 - protein, 51 aa, Homo sapiens; identical to SEQ ID NO: 46346
  Payload ID: 9425
  Gene Symbol: LST1
  Gene Name: leukocyte specific transcript 1
  Uniprot ID: O00453
  ENSP ID: ENSP00000396431

SEQ ID NO: 46402 - protein, 97 aa, Homo sapiens; identical to SEQ ID NO: 46362
  Payload ID: 9425
  Gene Symbol: LST1
  Gene Name: leukocyte specific transcript 1
  Uniprot ID: O00453
  ENSP ID: ENSP00000396533

SEQ ID NO: 46403 - protein, 66 aa, Homo sapiens; identical to SEQ ID NO: 46340
  Payload ID: 9425
  Gene Symbol: LST1
  Gene Name: leukocyte specific transcript 1
  Uniprot ID: O00453
  ENSP ID: ENSP00000396579

SEQ ID NO: 46404 - protein, 13 aa, Homo sapiens
  Payload ID: 9425
  Gene Symbol: LST1
  Gene Name: leukocyte specific transcript 1
  Uniprot ID: O00453
  ENSP ID: ENSP00000397826
MLSRNDEAASAQQ

SEQ ID NO: 46405 - protein, 66 aa, Homo sapiens; identical to SEQ ID NO: 46340
  Payload ID: 9425
  Gene Symbol: LST1
  Gene Name: leukocyte specific transcript 1
  Uniprot ID: O00453
  ENSP ID: ENSP00000398228

SEQ ID NO: 46406 - protein, 43 aa, Homo sapiens
  Payload ID: 9425
  Gene Symbol: LST1
  Gene Name: leukocyte specific transcript 1
  ENSP ID: ENSP00000398376
YRGMMIYVSTGAWGWAGSCFWQWSFCPPACVGCIEERLPVPSS

SEQ ID NO: 46407 - protein, 28 aa, Homo sapiens
  Payload ID: 9425
  Gene Symbol: LST1
  Gene Name: leukocyte specific transcript 1
  ENSP ID: ENSP00000398510
MLSRNDGPGLLRAGTPLCISAEAASAQQ

SEQ ID NO: 46408 - protein, 28 aa, Homo sapiens
  Payload ID: 9425
  Gene Symbol: LST1
  Gene Name: leukocyte specific transcript 1
  ENSP ID: ENSP00000398672
MLSRNDGPGLLRAGTPLCISAEAASAQQ

SEQ ID NO: 46409 - protein, 104 aa, Homo sapiens; identical to SEQ ID NO: 46343
  Payload ID: 9425
  Gene Symbol: LST1
  Gene Name: leukocyte specific transcript 1
  Uniprot ID: O00453
  ENSP ID: ENSP00000398685

SEQ ID NO: 46410 - protein, 66 aa, Homo sapiens; identical to SEQ ID NO: 46340
  Payload ID: 9425
  Gene Symbol: LST1
  Gene Name: leukocyte specific transcript 1
  Uniprot ID: O00453
  ENSP ID: ENSP00000398700

SEQ ID NO: 46411 - protein, 66 aa, Homo sapiens; identical to SEQ ID NO: 46340
  Payload ID: 9425
  Gene Symbol: LST1
  Gene Name: leukocyte specific transcript 1
  Uniprot ID: O00453
  ENSP ID: ENSP00000398780

SEQ ID NO: 46412 - protein, 66 aa, Homo sapiens; identical to SEQ ID NO: 46338
  Payload ID: 9425
  Gene Symbol: LST1
  Gene Name: leukocyte specific transcript 1
  Uniprot ID: O00453
  ENSP ID: ENSP00000398918

SEQ ID NO: 46413 - protein, 82 aa, Homo sapiens; identical to SEQ ID NO: 46359
  Payload ID: 9425
  Gene Symbol: LST1
  Gene Name: leukocyte specific transcript 1
  ENSP ID: ENSP00000399051

SEQ ID NO: 46414 - protein, 59 aa, Homo sapiens; identical to SEQ ID NO: 46337
  Payload ID: 9425
  Gene Symbol: LST1
  Gene Name: leukocyte specific transcript 1
  Uniprot ID: O00453
  ENSP ID: ENSP00000399063

SEQ ID NO: 46415 - protein, 28 aa, Homo sapiens
  Payload ID: 9425
  Gene Symbol: LST1
  Gene Name: leukocyte specific transcript 1
  ENSP ID: ENSP00000399180
MLSRNDGPGLLRAGTPLCISAEAASAQQ

SEQ ID NO: 46416 - protein, 43 aa, Homo sapiens; identical to SEQ ID NO: 46406
  Payload ID: 9425
  Gene Symbol: LST1
  Gene Name: leukocyte specific transcript 1
  ENSP ID: ENSP00000399203

SEQ ID NO: 46417 - protein, 104 aa, Homo sapiens; identical to SEQ ID NO: 46343
  Payload ID: 9425
  Gene Symbol: LST1
  Gene Name: leukocyte specific transcript 1
  Uniprot ID: O00453
  ENSP ID: ENSP00000399411

SEQ ID NO: 46418 - protein, 35 aa, Homo sapiens; identical to SEQ ID NO: 46342
  Payload ID: 9425
  Gene Symbol: LST1
  Gene Name: leukocyte specific transcript 1
  Uniprot ID: O00453
  ENSP ID: ENSP00000399439

SEQ ID NO: 46419 - protein, 66 aa, Homo sapiens; identical to SEQ ID NO: 46338
  Payload ID: 9425
  Gene Symbol: LST1
  Gene Name: leukocyte specific transcript 1
  Uniprot ID: O00453
  ENSP ID: ENSP00000399474

SEQ ID NO: 46420 - protein, 36 aa, Homo sapiens; identical to SEQ ID NO: 46395
  Payload ID: 9425
  Gene Symbol: LST1
  Gene Name: leukocyte specific transcript 1
  ENSP ID: ENSP00000399869

SEQ ID NO: 46421 - protein, 43 aa, Homo sapiens; identical to SEQ ID NO: 46366
  Payload ID: 9425
  Gene Symbol: LST1
  Gene Name: leukocyte specific transcript 1
  ENSP ID: ENSP00000399941
  MOD_RES (1)..(1): Any amino acid

SEQ ID NO: 46422 - protein, 51 aa, Homo sapiens; identical to SEQ ID NO: 46346
  Payload ID: 9425
  Gene Symbol: LST1
  Gene Name: leukocyte specific transcript 1
  Uniprot ID: O00453
  ENSP ID: ENSP00000400069

SEQ ID NO: 46423 - protein, 28 aa, Homo sapiens
  Payload ID: 9425
  Gene Symbol: LST1
  Gene Name: leukocyte specific transcript 1
  ENSP ID: ENSP00000400138
MLSRNDGPGLLRAGTPLCISAEAASAQQ

SEQ ID NO: 46424 - protein, 46 aa, Homo sapiens; identical to SEQ ID NO: 46370
  Payload ID: 9425
  Gene Symbol: LST1
  Gene Name: leukocyte specific transcript 1
  ENSP ID: ENSP00000400339

SEQ ID NO: 46425 - protein, 28 aa, Homo sapiens
  Payload ID: 9425
  Gene Symbol: LST1
  Gene Name: leukocyte specific transcript 1
  ENSP ID: ENSP00000400638
MLSRNDGPGLLRAGTPLCISAEAASAQQ

SEQ ID NO: 46426 - protein, 28 aa, Homo sapiens
  Payload ID: 9425
  Gene Symbol: LST1
  Gene Name: leukocyte specific transcript 1
  ENSP ID: ENSP00000400881
MLSRNDGPGLLRAGTPLCISAEAASAQQ

SEQ ID NO: 46427 - protein, 35 aa, Homo sapiens; identical to SEQ ID NO: 46342
  Payload ID: 9425
  Gene Symbol: LST1
  Gene Name: leukocyte specific transcript 1
  Uniprot ID: O00453
  ENSP ID: ENSP00000401516

SEQ ID NO: 46428 - protein, 73 aa, Homo sapiens; identical to SEQ ID NO: 46339
  Payload ID: 9425
  Gene Symbol: LST1
  Gene Name: leukocyte specific transcript 1
  Uniprot ID: O00453
  ENSP ID: ENSP00000401567

SEQ ID NO: 46429 - protein, 28 aa, Homo sapiens
  Payload ID: 9425
  Gene Symbol: LST1
  Gene Name: leukocyte specific transcript 1
  ENSP ID: ENSP00000401621
MLSRNDGPGLLRAGTPLCISAEAASAQQ

SEQ ID NO: 46430 - protein, 13 aa, Homo sapiens
  Payload ID: 9425
  Gene Symbol: LST1
  Gene Name: leukocyte specific transcript 1
  Uniprot ID: O00453
  ENSP ID: ENSP00000401650
MLSRNDEAASAQQ

SEQ ID NO: 46431 - protein, 13 aa, Homo sapiens
  Payload ID: 9425
  Gene Symbol: LST1
  Gene Name: leukocyte specific transcript 1
  Uniprot ID: O00453
  ENSP ID: ENSP00000401655
MLSRNDEAASAQQ

SEQ ID NO: 46432 - protein, 36 aa, Homo sapiens; identical to SEQ ID NO: 46395
  Payload ID: 9425
  Gene Symbol: LST1
  Gene Name: leukocyte specific transcript 1
  ENSP ID: ENSP00000402102

SEQ ID NO: 46433 - protein, 36 aa, Homo sapiens; identical to SEQ ID NO: 46395
  Payload ID: 9425
  Gene Symbol: LST1
  Gene Name: leukocyte specific transcript 1
  ENSP ID: ENSP00000402235

SEQ ID NO: 46434 - protein, 28 aa, Homo sapiens
  Payload ID: 9425
  Gene Symbol: LST1
  Gene Name: leukocyte specific transcript 1
  ENSP ID: ENSP00000402637
MLSRNDGPGLLRAGTPLCISAEAASAQQ

SEQ ID NO: 46435 - protein, 28 aa, Homo sapiens
  Payload ID: 9425
  Gene Symbol: LST1
  Gene Name: leukocyte specific transcript 1
  ENSP ID: ENSP00000402699
MLSRNDGPGLLRAGTPLCISAEAASAQQ

SEQ ID NO: 46436 - protein, 66 aa, Homo sapiens; identical to SEQ ID NO: 46340
  Payload ID: 9425
  Gene Symbol: LST1
  Gene Name: leukocyte specific transcript 1
  Uniprot ID: O00453
  ENSP ID: ENSP00000402707

SEQ ID NO: 46437 - protein, 51 aa, Homo sapiens; identical to SEQ ID NO: 46346
  Payload ID: 9425
  Gene Symbol: LST1
  Gene Name: leukocyte specific transcript 1
  Uniprot ID: O00453
  ENSP ID: ENSP00000402873

SEQ ID NO: 46438 - protein, 28 aa, Homo sapiens
  Payload ID: 9425
  Gene Symbol: LST1
  Gene Name: leukocyte specific transcript 1
  ENSP ID: ENSP00000402960
MLSRNDGPGLLRAGTPLCISAEAASAQQ

SEQ ID NO: 46439 - protein, 104 aa, Homo sapiens; identical to SEQ ID NO: 46343
  Payload ID: 9425
  Gene Symbol: LST1
  Gene Name: leukocyte specific transcript 1
  Uniprot ID: O00453
  ENSP ID: ENSP00000403097

SEQ ID NO: 46440 - protein, 82 aa, Homo sapiens; identical to SEQ ID NO: 46359
  Payload ID: 9425
  Gene Symbol: LST1
  Gene Name: leukocyte specific transcript 1
  ENSP ID: ENSP00000403468

SEQ ID NO: 46441 - protein, 97 aa, Homo sapiens; identical to SEQ ID NO: 46362
  Payload ID: 9425
  Gene Symbol: LST1
  Gene Name: leukocyte specific transcript 1
  Uniprot ID: O00453
  ENSP ID: ENSP00000404051

SEQ ID NO: 46442 - protein, 73 aa, Homo sapiens; identical to SEQ ID NO: 46339
  Payload ID: 9425
  Gene Symbol: LST1
  Gene Name: leukocyte specific transcript 1
  Uniprot ID: O00453
  ENSP ID: ENSP00000404500

SEQ ID NO: 46443 - protein, 28 aa, Homo sapiens
  Payload ID: 9425
  Gene Symbol: LST1
  Gene Name: leukocyte specific transcript 1
  ENSP ID: ENSP00000404870
MLSRNDGPGLLRAGTPLCISAEAASAQQ

SEQ ID NO: 46444 - protein, 28 aa, Homo sapiens
  Payload ID: 9425
  Gene Symbol: LST1
  Gene Name: leukocyte specific transcript 1
  ENSP ID: ENSP00000405433
MLSRNDGPGLLRAGTPLCISAEAASAQQ

SEQ ID NO: 46445 - protein, 46 aa, Homo sapiens; identical to SEQ ID NO: 46370
  Payload ID: 9425
  Gene Symbol: LST1
  Gene Name: leukocyte specific transcript 1
  ENSP ID: ENSP00000405869

SEQ ID NO: 46446 - protein, 66 aa, Homo sapiens; identical to SEQ ID NO: 46340
  Payload ID: 9425
  Gene Symbol: LST1
  Gene Name: leukocyte specific transcript 1
  Uniprot ID: O00453
  ENSP ID: ENSP00000405900

SEQ ID NO: 46447 - protein, 13 aa, Homo sapiens
  Payload ID: 9425
  Gene Symbol: LST1
  Gene Name: leukocyte specific transcript 1
  Uniprot ID: O00453
  ENSP ID: ENSP00000405920
MLSRNDEAASAQQ

SEQ ID NO: 46448 - protein, 66 aa, Homo sapiens; identical to SEQ ID NO: 46340
  Payload ID: 9425
  Gene Symbol: LST1
  Gene Name: leukocyte specific transcript 1
  Uniprot ID: O00453
  ENSP ID: ENSP00000406438

SEQ ID NO: 46449 - protein, 104 aa, Homo sapiens; identical to SEQ ID NO: 46343
  Payload ID: 9425
  Gene Symbol: LST1
  Gene Name: leukocyte specific transcript 1
  Uniprot ID: O00453
  ENSP ID: ENSP00000406455

SEQ ID NO: 46450 - protein, 66 aa, Homo sapiens; identical to SEQ ID NO: 46338
  Payload ID: 9425
  Gene Symbol: LST1
  Gene Name: leukocyte specific transcript 1
  Uniprot ID: O00453
  ENSP ID: ENSP00000406625

SEQ ID NO: 46451 - protein, 46 aa, Homo sapiens; identical to SEQ ID NO: 46370
  Payload ID: 9425
  Gene Symbol: LST1
  Gene Name: leukocyte specific transcript 1
  ENSP ID: ENSP00000407149

SEQ ID NO: 46452 - protein, 36 aa, Homo sapiens; identical to SEQ ID NO: 46395
  Payload ID: 9425
  Gene Symbol: LST1
  Gene Name: leukocyte specific transcript 1
  ENSP ID: ENSP00000407209

SEQ ID NO: 46453 - protein, 35 aa, Homo sapiens; identical to SEQ ID NO: 46342
  Payload ID: 9425
  Gene Symbol: LST1
  Gene Name: leukocyte specific transcript 1
  Uniprot ID: O00453
  ENSP ID: ENSP00000407417

SEQ ID NO: 46454 - protein, 36 aa, Homo sapiens; identical to SEQ ID NO: 46395
  Payload ID: 9425
  Gene Symbol: LST1
  Gene Name: leukocyte specific transcript 1
  ENSP ID: ENSP00000407449

SEQ ID NO: 46455 - protein, 82 aa, Homo sapiens; identical to SEQ ID NO: 46359
  Payload ID: 9425
  Gene Symbol: LST1
  Gene Name: leukocyte specific transcript 1
  ENSP ID: ENSP00000407534

SEQ ID NO: 46456 - protein, 82 aa, Homo sapiens; identical to SEQ ID NO: 46359
  Payload ID: 9425
  Gene Symbol: LST1
  Gene Name: leukocyte specific transcript 1
  ENSP ID: ENSP00000407803

SEQ ID NO: 46457 - protein, 82 aa, Homo sapiens; identical to SEQ ID NO: 46359
  Payload ID: 9425
  Gene Symbol: LST1
  Gene Name: leukocyte specific transcript 1
  ENSP ID: ENSP00000407824

SEQ ID NO: 46458 - protein, 13 aa, Homo sapiens
  Payload ID: 9425
  Gene Symbol: LST1
  Gene Name: leukocyte specific transcript 1
  Uniprot ID: O00453
  ENSP ID: ENSP00000408876
MLSRNDEAASAQQ

SEQ ID NO: 46459 - protein, 66 aa, Homo sapiens; identical to SEQ ID NO: 46340
  Payload ID: 9425
  Gene Symbol: LST1
  Gene Name: leukocyte specific transcript 1
  Uniprot ID: O00453
  ENSP ID: ENSP00000409008

SEQ ID NO: 46460 - protein, 97 aa, Homo sapiens; identical to SEQ ID NO: 46362
  Payload ID: 9425
  Gene Symbol: LST1
  Gene Name: leukocyte specific transcript 1
  Uniprot ID: O00453
  ENSP ID: ENSP00000409163

SEQ ID NO: 46461 - protein, 104 aa, Homo sapiens; identical to SEQ ID NO: 46343
  Payload ID: 9425
  Gene Symbol: LST1
  Gene Name: leukocyte specific transcript 1
  Uniprot ID: O00453
  ENSP ID: ENSP00000409229

SEQ ID NO: 46462 - protein, 66 aa, Homo sapiens; identical to SEQ ID NO: 46340
  Payload ID: 9425
  Gene Symbol: LST1
  Gene Name: leukocyte specific transcript 1
  Uniprot ID: O00453
  ENSP ID: ENSP00000409433

SEQ ID NO: 46463 - protein, 35 aa, Homo sapiens; identical to SEQ ID NO: 46342
  Payload ID: 9425
  Gene Symbol: LST1
  Gene Name: leukocyte specific transcript 1
  Uniprot ID: O00453
  ENSP ID: ENSP00000409698

SEQ ID NO: 46464 - protein, 36 aa, Homo sapiens; identical to SEQ ID NO: 46395
  Payload ID: 9425
  Gene Symbol: LST1
  Gene Name: leukocyte specific transcript 1
  ENSP ID: ENSP00000410543

SEQ ID NO: 46465 - protein, 66 aa, Homo sapiens; identical to SEQ ID NO: 46340
  Payload ID: 9425
  Gene Symbol: LST1
  Gene Name: leukocyte specific transcript 1
  Uniprot ID: O00453
  ENSP ID: ENSP00000411087

SEQ ID NO: 46466 - protein, 36 aa, Homo sapiens; identical to SEQ ID NO: 46395
  Payload ID: 9425
  Gene Symbol: LST1
  Gene Name: leukocyte specific transcript 1
  ENSP ID: ENSP00000411296

SEQ ID NO: 46467 - protein, 28 aa, Homo sapiens
  Payload ID: 9425
  Gene Symbol: LST1
  Gene Name: leukocyte specific transcript 1
  ENSP ID: ENSP00000411403
MLSRNDGPGLLRAGTPLCISAEAASAQQ

SEQ ID NO: 46468 - protein, 59 aa, Homo sapiens; identical to SEQ ID NO: 46337
  Payload ID: 9425
  Gene Symbol: LST1
  Gene Name: leukocyte specific transcript 1
  Uniprot ID: O00453
  ENSP ID: ENSP00000411547

SEQ ID NO: 46469 - protein, 66 aa, Homo sapiens; identical to SEQ ID NO: 46340
  Payload ID: 9425
  Gene Symbol: LST1
  Gene Name: leukocyte specific transcript 1
  Uniprot ID: O00453
  ENSP ID: ENSP00000411866

SEQ ID NO: 46470 - protein, 59 aa, Homo sapiens; identical to SEQ ID NO: 46337
  Payload ID: 9425
  Gene Symbol: LST1
  Gene Name: leukocyte specific transcript 1
  Uniprot ID: O00453
  ENSP ID: ENSP00000411961

SEQ ID NO: 46471 - protein, 28 aa, Homo sapiens
  Payload ID: 9425
  Gene Symbol: LST1
  Gene Name: leukocyte specific transcript 1
  ENSP ID: ENSP00000412112
MLSRNDGPGLLRAGTPLCISAEAASAQQ

SEQ ID NO: 46472 - protein, 97 aa, Homo sapiens; identical to SEQ ID NO: 46362
  Payload ID: 9425
  Gene Symbol: LST1
  Gene Name: leukocyte specific transcript 1
  Uniprot ID: O00453
  ENSP ID: ENSP00000412276

SEQ ID NO: 46473 - protein, 59 aa, Homo sapiens; identical to SEQ ID NO: 46337
  Payload ID: 9425
  Gene Symbol: LST1
  Gene Name: leukocyte specific transcript 1
  Uniprot ID: O00453
  ENSP ID: ENSP00000412627

SEQ ID NO: 46474 - protein, 28 aa, Homo sapiens
  Payload ID: 9425
  Gene Symbol: LST1
  Gene Name: leukocyte specific transcript 1
  ENSP ID: ENSP00000412978
MLSRNDGPGLLRAGTPLCISAEAASAQQ

SEQ ID NO: 46475 - protein, 28 aa, Homo sapiens
  Payload ID: 9425
  Gene Symbol: LST1
  Gene Name: leukocyte specific transcript 1
  ENSP ID: ENSP00000413488
MLSRNDGPGLLRAGTPLCISAEAASAQQ

SEQ ID NO: 46476 - protein, 66 aa, Homo sapiens; identical to SEQ ID NO: 46340
  Payload ID: 9425
  Gene Symbol: LST1
  Gene Name: leukocyte specific transcript 1
  Uniprot ID: O00453
  ENSP ID: ENSP00000413526

SEQ ID NO: 46477 - protein, 97 aa, Homo sapiens; identical to SEQ ID NO: 46362
  Payload ID: 9425
  Gene Symbol: LST1
  Gene Name: leukocyte specific transcript 1
  Uniprot ID: O00453
  ENSP ID: ENSP00000414173

SEQ ID NO: 46478 - protein, 73 aa, Homo sapiens; identical to SEQ ID NO: 46339
  Payload ID: 9425
  Gene Symbol: LST1
  Gene Name: leukocyte specific transcript 1
  Uniprot ID: O00453
  ENSP ID: ENSP00000414246

SEQ ID NO: 46479 - protein, 82 aa, Homo sapiens; identical to SEQ ID NO: 46359
  Payload ID: 9425
  Gene Symbol: LST1
  Gene Name: leukocyte specific transcript 1
  ENSP ID: ENSP00000414636

SEQ ID NO: 46480 - protein, 43 aa, Homo sapiens; identical to SEQ ID NO: 46366
  Payload ID: 9425
  Gene Symbol: LST1
  Gene Name: leukocyte specific transcript 1
  ENSP ID: ENSP00000414728
  MOD_RES (1)..(1): Any amino acid

SEQ ID NO: 46481 - protein, 28 aa, Homo sapiens
  Payload ID: 9425
  Gene Symbol: LST1
  Gene Name: leukocyte specific transcript 1
  ENSP ID: ENSP00000414729
MLSRNDGPGLLRAGTPLCISAEAASAQQ

SEQ ID NO: 46482 - protein, 28 aa, Homo sapiens
  Payload ID: 9425
  Gene Symbol: LST1
  Gene Name: leukocyte specific transcript 1
  ENSP ID: ENSP00000414738
MLSRNDGPGLLRAGTPLCISAEAASAQQ

SEQ ID NO: 46483 - protein, 66 aa, Homo sapiens; identical to SEQ ID NO: 46340
  Payload ID: 9425
  Gene Symbol: LST1
  Gene Name: leukocyte specific transcript 1
  Uniprot ID: O00453
  ENSP ID: ENSP00000414744

SEQ ID NO: 46484 - protein, 51 aa, Homo sapiens; identical to SEQ ID NO: 46346
  Payload ID: 9425
  Gene Symbol: LST1
  Gene Name: leukocyte specific transcript 1
  Uniprot ID: O00453
  ENSP ID: ENSP00000415143

SEQ ID NO: 46485 - protein, 66 aa, Homo sapiens; identical to SEQ ID NO: 46340
  Payload ID: 9425
  Gene Symbol: LST1
  Gene Name: leukocyte specific transcript 1
  Uniprot ID: O00453
  ENSP ID: ENSP00000415168

SEQ ID NO: 46486 - protein, 28 aa, Homo sapiens
  Payload ID: 9425
  Gene Symbol: LST1
  Gene Name: leukocyte specific transcript 1
  ENSP ID: ENSP00000415445
MLSRNDGPGLLRAGTPLCISAEAASAQQ

SEQ ID NO: 46487 - protein, 66 aa, Homo sapiens; identical to SEQ ID NO: 46340
  Payload ID: 9425
  Gene Symbol: LST1
  Gene Name: leukocyte specific transcript 1
  Uniprot ID: O00453
  ENSP ID: ENSP00000415526

SEQ ID NO: 46488 - protein, 59 aa, Homo sapiens; identical to SEQ ID NO: 46337
  Payload ID: 9425
  Gene Symbol: LST1
  Gene Name: leukocyte specific transcript 1
  Uniprot ID: O00453
  ENSP ID: ENSP00000415623

SEQ ID NO: 46489 - protein, 28 aa, Homo sapiens
  Payload ID: 9425
  Gene Symbol: LST1
  Gene Name: leukocyte specific transcript 1
  ENSP ID: ENSP00000416118
MLSRNDGPGLLRAGTPLCISAEAASAQQ

SEQ ID NO: 46490 - protein, 97 aa, Homo sapiens; identical to SEQ ID NO: 46362
  Payload ID: 9425
  Gene Symbol: LST1
  Gene Name: leukocyte specific transcript 1
  Uniprot ID: O00453
  ENSP ID: ENSP00000416283

SEQ ID NO: 46491 - protein, 66 aa, Homo sapiens; identical to SEQ ID NO: 46338
  Payload ID: 9425
  Gene Symbol: LST1
  Gene Name: leukocyte specific transcript 1
  Uniprot ID: O00453
  ENSP ID: ENSP00000416808

SEQ ID NO: 46492 - protein, 35 aa, Homo sapiens
  Payload ID: 9425
  Gene Symbol: LST1
  Gene Name: leukocyte specific transcript 1
  ENSP ID: ENSP00000417645
  MOD_RES (1)..(1): Any amino acid
XGGLLLLAVVLLSACLCWLHRREAGEELEAASAQQ

SEQ ID NO: 46493 - protein, 60 aa, Homo sapiens
  Payload ID: 9425
  Gene Symbol: LST1
  Gene Name: leukocyte specific transcript 1
  ENSP ID: ENSP00000418578
  MOD_RES (1)..(1): Any amino acid
XDICIYGGLGLGGLLLLAVVLLSACLCWLHRREAGEELGPGLLRAGTPLCISAEAASAQQ

SEQ ID NO: 46494 - protein, 270 aa, Homo sapiens
  Payload ID: 9426
  Gene Symbol: LAIR1
  Gene Name: leukocyte-associated immunoglobulin-like receptor 1
  Uniprot ID: Q6GTX8
  ENSP ID: ENSP00000301193
MSPHPTALLGLVLCLAQTIHTQEEDLPRPSISAEPGTVIPLGSHVTFVCRGPVGVQTFRLERDSRSTYNDTEDVSQASPSESEARFRIDSVREGNAGLYRCIYYKPPKWSEQSDYLELLVKGPTQRPSDNSHNEHAPASQGLKAEHLYILIGVSVVFLFCLLLLVLFCLHRQNQIKQGPPRSKDEEQKPQQRPDLAVDVLERTADKATVNGLPEKDRETDTSALAAGSSQEVTYAQLDHWALTQRTARAVSPQSTKPMAESITYAAVARH

SEQ ID NO: 46495 - protein, 280 aa, Homo sapiens
  Payload ID: 9426
  Gene Symbol: LAIR1
  Gene Name: leukocyte-associated immunoglobulin-like receptor 1
  ENSP ID: ENSP00000319204
MEREMVLCLAQTIHTQEDLPRPSISAEPGTVIPLGSHVTFVCRGPVGVQTFRLERESRSTYNDTEDVSQASPSESEARFRIDSVSEGNAGPYRCIYYKPPKWSEQSDYLELLVKETSGGPDSPDTEPGSSAGPTQRPSDNSHNEHAPASQGLKAEHLYILIGVSVVFLFCLLLLVLFCLHRQNQIKQGPPRSKDEEQKPQQRPDLAVDVLERTADKATVNGLPEKDRETDTSALAAGSSQEVTYAQLDHWALTQRTARAVSPQSTKPMAESITYAAVARH

SEQ ID NO: 46496 - protein, 127 aa, Homo sapiens
  Payload ID: 9426
  Gene Symbol: LAIR1
  Gene Name: leukocyte-associated immunoglobulin-like receptor 1
  ENSP ID: ENSP00000375621
MSPHPTALLGLVLCLAQTIHTQEEDLPRPSISAEPGTVIPLGSHVTFVCRGPVGVQTFRLERDSRSTYNDTEDVSQASPSESEARFRIDSKALEARTPRTQSPAPQLDPRRGRRTTVTMSMHLLPKA

SEQ ID NO: 46497 - protein, 287 aa, Homo sapiens
  Payload ID: 9426
  Gene Symbol: LAIR1
  Gene Name: leukocyte-associated immunoglobulin-like receptor 1
  Uniprot ID: Q6GTX8
  ENSP ID: ENSP00000375622
MSPHPTALLGLVLCLAQTIHTQEEDLPRPSISAEPGTVIPLGSHVTFVCRGPVGVQTFRLERDSRSTYNDTEDVSQASPSESEARFRIDSVREGNAGLYRCIYYKPPKWSEQSDYLELLVKESSGGPDSPDTEPGSSAGPTQRPSDNSHNEHAPASQGLKAEHLYILIGVSVVFLFCLLLLVLFCLHRQNQIKQGPPRSKDEEQKPQQRPDLAVDVLERTADKATVNGLPEKDRETDTSALAAGSSQEVTYAQLDHWALTQRTARAVSPQSTKPMAESITYAAVARH

SEQ ID NO: 46498 - protein, 269 aa, Homo sapiens
  Payload ID: 9426
  Gene Symbol: LAIR1
  Gene Name: leukocyte-associated immunoglobulin-like receptor 1
  ENSP ID: ENSP00000375623
MEREMEDLPRPSISAEPGTVIPLGSHVTFVCRGPVGVQTFRLERDSRSTYNDTEDVSQASPSESEARFRIDSVREGNAGLYRCIYYKPPKWSEQSDYLELLVKESSGGPDSPDTEPGSSAGPTQRPSDNSHNEHAPASQGLKAEHLYILIGVSVVFLFCLLLLVLFCLHRQNQIKQGPPRSKDEEQKPQQRPDLAVDVLERTADKATVNGLPEKDRETDTSALAAGSSQEVTYAQLDHWALTQRTARAVSPQSTKPMAESITYAAVARH

SEQ ID NO: 46499 - protein, 286 aa, Homo sapiens
  Payload ID: 9426
  Gene Symbol: LAIR1
  Gene Name: leukocyte-associated immunoglobulin-like receptor 1
  ENSP ID: ENSP00000391003
MSPHPTALLGLVLCLAQTIHTQEDLPRPSISAEPGTVIPLGSHVTFVCRGPVGVQTFRLERDSRSTYNDTEDVSQASPSESEARFRIDSVREGNAGLYRCIYYKPPKWSEQSDYLELLVKESSGGPDSPDTEPGSSAGPTQRPSDNSHNEHAPASQGLKAEHLYILIGVSVVFLFCLLLLVLFCLHRQNQIKQGPPRSKDEEQKPQQRPDLAVDVLERTADKATVNGLPEKDRETDTSALAAGSSQEVTYAQLDHWALTQRTARAVSPQSTKPMAESITYAAVARH

SEQ ID NO: 46500 - protein, 93 aa, Homo sapiens
  Payload ID: 9426
  Gene Symbol: LAIR1
  Gene Name: leukocyte-associated immunoglobulin-like receptor 1
  ENSP ID: ENSP00000392058
MEREMVLCLAQTIHTQEEDLPRPSISAEPGTVIPLGSHVTFVCRGPVGVQTFRLERDSRSTYNDTEDVSQASPSESEARFRIDSVREGNAGLY

SEQ ID NO: 46501 - protein, 44 aa, Homo sapiens
  Payload ID: 9426
  Gene Symbol: LAIR1
  Gene Name: leukocyte-associated immunoglobulin-like receptor 1
  ENSP ID: ENSP00000399710
MSPHPTALLGLVLCLAQTIHTQEVDAEILLCFPPRRSAQTLHLG

SEQ ID NO: 46502 - protein, 44 aa, Homo sapiens; identical to SEQ ID NO: 46501
  Payload ID: 9426
  Gene Symbol: LAIR1
  Gene Name: leukocyte-associated immunoglobulin-like receptor 1
  ENSP ID: ENSP00000411632

SEQ ID NO: 46503 - protein, 153 aa, Homo sapiens
  Payload ID: 9426
  Gene Symbol: LAIR1
  Gene Name: leukocyte-associated immunoglobulin-like receptor 1
  ENSP ID: ENSP00000412796
MSPHPTALLGLVLCLAQTIHTQEEDLPRPSISAEPGTVIPLGSHVTFVCRGPVGVQTFRLERDSRSTYNDTEDVSQASPSESEARFRIDSVREGNAGLYRCIYYKPPKWSEQSDYLELLVKESSGGPDSPDTEPGSSAGPTQRPSDNSHNERE

SEQ ID NO: 46504 - protein, 269 aa, Homo sapiens
  Payload ID: 9426
  Gene Symbol: LAIR1
  Gene Name: leukocyte-associated immunoglobulin-like receptor 1
  Uniprot ID: Q6GTX8
  ENSP ID: ENSP00000418998
MSPHPTALLGLVLCLAQTIHTQEDLPRPSISAEPGTVIPLGSHVTFVCRGPVGVQTFRLERDSRSTYNDTEDVSQASPSESEARFRIDSVREGNAGLYRCIYYKPPKWSEQSDYLELLVKGPTQRPSDNSHNEHAPASQGLKAEHLYILIGVSVVFLFCLLLLVLFCLHRQNQIKQGPPRSKDEEQKPQQRPDLAVDVLERTADKATVNGLPEKDRETDTSALAAGSSQEVTYAQLDHWALTQRTARAVSPQSTKPMAESITYAAVARH

SEQ ID NO: 46505 - protein, 287 aa, Homo sapiens
  Payload ID: 9426
  Gene Symbol: LAIR1
  Gene Name: leukocyte-associated immunoglobulin-like receptor 1
  ENSP ID: ENSP00000478029
MSPHPTALLGLVLCLAQTIHTQEEDLPRPSISAEPGTVIPLGSHVTFVCRGPVGVQTFRLERESRSTYNDTEDVSQASPSESEARFRIDSVSEGNAGPYRCIYYKPPKWSEQSDYLELLVKETSGGRDSPDTEPGSSAGPTQRPSDNSHNEHAPASQGLKAEHLYILIGVSVVFLFCLLLLVLFCLHRQNQIKQGPPRSKDEEQKPQQRPDLAVDVLERTADKATVNGLPEKDRETDTSALAAGSSQEVTYAQLDHWALTQRTARAVSPQSTKPMAESITYAAVARH

SEQ ID NO: 46506 - protein, 44 aa, Homo sapiens; identical to SEQ ID NO: 46501
  Payload ID: 9426
  Gene Symbol: LAIR1
  Gene Name: leukocyte-associated immunoglobulin-like receptor 1
  ENSP ID: ENSP00000478330

SEQ ID NO: 46507 - protein, 269 aa, Homo sapiens
  Payload ID: 9426
  Gene Symbol: LAIR1
  Gene Name: leukocyte-associated immunoglobulin-like receptor 1
  Uniprot ID: Q6GTX8
  ENSP ID: ENSP00000478405
MSPHPTALLGLVLCLAQTIHTQEDLPRPSISAEPGTVIPLGSHVTFVCRGPVGVQTFRLERESRSTYNDTEDVSQASPSESEARFRIDSVSEGNAGPYRCIYYKPPKWSEQSDYLELLVKGPTQRPSDNSHNEHAPASQGLKAEHLYILIGVSVVFLFCLLLLVLFCLHRQNQIKQGPPRSKDEEQKPQQRPDLAVDVLERTADKATVNGLPEKDRETDTSALAAGSSQEVTYAQLDHWALTQRTARAVSPQSTKPMAESITYAAVARH

SEQ ID NO: 46508 - protein, 136 aa, Homo sapiens
  Payload ID: 9426
  Gene Symbol: LAIR1
  Gene Name: leukocyte-associated immunoglobulin-like receptor 1
  ENSP ID: ENSP00000478770
MSPHPTALLGLVLCLAQTIHTQEEDLPRPSISAEPGTVIPLGSHVTFVCRGPVGVQTFRLERESRSTYNDTEDVSQASPSESEARFRIDSVSEGNAGPYRCIYYKPPKWSEQSDYLELLVKGPTQRPSDNSHNERE

SEQ ID NO: 46509 - protein, 269 aa, Homo sapiens; identical to SEQ ID NO: 46507
  Payload ID: 9426
  Gene Symbol: LAIR1
  Gene Name: leukocyte-associated immunoglobulin-like receptor 1
  Uniprot ID: Q6GTX8
  ENSP ID: ENSP00000478853

SEQ ID NO: 46510 - protein, 110 aa, Homo sapiens
  Payload ID: 9426
  Gene Symbol: LAIR1
  Gene Name: leukocyte-associated immunoglobulin-like receptor 1
  ENSP ID: ENSP00000478951
MSPHPTALLGLVLCLAQTIHTQEEDLPRPSISAEPGTVIPLGSHVTFVCRGPVGVQTFRLERESRSTYNDTEDVSQASPSESEARFRIDSDPRRGRRTTVTMSMHLLPKA

SEQ ID NO: 46511 - protein, 269 aa, Homo sapiens; identical to SEQ ID NO: 46507
  Payload ID: 9426
  Gene Symbol: LAIR1
  Gene Name: leukocyte-associated immunoglobulin-like receptor 1
  Uniprot ID: Q6GTX8
  ENSP ID: ENSP00000479006

SEQ ID NO: 46512 - protein, 287 aa, Homo sapiens
  Payload ID: 9426
  Gene Symbol: LAIR1
  Gene Name: leukocyte-associated immunoglobulin-like receptor 1
  Uniprot ID: Q6GTX8
  ENSP ID: ENSP00000479133
MSPHPTALLGLVLCLAQTIHTQEEDLPRPSISAEPGTVIPLGSHVTFVCRGPVGVQTFRLERESRSTYNDTEDVSQASPSESEARFRIDSVSEGNAGPYRCIYYKPPKWSEQSDYLELLVKETSGGPDSPDTEPGSSAGPTQRPSDNSHNEHAPASQGLKAEHLYILIGVSVVFLFCLLLLVLFCLHRQNQIKQGPPRSKDEEQKPQQRPDLAVDVLERTADKATVNGLPEKDRETDTSALAAGSSQEVTYAQLDHWALTQRTARAVSPQSTKPMAESITYAAVARH

SEQ ID NO: 46513 - protein, 269 aa, Homo sapiens
  Payload ID: 9426
  Gene Symbol: LAIR1
  Gene Name: leukocyte-associated immunoglobulin-like receptor 1
  ENSP ID: ENSP00000479294
MEREMEDLPRPSISAEPGTVIPLGSHVTFVCRGPVGVQTFRLERESRSTYNDTEDVSQASPSESEARFRIDSVSEGNAGPYRCIYYKPPKWSEQSDYLELLVKETSGGPDSPDTEPGSSAGPTQRPSDNSHNEHAPASQGLKAEHLYILIGVSVVFLFCLLLLVLFCLHRQNQIKQGPPRSKDEEQKPQQRPDLAVDVLERTADKATVNGLPEKDRETDTSALAAGSSQEVTYAQLDHWALTQRTARAVSPQSTKPMAESITYAAVARH

SEQ ID NO: 46514 - protein, 270 aa, Homo sapiens
  Payload ID: 9426
  Gene Symbol: LAIR1
  Gene Name: leukocyte-associated immunoglobulin-like receptor 1
  Uniprot ID: Q6GTX8
  ENSP ID: ENSP00000479649
MSPHPTALLGLVLCLAQTIHTQEEDLPRPSISAEPGTVIPLGSHVTFVCRGPVGVQTFRLERESRSTYNDTEDVSQASPSESEARFRIDSVSEGNAGPYRCIYYKPPKWSEQSDYLELLVKGPTQRPSDNSHNEHAPASQGLKAEHLYILIGVSVVFLFCLLLLVLFCLHRQNQIKQGPPRSKDEEQKPQQRPDLAVDVLERTADKATVNGLPEKDRETDTSALAAGSSQEVTYAQLDHWALTQRTARAVSPQSTKPMAESITYAAVARH

SEQ ID NO: 46515 - protein, 287 aa, Homo sapiens; identical to SEQ ID NO: 46512
  Payload ID: 9426
  Gene Symbol: LAIR1
  Gene Name: leukocyte-associated immunoglobulin-like receptor 1
  Uniprot ID: Q6GTX8
  ENSP ID: ENSP00000479682

SEQ ID NO: 46516 - protein, 287 aa, Homo sapiens; identical to SEQ ID NO: 46512
  Payload ID: 9426
  Gene Symbol: LAIR1
  Gene Name: leukocyte-associated immunoglobulin-like receptor 1
  Uniprot ID: Q6GTX8
  ENSP ID: ENSP00000479707

SEQ ID NO: 46517 - protein, 269 aa, Homo sapiens; identical to SEQ ID NO: 46513
  Payload ID: 9426
  Gene Symbol: LAIR1
  Gene Name: leukocyte-associated immunoglobulin-like receptor 1
  ENSP ID: ENSP00000479951

SEQ ID NO: 46518 - protein, 270 aa, Homo sapiens; identical to SEQ ID NO: 46514
  Payload ID: 9426
  Gene Symbol: LAIR1
  Gene Name: leukocyte-associated immunoglobulin-like receptor 1
  Uniprot ID: Q6GTX8
  ENSP ID: ENSP00000480619

SEQ ID NO: 46519 - protein, 270 aa, Homo sapiens; identical to SEQ ID NO: 46514
  Payload ID: 9426
  Gene Symbol: LAIR1
  Gene Name: leukocyte-associated immunoglobulin-like receptor 1
  Uniprot ID: Q6GTX8
  ENSP ID: ENSP00000480659

SEQ ID NO: 46520 - protein, 269 aa, Homo sapiens; identical to SEQ ID NO: 46507
  Payload ID: 9426
  Gene Symbol: LAIR1
  Gene Name: leukocyte-associated immunoglobulin-like receptor 1
  Uniprot ID: Q6GTX8
  ENSP ID: ENSP00000481204

SEQ ID NO: 46521 - protein, 269 aa, Homo sapiens
  Payload ID: 9426
  Gene Symbol: LAIR1
  Gene Name: leukocyte-associated immunoglobulin-like receptor 1
  ENSP ID: ENSP00000481597
MEREMEDLPRPSISAEPGTVIPLGSHVTFVCRGPVGVQTFRLERESRSTYNDTEDVSQASPSESEARFRIDSVSEGNAGPYRCIYYKPPKWSEQSDYLELLVKETSGGRDSPDTEPGSSAGPTQRPSDNSHNEHAPASQGLKAEHLYILIGVSVVFLFCLLLLVLFCLHRQNQIKQGPPRSKDEEQKPQQRPDLAVDVLERTADKATVNGLPEKDRETDTSALAAGSSQEVTYAQLDHWALTQRTARAVSPQSTKPMAESITYAAVARH

SEQ ID NO: 46522 - protein, 276 aa, Homo sapiens
  Payload ID: 9426
  Gene Symbol: LAIR1
  Gene Name: leukocyte-associated immunoglobulin-like receptor 1
  ENSP ID: ENSP00000482135
MVLCLAQTIHTQEDLPRPSISAEPGTVIPLGSHVTFVCRGPVGVQTFRLERESRSTYNDTEDVSQASPSESEARFRIDSVSEGNAGPYRCIYYKPPKWSEQSDYLELLVKETSGGPDSPDTEPGSSAGPTQRPSDNSHNEHAPASQGLKAEHLYILIGVSVVFLFCLLLLVLFCLHRQNQIKQGPPRSKDEEQKPQQRPDLAVDVLERTADKATVNGLPEKDRETDTSALAAGSSQEVTYAQLDHWALTQRTARAVSPQSTKPMAESITYAAVARH

SEQ ID NO: 46523 - protein, 79 aa, Homo sapiens
  Payload ID: 9426
  Gene Symbol: LAIR1
  Gene Name: leukocyte-associated immunoglobulin-like receptor 1
  ENSP ID: ENSP00000482572
EQSDYLELLVKETSGGPDSPDTEPGSSAGTVPGTEASGFDAPRMRRNGLPSCELQWGEIVRMSNRNALIPIHAYTDKNI

SEQ ID NO: 46524 - protein, 286 aa, Homo sapiens
  Payload ID: 9426
  Gene Symbol: LAIR1
  Gene Name: leukocyte-associated immunoglobulin-like receptor 1
  ENSP ID: ENSP00000482633
MSPHPTALLGLVLCLAQTIHTQEDLPRPSISAEPGTVIPLGSHVTFVCRGPVGVQTFRLERESRSTYNDTEDVSQASPSESEARFRIDSVSEGNAGPYRCIYYKPPKWSEQSDYLELLVKETSGGPDSPDTEPGSSAGPTQRPSDNSHNEHAPASQGLKAEHLYILIGVSVVFLFCLLLLVLFCLHRQNQIKQGPPRSKDEEQKPQQRPDLAVDVLERTADKATVNGLPEKDRETDTSALAAGSSQEVTYAQLDHWALTQRTARAVSPQSTKPMAESITYAAVARH

SEQ ID NO: 46525 - protein, 270 aa, Homo sapiens; identical to SEQ ID NO: 46514
  Payload ID: 9426
  Gene Symbol: LAIR1
  Gene Name: leukocyte-associated immunoglobulin-like receptor 1
  Uniprot ID: Q6GTX8
  ENSP ID: ENSP00000482922

SEQ ID NO: 46526 - protein, 44 aa, Homo sapiens; identical to SEQ ID NO: 46501
  Payload ID: 9426
  Gene Symbol: LAIR1
  Gene Name: leukocyte-associated immunoglobulin-like receptor 1
  ENSP ID: ENSP00000483342

SEQ ID NO: 46527 - protein, 269 aa, Homo sapiens; identical to SEQ ID NO: 46513
  Payload ID: 9426
  Gene Symbol: LAIR1
  Gene Name: leukocyte-associated immunoglobulin-like receptor 1
  ENSP ID: ENSP00000483622

SEQ ID NO: 46528 - protein, 79 aa, Homo sapiens
  Payload ID: 9426
  Gene Symbol: LAIR1
  Gene Name: leukocyte-associated immunoglobulin-like receptor 1
  ENSP ID: ENSP00000483867
EQSDYLELLVKESSGGPDSPDTEPGSSAGTVPGTEASGFDAPRMRRNGLPSCELQWGEIVRMSNRNALIPIHAYTDKNI

SEQ ID NO: 46529 - protein, 286 aa, Homo sapiens; identical to SEQ ID NO: 46524
  Payload ID: 9426
  Gene Symbol: LAIR1
  Gene Name: leukocyte-associated immunoglobulin-like receptor 1
  ENSP ID: ENSP00000484578

SEQ ID NO: 46530 - protein, 286 aa, Homo sapiens
  Payload ID: 9426
  Gene Symbol: LAIR1
  Gene Name: leukocyte-associated immunoglobulin-like receptor 1
  ENSP ID: ENSP00000484953
MSPHPTALLGLVLCLAQTIHTQEDLPRPSISAEPGTVIPLGSHVTFVCRGPVGVQTFRLERESRSTYNDTEDVSQASPSESEARFRIDSVSEGNAGPYRCIYYKPPKWSEQSDYLELLVKETSGGRDSPDTEPGSSAGPTQRPSDNSHNEHAPASQGLKAEHLYILIGVSVVFLFCLLLLVLFCLHRQNQIKQGPPRSKDEEQKPQQRPDLAVDVLERTADKATVNGLPEKDRETDTSALAAGSSQEVTYAQLDHWALTQRTARAVSPQSTKPMAESITYAAVARH

SEQ ID NO: 46531 - protein, 152 aa, Homo sapiens
  Payload ID: 9427
  Gene Symbol: LAIR2
  Gene Name: leukocyte-associated immunoglobulin-like receptor 2
  Uniprot ID: Q6ISS4
  ENSP ID: ENSP00000301202
MSPHLTALLGLVLCLAQTIHTQEGALPRPSISAEPGTVISPGSHVTFMCRGPVGVQTFRLEREDRAKYKDSYNVFRLGPSESEARFHIDSVSEGNAGLYRCLYYKPPGWSEHSDFLELLVKESSGGPDSPDTEPGSSAGTVPGTEASGFDAP

SEQ ID NO: 46532 - protein, 135 aa, Homo sapiens
  Payload ID: 9427
  Gene Symbol: LAIR2
  Gene Name: leukocyte-associated immunoglobulin-like receptor 2
  Uniprot ID: Q6ISS4
  ENSP ID: ENSP00000301203
MSPHLTALLGLVLCLAQTIHTQEGALPRPSISAEPGTVISPGSHVTFMCRGPVGVQTFRLEREDRAKYKDSYNVFRLGPSESEARFHIDSVSEGNAGLYRCLYYKPPGWSEHSDFLELLVKGTVPGTEASGFDAP

SEQ ID NO: 46533 - protein, 89 aa, Homo sapiens
  Payload ID: 9427
  Gene Symbol: LAIR2
  Gene Name: leukocyte-associated immunoglobulin-like receptor 2
  ENSP ID: ENSP00000390729
MEREMVLCLAQTIHTQEGALPRPSISAEPGTVISPGSHVTFMCRGPVGVQTFRLEREDRAKYKDSYNVFRLGPSESEARFHIDSVSEGN

SEQ ID NO: 46534 - protein, 152 aa, Homo sapiens; identical to SEQ ID NO: 46531
  Payload ID: 9427
  Gene Symbol: LAIR2
  Gene Name: leukocyte-associated immunoglobulin-like receptor 2
  Uniprot ID: Q6ISS4
  ENSP ID: ENSP00000477535

SEQ ID NO: 46535 - protein, 100 aa, Homo sapiens
  Payload ID: 9427
  Gene Symbol: LAIR2
  Gene Name: leukocyte-associated immunoglobulin-like receptor 2
  ENSP ID: ENSP00000477714
MEREMVLCLAQTIHTQEGALPRPSISAEPGTVISPGSHVTFMCRGPVGVQTFRLEREDRAKYKDSYNVFRLGPSESEARFHIDSVSEGNAGLYRCLYYKP

SEQ ID NO: 46536 - protein, 135 aa, Homo sapiens; identical to SEQ ID NO: 46532
  Payload ID: 9427
  Gene Symbol: LAIR2
  Gene Name: leukocyte-associated immunoglobulin-like receptor 2
  Uniprot ID: Q6ISS4
  ENSP ID: ENSP00000477747

SEQ ID NO: 46537 - protein, 152 aa, Homo sapiens; identical to SEQ ID NO: 46531
  Payload ID: 9427
  Gene Symbol: LAIR2
  Gene Name: leukocyte-associated immunoglobulin-like receptor 2
  Uniprot ID: Q6ISS4
  ENSP ID: ENSP00000478193

SEQ ID NO: 46538 - protein, 175 aa, Homo sapiens
  Payload ID: 9427
  Gene Symbol: LAIR2
  Gene Name: leukocyte-associated immunoglobulin-like receptor 2
  ENSP ID: ENSP00000478866
MSPHLTALLGLVLCLAQTIHTQEGALPRPSISAEPGTVISPGSHVTFMCRGPVGVQTFRLEREDRAKYKDSYNVFRLGPSESEARFHIDSVSEGNAGLYRCLYYKPPGWSEHSDFLELLVKGTVPGTEASGFDAPRMRRNGLPSCELQWGEIIRMSNRNAQMPIHTYTNKKIRFA

SEQ ID NO: 46539 - protein, 77 aa, Homo sapiens
  Payload ID: 9427
  Gene Symbol: LAIR2
  Gene Name: leukocyte-associated immunoglobulin-like receptor 2
  ENSP ID: ENSP00000479882
MEREMGALPRPSISAEPGTVISPGSHVTFMCRGPVGVQTFRLEREDRAKYKDSYNVFRLGPSESEARFHIDSVSEGN

SEQ ID NO: 46540 - protein, 115 aa, Homo sapiens
  Payload ID: 9427
  Gene Symbol: LAIR2
  Gene Name: leukocyte-associated immunoglobulin-like receptor 2
  ENSP ID: ENSP00000480374
MEREMVLCLAQTIHTQEGALPRPSISAEPGTVISPGSHVTFMCRGPVGVQTFRLEREDRAKYKDSYNVFRLGPSESEARFHIDSVSEGNAGLYRCLYYKPPGWSEHSDFLELLVK

SEQ ID NO: 46541 - protein, 77 aa, Homo sapiens; identical to SEQ ID NO: 46539
  Payload ID: 9427
  Gene Symbol: LAIR2
  Gene Name: leukocyte-associated immunoglobulin-like receptor 2
  ENSP ID: ENSP00000480394

SEQ ID NO: 46542 - protein, 77 aa, Homo sapiens; identical to SEQ ID NO: 46539
  Payload ID: 9427
  Gene Symbol: LAIR2
  Gene Name: leukocyte-associated immunoglobulin-like receptor 2
  ENSP ID: ENSP00000480413

SEQ ID NO: 46543 - protein, 89 aa, Homo sapiens; identical to SEQ ID NO: 46533
  Payload ID: 9427
  Gene Symbol: LAIR2
  Gene Name: leukocyte-associated immunoglobulin-like receptor 2
  ENSP ID: ENSP00000480617

SEQ ID NO: 46544 - protein, 135 aa, Homo sapiens; identical to SEQ ID NO: 46532
  Payload ID: 9427
  Gene Symbol: LAIR2
  Gene Name: leukocyte-associated immunoglobulin-like receptor 2
  Uniprot ID: Q6ISS4
  ENSP ID: ENSP00000480904

SEQ ID NO: 46545 - protein, 208 aa, Homo sapiens
  Payload ID: 9427
  Gene Symbol: LAIR2
  Gene Name: leukocyte-associated immunoglobulin-like receptor 2
  ENSP ID: ENSP00000483654
MSPHLTALLGLVLCLAQTIHTQEGALPRPSISAEPGTVISPGSHVTFMCRGPVGVQTFRLEREDRAKYKDSYNVFRLGPSESEARFHIDSVSEGNAGLYRCLYYKPPGWSEHSDFLELLVKESSGGPDSPDTEPGSSAGTVPGTEASGFDAPRMRRNGLPSCELQWGEIIRMSNRNAQMPIHTYTNKKIRFAMENFRPIISIILNMFT

SEQ ID NO: 46546 - protein, 77 aa, Homo sapiens; identical to SEQ ID NO: 46539
  Payload ID: 9427
  Gene Symbol: LAIR2
  Gene Name: leukocyte-associated immunoglobulin-like receptor 2
  ENSP ID: ENSP00000484484

SEQ ID NO: 46547 - protein, 611 aa, Homo sapiens
  Payload ID: 9428
  Gene Symbol: LTA4H
  Gene Name: leukotriene A4 hydrolase
  Uniprot ID: P09960
  ENSP ID: ENSP00000228740
MPEIVDTCSLASPASVCRTKHLHLRCSVDFTRRTLTGTAALTVQSQEDNLRSLVLDTKDLTIEKVVINGQEVKYALGERQSYKGSPMEISLPIALSKNQEIVIEISFETSPKSSALQWLTPEQTSGKEHPYLFSQCQAIHCRAILPCQDTPSVKLTYTAEVSVPKELVALMSAIRDGETPDPEDPSRKIYKFIQKVPIPCYLIALVVGALESRQIGPRTLVWSEKEQVEKSAYEFSETESMLKIAEDLGGPYVWGQYDLLVLPPSFPYGGMENPCLTFVTPTLLAGDKSLSNVIAHEISHSWTGNLVTNKTWDHFWLNEGHTVYLERHICGRLFGEKFRHFNALGGWGELQNSVKTFGETHPFTKLVVDLTDIDPDVAYSSVPYEKGFALLFYLEQLLGGPEIFLGFLKAYVEKFSYKSITTDDWKDFLYSYFKDKVDVLNQVDWNAWLYSPGLPPIKPNYDMTLTNACIALSQRWITAKEDDLNSFNATDLKDLSSHQLNEFLAQTLQRAPLPLGHIKRMQEVYNFNAINNSEIRFRWLRLCIQSKWEDAIPLALKMATEQGRMKFTRPLFKDLAAFDKSHDQAVRTYQEHKASMHPVTAMLVGKDLKVD

SEQ ID NO: 46548 - protein, 508 aa, Homo sapiens
  Payload ID: 9428
  Gene Symbol: LTA4H
  Gene Name: leukotriene A4 hydrolase
  Uniprot ID: P09960
  ENSP ID: ENSP00000395051
MLPQRNLSKRQVPTMHIPVKTRRLLAALKVLDTKDLTIEKVVINGQEVKYALGERQSYKGSPMEISLPIALSKNQEIVIEISFETSPKSSALQWLTPEQTSGKEHPYLFSQCQAIHCRAILPCQDTPSVKLTYTAEVSVPKELVALMSAIRDGETPDPEDPSRKIYKFIQKVPIPCYLIALVVGALESRQIGPRTLVWSEKEQVEKSAYEFSETESMLKIAEDLGGPYVWGQYDLLVLPPSFPYGGMENPCLTFVTPTLLAGDKSLSNVIAHEISHSWTGNLVTNKTWDHFWLNEGHTVYLERHICGRLFGEKFRHFNALGGWGELQNSVKTFGETHPFTKLVVDLTDIDPDVAYSSVPYEKGFALLFYLEQLLGGPEIFLGFLKAYVEKFSYKSITTDDWKDFLYSYFKDKVDVLNQVDWNAWLYSPGLPPIKPNYDMTLTNACIALSQRWITAKEDDLNSFNATDLKDLSSHQLNEFLAQTLQRMAAALHSIQVGGRNSFGAKDGN

SEQ ID NO: 46549 - protein, 132 aa, Homo sapiens
  Payload ID: 9428
  Gene Symbol: LTA4H
  Gene Name: leukotriene A4 hydrolase
  ENSP ID: ENSP00000449340
MPEIVDTCSLASPASVCRTKHLHLRCSVDFTRRTLTGTAALTVQSQEDNLRSLVLDTKDLTIEKVVINGQEVKYALGERQSYKGSPMEISLPIALSNGSLLNRLLGRNTHISLVSARPSTAEQSFLVRTLLL

SEQ ID NO: 46550 - protein, 587 aa, Homo sapiens
  Payload ID: 9428
  Gene Symbol: LTA4H
  Gene Name: leukotriene A4 hydrolase
  Uniprot ID: P09960
  ENSP ID: ENSP00000449958
MLPQRNLSKRQVPTMHIPVKTRRLLAALKVLDTKDLTIEKVVINGQEVKYALGERQSYKGSPMEISLPIALSKNQEIVIEISFETSPKSSALQWLTPEQTSGKEHPYLFSQCQAIHCRAILPCQDTPSVKLTYTAEVSVPKELVALMSAIRDGETPDPEDPSRKIYKFIQKVPIPCYLIALVVGALESRQIGPRTLVWSEKEQVEKSAYEFSETESMLKIAEDLGGPYVWGQYDLLVLPPSFPYGGMENPCLTFVTPTLLAGDKSLSNVIAHEISHSWTGNLVTNKTWDHFWLNEGHTVYLERHICGRLFGEKFRHFNALGGWGELQNSVKTFGETHPFTKLVVDLTDIDPDVAYSSVPYEKGFALLFYLEQLLGGPEIFLGFLKAYVEKFSYKSITTDDWKDFLYSYFKDKVDVLNQVDWNAWLYSPGLPPIKPNYDMTLTNACIALSQRWITAKEDDLNSFNATDLKDLSSHQLNEFLAQTLQRAPLPLGHIKRMQEVYNFNAINNSEIRFRWLRLCIQSKWEDAIPLALKMATEQGRMKFTRPLFKDLAAFDKSHDQAVRTYQEHKASMHPVTAMLVGKDLKVD

SEQ ID NO: 46551 - protein, 352 aa, Homo sapiens
  Payload ID: 9429
  Gene Symbol: LTB4R
  Gene Name: leukotriene B4 receptor
  Uniprot ID: Q15722
  ENSP ID: ENSP00000307445
MNTTSSAAPPSLGVEFISLLAIILLSVALAVGLPGNSFVVWSILKRMQKRSVTALMVLNLALADLAVLLTAPFFLHFLAQGTWSFGLAGCRLCHYVCGVSMYASVLLITAMSLDRSLAVARPFVSQKLRTKAMARRVLAGIWVLSFLLATPVLAYRTVVPWKTNMSLCFPRYPSEGHRAFHLIFEAVTGFLLPFLAVVASYSDIGRRLQARRFRRSRRTGRLVVLIILTFAAFWLPYHVVNLAEAGRALAGQAAGLGLVGKRLSLARNVLIALAFLSSSVNPVLYACAGGGLLRSAGVGFVAKLLEGTGSEASSTRRGGSLGQTARSGPAALEPGPSESLTASSPLKLNELN

SEQ ID NO: 46552 - protein, 352 aa, Homo sapiens; identical to SEQ ID NO: 46551
  Payload ID: 9429
  Gene Symbol: LTB4R
  Gene Name: leukotriene B4 receptor
  Uniprot ID: Q15722
  ENSP ID: ENSP00000380002

SEQ ID NO: 46553 - protein, 352 aa, Homo sapiens; identical to SEQ ID NO: 46551
  Payload ID: 9429
  Gene Symbol: LTB4R
  Gene Name: leukotriene B4 receptor
  Uniprot ID: Q15722
  ENSP ID: ENSP00000380008

SEQ ID NO: 46554 - protein, 102 aa, Homo sapiens
  Payload ID: 9429
  Gene Symbol: LTB4R
  Gene Name: leukotriene B4 receptor
  ENSP ID: ENSP00000450457
MNTTSSAAPPSLGVEFISLLAIILLSVALAVGLPGNSFVVWSILKRMQKRSVTALMVLNLALADLAVLLTAPFFLHFLAQGTWSFGLAGCRLCHYVCGVSMY

SEQ ID NO: 46555 - protein, 232 aa, Homo sapiens
  Payload ID: 9429
  Gene Symbol: LTB4R
  Gene Name: leukotriene B4 receptor
  ENSP ID: ENSP00000451929
MYASVLLITAMSLDRSLAVARPFVSQKLRTKAMARRVLAGIWVLSFLLATPVLAYRTVVPWKTNMSLCFPRYPSEGHRAFHLIFEAVTGFLLPFLAVVASYSDIGRRLQARRFRRSRRTGRLVVLIILTFAAFWLPYHVVNLAEAGRALAGQAAGLGLVGKRLSLARNVLIALAFLSSSVNPVLYACAGGGLLRSAGVGFVAKLLEGTGSEASSTRRGGSLGQTARSGPAAL

SEQ ID NO: 46556 - protein, 389 aa, Homo sapiens
  Payload ID: 9430
  Gene Symbol: LTB4R2
  Gene Name: leukotriene B4 receptor 2
  Uniprot ID: Q9NPC1
  ENSP ID: ENSP00000432146
MAPSHRASQVGFCPTPERPLWRLPPTCRPRRMSVCYRPPGNETLLSWKTSRATGTAFLLLAALLGLPGNGFVVWSLAGWRPARGRPLAATLVLHLALADGAVLLLTPLFVAFLTRQAWPLGQAGCKAVYYVCALSMYASVLLTGLLSLQRCLAVTRPFLAPRLRSPALARRLLLAVWLAALLLAVPAAVYRHLWRDRVCQLCHPSPVHAAAHLSLETLTAFVLPFGLMLGCYSVTLARLRGARWGSGRHGARVGRLVSAIVLAFGLLWAPYHAVNLLQAVAALAPPEGALAKLGGAGQAARAGTTALAFFSSSVNPVLYVFTAGDLLPRAGPRFLTRLFEGSGEARGGGRSREGTMELRTTPQLKVVGQGRGNGDPGGGMEKDGPEWDL

SEQ ID NO: 46557 - protein, 358 aa, Homo sapiens
  Payload ID: 9430
  Gene Symbol: LTB4R2
  Gene Name: leukotriene B4 receptor 2
  Uniprot ID: Q9NPC1
  ENSP ID: ENSP00000433290
MSVCYRPPGNETLLSWKTSRATGTAFLLLAALLGLPGNGFVVWSLAGWRPARGRPLAATLVLHLALADGAVLLLTPLFVAFLTRQAWPLGQAGCKAVYYVCALSMYASVLLTGLLSLQRCLAVTRPFLAPRLRSPALARRLLLAVWLAALLLAVPAAVYRHLWRDRVCQLCHPSPVHAAAHLSLETLTAFVLPFGLMLGCYSVTLARLRGARWGSGRHGARVGRLVSAIVLAFGLLWAPYHAVNLLQAVAALAPPEGALAKLGGAGQAARAGTTALAFFSSSVNPVLYVFTAGDLLPRAGPRFLTRLFEGSGEARGGGRSREGTMELRTTPQLKVVGQGRGNGDPGGGMEKDGPEWDL

SEQ ID NO: 46558 - protein, 319 aa, Homo sapiens
  Payload ID: 9430
  Gene Symbol: LTB4R2
  Gene Name: leukotriene B4 receptor 2
  ENSP ID: ENSP00000434760
MSVCYRPPGNETLLSWKTSRATGTAFLLLAALLGLPGNGFVVWSLAGWRPARGRPLAATLVLHLALADGAVLLLTPLFVAFLTRQAWPLGQAGCKAVYYVCALSMYASVLLTGLLSLQRCLAVTRPFLAPRLRSPALARRLLLAVWLAALLLAVPAAVYRHLWRDRVCQLCHPSPVHAAAHLSLETLTAFVLPFGLMLGCYSVTLARLRGARWGSGRHGARVGRLVSAIVLAFGLLWAPYHAVNLLQAVAALAPPEGALAKLGGAGQAARAGTTALAFFSSSVNPVLYVFTAGDLLPRAGPRFLTRLFEGSGEARGGGR

SEQ ID NO: 46559 - protein, 160 aa, Homo sapiens
  Payload ID: 9430
  Gene Symbol: LTB4R2
  Gene Name: leukotriene B4 receptor 2
  ENSP ID: ENSP00000436668
MSVCYRPPGNETLLSWKTSRATGTAFLLLAALLGLPGNGFVVWSLAGWRPARGRPLAATLVLHLALADGAVLLLTPLFVAFLTRQAWPLGQAGCKAVYYVCALSMYASVLLTGLLSLQRCLAVTRPFLAPRLRSPALARRLLLAVWLAALLLAVPAAVYR

SEQ ID NO: 46560 - protein, 358 aa, Homo sapiens; identical to SEQ ID NO: 46557
  Payload ID: 9430
  Gene Symbol: LTB4R2
  Gene Name: leukotriene B4 receptor 2
  Uniprot ID: Q9NPC1
  ENSP ID: ENSP00000445772

SEQ ID NO: 46561 - protein, 150 aa, Homo sapiens
  Payload ID: 9431
  Gene Symbol: LTC4S
  Gene Name: leukotriene C4 synthase
  Uniprot ID: Q16873
  ENSP ID: ENSP00000292596
MKDEVALLAAVTLLGVLLQAYFSLQVISARRAFRVSPPLTTGPPEFERVYRAQVNCSEYFPLFLATLWVAGIFFHEGAAALCGLVYLFARLRYFQGYARSAQLRLAPLYASARALWLLVALAALGLLAHFLPAALRAALLGRLRTLLPWA

SEQ ID NO: 46562 - protein, 93 aa, Homo sapiens
  Payload ID: 9431
  Gene Symbol: LTC4S
  Gene Name: leukotriene C4 synthase
  ENSP ID: ENSP00000385627
MKDEVALLAAVTLLGVLLQGAAALCGLVYLFARLRYFQGYARSAQLRLAPLYASARALWLLVALAALGLLAHFLPAALRAALLGRLRTLLPWA

SEQ ID NO: 46563 - protein, 69 aa, Homo sapiens
  Payload ID: 9431
  Gene Symbol: LTC4S
  Gene Name: leukotriene C4 synthase
  ENSP ID: ENSP00000427299
MKDEVALLAAVTLLGVLLQGDLGAQGLPRVAAAHHRPTRVRARLPSPGELQRVLPAVPRHALGRRHLLS

SEQ ID NO: 46564 - protein, 386 aa, Homo sapiens
  Payload ID: 9432
  Gene Symbol: LPXN
  Gene Name: leupaxin
  Uniprot ID: O60711
  ENSP ID: ENSP00000378512
MEELDALLEELERSTLQDSDEYSNPAPLPLDQHSRKETNLDETSEILSIQDNTSPLPAQLVYTTNIQELNVYSEAQEPKESPPPSKTSAAAQLDELMAHLTEMQAKVAVRADAGKKHLPDKQDHKASLDSMLGGLEQELQDLGIATVPKGHCASCQKPIAGKVIHALGQSWHPEHFVCTHCKEEIGSSPFFERSGLAYCPNDYHQLFSPRCAYCAAPILDKVLTAMNQTWHPEHFFCSHCGEVFGAEGFHEKDKKPYCRKDFLAMFSPKCGGCNRPVLENYLSAMDTVWHPECFVCGDCFTSFSTGSFFELDGRPFCELHYHHRRGTLCHGCGQPITGRCISAMGYKFHPEHFVCAFCLTQLSKGIFREQNDKTYCQPCFNKLFPL

SEQ ID NO: 46565 - protein, 391 aa, Homo sapiens
  Payload ID: 9432
  Gene Symbol: LPXN
  Gene Name: leupaxin
  Uniprot ID: O60711
  ENSP ID: ENSP00000431284
MSTLLISSSDALLEELERSTLQDSDEYSNPAPLPLDQHSRKETNLDETSEILSIQDNTSPLPAQLVYTTNIQELNVYSEAQEPKESPPPSKTSAAAQLDELMAHLTEMQAKVAVRADAGKKHLPDKQDHKASLDSMLGGLEQELQDLGIATVPKGHCASCQKPIAGKVIHALGQSWHPEHFVCTHCKEEIGSSPFFERSGLAYCPNDYHQLFSPRCAYCAAPILDKVLTAMNQTWHPEHFFCSHCGEVFGAEGFHEKDKKPYCRKDFLAMFSPKCGGCNRPVLENYLSAMDTVWHPECFVCGDCFTSFSTGSFFELDGRPFCELHYHHRRGTLCHGCGQPITGRCISAMGYKFHPEHFVCAFCLTQLSKGIFREQNDKTYCQPCFNKLFPL

SEQ ID NO: 46566 - protein, 106 aa, Homo sapiens
  Payload ID: 9432
  Gene Symbol: LPXN
  Gene Name: leupaxin
  ENSP ID: ENSP00000437094
MEELDALLEELERSTLQDSDEYSNPAPLPLDQHSRKETNLDETSEILSIQDNTSPLPAQLVYTTNIQELNVYSEAQEPKESPPPSKTSAAAQLDELMAHLTEMQAK

SEQ ID NO: 46567 - protein, 366 aa, Homo sapiens
  Payload ID: 9432
  Gene Symbol: LPXN
  Gene Name: leupaxin
  ENSP ID: ENSP00000461855
MPYWRNWNAPPFRTVMNIPTQLLFPWISIPERRLTLMRLRRSFLFRITQVPCREAQEPKESPPPSKTSAAAQLDELMAHLTEMQAKVAVRADAGKKHLPDKQDHKASLDSMLGGLEQELQDLGIATVPKGHCASCQKPIAGKVIHALGQSWHPEHFVCTHCKEEIGSSPFFERSGLAYCPNDYHQLFSPRCAYCAAPILDKVLTAMNQTWHPEHFFCSHCGEVFGAEGFHEKDKKPYCRKDFLAMFSPKCGGCNRPVLENYLSAMDTVWHPECFVCGDCFTSFSTGSFFELDGRPFCELHYHHRRGTLCHGCGQPITGRCISAMGYKFHPEHFVCAFCLTQLSKGIFREQNDKTYCQPCFNKLFPL

SEQ ID NO: 46568 - protein, 379 aa, Homo sapiens
  Payload ID: 9433
  Gene Symbol: LFNG
  Gene Name: LFNG O-fucosylpeptide 3-beta-N-acetylglucosaminyltransferase
  Uniprot ID: Q8NES3
  ENSP ID: ENSP00000222725
MLKRCGRRLLLALAGALLACLLVLTADPPPPPLPAERGRRALRSLAGPAGAAPAPGLGAAAAAPGALVRDVHSLSEYFSLLTRARRDAGPPPGAAPRPADGHPRPLAEPLAPRDVFIAVKTTKKFHRARLDLLLETWISRHKEMTFIFTDGEDEALARHTGNVVITNCSAAHSRQALSCKMAVEYDRFIESGRKWFCHVDDDNYVNLRALLRLLASYPHTRDVYVGKPSLDRPIQAMERVSENKVRPVHFWFATGGAGFCISRGLALKMSPWASGGHFMNTAERIRLPDDCTIGYIVEALLGVPLIRSGLFHSHLENLQQVPTSELHEQVTLSYGMFENKRNAVHVKGPFSVEADPSRFRSIHCHLYPDTPWCPRTAIF

SEQ ID NO: 46569 - protein, 250 aa, Homo sapiens
  Payload ID: 9433
  Gene Symbol: LFNG
  Gene Name: LFNG O-fucosylpeptide 3-beta-N-acetylglucosaminyltransferase
  Uniprot ID: Q8NES3
  ENSP ID: ENSP00000343095
MTPGRCCLAADIQVETFIFTDGEDEALARHTGNVVITNCSAAHSRQALSCKMAVEYDRFIESGRKWFCHVDDDNYVNLRALLRLLASYPHTRDVYVGKPSLDRPIQAMERVSENKVRPVHFWFATGGAGFCISRGLALKMSPWASGGHFMNTAERIRLPDDCTIGYIVEALLGVPLIRSGLFHSHLENLQQVPTSELHEQVTLSYGMFENKRNAVHVKGPFSVEADPSRFRSIHCHLYPDTPWCPRTAIF

SEQ ID NO: 46570 - protein, 361 aa, Homo sapiens
  Payload ID: 9433
  Gene Symbol: LFNG
  Gene Name: LFNG O-fucosylpeptide 3-beta-N-acetylglucosaminyltransferase
  Uniprot ID: Q8NES3
  ENSP ID: ENSP00000352579
MLKRCGRRLLLALAGALLACLLVLTADPPPPPLPAERGRRALRSLAGPAGAAPAPGLGAAAAAPGALVRDVHSLSEYFSLLTRARRDAGPPPGAAPRPADGHPRPLAEPLAPRDVFIAVKTTKKFHRARLDLLLETWISRHKEMTFIFTDGEDEALARHTGNVVITNCSAAHSRQALSCKMAVEYDRFIESGRKWFCHVDDDNYVNLRALLRLLASYPHTRDVYVGKPSLDRPIQAMERVSENKVRPVHFWFATGGAGFCISRGLALKMSPWASGGHFMNTAERIRLPDDCTIGYIVEALLGVPLIRSGLFHSHLENLQQVPTSELHEQVTLSYGMFENKRNAVHVKGPFSVEADPSRWGN

SEQ ID NO: 46571 - protein, 250 aa, Homo sapiens; identical to SEQ ID NO: 46569
  Payload ID: 9433
  Gene Symbol: LFNG
  Gene Name: LFNG O-fucosylpeptide 3-beta-N-acetylglucosaminyltransferase
  Uniprot ID: Q8NES3
  ENSP ID: ENSP00000384786

SEQ ID NO: 46572 - protein, 308 aa, Homo sapiens
  Payload ID: 9433
  Gene Symbol: LFNG
  Gene Name: LFNG O-fucosylpeptide 3-beta-N-acetylglucosaminyltransferase
  Uniprot ID: Q8NES3
  ENSP ID: ENSP00000385764
MDEQTGRLRLDTYCMSAKQIWAWSKCSGRLWDEHMKWMEGWTDRWTDGWMDGWMDEWSPTPALRSYGGGLSQQTFIFTDGEDEALARHTGNVVITNCSAAHSRQALSCKMAVEYDRFIESGRKWFCHVDDDNYVNLRALLRLLASYPHTRDVYVGKPSLDRPIQAMERVSENKVRPVHFWFATGGAGFCISRGLALKMSPWASGGHFMNTAERIRLPDDCTIGYIVEALLGVPLIRSGLFHSHLENLQQVPTSELHEQVTLSYGMFENKRNAVHVKGPFSVEADPSRFRSIHCHLYPDTPWCPRTAIF

SEQ ID NO: 46573 - protein, 248 aa, Homo sapiens
  Payload ID: 9433
  Gene Symbol: LFNG
  Gene Name: LFNG O-fucosylpeptide 3-beta-N-acetylglucosaminyltransferase
  ENSP ID: ENSP00000483986
MKGCLLKADFLLQTFIFTDGEDEALARHTGNVVITNCSAAHSRQALSCKMAVEYDRFIESGRKWFCHVDDDNYVNLRALLRLLASYPHTRDVYVGKPSLDRPIQAMERVSENKVRPVHFWFATGGAGFCISRGLALKMSPWASGGHFMNTAERIRLPDDCTIGYIVEALLGVPLIRSGLFHSHLENLQQVPTSELHEQVTLSYGMFENKRNAVHVKGPFSVEADPSRFRSIHCHLYPDTPWCPRTAIF

SEQ ID NO: 46574 - protein, 433 aa, Homo sapiens
  Payload ID: 9434
  Gene Symbol: LCOR
  Gene Name: ligand dependent nuclear receptor corepressor
  Uniprot ID: Q96JN0
  ENSP ID: ENSP00000348298
MQRMIQQFAAEYTSKNSSTQDPSQPNSTKNQSLPKASPVTTSPTAATTQNPVLSKLLMADQDSPLDLTVRKSQSEPSEQDGVLDLSTKKSPCAGSTSLSHSPGCSSTQGNGRPGRPSQYRPDGLRSGDGVPPRSLQDGTREGFGHSTSLKVPLARSLQISEELLSRNQLSTAASLGPSGLQNHGQHLILSREASWAKPHYEFNLSRMKFRGNGALSNISDLPFLAENSAFPKMALQAKQDGKKDVSHSSPVDLKIPQVRGMDLSWESRTGDQYSYSSLVMGSQTESALSKKLRAILPKQSRKSMLDAGPDSWGSDAEQSTSGQPYPTSDQEGDPGSKQPRKKRGRYRQYNSEILEEAISVVMSGKMSVSKAQSIYGIPHSTLEYKVKERLGTLKNPPKKKMKLMRSEGPDVSVKIELDPQGEAAQSANESKNE

SEQ ID NO: 46575 - protein, 433 aa, Homo sapiens; identical to SEQ ID NO: 46574
  Payload ID: 9434
  Gene Symbol: LCOR
  Gene Name: ligand dependent nuclear receptor corepressor
  Uniprot ID: Q96JN0
  ENSP ID: ENSP00000360138

SEQ ID NO: 46576 - protein, 433 aa, Homo sapiens; identical to SEQ ID NO: 46574
  Payload ID: 9434
  Gene Symbol: LCOR
  Gene Name: ligand dependent nuclear receptor corepressor
  Uniprot ID: Q96JN0
  ENSP ID: ENSP00000360144

SEQ ID NO: 46577 - protein, 406 aa, Homo sapiens
  Payload ID: 9434
  Gene Symbol: LCOR
  Gene Name: ligand dependent nuclear receptor corepressor
  Uniprot ID: Q96JN0
  ENSP ID: ENSP00000443431
MQRMIQQFAAEYTSKNSSTQDPSQPNSTKNQSLPKASPVTTSPTAATTQNPVLSKLLMADQDSPLDLTVRKSQSEPSEQDGVLDLSTKKSPCAGSTSLSHSPGCSSTQGNGRPGRPSQYRPDGLRSGDGVPPRSLQDGTREGFGHSTSLKVPLARSLQISEELLSRNQLSTAASLGPSGLQNHGQHLILSREASWAKPHYEFNLSRMKFRGNGALSNISDLPFLAENSAFPKMALQAKQDGKKDVSHSSPVDLKIPQVRGMDLSWESRTGDQYSYSSLVMGSQTESALSKKLRAILPKQSRKSMLDAGPDSWGSDAEQSTSGQPYPTSDQEGDPGSKQPRKKRGRYRQYNSEILEEAISVVMSGKMSVSKAQSIYGIPHSTLEYKVKERLGTLKNPPKKKMKLMSG

SEQ ID NO: 46578 - protein, 318 aa, Homo sapiens
  Payload ID: 9435
  Gene Symbol: LCORL
  Gene Name: ligand dependent nuclear receptor corepressor-like
  Uniprot ID: Q8N3X6
  ENSP ID: ENSP00000317566
MDKGRERMAAAAAAAAAAAAAAQCRSPRCAAERRGFRRELDSWRHRLMHCVGFESILEGLYGPRLRRDLSLFEDCEPEELTDWSMDEKCSFCNLQREAVSDCIPSLDSSQSTPTEELSSQGQSNTDKIECQAENYLNALFRKKDLPQNCDPNIPLVAQELMKKMIRQFAIEYISKSGKTQENRNGSIGPSIVCKSIQMNQAENSLQEEQEGPLDLTVNRMQEQNTQQGDGVLDLSTKKTSIKSEESSICDPSSENSVAGMLQVKTDEKLNVSDENTASCPLSPIKMCLNRPIEWNLNLTTASLTSCTVHNQNLKSEEK

SEQ ID NO: 46579 - protein, 518 aa, Homo sapiens
  Payload ID: 9435
  Gene Symbol: LCORL
  Gene Name: ligand dependent nuclear receptor corepressor-like
  ENSP ID: ENSP00000371659
MDEKCSFCNLQREAVSDCIPSLDSSQSTPTEELSSQGQSNTDKIECQAENYLNALFRKKDLPQNCDPNIPLVAQELMKKMIRQFAIEYISKSGKTQENRNGSIGPSIVCKSIQMNQAENSLQEEQEGPLDLTVNRMQEQNTQQGDGVLDLSTKKTSIKSEESSICDPSSENSVAGRLHRNREDYVERSAEFADGLLSKALKDIQSGALDINKAGILYGIPQKTLLLHLEALPAGKPASFKNKTRDFHDSYSYKDSKETCAVLQKVALWARAQAERTEKSKLNLLETSEIKFPTASTYLHQLTLQKMVTQFKEKNESLQYETSNPTVQLKIPQLRVSSVSKSQPDGSGLLDVMYQVSKTSSVLEGSALQKLKNILPKQNKIECSGPVTHSSVDSYFLHGDLSPLCLNSKNGTVDGTSENTEDGLDRKDSKQPRKKRGRYRQYDHEIMEEAIAMVMSGKMSVSKAQGIYGVPHSTLEYKVKERSGTLKTPPKKKLRLPDTGLYNMTDSGTGSCKNSSKPV

SEQ ID NO: 46580 - protein, 602 aa, Homo sapiens
  Payload ID: 9435
  Gene Symbol: LCORL
  Gene Name: ligand dependent nuclear receptor corepressor-like
  Uniprot ID: Q8N3X6
  ENSP ID: ENSP00000371661
MDKGRERMAAAAAAAAAAAAAAQCRSPRCAAERRGFRRELDSWRHRLMHCVGFESILEGLYGPRLRRDLSLFEDCEPEELTDWSMDEKCSFCNLQREAVSDCIPSLDSSQSTPTEELSSQGQSNTDKIECQAENYLNALFRKKDLPQNCDPNIPLVAQELMKKMIRQFAIEYISKSGKTQENRNGSIGPSIVCKSIQMNQAENSLQEEQEGPLDLTVNRMQEQNTQQGDGVLDLSTKKTSIKSEESSICDPSSENSVAGRLHRNREDYVERSAEFADGLLSKALKDIQSGALDINKAGILYGIPQKTLLLHLEALPAGKPASFKNKTRDFHDSYSYKDSKETCAVLQKVALWARAQAERTEKSKLNLLETSEIKFPTASTYLHQLTLQKMVTQFKEKNESLQYETSNPTVQLKIPQLRVSSVSKSQPDGSGLLDVMYQVSKTSSVLEGSALQKLKNILPKQNKIECSGPVTHSSVDSYFLHGDLSPLCLNSKNGTVDGTSENTEDGLDRKDSKQPRKKRGRYRQYDHEIMEEAIAMVMSGKMSVSKAQGIYGVPHSTLEYKVKERSGTLKTPPKKKLRLPDTGLYNMTDSGTGSCKNSSKPV

SEQ ID NO: 46581 - protein, 79 aa, Homo sapiens
  Payload ID: 9435
  Gene Symbol: LCORL
  Gene Name: ligand dependent nuclear receptor corepressor-like
  ENSP ID: ENSP00000423489
MDKGRERMAAAAAAAAAAAAAAQCRSPRCAAERRGFRRELDSWRHRLMHCVGFESILEGLYGPRLRRDLSLFEGLYTIS

SEQ ID NO: 46582 - protein, 769 aa, Homo sapiens
  Payload ID: 9436
  Gene Symbol: LRIF1
  Gene Name: ligand dependent nuclear receptor interacting factor 1
  Uniprot ID: Q5T3J3
  ENSP ID: ENSP00000358778
MSNNLRRVFLKPAEENSGNASRCVSGCMYQVVQTIGSDGKNLLQLLPIPKSSGNLIPLVQSSVMSDALKGNTGKPVQVTFQTQISSSSTSASVQLPIFQPASSSNYFLTRTVDTSEKGRVTSVGTGNFSSSVSKVQSHGVKIDGLTMQTFAVPPSTQKDSSFIVVNTQSLPVTVKSPVLPSGHHLQIPAHAEVKSVPASSLPPSVQQKILATATTSTSGMVEASQMPTVIYVSPVNTVKNVVTKNFQNIYPKPVTEIAKPVILNTTQIPKNVATETQLKGGQHSQAAPVKWIFQDNLQPFTPSLVPVKSSNNVASKILKTFVDRKNLGDNTINMPPLSTIDPSGTRSKNMPIKDNALVMFNGKVYLLAKKGTDVLPSQIDQQNSVSPDTPVRKDTLQTVSSSPVTEISREVVNIVLAKSKSSQMETKSLSNTQLASMANLRAEKNKVEKPSPSTTNPHMNQSSNYLKQSKTLFTNPIFPVGFSTGHNAPRKVTAVIYARKGSVLQSIEKISSSVDATTVTSQQCVFRDQEPKIHNEMASTSDKGAQGRNDKKDSQGRSNKALHLKSDAEFKKIFGLTKDLRVCLTRIPDHLTSGEGFDSFSSLVKSGTYKETEFMVKEGERKQQNFDKKRKAKTNKKMDHIKKRKTENAYNAIINGEANVTGSQLLSSILPTSDVSQHNILTSHSKTRQEKRTEMEYYTHEKQEKGTLNSNAAYEQSHFFNKNYTEDIFPVTPPELEETIRDEKIRRLKQVLREKEAALEEMRKKMHQK

SEQ ID NO: 46583 - protein, 233 aa, Homo sapiens
  Payload ID: 9436
  Gene Symbol: LRIF1
  Gene Name: ligand dependent nuclear receptor interacting factor 1
  Uniprot ID: Q5T3J3
  ENSP ID: ENSP00000432290
MASTSDKGAQGRNDKKDSQGRSNKALHLKSDAEFKKIFGLTKDLRVCLTRIPDHLTSGEGFDSFSSLVKSGTYKETEFMVKEGERKQQNFDKKRKAKTNKKMDHIKKRKTENAYNAIINGEANVTGSQLLSSILPTSDVSQHNILTSHSKTRQEKRTEMEYYTHEKQEKGTLNSNAAYEQSHFFNKNYTEDIFPVTPPELEETIRDEKIRRLKQVLREKEAALEEMRKKMHQK

SEQ ID NO: 46584 - protein, 233 aa, Homo sapiens; identical to SEQ ID NO: 46583
  Payload ID: 9436
  Gene Symbol: LRIF1
  Gene Name: ligand dependent nuclear receptor interacting factor 1
  Uniprot ID: Q5T3J3
  ENSP ID: ENSP00000435259

SEQ ID NO: 46585 - protein, 728 aa, Homo sapiens
  Payload ID: 9437
  Gene Symbol: LNX1
  Gene Name: ligand of numb-protein X 1, E3 ubiquitin protein ligase
  Uniprot ID: Q8TBB1
  ENSP ID: ENSP00000263925
MNQPESANDPEPLCAVCGQAHSLEENHFYSYPEEVDDDLICHICLQALLDPLDTPCGHTYCTLCLTNFLVEKDFCPMDRKPLVLQHCKKSSILVNKLLNKLLVTCPFREHCTQVLQRCDLEHHFQTSCKGASHYGLTKDRKRRSQDGCPDGCASLTATAPSPEVSAAATISLMTDEPGLDNPAYVSSAEDGQPAISPVDSGRSNRTRARPFERSTIRSRSFKKINRALSVLRRTKSGSAVANHADQGRENSENTTAPEVFPRLYHLIPDGEITSIKINRVDPSESLSIRLVGGSETPLVHIIIQHIYRDGVIARDGRLLPGDIILKVNGMDISNVPHNYAVRLLRQPCQVLWLTVMREQKFRSRNNGQAPDAYRPRDDSFHVILNKSSPEEQLGIKLVRKVDEPGVFIFNVLDGGVAYRHGQLEENDRVLAINGHDLRYGSPESAAHLIQASERRVHLVVSRQVRQRSPDIFQEAGWNSNGSWSPGPGERSNTPKPLHPTITCHEKVVNIQKDPGESLGMTVAGGASHREWDLPIYVISVEPGGVISRDGRIKTGDILLNVDGVELTEVSRSEAVALLKRTSSSIVLKALEVKEYEPQEDCSSPAALDSNHNMAPPSDWSPSWVMWLELPRCLYNCKDIVLRRNTAGSLGFCIVGGYEEYNGNKPFFIKSIVEGTPAYNDGRIRCGDILLAVNGRSTSGMIHACLARLLKELKGRITLTIVSWPGTFL

SEQ ID NO: 46586 - protein, 632 aa, Homo sapiens
  Payload ID: 9437
  Gene Symbol: LNX1
  Gene Name: ligand of numb-protein X 1, E3 ubiquitin protein ligase
  Uniprot ID: Q8TBB1
  ENSP ID: ENSP00000302879
MKALLLLVLPWLSPANYIDNVGNLHFLYSELCKGASHYGLTKDRKRRSQDGCPDGCASLTATAPSPEVSAAATISLMTDEPGLDNPAYVSSAEDGQPAISPVDSGRSNRTRARPFERSTIRSRSFKKINRALSVLRRTKSGSAVANHADQGRENSENTTAPEVFPRLYHLIPDGEITSIKINRVDPSESLSIRLVGGSETPLVHIIIQHIYRDGVIARDGRLLPGDIILKVNGMDISNVPHNYAVRLLRQPCQVLWLTVMREQKFRSRNNGQAPDAYRPRDDSFHVILNKSSPEEQLGIKLVRKVDEPGVFIFNVLDGGVAYRHGQLEENDRVLAINGHDLRYGSPESAAHLIQASERRVHLVVSRQVRQRSPDIFQEAGWNSNGSWSPGPGERSNTPKPLHPTITCHEKVVNIQKDPGESLGMTVAGGASHREWDLPIYVISVEPGGVISRDGRIKTGDILLNVDGVELTEVSRSEAVALLKRTSSSIVLKALEVKEYEPQEDCSSPAALDSNHNMAPPSDWSPSWVMWLELPRCLYNCKDIVLRRNTAGSLGFCIVGGYEEYNGNKPFFIKSIVEGTPAYNDGRIRCGDILLAVNGRSTSGMIHACLARLLKELKGRITLTIVSWPGTFL

SEQ ID NO: 46587 - protein, 99 aa, Homo sapiens
  Payload ID: 9437
  Gene Symbol: LNX1
  Gene Name: ligand of numb-protein X 1, E3 ubiquitin protein ligase
  ENSP ID: ENSP00000421897
MNQPESANDPEPLCAVCGQAHSLEENHFYSYPEEVDDDLICHICLQALLDPLDTPCGHTYCTLCLTNFLVEKDFCPMDRKPLVLQHCKKSSILVNKLLN

SEQ ID NO: 46588 - protein, 6 aa, Homo sapiens
  Payload ID: 9437
  Gene Symbol: LNX1
  Gene Name: ligand of numb-protein X 1, E3 ubiquitin protein ligase
  ENSP ID: ENSP00000423344
MNQPES

SEQ ID NO: 46589 - protein, 90 aa, Homo sapiens
  Payload ID: 9437
  Gene Symbol: LNX1
  Gene Name: ligand of numb-protein X 1, E3 ubiquitin protein ligase
  ENSP ID: ENSP00000424364
MNQPESANDPEPLCAVCGQAHSLEENHFYSYPEEVDDDLICHICLQALLDPLDTPCGHTYCTLCLTNFLVEKDFCPMDRKPLVLQHCKKS

SEQ ID NO: 46590 - protein, 16 aa, Homo sapiens
  Payload ID: 9437
  Gene Symbol: LNX1
  Gene Name: ligand of numb-protein X 1, E3 ubiquitin protein ligase
  ENSP ID: ENSP00000425135
MNQPESANDPEPLCAV

SEQ ID NO: 46591 - protein, 125 aa, Homo sapiens
  Payload ID: 9437
  Gene Symbol: LNX1
  Gene Name: ligand of numb-protein X 1, E3 ubiquitin protein ligase
  ENSP ID: ENSP00000426445
MNQPESANDPEPLCAVCGQAHSLEENHFYSYPEEVDDDLICHICLQALLDPLDTPCGHTYCTLCLTNFLVEKDFCPMDRKPLVLQHCKKSSILVNKLLNKLLVTCPFREHCTQVLQRCDLEHHFQ

SEQ ID NO: 46592 - protein, 690 aa, Homo sapiens [sequence omitted]

SEQ ID NO: 46593 - protein, 919 aa, Homo sapiens
  Payload ID: 9439
  Gene Symbol: LIG1
  Gene Name: ligase I, DNA, ATP-dependent
  Uniprot ID: P18858
  ENSP ID: ENSP00000263274
MQRSIMSFFHPKKEGKAKKPEKEASNSSRETEPPPKAALKEWNGVVSESDSPVKRPGRKAARVLGSEGEEEDEALSPAKGQKPALDCSQVSPPRPATSPENNASLSDTSPMDSSPSGIPKRRTARKQLPKRTIQEVLEEQSEDEDREAKRKKEEEEEETPKESLTEAEVATEKEGEDGDQPTTPPKPLKTSKAETPTESVSEPEVATKQELQEEEEQTKPPRRAPKTLSSFFTPRKPAVKKEVKEEEPGAPGKEGAAEGPLDPSGYNPAKNNYHPVEDACWKPGQKVPYLAVARTFEKIEEVSARLRMVETLSNLLRSVVALSPPDLLPVLYLSLNHLGPPQQGLELGVGDGVLLKAVAQATGRQLESVRAEAAEKGDVGLVAENSRSTQRLMLPPPPLTASGVFSKFRDIARLTGSASTAKKIDIIKGLFVACRHSEARFIARSLSGRLRLGLAEQSVLAALSQAVSLTPPGQEFPPAMVDAGKGKTAEARKTWLEEQGMILKQTFCEVPDLDRIIPVLLEHGLERLPEHCKLSPGIPLKPMLAHPTRGISEVLKRFEEAAFTCEYKYDGQRAQIHALEGGEVKIFSRNQEDNTGKYPDIISRIPKIKLPSVTSFILDTEAVAWDREKKQIQPFQVLTTRKRKEVDASEIQVQVCLYAFDLIYLNGESLVREPLSRRRQLLRENFVETEGEFVFATSLDTKDIEQIAEFLEQSVKDSCEGLMVKTLDVDATYEIAKRSHNWLKLKKDYLDGVGDTLDLVVIGAYLGRGKRAGRYGGFLLASYDEDSEELQAICKLGTGFSDEELEEHHQSLKALVLPSPRPYVRIDGAVIPDHWLDPSAVWEVKCADLSLSPIYPAARGLVDSDKGISLRFPRFIRVREDKQPEQATTSAQVACLYRKQSQIQNQQGEDSGSDPEDTY

SEQ ID NO: 46594 - protein, 851 aa, Homo sapiens
  Payload ID: 9439
  Gene Symbol: LIG1
  Gene Name: ligase I, DNA, ATP-dependent
  ENSP ID: ENSP00000441531
MQRSIMSFFHPKKEGKAKKPEKEASNSSRETEPPPKAALKEWNGVVSESDSPVKRPGRKAARVLGSEGEEEDEALSPAKGQKPALDCSQVSPPRPATSPENNASLSDTSPMDSSPSGIPKRRTEAETPTESVSEPEVATKQELQEEEEQTKPPRRAPKTLSSFFTPRKPAVKKEVKEEEPGAPGKEGAAEGPLDPSGYNPAKNNYHPVEDACWKPGQKVPYLAVARTFEKIEEVSARLRMVETLSNLLRSVVALSPPDLLPVLYLSLNHLGPPQQGLELGVGDGVLLKAVAQATGRQLESVRAEAAEKGDVGLVAENSRSTQRLMLPPPPLTASGVFSKFRDIARLTGSASTAKKIDIIKGLFVACRHSEARFIARSLSGRLRLGLAEQSVLAALSQAVSLTPPGQEFPPAMVDAGKGKTAEARKTWLEEQGMILKQTFCEVPDLDRIIPVLLEHGLERLPEHCKLSPGIPLKPMLAHPTRGISEVLKRFEEAAFTCEYKYDGQRAQIHALEGGEVKIFSRNQEDNTGKYPDIISRIPKIKLPSVTSFILDTEAVAWDREKKQIQPFQVLTTRKRKEVDASEIQVQVCLYAFDLIYLNGESLVREPLSRRRQLLRENFVETEGEFVFATSLDTKDIEQIAEFLEQSVKDSCEGLMVKTLDVDATYEIAKRSHNWLKLKKDYLDGVGDTLDLVVIGAYLGRGKRAGRYGGFLLASYDEDSEELQAICKLGTGFSDEELEEHHQSLKALVLPSPRPYVRIDGAVIPDHWLDPSAVWEVKCADLSLSPIYPAARGLVDSDKGISLRFPRFIRVREDKQPEQATTSAQVACLYRKQSQIQNQQGEDSGSDPEDTY

SEQ ID NO: 46595 - protein, 888 aa, Homo sapiens
  Payload ID: 9439
  Gene Symbol: LIG1
  Gene Name: ligase I, DNA, ATP-dependent
  Uniprot ID: P18858
  ENSP ID: ENSP00000442841
MQRSIMAALKEWNGVVSESDSPVKRPGRKAARVLGSEGEEEDEALSPAKGQKPALDCSQVSPPRPATSPENNASLSDTSPMDSSPSGIPKRRTARKQLPKRTIQEVLEEQSEDEDREAKRKKEEEEETPKESLTEAEVATEKEGEDGDQPTTPPKPLKTSKAETPTESVSEPEVATKQELQEEEEQTKPPRRAPKTLSSFFTPRKPAVKKEVKEEEPGAPGKEGAAEGPLDPSGYNPAKNNYHPVEDACWKPGQKVPYLAVARTFEKIEEVSARLRMVETLSNLLRSVVALSPPDLLPVLYLSLNHLGPPQQGLELGVGDGVLLKAVAQATGRQLESVRAEAAEKGDVGLVAENSRSTQRLMLPPPPLTASGVFSKFRDIARLTGSASTAKKIDIIKGLFVACRHSEARFIARSLSGRLRLGLAEQSVLAALSQAVSLTPPGQEFPPAMVDAGKGKTAEARKTWLEEQGMILKQTFCEVPDLDRIIPVLLEHGLERLPEHCKLSPGIPLKPMLAHPTRGISEVLKRFEEAAFTCEYKYDGQRAQIHALEGGEVKIFSRNQEDNTGKYPDIISRIPKIKLPSVTSFILDTEAVAWDREKKQIQPFQVLTTRKRKEVDASEIQVQVCLYAFDLIYLNGESLVREPLSRRRQLLRENFVETEGEFVFATSLDTKDIEQIAEFLEQSVKDSCEGLMVKTLDVDATYEIAKRSHNWLKLKKDYLDGVGDTLDLVVIGAYLGRGKRAGRYGGFLLASYDEDSEELQAICKLGTGFSDEELEEHHQSLKALVLPSPRPYVRIDGAVIPDHWLDPSAVWEVKCADLSLSPIYPAARGLVDSDKGISLRFPRFIRVREDKQPEQATTSAQVACLYRKQSQIQNQQGEDSGSDPEDTY

SEQ ID NO: 46596 - protein, 415 aa, Homo sapiens
  Payload ID: 9439
  Gene Symbol: LIG1
  Gene Name: ligase I, DNA, ATP-dependent
  ENSP ID: ENSP00000445928
MQRSIMSFFHPKKEGKAKKPEKEASNSSRETEPPPKAALKEWNGVVSESDSPVKRPGRKAARVLGSEGEEEDEALSPAKGQKPALDCSQVSPPRPATSPENNASLSDTSPMDSSPSGIPKRRTEEETPKESLTEAEVATEKEGEDGDQPTTPPKPLKTSKAETPTESVSEPEVATKQELQEEEEQTKPPRRAPKTLSSFFTPRKPAVKKEVKEEEPGAPGKEGAAEGPLDPSGYNPAKNNYHPVEDACWKPGQKVPYLAVARTFEKIEEVSARLRMVETLSNLLRSVVALSPPDLLPVLYLSLNHLGPPQQGLELGVGDGVLLKAVAQATGRERRETRSHNCHPRHPHPRSPLKVGSWSPSGLRQPRKATWGWWPRTAAAPRGSCCHHLRSLPPGSSASSATSPGSLAVLPQPRR

SEQ ID NO: 46597 - protein, 145 aa, Homo sapiens
  Payload ID: 9439
  Gene Symbol: LIG1
  Gene Name: ligase I, DNA, ATP-dependent
  ENSP ID: ENSP00000469638
MQRSIMSFFHPKKEGKAKKPEKEASNSSRETEPPPKAALKEWNGVVSESDSPVKRPGRKAARVLGSEGEEEDEALSPAKGQKPALDCSQVSPPRPATSPENNASLSDTSPMDSSPSGIPKRRTARKQLPKRTIQEVLEEQSEDED

SEQ ID NO: 46598 - protein, 800 aa, Homo sapiens
  Payload ID: 9439
  Gene Symbol: LIG1
  Gene Name: ligase I, DNA, ATP-dependent
  ENSP ID: ENSP00000471380
MQRSIMSFFHPKKEGKAKKPEKEASNSSRETEPPPKAALKEWNGVVSESDSPVKRPGRKAARVLGSEGEEEDEALSPAKGQKPALDCSQVSPPRPATSPENNASLSDTSPMDSSPSGIPKRRTARKQLPKRTIQEVLEEQSEDEDREAKRKKEEEEETPKESLTEAEVATEKEGEDGDQPTTPPKPLKTSKAETPTESVSEPEVATKQELQEEEEQTKPPRRAPKTLSSFFTPRKPAVKKEVKEEEPGAPGKEGAAEGPLDPSGYNPAKNNYHPVEDACWKPGQKVPYLAVARTFEKIEEVSARLRMVETLSNLLRSVVALSPPDLLPVLYLSLNHLGPPQQGLELGVGDGVLLKAVAQATGRQLESVRAEAAEKGDVGLVAENSRSTQRLMLPPPPLTASGVFSKFRDIARLTGSASTAKKIDIIKGLFVACRHSEARFIARSLSGRLRLGLAEQSVLAALSQAVSLTPPGQEFPPAMVDAGKGKTAEARKTWLEEQGMILKQTFCEVPDLDRIIPVLLEHGLERLPEHCKLSPGIPLKPMLAHPTRGISEVLKRFEEAAFTCEYKYDGQRAQIHALEGGEVKIFSRNQEDNTGKYPDIISRIPKIKLPSVTSFILDTEAVAWDREKKQIQPFQVLTTRKRKEVDASEIQVQVCLYAFDLIYLNGESLVREPLSRRRQLLRENFVETEGEFVFATSLDTKDIEQIAEFLEQSVKDSCEGLMVKTLDVDATYEIAKRSHNWLKLKKDYLDGVGDTLDLVVIGAYLGRGKRAGRYGGFLLASYDEDSEELQAICKVLGNWG

SEQ ID NO: 46599 - protein, 801 aa, Homo sapiens
  Payload ID: 9439
  Gene Symbol: LIG1
  Gene Name: ligase I, DNA, ATP-dependent
  Uniprot ID: P18858
  ENSP ID: ENSP00000471836
MQRSIMSFFHPKKEGKAKKPEKEASNSSRETEPPPKAALKEWNGVVSESDSPVKRPGRKAARVLGSEGEEEDEALSPAKGQKPALDCSQVSPPRPATSPENNASLSDTSPMDSSPSGIPKRRTARKQLPKRTIQEVLEEQSEDEDREAKRKKEEEEEETPKESLTEAEVATEKEGEDGDQPTTPPKPLKTSKAETPTESVSEPEVATKQELQEEEEQTKPPRRAPKTLSSFFTPRKPAVKKEVKEEEPGAPGKEGAAEGPLDPSGYNPAKNNYHPVEDACWKPGQKVPYLAVARTFEKIEEVSARLRMVETLSNLLRSVVALSPPDLLPVLYLSLNHLGPPQQGLELGVGDGVLLKAVAQATGRQLESVRAEAAEKGDVGLVAENSRSTQRLMLPPPPLTASGVFSKFRDIARLTGSASTAKKIDIIKGLFVACRHSEARFIARSLSGRLRLGLAEQSVLAALSQAVSLTPPGQEFPPAMVDAGKGKTAEARKTWLEEQGMILKQTFCEVPDLDRIIPVLLEHGLERLPEHCKLSPGIPLKPMLAHPTRGISEVLKRFEEAAFTCEYKYDGQRAQIHALEGGEVKIFSRNQEDNTGKYPDIISRIPKIKLPSVTSFILDTEAVAWDREKKQIQPFQVLTTRKRKEVDASEIQVQVCLYAFDLIYLNGESLVREPLSRRRQLLRENFVETEGEFVFATSLDTKDIEQIAEFLEQSVKDSCEGLMVKTLDVDATYEIAKRSHNWLKLKKDYLDGVGDTLDLVVIGAYLGRGKRAGRYGGFLLASYDEDSEELQAICKVLGNWG

SEQ ID NO: 46600 - protein, 149 aa, Homo sapiens
  Payload ID: 9439
  Gene Symbol: LIG1
  Gene Name: ligase I, DNA, ATP-dependent
  ENSP ID: ENSP00000471861
MQRSIMSFFHPKKEGKAKKPEKEASNSSRETEPPPKAALKEWNGVVSESDSPVKRPGRKAARVLGSEGEEEDEALSPAKGQKPALDCSQVSPPRPATSPENNASLSDTSPMDSSPSGIPKRRTEAETPTESVSEPEVATKQELQEEEEQ

SEQ ID NO: 46601 - protein, 28 aa, Homo sapiens
  Payload ID: 9439
  Gene Symbol: LIG1
  Gene Name: ligase I, DNA, ATP-dependent
  ENSP ID: ENSP00000472085
MQRSIMSFFHPKKEGKAKKPEKEASNSS

SEQ ID NO: 46602 - protein, 36 aa, Homo sapiens
  Payload ID: 9439
  Gene Symbol: LIG1
  Gene Name: ligase I, DNA, ATP-dependent
  ENSP ID: ENSP00000472331
  MOD_RES (1)..(1): Any amino acid
XWLEEQGMILKQTFWDSPETNVGPSHPGHQRGPETL

SEQ ID NO: 46603 - protein, 801 aa, Homo sapiens; identical to SEQ ID NO: 46599
  Payload ID: 9439
  Gene Symbol: LIG1
  Gene Name: ligase I, DNA, ATP-dependent
  Uniprot ID: P18858
  ENSP ID: ENSP00000483027

SEQ ID NO: 46604 - protein, 949 aa, Homo sapiens
  Payload ID: 9440
  Gene Symbol: LIG3
  Gene Name: ligase III, DNA, ATP-dependent
  Uniprot ID: P49916
  ENSP ID: ENSP00000262327
MSLAFKIFFPQTLRALSRKELCLFRKHHWRDVRQFSQWSETDLLHGHPLFLRRKPVLSFQGSHLRSRATYLVFLPGLHVGLCSGPCEMAEQRFCVDYAKRGTAGCKKCKEKIVKGVCRIGKVVPNPFSESGGDMKEWYHIKCMFEKLERARATTKKIEDLTELEGWEELEDNEKEQITQHIADLSSKAAGTPKKKAVVQAKLTTTGQVTSPVKGASFVTSTNPRKFSGFSAKPNNSGEAPSSPTPKRSLSSSKCDPRHKDCLLREFRKLCAMVADNPSYNTKTQIIQDFLRKGSAGDGFHGDVYLTVKLLLPGVIKTVYNLNDKQIVKLFSRIFNCNPDDMARDLEQGDVSETIRVFFEQSKSFPPAAKSLLTIQEVDEFLLRLSKLTKEDEQQQALQDIASRCTANDLKCIIRLIKHDLKMNSGAKHVLDALDPNAYEAFKASRNLQDVVERVLHNAQEVEKEPGQRRALSVQASLMTPVQPMLAEACKSVEYAMKKCPNGMFSEIKYDGERVQVHKNGDHFSYFSRSLKPVLPHKVAHFKDYIPQAFPGGHSMILDSEVLLIDNKTGKPLPFGTLGVHKKAAFQDANVCLFVFDCIYFNDVSLMDRPLCERRKFLHDNMVEIPNRIMFSEMKRVTKALDLADMITRVIQEGLEGLVLKDVKGTYEPGKRHWLKVKKDYLNEGAMADTADLVVLGAFYGQGSKGGMMSIFLMGCYDPGSQKWCTVTKCAGGHDDATLARLQNELDMVKISKDPSKIPSWLKVNKIYYPDFIVPDPKKAAVWEITGAEFSKSEAHTADGISIRFPRCTRIRDDKDWKSATNLPQLKELYQLSKEKADFTVVAGDEGSSTTGGSSEENKGPSGSAVSRKAPSKPSASTKKAEGKLSNSNSKDGNMQTAKPSAMKVGEKLATKSSPVKVGEKRKAADETLCQTKRRPASEQRGRTVPAGRR

SEQ ID NO: 46605 - protein, 1009 aa, Homo sapiens
  Payload ID: 9440
  Gene Symbol: LIG3
  Gene Name: ligase III, DNA, ATP-dependent
  Uniprot ID: P49916
  ENSP ID: ENSP00000367787
MSLAFKIFFPQTLRALSRKELCLFRKHHWRDVRQFSQWSETDLLHGHPLFLRRKPVLSFQGSHLRSRATYLVFLPGLHVGLCSGPCEMAEQRFCVDYAKRGTAGCKKCKEKIVKGVCRIGKVVPNPFSESGGDMKEWYHIKCMFEKLERARATTKKIEDLTELEGWEELEDNEKEQITQHIADLSSKAAGTPKKKAVVQAKLTTTGQVTSPVKGASFVTSTNPRKFSGFSAKPNNSGEAPSSPTPKRSLSSSKCDPRHKDCLLREFRKLCAMVADNPSYNTKTQIIQDFLRKGSAGDGFHGDVYLTVKLLLPGVIKTVYNLNDKQIVKLFSRIFNCNPDDMARDLEQGDVSETIRVFFEQSKSFPPAAKSLLTIQEVDEFLLRLSKLTKEDEQQQALQDIASRCTANDLKCIIRLIKHDLKMNSGAKHVLDALDPNAYEAFKASRNLQDVVERVLHNAQEVEKEPGQRRALSVQASLMTPVQPMLAEACKSVEYAMKKCPNGMFSEIKYDGERVQVHKNGDHFSYFSRSLKPVLPHKVAHFKDYIPQAFPGGHSMILDSEVLLIDNKTGKPLPFGTLGVHKKAAFQDANVCLFVFDCIYFNDVSLMDRPLCERRKFLHDNMVEIPNRIMFSEMKRVTKALDLADMITRVIQEGLEGLVLKDVKGTYEPGKRHWLKVKKDYLNEGAMADTADLVVLGAFYGQGSKGGMMSIFLMGCYDPGSQKWCTVTKCAGGHDDATLARLQNELDMVKISKDPSKIPSWLKVNKIYYPDFIVPDPKKAAVWEITGAEFSKSEAHTADGISIRFPRCTRIRDDKDWKSATNLPQLKELYQLSKEKADFTVVAGDEGSSTTGGSSEENKGPSGSAVSRKAPSKPSASTKKAEGKLSNSNSKDGNMQTAKPSAMKVGEKLATKSSPVKVGEKRKAADETLCQTKVLLDIFTGVRLYLPPSTPDFSRLRRYFVAFDGDLVQEFDMTSATHVLGSRDKNPAAQQVSPEWIWACIRKRRLVAPC

SEQ ID NO: 46606 - protein, 36 aa, Homo sapiens
  Payload ID: 9440
  Gene Symbol: LIG3
  Gene Name: ligase III, DNA, ATP-dependent
  ENSP ID: ENSP00000465288
  MOD_RES (1)..(1): Any amino acid
XKFLHDNMVEIPNRIMFSEMKRVTHLSCPSESFGLG

SEQ ID NO: 46607 - protein, 38 aa, Homo sapiens
  Payload ID: 9440
  Gene Symbol: LIG3
  Gene Name: ligase III, DNA, ATP-dependent
  ENSP ID: ENSP00000466278
  MOD_RES (1)..(1): Any amino acid
XARATTKKIEDLTELEGWEELEDNEKEQITQHIAEIVH

SEQ ID NO: 46608 - protein, 207 aa, Homo sapiens
  Payload ID: 9440
  Gene Symbol: LIG3
  Gene Name: ligase III, DNA, ATP-dependent
  ENSP ID: ENSP00000467063
MAEQRFCVDYAKRGTAGCKKCKEKIVKGVCRIGKVVPNPFSESGGDMKEWYHIKCMFEKLERARATTKKIEDLTELEGWEELEDNEKEQITQHIADLSSKAAGTPKKKAVVQAKLTTTGQVTSPVKGASFVTSTNPRKFSGFSAKPNNSGEAPSSPTPKRSLSSSKCDPRHKDCLLREFRKLCAMVADNPSYNTKTQIIQDFLRKGS

SEQ ID NO: 46609 - protein, 185 aa, Homo sapiens
  Payload ID: 9440
  Gene Symbol: LIG3
  Gene Name: ligase III, DNA, ATP-dependent
  ENSP ID: ENSP00000467757
MVADNPSYNTKTQIIQDFLRKGSAGDGFHGDVYLTVKLLLPGVIKTVYNLNDKQIVKLFSRIFNCNPDDMARDLEQGDVSETIRVFFEQSKSFPPAAKSLLTIQEVDEFLLRLSKLTKEDEQQQALQDIASRCTANDLKCIIRLIKHDLKMNSGAKHVLDALDPNAYEAFKASRNLQDVVERVLH

SEQ ID NO: 46610 - protein, 545 aa, Homo sapiens
  Payload ID: 9440
  Gene Symbol: LIG3
  Gene Name: ligase III, DNA, ATP-dependent
  ENSP ID: ENSP00000468479
MSKFRGLRYMSLAFKIFFPQTLRALSRKELCLFRKHHWRDVRQFSQWSETDLLHGHPLFLRRKPVLSFQGSHLRSRATYLVFLPGLHVGLCSGPCEMAEQRFCVDYAKRGTAGCKKCKEKIVKGVCRIGKVVPNPFSESGGDMKEWYHIKCMFEKLERARATTKKIEDLTELEGWEELEDNEKEQITQHIADLSSKAAGTPKKKAVVQAKLTTTGQVTSPVKGASFVTSTNPRKFSGFSAKPNNSGEAPSSPTPKRSLSSSKCDPRHKDCLLREFRKLCAMVADNPSYNTKTQIIQDFLRKGSAGDGFHGDVYLTVKLLLPGVIKTVYNLNDKQIVKLFSRIFNCNPDDMARDLEQGDVSETIRVFFEQSKSFPPAAKSLLTIQEVDEFLLRLSKLTKEDEQQQALQDIASRCTANDLKCIIRLIKHDLKMNSGAKHVLDALDPNAYEAFKASRNLQDVVERVLHNAQEVEKEPGQRRALSVQASLMTPVQPMLAEACKSVEYAMKKCPNGMFSEIKYDGERVQVHKNGDHFSYFSRSLKPVLPH

SEQ ID NO: 46611 - protein, 911 aa, Homo sapiens
  Payload ID: 9441
  Gene Symbol: LIG4
  Gene Name: ligase IV, DNA, ATP-dependent
  Uniprot ID: P49917
  ENSP ID: ENSP00000349393
MAASQTSQTVASHVPFADLCSTLERIQKSKGRAEKIRHFREFLDSWRKFHDALHKNHKDVTDSFYPAMRLILPQLERERMAYGIKETMLAKLYIELLNLPRDGKDALKLLNYRTPTGTHGDAGDFAMIAYFVLKPRCLQKGSLTIQQVNDLLDSIASNNSAKRKDLIKKSLLQLITQSSALEQKWLIRMIIKDLKLGVSQQTIFSVFHNDAAELHNVTTDLEKVCRQLHDPSVGLSDISITLFSAFKPMLAAIADIEHIEKDMKHQSFYIETKLDGERMQMHKDGDVYKYFSRNGYNYTDQFGASPTEGSLTPFIHNAFKADIQICILDGEMMAYNPNTQTFMQKGTKFDIKRMVEDSDLQTCYCVFDVLMVNNKKLGHETLRKRYEILSSIFTPIPGRIEIVQKTQAHTKNEVIDALNEAIDKREEGIMVKQPLSIYKPDKRGEGWLKIKPEYVSGLMDELDILIVGGYWGKGSRGGMMSHFLCAVAEKPPPGEKPSVFHTLSRVGSGCTMKELYDLGLKLAKYWKPFHRKAPPSSILCGTEKPEVYIEPCNSVIVQIKAAEIVPSDMYKTGCTLRFPRIEKIRDDKEWHECMTLDDLEQLRGKASGKLASKHLYIGGDDEPQEKKRKAAPKMKKVIGIIEHLKAPNLTNVNKISNIFEDVEFCVMSGTDSQPKPDLENRIAEFGGYIVQNPGPDTYCVIAGSENIRVKNIILSNKHDVVKPAWLLECFKTKSFVPWQPRFMIHMCPSTKEHFAREYDCYGDSYFIDTDLNQLKEVFSGIKNSNEQTPEEMASLIADLEYRYSWDCSPLSMFRRHTVYLDSYAVINDLSTKNEGTRLAIKALELRFHGAKVVSCLAEGVSHVIIGEDHSRVADFKAFRRTFKRKFKILKESWVTDSIDKCELQEENQYLI

SEQ ID NO: 46612 - protein, 911 aa, Homo sapiens; identical to SEQ ID NO: 46611
  Payload ID: 9441
  Gene Symbol: LIG4
  Gene Name: ligase IV, DNA, ATP-dependent
  Uniprot ID: P49917
  ENSP ID: ENSP00000385955

SEQ ID NO: 46613 - protein, 911 aa, Homo sapiens; identical to SEQ ID NO: 46611
  Payload ID: 9441
  Gene Symbol: LIG4
  Gene Name: ligase IV, DNA, ATP-dependent
  Uniprot ID: P49917
  ENSP ID: ENSP00000402030

SEQ ID NO: 46614 - protein, 844 aa, Homo sapiens
  Payload ID: 9441
  Gene Symbol: LIG4
  Gene Name: ligase IV, DNA, ATP-dependent
  ENSP ID: ENSP00000480814
MRLILPQLERERMAYGIKETMLAKLYIELLNLPRDGKDALKLLNYRTPTGTHGDAGDFAMIAYFVLKPRCLQKGSLTIQQVNDLLDSIASNNSAKRKDLIKKSLLQLITQSSALEQKWLIRMIIKDLKLGVSQQTIFSVFHNDAAELHNVTTDLEKVCRQLHDPSVGLSDISITLFSAFKPMLAAIADIEHIEKDMKHQSFYIETKLDGERMQMHKDGDVYKYFSRNGYNYTDQFGASPTEGSLTPFIHNAFKADIQICILDGEMMAYNPNTQTFMQKGTKFDIKRMVEDSDLQTCYCVFDVLMVNNKKLGHETLRKRYEILSSIFTPIPGRIEIVQKTQAHTKNEVIDALNEAIDKREEGIMVKQPLSIYKPDKRGEGWLKIKPEYVSGLMDELDILIVGGYWGKGSRGGMMSHFLCAVAEKPPPGEKPSVFHTLSRVGSGCTMKELYDLGLKLAKYWKPFHRKAPPSSILCGTEKPEVYIEPCNSVIVQIKAAEIVPSDMYKTGCTLRFPRIEKIRDDKEWHECMTLDDLEQLRGKASGKLASKHLYIGGDDEPQEKKRKAAPKMKKVIGIIEHLKAPNLTNVNKISNIFEDVEFCVMSGTDSQPKPDLENRIAEFGGYIVQNPGPDTYCVIAGSENIRVKNIILSNKHDVVKPAWLLECFKTKSFVPWQPRFMIHMCPSTKEHFAREYDCYGDSYFIDTDLNQLKEVFSGIKNSNEQTPEEMASLIADLEYRYSWDCSPLSMFRRHTVYLDSYAVINDLSTKNEGTRLAIKALELRFHGAKVVSCLAEGVSHVIIGEDHSRVADFKAFRRTFKRKFKILKESWVTDSIDKCELQEENQYLI

SEQ ID NO: 46615 - protein, 911 aa, Homo sapiens; identical to SEQ ID NO: 46611
  Payload ID: 9441
  Gene Symbol: LIG4
  Gene Name: ligase IV, DNA, ATP-dependent
  Uniprot ID: P49917
  ENSP ID: ENSP00000484288

SEQ ID NO: 46616 - protein, 756 aa, Homo sapiens
  Payload ID: 9442
  Gene Symbol: LARGE
  Gene Name: like-glycosyltransferase
  Uniprot ID: O95461
  ENSP ID: ENSP00000347088
MLGICRGRRKFLAASLSLLCIPAITWIYLFSGSFEDGKPVSLSPLESQAHSPRYTASSQRERESLEVRMREVEEENRALRRQLSLAQGRAPSHRRGNHSKTYSMEEGTGDSENLRAGIVAGNSSECGQQPVVEKCETIHVAIVCAGYNASRDVVTLVKSVLFHRRNPLHFHLIADSIAEQILATLFQTWMVPAVRVDFYNADELKSEVSWIPNKHYSGIYGLMKLVLTKTLPANLERVIVLDTDITFATDIAELWAVFHKFKGQQVLGLVENQSDWYLGNLWKNHRPWPALGRGYNTGVILLLLDKLRKMKWEQMWRLTAERELMGMLSTSLADQDIFNAVIKQNPFLVYQLPCFWNVQLSDHTRSEQCYRDVSDLKVIHWNSPKKLRVKNKHVEFFRNLYLTFLEYDGNLLRRELFGCPSEADVNSENLQKQLSELDEDDLCYEFRRERFTVHRTHLYFLHYEYEPAADSTDVTLVAQLSMDRLQMLEAICKHWEGPISLALYLSDAEAQQFLRYAQGSEVLMSRHNVGYHIVYKEGQFYPVNLLRNVAMKHISTPYMFLSDIDFLPMYGLYEYLRKSVIQLDLANTKKAMIVPAFETLRYRLSFPKSKAELLSMLDMGTLFTFRYHVWTKGHAPTNFAKWRTATTPYRVEWEADFEPYVVVRRDCPEYDRRFVGFGWNKVAHIMELDVQEYEFIVLPNAYMIHMPHAPSFDITKFRSNKQYRICLKTLKEEFQQDMSRRYGFAALKYLTAENNS

SEQ ID NO: 46617 - protein, 756 aa, Homo sapiens; identical to SEQ ID NO: 46616
  Payload ID: 9442
  Gene Symbol: LARGE
  Gene Name: like-glycosyltransferase
  Uniprot ID: O95461
  ENSP ID: ENSP00000380549

SEQ ID NO: 46618 - protein, 704 aa, Homo sapiens
  Payload ID: 9442
  Gene Symbol: LARGE
  Gene Name: like-glycosyltransferase
  Uniprot ID: O95461
  ENSP ID: ENSP00000385223
MLGICRGRRKFLAASLSLLCIPAITWIYLFSGSFEDGKPVSLSPLESQAHSPRYTASSQRERESLEVRMREVEEENRALRRQLSLAQGRAPSHRRGNHSKTYSMEEGTGDSENLRAGIVAGNSSECGQQPVVEKCETIHVAIVCAGYNASRDVVTLVKSVLFHRRNPLHFHLIADSIAEQILATLFQTWMVPAVRVDFYNADELKSEVSWIPNKHYSGIYGLMKLVLTKTLPANLERVIVLDTDITFATDIAELWAVFHKFKGQQVLGLVENQSDWYLGNLWKNHRPWPALGRGYNTGVILLLLDKLRKMKWEQMWRLTAERELMGMLSTSLADQDIFNAVIKQNPFLVYQLPCFWNVQLSDHTRSEQCYRDVSDLKLQKQLSELDEDDLCYEFRRERFTVHRTHLYFLHYEYEPAADSTDVTLVAQLSMDRLQMLEAICKHWEGPISLALYLSDAEAQQFLRYAQGSEVLMSRHNVGYHIVYKEGQFYPVNLLRNVAMKHISTPYMFLSDIDFLPMYGLYEYLRKSVIQLDLANTKKAMIVPAFETLRYRLSFPKSKAELLSMLDMGTLFTFRYHVWTKGHAPTNFAKWRTATTPYRVEWEADFEPYVVVRRDCPEYDRRFVGFGWNKVAHIMELDVQEYEFIVLPNAYMIHMPHAPSFDITKFRSNKQYRICLKTLKEEFQQDMSRRYGFAALKYLTAENNS

SEQ ID NO: 46619 - protein, 108 aa, Homo sapiens
  Payload ID: 9442
  Gene Symbol: LARGE
  Gene Name: like-glycosyltransferase
  ENSP ID: ENSP00000389605
MLGICRGRRKFLAASLSLLCIPAITWIYLFSGSFEDGKPVSLSPLESQAHSPRYTASSQRERESLEVRMREVEEENRALRRQLSLAQGRAPSHRRGNHSKTYSMEEGT

SEQ ID NO: 46620 - protein, 136 aa, Homo sapiens
  Payload ID: 9442
  Gene Symbol: LARGE
  Gene Name: like-glycosyltransferase
  ENSP ID: ENSP00000396277
MLGICRGRRKFLAASLSLLCIPAITWIYLFSGSFEDGKPVSLSPLESQAHSPRYTASSQRERESLEVRMREVEEENRALRRQLSLAQGRAPSHRRGNHSKTYSMEEGTGDSENLRAGIVAGNSSECGQQPVVEKCE

SEQ ID NO: 46621 - protein, 187 aa, Homo sapiens
  Payload ID: 9442
  Gene Symbol: LARGE
  Gene Name: like-glycosyltransferase
  ENSP ID: ENSP00000403841
MLIWSEVSWIPNKHYSGIYGLMKLVLTKTLPANLERVIVLDTDITFATDIAELWAVFHKFKGQQVLGLVENQSDWYLGNLWKNHRPWPALGRGYNTGVILLLLDKLRKMKWEQMWRLTAERELMGMLSTSLADQDIFNAVIKQNPFLVYQLPCFWNVQLSDHTRSEQCYRDVSDLKVIHWNSPKKLR

SEQ ID NO: 46622 - protein, 47 aa, Homo sapiens
  Payload ID: 9442
  Gene Symbol: LARGE
  Gene Name: like-glycosyltransferase
  ENSP ID: ENSP00000406000
MLGICRGRRKFLAASLSLLCIPAITWIYLFSGSFEDGKPVSLSPLES

SEQ ID NO: 46623 - protein, 60 aa, Homo sapiens
  Payload ID: 9442
  Gene Symbol: LARGE
  Gene Name: like-glycosyltransferase
  ENSP ID: ENSP00000411065
MLGICRGRRKFLAASLSLLCIPAITWIYLFSGSFEDGKPVSLSPLESQAHSPRYTASSQR

SEQ ID NO: 46624 - protein, 135 aa, Homo sapiens
  Payload ID: 9442
  Gene Symbol: LARGE
  Gene Name: like-glycosyltransferase
  ENSP ID: ENSP00000415546
MLGICRGRRKFLAASLSLLCIPAITWIYLFSGSFEDGKPVSLSPLESQAHSPRYTASSQRERESLEVRMREVEEENRALRRQLSLAQGRAPSHRRGNHSKTYSMEEGTGDSENLRAGIVAGNSSECGQQPVVEKC

SEQ ID NO: 46625 - protein, 325 aa, Homo sapiens
  Payload ID: 9442
  Gene Symbol: LARGE
  Gene Name: like-glycosyltransferase
  ENSP ID: ENSP00000476364
LMGMLSTSLADQDIFNAVIKQNPFLVYQLPCFWNVQLSDHTRSEQCYRDVSDLKVIHWNSPKKLRVKNKHVEFFRNLYLTFLEYDGNLLRRELFGCPSEADVNSENLQKQLSELDEDDLCYEFRRERFTVHRTHLYFLHYEYEPAADSTDVTLVAQLSMDRLQMLEAICKHWEGPISLALYLSDAEAQQFLRYAQGSEVLMSRHNVGYHIVYKEGQFYPVNLLRNVAMKHISTPYMFLSDIDFLPMYGLYEYLRKSVIQLDLANTKKAMIVPAFETLRYRLSFPKSKAELLSMLDMGTLFTFSFDFSQTLSPIISCKTTVPNTCL

SEQ ID NO: 46626 - protein, 183 aa, Homo sapiens
  Payload ID: 9442
  Gene Symbol: LARGE
  Gene Name: like-glycosyltransferase
  ENSP ID: ENSP00000476415
LMGMLSTSLADQDIFNAVIKQNPFLVYQLPCFWNVQLSDHTRSEQCYRDVSDLKVIHWNSPKKLRVKNKHVEFFRNLYLTFLEYDGNLLRRELFGCPSEADVNSENLQKQLSELDEDDLCYEFRRERFTVHRTHLYFLHYEYEPAADSTDVTLVAQLSMDSFDFSQTLSPIISCKTTVPNTCL

SEQ ID NO: 46627 - protein, 276 aa, Homo sapiens
  Payload ID: 9442
  Gene Symbol: LARGE
  Gene Name: like-glycosyltransferase
  ENSP ID: ENSP00000476866
LMGMLSTSLADQDIFNAVIKQNPFLVYQLPCFWNVQLSDHTRSEQCYRDVSDLKVIHWNSPKKLRVKNKHVEFFRNLYLTFLEYDGNLLRRELFGCPSEADVNSENLQKQLSELDEDDLCYEFRRERFTVHRTHLYFLHYEYEPAADSTDVTLVAQLSMDRLQMLEAICKHWEGPISLALYLSDAEAQQFLRYAQGSEVLMSRHNVGYHIVYKEGQFYPVNLLRNVAMKHISTPYMFLSDIDFLPMYGLYEYLSFDFSQTLSPIISCKTTVPNTCL

SEQ ID NO: 46628 - protein, 1083 aa, Homo sapiens
  Payload ID: 9443
  Gene Symbol: LIMCH1
  Gene Name: LIM and calponin homology domains 1
  Uniprot ID: Q9UPQ0
  ENSP ID: ENSP00000316891
MACPALGLEALQPLQPEPPPEPAFSEAQKWIEQVTGRSFGDKDFRTGLENGILLCELLNAIKPGLVKKINRLPTPIAGLDNIILFLRGCKELGLKESQLFDPSDLQDTSNRVTVKSLDYSRKLKNVLVTIYWLGKAANSCTSYSGTTLNLKEFEGLLAQMRKDTDDIESPKRSIRDSGYIDCWDSERSDSLSPPRHGRDDSFDSLDSFGSRSRQTPSPDVVLRGSSDGRGSDSESDLPHRKLPDVKKDDMSARRTSHGEPKSAVPFNQYLPNKSNQTAYVPAPLRKKKAEREEYRKSWSTATSPLGGERPFRYGPRTPVSDDAESTSMFDMRCEEEAAVQPHSRARQEQLQLINNQLREEDDKWQDDLARWKSRRRSVSQDLIKKEEERKKMEKLLAGEDGTSERRKSIKTYREIVQEKERRERELHEAYKNARSQEEAEGILQQYIERFTISEAVLERLEMPKILERSHSTEPNLSSFLNDPNPMKYLRQQSLPPPKFTATVETTIARASVLDTSMSAGSGSPSKTVTPKAVPMLTPKPYSQPKNSQDVLKTFKVDGKVSVNGETVHREEEKERECPTVAPAHSLTKSQMFEGVARVHGSPLELKQDNGSIEINIKKPNSVPQELAATTEKTEPNSQEDKNDGGKSRKGNIELASSEPQHFTTTVTRCSPTVAFVEFPSSPQLKNDVSEEKDQKKPENEMSGKVELVLSQKVVKPKSPEPEATLTFPFLDKMPEANQLHLPNLNSQVDSPSSEKSPVMTPQFKFWAWDPEEERRRQEKWQQEQERLLQERYQKEQDKLKEEWEKAQKEVEEEERRYYEEERKIIEDTVVPFTVSSSSADQLSTSSSMTEGSGTMNKIDLGNCQDEKQDRRWKKSFQGDDSDLLLKTRESDRLEEKGSLTEGALAHSGNPVSKGVHEDHQLDTEAGAPHCGTNPQLAQDPSQNQQTSNPTHSSEDVKPKTLPLDKSINHQIESPSERRKKSPREHFQAGPFSPCSPTPPGQSPNRSISGKKLCSSCGLPLGKGAAMIIETLNLYFHIQCFRCGICKGQLGDAVSGTDVRIRNGLLNCNDCYMRSRSAGQPTTL

SEQ ID NO: 46629 - protein, 890 aa, Homo sapiens
  Payload ID: 9443
  Gene Symbol: LIMCH1
  Gene Name: LIM and calponin homology domains 1
  Uniprot ID: Q9UPQ0
  ENSP ID: ENSP00000371172
MDSERQVKDTDDIESPKRSIRDSGYIDCWDSERSDSLSPPRHGRDDSFDSLDSFGSRSRQTPSPDVVLRGSSDGRGSDSESDLPHRKLPDVKKDDMSARRTSHGEPKSAVPFNQYLPNKSNQTAYVPAPLRKKKAEREEYRKSWSTATSPLGGERPFRSTSMFDMRCEEEAAVQPHSRARQEQLQLINNQLREEDDKWQDDLARWKSRRRSVSQDLIKKEEERKKMEKLLAGEDGTSERRKSIKTYREIVQEKERRERELHEAYKNARSQEEAEGILQQYIERFTISEAVLERLEMPKILERSHSTEPNLSSFLNDPNPMKYLRQQSLPPPKFTATVETTIARASVLDTSMSAGSGSPSKTVTPKAVPMLTPKPYSQPKNSQDVLKTFKVDGKVSVNGETVHREEEKERECPTVAPAHSLTKSQMFEGVARVHGSPLELKQDNGSIEINIKKPNSVPQELAATTEKTEPNSQEDKNDGGKSRKGNIELASSEPQHFTTTVTRCSPTVAFVEFPSSPQLKNDVSEEKDQKKPENEMSGKVELVLSQKVVKPKSPEPEATLTFPFLDKMPEANQLHLPNLNSQVDSPSSEKSPVMTPFKFWAWDPEEERRRQEKWQQEQERLLQERYQKEQDKLKEEWEKAQKEVEEEERRYYEEERKIIEDTVVPFTVSSSSADQLSTSSSMTEGSGTMNKIDLGNCQDEKQDRRWKKSFQGDDSDLLLKTRESDRLEEKGSLTEGALAHSGNPVSKGVHEDHQLDTEAGAPHCGTNPQLAQDPSQNQQTSNPTHSSEDVKPKTLPLDKSINHQIESPSERRKSISGKKLCSSCGLPLGKGAAMIIETLNLYFHIQCFRCGICKGQLGDAVSGTDVRIRNGLLNCNDCYMRSRSAGQPTTL

SEQ ID NO: 46630 - protein, 902 aa, Homo sapiens
  Payload ID: 9443
  Gene Symbol: LIMCH1
  Gene Name: LIM and calponin homology domains 1
  Uniprot ID: Q9UPQ0
  ENSP ID: ENSP00000379840
MDSERQVKDTDDIESPKRSIRDSGYIDCWDSERSDSLSPPRHGRDDSFDSLDSFGSRSRQTPSPDVVLRGSSDGRGSDSESDLPHRKLPDVKKDDMSARRTSHGEPKSAVPFNQYLPNKSNQTAYVPAPLRKKKAEREEYRKSWSTATSPLGGERPFRYGPRTPVSDDAESTSMFDMRCEEEAAVQPHSRARQEQLQLINNQLREEDDKWQDDLARWKSRRRSVSQDLIKKEEERKKMEKLLAGEDGTSERRKSIKTYREIVQEKERRERELHEAYKNARSQEEAEGILQQYIERFTISEAVLERLEMPKILERSHSTEPNLSSFLNDPNPMKYLRQQSLPPPKFTATVETTIARASVLDTSMSAGSGSPSKTVTPKAVPMLTPKPYSQPKNSQDVLKTFKVDGKVSVNGETVHREEEKERECPTVAPAHSLTKSQMFEGVARVHGSPLELKQDNGSIEINIKKPNSVPQELAATTEKTEPNSQEDKNDGGKSRKGNIELASSEPQHFTTTVTRCSPTVAFVEFPSSPQLKNDVSEEKDQKKPENEMSGKVELVLSQKVVKPKSPEPEATLTFPFLDKMPEANQLHLPNLNSQVDSPSSEKSPVMTPFKFWAWDPEEERRRQEKWQQEQERLLQERYQKEQDKLKEEWEKAQKEVEEEERRYYEEERKIIEDTVVPFTVSSSSADQLSTSSSMTEGSGTMNKIDLGNCQDEKQDRRWKKSFQGDDSDLLLKTRESDRLEEKGSLTEGALAHSGNPVSKGVHEDHQLDTEAGAPHCGTNPQLAQDPSQNQQTSNPTHSSEDVKPKTLPLDKSINHQIESPSERRKSISGKKLCSSCGLPLGKGAAMIIETLNLYFHIQCFRCGICKGQLGDAVSGTDVRIRNGLLNCNDCYMRSRSAGQPTTL

SEQ ID NO: 46631 - protein, 126 aa, Homo sapiens
  Payload ID: 9443
  Gene Symbol: LIMCH1
  Gene Name: LIM and calponin homology domains 1
  ENSP ID: ENSP00000411020
MRKDTDDIESPKRSIRDSGYIDCWDSERSDSLSPPRHGRDDSFDSLDSFGSRSRQTPSPDVVLRGSSDGRGSDSESDLPHRKLPDVKKDDMSARRTSHGEPKSAVPFNQYLPNKSNQTAYVPAPLR

SEQ ID NO: 46632 - protein, 897 aa, Homo sapiens
  Payload ID: 9443
  Gene Symbol: LIMCH1
  Gene Name: LIM and calponin homology domains 1
  Uniprot ID: Q9UPQ0
  ENSP ID: ENSP00000421242
MRKDTDDIESPKRSIRDSGYIDCWDSERSDSLSPPRHGRDDSFDSLDSFGSRSRQTPSPDVVLRGSSDGRGSDSESDLPHRKLPDVKKDDMSARRTSHGEPKSAVPFNQYLPNKSNQTAYVPAPLRKKKAEREEYRKSWSTATSPLGGERPFRYGPRTPVSDDAESTSMFDMRCEEEAAVQPHSRARQEQLQLINNQLREEDDKWQDDLARWKSRRRSVSQDLIKKEEERKKMEKLLAGEDGTSERRKSIKTYREIVQEKERRERELHEAYKNARSQEEAEGILQQYIERFTISEAVLERLEMPKILERSHSTEPNLSSFLNDPNPMKYLRQQSLPPPKFTATVETTIARASVLDTSMSAGSGSPSKTVTPKAVPMLTPKPYSQPKNSQDVLKTFKVDGKVSVNGETVHREEEKERECPTVAPAHSLTKSQMFEGVARVHGSPLELKQDNGSIEINIKKPNSVPQELAATTEKTEPNSQEDKNDGGKSRKGNIELASSEPQHFTTTVTRCSPTVAFVEFPSSPQLKNDVSEEKDQKKPENEMSGKVELVLSQKVVKPKSPEPEATLTFPFLDKMPEANQLHLPNLNSQVDSPSSEKSPVMTPFKFWAWDPEEERRRQEKWQQEQERLLQERYQKEQDKLKEEWEKAQKEVEEEERRYYEEERKIIEDTVVPFTVSSSSADQLSTSSSMTEGSGTMNKIDLGNCQDEKQDRRWKKSFQGDDSDLLLKTRESDRLEEKGSLTEGALAHSGNPVSKGVHEDHQLDTEAGAPHCGTNPQLAQDPSQNQQTSNPTHSSEDVKPKTLPLDKSINHQIESPSERRKSISGKKLCSSCGLPLGKGAAMIIETLNLYFHIQCFRCGICKGQLGDAVSGTDVRIRNGLLNCNDCYMRSRSAGQPTTL

SEQ ID NO: 46633 - protein, 917 aa, Homo sapiens
  Payload ID: 9443
  Gene Symbol: LIMCH1
  Gene Name: LIM and calponin homology domains 1
  ENSP ID: ENSP00000421656
  MOD_RES (1)..(1): Any amino acid
XIESPKRSIRDSGYIDCWDSERSDSLSPPRHGRDDSFDSLDSFGSRSRQTPSPDVVLRGSSDGRGSDSESDLPHRKLPDVKKDDMSARRTSHGEPKSAVPFNQYLPNKSNQTAYVPAPLRKKKAEREEYRKSWSTATSPLGGERPFRYGPRTPVSDDAESTSMFDMRCEEEAAVQPHSRARQEQLQLINNQLREEDDKWQDDLARWKSRRRSVSQDLIKKEEERKKMEKLLAGEDGTSERRKSIKTYREIVQEKERRERELHEAYKNARSQEEAEGILQQYIERFTISEAVLERLEMPKILERSHSTEPNLSSFLNDPNPMKYLRQQSLPPPKFTATVETTIARASVLDTSMSAGSGSPSKTVTPKAVPMLTPKPYSQPKNSQDVLKTFKVDGKVSVNGETVHREEEKERECPTVAPAHSLTKSQMFEGVARVHGSPLELKQDNGSIEINIKKPNSVPQELAATTEKTEPNSQEDKNDGGKSRKGNIELASSEPQHFTTTVTRCSPTVAFVEFPSSPQLKNDVSEEKDQKKPENEMSGKVELVLSQKVVKPKSPEPEATLTFPFLDKMPEANQLHLPNLNSQVDSPSSEKSPVMTPFKFWAWDPEEERRRQEKWQQEQERLLQERYQKEQDKLKEEWEKAQKEVEEEERRYYEEERKIIEDTVVPFTVSSSSADQLSTSSSMTEGSGTMNKIDLGNCQDEKQDRRWKKSFQGDDSDLLLKTRESDRLEEKGSLTEGALAHSGNPVSKGVHEDHQLDTEAGAPHCGTNPQLAQDPSQNQQTSNPTHSSEDVKPKTLPLDKSINHQIESPSERRKKSPREHFQAGPFSPCSPTPPGQSPNRSISGKKLCSSCGLPLGKGAAMIIETLNLYFHIQCFRCGICKGQLGDAVSGTDVRIRNGLLNCNDCYMRSRSAGQPTTL

SEQ ID NO: 46634 - protein, 916 aa, Homo sapiens
  Payload ID: 9443
  Gene Symbol: LIMCH1
  Gene Name: LIM and calponin homology domains 1
  ENSP ID: ENSP00000422864
MDSERQVKDTDDIESPKRSIRDSGYIDCWDSERSDSLSPPRHGRDDSFDSLDSFGSRSRQTPSPDVVLRGSSDGRGSDSESDLPHRKLPDVKKDDMSARRTSHGEPKSAVPFNQYLPNKSNQTAYVPAPLRKKKAEREEYRKSWSTATSPLGGERPFRSTSMFDMRCEEEAAVQPHSRARQEQLQLINNQLREEDDKWQDDLARWKSRRRSVSQDLIKKEEERKKMEKLLAGEDGTSERRKSIKTYREIVQEKERRERELHEAYKNARSQEEAEGILQQYIERFTISEAVLERLEMPKILERSHSTEPNLSSFLNDPNPMKYLRQQSLPPPKFTATVETTIARASVLDTSMSAGSGSPSKTVTPKAVPMLTPKPYSQPKNSQDVLKTFKVDGKVSVNGETVHREEEKERECPTVAPAHSLTKSQMFEGVARVHGSPLELKQDNGSIEINIKKPNSVPQELAATTEKTEPNSQEDKNDGGKSRKGNIELASSEPQHFTTTVTRCSPTVAFVEFPSSPQLKNDVSEEKDQKKPENEMSGKVELVLSQKVVKPKSPEPEATLTFPFLDKMPEANQLHLPNLNSQVDSPSSEKSPVMTPFKFWAWDPEEERRRQEKWQQEQERLLQERYQKEQDKLKEEWEKAQKEVEEEERRYYEEERKIIEDTVVPFTVSSSSADQLSTSSSMTEGSGTMNKIDLGNCQDEKQDRRWKKSFQGDDSDLLLKTRESDRLEEKGSLTEGALAHSGNPVSKGVHEDHQLDTEAGAPHCGTNPQLAQDPSQNQQTSNPTHSSEDVKPKTLPLDKSINHQIESPSERRKKSPREHFQAGPFSPCSPTPPGQSPNRSISGKKLCSSCGLPLGKGAAMIIETLNLYFHIQCFRCGICKGQLGDAVSGTDVRIRNGLLNCNDCYMRSRSAGQPTTL

SEQ ID NO: 46635 - protein, 160 aa, Homo sapiens
  Payload ID: 9443
  Gene Symbol: LIMCH1
  Gene Name: LIM and calponin homology domains 1
  ENSP ID: ENSP00000423355
MDSERQVKVKDTDDIESPKRSIRDSGYIDCWDSERSDSLSPPRHGRDDSFDSLDSFGSRSRQTPSPDVVLRGSSDGRGSDSESDLPHRKLPDVKKDDMSARRTSHGEPKSAVPFNQYLPNKSNQTAYVPAPLRKKKAEREEYRKSWSTATSPLGGERPFR

SEQ ID NO: 46636 - protein, 1069 aa, Homo sapiens
  Payload ID: 9443
  Gene Symbol: LIMCH1
  Gene Name: LIM and calponin homology domains 1
  Uniprot ID: Q9UPQ0
  ENSP ID: ENSP00000424437
MACPALGLEALQPLQPEPPPEPAFSEAQKWIEQVTGRSFGDKDFRTGLENGILLCELLNAIKPGLVKKINRLPTPIAGLDNIILFLRGCKELGLKESQLFDPSDLQDTSNRVTVKSLDYSRKLKNVLVTIYWLGKAANSCTSYSGTTLNLKEFEGLLAQMRKDTDDIESPKRSIRDSGYIDCWDSERSDSLSPPRHGRDDSFDSLDSFGSRSRQTPSPDVVLRGSSDGRGSDSESDLPHRKLPDVKKDDMSARRTSHGEPKSAVPFNQYLPNKSNQTAYVPAPLRKKKAEREEYRKSWSTATSPLGGERPFRSTSMFDMRCEEEAAVQPHSRARQEQLQLINNQLREEDDKWQDDLARWKSRRRSVSQDLIKKEEERKKMEKLLAGEDGTSERRKSIKTYREIVQEKERRERELHEAYKNARSQEEAEGILQQYIERFTISEAVLERLEMPKILERSHSTEPNLSSFLNDPNPMKYLRQQSLPPPKFTATVETTIARASVLDTSMSAGSGSPSKTVTPKAVPMLTPKPYSQPKNSQDVLKTFKVDGKVSVNGETVHREEEKERECPTVAPAHSLTKSQMFEGVARVHGSPLELKQDNGSIEINIKKPNSVPQELAATTEKTEPNSQEDKNDGGKSRKGNIELASSEPQHFTTTVTRCSPTVAFVEFPSSPQLKNDVSEEKDQKKPENEMSGKVELVLSQKVVKPKSPEPEATLTFPFLDKMPEANQLHLPNLNSQESPGTASVPLRVQNSWRRSQFFSQSVDSPSSEKSPVMTPFKFWAWDPEEERRRQEKWQQEQERLLQERYQKEQDKLKEEWEKAQKEVEEEERRYYEEERKIIEDTVVPFTVSSSSADQLSTSSSMTEGSGTMNKIDLGNCQDEKQDRRWKKSFQGDDSDLLLKTRESDRLEEKGSLTEGALAHSGNPVSKGVHEDHQLDTEAGAPHCGTNPQLAQDPSQNQQTSNPTHSSEDVKPKTLPLDKSINHQIESPSERRKSISGKKLCSSCGLPLGKGAAMIIETLNLYFHIQCFRCGICKGQLGDAVSGTDVRIRNGLLNCNDCYMRSRSAGQPTTL

SEQ ID NO: 46637 - protein, 1057 aa, Homo sapiens
  Payload ID: 9443
  Gene Symbol: LIMCH1
  Gene Name: LIM and calponin homology domains 1
  Uniprot ID: Q9UPQ0
  ENSP ID: ENSP00000424645
MACPALGLEALQPLQPEPPPEPAFSEAQKWIEQVTGRSFGDKDFRTGLENGILLCELLNAIKPGLVKKINRLPTPIAGLDNIILFLRGCKELGLKESQLFDPSDLQDTSNRVTVKSLDYSRKLKNVLVTIYWLGKAANSCTSYSGTTLNLKEFEGLLAQMRKDTDDIESPKRSIRDSGYIDCWDSERSDSLSPPRHGRDDSFDSLDSFGSRSRQTPSPDVVLRGSSDGRGSDSESDLPHRKLPDVKKDDMSARRTSHGEPKSAVPFNQYLPNKSNQTAYVPAPLRKKKAEREEYRKSWSTATSPLGGERPFRYGPRTPVSDDAESTSMFDMRCEEEAAVQPHSRARQEQLQLINNQLREEDDKWQDDLARWKSRRRSVSQDLIKKEEERKKMEKLLAGEDGTSERRKSIKTYREIVQEKERRERELHEAYKNARSQEEAEGILQQYIERFTISEAVLERLEMPKILERSHSTEPNLSSFLNDPNPMKYLRQQSLPPPKFTATVETTIARASVLDTSMSAGSGSPSKTVTPKAVPMLTPKPYSQPKNSQDVLKTFKVDGKVSVNGETVHREEEKERECPTVAPAHSLTKSQMFEGVARVHGSPLELKQDNGSIEINIKKPNSVPQELAATTEKTEPNSQEDKNDGGKSRKGNIELASSEPQHFTTTVTRCSPTVAFVEFPSSPQLKNDVSEEKDQKKPENEMSGKVELVLSQKVVKPKSPEPEATLTFPFLDKMPEANQLHLPNLNSQVDSPSSEKSPVMTPQFKFWAWDPEEERRRQEKWQQEQERLLQERYQKEQDKLKEEWEKAQKEVEEEERRYYEEERKIIEDTVVPFTVSSSSADQLSTSSSMTEGSGTMNKIDLGNCQDEKQDRRWKKSFQGDDSDLLLKTRESDRLEEKGSLTEGALAHSGNPVSKGVHEDHQLDTEAGAPHCGTNPQLAQDPSQNQQTSNPTHSSEDVKPKTLPLDKSINHQIESPSERRKSISGKKLCSSCGLPLGKGAAMIIETLNLYFHIQCFRCGICKGQLGDAVSGTDVRIRNGLLNCNDCYMRSRSAGQPTTL

SEQ ID NO: 46638 - protein, 1056 aa, Homo sapiens
  Payload ID: 9443
  Gene Symbol: LIMCH1
  Gene Name: LIM and calponin homology domains 1
  Uniprot ID: Q9UPQ0
  ENSP ID: ENSP00000424825
MACPALGLEALQPLQPEPPPEPAFSEAQKWIEQVTGRSFGDKDFRTGLENGILLCELLNAIKPGLVKKINRLPTPIAGLDNIILFLRGCKELGLKESQLFDPSDLQDTSNRVTVKSLDYSRKLKNVLVTIYWLGKAANSCTSYSGTTLNLKEFEGLLAQMRKDTDDIESPKRSIRDSGYIDCWDSERSDSLSPPRHGRDDSFDSLDSFGSRSRQTPSPDVVLRGSSDGRGSDSESDLPHRKLPDVKKDDMSARRTSHGEPKSAVPFNQYLPNKSNQTAYVPAPLRKKKAEREEYRKSWSTATSPLGGERPFRYGPRTPVSDDAESTSMFDMRCEEEAAVQPHSRARQEQLQLINNQLREEDDKWQDDLARWKSRRRSVSQDLIKKEEERKKMEKLLAGEDGTSERRKSIKTYREIVQEKERRERELHEAYKNARSQEEAEGILQQYIERFTISEAVLERLEMPKILERSHSTEPNLSSFLNDPNPMKYLRQQSLPPPKFTATVETTIARASVLDTSMSAGSGSPSKTVTPKAVPMLTPKPYSQPKNSQDVLKTFKVDGKVSVNGETVHREEEKERECPTVAPAHSLTKSQMFEGVARVHGSPLELKQDNGSIEINIKKPNSVPQELAATTEKTEPNSQEDKNDGGKSRKGNIELASSEPQHFTTTVTRCSPTVAFVEFPSSPQLKNDVSEEKDQKKPENEMSGKVELVLSQKVVKPKSPEPEATLTFPFLDKMPEANQLHLPNLNSQVDSPSSEKSPVMTPFKFWAWDPEEERRRQEKWQQEQERLLQERYQKEQDKLKEEWEKAQKEVEEEERRYYEEERKIIEDTVVPFTVSSSSADQLSTSSSMTEGSGTMNKIDLGNCQDEKQDRRWKKSFQGDDSDLLLKTRESDRLEEKGSLTEGALAHSGNPVSKGVHEDHQLDTEAGAPHCGTNPQLAQDPSQNQQTSNPTHSSEDVKPKTLPLDKSINHQIESPSERRKSISGKKLCSSCGLPLGKGAAMIIETLNLYFHIQCFRCGICKGQLGDAVSGTDVRIRNGLLNCNDCYMRSRSAGQPTTL

SEQ ID NO: 46639 - protein, 910 aa, Homo sapiens
  Payload ID: 9443
  Gene Symbol: LIMCH1
  Gene Name: LIM and calponin homology domains 1
  Uniprot ID: Q9UPQ0
  ENSP ID: ENSP00000425222
MRKDTDDIESPKRSIRDSGYIDCWDSERSDSLSPPRHGRDDSFDSLDSFGSRSRQTPSPDVVLRGSSDGRGSDSESDLPHRKLPDVKKDDMSARRTSHGEPKSAVPFNQYLPNKSNQTAYVPAPLRKKKAEREEYRKSWSTATSPLGGERPFRSTSMFDMRCEEEAAVQPHSRARQEQLQLINNQLREEDDKWQDDLARWKSRRRSVSQDLIKKEEERKKMEKLLAGEDGTSERRKSIKTYREIVQEKERRERELHEAYKNARSQEEAEGILQQYIERFTISEAVLERLEMPKILERSHSTEPNLSSFLNDPNPMKYLRQQSLPPPKFTATVETTIARASVLDTSMSAGSGSPSKTVTPKAVPMLTPKPYSQPKNSQDVLKTFKVDGKVSVNGETVHREEEKERECPTVAPAHSLTKSQMFEGVARVHGSPLELKQDNGSIEINIKKPNSVPQELAATTEKTEPNSQEDKNDGGKSRKGNIELASSEPQHFTTTVTRCSPTVAFVEFPSSPQLKNDVSEEKDQKKPENEMSGKVELVLSQKVVKPKSPEPEATLTFPFLDKMPEANQLHLPNLNSQESPGTASVPLRVQNSWRRSQFFSQSVDSPSSEKSPVMTPFKFWAWDPEEERRRQEKWQQEQERLLQERYQKEQDKLKEEWEKAQKEVEEEERRYYEEERKIIEDTVVPFTVSSSSADQLSTSSSMTEGSGTMNKIDLGNCQDEKQDRRWKKSFQGDDSDLLLKTRESDRLEEKGSLTEGALAHSGNPVSKGVHEDHQLDTEAGAPHCGTNPQLAQDPSQNQQTSNPTHSSEDVKPKTLPLDKSINHQIESPSERRKSISGKKLCSSCGLPLGKGAAMIIETLNLYFHIQCFRCGICKGQLGDAVSGTDVRIRNGLLNCNDCYMRSRSAGQPTTL

SEQ ID NO: 46640 - protein, 1467 aa, Homo sapiens
  Payload ID: 9443
  Gene Symbol: LIMCH1
  Gene Name: LIM and calponin homology domains 1
  ENSP ID: ENSP00000425631
MRKDTDDIESPKRSIRDSGYIDCWDSERSDSLSPPRHGRDDSFDSLDSFGSRSRQTPSPDVVLRGSSDGRGSDSESDLPHRKLPDVKKDDMSARRTSHGEPKSAVPFNQYLPNKSNQTAYVPAPLRKKKAEREEYRKSWSTATSPLGGERPFSFPETIEEEGSEVGSAGEDNPAGQMNPGWKPSDGGCELPDGSGKEHPSSDGAVVAPAPKSEEKDAAEIQKRKRLEQAGIKVMPAAQRFASQKQLSEEKEAIRDIVLRKENSFLTHQHGNDSEAEGEVVCRLPDLEKDDFAARRARMNQTKPMVPLNQLLYGPYPKKGAEKSDGSKQLSKGISKKRSLEYKRNQGHTEEVKLIVTCNMRAQESEPVEGGLRKVPDLHKDDLAQQRIQGSLAPHREPPSFITLSNITEADLETWERLKVSEKARDGDVQHICASEPSPEIKAETAIRDDFANRKARASKKASSPRQKFVHFGPVTELDQQKWKRLSIGKAGPREDEEEVICHGSKIQMDSVSPVSAATSSLKGHQIFNRQNDCRTMNCGRGDYCRRASWLAPVPESQEEWVCSLGECPRGTEEVTSKQLPQDGKEETESAPRDSERLSKAERSEDSSQPLVCPLASECEASGTEEKLEKMTAPAWSGSGLKGQRKLDDSRKDDMMARRTGMSLRHTGSNPNQFLPVPFAKQQDVEESSKGLPMKDQRYGPRTPVSDDAESTSMFDMRCEEEAAVQPHSRARQEQLQLINNQLREEDDKWQDDLARWKSRRRSVSQDLIKKEEERKKMEKLLAGEDGTSERRKSIKTYREIVQEKERRERELHEAYKNARSQEEAEGILQQYIERFTISEAVLERLEMPKILERSHSTEPNLSSFLNDPNPMKYLRQQSLPPPKFTATVETTIARASVLDTSMSAGSGSPSKTVTPKAVPMLTPKPYSQPKNSQDVLKTFKVDGKVSVNGETVHREEEKERECPTVAPAHSLTKSQMFEGVARVHGSPLELKQDNGSIEINIKKPNSVPQELAATTEKTEPNSQEDKNDGGKSRKGNIELASSEPQHFTTTVTRCSPTVAFVEFPSSPQLKNDVSEEKDQKKPENEMSGKVELVLSQKVVKPKSPEPEATLTFPFLDKMPEANQLHLPNLNSQVDSPSSEKSPVMTPFKFWAWDPEEERRRQEKWQQEQERLLQERYQKEQDKLKEEWEKAQKEVEEEERRYYEEERKIIEDTVVPFTVSSSSADQLSTSSSMTEGSGTMNKIDLGNCQDEKQDRRWKKSFQGDDSDLLLKTRESDRLEEKGSLTEGALAHSGNPVSKGVHEDHQLDTEAGAPHCGTNPQLAQDPSQNQQTSNPTHSSEDVKPKTLPLDKSINHQIESPSERRKKSPREHFQAGPFSPCSPTPPGQSPNRSISGKKLCSSCGLPLGKGAAMIIETLNLYFHIQCFRCGICKGQLGDAVSGTDVRIRNGLLNCNDCYMRSRSAGQPTTL

SEQ ID NO: 46641 - protein, 897 aa, Homo sapiens
  Payload ID: 9443
  Gene Symbol: LIMCH1
  Gene Name: LIM and calponin homology domains 1
  ENSP ID: ENSP00000426334
MLRHWREQGFYYNTRDTDDIESPKRSIRDSGYIDCWDSERSDSLSPPRHGRDDSFDSLDSFGSRSRQTPSPDVVLRGSSDGRGSDSESDLPHRKLPDVKKDDMSARRTSHGEPKSAVPFNQYLPNKSNQTAYVPAPLRKKKAEREEYRKSWSTATSPLGGERPFRSTSMFDMRCEEEAAVQPHSRARQEQLQLINNQLREEDDKWQDDLARWKSRRRSVSQDLIKKEEERKKMEKLLAGEDGTSERRKSIKTYREIVQEKERRERELHEAYKNARSQEEAEGILQQYIERFTISEAVLERLEMPKILERSHSTEPNLSSFLNDPNPMKYLRQQSLPPPKFTATVETTIARASVLDTSMSAGSGSPSKTVTPKAVPMLTPKPYSQPKNSQDVLKTFKVDGKVSVNGETVHREEEKERECPTVAPAHSLTKSQMFEGVARVHGSPLELKQDNGSIEINIKKPNSVPQELAATTEKTEPNSQEDKNDGGKSRKGNIELASSEPQHFTTTVTRCSPTVAFVEFPSSPQLKNDVSEEKDQKKPENEMSGKVELVLSQKVVKPKSPEPEATLTFPFLDKMPEANQLHLPNLNSQVDSPSSEKSPVMTPFKFWAWDPEEERRRQEKWQQEQERLLQERYQKEQDKLKEEWEKAQKEVEEEERRYYEEERKIIEDTVVPFTVSSSSADQLSTSSSMTEGSGTMNKIDLGNCQDEKQDRRWKKSFQGDDSDLLLKTRESDRLEEKGSLTEGALAHSGNPVSKGVHEDHQLDTEAGAPHCGTNPQLAQDPSQNQQTSNPTHSSEDVKPKTLPLDKSINHQIESPSERRKSISGKKLCSSCGLPLGKGAAMIIETLNLYFHIQCFRCGICKGQLGDAVSGTDVRIRNGLLNCNDCYMRSRSAGQPTTL

SEQ ID NO: 46642 - protein, 26 aa, Homo sapiens
  Payload ID: 9443
  Gene Symbol: LIMCH1
  Gene Name: LIM and calponin homology domains 1
  ENSP ID: ENSP00000426353
MRKDTDDIESPKRSIRDSGYIDCWDS

SEQ ID NO: 46643 - protein, 980 aa, Homo sapiens
  Payload ID: 9443
  Gene Symbol: LIMCH1
  Gene Name: LIM and calponin homology domains 1
  ENSP ID: ENSP00000427045
MACPALGLEALQPLQPEPPPEPAFSEAQKWIEQVTGRSFGDKDFRTGLENGILLCELLNAIKPGLVKKINRLPTPIAGLDNIILFLRGCKELGLKESQLFDPSDLQDTSNRVTVKSLDYSRKLKNVLVTIYWLGKAANSCTSYSGTTLNLKEFEGLLAQMRKDTDDIESPKRSIRDSGYIDCWDSERSDSLSPPRHGRDDSFDSLDSFGSRSRQTPSPDVVLRGSSDGRGSDSESDLPHRKLPDVKKDDMSARRTSHGEPKSAVPFNQYLPNKSNQTAYVPAPLRKKKAEREEYRKSWSTATSPLGGERPFRYGPRTPVSDDAESTSMFDMRCEEEAAVQPHSRARQEQLQLINNQLREEDDKWQDDLARWKSRRRSVSQDLIKKEEERKKMEKLLAGEDGTSERRKSIKTYREIVQEKERRERELHEAYKNARSQEEAEGILQQYIERFTISEAVLERLEMPKILERSHSTEPNLSSFLNDPNPMKYLRQQSLPPPKFTATVETTIARASVLDTSMSAGSGSPSKTVTPKAVPMLTPKPYSQPKNSQDVLKTFKVDGKVSVNGETVHREEEKERECPTVAPAHSLTKSQMFEGVARVHGSPLELKQDNGSIEINIKKPNSVPQELAATTEKTEPNSQEDKNDGGKSRKGNIELASSEPQHFTTTVTRCSPTVAFVEFPSSPQLKNDVSEEKDQKKPENEMSGKVELVLSQKERYQKEQDKLKEEWEKAQKEVEEEERRYYEEERKIIEDTVVPFTVSSSSADQLSTSSSMTEGSGTMNKIDLGNCQDEKQDRRWKKSFQGDDSDLLLKTRESDRLEEKGSLTEGALAHSGNPVSKGVHEDHQLDTEAGAPHCGTNPQLAQDPSQNQQTSNPTHSSEDVKPKTLPLDKSINHQIESPSERRKSISGKKLCSSCGLPLGKGAAMIIETLNLYFHIQCFRCGICKGQLGDAVSGTDVRIRNGLLNCNDCYMRSRSAGQPTTL

SEQ ID NO: 46644 - protein, 153 aa, Homo sapiens
  Payload ID: 9443
  Gene Symbol: LIMCH1
  Gene Name: LIM and calponin homology domains 1
  ENSP ID: ENSP00000427311
MRKDTDDIESPKRSIRDSGYIDCWDSERSDSLSPPRHGRDDSFDSLDSFGSRSRQTPSPDVVLRGSSDGRGSDSESDLPHRKLPDVKKDDMSARRTSHGEPKSAVPFNQYLPNKSNQTAYVPAPLRKKKAEREEYRKSWSTATSPLGGERPFR

SEQ ID NO: 46645 - protein, 365 aa, Homo sapiens
  Payload ID: 9444
  Gene Symbol: LMCD1
  Gene Name: LIM and cysteine-rich domains 1
  Uniprot ID: Q9NZU5
  ENSP ID: ENSP00000157600
MAKVAKDLNPGVKKMSLGQLQSARGVACLGCKGTCSGFEPHSWRKICKSCKCSQEDHCLTSDLEDDRKIGRLLMDSKYSTLTARVKGGDGIRIYKRNRMIMTNPIATGKDPTFDTITYEWAPPGVTQKLGLQYMELIPKEKQPVTGTEGAFYRRRQLMHQLPIYDQDPSRCRGLLENELKLMEEFVKQYKSEALGVGEVALPGQGGLPKEEGKQQEKPEGAETTAATTNGSLSDPSKEVEYVCELCKGAAPPDSPVVYSDRAGYNKQWHPTCFVCAKCSEPLVDLIYFWKDGAPWCGRHYCESLRPRCSGCDEIIFAEDYQRVEDLAWHRKHFVCEGCEQLLSGRAYIVTKGQLLCPTCSKSKRS

SEQ ID NO: 46646 - protein, 253 aa, Homo sapiens
  Payload ID: 9444
  Gene Symbol: LMCD1
  Gene Name: LIM and cysteine-rich domains 1
  ENSP ID: ENSP00000380542
MFGMQGDVFGLRATFMEGLQYMELIPKEKQPVTGTEGAFYRRRQLMHQLPIYDQDPSRCRGLLENELKLMEEFVKQYKSEALGVGEVALPGQGGLPKEEGKQQEKPEGAETTAATTNGSLSDPSKEVEYVCELCKGAAPPDSPVVYSDRAGYNKQWHPTCFVCAKCSEPLVDLIYFWKDGAPWCGRHYCESLRPRCSGCDEIIFAEDYQRVEDLAWHRKHFVCEGCEQLLSGRAYIVTKGQLLCPTCSKSKRS

SEQ ID NO: 46647 - protein, 292 aa, Homo sapiens
  Payload ID: 9444
  Gene Symbol: LMCD1
  Gene Name: LIM and cysteine-rich domains 1
  Uniprot ID: Q9NZU5
  ENSP ID: ENSP00000396515
MDSKYSTLTARVKGGDGIRIYKRNRMIMTNPIATGKDPTFDTITYEWAPPGVTQKLGLQYMELIPKEKQPVTGTEGAFYRRRQLMHQLPIYDQDPSRCRGLLENELKLMEEFVKQYKSEALGVGEVALPGQGGLPKEEGKQQEKPEGAETTAATTNGSLSDPSKEVEYVCELCKGAAPPDSPVVYSDRAGYNKQWHPTCFVCAKCSEPLVDLIYFWKDGAPWCGRHYCESLRPRCSGCDEIIFAEDYQRVEDLAWHRKHFVCEGCEQLLSGRAYIVTKGQLLCPTCSKSKRS

SEQ ID NO: 46648 - protein, 233 aa, Homo sapiens
  Payload ID: 9444
  Gene Symbol: LMCD1
  Gene Name: LIM and cysteine-rich domains 1
  ENSP ID: ENSP00000400555
MGYTYKVIERILEIGAFRPHMSLGQLQSARGVACLGCKGTCSGFEPHSWRKICKSCKCSQEDHCLTSDLEDDRKIGRLLMDSKYSTLTARVKGGDGIRIYKRNRMIMTNPIATGKDPTFDTITYEWAPPGVTQKLGLQYMELIPKEKQPVTGTEGAFYRRRQLMHQLPIYDQDPSRCRGLLENELKLMEEFVKQYKSEALGVGEVALPGQGGLPKEEGKQQEKPEGAETTAAT

SEQ ID NO: 46649 - protein, 58 aa, Homo sapiens
  Payload ID: 9444
  Gene Symbol: LMCD1
  Gene Name: LIM and cysteine-rich domains 1
  ENSP ID: ENSP00000405049
MAKVAKDLNPGVKKMSLGQLQSARGVACLGCKGTCSGFEPHSWRDCSTWSSSPRRSSQ

SEQ ID NO: 46650 - protein, 247 aa, Homo sapiens
  Payload ID: 9444
  Gene Symbol: LMCD1
  Gene Name: LIM and cysteine-rich domains 1
  ENSP ID: ENSP00000411222
MAKVAKDLNPGVKKMSLGQLQSARGVACLGCKGTCSGFEPHSWRKICKSCKCSQEDHCLTSDLEDDRKIGRLLMDSKYSTLTARVKGGDGIRIYKRNRMIMTNPIATGKDPTFDTITYEWAPPGVTQKLGLQYMELIPKEKQPVTGTEGAFYRRRQLMHQLPIYDQDPSRCRGLLENELKLMEEFVKQYKSEALGVGEVALPGQGGLPKEEGKQQEKPEGAETTAATTNGSLSDPSKEVEYKPVPLV

SEQ ID NO: 46651 - protein, 325 aa, Homo sapiens
  Payload ID: 9445
  Gene Symbol: LIMS1
  Gene Name: LIM and senescent cell antigen-like domains 1
  Uniprot ID: P48059
  ENSP ID: ENSP00000331775
MANALASATCERCKGGFAPAEKIVNSNGELYHEQCFVCAQCFQQFPEGLFYEFEGRKYCEHDFQMLFAPCCHQCGEFIIGRVIKAMNNSWHPECFRCDLCQEVLADIGFVKNAGRHLCRPCHNREKARGLGKYICQKCHAIIDEQPLIFKNDPYHPDHFNCANCGKELTADARELKGELYCLPCHDKMGVPICGACRRPIEGRVVNAMGKQWHVEHFVCAKCEKPFLGHRHYERKGLAYCETHYNQLFGDVCFHCNRVIEGDVVSALNKAWCVNCFACSTCNTKLTLKNKFVEFDMKPVCKKCYEKFPLELKKRLKKLAETLGRK

SEQ ID NO: 46652 - protein, 387 aa, Homo sapiens
  Payload ID: 9445
  Gene Symbol: LIMS1
  Gene Name: LIM and senescent cell antigen-like domains 1
  Uniprot ID: P48059
  ENSP ID: ENSP00000337598
MAFSGRARPCIIPENEEIPRAALNTVHEANGTEDERAVSKLQRRHSDVKVYKEFCDFYAKFNMANALASATCERCKGGFAPAEKIVNSNGELYHEQCFVCAQCFQQFPEGLFYEFEGRKYCEHDFQMLFAPCCHQCGEFIIGRVIKAMNNSWHPECFRCDLCQEVLADIGFVKNAGRHLCRPCHNREKARGLGKYICQKCHAIIDEQPLIFKNDPYHPDHFNCANCGKELTADARELKGELYCLPCHDKMGVPICGACRRPIEGRVVNAMGKQWHVEHFVCAKCEKPFLGHRHYERKGLAYCETHYNQLFGDVCFHCNRVIEGDVVSALNKAWCVNCFACSTCNTKLTLKNKFVEFDMKPVCKKCYEKFPLELKKRLKKLAETLGRK

SEQ ID NO: 46653 - protein, 325 aa, Homo sapiens; identical to SEQ ID NO: 46651
  Payload ID: 9445
  Gene Symbol: LIMS1
  Gene Name: LIM and senescent cell antigen-like domains 1
  Uniprot ID: P48059
  ENSP ID: ENSP00000376987

SEQ ID NO: 46654 - protein, 329 aa, Homo sapiens
  Payload ID: 9445
  Gene Symbol: LIMS1
  Gene Name: LIM and senescent cell antigen-like domains 1
  Uniprot ID: P48059
  ENSP ID: ENSP00000386926
MTCNMANALASATCERCKGGFAPAEKIVNSNGELYHEQCFVCAQCFQQFPEGLFYEFEGRKYCEHDFQMLFAPCCHQCGEFIIGRVIKAMNNSWHPECFRCDLCQEVLADIGFVKNAGRHLCRPCHNREKARGLGKYICQKCHAIIDEQPLIFKNDPYHPDHFNCANCGKELTADARELKGELYCLPCHDKMGVPICGACRRPIEGRVVNAMGKQWHVEHFVCAKCEKPFLGHRHYERKGLAYCETHYNQLFGDVCFHCNRVIEGDVVSALNKAWCVNCFACSTCNTKLTLKNKFVEFDMKPVCKKCYEKFPLELKKRLKKLAETLGRK

SEQ ID NO: 46655 - protein, 362 aa, Homo sapiens
  Payload ID: 9445
  Gene Symbol: LIMS1
  Gene Name: LIM and senescent cell antigen-like domains 1
  Uniprot ID: P48059
  ENSP ID: ENSP00000387264
MTALQLKELSHSGLYRRRRDRPDSLRVNGLPEEELSNMANALASATCERCKGGFAPAEKIVNSNGELYHEQCFVCAQCFQQFPEGLFYEFEGRKYCEHDFQMLFAPCCHQCGEFIIGRVIKAMNNSWHPECFRCDLCQEVLADIGFVKNAGRHLCRPCHNREKARGLGKYICQKCHAIIDEQPLIFKNDPYHPDHFNCANCGKELTADARELKGELYCLPCHDKMGVPICGACRRPIEGRVVNAMGKQWHVEHFVCAKCEKPFLGHRHYERKGLAYCETHYNQLFGDVCFHCNRVIEGDVVSALNKAWCVNCFACSTCNTKLTLKNKFVEFDMKPVCKKCYEKFPLELKKRLKKLAETLGRK

SEQ ID NO: 46656 - protein, 176 aa, Homo sapiens
  Payload ID: 9445
  Gene Symbol: LIMS1
  Gene Name: LIM and senescent cell antigen-like domains 1
  ENSP ID: ENSP00000390862
MLGVAAGMTHSNMANALASATCERCKGGFAPAEKIVNSNGELYHEQCFVCAQCFQQFPEGLFYEFEGRKYCEHDFQMLFAPCCHQCGEFIIGRVIKAMNNSWHPECFRCDLCQEVLADIGFVKNAGRHLCRPCHNREKARGLGKYICQKCHAIIDEQPLIFKNDPYHPDHFNCANC

SEQ ID NO: 46657 - protein, 117 aa, Homo sapiens
  Payload ID: 9445
  Gene Symbol: LIMS1
  Gene Name: LIM and senescent cell antigen-like domains 1
  ENSP ID: ENSP00000399267
MAFSGRARPCIIPENEEIPRAALNTVHEANGTEDERAVSKLQRRHSDVKVYKEFCDFYAKFNMANALASATCERCKGGFAPAEKIVNSNGELYHEQCFVCAQCFQQFPEGLFYEERT

SEQ ID NO: 46658 - protein, 100 aa, Homo sapiens
  Payload ID: 9445
  Gene Symbol: LIMS1
  Gene Name: LIM and senescent cell antigen-like domains 1
  ENSP ID: ENSP00000402322
MTALQLKELSHSGLYRRRRDRPDSLRVNGLPEEELSNMANALASATCERCKGGFAPAEKIVNSNGELYHEQCFVCAQCFQQFPEGLFYEVNSSLAELSKP

SEQ ID NO: 46659 - protein, 55 aa, Homo sapiens
  Payload ID: 9445
  Gene Symbol: LIMS1
  Gene Name: LIM and senescent cell antigen-like domains 1
  ENSP ID: ENSP00000410751
MANALASATCERCKGGFAPAEKIVNSNGELYHEQCFVCAQCFQQFPEGLFYEERT

SEQ ID NO: 46660 - protein, 337 aa, Homo sapiens
  Payload ID: 9445
  Gene Symbol: LIMS1
  Gene Name: LIM and senescent cell antigen-like domains 1
  Uniprot ID: P48059
  ENSP ID: ENSP00000437912
MLGVAAGMTHSNMANALASATCERCKGGFAPAEKIVNSNGELYHEQCFVCAQCFQQFPEGLFYEFEGRKYCEHDFQMLFAPCCHQCGEFIIGRVIKAMNNSWHPECFRCDLCQEVLADIGFVKNAGRHLCRPCHNREKARGLGKYICQKCHAIIDEQPLIFKNDPYHPDHFNCANCGKELTADARELKGELYCLPCHDKMGVPICGACRRPIEGRVVNAMGKQWHVEHFVCAKCEKPFLGHRHYERKGLAYCETHYNQLFGDVCFHCNRVIEGDVVSALNKAWCVNCFACSTCNTKLTLKNKFVEFDMKPVCKKCYEKFPLELKKRLKKLAETLGRK

SEQ ID NO: 46661 - protein, 209 aa, Homo sapiens
  Payload ID: 9445
  Gene Symbol: LIMS1
  Gene Name: LIM and senescent cell antigen-like domains 1
  ENSP ID: ENSP00000446121
  MOD_RES (1)..(1): Any amino acid
XKELTADARELKGELYCLPCHDKMGVPICGACRRPIEGRVVNAMGKQWHVEHFVCAKCEKPFLGHRHYERKGLAYCETHYNQLFGDVCFHCNRVIEGDVVSALNKAWCVNCFACSTCNTKLTLKDKFVEIDLKPVCKHCYEKMPEEFKRRLAKREREAKDKDKQKKKKPVCLNKFVEFDMKPVCKKCYEKFPLELKKRLKKLAETLGRK

SEQ ID NO: 46662 - protein, 365 aa, Homo sapiens
  Payload ID: 9446
  Gene Symbol: LIMS2
  Gene Name: LIM and senescent cell antigen-like domains 2
  Uniprot ID: Q7Z4I7
  ENSP ID: ENSP00000326888
MAARLGALAASGLYRRRQHRQSPPPATGNMSDALANAVCQRCQARFSPAERIVNSNGELYHEHCFVCAQCFRPFPEGLFYEFEGRKYCEHDFQMLFAPCCGSCGEFIIGRVIKAMNNNWHPGCFRCELCDVELADLGFVKNAGRHLCRPCHNREKAKGLGKYICQRCHLVIDEQPLMFRSDAYHPDHFNCTHCGKELTAEARELKGELYCLPCHDKMGVPICGACRRPIEGRVVNALGKQWHVEHFVCAKCEKPFLGHRHYEKKGLAYCETHYNQLFGDVCYNCSHVIEGDVVSALNKAWCVSCFSCSTCNSKLTLKNKFVEFDMKPVCKRCYEKFPLELKKRLKKLSELTSRKAQPKATDLNSA

SEQ ID NO: 46663 - protein, 341 aa, Homo sapiens
  Payload ID: 9446
  Gene Symbol: LIMS2
  Gene Name: LIM and senescent cell antigen-like domains 2
  Uniprot ID: Q7Z4I7
  ENSP ID: ENSP00000347240
MTGSNMSDALANAVCQRCQARFSPAERIVNSNGELYHEHCFVCAQCFRPFPEGLFYEFEGRKYCEHDFQMLFAPCCGSCGEFIIGRVIKAMNNNWHPGCFRCELCDVELADLGFVKNAGRHLCRPCHNREKAKGLGKYICQRCHLVIDEQPLMFRSDAYHPDHFNCTHCGKELTAEARELKGELYCLPCHDKMGVPICGACRRPIEGRVVNALGKQWHVEHFVCAKCEKPFLGHRHYEKKGLAYCETHYNQLFGDVCYNCSHVIEGDVVSALNKAWCVSCFSCSTCNSKLTLKNKFVEFDMKPVCKRCYEKFPLELKKRLKKLSELTSRKAQPKATDLNSA

SEQ ID NO: 46664 - protein, 189 aa, Homo sapiens
  Payload ID: 9446
  Gene Symbol: LIMS2
  Gene Name: LIM and senescent cell antigen-like domains 2
  Uniprot ID: Q7Z4I7
  ENSP ID: ENSP00000386252
MFRSDAYHPDHFNCTHCGKELTAEARELKGELYCLPCHDKMGVPICGACRRPIEGRVVNALGKQWHVEHFVCAKCEKPFLGHRHYEKKGLAYCETHYNQLFGDVCYNCSHVIEGDVVSALNKAWCVSCFSCSTCNSKLTLKNKFVEFDMKPVCKRCYEKFPLELKKRLKKLSELTSRKAQPKATDLNSA

SEQ ID NO: 46665 - protein, 189 aa, Homo sapiens; identical to SEQ ID NO: 46664
  Payload ID: 9446
  Gene Symbol: LIMS2
  Gene Name: LIM and senescent cell antigen-like domains 2
  Uniprot ID: Q7Z4I7
  ENSP ID: ENSP00000386345

SEQ ID NO: 46666 - protein, 336 aa, Homo sapiens
  Payload ID: 9446
  Gene Symbol: LIMS2
  Gene Name: LIM and senescent cell antigen-like domains 2
  Uniprot ID: Q7Z4I7
  ENSP ID: ENSP00000386383
MSDALANAVCQRCQARFSPAERIVNSNGELYHEHCFVCAQCFRPFPEGLFYEFEGRKYCEHDFQMLFAPCCGSCGEFIIGRVIKAMNNNWHPGCFRCELCDVELADLGFVKNAGRHLCRPCHNREKAKGLGKYICQRCHLVIDEQPLMFRSDAYHPDHFNCTHCGKELTAEARELKGELYCLPCHDKMGVPICGACRRPIEGRVVNALGKQWHVEHFVCAKCEKPFLGHRHYEKKGLAYCETHYNQLFGDVCYNCSHVIEGDVVSALNKAWCVSCFSCSTCNSKLTLKNKFVEFDMKPVCKRCYEKFPLELKKRLKKLSELTSRKAQPKATDLNSA

SEQ ID NO: 46667 - protein, 189 aa, Homo sapiens; identical to SEQ ID NO: 46664
  Payload ID: 9446
  Gene Symbol: LIMS2
  Gene Name: LIM and senescent cell antigen-like domains 2
  Uniprot ID: Q7Z4I7
  ENSP ID: ENSP00000386570

SEQ ID NO: 46668 - protein, 336 aa, Homo sapiens; identical to SEQ ID NO: 46666
  Payload ID: 9446
  Gene Symbol: LIMS2
  Gene Name: LIM and senescent cell antigen-like domains 2
  Uniprot ID: Q7Z4I7
  ENSP ID: ENSP00000386637

SEQ ID NO: 46669 - protein, 189 aa, Homo sapiens; identical to SEQ ID NO: 46664
  Payload ID: 9446
  Gene Symbol: LIMS2
  Gene Name: LIM and senescent cell antigen-like domains 2
  Uniprot ID: Q7Z4I7
  ENSP ID: ENSP00000386907

SEQ ID NO: 46670 - protein, 336 aa, Homo sapiens; identical to SEQ ID NO: 46666
  Payload ID: 9446
  Gene Symbol: LIMS2
  Gene Name: LIM and senescent cell antigen-like domains 2
  Uniprot ID: Q7Z4I7
  ENSP ID: ENSP00000387002

SEQ ID NO: 46671 - protein, 60 aa, Homo sapiens
  Payload ID: 9446
  Gene Symbol: LIMS2
  Gene Name: LIM and senescent cell antigen-like domains 2
  ENSP ID: ENSP00000388611
MFRSDAYHPDHFNCTHCGTLSVPSVRSHSWGTGTMRRRAWPTARLTTTSSSGTSATTAAM

SEQ ID NO: 46672 - protein, 169 aa, Homo sapiens
  Payload ID: 9446
  Gene Symbol: LIMS2
  Gene Name: LIM and senescent cell antigen-like domains 2
  ENSP ID: ENSP00000397253
  MOD_RES (1)..(1): Any amino acid
XGVPICGACRRPIEGRVVNALGKQWHVEVSQAGGHVASGWGVPQLRVMHFVCAKCEKPFLGHRHYEKKGLAYCETHYNQLFGDVCYNCSHVIEGDVVSALNKAWCVSCFSCSTCNSKLTLKNKFVEFDMKPVCKRCYEKFPLELKKRLKKLSELTSRKAQPKATDLNSA

SEQ ID NO: 46673 - protein, 363 aa, Homo sapiens
  Payload ID: 9446
  Gene Symbol: LIMS2
  Gene Name: LIM and senescent cell antigen-like domains 2
  Uniprot ID: Q7Z4I7
  ENSP ID: ENSP00000443794
MTGRKRKWGETGTGSGAAPAAALRWSNMSDALANAVCQRCQARFSPAERIVNSNGELYHEHCFVCAQCFRPFPEGLFYEFEGRKYCEHDFQMLFAPCCGSCGEFIIGRVIKAMNNNWHPGCFRCELCDVELADLGFVKNAGRHLCRPCHNREKAKGLGKYICQRCHLVIDEQPLMFRSDAYHPDHFNCTHCGKELTAEARELKGELYCLPCHDKMGVPICGACRRPIEGRVVNALGKQWHVEHFVCAKCEKPFLGHRHYEKKGLAYCETHYNQLFGDVCYNCSHVIEGDVVSALNKAWCVSCFSCSTCNSKLTLKNKFVEFDMKPVCKRCYEKFPLELKKRLKKLSELTSRKAQPKATDLNSA

SEQ ID NO: 46674 - protein, 249 aa, Homo sapiens
  Payload ID: 9446
  Gene Symbol: LIMS2
  Gene Name: LIM and senescent cell antigen-like domains 2
  ENSP ID: ENSP00000484949
MESRHPAVAEIACTCWALLHLANPEGRGHLCRPCHNREKAKGLGKYICQRCHLVIDEQPLMFRSDAYHPDHFNCTHCGKELTAEARELKGELYCLPCHDKMGVPICGACRRPIEGRVVNALGKQWHVEHFVCAKCEKPFLGHRHYEKKGLAYCETHYNQLFGDVCYNCSHVIEGDVVSALNKAWCVSCFSCSTCNSKLTLKNKFVEFDMKPVCKRCYEKFPLELKKRLKKLSELTSRKAQPKATDLNSA

SEQ ID NO: 46675 - protein, 117 aa, Homo sapiens
  Payload ID: 9447
  Gene Symbol: LIMS3
  Gene Name: LIM and senescent cell antigen-like domains 3
  Uniprot ID: P0CW19
  ENSP ID: ENSP00000405165
MAFSGRARPCIIPENEEIPRAALNTVHEANGTEDERAVSKLQRRHSDVKVYKEFCDFYAKFNMANALASATCERCKGGFAPAETIVNSNGELYHEQCFVCAQCFQQFPEGLFYEERT

SEQ ID NO: 46676 - protein, 248 aa, Homo sapiens; identical to SEQ ID NO: 1146
  Payload ID: 9447
  Gene Symbol: LIMS3
  Gene Name: LIM and senescent cell antigen-like domains 3
  Uniprot ID: P0CW19
  ENSP ID: ENSP00000488227

SEQ ID NO: 46677 - protein, 398 aa, Homo sapiens
  Payload ID: 9447
  Gene Symbol: LIMS3
  Gene Name: LIM and senescent cell antigen-like domains 3
  ENSP ID: ENSP00000488486
MAFSGRARPCIIPENEEIPRAALNTVHEANGTEDERAVSKLQRRHSDVKVYKEFCDFYAKFNMANALASATCERCKGGFAPAETIVNSNGELYHEQCFVCAQCFQQFPEGLFYEFEGRKYCEHDFQMLFAPCCHQCGEFIIGRVIKAMNNSWHPECFRCDLCQEVLADIGFVKNAGRHLCRPCHNREKARGLGKYICQKCHAIIDEQPLIFKNDPYHPDHFNCANCGKDLTADAQELKGELYCLPCHDKMGVPICGACRRPIEGRVVNAMGKQWHVEHFVCAKCEKPFLGHRHYERKGLAYCETHYNQLFGDVCFHCNRVIEGDVVSALNKAWCVNCFACSTCNTKLTLKDKFVEIDLKPVCKHCYEKMPEEFKRRLAKREREAKDKDKQKKKKPVCL

SEQ ID NO: 46678 - protein, 55 aa, Homo sapiens
  Payload ID: 9447
  Gene Symbol: LIMS3
  Gene Name: LIM and senescent cell antigen-like domains 3
  ENSP ID: ENSP00000488782
MANALASATCERCKGGFAPAETIVNSNGELYHEQCFVCAQCFQQFPEGLFYEERT

SEQ ID NO: 46679 - protein, 117 aa, Homo sapiens; identical to SEQ ID NO: 46675
  Payload ID: 9448
  Gene Symbol: LIMS3L
  Gene Name: LIM and senescent cell antigen-like domains 3-like
  Uniprot ID: P0CW20
  ENSP ID: ENSP00000404432

SEQ ID NO: 46680 - protein, 248 aa, Homo sapiens; identical to SEQ ID NO: 1146
  Payload ID: 9448
  Gene Symbol: LIMS3L
  Gene Name: LIM and senescent cell antigen-like domains 3-like
  ENSP ID: ENSP00000487960

SEQ ID NO: 46681 - protein, 398 aa, Homo sapiens; identical to SEQ ID NO: 46677
  Payload ID: 9448
  Gene Symbol: LIMS3L
  Gene Name: LIM and senescent cell antigen-like domains 3-like
  ENSP ID: ENSP00000488340

SEQ ID NO: 46682 - protein, 261 aa, Homo sapiens
  Payload ID: 9449
  Gene Symbol: LASP1
  Gene Name: LIM and SH3 protein 1
  Uniprot ID: Q14847
  ENSP ID: ENSP00000325240
MNPNCARCGKIVYPTEKVNCLDKFWHKACFHCETCKMTLNMKNYKGYEKKPYCNAHYPKQSFTMVADTPENLRLKQQSELQSQVRYKEEFEKNKGKGFSVVADTPELQRIKKTQDQISNIKYHEEFEKSRMGPSGGEGMEPERRDSQDGSSYRRPLEQQQPHHIPTSAPVYQQPQQQPVAQSYGGYKEPAAPVSIQRSAPGGGGKRYRAVYDYSAADEDEVSFQDGDTIVNVQQIDDGWMYGTVERTGDTGMLPANYVEAI

SEQ ID NO: 46683 - protein, 166 aa, Homo sapiens
  Payload ID: 9449
  Gene Symbol: LASP1
  Gene Name: LIM and SH3 protein 1
  ENSP ID: ENSP00000391897
MTLNMKNYKGYEKKPYCNAHYPKQSFTMVADTPENLRLKQQSELQSQVRYKEEFEKNKGKGFSVVADTPELQRIKKTQDQISNIKYHEEFEKSRMGPSGGEGMEPERRDSQDGSSYRRPLEQQQPHHIPTSAPVYQQPQQQPVAQSYGGYKEPAAPVSIQRSAPGG

SEQ ID NO: 46684 - protein, 261 aa, Homo sapiens; identical to SEQ ID NO: 46682
  Payload ID: 9449
  Gene Symbol: LASP1
  Gene Name: LIM and SH3 protein 1
  Uniprot ID: Q14847
  ENSP ID: ENSP00000392853

SEQ ID NO: 46685 - protein, 205 aa, Homo sapiens
  Payload ID: 9449
  Gene Symbol: LASP1
  Gene Name: LIM and SH3 protein 1
  Uniprot ID: Q14847
  ENSP ID: ENSP00000401048
MLPLRDLQDDTEHEELQGLREEALLQRVRYKEEFEKNKGKGFSVVADTPELQRIKKTQDQISNIKYHEEFEKSRMGPSGGEGMEPERRDSQDGSSYRRPLEQQQPHHIPTSAPVYQQPQQQPVAQSYGGYKEPAAPVSIQRSAPGGGGKRYRAVYDYSAADEDEVSFQDGDTIVNVQQIDDGWMYGTVERTGDTGMLPANYVEAI

SEQ ID NO: 46686 - protein, 91 aa, Homo sapiens
  Payload ID: 9449
  Gene Symbol: LASP1
  Gene Name: LIM and SH3 protein 1
  ENSP ID: ENSP00000414803
MNPNCARCGKIVYPTEKVNCLDKFWHKACFHCETCKMTLNMKNYKGYEKKPYCNAHYPKQSFTMVADTPENLRLKQQSELQSQMKKPRPGA

SEQ ID NO: 46687 - protein, 105 aa, Homo sapiens
  Payload ID: 9449
  Gene Symbol: LASP1
  Gene Name: LIM and SH3 protein 1
  ENSP ID: ENSP00000462564
RDSQDGSSYRRPLEQQQPHHIPTSAPVYQQPQQQPVAQSYGGYKEPAAPVSIQRSAPGGGGVSNPGRRGEARGRGSFGKAWTQLMDSPDLCTHPLLCVMIRISAL

SEQ ID NO: 46688 - protein, 71 aa, Homo sapiens
  Payload ID: 9449
  Gene Symbol: LASP1
  Gene Name: LIM and SH3 protein 1
  ENSP ID: ENSP00000468664
MNPNCARCGKIVYPTEKVNCLDKFWHKACFHCETCKMTLNMKNYKGYEKKPYCNACATRRSLRRTRAKVSA

SEQ ID NO: 46689 - protein, 1398 aa, Homo sapiens
  Payload ID: 9450
  Gene Symbol: LMO7
  Gene Name: LIM domain 7
  ENSP ID: ENSP00000317802
MQDYNKDDMSYRRISAVEPKTALPFNRFLPNKSRQPSYVPAPLRKKKPDKHEDNRRSWASPVYTEADGTFSSNQRRIWGTNVENWPTVQGTSKSSCYLEEEKAKTRSIPNIVKDDLYVRKLSPVMPNPGNAFDQFLPKCWTPEDVNWKRIKRETYKPWYKEFQGFSQFLLLQALQTYSDDILSSETHTKIDPTSGPRLITRRKNLSYAPGYRRDDLEMAALDPDLENDDFFVRKTGAFHANPYVLRAFEDFRKFSEQDDSVERDIILQCREGELVLPDLEKDDMIVRRIPAQKKEVPLSGAPDRYHPVPFPEPWTLPPEIQAKFLCVLERTCPSKEKSNSCRILVPSYRQKKDDMLTRKIQSWKLGTTVPPISFTPGPCSEADLKRWEAIREASRLRHKKRLMVERLFQKIYGENGSKSMSDVSAEDVQNLRQLRYEEMQKIKSQLKEQDQKWQDDLAKWKDRRKSYTSDLQKKKEEREEIEKQALEKSKRSSKTFKEMLQDRESQNQKSTVPSRRRMYSFDDVLEEGKRPPTMTVSEASYQSERVEEKGATYPSEIPKEDSTTFAKREDRVTTEIQLPSQSPVEEQSPASLSSLRSRSTQMESTRVSASLPRSYRKTDTVRLTSVVTPRPFGSQTRGISSLPRSYTMDDAWKYNGDVEDIKRTPNNVVSTPAPSPDASQLASSLSSQKEVAATEEDVTRLPSPTSPFSSLSQDQAATSKATLSSTSGLDLMSESGEGEISPQREVSRSQDQFSDMRISINQTPGKSLDFGFTIKWDIPGIFVASVEAGSPAEFSQLQVDDEIIAINNTKFSYNDSKEWEEAMAKAQETGHLVMDVRRYGKAGSPETKWIDATSGIYNSEKSSNLSVTTDFSESLQSSNIESKEINGIHDESNAFESKASESISLKNLKRRSQFFEQGSSDSVVPDLPVPTISAPSRWVWDQEEERKRQERWQKEQDRLLQEKYQREQEKLREEWQRAKQEAERENSKYLDEELMVLSSNSMSLTTREPSLATWEATWSEGSKSSDREGTRAGEEERRQPQEEVVHEDQGKKPQDQLVIERERKWEQQLQEEQEQKRLQAEAEEQKRPAEEQKRQAEIERETSVRIYQYRRPVDSYDIPKTEEASSGFLPGDRNKSRSTTELDDYSTNKNGNNKYLDQIGNMTSSQRRSKKEQVPSGAELERQQILQEMRKRTPLHNDNSWIRQRSASVNKEPVSLPGIMRRGESLDNLDSPRSNSWRQPPWLNQPTGFYASSSVQDFSRPPPQLVSTSNRAYMRNPSSSVPPPSAGSVKTSTTGVATTQSPTPRSHSPSASQSGSQLRNRSVSGKRICSYCNNILGKGAAMIIESLGLCYHLHCFKCVACECDLGGSSSGAEVRIRNHQLYCNDCYLRFKSGRPTAM

SEQ ID NO: 46690 - protein, 1349 aa, Homo sapiens
  Payload ID: 9450
  Gene Symbol: LMO7
  Gene Name: LIM domain 7
  Uniprot ID: Q8WWI1
  ENSP ID: ENSP00000342112
MKKIRICHIFTFYSWMSYDVLFQRTELGALEIWRQLICAHVCICVGWLYLRDRVCSKKDIILRTEQNSGRTILIKAVTEKNFETKDFRASLENGVLLCDLINKLKPGVIKKINRLSTPIAGLDNINVFLKACEQIGLKEAQLFHPGDLQDLSNRVTVKQEETDRRVKNVLITLYWLGRKAQSNPYYNGPHLNLKAFENLLGQALTKALEDSSFLKRSGRDSGYGDIWCPERGEFLAPPRHHKREDSFESLDSLGSRSLTSCSSDITLRGGREGFESDTDSEFTFKMQDYNKDDMSYRRISAVEPKTALPFNRFLPNKSRQPSYVPAPLRKKKPDKHEDNRRSWASPVYTEADGTFSRLFQKIYGENGSKSMSDVSAEDVQNLRQLRYEEMQKIKSQLKEQDQKWQDDLAKWKDRRKSYTSDLQKKKEEREEIEKQALEKSKRSSKTFKEMLQDRESQNQKSTVPSRRRMYSFDDVLEEGKRPPTMTVSEASYQSERVEEKGATYPSEIPKEDSTTFAKREDRVTTEIQLPSQSPVEEQSPASLSSLRSRSTQMESTRVSASLPRSYRKTDTVRLTSVVTPRPFGSQTRGISSLPRSYTMDDAWKYNGDVEDIKRTPNNVVSTPAPSPDASQLASSLSSQKEVAATEEDVTRLPSPTSPFSSLSQDQAATSKATLSSTSGLDLMSESGEGEISPQREVSRSQDQFSDMRISINQTPGKSLDFGFTIKWDIPGIFVASVEAGSPAEFSQLQVDDEIIAINNTKFSYNDSKEWEEAMAKAQETGHLVMDVRRYGKAGSPETKWIDATSGIYNSEKSSNLSVTTDFSESLQSSNIESKEINGIHDESNAFESKASESISLKNLKRRSQFFEQGSSDSVVPDLPVPTISAPSRWVWDQEEERKRQERWQKEQDRLLQEKYQREQEKLREEWQRAKQEAERENSKYLDEELMVLSSNSMSLTTREPSLATWEATWSEGSKSSDREGTRAGEEERRQPQEEVVHEDQGKKPQDQLVIERERKWEQQLQEEQEQKRLQAEAEEQKRPAEEQKRQAEIERETSVRIYQYRRPVDSYDIPKTEEASSGFLPGDRNKSRSTTELDDYSTNKNGNNKYLDQIGNMTSSQRRSKKEQVPSGAELERQQILQEMRKRTPLHNDNSWIRQRSASVNKEPVSLPGIMRRGESLDNLDSPRSNSWRQPPWLNQPTGFYASSSVQDFSRPPPQLVSTSNRAYMRNPSSSVPPPSAGSVKTSTTGVATTQSPTPRSHSPSASQSGSQLRNRSVSGKRICSYCNNILGKGAAMIIESLGLCYHLHCFKCVACECDLGGSSSGAEVRIRNHQLYCNDCYLRFKSGRPTAM

SEQ ID NO: 46691 - protein, 1668 aa, Homo sapiens
  Payload ID: 9450
  Gene Symbol: LMO7
  Gene Name: LIM domain 7
  ENSP ID: ENSP00000349571
MSYDVLFQRTELGALEIWRQLICAHVCICVGWLYLRDRVCSKKDIILRTEQNSGRTILIKAVTEKNFETKDFRASLENGVLLCDLINKLKPGVIKKINRLSTPIAGLDNINVFLKACEQIGLKEAQLFHPGDLQDLSNRVTVKQEETDRRVKNVLITLYWLGRKAQSNPYYNGPHLNLKAFENLLGQALTKALEDSSFLKRSGRDSGYGDIWCPERGEFLAPPRHHKREDSFESLDSLGSRSLTSCSSDITLRGGREGFESDTDSEFTFKMQDYNKDDMSYRRISAVEPKTALPFNRFLPNKSRQPSYVPAPLRKKKPDKHEDNRRSWASPVYTEADGTFSSNQRRIWGTNVENWPTVQGTSKSSCYLEEEKAKTRSIPNIVKDDLYVRKLSPVMPNPGNAFDQFLPKCWTPEDVNWKRIKRETYKPWYKEFQGFSQFLLLQALQTYSDDILSSETHTKIDPTSGPRLITRRKNLSYAPGYRRDDLEMAALDPDLENDDFFVRKTGAFHANPYVLRAFEDFRKFSEQDDSVERDIILQCREGELVLPDLEKDDMIVRRIPAQKKEVPLSGAPDRYHPVPFPEPWTLPPEIQAKFLCVLERTCPSKEKSNSCRILVPSYRQKKDDMLTRKIQSWKLGTTVPPISFTPGPCSEADLKRWEAIREASRLRHKKRLMVERLFQKIYGENGSKSMSDVSAEDVQNLRQLRYEEMQKIKSQLKEQDQKWQDDLAKWKDRRKSYTSDLQKKKEEREEIEKQALEKSKRSSKTFKEMLQDRESQNQKSTVPSRRRMYSFDDVLEEGKRPPTMTVSEASYQSERVEEKGATYPSEIPKEDSTTFAKREDRVTTEIQLPSQSPVEEQSPASLSSLRSRSTQMESTRVSASLPRSYRKTDTVRLTSVVTPRPFGSQTRGISSLPRSYTMDDAWKYNGDVEDIKRTPNNVVSTPAPSPDASQLASSLSSQKEVAATEEDVTRLPSPTSPFSSLSQDQAATSKATLSSTSGLDLMSESGEGEISPQREVSRSQDQFSDMRISINQTPGKSLDFGFTIKWDIPGIFVASVEAGSPAEFSQLQVDDEIIAINNTKFSYNDSKEWEEAMAKAQETGHLVMDVRRYGKAGSPETKWIDATSGIYNSEKSSNLSVTTDFSESLQSSNIESKEINGIHDESNAFESKASESISLKNLKRRSQFFEQGSSDSVVPDLPVPTISAPSRWVWDQEEERKRQERWQKEQDRLLQEKYQREQEKLREEWQRAKQEAERENSKYLDEELMVLSSNSMSLTTREPSLATWEATWSEGSKSSDREGTRAGEEERRQPQEEVVHEDQGKKPQDQLVIERERKWEQQLQEEQEQKRLQAEAEEQKRPAEEQKRQAEIERETSVRIYQYRRPVDSYDIPKTEEASSGFLPGDRNKSRSTTELDDYSTNKNGNNKYLDQIGNMTSSQRRSKKEQVPSGAELERQQILQEMRKRTPLHNDNSWIRQRSASVNKEPVSLPGIMRRGESLDNLDSPRSNSWRQPPWLNQPTGFYASSSVQDFSRPPPQLVSTSNRAYMRNPSSSVPPPSAGSVKTSTTGVATTQSPTPRSHSPSASQSGSQLRNRSVSGKRICSYCNNILGKGAAMIIESLGLCYHLHCFKCVACECDLGGSSSGAEVRIRNHQLYCNDCYLRFKSGRPTAM

SEQ ID NO: 46692 - protein, 1045 aa, Homo sapiens
  Payload ID: 9450
  Gene Symbol: LMO7
  Gene Name: LIM domain 7
  ENSP ID: ENSP00000366719
MEGLEEAEANCSVAFAEAQRWVEAVTEKNFETKDFRASLENGVLLCDLINKLKPGVIKKINRLSTPIAGLDNINVFLKACEQIGLKEAQLFHPGDLQDLSNRVTVKQEETDRRVKNVLITLYWLGRKAQSNPYYNGPHLNLKAFENLLGQALTKALEDSSFLKRSGRDSGYGDIWCPERGEFLAPPRHHKREDSFESLDSLGSRSLTSCSSDITLRGGREGFESDTDSEFTFKMQDYNKDDMSYRRISAVEPKTALPFNRFLPNKSRQPSYVPAPLRKKKPDKHEDNRRSWASPVYTEADGTFSRLFQKIYGENGSKSMSDVSAEDVQNLRQLRYEEMQKIKSQLKEQDQKWQDDLAKWKDRRKSYTSDLQKKKEEREEIEKQALEKSKRSSKTFKEMLQDRESQNQKSTVPSRRRMYSFDDVLEEGKRPPTMTVSEASYQSERVEEKGATYPSEIPKEDSTTFAKREDRVTTEIQLPSQSPVEEQSPASLSSLRSRSTQMESTRVSASLPRSYRKTDTVRLTSVVTPRPFGSQTRGISSLPRSYTMDDAWKYNGDVEDIKRTPNNVVSTPAPSPDASQLASSLSSQKEVAATEEDVTRLPSPTSPFSSLSQDQAATSKATLSSTSGLDLMSESGEGEISPQREVSRSQDQFSDMRISINQTPGKSLDFGFTIKWDIPGIFVASVEAGSPAEFSQLQVDDEIIAINNTKFSYNDSKEWEEAMAKAQETGHLVMDVRRYGKAGSPETKWIDATSGIYNSEKSSNLSVTTDFSESLQSSNIESKEINGIHDESNAFESKASESISLKNLKRRSQFFEQGSSDSVVPDLPVPTISAPSRWVWDQEEERKRQERWQKEQDRLLQEKYQREQEKLREEWQRAKQEAERENSKYLDEELMVLSSNSMSLTTREPSLATWEATWSEGSKSSDREGTRAGEEERRQPQEEVVHEDQGKKPQDQLVIERERKWEQQLQEEQEQKRLQAEAEEQKRPAEEQKRQAEIERETSVRIYQYRRPVDSYDIPKTEEASSGFLPGDRNKSRSTTELDDYS

SEQ ID NO: 46693 - protein, 1631 aa, Homo sapiens
  Payload ID: 9450
  Gene Symbol: LMO7
  Gene Name: LIM domain 7
  ENSP ID: ENSP00000366757
MEGLEEAEANCSVAFAEAQRWVEAVTEKNFETKDFRASLENGVLLCDLINKLKPGVIKKINRLSTPIAGLDNINVFLKACEQIGLKEAQLFHPGDLQDLSNRVTVKQEETDRRVKNVLITLYWLGRKAQSNPYYNGPHLNLKAFENLLGQALTKALEDSSFLKRSGRDSGYGDIWCPERGEFLAPPRHHKREDSFESLDSLGSRSLTSCSSDITLRGGREGFESDTDSEFTFKMQDYNKDDMSYRRISAVEPKTALPFNRFLPNKSRQPSYVPAPLRKKKPDKHEDNRRSWASPVYTEADGTFSSNQRRIWGTNVENWPTVQGTSKSSCYLEEEKAKTRSIPNIVKDDLYVRKLSPVMPNPGNAFDQFLPKCWTPEDVNWKRIKRETYKPWYKEFQGFSQFLLLQALQTYSDDILSSETHTKIDPTSGPRLITRRKNLSYAPGYRRDDLEMAALDPDLENDDFFVRKTGAFHANPYVLRAFEDFRKFSEQDDSVERDIILQCREGELVLPDLEKDDMIVRRIPAQKKEVPLSGAPDRYHPVPFPEPWTLPPEIQAKFLCVLERTCPSKEKSNSCRILVPSYRQKKDDMLTRKIQSWKLGTTVPPISFTPGPCSEADLKRWEAIREASRLRHKKRLMVERLFQKIYGENGSKSMSDVSAEDVQNLRQLRYEEMQKIKSQLKEQDQKWQDDLAKWKDRRKSYTSDLQKKKEEREEIEKQALEKSKRSSKTFKEMLQDRESQNQKSTVPSRRRMYSFDDVLEEGKRPPTMTVSEASYQSERVEEKGATYPSEIPKEDSTTFAKREDRVTTEIQLPSQSPVEEQSPASLSSLRSRSTQMESTRVSASLPRSYRKTDTVRLTSVVTPRPFGSQTRGISSLPRSYTMDDAWKYNGDVEDIKRTPNNVVSTPAPSPDASQLASSLSSQKEVAATEEDVTRLPSPTSPFSSLSQDQAATSKATLSSTSGLDLMSESGEGEISPQREVSRSQDQFSDMRISINQTPGKSLDFGFTIKWDIPGIFVASVEAGSPAEFSQLQVDDEIIAINNTKFSYNDSKEWEEAMAKAQETGHLVMDVRRYGKAGSPETKWIDATSGIYNSEKSSNLSVTTDFSESLQSSNIESKEINGIHDESNAFESKASESISLKNLKRRSQFFEQGSSDSVVPDLPVPTISAPSRWVWDQEEERKRQERWQKEQDRLLQEKYQREQEKLREEWQRAKQEAERENSKYLDEELMVLSSNSMSLTTREPSLATWEATWSEGSKSSDREGTRAGEEERRQPQEEVVHEDQGKKPQDQLVIERERKWEQQLQEEQEQKRLQAEAEEQKRPAEEQKRQAEIERETSVRIYQYRRPVDSYDIPKTEEASSGFLPGDRNKSRSTTELDDYSTNKNGNNKYLDQIGNMTSSQRRSKKEQVPSGAELERQQILQEMRKRTPLHNDNSWIRQRSASVNKEPVSLPGIMRRGESLDNLDSPRSNSWRQPPWLNQPTGFYASSSVQDFSRPPPQLVSTSNRAYMRNPSSSVPPPSAGSVKTSTTGVATTQSPTPRSHSPSASQSGSQLRNRSVSGKRICSYCNNILGKGAAMIIESLGLCYHLHCFKCVACECDLGGSSSGAEVRIRNHQLYCNDCYLRFKSGRPTAM

SEQ ID NO: 46694 - protein, 1055 aa, Homo sapiens
  Payload ID: 9450
  Gene Symbol: LMO7
  Gene Name: LIM domain 7
  ENSP ID: ENSP00000388955
  MOD_RES (1)..(1): Any amino acid
XFKMQDYNKDDMSYRRISAVEPKTALPFNRFLPNKSRQPSYVPAPLRKKKPDKHEDNRRSWASPVYTEADGTFSSQFLLLQALQTYSDDILSSETHTKIDPTSGPRLITRRKNLSYAPGYRRDDLEMAALDPDLENDDFFVRKTGAFHANPYVLRAFEDFRKFSEQDDSVERDIILQCREGELVLPDLEKDDMIVRRIPAQKKEVPLSGAPDRYHPVPFPEPWTLPPEIQAKFLCVLERTCPSKEKSNSCRILVPSYRQKKDDMLTRKIQSWKLGTTVPPISFTPGPCSEADLKRWEAIREASRLRHKKRLMVERLFQKIYGENGSKSMSDVSAEDVQNLRQLRYEEMQKIKSQLKEQDQKWQDDLAKWKDRRKSYTSDLQKKKEEREEIEKQALEKSKRSSKTFKEMLQDRESQNQKSTVPSRRRMYSFDDVLEEGKRPPTMTVSEASYQSERVEEKGATYPSEIPKEDSTTFAKREDRVTTEIQLPSQSPVEEQSPASLSSLRSRSTQMESTRVSASLPRSYRKTDTVRLTSVVTPRPFGSQTRGISSLPRSYTMDDAWKYNGDVEDIKRTPNNVVSTPAPSPDASQLASSLSSQKEVAATEEDVTRLPSPTSPFSSLSQDQAATSKATLSSTSGLDLMSESGEGEISPQREVSRSQDQFSDMRISINQTPGKSLDFGFTIKWDIPGIFVASVEAGSPAEFSQLQVDDEIIAINNTKFSYNDSKEWEEAMAKAQETGHLVMDVRRYGKAGSPETKWIDATSGIYNSEKSSNLSVTTDFSESLQSSNIESKEINGIHDESNAFESKASESISLKNLKRRSQFFEQGSSDSVVPDLPVPTISAPSRWVWDQEEERKRQERWQKEQDRLLQEKYQREQEKLREEWQRAKQEAERENSKYLDEELMVLSSNSMSLTTREPSLATWEATWSEGSKSSDREGTRAGEEERRQPQEEVVHEDQGKKPQDQLVIERERKWEQQLQEEQEQKRLQAEAEEQKRPAEEQKRQAEIERETSVRIYQYRRPVDSYDIPKTEEASSGFLPGDRNKSRSTTELDDYS

SEQ ID NO: 46695 - protein, 1275 aa, Homo sapiens
  Payload ID: 9450
  Gene Symbol: LMO7
  Gene Name: LIM domain 7
  ENSP ID: ENSP00000431129
MLWRTERLYKPYVFFFKYTYAWVLLLPLLLTDNINVFLKACEQIGLKEAQLFHPGDLQDLSNRVTVKQEETDRRVKNVLITLYWLGRKAQSNPYYNGPHLNLKAFENLLGQALTKALEDSSFLKRSGRDSGYGDIWCPERGEFLAPPRHHKREDSFESLDSLGSRSLTSCSSDITLRGGREGFESDTDSEFTFKMQDYNKDDMSYRRISAVEPKTALPFNRFLPNKSRQPSYVPAPLRKKKPDKHEDNRRSWASPVYTEADGTFSRSKSMSDVSAEDVQNLRQLRYEEMQKIKSQLKEQDQKWQDDLAKWKDRRKSYTSDLQKKKEEREEIEKQALEKSKRSSKTFKEMLQDRESQNQKSTVPSRRRMYSFDDVLEEGKRPPTMTVSEASYQSERVEEKGATYPSEIPKEDSTTFAKREDRVTTEIQLPSQSPVEEQSPASLSSLRSRSTQMESTRVSASLPRSYRKTDTVRLTSVVTPRPFGSQTRGISSLPRSYTMDDAWKYNGDVEDIKRTPNNVVSTPAPSPDASQLASSLSSQKEVAATEEDVTRLPSPTSPFSSLSQDQAATSKATLSSTSGLDLMSESGEGEISPQREVSRSQDQFSDMRISINQTPGKSLDFGFTIKWDIPGIFVASVEAGSPAEFSQLQVDDEIIAINNTKFSYNDSKEWEEAMAKAQETGHLVMDVRRYGKADWGKDQPSLPFIRHKTLNLTSMATKIIGSPETKWIDATSGIYNSEKSSNLSVTTDFSESLQSSNIESKEINGIHDESNAFESKASESISLKNLKRRSQFFEQGSSDSVVPDLPVPTISAPSRWVWDQEEERKRQERWQKEQDRLLQEKYQREQEKLREEWQRAKQEAERENSKYLDEELMVLSSNSMSLTTREPSLATWEATWSEGSKSSDREGTRAGEEERRQPQEEVVHEDQGKKPQDQLVIERERKWEQQLQEEQEQKRLQAEAEEQKRPAEEQKRQAEIERETSVRIYQYRRPVDSYDIPKTEEASSGFLPGDRNKSRSTTELDDYSTNKNGNNKYLDQIGNMTSSQRRSKKEQVPSGAELERQQILQEMRKRTPLHNDNSWIRQRSASVNKEPVSLPGIMRRGESLDNLDSPRSNSWRQPPWLNQPTGFYASSSVQDFSRPPPQLVSTSNRAYMRNPSSSVPPPSAGSVKTSTTGVATTQSPTPRSHSPSASQSGSQLRNRSVSGKRICSYCNNILGKGAAMIIESLGLCYHLHCFKCVACECDLGGSSSGAEVRIRNHQLYCNDCYLRFKSGRPTAM

SEQ ID NO: 46696 - protein, 121 aa, Homo sapiens
  Payload ID: 9450
  Gene Symbol: LMO7
  Gene Name: LIM domain 7
  ENSP ID: ENSP00000431271
MQDYNKDDMSYRRISAVEPKTALPFNRFLPNKSRQPSYVPAPLRKKKPDKHEDNRRSWASPVYTEADGTFSRLFQKIYGENGSKSMSDVSAEDVQNLRQLRYEEMQKIKSQLKEQDQKWQD

SEQ ID NO: 46697 - protein, 165 aa, Homo sapiens
  Payload ID: 9450
  Gene Symbol: LMO7
  Gene Name: LIM domain 7
  ENSP ID: ENSP00000431636
MQDYNKDDMSYRRISAVEPKTALPFNRFLPNKSRQPSYVPAPLRKKKPDKHEDNRRSWASPVYTEADGTFSRLFQKIYGENGSKSMSDVSAEDVQNLRQLRYEEMQKIKSQLKEQDQKWQDDLAKWKDRRKSYTSDLQKKKEEREEIEKQALEKSKRSSKTFKEM

SEQ ID NO: 46698 - protein, 191 aa, Homo sapiens
  Payload ID: 9450
  Gene Symbol: LMO7
  Gene Name: LIM domain 7
  ENSP ID: ENSP00000431896
MQDYNKDDMSYRRISAVEPKTALPFNRFLPNKSRQPSYVPAPLRKKKPDKHEDNRRSWASPVYTEADGTFSRSKSMSDVSAEDVQNLRQLRYEEMQKIKSQLKEQDQKWQDDLAKWKDRRKSYTSDLQKKKEEREEIEKQALEKSKRSSKTFKEMLQDRESQNQKSTVPSRRRMYSFDDVLEEGKRPPTMT

SEQ ID NO: 46699 - protein, 165 aa, Homo sapiens
  Payload ID: 9450
  Gene Symbol: LMO7
  Gene Name: LIM domain 7
  ENSP ID: ENSP00000432269
MQDYNKDDMSYRRISAVEPKTALPFNRFLPNKSRQPSYVPAPLRKKKPDKHEDNRRSWASPVYTEADGTFSSNQRRIWGTNVENWPTVQGTSKSSCYLEEEKAKTRSIPNIVKDDLYVRKLSPVMPNPGNAFDQFLPKCWTPEDVNWKRIKRETYKPWYKEFQGF

SEQ ID NO: 46700 - protein, 1385 aa, Homo sapiens
  Payload ID: 9450
  Gene Symbol: LMO7
  Gene Name: LIM domain 7
  ENSP ID: ENSP00000433352
MQDYNKDDMSYRRISAVEPKTALPFNRFLPNKSRQPSYVPAPLRKKKPDKHEDNRRSWASPVYTEADGTFSSNQRRIWGTNVENWPTVQGTSKSSCYLEEEKAKTRSIPNIVKDDLYVRKLSPVMPNPGNAFDQFLPKCWTPEDVNWKRIKRETYKPWYKEFQGFSQFLLLQALQTYSDDILSSETHTKIDPTSGPRLITRRKNLSYAPGYRRDDLEMAALDPDLENDDFFVRKTGAFHANPYVLRAFEDFRKFSEQDDSVERDIILQCREGELVLPDLEKDDMIVRRIPAQKKEVPLSGAPDRYHPVPFPEPWTLPPEIQAKFLCVLERTCPSKEKSNSCRILVPSYRQKKDDMLTRKIQSWKLGTTVPPISFTPGPCSEADLKRWEAIREASRLRHKKRLMVERLFQKIYGENGSKSMSDVSAEDVQNLRQLRYEEMQKIKSQLKEQDQKWQDDLAKWKDRRKSYTSDLQKKKEEREEIEKQALEKSKRSSKTFKEMLQDRESQNQKSTVPSRRRMYSFDDVLEEGKRPPTMTVSEASYQSERVEEKGATYPSEIPKEDSTTFAKREDRVTTEIQLPSQSPVEEQSPASLSSLRSRSTQMESTRVSASLPRSYRKTDTVRLTSVVTPRPFGSQTRGISSLPRSYTMDDAWKYNGDVEDIKRTPNNVVSTPAPSPDASQLASSLSSQKEVAATEEDVTRLPSPTSPFSSLSQDQAATSKATLSSTSGLDLMSESGEGEISPQREVSRSQDQFSDMRISINQTPGKSLDFGFTIKWDIPGIFVASVEAGSPAEFSQLQVDDEIIAINNTKFSYNDSKEWEEAMAKAQETGHLVMDVRRYGKAGSPETKWIDATSGIYNSEKSSNLSVTTDFSESLQSSNIESKEINGIHDESNAFESKASESISLKNLKRRSQFFEQGSSDSVVPDLPVPTISAPSRWVWDQEEERKRQERWQKEQDRLLQEKYQREQEKLREEWQRAKQEAERENSKYLDEELMVLSSNSMSLTTREPSLATWEATWSEGSKSSDREGTRAGEEERRQPQEEVVHEDQGKKPQDQLVIERERKWEQQLQEEQEQKRLQAEAEEQKRPAEEQKRQAEIERETSVRIYQYRRPVDSYDIPKTEEASSGFLPGDRNKSRSTTELDDYSTNKNGNNKYLDQIGNMTSSQRRSKKEQVPSGAELERQQILQEMRKRTPLHNDNSWIRQRSASVNKEPVSLPGIMRRGESLDNLDSPRSNSWRQPPWLNQPTGFYASSSVQDFSRPPPQLVSTSNRAYMRNPSSSVPPPSAGSVKTSTTGVATTQSPTPRSHSPSASQSGSQLRNSVLPVSVTSEALPQELKSGSETTNCTATTAISDSNLDGQPPCDVSLHTKALLQIEEEVVAAHVDL

SEQ ID NO: 46701 - protein, 305 aa, Homo sapiens
  Payload ID: 9450
  Gene Symbol: LMO7
  Gene Name: LIM domain 7
  ENSP ID: ENSP00000433591
  MOD_RES (1)..(1): Any amino acid
XDVTRLPSPTSPFSSLSQDQAATSKATLSSTSGLDLMSESGEGEISPQREVSRSQDQFSDMRISINQTPGKSLDFGFTIKWDIPGIFVASVEAGSPAEFSQLQVDDEIIAINNTKFSYNDSKEWEEAMAKAQETGHLVMDVRRYGKADWGKDQPSLPFIRHKTLNLTSMATKIIGSPETKWIDATSGIYNSEKSSNLSVTTDFSESLQSSNIESKEINGIHDESNAFESKGSSDSVVPDLPVPTISAPSRWVWDQEEERKRQERWQKEQDRLLQEKYQREQEKLREEWQRAKQEAERENSKYLDE

SEQ ID NO: 46702 - protein, 292 aa, Homo sapiens
  Payload ID: 9450
  Gene Symbol: LMO7
  Gene Name: LIM domain 7
  ENSP ID: ENSP00000434083
  MOD_RES (1)..(1): Any amino acid
XNDSKEWEEAMAKAQETGHLVMDVRRYGKAGSPETKWIDATSGIYNSEKSSNLSVTTDFSESLQSSNIESKEINGIHDESNAFESKGSSDSVVPDLPVPTISAPSRWVWDQEEERKRQERWQKEQDRLLQEKYQREQEKLREEWQRAKQEAERENSKYLDEELMVLSSNSMSLTTREPSLATWEATWSEGSKSSDREGTRAGEEERRQPQEEVVHEDQGKKPQDQLVIERERKWEQQLQEEQEQKRLQAEAEEQKRPAEEQKRQAEIERETSVRIYQYRRPVDSYDIPKTEE

SEQ ID NO: 46703 - protein, 141 aa, Homo sapiens
  Payload ID: 9450
  Gene Symbol: LMO7
  Gene Name: LIM domain 7
  ENSP ID: ENSP00000434201
MQDYNKDDMSYRRISAVEPKTALPFNRFLPNKSRQPSYVPAPLRKKKPDKHEDNRRSWASPVYTEADGTFSSQFLLLQALQTYSDDILSSETHTKIDPTSGPRLITRRKNLSYAPGYRRDDLEMAALDPDLENDDFFVRKT

SEQ ID NO: 46704 - protein, 12 aa, Homo sapiens
  Payload ID: 9450
  Gene Symbol: LMO7
  Gene Name: LIM domain 7
  ENSP ID: ENSP00000434943
MQDYNKDDMSYR

SEQ ID NO: 46705 - protein, 179 aa, Homo sapiens
  Payload ID: 9450
  Gene Symbol: LMO7
  Gene Name: LIM domain 7
  ENSP ID: ENSP00000435296
  MOD_RES (1)..(1): Any amino acid
XTPGKSLDFGFTIKWDIPGIFVASVEAGSPAEFSQLQVDDEIIAINNTKFSYNDSKEWEEAMAKAQETGHLVMDVRRYGKAGSPETKWIDATSGIYNSEKSSNLSVTTDFSESLQSSNIESKEINGIHDESNAFESKASESISLKNLKRRSQFFEQGSSGFSYSSWVYLCGSSDSVVPD

SEQ ID NO: 46706 - protein, 99 aa, Homo sapiens
  Payload ID: 9450
  Gene Symbol: LMO7
  Gene Name: LIM domain 7
  ENSP ID: ENSP00000475811
MIEVSERNYFIEMKTYIVYFSSLPMCCNTGSSDSVVPDLPVPTISAPSRWVWDQEEERKRQERWQKEQDRLLQEKYQREQEKLREEWQRAKQEAERENS

SEQ ID NO: 46707 - protein, 759 aa, Homo sapiens
  Payload ID: 9451
  Gene Symbol: LIMA1
  Gene Name: LIM domain and actin binding 1
  Uniprot ID: Q9UHB6
  ENSP ID: ENSP00000340184
MESSPFNRRQWTSLSLRVTAKELSLVNKNKSSAIVEIFSKYQKAAEETNMEKKRSNTENLSQHFRKGTLTVLKKKWENPGLGAESHTDSLRNSSTEIRHRADHPPAEVTSHAASGAKADQEEQIHPRSRLRSPPEALVQGRYPHIKDGEDLKDHSTESKKMENCLGESRHEVEKSEISENTDASGKIEKYNVPLNRLKMMFEKGEPTQTKILRAQSRSASGRKISENSYSLDDLEIGPGQLSSSTFDSEKNESRRNLELPRLSETSIKDRMAKYQAAVSKQSSSTNYTNELKASGGEIKIHKMEQKENVPPGPEVCITHQEGEKISANENSLAVRSTPAEDDSRDSQVKSEVQQPVHPKPLSPDSRASSLSESSPPKAMKKFQAPARETCVECQKTVYPMERLLANQQVFHISCFRCSYCNNKLSLGTYASLHGRIYCKPHFNQLFKSKGNYDEGFGHRPHKDLWASKNENEEILERPAQLANARETPHSPGVEDAPIAKVGVLAASMEAKASSQQEKEDKPAETKKLRIAWPPPTELGSSGSALEEGIKMSKPKWPPEDEISKPEVPEDVDLDLKKLRRSSSLKERSRPFTVAASFQSTSVKSPKTVSPPIRKGWSMSEQSEESVGGRVAERKQVENAKASKKNGNVGKTTWQNKESKGETGKRSKEGHSLEMENENLVENGADSDEDDNSFLKQQSPQEPKSLNWSSFVDNTFAEEFTTQNQKSQDVELWEGEVVKELSVEEQIKRNRYYDEDEDEE

SEQ ID NO: 46708 - protein, 760 aa, Homo sapiens
  Payload ID: 9451
  Gene Symbol: LIMA1
  Gene Name: LIM domain and actin binding 1
  Uniprot ID: Q9UHB6
  ENSP ID: ENSP00000378400
MESSPFNRRQWTSLSLRVTAKELSLVNKNKSSAIVEIFSKYQKAAEETNMEKKRSNTENLSQHFRKGTLTVLKKKWENPGLGAESHTDSLRNSSTEIRHRADHPPAEVTSHAASGAKADQEEQIHPRSRLRSPPEALVQGRYPHIKDGEDLKDHSTESKKMENCLGESRHEVEKSEISENTDASGKIEKYNVPLNRLKMMFEKGEPTQTKILRAQSRSASGRKISENSYSLDDLEIGPGQLSSSTFDSEKNESRRNLELPRLSETSIKDRMAKYQAAVSKQSSSTNYTNELKASGGEIKIHKMEQKENVPPGPEVCITHQEGEKISANENSLAVRSTPAEDDSPGDSQVKSEVQQPVHPKPLSPDSRASSLSESSPPKAMKKFQAPARETCVECQKTVYPMERLLANQQVFHISCFRCSYCNNKLSLGTYASLHGRIYCKPHFNQLFKSKGNYDEGFGHRPHKDLWASKNENEEILERPAQLANARETPHSPGVEDAPIAKVGVLAASMEAKASSQQEKEDKPAETKKLRIAWPPPTELGSSGSALEEGIKMSKPKWPPEDEISKPEVPEDVDLDLKKLRRSSSLKERSRPFTVAASFQSTSVKSPKTVSPPIRKGWSMSEQSEESVGGRVAERKQVENAKASKKNGNVGKTTWQNKESKGETGKRSKEGHSLEMENENLVENGADSDEDDNSFLKQQSPQEPKSLNWSSFVDNTFAEEFTTQNQKSQDVELWEGEVVKELSVEEQIKRNRYYDEDEDEE

SEQ ID NO: 46709 - protein, 130 aa, Homo sapiens
  Payload ID: 9451
  Gene Symbol: LIMA1
  Gene Name: LIM domain and actin binding 1
  ENSP ID: ENSP00000447975
MESSPFNRRQWTSLSLRVTAKELSLVNKNKSSAIVEIFSKYQKAAEETNMEKKRSNTENLSQHFRKGTLTVLKKKWENPGLGAESHTDSLRNSSTEIRHRADHPPAEVTSHAASGAKADQEEQIHPRSRL

SEQ ID NO: 46710 - protein, 388 aa, Homo sapiens
  Payload ID: 9451
  Gene Symbol: LIMA1
  Gene Name: LIM domain and actin binding 1
  ENSP ID: ENSP00000448411
MESSPFNRRQWTSLSLRVTAKELSLVNKNKSSAIVEIFSKYQKAAEETNMEKKRSNTENLSQHFRKGTLTVLKKKWENPGLGAESHTDSLRNSSTEIRHRADHPPAEVTSHAASGAKADQEEQIHPRSRLRSPPEALVQGRYPHIKDGEDLKDHSTESKKMENCLGESRHEVEKSEISENTDASGKIEKYNVPLNRLKMMFEKGEPTQTKILRAQSRSASGRKISENSYSLDDLEIGPGQLSSSTFDSEKNESRRNLELPRLSETSIKDRMAKYQAAVSKQSSSTNYTNELKASGGEIKIHKMEQKENVPPGPEVCITHQEGEKISANENSLAVRSTPAEDDSRDSQVKSEVQQPVHPKPLSPDSRASSLSESSPPKAMKLLPPAPGT

SEQ ID NO: 46711 - protein, 456 aa, Homo sapiens
  Payload ID: 9451
  Gene Symbol: LIMA1
  Gene Name: LIM domain and actin binding 1
  ENSP ID: ENSP00000448463
MEQKENVPPGPEVCITHQEGEKISANENSLAVRSTPAEDDSRDSQVKSEVQQPVHPKPLSPDSRASSLSESSPPKAMKFQAPARETCVECQKTVYPMERLLANQQVFHISCFRCSYCNNKLSLGTYASLHGRIYCKPHFNQLFKSKGNYDEGFGHRPHKDLWASKNENEEILERPAQLANARETPHSPGVEDAPIAKVGVLAASMEAKASSQQEKEDKPAETKKLRIAWPPPTELGSSGSALEEGIKMSKPKWPPEDEISKPEVPEDVDLDLKKLRRSSSLKERSRPFTVAASFQSTSVKSPKTVSPPIRKGWSMSEQSEESVGGRVAERKQVENAKASKKNGNVGKTTWQNKESKGETGKRSKEGHSLEMENENLVENGADSDEDDNSFLKQQSPQEPKSLNWSSFVDNTFAEEFTTQNQKSQDVELWEGEVVKELSVEEQIKRNRYYDEDEDEE

SEQ ID NO: 46712 - protein, 457 aa, Homo sapiens
  Payload ID: 9451
  Gene Symbol: LIMA1
  Gene Name: LIM domain and actin binding 1
  Uniprot ID: Q9UHB6
  ENSP ID: ENSP00000448706
MEQKENVPPGPEVCITHQEGEKISANENSLAVRSTPAEDDSRDSQVKSEVQQPVHPKPLSPDSRASSLSESSPPKAMKKFQAPARETCVECQKTVYPMERLLANQQVFHISCFRCSYCNNKLSLGTYASLHGRIYCKPHFNQLFKSKGNYDEGFGHRPHKDLWASKNENEEILERPAQLANARETPHSPGVEDAPIAKVGVLAASMEAKASSQQEKEDKPAETKKLRIAWPPPTELGSSGSALEEGIKMSKPKWPPEDEISKPEVPEDVDLDLKKLRRSSSLKERSRPFTVAASFQSTSVKSPKTVSPPIRKGWSMSEQSEESVGGRVAERKQVENAKASKKNGNVGKTTWQNKESKGETGKRSKEGHSLEMENENLVENGADSDEDDNSFLKQQSPQEPKSLNWSSFVDNTFAEEFTTQNQKSQDVELWEGEVVKELSVEEQIKRNRYYDEDEDEE

SEQ ID NO: 46713 - protein, 600 aa, Homo sapiens
  Payload ID: 9451
  Gene Symbol: LIMA1
  Gene Name: LIM domain and actin binding 1
  Uniprot ID: Q9UHB6
  ENSP ID: ENSP00000448779
MENCLGESRHEVEKSEISENTDASGKIEKYNVPLNRLKMMFEKGEPTQTKILRAQSRSASGRKISENSYSLDDLEIGPGQLSSSTFDSEKNESRRNLELPRLSETSIKDRMAKYQAAVSKQSSSTNYTNELKASGGEIKIHKMEQKENVPPGPEVCITHQEGEKISANENSLAVRSTPAEDDSPGDSQVKSEVQQPVHPKPLSPDSRASSLSESSPPKAMKKFQAPARETCVECQKTVYPMERLLANQQVFHISCFRCSYCNNKLSLGTYASLHGRIYCKPHFNQLFKSKGNYDEGFGHRPHKDLWASKNENEEILERPAQLANARETPHSPGVEDAPIAKVGVLAASMEAKASSQQEKEDKPAETKKLRIAWPPPTELGSSGSALEEGIKMSKPKWPPEDEISKPEVPEDVDLDLKKLRRSSSLKERSRPFTVAASFQSTSVKSPKTVSPPIRKGWSMSEQSEESVGGRVAERKQVENAKASKKNGNVGKTTWQNKESKGETGKRSKEGHSLEMENENLVENGADSDEDDNSFLKQQSPQEPKSLNWSSFVDNTFAEEFTTQNQKSQDVELWEGEVVKELSVEEQIKRNRYYDEDEDEE

SEQ ID NO: 46714 - protein, 111 aa, Homo sapiens
  Payload ID: 9451
  Gene Symbol: LIMA1
  Gene Name: LIM domain and actin binding 1
  ENSP ID: ENSP00000449890
MESSPFNRRQWTSLSLRVTAKELSLVNKNKSSAIVEIFSKYQKAAEETNMEKKRSNTENLSQHFRKGTLTVLKKKWENPGLGAESHTDSLRNSSTEIRHRADHPPAEVTSH

SEQ ID NO: 46715 - protein, 598 aa, Homo sapiens
  Payload ID: 9451
  Gene Symbol: LIMA1
  Gene Name: LIM domain and actin binding 1
  ENSP ID: ENSP00000450087
MENCLGESRHEVEKSEISENTDASGKIEKYNVPLNRLKMMFEKGEPTQTKILRAQSRSASGRKISENSYSLDDLEIGPGQLSSSTFDSEKNESRRNLELPRLSETSIKDRMAKYQAAVSKQSSSTNYTNELKASGGEIKIHKMEQKENVPPGPEVCITHQEGEKISANENSLAVRSTPAEDDSRDSQVKSEVQQPVHPKPLSPDSRASSLSESSPPKAMKFQAPARETCVECQKTVYPMERLLANQQVFHISCFRCSYCNNKLSLGTYASLHGRIYCKPHFNQLFKSKGNYDEGFGHRPHKDLWASKNENEEILERPAQLANARETPHSPGVEDAPIAKVGVLAASMEAKASSQQEKEDKPAETKKLRIAWPPPTELGSSGSALEEGIKMSKPKWPPEDEISKPEVPEDVDLDLKKLRRSSSLKERSRPFTVAASFQSTSVKSPKTVSPPIRKGWSMSEQSEESVGGRVAERKQVENAKASKKNGNVGKTTWQNKESKGETGKRSKEGHSLEMENENLVENGADSDEDDNSFLKQQSPQEPKSLNWSSFVDNTFAEEFTTQNQKSQDVELWEGEVVKELSVEEQIKRNRYYDEDEDEE

SEQ ID NO: 46716 - protein, 599 aa, Homo sapiens
  Payload ID: 9451
  Gene Symbol: LIMA1
  Gene Name: LIM domain and actin binding 1
  Uniprot ID: Q9UHB6
  ENSP ID: ENSP00000450266
MENCLGESRHEVEKSEISENTDASGKIEKYNVPLNRLKMMFEKGEPTQTKILRAQSRSASGRKISENSYSLDDLEIGPGQLSSSTFDSEKNESRRNLELPRLSETSIKDRMAKYQAAVSKQSSSTNYTNELKASGGEIKIHKMEQKENVPPGPEVCITHQEGEKISANENSLAVRSTPAEDDSRDSQVKSEVQQPVHPKPLSPDSRASSLSESSPPKAMKKFQAPARETCVECQKTVYPMERLLANQQVFHISCFRCSYCNNKLSLGTYASLHGRIYCKPHFNQLFKSKGNYDEGFGHRPHKDLWASKNENEEILERPAQLANARETPHSPGVEDAPIAKVGVLAASMEAKASSQQEKEDKPAETKKLRIAWPPPTELGSSGSALEEGIKMSKPKWPPEDEISKPEVPEDVDLDLKKLRRSSSLKERSRPFTVAASFQSTSVKSPKTVSPPIRKGWSMSEQSEESVGGRVAERKQVENAKASKKNGNVGKTTWQNKESKGETGKRSKEGHSLEMENENLVENGADSDEDDNSFLKQQSPQEPKSLNWSSFVDNTFAEEFTTQNQKSQDVELWEGEVVKELSVEEQIKRNRYYDEDEDEE

SEQ ID NO: 46717 - protein, 375 aa, Homo sapiens
  Payload ID: 9452
  Gene Symbol: LDB1
  Gene Name: LIM domain binding 1
  Uniprot ID: Q86U70
  ENSP ID: ENSP00000354616
MLDRDVGPTPMYPPTYLEPGIGRHTPYGNQTDYRIFELNKRLQNWTEECDNLWWDAFTTEFFEDDAMLTITFCLEDGPKRYTIGRTLIPRYFRSIFEGGATELYYVLKHPKEAFHSNFVSLDCDQGSMVTQHGKPMFTQVCVEGRLYLEFMFDDMMRIKTWHFSIRQHRELIPRSILAMHAQDPQMLDQLSKNITRCGLSNSTLNYLRLCVILEPMQELMSRHKTYSLSPRDCLKTCLFQKWQRMVAPPAEPTRQQPSKRRKRKMSGGSTMSSGGGNTNNSNSKKKSPASTFALSSQVPDVMVVGEPTLMGGEFGDEDERLITRLENTQFDAANGIDDEDSFNNSPALGANSPWNSKPPSSQESKSENPTSQASQ

SEQ ID NO: 46718 - protein, 411 aa, Homo sapiens
  Payload ID: 9452
  Gene Symbol: LDB1
  Gene Name: LIM domain binding 1
  Uniprot ID: Q86U70
  ENSP ID: ENSP00000392466
MSVGCACPGCSSKSFKLYSPKEPPNGNAFPPFHPGTMLDRDVGPTPMYPPTYLEPGIGRHTPYGNQTDYRIFELNKRLQNWTEECDNLWWDAFTTEFFEDDAMLTITFCLEDGPKRYTIGRTLIPRYFRSIFEGGATELYYVLKHPKEAFHSNFVSLDCDQGSMVTQHGKPMFTQVCVEGRLYLEFMFDDMMRIKTWHFSIRQHRELIPRSILAMHAQDPQMLDQLSKNITRCGLSNSTLNYLRLCVILEPMQELMSRHKTYSLSPRDCLKTCLFQKWQRMVAPPAEPTRQQPSKRRKRKMSGGSTMSSGGGNTNNSNSKKKSPASTFALSSQVPDVMVVGEPTLMGGEFGDEDERLITRLENTQFDAANGIDDEDSFNNSPALGANSPWNSKPPSSQESKSENPTSQASQ

SEQ ID NO: 46719 - protein, 373 aa, Homo sapiens
  Payload ID: 9453
  Gene Symbol: LDB2
  Gene Name: LIM domain binding 2
  Uniprot ID: O43679
  ENSP ID: ENSP00000306772
MSSTPHDPFYSSPFGPFYRRHTPYMVQPEYRIYEMNKRLQSRTEDSDNLWWDAFATEFFEDDATLTLSFCLEDGPKRYTIGRTLIPRYFSTVFEGGVTDLYYILKHSKESYHNSSITVDCDQCTMVTQHGKPMFTKVCTEGRLILEFTFDDLMRIKTWHFTIRQYRELVPRSILAMHAQDPQVLDQLSKNITRMGLTNFTLNYLRLCVILEPMQELMSRHKTYNLSPRDCLKTCLFQKWQRMVAPPAEPTRQPTTKRRKRKNSTSSTSNSSAGNNANSTGSKKKTTAANLSLSSQVPDVMVVGEPTLMGGEFGDEDERLITRLENTQYDAANGMDDEEDFNNSPALGNNSPWNSKPPATQETKSENPPPQASQ

SEQ ID NO: 46720 - protein, 331 aa, Homo sapiens
  Payload ID: 9453
  Gene Symbol: LDB2
  Gene Name: LIM domain binding 2
  Uniprot ID: O43679
  ENSP ID: ENSP00000392089
MSSTPHDPFYSSPFGPFYRRHTPYMVQPEYRIYEMNKRLQSRTEDSDNLWWDAFATEFFEDDATLTLSFCLEDGPKRYTIGRTLIPRYFSTVFEGGVTDLYYILKHSKESYHNSSITVDCDQCTMVTQHGKPMFTKVCTEGRLILEFTFDDLMRIKTWHFTIRQYRELVPRSILAMHAQDPQVLDQLSKNITRMGLTNFTLNYLRLCVILEPMQELMSRHKTYNLSPRDCLKTCLFQKWQRMVAPPAEPTRQPTTKRRKRKNSTSSTSNSSAGNNANSTGSKKKTTAANLSLSSQVPGLGAIPNCSLNPGRDGDLCHSTAVTPSGQFKEKH

SEQ ID NO: 46721 - protein, 164 aa, Homo sapiens
  Payload ID: 9453
  Gene Symbol: LDB2
  Gene Name: LIM domain binding 2
  ENSP ID: ENSP00000421767
MVQPEYRIYEMNKRLQSRTEDSDNLWWDAFATEFFEDDATLTLSFCLEDGPKRYTIGRTLIPRYFSTVFEGGVTDLYYILKHSKESYHNSSITVDCDQCTMVTQHGKPMFTKVCTEGRLILEFTFDDLMRIKTWHFTIRQYRELVPRSILAMHAQDPQVLDQLS

SEQ ID NO: 46722 - protein, 371 aa, Homo sapiens
  Payload ID: 9453
  Gene Symbol: LDB2
  Gene Name: LIM domain binding 2
  ENSP ID: ENSP00000422552
MSSTPHDPFYSSPFGPFYRRHTPYMVQPEYRIYEMNKRLQSRTEDSDNLWWDAFATEFFEDDATLTLSFCLEDGPKRYTIGRTLIPRYFSTVFEGGVTDLYYILKHSKESYHNSSITVDCDQCTMVTQHGKPMFTKVCTEGRLILEFTFDDLMRIKTWHFTIRQYRELVPRSILAMHAQDPQVLDQLSKNITRMGLTNFTLNYLRLCVILEPMQELMSRHKTYNLSPRDCLKTCLFQKWQRMVAPPAEPTRQPTTKRRKRKNSTSSTSNSSAGNNANSTGSKKKTTAANLSLSSQDVMVVGEPTLMGGEFGDEDERLITRLENTQYDAANGMDDEEDFNNSPALGNNSPWNSKPPATQETKSENPPPQASQ

SEQ ID NO: 46723 - protein, 313 aa, Homo sapiens
  Payload ID: 9453
  Gene Symbol: LDB2
  Gene Name: LIM domain binding 2
  ENSP ID: ENSP00000423963
MSSTPHDPFYSSPFGPFYRRHTPYMVQPEYRIYEMNKRLQSRTEDSDNLWWDAFATEFFEDDATLTLSFCLEDGPKRYTIGRTLIPRYFSTVFEGGVTDLYYILKHSKESYHNSSITVDCDQCTMVTQHGKPMFTKVCTEGRLILEFTFDDLMRIKTWHFTIRQYRELVPRSILAMHAQDPQVLDQLSKNITRMGLTNFTLNYLRLCVILEPMQELMSRHKTYNLSPRDCLKTCLFQKWQRMVAPPAEPTRQPTTKRRKRKNSTSSTSNSSAGNNANSTGSKKKTTAANLSLSSQVPIASIARSPVSGCALRT

SEQ ID NO: 46724 - protein, 106 aa, Homo sapiens
  Payload ID: 9453
  Gene Symbol: LDB2
  Gene Name: LIM domain binding 2
  ENSP ID: ENSP00000424676
MSSTPHDPFYSSPFGPFYRRHTPYMVQPEYRIYEMNKRLQSRTEDSDNLWWDAFATEFFEDDATLTLSFCLEDGPKRYRTKNLRPIGEKMNINGKCYRQDPHPPLL

SEQ ID NO: 46725 - protein, 110 aa, Homo sapiens
  Payload ID: 9453
  Gene Symbol: LDB2
  Gene Name: LIM domain binding 2
  ENSP ID: ENSP00000424770
MSSTPHDPFYSSPFGPFYRRHTPYMVQPEYRIYEMNKRLQSRTEDSDNLWWDAFATEFFEDDATLTLSFCLEDGPKRYIVHSAADARGNCNQLGDSEPDACDGLLQFPIM

SEQ ID NO: 46726 - protein, 294 aa, Homo sapiens
  Payload ID: 9453
  Gene Symbol: LDB2
  Gene Name: LIM domain binding 2
  ENSP ID: ENSP00000425754
  MOD_RES (1)..(1): Any amino acid
XIGRTLIPRYFSTVFEGGVTDLYYILKHSKESYHNSSITVDCDQCTMVTQHGKPMFTKVCTEGRLILEFTFDDLMRIKTWHFTIRQYRELVPRSILAMHAQDPQVLDQLSKNITRMGLTNFTLNYLRLCVILEPMQELMSRHKTYNLSPRDCLKTCLFQKWQRMVAPPEPTRQPTTKRRKRKNSTSSTSNSSAGNNANSTGSKKKTTAANLSLSSQVPDVMVVGEPTLMGGEFGDEDERLITRLENTQYDAANGMDDEEDFNNSPALGNNSPWNSKPPATQETKSENPPPQASQ

SEQ ID NO: 46727 - protein, 617 aa, Homo sapiens
  Payload ID: 9454
  Gene Symbol: LDB3
  Gene Name: LIM domain binding 3
  Uniprot ID: O75112
  ENSP ID: ENSP00000263066
MSYSVTLTGPGPWGFRLQGGKDFNMPLTISRITPGSKAAQSQLSQGDLVVAIDGVNTDTMTHLEAQNKIKSASYNLSLTLQKSKRPIPISTTAPPVQTPLPVIPHQKVVVNSPANADYQERFNPSALKDSALSTHKPIEVKGLGGKATIIHAQYNTPISMYSQDAIMDAIAGQAQAQGSDFSGSLPIKDLAVDSASPVYQAVIKSQNKPEDEADEWARRSSNLQSRSFRILAQMTGTEFMQDPDEEALRRSRPQASSYSPAVAASSAPATHTSYSEGPAAPAPKPRVVTTASIRPSVYQPVPASTYSPSPGANYSPTPYTPSPAPAYTPSPAPAYTPSPVPTYTPSPAPAYTPSPAPNYNPAPSVAYSGGPAEPASRPPWVTDDSFSQKFAPGKSTTSISKQTLPRGGPAYTPAGPQVPPLARGTVQRAERFPASSRTPLCGHCNNVIRGPFLVAMGRSWHPEEFTCAYCKTSLADVCFVEEQNNVYCERCYEQFFAPLCAKCNTKIMGEVMHALRQTWHTTCFVCAACKKPFGNSLFHMEDGEPYCEKDYINLFSTKCHGCDFPVEAGDKFIEALGHTWHDTCFICAVCHVNLEGQPFYSKKDRPLCKKHAHTINL

SEQ ID NO: 46728 - protein, 727 aa, Homo sapiens
  Payload ID: 9454
  Gene Symbol: LDB3
  Gene Name: LIM domain binding 3
  Uniprot ID: O75112
  ENSP ID: ENSP00000355296
MSYSVTLTGPGPWGFRLQGGKDFNMPLTISRITPGSKAAQSQLSQGDLVVAIDGVNTDTMTHLEAQNKIKSASYNLSLTLQKSKRPIPISTTAPPVQTPLPVIPHQKDPALDTNGSLVAPSPSPEARASPGTPGTPELRPTFSPAFSRPSAFSSLAEASDPGPPRASLRAKTSPEGARDLLGPKALPGSSQPRQYNNPIGLYSAETLREMAQMYQMSLRGKASGVGLPGGSLPIKDLAVDSASPVYQAVIKSQNKPEDEADEWARRSSNLQSRSFRILAQMTGTEFMQDPDEEALRRSSTPIEHAPVCTSQATTPLLPASAQPPAAASPSAASPPLATAAAHTAIASASTTAPASSPADSPRPQASSYSPAVAASSAPATHTSYSEGPAAPAPKPRVVTTASIRPSVYQPVPASTYSPSPGANYSPTPYTPSPAPAYTPSPAPAYTPSPVPTYTPSPAPAYTPSPAPNYNPAPSVAYSGGPAEPASRPPWVTDDSFSQKFAPGKSTTSISKQTLPRGGPAYTPAGPQVPPLARGTVQRAERFPASSRTPLCGHCNNVIRGPFLVAMGRSWHPEEFTCAYCKTSLADVCFVEEQNNVYCERCYEQFFAPLCAKCNTKIMGEVMHALRQTWHTTCFVCAACKKPFGNSLFHMEDGEPYCEKDYINLFSTKCHGCDFPVEAGDKFIEALGHTWHDTCFICAVCHVNLEGQPFYSKKDRPLCKKHAHTINL

SEQ ID NO: 46729 - protein, 398 aa, Homo sapiens
  Payload ID: 9454
  Gene Symbol: LDB3
  Gene Name: LIM domain binding 3
  Uniprot ID: O75112
  ENSP ID: ENSP00000361126
MSYSVTLTGPGPWGFRLQGGKDFNMPLTISRITPGSKAAQSQLSQGDLVVAIDGVNTDTMTHLEAQNKIKSASYNLSLTLQKSKRPIPISTTAPPVQTPLPVIPHQKDPALDTNGSLVAPSPSPEARASPGTPGTPELRPTFSPAFSRPSAFSSLAEASDPGPPRASLRAKTSPEGARDLLGPKALPGSSQPRQYNNPIGLYSAETLREMAQMYQMSLRGKASGVGLPGGADYQERFNPSALKDSALSTHKPIEVKGLGGKATIIHAQYNTPISMYSQDAIMDAIAGQAQAQGSDFSGSLPIKDLAVDSASPVYQAVIKSQNKPEDEADEWARRSSNLQSRSFRILAQMTGTEFMQDPDEEALRRSRERFETERNSPRFAKLRNWHHGLSAQILNVKS

SEQ ID NO: 46730 - protein, 283 aa, Homo sapiens
  Payload ID: 9454
  Gene Symbol: LDB3
  Gene Name: LIM domain binding 3
  Uniprot ID: O75112
  ENSP ID: ENSP00000361136
MSYSVTLTGPGPWGFRLQGGKDFNMPLTISRITPGSKAAQSQLSQGDLVVAIDGVNTDTMTHLEAQNKIKSASYNLSLTLQKSKRPIPISTTAPPVQTPLPVIPHQKVVVNSPANADYQERFNPSALKDSALSTHKPIEVKGLGGKATIIHAQYNTPISMYSQDAIMDAIAGQAQAQGSDFSGSLPIKDLAVDSASPVYQAVIKSQNKPEDEADEWARRSSNLQSRSFRILAQMTGTEFMQDPDEEALRRSRERFETERNSPRFAKLRNWHHGLSAQILNVKS

SEQ ID NO: 46731 - protein, 732 aa, Homo sapiens
  Payload ID: 9454
  Gene Symbol: LDB3
  Gene Name: LIM domain binding 3
  Uniprot ID: O75112
  ENSP ID: ENSP00000401437
MSYSVTLTGPGPWGFRLQGGKDFNMPLTISRITPGSKAAQSQLSQGDLVVAIDGVNTDTMTHLEAQNKIKSASYNLSLTLQKSKRPIPISTTAPPVQTPLPVIPHQKDPALDTNGSLVAPSPSPEARASPGTPGTPELRPTFSPAFSRPSAFSSLAEASDPGPPRASLRAKTSPEGARDLLGPKALPGSSQPRQYNNPIGLYSAETLREMAQMYQMSLRGKASGVGLPGGADYQERFNPSALKDSALSTHKPIEVKGLGGKATIIHAQYNTPISMYSQDAIMDAIAGQAQAQGSDFSGSLPIKDLAVDSASPVYQAVIKSQNKPEDEADEWARRSSNLQSRSFRILAQMTGTEFMQDPDEEALRRSRPQASSYSPAVAASSAPATHTSYSEGPAAPAPKPRVVTTASIRPSVYQPVPASTYSPSPGANYSPTPYTPSPAPAYTPSPAPAYTPSPVPTYTPSPAPAYTPSPAPNYNPAPSVAYSGGPAEPASRPPWVTDDSFSQKFAPGKSTTSISKQTLPRGGPAYTPAGPQVPPLARGTVQRAERFPASSRTPLCGHCNNVIRGPFLVAMGRSWHPEEFTCAYCKTSLADVCFVEEQNNVYCERCYEQFFAPLCAKCNTKIMGEVMHALRQTWHTTCFVCAACKKPFGNSLFHMEDGEPYCEKDYINLFSTKCHGCDFPVEAGDKFIEALGHTWHDTCFICAVCHVNLEGQPFYSKKDRPLCKKHAHTINL

SEQ ID NO: 46732 - protein, 231 aa, Homo sapiens
  Payload ID: 9454
  Gene Symbol: LDB3
  Gene Name: LIM domain binding 3
  ENSP ID: ENSP00000438866
MSYSVTLTGPGPWGFRLQGGKDFNMPLTISRITPGSKAAQSQLSQGDLVVAIDGVNTDTMTHLEAQNKIKSASYNLSLTLQKSKRPIPISTTAPPVQTPLPVIPHQKDPALDTNGSLVAPSPSPEARASPGTPGTPELRPTFSPAFSRPSAFSSLAEASDPGPPRASLRAKTSPEGARDLLGPKALPGSSQPRQYNNPIGLYSAETLREMAQMYQMSLRGKASGVGLPGGW

SEQ ID NO: 46733 - protein, 330 aa, Homo sapiens
  Payload ID: 9454
  Gene Symbol: LDB3
  Gene Name: LIM domain binding 3
  Uniprot ID: O75112
  ENSP ID: ENSP00000485389
MSYSVTLTGPGPWGFRLQGGKDFNMPLTISRITPGSKAAQSQLSQGDLVVAIDGVNTDTMTHLEAQNKIKSASYNLSLTLQKSKRPIPISTTAPPVQTPLPVIPHQKDPALDTNGSLVAPSPSPEARASPGTPGTPELRPTFSPAFSRPSAFSSLAEASDPGPPRASLRAKTSPEGARDLLGPKALPGSSQPRQYNNPIGLYSAETLREMAQMYQMSLRGKASGVGLPGGSLPIKDLAVDSASPVYQAVIKSQNKPEDEADEWARRSSNLQSRSFRILAQMTGTEFMQDPDEEALRRSRERFETERNSPRFAKLRNWHHGLSAQILNVKS

SEQ ID NO: 46734 - protein, 732 aa, Homo sapiens; identical to SEQ ID NO: 46731
  Payload ID: 9454
  Gene Symbol: LDB3
  Gene Name: LIM domain binding 3
  Uniprot ID: O75112
  ENSP ID: ENSP00000485500

SEQ ID NO: 46735 - protein, 81 aa, Homo sapiens
  Payload ID: 9454
  Gene Symbol: LDB3
  Gene Name: LIM domain binding 3
  ENSP ID: ENSP00000485538
VMHALRQTWHTTCFVCAACKKPFGNSLFHMEDGEPYCEKDYINLFSTKCHGCDFPVEAGDKFIEALGHTWHDTCFICAVCL

SEQ ID NO: 46736 - protein, 127 aa, Homo sapiens
  Payload ID: 9455
  Gene Symbol: LIMD2
  Gene Name: LIM domain containing 2
  Uniprot ID: Q9BT23
  ENSP ID: ENSP00000259006
MFQAAGAAQATPSHDAKGGGSSTVQRSKSFSLRAQVKETCAACQKTVYPMERLVADKLIFHNSCFCCKHCHTKLSLGSYAALHGEFYCKPHFQQLFKSKGNYDEGFGRKQHKELWAHKEVDPGTKTA

SEQ ID NO: 46737 - protein, 87 aa, Homo sapiens
  Payload ID: 9455
  Gene Symbol: LIMD2
  Gene Name: LIM domain containing 2
  ENSP ID: ENSP00000462125
MFQAAGAAQATPSHDAKGGGSSTVQRSKHCHTKLSLGSYAALHGEFYCKPHFQQLFKSKGNYDEGFGRKQHKELWAHKEVDPGTKTA

SEQ ID NO: 46738 - protein, 127 aa, Homo sapiens; identical to SEQ ID NO: 46736
  Payload ID: 9455
  Gene Symbol: LIMD2
  Gene Name: LIM domain containing 2
  Uniprot ID: Q9BT23
  ENSP ID: ENSP00000462707

SEQ ID NO: 46739 - protein, 78 aa, Homo sapiens
  Payload ID: 9455
  Gene Symbol: LIMD2
  Gene Name: LIM domain containing 2
  ENSP ID: ENSP00000463089
MERLVADKLIFHNSCFCCKHCHTKLSLGSYAALHGEFYCKPHFQQLFKSKGNYDEGFGRKQHKELWAHKEVDPGTKTA

SEQ ID NO: 46740 - protein, 78 aa, Homo sapiens; identical to SEQ ID NO: 46739
  Payload ID: 9455
  Gene Symbol: LIMD2
  Gene Name: LIM domain containing 2
  ENSP ID: ENSP00000463409

SEQ ID NO: 46741 - protein, 78 aa, Homo sapiens; identical to SEQ ID NO: 46739
  Payload ID: 9455
  Gene Symbol: LIMD2
  Gene Name: LIM domain containing 2
  ENSP ID: ENSP00000463656

SEQ ID NO: 46742 - protein, 109 aa, Homo sapiens
  Payload ID: 9455
  Gene Symbol: LIMD2
  Gene Name: LIM domain containing 2
  ENSP ID: ENSP00000463805
MFQAAGAAQATPSHDAKGGGSSTVQRSKSFSLRAQVKETCAACQKTVYPMERLVADKLIFHNSCFCCKHCHTKLSLGSYAALHGEFYCKPHFQQLFKSKGNYDEGFGRK

SEQ ID NO: 46743 - protein, 127 aa, Homo sapiens; identical to SEQ ID NO: 46736
  Payload ID: 9455
  Gene Symbol: LIMD2
  Gene Name: LIM domain containing 2
  Uniprot ID: Q9BT23
  ENSP ID: ENSP00000464003

SEQ ID NO: 46744 - protein, 93 aa, Homo sapiens
  Payload ID: 9456
  Gene Symbol: LPP
  Gene Name: LIM domain containing preferred translocation partner in lipoma
  ENSP ID: ENSP00000392667
MSHPSWLPPKSTGEPLGHVPARMETTHSFGNPSISVSTQQPPKKFAPVVAPKPKYNPYKQPGGEGDFLPPPPPPLDDSSALPSISGNFPPPPP

SEQ ID NO: 46745 - protein, 252 aa, Homo sapiens
  Payload ID: 9456
  Gene Symbol: LPP
  Gene Name: LIM domain containing preferred translocation partner in lipoma
  ENSP ID: ENSP00000393008
MVIPNQPPLTATKKSTLKPQPAPQAGPIPVAPIGTLKPQPQPVPASYTTASTSSRPTFNVQVKSAQPSPHYMAAPSSGQIYGSGPQGYNTQPVPVSGQCPPPSTRGGMDYAYIPPPGLQPEPGYGYAPNQGRYYEGYYAAGPGYGGRNDSDPTYGQQGHPNTWKREPGYTPPGAGNQNPPGMYPVTGPKKTYITDPVSAPCAPPLQPKGGHSGQLGPSSVAPSFRPEDELEHLTKKMLYDMENPPADEYFEC

SEQ ID NO: 46746 - protein, 428 aa, Homo sapiens
  Payload ID: 9456
  Gene Symbol: LPP
  Gene Name: LIM domain containing preferred translocation partner in lipoma
  ENSP ID: ENSP00000393602
MSHPSWLPPKSTGEPLGHVPARMETTHSFGNPSISVSTQQPPKKFAPVVAPKPKYNPYKQPGGEGDFLPPPPPPLDDSSALPSISGNFPPPPPLDEEAFKVQGNPGGKTLEERRSSLDAEIDSLTSILADLECSSPYKPRPPQSSTGSTASPPVSTPVTGHKRMVIPNQPPLTATKKSTLKPQPAPQAGPIPVAPIGTLKPQPQPVPASYTTASTSSRPTFNVQVKSAQPSPHYMAAPSSGQIYGSGPQGYNTQPVPVSGQCPPPSTRGGMDYAYIPPPGLQPEPGYGYAPNQGRYYEGYYAAGPGYGGRNDSDPTYGQQGHPNTWKREPGYTPPGAGNQNPPGMYPVTGPKKTYITDPVSAPCAPPLQPKGGHSGQLGPSSVAPSFRPEDELEHLTKKMLYDMENPPADEYFGEWGLELTSEVTILL

SEQ ID NO: 46747 - protein, 65 aa, Homo sapiens
  Payload ID: 9456
  Gene Symbol: LPP
  Gene Name: LIM domain containing preferred translocation partner in lipoma
  ENSP ID: ENSP00000394257
MSHPSWLPPKSTGEPLGHVPARMETTHSFGNPSISVSTQQPPKKFAPVVAPKPKYNPYKQPGGEG

SEQ ID NO: 46748 - protein, 66 aa, Homo sapiens
  Payload ID: 9456
  Gene Symbol: LPP
  Gene Name: LIM domain containing preferred translocation partner in lipoma
  ENSP ID: ENSP00000397017
MSHPSWLPPKSTGEPLGHVPARMETTHSFGNPSISVSTQQPPKKFAPVVAPKPKYNPYKQPGGEGD

SEQ ID NO: 46749 - protein, 52 aa, Homo sapiens
  Payload ID: 9456
  Gene Symbol: LPP
  Gene Name: LIM domain containing preferred translocation partner in lipoma
  ENSP ID: ENSP00000397166
MSHPSWLPPKSTGEPLGHVPARMETTHSFGNPSISVSTQQPPKKFAPVVAPK

SEQ ID NO: 46750 - protein, 57 aa, Homo sapiens
  Payload ID: 9456
  Gene Symbol: LPP
  Gene Name: LIM domain containing preferred translocation partner in lipoma
  ENSP ID: ENSP00000403825
MSHPSWLPPKSTGEPLGHVPARMETTHSFGNPSISVSTQQPPKKFAPVVAPKPKYNP

SEQ ID NO: 46751 - protein, 46 aa, Homo sapiens
  Payload ID: 9456
  Gene Symbol: LPP
  Gene Name: LIM domain containing preferred translocation partner in lipoma
  ENSP ID: ENSP00000404679
MSHPSWLPPKSTGEPLGHVPARMETTHSFGNPSISVSTQQPPKKFA

SEQ ID NO: 46752 - protein, 111 aa, Homo sapiens
  Payload ID: 9456
  Gene Symbol: LPP
  Gene Name: LIM domain containing preferred translocation partner in lipoma
  ENSP ID: ENSP00000405138
MSHPSWLPPKSTGEPLGHVPARMETTHSFGNPSISVSTQQPPKKFAPVVAPKPKYNPYKQPGGEGDFLPPPPPPLDDSSALPSISGNFPPPPPLDEEAFKVQGNPGGKTLE

SEQ ID NO: 46753 - protein, 151 aa, Homo sapiens
  Payload ID: 9456
  Gene Symbol: LPP
  Gene Name: LIM domain containing preferred translocation partner in lipoma
  ENSP ID: ENSP00000410340
MSHPSWLPPKSTGEPLGHVPARMETTHSFGNPSISVSTQQPPKKFAPVVAPKPKYNPYKQPGGEGDFLPPPPPPLDDSSALPSISGNFPPPPPLDEEAFKVQGNPGGKTLEERRSSLDAEIDSLTSILADLECSSPYKPRPPQSSTGSTAS

SEQ ID NO: 46754 - protein, 612 aa, Homo sapiens
  Payload ID: 9456
  Gene Symbol: LPP
  Gene Name: LIM domain containing preferred translocation partner in lipoma
  Uniprot ID: Q93052
  ENSP ID: ENSP00000478901
MSHPSWLPPKSTGEPLGHVPARMETTHSFGNPSISVSTQQPPKKFAPVVAPKPKYNPYKQPGGEGDFLPPPPPPLDDSSALPSISGNFPPPPPLDEEAFKVQGNPGGKTLEERRSSLDAEIDSLTSILADLECSSPYKPRPPQSSTGSTASPPVSTPVTGHKRMVIPNQPPLTATKKSTLKPQPAPQAGPIPVAPIGTLKPQPQPVPASYTTASTSSRPTFNVQVKSAQPSPHYMAAPSSGQIYGSGPQGYNTQPVPVSGQCPPPSTRGGMDYAYIPPPGLQPEPGYGYAPNQGRYYEGYYAAGPGYGGRNDSDPTYGQQGHPNTWKREPGYTPPGAGNQNPPGMYPVTGPKKTYITDPVSAPCAPPLQPKGGHSGQLGPSSVAPSFRPEDELEHLTKKMLYDMENPPADEYFGRCARCGENVVGEGTGCTAMDQVFHVDCFTCIICNNKLRGQPFYAVEKKAYCEPCYINTLEQCNVCSKPIMERILRATGKAYHPHCFTCVMCHRSLDGIPFTVDAGGLIHCIEDFHKKFAPRCSVCKEPIMPAPGQEETVRIVALDRDFHVHCYRCEDCGGLLSEGDNQGCYPLDGHILCKTCNSARIRVLTAKASTDL

SEQ ID NO: 46755 - protein, 590 aa, Homo sapiens
  Payload ID: 9456
  Gene Symbol: LPP
  Gene Name: LIM domain containing preferred translocation partner in lipoma
  ENSP ID: ENSP00000482617
METTHSFGNPSISVSTQQPPKKFAPVVAPKPKYNPYKQPGGEGDFLPPPPPPLDDSSALPSISGNFPPPPPLDEEAFKVQGNPGGKTLEERRSSLDAEIDSLTSILADLECSSPYKPRPPQSSTGSTASPPVSTPVTGHKRMVIPNQPPLTATKKSTLKPQPAPQAGPIPVAPIGTLKPQPQPVPASYTTASTSSRPTFNVQVKSAQPSPHYMAAPSSGQIYGSGPQGYNTQPVPVSGQCPPPSTRGGMDYAYIPPPGLQPEPGYGYAPNQGRYYEGYYAAGPGYGGRNDSDPTYGQQGHPNTWKREPGYTPPGAGNQNPPGMYPVTGPKKTYITDPVSAPCAPPLQPKGGHSGQLGPSSVAPSFRPEDELEHLTKKMLYDMENPPADEYFGRCARCGENVVGEGTGCTAMDQVFHVDCFTCIICNNKLRGQPFYAVEKKAYCEPCYINTLEQCNVCSKPIMERILRATGKAYHPHCFTCVMCHRSLDGIPFTVDAGGLIHCIEDFHKKFAPRCSVCKEPIMPAPGQEETVRIVALDRDFHVHCYRCEDCGGLLSEGDNQGCYPLDGHILCKTCNSARIRVLTAKASTDL

SEQ ID NO: 46756 - protein, 647 aa, Homo sapiens
  Payload ID: 9457
  Gene Symbol: LIMK1
  Gene Name: LIM domain kinase 1
  Uniprot ID: P53667
  ENSP ID: ENSP00000336740
MRLTLLCCTWREERMGEEGSELPVCASCGQRIYDGQYLQALNADWHADCFRCCDCSASLSHQYYEKDGQLFCKKDYWARYGESCHGCSEQITKGLVMVAGELKYHPECFICLTCGTFIGDGDTYTLVEHSKLYCGHCYYQTVVTPVIEQILPDSPGSHLPHTVTLVSIPASSHGKRGLSVSIDPPHGPPGCGTEHSHTVRVQGVDPGCMSPDVKNSIHVGDRILEINGTPIRNVPLDEIDLLIQETSRLLQLTLEHDPHDTLGHGLGPETSPLSSPAYTPSGEAGSSARQKPVLRSCSIDRSPGAGSLGSPASQRKDLGRSESLRVVCRPHRIFRPSDLIHGEVLGKGCFGQAIKVTHRETGEVMVMKELIRFDEETQRTFLKEVKVMRCLEHPNVLKFIGVLYKDKRLNFITEYIKGGTLRGIIKSMDSQYPWSQRVSFAKDIASGMAYLHSMNIIHRDLNSHNCLVRENKNVVVADFGLARLMVDEKTQPEGLRSLKKPDRKKRYTVVGNPYWMAPEMINGRSYDEKVDVFSFGIVLCEIIGRVNADPDYLPRTMDFGLNVRGFLDRYCPPNCPPSFFPITVRCCDLDPEKRPSFVKLEHWLETLRMHLAGHLPLGPQLEQLDRGFWETYRRGESGLPAHPEVPD

SEQ ID NO: 46757 - protein, 677 aa, Homo sapiens
  Payload ID: 9457
  Gene Symbol: LIMK1
  Gene Name: LIM domain kinase 1
  ENSP ID: ENSP00000409717
MSSILELSTSRQGVPPSVLDWTTQFLWTLDSAQTRAPSRTLGRAAPAPGSELPVCASCGQRIYDGQYLQALNADWHADCFRCCDCSASLSHQYYEKDGQLFCKKDYWARYGESCHGCSEQITKGLVMVAGELKYHPECFICLTCGTFIGDGDTYTLVEHSKLYCGHCYYQTVVTPVIEQILPDSPGSHLPHTVTLVSIPASSHGKRGLSVSIDPPHGPPGCGTEHSHTVRVQGVDPGCMSPDVKNSIHVGDRILEINGTPIRNVPLDEIDLLIQETSRLLQLTLEHDPHDTLGHGLGPETSPLSSPAYTPSGEAGSSARQKPVLRSCSIDRSPGAGSLGSPASQRKDLGRSESLRVVCRPHRIFRPSDLIHGEVLGKGCFGQAIKVTHRETGEVMVMKELIRFDEETQRTFLKEVKVMRCLEHPNVLKFIGVLYKDKRLNFITEYIKGGTLRGIIKSMDSQYPWSQRVSFAKDIASGMAYLHSMNIIHRDLNSHNCLVRENKNVVVADFGLARLMVDEKTQPEGLRSLKKPDRKKRYTVVGNPYWMAPEMINGRSYDEKVDVFSFGIVLCEIIGRVNADPDYLPRTMDFGLNVRGFLDRYCPPNCPPSFFPITVRCCDLDPEKRPSFVKLEHWLETLRMHLAGHLPLGPQLEQLDRGFWETYRRGESGLPAHPEVPD

SEQ ID NO: 46758 - protein, 305 aa, Homo sapiens
  Payload ID: 9457
  Gene Symbol: LIMK1
  Gene Name: LIM domain kinase 1
  Uniprot ID: P53667
  ENSP ID: ENSP00000414606
MRLTLLCCTWREERMGEEGSELPVCASCGQRIYDGQYLQALNADWHADCFRCCDCSASLSHQYYEKDGQLFCKKDYWARYGESCHGCSEQITKGLVMVAGELKYHPECFICLTCGTFIGDGDTYTLVEHSKLYCGHCYYQTVVTPVIEQILPDSPGSHLPHTVTLVSIPASSHGKRGLSVSIDPPHGPPGCGTEHSHTVRVQGVDPGCMSPDVKNSIHVGDRILEINGTPIRNVPLDEIDLLIQETSRLLQLTLEHDPHDTLGHGLGPETSPLSSPAYTPSGEAGSSARQKPVFARTWVALSPSA

SEQ ID NO: 46759 - protein, 613 aa, Homo sapiens
  Payload ID: 9457
  Gene Symbol: LIMK1
  Gene Name: LIM domain kinase 1
  Uniprot ID: P53667
  ENSP ID: ENSP00000444452
MLLASAPRRRRFLQRAKCCDCSASLSHQYYEKDGQLFCKKDYWARYGESCHGCSEQITKGLVMVAGELKYHPECFICLTCGTFIGDGDTYTLVEHSKLYCGHCYYQTVVTPVIEQILPDSPGSHLPHTVTLVSIPASSHGKRGLSVSIDPPHGPPGCGTEHSHTVRVQGVDPGCMSPDVKNSIHVGDRILEINGTPIRNVPLDEIDLLIQETSRLLQLTLEHDPHDTLGHGLGPETSPLSSPAYTPSGEAGSSARQKPVLRSCSIDRSPGAGSLGSPASQRKDLGRSESLRVVCRPHRIFRPSDLIHGEVLGKGCFGQAIKVTHRETGEVMVMKELIRFDEETQRTFLKEVKVMRCLEHPNVLKFIGVLYKDKRLNFITEYIKGGTLRGIIKSMDSQYPWSQRVSFAKDIASGMAYLHSMNIIHRDLNSHNCLVRENKNVVVADFGLARLMVDEKTQPEGLRSLKKPDRKKRYTVVGNPYWMAPEMINGRSYDEKVDVFSFGIVLCEIIGRVNADPDYLPRTMDFGLNVRGFLDRYCPPNCPPSFFPITVRCCDLDPEKRPSFVKLEHWLETLRMHLAGHLPLGPQLEQLDRGFWETYRRGESGLPAHPEVPD

SEQ ID NO: 46760 - protein, 617 aa, Homo sapiens
  Payload ID: 9458
  Gene Symbol: LIMK2
  Gene Name: LIM domain kinase 2
  Uniprot ID: P53671
  ENSP ID: ENSP00000330470
MGSYLSVPAYFTSRDLFRCSECQDSLTNWYYEKDGKLYCPKDYWGKFGEFCHGCSLLMTGPFMVAGEFKYHPECFACMSCKVIIEDGDAYALVQHATLYCGKCHNEVVLAPMFERLSTESVQEQLPYSVTLISMPATTEGRRGFSVSVESACSNYATTVQVKEVNRMHISPNNRNAIHPGDRILEINGTPVRTLRVEEVEDAISQTSQTLQLLIEHDPVSQRLDQLRLEARLAPHMQNAGHPHALSTLDTKENLEGTLRRRSLRRSNSISKSPGPSSPKEPLLFSRDISRSESLRCSSSYSQQIFRPCDLIHGEVLGKGFFGQAIKVTHKATGKVMVMKELIRCDEETQKTFLTEVKVMRSLDHPNVLKFIGVLYKDKKLNLLTEYIEGGTLKDFLRSMDPFPWQQKVRFAKGIASGMAYLHSMCIIHRDLNSHNCLIKLDKTVVVADFGLSRLIVEERKRAPMEKATTKKRTLRKNDRKKRYTVVGNPYWMAPEMLNGKSYDETVDIFSFGIVLCEIIGQVYADPDCLPRTLDFGLNVKLFWEKFVPTDCPPAFFPLAAICCRLEPESRPAFSKLEDSFEALSLYLGELGIPLPAELEELDHTVSMQYGLTRDSPP

SEQ ID NO: 46761 - protein, 638 aa, Homo sapiens
  Payload ID: 9458
  Gene Symbol: LIMK2
  Gene Name: LIM domain kinase 2
  Uniprot ID: P53671
  ENSP ID: ENSP00000332687
MSALAGEDVWRCPGCGDHIAPSQIWYRTVNETWHGSCFRCSECQDSLTNWYYEKDGKLYCPKDYWGKFGEFCHGCSLLMTGPFMVAGEFKYHPECFACMSCKVIIEDGDAYALVQHATLYCGKCHNEVVLAPMFERLSTESVQEQLPYSVTLISMPATTEGRRGFSVSVESACSNYATTVQVKEVNRMHISPNNRNAIHPGDRILEINGTPVRTLRVEEVEDAISQTSQTLQLLIEHDPVSQRLDQLRLEARLAPHMQNAGHPHALSTLDTKENLEGTLRRRSLRRSNSISKSPGPSSPKEPLLFSRDISRSESLRCSSSYSQQIFRPCDLIHGEVLGKGFFGQAIKVTHKATGKVMVMKELIRCDEETQKTFLTEVKVMRSLDHPNVLKFIGVLYKDKKLNLLTEYIEGGTLKDFLRSMDPFPWQQKVRFAKGIASGMAYLHSMCIIHRDLNSHNCLIKLDKTVVVADFGLSRLIVEERKRAPMEKATTKKRTLRKNDRKKRYTVVGNPYWMAPEMLNGKSYDETVDIFSFGIVLCEIIGQVYADPDCLPRTLDFGLNVKLFWEKFVPTDCPPAFFPLAAICCRLEPESRPAFSKLEDSFEALSLYLGELGIPLPAELEELDHTVSMQYGLTRDSPP

SEQ ID NO: 46762 - protein, 686 aa, Homo sapiens
  Payload ID: 9458
  Gene Symbol: LIMK2
  Gene Name: LIM domain kinase 2
  Uniprot ID: P53671
  ENSP ID: ENSP00000339916
MGSYLSVPAYFTSRDLFRCSECQDSLTNWYYEKDGKLYCPKDYWGKFGEFCHGCSLLMTGPFMVAGEFKYHPECFACMSCKVIIEDGDAYALVQHATLYCGKCHNEVVLAPMFERLSTESVQEQLPYSVTLISMPATTEGRRGFSVSVESACSNYATTVQVKEVNRMHISPNNRNAIHPGDRILEINGTPVRTLRVEEVEDAISQTSQTLQLLIEHDPVSQRLDQLRLEARLAPHMQNAGHPHALSTLDTKENLEGTLRRRSLRRSNSISKSPGPSSPKEPLLFSRDISRSESLRCSSSYSQQIFRPCDLIHGEVLGKGFFGQAIKVTHKATGKVMVMKELIRCDEETQKTFLTEVKVMRSLDHPNVLKFIGVLYKDKKLNLLTEYIEGGTLKDFLRSMDPFPWQQKVRFAKGIASGMAYLHSMCIIHRDLNSHNCLIKLDKTVVVADFGLSRLIVEERKRAPMEKATTKKRTLRKNDRKKRYTVVGNPYWMAPEMLNGKSYDETVDIFSFGIVLCEIIGQVYADPDCLPRTLDFGLNVKLFWEKFVPTDCPPAFFPLAAICCRLEPESRAPPGAAGEGPGCADDEGPVRRQGKVTIKYDPKELRKHLNLEEWILEQLTRLYDCQEEEISELEIDVDELLDMESDDAWASRVKELLVDCYKPTEAFISGLLDKIRAMQKLSTPQKK

SEQ ID NO: 46763 - protein, 629 aa, Homo sapiens
  Payload ID: 9458
  Gene Symbol: LIMK2
  Gene Name: LIM domain kinase 2
  ENSP ID: ENSP00000384602
MTGPFMVAGEFKYHPECFACMSCKVIIEDGDAYALVQHATLYCGKCHNEVVLAPMFERLSTESVQEQLPYSVTLISMPATTEGRRGFSVSVESACSNYATTVQVKEVNRMHISPNNRNAIHPGDRILEINGTPVRTLRVEEVEDAISQTSQTLQLLIEHDPVSQRLDQLRLEARLAPHMQNAGHPHALSTLDTKENLEGTLRRRSLRRSNSISKSPGPSSPKEPLLFSRDISRSESLRCSSSYSQQIFRPCDLIHGEVLGKGFFGQAIKVTHKATGKVMVMKELIRCDEETQKTFLTEVKVMRSLDHPNVLKFIGVLYKDKKLNLLTEYIEGGTLKDFLRSMDPFPWQQKVRFAKGIASGMAYLHSMCIIHRDLNSHNCLIKLDKTVVVADFGLSRLIVEERKRAPMEKATTKKRTLRKNDRKKRYTVVGNPYWMAPEMLNGKSYDETVDIFSFGIVLCEIIGQVYADPDCLPRTLDFGLNVKLFWEKFVPTDCPPAFFPLAAICCRLEPESRAPPGAAGEGPGCADDEGPVRRQGKVTIKYDPKELRKHLNLEEWILEQLTRLYDCQEEEISELEIDVDELLDMESDDAWASRVKELLVDCYKPTEAFISGLLDKIRAMQKLSTPQKK

SEQ ID NO: 46764 - protein, 82 aa, Homo sapiens
  Payload ID: 9458
  Gene Symbol: LIMK2
  Gene Name: LIM domain kinase 2
  ENSP ID: ENSP00000388422
MGSYLSVPAYFTSRDLFRCSECQDSLTNWYYEKDGKLYCPKDYWGKFGEFCHGCSLLMTGPFMVSESLHICPSWSSESIDSA

SEQ ID NO: 46765 - protein, 156 aa, Homo sapiens
  Payload ID: 9459
  Gene Symbol: LMO1
  Gene Name: LIM domain only 1 (rhombotin 1)
  Uniprot ID: P25800
  ENSP ID: ENSP00000338207
MMVLDKEDGVPMLSVQPKGKQKGCAGCNRKIKDRYLLKALDKYWHEDCLKCACCDCRLGEVGSTLYTKANLILCRRDYLRLFGTTGNCAACSKLIPAFEMVMRARDNVYHLDCFACQLCNQRFCVGDKFFLKNNMILCQMDYEEGQLNGTFESQVQ

SEQ ID NO: 46766 - protein, 155 aa, Homo sapiens
  Payload ID: 9459
  Gene Symbol: LMO1
  Gene Name: LIM domain only 1 (rhombotin 1)
  Uniprot ID: P25800
  ENSP ID: ENSP00000404538
MVLDQEDGVPMLSVQPKGKQKGCAGCNRKIKDRYLLKALDKYWHEDCLKCACCDCRLGEVGSTLYTKANLILCRRDYLRLFGTTGNCAACSKLIPAFEMVMRARDNVYHLDCFACQLCNQRFCVGDKFFLKNNMILCQMDYEEGQLNGTFESQVQ

SEQ ID NO: 46767 - protein, 145 aa, Homo sapiens
  Payload ID: 9459
  Gene Symbol: LMO1
  Gene Name: LIM domain only 1 (rhombotin 1)
  ENSP ID: ENSP00000435456
MLSVQPKGKQKGCAGCNRKIKDRYLLKALDKYWHEDCLKCACCDCRLGEVGSTLYTKANLILCRRDYLRLFGTTGNCAACSKLIPAFEMVMRARDNVYHLDCFACQLCNQRFCVGDKFFLKNNMILCQMDYEEGQLNGTFESQVQ

SEQ ID NO: 46768 - protein, 227 aa, Homo sapiens
  Payload ID: 9460
  Gene Symbol: LMO2
  Gene Name: LIM domain only 2 (rhombotin-like 1)
  Uniprot ID: P25791
  ENSP ID: ENSP00000257818
MEGSAVTVLERGGASSPAERRSKRRRRSGGDGGGGGGARAPEGVRAPAAGQPRATKGAPPPPGTPPPSPMSSAIERKSLDPSEEPVDEVLQIPPSLLTCGGCQQNIGDRYFLKAIDQYWHEDCLSCDLCGCRLGEVGRRLYYKLGRKLCRRDYLRLFGQDGLCASCDKRIRAYEMTMRVKDKVYHLECFKCAACQKHFCVGDRYLLINSDIVCEQDIYEWTKINGMI

SEQ ID NO: 46769 - protein, 158 aa, Homo sapiens
  Payload ID: 9460
  Gene Symbol: LMO2
  Gene Name: LIM domain only 2 (rhombotin-like 1)
  Uniprot ID: P25791
  ENSP ID: ENSP00000379175
MSSAIERKSLDPSEEPVDEVLQIPPSLLTCGGCQQNIGDRYFLKAIDQYWHEDCLSCDLCGCRLGEVGRRLYYKLGRKLCRRDYLRLFGQDGLCASCDKRIRAYEMTMRVKDKVYHLECFKCAACQKHFCVGDRYLLINSDIVCEQDIYEWTKINGMI

SEQ ID NO: 46770 - protein, 55 aa, Homo sapiens
  Payload ID: 9460
  Gene Symbol: LMO2
  Gene Name: LIM domain only 2 (rhombotin-like 1)
  Uniprot ID: P25791
  ENSP ID: ENSP00000401967
MSSAIERKSLDPSESLKGSQVRCPVWPKTISDPRCWSHSGEAVPDAWPSLQGTSG

SEQ ID NO: 46771 - protein, 156 aa, Homo sapiens
  Payload ID: 9461
  Gene Symbol: LMO3
  Gene Name: LIM domain only 3 (rhombotin-like 2)
  Uniprot ID: Q8TAP4
  ENSP ID: ENSP00000261169
MQKKEKSFGIQMLSVQPDTKPKGCAGCNRKIKDRYLLKALDKYWHEDCLKCACCDCRLGEVGSTLYTKANLILCRRDYLRLFGVTGNCAACSKLIPAFEMVMRAKDNVYHLDCFACQLCNQRFCVGDKFFLKNNMILCQTDYEEGLMKEGYAPQVR

SEQ ID NO: 46772 - protein, 145 aa, Homo sapiens
  Payload ID: 9461
  Gene Symbol: LMO3
  Gene Name: LIM domain only 3 (rhombotin-like 2)
  Uniprot ID: Q8TAP4
  ENSP ID: ENSP00000312856
MLSVQPDTKPKGCAGCNRKIKDRYLLKALDKYWHEDCLKCACCDCRLGEVGSTLYTKANLILCRRDYLRLFGVTGNCAACSKLIPAFEMVMRAKDNVYHLDCFACQLCNQRFCVGDKFFLKNNMILCQTDYEEGLMKEGYAPQVR

SEQ ID NO: 46773 - protein, 145 aa, Homo sapiens; identical to SEQ ID NO: 46772
  Payload ID: 9461
  Gene Symbol: LMO3
  Gene Name: LIM domain only 3 (rhombotin-like 2)
  Uniprot ID: Q8TAP4
  ENSP ID: ENSP00000346689

SEQ ID NO: 46774 - protein, 69 aa, Homo sapiens
  Payload ID: 9461
  Gene Symbol: LMO3
  Gene Name: LIM domain only 3 (rhombotin-like 2)
  ENSP ID: ENSP00000379508
MLSVQPDTKPKGCAGCNRKIKDRYLLKALDKYWHEDCLKCACCDCRLGEVGSTLYTKANLILCRRDYLR

SEQ ID NO: 46775 - protein, 60 aa, Homo sapiens
  Payload ID: 9461
  Gene Symbol: LMO3
  Gene Name: LIM domain only 3 (rhombotin-like 2)
  ENSP ID: ENSP00000404386
MLSVQPDTKPKGCAGCNRKIKDRYLLKALDKYWHEDCLKCACCDCRLGEALWCNGKLRCL

SEQ ID NO: 46776 - protein, 70 aa, Homo sapiens
  Payload ID: 9461
  Gene Symbol: LMO3
  Gene Name: LIM domain only 3 (rhombotin-like 2)
  ENSP ID: ENSP00000404656
MLSVQPDTKPKGCAGCNRKIKDRYLLKALDKYWHEDCLKCACCDCRLGEVGSTLYTKANLILCRRDYLSI

SEQ ID NO: 46777 - protein, 145 aa, Homo sapiens; identical to SEQ ID NO: 46772
  Payload ID: 9461
  Gene Symbol: LMO3
  Gene Name: LIM domain only 3 (rhombotin-like 2)
  Uniprot ID: Q8TAP4
  ENSP ID: ENSP00000412479

SEQ ID NO: 46778 - protein, 145 aa, Homo sapiens; identical to SEQ ID NO: 46772
  Payload ID: 9461
  Gene Symbol: LMO3
  Gene Name: LIM domain only 3 (rhombotin-like 2)
  Uniprot ID: Q8TAP4
  ENSP ID: ENSP00000413703

SEQ ID NO: 46779 - protein, 92 aa, Homo sapiens
  Payload ID: 9461
  Gene Symbol: LMO3
  Gene Name: LIM domain only 3 (rhombotin-like 2)
  ENSP ID: ENSP00000437890
MLSVQPDTKPKGCAGCNRKIKDRYLLKALDKYWHEDCLKCACCDCRLGEVGSTLYTKANLILCRRDYLSISSGFMLPFQIRSLYSPGNVKVF

SEQ ID NO: 46780 - protein, 60 aa, Homo sapiens; identical to SEQ ID NO: 46775
  Payload ID: 9461
  Gene Symbol: LMO3
  Gene Name: LIM domain only 3 (rhombotin-like 2)
  ENSP ID: ENSP00000438187

SEQ ID NO: 46781 - protein, 145 aa, Homo sapiens; identical to SEQ ID NO: 46772
  Payload ID: 9461
  Gene Symbol: LMO3
  Gene Name: LIM domain only 3 (rhombotin-like 2)
  Uniprot ID: Q8TAP4
  ENSP ID: ENSP00000439275

SEQ ID NO: 46782 - protein, 69 aa, Homo sapiens; identical to SEQ ID NO: 46774
  Payload ID: 9461
  Gene Symbol: LMO3
  Gene Name: LIM domain only 3 (rhombotin-like 2)
  ENSP ID: ENSP00000439900

SEQ ID NO: 46783 - protein, 84 aa, Homo sapiens
  Payload ID: 9461
  Gene Symbol: LMO3
  Gene Name: LIM domain only 3 (rhombotin-like 2)
  ENSP ID: ENSP00000439989
MLSVQPDTKPKGCAGCNRKIKDRYLLKALDKYWHEDCLKCACCDCRLGEVGSTLYTKANLILCRRDYLRLFGVTGNCAACSKLI

SEQ ID NO: 46784 - protein, 145 aa, Homo sapiens; identical to SEQ ID NO: 46772
  Payload ID: 9461
  Gene Symbol: LMO3
  Gene Name: LIM domain only 3 (rhombotin-like 2)
  Uniprot ID: Q8TAP4
  ENSP ID: ENSP00000440099

SEQ ID NO: 46785 - protein, 60 aa, Homo sapiens; identical to SEQ ID NO: 46775
  Payload ID: 9461
  Gene Symbol: LMO3
  Gene Name: LIM domain only 3 (rhombotin-like 2)
  ENSP ID: ENSP00000440885

SEQ ID NO: 46786 - protein, 60 aa, Homo sapiens; identical to SEQ ID NO: 46775
  Payload ID: 9461
  Gene Symbol: LMO3
  Gene Name: LIM domain only 3 (rhombotin-like 2)
  ENSP ID: ENSP00000440948

SEQ ID NO: 46787 - protein, 110 aa, Homo sapiens
  Payload ID: 9461
  Gene Symbol: LMO3
  Gene Name: LIM domain only 3 (rhombotin-like 2)
  ENSP ID: ENSP00000441360
MLSVQPDTKPKGCAGCNRKIKDRYLLKALDKYWHEDCLKCACCDCRLGEVGSTLYTKANLILCRRDYLRLFGVTGNCAACSKLIPAFEMVMRAKDNVYHLDCFACQLCNQ

SEQ ID NO: 46788 - protein, 118 aa, Homo sapiens
  Payload ID: 9461
  Gene Symbol: LMO3
  Gene Name: LIM domain only 3 (rhombotin-like 2)
  ENSP ID: ENSP00000442713
MLSVQPDTKPKGCAGCNRKIKDRYLLKALDKYWHEDCLKCACCDCRLGEVGSTLYTKANLILCRRDYLRLFGVTGNCAACSKLIPAFEMVMRAKDNVYHLDCFACQLCNQRFCVGDKF

SEQ ID NO: 46789 - protein, 167 aa, Homo sapiens
  Payload ID: 9461
  Gene Symbol: LMO3
  Gene Name: LIM domain only 3 (rhombotin-like 2)
  Uniprot ID: Q8TAP4
  ENSP ID: ENSP00000442786
MLSVQPDTKPKGCAGCNRKIKDRYLLKALDKYWHEDCLKCACCDCRLGEHLKRCGSIYIHAAHTEIGICVTLEWPLPFVIIDFSQQITIAWLFGVTGNCAACSKLIPAFEMVMRAKDNVYHLDCFACQLCNQRFCVGDKFFLKNNMILCQTDYEEGLMKEGYAPQVR

SEQ ID NO: 46790 - protein, 118 aa, Homo sapiens; identical to SEQ ID NO: 46788
  Payload ID: 9461
  Gene Symbol: LMO3
  Gene Name: LIM domain only 3 (rhombotin-like 2)
  ENSP ID: ENSP00000443807

SEQ ID NO: 46791 - protein, 88 aa, Homo sapiens
  Payload ID: 9461
  Gene Symbol: LMO3
  Gene Name: LIM domain only 3 (rhombotin-like 2)
  ENSP ID: ENSP00000444269
MLSVQPDTKPKGCAGCNRKIKDRYLLKALDKYWHEDCLKCACCDCRLGEVGSTLYTKANLILCRRDYLRLFGVTGNCAACSKLIPAFE

SEQ ID NO: 46792 - protein, 145 aa, Homo sapiens; identical to SEQ ID NO: 46772
  Payload ID: 9461
  Gene Symbol: LMO3
  Gene Name: LIM domain only 3 (rhombotin-like 2)
  Uniprot ID: Q8TAP4
  ENSP ID: ENSP00000444393

SEQ ID NO: 46793 - protein, 118 aa, Homo sapiens; identical to SEQ ID NO: 46788
  Payload ID: 9461
  Gene Symbol: LMO3
  Gene Name: LIM domain only 3 (rhombotin-like 2)
  ENSP ID: ENSP00000445193

SEQ ID NO: 46794 - protein, 97 aa, Homo sapiens
  Payload ID: 9461
  Gene Symbol: LMO3
  Gene Name: LIM domain only 3 (rhombotin-like 2)
  ENSP ID: ENSP00000445504
MLSVQPDTKPKGCAGCNRKIKDRYLLKALDKYWHEDCLKCACCDCRLGEVGSTLYTKANLILCRRDYLRLFGVTGNCAACSKLIPAFEMVMRAKDNV

SEQ ID NO: 46795 - protein, 145 aa, Homo sapiens; identical to SEQ ID NO: 46772
  Payload ID: 9461
  Gene Symbol: LMO3
  Gene Name: LIM domain only 3 (rhombotin-like 2)
  Uniprot ID: Q8TAP4
  ENSP ID: ENSP00000445751

SEQ ID NO: 46796 - protein, 58 aa, Homo sapiens
  Payload ID: 9461
  Gene Symbol: LMO3
  Gene Name: LIM domain only 3 (rhombotin-like 2)
  ENSP ID: ENSP00000446095
MLSVQPDTKPKGCAGCNRKIKDRYLLKALDKYWHEDCLKCACCDCRLGEVGSTLYTKA

SEQ ID NO: 46797 - protein, 145 aa, Homo sapiens; identical to SEQ ID NO: 46772
  Payload ID: 9461
  Gene Symbol: LMO3
  Gene Name: LIM domain only 3 (rhombotin-like 2)
  Uniprot ID: Q8TAP4
  ENSP ID: ENSP00000446115

SEQ ID NO: 46798 - protein, 163 aa, Homo sapiens
  Payload ID: 9461
  Gene Symbol: LMO3
  Gene Name: LIM domain only 3 (rhombotin-like 2)
  Uniprot ID: Q8TAP4
  ENSP ID: ENSP00000446463
MLMEGGRAAAARNVSSIQMLSVQPDTKPKGCAGCNRKIKDRYLLKALDKYWHEDCLKCACCDCRLGEVGSTLYTKANLILCRRDYLRLFGVTGNCAACSKLIPAFEMVMRAKDNVYHLDCFACQLCNQRFCVGDKFFLKNNMILCQTDYEEGLMKEGYAPQVR

SEQ ID NO: 46799 - protein, 125 aa, Homo sapiens [sequence omitted]

SEQ ID NO: 46800 - protein, 165 aa, Homo sapiens
  Payload ID: 9462
  Gene Symbol: LMO4
  Gene Name: LIM domain only 4
  Uniprot ID: P61968
  ENSP ID: ENSP00000359573
MVNPGSSSQPPPVTAGSLSWKRCAGCGGKIADRFLLYAMDSYWHSRCLKCSCCQAQLGDIGTSCYTKSGMILCRNDYIRLFGNSGACSACGQSIPASELVMRAQGNVYHLKCFTCSTCRNRLVPGDRFHYINGSLFCEHDRPTALINGHLNSLQSNPLLPDQKVC

SEQ ID NO: 46801 - protein, 165 aa, Homo sapiens; identical to SEQ ID NO: 46800
  Payload ID: 9462
  Gene Symbol: LMO4
  Gene Name: LIM domain only 4
  Uniprot ID: P61968
  ENSP ID: ENSP00000359575

SEQ ID NO: 46802 - protein, 676 aa, Homo sapiens
  Payload ID: 9463
  Gene Symbol: LIMD1
  Gene Name: LIM domains containing 1
  Uniprot ID: Q9UGP4
  ENSP ID: ENSP00000273317
MDKYDDLGLEASKFIEDLNMYEASKDGLFRVDKGAGNNPEFEETRRVFATKMAKIHLQQQQQQLLQEETLPRGSRGPVNGGGRLGPQARWEVVGSKLTVDGAAKPPLAASTGAPGAVTTLAAGQPPYPPQEQRSRPYLHGTRHGSQDCGSRESLATSEMSAFHQPGPCEDPSCLTHGDYYDNLSLASPKWGDKPGVSPSIGLSVGSGWPSSPGSDPPLPKPCGDHPLNHRQLSLSSSRSSEGSLGGQNSGIGGRSSEKPTGLWSTASSQRVSPGLPSPNLENGAPAVGPVQPRTPSVSAPLALSCPRQGGLPRSNSGLGGEVSGVMSKPNVDPQPWFQDGPKSYLSSSAPSSSPAGLDGSQQGAVPGLGPKPGCTDLGTGPKLSPTSLVHPVMSTLPELSCKEGPLGWSSDGSLGSVLLDSPSSPRVRLPCQPLVPGPELRPSAAELKLEALTQRLEREMDAHPKADYFGACVKCSKGVFGAGQACQAMGNLYHDTCFTCAACSRKLRGKAFYFVNGKVFCEEDFLYSGFQQSADRCFLCGHLIMDMILQALGKSYHPGCFRCVICNECLDGVPFTVDSENKIYCVRDYHKVLAPKCAACGLPILPPEGSDETIRVVSMDRDYHVECYHCEDCGLELNDEDGHRCYPLEDHLFCHSCHVKRLEKRPSSTALHQHHF

SEQ ID NO: 46803 - protein, 620 aa, Homo sapiens
  Payload ID: 9463
  Gene Symbol: LIMD1
  Gene Name: LIM domains containing 1
  ENSP ID: ENSP00000394537
MDKYDDLGLEASKFIEDLNMYEASKDGLFRVDKGAGNNPEFEETRRVFATKMAKIHLQQQQQQLLQEETLPRGSRGPVNGGGRLGPQARWEVVGSKLTVDGAAKPPLAASTGAPGAVTTLAAGQPPYPPQEQRSRPYLHGTRHGSQDCGSRESLATSEMSAFHQPGPCEDPSCLTHGDYYDNLSLASPKWGDKPGVSPSIGLSVGSGWPSSPGSDPPLPKPCGDHPLNHRQLSLSSSRSSEGSLGGQNSGIGGRSSEKPTGLWSTASSQRVSPGLPSPNLENGAPAVGPVQPRTPSVSAPLALSCPRQGGLPRSNSGLGGEVSGVMSKPNVDPQPWFQDGPKSYLSSSAPSSSPAGLDGSQQGAVPGLGPKPGCTDLGTGPKLSPTSLVHPVMSTLPELSCKEGPLGWSSDGSLGSVLLDSPSSPRVRLPCQPLVPGPELRPSAAELKLEALTQRLEREMDAHPKADYFGACVKCSKGVFGAGQACQAMGNLYHDTCFTCAACSRKLRGKAFYFVNGKVFCEEDFLYSGFQQSADRCFLCGHLIMDMILQALGKSYHPGCFRCVICNECLDGVPFTVDSENKIYCVRDYHKVLAPKCAACGLPILPPEVRCPSRHAPRGF

SEQ ID NO: 46804 - protein, 406 aa, Homo sapiens
  Payload ID: 9464
  Gene Symbol: LHX1
  Gene Name: LIM homeobox 1
  Uniprot ID: P48742
  ENSP ID: ENSP00000477829
MVHCAGCKRPILDRFLLNVLDRAWHVKCVQCCECKCNLTEKCFSREGKLYCKNDFFRCFGTKCAGCAQGISPSDLVRRARSKVFHLNCFTCMMCNKQLSTGEELYIIDENKFVCKEDYLSNSSVAKENSLHSATTGSDPSLSPDSQDPSQDDAKDSESANVSDKEAGSNENDDQNLGAKRRGPRTTIKAKQLETLKAAFAATPKPTRHIREQLAQETGLNMRVIQVWFQNRRSKERRMKQLSALGARRHAFFRSPRRMRPLVDRLEPGELIPNGPFSFYGDYQSEYYGPGGNYDFFPQGPPSSQAQTPVDLPFVPSSGPSGTPLGGLEHPLPGHHPSSEAQRFTDILAHPPGDSPSPEPSLPGPLHSMSAEVFGPSPPFSSLSVNGGASYGNHLSHPPEMNEAAVW

SEQ ID NO: 46805 - protein, 141 aa, Homo sapiens
  Payload ID: 9464
  Gene Symbol: LHX1
  Gene Name: LIM homeobox 1
  ENSP ID: ENSP00000481496
  MOD_RES (1)..(1): Any amino acid
XRPLVDRLEPGELIPNGPFSFYGASRTILLLGRPDGKGGHEIGSKSASRWDWDPRTGCRRAELGLPKGNADLSPTPTWTRIRRQTPRACAPGRRAAKRRPGQPRVRTAVGDARSRGEGGREHSRVKEVKRPRALPGQPGGF

SEQ ID NO: 46806 - protein, 406 aa, Homo sapiens; identical to SEQ ID NO: 46804
  Payload ID: 9464
  Gene Symbol: LHX1
  Gene Name: LIM homeobox 1
  Uniprot ID: P48742
  ENSP ID: ENSP00000484449

SEQ ID NO: 46807 - protein, 141 aa, Homo sapiens; identical to SEQ ID NO: 46805
  Payload ID: 9464
  Gene Symbol: LHX1
  Gene Name: LIM homeobox 1
  ENSP ID: ENSP00000488248
  MOD_RES (1)..(1): Any amino acid

SEQ ID NO: 46808 - protein, 406 aa, Homo sapiens
  Payload ID: 9465
  Gene Symbol: LHX2
  Gene Name: LIM homeobox 2
  Uniprot ID: P50458
  ENSP ID: ENSP00000362717
MLFHSLSGPEVHGVIDEMDRRAKSEAPAISSAIDRGDTETTMPSISSDRAALCAGCGGKISDRYYLLAVDKQWHMRCLKCCECKLNLESELTCFSKDGSIYCKEDYYRRFSVQRCARCHLGISASEMVMRARDLVYHLNCFTCTTCNKMLTTGDHFGMKDSLVYCRLHFEALLQGEYPAHFNHADVAAAAAAAAAAKSAGLGAAGANPLGLPYYNGVGTVQKGRPRKRKSPGPGADLAAYNAALSCNENDAEHLDRDQPYPSSQKTKRMRTSFKHHQLRTMKSYFAINHNPDAKDLKQLAQKTGLTKRVLQVWFQNARAKFRRNLLRQENTGVDKSTDAALQTGTPSGPASELSNASLSPSSTPTTLTDLTSPTLPTVTSVLTSVPGNLEGHEPHSPSQTTLTNLF

SEQ ID NO: 46809 - protein, 412 aa, Homo sapiens
  Payload ID: 9465
  Gene Symbol: LHX2
  Gene Name: LIM homeobox 2
  ENSP ID: ENSP00000394978
  MOD_RES (1)..(1): Any amino acid
XHSLSGPEVHGVIDEMDRRAKSEAPAISSAIDRGDTETTMPSISSDRAALCAGCGGKISDRYYLLAVDKQWHMRCLKCCECKLNLESELTCFSKDGSIYCKEDYYSPSLHGPYRRFSVQRCARCHLGISASEMVMRARDLVYHLNCFTCTTCNKMLTTGDHFGMKDSLVYCRLHFEALLQGEYPAHFNHADVAAAAAAAAAAKSAGLGAAGANPLGLPYYNGVGTVQKGRPRKRKSPGPGADLAAYNAALSCNENDAEHLDRDQPYPSSQKTKRMRTSFKHHQLRTMKSYFAINHNPDAKDLKQLAQKTGLTKRVLQVWFQNARAKFRRNLLRQENTGVDKSTDAALQTGTPSGPASELSNASLSPSSTPTTLTDLTSPTLPTVTSVLTSVPGNLEGHEPHSPSQTTLTNLF

SEQ ID NO: 46810 - protein, 146 aa, Homo sapiens
  Payload ID: 9465
  Gene Symbol: LHX2
  Gene Name: LIM homeobox 2
  ENSP ID: ENSP00000453448
MPSISSDRAALCAGCGGKISDRYYLLAVDKQWHMRCLKCCECKLNLESELTCFSKDGSIYCKEDYYRRFSVQRCARCHLGISASEMVMRARDLVYHLNCFTCTTCNKMLTTGDHFGMKDSLVYCRLHFEALLQGEYPAHFNHADVA

SEQ ID NO: 46811 - protein, 115 aa, Homo sapiens
  Payload ID: 9465
  Gene Symbol: LHX2
  Gene Name: LIM homeobox 2
  ENSP ID: ENSP00000476200
  MOD_RES (1)..(1): Any amino acid
XLGAAGANPLGLPYYNGVGTVQKGRPRKRKSPGPGADLAAYNAALSCNENDAEHLDRDQPYPSSQKTKRMRTSFKHHQLRTMKSYFAINHNPDAKDLKQLAQKTGLTKRVLQASL

SEQ ID NO: 46812 - protein, 402 aa, Homo sapiens
  Payload ID: 9466
  Gene Symbol: LHX3
  Gene Name: LIM homeobox 3
  Uniprot ID: Q9UBR4
  ENSP ID: ENSP00000360811
MEARGELGPARESAGGDLLLALLARRADLRREIPLCAGCDQHILDRFILKALDRHWHSKCLKCSDCHTPLAERCFSRGESVYCKDDFFKRFGTKCAACQLGIPPTQVVRRAQDFVYHLHCFACVVCKRQLATGDEFYLMEDSRLVCKADYETAKQREAEATAKRPRTTITAKQLETLKSAYNTSPKPARHVREQLSSETGLDMRVVQVWFQNRRAKEKRLKKDAGRQRWGQYFRNMKRSRGGSKSDKDSVQEGQDSDAEVSFPDEPSLAEMGPANGLYGSLGEPTQALGRPSGALGNFSLEHGGLAGPEQYRELRPGSPYGVPPSPAAPQSLPGPQPLLSSLVYPDTSLGLVPSGAPGGPPPMRVLAGNGPSSDLSTGSSGGYPDFPASPASWLDEVDHAQF

SEQ ID NO: 46813 - protein, 397 aa, Homo sapiens
  Payload ID: 9466
  Gene Symbol: LHX3
  Gene Name: LIM homeobox 3
  Uniprot ID: Q9UBR4
  ENSP ID: ENSP00000360813
MLLETGLERDRARPGAAAVCTLGGTREIPLCAGCDQHILDRFILKALDRHWHSKCLKCSDCHTPLAERCFSRGESVYCKDDFFKRFGTKCAACQLGIPPTQVVRRAQDFVYHLHCFACVVCKRQLATGDEFYLMEDSRLVCKADYETAKQREAEATAKRPRTTITAKQLETLKSAYNTSPKPARHVREQLSSETGLDMRVVQVWFQNRRAKEKRLKKDAGRQRWGQYFRNMKRSRGGSKSDKDSVQEGQDSDAEVSFPDEPSLAEMGPANGLYGSLGEPTQALGRPSGALGNFSLEHGGLAGPEQYRELRPGSPYGVPPSPAAPQSLPGPQPLLSSLVYPDTSLGLVPSGAPGGPPPMRVLAGNGPSSDLSTGSSGGYPDFPASPASWLDEVDHAQF

SEQ ID NO: 46814 - protein, 386 aa, Homo sapiens
  Payload ID: 9466
  Gene Symbol: LHX3
  Gene Name: LIM homeobox 3
  ENSP ID: ENSP00000483080
MTLNMKETRWGAPAPEIPLCAGCDQHILDRFILKALDRHWHSKCLKCSDCHTPLAERCFSRGESVYCKDDFFKRFGTKCAACQLGIPPTQVVRRAQDFVYHLHCFACVVCKRQLATGDEFYLMEDSRLVCKADYETAKQREAEATAKRPRTTITAKQLETLKSAYNTSPKPARHVREQLSSETGLDMRVVQVWFQNRRAKEKRLKKDAGRQRWGQYFRNMKRSRGGSKSDKDSVQEGQDSDAEVSFPDEPSLAEMGPANGLYGSLGEPTQALGRPSGALGNFSLEHGGLAGPEQYRELRPGSPYGVPPSPAAPQSLPGPQPLLSSLVYPDTSLGLVPSGAPGGPPPMRVLAGNGPSSDLSTGSSGGYPDFPASPASWLDEVDHAQF

SEQ ID NO: 46815 - protein, 390 aa, Homo sapiens
  Payload ID: 9467
  Gene Symbol: LHX4
  Gene Name: LIM homeobox 4
  Uniprot ID: Q969G2
  ENSP ID: ENSP00000263726
MMQSATVPAEGAVKGLPEMLGVPMQQIPQCAGCNQHILDKFILKVLDRHWHSSCLKCADCQMQLADRCFSRAGSVYCKEDFFKRFGTKCTACQQGIPPTQVVRKAQDFVYHLHCFACIICNRQLATGDEFYLMEDGRLVCKEDYETAKQNDDSEAGAKRPRTTITAKQLETLKNAYKNSPKPARHVREQLSSETGLDMRVVQVWFQNRRAKEKRLKKDAGRHRWGQFYKSVKRSRGSSKQEKESSAEDCGVSDSELSFREDQILSELGHTNRIYGNVGDVTGGQLMNGSFSMDGTGQSYQDLRDGSPYGIPQSPSSISSLPSHAPLLNGLDYTVDSNLGIIAHAGQGVSQTLRAMAGGPTSDISTGSSVGYPDFPTSPGSWLDEMDHPPF

SEQ ID NO: 46816 - protein, 151 aa, Homo sapiens
  Payload ID: 9467
  Gene Symbol: LHX4
  Gene Name: LIM homeobox 4
  ENSP ID: ENSP00000452783
  MOD_RES (1)..(1): Any amino acid
XDSPVRWLQPAHPGQVHPEGPGQTLAQLLPQVCRLPDAAGGQVLLQGWERLLQGGLLQVSQNGASAQNARPASRVSPQPRWSARPRTLSTTCTALLASSATGSWPRGTNSTSWRTGGWCARKTTRQPSRTMTQRLELSGPGPPSQPSSWRH

SEQ ID NO: 46817 - protein, 402 aa, Homo sapiens
  Payload ID: 9468
  Gene Symbol: LHX5
  Gene Name: LIM homeobox 5
  Uniprot ID: Q9H2C1
  ENSP ID: ENSP00000261731
MMVHCAGCERPILDRFLLNVLDRAWHIKCVQCCECKTNLSEKCFSREGKLYCKNDFFRRFGTKCAGCAQGISPSDLVRKARSKVFHLNCFTCMVCNKQLSTGEELYVIDENKFVCKDDYLSSSSLKEGSLNSVSSCTDRSLSPDLQDALQDDPKETDNSTSSDKETANNENEEQNSGTKRRGPRTTIKAKQLETLKAAFAATPKPTRHIREQLAQETGLNMRVIQVWFQNRRSKERRMKQLSALGARRHAFFRSPRRMRPLGGRLDESEMLGSTPYTYYGDYQGDYYAPGSNYDFFAHGPPSQAQSPADSSFLAASGPGSTPLGALEPPLAGPHAADNPRFTDMISHPDTPSPEPGLPGTLHPMPGEVFSGGPSPPFPMSGTSGYSGPLSHPNPELNEAAVW

SEQ ID NO: 46818 - protein, 377 aa, Homo sapiens
  Payload ID: 9469
  Gene Symbol: LHX6
  Gene Name: LIM homeobox 6
  Uniprot ID: Q9UPM6
  ENSP ID: ENSP00000340137
MYWKHENAAPALPEGCRLPAEGGPATDQVMAQPGSGCKATTRCLEGTAPPAMAQSDAEALAGALDKDEGQASPCTPSTPSVCSPPSAASSVPSAGKNICSSCGLEILDRYLLKVNNLIWHVRCLECSVCRTSLRQQNSCYIKNKEIFCKMDYFSRFGTKCARCGRQIYASDWVRRARGNAYHLACFACFSCKRQLSTGEEFGLVEEKVLCRIHYDTMIENLKRAAENGNGLTLEGAVPSEQDSQPKPAKRARTSFTAEQLQVMQAQFAQDNNPDAQTLQKLADMTGLSRRVIQVWFQNCRARHKKHTPQHPVPPSGAPPSRLPSALSDDIHYTPFSSPERARMVTLHGYIESHPFSVLTLPALPHLPVGAPQLPLSR

SEQ ID NO: 46819 - protein, 348 aa, Homo sapiens
  Payload ID: 9469
  Gene Symbol: LHX6
  Gene Name: LIM homeobox 6
  Uniprot ID: Q9UPM6
  ENSP ID: ENSP00000362859
MAQPGSGCKATTRCLEGTAPPAMAQSDAEALAGALDKDEGQASPCTPSTPSVCSPPSAASSVPSAGKNICSSCGLEILDRYLLKVNNLIWHVRCLECSVCRTSLRQQNSCYIKNKEIFCKMDYFSRFGTKCARCGRQIYASDWVRRARGNAYHLACFACFSCKRQLSTGEEFGLVEEKVLCRIHYDTMIENLKRAAENGNGLTLEGAVPSEQDSQPKPAKRARTSFTAEQLQVMQAQFAQDNNPDAQTLQKLADMTGLSRRVIQVWFQNCRARHKKHTPQHPVPPSGAPPSRLPSALSDDIHYTPFSSPERARMVTLHGYIESHPFSVLTLPALPHLPVGAPQLPLSR

SEQ ID NO: 46820 - protein, 363 aa, Homo sapiens
  Payload ID: 9469
  Gene Symbol: LHX6
  Gene Name: LIM homeobox 6
  Uniprot ID: Q9UPM6
  ENSP ID: ENSP00000362860
MAQPGSGCKATTRCLEGTAPPAMAQSDAEALAGALDKDEGQASPCTPSTPSVCSPPSAASSVPSAGKNICSSCGLEILDRYLLKVNNLIWHVRCLECSVCRTSLRQQNSCYIKNKEIFCKMDYFSRFGTKCARCGRQIYASDWVRRARGNAYHLACFACFSCKRQLSTGEEFGLVEEKVLCRIHYDTMIENLKRAAENGNGLTLEGAVPSEQDSQPKPAKRARTSFTAEQLQVMQAQFAQDNNPDAQTLQKLADMTGLSRRVIQVWFQNCRARHKKHTPQHPVPPSGAPPSRLPSALSDDIHYTPFSSPERARMVTLHGYIESQVQCGQVHCRLPYTAPPVHLKADMDGPLSNRGEKVILFQY

SEQ ID NO: 46821 - protein, 392 aa, Homo sapiens
  Payload ID: 9469
  Gene Symbol: LHX6
  Gene Name: LIM homeobox 6
  Uniprot ID: Q9UPM6
  ENSP ID: ENSP00000377854
MYWKHENAAPALPEGCRLPAEGGPATDQVMAQPGSGCKATTRCLEGTAPPAMAQSDAEALAGALDKDEGQASPCTPSTPSVCSPPSAASSVPSAGKNICSSCGLEILDRYLLKVNNLIWHVRCLECSVCRTSLRQQNSCYIKNKEIFCKMDYFSRFGTKCARCGRQIYASDWVRRARGNAYHLACFACFSCKRQLSTGEEFGLVEEKVLCRIHYDTMIENLKRAAENGNGLTLEGAVPSEQDSQPKPAKRARTSFTAEQLQVMQAQFAQDNNPDAQTLQKLADMTGLSRRVIQVWFQNCRARHKKHTPQHPVPPSGAPPSRLPSALSDDIHYTPFSSPERARMVTLHGYIESQVQCGQVHCRLPYTAPPVHLKADMDGPLSNRGEKVILFQY

SEQ ID NO: 46822 - protein, 366 aa, Homo sapiens
  Payload ID: 9469
  Gene Symbol: LHX6
  Gene Name: LIM homeobox 6
  Uniprot ID: Q9UPM6
  ENSP ID: ENSP00000441464
MRRGLCRRSAENPDAGPVMAQPGSGCKATTRCLEGTAPPAMAQSDAEALAGALDKDEGQASPCTPSTPSVCSPPSAASSVPSAGKNICSSCGLEILDRYLLKVNNLIWHVRCLECSVCRTSLRQQNSCYIKNKEIFCKMDYFSRFGTKCARCGRQIYASDWVRRARGNAYHLACFACFSCKRQLSTGEEFGLVEEKVLCRIHYDTMIENLKRAAENGNGLTLEGAVPSEQDSQPKPAKRARTSFTAEQLQVMQAQFAQDNNPDAQTLQKLADMTGLSRRVIQVWFQNCRARHKKHTPQHPVPPSGAPPSRLPSALSDDIHYTPFSSPERARMVTLHGYIESHPFSVLTLPALPHLPVGAPQLPLSR

SEQ ID NO: 46823 - protein, 35 aa, Homo sapiens
  Payload ID: 9469
  Gene Symbol: LHX6
  Gene Name: LIM homeobox 6
  ENSP ID: ENSP00000452811
MVTLHGYIESHPFSVLTLPALPHLPVGAPQLPLSR

SEQ ID NO: 46824 - protein, 33 aa, Homo sapiens
  Payload ID: 9469
  Gene Symbol: LHX6
  Gene Name: LIM homeobox 6
  ENSP ID: ENSP00000453606
MAQPGSGCKATTRCLEGTAPPAMAQSDAEALAG

SEQ ID NO: 46825 - protein, 50 aa, Homo sapiens
  Payload ID: 9469
  Gene Symbol: LHX6
  Gene Name: LIM homeobox 6
  ENSP ID: ENSP00000453798
MVTLHGYIESQVQCGQVHCRLPYTAPPVHLKADMDGPLSNRGEKVILFQY

SEQ ID NO: 46826 - protein, 176 aa, Homo sapiens
  Payload ID: 9469
  Gene Symbol: LHX6
  Gene Name: LIM homeobox 6
  Uniprot ID: Q9UPM6
  ENSP ID: ENSP00000475927
MIENLKRAAENGNGLTLEGAVPSEQDSQPKPAKRARTSFTAEQLQVMQAQFAQDNNPDAQTLQKLADMTGLSRRVIQVWFQNCRARHKKHTPQHPVPPSGAPPSRLPSALSDDIHYTPFSSPERARMVTLHGYIESQVQCGQVHCRLPYTAPPVHLKADMDGPLSNRGEKVILFQY

SEQ ID NO: 46827 - protein, 356 aa, Homo sapiens
  Payload ID: 9470
  Gene Symbol: LHX8
  Gene Name: LIM homeobox 8
  Uniprot ID: Q68G74
  ENSP ID: ENSP00000294638
MQILSRCQGLMSEECGRTTALAAGRTRKGAGEEGLVSPEGAGDEDSCSSSAPLSPSSSPRSMASGSGCPPGKCVCNSCGLEIVDKYLLKVNDLCWHVRCLSCSVCRTSLGRHTSCYIKDKDIFCKLDYFRRYGTRCSRCGRHIHSTDWVRRAKGNVYHLACFACFSCKRQLSTGEEFALVEEKVLCRVHYDCMLDNLKREVENGNGISVEGALLTEQDVNHPKPAKRARTSFTADQLQVMQAQFAQDNNPDAQTLQKLAERTGLSRRVIQVWFQNCRARHKKHVSPNHSSSTPVTAVPPSRLSPPMLEEMAYSAYVPQDGTMLTALHSYMDAHSPTTLGLQPLLPHSMTQLPISHT

SEQ ID NO: 46828 - protein, 346 aa, Homo sapiens
  Payload ID: 9470
  Gene Symbol: LHX8
  Gene Name: LIM homeobox 8
  Uniprot ID: Q68G74
  ENSP ID: ENSP00000348597
MSEECGRTTALAAGRTRKGAGEEGLVSPEGAGDEDSCSSSAPLSPSSSPRSMASGSGCPPGKCVCNSCGLEIVDKYLLKVNDLCWHVRCLSCSVCRTSLGRHTSCYIKDKDIFCKLDYFRRYGTRCSRCGRHIHSTDWVRRAKGNVYHLACFACFSCKRQLSTGEEFALVEEKVLCRVHYDCMLDNLKREVENGNGISVEGALLTEQDVNHPKPAKRARTSFTADQLQVMQAQFAQDNNPDAQTLQKLAERTGLSRRVIQVWFQNCRARHKKHVSPNHSSSTPVTAVPPSRLSPPMLEEMAYSAYVPQDGTMLTALHSYMDAHSPTTLGLQPLLPHSMTQLPISHT

SEQ ID NO: 46829 - protein, 397 aa, Homo sapiens
  Payload ID: 9471
  Gene Symbol: LHX9
  Gene Name: LIM homeobox 9
  Uniprot ID: Q9NQ69
  ENSP ID: ENSP00000356357
MEIVGCRAEDNSCPFRPPAMLFHGISGGHIQGIMEEMERRSKTEARLAKGAQLNGRDAGMPPLSPEKPALCAGCGGKISDRYYLLAVDKQWHLRCLKCCECKLALESELTCFAKDGSIYCKEDYYRRFSVQRCARCHLGISASEMVMRARDSVYHLSCFTCSTCNKTLTTGDHFGMKDSLVYCRAHFETLLQGEYPPQLSYTELAAKSGGLALPYFNGTGTVQKGRPRKRKSPALGVDIVNYNSGCNENEADHLDRDQQPYPPSQKTKRMRTSFKHHQLRTMKSYFAINHNPDAKDLKQLAQKTGLTKRVLQVWFQNARAKFRRNLLRQENGGVDKADGTSLPAPPSADSGALTPPGTATTLTDLTNPTITVVTSVTSNMDSHESGSPSQTTLTNLF

SEQ ID NO: 46830 - protein, 54 aa, Homo sapiens
  Payload ID: 9471
  Gene Symbol: LHX9
  Gene Name: LIM homeobox 9
  ENSP ID: ENSP00000356358
MLFHGISGGHIQGIMEEMERRSKTEARLAKGAQLNGRDAASPRRGSAAPRASWA

SEQ ID NO: 46831 - protein, 388 aa, Homo sapiens
  Payload ID: 9471
  Gene Symbol: LHX9
  Gene Name: LIM homeobox 9
  Uniprot ID: Q9NQ69
  ENSP ID: ENSP00000356360
MLNGTTLEAAMLFHGISGGHIQGIMEEMERRSKTEARLAKGAQLNGRDAGMPPLSPEKPALCAGCGGKISDRYYLLAVDKQWHLRCLKCCECKLALESELTCFAKDGSIYCKEDYYRRFSVQRCARCHLGISASEMVMRARDSVYHLSCFTCSTCNKTLTTGDHFGMKDSLVYCRAHFETLLQGEYPPQLSYTELAAKSGGLALPYFNGTGTVQKGRPRKRKSPALGVDIVNYNSGCNENEADHLDRDQQPYPPSQKTKRMRTSFKHHQLRTMKSYFAINHNPDAKDLKQLAQKTGLTKRVLQVWFQNARAKFRRNLLRQENGGVDKADGTSLPAPPSADSGALTPPGTATTLTDLTNPTITVVTSVTSNMDSHESGSPSQTTLTNLF

SEQ ID NO: 46832 - protein, 321 aa, Homo sapiens
  Payload ID: 9471
  Gene Symbol: LHX9
  Gene Name: LIM homeobox 9
  Uniprot ID: Q9NQ69
  ENSP ID: ENSP00000356361
MLNGTTLEAAMLFHGISGGHIQGIMEEMERRSKTEARLAKGAQLNGRDAGMPPLSPEKPALCAGCGGKISDRYYLLAVDKQWHLRCLKCCECKLALESELTCFAKDGSIYCKEDYYRRFSVQRCARCHLGISASEMVMRARDSVYHLSCFTCSTCNKTLTTGDHFGMKDSLVYCRAHFETLLQGEYPPQLSYTELAAKSGGLALPYFNGTGTVQKGRPRKRKSPALGVDIVNYNSGCNENEADHLDRDQQPYPPSQKTKRMRTSFKHHQLRTMKSYFAINHNPDAKDLKQLAQKTGLTKRVLQGEQILGHYSQTSRRLKIP

SEQ ID NO: 46833 - protein, 336 aa, Homo sapiens
  Payload ID: 9471
  Gene Symbol: LHX9
  Gene Name: LIM homeobox 9
  ENSP ID: ENSP00000453064
MQTLQTPSPLRMKPASSRVSGPQEAMLFHGISGGHIQGIMEEMERRSKTEARLAKGAQLNGRDAGMPPLSPEKPALCAGCGGKISDRYYLLAVDKQWHLRCLKCCECKLALESELTCFAKDGSIYCKEDYYRRFSVQRCARCHLGISASEMVMRARDSVYHLSCFTCSTCNKTLTTGDHFGMKDSLVYCRAHFETLLQGEYPPQLSYTELAAKSGGLALPYFNGTGTVQKGRPRKRKSPALGVDIVNYNSGCNENEADHLDRDQQPYPPSQKTKRMRTSFKHHQLRTMKSYFAINHNPDAKDLKQLAQKTGLTKRVLQGEQILGHYSQTSRRLKIP

SEQ ID NO: 46834 - protein, 26 aa, Homo sapiens
  Payload ID: 9471
  Gene Symbol: LHX9
  Gene Name: LIM homeobox 9
  ENSP ID: ENSP00000482898
MLFHGISGGHIQGIMEEMERRSKTEA

SEQ ID NO: 46835 - protein, 37 aa, Homo sapiens
  Payload ID: 9471
  Gene Symbol: LHX9
  Gene Name: LIM homeobox 9
  ENSP ID: ENSP00000483170
MLFHGISGGHIQGIMEEMERRSKTEARLAKGAQLNGR

SEQ ID NO: 46836 - protein, 382 aa, Homo sapiens
  Payload ID: 9472
  Gene Symbol: LMX1A
  Gene Name: LIM homeobox transcription factor 1, alpha
  Uniprot ID: Q8TE12
  ENSP ID: ENSP00000294816
MLDGLKMEENFQSAIDTSASFSSLLGRAVSPKSVCEGCQRVILDRFLLRLNDSFWHEQCVQCASCKEPLETTCFYRDKKLYCKYDYEKLFAVKCGGCFEAIAPNEFVMRAQKSVYHLSCFCCCVCERQLQKGDEFVLKEGQLLCKGDYEKERELLSLVSPAASDSGKSDDEESLCKSAHGAGKGTAEEGKDHKRPKRPRTILTTQQRRAFKASFEVSSKPCRKVRETLAAETGLSVRVVQVWFQNQRAKMKKLARRQQQQQQDQQNTQRLSSAQTNGGGSAGMEGIMNPYTALPTPQQLLAIEQSVYSSDPFRQGLTPPQMPGDHMHPYGAEPLFHDLDSDDTSLSNLGDCFLATSEAGPLQSRVGNPIDHLYSMQNSYFTS

SEQ ID NO: 46837 - protein, 382 aa, Homo sapiens; identical to SEQ ID NO: 46836
  Payload ID: 9472
  Gene Symbol: LMX1A
  Gene Name: LIM homeobox transcription factor 1, alpha
  Uniprot ID: Q8TE12
  ENSP ID: ENSP00000340226

SEQ ID NO: 46838 - protein, 382 aa, Homo sapiens; identical to SEQ ID NO: 46836
  Payload ID: 9472
  Gene Symbol: LMX1A
  Gene Name: LIM homeobox transcription factor 1, alpha
  Uniprot ID: Q8TE12
  ENSP ID: ENSP00000356868

SEQ ID NO: 46839 - protein, 406 aa, Homo sapiens
  Payload ID: 9473
  Gene Symbol: LMX1B
  Gene Name: LIM homeobox transcription factor 1, beta
  Uniprot ID: O60663
  ENSP ID: ENSP00000347684
MDIATGPESLERCFPRGQTDCAKMLDGIKMEEHALRPGPATLGVLLGSDCPHPAVCEGCQRPISDRFLMRVNESSWHEECLQCAACQQALTTSCYFRDRKLYCKQDYQQLFAAKCSGCMEKIAPTEFVMRALECVYHLGCFCCCVCERQLRKGDEFVLKEGQLLCKGDYEKEKDLLSSVSPDESDSVKSEDEDGDMKPAKGQGSQSKGSGDDGKDPRRPKRPRTILTTQQRRAFKASFEVSSKPCRKVRETLAAETGLSVRVVQVWFQNQRAKMKKLARRHQQQQEQQNSQRLGQGEPGPGQGLGQEVLSSRMEGMMASYTPLAPPQQQIVAMEQSPYGSSDPFQQGLTPPQMPGNDSIFHDIDSDTSLTSLSDCFLGSSDVGSLQARVGNPIDRLYSMQSSYFAS

SEQ ID NO: 46840 - protein, 402 aa, Homo sapiens
  Payload ID: 9473
  Gene Symbol: LMX1B
  Gene Name: LIM homeobox transcription factor 1, beta
  Uniprot ID: O60663
  ENSP ID: ENSP00000362573
MDIATGPESLERCFPRGQTDCAKMLDGIKMEEHALRPGPATLGVLLGSDCPHPAVCEGCQRPISDRFLMRVNESSWHEECLQCAACQQALTTSCYFRDRKLYCKQDYQQLFAAKCSGCMEKIAPTEFVMRALECVYHLGCFCCCVCERQLRKGDEFVLKEGQLLCKGDYEKEKDLLSSVSPDESDSVKSEDEDGDMKPAKGQGSQSKGSGDDGKDPRRPKRPRTILTTQQRRAFKASFEVSSKPCRKVRETLAAETGLSVRVVQVWFQNQRAKMKKLARRHQQQQEQQNSQRLGQEVLSSRMEGMMASYTPLAPPQQQIVAMEQSPYGSSDPFQQGLTPPQMPGDHMNPYGNDSIFHDIDSDTSLTSLSDCFLGSSDVGSLQARVGNPIDRLYSMQSSYFAS

SEQ ID NO: 46841 - protein, 395 aa, Homo sapiens
  Payload ID: 9473
  Gene Symbol: LMX1B
  Gene Name: LIM homeobox transcription factor 1, beta
  Uniprot ID: O60663
  ENSP ID: ENSP00000436930
MDIATGPESLERCFPRGQTDCAKMLDGIKMEEHALRPGPATLGVLLGSDCPHPAVCEGCQRPISDRFLMRVNESSWHEECLQCAACQQALTTSCYFRDRKLYCKQDYQQLFAAKCSGCMEKIAPTEFVMRALECVYHLGCFCCCVCERQLRKGDEFVLKEGQLLCKGDYEKEKDLLSSVSPDESDSVKSEDEDGDMKPAKGQGSQSKGSGDDGKDPRRPKRPRTILTTQQRRAFKASFEVSSKPCRKVRETLAAETGLSVRVVQVWFQNQRAKMKKLARRHQQQQEQQNSQRLGQEVLSSRMEGMMASYTPLAPPQQQIVAMEQSPYGSSDPFQQGLTPPQMPGNDSIFHDIDSDTSLTSLSDCFLGSSDVGSLQARVGNPIDRLYSMQSSYFAS

SEQ ID NO: 46842 - protein, 383 aa, Homo sapiens
  Payload ID: 9473
  Gene Symbol: LMX1B
  Gene Name: LIM homeobox transcription factor 1, beta
  ENSP ID: ENSP00000453580
MLDGIKMEEHALRPGPATLGVLLGSDCPHPAVCEGCQRPISDRFLMRVNESSWHEECLQCAACQQALTTSCYFRDRKLYCKQDYQQLFAAKCSGCMEKIAPTEFVMRALECVYHLGCFCCCVCERQLRKGDEFVLKEGQLLCKGDYEKEKDLLSSVSPDESDSVKSEDEDGDMKPAKGQGSQSKGSGDDGKDPRRPKRPRTILTTQQRRAFKASFEVSSKPCRKVRETLAAETGLSVRVVQVWFQNQRAKMKKLARRHQQQQEQQNSQRLGQGEPGPGQGLGQEVLSSRMEGMMASYTPLAPPQQQIVAMEQSPYGSSDPFQQGLTPPQMPGNDSIFHDIDSDTSLTSLSDCFLGSSDVGSLQARVGNPIDRLYSMQSSYFAS

SEQ ID NO: 46843 - protein, 282 aa, Homo sapiens
  Payload ID: 9474
  Gene Symbol: LIX1
  Gene Name: limb and CNS expressed 1
  Uniprot ID: Q8N485
  ENSP ID: ENSP00000274382
MDRTLESLRHIIAQVLPHRDPALVFKDLNVVSMLQEFWESKQQQKAAFPSEGVVVYESLPAPGPPFVSYVTLPGGSCFGNFQCCLSRAEARRDAAKVALINSLFNELPSRRITKEFIMESVQEAVASTSGTLDDADDPSTSVGAYHYMLESNMGKTMLEFQELMTIFQLLHWNGSLKALRETKCSRQEVISYYSQYSLDEKMRSHMALDWIMKERDSPGIVSQELRMALRQLEEARKAGQELRFYKEKKEILSLALTQICSDPDTSSPSDDQLSLTALCGYH

SEQ ID NO: 46844 - protein, 63 aa, Homo sapiens
  Payload ID: 9474
  Gene Symbol: LIX1
  Gene Name: limb and CNS expressed 1
  ENSP ID: ENSP00000427469
MHKVNVVSMLQEFWESKQQQKAAFPSEGVVVYESLPAPGPPFVSYVTLPGGSCFGNFQCCLSR

SEQ ID NO: 46845 - protein, 337 aa, Homo sapiens
  Payload ID: 9475
  Gene Symbol: LIX1L
  Gene Name: limb and CNS expressed 1 like
  Uniprot ID: Q8IVB5
  ENSP ID: ENSP00000474487
METMRAQRLQPGVGTSGRGTLRALRPGVTGAAAATATPPAGPPPAPPPPAPPPPPLLLSGAPGLPLPPGAAGSPAVLREAVEAVVRSFAKHTQGYGRVNVVEALQEFWQMKQSRGADLKNGALVVYEMVPSNSPPYVCYVTLPGGSCFGSFQFCPTKAEARRSAAKIALMNSVFNEHPSRRITDEFIEKSVSEALASFNGNREEADNPNTGIGAFRFMLESNKGKSMLEFQELMTVFQLLHWNGSLKAMRERQCSRQEVLAHYSHRALDDDIRHQMALDWVSREQSVPGALSRELASTERELDEARLAGKELRFHKEKKDILVLAAGQLGNMHSSNC

SEQ ID NO: 46846 - protein, 105 aa, Homo sapiens
  Payload ID: 9476
  Gene Symbol: LBH
  Gene Name: limb bud and heart development
  Uniprot ID: Q53QV2
  ENSP ID: ENSP00000378733
MSIYFPIHCPDYLRSAKMTEVMMNTQPMEEIGLSPRKDGLSYQIFPDPSDFDRCCKLKDRLPSIVVEPTEGEVESGELRWPPEEFLVQEDEQDNCEETAKENKEQ

SEQ ID NO: 46847 - protein, 48 aa, Homo sapiens
  Payload ID: 9476
  Gene Symbol: LBH
  Gene Name: limb bud and heart development
  ENSP ID: ENSP00000384443
MSIYFPIHCPDYLRSAKMTEVMMNTQPMEEIGLSPRKDGLSYQDCEEP

SEQ ID NO: 46848 - protein, 52 aa, Homo sapiens
  Payload ID: 9476
  Gene Symbol: LBH
  Gene Name: limb bud and heart development
  ENSP ID: ENSP00000385409
MSIYFPIHCPDYLRSAKMTEVMMNTQPMEEIGLSPRKDGLSYQVNLPRPVRF

SEQ ID NO: 46849 - protein, 111 aa, Homo sapiens
  Payload ID: 9476
  Gene Symbol: LBH
  Gene Name: limb bud and heart development
  ENSP ID: ENSP00000385703
MQVSTSRPAAAGLSCPDYLRSAKMTEVMMNTQPMEEIGLSPRKDGLSYQIFPDPSDFDRCCKLKDRLPSIVVEPTEGEVESGELRWPPEEFLVQEDEQDNCEETAKENKEQ

SEQ ID NO: 46850 - protein, 88 aa, Homo sapiens
  Payload ID: 9476
  Gene Symbol: LBH
  Gene Name: limb bud and heart development
  ENSP ID: ENSP00000386106
MTEVMMNTQPMEEIGLSPRKDGLSYQIFPDPSDFDRCCKLKDRLPSIVVEPTEGEVESGELRWPPEEFLVQEDEQDNCEETAKENKEQ

SEQ ID NO: 46851 - protein, 43 aa, Homo sapiens
  Payload ID: 9476
  Gene Symbol: LBH
  Gene Name: limb bud and heart development
  ENSP ID: ENSP00000392167
MSIYFPIHCPDYLRSAKMTEVMMNTQPMEEIGLSPRKDGLSYQ

SEQ ID NO: 46852 - protein, 490 aa, Homo sapiens
  Payload ID: 9477
  Gene Symbol: LMBR1
  Gene Name: limb development membrane protein 1
  Uniprot ID: Q8WVP7
  ENSP ID: ENSP00000326604
MEGQDEVSAREQHFHSQVRESTICFLLFAILYVVSYFIITRYKRKSDEQEDEDAIVNRISLFLSTFTLAVSAGAVLLLPFSIISNEILLSFPQNYYIQWLNGSLIHGLWNLASLFSNLCLFVLMPFAFFFLESEGFAGLKKGIRARILETLVMLLLLALLILGIVWVASALIDNDAASMESLYDLWEFYLPYLYSCISLMGCLLLLLCTPVGLSRMFTVMGQLLVKPTILEDLDEQIYIITLEEEALQRRLNGLSSSVEYNIMELEQELENVKTLKTKLERRKKASAWERNLVYPAVMVLLLIETSISVLLVACNILCLLVDETAMPKGTRGPGIGNASLSTFGFVGAALEIILIFYLMVSSVVGFYSLRFFGNFTPKKDDTTMTKIIGNCVSILVLSSALPVMSRTLGITRFDLLGDFGRFNWLGNFYIVLSYNLLFAIVTTLCLVRKFTSAVREELFKALGLHKLHLPNTSRDSETAKPSVNGHQKAL

SEQ ID NO: 46853 - protein, 284 aa, Homo sapiens
  Payload ID: 9477
  Gene Symbol: LMBR1
  Gene Name: limb development membrane protein 1
  ENSP ID: ENSP00000352392
MLLLLALLILGIVWVASALIDNDAASMESLYDLWEFYLPYLYSCISLMGCLLLLLCTPVGLSRMFTVMGQLLVKPTILEDLDEQIYIITLEEEALQRRLNGLSSSVEYNIMELEQELENVKTLKTKLERRKKASAWERNLVYPAVMVLLLIETSISVLLVACNILCLLVDETAMPKGTRGPGIGNASLSTFGFVGAALEIILIFYLMVSSVVGFYSLRFFGNFTPKKDDTTMTKIIGNCVSILVLSSALPVMSRTLGLHKLHLPNTSRDSETAKPSVNGHQKAL

SEQ ID NO: 46854 - protein, 38 aa, Homo sapiens
  Payload ID: 9477
  Gene Symbol: LMBR1
  Gene Name: limb development membrane protein 1
  ENSP ID: ENSP00000392557
MEGQDEVSAREQHFHSQVRESTMNKKMKMPSSTGFRCF

SEQ ID NO: 46855 - protein, 63 aa, Homo sapiens
  Payload ID: 9477
  Gene Symbol: LMBR1
  Gene Name: limb development membrane protein 1
  ENSP ID: ENSP00000393928
MEGQDEVSAREQHFHSQVRESTICFLLFAILYVVSYFIITRYKRKSDEQEDEDAIVNRISYVF

SEQ ID NO: 46856 - protein, 77 aa, Homo sapiens
  Payload ID: 9477
  Gene Symbol: LMBR1
  Gene Name: limb development membrane protein 1
  ENSP ID: ENSP00000395754
MEGQDEVSAREQHFHSQVRESTICFLLFAILYVVSYFIITRYKRKSGNPSPHFRDFGHASSSCVTHSWDSVGSFSTH

SEQ ID NO: 46857 - protein, 48 aa, Homo sapiens
  Payload ID: 9477
  Gene Symbol: LMBR1
  Gene Name: limb development membrane protein 1
  ENSP ID: ENSP00000397698
MEGQDEVSAREQHFHSQVRESTICFLLFAILYVVSYFIITRYKRKSGK

SEQ ID NO: 46858 - protein, 45 aa, Homo sapiens
  Payload ID: 9477
  Gene Symbol: LMBR1
  Gene Name: limb development membrane protein 1
  ENSP ID: ENSP00000403052
GLWNLASLFSNLCLFVLMPFAFFFLESEGFAGLKKEGKMSRQNLV

SEQ ID NO: 46859 - protein, 529 aa, Homo sapiens
  Payload ID: 9477
  Gene Symbol: LMBR1
  Gene Name: limb development membrane protein 1
  ENSP ID: ENSP00000408256
GQDEVSAREQHFHSQVRESTICFLLFAILYVVSYFIITRYKRKSDEQEDEDAIVNRISLFLSTFTLAVSAGAVLLLPFSIISNEILLSFPQNYYIQWLNGSLIHGLWNLASLFSNLCLFVLMPFAFFFLESEGFAGLKKGIRARILETLVMLLLLALLILGIVWVASALIDNDAASMESLYDLWEFYLPYLYSCISLMGCLLLLLCTPVGLSRMFTVMGQLLVKPTILEDLDEQIYIITLEEEALQRRLNVGMLCAGNPEVATGRQVPEEQAGQLLLGKWIQEGGDMIANPRLSSSVEYNIMELEQELENVKTLKTKLERRKKASAWERNLVYPAVMVLLLIETSISVLLVACNILCLLVDETAMPKGTRGPGIGNASLSTFGFVGAALEIILIFYLMVSSVVGFYSLRFFGNFTPKKDDTTMTKIIGNCVSILVLSSALPVMSRTLGITRFDLLGDFGRFNWLGNFYIVLSYNLLFAIVTTLCLVRKFTSAVREELFKALGLHKLHLPNTSRDSETAKPSVNGHQKAL

SEQ ID NO: 46860 - protein, 47 aa, Homo sapiens
  Payload ID: 9477
  Gene Symbol: LMBR1
  Gene Name: limb development membrane protein 1
  ENSP ID: ENSP00000413539
MEGQDEVSAREQHFHSQVRESTVVFEHVHSRSVSWGCFAFTLLNHQQ

SEQ ID NO: 46861 - protein, 52 aa, Homo sapiens
  Payload ID: 9477
  Gene Symbol: LMBR1
  Gene Name: limb development membrane protein 1
  ENSP ID: ENSP00000414795
MEGQDEVSAREQHFHSQVRESTICFLLFAILYVVSYFIITRYKRKSGSPSVP

SEQ ID NO: 46862 - protein, 489 aa, Homo sapiens
  Payload ID: 9478
  Gene Symbol: LMBR1L
  Gene Name: limb development membrane protein 1-like
  Uniprot ID: Q6UX01
  ENSP ID: ENSP00000267102
MEAPDYEVLSVREQLFHERIRECIISTLLFATLYILCHIFLTRFKKPAEFTTVDDEDATVNKIALELCTFTLAIALGAVLLLPFSIISNEVLLSLPRNYYIQWLNGSLIHGLWNLVFLFSNLSLIFLMPFAYFFTESEGFAGSRKGVLGRVYETVVMLMLLTLLVLGMVWVASAIVDKNKANRESLYDFWEYYLPYLYSCISFLGVLLLLVCTPLGLARMFSVTGKLLVKPRLLEDLEEQLYCSAFEEAALTRRICNPTSCWLPLDMELLHRQVLALQTQRVLLEKRRKASAWQRNLGYPLAMLCLLVLTGLSVLIVAIHILELLIDEAAMPRGMQGTSLGQVSFSKLGSFGAVIQVVLIFYLMVSSVVGFYSSPLFRSLRPRWHDTAMTQIIGNCVCLLVLSSALPVFSRTLGLTRFDLLGDFGRFNWLGNFYIVFLYNAAFAGLTTLCLVKTFTAAVRAELIRAFGLDRLPLPVSGFPQASRKTQHQ

SEQ ID NO: 46863 - protein, 74 aa, Homo sapiens
  Payload ID: 9478
  Gene Symbol: LMBR1L
  Gene Name: limb development membrane protein 1-like
  ENSP ID: ENSP00000394677
MEAPDYEVLSVREQLFHERIRECIISTLLFATLYILCHIFLTRFKKPAEFTTVSSYKMGVTMSTYSIVWTKGDG

SEQ ID NO: 46864 - protein, 153 aa, Homo sapiens
  Payload ID: 9478
  Gene Symbol: LMBR1L
  Gene Name: limb development membrane protein 1-like
  ENSP ID: ENSP00000413785
MEAPDYEVLSVREQLFHERIRECIISTLLFATLYILCHIFLTRFKKPAEFTTGSSCAPLPWQLPWVLSCSCPSPSSAMRCCSPCLGTTTSSGSTAPSSMVCGSWKLLGASGTLFFSSPTCPSSSSCPLHISSLSLRALLAPERVSWAGSMRQW

SEQ ID NO: 46865 - protein, 141 aa, Homo sapiens
  Payload ID: 9478
  Gene Symbol: LMBR1L
  Gene Name: limb development membrane protein 1-like
  ENSP ID: ENSP00000446641
MKGRRRHTELDSRKEGRCRDGRREEPGDLISTLLFATLYILCHIFLTRFKKPAEFTTVDDEDATVNKIALELCTFTLAIALGAVLLLPFSIISNEVLLSLPRNYYIQWLNGSLIHGLWNLVFLFSNLSLIFLMPFAYFFTE

SEQ ID NO: 46866 - protein, 59 aa, Homo sapiens
  Payload ID: 9478
  Gene Symbol: LMBR1L
  Gene Name: limb development membrane protein 1-like
  ENSP ID: ENSP00000446718
MEAPDYEVLSVREQLFHERIRECIAGFPASQPFRGFPSEWSSQGFRGYLAAVPYALPAT

SEQ ID NO: 46867 - protein, 153 aa, Homo sapiens
  Payload ID: 9478
  Gene Symbol: LMBR1L
  Gene Name: limb development membrane protein 1-like
  ENSP ID: ENSP00000447240
MEAPDYEVLSVREQLFHERIRECIISTLLFATLYILCHIFLTRFKKPAEFTTVDDEDATVNKIALELCTFTLAIALGAVLLLPFSIISNEVLLSLPRNYYIQWLNGSLIHVCTPLGLARMFSVTGKLLVKPRLLEDLEEQLYCSAFEEAALTR

SEQ ID NO: 46868 - protein, 469 aa, Homo sapiens
  Payload ID: 9478
  Gene Symbol: LMBR1L
  Gene Name: limb development membrane protein 1-like
  Uniprot ID: Q6UX01
  ENSP ID: ENSP00000447329
MEAPDYEVLSVREQLFHERIRECIISTLLFATLYILCHIFLTRFKKPAEFTTVDDEDATVNKIALELCTFTLAIALGAVLLLPFSIISNEVLLSLPRNYYIQWLNGSLIHGLWNLVFLFSNLSLIFLMPFAYFFTESEGFAGSRKGVLGRVYETVVMLMLLTLLVLGMVWVASAIVDKNKANRESLYDFWEYYLPYLYSCISFLGVLLLLVCTPLGLARMFSVTGKLLVKPRLLEDLEEQLYCSAFEEAALTRRICNPTSCWLPLDMELLHRQVLALQTQRVLLEKRRKASAWQRNLGYPLAMLCLLVLTGLSVLIVAIHILELLIDEAAMPRGMQVVLIFYLMVSSVVGFYSSPLFRSLRPRWHDTAMTQIIGNCVCLLVLSSALPVFSRTLGLTRFDLLGDFGRFNWLGNFYIVFLYNAAFAGLTTLCLVKTFTAAVRAELIRAFGLDRLPLPVSGFPQASRKTQHQ

SEQ ID NO: 46869 - protein, 39 aa, Homo sapiens
  Payload ID: 9478
  Gene Symbol: LMBR1L
  Gene Name: limb development membrane protein 1-like
  ENSP ID: ENSP00000448128
  MOD_RES (1)..(1): Any amino acid
XCHIFLTRFKKPAEFTTVSSYKMGVTMSTYSIVWTKGDG

SEQ ID NO: 46870 - protein, 185 aa, Homo sapiens
  Payload ID: 9478
  Gene Symbol: LMBR1L
  Gene Name: limb development membrane protein 1-like
  ENSP ID: ENSP00000448147
  MOD_RES (1)..(1): Any amino acid
XKRRKASAWQRNLGYPLAMLCLLVLTGLSVLIVAIHILELLIDEAAMPRGMQVVLIFYLMVSSVVGFYSSPLFRSLRPRWHDTAMTQIIGNCVCLLVLSSALPVFSRTLGLTRFDLLGDFGRFNWLGNFYIVFLYNAAFAGLTTLCLVKTFTAAVRAELIRAFGLDRLPLPVSGFPQASRKTQHQ

SEQ ID NO: 46871 - protein, 125 aa, Homo sapiens
  Payload ID: 9478
  Gene Symbol: LMBR1L
  Gene Name: limb development membrane protein 1-like
  ENSP ID: ENSP00000448821
GLSVLIVAIHILELLIDEAAMPRGMQGTSLGQVSFSKLGSFGAVIQVVLIFYLMVSSVVGFYSSPLFRSLRPRWHDTAMTQIIGNCVCLLVLSSALPVFSRTLGLDRLPLPVSGFPQASRKTQHQ

SEQ ID NO: 46872 - protein, 74 aa, Homo sapiens; identical to SEQ ID NO: 46863
  Payload ID: 9478
  Gene Symbol: LMBR1L
  Gene Name: limb development membrane protein 1-like
  ENSP ID: ENSP00000448973

SEQ ID NO: 46873 - protein, 79 aa, Homo sapiens
  Payload ID: 9478
  Gene Symbol: LMBR1L
  Gene Name: limb development membrane protein 1-like
  ENSP ID: ENSP00000449103
MEAPDYEVLSVREQLFHERIRECIISTLLFATLYILCHIFLTRFKKPAEFTTGLWNLVFLFSNLSLIFLMPFAYFFTES

SEQ ID NO: 46874 - protein, 126 aa, Homo sapiens
  Payload ID: 9478
  Gene Symbol: LMBR1L
  Gene Name: limb development membrane protein 1-like
  ENSP ID: ENSP00000449633
MEAPDYEVLSVREQLFHERIRECIISTLLFATLYILCHIFLTRFKKPAEFTTVDDEDATVNKIALELCTFTLAIALGAVLLLPFSIISNEVLLSLPRNYYIQWLNGSLIHGLWNLVFLFSNLSLIF

SEQ ID NO: 46875 - protein, 49 aa, Homo sapiens
  Payload ID: 9478
  Gene Symbol: LMBR1L
  Gene Name: limb development membrane protein 1-like
  ENSP ID: ENSP00000450032
MEAPDYEVLSVREQLFHERIRECIARAVHLYPGNCPGCCPAPALLHHQQ

SEQ ID NO: 46876 - protein, 92 aa, Homo sapiens
  Payload ID: 9478
  Gene Symbol: LMBR1L
  Gene Name: limb development membrane protein 1-like
  ENSP ID: ENSP00000450362
AWQRNLGYPLAMLCLLVLTGLSVLIVAIHILELLIDEAAMPRGMQVVLILYPSGNPSLPLFSKPVSWDSRPSTSWTFYLMVSSVVGFYSSPL

SEQ ID NO: 46877 - protein, 345 aa, Homo sapiens
  Payload ID: 9479
  Gene Symbol: LSAMP
  Gene Name: limbic system-associated membrane protein
  ENSP ID: ENSP00000328455
LRLLCLLPTGLPVRSVDFNRGTDNITVRQGDTAILRCVVEDKNSKVAWLNRSGIIFAGHDKWSLDPRVELEKRHSLEYSLRIQKVDVYDEGSYTCSVQTQHEPKTSQVYLIVQVPPKISNISSDVTVNEGSNVTLVCMANGRPEPVITWRHLTPTGREFEGEEEYLEILGITREQSGKYECKAANEVSSADVKQVKVTVNYPPTITESKSNEATTGRQASLKCEASAVPAPDFEWYRDDTRINSANGLEIKSTEGQSSLTVTNVTEEHYGNYTCVAANKLGVTNASLVLFKRVLPTIPHPIQEIGTTVHFKQKGPGSVRGINGSISLAVPLWLLAASLLCLLSKC

SEQ ID NO: 46878 - protein, 205 aa, Homo sapiens
  Payload ID: 9479
  Gene Symbol: LSAMP
  Gene Name: limbic system-associated membrane protein
  ENSP ID: ENSP00000418506
MIVRLPQPCGTVSEKISSEVFSRNCAGGGSLRRKRKAGILEMVIFQLFHIHRSVSHGQQGLPVRSVDFNRGTDNITVRQGDTAILRCVVEDKNSKVAWLNRSGIIFAGHDKWSLDPRVELEKRHSLEYSLRIQKVDVYDEGSYTCSVQTQHEPKTSQVYLIVQVPPKISNISSDVTVNEGSNVTLVCMANGRPEPVITWRHLTPT

SEQ ID NO: 46879 - protein, 338 aa, Homo sapiens
  Payload ID: 9479
  Gene Symbol: LSAMP
  Gene Name: limbic system-associated membrane protein
  Uniprot ID: Q13449
  ENSP ID: ENSP00000419000
MVRRVQPDRKQLPLVLLRLLCLLPTGLPVRSVDFNRGTDNITVRQGDTAILRCVVEDKNSKVAWLNRSGIIFAGHDKWSLDPRVELEKRHSLEYSLRIQKVDVYDEGSYTCSVQTQHEPKTSQVYLIVQVPPKISNISSDVTVNEGSNVTLVCMANGRPEPVITWRHLTPTGREFEGEEEYLEILGITREQSGKYECKAANEVSSADVKQVKVTVNYPPTITESKSNEATTGRQASLKCEASAVPAPDFEWYRDDTRINSANGLEIKSTEGQSSLTVTNVTEEHYGNYTCVAANKLGVTNASLVLFRPGSVRGINGSISLAVPLWLLAASLLCLLSKC

SEQ ID NO: 46880 - protein, 288 aa, Homo sapiens [sequence omitted]

SEQ ID NO: 46881 - protein, 209 aa, Homo sapiens
  Payload ID: 9480
  Gene Symbol: LIN28A
  Gene Name: lin-28 homolog A (C. elegans)
  Uniprot ID: Q9H9Z2
  ENSP ID: ENSP00000254231
MGSVSNQQFAGGCAKAAEEAPEEAPEDAARAADEPQLLHGAGICKWFNVRMGFGFLSMTARAGVALDPPVDVFVHQSKLHMEGFRSLKEGEAVEFTFKKSAKGLESIRVTGPGGVFCIGSERRPKGKSMQKRRSKGDRCYNCGGLDHHAKECKLPPQPKKCHFCQSISHMVASCPLKAQQGPSAQGKPTYFREEEEEIHSPTLLPEAQN

SEQ ID NO: 46882 - protein, 209 aa, Homo sapiens; identical to SEQ ID NO: 46881
  Payload ID: 9480
  Gene Symbol: LIN28A
  Gene Name: lin-28 homolog A (C. elegans)
  Uniprot ID: Q9H9Z2
  ENSP ID: ENSP00000363314

SEQ ID NO: 46883 - protein, 250 aa, Homo sapiens
  Payload ID: 9481
  Gene Symbol: LIN28B
  Gene Name: lin-28 homolog B (C. elegans)
  Uniprot ID: Q6ZN17
  ENSP ID: ENSP00000344401
MAEGGASKGGGEEPGKLPEPAEEESQVLRGTGHCKWFNVRMGFGFISMINREGSPLDIPVDVFVHQSKLFMEGFRSLKEGEPVEFTFKKSSKGLESIRVTGPGGSPCLGSERRPKGKTLQKRKPKGDRCYNCGGLDHHAKECSLPPQPKKCHYCQSIMHMVANCPHKNVAQPPASSQGRQEAESQPCTSTLPREVGGGHGCTSPPFPQEARAEISERSGRSPQEASSTKSSIAPEEQSKKGPSVQKRKKT

SEQ ID NO: 46884 - protein, 246 aa, Homo sapiens
  Payload ID: 9482
  Gene Symbol: LIN37
  Gene Name: lin-37 DREAM MuvB core complex component
  Uniprot ID: Q96GY3
  ENSP ID: ENSP00000301159
MFPVKVKVEKSELEMAKARNQLDAVLQCLLEKSHMDRERLDEEAGKTPSDTHNKDCSIAATGKRPSARFPHQRRKKRREMDDGLAEGGPQRSNTYVIKLFDRSVDLAQFSENTPLYPICRAWMRNSPSVRERECSPSSPLPPLPEDEEGSEVTNSKSRDVYKLPPPTPPGPPGDACRSRIPSPLQPEMQGTPDDEPSEPEPSPSTLIYRNMQRWKRIRQRWKEASHRNQLRYSESMKILREMYERQ

SEQ ID NO: 46885 - protein, 19 aa, Homo sapiens
  Payload ID: 9482
  Gene Symbol: LIN37
  Gene Name: lin-37 DREAM MuvB core complex component
  ENSP ID: ENSP00000466160
MAKARNQLDAVLQCLLEKS

SEQ ID NO: 46886 - protein, 163 aa, Homo sapiens
  Payload ID: 9482
  Gene Symbol: LIN37
  Gene Name: lin-37 DREAM MuvB core complex component
  ENSP ID: ENSP00000466707
  MOD_RES (1)..(1): Any amino acid
XPSARFPHQRRKKRREMDDGLAEGGPQRSNTYVIKLFDRSVDLAQFSENTPLYPICRAWMRNSPSGSEVTNSKSRDVYKLPPPTPPGPPGDACRSRIPSPLQPEMQGTPDDEPSEPEPSPSTLIYRNMQRWKRIRQRWKEASHRNQLRYSESMKILREMYERQ

SEQ ID NO: 46887 - protein, 54 aa, Homo sapiens
  Payload ID: 9482
  Gene Symbol: LIN37
  Gene Name: lin-37 DREAM MuvB core complex component
  ENSP ID: ENSP00000469928
MFPVKVKVEKSELEMAKARNQLDAVLQCLLEKSHMDRERLDEEAGKTPSDTHNK

SEQ ID NO: 46888 - protein, 116 aa, Homo sapiens
  Payload ID: 9483
  Gene Symbol: LIN52
  Gene Name: lin-52 DREAM MuvB core complex component
  Uniprot ID: Q52LA3
  ENSP ID: ENSP00000451812
MGWKMASPTDGTDLEASLLSFEKLDRASPDLWPEQLPGVAEFAASFKSPITSSPPKWMAEIERDDIDMLKELGSLTTANLMEKVRGLQNLAYQLGLDESREMTRGKFLNILEKPKK

SEQ ID NO: 46889 - protein, 97 aa, Homo sapiens
  Payload ID: 9483
  Gene Symbol: LIN52
  Gene Name: lin-52 DREAM MuvB core complex component
  ENSP ID: ENSP00000452513
  MOD_RES (1)..(1): Any amino acid
XRDMGWKMASPTDGTDLEASLLSFEKLDRASPDLWPEQFLFFFLVPGVAEFAASFKSPITSSPPKWMAEIERDDIDMLKAREMTRGKFLNILEKPKK

SEQ ID NO: 46890 - protein, 749 aa, Homo sapiens
  Payload ID: 9484
  Gene Symbol: LIN54
  Gene Name: lin-54 DREAM MuvB core complex component
  Uniprot ID: Q6MZP7
  ENSP ID: ENSP00000341947
MEVVPAEVNSLLPEEIMDTGITLVDDDSIEAVIVSSPIPMETELEEIVNINSTGDSTATPISTEPITVYSNHTNQVAVNTTITKADSNTTVKPAFPSGLQKLGAQTPVTISANQIILNKVSQTSDLKLGNQTLKPDGQKLILTTLGKSGSPIVLALPHSQLPQAQKVTTQAQSGDAKLPPQQIKVVTIGGRPEVKPVIGVSALTPGSQLINTTTQPSVLQTQQLKTVQIAKKPRTPTSGPVITKLIFAKPINSKAVTGQTTQVSPPVIAGRVLSQSTPGTPSKTITISESGVIGSTLNSTTQTPNKIAISPLKSPNKAVKSTVQTITVGGVSTSQFKTIIPLATAPNVQQIQVPGSKFHYVRLVTATSASSSTQPVSQNPSTNTQPLQQAKPVVVNTTPVRMSVPIVSAQAVKQVVPKPINPTSQIVTTSQPQQRLIMPATPLPQIQPNLTNLPPGTVLAPAPGTGNVGYAVLPAQYVTQLQQSSYVSIASNSTFTGTSGIQTQARLPFNGIIPSESASRPRKPCNCTKSLCLKLYCDCFANGEFCNNCNCTNCYNNLEHENERQKAIKACLDRNPEAFKPKIGKGKEGESDRRHSKGCNCKRSGCLKNYCECYEAKIMCSSICKCIGCKNFEESPERKTLMHLADAAEVRVQQQTAAKTKLSSQISDLLTRPTPALNSGGGKLPFTFVTKEVAEATCNCLLAQAEQADKKGKSKAAAERMILEEFGRCLMSVINSAGKAKSDPCAMNC

SEQ ID NO: 46891 - protein, 528 aa, Homo sapiens
  Payload ID: 9484
  Gene Symbol: LIN54
  Gene Name: lin-54 DREAM MuvB core complex component
  Uniprot ID: Q6MZP7
  ENSP ID: ENSP00000398265
MEVVPAEIAKKPRTPTSGPVITKLIFAKPINSKAVTGQTTQVSPPVIAGRVLSQSTPGTPSKTITISESGVIGSTLNSTTQTPNKIAISPLKSPNKAVKSTVQTITVGGVSTSQFKTIIPLATAPNVQQIQVPGSKFHYVRLVTATSASSSTQPVSQNPSTNTQPLQQAKPVVVNTTPVRMSVPIVSAQAVKQVVPKPINPTSQIVTTSQPQQRLIMPATPLPQIQPNLTNLPPGTVLAPAPGTGNVGYAVLPAQYVTQLQQSSYVSIASNSTFTGTSGIQTQARLPFNGIIPSESASRPRKPCNCTKSLCLKLYCDCFANGEFCNNCNCTNCYNNLEHENERQKAIKACLDRNPEAFKPKIGKGKEGESDRRHSKGCNCKRSGCLKNYCECYEAKIMCSSICKCIGCKNFEESPERKTLMHLADAAEVRVQQQTAAKTKLSSQISDLLTRPTPALNSGGGKLPFTFVTKEVAEATCNCLLAQAEQADKKGKSKAAAERMILEEFGRCLMSVINSAGKAKSDPCAMNC

SEQ ID NO: 46892 - protein, 528 aa, Homo sapiens; identical to SEQ ID NO: 46891
  Payload ID: 9484
  Gene Symbol: LIN54
  Gene Name: lin-54 DREAM MuvB core complex component
  Uniprot ID: Q6MZP7
  ENSP ID: ENSP00000407139

SEQ ID NO: 46893 - protein, 528 aa, Homo sapiens; identical to SEQ ID NO: 46891
  Payload ID: 9484
  Gene Symbol: LIN54
  Gene Name: lin-54 DREAM MuvB core complex component
  Uniprot ID: Q6MZP7
  ENSP ID: ENSP00000421045

SEQ ID NO: 46894 - protein, 62 aa, Homo sapiens
  Payload ID: 9484
  Gene Symbol: LIN54
  Gene Name: lin-54 DREAM MuvB core complex component
  ENSP ID: ENSP00000421651
MEVVPAEIAKKPRTPTSGPVITKLIFAKPINSKAVTGQTTQVSPPVIAGFFHSLLPELHQRP

SEQ ID NO: 46895 - protein, 660 aa, Homo sapiens
  Payload ID: 9484
  Gene Symbol: LIN54
  Gene Name: lin-54 DREAM MuvB core complex component
  Uniprot ID: Q6MZP7
  ENSP ID: ENSP00000423475
MEVVPAEVNSLLPEEIMDTGITLVDDDSIEAVIVSSPIPMETELEEIVNINSTGDSTATPISTEPITVYSNHTNQVAVNTTITKADSNTTVKPAFPSGLQKLGAQTPVTISANQIILNKVSQTSDLKLGNQTLKPDGQKLILTTLGKSGSPIVLALPHSQLPQAQKVTTQAQSGDAKLPPQQIKVVTIGGRPEVKPVIGVSALTPGSQLINTTTQPSVLQTQQLKTVQAVKSTVQTITVGGVSTSQFKTIIPLATAPNVQQIQVPGSKFHYVRLVTATSASSSTQPVSQNPSTNTQPLQQAKPVVVNTTPVRMSVPIVSAQAVKQVVPKPINPTSQIVTTSQPQQRLIMPATPLPQIQPNLTNLPPGTVLAPAPGTGNVGYAVLPAQYVTQLQQSSYVSIASNSTFTGTSGIQTQARLPFNGIIPSESASRPRKPCNCTKSLCLKLYCDCFANGEFCNNCNCTNCYNNLEHENERQKAIKACLDRNPEAFKPKIGKGKEGESDRRHSKGCNCKRSGCLKNYCECYEAKIMCSSICKCIGCKNFEESPERKTLMHLADAAEVRVQQQTAAKTKLSSQISDLLTRPTPALNSGGGKLPFTFVTKEVAEATCNCLLAQAEQADKKGKSKAAAERMILEEFGRCLMSVINSAGKAKSDPCAMNC

SEQ ID NO: 46896 - protein, 749 aa, Homo sapiens; identical to SEQ ID NO: 46890
  Payload ID: 9484
  Gene Symbol: LIN54
  Gene Name: lin-54 DREAM MuvB core complex component
  Uniprot ID: Q6MZP7
  ENSP ID: ENSP00000425844

SEQ ID NO: 46897 - protein, 243 aa, Homo sapiens
  Payload ID: 9484
  Gene Symbol: LIN54
  Gene Name: lin-54 DREAM MuvB core complex component
  Uniprot ID: Q6MZP7
  ENSP ID: ENSP00000427413
MEVVPAEVNSLLPEEIMDTGITLVDDDSIEAVIVSSPIPMETELEEIVNINSTGDSTATPISTEPITVYSNHTNQVAVNTTITKADSNTTVKPAFPSGLQKLGAQTPVTISANQIILNKVSQTSDLKLGNQTLKPDGQKLILTTLGKSGSPIVLALPHSQLPQAQKVTTQAQSGDAKLPPQQIKVVTIGGRPEVKPVIGVSALTPGSQLINTTTQPSVLQTQQLKTVQVGFFHSLLPELHQRP

SEQ ID NO: 46898 - protein, 101 aa, Homo sapiens
  Payload ID: 9485
  Gene Symbol: LIN7A
  Gene Name: lin-7 homolog A (C. elegans)
  ENSP ID: ENSP00000261203
MLKPSVTSAPTADMATLTVVQPLTLDRDVARAIELLEKLQESGEVPVHKLQSLKKVLQSEFCTAIREVYQYMHETITVNGCPEFRARATAKVFSCVHCKRI

SEQ ID NO: 46899 - protein, 233 aa, Homo sapiens
  Payload ID: 9485
  Gene Symbol: LIN7A
  Gene Name: lin-7 homolog A (C. elegans)
  Uniprot ID: O14910
  ENSP ID: ENSP00000447488
MLKPSVTSAPTADMATLTVVQPLTLDRDVARAIELLEKLQESGEVPVHKLQSLKKVLQSEFCTAIREVYQYMHETITVNGCPEFRARATAKATVAAFAASEGHSHPRVVELPKTDEGLGFNVMGGKEQNSPIYISRIIPGGVAERHGGLKRGDQLLSVNGVSVEGEHHEKAVELLKAAKDSVKLVVRYTPKVLEEMEARFEKLRTARRRQQQQLLIQQQQQQQQQQTQQNHMS

SEQ ID NO: 46900 - protein, 130 aa, Homo sapiens
  Payload ID: 9485
  Gene Symbol: LIN7A
  Gene Name: lin-7 homolog A (C. elegans)
  ENSP ID: ENSP00000448891
  MOD_RES (1)..(1): Any amino acid
XLEKLQESGEVPVHKLQSLKKVLQSEFCTAIREVYQYMHETITVNGCPEFRARATAKATVAAFAASEGHSHPRVVELPKTDEGLGFNVMGGKEQNSPIYISRIIPGGVAERHGGLKRGDQLLSVNGVVCL

SEQ ID NO: 46901 - protein, 180 aa, Homo sapiens
  Payload ID: 9485
  Gene Symbol: LIN7A
  Gene Name: lin-7 homolog A (C. elegans)
  ENSP ID: ENSP00000448975
TSAPTADMATLTVVQPLTLDRDVARAIELLEKLQESGEVPVHKLQSLKKVLQSEFCTAIREVYQYMHETITVNGCPEFRARATAKATVAAFAASEGHSHPRVVELPKTDEGLGFNVMGGKEQNSPIYISRIIPGGVAERHGGLKRGDQLLSVNGVLLRSQKQMETHVSSAIIGRENFFYP

SEQ ID NO: 46902 - protein, 207 aa, Homo sapiens
  Payload ID: 9486
  Gene Symbol: LIN7B
  Gene Name: lin-7 homolog B (C. elegans)
  Uniprot ID: Q9HAP6
  ENSP ID: ENSP00000221459
MAALVEPLGLERDVSRAVELLERLQRSGELPPQKLQALQRVLQSRFCSAIREVYEQLYDTLDITGSAEIRAHATAKATVAAFTASEGHAHPRVVELPKTDEGLGFNIMGGKEQNSPIYISRVIPGGVADRHGGLKRGDQLLSVNGVSVEGEQHEKAVELLKAAQGSVKLVVRYTPRVLEEMEARFEKMRSARRRQQHQSYSSLESRG

SEQ ID NO: 46903 - protein, 137 aa, Homo sapiens
  Payload ID: 9486
  Gene Symbol: LIN7B
  Gene Name: lin-7 homolog B (C. elegans)
  Uniprot ID: Q9HAP6
  ENSP ID: ENSP00000375737
MAALVEPLGLERDVSRAVELLERLQRSGELPPQKLQALQRVLQSRFCSAIREVYEQLYDTLDITGSAEIRAHATAKSVEGEQHEKAVELLKAAQGSVKLVVRYTPRVLEEMEARFEKMRSARRRQQHQSYSSLESRG

SEQ ID NO: 46904 - protein, 132 aa, Homo sapiens
  Payload ID: 9486
  Gene Symbol: LIN7B
  Gene Name: lin-7 homolog B (C. elegans)
  ENSP ID: ENSP00000472804
  MOD_RES (1)..(1): Any amino acid
XALVEPLGLERDVSRAVELLERLQRSGELPPQKLQALQRVLQSRFCSAIREVYEQLYDTLDITGSAEIRAHATAKKYKKKKKERKSRAWWRVPVIPAGLQLRRLRQENRLNPGGRGCSEPRSCHCTPAWATE

SEQ ID NO: 46905 - protein, 115 aa, Homo sapiens
  Payload ID: 9486
  Gene Symbol: LIN7B
  Gene Name: lin-7 homolog B (C. elegans)
  ENSP ID: ENSP00000474643
  MOD_RES (1)..(1): Any amino acid
XLGLERDVSRAVELLERLQRSGELPPQKLQALQRVLQSRFCSAIREVYEQLYDTLDITGSAEIRAHATAKVGPAPHCSWCLFNCLVELNISFMPVISVSSLMIFAKSMCHLTISK

SEQ ID NO: 46906 - protein, 197 aa, Homo sapiens
  Payload ID: 9487
  Gene Symbol: LIN7C
  Gene Name: lin-7 homolog C (C. elegans)
  Uniprot ID: Q9NUP9
  ENSP ID: ENSP00000278193
MAALGEPVRLERDICRAIELLEKLQRSGEVPPQKLQALQRVLQSEFCNAVREVYEHVYETVDISSSPEVRANATAKATVAAFAASEGHSHPRVVELPKTEEGLGFNIMGGKEQNSPIYISRIIPGGIADRHGGLKRGDQLLSVNGVSVEGEHHEKAVELLKAAQGKVKLVVRYTPKVLEEMESRFEKMRSAKRRQQT

SEQ ID NO: 46907 - protein, 173 aa, Homo sapiens
  Payload ID: 9487
  Gene Symbol: LIN7C
  Gene Name: lin-7 homolog C (C. elegans)
  ENSP ID: ENSP00000435353
MAALGEPVRLERDICRAIELLEKLQRSGEVPPQKLQALQRVLQSEFCNAVREATVAAFAASEGHSHPRVVELPKTEEGLGFNIMGGKEQNSPIYISRIIPGGIADRHGGLKRGDQLLSVNGVSVEGEHHEKAVELLKAAQGKVKLVVRYTPKVLEEMESRFEKMRSAKRRQQT

SEQ ID NO: 46908 - protein, 558 aa, Homo sapiens
  Payload ID: 9488
  Gene Symbol: LIN9
  Gene Name: lin-9 DREAM MuvB core complex component
  Uniprot ID: Q5TKA1
  ENSP ID: ENSP00000329102
MHRGGQPLKKRRGSFKMAELDQLPDESSSAKALVSLKEGSLSNTWNEKYSSLQKTPVWKGRNTSSAVEMPFRNSKRSRLFSDEDDRQINTRSPKRNQRVAMVPQKFTATMSTPDKKASQKIGFRLRNLLKLPKAHKWCIYEWFYSNIDKPLFEGDNDFCVCLKESFPNLKTRKLTRVEWGKIRRLMGKPRRCSSAFFEEERSALKQKRQKIRLLQQRKVADVSQFKDLPDEIPLPLVIGTKVTARLRGVHDGLFTGQIDAVDTLNATYRVTFDRTGLGTHTIPDYEVLSNEPHETMPIAAFGQKQRPSRFFMTPPRLHYTPPLQSPIIDNDPLLGQSPWRSKISGSDTETLGGFPVEFLIQVTRLSKILMIKKEHIKKLREMNTEAEKLKSYSMPISIEFQRRYATIVLELEQLNKDLNKVLHKVQQYCYELAPDQGLQPADQPTDMRRRCEEEAQEIVRHANSSTGQPCVENENLTDLISRLTAILLQIKCLAEGGDLNSFEFKSLTDSLNDIKSTIDASNISCFQNNVEIHVAHIQSGLSQMGNLHAFAANNTNRD

SEQ ID NO: 46909 - protein, 71 aa, Homo sapiens
  Payload ID: 9488
  Gene Symbol: LIN9
  Gene Name: lin-9 DREAM MuvB core complex component
  ENSP ID: ENSP00000352515
MPFRNSKRSRLFSDEDDRQINTRSPKRNQRVAMVPQKFTATMSTPDKKASQKIGFRLRNLLKLPKAHKWCI

SEQ ID NO: 46910 - protein, 613 aa, Homo sapiens
  Payload ID: 9488
  Gene Symbol: LIN9
  Gene Name: lin-9 DREAM MuvB core complex component
  ENSP ID: ENSP00000355773
ETAEQNSSLAVGLNDQLHDLSRSRSPAARSSASNIRERRARIARGRWDRVPDVATRRGLLRPAVSGKVRGRRRPSNVGFGNCSSAKALVSLKEGSLSNTWNEKYSSLQKTPVWKGRNTSSAVEMPFRNSKRSRLFSDEDDRQINTRSPKRNQRVAMVPQKFTATMSTPDKKASQKIGFRLRNLLKLPKAHKWCIYEWFYSNIDKPLFEGDNDFCVCLKESFPNLKTRKLTRVEWGKIRRLMGKPRRCSSAFFEEERSALKQKRQKIRLLQQRKVADVSQFKDLPDEIPLPLVIGTKVTARLRGVHDGLFTGQIDAVDTLNATYRVTFDRTGLGTHTIPDYEVLSNEPHETMPIAAFGQKQRPSRFFMTPPRLHYTPPLQSPIIDNDPLLGQSPWRSKISGSDTETLGGFPVEFLIQVTRLSKILMIKKEHIKKLREMNTEAEKLKSYSMPISIEFQRRYATIVLELEQLNKDLNKVLHKVQQYCYELAPDQGLQPADQPTDMRRRCEEEAQEIVRHANSSTGQPCVENENLTDLISRLTAILLQIKCLAEGGDLNSFEFKSLTDSLNDIKSTIDASNISCFQNNVEIHVAHIQSGLSQMGNLHAFAANNTNRD

SEQ ID NO: 46911 - protein, 518 aa, Homo sapiens
  Payload ID: 9488
  Gene Symbol: LIN9
  Gene Name: lin-9 DREAM MuvB core complex component
  ENSP ID: ENSP00000418121
QPLKKRRGSFKMAELDQLPDESSSAKALVSLKEGSLSNTWNEKYSSLQKTPVWKGRNTSSAVEMKFTATMSTPDKKASQKIGFRLRNLLKLPKAHKWCIYEWFYSNIDKPLFEGDNDFCVCLKESFPNLKTRKLTRVEWGKIRRLMGKPRRCSSAFFEEERSALKQKRQKIRLLQQRKVADVSQFKDLPDEIPLPLVIGTKVTARLRGVHDGLFTGQIDAVDTLNATYRVTFDRTGLGTHTIPDYEVLSNEPHETMPIAAFGQKQRPSRFFMTPPRLHYTPPLQSPIIDNDPLLGQSPWRSKISGSDTETLGGFPVEFLIQVTRLSKILMIKKEHIKKLREMNTEAEKLKSYSMPISIEFQRRYATIVLELEQLNKDLNKVLHKVQQYCYELAPDQGLQPADQPTDMRRRCEEEAQEIVRHANSSTGQPCVENENLTDLISRLTAILLQIKCLAEGGDLNSFEFKSLTDSLNDIKSTIDASNISCFQNNVEIHVAHIQSGLSQMGNLHAFAANNTNRD

SEQ ID NO: 46912 - protein, 489 aa, Homo sapiens
  Payload ID: 9488
  Gene Symbol: LIN9
  Gene Name: lin-9 DREAM MuvB core complex component
  ENSP ID: ENSP00000418489
MHRGGQPLKKRRGSFKMAELDQLPDESSSAKALVSLKEGSLSNTWNEKYSSLQKTPVWKGRNTSSAVEMKFTATMSTPDKKASQKIGFRLRNLLKLPKAHKWCIYEWFYSNIDKPLFEGDNDFCVCLKESFPNLKTRKLTRVEWGKIRRLMGKPRRCSSAFFEEERSALKQKRQKIRLLQQRKVADVSQFKDLPDEIPLPLVIGTKVTARLRGVHDGLFTGQIDAVDTLNATYRVTFDRTGLGTHTIPDYEVLSNEPHETMPIAAFGQKQRPSRFFMTPPRLHYTPPLQSPIIDNDPLLGQSPWRSKISGSDTETLGGFPVEFLIQVTRLSKILMIKKEHIKKLREMNTEAEKLKSYSMPISIEFQRRYATIVLELEQLNKDLNKVLHKVQQYCYELAPDQGLQPADQPTDMRRRCEEEAQEIVRHANSSTGQPCVENENLTDLISRLTAILLQIKCLAEGGDLNSFEFKSLTDSLNDIKSTIDASNIR

SEQ ID NO: 46913 - protein, 865 aa, Homo sapiens
  Payload ID: 9489
  Gene Symbol: L1TD1
  Gene Name: LINE-1 type transposase domain containing 1
  Uniprot ID: Q5T7N2
  ENSP ID: ENSP00000419901
MSDVSTSVQSKFARLAKKKENITYMKREQLTETDKDIAPVLDLKCKDVSAIMNKFKVLMEIQDLMFEEMRETLKNDLKAVLGGKATIPEVKNSENSSSRTEFQQIINLALQKTGMVGKIEGENSKIGDDNENLTFKLEVNELSGKLDNTNEYNSNDGKKLPQGESRSYEVMGSMEETLCNIDDRDGNRNVHLEFTERESRKDGEDEFVKEMREERKFQKLKNKEEVLKASREEKVLMDEGAVLTLVADLSSATLDISKQWSNVFNILRENDFEPKFLCEVKLAFKCDGEIKTFSDLQSLRKFASQKSSVKELLKDVLPQKEEINQGGRKYGIQEKRDKTLIDSKHRAGEITSDGLSFLFLKEVKVAKPEEMKNLETQEEEFSELEELDEEASGMEDDEDTSGLEEEEEEPSGLEEEEEEEASGLEEDEASGLEEEEEQTSEQDSTFQGHTLVDAKHEVEITSDGMETTFIDSVEDSESEEEEEGKSSETGKVKTTSLTEKKASRRQKEIPFSYLVGDSGKKKLVKHQVVHKTQEEEETAVPTSQGTGTPCLTLCLASPSKSLEMSHDEHKKHSHTNLSISTGVTKLKKTEEKKHRTLHTEELTSKEADLTEETEENLRSSVINSIREIKEEIGNLKSSHSGVLEIENSVDDLSSRMDILEERIDSLEDQIEEFSKDTMQMTKQIISKERQRDIEERSRSCNIRLIGIPEKESYENRAEDIIKEIIDENFAELKKGSSLEIVSACRVPSKIDEKRLTPRHILVKFWNSSDKEKIIRASRERREITYQGTRIRLTADLSLDTLDARSKWSNVFKVLLEKGFNPRILYPAKMAFDFRGKTKVFLSIEEFRDYVLHMPTLRELLGNNIP

SEQ ID NO: 46914 - protein, 757 aa, Homo sapiens
  Payload ID: 9490
  Gene Symbol: LINS1
  Gene Name: lines homolog 1
  Uniprot ID: Q8NG48
  ENSP ID: ENSP00000318423
MKVFCEVLEELYKKVLLGATLENDSHDYIFYLNPAVSDQDCSTATSLEWANTCGIQGRHQPISVGVAPIAVAPVCLKTNSQMSGSREVMLLQLTVIKVMTTRILSVKTEFHAKEQYRDVIKILLESAKVDSKLICMFQNSDKLLSHMAAQCLALLLYFQLREKITLSNSWIAFCQKNLSEYSESNKAIYCLWTLTAIIKEIFKDSCSQKTEILKQFLTHFDTIFEVFYNSLFSQHFENCRDTSKIVNILMCFLDLLELLIASRIHLKLHFTCQRILFLKPSCMLEVITWPIQAFVKRKVIIFLKKCLLCKVGEDLCRGSVPALMPPDHHVAVDMLALANAVLQAVNSGLLKTLSVYEKHSFFGGDEVQPECELITSPDHVILRAASLVIMKSLEIKFQNYSSASEVKVDLQRFMSELLTFLKPHLQPSLQLHNPCKWLSRVFIEQDDDMLEAAKASLGIYLTLTRGCEATESLTQGKEMWDHHTHENGYNPHCIFLFFLKNIGFDSTVLLDFLISSETCFLEYFVRYLKLLQKDWDNFFTICNNFDATESKYDISICGCVPSLVQDQSSNQTIPHRLTAPHSHRDVCARHSWASDAPSEPLKAVMSKGAHTMCASSLSSPRASQSLVDYDSSDDSDVESTEQCLANSKQTSLHQQATKEIQDAAGTSRDKKEFSLEPPSRPLVLKEFDTAFSFDCEVAPNDVVSEVGIFYRIVKCFQELQDAICRLQKKNLFPYNPTALLKLLKYIEVISNKTMNTL

SEQ ID NO: 46915 - protein, 198 aa, Homo sapiens
  Payload ID: 9490
  Gene Symbol: LINS1
  Gene Name: lines homolog 1
  ENSP ID: ENSP00000452941
MKVFCEVLEELYKKVLLGATLENDSHDYIFYLNPAVSDQDCSTATSLEWANTCGIQGRHQPISVGVAPIAVAPVCLKTNSQMSGSREVMLLQLTVIKVMTTRILSVKTEFHAKEQYRDVIKILLESAKVDSKLICMFQNSDKLLSHMAAQCLALLLYFQLREKITLSNSWIAFCQKNLSEYSESNKAIYCLWTLTAII

SEQ ID NO: 46916 - protein, 129 aa, Homo sapiens
  Payload ID: 9490
  Gene Symbol: LINS1
  Gene Name: lines homolog 1
  ENSP ID: ENSP00000453495
MKVFCEVLEELYKKVLLGATLENDSHDYIFYLNPAVSDQDCSTATSLEWANTCGIQGRHQPISVGVAPIAVAPVCLKTNSQMSGSREVMLLQLTVIKVMTTRILSVKTEFHAKEQYRDVIKILLESAKV

SEQ ID NO: 46917 - protein, 191 aa, Homo sapiens
  Payload ID: 9490
  Gene Symbol: LINS1
  Gene Name: lines homolog 1
  ENSP ID: ENSP00000453642
MKVFCEVLEELYKKVLLGATLENDSHDYIFYLNPAVSDQDCSTATSLEWANTCGIQGRHQPISVGVAPIAVAPVCLKTNSQMSGSREVMLLQLTVIKVMTTRILSVKTEFHAKEQYRDVIKILLESAKVDSKLICMFQNSDKLLSHMAAQCLALLLYFQLREKITLSNSWIAFCQKNLSEYSESNKAIYCL

SEQ ID NO: 46918 - protein, 144 aa, Homo sapiens
  Payload ID: 9490
  Gene Symbol: LINS1
  Gene Name: lines homolog 1
  ENSP ID: ENSP00000453692
MKVFCEVLEELYKKVLLGATLENDSHDYIFYLNPAVSDQDCSTATSLEWANTCGIQGRHQPISVGVAPIAVAPVCLKTNSQMSGSREVMLLQLTVIKVMTTRILSVKTEFHAKEQYRDVIKILLESAKVDSKLICMFQNSDKLL

SEQ ID NO: 46919 - protein, 436 aa, Homo sapiens
  Payload ID: 9490
  Gene Symbol: LINS1
  Gene Name: lines homolog 1
  Uniprot ID: Q8NG48
  ENSP ID: ENSP00000454200
MKVFCEVLEELYKKVLLGATLENDSHDYIFYLNPAVSDQDCSTATSLEWANTCGIQGRHQPISVGVAPIAVAPVCLKTNSQMSGSREVMLLQLTVIKVMTTRILSVKTEFHAKEQYRDVIKILLESAKVDSKLICMFQNSDKLLSHMAAQCLALLLYFQLREKITLSNSWIAFCQKNLSEYSESNKAIYCLWTLTAIIKEIFKDSCSQKTEILKQFLTHFDTIFEVFYNSLFSQHFENCRDTSKIVNILMCFLDLLELLIASRIHLKLHFTCQRILFLKPSCMLEVITWPIQAFVKRKVIIFLKKCLLCKVGEDLCRGSVPALMPPDHHVAVDMLALANAVLQAVNSGLLKTLSVYEKHSFFGGDEVQPECELITSPDHVILRAASLVIMKSLEIKFQNYSSASEVKGNSPNSFCMQCVIIYLSTVIHNYQISGLV

SEQ ID NO: 46920 - protein, 317 aa, Homo sapiens
  Payload ID: 9490
  Gene Symbol: LINS1
  Gene Name: lines homolog 1
  ENSP ID: ENSP00000454929
MKVFCEVLEELYKKICMFQNSDKLLSHMAAQCLALLLYFQLREKITLSNSWIAFCQKNLSEYSESNKAIYCLWTLTAIIKEIFKDSCSQKTEILKQFLTHFDTIFEVFYNSLFSQHFENCRDTSKIVNILMCFLDLLELLIASRIHLKLHFTCQRILFLKPSCMLEVITWPIQAFVKRKVIIFLKKCLLCKVGEDLCRGSVPALMPPDHHVAVDMLALANAVLQAVNSGLLKTLSVYEKHSFFGGDEVQPECELITSPDHVILRAASLVIMKSLEIKFQNYSSASEVKGNSPNSFCMQCVIIYLSTVIHNYQISGLV

SEQ ID NO: 46921 - protein, 132 aa, Homo sapiens
  Payload ID: 9490
  Gene Symbol: LINS1
  Gene Name: lines homolog 1
  ENSP ID: ENSP00000454985
MSGSREVMLLQLTVIKVMTTRILSVKTEFHAKEQYRDVIKILLESAKVDSKLICMFQNSDKLLSHMAAQCLALLLYFQLREKITLSNSWIAFCQKNLSEYSESNKAIYCLWTLTAIIKEIFKDSCSQKTEIL

SEQ ID NO: 46922 - protein, 69 aa, Homo sapiens
  Payload ID: 9490
  Gene Symbol: LINS1
  Gene Name: lines homolog 1
  ENSP ID: ENSP00000474128
  MOD_RES (1)..(1): Any amino acid
XVNSGLLKTLSVYEKHSFFGGDEVQPECELITSPDHVILRAASLVIMKSLEIKFQNYSSASEVKDMEIK

SEQ ID NO: 46923 - protein, 262 aa, Homo sapiens
  Payload ID: 9491
  Gene Symbol: LAT
  Gene Name: linker for activation of T cells
  Uniprot ID: O43561
  ENSP ID: ENSP00000354119
MEEAILVPCVLGLLLLPILAMLMALCVHCHRLPGSYDSTSSDSLYPRGIQFKRPHTVAPWPPAYPPVTSYPPLSQPDLLPIPRSPQPLGGSHRTPSSRRDSDGANSVASYENEGASGIRGAQAGWGVWGPSWTRLTPVSLPPEPACEDADEDEDDYHNPGYLVVLPDSTPATSTAAPSAPALSTPGIRDSAFSMESIDDYVNVPESGESAEASLDGSREYVNVSQELHPGAAKTEPAALSSQEAEEVEEEGAPDYENLQELN

SEQ ID NO: 46924 - protein, 233 aa, Homo sapiens
  Payload ID: 9491
  Gene Symbol: LAT
  Gene Name: linker for activation of T cells
  Uniprot ID: O43561
  ENSP ID: ENSP00000378841
MEEAILVPCVLGLLLLPILAMLMALCVHCHRLPGSYDSTSSDSLYPRGIQFKRPHTVAPWPPAYPPVTSYPPLSQPDLLPIPRSPQPLGGSHRTPSSRRDSDGANSVASYENEEPACEDADEDEDDYHNPGYLVVLPDSTPATSTAAPSAPALSTPGIRDSAFSMESIDDYVNVPESGESAEASLDGSREYVNVSQELHPGAAKTEPAALSSQEAEEVEEEGAPDYENLQELN

SEQ ID NO: 46925 - protein, 269 aa, Homo sapiens
  Payload ID: 9491
  Gene Symbol: LAT
  Gene Name: linker for activation of T cells
  Uniprot ID: O43561
  ENSP ID: ENSP00000378845
MEATAASWQVAVPVLGGASRPLGPRGAASLLRAPLQMEEAILVPCVLGLLLLPILAMLMALCVHCHRLPGSYDSTSSDSLYPRGIQFKRPHTVAPWPPAYPPVTSYPPLSQPDLLPIPRSPQPLGGSHRTPSSRRDSDGANSVASYENEEPACEDADEDEDDYHNPGYLVVLPDSTPATSTAAPSAPALSTPGIRDSAFSMESIDDYVNVPESGESAEASLDGSREYVNVSQELHPGAAKTEPAALSSQEAEEVEEEGAPDYENLQELN

SEQ ID NO: 46926 - protein, 232 aa, Homo sapiens
  Payload ID: 9491
  Gene Symbol: LAT
  Gene Name: linker for activation of T cells
  Uniprot ID: O43561
  ENSP ID: ENSP00000398793
MEEAILVPCVLGLLLLPILAMLMALCVHCHRLPGSYDSTSSDSLYPRGIQFKRPHTVAPWPPAYPPVTSYPPLSQPDLLPIPSPQPLGGSHRTPSSRRDSDGANSVASYENEEPACEDADEDEDDYHNPGYLVVLPDSTPATSTAAPSAPALSTPGIRDSAFSMESIDDYVNVPESGESAEASLDGSREYVNVSQELHPGAAKTEPAALSSQEAEEVEEEGAPDYENLQELN

SEQ ID NO: 46927 - protein, 85 aa, Homo sapiens
  Payload ID: 9491
  Gene Symbol: LAT
  Gene Name: linker for activation of T cells
  ENSP ID: ENSP00000454793
MEEAILVPCVLGLLLLPILAMLMALCVHCHRLPGSYDSTSSDSLYPRGIQFKRPHTVAPWPPAYPPVTSYPPLSQPDLLPIPHDP

SEQ ID NO: 46928 - protein, 166 aa, Homo sapiens
  Payload ID: 9491
  Gene Symbol: LAT
  Gene Name: linker for activation of T cells
  ENSP ID: ENSP00000455728
IPRSPQPLGGSHRTPSSRRDSDGANSVASYENEEPACEDADEDEDDYHNPGYLVVLPDSTPATSTAAPSAPALSTPGIRDSAFSMESIDDYVNVPESGESAEASLDGSREYVNVSQELHPGAAKTEPVEAESVLEPGLPGTAELGSWKWLWGPHMASCPCSSLTTA

SEQ ID NO: 46929 - protein, 261 aa, Homo sapiens
  Payload ID: 9491
  Gene Symbol: LAT
  Gene Name: linker for activation of T cells
  Uniprot ID: O43561
  ENSP ID: ENSP00000456761
MEEAILVPCVLGLLLLPILAMLMALCVHCHRLPGSYDSTSSDSLYPRGIQFKRPHTVAPWPPAYPPVTSYPPLSQPDLLPIPSPQPLGGSHRTPSSRRDSDGANSVASYENEGASGIRGAQAGWGVWGPSWTRLTPVSLPPEPACEDADEDEDDYHNPGYLVVLPDSTPATSTAAPSAPALSTPGIRDSAFSMESIDDYVNVPESGESAEASLDGSREYVNVSQELHPGAAKTEPAALSSQEAEEVEEEGAPDYENLQELN

SEQ ID NO: 46930 - protein, 232 aa, Homo sapiens; identical to SEQ ID NO: 46926
  Payload ID: 9491
  Gene Symbol: LAT
  Gene Name: linker for activation of T cells
  Uniprot ID: O43561
  ENSP ID: ENSP00000457036

SEQ ID NO: 46931 - protein, 85 aa, Homo sapiens; identical to SEQ ID NO: 46927
  Payload ID: 9491
  Gene Symbol: LAT
  Gene Name: linker for activation of T cells
  ENSP ID: ENSP00000488120

SEQ ID NO: 46932 - protein, 243 aa, Homo sapiens
  Payload ID: 9492
  Gene Symbol: LAT2
  Gene Name: linker for activation of T cells family, member 2
  Uniprot ID: Q9GZY6
  ENSP ID: ENSP00000275635
MSSGTELLWPGAALLVLLGVAASLCVRCSRPGAKRSEKIYQQRSLREDQQSFTGSRTYSLVGQAWPGPLADMAPTRKDKLLQFYPSLEDPASSRYQNFSKGSRHGSEEAYIDPIAMEYYNWGRFSKPPEDDDANSYENVLICKQKTTETGAQQEGIGGLCRGDLSLSLALKTGPTSGLCPSASPEEDEESEDYQNSASIHQWRESRKVMGQLQREASPGPVGSPDEEDGEPDYVNGEVAATEA

SEQ ID NO: 46933 - protein, 243 aa, Homo sapiens; identical to SEQ ID NO: 46932
  Payload ID: 9492
  Gene Symbol: LAT2
  Gene Name: linker for activation of T cells family, member 2
  Uniprot ID: Q9GZY6
  ENSP ID: ENSP00000344881

SEQ ID NO: 46934 - protein, 63 aa, Homo sapiens
  Payload ID: 9492
  Gene Symbol: LAT2
  Gene Name: linker for activation of T cells family, member 2
  ENSP ID: ENSP00000354374
MSSGTELLWPGAALLVLLGVAASLCVRCSRPGAKRSEKIYQQRSLREDQQSFTGSRTYSLVGQ

SEQ ID NO: 46935 - protein, 243 aa, Homo sapiens; identical to SEQ ID NO: 46932
  Payload ID: 9492
  Gene Symbol: LAT2
  Gene Name: linker for activation of T cells family, member 2
  Uniprot ID: Q9GZY6
  ENSP ID: ENSP00000381492

SEQ ID NO: 46936 - protein, 100 aa, Homo sapiens
  Payload ID: 9492
  Gene Symbol: LAT2
  Gene Name: linker for activation of T cells family, member 2
  ENSP ID: ENSP00000417533
MSSGTELLWPGAALLVLLGVAASLCVRCSRPGAKRSEKIYQQRSLREDQQSFTGSRTYSLVGQAWPGPLADMAPTRKDKLLQFYPSLEDPASSRYQNFSK

SEQ ID NO: 46937 - protein, 100 aa, Homo sapiens
  Payload ID: 9492
  Gene Symbol: LAT2
  Gene Name: linker for activation of T cells family, member 2
  ENSP ID: ENSP00000419150
MSSGTELLWPGAALLVLLGVAASLCVRCSRPGAKRREDQQSFTGSRTYSLVGQAWPGPLADMAPTRKDKLLQFYPSLEDPASSRYQNFSKGSRHGSEEAY

SEQ ID NO: 46938 - protein, 243 aa, Homo sapiens; identical to SEQ ID NO: 46932
  Payload ID: 9492
  Gene Symbol: LAT2
  Gene Name: linker for activation of T cells family, member 2
  Uniprot ID: Q9GZY6
  ENSP ID: ENSP00000420494

SEQ ID NO: 46939 - protein, 58 aa, Homo sapiens
  Payload ID: 9492
  Gene Symbol: LAT2
  Gene Name: linker for activation of T cells family, member 2
  ENSP ID: ENSP00000420549
MSSGTELLWPGAALLVLLGVAASLCVRCSRPGAKRSEKIYQQRSLREDQQSFTGSRTY

SEQ ID NO: 46940 - protein, 111 aa, Homo sapiens
  Payload ID: 9492
  Gene Symbol: LAT2
  Gene Name: linker for activation of T cells family, member 2
  Uniprot ID: Q9GZY6
  ENSP ID: ENSP00000433807
MSSGTELLWPGAALLVLLGVAASLCVRCSRPGAKRSEKIYQQRSLREDQQSFTGSRTYSLVGQAWPGPLADMAPTRKDKLLQFYPSLEDPASSRYQNFSKGSRHGSEEAYI

SEQ ID NO: 46941 - protein, 219 aa, Homo sapiens
  Payload ID: 9493
  Gene Symbol: LIPA
  Gene Name: lipase A, lysosomal acid, cholesterol esterase
  ENSP ID: ENSP00000282673
MKMRFLGLVVCLVLWTLHSEGSGGKLTAVDPETNMNVSEIISYWGFPSEEYLVETEDGYILCLNRIPHGRKNHSDKGPKPVVFLQHGLLADSSNWVTNLANSSLGFILADAGFDVWMGNSRGNTWSRKHKTLSVSQDEFWAFSYDEMAKYDLPASINFILNKTGQEQVYYVGHSQGTTIGFIAFSQIPELAKRIKMFFALGPVASVAFCTSPMAKLGRL

SEQ ID NO: 46942 - protein, 399 aa, Homo sapiens
  Payload ID: 9493
  Gene Symbol: LIPA
  Gene Name: lipase A, lysosomal acid, cholesterol esterase
  Uniprot ID: P38571
  ENSP ID: ENSP00000337354
MKMRFLGLVVCLVLWTLHSEGSGGKLTAVDPETNMNVSEIISYWGFPSEEYLVETEDGYILCLNRIPHGRKNHSDKGPKPVVFLQHGLLADSSNWVTNLANSSLGFILADAGFDVWMGNSRGNTWSRKHKTLSVSQDEFWAFSYDEMAKYDLPASINFILNKTGQEQVYYVGHSQGTTIGFIAFSQIPELAKRIKMFFALGPVASVAFCTSPMAKLGRLPDHLIKDLFGDKEFLPQSAFLKWLGTHVCTHVILKELCGNLCFLLCGFNERNLNMSRVDVYTTHSPAGTSVQNMLHWSQAVKFQKFQAFDWGSSAKNYFHYNQSYPPTYNVKDMLVPTAVWSGGHDWLADVYDVNILLTQITNLVFHESIPEWEHLDFIWGLDAPWRLYNKIINLMRKYQ

SEQ ID NO: 46943 - protein, 343 aa, Homo sapiens
  Payload ID: 9493
  Gene Symbol: LIPA
  Gene Name: lipase A, lysosomal acid, cholesterol esterase
  Uniprot ID: P38571
  ENSP ID: ENSP00000360903
MACLEFVPFDVQMCLEFLPSGPKPVVFLQHGLLADSSNWVTNLANSSLGFILADAGFDVWMGNSRGNTWSRKHKTLSVSQDEFWAFSYDEMAKYDLPASINFILNKTGQEQVYYVGHSQGTTIGFIAFSQIPELAKRIKMFFALGPVASVAFCTSPMAKLGRLPDHLIKDLFGDKEFLPQSAFLKWLGTHVCTHVILKELCGNLCFLLCGFNERNLNMSRVDVYTTHSPAGTSVQNMLHWSQAVKFQKFQAFDWGSSAKNYFHYNQSYPPTYNVKDMLVPTAVWSGGHDWLADVYDVNILLTQITNLVFHESIPEWEHLDFIWGLDAPWRLYNKIINLMRKYQ

SEQ ID NO: 46944 - protein, 290 aa, Homo sapiens
  Payload ID: 9493
  Gene Symbol: LIPA
  Gene Name: lipase A, lysosomal acid, cholesterol esterase
  ENSP ID: ENSP00000388415
MKMRFLGLVVCLVLWTLHSEGSGGKLTAVDPETNMNVSEIISYWGFPSEEYLVETEDGYILCLNRIPHGRKNHSDKGPKPVVFLQHGLLADSSNWVTNLANSSLGFILADAGFDVWMGNSRGNTWSRKHKTLSVSQDEFWAFSYDEMAKYDLPASINFILNKTGQEQVYYVGHSQGTTIGFIAFSQIPELAKRIKMFFALGPVASVAFCTSPMAKLGRLPDHLIKDLFGDKEFLPQSAFLKWLGTHVCTHVILKELCGNLCFLLCGFNERNLNMSRVDVYTTHSPAGTSV

SEQ ID NO: 46945 - protein, 283 aa, Homo sapiens
  Payload ID: 9493
  Gene Symbol: LIPA
  Gene Name: lipase A, lysosomal acid, cholesterol esterase
  ENSP ID: ENSP00000413019
MGNSRGNTWSRKHKTLSVSQDEFWAFSYDEMAKYDLPASINFILNKTGQEQVYYVGHSQGTTIGFIAFSQIPELAKRIKMFFALGPVASVAFCTSPMAKLGRLPDHLIKDLFGDKEFLPQSAFLKWLGTHVCTHVILKELCGNLCFLLCGFNERNLNMSRVDVYTTHSPAGTSVQNMLHWSQAVKFQKFQAFDWGSSAKNYFHYNQSYPPTYNVKDMLVPTAVWSGGHDWLADVYDVNILLTQITNLVFHESIPEWEHLDFIWGLDAPWRLYNKIINLMRKYQ

SEQ ID NO: 46946 - protein, 567 aa, Homo sapiens
  Payload ID: 9494
  Gene Symbol: LMF1
  Gene Name: lipase maturation factor 1
  Uniprot ID: Q96S06
  ENSP ID: ENSP00000262301
MRPDSPTMAAPAESLRRRKTGYSDPEPESPPAPGRGPAGSPAHLHTGTFWLTRIVLLKALAFVYFVAFLVAFHQNKQLIGDRGLLPCRVFLKNFQQYFQDRTSWEVFSYMPTILWLMDWSDMNSNLDLLALLGLGISSFVLITGCANMLLMAALWGLYMSLVNVGHVWYSFGWESQLLETGFLGIFLCPLWTLSRLPQHTPTSRIVLWGFRWLIFRIMLGAGLIKIRGDRCWRDLTCMDFHYETQPMPNPVAYYLHHSPWWFHRFETLSNHFIELLVPFFLFLGRRACIIHGVLQILFQAVLIVSGNLSFLNWLTMVPSLACFDDATLGFLFPSGPGSLKDRVLQMQRDIRGARPEPRFGSVVRRAANVSLGVLLAWLSVPVVLNLLSSRQVMNTHFNSLHIVNTYGAFGSITKERAEVILQGTASSNASAPDAMWEDYEFKCKPGDPSRRPCLISPYHYRLDWLMWFAAFQTYEHNDWIIHLAGKLLASDAEALSLLAHNPFAGRPPPRWVRGEHYRYKFSRPGGRHAAEGKWWVRKRIGAYFPPLSLEELRPYFRDRGWPLPGPL

SEQ ID NO: 46947 - protein, 330 aa, Homo sapiens
  Payload ID: 9494
  Gene Symbol: LMF1
  Gene Name: lipase maturation factor 1
  Uniprot ID: Q96S06
  ENSP ID: ENSP00000437418
MDFHYETQPMPNPVAYYLHHSPWWFHRFETLSNHFIELLVPFFLFLGRRACIIHGVLQILFQAVLIVSGNLSFLNWLTMVPSLACFDDATLGFLFPSGPGSLKDRVLQMQRDIRGARPEPRFGSVVRRAANVSLGVLLAWLSVPVVLNLLSSRQVMNTHFNSLHIVNTYGAFGSITKERAEVILQGTASSNASAPDAMWEDYEFKCKPGDPSRRPCLISPYHYRLDWLMWFAAFQTYEHNDWIIHLAGKLLASDAEALSLLAHNPFAGRPPPRWVRGEHYRYKFSRPGGRHAAEGKWWVRKRIGAYFPPLSLEELRPYFRDRGWPLPGPL

SEQ ID NO: 46948 - protein, 95 aa, Homo sapiens
  Payload ID: 9494
  Gene Symbol: LMF1
  Gene Name: lipase maturation factor 1
  ENSP ID: ENSP00000443820
MPTILWLMDWSDMNSNLDLLALLGLGISSFVLITGCANMLLMAALWGLYMSLVNVGHVWYSFAAQHVTLDCRAEIQKTRSSFGSALPAFRAAMRL

SEQ ID NO: 46949 - protein, 198 aa, Homo sapiens
  Payload ID: 9494
  Gene Symbol: LMF1
  Gene Name: lipase maturation factor 1
  ENSP ID: ENSP00000454672
MPTILWLMDWSDMNSNLDLLALLGLGISSFVLITGCANMLLMAALWGLYMSLVNVGHVWYSFGWESQLLETGFLGIFLCPLWTLSRLPQHTPTSRIVLWGFRWLIFRIMLGAGLIKIRGDRCWRDLTCMDFHYETQPMPNPVAYYLHHSPWWFHRFETLSNHFIELLVPFFLFLGRRACIIHGVLQILFQAVLIVSGN

SEQ ID NO: 46950 - protein, 150 aa, Homo sapiens
  Payload ID: 9494
  Gene Symbol: LMF1
  Gene Name: lipase maturation factor 1
  ENSP ID: ENSP00000455162
MYSFGWESQLLETGFLGIFLCPLWTLSRLPQHTPTSRIVLWGFRWLIFRIMLGAGLIKIRGDRCWRDLTCMDFHYETQPMPNPVAYYLHHSPWWFHRFETLSNHFIELLVPFFLFLGRRACIIHGVLQILFQAVLIVSGNLSFLNWLTMV

SEQ ID NO: 46951 - protein, 134 aa, Homo sapiens
  Payload ID: 9494
  Gene Symbol: LMF1
  Gene Name: lipase maturation factor 1
  ENSP ID: ENSP00000455715
IYRPCLLLAARATRYFLGISSLQLPVVAFLVAFHQNKQLIGDRGLLPCRVFLKNFQQYFQDRTSWEVFSYMPTILWLMDWSDMNSNLDLLALLGLGISSFVLITGCANMLLMAALWGLYMSLVNVGHVWYSFGK

SEQ ID NO: 46952 - protein, 184 aa, Homo sapiens
  Payload ID: 9494
  Gene Symbol: LMF1
  Gene Name: lipase maturation factor 1
  ENSP ID: ENSP00000455833
MRPDSPTMAAPAESLRRRKTGYSDPEPESPPAPGRGPAGSPAHLHTGTFWLTRIVLLKALAFVYFVAFLVAFHQNKQLIGDRGLLPCRVFLKNFQQYFQDRTSWEVFSYMPTILWLMDWSDMNSNLDLLALLGLGISSFVLITGCANMLLMAALWGLYMSLVNVGHVWYSFASAISLPSMHGGQ

SEQ ID NO: 46953 - protein, 149 aa, Homo sapiens
  Payload ID: 9494
  Gene Symbol: LMF1
  Gene Name: lipase maturation factor 1
  ENSP ID: ENSP00000455930
PSRAGPRPGASGTLLHPEGLCLPGFPGVIQTWGEKNHHPSHTQTQRDSKPGGAGWTQRPSPCQPKGHGPRSPPPAPRAQLCAGHQKPQIMTAAQTVATGPWCSVKPLAPAWAHSRGHERVLLWLHHHTHRAAGAQLCHGSQPGSSRPVG

SEQ ID NO: 46954 - protein, 168 aa, Homo sapiens
  Payload ID: 9494
  Gene Symbol: LMF1
  Gene Name: lipase maturation factor 1
  ENSP ID: ENSP00000456631
  MOD_RES (1)..(1): Any amino acid
XTMAAPAESLRRRKTGYSDPEPESPPAPGRGPAGSPAHLHTGTFWLTRIVLLKALAFVYFVAFLVAFHQNKQLIGDRGLLPCRVFLKNFQQYFQDRTSWEVFSYMPTILWLMDWSDMNSNLDLLALLGLGISSFVLITGCANMLLMAALWGLYMSLVNVGHVWYSFGK

SEQ ID NO: 46955 - protein, 161 aa, Homo sapiens
  Payload ID: 9494
  Gene Symbol: LMF1
  Gene Name: lipase maturation factor 1
  ENSP ID: ENSP00000457725
  MOD_RES (1)..(1): Any amino acid
XPEPESPPAPGRGPAGSPAHLHTGTFWLTRIVLLKALAFVYFVAFLVAFHQNKQLIGDRGLLPCRVFLKNFQQYFQDRTSWEVFSYMPTILWLMDWSDMNSNLDLLALLGLGISSFVLITGCANMLLMAALWGLYMSLVNVGHVWYSFASAISLPSMHGGQ

SEQ ID NO: 46956 - protein, 350 aa, Homo sapiens
  Payload ID: 9494
  Gene Symbol: LMF1
  Gene Name: lipase maturation factor 1
  ENSP ID: ENSP00000458135
MLGAGLIKIRGDRCWRDLTCMDFHYETQPMPNPVAYYLHHSPWWFHRFETLSNHFIELLVPFFLFLGRRACIIHGVLQILFQAVLIVSGNLSFLNWLTMVPSLACFDDATLGFLFPSGPGSLKDRVLQMQRDIRGARPEPRFGSVVRRAANVSLGVLLAWLSVPVVLNLLSSRQVMNTHFNSLHIVNTYGAFGSITKERAEVILQGTASSNASAPDAMWEDYEFKCKPGDPSRRPCLISPYHYRLDWLMWFAAFQTYEHNDWIIHLAGKLLASDAEALSLLAHNPFAGRPPPRWVRGEHYRYKFSRPGGRHAAEGKWWVRKRIGAYFPPLSLEELRPYFRDRGWPLPGPL

SEQ ID NO: 46957 - protein, 682 aa, Homo sapiens
  Payload ID: 9495
  Gene Symbol: LMF2
  Gene Name: lipase maturation factor 2
  Uniprot ID: Q9BU23
  ENSP ID: ENSP00000216080
MTCPPTGLYGPEGILPARRTLRPQGKGRWQQLWETPTLLWEAPRLGLDTAQGLELLSLLGALVALGALLLSPLRHPVIYLLLWAAYLSACQVGQVFLYFQWDSLLLETGFLAVLVAPLRPASHRKEAPQGRQAGALPHEDLPFWLVRWLLFRLMFASGVVKLTSRCPAWWGLTALTYHYETQCLPTPAAWFAHHLPVWLHKLSVVATFLIEIAVPPLFFAPIRRLRLAAFYSQVLLQVLIIITGNYNFFNLMTLVLTTALLDDQHLAAEPGHGSRKKTATSWPKALLATLSLLLELAVYGLLAYGTVHYFGLEVDWQQRTIHSRTTFTFHQFSQWLKTLTLPTVWLGVASLVWELLSALWRWTQVRGWLRKLSAVVQLSLVGTATVALFLISLVPYSYVEPGTHGRLWTGAHRLFGAVEHLQLANSYGLFRRMTGLGGRPEVVLEGSYDGHHWTEIEFMYKPGNLSRPPPVVVPHQPRLDWQMWFAALGPHTHSPWFTSLVLRLLQGKEPVIRLVQSQVARYPFHKQPPTYVRAQRYKYWFSQPGEQGQWWRRQWVEEFFPSVSLGDPTLETLLRQFGLQEKSPPRTRSANSTLAQALHWTRSQLSPLEAPALLWGLLMAVGAVRFVQALLAPCSLRSSPLAPVSGEKRRPASQKDSGAASEQATAAPNPCSSSSRTTRRKK

SEQ ID NO: 46958 - protein, 707 aa, Homo sapiens
  Payload ID: 9495
  Gene Symbol: LMF2
  Gene Name: lipase maturation factor 2
  Uniprot ID: Q9BU23
  ENSP ID: ENSP00000424381
MAGSRLPRQLFLQGVAAVFMFAFASLYTQIPGLYGPEGILPARRTLRPQGKGRWQQLWETPTLLWEAPRLGLDTAQGLELLSLLGALVALGALLLSPLRHPVIYLLLWAAYLSACQVGQVFLYFQWDSLLLETGFLAVLVAPLRPASHRKEAPQGRQAGALPHEDLPFWLVRWLLFRLMFASGVVKLTSRCPAWWGLTALTYHYETQCLPTPAAWFAHHLPVWLHKLSVVATFLIEIAVPPLFFAPIRRLRLAAFYSQVLLQVLIIITGNYNFFNLMTLVLTTALLDDQHLAAEPGHGSRKKTATSWPKALLATLSLLLELAVYGLLAYGTVHYFGLEVDWQQRTIHSRTTFTFHQFSQWLKTLTLPTVWLGVASLVWELLSALWRWTQVRGWLRKLSAVVQLSLVGTATVALFLISLVPYSYVEPGTHGRLWTGAHRLFGAVEHLQLANSYGLFRRMTGLGGRPEVVLEGSYDGHHWTEIEFMYKPGNLSRPPPVVVPHQPRLDWQMWFAALGPHTHSPWFTSLVLRLLQGKEPVIRLVQSQVARYPFHKQPPTYVRAQRYKYWFSQPGEQGQWWRRQWVEEFFPSVSLGDPTLETLLRQFGLQEKSPPRTRSANSTLAQALHWTRSQLSPLEAPALLWGLLMAVGAVRFVQALLAPCSLRSSPLAPVSGEKRRPASQKDSGAASEQATAAPNPCSSSSRTTRRKK

SEQ ID NO: 46959 - protein, 500 aa, Homo sapiens
  Payload ID: 9496
  Gene Symbol: LIPG
  Gene Name: lipase, endothelial
  Uniprot ID: Q9Y5X9
  ENSP ID: ENSP00000261292
MSNSVPLLCFWSLCYCFAAGSPVPFGPEGRLEDKLHKPKATQTEVKPSVRFNLRTSKDPEHEGCYLSVGHSQPLEDCSFNMTAKTFFIIHGWTMSGIFENWLHKLVSALHTREKDANVVVVDWLPLAHQLYTDAVNNTRVVGHSIARMLDWLQEKDDFSLGNVHLIGYSLGAHVAGYAGNFVKGTVGRITGLDPAGPMFEGADIHKRLSPDDADFVDVLHTYTRSFGLSIGIQMPVGHIDIYPNGGDFQPGCGLNDVLGSIAYGTITEVVKCEHERAVHLFVDSLVNQDKPSFAFQCTDSNRFKKGICLSCRKNRCNSIGYNAKKMRNKRNSKMYLKTRAGMPFRVYHYQMKIHVFSYKNMGEIEPTFYVTLYGTNADSQTLPLEIVERIEQNATNTFLVYTEEDLGDLLKIQLTWEGASQSWYNLWKEFRSYLSQPRNPGRELNIRRIRVKSGETQRKLTFCTEDPENTSISPGRELWFRKCRDGWRMKNETSPTVELP

SEQ ID NO: 46960 - protein, 426 aa, Homo sapiens
  Payload ID: 9496
  Gene Symbol: LIPG
  Gene Name: lipase, endothelial
  ENSP ID: ENSP00000387978
MSNSVPLLCFWSLCYCFAAGSPVPFGPEGRLEDKLHKPKATQTEVKPSVRFNLRTSKDPEHEGCYLSVGHSQPLEDCSFNMTAKTFFIIHGWTMSGIFENWLHKLVSALHTREKDANVVVVDWLPLAHQLYTDAVNNTRVVGHSIARMLDWLQEKDDFSLGNVHLIGYSLGAHVAGYAGNFVKGTVGRITAITEVVKCEHERAVHLFVDSLVNQDKPSFAFQCTDSNRFKKGICLSCRKNRCNSIGYNAKKMRNKRNSKMYLKTRAGMPFRVYHYQMKIHVFSYKNMGEIEPTFYVTLYGTNADSQTLPLEIVERIEQNATNTFLVYTEEDLGDLLKIQLTWEGASQSWYNLWKEFRSYLSQPRNPGRELNIRRIRVKSGETQRKLTFCTEDPENTSISPGRELWFRKCRDGWRMKNETSPTVELP

SEQ ID NO: 46961 - protein, 354 aa, Homo sapiens
  Payload ID: 9496
  Gene Symbol: LIPG
  Gene Name: lipase, endothelial
  Uniprot ID: Q9Y5X9
  ENSP ID: ENSP00000462420
MSNSVPLLCFWSLCYCFAAGSPVPFGPEGRLEDKLHKPKATQTEVKPSVRFNLRTSKDPEHEGCYLSVGHSQPLEDCSFNMTAKTFFIIHGWTMSGIFENWLHKLVSALHTREKDANVVVVDWLPLAHQLYTDAVNNTRVVGHSIARMLDWLQEKDDFSLGNVHLIGYSLGAHVAGYAGNFVKGTVGRITGLDPAGPMFEGADIHKRLSPDDADFVDVLHTYTRSFGLSIGIQMPVGHIDIYPNGGDFQPGCGLNDVLGSIAYGTITEVVKCEHERAVHLFVDSLVNQDKPSFAFQCTDSNRFKKGICLSCRKNRCNSIGYNAKKMRNKRNSKMYLKTRAGMPFRGNLQSLECP

SEQ ID NO: 46962 - protein, 188 aa, Homo sapiens
  Payload ID: 9496
  Gene Symbol: LIPG
  Gene Name: lipase, endothelial
  ENSP ID: ENSP00000462480
LCYCFAAGSPVPFGPEGRLEDKLHKPKATQTEVKPSVRFNLRTSKDPEHEGCYLSVGHSQPLEDCSFNMTAKTFFIIHGWTMSGIFENWLHKLVSALHTREKDANVVVVDWLPLAHQLYTDAVNNTRVVGHSIARMLDWLQVLGDERESPVTSRISNPIFLRNAGHASVAMNFWSLIKIFEIKSFIEL

SEQ ID NO: 46963 - protein, 24 aa, Homo sapiens
  Payload ID: 9496
  Gene Symbol: LIPG
  Gene Name: lipase, endothelial
  ENSP ID: ENSP00000463077
MTAKTFFIIHGWTMSGIFENWLHK

SEQ ID NO: 46964 - protein, 390 aa, Homo sapiens
  Payload ID: 9496
  Gene Symbol: LIPG
  Gene Name: lipase, endothelial
  ENSP ID: ENSP00000463835
MLSFSRDRLPSGRRVSGKCPPPPLGMAVGRGGSGCPEEGSGRKLELLESQLPAERAREEAGPSVRRPRDKLHKPKATQTEVKPSVRFNLRTSKDPEHEGCYLSVGHSQPLEDCSFNMTAKTFFIIHGWTMSGIFENWLHKLVSALHTREKDANVVVVDWLPLAHQLYTDAVNNTRVVGHSIARMLDWLQEKDDFSLGNVHLIGYSLGAHVAGYAGNFVKGTVGRITGLDPAGPMFEGADIHKRLSPDDADFVDVLHTYTRSFGLSIGIQMPVGHIDIYPNGGDFQPGCGLNDVLGSIAYGTITEVVKCEHERAVHLFVDSLVNQDKPSFAFQCTDSNRFKKGICLSCRKNRCNSIGYNAKKMRNKRNSKMYLKTRAGMPFRGNLQSLECP

SEQ ID NO: 46965 - protein, 366 aa, Homo sapiens
  Payload ID: 9497
  Gene Symbol: LIPJ
  Gene Name: lipase, family member J
  Uniprot ID: Q5W064
  ENSP ID: ENSP00000361007
MNISQIISYWGYPDEEYDIVTEDGYILGLYRIPYWRTDNNKNLAQRVVVYLQHGLLTSASSWISNLPNNSLGFILADAGYDVWMGNSRGNTWSRKHLYLETSSKEFWAFSFDEMAKYDLPASIDFTVKQTRQEEIFYVGHSQGTTIGFITFSTISKIAERIKIFFALAPVFSTKYLKSPLIRMTYKWKSIVMAFSGNKDFLPKTSFKKFIGSKLCPLQIFDKICLNILFMMFGYDPKNLNMSRLDVYFSHNPAGTSVQNMLHWSQLLNSTHLKAYDWGSPDLNLVHYNQTTSPLYNMTNMNVATAIWNGKSDLLADPEDVNILHSEITNHIYYKTISYYNHIDSLFGLDVYDQVYHEIIDIIQDNL

SEQ ID NO: 46966 - protein, 154 aa, Homo sapiens
  Payload ID: 9497
  Gene Symbol: LIPJ
  Gene Name: lipase, family member J
  ENSP ID: ENSP00000434211
YVGHSQGTTIGFITFSTISKIAERIKIFFALAPVFSTKYLKSPLIRMTYKWKSIVMSRLDVYFSHNPAGTSVQNMLHWSQLLNSTHLKAYDWGSPDLNLVHYNQTTSPLYNMTNMNVATAIWNGKSDLLADPEDVNILHSEITNHIYYKTISYY

SEQ ID NO: 46967 - protein, 399 aa, Homo sapiens
  Payload ID: 9498
  Gene Symbol: LIPK
  Gene Name: lipase, family member K
  Uniprot ID: Q5VXJ0
  ENSP ID: ENSP00000383900
MWQLLAAACWMLLLGSMYGYDKKGNNANPEANMNISQIISYWGYPYEEYDVTTKDGYILGIYRIPHGRGCPGRTAPKPAVYLQHGLIASASNWICNLPNNSLAFLLADSGYDVWLGNSRGNTWSRKHLKLSPKSPEYWAFSLDEMAKYDLPATINFIIEKTGQKRLYYVGHSQGTTIAFIAFSTNPELAKKIKIFFALAPVVTVKYTQSPMKKLTTLSRRVVKVLFGDKMFHPHTLFDQFIATKVCNRKLFRRICSNFLFTLSGFDPQNLNMSRLDVYLSHNPAGTSVQNMLHWAQAVNSGQLQAFDWGNSDQNMMHFHQLTPPLYNITKMEVPTAIWNGGQDIVADPKDVENLLPQIANLIYYKLIPHYNHVDFYLGEDAPQEIYQDLIILMEEYLQN

SEQ ID NO: 46968 - protein, 423 aa, Homo sapiens
  Payload ID: 9499
  Gene Symbol: LIPM
  Gene Name: lipase, family member M
  Uniprot ID: Q5VYY2
  ENSP ID: ENSP00000383901
MLETLSRQWIVSHRMEMWLLILVAYMFQRNVNSVHMPTKAVDPEAFMNISEIIQHQGYPCEEYEVATEDGYILSVNRIPRGLVQPKKTGSRPVVLLQHGLVGGASNWISNLPNNSLGFILADAGFDVWMGNSRGNAWSRKHKTLSIDQDEFWAFSYDEMARFDLPAVINFILQKTGQEKIYYVGYSQGTTMGFIAFSTMPELAQKIKMYFALAPIATVKHAKSPGTKFLLLPDMMIKGLFGKKEFLYQTRFLRQLVIYLCGQVILDQICSNIMLLLGGFNTNNMNMSRASVYAAHTLAGTSVQNILHWSQAVNSGELRAFDWGSETKNLEKCNQPTPVRYRVRDMTVPTAMWTGGQDWLSNPEDVKMLLSEVTNLIYHKNIPEWAHVDFIWGLDAPHRMYNEIIHLMQQEETNLSQGRCEAVL

SEQ ID NO: 46969 - protein, 383 aa, Homo sapiens
  Payload ID: 9499
  Gene Symbol: LIPM
  Gene Name: lipase, family member M
  Uniprot ID: Q5VYY2
  ENSP ID: ENSP00000440375
MTRPLDRKQSEIIQHQGYPCEEYEVATEDGYILSVNRIPRGLVQPKKTGSRPVVLLQHGLVGGASNWISNLPNNSLGFILADAGFDVWMGNSRGNAWSRKHKTLSIDQDEFWAFSYDEMARFDLPAVINFILQKTGQEKIYYVGYSQGTTMGFIAFSTMPELAQKIKMYFALAPIATVKHAKSPGTKFLLLPDMMIKGLFGKKEFLYQTRFLRQLVIYLCGQVILDQICSNIMLLLGGFNTNNMNMSRASVYAAHTLAGTSVQNILHWSQAVNSGELRAFDWGSETKNLEKCNQPTPVRYRVRDMTVPTAMWTGGQDWLSNPEDVKMLLSEVTNLIYHKNIPEWAHVDFIWGLDAPHRMYNEIIHLMQQEETNLSQGRCEAVL

SEQ ID NO: 46970 - protein, 398 aa, Homo sapiens
  Payload ID: 9500
  Gene Symbol: LIPN
  Gene Name: lipase, family member N
  Uniprot ID: Q5VXI9
  ENSP ID: ENSP00000383923
MMWLLLTTTCLICGTLNAGGFLDLENEVNPEVWMNTSEIIIYNGYPSEEYEVTTEDGYILLVNRIPYGRTHARSTGPRPVVYMQHALFADNAYWLENYANGSLGFLLADAGYDVWMGNSRGNTWSRRHKTLSETDEKFWAFSFDEMAKYDLPGVIDFIVNKTGQEKLYFIGHSLGTTIGFVAFSTMPELAQRIKMNFALGPTISFKYPTGIFTRFFLLPNSIIKAVFGTKGFFLEDKKTKIASTKICNNKILWLICSEFMSLWAGSNKKNMNQSRMDVYMSHAPTGSSVHNILHIKQLYHSDEFRAYDWGNDADNMKHYNQSHPPIYDLTAMKVPTAIWAGGHDVLVTPQDVARILPQIKSLHYFKLLPDWNHFDFVWGLDAPQRMYSEIIALMKAYS

SEQ ID NO: 46971 - protein, 398 aa, Homo sapiens
  Payload ID: 9501
  Gene Symbol: LIPF
  Gene Name: lipase, gastric
  Uniprot ID: P07098
  ENSP ID: ENSP00000238983
MWLLLTMASLISVLGTTHGLFGKLHPGSPEVTMNISQMITYWGYPNEEYEVVTEDGYILEVNRIPYGKKNSGNTGQRPVVFLQHGLLASATNWISNLPNNSLAFILADAGYDVWLGNSRGNTWARRNLYYSPDSVEFWAFSFDEMAKYDLPATIDFIVKKTGQKQLHYVGHSQGTTIGFIAFSTNPSLAKRIKTFYALAPVATVKYTKSLINKLRFVPQSLFKFIFGDKIFYPHNFFDQFLATEVCSREMLNLLCSNALFIICGFDSKNFNTSRLDVYLSHNPAGTSVQNMFHWTQAVKSGKFQAYDWGSPVQNRMHYDQSQPPYYNVTAMNVPIAVWNGGKDLLADPQDVGLLLPKLPNLIYHKEIPFYNHLDFIWAMDAPQEVYNDIVSMISEDKK

SEQ ID NO: 46972 - protein, 375 aa, Homo sapiens
  Payload ID: 9501
  Gene Symbol: LIPF
  Gene Name: lipase, gastric
  Uniprot ID: P07098
  ENSP ID: ENSP00000348101
MFSNANSRSKMWLLLTMASLISVLGTTHGLFGKLHPGSPEVTMNISQMITYWGYPNEEYEVVTEDGYILEVNRIPYGKKNSGNTDAGYDVWLGNSRGNTWARRNLYYSPDSVEFWAFSFDEMAKYDLPATIDFIVKKTGQKQLHYVGHSQGTTIGFIAFSTNPSLAKRIKTFYALAPVATVKYTKSLINKLRFVPQSLFKFIFGDKIFYPHNFFDQFLATEVCSREMLNLLCSNALFIICGFDSKNFNTSRLDVYLSHNPAGTSVQNMFHWTQAVKSGKFQAYDWGSPVQNRMHYDQSQPPYYNVTAMNVPIAVWNGGKDLLADPQDVGLLLPKLPNLIYHKEIPFYNHLDFIWAMDAPQEVYNDIVSMISEDKK

SEQ ID NO: 46973 - protein, 408 aa, Homo sapiens
  Payload ID: 9501
  Gene Symbol: LIPF
  Gene Name: lipase, gastric
  Uniprot ID: P07098
  ENSP ID: ENSP00000377900
MFSNANSRSKMWLLLTMASLISVLGTTHGLFGKLHPGSPEVTMNISQMITYWGYPNEEYEVVTEDGYILEVNRIPYGKKNSGNTGQRPVVFLQHGLLASATNWISNLPNNSLAFILADAGYDVWLGNSRGNTWARRNLYYSPDSVEFWAFSFDEMAKYDLPATIDFIVKKTGQKQLHYVGHSQGTTIGFIAFSTNPSLAKRIKTFYALAPVATVKYTKSLINKLRFVPQSLFKFIFGDKIFYPHNFFDQFLATEVCSREMLNLLCSNALFIICGFDSKNFNTSRLDVYLSHNPAGTSVQNMFHWTQAVKSGKFQAYDWGSPVQNRMHYDQSQPPYYNVTAMNVPIAVWNGGKDLLADPQDVGLLLPKLPNLIYHKEIPFYNHLDFIWAMDAPQEVYNDIVSMISEDKK

SEQ ID NO: 46974 - protein, 365 aa, Homo sapiens
  Payload ID: 9501
  Gene Symbol: LIPF
  Gene Name: lipase, gastric
  Uniprot ID: P07098
  ENSP ID: ENSP00000477140
MWLLLTMASLISVLGTTHGLFGKLHPGSPEVTMNISQMITYWGYPNEEYEVVTEDGYILEVNRIPYGKKNSGNTDAGYDVWLGNSRGNTWARRNLYYSPDSVEFWAFSFDEMAKYDLPATIDFIVKKTGQKQLHYVGHSQGTTIGFIAFSTNPSLAKRIKTFYALAPVATVKYTKSLINKLRFVPQSLFKFIFGDKIFYPHNFFDQFLATEVCSREMLNLLCSNALFIICGFDSKNFNTSRLDVYLSHNPAGTSVQNMFHWTQAVKSGKFQAYDWGSPVQNRMHYDQSQPPYYNVTAMNVPIAVWNGGKDLLADPQDVGLLLPKLPNLIYHKEIPFYNHLDFIWAMDAPQEVYNDIVSMISEDKK

SEQ ID NO: 46975 - protein, 499 aa, Homo sapiens
  Payload ID: 9502
  Gene Symbol: LIPC
  Gene Name: lipase, hepatic
  Uniprot ID: P11150
  ENSP ID: ENSP00000299022
MDTSPLCFSILLVLCIFIQSSALGQSLKPEPFGRRAQAVETNKTLHEMKTRFLLFGETNQGCQIRINHPDTLQECGFNSSLPLVMIIHGWSVDGVLENWIWQMVAALKSQPAQPVNVGLVDWITLAHDHYTIAVRNTRLVGKEVAALLRWLEESVQLSRSHVHLIGYSLGAHVSGFAGSSIGGTHKIGRITGLDAAGPLFEGSAPSNRLSPDDANFVDAIHTFTREHMGLSVGIKQPIGHYDFYPNGGSFQPGCHFLELYRHIAQHGFNAITQTIKCSHERSVHLFIDSLLHAGTQSMAYPCGDMNSFSQGLCLSCKKGRCNTLGYHVRQEPRSKSKRLFLVTRAQSPFKVYHYQFKIQFINQTETPIQTTFTMSLLGTKEKMQKIPITLGKGIASNKTYSFLITLDVDIGELIMIKFKWENSAVWANVWDTVQTIIPWSTGPRHSGLVLKTIRVKAGETQQRMTFCSENTDDLLLRPTQEKIFVKCEIKSKTSKRKIR

SEQ ID NO: 46976 - protein, 499 aa, Homo sapiens; identical to SEQ ID NO: 46975
  Payload ID: 9502
  Gene Symbol: LIPC
  Gene Name: lipase, hepatic
  Uniprot ID: P11150
  ENSP ID: ENSP00000348425

SEQ ID NO: 46977 - protein, 438 aa, Homo sapiens
  Payload ID: 9502
  Gene Symbol: LIPC
  Gene Name: lipase, hepatic
  ENSP ID: ENSP00000395002
MDTSPLCFSILLVLCIFIQSSALGQSLKPEPFGRRAQAVETNKTLHEMKTRFLLFGETNQGCQIRINHPDTLQECGFNSSLPLVMIIHGWSESVQLSRSHVHLIGYSLGAHVSGFAGSSIGGTHKIGRITGLDAAGPLFEGSAPSNRLSPDDANFVDAIHTFTREHMGLSVGIKQPIGHYDFYPNGGSFQPGCHFLELYRHIAQHGFNAITQTIKCSHERSVHLFIDSLLHAGTQSMAYPCGDMNSFSQGLCLSCKKGRCNTLGYHVRQEPRSKSKRLFLVTRAQSPFKVYHYQFKIQFINQTETPIQTTFTMSLLGTKEKMQKIPITLGKGIASNKTYSFLITLDVDIGELIMIKFKWENSAVWANVWDTVQTIIPWSTGPRHSGLVLKTIRVKAGETQQRMTFCSENTDDLLLRPTQEKIFVKCEIKSKTSKRKIR

SEQ ID NO: 46978 - protein, 499 aa, Homo sapiens
  Payload ID: 9502
  Gene Symbol: LIPC
  Gene Name: lipase, hepatic
  ENSP ID: ENSP00000395569
MDTSPLCFSILLVLCIFIQSSALGQSLKPEPFGRRAQAVETNKTLHEMKTRFLLFGETNQGCQIRINHPDTLQECGFNSSLPLVMIIHGWSVDGVLENWIWQMVAALKSQPAQPVNVGLVDWITLAHDHYTIAVRNTRLVGKEVAALLRWLEESVQLSRSHVHLIGYSLGAHVSGFAGSSIGGTHKIGRITGLDAAGPLFEGSAPSNRLSPDDANFVDAIHTFTREHMGLSVGIKQPIGHYDFYPNGGSFQPGCHFLELYRHIAQHGFNAITQTIKCSHERSVHLFIDSLLHAGTQSMAYPCGDMNSFSQGLCLSCKKGRCNTLGYHVRQEPRSKSKRLFLVTRAQSPFKVYHYQFKIQFINQTETPIQTTFTMSLLGTKEKMQKIPITLGKGIASNKTYSFLITLDVDIGELIMIKFKWENSAVWANVWDTVQTIIPWSTGPRHSGLVLKTIRVKAGETQQRSPNRINLGRLNCSLLFCTELFSHDSLAHWSSAASEL

SEQ ID NO: 46979 - protein, 1076 aa, Homo sapiens
  Payload ID: 9503
  Gene Symbol: LIPE
  Gene Name: lipase, hormone-sensitive
  Uniprot ID: Q05469
  ENSP ID: ENSP00000244289
MEPGSKSVSRSDWQPEPHQRPITPLEPGPEKTPIAQPESKTLQGSNTQQKPASNQRPLTQQETPAQHDAESQKEPRAQQKSASQEEFLAPQKPAPQQSPYIQRVLLTQQEAASQQGPGLGKESITQQEPALRQRHVAQPGPGPGEPPPAQQEAESTPAAQAKPGAKREPSAPTESTSQETPEQSDKQTTPVQGAKSKQGSLTELGFLTKLQELSIQRSALEWKALSEWVTDSESESDVGSSSDTDSPATMGGMVAQGVKLGFKGKSGYKVMSGYSGTSPHEKTSARNHRHYQDTASRLIHNMDLRTMTQSLVTLAEDNIAFFSSQGPGETAQRLSGVFAGVREQALGLEPALGRLLGVAHLFDLDPETPANGYRSLVHTARCCLAHLLHKSRYVASNRRSIFFRTSHNLAELEAYLAALTQLRALVYYAQRLLVTNRPGVLFFEGDEGLTADFLREYVTLHKGCFYGRCLGFQFTPAIRPFLQTISIGLVSFGEHYKRNETGLSVAASSLFTSGRFAIDPELRGAEFERITQNLDVHFWKAFWNITEMEVLSSLANMASATVRVSRLLSLPPEAFEMPLTADPTLTVTISPPLAHTGPGPVLVRLISYDLREGQDSEELSSLIKSNGQRSLELWPRPQQAPRSRSLIVHFHGGGFVAQTSRSHEPYLKSWAQELGAPIISIDYSLAPEAPFPRALEECFFAYCWAIKHCALLGSTGERICLAGDSAGGNLCFTVALRAAAYGVRVPDGIMAAYPATMLQPAASPSRLLSLMDPLLPLSVLSKCVSAYAGAKTEDHSNSDQKALGMMGLVRRDTALLLRDFRLGASSWLNSFLELSGRKSQKMSEPIAEPMRRSVSEAALAQPQGPLGTDSLKNLTLRDLSLRGNSETSSDTPEMSLSAETLSPSTPSDVNFLLPPEDAGEEAEAKNELSPMDRGLGVRAAFPEGFHPRRSSQGATQMPLYSSPIVKNPFMSPLLAPDSMLKSLPPVHIVACALDPMLDDSVMLARRLRNLGQPVTLRVVEDLPHGFLTLAALCRETRQAAELCVERIRLVLTPPAGAGPSGETGAAGVDGGCGGRH

SEQ ID NO: 46980 - protein, 80 aa, Homo sapiens
  Payload ID: 9503
  Gene Symbol: LIPE
  Gene Name: lipase, hormone-sensitive
  ENSP ID: ENSP00000469030
MDLRTMTQSLVTLAEDNIAFFSSQGPGETAQRLSGVFAGVREQALGLEPALGRLLGVAHLFDLDPETPANGYRSLVHTAR

SEQ ID NO: 46981 - protein, 176 aa, Homo sapiens
  Payload ID: 9503
  Gene Symbol: LIPE
  Gene Name: lipase, hormone-sensitive
  ENSP ID: ENSP00000469268
MDLRTMTQSLVTLAEDNIAFFSSQGPGETAQRLSGVFAGVREQALGLEPALGRLLGVAHLFDLDPETPANGYRSLVHTARCCLAHLLHKSRYVASNRRSIFFRTSHNLAELEAYLAALTQLRALVYYAQRLLVTNRPGVLFFEGDEGLTADFLREYVTLHKGCFYGRCLGFQFTPA

SEQ ID NO: 46982 - protein, 305 aa, Homo sapiens
  Payload ID: 9503
  Gene Symbol: LIPE
  Gene Name: lipase, hormone-sensitive
  ENSP ID: ENSP00000469545
  MOD_RES (1)..(1): Any amino acid
XEECFFAYCWAIKHCALLGAKTEDHSNSDQKALGMMGLVRRDTALLLRDFRLGASSWLNSFLELSGRKSQKMSEPIAEPMRRSVSEAALAQPQGPLGTDSLKNLTLRDLSLRGNSETSSDTPEMSLSAETLSPSTPSDVNFLLPPEDAGEEAEAKNELSPMDRGLGVRAAFPEGFHPRRSSQGATQMPLYSSPIVKNPFMSPLLAPDSMLKSLPPVHIVACALDPMLDDSVMLARRLRNLGQPVTLRVVEDLPHGFLTLAALCRETRQAAELCVERIRLVLTPPAGAGPSGETGAAGVDGGCGGR

SEQ ID NO: 46983 - protein, 260 aa, Homo sapiens
  Payload ID: 9503
  Gene Symbol: LIPE
  Gene Name: lipase, hormone-sensitive
  ENSP ID: ENSP00000469990
MELAGGTEPAEAAMAPASKNAKEGSRSHGRRRWRKDKAKASRLIHNMDLRTMTQSLVTLAEDNIAFFSSQGPGETAQRLSGVFAGVREQALGLEPALGRLLGVAHLFDLDPETPANGYRSLVHTARCCLAHLLHKSRYVASNRRSIFFRTSHNLAELEAYLAALTQLRALVYYAQRLLVTNRPGVLFFEGDEGLTADFLREYVTLHKGCFYGRCLGFQFTPAIRPFLQTISIGLVSFGEHYKRNETGLSVAASSLFTSGR

SEQ ID NO: 46984 - protein, 275 aa, Homo sapiens
  Payload ID: 9503
  Gene Symbol: LIPE
  Gene Name: lipase, hormone-sensitive
  ENSP ID: ENSP00000472218
  MOD_RES (1)..(1): Any amino acid
XRAAAYGVRVPDGIMAAYPATMLQPAASPSRLLSLMDPLLPLSVLSKCVSAYAGAKTEDHSNSDQKALGMMGLVRRDTALLLRDFRLGASSWLNSFLELSGRKSQKMSEPIAGLSALPLSEPMRRSVSEAALAQPQGPLGTDSLKNLTLRDLSLRGNSETSSDTPEMSLSAETLSPSTPSDVNFLLPPEDAGEEAEAKNELSPMDRGLGVRAAFPEGFHPRRSSQGATQMPLYSSPIVKNPFMSPLLAPDSMLKSLPPVHIVACALDPMLDDSVM

SEQ ID NO: 46985 - protein, 222 aa, Homo sapiens
  Payload ID: 9503
  Gene Symbol: LIPE
  Gene Name: lipase, hormone-sensitive
  ENSP ID: ENSP00000472531
MPRRASRLIHNMDLRTMTQSLVTLAEDNIAFFSSQGPGETAQRLSGVFAGVREQALGLEPALGRLLGVAHLFDLDPETPANGYRSLVHTARCCLAHLLHKSRYVASNRRSIFFRTSHNLAELEAYLAALTQLRALVYYAQRLLVTNRPGVLFFEGDEGLTADFLREYVTLHKGCFYGRCLGFQFTPAIRPFLQTISIGLVSFGEHYKRNETGLSVAASSLFT

SEQ ID NO: 46986 - protein, 451 aa, Homo sapiens
  Payload ID: 9504
  Gene Symbol: LIPH
  Gene Name: lipase, member H
  Uniprot ID: Q8WWY8
  ENSP ID: ENSP00000296252
MLRFYLFISLLCLSRSDAEETCPSFTRLSFHSAVVGTGLNVRLMLYTRKNLTCAQTINSSAFGNLNVTKKTTFIVHGFRPTGSPPVWMDDLVKGLLSVEDMNVVVVDWNRGATTLIYTHASSKTRKVAMVLKEFIDQMLAEGASLDDIYMIGVSLGAHISGFVGEMYDGWLGRITGLDPAGPLFNGKPHQDRLDPSDAQFVDVIHSDTDALGYKEPLGNIDFYPNGGLDQPGCPKTILGGFQYFKCDHQRSVYLYLSSLRESCTITAYPCDSYQDYRNGKCVSCGTSQKESCPLLGYYADNWKDHLRGKDPPMTKAFFDTAEESPFCMYHYFVDIITWNKNVRRGDITIKLRDKAGNTTESKINHEPTTFQKYHQVSLLARFNQDLDKVAAISLMFSTGSLIGPRYKLRILRMKLRSLAHPERPQLCRYDLVLMENVETVFQPILCPELQL

SEQ ID NO: 46987 - protein, 73 aa, Homo sapiens
  Payload ID: 9504
  Gene Symbol: LIPH
  Gene Name: lipase, member H
  ENSP ID: ENSP00000390228
  MOD_RES (1)..(1): Any amino acid
XSPFCMYHYFVDIITWNKNVRRGDITIKLRDKAGNTTESKINQISNRPKVQAQDSPNEVKVPCPSGEASAVSV

SEQ ID NO: 46988 - protein, 417 aa, Homo sapiens
  Payload ID: 9504
  Gene Symbol: LIPH
  Gene Name: lipase, member H
  ENSP ID: ENSP00000396384
MLRFYLFISLLCLSRSDAEETCPSFTRLSFHSAVVGTGLNVRLMLYTRKNLTCAQTINSSAFGNLNVTKKTTFIVHGFRPTGSPPVWMDDLVKGLLSVEDMNVVVVDWNRGATTLIYTHASSKTRKVAMVLKEFIDQMLAEGASLDDIYMIGVSLGAHISGFVGEMYDGWLGRITALGYKEPLGNIDFYPNGGLDQPGCPKTILGGFQYFKCDHQRSVYLYLSSLRESCTITAYPCDSYQDYRNGKCVSCGTSQKESCPLLGYYADNWKDHLRGKDPPMTKAFFDTAEESPFCMYHYFVDIITWNKNVRRGDITIKLRDKAGNTTESKINHEPTTFQKYHQVSLLARFNQDLDKVAAISLMFSTGSLIGPRYKLRILRMKLRSLAHPERPQLCRYDLVLMENVETVFQPILCPELQL

SEQ ID NO: 46989 - protein, 85 aa, Homo sapiens
  Payload ID: 9504
  Gene Symbol: LIPH
  Gene Name: lipase, member H
  ENSP ID: ENSP00000408218
  MOD_RES (1)..(1): Any amino acid
XDIYMIGVSLGAHISGFVGEMYDGWLGRITGFQYFKCDHQRSVYLYLSSLRESCTITAYPCDSYQDYRNGKCVSCGTSQKESCPL

SEQ ID NO: 46990 - protein, 47 aa, Homo sapiens
  Payload ID: 9504
  Gene Symbol: LIPH
  Gene Name: lipase, member H
  ENSP ID: ENSP00000414311
MLRFYLFISLLCLSRSDASLDMNEESPLFEEGFLQSEIWEIKLIPPK

SEQ ID NO: 46991 - protein, 481 aa, Homo sapiens
  Payload ID: 9505
  Gene Symbol: LIPI
  Gene Name: lipase, member I
  Uniprot ID: Q6XZB0
  ENSP ID: ENSP00000343331
MLLKCLHNNLCQKYSAHAFQFSPRNVLWLLVVCLRSDNKRPCLEFSQLSVKDSFRDLFIPRIETILMMYTRNNLNCAEPLFEQNNSLNVNFNTQKKTVWLIHGYRPVGSIPLWLQNFVRILLNEEDMNVIVVDWSRGATTFIYNRAVKNTRKVAVSLSVHIKNLLKHGASLDNFHFIGVSLGAHISGFVGKIFHGQLGRITGLDPAGPRFSRKPPYSRLDYTDAKFVDVIHSDSNGLGIQEPLGHIDFYPNGGNKQPGCPKSIFSGIQFIKCNHQRAVHLFMASLETNCNFISFPCRSYKDYKTSLCVDCDCFKEKSCPRLGYQAKLFKGVLKERMEGRPLRTTVFLDTSGTYPFCTYYFVLSIIVPDKTMMDGSFSFKLLNQLGMIEEPRLYEKNKPFYKLQEVKILAQFYNDFVNISSIGLTYFQSSNLQCSTCTYKIQSLMLKSLTYPERPPLCRYNIVLKDREEVFLNPNTCTPKNT

SEQ ID NO: 46992 - protein, 141 aa, Homo sapiens
  Payload ID: 9505
  Gene Symbol: LIPI
  Gene Name: lipase, member I
  ENSP ID: ENSP00000383072
  MOD_RES (1)..(1): Any amino acid
XYNRAVKNTRKVAVSLSVHIKNLLKHGASLDNFHFIGVSLGAHISGFVGKIFHGQLGRITGLDPAGPRFSRKPPYSRLDYTDAKFVDVIHSDSNGIQFIKCNHQRAVHLFMASLETNCNFISFPCRSYKDYKTSLCVDCDC

SEQ ID NO: 46993 - protein, 451 aa, Homo sapiens
  Payload ID: 9505
  Gene Symbol: LIPI
  Gene Name: lipase, member I
  Uniprot ID: Q6XZB0
  ENSP ID: ENSP00000440381
MCWVRSDNKRPCLEFSQLSVKDSFRDLFIPRIETILMMYTRNNLNCAEPLFEQNNSLNVNFNTQKKTVWLIHGYRPVGSIPLWLQNFVRILLNEEDMNVIVVDWSRGATTFIYNRAVKNTRKVAVSLSVHIKNLLKHGASLDNFHFIGVSLGAHISGFVGKIFHGQLGRITGLDPAGPRFSRKPPYSRLDYTDAKFVDVIHSDSNGLGIQEPLGHIDFYPNGGNKQPGCPKSIFSGIQFIKCNHQRAVHLFMASLETNCNFISFPCRSYKDYKTSLCVDCDCFKEKSCPRLGYQAKLFKGVLKERMEGRPLRTTVFLDTSGTYPFCTYYFVLSIIVPDKTMMDGSFSFKLLNQLGMIEEPRLYEKNKPFYKLQEVKILAQFYNDFVNISSIGLTYFQSSNLQCSTCTYKIQSLMLKSLTYPERPPLCRYNIVLKDREEVFLNPNTCTPKNT

SEQ ID NO: 46994 - protein, 421 aa, Homo sapiens
  Payload ID: 9505
  Gene Symbol: LIPI
  Gene Name: lipase, member I
  ENSP ID: ENSP00000482652
MCWVRSDNKRPCLEFSQLSVKDSFRDLFIPRIETILMMYTRNNLNCAEPLFEQNNSLNVNFNTQKKTVWLIHGYRPVGSIPLWLQNFVRILLNEEDMNVIVVDWSRGATTFIYNRAVKNTRKVAVSLSVHIKNLLKHGASLDNFHFIGVSLGAHISGFVGKIFHGQLGRITGLDPAGPRFSRKPPYSRLDYTDAKFVDVIHSDSNGIQFIKCNHQRAVHLFMASLETNCNFISFPCRSYKDYKTSLCVDCDCFKEKSCPRLGYQAKLFKGVLKERMEGRPLRTTVFLDTSGTYPFCTYYFVLSIIVPDKTMMDGSFSFKLLNQLGMIEEPRLYEKNKPFYKLQEVKILAQFYNDFVNISSIGLTYFQSSNLQCSTCTYKIQSLMLKSLTYPERPPLCRYNIVLKDREEVFLNPNTCTPKNT

SEQ ID NO: 46995 - protein, 325 aa, Homo sapiens
  Payload ID: 9506
  Gene Symbol: LDAH
  Gene Name: lipid droplet associated hydrolase
  Uniprot ID: Q9H6V9
  ENSP ID: ENSP00000237822
MDSELKEEIPVHEEFILCGGAETQVLKCGPWTDLFHDQSVKRPKLLIFIIPGNPGFSAFYVPFAKALYSLTNRRFPVWTISHAGHALAPKDKKILTTSEDSNAQEIKDIYGLNGQIEHKLAFLRTHVPKDMKLVLIGHSIGSYFTLQMLKRVPELPVIRAFLLFPTIERMSESPNGRIATPLLCWFRYVLYVTGYLLLKPCPETIKSLLIRRGLQVMNLENEFSPLNILEPFCLANAAYLGGQEMMEVVKRDDETIKEHLCKLTFYYGTIDPWCPKEYYEDIKKDFPEGDIRLCEKNIPHAFITHFNQEMADMIADSLKDDLSKM

SEQ ID NO: 46996 - protein, 370 aa, Homo sapiens
  Payload ID: 9506
  Gene Symbol: LDAH
  Gene Name: lipid droplet associated hydrolase
  ENSP ID: ENSP00000370480
MDSELKEEIPVHEEFILCGGAETQVLKCGPWTDLFHDQSVKRPKLLIFIIPGNPGFSAFYVPFAKALYSLTNRRFPVWTISHAGHALAPKDKKILTTSEDSNAQEIKDIYGLNGQIEHKLAFLRTHVPKDMKLVLIGHSIGSYFTLQMLKRVPELPVIRAFLLFPTIERMSESPNGRIATPLLCWFRYVLYVTGYLLLKPCPETIKSLLIRRGLQVMNLENEFSPLNILEPFCLANAAYLGGQEMMEVVKRDDETIKEHLCKLTFYYGTIDPWCPKEYYEDIKKDFPEGDIRLCEKNIPHAFITHFNQEMADMIADSLKDDLSKIGNPSWHYHSLRTMRCPSAQILKPPDERFGSDLLPTYWWKNQISRD

SEQ ID NO: 46997 - protein, 240 aa, Homo sapiens
  Payload ID: 9506
  Gene Symbol: LDAH
  Gene Name: lipid droplet associated hydrolase
  ENSP ID: ENSP00000384267
MKLVLIGHSIGSYFTLQMLKRVPELPVIRAFLLFPTIERMSESPNGRIATPLLCWFRYVLYVTGYLLLKPCPETIKSLLIRRGLQVMNLENEFSPLNILEPFCLANAAYLGGQEMMEVVKRDDETIKEHLCKLTFYYGTIDPWCPKEYYEDIKKDFPEGDIRLCEKNIPHAFITHFNQEMADMIADSLKDDLSKIGNPSWHYHSLRTMRCPSAQILKPPDERFGSDLLPTYWWKNQISRD

SEQ ID NO: 46998 - protein, 146 aa, Homo sapiens
  Payload ID: 9506
  Gene Symbol: LDAH
  Gene Name: lipid droplet associated hydrolase
  ENSP ID: ENSP00000385951
MDSELKEEIPVHEEFILCGGAETQVLKCGPWTDLFHDQSVKRPKLLIFIIPGERKSLGNPGFSAFYVPFAKALYSLTNRRFPVWTISHAGHALAPKDKKILTTSEDSNAQEIKDIYGLNGQIEHKLAFLRTHVPKDMKLVLIGHSI

SEQ ID NO: 46999 - protein, 283 aa, Homo sapiens
  Payload ID: 9506
  Gene Symbol: LDAH
  Gene Name: lipid droplet associated hydrolase
  ENSP ID: ENSP00000388635
MDSELKEEIPVHEEFILCGGAETQVLKCGPWTDLFHDQSVKRPKLLIFIIPGERKSLDSNAQEIKDIYGLNGQIEHKLAFLRTHVPKDMKLVLIGHSIGSYFTLQMLKRVPELPVIRAFLLFPTIERMSESPNGRIATPLLCWFRYVLYVTGYLLLKPCPETIKSLLIRRGLQVMNLENEFSPLNILEPFCLANAAYLGGQEMMEVVKRDDETIKEHLCKLTFYYGTIDPWCPKEYYEDIKKDFPEGDIRLCEKNIPHAFITHFNQEMADMIADSLKDDLSKM

SEQ ID NO: 47000 - protein, 130 aa, Homo sapiens
  Payload ID: 9506
  Gene Symbol: LDAH
  Gene Name: lipid droplet associated hydrolase
  ENSP ID: ENSP00000396911
MKLVLIGHSIGSYFTLQMLKRVPELPVIRAFLLFPTIERMSESPNGRIATPLLCWFRYVLYVTGYLLLKPCPETIKSLLIRRGLQVMNLENEFSPLNILEPFCLANAAYLGGQEMMEVVKRDDETIKEHL

SEQ ID NO: 47001 - protein, 166 aa, Homo sapiens
  Payload ID: 9506
  Gene Symbol: LDAH
  Gene Name: lipid droplet associated hydrolase
  ENSP ID: ENSP00000400340
MDSELKEEIPVHEEFILCGGAETQVLKCGPWTDLFHDQSVKRPKLLIFIIPGNPGFSAFYVPFAKALYSLTNRRFPVWTISHAGHALAPKDKKILTTSEDSNAQEIKDIYGLNGQIEHKLAFLRTHVPKDMKLVLIGHSIGSYFTLQMLKRVPELPLMLPTLGAKK

SEQ ID NO: 47002 - protein, 159 aa, Homo sapiens
  Payload ID: 9506
  Gene Symbol: LDAH
  Gene Name: lipid droplet associated hydrolase
  ENSP ID: ENSP00000400910
MDSELKEEIPVHEEFILCGGAETQVLKCGPWTDLFHDQSVKRPKLLIFIIPDSNAQEIKDIYGLNGQIEHKLAFLRTHVPKDMKLVLIGHSIGSYFTLQMLKRVPELPVIRAFLLFPTIERMSESPNGRIATPLLCWFRYVLYVTGYLLLKPCPETIKS

SEQ ID NO: 47003 - protein, 156 aa, Homo sapiens
  Payload ID: 9506
  Gene Symbol: LDAH
  Gene Name: lipid droplet associated hydrolase
  ENSP ID: ENSP00000414710
MDSELKEEIPVHEEFILCGGAETQVLKCGPWTDLFHDQSVKRPKLLIFIIPGNPGFSAFYVPFAKALYSLTNRRFPVWTISHAGHALAPKDKKILTTSEGGILAVLSWWTQEASPLGTLAGSTLMTPSDPNYFPKTPLHLLIAFGHRVSPMDLGAI

SEQ ID NO: 47004 - protein, 195 aa, Homo sapiens
  Payload ID: 9506
  Gene Symbol: LDAH
  Gene Name: lipid droplet associated hydrolase
  Uniprot ID: Q9H6V9
  ENSP ID: ENSP00000440570
MKLVLIGHSIGSYFTLQMLKRVPELPVIRAFLLFPTIERMSESPNGRIATPLLCWFRYVLYVTGYLLLKPCPETIKSLLIRRGLQVMNLENEFSPLNILEPFCLANAAYLGGQEMMEVVKRDDETIKEHLCKLTFYYGTIDPWCPKEYYEDIKKDFPEGDIRLCEKNIPHAFITHFNQEMADMIADSLKDDLSKM

SEQ ID NO: 47005 - protein, 195 aa, Homo sapiens; identical to SEQ ID NO: 47004
  Payload ID: 9506
  Gene Symbol: LDAH
  Gene Name: lipid droplet associated hydrolase
  Uniprot ID: Q9H6V9
  ENSP ID: ENSP00000483067

SEQ ID NO: 47006 - protein, 277 aa, Homo sapiens
  Payload ID: 9506
  Gene Symbol: LDAH
  Gene Name: lipid droplet associated hydrolase
  Uniprot ID: Q9H6V9
  ENSP ID: ENSP00000487592
MDSELKEEIPVHEEFILCGGAETQVLKCGPWTDLFHDQSVKRPKLLIFIIPDSNAQEIKDIYGLNGQIEHKLAFLRTHVPKDMKLVLIGHSIGSYFTLQMLKRVPELPVIRAFLLFPTIERMSESPNGRIATPLLCWFRYVLYVTGYLLLKPCPETIKSLLIRRGLQVMNLENEFSPLNILEPFCLANAAYLGGQEMMEVVKRDDETIKEHLCKLTFYYGTIDPWCPKEYYEDIKKDFPEGDIRLCEKNIPHAFITHFNQEMADMIADSLKDDLSKM

SEQ ID NO: 47007 - protein, 890 aa, Homo sapiens
  Payload ID: 9507
  Gene Symbol: LPIN1
  Gene Name: lipin 1
  Uniprot ID: Q14693
  ENSP ID: ENSP00000256720
MNYVGQLAGQVFVTVKELYKGLNPATLSGCIDIIVIRQPNGNLQCSPFHVRFGKMGVLRSREKVVDIEINGESVDLHMKLGDNGEAFFVQETDNDQEVIPMHLATSPILSEGASRMECQLKRGSVDRMRGLDPSTPAQVIAPSETPSSSSVVKKRRKRRRKSQLDSLKRDDNMNTSEDEDMFPIEMSSDEAMELLESSRTLPNDIPPFQDDIPEENLSLAVIYPQSASYPNSDREWSPTPSPSGSRPSTPKSDSELVSKSTERTGQKNPEMLWLWGELPQAAKSSSPHKMKESSPLSSRKICDKSHFQAIHSESSDTFSDQSPTLVGGALLDQNKPQTEMQFVNEEDLETLGAAAPLLPMIEELKPPSASVVQTANKTDSPSRKRDKRSRHLGADGVYLDDLTDMDPEVAALYFPKNGDPSGLAKHASDNGARSANQSPQSVGSSGVDSGVESTSDGLRDLPSIAISLCGGLSDHREITKDAFLEQAVSYQQFVDNPAIIDDPNLVVKIGSKYYNWTTAAPLLLAMQAFQKPLPKATVESIMRDKMPKKGGRWWFSWRGRNTTIKEESKPEQCLAGKAHSTGEQPPQLSLATRVKHESSSSDEERAAAKPSNAGHLPLLPNVSYKKTLRLTSEQLKSLKLKNGPNDVVFSVTTQYQGTCRCEGTIYLWNWDDKVIISDIDGTITRSDTLGHILPTLGKDWTHQGIAKLYHKVSQNGYKFLYCSARAIGMADMTRGYLHWVNERGTVLPQGPLLLSPSSLFSALHREVIEKKPEKFKVQCLTDIKNLFFPNTEPFYAAFGNRPADVYSYKQVGVSLNRIFTVNPKGELVQEHAKTNISSYVRLCEVVDHVFPLLKRSHSSDFPCSDTFSNFTFWREPLPPFENQDIHSASA

SEQ ID NO: 47008 - protein, 932 aa, Homo sapiens
  Payload ID: 9507
  Gene Symbol: LPIN1
  Gene Name: lipin 1
  Uniprot ID: Q14693
  ENSP ID: ENSP00000379404
MSRVQTMNYVGQLAGQVFVTVKELYKGLNPATLSGCIDIIVIRQPNGNLQCSPFHVRFGKMGVLRSREKVVDIEINGESVDLHMKLGDNGEAFFVQETDNDQEVIPMHLATSPILSEGASRMECQLKRGSVDRMRGLDPSTPAQVIAPSETPSSSSVVKKRRKRRRKSQLDSLKRDDNMNTSEDEDMFPIEMSSDEAMELLESSRTLPNDIPPFQDDIPEENLSLAVIYPQSASYPNSDREWSPTPSSLVDCKRTAPHLAVAAEGGLSSSCPPQSSLFHPSESPSGSRPSTPKSDSELVSKSTERTGQKNPEMLWLWGELPQAAKSSSPHKMKESSPLSSRKICDKSHFQAIHSESSDTFSDQSPTLVGGALLDQNKPQTEMQFVNEEDLETLGAAAPLLPMIEELKPPSASVVQTANKTDSPSRKRDKRSRHLGADGVYLDDLTDMDPEVAALYFPKNGDPSGLAKHASDNGARSANQSPQSVGSSGVDSGVESTSDGLRDLPSIAISLCGGLSDHREITKDAFLEQAVSYQQFVDNPAIIDDPNLVVKIGSKYYNWTTAAPLLLAMQAFQKPLPKATVESIMRDKMPKKGGRWWFSWRGRNTTIKEESKPEQCLAGKAHSTGEQPPQLSLATRVKHESSSSDEERAAAKPSNAGHLPLLPNVSYKKTLRLTSEQLKSLKLKNGPNDVVFSVTTQYQGTCRCEGTIYLWNWDDKVIISDIDGTITRSDTLGHILPTLGKDWTHQGIAKLYHKVSQNGYKFLYCSARAIGMADMTRGYLHWVNERGTVLPQGPLLLSPSSLFSALHREVIEKKPEKFKVQCLTDIKNLFFPNTEPFYAAFGNRPADVYSYKQVGVSLNRIFTVNPKGELVQEHAKTNISSYVRLCEVVDHVFPLLKRSHSSDFPCSDTFSNFTFWREPLPPFENQDIHSASA

SEQ ID NO: 47009 - protein, 459 aa, Homo sapiens
  Payload ID: 9507
  Gene Symbol: LPIN1
  Gene Name: lipin 1
  Uniprot ID: Q14693
  ENSP ID: ENSP00000379405
MSRVQTMNYVGQLAGQVFVTVKELYKGLNPATLSGCIDIIVIRQPNGNLQCSPFHVRFGKMGVLRSREKVVDIEINGESVDLHMKLGDNGEAFFVQETDNDQEVIPMHLATSPILSEGASRMECQLKRGSVDRMRGLDPSTPAQVIAPSETPSSSSVVKKRRKRRRKSQLDSLKRDDNMNTSEDEDMFPIEMSSDEAMELLESSRTLPNDIPPFQDDIPEENLSLAVIYPQSASYPNSDREWSPTPSSLVDCKRTAPHLAVAAEGGLSSSCPPQSSLFHPSESPSGSRPSTPKSDSELVSKSTERTGQKNPEMLWLWGELPQAAKSSSPHKMKESSPLSSRKICDKSHFQAIHSESSDTFSDQSPTLVGGALLDQNKPQTEMQFVNEEDLETLGAAAPLLPMIEELKPPSASVVQTANKTDSPSRKRDKRSRHLGADGVYLDDLTDMDPEVAALYFPKK

SEQ ID NO: 47010 - protein, 701 aa, Homo sapiens
  Payload ID: 9507
  Gene Symbol: LPIN1
  Gene Name: lipin 1
  ENSP ID: ENSP00000379406
MSRVQTMNYVGQLAGQVFVTVKELYKGLNPATLSGCIDIIVIRQPNGNLQCSPFHVRFGKMGVLRSREKVVDIEINGESVDLHMKLGDNGEAFFVQETDNDQEVIPMHLATSPILSEGASRMECQLKRGSVDRMRGLDPSTPAQVIAPSETPSSSSVVKKRRKRRRKSQLDSLKRDDNMNTSEDEDMFPIEMSSDEAMELLESSRTLPNDIPPFQDDIPEENLSLAVIYPQSASYPNSDREWSPTPSSLVDCKRTAPHLAVAAEGGLSSSCPPQSSLFHPSESPSGSRPSTPKSDSELVSKSTERTGQKNPEMLWLWGELPQAAKSSSPHKMKESSPLSSRKICDKSHFQAIHSESSDTFSDQSPTLVGGALLDQNKPQTEMQFVNEEDLETLGAAAPLLPMIEELKPPSASVVQTANKTDSPSRKRDKRSRHLGADGVYLDDLTDMDPEVAALYFPKNGDPSGLAKHASDNGARSANQSPQSVGSSGVDSGVESTSDGLRDLPSIAISLCGGLSDHREITKDAFLEQAVSYQQFVDNPAIIDDPNLVVKIGSKYYNWTTAAPLLLAMQAFQKPLPKATVESIMRDKMPKKGGRWWFSWRGRNTTIKEESKPEQCLAGKAHSTGEQPPQLSLATRVKHESSSSDEERAAAKPSNAGHLPLLPNVSYKKTLRLTSEQLLEVEEWPQRRGFQCHHAVPRHVPL

SEQ ID NO: 47011 - protein, 28 aa, Homo sapiens
  Payload ID: 9507
  Gene Symbol: LPIN1
  Gene Name: lipin 1
  ENSP ID: ENSP00000392424
MNYVGQLAGQVFVTVKELYKGLNPATLS

SEQ ID NO: 47012 - protein, 975 aa, Homo sapiens
  Payload ID: 9507
  Gene Symbol: LPIN1
  Gene Name: lipin 1
  Uniprot ID: Q14693
  ENSP ID: ENSP00000397908
MGEQDGIRSSSWETSQGKSSPDSAWSWIPIMRDPGWIRNVWSSNINVQTMNYVGQLAGQVFVTVKELYKGLNPATLSGCIDIIVIRQPNGNLQCSPFHVRFGKMGVLRSREKVVDIEINGESVDLHMKLGDNGEAFFVQETDNDQEVIPMHLATSPILSEGASRMECQLKRGSVDRMRGLDPSTPAQVIAPSETPSSSSVVKKRRKRRRKSQLDSLKRDDNMNTSEDEDMFPIEMSSDEAMELLESSRTLPNDIPPFQDDIPEENLSLAVIYPQSASYPNSDREWSPTPSSLVDCKRTAPHLAVAAEGGLSSSCPPQSSLFHPSESPSGSRPSTPKSDSELVSKSTERTGQKNPEMLWLWGELPQAAKSSSPHKMKESSPLSSRKICDKSHFQAIHSESSDTFSDQSPTLVGGALLDQNKPQTEMQFVNEEDLETLGAAAPLLPMIEELKPPSASVVQTANKTDSPSRKRDKRSRHLGADGVYLDDLTDMDPEVAALYFPKNGDPSGLAKHASDNGARSANQSPQSVGSSGVDSGVESTSDGLRDLPSIAISLCGGLSDHREITKDAFLEQAVSYQQFVDNPAIIDDPNLVVKIGSKYYNWTTAAPLLLAMQAFQKPLPKATVESIMRDKMPKKGGRWWFSWRGRNTTIKEESKPEQCLAGKAHSTGEQPPQLSLATRVKHESSSSDEERAAAKPSNAGHLPLLPNVSYKKTLRLTSEQLKSLKLKNGPNDVVFSVTTQYQGTCRCEGTIYLWNWDDKVIISDIDGTITRSDTLGHILPTLGKDWTHQGIAKLYHKVSQNGYKFLYCSARAIGMADMTRGYLHWVNERGTVLPQGPLLLSPSSLFSALHREVIEKKPEKFKVQCLTDIKNLFFPNTEPFYAAFGNRPADVYSYKQVGVSLNRIFTVNPKGELVQEHAKTNISSYVRLCEVVDHVFPLLKRSHSSDFPCSDTFSNFTFWREPLPPFENQDIHSASA

SEQ ID NO: 47013 - protein, 896 aa, Homo sapiens
  Payload ID: 9507
  Gene Symbol: LPIN1
  Gene Name: lipin 1
  Uniprot ID: Q14693
  ENSP ID: ENSP00000401522
MSRVQTMNYVGQLAGQVFVTVKELYKGLNPATLSGCIDIIVIRQPNGNLQCSPFHVRFGKMGVLRSREKVVDIEINGESVDLHMKLGDNGEAFFVQETDNDQEVIPMHLATSPILSEGASRMECQLKRGSVDRMRGLDPSTPAQVIAPSETPSSSSVVKKRRKRRRKSQLDSLKRDDNMNTSEDEDMFPIEMSSDEAMELLESSRTLPNDIPPFQDDIPEENLSLAVIYPQSASYPNSDREWSPTPSPSGSRPSTPKSDSELVSKSTERTGQKNPEMLWLWGELPQAAKSSSPHKMKESSPLSSRKICDKSHFQAIHSESSDTFSDQSPTLVGGALLDQNKPQTEMQFVNEEDLETLGAAAPLLPMIEELKPPSASVVQTANKTDSPSRKRDKRSRHLGADGVYLDDLTDMDPEVAALYFPKNGDPSGLAKHASDNGARSANQSPQSVGSSGVDSGVESTSDGLRDLPSIAISLCGGLSDHREITKDAFLEQAVSYQQFVDNPAIIDDPNLVVKIGSKYYNWTTAAPLLLAMQAFQKPLPKATVESIMRDKMPKKGGRWWFSWRGRNTTIKEESKPEQCLAGKAHSTGEQPPQLSLATRVKHESSSSDEERAAAKPSNAGHLPLLPNVSYKKTLRLTSEQLKSLKLKNGPNDVVFSVTTQYQGTCRCEGTIYLWNWDDKVIISDIDGTITRSDTLGHILPTLGKDWTHQGIAKLYHKVSQNGYKFLYCSARAIGMADMTRGYLHWVNERGTVLPQGPLLLSPSSLFSALHREVIEKKPEKFKVQCLTDIKNLFFPNTEPFYAAFGNRPADVYSYKQVGVSLNRIFTVNPKGELVQEHAKTNISSYVRLCEVVDHVFPLLKRSHSSDFPCSDTFSNFTFWREPLPPFENQDIHSASA

SEQ ID NO: 47014 - protein, 96 aa, Homo sapiens
  Payload ID: 9507
  Gene Symbol: LPIN1
  Gene Name: lipin 1
  ENSP ID: ENSP00000412578
MNYVGQLAGQVFVTVKELYKGLNPATLSGCIDIIVIRQPNGNLQCSPFHVRFGKMGVLRSREKVVDIEINGESVDLHMKLGDNGEAFFVQETDNDQ

SEQ ID NO: 47015 - protein, 194 aa, Homo sapiens
  Payload ID: 9507
  Gene Symbol: LPIN1
  Gene Name: lipin 1
  ENSP ID: ENSP00000413714
IDDPNLVVKIGSKYYNWTTAAPLLLAMQAFQKPLPKSSCLSYLHVILDAIRFCFSKIFNAQIATVESIMRDKMPKKGGRWWFSWRGRNTTIKEESKPEQCLAGKAHSTGEQPPQLSLATRVKHESSSSDEERAAAKPSNAGHLPLLPNVSYKKTLRLTSEQLKSLKLKNGPNDVVFSVTTQYQGTCRCEGTIYL

SEQ ID NO: 47016 - protein, 896 aa, Homo sapiens
  Payload ID: 9508
  Gene Symbol: LPIN2
  Gene Name: lipin 2
  Uniprot ID: Q92539
  ENSP ID: ENSP00000261596
MNYVGQLAGQVIVTVKELYKGINQATLSGCIDVIVVQQQDGSYQCSPFHVRFGKLGVLRSKEKVIDIEINGSAVDLHMKLGDNGEAFFVEETEEEYEKLPAYLATSPIPTEDQFFKDIDTPLVKSGGDETPSQSSDISHVLETETIFTPSSVKKKKRRRKKYKQDSKKEEQAASAAAEDTCDVGVSSDDDKGAQAARGSSNASLKEEECKEPLLFHSGDHYPLSDGDWSPLETTYPQTACPKSDSELEVKPAESLLRSESHMEWTWGGFPESTKVSKRERSDHHPRTATITPSENTHFRVIPSEDNLISEVEKDASMEDTVCTIVKPKPRALGTQMSDPTSVAELLEPPLESTQISSMLDADHLPNAALAEAPSESKPAAKVDSPSKKKGVHKRSQHQGPDDIYLDDLKGLEPEVAALYFPKSESEPGSRQWPESDTLSGSQSPQSVGSAAADSGTECLSDSAMDLPDVTLSLCGGLSENGEISKEKFMEHIITYHEFAENPGLIDNPNLVIRIYNRYYNWALAAPMILSLQVFQKSLPKATVESWVKDKMPKKSGRWWFWRKRESMTKQLPESKEGKSEAPPASDLPSSSKEPAGARPAENDSSSDEGSQELEESITVDPIPTEPLSHGSTTSYKKSLRLSSDQIAKLKLHDGPNDVVFSITTQYQGTCRCAGTIYLWNWNDKIIISDIDGTITKSDALGQILPQLGKDWTHQGIAKLYHSINENGYKFLYCSARAIGMADMTRGYLHWVNDKGTILPRGPLMLSPSSLFSAFHREVIEKKPEKFKIECLNDIKNLFAPSKQPFYAAFGNRPNDVYAYTQVGVPDCRIFTVNPKGELIQERTKGNKSSYHRLSELVEHVFPLLSKEQNSAFPCPEFSSFCYWRDPIPEVDLDDLS

SEQ ID NO: 47017 - protein, 232 aa, Homo sapiens
  Payload ID: 9508
  Gene Symbol: LPIN2
  Gene Name: lipin 2
  ENSP ID: ENSP00000463026
MNYVGQLAGQVIVTVKELYKGINQATLSGCIDVIVVQQQDGSYQCSPFHVRFGKLGVLRSKEKVIDIEINGSAVDLHMKLGDNGEAFFVEETEEEYEKLPAYLATSPIPTEDQFFKDIDTPLVKSGGDETPSQSSDISHVLETETIFTPSSVKKKKRRRKKYKQDSKKEEQAASAAAEDTCDVGVSSDDDKGAQAARGSSNASLKEEECKEPLLFHSGDHYPLSDGDWSPLE

SEQ ID NO: 47018 - protein, 129 aa, Homo sapiens
  Payload ID: 9508
  Gene Symbol: LPIN2
  Gene Name: lipin 2
  ENSP ID: ENSP00000463810
MFYLEDDKEDEVVCKGSLSKTQDVYHDKSPPGILSQTMNYVGQLAGQVIVTVKELYKGINQATLSGCIDVIVVQQQDGSYQCSPFHVRFGKLGVLRSKEKVIDIEINGSAVDLHMKLGDNGEAFFVEET

SEQ ID NO: 47019 - protein, 851 aa, Homo sapiens
  Payload ID: 9509
  Gene Symbol: LPIN3
  Gene Name: lipin 3
  Uniprot ID: Q9BQK8
  ENSP ID: ENSP00000362354
MNYVGQLAETVFGTVKELYRGLNPATLSGGIDVLVVKQVDGSFRCSPFHVRFGKLGVLRSREKVVDIELNGEPVDLHMKLGDSGEAFFVQELESDDEHVPPGLCTSPIPWGGLSGFPSDSQLGTASEPEGLVMAGTASTGRRKRRRRRKPKQKEDAVATDSSPEELEAGAESELSLPEKLRPEPPGVQLEEKSSLQPKDIYPYSDGEWPPQASLSAGELTSPKSDSELEVRTPEPSPLRAESHMQWAWGRLPKVARAERPESSVVLEGRAGATSPPRGGPSTPSTSVAGGVDPLGLPIQQTEAGADLQPDTEDPTLVGPPLHTPETEESKTQSSGDMGLPPASKSWSWATLEVPVPTGQPERVSRGKGSPKRSQHLGPSDIYLDDLPSLDSENAALYFPQSDSGLGARRWSEPSSQKSLRDPNPEHEPEPTLDTVDTIALSLCGGLADSRDISLEKFNQHSVSYQDLTKNPGLLDDPNLVVKINGKHYNWAVAAPMILSLQAFQKNLPKSTMDKLEREKMPRKGGRWWFSWRRRDFLAEERSAQKEKTAAKEQQGEKTEVLSSDDDAPDSPVILEIPSLPPSTPPSTPTYKKSLRLSSDQIRRLNLQEGANDVVFSVTTQYQGTCRCKATIYLWKWDDKVVISDIDGTITKSDALGHILPQLGKDWTHQGITSLYHKIQLNGYKFLYCSARAIGMADLTKGYLQWVSEGGCSLPKGPILLSPSSLFSALHREVIEKKPEVFKVACLSDIQQLFLPHGQPFYAAFGNRPNDVFAYRQVGLPESRIFTVNPRGELIQELIKNHKSTYERLGEVVELLFPPVARGPSTDLANPEYSNFCYWREPLPAVDLDTLD

SEQ ID NO: 47020 - protein, 269 aa, Homo sapiens
  Payload ID: 9509
  Gene Symbol: LPIN3
  Gene Name: lipin 3
  ENSP ID: ENSP00000398092
  MOD_RES (1)..(1): Any amino acid
XVKINGKHYNWAVAAPMILSLQAFQKNLPKRSAQKEKTAAKEQQGEKTEVLSSDDDAPDSPVILEIPSLPPSTPPSTPTYKKSLRLSSDQIRRLNLQEGANDVVFSVTTQYQGTCRCKATIYLWKWDDKVVISDIDGTITKSDALGHILPQLGKDWTHQGITSLYHKIQLNGYKFLYCSARAIGMADLTKGYLQWVSEGGCSLPKGPILLSPSSLFSALHREVIEKKPEVFKVACLSDIQQLFLPHGQPFYAAFGNRPNDVFAYRQVGL

SEQ ID NO: 47021 - protein, 852 aa, Homo sapiens
  Payload ID: 9509
  Gene Symbol: LPIN3
  Gene Name: lipin 3
  Uniprot ID: Q9BQK8
  ENSP ID: ENSP00000487971
MNYVGQLAETVFGTVKELYRGLNPATLSGGIDVLVVKQVDGSFRCSPFHVRFGKLGVLRSREKVVDIELNGEPVDLHMKLGDSGEAFFVQELESDDEHVPPGLCTSPIPWGGLSGFPSDSQLGTASEPEGLVMAGTASTGRRKRRRRRKPKQKEDAVATDSSPEELEAGAESELSLPEKLRPEPPGSVQLEEKSSLQPKDIYPYSDGEWPPQASLSAGELTSPKSDSELEVRTPEPSPLRAESHMQWAWGRLPKVARAERPESSVVLEGRAGATSPPRGGPSTPSTSVAGGVDPLGLPIQQTEAGADLQPDTEDPTLVGPPLHTPETEESKTQSSGDMGLPPASKSWSWATLEVPVPTGQPERVSRGKGSPKRSQHLGPSDIYLDDLPSLDSENAALYFPQSDSGLGARRWSEPSSQKSLRDPNPEHEPEPTLDTVDTIALSLCGGLADSRDISLEKFNQHSVSYQDLTKNPGLLDDPNLVVKINGKHYNWAVAAPMILSLQAFQKNLPKSTMDKLEREKMPRKGGRWWFSWRRRDFLAEERSAQKEKTAAKEQQGEKTEVLSSDDDAPDSPVILEIPSLPPSTPPSTPTYKKSLRLSSDQIRRLNLQEGANDVVFSVTTQYQGTCRCKATIYLWKWDDKVVISDIDGTITKSDALGHILPQLGKDWTHQGITSLYHKIQLNGYKFLYCSARAIGMADLTKGYLQWVSEGGCSLPKGPILLSPSSLFSALHREVIEKKPEVFKVACLSDIQQLFLPHGQPFYAAFGNRPNDVFAYRQVGLPESRIFTVNPRGELIQELIKNHKSTYERLGEVVELLFPPVARGPSTDLANPEYSNFCYWREPLPAVDLDTLD

SEQ ID NO: 47022 - protein, 176 aa, Homo sapiens
  Payload ID: 9510
  Gene Symbol: LCN1
  Gene Name: lipocalin 1
  Uniprot ID: P31025
  ENSP ID: ENSP00000263598
MKPLLLAVSLGLIAALQAHHLLASDEEIQDVSGTWYLKAMTVDREFPEMNLESVTPMTLTTLEGGNLEAKVTMLISGRCQEVKAVLEKTDEPGKYTADGGKHVAYIIRSHVKDHYIFYCEGELHGKPVRGVKLVGRDPKNNLEALEDFEKAAGARGLSTESILIPRQSETCSPGSD

SEQ ID NO: 47023 - protein, 176 aa, Homo sapiens; identical to SEQ ID NO: 47022
  Payload ID: 9510
  Gene Symbol: LCN1
  Gene Name: lipocalin 1
  Uniprot ID: P31025
  ENSP ID: ENSP00000360846

SEQ ID NO: 47024 - protein, 200 aa, Homo sapiens
  Payload ID: 9511
  Gene Symbol: LCN10
  Gene Name: lipocalin 10
  Uniprot ID: Q6JVE6
  ENSP ID: ENSP00000418491
MRQGLLVLALVLVLVLVLAAGSQVQEWYPRESHALNWNKFSGFWYILATATDAQGFLPARDKRKLGASVVKVNKVGQLRVLLAFRRLKGCQSQEVILRKDGKKPVFGNACAYAAGPREGQEGVKGVKAFHVLSTDYSYGLVYLRLGRATQNYKNLLLFHRQNVSSFQSLKEFMDACDILGLSKAAVILPKDASRTHTILP

SEQ ID NO: 47025 - protein, 187 aa, Homo sapiens
  Payload ID: 9511
  Gene Symbol: LCN10
  Gene Name: lipocalin 10
  Uniprot ID: Q6JVE6
  ENSP ID: ENSP00000420564
MRQGLLVLALVLVLVLVLAAGSQVQEWYPRESHALNWNKFSGFWYILATATDAQGFLPARDKRKLGASVVKVNKVGQLRVLLAFRRGQGCGRAQPRHPGTSGHLWASLSVKGVKAFHVLSTDYSYGLVYLRLGRATQNYKNLLLFHRQNVSSFQSLKEFMDACDILGLSKAAVILPKDASRTHTILP

SEQ ID NO: 47026 - protein, 164 aa, Homo sapiens
  Payload ID: 9511
  Gene Symbol: LCN10
  Gene Name: lipocalin 10
  ENSP ID: ENSP00000431726
MRQGLLVLALVLVLVLVLAAGSQVQEWYPRESHALNWNKFSGFWYILATATDAQGFLPARDKRKLGASVVKVNKVGQLRVLLAFRRLKGCQSQEVILRKDGKKPVFGNACAYAAGPREGQEGDRQNVSSFQSLKEFMDACDILGLSKAAVILPKDASRTHTILP

SEQ ID NO: 47027 - protein, 37 aa, Homo sapiens
  Payload ID: 9511
  Gene Symbol: LCN10
  Gene Name: lipocalin 10
  ENSP ID: ENSP00000431930
  MOD_RES (1)..(1): Any amino acid
XTDAQGFLPARDKRKLGASVVKVNKVGQLRVLLAFRR

SEQ ID NO: 47028 - protein, 75 aa, Homo sapiens
  Payload ID: 9511
  Gene Symbol: LCN10
  Gene Name: lipocalin 10
  ENSP ID: ENSP00000434410
MRQGLLVLALVLVLVLVLAAGSQVQEWYPRESHALNWNKGQEEAGGVRGKGEQSGPAPRAPRLQTIGRMFRASRV

SEQ ID NO: 47029 - protein, 86 aa, Homo sapiens
  Payload ID: 9511
  Gene Symbol: LCN10
  Gene Name: lipocalin 10
  ENSP ID: ENSP00000435948
MRQGLLVLALVLVLVLVLAAGSQVQEWYPRESHALNWNKFSGFWYILATATDAQGFLPARDKRKLGASVVKVNKVGQLRVLLAFRR

SEQ ID NO: 47030 - protein, 90 aa, Homo sapiens
  Payload ID: 9512
  Gene Symbol: LCN12
  Gene Name: lipocalin 12
  ENSP ID: ENSP00000360695
TFELSDDGRFEVWNAMTRGQHCDTWSYVLIPAAQPGQFTVDHGVDTRAGWPSSGSACWAGAGCCLPGRWTSSSAWAELRASRMTTSSSQM

SEQ ID NO: 47031 - protein, 192 aa, Homo sapiens
  Payload ID: 9512
  Gene Symbol: LCN12
  Gene Name: lipocalin 12
  Uniprot ID: Q6JVE5
  ENSP ID: ENSP00000360696
MRLLCGLWLWLSLLKVLQAQTPTPLPLPPPMQSFQGNQFQGEWFVLGLAGNSFRPEHRALLNAFTATFELSDDGRFEVWNAMTRGQHCDTWSYVLIPAAQPGQFTVDHGVEPGADREETRVVDSDYTQFALMLSRRHTSRLAVLRISLLGRSWLLPPGTLDQFICLGRAQGLSDDNIVFPDVTGWSPQASVC

SEQ ID NO: 47032 - protein, 102 aa, Homo sapiens
  Payload ID: 9512
  Gene Symbol: LCN12
  Gene Name: lipocalin 12
  ENSP ID: ENSP00000473473
ALLNAFTATFELSDDGRFEVWNAMTRGQHCDTWSYVLIPAAQPGQFTVDHGVGRSWLLPPGTLDQFICLGRAQGLSDDNIVFPDVTGGALDLSSLPWVAAPA

SEQ ID NO: 47033 - protein, 184 aa, Homo sapiens
  Payload ID: 9513
  Gene Symbol: LCN15
  Gene Name: lipocalin 15
  Uniprot ID: Q6UWW0
  ENSP ID: ENSP00000313833
MMSFLLGAILTLLWAPTAQAEVLLQPDFNAEKFSGLWYVVSMASDCRVFLGKKDHLSMSTRAIRPTEEGGLHVHMEFPGADGCNQVDAEYLKVGSEGHFRVPALGYLDVRIVDTDYSSFAVLYIYKELEGALSTMVQLYSRTQDVSPQALKSFQDFYPTLGLPKDMMVMLPQSDACNPESKEAP

SEQ ID NO: 47034 - protein, 198 aa, Homo sapiens
  Payload ID: 9514
  Gene Symbol: LCN2
  Gene Name: lipocalin 2
  Uniprot ID: P80188
  ENSP ID: ENSP00000277480
MPLGLLWLGLALLGALHAQAQDSTSDLIPAPPLSKVPLQQNFQDNQFQGKWYVVGLAGNAILREDKDPQKMYATIYELKEDKSYNVTSVLFRKKKCDYWIRTFVPGCQPGEFTLGNIKSYPGLTSYLVRVVSTNYNQHAMVFFKKVSQNREYFKITLYGRTKELTSELKENFIRFSKSLGLPENHIVFPVPIDQCIDG

SEQ ID NO: 47035 - protein, 200 aa, Homo sapiens
  Payload ID: 9514
  Gene Symbol: LCN2
  Gene Name: lipocalin 2
  ENSP ID: ENSP00000362089
MPLGLLWLGLALLGALHAQAQDSTSDLIPAPPLSKVPLQQNFQDNQFQGKWYVVGLAGNAILREDKDPQKMYATIYELKEDKSYNVTSVLFREKAQKCDYWIRTFVPGCQPGEFTLGNIKSYPGLTSYLVRVVSTNYNQHAMVFFKKVSQNREYFKITLYGRTKELTSELKENFIRFSKSLGLPENHIVFPVPIDQCIDG

SEQ ID NO: 47036 - protein, 198 aa, Homo sapiens; identical to SEQ ID NO: 47034
  Payload ID: 9514
  Gene Symbol: LCN2
  Gene Name: lipocalin 2
  Uniprot ID: P80188
  ENSP ID: ENSP00000362108

SEQ ID NO: 47037 - protein, 163 aa, Homo sapiens
  Payload ID: 9515
  Gene Symbol: LCN6
  Gene Name: lipocalin 6
  Uniprot ID: P62502
  ENSP ID: ENSP00000339621
MGGLLLAAFLALVSVPRAQAVWLGRLDPEQLLGPWYVLAVASREKGFAMEKDMKNVVGVVVTLTPENNLRTLSSQHGLGGCDQSVMDLIKRNSGWVFENPSIGVLELWVLATNFRDYAIIFTQLEFGDEPFNTVELYSLTETASQEAMGLFTKWSRSLGFLSQ

SEQ ID NO: 47038 - protein, 78 aa, Homo sapiens
  Payload ID: 9515
  Gene Symbol: LCN6
  Gene Name: lipocalin 6
  ENSP ID: ENSP00000468337
MDLIKRNSGWVFENPSIGVLELWVLATNFRDYAIIFTQLEFGDEPFNTVELYSLTETASQEAMGLFTKWSRSLGFLSQ

SEQ ID NO: 47039 - protein, 152 aa, Homo sapiens
  Payload ID: 9516
  Gene Symbol: LCN8
  Gene Name: lipocalin 8
  Uniprot ID: Q6JVE9
  ENSP ID: ENSP00000360753
MEELDRQKIGGFWREVGVASDQSLVLTAPKRVEGLFLTLSGSNLTVKVAYNSSGSCEIEKIVGSEIDSTGKFAFPGHREIHVLDTDYEGYAILRVSLMWRGRNFRVLKYFTRSLEDKDRLGFWKFRELTADTGLYLAARPGRCAELLKEELI

SEQ ID NO: 47040 - protein, 175 aa, Homo sapiens
  Payload ID: 9516
  Gene Symbol: LCN8
  Gene Name: lipocalin 8
  Uniprot ID: Q6JVE9
  ENSP ID: ENSP00000482512
MPGAAEALPTVTVTLVAGAVPPASGALTAHCIGGFWREVGVASDQSLVLTAPKRVEGLFLTLSGSNLTVKVAYNSSGSCEIEKIVGSEIDSTGKFAFPGHREIHVLDTDYEGYAILRVSLMWRGRNFRVLKYFTRSLEDKDRLGFWKFRELTADTGLYLAARPGRCAELLKEELI

SEQ ID NO: 47041 - protein, 176 aa, Homo sapiens
  Payload ID: 9517
  Gene Symbol: LCN9
  Gene Name: lipocalin 9
  Uniprot ID: Q8WX39
  ENSP ID: ENSP00000277526
MALLLLSLGLSLIAAQEFDPHTVMQRNYNVARVSGVWYSIFMASDDLNRIKENGDLRVFVRNIEHLKNGSLIFDFEYMVQGECVAVVVVCEKTEKNGEYSINYEGQNTVAVSETDYRLFITFHLQNFRNGTETHTLALYETCEKYGLGSQNIIDLTNKDPCYSKHYRSPPRPPMRW

SEQ ID NO: 47042 - protein, 176 aa, Homo sapiens [sequence omitted]

SEQ ID NO: 47043 - protein, 164 aa, Homo sapiens
  Payload ID: 9518
  Gene Symbol: LCNL1
  Gene Name: lipocalin-like 1
  Uniprot ID: Q6ZST4
  ENSP ID: ENSP00000386162
MVGVVSDDQDFLDSKDTMKMAVVLVTPLGNGDLALKFGYPTPHGGCQKMDTTFTEGAVPGQFSNPAMALSDIRVAFSDYQHFALLYLEMRKGGLRNQWLQLYGGRAAGRRPRHPRFGSGMSPLCLHQPFLHAEGGTAGSWCLWPRVPAPPCPSLPLFAPPAPSL

SEQ ID NO: 47044 - protein, 372 aa, Homo sapiens
  Payload ID: 9519
  Gene Symbol: LIAS
  Gene Name: lipoic acid synthetase
  Uniprot ID: O43766
  ENSP ID: ENSP00000261434
MSLRCGDAARTLGPRVFGRYFCSPVRPLSSLPDKKKELLQNGPDLQDFVSGDLADRSTWDEYKGNLKRQKGERLRLPPWLKTEIPMGKNYNKLKNTLRNLNLHTVCEEARCPNIGECWGGGEYATATATIMLMGDTCTRGCRFCSVKTARNPPPLDASEPYNTAKAIAEWGLDYVVLTSVDRDDMPDGGAEHIAKTVSYLKERNPKILVECLTPDFRGDLKAIEKVALSGLDVYAHNVETVPELQSKVRDPRANFDQSLRVLKHAKKVQPDVISKTSIMLGLGENDEQVYATMKALREADVDCLTLGQYMQPTRRHLKVEEYITPEKFKYWEKVGNELGFHYTASGPLVRSSYKAGEFFLKNLVAKRKTKDL

SEQ ID NO: 47045 - protein, 322 aa, Homo sapiens
  Payload ID: 9519
  Gene Symbol: LIAS
  Gene Name: lipoic acid synthetase
  Uniprot ID: O43766
  ENSP ID: ENSP00000340676
MSLRCGDAARTLGPRVFGRYFCSPVRPLSSLPDKKKELLQNGPDLQDFVSGDLADRSTWDEYKGNLKRQKGERLRLPPWLKTEIPMGKNYNKLKNTLRNLNLHTVCEEARCPNIGECWGGGEYATATATIMLMGDTCTRGCRFCSVKTARNPPPLDASEPYNTAKAIAEWGLDYVVLTSVDRDDMPDGGAEHIAKTVSYLKERNPKILVECLTPDFRGDLKAIEKVALSGLDVYAHNVETVPELQSKVRDPRANFDQSLRVLKHAKKVQPDVISKTSIMLGLGENDEQVYATMKALREADVDCLTLGQYMQPTRRHLKVNFS

SEQ ID NO: 47046 - protein, 329 aa, Homo sapiens
  Payload ID: 9519
  Gene Symbol: LIAS
  Gene Name: lipoic acid synthetase
  Uniprot ID: O43766
  ENSP ID: ENSP00000371270
MSLRCGDAARTLGPRVFGRYFCSPVRPLSSLPDKKKELLQNGPDLQDFVSGDLADRSTWDEYKGNLKRQKGERLRLPPWLKTEIPMGKNYNKLKNTLRNLNLHTVCEEARCPNIGECWGGGEYATATATIMLMGDTCTRGCRFCSVKTARNPPPLDASEPYNTAKAIAEWGLDYVVLTSVDRDDMPDGGAEHIAKTVSYLKESKVRDPRANFDQSLRVLKHAKKVQPDVISKTSIMLGLGENDEQVYATMKALREADVDCLTLGQYMQPTRRHLKVEEYITPEKFKYWEKVGNELGFHYTASGPLVRSSYKAGEFFLKNLVAKRKTKDL

SEQ ID NO: 47047 - protein, 242 aa, Homo sapiens
  Payload ID: 9519
  Gene Symbol: LIAS
  Gene Name: lipoic acid synthetase
  ENSP ID: ENSP00000425580
MSLRCGDAARTLGPRVFGRYFCSPVRPLSSLPDKKKELLQNGPDLQDFVSGDLADRSTWDEYKGNLKRQKGERNPKILVECLTPDFRGDLKAIEKVALSGLDVYAHNVETVPELQSKVRDPRANFDQSLRVLKHAKKVQPDVISKTSIMLGLGENDEQVYATMKALREADVDCLTLGQYMQPTRRHLKVEEYITPEKFKYWEKVGNELGFHYTASGPLVRSSYKAGEFFLKNLVAKRKTKDL

SEQ ID NO: 47048 - protein, 591 aa, Homo sapiens
  Payload ID: 9520
  Gene Symbol: LSR
  Gene Name: lipolysis stimulated lipoprotein receptor
  Uniprot ID: Q86X29
  ENSP ID: ENSP00000262627
MQQDGLGVGTRNGSGKGRSVHPSWPWCAPRPLRYFGRDARARRAQTAAMALAIQVTVSNPYHVVILFQPVTLPCTYQMTSTPTQPIVIWKYKSFCRDRIADAFSPASVDNQLNAQLAAGNPGYNPYVECQDSVRTVRVVATKQGNAVTLGDYYQGRRITITGNADLTFDQTAWGDSGVYYCSVVSAQDLQGNNEAYAELIVLGRTSGVAELLPGFQAGPIEDWLFVVVVCLAAFLIFLLLGICWCQCCPHTCCCYVRCPCCPDKCCCPEALYAAGKAATSGVPSIYAPSTYAHLSPAKTPPPPAMIPMGPAYNGYPGGYPGDVDRSSSVRSGYRIQASQQDDSMRVLYYMEKELANFDPSRPGPPSGRVERAMSEVTSLHEDDWRSRPSRGPALTPIRDEEWGGHSPRSPRGWDQEPAREQAGGGWRARRPRARSVDALDDLTPPSTAESGSRSPTSNGGRSRAYMPPRSRSRDDLYDQDDSRDFPRSRDPHYDDFRSRERPPADPRSHHHRTRDPRDNGSRSGDLPYDGRLLEEAVRKKGSEERRRPHKEEEEEAYYPPAPPPYSETDSQASRERRLKKNLALSRESLVV

SEQ ID NO: 47049 - protein, 630 aa, Homo sapiens
  Payload ID: 9520
  Gene Symbol: LSR
  Gene Name: lipolysis stimulated lipoprotein receptor
  Uniprot ID: Q86X29
  ENSP ID: ENSP00000346976
MQQDGLGVGTRNGSGKGRSVHPSWPWCAPRPLRYFGRDARARRAQTAAMALLAGGLSRGLGSHPAAAGRDAVVFVWLLLSTWCTAPARAIQVTVSNPYHVVILFQPVTLPCTYQMTSTPTQPIVIWKYKSFCRDRIADAFSPASVDNQLNAQLAAGNPGYNPYVECQDSVRTVRVVATKQGNAVTLGDYYQGRRITITGNADLTFDQTAWGDSGVYYCSVVSAQDLQGNNEAYAELIVLDWLFVVVVCLAAFLIFLLLGICWCQCCPHTCCCYVRCPCCPDKCCCPEALYAAGKAATSGVPSIYAPSTYAHLSPAKTPPPPAMIPMGPAYNGYPGGYPGDVDRSSSAGGQGSYVPLLRDTDSSVASEVRSGYRIQASQQDDSMRVLYYMEKELANFDPSRPGPPSGRVERAMSEVTSLHEDDWRSRPSRGPALTPIRDEEWGGHSPRSPRGWDQEPAREQAGGGWRARRPRARSVDALDDLTPPSTAESGSRSPTSNGGRSRAYMPPRSRSRDDLYDQDDSRDFPRSRDPHYDDFRSRERPPADPRSHHHRTRDPRDNGSRSGDLPYDGRLLEEAVRKKGSEERRRPHKEEEEEAYYPPAPPPYSETDSQASRERRLKKNLALSRESLVV

SEQ ID NO: 47050 - protein, 581 aa, Homo sapiens
  Payload ID: 9520
  Gene Symbol: LSR
  Gene Name: lipolysis stimulated lipoprotein receptor
  Uniprot ID: Q86X29
  ENSP ID: ENSP00000354034
MQQDGLGVGTRNGSGKGRSVHPSWPWCAPRPLRYFGRDARARRAQTAAMALLAGGLSRGLGSHPAAAGRDAVVFVWLLLSTWCTAPARAIQVTVSNPYHVVILFQPVTLPCTYQMTSTPTQPIVIWKYKSFCRDRIADAFSPASVDNQLNAQLAAGNPGYNPYVECQDSVRTVRVVATKQGNAVTLGDYYQGRRITITGNADLTFDQTAWGDSGVYYCSVVSAQDLQGNNEAYAELIVLVYAAGKAATSGVPSIYAPSTYAHLSPAKTPPPPAMIPMGPAYNGYPGGYPGDVDRSSSAGGQGSYVPLLRDTDSSVASEVRSGYRIQASQQDDSMRVLYYMEKELANFDPSRPGPPSGRVERAMSEVTSLHEDDWRSRPSRGPALTPIRDEEWGGHSPRSPRGWDQEPAREQAGGGWRARRPRARSVDALDDLTPPSTAESGSRSPTSNGGRSRAYMPPRSRSRDDLYDQDDSRDFPRSRDPHYDDFRSRERPPADPRSHHHRTRDPRDNGSRSGDLPYDGRLLEEAVRKKGSEERRRPHKEEEEEAYYPPAPPPYSETDSQASRERRLKKNLALSRESLVV

SEQ ID NO: 47051 - protein, 649 aa, Homo sapiens
  Payload ID: 9520
  Gene Symbol: LSR
  Gene Name: lipolysis stimulated lipoprotein receptor
  Uniprot ID: Q86X29
  ENSP ID: ENSP00000354575
MQQDGLGVGTRNGSGKGRSVHPSWPWCAPRPLRYFGRDARARRAQTAAMALLAGGLSRGLGSHPAAAGRDAVVFVWLLLSTWCTAPARAIQVTVSNPYHVVILFQPVTLPCTYQMTSTPTQPIVIWKYKSFCRDRIADAFSPASVDNQLNAQLAAGNPGYNPYVECQDSVRTVRVVATKQGNAVTLGDYYQGRRITITGNADLTFDQTAWGDSGVYYCSVVSAQDLQGNNEAYAELIVLGRTSGVAELLPGFQAGPIEDWLFVVVVCLAAFLIFLLLGICWCQCCPHTCCCYVRCPCCPDKCCCPEALYAAGKAATSGVPSIYAPSTYAHLSPAKTPPPPAMIPMGPAYNGYPGGYPGDVDRSSSAGGQGSYVPLLRDTDSSVASEVRSGYRIQASQQDDSMRVLYYMEKELANFDPSRPGPPSGRVERAMSEVTSLHEDDWRSRPSRGPALTPIRDEEWGGHSPRSPRGWDQEPAREQAGGGWRARRPRARSVDALDDLTPPSTAESGSRSPTSNGGRSRAYMPPRSRSRDDLYDQDDSRDFPRSRDPHYDDFRSRERPPADPRSHHHRTRDPRDNGSRSGDLPYDGRLLEEAVRKKGSEERRRPHKEEEEEAYYPPAPPPYSETDSQASRERRLKKNLALSRESLVV

SEQ ID NO: 47052 - protein, 493 aa, Homo sapiens
  Payload ID: 9520
  Gene Symbol: LSR
  Gene Name: lipolysis stimulated lipoprotein receptor
  Uniprot ID: Q86X29
  ENSP ID: ENSP00000394479
MALLAGGLSRGLGSHPAAAGRDAVVFVWLLLSTWCTAPARAIQVTVSNPYHVVILFQPVTLPCTYQMTSTPTQPIVIWKYKSFCRDRIADAFSPASVDNQLNAQLAAGNPGYNPYVECQDSVRTVRVVATKQGNAVTLGDYYQGRRITITGMYAAGKAATSGVPSIYAPSTYAHLSPAKTPPPPAMIPMGPAYNGYPGGYPGDVDRSSSAGGQGSYVPLLRDTDSSVASEVRSGYRIQASQQDDSMRVLYYMEKELANFDPSRPGPPSGRVERAMSEVTSLHEDDWRSRPSRGPALTPIRDEEWGGHSPRSPRGWDQEPAREQAGGGWRARRPRARSVDALDDLTPPSTAESGSRSPTSNGGRSRAYMPPRSRSRDDLYDQDDSRDFPRSRDPHYDDFRSRERPPADPRSHHHRTRDPRDNGSRSGDLPYDGRLLEEAVRKKGSEERRRPHKEEEEEAYYPPAPPPYSETDSQASRERRLKKNLALSRESLVV

SEQ ID NO: 47053 - protein, 114 aa, Homo sapiens
  Payload ID: 9520
  Gene Symbol: LSR
  Gene Name: lipolysis stimulated lipoprotein receptor
  ENSP ID: ENSP00000470630
DSVRTVRVVATKQGNAVTLGDYYQGRRITITGNADLTFDQTAWGDSGVYYCSVVSAQDLQGNNEAYAELIVLGRTSGVAELLPGFQAGPIEVYAAGKAATSGVPSIYAPSTYAH

SEQ ID NO: 47054 - protein, 51 aa, Homo sapiens
  Payload ID: 9520
  Gene Symbol: LSR
  Gene Name: lipolysis stimulated lipoprotein receptor
  ENSP ID: ENSP00000471486
MQQDGLGVGTRNGSGKGRSVHPSWPWCAPRPLSSCQGHPGDRVQPLPRGDP

SEQ ID NO: 47055 - protein, 139 aa, Homo sapiens
  Payload ID: 9520
  Gene Symbol: LSR
  Gene Name: lipolysis stimulated lipoprotein receptor
  ENSP ID: ENSP00000472154
MTSTPTQPIVIWKYKSFCRDRIADAFSPASVDNQLNAQLAAGNPGYNPYVECQDSVRTVRVVATKQGNAVTLGDYYQGRRITITGNADLTFDQTAWGDSGVYYCSVVSAQDLQGNNEAYAELIVLDWLFVVVVCLAAFL

SEQ ID NO: 47056 - protein, 629 aa, Homo sapiens
  Payload ID: 9520
  Gene Symbol: LSR
  Gene Name: lipolysis stimulated lipoprotein receptor
  Uniprot ID: Q86X29
  ENSP ID: ENSP00000472569
MQQDGLGVGTRNGSGKGRSVHPSWPWCAPRPLRYFGRDARARRAQTAAMALLAGGLSRGLGSHPAAAGRDAVVFVWLLLSTWCTAPARAIQVTVSNPYHVVILFQPVTLPCTYQMTSTPTQPIVIWKYKSFCRDRIADAFSPASVDNQLNAQLAAGNPGYNPYVECQDSVRTVRVVATKQGNAVTLGDYYQGRRITITGNADLTFDQTAWGDSGVYYCSVVSAQDLQGNNEAYAELIVLDWLFVVVVCLAAFLIFLLLGICWCQCCPHTCCCYVRCPCCPDKCCCPEALYAAGKAATSGVPSIYAPSTYAHLSPAKTPPPPAMIPMGPAYNGYPGGYPGDVDRSSSAGGQGSYVPLLRDTDSSVASVRSGYRIQASQQDDSMRVLYYMEKELANFDPSRPGPPSGRVERAMSEVTSLHEDDWRSRPSRGPALTPIRDEEWGGHSPRSPRGWDQEPAREQAGGGWRARRPRARSVDALDDLTPPSTAESGSRSPTSNGGRSRAYMPPRSRSRDDLYDQDDSRDFPRSRDPHYDDFRSRERPPADPRSHHHRTRDPRDNGSRSGDLPYDGRLLEEAVRKKGSEERRRPHKEEEEEAYYPPAPPPYSETDSQASRERRLKKNLALSRESLVV

SEQ ID NO: 47057 - protein, 601 aa, Homo sapiens
  Payload ID: 9520
  Gene Symbol: LSR
  Gene Name: lipolysis stimulated lipoprotein receptor
  ENSP ID: ENSP00000474797
MALLAGGLSRGLGSHPAAAGRDAVVFVWLLLSTWCTAPARAIQVTVSNPYHVVILFQPVTLPCTYQMTSTPTQPIVIWKYKSFCRDRIADAFSPASVDNQLNAQLAAGNPGYNPYVECQDSVRTVRVVATKQGNAVTLGDYYQGRRITITGNADLTFDQTAWGDSGVYYCSVVSAQDLQGNNEAYAELIVLGRTSGVAELLPGFQAGPIEDWLFVVVVCLAAFLIFLLLGICWCQCCPHTCCCYVRCPCCPDKCCCPEALYAAGKAATSGVPSIYAPSTYAHLSPAKTPPPPAMIPMGPAYNGYPGGYPGDVDRSSSAGGQGSYVPLLRDTDSSVASEVRSGYRIQASQQDDSMRVLYYMEKELANFDPSRPGPPSGRVERAMSEVTSLHEDDWRSRPSRGPALTPIRDEEWGGHSPRSPRGWDQEPAREQAGGGWRARRPRARSVDALDDLTPPSTAESGSRSPTSNGGRSRAYMPPRSRSRDDLYDQDDSRDFPRSRDPHYDDFRSRERPPADPRSHHHRTRDPRDNGSRSGDLPYDGRLLEEAVRKKGSEERRRPHKEEEEEAYYPPAPPPYSETDSQASRERRLKKNLALSRESLVV

SEQ ID NO: 47058 - protein, 649 aa, Homo sapiens; identical to SEQ ID NO: 47051
  Payload ID: 9520
  Gene Symbol: LSR
  Gene Name: lipolysis stimulated lipoprotein receptor
  Uniprot ID: Q86X29
  ENSP ID: ENSP00000480821

SEQ ID NO: 47059 - protein, 200 aa, Homo sapiens
  Payload ID: 9521
  Gene Symbol: LHFP
  Gene Name: lipoma HMGIC fusion partner
  Uniprot ID: Q9Y693
  ENSP ID: ENSP00000368908
MASSLTCTGVIWALLSFLCAATSCVGFFMPYWLWGSQLGKPVSFGTFRRCSYPVHDESRQMMVMVEECGRYASFQGIPSAEWRICTIVTGLGCGLLLLVALTALMGCCVSDLISRTVGRVAGGIQFLGGLLIGAGCALYPLGWDSEEVRQTCGYTSGQFDLGKCEIGWAYYCTGAGATAAMLLCTWLACFSGKKQKHYPY

SEQ ID NO: 47060 - protein, 220 aa, Homo sapiens
  Payload ID: 9522
  Gene Symbol: LHFPL1
  Gene Name: lipoma HMGIC fusion partner-like 1
  Uniprot ID: Q86WI0
  ENSP ID: ENSP00000361036
MRSSLTMVGTLWAFLSLVTAVTSSTSYFLPYWLFGSQMGKPVSFSTFRRCNYPVRGEGHSLIMVEECGRYASFNAIPSLAWQMCTVVTGAGCALLLLVALAAVLGCCMEELISRMMGRCMGAAQFVGGLLISSGCALYPLGWNSPEIMQTCGNVSNQFQLGTCRLGWAYYCAGGGAAAAMLICTWLSCFAGRNPKPVILVESIMRNTNSYAMELDHCLKP

SEQ ID NO: 47061 - protein, 228 aa, Homo sapiens
  Payload ID: 9523
  Gene Symbol: LHFPL2
  Gene Name: lipoma HMGIC fusion partner-like 2
  Uniprot ID: Q6ZUX7
  ENSP ID: ENSP00000369702
MCHVIVTCRSMLWTLLSIVVAFAELIAFMSADWLIGKARSRGGVEPAGPGGGSPEPYHPTLGIYARCIRNPGVQHFQRDTLCGPYAESFGEIASGFWQATAIFLAVGIFILCMVALVSVFTMCVQSIMKKSIFNVCGLLQGIAGLFLILGLILYPAGWGCQKAIDYCGHYASAYKPGDCSLGWAFYTAIGGTVLTFICAVFSAQAEIATSSDKVQEEIEEGKNLICLL

SEQ ID NO: 47062 - protein, 228 aa, Homo sapiens; identical to SEQ ID NO: 47061
  Payload ID: 9523
  Gene Symbol: LHFPL2
  Gene Name: lipoma HMGIC fusion partner-like 2
  Uniprot ID: Q6ZUX7
  ENSP ID: ENSP00000425906

SEQ ID NO: 47063 - protein, 218 aa, Homo sapiens
  Payload ID: 9524
  Gene Symbol: LHFPL3
  Gene Name: lipoma HMGIC fusion partner-like 3
  ENSP ID: ENSP00000385374
MLPAQEAAKLYHTNYVRNSRAIGVLWAIFTICFAIVNVVCFIQPYWIGDGVDTPQAGYFGLFHYCIGNGFSRELTCRGSFTDFSTLPSGAFKAASFFIGLSMMLIIACIICFTLFFFCNTATVYKICAWMQLTSAACLVLGCMIFPDGWDSDEVKRMCGEKTDKYTLGACSVRWAYILAIIGILDALILSFLAFVLGNRQDSLMAEELKAENKDDGNA

SEQ ID NO: 47064 - protein, 222 aa, Homo sapiens
  Payload ID: 9524
  Gene Symbol: LHFPL3
  Gene Name: lipoma HMGIC fusion partner-like 3
  Uniprot ID: Q86UP9
  ENSP ID: ENSP00000393128
MLPAQEAAKLYHTNYVRNSRAIGVLWAIFTICFAIVNVVCFIQPYWIGDGVDTPQAGYFGLFHYCIGNGFSRELTCRGSFTDFSTLPSGAFKAASFFIGLSMMLIIACIICFTLFFFCNTATVYKICAWMQLTSAACLVLGCMIFPDGWDSDEVKRMCGEKTDKYTLGACSVRWAYILAIIGILDALILSFLAFVLGNRQDSLMAEELKAENKVLLSQYSLE

SEQ ID NO: 47065 - protein, 247 aa, Homo sapiens
  Payload ID: 9525
  Gene Symbol: LHFPL4
  Gene Name: lipoma HMGIC fusion partner-like 4
  Uniprot ID: Q7Z7J7
  ENSP ID: ENSP00000287585
MLPSQEASKLYHEHYMRNSRAIGVLWAIFTICFAIINVVVFIQPYWVGDSVSTPKPGYFGLFHYCVGSGLAGRELTCRGSFTDFSTIPSSAFKAAAFFVLLSMVLILGCITCFSLFFFCNTATVYKICAWMQLLAALCLVLGCMIFPDGWDAETIRDMCGAKTGKYSLGDCSVRWAYILAIIGILNALILSFLAFVLGNRQTDLLQEELKPENKDFVGSTVSSVLRPGGDVSGWGVLPCPVAHSQGP

SEQ ID NO: 47066 - protein, 219 aa, Homo sapiens
  Payload ID: 9526
  Gene Symbol: LHFPL5
  Gene Name: lipoma HMGIC fusion partner-like 5
  Uniprot ID: Q8TAF8
  ENSP ID: ENSP00000353346
MVKLLPAQEAAKIYHTNYVRNSRAVGVMWGTLTICFSVLVMALFIQPYWIGDSVNTPQAGYFGLFSYCVGNVLSSELICKGGPLDFSSIPSRAFKTAMFFVALGMFLIIGSIICFSLFFICNTATVYKICAWMQLAAATGLMIGCLVYPDGWDSSEVRRMCGEQTGKYTLGHCTIRWAFMLAILSIGDALILSFLAFVLGYRQDKLLPDDYKADGTEEV

SEQ ID NO: 47067 - protein, 481 aa, Homo sapiens
  Payload ID: 9527
  Gene Symbol: LBP
  Gene Name: lipopolysaccharide binding protein
  Uniprot ID: P18428
  ENSP ID: ENSP00000217407
MGALARALPSILLALLLTSTPEALGANPGLVARITDKGLQYAAQEGLLALQSELLRITLPDFTGDLRIPHVGRGRYEFHSLNIHSCELLHSALRPVPGQGLSLSISDSSIRVQGRWKVRKSFFKLQGSFDVSVKGISISVNLLLGSESSGRPTVTASSCSSDIADVEVDMSGDLGWLLNLFHNQIESKFQKVLESRICEMIQKSVSSDLQPYLQTLPVTTEIDSFADIDYSLVEAPRATAQMLEVMFKGEIFHRNHRSPVTLLAAVMSLPEEHNKMVYFAISDYVFNTASLVYHEEGYLNFSITDDMIPPDSNIRLTTKSFRPFVPRLARLYPNMNLELQGSVPSAPLLNFSPGNLSVDPYMEIDAFVLLPSSSKEPVFRLSVATNVSATLTFNTSKITGFLKPGKVKVELKESKVGLFNAELLEALLNYYILNTFYPKFNDKLAEGFPLPLLKRVQLYDLGLQIHKDFLFLGANVQYMRV

SEQ ID NO: 47068 - protein, 161 aa, Homo sapiens
  Payload ID: 9528
  Gene Symbol: LITAF
  Gene Name: lipopolysaccharide-induced TNF factor
  Uniprot ID: Q99732
  ENSP ID: ENSP00000340118
MSVPGPYQAATGPSSAPSAPPSYEETVAVNSYYPTPPAPMPGPTTGLVTGPDGKGMNPPSYYTQPAPIPNNNPITVQTVYVQHPITFLDRPIQMCCPSCNKMIVSQLSYNAGALTWLSCGSLCLLGCIAGCCFIPFCVDALQDVDHYCPNCRALLGTYKRL

SEQ ID NO: 47069 - protein, 228 aa, Homo sapiens
  Payload ID: 9528
  Gene Symbol: LITAF
  Gene Name: lipopolysaccharide-induced TNF factor
  Uniprot ID: Q99732
  ENSP ID: ENSP00000371231
MSVPGPYQAATGPSSAPSAPPSYEETVAVNSYYPTPPAPMPGPTTGLVTGPDGKGMNPPSYYTQPAPIPNNNPITVQTVYVQHPITFLDRPIQMCCPSCNKMIVSQLSYNAGALTWLSCGSLCLLGVHSGLLLHPLLRGCPAGRGPLLSQLQSSPGHLQAFVGLSQTWREPGAAGSPFHLSSSFTPGGGSALVVSPLQGAHLHVFFWGEYVAKLTNLQTPEIAAWSRA

SEQ ID NO: 47070 - protein, 152 aa, Homo sapiens
  Payload ID: 9528
  Gene Symbol: LITAF
  Gene Name: lipopolysaccharide-induced TNF factor
  Uniprot ID: Q99732
  ENSP ID: ENSP00000397958
MSVPGPYQAATGPSSAPSAPPSYEETVAVNSYYPTPPAPMPGPTTGLVTGPDGKGMNPPSYYTQPAPIPNNNPITVQTVYVQHPITFLDRPIQMCCPSCNKMIVSQLSYNAGALTWLSCGSLCLLGQECSGTIVALRSFDLLGSCNPPSSAS

SEQ ID NO: 47071 - protein, 33 aa, Homo sapiens
  Payload ID: 9528
  Gene Symbol: LITAF
  Gene Name: lipopolysaccharide-induced TNF factor
  ENSP ID: ENSP00000458538
MTFVNCHGAGGSVAVRKTRVRPRRRLGFGKMSV

SEQ ID NO: 47072 - protein, 68 aa, Homo sapiens
  Payload ID: 9528
  Gene Symbol: LITAF
  Gene Name: lipopolysaccharide-induced TNF factor
  ENSP ID: ENSP00000458836
MCCPSCNKMIVSQLSYNAGALTWLSCGSLCLLGCIAGCCFIPFCVDALQDVDHYCPNCRALLGTYKRL

SEQ ID NO: 47073 - protein, 137 aa, Homo sapiens
  Payload ID: 9528
  Gene Symbol: LITAF
  Gene Name: lipopolysaccharide-induced TNF factor
  ENSP ID: ENSP00000458871
MSVPGPYQAATGPSSAPSAPPSYEETVAVNSYYPTPPAPMPGPTTGLVTGPDGKGMNPPSYYTQPAPIPNNNPITVQTVYVQHPITFLDRPIQMCCPSCNKMIVSQLSYNAGALTWLSCGSLCLLGCIAGCCFIPFC

SEQ ID NO: 47074 - protein, 136 aa, Homo sapiens
  Payload ID: 9528
  Gene Symbol: LITAF
  Gene Name: lipopolysaccharide-induced TNF factor
  ENSP ID: ENSP00000458981
MSVPGPYQAATGPSSAPSAPPSYEETVAVNSYYPTPPAPMPGPTTGLVTGPDGKGMNPPSYYTQPAPIPNNNPITVQTVYVQHPITFLDRPIQMCCPSCNKMIVSQLSYNAGALTWLSCGSLCLLGQECSGTIVAL

SEQ ID NO: 47075 - protein, 39 aa, Homo sapiens
  Payload ID: 9528
  Gene Symbol: LITAF
  Gene Name: lipopolysaccharide-induced TNF factor
  ENSP ID: ENSP00000459026
MSVPGPYQAATGPSSAPSAPPSYEETVAVNSYYPTPPAP

SEQ ID NO: 47076 - protein, 10 aa, Homo sapiens
  Payload ID: 9528
  Gene Symbol: LITAF
  Gene Name: lipopolysaccharide-induced TNF factor
  ENSP ID: ENSP00000459094
  MOD_RES (1)..(1): Any amino acid
XRSDSAKESK

SEQ ID NO: 47077 - protein, 161 aa, Homo sapiens; identical to SEQ ID NO: 47068
  Payload ID: 9528
  Gene Symbol: LITAF
  Gene Name: lipopolysaccharide-induced TNF factor
  Uniprot ID: Q99732
  ENSP ID: ENSP00000459138

SEQ ID NO: 47078 - protein, 161 aa, Homo sapiens; identical to SEQ ID NO: 47068
  Payload ID: 9528
  Gene Symbol: LITAF
  Gene Name: lipopolysaccharide-induced TNF factor
  Uniprot ID: Q99732
  ENSP ID: ENSP00000459533

SEQ ID NO: 47079 - protein, 75 aa, Homo sapiens
  Payload ID: 9528
  Gene Symbol: LITAF
  Gene Name: lipopolysaccharide-induced TNF factor
  ENSP ID: ENSP00000459603
MSVPGPYQAATGPSSAPSAPPSYEETVAVNSYYPTPPAPMPGPTTGLVTGPDGKGMNPPSYYTQPAPIPNNNPSA

SEQ ID NO: 47080 - protein, 88 aa, Homo sapiens
  Payload ID: 9528
  Gene Symbol: LITAF
  Gene Name: lipopolysaccharide-induced TNF factor
  ENSP ID: ENSP00000459898
MTFVNCHGAGGSVAVRKTRVRPRRRLGFGKMSVPGPYQAATGPSSAPSAPPSYEETVAVNSYYPTPPAPMPGPTTGLVTGPDGKGMNP

SEQ ID NO: 47081 - protein, 105 aa, Homo sapiens
  Payload ID: 9528
  Gene Symbol: LITAF
  Gene Name: lipopolysaccharide-induced TNF factor
  ENSP ID: ENSP00000459913
MSVPGPYQAATGPSSAPSAPPSYEETVAVNSYYPTPPAPMPGPTTGLVTGPDGKGMNPPSYYTQPAPIPNNNPSTCGLPGPPYHSLALHPGNQESDRSDSAKESK

SEQ ID NO: 47082 - protein, 126 aa, Homo sapiens
  Payload ID: 9528
  Gene Symbol: LITAF
  Gene Name: lipopolysaccharide-induced TNF factor
  ENSP ID: ENSP00000460133
MSVPGPYQAATGPSSAPSAPPSYEETVAVNSYYPTPPAPMPGPTTGLVTGPDGKGMNPPSYYTQPAPIPNNNPITVQTVYVQHPITFLDRPIQMCCPSCNKMIVSQLSYNAGALTWLSCGSLCLLG

SEQ ID NO: 47083 - protein, 153 aa, Homo sapiens
  Payload ID: 9528
  Gene Symbol: LITAF
  Gene Name: lipopolysaccharide-induced TNF factor
  ENSP ID: ENSP00000460743
MSVPGPYQAATGPSSAPSAPPSYEETVAVNSYYPTPPAPMPGPTTGLVTGPDGKGMNPPSYYTQPAPIPNNNPITVQTVYVQHPITFLDRPIQMCCPSCNKMIVSQLSYNAGALTWLSCGSLCLLGCIAGCCFIPFCVDALQDVDHYCPNCRA

SEQ ID NO: 47084 - protein, 81 aa, Homo sapiens
  Payload ID: 9528
  Gene Symbol: LITAF
  Gene Name: lipopolysaccharide-induced TNF factor
  ENSP ID: ENSP00000460873
MSVPGPYQAATGPSSAPSAPPSYEETVAVNSYYPTPPAPMPGPTTGLVTGPDGKGMNPPSYYTQPAPIPNNNPMNAIGLVS

SEQ ID NO: 47085 - protein, 161 aa, Homo sapiens; identical to SEQ ID NO: 47068
  Payload ID: 9528
  Gene Symbol: LITAF
  Gene Name: lipopolysaccharide-induced TNF factor
  Uniprot ID: Q99732
  ENSP ID: ENSP00000461667

SEQ ID NO: 47086 - protein, 161 aa, Homo sapiens; identical to SEQ ID NO: 47068
  Payload ID: 9528
  Gene Symbol: LITAF
  Gene Name: lipopolysaccharide-induced TNF factor
  Uniprot ID: Q99732
  ENSP ID: ENSP00000461813

SEQ ID NO: 47087 - protein, 152 aa, Homo sapiens; identical to SEQ ID NO: 47070
  Payload ID: 9528
  Gene Symbol: LITAF
  Gene Name: lipopolysaccharide-induced TNF factor
  Uniprot ID: Q99732
  ENSP ID: ENSP00000481589

SEQ ID NO: 47088 - protein, 161 aa, Homo sapiens; identical to SEQ ID NO: 47068
  Payload ID: 9528
  Gene Symbol: LITAF
  Gene Name: lipopolysaccharide-induced TNF factor
  Uniprot ID: Q99732
  ENSP ID: ENSP00000483114

SEQ ID NO: 47089 - protein, 475 aa, Homo sapiens
  Payload ID: 9529
  Gene Symbol: LPL
  Gene Name: lipoprotein lipase
  Uniprot ID: P06858
  ENSP ID: ENSP00000309757
MESKALLVLTLAVWLQSLTASRGGVAAADQRRDFIDIESKFALRTPEDTAEDTCHLIPGVAESVATCHFNHSSKTFMVIHGWTVTGMYESWVPKLVAALYKREPDSNVIVVDWLSRAQEHYPVSAGYTKLVGQDVARFINWMEEEFNYPLDNVHLLGYSLGAHAAGIAGSLTNKKVNRITGLDPAGPNFEYAEAPSRLSPDDADFVDVLHTFTRGSPGRSIGIQKPVGHVDIYPNGGTFQPGCNIGEAIRVIAERGLGDVDQLVKCSHERSIHLFIDSLLNEENPSKAYRCSSKEAFEKGLCLSCRKNRCNNLGYEINKVRAKRSSKMYLKTRSQMPYKVFHYQVKIHFSGTESETHTNQAFEISLYGTVAESENIPFTLPEVSTNKTYSFLIYTEVDIGELLMLKLKWKSDSYFSWSDWWSSPGFAIQKIRVKAGETQKKVIFCSREKVSHLQKGKAPAVFVKCHDKSLNKKSG

SEQ ID NO: 47090 - protein, 129 aa, Homo sapiens
  Payload ID: 9529
  Gene Symbol: LPL
  Gene Name: lipoprotein lipase
  ENSP ID: ENSP00000428237
MESKALLVLTLAVWLQSLTASRGGVAAADQRRDFIDIESKFALRTPEDTAEDTCHLIPGVAESVATCHFNHSSKTFMVIHGWTVTGMYESWVPKLVAALYKREPDSNVIVVDWLSRAQEHYPVSAGYTK

SEQ ID NO: 47091 - protein, 115 aa, Homo sapiens
  Payload ID: 9529
  Gene Symbol: LPL
  Gene Name: lipoprotein lipase
  ENSP ID: ENSP00000428496
MVIHGWTVTGMYESWVPKLVAALYKREPDSNVIVVDWLSRAQEHYPVSAGYTKLVGQDVARFINWMEEEFNYPLDNVHLLGYSLGAHAAGIAGSLTNKKVNRITGLDPAGPNFEY

SEQ ID NO: 47092 - protein, 105 aa, Homo sapiens
  Payload ID: 9529
  Gene Symbol: LPL
  Gene Name: lipoprotein lipase
  ENSP ID: ENSP00000428557
MESKALLVLTLAVWLQSLTASRGGVAAADQRRDFIDIESKFALRTPEDTAEDTCHLIPGVAESVATCHFNHSSKTFMVIHGWTVTGMYESWVPKLVAALYKREPD

SEQ ID NO: 47093 - protein, 39 aa, Homo sapiens
  Payload ID: 9529
  Gene Symbol: LPL
  Gene Name: lipoprotein lipase
  ENSP ID: ENSP00000431028
MESKALLVLTLAVWLQSLTASRGGVAAADLILKLQIFKF

SEQ ID NO: 47094 - protein, 2040 aa, Homo sapiens
  Payload ID: 9530
  Gene Symbol: LPA
  Gene Name: lipoprotein, Lp(a)
  Uniprot ID: P08519
  ENSP ID: ENSP00000321334
MEHKEVVLLLLLFLKSAAPEQSHVVQDCYHGDGQSYRGTYSTTVTGRTCQAWSSMTPHQHNRTTENYPNAGLIMNYCRNPDAVAAPYCYTRDPGVRWEYCNLTQCSDAEGTAVAPPTVTPVPSLEAPSEQAPTEQRPGVQECYHGNGQSYRGTYSTTVTGRTCQAWSSMTPHSHSRTPEYYPNAGLIMNYCRNPDAVAAPYCYTRDPGVRWEYCNLTQCSDAEGTAVAPPTVTPVPSLEAPSEQAPTEQRPGVQECYHGNGQSYRGTYSTTVTGRTCQAWSSMTPHSHSRTPEYYPNAGLIMNYCRNPDAVAAPYCYTRDPGVRWEYCNLTQCSDAEGTAVAPPTVTPVPSLEAPSEQAPTEQRPGVQECYHGNGQSYRGTYSTTVTGRTCQAWSSMTPHSHSRTPEYYPNAGLIMNYCRNPDAVAAPYCYTRDPGVRWEYCNLTQCSDAEGTAVAPPTVTPVPSLEAPSEQAPTEQRPGVQECYHGNGQSYRGTYSTTVTGRTCQAWSSMTPHSHSRTPEYYPNAGLIMNYCRNPDAVAAPYCYTRDPGVRWEYCNLTQCSDAEGTAVAPPTVTPVPSLEAPSEQAPTEQRPGVQECYHGNGQSYRGTYSTTVTGRTCQAWSSMTPHSHSRTPEYYPNAGLIMNYCRNPDAVAAPYCYTRDPGVRWEYCNLTQCSDAEGTAVAPPTVTPVPSLEAPSEQAPTEQRPGVQECYHGNGQSYRGTYSTTVTGRTCQAWSSMTPHSHSRTPEYYPNAGLIMNYCRNPDAVAAPYCYTRDPGVRWEYCNLTQCSDAEGTAVAPPTVTPVPSLEAPSEQAPTEQRPGVQECYHGNGQSYRGTYSTTVTGRTCQAWSSMTPHSHSRTPEYYPNAGLIMNYCRNPDPVAAPYCYTRDPSVRWEYCNLTQCSDAEGTAVAPPTITPIPSLEAPSEQAPTEQRPGVQECYHGNGQSYQGTYFITVTGRTCQAWSSMTPHSHSRTPAYYPNAGLIKNYCRNPDPVAAPWCYTTDPSVRWEYCNLTRCSDAEWTAFVPPNVILAPSLEAFFEQALTEETPGVQDCYYHYGQSYRGTYSTTVTGRTCQAWSSMTPHQHSRTPENYPNAGLTRNYCRNPDAEIRPWCYTMDPSVRWEYCNLTQCLVTESSVLATLTVVPDPSTEASSEEAPTEQSPGVQDCYHGDGQSYRGSFSTTVTGRTCQSWSSMTPHWHQRTTEYYPNGGLTRNYCRNPDAEISPWCYTMDPNVRWEYCNLTQCPVTESSVLATSTAVSEQAPTEQSPTVQDCYHGDGQSYRGSFSTTVTGRTCQSWSSMTPHWHQRTTEYYPNGGLTRNYCRNPDAEIRPWCYTMDPSVRWEYCNLTQCPVMESTLLTTPTVVPVPSTELPSEEAPTENSTGVQDCYRGDGQSYRGTLSTTITGRTCQSWSSMTPHWHRRIPLYYPNAGLTRNYCRNPDAEIRPWCYTMDPSVRWEYCNLTRCPVTESSVLTTPTVAPVPSTEAPSEQAPPEKSPVVQDCYHGDGRSYRGISSTTVTGRTCQSWSSMIPHWHQRTPENYPNAGLTENYCRNPDSGKQPWCYTTDPCVRWEYCNLTQCSETESGVLETPTVVPVPSMEAHSEAAPTEQTPVVRQCYHGNGQSYRGTFSTTVTGRTCQSWSSMTPHRHQRTPENYPNDGLTMNYCRNPDADTGPWCFTMDPSIRWEYCNLTRCSDTEGTVVAPPTVIQVPSLGPPSEQDCMFGNGKGYRGKKATTVTGTPCQEWAAQEPHRHSTFIPGTNKWAGLEKNYCRNPDGDINGPWCYTMNPRKLFDYCDIPLCASSSFDCGKPQVEPKKCPGSIVGGCVAHPHSWPWQVSLRTRFGKHFCGGTLISPEWVLTAAHCLKKSSRPSSYKVILGAHQEVNLESHVQEIEVSRLFLEPTQADIALLKLSRPAVITDKVMPACLPSPDYMVTARTECYITGWGETQGTFGTGLLKEAQLLVIENEVCNHYKYICAEHLARGTDSCQGDSGGPLVCFEKDKYILQGVTSWGLGCARPNKPGVYARVSRFVTWIEGMMRNN

SEQ ID NO: 47095 - protein, 613 aa, Homo sapiens
  Payload ID: 9530
  Gene Symbol: LPA
  Gene Name: lipoprotein, Lp(a)
  Uniprot ID: P08519
  ENSP ID: ENSP00000395608
SGLIMNYCRNPDAVAAPYCYTRDPGVRWEYCNLTQCSDAEGTAVAPPTVTPVPSLEAPSEQAPTEQRPGVQECYHGNGQSYRGTYSTTVTGRTCQAWSSMTPHSHSRTPEYYPNAGLIMNYCRNPDPVAAPYCYTRDPSVRWEYCNLTQCSDAEGTAVAPPTITPIPSLEAPSEQAPTEQRPGVQECYHGNGQSYQGTYFITVTGRTCQAWSSMTPHSHSRTPAYYPNAGLIKNYCRNPDPVAAPWCYTTDPSVRWEYCNLTRCSDAEWTAFVPPNVILAPSLEAFFEQALTEETPGVQDCYYHYGQSYRGTYSTTVTGRTCQAWSSMTPHQHSRTPENYPNAGLTRNYCRNPDAEIRPWCYTMDPSVRWEYCNLTQCLVTESSVLATLTVVPDPSTEASSEEAPTEQSPGVQDCYHGDGQSYRGSFSTTVTGRTCQSWSSMTPHWHQRTTEYYPNGGLTRNYCRNPDAEISPWCYTMDPNVRWEYCNLTQCPVTESSVLATSTAVSEQAPTEQSPTVQDCYHGDGQSYRGSFSTTVTGRTCQSWSSMTPHWHQRTTEYYPNGGLTRNYCRNPDAEIRPWCYTMDPSVRWEYCNLTQCPVMESTLLTTPTVVP

SEQ ID NO: 47096 - protein, 571 aa, Homo sapiens
  Payload ID: 9530
  Gene Symbol: LPA
  Gene Name: lipoprotein, Lp(a)
  ENSP ID: ENSP00000480589
SGLIMNYCRNPDAVAAPYCYTRDPGVRWEYCNLTQCSDAEGTAVAPPTVTPVPSLEAPSEQAPTEQRPGVQECYHGNGQSYRGTYSTTVTGRTCQAWSSMTPHSHSRTPEYYPNAGLIMNYCRNPDAVAAPYCYTRDPGVRWEYCNLTQCSDAEGTAVAPPTVTPVPSLEAPSEQAPTEQRPGVQECYHGNGQSYRGTYSTTVTGRTCQAWSSMTPHSHSRTPEYYPNAGLIMNYCRNPDAVAAPYCYTRDPGVRWEYCNLTQCSDAEGTAVAPPTVTPVPSLEAPSEQAPTEQRPGVQECYHGNGQSYRGTYSTTVTGRTCQAWSSMTPHSHSRTPEYYPNAGLIMNYCRNPDAVAAPYCYTRDPGVRWEYCNLTQCSDAEGTAVAPPTVTPVPSLEAPSEQAPTEQRPGVQECYHGNGQSYRGTYSTTVTGRTCQAWSSMTPHSHSRTPEYYPNAGLIMNYCRNPDAVAAPYCYTRDPGVRWEYCNLTQCSDAEGTAVAPPTVTPVPSLEAPSEQAPTEQRPGVQECYHGNGQSYRGTYSTTVTGRTCQAWSSMTPHSHSRTPEYYPNA

SEQ ID NO: 47097 - protein, 1114 aa, Homo sapiens
  Payload ID: 9531
  Gene Symbol: LOXHD1
  Gene Name: lipoxygenase homology domains 1
  Uniprot ID: Q8IVV2
  ENSP ID: ENSP00000300591
MNNEITYYFPCQRWLAVEEDDGQLSRELLPVDESYVLPQSEEGRGGGDNNPLDNLALEQKDKSTTFSVTIKTGVKKNAGTDANVFITLFGTQDDTGMTLLKSSKTNSDKFERDSIEIFTVETLDLGDLWKVRLGHDNTGKAPGWFVDWVEVDAPSLGKCMTFPCGRWLAKNEDDGSIIRDLFHAELQTRLYTPFVPYEITLYTSDVFAAGTDANIFIIIYGCDAVCTQQKYLCTNKREQKQFFERKSASRFIVELEDVGEIIEKIRIGHNNTGMNPGWHCSHVDIRRLLPDKDGAETLTFPCDRWLATSEDDKKTIRELVPYDIFTEKYMKDGSLRQVYKEVEEPLDIVLYSVQIFTGNIPGAGTDAKVYITIYGDLGDTGERYLGKSENRTNKFERGTADTFIIEAADLGVIYKIKLRHDNSKWCADWYVEKVEIWNDTNEDEFLFLCGRWLSLKKEDGRLERLFYEKEYTGDRSSNCSSPADFWEIALSSKMADVDISTVTGPMADYVQEGPIIPYYVSVTTGKHKDAATDSRAFIFLIGEDDERSKRIWLDYPRGKRGFSRGSVEEFYVAGLDVGIIKKIELGHDGASPESCWLVEELCLAVPTQGTKYMLNCNCWLAKDRGDGITSRVFDLLDAMVVNIGVKVLYEMTVWTGDVVGGGTDSNIFMTLYGINGSTEEMQLDKKKARFEREQNDTFIMEILDIAPFTKMRIRIDGLGSRPEWFLERILLKNMNTGDLTMFYYGDWLSQRKGKKTLVCEMCAVIDEEEMMEWTSYTVAVKTSDILGAGTDANVFIIIFGENGDSGTLALKQSANWNKFERNNTDTFNFPDMLSLGHLCKLRVWHDNKGIFPGWHLSYVDVKDNSRDETFHFQCDCWLSKSEGDGQTVRDFACANNKICDELEETTYEIVIETGNGGETRENVWLILEGRKNRSKEFLMENSSRQRAFRKGTTDTFEFDSIYLGDIASLCVGHLAREDRFIPKRELAWHVKTITITEMEYGNVYFFNCDCLIPLKRKRKYFKVFEVTKTTESFASKVQSLVPVKYEVIVTTGYEPGAGTDANVFVTIFGANGDTGKRELKQKMRNLFERGSTDRFFLETLELVVTRLGLAAECG

SEQ ID NO: 47098 - protein, 512 aa, Homo sapiens
  Payload ID: 9531
  Gene Symbol: LOXHD1
  Gene Name: lipoxygenase homology domains 1
  Uniprot ID: Q8IVV2
  ENSP ID: ENSP00000381676
MTVWTGDVVGGGTDSNIFMTLYGINGSTEEMQLDKKKARFEREQNDTFIMEILDIAPFTKMRIRIDGLGSRPEWFLERILLKNMNTGDLTMFYYGDWLSQRKGKKTLVCEMCAVIDEEEMMEWTSYTVAVKTSDILGAGTDANVFIIIFGENGDSGTLALKQSANWNKFERNNTDTFNFPDMLSLGHLCKLRVWHDNKGIFPGWHLSYVDVKDNSRDETFHFQCDCWLSKSEGDGQTVRDFACANNKICDELEETTYEIVIETGNGGETRENVWLILEGRKNRSKEFLMENSSRQRAFRKGTTDTFEFDSIYLGDIASLCVGHLAREDRFIPKRELAWHVKTITITEMEYGNVYFFNCDCLIPLKRKRKYFKVFEVTKTTESFASKVQSLVPVKYEVIVTTGYEPGAGTDANVFVTIFGANGDTGKRELKQKMRNLFERGSTDRFFLETLELGELRKVRLEHDSSGYCSGWLVEKVEVTNTSTGVATIFNCGRWLDKKRGDGLTWRDLFPSV

SEQ ID NO: 47099 - protein, 457 aa, Homo sapiens
  Payload ID: 9531
  Gene Symbol: LOXHD1
  Gene Name: lipoxygenase homology domains 1
  Uniprot ID: Q8IVV2
  ENSP ID: ENSP00000381692
MTVWTGDVVGGGTDSNIFMTLYGINGSTEEMQLDKKKARFEREQNDTFIMEILDIAPFTKMRIRIDGLGSRPEWFLERILLKNMNTGDLTMFYYGDWLSQRKGKKTLVCEMCAVIDEEEMMEWTSYTVAVKTSDILGAGTDANVFIIIFGENGDSGTLALKQSANWNKFERNNTDTFNFPDMLSLGHLCKLRVWHDNKGIFPGWHLSYVDVKDNSRDETFHFQCDCWLSKSEGDGQTVRDFACANNKICDELEETTYEIVIETGNGGETRENVWLILEGRKNRSKEFLMENSSRQRAFRKGTTDTFEFDSIYLGDIASLCVGHLAREDRFIPKRELAWHVKTITITEMEYGNVYFFNCDCLIPLKRKRKYFKVFEVTKTTESFASKVQSLVPVKYEVIVTTGYEPGAGTDANVFVTIFGANGDTGKRELKQKMRNLFERGSTDRFFLETLELGELRK

SEQ ID NO: 47100 - protein, 2067 aa, Homo sapiens
  Payload ID: 9531
  Gene Symbol: LOXHD1
  Gene Name: lipoxygenase homology domains 1
  ENSP ID: ENSP00000387621
MMPQKKRRRKKDIDFLALYEAELLNYASEDDEGELEHEYYKARVYEVVTATGDVRGAGTDANVFITLFGENGLSPKLQLTSKSKSAFEKGNVDVFRVRTNNVGLIYKVRIEHDNTGLNASWYLDHVIVTDMKRPHLRYYFNCNNWLSKVEGDRQWCRDLLASFNPMDMPRGNKYEVKVYTGDVIGAGTDADVFINIFGEYGDTGERRLENEKDNFEKGAEDRFILDAPDLGQLMKINVGHNNKGGSAGWFLSQIVIEDIGNKRKYDFPLNRWLALDEDDGKIQRDILVGGAETTAITYIVTVFTGDVRGAGTKSKIYLVMYGARGNKNSGKIFLEGGVFDRGRTDIFHIELAVLLSPLSRVSVGHGNVGVNRGWFCEKVVILCPFTGIQQTFPCSNWLDEKKADGLIERQLYEMVSLRKKRLKKFPWSLWVWTTDLKKAGTNSPIFIQIYGQKGRTDEILLNPNNKWFKPGIIEKFRIELPDLGRFYKIRVWHDKRSSGSGWHLERMTLMNTLNKDKYNFNCNRWLDANEDDNEIVREMTAEGPTVRRIMGMARYHVTVCTGELEGAGTDANVYLCLFGDVGDTGERLLYNCRNNTDLFEKGNADEFTIESVTMRNVRRVRIRHDGKGSGSGWYLDRVLVREEGQPESDNVEFPCLRWLDKDKDDGQLVRELLPSDSSATLKNFRYHISLKTGDVSGASTDSRVYIKLYGDKSDTIKQVLLVSDNNLKDYFERGRVDEFTLETLNIGNINRLVIGHDSTGMHASWFLGSVQIRVPRQGKQYTFPANRWLDKNQADGRLEVELYPSEVVEIQKLVHYEVEIWTGDVGGAGTSARVYMQIYGEKGKTEVLFLSSRSKVFERASKDTFQTDTFTIYAIDLGALTKIRIRHDNTGNRAGWFLDRIDITDMNNEITYYFPCQRWLAVEEDDGQLSRELLPVDESYVLPQSEEGRGGGDNNPLDNLALEQKDKSTTFSVTIKTGVKKNAGTDANVFITLFGTQDDTGMTLLKSSKTNSDKFERDSIEIFTVETLDLGDLWKVRLGHDNTGKAPGWFVDWVEVDAPSLGKCMTFPCGRWLAKNEDDGSIIRDLFHAELQTRLYTPFVPYEITLYTSDVFAAGTDANIFIIIYGCDAVCTQQKYLCTNKREQKQFFERKSASRFIVELEDVGEIIEKIRIGHNNTGMNPGWHCSHVDIRRLLPDKDGAETLTFPCDRWLATSEDDKKTIRELVPYDIFTEKYMKDGSLRQVYKEVEEPLDIVLYSVQIFTGNIPGAGTDAKVYITIYGDLGDTGERYLGKSENRTNKFERGTADTFIIEAADLGVIYKIKLRHDNSKWCADWYVEKVEIWNDTNEDEFLFLCGRWLSLKKEDGRLERLFYEKEYTGDRSSNCSSPADFWEIALSSKMADVDISTVTGPMADYVQEGPIIPYYVSVTTGKHKDAATDSRAFIFLIGEDDERSKRIWLDYPRGKRGFSRGSVEEFYVAGLDVGIIKKIELGHDGASPESCWLVEELCLAVPTQGTKYMLNCNCWLAKDRGDGITSRVFDLLDAMVVNIGVKVLYEMTVWTGDVVGGGTDSNIFMTLYGINGSTEEMQLDKKKARFEREQNDTFIMEILDIAPFTKMRIRIDGLGSRPEWFLERILLKNMNTGDLTMFYYGDWLSQRKGKKTLVCEMCAVIDEEEMMEWTSYTVAVKTSDILGAGTDANVFIIIFGENGDSGTLALKQSANWNKFERNNTDTFNFPDMLSLGHLCKLRVWHDNKGIFPGWHLSYVDVKDNSRDETFHFQCDCWLSKSEGDGQTVRDFACANNKICDELEETTYEIVIETGNGGETRENVWLILEGRKNRSKEFLMENSSRQRAFRKGTTDTFEFDSIYLGDIASLCVGHLAREDRFIPKRELAWHVKTITITEMEYGNVYFFNCDCLIPLKRKRKYFKVFEVTKTTESFASKVQSLVPVKYEVIVTTGYEPGAGTDANVFVTIFGANGDTGKRELKQKMRNLFERGSTDRFFLETLELGELRKVRLEHDSSGYCSGWLVEKVEVTNTSTGVATIFNCGRWLDKKRGDGLTWRDLFPSV

SEQ ID NO: 47101 - protein, 180 aa, Homo sapiens
  Payload ID: 9531
  Gene Symbol: LOXHD1
  Gene Name: lipoxygenase homology domains 1
  ENSP ID: ENSP00000392440
MTVWTGDVVGGGTDSNIFMTLYGINGSTEEMQLDKKKARFEREQNDTFIMEILDIAPFTKMRIRIDGLGSRPEWFLERILLKNMNTGDLTMFYYGDWLSQRKGKKTLVCEMCAVIDEEEMMEWTSYTVAVKTSDILGAGTDANVFIIIFGENGDSGTLALKQSANWNKFERNNTDTFNFP

SEQ ID NO: 47102 - protein, 23 aa, Homo sapiens
  Payload ID: 9531
  Gene Symbol: LOXHD1
  Gene Name: lipoxygenase homology domains 1
  ENSP ID: ENSP00000412568
MNNEITYYFPCQRWLAVEEDDGQ

SEQ ID NO: 47103 - protein, 57 aa, Homo sapiens
  Payload ID: 9531
  Gene Symbol: LOXHD1
  Gene Name: lipoxygenase homology domains 1
  ENSP ID: ENSP00000414278
MGFLDQVRSCPTKVLYEMTVWTGDVVGGGTDSNIFMTLYGINGSTEEMQLDKKKARF

SEQ ID NO: 47104 - protein, 306 aa, Homo sapiens
  Payload ID: 9531
  Gene Symbol: LOXHD1
  Gene Name: lipoxygenase homology domains 1
  ENSP ID: ENSP00000440060
MRLGTNCEHPQLPLAAPSGYYFPCQRWLAVEEDDGQLSRELLPVDESYVLPQSEEGRGGGDNNPLDNLALEQKDKSTTFSVTIKTGVKKNAGTDANVFITLFGTQDDTGMTLLKSSKTNSDKFERDSIEIFTVETLDLGDLWKVRLGHDNTGKAPGWFVDWVEVDAPSLGKCMTFPCGRWLAKNEDDGSIIRDLFHAELQTRLYTPFVPYEITLYTSDVFAAGTDANIFIIIYGCDAVCTQQKYLCTNKREQKQFFERKSASRFIVELEDVGEIIEKIRIGHNNTGMNPGWHCSHVDIRRLLPDKD

SEQ ID NO: 47105 - protein, 2211 aa, Homo sapiens
  Payload ID: 9531
  Gene Symbol: LOXHD1
  Gene Name: lipoxygenase homology domains 1
  ENSP ID: ENSP00000444586
MMPQKKRRRKKDIDFLALYEAELLNYASEDDEGELEHEYYKARVYEVVTATGDVRGAGTDANVFITLFGENGLSPKLQLTSKSKSAFEKGNVDVFRVRTNNVGLIYKVRIEHDNTGLNASWYLDHVIVTDMKRPHLRYYFNCNNWLSKVEGDRQWCRDLLASFNPMDMPRGNKYEVKVYTGDVIGAGTDADVFINIFGEYGDTGERRLENEKDNFEKGAEDRFILDAPDLGQLMKINVGHNNKGGSAGWFLSQIVIEDIGNKRKYDFPLNRWLALDEDDGKIQRDILVGGAETTAITYIVTVFTGDVRGAGTKSKIYLVMYGARGNKNSGKIFLEGGVFDRGRTDIFHIELAVLLSPLSRVSVGHGNVGVNRGWFCEKVVILCPFTGIQQTFPCSNWLDEKKADGLIERQLYEMVSLRKKRLKKFPWSLWVWTTDLKKAGTNSPIFIQIYGQKGRTDEILLNPNNKWFKPGIIEKFRIELPDLGRFYKIRVWHDKRSSGSGWHLERMTLMNTLNKDKYNFNCNRWLDANEDDNEIVREMTAEGPTVRRIMGMARYHVTVCTGELEGAGTDANVYLCLFGDVGDTGERLLYNCRNNTDLFEKGNADEFTIESVTMRNVRRVRIRHDGKGSGSGWYLDRVLVREEGQPESDNVEFPCLRWLDKDKDDGQLVRELLPSDSSATLKNFRYHISLKTGDVSGASTDSRVYIKLYGDKSDTIKQVLLVSDNNLKDYFERGRVDEFTLETLNIGNINRLVIGHDSTGMHASWFLGSVQIRVPRQGKQYTFPANRWLDKNQADGRLEVELYPSEVVEIQKLVHYEVEIWTGDVGGAGTSARVYMQIYGEKGKTEVLFLSSRSKVFERASKDTFQLEAADVGEVYKLRLGHTGEGFGPSWFVDTVWLRHLVVREVDLTPEEEARKKKEKDKLRQLLKKERLKAKLQRKKKKRKGSDEEDEGEEEESSSSEESSSEEEEMEEEEEEEEFGPGMQEVIEQHKFEAHRWLARGKEDNELVVELVPAGKPGPERNTYEVQVVTGNVPKAGTDANVYLTIYGEEYGDTGERPLKKSDKSNKFEQGQTDTFTIYAIDLGALTKIRIRHDNTGNRAGWFLDRIDITDMNNEITYYFPCQRWLAVEEDDGQLSRELLPVDESYVLPQSEEGRGGGDNNPLDNLALEQKDKSTTFSVTIKTGVKKNAGTDANVFITLFGTQDDTGMTLLKSSKTNSDKFERDSIEIFTVETLDLGDLWKVRLGHDNTGKAPGWFVDWVEVDAPSLGKCMTFPCGRWLAKNEDDGSIIRDLFHAELQTRLYTPFVPYEITLYTSDVFAAGTDANIFIIIYGCDAVCTQQKYLCTNKREQKQFFERKSASRFIVELEDVGEIIEKIRIGHNNTGMNPGWHCSHVDIRRLLPDKDGAETLTFPCDRWLATSEDDKKTIRELVPYDIFTEKYMKDGSLRQVYKEVEEPLDIVLYSVQIFTGNIPGAGTDAKVYITIYGDLGDTGERYLGKSENRTNKFERGTADTFIIEAADLGVIYKIKLRHDNSKWCADWYVEKVEIWNDTNEDEFLFLCGRWLSLKKEDGRLERLFYEKEYTGDRSSNCSSPADFWEIALSSKMADVDISTVTGPMADYVQEGPIIPYYVSVTTGKHKDAATDSRAFIFLIGEDDERSKRIWLDYPRGKRGFSRGSVEEFYVAGLDVGIIKKIEVLYEMTVWTGDVVGGGTDSNIFMTLYGINGSTEEMQLDKKKARFEREQNDTFIMEILDIAPFTKMRIRIDGLGSRPEWFLERILLKNMNTGDLTMFYYGDWLSQRKGKKTLVCEMCAVIDEEEMMEWTSYTVAVKTSDILGAGTDANVFIIIFGENGDSGTLALKQSANWNKFERNNTDTFNFPDMLSLGHLCKLRVWHDNKGIFPGWHLSYVDVKDNSRDETFHFQCDCWLSKSEGDGQTVRDFACANNKICDELEETTYEIVIETGNGGETRENVWLILEGRKNRSKEFLMENSSRQRAFRKGTTDTFEFDSIYLGDIASLCVGHLAREDRFIPKRELAWHVKTITITEMEYGNVYFFNCDCLIPLKRKRKYFKVFEVTKTTESFASKVQSLVPVKYEVIVTTGYEPGAGTDANVFVTIFGANGDTGKRELKQKMRNLFERGSTDRFFLETLELGELRKVRLEHDSSGYCSGWLVEKVEVTNTSTGVATIFNCGRWLDKKRGDGLTWRDLFPSV

SEQ ID NO: 47106 - protein, 1100 aa, Homo sapiens
  Payload ID: 9531
  Gene Symbol: LOXHD1
  Gene Name: lipoxygenase homology domains 1
  ENSP ID: ENSP00000461964
MNNEITYYFPCQRWLAVEEDDGQLSRELLPVDESYVLPQSEEGRGGGDNNPLDNLALEQKDKSTTFSVTIKTGVKKNAGTDANVFITLFGTQDDTGMTLLKSSKTNSDKFERDSIEIFTVETLDLGDLWKVRLGHDNTGKAPGWFVDWVEVDAPSLGKCMTFPCGRWLAKNEDDGSIIRDLFHAELQTRLYTPFVPYEITLYTSDVFAAGTDANIFIIIYGCDAVCTQQKYLCTNKREQKQFFERKSASRFIVELEDVGEIIEKIRIGHNNTGMNPGWHCSHVDIRRLLPDKDGAETLTFPCDRWLATSEDDKKTIRELVPYDIFTEKYMKDGSLRQVYKEVEEPLDIVLYSVQIFTGNIPGAGTDAKVYITIYGDLGDTGERYLGKSENRTNKFERGTADTFIIEAADLGVIYKIKLRHDNSKWCADWYVEKVEIWNDTNEDEFLFLCGRWLSLKKEDGRLERLFYEKEYTGDRSSNCSSPADFWEIALSSKMADVDISTVTGPMADYVQEGPIIPYYVSVTTGKHKDAATDSRAFIFLIGEDDERSKRIWLDYPRGKRGFSRGSVEEFYVAGLDVGIIKKIEVLYEMTVWTGDVVGGGTDSNIFMTLYGINGSTEEMQLDKKKARFEREQNDTFIMEILDIAPFTKMRIRIDGLGSRPEWFLERILLKNMNTGDLTMFYYGDWLSQRKGKKTLVCEMCAVIDEEEMMEWTSYTVAVKTSDILGAGTDANVFIIIFGENGDSGTLALKQSANWNKFERNNTDTFNFPDMLSLGHLCKLRVWHDNKGIFPGWHLSYVDVKDNSRDETFHFQCDCWLSKSEGDGQTVRDFACANNKICDELEETTYEIVIETGNGGETRENVWLILEGRKNRSKEFLMENSSRQRAFRKGTTDTFEFDSIYLGDIASLCVGHLAREDRFIPKRELAWHVKTITITEMEYGNVYFFNCDCLIPLKRKRKYFKVFEVTKTTESFASKVQSLVPVKYEVIVTTGYEPGAGTDANVFVTIFGANGDTGKRELKQKMRNLFERGSTDRFFLETLELGELRKVRLEHDSSGYCSGWLVEKVEVTNTSTGVATIFNCGRWLDKKRGDGLTWRDLFPSV

SEQ ID NO: 47107 - protein, 1011 aa, Homo sapiens
  Payload ID: 9531
  Gene Symbol: LOXHD1
  Gene Name: lipoxygenase homology domains 1
  ENSP ID: ENSP00000463285
MTLLKSSKTNSDKFERDSIEIFTVETLDLGDLWKVRLGHDNTGKAPGWFVDWVEVDAPSLGKCMTFPCGRWLAKNEDDGSIIRDLFHAELQTRLYTPFVPYEITLYTSDVFAAGTDANIFIIIYGCDAVCTQQKYLCTNKREQKQFFERKSASRFIVELEDVGEIIEKIRIGHNNTGMNPGWHCSHVDIRRLLPDKDGAETLTFPCDRWLATSEDDKKTIRELVPYDIFTEKYMKDGSLRQVYKEVEEPLDIVLYSVQIFTGNIPGAGTDAKVYITIYGDLGDTGERYLGKSENRTNKFERGTADTFIIEAADLGVIYKIKLRHDNSKWCADWYVEKVEIWNDTNEDEFLFLCGRWLSLKKEDGRLERLFYEKEYTGDRSSNCSSPADFWEIALSSKMADVDISTVTGPMADYVQEGPIIPYYVSVTTGKHKDAATDSRAFIFLIGEDDERSKRIWLDYPRGKRGFSRGSVEEFYVAGLDVGIIKKIELGHDGASPESCWLVEELCLAVPTQGTKYMLNCNCWLAKDRGDGITSRVFDLLDAMVVNIGVKVLYEMTVWTGDVVGGGTDSNIFMTLYGINGSTEEMQLDKKKARFEREQNDTFIMEILDIAPFTKMRIRIDGLGSRPEWFLERILLKNMNTGDLTMFYYGDWLSQRKGKKTLVCEMCAVIDEEEMMEWTSYTVAVKTSDILGAGTDANVFIIIFGENGDSGTLALKQSANWNKFERNNTDTFNFPDMLSLGHLCKLRVWHDNKGIFPGWHLSYVDVKDNSRDETFHFQCDCWLSKSEGDGQTVRDFACANNKICDELEETTYEIVIETGNGGETRENVWLILEGRKNRSKEFLMENSSRQRAFRKGTTDTFEFDSIYLGDIASLCVGHLAREDRFIPKRELAWHVKTITITEMEYGNVYFFNCDCLIPLKRKRKYFKVFEVTKTTESFASKVQSLVPVKYEVIVTTGYEPGAGTDANVFVTIFGANGDTGKRELKQKMRNLFERGSTDRFFLETLELGELRK

SEQ ID NO: 47108 - protein, 231 aa, Homo sapiens
  Payload ID: 9532
  Gene Symbol: LIPT2
  Gene Name: lipoyl(octanoyl) transferase 2 (putative)
  Uniprot ID: A6NK58
  ENSP ID: ENSP00000309463
MRQPAVRLVRLGRVPYAELLGLQDRWLRRLQAEPGIEAPSGTEAGALLLCEPAGPVYTAGLRGGLTPEETARLRALGAEVRVTGRGGLATFHGPGQLLCHPVLDLRRLGLRLRMHVASLEACAVRLCELQGLQDARARPPPYTGVWLDDRKICAIGVRCGRHITSHGLALNCSTDLTWFEHIVPCGLVGTGVTSLSKELQRHVTVEEVMPPFLVAFKEIYKCTLISEDSPN

SEQ ID NO: 47109 - protein, 78 aa, Homo sapiens
  Payload ID: 9532
  Gene Symbol: LIPT2
  Gene Name: lipoyl(octanoyl) transferase 2 (putative)
  ENSP ID: ENSP00000431210
  MOD_RES (1)..(1): Any amino acid
XGLQDARARPPPYTGVWLDDRKICAIGERRGAGRYLRAEESAVEGTSHPTAWLSTALPTSRGLSTSCPVDWLGQASLP

SEQ ID NO: 47110 - protein, 73 aa, Homo sapiens
  Payload ID: 9532
  Gene Symbol: LIPT2
  Gene Name: lipoyl(octanoyl) transferase 2 (putative)
  ENSP ID: ENSP00000433005
  MOD_RES (1)..(1): Any amino acid
XLGLQDRWLRRLQAEPGIEAPSGTEAGALLLCEPAGPVYTAGLRGGLTPEETARLRALGAEESAVEGTSHPTA

SEQ ID NO: 47111 - protein, 373 aa, Homo sapiens
  Payload ID: 9533
  Gene Symbol: LIPT1
  Gene Name: lipoyltransferase 1
  Uniprot ID: Q9Y234
  ENSP ID: ENSP00000377114
MLIPFSMKNCFQLLCNCQVPAAGFKKTVKNGLILQSISNDVYQNLAVEDWIHDHMNLEGKPILFFWQNSPSVVIGRHQNPWQECNLNLMREEGIKLARRRSGGGTVYHDMGNINLTFFTTKKKYDRMENLKLIVRALNAVQPQLDVQATKRFDLLLDGQFKISGTASKIGRTTAYHHCTLLCSTDGTFLSSLLKSPYQGIRSNATASIPSLVKNLLEKDPTLTCEVLMNAVATEYAAYHQIDNHIHLINPTDETLFPGINSKAKELQTWEWIYGKTPKFSINTSFHVLYEQSHLEIKVFIDIKNGRIEICNIEAPDHWLPLEIRDKLNSSLIGSKFCPTETTMLTNILLRTCPQDHKLNSKWNILCEKIKGIM

SEQ ID NO: 47112 - protein, 373 aa, Homo sapiens; identical to SEQ ID NO: 47111
  Payload ID: 9533
  Gene Symbol: LIPT1
  Gene Name: lipoyltransferase 1
  Uniprot ID: Q9Y234
  ENSP ID: ENSP00000377115

SEQ ID NO: 47113 - protein, 135 aa, Homo sapiens
  Payload ID: 9533
  Gene Symbol: LIPT1
  Gene Name: lipoyltransferase 1
  ENSP ID: ENSP00000387387
MLIPFSMKNCFQLLCNCQVPAAGFKKTVKNGLILQSISNDVYQNLAVEDWIHDHMNLEGKPILFFWQNSPSVVIGRHQNPWQECNLNLMREEGIKLARRRSGGGTVYHDMGNINLTFFTTKKKYDRMENLKLIVR

SEQ ID NO: 47114 - protein, 251 aa, Homo sapiens
  Payload ID: 9533
  Gene Symbol: LIPT1
  Gene Name: lipoyltransferase 1
  ENSP ID: ENSP00000393591
MLIPFSMKNCFQLLCNCQVPAAGFKKTVKNGLILQSISNDVYQNLAVEDWIHDHMNLEGKPILFFWQNSPSVVIGRHQNPWQECNLNLMREEGIKLARRRSGGGTVYHDMGNINLTFFTTKKKYDRMENLKLIVRALNAVQPQLDVQATKRFDLLLDGQFKISGTASKIGRTTAYHHCTLLCSTDGTFLSSLLKSPYQGIRSNATASIPSLVKNLLEKDPTLTCEVLMNAVATEYAAYHQIDNHIHLINPT

SEQ ID NO: 47115 - protein, 106 aa, Homo sapiens
  Payload ID: 9533
  Gene Symbol: LIPT1
  Gene Name: lipoyltransferase 1
  ENSP ID: ENSP00000398168
MLIPFSMKNCFQLLCNCQVPAAGFKKTVKNGLILQSISNDVYQNLAVEDWIHDHMNLEGKPILFFWQNSPSVVIGRHQNPWQECNLNLMREEGIKLARRRSGGGTV

SEQ ID NO: 47116 - protein, 39 aa, Homo sapiens
  Payload ID: 9533
  Gene Symbol: LIPT1
  Gene Name: lipoyltransferase 1
  ENSP ID: ENSP00000406314
MLIPFSMKNCFQLLCNCQVPAAGFKKTVKNGLILQSISN

SEQ ID NO: 47117 - protein, 1766 aa, Homo sapiens
  Payload ID: 9534
  Gene Symbol: LTN1
  Gene Name: listerin E3 ubiquitin protein ligase 1
  Uniprot ID: O94822
  ENSP ID: ENSP00000354977
MGGKNKQRTKGNLRPSNSGRAAELLAKEQGTVPGFIGFGTSQSDLGYVPAIQGAEEIDSLVDSDFRMVLRKLSKKDVTTKLKAMQEFGTMCTERDTETVKGVLPYWPRIFCKISLDHDRRVREATQQAFEKLILKVKKQLAPYLKSLMGYWLMAQCDTYTPAAFAAKDAFEAAFPPSKQPEAIAFCKDEITSVLQDHLIKETPDTLSDPQTVPEEEREAKFYRVVTCSLLALKRLLCLLPDNELDSLEEKFKSLLSQNKFWKYGKHSVPQIRSAYFELVSALCQRIPQLMKEEASKVSPSVLLSIDDSDPIVCPALWEAVLYTLTTIEDCWLHVNAKKSVFPKLSTVIREGGRGLATVIYPYLLPFISKLPQSITNPKLDFFKNFLTSLVAGLSTERTKTSSLESSAVISAFFECLRFIMQQNLGEEEIEQMLVNDQLIPFIDAVLKDPGLQHGQLFNHLAETLSSWEAKADTEKDEKTAHNLENVLIHFWERLSEICVAKISEPEADVESVLGVSNLLQVLQKPKSSLKSSKKKNGKVRFADEILESNKENEKCVSSEGEKIEGWELTTEPSLTHNSSGLLSPLRKKPLEDLVCKLADISINYVNERKSEQHLRFLSTLLDSFSSSRVFKMLLGDEKQSIVQAKPLEIAKLVQKNPAVQFLYQKLIGWLNEDQRKDFGFLVDILYSALRCCDNDMERKKVLDDLTKVDLKWNSLLKIIEKACPSSDKHALVTPWLKGDILGEKLVNLADCLCNEDLESRVSSESHFSERWTLLSLVLSQHVKNDYLIGDVYVERIIVRLHETLFKTKKLSEAESSDSSVSFICDVAYNYFSSAKGCLLMPSSEDLLLTLFQLCAQSKEKTHLPDFLICKLKNTWLSGVNLLVHQTDSSYKESTFLHLSALWLKNQVQASSLDINSLQVLLSAVDDLLNTLLESEDSYLMGVYIGSVMPNDSEWEKMRQSLPMQWLHRPLLEGRLSLNYECFKTDFKEQDIKTLPSHLCTSALLSKMVLIALRKETVLENNELEKIIAELLYSLQWCEELDNPPIFLIGFCEILQKMNITYDNLRVLGNTSGLLQLLFNRSREHGTLWSLIIAKLILSRSISSDEVKPHYKRKESFFPLTEGNLHTIQSLCPFLSKEEKKEFSAQCIPALLGWTKKDLCSTNGGFGHLAIFNSCLQTKSIDDGELLHGILKIIISWKKEHEDIFLFSCNLSEASPEVLGVNIEIIRFLSLFLKYCSSPLAESEWDFIMCSMLAWLETTSENQALYSIPLVQLFACVSCDLACDLSAFFDSTTLDTIGNLPVNLISEWKEFFSQGIHSLLLPILVTVTGENKDVSETSFQNAMLKPMCETLTYISKEQLLSHKLPARLVADQKTNLPEYLQTLLNTLAPLLLFRARPVQIAVYHMLYKLMPELPQYDQDNLKSYGDEEEEPALSPPAALMSLLSIQEDLLENVLGCIPVGQIVTIKPLSEDFCYVLGYLLTWKLILTFFKAASSQLRALYSMYLRKTKSLNKLLYHLFRLMPENPTYAETAVEVPNKDPKTFFTEELQLSIRETTMLPYHIPHLACSVYHMTLKDLPAMVRLWWNSSEKRVFNIVDRFTSKYVSSVLSFQEISSVQTSTQLFNGMTVKARATTREVMATYTIEDIVIELIIQLPSNYPLGSIIVESGKRVGVAVQQWRNWMLQLSTYLTHQNGSIMEGLALWKNNVDKRFEGVEDCMICFSVIHGFNYSLPKKACRTCKKKFHSACLYKWFTSSNKSTCPLCRETFF

SEQ ID NO: 47118 - protein, 1812 aa, Homo sapiens
  Payload ID: 9534
  Gene Symbol: LTN1
  Gene Name: listerin E3 ubiquitin protein ligase 1
  Uniprot ID: O94822
  ENSP ID: ENSP00000373846
MDRVGGGKGPGGSYYRVSSSAARSRKLCPGRVNRGLSAQSTAATATMGGKNKQRTKGNLRPSNSGRAAELLAKEQGTVPGFIGFGTSQSDLGYVPAIQGAEEIDSLVDSDFRMVLRKLSKKDVTTKLKAMQEFGTMCTERDTETVKGVLPYWPRIFCKISLDHDRRVREATQQAFEKLILKVKKQLAPYLKSLMGYWLMAQCDTYTPAAFAAKDAFEAAFPPSKQPEAIAFCKDEITSVLQDHLIKETPDTLSDPQTVPEEEREAKFYRVVTCSLLALKRLLCLLPDNELDSLEEKFKSLLSQNKFWKYGKHSVPQIRSAYFELVSALCQRIPQLMKEEASKVSPSVLLSIDDSDPIVCPALWEAVLYTLTTIEDCWLHVNAKKSVFPKLSTVIREGGRGLATVIYPYLLPFISKLPQSITNPKLDFFKNFLTSLVAGLSTERTKTSSLESSAVISAFFECLRFIMQQNLGEEEIEQMLVNDQLIPFIDAVLKDPGLQHGQLFNHLAETLSSWEAKADTEKDEKTAHNLENVLIHFWERLSEICVAKISEPEADVESVLGVSNLLQVLQKPKSSLKSSKKKNGKVRFADEILESNKENEKCVSSEGEKIEGWELTTEPSLTHNSSGLLSPLRKKPLEDLVCKLADISINYVNERKSEQHLRFLSTLLDSFSSSRVFKMLLGDEKQSIVQAKPLEIAKLVQKNPAVQFLYQKLIGWLNEDQRKDFGFLVDILYSALRCCDNDMERKKVLDDLTKVDLKWNSLLKIIEKACPSSDKHALVTPWLKGDILGEKLVNLADCLCNEDLESRVSSESHFSERWTLLSLVLSQHVKNDYLIGDVYVERIIVRLHETLFKTKKLSEAESSDSSVSFICDVAYNYFSSAKGCLLMPSSEDLLLTLFQLCAQSKEKTHLPDFLICKLKNTWLSGVNLLVHQTDSSYKESTFLHLSALWLKNQVQASSLDINSLQVLLSAVDDLLNTLLESEDSYLMGVYIGSVMPNDSEWEKMRQSLPMQWLHRPLLEGRLSLNYECFKTDFKEQDIKTLPSHLCTSALLSKMVLIALRKETVLENNELEKIIAELLYSLQWCEELDNPPIFLIGFCEILQKMNITYDNLRVLGNTSGLLQLLFNRSREHGTLWSLIIAKLILSRSISSDEVKPHYKRKESFFPLTEGNLHTIQSLCPFLSKEEKKEFSAQCIPALLGWTKKDLCSTNGGFGHLAIFNSCLQTKSIDDGELLHGILKIIISWKKEHEDIFLFSCNLSEASPEVLGVNIEIIRFLSLFLKYCSSPLAESEWDFIMCSMLAWLETTSENQALYSIPLVQLFACVSCDLACDLSAFFDSTTLDTIGNLPVNLISEWKEFFSQGIHSLLLPILVTVTGENKDVSETSFQNAMLKPMCETLTYISKEQLLSHKLPARLVADQKTNLPEYLQTLLNTLAPLLLFRARPVQIAVYHMLYKLMPELPQYDQDNLKSYGDEEEEPALSPPAALMSLLSIQEDLLENVLGCIPVGQIVTIKPLSEDFCYVLGYLLTWKLILTFFKAASSQLRALYSMYLRKTKSLNKLLYHLFRLMPENPTYAETAVEVPNKDPKTFFTEELQLSIRETTMLPYHIPHLACSVYHMTLKDLPAMVRLWWNSSEKRVFNIVDRFTSKYVSSVLSFQEISSVQTSTQLFNGMTVKARATTREVMATYTIEDIVIELIIQLPSNYPLGSIIVESGKRVGVAVQQWRNWMLQLSTYLTHQNGSIMEGLALWKNNVDKRFEGVEDCMICFSVIHGFNYSLPKKACRTCKKKFHSACLYKWFTSSNKSTCPLCRETFF

SEQ ID NO: 47119 - protein, 813 aa, Homo sapiens
  Payload ID: 9534
  Gene Symbol: LTN1
  Gene Name: listerin E3 ubiquitin protein ligase 1
  ENSP ID: ENSP00000373847
MDRVGGGKGPGGSYYRVSSSAARSRKLCPGRVNRGLSAQSTAATATMGGKNKQRTKGNLRPSNSGRAAELLAKEQGTVPGFIGFGTSQSDLGYVPAIQGAEEIDSLVDSDFRMVLRKLSKKDVTTKLKAMQEFGTMCTERDTETVKGVLPYWPRIFCKISLDHDRRVREATQQAFEKLILKVKKQLAPYLKSLMGYWLMAQCDTYTPAAFAAKDAFEAAFPPSKQPEAIAFCKDEITSVLQDHLIKETPDTLSDPQTVPEEEREAKFYRVVTCSLLALKRLLCLLPDNELDSLEEKFKSLLSQNKFWKYGKHSVPQIRSAYFELVSALCQRIPQLMKEEASKVSPSVLLSIDDSDPIVCPALWEAVLYTLTTIEDCWLHVNAKKSVFPKLSTVIREGGRGLATVIYPYLLPFISKLPQSITNPKLDFFKNFLTSLVAGLSTERTKTSSLESSAVISAFFECLRFIMQQNLGEEEIEQMLVNDQLIPFIDAVLKDPGLQHGQLFNHLAETLSSWEAKADTEKDEKTAHNLENVLIHFWERLSEICVAKISEPEADVESVLGVSNLLQVLQKPKSSLKSSKKKNGKVRFADEILESNKENEKCVSSEGEKIEGWELTTEPSLTHNSSGLLSPLRKKPLEDLVCKLADISINYVNERKSEQHLRFLSTLLDSFSSSRVFKMLLGDEKQSIVQAKPLEIAKLVQKNPAVQFLYQKLIGWLNEDQRKDFGFLVDILYSALRCCDNDMERKKVLDDLTKVDLKWNSLLKIIEKECTCREVQILTSVWKKILFLSSDWKFLASVCCLRFHDSLASSSPYS

SEQ ID NO: 47120 - protein, 366 aa, Homo sapiens
  Payload ID: 9534
  Gene Symbol: LTN1
  Gene Name: listerin E3 ubiquitin protein ligase 1
  ENSP ID: ENSP00000474690
  MOD_RES (1)..(1): Any amino acid
XSKKDVTTKLKAMQEFGTMCTERDTETVKGVLPYWPRIFCKISLDHDRRVREATQQAFEKLILKVKKQLAPYLKSLMGYWLMAQCDTYTPAAFAAKDAFEAAFPPSKQPEAIAFCKDEITSVLQDHLIKETPDTLSDPQTVPEEEREAKFYRVVTCSLLALKRLLCLLPDNELDSLEEKFKSLLSQNKFWKYGKHSVPQIRSAYFELVSALCQRIPQLMKEEASKVSPSVLLSIDDSDPIVCPALWEAVLYTLTTIEDCWLHVNAKKSVFPKLSTVIREGGRGLATVIYPYLLPFISKLPQSITNPKLDFFKNFLTSLVAGLSTERTKTSSLESSAVISAFFECLRFIMQQNLGEEEIEQMLVNDQ

SEQ ID NO: 47121 - protein, 1812 aa, Homo sapiens; identical to SEQ ID NO: 47118
  Payload ID: 9534
  Gene Symbol: LTN1
  Gene Name: listerin E3 ubiquitin protein ligase 1
  Uniprot ID: O94822
  ENSP ID: ENSP00000478783

SEQ ID NO: 47122 - protein, 77 aa, Homo sapiens
  Payload ID: 9535
  Gene Symbol: LEAP2
  Gene Name: liver expressed antimicrobial peptide 2
  Uniprot ID: Q969E1
  ENSP ID: ENSP00000296877
MWHLKLCAVLMIFLLLLGQIDGSPIPEVSSAKRRPRRMTPFWRGVSLRPIGASCRDDSECITRLCRKRRCSLSVAQE

SEQ ID NO: 47123 - protein, 194 aa, Homo sapiens
  Payload ID: 9536
  Gene Symbol: LKAAEAR1
  Gene Name: LKAAEAR motif containing 1
  Uniprot ID: Q8TD35
  ENSP ID: ENSP00000302763
MPPPAKEGGRKGPRERSGKSAPGTAQGEERAKGAPATEPPKPGWALTPQGLAAMLPAQRHRHLLFGDLLEDVGAAASTFPCGSVEPGYRMPDPRPWTQSLELPAERQNRLLGVLKAAEARGRVRALRLRYTRMRAEEIALLIQRQKSARAAIRLELFLPPQLKPARIPDPLDRQERRRVETILEENVDGTIFPR

SEQ ID NO: 47124 - protein, 240 aa, Homo sapiens
  Payload ID: 9536
  Gene Symbol: LKAAEAR1
  Gene Name: LKAAEAR motif containing 1
  Uniprot ID: Q8TD35
  ENSP ID: ENSP00000310801
MPPPAKEGGRKGPRERSGKSAPGTAQGEERAKGAPATEPPKPGWALTPQGLAAMLPAQRHRHLLFGDLLEDVGAAASTFPCGSVEPGYRMPDPRPWTQSLELPAERQNRLLGVLKAAEARGRVRALRLRYTRMRAEEIALLIQRQKSARAAIRLELFLPPQLKPARIPDPLDRQEVQTSPGRGGERGGALPASAHAGPQPLSPAAEARGDHPGGERGWHHLPAVTATESVRRAPASHIKL

SEQ ID NO: 47125 - protein, 578 aa, Homo sapiens
  Payload ID: 9537
  Gene Symbol:
  Gene Name: LL0XNC01-16G2.1
  ENSP ID: ENSP00000488302
MLQDWCRRMGVNAERSLLILDIPDDCEEHEFQEAVRAALSPLGRYRVLIKVFRKELGARAALVEFAEGLNQSLIPRQIAGKGGPWKVISLPQALDAEFQDIPSFPAQPQGQAVARGAGEAGAAGEAGSVGEAGGVNEERSAGEDEAGGIGEAGGVGEAGAAGEAGAAGEAGAAGEAGGAGEAGGAGEAGGAGEEGGTGEEGGAGEAGGAGEEGGEDEAGAAGEAVGAGVVEAWTQSWRQTLRPLVKTMAYRELRPFSGREQPGCVEESFESWLEDAKDMLQLWCHASERERRRRLLDSLDGLALDIVSGLLEEDPDFSAQDCLTALGQVFRSRDTWMTSRMKFLTCTQGPQEGLFAFVVRLEGLLQKAVEKGAVHPAMANHLRLRQVLSRARPSEALQDTLRRMQLERRPPDFLRLLRLIRDMEAWAASLARSQQGVAWAAAPVESEDPAAAQASPAQGDASEADPGAEDADEAASTTKEAARVAPATGEDENAPAGLEGLGQGRSPDAPGGLPARMGSAVDMAPGGPSWEPEGLVQVGGQEAEEPPQEGLKPILEESENEDEDGAGEAGKPKSPPGK

SEQ ID NO: 47126 - protein, 130 aa, Homo sapiens
  Payload ID: 9538
  Gene Symbol:
  Gene Name: LLfos-48D6.2
  ENSP ID: ENSP00000481965
MVKSSLQRILNSHCFAREKEGDKPSATIHASRTMPLLSLHSRGGSSSERWPVSTAWCTWSPRPGAPKAKTTASSTTRSGPIFRTTSARHLSCSCATGRPPCSAPQPTSPPVASATRSRWWRGGTAPSMRK

SEQ ID NO: 47127 - protein, 129 aa, Homo sapiens
  Payload ID: 9539
  Gene Symbol: LLPH
  Gene Name: LLP homolog, long-term synaptic facilitation (Aplysia)
  Uniprot ID: Q9BRT6
  ENSP ID: ENSP00000266604
MAKSLRSKWKRKMRAEKRKKNAPKEASRLKSILKLDGDVLMKDVQEIATVVVPKPKHCQEKMQCEVKDEKDDMKMETDIKRNKKTLLDQHGQYPIWMNQRQRKRLKAKREKRKGKSKAKAVKVAKGLAW

SEQ ID NO: 47128 - protein, 129 aa, Homo sapiens; identical to SEQ ID NO: 47127
  Payload ID: 9539
  Gene Symbol: LLPH
  Gene Name: LLP homolog, long-term synaptic facilitation (Aplysia)
  Uniprot ID: Q9BRT6
  ENSP ID: ENSP00000437372

SEQ ID NO: 47129 - protein, 467 aa, Homo sapiens
  Payload ID: 9540
  Gene Symbol: LMBRD1
  Gene Name: LMBR1 domain containing 1
  Uniprot ID: Q9NUN5
  ENSP ID: ENSP00000359602
MKNQNGTFKDWANANVSRQIEDTVLYGYYTLYSVILFCVFFWIPFVYFYYEEKDDDDTSKCTQIKTALKYTLGFVVICALLLLVGAFVPLNVPNNKNSTEWEKVKSLFEELGSSHGLAALSFSISSLTLIGMLAAITYTAYGMSALPLNLIKGTRSAAYERLENTEDIEEVEQHIQTIKSKSKDGRPLPARDKRALKQFEERLRTLKKRERHLEFIENSWWTKFCGALRPLKIVWGIFFILVALLFVISLFLSNLDKALHSAGIDSGFIIFGANLSNPLNMLLPLLQTVFPLDYILITIIIMYFIFTSMAGIRNIGIWFFWIRLYKIRRGRTRPQALLFLCMILLLIVLHTSYMIYSLAPQYVMYGSQNYLIETNITSDNHKGNSTLSVPKRCDADAPEDQCTVTRTYLFLHKFWFFSAAYYFGNWAFLGVFLIGLIVSCCKGKKSVIEGVDEDSDISDDEPSVYSA

SEQ ID NO: 47130 - protein, 540 aa, Homo sapiens
  Payload ID: 9540
  Gene Symbol: LMBRD1
  Gene Name: LMBR1 domain containing 1
  Uniprot ID: Q9NUN5
  ENSP ID: ENSP00000359609
MATSGAASAELVIGWCIFGLLLLAILAFCWIYVRKYQSRRESEVVSTITAIFSLAIALITSALLPVDIFLVSYMKNQNGTFKDWANANVSRQIEDTVLYGYYTLYSVILFCVFFWIPFVYFYYEEKDDDDTSKCTQIKTALKYTLGFVVICALLLLVGAFVPLNVPNNKNSTEWEKVKSLFEELGSSHGLAALSFSISSLTLIGMLAAITYTAYGMSALPLNLIKGTRSAAYERLENTEDIEEVEQHIQTIKSKSKDGRPLPARDKRALKQFEERLRTLKKRERHLEFIENSWWTKFCGALRPLKIVWGIFFILVALLFVISLFLSNLDKALHSAGIDSGFIIFGANLSNPLNMLLPLLQTVFPLDYILITIIIMYFIFTSMAGIRNIGIWFFWIRLYKIRRGRTRPQALLFLCMILLLIVLHTSYMIYSLAPQYVMYGSQNYLIETNITSDNHKGNSTLSVPKRCDADAPEDQCTVTRTYLFLHKFWFFSAAYYFGNWAFLGVFLIGLIVSCCKGKKSVIEGVDEDSDISDDEPSVYSA

SEQ ID NO: 47131 - protein, 392 aa, Homo sapiens
  Payload ID: 9540
  Gene Symbol: LMBRD1
  Gene Name: LMBR1 domain containing 1
  Uniprot ID: Q9NUN5
  ENSP ID: ENSP00000433385
MATSGAASAELVIGWCIFGLLLLAILAFCWIYVRKYQSRRESEVVSTITAIFSLAIALITSALLPVDIFLVSYMKNQNGTFKDWANANVSRQIEDTVLYGYYTLYSVILFCVFFWIPFVYFYYEEKDDDDTSKCTQIKTALKYTLGFVVICALLLLVGAFVPLNVPNNKNSTEWEKVKSLFEELGSSHGLAALSFSISSLTLIGMLAAITYTAYGMSALPLNLIKGTRSAAYERLENTEDIEEVEQHIQTIKSKSKDGRPLPARDKRALKQFEERLRTLKKRERHLEFIENSWWTKFCGALRPLKIVWGIFFILVALLFVISLFLSNLDKALHSAGIDSGFIIFGANLSNPLNMLLPLLQTEFEILAYGSFGLDYIKSEEVEPGPKHSFFSA

SEQ ID NO: 47132 - protein, 695 aa, Homo sapiens
  Payload ID: 9541
  Gene Symbol: LMBRD2
  Gene Name: LMBR1 domain containing 2
  Uniprot ID: Q68DH5
  ENSP ID: ENSP00000296603
MSGAALGLEIVFVFFLALFLLHRYGDFKKQHRLVIIGTLLAWYLCFLIVFILPLDVSTTIYNRCKHAAANSSPPENSNITGLYATANPVPSQHPCFKPWSYIPDGIMPIFWRVVYWTSQFLTWILLPFMQSYARSGGFSITGKIKTALIENAIYYGTYLLIFGAFLIYVAVNPHLHLEWNQLQTIGIAAANTWGLFLLVLLLGYGLVEIPRSYWNGAKRGYLLMKTYFKAAKLMTEKADAEENLEDAMEEVRKVNESIKYNHPLRKCVDTILKKCPTEYQEKMGRNMDDYEDFDEKHSIYPSEKSLVKLHKQVIYSVQRHRRTQVQWQILLEQAFYLEDVAKNETSATHQFVHTFQSPEPENRFIQYFYNPTFEWYWECLLRPWFYKILAVVLSIFSVIVVWSECTFFSTTPVLSLFAVFIQLAEKTYNYIYIEIACFLSIFFLSICVYSTVFRIRVFNYYYLASHHQTDAYSLLFSGMLFCRLTPPLCLNFLGLTHMDSSISHKNTQPTAYTSIMGSMKVLSFIADGFYIYYPMLVVILCIATYFSLGTRCLNLLGFQQFMGDDDMTSDLVNEGKELIRKEKRKRQRQEEGENRRREWKERYGHNREDSTRNRNIHTDPKESNFSDVNTNRSAFKYTRANNRTERDRIELLQDAEPLDFNAETFTDDPLESESGRYQPGGRYLSMSRSDIFNDV

SEQ ID NO: 47133 - protein, 122 aa, Homo sapiens
  Payload ID: 9542
  Gene Symbol: LMO7DN
  Gene Name: LMO7 downstream neighbor
  Uniprot ID: F2Z398
  ENSP ID: ENSP00000317235
MTWLDKGVWTQEDENSCSFSESDFPGCRDQINPSIPSIWTAVSGMMISLEVRWWIKGKQGYVISLGHALSPRLECSGTFSAHCILGLPGGSSYPPASVSQVVGTTALYLVEEAWAEAGKMRS

SEQ ID NO: 47134 - protein, 959 aa, Homo sapiens
  Payload ID: 9543
  Gene Symbol: LONP1
  Gene Name: lon peptidase 1, mitochondrial
  Uniprot ID: P36776
  ENSP ID: ENSP00000353826
MAASTGYVRLWGAARCWVLRRPMLAAAGGRVPTAAGAWLLRGQRTCDASPPWALWGRGPAIGGQWRGFWEASSRGGGAFSGGEDASEGGAEEGAGGAGGSAGAGEGPVITALTPMTIPDVFPHLPLIAITRNPVFPRFIKIIEVKNKKLVELLRRKVRLAQPYVGVFLKRDDSNESDVVESLDEIYHTGTFAQIHEMQDLGDKLRMIVMGHRRVHISRQLEVEPEEPEAENKHKPRRKSKRGKKEAEDELSARHPAELAMEPTPELPAEVLMVEVENVVHEDFQVTEEVKALTAEIVKTIRDIIALNPLYRESVLQMMQAGQRVVDNPIYLSDMGAALTGAESHELQDVLEETNIPKRLYKALSLLKKEFELSKLQQRLGREVEEKIKQTHRKYLLQEQLKIIKKELGLEKDDKDAIEEKFRERLKELVVPKHVMDVVDEELSKLGLLDNHSSEFNVTRNYLDWLTSIPWGKYSNENLDLARAQAVLEEDHYGMEDVKKRILEFIAVSQLRGSTQGKILCFYGPPGVGKTSIARSIARALNREYFRFSVGGMTDVAEIKGHRRTYVGAMPGKIIQCLKKTKTENPLILIDEVDKIGRGYQGDPSSALLELLDPEQNANFLDHYLDVPVDLSKVLFICTANVTDTIPEPLRDRMEMINVSGYVAQEKLAIAERYLVPQARALCGLDESKAKLSSDVLTLLIKQYCRESGVRNLQKQVEKVLRKSAYKIVSGEAESVEVTPENLQDFVGKPVFTVERMYDVTPPGVVMGLAWTAMGGSTLFVETSLRRPQDKDAKGDKDGSLEVTGQLGEVMKESARIAYTFARAFLMQHAPANDYLVTSHIHLHVPEGATPKDGPSAGCTIVTALLSLAMGRPVRQNLAMTGEVSLTGKILPVGGIKEKTIAAKRAGVTCIVLPAENKKDFYDLAAFITEGLEVHFVEHYREIFDIAFPDEQAEALAVER

SEQ ID NO: 47135 - protein, 763 aa, Homo sapiens
  Payload ID: 9543
  Gene Symbol: LONP1
  Gene Name: lon peptidase 1, mitochondrial
  Uniprot ID: P36776
  ENSP ID: ENSP00000441523
MQDLGDKLRMIVMGHRRVHISRQLEVEPEEPEAENKHKPRRKSKRGKKEAEDELSARHPAELAMEPTPELPAEVLMVEVENVVHEDFQVTEEVKALTAEIVKTIRDIIALNPLYRESVLQMMQAGQRVVDNPIYLSDMGAALTGAESHELQDVLEETNIPKRLYKALSLLKKEFELSKLQQRLGREVEEKIKQTHRKYLLQEQLKIIKKELGLEKDDKDAIEEKFRERLKELVVPKHVMDVVDEELSKLGLLDNHSSEFNVTRNYLDWLTSIPWGKYSNENLDLARAQAVLEEDHYGMEDVKKRILEFIAVSQLRGSTQGKILCFYGPPGVGKTSIARSIARALNREYFRFSVGGMTDVAEIKGHRRTYVGAMPGKIIQCLKKTKTENPLILIDEVDKIGRGYQGDPSSALLELLDPEQNANFLDHYLDVPVDLSKVLFICTANVTDTIPEPLRDRMEMINVSGYVAQEKLAIAERYLVPQARALCGLDESKAKLSSDVLTLLIKQYCRESGVRNLQKQVEKVLRKSAYKIVSGEAESVEVTPENLQDFVGKPVFTVERMYDVTPPGVVMGLAWTAMGGSTLFVETSLRRPQDKDAKGDKDGSLEVTGQLGEVMKESARIAYTFARAFLMQHAPANDYLVTSHIHLHVPEGATPKDGPSAGCTIVTALLSLAMGRPVRQNLAMTGEVSLTGKILPVGGIKEKTIAAKRAGVTCIVLPAENKKDFYDLAAFITEGLEVHFVEHYREIFDIAFPDEQAEALAVER

SEQ ID NO: 47136 - protein, 829 aa, Homo sapiens
  Payload ID: 9543
  Gene Symbol: LONP1
  Gene Name: lon peptidase 1, mitochondrial
  ENSP ID: ENSP00000465139
MTIPDVFPHLPLIAITRNPVFPRFIKIIEVKNKKLVELLRRKVRLAQPYVGVFLKRDDSNESDVVESLDEIYHTGTFAQIHEMQDLGDKLRMIVMGHRRVHISRQLEVEPEEPEAENKHKPRRKSKRGKKEAEDELSARHPAELAMEPTPELPAEVLMVEALTAEIVKTIRDIIALNPLYRESVLQMMQAGQRVVDNPIYLSDMGAALTGAESHELQDVLEETNIPKRLYKALSLLKKEFELSKLQQRLGREVEEKIKQTHRKYLLQEQLKIIKKELGLEKDDKDAIEEKFRERLKELVVPKHVMDVVDEELSKLGLLDNHSSEFNVTRNYLDWLTSIPWGKYSNENLDLARAQAVLEEDHYGMEDVKKRILEFIAVSQLRGSTQGKILCFYGPPGVGKTSIARSIARALNREYFRFSVGGMTDVAEIKGHRRTYVGAMPGKIIQCLKKTKTENPLILIDEVDKIGRGYQGDPSSALLELLDPEQNANFLDHYLDVPVDLSKVLFICTANVTDTIPEPLRDRMEMINVSGYVAQEKLAIAERYLVPQARALCGLDESKAKLSSDVLTLLIKQYCRESGVRNLQKQVEKVLRKSAYKIVSGEAESVEVTPENLQDFVGKPVFTVERMYDVTPPGVVMGLAWTAMGGSTLFVETSLRRPQDKDAKGDKDGSLEVTGQLGEVMKESARIAYTFARAFLMQHAPANDYLVTSHIHLHVPEGATPKDGPSAGCTIVTALLSLAMGRPVRQNLAMTGEVSLTGKILPVGGIKEKTIAAKRAGVTCIVLPAENKKDFYDLAAFITEGLEVHFVEHYREIFDIAFPDEQAEALAVER

SEQ ID NO: 47137 - protein, 845 aa, Homo sapiens
  Payload ID: 9543
  Gene Symbol: LONP1
  Gene Name: lon peptidase 1, mitochondrial
  ENSP ID: ENSP00000465585
MTIPDVFPHLPLIAITRNPVFPRFIKIIEVKNKKLVELLRRKVRLAQPYVGVFLKRDDSNESDVVESLDEIYHTGTFAQIHEMQDLGDKLRMIVMGHRRVHISRQLEVEPEEPEAENKHKPRRKSKRGKKEAEDELSARHPAELAMEPTPELPAEVLMVEVENVVHEDFQVTEEVKALTAEIVKTIRDIIALNPLYRESVLQMMQAGQRVVDNPIYLSDMGAALTGAESHELQDVLEETNIPKRLYKALSLLKKEFELSKLQQRLGREVEEKIKQTHRKYLLQEQLKIIKKELGLEKDDKDAIEEKFRERLKELVVPKHVMDVVDEELSKLGLLDNHSSEFNVTRNYLDWLTSIPWGKYSNENLDLARAQAVLEEDHYGMEDVKKRILEFIAVSQLRGSTQGKILCFYGPPGVGKTSIARSIARALNREYFRFSVGGMTDVAEIKGHRRTYVGAMPGKIIQCLKKTKTENPLILIDEVDKIGRGYQGDPSSALLELLDPEQNANFLDHYLDVPVDLSKVLFICTANVTDTIPEPLRDRMEMINVSGYVAQEKLAIAERYLVPQARALCGLDESKAKLSSDVLTLLIKQYCRESGVRNLQKQVEKVLRKSAYKIVSGEAESVEVTPENLQDFVGKPVFTVERMYDVTPPGVVMGLAWTAMGGSTLFVETSLRRPQDKDAKGDKDGSLEVTGQLGEVMKESARIAYTFARAFLMQHAPANDYLVTSHIHLHVPEGATPKDGPSAGCTIVTALLSLAMGRPVRQNLAMTGEVSLTGKILPVGGIKEKTIAAKRAGVTCIVLPAENKKDFYDLAAFITEGLEVHFVEHYREIFDIAFPDEQAEALAVER

SEQ ID NO: 47138 - protein, 185 aa, Homo sapiens
  Payload ID: 9543
  Gene Symbol: LONP1
  Gene Name: lon peptidase 1, mitochondrial
  ENSP ID: ENSP00000467808
GGAEEGAGGAGGSAGAGEGPVITALTPMTIPDVFPHLPLIAITRNPVFPRFIKIIEVKNKKLVELLRRKVRLAQPYVGVFLKRDDSNESDVVESLDEIYHTGTFAQIHEMQDLGDKLRMIVMGHRREASAGSSSQPQRLIHTCLAPVSESISADSWRWSPRSRRRRTSTSPAGSQSGARRRRRTS

SEQ ID NO: 47139 - protein, 242 aa, Homo sapiens
  Payload ID: 9543
  Gene Symbol: LONP1
  Gene Name: lon peptidase 1, mitochondrial
  ENSP ID: ENSP00000468083
  MOD_RES (1)..(1): Any amino acid
XMMQAGQRVVDNPIYLSDMGAALTGAESHELQDVLEETNVEEKIKQTHRKYLLQEQLKIIKKELGLEKDDKDAIEEKFRERLKELVVPKHVMDVVDEELSKLGLLDNHSSEFNVTRNYLDWLTSIPWGKYSNENLDLARAQAVLEEDHYGMEDVKKRILEFIAVSQLRGSTQGKILCFYGPPGVGKTSIARSIARALNREYFRFSVGGMTDVAEIKGHRRTYVGAMPGKIIQCLKKTKTENP

SEQ ID NO: 47140 - protein, 210 aa, Homo sapiens
  Payload ID: 9543
  Gene Symbol: LONP1
  Gene Name: lon peptidase 1, mitochondrial
  ENSP ID: ENSP00000468114
MAASTGYVRLWGAARCWVLRRPMLAAAGGRVPTAAGAWLLRGQRTCDASPPWALWGRGPAIGGQWRGFWEASSRGGGAFSGGEDASEGGAEEGAGGAGGSAGAGEGPVITALTPMTIPDVFPHLPLIAITRNPVFPRFIKIIEVEEQLKIIKKELGLEKDDKDAIEEKFRERLKELVVPKHVMDVVDEELSKLGLLDNHSSEFNVTRNYL

SEQ ID NO: 47141 - protein, 264 aa, Homo sapiens
  Payload ID: 9543
  Gene Symbol: LONP1
  Gene Name: lon peptidase 1, mitochondrial
  ENSP ID: ENSP00000468379
RKSAYKIVSGEAESVEVTPENLQDFVGKPVFTVERMYDVTPPGVVMGLAWTAMGGSTLFVETSLRRPQDKDAKGDKDGSLEVTGQLGEVMKESARIAYTFARAFLMQHAPANDYLVTSHIHLHVPEGATPKDGPSAGCTIVTALLSLAMGRPVRQNLAMTGEVSLTGKILPVGGIKEKTIAAQAGLTLTLPPGQARRGDVHRPASREQEGLLRPGSLHHRGPGGALRGTLPGDLRHRLPGRAGRGAGRGTVTATPGLQAADVRP

SEQ ID NO: 47142 - protein, 86 aa, Homo sapiens
  Payload ID: 9543
  Gene Symbol: LONP1
  Gene Name: lon peptidase 1, mitochondrial
  ENSP ID: ENSP00000468385
MAASTGYVRLWGAARCWVLRRPMLAAAGGRVPTAAGAWLLRGQRTCDASPPWALWGRGPAIGGQWRGTSTSPAGSQSGARRRRRTS

SEQ ID NO: 47143 - protein, 895 aa, Homo sapiens
  Payload ID: 9543
  Gene Symbol: LONP1
  Gene Name: lon peptidase 1, mitochondrial
  Uniprot ID: P36776
  ENSP ID: ENSP00000468541
MAASTGYVRLWGAARCWVLRRPMLAAAGGRVPTAAGAWLLRGPVITALTPMTIPDVFPHLPLIAITRNPVFPRFIKIIEVKNKKLVELLRRKVRLAQPYVGVFLKRDDSNESDVVESLDEIYHTGTFAQIHEMQDLGDKLRMIVMGHRRVHISRQLEVEPEEPEAENKHKPRRKSKRGKKEAEDELSARHPAELAMEPTPELPAEVLMVEVENVVHEDFQVTEEVKALTAEIVKTIRDIIALNPLYRESVLQMMQAGQRVVDNPIYLSDMGAALTGAESHELQDVLEETNIPKRLYKALSLLKKEFELSKLQQRLGREVEEKIKQTHRKYLLQEQLKIIKKELGLEKDDKDAIEEKFRERLKELVVPKHVMDVVDEELSKLGLLDNHSSEFNVTRNYLDWLTSIPWGKYSNENLDLARAQAVLEEDHYGMEDVKKRILEFIAVSQLRGSTQGKILCFYGPPGVGKTSIARSIARALNREYFRFSVGGMTDVAEIKGHRRTYVGAMPGKIIQCLKKTKTENPLILIDEVDKIGRGYQGDPSSALLELLDPEQNANFLDHYLDVPVDLSKVLFICTANVTDTIPEPLRDRMEMINVSGYVAQEKLAIAERYLVPQARALCGLDESKAKLSSDVLTLLIKQYCRESGVRNLQKQVEKVLRKSAYKIVSGEAESVEVTPENLQDFVGKPVFTVERMYDVTPPGVVMGLAWTAMGGSTLFVETSLRRPQDKDAKGDKDGSLEVTGQLGEVMKESARIAYTFARAFLMQHAPANDYLVTSHIHLHVPEGATPKDGPSAGCTIVTALLSLAMGRPVRQNLAMTGEVSLTGKILPVGGIKEKTIAAKRAGVTCIVLPAENKKDFYDLAAFITEGLEVHFVEHYREIFDIAFPDEQAEALAVER

SEQ ID NO: 47144 - protein, 852 aa, Homo sapiens
  Payload ID: 9544
  Gene Symbol: LONP2
  Gene Name: lon peptidase 2, peroxisomal
  Uniprot ID: Q86WA8
  ENSP ID: ENSP00000285737
MSSVSPIQIPSRLPLLLTHEGVLLPGSTMRTSVDSARNLQLVRSRLLKGTSLQSTILGVIPNTPDPASDAQDLPPLHRIGTAALAVQVVGSNWPKPHYTLLITGLCRFQIVQVLKEKPYPIAEVEQLDRLEEFPNTCKMREELGELSEQFYKYAVQLVEMLDMSVPAVAKLRRLLDSLPREALPDILTSIIRTSNKEKLQILDAVSLEERFKMTIPLLVRQIEGLKLLQKTRKPKQDDDKRVIAIRPIRRITHISGTLEDEDEDEDNDDIVMLEKKIRTSSMPEQAHKVCVKEIKRLKKMPQSMPEYALTRNYLELMVELPWNKSTTDRLDIRAARILLDNDHYAMEKLKKRVLEYLAVRQLKNNLKGPILCFVGPPGVGKTSVGRSVAKTLGREFHRIALGGVCDQSDIRGHRRTYVGSMPGRIINGLKTVGVNNPVFLLDEVDKLGKSLQGDPAAALLEVLDPEQNHNFTDHYLNVAFDLSQVLFIATANTTATIPAALLDRMEIIQVPGYTQEEKIEIAHRHLIPKQLEQHGLTPQQIQIPQVTTLDIITRYTREAGVRSLDRKLGAICRAVAVKVAEGQHKEAKLDRSDVTEREGCREHILEDEKPESISDTTDLALPPEMPILIDFHALKDILGPPMYEMEVSQRLSQPGVAIGLAWTPLGGEIMFVEASRMDGEGQLTLTGQLGDVMKESAHLAISWLRSNAKKYQLTNAFGSFDLLDNTDIHLHFPAGAVTKDGPSAGVTIVTCLASLFSGRLVRSDVAMTGEITLRGLVLPVGGIKDKVLAAHRAGLKQVIIPRRNEKDLEGIPGNVRQDLSFVTASCLDEVLNAAFDGGFTVKTRPGLLNSKL

SEQ ID NO: 47145 - protein, 605 aa, Homo sapiens
  Payload ID: 9544
  Gene Symbol: LONP2
  Gene Name: lon peptidase 2, peroxisomal
  ENSP ID: ENSP00000415983
MSSVSPIQIPSRLPLLLTHEGVLLPGSTMRTSVDSARNLQLVRSRLLKGTSLQSTILGVIPNTPDPASDAQDLPPLHRIGTAALAVQVVGSNWPKPHYTLLITGLCRFQIVQVLKEKPYPIAEVEQLDRLEEFPNTCKMREELGELSEQFYKYAVQILDAVSLEERFKMTIPLLVRQIEGLKLLQKTRKPKQDDDKRVIAIRPIRRITHISGTLEDEDEDEDNDDIVMLEKKIRTSSMPEQAHKVCVKEIKRLKKMPQSMPEYALTRNYLELMVELPWNKSTTDRLDIRAARILLDNDHYAMEKLKKRVLEYLAVRQLKNNLKGPILCFVGPPGVGKTSVGRSVAKTLGREFHRIALGGVCDQSDIRGHRRTYVGSMPGRIINGLKTVGVNNPVFLLDEVDKLGKSLQGDPAAALLEVLDPEQNHNFTDHYLNVAFDLSQVLFIATANTTATIPAALLDRMEIIQVPGYTQEEKIEIAHRHLIPKQLEQHGLTPQQIQIPQVTTLDIITRYTREAGVRSLDRKLGAICRAVAVKVAEGQHKEAKLDRSDVTEREGCREHILEDEKPESISDTTDLALPPEMPILIDFHALKDILGPPMYEMEIAS

SEQ ID NO: 47146 - protein, 808 aa, Homo sapiens
  Payload ID: 9544
  Gene Symbol: LONP2
  Gene Name: lon peptidase 2, peroxisomal
  Uniprot ID: Q86WA8
  ENSP ID: ENSP00000445426
MSSVSPIQIPSRLPLLLTHEGVLLPGSTMRTSVDSARNLQLVRSRLLKGTSLQSTILGVIPNTPDPASDAQDLPPLHRIGTAALAVQVVGSNWPKPHYTLLITGLCRFQIVQVLKEKPYPIAEVEQLDRLEEFPNTCKMREELGELSEQFYKYAVQILDAVSLEERFKMTIPLLVRQIEGLKLLQKTRKPKQDDDKRVIAIRPIRRITHISGTLEDEDEDEDNDDIVMLEKKIRTSSMPEQAHKVCVKEIKRLKKMPQSMPEYALTRNYLELMVELPWNKSTTDRLDIRAARILLDNDHYAMEKLKKRVLEYLAVRQLKNNLKGPILCFVGPPGVGKTSVGRSVAKTLGREFHRIALGGVCDQSDIRGHRRTYVGSMPGRIINGLKTVGVNNPVFLLDEVDKLGKSLQGDPAAALLEVLDPEQNHNFTDHYLNVAFDLSQVLFIATANTTATIPAALLDRMEIIQVPGYTQEEKIEIAHRHLIPKQLEQHGLTPQQIQIPQVTTLDIITRYTREAGVRSLDRKLGAICRAVAVKVAEGQHKEAKLDRSDVTEREGCREHILEDEKPESISDTTDLALPPEMPILIDFHALKDILGPPMYEMEVSQRLSQPGVAIGLAWTPLGGEIMFVEASRMDGEGQLTLTGQLGDVMKESAHLAISWLRSNAKKYQLTNAFGSFDLLDNTDIHLHFPAGAVTKDGPSAGVTIVTCLASLFSGRLVRSDVAMTGEITLRGLVLPVGGIKDKVLAAHRAGLKQVIIPRRNEKDLEGIPGNVRQDLSFVTASCLDEVLNAAFDGGFTVKTRPGLLNSKL

SEQ ID NO: 47147 - protein, 236 aa, Homo sapiens
  Payload ID: 9544
  Gene Symbol: LONP2
  Gene Name: lon peptidase 2, peroxisomal
  ENSP ID: ENSP00000455297
  MOD_RES (1)..(1): Any amino acid
XHALKDILGPPMYEMEVSQRLSQPGVAIGLAWTPLGGEIMFVEASRMDGEGQLTLTGQLGDVMKESAHLAISWLRSNAKKYQLTNAFGSFDLLDNTDIHLHFPAGAVTKDGPSAGVTIVTCLASLFSGRLVRSDVAMTGEITLRGLVLPVGGIKDKVLAAHRAGLKQVIIPRRNEKDLEGIPGNIEESLPKSIVAYDHLAQVGKQNFQLACVFLSAVRLRRTAGDHRIFPVSLRLT

SEQ ID NO: 47148 - protein, 169 aa, Homo sapiens
  Payload ID: 9544
  Gene Symbol: LONP2
  Gene Name: lon peptidase 2, peroxisomal
  ENSP ID: ENSP00000455633
RLKKMPQSMPEYALTRNYLELMVELPWNKSTTDRLDIRAARILLDNDHYAMEKLKKRVLEYLAVRQLKNNLKGPILCFVGPPGVGKTSVGRSVAKTLGREFHRIALGGVCDQSDIRGHRRTYVGSMPGRIINGLKTVGVNNPVFLLDEVDKLGKSLQGDPAAALLEFFL

SEQ ID NO: 47149 - protein, 300 aa, Homo sapiens
  Payload ID: 9544
  Gene Symbol: LONP2
  Gene Name: lon peptidase 2, peroxisomal
  ENSP ID: ENSP00000457841
MSSVSPIQIPSRLPLLLTHEGVLLPGSTMRTSVDSARNLQLVRSRLLKGTSLQSTILGVIPNTPDPASDAQDLPPLHRIGTAALAVQVVGSNWPKPHYTLLITGLCRFQIVQVLKEKPYPIAEVEQLDRLEEFPNTCKMREELGELSEQFYKYAVQLVEMLDMSVPAVAKLRRLLDSLPREALPDILTSIIRTSNKEKLQILDAVSLEERFKMTIPLLVRQIEGLKLLQKTRKPKQDDDKRVIAIRPIRRITHISGTLEDEDEDEDNDDIVMLEKKIRTSSMPEQAHKVCVKEIKRPPGH

SEQ ID NO: 47150 - protein, 773 aa, Homo sapiens
  Payload ID: 9545
  Gene Symbol: LONRF1
  Gene Name: LON peptidase N-terminal domain and ring finger 1
  Uniprot ID: Q17RB8
  ENSP ID: ENSP00000381298
MSSPAVARTSPGGSREMAPAPQGRGRFWEVGGGSGHRLERAAAESERWELLLRRGELLALGGHLKGALEAFAAALRRGAPARPECLGALVDCLVFNYRLRHGLGWSAAPVAGADGGAGGLLRCLGCRGFLSEPVTVPCGHSYCRRCLRRELRARCRLCRDRLPPATASATDAEGTAPRPPPLAAAIAASDFRTSVVLNHLAEKWFPGQRERARAAGRLGELLHQGRYREALAAACEALRAEPSDLIVKIYRAESYAGLQEFKAAIEDLNAVLFQLPDWPEVYFRKGKVLCDAGFLGDALQLFLQCLALDEDFAPAKLQVQKILCDLLLPENLKEGLKESSWSSLPCTKNRPFDFHSVMEESQSLNEPSPKQSEEIPEVTSEPVKGSLNRAQSAQSINSTEMPAREDCLKRVSSEPVLSVQEKGVLLKRKLSLLEQDVIVNEDGRNKLKKQGETPNEVCMFSLAYGDIPEELIDVSDFECSLCMRLFFEPVTTPCGHSFCKNCLERCLDHAPYCPLCKESLKEYLADRRYCVTQLLEELIVKYLPDELSERKKIYDEETAELSHLTKNVPIFVCTMAYPTVPCPLHVFEPRYRLMIRRSIQTGTKQFGMCVSDTQNSFADYGCMLQIRNVHFLPDGRSVVDTVGGKRFRVLKRGMKDGYCTADIEYLEDVKVENEDEIKNLRELHDLVYSQACSWFQNLRDRFRSQILQHFGSMPEREENLQAAPNGPAWCWWLLAVLPVDPRYQLSVLSMKSLKERLTKIQHILTYFSRDQSK

SEQ ID NO: 47151 - protein, 416 aa, Homo sapiens
  Payload ID: 9545
  Gene Symbol: LONRF1
  Gene Name: LON peptidase N-terminal domain and ring finger 1
  ENSP ID: ENSP00000432130
MEESQSLNEPSPKQSEEIPEVTSEPVKGSLNRAQSAQSINSTEMPAREDCLKRVSSEPVLSVQEKGVLLKRKLSLLEQDVIVNEDGRNKLKKQGETPNEVCMFSLAYGDIPEELIDVSDFECSLCMRLFFEPVTTPCGHSFCKNCLERCLDHAPYCPLCKESLKEYLADRRYCVTQLLEELIVKYLPDELSERKKIYDEETAELSHLTKNVPIFVCTMAYPTVPCPLHVFEPRYRLMIRRSIQTGTKQFGMCVSDTQNSFADYGCMLQIRNVHFLPDGRSVVDTVGGKRFRVLKRGMKDGYCTADIEYLEDVKVENEDEIKNLRELHDLVYSQACSWFQNLRDRFRSQILQHFGSMPEREENLQAAPNGPAWCWWLLAVLPVDPRYQLSVLSMKSLKERLTKIQHILTYFSRDQSK

SEQ ID NO: 47152 - protein, 376 aa, Homo sapiens
  Payload ID: 9545
  Gene Symbol: LONRF1
  Gene Name: LON peptidase N-terminal domain and ring finger 1
  ENSP ID: ENSP00000433327
LNRAQSAQSINSTEMPAREDCLKRVSSEPVLSVQEKGVLLKRKLSLLEQDVIVNEDGRNKLKKQGAYGDIPEELIDVSDFECSLCMRLFFEPVTTPCGHSFCKNCLERCLDHAPYCPLCKESLKEYLADRRYCVTQLLEELIVKYLPDELSERKKIYDEETAELSHLTKNVPIFVCTMAYPTVPCPLHVFEPRYRLMIRRSIQTGTKQFGMCVSDTQNSFADYGCMLQIRNVHFLPDGRSVVDTVGGKRFRVLKRGMKDGYCTADIEYLEDVKVENEDEIKNLRELHDLVYSQACSWFQNLRDRFRSQILQHFGSMPEREENLQAAPNGPAWCWWLLAVLPVDPRYQLSVLSMKSLKERLTKIQHILTYFSRDQSK

SEQ ID NO: 47153 - protein, 59 aa, Homo sapiens
  Payload ID: 9545
  Gene Symbol: LONRF1
  Gene Name: LON peptidase N-terminal domain and ring finger 1
  ENSP ID: ENSP00000434090
MEESQSLNEPSPKQLDEPTDAEPVDTEGQLCWQKSFTCHSVGIKVKKYQRSLQSLSKEA

SEQ ID NO: 47154 - protein, 199 aa, Homo sapiens
  Payload ID: 9545
  Gene Symbol: LONRF1
  Gene Name: LON peptidase N-terminal domain and ring finger 1
  ENSP ID: ENSP00000436770
MAYPTVPCPLHVFEPRYRLMIRRSIQTGTKQFGMCVSDTQNSFADYGCMLQIRNVHFLPDGRSVVDTVGGKRFRVLKRGMKDGYCTADIEYLEDVKVENEDEIKNLRELHDLVYSQACSWFQNLRDRFRSQILQHFGSMPEREENLQAAPNGPAWCWWLLAVLPVDPRYQLSVLSMKSLKERLTKIQHILTYFSRDQSK

SEQ ID NO: 47155 - protein, 59 aa, Homo sapiens; identical to SEQ ID NO: 47153
  Payload ID: 9545
  Gene Symbol: LONRF1
  Gene Name: LON peptidase N-terminal domain and ring finger 1
  ENSP ID: ENSP00000451692

SEQ ID NO: 47156 - protein, 754 aa, Homo sapiens
  Payload ID: 9546
  Gene Symbol: LONRF2
  Gene Name: LON peptidase N-terminal domain and ring finger 2
  Uniprot ID: Q1L5Z9
  ENSP ID: ENSP00000377086
MSPEPVPPPPPPQCPGCDRAEPIAQRLEEGDEAFRAGDYEMAAELFRSMLAGLAQPDRGLCLRLGDALARAGRLPEALGAFRGAARLGALRPEELEELAGGLVRAVGLRDRPLSAENPGGEPEAPGEGGPAPEPRAPRDLLGCPRCRRLLHKPVTLPCGLTVCKRCVEPGPARPQVRRVNVVLSGLLEKCFPAECRLRRLAGQARSLQRQQQPEAALLRCDQALELAPDDNSLLLLRAELYLTMKNYEQALQDASAACQNEPLLIKGHQVKAQALSGLGRSKEVLKEFLYCLALNPECNSVKKEAQKVMCEVLFSATANVHENLTSSIQSRLKAQGHSHMNAQALLEEGDAGSSENSSEKSDMLGNTNSSVLYFILGLHFEEDKKALESILPTAPSAGLKRQFPDDVEDAPDLNAPGKIPKKDLSLQRSPNSETEESQGLSLDVTDFECALCMRLLFEPVTTPCGHTFCLKCLERCLDHAPHCPLCKDKLSELLASRNFNITVLAEELIFRYLPDELSDRKRIYDEEMSELSNLTRDVPIFVCAMAFPTVPCPLHVFEPRYRLMIRRCMETGTKRFGMCLSAEHAGLSEYGCMLEIKDVRTFPDGSSVVDAIGISRFRVLSHRHRDGYNTADIEYLEDEKVEGPEYEELAALHDSVHQQSVSWFASLQDRMKEQILSHFGVMPDREPEPQSNPSGPAWSWWILAVLPLERKAQLAILGMTSLKERLLAIRRILVIITRKMNSRQELANARERNN

SEQ ID NO: 47157 - protein, 511 aa, Homo sapiens
  Payload ID: 9546
  Gene Symbol: LONRF2
  Gene Name: LON peptidase N-terminal domain and ring finger 2
  Uniprot ID: Q1L5Z9
  ENSP ID: ENSP00000386823
MKNYEQALQDASAACQNEPLLIKGHQVKAQALSGLGRSKEVLKEFLYCLALNPECNSVKKEAQKVMCEVLFSATANVHENLTSSIQSRLKAQGHSHMNAQALLEEGDAGSSENSSEKSDMLGNTNSSVLYFILGLHFEEDKKALESILPTAPSAGLKRQFPDDVEDAPDLNAPGKIPKKDLSLQRSPNSETEESQGLSLDVTDFECALCMRLLFEPVTTPCGHTFCLKCLERCLDHAPHCPLCKDKLSELLASRNFNITVLAEELIFRYLPDELSDRKRIYDEEMSELSNLTRDVPIFVCAMAFPTVPCPLHVFEPRYRLMIRRCMETGTKRFGMCLSAEHAGLSEYGCMLEIKDVRTFPDGSSVVDAIGISRFRVLSHRHRDGYNTADIEYLEDEKVEGPEYEELAALHDSVHQQSVSWFASLQDRMKEQILSHFGVMPDREPEPQSNPSGPAWSWWILAVLPLERKAQLAILGMTSLKERLLAIRRILVIITRKMNSRQELANARERNN

SEQ ID NO: 47158 - protein, 718 aa, Homo sapiens
  Payload ID: 9547
  Gene Symbol: LONRF3
  Gene Name: LON peptidase N-terminal domain and ring finger 3
  Uniprot ID: Q496Y0
  ENSP ID: ENSP00000307732
MESVRIEQMLSLPAEVSSDNLESAERGASAAQVDMGPHPKVAAEGPAPLPTREPEQEQSPGTSTPESKVLLTQADALASRGRIREALEVYRQLSERQQLVAEQLEQLVRCLAEKVPQGEALAPAPPDEGSTASGTVAAEETGAAAAAAATEVWDGFKCRKCHGFLSDPVSLSCGHTFCKLCLERGRAADRRCALCGVKLSALMVATGRARGARRAGQQPPPPLRVNVVLSGLLGKLFPGPARASQLRHEGNRLYRERQVEAALLKYNEAVKLAPNDHLLYSNRSQIYFTLESHENALHDAEIACKLRPMGFKDNLELPHCSSQEEAAARGDGSSLMDPAKVKGDGQQHHMKDQEEEEEKWDATSPKAASSKTGKCQEKKRKHCQIESQEETGMPNKASKQDPPTDQGDKPALSLPLASFDASDLECALCMRLFYEPVTTPCGHTFCLKCLERCLDHNAKCPLCKDGLSQCLASRKYSKNVIMEELIAKFLPEELKERRKLYEEEMEELSNLNKNVPIFVCTMAYPTVPCPLHIFEPCYRLMIRRCIETGTRQFGMCLGDPVKGFAEYGCILEIRNVQFFADGRSVVDSIGKRRFRVLHQSQRDGYNTADIEYIEDQKVQGEDCAELMGLHNCVYQQASLWFHSLKLSLKNRILNHFGPMPEKDADPQMNPNGPAWCWWMLAVLPLESRAQLPFLAMRSLKDRLNGIRRVLAFISRNQN

SEQ ID NO: 47159 - protein, 759 aa, Homo sapiens
  Payload ID: 9547
  Gene Symbol: LONRF3
  Gene Name: LON peptidase N-terminal domain and ring finger 3
  Uniprot ID: Q496Y0
  ENSP ID: ENSP00000360690
MESVRIEQMLSLPAEVSSDNLESAERGASAAQVDMGPHPKVAAEGPAPLPTREPEQEQSPGTSTPESKVLLTQADALASRGRIREALEVYRQLSERQQLVAEQLEQLVRCLAEKVPQGEALAPAPPDEGSTASGTVAAEETGAAAAAAATEVWDGFKCRKCHGFLSDPVSLSCGHTFCKLCLERGRAADRRCALCGVKLSALMVATGRARGARRAGQQPPPPLRVNVVLSGLLGKLFPGPARASQLRHEGNRLYRERQVEAALLKYNEAVKLAPNDHLLYSNRSQIYFTLESHENALHDAEIACKLRPMGFKAHFRKAQALATLGKVEEALREFLYCVSLDGKNKRARCEAQRDNLELPHCSSQEEAAARGDGSSLMDPAKVKGDGQQHHMKDQEEEEEKWDATSPKAASSKTGKCQEKKRKHCQIESQEETGMPNKASKQDPPTDQGDKPALSLPLASFDASDLECALCMRLFYEPVTTPCGHTFCLKCLERCLDHNAKCPLCKDGLSQCLASRKYSKNVIMEELIAKFLPEELKERRKLYEEEMEELSNLNKNVPIFVCTMAYPTVPCPLHIFEPCYRLMIRRCIETGTRQFGMCLGDPVKGFAEYGCILEIRNVQFFADGRSVVDSIGKRRFRVLHQSQRDGYNTADIEYIEDQKVQGEDCAELMGLHNCVYQQASLWFHSLKLSLKNRILNHFGPMPEKDADPQMNPNGPAWCWWMLAVLPLESRAQLPFLAMRSLKDRLNGIRRVLAFISRNQN

SEQ ID NO: 47160 - protein, 503 aa, Homo sapiens
  Payload ID: 9547
  Gene Symbol: LONRF3
  Gene Name: LON peptidase N-terminal domain and ring finger 3
  ENSP ID: ENSP00000408894
MGFKAHFRKAQALATLGKVEEALREFLYCVSLDGKNKRARCEAQRLLLSFFSPSVPGDSQEHSPDILKLLAPHPRLKENVESMTTEVTSHNLPRLLQDNLELPHCSSQEEAAARGDGSSLMDPAKVKGDGQQHHMKDQEEEEEKWDATSPKAASSKTGKCQEKKRKHCQIESQEETGMPNKASKQDPPTDQGDKPALSLPLASFDASDLECALCMRLFYEPVTTPCGHTFCLKCLERCLDHNAKCPLCKDGLSQCLASRKYSKNVIMEELIAKFLPEELKERRKLYEEEMEELSNLNKNVPIFVCTMAYPTVPCPLHIFEPCYRLMIRRCIETGTRQFGMCLGDPVKGFAEYGCILEIRNVQFFADGRSVVDSIGKRRFRVLHQSQRDGYNTADIEYIEDQKVQGEDCAELMGLHNCVYQQASLWFHSLKLSLKNRILNHFGPMPEKDADPQMNPNGPAWCWWMLAVLPLESRAQLPFLAMRSLKDRLNGIRRVLAFISRNQN

SEQ ID NO: 47161 - protein, 525 aa, Homo sapiens
  Payload ID: 9547
  Gene Symbol: LONRF3
  Gene Name: LON peptidase N-terminal domain and ring finger 3
  ENSP ID: ENSP00000414519
  MOD_RES (1)..(1): Any amino acid
XCGVKLSALMVATGRARGARRAGQQPPPPLRVNVVLSGLLGKLFPGPARASQLRHEGNRLYRERQVEAALLKYNEAVKLAPNDHLLYSNRSQIYFTLESHENALHDAEIACKLRPMGFKDNLELPHCSSQEEAAARGDGSSLMDPAKVKGDGQQHHMKDQEEEEEKWDATSPKAASSKTGKCQEKKRKHCQIESQEETGMPNKASKQDPPTDQGDKPALSLPLASFDASDLECALCMRLFYEPVTTPCGHTFCLKCLERCLDHNAKCPLCKDGLSQCLASRKYSKNVIMEELIAKFLPEELKERRKLYEEEMEELSNLNKNVPIFVCTMAYPTVPCPLHIFEPCYRLMIRRCIETGTRQFGMCLGDPVKGFAEYGCILEIRNVQFFADGRSVVDSIGKRRFRVLHQSQRDGYNTADIEYIEDQKVQGEDCAELMGLHNCVYQQASLWFHSLKLSLKNRILNHFGPMPEKDADPQMNPNGPAWCWWMLAVLPLESRAQLPFLAMRSLKDRLNGIRRVLAFISRNQN

SEQ ID NO: 47162 - protein, 610 aa, Homo sapiens
  Payload ID: 9547
  Gene Symbol: LONRF3
  Gene Name: LON peptidase N-terminal domain and ring finger 3
  Uniprot ID: Q496Y0
  ENSP ID: ENSP00000435426
MESVRIEQMLSLPAEVSSDNLESAERGASAAQVDMGPHPKVAAEGPAPLPTREPEQEQSPGTSTPESKVLLTQADALASRGRIREALEVYRQLSERQQLVAEQLEQLVRCLAEKVPQGEALAPAPPDEGSTASGTVAAEETGAAAAAAATEVWDGFKCRKCHGFLSDPVSLSCGHTFCKLCLERGRAADRRCALCGVKLSALMVATGRARGARRAGQQPPPPLRVNVVLSGLLGKLFPGPARASQLRHEGNRLYRERQVEAALLKYNEAVKLAPNDHLLYSNRSQIYFTLESHENALHDAEIACKLRPMGFKAHFRKAQALATLGKVEEALREFLYCVSLDGKNKRARCEAQRDNLELPHCSSQEEAAARGDGSSLMDPAKVKGDGQQHHMKDQEEEEEKWDATSPKAASSKTGKCQEKKRKHCQIESQEETGMPNKASKQDPPTDQGDKPALSLPLASFDASDLECALCMRLFYEPVTTPCGHTFCLKCLERCLDHNAKCPLCKDGLSQCLASRKYSKNVIMEELIAKFLPEELKERRKLYEEEMEELSNLNKNVPIFVCTMAYPTVPCPLHIFEPCYRLMIRRCIETGTRQFGMCLGDPVKGHCLLCN

SEQ ID NO: 47163 - protein, 56 aa, Homo sapiens
  Payload ID: 9548
  Gene Symbol: LINC00116
  Gene Name: long intergenic non-protein coding RNA 116
  Uniprot ID: Q8NCU8
  ENSP ID: ENSP00000485064
MADVSERTLQLSVLVAFASGVLLGWQANRLRRRYLDWRKRRLQDKLAATQKKLDLA

SEQ ID NO: 47164 - protein, 138 aa, Homo sapiens
  Payload ID: 9548
  Gene Symbol: LINC00116
  Gene Name: long intergenic non-protein coding RNA 116
  Uniprot ID: Q8NCU8
  ENSP ID: ENSP00000485216
MLANDVRHQQEMWGFRKVEGGVVQSLGKSSVEGETDGTISEFREIQRLAAFASFLSHAPPLNARRLLTPPPRRRPRCTPAAAMADVSERTLQLSVLVAFASGVLLGWQANRLRRRYLDWRKRRLQDKLAATQKKLDLA

SEQ ID NO: 47165 - protein, 56 aa, Homo sapiens; identical to SEQ ID NO: 47163
  Payload ID: 9548
  Gene Symbol: LINC00116
  Gene Name: long intergenic non-protein coding RNA 116
  Uniprot ID: Q8NCU8
  ENSP ID: ENSP00000485373

SEQ ID NO: 47166 - protein, 40 aa, Homo sapiens
  Payload ID: 9549
  Gene Symbol: LINC01420
  Gene Name: long intergenic non-protein coding RNA 1420
  ENSP ID: ENSP00000489367
  MOD_RES (1)..(1): Any amino acid
XSGRSTLPPGNAREAKPPKKRCLLAPRWDYPEGTPNGVFE

SEQ ID NO: 47167 - protein, 68 aa, Homo sapiens
  Payload ID: 9549
  Gene Symbol: LINC01420
  Gene Name: long intergenic non-protein coding RNA 1420
  ENSP ID: ENSP00000489486
MGDQPCASGRSTLPPGNAREAKPPKKRCLLAPRWDYPEGTPNGGSTTLPSAPPPASAGLKSHPPPPEK

SEQ ID NO: 47168 - protein, 68 aa, Homo sapiens; identical to SEQ ID NO: 47167
  Payload ID: 9549
  Gene Symbol: LINC01420
  Gene Name: long intergenic non-protein coding RNA 1420
  ENSP ID: ENSP00000489583

SEQ ID NO: 47169 - protein, 62 aa, Homo sapiens
  Payload ID: 9550
  Gene Symbol: LINC01556
  Gene Name: long intergenic non-protein coding RNA 1556
  Uniprot ID: Q5JQF7
  ENSP ID: ENSP00000373152
MLQVVQEGNPAPFIINTVKRGRRDRERQRTPWAPHPLGFQGRRYIYESPNHRGKDSSFLAQK

SEQ ID NO: 47170 - protein, 62 aa, Homo sapiens
  Payload ID: 9550
  Gene Symbol: LINC01556
  Gene Name: long intergenic non-protein coding RNA 1556
  Uniprot ID: Q5JQF7
  ENSP ID: ENSP00000394134
MLQVVQEGNPAPFIINTVKRGRRDRERQRTPWAPHPLGFQERRYIYESPNHRGKDSSFLAQK

SEQ ID NO: 47171 - protein, 62 aa, Homo sapiens; identical to SEQ ID NO: 47170
  Payload ID: 9550
  Gene Symbol: LINC01556
  Gene Name: long intergenic non-protein coding RNA 1556
  Uniprot ID: Q5JQF7
  ENSP ID: ENSP00000396675

SEQ ID NO: 47172 - protein, 62 aa, Homo sapiens; identical to SEQ ID NO: 47170
  Payload ID: 9550
  Gene Symbol: LINC01556
  Gene Name: long intergenic non-protein coding RNA 1556
  Uniprot ID: Q5JQF7
  ENSP ID: ENSP00000401725

SEQ ID NO: 47173 - protein, 62 aa, Homo sapiens; identical to SEQ ID NO: 47169
  Payload ID: 9550
  Gene Symbol: LINC01556
  Gene Name: long intergenic non-protein coding RNA 1556
  Uniprot ID: Q5JQF7
  ENSP ID: ENSP00000410635

SEQ ID NO: 47174 - protein, 170 aa, Homo sapiens
  Payload ID: 9551
  Gene Symbol: LINC01620
  Gene Name: long intergenic non-protein coding RNA 1620
  Uniprot ID: Q4KN68
  ENSP ID: ENSP00000362001
MAYYFHFYGELPSQESPHPGVYSPHPQGGWQPTADSYREWHNEDLNPRMSHWTYAQELVSYKKTSFIVWRHRISPNGVTSRKPYCHFHGGQWPGPTPPSCLSSAFASGSFSHFEDSPYILLHVVLQMCWLRAQRLNQRDLGLNPTSAIEHQLSDLDCVPLLLWASDSPSE

SEQ ID NO: 47175 - protein, 95 aa, Homo sapiens
  Payload ID: 9552
  Gene Symbol: LINC00493
  Gene Name: long intergenic non-protein coding RNA 493
  ENSP ID: ENSP00000485316
MYRNEFTAWYRRMSVVYGIGTWSVLGSLLYYSRTMAKSSVDQKDGSASEVPSELSERPKGFYVETVVTYKEDFVPNTEKILNYWKSWTGGPGTEP

SEQ ID NO: 47176 - protein, 94 aa, Homo sapiens
  Payload ID: 9552
  Gene Symbol: LINC00493
  Gene Name: long intergenic non-protein coding RNA 493
  ENSP ID: ENSP00000485491
MYRNEFTAWYRRMSVVYGIGTWSVLGSLLYYSRTMAKSSDQKDGSASEVPSELSERPKGFYVETVVTYKEDFVPNTEKILNYWKSWTGGPGTEP

SEQ ID NO: 47177 - protein, 73 aa, Homo sapiens
  Payload ID: 9552
  Gene Symbol: LINC00493
  Gene Name: long intergenic non-protein coding RNA 493
  ENSP ID: ENSP00000485501
MYRNEFTAWYRRMSVVYGIGTWSVLGSLLYYSRTMAKSSGLTLSPRLECSGMISAHHNLRLRAQVILLPQPPE

SEQ ID NO: 47178 - protein, 101 aa, Homo sapiens
  Payload ID: 9553
  Gene Symbol: LINC00694
  Gene Name: long intergenic non-protein coding RNA 694
  Uniprot ID: P0DN24
  ENSP ID: ENSP00000489112
MSRGQFGQGQEPLDMFFWVNEISGEITYPPQKADAPAVSPESPQKKPPFQPRSVQEAPCSPQGPPAQRPALAPPSKPSLKDSGSRNPCPSAPTWARPKPEE

SEQ ID NO: 47179 - protein, 101 aa, Homo sapiens; identical to SEQ ID NO: 47178
  Payload ID: 9553
  Gene Symbol: LINC00694
  Gene Name: long intergenic non-protein coding RNA 694
  Uniprot ID: P0DN24
  ENSP ID: ENSP00000489511

SEQ ID NO: 47180 - protein, 667 aa, Homo sapiens
  Payload ID: 9554
  Gene Symbol:
  Gene Name: Long-chain-fatty-acid--CoA ligase 6 [Source:UniProtKB/Swiss-Prot
  Acc:Q9UKU0]
  Uniprot ID: Q9UKU0
  ENSP ID: ENSP00000415140
MQTQEILRILRLPELGDLGQFFRSLSATTLVSMGALAAILAYWFTHRPKALQPPCNLLMQSEEVEDSGGARRSVIGSGPQLLTHYYDDARTMYQVFRRGLSISGNGPCLGFRKPKQPYQWLSYQEVADRAEFLGSGLLQHNCKACTDQFIGVFAQNRPEWIIVELACYTYSMVVVPLYDTLGPGAIRYIINTADISTVIVDKPQKAVLLLEHVERKETPGLKLIILMDPFEEALKERGQKCGVVIKSMQAVEDCGQENHQAPVPPQPDDLSIVCFTSGTTGNPKGAMLTHGNVVADFSGFLKVTESQWAPTCADVHISYLPLAHMFERMVQSVVYCHGGRVGFFQGDIRLLSDDMKALCPTIFPVVPRLLNRMYDKIFSQANTPLKRWLLEFAAKRKQAEVRSGIIRNDSIWDELFFNKIQASLGGCVRMIVTGAAPASPTVLGFLRAALGCQVYEGYGQTECTAGCTFTTPGDWTSGHVGAPLPCNHIKLVDVEELNYWACKGEGEICVRGPNVFKGYLKDPDRTKEALDSDGWLHTGDIGKWLPAGTLKIIDRKKHIFKLAQGEYVAPEKIENIYIRSQPVAQIYVHGDSLKAFLVGIVVPDPEVMPSWAQKRGIEGTYADLCTNKDLKKAILEDMVRLGKESGLHSFEQDLPQCLIQIKVFSKY

SEQ ID NO: 47181 - protein, 312 aa, Homo sapiens
  Payload ID: 9555
  Gene Symbol: LOR
  Gene Name: loricrin
  Uniprot ID: P23490
  ENSP ID: ENSP00000357731
MSYQKKQPTPQPPVDCVKTSGGGGGGGGSGGGGCGFFGGGGSGGGSSGSGCGYSGGGGYSGGGCGGGSSGGGGGGGIGGCGGGSGGSVKYSGGGGSSGGGSGCFSSGGGGSGCFSSGGGGSSGGGSGCFSSGGGGSSGGGSGCFSSGGGGFSGQAVQCQSYGGVSSGGSSGGGSGCFSSGGGGGSVCGYSGGGSGCGGGSSGGSGSGYVSSQQVTQTSCAPQPSYGGGSSGGGGSGGSGCFSSGGGGGSSGCGGGSSGIGSGCIISGGGSVCGGGSSGGGGGGSSVGGSGSGKGVPICHQTQQKQAPTWPSK

SEQ ID NO: 47182 - protein, 945 aa, Homo sapiens
  Payload ID: 9556
  Gene Symbol: LDLR
  Gene Name: low density lipoprotein receptor
  ENSP ID: ENSP00000252444
  MOD_RES (1)..(1): Any amino acid
XGRPGVPPRFLSQRRRQVPGPRSRLRDIHESPSVILGPPGEVPGFRCALWRHLRPHLVLGGALAPPAPIKFTEGPPATLKASVPYEVETLPQNLPAPPWSAAEIFSHVGDRCERNEFQCQDGKCISYKWVCDGSAECQDGSDESQETCLSVTCKSGDFSCGGRVNRCIPQFWRCDGQVDCDNGSDEQGCPPKTCSQDEFRCHDGKCISRQFVCDSDRDCLDGSDEASCPVLTCGPASFQCNSSTCIPQLWACDNDPDCEDGSDEWPQRCRGLYVFQGDSSPCSAFEFHCLSGECIHSSWRCDGGPDCKDKSDEENCAVATCRPDEFQCSDGNCIHGSRQCDREYDCKDMSDEVGCVNVTLCEGPNKFKCHSGECITLDKVCNMARDCRDWSDEPIKECGTNECLDNNGGCSHVCNDLKIGYECLCPDGFQLVAQRRCEDIDECQDPDTCSQLCVNLEGGYKCQCEEGFQLDPHTKACKAVGSIAYLFFTNRHEVRKMTLDRSEYTSLIPNLRNVVALDTEVASNRIYWSDLSQRMICSTQLDRAHGVSSYDTVISRDIQAPDGLAVDWIHSNIYWTDSVLGTVSVADTKGVKRKTLFRENGSKPRAIVVDPVHGFMYWTDWGTPAKIKKGGLNGVDIYSLVTENIQWPNGITLDLLSGRLYWVDSKLHSISSIDVNGGNRKTILEDEKRLAHPFSLAVFEDKVFWTDIINEAIFSANRLTGSDVNLLAENLLSPEDMVLFHNLTQPRGVNWCERTTLSNGGCQYLCLPAPQINPHSPKFTCACPDGMLLARDMRSCLTEAEAAVATQETSTVRLKVSSTAVRTQHTTTRPVPDTSRLPGATPGLTTVEIVTMSHQALGDVAGRGNEKKPSSVRALSIVLPIVLLVFLCLGVFLLWKNWRLKNINSINFDNPVYQKTTEDEVHICHNQDGYSYPSRQMVSLEDDVA

SEQ ID NO: 47183 - protein, 692 aa, Homo sapiens
  Payload ID: 9556
  Gene Symbol: LDLR
  Gene Name: low density lipoprotein receptor
  Uniprot ID: P01130
  ENSP ID: ENSP00000397829
MGPWGWKLRWTVALLLAAAGTAVGDRCERNEFQCQDGKCISYKWVCDGSAECQDGSDESQETCLSVTCKSGDFSCGGRVNRCIPQFWRCDGQVDCDNGSDEQGCLTLCEGPNKFKCHSGECITLDKVCNMARDCRDWSDEPIKECGTNECLDNNGGCSHVCNDLKIGYECLCPDGFQLVAQRRCEDIDECQDPDTCSQLCVNLEGGYKCQCEEGFQLDPHTKACKAVGSIAYLFFTNRHEVRKMTLDRSEYTSLIPNLRNVVALDTEVASNRIYWSDLSQRMICSTQLDRAHGVSSYDTVISRDIQAPDGLAVDWIHSNIYWTDSVLGTVSVADTKGVKRKTLFRENGSKPRAIVVDPVHGFMYWTDWGTPAKIKKGGLNGVDIYSLVTENIQWPNGITLDLLSGRLYWVDSKLHSISSIDVNGGNRKTILEDEKRLAHPFSLAVFEDKVFWTDIINEAIFSANRLTGSDVNLLAENLLSPEDMVLFHNLTQPRGVNWCERTTLSNGGCQYLCLPAPQINPHSPKFTCACPDGMLLARDMRSCLTEAEAAVATQETSTVRLKVSSTAVRTQHTTTRPVPDTSRLPGATPGLTTVEIVTMSHQALGDVAGRGNEKKPSSVRALSIVLPIVLLVFLCLGVFLLWKNWRLKNINSINFDNPVYQKTTEDEVHICHNQDGYSYPSRQMVSLEDDVA

SEQ ID NO: 47184 - protein, 682 aa, Homo sapiens
  Payload ID: 9556
  Gene Symbol: LDLR
  Gene Name: low density lipoprotein receptor
  Uniprot ID: P01130
  ENSP ID: ENSP00000437639
MGPWGWKLRWTVALLLAAAGTAVGDRCERNEFQCQDGKCISYKWVCDGSAECQDGSDESQETCLSVTCKSGDFSCGGRVNRCIPQFWRCDGQVDCDNGSDEQGCPVATCRPDEFQCSDGNCIHGSRQCDREYDCKDMSDEVGCVNVTLCEGPNKFKCHSGECITLDKVCNMARDCRDWSDEPIKECGTNECLDNNGGCSHVCNDLKIGYECLCPDGFQLVAQRRCEDIDECQDPDTCSQLCVNLEGGYKCQCEEGFQLDPHTKACKAVGSIAYLFFTNRHEVRKMTLDRSEYTSLIPNLRNVVALDTEVASNRIYWSDLSQRMICSTQLDRAHGVSSYDTVISRDIQAPDGLAVDWIHSNIYWTDSVLGTVSVADTKGVKRKTLFRENGSKPRAIVVDPVHGFMYWTDWGTPAKIKKGGLNGVDIYSLVTENIQWPNGITLDLLSGRLYWVDSKLHSISSIDVNGGNRKTILEDEKRLAHPFSLAVFEDKVFWTDIINEAIFSANRLTGSDVNLLAENLLSPEDMVLFHNLTQPREAEAAVATQETSTVRLKVSSTAVRTQHTTTRPVPDTSRLPGATPGLTTVEIVTMSHQALGDVAGRGNEKKPSSVRALSIVLPIVLLVFLCLGVFLLWKNWRLKNINSINFDNPVYQKTTEDEVHICHNQDGYSYPSRQMVSLEDDVA

SEQ ID NO: 47185 - protein, 819 aa, Homo sapiens
  Payload ID: 9556
  Gene Symbol: LDLR
  Gene Name: low density lipoprotein receptor
  Uniprot ID: P01130
  ENSP ID: ENSP00000440520
MGPWGWKLRWTVALLLAAAGTAVGDRCERNEFQCQDGKCISYKWVCDGSAECQDGSDESQETCSPKTCSQDEFRCHDGKCISRQFVCDSDRDCLDGSDEASCPVLTCGPASFQCNSSTCIPQLWACDNDPDCEDGSDEWPQRCRGLYVFQGDSSPCSAFEFHCLSGECIHSSWRCDGGPDCKDKSDEENCAVATCRPDEFQCSDGNCIHGSRQCDREYDCKDMSDEVGCVNVTLCEGPNKFKCHSGECITLDKVCNMARDCRDWSDEPIKECGTNECLDNNGGCSHVCNDLKIGYECLCPDGFQLVAQRRCEDIDECQDPDTCSQLCVNLEGGYKCQCEEGFQLDPHTKACKAVGSIAYLFFTNRHEVRKMTLDRSEYTSLIPNLRNVVALDTEVASNRIYWSDLSQRMICSTQLDRAHGVSSYDTVISRDIQAPDGLAVDWIHSNIYWTDSVLGTVSVADTKGVKRKTLFRENGSKPRAIVVDPVHGFMYWTDWGTPAKIKKGGLNGVDIYSLVTENIQWPNGITLDLLSGRLYWVDSKLHSISSIDVNGGNRKTILEDEKRLAHPFSLAVFEDKVFWTDIINEAIFSANRLTGSDVNLLAENLLSPEDMVLFHNLTQPRGVNWCERTTLSNGGCQYLCLPAPQINPHSPKFTCACPDGMLLARDMRSCLTEAEAAVATQETSTVRLKVSSTAVRTQHTTTRPVPDTSRLPGATPGLTTVEIVTMSHQALGDVAGRGNEKKPSSVRALSIVLPIVLLVFLCLGVFLLWKNWRLKNINSINFDNPVYQKTTEDEVHICHNQDGYSYPSRQMVSLEDDVA

SEQ ID NO: 47186 - protein, 858 aa, Homo sapiens
  Payload ID: 9556
  Gene Symbol: LDLR
  Gene Name: low density lipoprotein receptor
  Uniprot ID: P01130
  ENSP ID: ENSP00000453346
MGPWGWKLRWTVALLLAAAGTAVGDRCERNEFQCQDGKCISYKWVCDGSAECQDGSDESQETCLSVTCKSGDFSCGGRVNRCIPQFWRCDGQVDCDNGSDEQGCPPKTCSQDEFRCHDGKCISRQFVCDSDRDCLDGSDEASCPVLTCGPASFQCNSSTCIPQLWACDNDPDCEDGSDEWPQRCRGLYVFQGDSSPCSAFEFHCLSGECIHSSWRCDGGPDCKDKSDEENCAVATCRPDEFQCSDGNCIHGSRQCDREYDCKDMSDEVGCVNVTLCEGPNKFKCHSGECITLDKVCNMARDCRDWSDEPIKECGTNECLDNNGGCSHVCNDLKIGYECLCPDGFQLVAQRRCEDIDECQDPDTCSQLCVNLEGGYKCQCEEGFQLDPHTKACKAVGSIAYLFFTNRHEVRKMTLDRSEYTSLIPNLRNVVALDTEVASNRIYWSDLSQRMICSTQLDRAHGVSSYDTVISRDIQAPDGLAVDWIHSNIYWTDSVLGTVSVADTKGVKRKTLFRENGSKPRAIVVDPVHGFMYWTDWGTPAKIKKGGLNGVDIYSLVTENIQWPNGITLDLLSGRLYWVDSKLHSISSIDVNGGNRKTILEDEKRLAHPFSLAVFEDKVFWTDIINEAIFSANRLTGSDVNLLAENLLSPEDMVLFHNLTQPRGVNWCERTTLSNGGCQYLCLPAPQINPHSPKFTCACPDGMLLARDMRSCLTEAEAAVATQETSTVRLKVSSTAVRTQHTTTRPVPDTSRLPGATPGLTTVEIVTMSHQALGDVAGRGNEKKPSSVRALSIVLPIVLLVFLCLGVFLLWKNWRLKNINSINFDNPVYQKTTEDEVHICHNQDGYSYPSMVSLEDDVA

SEQ ID NO: 47187 - protein, 309 aa, Homo sapiens
  Payload ID: 9556
  Gene Symbol: LDLR
  Gene Name: low density lipoprotein receptor
  ENSP ID: ENSP00000453513
  MOD_RES (1)..(1): Any amino acid
XLDGSDEASCPVLTCGPASFQCNSSTCIPQLWACDNDPDCEDGSDEWPQRCRGLYVFQGDSSPCSAFEFHCLSGECIHSSWRCDGGPDCKDKSDEENCAVATCRPDEFQCSDGNCIHGSRQCDREYDCKDMSDEVGCVNVTLCEGPNKFKCHSGECITLDKVCNMARDCRDWSDEPIKECDIDECQDPDTCSQLCVNLEGGYKCQCEEGFQLDPHTKACKAVGSIAYLFFTNRHEVRKMTLDRSEYTSLIPNLRNVVALDTEVASNRIYWSDLSQRMICSTQLDRAHGVSSYDTVISRDIQAPDGLAVD

SEQ ID NO: 47188 - protein, 948 aa, Homo sapiens
  Payload ID: 9556
  Gene Symbol: LDLR
  Gene Name: low density lipoprotein receptor
  ENSP ID: ENSP00000453557
MGPWGWKLRWTVALLLAAAGTAVGDRCERNEFQCQDGKCISYKWVCDGSAECQDGSDESQETCLSVTCKSGDFSCGGRVNRCIPQFWRCDGQVDCDNGSDEQGCPPKTCSQDEFRCHDGKCISRQFVCDSDRDCLDGSDEASCPVLTCGPASFQCNSSTCIPQLWACDNDPDCEDGSDEWPQRCRGLYVFQGDSSPCSAFEFHCLSGECIHSSWRCDGGPDCKDKSDEENCAVATCRPDEFQCSDGNCIHGSRQCDREYDCKDMSDEVGCVNVTLCEGPNKFKCHSGECITLDKVCNMARDCRDWSDEPIKECGTNECLDNNGGCSHVCNDLKIGYECLCPDGFQLVAQRRCEDIDECQDPDTCSQLCVNLEGGYKCQCEEGFQLDPHTKACKAVGSIAYLFFTNRHEVRKMTLDRSEYTSLIPNLRNVVALDTEVASNRIYWSDLSQRMICSTQLDRAHGVSSYDTVISRDIQAPDGLAVDWIHSNIYWTDSVLGTVSVADTKGVKRKTLFRENGSKPRAIVVDPVHGFMYWTDWGTPAKIKKGGLNGVDIYSLVTENIQWPNGITLDLLSGRLYWVDSKLHSISSIDVNGGNRKTILEDEKRLAHPFSLAVFEDKVFWTDIINEAIFSANRLTGSDVNLLAENLLSPEDMVLFHNLTQPRGVNWCERTTLSNGGCQYLCLPAPQINPHSPKFTCACPDGMLLARDMRSCLTEAEAAVATQETSTVRLKVSSTAVRTQHTTTRPVPDTSRLPGATPGLTTVEIVTMSHQALGDVAGRGNEKKPSSVRALSIVLPIATELGLWSRGQLCDRACLSLQCSSSSFAWGSSFYGRTGGLRTSTASTLTTPSIRRPQRMRSTFATTRTATATPRDRWSVWRMTWREHLPGVPSLPRTLPETSPALFYSKTEKTKALPARALFYIFIHLGGRTGFGQCPCNGLGWDFGFFLSS

SEQ ID NO: 47189 - protein, 170 aa, Homo sapiens
  Payload ID: 9556
  Gene Symbol: LDLR
  Gene Name: low density lipoprotein receptor
  ENSP ID: ENSP00000453696
  MOD_RES (1)..(1): Any amino acid
XNVVALDTEVASNRIYWSDLSQRMICSTQLDRAHGVSSYDTVISRDIQAPDGLAVDWIHSNIYWTDSVLGTVSVADTKGVKRKTLFRENGSKPRAIVVDPVHGFMYWTDWGTPAKIKKGGLNGVDIYSLVTENIQWPNGITLGQSILDRYHQRSHFQCQPPHRFRCQLVG

SEQ ID NO: 47190 - protein, 860 aa, Homo sapiens [sequence omitted]

SEQ ID NO: 47191 - protein, 308 aa, Homo sapiens
  Payload ID: 9557
  Gene Symbol: LDLRAP1
  Gene Name: low density lipoprotein receptor adaptor protein 1
  Uniprot ID: Q5SW96
  ENSP ID: ENSP00000363458
MDALKSAGRALIRSPSLAKQSWGGGGRHRKLPENWTDTRETLLEGMLFSLKYLGMTLVEQPKGEELSAAAIKRIVATAKASGKKLQKVTLKVSPRGIILTDNLTNQLIENVSIYRISYCTADKMHDKVFAYIAQSQHNQSLECHAFLCTKRKMAQAVTLTVAQAFKVAFEFWQVSKEEKEKRDKASQEGGDVLGARQDCTPSLKSLVATGNLLDLEETAKAPLSTVSANTTNMDEVPRPQALSGSSVVWELDDGLDEAFSRLAQSRTNPQVLDTGLTAQDMHYAQCLSPVDWDKPDSSGTEQDDLFSF

SEQ ID NO: 47192 - protein, 205 aa, Homo sapiens
  Payload ID: 9558
  Gene Symbol: LDLRAD1
  Gene Name: low density lipoprotein receptor class A domain containing 1
  Uniprot ID: Q5T700
  ENSP ID: ENSP00000360411
MNKVFPQGENGYTAAESKAHPGGEAGGGHLCCSRRGACLSASLLLLLATVAALIALVTILGLPSCTPGAQACITLTNRTGFLCHDQRSCIPASGVCDGVRTCTHGEDEDESLCRDVPQSLPHFLVAHCGDPASWIYSDQKCDGTNNCGDCSDELSPVTVCPPCGPGWWRCPSTFFKYCDCIPRHLCRDHVQHCSDWSDEYACPGP

SEQ ID NO: 47193 - protein, 116 aa, Homo sapiens
  Payload ID: 9558
  Gene Symbol: LDLRAD1
  Gene Name: low density lipoprotein receptor class A domain containing 1
  Uniprot ID: Q5T700
  ENSP ID: ENSP00000360413
MNKVFPQGENGYTAAESKAHPGGEGDVPQSLPHFLVAHCGDPASWIYSDQKCDGTNNCGDCSDELSPVTVCPPCGPGWWRCPSTFFKYCDCIPRHLCRDHVQHCSDWSDEYACPGP

SEQ ID NO: 47194 - protein, 166 aa, Homo sapiens
  Payload ID: 9558
  Gene Symbol: LDLRAD1
  Gene Name: low density lipoprotein receptor class A domain containing 1
  Uniprot ID: Q5T700
  ENSP ID: ENSP00000411017
MQGTRAELSAHSPSRAAGNRRHEQGLPPGAQACITLTNRTGFLCHDQRSCIPASGVCDGVRTCTHGEDEDESLCRDVPQSLPHFLVAHCGDPASWIYSDQKCDGTNNCGDCSDELSPVTVCPPCGPGWWRCPSTFFKYCDCIPRHLCRDHVQHCSDWSDEYACPGP

SEQ ID NO: 47195 - protein, 162 aa, Homo sapiens
  Payload ID: 9558
  Gene Symbol: LDLRAD1
  Gene Name: low density lipoprotein receptor class A domain containing 1
  Uniprot ID: Q5T700
  ENSP ID: ENSP00000445871
MNKVFPQGENGYTAAESKAHPGGEGAQACITLTNRTGFLCHDQRSCIPASGVCDGVRTCTHGEDEDESLCRDVPQSLPHFLVAHCGDPASWIYSDQKCDGTNNCGDCSDELSPVTVCPPCGPGWWRCPSTFFKYCDCIPRHLCRDHVQHCSDWSDEYACPGP

SEQ ID NO: 47196 - protein, 272 aa, Homo sapiens
  Payload ID: 9559
  Gene Symbol: LDLRAD2
  Gene Name: low density lipoprotein receptor class A domain containing 2
  Uniprot ID: Q5SZI1
  ENSP ID: ENSP00000340988
MEACCLLQLPQRLLLLGAAALTATALETADLAELCGQTWQGDGLLLRSHAASRRFYFVAPDTDCGLWVQAAAPGDRIRFQFRFFLVYSLTPAPPALNTSSPAPADPCAPGSYLQFYEGPPGAPRPLGSPLCGLNIPVPVASSGPFLGLRLVTRGRQPRVDFVGEVTSFRLGPCGAYFRCQNGRCIPSSLVCDPWGMDNCGDGSDQGSWSPADCRGPSPVPSQTGSTDAHTSRSLTPSPALGSAGSLWIAAERSSPAGRDPTRQDAALEGSTE

SEQ ID NO: 47197 - protein, 272 aa, Homo sapiens; identical to SEQ ID NO: 47196
  Payload ID: 9559
  Gene Symbol: LDLRAD2
  Gene Name: low density lipoprotein receptor class A domain containing 2
  Uniprot ID: Q5SZI1
  ENSP ID: ENSP00000444097

SEQ ID NO: 47198 - protein, 345 aa, Homo sapiens
  Payload ID: 9560
  Gene Symbol: LDLRAD3
  Gene Name: low density lipoprotein receptor class A domain containing 3
  Uniprot ID: Q86YD5
  ENSP ID: ENSP00000318607
MWLLGPLCLLLSSAAESQLLPGNNFTNECNIPGNFMCSNGRCIPGAWQCDGLPDCFDKSDEKECPKAKSKCGPTFFPCASGIHCIIGRFRCNGFEDCPDGSDEENCTANPLLCSTARYHCKNGLCIDKSFICDGQNNCQDNSDEESCESSQEPGSGQVFVTSENQLVYYPSITYAIIGSSVIFVLVVALLALVLHHQRKRNNLMTLPVHRLQHPVLLSRLVVLDHPHHCNVTYNVNNGIQYVASQAEQNASEVGSPPSYSEALLDQRPAWYDLPPPPYSSDTESLNQADLPPYRSRSGSANSASSQAASSLLSVEDTSHSPGQPGPQEGTAEPRDSEPSQGTEEV

SEQ ID NO: 47199 - protein, 296 aa, Homo sapiens
  Payload ID: 9560
  Gene Symbol: LDLRAD3
  Gene Name: low density lipoprotein receptor class A domain containing 3
  Uniprot ID: Q86YD5
  ENSP ID: ENSP00000433954
MWLLGPLCLLLSSAAAKAKSKCGPTFFPCASGIHCIIGRFRCNGFEDCPDGSDEENCTANPLLCSTARYHCKNGLCIDKSFICDGQNNCQDNSDEESCESSQEPGSGQVFVTSENQLVYYPSITYAIIGSSVIFVLVVALLALVLHHQRKRNNLMTLPVHRLQHPVLLSRLVVLDHPHHCNVTYNVNNGIQYVASQAEQNASEVGSPPSYSEALLDQRPAWYDLPPPPYSSDTESLNQADLPPYRSRSGSANSASSQAASSLLSVEDTSHSPGQPGPQEGTAEPRDSEPSQGTEEV

SEQ ID NO: 47200 - protein, 335 aa, Homo sapiens
  Payload ID: 9560
  Gene Symbol: LDLRAD3
  Gene Name: low density lipoprotein receptor class A domain containing 3
  ENSP ID: ENSP00000434313
MWLLGPLCLLLSSAAAKAKSKCGPTFFPCASGIHCIIGRFRCNGFEDCPDGSDEENCTANPLLCSTARYHCKNGLCIDKSFICDGQNNCQDNSDEESCESSQVSLLLPRLECSGTISAHCKLRLPGSRHSPASASRVAGTTEPGSGQVFVTSENQLVYYPSITYAIIGSSVIFVLVVALLALVLHHQRKRNNLMTLPVHRLQHPVLLSRLVVLDHPHHCNVTYNVNNGIQYVASQAEQNASEVGSPPSYSEALLDQRPAWYDLPPPPYSSDTESLNQADLPPYRSRSGSANSASSQAASSLLSVEDTSHSPGQPGPQEGTAEPRDSEPSQGTEEV

SEQ ID NO: 47201 - protein, 306 aa, Homo sapiens
  Payload ID: 9561
  Gene Symbol: LDLRAD4
  Gene Name: low density lipoprotein receptor class A domain containing 4
  Uniprot ID: O15165
  ENSP ID: ENSP00000352420
MPEAGFQATNAFTECKFTCTSGKCLYLGSLVCNQQNDCGDNSDEENCLLVTEHPPPGIFNSELEFAQIIIIVVVVTVMVVVIVCLLNHYKVSTRSFINRPNQSRRREDGLPQEGCLWPSDSAAPRLGASEIMHAPRSRDRFTAPSFIQRDRFSRFQPTYPYVQHEIDLPPTISLSDGEEPPPYQGPCTLQLRDPEQQMELNRESVRAPPNRTIFDSDLIDIAMYSGGPCPPSSNSGISASTCSSNGRMEGPPPTYSEVMGHHPGASFLHHQRSNAHRGSRLQFQQNNAESTIVPIKGKDRKPGNLV

SEQ ID NO: 47202 - protein, 288 aa, Homo sapiens
  Payload ID: 9561
  Gene Symbol: LDLRAD4
  Gene Name: low density lipoprotein receptor class A domain containing 4
  Uniprot ID: O15165
  ENSP ID: ENSP00000382741
MPEAGFQATNAFTECKFTCTSGKCLYLGSLVCNQQNDCGDNSDEENCLLVTEHPPPGIFNSELEFAQIIIIVVVVTVMVVVIVCLLNHYKVSTRSFINRPNQSRRREDGLPQIMHAPRSRDRFTAPSFIQRDRFSRFQPTYPYVQHEIDLPPTISLSDGEEPPPYQGPCTLQLRDPEQQMELNRESVRAPPNRTIFDSDLIDIAMYSGGPCPPSSNSGISASTCSSNGRMEGPPPTYSEVMGHHPGASFLHHQRSNAHRGSRLQFQQNNAESTIVPIKGKDRKPGNLV

SEQ ID NO: 47203 - protein, 69 aa, Homo sapiens
  Payload ID: 9561
  Gene Symbol: LDLRAD4
  Gene Name: low density lipoprotein receptor class A domain containing 4
  ENSP ID: ENSP00000465244
MPEAGFQATNAFTECKFTCTSGKCLYLGSLVCNQQNDCGDNSDEENCLLVTEHPPPGIFNSELEFAQII

SEQ ID NO: 47204 - protein, 43 aa, Homo sapiens
  Payload ID: 9561
  Gene Symbol: LDLRAD4
  Gene Name: low density lipoprotein receptor class A domain containing 4
  ENSP ID: ENSP00000465573
MPEAGFQATNAFTECKFTCTSGKCLYLGSLVCNQQNDCGDNSD

SEQ ID NO: 47205 - protein, 269 aa, Homo sapiens
  Payload ID: 9561
  Gene Symbol: LDLRAD4
  Gene Name: low density lipoprotein receptor class A domain containing 4
  Uniprot ID: O15165
  ENSP ID: ENSP00000466178
MSSDHLNNSTLKEAQFKDLFLKKAELEFAQIIIIVVVVTVMVVVIVCLLNHYKVSTRSFINRPNQSRRREDGLPQEGCLWPSDSAAPRLGASEIMHAPRSRDRFTAPSFIQRDRFSRFQPTYPYVQHEIDLPPTISLSDGEEPPPYQGPCTLQLRDPEQQMELNRESVRAPPNRTIFDSDLIDIAMYSGGPCPPSSNSGISASTCSSNGRMEGPPPTYSEVMGHHPGASFLHHQRSNAHRGSRLQFQQNNAESTIVPIKGKDRKPGNLV

SEQ ID NO: 47206 - protein, 34 aa, Homo sapiens
  Payload ID: 9561
  Gene Symbol: LDLRAD4
  Gene Name: low density lipoprotein receptor class A domain containing 4
  ENSP ID: ENSP00000466490
MVVVIVCLLNHYKVSTRSFINRPNQSRRREDGLP

SEQ ID NO: 47207 - protein, 208 aa, Homo sapiens
  Payload ID: 9561
  Gene Symbol: LDLRAD4
  Gene Name: low density lipoprotein receptor class A domain containing 4
  Uniprot ID: O15165
  ENSP ID: ENSP00000466771
MRLDSHLECISSTQEGCLWPSDSAAPRLGASEIMHAPRSRDRFTAPSFIQRDRFSRFQPTYPYVQHEIDLPPTISLSDGEEPPPYQGPCTLQLRDPEQQMELNRESVRAPPNRTIFDSDLIDIAMYSGGPCPPSSNSGISASTCSSNGRMEGPPPTYSEVMGHHPGASFLHHQRSNAHRGSRLQFQQNNAESTIVPIKGKDRKPGNLV

SEQ ID NO: 47208 - protein, 229 aa, Homo sapiens
  Payload ID: 9561
  Gene Symbol: LDLRAD4
  Gene Name: low density lipoprotein receptor class A domain containing 4
  Uniprot ID: O15165
  ENSP ID: ENSP00000466772
MVVVIVCLLNHYKVSTRSFINRPNQSRRREDGLPQEGCLWPSDSAAPRLGASEIMHAPRSRDRFTAPSFIQRDRFSRFQPTYPYVQHEIDLPPTISLSDGEEPPPYQGPCTLQLRDPEQQMELNRESVRAPPNRTIFDSDLIDIAMYSGGPCPPSSNSGISASTCSSNGRMEGPPPTYSEVMGHHPGASFLHHQRSNAHRGSRLQFQQNNAESTIVPIKGKDRKPGNLV

SEQ ID NO: 47209 - protein, 251 aa, Homo sapiens
  Payload ID: 9561
  Gene Symbol: LDLRAD4
  Gene Name: low density lipoprotein receptor class A domain containing 4
  Uniprot ID: O15165
  ENSP ID: ENSP00000474783
MSSDHLNNSTLKEAQFKDLFLKKAELEFAQIIIIVVVVTVMVVVIVCLLNHYKVSTRSFINRPNQSRRREDGLPQIMHAPRSRDRFTAPSFIQRDRFSRFQPTYPYVQHEIDLPPTISLSDGEEPPPYQGPCTLQLRDPEQQMELNRESVRAPPNRTIFDSDLIDIAMYSGGPCPPSSNSGISASTCSSNGRMEGPPPTYSEVMGHHPGASFLHHQRSNAHRGSRLQFQQNNAESTIVPIKGKDRKPGNLV

SEQ ID NO: 47210 - protein, 4544 aa, Homo sapiens
  Payload ID: 9562
  Gene Symbol: LRP1
  Gene Name: low density lipoprotein receptor-related protein 1
  Uniprot ID: Q07954
  ENSP ID: ENSP00000243077
MLTPPLLLLLPLLSALVAAAIDAPKTCSPKQFACRDQITCISKGWRCDGERDCPDGSDEAPEICPQSKAQRCQPNEHNCLGTELCVPMSRLCNGVQDCMDGSDEGPHCRELQGNCSRLGCQHHCVPTLDGPTCYCNSSFQLQADGKTCKDFDECSVYGTCSQLCTNTDGSFICGCVEGYLLQPDNRSCKAKNEPVDRPPVLLIANSQNILATYLSGAQVSTITPTSTRQTTAMDFSYANETVCWVHVGDSAAQTQLKCARMPGLKGFVDEHTINISLSLHHVEQMAIDWLTGNFYFVDDIDDRIFVCNRNGDTCVTLLDLELYNPKGIALDPAMGKVFFTDYGQIPKVERCDMDGQNRTKLVDSKIVFPHGITLDLVSRLVYWADAYLDYIEVVDYEGKGRQTIIQGILIEHLYGLTVFENYLYATNSDNANAQQKTSVIRVNRFNSTEYQVVTRVDKGGALHIYHQRRQPRVRSHACENDQYGKPGGCSDICLLANSHKARTCRCRSGFSLGSDGKSCKKPEHELFLVYGKGRPGIIRGMDMGAKVPDEHMIPIENLMNPRALDFHAETGFIYFADTTSYLIGRQKIDGTERETILKDGIHNVEGVAVDWMGDNLYWTDDGPKKTISVARLEKAAQTRKTLIEGKMTHPRAIVVDPLNGWMYWTDWEEDPKDSRRGRLERAWMDGSHRDIFVTSKTVLWPNGLSLDIPAGRLYWVDAFYDRIETILLNGTDRKIVYEGPELNHAFGLCHHGNYLFWTEYRSGSVYRLERGVGGAPPTVTLLRSERPPIFEIRMYDAQQQQVGTNKCRVNNGGCSSLCLATPGSRQCACAEDQVLDADGVTCLANPSYVPPPQCQPGEFACANSRCIQERWKCDGDNDCLDNSDEAPALCHQHTCPSDRFKCENNRCIPNRWLCDGDNDCGNSEDESNATCSARTCPPNQFSCASGRCIPISWTCDLDDDCGDRSDESASCAYPTCFPLTQFTCNNGRCININWRCDNDNDCGDNSDEAGCSHSCSSTQFKCNSGRCIPEHWTCDGDNDCGDYSDETHANCTNQATRPPGGCHTDEFQCRLDGLCIPLRWRCDGDTDCMDSSDEKSCEGVTHVCDPSVKFGCKDSARCISKAWVCDGDNDCEDNSDEENCESLACRPPSHPCANNTSVCLPPDKLCDGNDDCGDGSDEGELCDQCSLNNGGCSHNCSVAPGEGIVCSCPLGMELGPDNHTCQIQSYCAKHLKCSQKCDQNKFSVKCSCYEGWVLEPDGESCRSLDPFKPFIIFSNRHEIRRIDLHKGDYSVLVPGLRNTIALDFHLSQSALYWTDVVEDKIYRGKLLDNGALTSFEVVIQYGLATPEGLAVDWIAGNIYWVESNLDQIEVAKLDGTLRTTLLAGDIEHPRAIALDPRDGILFWTDWDASLPRIEAASMSGAGRRTVHRETGSGGWPNGLTVDYLEKRILWIDARSDAIYSARYDGSGHMEVLRGHEFLSHPFAVTLYGGEVYWTDWRTNTLAKANKWTGHNVTVVQRTNTQPFDLQVYHPSRQPMAPNPCEANGGQGPCSHLCLINYNRTVSCACPHLMKLHKDNTTCYEFKKFLLYARQMEIRGVDLDAPYYNYIISFTVPDIDNVTVLDYDAREQRVYWSDVRTQAIKRAFINGTGVETVVSADLPNAHGLAVDWVSRNLFWTSYDTNKKQINVARLDGSFKNAVVQGLEQPHGLVVHPLRGKLYWTDGDNISMANMDGSNRTLLFSGQKGPVGLAIDFPESKLYWISSGNHTINRCNLDGSGLEVIDAMRSQLGKATALAIMGDKLWWADQVSEKMGTCSKADGSGSVVLRNSTTLVMHMKVYDESIQLDHKGTNPCSVNNGDCSQLCLPTSETTRSCMCTAGYSLRSGQQACEGVGSFLLYSVHEGIRGIPLDPNDKSDALVPVSGTSLAVGIDFHAENDTIYWVDMGLSTISRAKRDQTWREDVVTNGIGRVEGIAVDWIAGNIYWTDQGFDVIEVARLNGSFRYVVISQGLDKPRAITVHPEKGYLFWTEWGQYPRIERSRLDGTERVVLVNVSISWPNGISVDYQDGKLYWCDARTDKIERIDLETGENREVVLSSNNMDMFSVSVFEDFIYWSDRTHANGSIKRGSKDNATDSVPLRTGIGVQLKDIKVFNRDRQKGTNVCAVANGGCQQLCLYRGRGQRACACAHGMLAEDGASCREYAGYLLYSERTILKSIHLSDERNLNAPVQPFEDPEHMKNVIALAFDYRAGTSPGTPNRIFFSDIHFGNIQQINDDGSRRITIVENVGSVEGLAYHRGWDTLYWTSYTTSTITRHTVDQTRPGAFERETVITMSGDDHPRAFVLDECQNLMFWTNWNEQHPSIMRAALSGANVLTLIEKDIRTPNGLAIDHRAEKLYFSDATLDKIERCEYDGSHRYVILKSEPVHPFGLAVYGEHIFWTDWVRRAVQRANKHVGSNMKLLRVDIPQQPMGIIAVANDTNSCELSPCRINNGGCQDLCLLTHQGHVNCSCRGGRILQDDLTCRAVNSSCRAQDEFECANGECINFSLTCDGVPHCKDKSDEKPSYCNSRRCKKTFRQCSNGRCVSNMLWCNGADDCGDGSDEIPCNKTACGVGEFRCRDGTCIGNSSRCNQFVDCEDASDEMNCSATDCSSYFRLGVKGVLFQPCERTSLCYAPSWVCDGANDCGDYSDERDCPGVKRPRCPLNYFACPSGRCIPMSWTCDKEDDCEHGEDETHCNKFCSEAQFECQNHRCISKQWLCDGSDDCGDGSDEAAHCEGKTCGPSSFSCPGTHVCVPERWLCDGDKDCADGADESIAAGCLYNSTCDDREFMCQNRQCIPKHFVCDHDRDCADGSDESPECEYPTCGPSEFRCANGRCLSSRQWECDGENDCHDQSDEAPKNPHCTSQEHKCNASSQFLCSSGRCVAEALLCNGQDDCGDSSDERGCHINECLSRKLSGCSQDCEDLKIGFKCRCRPGFRLKDDGRTCADVDECSTTFPCSQRCINTHGSYKCLCVEGYAPRGGDPHSCKAVTDEEPFLIFANRYYLRKLNLDGSNYTLLKQGLNNAVALDFDYREQMIYWTDVTTQGSMIRRMHLNGSNVQVLHRTGLSNPDGLAVDWVGGNLYWCDKGRDTIEVSKLNGAYRTVLVSSGLREPRALVVDVQNGYLYWTDWGDHSLIGRIGMDGSSRSVIVDTKITWPNGLTLDYVTERIYWADAREDYIEFASLDGSNRHVVLSQDIPHIFALTLFEDYVYWTDWETKSINRAHKTTGTNKTLLISTLHRPMDLHVFHALRQPDVPNHPCKVNNGGCSNLCLLSPGGGHKCACPTNFYLGSDGRTCVSNCTASQFVCKNDKCIPFWWKCDTEDDCGDHSDEPPDCPEFKCRPGQFQCSTGICTNPAFICDGDNDCQDNSDEANCDIHVCLPSQFKCTNTNRCIPGIFRCNGQDNCGDGEDERDCPEVTCAPNQFQCSITKRCIPRVWVCDRDNDCVDGSDEPANCTQMTCGVDEFRCKDSGRCIPARWKCDGEDDCGDGSDEPKEECDERTCEPYQFRCKNNRCVPGRWQCDYDNDCGDNSDEESCTPRPCSESEFSCANGRCIAGRWKCDGDHDCADGSDEKDCTPRCDMDQFQCKSGHCIPLRWRCDADADCMDGSDEEACGTGVRTCPLDEFQCNNTLCKPLAWKCDGEDDCGDNSDENPEECARFVCPPNRPFRCKNDRVCLWIGRQCDGTDNCGDGTDEEDCEPPTAHTTHCKDKKEFLCRNQRCLSSSLRCNMFDDCGDGSDEEDCSIDPKLTSCATNASICGDEARCVRTEKAAYCACRSGFHTVPGQPGCQDINECLRFGTCSQLCNNTKGGHLCSCARNFMKTHNTCKAEGSEYQVLYIADDNEIRSLFPGHPHSAYEQAFQGDESVRIDAMDVHVKAGRVYWTNWHTGTISYRSLPPAAPPTTSNRHRRQIDRGVTHLNISGLKMPRGIAIDWVAGNVYWTDSGRDVIEVAQMKGENRKTLISGMIDEPHAIVVDPLRGTMYWSDWGNHPKIETAAMDGTLRETLVQDNIQWPTGLAVDYHNERLYWADAKLSVIGSIRLNGTDPIVAADSKRGLSHPFSIDVFEDYIYGVTYINNRVFKIHKFGHSPLVNLTGGLSHASDVVLYHQHKQPEVTNPCDRKKCEWLCLLSPSGPVCTCPNGKRLDNGTCVPVPSPTPPPDAPRPGTCNLQCFNGGSCFLNARRQPKCRCQPRYTGDKCELDQCWEHCRNGGTCAASPSGMPTCRCPTGFTGPKCTQQVCAGYCANNSTCTVNQGNQPQCRCLPGFLGDRCQYRQCSGYCENFGTCQMAADGSRQCRCTAYFEGSRCEVNKCSRCLEGACVVNKQSGDVTCNCTDGRVAPSCLTCVGHCSNGGSCTMNSKMMPECQCPPHMTGPRCEEHVFSQQQPGHIASILIPLLLLLLLVLVAGVVFWYKRRVQGAKGFQHQRMTNGAMNVEIGNPTYKMYEGGEPDDVGGLLDADFALDPDKPTNFTNPVYATLYMGGHGSRHSLASTDEKRELLGRGPEDEIGDPLA

SEQ ID NO: 47211 - protein, 292 aa, Homo sapiens
  Payload ID: 9562
  Gene Symbol: LRP1
  Gene Name: low density lipoprotein receptor-related protein 1
  Uniprot ID: Q07954
  ENSP ID: ENSP00000341264
MLTPPLLLLLPLLSALVAAAIDAPKTCSPKQFACRDQITCISKGWRCDGERDCPDGSDEAPEICPQSKAQRCQPNEHNCLGTELCVPMSRLCNGVQDCMDGSDEGPHCRELQGNCSRLGCQHHCVPTLDGPTCYCNSSFQLQADGKTCKDFDECSVYGTCSQLCTNTDGSFICGCVEGYLLQPDNRSCKAKNEPVDRPPVLLIANSQNILATYLSGAQVSTITPTSTRQTTAMDFSYANETVCWVHVGDSAAQTQLKCARMPGLKGFVDEHTINISLSLHLCVFSKSQQEMG

SEQ ID NO: 47212 - protein, 183 aa, Homo sapiens
  Payload ID: 9562
  Gene Symbol: LRP1
  Gene Name: low density lipoprotein receptor-related protein 1
  ENSP ID: ENSP00000451012
NGQDNCGDGEDERDCPEVTCAPNQFQCSITKRCIPRVWVCDRDNDCVDGSDEPANCTQMTCGVDEFRCKDSGRCIPARWKCDGEDDCGDGSDEPKEECGEPRPHSRRKTVYLDERTCEPYQFRCKNNRCVPGRWQCDYDNDCGDNSDEESCTPRPCSESEFSCANGRCIAGRWKCDGDHDCAD

SEQ ID NO: 47213 - protein, 296 aa, Homo sapiens
  Payload ID: 9562
  Gene Symbol: LRP1
  Gene Name: low density lipoprotein receptor-related protein 1
  ENSP ID: ENSP00000451449
MLTPPLLLLLPLLSALVAAAIDAPKTCSPKQFACRDQITCISKGWRCDGERDCPDGSDEAPEICPQSKAQRCQPNEHNCLGTELCVPMSRLCNGVQDCMDGSDEGPHCRELQGNCSRLGCQHHCVPTLDGPTCYCNSSFQLQADGKTCKDFDECSVYGTCSQLCTNTDGSFICGCVEGYLLQPDNRSCKAKNEPVDRPPVLLIANSQNILATYLSGAQVSTITPTSTRQTTAMDFSYANETVCWVHVGDSAAQTQLKCARMPGLKGFVDEHTINISLSLHRRSRKRAQENEVTQHG

SEQ ID NO: 47214 - protein, 139 aa, Homo sapiens
  Payload ID: 9562
  Gene Symbol: LRP1
  Gene Name: low density lipoprotein receptor-related protein 1
  ENSP ID: ENSP00000451622
  MOD_RES (1)..(1): Any amino acid
XRPGAFERETVITMSGDDHPRAFVLDECQNLMFWTNWNEQHPSIMRAALSGANVLTLIEKDIRTPNGLAIDHRAEKLYFSDATLDKIERCEYDGSHRYVNSLHAESTTVAARTCVCSLTRAMSTAHAEGAESSRMTSPA

SEQ ID NO: 47215 - protein, 439 aa, Homo sapiens
  Payload ID: 9562
  Gene Symbol: LRP1
  Gene Name: low density lipoprotein receptor-related protein 1
  ENSP ID: ENSP00000451737
MLTPPLLLLLPLLSALVAAAIDAPKTCSPKQFACRDQITCISKGWRCDGERDCPDGSDEAPEICPQSKAQRCQPNEHNCLGTELCVPMSRLCNGVQDCMDGSDEGPHCRELQGNCSRLGCQHHCVPTLDGPTCYCNSSFQLQADGKTCKDFDECSVYGTCSQLCTNTDGSFICGCVEGYLLQPDNRSCKAKNEPVDRPPVLLIANSQNILATYLSGAQVSTITPTSTRQTTAMDFSYANETVCWVHVGDSAAQTQLKCARMPGLKGFVDEHTINISLSLHHVEQMAIDWLTGNFYFVDDIDDRIFVCNRNGDTCVTLLDLELYNPKGIALDPAMGKVFFTDYGQIPKVERCDMDGQNRTKLVDSKIVFPHGITLDLVSRLVYWADAYLDYIEVVDYEGKGRQTIIQGILVRELLSEVLWGNHDPGPSGEGGSLCRGTVL

SEQ ID NO: 47216 - protein, 713 aa, Homo sapiens
  Payload ID: 9563
  Gene Symbol: LRP10
  Gene Name: low density lipoprotein receptor-related protein 10
  Uniprot ID: Q7Z4F1
  ENSP ID: ENSP00000352601
MLLATLLLLLLGGALAHPDRIIFPNHACEDPPAVLLEVQGTLQRPLVRDSRTSPANCTWLILGSKEQTVTIRFQKLHLACGSERLTLRSPLQPLISLCEAPPSPLQLPGGNVTITYSYAGARAPMGQGFLLSYSQDWLMCLQEEFQCLNHRCVSAVQRCDGVDACGDGSDEAGCSSDPFPGLTPRPVPSLPCNVTLEDFYGVFSSPGYTHLASVSHPQSCHWLLDPHDGRRLAVRFTALDLGFGDAVHVYDGPGPPESSRLLRSLTHFSNGKAVTVETLSGQAVVSYHTVAWSNGRGFNATYHVRGYCLPWDRPCGLGSGLGAGEGLGERCYSEAQRCDGSWDCADGTDEEDCPGCPPGHFPCGAAGTSGATACYLPADRCNYQTFCADGADERRCRHCQPGNFRCRDEKCVYETWVCDGQPDCADGSDEWDCSYVLPRKVITAAVIGSLVCGLLLVIALGCTCKLYAIRTQEYSIFAPLSRMEAEIVQQQAPPSYGQLIAQGAIPPVEDFPTENPNDNSVLGNLRSLLQILRQDMTPGGGPGARRRQRGRLMRRLVRRLRRWGLLPRTNTPARASEARSQVTPSAAPLEALDGGTGPAREGGAVGGQDGEQAPPLPIKAPLPSASTSPAPTTVPEAPGPLPSLPLEPSLLSGVVQALRGRLLPSLGPPGPTRSPPGPHTAVLALEDEDDVLLVPLAEPGVWVAEAEDEPLLT

SEQ ID NO: 47217 - protein, 556 aa, Homo sapiens
  Payload ID: 9563
  Gene Symbol: LRP10
  Gene Name: low density lipoprotein receptor-related protein 10
  Uniprot ID: Q7Z4F1
  ENSP ID: ENSP00000447559
MLLATLLLLLLGGALAHPDRIIFPNHACEDPPAVLLEVQGTLQRPLVRDSRTSPANCTWLILGSKEQTVTIRFQKLHLACGSERLTLRSPLQPLISLCEAPPSPLQLPGGNVTITYSYAGARAPMGQGFLLSYSQDWLMCLQEEFQCLNHRCVSAVQRCDGVDACGDGSDEAGCSSDPFPGLTPRPVPSLPCNVTLEDFYGVFSSPGYTHLASVSHPQSCHWLLDPHDGRRLAVRFTALDLGFGDAVHVYDGPGPPESSRLLRSLTHFSNGKAVTVETLSGQAVVSYHTVAWSNGRGFNATYHVRGYCLPWDRPCGLGSGLGAGEGLGERCYSEAQRCDGSWDCADGTDEEDCPGCPPGHFPCGAAGTSGATACYLPADRCNYQTFCADGADERRCRHCQPGNFRCRDEKCVYETWVCDGQPDCADGSDEWDCSYVLPRKVITAAVIGSLVCGLLLVIALGCTCKLYAIRTQEYSIFAPLSRMEAEIVQQQAPPSYGQLIAQGAIPPVEDFPTENPNDNSVLGNLRSLLQILRQDMTPGGGPGARRRQRGRLMRRL

SEQ ID NO: 47218 - protein, 458 aa, Homo sapiens
  Payload ID: 9563
  Gene Symbol: LRP10
  Gene Name: low density lipoprotein receptor-related protein 10
  ENSP ID: ENSP00000447977
  MOD_RES (1)..(1): Any amino acid
XAPPSPLQLPGGNVTITYSYAGARAPMGQGFLLSYSQDWLMCLQEEFQCLNHRCVSAVQRCDGVDACGDGSDEAGCSSDPFPGLTPRPVPSLPCNVTLEDFYGVFSSPGYTHLASVSHPQSCHWLLDPHDGRRLAVRFTALDLGFGDAVHVYDGPGPPESSRLLRSLTHFSNGKAVTVETLSGQAVVSYHTVAWSNGRGFNATYHVRGYCLPWDRPCGLGSGLGAGEGLGERCYSEAQRCDGSWDCADGTDEEDCPGCPPGHFPCGAAGTSGATACYLPADRCNYQTFCADGADERRCRHCQPGNFRCRDEKCVYETWVCDGQPDCADGSDEWDCSYVLPRKVITAAVIGSLVCGLLLVIALGCTCKLYAIRTQEYSIFAPLSRMEAEIVQQQAPPSYGQLIAQGAIPPVEDFPTENPNDNSVLGNLRSLLQILRQDMTPGGGPGARRRQRGRLMRRL

SEQ ID NO: 47219 - protein, 500 aa, Homo sapiens
  Payload ID: 9564
  Gene Symbol: LRP11
  Gene Name: low density lipoprotein receptor-related protein 11
  Uniprot ID: Q86VZ4
  ENSP ID: ENSP00000239367
MASVAQESAGSQRRLPPRHGALRGLLLLCLWLPSGRAALPPAAPLSELHAQLSGVEQLLEEFRRQLQQERPQEELELELRAGGGPQEDCPGPGSGGYSAMPDAIIRTKDSLAAGASFLRAPAAVRGWRQCVAACCSEPRCSVAVVELPRRPAPPAAVLGCYLFNCTARGRNVCKFALHSGYSSYSLSRAPDGAALATARASPRQEKDAPPLSKAGQDVVLHLPTDGVVLDGRESTDDHAIVQYEWALLQGDPSVDMKVPQSGTLKLSHLQEGTYTFQLTVTDTAGQRSSDNVSVTVLRAAYSTGGCLHTCSRYHFFCDDGCCIDITLACDGVQQCPDGSDEDFCQNLGLDRKMVTHTAASPALPRTTGPSEDAGGDSLVEKSQKATAPNKPPALSNTEKRNHSAFWGPESQIIPVMPDSSSSGKNRKEESYIFESKGDGGGGEHPAPETGAVLPLALGLAITALLLLMVACRLRLVKQKLKKARPITSEESDYLINGMYL

SEQ ID NO: 47220 - protein, 325 aa, Homo sapiens
  Payload ID: 9564
  Gene Symbol: LRP11
  Gene Name: low density lipoprotein receptor-related protein 11
  ENSP ID: ENSP00000356338
MASVAQESAGSQRRLPPRHGALRGLLLLCLWLPSGRAALPPAAPLSELHAQLSGVEQLLEEFRRQLQQERPQEELELELRAGGGPQEDCPGPGSGGYSAMPDAIIRTKDSLAAGASFLRAPAAVRGWRQCVAACCSEPRCSVAVVELPRRPAPPAAVLGCYLFNCTARGRNVCKFALHSGYSSYSLSRAPDGAALATARASPRQEKDAPPLSKAGQDVVLHLPTDGVVLDGRESTDDHAIVQYEWALLQGDPSVDMKVPQSGTLKLSHLQEGTYTFQLTVTDTAGQRSSDNVSVTVLRAAYSTGDGWSICCICSKREAKEFSETS

SEQ ID NO: 47221 - protein, 859 aa, Homo sapiens
  Payload ID: 9565
  Gene Symbol: LRP12
  Gene Name: low density lipoprotein receptor-related protein 12
  Uniprot ID: Q9Y561
  ENSP ID: ENSP00000276654
MACRWSTKESPRWRSALLLLFLAGVYGNGALAEHSENVHISGVSTACGETPEQIRAPSGIITSPGWPSEYPAKINCSWFIRANPGEIITISFQDFDIQGSRRCNLDWLTIETYKNIESYRACGSTIPPPYISSQDHIWIRFHSDDNISRKGFRLAYFSGKSEEPNCACDQFRCGNGKCIPEAWKCNNMDECGDSSDEEICAKEANPPTAAAFQPCAYNQFQCLSRFTKVYTCLPESLKCDGNIDCLDLGDEIDCDVPTCGQWLKYFYGTFNSPNYPDFYPPGSNCTWLIDTGDHRKVILRFTDFKLDGTGYGDYVKIYDGLEENPHKLLRVLTAFDSHAPLTVVSSSGQIRVHFCADKVNAARGFNATYQVDGFCLPWEIPCGGNWGCYTEQQRCDGYWHCPNGRDETNCTMCQKEEFPCSRNGVCYPRSDRCNYQNHCPNGSDEKNCFFCQPGNFHCKNNRCVFESWVCDSQDDCGDGSDEENCPVIVPTRVITAAVIGSLICGLLLVIALGCTCKLYSLRMFERRSFETQLSRVEAELLRREAPPSYGQLIAQGLIPPVEDFPVCSPNQASVLENLRLAVRSQLGFTSVRLPMAGRSSNIWNRIFNFARSRHSGSLALVSADGDEVVPSQSTSREPERNHTHRSLFSVESDDTDTENERRDMAGASGGVAAPLPQKVPPTTAVEATVGACASSSTQSTRGGHADNGRDVTSVEPPSVSPARHQLTSALSRMTQGLRWVRFTLGRSSSLSQNQSPLRQLDNGVSGREDDDDVEMLIPISDGSSDFDVNDCSRPLLDLASDQGQGLRQPYNATNPGVRPSNRDGPCERCGIVHTAQIPDTCLEVTLKNETSDDEALLLC

SEQ ID NO: 47222 - protein, 840 aa, Homo sapiens
  Payload ID: 9565
  Gene Symbol: LRP12
  Gene Name: low density lipoprotein receptor-related protein 12
  Uniprot ID: Q9Y561
  ENSP ID: ENSP00000399148
MACRWSTKESPRWRSALLLLFLAGVYACGETPEQIRAPSGIITSPGWPSEYPAKINCSWFIRANPGEIITISFQDFDIQGSRRCNLDWLTIETYKNIESYRACGSTIPPPYISSQDHIWIRFHSDDNISRKGFRLAYFSGKSEEPNCACDQFRCGNGKCIPEAWKCNNMDECGDSSDEEICAKEANPPTAAAFQPCAYNQFQCLSRFTKVYTCLPESLKCDGNIDCLDLGDEIDCDVPTCGQWLKYFYGTFNSPNYPDFYPPGSNCTWLIDTGDHRKVILRFTDFKLDGTGYGDYVKIYDGLEENPHKLLRVLTAFDSHAPLTVVSSSGQIRVHFCADKVNAARGFNATYQVDGFCLPWEIPCGGNWGCYTEQQRCDGYWHCPNGRDETNCTMCQKEEFPCSRNGVCYPRSDRCNYQNHCPNGSDEKNCFFCQPGNFHCKNNRCVFESWVCDSQDDCGDGSDEENCPVIVPTRVITAAVIGSLICGLLLVIALGCTCKLYSLRMFERRSFETQLSRVEAELLRREAPPSYGQLIAQGLIPPVEDFPVCSPNQASVLENLRLAVRSQLGFTSVRLPMAGRSSNIWNRIFNFARSRHSGSLALVSADGDEVVPSQSTSREPERNHTHRSLFSVESDDTDTENERRDMAGASGGVAAPLPQKVPPTTAVEATVGACASSSTQSTRGGHADNGRDVTSVEPPSVSPARHQLTSALSRMTQGLRWVRFTLGRSSSLSQNQSPLRQLDNGVSGREDDDDVEMLIPISDGSSDFDVNDCSRPLLDLASDQGQGLRQPYNATNPGVRPSNRDGPCERCGIVHTAQIPDTCLEVTLKNETSDDEALLLC

SEQ ID NO: 47223 - protein, 200 aa, Homo sapiens
  Payload ID: 9565
  Gene Symbol: LRP12
  Gene Name: low density lipoprotein receptor-related protein 12
  ENSP ID: ENSP00000429305
MCQKEEFPCSRNGVCYPRSDRCNYQNHCPNGSDEKNCFFCQPGNFHCKNNRCVFESWVCDSQDDCGDGSDEENCPVIVPTRVITAAVIGSLICGLLLVIALGCTCKLYSLRMFERRSFETQLSRVEAELLRREAPPSYGQLIAQGLIPPVEDFPVCSPNQASVLENLRLAVRSQLGFTSVRLPMAGRSSNIWNRIFNFAR

SEQ ID NO: 47224 - protein, 4599 aa, Homo sapiens
  Payload ID: 9566
  Gene Symbol: LRP1B
  Gene Name: low density lipoprotein receptor-related protein 1B
  Uniprot ID: Q9NZR2
  ENSP ID: ENSP00000374135
MSEFLLALLTLSGLLPIARVLTVGADRDQQLCDPGEFLCHDHVTCVSQSWLCDGDPDCPDDSDESLDTCPEEVEIKCPLNHIACLGTNKCVHLSQLCNGVLDCPDGYDEGVHCQELLSNCQQLNCQYKCTMVRNSTRCYCEDGFEITEDGRSCKDQDECAVYGTCSQTCRNTHGSYTCSCVEGYLMQPDNRSCKAKIEPTDRPPILLIANFETIEVFYLNGSKMATLSSVNGNEIHTLDFIYNEDMICWIESRESSNQLKCIQITKAGGLTDEWTINILQSFHNVQQMAIDWLTRNLYFVDHVGDRIFVCNSNGSVCVTLIDLELHNPKAIAVDPIAGKLFFTDYGNVAKVERCDMDGMNRTRIIDSKTEQPAALALDLVNKLVYWVDLYLDYVGVVDYQGKNRHTVIQGRQVRHLYGITVFEDYLYATNSDNYNIVRINRFNGTDIHSLIKIENAWGIRIYQKRTQPTVRSHACEVDPYGMPGGCSHICLLSSSYKTRTCRCRTGFNLGSDGRSCKRPKNELFLFYGKGRPGIVRGMDLNTKIADEYMIPIENLVNPRALDFHAETNYIYFADTTSFLIGRQKIDGTERETILKDDLDNVEGIAVDWIGNNLYWTNDGHRKTINVARLEKASQSRKTLLEGEMSHPRGIVVDPVNGWMYWTDWEEDEIDDSVGRIEKAWMDGFNRQIFVTSKMLWPNGLTLDFHTNTLYWCDAYYDHIEKVFLNGTHRKIVYSGRELNHPFGLSHHGNYVFWTDYMNGSIFQLDLITSEVTLLRHERPPLFGLQIYDPRKQQGDNMCRVNNGGCSTLCLAIPGGRVCACADNQLLDENGTTCTFNPGEALPHICKAGEFRCKNRHCIQARWKCDGDDDCLDGSDEDSVNCFNHSCPDDQFKCQNNRCIPKRWLCDGANDCGSNEDESNQTCTARTCQVDQFSCGNGRCIPRAWLCDREDDCGDQTDEMASCEFPTCEPLTQFVCKSGRCISSKWHCDSDDDCGDGSDEVGCVHSCFDNQFRCSSGRCIPGHWACDGDNDCGDFSDEAQINCTKEEIHSPAGCNGNEFQCHPDGNCVPDLWRCDGEKDCEDGSDEKGCNGTIRLCDHKTKFSCWSTGRCINKAWVCDGDIDCEDQSDEDDCDSFLCGPPKHPCANDTSVCLQPEKLCNGKKDCPDGSDEGYLCDECSLNNGGCSNHCSVVPGRGIVCSCPEGLQLNKDNKTCEIVDYCSNHLKCSQVCEQHKHTVKCSCYEGWKLDVDGESCTSVDPFEAFIIFSIRHEIRRIDLHKRDYSLLVPGLRNTIALDFHFNQSLLYWTDVVEDRIYRGKLSESGGVSAIEVVVEHGLATPEGLTVDWIAGNIYWIDSNLDQIEVAKLDGSLRTTLIAGAMEHPRAIALDPRYGILFWTDWDANFPRIESASMSGAGRKTIYKDMKTGAWPNGLTVDHFEKRIVWTDARSDAIYSALYDGTNMIEIIRGHEYLSHPFAVSLYGSEVYWTDWRTNTLSKANKWTGQNVSVIQKTSAQPFDLQIYHPSRQPQAPNPCAANDGKGPCSHMCLINHNRSAACACPHLMKLSSDKKTCYEMKKFLLYARRSEIRGVDIDNPYFNFITAFTVPDIDDVTVIDFDASEERLYWTDIKTQTIKRAFINGTGLETVISRDIQSIRGLAVDWVSRNLYWISSEFDETQINVARLDGSLKTSIIHGIDKPQCLAAHPVRGKLYWTDGNTINMANMDGSNSKILFQNQKEPVGLSIDYVENKLYWISSGNGTINRCNLDGGNLEVIESMKEELTKATALTIMDKKLWWADQNLAQLGTCSKRDGRNPTILRNKTSGVVHMKVYDKEAQQGSNSCQLNNGGCSQLCLPTSETTRTCMCTVGYYLQKNRMSCQGIESFLMYSVHEGIRGIPLEPSDKMDALMPISGTSFAVGIDFHAENDTIYWTDMGFNKISRAKRDQTWKEDIITNGLGRVEGIAVDWIAGNIYWTDHGFNLIEVARLNGSFRYVIISQGLDQPRSIAVHPEKGLLFWTEWGQMPCIGKARLDGSEKVVLVSMGIAWPNGISIDYEENKLYWCDARTDKIERIDLETGGNREMVLSGSNVDMFSVAVFGAYIYWSDRAHANGSVRRGHKNDATETITMRTGLGVNLKEVKIFNRVREKGTNVCARDNGGCKQLCLYRGNSRRTCACAHGYLAEDGVTCLRHEGYLLYSGRTILKSIHLSDETNLNSPIRPYENPRYFKNVIALAFDYNQRRKGTNRIFYSDAHFGNIQLIKDNWEDRQVIVENVGSVEGLAYHRAWDTLYWTSSTTSSITRHTVDQTRPGAFDREAVITMSEDDHPHVLALDECQNLMFWTNWNEQHPSIMRSTLTGKNAQVVVSTDILTPNGLTIDYRAEKLYFSDGSLGKIERCEYDGSQRHVIVKSGPGTFLSLAVYDNYIFWSDWGRRAILRSNKYTGGDTKILRSDIPHQPMGIIAVANDTNSCELSPCALLNGGCHDLCLLTPNGRVNCSCRGDRILLEDNRCVTKNSSCNAYSEFECGNGECIDYQLTCDGIPHCKDKSDEKLLYCENRSCRRGFKPCYNRRCIPHGKLCDGENDCGDNSDELDCKVSTCATVEFRCADGTCIPRSARCNQNIDCADASDEKNCNNTDCTHFYKLGVKTTGFIRCNSTSLCVLPTWICDGSNDCGDYSDELKCPVQNKHKCEENYFSCPSGRCILNTWICDGQKDCEDGRDEFHCDSSCSWNQFACSAQKCISKHWICDGEDDCGDGLDESDSICGAITCAADMFSCQGSRACVPRHWLCDGERDCPDGSDELSTAGCAPNNTCDENAFMCHNKVCIPKQFVCDHDDDCGDGSDESPQCGYRQCGTEEFSCADGRCLLNTQWQCDGDFDCPDHSDEAPLNPKCKSAEQSCNSSFFMCKNGRCIPSGGLCDNKDDCGDGSDERNCHINECLSKKVSGCSQDCQDLPVSYKCKCWPGFQLKDDGKTCVDIDECSSGFPCSQQCINTYGTYKCLCTDGYEIQPDNPNGCKSLSDEEPFLILADHHEIRKISTDGSNYTLLKQGLNNVIAIDFDYREEFIYWIDSSRPNGSRINRMCLNGSDIKVVHNTAVPNALAVDWIGKNLYWSDTEKRIIEVSKLNGLYPTILVSKRLKFPRDLSLDPQAGYLYWIDCCEYPHIGRVGMDGTNQSVVIETKISRPMALTIDYVNRRLYWADENHIEFSNMDGSHRHKVPNQDIPGVIALTLFEDYIYWTDGKTKSLSRAHKTSGADRLSLIYSWHAITDIQVYHSYRQPDVSKHLCMINNGGCSHLCLLAPGKTHTCACPTNFYLAADNRTCLSNCTASQFRCKTDKCIPFWWKCDTVDDCGDGSDEPDDCPEFRCQPGRFQCGTGLCALPAFICDGENDCGDNSDELNCDTHVCLSGQFKCTKNQKCIPVNLRCNGQDDCGDEEDERDCPENSCSPDYFQCKTTKHCISKLWVCDEDPDCADASDEANCDKKTCGPHEFQCKNNNCIPDHWRCDSQNDCSDNSDEENCKPQTCTLKDFLCANGDCVSSRFWCDGDFDCADGSDERNCETSCSKDQFRCSNGQCIPAKWKCDGHEDCKYGEDEKSCEPASPTCSSREYICASDGCISASLKCNGEYDCADGSDEMDCVTECKEDQFRCKNKAHCIPIRWLCDGIHDCVDGSDEENCERGGNICRADEFLCNNSLCKLHFWVCDGEDDCGDNSDEAPDMCVKFLCPSTRPHRCRNNRICLQSEQMCNGIDECGDNSDEDHCGGKLTYKARPCKKDEFACSNKKCIPMDLQCDRLDDCGDGSDEQGCRIAPTEYTCEDNVNPCGDDAYCNQIKTSVFCRCKPGFQRNMKNRQCEDLNECLVFGTCSHQCINVEGSYKCVCDQNFQERNNTCIAEGSEDQVLYIANDTDILGFIYPFNYSGDHQQISHIEHNSRITGMDVYYQRDMIIWSTQFNPGGIFYKRIHGREKRQANSGLICPEFKRPRDIAVDWVAGNIYWTDHSRMHWFSYYTTHWTSLRYSINVGQLNGPNCTRLLTNMAGEPYAIAVNPKRGMMYWTVVGDHSHIEEAAMDGTLRRILVQKNLQRPTGLAVDYFSERIYWADFELSIIGSVLYDGSNSVVSVSSKQGLLHPHRIDIFEDYIYGAGPKNGVFRVQKFGHGSVEYLALNIDKTKGVLISHRYKQLDLPNPCLDLACEFLCLLNPSGATCVCPEGKYLINGTCNDDSLLDDSCKLTCENGGRCILNEKGDLRCHCWPSYSGERCEVNHCSNYCQNGGTCVPSVLGRPTCSCALGFTGPNCGKTVCEDFCQNGGTCIVTAGNQPYCHCQPEYTGDRCQYYVCHHYCVNSESCTIGDDGSVECVCPTRYEGPKCEVDKCVRCHGGHCIINKDSEDIFCNCTNGKIASSCQLCDGYCYNGGTCQLDPETNVPVCLCSTNWSGTQCERPAPKSSKSDHISTRSIAIIVPLVLLVTLITTLVIGLVLCKRKRRTKTIRRQPIINGGINVEIGNPSYNMYEVDHDHNDGGLLDPGFMIDPTKARYIGGGPSAFKLPHTAPPIYLNSDLKGPLTAGPTNYSNPVYAKLYMDGQNCRNSLGSVDERKELLPKKIEIGIRETVA

SEQ ID NO: 47225 - protein, 280 aa, Homo sapiens
  Payload ID: 9566
  Gene Symbol: LRP1B
  Gene Name: low density lipoprotein receptor-related protein 1B
  ENSP ID: ENSP00000393859
  MOD_RES (1)..(1): Any amino acid
XRPTCSCALGFTGPNCGKTVCEDFCQNGGTCIVTAGNQPYCHCQPEYTGDRCQYYVCHHYCVNSESCTIGDDGSVECVCPTRYEGPKCEVDKCVRCHGGHCIINKDSEDIFCNCTNGKIASSCQLCDGYCYNGGTCQLDPETNVPVCLCSVGFKSQRCDQKENPCDHYCQNEGICTLTAFNEPRCKCSTNWSGTQCERPAPKSSKSDHISTRSIAIIVPLVLLVTLITTLVIGLVLCKRKRRTKTIRRQPIINGGINVEIGNPSYNMYEVDHDHNDGGLL

SEQ ID NO: 47226 - protein, 781 aa, Homo sapiens
  Payload ID: 9566
  Gene Symbol: LRP1B
  Gene Name: low density lipoprotein receptor-related protein 1B
  ENSP ID: ENSP00000413239
MSEFLLALLTLSGLLPIARVLTVGADRDQQLCDPGEFLCHDHVTCVSQSWLCDGDPDCPDDSDESLDTSRTCQVDQFSCGNGRCIPRAWLCDREDDCGDQTDEMASCEFPTCEPLTQFVCKSGRCISSKWHCDSDDDCGDGSDEVGCVHSCFDNQFRCSSGRCIPGHWACDGDNDCGDFSDEAQINCTKEEIHSPAGCNGNEFQCHPDGNCVPDLWRCDGEKDCEDGSDEKGCNGTIRLCDHKTKFSCWSTGRCINKAWVCDGDIDCEDQSDEDDCDSFLCGPPKHPCANDTSVCLQPEKLCNGKKDCPDGSDEGYLCDECSLNNGGCSNHCSVVPGRGIVCSCPEGLQLNKDNKTCEIVDYCSNHLKCSQVCEQHKHTVKCSCYEGWKLDVDGESCTSVDPFEAFIIFSIRHEIRRIDLHKRDYSLLVPGLRNTIALDFHFNQSLLYWTDVVEDRIYRGKLSESGGVSAIEVVVEHGLATPEGLTVDWIAGNIYWIDSNLDQIEVAKLDGSLRTTLIAGAMEHPRAIALDPRYGILFWTDWDANFPRIESASMSGAGRKTIYKDMKTGAWPNGLTVDHFEKRIVWTDARSDAIYSALYDGTNMIEIIRGHEYLSHPFAVSLYGSEVYWTDWRTNTLSKANKWTGQNVSVIQKTSAQPFDLQIYHPSRQPQAPNPCAANDGKGPCSHMCLINHNRSAACACPHLMKLSSDKKTCYEMKKFLLYARRSEIRGVDIDNPYFNFITAFTVPDIDDVTVIDFDASEERLYWTDIKTQTIKRAFIN

SEQ ID NO: 47227 - protein, 798 aa, Homo sapiens
  Payload ID: 9566
  Gene Symbol: LRP1B
  Gene Name: low density lipoprotein receptor-related protein 1B
  ENSP ID: ENSP00000415052
  MOD_RES (1)..(1): Any amino acid
XSNKKCIPMDLQCDRLDDCGDGSDEQGCRIAPTEYTCEDNVNPCGDDAYCNQIKTSVFCRCKPGFQRNMKNRQCEDLNECLVFGTCSHQCINVEGSYKCVCDQNFQERNNTCIAEGSEDQVLYIANDTDILGFIYPFNYSGDHQQISHIEHNSRITGMDVYYQRDMIIWSTQFNPGGIFYKRIHGREKRQANSGLICPEFKRPRDIAVDWVAGNIYWTDHSRMHWFSYYTTHWTSLRYSINVGQLNGPNCTRLLTNMAGEPYAIAVNPKRGMMYWTVVGDHSHIEEAAMDGTLRRILVQKNLQRPTGLAVDYFSERIYWADFELSIIGSVLYDGSNSVVSVSSKQGLLHPHRIDIFEDYIYGAGPKNGVFRVQKFGHGSVEYLALNIDKTKGVLISHRYKQLDLPNPCLDLACEFLCLLNPSGATCVCPEGKYLINGTCNDDSLLDDSCKLTCENGGRCILNEKGDLRCHCWPSYSGERCEVNHCSNYCQNGGTCVPSVLGRPTCSCALGFTGPNCGKTVCEDFCQNGGTCIVTAGNQPYCHCQPEYTGDRCQYYVCHHYCVNSESCTIGDDGSVECVCPTRYEGPKCEVDKCVRCHGGHCIINKDSEDIFCNCTNGKIASSCQLCDGYCYNGGTCQLDPETNVPVCLCSTNWSGTQCERPAPKSSKSDHISTRSIAIIVPLVLLVTLITTLVIGLVLCKRKRRTKTIRRQPIINGGINVEIGNPSYNMYEVDHDHNDGGLLDPGFMIDPTKPTNYSNPVYAKLYMDGQNCRNSLGSVDERKELLPKKIEIGIRETVA

SEQ ID NO: 47228 - protein, 4406 aa, Homo sapiens
  Payload ID: 9566
  Gene Symbol: LRP1B
  Gene Name: low density lipoprotein receptor-related protein 1B
  ENSP ID: ENSP00000478868
ELLSNCQQLNCQYKCTMVRNSTRCYCEDGFEITEDGRSCKDQDECAVYGTCSQTCRNTHGSYTCSCVEGYLMQPDNRSCKAKIEPTDRPPILLIANFETIEVFYLNGSKMATLSSVNGNEIHTLDFIYNEDMICWIESRESSNQLKCIQITKAGGLTDEWTINILQSFHNVQQMAIDWLTRNLYFVDHVGDRIFVCNSNGSVCVTLIDLELHNPKAIAVDPIAGKLFFTDYGNVAKVERCDMDGMNRTRIIDSKTEQPAALALDLVNKLVYWVDLYLDYVGVVDYQGKNRHTVIQGRQVRHLYGITVFEDYLYATNSDNYNIVRINRFNGTDIHSLIKIENAWGIRIYQKRTQPTVRSHACEVDPYGMPGGCSHICLLSSSYKTRTCRCRTGFNLGSDGRSCKRPKNELFLFYGKGRPGIVRGMDLNTKIADEYMIPIENLVNPRALDFHAETNYIYFADTTSFLIGRQKIDGTERETILKDDLDNVEGIAVDWIGNNLYWTNDGHRKTINVARLEKASQSRKTLLEGEMSHPRGIVVDPVNGWMYWTDWEEDEIDDSVGRIEKAWMDGFNRQIFVTSKMLWPNGLTLDFHTNTLYWCDAYYDHIEKVFLNGTHRKIVYSGRELNHPFGLSHHGNYVFWTDYMNGSIFQLDLITSEVTLLRHERPPLFGLQIYDPRKQQGDNMCRVNNGGCSTLCLAIPGGRVCACADNQLLDENGTTCTFNPGEALPHICKAGEFRCKNRHCIQARWKCDGDDDCLDGSDEDSVNCFNHSCPDDQFKCQNNRCIPKRWLCDGANDCGSNEDESNQTCTARTCQVDQFSCGNGRCIPRAWLCDREDDCGDQTDEMASCEFPTCEPLTQFVCKSGRCISSKWHCDSDDDCGDGSDEVGCVHSCFDNQFRCSSGRCIPGHWACDGDNDCGDFSDEAQINCTKEEIHSPAGCNGNEFQCHPDGNCVPDLWRCDGEKDCEDGSDEKGCNGTIRLCDHKTKFSCWSTGRCINKAWVCDGDIDCEDQSDEDDCDSFLCGPPKHPCANDTSVCLQPEKLCNGKKDCPDGSDEGYLCDECSLNNGGCSNHCSVVPGRGIVCSCPEGLQLNKDNKTCEIVDYCSNHLKCSQVCEQHKHTVKCSCYEGWKLDVDGESCTSVDPFEAFIIFSIRHEIRRIDLHKRDYSLLVPGLRNTIALDFHFNQSLLYWTDVVEDRIYRGKLSESGGVSAIEVVVEHGLATPEGLTVDWIAGNIYWIDSNLDQIEVAKLDGSLRTTLIAGAMEHPRAIALDPRYGILFWTDWDANFPRIESASMSGAGRKTIYKDMKTGAWPNGLTVDHFEKRIVWTDARSDAIYSALYDGTNMIEIIRGHEYLSHPFAVSLYGSEVYWTDWRTNTLSKANKWTGQNVSVIQKTSAQPFDLQIYHPSRQPQAPNPCAANDGKGPCSHMCLINHNRSAACACPHLMKLSSDKKTCYEMKKFLLYARRSEIRGVDIDNPYFNFITAFTVPDIDDVTVIDFDASEERLYWTDIKTQTIKRAFINGTGLETVISRDIQSIRGLAVDWVSRNLYWISSEFDETQINVARLDGSLKTSIIHGIDKPQCLAAHPVRGKLYWTDGNTINMANMDGSNSKILFQNQKEPVGLSIDYVENKLYWISSGNGTINRCNLDGGNLEVIESMKEELTKATALTIMDKKLWWADQNLAQLGTCSKRDGRNPTILRNKTSGVVHMKVYDKEAQQGSNSCQLNNGGCSQLCLPTSETTRTCMCTVGYYLQKNRMSCQGIESFLMYSVHEGIRGIPLEPSDKMDALMPISGTSFAVGIDFHAENDTIYWTDMGFNKISRAKRDQTWKEDIITNGLGRVEGIAVDWIAGNIYWTDHGFNLIEVARLNGSFRYVIISQGLDQPRSIAVHPEKGLLFWTEWGQMPCIGKARLDGSEKVVLVSMGIAWPNGISIDYEENKLYWCDARTDKIERIDLETGGNREMVLSGSNVDMFSVAVFGAYIYWSDRAHANGSVRRGHKNDATETITMRTGLGVNLKEVKIFNRVREKGTNVCARDNGGCKQLCLYRGNSRRTCACAHGYLAEDGVTCLRHEGYLLYSGRTILKSIHLSDETNLNSPIRPYENPRYFKNVIALAFDYNQRRKGTNRIFYSDAHFGNIQLIKDNWEDRQVIVENVGSVEGLAYHRAWDTLYWTSSTTSSITRHTVDQTRPGAFDREAVITMSEDDHPHVLALDECQNLMFWTNWNEQHPSIMRSTLTGKNAQVVVSTDILTPNGLTIDYRAEKLYFSDGSLGKIERCEYDGSQRHVIVKSGPGTFLSLAVYDNYIFWSDWGRRAILRSNKYTGGDTKILRSDIPHQPMGIIAVANDTNSCELSPCALLNGGCHDLCLLTPNGRVNCSCRGDRILLEDNRCVTKNSSCNAYSEFECGNGECIDYQLTCDGIPHCKDKSDEKLLYCENRSCRRGFKPCYNRRCIPHGKLCDGENDCGDNSDELDCKVSTCATVEFRCADGTCIPRSARCNQNIDCADASDEKNCNNTDCTHFYKLGVKTTGFIRCNSTSLCVLPTWICDGSNDCGDYSDELKCPVQNKHKCEENYFSCPSGRCILNTWICDGQKDCEDGRDEFHCDSSCSWNQFACSAQKCISKHWICDGEDDCGDGLDESDSICGAITCAADMFSCQGSRACVPRHWLCDGERDCPDGSDELSTAGCAPNNTCDENAFMCHNKVCIPKQFVCDHDDDCGDGSDESPQCGYRQCGTEEFSCADGRCLLNTQWQCDGDFDCPDHSDEAPLNPKCKSAEQSCNSSFFMCKNGRCIPSGGLCDNKDDCGDGSDERNCHINECLSKKVSGCSQDCQDLPVSYKCKCWPGFQLKDDGKTCVDIDECSSGFPCSQQCINTYGTYKCLCTDGYEIQPDNPNGCKSLSDEEPFLILADHHEIRKISTDGSNYTLLKQGLNNVIAIDFDYREEFIYWIDSSRPNGSRINRMCLNGSDIKVVHNTAVPNALAVDWIGKNLYWSDTEKRIIEVSKLNGLYPTILVSKRLKFPRDLSLDPQAGYLYWIDCCEYPHIGRVGMDGTNQSVVIETKISRPMALTIDYVNRRLYWADENHIEFSNMDGSHRHKVPNQDIPGVIALTLFEDYIYWTDGKTKSLSRAHKTSGADRLSLIYSWHAITDIQVYHSYRQPDVSKHLCMINNGGCSHLCLLAPGKTHTCACPTNFYLAADNRTCLSNCTASQFRCKTDKCIPFWWKCDTVDDCGDGSDEPDDCPEFRCQPGRFQCGTGLCALPAFICDGENDCGDNSDELNCDTHVCLSGQFKCTKNQKCIPVNLRCNGQDDCGDEEDERDCPENSCSPDYFQCKTTKHCISKLWVCDEDPDCADASDEANCDKKTCGPHEFQCKNNNCIPDHWRCDSQNDCSDNSDEENCKPQTCTLKDFLCANGDCVSSRFWCDGDFDCADGSDERNCETSCSKDQFRCSNGQCIPAKWKCDGHEDCKYGEDEKSCEPASPTCSSREYICASDGCISASLKCNGEYDCADGSDEMDCVTECKEDQFRCKNKAHCIPIRWLCDGIHDCVDGSDEENCERGGNICRADEFLCNNSLCKLHFWVCDGEDDCGDNSDEAPDMCVKFLCPSTRPHRCRNNRICLQSEQMCNGIDECGDNSDEDHCGGKLTYKARPCKKDEFACSNKKCIPMDLQCDRLDDCGDGSDEQGCRIAPTEYTCEDNVNPCGDDAYCNQIKTSVFCRCKPGFQRNMKNRQCEDLNECLVFGTCSHQCINVEGSYKCVCDQNFQERNNTCIAEGSEDQVLYIANDTDILGFIYPFNYSGDHQQISHIEHNSRITGMDVYYQRDMIIWSTQFNPGGIFYKRIHGREKRQANSGLICPEFKRPRDIAVDWVAGNIYWTDHSRMHWFSYYTTHWTSLRYSINVGQLNGPNCTRLLTNMAGEPYAIAVNPKRGMMYWTVVGDHSHIEEAAMDGTLRRILVQKNLQRPTGLAVDYFSERIYWADFELSIIGSVLYDGSNSVVSVSSKQGLLHPHRIDIFEDYIYGAGPKNGVFRVQKFGHGSVEYLALNIDKTKGVLISHRYKQLDLPNPCLDLACEFLCLLNPSGATCVCPEGKYLINGTCNDDSLLDDSCKLTCENGGRCILNEKGDLRCHCWPSYSGERCEVNHCSNYCQNGGTCVPSVLGRPTCSCALGFTGPNCGKTVCEDFCQNGGTCIVTAGNQPYCHCQPEYTGDRCQYYVCHHYCVNSESCTIGDDGSVECVCPTRYEGPKCEVDKCVRCHGGHCIINKDSEDIFCNCTNGKIASSCQLCDGYCYNGGTCQLDPETNVPVCLCSTNWSGTQCERPAPKSSKSDHISTRSIAIIVPLVLLVTLITTLVIGLVLCKRKRRTKTIRRQPIINGGINVEIGNPSYNMYEVDHDHNDGGLLDPGFMIDPTK

SEQ ID NO: 47229 - protein, 4655 aa, Homo sapiens
  Payload ID: 9567
  Gene Symbol: LRP2
  Gene Name: low density lipoprotein receptor-related protein 2
  Uniprot ID: P98164
  ENSP ID: ENSP00000263816
MDRGPAAVACTLLLALVACLAPASGQECDSAHFRCGSGHCIPADWRCDGTKDCSDDADEIGCAVVTCQQGYFKCQSEGQCIPNSWVCDQDQDCDDGSDERQDCSQSTCSSHQITCSNGQCIPSEYRCDHVRDCPDGADENDCQYPTCEQLTCDNGACYNTSQKCDWKVDCRDSSDEINCTEICLHNEFSCGNGECIPRAYVCDHDNDCQDGSDEHACNYPTCGGYQFTCPSGRCIYQNWVCDGEDDCKDNGDEDGCESGPHDVHKCSPREWSCPESGRCISIYKVCDGILDCPGREDENNTSTGKYCSMTLCSALNCQYQCHETPYGGACFCPPGYIINHNDSRTCVEFDDCQIWGICDQKCESRPGRHLCHCEEGYILERGQYCKANDSFGEASIIFSNGRDLLIGDIHGRSFRILVESQNRGVAVGVAFHYHLQRVFWTDTVQNKVFSVDINGLNIQEVLNVSVETPENLAVDWVNNKIYLVETKVNRIDMVNLDGSYRVTLITENLGHPRGIAVDPTVGYLFFSDWESLSGEPKLERAFMDGSNRKDLVKTKLGWPAGVTLDMISKRVYWVDSRFDYIETVTYDGIQRKTVVHGGSLIPHPFGVSLFEGQVFFTDWTKMAVLKANKFTETNPQVYYQASLRPYGVTVYHSLRQPYATNPCKDNNGGCEQVCVLSHRTDNDGLGFRCKCTFGFQLDTDERHCIAVQNFLIFSSQVAIRGIPFTLSTQEDVMVPVSGNPSFFVGIDFDAQDSTIFFSDMSKHMIFKQKIDGTGREILAANRVENVESLAFDWISKNLYWTDSHYKSISVMRLADKTRRTVVQYLNNPRSVVVHPFAGYLFFTDWFRPAKIMRAWSDGSHLLPVINTTLGWPNGLAIDWAASRLYWVDAYFDKIEHSTFDGLDRRRLGHIEQMTHPFGLAIFGEHLFFTDWRLGAIIRVRKADGGEMTVIRSGIAYILHLKSYDVNIQTGSNACNQPTHPNGDCSHFCFPVPNFQRVCGCPYGMRLASNHLTCEGDPTNEPPTEQCGLFSFPCKNGRCVPNYYLCDGVDDCHDNSDEQLCGTLNNTCSSSAFTCGHGECIPAHWRCDKRNDCVDGSDEHNCPTHAPASCLDTQYTCDNHQCISKNWVCDTDNDCGDGSDEKNCNSTETCQPSQFNCPNHRCIDLSFVCDGDKDCVDGSDEVGCVLNCTASQFKCASGDKCIGVTNRCDGVFDCSDNSDEAGCPTRPPGMCHSDEFQCQEDGICIPNFWECDGHPDCLYGSDEHNACVPKTCPSSYFHCDNGNCIHRAWLCDRDNDCGDMSDEKDCPTQPFRCPSWQWQCLGHNICVNLSVVCDGIFDCPNGTDESPLCNGNSCSDFNGGCTHECVQEPFGAKCLCPLGFLLANDSKTCEDIDECDILGSCSQHCYNMRGSFRCSCDTGYMLESDGRTCKVTASESLLLLVASQNKIIADSVTSQVHNIYSLVENGSYIVAVDFDSISGRIFWSDATQGKTWSAFQNGTDRRVVFDSSIILTETIAIDWVGRNLYWTDYALETIEVSKIDGSHRTVLISKNLTNPRGLALDPRMNEHLLFWSDWGHHPRIERASMDGSMRTVIVQDKIFWPCGLTIDYPNRLLYFMDSYLDYMDFCDYNGHHRRQVIASDLIIRHPYALTLFEDSVYWTDRATRRVMRANKWHGGNQSVVMYNIQWPLGIVAVHPSKQPNSVNPCAFSRCSHLCLLSSQGPHFYSCVCPSGWSLSPDLLNCLRDDQPFLITVRQHIIFGISLNPEVKSNDAMVPIAGIQNGLDVEFDDAEQYIYWVENPGEIHRVKTDGTNRTVFASISMVGPSMNLALDWISRNLYSTNPRTQSIEVLTLHGDIRYRKTLIANDGTALGVGFPIGITVDPARGKLYWSDQGTDSGVPAKIASANMDGTSVKTLFTGNLEHLECVTLDIEEQKLYWAVTGRGVIERGNVDGTDRMILVHQLSHPWGIAVHDSFLYYTDEQYEVIERVDKATGANKIVLRDNVPNLRGLQVYHRRNAAESSNGCSNNMNACQQICLPVPGGLFSCACATGFKLNPDNRSCSPYNSFIVVSMLSAIRGFSLELSDHSETMVPVAGQGRNALHVDVDVSSGFIYWCDFSSSVASDNAIRRIKPDGSSLMNIVTHGIGENGVRGIAVDWVAGNLYFTNAFVSETLIEVLRINTTYRRVLLKVTVDMPRHIVVDPKNRYLFWADYGQRPKIERSFLDCTNRTVLVSEGIVTPRGLAVDRSDGYVYWVDDSLDIIARIRINGENSEVIRYGSRYPTPYGITVFENSIIWVDRNLKKIFQASKEPENTEPPTVIRDNINWLRDVTIFDKQVQPRSPAEVNNNPCLENNGGCSHLCFALPGLHTPKCDCAFGTLQSDGKNCAISTENFLIFALSNSLRSLHLDPENHSPPFQTINVERTVMSLDYDSVSDRIYFTQNLASGVGQISYATLSSGIHTPTVIASGIGTADGIAFDWITRRIYYSDYLNQMINSMAEDGSNRTVIARVPKPRAIVLDPCQGYLYWADWDTHAKIERATLGGNFRVPIVNSSLVMPSGLTLDYEEDLLYWVDASLQRIERSTLTGVDREVIVNAAVHAFGLTLYGQYIYWTDLYTQRIYRANKYDGSGQIAMTTNLLSQPRGINTVVKNQKQQCNNPCEQFNGGCSHICAPGPNGAECQCPHEGNWYLANNRKHCIVDNGERCGASSFTCSNGRCISEEWKCDNDNDCGDGSDEMESVCALHTCSPTAFTCANGRCVQYSYRCDYYNDCGDGSDEAGCLFRDCNATTEFMCNNRRCIPREFICNGVDNCHDNNTSDEKNCPDRTCQSGYTKCHNSNICIPRVYLCDGDNDCGDNSDENPTYCTTHTCSSSEFQCASGRCIPQHWYCDQETDCFDASDEPASCGHSERTCLADEFKCDGGRCIPSEWICDGDNDCGDMSDEDKRHQCQNQNCSDSEFLCVNDRPPDRRCIPQSWVCDGDVDCTDGYDENQNCTRRTCSENEFTCGYGLCIPKIFRCDRHNDCGDYSDERGCLYQTCQQNQFTCQNGRCISKTFVCDEDNDCGDGSDELMHLCHTPEPTCPPHEFKCDNGRCIEMMKLCNHLDDCLDNSDEKGCGINECHDPSISGCDHNCTDTLTSFYCSCRPGYKLMSDKRTCVDIDECTEMPFVCSQKCENVIGSYICKCAPGYLREPDGKTCRQNSNIEPYLIFSNRYYLRNLTIDGYFYSLILEGLDNVVALDFDRVEKRLYWIDTQRQVIERMFLNKTNKETIINHRLPAAESLAVDWVSRKLYWLDARLDGLFVSDLNGGHRRMLAQHCVDANNTFCFDNPRGLALHPQYGYLYWADWGHRAYIGRVGMDGTNKSVIISTKLEWPNGITIDYTNDLLYWADAHLGYIEYSDLEGHHRHTVYDGALPHPFAITIFEDTIYWTDWNTRTVEKGNKYDGSNRQTLVNTTHRPFDIHVYHPYRQPIVSNPCGTNNGGCSHLCLIKPGGKGFTCECPDDFRTLQLSGSTYCMPMCSSTQFLCANNEKCIPIWWKCDGQKDCSDGSDELALCPQRFCRLGQFQCSDGNCTSPQTLCNAHQNCPDGSDEDRLLCENHHCDSNEWQCANKRCIPESWQCDTFNDCEDNSDEDSSHCASRTCRPGQFRCANGRCIPQAWKCDVDNDCGDHSDEPIEECMSSAHLCDNFTEFSCKTNYRCIPKWAVCNGVDDCRDNSDEQGCEERTCHPVGDFRCKNHHCIPLRWQCDGQNDCGDNSDEENCAPRECTESEFRCVNQQCIPSRWICDHYNDCGDNSDERDCEMRTCHPEYFQCTSGHCVHSELKCDGSADCLDASDEADCPTRFPDGAYCQATMFECKNHVCIPPYWKCDGDDDCGDGSDEELHLCLDVPCNSPNRFRCDNNRCIYSHEVCNGVDDCGDGTDETEEHCRKPTPKPCTEYEYKCGNGHCIPHDNVCDDADDCGDWSDELGCNKGKERTCAENICEQNCTQLNEGGFICSCTAGFETNVFDRTSCLDINECEQFGTCPQHCRNTKGSYECVCADGFTSMSDRPGKRCAAEGSSPLLLLPDNVRIRKYNLSSERFSEYLQDEEYIQAVDYDWDPKDIGLSVVYYTVRGEGSRFGAIKRAYIPNFESGRNNLVQEVDLKLKYVMQPDGIAVDWVGRHIYWSDVKNKRIEVAKLDGRYRKWLISTDLDQPAAIAVNPKLGLMFWTDWGKEPKIESAWMNGEDRNILVFEDLGWPTGLSIDYLNNDRIYWSDFKEDVIETIKYDGTDRRVIAKEAMNPYSLDIFEDQLYWISKEKGEVWKQNKFGQGKKEKTLVVNPWLTQVRIFHQLRYNKSVPNLCKQICSHLCLLRPGGYSCACPQGSSFIEGSTTECDAAIELPINLPPPCRCMHGGNCYFDETDLPKCKCPSGYTGKYCEMAFSKGISPGTTAVAVLLTILLIVVIGALAIAGFFHYRRTGSLLPALPKLPSLSSLVKPSENGNGVTFRSGADLNMDIGVSGFGPETAIDRSMAMSEDFVMEMGKQPIIFENPMYSARDSAVKVVQPIQVTVSENVDNKNYGSPINPSEIVPETNPTSPAADGTQVTKWNLFKRKSKQTTNFENPIYAQMENEQKESVAATPPPSPSLPAKPKPPSRRDPTPTYSATEDTFKDTANLVKEDSEV

SEQ ID NO: 47230 - protein, 1225 aa, Homo sapiens
  Payload ID: 9567
  Gene Symbol: LRP2
  Gene Name: low density lipoprotein receptor-related protein 2
  ENSP ID: ENSP00000409813
MDRGPAAVACTLLLALVACLAPASGQECDSAHFRCGSGHCIPADWRCDGTKDCSDDADEIGCAVVTCQQGYFKCQSEGQCIPNSWVCDQDQDCDDGSDERQDCSQSTCSSHQITCSNGQCIPSEYRCDHVRDCPDGADENDCQYPTCEQLTCDNGACYNTSQKCDWKVDCRDSSDEINCTEICLHNEFSCGNGECIPRAYVCDHDNDCQDGSDEHACNYPTCGGYQFTCPSGRCIYQNWVCDGEDDCKDNGDEDGCESGPHDVHKCSPREWSCPESGRCISIYKVCDGILDCPGREDENNTSTGKYCSMTLCSALNCQYQCHETPYGGACFCPPGYIINHNDSRTCVEFDDCQIWGICDQKCESRPGRHLCHCEEGYILERGQYCKANDSFGEASIIFSNGRDLLIGDIHGRSFRILVESQNRGVAVGVAFHYHLQRVFWTDTVQNKVFSVDINGLNIQEVLNVSVETPENLAVDWVNNKIYLVETKVNRIDMVNLDGSYRVTLITENLGHPRGIAVDPTVGKTVVHGGSLIPHPFGVSLFEGQVFFTDWTKMAVLKANKFTETNPQVYYQASLRPYGVTVYHSLRQPYATNPCKDNNGGCEQVCVLSHRTDNDGLGFRCKCTFGFQLDTDERHCIGREILAANRVENVESLAFDWISKNLYWTDSHYKSISVMRLADKTRRTVVQYLNNPRSVVVHPFAGYLFFTDWFRPAKIMRAWSDGSHLLPVINTTLGWPNGLAIDWAASRLYWVDAYFDKIEHSTFDGLDRRRLGHIEQMTHPFGLAIFGEHLFFTDWRLGAIIRVRKADGGEMTVIRSGIAYILHLKSYDVNIQTGSNACNQPTHPNGDCSHFCFPVPNFQRVCGCPYGMRLASNHLTCEGDPTNEPPTEQCGLFSFPCKNGRCVPNYYLCDGVDDCHDNSDEQLCGTLNNTCSSSAFTCGHGECIPAHWRCDKRNDCVDGSDEHNCPTHAPASCLDTQYTCDNHQCISKNWVCDTDNDCGDGSDEKNCNSTETCQPSQFNCPNHRCIDLSFVCDGDKDCVDGSDEVGCVLNCTASQFKCASGDKCIGVTNRCDGVFDCSDNSDEAGCPTRPPGMCHSDEFQCQEDGICIPNFWECDGHPDCLYGSDEHNACVPKTCPSSYFHCDNGNCIHRAWLCDRDNDCGDMSDEKDCPTQPFRCPSWQWQCLGHNICVNLSVVCDGIFDCPNGTDESPLCSKFPDHSLLAINSF

SEQ ID NO: 47231 - protein, 770 aa, Homo sapiens
  Payload ID: 9568
  Gene Symbol: LRP3
  Gene Name: low density lipoprotein receptor-related protein 3
  Uniprot ID: O75074
  ENSP ID: ENSP00000253193
MEKRAAAGLEGAPGARAQLAVVCLVNIFLTGRLSSAVPALAACSGKLEQHTERRGVIYSPAWPLNYPPGTNCSWYIQGDRGDMITISFRNFDVEESHQCSLDWLLLGPAAPPRQEAFRLCGSAIPPAFISARDHVWIFFHSDASSSGQAQGFRLSYIRGKLGQASCQADEFRCDNGKCLPGPWQCNTVDECGDGSDEGNCSAPASEPPGSLCPGGTFPCSGARSTRCLPVERRCDGLQDCGDGSDEAGCPDLACGRRLGSFYGSFASPDLFGAARGPSDLHCTWLVDTQDSRRVLLQLELRLGYDDYVQVYEGLGERGDRLLQTLSYRSNHRPVSLEAAQGRLTVAYHARARSAGHGFNATYQVKGYCLPWEQPCGSSSDSDGGSLGDQGCFSEPQRCDGWWHCASGRDEQGCPACPPDQYPCEGGSGLCYTPADRCNNQKSCPDGADEKNCFSCQPGTFHCGTNLCIFETWRCDGQEDCQDGSDEHGCLAAVPRKVITAALIGSLVCGLLLVIALGCAFKLYSLRTQEYRAFETQMTRLEAEFVRREAPPSYGQLIAQGLIPPVEDFPVYSASQASVLQNLRTAMRRQMRRHASRRGPSRRRLGRLWNRLFHRPRAPRGQIPLLTAARPSQTVLGDGFLQPAPGAAPDPPAPLMDTGSTRAAGDRPPSAPGRAPEVGPSGPPLPSGLRDPECRPVDKDRKVCREPLVDGPAPADAPREPCSAQDPHPQVSTASSTLGPHSPEPLGVCRNPPPPCSPMLEASDDEALLVC

SEQ ID NO: 47232 - protein, 91 aa, Homo sapiens
  Payload ID: 9568
  Gene Symbol: LRP3
  Gene Name: low density lipoprotein receptor-related protein 3
  ENSP ID: ENSP00000476735
MITISFRNFDVEESHQCSLDWLLLGPAAPPRQEAFRLCGSAIPPAFISARDHVWIFFHSDASSSGQAQGFRLSYIRGKLGQASCQADEFRC

SEQ ID NO: 47233 - protein, 1905 aa, Homo sapiens
  Payload ID: 9569
  Gene Symbol: LRP4
  Gene Name: low density lipoprotein receptor-related protein 4
  Uniprot ID: O75096
  ENSP ID: ENSP00000367888
MRRQWGALLLGALLCAHGLASSPECACGRSHFTCAVSALGECTCIPAQWQCDGDNDCGDHSDEDGCILPTCSPLDFHCDNGKCIRRSWVCDGDNDCEDDSDEQDCPPRECEEDEFPCQNGYCIRSLWHCDGDNDCGDNSDEQCDMRKCSDKEFRCSDGSCIAEHWYCDGDTDCKDGSDEENCPSAVPAPPCNLEEFQCAYGRCILDIYHCDGDDDCGDWSDESDCSSHQPCRSGEFMCDSGLCINAGWRCDGDADCDDQSDERNCTTSMCTAEQFRCHSGRCVRLSWRCDGEDDCADNSDEENCENTGSPQCALDQFLCWNGRCIGQRKLCNGVNDCGDNSDESPQQNCRPRTGEENCNVNNGGCAQKCQMVRGAVQCTCHTGYRLTEDGHTCQDVNECAEEGYCSQGCTNSEGAFQCWCETGYELRPDRRSCKALGPEPVLLFANRIDIRQVLPHRSEYTLLLNNLENAIALDFHHRRELVFWSDVTLDRILRANLNGSNVEEVVSTGLESPGGLAVDWVHDKLYWTDSGTSRIEVANLDGAHRKVLLWQNLEKPRAIALHPMEGTIYWTDWGNTPRIEASSMDGSGRRIIADTHLFWPNGLTIDYAGRRMYWVDAKHHVIERANLDGSHRKAVISQGLPHPFAITVFEDSLYWTDWHTKSINSANKFTGKNQEIIRNKLHFPMDIHTLHPQRQPAGKNRCGDNNGGCTHLCLPSGQNYTCACPTGFRKISSHACAQSLDKFLLFARRMDIRRISFDTEDLSDDVIPLADVRSAVALDWDSRDDHVYWTDVSTDTISRAKWDGTGQEVVVDTSLESPAGLAIDWVTNKLYWTDAGTDRIEVANTDGSMRTVLIWENLDRPRDIVVEPMGGYMYWTDWGASPKIERAGMDASGRQVIISSNLTWPNGLAIDYGSQRLYWADAGMKTIEFAGLDGSKRKVLIGSQLPHPFGLTLYGERIYWTDWQTKSIQSADRLTGLDRETLQENLENLMDIHVFHRRRPPVSTPCAMENGGCSHLCLRSPNPSGFSCTCPTGINLLSDGKTCSPGMNSFLIFARRIDIRMVSLDIPYFADVVVPINITMKNTIAIGVDPQEGKVYWSDSTLHRISRANLDGSQHEDIITTGLQTTDGLAVDAIGRKVYWTDTGTNRIEVGNLDGSMRKVLVWQNLDSPRAIVLYHEMGFMYWTDWGENAKLERSGMDGSDRAVLINNNLGWPNGLTVDKASSQLLWADAHTERIEAADLNGANRHTLVSPVQHPYGLTLLDSYIYWTDWQTRSIHRADKGTGSNVILVRSNLPGLMDMQAVDRAQPLGFNKCGSRNGGCSHLCLPRPSGFSCACPTGIQLKGDGKTCDPSPETYLLFSSRGSIRRISLDTSDHTDVHVPVPELNNVISLDYDSVDGKVYYTDVFLDVIRRADLNGSNMETVIGRGLKTTDGLAVDWVARNLYWTDTGRNTIEASRLDGSCRKVLINNSLDEPRAIAVFPRKGYLFWTDWGHIAKIERANLDGSERKVLINTDLGWPNGLTLDYDTRRIYWVDAHLDRIESADLNGKLRQVLVSHVSHPFALTQQDRWIYWTDWQTKSIQRVDKYSGRNKETVLANVEGLMDIIVVSPQRQTGTNACGVNNGGCTHLCFARASDFVCACPDEPDSRPCSLVPGLVPPAPRATGMSEKSPVLPNTPPTTLYSSTTRTRTSLEEVEGRCSERDARLGLCARSNDAVPAAPGEGLHISYAIGGLLSILLILVVIAALMLYRHKKSKFTDPGMGNLTYSNPSYRTSTQEVKIEAIPKPAMYNQLCYKKEGGPDHNYTKEKIKIVEGICLLSGDDAEWDDLKQLRSSRGGLLRDHVCMKTDTVSIQASSGSLDDTETEQLLQEEQSECSSVHTAATPERRGSLPDTGWKHERKLSSESQV

SEQ ID NO: 47234 - protein, 133 aa, Homo sapiens
  Payload ID: 9569
  Gene Symbol: LRP4
  Gene Name: low density lipoprotein receptor-related protein 4
  ENSP ID: ENSP00000434763
MRRQWGALLLGALLCAHVLPTCSPLDFHCDNGKCIRRSWVCDGDNDCEDDSDEQDCPPRECEEDEFPCQNGYCIRSLWHCDGDNDCGDNSDEQCDMRKCSDKEFRCSDGSCIAEHWYCDGDTDCKDGSDEENC

SEQ ID NO: 47235 - protein, 1615 aa, Homo sapiens
  Payload ID: 9570
  Gene Symbol: LRP5
  Gene Name: low density lipoprotein receptor-related protein 5
  Uniprot ID: O75197
  ENSP ID: ENSP00000294304
MEAAPPGPPWPLLLLLLLLLALCGCPAPAAASPLLLFANRRDVRLVDAGGVKLESTIVVSGLEDAAAVDFQFSKGAVYWTDVSEEAIKQTYLNQTGAAVQNVVISGLVSPDGLACDWVGKKLYWTDSETNRIEVANLNGTSRKVLFWQDLDQPRAIALDPAHGYMYWTDWGETPRIERAGMDGSTRKIIVDSDIYWPNGLTIDLEEQKLYWADAKLSFIHRANLDGSFRQKVVEGSLTHPFALTLSGDTLYWTDWQTRSIHACNKRTGGKRKEILSALYSPMDIQVLSQERQPFFHTRCEEDNGGCSHLCLLSPSEPFYTCACPTGVQLQDNGRTCKAGAEEVLLLARRTDLRRISLDTPDFTDIVLQVDDIRHAIAIDYDPLEGYVYWTDDEVRAIRRAYLDGSGAQTLVNTEINDPDGIAVDWVARNLYWTDTGTDRIEVTRLNGTSRKILVSEDLDEPRAIALHPVMGLMYWTDWGENPKIECANLDGQERRVLVNASLGWPNGLALDLQEGKLYWGDAKTDKIEVINVDGTKRRTLLEDKLPHIFGFTLLGDFIYWTDWQRRSIERVHKVKASRDVIIDQLPDLMGLKAVNVAKVVGTNPCADRNGGCSHLCFFTPHATRCGCPIGLELLSDMKTCIVPEAFLVFTSRAAIHRISLETNNNDVAIPLTGVKEASALDFDVSNNHIYWTDVSLKTISRAFMNGSSVEHVVEFGLDYPEGMAVDWMGKNLYWADTGTNRIEVARLDGQFRQVLVWRDLDNPRSLALDPTKGYIYWTEWGGKPRIVRAFMDGTNCMTLVDKVGRANDLTIDYADQRLYWTDLDTNMIESSNMLGQERVVIADDLPHPFGLTQYSDYIYWTDWNLHSIERADKTSGRNRTLIQGHLDFVMDILVFHSSRQDGLNDCMHNNGQCGQLCLAIPGGHRCGCASHYTLDPSSRNCSPPTTFLLFSQKSAISRMIPDDQHSPDLILPLHGLRNVKAIDYDPLDKFIYWVDGRQNIKRAKDDGTQPFVLTSLSQGQNPDRQPHDLSIDIYSRTLFWTCEATNTINVHRLSGEAMGVVLRGDRDKPRAIVVNAERGYLYFTNMQDRAAKIERAALDGTEREVLFTTGLIRPVALVVDNTLGKLFWVDADLKRIESCDLSGANRLTLEDANIVQPLGLTILGKHLYWIDRQQQMIERVEKTTGDKRTRIQGRVAHLTGIHAVEEVSLEEFSAHPCARDNGGCSHICIAKGDGTPRCSCPVHLVLLQNLLTCGEPPTCSPDQFACATGEIDCIPGAWRCDGFPECDDQSDEEGCPVCSAAQFPCARGQCVDLRLRCDGEADCQDRSDEADCDAICLPNQFRCASGQCVLIKQQCDSFPDCIDGSDELMCEITKPPSDDSPAHSSAIGPVIGIILSLFVMGGVYFVCQRVVCQRYAGANGPFPHEYVSGTPHVPLNFIAPGGSQHGPFTGIACGKSMMSSVSLMGGRGGVPLYDRNHVTGASSSSSSSTKATLYPPILNPPPSPATDPSLYNMDMFYSSNIPATARPYRPYIIRGMAPPTTPCSTDVCDSDYSASRWKASKYYLDLNSDSDPYPPPPTPHSQYLSAEDSCPPSPATERSYFHLFPPPPSPCTDSS

SEQ ID NO: 47236 - protein, 172 aa, Homo sapiens
  Payload ID: 9570
  Gene Symbol: LRP5
  Gene Name: low density lipoprotein receptor-related protein 5
  ENSP ID: ENSP00000435315
  MOD_RES (1)..(1): Any amino acid
XSSSSSSTKATLYPPGLGSGCMLSRMALETHISPTPFGKLHVGLGCRQWHLWKILNPPPSPATDPSLYNMDMFYSSNIPATARPYRPYIIRGMAPPTTPCSTDVCDSDYSASRWKASKYYLDLNSDSDPYPPPPTPHSQYLSAEDSCPPSPATERSYFHLFPPPPSPCTDSS

SEQ ID NO: 47237 - protein, 471 aa, Homo sapiens
  Payload ID: 9570
  Gene Symbol: LRP5
  Gene Name: low density lipoprotein receptor-related protein 5
  ENSP ID: ENSP00000436652
MEAAPPGPPWPLLLLLLLLLALCGCPAPAAASPLLLFANRRDVRLVDAGGVKLESTIVVSGLEDAAAVDFQFSKGAVYWTDVSEEAIKQTYLNQTGAAVQNVVISGLVSPDGLACDWVGKKLYWTDSETNRIEVANLNGTSRKVLFWQDLDQPRAIALDPAHGYMYWTDWGETPRIERAGMDGSTRKIIVDSDIYWPNGLTIDLEEQKLYWADAKLSFIHRANLDGSFRQKVVEGSLTHPFALTLSGDTLYWTDWQTRSIHACNKRTGGKRKEILSALYSPMDIQVLSQERQPFFHTRCEEDNGGCSHLCLLSPSEPFYTCACPTGVQLQDNGRTCKAGAEEVLLLARRTDLRRISLDTPDFTDIVLQVDDIRHAIAIDYDPLEGYVYWTDDEVRAIRRAYLDGSGAQTLVNTEINDPDGIAVDWVARNLYWTDTGTDRIEVTRLNGTSRKILVSEDLDEPRAIALHPVMG

SEQ ID NO: 47238 - protein, 252 aa, Homo sapiens
  Payload ID: 9571
  Gene Symbol: LRP5L
  Gene Name: low density lipoprotein receptor-related protein 5-like
  Uniprot ID: A4QPB2
  ENSP ID: ENSP00000384291
MEGHVYWTDDEVWAIRRAYLDGSGAQTLINTKINDPDDIAVNWVARSLYWTHTGTEHIEVTCLNSTSHKILVSEDMDEPRAIALHPEMGLTYWIDWGENPEIKRANLDRQELRVLVNASLGWPNGLALDLQEGKLYWGDAKTDKIEAISVDETKRQTLLKDKLPHIFRFTLLGDFIYWTAWQHHSIKRVHKVKANRDVIIDQLPDLMGLKAVNVDKVVGTNPHADRNGGAATCASSRPTQPGLAAPSRAWNC

SEQ ID NO: 47239 - protein, 252 aa, Homo sapiens; identical to SEQ ID NO: 47238
  Payload ID: 9571
  Gene Symbol: LRP5L
  Gene Name: low density lipoprotein receptor-related protein 5-like
  Uniprot ID: A4QPB2
  ENSP ID: ENSP00000384562

SEQ ID NO: 47240 - protein, 224 aa, Homo sapiens
  Payload ID: 9571
  Gene Symbol: LRP5L
  Gene Name: low density lipoprotein receptor-related protein 5-like
  Uniprot ID: A4QPB2
  ENSP ID: ENSP00000407283
MEGHVYWTDDEVWAIRRAYLDGSGAQTLINTKINDPDDIAVNWVARSLYWTHTGTEHIEVTCLNSTSHKILVSEDMDEPRAIALHPEMGLTYWIDWGENPEIKRANLDRQELRVLVNASLGWPNGLALDLQEGKLYWGDAKTDKIEAISVDETKRQTLLKDKLPHIFRFTLLGDFIYWTAWQHHSIKRVHKVKANRDVIIDQLPDLMGLKAVNVDKVVGPGTAE

SEQ ID NO: 47241 - protein, 3 aa, Homo sapiens
  Payload ID: 9571
  Gene Symbol: LRP5L
  Gene Name: low density lipoprotein receptor-related protein 5-like
  ENSP ID: ENSP00000437736
MEG

SEQ ID NO: 47242 - protein, 70 aa, Homo sapiens
  Payload ID: 9571
  Gene Symbol: LRP5L
  Gene Name: low density lipoprotein receptor-related protein 5-like
  ENSP ID: ENSP00000438222
MEGHVYWTDDEVWAIRRAYLDGSGAQTLINTKINDPDDIAVNWVARSLYWTHTGTEHIEPHVLDRLGREP

SEQ ID NO: 47243 - protein, 252 aa, Homo sapiens; identical to SEQ ID NO: 47238
  Payload ID: 9571
  Gene Symbol: LRP5L
  Gene Name: low density lipoprotein receptor-related protein 5-like
  Uniprot ID: A4QPB2
  ENSP ID: ENSP00000482378

SEQ ID NO: 47244 - protein, 1613 aa, Homo sapiens
  Payload ID: 9572
  Gene Symbol: LRP6
  Gene Name: low density lipoprotein receptor-related protein 6
  Uniprot ID: O75581
  ENSP ID: ENSP00000261349
MGAVLRSLLACSFCVLLRAAPLLLYANRRDLRLVDATNGKENATIVVGGLEDAAAVDFVFSHGLIYWSDVSEEAIKRTEFNKTESVQNVVVSGLLSPDGLACDWLGEKLYWTDSETNRIEVSNLDGSLRKVLFWQELDQPRAIALDPSSGFMYWTDWGEVPKIERAGMDGSSRFIIINSEIYWPNGLTLDYEEQKLYWADAKLNFIHKSNLDGTNRQAVVKGSLPHPFALTLFEDILYWTDWSTHSILACNKYTGEGLREIHSDIFSPMDIHAFSQQRQPNATNPCGIDNGGCSHLCLMSPVKPFYQCACPTGVKLLENGKTCKDGATELLLLARRTDLRRISLDTPDFTDIVLQLEDIRHAIAIDYDPVEGYIYWTDDEVRAIRRSFIDGSGSQFVVTAQIAHPDGIAVDWVARNLYWTDTGTDRIEVTRLNGTMRKILISEDLEEPRAIVLDPMVGYMYWTDWGEIPKIERAALDGSDRVVLVNTSLGWPNGLALDYDEGKIYWGDAKTDKIEVMNTDGTGRRVLVEDKIPHIFGFTLLGDYVYWTDWQRRSIERVHKRSAEREVIIDQLPDLMGLKATNVHRVIGSNPCAEENGGCSHLCLYRPQGLRCACPIGFELISDMKTCIVPEAFLLFSRRADIRRISLETNNNNVAIPLTGVKEASALDFDVTDNRIYWTDISLKTISRAFMNGSALEHVVEFGLDYPEGMAVDWLGKNLYWADTGTNRIEVSKLDGQHRQVLVWKDLDSPRALALDPAEGFMYWTEWGGKPKIDRAAMDGSERTTLVPNVGRANGLTIDYAKRRLYWTDLDTNLIESSNMLGLNREVIADDLPHPFGLTQYQDYIYWTDWSRRSIERANKTSGQNRTIIQGHLDYVMDILVFHSSRQSGWNECASSNGHCSHLCLAVPVGGFVCGCPAHYSLNADNRTCSAPTTFLLFSQKSAINRMVIDEQQSPDIILPIHSLRNVRAIDYDPLDKQLYWIDSRQNMIRKAQEDGSQGFTVVVSSVPSQNLEIQPYDLSIDIYSRYIYWTCEATNVINVTRLDGRSVGVVLKGEQDRPRAVVVNPEKGYMYFTNLQERSPKIERAALDGTEREVLFFSGLSKPIALALDSRLGKLFWADSDLRRIESSDLSGANRIVLEDSNILQPVGLTVFENWLYWIDKQQQMIEKIDMTGREGRTKVQARIAQLSDIHAVKELNLQEYRQHPCAQDNGGCSHICLVKGDGTTRCSCPMHLVLLQDELSCGEPPTCSPQQFTCFTGEIDCIPVAWRCDGFTECEDHSDELNCPVCSESQFQCASGQCIDGALRCNGDANCQDKSDEKNCEVLCLIDQFRCANGQCIGKHKKCDHNVDCSDKSDELDCYPTEEPAPQATNTVGSVIGVIVTIFVSGTVYFICQRMLCPRMKGDGETMTNDYVVHGPASVPLGYVPHPSSLSGSLPGMSRGKSMISSLSIMGGSSGPPYDRAHVTGASSSSSSSTKGTYFPAILNPPPSPATERSHYTMEFGYSSNSPSTHRSYSYRPYSYRHFAPPTTPCSTDVCDSDYAPSRRMTSVATAKGYTSDLNYDSEPVPPPPTPRSQYLSAEENYESCPPSPYTERSYSHHLYPPPPSPCTDSS

SEQ ID NO: 47245 - protein, 75 aa, Homo sapiens
  Payload ID: 9572
  Gene Symbol: LRP6
  Gene Name: low density lipoprotein receptor-related protein 6
  ENSP ID: ENSP00000439765
MYWTDWGEVPKIERAGMDGSSRFIIINSEIYWPNGLTLDYEEQKLYWADAKLNFIHKSNLDGTNRQAVVKGSLPH

SEQ ID NO: 47246 - protein, 1568 aa, Homo sapiens
  Payload ID: 9572
  Gene Symbol: LRP6
  Gene Name: low density lipoprotein receptor-related protein 6
  ENSP ID: ENSP00000442472
MGAVLRSLLACSFCVLLRAAPLLLYANRRDLRLVDATNGKENATIVVGGLEDAAAVDFVFSHGLIYWSDVSEEAIKRTEFNKTESVQNVVVSGLLSPDGLACDWLGEKLYWTDSETNRIEVSNLDGSLRKVLFWQELDQPRAIALDPSSGFMYWTDWGEVPKIERAGMDGSSRFIIINSEIYWPNGLTLDYEEQKLYWADAKLNFIHKSNLDGTNRQAVVKGSLPHPFALTLFEDILYWTDWSTHSILACNKYTGEGLREIHSDIFSPMDIHAFSQQRQPNATNPCGIDNGGCSHLCLMSPVKPFYQCACPTGVKLLENGKTCKDGATELLLLARRTDLRRISLDTPDFTDIVLQLEDIRHAIAIDYDPVEGYIYWTDDEVRAIRRSFIDGSGSQFVVTAQIAHPDGIAVDWVARNLYWTDTGTDRIEVTRLNGTMRKILISEDLEEPRAIVLDPMVGYMYWTDWGEIPKIERAALDGSDRVVLVNTSLGWPNGLALDYDEGKIYWGDAKTDKIEVMNTDGTGRRVLVEDKIPHIFGFTLLGDYVYWTDWQRRSIERVHKRSAEREVIIDQLPDLMGLKATNVHRVIGSNPCAEENGGCSHLCLYRPQGLRCACPIGFELISDMKTCIVPEAFLLFSRRADIRRISLETNNNNVAIPLTGVKEASALDFDVTDNRIYWTDISLKTISRAFMNGSALEHVVEFGLDYPEGMAVDWLGKNLYWADTGTNRIEVSKLDGQHRQVLVWKDLDSPRALALDPAEGFMYWTEWGGKPKIDRAAMDGSERTTLVPNVGRANGLTIDYAKRRLYWTDLDTNLIESSNMLGLNREVIADDLPHPFGLTQYQDYIYWTDWSRRSIERANKTSGQNRTIIQGHLDYVMDILVFHSSRQSGWNECASSNGHCSHLCLAVPVGGFVCGCPAHYSLNADNRTCSAPTTFLLFSQKSAINRMVIDEQQSPDIILPIHSLRNVRAIDYDPLDKQLYWIDSRQNMIRKAQEDGSQGFTVVVSSVPSQNLEIQPYDLSIDIYSRYIYWTCEATNVINVTRLDGRSVGVVLKGEQDRPRAVVVNPEKGYMYFTNLQERSPKIERAALDGTEREVLFFSGLSKPIALALDSRLGKLFWADSDLRRIESSDLSGANRIVLEDSNILQPVGLTVFENWLYWIDKQQQMIEKIDMTGREGRTKVQARIAQLSDIHAVKELNLQEYRQHPCAQDNGGCSHICLVKGDGTTRCSCPMHLVLLQDELSCGESQFQCASGQCIDGALRCNGDANCQDKSDEKNCEVLCLIDQFRCANGQCIGKHKKCDHNVDCSDKSDELDCYPTEEPAPQATNTVGSVIGVIVTIFVSGTVYFICQRMLCPRMKGDGETMTNDYVVHGPASVPLGYVPHPSSLSGSLPGMSRGKSMISSLSIMGGSSGPPYDRAHVTGASSSSSSSTKGTYFPAILNPPPSPATERSHYTMEFGYSSNSPSTHRSYSYRPYSYRHFAPPTTPCSTDVCDSDYAPSRRMTSVATAKGYTSDLNYDSEPVPPPPTPRSQYLSAEENYESCPPSPYTERSYSHHLYPPPPSPCTDSS

SEQ ID NO: 47247 - protein, 69 aa, Homo sapiens
  Payload ID: 9572
  Gene Symbol: LRP6
  Gene Name: low density lipoprotein receptor-related protein 6
  ENSP ID: ENSP00000443239
NCEVLCLIDQFRCANGQCIGKHKKCDHNVDCSDKSDELDCYFEPSTIPSHRAITLHYGIWIFFKQSFHS

SEQ ID NO: 47248 - protein, 1478 aa, Homo sapiens
  Payload ID: 9572
  Gene Symbol: LRP6
  Gene Name: low density lipoprotein receptor-related protein 6
  ENSP ID: ENSP00000445083
  MOD_RES (1)..(1): Any amino acid
XLDQPRAIALDPSSGFMYWTDWGEVPKIERAGMDGSSRFIIINSEIYWPNGLTLDYEEQKLYWADAKLNFIHKSNLDGTNRQAVVKGSLPHPFALTLFEDILYWTDWSTHSILACNKYTGEGLREIHSDIFSPMDIHAFSQQRQPNATNPCGIDNGGCSHLCLMSPVKPFYQCACPTGVKLLENGKTCKDGATELLLLARRTDLRRISLDTPDFTDIVLQLEDIRHAIAIDYDPVEGYIYWTDDEVRAIRRSFIDGSGSQFVVTAQIAHPDGIAVDWVARNLYWTDTGTDRIEVTRLNGTMRKILISEDLEEPRAIVLDPMVGYMYWTDWGEIPKIERAALDGSDRVVLVNTSLGWPNGLALDYDEGKIYWGDAKTDKIEVMNTDGTGRRVLVEDKIPHIFGFTLLGDYVYWTDWQRRSIERVHKRSAEREVIIDQLPDLMGLKATNVHRVIGSNPCAEENGGCSHLCLYRPQGLRCACPIGFELISDMKTCIVPEAFLLFSRRADIRRISLETNNNNVAIPLTGVKEASALDFDVTDNRIYWTDISLKTISRAFMNGSALEHVVEFGLDYPEGMAVDWLGKNLYWADTGTNRIEVSKLDGQHRQVLVWKDLDSPRALALDPAEGFMYWTEWGGKPKIDRAAMDGSERTTLVPNVGRANGLTIDYAKRRLYWTDLDTNLIESSNMLGLNREVIADDLPHPFGLTQYQDYIYWTDWSRRSIERANKTSGQNRTIIQGHLDYVMDILVFHSSRQSGWNECASSNGHCSHLCLAVPVGGFVCGCPAHYSLNADNRTCSAPTTFLLFSQKSAINRMVIDEQQSPDIILPIHSLRNVRAIDYDPLDKQLYWIDSRQNMIRKAQEDGSQGFTVVVSSVPSQNLEIQPYDLSIDIYSRYIYWTCEATNVINVTRLDGRSVGVVLKGEQDRPRAVVVNPEKGYMYFTNLQERSPKIERAALDGTEREVLFFSGLSKPIALALDSRLGKLFWADSDLRRIESSDLSGANRIVLEDSNILQPVGLTVFENWLYWIDKQQQMIEKIDMTGREGRTKVQARIAQLSDIHAVKELNLQEYRQHPCAQDNGGCSHICLVKGDGTTRCSCPMHLVLLQDELSCGEPPTCSPQQFTCFTGEIDCIPVAWRCDGFTECEDHSDELNCPVCSESQFQCASGQCIDGALRCNGDANCQDKSDEKNCEVLCLIDQFRCANGQCIGKHKKCDHNVDCSDKSDELDCYPTEEPAPQATNTVGSVIGVIVTIFVSGTVYFICQRMLCPRMKGDGETMTNDYVVHGPASVPLGYVPHPSSLSGSLPGMSRGKSMISSLSIMGGSSGPPYDRAHVTGASSSSSSSTKGTYFPAILNPPPSPATERSHYTMEFGYSSNSPSTHRSYSYRPYSYRHFAPPTTPCSTDVCDSDYAPSRRMTSVATAKGYTSDLNYDSEPVPPPPTPRSQYLSAEENYESCPPSPYTERSYSHHLYPPPPSPCTDSS

SEQ ID NO: 47249 - protein, 1613 aa, Homo sapiens; identical to SEQ ID NO: 47244
  Payload ID: 9572
  Gene Symbol: LRP6
  Gene Name: low density lipoprotein receptor-related protein 6
  Uniprot ID: O75581
  ENSP ID: ENSP00000486315

SEQ ID NO: 47250 - protein, 75 aa, Homo sapiens; identical to SEQ ID NO: 47245
  Payload ID: 9572
  Gene Symbol: LRP6
  Gene Name: low density lipoprotein receptor-related protein 6
  ENSP ID: ENSP00000486383

SEQ ID NO: 47251 - protein, 1568 aa, Homo sapiens; identical to SEQ ID NO: 47246
  Payload ID: 9572
  Gene Symbol: LRP6
  Gene Name: low density lipoprotein receptor-related protein 6
  ENSP ID: ENSP00000486524

SEQ ID NO: 47252 - protein, 69 aa, Homo sapiens; identical to SEQ ID NO: 47247
  Payload ID: 9572
  Gene Symbol: LRP6
  Gene Name: low density lipoprotein receptor-related protein 6
  ENSP ID: ENSP00000486758

SEQ ID NO: 47253 - protein, 1478 aa, Homo sapiens; identical to SEQ ID NO: 47248
  Payload ID: 9572
  Gene Symbol: LRP6
  Gene Name: low density lipoprotein receptor-related protein 6
  ENSP ID: ENSP00000487008
  MOD_RES (1)..(1): Any amino acid

SEQ ID NO: 47254 - protein, 963 aa, Homo sapiens
  Payload ID: 9573
  Gene Symbol: LRP8
  Gene Name: low density lipoprotein receptor-related protein 8, apolipoprotein e receptor
  Uniprot ID: Q14114
  ENSP ID: ENSP00000303634
MGLPEPGPLRLLALLLLLLLLLLLQLQHLAAAAADPLLGGQGPAKDCEKDQFQCRNERCIPSVWRCDEDDDCLDHSDEDDCPKKTCADSDFTCDNGHCIHERWKCDGEEECPDGSDESEATCTKQVCPAEKLSCGPTSHKCVPASWRCDGEKDCEGGADEAGCATLCAPHEFQCGNRSCLAAVFVCDGDDDCGDGSDERGCADPACGPREFRCGGDGGGACIPERWVCDRQFDCEDRSDEAAELCGRPGPGATSAPAACATASQFACRSGECVHLGWRCDGDRDCKDKSDEADCPLGTCRGDEFQCGDGTCVLAIKHCNQEQDCPDGSDEAGCLQGLNECLHNNGGCSHICTDLKIGFECTCPAGFQLLDQKTCGDIDECKDPDACSQICVNYKGYFKCECYPGYEMDLLTKNCKAAAGKSPSLIFTNRHEVRRIDLVKRNYSRLIPMLKNVVALDVEVATNRIYWCDLSYRKIYSAYMDKASDPKEQEVLIDEQLHSPEGLAVDWVHKHIYWTDSGNKTISVATVDGGRRRTLFSRNLSEPRAIAVDPLRGFMYWSDWGDQAKIEKSGLNGVDRQTLVSDNIEWPNGITLDLLSQRLYWVDSKLHQLSSIDFSGGNRKTLISSTDFLSHPFGIAVFEDKVFWTDLENEAIFSANRLNGLEISILAENLNNPHDIVIFHELKQPRAPDACELSVQPNGGCEYLCLPAPQISSHSPKYTCACPDTMWLGPDMKRCYRAPQSTSTTTLASTMTRTVPATTRAPGTTVHRSTYQNHSTETPSLTAAVPSSVSVPRAPSISPSTLSPATSNHSQHYANEDSKMGSTVTAAVIGIIVPIVVIALLCMSGYLIWRNWKRKNTKSMNFDNPVYRKTTEEEDEDELHIGRTAQIGHVYPAAISSFDRPLWAEPCLGETREPEDPAPALKELFVLPGEPRSQLHQLPKNPLSELPVVKSKRVALSLEDDGLP

SEQ ID NO: 47255 - protein, 793 aa, Homo sapiens
  Payload ID: 9573
  Gene Symbol: LRP8
  Gene Name: low density lipoprotein receptor-related protein 8, apolipoprotein e receptor
  Uniprot ID: Q14114
  ENSP ID: ENSP00000334522
MGLPEPGPLRLLALLLLLLLLLLLQLQHLAAAAADPLLGGQGPAKDCEKDQFQCRNERCIPSVWRCDEDDDCLDHSDEDDCPKKTCADSDFTCDNGHCIHERWKCDGEEECPDGSDESEATCTKQVCPAEKLSCGPTSHKCVPASWRCDGEKDCEGGADEAGCATWLNECLHNNGGCSHICTDLKIGFECTCPAGFQLLDQKTCGDIDECKDPDACSQICVNYKGYFKCECYPGYEMDLLTKNCKAAAGKSPSLIFTNRHEVRRIDLVKRNYSRLIPMLKNVVALDVEVATNRIYWCDLSYRKIYSAYMDKASDPKEQEVLIDEQLHSPEGLAVDWVHKHIYWTDSGNKTISVATVDGGRRRTLFSRNLSEPRAIAVDPLRGFMYWSDWGDQAKIEKSGLNGVDRQTLVSDNIEWPNGITLDLLSQRLYWVDSKLHQLSSIDFSGGNRKTLISSTDFLSHPFGIAVFEDKVFWTDLENEAIFSANRLNGLEISILAENLNNPHDIVIFHELKQPRAPDACELSVQPNGGCEYLCLPAPQISSHSPKYTCACPDTMWLGPDMKRCYRAPQSTSTTTLASTMTRTVPATTRAPGTTVHRSTYQNHSTETPSLTAAVPSSVSVPRAPSISPSTLSPATSNHSQHYANEDSKMGSTVTAAVIGIIVPIVVIALLCMSGYLIWRNWKRKNTKSMNFDNPVYRKTTEEEDEDELHIGRTAQIGHVYPAAISSFDRPLWAEPCLGETREPEDPAPALKELFVLPGEPRSQLHQLPKNPLSELPVVKSKRVALSLEDDGLP

SEQ ID NO: 47256 - protein, 700 aa, Homo sapiens
  Payload ID: 9573
  Gene Symbol: LRP8
  Gene Name: low density lipoprotein receptor-related protein 8, apolipoprotein e receptor
  Uniprot ID: Q14114
  ENSP ID: ENSP00000346391
MGLPEPGPLRLLALLLLLLLLLLLQLQHLAAAAADPLLGGQGPAKDCEKDQFQCRNERCIPSVWRCDEDDDCLDHSDEDDCPKKTCADSDFTCDNGHCIHERWKCDGEEECPDGSDESEATCTKQVCPAEKLSCGPTSHKCVPASWRCDGEKDCEGGADEAGCATSLGTCRGDEFQCGDGTCVLAIKHCNQEQDCPDGSDEAGCLQGLNECLHNNGGCSHICTDLKIGFECTCPAGFQLLDQKTCGDIDECKDPDACSQICVNYKGYFKCECYPGYEMDLLTKNCKAAAGKSPSLIFTNRHEVRRIDLVKRNYSRLIPMLKNVVALDVEVATNRIYWCDLSYRKIYSAYMDKASDPKEQEVLIDEQLHSPEGLAVDWVHKHIYWTDSGNKTISVATVDGGRRRTLFSRNLSEPRAIAVDPLRGFMYWSDWGDQAKIEKSGLNGVDRQTLVSDNIEWPNGITLDLLSQRLYWVDSKLHQLSSIDFSGGNRKTLISSTDFLSHPFGIAVFEDKVFWTDLENEAIFSANRLNGLEISILAENLNNPHDIVIFHELKQPRAPDACELSVQPNGGCEYLCLPAPQISSHSPKYTCACPDTMWLGPDMKRCYRDANEDSKMGSTVTAAVIGIIVPIVVIALLCMSGYLIWRNWKRKNTKSMNFDNPVYRKTTEEEDEDELHIGRTAQIGHVYPARVALSLEDDGLP

SEQ ID NO: 47257 - protein, 904 aa, Homo sapiens
  Payload ID: 9573
  Gene Symbol: LRP8
  Gene Name: low density lipoprotein receptor-related protein 8, apolipoprotein e receptor
  Uniprot ID: Q14114
  ENSP ID: ENSP00000360509
MGLPEPGPLRLLALLLLLLLLLLLQLQHLAAAAADPLLGGQGPAKDCEKDQFQCRNERCIPSVWRCDEDDDCLDHSDEDDCPKKTCADSDFTCDNGHCIHERWKCDGEEECPDGSDESEATCTKQVCPAEKLSCGPTSHKCVPASWRCDGEKDCEGGADEAGCATLCAPHEFQCGNRSCLAAVFVCDGDDDCGDGSDERGCADPACGPREFRCGGDGGGACIPERWVCDRQFDCEDRSDEAAELCGRPGPGATSAPAACATASQFACRSGECVHLGWRCDGDRDCKDKSDEADCPLGTCRGDEFQCGDGTCVLAIKHCNQEQDCPDGSDEAGCLQGLNECLHNNGGCSHICTDLKIGFECTCPAGFQLLDQKTCGDIDECKDPDACSQICVNYKGYFKCECYPGYEMDLLTKNCKAAAGKSPSLIFTNRHEVRRIDLVKRNYSRLIPMLKNVVALDVEVATNRIYWCDLSYRKIYSAYMDKASDPKEQEVLIDEQLHSPEGLAVDWVHKHIYWTDSGNKTISVATVDGGRRRTLFSRNLSEPRAIAVDPLRGFMYWSDWGDQAKIEKSGLNGVDRQTLVSDNIEWPNGITLDLLSQRLYWVDSKLHQLSSIDFSGGNRKTLISSTDFLSHPFGIAVFEDKVFWTDLENEAIFSANRLNGLEISILAENLNNPHDIVIFHELKQPRAPDACELSVQPNGGCEYLCLPAPQISSHSPKYTCACPDTMWLGPDMKRCYRAPQSTSTTTLASTMTRTVPATTRAPGTTVHRSTYQNHSTETPSLTAAVPSSVSVPRAPSISPSTLSPATSNHSQHYANEDSKMGSTVTAAVIGIIVPIVVIALLCMSGYLIWRNWKRKNTKSMNFDNPVYRKTTEEEDEDELHIGRTAQIGHVYPARVALSLEDDGLP

SEQ ID NO: 47258 - protein, 121 aa, Homo sapiens
  Payload ID: 9573
  Gene Symbol: LRP8
  Gene Name: low density lipoprotein receptor-related protein 8, apolipoprotein e receptor
  ENSP ID: ENSP00000431241
  MOD_RES (1)..(1): Any amino acid
XPSSVSVPRAPSISPSTLSPATSNHSQHYANEDSKMGSTVTAAVIGIIVPIVVIALLCMSGYLIWRNWKRKNTKSMNFDNPVYRKTTEEEDEDELHIGRTAQIGHVYPARVALSLEDDGLP

SEQ ID NO: 47259 - protein, 392 aa, Homo sapiens
  Payload ID: 9573
  Gene Symbol: LRP8
  Gene Name: low density lipoprotein receptor-related protein 8, apolipoprotein e receptor
  ENSP ID: ENSP00000433554
MGLPEPGPLRLLALLLLLLLLLLLQLQHLAAAAADPLLGGQGPAKDCEKDQFQCRNERCIPSVWRCDEDDDCLDHSDEDDCPKKTCADSDFTCDNGHCIHERWKCDGEEECPDGSDESEATCTKQVCPAEKLSCGPTSHKCVPASWRCDGEKDCEGGADEAGCATLCAPHEFQCGNRSCLAAVFVCDGDDDCGDGSDERGCADPACGPREFRCGGDGGGACIPERWVCDRQFDCEDRSDEAAELCGRPGPGATSAPAACATASQFACRSGECVHLGWRCDGDRDCKDKSDEADCPLGTCRGDEFQCGDGTCVLAIKHCNQEQDCPDGSDEAGCLQESPCEGPRRFQCKSGKRVDGGKVCDVQRDCRDWSDELLKVWAERVSAQQWRLLTHLH

SEQ ID NO: 47260 - protein, 135 aa, Homo sapiens
  Payload ID: 9573
  Gene Symbol: LRP8
  Gene Name: low density lipoprotein receptor-related protein 8, apolipoprotein e receptor
  ENSP ID: ENSP00000435346
  MOD_RES (1)..(1): Any amino acid
XVKRNYSRLIPMLKNVVALDVEVATNRIYWCDLSYRKIYSAYMDKASDPKEQEVLIDEQLHSPEGLAVDWVHKHIYWTDSGNKTISVATVDGGRRRTLFSRNLSEPRAIAVDPLRGSAEPALVLGRLQATPTVQH

SEQ ID NO: 47261 - protein, 240 aa, Homo sapiens
  Payload ID: 9573
  Gene Symbol: LRP8
  Gene Name: low density lipoprotein receptor-related protein 8, apolipoprotein e receptor
  ENSP ID: ENSP00000436651
  MOD_RES (1)..(1): Any amino acid
XDGSDEAGCLQVPPTFLGNRRRPRGLNECLHNNGGCSHICTDLKIGFECTCPAGFQLLDQKTCGDIDECKDPDACSQICVNYKGYFKCECYPGYEMDLLTKNCKAAAGKSPSLIFTNRHEVRRIDLVKRNYSRLIPMLKNVVALDVEVATNRIYWCDLSYRKIYSAYMDKASDPKEQEVLIDEQLHSPEGLAVDWVHKHIYWTDSGNKTISVATVDGGRRRTLFSRNLSEPRAIAVDPLR

SEQ ID NO: 47262 - protein, 457 aa, Homo sapiens
  Payload ID: 9573
  Gene Symbol: LRP8
  Gene Name: low density lipoprotein receptor-related protein 8, apolipoprotein e receptor
  ENSP ID: ENSP00000437009
MLKNVVALDVEVATNRIYWCDLSYRKIYSAYMDKASDPKEQEVLIDEQLHSPEGLAVDWVHKHIYWTDSGNKTISVATVDGGRRRTLFSRNLSEPRAIAVDPLRGFMYWSDWGDQAKIEKSGLNGVDRQTLVSDNIEWPNGITLDLLSQRLYWVDSKLHQLSSIDFSGGNRKTLISSTDFLSHPFGIAVFEDKVFWTDLENEAIFSANRLNGLEISILAENLNNPHDIVIFHELKQPRAPDACELSVQPNGGCEYLCLPAPQISSHSPKYTCACPDTMWLGPDMKRCYRAPQSTSTTTLASTMTRTVPATTRAPGTTVHRSTYQNHSTETPSLTAAVPSSVSVPRAPSISPSTLSPATSNHSQHYANEDSKMGSTVTAAVIGIIVPIVVIALLCMSGYLIWRNWKRKNTKSMNFDNPVYRKTTEEEDEDELHIGRTAQIGHVYPARVALSLEDDGLP

SEQ ID NO: 47263 - protein, 699 aa, Homo sapiens
  Payload ID: 9573
  Gene Symbol: LRP8
  Gene Name: low density lipoprotein receptor-related protein 8, apolipoprotein e receptor
  ENSP ID: ENSP00000480025
MGLPEPGPLRLLALLLLLLLLLLLQLQHLAAAAADPLLGGQGPAKDCEKDQFQCRNERCIPSVWRCDEDDDCLDHSDEDDCPKKTCADSDFTCDNGHCIHERWKCDGEEECPDGSDESEATCTKQVCPAEKLSCGPTSHKCVPASWRCDGEKDCEGGADEAGCATSLGTCRGDEFQCGDGTCVLAIKHCNQEQDCPDGSDEAGCLQGLNECLHNNGGCSHICTDLKIGFECTCPAGFQLLDQKTCGDIDECKDPDACSQICVNYKGYFKCECYPGYEMDLLTKNCKAAAGKSPSLIFTNRTGAEDRPVKRNYSRLIPMLKNVVALDVEVATNRIYWCDLSYRKIYSAYMDKASDPKEQEVLIDEQLHSPEGLAVDWVHKHIYWTDSGNKTISVATVDGGRRRTLFSRNLSEPRAIAVDPLRGFMYWSDWGDQAKIEKSGLNGVDRQTLVSDNIEWPNGITLDLLSQRLYWVDSKLHQLSSIDFSGGNRKTLISSTDFLSHPFGIAVFEDKVFWTDLENEAIFSANRLNGLEISILAENLNNPHDIVIFHELKQPRAPDACELSVQPNGGCEYLCLPAPQISSHSPKYTCACPDTMWLGPDMKRCYRDANEDSKMGSTVTAAVIGIIVPIVVIALLCMSGYLIWRNWKRKNTKSMNFDNPVYRKTTEEEDEDELHIGRTAQIGHVYPARVALSLEDDGLP

SEQ ID NO: 47264 - protein, 105 aa, Homo sapiens
  Payload ID: 9574
  Gene Symbol: LRPAP1
  Gene Name: low density lipoprotein receptor-related protein associated protein 1
  ENSP ID: ENSP00000421648
MAPRRVRSFLRGLPALLLLLLFLGPWPAASHGGKYSREKNQPKPSPKRESGEEFRMEKLNQLWEKAQRNLPVASLLRGQFLAVSWSVLLVAHRLLPFVRSCIFLP

SEQ ID NO: 47265 - protein, 357 aa, Homo sapiens
  Payload ID: 9574
  Gene Symbol: LRPAP1
  Gene Name: low density lipoprotein receptor-related protein associated protein 1
  Uniprot ID: P30533
  ENSP ID: ENSP00000421922
MAPRRVRSFLRGLPALLLLLLFLGPWPAASHGGKYSREKNQPKPSPKRESGEEFRMEKLNQLWEKAQRLHLPPVRLAELHADLKIQERDELAWKKLKLDGLDEDGEKEARLIRNLNVILAKYGLDGKKDARQVTSNSLSGTQEDGLDDPRLEKLWHKAKTSGKFSGEELDKLWREFLHHKEKVHEYNVLLETLSRTEEIHENVISPSDLSDIKGSVLHSRHTELKEKLRSINQGLDRLRRVSHQGYSTEAEFEEPRVIDLWDLAQSANLTDKELEAFREELKHFEAKIEKHNHYQKQLEIAHEKLRHAESVGDGERVSRSREKHALLEGRTKELGYTVKKHLQDLSGRISRARHNEL

SEQ ID NO: 47266 - protein, 2863 aa, Homo sapiens
  Payload ID: 9575
  Gene Symbol: LRBA
  Gene Name: LPS-responsive vesicle trafficking, beach and anchor containing
  Uniprot ID: P50851
  ENSP ID: ENSP00000349629
MASEDNRVPSPPPTGDDGGGGGREETPTEGGALSLKPGLPIRGIRMKFAVLTGLVEVGEVSNRDIVETVFNLLVGGQFDLEMNFIIQEGESINCMVDLLEKCDITCQAEVWSMFTAILKKSIRNLQVCTEVGLVEKVLGKIEKVDNMIADLLVDMLGVLASYNLTVRELKLFFSKLQGDKGRWPPHAGKLLSVLKHMPQKYGPDAFFNFPGKSAAAIALPPIAKWPYQNGFTFHTWLRMDPVNNINVDKDKPYLYCFRTSKGLGYSAHFVGGCLIVTSIKSKGKGFQHCVKFDFKPQKWYMVTIVHIYNRWKNSELRCYVNGELASYGEITWFVNTSDTFDKCFLGSSETADANRVFCGQMTAVYLFSEALNAAQIFAIYQLGLGYKGTFKFKAESDLFLAEHHKLLLYDGKLSSAIAFTYNPRATDAQLCLESSPKDNPSIFVHSPHALMLQDVKAVLTHSIQSAMHSIGGVQVLFPLFAQLDYRQYLSDEIDLTICSTLLAFIMELLKNSIAMQEQMLACKGFLVIGYSLEKSSKSHVSRAVLELCLAFSKYLSNLQNGMPLLKQLCDHVLLNPAIWIHTPAKVQLMLYTYLSTEFIGTVNIYNTIRRVGTVLLIMHTLKYYYWAVNPQDRSGITPKGLDGPRPNQKEMLSLRAFLLMFIKQLVMKDSGVKEDELQAILNYLLTMHEDDNLMDVLQLLVALMSEHPNSMIPAFDQRNGLRVIYKLLASKSEGIRVQALKAMGYFLKHLAPKRKAEVMLGHGLFSLLAERLMLQTNLITMTTYNVLFEILIEQIGTQVIHKQHPDPDSSVKIQNPQILKVIATLLRNSPQCPESMEVRRAFLSDMIKLFNNSRENRRSLLQCSVWQEWMLSLCYFNPKNSDEQKITEMVYAIFRILLYHAVKYEWGGWRVWVDTLSITHSKVTFEIHKENLANIFREQQGKVDEEIGLCSSTSVQAASGIRRDINVSVGSQQPDTKDSPVCPHFTTNGNENSSIEKTSSLESASNIELQTTNTSYEEMKAEQENQELPDEGTLEETLTNETRNADDLEVSSDIIEAVAISSNSFITTGKDSMTVSEVTASISSPSEEDASEMPEFLDKSIVEEEEDDDYVELKVEGSPTEEANLPTELQDNSLSPAASEAGEKLDMFGNDDKLIFQEGKPVTEKQTDTETQDSKDSGIQTMTASGSSAMSPETTVSQIAVESDLGQMLEEGKKATNLTRETKLINDCHGSVSEASSEQKIAKLDVSNVATDTERLELKASPNVEAPQPHRHVLEISRQHEQPGQGIAPDAVNGQRRDSRSTVFRIPEFNWSQMHQRLLTDLLFSIETDIQMWRSHSTKTVMDFVNSSDNVIFVHNTIHLISQVMDNMVMACGGILPLLSAATSATHELENIEPTQGLSIEASVTFLQRLISLVDVLIFASSLGFTEIEAEKSMSSGGILRQCLRLVCAVAVRNCLECQQHSQLKTRGDKALKPMHSLIPLGKSAAKSPVDIVTGGISPVRDLDRLLQDMDINRLRAVVFRDIEDSKQAQFLALAVVYFISVLMVSKYRDILEPQNERHSQSCTETGSENENVSLSEITPAAFSTLTTASVEESESTSSARRRDSGIGEETATGLGSHVEVTPHTAPPGVSAGPDAISEVLSTLSLEVNKSPETKNDRGNDLDTKATPSVSVSKNVNVKDILRSLVNIPADGVTVDPALLPPACLGALGDLSVEQPVQFRSFDRSVIVAAKKSAVSPSTFNTSIPTNAVSVVSSVDSAQASDMGGESPGSRSSNAKLPSVPTVDSVSQDPVSNMSITERLEHALEKAAPLLREIFVDFAPFLSRTLLGSHGQELLIEGTSLVCMKSSSSVVELVMLLCSQEWQNSIQKNAGLAFIELVNEGRLLSQTMKDHLVRVANEAEFILSRQRAEDIHRHAEFESLCAQYSADKREDEKMCDHLIRAAKYRDHVTATQLIQKIINILTDKHGAWGNSAVSRPLEFWRLDYWEDDLRRRRRFVRNPLGSTHPEATLKTAVEHVCIFKLRENSKATDEDILAKGKQSIRSQALGNQNSENEILLEGDDDTLSSVDEKDLENLAGPVSLSTPAQLVAPSVVVKGTLSVTSSELYFEVDEEDPNFKKIDPKILAYTEGLHGKWLFTEIRSIFSRRYLLQNTALEIFMANRVAVMFNFPDPATVKKVVNYLPRVGVGTSFGLPQTRRISLASPRQLFKASNMTQRWQHREISNFEYLMFLNTIAGRSYNDLNQYPVFPWVITNYESEELDLTLPTNFRDLSKPIGALNPKRAAFFAERYESWEDDQVPKFHYGTHYSTASFVLAWLLRIEPFTTYFLNLQGGKFDHADRTFSSISRAWRNSQRDTSDIKELIPEFYYLPEMFVNFNNYNLGVMDDGTVVSDVELPPWAKTSEEFVHINRLALESEFVSCQLHQWIDLIFGYKQQGPEAVRALNVFYYLTYEGAVNLNSITDPVLREAVEAQIRSFGQTPSQLLIEPHPPRGSAMQVSPLMFTDKAQQDVIMVLKFPSNSPVTHVAANTQPGLATPAVITVTANRLFAVNKWHNLPAHQGAVQDQPYQLPVEIDPLIASNTGMHRRQITDLLDQSIQVHSQCFVITSDNRYILVCGFWDKSFRVYSTDTGRLIQVVFGHWDVVTCLARSESYIGGNCYILSGSRDATLLLWYWNGKCSGIGDNPGSETAAPRAILTGHDYEVTCAAVCAELGLVLSGSQEGPCLIHSMNGDLLRTLEGPENCLKPKLIQASREGHCVIFYENGLFCTFSVNGKLQATMETDDNIRAIQLSRDGQYLLTGGDRGVVVVRQVSDLKQLFAYPGCDAGIRAMALSYDQRCIISGMASGSIVLFYNDFNRWHHEYQTRY

SEQ ID NO: 47267 - protein, 2851 aa, Homo sapiens
  Payload ID: 9575
  Gene Symbol: LRBA
  Gene Name: LPS-responsive vesicle trafficking, beach and anchor containing
  Uniprot ID: P50851
  ENSP ID: ENSP00000421552
MASEDNRVPSPPPTGDDGGGGGREETPTEGGALSLKPGLPIRGIRMKFAVLTGLVEVGEVSNRDIVETVFNLLVGGQFDLEMNFIIQEGESINCMVDLLEKCDITCQAEVWSMFTAILKKSIRNLQVCTEVGLVEKVLGKIEKVDNMIADLLVDMLGVLASYNLTVRELKLFFSKLQGDKGRWPPHAGKLLSVLKHMPQKYGPDAFFNFPGKSAAAIALPPIAKWPYQNGFTFHTWLRMDPVNNINVDKDKPYLYCFRTSKGLGYSAHFVGGCLIVTSIKSKGKGFQHCVKFDFKPQKWYMVTIVHIYNRWKNSELRCYVNGELASYGEITWFVNTSDTFDKCFLGSSETADANRVFCGQMTAVYLFSEALNAAQIFAIYQLGLGYKGTFKFKAESDLFLAEHHKLLLYDGKLSSAIAFTYNPRATDAQLCLESSPKDNPSIFVHSPHALMLQDVKAVLTHSIQSAMHSIGGVQVLFPLFAQLDYRQYLSDEIDLTICSTLLAFIMELLKNSIAMQEQMLACKGFLVIGYSLEKSSKSHVSRAVLELCLAFSKYLSNLQNGMPLLKQLCDHVLLNPAIWIHTPAKVQLMLYTYLSTEFIGTVNIYNTIRRVGTVLLIMHTLKYYYWAVNPQDRSGITPKGLDGPRPNQKEMLSLRAFLLMFIKQLVMKDSGVKEDELQAILNYLLTMHEDDNLMDVLQLLVALMSEHPNSMIPAFDQRNGLRVIYKLLASKSEGIRVQALKAMGYFLKHLAPKRKAEVMLGHGLFSLLAERLMLQTNLITMTTYNVLFEILIEQIGTQVIHKQHPDPDSSVKIQNPQILKVIATLLRNSPQCPESMEVRRAFLSDMIKLFNNSRENRRSLLQCSVWQEWMLSLCYFNPKNSDEQKITEMVYAIFRILLYHAVKYEWGGWRVWVDTLSITHSKVTFEIHKENLANIFREQQGKVDEEIGLCSSTSVQAASGIRRDINVSVGSQQPDTKDSPVCPHFTTNGNENSSIEKTSSLESASNIELQTTNTSYEEMKAEQENQELPDEGTLEETLTNETRNADDLEVSSDIIEAVAISSNSFITTGKDSMTVSEVTASISSPSEEDASEMPEFLDKSIVEEEEDDDYVELKVEGSPTEEANLPTELQDNSLSPAASEAGEKLDMFGNDDKLIFQEGKPVTEKQTDTETQDSKDSGIQTMTASGSSAMSPETTVSQIAVESDLGQMLEEGKKATNLTRETKLINDCHGSVSEASSEQKIAKLDVSNVATDTERLELKASPNVEAPQPHRHVLEISRQHEQPGQGIAPDAVNGQRRDSRSTVFRIPEFNWSQMHQRLLTDLLFSIETDIQMWRSHSTKTVMDFVNSSDNVIFVHNTIHLISQVMDNMVMACGGILPLLSAATSATHELENIEPTQGLSIEASVTFLQRLISLVDVLIFASSLGFTEIEAEKSMSSGGILRQCLRLVCAVAVRNCLECQQHSQLKTRGDKALKPMHSLIPLGKSAAKSPVDIVTGGISPVRDLDRLLQDMDINRLRAVVFRDIEDSKQAQFLALAVVYFISVLMVSKYRDILEPQNERHSQSCTETGSENENVSLSEITPAAFSTLTTASVEESESTSSARRRDSGIGEETATGLGSHVEVTPHTAPPGVSAGPDAISEVLSTLSLEVNKSPETKNDRGNDLDTKATPSVSVSKNVNVKDILRSLVNIPADGVTVDPALLPPACLGALGDLSVEQPVQFRSFDRSVIVAAKKSAVSPSTFNTSIPTNAVSVVSSVDSAQASDMGGESPGSRSSNAKLPSVPTVDSVSQDPVSNMSITERLEHALEKAAPLLREIFVDFAPFLSRTLLGSHGQELLIEGTSLVCMKSSSSVVELVMLLCSQEWQNSIQKNAGLAFIELVNEGRLLSQTMKDHLVRVANEAEFILSRQRAEDIHRHAEFESLCAQYSADKREDEKMCDHLIRAAKYRDHVTATQLIQKIINILTDKHGAWGNSAVSRPLEFWRLDYWEDDLRRRRRFVRNPLGSTHPEATLKTAVEHATDEDILAKGKQSIRSQALGNQNSENEILLEGDDDTLSSVDEKDLENLAGPVSLSTPAQLVAPSVVVKGTLSVTSSELYFEVDEEDPNFKKIDPKILAYTEGLHGKWLFTEIRSIFSRRYLLQNTALEIFMANRVAVMFNFPDPATVKKVVNYLPRVGVGTSFGLPQTRRISLASPRQLFKASNMTQRWQHREISNFEYLMFLNTIAGRSYNDLNQYPVFPWVITNYESEELDLTLPTNFRDLSKPIGALNPKRAAFFAERYESWEDDQVPKFHYGTHYSTASFVLAWLLRIEPFTTYFLNLQGGKFDHADRTFSSISRAWRNSQRDTSDIKELIPEFYYLPEMFVNFNNYNLGVMDDGTVVSDVELPPWAKTSEEFVHINRLALESEFVSCQLHQWIDLIFGYKQQGPEAVRALNVFYYLTYEGAVNLNSITDPVLREAVEAQIRSFGQTPSQLLIEPHPPRGSAMQVSPLMFTDKAQQDVIMVLKFPSNSPVTHVAANTQPGLATPAVITVTANRLFAVNKWHNLPAHQGAVQDQPYQLPVEIDPLIASNTGMHRRQITDLLDQSIQVHSQCFVITSDNRYILVCGFWDKSFRVYSTDTGRLIQVVFGHWDVVTCLARSESYIGGNCYILSGSRDATLLLWYWNGKCSGIGDNPGETAAPRAILTGHDYEVTCAAVCAELGLVLSGSQEGPCLIHSMNGDLLRTLEGPENCLKPKLIQASREGHCVIFYENGLFCTFSVNGKLQATMETDDNIRAIQLSRDGQYLLTGGDRGVVVVRQVSDLKQLFAYPGCDAGIRAMALSYDQRCIISGMASGSIVLFYNDFNRWHHEYQTRY

SEQ ID NO: 47268 - protein, 2575 aa, Homo sapiens
  Payload ID: 9575
  Gene Symbol: LRBA
  Gene Name: LPS-responsive vesicle trafficking, beach and anchor containing
  ENSP ID: ENSP00000422180
MASEDNRVPSPPPTGDDGGGGGREETPTEGGALSLKPGLPIRGIRMKFAVLTGLVEVGEVSNRDIVETVFNLLVGGQFDLEMNFIIQEGESINCMVDLLEKCDITCQAEVWSMFTAILKKSIRNLQVCTEVGLVEKVLGKIEKVDNMIADLLVDMLGVLASYNLTVRELKLFFSKLQGDKGRWPPHAGKLLSVLKHMPQKYGPDAFFNFPGKSAAAIALPPIAKWPYQNGFTFHTWLRMDPVNNINVDKDKPYLYCFRTSKGLGYSAHFVGGCLIVTSIKSKGKGFQHCVKFDFKPQKWYMVTIVHIYNRWKNSELRCYVNGELASYGEITWFVNTSDTFDKCFLGSSETADANRVFCGQMTAVYLFSEALNAAQIFAIYQLGLGYKGTFKFKAESDLFLAEHHKLLLYDGKLSSAIAFTYNPRATDAQLCLESSPKDNPSIFVHSPHALMLQDVKAVLTHSIQSAMHSIGGVQVLFPLFAQLDYRQYLSDEIDLTICSTLLAFIMELLKNSIAMQEQMLACKGFLVIGYSLEKSSKSHVSRAVLELCLAFSKYLSNLQNGMPLLKQLCDHVLLNPAIWIHTPAKVQLMLYTYLSTEFIGTVNIYNTIRRVGTVLLIMHTLKYYYWAVNPQDRSGITPKGLDGPRPNQKEMLSLRAFLLMFIKQLVMKDSGVKEDELQAILNYLLTMHEDDNLMDVLQLLVALMSEHPNSMIPAFDQRNGLRVIYKLLASKSEGIRVQALKAMGYFLKHLAPKRKAEVMLGHGLFSLLAERLMLQTNLITMTTYNVLFEILIEQIGTQVIHKQHPDPDSSVKIQNPQILKVIATLLRNSPQCPESMEVRRAFLSDMIKLFNNSRENRRSLLQCSVWQEWMLSLCYFNPKNSDEQKITEMVYAIFRILLYHAVKYEWGGWRVWVDTLSITHSKVTFEIHKENLANIFREQQGKVDEEIGLCSSTSVQAASGIRRDINVSVGSQQPDTKDSPVCPHFTTNGNENSSIEKTSSLESASNIELQTTNTSYEEMKAEQENQELPDEGTLEETLTNETRNADDLEVSSDIIEAVAISSNSFITTGKDSMTVSEVTASISSPSEEDASEMPEFLDKSIVEEEEDDDYVELKVEGSPTEEANLPTELQDNSLSPAASEAGEKLDMFGNDDKLIFQEGKPVTEKQTDTETQDSKDSGIQTMTASGSSAMSPETTVSQIAVESDLGQMLEEGKKATNLTRETKLINDCHGSVSEASSEQKIAKLDVSNVATDTERLELKASPNVEAPQPHRHVLEISRQHEQPGQGIAPDAVNGQRRDSRSTVFRIPEFNWSQMHQRLLTDLLFSIETDIQMWRSHSTKTVMDFVNSSDNVIFVHNTIHLISQVMDNMVMACGGILPLLSAATSATHELENIEPTQGLSIEASVTFLQRLISLVDVLIFASSLGFTEIEAEKSMSSGGILRQCLRLVCAVAVRNCLECQQHSQLKTRGDKALKPMHSLIPLGKSAAKSPVDIVTGGISPVRDLDRLLQDMDINRLRAVVFRDIEDSKQAQFLALAVVYFISVLMVSKYRDILEPQNERHSQSCTETGSENENVSLSEITPAAFSTLTTASVEESESTSSARRRDSGIGEETATGLGSHVEVTPHTAPPGVSAGPDAISEVLSTLSLEVNKSPETKNDRGNDLDTKATPSVSVSKNVNVKDILRSLVNIPADGVTVDPALLPPACLGALGDLSVEQPVQFRSFDRSVIVAAKKSAVSPSTFNTSIPTNAVSVVSSVDSAQASDMGGESPGSRSSNAKLPSVPTVDSVSQDPVSNMSITERLEHALEKAAPLLREIFVDFAPFLSRTLLGSHGQELLIEGTSLVCMKSSSSVVELVMLLCSQEWQNSIQKNAGLAFIELVNEGRLLSQTMKDHLVRVANEAEFILSRQRAEDIHRHAEFESLCAQYSADKREDEKMCDHLIRAAKYRDHVTATQLIQKIINILTDKHGAWGNSAVSRPLEFWRLDYWEDDLRRRRRFVRNPLGSTHPEATLKTAVEHATDEDILAKGKQSIRSQALGNQNSENEILLEGDDDTLSSVDEKDLENLAGPVSLSTPAQLVAPSVVVKGTLSVTSSELYFEVDEEDPNFKKIDPKILAYTEGLHGKWLFTEIRSIFSRRYLLQNTALEIFMANRVAVMFNFPDPATVKKVVNYLPRVGVGTSFGLPQTRRISLASPRQLFKASNMTQRWQHREISNFEYLMFLNTIAGRSYNDLNQYPVFPWVITNYESEELDLTLPTNFRDLSKPIGALNPKRAAFFAERYESWEDDQVPKFHYGTHYSTASFVLAWLLRIEPFTTYFLNLQGGKFDHADRTFSSISRAWRNSQRDTSDIKELIPEFYYLPEMFVNFNNYNLGVMDDGTVVSDVELPPWAKTSEEFVHINRLALESEFVSCQLHQWIDLIFGYKQQGPEAVRALNVFYYLTYEGAVNLNSITDPVLREAVEAQIRSFGQTPSQLLIEPHPPRGSAMQVSPLMFTDKAQQDVIMVLKFPSNSPVTHVAANTQPGLATPAVITVTANRLFAVNKWHNLPAHQGAVQDQPYQLPVEIDPLIGLSLPSLFAIH

SEQ ID NO: 47269 - protein, 134 aa, Homo sapiens
  Payload ID: 9575
  Gene Symbol: LRBA
  Gene Name: LPS-responsive vesicle trafficking, beach and anchor containing
  ENSP ID: ENSP00000424640
GFTEIEAEKSMSSGGILRQCLRLVCAVAVRNCLECQQHSQLKTRGDKALKPMHSLIPLGKSAAKSPVDIVTGGISPVRDLDRLLQDMDINRLRAVVFRDITKKSLHMNLQNIIDFVRSRITNMSKNCIKWICSN

SEQ ID NO: 47270 - protein, 147 aa, Homo sapiens
  Payload ID: 9575
  Gene Symbol: LRBA
  Gene Name: LPS-responsive vesicle trafficking, beach and anchor containing
  ENSP ID: ENSP00000425852
  MOD_RES (1)..(1): Any amino acid
XYILSGSRDATLLLWYWNGKCSGIGDNPGSETAAPRAILTGHDYEVTCAAVCAELGLVLSGSQEGPCLIHSMNGDLLRTLEGPENCLKPKLIQASREGHCVIFYENGLFCTFSVNGKLQATMETDDNIRVHHFWHGFRKHCAILQRL

SEQ ID NO: 47271 - protein, 1505 aa, Homo sapiens
  Payload ID: 9575
  Gene Symbol: LRBA
  Gene Name: LPS-responsive vesicle trafficking, beach and anchor containing
  ENSP ID: ENSP00000426669
  MOD_RES (1)..(1): Any amino acid
XDNVIFVHNTIHLISQVMDNMVMACGGILPLLSAATSATHELENIEPTQGLSIEASVTFLQRLISLVDVLIFASSLGFTEIEAEKSMSSGGILRQCLRLVCAVAVRNCLECQQHSQLKTRGDKALKPMHSLIPLGKSAAKSPVDIVTGGISPVRDLDRLLQDMDINRLRAVVFRDIEDSKQAQFLALAVVYFISVLMVSKYRDILEPQNERHSQSCTETGSENENVSLSEITPAAFSTLTTASVEESESTSSARRRDSGIGEETATGLGSHVEVTPHTAPPGVSAGPDAISEVLSTLSLEVNKSPETKNDRGNDLDTKATPSVSVSKNVNVKDILRSLVNIPADGVTVDPALLPPACLGALGDLSVEQPVQFRSFDRSVIVAAKKSAVSPSTFNTSIPTNAVSVVSSVDSAQASDMGGESPGSRSSNAKLPSVPTVDSVSQDPVSNMSITERLEHALEKAAPLLREIFVDFAPFLSRTLLGSHGQELLIEGTSLVCMKSSSSVVELVMLLCSQEWQNSIQKNAGLAFIELVNEGRLLSQTMKDHLVRVANEAEFILSRQRAEDIHRHAEFESLCAQYSADKREDEKMCDHLIRAAKYRDHVTATQLIQKIINILTDKHGAWGNSAVSRPLEFWRLDYWEDDLRRRRRFVRNPLGSTHPEATLKTAVEHATDEDILAKGKQSIRSQALGNQNSENEILLEGDDDTLSSVDEKDLENLAGPVSLSTPAQLVAPSVVVKGTLSVTSSELYFEVDEEDPNFKKIDPKILAYTEGLHGKWLFTEIRSIFSRRYLLQNTALEIFMANRVAVMFNFPDPATVKKVVNYLPRVGVGTSFGLPQTRRISLASPRQLFKASNMTQRWQHREISNFEYLMFLNTIAGRSYNDLNQYPVFPWVITNYESEELDLTLPTNFRDLSKPIGALNPKRAAFFAERYESWEDDQVPKFHYGTHYSTASFVLAWLLRIEPFTTYFLNLQGGKFDHADRTFSSISRAWRNSQRDTSDIKELIPEFYYLPEMFVNFNNYNLGVMDDGTVVSDVELPPWAKTSEEFVHINRLALESEFVSCQLHQWIDLIFGYKQQGPEAVRALNVFYYLTYEGAVNLNSITDPVLREAVEAQIRSFGQTPSQLLIEPHPPRGSAMQVSPLMFTDKAQQDVIMVLKFPSNSPVTHVAANTQPGLATPAVITVTANRLFAVNKWHNLPAHQGAVQDQPYQLPVEIDPLIASNTGMHRRQITDLLDQSIQVHSQCFVITSDNRYILVCGFWDKSFRVYSTDTGRLIQVVFGHWDVVTCLARSESYIGGNCYILSGSRDATLLLWYWNGKCSGIGDNPGSETAAPRAILTGHDYEVTCAAVCAELGLVLSGSQEGPCLIHSMNGDLLRTLEGPENCLKPKLIQASREGHCVIFYENGLFCTFSVNGKLQATMETDDNIRAIQLSRDGQYLLTGGDRGVVVVRQVSDLKQLFAYPGCDAGIRAMALSYDQRCIISGMASGSIVLFYNDFNRWHHEYQTRY

SEQ ID NO: 47272 - protein, 1070 aa, Homo sapiens; identical to SEQ ID NO: 45954
  Payload ID: 9576
  Gene Symbol:
  Gene Name: LRIG1
  ENSP ID: ENSP00000488182

SEQ ID NO: 47273 - protein, 1093 aa, Homo sapiens; identical to SEQ ID NO: 45953
  Payload ID: 9576
  Gene Symbol:
  Gene Name: LRIG1
  ENSP ID: ENSP00000488729

SEQ ID NO: 47274 - protein, 347 aa, Homo sapiens
  Payload ID: 9577
  Gene Symbol: LRP2BP
  Gene Name: LRP2 binding protein
  Uniprot ID: Q9P2M1
  ENSP ID: ENSP00000332681
MKLTSEKLPKNPFYASVSQYAAKNQKFFQWKKEKTDYTHANLVDKALQLLKERILKGDTLAYFLRGQLYFEEGWYEEALEQFEEIKEKDHQATYQLGVMYYDGLGTTLDAEKGVDYMKKILDSPCPKARHLKFAAAYNLGRAYYEGKGVKRSNEEAERLWLIAADNGNPKASVKAQSMLGLYYSTKEPKELEKAFYWHSEACGNGNLESQGALGLMYLYGQGIRQDTEAALQCLREAAERGNVYAQGNLVEYYYKMKFFTKCVAFSKRIADYDEVHDIPMIAQVTDCLPEFIGRGMAMASFYHARCLQLGLGITRDETTAKHYYSKACRLNPALADELHSLLIRQRI

SEQ ID NO: 47275 - protein, 153 aa, Homo sapiens
  Payload ID: 9577
  Gene Symbol: LRP2BP
  Gene Name: LRP2 binding protein
  ENSP ID: ENSP00000421244
MKLTSEKLPKNPFYASVSQYAAKNQKFFQWKKEKTDYTHANLVDKALQLLKERILKGDTLAYFLRGQLYFEEGWYEEALEQFEEIKEKDHQATYQLGVMYYDGLGTTLDAEKGVDYMKKILDSPCPKARHLKFAAAYNLGRAYYEGKGVKRSN

SEQ ID NO: 47276 - protein, 321 aa, Homo sapiens
  Payload ID: 9577
  Gene Symbol: LRP2BP
  Gene Name: LRP2 binding protein
  ENSP ID: ENSP00000424610
MEFLTFLKSDYTHANLVDKALQLLKERILKGDTLAYFLRGQLYFEEGWYEEALEQFEEIKEKDHQATYQLGVMYYDGLGTTLDAEKGVDYMKKILDSPCPKARHLKFAAAYNLGRAYYEGKGVKRSNEEAERLWLIAADNGNPKASVKAQSMLGLYYSTKEPKELEKAFYWHSEACGNGNLESQGALGLMYLYGQGIRQDTEAALQCLREAAERGNVYAQGNLVEYYYKMKFFTKCVAFSKRIADYDEVHDIPMIAQVTDCLPEFIGRGMAMASFYHARCLQLGLGITRDETTAKHYYSKACRLNPALADELHSLLIRQRI

SEQ ID NO: 47277 - protein, 347 aa, Homo sapiens; identical to SEQ ID NO: 47274
  Payload ID: 9577
  Gene Symbol: LRP2BP
  Gene Name: LRP2 binding protein
  Uniprot ID: Q9P2M1
  ENSP ID: ENSP00000426203

SEQ ID NO: 47278 - protein, 238 aa, Homo sapiens
  Payload ID: 9578
  Gene Symbol: LRRN4CL
  Gene Name: LRRN4 C-terminal like
  Uniprot ID: Q8ND94
  ENSP ID: ENSP00000325808
MLGSPCLLWLLAVTFLVPRAQPLAPQDFEEEEADETETAWPPLPAVPCDYDHCRHLQVPCKELQRVGPAACLCPGLSSPAQPPDPPRMGEVRIAAEEGRAVVHWCAPFSPVLHYWLLLWDGSEAAQKGPPLNATVRRAELKGLKPGGIYVVCVVAANEAGASRVPQAGGEGLEGADIPAFGPCSRLAVPPNPRTLVHAAVGVGTALALLSCAALVWHFCLRDRWGCPRRAAARAAGAL

SEQ ID NO: 47279 - protein, 385 aa, Homo sapiens
  Payload ID: 9579
  Gene Symbol: LSM14B
  Gene Name: LSM family member 14B
  Uniprot ID: Q9BX40
  ENSP ID: ENSP00000279068
MSGSSGTPYLGSKISLISKAQIRYEGILYTIDTDNSTVALAKVRSFGTEDRPTDRPAPPREEIYEYIIFRGSDIKDITVCEPPKAQHTLPQDPAIVQSSLGSASASPFQPHVPYSPFRGMAPYGPLAASSLLSQQYAASLGLGAGFPSIPVGKSPMVEQAVQTGSADNLNAKKLLPGKGTTGTQLNGRQAQPSSKTASDVVQPAAVQAQGQVNDENRRPQRRRSGNRRTRNRSRGQNRPTNVKENTIKFEGDFDFESANAQFNREELDKEFKKKLNFKDDKAEKGEEKDLAVVTQSAEAPAEEDLLGPNCYYDKSKSFFDNISSELKTSSRRTTWAEERKLNTETFGVSGRFLRGRSSRGGFRGGRGNGTTRRNPTSHRAGTGRV

SEQ ID NO: 47280 - protein, 223 aa, Homo sapiens
  Payload ID: 9579
  Gene Symbol: LSM14B
  Gene Name: LSM family member 14B
  ENSP ID: ENSP00000279069
MSGSSGTPYLGSKISLISKAQIRYEGILYTIDTDNSTVALAKVRSFGTEDRPTDRPAPPREEIYEYIIFRGSDIKDITVCEPPKAQHTLPQDPAIVQSSLGSASASPFQPHVPYSPFRGMAPYGPLAASSLLSQQYAASLGLGAGFPSIPVGKSPMVEQAVQTGSADNLNAKKLLPGKGTTGTQLNGRQAQPSSKTASGNRRTRNRSRGQNRPTNVKENTIKF

SEQ ID NO: 47281 - protein, 248 aa, Homo sapiens
  Payload ID: 9579
  Gene Symbol: LSM14B
  Gene Name: LSM family member 14B
  ENSP ID: ENSP00000355209
MAPYGPLAASSLLSQQYAASLGLEKLVSPPASAAASSPSSSPSPQPVSELDLSSEPQQLTAKGAGFPSIPVGKSPMVEQAVQTGSADNLNAKKLLPGKGTTGTQLNGRQAQPSSKTASDVVQPAAVQAQGQVNDENRRPQRRRSGNRRTRNRSRGQNRPTNVKENTIKFEGDFDFESANAQFNREELDKEFKKKLNFKDDKAEKGEEKDLAVVTQSAEAPAEEDLLGPNCYYDKSKSFFDNISSELKT

SEQ ID NO: 47282 - protein, 221 aa, Homo sapiens
  Payload ID: 9579
  Gene Symbol: LSM14B
  Gene Name: LSM family member 14B
  ENSP ID: ENSP00000359953
MSGSSGTPYLGSKISLISKAQIRYEGILYTIDTDNSTVALAKVRSFGTEDRPTDRPAPPREEIYEYIIFRGSDIKDITVCEPPKAQHTLPQDPAIVQSSLGSASASPFQPHVPYSPFRGMAPYGPLAASSLLSQQYAASLGLEKLVSPPASAAASSPSSSPSPQPVSELDLSSEPQQLTAKGNSSLGELHAVLQTILRARGKAADRMTVAVADHLPSPCSR

SEQ ID NO: 47283 - protein, 296 aa, Homo sapiens
  Payload ID: 9579
  Gene Symbol: LSM14B
  Gene Name: LSM family member 14B
  ENSP ID: ENSP00000383172
MSGSSGTPYLGSKISLISKAQIRYEGILYTIDTDNSTVALAKVRSFGTEDRPTDRPAPPREEIYEYIIFRGSDIKDITVCEPPKAQHTLPQDPAIVQLNKRPDEGVRGDGMAFAVLTRCLVVQSSLGSASASPFQPHVPYSPFRGMAPYGPLAASSLLSQQYAASLGLGAGFPSIPVGKSPMVEQAVQTGSADNLNAKKLLPGKGTTGTQLNGRQAQPSSKTASDVVQPAAVQAQGQVNDENRRPQRRRSGNRRTRNRSRGQNRPTNVKENTIKFEGDFDFESANAQFNREELDKE

SEQ ID NO: 47284 - protein, 133 aa, Homo sapiens
  Payload ID: 9580
  Gene Symbol: LSM1
  Gene Name: LSM1 homolog, mRNA degradation associated
  Uniprot ID: O15116
  ENSP ID: ENSP00000310596
MNYMPGTASLIEDIDKKHLVLLRDGRTLIGFLRSIDQFANLVLHQTVERIHVGKKYGDIPRGIFVVRGENVVLLGEIDLEKESDTPLQQVSIEEILEEQRVEQQTKLEAEKLKVQALKDRGLSIPRADTLDEY

SEQ ID NO: 47285 - protein, 44 aa, Homo sapiens
  Payload ID: 9580
  Gene Symbol: LSM1
  Gene Name: LSM1 homolog, mRNA degradation associated
  ENSP ID: ENSP00000428307
MNYMPGTASLIEDIDKKHLVLLRDGRTLIGFLRSIDQFGTSCSC

SEQ ID NO: 47286 - protein, 44 aa, Homo sapiens
  Payload ID: 9580
  Gene Symbol: LSM1
  Gene Name: LSM1 homolog, mRNA degradation associated
  ENSP ID: ENSP00000430021
MNYMPGTASLIEDIDKKHLVLLRDGRTLIGFLRSIDQFGLGKGE

SEQ ID NO: 47287 - protein, 123 aa, Homo sapiens
  Payload ID: 9581
  Gene Symbol: LSM10
  Gene Name: LSM10, U7 small nuclear RNA associated
  Uniprot ID: Q969L4
  ENSP ID: ENSP00000319341
MAVSHSVKERTISENSLIILLQGLQGRVTTVDLRDESVAHGRIDNVDAFMNIRLAKVTYTDRWGHQVKLDDLFVTGRNVRYVHIPDDVNITSTIEQQLQIIHRVRNFGGKGQGRWEFPPKNCK

SEQ ID NO: 47288 - protein, 360 aa, Homo sapiens
  Payload ID: 9582
  Gene Symbol: LSM11
  Gene Name: LSM11, U7 small nuclear RNA associated
  Uniprot ID: P83369
  ENSP ID: ENSP00000286307
MEERERGARSAGAGSPARPPSPRLDVSSDSFDPLLALYAPRLPPIPYPNAPCFNNVAEYESFLRTGVRGGGRGRGRARGAAAGSGVPAAPGPSGRTRRRPDAPAPDPERIQRLRRLMVAKEEGDGAAGAGRRGPGRSRKAPRNVLTRMPLHEGSPLGELHRCIREGVKVNVHIRTFKGLRGVCTGFLVAFDKFWNMALTDVDETYRKPVLGKAYERDSSLTLTRLFDRLKLQDSSKKEADSKSAVEDSTLSRYSQTSTWKLASVWGRADTGRGSHKRSRSVPSSLQASAREESRSELSGRTTRTDGSSVGGTFSRATTLSRGQSRKKKRKPKVDYQQVFTRHINQIFIRGENVLLVHLAQ

SEQ ID NO: 47289 - protein, 195 aa, Homo sapiens
  Payload ID: 9583
  Gene Symbol: LSM12
  Gene Name: LSM12 homolog
  Uniprot ID: Q3MHD2
  ENSP ID: ENSP00000293406
MAAPPGEYFSVGSQVSCRTCQEQRLQGEVVAFDYQSKMLALKCPSSSGKPNHADILLINLQYVSEVEIINDRTETPPPLASLNVSKLASKARTEKEEKLSQAYAISAGVSLEGQQLFQTIHKTIKDCKWQEKNIVVMEEVVITPPYQVENCKGKEGSALSHVRKIVEKHFRDVESQKILQRSQAQQPQKEAALSS

SEQ ID NO: 47290 - protein, 230 aa, Homo sapiens
  Payload ID: 9583
  Gene Symbol: LSM12
  Gene Name: LSM12 homolog
  ENSP ID: ENSP00000466074
MAAPPGEYFSVGSQVSCRTCQEQRLQGEVVAFDYQSKMLALKCPSSSGKPNHADILLINLQYVSEVEIINDRTETPPPLASLNVSKLASKARTEKEEKLSQAYAISAGVSLEGQQLFQTIHKTIKDCKWQEKNIVVMEEVVITPPYQVENCKGKEGSALSHVRKIRQSLALSPTLECSGAISAHCNLRLPGSSDSPASASRVPGTTGVCHHTRLEMGFHHVGQAGLELLT

SEQ ID NO: 47291 - protein, 195 aa, Homo sapiens; identical to SEQ ID NO: 47289
  Payload ID: 9583
  Gene Symbol: LSM12
  Gene Name: LSM12 homolog
  Uniprot ID: Q3MHD2
  ENSP ID: ENSP00000466718

SEQ ID NO: 47292 - protein, 463 aa, Homo sapiens
  Payload ID: 9584
  Gene Symbol: LSM14A
  Gene Name: LSM14A mRNA processing body assembly factor
  Uniprot ID: Q8ND56
  ENSP ID: ENSP00000413964
MSGGTPYIGSKISLISKAEIRYEGILYTIDTENSTVALAKVRSFGTEDRPTDRPIPPRDEVFEYIIFRGSDIKDLTVCEPPKPQCSLPQDPAIVQSSLGSSTSSFQSMGSYGPFGRMPTYSQFSPSSLVGQQFGAVGVAGSSLTSFGTETSNSGTLPQSSAVGSAFTQDTRSLKTQLSQGRSSPQLDPLRKSPTMEQAVQTASAHLPAPAAVGRRSPVSTRPLPSASQKAGENQEHRRAEVHKVSRPENEQLRNDNKRQVAPGAPSAPRRGRGGHRGGRGRFGIRRDGPMKFEKDFDFESANAQFNKEEIDREFHNKLKLKEDKLEKQEKPVNGEDKGDSGVDTQNSEGNADEEDPLGPNCYYDKTKSFFDNISCDDNRERRPTWAEERRLNAETFGIPLRPNRGRGGYRGRGGLGFRGGRGRGGGRGGTFTAPRGFRGGFRGGRGGREFADFEYRKTTAFGP

SEQ ID NO: 47293 - protein, 463 aa, Homo sapiens
  Payload ID: 9584
  Gene Symbol: LSM14A
  Gene Name: LSM14A mRNA processing body assembly factor
  Uniprot ID: Q8ND56
  ENSP ID: ENSP00000446271
MSGGTPYIGSKISLISKAEIRYEGILYTIDTENSTVALAKVRSFGTEDRPTDRPIPPRDEVFEYIIFRGSDIKDLTVCEPPKPQCSLPQDPAIVQSSLGSSTSSFQSMGSYGPFGRMPTYSQFSPSSLVGQQFGAVGVAGSSLTSFGTETSNSGTLPQSSAVGSAFTQDTRSLKTQLSQGRSSPQLDPLRKSPTMEQAVQTASAHLPAPAAVGRRSPVSTRPLPSASQKAGENQEHRRAEVHKVSRPENEQLRNDNKRQVAPGAPSAPRRGRGGHRGGRGRFGIRRDGPMKFEKDFDFESANAQFNKEEIDREFHNKLKLKEDKLEKQEKPVNGEDKGDSGVDTQNSEGNADEEDPLGPNCYYDKTKSFFDNISCDDNRERRPTWAEERRLNAETFGIPLRPNRGRGGYRGRGGLGFRGGRGRGGGRGGTFTAPRGFRGGFRGGRGGREFADFEYRKDNKVAA

SEQ ID NO: 47294 - protein, 422 aa, Homo sapiens
  Payload ID: 9584
  Gene Symbol: LSM14A
  Gene Name: LSM14A mRNA processing body assembly factor
  Uniprot ID: Q8ND56
  ENSP ID: ENSP00000446451
MSGGTPYIGSKISLISKAEIRYEGILYTIDTENSTVALAKVRSFGTEDRPTDRPIPPRDEVFEYIIFRGSDIKDLTVCEPPKPQCSLPQDPAIVQSSLGSSTSSFQSMGSYGPFGRMPTYSQFSPSSLVGQQFGAVGVGRSSPQLDPLRKSPTMEQAVQTASAHLPAPAAVGRRSPVSTRPLPSASQKAGENQEHRRAEVHKVSRPENEQLRNDNKRQVAPGAPSAPRRGRGGHRGGRGRFGIRRDGPMKFEKDFDFESANAQFNKEEIDREFHNKLKLKEDKLEKQEKPVNGEDKGDSGVDTQNSEGNADEEDPLGPNCYYDKTKSFFDNISCDDNRERRPTWAEERRLNAETFGIPLRPNRGRGGYRGRGGLGFRGGRGRGGGRGGTFTAPRGFRGGFRGGRGGREFADFEYRKTTAFGP

SEQ ID NO: 47295 - protein, 463 aa, Homo sapiens; identical to SEQ ID NO: 47292
  Payload ID: 9584
  Gene Symbol: LSM14A
  Gene Name: LSM14A mRNA processing body assembly factor
  Uniprot ID: Q8ND56
  ENSP ID: ENSP00000459843

SEQ ID NO: 47296 - protein, 80 aa, Homo sapiens
  Payload ID: 9584
  Gene Symbol: LSM14A
  Gene Name: LSM14A mRNA processing body assembly factor
  ENSP ID: ENSP00000460420
TWAEERRLNAETFGIPLRPNRGRGGYRGRGGLGFRGGRGRGGGRGGTFTAPRGFRGGFRGGRGGREFADFEYRKDNKVAA

SEQ ID NO: 47297 - protein, 344 aa, Homo sapiens
  Payload ID: 9584
  Gene Symbol: LSM14A
  Gene Name: LSM14A mRNA processing body assembly factor
  ENSP ID: ENSP00000460896
PYIGSKISLISKAEIRYEGILYTIDTENSTVALAKVRSFGTEDRPTDRPIPPRDEVFEYIIFRGSDIKDLTVCEPPKPQCSLPQDPAIVQSSLGSSTSSFQSMGSYGPFGRMPTYSQFSPSSLVGQQFGAVGVAGSSLTSFGTETSNSGTLPQSSAVGSAFTQDTRSLKTQLSQAEVHKVSRPENEQLRNDNKRQVAPGAPSAPRRGRGGHRGGRGRFGIRRDGPMKFEKDFDFESANAQFNKEEIDREFHNKLKLKEDKLEKQEKPVNGEDKGDSGVDTQNSEGNADEEDPLGPNCYYDKTKSFFDNISCDDNRERRPTWAEERRLNAETFGIPLRPNRGRGG

SEQ ID NO: 47298 - protein, 463 aa, Homo sapiens; identical to SEQ ID NO: 47293
  Payload ID: 9584
  Gene Symbol: LSM14A
  Gene Name: LSM14A mRNA processing body assembly factor
  Uniprot ID: Q8ND56
  ENSP ID: ENSP00000461225

SEQ ID NO: 47299 - protein, 102 aa, Homo sapiens
  Payload ID: 9584
  Gene Symbol: LSM14A
  Gene Name: LSM14A mRNA processing body assembly factor
  ENSP ID: ENSP00000461436
MSGGTPYIGSKISLISKAEIRYEGILYTIDTENSTVALAKVRSFGTEDRPTDRPIPPRDEVFEYIIFRGSDIKDLTVCEPPKPQCSLPQDPAIVQSRWSTVA

SEQ ID NO: 47300 - protein, 314 aa, Homo sapiens
  Payload ID: 9584
  Gene Symbol: LSM14A
  Gene Name: LSM14A mRNA processing body assembly factor
  ENSP ID: ENSP00000466725
PYIGSKISLISKAEIRYEGILYTIDTENSTVALAKVRSFGTEDRPTDRPIPPRDEVFEYIIFRGSDIKDLTVCEPPKPQCSLPQDPAIVQSSLGSSTSSFQSMGSYGPFGRMPTYSQFSPSSLVGQQFGAVGVAGSSLTSFGTETSNSGTLPQSSAVGSAFTQDTRSLKTQLSQAEVHKVSRPENEQLRNDNKRQVAPGAPSAPRRGRGGHRGGRGRFGIRRDGPMKFEKDFDFESANAQFNKEEIDREFHNKLKLKEDKLEKQEKPVNGEDKGDSGVDTQNSEGNADEEDPLGPNCYYDKTKSFFDNISCDDN

SEQ ID NO: 47301 - protein, 102 aa, Homo sapiens; identical to SEQ ID NO: 47299
  Payload ID: 9584
  Gene Symbol: LSM14A
  Gene Name: LSM14A mRNA processing body assembly factor
  ENSP ID: ENSP00000468130

SEQ ID NO: 47302 - protein, 148 aa, Homo sapiens
  Payload ID: 9584
  Gene Symbol: LSM14A
  Gene Name: LSM14A mRNA processing body assembly factor
  ENSP ID: ENSP00000485334
  MOD_RES (1)..(1): Any amino acid
XDKLEKQEKPVNGEDKGDSGVDTQNSEGNADEEDPLGPNCYYDKTKSFFDNISCDDNRERRPTWAEERRLNAETFGIPLRPNRGRGGYRGRGGLGFRGGRGRGGGRGGTFTAPRGFRGGFRGGRGGREFADFEYRVSVTVNKFFGVDM

SEQ ID NO: 47303 - protein, 144 aa, Homo sapiens
  Payload ID: 9584
  Gene Symbol: LSM14A
  Gene Name: LSM14A mRNA processing body assembly factor
  ENSP ID: ENSP00000485590
EKQEKPVNGEDKGDSGVDTQNSEGNADEEDPLGPNCYYDKTKSFFDNISCDDNRERRPTWAEERRLNAETFGIPLRPNRGRGGYRGRGGLGFRGGRGRGGGRGGTFTAPRGFRGGFRGGRGGREFADFEYRVSVTVNKFFGVDM

SEQ ID NO: 47304 - protein, 95 aa, Homo sapiens
  Payload ID: 9585
  Gene Symbol: LSM2
  Gene Name: LSM2 homolog, U6 small nuclear RNA and mRNA degradation associated
  Uniprot ID: Q9Y333
  ENSP ID: ENSP00000364813
MLFYSFFKSLVGKDVVVELKNDLSICGTLHSVDQYLNIKLTDISVTDPEKYPHMLSVKNCFIRGSVVRYVQLPADEVDTQLLQDAARKEALQQKQ

SEQ ID NO: 47305 - protein, 95 aa, Homo sapiens; identical to SEQ ID NO: 47304
  Payload ID: 9585
  Gene Symbol: LSM2
  Gene Name: LSM2 homolog, U6 small nuclear RNA and mRNA degradation associated
  Uniprot ID: Q9Y333
  ENSP ID: ENSP00000372883

SEQ ID NO: 47306 - protein, 95 aa, Homo sapiens; identical to SEQ ID NO: 47304
  Payload ID: 9585
  Gene Symbol: LSM2
  Gene Name: LSM2 homolog, U6 small nuclear RNA and mRNA degradation associated
  Uniprot ID: Q9Y333
  ENSP ID: ENSP00000403345

SEQ ID NO: 47307 - protein, 95 aa, Homo sapiens; identical to SEQ ID NO: 47304
  Payload ID: 9585
  Gene Symbol: LSM2
  Gene Name: LSM2 homolog, U6 small nuclear RNA and mRNA degradation associated
  Uniprot ID: Q9Y333
  ENSP ID: ENSP00000406280

SEQ ID NO: 47308 - protein, 95 aa, Homo sapiens; identical to SEQ ID NO: 47304
  Payload ID: 9585
  Gene Symbol: LSM2
  Gene Name: LSM2 homolog, U6 small nuclear RNA and mRNA degradation associated
  Uniprot ID: Q9Y333
  ENSP ID: ENSP00000414006

SEQ ID NO: 47309 - protein, 95 aa, Homo sapiens; identical to SEQ ID NO: 47304
  Payload ID: 9585
  Gene Symbol: LSM2
  Gene Name: LSM2 homolog, U6 small nuclear RNA and mRNA degradation associated
  Uniprot ID: Q9Y333
  ENSP ID: ENSP00000414634

SEQ ID NO: 47310 - protein, 102 aa, Homo sapiens
  Payload ID: 9586
  Gene Symbol: LSM3
  Gene Name: LSM3 homolog, U6 small nuclear RNA and mRNA degradation associated
  Uniprot ID: P62310
  ENSP ID: ENSP00000302160
MADDVDQQQTTNTVEEPLDLIRLSLDERIYVKMRNDRELRGRLHAYDQHLNMILGDVEETVTTIEIDEETYEEIYKSTKRNIPMLFVRGDGVVLVAPPLRVG

SEQ ID NO: 47311 - protein, 69 aa, Homo sapiens
  Payload ID: 9587
  Gene Symbol: LSM4
  Gene Name: LSM4 homolog, U6 small nuclear RNA and mRNA degradation associated
  ENSP ID: ENSP00000469028
MLPLSLLKTAQNHPMLVELKNGETYNGHLVSCDNWMNINLREVICTSRVKNPNQREPHPRLEGAPVSHS

SEQ ID NO: 47312 - protein, 139 aa, Homo sapiens
  Payload ID: 9587
  Gene Symbol: LSM4
  Gene Name: LSM4 homolog, U6 small nuclear RNA and mRNA degradation associated
  Uniprot ID: Q9Y4Z0
  ENSP ID: ENSP00000469468
MLPLSLLKTAQNHPMLVELKNGETYNGHLVSCDNWMNINLREVICTSRDGDKFWRMPECYIRGSTIKYLRIPDEIIDMVKEEVVAKGRGRGGLQQQKQQKGRGMGGAGRGVFGGRGRGGIPGTGRGQPEKKPGRQAGKQ

SEQ ID NO: 47313 - protein, 125 aa, Homo sapiens
  Payload ID: 9587
  Gene Symbol: LSM4
  Gene Name: LSM4 homolog, U6 small nuclear RNA and mRNA degradation associated
  ENSP ID: ENSP00000475950
MLVELKNGETYNGHLVSCDNWMNINLREVICTSRDGDKFWRMPECYIRGSTIKYLRIPDEIIDMVKEEVVAKGRGRGGLQQQKQQKGRGMGGAGRGVFGGRGRGGIPGTGRGQPEKKPGRQAGKQ

SEQ ID NO: 47314 - protein, 109 aa, Homo sapiens
  Payload ID: 9587
  Gene Symbol: LSM4
  Gene Name: LSM4 homolog, U6 small nuclear RNA and mRNA degradation associated
  ENSP ID: ENSP00000476184
MGGTQDQSSQALVKQTNHVALFAFQLPLSLLKTAQNHPMLVELKNGETYNGHLVSCDNWMNINLREVICTSRDGDKFWRMPECYIRGSTIKYLRIPDEIIDMVKEEVVA

SEQ ID NO: 47315 - protein, 238 aa, Homo sapiens
  Payload ID: 9587
  Gene Symbol: LSM4
  Gene Name: LSM4 homolog, U6 small nuclear RNA and mRNA degradation associated
  ENSP ID: ENSP00000477443
MLPLSLLKTAQNHPMLVELKNGETYNGHLVSCDNWMNINLREVICTSRDGDKFWRMPECYIRGSTIKYLRIPDEIIDMVKEEVVAKGRGRGGLQQQKQQKGRGMGGAGRGGSPLSSGRTWGGKTATRGIPPSWGCPCSAASEPPNPPGPPSWSLAMSRGPGRGAPRPGTQPSSHCASWRSSGHIKSPPQASVSPLRGYGGAHLSRPLATPLGTWRGSIQSQGRPPPPEMMNWHKIPFV

SEQ ID NO: 47316 - protein, 71 aa, Homo sapiens
  Payload ID: 9588
  Gene Symbol: LSM5
  Gene Name: LSM5 homolog, U6 small nuclear RNA and mRNA degradation associated
  ENSP ID: ENSP00000223084
MAANATTNPSQLLPLGNRRPLGSRNRELTFRIGGRGAVPRQALAECGEMYKTKCGSTLSSKSSRQQAAPAL

SEQ ID NO: 47317 - protein, 64 aa, Homo sapiens
  Payload ID: 9588
  Gene Symbol: LSM5
  Gene Name: LSM5 homolog, U6 small nuclear RNA and mRNA degradation associated
  ENSP ID: ENSP00000386275
MAANATTNPSQLLPLELVDKCIGSRIHIVMKSDKEIVGTLLGFDDFVSILLKVKSHQKEEGLLN

SEQ ID NO: 47318 - protein, 62 aa, Homo sapiens
  Payload ID: 9588
  Gene Symbol: LSM5
  Gene Name: LSM5 homolog, U6 small nuclear RNA and mRNA degradation associated
  Uniprot ID: Q9Y4Y9
  ENSP ID: ENSP00000386363
MKSDKEIVGTLLGFDDFVNMVLEDVTEFEITPEGRRITKLDQILLNGNNITMLVPGGEGPEV

SEQ ID NO: 47319 - protein, 62 aa, Homo sapiens; identical to SEQ ID NO: 47318
  Payload ID: 9588
  Gene Symbol: LSM5
  Gene Name: LSM5 homolog, U6 small nuclear RNA and mRNA degradation associated
  Uniprot ID: Q9Y4Y9
  ENSP ID: ENSP00000386707

SEQ ID NO: 47320 - protein, 62 aa, Homo sapiens; identical to SEQ ID NO: 47318
  Payload ID: 9588
  Gene Symbol: LSM5
  Gene Name: LSM5 homolog, U6 small nuclear RNA and mRNA degradation associated
  Uniprot ID: Q9Y4Y9
  ENSP ID: ENSP00000386814

SEQ ID NO: 47321 - protein, 62 aa, Homo sapiens; identical to SEQ ID NO: 47318
  Payload ID: 9588
  Gene Symbol: LSM5
  Gene Name: LSM5 homolog, U6 small nuclear RNA and mRNA degradation associated
  Uniprot ID: Q9Y4Y9
  ENSP ID: ENSP00000387109

SEQ ID NO: 47322 - protein, 62 aa, Homo sapiens; identical to SEQ ID NO: 47318
  Payload ID: 9588
  Gene Symbol: LSM5
  Gene Name: LSM5 homolog, U6 small nuclear RNA and mRNA degradation associated
  Uniprot ID: Q9Y4Y9
  ENSP ID: ENSP00000387126

SEQ ID NO: 47323 - protein, 91 aa, Homo sapiens
  Payload ID: 9588
  Gene Symbol: LSM5
  Gene Name: LSM5 homolog, U6 small nuclear RNA and mRNA degradation associated
  Uniprot ID: Q9Y4Y9
  ENSP ID: ENSP00000410758
MAANATTNPSQLLPLELVDKCIGSRIHIVMKSDKEIVGTLLGFDDFVNMVLEDVTEFEITPEGRRITKLDQILLNGNNITMLVPGGEGPEV

SEQ ID NO: 47324 - protein, 80 aa, Homo sapiens
  Payload ID: 9589
  Gene Symbol: LSM6
  Gene Name: LSM6 homolog, U6 small nuclear RNA and mRNA degradation associated
  Uniprot ID: P62312
  ENSP ID: ENSP00000296581
MSLRKQTPSDFLKQIIGRPVVVKLNSGVDYRGVLACLDGYMNIALEQTEEYVNGQLKNKYGDAFIRGNNVLYISTQKRRM

SEQ ID NO: 47325 - protein, 80 aa, Homo sapiens; identical to SEQ ID NO: 47324
  Payload ID: 9589
  Gene Symbol: LSM6
  Gene Name: LSM6 homolog, U6 small nuclear RNA and mRNA degradation associated
  Uniprot ID: P62312
  ENSP ID: ENSP00000420929

SEQ ID NO: 47326 - protein, 80 aa, Homo sapiens; identical to SEQ ID NO: 47324
  Payload ID: 9589
  Gene Symbol: LSM6
  Gene Name: LSM6 homolog, U6 small nuclear RNA and mRNA degradation associated
  Uniprot ID: P62312
  ENSP ID: ENSP00000422392

SEQ ID NO: 47327 - protein, 80 aa, Homo sapiens; identical to SEQ ID NO: 47324
  Payload ID: 9589
  Gene Symbol: LSM6
  Gene Name: LSM6 homolog, U6 small nuclear RNA and mRNA degradation associated
  Uniprot ID: P62312
  ENSP ID: ENSP00000427036

SEQ ID NO: 47328 - protein, 103 aa, Homo sapiens
  Payload ID: 9590
  Gene Symbol: LSM7
  Gene Name: LSM7 homolog, U6 small nuclear RNA and mRNA degradation associated
  Uniprot ID: Q9UK45
  ENSP ID: ENSP00000252622
MADKEKKKKESILDLSKYIDKTIRVKFQGGREASGILKGFDPLLNLVLDGTIEYMRDPDDQYKLTEDTRQLGLVVCRGTSVVLICPQDGMEAIPNPFIQQQDA

SEQ ID NO: 47329 - protein, 60 aa, Homo sapiens
  Payload ID: 9590
  Gene Symbol: LSM7
  Gene Name: LSM7 homolog, U6 small nuclear RNA and mRNA degradation associated
  ENSP ID: ENSP00000466556
DKEKKKKESILDLSKYIDKTIRVKFQGGREESQALAHTPEEGHLGSMLETYLPQCSHLSP

SEQ ID NO: 47330 - protein, 35 aa, Homo sapiens
  Payload ID: 9590
  Gene Symbol: LSM7
  Gene Name: LSM7 homolog, U6 small nuclear RNA and mRNA degradation associated
  ENSP ID: ENSP00000467145
MADKEKKKKESILDLSKYIDKTIRVKFQGGREVES

SEQ ID NO: 47331 - protein, 49 aa, Homo sapiens
  Payload ID: 9590
  Gene Symbol: LSM7
  Gene Name: LSM7 homolog, U6 small nuclear RNA and mRNA degradation associated
  ENSP ID: ENSP00000485007
MRDPDDQYKLTEDTRQLGLVVCRGTSVVLICPQDGMEAIPNPFIQQQDA

SEQ ID NO: 47332 - protein, 96 aa, Homo sapiens
  Payload ID: 9591
  Gene Symbol: LSM8
  Gene Name: LSM8 homolog, U6 small nuclear RNA associated
  Uniprot ID: O95777
  ENSP ID: ENSP00000249299
MTSALENYINRTVAVITSDGRMIVGTLKGFDQTINLILDESHERVFSSSQGVEQVVLGLYIVRGDNVAVIGEIDEETDSALDLGNIRAEPLNSVAH

SEQ ID NO: 47333 - protein, 67 aa, Homo sapiens
  Payload ID: 9591
  Gene Symbol: LSM8
  Gene Name: LSM8 homolog, U6 small nuclear RNA associated
  ENSP ID: ENSP00000395263
MTSALENYINRTVAVITSDGRMIVGTLKGFDQTINLILDESHERVFSSSQGVEQVVLGLYIVRGDNV

SEQ ID NO: 47334 - protein, 75 aa, Homo sapiens
  Payload ID: 9591
  Gene Symbol: LSM8
  Gene Name: LSM8 homolog, U6 small nuclear RNA associated
  ENSP ID: ENSP00000403811
MIVGTLKGFDQTINLILDESHERVFSSSQGVEQVVLGLYIVRGDNVAVIGEIDEETDSALDLGNIRAEPLNSVAH

SEQ ID NO: 47335 - protein, 77 aa, Homo sapiens
  Payload ID: 9591
  Gene Symbol: LSM8
  Gene Name: LSM8 homolog, U6 small nuclear RNA associated
  ENSP ID: ENSP00000408267
MTSALENYINRILKLAAAGLSGTVAVITSDGRMIVGTLKGFDQTINLILDESHERVFSSSQGVEQVVLGLYIVRGDN

SEQ ID NO: 47336 - protein, 475 aa, Homo sapiens
  Payload ID: 9592
  Gene Symbol: LTV1
  Gene Name: LTV1 ribosome biogenesis factor
  Uniprot ID: Q96GA3
  ENSP ID: ENSP00000356548
MPHRKKKPFIEKKKAVSFHLVHRSQRDPLAADESAPQRVLLPTQKIDNEERRAEQRKYGVFFDDDYDYLQHLKEPSGPSELIPSSTFSAHNRREEKEETLVIPSTGIKLPSSVFASEFEEDVGLLNKAAPVSGPRLDFDPDIVAALDDDFDFDDPDNLLEDDFILQANKATGEEEGMDIQKSENEDDSEWEDVDDEKGDSNDDYDSAGLLSDEDCMSVPGKTHRAIADHLFWSEETKSRFTEYSMTSSVMRRNEQLTLHDERFEKFYEQYDDDEIGALDNAELEGSIQVDSNRLQEVLNDYYKEKAENCVKLNTLEPLEDQDLPMNELDESEEEEMITVVLEEAKEKWDCESICSTYSNLYNHPQLIKYQPKPKQIRISSKTGIPLNVLPKKGLTAKQTERIQMINGSDLPKVSTQPRSKNESKEDKRARKQAIKEERKERRVEKKANKLAFKLEKRRQEKELLNLKKNVEGLKL

SEQ ID NO: 47337 - protein, 371 aa, Homo sapiens
  Payload ID: 9593
  Gene Symbol: LUC7L
  Gene Name: LUC7-like
  Uniprot ID: Q9NQ29
  ENSP ID: ENSP00000293872
MSAQAQMRALLDQLMGTARDGDETRQRVKFTDDRVCKSHLLDCCPHDILAGTRMDLGECTKIHDLALRADYEIASKERDLFFELDAMDHLESFIAECDRRTELAKKRLAETQEEISAEVSAKAEKVHELNEEIGKLLAKAEQLGAEGNVDESQKILMEVEKVRAKKKEAEEEYRNSMPASSFQQQKLRVCEVCSAYLGLHDNDRRLADHFGGKLHLGFIQIREKLDQLRKTVAEKQEKRNQDRLRRREEREREERLSRRSGSRTRDRRRSRSRDRRRRRSRSTSRERRKLSRSRSRDRHRRHRSRSRSHSRGHRRASRDRSAKYKFSRERASREESWESGRSERGPPDWRLESSNGKMASRRSEEKEAGEI

SEQ ID NO: 47338 - protein, 325 aa, Homo sapiens
  Payload ID: 9593
  Gene Symbol: LUC7L
  Gene Name: LUC7-like
  Uniprot ID: Q9NQ29
  ENSP ID: ENSP00000337507
MSAQAQMRALLDQLMGTARDGDETRQRVKFTDDRVCKSHLLDCCPHDILAGTRMDLGECTKIHDLALRADYEIASKERDLFFELDAMDHLESFIAECDRRTELAKKRLAETQEEISAEVSAKAEKVHELNEEIGKLLAKAEQLGAEGNVDESQKILMEVEKVRAKKKEAEEEYRNSMPASSFQQQKLRVCEVCSAYLGLHDNDRRLADHFGGKLHLGFIQIREKLDQLRKTVAEKQEKRNQDRLRRREEREREERLSRRSGSRTRDRRRSRSRDRRRRRSRSTSRERRKLSRSRSRDRHRRHRSRSRSHSRGHRRASRDRSAKYK

SEQ ID NO: 47339 - protein, 272 aa, Homo sapiens
  Payload ID: 9593
  Gene Symbol: LUC7L
  Gene Name: LUC7-like
  ENSP ID: ENSP00000380882
MDLGECTKIHDLALRADYEIASKERDLFFELDAMDHLESFIAECDRRTELAKKRLAETQEEISAEVSAKAEKVHELNEEIGKLLAKAEQLGAEGNVDESQKILMEVEKVRAKKKEAEEEYRNSMPASSFQQQKLRVCEVCSAYLGLHDNDRRLADHFGGKLHLGFIQIREKLDQLRKTVAEKQEKRNQDRLRRREEREREERLSRRSGSRTRDRRRSRSRDRRRRRSRSTSRERRKLSRSRSRDRHRRHRSRSRSHSRGHRRASRDRSAKYK

SEQ ID NO: 47340 - protein, 325 aa, Homo sapiens; identical to SEQ ID NO: 47338
  Payload ID: 9593
  Gene Symbol: LUC7L
  Gene Name: LUC7-like
  Uniprot ID: Q9NQ29
  ENSP ID: ENSP00000380885

SEQ ID NO: 47341 - protein, 42 aa, Homo sapiens
  Payload ID: 9593
  Gene Symbol: LUC7L
  Gene Name: LUC7-like
  ENSP ID: ENSP00000390953
MSAQAQMRALLDQLMGTARDGESERPTRRGSGVGVRRGRRAA

SEQ ID NO: 47342 - protein, 55 aa, Homo sapiens
  Payload ID: 9593
  Gene Symbol: LUC7L
  Gene Name: LUC7-like
  ENSP ID: ENSP00000393551
MSAQAQMRALLDQLMGTARDGSVYLCLPTSICKGVAESLMFIEPRRNQTEGQVYR

SEQ ID NO: 47343 - protein, 182 aa, Homo sapiens
  Payload ID: 9593
  Gene Symbol: LUC7L
  Gene Name: LUC7-like
  ENSP ID: ENSP00000406695
MDHLESFIAECDRRTELAKKRLAETQEEISAEVSAKAEKVHELNEEIGKLLAKAEQLGAEGNVDESQKILMEVEKVRAKKKEAEEEYRNSMPASSFQQQKLRVCEVCSAYLGLHDNDRRLADHFGGKLHLGFIQIREKLDQLRKTVAEKQEKRNQDRLRRREEREREERLSRRSGSRTRDRR

SEQ ID NO: 47344 - protein, 60 aa, Homo sapiens
  Payload ID: 9593
  Gene Symbol: LUC7L
  Gene Name: LUC7-like
  ENSP ID: ENSP00000407781
  MOD_RES (1)..(1): Any amino acid
XRRRSRSRDRRRRRSRSTSRERRKLSRSRSRDRHRRHRSRSRSHSRGHRRASRDRSAKYK

SEQ ID NO: 47345 - protein, 32 aa, Homo sapiens
  Payload ID: 9593
  Gene Symbol: LUC7L
  Gene Name: LUC7-like
  ENSP ID: ENSP00000409977
MDLGECTKIHDLALRADYEIASKERDLFFELD

SEQ ID NO: 47346 - protein, 170 aa, Homo sapiens
  Payload ID: 9593
  Gene Symbol: LUC7L
  Gene Name: LUC7-like
  ENSP ID: ENSP00000413033
LGAEGNVDESQKILMEVEKVRAKKKEAEKTVAEKQEKRNQDRLRRREEREREERLSRRSGSRTRDRRRSRSRDRRRRRSRSTSRERRKLSRSRSRDRHRRHRSRSRSHSRGHRRASRDRSAKYKFSRERASREESWESGRSERGPPDWRLESSNGKMASRRSEEKEAGEI

SEQ ID NO: 47347 - protein, 84 aa, Homo sapiens
  Payload ID: 9593
  Gene Symbol: LUC7L
  Gene Name: LUC7-like
  ENSP ID: ENSP00000414508
MDHLESFIAECDRRTELAKKRLAETQEEISAEVSAKAEKVHELNEEIGKLLAKAEQLGAEGNVDESQKILMEVEKVRAKKKEAE

SEQ ID NO: 47348 - protein, 55 aa, Homo sapiens; identical to SEQ ID NO: 47342
  Payload ID: 9593
  Gene Symbol: LUC7L
  Gene Name: LUC7-like
  ENSP ID: ENSP00000414860

SEQ ID NO: 47349 - protein, 55 aa, Homo sapiens; identical to SEQ ID NO: 47342
  Payload ID: 9593
  Gene Symbol: LUC7L
  Gene Name: LUC7-like
  ENSP ID: ENSP00000485761

SEQ ID NO: 47350 - protein, 389 aa, Homo sapiens
  Payload ID: 9594
  Gene Symbol: LUC7L2
  Gene Name: LUC7-like 2 pre-mRNA splicing factor
  ENSP ID: ENSP00000263545
MVIHSQLKKIQGASERMGDTTRQRIKFSDDRVCKSHLLNCCPHDVLSGTRMDLGECLKVHDLALRADYEIASKEQDFFFELDAMDHLQSFIADCDRRTEVAKKRLAETQEEISAEVAAKAERVHELNEEIGKLLAKVEQLGAEGNVEESQKVMDEVEKARAKKREAEEVYRNSMPASSFQQQKLRVCEVCSAYLGLHDNDRRLADHFGGKLHLGFIEIREKLEELKRVVAEKQEKRNQERLKRREEREREEREKLRRSRSHSKNPKRSRSREHRRHRSRSMSRERKRRTRSKSREKRHRHRSRSSSRSRSRSHQRSRHSSRDRSRERSKRRSSKERFRDQDLASCDRDRSSRDRSPRDRDRKDKKRSYESANGRSEDRRSSEEREAGEI

SEQ ID NO: 47351 - protein, 392 aa, Homo sapiens
  Payload ID: 9594
  Gene Symbol: LUC7L2
  Gene Name: LUC7-like 2 pre-mRNA splicing factor
  Uniprot ID: Q9Y383
  ENSP ID: ENSP00000347005
MSAQAQMRAMLDQLMGTSRDGDTTRQRIKFSDDRVCKSHLLNCCPHDVLSGTRMDLGECLKVHDLALRADYEIASKEQDFFFELDAMDHLQSFIADCDRRTEVAKKRLAETQEEISAEVAAKAERVHELNEEIGKLLAKVEQLGAEGNVEESQKVMDEVEKARAKKREAEEVYRNSMPASSFQQQKLRVCEVCSAYLGLHDNDRRLADHFGGKLHLGFIEIREKLEELKRVVAEKQEKRNQERLKRREEREREEREKLRRSRSHSKNPKRSRSREHRRHRSRSMSRERKRRTRSKSREKRHRHRSRSSSRSRSRSHQRSRHSSRDRSRERSKRRSSKERFRDQDLASCDRDRSSRDRSPRDRDRKDKKRSYESANGRSEDRRSSEEREAGEI

SEQ ID NO: 47352 - protein, 83 aa, Homo sapiens
  Payload ID: 9594
  Gene Symbol: LUC7L2
  Gene Name: LUC7-like 2 pre-mRNA splicing factor
  ENSP ID: ENSP00000393012
MSAQAQMRAMLDQLMGTSRDGSMYLCLPTSICKGVSERPRIRQAEIQLVNESNSVMTEYARVTFSTVVLMMSFLELEWILENV

SEQ ID NO: 47353 - protein, 389 aa, Homo sapiens; identical to SEQ ID NO: 47350
  Payload ID: 9594
  Gene Symbol: LUC7L2
  Gene Name: LUC7-like 2 pre-mRNA splicing factor
  ENSP ID: ENSP00000441604

SEQ ID NO: 47354 - protein, 54 aa, Homo sapiens
  Payload ID: 9594
  Gene Symbol: LUC7L2
  Gene Name: LUC7-like 2 pre-mRNA splicing factor
  ENSP ID: ENSP00000477492
MSAQAQMRAMLDQLMGTSRDGSMYLCLPTSICKGVSERPRIRQAQKGDTSAGTK

SEQ ID NO: 47355 - protein, 391 aa, Homo sapiens
  Payload ID: 9594
  Gene Symbol: LUC7L2
  Gene Name: LUC7-like 2 pre-mRNA splicing factor
  ENSP ID: ENSP00000483438
MPAYLNLQGSVRKAPHSPSRDTTRQRIKFSDDRVCKSHLLNCCPHDVLSGTRMDLGECLKVHDLALRADYEIASKEQDFFFELDAMDHLQSFIADCDRRTEVAKKRLAETQEEISAEVAAKAERVHELNEEIGKLLAKVEQLGAEGNVEESQKVMDEVEKARAKKREAEEVYRNSMPASSFQQQKLRVCEVCSAYLGLHDNDRRLADHFGGKLHLGFIEIREKLEELKRVVAEKQEKRNQERLKRREEREREEREKLRRSRSHSKNPKRSRSREHRRHRSRSMSRERKRRTRSKSREKRHRHRSRSSSRSRSRSHQRSRHSSRDRSRERSKRRSSKERFRDQDLASCDRDRSSRDRSPRDRDRKDKKRSYESANGRSEDRRSSEEREAGEI

SEQ ID NO: 47356 - protein, 432 aa, Homo sapiens
  Payload ID: 9595
  Gene Symbol: LUC7L3
  Gene Name: LUC7-like 3 pre-mRNA splicing factor
  Uniprot ID: O95232
  ENSP ID: ENSP00000240304
MISAAQLLDELMGRDRNLAPDEKRSNVRWDHESVCKYYLCGFCPAELFTNTRSDLGPCEKIHDENLRKQYEKSSRFMKVGYERDFLRYLQSLLAEVERRIRRGHARLALSQNQQSSGAAGPTGKNEEKIQVLTDKIDVLLQQIEELGSEGKVEEAQGMMKLVEQLKEERELLRSTTSTIESFAAQEKQMEVCEVCGAFLIVGDAQSRVDDHLMGKQHMGYAKIKATVEELKEKLRKRTEEPDRDERLKKEKQEREEREKEREREREERERKRRREEEEREKERARDRERRKRSRSRSRHSSRTSDRRCSRSRDHKRSRSRERRRSRSRDRRRSRSHDRSERKHRSRSRDRRRSKSRDRKSYKHRSKSRDREQDRKSKEKEKRGSDDKKSSVKSGSREKQSEDTNTESKESDTKNEVNGTSEDIKSEGDTQSN

SEQ ID NO: 47357 - protein, 489 aa, Homo sapiens
  Payload ID: 9595
  Gene Symbol: LUC7L3
  Gene Name: LUC7-like 3 pre-mRNA splicing factor
  ENSP ID: ENSP00000376919
MISAAQLLDELMGRDRNLAPDEKRSNVRWDHESVCKYYLCGFCPAELFTNTRSDLGPCEKIHDENLRKQYEKSSRFMKVGYERDFLRYLQSLLAEVERRIRRGHARLALSQNQQSSGAAGPTGKNEEKIQVLTDKIDVLLQQIEELGSEGKVEEAQGMMKLVEQLKEERELLRSTTSTIESFAAQEKQMEVCEVCGAFLIVGDAQSRVDDHLMGKQHMGYAKIKATVEELKEKLRKRTEEPDRDERLKKEKQEREEREKEREREREERERKRRREEEEREKERARDRERRKRSRSRSRHSSRTSDRRCSRSRDHKRSRSRERRRSRSRDRRRSRSHDRSERKHRSRSRDRRRSKSRDRKSYKHRSKSRDREQDRKSKEKEKRGSDDKKSSVKSGSREKQSEDTNTESKESDTKNEVNGTSEDIKSEVQRKYAQMKMELSRVRRHTKASSEGKDSVVLQNILRYIVLSQLFCSRLVPPLVCLFGNYRPHL

SEQ ID NO: 47358 - protein, 184 aa, Homo sapiens
  Payload ID: 9595
  Gene Symbol: LUC7L3
  Gene Name: LUC7-like 3 pre-mRNA splicing factor
  ENSP ID: ENSP00000420933
MISAAQLLDELMGRDRNLAPDEKRSNVRWDHESSTGFCHIGQAGLELLTSSDRSASVSQSAEVTGVSHCARLAFPTLLHSKIVCKYYLCGFCPAELFTNTRSDLGPCEKIHDENLRKQYEKSSRFMKVGYERDFLRYLQSLLAEVERRIRRGHARLALSQNQQSSGAAGPTGKNEEKIQVLTDK

SEQ ID NO: 47359 - protein, 54 aa, Homo sapiens
  Payload ID: 9595
  Gene Symbol: LUC7L3
  Gene Name: LUC7-like 3 pre-mRNA splicing factor
  ENSP ID: ENSP00000421213
MISAAQLLDELMGRDRNLAPDEKRSNVRWDHESVRVKKFMMKIYENSMRRALVS

SEQ ID NO: 47360 - protein, 39 aa, Homo sapiens
  Payload ID: 9595
  Gene Symbol: LUC7L3
  Gene Name: LUC7-like 3 pre-mRNA splicing factor
  ENSP ID: ENSP00000423556
RSNVRWDHESVCKYYLCGFCPAELFTNTRSDLEEKRILL

SEQ ID NO: 47361 - protein, 79 aa, Homo sapiens
  Payload ID: 9595
  Gene Symbol: LUC7L3
  Gene Name: LUC7-like 3 pre-mRNA splicing factor
  ENSP ID: ENSP00000424767
MISAAQLLDELMGRDRNLAPDEKRSNVRWDHESVCKYYLCGFCPAELFTNTRSDLDVFGRGDNIRDVSKFLEDDKWMEE

SEQ ID NO: 47362 - protein, 79 aa, Homo sapiens; identical to SEQ ID NO: 47361
  Payload ID: 9595
  Gene Symbol: LUC7L3
  Gene Name: LUC7-like 3 pre-mRNA splicing factor
  ENSP ID: ENSP00000424788

SEQ ID NO: 47363 - protein, 432 aa, Homo sapiens; identical to SEQ ID NO: 47356
  Payload ID: 9595
  Gene Symbol: LUC7L3
  Gene Name: LUC7-like 3 pre-mRNA splicing factor
  Uniprot ID: O95232
  ENSP ID: ENSP00000425092

SEQ ID NO: 47364 - protein, 79 aa, Homo sapiens; identical to SEQ ID NO: 47361
  Payload ID: 9595
  Gene Symbol: LUC7L3
  Gene Name: LUC7-like 3 pre-mRNA splicing factor
  ENSP ID: ENSP00000425251

SEQ ID NO: 47365 - protein, 36 aa, Homo sapiens
  Payload ID: 9595
  Gene Symbol: LUC7L3
  Gene Name: LUC7-like 3 pre-mRNA splicing factor
  ENSP ID: ENSP00000426123
MKVGYERDFLRYLQSLLAEVERRIRRGHARLALSQN

SEQ ID NO: 47366 - protein, 207 aa, Homo sapiens
  Payload ID: 9595
  Gene Symbol: LUC7L3
  Gene Name: LUC7-like 3 pre-mRNA splicing factor
  ENSP ID: ENSP00000426371
SFAAQEKQMEVCEVCGAFLIVGDAQSRVDDHLMGKQHMGYAKIKATVEELKEKLRKRTEEPDRDERLKKEKQEREEREKEREREREERERKRRREEEEREKERARDRERRKRSRSRSRHSSRTSDRRCSRSRDHKRSRSRERRRSRSRDRRRSRSHDRSERKHRSRSRDRRRSKSRDRKSYKHRSKSRDREQDRKSKEKGQKIRLLD

SEQ ID NO: 47367 - protein, 79 aa, Homo sapiens; identical to SEQ ID NO: 47361
  Payload ID: 9595
  Gene Symbol: LUC7L3
  Gene Name: LUC7-like 3 pre-mRNA splicing factor
  ENSP ID: ENSP00000426488

SEQ ID NO: 47368 - protein, 123 aa, Homo sapiens
  Payload ID: 9595
  Gene Symbol: LUC7L3
  Gene Name: LUC7-like 3 pre-mRNA splicing factor
  ENSP ID: ENSP00000427927
  MOD_RES (1)..(1): Any amino acid
XRRSKSRDRKSYKHRSKSRDREQDRKSKEKEKRGSDDKKSSVKSGSREKQSEDTNTESKESDTKNEVNGTSEDIKSEVQRKYAQMKMELSRVRRHTKASSEGKDSVVLQNILRTTVRRFLEEY

SEQ ID NO: 47369 - protein, 86 aa, Homo sapiens
  Payload ID: 9595
  Gene Symbol: LUC7L3
  Gene Name: LUC7-like 3 pre-mRNA splicing factor
  ENSP ID: ENSP00000428225
  MOD_RES (1)..(1): Any amino acid
XRSERKHRSRSRDRRRSKSRDRKSYKHRSKSRDREQDRKSKEKVQRKYAQMKMELSRVRRHTKASSEGKDSVVLQNILSVGVVSGP

SEQ ID NO: 47370 - protein, 107 aa, Homo sapiens
  Payload ID: 9595
  Gene Symbol: LUC7L3
  Gene Name: LUC7-like 3 pre-mRNA splicing factor
  ENSP ID: ENSP00000428293
RSRSRHSSRTSDRRCSRSRDHKRSRSRERRRSRSRDRRRSRSHDRSERKHRSRSRDRRRSKSRDRKSYKHRSKSRDREQDRKSKEKEDKIIGLTTSPLRDNKTTLPH

SEQ ID NO: 47371 - protein, 118 aa, Homo sapiens
  Payload ID: 9595
  Gene Symbol: LUC7L3
  Gene Name: LUC7-like 3 pre-mRNA splicing factor
  ENSP ID: ENSP00000430407
  MOD_RES (1)..(1): Any amino acid
XSKSRDRKSYKHRSKSRDREQDRKSKEKEKRGSDDKKSSVKSGSREKQSEDTNTESKESDTKNEVNGTSEDIKSEVQRKYAQMKMELSRVRRHTKASSEGKDSVVLQNILSVGVVSGP

SEQ ID NO: 47372 - protein, 46 aa, Homo sapiens
  Payload ID: 9595
  Gene Symbol: LUC7L3
  Gene Name: LUC7-like 3 pre-mRNA splicing factor
  ENSP ID: ENSP00000476198
MKVGYERDFLRYLQSLLAEVERRIRRGHARLALSQNQQSSGAAGPT

SEQ ID NO: 47373 - protein, 79 aa, Homo sapiens; identical to SEQ ID NO: 47361
  Payload ID: 9595
  Gene Symbol: LUC7L3
  Gene Name: LUC7-like 3 pre-mRNA splicing factor
  ENSP ID: ENSP00000486238

SEQ ID NO: 47374 - protein, 338 aa, Homo sapiens
  Payload ID: 9596
  Gene Symbol: LUM
  Gene Name: lumican
  Uniprot ID: P51884
  ENSP ID: ENSP00000266718
MSLSAFTLFLALIGGTSGQYYDYDFPLSIYGQSSPNCAPECNCPESYPSAMYCDELKLKSVPMVPPGIKYLYLRNNQIDHIDEKAFENVTDLQWLILDHNLLENSKIKGRVFSKLKQLKKLHINHNNLTESVGPLPKSLEDLQLTHNKITKLGSFEGLVNLTFIHLQHNRLKEDAVSAAFKGLKSLEYLDLSFNQIARLPSGLPVSLLTLYLDNNKISNIPDEYFKRFNALQYLRLSHNELADSGIPGNSFNVSSLVELDLSYNKLKNIPTVNENLENYYLEVNQLEKFDIKSFCKILGPLSYSKIKHLRLDGNRISETSLPPDMYECLRVANEVTLN

SEQ ID NO: 47375 - protein, 141 aa, Homo sapiens
  Payload ID: 9597
  Gene Symbol: LHB
  Gene Name: luteinizing hormone beta polypeptide
  Uniprot ID: P01229
  ENSP ID: ENSP00000221421
MEMLQGLLLLLLLSMGGAWASREPLRPWCHPINAILAVEKEGCPVCITVNTTICAGYCPTMMRVLQAVLPPLPQVVCTYRDVRFESIRLPGCPRGVDPVVSFPVALSCRCGPCRRSTSDCGGPKDHPLTCDHPQLSGLLFL

SEQ ID NO: 47376 - protein, 154 aa, Homo sapiens
  Payload ID: 9597
  Gene Symbol: LHB
  Gene Name: luteinizing hormone beta polypeptide
  ENSP ID: ENSP00000375742
MLQGLLLLLLLSMGGAWASREPLRPWCHPINAILAVEKEGCPVCITVNTTICAGYCPTMMRVLQAVLPPLPQVVCTYRDVRFESIRLPGCPRGVDPVVSFPVALSCRCGPCRRSTSDCGGPKDHPLTCDHPQQASSSSKDPPRSLPSPSRLLEP

SEQ ID NO: 47377 - protein, 699 aa, Homo sapiens
  Payload ID: 9598
  Gene Symbol: LHCGR
  Gene Name: luteinizing hormone/choriogonadotropin receptor
  Uniprot ID: P22888
  ENSP ID: ENSP00000294954
MKQRFSALQLLKLLLLLQPPLPRALREALCPEPCNCVPDGALRCPGPTAGLTRLSLAYLPVKVIPSQAFRGLNEVIKIEISQIDSLERIEANAFDNLLNLSEILIQNTKNLRYIEPGAFINLPRLKYLSICNTGIRKFPDVTKVFSSESNFILEICDNLHITTIPGNAFQGMNNESVTLKLYGNGFEEVQSHAFNGTTLTSLELKENVHLEKMHNGAFRGATGPKTLDISSTKLQALPSYGLESIQRLIATSSYSLKKLPSRETFVNLLEATLTYPSHCCAFRNLPTKEQNFSHSISENFSKQCESTVRKVNNKTLYSSMLAESELSGWDYEYGFCLPKTPRCAPEPDAFNPCEDIMGYDFLRVLIWLINILAIMGNMTVLFVLLTSRYKLTVPRFLMCNLSFADFCMGLYLLLIASVDSQTKGQYYNHAIDWQTGSGCSTAGFFTVFASELSVYTLTVITLERWHTITYAIHLDQKLRLRHAILIMLGGWLFSSLIAMLPLVGVSNYMKVSICFPMDVETTLSQVYILTILILNVVAFFIICACYIKIYFAVRNPELMATNKDTKIAKKMAILIFTDFTCMAPISFFAISAAFKVPLITVTNSKVLLVLFYPINSCANPFLYAIFTKTFQRDFFLLLSKFGCCKRRAELYRRKDFSAYTSNCKNGFTGSNKPSQSTLKLSTLHCQGTALLDKTRYTEC

SEQ ID NO: 47378 - protein, 325 aa, Homo sapiens
  Payload ID: 9598
  Gene Symbol: LHCGR
  Gene Name: luteinizing hormone/choriogonadotropin receptor
  ENSP ID: ENSP00000385406
MKQRFSALQLLKLLLLLQPPLPRALREALCPEPCNCVPDGALRCPGPTAGLTRLSLAYLPVKVIPSQAFRGLNEVIKIEISQIDSLERIEANAFDNLLNLSEILIQNTKNLRYIEPGAFINLPRLKYLSICNTGIRKFPDVTKVFSSESNFILEICDNLHITTIPGNAFQGMNNESVTLKLYGNGFEEVQSHAFNGTTLTSLELKENVHLEKMHNGAFRGATGPKTLDISSTKLQALPSYGLESIQRLIATSSYSLKKLPSRETFVNLLEATLTYPSHCCAFRNLPTKEQNFSHSISENFSKQCESTVRKVNNKTLSKPRINGYQ

SEQ ID NO: 47379 - protein, 329 aa, Homo sapiens
  Payload ID: 9598
  Gene Symbol: LHCGR
  Gene Name: luteinizing hormone/choriogonadotropin receptor
  ENSP ID: ENSP00000385847
MKQRFSALQLLKLLLLLQPPLPRALREALCPEPCNCVPDGALRCPGPTAGLTRLSLAYLPVKVIPSQAFRGLNEVIKIEISQIDSLERIEANAFDNLLNLSEILIQNTKNLRYIEPGAFINLPRLKYLSICNTGIRKFPDVTKVFSSESNFILEICDNLHITTIPGNAFQGMNNESVTLKLYGNGFEEVQSHAFNGTTLTSLELKENVHLEKMHNGAFRGATGPKTLDISSTKLQALPSYGLESIQRLIATSSYSLKKLPSRETFVNLLEATLTYPSHCCAFRNLPTKEQNFSHSISENFSKQCESTVRKVNNKTLLLHGALSAAHSLS

SEQ ID NO: 47380 - protein, 672 aa, Homo sapiens
  Payload ID: 9598
  Gene Symbol: LHCGR
  Gene Name: luteinizing hormone/choriogonadotropin receptor
  ENSP ID: ENSP00000386033
MKQRFSALQLLKLLLLLQPPLPRALREALCPEPCNCVPDGALRCPGPTAGLTRLSLAYLPVKVIPSQAFRGLNEVIKIEISQIDSLERIEANAFDNLLNLSEILIQNTKNLRYIEPGAFINLPRLKYLSICNTGIRKFPDVTKVFSSESNFILEICDNLHITTIPGNAFQGMNNESVTLKLYGNGFEEVQSHAFNGTTLTSLELKENVHLEKMHNGAFRGATGPKTLDISSTKLQALPSYGLESIQRLIATSSYSLKKLPSRETFVNLLEATLTYPSHCCAFRNLPTKDYSSMLAESELSGWDYEYGFCLPKTPRCAPEPDAFNPCEDIMGYDFLRVLIWLINILAIMGNMTVLFVLLTSRYKLTVPRFLMCNLSFADFCMGLYLLLIASVDSQTKGQYYNHAIDWQTGSGCSTAGFFTVFASELSVYTLTVITLERWHTITYAIHLDQKLRLRHAILIMLGGWLFSSLIAMLPLVGVSNYMKVSICFPMDVETTLSQVYILTILILNVVAFFIICACYIKIYFAVRNPELMATNKDTKIAKKMAILIFTDFTCMAPISFFAISAAFKVPLITVTNSKVLLVLFYPINSCANPFLYAIFTKTFQRDFFLLLSKFGCCKRRAELYRRKDFSAYTSNCKNGFTGSNKPSQSTLKLSTLHCQGTALLDKTRYTEC

SEQ ID NO: 47381 - protein, 175 aa, Homo sapiens
  Payload ID: 9598
  Gene Symbol: LHCGR
  Gene Name: luteinizing hormone/choriogonadotropin receptor
  ENSP ID: ENSP00000403748
NCVPDGALRCPGPTAGLTRLSLAYLPVKVIPSQAFRGLNEVIKIEISQIDSLERIEANAFDNLLNLSEILIQNTKNLRYIEPGAFINLPRLKYLSICNTGIRKFPDVTKVFSSESNFILEICDNLHITTIPGNAFQGMNNESVTLPWQNCDEAIKELTLKEKRENMDWNDSEMKR

SEQ ID NO: 47382 - protein, 379 aa, Homo sapiens
  Payload ID: 9599
  Gene Symbol: LYAR
  Gene Name: Ly1 antibody reactive
  Uniprot ID: Q9NX58
  ENSP ID: ENSP00000345917
MVFFTCNACGESVKKIQVEKHVSVCRNCECLSCIDCGKDFWGDDYKNHVKCISEDQKYGGKGYEGKTHKGDIKQQAWIQKISELIKRPNVSPKVRELLEQISAFDNVPRKKAKFQNWMKNSLKVHNESILDQVWNIFSEASNSEPVNKEQDQRPLHPVANPHAEISTKVPASKVKDAVEQQGEVKKNKRERKEERQKKRKREKKELKLENHQENSRNQKPKKRKKGQEADLEAGGEEVPEANGSAGKRSKKKKQRKDSASEEEARVGAGKRKRRHSEVETDSKKKKMKLPEHPEGGEPEDDEAPAKGKFNWKGTIKAILKQAPDNEITIKKLRKKVLAQYYTVTDEHHRSEEELLVIFNKKISKNPTFKLLKDKVKLVK

SEQ ID NO: 47383 - protein, 379 aa, Homo sapiens; identical to SEQ ID NO: 47382
  Payload ID: 9599
  Gene Symbol: LYAR
  Gene Name: Ly1 antibody reactive
  Uniprot ID: Q9NX58
  ENSP ID: ENSP00000397367

SEQ ID NO: 47384 - protein, 79 aa, Homo sapiens
  Payload ID: 9599
  Gene Symbol: LYAR
  Gene Name: Ly1 antibody reactive
  ENSP ID: ENSP00000420902
MVFFTCNACGESVKKIQVEKHVSVCRNCECLSCIDCGKDFWGDDYKNHVKCISEDQKYGGKGYEGKTHKGDIKQQAWIQ

SEQ ID NO: 47385 - protein, 97 aa, Homo sapiens
  Payload ID: 9600
  Gene Symbol: LYNX1
  Gene Name: Ly6/neurotoxin 1
  Uniprot ID: Q9BZG9
  ENSP ID: ENSP00000319846
MQLGTGLLLAAVLSLQLAAAEAIWCHQCTGFGGCSHGSRCLRDSTHCVTTATRVLSNTEDLPLVTKMCHIGCPDIPSLGLGPYVSIACCQTSLCNHD

SEQ ID NO: 47386 - protein, 87 aa, Homo sapiens
  Payload ID: 9600
  Gene Symbol: LYNX1
  Gene Name: Ly6/neurotoxin 1
  ENSP ID: ENSP00000428465
LLAAVLSLQLAAAEAIWCHQCTGFGGCSHGSRCLRDSTHCVTTATRPRTLSPHSPHSLAPGLTAAPPSRLASPPLPASAATVQHRLS

SEQ ID NO: 47387 - protein, 82 aa, Homo sapiens
  Payload ID: 9600
  Gene Symbol: LYNX1
  Gene Name: Ly6/neurotoxin 1
  ENSP ID: ENSP00000428713
MTPLLTLILVVLMGLPLAQALDCHVCAYNGDNCFNPMRCPAMVAYCMTTRTYYTPTRMKLQPKPYGVTSARASEGAPMDPDA

SEQ ID NO: 47388 - protein, 116 aa, Homo sapiens
  Payload ID: 9600
  Gene Symbol: LYNX1
  Gene Name: Ly6/neurotoxin 1
  Uniprot ID: Q9BZG9
  ENSP ID: ENSP00000477648
MTPLLTLILVVLMGLPLAQALDCHVCAYNGDNCFNPMRCPAMVAYCMTTRTYYTPTRMKVSKSCVPRCFETVYDGYSKHASTTSCCQYDLCNGTGLATPATLALAPILLATLWGLL

SEQ ID NO: 47389 - protein, 116 aa, Homo sapiens; identical to SEQ ID NO: 47388
  Payload ID: 9600
  Gene Symbol: LYNX1
  Gene Name: Ly6/neurotoxin 1
  Uniprot ID: Q9BZG9
  ENSP ID: ENSP00000478390

SEQ ID NO: 47390 - protein, 116 aa, Homo sapiens; identical to SEQ ID NO: 47388
  Payload ID: 9600
  Gene Symbol: LYNX1
  Gene Name: Ly6/neurotoxin 1
  Uniprot ID: Q9BZG9
  ENSP ID: ENSP00000478402

SEQ ID NO: 47391 - protein, 131 aa, Homo sapiens
  Payload ID: 9600
  Gene Symbol: LYNX1
  Gene Name: Ly6/neurotoxin 1
  Uniprot ID: Q9BZG9
  ENSP ID: ENSP00000479586
MTPLLTLILVVLMGLPLAQALDCHVCAYNGDNCFNPMRCPAMVAYCMTTRTSAAEAIWCHQCTGFGGCSHGSRCLRDSTHCVTTATRVLSNTEDLPLVTKMCHIGCPDIPSLGLGPYVSIACCQTSLCNHD

SEQ ID NO: 47392 - protein, 84 aa, Homo sapiens
  Payload ID: 9600
  Gene Symbol: LYNX1
  Gene Name: Ly6/neurotoxin 1
  ENSP ID: ENSP00000481790
MTPLLTLILVVLMGLPLAQALDCHVCAYNGDNCFNPMRCPAMVAYCMTTRTYYTPTRMKVSKSCVPRCFETVYDGYSKHASTTS

SEQ ID NO: 47393 - protein, 82 aa, Homo sapiens
  Payload ID: 9600
  Gene Symbol: LYNX1
  Gene Name: Ly6/neurotoxin 1
  ENSP ID: ENSP00000482846
MTPLLTLILVVLMGLPLAQALDCHVCAYNGDNCFNPMRCPAMVAYCMTTRTYYTPTRMKVSKSCVPRCFETVYDGYSKHAST

SEQ ID NO: 47394 - protein, 89 aa, Homo sapiens
  Payload ID: 9601
  Gene Symbol: LYPD1
  Gene Name: LY6/PLAUR domain containing 1
  Uniprot ID: Q8N2G4
  ENSP ID: ENSP00000340563
MCQKEVMEQSAGIMYRKSCASSAACLIASAGYQSFCSPGKLNSVCISCCNTPLCNGPRPKKRGSSASALRPGLRTTILFLKLALFSAHC

SEQ ID NO: 47395 - protein, 141 aa, Homo sapiens
  Payload ID: 9601
  Gene Symbol: LYPD1
  Gene Name: LY6/PLAUR domain containing 1
  Uniprot ID: Q8N2G4
  ENSP ID: ENSP00000380605
MWVLGIAATFCGLFLLPGFALQIQCYQCEEFQLNNDCSSPEFIVNCTVNVQDMCQKEVMEQSAGIMYRKSCASSAACLIASAGYQSFCSPGKLNSVCISCCNTPLCNGPRPKKRGSSASALRPGLRTTILFLKLALFSAHC

SEQ ID NO: 47396 - protein, 39 aa, Homo sapiens
  Payload ID: 9601
  Gene Symbol: LYPD1
  Gene Name: LY6/PLAUR domain containing 1
  ENSP ID: ENSP00000396651
MWVLGIAATFCGLFLLPGENTQRPAAEARLCAANPVLPV

SEQ ID NO: 47397 - protein, 125 aa, Homo sapiens
  Payload ID: 9602
  Gene Symbol: LYPD2
  Gene Name: LY6/PLAUR domain containing 2
  Uniprot ID: Q6UXB3
  ENSP ID: ENSP00000352163
MRGTRLALLALVLAACGELAPALRCYVCPEPTGVSDCVTIATCTTNETMCKTTLYSREIVYPFQGDSTVTKSCASKCKPSDVDGIGQTLPVSCCNTELCNVDGAPALNSLHCGALTLLPLLSLRL

SEQ ID NO: 47398 - protein, 346 aa, Homo sapiens [sequence omitted]

SEQ ID NO: 47399 - protein, 211 aa, Homo sapiens
  Payload ID: 9604
  Gene Symbol: LYPD4
  Gene Name: LY6/PLAUR domain containing 4
  Uniprot ID: Q6UWN0
  ENSP ID: ENSP00000339568
MGPQHLRLVQLFCLLGAISTLPRMSCGAGCYKTQKGTARGVVGFKGCSSSSSYPAQISYLVSPPGVSIASYSRVCRSYLCNNLTNLEPFVKLKASTPKSITSASCSCPTCVGEHMKDCLPNFVTTNSCPLAASTCYSSTLKFQAGFLNTTFLLMGCAREHNQLLADFHHIGSIKVTEVLNILEKSQIVGAASSRQDPAWGVVLGLLFAFRD

SEQ ID NO: 47400 - protein, 211 aa, Homo sapiens; identical to SEQ ID NO: 47399
  Payload ID: 9604
  Gene Symbol: LYPD4
  Gene Name: LY6/PLAUR domain containing 4
  Uniprot ID: Q6UWN0
  ENSP ID: ENSP00000472570

SEQ ID NO: 47401 - protein, 246 aa, Homo sapiens
  Payload ID: 9604
  Gene Symbol: LYPD4
  Gene Name: LY6/PLAUR domain containing 4
  Uniprot ID: Q6UWN0
  ENSP ID: ENSP00000476510
MGPQHLRLVQLFCLLGAISTLPRAGALLCYEATASRFRAVAFHNWKWLLMRNMVCKLQEGCEETLVFIETGTARGVVGFKGCSSSSSYPAQISYLVSPPGVSIASYSRVCRSYLCNNLTNLEPFVKLKASTPKSITSASCSCPTCVGEHMKDCLPNFVTTNSCPLAASTCYSSTLKFQAGFLNTTFLLMGCAREHNQLLADFHHIGSIKVTEVLNILEKSQIVGAASSRQDPAWGVVLGLLFAFRD

SEQ ID NO: 47402 - protein, 251 aa, Homo sapiens
  Payload ID: 9605
  Gene Symbol: LYPD5
  Gene Name: LY6/PLAUR domain containing 5
  Uniprot ID: Q6UWN5
  ENSP ID: ENSP00000367185
MAMGVPRVILLCLFGAALCLTGSQALQCYSFEHTYFGPFDLRAMKLPSISCPHECFEAILSLDTGYRAPVTLVRKGCWTGPPAGQTQSNADALPPDYSVVRGCTTDKCNAHLMTHDALPNLSQAPDPPTLSGAECYACIGVHQDDCAIGRSRRVQCHQDQTACFQGNGRMTVGNFSVPVYIRTCHRPSCTTEGTTSPWTAIDLQGSCCEGYLCNRKSMTQPFTSASATTPPRALQVLALLLPVLLLVGLSA

SEQ ID NO: 47403 - protein, 208 aa, Homo sapiens
  Payload ID: 9605
  Gene Symbol: LYPD5
  Gene Name: LY6/PLAUR domain containing 5
  Uniprot ID: Q6UWN5
  ENSP ID: ENSP00000408433
MKLPSISCPHECFEAILSLDTGYRAPVTLVRKGCWTGPPAGQTQSNADALPPDYSVVRGCTTDKCNAHLMTHDALPNLSQAPDPPTLSGAECYACIGVHQDDCAIGRSRRVQCHQDQTACFQGNGRMTVGNFSVPVYIRTCHRPSCTTEGTTSPWTAIDLQGSCCEGYLCNRKSMTQPFTSASATTPPRALQVLALLLPVLLLVGLSA

SEQ ID NO: 47404 - protein, 127 aa, Homo sapiens
  Payload ID: 9605
  Gene Symbol: LYPD5
  Gene Name: LY6/PLAUR domain containing 5
  ENSP ID: ENSP00000470163
MKLPSISCPHECFEAILSLDTGYRAPVTLVRKGCWTGPPAGQTQSNADALPPDYSVVRGCTTDKCNAHLMTHDALPNLSQAPDPPTLSGAECYACIGVHQDDCAIGRSRRVQCHQDQTACFQGNGRM

SEQ ID NO: 47405 - protein, 208 aa, Homo sapiens; identical to SEQ ID NO: 47403
  Payload ID: 9605
  Gene Symbol: LYPD5
  Gene Name: LY6/PLAUR domain containing 5
  Uniprot ID: Q6UWN5
  ENSP ID: ENSP00000471692

SEQ ID NO: 47406 - protein, 113 aa, Homo sapiens
  Payload ID: 9605
  Gene Symbol: LYPD5
  Gene Name: LY6/PLAUR domain containing 5
  ENSP ID: ENSP00000471909
MKLPSISCPHECFEAILSLDTGYRAPVTLVRKGCWTGPPAGQTQSNADALPPDYSVVRGCTTDKCNAHLMTHDALPNLSQAPDPPTLSGAECYACIGVHQDDCAIGRSRRVQC

SEQ ID NO: 47407 - protein, 171 aa, Homo sapiens
  Payload ID: 9606
  Gene Symbol: LYPD6
  Gene Name: LY6/PLAUR domain containing 6
  Uniprot ID: Q86Y78
  ENSP ID: ENSP00000334463
MEPGPALAWLLLLSLLADCLKAAQSRDFTVKDIIYLHPSTTPYPGGFKCFTCEKAADNYECNRWAPDIYCPRETRYCYTQHTMEVTGNSISVTKRCVPLEECLSTGCRDSEHEGHKVCTSCCEGNICNLPLPRNETDATFATTSPINQTNGHPRCMSVIVSCLWLWLGLML

SEQ ID NO: 47408 - protein, 76 aa, Homo sapiens
  Payload ID: 9606
  Gene Symbol: LYPD6
  Gene Name: LY6/PLAUR domain containing 6
  Uniprot ID: Q86Y78
  ENSP ID: ENSP00000376594
MEPGPALAWLLLLSLLADCLKAAQSRDFTVKDIIYLHPSTTPYPGGFKCFTCEKAADNYECNRWAPDIYCPRGTMI

SEQ ID NO: 47409 - protein, 171 aa, Homo sapiens; identical to SEQ ID NO: 47407
  Payload ID: 9606
  Gene Symbol: LYPD6
  Gene Name: LY6/PLAUR domain containing 6
  Uniprot ID: Q86Y78
  ENSP ID: ENSP00000386413

SEQ ID NO: 47410 - protein, 53 aa, Homo sapiens
  Payload ID: 9606
  Gene Symbol: LYPD6
  Gene Name: LY6/PLAUR domain containing 6
  ENSP ID: ENSP00000392286
MEPGPALAWLLLLSLLADCLKAAQSRDFTVKDIIYLHPSTTPYPGGFKCFTCE

SEQ ID NO: 47411 - protein, 76 aa, Homo sapiens; identical to SEQ ID NO: 47408
  Payload ID: 9606
  Gene Symbol: LYPD6
  Gene Name: LY6/PLAUR domain containing 6
  Uniprot ID: Q86Y78
  ENSP ID: ENSP00000396855

SEQ ID NO: 47412 - protein, 183 aa, Homo sapiens
  Payload ID: 9607
  Gene Symbol: LYPD6B
  Gene Name: LY6/PLAUR domain containing 6B
  ENSP ID: ENSP00000280115
MRYKSSDRPAHKVSMLLLCHALAIAVVQIVIFSESWAFAKNINFYNVRPPLDPTPFPNSFKCFTCENAGDNYNCNRWAEDKWCPQNTQYCLTVHHFTSHGRSTSITKKCASRSECHFVGCHHSRDSEHTECRSCCEGMICNVELPTNHTNAVFAVMHAQRTSGSSAPTLYLPVLAWVFVLPLL

SEQ ID NO: 47413 - protein, 183 aa, Homo sapiens
  Payload ID: 9607
  Gene Symbol: LYPD6B
  Gene Name: LY6/PLAUR domain containing 6B
  Uniprot ID: Q8NI32
  ENSP ID: ENSP00000386479
MLYKSSDRPAHKVSMLLLCHALAIAVVQIVIFSESWAFAKNINFYNVRPPLDPTPFPNSFKCFTCENAGDNYNCNRWAEDKWCPQNTQYCLTVHHFTSHGRSTSITKKCASRSECHFVGCHHSRDSEHTECRSCCEGMICNVELPTNHTNAVFAVMHAQRTSGSSAPTLYLPVLAWVFVLPLL

SEQ ID NO: 47414 - protein, 183 aa, Homo sapiens; identical to SEQ ID NO: 47413
  Payload ID: 9607
  Gene Symbol: LYPD6B
  Gene Name: LY6/PLAUR domain containing 6B
  Uniprot ID: Q8NI32
  ENSP ID: ENSP00000386650

SEQ ID NO: 47415 - protein, 207 aa, Homo sapiens
  Payload ID: 9607
  Gene Symbol: LYPD6B
  Gene Name: LY6/PLAUR domain containing 6B
  Uniprot ID: Q8NI32
  ENSP ID: ENSP00000387077
MLLITLSANLFTVPERSLTTTFSFSRYKSSDRPAHKVSMLLLCHALAIAVVQIVIFSESWAFAKNINFYNVRPPLDPTPFPNSFKCFTCENAGDNYNCNRWAEDKWCPQNTQYCLTVHHFTSHGRSTSITKKCASRSECHFVGCHHSRDSEHTECRSCCEGMICNVELPTNHTNAVFAVMHAQRTSGSSAPTLYLPVLAWVFVLPLL

SEQ ID NO: 47416 - protein, 50 aa, Homo sapiens
  Payload ID: 9607
  Gene Symbol: LYPD6B
  Gene Name: LY6/PLAUR domain containing 6B
  ENSP ID: ENSP00000388361
MLCERHCTEEDENHSKPNKGNAEEIFSAEYWKVRFPASRISGNVNEQHEA

SEQ ID NO: 47417 - protein, 54 aa, Homo sapiens
  Payload ID: 9607
  Gene Symbol: LYPD6B
  Gene Name: LY6/PLAUR domain containing 6B
  ENSP ID: ENSP00000410840
MLYKSSDRPAHKVSMLLLCHALAIAVVQIVIFSESWAFAKNINFYNVRPPLDHK

SEQ ID NO: 47418 - protein, 74 aa, Homo sapiens
  Payload ID: 9607
  Gene Symbol: LYPD6B
  Gene Name: LY6/PLAUR domain containing 6B
  ENSP ID: ENSP00000412070
MLLITLSANLFTVPERSLTTTFSFSRCERHCTEEDENHSKPNKGNAEEIFSAEYWKVRFPASRISGNVNEQHEA

SEQ ID NO: 47419 - protein, 54 aa, Homo sapiens
  Payload ID: 9608
  Gene Symbol: LYPD8
  Gene Name: LY6/PLAUR domain containing 8
  ENSP ID: ENSP00000456439
  MOD_RES (1)..(1): Any amino acid
XPPLKNVSSNAECPACYESNGTSCHGKPWKCYEEEQCVFLVAELKNGTPGDGAD

SEQ ID NO: 47420 - protein, 237 aa, Homo sapiens
  Payload ID: 9608
  Gene Symbol: LYPD8
  Gene Name: LY6/PLAUR domain containing 8
  ENSP ID: ENSP00000466070
MKGILVAGITAVLVAAVESLSCVQCNSWEKSCVNSIASECPSHANTSCISSSASSSLETPVRLYQNMFCSAENCSEETHITAFTVHVSAEEHFHFVSQCCQGKECSNTSDALDPPLKNVSSNAECPACYESNGTSCHGKPWKCYEEEQCVFLVAELKNDIESKSLVLKGCSNVSNATCQFLSGENKTLGGVIFRKFECANVNSLTPTSAPTTSHNVGSKASLYLLALASLLLRGLLP

SEQ ID NO: 47421 - protein, 1817 aa, Homo sapiens
  Payload ID: 9609
  Gene Symbol: LY75-CD302
  Gene Name: LY75-CD302 readthrough
  ENSP ID: ENSP00000421035
MRTGWATPRRPAGLLMLLFWFFDLAEPSGRAANDPFTIVHGNTGKCIKPVYGWIVADDCDETEDKLWKWVSQHRLFHLHSQKCLGLDITKSVNELRMFSCDSSAMLWWKCEHHSLYGAARYRLALKDGHGTAISNASDVWKKGGSEESLCDQPYHEIYTRDGNSYGRPCEFPFLIDGTWHHDCILDEDHSGPWCATTLNYEYDRKWGICLKPENGCEDNWEKNEQFGSCYQFNTQTALSWKEAYVSCQNQGADLLSINSAAELTYLKEKEGIAKIFWIGLNQLYSARGWEWSDHKPLNFLNWDPDRPSAPTIGGSSCARMDAESGLWQSFSCEAQLPYVCRKPLNNTVELTDVWTYSDTRCDAGWLPNNGFCYLLVNESNSWDKAHAKCKAFSSDLISIHSLADVEVVVTKLHNEDIKEEVWIGLKNINIPTLFQWSDGTEVTLTYWDENEPNVPYNKTPNCVSYLGELGQWKVQSCEEKLKYVCKRKGEKLNDASSDKMCPPDEGWKRHGETCYKIYEDEVPFGTNCNLTITSRFEQEYLNDLMKKYDKSLRKYFWTGLRDVDSCGEYNWATVGGRRRAVTFSNWNFLEPASPGGCVAMSTGKSVGKWEVKDCRSFKALSICKKMSGPLGPEEASPKPDDPCPEGWQSFPASLSCYKVFHAERIVRKRNWEEAERFCQALGAHLSSFSHVDEIKEFLHFLTDQFSGQHWLWIGLNKRSPDLQGSWQWSDRTPVSTIIMPNEFQQDYDIRDCAAVKVFHRPWRRGWHFYDDREFIYLRPFACDTKLEWVCQIPKGRTPKTPDWYNPDRAGIHGPPLIIEGSEYWFVADLHLNYEEAVLYCASNHSFLATITSFVGLKAIKNKIANISGDGQKWWIRISEWPIDDHFTYSRYPWHRFPVTFGEECLYMSAKTWLIDLGKPTDCSTKLPFICEKYNVSSLEKYSPDSAAKVQCSEQWIPFQNKCFLKIKPVSLTFSQASDTCHSYGGTLPSVLSQIEQDFITSLLPDMEATLWIGLRWTAYEKINKWTDNRELTYSNFHPLLVSGRLRIPENFFEEESRYHCALILNLQKSPFTGTWNFTSCSERHFVSLCQKYSEVKSRQTLQNASETVKYLNNLYKIIPKTLTWHSAKRECLKSNMQLVSITDPYQQAFLSVQALLHNSSLWIGLFSQDDELNFGWSDGKRLHFSRWAETNGQLEDCVVLDTDGFWKTVDCNDNQPGAICYYSGNETEKEVKPVDSVKCPSPVLNTPWIPFQNCCYNFIITKNRHMATTQDEVHTKCQKLNPKSHILSIRDEKENNFVLEQLLYFNYMASWVMLGITYRNKSLMWFDKTPLSYTHWRAGRPTIKNEKFLAGLSTDGFWDIQTFKVIEEAVYFHQHSILACKIEMVDYKEEYNTTLPQFMPYEDGIYSVIQKKVTWYEALNMCSQSGGHLASVHNQNGQLFLEDIVKRDGFPLWVGLSSHDGSESSFEWSDGSTFDYIPWKGQTSPGNCVLLDPKGTWKHEKCNSVKDGAICYKPTKSKKLSRLTYSSRCPAAKENGSRWIQYKGHCYKSDQALHSFSEAKKLCSKHDHSATIVSIKDEDENKFVSRLMRENNNITMRVWLGLSQHSVDCPSSTWIQFQDSCYIFLQEAIKVESIEDVRNQCTDHGADMISIHNEEENAFILDTLKKQWKGPDDILLGMFYDTDDASFKWFDNSNMTFDKWTDQDDDEDLVDTCAFLHIKTGEWKKGNCEVSSVEGTLCKTAIPYKRKYLSDNHILISALVIASTVILTVLGAIIWFLYKKHSDSRFTTVFSTAPQSPYNEDCVLVVGEENEYPVQFD

SEQ ID NO: 47422 - protein, 1873 aa, Homo sapiens
  Payload ID: 9609
  Gene Symbol: LY75-CD302
  Gene Name: LY75-CD302 readthrough
  ENSP ID: ENSP00000423463
MRTGWATPRRPAGLLMLLFWFFDLAEPSGRAANDPFTIVHGNTGKCIKPVYGWIVADDCDETEDKLWKWVSQHRLFHLHSQKCLGLDITKSVNELRMFSCDSSAMLWWKCEHHSLYGAARYRLALKDGHGTAISNASDVWKKGGSEESLCDQPYHEIYTRDGNSYGRPCEFPFLIDGTWHHDCILDEDHSGPWCATTLNYEYDRKWGICLKPENGCEDNWEKNEQFGSCYQFNTQTALSWKEAYVSCQNQGADLLSINSAAELTYLKEKEGIAKIFWIGLNQLYSARGWEWSDHKPLNFLNWDPDRPSAPTIGGSSCARMDAESGLWQSFSCEAQLPYVCRKPLNNTVELTDVWTYSDTRCDAGWLPNNGFCYLLVNESNSWDKAHAKCKAFSSDLISIHSLADVEVVVTKLHNEDIKEEVWIGLKNINIPTLFQWSDGTEVTLTYWDENEPNVPYNKTPNCVSYLGELGQWKVQSCEEKLKYVCKRKGEKLNDASSDKMCPPDEGWKRHGETCYKIYEDEVPFGTNCNLTITSRFEQEYLNDLMKKYDKSLRKYFWTGLRDVDSCGEYNWATVGGRRRAVTFSNWNFLEPASPGGCVAMSTGKSVGKWEVKDCRSFKALSICKKMSGPLGPEEASPKPDDPCPEGWQSFPASLSCYKVFHAERIVRKRNWEEAERFCQALGAHLSSFSHVDEIKEFLHFLTDQFSGQHWLWIGLNKRSPDLQGSWQWSDRTPVSTIIMPNEFQQDYDIRDCAAVKVFHRPWRRGWHFYDDREFIYLRPFACDTKLEWVCQIPKGRTPKTPDWYNPDRAGIHGPPLIIEGSEYWFVADLHLNYEEAVLYCASNHSFLATITSFVGLKAIKNKIANISGDGQKWWIRISEWPIDDHFTYSRYPWHRFPVTFGEECLYMSAKTWLIDLGKPTDCSTKLPFICEKYNVSSLEKYSPDSAAKVQCSEQWIPFQNKCFLKIKPVSLTFSQASDTCHSYGGTLPSVLSQIEQDFITSLLPDMEATLWIGLRWTAYEKINKWTDNRELTYSNFHPLLVSGRLRIPENFFEEESRYHCALILNLQKSPFTGTWNFTSCSERHFVSLCQKYSEVKSRQTLQNASETVKYLNNLYKIIPKTLTWHSAKRECLKSNMQLVSITDPYQQAFLSVQALLHNSSLWIGLFSQDDELNFGWSDGKRLHFSRWAETNGQLEDCVVLDTDGFWKTVDCNDNQPGAICYYSGNETEKEVKPVDSVKCPSPVLNTPWIPFQNCCYNFIITKNRHMATTQDEVHTKCQKLNPKSHILSIRDEKENNFVLEQLLYFNYMASWVMLGITYRNKSLMWFDKTPLSYTHWRAGRPTIKNEKFLAGLSTDGFWDIQTFKVIEEAVYFHQHSILACKIEMVDYKEEYNTTLPQFMPYEDGIYSVIQKKVTWYEALNMCSQSGGHLASVHNQNGQLFLEDIVKRDGFPLWVGLSSHDGSESSFEWSDGSTFDYIPWKGQTSPGNCVLLDPKGTWKHEKCNSVKDGAICYKPTKSKKLSRLTYSSRCPAAKENGSRWIQYKGHCYKSDQALHSFSEAKKLCSKHDHSATIVSIKDEDENKFVSRLMRENNNITMRVWLGLSQHSVDQSWSWLDGSEVTFVKWENKSKSGVGRCSMLIASNETWKKVECEHGFGRVVCKVPLDCPSSTWIQFQDSCYIFLQEAIKVESIEDVRNQCTDHGADMISIHNEEENAFILDTLKKQWKGPDDILLGMFYDTDDASFKWFDNSNMTFDKWTDQDDDEDLVDTCAFLHIKTGEWKKGNCEVSSVEGTLCKTAIPYKRKYLSDNHILISALVIASTVILTVLGAIIWFLYKKHSDSRFTTVFSTAPQSPYNEDCVLVVGEENEYPVQFD

SEQ ID NO: 47423 - protein, 322 aa, Homo sapiens
  Payload ID: 9610
  Gene Symbol: LYVE1
  Gene Name: lymphatic vessel endothelial hyaluronan receptor 1
  Uniprot ID: Q9Y5Y7
  ENSP ID: ENSP00000256178
MARCFSLVLLLTSIWTTRLLVQGSLRAEELSIQVSCRIMGITLVSKKANQQLNFTEAKEACRLLGLSLAGKDQVETALKASFETCSYGWVGDGFVVISRISPNPKCGKNGVGVLIWKVPVSRQFAAYCYNSSDTWTNSCIPEIITTKDPIFNTQTATQTTEFIVSDSTYSVASPYSTIPAPTTTPPAPASTSIPRRKKLICVTEVFMETSTMSTETEPFVENKAAFKNEAAGFGGVPTALLVLALLFFGAAAGLGFCYVKRYVKAFPFTNKNQQKEMIETKVVKEEKANDSNPNEESKKTDKNPEESKSPSKTTVRCLEAEV

SEQ ID NO: 47424 - protein, 71 aa, Homo sapiens
  Payload ID: 9610
  Gene Symbol: LYVE1
  Gene Name: lymphatic vessel endothelial hyaluronan receptor 1
  ENSP ID: ENSP00000402580
MARCFSLVLLLTSIWTTRLLVQGSLRAEGSSFLALCSCSAIEMKPSNHFSVQLVCILLQLWLGWRWIRGHL

SEQ ID NO: 47425 - protein, 218 aa, Homo sapiens
  Payload ID: 9610
  Gene Symbol: LYVE1
  Gene Name: lymphatic vessel endothelial hyaluronan receptor 1
  ENSP ID: ENSP00000436016
MARCFSLVLLLTSIWTTRLLVQGSLRAEDTWTNSCIPEIITTKDPIFNTQTATQTTEFIVSDSTYSVASPYSTIPAPTTTPPAPASTSIPRRKKLICVTEVFMETSTMSTETEPFVENKAAFKNEAAGFGGVPTALLVLALLFFGAAAGLGFCYVKRYVKAFPFTNKNQQKEMIETKVVKEEKANDSNPNEESKKTDKNPEESKSPSKTTVRCLEAEV

SEQ ID NO: 47426 - protein, 280 aa, Homo sapiens
  Payload ID: 9611
  Gene Symbol: LYL1
  Gene Name: lymphoblastic leukemia associated hematopoiesis regulator 1
  Uniprot ID: P12980
  ENSP ID: ENSP00000264824
MCPPQAQAEVGPTMTEKAEMVCAPSPAPAPPPKPASPGPPQVEEVGHRGGSSPPRLPPGVPVISLGHSRPPGVAMPTTELGTLRPPLLQLSTLGTAPPTLALHYHPHPFLNSVYIGPAGPFSIFPSSRLKRRPSHCELDLAEGHQPQKVARRVFTNSRERWRQQNVNGAFAELRKLLPTHPPDRKLSKNEVLRLAMKYIGFLVRLLRDQAAALAAGPTPPGPRKRPVHRVPDDGARRGSGRRAEAAARSQPAPPADPDGSPGGAARPIKMEQTALSPEVR

SEQ ID NO: 47427 - protein, 57 aa, Homo sapiens
  Payload ID: 9611
  Gene Symbol: LYL1
  Gene Name: lymphoblastic leukemia associated hematopoiesis regulator 1
  ENSP ID: ENSP00000468122
MPTTELGTLRPPLLQLSTLGTAPPTLALHYHPHPFLNSVYIGPAGPFSIFPSSRLKR

SEQ ID NO: 47428 - protein, 128 aa, Homo sapiens
  Payload ID: 9612
  Gene Symbol: LY6D
  Gene Name: lymphocyte antigen 6 complex, locus D
  Uniprot ID: Q14210
  ENSP ID: ENSP00000301263
MRTALLLLAALAVATGPALTLRCHVCTSSSNCKHSVVCPASSRFCKTTNTVEPLRGNLVKKDCAESCTPSYTLQGQVSSGTSSTQCCQEDLCNEKLHNAAPTRTALAHSALSLGLALSLLAVILAPSL

SEQ ID NO: 47429 - protein, 131 aa, Homo sapiens
  Payload ID: 9613
  Gene Symbol: LY6E
  Gene Name: lymphocyte antigen 6 complex, locus E
  Uniprot ID: Q16553
  ENSP ID: ENSP00000292494
MKIFLPVLLAALLGVERASSLMCFSCLNQKSNLYCLKPTICSDQDNYCVTVSASAGIGNLVTFGHSLSKTCSPACPIPEGVNVGVASMGISCCQSFLCNFSAADGGLRASVTLLGAGLLLSLLPALLRFGP

SEQ ID NO: 47430 - protein, 131 aa, Homo sapiens; identical to SEQ ID NO: 47429
  Payload ID: 9613
  Gene Symbol: LY6E
  Gene Name: lymphocyte antigen 6 complex, locus E
  Uniprot ID: Q16553
  ENSP ID: ENSP00000414307

SEQ ID NO: 47431 - protein, 131 aa, Homo sapiens; identical to SEQ ID NO: 47429
  Payload ID: 9613
  Gene Symbol: LY6E
  Gene Name: lymphocyte antigen 6 complex, locus E
  Uniprot ID: Q16553
  ENSP ID: ENSP00000427915

SEQ ID NO: 47432 - protein, 131 aa, Homo sapiens; identical to SEQ ID NO: 47429
  Payload ID: 9613
  Gene Symbol: LY6E
  Gene Name: lymphocyte antigen 6 complex, locus E
  Uniprot ID: Q16553
  ENSP ID: ENSP00000428159

SEQ ID NO: 47433 - protein, 131 aa, Homo sapiens; identical to SEQ ID NO: 47429
  Payload ID: 9613
  Gene Symbol: LY6E
  Gene Name: lymphocyte antigen 6 complex, locus E
  Uniprot ID: Q16553
  ENSP ID: ENSP00000428169

SEQ ID NO: 47434 - protein, 41 aa, Homo sapiens
  Payload ID: 9613
  Gene Symbol: LY6E
  Gene Name: lymphocyte antigen 6 complex, locus E
  ENSP ID: ENSP00000428365
MKIFLPVLLAALLGVEREEQSVLPEADHLLRPGQLLRDCVC

SEQ ID NO: 47435 - protein, 147 aa, Homo sapiens
  Payload ID: 9613
  Gene Symbol: LY6E
  Gene Name: lymphocyte antigen 6 complex, locus E
  ENSP ID: ENSP00000428427
MTSGIPGCGGACVLPSRAPLRRRDPQHCSPTLSEAPLLRAHTQTRLLTRGLPTPNTTRTVQVSVTVTPTWSPVRPRQDRLLWFVTSRQDGHPLQNEDLLASAAGCPSGCGASQLADVLLLLEPEEQSVLPEADHLLRPGQLLRDCVC

SEQ ID NO: 47436 - protein, 131 aa, Homo sapiens; identical to SEQ ID NO: 47429
  Payload ID: 9613
  Gene Symbol: LY6E
  Gene Name: lymphocyte antigen 6 complex, locus E
  Uniprot ID: Q16553
  ENSP ID: ENSP00000428442

SEQ ID NO: 47437 - protein, 66 aa, Homo sapiens
  Payload ID: 9613
  Gene Symbol: LY6E
  Gene Name: lymphocyte antigen 6 complex, locus E
  ENSP ID: ENSP00000428467
MKIFLPVLLAALLGVERASSLMCFSCLNQKSNLYCLKPTICSDQDNYCVTVSASAGIASFPMQGIS

SEQ ID NO: 47438 - protein, 131 aa, Homo sapiens; identical to SEQ ID NO: 47429
  Payload ID: 9613
  Gene Symbol: LY6E
  Gene Name: lymphocyte antigen 6 complex, locus E
  Uniprot ID: Q16553
  ENSP ID: ENSP00000428572

SEQ ID NO: 47439 - protein, 73 aa, Homo sapiens
  Payload ID: 9613
  Gene Symbol: LY6E
  Gene Name: lymphocyte antigen 6 complex, locus E
  ENSP ID: ENSP00000430131
MKIFLPVLLAALLGVERASSLMCFSCLNQKSNLYCLKPTICSDQDNYCVTVSASAGIGECQASDRAFLPWPSP

SEQ ID NO: 47440 - protein, 66 aa, Homo sapiens
  Payload ID: 9613
  Gene Symbol: LY6E
  Gene Name: lymphocyte antigen 6 complex, locus E
  ENSP ID: ENSP00000430700
MKIFLPVLLAALLGVERASSLMCFSCLNQKSNLYCLKPTICSDQDNYCVTVSASAGIGGFAGGTDS

SEQ ID NO: 47441 - protein, 41 aa, Homo sapiens; identical to SEQ ID NO: 47434
  Payload ID: 9613
  Gene Symbol: LY6E
  Gene Name: lymphocyte antigen 6 complex, locus E
  ENSP ID: ENSP00000430770

SEQ ID NO: 47442 - protein, 66 aa, Homo sapiens; identical to SEQ ID NO: 47437
  Payload ID: 9613
  Gene Symbol: LY6E
  Gene Name: lymphocyte antigen 6 complex, locus E
  ENSP ID: ENSP00000430796

SEQ ID NO: 47443 - protein, 131 aa, Homo sapiens; identical to SEQ ID NO: 47429
  Payload ID: 9613
  Gene Symbol: LY6E
  Gene Name: lymphocyte antigen 6 complex, locus E
  Uniprot ID: Q16553
  ENSP ID: ENSP00000482517

SEQ ID NO: 47444 - protein, 131 aa, Homo sapiens; identical to SEQ ID NO: 47429
  Payload ID: 9613
  Gene Symbol: LY6E
  Gene Name: lymphocyte antigen 6 complex, locus E
  Uniprot ID: Q16553
  ENSP ID: ENSP00000487664

SEQ ID NO: 47445 - protein, 66 aa, Homo sapiens; identical to SEQ ID NO: 47437
  Payload ID: 9613
  Gene Symbol: LY6E
  Gene Name: lymphocyte antigen 6 complex, locus E
  ENSP ID: ENSP00000487700

SEQ ID NO: 47446 - protein, 73 aa, Homo sapiens; identical to SEQ ID NO: 47439
  Payload ID: 9613
  Gene Symbol: LY6E
  Gene Name: lymphocyte antigen 6 complex, locus E
  ENSP ID: ENSP00000488115

SEQ ID NO: 47447 - protein, 66 aa, Homo sapiens; identical to SEQ ID NO: 47437
  Payload ID: 9613
  Gene Symbol: LY6E
  Gene Name: lymphocyte antigen 6 complex, locus E
  ENSP ID: ENSP00000488121

SEQ ID NO: 47448 - protein, 147 aa, Homo sapiens; identical to SEQ ID NO: 47435
  Payload ID: 9613
  Gene Symbol: LY6E
  Gene Name: lymphocyte antigen 6 complex, locus E
  ENSP ID: ENSP00000488311

SEQ ID NO: 47449 - protein, 41 aa, Homo sapiens; identical to SEQ ID NO: 47434
  Payload ID: 9613
  Gene Symbol: LY6E
  Gene Name: lymphocyte antigen 6 complex, locus E
  ENSP ID: ENSP00000488414

SEQ ID NO: 47450 - protein, 131 aa, Homo sapiens; identical to SEQ ID NO: 47429
  Payload ID: 9613
  Gene Symbol: LY6E
  Gene Name: lymphocyte antigen 6 complex, locus E
  Uniprot ID: Q16553
  ENSP ID: ENSP00000488421

SEQ ID NO: 47451 - protein, 131 aa, Homo sapiens; identical to SEQ ID NO: 47429
  Payload ID: 9613
  Gene Symbol: LY6E
  Gene Name: lymphocyte antigen 6 complex, locus E
  Uniprot ID: Q16553
  ENSP ID: ENSP00000488443

SEQ ID NO: 47452 - protein, 131 aa, Homo sapiens; identical to SEQ ID NO: 47429
  Payload ID: 9613
  Gene Symbol: LY6E
  Gene Name: lymphocyte antigen 6 complex, locus E
  Uniprot ID: Q16553
  ENSP ID: ENSP00000488556

SEQ ID NO: 47453 - protein, 131 aa, Homo sapiens; identical to SEQ ID NO: 47429
  Payload ID: 9613
  Gene Symbol: LY6E
  Gene Name: lymphocyte antigen 6 complex, locus E
  Uniprot ID: Q16553
  ENSP ID: ENSP00000488559

SEQ ID NO: 47454 - protein, 66 aa, Homo sapiens; identical to SEQ ID NO: 47440
  Payload ID: 9613
  Gene Symbol: LY6E
  Gene Name: lymphocyte antigen 6 complex, locus E
  ENSP ID: ENSP00000488627

SEQ ID NO: 47455 - protein, 41 aa, Homo sapiens; identical to SEQ ID NO: 47434
  Payload ID: 9613
  Gene Symbol: LY6E
  Gene Name: lymphocyte antigen 6 complex, locus E
  ENSP ID: ENSP00000488743

SEQ ID NO: 47456 - protein, 131 aa, Homo sapiens; identical to SEQ ID NO: 47429
  Payload ID: 9613
  Gene Symbol: LY6E
  Gene Name: lymphocyte antigen 6 complex, locus E
  Uniprot ID: Q16553
  ENSP ID: ENSP00000488891

SEQ ID NO: 47457 - protein, 201 aa, Homo sapiens
  Payload ID: 9614
  Gene Symbol: LY6G5B
  Gene Name: lymphocyte antigen 6 complex, locus G5B
  Uniprot ID: Q8NDX9
  ENSP ID: ENSP00000365024
MKVHMLVGVLVMVGFTVGKVPVPDIRTCHFCLVEDPSVGCISGSEKCTISSSSLCMVITIYYDVKVRFIVRGCGQYISYRCQEKRNTYFAEYWYQAQCCQYDYCNSWSSPQLQSSLPEPHDRPLALPLSDSQIQWFYQALNLSLPLPNFHAGTEPDGLDPMVTLSLNLGLSFAELRRMYLFLNSSGLLVLPQAGLLTPHPS

SEQ ID NO: 47458 - protein, 212 aa, Homo sapiens
  Payload ID: 9614
  Gene Symbol: LY6G5B
  Gene Name: lymphocyte antigen 6 complex, locus G5B
  ENSP ID: ENSP00000372921
DFGYCPRVYCENQPMLPIGVLVMVGFTVGKVPVPDIRTCHFCLVEDPSVGCISGSEKCTISSSSLCMVITIYYDVKVRFIVRGCGQYISYRCQEKRNTYFAEYWYQAQCCQYDYCNSWSSPQLQSSLPEPHDRPLALPLSDSQIQWFYQALNLSLPLPNFHAGTEPDGLDPMVTLSLNLGLSFAELCRMYLFLNSSGLLVLPQAGLLTPHPS

SEQ ID NO: 47459 - protein, 146 aa, Homo sapiens
  Payload ID: 9614
  Gene Symbol: LY6G5B
  Gene Name: lymphocyte antigen 6 complex, locus G5B
  Uniprot ID: Q8NDX9
  ENSP ID: ENSP00000386365
MVITIYYDVKVRFIVRGCGQYISYRCQEKRNTYFAEYWYQAQCCQYDYCNSWSSPQLQSSLPEPHDRPLALPLSDSQIQWFYQALNLSLPLPNFHAGTEPDGLDPMVTLSLNLGLSFAELRRMYLFLNSSGLLVLPQAGLLTPHPS

SEQ ID NO: 47460 - protein, 212 aa, Homo sapiens; identical to SEQ ID NO: 47458
  Payload ID: 9614
  Gene Symbol: LY6G5B
  Gene Name: lymphocyte antigen 6 complex, locus G5B
  ENSP ID: ENSP00000395699

SEQ ID NO: 47461 - protein, 212 aa, Homo sapiens; identical to SEQ ID NO: 22403
  Payload ID: 9614
  Gene Symbol: LY6G5B
  Gene Name: lymphocyte antigen 6 complex, locus G5B
  ENSP ID: ENSP00000398952

SEQ ID NO: 47462 - protein, 212 aa, Homo sapiens; identical to SEQ ID NO: 22403
  Payload ID: 9614
  Gene Symbol: LY6G5B
  Gene Name: lymphocyte antigen 6 complex, locus G5B
  ENSP ID: ENSP00000407899

SEQ ID NO: 47463 - protein, 201 aa, Homo sapiens; identical to SEQ ID NO: 47457
  Payload ID: 9614
  Gene Symbol: LY6G5B
  Gene Name: lymphocyte antigen 6 complex, locus G5B
  Uniprot ID: Q8NDX9
  ENSP ID: ENSP00000417055

SEQ ID NO: 47464 - protein, 201 aa, Homo sapiens; identical to SEQ ID NO: 47457
  Payload ID: 9614
  Gene Symbol: LY6G5B
  Gene Name: lymphocyte antigen 6 complex, locus G5B
  Uniprot ID: Q8NDX9
  ENSP ID: ENSP00000417822

SEQ ID NO: 47465 - protein, 201 aa, Homo sapiens; identical to SEQ ID NO: 47457
  Payload ID: 9614
  Gene Symbol: LY6G5B
  Gene Name: lymphocyte antigen 6 complex, locus G5B
  Uniprot ID: Q8NDX9
  ENSP ID: ENSP00000418119

SEQ ID NO: 47466 - protein, 201 aa, Homo sapiens [sequence omitted]

SEQ ID NO: 47467 - protein, 201 aa, Homo sapiens [sequence omitted]

SEQ ID NO: 47468 - protein, 201 aa, Homo sapiens; identical to SEQ ID NO: 47457
  Payload ID: 9614
  Gene Symbol: LY6G5B
  Gene Name: lymphocyte antigen 6 complex, locus G5B
  Uniprot ID: Q8NDX9
  ENSP ID: ENSP00000420698

SEQ ID NO: 47469 - protein, 150 aa, Homo sapiens
  Payload ID: 9615
  Gene Symbol: LY6G5C
  Gene Name: lymphocyte antigen 6 complex, locus G5C
  Uniprot ID: Q5SRR4
  ENSP ID: ENSP00000313380
MRFMAGPAGSQSLGPLCFHSSPQALYTVLLIVLVMMSLVFGKFVPVNWEPPQPLPFPKYLRCYRCLLETKELGCLLGSDICLTPAGSSCITLHKKNSSGSDVMVSDCRSKEQMSDCSNTRTSPVSGFWIFSQYCFLDFCNDPQNRGLYTP

SEQ ID NO: 47470 - protein, 225 aa, Homo sapiens
  Payload ID: 9615
  Gene Symbol: LY6G5C
  Gene Name: lymphocyte antigen 6 complex, locus G5C
  ENSP ID: ENSP00000365023
  MOD_RES (1)..(1): Any amino acid
XADLPSCWGAGPCYTGHKVGALRRDTVICCCRHGDYSTPCLFTPGKPSRNPSPWKRTLWTLSAPWAGPAGWTGEEQNATKTGLITRRPRPLRRRPHPAPASPLPEIIRGNIPRMLGKFVPVNWEPPQPLPFPKYLRCYRCLLETKELGCLLGSDICLTPAGSSCITLHKKNSSGSDVMVSDCRSKEQMSDCSNTRTSPVSGFWIFSQYCFLDFCNDPQNRGLYTP

SEQ ID NO: 47471 - protein, 150 aa, Homo sapiens; identical to SEQ ID NO: 47469
  Payload ID: 9615
  Gene Symbol: LY6G5C
  Gene Name: lymphocyte antigen 6 complex, locus G5C
  Uniprot ID: Q5SRR4
  ENSP ID: ENSP00000372724

SEQ ID NO: 47472 - protein, 150 aa, Homo sapiens; identical to SEQ ID NO: 47469
  Payload ID: 9615
  Gene Symbol: LY6G5C
  Gene Name: lymphocyte antigen 6 complex, locus G5C
  Uniprot ID: Q5SRR4
  ENSP ID: ENSP00000372917

SEQ ID NO: 47473 - protein, 225 aa, Homo sapiens; identical to SEQ ID NO: 47470
  Payload ID: 9615
  Gene Symbol: LY6G5C
  Gene Name: lymphocyte antigen 6 complex, locus G5C
  ENSP ID: ENSP00000389781
  MOD_RES (1)..(1): Any amino acid

SEQ ID NO: 47474 - protein, 150 aa, Homo sapiens; identical to SEQ ID NO: 47469
  Payload ID: 9615
  Gene Symbol: LY6G5C
  Gene Name: lymphocyte antigen 6 complex, locus G5C
  Uniprot ID: Q5SRR4
  ENSP ID: ENSP00000391301

SEQ ID NO: 47475 - protein, 150 aa, Homo sapiens; identical to SEQ ID NO: 47469
  Payload ID: 9615
  Gene Symbol: LY6G5C
  Gene Name: lymphocyte antigen 6 complex, locus G5C
  Uniprot ID: Q5SRR4
  ENSP ID: ENSP00000391878

SEQ ID NO: 47476 - protein, 225 aa, Homo sapiens; identical to SEQ ID NO: 47470
  Payload ID: 9615
  Gene Symbol: LY6G5C
  Gene Name: lymphocyte antigen 6 complex, locus G5C
  ENSP ID: ENSP00000397467
  MOD_RES (1)..(1): Any amino acid

SEQ ID NO: 47477 - protein, 225 aa, Homo sapiens; identical to SEQ ID NO: 47470
  Payload ID: 9615
  Gene Symbol: LY6G5C
  Gene Name: lymphocyte antigen 6 complex, locus G5C
  ENSP ID: ENSP00000400837
  MOD_RES (1)..(1): Any amino acid

SEQ ID NO: 47478 - protein, 225 aa, Homo sapiens; identical to SEQ ID NO: 47470
  Payload ID: 9615
  Gene Symbol: LY6G5C
  Gene Name: lymphocyte antigen 6 complex, locus G5C
  ENSP ID: ENSP00000400950
  MOD_RES (1)..(1): Any amino acid

SEQ ID NO: 47479 - protein, 225 aa, Homo sapiens; identical to SEQ ID NO: 47470
  Payload ID: 9615
  Gene Symbol: LY6G5C
  Gene Name: lymphocyte antigen 6 complex, locus G5C
  ENSP ID: ENSP00000403079
  MOD_RES (1)..(1): Any amino acid

SEQ ID NO: 47480 - protein, 225 aa, Homo sapiens; identical to SEQ ID NO: 47470
  Payload ID: 9615
  Gene Symbol: LY6G5C
  Gene Name: lymphocyte antigen 6 complex, locus G5C
  ENSP ID: ENSP00000410321
  MOD_RES (1)..(1): Any amino acid

SEQ ID NO: 47481 - protein, 150 aa, Homo sapiens; identical to SEQ ID NO: 47469
  Payload ID: 9615
  Gene Symbol: LY6G5C
  Gene Name: lymphocyte antigen 6 complex, locus G5C
  Uniprot ID: Q5SRR4
  ENSP ID: ENSP00000413765

SEQ ID NO: 47482 - protein, 150 aa, Homo sapiens; identical to SEQ ID NO: 47469
  Payload ID: 9615
  Gene Symbol: LY6G5C
  Gene Name: lymphocyte antigen 6 complex, locus G5C
  Uniprot ID: Q5SRR4
  ENSP ID: ENSP00000414953

SEQ ID NO: 47483 - protein, 69 aa, Homo sapiens
  Payload ID: 9615
  Gene Symbol: LY6G5C
  Gene Name: lymphocyte antigen 6 complex, locus G5C
  ENSP ID: ENSP00000418172
MAGPAGSQSLGPLCFHSSPQALYTVLLIVLVMMSLVFGKWLQGFRRVSWPGWRNPQTPSVWVHLSRMLR

SEQ ID NO: 47484 - protein, 125 aa, Homo sapiens
  Payload ID: 9616
  Gene Symbol: LY6G6C
  Gene Name: lymphocyte antigen 6 complex, locus G6C
  Uniprot ID: O95867
  ENSP ID: ENSP00000364978
MKALMLLTLSVLLCWVSADIRCHSCYKVPVLGCVDRQSCRLEPGQQCLTTHAYLGKMWVFSNLRCGTPEEPCQEAFNQTNRKLGLTYNTTCCNKDNCNSAGPRPTPALGLVFLTSLAGLGLWLLH

SEQ ID NO: 47485 - protein, 125 aa, Homo sapiens; identical to SEQ ID NO: 47484
  Payload ID: 9616
  Gene Symbol: LY6G6C
  Gene Name: lymphocyte antigen 6 complex, locus G6C
  Uniprot ID: O95867
  ENSP ID: ENSP00000372905

SEQ ID NO: 47486 - protein, 125 aa, Homo sapiens; identical to SEQ ID NO: 47484
  Payload ID: 9616
  Gene Symbol: LY6G6C
  Gene Name: lymphocyte antigen 6 complex, locus G6C
  Uniprot ID: O95867
  ENSP ID: ENSP00000388591

SEQ ID NO: 47487 - protein, 125 aa, Homo sapiens; identical to SEQ ID NO: 47484
  Payload ID: 9616
  Gene Symbol: LY6G6C
  Gene Name: lymphocyte antigen 6 complex, locus G6C
  Uniprot ID: O95867
  ENSP ID: ENSP00000409428

SEQ ID NO: 47488 - protein, 125 aa, Homo sapiens; identical to SEQ ID NO: 47484
  Payload ID: 9616
  Gene Symbol: LY6G6C
  Gene Name: lymphocyte antigen 6 complex, locus G6C
  Uniprot ID: O95867
  ENSP ID: ENSP00000410398

SEQ ID NO: 47489 - protein, 125 aa, Homo sapiens; identical to SEQ ID NO: 47484
  Payload ID: 9616
  Gene Symbol: LY6G6C
  Gene Name: lymphocyte antigen 6 complex, locus G6C
  Uniprot ID: O95867
  ENSP ID: ENSP00000411365

SEQ ID NO: 47490 - protein, 125 aa, Homo sapiens; identical to SEQ ID NO: 47484
  Payload ID: 9616
  Gene Symbol: LY6G6C
  Gene Name: lymphocyte antigen 6 complex, locus G6C
  Uniprot ID: O95867
  ENSP ID: ENSP00000415732

SEQ ID NO: 47491 - protein, 69 aa, Homo sapiens
  Payload ID: 9616
  Gene Symbol: LY6G6C
  Gene Name: lymphocyte antigen 6 complex, locus G6C
  ENSP ID: ENSP00000431133
MWVFSNLRCGTPEEPCQEAFNQTNRKLGLTYNTTCCNKDNCNSAGPRPTPALGLVFLTSLAGLGLWLLH

SEQ ID NO: 47492 - protein, 69 aa, Homo sapiens; identical to SEQ ID NO: 47491
  Payload ID: 9616
  Gene Symbol: LY6G6C
  Gene Name: lymphocyte antigen 6 complex, locus G6C
  ENSP ID: ENSP00000432319

SEQ ID NO: 47493 - protein, 69 aa, Homo sapiens; identical to SEQ ID NO: 47491
  Payload ID: 9616
  Gene Symbol: LY6G6C
  Gene Name: lymphocyte antigen 6 complex, locus G6C
  ENSP ID: ENSP00000433207

SEQ ID NO: 47494 - protein, 69 aa, Homo sapiens; identical to SEQ ID NO: 47491
  Payload ID: 9616
  Gene Symbol: LY6G6C
  Gene Name: lymphocyte antigen 6 complex, locus G6C
  ENSP ID: ENSP00000433921

SEQ ID NO: 47495 - protein, 69 aa, Homo sapiens; identical to SEQ ID NO: 47491
  Payload ID: 9616
  Gene Symbol: LY6G6C
  Gene Name: lymphocyte antigen 6 complex, locus G6C
  ENSP ID: ENSP00000434057

SEQ ID NO: 47496 - protein, 174 aa, Homo sapiens
  Payload ID: 9617
  Gene Symbol: LY6G6D
  Gene Name: lymphocyte antigen 6 complex, locus G6D
  ENSP ID: ENSP00000364984
MKPQFVGILLSSLLGAALGNRMRCYNCGGSPSSSCKEAVTTCGEGRPQPGLEQIKLPGNRRCFLRGLKIPLGSLKSHLLCPRRQVLKPGVQHPSFILSLSPSDLDSPTSSLRRSPSLQSSGDRVGGRRDLSSPQGLLPGRPVQQRRGKPCGPCRHFGCSSYRPDLSLARTVERI

SEQ ID NO: 47497 - protein, 133 aa, Homo sapiens
  Payload ID: 9617
  Gene Symbol: LY6G6D
  Gene Name: lymphocyte antigen 6 complex, locus G6D
  Uniprot ID: O95868
  ENSP ID: ENSP00000364985
MKPQFVGILLSSLLGAALGNRMRCYNCGGSPSSSCKEAVTTCGEGRPQPGLEQIKLPGNPPVTLIHQHPACVAAHHCNQVETESVGDVTYPAHRDCYLGDLCNSAVASHVAPAGILAAAATALTCLLPGLWSG

SEQ ID NO: 47498 - protein, 174 aa, Homo sapiens; identical to SEQ ID NO: 47496
  Payload ID: 9617
  Gene Symbol: LY6G6D
  Gene Name: lymphocyte antigen 6 complex, locus G6D
  ENSP ID: ENSP00000372907

SEQ ID NO: 47499 - protein, 133 aa, Homo sapiens; identical to SEQ ID NO: 47497
  Payload ID: 9617
  Gene Symbol: LY6G6D
  Gene Name: lymphocyte antigen 6 complex, locus G6D
  Uniprot ID: O95868
  ENSP ID: ENSP00000382952

SEQ ID NO: 47500 - protein, 382 aa, Homo sapiens
  Payload ID: 9617
  Gene Symbol: LY6G6D
  Gene Name: lymphocyte antigen 6 complex, locus G6D
  ENSP ID: ENSP00000382956
MAVLFLLLFLCGTPQAADNMQAIYVALGEAVELPCPSPPTLHGDEHLSWFCSPAAGSFTTLVAQVQVGRPAPDPGKPGRESRLRLLGNYSLWLEGSKEEDAGRYWCTVLGQHHNYQNWRVYDVLVLKGSQLSARAADGSPCNVLLCSVVPSRRMDSVTWQEGKGPVRGRVQSFWGSEAALLLVCPGEGLSEPRSRRPRIIRCLMTHNKGVSFSLAASIDASPALCAPSTGWDMPWILMLLLTMGQGVVILALSIVLWRQRVRGAPGRGNRMRCYNCGGSPSSSCKEAVTTCGEGRPQPGLEQIKLPGNPPVTLIHQHPACVAAHHCNQVETESVGDVTYPAHRDCYLGDLCNSAVASHVAPAGILAAAATALTCLLPGLWSG

SEQ ID NO: 47501 - protein, 133 aa, Homo sapiens; identical to SEQ ID NO: 47497
  Payload ID: 9617
  Gene Symbol: LY6G6D
  Gene Name: lymphocyte antigen 6 complex, locus G6D
  Uniprot ID: O95868
  ENSP ID: ENSP00000389619

SEQ ID NO: 47502 - protein, 174 aa, Homo sapiens; identical to SEQ ID NO: 47496
  Payload ID: 9617
  Gene Symbol: LY6G6D
  Gene Name: lymphocyte antigen 6 complex, locus G6D
  ENSP ID: ENSP00000389642

SEQ ID NO: 47503 - protein, 133 aa, Homo sapiens; identical to SEQ ID NO: 47497
  Payload ID: 9617
  Gene Symbol: LY6G6D
  Gene Name: lymphocyte antigen 6 complex, locus G6D
  Uniprot ID: O95868
  ENSP ID: ENSP00000390777

SEQ ID NO: 47504 - protein, 174 aa, Homo sapiens; identical to SEQ ID NO: 47496
  Payload ID: 9617
  Gene Symbol: LY6G6D
  Gene Name: lymphocyte antigen 6 complex, locus G6D
  ENSP ID: ENSP00000392479

SEQ ID NO: 47505 - protein, 133 aa, Homo sapiens
  Payload ID: 9617
  Gene Symbol: LY6G6D
  Gene Name: lymphocyte antigen 6 complex, locus G6D
  Uniprot ID: O95868
  ENSP ID: ENSP00000392651
MKPQFVGILLSSLLGAALGNRMRCYNCGGSPSSTCKEAVTTCGEGRPQPGLEQIKLPGNPPVTLIHQHPACVAAHHCNQVETESVGDVTYPAHRDCYLGDLCNSAVASHVAPAGILAAAATALTCLLPGLWSG

SEQ ID NO: 47506 - protein, 133 aa, Homo sapiens; identical to SEQ ID NO: 47497
  Payload ID: 9617
  Gene Symbol: LY6G6D
  Gene Name: lymphocyte antigen 6 complex, locus G6D
  Uniprot ID: O95868
  ENSP ID: ENSP00000395722

SEQ ID NO: 47507 - protein, 133 aa, Homo sapiens; identical to SEQ ID NO: 47497
  Payload ID: 9617
  Gene Symbol: LY6G6D
  Gene Name: lymphocyte antigen 6 complex, locus G6D
  Uniprot ID: O95868
  ENSP ID: ENSP00000397576

SEQ ID NO: 47508 - protein, 382 aa, Homo sapiens; identical to SEQ ID NO: 22401
  Payload ID: 9617
  Gene Symbol: LY6G6D
  Gene Name: lymphocyte antigen 6 complex, locus G6D
  ENSP ID: ENSP00000397708

SEQ ID NO: 47509 - protein, 382 aa, Homo sapiens; identical to SEQ ID NO: 22401
  Payload ID: 9617
  Gene Symbol: LY6G6D
  Gene Name: lymphocyte antigen 6 complex, locus G6D
  ENSP ID: ENSP00000406832

SEQ ID NO: 47510 - protein, 174 aa, Homo sapiens
  Payload ID: 9617
  Gene Symbol: LY6G6D
  Gene Name: lymphocyte antigen 6 complex, locus G6D
  ENSP ID: ENSP00000408650
MKPQFVGILLSSLLGAALGNRMRCYNCGGSPSSTCKEAVTTCGEGRPQPGLEQIKLPGNRRCFLRGLKIPLGSLKSHLLCPRRQVLKPGVQHPSFILSLSPSDLDSPTSSLRRSPSLQSSGDRVGGRRDLSSPQGLLPGRPVQQRRGKPCGPCRHFGCSSYRPDLSLARTVERI

SEQ ID NO: 47511 - protein, 174 aa, Homo sapiens; identical to SEQ ID NO: 47496
  Payload ID: 9617
  Gene Symbol: LY6G6D
  Gene Name: lymphocyte antigen 6 complex, locus G6D
  ENSP ID: ENSP00000411977

SEQ ID NO: 47512 - protein, 174 aa, Homo sapiens; identical to SEQ ID NO: 47496
  Payload ID: 9617
  Gene Symbol: LY6G6D
  Gene Name: lymphocyte antigen 6 complex, locus G6D
  ENSP ID: ENSP00000414791

SEQ ID NO: 47513 - protein, 100 aa, Homo sapiens
  Payload ID: 9618
  Gene Symbol: LY6G6E
  Gene Name: lymphocyte antigen 6 complex, locus G6E (pseudogene)
  ENSP ID: ENSP00000372909
MGTSSIFLCVLFLCGALGLTMSPARGRLRCYICGFTKPCHPVPTECRDDEACGISIGTSGRTLVQWPFSRRLPTSIHPAFPVAPASACLFHPTDQSEITE

SEQ ID NO: 47514 - protein, 125 aa, Homo sapiens
  Payload ID: 9618
  Gene Symbol: LY6G6E
  Gene Name: lymphocyte antigen 6 complex, locus G6E (pseudogene)
  ENSP ID: ENSP00000372910
MGTSSIFLCVLFLCGALGLTMSPARGRLRCYICGFTKPCHPVPTECRDDEACGISIGTSGKSCLSRAQCPLPGYATYWLHSYTLWHHCCEQDLCNIAASPQQLTSLLASLPLFVASFAGRGHLLH

SEQ ID NO: 47515 - protein, 100 aa, Homo sapiens; identical to SEQ ID NO: 47513
  Payload ID: 9618
  Gene Symbol: LY6G6E
  Gene Name: lymphocyte antigen 6 complex, locus G6E (pseudogene)
  ENSP ID: ENSP00000382095

SEQ ID NO: 47516 - protein, 88 aa, Homo sapiens
  Payload ID: 9618
  Gene Symbol: LY6G6E
  Gene Name: lymphocyte antigen 6 complex, locus G6E (pseudogene)
  ENSP ID: ENSP00000386842
MLQLYKSRDLGVQITSPRFLSLCLAMGTSSIFLCVLFLCGALGLTMSPARGRLRCYICGFTKPCHPVPTECRDDEACGISIGTSDAHC

SEQ ID NO: 47517 - protein, 100 aa, Homo sapiens; identical to SEQ ID NO: 47513
  Payload ID: 9618
  Gene Symbol: LY6G6E
  Gene Name: lymphocyte antigen 6 complex, locus G6E (pseudogene)
  ENSP ID: ENSP00000388932

SEQ ID NO: 47518 - protein, 66 aa, Homo sapiens
  Payload ID: 9618
  Gene Symbol: LY6G6E
  Gene Name: lymphocyte antigen 6 complex, locus G6E (pseudogene)
  ENSP ID: ENSP00000393941
MGTSSIFLCVLFLCGALGLTMSPARGRLRCYICGFTKPCHPVPTECRDDEACGISIGTSDQSEITE

SEQ ID NO: 47519 - protein, 66 aa, Homo sapiens; identical to SEQ ID NO: 47518
  Payload ID: 9618
  Gene Symbol: LY6G6E
  Gene Name: lymphocyte antigen 6 complex, locus G6E (pseudogene)
  ENSP ID: ENSP00000398849

SEQ ID NO: 47520 - protein, 100 aa, Homo sapiens; identical to SEQ ID NO: 47513
  Payload ID: 9618
  Gene Symbol: LY6G6E
  Gene Name: lymphocyte antigen 6 complex, locus G6E (pseudogene)
  ENSP ID: ENSP00000403996

SEQ ID NO: 47521 - protein, 66 aa, Homo sapiens; identical to SEQ ID NO: 47518
  Payload ID: 9618
  Gene Symbol: LY6G6E
  Gene Name: lymphocyte antigen 6 complex, locus G6E (pseudogene)
  ENSP ID: ENSP00000407275

SEQ ID NO: 47522 - protein, 66 aa, Homo sapiens; identical to SEQ ID NO: 47518
  Payload ID: 9618
  Gene Symbol: LY6G6E
  Gene Name: lymphocyte antigen 6 complex, locus G6E (pseudogene)
  ENSP ID: ENSP00000410718

SEQ ID NO: 47523 - protein, 100 aa, Homo sapiens; identical to SEQ ID NO: 47513
  Payload ID: 9618
  Gene Symbol: LY6G6E
  Gene Name: lymphocyte antigen 6 complex, locus G6E (pseudogene)
  ENSP ID: ENSP00000411081

SEQ ID NO: 47524 - protein, 100 aa, Homo sapiens; identical to SEQ ID NO: 47513
  Payload ID: 9618
  Gene Symbol: LY6G6E
  Gene Name: lymphocyte antigen 6 complex, locus G6E (pseudogene)
  ENSP ID: ENSP00000413547

SEQ ID NO: 47525 - protein, 66 aa, Homo sapiens; identical to SEQ ID NO: 47518
  Payload ID: 9618
  Gene Symbol: LY6G6E
  Gene Name: lymphocyte antigen 6 complex, locus G6E (pseudogene)
  ENSP ID: ENSP00000414035

SEQ ID NO: 47526 - protein, 66 aa, Homo sapiens; identical to SEQ ID NO: 47518
  Payload ID: 9618
  Gene Symbol: LY6G6E
  Gene Name: lymphocyte antigen 6 complex, locus G6E (pseudogene)
  ENSP ID: ENSP00000414169

SEQ ID NO: 47527 - protein, 66 aa, Homo sapiens; identical to SEQ ID NO: 47518
  Payload ID: 9618
  Gene Symbol: LY6G6E
  Gene Name: lymphocyte antigen 6 complex, locus G6E (pseudogene)
  ENSP ID: ENSP00000416475

SEQ ID NO: 47528 - protein, 100 aa, Homo sapiens; identical to SEQ ID NO: 47513
  Payload ID: 9618
  Gene Symbol: LY6G6E
  Gene Name: lymphocyte antigen 6 complex, locus G6E (pseudogene)
  ENSP ID: ENSP00000416966

SEQ ID NO: 47529 - protein, 128 aa, Homo sapiens
  Payload ID: 9618
  Gene Symbol: LY6G6E
  Gene Name: lymphocyte antigen 6 complex, locus G6E (pseudogene)
  ENSP ID: ENSP00000435573
MGTSSIFLCVLFLCGALGLTMSPARGRLRCYICGFTKPCHPVPTECRDDEACGISIGTSVKKLPLKGPVPSARLCHLLAALLHSVAPLLRAGPVQHSRFPTAAHQPPRLPAPLCGQLRWERTPPPLAS

SEQ ID NO: 47530 - protein, 125 aa, Homo sapiens; identical to SEQ ID NO: 47514
  Payload ID: 9618
  Gene Symbol: LY6G6E
  Gene Name: lymphocyte antigen 6 complex, locus G6E (pseudogene)
  ENSP ID: ENSP00000447045

SEQ ID NO: 47531 - protein, 125 aa, Homo sapiens; identical to SEQ ID NO: 47514
  Payload ID: 9618
  Gene Symbol: LY6G6E
  Gene Name: lymphocyte antigen 6 complex, locus G6E (pseudogene)
  ENSP ID: ENSP00000447438

SEQ ID NO: 47532 - protein, 125 aa, Homo sapiens; identical to SEQ ID NO: 47514
  Payload ID: 9618
  Gene Symbol: LY6G6E
  Gene Name: lymphocyte antigen 6 complex, locus G6E (pseudogene)
  ENSP ID: ENSP00000447596

SEQ ID NO: 47533 - protein, 125 aa, Homo sapiens; identical to SEQ ID NO: 47514
  Payload ID: 9618
  Gene Symbol: LY6G6E
  Gene Name: lymphocyte antigen 6 complex, locus G6E (pseudogene)
  ENSP ID: ENSP00000448748

SEQ ID NO: 47534 - protein, 125 aa, Homo sapiens; identical to SEQ ID NO: 47514
  Payload ID: 9618
  Gene Symbol: LY6G6E
  Gene Name: lymphocyte antigen 6 complex, locus G6E (pseudogene)
  ENSP ID: ENSP00000448874

SEQ ID NO: 47535 - protein, 125 aa, Homo sapiens; identical to SEQ ID NO: 47514
  Payload ID: 9618
  Gene Symbol: LY6G6E
  Gene Name: lymphocyte antigen 6 complex, locus G6E (pseudogene)
  ENSP ID: ENSP00000449142

SEQ ID NO: 47536 - protein, 297 aa, Homo sapiens
  Payload ID: 9619
  Gene Symbol: LY6G6F
  Gene Name: lymphocyte antigen 6 complex, locus G6F
  Uniprot ID: Q5SQ64
  ENSP ID: ENSP00000364992
MAVLFLLLFLCGTPQAADNMQAIYVALGEAVELPCPSPPTLHGDEHLSWFCSPAAGSFTTLVAQVQVGRPAPDPGKPGRESRLRLLGNYSLWLEGSKEEDAGRYWCAVLGQHHNYQNWRVYDVLVLKGSQLSARAADGSPCNVLLCSVVPSRRMDSVTWQEGKGPVRGRVQSFWGSEAALLLVCPGEGLSEPRSRRPRIIRCLMTHNKGVSFSLAASIDASPALCAPSTGWDMPWILMLLLTMGQGVVILALSIVLWRQRVRGAPGRDASIPQFKPEIQVYENIHLARLGPPAHKPR

SEQ ID NO: 47537 - protein, 297 aa, Homo sapiens [sequence omitted]

SEQ ID NO: 47538 - protein, 297 aa, Homo sapiens; identical to SEQ ID NO: 47536
  Payload ID: 9619
  Gene Symbol: LY6G6F
  Gene Name: lymphocyte antigen 6 complex, locus G6F
  Uniprot ID: Q5SQ64
  ENSP ID: ENSP00000389102

SEQ ID NO: 47539 - protein, 297 aa, Homo sapiens [sequence omitted]

SEQ ID NO: 47540 - protein, 297 aa, Homo sapiens; identical to SEQ ID NO: 47536
  Payload ID: 9619
  Gene Symbol: LY6G6F
  Gene Name: lymphocyte antigen 6 complex, locus G6F
  Uniprot ID: Q5SQ64
  ENSP ID: ENSP00000404884

SEQ ID NO: 47541 - protein, 297 aa, Homo sapiens; identical to SEQ ID NO: 47536
  Payload ID: 9619
  Gene Symbol: LY6G6F
  Gene Name: lymphocyte antigen 6 complex, locus G6F
  Uniprot ID: Q5SQ64
  ENSP ID: ENSP00000407535

SEQ ID NO: 47542 - protein, 297 aa, Homo sapiens; identical to SEQ ID NO: 47536
  Payload ID: 9619
  Gene Symbol: LY6G6F
  Gene Name: lymphocyte antigen 6 complex, locus G6F
  Uniprot ID: Q5SQ64
  ENSP ID: ENSP00000409959

SEQ ID NO: 47543 - protein, 161 aa, Homo sapiens
  Payload ID: 9620
  Gene Symbol: LY6H
  Gene Name: lymphocyte antigen 6 complex, locus H
  Uniprot ID: O94772
  ENSP ID: ENSP00000342711
MLAPQRTRAPSPRAAPRPTRSMLPAAMKGLGLALLAVLLCSAPAHGLWCQDCTLTTNSSHCTPKQCQPSDTVCASVRITDPSSSRKDHSVNKMCASSCDFVKRHFFSDYLMGFINSGILKVDVDCCEKDLCNGAAGAGHSPWALAGGLLLSLGPALLWAGP

SEQ ID NO: 47544 - protein, 161 aa, Homo sapiens; identical to SEQ ID NO: 47543
  Payload ID: 9620
  Gene Symbol: LY6H
  Gene Name: lymphocyte antigen 6 complex, locus H
  Uniprot ID: O94772
  ENSP ID: ENSP00000399485

SEQ ID NO: 47545 - protein, 140 aa, Homo sapiens
  Payload ID: 9620
  Gene Symbol: LY6H
  Gene Name: lymphocyte antigen 6 complex, locus H
  Uniprot ID: O94772
  ENSP ID: ENSP00000409899
MLPAAMKGLGLALLAVLLCSAPAHGLWCQDCTLTTNSSHCTPKQCQPSDTVCASVRITDPSSSRKDHSVNKMCASSCDFVKRHFFSDYLMGFINSGILKVDVDCCEKDLCNGAAGAGHSPWALAGGLLLSLGPALLWAGP

SEQ ID NO: 47546 - protein, 140 aa, Homo sapiens; identical to SEQ ID NO: 47545
  Payload ID: 9620
  Gene Symbol: LY6H
  Gene Name: lymphocyte antigen 6 complex, locus H
  Uniprot ID: O94772
  ENSP ID: ENSP00000478470

SEQ ID NO: 47547 - protein, 140 aa, Homo sapiens; identical to SEQ ID NO: 47545
  Payload ID: 9620
  Gene Symbol: LY6H
  Gene Name: lymphocyte antigen 6 complex, locus H
  Uniprot ID: O94772
  ENSP ID: ENSP00000480084

SEQ ID NO: 47548 - protein, 161 aa, Homo sapiens; identical to SEQ ID NO: 47543
  Payload ID: 9620
  Gene Symbol: LY6H
  Gene Name: lymphocyte antigen 6 complex, locus H
  Uniprot ID: O94772
  ENSP ID: ENSP00000482094

SEQ ID NO: 47549 - protein, 161 aa, Homo sapiens; identical to SEQ ID NO: 47543
  Payload ID: 9620
  Gene Symbol: LY6H
  Gene Name: lymphocyte antigen 6 complex, locus H
  Uniprot ID: O94772
  ENSP ID: ENSP00000487965

SEQ ID NO: 47550 - protein, 165 aa, Homo sapiens
  Payload ID: 9621
  Gene Symbol: LY6K
  Gene Name: lymphocyte antigen 6 complex, locus K
  Uniprot ID: Q17RY6
  ENSP ID: ENSP00000292430
MALLALLLVVALPRVWTDANLTARQRDPEDSQRTDEGDNRVWCHVCERENTFECQNPRRCKWTEPYCVIAAVKIFPRFFMVAKQCSAGCAAMERPKPEEKRFLLEEPMPFFYLKCCKIRYCNLEGPPINSSVFKEYAGSMGESCGGLWLAILLLLASIAAGLSLS

SEQ ID NO: 47551 - protein, 100 aa, Homo sapiens
  Payload ID: 9621
  Gene Symbol: LY6K
  Gene Name: lymphocyte antigen 6 complex, locus K
  ENSP ID: ENSP00000427749
MALLALLLVVALPRVWTDANLTARQRDPEDSQRTDEGDNRVWCHVCERENTFECQNPRRCKWTEPYCVIAAVRRSSGLVNSDSAQQSLSSPSVSTKLVGC

SEQ ID NO: 47552 - protein, 85 aa, Homo sapiens
  Payload ID: 9621
  Gene Symbol: LY6K
  Gene Name: lymphocyte antigen 6 complex, locus K
  ENSP ID: ENSP00000428432
MALLALLLVVALPRVWTDANLTARQRDPEDSQRTDEGDNRVWCHVCERENTFECQNPRRCKWTEPYCVIAAVSEYLRSCWGPKGR

SEQ ID NO: 47553 - protein, 105 aa, Homo sapiens
  Payload ID: 9621
  Gene Symbol: LY6K
  Gene Name: lymphocyte antigen 6 complex, locus K
  Uniprot ID: Q17RY6
  ENSP ID: ENSP00000429695
MALLALLLVVALPRVWTDANLTARQRDPEDSQRTDEGDNRVWCHVCERENTFECQNPRRCKWTEPYCVIAAVTVLRWLCSDGETQARGEAVSPGRAHALLLPQVL

SEQ ID NO: 47554 - protein, 1722 aa, Homo sapiens
  Payload ID: 9622
  Gene Symbol: LY75
  Gene Name: lymphocyte antigen 75
  Uniprot ID: O60449
  ENSP ID: ENSP00000263636
MRTGWATPRRPAGLLMLLFWFFDLAEPSGRAANDPFTIVHGNTGKCIKPVYGWIVADDCDETEDKLWKWVSQHRLFHLHSQKCLGLDITKSVNELRMFSCDSSAMLWWKCEHHSLYGAARYRLALKDGHGTAISNASDVWKKGGSEESLCDQPYHEIYTRDGNSYGRPCEFPFLIDGTWHHDCILDEDHSGPWCATTLNYEYDRKWGICLKPENGCEDNWEKNEQFGSCYQFNTQTALSWKEAYVSCQNQGADLLSINSAAELTYLKEKEGIAKIFWIGLNQLYSARGWEWSDHKPLNFLNWDPDRPSAPTIGGSSCARMDAESGLWQSFSCEAQLPYVCRKPLNNTVELTDVWTYSDTRCDAGWLPNNGFCYLLVNESNSWDKAHAKCKAFSSDLISIHSLADVEVVVTKLHNEDIKEEVWIGLKNINIPTLFQWSDGTEVTLTYWDENEPNVPYNKTPNCVSYLGELGQWKVQSCEEKLKYVCKRKGEKLNDASSDKMCPPDEGWKRHGETCYKIYEDEVPFGTNCNLTITSRFEQEYLNDLMKKYDKSLRKYFWTGLRDVDSCGEYNWATVGGRRRAVTFSNWNFLEPASPGGCVAMSTGKSVGKWEVKDCRSFKALSICKKMSGPLGPEEASPKPDDPCPEGWQSFPASLSCYKVFHAERIVRKRNWEEAERFCQALGAHLSSFSHVDEIKEFLHFLTDQFSGQHWLWIGLNKRSPDLQGSWQWSDRTPVSTIIMPNEFQQDYDIRDCAAVKVFHRPWRRGWHFYDDREFIYLRPFACDTKLEWVCQIPKGRTPKTPDWYNPDRAGIHGPPLIIEGSEYWFVADLHLNYEEAVLYCASNHSFLATITSFVGLKAIKNKIANISGDGQKWWIRISEWPIDDHFTYSRYPWHRFPVTFGEECLYMSAKTWLIDLGKPTDCSTKLPFICEKYNVSSLEKYSPDSAAKVQCSEQWIPFQNKCFLKIKPVSLTFSQASDTCHSYGGTLPSVLSQIEQDFITSLLPDMEATLWIGLRWTAYEKINKWTDNRELTYSNFHPLLVSGRLRIPENFFEEESRYHCALILNLQKSPFTGTWNFTSCSERHFVSLCQKYSEVKSRQTLQNASETVKYLNNLYKIIPKTLTWHSAKRECLKSNMQLVSITDPYQQAFLSVQALLHNSSLWIGLFSQDDELNFGWSDGKRLHFSRWAETNGQLEDCVVLDTDGFWKTVDCNDNQPGAICYYSGNETEKEVKPVDSVKCPSPVLNTPWIPFQNCCYNFIITKNRHMATTQDEVHTKCQKLNPKSHILSIRDEKENNFVLEQLLYFNYMASWVMLGITYRNKSLMWFDKTPLSYTHWRAGRPTIKNEKFLAGLSTDGFWDIQTFKVIEEAVYFHQHSILACKIEMVDYKEEYNTTLPQFMPYEDGIYSVIQKKVTWYEALNMCSQSGGHLASVHNQNGQLFLEDIVKRDGFPLWVGLSSHDGSESSFEWSDGSTFDYIPWKGQTSPGNCVLLDPKGTWKHEKCNSVKDGAICYKPTKSKKLSRLTYSSRCPAAKENGSRWIQYKGHCYKSDQALHSFSEAKKLCSKHDHSATIVSIKDEDENKFVSRLMRENNNITMRVWLGLSQHSVDQSWSWLDGSEVTFVKWENKSKSGVGRCSMLIASNETWKKVECEHGFGRVVCKVPLGPDYTAIAIIVATLSILVLMGGLIWFLFQRHRLHLAGFSSVRYAQGVNEDEIMLPSFHD

SEQ ID NO: 47555 - protein, 162 aa, Homo sapiens
  Payload ID: 9623
  Gene Symbol: LY86
  Gene Name: lymphocyte antigen 86
  Uniprot ID: O95711
  ENSP ID: ENSP00000230568
MKGFTATLFLWTLIFPSCSGGGGGKAWPTHVVCSDSGLEVLYQSCDPLQDFGFSVEKCSKQLKSNINIRFGIILREDIKELFLDLALMSQGSSVLNFSYPICEAALPKFSFCGRRKGEQIYYAGPVNNPEFTIPQGEYQVLLELYTEKRSTVACANATIMCS

SEQ ID NO: 47556 - protein, 162 aa, Homo sapiens; identical to SEQ ID NO: 47555
  Payload ID: 9623
  Gene Symbol: LY86
  Gene Name: lymphocyte antigen 86
  Uniprot ID: O95711
  ENSP ID: ENSP00000369286

SEQ ID NO: 47557 - protein, 655 aa, Homo sapiens
  Payload ID: 9624
  Gene Symbol: LY9
  Gene Name: lymphocyte antigen 9
  Uniprot ID: Q9HBG7
  ENSP ID: ENSP00000263285
MVAPKSHTDDWAPGPFSSKPQRSQLQIFSSVLQTSLLFLLMGLRASGKDSAPTVVSGILGGSVTLPLNISVDTEIENVIWIGPKNALAFARPKENVTIMVKSYLGRLDITKWSYSLCISNLTLNDAGSYKAQINQRNFEVTTEEEFTLFVYEQLQEPQVTMKSVKVSENFSCNITLMCSVKGAEKSVLYSWTPREPHASESNGGSILTVSRTPCDPDLPYICTAQNPVSQRSSLPVHVGQFCTDPGASRGGTTGETVVGVLGEPVTLPLALPACRDTEKVVWLFNTSIISKEREEAATADPLIKSRDPYKNRVWVSSQDCSLKISQLKIEDAGPYHAYVCSEASSVTSMTHVTLLIYRRLRKPKITWSLRHSEDGICRISLTCSVEDGGNTVMYTWTPLQKEAVVSQGESHLNVSWRSSENHPNLTCTASNPVSRSSHQFLSENICSGPERNTKLWIGLFLMVCLLCVGIFSWCIWKRKGRCSVPAFCSSQAEAPADTPEPTAGHTLYSVLSQGYEKLDTPLRPARQQPTPTSDSSSDSNLTTEEDEDRPEVHKPISGRYEVFDQVTQEGAGHDPAPEGQADYDPVTPYVTEVESVVGENTMYAQVFNLQGKTPVSQKEESSATIYCSIRKPQVVPPPQQNDLEIPESPTYENFT

SEQ ID NO: 47558 - protein, 341 aa, Homo sapiens
  Payload ID: 9624
  Gene Symbol: LY9
  Gene Name: lymphocyte antigen 9
  ENSP ID: ENSP00000357014
  MOD_RES (1)..(1): Any amino acid
XKVVWLFNTSIISKEREEAATADPLIKSRDPYKNRVWVSSQDCSLKISQLKIEDAGPYHAYVCSEASSVTSMTHVTLLIYRRLRKPKITWSLRHSEDGICRISLTCSVEDGGNTVMYTWTPLQKEAVVSQGESHLNVSWRSSENHPNLTCTASNPVSRSSHQFLSENICSGPERNTKLWIGLFLMVCLLCVGIFSWCIWKRKGRCSVPAFCSSQAEAPADTPGYEKLDTPLRPARQQPTPTSDSSSDSNLTTEEDEDRPEVHKPISGRYEVFDQVTQEGAGHDPAPEGQADYDPVTPYVTEVESVVGENTMYAQVFNLQVVPPPQQNDLEIPESPTYENFT

SEQ ID NO: 47559 - protein, 641 aa, Homo sapiens
  Payload ID: 9624
  Gene Symbol: LY9
  Gene Name: lymphocyte antigen 9
  Uniprot ID: Q9HBG7
  ENSP ID: ENSP00000357016
MVAPKSHTDDWAPGPFSSKPQRSQLQIFSSVLQTSLLFLLMGLRASGKDSAPTVVSGILGGSVTLPLNISVDTEIENVIWIGPKNALAFARPKENVTIMVKSYLGRLDITKWSYSLCISNLTLNDAGSYKAQINQRNFEVTTEEEFTLFVYEQLQEPQVTMKSVKVSENFSCNITLMCSVKGAEKSVLYSWTPREPHASESNGGSILTVSRTPCDPDLPYICTAQNPVSQRSSLPVHVGQFCTDPGASRGGTTGETVVGVLGEPVTLPLALPACRDTEKVVWLFNTSIISKEREEAATADPLIKSRDPYKNRVWVSSQDCSLKISQLKIEDAGPYHAYVCSEASSVTSMTHVTLLIYRRLRKPKITWSLRHSEDGICRISLTCSVEDGGNTVMYTWTPLQKEAVVSQGESHLNVSWRSSENHPNLTCTASNPVSRSSHQFLSENICSGPERNTKLWIGLFLMVCLLCVGIFSWCIWKRKGRCSVPAFCSSQAEAPADTPGYEKLDTPLRPARQQPTPTSDSSSDSNLTTEEDEDRPEVHKPISGRYEVFDQVTQEGAGHDPAPEGQADYDPVTPYVTEVESVVGENTMYAQVFNLQGKTPVSQKEESSATIYCSIRKPQVVPPPQQNDLEIPESPTYENFT

SEQ ID NO: 47560 - protein, 193 aa, Homo sapiens
  Payload ID: 9624
  Gene Symbol: LY9
  Gene Name: lymphocyte antigen 9
  ENSP ID: ENSP00000357018
MVAPKSHTDDWAPGPFSSKPQRSQLQIFSSVLQTSLLFLLMGLRASGKDSAPTVVSGILGGSVTLPLNISVDTEIENVIWIGPKNALAFARPKENVTIMVKSYLGRLDITKWSYSLCISNLTLNDAGSYKAQINQRNFEVTTEEEFTLFVYAPFIEKLSVHVIEGDHRTLLEGSGLESIISTLAEPRVSVREG

SEQ ID NO: 47561 - protein, 565 aa, Homo sapiens
  Payload ID: 9624
  Gene Symbol: LY9
  Gene Name: lymphocyte antigen 9
  ENSP ID: ENSP00000376039
MVAPKSHTDDWAPGPFSSKPQRSQLQIFSSVLQTSLLFLLMGLRASGKDSAPTVVSGILGGSVTLPLNISVDTEIENVIWIGPKNALAFARPKENVTIMVKSYLGRLDITKWSYSLCISNLTLNDAGSYKAQINQRNFEVTTEEEFTLFVYEQLQEPQVTMKSVKVSENFSCNITLMCSVKGAEKSVLYSWTPREPHASESNGGSILTVSRTPCDPDLPYICTAQNPVSQRSSLPVHVGQFCTDPGASRGGTTGETVVGVLGEPVTLPLALPACRDTEKVVWLFNTSIISKEREEAATADPLIKSRDPYKNRVWVSSQDCSLKISQLKIEDAGPYHAYVCSEASSVTSMTHVTLLIYRPERNTKLWIGLFLMVCLLCVGIFSWCIWKRKGRCSVPAFCSSQAEAPADTPEPTAGHTLYSVLSQGYEKLDTPLRPARQQPTPTSDSSSDSNLTTEEDEDRPEVHKPISGRYEVFDQVTQEGAGHDPAPEGQADYDPVTPYVTEVESVVGENTMYAQVFNLQGKTPVSQKEESSATIYCSIRKPQVVPPPQQNDLEIPESPTYENFT

SEQ ID NO: 47562 - protein, 71 aa, Homo sapiens
  Payload ID: 9624
  Gene Symbol: LY9
  Gene Name: lymphocyte antigen 9
  ENSP ID: ENSP00000473643
KSHTDDWAPGPFSSKPQRSQLQIFSSVLQTSLLFLLMEFLVESGSQTHLFWSRISKVLSRASEALESGNPS

SEQ ID NO: 47563 - protein, 61 aa, Homo sapiens
  Payload ID: 9624
  Gene Symbol: LY9
  Gene Name: lymphocyte antigen 9
  ENSP ID: ENSP00000476321
MVAPKSHTDDWAPGPFSSKPQRSQLQIFSSVLQTSLLFLLMGPTPGKHLSAAWPGTPLSSR

SEQ ID NO: 47564 - protein, 160 aa, Homo sapiens [sequence omitted]

SEQ ID NO: 47565 - protein, 130 aa, Homo sapiens
  Payload ID: 9625
  Gene Symbol: LY96
  Gene Name: lymphocyte antigen 96
  Uniprot ID: Q9Y6Y9
  ENSP ID: ENSP00000430533
MLPFLFFSTLFSSIFTEAQKQYWVCNSSDASISYTYCGRDLKQLYFNLYITVNTMNLPKRKEVICRGSDDDYSFCRALKGETVNTTISFSFKGIKFSKGKYKCVVEAISGSPEEMLFCLEFVILHQPNSN

SEQ ID NO: 47566 - protein, 627 aa, Homo sapiens
  Payload ID: 9626
  Gene Symbol: LCP1
  Gene Name: lymphocyte cytosolic protein 1 (L-plastin)
  Uniprot ID: P13796
  ENSP ID: ENSP00000315757
MARGSVSDEEMMELREAFAKVDTDGNGYISFNELNDLFKAACLPLPGYRVREITENLMATGDLDQDGRISFDEFIKIFHGLKSTDVAKTFRKAINKKEGICAIGGTSEQSSVGTQHSYSEEEKYAFVNWINKALENDPDCRHVIPMNPNTNDLFNAVGDGIVLCKMINLSVPDTIDERTINKKKLTPFTIQENLNLALNSASAIGCHVVNIGAEDLKEGKPYLVLGLLWQVIKIGLFADIELSRNEALIALLREGESLEDLMKLSPEELLLRWANYHLENAGCNKIGNFSTDIKDSKAYYHLLEQVAPKGDEEGVPAVVIDMSGLREKDDIQRAECMLQQAERLGCRQFVTATDVVRGNPKLNLAFIANLFNRYPALHKPENQDIDWGALEGETREERTFRNWMNSLGVNPRVNHLYSDLSDALVIFQLYEKIKVPVDWNRVNKPPYPKLGGNMKKLENCNYAVELGKNQAKFSLVGIGGQDLNEGNRTLTLALIWQLMRRYTLNILEEIGGGQKVNDDIIVNWVNETLREAKKSSSISSFKDPKISTSLPVLDLIDAIQPGSINYDLLKTENLNDDEKLNNAKYAISMARKIGARVYALPEDLVEVNPKMVMTVFACLMGKGMKRV

SEQ ID NO: 47567 - protein, 627 aa, Homo sapiens; identical to SEQ ID NO: 47566
  Payload ID: 9626
  Gene Symbol: LCP1
  Gene Name: lymphocyte cytosolic protein 1 (L-plastin)
  Uniprot ID: P13796
  ENSP ID: ENSP00000381581

SEQ ID NO: 47568 - protein, 66 aa, Homo sapiens
  Payload ID: 9626
  Gene Symbol: LCP1
  Gene Name: lymphocyte cytosolic protein 1 (L-plastin)
  ENSP ID: ENSP00000402157
MARGSVSDEEMMELREAFAKVDTDGNGYISFNELNDLFKAACLPLPGYRVREITENLMATGDLDQD

SEQ ID NO: 47569 - protein, 246 aa, Homo sapiens
  Payload ID: 9626
  Gene Symbol: LCP1
  Gene Name: lymphocyte cytosolic protein 1 (L-plastin)
  ENSP ID: ENSP00000408052
MARGSVSDEEMMELREAFAKVDTDGNGYISFNELNDLFKAACLPLPGYRVREITENLMATGDLDQDGRISFDEFIKIFHGLKSTDVAKTFRKAINKKEGICAIGGTSEQSSVGTQHSYSEEEKYAFVNWINKALENDPDCRHVIPMNPNTNDLFNAVGDGIVLCKMINLSVPDTIDERTINKKKLTPFTIQENLNLALNSASAIGCHVVNIGAEDLKEGKPYLVLGLLWQVIKIGLFADIELSRNE

SEQ ID NO: 47570 - protein, 533 aa, Homo sapiens
  Payload ID: 9627
  Gene Symbol: LCP2
  Gene Name: lymphocyte cytosolic protein 2 (SH2 domain containing leukocyte protein of 76kDa)
  Uniprot ID: Q13094
  ENSP ID: ENSP00000046794
MALRNVPFRSEVLGWDPDSLADYFKKLNYKDCEKAVKKYHIDGARFLNLTENDIQKFPKLRVPILSKLSQEINKNEERRSIFTRKPQVPRFPEETESHEEDNGGWSSFEEDDYESPNDDQDGEDDGDYESPNEEEEAPVEDDADYEPPPSNDEEALQNSILPAKPFPNSNSMYIDRPPSGKTPQQPPVPPQRPMAALPPPPAGRNHSPLPPPQTNHEEPSRSRNHKTAKLPAPSIDRSTKPPLDRSLAPFDREPFTLGKKPPFSDKPSIPAGRSLGEHLPKIQKPPLPPTTERHERSSPLPGKKPPVPKHGWGPDRRENDEDDVHQRPLPQPALLPMSSNTFPSRSTKPSPMNPLPSSHMPGAFSESNSSFPQSASLPPYFSQGPSNRPPIRAEGRNFPLPLPNKPRPPSPAEEENSLNEEWYVSYITRPEAEAALRKINQDGTFLVRDSSKKTTTNPYVLMVLYKDKVYNIQIRYQKESQVYLLGTGLRGKEDFLSVSDIIDYFRKMPLLLIDGKNRGSRYQCTLTHAAGYP

SEQ ID NO: 47571 - protein, 328 aa, Homo sapiens
  Payload ID: 9627
  Gene Symbol: LCP2
  Gene Name: lymphocyte cytosolic protein 2 (SH2 domain containing leukocyte protein of 76kDa)
  ENSP ID: ENSP00000428871
MQPLPPPQTNHEEPSRSRNHKTAKLPAPSIDRSTKPPLDRSLAPFDREPFTLGKKPPFSDKPSIPAGRSLGEHLPKIQKPPLPPTTERHERSSPLPGKKPPVPKHGWGPDRRENDEDDVHQRPLPQPALLPMSSNTFPSRSTKPSPMNPLPSSHMPGAFSESNSSFPQSASLPPYFSQGPSNRPPIRAEGRNFPLPLPNKPRPPSPAEEENSLNEEWYVSYITRPEAEAALRKINQDGTFLVRDSSKKTTTNPYVLMVLYKDKVYNIQIRYQKESQVYLLGTGLRGKEDFLSVSDIIDYFRKMPLLLIDGKNRGSRYQCTLTHAAGYP

SEQ ID NO: 47572 - protein, 140 aa, Homo sapiens
  Payload ID: 9627
  Gene Symbol: LCP2
  Gene Name: lymphocyte cytosolic protein 2 (SH2 domain containing leukocyte protein of 76kDa)
  ENSP ID: ENSP00000430391
MQPLPPPQTNHEEPSRSRNHKTAKRKKPPFSDKPSIPAGRSLGEHLPKIQKPPLPPTTERHERSSPLPGKKPPVPKHGWGPDRRENDEDDVHQRPLPQPALLPMSSNTFPSRSTKPSPMNPLPSSHMPGAFSESNSSFPQ

SEQ ID NO: 47573 - protein, 533 aa, Homo sapiens [sequence omitted]

SEQ ID NO: 47574 - protein, 414 aa, Homo sapiens
  Payload ID: 9628
  Gene Symbol: LEXM
  Gene Name: lymphocyte expansion molecule
  Uniprot ID: Q3ZCV2
  ENSP ID: ENSP00000350924
MRESQDAAGAHGWNRVGSTATKWFTGAPFGVQSHRFDISAVYPNWKKFSTFTEAPYSTRYSTQVSHIGPGTYSSKETCFSKKKLMKEVDTGWAKAQEATRLTQLPHFQYQAIMKEKRLKEQKLGPGSYNLKDFLEQLREKPCSTRGLLSSGEVRFRGLTGNYYPGPGNYGEKGNPYTKLEENAWNRSHSEGLMCRMSNKPHPRPHQGSGLGPGTYFFKSDLETYVARSVGTRGPYDTFSGDRSKPLPYGHYSMQKKKPRELMNFKSFVEELNSHHNKKHGVFSKLPRNPKTPTERIYWANLSQCPRTLATSGPSFWLPQEKKCKPVNQPPFLLTSKGSGAKACQMIMGSWNPVGVGRYLNTWLMETKDRRQRYRSLFLSGSKRYLSDLARDMLMQIRLFCWKGLEVINFGLSPM

SEQ ID NO: 47575 - protein, 418 aa, Homo sapiens
  Payload ID: 9628
  Gene Symbol: LEXM
  Gene Name: lymphocyte expansion molecule
  Uniprot ID: Q3ZCV2
  ENSP ID: ENSP00000360320
MRESQDAAGAHGWNRVGSTATKWFTGAPFGVQSHRFDISAVYPNWKKFSTFTEAPYSTRYSTQVSHIGPGTYSSKETCFSKKKLMKEVDTGWAKAQEATRLTQLPHFQYQAIMKEKRLKEQKLGPGSYNLKDFLEQLREKPCSTRGLLSSGEVRFRGLTGNYYPGPGNYGEKGNPYTKLEENAWNRSHSEGLMCRMSNKPHPRPHQGSGLGPGTYFFKSDLETYVARSVGTRGPYDTFSGDRSKPLPYGHYSMQKKKPRELMNFKSFVEELNSHHNKKHGVFSKLPRNPKTPTERIYWANLSQCPRTLATSGPSFWLPQEKKCKPVNQPPFLLTSKGSGAKACQMIMGSWNPVGVGRYLNTWLMETKDRRQRYRSLFLSGSKRYLSDLARDMLMQERITPFTKGKCPPTVDYNSDPTP

SEQ ID NO: 47576 - protein, 382 aa, Homo sapiens
  Payload ID: 9629
  Gene Symbol: LAX1
  Gene Name: lymphocyte transmembrane adaptor 1
  Uniprot ID: Q8IWV1
  ENSP ID: ENSP00000356186
MRSHFLQWALATSRNKDQITNIFSGFAGLLAILLVVAVFCILWNWNKRKKRQVPYLRVTVMPLLTLPQTRQRAKNIYDILPWRQEDLGRHESRSMRIFSTESLLSRNSESPEHVPSQAGNAFQEHTAHIHATEYAVGIYDNAMVPQMCGNLTPSAHCINVRASRDCASISSEDSHDYVNVPTAEEIAETLASTKSPSRNLFVLPSTQKLEFTEERDEGCGDAGDCTSLYSPGAEDSDSLSNGEGSSQISNDYVNMTGLDLSAIQERQLWVAFQCCRDYENVPAADPSGSQQQAEKDVPSSNIGHVEDKTDDPGTHVQCVKRTFLASGDYADFQPFTQSEDSQMKHREEMSNEDSSDYENVLTAKLGGRDSEQGPGTQLLPDE

SEQ ID NO: 47577 - protein, 398 aa, Homo sapiens
  Payload ID: 9629
  Gene Symbol: LAX1
  Gene Name: lymphocyte transmembrane adaptor 1
  Uniprot ID: Q8IWV1
  ENSP ID: ENSP00000406970
MDGVTPTLSTIRGRTLESSTLHVTPRSLDRNKDQITNIFSGFAGLLAILLVVAVFCILWNWNKRKKRQVPYLRVTVMPLLTLPQTRQRAKNIYDILPWRQEDLGRHESRSMRIFSTESLLSRNSESPEHVPSQAGNAFQEHTAHIHATEYAVGIYDNAMVPQMCGNLTPSAHCINVRASRDCASISSEDSHDYVNVPTAEEIAETLASTKSPSRNLFVLPSTQKLEFTEERDEGCGDAGDCTSLYSPGAEDSDSLSNGEGSSQISNDYVNMTGLDLSAIQERQLWVAFQCCRDYENVPAADPSGSQQQAEKDVPSSNIGHVEDKTDDPGTHVQCVKRTFLASGDYADFQPFTQSEDSQMKHREEMSNEDSSDYENVLTAKLGGRDSEQGPGTQLLPDE

SEQ ID NO: 47578 - protein, 525 aa, Homo sapiens
  Payload ID: 9630
  Gene Symbol: LAG3
  Gene Name: lymphocyte-activation gene 3
  Uniprot ID: P18627
  ENSP ID: ENSP00000203629
MWEAQFLGLLFLQPLWVAPVKPLQPGAEVPVVWAQEGAPAQLPCSPTIPLQDLSLLRRAGVTWQHQPDSGPPAAAPGHPLAPGPHPAAPSSWGPRPRRYTVLSVGPGGLRSGRLPLQPRVQLDERGRQRGDFSLWLRPARRADAGEYRAAVHLRDRALSCRLRLRLGQASMTASPPGSLRASDWVILNCSFSRPDRPASVHWFRNRGQGRVPVRESPHHHLAESFLFLPQVSPMDSGPWGCILTYRDGFNVSIMYNLTVLGLEPPTPLTVYAGAGSRVGLPCRLPAGVGTRSFLTAKWTPPGGGPDLLVTGDNGDFTLRLEDVSQAQAGTYTCHIHLQEQQLNATVTLAIITVTPKSFGSPGSLGKLLCEVTPVSGQERFVWSSLDTPSQRSFSGPWLEAQEAQLLSQPWQCQLYQGERLLGAAVYFTELSSPGAQRSGRAPGALPAGHLLLFLILGVLSLLLLVTGAFGFHLWRRQWRPRRFSALEQGIHPPQAQSKIEELEQEPEPEPEPEPEPEPEPEPEQL

SEQ ID NO: 47579 - protein, 360 aa, Homo sapiens
  Payload ID: 9630
  Gene Symbol: LAG3
  Gene Name: lymphocyte-activation gene 3
  Uniprot ID: P18627
  ENSP ID: ENSP00000413825
MWEAQFLGLLFLQPLWVAPVKPLQPGAEVPVVWAQEGAPAQLPCSPTIPLQDLSLLRRAGVTWQHQPDSGPPAAAPGHPLAPGPHPAAPSSWGPRPRRYTVLSVGPGGLRSGRLPLQPRVQLDERGRQRGDFSLWLRPARRADAGEYRAAVHLRDRALSCRLRLRLGQASMTASPPGSLRASDWVILNCSFSRPDRPASVHWFRNRGQGRVPVRESPHHHLAESFLFLPQVSPMDSGPWGCILTYRDGFNVSIMYNLTVLGLEPPTPLTVYAGAGSRVGLPCRLPAGVGTRSFLTAKWTPPGGGPDLLVTGDNGDFTLRLEDVSQAQAGTYTCHIHLQEQQLNATVTLAIITGQPQVGKE

SEQ ID NO: 47580 - protein, 339 aa, Homo sapiens
  Payload ID: 9631
  Gene Symbol: LSP1
  Gene Name: lymphocyte-specific protein 1
  Uniprot ID: P33241
  ENSP ID: ENSP00000308383
MAEASSDPGAEEREELLGPTAQWSVEDEEEAVHEQCQHERDRQLQAQDEEGGGHVPERPKQEMLLSLKPSEAPELDEDEGFGDWSQRPEQRQQHEGAQGALDSGEPPQCRSPEGEQEDRPGLHAYEKEDSDEVHLEELSLSKEGPGPEDTVQDNLGAAGAEEEQEEHQKCQQPRTPSPLVLEGTIEQSSPPLSPTTKLIDRTESLNRSIEKSNSVKKSQPDLPISKIDQWLEQYTQAIETAGRTPKLARQASIELPSMAVASTKSRWETGEVQAQSAAKTPSCKDIVAGDMSKKSLWEQKGGSKTSSTIKSTPSGKRYKFVATGHGKYEKVLVEGGPAP

SEQ ID NO: 47581 - protein, 467 aa, Homo sapiens
  Payload ID: 9631
  Gene Symbol: LSP1
  Gene Name: lymphocyte-specific protein 1
  Uniprot ID: P33241
  ENSP ID: ENSP00000371194
MAPIWSPPGRVSGCHLSSGPAPGSAVGPWLGTPHPSLPLPLAPHKPPPPGLPGSAGQTSLPAQRECVFPGDAAVHQELCGLGFEECLGSIPQAHQCYLTNGPKRRKCSPRRRGRAPAWLCGGSPPCHQGLGHEHPSSGPSTNCSPRPTAQWSVEDEEEAVHEQCQHERDRQLQAQDEEGGGHVPERPKQEMLLSLKPSEAPELDEDEGFGDWSQRPEQRQQHEGAQGALDSGEPPQCRSPEGEQEDRPGLHAYEKEDSDEVHLEELSLSKEGPGPEDTVQDNLGAAGAEEEQEEHQKCQQPRTPSPLVLEGTIEQSSPPLSPTTKLIDRTESLNRSIEKSNSVKKSQPDLPISKIDQWLEQYTQAIETAGRTPKLARQASIELPSMAVASTKSRWETGEVQAQSAAKTPSCKDIVAGDMSKKSLWEQKGGSKTSSTIKSTPSGKRYKFVATGHGKYEKVLVEGGPAP

SEQ ID NO: 47582 - protein, 277 aa, Homo sapiens
  Payload ID: 9631
  Gene Symbol: LSP1
  Gene Name: lymphocyte-specific protein 1
  Uniprot ID: P33241
  ENSP ID: ENSP00000383932
MLLSLKPSEAPELDEDEGFGDWSQRPEQRQQHEGAQGALDSGEPPQCRSPEGEQEDRPGLHAYEKEDSDEVHLEELSLSKEGPGPEDTVQDNLGAAGAEEEQEEHQKCQQPRTPSPLVLEGTIEQSSPPLSPTTKLIDRTESLNRSIEKSNSVKKSQPDLPISKIDQWLEQYTQAIETAGRTPKLARQASIELPSMAVASTKSRWETGEVQAQSAAKTPSCKDIVAGDMSKKSLWEQKGGSKTSSTIKSTPSGKRYKFVATGHGKYEKVLVEGGPAP

SEQ ID NO: 47583 - protein, 277 aa, Homo sapiens; identical to SEQ ID NO: 47582
  Payload ID: 9631
  Gene Symbol: LSP1
  Gene Name: lymphocyte-specific protein 1
  Uniprot ID: P33241
  ENSP ID: ENSP00000384022

SEQ ID NO: 47584 - protein, 275 aa, Homo sapiens
  Payload ID: 9631
  Gene Symbol: LSP1
  Gene Name: lymphocyte-specific protein 1
  ENSP ID: ENSP00000400346
MLEERSEARPTAQWSVEDEEEAVHEQCQHERDRQLQAQDEEGGGHVPERPKQEMLLSLKPSEAPELDEDEGFGDWSQRPEQRQQHEGAQGALDSGEPPQCRSPEGEQEDRPGLHAYEKEDSDEVHLEELSLSKEGPGPEDTVQDNLGAAGAEEEQEEHQKCQQPRTPSPLVLEGTIEQSSPPLSPTTKLIDRTESLNRSIEKSNSVKKSQPDLPISKIDQWLEQYTQAIETAGRTPKLARQASIELPSMAVASTKSRWETGEVQAQSAAKTPSCK

SEQ ID NO: 47585 - protein, 175 aa, Homo sapiens
  Payload ID: 9631
  Gene Symbol: LSP1
  Gene Name: lymphocyte-specific protein 1
  ENSP ID: ENSP00000400999
MPTAQWSVEDEEEAVHEQCQHERDRQLQAQDEEGGGHVPERPKQEMLLSLKPSEAPELDEDEGFGDWSQRPEQRQQHEGAQGALDSGEPPQCRSPEGEQEDRPGLHAYEKEDSDEVHLEELSLSKEGPGPEDTVQDNLGAAGAEEEQEEHQKCQQPRTPSPLVLEGTIEQSSPPL

SEQ ID NO: 47586 - protein, 126 aa, Homo sapiens
  Payload ID: 9631
  Gene Symbol: LSP1
  Gene Name: lymphocyte-specific protein 1
  ENSP ID: ENSP00000402543
MLLSLKPSEAPELDEDEGFGDWSQRPEQRQQHEGAQGALDSGEPPQCRSPEGEQEDRPGLHAYEKEDSDEVHLEELSLSKEGPGPEDTVQDNLGAAGAEEEQEEHQKCQQPRTPSPLVLEGTIEQS

SEQ ID NO: 47587 - protein, 122 aa, Homo sapiens
  Payload ID: 9631
  Gene Symbol: LSP1
  Gene Name: lymphocyte-specific protein 1
  ENSP ID: ENSP00000403460
MKASGRGRWPGRAPQSSTGRHGVGVSGRGPGCWVLRPTAQWSVEDEEEAVHEQCQHERDRQLQAQDEEGGGHVPERPKQEMLLSLKPSEAPELDEDEGFGDWSQRPEQRQQHEGAQGALDSG

SEQ ID NO: 47588 - protein, 60 aa, Homo sapiens
  Payload ID: 9631
  Gene Symbol: LSP1
  Gene Name: lymphocyte-specific protein 1
  ENSP ID: ENSP00000411191
MLLSLKPSEAPELDEDEGFGDWSQRPEQRQQHEGAQGALDSGEPPQCRSPEGEQEDRPGL

SEQ ID NO: 47589 - protein, 222 aa, Homo sapiens
  Payload ID: 9631
  Gene Symbol: LSP1
  Gene Name: lymphocyte-specific protein 1
  ENSP ID: ENSP00000412405
MLLSLKPSEAPELDEDEGFGDWSQRPEQRQQHEGAQGALDSGEPPQCRSPEGEQEDRPGLHAYEKEDSDEVHLEELSLSKEGPGPEDTVQDNLGAAGAEEEQEEHQKCQQPRTPSPLVLEGTIEQSSPPLSPTTKLIDRTESLNRSIEKSNSVKKSQPDLPISKIDQWLEQYTQAIETAGRTPKLARQASIELPSMAVASTKSRWETGEVQAQSAAKTPSCK

SEQ ID NO: 47590 - protein, 64 aa, Homo sapiens
  Payload ID: 9631
  Gene Symbol: LSP1
  Gene Name: lymphocyte-specific protein 1
  ENSP ID: ENSP00000414106
MLLSLKPSEAPELDEDEGFGDWSQRPEQRQQHEGAQGALDSGEPPQCRSPEGEQEDRPGLHAYE

SEQ ID NO: 47591 - protein, 222 aa, Homo sapiens; identical to SEQ ID NO: 47589
  Payload ID: 9631
  Gene Symbol: LSP1
  Gene Name: lymphocyte-specific protein 1
  ENSP ID: ENSP00000416363

SEQ ID NO: 47592 - protein, 277 aa, Homo sapiens; identical to SEQ ID NO: 47582
  Payload ID: 9631
  Gene Symbol: LSP1
  Gene Name: lymphocyte-specific protein 1
  Uniprot ID: P33241
  ENSP ID: ENSP00000484140

SEQ ID NO: 47593 - protein, 399 aa, Homo sapiens
  Payload ID: 9632
  Gene Symbol: LEF1
  Gene Name: lymphoid enhancer-binding factor 1
  Uniprot ID: Q9UJU2
  ENSP ID: ENSP00000265165
MPQLSGGGGGGGGDPELCATDEMIPFKDEGDPQKEKIFAEISHPEEEGDLADIKSSLVNESEIIPASNGHEVARQAQTSQEPYHDKAREHPDDGKHPDGGLYNKGPSYSSYSGYIMMPNMNNDPYMSNGSLSPPIPRTSNKVPVVQPSHAVHPLTPLITYSDEHFSPGSHPSHIPSDVNSKQGMSRHPPAPDIPTFYPLSPGGVGQITPPLGWQGQPVYPITGGFRQPYPSSLSVDTSMSRFSHHMIPGPPGPHTTGIPHPAIVTPQVKQEHPHTDSDLMHVKPQHEQRKEQEPKRPHIKKPLNAFMLYMKEMRANVVAECTLKESAAINQILGRRWHALSREEQAKYYELARKERQLHMQLYPGWSARDNYGKKKKRKREKLQESASGTGPRMTAAYI

SEQ ID NO: 47594 - protein, 386 aa, Homo sapiens
  Payload ID: 9632
  Gene Symbol: LEF1
  Gene Name: lymphoid enhancer-binding factor 1
  Uniprot ID: Q9UJU2
  ENSP ID: ENSP00000369284
MPQLSGGGGGGGGDPELCATDEMIPFKDEGDPQKEKIFAEISHPEEEGDLADIKSSLVNESEIIPASNGHEVARQAQTSQEPYHDKAREHPDDGKHPDGGLYNKGPSYSSYSGYIMMPNMNNDPYMSNGSLSPPIPRTSNKVPVVQPSHAVHPLTPLITYSDEHFSPGSHPSHIPSDVNSKQGMSRHPPAPDIPTFYPLSPGGVGQITPPLGWFSHHMIPGPPGPHTTGIPHPAIVTPQVKQEHPHTDSDLMHVKPQHEQRKEQEPKRPHIKKPLNAFMLYMKEMRANVVAECTLKESAAINQILGRRWHALSREEQAKYYELARKERQLHMQLYPGWSARDNYGKKKKRKREKLQESASGGKRSSFPTCKAKAATPGPLLEMEAC

SEQ ID NO: 47595 - protein, 371 aa, Homo sapiens
  Payload ID: 9632
  Gene Symbol: LEF1
  Gene Name: lymphoid enhancer-binding factor 1
  Uniprot ID: Q9UJU2
  ENSP ID: ENSP00000406176
MPQLSGGGGGGGGDPELCATDEMIPFKDEGDPQKEKIFAEISHPEEEGDLADIKSSLVNESEIIPASNGHEVARQAQTSQEPYHDKAREHPDDGKHPDGGLYNKGPSYSSYSGYIMMPNMNNDPYMSNGSLSPPIPRTSNKVPVVQPSHAVHPLTPLITYSDEHFSPGSHPSHIPSDVNSKQGMSRHPPAPDIPTFYPLSPGGVGQITPPLGWFSHHMIPGPPGPHTTGIPHPAIVTPQVKQEHPHTDSDLMHVKPQHEQRKEQEPKRPHIKKPLNAFMLYMKEMRANVVAECTLKESAAINQILGRRWHALSREEQAKYYELARKERQLHMQLYPGWSARDNYGKKKKRKREKLQESASGTGPRMTAAYI

SEQ ID NO: 47596 - protein, 329 aa, Homo sapiens
  Payload ID: 9632
  Gene Symbol: LEF1
  Gene Name: lymphoid enhancer-binding factor 1
  Uniprot ID: Q9UJU2
  ENSP ID: ENSP00000422334
MPQLSGGGGGGGGDPELCATDEMIPFKDEGDPQKEKIFAEISHPEEEGDLADIKSSLVNESEIIPASNGHEVARQAQTSQEPYHDKAREHPDDGKHPDGGLYNKGPSYSSYSGYIMMPNMNNDPYMSNGSLSPPIPRTSNKVPVVQPSHAVHPLTPLITYSDEHFSPGSHPSHIPSDVNSKQGMSRHPPAPDIPTFYPLSPGGVGQITPPLGWQGQPVYPITGGFRQPYPSSLSVDTSMSRFSHHMIPGPPGPHTTGIPHPAIVTPQVKQEHPHTDSDLMHVCSAFLLPHPFLIPSTPSPNHHHHHLLGSLSMNRERSRSQKDLTLRSL

SEQ ID NO: 47597 - protein, 173 aa, Homo sapiens
  Payload ID: 9632
  Gene Symbol: LEF1
  Gene Name: lymphoid enhancer-binding factor 1
  ENSP ID: ENSP00000422801
MAEVARQAQTSQEPYHDKAREHPDDGKHPDGGLYNKGPSYSSYSGYIMMPNMNNDPYMSNGSLSPPIPRTSNKVPVVQPSHAVHPLTPLITYSDEHFSPGSHPSHIPSDVNSKQGMSRHPPAPDIPTFYPLSPGGVGQITPPLGWQGQPVYPITGGFRQPYPSSLSVDTSMSR

SEQ ID NO: 47598 - protein, 303 aa, Homo sapiens
  Payload ID: 9632
  Gene Symbol: LEF1
  Gene Name: lymphoid enhancer-binding factor 1
  Uniprot ID: Q9UJU2
  ENSP ID: ENSP00000422840
MAEVARQAQTSQEPYHDKAREHPDDGKHPDGGLYNKGPSYSSYSGYIMMPNMNNDPYMSNGSLSPPIPRTSNKVPVVQPSHAVHPLTPLITYSDEHFSPGSHPSHIPSDVNSKQGMSRHPPAPDIPTFYPLSPGGVGQITPPLGWFSHHMIPGPPGPHTTGIPHPAIVTPQVKQEHPHTDSDLMHVKPQHEQRKEQEPKRPHIKKPLNAFMLYMKEMRANVVAECTLKESAAINQILGRRWHALSREEQAKYYELARKERQLHMQLYPGWSARDNYGKKKKRKREKLQESASGTGPRMTAAYI

SEQ ID NO: 47599 - protein, 145 aa, Homo sapiens
  Payload ID: 9632
  Gene Symbol: LEF1
  Gene Name: lymphoid enhancer-binding factor 1
  ENSP ID: ENSP00000427365
MAEVARQAQTSQEPYHDKAREHPDDGKHPDGGLYNKGPSYSSYSGYIMMPNMNNDPYMSNGSLSPPIPRTSNKVPVVQPSHAVHPLTPLITYSDEHFSPGSHPSHIPSDVNSKQGMSRHPPAPDIPTFYPLSPGGVGQITPPLGW

SEQ ID NO: 47600 - protein, 133 aa, Homo sapiens
  Payload ID: 9632
  Gene Symbol: LEF1
  Gene Name: lymphoid enhancer-binding factor 1
  ENSP ID: ENSP00000427459
MAEVARQAQTSQEPYHDKAREHPDDGKHPDGGLYNKGPSYSSYSGYIMMPNMNNDPYMSNGSLSPPIPRTACPDILQLLISLLFIPCLRVVLDRSPHLLAGKVSLYIPSRVDSGNPTHPHCQSTLPCPGFPII

SEQ ID NO: 47601 - protein, 499 aa, Homo sapiens
  Payload ID: 9633
  Gene Symbol: LRMP
  Gene Name: lymphoid-restricted membrane protein
  Uniprot ID: Q12912
  ENSP ID: ENSP00000346442
MNDDPSMEENGVERVCPESLLQSREYSSLPLPRHTSSTDGTITSSDPGLEILNMASCDLDRNSLCKKEEDTRSASPTIEAQGTSPAHDNIAFQDSTSKDKTILNLEAKEEPETIEEHKKEHASGDSVVSPLPVTTVKSVNLRQSENTSANEKEVEAEFLRLSLGFKCDWFTLEKRVKLEERSRDLAEENLKKEITNCLKLLESLTPLCEDDNQAQEIIKKLEKSIKFLSQCAARVASRAEMLGAINQESRVSKAVEVMIQHVENLKRMYAKEHAELEELKQVLLQNERSFNPLEDDDDCQIKKRSASLNSKPSSLRRVTIASLPRNIGNAGMVAGMENNDRFSRRSSSWRILGSKQSEHRPSLPRFISTYSWADAEEEKCELKTKDDSEPSGEETVERTRKPSLSEKKNNPSKWDVSSVYDTIASWATNLKSSIRKANKALWLSIAFIVLFAALMSFLTGQLFQKSVDAAPTQQEDSWTSLEHILWPFTRLRHNGPPPV

SEQ ID NO: 47602 - protein, 348 aa, Homo sapiens
  Payload ID: 9633
  Gene Symbol: LRMP
  Gene Name: lymphoid-restricted membrane protein
  ENSP ID: ENSP00000354805
MNDDPSMEENGVERVCPESLLQSREYSSLPLPRHTSSTDGTITSSDPGLEILNMASCDLDRNSLCKKEEDTRSASPTIEAQGTSPAHDNIAFQDSTSKDKTILNLEAKEEPETIEEHKKEHASGDSVVSPLPVTTVKSVNLRQSENTSANEKEVEAEFLRLSLGFKCDWFTLEKRVKLEERSRDLAEENLKKEITNCLKLLESLTPLCEDDNQAQEIIKKLEKSIKFLSQCAARVASRAEMLGAINQESRVSKAVEVMIQHVENLKRMYAKEHAELEELKQVLLQNERSFNPLEDDDDCQIKKRSASLNSKPSSLRRVTIASLPRNIGNAGMVAGMENNDRFSRRSSS

SEQ ID NO: 47603 - protein, 446 aa, Homo sapiens
  Payload ID: 9633
  Gene Symbol: LRMP
  Gene Name: lymphoid-restricted membrane protein
  ENSP ID: ENSP00000444056
MASCDLDRNSLCKKEEDTRSASPTIEAQGTSPAHDNIAFQDSTSKDKTILNLEAKEEPETIEEHKKEHASGDSVVSPLPVTTVKSVNLRQSENTSANEKEVEAEFLRLSLGFKCDWFTLEKRVKLEERSRDLAEENLKKEITNCLKLLESLTPLCEDDNQAQEIIKKLEKSIKFLSQCAARVASRAEMLGAINQESRVSKAVEVMIQHVENLKRMYAKEHAELEELKQVLLQNERSFNPLEDDDDCQIKKRSASLNSKPSSLRRVTIASLPRNIGNAGMVAGMENNDRFSRRSSSWRILGSKQSEHRPSLPRFISTYSWADAEEEKCELKTKDDSEPSGEETVERTRKPSLSEKKNNPSKWDVSSVYDTIASWATNLKSSIRKANKALWLSIAFIVLFAALMSFLTGQLFQKSVDAAPTQQEDSWTSLEHILWPFTRLRHNGPPPV

SEQ ID NO: 47604 - protein, 499 aa, Homo sapiens; identical to SEQ ID NO: 47601
  Payload ID: 9633
  Gene Symbol: LRMP
  Gene Name: lymphoid-restricted membrane protein
  Uniprot ID: Q12912
  ENSP ID: ENSP00000446496

SEQ ID NO: 47605 - protein, 118 aa, Homo sapiens
  Payload ID: 9633
  Gene Symbol: LRMP
  Gene Name: lymphoid-restricted membrane protein
  ENSP ID: ENSP00000448534
MNDDPSMEENGVERVCPESLLQSREYSSLPLPRHTSSTDGTITSSDPGLEILNMASCDLDRNSLCKKEEDTRSASPTIEAQGTSPAHDNIAFQDSTSKDKTILNLEAKEEPETIEEHK

SEQ ID NO: 47606 - protein, 499 aa, Homo sapiens; identical to SEQ ID NO: 47601
  Payload ID: 9633
  Gene Symbol: LRMP
  Gene Name: lymphoid-restricted membrane protein
  Uniprot ID: Q12912
  ENSP ID: ENSP00000450246

SEQ ID NO: 47607 - protein, 76 aa, Homo sapiens
  Payload ID: 9633
  Gene Symbol: LRMP
  Gene Name: lymphoid-restricted membrane protein
  ENSP ID: ENSP00000450634
MNDDPSMEENGVERVCPESLLQSREYSSLPLPRHTSSTDGTITSSDPGLEILNMASCDLDRNSLCKKEEDTRSASP

SEQ ID NO: 47608 - protein, 69 aa, Homo sapiens
  Payload ID: 9633
  Gene Symbol: LRMP
  Gene Name: lymphoid-restricted membrane protein
  ENSP ID: ENSP00000450767
  MOD_RES (1)..(1): Any amino acid
XEKEVEAEFLRLSLGFKCDWFTLEKRVKLEERSRDLAEENLKKEITNCLKLLEAEKESYRKLSNRKYQF

SEQ ID NO: 47609 - protein, 8 aa, Homo sapiens
  Payload ID: 9633
  Gene Symbol: LRMP
  Gene Name: lymphoid-restricted membrane protein
  ENSP ID: ENSP00000451048
MNDDPSME

SEQ ID NO: 47610 - protein, 62 aa, Homo sapiens
  Payload ID: 9633
  Gene Symbol: LRMP
  Gene Name: lymphoid-restricted membrane protein
  ENSP ID: ENSP00000451159
MNDDPSMEENGVERVCPESLLQSREYSSLPLPRHTSSTDGTITSSETRSVRKRRIQDQLLPR

SEQ ID NO: 47611 - protein, 97 aa, Homo sapiens
  Payload ID: 9633
  Gene Symbol: LRMP
  Gene Name: lymphoid-restricted membrane protein
  ENSP ID: ENSP00000451196
  MOD_RES (1)..(1): Any amino acid
XDNQAQEIIKKLEKSIKFLSQCAARVASRAEMLGAINQESRVSKAVEVMIQHVENLKRMYAKEHAELEELKQVLLQNERSFNPLEDDADTHVVPTLC

SEQ ID NO: 47612 - protein, 120 aa, Homo sapiens
  Payload ID: 9633
  Gene Symbol: LRMP
  Gene Name: lymphoid-restricted membrane protein
  ENSP ID: ENSP00000452116
MNDDPSMEENGVERVCPESLLQSREYSSLPLPRHTSSTDGTITSSDPGLEILNMASCDLDRNSLCKKEEDTRSASPTIEAQGTSPAHDNIAFQDSTSKDKTILNLEAKEEPETIEEHKKE

SEQ ID NO: 47613 - protein, 205 aa, Homo sapiens
  Payload ID: 9634
  Gene Symbol: LTA
  Gene Name: lymphotoxin alpha
  ENSP ID: ENSP00000372791
MTPPERLFLPRVCGTTLHLLLLGLLLVLLPGAQGLPGVGLTPSAAQTARQHPKMHLAHSNLKPAAHLIGDPSKQNSLLWRANTDRAFLQDGFSLSNNSLLVPTSGIYFVYSQVVFSGKAYSPKATSSPLYLAHEVQLFSSQYPFHVPLLSSQKMVYPGLQEPWLHSMYHGAAFQLTQGDQLSTHTDGIPHLVLSPSTVFFGAFAL

SEQ ID NO: 47614 - protein, 205 aa, Homo sapiens; identical to SEQ ID NO: 47613
  Payload ID: 9634
  Gene Symbol: LTA
  Gene Name: lymphotoxin alpha
  ENSP ID: ENSP00000372793

SEQ ID NO: 47615 - protein, 205 aa, Homo sapiens
  Payload ID: 9634
  Gene Symbol: LTA
  Gene Name: lymphotoxin alpha
  ENSP ID: ENSP00000372991
MTPPERLFLPRVRGTTLHLLLLGLLLVLLPGAQGLPGVGLTPSAAQTARQHPKMHLAHSTLKPAAHLIGDPSKQNSLLWRANTDRAFLQDGFSLSNNSLLVPTSGIYFVYSQVVFSGKAYSPKATSSPLYLAHEVQLFSSQYPFHVPLLSSQKMVYPGLQEPWLHSMYHGAAFQLTQGDQLSTHTDGIPHLVLSPSTVFFGAFAL

SEQ ID NO: 47616 - protein, 205 aa, Homo sapiens; identical to SEQ ID NO: 47615
  Payload ID: 9634
  Gene Symbol: LTA
  Gene Name: lymphotoxin alpha
  ENSP ID: ENSP00000383131

SEQ ID NO: 47617 - protein, 205 aa, Homo sapiens; identical to SEQ ID NO: 47615
  Payload ID: 9634
  Gene Symbol: LTA
  Gene Name: lymphotoxin alpha
  ENSP ID: ENSP00000387924

SEQ ID NO: 47618 - protein, 205 aa, Homo sapiens; identical to SEQ ID NO: 47615
  Payload ID: 9634
  Gene Symbol: LTA
  Gene Name: lymphotoxin alpha
  ENSP ID: ENSP00000395895

SEQ ID NO: 47619 - protein, 205 aa, Homo sapiens
  Payload ID: 9634
  Gene Symbol: LTA
  Gene Name: lymphotoxin alpha
  Uniprot ID: P01374
  ENSP ID: ENSP00000395976
MTPPERLFLPRVCGTTLHLLLLGLLLVLLPGAQGLPGVGLTPSAAQTARQHPKMHLAHSTLKPAAHLIGDPSKQNSLLWRANTDRAFLQDGFSLSNNSLLVPTSGIYFVYSQVVFSGKAYSPKATSSPLYLAHEVQLFSSQYPFHVPLLSSQKMVYPGLQEPWLHSMYHGAAFQLTQGDQLSTHTDGIPHLVLSPSTVFFGAFAL

SEQ ID NO: 47620 - protein, 205 aa, Homo sapiens; identical to SEQ ID NO: 47619
  Payload ID: 9634
  Gene Symbol: LTA
  Gene Name: lymphotoxin alpha
  Uniprot ID: P01374
  ENSP ID: ENSP00000402413

SEQ ID NO: 47621 - protein, 205 aa, Homo sapiens; identical to SEQ ID NO: 47619
  Payload ID: 9634
  Gene Symbol: LTA
  Gene Name: lymphotoxin alpha
  Uniprot ID: P01374
  ENSP ID: ENSP00000403495

SEQ ID NO: 47622 - protein, 205 aa, Homo sapiens; identical to SEQ ID NO: 47615
  Payload ID: 9634
  Gene Symbol: LTA
  Gene Name: lymphotoxin alpha
  ENSP ID: ENSP00000407133

SEQ ID NO: 47623 - protein, 205 aa, Homo sapiens; identical to SEQ ID NO: 47619
  Payload ID: 9634
  Gene Symbol: LTA
  Gene Name: lymphotoxin alpha
  Uniprot ID: P01374
  ENSP ID: ENSP00000412555

SEQ ID NO: 47624 - protein, 205 aa, Homo sapiens; identical to SEQ ID NO: 47619
  Payload ID: 9634
  Gene Symbol: LTA
  Gene Name: lymphotoxin alpha
  Uniprot ID: P01374
  ENSP ID: ENSP00000413450

SEQ ID NO: 47625 - protein, 205 aa, Homo sapiens; identical to SEQ ID NO: 47615
  Payload ID: 9634
  Gene Symbol: LTA
  Gene Name: lymphotoxin alpha
  ENSP ID: ENSP00000416337

SEQ ID NO: 47626 - protein, 205 aa, Homo sapiens; identical to SEQ ID NO: 47619
  Payload ID: 9634
  Gene Symbol: LTA
  Gene Name: lymphotoxin alpha
  Uniprot ID: P01374
  ENSP ID: ENSP00000416509

SEQ ID NO: 47627 - protein, 244 aa, Homo sapiens
  Payload ID: 9635
  Gene Symbol: LTB
  Gene Name: lymphotoxin beta (TNF superfamily, member 3)
  Uniprot ID: Q06643
  ENSP ID: ENSP00000365285
MGALGLEGRGGRLQGRGSLLLAVAGATSLVTLLLAVPITVLAVLALVPQDQGGLVTETADPGAQAQQGLGFQKLPEEEPETDLSPGLPAAHLIGAPLKGQGLGWETTKEQAFLTSGTQFSDAEGLALPQDGLYYLYCLVGYRGRAPPGGGDPQGRSVTLRSSLYRAGGAYGPGTPELLLEGAETVTPVLDPARRQGYGPLWYTSVGFGGLVQLRRGERVYVNISHPDMVDFARGKTFFGAVMVG

SEQ ID NO: 47628 - protein, 244 aa, Homo sapiens; identical to SEQ ID NO: 47627
  Payload ID: 9635
  Gene Symbol: LTB
  Gene Name: lymphotoxin beta (TNF superfamily, member 3)
  Uniprot ID: Q06643
  ENSP ID: ENSP00000372985

SEQ ID NO: 47629 - protein, 244 aa, Homo sapiens; identical to SEQ ID NO: 47627
  Payload ID: 9635
  Gene Symbol: LTB
  Gene Name: lymphotoxin beta (TNF superfamily, member 3)
  Uniprot ID: Q06643
  ENSP ID: ENSP00000393693

SEQ ID NO: 47630 - protein, 244 aa, Homo sapiens; identical to SEQ ID NO: 47627
  Payload ID: 9635
  Gene Symbol: LTB
  Gene Name: lymphotoxin beta (TNF superfamily, member 3)
  Uniprot ID: Q06643
  ENSP ID: ENSP00000395102

SEQ ID NO: 47631 - protein, 244 aa, Homo sapiens; identical to SEQ ID NO: 47627
  Payload ID: 9635
  Gene Symbol: LTB
  Gene Name: lymphotoxin beta (TNF superfamily, member 3)
  Uniprot ID: Q06643
  ENSP ID: ENSP00000398741

SEQ ID NO: 47632 - protein, 244 aa, Homo sapiens; identical to SEQ ID NO: 47627
  Payload ID: 9635
  Gene Symbol: LTB
  Gene Name: lymphotoxin beta (TNF superfamily, member 3)
  Uniprot ID: Q06643
  ENSP ID: ENSP00000404014

SEQ ID NO: 47633 - protein, 244 aa, Homo sapiens; identical to SEQ ID NO: 47627
  Payload ID: 9635
  Gene Symbol: LTB
  Gene Name: lymphotoxin beta (TNF superfamily, member 3)
  Uniprot ID: Q06643
  ENSP ID: ENSP00000404450

SEQ ID NO: 47634 - protein, 244 aa, Homo sapiens; identical to SEQ ID NO: 47627
  Payload ID: 9635
  Gene Symbol: LTB
  Gene Name: lymphotoxin beta (TNF superfamily, member 3)
  Uniprot ID: Q06643
  ENSP ID: ENSP00000410481

SEQ ID NO: 47635 - protein, 77 aa, Homo sapiens
  Payload ID: 9635
  Gene Symbol: LTB
  Gene Name: lymphotoxin beta (TNF superfamily, member 3)
  Uniprot ID: Q06643
  ENSP ID: ENSP00000416113
MGALGLEGRGGRLQGRGSLLLAVAGATSLVTLLLAVPITVLAVLALVPQDQGGLGFRSCQRRSQKQISAPGSQLPTS

SEQ ID NO: 47636 - protein, 435 aa, Homo sapiens
  Payload ID: 9636
  Gene Symbol: LTBR
  Gene Name: lymphotoxin beta receptor (TNFR superfamily, member 3)
  Uniprot ID: P36941
  ENSP ID: ENSP00000228918
MLLPWATSAPGLAWGPLVLGLFGLLAASQPQAVPPYASENQTCRDQEKEYYEPQHRICCSRCPPGTYVSAKCSRIRDTVCATCAENSYNEHWNYLTICQLCRPCDPVMGLEEIAPCTSKRKTQCRCQPGMFCAAWALECTHCELLSDCPPGTEAELKDEVGKGNNHCVPCKAGHFQNTSSPSARCQPHTRCENQGLVEAAPGTAQSDTTCKNPLEPLPPEMSGTMLMLAVLLPLAFFLLLATVFSCIWKSHPSLCRKLGSLLKRRPQGEGPNPVAGSWEPPKAHPYFPDLVQPLLPISGDVSPVSTGLPAAPVLEAGVPQQQSPLDLTREPQLEPGEQSQVAHGTNGIHVTGGSMTITGNIYIYNGPVLGGPPGPGDLPATPEPPYPIPEEGDPGPPGLSTPHQEDGKAWHLAETEHCGATPSNRGPRNQFITHD

SEQ ID NO: 47637 - protein, 217 aa, Homo sapiens
  Payload ID: 9636
  Gene Symbol: LTBR
  Gene Name: lymphotoxin beta receptor (TNFR superfamily, member 3)
  ENSP ID: ENSP00000437647
MLLPWATSAPGLAWGPLVLGLFGLLAASQPQAVPPYASENQTCRDQEKEYYEPQHRICCSRCPPAKCSRIRDTVCATCAENSYNEHWNYLTICQLCRPCDPVMGLEEIAPCTSKRKTQCRCQPGMFCAAWALECTHCELLSDCPPGTEAELKDEVGKGNNHCVPCKAGHFQNTSSPSARCQPHTRCENQGLVEAAPGTAQSDTTCKNPLEPLPPEMS

SEQ ID NO: 47638 - protein, 148 aa, Homo sapiens
  Payload ID: 9636
  Gene Symbol: LTBR
  Gene Name: lymphotoxin beta receptor (TNFR superfamily, member 3)
  ENSP ID: ENSP00000437954
MGLEEIAPCTSKRKTQCRCQPGMFCAAWALECTHCELLSDCPPGTEAELKDEVGKGNNHCVPCKAGHFQNTSSPSARCQPHTRCENQGLVEAAPGTAQSDTTCKNPLEPLPPEMSEPALSKGVENLQALLYQAATGSSEASFPTLSPL

SEQ ID NO: 47639 - protein, 292 aa, Homo sapiens
  Payload ID: 9636
  Gene Symbol: LTBR
  Gene Name: lymphotoxin beta receptor (TNFR superfamily, member 3)
  ENSP ID: ENSP00000438605
MGLEEIAPCTSKRKTQCRCQPGMFCAAWALECTHCELLSDCPPGTEAELKDEVGKGNNHCVPCKAGHFQNTSSPSARCQPHTRCENQGLVEAAPGTAQSDTTCKNPLEPLPPEMSGSLLKRRPQGEGPNPVAGSWEPPKAHPYFPDLVQPLLPISGDVSPVSTGLPAAPVLEAGVPQQQSPLDLTREPQLEPGEQSQVAHGTNGIHVTGGSMTITGNIYIYNGPVLGGPPGPGDLPATPEPPYPIPEEGDPGPPGLSTPHQEDGKAWHLAETEHCGATPSNRGPRNQFITHD

SEQ ID NO: 47640 - protein, 74 aa, Homo sapiens
  Payload ID: 9636
  Gene Symbol: LTBR
  Gene Name: lymphotoxin beta receptor (TNFR superfamily, member 3)
  ENSP ID: ENSP00000438955
MGLEEIAPCTSKRKTQCRCQPGMFCAAWALECTHCELLSDCPPGTEAELKGVRTKVWWRQLQALPSPTQPAKIH

SEQ ID NO: 47641 - protein, 416 aa, Homo sapiens
  Payload ID: 9636
  Gene Symbol: LTBR
  Gene Name: lymphotoxin beta receptor (TNFR superfamily, member 3)
  Uniprot ID: P36941
  ENSP ID: ENSP00000440875
MEATGISLASQLKVPPYASENQTCRDQEKEYYEPQHRICCSRCPPGTYVSAKCSRIRDTVCATCAENSYNEHWNYLTICQLCRPCDPVMGLEEIAPCTSKRKTQCRCQPGMFCAAWALECTHCELLSDCPPGTEAELKDEVGKGNNHCVPCKAGHFQNTSSPSARCQPHTRCENQGLVEAAPGTAQSDTTCKNPLEPLPPEMSGTMLMLAVLLPLAFFLLLATVFSCIWKSHPSLCRKLGSLLKRRPQGEGPNPVAGSWEPPKAHPYFPDLVQPLLPISGDVSPVSTGLPAAPVLEAGVPQQQSPLDLTREPQLEPGEQSQVAHGTNGIHVTGGSMTITGNIYIYNGPVLGGPPGPGDLPATPEPPYPIPEEGDPGPPGLSTPHQEDGKAWHLAETEHCGATPSNRGPRNQFITHD

SEQ ID NO: 47642 - protein, 150 aa, Homo sapiens
  Payload ID: 9637
  Gene Symbol: LYN
  Gene Name: LYN proto-oncogene, Src family tyrosine kinase
  ENSP ID: ENSP00000428313
MGCIKSKGKDSLSDDGVDLKTQPVRNTERTIYVRDPTSNKQQRPVPESQLLPGQRFQTKDPEEQGDIVVALYPYDGIHPDDLSFKKGEKMKVLEEHGEWWKAKSLLTKKEGFIPSNYVAKLNTLETEEWFFKDITRKDAERQLLAPGNSA

SEQ ID NO: 47643 - protein, 491 aa, Homo sapiens
  Payload ID: 9637
  Gene Symbol: LYN
  Gene Name: LYN proto-oncogene, Src family tyrosine kinase
  Uniprot ID: P07948
  ENSP ID: ENSP00000428424
MGCIKSKGKDSLSDDGVDLKTQPVPESQLLPGQRFQTKDPEEQGDIVVALYPYDGIHPDDLSFKKGEKMKVLEEHGEWWKAKSLLTKKEGFIPSNYVAKLNTLETEEWFFKDITRKDAERQLLAPGNSAGAFLIRESETLKGSFSLSVRDFDPVHGDVIKHYKIRSLDNGGYYISPRITFPCISDMIKHYQKQADGLCRRLEKACISPKPQKPWDKDAWEIPRESIKLVKRLGAGQFGEVWMGYYNNSTKVAVKTLKPGTMSVQAFLEEANLMKTLQHDKLVRLYAVVTREEPIYIITEYMAKGSLLDFLKSDEGGKVLLPKLIDFSAQIAEGMAYIERKNYIHRDLRAANVLVSESLMCKIADFGLARVIEDNEYTAREGAKFPIKWTAPEAINFGCFTIKSDVWSFGILLYEIVTYGKIPYPGRTNADVMTALSQGYRMPRVENCPDELYDIMKMCWKEKAEERPTFDYLQSVLDDFYTATEGQYQQQP

SEQ ID NO: 47644 - protein, 512 aa, Homo sapiens
  Payload ID: 9637
  Gene Symbol: LYN
  Gene Name: LYN proto-oncogene, Src family tyrosine kinase
  Uniprot ID: P07948
  ENSP ID: ENSP00000428924
MGCIKSKGKDSLSDDGVDLKTQPVRNTERTIYVRDPTSNKQQRPVPESQLLPGQRFQTKDPEEQGDIVVALYPYDGIHPDDLSFKKGEKMKVLEEHGEWWKAKSLLTKKEGFIPSNYVAKLNTLETEEWFFKDITRKDAERQLLAPGNSAGAFLIRESETLKGSFSLSVRDFDPVHGDVIKHYKIRSLDNGGYYISPRITFPCISDMIKHYQKQADGLCRRLEKACISPKPQKPWDKDAWEIPRESIKLVKRLGAGQFGEVWMGYYNNSTKVAVKTLKPGTMSVQAFLEEANLMKTLQHDKLVRLYAVVTREEPIYIITEYMAKGSLLDFLKSDEGGKVLLPKLIDFSAQIAEGMAYIERKNYIHRDLRAANVLVSESLMCKIADFGLARVIEDNEYTAREGAKFPIKWTAPEAINFGCFTIKSDVWSFGILLYEIVTYGKIPYPGRTNADVMTALSQGYRMPRVENCPDELYDIMKMCWKEKAEERPTFDYLQSVLDDFYTATEGQYQQQP

SEQ ID NO: 47645 - protein, 122 aa, Homo sapiens
  Payload ID: 9638
  Gene Symbol: LYRM1
  Gene Name: LYR motif containing 1
  Uniprot ID: O43325
  ENSP ID: ENSP00000219168
MTTATRQEVLGLYRSIFRLARKWQATSGQMEDTIKEKQYILNEARTLFRKNKNLTDTDLIKQCIDECTARIEIGLHYKIPYPRPIHLPPMGLTPLRGRGLRSQEKLRKLSKPVYLRSHDEVS

SEQ ID NO: 47646 - protein, 122 aa, Homo sapiens; identical to SEQ ID NO: 47645
  Payload ID: 9638
  Gene Symbol: LYRM1
  Gene Name: LYR motif containing 1
  Uniprot ID: O43325
  ENSP ID: ENSP00000379367

SEQ ID NO: 47647 - protein, 33 aa, Homo sapiens
  Payload ID: 9638
  Gene Symbol: LYRM1
  Gene Name: LYR motif containing 1
  ENSP ID: ENSP00000396868
MGLTPLRGRGLRSQEKLRKLSKPVYLRSHDEVS

SEQ ID NO: 47648 - protein, 122 aa, Homo sapiens; identical to SEQ ID NO: 47645
  Payload ID: 9638
  Gene Symbol: LYRM1
  Gene Name: LYR motif containing 1
  Uniprot ID: O43325
  ENSP ID: ENSP00000407883

SEQ ID NO: 47649 - protein, 122 aa, Homo sapiens; identical to SEQ ID NO: 47645
  Payload ID: 9638
  Gene Symbol: LYRM1
  Gene Name: LYR motif containing 1
  Uniprot ID: O43325
  ENSP ID: ENSP00000454551

SEQ ID NO: 47650 - protein, 33 aa, Homo sapiens; identical to SEQ ID NO: 47647
  Payload ID: 9638
  Gene Symbol: LYRM1
  Gene Name: LYR motif containing 1
  ENSP ID: ENSP00000454759

SEQ ID NO: 47651 - protein, 122 aa, Homo sapiens; identical to SEQ ID NO: 47645
  Payload ID: 9638
  Gene Symbol: LYRM1
  Gene Name: LYR motif containing 1
  Uniprot ID: O43325
  ENSP ID: ENSP00000454826

SEQ ID NO: 47652 - protein, 107 aa, Homo sapiens
  Payload ID: 9638
  Gene Symbol: LYRM1
  Gene Name: LYR motif containing 1
  ENSP ID: ENSP00000454890
MTTATRQEVLGLYRSIFRLARKWQATSGQMEDTIKEKQYILNEARTLFRKNKNLTDTDLIKQCIDECTARIEIGLHYKIPYPRPVSVTPVNKCWVLTLINLVISKNV

SEQ ID NO: 47653 - protein, 122 aa, Homo sapiens; identical to SEQ ID NO: 47645
  Payload ID: 9638
  Gene Symbol: LYRM1
  Gene Name: LYR motif containing 1
  Uniprot ID: O43325
  ENSP ID: ENSP00000457333

SEQ ID NO: 47654 - protein, 107 aa, Homo sapiens; identical to SEQ ID NO: 47652
  Payload ID: 9638
  Gene Symbol: LYRM1
  Gene Name: LYR motif containing 1
  ENSP ID: ENSP00000457743

SEQ ID NO: 47655 - protein, 77 aa, Homo sapiens
  Payload ID: 9639
  Gene Symbol: LYRM2
  Gene Name: LYR motif containing 2
  ENSP ID: ENSP00000427859
MAASRLPPATLTLKQFVRRQQVLLLYRRILQTIRQVPNDSDRKYLKDWAREEFRRNKSATEEVRTKSWLRPRLKRKT

SEQ ID NO: 47656 - protein, 72 aa, Homo sapiens
  Payload ID: 9639
  Gene Symbol: LYRM2
  Gene Name: LYR motif containing 2
  ENSP ID: ENSP00000428207
MAASRLPPATLTLKQFVRRQQVLLLYRRILQTIRQVPNDSDRKYLKDWAREEFRRNKSATEEVRTKSWIQSG

SEQ ID NO: 47657 - protein, 88 aa, Homo sapiens
  Payload ID: 9639
  Gene Symbol: LYRM2
  Gene Name: LYR motif containing 2
  Uniprot ID: Q9NU23
  ENSP ID: ENSP00000430025
MAASRLPPATLTLKQFVRRQQVLLLYRRILQTIRQVPNDSDRKYLKDWAREEFRRNKSATEEDTIRMMITQGNMQLKELEKTLALAKS

SEQ ID NO: 47658 - protein, 98 aa, Homo sapiens
  Payload ID: 9639
  Gene Symbol: LYRM2
  Gene Name: LYR motif containing 2
  ENSP ID: ENSP00000430316
MAASRLPPATLTLKQFVRRQQVLLLYRRILQTIRQVPNDSDRKYLKDWAREEFRRNKSATEEASPTTEAQDLKEANGIVTTTGVRSICVREFSLDLGL

SEQ ID NO: 47659 - protein, 98 aa, Homo sapiens; identical to SEQ ID NO: 47658
  Payload ID: 9639
  Gene Symbol: LYRM2
  Gene Name: LYR motif containing 2
  ENSP ID: ENSP00000486073

SEQ ID NO: 47660 - protein, 74 aa, Homo sapiens
  Payload ID: 9640
  Gene Symbol: LYRM4
  Gene Name: LYR motif containing 4
  ENSP ID: ENSP00000417885
  MOD_RES (1)..(1): Any amino acid
XTYAVRRIRDAFRENKNVKDPVEIQTLVNKAKRDLGVIRRQITESRSVTQAGVQWRDLSNLHLPGSNHSSASAS

SEQ ID NO: 47661 - protein, 40 aa, Homo sapiens
  Payload ID: 9640
  Gene Symbol: LYRM4
  Gene Name: LYR motif containing 4
  ENSP ID: ENSP00000418321
MAASSRAQVLSLYRAMLRESKRFSAYNYRSTLANCIQLTS

SEQ ID NO: 47662 - protein, 91 aa, Homo sapiens
  Payload ID: 9640
  Gene Symbol: LYRM4
  Gene Name: LYR motif containing 4
  Uniprot ID: Q9HD34
  ENSP ID: ENSP00000418787
MAASSRAQVLSLYRAMLRESKRFSAYNYRTYAVRRIRDAFRENKNVKDPVEIQTLVNKAKRDLGVIRRQVHIGQLYSTDKLIIENRDMPRT

SEQ ID NO: 47663 - protein, 70 aa, Homo sapiens
  Payload ID: 9640
  Gene Symbol: LYRM4
  Gene Name: LYR motif containing 4
  ENSP ID: ENSP00000419928
MAASSRAQVLSLYRAMLRESKRFSAYNYRTYAVRRIRDAFRENKNVKDPVEIQTLVNKAKRDLGVIRRQA

SEQ ID NO: 47664 - protein, 96 aa, Homo sapiens
  Payload ID: 9640
  Gene Symbol: LYRM4
  Gene Name: LYR motif containing 4
  ENSP ID: ENSP00000420026
MAASSRAQVLSLYRAMLRESKRFSAYNYRTYAVRRIRDAFRENKNVKDPVEIQTLVNKAKRDLGVIRRQVAEQGTAARRKSGNSSRSLGKPCTSWP

SEQ ID NO: 47665 - protein, 130 aa, Homo sapiens
  Payload ID: 9640
  Gene Symbol: LYRM4
  Gene Name: LYR motif containing 4
  ENSP ID: ENSP00000443900
MAASSRAQVLSLYRAMLRESKRFSAYNYRTYAVRRIRDAFRENKNVKDPVEIQTLVNKAKRDLGVIRRQMDSHSVAQAGVHWNDLSSLQPLPPWFKQFSCLSLPSSWDYRRTPPRLANFCILSRDVISLY

SEQ ID NO: 47666 - protein, 90 aa, Homo sapiens
  Payload ID: 9641
  Gene Symbol: LYRM5
  Gene Name: LYR motif containing 5
  Uniprot ID: Q6IPR1
  ENSP ID: ENSP00000370761
MKMANSLRGEVLKLYKNLLYLGRDYPKGADYFKKRLKNIFLKNKDVKNPEKIKELIAQGEFVMKELEALYFLRKYRAMKQRYYSDTNKTN

SEQ ID NO: 47667 - protein, 88 aa, Homo sapiens
  Payload ID: 9641
  Gene Symbol: LYRM5
  Gene Name: LYR motif containing 5
  ENSP ID: ENSP00000450443
MANSLRGEVLKLYKNLLYLGRDYPKGADYFKKRLKNIFLKNKDVKNPEKIKELIAQGEFVMKELEALYFLRKYRAMKQRYYSDTNKTN

SEQ ID NO: 47668 - protein, 88 aa, Homo sapiens; identical to SEQ ID NO: 47667
  Payload ID: 9641
  Gene Symbol: LYRM5
  Gene Name: LYR motif containing 5
  ENSP ID: ENSP00000450584

SEQ ID NO: 47669 - protein, 38 aa, Homo sapiens
  Payload ID: 9641
  Gene Symbol: LYRM5
  Gene Name: LYR motif containing 5
  ENSP ID: ENSP00000451008
MANSLRGEVLKLYKNKYIIFLFEAAVSWTRLSKRSRLF

SEQ ID NO: 47670 - protein, 88 aa, Homo sapiens; identical to SEQ ID NO: 47667
  Payload ID: 9641
  Gene Symbol: LYRM5
  Gene Name: LYR motif containing 5
  ENSP ID: ENSP00000451494

SEQ ID NO: 47671 - protein, 41 aa, Homo sapiens [sequence omitted]

SEQ ID NO: 47672 - protein, 37 aa, Homo sapiens
  Payload ID: 9641
  Gene Symbol: LYRM5
  Gene Name: LYR motif containing 5
  ENSP ID: ENSP00000451938
MANSLRGEVLKLYKNKKYNILGRVTMTNSSGKETKPL

SEQ ID NO: 47673 - protein, 34 aa, Homo sapiens
  Payload ID: 9641
  Gene Symbol: LYRM5
  Gene Name: LYR motif containing 5
  ENSP ID: ENSP00000452130
MANSLRGEVLKLYKNLLYLGRDYPKGADYFKKRL

SEQ ID NO: 47674 - protein, 88 aa, Homo sapiens; identical to SEQ ID NO: 47667
  Payload ID: 9641
  Gene Symbol: LYRM5
  Gene Name: LYR motif containing 5
  ENSP ID: ENSP00000452146

SEQ ID NO: 47675 - protein, 41 aa, Homo sapiens [sequence omitted]

SEQ ID NO: 47676 - protein, 104 aa, Homo sapiens
  Payload ID: 9642
  Gene Symbol: LYRM7
  Gene Name: LYR motif containing 7
  Uniprot ID: Q5U5X0
  ENSP ID: ENSP00000368688
MGRAVKVLQLFKTLHRTRQQVFKNDARALEAARIKINEEFKNNKSETSSKKIEELMKIGSDVELLLRTSVIQGIHTDHNTLKLVPRKDLLVENVPYCDAPTQKQ

SEQ ID NO: 47677 - protein, 53 aa, Homo sapiens
  Payload ID: 9642
  Gene Symbol: LYRM7
  Gene Name: LYR motif containing 7
  ENSP ID: ENSP00000423283
MGRAVKVLQLFKTLHRTRQQVFKNDARALEELVPRKDLLVENVPYCDAPTQKQ

SEQ ID NO: 47678 - protein, 63 aa, Homo sapiens
  Payload ID: 9642
  Gene Symbol: LYRM7
  Gene Name: LYR motif containing 7
  ENSP ID: ENSP00000423991
MGRAVKVLQLFKTLHRTRQQVFKNDARALEAARIKINEEFKNNKSETSSKKIEENWSLGKTFL

SEQ ID NO: 47679 - protein, 78 aa, Homo sapiens
  Payload ID: 9643
  Gene Symbol: LYRM9
  Gene Name: LYR motif containing 9
  Uniprot ID: A8MSI8
  ENSP ID: ENSP00000368396
MAPLPGAELVRRPLQLYRYLLRCCQQLPTKGIQQHYKHAVRQSFRVHSDEDNPERIQQIIKRAIEDADWIMNKYKKQN

SEQ ID NO: 47680 - protein, 78 aa, Homo sapiens; identical to SEQ ID NO: 47679
  Payload ID: 9643
  Gene Symbol: LYRM9
  Gene Name: LYR motif containing 9
  Uniprot ID: A8MSI8
  ENSP ID: ENSP00000368397

SEQ ID NO: 47681 - protein, 86 aa, Homo sapiens
  Payload ID: 9643
  Gene Symbol: LYRM9
  Gene Name: LYR motif containing 9
  ENSP ID: ENSP00000421807
MAPLPGAELVRRPLQLYRYLLRCCQQLPTKGIQQHYKHAVRQSFRVHSDEDNPERIQQIIKRAIEDADWIMNKVGAWPLGSACELG

SEQ ID NO: 47682 - protein, 92 aa, Homo sapiens
  Payload ID: 9643
  Gene Symbol: LYRM9
  Gene Name: LYR motif containing 9
  ENSP ID: ENSP00000426554
MAPLPGAELVRRPLQLYRYLLRCCQQLPTKGIQQHYKHAVRQSFRVHSDEDNPERIQQIIKRAIEDADWIMNKLRMVPVEEATSQLLPSSRS

SEQ ID NO: 47683 - protein, 27 aa, Homo sapiens
  Payload ID: 9643
  Gene Symbol: LYRM9
  Gene Name: LYR motif containing 9
  ENSP ID: ENSP00000463472
MAPLPGAELVRRPLQLYRYLLRCCQQL

SEQ ID NO: 47684 - protein, 86 aa, Homo sapiens; identical to SEQ ID NO: 47681
  Payload ID: 9643
  Gene Symbol: LYRM9
  Gene Name: LYR motif containing 9
  ENSP ID: ENSP00000464378

SEQ ID NO: 47685 - protein, 852 aa, Homo sapiens
  Payload ID: 9644
  Gene Symbol: KDM1A
  Gene Name: lysine (K)-specific demethylase 1A
  Uniprot ID: O60341
  ENSP ID: ENSP00000349049
MLSGKKAAAAAAAAAAAATGTEAGPGTAGGSENGSEVAAQPAGLSGPAEVGPGAVGERTPRKKEPPRASPPGGLAEPPGSAGPQAGPTVVPGSATPMETGIAETPEGRRTSRRKRAKVEYREMDESLANLSEDEYYSEEERNAKAEKEKKLPPPPPQAPPEEENESEPEEPSGVEGAAFQSRLPHDRMTSQEAACFPDIISGPQQTQKVFLFIRNRTLQLWLDNPKIQLTFEATLQQLEAPYNSDTVLVHRVHSYLERHGLINFGIYKRIKPLPTKKTGKVIIIGSGVSGLAAARQLQSFGMDVTLLEARDRVGGRVATFRKGNYVADLGAMVVTGLGGNPMAVVSKQVNMELAKIKQKCPLYEANGQAVPKEKDEMVEQEFNRLLEATSYLSHQLDFNVLNNKPVSLGQALEVVIQLQEKHVKDEQIEHWKKIVKTQEELKELLNKMVNLKEKIKELHQQYKEASEVKPPRDITAEFLVKSKHRDLTALCKEYDELAETQGKLEEKLQELEANPPSDVYLSSRDRQILDWHFANLEFANATPLSTLSLKHWDQDDDFEFTGSHLTVRNGYSCVPVALAEGLDIKLNTAVRQVRYTASGCEVIAVNTRSTSQTFIYKCDAVLCTLPLGVLKQQPPAVQFVPPLPEWKTSAVQRMGFGNLNKVVLCFDRVFWDPSVNLFGHVGSTTASRGELFLFWNLYKAPILLALVAGEAAGIMENISDDVIVGRCLAILKGIFGSSAVPQPKETVVSRWRADPWARGSYSYVAAGSSGNDYDLMAQPITPGPSIPGAPQPIPRLFFAGEHTIRNYPATVHGALLSGLREAGRIADQFLGAMYTLPRQATPGVPAQQSPSM

SEQ ID NO: 47686 - protein, 876 aa, Homo sapiens
  Payload ID: 9644
  Gene Symbol: KDM1A
  Gene Name: lysine (K)-specific demethylase 1A
  Uniprot ID: O60341
  ENSP ID: ENSP00000383042
MLSGKKAAAAAAAAAAAATGTEAGPGTAGGSENGSEVAAQPAGLSGPAEVGPGAVGERTPRKKEPPRASPPGGLAEPPGSAGPQAGPTVVPGSATPMETGIAETPEGRRTSRRKRAKVEYREMDESLANLSEDEYYSEEERNAKAEKEKKLPPPPPQAPPEEENESEPEEPSGQAGGLQDDSSGGYGDGQASGVEGAAFQSRLPHDRMTSQEAACFPDIISGPQQTQKVFLFIRNRTLQLWLDNPKIQLTFEATLQQLEAPYNSDTVLVHRVHSYLERHGLINFGIYKRIKPLPTKKTGKVIIIGSGVSGLAAARQLQSFGMDVTLLEARDRVGGRVATFRKGNYVADLGAMVVTGLGGNPMAVVSKQVNMELAKIKQKCPLYEANGQADTVKVPKEKDEMVEQEFNRLLEATSYLSHQLDFNVLNNKPVSLGQALEVVIQLQEKHVKDEQIEHWKKIVKTQEELKELLNKMVNLKEKIKELHQQYKEASEVKPPRDITAEFLVKSKHRDLTALCKEYDELAETQGKLEEKLQELEANPPSDVYLSSRDRQILDWHFANLEFANATPLSTLSLKHWDQDDDFEFTGSHLTVRNGYSCVPVALAEGLDIKLNTAVRQVRYTASGCEVIAVNTRSTSQTFIYKCDAVLCTLPLGVLKQQPPAVQFVPPLPEWKTSAVQRMGFGNLNKVVLCFDRVFWDPSVNLFGHVGSTTASRGELFLFWNLYKAPILLALVAGEAAGIMENISDDVIVGRCLAILKGIFGSSAVPQPKETVVSRWRADPWARGSYSYVAAGSSGNDYDLMAQPITPGPSIPGAPQPIPRLFFAGEHTIRNYPATVHGALLSGLREAGRIADQFLGAMYTLPRQATPGVPAQQSPSM

SEQ ID NO: 47687 - protein, 301 aa, Homo sapiens
  Payload ID: 9644
  Gene Symbol: KDM1A
  Gene Name: lysine (K)-specific demethylase 1A
  ENSP ID: ENSP00000473294
DFEFTGSHLTVRNGYSCVPVALAEGLDIKLNTAVRQVRYTASVFSHPTSAGCEVIAVNTRSTSQTFIYKCDAVLCTLPLGVLKQQPPAVQFVPPLPEWKTSAVQRMGFGNLNKVVLCFDRVFWDPSVNLFGHVGSTTASRGELFLFWNLYKAPILLALVAGEAAGIMENISDDVIVGRCLAILKGIFGSSAVPQPKETVVSRWRADPWARGSYSYVAAGSSGNDYDLMAQPITPGPSIPGAPQPIPRLFFAGEHTIRNYPATVHGALLSGLREAGRIADQFLGAMYTLPRQATPGVPAQQS

SEQ ID NO: 47688 - protein, 189 aa, Homo sapiens
  Payload ID: 9644
  Gene Symbol: KDM1A
  Gene Name: lysine (K)-specific demethylase 1A
  ENSP ID: ENSP00000473297
EYDELAETQGKLEEKLQELEANPPSPLFFCSDVYLSSRDRQILDWHFANLEFANATPLSTLSLKHWDQDDDFEFTGSHLTVRNGYSCVPVALAEGLDIKLNTAVRQVRYTASGCEVIAVNTRSTSQTFIYKCDAVLCTLPLGVLKQQPPAVQFVPPLPEWKTSAVQRMGFGNLNKVVLCFDRVFWDPSV

SEQ ID NO: 47689 - protein, 590 aa, Homo sapiens
  Payload ID: 9645
  Gene Symbol: KDM1B
  Gene Name: lysine (K)-specific demethylase 1B
  Uniprot ID: Q8NB78
  ENSP ID: ENSP00000297792
MATPRGRTKKKASFDHSPDSLPLRSSGRQAKKKATETTDEDEDGGSEKKYRKCEKAGCTATCPVCFASASERCAKNGYTSRWYHLSCGEHFCNECFDHYYRSHKDGYDKYTTWKKIWTSNGKTEPSPKAFMADQQLPYWVQCTKPECRKWRQLTKEIQLTPQIAKTYRCGMKPNTAIKPETSDHCSLPEDLEALTPQKCIPHIIVRGLVRIRCVQEVERILYFMTRKGLINTGVLSVGADQYLLPKDYHNKSVIIIGAGPAGLAAARQLHNFGIKVTVLEAKDRIGGRVWDDKSFKGVTVGRGAQIVNGCINNPVALMCEQVSARSWDHNEFFAQFAGDHTLLTPGYSVIIEKLAEGLDIQLKSPVQCIDYSGDEVQVTTTDGTGYSAQKVLVTVPLALLQKGAIQFNPPLSEKKMKAINSLGAGIIEKIALQFPYRFWDSKVQGADFFGHVPPSASKRGLFAVFYDMDPQKKHSVLMSVIAGEAVASVRTLDDKQVLQQCMATLRELFKEQEVPDPTKYFVTRWSTDPWIQMAYSFVKTGGSGEAYDIIAEDIQGTVFFAGEATNRHFPQTVTGAYLSGVREASKIAAF

SEQ ID NO: 47690 - protein, 640 aa, Homo sapiens
  Payload ID: 9645
  Gene Symbol: KDM1B
  Gene Name: lysine (K)-specific demethylase 1B
  ENSP ID: ENSP00000405669
  MOD_RES (1)..(1): Any amino acid
XCSLPEDLRVLEVSNHWWYSMLILPPLLKDSVAAPLLSAYYPDCVGMSPSCTSTNRAAATGNASPGKLEHSKAALSVHVPGMNRYFQPFYQPNECGKALCVRPDVMELDELYEFPEYSRDPTMYLALRNLILALWYTNCKEALTPQKCIPHIIVRGLVRIRCVQEVERILYFMTRKGLINTGVLSVGADQYLLPKDYHNKSVIIIGAGPAGLAAARQLHNFGIKVTVLEAKDRIGGRVWDDKSFKGVTVGRGAQIVNGCINNPVALMCEQLGISMHKFGERCDLIQEGGRITDPTIDKRMDFHFNALLDVVSEWRKDKTQLQDVPLGEKIEEIYKAFIKESGIQFSELEGQVLQFHLSNLEYACGSNLHQVSARSWDHNEFFAQFAGDHTLLTPGYSVIIEKLAEGLDIQLKSPQVQCIDYSGDEVQVTTTDGTGYSAQKVLVTVPLALLQKGAIQFNPPLSEKKMKAINSLGAGIIEKIALQFPYRFWDSKVQGADFFGHVPPSASKRGLFAVFYDMDPQKKHSVLMSVIAGEAVASVRTLDDKQVLQQCMATLRELFKEQEVPDPTKYFVTRWSTDPWIQMAYSFVKTGGSGEAYDIIAEDIQGTVFFAGEATNRHFPQTVTGAYLSGVREASKIAAF

SEQ ID NO: 47691 - protein, 113 aa, Homo sapiens
  Payload ID: 9645
  Gene Symbol: KDM1B
  Gene Name: lysine (K)-specific demethylase 1B
  ENSP ID: ENSP00000442670
MSVIAGEAVASVRTLDDKQVLQQCMATLRELFKEQEVPDPTKYFVTRWSTDPWIQMAYSFVKTGGSGEAYDIIAEDIQGTVFFAGEATNRHFPQTVTGAYLSGVREASKIAAF

SEQ ID NO: 47692 - protein, 1145 aa, Homo sapiens
  Payload ID: 9646
  Gene Symbol: KDM2A
  Gene Name: lysine (K)-specific demethylase 2A
  ENSP ID: ENSP00000309302
MRRRYEDDGISDDEIEGKRTFDLEEKLHTNKYNANFVTFMEGKDFNVEYIQRGGLRDPLIFKNSDGLGIKMPDPDFTVNDVKMCVGSRRMVDVMDVNTQKGIEMTMAQWTRYYETPEEEREKLYNVISLEFSHTRLENMVQRPSTVDFIDWVDNMWPRHLKESQTESTNAILEMQYPKVQKYCLMSVRGCYTDFHVDFGGTSVWYHIHQGGKVFWLIPPTAHNLELYENWLLSGKQGDIFLGDRVSDCQRIELKQGYTFVIPSGWIHAVYTPTDTLVFGGNFLHSFNIPMQLKIYNIEDRTRVPNKFRYPFYYEMCWYVLERYVYCITNRSHLTKEFQKESLSMDLELNGLESGNGDEEAVDREPRRLSSRRSVLTSPVANGVNLDYDGLGKTCRSLPSLKKTLAGDSSSDCSRGSHNGQVWDPQCAPRKDRQVHLTHFELEGLRCLVDKLESLPLHKKCVPTGIEDEDALIADVKILLEELANSDPKLALTGVPIVQWPKRDKLKFPTRPKVRVPTIPITKPHTMKPAPRLTPVRPAAASPIVSGARRRRVRCRKCKACVQGECGVCHYCRDMKKFGGPGRMKQSCVLRQCLAPRLPHSVTCSLCGEVDQNEETQDFEKKLMECCICNEIVHPGCLQMDGEGLLNEELPNCWECPKCYQEDSSEKAQKRKMEESDEEAVQAKVLRPLRSCDEPLTPPPHSPTSMLQLIHDPVSPRGMVTRSSPGAGPSDHHSASRDERFKRRQLLRLQATERTMVREKENNPSGKKELSEVEKAKIRGSYLTVTLQRPTKELHGTSIVPKLQAITASSANLRHSPRVLVQHCPARTPQRGDEEGLGGEEEEEEEEEEEDDSAEEGGAARLNGRGSWAQDGDESWMQREVWMSVFRYLSRRELCECMRVCKTWYKWCCDKRLWTKIDLSRCKAIVPQALSGIIKRQPVSLDLSWTNISKKQLTWLVNRLPGLKDLLLAGCSWSAVSALSTSSCPLLRTLDLRWAVGIKDPQIRDLLTPPADKPGQDNRSKLRNMTDFRLAGLDITDATLRLIIRHMPLLSRLDLSHCSHLTDQSSNLLTAVGSSTRYSLTELNMAGCNKLTDQTLIYLRRIANVTLIDLRGCKQITRKACEHFISDLSINSLYCLSDEKLIQKIS

SEQ ID NO: 47693 - protein, 782 aa, Homo sapiens
  Payload ID: 9646
  Gene Symbol: KDM2A
  Gene Name: lysine (K)-specific demethylase 2A
  Uniprot ID: Q9Y2K7
  ENSP ID: ENSP00000381640
MEPEEERIRYSQRLRGTMRRRYEDDGISDDEIEGKRTFDLEEKLHTNKYNANFVTFMEGKDFNVEYIQRGGLRDPLIFKNSDGLGIKMPDPDFTVNDVKMCVGSRRMVDVMDVNTQKGIEMTMAQWTRYYETPEEEREKLYNVISLEFSHTRLENMVQRPSTVDFIDWVDNMWPRHLKESQTESTNAILEMQYPKVQKYCLMSVRGCYTDFHVDFGGTSVWYHIHQGGKVFWLIPPTAHNLELYENWLLSGKQGDIFLGDRVSDCQRIELKQGYTFVIPSGWIHAVYTPTDTLVFGGNFLHSFNIPMQLKIYNIEDRTRVPNKFRYPFYYEMCWYVLERYVYCITNRSHLTKEFQKESLSMDLELNGLESGNGDEEAVDREPRRLSSRRSVLTSPVANGVNLDYDGLGKTCRSLPSLKKTLAGDSSSDCSRGSHNGQVWDPQCAPRKDRQVHLTHFELEGLRCLVDKLESLPLHKKCVPTGIEDEDALIADVKILLEELANSDPKLALTGVPIVQWPKRDKLKFPTRPKVRVPTIPITKPHTMKPAPRLTPVRPAAASPIVSGARRRRVRCRKCKACVQGECGVCHYCRDMKKFGGPGRMKQSCVLRQCLAPRLPHSVTCSLCGEVDQNEETQDFEKKLMECCICNEIVHPGCLQMDGEGLLNEELPNCWECPKCYQEDSSEKAQKRKMEESDEEAVQAKVLRPLRSCDEPLTPPPHSPTSMLQLIHDPVSPRGMVTRSSPGAGPSDHHSASRDERFKRRQLLRLQATERTMVLRQETLDKN

SEQ ID NO: 47694 - protein, 1162 aa, Homo sapiens
  Payload ID: 9646
  Gene Symbol: KDM2A
  Gene Name: lysine (K)-specific demethylase 2A
  Uniprot ID: Q9Y2K7
  ENSP ID: ENSP00000432786
MEPEEERIRYSQRLRGTMRRRYEDDGISDDEIEGKRTFDLEEKLHTNKYNANFVTFMEGKDFNVEYIQRGGLRDPLIFKNSDGLGIKMPDPDFTVNDVKMCVGSRRMVDVMDVNTQKGIEMTMAQWTRYYETPEEEREKLYNVISLEFSHTRLENMVQRPSTVDFIDWVDNMWPRHLKESQTESTNAILEMQYPKVQKYCLMSVRGCYTDFHVDFGGTSVWYHIHQGGKVFWLIPPTAHNLELYENWLLSGKQGDIFLGDRVSDCQRIELKQGYTFVIPSGWIHAVYTPTDTLVFGGNFLHSFNIPMQLKIYNIEDRTRVPNKFRYPFYYEMCWYVLERYVYCITNRSHLTKEFQKESLSMDLELNGLESGNGDEEAVDREPRRLSSRRSVLTSPVANGVNLDYDGLGKTCRSLPSLKKTLAGDSSSDCSRGSHNGQVWDPQCAPRKDRQVHLTHFELEGLRCLVDKLESLPLHKKCVPTGIEDEDALIADVKILLEELANSDPKLALTGVPIVQWPKRDKLKFPTRPKVRVPTIPITKPHTMKPAPRLTPVRPAAASPIVSGARRRRVRCRKCKACVQGECGVCHYCRDMKKFGGPGRMKQSCVLRQCLAPRLPHSVTCSLCGEVDQNEETQDFEKKLMECCICNEIVHPGCLQMDGEGLLNEELPNCWECPKCYQEDSSEKAQKRKMEESDEEAVQAKVLRPLRSCDEPLTPPPHSPTSMLQLIHDPVSPRGMVTRSSPGAGPSDHHSASRDERFKRRQLLRLQATERTMVREKENNPSGKKELSEVEKAKIRGSYLTVTLQRPTKELHGTSIVPKLQAITASSANLRHSPRVLVQHCPARTPQRGDEEGLGGEEEEEEEEEEEDDSAEEGGAARLNGRGSWAQDGDESWMQREVWMSVFRYLSRRELCECMRVCKTWYKWCCDKRLWTKIDLSRCKAIVPQALSGIIKRQPVSLDLSWTNISKKQLTWLVNRLPGLKDLLLAGCSWSAVSALSTSSCPLLRTLDLRWAVGIKDPQIRDLLTPPADKPGQDNRSKLRNMTDFRLAGLDITDATLRLIIRHMPLLSRLDLSHCSHLTDQSSNLLTAVGSSTRYSLTELNMAGCNKLTDQTLIYLRRIANVTLIDLRGCKQITRKACEHFISDLSINSLYCLSDEKLIQKIS

SEQ ID NO: 47695 - protein, 723 aa, Homo sapiens
  Payload ID: 9646
  Gene Symbol: KDM2A
  Gene Name: lysine (K)-specific demethylase 2A
  Uniprot ID: Q9Y2K7
  ENSP ID: ENSP00000435776
MCSGRFQNIQVNPDFPRGRISNSFRRTSSTENKTKTLGKLHQEPRQLQSDGKRKILLEELANSDPKLALTGVPIVQWPKRDKLKFPTRPKVRVPTIPITKPHTMKPAPRLTPVRPAAASPIVSGARRRRVRCRKCKACVQGECGVCHYCRDMKKFGGPGRMKQSCVLRQCLAPRLPHSVTCSLCGEVDQNEETQDFEKKLMECCICNEIVHPGCLQMDGEGLLNEELPNCWECPKCYQEDSSEKAQKRKMEESDEEAVQAKVLRPLRSCDEPLTPPPHSPTSMLQLIHDPVSPRGMVTRSSPGAGPSDHHSASRDERFKRRQLLRLQATERTMVREKENNPSGKKELSEVEKAKIRGSYLTVTLQRPTKELHGTSIVPKLQAITASSANLRHSPRVLVQHCPARTPQRGDEEGLGGEEEEEEEEEEEDDSAEEGGAARLNGRGSWAQDGDESWMQREVWMSVFRYLSRRELCECMRVCKTWYKWCCDKRLWTKIDLSRCKAIVPQALSGIIKRQPVSLDLSWTNISKKQLTWLVNRLPGLKDLLLAGCSWSAVSALSTSSCPLLRTLDLRWAVGIKDPQIRDLLTPPADKPGQDNRSKLRNMTDFRLAGLDITDATLRLIIRHMPLLSRLDLSHCSHLTDQSSNLLTAVGSSTRYSLTELNMAGCNKLTDQTLIYLRRIANVTLIDLRGCKQITRKACEHFISDLSINSLYCLSDEKLIQKIS

SEQ ID NO: 47696 - protein, 1265 aa, Homo sapiens
  Payload ID: 9647
  Gene Symbol: KDM2B
  Gene Name: lysine (K)-specific demethylase 2B
  Uniprot ID: Q8NHM5
  ENSP ID: ENSP00000366269
MEAEKDSGRRLRPIDRQRYDENEDLSDVEEIVSVRGFSLEEKLRSQLYQGDFVHAMEGKDFNYEYVQREALRVPLIFREKDGLGIKMPDPDFTVRDVKLLVGSRRLVDVMDVNTQKGTEMSMSQFVRYYETPEAQRDKLYNVISLEFSHTKLEHLVKRPTVVDLVDWVDNMWPQHLKEKQTEATNAIAEMKYPKVKKYCLMSVKGCFTDFHIDFGGTSVWYHVFRGGKIFWLIPPTLHNLALYEEWVLSGKQSDIFLGDRVERCQRIELKQGYTFFIPSGWIHAVYTPVDSLVFGGNILHSFNVPMQLRIYEIEDRTRVQPKFRYPFYYEMCWYVLERYVYCVTQRSHLTQEYQRESMLIDAPRKPSIDGFSSDSWLEMEEEACDQQPQEEEEKDEEGEGRDRAPKPPTDGSTSPTSTPSEDQEALGKKPKAPALRFLKRTLSNESEESVKSTTLAVDYPKTPTGSPATEVSAKWTHLTEFELKGLKALVEKLESLPENKKCVPEGIEDPQALLEGVKNVLKEHADDDPSLAITGVPVVTWPKKTPKNRAVGRPKGKLGPASAVKLAANRTTAGARRRRTRCRKCEACLRTECGECHFCKDMKKFGGPGRMKQSCIMRQCIAPVLPHTAVCLVCGEAGKEDTVEEEEGKFNLMLMECSICNEIIHPGCLKIKESEGVVNDELPNCWECPKCNHAGKTGKQKRGPGFKYASNLPGSLLKEQKMNRDNKEGQEPAKRRSECEEAPRRRSDEHSKKVPPDGLLRRKSDDVHLRKKRKYEKPQELSGRKRLKPGKEDKLFRKKRRSWKNAEDRMALANKPLRRFKQEPEDELPEAPPKTRESDHSRSSSPTAGPSTEGAEGPEEKKKVKMRRKRRLPNKELSRELSKELNHEIQRTENSLANENQQPIKSEPESEGEEPKRPPGICERPHRFSKGLNGTPRELRHQLGPSLRSPPRVISRPPPSVSPPKCIQMERHVIRPPPISPPPDSLPLDDGAAHVMHREVWMAVFSYLSHQDLCVCMRVCRTWNRWCCDKRLWTRIDLNHCKSITPLMLSGIIRRQPVSLDLSWTNISKKQLSWLINRLPGLRDLVLSGCSWIAVSALCSSSCPLLRTLDVQWVEGLKDAQMRDLLSPPTDNRPGQMDNRSKLRNIVELRLAGLDITDASLRLIIRHMPLLSKLHLSYCNHVTDQSINLLTAVGTTTRDSLTEINLSDCNKVTDQCLSFFKRCGNICHIDLRYCKQVTKEGCEQFIAEMSSFQGRSCSTTRLGDE

SEQ ID NO: 47697 - protein, 1336 aa, Homo sapiens
  Payload ID: 9647
  Gene Symbol: KDM2B
  Gene Name: lysine (K)-specific demethylase 2B
  Uniprot ID: Q8NHM5
  ENSP ID: ENSP00000366271
MAGPQMGGSAEDHPPRKRHAAEKQKKKTVIYTKCFEFESATQRPIDRQRYDENEDLSDVEEIVSVRGFSLEEKLRSQLYQGDFVHAMEGKDFNYEYVQREALRVPLIFREKDGLGIKMPDPDFTVRDVKLLVGSRRLVDVMDVNTQKGTEMSMSQFVRYYETPEAQRDKLYNVISLEFSHTKLEHLVKRPTVVDLVDWVDNMWPQHLKEKQTEATNAIAEMKYPKVKKYCLMSVKGCFTDFHIDFGGTSVWYHVFRGGKIFWLIPPTLHNLALYEEWVLSGKQSDIFLGDRVERCQRIELKQGYTFFIPSGWIHAVYTPVDSLVFGGNILHSFNVPMQLRIYEIEDRTRVQPKFRYPFYYEMCWYVLERYVYCVTQRSHLTQEYQRESMLIDAPRKPSIDGFSSDSWLEMEEEACDQQPQEEEEKDEEGEGRDRAPKPPTDGSTSPTSTPSEDQEALGKKPKAPALRFLKRTLSNESEESVKSTTLAVDYPKTPTGSPATEVSAKWTHLTEFELKGLKALVEKLESLPENKKCVPEGIEDPQALLEGVKNVLKEHADDDPSLAITGVPVVTWPKKTPKNRAVGRPKGKLGPASAVKLAANRTTAGARRRRTRCRKCEACLRTECGECHFCKDMKKFGGPGRMKQSCIMRQCIAPVLPHTAVCLVCGEAGKEDTVEEEEGKFNLMLMECSICNEIIHPGCLKIKESEGVVNDELPNCWECPKCNHAGKTGKQKRGPGFKYASNLPGSLLKEQKMNRDNKEGQEPAKRRSECEEAPRRRSDEHSKKVPPDGLLRRKSDDVHLRKKRKYEKPQELSGRKRASSLQTSPGSSSHLSPRPPLGSSLSPWWRSSLTYFQQQLKPGKEDKLFRKKRRSWKNAEDRMALANKPLRRFKQEPEDELPEAPPKTRESDHSRSSSPTAGPSTEGAEGPEEKKKVKMRRKRRLPNKELSRELSKELNHEIQRTENSLANENQQPIKSEPESEGEEPKRPPGICERPHRFSKGLNGTPRELRHQLGPSLRSPPRVISRPPPSVSPPKCIQMERHVIRPPPISPPPDSLPLDDGAAHVMHREVWMAVFSYLSHQDLCVCMRVCRTWNRWCCDKRLWTRIDLNHCKSITPLMLSGIIRRQPVSLDLSWTNISKKQLSWLINRLPGLRDLVLSGCSWIAVSALCSSSCPLLRTLDVQWVEGLKDAQMRDLLSPPTDNRPGQMDNRSKLRNIVELRLAGLDITDASLRLIIRHMPLLSKLHLSYCNHVTDQSINLLTAVGTTTRDSLTEINLSDCNKVTDQCLSFFKRCGNICHIDLRYCKQVTKEGCEQFIAEMSVSVQFGQVEEKLLQKLS

SEQ ID NO: 47698 - protein, 510 aa, Homo sapiens
  Payload ID: 9647
  Gene Symbol: KDM2B
  Gene Name: lysine (K)-specific demethylase 2B
  ENSP ID: ENSP00000398279
MRQLLRPIDRQRYDENEDLSDVEEIVSVRGFSLEEKLRSQLYQGDFVHAMEGKDFNYEYVQREALRVPLIFREKDGLGIKMPDPDFTVRDVKLLVGSRRLVDVMDVNTQKGTEMSMSQFVRYYETPEAQRDKLYNVISLEFSHTKLEHLVKRPTVVDLVDWVDNMWPQHLKEKQTEATNAIAEMKYPKVKKYCLMSVKGCFTDFHIDFGGTSVWYHVFRGGKIFWLIPPTLHNLALYEEWVLSGKQSDIFLGDRVERCQRIELKQGYTFFIPSGWIHAVYTPVDSLVFGGNILHSFNVPMQLRIYEIEDRTRVQPKFRYPFYYEMCWYVLERYVYCVTQRSHLTQEYQRESMLIDAPRKPSIDGFSSDSWLEMEEEACDQQPQEEEEKDEEGEGRDRAPKPPTDGSTSPTSTPSEDQEALGKKPKAPALRFLKRTLSNESEESVKSTTLAVDYPKTPTGSPATEVSAKWTHLTEFELKGLKALVEKLESLPENKKCVPEGIEDPQALLEG

SEQ ID NO: 47699 - protein, 154 aa, Homo sapiens
  Payload ID: 9647
  Gene Symbol: KDM2B
  Gene Name: lysine (K)-specific demethylase 2B
  ENSP ID: ENSP00000437497
MSVKGCFTDFHIDFGGTSVWYHVFRGGKIFWLIPPTLHNLALYEEWVLSGKQSDIFLGDRVERCQRIELKQGYTFFIPSGWIHAVYTPVDSLVFGGNILHSFNVPMQLRIYEIEDRTRVQPKFRYPFYYEMCWYVLERYVYCVTQRSHLTQEYQ

SEQ ID NO: 47700 - protein, 704 aa, Homo sapiens
  Payload ID: 9647
  Gene Symbol: KDM2B
  Gene Name: lysine (K)-specific demethylase 2B
  ENSP ID: ENSP00000437821
MKKFGGPGRMKQSCIMRQCIAPVLPHTAVCLVCGEAGKEDTVEEEEGKFNLMLMECSICNEIIHPGCLKIKESEGVVNDELPNCWECPKCNHAGKTGKQKRGPGFKYASNLPGSLLKEQKMNRDNKEGQEPAKRRSECEEAPRRRSDEHSKKVPPDGLLRRKSDDVHLRKKRKYEKPQELSGRKRASSLQTSPGSSSHLSPRPPLGSSLSPWWRSSLTYFQQQLKPGKEDKLFRKKRRSWKNAEDRMALANKPLRRFKQEPEDELPEAPPKTRESDHSRSSSPTAGPSTEGAEGPEEKKKVKMRRKRRLPNKELSRELSKELNHEIQRTENSLANENQQPIKSEPESEGEEPKRPPGICERPHRFSKGLNGTPRELRHQLGPSLRSPPRVISRPPPSVSPPKCIQMERHVIRPPPISPPPDSLPLDDGAAHVMHREVWMAVFSYLSHQDLCVCMRVCRTWNRWCCDKRLWTRIDLNHCKSITPLMLSGIIRRQPVSLDLSWTNISKKQLSWLINRLPGLRDLVLSGCSWIAVSALCSSSCPLLRTLDVQWVEGLKDAQMRDLLSPPTDNRPGQMDNRSKLRNIVELRLAGLDITDASLRLIIRHMPLLSKLHLSYCNHVTDQSINLLTAVGTTTRDSLTEINLSDCNKVTDQCLSFFKRCGNICHIDLRYCKQVTKEGCEQFIAEMSVSVQFGQVEEKLLQKLS

SEQ ID NO: 47701 - protein, 104 aa, Homo sapiens
  Payload ID: 9647
  Gene Symbol: KDM2B
  Gene Name: lysine (K)-specific demethylase 2B
  ENSP ID: ENSP00000438138
MAGPQMGGSAEDHPPRKRHAAEKQKKKTVIYTKCFEFESATQRPIDRQRYDENEDLSDVEEIVSVRGFSLEEKLRSQLYQGDFVHAMEGKGCLTLISQSETSNS

SEQ ID NO: 47702 - protein, 180 aa, Homo sapiens
  Payload ID: 9647
  Gene Symbol: KDM2B
  Gene Name: lysine (K)-specific demethylase 2B
  ENSP ID: ENSP00000440373
MPDPDFTVRDVKLLVGSRRLVDVMDVNTQKGTEMSMSQFVRYYETPEAQRDKLYNVISLEFSHTKLEHLVKRPTVVDLVDWVDNMWPQHLKEKQTEATNAIAEMKYPKVKKYCLMSVKGCFTDFHIDFGGTSVWYHVFRGGKIFWLIPPTLHNLALYEEWVLSGKQSDIFLGDRVERCQR

SEQ ID NO: 47703 - protein, 123 aa, Homo sapiens
  Payload ID: 9647
  Gene Symbol: KDM2B
  Gene Name: lysine (K)-specific demethylase 2B
  ENSP ID: ENSP00000440942
MSVKGCFTDFHIDFGGTSVWYHVFRGGKIFWLIPPTLHNLALYEEWVLSGKQSDIFLGDRVERCQRIELKQGYTFFIPSGWIHAVYTPVDSLVFGGNILHSFNVPMQLRIYEIEDRTREKNKL

SEQ ID NO: 47704 - protein, 97 aa, Homo sapiens
  Payload ID: 9647
  Gene Symbol: KDM2B
  Gene Name: lysine (K)-specific demethylase 2B
  ENSP ID: ENSP00000442293
MSVKGCFTDFHIDFGGTSVWYHVFRGGKIFWLIPPTLHNLALYEEWVLSGKQSDIFLGDRVERCQRIELKQGYTFFIPSGWIHAVYTPVDSLVFGGN

SEQ ID NO: 47705 - protein, 41 aa, Homo sapiens
  Payload ID: 9647
  Gene Symbol: KDM2B
  Gene Name: lysine (K)-specific demethylase 2B
  ENSP ID: ENSP00000443052
MWLKPFEGEGWKATTCLCSPNSVTPSTMRCAGMSWRDTCTV

SEQ ID NO: 47706 - protein, 125 aa, Homo sapiens
  Payload ID: 9647
  Gene Symbol: KDM2B
  Gene Name: lysine (K)-specific demethylase 2B
  ENSP ID: ENSP00000444846
MLPGLSRGHRRRGWIHAVYTPVDSLVFGGNILHSFNVPMQLRIYEIEDRTRVQPKFRYPFYYEMCWYVLERYVYCVTQRSHLTQEYQRESMLIDAPRKPSIDGFSSDSWLEMEEEACDQQPQEEE

SEQ ID NO: 47707 - protein, 171 aa, Homo sapiens
  Payload ID: 9647
  Gene Symbol: KDM2B
  Gene Name: lysine (K)-specific demethylase 2B
  ENSP ID: ENSP00000445102
MSVKGCFTDFHIDFGGTSVWYHVFRGGKIFWLIPPTLHNLALYEEWVLSGKQSDIFLGDRVERCQRIELKQGYTFFIPSGWIHAVYTPVDSLVFGGNILHSFNVPMQLRIYEIEDRTRVQPKFRYPFYYEMCWYVLERYVYCVTQRSHLTQEYQRESMLIDAPRKPSIDGF

SEQ ID NO: 47708 - protein, 706 aa, Homo sapiens [sequence omitted]

SEQ ID NO: 47709 - protein, 507 aa, Homo sapiens
  Payload ID: 9647
  Gene Symbol: KDM2B
  Gene Name: lysine (K)-specific demethylase 2B
  ENSP ID: ENSP00000474307
MAGPQMGGSAEDHPPRKRHAAEKQKKKTVIYTKCFEFESATQRPIDRQRYDENEDLSDVEEIVSVRGFSLEEKLRSQLYQGDFVHAMEGKDFNYEYVQREALRVPLIFREKDGLGIKMPDPDFTVRDVKLLVGSRRLVDVMDVNTQKGTEMSMSQFVRYYETPEAQRDKLYNVISLEFSHTKLEHLVKRPTVVDLVDWVDNMWPQHLKEKQTEATNAIAEMKYPKVKKYCLMSVKGCFTDFHIDFGGTSVWYHVFRGGKVQPKFRYPFYYEMCWYVLERYVYCVTQRSHLTQEYQRESMLIDAPRKPSIDGFSSDSWLEMEEEACDQQPQEEEEKDEEGEGRDRAPKPPTDGSTSPTSTPSEDQEALGKKPKAPALRFLKRTLSNESEESVKSTTLAVDYPKTPTGSPATEVSAKWTHLTEFELKGLKALVEKLESLPENKKCVPEGIEDPQALLEGVKNVLKEHADDDPSLAITGVPVVTWPKKTPKVRRSLPAAGGRFPPPSHLL

SEQ ID NO: 47710 - protein, 559 aa, Homo sapiens
  Payload ID: 9647
  Gene Symbol: KDM2B
  Gene Name: lysine (K)-specific demethylase 2B
  Uniprot ID: Q8NHM5
  ENSP ID: ENSP00000480847
MPDPDFTVRDVKLLVGSRRLVDVMDVNTQKGTEMSMSQFVRYYETPEAQRDKLYNVISLEFSHTKLEHLVKRPTVVDLVDWVDNMWPQHLKEKQTEATNAIAEMKYPKVKKYCLMSVKGCFTDFHIDFGGTSVWYHVFRGGKIFWLIPPTLHNLALYEEWVLSGKQSDIFLGDRVERCQRIELKQGYTFFIPSGWIHAVYTPVDSLVFGGNILHSFNVPMQLRIYEIEDRTRVQPKFRYPFYYEMCWYVLERYVYCVTQRSHLTQEYQRESMLIDAPRKPSIDGFSSDSWLEMEEEACDQQPQEEEEKDEEGEGRDRAPKPPTDGSTSPTSTPSEDQEALGKKPKAPALRFLKRTLSNESEESVKSTTLAVDYPKTPTGSPATEVSAKWTHLTEFELKGLKALVEKLESLPENKKCVPEGIEDPQALLEGVKNVLKEHADDDPSLAITGVPVVTWPKKTPKNRAVGRPKGKLGPASAVKLAANRTTAGARRRRTRCRKCEACLRTECGECHFCKDMKKFGGPGRMKQSCIMRQCIATAIRSLISACPSSNAVETSVILT

SEQ ID NO: 47711 - protein, 1321 aa, Homo sapiens
  Payload ID: 9648
  Gene Symbol: KDM3A
  Gene Name: lysine (K)-specific demethylase 3A
  Uniprot ID: Q9Y4C1
  ENSP ID: ENSP00000323659
MVLTLGESWPVLVGRRFLSLSAADGSDGSHDSWDVERVAEWPWLSGTIRAVSHTDVTKKDLKVCVEFDGESWRKRRWIEVYSLLRRAFLVEHNLVLAERKSPEISERIVQWPAITYKPLLDKAGLGSITSVRFLGDQQRVFLSKDLLKPIQDVNSLRLSLTDNQIVSKEFQALIVKHLDESHLLKGDKNLVGSEVKIYSLDPSTQWFSATVINGNPASKTLQVNCEEIPALKIVDPSLIHVEVVHDNLVTCGNSARIGAVKRKSSENNGTLVSKQAKSCSEASPSMCPVQSVPTTVFKEILLGCTAATPPSKDPRQQSTPQAANSPPNLGAKIPQGCHKQSLPEEISSCLNTKSEALRTKPDVCKAGLLSKSSQIGTGDLKILTEPKGSCTQPKTNTDQENRLESVPQALTGLPKECLPTKASSKAELEIANPPELQKHLEHAPSPSDVSNAPEVKAGVNSDSPNNCSGKKVEPSALACRSQNLKESSVKVDNESCCSRSNNKIQNAPSRKSVLTDPAKLKKLQQSGEAFVQDDSCVNIVAQLPKCRECRLDSLRKDKEQQKDSPVFCRFFHFRRLQFNKHGVLRVEGFLTPNKYDNEAIGLWLPLTKNVVGIDLDTAKYILANIGDHFCQMVISEKEAMSTIEPHRQVAWKRAVKGVREMCDVCDTTIFNLHWVCPRCGFGVCVDCYRMKRKNCQQGAAYKTFSWLKCVKSQIHEPENLMPTQIIPGKALYDVGDIVHSVRAKWGIKANCPCSNRQFKLFSKPASKEDLKQTSLAGEKPTLGAVLQQNPSVLEPAAVGGEAASKPAGSMKPACPASTSPLNWLADLTSGNVNKENKEKQPTMPILKNEIKCLPPLPPLSKSSTVLHTFNSTILTPVSNNNSGFLRNLLNSSTGKTENGLKNTPKILDDIFASLVQNKTTSDLSKRPQGLTIKPSILGFDTPHYWLCDNRLLCLQDPNNKSNWNVFRECWKQGQPVMVSGVHHKLNSELWKPESFRKEFGEQEVDLVNCRTNEIITGATVGDFWDGFEDVPNRLKNEKEPMVLKLKDWPPGEDFRDMMPSRFDDLMANIPLPEYTRRDGKLNLASRLPNYFVRPDLGPKMYNAYGLITPEDRKYGTTNLHLDVSDAANVMVYVGIPKGQCEQEEEVLKTIQDGDSDELTIKRFIEGKEKPGALWHIYAAKDTEKIREFLKKVSEEQGQENPADHDPIHDQSWYLDRSLRKRLHQEYGVQGWAIVQFLGDVVFIPAGAPHQVHNLYSCIKVAEDFVSPEHVKHCFWLTQEFRYLSQTHTNHEDKLQVKNVIYHAVKDAVAMLKASESSFGKP

SEQ ID NO: 47712 - protein, 1321 aa, Homo sapiens; identical to SEQ ID NO: 47711
  Payload ID: 9648
  Gene Symbol: KDM3A
  Gene Name: lysine (K)-specific demethylase 3A
  Uniprot ID: Q9Y4C1
  ENSP ID: ENSP00000386516

SEQ ID NO: 47713 - protein, 1321 aa, Homo sapiens; identical to SEQ ID NO: 47711
  Payload ID: 9648
  Gene Symbol: KDM3A
  Gene Name: lysine (K)-specific demethylase 3A
  Uniprot ID: Q9Y4C1
  ENSP ID: ENSP00000386660

SEQ ID NO: 47714 - protein, 711 aa, Homo sapiens
  Payload ID: 9648
  Gene Symbol: KDM3A
  Gene Name: lysine (K)-specific demethylase 3A
  ENSP ID: ENSP00000394691
MVLTLGESWPVLVGRRFLSLSAADGSDGSHDSWDVERVAEWPWLSGTIRAVSHTDVTKKDLKVCVEFDGESWRKRRWIEVYSLLRRAFLVEHNLVLAERKSPEISERIVQWPAITYKPLLDKAGLGSITSVRFLGDQQRVFLSKDLLKPIQDVNSLRLSLTDNQIVSKEFQALIVKHLDESHLLKGDKNLVGSEVKIYSLDPSTQWFSATVINGNPASKTLQVNCEEIPALKIVDPSLIHVEVVHDNLVTCGNSARIGAVKRKSSENNGTLVSKQAKSCSEASPSMCPVQSVPTTVFKEILLGCTAATPPSKDPRQQSTPQAANSPPNLGAKIPQGCHKQSLPEEISSCLNTKSEALRTKPDVCKAGLLSKSSQIGTGDLKILTEPKGSCTQPKTNTDQENRLESVPQALTGLPKECLPTKASSKAELEIANPPELQKHLEHAPSPSDVSNAPEVKAGVNSDSPNNCSGKKVEPSALACRSQNLKESSVKVDNESCCSRSNNKIQNAPSRKSVLTDPAKLKKLQQSGEAFVQDDSCVNIVAQLPKCRECRLDSLRKDKEQQKDSPVFCRFFHFRRLQFNKHGVLRVEGFLTPNKYDNEAIGLWLPLTKNVVGIDLDTAKYILANIGDHFCQMVISEKEAMSTIEPHRQVAWKRAVKGVREMCDVCDTTIFNLHWVCPRCGFGVCVDCYRMKRKNCQQGENRFDSPPAPLHS

SEQ ID NO: 47715 - protein, 121 aa, Homo sapiens
  Payload ID: 9648
  Gene Symbol: KDM3A
  Gene Name: lysine (K)-specific demethylase 3A
  ENSP ID: ENSP00000396561
MVLTLGESWPVLVGRRFLSLSAADGSDGSHDSWDVERVAEWPWLSGTIRAVSHTDVTKKDLKVCVEFDGESWRKRRWIEVYSLLRRAFLVEHNLVLAERKSPEISERIVQWPAITYKPLLD

SEQ ID NO: 47716 - protein, 170 aa, Homo sapiens
  Payload ID: 9648
  Gene Symbol: KDM3A
  Gene Name: lysine (K)-specific demethylase 3A
  ENSP ID: ENSP00000397660
MVLTLGESWPVLVGRRFLSLSAADGSDGSHDSWDVERVAEWPWLSGTIRAVSHTDVTKKDLKVCVEFDGESWRKRRWIEVYSLLRRAFLVEHNLVLAERKSPEISERIVQWPAITYKPLLDKAGLGSITSVRFLGDQQRVFLSKDLLKPIQDVNSLRLSLTDNQIVSKEF

SEQ ID NO: 47717 - protein, 1327 aa, Homo sapiens
  Payload ID: 9648
  Gene Symbol: KDM3A
  Gene Name: lysine (K)-specific demethylase 3A
  ENSP ID: ENSP00000438324
MVLTLGESWPVLVGRRFLSLSAADGSDGSHDSWDVERVAEWPWLSGTIRAVSHTDVTKKDLKVCVEFDGESWRKRRWIEVYSLLRRAFLVEHNLVLAERKSPEISERIVQWPAITYKPLLDKAGLGSITSVRFLGDQQRVFLSKDLLKPIQDVNSLRLSLTDNQIVSKEFQALIVKHLDESHLLKGDKNLVGSEVKIYSLDPSTQWFSATVINGNPASKTLQVNCEEIPALKIVDPSLIHVEVVHDNLVTCGNSARIGAVKRKSSENNGTLVSKQAKSCSEASPSMCPVQSVPTTVFKEILLGCTAATPPSKDPRQQSTPQAANSPPNLGAKIPQGCHKQSLPEEISSCLNTKSEALRTKPDVCKAGLLSKSSQIGTGDLKILTEPKGSCTQPKTNTDQENRLESVPQALTGLPKECLPTKASSKAELEIANPPELQKHLEHAPSPSDVSNAPEVKAGVNSDSPNNCSGKKVEPSALACRSQNLKESSVKVDNESCCSRSNNKIQNAPSRKSVLTDPAKLKKLQQSGEAFVQDDSCVNIVAQLPKCRECRLDSLRKDKEQQKDSPVFCRFFHFRRLQFNKHGVLRVEGFLTPNKYDNEAIGLWLPLTKNVVGIDLDTAKYILANIGDHFCQMVISEKEAMSTIEPHRQVAWKRAVKGVREMCDVCDTTIFNLHWVCPRCGFGVCVDCYRMKRKNCQQGAAYKTFSWLKCVKSQIHEPENLMPTQIIPGKALYDVGDIVHSVRAKWGIKANCPCSNRQFKLFSKPASKEDLKQTSLAGEKPTLGAVLQQNPSVLEPAAVGGEAASKPAGSMKPACPASTSPLNWLADLTSGNVNKENKEKQPTMPILKNEIKCLPPLPPLSKSSTVLHTFNSTILTPVSNNNSGFLRNLLNSSTGKTENGLKNTPKILDDIFASLVQNKTTSDLSKRPQGLTIKPSILGFDTPHYWLCDNRLLCLQDPNNKSNWNVFRECWKQGQPVMVSGVHHKLNSELWKPESFRKEFGEQEVDLVNCRTNEIITGATVGDFWDGFEDVPNRLKNEKEPMVLKLKDWPPGEDFRDMMPSRFDDLMANIPLPEYTRRDGKLNLASRLPNYFVRPDLGPKMYNAYGLITPEDRKYGTTNLHLDVSDAANVMVYVGIPKGQCEQEEEVLKTIQDGDSDELTIKRFIEGKEKPGALWHIYAAKDTEKIREFLKKVSEEQGQENPADHDPIHDQSWYLDRSLRKRLHQEYGVQGWAIVQFLGDVVFIPAGAPHQVHNLYSCIKVAEDFVSPEHVKHCFWLTQEFRYLSQTHTNHEDKLQVKNVIYHAVKDAVAMLKVNPVLANLNLPAHWK

SEQ ID NO: 47718 - protein, 1761 aa, Homo sapiens
  Payload ID: 9649
  Gene Symbol: KDM3B
  Gene Name: lysine (K)-specific demethylase 3B
  Uniprot ID: Q7LBC6
  ENSP ID: ENSP00000326563
MADAAASPVGKRLLLLFADTAASASASAPAAAAASGDPGPALRTRAWRAGTVRAMSGAVPQDLAIFVEFDGCNWKQHSWVKVHAEEVIVLLLEGSLVWAPREDPVLLQGIRVSIAQWPALTFTPLVDKLGLGSVVPVEYLLDRELRFLSDANGLHLFQMGTDSQNQILLEHAALRETVNALISDQKLQEIFSRGPYSVQGHRVKIYQPEGEEGWLYGVVSHQDSITRLMEVSVTESGEIKSVDPRLIHVMLMDNSAPQSEGGTLKAVKSSKGKKKRESIEGKDGRRRKSASDSGCDPASKKLKGDRGEVDSNGSDGGEASRGPWKGGNASGEPGLDQRAKQPPSTFVPQINRNIRFATYTKENGRTLVVQDEPVGGDTPASFTPYSTATGQTPLAPEVGGAENKEAGKTLEQVGQGIVASAAVVTTASSTPNTVRISDTGLAAGTVPEKQKGSRSQASGENSRNSILASSGFGAPLPSSSQPLTFGSGRSQSNGVLATENKPLGFSFGCSSAQEAQKDTDLSKNLFFQCMSQTLPTSNYFTTVSESLADDSSSRDSFKQSLESLSSGLCKGRSVLGTDTKPGSKAGSSVDRKVPAESMPTLTPAFPRSLLNARTPENHENLFLQPPKLSREEPSNPFLAFVEKVEHSPFSSFASQASGSSSSATTVTSKVAPSWPESHSSADSASLAKKKPLFITTDSSKLVSGVLGSALTSGGPSLSAMGNGRSSSPTSSLTQPIEMPTLSSSPTEERPTVGPGQQDNPLLKTFSNVFGRHSGGFLSSPADFSQENKAPFEAVKRFSLDERSLACRQDSDSSTNSDLSDLSDSEEQLQAKTGLKGIPEHLMGKLGPNGERSAELLLGKSKGKQAPKGRPRTAPLKVGQSVLKDVSKVKKLKQSGEPFLQDGSCINVAPHLHKCRECRLERYRKFKEQEQDDSTVACRFFHFRRLIFTRKGVLRVEGFLSPQQSDPDAMNLWIPSSSLAEGIDLETSKYILANVGDQFCQLVMSEKEAMMMVEPHQKVAWKRAVRGVREMCDVCETTLFNIHWVCRKCGFGVCLDCYRLRKSRPRSETEEMGDEEVFSWLKCAKGQSHEPENLMPTQIIPGTALYNIGDMVHAARGKWGIKANCPCISRQNKSVLRPAVTNGMSQLPSINPSASSGNETTFSGGGGPAPVTTPEPDHVPKADSTDIRSEEPLKTDSSASNSNSELKAIRPPCPDTAPPSSALHWLADLATQKAKEETKEAGSLRSVLNKESHSPFGLDSFNSTAKVSPLTPKLFNSLLLGPTASNNKTEGSSLRDLLHSGPGKLPQTPLDTGIPFPPVFSTSSAGVKSKASLPNFLDHIIASVVENKKTSDASKRACNLTDTQKEVKEMVMGLNVLDPHTSHSWLCDGRLLCLHDPSNKNNWKIFRECWKQGQPVLVSGVHKKLKSELWKPEAFSQEFGDQDVDLVNCRNCAIISDVKVRDFWDGFEIICKRLRSEDGQPMVLKLKDWPPGEDFRDMMPTRFEDLMENLPLPEYTKRDGRLNLASRLPSYFVRPDLGPKMYNAYGLITAEDRRVGTTNLHLDVSDAVNVMVYVGIPIGEGAHDEEVLKTIDEGDADEVTKQRIHDGKEKPGALWHIYAAKDAEKIRELLRKVGEEQGQENPPDHDPIHDQSWYLDQTLRKRLYEEYGVQGWAIVQFLGDAVFIPAGAPHQVHNLYSCIKVAEDFVSPEHVKHCFRLTQEFRHLSNTHTNHEDKLQVKNIIYHAVKDAVGTLKAHESKLARS

SEQ ID NO: 47719 - protein, 20 aa, Homo sapiens
  Payload ID: 9649
  Gene Symbol: KDM3B
  Gene Name: lysine (K)-specific demethylase 3B
  ENSP ID: ENSP00000423012
VPEKQKGSRSQASGELASQC

SEQ ID NO: 47720 - protein, 274 aa, Homo sapiens
  Payload ID: 9649
  Gene Symbol: KDM3B
  Gene Name: lysine (K)-specific demethylase 3B
  ENSP ID: ENSP00000425186
IFVEFDGCNWKQHSWVKVHAEEVIVLLLEGSLVWAPREDPVLLQGIRVSIAQWPALTFTPLVDKLGLGSVVPVEYLLDRELRFLSDANGLHLFQMGTDSQNQILLEHAALRETVNALISDQKLQEIFSRGPYSVQGHRVKIYQPEGEEGWLYGVVSHQDSITRLMEVSVTESGEIKSVDPRLIHVMLMDNSAPQSEGGTLKAVKSSKGKKKRESIEGKDGRRRKSASDSGCDPASKKLKGDRGEVDSNGSDGDKPQHSLCHLHQRKRQDSGGAG

SEQ ID NO: 47721 - protein, 759 aa, Homo sapiens
  Payload ID: 9649
  Gene Symbol: KDM3B
  Gene Name: lysine (K)-specific demethylase 3B
  Uniprot ID: Q7LBC6
  ENSP ID: ENSP00000439462
MSEKEAMMMVEPHQKVAWKRAVRGVREMCDVCETTLFNIHWVCRKCGFGVCLDCYRLRKSRPRSETEEMGDEEVFSWLKCAKGQSHEPENLMPTQIIPGTALYNIGDMVHAARGKWGIKANCPCISRQNKSVLRPAVTNGMSQLPSINPSASSGNETTFSGGGGPAPVTTPEPDHVPKADSTDIRSEEPLKTDSSASNSNSELKAIRPPCPDTAPPSSALHWLADLATQKAKEETKEAGSLRSVLNKESHSPFGLDSFNSTAKVSPLTPKLFNSLLLGPTASNNKTEGSSLRDLLHSGPGKLPQTPLDTGIPFPPVFSTSSAGVKSKASLPNFLDHIIASVVENKKTSDASKRACNLTDTQKEVKEMVMGLNVLDPHTSHSWLCDGRLLCLHDPSNKNNWKIFRECWKQGQPVLVSGVHKKLKSELWKPEAFSQEFGDQDVDLVNCRNCAIISDVKVRDFWDGFEIICKRLRSEDGQPMVLKLKDWPPGEDFRDMMPTRFEDLMENLPLPEYTKRDGRLNLASRLPSYFVRPDLGPKMYNAYGLITAEDRRVGTTNLHLDVSDAVNVMVYVGIPIGEGAHDEEVLKTIDEGDADEVTKQRIHDGKEKPGALWHIYAAKDAEKIRELLRKVGEEQGQENPPDHDPIHDQSWYLDQTLRKRLYEEYGVQGWAIVQFLGDAVFIPAGAPHQVHNLYSCIKVAEDFVSPEHVKHCFRLTQEFRHLSNTHTNHEDKLQVKNIIYHAVKDAVGTLKAHESKLARS

SEQ ID NO: 47722 - protein, 1064 aa, Homo sapiens
  Payload ID: 9650
  Gene Symbol: KDM4A
  Gene Name: lysine (K)-specific demethylase 4A
  Uniprot ID: O75164
  ENSP ID: ENSP00000361473
MASESETLNPSARIMTFYPTMEEFRNFSRYIAYIESQGAHRAGLAKVVPPKEWKPRASYDDIDDLVIPAPIQQLVTGQSGLFTQYNIQKKAMTVREFRKIANSDKYCTPRYSEFEELERKYWKNLTFNPPIYGADVNGTLYEKHVDEWNIGRLRTILDLVEKESGITIEGVNTPYLYFGMWKTSFAWHTEDMDLYSINYLHFGEPKSWYSVPPEHGKRLERLAKGFFPGSAQSCEAFLRHKMTLISPLMLKKYGIPFDKVTQEAGEFMITFPYGYHAGFNHGFNCAESTNFATRRWIEYGKQAVLCSCRKDMVKISMDVFVRKFQPERYKLWKAGKDNTVIDHTLPTPEAAEFLKESELPPRAGNEEECPEEDMEGVEDGEEGDLKTSLAKHRIGTKRHRVCLEIPQEVSQSELFPKEDLSSEQYEMTECPAALAPVRPTHSSVRQVEDGLTFPDYSDSTEVKFEELKNVKLEEEDEEEEQAAAALDLSVNPASVGGRLVFSGSKKKSSSSLGSGSSRDSISSDSETSEPLSCRAQGQTGVLTVHSYAKGDGRVTVGEPCTRKKGSAARSFSERELAEVADEYMFSLEENKKSKGRRQPLSKLPRHHPLVLQECVSDDETSEQLTPEEEAEETEAWAKPLSQLWQNRPPNFEAEKEFNETMAQQAPHCAVCMIFQTYHQVEFGGFNQNCGNASDLAPQKQRTKPLIPEMCFTSTGCSTDINLSTPYLEEDGTSILVSCKKCSVRVHASCYGVPPAKASEDWMCSRCSANALEEDCCLCSLRGGALQRANDDRWVHVSCAVAILEARFVNIAERSPVDVSKIPLPRFKLKCIFCKKRRKRTAGCCVQCSHGRCPTAFHVSCAQAAGVMMQPDDWPFVVFITCFRHKIPNLERAKGALQSITAGQKVISKHKNGRFYQCEVVRLTTETFYEVNFDDGSFSDNLYPEDIVSQDCLQFGPPAEGEVVQVRWTDGQVYGAKFVASHPIQMYQVEFEDGSQLVVKRDDVYTLDEELPKRVKSRLSVASDMRFNEIFTEKEVKQEKKRQRVINSRYREDYIEPALYRAIME

SEQ ID NO: 47723 - protein, 1096 aa, Homo sapiens
  Payload ID: 9651
  Gene Symbol: KDM4B
  Gene Name: lysine (K)-specific demethylase 4B
  ENSP ID: ENSP00000159111
MGSEDHGAQNPSCKIMTFRPTMEEFKDFNKYVAYIESQGAHRAGLAKIIPPKEWKPRQTYDDIDDVVIPAPIQQVVTGQSGLFTQYNIQKKAMTVGEYRRLANSEKYCTPRHQDFDDLERKYWKNLTFVSPIYGADISGSLYDDDVAQWNIGSLRTILDMVERECGTIIEGVNTPYLYFGMWKTTFAWHTEDMDLYSINYLHFGEPKSWYAIPPEHGKRLERLAIGFFPGSSQGCDAFLRHKMTLISPIILKKYGIPFSRITQEAGEFMITFPYGYHAGFNHGFNCAESTNFATLRWIDYGKVATQCTCRKDMVKISMDVFVRILQPERYELWKQGKDLTVLDHTRPTALTSPELSSWSASRASLKAKLLRRSHRKRSQPKKPKPEDPKFPGEGTAGAALLEEAGGSVKEEAGPEVDPEEEEEEPQPLPHGREAEGAEEDGRGKLRPTKAKSERKKKSFGLLPPQLPPPPAHFPSEEALWLPSPLEPPVLGPGPAAMEESPLPAPLNVVPPEVPSEELEAKPRPIIPMLYVVPRPGKAAFNQEHVSCQQAFEHFAQKGPTWKEPVSPMELTGPEDGAASSGAGRMETKARAGEGQAPSTFSKLKMEIKKSRRHPLGRPPTRSPLSVVKQEASSDEEASPFSGEEDVSDPDALRPLLSLQWKNRAASFQAERKFNAAAARTEPYCAICTLFYPYCQALQTEKEAPIASLGEGCPATLPSKSRQKTRPLIPEMCFTSGGENTEPLPANSYIGDDGTSPLIACGKCCLQVHASCYGIRPELVNEGWTCSRCAAHAWTAECCLCNLRGGALQMTTDRRWIHVICAIAVPEARFLNVIERHPVDISAIPEQRWKLKCVYCRKRMKKVSGACIQCSYEHCSTSFHVTCAHAAGVLMEPDDWPYVVSITCLKHKSGGHAVQLLRAVSLGQVVITKNRNGLYYRCRVIGAASQTCYEVNFDDGSYSDNLYPESITSRDCVQLGPPSEGELVELRWTDGNLYKAKFISSVTSHIYQVEFEDGSQLTVKRGDIFTLEEELPKRVRSRLSLSTGAPQEPAFSGEEAKAAKRPRVGTPLATEDSGRSQDYVAFVESLLQVQGRPGAPF

SEQ ID NO: 47724 - protein, 448 aa, Homo sapiens
  Payload ID: 9651
  Gene Symbol: KDM4B
  Gene Name: lysine (K)-specific demethylase 4B
  Uniprot ID: O94953
  ENSP ID: ENSP00000371178
MGSEDHGAQNPSCKIMTFRPTMEEFKDFNKYVAYIESQGAHRAGLAKIIPPKEWKPRQTYDDIDDVVIPAPIQQVVTGQSGLFTQYNIQKKAMTVGEYRRLANSEKYCTPRHQDFDDLERKYWKNLTFVSPIYGADISGSLYDDDVAQWNIGSLRTILDMVERECGTIIEGVNTPYLYFGMWKTTFAWHTEDMDLYSINYLHFGEPKSWYAIPPEHGKRLERLAIGFFPGSSQGCDAFLRHKMTLISPIILKKYGIPFSRITQEAGEFMITFPYGYHAGFNHGFNCAESTNFATLRWIDYGKVATQCTCRKDMVKISMDVFVRILQPERYELWKQGKDLTVLDHTRPTALTSPELSSWSASRASLKAKLLRRTPPCVSPHRPSQPGIWCPPGGEAKASAASWLLTTRGHGDTEAGPGLGGDPLHAQSEGQASCVSTSRLRMATQDPCR

SEQ ID NO: 47725 - protein, 1130 aa, Homo sapiens
  Payload ID: 9651
  Gene Symbol: KDM4B
  Gene Name: lysine (K)-specific demethylase 4B
  ENSP ID: ENSP00000440495
MGSEDHGAQNPSCKIMTFRPTMEEFKDFNKYVAYIESQGAHRAGLAKIIPPKEWKPRQTYDDIDDVVIPAPIQQVVTGQSGLFTQYNIQKKAMTVGEYRRLANSEKYCTPRHQDFDDLERKYWKNLTFVSPIYGADISGSLYDDDVAQWNIGSLRTILDMVERECGTIIEGVNTPYLYFGMWKTTFAWHTEDMDLYSINYLHFGEPKSWYAIPPEHGKRLERLAIGFFPGSSQGCDAFLRHKMTLISPIILKKYGIPFSRITQEAGEFMITFPYGYHAGFNHGFNCAESTNFATLRWIDYGKVATQCTCRKDMVKISMDVFVRILQPERYELWKQGKDLTVLDHTRPTALTSPELSSWSASRASLKAKLLRRQISLKENRHWRKTEEERKPSLERKKEQTKRPGLSSHRKRSQPKKPKPEDPKFPGEGTAGAALLEEAGGSVKEEAGPEVDPEEEEEEPQPLPHGREAEGAEEDGRGKLRPTKAKSERKKKSFGLLPPQLPPPPAHFPSEEALWLPSPLEPPVLGPGPAAMEESPLPAPLNVVPPEVPSEELEAKPRPIIPMLYVVPRPGKAAFNQEHVSCQQAFEHFAQKGPTWKEPVSPMELTGPEDGAASSGAGRMETKARAGEGQAPSTFSKLKMEIKKSRRHPLGRPPTRSPLSVVKQEASSDEEASPFSGEEDVSDPDALRPLLSLQWKNRAASFQAERKFNAAAARTEPYCAICTLFYPYCQALQTEKEAPIASLGEGCPATLPSKSRQKTRPLIPEMCFTSGGENTEPLPANSYIGDDGTSPLIACGKCCLQVHASCYGIRPELVNEGWTCSRCAAHAWTAECCLCNLRGGALQMTTDRRWIHVICAIAVPEARFLNVIERHPVDISAIPEQRWKLKCVYCRKRMKKVSGACIQCSYEHCSTSFHVTCAHAAGVLMEPDDWPYVVSITCLKHKSGGHAVQLLRAVSLGQVVITKNRNGLYYRCRVIGAASQTCYEVNFDDGSYSDNLYPESITSRDCVQLGPPSEGELVELRWTDGNLYKAKFISSVTSHIYQVEFEDGSQLTVKRGDIFTLEEELPKRVRSRLSLSTGAPQEPAFSGEEAKAAKRPRVGTPLATEDSGRSQDYVAFVESLLQVQGRPGAPF

SEQ ID NO: 47726 - protein, 623 aa, Homo sapiens
  Payload ID: 9651
  Gene Symbol: KDM4B
  Gene Name: lysine (K)-specific demethylase 4B
  ENSP ID: ENSP00000467678
  MOD_RES (1)..(1): Any amino acid
XTNFATLRWIDYGKVATQCTCRKDMVKISMDVFVRILQPERYELWKQGKDLTVLDHTRPTALTSPELSSWSASRASLKAKLLRRQISLKENRHWRKTEEERKPSLERKKEQTKRPGLSSHRKRSQPKKPKPEDPKFPGEGTAGAALLEEAGGSVKEEAGPEVDPEEEEEEPQPLPHGREAEGAEEDGRGKLRPTKAKSERKKKSFGLLPPQLPPPPAHFPSEEALWLPSPLEPPVLGPGPAAMEESPLPAPLNVVPPEVPSEELEAKPRPIIPMLYVVPRPGKAAFNQEHVSCQQAFEHFAQKGPTWKEPVSPMELTGPEDGAASSGAGRMETKARAGEGQAPSTFSKLKMEIKKSRRHPLGRPPTRSPLSVVKQEASSDEEASPFSGEEDVSDPDALRPLLSLQWKNRAASFQAERKFNAAAARTEPYCAICTLFYPYCQALQTEKEAPIASLGEGCPATLPSKSRQKTRPLIPEMCFTSGGENTEPLPANSYIGDDGTSPLIACGKCCLQVHASCYGIRPELVNEGWTCSRCAAHAWTAECCLCNLRGGALQMTTDRRWIHVICAIAVPEARFLNVIERHPVDISAIPEQRWKLVRSLGPGGAWPIMAWAAALQGCLLHTL

SEQ ID NO: 47727 - protein, 120 aa, Homo sapiens
  Payload ID: 9651
  Gene Symbol: KDM4B
  Gene Name: lysine (K)-specific demethylase 4B
  ENSP ID: ENSP00000468514
MGSEDHGAQNPSCKIMTFRPTMEEFKDFNKYVAYIESQGAHRAGLAKIIPPKEWKPRQTYDDIDDVVIPAPIQQVVTGQSGLFTQYNIQKKAMTVGEYRRLANSEKYCTPRHQDFDDLER

SEQ ID NO: 47728 - protein, 1130 aa, Homo sapiens; identical to SEQ ID NO: 47725
  Payload ID: 9651
  Gene Symbol: KDM4B
  Gene Name: lysine (K)-specific demethylase 4B
  ENSP ID: ENSP00000480642

SEQ ID NO: 47729 - protein, 1047 aa, Homo sapiens
  Payload ID: 9652
  Gene Symbol: KDM4C
  Gene Name: lysine (K)-specific demethylase 4C
  Uniprot ID: Q9H3R0
  ENSP ID: ENSP00000370707
MEVAEVESPLNPSCKIMTFRPSMEEFREFNKYLAYMESKGAHRAGLAKVIPPKEWKPRQCYDDIDNLLIPAPIQQMVTGQSGLFTQYNIQKKAMTVKEFRQLANSGKYCTPRYLDYEDLERKYWKNLTFVAPIYGADINGSIYDEGVDEWNIARLNTVLDVVEEECGISIEGVNTPYLYFGMWKTTFAWHTEDMDLYSINYLHFGEPKSWYAIPPEHGKRLERLAQGFFPSSSQGCDAFLRHKMTLISPSVLKKYGIPFDKITQEAGEFMITFPYGYHAGFNHGFNCAESTNFATVRWIDYGKVAKLCTCRKDMVKISMDIFVRKFQPDRYQLWKQGKDIYTIDHTKPTPASTPEVKAWLQRRRKVRKASRSFQCARSTSKRPKADEEEEVSDEVDGAEVPNPDSVTDDLKVSEKSEAAVKLRNTEASSEEESSASRMQVEQNLSDHIKLSGNSCLSTSVTEDIKTEDDKAYAYRSVPSISSEADDSIPLSSGYEKPEKSDPSELSWPKSPESCSSVAESNGVLTEGEESDVESHGNGLEPGEIPAVPSGERNSFKVPSIAEGENKTSKSWRHPLSRPPARSPMTLVKQQAPSDEELPEVLSIEEEVEETESWAKPLIHLWQTKSPNFAAEQEYNATVARMKPHCAICTLLMPYHKPDSSNEENDARWETKLDEVVTSEGKTKPLIPEMCFIYSEENIEYSPPNAFLEEDGTSLLISCAKCCVRVHASCYGIPSHEICDGWLCARCKRNAWTAECCLCNLRGGALKQTKNNKWAHVMCAVAVPEVRFTNVPERTQIDVGRIPLQRLKLKCIFCRHRVKRVSGACIQCSYGRCPASFHVTCAHAAGVLMEPDDWPYVVNITCFRHKVNPNVKSKACEKVISVGQTVITKHRNTRYYSCRVMAVTSQTFYEVMFDDGSFSRDTFPEDIVSRDCLKLGPPAEGEVVQVKWPDGKLYGAKYFGSNIAHMYQVEFEDGSQIAMKREDIYTLDEELPKRVKARFVSAGRCHLGTCQVNSLSSPHVSQAQQETYLGFWINSKKSQCNIFLSGTY

SEQ ID NO: 47730 - protein, 1056 aa, Homo sapiens
  Payload ID: 9652
  Gene Symbol: KDM4C
  Gene Name: lysine (K)-specific demethylase 4C
  Uniprot ID: Q9H3R0
  ENSP ID: ENSP00000370710
MEVAEVESPLNPSCKIMTFRPSMEEFREFNKYLAYMESKGAHRAGLAKVIPPKEWKPRQCYDDIDNLLIPAPIQQMVTGQSGLFTQYNIQKKAMTVKEFRQLANSGKYCTPRYLDYEDLERKYWKNLTFVAPIYGADINGSIYDEGVDEWNIARLNTVLDVVEEECGISIEGVNTPYLYFGMWKTTFAWHTEDMDLYSINYLHFGEPKSWYAIPPEHGKRLERLAQGFFPSSSQGCDAFLRHKMTLISPSVLKKYGIPFDKITQEAGEFMITFPYGYHAGFNHGFNCAESTNFATVRWIDYGKVAKLCTCRKDMVKISMDIFVRKFQPDRYQLWKQGKDIYTIDHTKPTPASTPEVKAWLQRRRKVRKASRSFQCARSTSKRPKADEEEEVSDEVDGAEVPNPDSVTDDLKVSEKSEAAVKLRNTEASSEEESSASRMQVEQNLSDHIKLSGNSCLSTSVTEDIKTEDDKAYAYRSVPSISSEADDSIPLSSGYEKPEKSDPSELSWPKSPESCSSVAESNGVLTEGEESDVESHGNGLEPGEIPAVPSGERNSFKVPSIAEGENKTSKSWRHPLSRPPARSPMTLVKQQAPSDEELPEVLSIEEEVEETESWAKPLIHLWQTKSPNFAAEQEYNATVARMKPHCAICTLLMPYHKPDSSNEENDARWETKLDEVVTSEGKTKPLIPEMCFIYSEENIEYSPPNAFLEEDGTSLLISCAKCCVRVHASCYGIPSHEICDGWLCARCKRNAWTAECCLCNLRGGALKQTKNNKWAHVMCAVAVPEVRFTNVPERTQIDVGRIPLQRLKLKCIFCRHRVKRVSGACIQCSYGRCPASFHVTCAHAAGVLMEPDDWPYVVNITCFRHKVNPNVKSKACEKVISVGQTVITKHRNTRYYSCRVMAVTSQTFYEVMFDDGSFSRDTFPEDIVSRDCLKLGPPAEGEVVQVKWPDGKLYGAKYFGSNIAHMYQVEFEDGSQIAMKREDIYTLDEELPKRVKARFSTASDMRFEDTFYGADIIQGERKRQRVLSSRFKNEYVADPVYRTFLKSSFQKKCQKRQ

SEQ ID NO: 47731 - protein, 151 aa, Homo sapiens
  Payload ID: 9652
  Gene Symbol: KDM4C
  Gene Name: lysine (K)-specific demethylase 4C
  ENSP ID: ENSP00000383990
MEVAEVESPLNPSCKIMTFRPSMEEFREFNKYLAYMESKGAHRAGLAKVIPPKEWKPRQCYDDIDNLLIPAPIQQMVTGQSGLFTQYNIQKKAMTVKEFRQLANSGKYCTPRYLDYEDLERKYWKNLTFVAPIYGADINGSIYDEVHSYLQ

SEQ ID NO: 47732 - protein, 354 aa, Homo sapiens
  Payload ID: 9652
  Gene Symbol: KDM4C
  Gene Name: lysine (K)-specific demethylase 4C
  ENSP ID: ENSP00000400127
PDSSNEENDARWETKLDEVVTSEGKTKPLIPEMCFIYSEENIEYSPPNAFLEEDGTSLLISCAKCCVRVHASCYGIPSHEICDGWLCARCKRNAWTAECCLCNLRGGALKQTKNNKWAHVMCAVAVPEVRFTNVPERTQIDVGRIPLQRLKLKCIFCRHRVKRVSGACIQCSYGRCPASFHVTCAHAAGVLMEPDDWPYVVNITCFRHKVNPNVFTAQSKHSKNESCIATTTSAAAAGATILCELGHKSKACEKVISVGQTVITKHRNTRYYSCRVMAVTSQTFYEVMFDDGSFSRDTFPEDIVSRDCLKLGPPAEGEVVQVKWPDGKLYGAKYFGSNIAHMYQVEFEDGSQIA

SEQ ID NO: 47733 - protein, 373 aa, Homo sapiens
  Payload ID: 9652
  Gene Symbol: KDM4C
  Gene Name: lysine (K)-specific demethylase 4C
  ENSP ID: ENSP00000404756
MEVAEVESPLNPSCKIMTFRPSMEEFREFNKYLAYMESKGAHRAGLAKVIPPKEWKPRQCYDDIDNLLIPAPIQQMVTGQSGLFTQYNIQKKAMTVKEFRQLANSGKYCTPRYLDYEDLERKYWKNLTFVAPIYGADINGSIYDEGVDEWNIARLNTVLDVVEEECGISIEGVNTPYLYFGMWKTTFAWHTEDMDLYSINYLHFGEPKSWYAIPPEHGKRLERLAQGFFPSSSQGCDAFLRHKMTLISPSVLKKYGIPFDKITQEAGEFMITFPYGYHAGFNHGFNCAESTNFATVRWIDYGKVAKLCTCRKDMVKISMDIFVRKFQPDRYQLWKQGKDIYTIDHTKPTPASTPEVKAWLQRRRKVRKASRRL

SEQ ID NO: 47734 - protein, 743 aa, Homo sapiens
  Payload ID: 9652
  Gene Symbol: KDM4C
  Gene Name: lysine (K)-specific demethylase 4C
  ENSP ID: ENSP00000405739
MVKISMDIFVRKFQPDRYQLWKQGKDIYTIDHTKPTPASTPEVKAWLQRRRKVRKASRSFQCARSTSKRPKADEEEEVSDEVDGAEVPNPDSVTDDLKVSEKSEAAVKLRNTEASSEEESSASRMQVEQNLSDHIKLSGNSCLSTSVTEDIKTEDDKAYAYRSVPSISSEADDSIPLSSGYEKPEKSDPSELSWPKSPESCSSVAESNGVLTEGEESDVESHGNGLEPGEIPAVPSGERNSFKVPSIAEGENKTSKSWRHPLSRPPARSPMTLVKQQAPSDEELPEVLSIEEEVEETESWAKPLIHLWQTKSPNFAAEQEYNATVARMKPHCAICTLLMPYHKPDSSNEENDARWETKLDEVVTSEGKTKPLIPEMCFIYSEENIEYSPPNAFLEEDGTSLLISCAKCCVRVHASCYGIPSHEICDGWLCARCKRNAWTAECCLCNLRGGALKQTKNNKWAHVMCAVAVPEVRFTNVPERTQIDVGRIPLQRLKLKCIFCRHRVKRVSGACIQCSYGRCPASFHVTCAHAAGVLMEPDDWPYVVNITCFRHKVNPNVKSKACEKVISVGQTVITKHRNTRYYSCRVMAVTSQTFYEVMFDDGSFSRDTFPEDIVSRDCLKLGPPAEGEVVQVKWPDGKLYGAKYFGSNIAHMYQVEFEDGSQIAMKREDIYTLDEELPKRVKARFSTASDMRFEDTFYGADIIQGERKRQRVLSSRFKNEYVADPVYRTFLKSSFQKKCQKRQ

SEQ ID NO: 47735 - protein, 813 aa, Homo sapiens
  Payload ID: 9652
  Gene Symbol: KDM4C
  Gene Name: lysine (K)-specific demethylase 4C
  Uniprot ID: Q9H3R0
  ENSP ID: ENSP00000445427
MEVAEVESPLNPSCKIMTFRPSMEEFREFNKYLAYMESKGAHRAGLAKVIPPKEWKPRQCYDDIDNLLIPAPIQQMVTGQSGLFTQYNIQKKAMTVKEFRQLANSGKYCTPRYLDYEDLERKYWKNLTFVAPIYGADINGSIYDEGVDEWNIARLNTVLDVVEEECGISIEGVNTPYLYFGMWKTTFAWHTEDMDLYSINYLHFGEPKSWYAIPPEHGKRLERLAQGFFPSSSQGCDAFLRHKMTLISPSVLKKYGIPFDKITQEAGEFMITFPYGYHAGFNHGFNCAESTNFATVRWIDYGKVAKLCTCRKDMVKISMDIFVRKFQPDRYQLWKQGKDIYTIDHTKPTPASTPEVKAWLQRRRKVRKASRSFQCARSTSKRPKADEEEEVSDEVDGAEVPNPDSVTDDLKVSEKSEAAVKLRNTEASSEEESSASRMQVEQNLSDHIKLSGNSCLSTSVTEDIKTEDDKAYAYRSVPSISSEADDSIPLSSGYEKPEKSDPSELSWPKSPESCSSVAESNGVLTEGEESDVESHGNGLEPGEIPAVPSGERNSFKVPSIAEGENKTSKSWRHPLSRPPARSPMTLVKQQAPSDEELPEVLSIEEEVEETESWAKPLIHLWQTKSPNFAAEQEYNATVARMKPHCAICTLLMPYHKPDSSNEENDARWETKLDEVVTSEGKTKPLIPEMCFIYSEENIEYSPPNAFLEEDGTSLLISCAKCCVRVHASCYGIPSHEICDGWLCARCKRNAWTAECCLCNLRGGALKQTKNNKWAHVMCAVAVPEVRFTNVPERTQIDVGRIPLQRLKLGRLGI

SEQ ID NO: 47736 - protein, 523 aa, Homo sapiens
  Payload ID: 9653
  Gene Symbol: KDM4D
  Gene Name: lysine (K)-specific demethylase 4D
  Uniprot ID: Q6B0I6
  ENSP ID: ENSP00000334181
METMKSKANCAQNPNCNIMIFHPTKEEFNDFDKYIAYMESQGAHRAGLAKIIPPKEWKARETYDNISEILIATPLQQVASGRAGVFTQYHKKKKAMTVGEYRHLANSKKYQTPPHQNFEDLERKYWKNRIYNSPIYGADISGSLFDENTKQWNLGHLGTIQDLLEKECGVVIEGVNTPYLYFGMWKTTFAWHTEDMDLYSINYLHLGEPKTWYVVPPEHGQRLERLARELFPGSSRGCGAFLRHKVALISPTVLKENGIPFNRITQEAGEFMVTFPYGYHAGFNHGFNCAEAINFATPRWIDYGKMASQCSCGEARVTFSMDAFVRILQPERYDLWKRGQDRAVVDHMEPRVPASQELSTQKEVQLPRRAALGLRQLPSHWARHSPWPMAARSGTRCHTLVCSSLPRRSAVSGTATQPRAAAVHSSKKPSSTPSSTPGPSAQIIHPSNGRRGRGRPPQKLRAQELTLQTPAKRPLLAGTTCTASGPEPEPLPEDGALMDKPVPLSPGLQHPVKASGCSWAPVP

SEQ ID NO: 47737 - protein, 523 aa, Homo sapiens; identical to SEQ ID NO: 47736
  Payload ID: 9653
  Gene Symbol: KDM4D
  Gene Name: lysine (K)-specific demethylase 4D
  Uniprot ID: Q6B0I6
  ENSP ID: ENSP00000460897

SEQ ID NO: 47738 - protein, 523 aa, Homo sapiens; identical to SEQ ID NO: 47736
  Payload ID: 9653
  Gene Symbol: KDM4D
  Gene Name: lysine (K)-specific demethylase 4D
  Uniprot ID: Q6B0I6
  ENSP ID: ENSP00000482224

SEQ ID NO: 47739 - protein, 506 aa, Homo sapiens
  Payload ID: 9654
  Gene Symbol: KDM4E
  Gene Name: lysine (K)-specific demethylase 4E
  Uniprot ID: B2RXH2
  ENSP ID: ENSP00000397239
MKSVHSSPQNTSHTIMTFYPTMEEFADFNTYVAYMESQGAHQAGLAKVIPPKEWKARQMYDDIEDILIATPLQQVTSGQGGVFTQYHKKKKAMRVGQYRRLANSKKYQTPPHQNFADLEQRYWKSHPGNPPIYGADISGSLFEESTKQWNLGHLGTILDLLEQECGVVIEGVNTPYLYFGMWKTTFAWHTEDMDLYSINYLHFGEPKTWYVVPPEHGQHLERLARELFPDISRGCEAFLRHKVALISPTVLKENGIPFNCMTQEAGEFMVTFPYGYHAGFNHGFNCAEAINFATPRWIDYGKMASQCSCGESTVTFSMDPFVRIVQPESYELWKHRQDLAIVEHTEPRVAESQELSNWRDDIVLRRAALGLRLLPNLTAQCPTQPVSSGHCYNPKGCGTDAVPGSAFQSSAYHTQTQSLTLGMSARVLLPSTGSWGSGRGRGRGQGQGRGCSRGRGHGCCTRELGTEEPTVQPASKRRLLMGTRSRAQGHRPQLPLANDLMTNLSL

SEQ ID NO: 47740 - protein, 1722 aa, Homo sapiens
  Payload ID: 9655
  Gene Symbol: KDM5A
  Gene Name: lysine (K)-specific demethylase 5A
  ENSP ID: ENSP00000372265
MAGVGPGGYAAEFVPPPECPVFEPSWEEFTDPLSFIGRIRPLAEKTGICKIRPPKDWQPPFACEVKSFRFTPRVQRLNELEAMTRVRLDFLDQLAKFWELQGSTLKIPVVERKILDLYALSKIVASKGGFEMVTKEKKWSKVGSRLGYLPGKGTGSLLKSHYERILYPYELFQSGVSLMGVQMPNLDLKEKVEPEVLSTDTQTSPEPGTRMNILPKRTRRVKTQSESGDVSRNTELKKLQIFGAGPKVVGLAMGTKDKEDEVTRRRKVTNRSDAFNMQMRQRKGTLSVNFVDLYVCMFCGRGNNEDKLLLCDGCDDSYHTFCLIPPLPDVPKGDWRCPKCVAEECSKPREAFGFEQAVREYTLQSFGEMADNFKSDYFNMPVHMVPTELVEKEFWRLVSSIEEDVIVEYGADISSKDFGSGFPVKDGRRKILPEEEEYALSGWNLNNMPVLEQSVLAHINVDISGMKVPWLYVGMCFSSFCWHIEDHWSYSINYLHWGEPKTWYGVPSHAAEQLEEVMRELAPELFESQPDLLHQLVTIMNPNVLMEHGVPVYRTNQCAGEFVVTFPRAYHSGFNQGYNFAEAVNFCTADWLPIGRQCVNHYRRLRRHCVFSHEELIFKMAADPECLDVGLAAMVCKELTLMTEEETRLRESVVQMGVLMSEEEVFELVPDDERQCSACRTTCFLSALTCSCNPERLVCLYHPTDLCPCPMQKKCLRYRYPLEDLPSLLYGVKVRAQSYDTWVSRVTEALSANFNHKKDLIELRVMLEDAEDRKYPENDLFRKLRDAVKEAETCASVAQLLLSKKQKHRQSPDSGRTRTKLTVEELKAFVQQLFSLPCVISQARQVKNLLDDVEEFHERAQEAMMDETPDSSKLQMLIDMGSSLYVELPELPRLKQELQQARWLDEVRLTLSDPQQVTLDVMKKLIDSGVGLAPHHAVEKAMAELQELLTVSERWEEKAKVCLQARPRHSVASLESIVNEAKNIPAFLPNVLSLKEALQKAREWTAKVEAIQSGSNYAYLEQLESLSAKGRPIPVRLEALPQVESQVAAARAWRERTGRTFLKKNSSHTLLQVLSPRTDIGVYGSGKNRRKKVKELIEKEKEKDLDLEPLSDLEEGLEETRDTAMVVAVFKEREQKEIEAMHSLRAANLAKMTMVDRIEEVKFCICRKTASGFMLQCELCKDWFHNSCVPLPKSSSQKKGSSWQAKEVKFLCPLCMRSRRPRLETILSLLVSLQKLPVRLPEGEALQCLTERAMSWQDRARQALATDELSSALAKLSVLSQRMVEQAAREKTEKIISAELQKAAANPDLQGHLPSFQQSAFNRVVSSVSSSPRQTMDYDDEETDSDEDIRETYGYDMKDTASVKSSSSLEPNLFCDEEIPIKSEEVVTHMWTAPSFCAEHAYSSASKSCSQVFFGKGSSTPRKQPRKSPLVPRSLEPPVLELSPGAKAQLEELMMVGDLLEVSLDETQHIWRILQATHPPSEDRFLHIMEDDSMEEKPLKVKGKDSSEKKRKRKLEKVEQLFGEGKQKSKELKKMDKPRKKKLKLGADKSKELNKLAKKLAKEEERKKKKEKAAAAKVELVKESTEKKREKKVLDIPSKYDWSGAEESDDENAVCAAQNCQRPCKDKGVVFVTKKRRIKNISFKSGLCDCFSKKVDWVQCDGGCDEWFHQVCVGVSPEMAENEDYICINCAKKQGPVSPGPAPPPSFIMSYKLPMEDLKETS

SEQ ID NO: 47741 - protein, 1690 aa, Homo sapiens
  Payload ID: 9655
  Gene Symbol: KDM5A
  Gene Name: lysine (K)-specific demethylase 5A
  Uniprot ID: P29375
  ENSP ID: ENSP00000382688
MAGVGPGGYAAEFVPPPECPVFEPSWEEFTDPLSFIGRIRPLAEKTGICKIRPPKDWQPPFACEVKSFRFTPRVQRLNELEAMTRVRLDFLDQLAKFWELQGSTLKIPVVERKILDLYALSKIVASKGGFEMVTKEKKWSKVGSRLGYLPGKGTGSLLKSHYERILYPYELFQSGVSLMGVQMPNLDLKEKVEPEVLSTDTQTSPEPGTRMNILPKRTRRVKTQSESGDVSRNTELKKLQIFGAGPKVVGLAMGTKDKEDEVTRRRKVTNRSDAFNMQMRQRKGTLSVNFVDLYVCMFCGRGNNEDKLLLCDGCDDSYHTFCLIPPLPDVPKGDWRCPKCVAEECSKPREAFGFEQAVREYTLQSFGEMADNFKSDYFNMPVHMVPTELVEKEFWRLVSSIEEDVIVEYGADISSKDFGSGFPVKDGRRKILPEEEEYALSGWNLNNMPVLEQSVLAHINVDISGMKVPWLYVGMCFSSFCWHIEDHWSYSINYLHWGEPKTWYGVPSHAAEQLEEVMRELAPELFESQPDLLHQLVTIMNPNVLMEHGVPVYRTNQCAGEFVVTFPRAYHSGFNQGYNFAEAVNFCTADWLPIGRQCVNHYRRLRRHCVFSHEELIFKMAADPECLDVGLAAMVCKELTLMTEEETRLRESVVQMGVLMSEEEVFELVPDDERQCSACRTTCFLSALTCSCNPERLVCLYHPTDLCPCPMQKKCLRYRYPLEDLPSLLYGVKVRAQSYDTWVSRVTEALSANFNHKKDLIELRVMLEDAEDRKYPENDLFRKLRDAVKEAETCASVAQLLLSKKQKHRQSPDSGRTRTKLTVEELKAFVQQLFSLPCVISQARQVKNLLDDVEEFHERAQEAMMDETPDSSKLQMLIDMGSSLYVELPELPRLKQELQQARWLDEVRLTLSDPQQVTLDVMKKLIDSGVGLAPHHAVEKAMAELQELLTVSERWEEKAKVCLQARPRHSVASLESIVNEAKNIPAFLPNVLSLKEALQKAREWTAKVEAIQSGSNYAYLEQLESLSAKGRPIPVRLEALPQVESQVAAARAWRERTGRTFLKKNSSHTLLQVLSPRTDIGVYGSGKNRRKKVKELIEKEKEKDLDLEPLSDLEEGLEETRDTAMVVAVFKEREQKEIEAMHSLRAANLAKMTMVDRIEEVKFCICRKTASGFMLQCELCKDWFHNSCVPLPKSSSQKKGSSWQAKEVKFLCPLCMRSRRPRLETILSLLVSLQKLPVRLPEGEALQCLTERAMSWQDRARQALATDELSSALAKLSVLSQRMVEQAAREKTEKIISAELQKAAANPDLQGHLPSFQQSAFNRVVSSVSSSPRQTMDYDDEETDSDEDIRETYGYDMKDTASVKSSSSLEPNLFCDEEIPIKSEEVVTHMWTAPSFCAEHAYSSASKSCSQGSSTPRKQPRKSPLVPRSLEPPVLELSPGAKAQLEELMMVGDLLEVSLDETQHIWRILQATHPPSEDRFLHIMEDDSMEEKPLKVKGKDSSEKKRKRKLEKVEQLFGEGKQKSKELKKMDKPRKKKLKLGADKSKELNKLAKKLAKEEERKKKKEKAAAAKVELVKESTEKKREKKVLDIPSKYDWSGAEESDDENAVCAAQNCQRPCKDKVDWVQCDGGCDEWFHQVCVGVSPEMAENEDYICINCAKKQGPVSPGPAPPPSFIMSYKLPMEDLKETS

SEQ ID NO: 47742 - protein, 122 aa, Homo sapiens
  Payload ID: 9655
  Gene Symbol: KDM5A
  Gene Name: lysine (K)-specific demethylase 5A
  ENSP ID: ENSP00000438203
MLKSLDVGNSRSTILESQLLQITRFAYKVNYNLTFEDWQPPFACEVKSFRFTPRVQRLNELEAMTRVRLDFLDQLAKFWELQGSTLKIPVVERKILDLYALSKIVASKGGFEMVTKEKKWSK

SEQ ID NO: 47743 - protein, 715 aa, Homo sapiens
  Payload ID: 9655
  Gene Symbol: KDM5A
  Gene Name: lysine (K)-specific demethylase 5A
  ENSP ID: ENSP00000440622
MAGVGPGGYAAEFVPPPECPVFEPSWEEFTDPLSFIGRIRPLAEKTGICKIRPPKEYALSGWNLNNMPVLEQSVLAHINVDISGMKVPWLYVGMCFSSFCWHIEDHWSYSINYLHWGEPKTWYGVPSHAAEQLEEVMRELAPELFESQPDLLHQLVTIMNPNVLMEHGVPVYRTNQCAGEFVVTFPRAYHSGFNQGYNFAEAVNFCTADWLPIGRQCVNHYRRLRRHCVFSHEELIFKMAADPECLDVGLAAMVCKELTLMTEEETRLRESVVQMGVLMSEEEVFELVPDDERQCSACRTTCFLSALTCSCNPERLVCLYHPTDLCPCPMQKKCLRYRYPLEDLPSLLYGVKVRAQSYDTWVSRVTEALSANFNHKKDLIELRVMLEDAEDRKYPENDLFRKLRDAVKEAETCASVAQLLLSKKQKHRQSPDSGRTRTKLTVEELKAFVQQLFSLPCVISQARQVKNLLDDVEEFHERAQEAMMDETPDSSKLQMLIDMGSSLYVELPELPRLKQELQQARWLDEVRLTLSDPQQVTLDVMKKLIDSGVGLAPHHAVEKAMAELQELLTVSERWEEKAKVCLQARPRHSVASLESIVNEAKNIPAFLPNVLSLKEALQKAREWTAKVEAIQSGSNYAYLEQLESLSAKGRPIPVRLEALPQVESQVAAARAWRERTGRTFLKKNSSHTLLQVLSPRTDIGVYGSGKNRRKKVKEL

SEQ ID NO: 47744 - protein, 126 aa, Homo sapiens
  Payload ID: 9655
  Gene Symbol: KDM5A
  Gene Name: lysine (K)-specific demethylase 5A
  ENSP ID: ENSP00000443854
MAGVGPGGYAAEFVPPPECPVFEPSWEEFTDPLSFIGRIRPLAEKTGICKIRPPKDWQPPFACEVKSFRFTPRVQRLNELEIVASKGGFEMVTKEKKWSKVGSRLGYLPGKGTGSLLKSHYERILY

SEQ ID NO: 47745 - protein, 131 aa, Homo sapiens
  Payload ID: 9655
  Gene Symbol: KDM5A
  Gene Name: lysine (K)-specific demethylase 5A
  ENSP ID: ENSP00000444251
MAGVGPGGYAAEFVPPPECPVFEPSWEEFTDPLSFIGRIRPLAEKTGICKIRPPKFWQISSVSKDWQPPFACEVKSFRFTPRVQRLNELEAMTRVRLDFLDQLAKFWELQGSTLKIPVVERKILDLYALSK

SEQ ID NO: 47746 - protein, 1275 aa, Homo sapiens
  Payload ID: 9656
  Gene Symbol: KDM5B
  Gene Name: lysine (K)-specific demethylase 5B
  ENSP ID: ENSP00000235790
MGFAPGKAVGSHIRGHYERILNPYNLFLSGDSLRCLQKPNLTTDTKDKEYKPHDIPQRQSVQPSETCPPARRAKRMRAEAMNIKIEPEETTEARTHNLRRRMGCPTPKCENEKEMKSSIKQEPIERKDYIVENEKEKPKSRSKKATNAVDLYVCLLCGSGNDEDRLLLCDGCDDSYHTFCLIPPLHDVPKGDWRCPKCLAQECSKPQEAFGFEQAARDYTLRTFGEMADAFKSDYFNMPVHMVPTELVEKEFWRLVSTIEEDVTVEYGADIASKEFGSGFPVRDGKIKLSPEEEEYLDSGWNLNNMPVMEQSVLAHITADICGMKLPWLYVGMCFSSFCWHIEDHWSYSINYLHWGEPKTWYGVPGYAAEQLENVMKKLAPELFVSQPDLLHQLVTIMNPNTLMTHEVPVYRTNQCAGEFVITFPRAYHSGFNQGFNFAEAVNFCTVDWLPLGRQCVEHYRLLHRYCVFSHDEMICKMASKADVLDVVVASTVQKDMAIMIEDEKALRETVRKLGVIDSERMDFELLPDDERQCVKCKTTCFMSAISCSCKPGLLVCLHHVKELCSCPPYKYKLRYRYTLDDLYPMMNALKLRAESYNEWALNVNEALEAKINKKKSLVSFKALIEESEMKKFPDNDLLRHLRLVTQDAEKCASVAQQLLNGKRQTRYRSGGGKSQNQLTVNELRQFVTQLYALPCVLSQTPLLKDLLNRVEDFQQHSQKLLSEETPSAAELQDLLDVSFEFDVELPQLAEMRIRLEQARWLEEVQQACLDPSSLTLDDMRRLIDLGVGLAPYSAVEKAMARLQELLTVSEHWDDKAKSLLKARPRHSLNSLATAVKEIEEIPAYLPNGAALKDSVQRARDWLQDVEGLQAGGRVPVLDTLIELVTRGRSIPVHLNSLPRLETLVAEVQAWKECAVNTFLTENSPYSLLEVLCPRCDIGLLGLKRKQRKLKEPLPNGKKKSTKLESLSDLERALTESKETASAMATLGEARLREMEALQSLRLANEGKLLSPLQDVDIKICLCQKAPAAPMIQCELCRDAFHTSCVAVPSISQGLRIWLCPHCRRSEKPPLEKILPLLASLQRIRVRLPEGDALRYMIERTVNWQHRAQQLLSSGNLKFVQDRVGSGLLYSRWQASAGQVSDTNKVSQPPGTTSFSLPDDWDNRTSYLHSPFSTGRSCIPLHGVSPEVNELLMEAQLLQVSLPEIQELYQTLLAKPSPAQQTDRSSPVRPSSEKNDCCRGKRDGINSLERKLKRRLEREGLSSERWERVKKMRTP

SEQ ID NO: 47747 - protein, 1580 aa, Homo sapiens
  Payload ID: 9656
  Gene Symbol: KDM5B
  Gene Name: lysine (K)-specific demethylase 5B
  Uniprot ID: Q9UGL1
  ENSP ID: ENSP00000356233
MEAATTLHPGPRPALPLGGPGPLGEFLPPPECPVFEPSWEEFADPFAFIHKIRPIAEQTGICKVRPPPDWQPPFACDVDKLHFTPRIQRLNELEAQTRVKLNFLDQIAKYWELQGSTLKIPHVERKILDLFQLNKLVAEEGGFAVVCKDRKWTKIATKMGFAPGKAVGSHIRGHYERILNPYNLFLSGDSLRCLQKPNLTTDTKDKEYKPHDIPQRQSVQPSETCPPARRAKRMRAERQSLAVLPRLECSGAILAHCNLRLLDSSNSSASASQAMNIKIEPEETTEARTHNLRRRMGCPTPKCENEKEMKSSIKQEPIERKDYIVENEKEKPKSRSKKATNAVDLYVCLLCGSGNDEDRLLLCDGCDDSYHTFCLIPPLHDVPKGDWRCPKCLAQECSKPQEAFGFEQAARDYTLRTFGEMADAFKSDYFNMPVHMVPTELVEKEFWRLVSTIEEDVTVEYGADIASKEFGSGFPVRDGKIKLSPEEEEYLDSGWNLNNMPVMEQSVLAHITADICGMKLPWLYVGMCFSSFCWHIEDHWSYSINYLHWGEPKTWYGVPGYAAEQLENVMKKLAPELFVSQPDLLHQLVTIMNPNTLMTHEVPVYRTNQCAGEFVITFPRAYHSGFNQGFNFAEAVNFCTVDWLPLGRQCVEHYRLLHRYCVFSHDEMICKMASKADVLDVVVASTVQKDMAIMIEDEKALRETVRKLGVIDSERMDFELLPDDERQCVKCKTTCFMSAISCSCKPGLLVCLHHVKELCSCPPYKYKLRYRYTLDDLYPMMNALKLRAESYNEWALNVNEALEAKINKKKSLVSFKALIEESEMKKFPDNDLLRHLRLVTQDAEKCASVAQQLLNGKRQTRYRSGGGKSQNQLTVNELRQFVTQLYALPCVLSQTPLLKDLLNRVEDFQQHSQKLLSEETPSAAELQDLLDVSFEFDVELPQLAEMRIRLEQARWLEEVQQACLDPSSLTLDDMRRLIDLGVGLAPYSAVEKAMARLQELLTVSEHWDDKAKSLLKARPRHSLNSLATAVKEIEEIPAYLPNGAALKDSVQRARDWLQDVEGLQAGGRVPVLDTLIELVTRGRSIPVHLNSLPRLETLVAEVQAWKECAVNTFLTENSPYSLLEVLCPRCDIGLLGLKRKQRKLKEPLPNGKKKSTKLESLSDLERALTESKETASAMATLGEARLREMEALQSLRLANEGKLLSPLQDVDIKICLCQKAPAAPMIQCELCRDAFHTSCVAVPSISQGLRIWLCPHCRRSEKPPLEKILPLLASLQRIRVRLPEGDALRYMIERTVNWQHRAQQLLSSGNLKFVQDRVGSGLLYSRWQASAGQVSDTNKVSQPPGTTSFSLPDDWDNRTSYLHSPFSTGRSCIPLHGVSPEVNELLMEAQLLQVSLPEIQELYQTLLAKPSPAQQTDRSSPVRPSSEKNDCCRGKRDGINSLERKLKRRLEREGLSSERWERVKKMRTPKKKKIKLSHPKDMNNFKLERERSYELVRSAETHSLPSDTSYSEQEDSEDEDAICPAVSCLQPEGDEVDWVQCDGSCNQWFHQVCVGVSPEMAEKEDYICVRCTVKDAPSRK

SEQ ID NO: 47748 - protein, 1544 aa, Homo sapiens
  Payload ID: 9656
  Gene Symbol: KDM5B
  Gene Name: lysine (K)-specific demethylase 5B
  Uniprot ID: Q9UGL1
  ENSP ID: ENSP00000356234
MEAATTLHPGPRPALPLGGPGPLGEFLPPPECPVFEPSWEEFADPFAFIHKIRPIAEQTGICKVRPPPDWQPPFACDVDKLHFTPRIQRLNELEAQTRVKLNFLDQIAKYWELQGSTLKIPHVERKILDLFQLNKLVAEEGGFAVVCKDRKWTKIATKMGFAPGKAVGSHIRGHYERILNPYNLFLSGDSLRCLQKPNLTTDTKDKEYKPHDIPQRQSVQPSETCPPARRAKRMRAEAMNIKIEPEETTEARTHNLRRRMGCPTPKCENEKEMKSSIKQEPIERKDYIVENEKEKPKSRSKKATNAVDLYVCLLCGSGNDEDRLLLCDGCDDSYHTFCLIPPLHDVPKGDWRCPKCLAQECSKPQEAFGFEQAARDYTLRTFGEMADAFKSDYFNMPVHMVPTELVEKEFWRLVSTIEEDVTVEYGADIASKEFGSGFPVRDGKIKLSPEEEEYLDSGWNLNNMPVMEQSVLAHITADICGMKLPWLYVGMCFSSFCWHIEDHWSYSINYLHWGEPKTWYGVPGYAAEQLENVMKKLAPELFVSQPDLLHQLVTIMNPNTLMTHEVPVYRTNQCAGEFVITFPRAYHSGFNQGFNFAEAVNFCTVDWLPLGRQCVEHYRLLHRYCVFSHDEMICKMASKADVLDVVVASTVQKDMAIMIEDEKALRETVRKLGVIDSERMDFELLPDDERQCVKCKTTCFMSAISCSCKPGLLVCLHHVKELCSCPPYKYKLRYRYTLDDLYPMMNALKLRAESYNEWALNVNEALEAKINKKKSLVSFKALIEESEMKKFPDNDLLRHLRLVTQDAEKCASVAQQLLNGKRQTRYRSGGGKSQNQLTVNELRQFVTQLYALPCVLSQTPLLKDLLNRVEDFQQHSQKLLSEETPSAAELQDLLDVSFEFDVELPQLAEMRIRLEQARWLEEVQQACLDPSSLTLDDMRRLIDLGVGLAPYSAVEKAMARLQELLTVSEHWDDKAKSLLKARPRHSLNSLATAVKEIEEIPAYLPNGAALKDSVQRARDWLQDVEGLQAGGRVPVLDTLIELVTRGRSIPVHLNSLPRLETLVAEVQAWKECAVNTFLTENSPYSLLEVLCPRCDIGLLGLKRKQRKLKEPLPNGKKKSTKLESLSDLERALTESKETASAMATLGEARLREMEALQSLRLANEGKLLSPLQDVDIKICLCQKAPAAPMIQCELCRDAFHTSCVAVPSISQGLRIWLCPHCRRSEKPPLEKILPLLASLQRIRVRLPEGDALRYMIERTVNWQHRAQQLLSSGNLKFVQDRVGSGLLYSRWQASAGQVSDTNKVSQPPGTTSFSLPDDWDNRTSYLHSPFSTGRSCIPLHGVSPEVNELLMEAQLLQVSLPEIQELYQTLLAKPSPAQQTDRSSPVRPSSEKNDCCRGKRDGINSLERKLKRRLEREGLSSERWERVKKMRTPKKKKIKLSHPKDMNNFKLERERSYELVRSAETHSLPSDTSYSEQEDSEDEDAICPAVSCLQPEGDEVDWVQCDGSCNQWFHQVCVGVSPEMAEKEDYICVRCTVKDAPSRK

SEQ ID NO: 47749 - protein, 77 aa, Homo sapiens
  Payload ID: 9656
  Gene Symbol: KDM5B
  Gene Name: lysine (K)-specific demethylase 5B
  ENSP ID: ENSP00000473481
ICKVRPPPDWQPPFACDVDKLHFTPRIQRLNELESRSVTQGGVQQHYPGSLQPLPPGFKSFSCLSLPSSWDYRPKLV

SEQ ID NO: 47750 - protein, 74 aa, Homo sapiens
  Payload ID: 9657
  Gene Symbol: KDM5C
  Gene Name: lysine (K)-specific demethylase 5C
  ENSP ID: ENSP00000344004
MEPGSDDFLPPPECPVFEPSWAEFRDPLGYIAKIRPIAEKSGICKIRPPASGIPALTPTPWGFLPCLFLYQAGV

SEQ ID NO: 47751 - protein, 1557 aa, Homo sapiens
  Payload ID: 9657
  Gene Symbol: KDM5C
  Gene Name: lysine (K)-specific demethylase 5C
  Uniprot ID: P41229
  ENSP ID: ENSP00000364528
MEPGSDDFLPPPECPVFEPSWAEFRDPLGYIAKIRPIAEKSGICKIRPPADWQPPFAVEVDNFRFTPRIQRLNELEAQTRVKLNYLDQIAKFWEIQGSSLKIPNVERRILDLYSLSKIVVEEGGYEAICKDRRWARVAQRLNYPPGKNIGSLLRSHYERIVYPYEMYQSGANLVQCNTRPFDNEEKDKEYKPHSIPLRQSVQPSKFNSYGRRAKRLQPDPEPTEEDIEKNPELKKLQIYGAGPKMMGLGLMAKDKTLRKKDKEGPECPPTVVVKEELGGDVKVESTSPKTFLESKEELSHSPEPCTKMTMRLRRNHSNAQFIESYVCRMCSRGDEDDKLLLCDGCDDNYHIFCLLPPLPEIPKGVWRCPKCVMAECKRPPEAFGFEQATREYTLQSFGEMADSFKADYFNMPVHMVPTELVEKEFWRLVNSIEEDVTVEYGADIHSKEFGSGFPVSDSKRHLTPEEEEYATSGWNLNVMPVLEQSVLCHINADISGMKVPWLYVGMVFSAFCWHIEDHWSYSINYLHWGEPKTWYGVPSLAAEHLEEVMKKLTPELFDSQPDLLHQLVTLMNPNTLMSHGVPVVRTNQCAGEFVITFPRAYHSGFNQGYNFAEAVNFCTADWLPAGRQCIEHYRRLRRYCVFSHEELICKMAACPEKLDLNLAAAVHKEMFIMVQEERRLRKALLEKGITEAEREAFELLPDDERQCIKCKTTCFLSALACYDCPDGLVCLSHINDLCKCSSSRQYLRYRYTLDELPAMLHKLKVRAESFDTWANKVRVALEVEDGRKRSLEELRALESEARERRFPNSELLQQLKNCLSEAEACVSRALGLVSGQEAGPHRVAGLQMTLTELRAFLDQMNNLPCAMHQIGDVKGVLEQVEAYQAEAREALASLPSSPGLLQSLLERGRQLGVEVPEAQQLQRQVEQARWLDEVKRTLAPSARRGTLAVMRGLLVAGASVAPSPAVDKAQAELQELLTIAERWEEKAHLCLEARQKHPPATLEAIIREAENIPVHLPNIQALKEALAKARAWIADVDEIQNGDHYPCLDDLEGLVAVGRDLPVGLEELRQLELQVLTAHSWREKASKTFLKKNSCYTLLEVLCPCADAGSDSTKRSRWMEKELGLYKSDTELLGLSAQDLRDPGSVIVAFKEGEQKEKEGILQLRRTNSAKPSPLASSSTASSTTSICVCGQVLAGAGALQCDLCQDWFHGRCVSVPRLLSSPRPNPTSSPLLAWWEWDTKFLCPLCMRSRRPRLETILALLVALQRLPVRLPEGEALQCLTERAISWQGRARQALASEDVTALLGRLAELRQRLQAEPRPEEPPNYPAAPASDPLREGSGKDMPKVQGLLENGDSVTSPEKVAPEEGSDLELLSSLLPQLTGPVLELPEATRAPLEELMMEGDLLEVTLDENHSIWQLLQAGQPPDLERIRTLLELEKAERHGSRARGRALERRRRRKVDRGGEGDDPAREELEPKRVRSSGPEAEEVQEEEELEEETGGEGPPAPIPTTGSPSTQENQNGLEPAEGTTSGPSAPFSTLTPRLHLPCPQQPPQQQL

SEQ ID NO: 47752 - protein, 1516 aa, Homo sapiens
  Payload ID: 9657
  Gene Symbol: KDM5C
  Gene Name: lysine (K)-specific demethylase 5C
  Uniprot ID: P41229
  ENSP ID: ENSP00000364532
MEPGSDDFLPPPECPVFEPSWAEFRDPLGYIAKIRPIAEKSGICKIRPPADWQPPFAVEVDNFRFTPRIQRLNELEIVVEEGGYEAICKDRRWARVAQRLNYPPGKNIGSLLRSHYERIVYPYEMYQSGANLVQCNTRPFDNEEKDKEYKPHSIPLRQSVQPSKFNSYGRRAKRLQPDPEPTEEDIEKNPELKKLQIYGAGPKMMGLGLMAKDKTLRKKDKEGPECPPTVVVKEELGGDVKVESTSPKTFLESKEELSHSPEPCTKMTMRLRRNHSNAQFIESYVCRMCSRGDEDDKLLLCDGCDDNYHIFCLLPPLPEIPKGVWRCPKCVMAECKRPPEAFGFEQATREYTLQSFGEMADSFKADYFNMPVHMVPTELVEKEFWRLVNSIEEDVTVEYGADIHSKEFGSGFPVSDSKRHLTPEEEEYATSGWNLNVMPVLEQSVLCHINADISGMKVPWLYVGMVFSAFCWHIEDHWSYSINYLHWGEPKTWYGVPSLAAEHLEEVMKKLTPELFDSQPDLLHQLVTLMNPNTLMSHGVPVVRTNQCAGEFVITFPRAYHSGFNQGYNFAEAVNFCTADWLPAGRQCIEHYRRLRRYCVFSHEELICKMAACPEKLDLNLAAAVHKEMFIMVQEERRLRKALLEKGITEAEREAFELLPDDERQCIKCKTTCFLSALACYDCPDGLVCLSHINDLCKCSSSRQYLRYRYTLDELPAMLHKLKVRAESFDTWANKVRVALEVEDGRKRSLEELRALESEARERRFPNSELLQQLKNCLSEAEACVSRALGLVSGQEAGPHRVAGLQMTLTELRAFLDQMNNLPCAMHQIGDVKGVLEQVEAYQAEAREALASLPSSPGLLQSLLERGRQLGVEVPEAQQLQRQVEQARWLDEVKRTLAPSARRGTLAVMRGLLVAGASVAPSPAVDKAQAELQELLTIAERWEEKAHLCLEARQKHPPATLEAIIREAENIPVHLPNIQALKEALAKARAWIADVDEIQNGDHYPCLDDLEGLVAVGRDLPVGLEELRQLELQVLTAHSWREKASKTFLKKNSCYTLLEVLCPCADAGSDSTKRSRWMEKELGLYKSDTELLGLSAQDLRDPGSVIVAFKEGEQKEKEGILQLRRTNSAKPSPLASSSTASSTTSICVCGQVLAGAGALQCDLCQDWFHGRCVSVPRLLSSPRPNPTSSPLLAWWEWDTKFLCPLCMRSRRPRLETILALLVALQRLPVRLPEGEALQCLTERAISWQGRARQALASEDVTALLGRLAELRQRLQAEPRPEEPPNYPAAPASDPLREGSGKDMPKVQGLLENGDSVTSPEKVAPEEGSDLELLSSLLPQLTGPVLELPEATRAPLEELMMEGDLLEVTLDENHSIWQLLQAGQPPDLERIRTLLELEKAERHGSRARGRALERRRRRKVDRGGEGDDPAREELEPKRVRSSGPEAEEVQEEEELEEETGGEGPPAPIPTTGSPSTQENQNGLEPAEGTTSGPSAPFSTLTPRLHLPCPQQPPQQQL

SEQ ID NO: 47753 - protein, 1560 aa, Homo sapiens
  Payload ID: 9657
  Gene Symbol: KDM5C
  Gene Name: lysine (K)-specific demethylase 5C
  Uniprot ID: P41229
  ENSP ID: ENSP00000364550
MEPGSDDFLPPPECPVFEPSWAEFRDPLGYIAKIRPIAEKSGICKIRPPADWQPPFAVEVDNFRFTPRIQRLNELEAQTRVKLNYLDQIAKFWEIQGSSLKIPNVERRILDLYSLSKIVVEEGGYEAICKDRRWARVAQRLNYPPGKNIGSLLRSHYERIVYPYEMYQSGANLVQCNTRPFDNEEKDKEYKPHSIPLRQSVQPSKFNSYGRRAKRLQPDPEPTEEDIEKNPELKKLQIYGAGPKMMGLGLMAKDKTLRKKDKEGPECPPTVVVKEELGGDVKVESTSPKTFLESKEELSHSPEPCTKMTMRLRRNHSNAQFIESYVCRMCSRGDEDDKLLLCDGCDDNYHIFCLLPPLPEIPKGVWRCPKCVMAECKRPPEAFGFEQATREYTLQSFGEMADSFKADYFNMPVHMVPTELVEKEFWRLVNSIEEDVTVEYGADIHSKEFGSGFPVSDSKRHLTPEEEEYATSGWNLNVMPVLEQSVLCHINADISGMKVPWLYVGMVFSAFCWHIEDHWSYSINYLHWGEPKTWYGVPSLAAEHLEEVMKKLTPELFDSQPDLLHQLVTLMNPNTLMSHGVPVVRTNQCAGEFVITFPRAYHSGFNQGYNFAEAVNFCTADWLPAGRQCIEHYRRLRRYCVFSHEELICKMAACPEKLDLNLAAAVHKEMFIMVQEERRLRKALLEKGITEAEREAFELLPDDERQCIKCKTTCFLSALACYDCPDGLVCLSHINDLCKCSSSRQYLRYRYTLDELPAMLHKLKVRAESFDTWANKVRVALEVEDGRKRSLEELRALESEARERRFPNSELLQQLKNCLSEAEACVSRALGLVSGQEAGPHRVAGLQMTLTELRAFLDQMNNLPCAMHQIGDVKGVLEQVEAYQAEAREALASLPSSPGLLQSLLERGRQLGVEVPEAQQLQRQVEQARWLDEVKRTLAPSARRGTLAVMRGLLVAGASVAPSPAVDKAQAELQELLTIAERWEEKAHLCLEARQKHPPATLEAIIREAENIPVHLPNIQALKEALAKARAWIADVDEIQNGDHYPCLDDLEGLVAVGRDLPVGLEELRQLELQVLTAHSWREKASKTFLKKNSCYTLLEVLCPCADAGSDSTKRSRWMEKELGLYKSDTELLGLSAQDLRDPGSVIVAFKEGEQKEKEGILQLRRTNSAKPSPLASSSTASSTTSICVCGQVLAGAGALQCDLCQDWFHGRCVSVPRLLSSPRPNPTSSPLLAWWEWDTKFLCPLCMRSRRPRLETILALLVALQRLPVRLPEGEALQCLTERAISWQGRARQALASEDVTALLGRLAELRQRLQAEPRPEEPPNYPAAPASDPLREGSGKDMPKVQGLLENGDSVTSPEKVAPEEGSGKRDLELLSSLLPQLTGPVLELPEATRAPLEELMMEGDLLEVTLDENHSIWQLLQAGQPPDLERIRTLLELEKAERHGSRARGRALERRRRRKVDRGGEGDDPAREELEPKRVRSSGPEAEEVQEEEELEEETGGEGPPAPIPTTGSPSTQENQNGLEPAEGTTSGPSAPFSTLTPRLHLPCPQQPPQQQL

SEQ ID NO: 47754 - protein, 1559 aa, Homo sapiens
  Payload ID: 9657
  Gene Symbol: KDM5C
  Gene Name: lysine (K)-specific demethylase 5C
  Uniprot ID: P41229
  ENSP ID: ENSP00000385394
MEPGSDDFLPPPECPVFEPSWAEFRDPLGYIAKIRPIAEKSGICKIRPPADWQPPFAVEVDNFRFTPRIQRLNELEAQTRVKLNYLDQIAKFWEIQGSSLKIPNVERRILDLYSLSKIVVEEGGYEAICKDRRWARVAQRLNYPPGKNIGSLLRSHYERIVYPYEMYQSGANLVCNTRPFDNEEKDKEYKPHSIPLRQSVQPSKFNSYGRRAKRLQPDPEPTEEDIEKNPELKKLQIYGAGPKMMGLGLMAKDKTLRKKDKEGPECPPTVVVKEELGGDVKVESTSPKTFLESKEELSHSPEPCTKMTMRLRRNHSNAQFIESYVCRMCSRGDEDDKLLLCDGCDDNYHIFCLLPPLPEIPKGVWRCPKCVMAECKRPPEAFGFEQATREYTLQSFGEMADSFKADYFNMPVHMVPTELVEKEFWRLVNSIEEDVTVEYGADIHSKEFGSGFPVSDSKRHLTPEEEEYATSGWNLNVMPVLEQSVLCHINADISGMKVPWLYVGMVFSAFCWHIEDHWSYSINYLHWGEPKTWYGVPSLAAEHLEEVMKKLTPELFDSQPDLLHQLVTLMNPNTLMSHGVPVVRTNQCAGEFVITFPRAYHSGFNQGYNFAEAVNFCTADWLPAGRQCIEHYRRLRRYCVFSHEELICKMAACPEKLDLNLAAAVHKEMFIMVQEERRLRKALLEKGITEAEREAFELLPDDERQCIKCKTTCFLSALACYDCPDGLVCLSHINDLCKCSSSRQYLRYRYTLDELPAMLHKLKVRAESFDTWANKVRVALEVEDGRKRSLEELRALESEARERRFPNSELLQQLKNCLSEAEACVSRALGLVSGQEAGPHRVAGLQMTLTELRAFLDQMNNLPCAMHQIGDVKGVLEQVEAYQAEAREALASLPSSPGLLQSLLERGRQLGVEVPEAQQLQRQVEQARWLDEVKRTLAPSARRGTLAVMRGLLVAGASVAPSPAVDKAQAELQELLTIAERWEEKAHLCLEARQKHPPATLEAIIREAENIPVHLPNIQALKEALAKARAWIADVDEIQNGDHYPCLDDLEGLVAVGRDLPVGLEELRQLELQVLTAHSWREKASKTFLKKNSCYTLLEVLCPCADAGSDSTKRSRWMEKELGLYKSDTELLGLSAQDLRDPGSVIVAFKEGEQKEKEGILQLRRTNSAKPSPLASSSTASSTTSICVCGQVLAGAGALQCDLCQDWFHGRCVSVPRLLSSPRPNPTSSPLLAWWEWDTKFLCPLCMRSRRPRLETILALLVALQRLPVRLPEGEALQCLTERAISWQGRARQALASEDVTALLGRLAELRQRLQAEPRPEEPPNYPAAPASDPLREGSGKDMPKVQGLLENGDSVTSPEKVAPEEGSGKRDLELLSSLLPQLTGPVLELPEATRAPLEELMMEGDLLEVTLDENHSIWQLLQAGQPPDLERIRTLLELEKAERHGSRARGRALERRRRRKVDRGGEGDDPAREELEPKRVRSSGPEAEEVQEEEELEEETGGEGPPAPIPTTGSPSTQENQNGLEPAEGTTSGPSAPFSTLTPRLHLPCPQQPPQQQL

SEQ ID NO: 47755 - protein, 99 aa, Homo sapiens
  Payload ID: 9657
  Gene Symbol: KDM5C
  Gene Name: lysine (K)-specific demethylase 5C
  ENSP ID: ENSP00000407277
MEPGSDDFLPPPECPVFEPSWAEFRDPLGYIAKIRPIAEKSGICKIRPPADWQPPFAVEVDNFRFTPRIQRLNELEFQLLRRLRQEDHLSPGGQVYSQP

SEQ ID NO: 47756 - protein, 53 aa, Homo sapiens
  Payload ID: 9657
  Gene Symbol: KDM5C
  Gene Name: lysine (K)-specific demethylase 5C
  ENSP ID: ENSP00000409757
MEPGSDDFLPPPECPVFEPSWAEFRDPLGYIAKIRPIAEKSGICKIRPPAAGV

SEQ ID NO: 47757 - protein, 1379 aa, Homo sapiens
  Payload ID: 9657
  Gene Symbol: KDM5C
  Gene Name: lysine (K)-specific demethylase 5C
  Uniprot ID: P41229
  ENSP ID: ENSP00000445176
MEPGSDDFLPPPECPVFEPSWAEFRDPLGYIAKIRPIAEKSGICKIRPPAIVVEEGGYEAICKDRRWARVAQRLNYPPGKNIGSLLRSHYERIVYPYEMYQSGANLVQCNTRPFDNEEKDKEYKPHSIPLRQSVQPSKFNSYGRRAKRLQPDPEPTEEDIEKNPELKKLQIYGAGPKMMGLGLMAKDKTLRKKDKEGPECPPTVVVKEELGGDVKVESTSPKTFLESKEELSHSPEPCTKMTMRLRRNHSNAQFIESYVCRMCSRGDEDDKLLLCDGCDDNYHIFCLLPPLPEIPKGVWRCPKCVMAECKRPPEAFGFEQATREYTLQSFGEMADSFKADYFNMPVHMVPTELVEKEFWRLVNSIEEDVTVEYGADIHSKEFGSGFPVSDSKRHLTPEEEEYATSGWNLNVMPVLEQSVLCHINADISGMKVPWLYVGMVFSAFCWHIEDHWSYSINYLHWGEPKTWYGVPSLAAEHLEEVMKKLTPELFDSQPDLLHQLVTLMNPNTLMSHGVPVVRTNQCAGEFVITFPRAYHSGFNQGYNFAEAVNFCTADWLPAGRQCIEHYRRLRRYCVFSHEELICKMAACPEKLDLNLAAAVHKEMFIMVQEERRLRKALLEKGITEAEREAFELLPDDERQCIKCKTTCFLSALACYDCPDGLVCLSHINDLCKCSSSRQYLRYRYTLDELPAMLHKLKVRAESFDTWANKVRVALEVEDGRKRSLEELRALESEARERRFPNSELLQQLKNCLSEAEACVSRALGLVSGQEAGPHRVAGLQMTLTELRAFLDQMNNLPCAMHQIGDVKGVLEQVEAYQAEAREALASLPSSPGLLQSLLERGRQLGVEVPEAQQLQRQVEQARWLDEVKRTLAPSARRGTLAVMRGLLVAGASVAPSPAVDKAQAELQELLTIAERWEEKAHLCLEARQKHPPATLEAIIREAENIPVHLPNIQALKEALAKARAWIADVDEIQNGDHYPCLDDLEGLVAVGRDLPVGLEELRQLELQVLTAHSWREKASKTFLKKNSCYTLLEVLCPCADAGSDSTKRSRWMEKELGLYKSDTELLGLSAQDLRDPGSVIVAFKEGEQKEKEGILQLRRTNSAKPSPLASSSTASSTTSICVCGQVLAGAGALQCDLCQDWFHGRCVSVPRLLSSPRPNPTSSPLLAWWEWDTKFLCPLCMRSRRPRLETILALLVALQRLPVRLPEGEALQCLTERAISWQGRARQALASEDVTALLGRLAELRQRLQAEPRPEEPPNYPAAPASDPLREGSGKDMPKVQGLLENGDSVTSPEKVAPEEGSDLELLSSLLPQLTGPVLELPEATRAPLEELMMEGDLLEVTLDENHSIPESLDFCILTPRYCSDLSSWGPAPGVFPPW

SEQ ID NO: 47758 - protein, 1539 aa, Homo sapiens
  Payload ID: 9658
  Gene Symbol: KDM5D
  Gene Name: lysine (K)-specific demethylase 5D
  Uniprot ID: Q9BY66
  ENSP ID: ENSP00000322408
MEPGCDEFLPPPECPVFEPSWAEFQDPLGYIAKIRPIAEKSGICKIRPPADWQPPFAVEVDNFRFTPRVQRLNELEAQTRVKLNYLDQIAKFWEIQGSSLKIPNVERKILDLYSLSKIVIEEGGYEAICKDRRWARVAQRLHYPPGKNIGSLLRSHYERIIYPYEMFQSGANHVQCNTHPFDNEVKDKEYKPHSIPLRQSVQPSKFSSYSRRAKRLQPDPEPTEEDIEKHPELKKLQIYGPGPKMMGLGLMAKDKDKTVHKKVTCPPTVTVKDEQSGGGNVSSTLLKQHLSLEPCTKTTMQLRKNHSSAQFIDSYICQVCSRGDEDDKLLFCDGCDDNYHIFCLLPPLPEIPRGIWRCPKCILAECKQPPEAFGFEQATQEYSLQSFGEMADSFKSDYFNMPVHMVPTELVEKEFWRLVSSIEEDVTVEYGADIHSKEFGSGFPVSNSKQNLSPEEKEYATSGWNLNVMPVLDQSVLCHINADISGMKVPWLYVGMVFSAFCWHIEDHWSYSINYLHWGEPKTWYGVPSLAAEHLEEVMKMLTPELFDSQPDLLHQLVTLMNPNTLMSHGVPVVRTNQCAGEFVITFPRAYHSGFNQGYNFAEAVNFCTADWLPAGRQCIEHYRRLRRYCVFSHEELICKMAAFPETLDLNLAVAVHKEMFIMVQEERRLRKALLEKGVTEAEREAFELLPDDERQCIKCKTTCFLSALACYDCPDGLVCLSHINDLCKCSSSRQYLRYRYTLDELPTMLHKLKIRAESFDTWANKVRVALEVEDGRKRSFEELRALESEARERRFPNSELLQRLKNCLSEVEACIAQVLGLVSGQVARMDTPQLTLTELRVLLEQMGSLPCAMHQIGDVKDVLEQVEAYQAEAREALATLPSSPGLLRSLLERGQQLGVEVPEAHQLQQQVEQAQWLDEVKQALAPSAHRGSLVIMQGLLVMGAKIASSPSVDKARAELQELLTIAERWEEKAHFCLEARQKHPPATLEAIIRETENIPVHLPNIQALKEALTKAQAWIADVDEIQNGDHYPCLDDLEGLVAVGRDLPVGLEELRQLELQVLTAHSWREKASKTFLKKNSCYTLLEVLCPCADAGSDSTKRSRWMEKALGLYQCDTELLGLSAQDLRDPGSVIVAFKEGEQKEKEGILQLRRTNSAKPSPLAPSLMASSPTSICVCGQVPAGVGVLQCDLCQDWFHGQCVSVPHLLTSPKPSLTSSPLLAWWEWDTKFLCPLCMRSRRPRLETILALLVALQRLPVRLPEGEALQCLTERAIGWQDRARKALASEDVTALLRQLAELRQQLQAKPRPEEASVYTSATACDPIREGSGNNISKVQGLLENGDSVTSPENMAPGKGSDLELLSSLLPQLTGPVLELPEAIRAPLEELMMEGDLLEVTLDENHSIWQLLQAGQPPDLDRIRTLLELEKFEHQGSRTRSRALERRRRRQKVDQGRNVENLVQQELQSKRARSSGIMSQVGREEEHYQEKADRENMFLTPSTDHSPFLKGNQNSLQHKDSGSSAACPSLMPLLQLSYSDEQQL

SEQ ID NO: 47759 - protein, 1482 aa, Homo sapiens
  Payload ID: 9658
  Gene Symbol: KDM5D
  Gene Name: lysine (K)-specific demethylase 5D
  Uniprot ID: Q9BY66
  ENSP ID: ENSP00000372256
MEPGCDEFLPPPECPVFEPSWAEFQDPLGYIAKIRPIAEKSGICKIRPPADWQPPFAVEVDNFRFTPRVQRLNELEAQTRVKLNYLDQIAKFWEIQGSSLKIPNVERKILDLYSLSKQCNTHPFDNEVKDKEYKPHSIPLRQSVQPSKFSSYSRRAKRLQPDPEPTEEDIEKHPELKKLQIYGPGPKMMGLGLMAKDKDKTVHKKVTCPPTVTVKDEQSGGGNVSSTLLKQHLSLEPCTKTTMQLRKNHSSAQFIDSYICQVCSRGDEDDKLLFCDGCDDNYHIFCLLPPLPEIPRGIWRCPKCILAECKQPPEAFGFEQATQEYSLQSFGEMADSFKSDYFNMPVHMVPTELVEKEFWRLVSSIEEDVTVEYGADIHSKEFGSGFPVSNSKQNLSPEEKEYATSGWNLNVMPVLDQSVLCHINADISGMKVPWLYVGMVFSAFCWHIEDHWSYSINYLHWGEPKTWYGVPSLAAEHLEEVMKMLTPELFDSQPDLLHQLVTLMNPNTLMSHGVPVVRTNQCAGEFVITFPRAYHSGFNQGYNFAEAVNFCTADWLPAGRQCIEHYRRLRRYCVFSHEELICKMAAFPETLDLNLAVAVHKEMFIMVQEERRLRKALLEKGVTEAEREAFELLPDDERQCIKCKTTCFLSALACYDCPDGLVCLSHINDLCKCSSSRQYLRYRYTLDELPTMLHKLKIRAESFDTWANKVRVALEVEDGRKRSFEELRALESEARERRFPNSELLQRLKNCLSEVEACIAQVLGLVSGQVARMDTPQLTLTELRVLLEQMGSLPCAMHQIGDVKDVLEQVEAYQAEAREALATLPSSPGLLRSLLERGQQLGVEVPEAHQLQQQVEQAQWLDEVKQALAPSAHRGSLVIMQGLLVMGAKIASSPSVDKARAELQELLTIAERWEEKAHFCLEARQKHPPATLEAIIRETENIPVHLPNIQALKEALTKAQAWIADVDEIQNGDHYPCLDDLEGLVAVGRDLPVGLEELRQLELQVLTAHSWREKASKTFLKKNSCYTLLEVLCPCADAGSDSTKRSRWMEKALGLYQCDTELLGLSAQDLRDPGSVIVAFKEGEQKEKEGILQLRRTNSAKPSPLAPSLMASSPTSICVCGQVPAGVGVLQCDLCQDWFHGQCVSVPHLLTSPKPSLTSSPLLAWWEWDTKFLCPLCMRSRRPRLETILALLVALQRLPVRLPEGEALQCLTERAIGWQDRARKALASEDVTALLRQLAELRQQLQAKPRPEEASVYTSATACDPIREGSGNNISKVQGLLENGDSVTSPENMAPGKGSDLELLSSLLPQLTGPVLELPEAIRAPLEELMMEGDLLEVTLDENHSIWQLLQAGQPPDLDRIRTLLELEKFEHQGSRTRSRALERRRRRQKVDQGRNVENLVQQELQSKRARSSGIMSQVGREEEHYQEKADRENMFLTPSTDHSPFLKGNQNSLQHKDSGSSAACPSLMPLLQLSYSDEQQL

SEQ ID NO: 47760 - protein, 293 aa, Homo sapiens
  Payload ID: 9658
  Gene Symbol: KDM5D
  Gene Name: lysine (K)-specific demethylase 5D
  ENSP ID: ENSP00000389433
LPNIQALKEALTKAQAWIADVDEIQNGDHYPCLDDLEGLVAVGRDLPVGLEELRQLELQVLCPCADAGSDSTKRSRWMEKALGLYQCDTELLGLSAQDLRDPGSVIVAFKEGEQKEKEGILQLRRTNSAKPSPLAPSLMASSPTSICVCGQVPAGVGVLQCDLCQDWFHGQCVSVPHLLTSPKPSLTSSPLLAWWEWDTKFLCPLCMRSRRPRLETILALLVALQRLPVRLPEGEALQCLTERAIGWQDRARKALASEDVTALLRQLAELRQQLQAKPRPEEASVYTSATACD

SEQ ID NO: 47761 - protein, 1476 aa, Homo sapiens
  Payload ID: 9658
  Gene Symbol: KDM5D
  Gene Name: lysine (K)-specific demethylase 5D
  ENSP ID: ENSP00000398543
MEPGCDEFLPPPECPVFEPSWAEFQDPLGYIAKIRPIAEKSGICKIRPPADWQPPFAVEVDNFRFTPRVQRLNELEIVIEEGGYEAICKDRRWARVAQRLHYPPGKNIGSLLRSHYERIIYPYEMFQSGANHVQCNTHPFDNEVKDKEYKPHSIPLRQSVQPSKFSSYSRRAKRLQPDPEPTEEDIEKHPELKKLQIYGPGPKMMGLGLMAKDKDKTVHKKVTCPPTVTVKDEQSGGGNVSSTLLKQHLSLEPCTKTTMQLRKNHSSAQFIDSYICQVCSRGDEDDKLLFCDGCDDNYHIFCLLPPLPEIPRGIWRCPKCILAECKQPPEAFGFEQATQEYSLQSFGEMADSFKSDYFNMPVHMVPTELVEKEFWRLVSSIEEDVTVEYGADIHSKEFGSGFPVSNSKQNLSPEEKEYATSGWNLNVMPVLDQSVLCHINADISGMKVPWLYVGMVFSAFCWHIEDHWSYSINYLHWGEPKTWYGVPSLAAEHLEEVMKMLTPELFDSQPDLLHQLVTLMNPNTLMSHGVPVVRTNQCAGEFVITFPRAYHSGFNQGYNFAEAVNFCTADWLPAGRQCIEHYRRLRRYCVFSHEELICKMAAFPETLDLNLAVAVHKEMFIMVQEERRLRKALLEKGVTEAEREAFELLPDDERQCIKCKTTCFLSALACYDCPDGLVCLSHINDLCKCSSSRQYLRYRYTLDELPTMLHKLKIRAESFDTWANKVRVALEVEDGRKRSFEELRALESEARERRFPNSELLQRLKNCLSEVEACIAQVLGLVSGQVARMDTPQLTLTELRVLLEQMGSLPCAMHQIGDVKDVLEQVEAYQAEAREALATLPSSPGLLRSLLERGQQLGVEVPEAHQLQQQVEQAQWLDEVKQALAPSAHRGSLVIMQGLLVMGAKIASSPSVDKARAELQELLTIAERWEEKAHFCLEARQKHPPATLEAIIRETENIPVHLPNIQALKEALTKAQAWIADVDEIQNGDHYPCLDDLEGLVAVGRDLPVGLEELRQLELQVLTAHSWREKASKTFLKKNSCYTLLEVLCPCADAGSDSTKRSRWMEKALGLYQCDTELLGLSAQDLRDPGSVIVAFKEGEQKEKEGILQLRRTNSAKPSPLAPSLMASSPTSICVCGQVPAGVGVLQCDLCQDWFHGQCVSVPHLLTSPKPSLTSSPLLAWWEWDTKFLCPLCMRSRRPRLETILALLVALQRLPVRLPEGEALQCLTERAIGWQDRARKALASEDVTALLRQLAELRQQLQAKPRPEEASVYTSATACDPIREGSGNNISKVQGLLENGDSVTSPENMAPGKGSDLELLSSLLPQLTGPVLELPEAIRAPLEELMMEGDLLEVTLDENHSIWQLLQAGQPPDLDRIRTLLELEKFEHQGSRTRSRALERRRRRQKVDQGRNVENLVQQELQSKRARSSGIMSQVGREEEHYQEKADRENMFLTPSTDHSPFLKGNQNSLQHKDSG

SEQ ID NO: 47762 - protein, 425 aa, Homo sapiens
  Payload ID: 9658
  Gene Symbol: KDM5D
  Gene Name: lysine (K)-specific demethylase 5D
  ENSP ID: ENSP00000416377
MEPGCDEFLPPPECPVFEPSWAEFQDPLGYIAKIRPIAEKSGICKIRPPADWQPPFAVEVDNFRFTPRVQRLNELEAQTRVKLNYLDQIAKFWEIQGSSLKIPNVERKILDLYSLSKIVIEEGGYEAICKDRRWARVAQRLHYPPGKNIGSLLRSHYERIIYPYEMFQSGANHVPEPTEEDIEKHPELKKLQIYGPGPKMMGLGLMAKDKDKTVHKKVTCPPTVTVKDEQSGGGNVSSTLLKQHLSLEPCTKTTMQLRKNHSSAQFIDSYICQVCSRGDEDDKLLFCDGCDDNYHIFCLLPPLPEIPRGIWRCPKCILAECKQPPEAFGFEQATQEYSLQSFGEMADSFKSDYFNMPVHMVPTELVEKEFWRLVSSIEEDVTVEYGADIHSKEFGSGFPVSNSKQNLSPEEKEYATSGWNLNVMP

SEQ ID NO: 47763 - protein, 1570 aa, Homo sapiens
  Payload ID: 9658
  Gene Symbol: KDM5D
  Gene Name: lysine (K)-specific demethylase 5D
  Uniprot ID: Q9BY66
  ENSP ID: ENSP00000444293
MEPGCDEFLPPPECPVFEPSWAEFQDPLGYIAKIRPIAEKSGICKIRPPADWQPPFAVEVDNFRFTPRVQRLNELEAQTRVKLNYLDQIAKFWEIQGSSLKIPNVERKILDLYSLSKIVIEEGGYEAICKDRRWARVAQRLHYPPGKNIGSLLRSHYERIIYPYEMFQSGANHVQCNTHPFDNEVKDKEYKPHSIPLRQSVQPSKFSSYSRRAKRLQPDPEPTEEDIEKHPELKKLQIYGPGPKMMGLGLMAKDKDKTVHKKVTCPPTVTVKDEQSGGGNVSSTLLKQHLSLEPCTKTTMQLRKNHSSAQFIDSYICQVCSRGDEDDKLLFCDGCDDNYHIFCLLPPLPEIPRGIWRCPKCILAECKQPPEAFGFEQATQEYSLQSFGEMADSFKSDYFNMPVHMVPTELVEKEFWRLVSSIEEDVTVEYGADIHSKEFGSGFPVSNSKQNLSPEEKRQSLTVLTRLISSFWAQAVLPPWPPKVLGLQEYATSGWNLNVMPVLDQSVLCHINADISGMKVPWLYVGMVFSAFCWHIEDHWSYSINYLHWGEPKTWYGVPSLAAEHLEEVMKMLTPELFDSQPDLLHQLVTLMNPNTLMSHGVPVVRTNQCAGEFVITFPRAYHSGFNQGYNFAEAVNFCTADWLPAGRQCIEHYRRLRRYCVFSHEELICKMAAFPETLDLNLAVAVHKEMFIMVQEERRLRKALLEKGVTEAEREAFELLPDDERQCIKCKTTCFLSALACYDCPDGLVCLSHINDLCKCSSSRQYLRYRYTLDELPTMLHKLKIRAESFDTWANKVRVALEVEDGRKRSFEELRALESEARERRFPNSELLQRLKNCLSEVEACIAQVLGLVSGQVARMDTPQLTLTELRVLLEQMGSLPCAMHQIGDVKDVLEQVEAYQAEAREALATLPSSPGLLRSLLERGQQLGVEVPEAHQLQQQVEQAQWLDEVKQALAPSAHRGSLVIMQGLLVMGAKIASSPSVDKARAELQELLTIAERWEEKAHFCLEARQKHPPATLEAIIRETENIPVHLPNIQALKEALTKAQAWIADVDEIQNGDHYPCLDDLEGLVAVGRDLPVGLEELRQLELQVLTAHSWREKASKTFLKKNSCYTLLEVLCPCADAGSDSTKRSRWMEKALGLYQCDTELLGLSAQDLRDPGSVIVAFKEGEQKEKEGILQLRRTNSAKPSPLAPSLMASSPTSICVCGQVPAGVGVLQCDLCQDWFHGQCVSVPHLLTSPKPSLTSSPLLAWWEWDTKFLCPLCMRSRRPRLETILALLVALQRLPVRLPEGEALQCLTERAIGWQDRARKALASEDVTALLRQLAELRQQLQAKPRPEEASVYTSATACDPIREGSGNNISKVQGLLENGDSVTSPENMAPGKGSDLELLSSLLPQLTGPVLELPEAIRAPLEELMMEGDLLEVTLDENHSIWQLLQAGQPPDLDRIRTLLELEKFEHQGSRTRSRALERRRRRQKVDQGRNVENLVQQELQSKRARSSGIMSQVGREEEHYQEKADRENMFLTPSTDHSPFLKGNQNSLQHKDSGSSAACPSLMPLLQLSYSDEQQL

SEQ ID NO: 47764 - protein, 1401 aa, Homo sapiens
  Payload ID: 9659
  Gene Symbol: KDM6A
  Gene Name: lysine (K)-specific demethylase 6A
  Uniprot ID: O15550
  ENSP ID: ENSP00000367203
MKSCGVSLATAAAAAAAFGDEEKKMAAGKASGESEEASPSLTAEEREALGGLDSRLFGFVRFHEDGARTKALLGKAVRCYESLILKAEGKVESDFFCQLGHFNLLLEDYPKALSAYQRYYSLQSDYWKNAAFLYGLGLVYFHYNAFQWAIKAFQEVLYVDPSFCRAKEIHLRLGLMFKVNTDYESSLKHFQLALVDCNPCTLSNAEIQFHIAHLYETQRKYHSAKEAYEQLLQTENLSAQVKATVLQQLGWMHHTVDLLGDKATKESYAIQYLQKSLEADPNSGQSWYFLGRCYSSIGKVQDAFISYRQSIDKSEASADTWCSIGVLYQQQNQPMDALQAYICAVQLDHGHAAAWMDLGTLYESCNQPQDAIKCYLNATRSKSCSNTSALAARIKYLQAQLCNLPQGSLQNKTKLLPSIEEAWSLPIPAELTSRQGAMNTAQQNTSDNWSGGHAVSHPPVQQQAHSWCLTPQKLQHLEQLRANRNNLNPAQKLMLEQLESQFVLMQQHQMRPTGVAQVRSTGIPNGPTADSSLPTNSVSGQQPQLALTRVPSVSQPGVRPACPGQPLANGPFSAGHVPCSTSRTLGSTDTILIGNNHITGSGSNGNVPYLQRNALTLPHNRTNLTSSAEEPWKNQLSNSTQGLHKGQSSHSAGPNGERPLSSTGPSQHLQAAGSGIQNQNGHPTLPSNSVTQGAALNHLSSHTATSGGQQGITLTKESKPSGNILTVPETSRHTGETPNSTASVEGLPNHVHQMTADAVCSPSHGDSKSPGLLSSDNPQLSALLMGKANNNVGTGTCDKVNNIHPAVHTKTDNSVASSPSSAISTATPSPKSTEQTTTNSVTSLNSPHSGLHTINGEGMEESQSPMKTDLLLVNHKPSPQIIPSMSVSIYPSSAEVLKACRNLGKNGLSNSSILLDKCPPPRPPSSPYPPLPKDKLNPPTPSIYLENKRDAFFPPLHQFCTNPNNPVTVIRGLAGALKLDLGLFSTKTLVEANNEHMVEVRTQLLQPADENWDPTGTKKIWHCESNRSHTTIAKYAQYQASSFQESLREENEKRSHHKDHSDSESTSSDNSGRRRKGPFKTIKFGTNIDLSDDKKWKLQLHELTKLPAFVRVVSAGNLLSHVGHTILGMNTVQLYMKVPGSRTPGHQENNNFCSVNINIGPGDCEWFVVPEGYWGVLNDFCEKNNLNFLMGSWWPNLEDLYEANVPVYRFIQRPGDLVWINAGTVHWVQAIGWCNNIAWNVGPLTACQYKLAVERYEWNKLQSVKSIVPMVHLSWNMARNIKVSDPKLFEMIKYCLLRTLKQCQTLREALIAAGKEIIWHGRTKEEPAHYCSICEVEVFDLLFVTNESNSRKTYIVHCQDCARKTSGNLENFVVLEQYKMEDLMQVYDQFTLAPPLPSASS

SEQ ID NO: 47765 - protein, 1384 aa, Homo sapiens
  Payload ID: 9659
  Gene Symbol: KDM6A
  Gene Name: lysine (K)-specific demethylase 6A
  ENSP ID: ENSP00000372355
MAAGKASGESEEASPSLTAEEREALGGLDSRLFGFVRFHEDGARTKALLGKAVRCYESLILKAEGKVESDFFCQLGHFNLLLEDYPKALSAYQRYYSLQSDYWKNAAFLYGLGLVYFHYNAFQWAIKAFQEVLYVDPSFCRAKEIHLRLGLMFKVNTDYESSLKHFQLALVDCNPCTLSNAEIQFHIAHLYETQRKYHSAKEAYEQLLQTENLSAQVKATVLQQLGWMHHTVDLLGDKATKESYAIQYLQKSLEADPNSGQSWYFLGRCYSSIGKVQDAFISYRQSIDKSEASADTWCSIGVLYQQQNQPMDALQAYICAVQLDHGHAAAWMDLGTLYESCNQPQDAIKCYLNATRSKSCSNTSALAARIKYLQACKPHHPNTEPVLGLSQTPISQQSLPLHMIPSSQVDDLSSPAKRKRTSSPTKNTSDNWSGGHAVSHPPVQQQAHSWCLTPQKLQHLEQLRANRNNLNPAQKLMLEQLESQFVLMQQHQMRPTGVAQVRSTGIPNGPTADSSLPTNSVSGQQPQLALTRVPSVSQPGVRPACPGQPLANGPFSAGHVPCSTSRTLGSTDTILIGNNHITGSGSNGNVPYLQRNALTLPHNRTNLTSSAEEPWKNQLSNSTQGLHKGQSSHSAGPNGERPLSSTGPSQHLQAAGSGIQNQNGHPTLPSNSVTQGAALNHLSSHTATSGGQQGITLTKESKPSGNILTVPETSRHTGETPNSTASVEGLPNHVHQMTADAVCSPSHGDSKSPGLLSSDNPQLSALLMGKANNNVGTGTCDKVNNIHPAVHTKTDNSVASSPSSAISTATPSPKSTEQTTTNSVTSLNSPHSGLHTINGEGMEESQSPMKTDLLLVNHKPSPQIIPSMSVSIYPSSAEVLKACRNLGKNGLSNSSILLDKCPPPRPPSSPYPPLPKDKLNPPTPSIYLENKRDAFFPPLHQFCTNPNNPVTVIRGLAGALKLDLGLFSTKTLVEANNEHMVEVRTQLLQPADENWDPTGTKKIWHCESNRSHTTIAKYAQYQASSFQESLREENEKRSHHKDHSDSESTSSDNSGRRRKGPFKTIKFGTNIDLSDDKKWKLQLHELTKLPAFVRVVSAGNLLSHVGHTILGMNTVQLYMKVPGSRTPGHQENNNFCSVNINIGPGDCEWFVVPEGYWGVLNDFCEKNNLNFLMGSWWPNLEDLYEANVPVYRFIQRPGDLVWINAGTVHWVQAIGWCNNIAWNVGPLTACQYKLAVERYEWNKLQSVKSIVPMVHLSWNMARNIKVSDPKLFEMIKYCLLRTLKQCQTLREALIAAGKEIIWHGRTKEEPAHYCSICEVEVFDLLFVTNESNSRKTYIVHCQDCARKTSGNLENFVVLEQYKMEDLMQVYDQFTLAPPLPSASS

SEQ ID NO: 47766 - protein, 1044 aa, Homo sapiens
  Payload ID: 9659
  Gene Symbol: KDM6A
  Gene Name: lysine (K)-specific demethylase 6A
  ENSP ID: ENSP00000398929
  MOD_RES (1)..(1): Any amino acid
XNKTKLLPSIEEAWSLPIPAELTSRQGAMNTAQQACKPHHPNTEPVLGLSQTPISQQSLPLHMIPSSQVDDLSSPAKRKRTSSPTKNTSDNWSGGHAVSHPPVQQQAHSWCLTPQKLQHLEQLRANRNNLNPAQKLMLEQLESQFVLMQQHQMRPTGVAQVRSTGIPNGPTADSSLPTNSVSGQQPQLALTRVPSVSQPGVRPACPGQPLANGPFSAGHVPCSTSRTLGSTDTILIGNNHITGSGSNGNVPYLQRNALTLPHNRTNLTSSAEEPWKNQLSNSTQGLHKGQSSHSAGPNGERPLSSTGPSQHLQAAGSGIQNQNGHPTLPSNSVTQGAALNHLSSHTATSGGQQGITLTKESKPSGNILTVPETSRHTGETPNSTASVEGLPNHVHQMTADAVCSPSHGDSKSPGLLSSDNPQLSALLMGKANNNVGTGTCDKVNNIHPAVHTKTDNSVASSPSSAISTATPSPKSTEQTTTNSVTSLNSPHSGLHTINGEGMEESQSPMKTDLLLVNHKPSPQIIPSMSVSIYPSSAEVLKACRNLGKNGLSNSSILLDKCPPPRPPSSPYPPLPKDKLNPPTPSIYLENKRDAFFPPLHQFCTNPNNPVTVIRGLAGALKLDLGLFSTKTLVEANNEHMVEVRTQLLQPADENWDPTGTKKIWHCESNRSHTTIAKYAQYQASSFQESLREENEKRSHHKDHSDSESTSSDNSGRRRKGPFKTIKFGTNIDLSDDKKWKLQLHELTKLPAFVRVVSAGNLLSHVGHTILGMNTVQLYMKVPGSRTPGHQENNNFCSVNINIGPGDCEWFVVPEGYWGVLNDFCEKNNLNFLMGSWWPNLEDLYEANVPVYRFIQRPGDLVWINAGTVHWVQAIGWCNNIAWNVGPLTACQYKLAVERYEWNKLQSVKSIVPMVHLSWNMARNIKVSDPKLFEMIKYCLLRTLKQCQTLREALIAAGKEIIWHGRTKEEPAHYCSICEVEVFDLLFVTNESNSRKTYIVHCQDCARKTSGNLENFVVLEQYKMEDLMQVYDQFTLAPPLPSASS

SEQ ID NO: 47767 - protein, 224 aa, Homo sapiens
  Payload ID: 9659
  Gene Symbol: KDM6A
  Gene Name: lysine (K)-specific demethylase 6A
  ENSP ID: ENSP00000399980
  MOD_RES (1)..(1): Any amino acid
XLQAYICAVQLDHGHAAAWMDLGTLYESCNQPQDAIKCYLNATRSKSCSNTSALAARIKYLQAQLCNLPQGSLQNKTKLLPSIEEAWSLPIPAELTSRQGAMNTAQQNTSDNWSGGHAVSHPPVQQQAHSWCLTPQKLQMRPTGVAQVRSTGIPNGPTADSSLPTNSVSGQQPQLALTRVPSVSQPGVRPACPGQPLANGPFSAGHVPCSTSRTLGSTDTILIG

SEQ ID NO: 47768 - protein, 999 aa, Homo sapiens
  Payload ID: 9659
  Gene Symbol: KDM6A
  Gene Name: lysine (K)-specific demethylase 6A
  ENSP ID: ENSP00000405910
  MOD_RES (1)..(1): Any amino acid
XGTLYESCNQPQDAIKCYLNATRSKSCSNTSALAARIKYLQNTSDNWSGGHAVSHPPVQQQAHSWCLTPQKLQHLEQLRANRNNLNPAQKLMLEQLESQFVLMQQHQMRPTGVAQVRSTGIPNGPTADSSLPTNSVSGQQPQLALTRVPSVSQPGVRPACPGQPLANGPFSAGHVPCSTSRTLGSTDTILIGNNHITGSGSNGNVPYLQRNALTLPHNRTNLTSSAEEPWKNQLSNSTQGLHKGQSSHSAGPNGERPLSSTGPSQHLQAAGSGIQNQNGHPTLPSNSVTQGAALNHLSSHTATSGGQQGITLTKESKPSGNILTVPETSRHTGETPNSTASVEGLPNHVHQMTADAVCSPSHGDSKSPGLLSSDNPQLSALLMGKANNNVGTGTCDKVNNIHPAVHTKTDNSVASSPSSAISTATPSPKSTEQTTTNSVTSLNSPHSGLHTINGEGMEESQSPMKTDLLLVNHKPSPQIIPSMSVSIYPSSAEVLKACRNLGKNGLSNSSILLDKCPPPRPPSSPYPPLPKDKLNPPTPSIYLENKRDAFFPPLHQFCTNPNNPVTVIRGLAGALKLDLGLFSTKTLVEANNEHMVEVRTQLLQPADENWDPTGTKKIWHCESNRSHTTIAKYAQYQASSFQESLREENEKRSHHKDHSDSESTSSDNSGRRRKGPFKTIKFGTNIDLSDDKKWKLQLHELTKLPAFVRVVSAGNLLSHVGHTILGMNTVQLYMKVPGSRTPGHQENNNFCSVNINIGPGDCEWFVVPEGYWGVLNDFCEKNNLNFLMGSWWPNLEDLYEANVPVYRFIQRPGDLVWINAGTVHWVQAIGWCNNIAWNVGPLTACQYKLAVERYEWNKLQSVKSIVPMVHLSWNMARNIKVSDPKLFEMIKYCLLRTLKQCQTLREALIAAGKEIIWHGRTKEEPAHYCSICEVEVFDLLFVTNESNSRKTYIVHCQDCARKTSGNLENFVVLEQYKMEDLMQVYDQFTLAPPLPSASS

SEQ ID NO: 47769 - protein, 161 aa, Homo sapiens
  Payload ID: 9659
  Gene Symbol: KDM6A
  Gene Name: lysine (K)-specific demethylase 6A
  ENSP ID: ENSP00000408230
  MOD_RES (1)..(1): Any amino acid
XARNIKVSDPKLFEMIKIFSLSPNFRAEKCLRDHLVQPLRSNGEPEPLRFTGEYCLLRTLKQCQTLREALIAAGKEIIWHGRTKEEPAHYCSICEVEVFDLLFVTNESNSRKTYIVHCQDCARKTSGNLENFVVLEQYKMEDLMQVYDQFTLAPPLPSASS

SEQ ID NO: 47770 - protein, 1332 aa, Homo sapiens
  Payload ID: 9659
  Gene Symbol: KDM6A
  Gene Name: lysine (K)-specific demethylase 6A
  ENSP ID: ENSP00000437405
MAAGKASGESEEASPSLTAEEREALGGLDSRLFGFVRFHEDGARTKALLGKAVRCYESLILKAEGKVESDFFCQLGHFNLLLEDYPKALSAYQRYYSLQSDYWKNAAFLYGLGLVYFHYNAFQWAIKAFQEVLYVDPSFCRAKEIHLRLGLMFKVNTDYESSLKHFQLALVDCNPCTLSNAEIQFHIAHLYETQRKYHSAKEAYEQLLQTENLSAQVKATVLQQLGWMHHTVDLLGDKATKESYAIQYLQKSLEADPNSGQSWYFLGRCYSSIGKVQDAFISYRQSIDKSEASADTWCSIGVLYQQQNQPMDALQAYICAVQLDHGHAAAWMDLGTLYESCNQPQDAIKCYLNATRSKSCSNTSALAARIKYLQNTSDNWSGGHAVSHPPVQQQAHSWCLTPQKLQHLEQLRANRNNLNPAQKLMLEQLESQFVLMQQHQMRPTGVAQVRSTGIPNGPTADSSLPTNSVSGQQPQLALTRVPSVSQPGVRPACPGQPLANGPFSAGHVPCSTSRTLGSTDTILIGNNHITGSGSNGNVPYLQRNALTLPHNRTNLTSSAEEPWKNQLSNSTQGLHKGQSSHSAGPNGERPLSSTGPSQHLQAAGSGIQNQNGHPTLPSNSVTQGAALNHLSSHTATSGGQQGITLTKESKPSGNILTVPETSRHTGETPNSTASVEGLPNHVHQMTADAVCSPSHGDSKSPGLLSSDNPQLSALLMGKANNNVGTGTCDKVNNIHPAVHTKTDNSVASSPSSAISTATPSPKSTEQTTTNSVTSLNSPHSGLHTINGEGMEESQSPMKTDLLLVNHKPSPQIIPSMSVSIYPSSAEVLKACRNLGKNGLSNSSILLDKCPPPRPPSSPYPPLPKDKLNPPTPSIYLENKRDAFFPPLHQFCTNPNNPVTVIRGLAGALKLDLGLFSTKTLVEANNEHMVEVRTQLLQPADENWDPTGTKKIWHCESNRSHTTIAKYAQYQASSFQESLREENEKRSHHKDHSDSESTSSDNSGRRRKGPFKTIKFGTNIDLSDDKKWKLQLHELTKLPAFVRVVSAGNLLSHVGHTILGMNTVQLYMKVPGSRTPGHQENNNFCSVNINIGPGDCEWFVVPEGYWGVLNDFCEKNNLNFLMGSWWPNLEDLYEANVPVYRFIQRPGDLVWINAGTVHWVQAIGWCNNIAWNVGPLTACQYKLAVERYEWNKLQSVKSIVPMVHLSWNMARNIKVSDPKLFEMIKYCLLRTLKQCQTLREALIAAGKEIIWHGRTKEEPAHYCSICEVEVFDLLFVTNESNSRKTYIVHCQDCARKTSGNLENFVVLEQYKMEDLMQVYDQFTLAPPLPSASS

SEQ ID NO: 47771 - protein, 1269 aa, Homo sapiens
  Payload ID: 9659
  Gene Symbol: KDM6A
  Gene Name: lysine (K)-specific demethylase 6A
  ENSP ID: ENSP00000443078
MAAGKASGESEEASPSLTAEEREALGGLDSRLFGFVRFHEDGARTKALLGKAVRCYESLILKAEGKVESDFFCQLGHFNLLLEDYPKALSAYQRYYSLQSDYWKNAAFLYGLGLVYFHYNAFQWAIKAFQEVLYVDPSFCRAKEIHLRLGLMFKVNTDYESSLKHFQLALVDCNPCTLSNAEIQFHIAHLYETQRKYHSAKEAYEQLLQTENLSAQVKATVLQQLGWMHHTVDLLGDKATKESYAIQYLQKSLEADPNSGQSWYFLGRCYSSIGKVQDAFISYRQSIDKSEASADTWCSIGVLYQQQNQPMDALQAYICAVQLDHGHAAAWMDLGTLYESCNQPQDAIKCYLNATRSKSCSNTSALAARIKYLQACKPHHPNTEPVLGLSQTPISQQSLPLHMIPSSQVDDLSSPAKRKRTSSPTKNTSDNWSGGHAVSHPPVQQQAHSWCLTPQKLQMRPTGVAQVRSTGIPNGPTADSSLPTNSVSGQQPQLALTRVPSVSQPGVRPACPGQPLANGPFSAGHVPCSTSRTLGSTDTILIGNNHITGSGSNGNVPYLQRNALTLPHNRTNLTSSAEEPWKNQLSNSTQGLHKGQSSHSAGPNGERPLSSTGPSQHLQAAGSGIQNQNGHPTLPSNSVTQGAALNHLSSHTATSGGQQGITLTKESKPSGNILTVPETSRHTGETPNSTASVEGLPNHVHQMTADAVCSPSHGDSKSPGLLSSDNPQLSALLMGKANNNVGTGTCDKVNNIHPAVHTKTDNSVASSPSSAISTATPSPKSTEQTTTNSVTSLNSPHSGLHTINGEGMEESQSPMKTDLLLVNHKPSPQIIPSMSVSIYPSSAEVLKACRNLGKNGLSNSSILLDKCPPPRPPSSPYPPLPKDKLNPPTPSIYLENKRDAFFPPLHQFCTNPNNPVTVIRGLAGALKLDLGLFSTKTLVEANNEHMVEVRTQLLQPADENWDPTGTKKIWHCESNRSHTTIAKYAQYQASSFQESLREENEKRSHHKDHSDSESTSSDNSGRRRKGPFKTIKFGTNIDLSDDKKWKLQLHELTKLPAFVRVVSAGNLLSHVGHTILGMNTVQLYMKVPGSRTPGHQENNNFCSVNINIGPGDCEWFVVPEGYWGVLNDFCEKNNLNFLMGSWWPNLEDLYEANVPVYRFIQRPGDLVWINAGTVHWVQAIGWCNNIAWNVGPLTACQYKLAVERYEWNKLQSVKSIVPMVHLSWNMARNIKVLSSKNSEAMSDIEGSSHCCRKRDYMAWADKRRTSSLL

SEQ ID NO: 47772 - protein, 224 aa, Homo sapiens
  Payload ID: 9659
  Gene Symbol: KDM6A
  Gene Name: lysine (K)-specific demethylase 6A
  ENSP ID: ENSP00000478793
MKSCGVSLATAAAAAAAFGDEEKKMAAGKASGESEEASPSLTAEEREALGGLDSRLFGFVRFHEDGARTKALLGKAVRCYESLILKAEGKVESDFFCQLGHFNLLLEDYPKALSAYQRYYSLQSDYWKNAAFLYGLGLVYFHYNAFQWAIKAFQEVLYVDPSFCRAKEIHLRLGLMFKVNTDYESSLKHFQLALVDCNPCTLSNAEIQFHIAHLYETQVGCITL

SEQ ID NO: 47773 - protein, 1429 aa, Homo sapiens
  Payload ID: 9659
  Gene Symbol: KDM6A
  Gene Name: lysine (K)-specific demethylase 6A
  ENSP ID: ENSP00000483595
MAAGKASGESEEASPSLTAEEREALGGLDSRLFGFVRFHEDGARTKALLGKAVRCYESLILKAEGKVESDFFCQLGHFNLLLEDYPKALSAYQRYYSLQSDYWKNAAFLYGLGLVYFHYNAFQWAIKAFQEVLYVDPSFCRAKEIHLRLGLMFKVNTDYESSLKHFQLALVDCNPCTLSNAEIQFHIAHLYETQRKYHSAKEAYEQLLQTENLSAQVKATVLQQLGWMHHTVDLLGDKATKESYAIQYLQKSLEADPNSGQSWYFLGRCYSSIGKVQDAFISYRQSIDKSEASADTWCSIGVLYQQQNQPMDALQAYICAVQLDHGHAAAWMDLGTLYESCNQPQDAIKCYLNATRSKSCSNTSALAARIKYLQAQLCNLPQGSLQNKTKLLPSIEEAWSLPIPAELTSRQGAMNTAQQACKPHHPNTEPVLGLSQTPISQQSLPLHMIPSSQVDDLSSPAKRKRTSSPTKNTSDNWSGGHAVSHPPVQQQAHSWCLTPQKLQHLEQLRANRNNLNPAQKLMLEQLESQFVLMQQHQMRPTGVAQVRSTGIPNGPTADSSLPTNSVSGQQPQLALTRVPSVSQPGVRPACPGQPLANGPFSAGHVPCSTSRTLGSTDTILIGNNHITGSGSNGNVPYLQRNALTLPHNRTNLTSSAEEPWKNQLSNSTQGLHKGQSSHSAGPNGERPLSSTGPSQHLQAAGSGIQNQNGHPTLPSNSVTQGAALNHLSSHTATSGGQQGITLTKESKPSGNILTVPETSRHTGETPNSTASVEGLPNHVHQMTADAVCSPSHGDSKSPGLLSSDNPQLSALLMGKANNNVGTGTCDKVNNIHPAVHTKTDNSVASSPSSAISTATPSPKSTEQTTTNSVTSLNSPHSGLHTINGEGMEESQSPMKTDLLLVNHKPSPQIIPSMSVSIYPSSAEVLKACRNLGKNGLSNSSILLDKCPPPRPPSSPYPPLPKDKLNPPTPSIYLENKRDAFFPPLHQFCTNPNNPVTVIRGLAGALKLDLGLFSTKTLVEANNEHMVEVRTQLLQPADENWDPTGTKKIWHCESNRSHTTIAKYAQYQASSFQESLREENEKRSHHKDHSDSESTSSDNSGRRRKGPFKTIKFGTNIDLSDDKKWKLQLHELTKLPAFVRVVSAGNLLSHVGHTILGMNTVQLYMKVPGSRTPGHQENNNFCSVNINIGPGDCEWFVVPEGYWGVLNDFCEKNNLNFLMGSWWPNLEDLYEANVPVYRFIQRPGDLVWINAGTVHWVQAIGWCNNIAWNVGPLTACQYKLAVERYEWNKLQSVKSIVPMVHLSWNMARNIKVSDPKLFEMIKYCLLRTLKQCQTLREALIAAGKEIIWHGRTKEEPAHYCSICEVEVFDLLFVTNESNSRKTYIVHCQDCARKTSGNLENFVVLEQYKMEDLMQVYDQFTLAPPLPSASS

SEQ ID NO: 47774 - protein, 1682 aa, Homo sapiens
  Payload ID: 9660
  Gene Symbol: KDM6B
  Gene Name: lysine (K)-specific demethylase 6B
  Uniprot ID: O15054
  ENSP ID: ENSP00000254846
MHRAVDPPGARAAREAFALGGLSCAGAWSSCPPHPPPRSAWLPGGRCSASIGQPPLPAPLPPSHGSSSGHPSKPYYAPGAPTPRPLHGKLESLHGCVQALLREPAQPGLWEQLGQLYESEHDSEEATRCYHSALRYGGSFAELGPRIGRLQQAQLWNFHTGSCQHRAKVLPPLEQVWNLLHLEHKRNYGAKRGGPPVKRAAEPPVVQPVPPAALSGPSGEEGLSPGGKRRRGCNSEQTGLPPGLPLPPPPLPPPPPPPPPPPPPLPGLATSPPFQLTKPGLWSTLHGDAWGPERKGSAPPERQEQRHSLPHPYPYPAPAYTAHPPGHRLVPAAPPGPGPRPPGAESHGCLPATRPPGSDLRESRVQRSRMDSSVSPAATTACVPYAPSRPPGLPGTTTSSSSSSSSNTGLRGVEPNPGIPGADHYQTPALEVSHHGRLGPSAHSSRKPFLGAPAATPHLSLPPGPSSPPPPPCPRLLRPPPPPAWLKGPACRAAREDGEILEELFFGTEGPPRPAPPPLPHREGFLGPPASRFSVGTQDSHTPPTPPTPTTSSSNSNSGSHSSSPAGPVSFPPPPYLARSIDPLPRPPSPAQNPQDPPLVPLTLALPPAPPSSCHQNTSGSFRRPESPRPRVSFPKTPEVGPGPPPGPLSKAPQPVPPGVGELPARGPRLFDFPPTPLEDQFEEPAEFKILPDGLANIMKMLDESIRKEEEQQQHEAGVAPQPPLKEPFASLQSPFPTDTAPTTTAPAVAVTTTTTTTTTTTATQEEEKKPPPALPPPPPLAKFPPPSQPQPPPPPPPSPASLLKSLASVLEGQKYCYRGTGAAVSTRPGPLPTTQYSPGPPSGATALPPTSAAPSAQGSPQPSASSSSQFSTSGGPWARERRAGEEPVPGPMTPTQPPPPLSLPPARSESEVLEEISRACETLVERVGRSATDPADPVDTAEPADSGTERLLPPAQAKEEAGGVAAVSGSCKRRQKEHQKEHRRHRRACKDSVGRRPREGRAKAKAKVPKEKSRRVLGNLDLQSEEIQGREKSRPDLGGASKAKPPTAPAPPSAPAPSAQPTPPSASVPGKKAREEAPGPPGVSRADMLKLRSLSEGPPKELKIRLIKVESGDKETFIASEVEERRLRMADLTISHCAADVVRASRNAKVKGKFRESYLSPAQSVKPKINTEEKLPREKLNPPTPSIYLESKRDAFSPVLLQFCTDPRNPITVIRGLAGSLRLNLGLFSTKTLVEASGEHTVEVRTQVQQPSDENWDLTGTRQIWPCESSRSHTTIAKYAQYQASSFQESLQEEKESEDEESEEPDSTTGTPPSSAPDPKNHHIIKFGTNIDLSDAKRWKPQLQELLKLPAFMRVTSTGNMLSHVGHTILGMNTVQLYMKVPGSRTPGHQENNNFCSVNINIGPGDCEWFAVHEHYWETISAFCDRHGVDYLTGSWWPILDDLYASNIPVYRFVQRPGDLVWINAGTVHWVQATGWCNNIAWNVGPLTAYQYQLALERYEWNEVKNVKSIVPMIHVSWNVARTVKISDPDLFKMIKFCLLQSMKHCQVQRESLVRAGKKIAYQGRVKDEPAYYCNECDVEVFNILFVTSENGSRNTYLVHCEGCARRRSAGLQGVVVLEQYRTEELAQAYDAFTLVRARRARGQRRRALGQAAGTGFGSPAAPFPEPPPAFSPQAPASTSR

SEQ ID NO: 47775 - protein, 1643 aa, Homo sapiens
  Payload ID: 9660
  Gene Symbol: KDM6B
  Gene Name: lysine (K)-specific demethylase 6B
  Uniprot ID: O15054
  ENSP ID: ENSP00000412513
MHRAVDPPGARAAREAFALGGLSCAGAWSSCPPHPPPRSAWLPGGRCSASIGQPPLPAPLPPSHGSSSGHPSKPYYAPGAPTPRPLHGKLESLHGCVQALLREPAQPGLWEQLGQLYESEHDSEEATRCYHSALRYGGSFAELGPRIGRLQQAQLWNFHTGSCQHRAKVLPPLEQVWNLLHLEHKRNYGAKRGGPPVKRAAEPPVVQPVPPAALSGPSGEEGLSPGGKRRRGCNSEQTGLPPGLPLPPPPLPPPPPPPPPPPPPLPGLATSPPFQLTKPGLWSTLHGDAWGPERKGSAPPERQEQRHSLPHPYPYPAPAYTAHPPGHRLVPAAPPGPGPRPPGAESHGCLPATRPPGSDLRESRVQRSRMDSSVSPAATTACVPYAPSRPPGLPGTTTSSSSSSSSNTGLRGVEPNPGIPGADHYQTPALEVSHHGRLGPSAHSSRKPFLGAPAATPHLSLPPGPSSPPPPPCPRLLRPPPPPAWLKGPACRAAREDGEILEELFFGTEGPPRPAPPPLPHREGFLGPPASRFSVGTQDSHTPPTPPTPTTSSSNSNSGSHSSSPAGPVSFPPPPYLARSIDPLPRPPSPAQNPQDPPLVPLTLALPPAPPSSCHQNTSGSFRRPESPRPRVSFPKTPEVGPGPPPGPLSKAPQPVPPGVGELPARGPRLFDFPPTPLEDQFEEPAEFKILPDGLANIMKMLDESIRKEEEQQQHEAGVAPQPPLKEPFASLQSPFPTDTAPTTTAPAVAVTTTTTTTTTTTATQEEEKKPPPALPPPPPLAKFPPPSQPQPPPPPPPSPASLLKSLASVLEGQKYCYRGTGAAVSTRPGPLPTTQYSPGPPSGATALPPTSAAPSAQGSPQPSASSSSQFSTSGGPWARERRAGEEPVPGPMTPTQPPPPLSLPPARSESEVLEEISRACETLVERVGRSATDPADPVDTAEPADSGTERLLPPAQAKEEAGGVAAVSGSCKRRQKEHQKEHRRHRRACKDSVGRRPREGRAKAKAKVPKEKSRRVLGNLDLQSEEIQGREKSRPDLGGASKAKPPTAPAPPSAPAPSAQPTPPSASVPGKKAREEAPGPPGVSRADMLKLRSLSEGPPKELKIRLIKVESGDKETFIASEVEERRLRMADLTISHCAADVVRASRNAKVKGKFRESYLSPAQSVKPKINTEEKLPREKLNPPTPSIYLESKRDAFSPVLLQFCTDPRNPITVIRGLAGSLRLNLGLFSTKTLVEASGEHTVEVRTQVQQPSDENWDLTGTRQIWPCESSRSHTTIAKYAQYQASSFQESLQEEKESEDEESEEPDSTTGTPPSSAPDPKNHHIIKFGTNIDLSDAKRWKPQLQELLKLPAFMRVTSTGNMLSHVGHTILGMNTVQLYMKVPGSRTPGHQENNNFCSVNINIGPGDCEWFAVHEHYWETISAFCDRHGVDYLTGSWWPILDDLYASNIPVYRFVQRPGDLVWINAGTVHWVQATGWCNNIAWNVGPLTAYQYQLALERYEWNEVKNVKSIVPMIHVSWNVARTVKISDPDLFKMIKFCLLQSMKHCQVQRESLVRAGKKIAYQGRVKDEPAYYCNECDVEVFNILFVTSENGSRNTYLVHCEGCARRRSAGLQGVVVLEQYRTEELAQAYDAFTLAPASTSR

SEQ ID NO: 47776 - protein, 361 aa, Homo sapiens
  Payload ID: 9660
  Gene Symbol: KDM6B
  Gene Name: lysine (K)-specific demethylase 6B
  ENSP ID: ENSP00000458445
MHRAVDPPGARAAREAFALGGLSCAGAWSSCPPHPPPRSAWLPGGRCSASIGQPPLPAPLPPSHGSSSGHPSKPYYAPGAPTPRPLHGKLESLHGCVQALLREPAQPGLWEQLGQLYESEHDSEEATRCYHSALRYGGSFAELGPRIGRLQQAQLWNFHTGSCQHRAKVLPPLEQVWNLLHLEHKRNYGAKRGGPPVKRAAEPPVVQPVPPAALSGPSGEEGLSPGGKRRRGCNSEQEQRHSLPHPYPYPAPAYTAHPPGHRLVPAAPPGPGPRPPGAESHGCLPATRPPGSDLRESRVQRSRMDSSVSPAATTACVPYAPSRPPGLPGTTTSSSSSSSSNTGLRGVEPNPGIPGADHYQT

SEQ ID NO: 47777 - protein, 941 aa, Homo sapiens
  Payload ID: 9661
  Gene Symbol: KDM7A
  Gene Name: lysine (K)-specific demethylase 7A
  Uniprot ID: Q6ZMT4
  ENSP ID: ENSP00000380692
MAGAAAAVAAGAAAGAAAAAVSVAAPGRASAPPPPPPVYCVCRQPYDVNRFMIECDICKDWFHGSCVGVEEHHAVDIDLYHCPNCAVLHGSSLMKKRRNWHRHDYTEIDDGSKPVQAGTRTFIKELRSRVFPSADEIIIKMHGSQLTQRYLEKHGFDVPIMVPKLDDLGLRLPSPTFSVMDVERYVGGDKVIDVIDVARQADSKMTLHNYVKYFMNPNRPKVLNVISLEFSDTKMSELVEVPDIAKKLSWVENYWPDDSVFPKPFVQKYCLMGVQDSYTDFHIDFGGTSVWYHVLWGEKIFYLIKPTDENLARYESWSSSVTQSEVFFGDKVDKCYKCVVKQGHTLFVPTGWIHAVLTSQDCMAFGGNFLHNLNIGMQLRCYEMEKRLKTPDLFKFPFFEAICWFVAKNLLETLKELREDGFQPQTYLVQGVKALHTALKLWMKKELVSEHAFEIPDNVRPGHLIKELSKVIRAIEEENGKPVKSQGIPIVCPVSRSSNEATSPYHSRRKMRKLRDHNVRTPSNLDILELHTREVLKRLEMCPWEEDILSSKLNGKFNKHLQPSSTVPEWRAKDNDLRLLLTNGRIIKDERQPFADQSLYTADSENEEDKRRTKKAKMKIEESSGVEGVEHEESQKPLNGFFTRVKSELRSRSSGYSDISESEDSGPECTALKSIFTTEESESSGDEKKQEITSNFKEESNVMRNFLQKSQKPSRSEIPIKRECPTSTSTEEEAIQGMLSMAGLHYSTCLQRQIQSTDCSGERNSLQDPSSCHGSNHEVRQLYRYDKPVECGYHVKTEDPDLRTSSWIKQFDTSRFHPQDLSRSQKCIRKEGSSEISQRVQSRNYVDSSGSSLQNGKYMQNSNLTSGACQISNGSLSPERPVGETSFSVPLHPTKRPASNPPPISNQATKGKRPKKGMATAKQRLGKILKLNRNGHARFFV

SEQ ID NO: 47778 - protein, 404 aa, Homo sapiens
  Payload ID: 9661
  Gene Symbol: KDM7A
  Gene Name: lysine (K)-specific demethylase 7A
  ENSP ID: ENSP00000420143
  MOD_RES (1)..(1): Any amino acid
XAKNLLETLKELREDGFQPQTYLVQGVKALHTALKLWMKKELVSEHAFEIPDNVRPGHLIKELSKVIRAIEEENGKPVKSQGIPIVCPVSRSSNEATSPYHSRRKMRKLRDHNVRTPSNLDILELHTREVLKRLEMCPWEEDILSSKLNGKFNKHLQPSSTVPEWRAKDNDLRLLLTNGRIIKDERQPFADQSLYTADSENEEDKRRTKKAKMKIEESSGVEGVEHEESQKPLNGFFTRVKSELRSRSSGYSDISESEDSGPECTALKSIFTTEESESSGDEKKQEITSNFKEESNVMRNFLQKSQKPSRSEIPIKRECPTSTSTEEEAIQGMLSMAGLHYSTCLQRQIQSTDCSGERNSLQDPSSCHGSNHEVRQLYRYDKPVECETRSHLCCPDWSPTPELK

SEQ ID NO: 47779 - protein, 416 aa, Homo sapiens
  Payload ID: 9662
  Gene Symbol: KDM8
  Gene Name: lysine (K)-specific demethylase 8
  Uniprot ID: Q8N371
  ENSP ID: ENSP00000286096
MAGDTHCPAEPLAREGTLWEALRALLPHSKEDLKLDLGEKVERSVVTLLQRATELFYEGRRDECLQSSEVILDYSWEKLNTGTWQDVDKDWRRVYAIGCLLKALCLCQAPEDANTVAAALRVCDMGLLMGAAILGDILLKVAAILQTHLPGKRPARGSLPEQPCTKKARADHGLIPDVKLEKTVPRLHRPSLQHFREQFLVPGRPVILKGVADHWPCMQKWSLEYIQEIAGCRTVPVEVGSRYTDEEWSQTLMTVNEFISKYIVNEPRDVGYLAQHQLFDQIPELKQDISIPDYCSLGDGEEEEITINAWFGPQGTISPLHQDPQQNFLVQVMGRKYIRLYSPQESGALYPHDTHLLHNTSQVDVENPDLEKFPKFAKAPFLSCILSPGEILFIPVKYWHYVRALDLSFSVSFWWS

SEQ ID NO: 47780 - protein, 454 aa, Homo sapiens
  Payload ID: 9662
  Gene Symbol: KDM8
  Gene Name: lysine (K)-specific demethylase 8
  Uniprot ID: Q8N371
  ENSP ID: ENSP00000398410
MSREKCSPGEGAEEGRGSEASGLKASAGHGTEPAGGGPMAGDTHCPAEPLAREGTLWEALRALLPHSKEDLKLDLGEKVERSVVTLLQRATELFYEGRRDECLQSSEVILDYSWEKLNTGTWQDVDKDWRRVYAIGCLLKALCLCQAPEDANTVAAALRVCDMGLLMGAAILGDILLKVAAILQTHLPGKRPARGSLPEQPCTKKARADHGLIPDVKLEKTVPRLHRPSLQHFREQFLVPGRPVILKGVADHWPCMQKWSLEYIQEIAGCRTVPVEVGSRYTDEEWSQTLMTVNEFISKYIVNEPRDVGYLAQHQLFDQIPELKQDISIPDYCSLGDGEEEEITINAWFGPQGTISPLHQDPQQNFLVQVMGRKYIRLYSPQESGALYPHDTHLLHNTSQVDVENPDLEKFPKFAKAPFLSCILSPGEILFIPVKYWHYVRALDLSFSVSFWWS

SEQ ID NO: 47781 - protein, 120 aa, Homo sapiens
  Payload ID: 9662
  Gene Symbol: KDM8
  Gene Name: lysine (K)-specific demethylase 8
  ENSP ID: ENSP00000454215
MAGDTHCPAEPLAREGTLWEALRALLPHSKEDLKLDLGEKVERSVVTLLQRATELFYEGRRDECLQSSEVILDYSWEKLNTGTWQDVDKDWRRVYAIGCLLKALCLCQAPEDANTVAAAL

SEQ ID NO: 47782 - protein, 90 aa, Homo sapiens
  Payload ID: 9662
  Gene Symbol: KDM8
  Gene Name: lysine (K)-specific demethylase 8
  ENSP ID: ENSP00000455463
  MOD_RES (1)..(1): Any amino acid
XVNEFISKYIVNEPRDVGYLAQHQLFDQIPELKQDISIPDYCSLGDGEEEEITINAWLTWRIPTWKSSPSLPRPHSCPASCLLERSCSSR

SEQ ID NO: 47783 - protein, 163 aa, Homo sapiens
  Payload ID: 9662
  Gene Symbol: KDM8
  Gene Name: lysine (K)-specific demethylase 8
  ENSP ID: ENSP00000456107
MAGDTHCPAEPLAREGTLWEALRALLPHSKEDLKLDLGEKVERSVVTLLQRATELFYEGRRDECLQSSEVILDYSWEKLNTGTWQDVDKDWRRVYAIGCLLKALCLCQAPEDANTVAAALRVCDMGLLMGAAILGDILLKVAAILQTHLPGKRPARGSLPEQP

SEQ ID NO: 47784 - protein, 220 aa, Homo sapiens
  Payload ID: 9662
  Gene Symbol: KDM8
  Gene Name: lysine (K)-specific demethylase 8
  Uniprot ID: Q8N371
  ENSP ID: ENSP00000456901
MAGDTHCPAEPLAREGTLWEALRALLPHSKEDLKLDLGEKVERSVVTLLQRATELFYEGRRDECLQSSEVILDYSWEKLNTGTWQDVDKDWRRVYAIGCLLKALCLCQAPEDANTVAAALRVCDMGLLMGAAILGDILLKVAAILQTHLPGKRPARGSLPEQPCTKVDVENPDLEKFPKFAKAPFLSCILSPGEILFIPVKYWHYVRALDLSFSVSFWWS

SEQ ID NO: 47785 - protein, 3969 aa, Homo sapiens
  Payload ID: 9663
  Gene Symbol: KMT2A
  Gene Name: lysine (K)-specific methyltransferase 2A
  Uniprot ID: Q03164
  ENSP ID: ENSP00000374157
MAHSCRWRFPARPGTTGGGGGGGRRGLGGAPRQRVPALLLPPGPPVGGGGPGAPPSPPAVAAAAAAAGSSGAGVPGGAAAASAASSSSASSSSSSSSSASSGPALLRVGPGFDAALQVSAAIGTNLRRFRAVFGESGGGGGSGEDEQFLGFGSDEEVRVRSPTRSPSVKTSPRKPRGRPRSGSDRNSAILSDPSVFSPLNKSETKSGDKIKKKDSKSIEKKRGRPPTFPGVKIKITHGKDISELPKGNKEDSLKKIKRTPSATFQQATKIKKLRAGKLSPLKSKFKTGKLQIGRKGVQIVRRRGRPPSTERIKTPSGLLINSELEKPQKVRKDKEGTPPLTKEDKTVVRQSPRRIKPVRIIPSSKRTDATIAKQLLQRAKKGAQKKIEKEAAQLQGRKVKTQVKNIRQFIMPVVSAISSRIIKTPRRFIEDEDYDPPIKIARLESTPNSRFSAPSCGSSEKSSAASQHSSQMSSDSSRSSSPSVDTSTDSQASEEIQVLPEERSDTPEVHPPLPISQSPENESNDRRSRRYSVSERSFGSRTTKKLSTLQSAPQQQTSSSPPPPLLTPPPPLQPASSISDHTPWLMPPTIPLASPFLPASTAPMQGKRKSILREPTFRWTSLKHSRSEPQYFSSAKYAKEGLIRKPIFDNFRPPPLTPEDVGFASGFSASGTAASARLFSPLHSGTRFDMHKRSPLLRAPRFTPSEAHSRIFESVTLPSNRTSAGTSSSGVSNRKRKRKVFSPIRSEPRSPSHSMRTRSGRLSSSELSPLTPPSSVSSSLSISVSPLATSALNPTFTFPSHSLTQSGESAEKNQRPRKQTSAPAEPFSSSSPTPLFPWFTPGSQTERGRNKDKAPEELSKDRDADKSVEKDKSRERDREREKENKRESRKEKRKKGSEIQSSSALYPVGRVSKEKVVGEDVATSSSAKKATGRKKSSSHDSGTDITSVTLGDTTAVKTKILIKKGRGNLEKTNLDLGPTAPSLEKEKTLCLSTPSSSTVKHSTSSIGSMLAQADKLPMTDKRVASLLKKAKAQLCKIEKSKSLKQTDQPKAQGQESDSSETSVRGPRIKHVCRRAAVALGRKRAVFPDDMPTLSALPWEEREKILSSMGNDDKSSIAGSEDAEPLAPPIKPIKPVTRNKAPQEPPVKKGRRSRRCGQCPGCQVPEDCGVCTNCLDKPKFGGRNIKKQCCKMRKCQNLQWMPSKAYLQKQAKAVKKKEKKSKTSEKKDSKESSVVKNVVDSSQKPTPSAREDPAPKKSSSEPPPRKPVEEKSEEGNVSAPGPESKQATTPASRKSSKQVSQPALVIPPQPPTTGPPRKEVPKTTPSEPKKKQPPPPESGPEQSKQKKVAPRPSIPVKQKPKEKEKPPPVNKQENAGTLNILSTLSNGNSSKQKIPADGVHRIRVDFKEDCEAENVWEMGGLGILTSVPITPRVVCFLCASSGHVEFVYCQVCCEPFHKFCLEENERPLEDQLENWCCRRCKFCHVCGRQHQATKQLLECNKCRNSYHPECLGPNYPTKPTKKKKVWICTKCVRCKSCGSTTPGKGWDAQWSHDFSLCHDCAKLFAKGNFCPLCDKCYDDDDYESKMMQCGKCDRWVHSKCENLSDEMYEILSNLPESVAYTCVNCTERHPAEWRLALEKELQISLKQVLTALLNSRTTSHLLRYRQAAKPPDLNPETEESIPSRSSPEGPDPPVLTEVSKQDDQQPLDLEGVKRKMDQGNYTSVLEFSDDIVKIIQAAINSDGGQPEIKKANSMVKSFFIRQMERVFPWFSVKKSRFWEPNKVSSNSGMLPNAVLPPSLDHNYAQWQEREENSHTEQPPLMKKIIPAPKPKGPGEPDSPTPLHPPTPPILSTDRSREDSPELNPPPGIEDNRQCALCLTYGDDSANDAGRLLYIGQNEWTHVNCALWSAEVFEDDDGSLKNVHMAVIRGKQLRCEFCQKPGATVGCCLTSCTSNYHFMCSRAKNCVFLDDKKVYCQRHRDLIKGEVVPENGFEVFRRVFVDFEGISLRRKFLNGLEPENIHMMIGSMTIDCLGILNDLSDCEDKLFPIGYQCSRVYWSTTDARKRCVYTCKIVECRPPVVEPDINSTVEHDENRTIAHSPTSFTESSSKESQNTAEIISPPSPDRPPHSQTSGSCYYHVISKVPRIRTPSYSPTQRSPGCRPLPSAGSPTPTTHEIVTVGDPLLSSGLRSIGSRRHSTSSLSPQRSKLRIMSPMRTGNTYSRNNVSSVSTTGTATDLESSAKVVDHVLGPLNSSTSLGQNTSTSSNLQRTVVTVGNKNSHLDGSSSSEMKQSSASDLVSKSSSLKGEKTKVLSSKSSEGSAHNVAYPGIPKLAPQVHNTTSRELNVSKIGSFAEPSSVSFSSKEALSFPHLHLRGQRNDRDQHTDSTQSANSSPDEDTEVKTLKLSGMSNRSSIINEHMGSSSRDRRQKGKKSCKETFKEKHSSKSFLEPGQVTTGEEGNLKPEFMDEVLTPEYMGQRPCNNVSSDKIGDKGLSMPGVPKAPPMQVEGSAKELQAPRKRTVKVTLTPLKMENESQSKNALKESSPASPLQIESTSPTEPISASENPGDGPVAQPSPNNTSCQDSQSNNYQNLPVQDRNLMLPDGPKPQEDGSFKRRYPRRSARARSNMFFGLTPLYGVRSYGEEDIPFYSSSTGKKRGKRSAEGQVDGADDLSTSDEDDLYYYNFTRTVISSGGEERLASHNLFREEEQCDLPKISQLDGVDDGTESDTSVTATTRKSSQIPKRNGKENGTENLKIDRPEDAGEKEHVTKSSVGHKNEPKMDNCHSVSRVKTQGQDSLEAQLSSLESSRRVHTSTPSDKNLLDTYNTELLKSDSDNNNSDDCGNILPSDIMDFVLKNTPSMQALGESPESSSSELLNLGEGLGLDSNREKDMGLFEVFSQQLPTTEPVDSSVSSSISAEEQFELPLELPSDLSVLTTRSPTVPSQNPSRLAVISDSGEKRVTITEKSVASSESDPALLSPGVDPTPEGHMTPDHFIQGHMDADHISSPPCGSVEQGHGNNQDLTRNSSTPGLQVPVSPTVPIQNQKYVPNSTDSPGPSQISNAAVQTTPPHLKPATEKLIVVNQNMQPLYVLQTLPNGVTQKIQLTSSVSSTPSVMETNTSVLGPMGGGLTLTTGLNPSLPTSQSLFPSASKGLLPMSHHQHLHSFPAATQSSFPPNISNPPSGLLIGVQPPPDPQLLVSESSQRTDLSTTVATPSSGLKKRPISRLQTRKNKKLAPSSTPSNIAPSDVVSNMTLINFTPSQLPNHPSLLDLGSLNTSSHRTVPNIIKRSKSSIMYFEPAPLLPQSVGGTAATAAGTSTISQDTSHLTSGSVSGLASSSSVLNVVSMQTTTTPTSSASVPGHVTLTNPRLLGTPDIGSISNLLIKASQQSLGIQDQPVALPPSSGMFPQLGTSQTPSTAAITAASSICVLPSTQTTGITAASPSGEADEHYQLQHVNQLLASKTGIHSSQRDLDSASGPQVSNFTQTVDAPNSMGLEQNKALSSAVQASPTSPGGSPSSPSSGQRSASPSVPGPTKPKPKTKRFQLPLDKGNGKKHKVSHLRTSSSEAHIPDQETTSLTSGTGTPGAEAEQQDTASVEQSSQKECGQPAGQVAVLPEVQVTQNPANEQESAEPKTVEEEESNFSSPLMLWLQQEQKRKESITEKKPKKGLVFEISSDDGFQICAESIEDAWKSLTDKVQEARSNARLKQLSFAGVNGLRMLGILHDAVVFLIEQLSGAKHCRNYKFRFHKPEEANEPPLNPHGSARAEVHLRKSAFDMFNFLASKHRQPPEYNPNDEEEEEVQLKSARRATSMDLPMPMRFRHLKKTSKEAVGVYRSPIHGRGLFCKRNIDAGEMVIEYAGNVIRSIQTDKREKYYDSKGIGCYMFRIDDSEVVDATMHGNAARFINHSCEPNCYSRVINIDGQKHIVIFAMRKIYRGEELTYDYKFPIEDASNKLPCNCGAKKCRKFLN

SEQ ID NO: 47786 - protein, 366 aa, Homo sapiens
  Payload ID: 9663
  Gene Symbol: KMT2A
  Gene Name: lysine (K)-specific methyltransferase 2A
  ENSP ID: ENSP00000376612
DPAPKKSSSEPPPRKPVEEKSEEGNVSAPGPESKQATTPASRKSSKQVSQPALVIPPQPPTTGPPRKEVPKTTPSEPKKKQPPPPESGPEQSKQKKVAPRPSIPVKQKPKEKEKPPPVNKQENAGTLNILSTLSNGNSSKQKIPADGVHRIRVDFKFVYCQVCCEPFHKFCLEENERPLEDQLENWCCRRCKFCHVCGRQHQATKQLLECNKCRNSYHPECLGPNYPTKPTKKKKVWICTKCVRCKSCGSTTPGKGWDAQWSHDFSLCHDCAKLFAKGNFCPLCDKCYDDDDYESKMMQCGKCDRWVHSKCENLSDEMYEILSNLPESVAYTCVNCTERHPAEWRLALEKELQISLKQVLTALLNS

SEQ ID NO: 47787 - protein, 1439 aa, Homo sapiens
  Payload ID: 9663
  Gene Symbol: KMT2A
  Gene Name: lysine (K)-specific methyltransferase 2A
  ENSP ID: ENSP00000432391
MAHSCRWRFPARPGTTGGGGGGGRRGLGGAPRQRVPALLLPPGPPVGGGGPGAPPSPPAVAAAAAAAGSSGAGVPGGAAAASAASSSSASSSSSSSSSASSGPALLRVGPGFDAALQVSAAIGTNLRRFRAVFGESGGGGGSGELTTQIPCSWRTKGHIHDKKTEPFRLLAWSWCLNDEQFLGFGSDEEVRVRSPTRSPSVKTSPRKPRGRPRSGSDRNSAILSDPSVFSPLNKSETKSGDKIKKKDSKSIEKKRGRPPTFPGVKIKITHGKDISELPKGNKEDSLKKIKRTPSATFQQATKIKKLRAGKLSPLKSKFKTGKLQIGRKGVQIVRRRGRPPSTERIKTPSGLLINSELEKPQKVRKDKEGTPPLTKEDKTVVRQSPRRIKPVRIIPSSKRTDATIAKQLLQRAKKGAQKKIEKEAAQLQGRKVKTQVKNIRQFIMPVVSAISSRIIKTPRRFIEDEDYDPPIKIARLESTPNSRFSAPSCGSSEKSSAASQHSSQMSSDSSRSSSPSVDTSTDSQASEEIQVLPEERSDTPEVHPPLPISQSPENESNDRRSRRYSVSERSFGSRTTKKLSTLQSAPQQQTSSSPPPPLLTPPPPLQPASSISDHTPWLMPPTIPLASPFLPASTAPMQGKRKSILREPTFRWTSLKHSRSEPQYFSSAKYAKEGLIRKPIFDNFRPPPLTPEDVGFASGFSASGTAASARLFSPLHSGTRFDMHKRSPLLRAPRFTPSEAHSRIFESVTLPSNRTSAGTSSSGVSNRKRKRKVFSPIRSEPRSPSHSMRTRSGRLSSSELSPLTPPSSVSSSLSISVSPLATSALNPTFTFPSHSLTQSGESAEKNQRPRKQTSAPAEPFSSSSPTPLFPWFTPGSQTERGRNKDKAPEELSKDRDADKSVEKDKSRERDREREKENKRESRKEKRKKGSEIQSSSALYPVGRVSKEKVVGEDVATSSSAKKATGRKKSSSHDSGTDITSVTLGDTTAVKTKILIKKGRGNLEKTNLDLGPTAPSLEKEKTLCLSTPSSSTVKHSTSSIGSMLAQADKLPMTDKRVASLLKKAKAQLCKIEKSKSLKQTDQPKAQGQESDSSETSVRGPRIKHVCRRAAVALGRKRAVFPDDMPTLSALPWEEREKILSSMGNDDKSSIAGSEDAEPLAPPIKPIKPVTRNKAPQEPPVKKGRRSRRCGQCPGCQVPEDCGVCTNCLDKPKFGGRNIKKQCCKMRKCQNLQWMPSKAYLQKQAKAVKKKEKKSKTSEKKDSKESSVVKNVVDSSQKPTPSAREDPAPKKSSSEPPPRKPVEEKSEEGNVSAPGPESKQATTPASRKSSKQVSQPALVIPPQPPTTGPPRKEVPKTTPSEPKKKQPPPPESGPEQSKQKKVAPRPSIPVKQKPKEKEKPPPVNKQENAGTLNILSTLSNGNSSKQKIPADGVHRIRVDFK

SEQ ID NO: 47788 - protein, 160 aa, Homo sapiens
  Payload ID: 9663
  Gene Symbol: KMT2A
  Gene Name: lysine (K)-specific methyltransferase 2A
  ENSP ID: ENSP00000432652
ASSSSASSSSSSSSSASSGPALLRVGPGFDAALQVSAAIGTNLRRFRAVFGESGGGGGSGELTTQIPCSWRTKGHIHDKKTEPFRLLAWSWCLNDEQFLGFGSDEEVRVRSPTRSPSGSMLAQADKLPMTDKRVASLLKKAKAQLCKIEKSKSLKQTDQP

SEQ ID NO: 47789 - protein, 87 aa, Homo sapiens
  Payload ID: 9663
  Gene Symbol: KMT2A
  Gene Name: lysine (K)-specific methyltransferase 2A
  ENSP ID: ENSP00000434618
AAAASAASSSSASSSSSSSSSASSGPALLRVGPGFDAALQVSAAIGTNLRRFRAVFGESGGGGGSGEVPQLKRDEETLETVLRRLKR

SEQ ID NO: 47790 - protein, 87 aa, Homo sapiens; identical to SEQ ID NO: 47789
  Payload ID: 9663
  Gene Symbol: KMT2A
  Gene Name: lysine (K)-specific methyltransferase 2A
  ENSP ID: ENSP00000436564

SEQ ID NO: 47791 - protein, 268 aa, Homo sapiens
  Payload ID: 9663
  Gene Symbol: KMT2A
  Gene Name: lysine (K)-specific methyltransferase 2A
  ENSP ID: ENSP00000436700
ASSSSASSSSSSSSSASSGPALLRVGPGFDAALQVSAAIGTNLRRFRAVFGESGGGGGSGEDEQFLGFGSDEEVRVRSPTRSPSGSMLAQADKLPMTDKRVASLLKKAKAQLCKIEKSKSLKQTDQPKAQGQESDSSETSVRGPRIKHVCRRAAVALGRKRAVFPDDMPTLSALPWEEREKILSSMGNDDKSSIAGSEDAEPLAPPIKPIKPVTRNKAPQEPPVKKGRRSRRCGQCPGCQVPEDCGVCTNCLDKPKFGGRNIKKQCCK

SEQ ID NO: 47792 - protein, 3972 aa, Homo sapiens
  Payload ID: 9663
  Gene Symbol: KMT2A
  Gene Name: lysine (K)-specific methyltransferase 2A
  Uniprot ID: Q03164
  ENSP ID: ENSP00000436786
MAHSCRWRFPARPGTTGGGGGGGRRGLGGAPRQRVPALLLPPGPPVGGGGPGAPPSPPAVAAAAAAAGSSGAGVPGGAAAASAASSSSASSSSSSSSSASSGPALLRVGPGFDAALQVSAAIGTNLRRFRAVFGESGGGGGSGEDEQFLGFGSDEEVRVRSPTRSPSVKTSPRKPRGRPRSGSDRNSAILSDPSVFSPLNKSETKSGDKIKKKDSKSIEKKRGRPPTFPGVKIKITHGKDISELPKGNKEDSLKKIKRTPSATFQQATKIKKLRAGKLSPLKSKFKTGKLQIGRKGVQIVRRRGRPPSTERIKTPSGLLINSELEKPQKVRKDKEGTPPLTKEDKTVVRQSPRRIKPVRIIPSSKRTDATIAKQLLQRAKKGAQKKIEKEAAQLQGRKVKTQVKNIRQFIMPVVSAISSRIIKTPRRFIEDEDYDPPIKIARLESTPNSRFSAPSCGSSEKSSAASQHSSQMSSDSSRSSSPSVDTSTDSQASEEIQVLPEERSDTPEVHPPLPISQSPENESNDRRSRRYSVSERSFGSRTTKKLSTLQSAPQQQTSSSPPPPLLTPPPPLQPASSISDHTPWLMPPTIPLASPFLPASTAPMQGKRKSILREPTFRWTSLKHSRSEPQYFSSAKYAKEGLIRKPIFDNFRPPPLTPEDVGFASGFSASGTAASARLFSPLHSGTRFDMHKRSPLLRAPRFTPSEAHSRIFESVTLPSNRTSAGTSSSGVSNRKRKRKVFSPIRSEPRSPSHSMRTRSGRLSSSELSPLTPPSSVSSSLSISVSPLATSALNPTFTFPSHSLTQSGESAEKNQRPRKQTSAPAEPFSSSSPTPLFPWFTPGSQTERGRNKDKAPEELSKDRDADKSVEKDKSRERDREREKENKRESRKEKRKKGSEIQSSSALYPVGRVSKEKVVGEDVATSSSAKKATGRKKSSSHDSGTDITSVTLGDTTAVKTKILIKKGRGNLEKTNLDLGPTAPSLEKEKTLCLSTPSSSTVKHSTSSIGSMLAQADKLPMTDKRVASLLKKAKAQLCKIEKSKSLKQTDQPKAQGQESDSSETSVRGPRIKHVCRRAAVALGRKRAVFPDDMPTLSALPWEEREKILSSMGNDDKSSIAGSEDAEPLAPPIKPIKPVTRNKAPQEPPVKKGRRSRRCGQCPGCQVPEDCGVCTNCLDKPKFGGRNIKKQCCKMRKCQNLQWMPSKAYLQKQAKAVKKKEKKSKTSEKKDSKESSVVKNVVDSSQKPTPSAREDPAPKKSSSEPPPRKPVEEKSEEGNVSAPGPESKQATTPASRKSSKQVSQPALVIPPQPPTTGPPRKEVPKTTPSEPKKKQPPPPESGPEQSKQKKVAPRPSIPVKQKPKEKEKPPPVNKQENAGTLNILSTLSNGNSSKQKIPADGVHRIRVDFKEDCEAENVWEMGGLGILTSVPITPRVVCFLCASSGHVEFVYCQVCCEPFHKFCLEENERPLEDQLENWCCRRCKFCHVCGRQHQATKQLLECNKCRNSYHPECLGPNYPTKPTKKKKVWICTKCVRCKSCGSTTPGKGWDAQWSHDFSLCHDCAKLFAKGNFCPLCDKCYDDDDYESKMMQCGKCDRWVHSKCENLSGTEDEMYEILSNLPESVAYTCVNCTERHPAEWRLALEKELQISLKQVLTALLNSRTTSHLLRYRQAAKPPDLNPETEESIPSRSSPEGPDPPVLTEVSKQDDQQPLDLEGVKRKMDQGNYTSVLEFSDDIVKIIQAAINSDGGQPEIKKANSMVKSFFIRQMERVFPWFSVKKSRFWEPNKVSSNSGMLPNAVLPPSLDHNYAQWQEREENSHTEQPPLMKKIIPAPKPKGPGEPDSPTPLHPPTPPILSTDRSREDSPELNPPPGIEDNRQCALCLTYGDDSANDAGRLLYIGQNEWTHVNCALWSAEVFEDDDGSLKNVHMAVIRGKQLRCEFCQKPGATVGCCLTSCTSNYHFMCSRAKNCVFLDDKKVYCQRHRDLIKGEVVPENGFEVFRRVFVDFEGISLRRKFLNGLEPENIHMMIGSMTIDCLGILNDLSDCEDKLFPIGYQCSRVYWSTTDARKRCVYTCKIVECRPPVVEPDINSTVEHDENRTIAHSPTSFTESSSKESQNTAEIISPPSPDRPPHSQTSGSCYYHVISKVPRIRTPSYSPTQRSPGCRPLPSAGSPTPTTHEIVTVGDPLLSSGLRSIGSRRHSTSSLSPQRSKLRIMSPMRTGNTYSRNNVSSVSTTGTATDLESSAKVVDHVLGPLNSSTSLGQNTSTSSNLQRTVVTVGNKNSHLDGSSSSEMKQSSASDLVSKSSSLKGEKTKVLSSKSSEGSAHNVAYPGIPKLAPQVHNTTSRELNVSKIGSFAEPSSVSFSSKEALSFPHLHLRGQRNDRDQHTDSTQSANSSPDEDTEVKTLKLSGMSNRSSIINEHMGSSSRDRRQKGKKSCKETFKEKHSSKSFLEPGQVTTGEEGNLKPEFMDEVLTPEYMGQRPCNNVSSDKIGDKGLSMPGVPKAPPMQVEGSAKELQAPRKRTVKVTLTPLKMENESQSKNALKESSPASPLQIESTSPTEPISASENPGDGPVAQPSPNNTSCQDSQSNNYQNLPVQDRNLMLPDGPKPQEDGSFKRRYPRRSARARSNMFFGLTPLYGVRSYGEEDIPFYSSSTGKKRGKRSAEGQVDGADDLSTSDEDDLYYYNFTRTVISSGGEERLASHNLFREEEQCDLPKISQLDGVDDGTESDTSVTATTRKSSQIPKRNGKENGTENLKIDRPEDAGEKEHVTKSSVGHKNEPKMDNCHSVSRVKTQGQDSLEAQLSSLESSRRVHTSTPSDKNLLDTYNTELLKSDSDNNNSDDCGNILPSDIMDFVLKNTPSMQALGESPESSSSELLNLGEGLGLDSNREKDMGLFEVFSQQLPTTEPVDSSVSSSISAEEQFELPLELPSDLSVLTTRSPTVPSQNPSRLAVISDSGEKRVTITEKSVASSESDPALLSPGVDPTPEGHMTPDHFIQGHMDADHISSPPCGSVEQGHGNNQDLTRNSSTPGLQVPVSPTVPIQNQKYVPNSTDSPGPSQISNAAVQTTPPHLKPATEKLIVVNQNMQPLYVLQTLPNGVTQKIQLTSSVSSTPSVMETNTSVLGPMGGGLTLTTGLNPSLPTSQSLFPSASKGLLPMSHHQHLHSFPAATQSSFPPNISNPPSGLLIGVQPPPDPQLLVSESSQRTDLSTTVATPSSGLKKRPISRLQTRKNKKLAPSSTPSNIAPSDVVSNMTLINFTPSQLPNHPSLLDLGSLNTSSHRTVPNIIKRSKSSIMYFEPAPLLPQSVGGTAATAAGTSTISQDTSHLTSGSVSGLASSSSVLNVVSMQTTTTPTSSASVPGHVTLTNPRLLGTPDIGSISNLLIKASQQSLGIQDQPVALPPSSGMFPQLGTSQTPSTAAITAASSICVLPSTQTTGITAASPSGEADEHYQLQHVNQLLASKTGIHSSQRDLDSASGPQVSNFTQTVDAPNSMGLEQNKALSSAVQASPTSPGGSPSSPSSGQRSASPSVPGPTKPKPKTKRFQLPLDKGNGKKHKVSHLRTSSSEAHIPDQETTSLTSGTGTPGAEAEQQDTASVEQSSQKECGQPAGQVAVLPEVQVTQNPANEQESAEPKTVEEEESNFSSPLMLWLQQEQKRKESITEKKPKKGLVFEISSDDGFQICAESIEDAWKSLTDKVQEARSNARLKQLSFAGVNGLRMLGILHDAVVFLIEQLSGAKHCRNYKFRFHKPEEANEPPLNPHGSARAEVHLRKSAFDMFNFLASKHRQPPEYNPNDEEEEEVQLKSARRATSMDLPMPMRFRHLKKTSKEAVGVYRSPIHGRGLFCKRNIDAGEMVIEYAGNVIRSIQTDKREKYYDSKGIGCYMFRIDDSEVVDATMHGNAARFINHSCEPNCYSRVINIDGQKHIVIFAMRKIYRGEELTYDYKFPIEDASNKLPCNCGAKKCRKFLN

SEQ ID NO: 47793 - protein, 2715 aa, Homo sapiens
  Payload ID: 9664
  Gene Symbol: KMT2B
  Gene Name: lysine (K)-specific methyltransferase 2B
  Uniprot ID: Q9UMN6
  ENSP ID: ENSP00000398837
MAAAAGGGSCPGPGSARGRFPGRPRGAGGGGGRGGRGNGAERVRVALRRGGGATGPGGAEPGEDTALLRLLGLRRGLRRLRRLWAGPRVQRGRGRGRGRGWGPSRGCVPEEESSDGESDEEEFQGFHSDEDVAPSSLRSALRSQRGRAPRGRGRKHKTTPLPPPRLADVAPTPPKTPARKRGEEGTERMVQALTELLRRAQAPQAPRSRACEPSTPRRSRGRPPGRPAGPCRRKQQAVVVAEAAVTIPKPEPPPPVVPVKHQTGSWKCKEGPGPGPGTPRRGGQSSRGGRGGRGRGRGGGLPFVIKFVSRAKKVKMGQLSLGLESGQGQGQHEESWQDVPQRRVGSGQGGSPCWKKQEQKLDDEEEEKKEEEEKDKEGEEKEERAVAEEMMPAAEKEEAKLPPPPLTPPAPSPPPPLPPPSTSPPPPLCPPPPPPVSPPPLPSPPPPPAQEEQEESPPPVVPATCSRKRGRPPLTPSQRAEREAARAGPEGTSPPTPTPSTATGGPPEDSPTVAPKSTTFLKNIRQFIMPVVSARSSRVIKTPRRFMDEDPPKPPKVEVSPVLRPPITTSPPVPQEPAPVPSPPRAPTPPSTPVPLPEKRRSILREPTFRWTSLTRELPPPPPAPPPPPAPSPPPAPATSSRRPLLLRAPQFTPSEAHLKIYESVLTPPPLGAPEAPEPEPPPADDSPAEPEPRAVGRTNHLSLPRFAPVVTTPVKAEVSPHGAPALSNGPQTQAQLLQPLQALQTQLLPQALPPPQPQLQPPPSPQQMPPLEKARIAGVGSLPLSGVEEKMFSLLKRAKVQLFKIDQQQQQKVAASMPLSPGGQMEEVAGAVKQISDRGPVRSEDESVEAKRERPSGPESPVQGPRIKHVCRHAAVALGQARAMVPEDVPRLSALPLRDRQDLATEDTSSASETESVPSRSRRGKVEAAGPGGESEPTGSGGTLAHTPRRSLPSHHGKKMRMARCGHCRGCLRVQDCGSCVNCLDKPKFGGPNTKKQCCVYRKCDKIEARKMERLAKKGRTIVKTLLPWDSDESPEASPGPPGPRRGAGAGGPREEVVAHPGPEEQDSLLQRKSARRCVKQRPSYDIFEDSDDSEPGGPPAPRRRTPRENELPLPEPEEQSRPRKPTLQPVLQLKARRRLDKDALAPGPFASFPNGWTGKQKSPDGVHRVRVDFKEDCDLENVWLMGGLSVLTSVPGGPPMVCLLCASKGLHELVFCQVCCDPFHPFCLEEAERPLPQHHDTWCCRRCKFCHVCGRKGRGSKHLLECERCRHAYHPACLGPSYPTRATRKRRHWICSACVRCKSCGATPGKNWDVEWSGDYSLCPRCTQLYEKGNYCPICTRCYEDNDYESKMMQCAQCDHWVHAKCEGLSDEDYEILSGLPDSVLYTCGPCAGAAQPRWREALSGALQGGLRQVLQGLLSSKVVGPLLLCTQCGPDGKQLHPGPCGLQAVSQRFEDGHYKSVHSFMEDMVGILMRHSEEGETPDRRAGGQMKGLLLKLLESAFGWFDAHDPKYWRRSTRLPNGVLPNAVLPPSLDHVYAQWRQQEPETPESGQPPGDPSAAFQGKDPAAFSHLEDPRQCALCLKYGDADSKEAGRLLYIGQNEWTHVNCAIWSAEVFEENDGSLKNVHAAVARGRQMRCELCLKPGATVGCCLSSCLSNFHFMCARASYCIFQDDKKVFCQKHTDLLDGKEIVNPDGFDVLRRVYVDFEGINFKRKFLTGLEPDAINVLIGSIRIDSLGTLSDLSDCEGRLFPIGYQCSRLYWSTVDARRRCWYRCRILEYRPWGPREEPAHLEAAEENQTIVHSPAPSSEPPGGEDPPLDTDVLVPGAPERHSPIQNLDPPLRPDSGSAPPPAPRSFSGARIKVPNYSPSRRPLGGVSFGPLPSPGSPSSLTHHIPTVGDPDFPAPPRRSRRPSPLAPRPPPSRWASPPLKTSPQLRVPPPTSVVTALTPTSGELAPPGPAPSPPPPEDLGPDFEDMEVVSGLSAADLDFAASLLGTEPFQEEIVAAGAMGSSHGGPGDSSEEESSPTSRYIHFPVTVVSAPGLAPSATPGAPRIEQLDGVDDGTDSEAEAVQQPRGQGTPPSGPGVVRAGVLGAAGDRARPPEDLPSEIVDFVLKNLGGPGDGGAGPREESLPPAPPLANGSQPSQGLTASPADPTRTFAWLPGAPGVRVLSLGPAPEPPKPATSKIILVNKLGQVFVKMAGEGEPVPPPVKQPPLPPTISPTAPTSWTLPPGPLLGVLPVVGVVRPAPPPPPPPLTLVLSSGPASPPRQAIRVKRVSTFSGRSPPAPPPYKAPRLDEDGEASEDTPQVPGLGSGGFSRVRMKTPTVRGVLDLDRPGEPAGEESPGPLQERSPLLPLPEDGPPQVPDGPPDLLLESQWHHYSGEASSSEEEPPSPDDKENQAPKRTGPHLRFEISSEDGFSVEAESLEGAWRTLIEKVQEARGHARLRHLSFSGMSGARLLGIHHDAVIFLAEQLPGAQRCQHYKFRYHQQGEGQEEPPLNPHGAARAEVYLRKCTFDMFNFLASQHRVLPEGATCDEEEDEVQLRSTRRATSLELPMAMRFRHLKKTSKEAVGVYRSAIHGRGLFCKRNIDAGEMVIEYSGIVIRSVLTDKREKFYDGKGIGCYMFRMDDFDVVDATMHGNAARFINHSCEPNCFSRVIHVEGQKHIVIFALRRILRGEELTYDYKFPIEDASNKLPCNCGAKRCRRFLN

SEQ ID NO: 47794 - protein, 4911 aa, Homo sapiens
  Payload ID: 9665
  Gene Symbol: KMT2C
  Gene Name: lysine (K)-specific methyltransferase 2C
  Uniprot ID: Q8NEZ4
  ENSP ID: ENSP00000262189
MSSEEDKSVEQPQPPPPPPEEPGAPAPSPAAADKRPRGRPRKDGASPFQRARKKPRSRGKTAVEDEDSMDGLETTETETIVETEIKEQSAEEDAEAEVDNSKQLIPTLQRSVSEESANSLVSVGVEAKISEQLCAFCYCGEKSSLGQGDLKQFRITPGFILPWRNQPSNKKDIDDNSNGTYEKMQNSAPRKQRGQRKERSPQQNIVSCVSVSTQTASDDQAGKLWDELSLVGLPDAIDIQALFDSTGTCWAHHRCVEWSLGVCQMEEPLLVNVDKAVVSGSTERCAFCKHLGATIKCCEEKCTQMYHYPCAAGAGTFQDFSHIFLLCPEHIDQAPERSKEDANCAVCDSPGDLLDQFFCTTCGQHYHGMCLDIAVTPLKRAGWQCPECKVCQNCKQSGEDSKMLVCDTCDKGYHTFCLQPVMKSVPTNGWKCKNCRICIECGTRSSSQWHHNCLICDNCYQQQDNLCPFCGKCYHPELQKDMLHCNMCKRWVHLECDKPTDHELDTQLKEEYICMYCKHLGAEMDRLQPGEEVEIAELTTDYNNEMEVEGPEDQMVFSEQAANKDVNGQESTPGIVPDAVQVHTEEQQKSHPSESLDTDSLLIAVSSQHTVNTELEKQISNEVDSEDLKMSSEVKHICGEDQIEDKMEVTENIEVVTHQITVQQEQLQLLEEPETVVSREESRPPKLVMESVTLPLETLVSPHEESISLCPEEQLVIERLQGEKEQKENSELSTGLMDSEMTPTIEGCVKDVSYQGGKSIKLSSETESSFSSSADISKADVSSSPTPSSDLPSHDMLHNYPSALSSSAGNIMPTTYISVTPKIGMGKPAITKRKFSPGRPRSKQGAWSTHNTVSPPSWSPDISEGREIFKPRQLPGSAIWSIKVGRGSGFPGKRRPRGAGLSGRGGRGRSKLKSGIGAVVLPGVSTADISSNKDDEENSMHNTVVLFSSSDKFTLNQDMCVVCGSFGQGAEGRLLACSQCGQCYHPYCVSIKITKVVLSKGWRCLECTVCEACGKATDPGRLLLCDDCDISYHTYCLDPPLQTVPKGGWKCKWCVWCRHCGATSAGLRCEWQNNYTQCAPCASLSSCPVCYRNYREEDLILQCRQCDRWMHAVCQNLNTEEEVENVADIGFDCSMCRPYMPASNVPSSDCCESSLVAQIVTKVKELDPPKTYTQDGVCLTESGMTQLQSLTVTVPRRKRSKPKLKLKIINQNSVAVLQTPPDIQSEHSRDGEMDDSREGELMDCDGKSESSPEREAVDDETKGVEGTDGVKKRKRKPYRPGIGGFMVRQRSRTGQGKTKRSVIRKDSSGSISEQLPCRDDGWSEQLPDTLVDESVSVTESTEKIKKRYRKRKNKLEETFPAYLQEAFFGKDLLDTSRQSKISLDNLSEDGAQLLYKTNMNTGFLDPSLDPLLSSSSAPTKSGTHGPADDPLADISEVLNTDDDILGIISDDLAKSVDHSDIGPVTDDPSSLPQPNVNQSSRPLSEEQLDGILSPELDKMVTDGAILGKLYKIPELGGKDVEDLFTAVLSPANTQPTPLPQPPPPTQLLPIHNQDAFSRMPLMNGLIGSSPHLPHNSLPPGSGLGTFSAIAQSSYPDARDKNSAFNPMASDPNNSWTSSAPTVEGENDTMSNAQRSTLKWEKEEALGEMATVAPVLYTNINFPNLKEEFPDWTTRVKQIAKLWRKASSQERAPYVQKARDNRAALRINKVQMSNDSMKRQQQQDSIDPSSRIDSELFKDPLKQRESEHEQEWKFRQQMRQKSKQQAKIEATQKLEQVKNEQQQQQQQQFGSQHLLVQSGSDTPSSGIQSPLTPQPGNGNMSPAQSFHKELFTKQPPSTPTSTSSDDVFVKPQAPPPPPAPSRIPIQDSLSQAQTSQPPSPQVFSPGSSNSRPPSPMDPYAKMVGTPRPPPVGHSFSRRNSAAPVENCTPLSSVSRPLQMNETTANRPSPVRDLCSSSTTNNDPYAKPPDTPRPVMTDQFPKSLGLSRSPVVSEQTAKGPIAAGTSDHFTKPSPRADVFQRQRIPDSYARPLLTPAPLDSGPGPFKTPMQPPPSSQDPYGSVSQASRRLSVDPYERPALTPRPIDNFSHNQSNDPYSQPPLTPHPAVNESFAHPSRAFSQPGTISRPTSQDPYSQPPGTPRPVVDSYSQSSGTARSNTDPYSQPPGTPRPTTVDPYSQQPQTPRPSTQTDLFVTPVTNQRHSDPYAHPPGTPRPGISVPYSQPPATPRPRISEGFTRSSMTRPVLMPNQDPFLQAAQNRGPALPGPLVRPPDTCSQTPRPPGPGLSDTFSRVSPSAARDPYDQSPMTPRSQSDSFGTSQTAHDVADQPRPGSEGSFCASSNSPMHSQGQQFSGVSQLPGPVPTSGVTDTQNTVNMAQADTEKLRQRQKLREIILQQQQQKKIAGRQEKGSQDSPAVPHPGPLQHWQPENVNQAFTRPPPPYPGNIRSPVAPPLGPRYAVFPKDQRGPYPPDVASMGMRPHGFRFGFPGGSHGTMPSQERFLVPPQQIQGSGVSPQLRRSVSVDMPRPLNNSQMNNPVGLPQHFSPQSLPVQQHNILGQAYIELRHRAPDGRQRLPFSAPPGSVVEASSNLRHGNFIPRPDFPGPRHTDPMRRPPQGLPNQLPVHPDLEQVPPSQQEQGHSVHSSSMVMRTLNHPLGGEFSEAPLSTSVPSETTSDNLQITTQPSDGLEEKLDSDDPSVKELDVKDLEGVEVKDLDDEDLENLNLDTEDGKVVELDTLDNLETNDPNLDDLLRSGEFDIIAYTDPELDMGDKKSMFNEELDLPIDDKLDNQCVSVEPKKKEQENKTLVLSDKHSPQKKSTVTNEVKTEVLSPNSKVESKCETEKNDENKDNVDTPCSQASAHSDLNDGEKTSLHPCDPDLFEKRTNRETAGPSANVIQASTQLPAQDVINSCGITGSTPVLSSLLANEKSDNSDIRPSGSPPPPTLPASPSNHVSSLPPFIAPPGRVLDNAMNSNVTVVSRVNHVFSQGVQVNPGLIPGQSTVNHSLGTGKPATQTGPQTSQSGTSSMSGPQQLMIPQTLAQQNRERPLLLEEQPLLLQDLLDQERQEQQQQRQMQAMIRQRSEPFFPNIDFDAITDPIMKAKMVALKGINKVMAQNNLGMPPMVMSRFPFMGQVVTGTQNSEGQNLGPQAIPQDGSITHQISRPNPPNFGPGFVNDSQRKQYEEWLQETQQLLQMQQKYLEEQIGAHRKSKKALSAKQRTAKKAGREFPEEDAEQLKHVTEQQSMVQKQLEQIRKQQKEHAELIEDYRIKQQQQCAMAPPTMMPSVQPQPPLIPGATPPTMSQPTFPMVPQQLQHQQHTTVISGHTSPVRMPSLPGWQPNSAPAHLPLNPPRIQPPIAQLPIKTCTPAPGTVSNANPQSGPPPRVEFDDNNPFSESFQERERKERLREQQERQRIQLMQEVDRQRALQQRMEMEQHGMVGSEISSSRTSVSQIPFYSSDLPCDFMQPLGPLQQSPQHQQQMGQVLQQQNIQQGSINSPSTQTFMQTNERRQVGPPSFVPDSPSIPVGSPNFSSVKQGHGNLSGTSFQQSPVRPSFTPALPAAPPVANSSLPCGQDSTITHGHSYPGSTQSLIQLYSDIIPEEKGKKKRTRKKKRDDDAESTKAPSTPHSDITAPPTPGISETTSTPAVSTPSELPQQADQESVEPVGPSTPNMAAGQLCTELENKLPNSDFSQATPNQQTYANSEVDKLSMETPAKTEEIKLEKAETESCPGQEEPKLEEQNGSKVEGNAVACPVSSAQSPPHSAGAPAAKGDSGNELLKHLLKNKKSSSLLNQKPEGSICSEDDCTKDNKLVEKQNPAEGLQTLGAQMQGGFGCGNQLPKTDGGSETKKQRSKRTQRTGEKAAPRSKKRKKDEEEKQAMYSSTDTFTHLKQQNNLSNPPTPPASLPPTPPPMACQKMANGFATTEELAGKAGVLVSHEVTKTLGPKPFQLPFRPQDDLLARALAQGPKTVDVPASLPTPPHNNQEELRIQDHCGDRDTPDSFVPSSSPESVVGVEVSRYPDLSLVKEEPPEPVPSPIIPILPSTAGKSSESRRNDIKTEPGTLYFASPFGPSPNGPRSGLISVAITLHPTAAENISSVVAAFSDLLHVRIPNSYEVSSAPDVPSMGLVSSHRINPGLEYRQHLLLRGPPPGSANPPRLVSSYRLKQPNVPFPPTSNGLSGYKDSSHGIAESAALRPQWCCHCKVVILGSGVRKSFKDLTLLNKDSRESTKRVEKDIVFCSNNCFILYSSTAQAKNSENKESIPSLPQSPMRETPSKAFHQYSNNISTLDVHCLPQLPEKASPPASPPIAFPPAFEAAQVEAKPDELKVTVKLKPRLRAVHGGFEDCRPLNKKWRGMKWKKWSIHIVIPKGTFKPPCEDEIDEFLKKLGTSLKPDPVPKDYRKCCFCHEEGDGLTDGPARLLNLDLDLWVHLNCALWSTEVYETQAGALINVELALRRGLQMKCVFCHKTGATSGCHRFRCTNIYHFTCAIKAQCMFFKDKTMLCPMHKPKGIHEQELSYFAVFRRVYVQRDEVRQIASIVQRGERDHTFRVGSLIFHTIGQLLPQQMQAFHSPKALFPVGYEASRLYWSTRYANRRCRYLCSIEEKDGRPVFVIRIVEQGHEDLVLSDISPKGVWDKILEPVACVRKKSEMLQLFPAYLKGEDLFGLTVSAVARIAESLPGVEACENYTFRYGRNPLMELPLAVNPTGCARSEPKMSAHVKRFVLRPHTLNSTSTSKSFQSTVTGELNAPYSKQFVHSKSSQYRKMKTEWKSNVYLARSRIQGLGLYAARDIEKHTMVIEYIGTIIRNEVANRKEKLYESQNRGVYMFRMDNDHVIDATLTGGPARYINHSCAPNCVAEVVTFERGHKIIISSSRRIQKGEELCYDYKFDFEDDQHKIPCHCGAVNCRKWMN

SEQ ID NO: 47795 - protein, 4911 aa, Homo sapiens; identical to SEQ ID NO: 47794
  Payload ID: 9665
  Gene Symbol: KMT2C
  Gene Name: lysine (K)-specific methyltransferase 2C
  Uniprot ID: Q8NEZ4
  ENSP ID: ENSP00000347325

SEQ ID NO: 47796 - protein, 2441 aa, Homo sapiens
  Payload ID: 9665
  Gene Symbol: KMT2C
  Gene Name: lysine (K)-specific methyltransferase 2C
  ENSP ID: ENSP00000353218
  MOD_RES (1)..(1): Any amino acid
XERFLVPPQQIQGSGVSPQLRRSVSVDMPRPLNNSQMNNPVGLPQHFSPQSLPVQQHNILGQAYIELRHRAPDGRQRLPFSAPPGSVVEASSNLRHGNFIPRPDFPGPRHTDPMRRPPQGLPNQLPVHPDLEQVPPSQQEQGHSVHSSSMVMRTLNHPLGGEFSEAPLSTSVPSETTSDNLQITTQPSDGLEEKLDSDDPSVKELDVKDLEGVEVKDLDDEDLENLNLDTEDGKVVELDTLDNLETNDPNLDDLLRSGEFDIIAYTDPELDMGDKKSMFNEELDLPIDDKLDNQCVSVEPKKKEQENKTLVLSDKHSPQKKSTVTNEVKTEVLSPNSKVESKCETEKNDENKDNVDTPCSQASAHSDLNDGEKTSLHPCDPDLFEKRTNRETAGPSANVIQASTQLPAQDVINSCGITGSTPVLSSLLANEKSDNSDIRPSGSPPPPTLPASPSNHVSSLPPFIAPPGRVLDNAMNSNVTVVSRVNHVFSQGVQVNPGLIPGQSTVNHSLGTGKPATQTGPQTSQSGTSSMSGPQQLMIPQTLAQQNRERPLLLEEQPLLLQDLLDQERQEQQQQRQMQAMIRQRSEPFFPNIDFDAITDPIMKAKMVALKGINKVMAQNNLGMPPMVMSRFPFMGQVVTGTQNSEGQNLGPQAIPQDGSITHQISRPNPPNFGPGFVNDSQRKQYEEWLQETQQLLQMQQKYLEEQIGAHRKSKKALSAKQRTAKKAGREFPEEDAEQLKHVTEQQSMVQKQLEQIRKQQKEHAELIEDYRIKQQQQCAMAPPTMMPSVQPQPPLIPGATPPTMSQPTFPMVPQQLQHQQHTTVISGHTSPVRMPSLPGWQPNSAPAHLPLNPPRIQPPIAQLPIKTCTPAPGTVSNANPQSGPPPRVEFDDNNPFSESFQERERKERLREQQERQRIQLMQEVDRQRALQQRMEMEQHGMVGSEISSSRTSVSQIPFYSSDLPCDFMQPLGPLQQSPQHQQQMGQVLQQQNIQQGSINSPSTQTFMQTNERRQVGPPSFVPDSPSIPVGSPNFSSVKQGHGNLSGTSFQQSPVRPSFTPALPAAPPVANSSLPCGQDSTITHGHSYPGSTQSLIQLYSDIIPEEKGKKKRTRKKKRDDDAESTKAPSTPHSDITAPPTPGISETTSTPAVSTPSELPQQADQESVEPVGPSTPNMAAGQLCTELENKLPNSDFSQATPNQQTYANSEVDKLSMETPAKTEEIKLEKAETESCPGQEEPKLEEQNGSKVEGNAVACPVSSAQSPPHSAGAPAAKGDSGNELLKHLLKNKKSSSLLNQKPEGSICSEDDCTKDNKLVEKQNPAEGLQTLGAQMQGGFGCGNQLPKTDGGSETKKQRSKRTQRTGEKAAPRSKKRKKDEEEKQAMYSSTDTFTHLKQQLSLLPLMEPIIGVNFAHFLPYGSGQFNSGNRLLGTFGSATLEGVSDYYSQLIYKQNNLSNPPTPPASLPPTPPPMACQKMANGFATTEELAGKAGVLVSHEVTKTLGPKPFQLPFRPQDDLLARALAQGPKTVDVPASLPTPPHNNQEELRIQDHCGDRDTPDSFVPSSSPESVVGVEVSRYPDLSLVKEEPPEPVPSPIIPILPSTAGKSSESRRNDIKTEPGTLYFASPFGPSPNGPRSGLISVAITLHPTAAENISSVVAAFSDLLHVRIPNSYEVSSAPDVPSMGLVSSHRINPGLEYRQHLLLRGPPPGSANPPRLVSSYRLKQPNVPFPPTSNGLSGYKDSSHGIAESAALRPQWCCHCKVVILGSGVRKSFKDLTLLNKDSRESTKRVEKDIVFCSNNCFILYSSTAQAKNSENKESIPSLPQSPMRETPSKAFHQYSNNISTLDVHCLPQLPEKASPPASPPIAFPPAFEAAQVEAKPDELKVTVKLKPRLRAVHGGFEDCRPLNKKWRGMKWKKWSIHIVIPKGTFKPPCEDEIDEFLKKLGTSLKPDPVPKDYRKCCFCHEEGDGLTDGPARLLNLDLDLWVHLNCALWSTEVYETQAGALINVELALRRGLQMKCVFCHKTGATSGCHRFRCTNIYHFTCAIKAQCMFFKDKTMLCPMHKPKGIHEQELSYFAVFRRVYVQRDEVRQIASIVQRGERDHTFRVGSLIFHTIGQLLPQQMQAFHSPKALFPVGYEASRLYWSTRYANRRCRYLCSIEEKDGRPVFVIRIVEQGHEDLVLSDISPKGVWDKILEPVACVRKKSEMLQLFPAYLKGEDLFGLTVSAVARIAESLPGVEACENYTFRYGRNPLMELPLAVNPTGCARSEPKMSAHVKRPHTLNSTSTSKSFQSTVTGELNAPYSKQFVHSKSSQYRKMKTEWKSNVYLARSRIQGLGLYAARDIEKHTMVIEYIGTIIRNEVANRKEKLYESQNRGVYMFRMDNDHVIDATLTGGPARYINHSCAPNCVAEVVTFERGHKIIISSSRRIQKGEEVRV

SEQ ID NO: 47797 - protein, 228 aa, Homo sapiens
  Payload ID: 9665
  Gene Symbol: KMT2C
  Gene Name: lysine (K)-specific methyltransferase 2C
  ENSP ID: ENSP00000403483
  MOD_RES (1)..(1): Any amino acid
XSSAGNIMPTTYISVTPKIGMGKPAITKRKFSPGRPRSKQGRGSGFPGKRRPRGAGLSGRGGRGRSKLKSGIGAVVLPGVSTADISSNKDDEENSMHNTVVLFSSSDKFTLNQDMCVVCGSFGQGAEGRLLACSQCGQCYHPYCVSIKITKVVLSKGWRCLECTVCEACGKATDPGRLLLCDDCDISYHTYCLDPPLQTVPKGGWKCKWCVWCRHCGATSAGLRCEWQ

SEQ ID NO: 47798 - protein, 236 aa, Homo sapiens
  Payload ID: 9665
  Gene Symbol: KMT2C
  Gene Name: lysine (K)-specific methyltransferase 2C
  ENSP ID: ENSP00000408001
TKDNKLVEKQNPAEGLQNNLSNPPTPPASLPPTPPPMACQKMANGFATTEELAGKAGVLVSHEVTKTLGPKPFQLPFRPQDDLLARALAQGPKTVDVPASLPTPPHNNQEELRIQDHCGDRDTPDSFVPSSSPESVVGVEVSRYPDLSLVKEEPPEPVPSPIIPILPSTAGKSSESRRNDIKTEPGTLYFASPFGPSPNGPRSGLISVAITLHPTAAENISSVVAAFSDLLHVRIP

SEQ ID NO: 47799 - protein, 155 aa, Homo sapiens
  Payload ID: 9665
  Gene Symbol: KMT2C
  Gene Name: lysine (K)-specific methyltransferase 2C
  ENSP ID: ENSP00000410239
MSSEEDKSVEQPQPPPPPPEEPGAPAPSPAAADKRPRGRPRKDGASPFQRARKKPRSRGKTAVEDEDSMDGLETTETETIVETAEIKEQSAEEDAEAEVDNSKQLIPTLQRSVSEESANSLVSVGVEAKISEQLCAFCYCGEKSSLGQGDLKQFR

SEQ ID NO: 47800 - protein, 1524 aa, Homo sapiens
  Payload ID: 9665
  Gene Symbol: KMT2C
  Gene Name: lysine (K)-specific methyltransferase 2C
  ENSP ID: ENSP00000410411
LMQEVDRQRALQQRMEMEQHGMVGSEISSSRTSVSQIPFYSSDLPCDFMQPLGPLQQSPQHQQQMGQVLQQQNIQQGSINSPSTQTFMQTNERRQVGPPSFVPDSPSIPVGSPNFSSVKQGHGNLSGTSFQQSPVRPSFTPALPAAPPVANSSLPCGQDSTITHGHSYPGSTQSLIQLYSDIIPEEKGKKKRTRKKKRDDDAESTKAPSTPHSDITAPPTPGISETTSTPAVSTPSELPQQADQESVEPVGPSTPNMAAGQLCTELENKLPNSDFSQATPNQQTYANSEVDKLSMETPAKTEEIKLEKAETESCPGQEEPKLEEQNGSKVEGNAVACPVSSAQSPPHSAGAPAAKGDSGNELLKHLLKNKKSSSLLNQKPEGSICSEDDCTKDNKLVEKQNPAEGLQTLGAQMQGGFGCGNQLPKTDGGSETKKQRSKRTQRTGEKAAPRSKKRKKDEEEKQAMYSSTDTFTHLKQQLSLLPLMEPIIGVNFAHFLPYGSGQFNSGNRLLGTFGSATLEGVSDYYSQLIYKKMANGFATTEELAGKAGVLVSHEVTKTLGPKPFQLPFRPQDDLLARALAQGPKTVDVPASLPTPPHNNQEELRIQDHCGDRDTPDSFVPSSSPESVVGVEVSRYPDLSLVKEEPPEPVPSPIIPILPSTAGKSSESRRNDIKTEPGTLYFASPFGPSPNGPRSGLISVAITLHPTAAENISSVVAAFSDLLHVRIPNSYEVSSAPDVPSMGLVSSHRINPGLEYRQHLLLRGPPPGSANPPRLVSSYRLKQPNVPFPPTSNGLSGYKDSSHGIAESAALRPQWCCHCKVVILGSGVRKSFKDLTLLNKDSRESTKRVEKDIVFCSNNCFILYSSTAQAKNSENKESIPSLPQSPMRETPSKAFHQYSNNISTLDVHCLPQLPEKASPPASPPIAFPPAFEAAQVEAKPDELKVTVKLKPRLRAVHGGFEDCRPLNKKWRGMKWKKWSIHIVIPKGTFKPPCEDEIDEFLKKLGTSLKPDPVPKDYRKCCFCHEEGDGLTDGPARLLNLDLDLWVHLNCALWSTEVYETQAGALINVELALRRGLQMKCVFCHKTGATSGCHRFRCTNIYHFTCAIKAQCMFFKDKTMLCPMHKPKGIHEQELSYFAVFRRVYVQRDEVRQIASIVQRGERDHTFRVGSLIFHTIGQLLPQQMQAFHSPKALFPVGYEASRLYWSTRYANRRCRYLCSIEEKDGRPVFVIRIVEQGHEDLVLSDISPKGVWDKILEPVACVRKKSEMLQLFPAYLKGEDLFGLTVSAVARIAESLPGVEACENYTFRYGRNPLMELPLAVNPTGCARSEPKMSAHVKRPHTLNSTSTSKSFQSTVTGELNAPYSKQFVHSKSSQYRKMKTEWKSNVYLARSRIQGLGLYAARDIEKHTMVIEYIGTIIRNEVANRKEKLYESQNRGVYMFRMDNDHVIDATLTGGPARYINHSCAPNCVAEVVTFERGHKIIISSSRRIQKGEELCYDYKFDFEDDQHKIPCHCGAVNCRKWMN

SEQ ID NO: 47801 - protein, 826 aa, Homo sapiens
  Payload ID: 9665
  Gene Symbol: KMT2C
  Gene Name: lysine (K)-specific methyltransferase 2C
  ENSP ID: ENSP00000453752
MSSEEDKSVEQPQPPPPPPEEPGAPAPSPAAADKRPRGRPRKDGASPFQRARKKPRSRGKTAVEDEDSMDGLETTETETIVETEIKEQSAEEDAEAEVDNSKQLIPTLQRSVSEESANSLVSVGVEAKISEQLCAFCYCGEKSSLGQGDLKQFRITPGFILPWRNQPSNKKDIDDNSNGTYEKMQNSAPRKQRGQRKERSPQQNIVSCVSVSTQTASDDQAGKLWDELSLVGLPDAIDIQALFDSTGTCWAHHRCVEWSLGVCQMEEPLLVNVDKAVVSGSTERCAFCKHLGATIKCCEEKCTQMYHYPCAAGAGTFQDFSHIFLLCPEHIDQAPERSKEDANCAVCDSPGDLLDQFFCTTCGQHYHGMCLDIAVTPLKRAGWQCPECKVCQNCKQSGEDSKMLVCDTCDKGYHTFCLQPVMKSVPTNGWKCKNCRICIECGTRSSSQWHHNCLICDNCYQQQDNLCPFCGKCYHPELQKDMLHCNMCKRWVHLECDKPTDHELDTQLKEEYICMYCKHLGAEMDRLQPGEEVEIAELTTDYNNEMEVEGPEDQMVFSEQAANKDVNGQESTPGIVPDAVQVHTEEQQKSHPSESLDTDSLLIAVSSQHTVNTELEKQISNEVDSEDLKMSSEVKHICGEDQIEDKMEVTENIEVVTHQITVQQEQLQLLEEPETVVSREESRPPKLVMESVTLPLETLVSPHEESISLCPEEQLVIERLQGEKEQKENSELSTGLMDSEMTPTIEGCVKDVSYQGGKSIKLSSETESSFSSSADISKADVSSSPTPSSDLPSHDMLHNYPSALSSSAGNIMPTTYISVTPKIGMG

SEQ ID NO: 47802 - protein, 179 aa, Homo sapiens
  Payload ID: 9665
  Gene Symbol: KMT2C
  Gene Name: lysine (K)-specific methyltransferase 2C
  ENSP ID: ENSP00000454058
VFSPGSSNSRPPSPMDPYAKMRQKLREIILQQQQQKKIAGRQEKGSQDSPAVPHPGPLQHWQPENVNQAFTRPPPPYPGNIRSPVAPPLGPRYAVFPKDQRGPYPPDVASMGMRPHGFRFGFPGGSHGTMPSQERFLVPPQQIQGSGVSPQLRRSVSVDMPRPLNNSQMNNPVGLPQHF

SEQ ID NO: 47803 - protein, 5537 aa, Homo sapiens
  Payload ID: 9666
  Gene Symbol: KMT2D
  Gene Name: lysine (K)-specific methyltransferase 2D
  Uniprot ID: O14686
  ENSP ID: ENSP00000301067
MDSQKLAGEDKDSEPAADGPAASEDPSATESDLPNPHVGEVSVLSSGSPRLQETPQDCSGGPVRRCALCNCGEPSLHGQRELRRFELPFDWPRCPVVSPGGSPGPNEAVLPSEDLSQIGFPEGLTPAHLGEPGGSCWAHHWCAAWSAGVWGQEGPELCGVDKAIFSGISQRCSHCTRLGASIPCRSPGCPRLYHFPCATASGSFLSMKTLQLLCPEHSEGAAYLEEARCAVCEGPGELCDLFFCTSCGHHYHGACLDTALTARKRAGWQCPECKVCQACRKPGNDSKMLVCETCDKGYHTFCLKPPMEELPAHSWKCKACRVCRACGAGSAELNPNSEWFENYSLCHRCHKAQGGQTIRSVAEQHTPVCSRFSPPEPGDTPTDEPDALYVACQGQPKGGHVTSMQPKEPGPLQCEAKPLGKAGVQLEPQLEAPLNEEMPLLPPPEESPLSPPPEESPTSPPPEASRLSPPPEELPASPLPEALHLSRPLEESPLSPPPEESPLSPPPESSPFSPLEESPLSPPEESPPSPALETPLSPPPEASPLSPPFEESPLSPPPEELPTSPPPEASRLSPPPEESPMSPPPEESPMSPPPEASRLFPPFEESPLSPPPEESPLSPPPEASRLSPPPEDSPMSPPPEESPMSPPPEVSRLSPLPVVSRLSPPPEESPLSPPPEESPTSPPPEASRLSPPPEDSPTSPPPEDSPASPPPEDSLMSLPLEESPLLPLPEEPQLCPRSEGPHLSPRPEEPHLSPRPEEPHLSPQAEEPHLSPQPEEPCLCAVPEEPHLSPQAEGPHLSPQPEELHLSPQTEEPHLSPVPEEPCLSPQPEESHLSPQSEEPCLSPRPEESHLSPELEKPPLSPRPEKPPEEPGQCPAPEELPLFPPPGEPSLSPLLGEPALSEPGEPPLSPLPEELPLSPSGEPSLSPQLMPPDPLPPPLSPIITAAAPPALSPLGELEYPFGAKGDSDPESPLAAPILETPISPPPEANCTDPEPVPPMILPPSPGSPVGPASPILMEPLPPQCSPLLQHSLVPQNSPPSQCSPPALPLSVPSPLSPIGKVVGVSDEAELHEMETEKVSEPECPALEPSATSPLPSPMGDLSCPAPSPAPALDDFSGLGEDTAPLDGIDAPGSQPEPGQTPGSLASELKGSPVLLDPEELAPVTPMEVYPECKQTAGQGSPCEEQEEPRAPVAPTPPTLIKSDIVNEISNLSQGDASASFPGSEPLLGSPDPEGGGSLSMELGVSTDVSPARDEGSLRLCTDSLPETDDSLLCDAGTAISGGKAEGEKGRRRSSPARSRIKQGRSSSFPGRRRPRGGAHGGRGRGRARLKSTASSIETLVVADIDSSPSKEEEEEDDDTMQNTVVLFSNTDKFVLMQDMCVVCGSFGRGAEGHLLACSQCSQCYHPYCVNSKITKVMLLKGWRCVECIVCEVCGQASDPSRLLLCDDCDISYHTYCLDPPLLTVPKGGWKCKWCVSCMQCGAASPGFHCEWQNSYTHCGPCASLVTCPICHAPYVEEDLLIQCRHCERWMHAGCESLFTEDDVEQAADEGFDCVSCQPYVVKPVAPVAPPELVPMKVKEPEPQYFRFEGVWLTETGMALLRNLTMSPLHKRRQRRGRLGLPGEAGLEGSEPSDALGPDDKKDGDLDTDELLKGEGGVEHMECEIKLEGPVSPDVEPGKEETEESKKRKRKPYRPGIGGFMVRQRKSHTRTKKGPAAQAEVLSGDGQPDEVIPADLPAEGAVEQSLAEGDEKKKQQRRGRKKSKLEDMFPAYLQEAFFGKELLDLSRKALFAVGVGRPSFGLGTPKAKGDGGSERKELPTSQKGDDGPDIADEESRGLEGKADTPGPEDGGVKASPVPSDPEKPGTPGEGMLSSDLDRISTEELPKMESKDLQQLFKDVLGSEREQHLGCGTPGLEGSRTPLQRPFLQGGLPLGNLPSSSPMDSYPGLCQSPFLDSRERGGFFSPEPGEPDSPWTGSGGTTPSTPTTPTTEGEGDGLSYNQRSLQRWEKDEELGQLSTISPVLYANINFPNLKQDYPDWSSRCKQIMKLWRKVPAADKAPYLQKAKDNRAAHRINKVQKQAESQINKQTKVGDIARKTDRPALHLRIPPQPGALGSPPPAAAPTIFIGSPTTPAGLSTSADGFLKPPAGSVPGPDSPGELFLKLPPQVPAQVPSQDPFGLAPAYPLEPRFPTAPPTYPPYPSPTGAPAQPPMLGASSRPGAGQPGEFHTTPPGTPRHQPSTPDPFLKPRCPSLDNLAVPESPGVGGGKASEPLLSPPPFGESRKALEVKKEELGASSPSYGPPNLGFVDSPSSGTHLGGLELKTPDVFKAPLTPRASQVEPQSPGLGLRPQEPPPAQALAPSPPSHPDIFRPGSYTDPYAQPPLTPRPQPPPPESCCALPPRSLPSDPFSRVPASPQSQSSSQSPLTPRPLSAEAFCPSPVTPRFQSPDPYSRPPSRPQSRDPFAPLHKPPRPQPPEVAFKAGSLAHTSLGAGGFPAALPAGPAGELHAKVPSGQPPNFVRSPGTGAFVGTPSPMRFTFPQAVGEPSLKPPVPQPGLPPPHGINSHFGPGPTLGKPQSTNYTVATGNFHPSGSPLGPSSGSTGESYGLSPLRPPSVLPPPAPDGSLPYLSHGASQRSGITSPVEKREDPGTGMGSSLATAELPGTQDPGMSGLSQTELEKQRQRQRLRELLIRQQIQRNTLRQEKETAAAAAGAVGPPGSWGAEPSSPAFEQLSRGQTPFAGTQDKSSLVGLPPSKLSGPILGPGSFPSDDRLSRPPPPATPSSMDVNSRQLVGGSQAFYQRAPYPGSLPLQQQQQQLWQQQQATAATSMRFAMSARFPSTPGPELGRQALGSPLAGISTRLPGPGEPVPGPAGPAQFIELRHNVQKGLGPGGTPFPGQGPPQRPRFYPVSEDPHRLAPEGLRGLAVSGLPPQKPSAPPAPELNNSLHPTPHTKGPTLPTGLELVNRPPSSTELGRPNPLALEAGKLPCEDPELDDDFDAHKALEDDEELAHLGLGVDVAKGDDELGTLENLETNDPHLDDLLNGDEFDLLAYTDPELDTGDKKDIFNEHLRLVESANEKAEREALLRGVEPGPLGPEERPPPAADASEPRLASVLPEVKPKVEEGGRHPSPCQFTIATPKVEPAPAANSLGLGLKPGQSMMGSRDTRMGTGPFSSSGHTAEKASFGATGGPPAHLLTPSPLSGPGGSSLLEKFELESGALTLPGGPAASGDELDKMESSLVASELPLLIEDLLEHEKKELQKKQQLSAQLQPAQQQQQQQQQHSLLSAPGPAQAMSLPHEGSSPSLAGSQQQLSLGLAGARQPGLPQPLMPTQPPAHALQQRLAPSMAMVSNQGHMLSGQHGGQAGLVPQQSSQPVLSQKPMGTMPPSMCMKPQQLAMQQQLANSFFPDTDLDKFAAEDIIDPIAKAKMVALKGIKKVMAQGSIGVAPGMNRQQVSLLAQRLSGGPSSDLQNHVAAGSGQERSAGDPSQPRPNPPTFAQGVINEADQRQYEEWLFHTQQLLQMQLKVLEEQIGVHRKSRKALCAKQRTAKKAGREFPEADAEKLKLVTEQQSKIQKQLDQVRKQQKEHTNLMAEYRNKQQQQQQQQQQQQQQHSAVLALSPSQSPRLLTKLPGQLLPGHGLQPPQGPPGGQAGGLRLTPGGMALPGQPGGPFLNTALAQQQQQQHSGGAGSLAGPSGGFFPGNLALRSLGPDSRLLQERQLQLQQQRMQLAQKLQQQQQQQQQQQHLLGQVAIQQQQQQGPGVQTNQALGPKPQGLMPPSSHQGLLVQQLSPQPPQGPQGMLGPAQVAVLQQQHPGALGPQGPHRQVLMTQSRVLSSPQLAQQGQGLMGHRLVTAQQQQQQQQHQQQGSMAGLSHLQQSLMSHSGQPKLSAQPMGSLQQLQQQQQLQQQQQLQQQQQQQLQQQQQLQQQQLQQQQQQQQLQQQQQQQLQQQQQQLQQQQQQQQQQFQQQQQQQQMGLLNQSRTLLSPQQQQQQQVALGPGMPAKPLQHFSSPGALGPTLLLTGKEQNTVDPAVSSEATEGPSTHQGGPLAIGTTPESMATEPGEVKPSLSGDSQLLLVQPQPQPQPSSLQLQPPLRLPGQQQQQVSLLHTAGGGSHGQLGSGSSSEASSVPHLLAQPSVSLGDQPGSMTQNLLGPQQPMLERPMQNNTGPQPPKPGPVLQSGQGLPGVGIMPTVGQLRAQLQGVLAKNPQLRHLSPQQQQQLQALLMQRQLQQSQAVRQTPPYQEPGTQTSPLQGLLGCQPQLGGFPGPQTGPLQELGAGPRPQGPPRLPAPPGALSTGPVLGPVHPTPPPSSPQEPKRPSQLPSPSSQLPTEAQLPPTHPGTPKPQGPTLEPPPGRVSPAAAQLADTLFSKGLGPWDPPDNLAETQKPEQSSLVPGHLDQVNGQVVPEASQLSIKQEPREEPCALGAQSVKREANGEPIGAPGTSNHLLLAGPRSEAGHLLLQKLLRAKNVQLSTGRGSEGLRAEINGHIDSKLAGLEQKLQGTPSNKEDAAARKPLTPKPKRVQKASDRLVSSRKKLRKEDGVRASEALLKQLKQELSLLPLTEPAITANFSLFAPFGSGCPVNGQSQLRGAFGSGALPTGPDYYSQLLTKNNLSNPPTPPSSLPPTPPPSVQQKMVNGVTPSEELGEHPKDAASARDSERALRDTSEVKSLDLLAALPTPPHNQTEDVRMESDEDSDSPDSIVPASSPESILGEEAPRFPHLGSGRWEQEDRALSPVIPLIPRASIPVFPDTKPYGALGLEVPGKLPVTTWEKGKGSEVSVMLTVSAAAAKNLNGVMVAVAELLSMKIPNSYEVLFPESPARAGTEPKKGEAEGPGGKEKGLEGKSPDTGPDWLKQFDAVLPGYTLKSQLDILSLLKQESPAPEPPTQHSYTYNVSNLDVRQLSAPPPEEPSPPPSPLAPSPASPPTEPLVELPTEPLAEPPVPSPLPLASSPESARPKPRARPPEEGEDSRPPRLKKWKGVRWKRLRLLLTIQKGSGRQEDEREVAEFMEQLGTALRPDKVPRDMRRCCFCHEEGDGATDGPARLLNLDLDLWVHLNCALWSTEVYETQGGALMNVEVALHRGLLTKCSLCQRTGATSSCNRMRCPNVYHFACAIRAKCMFFKDKTMLCPMHKIKGPCEQELSSFAVFRRVYIERDEVKQIASIIQRGERLHMFRVGGLVFHAIGQLLPHQMADFHSATALYPVGYEATRIYWSLRTNNRRCCYRCSIGENNGRPEFVIKVIEQGLEDLVFTDASPQAVWNRIIEPVAAMRKEADMLRLFPEYLKGEELFGLTVHAVLRIAESLPGVESCQNYLFRYGRHPLMELPLMINPTGCARSEPKILTHYKRPHTLNSTSMSKAYQSTFTGETNTPYSKQFVHSKSSQYRRLRTEWKNNVYLARSRIQGLGLYAAKDLEKHTMVIEYIGTIIRNEVANRREKIYEEQNRGIYMFRINNEHVIDATLTGGPARYINHSCAPNCVAEVVTFDKEDKIIIISSRRIPKGEELTYDYQFDFEDDQHKIPCHCGAWNCRKWMN

SEQ ID NO: 47804 - protein, 218 aa, Homo sapiens
  Payload ID: 9666
  Gene Symbol: KMT2D
  Gene Name: lysine (K)-specific methyltransferase 2D
  ENSP ID: ENSP00000435714
TGCARSEPKILTHYKRVFTSIISFDPHNNLMRPHTLNSTSMSKAYQSTFTGETNTPYSKQFVHSKSSQYRRLRTEWKNNVYLARSRIQGLGLYAAKDLEKHTMVIEYIGTIIRNEVANRREKIYEEQNRGIYMFRINNEHVIDATLTGGPARYINHSCAPNCVAEVVTFDKEDKIIIISSRRIPKGEELTYDYQFDFEDDQHKIPCHCGAWNCRKWMN

SEQ ID NO: 47805 - protein, 145 aa, Homo sapiens
  Payload ID: 9666
  Gene Symbol: KMT2D
  Gene Name: lysine (K)-specific methyltransferase 2D
  ENSP ID: ENSP00000449455
MDSQKLAGEDKDSEPAADGPAASEDPSATESDLPNPHVGEVSVLSSGSPRLQETPQDCSGGPVRRCALCNCGEPSLHGQRELRRFELPFDWPRCPVVSPGGSPGPNEAVLPSEDLSQIGFPEGLTPAHLGEPGGSCWAHHWCAAW

SEQ ID NO: 47806 - protein, 1858 aa, Homo sapiens
  Payload ID: 9667
  Gene Symbol: KMT2E
  Gene Name: lysine (K)-specific methyltransferase 2E
  Uniprot ID: Q8IZD2
  ENSP ID: ENSP00000257745
MSIVIPLGVDTAETSYLEMAAGSEPESVEASPVVVEKSNSYPHQLYTSSSHHSHSYIGLPYADHNYGARPPPTPPASPPPSVLISKNEVGIFTTPNFDETSSATTISTSEDGSYGTDVTRCICGFTHDDGYMICCDKCSVWQHIDCMGIDRQHIPDTYLCERCQPRNLDKERAVLLQRRKRENMSDGDTSATESGDEVPVELYTAFQHTPTSITLTASRVSKVNDKRRKKSGEKEQHISKCKKAFREGSRKSSRVKGSAPEIDPSSDGSNFGWETKIKAWMDRYEEANNNQYSEGVQREAQRIALRLGNGNDKKEMNKSDLNTNNLLFKPPVESHIQKNKKILKSAKDLPPDALIIEYRGKFMLREQFEANGYFFKRPYPFVLFYSKFHGLEMCVDARTFGNEARFIRRSCTPNAEVRHEIQDGTIHLYIYSIHSIPKGTEITIAFDFDYGNCKYKVDCACLKENPECPVLKRSSESMENINSGYETRRKKGKKDKDISKEKDTQNQNITLDCEGTTNKMKSPETKQRKLSPLRLSVSNNQEPDFIDDIEEKTPISNEVEMESEEQIAERKRKMTREERKMEAILQAFARLEKREKRREQALERISTAKTEVKTECKDTQIVSDAEVIQEQAKEENASKPTPAKVNRTKQRKSFSRSRTHIGQQRRRHRTVSMCSDIQPSSPDIEVTSQQNDIENTVLTIEPETETALAEIITETEVPALNKCPTKYPKTKKHLVNEWLSEKNEKTGKPSDGLSERPLRITTDPEVLATQLNSLPGLTYSPHVYSTPKHYIRFTSPFLSEKRRRKEPTENISGSCKKRWLKQALEEENSAILHRFNSPCQERSRSPAVNGENKSPLLLNDSCSLPDLTTPLKKRRFYQLLDSVYSETSTPTPSPYATPTHTDITPMDPSFATPPRIKSDDETCRNGYKPIYSPVTPVTPGTPGNTMHFENISSPESSPEIKRRTYSQEGYDRSSTMLTLGPFRNSNLTELGLQEIKTIGYTSPRSRTEVNRQCPGEKEPVSDLQLGLDAVEPTALHKTLETPAHDRAEPNSQLDSTHSGRGTMYSSWVKSPDRTGVNFSVNSNLRDLTPSHQLEVGGGFRISESKCLMQDDTRGMFMETTVFCTSEDGLVSGFGRTVNDNLIDGNCTPQNPPQKKKVSLLEYRKRQREARKSGSKTENFPLISVSPHASGSLSNNGDGCASSNDNGEQVDHTASLPLPTPATVYNATSEETSNNCPVKDATASEKNEPEVQWTASTSVEQVRERSYQRALLLSDHRKDKDSGGESPCVSCSPSHVQSSPSSHSNHIPQLQAKGPVPSFSELMEDPDPENPEPTTTNECPSPDTSQNTCKSPPKMSKPGSPGSVIPAQAHGKIFTKPDPQWDSTVSASEAENGVHLKTELQQKQLSNNNQALSKNHPPQTHVRNSSEQLSQKLPSVPTKLHCPPSPHLENPPKSSTPHTPVQHGYLSPKPPSQQLGSPYRPHHSQSPQVGTPQREPQRNFYPAAQNLPANTQQATSGTLFTQTPSGQSSATYSQFNQQSLNSTAPPPPPPPPPSSSYYQNQQPSANFQNYNQLKGSLSQQTVFTSGPNQALPGTTSQQTVPGHHVTPGHFLPSQNPTIHHQTAAAVVPPPPPPPPAPGPHLVQQPNSHQQHSVAHVVGPVHAVTPGSHIHSQTAGHHLPPPPPPPGPAPHHHPPPHPSTGLQGLQAQHQHVVNSAPPPPPPPPPSSVLASGHHTTSAQALHHPPHQGPPLFPSSAHPTVPPYPSQATHHTTLGPGPQHQPSGTGPHCPLPVTGPHLQPQGPNSIPTPTASGFCPHPGSVALPHGVQGPQQASPVPGQIPIHRAQVPPTFQNNYHGSGWH

SEQ ID NO: 47807 - protein, 1858 aa, Homo sapiens; identical to SEQ ID NO: 47806
  Payload ID: 9667
  Gene Symbol: KMT2E
  Gene Name: lysine (K)-specific methyltransferase 2E
  Uniprot ID: Q8IZD2
  ENSP ID: ENSP00000312379

SEQ ID NO: 47808 - protein, 1778 aa, Homo sapiens
  Payload ID: 9667
  Gene Symbol: KMT2E
  Gene Name: lysine (K)-specific methyltransferase 2E
  ENSP ID: ENSP00000333986
MSIVIPLGVDTAETSYLEMAAGSEPESVEASPVVVEKSNSYPHQLYTSSSHHSHSYIGLPYADHNYGARPPPTPPASPPPSVLISKNEVGIFTTPNFDETSSATTISTSEDGSYGTDVTRCICGFTHDDGYMICCDKCSVWQHIDCMGIDRQHIPDTYLCERCQPRNLDKERAVLLQRRKRENMSDGDTSATESGDEVPVELYTAFQHTPTSITLTASRVSKVNDKRRKKSGEKEQHISKCKKAFREGSRKSSRVKGSAPEIDPSSDGSNFGWETKIKAWMDRYEEANNNQYSEGVQREAQRIALRLGNGNDKKEMNKSDLNTNNLLFKPPVESHIQKNKKILKSAKDLPPDALIIEYRGKFMLREQFEANGYFFKRPYPFVLFYSKFHGLEMCVDARTFGNEARFIRRSCTPNAEVRHEIQDGTIHLYIYSIHSIPKGTEITIAFDFDYGNCKYKVDCACLKENPECPVLKRSSESMENINSGYETRRKKGKKTREERKMEAILQAFARLEKREKRREQALERISTAKTEVKTECKDTQIVSDAEVIQEQAKEENASKPTPAKVNRTKQRKSFSRSRTHIGQQRRRHRTVSMCSDIQPSSPDIEVTSQQNDIENTVLTIEPETETALAEIITETEVPALNKCPTKYPKTKKHLVNEWLSEKNEKTGKPSDGLSERPLRITTDPEVLATQLNSLPGLTYSPHVYSTPKHYIRFTSPFLSEKRRRKEPTENISGSCKKRWLKQALEEENSAILHRFNSPCQERSRSPAVNGENKSPLLLNDSCSLPDLTTPLKKRRFYQLLDSVYSETSTPTPSPYATPTHTDITPMDPSFATPPRIKSDDETCRNGYKPIYSPVTPVTPGTPGNTMHFENISSPESSPEIKRRTYSQEGYDRSSTMLTLGPFRNSNLTELGLQEIKTIGYTSPRSRTEVNRQCPGEKEPVSDLQLGLDAVEPTALHKTLETPAHDRAEPNSQLDSTHSGRGTMYSSWVKSPDRTGVNFSVNSNLRDLTPSHQLEVGGGFRISESKCLMQDDTRGMFMETTVFCTSEDGLVSGFGRTVNDNLIDGNCTPQNPPQKKKVSLLEYRKRQREARKSGSKTENFPLISVSPHASGSLSNNGDGCASSNDNGEQVDHTASLPLPTPATVYNATSEETSNNCPVKDATASEKNEPEVQWTASTSVEQVRERSYQRALLLSDHRKDKDSGGESPCVSCSPSHVQSSPSSHSNHIPQLQAKGPVPSFSELMEDPDPENPEPTTTNECPSPDTSQNTCKSPPKMSKPGSPGSVIPAQAHGKIFTKPDPQWDSTVSASEAENGVHLKTELQQKQLSNNNQALSKNHPPQTHVRNSSEQLSQKLPSVPTKLHCPPSPHLENPPKSSTPHTPVQHGYLSPKPPSQQLGSPYRPHHSQSPQVGTPQREPQRNFYPAAQNLPANTQQATSGTLFTQTPSGQSSATYSQFNQQSLNSTAPPPPPPPPPSSSYYQNQQPSANFQNYNQLKGSLSQQTVFTSGPNQALPGTTSQQTVPGHHVTPGHFLPSQNPTIHHQTAAAVVPPPPPPPPAPGPHLVQQPNSHQQHSVAHVVGPVHAVTPGSHIHSQTAGHHLPPPPPPPGPAPHHHPPPHPSTGLQGLQAQHQHVVNSAPPPPPPPPPSSVLASGHHTTSAQALHHPPHQGPPLFPSSAHPTVPPYPSQATHHTTLGPGPQHQPSGTGPHCPLPVTGPHLQPQGPNSIPTPTASGFCPHPGSVALPHGVQGPQQASPVPGQIPIHRAQVPPTFQNNYHGSGWH

SEQ ID NO: 47809 - protein, 865 aa, Homo sapiens
  Payload ID: 9667
  Gene Symbol: KMT2E
  Gene Name: lysine (K)-specific methyltransferase 2E
  Uniprot ID: Q8IZD2
  ENSP ID: ENSP00000335398
MSIVIPLGVDTAETSYLEMAAGSEPESVEASPVVVEKSNSYPHQLYTSSSHHSHSYIGLPYADHNYGARPPPTPPASPPPSVLISKNEVGIFTTPNFDETSSATTISTSEDGSYGTDVTRCICGFTHDDGYMICCDKCSVWQHIDCMGIDRQHIPDTYLCERCQPRNLDKERAVLLQRRKRENMSDGDTSATESGDEVPVELYTAFQHTPTSITLTASRVSKVNDKRRKKSGEKEQHISKCKKAFREGSRKSSRVKGSAPEIDPSSDGSNFGWETKIKAWMDRYEEANNNQYSEGVQREAQRIALRLGNGNDKKEMNKSDLNTNNLLFKPPVESHIQKNKKILKSAKDLPPDALIIEYRGKFMLREQFEANGYFFKRPYPFVLFYSKFHGLEMCVDARTFGNEARFIRRSCTPNAEVRHEIQDGTIHLYIYSIHSIPKGTEITIAFDFDYGNCKYKVDCACLKENPECPVLKRSSESMENINSGYETRRKKGKKDKDISKEKDTQNQNITLDCEGTTNKMKSPETKQRKLSPLRLSVSNNQEPDFIDDIEEKTPISNEVEMESEEQIAERKRKMTREERKMEAILQAFARLEKREKRREQALERISTAKTEVKTECKDTQIVSDAEVIQEQAKEENASKPTPAKVNRTKQRKSFSRSRTHIGQQRRRHRTVSMCSDIQPSSPDIEVTSQQNDIENTVLTIEPETETALAEIITETEVPALNKCPTKYPKTKKHLVNEWLSEKNEKTGKPSDGLSERPLRITTDPEVLATQLNSLPGLTYSPHVYSTPKHYIRFTSPFLSEKRRRKEPTENISGSCKKRWLKQALEEENSAILHRFNSPCQERSRSPAVNEYFFPRKFSRNKETHL

SEQ ID NO: 47810 - protein, 125 aa, Homo sapiens
  Payload ID: 9667
  Gene Symbol: KMT2E
  Gene Name: lysine (K)-specific methyltransferase 2E
  ENSP ID: ENSP00000417156
  MOD_RES (1)..(1): Any amino acid
XGSLSNNGDGCASSNDNGEQVDHTASLPLPTPATVYNATSEETSNNCPVKDATASEKNEPEVQWTASTSVEQVRERSYQRALLLSDHRKDKDSDPDPENPEPTTTNECPSPDTSQNTCKSPPKMS

SEQ ID NO: 47811 - protein, 144 aa, Homo sapiens
  Payload ID: 9667
  Gene Symbol: KMT2E
  Gene Name: lysine (K)-specific methyltransferase 2E
  ENSP ID: ENSP00000417193
MSIVIPLGVDTAETSYLEMAAGSEPESVEASPVVVEKSNSYPHQLYTSSSHHSHSYIGLPYADHNYGARPPPTPPASPPPSVLISKNEVGIFTTPNFDETSSATTISTSEDGSYGTDVTRCICGFTHDDGYMICCDKCSTLESP

SEQ ID NO: 47812 - protein, 609 aa, Homo sapiens
  Payload ID: 9667
  Gene Symbol: KMT2E
  Gene Name: lysine (K)-specific methyltransferase 2E
  Uniprot ID: Q8IZD2
  ENSP ID: ENSP00000417888
MSIVIPLGVDTAETSYLEMAAGSEPESVEASPVVVEKSNSYPHQLYTSSSHHSHSYIGLPYADHNYGARPPPTPPASPPPSVLISKNEVGIFTTPNFDETSSATTISTSEDGSYGTDVTRCICGFTHDDGYMICCDKCSVWQHIDCMGIDRQHIPDTYLCERCQPRNLDKERAVLLQRRKRENMSDGDTSATESGDEVPVELYTAFQHTPTSITLTASRVSKVNDKRRKKSGEKEQHISKCKKAFREGSRKSSRVKGSAPEIDPSSDGSNFGWETKIKAWMDRYEEANNNQYSEGVQREAQRIALRLGNGNDKKEMNKSDLNTNNLLFKPPVESHIQKNKKILKSAKDLPPDALIIEYRGKFMLREQFEANGYFFKRPYPFVLFYSKFHGLEMCVDARTFGNEARFIRRSCTPNAEVRHEIQDGTIHLYIYSIHSIPKGTEITIAFDFDYGNCKYKVDCACLKENPECPVLKRSSESMENINSGYETRRKKGKKDKDISKEKDTQNQNITLDCEGTTNKMKSPETKQRKLSPLRLSVSNNQEPDFIDDIEEKTPISNEVEMESEEQIAERKRKMVSWEASSLGLVTAALHMVIVAAFTWAFTLFFEVSE

SEQ ID NO: 47813 - protein, 21 aa, Homo sapiens
  Payload ID: 9667
  Gene Symbol: KMT2E
  Gene Name: lysine (K)-specific methyltransferase 2E
  ENSP ID: ENSP00000419525
  MOD_RES (1)..(1): Any amino acid
XQNPPQKKKSPVGNFVGSNVV

SEQ ID NO: 47814 - protein, 352 aa, Homo sapiens
  Payload ID: 9667
  Gene Symbol: KMT2E
  Gene Name: lysine (K)-specific methyltransferase 2E
  ENSP ID: ENSP00000419883
MSIVIPLGVDTAETSYLEMAAGSENLDKERAVLLQRRKRENMSDGDTSATESGDEVPVELYTAFQHTPTSITLTASRVSKVNDKRRKKSGEKEQHISKCKKAFREGSRKSSRVKGSAPEIDPSSDGSNFGWETKIKAWMDRYEEANNNQYSEGVQREAQRIALRLGNGNDKKEMNKSDLNTNNLLFKPPVESHIQKNKKILKSAKDLPPDALIIEYRGKFMLREQFEANGYFFKRPYPFVLFYSKFHGLEMCVDARTFGNEARFIRRSCTPNAEVRHEIQDGTIHLYIYSIHSIPKGTEITIAFDFDYGNCKYKVDCACLKENPECPVLKRSSESMENINSGYETRRKKGKK

SEQ ID NO: 47815 - protein, 71 aa, Homo sapiens
  Payload ID: 9667
  Gene Symbol: KMT2E
  Gene Name: lysine (K)-specific methyltransferase 2E
  ENSP ID: ENSP00000420206
MSIVIPLGVDTAETSYLEMAAGSEPESVEASPVVVEKSNSYPHQLYTSSSHHSHSYIGLPYADHNYGARPP

SEQ ID NO: 47816 - protein, 230 aa, Homo sapiens
  Payload ID: 9667
  Gene Symbol: KMT2E
  Gene Name: lysine (K)-specific methyltransferase 2E
  ENSP ID: ENSP00000420415
MSIVIPLGVDTAETSYLEMAAGSEPESVEASPVVVEKSNSYPHQLYTSSSHHSHSYIGLPYADHNYGARPPPTPPASPPPSVLISKNEVGIFTTPNFDETSSATTISTSEDGSYGTDVTRCICGFTHDDGYMICCDKCSVWQHIDCMGIDRQHIPDTYLCERCQPRNLDKERAVLLQRRKRENMSDGDTSATESGDEVPVELYTAFQHTPTSITLTASRVSKVNDKRRKK

SEQ ID NO: 47817 - protein, 144 aa, Homo sapiens
  Payload ID: 9667
  Gene Symbol: KMT2E
  Gene Name: lysine (K)-specific methyltransferase 2E
  ENSP ID: ENSP00000473963
  MOD_RES (1)..(1): Any amino acid
XLEKREKRREQALERISTAKTEVKTECKDTQIVSDAEVIQEQAKEENASKPTPAKVNRTKQRKSFSRSRTHIGQQRRRHRTVSMCSDIQPSSPDIEVTSQQNDIENTVLTIEPETETALAEIITETEVPALNKCPTKYPKTKKV

SEQ ID NO: 47818 - protein, 453 aa, Homo sapiens [sequence omitted]

SEQ ID NO: 47819 - protein, 259 aa, Homo sapiens
  Payload ID: 9668
  Gene Symbol: KRCC1
  Gene Name: lysine-rich coiled-coil 1
  Uniprot ID: Q9NPI7
  ENSP ID: ENSP00000340083
MKHSKKTYDSFQDELEDYIKVQKARGLEPKTCFRKMKGDYLETCGYKGEVNSRPTYRMFDQRLPSETIQTYPRSCNIPQTVENRLPQWLPAHDSRLRLDSLSYCQFTRDCFSEKPVPLNFNQQEYICGSHGVEHRVYKHFSSDNSTSTHQASHKQIHQKRKRHPEEGREKSEEERSKHKRKKSCEEIDLDKHKSIQRKKTEVEIETVHVSTEKLKNRKEKKSRDVVSKKEERKRTKKKKEQGQERTEEEMLWDQSILGF

SEQ ID NO: 47820 - protein, 458 aa, Homo sapiens
  Payload ID: 9669
  Gene Symbol: KNOP1
  Gene Name: lysine-rich nucleolar protein 1
  Uniprot ID: Q1ED39
  ENSP ID: ENSP00000219837
MITKTHKVDLGLPEKKKKKKVVKEPETRYSVLNNDDYFADVSPLRATSPSKSVAHGQAPEMPLVKKKKKKKKGVSTLCEEHVEPETTLPARRTEKSPSLRKQVFGHLEFLSGEKKNKKSPLAMSHASGVKTSPDPRQGEEETRVGKKLKKHKKEKKGAQDPTAFSVQDPWFCEAREARDVGDTCSVGKKDEEQAALGQKRKRKSPREHNGKVKKKKKIHQEGDALPGHSKPSRSMESSPRKGSKKKPVKVEAPEYIPISDDPKASAKKKMKSKKKVEQPVIEEPALKRKKKKKRKESGVAGDPWKEETDTDLEVVLEKKGNMDEAHIDQVRRKALQEEIDRESGKTEASETRKWTGTQFGQWDTAGFENEDQKLKFLRLMGGFKNLSPSFSRPASTIARPNMALGKKAADSLQQNLQRDYDRAMSWKYSRGAGLGFSTAPNKIFYIDRNASKSVKLED

SEQ ID NO: 47821 - protein, 79 aa, Homo sapiens
  Payload ID: 9669
  Gene Symbol: KNOP1
  Gene Name: lysine-rich nucleolar protein 1
  ENSP ID: ENSP00000454329
MITKTHKVDLGLPEKKKKKKVVKEPETRYSVLNNDDYFADVSPLRATSPSKSVAHGQAPEMPLVKKKKKKKKGVSTLCE

SEQ ID NO: 47822 - protein, 137 aa, Homo sapiens
  Payload ID: 9669
  Gene Symbol: KNOP1
  Gene Name: lysine-rich nucleolar protein 1
  ENSP ID: ENSP00000455015
MDEAHIDQVRRKALQEEIDRESGKTEASETRKWTGTQFGQWDTAGFENEDQKLKFLRLMGGFKNLSPSFSRPASTIARPNMALGKKAADSLQQNLQRDYDRAMSWKYSRGAGLGFSTAPNKIFYIDRNASKSVKLED

SEQ ID NO: 47823 - protein, 199 aa, Homo sapiens
  Payload ID: 9669
  Gene Symbol: KNOP1
  Gene Name: lysine-rich nucleolar protein 1
  ENSP ID: ENSP00000455369
  MOD_RES (1)..(1): Any amino acid
XEKKGAQDPTAFSVQDPWFCEAREARDVGDTCSVGKKDEEQAALGQKRKRKSPREHNGKVKKKKKIHQEGDALPGHSKPSRSMESSPRKGSKKKPVKVEAPEYIPISDDPKASAKKKMKSKKKVEQPVIEEPALKRKKKKKRKESGVAGDPWKEVRRKALQEEIDRESGKTEASETRKWTGTQFGQWDTAGFENEDQKL

SEQ ID NO: 47824 - protein, 227 aa, Homo sapiens
  Payload ID: 9670
  Gene Symbol: LYSMD1
  Gene Name: LysM, putative peptidoglycan-binding, domain containing 1
  Uniprot ID: Q96S90
  ENSP ID: ENSP00000357904
MASPSRQPPPGGSGLLQGSRARSYGSLVQSACSPVRERRLEHQLEPGDTLAGLALKYGVTMEQIKRANRLYTNDSIFLKKTLYIPILTEPRDLFNGLDSEEEKDGEEKVHPSNSEVWPHSTERKKQETGAGRANGEVLPTPGQETPTPIHDLSASDFLKKLDSQISLSKKAAAQKLKKGENGVPGEDAGLHLSSPWMQQRAVLGPVPLTRTSRTRTLRDQEDEIFKL

SEQ ID NO: 47825 - protein, 179 aa, Homo sapiens
  Payload ID: 9670
  Gene Symbol: LYSMD1
  Gene Name: LysM, putative peptidoglycan-binding, domain containing 1
  Uniprot ID: Q96S90
  ENSP ID: ENSP00000404059
MRSGPLRISEWKMEQIKRANRLYTNDSIFLKKTLYIPILTEPRDLFNGLDSEEEKDGEEKVHPSNSEVWPHSTERKKQETGAGRANGEVLPTPGQETPTPIHDLSASDFLKKLDSQISLSKKAAAQKLKKGENGVPGEDAGLHLSSPWMQQRAVLGPVPLTRTSRTRTLRDQEDEIFKL

SEQ ID NO: 47826 - protein, 215 aa, Homo sapiens
  Payload ID: 9671
  Gene Symbol: LYSMD2
  Gene Name: LysM, putative peptidoglycan-binding, domain containing 2
  Uniprot ID: Q8IV50
  ENSP ID: ENSP00000267838
MADSSPALSLREGGPRAPRPSAPSPPPRSRSGSESEEAELSLSLARTKTRSYGSTASVRAPLGAGVIERHVEHRVRAGDTLQGIALKYGVTMEQIKRANKLFTNDCIFLKKTLNIPVISEKPLLFNGLNSIDSPENETADNSFSQEEEPVVAGEDLPPPSPQESDVQPVQPEEVSARDFLQRLDLQIKLSTQAAKKLKEESRDEESPYATSLYHS

SEQ ID NO: 47827 - protein, 124 aa, Homo sapiens
  Payload ID: 9671
  Gene Symbol: LYSMD2
  Gene Name: LysM, putative peptidoglycan-binding, domain containing 2
  Uniprot ID: Q8IV50
  ENSP ID: ENSP00000410424
MEQIKRANKLFTNDCIFLKKTLNIPVISEKPLLFNGLNSIDSPENETADNSFSQEEEPVVAGEDLPPPSPQESDVQPVQPEEVSARDFLQRLDLQIKLSTQAAKKLKEESRDEESPYATSLYHS

SEQ ID NO: 47828 - protein, 108 aa, Homo sapiens
  Payload ID: 9671
  Gene Symbol: LYSMD2
  Gene Name: LysM, putative peptidoglycan-binding, domain containing 2
  ENSP ID: ENSP00000452715
MAKAFKPVMSIPVSEHPDTEAALRAVSENETADNSFSQEEEPVVAGEDLPPPSPQESDVQPVQPEEVSARDFLQRLDLQIKLSTQAAKKLKEESRDEESPYATSLYHS

SEQ ID NO: 47829 - protein, 124 aa, Homo sapiens; identical to SEQ ID NO: 47827
  Payload ID: 9671
  Gene Symbol: LYSMD2
  Gene Name: LysM, putative peptidoglycan-binding, domain containing 2
  Uniprot ID: Q8IV50
  ENSP ID: ENSP00000453933

SEQ ID NO: 47830 - protein, 306 aa, Homo sapiens
  Payload ID: 9672
  Gene Symbol: LYSMD3
  Gene Name: LysM, putative peptidoglycan-binding, domain containing 3
  Uniprot ID: Q7Z3D4
  ENSP ID: ENSP00000314518
MAGRHQNRSFPLPGVQSSGQVHAFGNCSDSDILEEDAEVYELRSRGKEKVRRSTSRDRLDDIIVLTKDIQEGDTLNAIALQYCCTVADIKRVNNLISDQDFFALRSIKIPVKKFSSLTETLCPPKGRQTSRHSSVQYSSEQQEILPANDSLAYSDSAGSFLKEVDRDIEQIVKCTDNKRENLNEVVSALTAQQMRFEPDNKNTQRKDPYYGADWGIGWWTAVVIMLIVGIITPVFYLLYYEILAKVDVSHHSTVDSSHLHSKITPPSQQREMENGIVPTKGIHFSQQDDHKLYSQDSQSPAAQQET

SEQ ID NO: 47831 - protein, 90 aa, Homo sapiens
  Payload ID: 9672
  Gene Symbol: LYSMD3
  Gene Name: LysM, putative peptidoglycan-binding, domain containing 3
  ENSP ID: ENSP00000405507
MAGRHQNRSFPLPGVQSSGQVHAFGNCSDSDILEEDAEVYELRSRGKEKVRRSTSRDRLDDIIVLTKDIQEGDTLNAIALQYCCTCSISQ

SEQ ID NO: 47832 - protein, 150 aa, Homo sapiens
  Payload ID: 9672
  Gene Symbol: LYSMD3
  Gene Name: LysM, putative peptidoglycan-binding, domain containing 3
  Uniprot ID: Q7Z3D4
  ENSP ID: ENSP00000427020
MAGRHQNRSFPLPGVQSSGQVHAFGNCSDSDILEEDAEVYELRSRGKEKVRRSTSRDRLDDIIVLTKDIQEGDTLNAIALQYCCTLRWMLVIIQQWTLHIYIQKSHPHHSREKWKMELCQLKEYISANKMIINCIVKILSHLLLNRKHSN

SEQ ID NO: 47833 - protein, 127 aa, Homo sapiens
  Payload ID: 9672
  Gene Symbol: LYSMD3
  Gene Name: LysM, putative peptidoglycan-binding, domain containing 3
  Uniprot ID: Q7Z3D4
  ENSP ID: ENSP00000427683
MAGRHQNRSFPLPGVQSSGQVHAFGNCSDSDILEEDAEVYELRSRGKEKVRRSTSRDRLDDIIVLTKDIQEGDTLNAIALQYCCTVYQNSSKKVQFLDRNTLSSKRKTDFTSFICSILFRTTGNFAS

SEQ ID NO: 47834 - protein, 170 aa, Homo sapiens
  Payload ID: 9673
  Gene Symbol: LYSMD4
  Gene Name: LysM, putative peptidoglycan-binding, domain containing 4
  ENSP ID: ENSP00000333008
METHKELKPLLSPSSETTVTVELPEADRAGAGTGAQAGQLMGFFKGIDQDIERAVQSEIFLHESYCMDTSHQPLLPAPPKTPMDGADCGIQWWNAVFIMLLIGIVLPVFYLVYFKIQASGETPNSLNTTVIPNGSMAMGTVPGQAPRLAVAVPAVTSADSQFSQTTQAGS

SEQ ID NO: 47835 - protein, 297 aa, Homo sapiens
  Payload ID: 9673
  Gene Symbol: LYSMD4
  Gene Name: LysM, putative peptidoglycan-binding, domain containing 4
  Uniprot ID: Q5XG99
  ENSP ID: ENSP00000342840
MAVGTRGTLLKKSLTVWFCGPGARSATRAVSTSLPRREQVTWCCCSGSWPRRTASTSWRCSMAANTFYFRPNGAGDTRQNLIPDFYAFRVINNGKVADIKKVNNFIREQDLYALKSVKIPVRNHGILMETHKELKPLLSPSSETTVTVELPEADRAGAGTGAQAGQLMGFFKGIDQDIERAVQSEIFLHESYCMDTSHQPLLPAPPKTPMDGADCGIQWWNAVFIMLLIGIVLPVFYLVYFKIQASGETPNSLNTTVIPNGSMAMGTVPGQAPRLAVAVPAVTSADSQFSQTTQAGS

SEQ ID NO: 47836 - protein, 131 aa, Homo sapiens
  Payload ID: 9673
  Gene Symbol: LYSMD4
  Gene Name: LysM, putative peptidoglycan-binding, domain containing 4
  ENSP ID: ENSP00000368184
MDSTHPQHCACNSQIRPRWDCVAHCFLWAPGLPSRDDPGADKGEASGGVGTVSLTLSQPRERSLQVKKVFVKGMKKERALGEGAAWWQSQRLVSPGKHDRVSTHRKSQSVFTGVSAGDKQFTTTFSIVFTI

SEQ ID NO: 47837 - protein, 296 aa, Homo sapiens
  Payload ID: 9673
  Gene Symbol: LYSMD4
  Gene Name: LysM, putative peptidoglycan-binding, domain containing 4
  Uniprot ID: Q5XG99
  ENSP ID: ENSP00000386283
MRHEELLTKTFQGPAVVCGTPTSHVYMFKNGSGDSGDSSEEESHRVVLRPRGKERHKSGVHQPPQAGAGDVVLLQRELAQEDSLNKLALQYGCKVADIKKVNNFIREQDLYALKSVKIPVRNHGILMETHKELKPLLSPSSETTVTVELPEADRAGAGTGAQAGQLMGFFKGIDQDIERAVQSEIFLHESYCMDTSHQPLLPAPPKTPMDGADCGIQWWNAVFIMLLIGIVLPVFYLVYFKIQASGETPNSLNTTVIPNGSMAMGTVPGQAPRLAVAVPAVTSADSQFSQTTQAGS

SEQ ID NO: 47838 - protein, 123 aa, Homo sapiens
  Payload ID: 9673
  Gene Symbol: LYSMD4
  Gene Name: LysM, putative peptidoglycan-binding, domain containing 4
  ENSP ID: ENSP00000400054
MAVGTRGTLLKKSLTVWFCGPGARSATRAVSTSLPRREQVTWCCCSGSWPRRTASTSWRCSMAAKPNGAGDTRQNLIPDFYAFRVINNGKVADIKKVNNFIREQDLYALKSVKIPVRNHGILM

SEQ ID NO: 47839 - protein, 235 aa, Homo sapiens
  Payload ID: 9673
  Gene Symbol: LYSMD4
  Gene Name: LysM, putative peptidoglycan-binding, domain containing 4
  ENSP ID: ENSP00000445357
MFVANPQARWQLRVAGRGSRVAGRRSRRSLGAEVADIKKVNNFIREQDLYALKSVKIPVRNHGILMETHKELKPLLSPSSETTVTVELPEADRAGAGTGAQAGQLMGFFKGIDQDIERAVQSEIFLHESYCMDTSHQPLLPAPPKTPMDGADCGIQWWNAVFIMLLIGIVLPVFYLVYFKIQASGETPNSLNTTVIPNGSMAMGTVPGQAPRLAVAVPAVTSADSQFSQTTQAGS

SEQ ID NO: 47840 - protein, 414 aa, Homo sapiens [sequence omitted]

SEQ ID NO: 47841 - protein, 376 aa, Homo sapiens
  Payload ID: 9674
  Gene Symbol: LCLAT1
  Gene Name: lysocardiolipin acyltransferase 1
  Uniprot ID: Q6UWP7
  ENSP ID: ENSP00000368823
MVSWKGIYFILTLFWGSFFGSIFMLSPFLPLMFVNPSWYRWINNRLVATWLTLPVALLETMFGVKVIITGDAFVPGERSVIIMNHRTRMDWMFLWNCLMRYSYLRLEKICLKASLKGVPGFGWAMQAAAYIFIHRKWKDDKSHFEDMIDYFCDIHEPLQLLIFPEGTDLTENSKSRSNAFAEKNGLQKYEYVLHPRTTGFTFVVDRLREGKNLDAVHDITVAYPHNIPQSEKHLLQGDFPREIHFHVHRYPIDTLPTSKEDLQLWCHKRWEEKEERLRSFYQGEKNFYFTGQSVIPPCKSELRVLVVKLLSILYWTLFSPAMCLLIYLYSLVKWYFIITIVIFVLQERIFGGLEIIELACYRLLHKQPHLNSKKNE

SEQ ID NO: 47842 - protein, 308 aa, Homo sapiens
  Payload ID: 9674
  Gene Symbol: LCLAT1
  Gene Name: lysocardiolipin acyltransferase 1
  Uniprot ID: Q6UWP7
  ENSP ID: ENSP00000368826
MHSRGREIVVLLNPWSINEAVSSYCTYFIKQDSKSFGIMVSWKGIYFILTLFWGSFFGSIFMLSPFLPLMFVNPSWYRWINNRLVATWLTLPVALLETMFGVKVIITGDAFVPGERSVIIMNHRTRMDWMFLWNCLMRYSYLRLEKICLKASLKGVPGFGWAMQAAAYIFIHRKWKDDKSHFEDMIDYFCDIHEPLQLLIFPEGTDLTENSKSRSNAFAEKNGLQKYEYVLHPRTTGFTFVVDRLREGRRQSEGSKGPLQGELQITAQGNQRGHKQMEKHSMLMDWKNQYREIGHTAQSNLQIQCYSH

SEQ ID NO: 47843 - protein, 123 aa, Homo sapiens
  Payload ID: 9674
  Gene Symbol: LCLAT1
  Gene Name: lysocardiolipin acyltransferase 1
  ENSP ID: ENSP00000417565
MVSWKGIYFILTLFWGSFFGSIFMLSPFLPLMFVNPSWYRWINNRLVATWLTLPVALLETMFGVKVIITGDAFVPGERSVIIMNHRTRMDWMFLWNCLMRYSYLRLEKICLKASLKGVPGFGR

SEQ ID NO: 47844 - protein, 153 aa, Homo sapiens
  Payload ID: 9674
  Gene Symbol: LCLAT1
  Gene Name: lysocardiolipin acyltransferase 1
  ENSP ID: ENSP00000417875
MHSRGREIVVLLNPWSINEAVSSYCTYFIKQDSKSFGIMVSWKGIYFILTLFWGSFFGSIFMLSPFLPLMFVNPSWYRWINNRLVATWLTLPVALLETMFGVKVIITGDAFVPGERSVIIMNHRTRMDWMFLWNCLMRYSYLRLEKICLKASL

SEQ ID NO: 47845 - protein, 105 aa, Homo sapiens
  Payload ID: 9674
  Gene Symbol: LCLAT1
  Gene Name: lysocardiolipin acyltransferase 1
  ENSP ID: ENSP00000417951
MVSWKGIYFILTLFWGSFFGSIFMLSPFLPLMFVNPSWYRWINNRLVATWLTLPVALLETMFGVKVIITGDAFVPGERSVIIMNHRTRMDWMFLWNCLMRYSYLR

SEQ ID NO: 47846 - protein, 137 aa, Homo sapiens
  Payload ID: 9674
  Gene Symbol: LCLAT1
  Gene Name: lysocardiolipin acyltransferase 1
  ENSP ID: ENSP00000419444
MVSWKGIYFILTLFWGSFFGSIFMLSPFLPLMFVNPSWYRWINNRLVATWLTLPVALLETMFGVKVIITGDAFVPGERSVIIMNHRTRMDWMFLWNCLMRYSYLRLEKICLKASLKGVPGFGWAMQAAAYIFIHRKW

SEQ ID NO: 47847 - protein, 157 aa, Homo sapiens
  Payload ID: 9674
  Gene Symbol: LCLAT1
  Gene Name: lysocardiolipin acyltransferase 1
  ENSP ID: ENSP00000419646
MVSWKGIYFILTLFWGSFFGSIFMLSPFLPLMFVNPSWYRWINNRLVATWLTLPVALLETMFGVKVIITGDAFVPGERSVIIMNHRTRMDWMFLWNCLMRYSYLRLEKICLKASLKGVPGFENSKSRSNAFAEKNGLQKYEYVLHPRTTGFTFVVDR

SEQ ID NO: 47848 - protein, 66 aa, Homo sapiens
  Payload ID: 9674
  Gene Symbol: LCLAT1
  Gene Name: lysocardiolipin acyltransferase 1
  ENSP ID: ENSP00000419735
MHSRGREIVVLLNPWSINEAVSSYCTYFIKQDSKSFGHSTSLELSPDFHLCSDPPLHSILTGTQAL

SEQ ID NO: 47849 - protein, 140 aa, Homo sapiens
  Payload ID: 9674
  Gene Symbol: LCLAT1
  Gene Name: lysocardiolipin acyltransferase 1
  ENSP ID: ENSP00000419966
MVSWKGIYFILTLFWGSFFGSIFMLSPFLPLMFVNPSWYRWINNRLVATWLTLPVALLETMFGVKVIITGDAFVPGERSVIIMNHRTRMDWMFLWNCLMRYSYLRLEKICLKASLKGVPGFAQSHLKPNDTGILQQDCCC

SEQ ID NO: 47850 - protein, 136 aa, Homo sapiens
  Payload ID: 9674
  Gene Symbol: LCLAT1
  Gene Name: lysocardiolipin acyltransferase 1
  ENSP ID: ENSP00000420481
MVSWKGIYFILTLFWGSFFGSIFMLSPFLPLMFVNPSWYRWINNRLVATWLTLPVALLETMFGVKVIITGDAFVPGERSVIIMNHRTRMDWMFLWNCLMRYSYLRLEKICLKASLKGVPGFGWAMQAAAYIFIHRK

SEQ ID NO: 47851 - protein, 364 aa, Homo sapiens
  Payload ID: 9675
  Gene Symbol: LPAR1
  Gene Name: lysophosphatidic acid receptor 1
  Uniprot ID: Q92633
  ENSP ID: ENSP00000351755
MAAISTSIPVISQPQFTAMNEPQCFYNESIAFFYNRSGKHLATEWNTVSKLVMGLGITVCIFIMLANLLVMVAIYVNRRFHFPIYYLMANLAAADFFAGLAYFYLMFNTGPNTRRLTVSTWLLRQGLIDTSLTASVANLLAIAIERHITVFRMQLHTRMSNRRVVVVIVVIWTMAIVMGAIPSVGWNCICDIENCSNMAPLYSDSYLVFWAIFNLVTFVVMVVLYAHIFGYVRQRTMRMSRHSSGPRRNRDTMMSLLKTVVIVLGAFIICWTPGLVLLLLDVCCPQCDVLAYEKFFLLLAEFNSAMNPIIYSYRDKEMSATFRQILCCQRSENPTGPTEGSDRSASSLNHTILAGVHSNDHSVV

SEQ ID NO: 47852 - protein, 364 aa, Homo sapiens; identical to SEQ ID NO: 47851
  Payload ID: 9675
  Gene Symbol: LPAR1
  Gene Name: lysophosphatidic acid receptor 1
  Uniprot ID: Q92633
  ENSP ID: ENSP00000363552

SEQ ID NO: 47853 - protein, 364 aa, Homo sapiens; identical to SEQ ID NO: 47851
  Payload ID: 9675
  Gene Symbol: LPAR1
  Gene Name: lysophosphatidic acid receptor 1
  Uniprot ID: Q92633
  ENSP ID: ENSP00000363553

SEQ ID NO: 47854 - protein, 182 aa, Homo sapiens
  Payload ID: 9675
  Gene Symbol: LPAR1
  Gene Name: lysophosphatidic acid receptor 1
  ENSP ID: ENSP00000401810
MAAISTSIPVISQPQFTAMNEPQCFYNESIAFFYNRSGKHLATEWNTVSKLVMGLGITVCIFIMLANLLVMVAIYVNRRFHFPIYYLMANLAAADFFAGLAYFYLMFNTGPNTRRLTVSTWLLRQGLIDTSLTASVANLLAIAIERHITVFRMQLHTRMSNRRVVVVIVVIWTMAIVMGAIP

SEQ ID NO: 47855 - protein, 346 aa, Homo sapiens
  Payload ID: 9675
  Gene Symbol: LPAR1
  Gene Name: lysophosphatidic acid receptor 1
  ENSP ID: ENSP00000445697
MNEPQCFYNESIAFFYNRSGKHLATEWNTVSKLVMGLGITVCIFIMLANLLVMVAIYVNRRFHFPIYYLMANLAAADFFAGLAYFYLMFNTGPNTRRLTVSTWLLRQGLIDTSLTASVANLLAIAIERHITVFRMQLHTRMSNRRVVVVIVVIWTMAIVMGAIPSVGWNCICDIENCSNMAPLYSDSYLVFWAIFNLVTFVVMVVLYAHIFGYVRQRTMRMSRHSSGPRRNRDTMMSLLKTVVIVLGAFIICWTPGLVLLLLDVCCPQCDVLAYEKFFLLLAEFNSAMNPIIYSYRDKEMSATFRQILCCQRSENPTGPTEGSDRSASSLNHTILAGVHSNDHSVV

SEQ ID NO: 47856 - protein, 351 aa, Homo sapiens
  Payload ID: 9676
  Gene Symbol: LPAR2
  Gene Name: lysophosphatidic acid receptor 2
  Uniprot ID: Q9HBW0
  ENSP ID: ENSP00000384665
MVIMGQCYYNETIGFFYNNSGKELSSHWRPKDVVVVALGLTVSVLVLLTNLLVIAAIASNRRFHQPIYYLLGNLAAADLFAGVAYLFLMFHTGPRTARLSLEGWFLRQGLLDTSLTASVATLLAIAVERHRSVMAVQLHSRLPRGRVVMLIVGVWVAALGLGLLPAHSWHCLCALDRCSRMAPLLSRSYLAVWALSSLLVFLLMVAVYTRIFFYVRRRVQRMAEHVSCHPRYRETTLSLVKTVVIILGAFVVCWTPGQVVLLLDGLGCESCNVLAVEKYFLLLAEANSLVNAAVYSCRDAEMRRTFRRLLCCACLRQSTRESVHYTSSAQGGASTRIMLPENGHPLMDSTL

SEQ ID NO: 47857 - protein, 351 aa, Homo sapiens; identical to SEQ ID NO: 47856
  Payload ID: 9676
  Gene Symbol: LPAR2
  Gene Name: lysophosphatidic acid receptor 2
  Uniprot ID: Q9HBW0
  ENSP ID: ENSP00000443256

SEQ ID NO: 47858 - protein, 25 aa, Homo sapiens
  Payload ID: 9676
  Gene Symbol: LPAR2
  Gene Name: lysophosphatidic acid receptor 2
  ENSP ID: ENSP00000465206
MVIMGQCYYNETIGFFYNNSGKELS

SEQ ID NO: 47859 - protein, 351 aa, Homo sapiens; identical to SEQ ID NO: 47856
  Payload ID: 9676
  Gene Symbol: LPAR2
  Gene Name: lysophosphatidic acid receptor 2
  Uniprot ID: Q9HBW0
  ENSP ID: ENSP00000465280

SEQ ID NO: 47860 - protein, 74 aa, Homo sapiens
  Payload ID: 9676
  Gene Symbol: LPAR2
  Gene Name: lysophosphatidic acid receptor 2
  ENSP ID: ENSP00000466112
MVIMGQCYYNETIGFFYNNSGKELSSHWRPKDVVVVALGLTVSVLVLLTNLLVIAAIASNRRFHQPIYYLLGNL

SEQ ID NO: 47861 - protein, 20 aa, Homo sapiens
  Payload ID: 9676
  Gene Symbol: LPAR2
  Gene Name: lysophosphatidic acid receptor 2
  ENSP ID: ENSP00000466940
MVIMGQCYYNETIGFFYNNS

SEQ ID NO: 47862 - protein, 80 aa, Homo sapiens
  Payload ID: 9676
  Gene Symbol: LPAR2
  Gene Name: lysophosphatidic acid receptor 2
  ENSP ID: ENSP00000468132
MVIMGQCYYNETIGFFYNNSGKELSSHWRPKDVVVVALGLTVSVLVLLTNLLVIAAIASNRRFHQPIYYLLGNLAAADLF

SEQ ID NO: 47863 - protein, 353 aa, Homo sapiens
  Payload ID: 9677
  Gene Symbol: LPAR3
  Gene Name: lysophosphatidic acid receptor 3
  Uniprot ID: Q9UBY5
  ENSP ID: ENSP00000359643
MNECHYDKHMDFFYNRSNTDTVDDWTGTKLVIVLCVGTFFCLFIFFSNSLVIAAVIKNRKFHFPFYYLLANLAAADFFAGIAYVFLMFNTGPVSKTLTVNRWFLRQGLLDSSLTASLTNLLVIAVERHMSIMRMRVHSNLTKKRVTLLILLVWAIAIFMGAVPTLGWNCLCNISACSSLAPIYSRSYLVFWTVSNLMAFLIMVVVYLRIYVYVKRKTNVLSPHTSGSISRRRTPMKLMKTVMTVLGAFVVCWTPGLVVLLLDGLNCRQCGVQHVKRWFLLLALLNSVVNPIIYSYKDEDMYGTMKKMICCFSQENPERRPSRIPSTVLSRSDTGSQYIEDSISQGAVCNKSTS

SEQ ID NO: 47864 - protein, 353 aa, Homo sapiens; identical to SEQ ID NO: 47863
  Payload ID: 9677
  Gene Symbol: LPAR3
  Gene Name: lysophosphatidic acid receptor 3
  Uniprot ID: Q9UBY5
  ENSP ID: ENSP00000395389

SEQ ID NO: 47865 - protein, 370 aa, Homo sapiens
  Payload ID: 9678
  Gene Symbol: LPAR4
  Gene Name: lysophosphatidic acid receptor 4
  Uniprot ID: Q99677
  ENSP ID: ENSP00000408205
MGDRRFIDFQFQDSNSSLRPRLGNATANNTCIVDDSFKYNLNGAVYSVVFILGLITNSVSLFVFCFRMKMRSETAIFITNLAVSDLLFVCTLPFKIFYNFNRHWPFGDTLCKISGTAFLTNIYGSMLFLTCISVDRFLAIVYPFRSRTIRTRRNSAIVCAGVWILVLSGGISASLFSTTNVNNATTTCFEGFSKRVWKTYLSKITIFIEVVGFIIPLILNVSCSSVVLRTLRKPATLSQIGTNKKKVLKMITVHMAVFVVCFVPYNSVLFLYALVRSQAITNCFLERFAKIMYPITLCLATLNCCFDPFIYYFTLESFQKSFYINAHIRMESLFKTETPLTTKPSLPAIQEEVSDQTTNNGGELMLESTF

SEQ ID NO: 47866 - protein, 45 aa, Homo sapiens
  Payload ID: 9678
  Gene Symbol: LPAR4
  Gene Name: lysophosphatidic acid receptor 4
  ENSP ID: ENSP00000476460
MGDRRFIDFQFQDSNSSLRPRLGNATANNTCIVDDSFKYNLNGAV

SEQ ID NO: 47867 - protein, 370 aa, Homo sapiens; identical to SEQ ID NO: 47865
  Payload ID: 9678
  Gene Symbol: LPAR4
  Gene Name: lysophosphatidic acid receptor 4
  Uniprot ID: Q99677
  ENSP ID: ENSP00000478261

SEQ ID NO: 47868 - protein, 372 aa, Homo sapiens [sequence omitted]

SEQ ID NO: 47869 - protein, 372 aa, Homo sapiens [sequence omitted]

SEQ ID NO: 47870 - protein, 344 aa, Homo sapiens
  Payload ID: 9680
  Gene Symbol: LPAR6
  Gene Name: lysophosphatidic acid receptor 6
  Uniprot ID: P43657
  ENSP ID: ENSP00000344353
MVSVNSSHCFYNDSFKYTLYGCMFSMVFVLGLISNCVAIYIFICVLKVRNETTTYMINLAMSDLLFVFTLPFRIFYFTTRNWPFGDLLCKISVMLFYTNMYGSILFLTCISVDRFLAIVYPFKSKTLRTKRNAKIVCTGVWLTVIGGSAPAVFVQSTHSQGNNASEACFENFPEATWKTYLSRIVIFIEIVGFFIPLILNVTCSSMVLKTLTKPVTLSRSKINKTKVLKMIFVHLIIFCFCFVPYNINLILYSLVRTQTFVNCSVVAAVRTMYPITLCIAVSNCCFDPIVYYFTSDTIQNSIKMKNWSVRRSDFRFSEVHGAENFIQHNLQTLKSKIFDNESAA

SEQ ID NO: 47871 - protein, 344 aa, Homo sapiens; identical to SEQ ID NO: 47870
  Payload ID: 9680
  Gene Symbol: LPAR6
  Gene Name: lysophosphatidic acid receptor 6
  Uniprot ID: P43657
  ENSP ID: ENSP00000367691

SEQ ID NO: 47872 - protein, 344 aa, Homo sapiens; identical to SEQ ID NO: 47870
  Payload ID: 9680
  Gene Symbol: LPAR6
  Gene Name: lysophosphatidic acid receptor 6
  Uniprot ID: P43657
  ENSP ID: ENSP00000482660

SEQ ID NO: 47873 - protein, 534 aa, Homo sapiens
  Payload ID: 9681
  Gene Symbol: LPCAT1
  Gene Name: lysophosphatidylcholine acyltransferase 1
  Uniprot ID: Q8NF37
  ENSP ID: ENSP00000283415
MRLRGCGPRAAPASSAGASDARLLAPPGRNPFVHELRLSALQKAQVALMTLTLFPVRLLVAAAMMLLAWPLALVASLGSAEKEPEQPPALWRKVVDFLLKAIMRTMWFAGGFHRVAVKGRQALPTEAAILTLAPHSSYFDAIPVTMTMSSIVMKAESRDIPIWGTLIQYIRPVFVSRSDQDSRRKTVEEIKRRAQSNGKWPQIMIFPEGTCTNRTCLITFKPGAFIPGAPVQPVVLRYPNKLDTITWTWQGPGALEILWLTLCQFHNQVEIEFLPVYSPSEEEKRNPALYASNVRRVMAEALGVSVTDYTFEDCQLALAEGQLRLPADTCLLEFARLVRGLGLKPEKLEKDLDRYSERARMKGGEKIGIAEFAASLEVPVSDLLEDMFSLFDESGSGEVDLRECVVALSVVCRPARTLDTIQLAFKMYGAQEDGSVGEGDLSCILKTALGVAELTVTDLFRAIDQEEKGKITFADFHRFAEMYPAFAEEYLYPDQTHFESCAETSPAPIPNGFCADFSPENSDAGRKPVRKKLD

SEQ ID NO: 47874 - protein, 534 aa, Homo sapiens; identical to SEQ ID NO: 47873
  Payload ID: 9681
  Gene Symbol: LPCAT1
  Gene Name: lysophosphatidylcholine acyltransferase 1
  Uniprot ID: Q8NF37
  ENSP ID: ENSP00000423472

SEQ ID NO: 47875 - protein, 489 aa, Homo sapiens
  Payload ID: 9681
  Gene Symbol: LPCAT1
  Gene Name: lysophosphatidylcholine acyltransferase 1
  ENSP ID: ENSP00000485019
VALMTLTLFPVRLLVAAAMMLLAWPLALVASLGSAEKEPEQPPALWRKVVDFLLKAIMRTMWFAGGFHRVAVKGRQALPTEAAILTLAPHSSYFDAIPVTMTMSSIVMKAESRDIPIWGTLIQYIRPVFVSRSDQDSRRKTVEEIKRRAQSNGKWPQIMIFPEGTCTNRTCLITFKPGAFIPGAPVQPVVLRYPNKLDTITWTWQGPGALEILWLTLCQFHNQVEIEFLPVYSPSEEEKRNPALYASNVRRVMAEALGVSVTDYTFEDCQLALAEGQLRLPADTCLLEFARLVRGLGLKPEKLEKDLDRYSERARMKGGEKIGIAEFAASLEVPVSDLLEDMFSLFDESGSGEVDLRECVVALSVVCRPARTLDTIQLAFKMYGAQEDGSVGEGDLSCILKTALGVAELTVTDLFRAIDQEEKGKITFADFHRFAEMYPAFAEEYLYPDQTHFESCAETSPAPIPNGFCADFSPENSDAGRKPVRKKLD

SEQ ID NO: 47876 - protein, 489 aa, Homo sapiens; identical to SEQ ID NO: 47875
  Payload ID: 9681
  Gene Symbol: LPCAT1
  Gene Name: lysophosphatidylcholine acyltransferase 1
  ENSP ID: ENSP00000485860

SEQ ID NO: 47877 - protein, 234 aa, Homo sapiens
  Payload ID: 9681
  Gene Symbol: LPCAT1
  Gene Name: lysophosphatidylcholine acyltransferase 1
  ENSP ID: ENSP00000486797
ALGVSVTDYTFEDCQLALAEGQLRLPADTCLLEFARLVRGLGLKPEKLEKDLDRYSERARMKGGEKIGIAEFAASLEVPVSDLLEDMFSLFDESGSGEVDLRECVVALSVVCRPARTLDTIQLAFKMYGAQEDGSVGEGDLSCILKTALGVAELTVTDLFRAIDQEEKGKITFADFHRFAEMYPAFAEEYLYPDQTHFESCAETSPAPIPNGFCADFSPENSDAGRKPVRKKLD

SEQ ID NO: 47878 - protein, 544 aa, Homo sapiens
  Payload ID: 9682
  Gene Symbol: LPCAT2
  Gene Name: lysophosphatidylcholine acyltransferase 2
  Uniprot ID: Q7L5N7
  ENSP ID: ENSP00000262134
MSRCAQAAEVAATVPGAGVGNVGLRPPMVPRQASFFPPPVPNPFVQQTQIGSARRVQIVLLGIILLPIRVLLVALILLLAWPFAAISTVCCPEKLTHPITGWRRKITQTALKFLGRAMFFSMGFIVAVKGKIASPLEAPVFVAAPHSTFFDGIACVVAGLPSMVSRNENAQVPLIGRLLRAVQPVLVSRVDPDSRKNTINEIIKRTTSGGEWPQILVFPEGTCTNRSCLITFKPGAFIPGVPVQPVLLRYPNKLDTVTWTWQGYTFIQLCMLTFCQLFTKVEVEFMPVQVPNDEEKNDPVLFANKVRNLMAEALGIPVTDHTYEDCRLMISAGQLTLPMEAGLVEFTKISRKLKLDWDGVRKHLDEYASIASSSKGGRIGIEEFAKYLKLPVSDVLRQLFALFDRNHDGSIDFREYVIGLAVLCNPSNTEEIIQVAFKLFDVDEDGYITEEEFSTILQASLGVPDLDVSGLFKEIAQGDSISYEEFKSFALKHPEYAKIFTTYLDLQTCHVFSLPKEVQTTPSTASNKVSPEKHEESTSDKKDD

SEQ ID NO: 47879 - protein, 188 aa, Homo sapiens
  Payload ID: 9682
  Gene Symbol: LPCAT2
  Gene Name: lysophosphatidylcholine acyltransferase 2
  ENSP ID: ENSP00000457496
  MOD_RES (1)..(1): Any amino acid
XAPHSTFFDGIACVVAGLPSMVSRNENAQVPLIGRLLRAVQPVLVSRVDPDSRKNTINEIIKRTTSGGEWPQILVFPEGTCTNRSCLITFKPGAFIPGVPVQPVLLRYPNKLDTVTWTWQGYTFIQLCMLTFCQLFTKVEVEMFLFFWEGSSKHCLKISSFFCIFSLRRFKRRITQRTRTAHLLRLSF

SEQ ID NO: 47880 - protein, 252 aa, Homo sapiens
  Payload ID: 9682
  Gene Symbol: LPCAT2
  Gene Name: lysophosphatidylcholine acyltransferase 2
  ENSP ID: ENSP00000483225
MMKKNDPVLFANKVRNLMAEALGIPVTDHTYEDCRLMISAGQLTLPMEAGLVEFTKISRKLKLDWDGVRKHLDEYASIASSSKGGRIGIEEFAKYLKLPVSDVLRQLFALFDRNHDGSIDFREYVIGLAVLCNPSNTEEIIQVAFKLFDVDEDGYITEEEFSTILQASLGVPDLDVSGLFKEIAQGDSISYEEFKSFALKHPEYAKIFTTYLDLQTCHVFSLPKEVQTTPSTASNKVSPEKHEESTSDKKDD

SEQ ID NO: 47881 - protein, 487 aa, Homo sapiens
  Payload ID: 9683
  Gene Symbol: LPCAT3
  Gene Name: lysophosphatidylcholine acyltransferase 3
  Uniprot ID: Q6P1A2
  ENSP ID: ENSP00000261407
MASSAEGDEGTVVALAGVLQSGFQELSLNKLATSLGASEQALRLIISIFLGYPFALFYRHYLFYKETYLIHLFHTFTGLSIAYFNFGNQLYHSLLCIVLQFLILRLMGRTITAVLTTFCFQMAYLLAGYYYTATGNYDIKWTMPHCVLTLKLIGLAVDYFDGGKDQNSLSSEQQKYAIRGVPSLLEVAGFSYFYGAFLVGPQFSMNHYMKLVQGELIDIPGKIPNSIIPALKRLSLGLFYLVGYTLLSPHITEDYLLTEDYDNHPFWFRCMYMLIWGKFVLYKYVTCWLVTEGVCILTGLGFNGFEEKGKAKWDACANMKVWLFETNPRFTGTIASFNINTNAWVARYIFKRLKFLGNKELSQGLSLLFLALWHGLHSGYLVCFQMEFLIVIVERQAARLIQESPTLSKLAAITVLQPFYYLVQQTIHWLFMGYSMTAFCLFTWDKWLKVYKSIYFLGHIFFLSLLFILPYIHKAMVPRKEKLKKME

SEQ ID NO: 47882 - protein, 64 aa, Homo sapiens
  Payload ID: 9683
  Gene Symbol: LPCAT3
  Gene Name: lysophosphatidylcholine acyltransferase 3
  ENSP ID: ENSP00000437827
MASSAEGDEGTVVALAGVLQSGFQELSLNKLATSLGASEQALRLIISIFLGTPWMKPLPAEFWQ

SEQ ID NO: 47883 - protein, 347 aa, Homo sapiens
  Payload ID: 9683
  Gene Symbol: LPCAT3
  Gene Name: lysophosphatidylcholine acyltransferase 3
  ENSP ID: ENSP00000438765
MASSAEGDEGTVVALAGVLQSGFQELSLNKLATSLGASEQALRLIISIFLGYPFALFYRHYLFYKETYLIHLFHTFTGLSIAYFNFGNQLYHSLLCIVLQFLILRLMGRTITAVLTTFCFQMAYLLAGYYYTATGNYDIKWTMPHCVLTLKLIGLAVDYFDGGKDQNSLSSEQQKYAIRGVPSLLEVAGFSYFYGAFLVGPQFSMNHYMKLVQGELIDIPGKIPNSIIPALKRLSLGLFYLVGYTLLSPHITEDYLLTEDYDNHPFWFRCMYMLIWGKFVLYKYVTCWLVTEGVCILTGLGFNGFEEKGKAKWDACANMKVWLFETNPRFTGTIASFNINTNAWVAR

SEQ ID NO: 47884 - protein, 198 aa, Homo sapiens
  Payload ID: 9683
  Gene Symbol: LPCAT3
  Gene Name: lysophosphatidylcholine acyltransferase 3
  ENSP ID: ENSP00000440550
MASSAEGDEGTVVALAGVLQSGFQELSLNKLATSLGASEQALRLIISIFLGYPFALFYRHYLFYKETYLIHLFHTFTGLSIAYFNFGNQLYHSLLCIVLQFLILRLMGRTITAVLTTFCFQMAYLLAGYYYTATGNYDIKWTMPHCVLTLKLIGLAVDYFDGGKDQHHSCSQAPESGPFLPSGLHTAQPPHHRRLSPH

SEQ ID NO: 47885 - protein, 85 aa, Homo sapiens
  Payload ID: 9683
  Gene Symbol: LPCAT3
  Gene Name: lysophosphatidylcholine acyltransferase 3
  ENSP ID: ENSP00000442454
MASSAEGDEGTVVALAGVLQSGFQELSLNKLATSLGASEQALRLIISIFLGLPSGWILLHCHRQLRYQVDNATLCSDFEADWFGC

SEQ ID NO: 47886 - protein, 158 aa, Homo sapiens
  Payload ID: 9683
  Gene Symbol: LPCAT3
  Gene Name: lysophosphatidylcholine acyltransferase 3
  ENSP ID: ENSP00000443166
MASSAEGDEGTVVALAGVLQSGFQELSLNKLATSLGASEQALRLIISIFLGYPFALFYRHYLFYKETYLIHLFHTFTGLSIAYFNFGNQLYHSLLCIVLQFLILRLMGRTITAVLTTFCFQMAYLLAGYYYTATGNYDIKWTMPHCVLTLKLIEFLVL

SEQ ID NO: 47887 - protein, 524 aa, Homo sapiens
  Payload ID: 9684
  Gene Symbol: LPCAT4
  Gene Name: lysophosphatidylcholine acyltransferase 4
  Uniprot ID: Q643R3
  ENSP ID: ENSP00000317300
MSQGSPGDWAPLDPTPGPPASPNPFVHELHLSRLQRVKFCLLGALLAPIRVLLAFIVLFLLWPFAWLQVAGLSEEQLQEPITGWRKTVCHNGVLGLSRLLFFLLGFLRIRVRGQRASRLQAPVLVAAPHSTFFDPIVLLPCDLPKVVSRAENLSVPVIGALLRFNQAILVSRHDPASRRRVVEEVRRRATSGGKWPQVLFFPEGTCSNKKALLKFKPGAFIAGVPVQPVLIRYPNSLDTTSWAWRGPGVLKVLWLTASQPCSIVDVEFLPVYHPSPEESRDPTLYANNVQRVMAQALGIPATECEFVGSLPVIVVGRLKVALEPQLWELGKVLRKAGLSAGYVDAGAEPGRSRMISQEEFARQLQLSDPQTVAGAFGYFQQDTKGLVDFRDVALALAALDGGRSLEELTRLAFELFAEEQAEGPNRLLYKDGFSTILHLLLGSPHPAATALHAELCQAGSSQGLSLCQFQNFSLHDPLYGKLFSTYLRPPHTSRGTSQTPNASSPGNPTALANGTVQAPKQKGD

SEQ ID NO: 47888 - protein, 84 aa, Homo sapiens
  Payload ID: 9684
  Gene Symbol: LPCAT4
  Gene Name: lysophosphatidylcholine acyltransferase 4
  ENSP ID: ENSP00000454422
FLPVYHPSPEESRDPTLYANNVQRVMAQALGIPATECEFVGSLPVIVVGRLKVALEPQLWELGKVLRKAGIPRVWWTSEMWPLH

SEQ ID NO: 47889 - protein, 351 aa, Homo sapiens
  Payload ID: 9684
  Gene Symbol: LPCAT4
  Gene Name: lysophosphatidylcholine acyltransferase 4
  ENSP ID: ENSP00000478003
MTRLLDAEWWRRSEAGHLRRQVAAVLFFPEGTCSNKKALLKFKPGAFIAGVPVQPVLIRYPNSLDTTSWAWRGPGVLKVLWLTASQPCSIVDVEFLPVYHPSPEESRDPTLYANNVQRVMAQALGIPATECEFVGSLPVIVVGRLKVALEPQLWELGKVLRKAGLSAGYVDAGAEPGRSRMISQEEFARQLQLSDPQTVAGAFGYFQQDTKGLVDFRDVALALAALDGGRSLEELTRLAFELFAEEQAEGPNRLLYKDGFSTILHLLLGSPHPAATALHAELCQAGSSQGLSLCQFQNFSLHDPLYGKLFSTYLRPPHTSRGTSQTPNASSPGNPTALANGTVQAPKQKGD

SEQ ID NO: 47890 - protein, 370 aa, Homo sapiens
  Payload ID: 9685
  Gene Symbol: LPGAT1
  Gene Name: lysophosphatidylglycerol acyltransferase 1
  Uniprot ID: Q92604
  ENSP ID: ENSP00000355963
MAITLEEAPWLGWLLVKALMRFAFMVVNNLVAIPSYICYVIILQPLRVLDSKRFWYIEGIMYKWLLGMVASWGWYAGYTVMEWGEDIKAVSKDEAVMLVNHQATGDVCTLMMCLQDKGLVVAQMMWLMDHIFKYTNFGIVSLVHGDFFIRQGRSYRDQQLLLLKKHLENNYRSRDRKWIVLFPEGGFLRKRRETSQAFAKKNNLPFLTNVTLPRSGATKIILNALVAQQKNGSPAGGDAKELDSKSKGLQWIIDTTIAYPKAEPIDIQTWILGYRKPTVTHVHYRIFPIKDVPLETDDLTTWLYQRFVEKEDLLSHFYETGAFPPSKGHKEAVSREMTLSNLWIFLIQSFAFLSGYMWYNIIQYFYHCLF

SEQ ID NO: 47891 - protein, 370 aa, Homo sapiens; identical to SEQ ID NO: 47890
  Payload ID: 9685
  Gene Symbol: LPGAT1
  Gene Name: lysophosphatidylglycerol acyltransferase 1
  Uniprot ID: Q92604
  ENSP ID: ENSP00000355964

SEQ ID NO: 47892 - protein, 230 aa, Homo sapiens
  Payload ID: 9686
  Gene Symbol: LYPLA1
  Gene Name: lysophospholipase I
  Uniprot ID: O75608
  ENSP ID: ENSP00000320043
MCGNNMSTPLPAIVPAARKATAAVIFLHGLGDTGHGWAEAFAGIRSSHIKYICPHAPVRPVTLNMNVAMPSWFDIIGLSPDSQEDESGIKQAAENIKALIDQEVKNGIPSNRIILGGFSQGGALSLYTALTTQQKLAGVTALSCWLPLRASFPQGPIGGANRDISILQCHGDCDPLVPLMFGSLTVEKLKTLVNPANVTFKTYEGMMHSSCQQEMMDVKQFIDKLLPPID

SEQ ID NO: 47893 - protein, 214 aa, Homo sapiens
  Payload ID: 9686
  Gene Symbol: LYPLA1
  Gene Name: lysophospholipase I
  Uniprot ID: O75608
  ENSP ID: ENSP00000344477
MCGNNMSTPLPAIVPAARKATAAVIFLHGLGDTGHGWAEAFAGIRSSHIKYICPHAFDIIGLSPDSQEDESGIKQAAENIKALIDQEVKNGIPSNRIILGGFSQGGALSLYTALTTQQKLAGVTALSCWLPLRASFPQGPIGGANRDISILQCHGDCDPLVPLMFGSLTVEKLKTLVNPANVTFKTYEGMMHSSCQQEMMDVKQFIDKLLPPID

SEQ ID NO: 47894 - protein, 58 aa, Homo sapiens
  Payload ID: 9686
  Gene Symbol: LYPLA1
  Gene Name: lysophospholipase I
  ENSP ID: ENSP00000427967
MCGNNMSTPLPAIVPAARKATAAVIFLHGLGDTGVLSVVLIEIFLFSSATGIVTLWFP

SEQ ID NO: 47895 - protein, 90 aa, Homo sapiens
  Payload ID: 9686
  Gene Symbol: LYPLA1
  Gene Name: lysophospholipase I
  ENSP ID: ENSP00000428306
MNVAMPSWFDIIGLSPDSQEDESGIKQAAENIKALIDQEVKNGIPSNRIILGGFSQGGALSLYTALTTQQKLAGVTALSCWLPLRASFPQ

SEQ ID NO: 47896 - protein, 197 aa, Homo sapiens
  Payload ID: 9686
  Gene Symbol: LYPLA1
  Gene Name: lysophospholipase I
  ENSP ID: ENSP00000428729
MCGNNMSTPLPAIVPAARKATAAVIFLHGLGDTGHGWAEAFAGIRSSHIKYICPHAFDIIGLSPDSQEDESGIKQAAENIKALIDQEVKNGIPSNRIILGGFSQGGALSLYTALTTQQKLAGVTALSCWLPLRASFPQGPIGGANRDISILQCHGDCDPLVPLMFGSLTVEKLKTLVNPANVTFKTYEGMMHSSCQQ

SEQ ID NO: 47897 - protein, 103 aa, Homo sapiens
  Payload ID: 9686
  Gene Symbol: LYPLA1
  Gene Name: lysophospholipase I
  ENSP ID: ENSP00000430791
MCGNNMSTPLPAIVPAARKATAAVIFLHGLGDTGPVRPVTLNMNVAMPSWFDIIGLSPDSQEDESGIKQAAENIKALIDQEVKNGIPSNRIILGGFSQGGALS

SEQ ID NO: 47898 - protein, 196 aa, Homo sapiens
  Payload ID: 9686
  Gene Symbol: LYPLA1
  Gene Name: lysophospholipase I
  ENSP ID: ENSP00000482430
MCGNNMSTPLPAIVPAARKATAAVIFLHGLGDTGHGWAEAFAGIRSSHIKYICPHAPVRPVTLNMNVAMPSWFDIIGLSPDSQEDESGIKQAAENIKALIDQEVKNGIPSNRIILGGFSQGPIGGANRDISILQCHGDCDPLVPLMFGSLTVEKLKTLVNPANVTFKTYEGMMHSSCQQEMMDVKQFIDKLLPPID

SEQ ID NO: 47899 - protein, 166 aa, Homo sapiens
  Payload ID: 9686
  Gene Symbol: LYPLA1
  Gene Name: lysophospholipase I
  ENSP ID: ENSP00000484280
MNVAMPSWFDIIGLSPDSQEDESGIKQAAENIKALIDQEVKNGIPSNRIILGGFSQGGALSLYTALTTQQKLAGVTALSCWLPLRASFPQGPIGGANRDISILQCHGDCDPLVPLMFGSLTVEKLKTLVNPANVTFKTYEGMMHSSCQQEMMDVKQFIDKLLPPID

SEQ ID NO: 47900 - protein, 164 aa, Homo sapiens
  Payload ID: 9687
  Gene Symbol: LYPLA2
  Gene Name: lysophospholipase II
  ENSP ID: ENSP00000363625
MKMVMPSWFDLMGLSPDAPEDEAGIKKAAENIKALIEHEMKNGIPANRIVLGGFSQGGALSLYTALTCPHPLAGIVALSCWLPLHRAFPQAANGSAKDLAILQCHGELDPMVPVRFGALTAEKLRSVVTPARVQFKTYPGVMHSSCPQEMAAVKEFLEKLLPPV

SEQ ID NO: 47901 - protein, 180 aa, Homo sapiens
  Payload ID: 9687
  Gene Symbol: LYPLA2
  Gene Name: lysophospholipase II
  ENSP ID: ENSP00000363626
MCGNTMSVPLLTDAATVSGAERETAAVIFLHGLGDTGHSWADALSTIRLPHVKYICPHAPRIPVTLNMKMVMPSWFDLMGLSPDAPEDEAGIKKAAENIKALIEHEMKNGIPANRIVLGGFSQGGALSLYTALTCPHPLAGIVALSCWLPLHRAFPQVNVPTDPPALCVCILVAWGLLQH

SEQ ID NO: 47902 - protein, 182 aa, Homo sapiens
  Payload ID: 9687
  Gene Symbol: LYPLA2
  Gene Name: lysophospholipase II
  ENSP ID: ENSP00000363627
MCGNTMSVPLLTDAATVSGAERETAAVIFLHGLGDTGHSWADALSTIRLPHVKYICPHAPRIPVTLNMKMVMPSWFDLMGLSPDAPEDEAGIKKAAENIKALIEHEMKNGIPANRIVLGGFSQGGALSLYTALTCPHPLAGIVALSCWLPLHRAFPQGPVQDIPGCHAQLLSSGDGSCEGIS

SEQ ID NO: 47903 - protein, 137 aa, Homo sapiens
  Payload ID: 9687
  Gene Symbol: LYPLA2
  Gene Name: lysophospholipase II
  ENSP ID: ENSP00000363629
MCGNTMSVPLLTDAATVSGAERETAAVIFLHGLGDTGHSWADALSTIRLPHVKYICPHAPRIPVTLNMKMVMPSWFDLMGLSPDAPEDEAGIKKAAENRRGPVPLHGPHLPPPSGWHRGVELLAASAPGLPPGECPH

SEQ ID NO: 47904 - protein, 231 aa, Homo sapiens
  Payload ID: 9687
  Gene Symbol: LYPLA2
  Gene Name: lysophospholipase II
  Uniprot ID: O95372
  ENSP ID: ENSP00000363638
MCGNTMSVPLLTDAATVSGAERETAAVIFLHGLGDTGHSWADALSTIRLPHVKYICPHAPRIPVTLNMKMVMPSWFDLMGLSPDAPEDEAGIKKAAENIKALIEHEMKNGIPANRIVLGGFSQGGALSLYTALTCPHPLAGIVALSCWLPLHRAFPQAANGSAKDLAILQCHGELDPMVPVRFGALTAEKLRSVVTPARVQFKTYPGVMHSSCPQEMAAVKEFLEKLLPPV

SEQ ID NO: 47905 - protein, 90 aa, Homo sapiens
  Payload ID: 9687
  Gene Symbol: LYPLA2
  Gene Name: lysophospholipase II
  ENSP ID: ENSP00000388003
MCGNTMSVPLLTDAATVSGAERETAAVIFLHGLGDTGHSWADALSTIRLPHVKYICPHAPRIPVTLNMKMVMPSWFDLMGLSPDAPEDEA

SEQ ID NO: 47906 - protein, 162 aa, Homo sapiens
  Payload ID: 9687
  Gene Symbol: LYPLA2
  Gene Name: lysophospholipase II
  ENSP ID: ENSP00000409004
MLPPCLELSGKRPRHSWADALSTIRLPHVKYICPHAPRIPVTLNMKMVMPSWFDLMGLSPDAPEDEAGIKKAAENIKALIEHEMKNGIPANRIVLGGFSQGGALSLYTALTCPHPLAGIVALSCWLPLHRAFPQAANGSAKDLAILQCHGELDPMVPVRFGA

SEQ ID NO: 47907 - protein, 221 aa, Homo sapiens
  Payload ID: 9688
  Gene Symbol: LYPLAL1
  Gene Name: lysophospholipase-like 1
  Uniprot ID: Q5VWZ2
  ENSP ID: ENSP00000355894
MAAASGSVLQRCIVSPAGRHSASLIFLHGSGDSGQGLRMWIKQVLNQDLTFQHIKIIYPTAPPRFKITNDCPEHLESIDVMCQVLTDLIDEEVKSGIKKNRILIGGFSMGGCMAIHLAYRNHQDVAGVFALSSFLNKASAVYQALQKSNGVLPELFQCHGTADELVLHSWAEETNSMLKSLGVTTKFHSFPNVYHELSKTELDILKLWILTKLPGEMEKQK

SEQ ID NO: 47908 - protein, 237 aa, Homo sapiens
  Payload ID: 9688
  Gene Symbol: LYPLAL1
  Gene Name: lysophospholipase-like 1
  Uniprot ID: Q5VWZ2
  ENSP ID: ENSP00000355895
MAAASGSVLQRCIVSPAGRHSASLIFLHGSGDSGQGLRMWIKQVLNQDLTFQHIKIIYPTAPPRSYTPMKGGISNVWFDRFKITNDCPEHLESIDVMCQVLTDLIDEEVKSGIKKNRILIGGFSMGGCMAIHLAYRNHQDVAGVFALSSFLNKASAVYQALQKSNGVLPELFQCHGTADELVLHSWAEETNSMLKSLGVTTKFHSFPNVYHELSKTELDILKLWILTKLPGEMEKQK

SEQ ID NO: 47909 - protein, 233 aa, Homo sapiens
  Payload ID: 9689
  Gene Symbol: LAPTM4A
  Gene Name: lysosomal protein transmembrane 4 alpha
  Uniprot ID: Q15012
  ENSP ID: ENSP00000175091
MVSMSFKRNRSDRFYSTRCCGCCHVRTGTIILGTWYMVVNLLMAILLTVEVTHPNSMPAVNIQYEVIGNYYSSERMADNACVLFAVSVLMFIISSMLVYGAISYQVGWLIPFFCYRLFDFVLSCLVAISSLTYLPRIKEYLDQLPDFPYKDDLLALDSSCLLFIVLVFFALFIIFKAYLINCVWNCYKYINNRNVPEIAVYPAFEAPPQYVLPTYEMAVKMPEKEPPPPYLPA

SEQ ID NO: 47910 - protein, 317 aa, Homo sapiens
  Payload ID: 9690
  Gene Symbol: LAPTM4B
  Gene Name: lysosomal protein transmembrane 4 beta
  Uniprot ID: Q86VI4
  ENSP ID: ENSP00000402301
MTSRTRVTWPSPPRPLPVPAAAAVAFGAKGTDPAEARSSRGIEEAGPRAHGRAGREPERRRSRQQRRGGLQARRSTLLKTCARARATAPGAMKMVAPWTRFYSNSCCLCCHVRTGTILLGVWYLIINAVVLLILLSALADPDQYNFSSSELGGDFEFMDDANMCIAIAISLLMILICAMATYGAYKQRAAWIIPFFCYQIFDFALNMLVAITVLIYPNSIQEYIRQLPPNFPYRDDVMSVNPTCLVLIILLFISIILTFKGYLISCVWNCYRYINGRNSSDVLVYVTSNDTTVLLPPYDDATVNGAAKEPPPPYVSA

SEQ ID NO: 47911 - protein, 226 aa, Homo sapiens
  Payload ID: 9690
  Gene Symbol: LAPTM4B
  Gene Name: lysosomal protein transmembrane 4 beta
  Uniprot ID: Q86VI4
  ENSP ID: ENSP00000428409
MKMVAPWTRFYSNSCCLCCHVRTGTILLGVWYLIINAVVLLILLSALADPDQYNFSSSELGGDFEFMDDANMCIAIAISLLMILICAMATYGAYKQRAAWIIPFFCYQIFDFALNMLVAITVLIYPNSIQEYIRQLPPNFPYRDDVMSVNPTCLVLIILLFISIILTFKGYLISCVWNCYRYINGRNSSDVLVYVTSNDTTVLLPPYDDATVNGAAKEPPPPYVSA

SEQ ID NO: 47912 - protein, 152 aa, Homo sapiens
  Payload ID: 9690
  Gene Symbol: LAPTM4B
  Gene Name: lysosomal protein transmembrane 4 beta
  ENSP ID: ENSP00000429868
MKMVAPWTRFYSNSCCLCCHVRTGTILLGVWYLIINAVVLLILLSALADPDQYNFSSSELGGDFEFMDDAKILFNLSADMCIAIAISLLMILICAMATYGAYKQRAAWIIPFFCYQIFDFALNMLVAITVLIYPNSIQEYIRQLPPNFPYRD

SEQ ID NO: 47913 - protein, 317 aa, Homo sapiens; identical to SEQ ID NO: 47910
  Payload ID: 9690
  Gene Symbol: LAPTM4B
  Gene Name: lysosomal protein transmembrane 4 beta
  Uniprot ID: Q86VI4
  ENSP ID: ENSP00000482533

SEQ ID NO: 47914 - protein, 262 aa, Homo sapiens
  Payload ID: 9691
  Gene Symbol: LAPTM5
  Gene Name: lysosomal protein transmembrane 5
  Uniprot ID: Q13571
  ENSP ID: ENSP00000294507
MDPRLSTVRQTCCCFNVRIATTALAIYHVIMSVLLFIEHSVEVAHGKASCKLSQMGYLRIADLISSFLLITMLFIISLSLLIGVVKNREKYLLPFLSLQIMDYLLCLLTLLGSYIELPAYLKLASRSRASSSKFPLMTLQLLDFCLSILTLCSSYMEVPTYLNFKSMNHMNYLPSQEDMPHNQFIKMMIIFSIAFITVLIFKVYMFKCVWRCYRLIKCMNSVEEKRNSKMLQKVVLPSYEEALSLPSKTPEGGPAPPPYSEV

SEQ ID NO: 47915 - protein, 3801 aa, Homo sapiens
  Payload ID: 9692
  Gene Symbol: LYST
  Gene Name: lysosomal trafficking regulator
  Uniprot ID: Q99698
  ENSP ID: ENSP00000374443
MSTDSNSLAREFLTDVNRLCNAVVQRVEAREEEEEETHMATLGQYLVHGRGFLLLTKLNSIIDQALTCREELLTLLLSLLPLVWKIPVQEEKATDFNLPLSADIILTKEKNSSSQRSTQEKLHLEGSALSSQVSAKVNVFRKSRRQRKITHRYSVRDARKTQLSTSDSEANSDEKGIAMNKHRRPHLLHHFLTSFPKQDHPKAKLDRLATKEQTPPDAMALENSREIIPRQGSNTDILSEPAALSVISNMNNSPFDLCHVLLSLLEKVCKFDVTLNHNSPLAASVVPTLTEFLAGFGDCCSLSDNLESRVVSAGWTEEPVALIQRMLFRTVLHLLSVDVSTAEMMPENLRKNLTELLRAALKIRICLEKQPDPFAPRQKKTLQEVQEDFVFSKYRHRALLLPELLEGVLQILICCLQSAASNPFYFSQAMDLVQEFIQHHGFNLFETAVLQMEWLVLRDGVPPEASEHLKALINSVMKIMSTVKKVKSEQLHHSMCTRKRHRRCEYSHFMHHHRDLSGLLVSAFKNQVSKNPFEETADGDVYYPERCCCIAVCAHQCLRLLQQASLSSTCVQILSGVHNIGICCCMDPKSVIIPLLHAFKLPALKNFQQHILNILNKLILDQLGGAEISPKIKKAACNICTVDSDQLAQLEETLQGNLCDAELSSSLSSPSYRFQGILPSSGSEDLLWKWDALKAYQNFVFEEDRLHSIQIANHICNLIQKGNIVVQWKLYNYIFNPVLQRGVELAHHCQHLSVTSAQSHVCSHHNQCLPQDVLQIYVKTLPILLKSRVIRDLFLSCNGVSQIIELNCLNGIRSHSLKAFETLIISLGEQQKDASVPDIDGIDIEQKELSSVHVGTSFHHQQAYSDSPQSLSKFYAGLKEAYPKRRKTVNQDVHINTINLFLCVAFLCVSKEAESDRESANDSEDTSGYDSTASEPLSHMLPCISLESLVLPSPEHMHQAADIWSMCRWIYMLSSVFQKQFYRLGGFRVCHKLIFMIIQKLFRSHKEEQGKKEGDTSVNENQDLNRISQPKRTMKEDLLSLAIKSDPIPSELGSLKKSADSLGKLELQHISSINVEEVSATEAAPEEAKLFTSQESETSLQSIRLLEALLAICLHGARTSQQKMELELPNQNLSVESILFEMRDHLSQSKVIETQLAKPLFDALLRVALGNYSADFEHNDAMTEKSHQSAEELSSQPGDFSEEAEDSQCCSFKLLVEEEGYEADSESNPEDGETQDDGVDLKSETEGFSASSSPNDLLENLTQGEIIYPEICMLELNLLSASKAKLDVLAHVFESFLKIIRQKEKNVFLLMQQGTVKNLLGGFLSILTQDDSDFQACQRVLVDLLVSLMSSRTCSEELTLLLRIFLEKSPCTKILLLGILKIIESDTTMSPSQYLTFPLLHAPNLSNGVSSQKYPGILNSKAMGLLRRARVSRSKKEADRESFPHRLLSSWHIAPVHLPLLGQNCWPHLSEGFSVSLWFNVECIHEAESTTEKGKKIKKRNKSLILPDSSFDGTESDRPEGAEYINPGERLIEEGCIHIISLGSKALMIQVWADPHNATLIFRVCMDSNDDMKAVLLAQVESQENIFLPSKWQHLVLTYLQQPQGKRRIHGKISIWVSGQRKPDVTLDFMLPRKTSLSSDSNKTFCMIGHCLSSQEEFLQLAGKWDLGNLLLFNGAKVGSQEAFYLYACGPNHTSVMPCKYGKPVNDYSKYINKEILRCEQIRELFMTKKDVDIGLLIESLSVVYTTYCPAQYTIYEPVIRLKGQMKTQLSQRPFSSKEVQSILLEPHHLKNLQPTEYKTIQGILHEIGGTGIFVFLFARVVELSSCEETQALALRVILSLIKYNQQRVHELENCNGLSMIHQVLIKQKCIVGFYILKTLLEGCCGEDIIYMNENGEFKLDVDSNAIIQDVKLLEELLLDWKIWSKAEQGVWETLLAALEVLIRADHHQQMFNIKQLLKAQVVHHFLLTCQVLQEYKEGQLTPMPREVCRSFVKIIAEVLGSPPDLELLTIIFNFLLAVHPPTNTYVCHNPTNFYFSLHIDGKIFQEKVRSIMYLRHSSSGGRSLMSPGFMVISPSGFTASPYEGENSSNIIPQQMAAHMLRSRSLPAFPTSSLLTQSQKLTGSLGCSIDRLQNIADTYVATQSKKQNSLGSSDTLKKGKEDAFISSCESAKTVCEMEAVLSAQVSVSDVPKGVLGFPVVKADHKQLGAEPRSEDDSPGDESCPRRPDYLKGLASFQRSHSTIASLGLAFPSQNGSAAVGRWPSLVDRNTDDWENFAYSLGYEPNYNRTASAHSVTEDCLVPICCGLYELLSGVLLILPDVLLEDVMDKLIQADTLLVLVNHPSPAIQQGVIKLLDAYFARASKEQKDKFLKNRGFSLLANQLYLHRGTQELLECFIEMFFGRHIGLDEEFDLEDVRNMGLFQKWSVIPILGLIETSLYDNILLHNALLLLLQILNSCSKVADMLLDNGLLYVLCNTVAALNGLEKNIPMSEYKLLACDIQQLFIAVTIHACSSSGSQYFRVIEDLIVMLGYLQNSKNKRTQNMAVALQLRVLQAAMEFIRTTANHDSENLTDSLQSPSAPHHAVVQKRKSIAGPRKFPLAQTESLLMKMRSVANDELHVMMQRRMSQENPSQATETELAQRLQRLTVLAVNRIIYQEFNSDIIDILRTPENVTQSKTSVFQTEISEENIHHEQSSVFNPFQKEIFTYLVEGFKVSIGSSKASGSKQQWTKILWSCKETFRMQLGRLLVHILSPAHAAQERKQIFEIVHEPNHQEILRDCLSPSLQHGAKLVLYLSELIHNHQGELTEEELGTAELLMNALKLCGHKCIPPSASTKADLIKMIKEEQKKYETEEGVNKAAWQKTVNNNQQSLFQRLDSKSKDISKIAADITQAVSLSQGNERKKVIQHIRGMYKVDLSASRHWQELIQQLTHDRAVWYDPIYYPTSWQLDPTEGPNRERRRLQRCYLTIPNKYLLRDRQKSEDVVKPPLSYLFEDKTHSSFSSTVKDKAASESIRVNRRCISVAPSRETAGELLLGKCGMYFVEDNASDTVESSSLQGELEPASFSWTYEEIKEVHKRWWQLRDNAVEIFLTNGRTLLLAFDNTKVRDDVYHNILTNNLPNLLEYGNITALTNLWYTGQITNFEYLTHLNKHAGRSFNDLMQYPVFPFILADYVSETLDLNDLLIYRNLSKPIAVQYKEKEDRYVDTYKYLEEEYRKGAREDDPMPPVQPYHYGSHYSNSGTVLHFLVRMPPFTKMFLAYQDQSFDIPDRTFHSTNTTWRLSSFESMTDVKELIPEFFYLPEFLVNREGFDFGVRQNGERVNHVNLPPWARNDPRLFILIHRQALESDYVSQNICQWIDLVFGYKQKGKASVQAINVFHPATYFGMDVSAVEDPVQRRALETMIKTYGQTPRQLFHMAHVSRPGAKLNIEGELPAAVGLLVQFAFRETREQVKEITYPSPLSWIKGLKWGEYVGSPSAPVPVVCFSQPHGERFGSLQALPTRAICGLSRNFCLLMTYSKEQGVRSMNSTDIQWSAILSWGYADNILRLKSKQSEPPVNFIQSSQQYQVTSCAWVPDSCQLFTGSKCGVITAYTNRFTSSTPSEIEMETQIHLYGHTEEITSLFVCKPYSILISVSRDGTCIIWDLNRLCYVQSLAGHKSPVTAVSASETSGDIATVCDSAGGGSDLRLWTVNGDLVGHVHCREIICSVAFSNQPEGVSINVIAGGLENGIVRLWSTWDLKPVREITFPKSNKPIISLTFSCDGHHLYTANSDGTVIAWCRKDQQRLKQPMFYSFLSSYAAG

SEQ ID NO: 47916 - protein, 1382 aa, Homo sapiens
  Payload ID: 9692
  Gene Symbol: LYST
  Gene Name: lysosomal trafficking regulator
  ENSP ID: ENSP00000374444
MSTDSNSLAREFLTDVNRLCNAVVQRVEAREEEEEETHMATLGQYLVHGRGFLLLTKLNSIIDQALTCREELLTLLLSLLPLVWKIPVQEEKATDFNLPLSADIILTKEKNSSSQRSTQEKLHLEGSALSSQVSAKVNVFRKSRRQRKITHRYSVRDARKTQLSTSDSEANSDEKGIAMNKHRRPHLLHHFLTSFPKQDHPKAKLDRLATKEQTPPDAMALENSREIIPRQGSNTDILSEPAALSVISNMNNSPFDLCHVLLSLLEKVCKFDVTLNHNSPLAASVVPTLTEFLAGFGDCCSLSDNLESRVVSAGWTEEPVALIQRMLFRTVLHLLSVDVSTAEMMPENLRKNLTELLRAALKIRICLEKQPDPFAPRQKKTLQEVQEDFVFSKYRHRALLLPELLEGVLQILICCLQSAASNPFYFSQAMDLVQEFIQHHGFNLFETAVLQMEWLVLRDGVPPEASEHLKALINSVMKIMSTVKKVKSEQLHHSMCTRKRHRRCEYSHFMHHHRDLSGLLVSAFKNQVSKNPFEETADGDVYYPERCCCIAVCAHQCLRLLQQASLSSTCVQILSGVHNIGICCCMDPKSVIIPLLHAFKLPALKNFQQHILNILNKLILDQLGGAEISPKIKKAACNICTVDSDQLAQLEETLQGNLCDAELSSSLSSPSYRFQGILPSSGSEDLLWKWDALKAYQNFVFEEDRLHSIQIANHICNLIQKGNIVVQWKLYNYIFNPVLQRGVELAHHCQHLSVTSAQSHVCSHHNQCLPQDVLQIYVKTLPILLKSRVIRDLFLSCNGVSQIIELNCLNGIRSHSLKAFETLIISLGEQQKDASVPDIDGIDIEQKELSSVHVGTSFHHQQAYSDSPQSLSKFYAGLKEAYPKRRKTVNQDVHINTINLFLCVAFLCVSKEAESDRESANDSEDTSGYDSTASEPLSHMLPCISLESLVLPSPEHMHQAADIWSMCRWIYMLSSVFQKQFYRLGGFRVCHKLIFMIIQKLFRSHKEEQGKKEGDTSVNENQDLNRISQPKRTMKEDLLSLAIKSDPIPSELGSLKKSADSLGKLELQHISSINVEEVSATEAAPEEAKLFTSQESETSLQSIRLLEALLAICLHGARTSQQKMELELPNQNLSVESILFEMRDHLSQSKVIETQLAKPLFDALLRVALGNYSADFEHNDAMTEKSHQSAEELSSQPGDFSEEAEDSQCCSFKLLVEEEGYEADSESNPEDGETQDDGVDLKSETEGFSASSSPNDLLENLTQGEIIYPEICMLELNLLSASKAKLDVLAHVFESFLKIIRQKEKNVFLLMQQGTVKNLLGGFLSILTQDDSDFQACQRVLVDLLVSLMSSRTCSEELTLLLRIFLEKSPCTRATDQKVQST

SEQ ID NO: 47917 - protein, 181 aa, Homo sapiens
  Payload ID: 9692
  Gene Symbol: LYST
  Gene Name: lysosomal trafficking regulator
  ENSP ID: ENSP00000417168
  MOD_RES (1)..(1): Any amino acid
XIPMSEYKLLACDIQQLFIAVTIHACSSSGSQYFRVIEDLIVMLGYLQNSKNKRTQNMAVALQLRVLQAAMEFIRTTANHDSENLTDSLQSPSAPHHAVVQKRKSIAGSIPMKGSIIPHLPRHHFGSYGQLPMPFSFGPLNQDSSPQFSPGCTTCVVPPGAGPRKFPLAQTESLLMKMRSV

SEQ ID NO: 47918 - protein, 417 aa, Homo sapiens
  Payload ID: 9693
  Gene Symbol: LAMP1
  Gene Name: lysosomal-associated membrane protein 1
  Uniprot ID: P11279
  ENSP ID: ENSP00000333298
MAAPGSARRPLLLLLLLLLLGLMHCASAAMFMVKNGNGTACIMANFSAAFSVNYDTKSGPKNMTFDLPSDATVVLNRSSCGKENTSDPSLVIAFGRGHTLTLNFTRNATRYSVQLMSFVYNLSDTHLFPNASSKEIKTVESITDIRADIDKKYRCVSGTQVHMNNVTVTLHDATIQAYLSNSSFSRGETRCEQDRPSPTTAPPAPPSPSPSPVPKSPSVDKYNVSGTNGTCLLASMGLQLNLTYERKDNTTVTRLLNINPNKTSASGSCGAHLVTLELHSEGTTVLLFQFGMNASSSRFFLQGIQLNTILPDARDPAFKAANGSLRALQATVGNSYKCNAEEHVRVTKAFSVNIFKVWVQAFKVEGGQFGSVEECLLDENSMLIPIAVGGALAGLVLIVLIAYLVGRKRSHAGYQTI

SEQ ID NO: 47919 - protein, 410 aa, Homo sapiens
  Payload ID: 9694
  Gene Symbol: LAMP2
  Gene Name: lysosomal-associated membrane protein 2
  Uniprot ID: P13473
  ENSP ID: ENSP00000200639
MVCFRLFPVPGSGLVLVCLVLGAVRSYALELNLTDSENATCLYAKWQMNFTVRYETTNKTYKTVTISDHGTVTYNGSICGDDQNGPKIAVQFGPGFSWIANFTKAASTYSIDSVSFSYNTGDNTTFPDAEDKGILTVDELLAIRIPLNDLFRCNSLSTLEKNDVVQHYWDVLVQAFVQNGTVSTNEFLCDKDKTSTVAPTIHTTVPSPTTTPTPKEKPEAGTYSVNNGNDTCLLATMGLQLNITQDKVASVININPNTTHSTGSCRSHTALLRLNSSTIKYLDFVFAVKNENRFYLKEVNISMYLVNGSVFSIANNNLSYWDAPLGSSYMCNKEQTVSVSGAFQINTFDLRVQPFNVTQGKYSTAQDCSADDDNFLVPIAVGAALAGVLILVLLAYFIGLKHHHAGYEQF

SEQ ID NO: 47920 - protein, 410 aa, Homo sapiens
  Payload ID: 9694
  Gene Symbol: LAMP2
  Gene Name: lysosomal-associated membrane protein 2
  Uniprot ID: P13473
  ENSP ID: ENSP00000360386
MVCFRLFPVPGSGLVLVCLVLGAVRSYALELNLTDSENATCLYAKWQMNFTVRYETTNKTYKTVTISDHGTVTYNGSICGDDQNGPKIAVQFGPGFSWIANFTKAASTYSIDSVSFSYNTGDNTTFPDAEDKGILTVDELLAIRIPLNDLFRCNSLSTLEKNDVVQHYWDVLVQAFVQNGTVSTNEFLCDKDKTSTVAPTIHTTVPSPTTTPTPKEKPEAGTYSVNNGNDTCLLATMGLQLNITQDKVASVININPNTTHSTGSCRSHTALLRLNSSTIKYLDFVFAVKNENRFYLKEVNISMYLVNGSVFSIANNNLSYWDAPLGSSYMCNKEQTVSVSGAFQINTFDLRVQPFNVTQGKYSTAQECSLDDDTILIPIIVGAGLSGLIIVIVIAYVIGRRKSYAGYQTL

SEQ ID NO: 47921 - protein, 411 aa, Homo sapiens
  Payload ID: 9694
  Gene Symbol: LAMP2
  Gene Name: lysosomal-associated membrane protein 2
  Uniprot ID: P13473
  ENSP ID: ENSP00000408411
MVCFRLFPVPGSGLVLVCLVLGAVRSYALELNLTDSENATCLYAKWQMNFTVRYETTNKTYKTVTISDHGTVTYNGSICGDDQNGPKIAVQFGPGFSWIANFTKAASTYSIDSVSFSYNTGDNTTFPDAEDKGILTVDELLAIRIPLNDLFRCNSLSTLEKNDVVQHYWDVLVQAFVQNGTVSTNEFLCDKDKTSTVAPTIHTTVPSPTTTPTPKEKPEAGTYSVNNGNDTCLLATMGLQLNITQDKVASVININPNTTHSTGSCRSHTALLRLNSSTIKYLDFVFAVKNENRFYLKEVNISMYLVNGSVFSIANNNLSYWDAPLGSSYMCNKEQTVSVSGAFQINTFDLRVQPFNVTQGKYSTAEECSADSDLNFLIPVAVGVALGFLIIVVFISYMIGRRKSRTGYQSV

SEQ ID NO: 47922 - protein, 258 aa, Homo sapiens
  Payload ID: 9694
  Gene Symbol: LAMP2
  Gene Name: lysosomal-associated membrane protein 2
  ENSP ID: ENSP00000431526
  MOD_RES (1)..(1): Any amino acid
XNSLSTLEKNDVVQHYWDVLVQAFVQNGTVSTNEFLCDKDKTSTVAPTIHTTVPSPTTTPTPKEKPEAGTYSVNNGNDTCLLATMGLQLNITQDKVASVININPNTTHSTGSCRSHTALLRLNSSTIKYLDFVFAVKNENRFYLKEVNISMYLVNGSVFSIANNNLSYWDAPLGSSYMCNKEQTVSVSGAFQINTFDLRVQPFNVTQGKYSTAQECSLDDDTILIPIIVGAGLSGLIIVIVIAYVIGRRKSYAGYQTL

SEQ ID NO: 47923 - protein, 416 aa, Homo sapiens
  Payload ID: 9695
  Gene Symbol: LAMP3
  Gene Name: lysosomal-associated membrane protein 3
  Uniprot ID: Q9UQV4
  ENSP ID: ENSP00000265598
MPRQLSAAAALFASLAVILHDGSQMRAKAFPETRDYSQPTAAATVQDIKKPVQQPAKQAPHQTLAARFMDGHITFQTAATVKIPTTTPATTKNTATTSPITYTLVTTQATPNNSHTAPPVTEVTVGPSLAPYSLPPTITPPAHTTGTSSSTVSHTTGNTTQPSNQTTLPATLSIALHKSTTGQKPVQPTHAPGTTAAAHNTTRTAAPASTVPGPTLAPQPSSVKTGIYQVLNGSRLCIKAEMGIQLIVQDKESVFSPRRYFNIDPNATQASGNCGTRKSNLLLNFQGGFVNLTFTKDEESYYISEVGAYLTVSDPETIYQGIKHAVVMFQTAVGHSFKCVSEQSLQLSAHLQVKTTDVQLQAFDFEDDHFGNVDECSSDYTIVLPVIGAIVVGLCLMGMGVYKIRLRCQSSGYQRI

SEQ ID NO: 47924 - protein, 392 aa, Homo sapiens
  Payload ID: 9695
  Gene Symbol: LAMP3
  Gene Name: lysosomal-associated membrane protein 3
  ENSP ID: ENSP00000418912
MRAKAFPETRDYSQPTAAATVQDIKKPVQQPAKQAPHQTLAARFMDGHITFQTAATVKIPTTTPATTKNTATTSPITYTLVTTQATPNNSHTAPPVTEVTVGPSLAPYSLPPTITPPAHTTGTSSSTVSHTTGNTTQPSNQTTLPATLSIALHKSTTGQKPVQPTHAPGTTAAAHNTTRTAAPASTVPGPTLAPQPSSVKTGIYQVLNGSRLCIKAEMGIQLIVQDKESVFSPRRYFNIDPNATQASGNCGTRKSNLLLNFQGGFVNLTFTKDEESYYISEVGAYLTVSDPETIYQGIKHAVVMFQTAVGHSFKCVSEQSLQLSAHLQVKTTDVQLQAFDFEDDHFGNVDECSSDYTIVLPVIGAIVVGLCLMGMGVYKIRLRCQSSGYQRI

SEQ ID NO: 47925 - protein, 180 aa, Homo sapiens
  Payload ID: 9695
  Gene Symbol: LAMP3
  Gene Name: lysosomal-associated membrane protein 3
  ENSP ID: ENSP00000419059
MPRQLSAAAALFASLAVILHDGSQMRAKAFPETRDYSQPTAAATVQDIKKPVQQPAKQAPHQTLAARFMDGHITFQTAATVKIPTTTPATTKNTATTSPITYTLVTTQATPNNSHTAPPVTEVTVGPSLAPYSLPPTITPPAHTTGTSSSTVSHTTGNTTQPSNQTTLPATLSIALHKST

SEQ ID NO: 47926 - protein, 143 aa, Homo sapiens
  Payload ID: 9695
  Gene Symbol: LAMP3
  Gene Name: lysosomal-associated membrane protein 3
  ENSP ID: ENSP00000420589
MRAKAFPETRDYSQPTAAATVQDIKKPVQQPAKQAPHQTLAARFMDGHITFQTAATVKIPTTTPATTKNTATTSPITYTLVTTQATPNNSHTAPPVTEVTVGPSLAPYSLPPTITPPAHTTGTSSSTVSHTTGNTTQPSNQTT

SEQ ID NO: 47927 - protein, 280 aa, Homo sapiens
  Payload ID: 9696
  Gene Symbol: LAMP5
  Gene Name: lysosomal-associated membrane protein family, member 5
  Uniprot ID: Q9UJQ1
  ENSP ID: ENSP00000246070
MDLQGRGVPSIDRLRVLLMLFHTMAQIMAEQEVENLSGLSTNPEKDIFVVRENGTTCLMAEFAAKFIVPYDVWASNYVDLITEQADIALTRGAEVKGRCGHSQSELQVFWVDRAYALKMLFVKESHNMSKGPEATWRLSKVQFVYDSSEKTHFKDAVSAGKHTANSHHLSALVTPAGKSYECQAQQTISLASSDPQKTVTMILSAVHIQPFDIISDFVFSEEHKCPVDEREQLEETLPLILGLILGLVIMVTLAIYHVHHKMTANQVQIPRDRSQYKHMG

SEQ ID NO: 47928 - protein, 236 aa, Homo sapiens
  Payload ID: 9696
  Gene Symbol: LAMP5
  Gene Name: lysosomal-associated membrane protein family, member 5
  Uniprot ID: Q9UJQ1
  ENSP ID: ENSP00000406360
MDLQGRGVPSIDRLRVLLMLFHTMAQIMAEQEVENLSGLSTNPEKDIFVVRENGTTCLMAEFAAKFIVPYDVWASNYVDESHNMSKGPEATWRLSKVQFVYDSSEKTHFKDAVSAGKHTANSHHLSALVTPAGKSYECQAQQTISLASSDPQKTVTMILSAVHIQPFDIISDFVFSEEHKCPVDEREQLEETLPLILGLILGLVIMVTLAIYHVHHKMTANQVQIPRDRSQYKHMG

SEQ ID NO: 47929 - protein, 148 aa, Homo sapiens
  Payload ID: 9697
  Gene Symbol: LYZ
  Gene Name: lysozyme
  Uniprot ID: P61626
  ENSP ID: ENSP00000261267
MKALIVLGLVLLSVTVQGKVFERCELARTLKRLGMDGYRGISLANWMCLAKWESGYNTRATNYNAGDRSTDYGIFQINSRYWCNDGKTPGAVNACHLSCSALLQDNIADAVACAKRVVRDPQGIRAWVAWRNRCQNRDVRQYVQGCGV

SEQ ID NO: 47930 - protein, 137 aa, Homo sapiens
  Payload ID: 9697
  Gene Symbol: LYZ
  Gene Name: lysozyme
  ENSP ID: ENSP00000449898
MKALIVLGLVLLSVTVQGKVFERCELARTLKRLGMDGYRGISLANWMCLAKWESGYNTRATNYNAGDRSTDYGIFQINSRYWCNDGKTPGAVNACHLSCSGWHGEIVVKTEMSVSMFKVVECNSRIFLLQLILSLSH

SEQ ID NO: 47931 - protein, 104 aa, Homo sapiens
  Payload ID: 9697
  Gene Symbol: LYZ
  Gene Name: lysozyme
  ENSP ID: ENSP00000449969
MKALIVLGLVLLSVTVQGKVFERCELARTLKRLGMDGYRGISLANWMCLAKWESGYNTRATNYNAGDRSTDYGIFQINSRYWCNDGKTPGAVNACHLSCSGKTS

SEQ ID NO: 47932 - protein, 194 aa, Homo sapiens
  Payload ID: 9698
  Gene Symbol: LYG1
  Gene Name: lysozyme G-like 1
  Uniprot ID: Q8N1E2
  ENSP ID: ENSP00000311320
MSALWLLLGLLALMDLSESSNWGCYGNIQSLDTPGASCGIGRRHGLNYCGVRASERLAEIDMPYLLKYQPMMQTIGQKYCMDPAVIAGVLSRKSPGDKILVNMGDRTSMVQDPGSQAPTSWISESQVSQTTEVLTTRIKEIQRRFPTWTPDQYLRGGLCAYSGGAGYVRSSQDLSCDFCNDVLARAKYLKRHGF

SEQ ID NO: 47933 - protein, 194 aa, Homo sapiens; identical to SEQ ID NO: 47932
  Payload ID: 9698
  Gene Symbol: LYG1
  Gene Name: lysozyme G-like 1
  Uniprot ID: Q8N1E2
  ENSP ID: ENSP00000386923

SEQ ID NO: 47934 - protein, 212 aa, Homo sapiens
  Payload ID: 9699
  Gene Symbol: LYG2
  Gene Name: lysozyme G-like 2
  Uniprot ID: Q86SG7
  ENSP ID: ENSP00000327533
MLSSVVFWGLIALIGTSRGSYPFSHSMKPHLHPRLYHGCYGDIMTMKTSGATCDANSVMNCGIRGSEMFAEMDLRAIKPYQTLIKEVGQRHCVDPAVIAAIISRESHGGSVLQDGWDHRGLKFGLMQLDKQTYHPVGAWDSKEHLSQATGILTERIKAIQKKFPTWSVAQHLKGGLSAFKSGIEAIATPSDIDNDFVNDIIARAKFYKRQSF

SEQ ID NO: 47935 - protein, 182 aa, Homo sapiens
  Payload ID: 9699
  Gene Symbol: LYG2
  Gene Name: lysozyme G-like 2
  ENSP ID: ENSP00000386381
MLSSVVFWGLIALIGTSRGSYPFSHSMKPHLHPRLYHGCYGDIMTMKTSGATCDANSVMNCGIRGSEMFAEMDLRAIKPYQTLIKEVGQRHCVDPAVIAAIISRESHGGSVLQDGWDHRGLKFGLMQLDKQTYHPVGAWDSKEHLSQATGILTERIKAIQKKFPTWSVAQHLKGRLYSEYFV

SEQ ID NO: 47936 - protein, 212 aa, Homo sapiens; identical to SEQ ID NO: 47934
  Payload ID: 9699
  Gene Symbol: LYG2
  Gene Name: lysozyme G-like 2
  Uniprot ID: Q86SG7
  ENSP ID: ENSP00000386939

SEQ ID NO: 47937 - protein, 178 aa, Homo sapiens
  Payload ID: 9699
  Gene Symbol: LYG2
  Gene Name: lysozyme G-like 2
  Uniprot ID: Q86SG7
  ENSP ID: ENSP00000390357
MLSSVVFWGLIALIGTSRGSYPFSHSMKPHLHPRLYHGCYGDIMTMKTSGATCDANSVMNCGIRGSEMFAEMDLRAIKPYQTLIKEVGQRHCVDPAVIAAIISRESHGGSVLQDGWDHRGLKFGLMQLDKQTYHPVGAWDSKEHLSQATGILTERIKAIQKKFPTWSVAQHLKGFFLL

SEQ ID NO: 47938 - protein, 169 aa, Homo sapiens
  Payload ID: 9699
  Gene Symbol: LYG2
  Gene Name: lysozyme G-like 2
  ENSP ID: ENSP00000405439
MLSSVVFWGLIALIGTSRGSYPFSHSMKPHLHPRLYHGCYGDIMTMKTSGATCDANSVMNCGIRGSEMFAEMDLRAIKPYQTLIKEVGQRHCVDPAVIAAIISRESHGGSVLQDGWDHRGLKFGLMQLDKQTYHPVGAWDSKEHLSQATGILTERIKAIQKKFPTWSVA

SEQ ID NO: 47939 - protein, 178 aa, Homo sapiens; identical to SEQ ID NO: 47937
  Payload ID: 9699
  Gene Symbol: LYG2
  Gene Name: lysozyme G-like 2
  Uniprot ID: Q86SG7
  ENSP ID: ENSP00000487012

SEQ ID NO: 47940 - protein, 194 aa, Homo sapiens
  Payload ID: 9700
  Gene Symbol: LYZL1
  Gene Name: lysozyme-like 1
  Uniprot ID: Q6UWQ5
  ENSP ID: ENSP00000364650
MQDAPLSCLSPTKWSSVSSADSTEKSASGAGTRNLPFQFCLRQALRMKAAGILTLIGCLVTGAESKIYTRCKLAKIFSRAGLDNYWGFSLGNWICMAYYESGYNTTAQTVLDDGSIDYGIFQINSFAWCRRGKLKENNHCHVACSALITDDLTDAIICARKIVKETQGMNYWQGWKKHCEGRDLSEWKKGCEVS

SEQ ID NO: 47941 - protein, 106 aa, Homo sapiens
  Payload ID: 9700
  Gene Symbol: LYZL1
  Gene Name: lysozyme-like 1
  ENSP ID: ENSP00000434629
KIYTRCKLAKIFSRAGLDNYWGFSLGNWICMAYYESGYNTTAQTVLDDGSIDYGIFQINSFAWCRRGKLKENNHCHVACSALITDDLTDAIICARKIVKETQGMNY

SEQ ID NO: 47942 - protein, 194 aa, Homo sapiens
  Payload ID: 9701
  Gene Symbol: LYZL2
  Gene Name: lysozyme-like 2
  Uniprot ID: Q7Z4W2
  ENSP ID: ENSP00000364467
MQDAPLSCLSPTKWSSVSSADSTEKSASAAGTRNLPFQFCLRQALRMKAAGILTLIGCLVTGAESKIYTRCKLAKIFSRAGLDNYWGFSLGNWICMAYYESGYNTTAQTVLDDGSIDYGIFQINSFAWCRRGKLKENNHCHVACSALVTDDLTDAIICAKKIVKETQGMNYWQGWKKHCEGRDLSDWKKDCEVS

SEQ ID NO: 47943 - protein, 146 aa, Homo sapiens
  Payload ID: 9702
  Gene Symbol: LYZL4
  Gene Name: lysozyme-like 4
  Uniprot ID: Q96KX0
  ENSP ID: ENSP00000287748
MKASVVLSLLGYLVVPSGAYILGRCTVAKKLHDGGLDYFEGYSLENWVCLAYFESKFNPMAIYENTREGYTGFGLFQMRGSDWCGDHGRNRCHMSCSALLNPNLEKTIKCAKTIVKGKEGMGAWPTWSRYCQYSDTLARWLDGCKL

SEQ ID NO: 47944 - protein, 146 aa, Homo sapiens; identical to SEQ ID NO: 47943
  Payload ID: 9702
  Gene Symbol: LYZL4
  Gene Name: lysozyme-like 4
  Uniprot ID: Q96KX0
  ENSP ID: ENSP00000387897

SEQ ID NO: 47945 - protein, 86 aa, Homo sapiens
  Payload ID: 9703
  Gene Symbol: LYZL6
  Gene Name: lysozyme-like 6
  ENSP ID: ENSP00000481373
  MOD_RES (1)..(1): Any amino acid
XLEDLDGFEGYSLSDWLCLAFVESKFNISKINENADGSFDYGLFQINSHYWCNDYKSYSENLCHVDCQGIHCAKRIVSGARGMNNW

SEQ ID NO: 47946 - protein, 148 aa, Homo sapiens
  Payload ID: 9703
  Gene Symbol: LYZL6
  Gene Name: lysozyme-like 6
  Uniprot ID: O75951
  ENSP ID: ENSP00000482955
MTKALLIYLVSSFLALNQASLISRCDLAQVLQLEDLDGFEGYSLSDWLCLAFVESKFNISKINENADGSFDYGLFQINSHYWCNDYKSYSENLCHVDCQDLLNPNLLAGIHCAKRIVSGARGMNNWVEWRLHCSGRPLFYWLTGCRLR

SEQ ID NO: 47947 - protein, 148 aa, Homo sapiens; identical to SEQ ID NO: 47946
  Payload ID: 9703
  Gene Symbol: LYZL6
  Gene Name: lysozyme-like 6
  Uniprot ID: O75951
  ENSP ID: ENSP00000483358

SEQ ID NO: 47948 - protein, 148 aa, Homo sapiens; identical to SEQ ID NO: 47946
  Payload ID: 9703
  Gene Symbol: LYZL6
  Gene Name: lysozyme-like 6
  Uniprot ID: O75951
  ENSP ID: ENSP00000483897

SEQ ID NO: 47949 - protein, 86 aa, Homo sapiens; identical to SEQ ID NO: 47945
  Payload ID: 9703
  Gene Symbol: LYZL6
  Gene Name: lysozyme-like 6
  ENSP ID: ENSP00000487953
  MOD_RES (1)..(1): Any amino acid

SEQ ID NO: 47950 - protein, 148 aa, Homo sapiens; identical to SEQ ID NO: 47946
  Payload ID: 9703
  Gene Symbol: LYZL6
  Gene Name: lysozyme-like 6
  ENSP ID: ENSP00000488304

SEQ ID NO: 47951 - protein, 417 aa, Homo sapiens
  Payload ID: 9704
  Gene Symbol: LOX
  Gene Name: lysyl oxidase
  Uniprot ID: P28300
  ENSP ID: ENSP00000231004
MRFAWTVLLLGPLQLCALVHCAPPAAGQQQPPREPPAAPGAWRQQIQWENNGQVFSLLSLGSQYQPQRRRDPGAAVPGAANASAQQPRTPILLIRDNRTAAARTRTAGSSGVTAGRPRPTARHWFQAGYSTSRAREAGASRAENQTAPGEVPALSNLRPPSRVDGMVGDDPYNPYKYSDDNPYYNYYDTYERPRPGGRYRPGYGTGYFQYGLPDLVADPYYIQASTYVQKMSMYNLRCAAEENCLASTAYRADVRDYDHRVLLRFPQRVKNQGTSDFLPSRPRYSWEWHSCHQHYHSMDEFSHYDLLDANTQRRVAEGHKASFCLEDTSCDYGYHRRFACTAHTQGLSPGCYDTYGADIDCQWIDITDVKPGNYILKVSVNPSYLVPESDYTNNVVRCDIRYTGHHAYASGCTISPY

SEQ ID NO: 47952 - protein, 61 aa, Homo sapiens
  Payload ID: 9704
  Gene Symbol: LOX
  Gene Name: lysyl oxidase
  ENSP ID: ENSP00000427538
YNPYKYSDDNPYYNYYDTYERPRPGGRYRPGYGTGYFQYVQHTGQMSEIMITGCCSDFPKE

SEQ ID NO: 47953 - protein, 574 aa, Homo sapiens
  Payload ID: 9705
  Gene Symbol: LOXL1
  Gene Name: lysyl oxidase-like 1
  Uniprot ID: Q08397
  ENSP ID: ENSP00000261921
MALARGSRQLGALVWGACLCVLVHGQQAQPGQGSDPARWRQLIQWENNGQVYSLLNSGSEYVPAGPQRSESSSRVLLAGAPQAQQRRSHGSPRRRQAPSLPLPGRVGSDTVRGQARHPFGFGQVPDNWREVAVGDSTGMARARTSVSQQRHGGSASSVSASAFASTYRQQPSYPQQFPYPQAPFVSQYENYDPASRTYDQGFVYYRPAGGGVGAGAAAVASAGVIYPYQPRARYEEYGGGEELPEYPPQGFYPAPERPYVPPPPPPPDGLDRRYSHSLYSEGTPGFEQAYPDPGPEAAQAHGGDPRLGWYPPYANPPPEAYGPPRALEPPYLPVRSSDTPPPGGERNGAQQGRLSVGSVYRPNQNGRGLPDLVPDPNYVQASTYVQRAHLYSLRCAAEEKCLASTAYAPEATDYDVRVLLRFPQRVKNQGTADFLPNRPRHTWEWHSCHQHYHSMDEFSHYDLLDAATGKKVAEGHKASFCLEDSTCDFGNLKRYACTSHTQGLSPGCYDTYNADIDCQWIDITDVQPGNYILKVHVNPKYIVLESDFTNNVVRCNIHYTGRYVSATNCKIVQS

SEQ ID NO: 47954 - protein, 431 aa, Homo sapiens
  Payload ID: 9705
  Gene Symbol: LOXL1
  Gene Name: lysyl oxidase-like 1
  ENSP ID: ENSP00000457827
MALARGSRQLGALVWGACLCVLVHGQQAQPGQGSDPARWRQLIQWENNGQVYSLLNSGSEYVPAGPQRSESSSRVLLAGAPQAQQRRSHGSPRRRQAPSLPLPGRVGSDTVRGQARHPFGFGQVPDNWREVAVGDSTGMARARTSVSQQRHGGSASSVSASAFASTYRQQPSYPQQFPYPQAPFVSQYENYDPASRTYDQGFVYYRPAGGGVGAGAAAVASAGVIYPYQPRARYEEYGGGEELPEYPPQGFYPAPERPYVPPPPPPPDGLDRRYSHSLYSEGTPGFEQAYPDPGPEAAQAHGGDPRLGWYPPYANPPPEAYGPPRALEPPYLPVRSSDTPPPGGERNGAQQGRLSVGSVYRPNQNGRVTPAQTPACPGRKVEGQEQDGQAPGSGTSWGTRDHKDGGSLQTSPGRLTPGLAGERARASLRSP

SEQ ID NO: 47955 - protein, 774 aa, Homo sapiens
  Payload ID: 9706
  Gene Symbol: LOXL2
  Gene Name: lysyl oxidase-like 2
  Uniprot ID: Q9Y4K0
  ENSP ID: ENSP00000373783
MERPLCSHLCSCLAMLALLSPLSLAQYDSWPHYPEYFQQPAPEYHQPQAPANVAKIQLRLAGQKRKHSEGRVEVYYDGQWGTVCDDDFSIHAAHVVCRELGYVEAKSWTASSSYGKGEGPIWLDNLHCTGNEATLAACTSNGWGVTDCKHTEDVGVVCSDKRIPGFKFDNSLINQIENLNIQVEDIRIRAILSTYRKRTPVMEGYVEVKEGKTWKQICDKHWTAKNSRVVCGMFGFPGERTYNTKVYKMFASRRKQRYWPFSMDCTGTEAHISSCKLGPQVSLDPMKNVTCENGLPAVVSCVPGQVFSPDGPSRFRKAYKPEQPLVRLRGGAYIGEGRVEVLKNGEWGTVCDDKWDLVSASVVCRELGFGSAKEAVTGSRLGQGIGPIHLNEIQCTGNEKSIIDCKFNAESQGCNHEEDAGVRCNTPAMGLQKKLRLNGGRNPYEGRVEVLVERNGSLVWGMVCGQNWGIVEAMVVCRQLGLGFASNAFQETWYWHGDVNSNKVVMSGVKCSGTELSLAHCRHDGEDVACPQGGVQYGAGVACSETAPDLVLNAEMVQQTTYLEDRPMFMLQCAMEENCLSASAAQTDPTTGYRRLLRFSSQIHNNGQSDFRPKNGRHAWIWHDCHRHYHSMEVFTHYDLLNLNGTKVAEGHKASFCLEDTECEGDIQKNYECANFGDQGITMGCWDMYRHDIDCQWVDITDVPPGDYLFQVVINPNFEVAESDYSNNIMKCRSRYDGHRIWMYNCHIGGSFSEETEKKFEHFSGLLNNQLSPQ

SEQ ID NO: 47956 - protein, 67 aa, Homo sapiens
  Payload ID: 9706
  Gene Symbol: LOXL2
  Gene Name: lysyl oxidase-like 2
  ENSP ID: ENSP00000427826
RIRAILSTYRKRTPVMEGYVEVKEGKTWKQICDKHWTAKNSRVVCGMFGFPGERTYNTKVYNNPWCD

SEQ ID NO: 47957 - protein, 258 aa, Homo sapiens
  Payload ID: 9706
  Gene Symbol: LOXL2
  Gene Name: lysyl oxidase-like 2
  ENSP ID: ENSP00000427883
MEASKVLDKSKAAAIGDQSRPLCSRKGLSGGGSGGGPPWRARSQPGHCGSLKPKSSCCFCTPPVPPSCAGPLRGIISPKTGMERPLCSHLCSCLAMLALLSPLSLAQYDSWPHYPEYFQQPAPEYHQPQAPANVAKIQLRLAGQKRKHSEGRVEVYYDGQWGTVCDDDFSIHAAHVVCRELGYVEAKSWTASSSYGKGEGPIWLDNLHCTGNEATLAACTSNGWGVTDCKHTEDVGVVCSDKRIPGFKFDNSLINQIE

SEQ ID NO: 47958 - protein, 207 aa, Homo sapiens
  Payload ID: 9706
  Gene Symbol: LOXL2
  Gene Name: lysyl oxidase-like 2
  ENSP ID: ENSP00000427907
  MOD_RES (1)..(1): Any amino acid
XENGLPAVVSCVPGQVFSPDGPSRFRKAYKPEQDRVSLQQPLVRLRGGAYIGEGRVEVLKNGEWGTVCDDKWDLVSASVVCRELGFGSAKEAVTGSRLGQGIGPIHLNEIQCTGNEKSIIDCKFNAESQGCNHEEDAGVRCNTPAMGLQKKLRLNGGRNPYEGRVEVLVERNGSLVWGMVCGQNWGIVEAMVVCRQLGLGFASNAFQ

SEQ ID NO: 47959 - protein, 139 aa, Homo sapiens
  Payload ID: 9706
  Gene Symbol: LOXL2
  Gene Name: lysyl oxidase-like 2
  ENSP ID: ENSP00000428497
MERPLCSHLCSCLAMLALLSPLSLAQYDSWPHYPEYFQQPAPEYHQPQAPANVAKIQLRLAGQKRKHSEGRVEVYYDGQWGTVCDDDFSIHAAHVVCRELGYVEAKSWTASSSYGKGEGPIWLDNLHCTGNEATLAACT

SEQ ID NO: 47960 - protein, 95 aa, Homo sapiens
  Payload ID: 9706
  Gene Symbol: LOXL2
  Gene Name: lysyl oxidase-like 2
  ENSP ID: ENSP00000428933
MERPLCSHLCSCLAMLALLSPLSLAQYDSWPHYPEYFQQPAPEYHQPQAPANVAKIQLRLAGQKRKHSEGRVEVYYDGQWGTVCDDDFSIHAAHV

SEQ ID NO: 47961 - protein, 218 aa, Homo sapiens
  Payload ID: 9706
  Gene Symbol: LOXL2
  Gene Name: lysyl oxidase-like 2
  ENSP ID: ENSP00000429778
MEASKVLDKSKAAESSCCFCTPPVPPSCAGPLRGIISPKTGMERPLCSHLCSCLAMLALLSPLSLAQYDSWPHYPEYFQQPAPEYHQPQAPANVAKIQLRLAGQKRKHSEGRVEVYYDGQWGTVCDDDFSIHAAHVVCRELGYVEAKSWTASSSYGKGEGPIWLDNLHCTGNEATLAACTSNGWGVTDCKHTEDVGVVCSDKRIPGFKFDNSLINQIE

SEQ ID NO: 47962 - protein, 151 aa, Homo sapiens
  Payload ID: 9706
  Gene Symbol: LOXL2
  Gene Name: lysyl oxidase-like 2
  ENSP ID: ENSP00000430519
MERPLCSHLCSCLAMLALLSPLSLAQYDSWPHYPEYFQQPAPEYHQPQAPANVAKIQLRLAGQKRKHSEGRVEVYYDGQWGTVCDDDFSIHAAHVVCRELGYVEAKSWTASSSYGKGEGPIWLDNLHCTGNEATLAACTSNGWGVTDCKHT

SEQ ID NO: 47963 - protein, 101 aa, Homo sapiens
  Payload ID: 9706
  Gene Symbol: LOXL2
  Gene Name: lysyl oxidase-like 2
  ENSP ID: ENSP00000473322
MERPLCSHLCSCLAMLALLSPLSLAQYDSWPHYPEYFQQPAPEYHQPQAPANVAKIQLHLVLARRCQQQQSGHEWSEVLGNGAVPGALPPRRGGRGLPPGR

SEQ ID NO: 47964 - protein, 753 aa, Homo sapiens
  Payload ID: 9707
  Gene Symbol: LOXL3
  Gene Name: lysyl oxidase-like 3
  Uniprot ID: P58215
  ENSP ID: ENSP00000264094
MRPVSVWQWSPWGLLLCLLCSSCLGSPSPSTGPEKKAGSQGLRFRLAGFPRKPYEGRVEIQRAGEWGTICDDDFTLQAAHILCRELGFTEATGWTHSAKYGPGTGRIWLDNLSCSGTEQSVTECASRGWGNSDCTHDEDAGVICKDQRLPGFSDSNVIEVEHHLQVEEVRIRPAVGWGRRPLPVTEGLVEVRLPDGWSQVCDKGWSAHNSHVVCGMLGFPSEKRVNAAFYRLLAQRQQHSFGLHGVACVGTEAHLSLCSLEFYRANDTARCPGGGPAVVSCVPGPVYAASSGQKKQQQSKPQGEARVRLKGGAHPGEGRVEVLKASTWGTVCDRKWDLHAASVVCRELGFGSAREALSGARMGQGMGAIHLSEVRCSGQELSLWKCPHKNITAEDCSHSQDAGVRCNLPYTGAETRIRLSGGRSQHEGRVEVQIGGPGPLRWGLICGDDWGTLEAMVACRQLGLGYANHGLQETWYWDSGNITEVVMSGVRCTGTELSLDQCAHHGTHITCKRTGTRFTAGVICSETASDLLLHSALVQETAYIEDRPLHMLYCAAEENCLASSARSANWPYGHRRLLRFSSQIHNLGRADFRPKAGRHSWVWHECHGHYHSMDIFTHYDILTPNGTKVAEGHKASFCLEDTECQEDVSKRYECANFGEQGITVGCWDLYRHDIDCQWIDITDVKPGNYILQVVINPNFEVAESDFTNNAMKCNCKYDGHRIWVHNCHIGDAFSEEANRRFERYPGQTSNQII

SEQ ID NO: 47965 - protein, 608 aa, Homo sapiens
  Payload ID: 9707
  Gene Symbol: LOXL3
  Gene Name: lysyl oxidase-like 3
  Uniprot ID: P58215
  ENSP ID: ENSP00000377512
MRPVSVWQWSPWGLLLCLLCSSCLGSPSPSTGPEKKAGSQGLRFRLAGFPRKPYEGRVEIQRAGEWGTICDDDFTLQAAHILCRELGFTEATGWTHSAKYGPGTGRIWLDNLSCSGTEQSVTECASRGWGNSDCTHDEDAGVICKDQRLPGFSDSNVIEARVRLKGGAHPGEGRVEVLKASTWGTVCDRKWDLHAASVVCRELGFGSAREALSGARMGQGMGAIHLSEVRCSGQELSLWKCPHKNITAEDCSHSQDAGVRCNLPYTGAETRIRLSGGRSQHEGRVEVQIGGPGPLRWGLICGDDWGTLEAMVACRQLGLGYANHGLQETWYWDSGNITEVVMSGVRCTGTELSLDQCAHHGTHITCKRTGTRFTAGVICSETASDLLLHSALVQETAYIEDRPLHMLYCAAEENCLASSARSANWPYGHRRLLRFSSQIHNLGRADFRPKAGRHSWVWHECHGHYHSMDIFTHYDILTPNGTKVAEGHKASFCLEDTECQEDVSKRYECANFGEQGITVGCWDLYRHDIDCQWIDITDVKPGNYILQVVINPNFEVAESDFTNNAMKCNCKYDGHRIWVHNCHIGDAFSEEANRRFERYPGQTSNQII

SEQ ID NO: 47966 - protein, 586 aa, Homo sapiens
  Payload ID: 9707
  Gene Symbol: LOXL3
  Gene Name: lysyl oxidase-like 3
  ENSP ID: ENSP00000386545
MRPVSVWQWSPWGLLLCLLCSSCLGSPSPSTGPEKKAGSQGLRFRLAGFPRKPYEGRVEIQRAGEWGTICDDDFTLQAAHILCRELGFTEATGWTHSAKYGPGTGRIWLDNLSCSGTEQSVTECASRGWGNSDCTHDEDAGVICKDQRLPGFSDSNVIEARVRLKGGAHPGEGRVEVLKASTWGTVCDRKWDLHAASVVCRELGFGSAREALSGARMGQGMGAIHLSEVRCSGQELSLWKCPHKNITAEDCSHSQDAGVRCNLPYTGAETRIRLSGGRSQHEGRVEVQIGGPGPLRWGLICGDDWGTLEAMVACRQLGLGYANHGLQETWYWDSGNITEVVMSGVRCTGTELSLDQCAHHGTHITCKRTGTRFTAGVICSETASDLLLHSALVQETAYIEDRPLHMLYCAAEENCLASSARSANWPYGHRRLLRFSSQIHNLGRADFRPKAGRHSWVWHECHGHYHSMDIFTHYDILTPNGTKVAEGHKASFCLEDTECQEDVSKRYECANFGEQGITVGCWDLYRHDIDCQWIDITDVKPGNYILQVVINPNFEVAESDFTNNAMKCNCKYDGHRIWVHNCHIGI

SEQ ID NO: 47967 - protein, 697 aa, Homo sapiens
  Payload ID: 9707
  Gene Symbol: LOXL3
  Gene Name: lysyl oxidase-like 3
  ENSP ID: ENSP00000386696
MRPVSVWQWSPWGLLLCLLCSSCLGSPSPSTGPEKKAGSQGLRFRLAGFPRKPYEGRVEIQRAGEWGTICDDDFTLQAAHILCRELGFTEATGWTHSAKYGPGTGRIWLDNLSCSGTEQSVTECASRGWGNSDCTHDEDAGVICKDQRLPGFSDSNVIEVEHHLQVEEVRIRPAVGWGRRPLPVTEGLVEVRLPDGWSQVCDKGWSAHNSHVVCGMLGFPSEKRVNAAFYRLLAQRQQHSFGLHGVACVGTEAHLSLCSLEFYRANDTARCPGGGPAVVSCVPGPVYAASSGQKKQQQSKPQGEARVRLKGGAHPGEGRVEVLKASTWGTVCDRKWDLHAASVVCRELGFGSAREALSGARMGQGMGAIHLSEVRCSGQELSLWKCPHKNITAEDCSHSQDAGVRCNLPYTGAETRETWYWDSGNITEVVMSGVRCTGTELSLDQCAHHGTHITCKRTGTRFTAGVICSETASDLLLHSALVQETAYIEDRPLHMLYCAAEENCLASSARSANWPYGHRRLLRFSSQIHNLGRADFRPKAGRHSWVWHECHGHYHSMDIFTHYDILTPNGTKVAEGHKASFCLEDTECQEDVSKRYECANFGEQGITVGCWDLYRHDIDCQWIDITDVKPGNYILQVVINPNFEVAESDFTNNAMKCNCKYDGHRIWVHNCHIGDAFSEEANRRFERYPGQTSNQII

SEQ ID NO: 47968 - protein, 471 aa, Homo sapiens
  Payload ID: 9707
  Gene Symbol: LOXL3
  Gene Name: lysyl oxidase-like 3
  ENSP ID: ENSP00000387103
MRPVSVWQWSPWGLLLCLLCSSCLGSPSPSTGPEKKAGSQGLRFRLAGFPRKPYEGRVEIQRAGEWGTICDDDFTLQAAHILCRELGFTEATGWTHSAKYGPGTGRIWLDNLSCSGTEQSVTECASRGWGNSDCTHDEDAGVICKDQRLPGFSDSNVIEVEHHLQVEEVRIRPAVGWGRRPLPVTEGLVEVRLPDGWSQVCDKGWSAHNSHVVCGMLGFPSEKRVNAAFYRLLAQRQQHSFGLHGVACVGTEAHLSLCSLEFYRANDTARCPGGGPAVVSCVPGPVYAASSGQKKQQQSKPQGEARVRLKGGAHPGEGRVEVLKASTWGTVCDRKWDLHAASVVCRELGFGSAREALSGARMGQDVSKRYECANFGEQGITVGCWDLYRHDIDCQWIDITDVKPGNYILQVVINPNFEVAESDFTNNAMKCNCKYDGHRIWVHNCHIGDAFSEEANRRFERYPGQTSNQII

SEQ ID NO: 47969 - protein, 303 aa, Homo sapiens
  Payload ID: 9707
  Gene Symbol: LOXL3
  Gene Name: lysyl oxidase-like 3
  ENSP ID: ENSP00000398260
MRPVSVWQWSPWGLLLCLLCSSCLGSPSPSTGPEKKAGSQGLRFRLAGFPRKPYEGRVEIQRAGEWGTICDDDFTLQAAHILCRELGFTEATGWTHSAKYGPGTGRIWLDNLSCSGTEQSVTECASRGWGNSDCTHDEDAGVICKDQRLPGFSDSNVIEVEHHLQVEEVRIRPAVGWGRRPLPVTEGLVEVRLPDGWSQVCDKGWSAHNSHVVCGMLGFPSEKRVNAAFYRLLAQRQQHSFGLHGVACVGTEAHLSLCSLEFYRANDTARCPGGGPAVVSCVPGPVYAASSGQKKQQQSKPQG

SEQ ID NO: 47970 - protein, 180 aa, Homo sapiens
  Payload ID: 9707
  Gene Symbol: LOXL3
  Gene Name: lysyl oxidase-like 3
  ENSP ID: ENSP00000404026
  MOD_RES (1)..(1): Any amino acid
XRQRLERPQQPRGLRDAGLPQRKEGQRGLLQARVRLKGGAHPGEGRVEVLKASTWGTVCDRKWDLHAASVVCRELGFGSAREALSGARMGQGMGAIHLSEVRCSGQELSLWKCPHKNITAEDCSHSQDAGVRCNLPYTGAETRIRLSGGRSQHEGRVEVQIGGPGPLRWGLICGDDWGTL

SEQ ID NO: 47971 - protein, 756 aa, Homo sapiens
  Payload ID: 9708
  Gene Symbol: LOXL4
  Gene Name: lysyl oxidase-like 4
  Uniprot ID: Q96JB6
  ENSP ID: ENSP00000260702
MAWSPPATLFLFLLLLGQPPPSRPQSLGTTKLRLVGPESKPEEGRLEVLHQGQWGTVCDDNFAIQEATVACRQLGFEAALTWAHSAKYGQGEGPIWLDNVRCVGTESSLDQCGSNGWGVSDCSHSEDVGVICHPRRHRGYLSETVSNALGPQGRRLEEVRLKPILASAKQHSPVTEGAVEVKYEGHWRQVCDQGWTMNNSRVVCGMLGFPSEVPVDSHYYRKVWDLKMRDPKSRLKSLTNKNSFWIHQVTCLGTEPHMANCQVQVAPARGKLRPACPGGMHAVVSCVAGPHFRPPKTKPQRKGSWAEEPRVRLRSGAQVGEGRVEVLMNRQWGTVCDHRWNLISASVVCRQLGFGSAREALFGARLGQGLGPIHLSEVRCRGYERTLSDCPALEGSQNGCQHENDAAVRCNVPNMGFQNQVRLAGGRIPEEGLLEVQVEVNGVPRWGSVCSENWGLTEAMVACRQLGLGFAIHAYKETWFWSGTPRAQEVVMSGVRCSGTELALQQCQRHGPVHCSHGGGRFLAGVSCMDSAPDLVMNAQLVQETAYLEDRPLSQLYCAHEENCLSKSADHMDWPYGYRRLLRFSTQIYNLGRTDFRPKTGRDSWVWHQCHRHYHSIEVFTHYDLLTLNGSKVAEGHKASFCLEDTNCPTGLQRRYACANFGEQGVTVGCWDTYRHDIDCQWVDITDVGPGNYIFQVIVNPHYEVAESDFSNNMLQCRCKYDGHRVWLHNCHTGNSYPANAELSLEQEQRLRNNLI

SEQ ID NO: 47972 - protein, 597 aa, Homo sapiens
  Payload ID: 9709
  Gene Symbol: KARS
  Gene Name: lysyl-tRNA synthetase
  Uniprot ID: Q15046
  ENSP ID: ENSP00000303043
MAAVQAAEVKVDGSEPKLSKNELKRRLKAEKKVAEKEAKQKELSEKQLSQATAAATNHTTDNGVGPEEESVDPNQYYKIRSQAIHQLKVNGEDPYPHKFHVDISLTDFIQKYSHLQPGDHLTDITLKVAGRIHAKRASGGKLIFYDLRGEGVKLQVMANSRNYKSEEEFIHINNKLRRGDIIGVQGNPGKTKKGELSIIPYEITLLSPCLHMLPHLHFGLKDKETRYRQRYLDLILNDFVRQKFIIRSKIITYIRSFLDELGFLEIETPMMNIIPGGAVAKPFITYHNELDMNLYMRIAPELYHKMLVVGGIDRVYEIGRQFRNEGIDLTHNPEFTTCEFYMAYADYHDLMEITEKMVSGMVKHITGSYKVTYHPDGPEGQAYDVDFTPPFRRINMVEELEKALGMKLPETNLFETEETRKILDDICVAKAVECPPPRTTARLLDKLVGEFLEVTCINPTFICDHPQIMSPLAKWHRSKEGLTERFELFVMKKEICNAYTELNDPMRQRQLFEEQAKAKAAGDDEAMFIDENFCTALEYGLPPTAGWGMGIDRVAMFLTDSNNIKEVLLFPAMKPEDKKENVATTDTLESTTVGTSV

SEQ ID NO: 47973 - protein, 625 aa, Homo sapiens
  Payload ID: 9709
  Gene Symbol: KARS
  Gene Name: lysyl-tRNA synthetase
  Uniprot ID: Q15046
  ENSP ID: ENSP00000325448
MLTQAAVRLVRGSLRKTSWAEWGHRELRLGQLAPFTAPHKDKSFSDQRSELKRRLKAEKKVAEKEAKQKELSEKQLSQATAAATNHTTDNGVGPEEESVDPNQYYKIRSQAIHQLKVNGEDPYPHKFHVDISLTDFIQKYSHLQPGDHLTDITLKVAGRIHAKRASGGKLIFYDLRGEGVKLQVMANSRNYKSEEEFIHINNKLRRGDIIGVQGNPGKTKKGELSIIPYEITLLSPCLHMLPHLHFGLKDKETRYRQRYLDLILNDFVRQKFIIRSKIITYIRSFLDELGFLEIETPMMNIIPGGAVAKPFITYHNELDMNLYMRIAPELYHKMLVVGGIDRVYEIGRQFRNEGIDLTHNPEFTTCEFYMAYADYHDLMEITEKMVSGMVKHITGSYKVTYHPDGPEGQAYDVDFTPPFRRINMVEELEKALGMKLPETNLFETEETRKILDDICVAKAVECPPPRTTARLLDKLVGEFLEVTCINPTFICDHPQIMSPLAKWHRSKEGLTERFELFVMKKEICNAYTELNDPMRQRQLFEEQAKAKAAGDDEAMFIDENFCTALEYGLPPTAGWGMGIDRVAMFLTDSNNIKEVLLFPAMKPEDKKENVATTDTLESTTVGTSV

SEQ ID NO: 47974 - protein, 67 aa, Homo sapiens
  Payload ID: 9709
  Gene Symbol: KARS
  Gene Name: lysyl-tRNA synthetase
  ENSP ID: ENSP00000454512
MLTQAAVRLVRGSLRKTSWAEWGHRELRLGQLAPFTAPHKDKSFSDQRSTSVSCHETRRQEGECSNH

SEQ ID NO: 47975 - protein, 104 aa, Homo sapiens
  Payload ID: 9709
  Gene Symbol: KARS
  Gene Name: lysyl-tRNA synthetase
  ENSP ID: ENSP00000455488
IHINNKLRRGDIIGVQGNPGKTKKGELSIIPYEITLLSPCLHMLPHLHFGLKDKETRYRQRYLDLILNDFVRQKFIIRSKIITYIRSFLDELGFLEVRRVPCLT

SEQ ID NO: 47976 - protein, 124 aa, Homo sapiens
  Payload ID: 9709
  Gene Symbol: KARS
  Gene Name: lysyl-tRNA synthetase
  ENSP ID: ENSP00000455818
MLTQAAVRLVRGSLRKTSWAEWGHRELRLGQLAPFTAPHKDKSFSDQRSELKRRLKAEKKVAEKEAKQKELSEKQLSQATAAATNHTTDNGVGPEEESVDPNVGSMPKELLGESSSSMIFEERG

SEQ ID NO: 47977 - protein, 76 aa, Homo sapiens
  Payload ID: 9709
  Gene Symbol: KARS
  Gene Name: lysyl-tRNA synthetase
  ENSP ID: ENSP00000456185
MAAVQAAEVKVDGSEPKLSKNELKRRLKAEKKVAEKEAKQKELSEKQLSQATAAATNHTTDNGVGPEEESVDPNKL

SEQ ID NO: 47978 - protein, 86 aa, Homo sapiens
  Payload ID: 9709
  Gene Symbol: KARS
  Gene Name: lysyl-tRNA synthetase
  ENSP ID: ENSP00000456786
  MOD_RES (1)..(1): Any amino acid
XDGSEPKLSKNELKRRLKAEKKVAEKEAKQKELSEKQLSQATAAATNHTTDNGVGPEEESVDPNVGSMPKELLGESSSSMIFEERG

SEQ ID NO: 47979 - protein, 256 aa, Homo sapiens
  Payload ID: 9709
  Gene Symbol: KARS
  Gene Name: lysyl-tRNA synthetase
  ENSP ID: ENSP00000458028
MLTQAAVRLVRGSLRKTSWAEWGHRELRLGQLAPFTAPHKDKSFSDQRSELKRRLKAEKKVAEKEAKQKELSEKQLSQATAAATNHTTDNGVGPEEESVDPNQYYKIRSQAIHQLKVNGEDPYPHKFHVDISLTDFIQKYSHLQPGDHLTDITLKVAGRIHAKRASGGKLIFYDLRGEGVKLQVMANSRNYKSEEEFIHINNKLRRGDIIGVQGNPGKTKKGELSIIPYEITLLSPCLHMLPHLHFGLKDKETRYR

SEQ ID NO: 47980 - protein, 102 aa, Homo sapiens
  Payload ID: 9709
  Gene Symbol: KARS
  Gene Name: lysyl-tRNA synthetase
  ENSP ID: ENSP00000462057
MANSRNYKSEEEFIHINNKLRRGDIIGVQGNPGKTKKGELSIIPYEITLLSPCLHMLPHLHFGLKDKETRYRQRYLDLILNDFVRQKFIIRSKIITYIRSFL

SEQ ID NO: 47981 - protein, 522 aa, Homo sapiens
  Payload ID: 9710
  Gene Symbol: MB21D1
  Gene Name: Mab-21 domain containing 1
  Uniprot ID: Q8N884
  ENSP ID: ENSP00000359339
MQPWHGKAMQRASEAGATAPKASARNARGAPMDPTESPAAPEAALPKAGKFGPARKSGSRQKKSAPDTQERPPVRATGARAKKAPQRAQDTQPSDATSAPGAEGLEPPAAREPALSRAGSCRQRGARCSTKPRPPPGPWDVPSPGLPVSAPILVRRDAAPGASKLRAVLEKLKLSRDDISTAAGMVKGVVDHLLLRLKCDSAFRGVGLLNTGSYYEHVKISAPNEFDVMFKLEVPRIQLEEYSNTRAYYFVKFKRNPKENPLSQFLEGEILSASKMLSKFRKIIKEEINDIKDTDVIMKRKRGGSPAVTLLISEKISVDITLALESKSSWPASTQEGLRIQNWLSAKVRKQLRLKPFYLVPKHAKEGNGFQEETWRLSFSHIEKEILNNHGKSKTCCENKEEKCCRKDCLKLMKYLLEQLKERFKDKKHLDKFSSYHVKTAFFHVCTQNPQDSQWDRKDLGLCFDNCVTYFLQCLRTEKLENYFIPEFNLFSSNLIDKRSKEFLTKQIEYERNNEFPVFDEF

SEQ ID NO: 47982 - protein, 447 aa, Homo sapiens
  Payload ID: 9710
  Gene Symbol: MB21D1
  Gene Name: Mab-21 domain containing 1
  Uniprot ID: Q8N884
  ENSP ID: ENSP00000359342
MQPWHGKAMQRASEAGATAPKASARNARGAPMDPTESPAAPEAALPKAGKFGPARKSGSRQKKSAPDTQERPPVRATGARAKKAPQRAQDTQPSDATSAPGAEGLEPPAAREPALSRAGSCRQRGARCSTKPRPPPGPWDVPSPGLPVSAPILVRRDAAPGASKLRAVLEKLKLSRDDISTAAGMVKGVVDHLLLRLKCDSAFRGVGLLNTGSYYEHVKISAPNEFDVMFKLEVPRIQLEEYSNTRAYYFVKFKRNPKENPLSQFLEGEILSASKMLSKFRKIIKEEINDIKDTDVIMKRKRGGSPAVTLLISEKISVDITLALESKSSWPASTQEGLRIQNWLSAKVRKQLRLKPFYLVPKHAKEGNGFQEETWRLSFSHIEKEILNNHGKSKTCCENKEEKCCRKDCLKLMKYLLEQLKERFKDKKHLDKFSSYHVKTAFFHRLY

SEQ ID NO: 47983 - protein, 491 aa, Homo sapiens
  Payload ID: 9711
  Gene Symbol: MB21D2
  Gene Name: Mab-21 domain containing 2
  Uniprot ID: Q8IYB1
  ENSP ID: ENSP00000376246
MKMAAPTANKAASLGCNNKPAFPELDFRSGARVEELNKLIQEFTKHDQREYDDQRALEIHTAKDFIFSMLGMVQKLDQKLPVANEYLLLSGGVREGVVDLDLDELNVYARGTDYDMDFTLLVPALKLHDRNQPVTLDMRHSALCHSWLSLRLFDEGTISKWKDCCTIVDHINGATNYFFSPTKVADWFYDSISIVLSEIQKKPQRGMPKVEKVEKNGTIISIILGVGSSRMLYDIVPVVSFKGWPAVAQSWLMENHFWDGKITEEEVISGFYLVPACSYKGKKDNEWRLSFARSEVQLKKCISSSLMQAYQACKAIIIKLLSRPKAISPYHLRSMMLWACDRLPANYLAQEDYAAHFLLGLIDDLQHCLVNKMCPNYFIPQCNMLEHLSEETVMLHARKLSSVRSDPAEHLRTAIEHVKAANRLTLELQRRGSTTSIPSPQSDGGDPNQPDDRLAKKLQQLVTENPGKSISVFINPDDVTRPHFRIDDKFF

SEQ ID NO: 47984 - protein, 359 aa, Homo sapiens
  Payload ID: 9712
  Gene Symbol: MAB21L1
  Gene Name: mab-21-like 1 (C. elegans)
  Uniprot ID: Q13394
  ENSP ID: ENSP00000369251
MIAAQAKLVYHLNKYYNEKCQARKAAIAKTIREVCKVVSDVLKEVEVQEPRFISSLNEMDNRYEGLEVISPTEFEVVLYLNQMGVFNFVDDGSLPGCAVLKLSDGRKRSMSLWVEFITASGYLSARKIRSRFQTLVAQAVDKCSYRDVVKMVADTSEVKLRIRDRYVVQITPAFKCTGIWPRSAAHWPLPHIPWPGPNRVAEVKAEGFNLLSKECHSLAGKQSSAESDAWVLQFAEAENRLQMGGCRKKCLSILKTLRDRHLELPGQPLNNYHMKTLVSYECEKHPRESDWDESCLGDRLNGILLQLISCLQCRRCPHYFLPNLDLFQGKPHSALENAAKQTWRLAREILTNPKSLEKL

SEQ ID NO: 47985 - protein, 359 aa, Homo sapiens
  Payload ID: 9713
  Gene Symbol: MAB21L2
  Gene Name: mab-21-like 2 (C. elegans)
  Uniprot ID: Q9Y586
  ENSP ID: ENSP00000324701
MIAAQAKLVYQLNKYYTERCQARKAAIAKTIREVCKVVSDVLKEVEVQEPRFISSLSEIDARYEGLEVISPTEFEVVLYLNQMGVFNFVDDGSLPGCAVLKLSDGRKRSMSLWVEFITASGYLSARKIRSRFQTLVAQAVDKCSYRDVVKMIADTSEVKLRIRERYVVQITPAFKCTGIWPRSAAQWPMPHIPWPGPNRVAEVKAEGFNLLSKECYSLTGKQSSAESDAWVLQFGEAENRLLMGGCRNKCLSVLKTLRDRHLELPGQPLNNYHMKTLLLYECEKHPRETDWDESCLGDRLNGILLQLISCLQCRRCPHYFLPNLDLFQGKPHSALESAAKQTWRLAREILTNPKSLDKL

SEQ ID NO: 47986 - protein, 362 aa, Homo sapiens [sequence omitted]

SEQ ID NO: 47987 - protein, 325 aa, Homo sapiens
  Payload ID: 9715
  Gene Symbol: MACROD1
  Gene Name: MACRO domain containing 1
  Uniprot ID: Q9BQ69
  ENSP ID: ENSP00000255681
MSLQSRLSGRLAQLRAAGQLLVPPRPRPGHLAGATRTRSSTCGPPAFLGVFGRRARTSAGVGAWGAAAVGRTAGVRTWAPLAMAAKVDLSTSTDWKEAKSFLKGLSDKQREEHYFCKDFVRLKKIPTWKEMAKGVAVKVEEPRYKKDKQLNEKISLLRSDITKLEVDAIVNAANSSLLGGGGVDGCIHRAAGPLLTDECRTLQSCKTGKAKITGGYRLPAKYVIHTVGPIAYGEPSASQAAELRSCYLSSLDLLLEHRLRSVAFPCISTGVFGYPCEAAAEIVLATLREWLEQHKDKVDRLIICVFLEKDEDIYRSRLPHYFPVA

SEQ ID NO: 47988 - protein, 425 aa, Homo sapiens
  Payload ID: 9716
  Gene Symbol: MACROD2
  Gene Name: MACRO domain containing 2
  Uniprot ID: A1Z1Q3
  ENSP ID: ENSP00000217246
MYPSNKKKKVWREEKERLLKMTLEERRKEYLRDYIPLNSILSWKEEMKGKGQNDEENTQETSQVKKSLTEKVSLYRGDITLLEVDAIVNAANASLLGGGGVDGCIHRAAGPCLLAECRNLNGCDTGHAKITCGYDLPAKYVIHTVGPIARGHINGSHKEDLANCYKSSLKLVKENNIRSVAFPCISTGIYGFPNEPAAVIALNTIKEWLAKNHHEVDRIIFCVFLEVDFKIYKKKMNEFFSVDDNNEEEEDVEMKEDSDENGPEEKQSVEEMEEQSQDADGVNTVTVPGPASEEAVEDCKDEDFAKDENITKGGEVTDHSVRDQDHPDGQENDSTKNEIKIETESQSSYMETEELSSNQEDAVIVEQPEVIPLTEDQEEKEGEKAPGEDTPRMPGKSEGSSDLENTPGPDAGAQDEAKEQRNGTK

SEQ ID NO: 47989 - protein, 213 aa, Homo sapiens
  Payload ID: 9716
  Gene Symbol: MACROD2
  Gene Name: MACRO domain containing 2
  Uniprot ID: A1Z1Q3
  ENSP ID: ENSP00000367297
MNEFFSVDDNNEEEEDVEMKEDSDENGPEEKQSVEEMEEQSQDADGVNTVTVPGPASEEAVEDCKDEDFAKDENITKGGEVTDHSVRDQDHPDGQENDSTKNEIKIETESQSSYMETEELSSNQEDAVIVEQPEVIPLTEDQEEKEGEKAPGEDTPRMPGKSEGSSDLENTPGPDVEMNSQVDKVNDPTESQQEDQLIAGAQDEAKEQRNGTK

SEQ ID NO: 47990 - protein, 213 aa, Homo sapiens; identical to SEQ ID NO: 47989
  Payload ID: 9716
  Gene Symbol: MACROD2
  Gene Name: MACRO domain containing 2
  Uniprot ID: A1Z1Q3
  ENSP ID: ENSP00000385290

SEQ ID NO: 47991 - protein, 98 aa, Homo sapiens
  Payload ID: 9716
  Gene Symbol: MACROD2
  Gene Name: MACRO domain containing 2
  Uniprot ID: A1Z1Q3
  ENSP ID: ENSP00000385516
METEELSSNQEDAVIVEQPEVIPLTEDQEEKEGEKAPGEDTPRMPGKSEGSSDLENTPGPDVEMNSQVDKVNDPTESQQEDQLIGAQDEAKEQRNGTK

SEQ ID NO: 47992 - protein, 355 aa, Homo sapiens
  Payload ID: 9717
  Gene Symbol: MAEA
  Gene Name: macrophage erythroblast attacher
  Uniprot ID: Q7L5Y9
  ENSP ID: ENSP00000264750
MAVQESAAQLSMTLKVQEYPTLKVPYETLNKRFRAAQKNIDRETSHVTMVVAELEKTLSGCPAVDSVVSLLDGVVEKLSVLKRKAVESIQAEDESAKLCKRRIEHLKEHSSDQPAAASVWKRKRMDRMMVEHLLRCGYYNTAVKLARQSGIESCLEFSLRIQEFIELIRQNKRLDAVRHARKHFSQAEGSQLDEVRQAMGMLAFPPDTHISPYKDLLDPARWRMLIQQFRYDNYRLHQLGNNSVFTLTLQAGLSAIKTPQCYKEDGSSKSPDCPVCSRSLNKLAQPLPMAHCANSRLVCKISGDVMNENNPPMMLPNGYVYGYNSLLSIRQDDKVVCPRTKEVFHFSQAEKVYIM

SEQ ID NO: 47993 - protein, 396 aa, Homo sapiens
  Payload ID: 9717
  Gene Symbol: MAEA
  Gene Name: macrophage erythroblast attacher
  Uniprot ID: Q7L5Y9
  ENSP ID: ENSP00000302830
MAVQESAAQLSMTLKVQEYPTLKVPYETLNKRFRAAQKNIDRETSHVTMVVAELEKTLSGCPAVDSVVSLLDGVVEKLSVLKRKAVESIQAEDESAKLCKRRIEHLKEHSSDQPAAASVWKRKRMDRMMVEHLLRCGYYNTAVKLARQSGIEDLVNIEMFLTAKEVEESLERRETATCLAWCHDNKSRLRKMKSCLEFSLRIQEFIELIRQNKRLDAVRHARKHFSQAEGSQLDEVRQAMGMLAFPPDTHISPYKDLLDPARWRMLIQQFRYDNYRLHQLGNNSVFTLTLQAGLSAIKTPQCYKEDGSSKSPDCPVCSRSLNKLAQPLPMAHCANSRLVCKISGDVMNENNPPMMLPNGYVYGYNSLLSIRQDDKVVCPRTKEVFHFSQAEKVYIM

SEQ ID NO: 47994 - protein, 274 aa, Homo sapiens
  Payload ID: 9717
  Gene Symbol: MAEA
  Gene Name: macrophage erythroblast attacher
  ENSP ID: ENSP00000421644
MAVQESAAQLSMTLKVQEYPTLKVPYETLNKRFRAAQKNIDRETSHVTMVVAELEKTLSGCPAVDSVVSLLDGVVEKLSVLKRKAVESIQAEDESAKLCKRRIEHLKEHSSDQPAAASVWKRKRMDRMMVEHLLRCGYYNTAVKLARQSGIEDLVNIEMFLTAKEVEESLERRETATCLAWCHDNKSRLRKMKTCKKALQPSRREPAGRGAPGHGHAGLPARHAHLPVQGPSGPCTVADADPAVPVRQLPTTPAGKQFCVHPHPAGWPLSHQDT

SEQ ID NO: 47995 - protein, 434 aa, Homo sapiens
  Payload ID: 9717
  Gene Symbol: MAEA
  Gene Name: macrophage erythroblast attacher
  ENSP ID: ENSP00000422215
MAVQESAAQLSMTLKVQEYPTLKVPYETLNKRFRAAQKNIDRETSHVTMVVAELEKTLSGCPAVDSVVSLLDGVVEKLSVLKRKAVESIQAEDESAKLCKRRIEHLKEHSSDQPAAASVWKRKRMDRMMVEHLLRCGYYNTAVKLARQSGIEDLVNIEMFLTAKEVEESLERRETATCLAWCHDNKSRLRKMKGRQNKHEAKTGRKSRAASSSPKESLDLGMETLKGKPELSCLEFSLRIQEFIELIRQNKRLDAVRHARKHFSQAEGSQLDEVRQAMGMLAFPPDTHISPYKDLLDPARWRMLIQQFRYDNYRLHQLGNNSVFTLTLQAGLSAIKTPQCYKEDGSSKSPDCPVCSRSLNKLAQPLPMAHCANSRLVCKISGDVMNENNPPMMLPNGYVYGYNSLLSIRQDDKVVCPRTKEVFHFSQAEKVYIM

SEQ ID NO: 47996 - protein, 67 aa, Homo sapiens
  Payload ID: 9717
  Gene Symbol: MAEA
  Gene Name: macrophage erythroblast attacher
  ENSP ID: ENSP00000422235
MAVQESAAQLSMTLKVQEYPTLKNIPAWKPRCARPLHWPQKPHLSAEEPGCCLEWVSSTAWQHSHAS

SEQ ID NO: 47997 - protein, 107 aa, Homo sapiens
  Payload ID: 9717
  Gene Symbol: MAEA
  Gene Name: macrophage erythroblast attacher
  ENSP ID: ENSP00000423056
MAVQESAAQLSMTLKVQEYPTLKVPYETLNKRFRAAQKNIDRETSHVTMVVAELEKTLSGCPAVDSVVSLLDGVVEKLSVLKRKVGPAWRSLFSLGHGHPFCLENES

SEQ ID NO: 47998 - protein, 348 aa, Homo sapiens
  Payload ID: 9717
  Gene Symbol: MAEA
  Gene Name: macrophage erythroblast attacher
  ENSP ID: ENSP00000424436
MVVAELEKTLSGCPAVDSVVSLLDGVVEKLSVLKRKAVESIQAEDESAKLCKRRIEHLKEHSSDQPAAASVWKRKRMDRMMVEHLLRCGYYNTAVKLARQSGIEDLVNIEMFLTAKEVEESLERRETATCLAWCHDNKSRLRKMKSCLEFSLRIQEFIELIRQNKRLDAVRHARKHFSQAEGSQLDEVRQAMGMLAFPPDTHISPYKDLLDPARWRMLIQQFRYDNYRLHQLGNNSVFTLTLQAGLSAIKTPQCYKEDGSSKSPDCPVCSRSLNKLAQPLPMAHCANSRLVCKISGDVMNENNPPMMLPNGYVYGYNSLLSIRQDDKVVCPRTKEVFHFSQAEKVYIM

SEQ ID NO: 47999 - protein, 107 aa, Homo sapiens; identical to SEQ ID NO: 47997
  Payload ID: 9717
  Gene Symbol: MAEA
  Gene Name: macrophage erythroblast attacher
  ENSP ID: ENSP00000426326

SEQ ID NO: 48000 - protein, 395 aa, Homo sapiens
  Payload ID: 9717
  Gene Symbol: MAEA
  Gene Name: macrophage erythroblast attacher
  ENSP ID: ENSP00000426807
MWTLRATGREVGSSSCEDTVAPVPYETLNKRFRAAQKNIDRETSHVTMVVAELEKTLSGCPAVDSVVSLLDGVVEKLSVLKRKAVESIQAEDESAKLCKRRIEHLKEHSSDQPAAASVWKRKRMDRMMVEHLLRCGYYNTAVKLARQSGIEDLVNIEMFLTAKEVEESLERRETATCLAWCHDNKSRLRKMKSCLEFSLRIQEFIELIRQNKRLDAVRHARKHFSQAEGSQLDEVRQAMGMLAFPPDTHISPYKDLLDPARWRMLIQQFRYDNYRLHQLGNNSVFTLTLQAGLSAIKTPQCYKEDGSSKSPDCPVCSRSLNKLAQPLPMAHCANSRLVCKISGDVMNENNPPMMLPNGYVYGYNSLLSIRQDDKVVCPRTKEVFHFSQAEKVYIM

SEQ ID NO: 48001 - protein, 183 aa, Homo sapiens
  Payload ID: 9717
  Gene Symbol: MAEA
  Gene Name: macrophage erythroblast attacher
  ENSP ID: ENSP00000426903
MAVQESAAQLSMTLKVQEYPTLKVPYETLNKRFRAAQKNIDRETSHVTMVVAELEKTLSGCPAVDSVVSLLDGVVEKLSVLKRKDLVNIEMFLTAKEVEESLERRETATCLAWCHDNKSRLRKMKSCLEFSLRIQEFIELIRQNKRLDAVRHARKHFSQAEGSQLDEVRQAMGMLAFPPDTHI

SEQ ID NO: 48002 - protein, 245 aa, Homo sapiens
  Payload ID: 9717
  Gene Symbol: MAEA
  Gene Name: macrophage erythroblast attacher
  ENSP ID: ENSP00000426966
MAVQESAAQLSMTLKVQEYPTLKVPYETLNKRFRAAQKNIDRETSHVTMVVAELEKTLSGCPAVDSVVSLLDGVVEKLSVLKRKAVESIQAEDESAKLCKRRIEHLKEHSSDQPAAASVWKRKRMDRMMVEHLLRCGYYNTAVKLARQSGIETCKKALQPSRREPAGRGAPGHGHAGLPARHAHLPVQGPSGPCTVADADPAVPVRQLPTTPAGKQFCVHPHPAGWPLSHQDTTVLQGGRQLQEP

SEQ ID NO: 48003 - protein, 115 aa, Homo sapiens
  Payload ID: 9717
  Gene Symbol: MAEA
  Gene Name: macrophage erythroblast attacher
  ENSP ID: ENSP00000427460
MVVAELEKTLSGCPAVDSVVSLLDGVVEKLSVLKRKAVESIQAEDESAKLCKRRIEHLKEHSSDQPAAASVWKRKRMDRMMVEHLLRCGYYNTAVKLARQSGIEDLVNIEMFLTA

SEQ ID NO: 48004 - protein, 328 aa, Homo sapiens
  Payload ID: 9717
  Gene Symbol: MAEA
  Gene Name: macrophage erythroblast attacher
  ENSP ID: ENSP00000427512
MAVQESAAQLSMTLKVQEYPTLKVPYETLNKRFRAAQKNIDRETSHVTMVVAELEKTLSGCPAVDSVVSLLDGVVEKLSVLKRKAVESIQAEDESAKLCKRRIEHLKEHSSDQPAAASVWKRKRMDRMMVEHLLRCGYYNTAVKLARQSGIETCKKALQPSRREPAGRGAPGHGHAGLPARHAHLPVQGPSGPCTVADADPAVPVRQLPTTPAGKQFCVHPHPAGWPLSHQDTCYKEDGSSKSPDCPVCSRSLNKLAQPLPMAHCANSRLVCKISGDVMNENNPPMMLPNGYVYGYNSLLSIRQDDKVVCPRTKEVFHFSQAEKVYIM

SEQ ID NO: 48005 - protein, 716 aa, Homo sapiens
  Payload ID: 9718
  Gene Symbol: MPEG1
  Gene Name: macrophage expressed 1
  Uniprot ID: Q2M385
  ENSP ID: ENSP00000354335
MNNFRATILFWAAAAWAKSGKPSGEMDEVGVQKCKNALKLPVLEVLPGGGWDNLRNVDMGRVMELTYSNCRTTEDGQYIIPDEIFTIPQKQSNLEMNSEILESWANYQSSTSYSINTELSLFSKVNGKFSTEFQRMKTLQVKDQAITTRVQVRNLVYTVKINPTLELSSGFRKELLDISDRLENNQTRMATYLAELLVLNYGTHVTTSVDAGAALIQEDHLRASFLQDSQSSRSAVTASAGLAFQNTVNFKFEENYTSQNVLTKSYLSNRTNSRVQSIGGVPFYPGITLQAWQQGITNHLVAIDRSGLPLHFFINPNMLPDLPGPLVKKVSKTVETAVKRYYTFNTYPGCTDLNSPNFNFQANTDDGSCEGKMTNFSFGGVYQECTQLSGNRDVLLCQKLEQKNPLTGDFSCPSGYSPVHLLSQIHEEGYNHLECHRKCTLLVFCKTVCEDVFQVAKAEFRAFWCVASSQVPENSGLLFGGLFSSKSINPMTNAQSCPAGYFPLRLFENLKVCVSQDYELGSRFAVPFGGFFSCTVGNPLVDPAISRDLGAPSLKKCPGGFSQHPALISDGCQVSYCVKSGLFTGGSLPPARLPPFTRPPLMSQAATNTVIVTNSENARSWIKDSQTHQWRLGEPIELRRAMNVIHGDGGGLSGGAAAGVTVGVTTILAVVITLAIYGTRKFKKKAYQAIEERQSLVPGTAATGDTTYQEQGQSPA

SEQ ID NO: 48006 - protein, 115 aa, Homo sapiens
  Payload ID: 9719
  Gene Symbol: MIF
  Gene Name: macrophage migration inhibitory factor (glycosylation-inhibiting factor)
  Uniprot ID: P14174
  ENSP ID: ENSP00000215754
MPMFIVNTNVPRASVPDGFLSELTQQLAQATGKPPQYIAVHVVPDQLMAFGGSSEPCALCSLHSIGKIGGAQNRSYSKLLCGLLAERLRISPDRVYINYYDMNAANVGWNNSTFA

SEQ ID NO: 48007 - protein, 115 aa, Homo sapiens; identical to SEQ ID NO: 48006
  Payload ID: 9719
  Gene Symbol: MIF
  Gene Name: macrophage migration inhibitory factor (glycosylation-inhibiting factor)
  Uniprot ID: P14174
  ENSP ID: ENSP00000482779

SEQ ID NO: 48008 - protein, 520 aa, Homo sapiens
  Payload ID: 9720
  Gene Symbol: MARCO
  Gene Name: macrophage receptor with collagenous structure
  Uniprot ID: Q9UEW3
  ENSP ID: ENSP00000318916
MRNKKILKEDELLSETQQAAFHQIAMEPFEINVPKPKRRNGVNFSLAVVVIYLILLTAGAGLLVVQVLNLQARLRVLEMYFLNDTLAAEDSPSFSLLQSAHPGEHLAQGASRLQVLQAQLTWVRVSHEHLLQRVDNFTQNPGMFRIKGEQGAPGLQGHKGAMGMPGAPGPPGPPAEKGAKGAMGRDGATGPSGPQGPPGVKGEAGLQGPQGAPGKQGATGTPGPQGEKGSKGDGGLIGPKGETGTKGEKGDLGLPGSKGDRGMKGDAGVMGPPGAQGSKGDFGRPGPPGLAGFPGAKGDQGQPGLQGVPGPPGAVGHPGAKGEPGSAGSPGRAGLPGSPGSPGATGLKGSKGDTGLQGQQGRKGESGVPGPAGVKGEQGSPGLAGPKGAPGQAGQKGDQGVKGSSGEQGVKGEKGERGENSVSVRIVGSSNRGRAEVYYSGTWGTICDDEWQNSDAIVFCRMLGYSKGRALYKVGAGTGQIWLDNVQCRGTESTLWSCTKNSWGHHDCSHEEDAGVECSV

SEQ ID NO: 48009 - protein, 63 aa, Homo sapiens
  Payload ID: 9720
  Gene Symbol: MARCO
  Gene Name: macrophage receptor with collagenous structure
  ENSP ID: ENSP00000409192
MYFLNDTLAAEDSPSFSLLQSAHPGEHLAQGASRLQVLQAQLTWVRVSHEHLLQRVDNFTQNP

SEQ ID NO: 48010 - protein, 388 aa, Homo sapiens
  Payload ID: 9721
  Gene Symbol: MSR1
  Gene Name: macrophage scavenger receptor 1
  Uniprot ID: P21757
  ENSP ID: ENSP00000262100
MEQWDHFHNQQEDTDSCSESVKFDARSMTALLPPNPKNSPSLQEKLKSFKAALIALYLLVFAVLIPLIGIVAAQLLKWETKNCSVSSTNANDITQSLTGKGNDSEEEMRFQEVFMEHMSNMEKRIQHILDMEANLMDTEHFQNFSMTTDQRFNDILLQLSTLFSSVQGHGNAIDEISKSLISLNTTLLDLQLNIENLNGKIQENTFKQQEEISKLEERVYNVSAEIMAMKEEQVHLEQEIKGEVKVLNNITNDLRLKDWEHSQTLRNITLIQGPPGPPGEKGDRGPTGESGPRGFPGPIGPPGLKGDRGAIGFPGSRGLPGYAGRPGNSGPKGQKGEKGSGNTLSTGPIWLNEVFCFGRESSIEECKIRQWGTRACSHSEDAGVTCTL

SEQ ID NO: 48011 - protein, 451 aa, Homo sapiens
  Payload ID: 9721
  Gene Symbol: MSR1
  Gene Name: macrophage scavenger receptor 1
  Uniprot ID: P21757
  ENSP ID: ENSP00000262101
MEQWDHFHNQQEDTDSCSESVKFDARSMTALLPPNPKNSPSLQEKLKSFKAALIALYLLVFAVLIPLIGIVAAQLLKWETKNCSVSSTNANDITQSLTGKGNDSEEEMRFQEVFMEHMSNMEKRIQHILDMEANLMDTEHFQNFSMTTDQRFNDILLQLSTLFSSVQGHGNAIDEISKSLISLNTTLLDLQLNIENLNGKIQENTFKQQEEISKLEERVYNVSAEIMAMKEEQVHLEQEIKGEVKVLNNITNDLRLKDWEHSQTLRNITLIQGPPGPPGEKGDRGPTGESGPRGFPGPIGPPGLKGDRGAIGFPGSRGLPGYAGRPGNSGPKGQKGEKGSGNTLTPFTKVRLVGGSGPHEGRVEILHSGQWGTICDDRWEVRVGQVVCRSLGYPGVQAVHKAAHFGQGTGPIWLNEVFCFGRESSIEECKIRQWGTRACSHSEDAGVTCTL

SEQ ID NO: 48012 - protein, 388 aa, Homo sapiens; identical to SEQ ID NO: 48010
  Payload ID: 9721
  Gene Symbol: MSR1
  Gene Name: macrophage scavenger receptor 1
  Uniprot ID: P21757
  ENSP ID: ENSP00000347430

SEQ ID NO: 48013 - protein, 358 aa, Homo sapiens
  Payload ID: 9721
  Gene Symbol: MSR1
  Gene Name: macrophage scavenger receptor 1
  Uniprot ID: P21757
  ENSP ID: ENSP00000371428
MEQWDHFHNQQEDTDSCSESVKFDARSMTALLPPNPKNSPSLQEKLKSFKAALIALYLLVFAVLIPLIGIVAAQLLKWETKNCSVSSTNANDITQSLTGKGNDSEEEMRFQEVFMEHMSNMEKRIQHILDMEANLMDTEHFQNFSMTTDQRFNDILLQLSTLFSSVQGHGNAIDEISKSLISLNTTLLDLQLNIENLNGKIQENTFKQQEEISKLEERVYNVSAEIMAMKEEQVHLEQEIKGEVKVLNNITNDLRLKDWEHSQTLRNITLIQGPPGPPGEKGDRGPTGESGPRGFPGPIGPPGLKGDRGAIGFPGSRGLPGYAGRPGNSGPKGQKGEKGSGNTLRPVQLTDHIRAGPS

SEQ ID NO: 48014 - protein, 469 aa, Homo sapiens
  Payload ID: 9721
  Gene Symbol: MSR1
  Gene Name: macrophage scavenger receptor 1
  ENSP ID: ENSP00000405453
MCYLSAIISISLLNKKPSMEQWDHFHNQQEDTDSCSESVKFDARSMTALLPPNPKNSPSLQEKLKSFKAALIALYLLVFAVLIPLIGIVAAQLLKWETKNCSVSSTNANDITQSLTGKGNDSEEEMRFQEVFMEHMSNMEKRIQHILDMEANLMDTEHFQNFSMTTDQRFNDILLQLSTLFSSVQGHGNAIDEISKSLISLNTTLLDLQLNIENLNGKIQENTFKQQEEISKLEERVYNVSAEIMAMKEEQVHLEQEIKGEVKVLNNITNDLRLKDWEHSQTLRNITLIQGPPGPPGEKGDRGPTGESGPRGFPGPIGPPGLKGDRGAIGFPGSRGLPGYAGRPGNSGPKGQKGEKGSGNTLTPFTKVRLVGGSGPHEGRVEILHSGQWGTICDDRWEVRVGQVVCRSLGYPGVQAVHKAAHFGQGTGPIWLNEVFCFGRESSIEECKIRQWGTRACSHSEDAGVTCTL

SEQ ID NO: 48015 - protein, 64 aa, Homo sapiens
  Payload ID: 9721
  Gene Symbol: MSR1
  Gene Name: macrophage scavenger receptor 1
  ENSP ID: ENSP00000427905
MEQWDHFHNQQEDTDSCSESVKFDARSMTALLPPNPKNSPSLQEKLKSFKAALIALYLLVFAVL

SEQ ID NO: 48016 - protein, 37 aa, Homo sapiens
  Payload ID: 9721
  Gene Symbol: MSR1
  Gene Name: macrophage scavenger receptor 1
  ENSP ID: ENSP00000428865
MEQWDHFHNQQEDTDSCSESVKFDARSMTALLPPRNQ

SEQ ID NO: 48017 - protein, 58 aa, Homo sapiens
  Payload ID: 9721
  Gene Symbol: MSR1
  Gene Name: macrophage scavenger receptor 1
  ENSP ID: ENSP00000429498
MHLLQAGTSGSMEQWDHFHNQQEDTDSCSESVKFDARSMTALLPPNPKNSPSLQEKLK

SEQ ID NO: 48018 - protein, 149 aa, Homo sapiens
  Payload ID: 9721
  Gene Symbol: MSR1
  Gene Name: macrophage scavenger receptor 1
  ENSP ID: ENSP00000430536
EISKLEERVYNVSAEIMAMKEEQVHLEQEIKGEVKVLNNITNDLRLKDWEHSQTLRNITLIQGPPGPPGEKGDRGPTGESGPRGFPGPIGPPGLKGDRGAIGFPGSRGLPGYAGRPGNSGPKGQKGEKGSGNTLKSRNLTTRKVFAISK

SEQ ID NO: 48019 - protein, 195 aa, Homo sapiens
  Payload ID: 9722
  Gene Symbol: MST1
  Gene Name: macrophage stimulating 1
  ENSP ID: ENSP00000394756
  MOD_RES (1)..(1): Any amino acid
XAGPAFLRGVSSEGAVDTDCPAVLLLLNPQHGEPSLQRVPVAKMVCGPSGSQLVLLKLERSVTLNQRVALICLPPEWYVVPPGTKCEIAGWGETKGTGNDTVLNVALLNVISNQECNIKHRGRVRESEMCTEGLLAPVGACEGDYGGPLACFTHNCWVLEGIIIPNRVCARSRWPAVFTRVSVFVDWIHKVMRLG

SEQ ID NO: 48020 - protein, 725 aa, Homo sapiens
  Payload ID: 9722
  Gene Symbol: MST1
  Gene Name: macrophage stimulating 1
  ENSP ID: ENSP00000414287
MGLWWVTVQPPARRMGWLPLLLLLTQCLGVPGQRSPLNDFQVLRGTELQHLLHAVVPGPWQEDVADAEECAGRCGPLMDCRAFHYNVSSHGCQLLPWTQHSPHTRLRRSGRCDLFQKKDYVRTCIMNNGVGYRGTMATTVGGLPCQAWSHKFPNDHKYTPTLRNGLEENFCRNPDGDPGGPWCYTTDPAVRFQSCGIKSCREAACVWCNGEEYRGAVDRTESGRECQRWDLQHPHQHPFEPGKFLDQGLDDNYCRNPDGSERPWCYTTDPQIEREFCDLPRCGSEAQPRQEATTVSCFRGKGEGYRGTANTTTAGVPCQRWDAQIPHQHRFTPEKYACKDLRENFCRNPDGSEAPWCFTLRPGMRAAFCYQIRRCTDDVRPQDCYHGAGEQYRGTVSKTRKGVQCQRWSAETPHKPQFTFTSEPHAQLEENFCRNPDGDSHGPWCYTMDPRTPFDYCALRRCADDQPPSILDPPDQVQFEKCGKRVDRLDQRRSKLRVVGGHPGNSPWTVSLRNRQGQHFCGGSLVKEQWILTARQCFSSCHMPLTGYEVWLGTLFQNPQHGEPSLQRVPVAKMVCGPSGSQLVLLKLERSVTLNQRVALICLPPEWYVVPPGTKCEIAGWGETKGTGNDTVLNVALLNVISNQECNIKHRGRVRESEMCTEGLLAPVGACEGDYGGPLACFTHNCWVLEGIIIPNRVCARSRWPAVFTRVSVFVDWIHKVMRLG

SEQ ID NO: 48021 - protein, 1400 aa, Homo sapiens
  Payload ID: 9723
  Gene Symbol: MST1R
  Gene Name: macrophage stimulating 1 receptor
  Uniprot ID: Q04912
  ENSP ID: ENSP00000296474
MELLPPLPQSFLLLLLLPAKPAAGEDWQCPRTPYAASRDFDVKYVVPSFSAGGLVQAMVTYEGDRNESAVFVAIRNRLHVLGPDLKSVQSLATGPAGDPGCQTCAACGPGPHGPPGDTDTKVLVLDPALPALVSCGSSLQGRCFLHDLEPQGTAVHLAAPACLFSAHHNRPDDCPDCVASPLGTRVTVVEQGQASYFYVASSLDAAVAASFSPRSVSIRRLKADASGFAPGFVALSVLPKHLVSYSIEYVHSFHTGAFVYFLTVQPASVTDDPSALHTRLARLSATEPELGDYRELVLDCRFAPKRRRRGAPEGGQPYPVLRVAHSAPVGAQLATELSIAEGQEVLFGVFVTGKDGGPGVGPNSVVCAFPIDLLDTLIDEGVERCCESPVHPGLRRGLDFFQSPSFCPNPPGLEALSPNTSCRHFPLLVSSSFSRVDLFNGLLGPVQVTALYVTRLDNVTVAHMGTMDGRILQVELVRSLNYLLYVSNFSLGDSGQPVQRDVSRLGDHLLFASGDQVFQVPIQGPGCRHFLTCGRCLRAWHFMGCGWCGNMCGQQKECPGSWQQDHCPPKLTEFHPHSGPLRGSTRLTLCGSNFYLHPSGLVPEGTHQVTVGQSPCRPLPKDSSKLRPVPRKDFVEEFECELEPLGTQAVGPTNVSLTVTNMPPGKHFRVDGTSVLRGFSFMEPVLIAVQPLFGPRAGGTCLTLEGQSLSVGTSRAVLVNGTECLLARVSEGQLLCATPPGATVASVPLSLQVGGAQVPGSWTFQYREDPVVLSISPNCGYINSHITICGQHLTSAWHLVLSFHDGLRAVESRCERQLPEQQLCRLPEYVVRDPQGWVAGNLSARGDGAAGFTLPGFRFLPPPHPPSANLVPLKPEEHAIKFEYIGLGAVADCVGINVTVGGESCQHEFRGDMVVCPLPPSLQLGQDGAPLQVCVDGECHILGRVVRPGPDGVPQSTLLGILLPLLLLVAALATALVFSYWWRRKQLVLPPNLNDLASLDQTAGATPLPILYSGSDYRSGLALPAIDGLDSTTCVHGASFSDSEDESCVPLLRKESIQLRDLDSALLAEVKDVLIPHERVVTHSDRVIGKGHFGVVYHGEYIDQAQNRIQCAIKSLSRITEMQQVEAFLREGLLMRGLNHPNVLALIGIMLPPEGLPHVLLPYMCHGDLLQFIRSPQRNPTVKDLISFGLQVARGMEYLAEQKFVHRDLAARNCMLDESFTVKVADFGLARDILDREYYSVQQHRHARLPVKWMALESLQTYRFTTKSDVWSFGVLLWELLTRGAPPYRHIDPFDLTHFLAQGRRLPQPEYCPDSLYQVMQQCWEADPAVRPTFRVLVGEVEQIVSALLGDHYVQLPATYMNLGPSTSHEMNVRPEQPQFSPMPGNVRRPRPLSEPPRPT

SEQ ID NO: 48022 - protein, 1351 aa, Homo sapiens
  Payload ID: 9723
  Gene Symbol: MST1R
  Gene Name: macrophage stimulating 1 receptor
  Uniprot ID: Q04912
  ENSP ID: ENSP00000341325
MELLPPLPQSFLLLLLLPAKPAAGEDWQCPRTPYAASRDFDVKYVVPSFSAGGLVQAMVTYEGDRNESAVFVAIRNRLHVLGPDLKSVQSLATGPAGDPGCQTCAACGPGPHGPPGDTDTKVLVLDPALPALVSCGSSLQGRCFLHDLEPQGTAVHLAAPACLFSAHHNRPDDCPDCVASPLGTRVTVVEQGQASYFYVASSLDAAVAASFSPRSVSIRRLKADASGFAPGFVALSVLPKHLVSYSIEYVHSFHTGAFVYFLTVQPASVTDDPSALHTRLARLSATEPELGDYRELVLDCRFAPKRRRRGAPEGGQPYPVLRVAHSAPVGAQLATELSIAEGQEVLFGVFVTGKDGGPGVGPNSVVCAFPIDLLDTLIDEGVERCCESPVHPGLRRGLDFFQSPSFCPNPPGLEALSPNTSCRHFPLLVSSSFSRVDLFNGLLGPVQVTALYVTRLDNVTVAHMGTMDGRILQVELVRSLNYLLYVSNFSLGDSGQPVQRDVSRLGDHLLFASGDQVFQVPIQGPGCRHFLTCGRCLRAWHFMGCGWCGNMCGQQKECPGSWQQDHCPPKLTEFHPHSGPLRGSTRLTLCGSNFYLHPSGLVPEGTHQVTVGQSPCRPLPKDSSKLRPVPRKDFVEEFECELEPLGTQAVGPTNVSLTVTNMPPGKHFRVDGTSVLRGFSFMEPVLIAVQPLFGPRAGGTCLTLEGQSLSVGTSRAVLVNGTECLLARVSEGQLLCATPPGATVASVPLSLQVGGAQVPGSWTFQYREDPVVLSISPNCGYINSHITICGQHLTSAWHLVLSFHDGLRAVESRCERQLPEQQLCRLPEYVVRDPQGWVAGNLSARGDGAAGFTLPGFRFLPPPHPPSANLVPLKPEEHAIKFEVCVDGECHILGRVVRPGPDGVPQSTLLGILLPLLLLVAALATALVFSYWWRRKQLVLPPNLNDLASLDQTAGATPLPILYSGSDYRSGLALPAIDGLDSTTCVHGASFSDSEDESCVPLLRKESIQLRDLDSALLAEVKDVLIPHERVVTHSDRVIGKGHFGVVYHGEYIDQAQNRIQCAIKSLSRITEMQQVEAFLREGLLMRGLNHPNVLALIGIMLPPEGLPHVLLPYMCHGDLLQFIRSPQRNPTVKDLISFGLQVARGMEYLAEQKFVHRDLAARNCMLDESFTVKVADFGLARDILDREYYSVQQHRHARLPVKWMALESLQTYRFTTKSDVWSFGVLLWELLTRGAPPYRHIDPFDLTHFLAQGRRLPQPEYCPDSLYQVMQQCWEADPAVRPTFRVLVGEVEQIVSALLGDHYVQLPATYMNLGPSTSHEMNVRPEQPQFSPMPGNVRRPRPLSEPPRPT

SEQ ID NO: 48023 - protein, 285 aa, Homo sapiens
  Payload ID: 9723
  Gene Symbol: MST1R
  Gene Name: macrophage stimulating 1 receptor
  ENSP ID: ENSP00000393294
  MOD_RES (1)..(1): Any amino acid
XQSTLLGILLPLLLLVAALATALVFSYWWRRKQLVLPPNLNDLASLDQTAGATPLPILYSGSDYRSGLGHFGVVYHGEYIDQAQNRIQCAIKSLSRITEMQQVEAFLREGLLMRGLNHPNVLALIGIMLPPEGLPHVLLPYMCHGDLLQFIRSPQRNPTVKDLISFGLQVARGMEYLAEQKFVHRDLAARNCMLDESFTVKVADFGLARDILDREYYSVQQHRHARLPVKWMALESLQTYRFTTKSDVWSFGVLLWELLTRGAPPYRHIDPFDLTHFLAQGRRLP

SEQ ID NO: 48024 - protein, 1032 aa, Homo sapiens
  Payload ID: 9723
  Gene Symbol: MST1R
  Gene Name: macrophage stimulating 1 receptor
  ENSP ID: ENSP00000407926
MELLPPLPQSFLLLLLLPAKPAAGEDWQCPRTPYAASRDFDVKYVVPSFSAGGLVQAMVTYEGDRNESAVFVAIRNRLHVLGPDLKSVQSLATGPAGDPGCQTCAACGPGPHGPPGDTDTKVLVLDPALPALVSCGSSLQGRCFLHDLEPQGTAVHLAAPACLFSAHHNRPDDCPDCVASPLGTRVTVVEQGQASYFYVASSLDAAVAASFSPRSVSIRRLKADASGFAPGFVALSVLPKHLVSYSIEYVHSFHTGAFVYFLTVQPASVTDDPSALHTRLARLSATEPELGDYRELVLDCRFAPKRRRRGAPEGGQPYPVLRVAHSAPVGAQLATELSIAEGQEVLFGVFVTGKDGGPGVGPNSVVCAFPIDLLDTLIDEGVERCCESPVHPGLRRGLDFFQSPSFCPNPPGLEALSPNTSCRHFPLLVSSSFSRVDLFNGLLGPVQVTALYVTRLDNVTVAHMGTMDGRILQVELVRSLNYLLYVSNFSLGDSGQPVQRDVSRLGDHLLFASGDQVFQVPIQGPGCRHFLTCGRCLRAWHFMGCGWCGNMCGQQKECPGSWQQDHCPPKLTEFHPHSGPLRGSTRLTLCGSNFYLHPSGLVPEGTHQVTVGQSPCRPLPKDSSKLRPVPRKDFVEEFECELEPLGTQAVGPTNVSLTVTNMPPGKHFRVDGTSVLRGFSFMEPVLIAVQPLFGPRAGGTCLTLEGQSLSVGTSRAVLVNGTECLLARVSEGQLLCATPPGATVASVPLSLQVGGAQVPGSWTFQYREDPVVLSISPNCGYINSHITICGQHLTSAWHLVLSFHDGLRAVESRCERQLPEQQLCRLPEYVVRDPQGWVAGNLSARGDGAAGFTLPGFRFLPPPHPPSANLVPLKPEEHAIKFEYIGLGAVADCVGINVTVGGESCQHEFRGDMVVCPLPPSLQLGQDGAPLQVCVDGECHILGRVVRPGPDGVPQSTLLGILLPLLLLVAALATALVFSYWWRRKQLAPHSLSPQHSLPLMVWIPPLVSMEHPSPIVKMNPVCHCCGKSPSS

SEQ ID NO: 48025 - protein, 270 aa, Homo sapiens
  Payload ID: 9723
  Gene Symbol: MST1R
  Gene Name: macrophage stimulating 1 receptor
  ENSP ID: ENSP00000414792
  MOD_RES (1)..(1): Any amino acid
XINVTVGGESCQHEFRGDMVVCPLPPSLQLGQDGAPLQVCVDALPAIDGLDSTTCVHGASFSDSEDESCVPLLRKESIQLRDLDSALLAEVKDVLIPHERVVTHSDRVIGKGHFGVVYHGEYIDQAQNRIQCAIKSLSRITEMQQVEAFLREGLLMRGLNHPNVLALIGIMLPPEGLPHVLLPYMCHGDLLQFIRSPQRNPTVKDLISFGLQVARGMEYLAEQKFVHRDLAARNCMLDESFTVKVADFGLARDILDREYYSVQQHRHARL

SEQ ID NO: 48026 - protein, 254 aa, Homo sapiens
  Payload ID: 9723
  Gene Symbol: MST1R
  Gene Name: macrophage stimulating 1 receptor
  ENSP ID: ENSP00000481084
MELLPPLPQSFLLLLPYMCHGDLLQFIRSPQRNPTVKDLISFGLQVARGMEYLAEQKFVHRDLAARNCMLDESFTVKVADFGLARDILDREYYSVQQHRHARLPVKWMALESLQTYRFTTKSDVWSFGVLLWELLTRGAPPYRHIDPFDLTHFLAQGRRLPQPEYCPDSLYQVMQQCWEADPAVRPTFRVLVGEVEQIVSALLGDHYVQLPATYMNLGPSTSHEMNVRPEQPQFSPMPGNVRRPRPLSEPPRPT

SEQ ID NO: 48027 - protein, 1294 aa, Homo sapiens
  Payload ID: 9723
  Gene Symbol: MST1R
  Gene Name: macrophage stimulating 1 receptor
  ENSP ID: ENSP00000482642
MELLPPLPQSFLLLLLLPAKPAAGEDWQCPRTPYAASRDFDVKYVVPSFSAGGLVQAMVTYEGDRNESAVFVAIRNRLHVLGPDLKSVQSLATGPAGDPGCQTCAACGPGPHGPPGDTDTKVLVLDPALPALVSCGSSLQGRCFLHDLEPQGTAVHLAAPACLFSAHHNRPDDCPDCVASPLGTRVTVVEQGQASYFYVASSLDAAVAASFSPRSVSIRRLKADASGFAPGFVALSVLPKHLVSYSIEYVHSFHTGAFVYFLTVQPASVTDDPSALHTRLARLSATEPELGDYRELVLDCRFAPKRRRRGAPEGGQPYPVLRVAHSAPVGAQLATELSIAEGQEVLFGVFVTGKDGGPGVGPNSVVCAFPIDLLDTLIDEGVERCCESPVHPGLRRGLDFFQSPSFCPNPVFQVPIQGPGCRHFLTCGRCLRAWHFMGCGWCGNMCGQQKECPGSWQQDHCPPKLTEFHPHSGPLRGSTRLTLCGSNFYLHPSGLVPEGTHQVTVGQSPCRPLPKDSSKLRPVPRKDFVEEFECELEPLGTQAVGPTNVSLTVTNMPPGKHFRVDGTSVLRGFSFMEPVLIAVQPLFGPRAGGTCLTLEGQSLSVGTSRAVLVNGTECLLARVSEGQLLCATPPGATVASVPLSLQVGGAQVPGSWTFQYREDPVVLSISPNCGYINSHITICGQHLTSAWHLVLSFHDGLRAVESRCERQLPEQQLCRLPEYVVRDPQGWVAGNLSARGDGAAGFTLPGFRFLPPPHPPSANLVPLKPEEHAIKFEYIGLGAVADCVGINVTVGGESCQHEFRGDMVVCPLPPSLQLGQDGAPLQVCVDGECHILGRVVRPGPDGVPQSTLLGILLPLLLLVAALATALVFSYWWRRKQLVLPPNLNDLASLDQTAGATPLPILYSGSDYRSGLALPAIDGLDSTTCVHGASFSDSEDESCVPLLRKESIQLRDLDSALLAEVKDVLIPHERVVTHSDRVIGKGHFGVVYHGEYIDQAQNRIQCAIKSLSRITEMQQVEAFLREGLLMRGLNHPNVLALIGIMLPPEGLPHVLLPYMCHGDLLQFIRSPQRNPTVKDLISFGLQVARGMEYLAEQKFVHRDLAARNCMLDESFTVKVADFGLARDILDREYYSVQQHRHARLPVKWMALESLQTYRFTTKSDVWSFGVLLWELLTRGAPPYRHIDPFDLTHFLAQGRRLPQPEYCPDSLYQVMQQCWEADPAVRPTFRVLVGEVEQIVSALLGDHYVQLPATYMNLGPSTSHEMNVRPEQPQFSPMPGNVRRPRPLSEPPRPT

SEQ ID NO: 48028 - protein, 574 aa, Homo sapiens
  Payload ID: 9723
  Gene Symbol: MST1R
  Gene Name: macrophage stimulating 1 receptor
  ENSP ID: ENSP00000482827
MELLPPLPQSFLLLLLLPAKPAAGEDWQCPRTPYAASRDFDVKYVVPSFSAGGLVQAMVTYEGDRNESAVFVAIRNRLHVLGPDLKSVQSLATGPAGDPGCQTCAACGPGPHGPPGDTDTKVLVLDPALPALVSCGSSLQGRCFLHDLEPQGTAVHLAAPACLFSAHHNRPDDCPDCVASPLGTRVTVVEQGQASYFYVASSLDAAVAASFSPRSVSIRRLKADASGFAPGFVALSVLPLLLLVAALATALVFSYWWRRKQLVLPPNLNDLASLDQTAGATPLPILYSGSDYRSGLALPAIDGLDSTTCVHGASFSDSEDESCVPLLRKESIQLRDLDSALLAEVKDVLIPHERVVTHSDRVIGKGHFGVVYHGEYIDQAQNRIQCAIKSLSRITEMQQVEAFLREGLLMRGLNHPNVLALIGIMLPPEGLPHVLLPYMCHGDLLQFIRSPQRNPTVKDLISFGLQVARGMEYLAEQKFVHRDLAARNCMYQVMQQCWEADPAVRPTFRVLVGEVEQIVSALLGDHYVQLPATYMNLGPSTSHEMNVRPEQPQFSPMPGNVRRPRPLSEPPRPT

SEQ ID NO: 48029 - protein, 718 aa, Homo sapiens
  Payload ID: 9724
  Gene Symbol: MAD1L1
  Gene Name: MAD1 mitotic arrest deficient-like 1 (yeast)
  Uniprot ID: Q9Y6D9
  ENSP ID: ENSP00000265854
MEDLGENTMVLSTLRSLNNFISQRVEGGSGLDISTSAPGSLQMQYQQSMQLEERAEQIRSKSHLIQVEREKMQMELSHKRARVELERAASTSARNYEREVDRNQELLTRIRQLQEREAGAEEKMQEQLERNRQCQQNLDAASKRLREKEDSLAQAGETINALKGRISELQWSVMDQEMRVKRLESEKQELQEQLDLQHKKCQEANQKIQELQASQEARADHEQQIKDLEQKLSLQEQDAAIVKNMKSELVRLPRLERELKQLREESAHLREMRETNGLLQEELEGLQRKLGRQEKMQETLVGLELENERLLAKLQSWERLDQTMGLSIRTPEDLSRFVVELQQRELALKDKNSAVTSSARGLEKARQQLQEELRQVSGQLLEERKKRETHEALARRLQKRVLLLTKERDGMRAILGSYDSELTPAEYSPQLTRRMREAEDMVQKVHSHSAEMEAQLSQALEELGGQKQRADMLEMELKMLKSQSSSAEQSFLFSREEADTLRLKVEELEGERSRLEEEKRMLEAQLERRALQGDYDQSRTKVLHMSLNPTSVARQRLREDHSQLQAECERLRGLLRAMERGGTVPADLEAAAASLPSSKEVAELKKQVESAELKNQRLKEVFQTKIQEFRKACYTLTGYQIDITTENQYRLTSLYAEHPGDCLIFKATSPSGSKMQLLETEFSHTVGELIEVHLRRQDSIPAFLSSLTLELFSRQTVA

SEQ ID NO: 48030 - protein, 718 aa, Homo sapiens; identical to SEQ ID NO: 48029
  Payload ID: 9724
  Gene Symbol: MAD1L1
  Gene Name: MAD1 mitotic arrest deficient-like 1 (yeast)
  Uniprot ID: Q9Y6D9
  ENSP ID: ENSP00000382562

SEQ ID NO: 48031 - protein, 626 aa, Homo sapiens
  Payload ID: 9724
  Gene Symbol: MAD1L1
  Gene Name: MAD1 mitotic arrest deficient-like 1 (yeast)
  Uniprot ID: Q9Y6D9
  ENSP ID: ENSP00000384155
MLPARGCVRKRTVWPRLARVLIVTLLTLELSYAPLPCQLSGVPYNTGDPVGRWARPCIWPCPWHTTINALKGRISELQWSVMDQEMRVKRLESEKQELQEQLDLQHKKCQEANQKIQELQASQEARADHEQQIKDLEQKLSLQEQDAAIVKNMKSELVRLPRLERELKQLREESAHLREMRETNGLLQEELEGLQRKLGRQEKMQETLVGLELENERLLAKLQSWERLDQTMGLSIRTPEDLSRFVVELQQRELALKDKNSAVTSSARGLEKARQQLQEELRQVSGQLLEERKKRETHEALARRLQKRVLLLTKERDGMRAILGSYDSELTPAEYSPQLTRRMREAEDMVQKVHSHSAEMEAQLSQALEELGGQKQRADMLEMELKMLKSQSSSAEQSFLFSREEADTLRLKVEELEGERSRLEEEKRMLEAQLERRALQGDYDQSRTKVLHMSLNPTSVARQRLREDHSQLQAECERLRGLLRAMERGGTVPADLEAAAASLPSSKEVAELKKQVESAELKNQRLKEVFQTKIQEFRKACYTLTGYQIDITTENQYRLTSLYAEHPGDCLIFKATSPSGSKMQLLETEFSHTVGELIEVHLRRQDSIPAFLSSLTLELFSRQTVA

SEQ ID NO: 48032 - protein, 718 aa, Homo sapiens; identical to SEQ ID NO: 48029
  Payload ID: 9724
  Gene Symbol: MAD1L1
  Gene Name: MAD1 mitotic arrest deficient-like 1 (yeast)
  Uniprot ID: Q9Y6D9
  ENSP ID: ENSP00000385334

SEQ ID NO: 48033 - protein, 144 aa, Homo sapiens
  Payload ID: 9724
  Gene Symbol: MAD1L1
  Gene Name: MAD1 mitotic arrest deficient-like 1 (yeast)
  ENSP ID: ENSP00000390099
MEDLGENTMVLSTLRSLNNFISQRVEGGSGLDISTSAPGSLQMQYQQSMQREVDRNQELLTRIRQLQEREAGAEEKMQEQLERNRQCQQNLDAASKRLREKEDSLAQAGETINALKGRISELQWSVMDQEMRVKRLESEKQELQ

SEQ ID NO: 48034 - protein, 80 aa, Homo sapiens
  Payload ID: 9724
  Gene Symbol: MAD1L1
  Gene Name: MAD1 mitotic arrest deficient-like 1 (yeast)
  ENSP ID: ENSP00000393037
MRAILGSYDSELTPAEYSPQLTRRMREAEDMVQKVHSHSAEMEAQLSQALEELGGQKQRADMLEMELKMLKSQSSSAEQS

SEQ ID NO: 48035 - protein, 122 aa, Homo sapiens
  Payload ID: 9724
  Gene Symbol: MAD1L1
  Gene Name: MAD1 mitotic arrest deficient-like 1 (yeast)
  ENSP ID: ENSP00000394069
MSLNPTSVARQRLREDHSQLQAECERLRGLLRAMERGGTVPADLEAAAASLPSSKEVAELKKQVESAELKNQRLKEVFQTKIQEFRKACYTLTGYQIDITTENQYRLTSLYAEHPGDCLIFK

SEQ ID NO: 48036 - protein, 266 aa, Homo sapiens
  Payload ID: 9724
  Gene Symbol: MAD1L1
  Gene Name: MAD1 mitotic arrest deficient-like 1 (yeast)
  ENSP ID: ENSP00000394886
MRELEFAKLECCLAWQLQASRRELEMELKMLKSQSSSAEQSFLFSREEADTLRLKVEELEGERSRLEEEKRMLEAQLERRALQGDYDQSRTKVLHMSLNPTSVARQRLREDHSQLQAECERLRGLLRAMERGGTVPADLEAAAASLPSSKEVAELKKQVESAELKNQRLKEVFQTKIQEFRKACYTLTGYQIDITTENQYRLTSLYAEHPGDCLIFKATSPSGSKMQLLETEFSHTVGELIEVHLRRQDSIPAFLSSLTLELFSRQ

SEQ ID NO: 48037 - protein, 157 aa, Homo sapiens
  Payload ID: 9724
  Gene Symbol: MAD1L1
  Gene Name: MAD1 mitotic arrest deficient-like 1 (yeast)
  ENSP ID: ENSP00000395457
MEDLGENTMVLSTLRSLNNFISQRVEGGSGLDISTSAPGSLQMQYQQSMQLEERAEQIRSKSHLIQVEREKMQMELSHKRARVELERAASTSARNYEREVDRNQELLTRIRQLQEREAGAEEKMQEQLERNRQCQQNLDAASKRLREKEDSLAQAGE

SEQ ID NO: 48038 - protein, 41 aa, Homo sapiens
  Payload ID: 9724
  Gene Symbol: MAD1L1
  Gene Name: MAD1 mitotic arrest deficient-like 1 (yeast)
  ENSP ID: ENSP00000397417
MRAILGSYDSELTPAEYSPQLTRRMREAEDMVQKVHSHSAE

SEQ ID NO: 48039 - protein, 205 aa, Homo sapiens
  Payload ID: 9724
  Gene Symbol: MAD1L1
  Gene Name: MAD1 mitotic arrest deficient-like 1 (yeast)
  ENSP ID: ENSP00000401901
MQEQLERNRQCQQNLDAASKRLREKEDSLAQAGETINALKGRISELQWSVMDQEMRVKRLESEKQELQEQLDLQHKKCQEANQKIQELQASQEARADHEQQIKDLEQKLSLQEQDAAIVKNMKSELVRLPRLERELKQLREESAHLREMRETNGLLQEELEGLQRKLGRQEKMQETLVGLELENERLLAKLQSWERLDQTMGLSI

SEQ ID NO: 48040 - protein, 213 aa, Homo sapiens
  Payload ID: 9724
  Gene Symbol: MAD1L1
  Gene Name: MAD1 mitotic arrest deficient-like 1 (yeast)
  ENSP ID: ENSP00000413139
MQMELSHKRARVELERAASTSARNYEREVDRNQELLTRIRQLQEREAGAEEKMQEQLERNRQCQQNLDAASKRLREKEDSLAQAGETINALKGRISELQWSVMDQEMRVKRLESEKQELQEQLDLQHKKCQEANQKIQELQASQEARADHEQQIKDLEQKLSLQEQDAAIVKNMKSELVRLPRLERELKQLREESAHLREMRETNGLLQEELE

SEQ ID NO: 48041 - protein, 199 aa, Homo sapiens
  Payload ID: 9724
  Gene Symbol: MAD1L1
  Gene Name: MAD1 mitotic arrest deficient-like 1 (yeast)
  ENSP ID: ENSP00000414877
MVSLRPCLPGLPTQHLEEPCPGDYSARGLEKARQQLQEELRQVSGQLLEERKKRETHEALARRLQKRVLLLTKERDGMRAILGSYDSELTPAEYSPQLTRRMREAEDMVQKVHSHSAEMEAQLSQALEELGGQKQRADMLEMELKMLKSQSSSAEQSFLFSREEADTLRLKVEELEGERSRLEEEKRMLEAQLERRALQ

SEQ ID NO: 48042 - protein, 205 aa, Homo sapiens
  Payload ID: 9725
  Gene Symbol: MAD2L1
  Gene Name: MAD2 mitotic arrest deficient-like 1 (yeast)
  Uniprot ID: Q13257
  ENSP ID: ENSP00000296509
MALQLSREQGITLRGSAEIVAEFFSFGINSILYQRGIYPSETFTRVQKYGLTLLVTTDLELIKYLNNVVEQLKDWLYKCSVQKLVVVISNIESGEVLERWQFDIECDKTAKDDSAPREKSQKAIQDEIRSVIRQITATVTFLPLLEVSCSFDLLIYTDKDLVVPEKWEESGPQFITNSEEVRLRSFTTTIHKVNSMVAYKIPVND

SEQ ID NO: 48043 - protein, 90 aa, Homo sapiens
  Payload ID: 9725
  Gene Symbol: MAD2L1
  Gene Name: MAD2 mitotic arrest deficient-like 1 (yeast)
  Uniprot ID: Q13257
  ENSP ID: ENSP00000332295
MALQLSREQGITLRGSAEIVAEFFSFGINSILYQRGIYPSETFTRVQKYGLTLLVTTDLELIKYLNNVVEQLKVHPEKSLRKLSRMKSVQ

SEQ ID NO: 48044 - protein, 41 aa, Homo sapiens
  Payload ID: 9725
  Gene Symbol: MAD2L1
  Gene Name: MAD2 mitotic arrest deficient-like 1 (yeast)
  ENSP ID: ENSP00000425702
MALQLSREQGITLRGSAEIVAEFFLHPEKSLRKLSRMKSVQ

SEQ ID NO: 48045 - protein, 211 aa, Homo sapiens
  Payload ID: 9726
  Gene Symbol: MAD2L2
  Gene Name: MAD2 mitotic arrest deficient-like 2 (yeast)
  Uniprot ID: Q9UI95
  ENSP ID: ENSP00000235310
MTTLTRQDLNFGQVVADVLCEFLEVAVHLILYVREVYPVGIFQKRKKYNVPVQMSCHPELNQYIQDTLHCVKPLLEKNDVEKVVVVILDKEHRPVEKFVFEITQPPLLSISSDSLLSHVEQLLRAFILKISVCDAVLDHNPPGCTFTVLVHTREAATRNMEKIQVIKDFPWILADEQDVHMHDPRLIPLKTMTSDILKMQLYVEERAHKGS

SEQ ID NO: 48046 - protein, 211 aa, Homo sapiens; identical to SEQ ID NO: 48045
  Payload ID: 9726
  Gene Symbol: MAD2L2
  Gene Name: MAD2 mitotic arrest deficient-like 2 (yeast)
  Uniprot ID: Q9UI95
  ENSP ID: ENSP00000365855

SEQ ID NO: 48047 - protein, 224 aa, Homo sapiens
  Payload ID: 9726
  Gene Symbol: MAD2L2
  Gene Name: MAD2 mitotic arrest deficient-like 2 (yeast)
  ENSP ID: ENSP00000365857
MTTLTRQDLNFGQVVADVLCEFLEVAVHLILYVREVYPVGIFQKRKKYNVPVQMSCHPELNQYIQDTLHCVKPLLEKNDVEKVVVVILDKEHRPVEKFVFEITQPPLLSIRWAAPAPRPLAGISSDSLLSHVEQLLRAFILKISVCDAVLDHNPPGCTFTVLVHTREAATRNMEKIQVIKDFPWILADEQDVHMHDPRLIPLKTMTSDILKMQLYVEERAHKGS

SEQ ID NO: 48048 - protein, 224 aa, Homo sapiens; identical to SEQ ID NO: 48047
  Payload ID: 9726
  Gene Symbol: MAD2L2
  Gene Name: MAD2 mitotic arrest deficient-like 2 (yeast)
  ENSP ID: ENSP00000365860

SEQ ID NO: 48049 - protein, 211 aa, Homo sapiens; identical to SEQ ID NO: 48045
  Payload ID: 9726
  Gene Symbol: MAD2L2
  Gene Name: MAD2 mitotic arrest deficient-like 2 (yeast)
  Uniprot ID: Q9UI95
  ENSP ID: ENSP00000365882

SEQ ID NO: 48050 - protein, 167 aa, Homo sapiens
  Payload ID: 9726
  Gene Symbol: MAD2L2
  Gene Name: MAD2 mitotic arrest deficient-like 2 (yeast)
  ENSP ID: ENSP00000400982
MTTLTRQDLNFGQVVADVLCEFLEVAVHLILYVREVYPVGIFQKRKKYNVPVQMSCHPELNQYIQDTLHCVKPLLEKNDVEKVVVVILDKEHRPVEKFVFEITQPPLLSISSDSLLSHVEQLLRAFILKISVCDAVLDHNPPGCTFTVLVHTREAATRNMEKIQVIK

SEQ ID NO: 48051 - protein, 197 aa, Homo sapiens
  Payload ID: 9726
  Gene Symbol: MAD2L2
  Gene Name: MAD2 mitotic arrest deficient-like 2 (yeast)
  ENSP ID: ENSP00000411807
MTTLTRQDLNFGQGREAGPAGPGAGASGPAGFLERATGLCPPAVVADVLCEFLEVAVHLILYVREVYPVGIFQKRKKYNVPVQMSCHPELNQYIQDTLHCVKPLLEKNDVEKVVVVILDKEHRPVEKFVFEITQPPLLSISSDSLLSHVEQLLRAFILKISVCDAVLDHNPPGCTFTVLVHTREAATRNMEKIQVIK

SEQ ID NO: 48052 - protein, 274 aa, Homo sapiens
  Payload ID: 9727
  Gene Symbol: MAD2L1BP
  Gene Name: MAD2L1 binding protein
  Uniprot ID: Q15013
  ENSP ID: ENSP00000361244
MAAPEAEVLSSAAVPDLEWYEKSEETHASQIELLETSSTQEPLNASEAFCPRDCMVPVVFPGPVSQEGCCQFTCELLKHIMYQRQQLPLPYEQLKHFYRKPSPQAEEMLKKKPRATTEVSSRKCQQALAELESVLSHLEDFFARTLVPRVLILLGGNALSPKEFYELDLSLLAPYSVDQSLSTAACLRRLFRAIFMADAFSELQAPPLMGTVVMAQGHRNCGEDWFRPKLNYRVPSRGHKLTVTLSCGRPSIRTTAWEDYIWFQAPVTFKGFRE

SEQ ID NO: 48053 - protein, 306 aa, Homo sapiens
  Payload ID: 9727
  Gene Symbol: MAD2L1BP
  Gene Name: MAD2L1 binding protein
  Uniprot ID: Q15013
  ENSP ID: ENSP00000410818
MARVPLGRSLTLSPRLEHNGMTSAHHNFRLPGSRDSPASASQVAEIIDLEWYEKSEETHASQIELLETSSTQEPLNASEAFCPRDCMVPVVFPGPVSQEGCCQFTCELLKHIMYQRQQLPLPYEQLKHFYRKPSPQAEEMLKKKPRATTEVSSRKCQQALAELESVLSHLEDFFARTLVPRVLILLGGNALSPKEFYELDLSLLAPYSVDQSLSTAACLRRLFRAIFMADAFSELQAPPLMGTVVMAQGHRNCGEDWFRPKLNYRVPSRGHKLTVTLSCGRPSIRTTAWEDYIWFQAPVTFKGFRE

SEQ ID NO: 48054 - protein, 403 aa, Homo sapiens
  Payload ID: 9728
  Gene Symbol: MAEL
  Gene Name: maelstrom spermatogenic transposon silencer
  Uniprot ID: Q96JY0
  ENSP ID: ENSP00000356844
MPNRKASRNAYYFFVQEKIPELRRRGLPVARVADAIPYCSSDWAKPVFTPLRRPGMLVPKQNVSPPDMSALSLKGDQALLGGIFYFLNIFSHGELPPHCEQRFLPCEIGCVKYSLQEGIMADFHSFINPGEIPRGFRFHCQAASDSSHKIPISNFERGHNQATVLQNLYRFIHPNPGNWPPIYCKSDDRTRVNWCLKHMAKASEIRQDLQLLTVEDLVVGIYQQKFLKEPSKTWIRSLLDVAMWDYSSNTRCKWHEENDILFCALAVCKKIAYCISNSLATLFGIQLTEAHVPLQDYEASNSVTPKMVVLDAGRYQKLRVGSSGFSHFNSSNEEQRSNTPIGDYPSRAKISGQNSSVRGRGITRLLESISNSSSNIHKFSNCDTSLSPYMSQKDGYKSFSSLS

SEQ ID NO: 48055 - protein, 434 aa, Homo sapiens
  Payload ID: 9728
  Gene Symbol: MAEL
  Gene Name: maelstrom spermatogenic transposon silencer
  Uniprot ID: Q96JY0
  ENSP ID: ENSP00000356846
MPNRKASRNAYYFFVQEKIPELRRRGLPVARVADAIPYCSSDWALLREEEKEKYAEMAREWRAAQGKDPGPSEKQKPVFTPLRRPGMLVPKQNVSPPDMSALSLKGDQALLGGIFYFLNIFSHGELPPHCEQRFLPCEIGCVKYSLQEGIMADFHSFINPGEIPRGFRFHCQAASDSSHKIPISNFERGHNQATVLQNLYRFIHPNPGNWPPIYCKSDDRTRVNWCLKHMAKASEIRQDLQLLTVEDLVVGIYQQKFLKEPSKTWIRSLLDVAMWDYSSNTRCKWHEENDILFCALAVCKKIAYCISNSLATLFGIQLTEAHVPLQDYEASNSVTPKMVVLDAGRYQKLRVGSSGFSHFNSSNEEQRSNTPIGDYPSRAKISGQNSSVRGRGITRLLESISNSSSNIHKFSNCDTSLSPYMSQKDGYKSFSSLS

SEQ ID NO: 48056 - protein, 316 aa, Homo sapiens
  Payload ID: 9728
  Gene Symbol: MAEL
  Gene Name: maelstrom spermatogenic transposon silencer
  ENSP ID: ENSP00000402143
MPNRKASRNAYYFFVQEKIPELRRRGLPVARVADAIPYCSSDWAKPVFTPLRRPGMLVPKQNVSPPDMSALSLKGDQALLGGIFYFLNIFSHGELPPHCEQRFLPCEIGCVKYSLQEGIMADFHSFINPGEIPRGFRFHCQAASDSSHKIPISNFERGHNQATVLQNLYRFIHPNPGNWPPIYCKSDDRTRVNWCLKHMAKASEIRQDLQLLTVEDLVVGIYQQKFLKEPSKTWIRSLLDVAMWDYSSNTRCKWHEENDILFCALAVCKKIAYCISNSLATLFGIQLTEAHVPLQDYEASNSVTPKMVVLDAGRYQ

SEQ ID NO: 48057 - protein, 378 aa, Homo sapiens
  Payload ID: 9728
  Gene Symbol: MAEL
  Gene Name: maelstrom spermatogenic transposon silencer
  ENSP ID: ENSP00000482771
MAREWRAAQGKDPGPSEKQKPVFTPLRRPGMLVPKQNVSPPDMSALSLKGDQALLGGIFYFLNIFSHGELPPHCEQRFLPCEIGCVKYSLQEGIMADFHSFINPGEIPRGFRFHCQAASDSSHKIPISNFERGHNQATVLQNLYRFIHPNPGNWPPIYCKSDDRTRVNWCLKHMAKASEIRQDLQLLTVEDLVVGIYQQKFLKEPSKTWIRSLLDVAMWDYSSNTRCKWHEENDILFCALAVCKKIAYCISNSLATLFGIQLTEAHVPLQDYEASNSVTPKMVVLDAGRYQKLRVGSSGFSHFNSSNEEQRSNTPIGDYPSRAKISGQNSSVRGRGITRLLESISNSSSNIHKFSNCDTSLSPYMSQKDGYKSFSSLS

SEQ ID NO: 48058 - protein, 248 aa, Homo sapiens
  Payload ID: 9729
  Gene Symbol: MRO
  Gene Name: maestro
  Uniprot ID: Q9BYG7
  ENSP ID: ENSP00000256425
MDQRQRRILGQPLSIPTSQPKQKRTSMISFFSKVSWKLRFQKREPLKNVFFILAERARDPSAKKRHMAMRNLGTMAYEAPDKVRKYKKIVLDLLVYGLYDPVNLEVIHESMKTLTVVLGKIQGKGLGSFFIDITLQTRTLLDDENDSLRYSAFVLFGQLAAFAGRKWKKFFTSQVKQTRDSLLIHLQDRNPQVAKACKTTFQACSPYLKLKEEYSFQSEEDQRNTKLYQQLSHYHPEILQFFYANKIL

SEQ ID NO: 48059 - protein, 248 aa, Homo sapiens; identical to SEQ ID NO: 48058
  Payload ID: 9729
  Gene Symbol: MRO
  Gene Name: maestro
  Uniprot ID: Q9BYG7
  ENSP ID: ENSP00000381465

SEQ ID NO: 48060 - protein, 210 aa, Homo sapiens
  Payload ID: 9729
  Gene Symbol: MRO
  Gene Name: maestro
  Uniprot ID: Q9BYG7
  ENSP ID: ENSP00000392614
MAWGSKGIQGWENLAESSHLATTRESSPPESGTGSGSSRGSRLQEPQVSWKLRFQKREPLKNVFFILAERARDPSAKKRHMAMRNLGTMAYEAPDKVRKYKKIVLDLLVYGLYDPVNLEVIHESMKTLTVVLGKIQGKGLGSFFIDITLQTRTLLDDACKTTFQACSPYLKLKEEYSFQSEEDQRNTKLYQQLSHYHPEILQFFYANKIL

SEQ ID NO: 48061 - protein, 262 aa, Homo sapiens
  Payload ID: 9729
  Gene Symbol: MRO
  Gene Name: maestro
  Uniprot ID: Q9BYG7
  ENSP ID: ENSP00000397900
MAWGSKGIQGWENLAESSHLATTRESSPPESGTGSGSSRGSRLQEPQVSWKLRFQKREPLKNVFFILAERARDPSAKKRHMAMRNLGTMAYEAPDKVRKYKKIVLDLLVYGLYDPVNLEVIHESMKTLTVVLGKIQGKGLGSFFIDITLQTRTLLDDENDSLRYSAFVLFGQLAAFAGRKWKKFFTSQVKQTRDSLLIHLQDRNPQVAKACKTTFQACSPYLKLKEEYSFQSEEDQRNTKLYQQLSHYHPEILQFFYANKIL

SEQ ID NO: 48062 - protein, 248 aa, Homo sapiens; identical to SEQ ID NO: 48058
  Payload ID: 9729
  Gene Symbol: MRO
  Gene Name: maestro
  Uniprot ID: Q9BYG7
  ENSP ID: ENSP00000409509

SEQ ID NO: 48063 - protein, 196 aa, Homo sapiens
  Payload ID: 9729
  Gene Symbol: MRO
  Gene Name: maestro
  Uniprot ID: Q9BYG7
  ENSP ID: ENSP00000465653
MDQRQRRILGQPLSIPTSQPKQKRTSMISFFSKVSWKLRFQKREPLKNVFFILAERARDPSAKKRHMAMRNLGTMAYEAPDKVRKYKKIVLDLLVYGLYDPVNLEVIHESMKTLTVVLGKIQGKGLGSFFIDITLQTRTLLDDACKTTFQACSPYLKLKEEYSFQSEEDQRNTKLYQQLSHYHPEILQFFYANKIL

SEQ ID NO: 48064 - protein, 110 aa, Homo sapiens
  Payload ID: 9729
  Gene Symbol: MRO
  Gene Name: maestro
  ENSP ID: ENSP00000465783
MAWGSKGIQGWENLAESSHLATTRESSPPESGTGSGSSRGSRLQEPQFHGPKTEENPGPAPFHPYFPAQAEKDINDIFLFQGLLETEVPEAGASEECVFHLGRKSSGPQC

SEQ ID NO: 48065 - protein, 47 aa, Homo sapiens
  Payload ID: 9729
  Gene Symbol: MRO
  Gene Name: maestro
  ENSP ID: ENSP00000466218
MDQRQRRILGQPLSIPTSQPKQKRTSMISFFSKKELGTPVLKSVTWQ

SEQ ID NO: 48066 - protein, 179 aa, Homo sapiens
  Payload ID: 9729
  Gene Symbol: MRO
  Gene Name: maestro
  ENSP ID: ENSP00000467427
MDQRQRRILGQPLSIPTSQPKQKRTSMISFFSKVSWKLRFQKREPLKNVFFILAERARDPSAKKRHMAMRNLGTMAYEAPDKVRKYKKIVLDLLVYGLYDPVNLEVIHESMKTLTVVLGKIQGKGLGSFFIDITLQTRTLLDDACKTTFQACSPYLKLKEEYSFQSEEDQRNTKLYQQL

SEQ ID NO: 48067 - protein, 248 aa, Homo sapiens; identical to SEQ ID NO: 48058
  Payload ID: 9729
  Gene Symbol: MRO
  Gene Name: maestro
  Uniprot ID: Q9BYG7
  ENSP ID: ENSP00000482576

SEQ ID NO: 48068 - protein, 1641 aa, Homo sapiens
  Payload ID: 9730
  Gene Symbol: MROH1
  Gene Name: maestro heat-like repeat family member 1
  Uniprot ID: Q8NDA8
  ENSP ID: ENSP00000321737
MTESSMKKLASTLLDAITDKDPLVQEQVCSALCSLGEARPVETLRACEEYLRQHDKLAHPYRAAVLRAMERVLSSRASELDKDTASTIILLASSEMTKTKDLVWDWQQAASGVLVAVGRQFISKVMEELLRRLHPGTLPHCAVLHTLASLSVANAFGVVPFLPSVLSSLLPVLGVAKQDTVRVAFCSALQRFSEGALEYLANLDRAPDPTVRKDAFATDIFSAYDVLFHQWLQSREAKLRLAVVEALGPMSHLLPSERLEEQLPKLLPGILALYKKHAETFYLSKSLGQILEAAVSVGSRTLETQLDALLAALHSQICVPVESSSPLVMSNQKEVLRCFTVLACSSPDRLLAFLLPRLDTSNERTRVGTLQVVRHVINSAAAQMEDKKPFILSSMRLPLLDTNSKVKRAVVQVISAMAHHGYLEQPGGEAMIEYIVQQCALPPEQEPEKPGPGSKDPKADSVRAISVRTLYLVSTTVDRMSHVLWPYLLQFLTPVRFTGALTPLCRSLVHLAQKRQEAGADAFLIQYDAHASLPSPYAVTGRLLVVSSSPYLGDGRGAAALRLLSVLHPNIHPLLGQHWETTVPLLLGYLDEHTEETLPQEEWEEKLLMFLRDTLAIISDNAWICQLSLELCRQLPCYDEAPQEKNFLYKCIGTTLGAASSKEVVRKHLQELLETARYQEEAEREGLACCFGICAISHLEDTLAQLEDFVRSEVFRKSIGILNIFKDRSENEVEKVKSALILCYGHVAARAPRELVLAKVESDILRNICQHFSTKVLGIKVETKDPALKLCLVQSVCMVSRAICSSTQAGSFHFTRKAELVAQMMEFIRAEPPDSLRTPIRKKAMLTCTYLVSVEPALDEQARADVIHGCLHSIMALLPEPKEEDGGCQKSLYLETLHALEDLLTSLLQRNMTPQGLQIMIEHLSPWIKSPRGHERARALGLSALLLRYFLEHLRVSALVPFHNLGLLIGLFSPRCADLWPATRQEAVDCVYSLLYLQLGYEGFSRDYRDDVAERLLSLKDGLVHPDPAILFHTCHSVGQIIAKRLPPDQLISLLLTMFEALGDPEKNCSRAATVMINCLLQERGGVLQEKVPEIVSVLRSKLQEAQGEHVLPAAQHSVYLLATQHCAAVVSSLLGSPLPLDSHTCMLWRALAVEPRLAAQVLGLLLEKMSRDVPFKESRAFLLGRTPDRVATLLPLSATCALFEVMSTPAAGPAVLELYPQLFVVLLLRVSCTVGVQLPRNLQAQERRGASPALATRNLEPCSSAVDTLRSMLLRSGSEDVVQRMDLEGGWELLRTSAGHEEGATRLARAMAEHAGPRLPLVLKTLACTHSSAYENQRVTTTAFLAELLNSNVANDLMLLDSLLESLAARQKDTCASVRRLVLRGLANLASGCPDKVRTHGPQLLTAMIGGLDDGDNPHSPVALEAMLGLARLVHLVESWDLRSGLLHVAIRIRPFFDSEKMEFRTASIRLFGHLNKVCHGDCEDVFLDQVVGGLAPLLLHLQDPQATVASACRFALRMCGPNLACEELSAAFQKHLQEGRALHFGEFLNTTCKHLMHHFPDLLGRLLTTCLFYFKSSWENVRAAAPLFTGFLVLHSEPRQQPQVDLDQLIAALQILLKDPAPEVRTRAAEALGRLVKLA

SEQ ID NO: 48069 - protein, 422 aa, Homo sapiens
  Payload ID: 9730
  Gene Symbol: MROH1
  Gene Name: maestro heat-like repeat family member 1
  Uniprot ID: Q8NDA8
  ENSP ID: ENSP00000388174
MTESSMKKLASTLLDAITDKDPLVQEQVCSALCSLGEARPVETLRACEEYLRQHDKLAHPYRAAVLRAMERVLSSRASELDKDTASTIILLASSEMTKTKDLVWDWQQAASGVLVAVGRQFISKVMEELLRRLHPGTLPHCAVLHTLASLSVANAFGVVPFLPSVLSSLLPVLGVAKQDTVRVAFCSALQRFSEGALEYLANLDRAPDPTVRKDAFATDIFSAYDVLFHQWLQSREAKLRLAVVEALGPMSHLLPSERLEEQLPKLLPGILALYKKHAETFYLSKSLGQILEAAVSVGSRTLETQLDALLAALHSQICVPVESSSPLVMSNQKEVLRCFTVLACSSPDRLLAFLLPRLDTSNERTRVGTLQVVRHVINSAGSTNTRITLMLPSAVTRLKHEDCPARAAPQPADLTAAPASVA

SEQ ID NO: 48070 - protein, 1641 aa, Homo sapiens; identical to SEQ ID NO: 48068
  Payload ID: 9730
  Gene Symbol: MROH1
  Gene Name: maestro heat-like repeat family member 1
  Uniprot ID: Q8NDA8
  ENSP ID: ENSP00000435565

SEQ ID NO: 48071 - protein, 1632 aa, Homo sapiens
  Payload ID: 9730
  Gene Symbol: MROH1
  Gene Name: maestro heat-like repeat family member 1
  ENSP ID: ENSP00000436636
MTESSMKKLASTLLDAITDKDPLVQEQVCSALCSLGEARPVETLRACEEYLRQHDKLAHPYRAAVLRAMERVLSSRASELDKDTASTIILLASSEMTKTKDLVWDWQQAASGVLVAVGRQFISKVMEELLRRLHPGTLPHCAVLHTLASLSVANAFGVVPFLPSVLSSLLPVLGVAKQDTVRVAFCSALQRFSEGALEYLANLDRAPDPTVRKDAFATDIFSAYDVLFHQWLQSREAKLRLAVVEALGPMSHLLPSERLEEQLPKLLPGILALYKKHAETFYLSKSLGQILEAAVSVGSRTLETQLDALLAALHSQICVPVESSSPLVMSNQKEVLRCFTVLACSSPDRLLAFLLPRLDTSNERTRVGTLQVVRHVINSAAAQMEDKKPFILSSMRLPLLDTNSKVKRAVVQVISAMAHHGYLEQPGGEAMIEYIVQQCALPPEQEPEKPGPGSKDPKADSVRAISVRTLYLVSTTVDRMSHVLWPYLLQFLTPVRFTGALTPLCRSLVHLAQKRQEAGADAFLIQYDAHASLPSPYAVTGRLLVVSSSPYLGDGRGAAALRLLSVLHPNIHPLLGQHWETTVPLLLGYLDEHTEETLPQEEWEEKLLMFLRDTLAIISDNAWICQLSLELCRQLPCYDEAPQEKNFLYKCIGTTLGAASSKEVVRKHLQELLETARYQEEAEREGLACCFGICAISHLEDTLAQLEDFVRSEVFRKSIGILNIFKDRSENEVEKVKSALILCYGHVAARAPRELVLAKVESDILRNICQHFSTKDPALKLCLVQSVCMVSRAICSSTQAGSFHFTRKAELVAQMMEFIRAEPPDSLRTPIRKKAMLTCTYLVSVEPALDEQARADVIHGCLHSIMALLPEPKEEDGGCQKSLYLETLHALEDLLTSLLQRNMTPQGLQIMIEHLSPWIKSPRGHERARALGLSALLLRYFLEHLRVSALVPFHNLGLLIGLFSPRCADLWPATRQEAVDCVYSLLYLQLGYEGFSRDYRDDVAERLLSLKDGLVHPDPAILFHTCHSVGQIIAKRLPPDQLISLLLTMFEALGDPEKNCSRAATVMINCLLQERGGVLQEKVPEIVSVLRSKLQEAQGEHVLPAAQHSVYLLATQHCAAVVSSLLGSPLPLDSHTCMLWRALAVEPRLAAQVLGLLLEKMSRDVPFKESRAFLLGRTPDRVATLLPLSATCALFEVMSTPAAGPAVLELYPQLFVVLLLRVSCTVGVQLPRNLQAQERRGASPALATRNLEPCSSAVDTLRSMLLRSGSEDVVQRMDLEGGWELLRTSAGHEEGATRLARAMAEHAGPRLPLVLKTLACTHSSAYENQRVTTTAFLAELLNSNVANDLMLLDSLLESLAARQKDTCASVRRLVLRGLANLASGCPDKVRTHGPQLLTAMIGGLDDGDNPHSPVALEAMLGLARLVHLVESWDLRSGLLHVAIRIRPFFDSEKMEFRTASIRLFGHLNKVCHGDCEDVFLDQVVGGLAPLLLHLQDPQATVASACRFALRMCGPNLACEELSAAFQKHLQEGRALHFGEFLNTTCKHLMHHFPDLLGRLLTTCLFYFKSSWENVRAAAPLFTGFLVLHSEPRQQPQVDLDQLIAALQILLKDPAPEVRTRAAEALGRLVKLA

SEQ ID NO: 48072 - protein, 615 aa, Homo sapiens
  Payload ID: 9730
  Gene Symbol: MROH1
  Gene Name: maestro heat-like repeat family member 1
  Uniprot ID: Q8NDA8
  ENSP ID: ENSP00000437866
MRIIAKRLPPDQLISLLLTMFEALGDPEKNCSRAATVMINCLLQERGGVLQEKVPEIVSVLRSKLQEAQGEHVLPAAQHSVYLLATQHCAAVVSSLLGSPLPLDSHTCMLWRALAVEPRLAAQVLGLLLEKMSRDVPFKESRAFLLGRTPDRVATLLPLSATCALFEVMSTPAAGPAVLELYPQLFVVLLLRVSCTVGVQLPRNLQAQERRGASPALATRNLEPCSSAVDTLRSMLLRSGSEDVVQRMDLEGGWELLRTSAGHEEGATRLARAMAEHAGPRLPLVLKTLACTHSSAYENQRVTTTAFLAELLNSNVANDLMLLDSLLESLAARQKDTCASVRRLVLRGLANLASGCPDKVRTHGPQLLTAMIGGLDDGDNPHSPVALEAMLGLARLVHLVESWDLRSGLLHVAIRIRPFFDSEKMEFRTASIRLFGHLNKVCHGDCEDVFLDQVVGGLAPLLLHLQDPQATVASACRFALRMCGPNLACEELSAAFQKHLQEGRALHFGEFLNTTCKHLMHHFPDLLGRLLTTCLFYFKSSWENVRAAAPLFTGKHHPLPHPHAARQPRLMPPLHRVPGAALGAQAAAAGGPGPAHCGAPDPAEGPGPRGADEGC

SEQ ID NO: 48073 - protein, 1674 aa, Homo sapiens
  Payload ID: 9731
  Gene Symbol: MROH2A
  Gene Name: maestro heat-like repeat family member 2A
  Uniprot ID: A6NES4
  ENSP ID: ENSP00000374408
MTEAITEAAVASSEEVSEERDDLGPLELHDSGTFQQVVNLLDIIDSESAKTDTTGAGLDMRKTLASVIIMEKATTEPSVVINTLIRCLQVPEISTQRKVNIYNILQDIIQQEGELEEQCVQRLVAIASKEMREIPEMEGYMKAEVASDTLVALSRNHFSLVMYELQHHLKPLNLTDEFVIITLAKLANGNVFEFMPYMGITLATIFTMLRLANEAKIRQAICSAMETFCETVQFYLKHLEESVYPVMTEEEFALKVFPMYRYFVTVWLRHYNPEVKLGVIKSLKPMLGLLLPNDDLREQVYDYIPLLLAEYQGSLEVLFVTQVLRQILELSVTTNTPVPQMQLHTIFTELHVQVCNKAPAQHQYSSQNLMEMVHCFVALARSYPKELMKFFFSQMETNKEAVRVGTLNLIRAIVSADEPRMSIRAIYLAIRVVKNTISDTRSKVRMAILHIIGQLALCGYQERIKGWGLKYLSVQLTLSTYKLTNRREKFYQRDLEERMVHKVTMDTVKIITSSVSGMTTEFWVRLLCYIMETDYVEALTPICISLTNLAEHQLHGQDVDVSVAGKSRQVDLPAPQKLLARLLVLMSSPYKGEGRGIAMLNLLRTLSQSIAPSMADMWELEIALLVRYLEEHTEFTWDQKAWEDKLIQFLRNSLKKTRGSSWSLRLSKELNNQIASFDSPSLEKGFLYRALGFTLATGLEASKVEVLLLELLYKTDYSNDFDSEGVIMCFGLCARGQVKTVLNVLHDFEERIQESEQSWQISAWRKDHPWRRETVKSALMVMYSCVASYCHPQLLLNLVDSPITAKIIHHYVSSCQDICLKMAFMKSVVQVTKAINNIKDLEDFHFAQKTTLTSIIVAVIKAEPTDNLVSPVRALAMEALSHLSKLKPFYSTEENSELMDISIHSVISLQLPGEDNESIKTLYANALSSLEQLMESLLQRQLDPKGLQEMVQLLEKWILSEKEWEREKAVSLHLYLMWIYVHSTAVCIHLKLGQFGTMVGLIAPCTCDAHQRTRMASMNVLSSLLDLHASQTCSLWGPSKQKELEKCKGDLQSTDVEKIFCASSRIAKVVCMEFSCDEVVSLIQKLCENTGAMNLQHDKASVTWIAFFLQMRAKELEDKVAEILSAILVHLPVVDHPEVRRLLIDGILLLAHHHQETILTSLLRQPLPMESHLAEVWLAVSENVPFARTMLHSLMGRLQSRLSPRISATSKADIWRLAAVDPLMTLCTIHLLIQKLDENDKLPDFLPDLIYTLLLQLGSSHRPEAAPPVLKMWKLVHTTPLPEEMNLQRVTIKSMQLLFKRVKSQHLAHTLDEQAVWDLLQDGGTFLEGVSLLARLCMQHVEGHRQRLAELVLRGMDSEVLSCRISSTAVCFMSGPVLYQEKLLKPAALLLEKGADQEEDEALRVLSLRALGNMALGAPKKVKQYRKVLLEKCLGPLREPVSNSVTAEGMEALTKILAELREGDVGSSFDAMSEQCRIFFDNESELLRLKAFILFGKLARVVGMSKKHFFKGEVKKAWIPLMLHSQDPCSNAAQACMATMFQCVHFWGWKSLEHPSGPSDTATDDKMTVFQTTMCSILTRKKPAVLYRFLLETMAYVKNNLSRIRIAACNLAGIIMKQMSTHYLKKLDFPALRNSLQELQLDPDPGVRRAALETLTVLDSCSQHGFLASPQGMS

SEQ ID NO: 48074 - protein, 68 aa, Homo sapiens
  Payload ID: 9731
  Gene Symbol: MROH2A
  Gene Name: maestro heat-like repeat family member 2A
  ENSP ID: ENSP00000392128
MTEAITEAAVASSEEVSEERDDLGPLELHDSGTFQQVVNLLDIIDSESAKTDTTGAGLDMRKTLASVI

SEQ ID NO: 48075 - protein, 68 aa, Homo sapiens; identical to SEQ ID NO: 48074
  Payload ID: 9731
  Gene Symbol: MROH2A
  Gene Name: maestro heat-like repeat family member 2A
  ENSP ID: ENSP00000404614

SEQ ID NO: 48076 - protein, 9 aa, Homo sapiens
  Payload ID: 9731
  Gene Symbol: MROH2A
  Gene Name: maestro heat-like repeat family member 2A
  ENSP ID: ENSP00000409355
MRKTLASVI

SEQ ID NO: 48077 - protein, 1688 aa, Homo sapiens
  Payload ID: 9731
  Gene Symbol: MROH2A
  Gene Name: maestro heat-like repeat family member 2A
  ENSP ID: ENSP00000477597
MTEAITEAAVASSEEVSEERDDLGPLELHDSGTFQQVVNLLDIIDSESAKTDTTGAGLDMRKTLASVIIMEKATTEPSVVINTLIRCLQVPEISTQRKVNIYNILQDIIQQEGELEEQCVQRLVAIASKEMREIPEMEGYMKAEVASDTLVALSRNHFSLVMYELQHHLKPLNLTDEFVIITLAKLANGNVFEFMPYMGITLATIFTMLRLANEAKIRQAICSAMETFCETVQFYLKHLEESVYPVMTEEEFALKVFPMYRYFVTVWLRHYNPEVKLGVIKSLKPMLGLLLPNDDLREQVYDYIPLLLAEYQGKGHLPPFANPLQVLRQILELSVTTNTPVPQMQLHTIFTELHVQVCNKAPAQHQYSSQNLMEMVHCFVALARSYPKELMKFFFSQMETNKEAVRVGTLNLIRAIVSADEPRMSIRAIYLAIRVVKNTISDTRSKVRMAILHIIGQLALCGYQERIKGWGLKYLSVQLTLSTYKLTNRREKFYQRDLEERMVHKVTMDTVKIITSSVSGMTTEFWVRLLCYIMETDYVEALTPICISLTNLAEHQLHGQDVDVSVAGKSRQVDLPAPQKLLARLLVLMSSPYKGEGRGIAMLNLLRTLSQSIAPSMADMWELEIALLVRYLEEHTEFTWDQKAWEDKLIQFLRNSLKKTRGSSWSLRLSKELNNQIASFDSPSLEKGFLYRALGFTLATGLEASKVEVLLLELLYKTDYSNDFDSEGVIMCFGLCARGQVKTVLNVLHDFEERIQESEQSWQISAWRKDHPWRRETVKSALMVMYSCVASYCHPQLLLNLVDSPITAKIIHHYVSSCQDICLKMAFMKSVVQVTKAINNIKDLEDFHFAQKTTLTSIIVAVIKAEPTDNLVSPVRALAMEALSHLSKLKPFYSTEENSELMDISIHSVISLQLPGEDNESIKTLYANALSSLEQLMESLLQRQLDPKGLQEMVQLLEKWILSEKEWEREKAVSLHLYLMWIYVHSTAVCIHLKLGQFGTMVGLIAPCTCDAHQRTRMASMNVLSSLLDLHASQTCSLWGPSKQKELEKCKGDLQSTDVEKIFCASSRIAKVVCMEFSCDEVVSLIQKLCENTGAMNLQHDKASVTWIAFFLQMRAKELEDKVAEILSAILVHLPVVDHPEVRRLLIDGILLLAHHHQETILTSLLRQPLPMESHLAEVWLAVSENVPFARTMLHSLMGRLQSRLSPRISATSKADIWRLAAVDPLMTLCTIHLLIQKLDENDKLPDFLPDLIYTLLLQLGSSHRPEAAPPVLKMWKLVHTTPLPEEMNLQRCSRGRVTIKSMQLLFKRVKSQHLAHTLDEQAVWDLLQDGGTFLEGVSLLARLCMQHVEGHRQRLAELVLRGMDSEVLSCRISSTAVCVEMRHRFMSGPVLYQEKLLKPAALLLEKGADQEEDEALRVLSLRALGNMALGAPKKVKQYRKVLLEKCLGPLREPVSNSVTAEGMEALTKILAELREGDVGSSFDAMSEQCRIFFDNESELLRLKAFILFGKLARVVGMSKKHFFKGEVKKAWIPLMLHSQDPCSNAAQACMATMFQCVHFWGWKSLEHPSGPSDTATDDKMTVFQTTMCSILTRKKPAVLYRFLLETMAYVKNNLSRIRIAACNLAGIIMKQMSTHYLKKLDFPALRNSLQELQLDPDPGVRRAALETLTVLDSCSQHGFLASPQGMS

SEQ ID NO: 48078 - protein, 1585 aa, Homo sapiens
  Payload ID: 9732
  Gene Symbol: MROH2B
  Gene Name: maestro heat-like repeat family member 2B
  Uniprot ID: Q7Z745
  ENSP ID: ENSP00000382476
MTLSTEESIEMFGDINLTLGMLNKEDIVNKEDIYSHLTSVIQNTDILDDAIVQRLIYYASKDMRDNNMLREIRMLAGEVLVSLAAHDFNSVMYEVQSNFRILELPDEFVVLALAELATSYVSQSIPFMMMTLLTMQTMLRLAEDERMKGTFCIALEKFSKAIYKYVNHWRDFPYPRLDANRLSDKIFMLFWYIMEKWAPLASPMQTLSIVKAHGPTVSLLLHREDFRGYALGQVPWLLNQYKDKEIDFHVTQSLKQILTAAVLYDIGLPRSLRRSIFINLLQQICRAPEPPVKENEMKASSCFLILAHSNPGELMEFFDEQVRSNNEAIRVGILTLLRLAVNADEPRLRDHIISIERTVKIVMGDLSTKVRNSVLLLIQTMCEKSYIEAREGWPLIDYVFSQFATLNRNLEKPVKTNFHENEKEEESVRETSLEVLKTLDPLVIGMPQVLWPRILTFVVPAEYTEALEPLFSIIRILIMAEEKKQHSAKESTALVVSTGAVKLPSPQQLLARLLVISMPASLGELRGAGAIGLLKILPEIIHPKLVDLWKTRLPELLQPLEGKNISTVLWETMLLQLLKESLWKISDVAWTIQLTQDFKQQMGSYSNNSTEKKFLWKALGTTLACCQDSDFVNSQIKEFLTAPNQLGDQRQGITSILGYCAENHLDIVLKVLKTFQNQEKFFMNRCKSLFSGKKSLTKTDVMVIYGAVALHAPKKQLLSRLNQDIISQVLSLHGQCSQVLGMSVMNKDMDLQMSFTRSITEIGIAVQDAEDQGFQFSYKEMLIGYMLDFIRDEPLDSLASPIRWKALIAIRYLSKLKPQLSLQDHLNILEENIRRLLPLPPLENLKSEGQTDKDKEHIQFLYERSMDALGKLLKTMMWDNVNAEDCQEMFNLLQMWLVSQKEWERERAFQITAKVLTNDIEAPENFKIGSLLGLLAPHSCDTLPTIRQAAASSTIGLFYIKGIHLEVERLQGLQEGLESDDVQVQIKISSKIAKIVSKFIPNEEILMFLEEMLDGLESLNPTCTKACGIWMITVLKQQGAALEDQLLEILGTIYHHMPVLRQKEESFQFILEAISQIASFHMDTVVVNLLQKPLPFDRDTKTLWKALAEKPASSGKLLQALIDKLETELEDDIARVEAISVACAMYEVISMGTSVTGLYPELFTLLLKLVSCTLGQKMLTCPWSHRRHVMQQGEQQQIPDPCRLSTATLKCLQAQAMREGLAKESDEGDNLWTLLSSPSTHHIGVCSLARSMAVWQHGVILDIMEQLLSSLTSSSENYRITGAAFFSELMKEPILWKHGNLRNVLILMDQSAWDSNATLRQMAIRGLGNTASGAPHKVKKHKQLMLESIIRGLYHLARTEVVCESLKALKKILELLTDRDVSFYFKEIVLQTRTFFEDEQDDVRLTAIFLFEDLAPLTGRRWKIFFAEEIKKSLISFLLHLWDPNPKIGVACRDVLMVCIPFLGLQELYGVLDRLLDQDLPRARDFYRQFCVKLAKKNQEILWILHTHSFTFFTSTWEVIRSAAVKLTDAVVLNLTSQYVELLDREQLTTRLQALRQDPCISVQRAAEAALQTLLRRCKETSIPL

SEQ ID NO: 48079 - protein, 1140 aa, Homo sapiens
  Payload ID: 9732
  Gene Symbol: MROH2B
  Gene Name: maestro heat-like repeat family member 2B
  ENSP ID: ENSP00000441504
MPQVLWPRILTFVVPAEYTEALEPLFSIIRILIMAEEKKQHSAKESTALVVSTGAVKLPSPQQLLARLLVISMPASLGELRGAGAIGLLKILPEIIHPKLVDLWKTRLPELLQPLEGKNISTVLWETMLLQLLKESLWKISDVAWTIQLTQDFKQQMGSYSNNSTEKKFLWKALGTTLACCQDSDFVNSQIKEFLTAPNQLGDQRQGITSILGYCAENHLDIVLKVLKTFQNQEKFFMNRCKSLFSGKKSLTKTDVMVIYGAVALHAPKKQLLSRLNQDIISQVLSLHGQCSQVLGMSVMNKDMDLQMSFTRSITEIGIAVQDAEDQGFQFSYKEMLIGYMLDFIRDEPLDSLASPIRWKALIAIRYLSKLKPQLSLQDHLNILEENIRRLLPLPPLENLKSEGQTDKDKEHIQFLYERSMDALGKLLKTMMWDNVNAEDCQEMFNLLQMWLVSQKEWERERAFQITAKVLTNDIEAPENFKIGSLLGLLAPHSCDTLPTIRQAAASSTIGLFYIKGIHLEVERLQGLQEGLESDDVQVQIKISSKIAKIVSKFIPNEEILMFLEEMLDGLESLNPTCTKACGIWMITVLKQQGAALEDQLLEILGTIYHHMPVLRQKEESFQFILEAISQIASFHMDTVVVNLLQKPLPFDRDTKTLWKALAEKPASSGKLLQALIDKLETELEDDIARVEAISVACAMYEVISMGTSVTGLYPELFTLLLKLVSCTLGQKMLTCPWSHRRHVMQQGEQQQIPDPCRLSTATLKCLQAQAMREGLAKESDEGDNLWTLLSSPSTHHIGVCSLARSMAVWQHGVILDIMEQLLSSLTSSSENYRITGAAFFSELMKEPILWKHGNLRNVLILMDQSAWDSNATLRQMAIRGLGNTASGAPHKVKKHKQLMLESIIRGLYHLARTEVVCESLKALKKILELLTDRDVSFYFKEIVLQTRTFFEDEQDDVRLTAIFLFEDLAPLTGRRWKIFFAEEIKKSLISFLLHLWDPNPKIGVACRDVLMVCIPFLGLQELYGVLDRLLDQDLPRARDFYRQFCVKLAKKNQEILWILHTHSFTFFTSTWEVIRSAAVKLTDAVVLNLTSQYVELLDREQLTTRLQALRQDPCISVQRAAEAALQTLLRRCKETSIPL

SEQ ID NO: 48080 - protein, 39 aa, Homo sapiens
  Payload ID: 9733
  Gene Symbol: MROH5
  Gene Name: maestro heat-like repeat family member 5
  ENSP ID: ENSP00000427945
MDRQCSERPYSCTPTGRVSSAVSQNSSHRLQDAAGHEQC

SEQ ID NO: 48081 - protein, 39 aa, Homo sapiens; identical to SEQ ID NO: 48080
  Payload ID: 9733
  Gene Symbol: MROH5
  Gene Name: maestro heat-like repeat family member 5
  ENSP ID: ENSP00000429433

SEQ ID NO: 48082 - protein, 110 aa, Homo sapiens
  Payload ID: 9733
  Gene Symbol: MROH5
  Gene Name: maestro heat-like repeat family member 5
  ENSP ID: ENSP00000429440
MKDSSCMKVHQDSARRDRWSHPTTILLHKSQSSQATLMLQEHRMFMGEAYSAATGFKMLQDMNSADPFHLKYIIKKIKNMAHGSPKLVMETIHDYFIDNPEISSRHKFRL

SEQ ID NO: 48083 - protein, 1317 aa, Homo sapiens
  Payload ID: 9733
  Gene Symbol: MROH5
  Gene Name: maestro heat-like repeat family member 5
  ENSP ID: ENSP00000431031
MDRQCSERPYSCTPTGRVSSAVSQNSRISPPVSTSMKDSSCMKVHQDSARRDRWSHPTTILLHKSQSSQATLMLQEHRMFMGEAYSAATGFKMLQDMNSADPFHLKYIIKKIKNMAHGSPKLVMETIHDYFIDNPEISSRHKFRLFQTLEMVIGASDVLEETWEKTFTRLALENMTKATELEDIYQDAASNMLVAICRHSWRVVAQHLETELLTGVFPHRSLLYVMGVLSSSEELFSQEDKACWEEQLIQMAIKSVPFLSTDVWSKELLWTLTTPSWTQQEQSPEKAFLFTYYGLILQAEKNGATVRRHLQALLETSHQWPKQREGMALTLGLAATRHLDDVWAVLDQFGRSRPIRWSLPSSSPKNSEDLRWKWASSTILLAYGQVAAKARAHILPWVDNIVSRMVFYFHYSSWDETLKQSFLTATLMLMGAVSRSEGAHSYEFFQTSELLQCLMVLMEKEPQDTLCTRSRQQAMHIASSLCKLRPPIDLERKSQLLSTCFRSVFALPLLDALEKHTCLFLEPPNIQLWPVARERAGWTHQGWGPRAVLHCSEHLQSLYSRTMEALDFMLQSLIMQNPTADELHFLLSHLYIWLASEKAHERQRAVHSCMILLKFLNHNGYLDPKEDFKRIGQLVGILGMLCQDPDRATQRCSLEGASHLYQLLMCHKTGEALQAESQAPKELSQAHSDGAPLWNSRDQKATPLGPQEMAKNHIFQLCSFQVIKDIMQQLTLAELSDLIWTAIDGLGSTSPFRVQAASEMLLTAVQEHGAKLEIVSSMAQAIRLRLCSVHIPQAKEKTLHAITLLARSHTCELVATFLNISIPLDSHTFQLWRALGAGQPTSHLVLTTLLACLQERPLPTGASDSSPCPKEKTYLRLLAAMNMLHELQFAREFKQAVQEGYPKLFLALLTQMHYVLELNLPSEPPKQQAQEAAVPSPQSCSTSLEALKSLLSTTGHWHDFAHLELQGSWELFTTIHTYPKGVGLLARAMVQNHCRQIPAVLRQLLPSLQSPQERERKVAILILTKFLYSPVLLEVLPKQAALTVLAQGLHDPSPEVRVLSLQGLSNILFHPDKGSLLQGQLRPLLDGFFQSSDQVIVCIMGTVSDTLHRLGAQGTGSQSLGVAISTRSFFNDERDGIRAAAMALFGDLVAAMADRELSGLRTQVHQSMVPLLLHLKDQCPAVATQAKFTFYRCAVLLRWRLLHTLFCTLAWERGLSARHFLWTCLMTRSQEEFSIHLSQALSYLHSHSCHIKTWVTLFIGHTICYHPQAVFQMLNAVDTNLLFRTFEHLRSDPEPSIREFATSQLSFLQKVSARPKQ

SEQ ID NO: 48084 - protein, 1317 aa, Homo sapiens; identical to SEQ ID NO: 48083
  Payload ID: 9733
  Gene Symbol: MROH5
  Gene Name: maestro heat-like repeat family member 5
  ENSP ID: ENSP00000481783

SEQ ID NO: 48085 - protein, 492 aa, Homo sapiens
  Payload ID: 9733
  Gene Symbol: MROH5
  Gene Name: maestro heat-like repeat family member 5
  ENSP ID: ENSP00000487596
  MOD_RES (1)..(1): Any amino acid
XHTFQLWRALGAGQPTSHLVLTTLLACLQERPLPTGASDSSPCPKEKTYLRLLAAMNMLHELQFAREFKQAVQEGYPKLFLALLTQMHYVLELNLPSEPPKQQAQEAAVPSPQSCSTSLEALKSLLSTTGHWHDFAHLELQGSWELFTTIHTYPKGVGLLARAMVQNHCRQIPAVLRQLLPSLQSPQERERKVAILILTKFLYSPVLLEVLPKQAALTVLAQGLHDPSPEVRVLSLQGLSNILFHPDKGSLLQGQLRPLLDGFFQSSDQVIVCIMGTVSDTLHRLGAQGTGSQSLGVAISTRSFFNDERDGIRAAAMALFGDLVAAMADRELSGLRTQVHQSMVPLLLHLKDQCPAVATQAKFTFYRCAVLLRWRLLHTLFCTLAWERGLSARHFLWTCLMTRSQEEFSIHLSQALSYLHSHSCHIKTWVTLFIGHTICYHPQAVFQMLNAVDTNLLFRTFEHLRSDPEPSIREFATSQLSFLQKVSARPKQ

SEQ ID NO: 48086 - protein, 719 aa, Homo sapiens
  Payload ID: 9734
  Gene Symbol: MROH6
  Gene Name: maestro heat-like repeat family member 6
  Uniprot ID: A6NGR9
  ENSP ID: ENSP00000381857
MAGGVWGRSRAREAPVGALTLTALTEGIRARQGQPQGPPSAGPQPKSWEVKPEAEPQTQALTAPSEAEPGRGATVPEAGSEPCSLNSALEPAPEGPHQVPQSSWEEGVLADLALYTAACLEEAGFAGTQATVLTLSSALEARGERLEDQVHALVRGLLAQVPSLAEGRPWRAALRVLSALALEHARDVVCALLPRSLPADRVAAELWRSLSRNQRVNGQVLVQLLWALKGASGPEPQALAATRALGEMLAVSGCVGATRGFYPHLLLALVTQLHKLARSPCSPDMPKIWVLSHRGPPHSHASCAVEALKALLTGDGGRMVVTCMEQAGGWRRLVGAHTHLEGVLLLASAMVAHADHHLRGLFADLLPRLRSADDPQRLTAMAFFTGLLQSRPTARLLREEVILERLLTWQGDPEPTVRWLGLLGLGHLALNRRKVRHVSTLLPALLGALGEGDARLVGAALGALRRLLLRPRAPVRLLSAELGPRLPPLLDDTRDSIRASAVGLLGTLVRRGRGGLRLGLRGPLRKLVLQSLVPLLLRLHDPSRDAAESSEWTLARCDHAFCWGLLEELVTVAHYDSPEALSHLCCRLVQRYPGHVPNFLSQTQGYLRSPQDPLRRAAAVLIGFLVHHASPGCVNQDLLDSLFQDLGRLQSDPKPAVAAAAHVSAQQVAMLARARGCPRGPRLLRIAPRPARPPPVFADSPFQRRSVAGRWGCSGPRRA

SEQ ID NO: 48087 - protein, 50 aa, Homo sapiens
  Payload ID: 9734
  Gene Symbol: MROH6
  Gene Name: maestro heat-like repeat family member 6
  ENSP ID: ENSP00000431569
MLARARGCPRGPRLLRIAPRPARPPPVFADSPFQRRSVAGRWGCSGPRRA

SEQ ID NO: 48088 - protein, 50 aa, Homo sapiens; identical to SEQ ID NO: 48087
  Payload ID: 9734
  Gene Symbol: MROH6
  Gene Name: maestro heat-like repeat family member 6
  ENSP ID: ENSP00000434244

SEQ ID NO: 48089 - protein, 50 aa, Homo sapiens; identical to SEQ ID NO: 48087
  Payload ID: 9734
  Gene Symbol: MROH6
  Gene Name: maestro heat-like repeat family member 6
  ENSP ID: ENSP00000435528

SEQ ID NO: 48090 - protein, 6 aa, Homo sapiens
  Payload ID: 9734
  Gene Symbol: MROH6
  Gene Name: maestro heat-like repeat family member 6
  ENSP ID: ENSP00000436284
MLARAR

SEQ ID NO: 48091 - protein, 548 aa, Homo sapiens
  Payload ID: 9734
  Gene Symbol: MROH6
  Gene Name: maestro heat-like repeat family member 6
  ENSP ID: ENSP00000436959
MAGGVWGRSRAREAPVGALTLTALTEGIRARQGQPQGPPSAGPQPKSWEVKPEAEPQTQALTAPSEAEPGRGATVPEAGSEPCSLNSALEPAPEGPHQVPQSSWEEGVLADLALYTAACLEEAGFAGTQATVLTLSSALEARGERLEDQVHALVRGLLAQVPSLAEGRPWRAALRVLSALALEHARDVVCALLPRSLPADRVAAELWRSLSRNQRVNGQVLVQLLWALKGASGPEPQALAATRALGEMLAVSGCVGATRGFYPHLLLALVTQLHKLARSPCSPDMPKIWVLSHRGPPHSHASSHCPPAHCPHHQLCCGGLEGAAHRGWRPHGGHVHGAGRRLEEAGGSPHPPGGRPAAGQCYGGTCRPPPARPLRRLAPSASQRGRPAASHGYGLLHRAVAEPAHRTAPAGGGHPGATPHLAGRPRTHCALVGPAGPGPPRAESQEGAAREHAAAGAPGRTGRRRRAARGCSAGRPEEAPAAAPGACAAPERGAGTAPPSATGRHTGLNPRLGRRAPWDSGAPGPGRAPAGAPRPPAEAGAAESRAAA

SEQ ID NO: 48092 - protein, 719 aa, Homo sapiens; identical to SEQ ID NO: 48086
  Payload ID: 9734
  Gene Symbol: MROH6
  Gene Name: maestro heat-like repeat family member 6
  Uniprot ID: A6NGR9
  ENSP ID: ENSP00000479227

SEQ ID NO: 48093 - protein, 548 aa, Homo sapiens; identical to SEQ ID NO: 48091
  Payload ID: 9734
  Gene Symbol: MROH6
  Gene Name: maestro heat-like repeat family member 6
  ENSP ID: ENSP00000488703

SEQ ID NO: 48094 - protein, 1044 aa, Homo sapiens
  Payload ID: 9735
  Gene Symbol: MROH7
  Gene Name: maestro heat-like repeat family member 7
  ENSP ID: ENSP00000343211
MALSPGANLVFHEDPKMTPSPPSCGAPGLGSGTIPQPHPDMAQVPMLNLLPSPGLALVPDLNDSLSPVSGEASGLVSENTPRPDDSRAIAPASLQITSSCSGEALDLDSKDVSRPDSQGRLCPASNPILSPSSTEAPRLSSGNHPQSNSEDAFKCLSSKIFKLGQRNSNPSRHELNPFIRHHSREGLVLGHCISRPSSKALLIPTSNSSLDLDSNPLLNMGSRNTSKLNLNVAPDSHGTLIPDTNETITLASHNISESVSKGAFSTTWSTSSKETMNVASSGHSRSDLSVTITQASYVTLIPGSSYGISLHSSTHEPNSTISPPSCMTLILGSNETLSLDSSLLFSDTSTLTLSSQQDDAKDNSIHTVPLEENLESWSEMASIKVGQFPLGFPISNPAGKDAVTLQGIPEGAFDEVTSCLVKVPEKTEGGNNMALVENVTTLQKSQDLLEAEGEKKTMIKKIMRQIQEEPLDSLSSSVRKQAMEILTQLSHTQPTLGMRERSELVNVCVHSVFSLPSVQAMQEKDEAKAETIQALYHQTLEALQTLLKALFIEDPTPAGLKSILEALGPWMNSGKAHERARAVNTNVSVLNHMLLTLPFFMPLGFPALGLLLGRLILHIGDPDEEIGCEALDGIIILYTILELQKRARDKEETNKKELYESNKHFLGPYNPVSPCQNILRVIEEFGDFLGPQQIKDLLLAALEGLKGSSEAPGKDSREMMQLASEVMLSSVLEWYRHRALEVIPEIMQGIYMQLSHIQEPRARQVALLPVSLLASSFMTEVVVALLMCPLPLNSNGAEMWRQLILCKPSCDVRDLLDLLLGSLKEKPVTKEGRASIVPLAAASGLCELLSVNSCMGRVRRIYPQLLLALLIQVHYHIGLNLPGCVAPPKDTKKGAQPSPFVPVRWVVKVVKTLLLRMGCSYETTFLEDQGGWELMEQVESHHRGVALLARAMVQYSCQELCRILYLLIPLLERGDEKHRITATAFFVEQPCEEGIVILMLRISWERQQQAVTGARSWRVTHSALPHGADGHQTETSSNLLVLQV

SEQ ID NO: 48095 - protein, 1030 aa, Homo sapiens
  Payload ID: 9735
  Gene Symbol: MROH7
  Gene Name: maestro heat-like repeat family member 7
  Uniprot ID: Q68CQ1
  ENSP ID: ENSP00000379044
MALSPGANLVFHEDPKMTPSPPSCGAPGLGSGTIPQPHPDMAQVPMLNLLPSPGLALVPDLNDSLSPVSGEASGLVSENTPRPDDSRAIAPASLQITSSCSGEALDLDSKDVSRPDSQGRLCPASNPILSPSSTEAPRLSSGNHPQSNSEDAFKCLSSKIFKLGQRNSNPSRHELNPFIRHHSREGLVLGHCISRPSSKALLIPTSNSSLDLDSNPLLNMGSRNTSKLNLNVAPDSHGTLIPDTNETITLASHNISESVSKGAFSTTWSTSSKETMNVASSGHSRSDLSVTITQASYVTLIPGSSYGISLHSSTHEPNSTISPPSCMTLILGSNETLSLDSSLLFSDTSTLTLSSQQDDAKDNSIHTVPLEENLESWSEMASIKVGQFPLGFPISNPAGKDAVTLQGIPEGAFDEVTSCLVKVPEKTEGGNNMALVENVTTLQKSQDLLEAEGEKKTMIKKIMRQIQEEPLDSLSSSVRKQAMEILTQLSHTQPTLGMRERSELVNVCVHSVFSLPSVQAMQEKDEAKAETIQALYHQTLEALQTLLKALFIEDPTPAGLKSILEALGPWMNSGKAHERARAVNTNVSVLNHMLLTLPFFMPLGFPALGLLLGRLILHIGDPDEEIGCEALDGIIILYTILELQKRARDKEETNKKELYESNKHFLGPYNPVSPCQNILRVIEEFGDFLGPQQIKDLLLAALEGLKGSSEAPGKDSREMMQLASEVMLSSVLEWYRHRALEVIPEIMQGIYMQLSHIQEPRARQVALLPVSLLASSFMTEVVVALLMCPLPLNSNGAEMWRQLILCKPSCDVRDLLDLLLGSLKEKPVTKEGRASIVPLAAASGLCELLSVNSCMGRVRRIYPQLLLALLIQVHYHIGLNLPGCVAPPKDTKKGAQPSPFVPVRWVVKVVKTLLLRMGCSYETTFLEDQGGWELMEQVESHHRGVALLARAMVQYSCQELCRILYLLIPLLERGDEKHRITATAFFVEQPCEEGIVILMLRPQDLMGKATTSSHRGSELESDTLSFATWC

SEQ ID NO: 48096 - protein, 891 aa, Homo sapiens
  Payload ID: 9735
  Gene Symbol: MROH7
  Gene Name: maestro heat-like repeat family member 7
  ENSP ID: ENSP00000387048
MALVENVTTLQKSQDLLEAEGEKKTMIKKIMRQIQEEPLDSLSSSVRKQAMEILTQLSHTQPTLGMRERSELVNVCVHSVFSLPSVQAMQEKDEAKAETIQALYHQTLEALQTLLKALFIEDPTPAGLKSILEALGPWMNSGKAHERARAVNTNVSVLNHMLLTLPFFMPLGFPALGLLLGRLILHIGDPDEEIGCEALDGIIILYTILELQKRARDKEETNKKELYESNKHFLGPYNPVSPCQNILRVIEEFGDFLGPQQIKDLLLAALEGLKGSSEAPGKDSREMMQLASEVMLSSVLEWYRHRALEVIPEIMQGIYMQLSHIQEPRARQVALLPVSLLASSFMTEVVVALLMCPLPLNSNGAEMWRQLILCKPSCDVRDLLDLLLGSLKEKPVTKEGRASIVPLAAASGLCELLSVNSCMGRVRRIYPQLLLALLIQVHYHIGLNLPGCVAPPKDTKKGAQPSPFVPVRWVVKVVKTLLLRMGCSYETTFLEDQGGWELMEQVESHHRGVALLARAMVQYSCQELCRILYLLIPLLERGDEKHRITATAFFVELLQMEQVRRIPEEYSLGRMAEGLSHHDPIMKVLSIRGLVILARRSEKTAKVKALLPSMVKGLKNMDGMLVVEAVHNLKAVFKGRDQKLMDSAVYVEMLQILLPHFSDAREVVRSSCINLYGKVVQKLRAPRTQAMEEQLVSTLVPLLLTMQEGNSKVSQKCVKTLLRCSYFMAWELPKRAYSRKPWDNQQQTVAKICKCLVNTHRDSAFIFLSQSLEYAKNSRASLRKCSVMFIGSLVPCMESIMTEDRLNEVKAALDNLRHDPEASVCIYAAQVQDHILASCWQNSWLPHGNSWVCYSATTHRWSPSCENLPTSHQRRSWIMQALGSWKMSLKK

SEQ ID NO: 48097 - protein, 627 aa, Homo sapiens
  Payload ID: 9735
  Gene Symbol: MROH7
  Gene Name: maestro heat-like repeat family member 7
  Uniprot ID: Q68CQ1
  ENSP ID: ENSP00000388181
MALSPGANLVFHEDPKMTPSPPSCGAPGLGSGTIPQPHPDMAQVPMLNLLPSPGLALVPDLNDSLSPVSGEASGLVSENTPRPDDSRAIAPASLQITSSCSGEALDLDSKDVSRPDSQGRLCPASNPILSPSSTEAPRLSSGNHPQSNSEDAFKCLSSKIFKLGQRNSNPSRHELNPFIRHHSREGLVLGHCISRPSSKALLIPTSNSSLDLDSNPLLNMGSRNTSKLNLNVAPDSHGTLIPDTNETITLASHNISESVSKGAFSTTWSTSSKETMNVASSGHSRSDLSVTITQASYVTLIPGSSYGISLHSSTHEPNSTISPPSCMTLILGSNETLSLDSSLLFSDTSTLTLSSQQDDAKDNSIHTVPLEENLESWSEMASIKVGQFPLGFPISNPAGKDAVTLQGIPEGAFDEVTSCLVKVPEKTEGGNNMALVENVTTLQKSQDLLEAEGEKKTMIKKIMRQIQEEPLDSLSSSVRKQAMEILTQLSHTQPTLGMRERSELVNVCVHSVFSLPSVQAMQEKDEAKAETIQALYHQTLEALQTLLKALFIEDPTPAGLKSILEALGPWMNSGKAHERARAVNTNVSVLNHMLLTLPFFIAIQTDALGVPGAGASAGETHPSHWGS

SEQ ID NO: 48098 - protein, 627 aa, Homo sapiens; identical to SEQ ID NO: 48097
  Payload ID: 9735
  Gene Symbol: MROH7
  Gene Name: maestro heat-like repeat family member 7
  Uniprot ID: Q68CQ1
  ENSP ID: ENSP00000394373

SEQ ID NO: 48099 - protein, 1323 aa, Homo sapiens
  Payload ID: 9735
  Gene Symbol: MROH7
  Gene Name: maestro heat-like repeat family member 7
  Uniprot ID: Q68CQ1
  ENSP ID: ENSP00000396622
MALSPGANLVFHEDPKMTPSPPSCGAPGLGSGTIPQPHPDMAQVPMLNLLPSPGLALVPDLNDSLSPVSGEASGLVSENTPRPDDSRAIAPASLQITSSCSGEALDLDSKDVSRPDSQGRLCPASNPILSPSSTEAPRLSSGNHPQSNSEDAFKCLSSKIFKLGQRNSNPSRHELNPFIRHHSREGLVLGHCISRPSSKALLIPTSNSSLDLDSNPLLNMGSRNTSKLNLNVAPDSHGTLIPDTNETITLASHNISESVSKGAFSTTWSTSSKETMNVASSGHSRSDLSVTITQASYVTLIPGSSYGISLHSSTHEPNSTISPPSCMTLILGSNETLSLDSSLLFSDTSTLTLSSQQDDAKDNSIHTVPLEENLESWSEMASIKVGQFPLGFPISNPAGKDAVTLQGIPEGAFDEVTSCLVKVPEKTEGGNNMALVENVTTLQKSQDLLEAEGEKKTMIKKIMRQIQEEPLDSLSSSVRKQAMEILTQLSHTQPTLGMRERSELVNVCVHSVFSLPSVQAMQEKDEAKAETIQALYHQTLEALQTLLKALFIEDPTPAGLKSILEALGPWMNSGKAHERARAVNTNVSVLNHMLLTLPFFMPLGFPALGLLLGRLILHIGDPDEEIGCEALDGIIILYTILELQKRARDKEETNKKELYESNKHFLGPYNPVSPCQNILRVIEEFGDFLGPQQIKDLLLAALEGLKGSSEAPGKDSREMMQLASEVMLSSVLEWYRHRALEVIPEIMQGIYMQLSHIQEPRARQVALLPVSLLASSFMTEVVVALLMCPLPLNSNGAEMWRQLILCKPSCDVRDLLDLLLGSLKEKPVTKEGRASIVPLAAASGLCELLSVNSCMGRVRRIYPQLLLALLIQVHYHIGLNLPGCVAPPKDTKKGAQPSPFVPVRWVVKVVKTLLLRMGCSYETTFLEDQGGWELMEQVESHHRGVALLARAMVQYSCQELCRILYLLIPLLERGDEKHRITATAFFVELLQMEQVRRIPEEYSLGRMAEGLSHHDPIMKVLSIRGLVILARRSEKTAKVKALLPSMVKGLKNMDGMLVVEAVHNLKAVFKGRDQKLMDSAVYVEMLQILLPHFSDAREVVRSSCINLYGKVVQKLRAPRTQAMEEQLVSTLVPLLLTMQEGNSKVSQKCVKTLLRCSYFMAWELPKRAYSRKPWDNQQQTVAKICKCLVNTHRDSAFIFLSQSLEYAKNSRASLRKCSVMFIGSLVPCMESIMTEDRLNEVKAALDNLRHDPEASVCIYAAQVQDHILASCWQNSWLPHGNSWVCYSATTHRWSPSCENLPTSHQRRSWIMQALGSWKMSLKK

SEQ ID NO: 48100 - protein, 70 aa, Homo sapiens
  Payload ID: 9735
  Gene Symbol: MROH7
  Gene Name: maestro heat-like repeat family member 7
  ENSP ID: ENSP00000399703
MALVENVTTLQKSQDLLEAEGEKKTMIKKIMPHPAHPGHAGEVGAGERVCAQRVLPALRAGDAGEGRGQG

SEQ ID NO: 48101 - protein, 754 aa, Homo sapiens
  Payload ID: 9735
  Gene Symbol: MROH7
  Gene Name: maestro heat-like repeat family member 7
  ENSP ID: ENSP00000402209
MALSPGANLVFHEDPKMTPSPPSCGAPGLGSGTIPQPHPDMAQVPMLNLLPSPGLALVPDLNDSLSPVSGEASGLVSENTPRPDDSRAIAPASLQITSSCSGEALDLDSKDVSRPDSQGRLCPASNPILSPSSTEAPRLSSGNHPQSNSEDAFKCLSSKIFKLGQRNSNPSRHELNPFIRHHSREGLVLGHCISRPSSKALLIPTSNSSLDLDSNPLLNMGSRNTSKLNLNVAPDSHGTLIPDTNETITLASHNISESVSKGAFSTTWSTSSKETMNVASSGHSRSDLSVTITQASYVTLIPGSSYGISLHSSTHEPNSTISPPSCMTLILGSNETLSLDSSLLFSDTSTLTLSSQQDDAKDNSIHTVPLEENLESWSEMASIKVGQFPLGFPISNPAGKDAVTLQGIPEGAFDEVTSCLVKVPEKTEGGNNMALVENVTTLQKSQDLLEAEGEKKTMIKKIMRQIQEEPLDSLSSSVRKQAMEILTQLSHTQPTLGMRERSELVNVCVHSVFSLPSVQAMQEKDEAKAETIQALYHQTLEALQTLLKALFIEDPTPAGLKSILEALGPWMNSGKAHERARAVNTNVSVLNHMLLTLPFFMPLGFPALGLLLGRLILHIGDPDEEIGCEALDGIIILYTILELQKRARDKEETNKKELYESNKHFLGPYNPVSPCQNILRVIEEFGDFLGPQQIKDLLLAALEGLKGSSEAPGKDSREMMQLASEVMLSSVLEWYRHRALEVQWSRDVEAADTV

SEQ ID NO: 48102 - protein, 627 aa, Homo sapiens; identical to SEQ ID NO: 48097
  Payload ID: 9735
  Gene Symbol: MROH7
  Gene Name: maestro heat-like repeat family member 7
  Uniprot ID: Q68CQ1
  ENSP ID: ENSP00000404780

SEQ ID NO: 48103 - protein, 1069 aa, Homo sapiens
  Payload ID: 9736
  Gene Symbol: MROH8
  Gene Name: maestro heat-like repeat family member 8
  ENSP ID: ENSP00000339971
  MOD_RES (1)..(1): Any amino acid
XVAGTPTSSQPSFGPSIRERPSQSLCPCPCPAGEGDPAWPALERRLVTSRGRQPSPQSHAQLLTRRRHSSEQVPPESEPRADFRSGKWLQEPATGDARDSRQALRARMSSKHRICSQEEVVIPCAYDSDSESVDLELSNLEIIKKGSSSIELTDLDIPDIPGLHCEPLSHSPRHLTQQDPLSEAIVEKLIQSIQKVFNGELKGELEKLKFLGDLSSLSQALPYDETAKSFIHSHIADIVHTLNVLVQEERPHSLSSSMRQEVFVTIADLSYQDVHLLLGSEDRAELFSLTIKSIITLPSVRTLTQIQEIMPNGTCNTECLYRQTFQAFSEMLQSLVVKDPHLENLDTIIKHLVPWLQSVKDHERERATASMAQVLKCLSKHLNLKLPLRFQRLGHLVALMALLCGDPQEKVAEEAAEGIHSLLHITLRLKYITHDKKDQQNLKRALTKCREFLELHSSAAKCFYNCPFRIAQVFEGFLDSNELCQFIMTTFDTLKTLKHPCIQRSAGELLLTLAKNTESQFEKVPEIMGVICAQLSIISQPRVRQQIINTVSLFISRPKYTDIVLSFLLCHPVPYNRHLAEVWRMLSVELPSTTWILWRLLRKLQKCHNEPAQEKMAYVAVAATDALYEVFLGNRLRAATFRLFPQLLMTLLIQIHHSIGLTMSDVDIPSGLYTEQEVPSEVTPLCFAMQATKTLLLRTCCLQEFNIMEKNKGWALLGGKDGHLQGLFLLANALLERNQLLAQKVMYLLVPLLNRGNDKHKLTSAGFFVELLRSPVAKRLPSIYSVARFKDWLQDGNHLFRILGLRGLYNLVGHQEMREDIKSLLPYIVDSLRETDEKIVLSAIQILLQLVRTMDFTTLAAMMRTLFSLFGDVRSDVHRFSVTLFGAAIKSVKNPDKKSIENQVLDSLVPLLLYSQDENDAVAEESRQVLTICAQFLKWKLPQEVYSKDPWHIKPTEAGTICRFFEKKCKGKINILEQTLMYSKNPKLPIRRSAVLFVGLLSKYMDHNELRRMGTDWIEDDLRDLLCDPEPSLCIIASQTLLLVQMARAEPKPKQRVNWLQKLMGRSSA

SEQ ID NO: 48104 - protein, 629 aa, Homo sapiens
  Payload ID: 9736
  Gene Symbol: MROH8
  Gene Name: maestro heat-like repeat family member 8
  ENSP ID: ENSP00000383290
  MOD_RES (1)..(1): Any amino acid
XQPRQVAGTPTSSQPSFGPSIRERPSQSLCPCPCPAGEGDPAWPALERRLVTSRGRQPSPQSHAQLLTRRRHSSEQVPPESEPRADFRSGKWLQEPATGDARDSRQALRARMSSKHRICSQEEVVIPCAYDSDSESVDLELSNLEIIKKGSSSIELTDLDIPDIPGLHCEPLSHSPRHLTQQDPLSEAIVEKLIQSIQKVFNGELKGELEKLKFLGDLSSLSQALPYDETAKSFIHSHIADIVHTLNVLVQEERPHSLSSSMRQEVFVTIADLSYQDVHLLLGSEDRAELFSLTIKSIITLPSVRTLTQIQEIMPNGTCNTECLYRQTFQAFSEMLQSLVVKDPHLENLDTIIKHLVPWLQSVKDHERERATASMAQVLKCLSKHLNLKLPLRFQRLGHLVALMALLCGDPQEKVAEEAAEGIHSLLHITLRLKYITHDKKDQQNLKRALTKCREFLELHSSAAKCFYNCPFRIAQVFEGFLDSNELCQFIMTTFDTLKTLKHPCIQRSAGELLLTLAKNTESQFEKVPEIMGVICAQLSIISQPRVRQQIINTVSLFISRPKYTDIVLSFLLCHPVPYNRHLAEVWRMLSVELPSTTWILWRLLRKLQKCHNEPAQEKMAYVAVAVSP

SEQ ID NO: 48105 - protein, 946 aa, Homo sapiens
  Payload ID: 9736
  Gene Symbol: MROH8
  Gene Name: maestro heat-like repeat family member 8
  ENSP ID: ENSP00000383291
MPLSRRGRGSRLAGSRAATSNLPRATALSPKHAQLLTRRRHSSEQVPPESEPRADFRSGKWLQEPATGDARDSRQALRARMSSKHRICSQEEVVIPCAYDSDSESVDLELSNLEIIKKGSSSIELTDLDIPDIPGLHCEPLSHSPRHLTQQDPLSEAIVEKLIQSIQKVFNGELKGELEKLKFLGDLSSLSQALPYDETAKSFIHSHIADIVHTLNVLVQEERPHSLSSSMRQEVFVTIADLSYQDVHLLLGSEDRAELFSLTIKSIITLPSVRTLTQIQEIMPNGTCNTECLYRQTFQAFSEMLQSLVVKDPHLENLDTIIKHLVPWLQSVKDHERERATASMAQVLKCLSKHLNLKLPLRFQRLGHLVALMALLCGDPQEKVAEEAAEGIHSLLHITLRLKYITHDKKDQQNLKRALTKCREFLELHSSAAKCFYNCPFRIAQVFEGFLDSNELCQFIMTTFDTLKTLKHPCIQRSAGELLLTLAKNTESQFEKVPEIMGVICAQLSIISQPRVRQQIINTVSLFISRPKYTDIVLSFLLCHPVPYNRHLAEVWRMLSVELPSTTWILWRLLRKLQKCHNEPAQEKMAYVAVAATDALYEVFLGNRLRAATFRLFPQLLMTLLIQIHHSIGLTMSDVDIPSGLYTEQEVPSEVTPLCFAMQATKTLLLRTCCLQEFNIMEKNKGWALLGGKDGHLQGLFLLANALLERNQLLAQKVMYLLVPLLNRGNDKHKLTSAGFFVELLRSPVAKRLPSIYSVARFKDWLQDGNHLFRILGLRGLYNLVGHQEMREDIKSLLPYIVDSLRETDEKIVLSAIQILLQLVRTMDFTTLAAMMRTLFSLFGDVRSDVHRFSVTLFGAAIKSVKNPDKKSIENQVLDSLVPLLLYSQDENDAVAEESRQVLTICAQFLKWKLPQEVYSKDPWHIKPTEAGTICRFFGKKVQGEN

SEQ ID NO: 48106 - protein, 34 aa, Homo sapiens
  Payload ID: 9736
  Gene Symbol: MROH8
  Gene Name: maestro heat-like repeat family member 8
  ENSP ID: ENSP00000389695
MRQEVFVTIADLSYQDVHLLLGSEDRAELFSLTI

SEQ ID NO: 48107 - protein, 24 aa, Homo sapiens
  Payload ID: 9736
  Gene Symbol: MROH8
  Gene Name: maestro heat-like repeat family member 8
  ENSP ID: ENSP00000400468
MRQEVFVTIADLSYQDVHLLLGSE

SEQ ID NO: 48108 - protein, 600 aa, Homo sapiens
  Payload ID: 9736
  Gene Symbol: MROH8
  Gene Name: maestro heat-like repeat family member 8
  Uniprot ID: Q9H579
  ENSP ID: ENSP00000413544
  MOD_RES (1)..(1): Any amino acid
XHPSPRHQPRQVAGTPTSSQPSFGPSIRERPSQSLCPCPCPAGEGDPAWPALERRLVTSRGRQPSPQSHAQLLTRRRHSSEQVPPESEPRADFRSGKWLQEPATGDARDSRQALRARMSSKHRICSQEEVVIPCAYDSDSESVDLELSNLEIIKKGSSSIELTDLDIPDIPGLHCEPLSHSPRHLTQQDPLSEAIVEKLIQSIQKVFNGELKGELEKLKFLGDLSSLSQALPYDETAKSFIHSHIADIVHTLNVLVQEERPHSLSSSMRQEVFVTIADLSYQDVHLLLGSEDRAELFSLTIKSIITLPSVRTLTQIQEIMPNGTCNTECLYRQTFQAFSEMLQSLVVKDPHLENLDTIIKLPLRFQRLGHLVALMALLCGDPQEKVAEEAAEGIHSLLHITLRLKYITHDKKDQQNLKRALTKCREFLELHSSAAKCFYNCPFRIAQVFEGFLDSNELCQFIMTTFDTLKTLKHPCIQRSAGELLLTLAKNTESQFEKVPEIMGVICAQLSIISQPRVRQQIINTVSLFISRPKYTDIVLSFLLCHPVPYNRHLAEVWRMLSVELPSTTWILWRLLRKLQKCHNEPAQEKMAYVAVAVSP

SEQ ID NO: 48109 - protein, 670 aa, Homo sapiens
  Payload ID: 9736
  Gene Symbol: MROH8
  Gene Name: maestro heat-like repeat family member 8
  ENSP ID: ENSP00000415930
  MOD_RES (1)..(1): Any amino acid
XCNTECLYRQTFQAFSEMLQSLVVKDPHLENLDTIIKLPLRFQRLGHLVALMALLCGDPQEKVAEEAAEGIHSLLHITLRLKYITHDKKDQQNLKRALTKCREFLELHSSAAKCFYNCPFRIAQVPEIMGVICAQLSIISQPRVRQQIINTVSLFISRPKYTDIVLSFLLCHPVPYNRHLAEVWRMLSVELPSTTWILWRLLRKLQKCHNEPAQEKMAYVAVAATDALYEVFLGNRLRAATFRLFPQLLMTLLIQIHHSIGLTMSDVDIPSGLYTEQEVPSEVTPLCFAMQATKTLLLRTCCLQEFNIMEKNKGWALLGGKDGHLQGLFLLANALLERNQLLAQKVMYLLVPLLNRGNDKHKLTSAGFFVELLRSPVAKRLPSIYSVARFKDWLQDGNHLFRILGLRGLYNLVGHQEMREDIKSLLPYIVDSLRETDEKIVLSAIQILLQLVRTMDFTTLAAMMRTLFSLFGDVRSDVHRFSVTLFGAAIKSVKNPDKKSIENQVLDSLVPLLLYSQDENDAVAEESRQVLTICAQFLKWKLPQEVYSKDPWHIKPTEAGTICRFFEKKCKGKINILEQTLMYSKNPKLPIRRSAVLFVGLLSKYMDHNELRRMGTDWIEDDLRDLLCDPEPSLCIIASQTLLLVQMARAEPKPKQRVNWLQKLMGRSSA

SEQ ID NO: 48110 - protein, 573 aa, Homo sapiens
  Payload ID: 9737
  Gene Symbol: MROH9
  Gene Name: maestro heat-like repeat family member 9
  Uniprot ID: Q5TGP6
  ENSP ID: ENSP00000356732
MLTRNPKTKSSLQILQDSVKWHHMAHKVNSLLDAYSGLLSNESMILAVNSSFVDPLLQFESQLKIIESSFGMLVVMPSLDKVKEMGSSYEYIEDMENLYHNILNIYENILTSLVSKDLYKLQILKEMLVWMSKDSSYLQERIMVIINKVLRFTVTKVRKYISVDAPCLGLLAAELSLLCSHEDPSIVKQASLGMCHLLYIARCQNDIGTNKPTNGKSHSLQFPSSDVEFLPKEFQQDESKIAQRVGQTLLPPLLTDFVQSLLMKLSSPDDKIASDAASILIFTLEFHAEKVTMVSKIVDAIYRQLCDNNCMKDVMLQVITLLTCTSPKKVIFQLMDYPVPADDTLIQMWKAACSQASVAPHVLKTILLILKGKPGEMEDTVTEGKRFSLDITNLMPLAACQALCTFLPLGSYRKAVAQYFPQLLTTLMFQVFYNSELKPILKDRALYAQDALRVLLNCSGLQQVDITLMKENFWDQLSEDLCYYHGVCFIAKTLSEYNFPQFPETLSYLYKLSVEGPRRSEDTVIVLIFLTEVSFVDCEQLCSHFLFLPKFKSKFQFLVSLPLNVGSYQDLRS

SEQ ID NO: 48111 - protein, 861 aa, Homo sapiens
  Payload ID: 9737
  Gene Symbol: MROH9
  Gene Name: maestro heat-like repeat family member 9
  Uniprot ID: Q5TGP6
  ENSP ID: ENSP00000356733
MLTRNPKTKSSLQILQDSVKWHHMAHKVNSLLDAYSGLLSNESMILAVNSSFVDPLLQFESQLKIIESSFGMLVVMPSLDKVKEMGSSYEYIEDMENLYHNILNIYENILTSLVSKDLYKLQILKEMLVWMSKDSSYLQERIMVIINKVLRFTVTKVRKYISVDAPCLGLLAAELSLLCSHEDPSIVKQASLGMCHLLYIARCQNDIGTNKPTNGKSHSLQFPSSDVEFLPKEFQQDESKIAQRVGQTLLPPLLTDFVQSLLMKLSSPDDKIASDAASILIFTLEFHAEKVTMVSKIVDAIYRQLCDNNCMKDVMLQVITLLTCTSPKKVIFQLMDYPVPADDTLIQMWKAACSQASVAPHVLKTILLILKGKPGEMEDTVTEGKRFSLDITNLMPLAACQALCTFLPLGSYRKAVAQYFPQLLTTLMFQVFYNSELKPILKDRALYAQDALRVLLNCSGLQQVDITLMKENFWDQLSEDLCYYHGVCFIAKTLSEYNFPQFPETLSYLYKLSVEGPRRSEDTVIVLIFLTELLNNFFKDPLPEEFLVLFINWINDSNPVVSRLILHRIVHMSPIINKTENVSSILIAILDAFLSKDDNVVLQALLTLRRLLNELDKVTYSLGTRIGSSYCTLMDHINGGIRSMAIRHFGQLVRDMRQYTWMVNDVVLEGLVPLILFLEDDDKRVAEACKYTLKICTSQLKWSTSRLLKDENYSFEMVVLNICNNLIISHRNYITDLTSDTLRFLWSPRTYLKRASVILIGYLAKSGGHLLLRDEIEVMLDVIERLLRDEDPMIKQLAEITYDIFKKKAHKLTSAPLKQNFQKLLKLFYIKKLKPLYNYNSPNGQIDSPTDSKDVKNDKAL

SEQ ID NO: 48112 - protein, 187 aa, Homo sapiens
  Payload ID: 9737
  Gene Symbol: MROH9
  Gene Name: maestro heat-like repeat family member 9
  ENSP ID: ENSP00000403697
  MOD_RES (1)..(1): Any amino acid
XMPLAACQALCTFLPLGSYRKAVAQYFPQLLTTLMFQVFYNSELKPILKDRALYAQDALRVLLNCSGLQQVDITLMKENFWDQLSEDLCYYHGVCFIAKTLSEYNFPQFPETLSYLYKLSVEGPRRSEDTVIVLIFLTELLNNFFKDPLPEEFLVLFINWINDSNPVVSRLILHRIVHMSPIINKVD

SEQ ID NO: 48113 - protein, 256 aa, Homo sapiens
  Payload ID: 9738
  Gene Symbol: MAF1
  Gene Name: MAF1 homolog, negative regulator of RNA polymerase III
  Uniprot ID: Q9H063
  ENSP ID: ENSP00000318604
MKLLENSSFEAINSQLTVETGDAHIIGRIESYSCKMAGDDKHMFKQFCQEGQPHVLEALSPPQTSGLSPSRLSKSQGGEEEGPLSDKCSRKTLFYLIATLNESFRPDYDFSTARSHEFSREPSLSWVVNAVNCSLFSAVREDFKDLKPQLWNAVDEEICLAECDIYSYNPDLDSDPFGEDGSLWSFNYFFYNKRLKRIVFFSCRSISGSTYTPSEAGNELDMELGEEEVEEESRSGGSGAEETSTMEEDRVPVICI

SEQ ID NO: 48114 - protein, 70 aa, Homo sapiens
  Payload ID: 9738
  Gene Symbol: MAF1
  Gene Name: MAF1 homolog, negative regulator of RNA polymerase III
  ENSP ID: ENSP00000431907
MKLLENSSFEAINSQLTVETGDAHIIGRIESYSCKMAGDDKHMFKQFCQEGQPHVLEALSPPQTSGLSPS

SEQ ID NO: 48115 - protein, 286 aa, Homo sapiens
  Payload ID: 9738
  Gene Symbol: MAF1
  Gene Name: MAF1 homolog, negative regulator of RNA polymerase III
  ENSP ID: ENSP00000433979
MKLLENSSFEAINSQLTVETGDAHIIGRIESYSCKMAGDDKHMFKQFCQEGQPHVLEALSPPQTSGLSPSRLSKSQGGEEEGPLSDKCSRKTLFYLIATLNESFRPDYDFSTARSHEFSREPSLSWVVNAVNCSLFSAVREDFKDLKPQLWNAVDEEICLAECDIYRWAGIPADGLQASRFVGHLAPHTTCHPILPSYNPDLDSDPFGEDGSLWSFNYFFYNKRLKRIVFFSCRSISGSTYTPSEAGNELDMELGEEEVEEESRSGGSGAEETSTMEEDRVPVICI

SEQ ID NO: 48116 - protein, 252 aa, Homo sapiens
  Payload ID: 9738
  Gene Symbol: MAF1
  Gene Name: MAF1 homolog, negative regulator of RNA polymerase III
  ENSP ID: ENSP00000436030
MKLLENSSFEAINSQLTVETGDAHIIGRIESYSCKMAGDDKHMFKQFCQEGQPHVLEALSPPQTSGLSPSRLSKSQGGEEEGPLSDKCSRKTLFYLIATLNESFRPDYDFSTARSHEFSREPSLSWVVNAVNCSLFSAVREDFKDLKPQLWNAVDEEICLAECDIYRWAGIPADGLQASRFVGHLAPHTTCHPILPSYNPDLDSDPFGEDGSLWSFNYFFYNKRLKRIVFFSCRSISGSTYTPSEAGNELDM

SEQ ID NO: 48117 - protein, 164 aa, Homo sapiens
  Payload ID: 9738
  Gene Symbol: MAF1
  Gene Name: MAF1 homolog, negative regulator of RNA polymerase III
  ENSP ID: ENSP00000436639
LWSFNYFFYNKRLKRIVFFSCRSISGSTYTPSEAGNELDMELGEEEVEEESRSGGSGAEETSTMEEDRCVMGAMTRVLEAWSGYNRVGASSTWSKWWLLKAHCVPTSAQGPSDLYLMRRSRGPSFIQLQPMPGPVHLRGPWGLPSCWPDPGAATVLALPKAIPA

SEQ ID NO: 48118 - protein, 256 aa, Homo sapiens; identical to SEQ ID NO: 48113
  Payload ID: 9738
  Gene Symbol: MAF1
  Gene Name: MAF1 homolog, negative regulator of RNA polymerase III
  Uniprot ID: Q9H063
  ENSP ID: ENSP00000436720

SEQ ID NO: 48119 - protein, 124 aa, Homo sapiens
  Payload ID: 9739
  Gene Symbol:
  Gene Name: MaFF-interacting protein  [Source:UniProtKB/Swiss-Prot
  Acc:Q8WZ33]
  Uniprot ID: Q8WZ33
  ENSP ID: ENSP00000483280
MLCPRAAFLVGSFHGVFPGPPASSHWEFWVPSTPVGAYFCPPQPQLTPPNTPKLVSEVEELYKSITALREKLLQAEQSLRNLKDIHMSLEKDVTAMTNSVFIDRQKCMAHRTCYPTILQLAGYQ

SEQ ID NO: 48120 - protein, 143 aa, Homo sapiens
  Payload ID: 9740
  Gene Symbol: MAGIX
  Gene Name: MAGI family member, X-linked
  ENSP ID: ENSP00000400147
MSPNSPLHCFYLPAVSVLDSADIEVTDSRLPHATIVDHRPQVGDLVLHINGESTQGLTHAQAVERIRAGGPQLHLVIRRPLETHPGKPRGVGEPRKGVDRSPDPGGPEVTGSRSSSTSLVQHPPSRTTLKKTRGSPEPSPEAA

SEQ ID NO: 48121 - protein, 334 aa, Homo sapiens
  Payload ID: 9740
  Gene Symbol: MAGIX
  Gene Name: MAGI family member, X-linked
  ENSP ID: ENSP00000471299
MEPRTGDAADPRGSRGGRGPSPLAGPSARQLLARLDARPLAARAAVDVAALVRRAGATLRLRRKEAVSVLDSADIEVTDSRLPHATIVDHRPQHRWLETCNAPPQLIQGKARSAPKPSQASGHFSVELVRGYAGFGLTLGGGRDVAGDTPLAVRGLLKDGPAQRCGRLEVGDLVLHINGESTQGLTHAQAVERIRAGGPQLHLVIRRPLETHPGKPRGVGEPRKGVVPSWPDRSPDPGGPEVTGSRSSSTSLVQHPPSRTTLKKTRGSPEPSPEAAADGPTVSPPERRAEDPNDQIPGSPGPWLVPSEERLSRALGVRGAAQLAQEMAAGRRRH

SEQ ID NO: 48122 - protein, 258 aa, Homo sapiens
  Payload ID: 9740
  Gene Symbol: MAGIX
  Gene Name: MAGI family member, X-linked
  ENSP ID: ENSP00000479023
MEPRTGDAADPRGSRGGRGPSPLAGPSARQLLARLDARPLAARAAVDVAALVRRAGATLRLRRKEAVSVLDSADIEVTDSRLPHATIVDHRPQVGDLVLHINGESTQGLTHAQAVERIRAGGPQLHLVIRRPLETHPGKPRGVGEPRKGVVPSWPDRSPDPGGPEVTGSRSSSTSLVQHPPSRTTLKKTRGSPEPSPEAAADGPTVSPPERRAEDPNDQIPGSPGPWLVPSEERLSRALGVRGAAQLAQEMAAGRRRH

SEQ ID NO: 48123 - protein, 40 aa, Homo sapiens
  Payload ID: 9740
  Gene Symbol: MAGIX
  Gene Name: MAGI family member, X-linked
  ENSP ID: ENSP00000479878
MPLLWITGPRVRHVVLRSHPRPLVISLWSWFAVTQALASP

SEQ ID NO: 48124 - protein, 275 aa, Homo sapiens
  Payload ID: 9740
  Gene Symbol: MAGIX
  Gene Name: MAGI family member, X-linked
  ENSP ID: ENSP00000481198
MPLLWITGPRYHLILLSEASCLRANYVHLCPLFQHRWLETCNAPPQLIQGKARSAPKPSQASGHFSVELVRGYAGFGLTLGGGRDVAGDTPLAVRGLLKDGPAQRCGRLEVGDLVLHINGESTQGLTHAQAVERIRAGGPQLHLVIRRPLETHPGKPRGVGEPRKGVVPSWPDRSPDPGGPEVTGSRSSSTSLVQHPPSRTTLKKTRGSPEPSPEAAADGPTVSPPERRAEDPNDQIPGSPGPWLVPSEERLSRALGVRGAAQLAQEMAAGRRRH

SEQ ID NO: 48125 - protein, 262 aa, Homo sapiens
  Payload ID: 9740
  Gene Symbol: MAGIX
  Gene Name: MAGI family member, X-linked
  ENSP ID: ENSP00000484294
MSPNSPLHCFYLPAVSVLDSADIEVTDSRLPHATIVDHRPQGKARSAPKPSQASGHFSVELVRGYAGFGLTLGGGRDVAGDTPLAVRGLLKDGPAQRCGRLEVGDLVLHINGESTQGLTHAQAVERIRAGGPQLHLVIRRPLETHPGKPRGVGEPRKGVDRSPDPGGPEVTGSRSSSTSLVQHPPSRTTLKKTRGSPEPSPEAAADGPTVSPPERRAEDPNDQIPGSPGPWLVPSEERLSRALGVRGAAQLAQEMAAGRRRH

SEQ ID NO: 48126 - protein, 253 aa, Homo sapiens
  Payload ID: 9740
  Gene Symbol: MAGIX
  Gene Name: MAGI family member, X-linked
  ENSP ID: ENSP00000484729
MEPRTGDAADPRGSRGGRGPSPLAGPSARQLLARLDARPLAARAAVDVAALVRRAGATLRLRRKEAVSVLDSADIEVTDSRLPHATIVDHRPQVGDLVLHINGESTQGLTHAQAVERIRAGGPQLHLVIRRPLETHPGKPRGVGEPRKGVDRSPDPGGPEVTGSRSSSTSLVQHPPSRTTLKKTRGSPEPSPEAAADGPTVSPPERRAEDPNDQIPGSPGPWLVPSEERLSRALGVRGAAQLAQEMAAGRRRH

SEQ ID NO: 48127 - protein, 367 aa, Homo sapiens
  Payload ID: 9741
  Gene Symbol: MAGT1
  Gene Name: magnesium transporter 1
  ENSP ID: ENSP00000354649
MRKGKGPICLFSRPTLRPSRSKVSLIEGRGANMAARWRFWCVSVTMVVALLIVCDVPSASAQRKKEMVLSEKVSQLMEWTNKRPVIRMNGDKFRRLVKAPPRNYSVIVMFTALQLHRQCVVCKQADEEFQILANSWRYSSAFTNRIFFAMVDFDEGSDVFQMLNMNSAPTFINFPAKGKPKRGDTYELQVRGFSAEQIARWIADRTDVNIRVIRPPNYAGPLMLGLLLAVIGGLVYLRRSNMEFLFNKTGWAFAALCFVLAMTSGQMWNHIRGPPYAHKNPHTGHVNYIHGSSQAQFVAETHIVLLFNGGVTLGMVLLCEAATSDMDIGKRKIMCVAGIGLVVLFFSWMLSIFRSKYHGYPYSFLMS

SEQ ID NO: 48128 - protein, 134 aa, Homo sapiens
  Payload ID: 9741
  Gene Symbol: MAGT1
  Gene Name: magnesium transporter 1
  Uniprot ID: Q9H0U3
  ENSP ID: ENSP00000362433
MAARWRFWCVSVTMVVALLIVCDVPSASAQRKKEMVLSEKVSQLMEWTNKRPVIRMNGDKFRRLVKAPPRNYSVIVMFTALQLHRQCVVCKQADEEFQILANSWRYSSAFTNRIFFAMVDFDEGSDVFQMFQVF

SEQ ID NO: 48129 - protein, 367 aa, Homo sapiens; identical to SEQ ID NO: 48127
  Payload ID: 9741
  Gene Symbol: MAGT1
  Gene Name: magnesium transporter 1
  ENSP ID: ENSP00000478379

SEQ ID NO: 48130 - protein, 335 aa, Homo sapiens
  Payload ID: 9741
  Gene Symbol: MAGT1
  Gene Name: magnesium transporter 1
  Uniprot ID: Q9H0U3
  ENSP ID: ENSP00000480732
MAARWRFWCVSVTMVVALLIVCDVPSASAQRKKEMVLSEKVSQLMEWTNKRPVIRMNGDKFRRLVKAPPRNYSVIVMFTALQLHRQCVVCKQADEEFQILANSWRYSSAFTNRIFFAMVDFDEGSDVFQMLNMNSAPTFINFPAKGKPKRGDTYELQVRGFSAEQIARWIADRTDVNIRVIRPPNYAGPLMLGLLLAVIGGLVYLRRSNMEFLFNKTGWAFAALCFVLAMTSGQMWNHIRGPPYAHKNPHTGHVNYIHGSSQAQFVAETHIVLLFNGGVTLGMVLLCEAATSDMDIGKRKIMCVAGIGLVVLFFSWMLSIFRSKYHGYPYSFLMS

SEQ ID NO: 48131 - protein, 176 aa, Homo sapiens
  Payload ID: 9742
  Gene Symbol: MDP1
  Gene Name: magnesium-dependent phosphatase 1
  Uniprot ID: Q86V88
  ENSP ID: ENSP00000288087
MARLPKLAVFDLDYTLWPFWVDTHVDPPFHKSSDGTVRDRRGQDVRLYPEVPEVLKRLQSLGVPGAAASRTSEIEGANQLLELFDLFRYFVHREIYPGSKITHFERLQQKTGIPFSQMIFFDDERRNIVDVSKLGVTCIHIQNGMNLQTLSQGLETFAKAQTGPLRSSLEESPFEA

SEQ ID NO: 48132 - protein, 122 aa, Homo sapiens
  Payload ID: 9742
  Gene Symbol: MDP1
  Gene Name: magnesium-dependent phosphatase 1
  Uniprot ID: Q86V88
  ENSP ID: ENSP00000380045
MARLPKLAVFDLDYTLWPFWVDTHVDPPFHKSSDGTVRDRRGQDVRLYPEVPEVLKRLQSLGVPGAAASRTSEIEGANQLLELFDLFRCYLHSHPEWNESSNSKSRVRDICEGPNWAFEVQP

SEQ ID NO: 48133 - protein, 148 aa, Homo sapiens
  Payload ID: 9743
  Gene Symbol: MAGOHB
  Gene Name: mago homolog B, exon junction complex core component
  Uniprot ID: Q96A72
  ENSP ID: ENSP00000319240
MAVASDFYLRYYVGHKGKFGHEFLEFEFRPDGKLRYANNSNYKNDVMIRKEAYVHKSVMEELKRIIDDSEITKEDDALWPPPDRVGRQELEIVIGDEHISFTTSKIGSLIDVNQSKDPEGLRVFYYLVQDLKCLVFSLIGLHFKIKPI

SEQ ID NO: 48134 - protein, 102 aa, Homo sapiens
  Payload ID: 9743
  Gene Symbol: MAGOHB
  Gene Name: mago homolog B, exon junction complex core component
  ENSP ID: ENSP00000437462
MIRKEAYVHKSVMEELKRIIDDSEITKEDDALWPPPDRVGRQELEIVIGDEHISFTTSKIGSLIDVNQSKDPEGLRVFYYLVQDLKCLVFSLIGLHFKIKPI

SEQ ID NO: 48135 - protein, 90 aa, Homo sapiens
  Payload ID: 9743
  Gene Symbol: MAGOHB
  Gene Name: mago homolog B, exon junction complex core component
  ENSP ID: ENSP00000437512
MAVASDFYLRYYVGHKGKFGHEFLEFEFRPDGKLRYANNSNYKNDVMIRKEAYVHKSVMEELKRIIDDSEITKEDDALWPPPDRVGRQNK

SEQ ID NO: 48136 - protein, 81 aa, Homo sapiens
  Payload ID: 9743
  Gene Symbol: MAGOHB
  Gene Name: mago homolog B, exon junction complex core component
  ENSP ID: ENSP00000437548
MAVASDFYLRYYVGHKGKFGHEFLEFEFRPDGRMKSTKQEGRGKVPQEGVRKIFLEDGTLEMSLEMRDLAFERKKQTSRAV

SEQ ID NO: 48137 - protein, 44 aa, Homo sapiens
  Payload ID: 9743
  Gene Symbol: MAGOHB
  Gene Name: mago homolog B, exon junction complex core component
  ENSP ID: ENSP00000439091
MIRKEAYVHKSVMEELKRIIDDSEITKEDDALWPPPDRVGRQNK

SEQ ID NO: 48138 - protein, 81 aa, Homo sapiens; identical to SEQ ID NO: 48136
  Payload ID: 9743
  Gene Symbol: MAGOHB
  Gene Name: mago homolog B, exon junction complex core component
  ENSP ID: ENSP00000439698

SEQ ID NO: 48139 - protein, 81 aa, Homo sapiens; identical to SEQ ID NO: 48136
  Payload ID: 9743
  Gene Symbol: MAGOHB
  Gene Name: mago homolog B, exon junction complex core component
  ENSP ID: ENSP00000442440

SEQ ID NO: 48140 - protein, 81 aa, Homo sapiens; identical to SEQ ID NO: 48136
  Payload ID: 9743
  Gene Symbol: MAGOHB
  Gene Name: mago homolog B, exon junction complex core component
  ENSP ID: ENSP00000485778

SEQ ID NO: 48141 - protein, 109 aa, Homo sapiens
  Payload ID: 9744
  Gene Symbol: MAGOH
  Gene Name: mago homolog, exon junction complex core component
  Uniprot ID: P61326
  ENSP ID: ENSP00000360521
MESDFYLRYYVGHKGKFGHEFLEFEFRPDGKLRYANNSNYKNDVMIRKEELEIVIGDEHISFTTSKIGSLIDVNQSKDPEGLRVFYYLVQDLKCLVFSLIGLHFKIKPI

SEQ ID NO: 48142 - protein, 146 aa, Homo sapiens
  Payload ID: 9744
  Gene Symbol: MAGOH
  Gene Name: mago homolog, exon junction complex core component
  Uniprot ID: P61326
  ENSP ID: ENSP00000360525
MESDFYLRYYVGHKGKFGHEFLEFEFRPDGKLRYANNSNYKNDVMIRKEAYVHKSVMEELKRIIDDSEITKEDDALWPPPDRVGRQELEIVIGDEHISFTTSKIGSLIDVNQSKDPEGLRVFYYLVQDLKCLVFSLIGLHFKIKPI

SEQ ID NO: 48143 - protein, 576 aa, Homo sapiens
  Payload ID: 9745
  Gene Symbol: MGRN1
  Gene Name: mahogunin ring finger 1, E3 ubiquitin protein ligase
  Uniprot ID: O60291
  ENSP ID: ENSP00000262370
MGSILSRRIAGVEDIDIQANSAYRYPPKSGNYFASHFFMGGEKFDTPHPEGYLFGENMDLNFLGSRPVQFPYVTPAPHEPVKTLRSLVNIRKDSLRLVRYKDDADSPTEDGDKPRVLYSLEFTFDADARVAITIYCQASEEFLNGRAVYSPKSPSLQSETVHYKRGVSQQFSLPSFKIDFSEWKDDELNFDLDRGVFPVVIQAVVDEGDVVEVTGHAHVLLAAFEKHMDGSFSVKPLKQKQIVDRVSYLLQEIYGIENKNNQETKPSDDENSDNSNECVVCLSDLRDTLILPCRHLCLCTSCADTLRYQANNCPICRLPFRALLQIRAVRKKPGALSPVSFSPVLAQSLEHDEHSCPFKKSKPHPASLASKKPKRETNSDSVPPGYEPISLLEALNGLRAVSPAIPSAPLYEEITYSGISDGLSQASCPLAAIDHILDSSRQKGRPQSKAPDSTLRSPSSPIHEEDEEKLSEDVDAPPPLGGAELALRESSSPESFITEEVDESSSPQQGTRAASIENVLQDSSPEHCGRGPPADIYLPGRPTSMETAHGLATTSPTWPPLGGPSPDPSAAELTPL

SEQ ID NO: 48144 - protein, 552 aa, Homo sapiens
  Payload ID: 9745
  Gene Symbol: MGRN1
  Gene Name: mahogunin ring finger 1, E3 ubiquitin protein ligase
  Uniprot ID: O60291
  ENSP ID: ENSP00000382487
MGSILSRRIAGVEDIDIQANSAYRYPPKSGNYFASHFFMGGEKFDTPHPEGYLFGENMDLNFLGSRPVQFPYVTPAPHEPVKTLRSLVNIRKDSLRLVRYKDDADSPTEDGDKPRVLYSLEFTFDADARVAITIYCQASEEFLNGRAVYSPKSPSLQSETVHYKRGVSQQFSLPSFKIDFSEWKDDELNFDLDRGVFPVVIQAVVDEGDVVEVTGHAHVLLAAFEKHMDGSFSVKPLKQKQIVDRVSYLLQEIYGIENKNNQETKPSDDENSDNSNECVVCLSDLRDTLILPCRHLCLCTSCADTLRYQANNCPICRLPFRALLQIRAVRKKPGALSPVSFSPVLAQSLEHDEHSCPFKKSKPHPASLASKKPKRETNSDSVPPGYEPISLLEALNGLRAVSPAIPSAPLYEEITYSGISDGLSQASCPLAAIDHILDSSRQKGRPQSKAPDSTLRSPSSPIHEEDEEKLSEDVDAPPPLGGAELALRESSSPESFITEEVDESSSPQQGTRAASIENVLQDSSPEHCGRGPPADIYLPALGPDSCSVGIDE

SEQ ID NO: 48145 - protein, 530 aa, Homo sapiens
  Payload ID: 9745
  Gene Symbol: MGRN1
  Gene Name: mahogunin ring finger 1, E3 ubiquitin protein ligase
  Uniprot ID: O60291
  ENSP ID: ENSP00000393311
MGSILSRRIAGVEDIDIQANSAYRYPPKSGNYFASHFFMGGEKFDTPHPEGYLFGENMDLNFLGSRPVQFPYVTPAPHEPVKTLRSLVNIRKDSLRLVRYKDDADSPTEDGDKPRVLYSLEFTFDADARVAITIYCQASEEFLNGRAVYSPKSPSLQSETVHYKRGVSQQFSLPSFKIDFSEWKDDELNFDLDRGVFPVVIQAVVDEGDVVEVTGHAHVLLAAFEKHMDGSFSVKPLKQKQIVDRVSYLLQEIYGIENKNNQETKPSDDENSDNSNECVVCLSDLRDTLILPCRHLCLCTSCADTLRYQANNCPICRLPFRALLQIRAVRKKPGALSPVSFSPVLAQSLEHDEHSNSDSVPPGYEPISLLEALNGLRAVSPAIPSAPLYEEITYSGISDGLSQASCPLAAIDHILDSSRQKGRPQSKAPDSTLRSPSSPIHEEDEEKLSEDVDAPPPLGGAELALRESSSPESFITEEVDESSSPQQGTRAASIENVLQDSSPEHCGRGPPADIYLPALGPDSCSVGIDE

SEQ ID NO: 48146 - protein, 320 aa, Homo sapiens
  Payload ID: 9745
  Gene Symbol: MGRN1
  Gene Name: mahogunin ring finger 1, E3 ubiquitin protein ligase
  ENSP ID: ENSP00000443810
MGSILSRRIAGVEDIDIQANSAYRYPPKSGNYFASHFFMGGEKFDTPHPEGYLFGENMDLNFLGSRPVQFPYVTPAPHEPVKTLRSLVNIRKDSLRLVRYKDDADSPTEDGDKPRVLYSLEFTFDADARVAITIYCQASEEFLNGRAVYSPKSPSLQSETVHYKRGVSQQFSLPSFKIDFSEWKDDELNFDLDRGVFPVVIQAVVDEGDVVEVTGHAHVLLAAFEKHMDGSFSVKPLKQKQIVDRVSYLLQEIYGIENKNNQETKPSDDENSDNSNECVVCLSDLRDTLILPCRHLCLCTSCADTLRYQANNCPICRLQL

SEQ ID NO: 48147 - protein, 332 aa, Homo sapiens
  Payload ID: 9745
  Gene Symbol: MGRN1
  Gene Name: mahogunin ring finger 1, E3 ubiquitin protein ligase
  ENSP ID: ENSP00000464811
  MOD_RES (1)..(1): Any amino acid
XFMGGEKFDTPHPEGYLFGENMDLNFLGSRPVQFPYVTPAPHEPVKTLRSLVNIRKDSLRLVRYKDDADSPTEDGDKPRVLYSLEFTFDADARVAITIYCQASEEFLNGRAVYSPKSPSLQSETVHYKRGVSQQFSLPSFKIDFSEWKDDELNFDLDRGVFPVVIQAVVDEGDAVVEVTGHAHVLLAAFEKHMDGSFSVKPLKQKQIVDRVSYLLQEIYGIENKNNQETKPSDDENSDNSNECVVCLSDLRDTLILPCRHLCLCTSCADTLRYQANNCPICRLPFRALLQIRAVRKKPGALSPVSFSPVLAQSLEHDEHSCPFKKSKPHPAS

SEQ ID NO: 48148 - protein, 166 aa, Homo sapiens
  Payload ID: 9745
  Gene Symbol: MGRN1
  Gene Name: mahogunin ring finger 1, E3 ubiquitin protein ligase
  ENSP ID: ENSP00000465249
EKFDTPHPEGYLFGENMDLNFLGSRPVQFPYVTPAPHEPVKTLRSLVNIRKDSLRLVRYKDDADSPTEDGDKPRVLYSLEFTFDADARVAITIYCQASEEFLNGRAVYSPKSPSLQSETVHYKRGVSQHYLLQEIYGIENKNNQETKPSDDENSDNSNECVVCLSD

SEQ ID NO: 48149 - protein, 530 aa, Homo sapiens; identical to SEQ ID NO: 48145
  Payload ID: 9745
  Gene Symbol: MGRN1
  Gene Name: mahogunin ring finger 1, E3 ubiquitin protein ligase
  Uniprot ID: O60291
  ENSP ID: ENSP00000465860

SEQ ID NO: 48150 - protein, 594 aa, Homo sapiens
  Payload ID: 9745
  Gene Symbol: MGRN1
  Gene Name: mahogunin ring finger 1, E3 ubiquitin protein ligase
  ENSP ID: ENSP00000467414
MGSILSRRIAGVEDIDIQANSAYRYPPKSGNYFASHFFMGGEKFDTPHPEGYLFGENMDLNFLGSRPVQFPYVTPAPHEPVKTLRSLVNIRKDSLRLVRYKDDADSPTEDGDKPRVLYSLEFTFDADARVAITIYCQASEEFLNGRAVYSPKSPSLQSETVHYKRGVSQQFSLPSFKIDFSEWKDDELNFDLDRGVFPVVIQAVVDEGDVVEVTGHAHVLLAAFEKHMDGSFSVKPLKQKQIVDRVSYLLQEIYGIENKNNQETKISWKVSQARFIMASGPRTTGAAPRGGSGAPGRASPQPREPSDDENSDNSNECVVCLSDLRDTLILPCRHLCLCTSCADTLRYQANNCPICRLPFRALLQIRAVRKKPGALSPVSFSPVLAQSLEHDEHSCPFKKSKPHPASLASKKPKRETNSDSVPPGYEPISLLEALNGLRAVSPAIPSAPLYEEITYSGISDGLSQASCPLAAIDHILDSSRQKGRPQSKAPDSTLRSPSSPIHEEDEEKLSEDVDAPPPLGGAELALRESSSPESFITEEVDESSSPQQGTRAASIENVLQDSSPEHCGRGPPADIYLPGRPTSMETAHGLATTS

SEQ ID NO: 48151 - protein, 149 aa, Homo sapiens
  Payload ID: 9745
  Gene Symbol: MGRN1
  Gene Name: mahogunin ring finger 1, E3 ubiquitin protein ligase
  ENSP ID: ENSP00000468171
MGGEKFDTPHPEGYLFGENMDLNFLGSRPVQFPYVTPAPHEPVKTLRSLVNIRKDSLRLVRYKDDADSPTEDGDKPRVLYSLEFTFDADARVAITIYCQASEEFLNGRAVYSPKSPSLQSETVHYKRGVSQQFSLPSFKIDFSEWKDDE

SEQ ID NO: 48152 - protein, 554 aa, Homo sapiens
  Payload ID: 9745
  Gene Symbol: MGRN1
  Gene Name: mahogunin ring finger 1, E3 ubiquitin protein ligase
  Uniprot ID: O60291
  ENSP ID: ENSP00000468819
MGSILSRRIAGVEDIDIQANSAYRYPPKSGNYFASHFFMGGEKFDTPHPEGYLFGENMDLNFLGSRPVQFPYVTPAPHEPVKTLRSLVNIRKDSLRLVRYKDDADSPTEDGDKPRVLYSLEFTFDADARVAITIYCQASEEFLNGRAVYSPKSPSLQSETVHYKRGVSQQFSLPSFKIDFSEWKDDELNFDLDRGVFPVVIQAVVDEGDVVEVTGHAHVLLAAFEKHMDGSFSVKPLKQKQIVDRVSYLLQEIYGIENKNNQETKPSDDENSDNSNECVVCLSDLRDTLILPCRHLCLCTSCADTLRYQANNCPICRLPFRALLQIRAVRKKPGALSPVSFSPVLAQSLEHDEHSNSDSVPPGYEPISLLEALNGLRAVSPAIPSAPLYEEITYSGISDGLSQASCPLAAIDHILDSSRQKGRPQSKAPDSTLRSPSSPIHEEDEEKLSEDVDAPPPLGGAELALRESSSPESFITEEVDESSSPQQGTRAASIENVLQDSSPEHCGRGPPADIYLPGRPTSMETAHGLATTSPTWPPLGGPSPDPSAAELTPL

SEQ ID NO: 48153 - protein, 465 aa, Homo sapiens
  Payload ID: 9746
  Gene Symbol: MFSD1
  Gene Name: major facilitator superfamily domain containing 1
  Uniprot ID: Q9H3U5
  ENSP ID: ENSP00000264266
MEEEDEEARALLAGGPDEADRGAPAAPGALPALCDPSRLAHRLLVLLLMCFLGFGSYFCYDNPAALQTQVKRDMQVNTTKFMLLYAWYSWPNVVLCFFGGFLIDRVFGIRWGTIIFSCFVCIGQVVFALGGIFNAFWLMEFGRFVFGIGGESLAVAQNTYAVSWFKGKELNLVFGLQLSMARIGSTVNMNLMGWLYSKIEALLGSAGHTTLGITLMIGGITCILSLICALALAYLDQRAERILHKEQGKTGEVIKLTDVKDFSLPLWLIFIICVCYYVAVFPFIGLGKVFFTEKFGFSSQAASAINSVVYVISAPMSPVFGLLVDKTGKNIIWVLCAVAATLVSHMMLAFTMWNPWIAMCLLGLSYSLLACALWPMVAFVVPEHQLGTAYGFMQSIQNLGLAIISIIAGMILDSRGYLFLEVFFIACVSLSLLSVVLLYLVNRAQGGNLNYSARQREEIKFSHTE

SEQ ID NO: 48154 - protein, 475 aa, Homo sapiens
  Payload ID: 9746
  Gene Symbol: MFSD1
  Gene Name: major facilitator superfamily domain containing 1
  Uniprot ID: Q9H3U5
  ENSP ID: ENSP00000376560
MGVALRDLPGRHVSSRSHVTAVLTVFHGRCFLPGFGVVTTFPSPSPAGAMEEEDEEARALLAGGPDEADRGAPAAPGALPALCDPSRLAHRLLVLLLMCFLGFAIFAMIILLPFRLKLNEWGTIIFSCFVCIGQVVFALGGIFNAFWLMEFGRFVFGIGGESLAVAQNTYAVSWFKGKELNLVFGLQLSMARIGSTVNMNLMGWLYSKIEALLGSAGHTTLGITLMIGGITCILSLICALALAYLDQRAERILHKEQGKTGEVIKLTDVKDFSLPLWLIFIICVCYYVAVFPFIGLGKVFFTEKFGFSSQAASAINSVVYVISAPMSPVFGLLVDKTGKNIIWVLCAVAATLVSHMMLAFTMWNPWIAMCLLGLSYSLLACALWPMVAFVVPEHQLGTAYGFMQSIQNLGLAIISIIAGMILDSRGYLFLEVFFIACVSLSLLSVVLLYLVNRAQGGNLNYSARQREEIKFSHTE

SEQ ID NO: 48155 - protein, 514 aa, Homo sapiens
  Payload ID: 9746
  Gene Symbol: MFSD1
  Gene Name: major facilitator superfamily domain containing 1
  Uniprot ID: Q9H3U5
  ENSP ID: ENSP00000403117
MGVALRDLPGRHVSSRSHVTAVLTVFHGRCFLPGFGVVTTFPSPSPAGAMEEEDEEARALLAGGPDEADRGAPAAPGALPALCDPSRLAHRLLVLLLMCFLGFGSYFCYDNPAALQTQVKRDMQVNTTKFMLLYAWYSWPNVVLCFFGGFLIDRVFGIRWGTIIFSCFVCIGQVVFALGGIFNAFWLMEFGRFVFGIGGESLAVAQNTYAVSWFKGKELNLVFGLQLSMARIGSTVNMNLMGWLYSKIEALLGSAGHTTLGITLMIGGITCILSLICALALAYLDQRAERILHKEQGKTGEVIKLTDVKDFSLPLWLIFIICVCYYVAVFPFIGLGKVFFTEKFGFSSQAASAINSVVYVISAPMSPVFGLLVDKTGKNIIWVLCAVAATLVSHMMLAFTMWNPWIAMCLLGLSYSLLACALWPMVAFVVPEHQLGTAYGFMQSIQNLGLAIISIIAGMILDSRGYLFLEVFFIACVSLSLLSVVLLYLVNRAQGGNLNYSARQREEIKFSHTE

SEQ ID NO: 48156 - protein, 193 aa, Homo sapiens
  Payload ID: 9746
  Gene Symbol: MFSD1
  Gene Name: major facilitator superfamily domain containing 1
  ENSP ID: ENSP00000417163
GKELNLVFGLQLSMARIGSTVNMNLMGWLYSKIEALLGSAGHTTLGITLMIGGITCILSLICALALAYLDQRAERILHKEQGKTGEVIKLTDVKDFSLPLWLIFIICVCYYVAVFPFIGLGNVVYVISAPMSPVFGLLVDKTGKNIIWVLCAVAATLVSHMMLAFTMWNPWIAMCLLGLSYSLLACALWPMVA

SEQ ID NO: 48157 - protein, 116 aa, Homo sapiens
  Payload ID: 9746
  Gene Symbol: MFSD1
  Gene Name: major facilitator superfamily domain containing 1
  ENSP ID: ENSP00000417414
MDAGKLARHPTDTGSERAVPALAEIRPWWAPPLRPQGEGSYFCYDNPAALQTQVKRDMQVNTTKFMLLYAWYSWPNVVLCFFGGFLIDRVFGIRWGTIIFSCFVCIGQVVFALGGI

SEQ ID NO: 48158 - protein, 78 aa, Homo sapiens
  Payload ID: 9746
  Gene Symbol: MFSD1
  Gene Name: major facilitator superfamily domain containing 1
  Uniprot ID: Q9H3U5
  ENSP ID: ENSP00000417950
MEEEDEEARALLAGGPDEADRGAPAAPGALPALCDPSRLAHRLLVLLLMCFLGFGSYFCYDNPAALQTQVKRMGHNHF

SEQ ID NO: 48159 - protein, 36 aa, Homo sapiens
  Payload ID: 9746
  Gene Symbol: MFSD1
  Gene Name: major facilitator superfamily domain containing 1
  ENSP ID: ENSP00000418055
MQVNTTKFMLLYAWYSWPNVVLCFFGGFLIDRVFGI

SEQ ID NO: 48160 - protein, 128 aa, Homo sapiens
  Payload ID: 9746
  Gene Symbol: MFSD1
  Gene Name: major facilitator superfamily domain containing 1
  ENSP ID: ENSP00000418503
MLLVTPRPERGGRGTELGEFCGTPLLFSKSQGLATRPRGDRYEGSYFCYDNPAALQTQVKRDMQVNTTKFMLLYAWYSWPNVVLCFFGGFLIDRVFGIRWGTIIFSCFVCIGQVVFALGGIFNAFWLM

SEQ ID NO: 48161 - protein, 78 aa, Homo sapiens
  Payload ID: 9746
  Gene Symbol: MFSD1
  Gene Name: major facilitator superfamily domain containing 1
  ENSP ID: ENSP00000419281
MEEEDEEARALLAGGPDEADRGAPAAPGALPALCDPSRLAHRLLVLLLMCFLGFGSYFCYDNPAALQTQVKRFYFLFI

SEQ ID NO: 48162 - protein, 78 aa, Homo sapiens; identical to SEQ ID NO: 48158
  Payload ID: 9746
  Gene Symbol: MFSD1
  Gene Name: major facilitator superfamily domain containing 1
  Uniprot ID: Q9H3U5
  ENSP ID: ENSP00000419467

SEQ ID NO: 48163 - protein, 161 aa, Homo sapiens
  Payload ID: 9746
  Gene Symbol: MFSD1
  Gene Name: major facilitator superfamily domain containing 1
  ENSP ID: ENSP00000419708
MLLVTPRPERGGRGTELGEFCGTPLLFSSYFCYDNPAALQTQVKRDMQVNTTKFMLLYAWYSWPNVVLCFFGGFLIDRVFGIRWGTIIFSCFVCIGQVVFALGGIFNAFWLMEFGRFVFGIGGESLAVAQNTYAVSWFKGKELNLVFGLQLSMARIGSTVN

SEQ ID NO: 48164 - protein, 85 aa, Homo sapiens
  Payload ID: 9746
  Gene Symbol: MFSD1
  Gene Name: major facilitator superfamily domain containing 1
  ENSP ID: ENSP00000420699
MDAGKLARHPTDTGSERAVPALAEIRPWWAPPLRPQGEDNCETPVPGPGGMRVNNLKHLCLPGAHLLGSYFCYDNPAALQTQVKR

SEQ ID NO: 48165 - protein, 64 aa, Homo sapiens
  Payload ID: 9746
  Gene Symbol: MFSD1
  Gene Name: major facilitator superfamily domain containing 1
  ENSP ID: ENSP00000420816
EEEDEEARALLAGGPDEADRGAPAAPGALPALCDPSRLAHRLLAAIFAMIILLPFRLKLNEICK

SEQ ID NO: 48166 - protein, 514 aa, Homo sapiens; identical to SEQ ID NO: 48155
  Payload ID: 9746
  Gene Symbol: MFSD1
  Gene Name: major facilitator superfamily domain containing 1
  Uniprot ID: Q9H3U5
  ENSP ID: ENSP00000484175

SEQ ID NO: 48167 - protein, 455 aa, Homo sapiens
  Payload ID: 9747
  Gene Symbol: MFSD10
  Gene Name: major facilitator superfamily domain containing 10
  Uniprot ID: Q14728
  ENSP ID: ENSP00000332646
MGWGGGGGCTPRPPIHQQPPERRVVTVVFLGLLLDLLAFTLLLPLLPGLLESHGRAHDPLYGSWQGGVDWFATAIGMPVEKRYNSVLFGGLIGSAFSVLQFLCAPLTGATSDCLGRRPVMLLCLMGVATSYAVWATSRSFAAFLASRLIGGISKGNVSLSTAIVADLGSPLARSQGMAVIGVAFSLGFTLGPMLGASLPLEMAPWFALLFAASDLLFIFCFLPETLPLEKRAPSIALGFRDAADLLSPLALLRFSAVARGQDPPSGDRLSSLRRLGLVYFLYLFLFSGLEYTLSFLTHQRFQFSSLQQGKMFFLIGLTMATIQGAYARRIHPGGEVAAVKRALLLLVPAFLLIGWGRSLPVLGLGLLLYSFAAAVVVPCLSSVVAGYGSPGQKGTVMGTLRSLGALARAAGPLVAASVYWLAGAQACFTTWSGLFLLPFFLLQKLSYPAQTLKAE

SEQ ID NO: 48168 - protein, 455 aa, Homo sapiens; identical to SEQ ID NO: 48167
  Payload ID: 9747
  Gene Symbol: MFSD10
  Gene Name: major facilitator superfamily domain containing 10
  Uniprot ID: Q14728
  ENSP ID: ENSP00000347619

SEQ ID NO: 48169 - protein, 366 aa, Homo sapiens
  Payload ID: 9747
  Gene Symbol: MFSD10
  Gene Name: major facilitator superfamily domain containing 10
  ENSP ID: ENSP00000423402
MGWGGGGGCTPRPPIHQQPPERRVVTVVFLGLLLDLLAFTLLLPLLPGLLESHGRAHDPLYGSWQGGVDWFATAIGMPVEKRYNSVLFGGLIGSAFSVLQFLCAPLTGATSDCLGRRPVMLLCLMGVATSYAVWATSRSFAAFLASRLIGGISKGNVSLSTAIVADLGSPLARSQGMAVIGVAFSLGFTLGPMLGASLPLEMAPWFALLFAASDLLFIFCFLPETLPLEKRAPSIALGFRDAADLLSPLALLRFSAVARGQDPPSGDRLSSLRRLGLVYFLYLFLFSGLEYTLSFLTHQRFQFSRPSCCWCPPSSSSAGDVLCPCWAWGCCSTPLPPPLWCPACPPWSLAMAHQGRRARSWVHCAA

SEQ ID NO: 48170 - protein, 242 aa, Homo sapiens
  Payload ID: 9747
  Gene Symbol: MFSD10
  Gene Name: major facilitator superfamily domain containing 10
  ENSP ID: ENSP00000423509
MGWGGGGGCTPRPPIHQQPPERRVVTVVFLGLLLDLLAFTLLLPLLPGLLESHGRAHDPLYGSWQGGVDWFATAIGMPVEKRYNSVLFGGLIGSAFSVLQFLCAPLTGATSDCLGRRPVMLLCLMGVATSYAVWATSRSFAAFLASRLIGGISKGNVSLSTAIVADLGSPLARSQGMPPTCCSSSASCQRRCPWRNGRPLSPWGSVMRLICSAPWPCCASRLSLVARTHPLETGSAACAAWA

SEQ ID NO: 48171 - protein, 356 aa, Homo sapiens
  Payload ID: 9747
  Gene Symbol: MFSD10
  Gene Name: major facilitator superfamily domain containing 10
  ENSP ID: ENSP00000425757
MGWGGGGGCTPRPPIHQQPPERRVVTVVFLGLLLDLLAFTLLLPLLPGLLESHGRAHDPLYGSWQGGVDWFATAIGMPVEKRYNSVLFGGLIGSAFSVLQFLCAPLTGATSDCLGRRPVMLLCLMGVATSYAVWATSRSFAAFLASRLIGGISKGNVSLSTAIVADLGSPLARSQGMAVIGVAFSLGFTLGPMLGASLPLEMAPWFALLFAASDLLFIFCFLPETLPLEKRAPSIALGFRDAADLLSPLALLRFSAVARGQDPPSGDRLSSLRRLGLVYFLYLFLFSGLEYTLSFLTHQRFQFSSLQQGKMFFLIGLTMATIQGAYARRIHPGGEVAAVKRAHQGRRARSWVHCAA

SEQ ID NO: 48172 - protein, 480 aa, Homo sapiens
  Payload ID: 9747
  Gene Symbol: MFSD10
  Gene Name: major facilitator superfamily domain containing 10
  ENSP ID: ENSP00000426907
MGWGGGGGCTPRPPIHQQPPERRVVTVVFLGLLLDLLAFTLLLPLLPGLLESHGRAHDPLYGSWQGGVDWFATAIGMPVEKRYNSVLFGGLIGSAFSVLQFLCAPLTGATSDCLGRRPVMLLCLMGVATSYAVWATSRSFAAFLASRLIGGISKGNVSLSTAIVADLGSPLARSQGMAVIGVAFSLGFTLGPMLGASLPLEMAPWFALLFAASDLLFIFCFLPETLPLEKRAPSIALGFRDAADLLSPLALLRFSAVARGQDPPSGDRLSSLRRLGLVYFLYLFLFSGLEYTLSFLTHQRFQFSSLQQGKMFFLIGLTMATIQGAYARRIHPGGEVAAVKRALLLLVPAFLLIGWGRSLPVLGLGLLLYSFAAAVVVPCLSSVVAGYGSPGQKGTVMGTLRSLGALARAAGPLVAASGEGAGWCWGRLGAKHLPSPPKCQPPRGLGDATVSPQCTGWPGPRPASPRGPGSFCSPSSSCRS

SEQ ID NO: 48173 - protein, 100 aa, Homo sapiens
  Payload ID: 9747
  Gene Symbol: MFSD10
  Gene Name: major facilitator superfamily domain containing 10
  ENSP ID: ENSP00000427637
MGWGGGGGCTPRPPIHQQPPERRVVTVVFLGLLLDLLAFTLLLPLLPGLLESHGRAHDPLYGSWQGGVDWFATAIGMPVEKRYNSVLFGVSVCATHWGHL

SEQ ID NO: 48174 - protein, 449 aa, Homo sapiens
  Payload ID: 9748
  Gene Symbol: MFSD11
  Gene Name: major facilitator superfamily domain containing 11
  Uniprot ID: O43934
  ENSP ID: ENSP00000337240
MSPESKKLFNIIILGVAFMFMFTAFQTCGNVAQTVIRSLNRTDFHGSGYTSMAIIYGVFSASNLITPSVVAIVGPQLSMFASGLFYSMYIAVFIQPFPWSFYTASVFIGIAAAVLWTAQGNCLTINSDEHSIGRNSGIFWALLQSSLFFGNLYIYFAWQGKTQISESDRRTVFIALTVISLVGTVLFFLIRKPDSENVLGEDESSDDQDMEVNESAQNNLTKAVDAFKKSFKLCVTKEMLLLSITTAYTGLELTFFSGVYGTCIGATNKFGAEEKSLIGLSGIFIGIGEILGGSLFGLLSKNNRFGRNPVVLLGILVHFIAFYLIFLNMPGDAPIAPVKGTDSSAYIKSSKEVAILCSFLLGLGDSCFNTQLLSILGFLYSEDSAPAFAIFKFVQSICAAVAFFYSNYLLLHWQLLVMVIFGFFGTISFFTVEWEAAAFVARGSDYRSI

SEQ ID NO: 48175 - protein, 397 aa, Homo sapiens
  Payload ID: 9748
  Gene Symbol: MFSD11
  Gene Name: major facilitator superfamily domain containing 11
  Uniprot ID: O43934
  ENSP ID: ENSP00000348225
MSPESKKLFNIIILGVAFMFMFTAFQTCGNVAQTVIRSLNRTDFHGSGYTSMAIIYGVFSASNLITPSVVAIVGPQLSMFASGLFYSMYIAVFIQPFPWSFYTASVFIGIAAAESDRRTVFIALTVISLVGTVLFFLIRKPDSENVLGEDESSDDQDMEVNESAQNNLTKAVDAFKKSFKLCVTKEMLLLSITTAYTGLELTFFSGVYGTCIGATNKFGAEEKSLIGLSGIFIGIGEILGGSLFGLLSKNNRFGRNPVVLLGILVHFIAFYLIFLNMPGDAPIAPVKGTDSSAYIKSSKEVAILCSFLLGLGDSCFNTQLLSILGFLYSEDSAPAFAIFKFVQSICAAVAFFYSNYLLLHWQLLVMVIFGFFGTISFFTVEWEAAAFVARGSDYRSI

SEQ ID NO: 48176 - protein, 449 aa, Homo sapiens; identical to SEQ ID NO: 48174
  Payload ID: 9748
  Gene Symbol: MFSD11
  Gene Name: major facilitator superfamily domain containing 11
  Uniprot ID: O43934
  ENSP ID: ENSP00000464932

SEQ ID NO: 48177 - protein, 62 aa, Homo sapiens
  Payload ID: 9748
  Gene Symbol: MFSD11
  Gene Name: major facilitator superfamily domain containing 11
  ENSP ID: ENSP00000466223
MSPESKKLFNIIILGVAFMFMFTAFQTCGNVAQTVIRSLNRTDFHGSGYTSMAIIYGVFSAS

SEQ ID NO: 48178 - protein, 114 aa, Homo sapiens
  Payload ID: 9748
  Gene Symbol: MFSD11
  Gene Name: major facilitator superfamily domain containing 11
  ENSP ID: ENSP00000466412
MSPESKKLFNIIILGVAFMFMFTAFQTCGNVAQTVIRSLNRTDFHGSGYTSMAIIYGVFSASNLITPSVVAIVGPQLSMFASGLFYSLSRGPSTQPLFSLELLLLCFGQHKETA

SEQ ID NO: 48179 - protein, 117 aa, Homo sapiens
  Payload ID: 9748
  Gene Symbol: MFSD11
  Gene Name: major facilitator superfamily domain containing 11
  ENSP ID: ENSP00000466584
QGNCLTINSDEHSIGRNSGIFWALLQSSLFFGNLYIYFAWQGKTQISESDRRTVFIALTVISLVGTVLFFLIRKPDSENVLGEDESSDDQDMEVNEHWVFYKLKACGNPASSLPRTI

SEQ ID NO: 48180 - protein, 449 aa, Homo sapiens; identical to SEQ ID NO: 48174
  Payload ID: 9748
  Gene Symbol: MFSD11
  Gene Name: major facilitator superfamily domain containing 11
  Uniprot ID: O43934
  ENSP ID: ENSP00000466613

SEQ ID NO: 48181 - protein, 397 aa, Homo sapiens; identical to SEQ ID NO: 48175
  Payload ID: 9748
  Gene Symbol: MFSD11
  Gene Name: major facilitator superfamily domain containing 11
  Uniprot ID: O43934
  ENSP ID: ENSP00000466782

SEQ ID NO: 48182 - protein, 41 aa, Homo sapiens
  Payload ID: 9748
  Gene Symbol: MFSD11
  Gene Name: major facilitator superfamily domain containing 11
  ENSP ID: ENSP00000467375
MSPESKKLFNIIILGVAFMFMFTAFQTCGNVAVSWNLSSLL

SEQ ID NO: 48183 - protein, 41 aa, Homo sapiens; identical to SEQ ID NO: 48182
  Payload ID: 9748
  Gene Symbol: MFSD11
  Gene Name: major facilitator superfamily domain containing 11
  ENSP ID: ENSP00000467879

SEQ ID NO: 48184 - protein, 111 aa, Homo sapiens
  Payload ID: 9748
  Gene Symbol: MFSD11
  Gene Name: major facilitator superfamily domain containing 11
  ENSP ID: ENSP00000468223
MSPESKKLFNIIILGVAFMFMFTAFQTCGNVAQTVIRSLNRTDFHGSGYTSMAIIYGVFSASNLITPSVVAIVGPQLSMFASGLFYSLCFHWNCCCCALDSTRKLPDNQFG

SEQ ID NO: 48185 - protein, 449 aa, Homo sapiens; identical to SEQ ID NO: 48174
  Payload ID: 9748
  Gene Symbol: MFSD11
  Gene Name: major facilitator superfamily domain containing 11
  Uniprot ID: O43934
  ENSP ID: ENSP00000468309

SEQ ID NO: 48186 - protein, 211 aa, Homo sapiens
  Payload ID: 9748
  Gene Symbol: MFSD11
  Gene Name: major facilitator superfamily domain containing 11
  ENSP ID: ENSP00000468562
  MOD_RES (1)..(1): Any amino acid
XAYTGLELTFFSGVYGTCIGATNKFGAEEKSLIGLSGIFIGIGEILGGSLFGLLSKNNRFGRNPVVLLGILVHFIAFYLIFLNMPGDAPIAPVKGTDSSAYIKSSKEVAILCSFLLGLGDSCFNTQLLSILGFLYSEDSAPAFAIFKFVQFLWVGNLRMAELSPERLSRLQSMSLQAAVKVCSRLHWGRACFPAHSYSCCRSQFLTDCQAK

SEQ ID NO: 48187 - protein, 128 aa, Homo sapiens
  Payload ID: 9748
  Gene Symbol: MFSD11
  Gene Name: major facilitator superfamily domain containing 11
  ENSP ID: ENSP00000468616
FMFTAFQTCGNVAQTVIRSLNRTDFHGSGYTSMAIIYGVFSASNLITPSVVAIVGPQLSMFASGLFYSMYIAVFIQPFPWSFYTASVFIGIAAAVLWTAQGNCLTINSDEHSIGRNSGIFWALLQSRE

SEQ ID NO: 48188 - protein, 113 aa, Homo sapiens
  Payload ID: 9748
  Gene Symbol: MFSD11
  Gene Name: major facilitator superfamily domain containing 11
  ENSP ID: ENSP00000468758
MSPESKKLFNIIILGVAFMFMFTAFQTCGNVAQTVIRSLNRTDFHGSGYTSMAIIYGVFSASNLITPSVVAIVGPQLSMFASGLFYSMYIAVFIQPFPWSFYTASVFIGIAAA

SEQ ID NO: 48189 - protein, 449 aa, Homo sapiens; identical to SEQ ID NO: 48174
  Payload ID: 9748
  Gene Symbol: MFSD11
  Gene Name: major facilitator superfamily domain containing 11
  Uniprot ID: O43934
  ENSP ID: ENSP00000485005

SEQ ID NO: 48190 - protein, 480 aa, Homo sapiens
  Payload ID: 9749
  Gene Symbol: MFSD12
  Gene Name: major facilitator superfamily domain containing 12
  Uniprot ID: Q6NUT3
  ENSP ID: ENSP00000347583
MGPGPPAAGAAPSPRPLSLVARLSYAVGHFLNDLCASMWFTYLLLYLHSVRAYSSRGAGLLLLLGQVADGLCTPLVGYEADRAASCCARYGPRKAWHLVGTVCVLLSFPFIFSPCLGCGAATPEWAALLYYGPFIVIFQFGWASTQISHLSLIPELVTNDHEKVELTALRYAFTVVANITVYGAAWLLLHLQGSSRVEPTQDISISDQLGGQDVPVFRNLSLLVVGVGAVFSLLFHLGTRERRRPHAEEPGEHTPLLAPATAQPLLLWKHWLREPAFYQVGILYMTTRLIVNLSQTYMAMYLTYSLHLPKKFIATIPLVMYLSGFLSSFLMKPINKCIGRNMTYFSGLLVILAFAAWVALAEGLGVAVYAAAVLLGAGCATILVTSLAMTADLIGPHTNSGAFVYGSMSFLDKVANGLAVMAIQSLHPCPSELCCRACVSFYHWAMVAVTGGVGVAAALCLCSLLLWPTRLRRWDRDARP

SEQ ID NO: 48191 - protein, 471 aa, Homo sapiens
  Payload ID: 9749
  Gene Symbol: MFSD12
  Gene Name: major facilitator superfamily domain containing 12
  Uniprot ID: Q6NUT3
  ENSP ID: ENSP00000374046
MGPGPPAAGAAPSPRPLSLVARLSYAVGHFLNDLCASMWFTYLLLYLHSVRAYSSRGAGLLLLLGQVADGLCTPLVGYEADRAASCCARYGTVCVLLSFPFIFSPCLGCGAATPEWAALLYYGPFIVIFQFGWASTQISHLSLIPELVTNDHEKVELTALRYAFTVVANITVYGAAWLLLHLQGSSRVEPTQDISISDQLGGQDVPVFRNLSLLVVGVGAVFSLLFHLGTRERRRPHAEEPGEHTPLLAPATAQPLLLWKHWLREPAFYQVGILYMTTRLIVNLSQTYMAMYLTYSLHLPKKFIATIPLVMYLSGFLSSFLMKPINKCIGRNMTYFSGLLVILAFAAWVALAEGLGVAVYAAAVLLGAGCATILVTSLAMTADLIGPHTNSGAFVYGSMSFLDKVANGLAVMAIQSLHPCPSELCCRACVSFYHWAMVAVTGGVGVAAALCLCSLLLWPTRLRRWDRDARP

SEQ ID NO: 48192 - protein, 175 aa, Homo sapiens
  Payload ID: 9749
  Gene Symbol: MFSD12
  Gene Name: major facilitator superfamily domain containing 12
  ENSP ID: ENSP00000381566
  MOD_RES (1)..(1): Any amino acid
XGVAVYAAAVLLGAGCATILVTSLAMTADLIGPHTNSGAFVYGSMSFLDKVANGLAVMAIQSLHPCPSELCCRACVSFYHWAMVAVTGGVGVAAALCLCSLLLWPTRLRRSFLAWRRGRGEDKGPGYSWIPTVLVQPPRPTSPFLWEAPLAWRCTRKKWSGAGTKPWPREDWGTH

SEQ ID NO: 48193 - protein, 259 aa, Homo sapiens
  Payload ID: 9749
  Gene Symbol: MFSD12
  Gene Name: major facilitator superfamily domain containing 12
  ENSP ID: ENSP00000465302
LSLIPELVTNDHEKVELTALRYAFTVVANITVYGAAWLLLHLQGSSRVEPTQDISISDQLGGQDVPVFRNLSLLVVGVGAVFSLLFHLGTRERRRPHAEEPGEHTPLLAPATAQPLLLWKHWLREPAFYQVGILYMTTRLIVNLSQTYMAMYLTYSLHLPKKFIATIPLVMYLSGFLSSFLMKPINKCIGRNNSGAFVYGSMSFLDKVANGLAVMAIQSLHPCPSELCCRACVSFYHWAMVAVTGGVGVAAALCLCSLL

SEQ ID NO: 48194 - protein, 71 aa, Homo sapiens
  Payload ID: 9749
  Gene Symbol: MFSD12
  Gene Name: major facilitator superfamily domain containing 12
  ENSP ID: ENSP00000465782
MSPRRQGLMGHRLRPAVLPLHLQPLPGLWGGHARVGCPPLLRPVHRDLPVWLGLHTDLPPQPHPGARHQRP

SEQ ID NO: 48195 - protein, 147 aa, Homo sapiens
  Payload ID: 9749
  Gene Symbol: MFSD12
  Gene Name: major facilitator superfamily domain containing 12
  ENSP ID: ENSP00000466906
MSPRRQGLMGLECSHRISAHCNLELLGSSDSPASASRAVGTTEPVPAGGGCRRRVLTAIPPGHPGEAPAACGGARRAHPPVGPCHGPAPAALEALAPGAGFLPGGHTVHDHQAHREPVPDLHGHVPHLLAPPAQEVHRDHSPGDVPQ

SEQ ID NO: 48196 - protein, 471 aa, Homo sapiens; identical to SEQ ID NO: 48191
  Payload ID: 9749
  Gene Symbol: MFSD12
  Gene Name: major facilitator superfamily domain containing 12
  Uniprot ID: Q6NUT3
  ENSP ID: ENSP00000467207

SEQ ID NO: 48197 - protein, 180 aa, Homo sapiens
  Payload ID: 9749
  Gene Symbol: MFSD12
  Gene Name: major facilitator superfamily domain containing 12
  ENSP ID: ENSP00000467635
LSGFLSSFLMKPINKCIGRNMTYFSGLLVILAFAAWVALAEGLGVAVYAAAVLLGAGCATILVTSLAMTADLIGPHTNSGAFVYGSMSFLDKVANGLAVMAIQSLHPCPSELCCRACVSFYHWAMVAVTGGVGVAAALCLCSLLLWPTRLRRCESWPTPPSPDTDPHSLMPFPPLPCRGP

SEQ ID NO: 48198 - protein, 53 aa, Homo sapiens
  Payload ID: 9749
  Gene Symbol: MFSD12
  Gene Name: major facilitator superfamily domain containing 12
  ENSP ID: ENSP00000468287
MSPRRQGLMGARSSAAVFTSKETFPDLPTARRSNQPPAARPRRPPRPSPPPAC

SEQ ID NO: 48199 - protein, 163 aa, Homo sapiens
  Payload ID: 9749
  Gene Symbol: MFSD12
  Gene Name: major facilitator superfamily domain containing 12
  ENSP ID: ENSP00000478456
KFIATIPLVMYLSGFLSSFLMKPINKCIGRNMTYFSGLLVILAFAAWVALAEGLGVAVYAAAVLLGAGCATILVTSLAMTADLIGPHTNSGAFVYGSMSFLDKVANGLAVMAIQSLHPCPSELCCRACVSFYHWAMVAVTGGVGVAAALCLCSLLLWPTRLRR

SEQ ID NO: 48200 - protein, 143 aa, Homo sapiens
  Payload ID: 9749
  Gene Symbol: MFSD12
  Gene Name: major facilitator superfamily domain containing 12
  ENSP ID: ENSP00000481557
MVLADAAKMRSPRVRMAPNPVPGTLIRRGKLGRRQEGRVKTEAETGGQGVPGVAQSHHGLQEVWDRLSQPQKGPAPHRPGFQRANISVAEAPSAFAVLGDGRRHICSWPVSRSVAPTVSGHWPEGNRKSWRGRHTHEPFRNNE

SEQ ID NO: 48201 - protein, 543 aa, Homo sapiens
  Payload ID: 9750
  Gene Symbol: MFSD2A
  Gene Name: major facilitator superfamily domain containing 2A
  Uniprot ID: Q8NA29
  ENSP ID: ENSP00000361895
MAKGEGAESGSAAGLLPTSILQSTERPAQVKKEPKKKKQQLSVCNKLCYALGGAPYQVTGCALGFFLQIYLLDVAQKDEEVVFCFSSFQVGPFSASIILFVGRAWDAITDPLVGLCISKSPWTCLGRLMPWIIFSTPLAVIAYFLIWFVPDFPHGQTYWYLLFYCLFETMVTCFHVPYSALTMFISTEQTERDSATAYRMTVEVLGTVLGTAIQGQIVGQADTPCFQDLNSSTVASQSANHTHGTTSHRETQKAYLLAAGVIVCIYIICAVILILGVREQREPYEAQQSEPIAYFRGLRLVMSHGPYIKLITGFLFTSLAFMLVEGNFVLFCTYTLGFRNEFQNLLLAIMLSATLTIPIWQWFLTRFGKKTAVYVGISSAVPFLILVALMESNLIITYAVAVAAGISVAAAFLLPWSMLPDVIDDFHLKQPHFHGTEPIFFSFYVFFTKFASGVSLGISTLSLDFAGYQTRGCSQPERVKFTLNMLVTMAPIVLILLGLLLFKMYPIDEERRRQNKKALQALRDEASSSGCSETDSTELASIL

SEQ ID NO: 48202 - protein, 530 aa, Homo sapiens
  Payload ID: 9750
  Gene Symbol: MFSD2A
  Gene Name: major facilitator superfamily domain containing 2A
  Uniprot ID: Q8NA29
  ENSP ID: ENSP00000361898
MAKGEGAESGSAAGLLPTSILQSTERPAQVKKEPKKKKQQLSVCNKLCYALGGAPYQVTGCALGFFLQIYLLDVAQVGPFSASIILFVGRAWDAITDPLVGLCISKSPWTCLGRLMPWIIFSTPLAVIAYFLIWFVPDFPHGQTYWYLLFYCLFETMVTCFHVPYSALTMFISTEQTERDSATAYRMTVEVLGTVLGTAIQGQIVGQADTPCFQDLNSSTVASQSANHTHGTTSHRETQKAYLLAAGVIVCIYIICAVILILGVREQREPYEAQQSEPIAYFRGLRLVMSHGPYIKLITGFLFTSLAFMLVEGNFVLFCTYTLGFRNEFQNLLLAIMLSATLTIPIWQWFLTRFGKKTAVYVGISSAVPFLILVALMESNLIITYAVAVAAGISVAAAFLLPWSMLPDVIDDFHLKQPHFHGTEPIFFSFYVFFTKFASGVSLGISTLSLDFAGYQTRGCSQPERVKFTLNMLVTMAPIVLILLGLLLFKMYPIDEERRRQNKKALQALRDEASSSGCSETDSTELASIL

SEQ ID NO: 48203 - protein, 374 aa, Homo sapiens
  Payload ID: 9750
  Gene Symbol: MFSD2A
  Gene Name: major facilitator superfamily domain containing 2A
  ENSP ID: ENSP00000391261
MVTCFHVPYSALTMFISTEQTERDSATAYRMTVEVLGTVLGTAIQGQIVGQADTPCFQDLNSSTVASQSANHTHGTTSHRETQKAYLLAAGVIVCIYIICAVILILGVREQREPYEAQQSEPIAYFRGLRLVMSHGPYIKLITGFLFTSLAFMLVEGNFVLFCTYTLGFRNEFQNLLLAIMLSATLTIPIWQWFLTRFGKKTAVYVGISSAVPFLILVALMESNLIITYAVAVAAGISVAAAFLLPWSMLPDVIDDFHLKQPHFHGTEPIFFSFYVFFTKFASGVSLGISTLSLDFAGYQTRGCSQPERVKFTLNMLVTMAPIVLILLGLLLFKMYPIDEERRRQNKKALQALRDEASSSGCSETDSTELASIL

SEQ ID NO: 48204 - protein, 266 aa, Homo sapiens
  Payload ID: 9750
  Gene Symbol: MFSD2A
  Gene Name: major facilitator superfamily domain containing 2A
  ENSP ID: ENSP00000407606
MAKGEGAESGSAAGLLPTSILQSTERPAQKEPKKKKQQLSVCNKLCYALGGAPYQVTGCALGFFLQIYLLDVAQVGPFSASIILFVGRAWDAITDPLVGLCISKSPWTCLGRLMPWIIFSTPLAVIAYFLIWFVPDFPHGQTYWYLLFYCLFETMVTCFHVPYSALTMFISTEQTERDSATAYRMTVEVLGTVLGTAIQGQIVGQADTPCFQDLNSSTVASQSANHTHGTTSHRETQKAYLLAAGVIVCIYIICAVILILGVREQR

SEQ ID NO: 48205 - protein, 504 aa, Homo sapiens
  Payload ID: 9751
  Gene Symbol: MFSD2B
  Gene Name: major facilitator superfamily domain containing 2B
  ENSP ID: ENSP00000342501
MAAPPAPAAKGSPQPEPHAPEPGPGSAKRGREDSRAGRLSFCTKVCYGIGGVPNQIASSATAFYLQLFLLDIAQIPAAQVSLVLFGGKVSGAAADPVAGFFINRSQRTGSGRLMPWVLGCTPFIALAYFFLWFLPPFTSLRGLWYTTFYCLFQALATFFQVPYTALTMLLTPCPRERDSATAYRMTVEMAGTLMGATVHGLIVSGAHRPHRCEATATPGPVTVSPNAAHLYCIAAAVVVVTYPVCISLLCLGVKERPDPSAPASGPGLSFLAGLSLTTRHPPYLKLVISFLFISAAVQVEQSYLVLFCTHASQLHDHVQGLVLTVLVSAVLSTPLWEWVLQRFGKKTSAFGIFAMVPFAILLAAVPTAPVAYVVAFVSGVSIAVSLLLPWSMLPDVVDDFQLQHRHGPGLETIFYSSYVFFTKLSGACALGISTLSLEFSGYKAGVCKQAEEVVVTLKVLIGAVPTCMILAGLCILMVGSTPKTPSRDASSRLSLRRRTSYSLA

SEQ ID NO: 48206 - protein, 497 aa, Homo sapiens
  Payload ID: 9751
  Gene Symbol: MFSD2B
  Gene Name: major facilitator superfamily domain containing 2B
  Uniprot ID: A6NFX1
  ENSP ID: ENSP00000385527
MAAPPAPAAKGSPQPEPHAPEPGPGSAKRGREDSRAGRLSFCTKVCYGIGGVPNQIASSATAFYLQLFLLDIAQIPAAQVSLVLFGGKVSGAAADPVAGFFINRSQRTGSGRLMPWVLGCTPFIALAYFFLWFLPPFTSLRGLWYTTFYCLFQALATFFQVPYTALTMLLTPCPRERDSATAYRMTVEMAGTLMGATVHGLIVSGAHRPHRCEATATPGPVTVSPNAAHLYCIAAAVVVVTYPVCISLLCLGVKERPDPSAPASGPGLSFLAGLSLTTRHPPYLKLVISFLFISAAVQVEQSYLVLFCTHASQLHDHVQGLVLTVLVSAVLSTPLWEWVLQRFGKKTSAFGIFAMVPFAILLAAVPTAPVAYVVAFVSGVSIAVSLLLPWSMLPDVVDDFQLQHRHGPGLETIFYSSYVFFTKLSGACALGISTLSLEFSGYKAGVCKQAEEVVVTLKVLIGAVPTCMILAGLCILMVGSTPKTPSRDASSRLSLRR

SEQ ID NO: 48207 - protein, 44 aa, Homo sapiens
  Payload ID: 9751
  Gene Symbol: MFSD2B
  Gene Name: major facilitator superfamily domain containing 2B
  ENSP ID: ENSP00000390490
KVLIGAVPTCMILAGLCILMVGSTPKTPSRDASSRLSLRRVLHH

SEQ ID NO: 48208 - protein, 412 aa, Homo sapiens
  Payload ID: 9752
  Gene Symbol: MFSD3
  Gene Name: major facilitator superfamily domain containing 3
  Uniprot ID: Q96ES6
  ENSP ID: ENSP00000301327
MRGKLLPLAGLYLVQGLPYGLQSGLLPVLLRAGGLSLTRVGLAKVLYAPWLLKLAWAPLVDAQGSARAWVTRSTAGLGLVCGLLAGLPPPGAGQAGLPAAVAGLLLLLNLGAAMQDVALDALAVQLLEPAELGPGNTVQVVAYKLGAALAGGALLALLPTFSWPQLFLLLAATYWLAAALAWAAPALRRLPQQPPSEQRPHTAHLLRDVLAVPGTVWTAGFVLTYKLGEQGASSLFPLLLLDHGVSAPELGLWNGVGAVVCSIAGSSLGGTLLAKHWKLLPLLRSVLRFRLGGLACQTALVFHLDTLGASMDAGTILRGSALLSLCLQHFLGGLVTTVTFTGMMRCSQLAPRALQATHYSLLATLELLGKLLLGTLAGGLADGLGPHPCFLLLLILSAFPVLYLDLAPSTFL

SEQ ID NO: 48209 - protein, 514 aa, Homo sapiens
  Payload ID: 9753
  Gene Symbol: MFSD4
  Gene Name: major facilitator superfamily domain containing 4
  Uniprot ID: Q8N468
  ENSP ID: ENSP00000356115
MGCDGRVSGLLRRNLQPTLTYWSVFFSFGLCIAFLGPTLLDLRCQTHSSLPQISWVFFSQQLCLLLGSALGGVFKRTLAQSLWALFTSSLAISLVFAVIPFCRDVKVLASVMALAGLAMGCIDTVANMQLVRMYQKDSAVFLQVLHFFVGFGALLSPLIADPFLSEANCLPANSTANTTSRGHLFHVSRVLGQHHVDAKPWSNQTFPGLTPKDGAGTRVSYAFWIMALINLPVPMAVLMLLSKERLLTCCPQRRPLLLSADELALETQPPEKEDASSLPPKFQSHLGHEDLFSCCQRKNLRGAPYSFFAIHITGALVLFMTDGLTGAYSAFVYSYAVEKPLSVGHKVAGYLPSLFWGFITLGRLLSIPISSRMKPATMVFINVVGVVVTFLVLLIFSYNVVFLFVGTASLGLFLSSTFPSMLAYTEDSLQYKGCATTVLVTGAGVGEMVLQMLVGSIFQAQGSYSFLVCGVIFGCLAFTFYILLLFFHRMHPGLPSVPTQDRSIGMENSECYQR

SEQ ID NO: 48210 - protein, 459 aa, Homo sapiens
  Payload ID: 9753
  Gene Symbol: MFSD4
  Gene Name: major facilitator superfamily domain containing 4
  ENSP ID: ENSP00000440183
MEEKGEGMLPAPSPDITLPSCSLAQSLWALFTSSLAISLVFAVIPFCRDVKVLASVMALAGLAMGCIDTVANMQLVRMYQKDSAVFLQVLHFFVGFGALLSPLIADPFLSEANCLPANSTANTTSRGHLFHVSRVLGQHHVDAKPWSNQTFPGLTPKDGAGTRVSYAFWIMALINLPVPMAVLMLLSKERLLTCCPQRRPLLLSADELALETQPPEKEDASSLPPKFQSHLGHEDLFSCCQRKNLRGAPYSFFAIHITGALVLFMTDGLTGAYSAFVYSYAVEKPLSVGHKVAGYLPSLFWGFITLGRLLSIPISSRMKPATMVFINVVGVVVTFLVLLIFSYNVVFLFVGTASLGLFLSSTFPSMLAYTEDSLQYKGCATTVLVTGAGVGEMVLQMLVGSIFQAQGSYSFLVCGVIFGCLAFTFYILLLFFHRMHPGLPSVPTQDRSIGMENSECYQR

SEQ ID NO: 48211 - protein, 440 aa, Homo sapiens
  Payload ID: 9753
  Gene Symbol: MFSD4
  Gene Name: major facilitator superfamily domain containing 4
  ENSP ID: ENSP00000445329
MGCDGRVSGLLRRNLQPTLTYWSVFFSFGLCIAFLGPTLLDLRCQTHSSLPQISWVFFSQQLCLLLGSALGGVFKRTLAQSLWALFTSSLAISLVFAVIPFCRDVKVLASVMALAGLAMGCIDTVANMQLVRMYQKDSAVFLQVLHFFVGFGALLSPLIADPFLSEANCLPANSTANTTSRGHLFHVSRVLGQHHVDAKPWSNQTFPGLTPKDGAGTRVSYAFWIMALINLPVPMAVLMLLSKERLLTCCPQRRPLLLSADELALETQPPEKEDASSLPPKFQSHLGHEDLFSCCQRKNLRGAPYSFFAIHITGALVLFMTDGLTGAYSAFVYSYAVEKPLSVGHKVAGYLPSLFWGFITLGRLLSIPISSRMKPATMVFINVVGVVVTFLVLLIFSYNVVFLFVGTASLGLFLSSTFPSMLAYTEDSLQYKDIPGSGQL

SEQ ID NO: 48212 - protein, 361 aa, Homo sapiens
  Payload ID: 9753
  Gene Symbol: MFSD4
  Gene Name: major facilitator superfamily domain containing 4
  ENSP ID: ENSP00000478732
MGCDGRVSGLLRRNLQPTLTYWSVFFSFGLCIAFLGPTLLDLRCQTHSSLPQISWVFFSQQLCLLLGSALGGVFKRTLAQSLWALFTSSLAISLVFAVIPFCRDVKVLASVMALAGLAMGCIDTVANMQLVRMYQKDSAVFLQVLHFFVGFGALLSPLIADPFLSEANCLPANSTANTTSRGHLFHVSRVLGQHHVDAKPWSNQTFPGLTPKDGAGTRVSYAFWIMALINVGVVVTFLVLLIFSYNVVFLFVGTASLGLFLSSTFPSMLAYTEDSLQYKGCATTVLVTGAGVGEMVLQMLVGSIFQAQGSYSFLVCGVIFGCLAFTFYILLLFFHRMHPGLPSVPTQDRSIGMENSECYQR

SEQ ID NO: 48213 - protein, 126 aa, Homo sapiens
  Payload ID: 9753
  Gene Symbol: MFSD4
  Gene Name: major facilitator superfamily domain containing 4
  ENSP ID: ENSP00000480554
MEEKGEGMLPAPSPDITLPSCSLAQSLWALFTSSLAISLVFAVIPFCRDVKVLASVMALAGLAMGCIDTVANMQLVRMYQKDSAVFLQLPVPMAVLMLLSKERLLTCCPQRRPLLLSADELALETQ

SEQ ID NO: 48214 - protein, 88 aa, Homo sapiens
  Payload ID: 9753
  Gene Symbol: MFSD4
  Gene Name: major facilitator superfamily domain containing 4
  ENSP ID: ENSP00000482239
MGCDGRVSGLLRRNLQPTLTYWSVFFSFGLCIAFLGPTLLDLRCQTHSSLPQISWVFFSQQLCLLLGSALGGVFKRTCSISSWALVLC

SEQ ID NO: 48215 - protein, 121 aa, Homo sapiens
  Payload ID: 9753
  Gene Symbol: MFSD4
  Gene Name: major facilitator superfamily domain containing 4
  ENSP ID: ENSP00000483626
MALAGLAMGCIDTVANMQLVRMYQKDSAVFLQVLHFFVGFGALLSPLIADPFLSEANCLPANSTANTTSRGHLFHVSRVLGQHHVDAKPWSNQTFPGLTPKDGAGTRVSYAFWIMALINLP

SEQ ID NO: 48216 - protein, 450 aa, Homo sapiens
  Payload ID: 9754
  Gene Symbol: MFSD5
  Gene Name: major facilitator superfamily domain containing 5
  Uniprot ID: Q6N075
  ENSP ID: ENSP00000332624
MLVTAYLAFVGLLASCLGLELSRCRAKPPGRACSNPSFLRFQLDFYQVYFLALAADWLQAPYLYKLYQHYYFLEGQIAILYVCGLASTVLFGLVASSLVDWLGRKNSCVLFSLTYSLCCLTKLSQDYFVLLVGRALGGLSTALLFSAFEAWYIHEHVERHDFPAEWIPATFARAAFWNHVLAVVAGVAAEAVASWIGLGPVAPFVAAIPLLALAGALALRNWGENYDRQRAFSRTCAGGLRCLLSDRRVLLLGTIQALFESVIFIFVFLWTPVLDPHGAPLGIIFSSFMAASLLGSSLYRIATSKRYHLQPMHLLSLAVLIVVFSLFMLTFSTSPGQESPVESFIAFLLIELACGLYFPSMSFLRRKVIPETEQAGVLNWFRVPLHSLACLGLLVLHDSDRKTGTRNMFSICSAVMVMALLAVVGLFTVVRHDAELRVPSPTEEPYAPEL

SEQ ID NO: 48217 - protein, 557 aa, Homo sapiens
  Payload ID: 9754
  Gene Symbol: MFSD5
  Gene Name: major facilitator superfamily domain containing 5
  Uniprot ID: Q6N075
  ENSP ID: ENSP00000442688
MEVTAVGEEANQGDLLGFGQRCCSLGSSNPWLYRTAGIFPEHCTEEKKIGTYFRVAPQASKSQRSRCHGMAASEARPGEATAASYGRPFPTHPRRQEFRARVVRGPTMLVTAYLAFVGLLASCLGLELSRCRAKPPGRACSNPSFLRFQLDFYQVYFLALAADWLQAPYLYKLYQHYYFLEGQIAILYVCGLASTVLFGLVASSLVDWLGRKNSCVLFSLTYSLCCLTKLSQDYFVLLVGRALGGLSTALLFSAFEAWYIHEHVERHDFPAEWIPATFARAAFWNHVLAVVAGVAAEAVASWIGLGPVAPFVAAIPLLALAGALALRNWGENYDRQRAFSRTCAGGLRCLLSDRRVLLLGTIQALFESVIFIFVFLWTPVLDPHGAPLGIIFSSFMAASLLGSSLYRIATSKRYHLQPMHLLSLAVLIVVFSLFMLTFSTSPGQESPVESFIAFLLIELACGLYFPSMSFLRRKVIPETEQAGVLNWFRVPLHSLACLGLLVLHDSDRKTGTRNMFSICSAVMVMALLAVVGLFTVVRHDAELRVPSPTEEPYAPEL

SEQ ID NO: 48218 - protein, 412 aa, Homo sapiens
  Payload ID: 9754
  Gene Symbol: MFSD5
  Gene Name: major facilitator superfamily domain containing 5
  ENSP ID: ENSP00000449354
MEVTAVGEEANQGDLLGFGQRCCSLGSSNPWLYRTAGIFPEHCTEEKKIGTYFRVAPQASKSQRSRCHGMAASEARPGEATAASYGRPFPTHPRRQEFRARVVRGPTMLVTAYLAFVGLLASCLGLELSRCRAKPPGRACSNPSFLRFQLDFYQVYFLALAADWLQAPYLYKLYQHYYFLEGQIAILYVCGLASTVLFGLVASSLVDWLGRKNSCVLFSLTYSLCCLTKLSQDYFVLLVGRALGGLSTALLFSAFEAWYIHEHVERHDFPAEWIPATFARAAFWNHVLAVVAGVAAEAVASWIGLGPVAPFVAAIPLLALAGALALRNWGENYDRQRAFSRTCAGGLRCLLSDRRVLLLGTIQALFESVIFIFVFLWTPVLDPHGAPLGIIFSSFMAASLLGSSLYRIATSK

SEQ ID NO: 48219 - protein, 791 aa, Homo sapiens
  Payload ID: 9755
  Gene Symbol: MFSD6
  Gene Name: major facilitator superfamily domain containing 6
  Uniprot ID: Q6ZSS7
  ENSP ID: ENSP00000281416
MADDKVAILTDDEEEQKRKYVLADPFNGISREPEPPSNETPSSTETSAIPEEEIDWIEKHCVKINNDLLISKVFYFFFYSAYGSLYPLLPVYYKQLGMSPSQSGLLVGIRYFIEFCSAPFWGVVADRFKKGKIVLLFSLLCWVLFNLGIGFVKPATLRCVPKIRPTTHPTNASHQLTILPTNSSFTSFLTISPKMREKRNLLETRLNVSDTVTLPTAPNMNSEPTLQPQTGEITNRMMDLTLNSSTATPVSPGSVTKETTTVIVTTTKSLPSDQVMLVYDQQEVEAIFLVILVVVIIGEFFSASSVTIVDTVTLQYLGKHRDRYGLQRMWGSLGWGLAMLSVGIGIDYTHIEVLIDGKGCKPPEYRNYQIVFIVFGVLMTMALIVATQFRFRYNHFKNDDSKGKEVEIPQVERNNSTESSEETPTTTSHSQAFNFWDLIKLLCSVQYGSVLFVAWFMGFGYGFVFTFLYWHLEDLNGTTTLFGVCSVLSHVSELTAYFFSHKLIELIGHIRVLYIGLACNTARYIYISYLENAWTVLPMEVLQGVTHAAIWAACISYLSAAVPPELRTSAQGILQGLHLGLGRGCGAMIGGVLVNYFGAAATFRGIGMACLVILLLFALIQWLAVPDEEEDKTMLAERIPVPSSPVPIATIDLVQQQTEDVMPRIEPRLPPKKTKHQEEQEDVNKPAWGVSSSPWVTFVYALYQIKEMMQLTRDNRASEIQPLQGTNENRENSPAGRAQPVPCETHSDPSRNQPSPDAAASQTQTSPAHPSVDPCTEESEEQQAQLAAGGH

SEQ ID NO: 48220 - protein, 791 aa, Homo sapiens; identical to SEQ ID NO: 48219
  Payload ID: 9755
  Gene Symbol: MFSD6
  Gene Name: major facilitator superfamily domain containing 6
  Uniprot ID: Q6ZSS7
  ENSP ID: ENSP00000376141

SEQ ID NO: 48221 - protein, 271 aa, Homo sapiens
  Payload ID: 9755
  Gene Symbol: MFSD6
  Gene Name: major facilitator superfamily domain containing 6
  ENSP ID: ENSP00000397276
  MOD_RES (1)..(1): Any amino acid
XTFLYWHLEDLNGTTTLFGVCSVLSHVSELTAYFFSHKLIELIGHIRVLYIGLACNTARYIYISYLENAWTVLPMEVLQGVTHAAIWAACISYLSAAVPPELRTSAQGILQGLHLGLGRGCGAMIGGVLVNYFGAAATFRGIGMACLVILLLFALIQWLAVPDEEEDKTMLAERIPVPSSPVPIATIDLVQQQTEDVMPRIEPRLPPKKTKHQEEQEDVNKPAWGVSSSPWVTFVYALYQIKEMMQLTRDNRASEIQPLQLHIGKEMKGDQ

SEQ ID NO: 48222 - protein, 42 aa, Homo sapiens
  Payload ID: 9755
  Gene Symbol: MFSD6
  Gene Name: major facilitator superfamily domain containing 6
  ENSP ID: ENSP00000398737
MADDKVAILTDDEEEQKRKYVLADPFNGISREPEPPSNETPS

SEQ ID NO: 48223 - protein, 114 aa, Homo sapiens
  Payload ID: 9755
  Gene Symbol: MFSD6
  Gene Name: major facilitator superfamily domain containing 6
  ENSP ID: ENSP00000400131
MADDKVAILTDDEEEQKRKYVLADPFNGISREPEPPSNETPSSTETSAIPEEEIDWIEKHCVKINNDLLISKVFYFFFYSAYGSLYPLLPVYYKQLGMSPSQSGLLVGIRYFIE

SEQ ID NO: 48224 - protein, 156 aa, Homo sapiens
  Payload ID: 9755
  Gene Symbol: MFSD6
  Gene Name: major facilitator superfamily domain containing 6
  ENSP ID: ENSP00000403762
MADDKVAILTDDEEEQKRKYVLADPFNGISREPEPPSNETPSSTETSAIPEEEIDWIEKHCVKINNDLLISKVFYFFFYSAYGSLYPLLPVYYKQLGMSPSQSGLLVGIRYFIEFCSAPFWGVVADRFKKGKIVLLFSLLCWVLFNLGIGFVKPAT

SEQ ID NO: 48225 - protein, 91 aa, Homo sapiens
  Payload ID: 9755
  Gene Symbol: MFSD6
  Gene Name: major facilitator superfamily domain containing 6
  ENSP ID: ENSP00000404511
  MOD_RES (1)..(1): Any amino acid
XLYQIKEMMQLTRDNRASEIQPLQGTNENRENSPAGRAQPVPCETHSDPSRNQPSPDAAASQTQTSPAHPSVDPCTEESEEQQAQLAAGGH

SEQ ID NO: 48226 - protein, 179 aa, Homo sapiens
  Payload ID: 9755
  Gene Symbol: MFSD6
  Gene Name: major facilitator superfamily domain containing 6
  ENSP ID: ENSP00000406837
MEVLQGVTHAAIWAACISYLSAAVPPELRTSAQGILQGLHLGLGRGCGAMIGGVLVNYFGAAATFRGIGMACLVILLLFALIQWLAVPDEEEDKTMLAERIPVPSSPVPIATIDLVQQQTEDVMPRIEPRLPPKKTKHQEEQEDVNKPAWGVSSSPWVTFVYALYQIKEMMQLTRDNRA

SEQ ID NO: 48227 - protein, 586 aa, Homo sapiens
  Payload ID: 9756
  Gene Symbol: MFSD6L
  Gene Name: major facilitator superfamily domain containing 6-like
  Uniprot ID: Q8IWD5
  ENSP ID: ENSP00000330051
MSANPRWDISRALGVAKLFHLVCGVREACVTPFLTLYLRQLGLAAPWVGTLMGTKHLIAAFWAPVCAFLAKSYRKRRALLIGSLLGSVGASLLMVLVPPVDKNRVHFPCNGSSGLTSTDALPGVTLPVNITSAQESASSHPAKRTAEVEMPGFRNPPGESDRETFRDLHVYLAPSVEGARTTSQALLHPVTSGLKDHPWEVTFEVVKTALPLLPGGKGPGNPANLSGTKGKAWAFDLSLEALRRTFILSLGSVAFWELLTAPLEQVADDSLYEFLDFVDATDRYRSLWVWRLLGMSAGVCGITALVGQLDCFLMTSGPRGVVHFYGYSVVSTLALLVSIAFPIPICQQWEPSYKRVKALSIVGGDPHLILLASTTVLVGAIVSTVQNFLFWHMKDHGSGELVMGFSVALSLLGEILLHPFKATLLRKLSRTGLVGLGLSCLAGQLLYYSFLWSWWSVLPIQILSAISNRALWWAVGASVEDLATPRMERALSALFRGHFYGSGCSLGSFVGGFVVMRFSLAVLYQACCVALLLWLALLLSIQRRLPRERKIKYSKLLSMEVSDTSDSEQGTEQDWLVKAMREEHSD

SEQ ID NO: 48228 - protein, 441 aa, Homo sapiens
  Payload ID: 9757
  Gene Symbol: MFSD7
  Gene Name: major facilitator superfamily domain containing 7
  Uniprot ID: Q6UXD7
  ENSP ID: ENSP00000307545
MAGPTEAETGLAEPRALCAQRGHRTYARRWVFLLAISLLNCSNATINWLSLVYLVVSTPFGVAAIWILDSVGLRAALGVYTIPAGVVCLLSTICLWESVPPTPPSAGAASSTSEKFLDGLKLQLMWNKAYVILAVCLGGMIGISASFSALLEQILCASGHSSGFSGLCGALFITFGILGALALGPYVDRTKHFTEATKIGLCLFSLACVPFALVSQLQGQTLALAATCSLLGLFGFSVGPVAMELAVECSFPVGEGAATGMIFVLGQAEGILIMLAMTALTVRRSEPSLSTCQQGEDPLDWTVSLLLMAGLCTFFSCILAVFFHTPYRRLQAESGEPPSTRNAVGGADSGPGVDRGGAGRAGVLGPSTATPECTARGASLEDPRGPGSPHPACHRATPRAQGPAATDAPSRPGRLAGRVQASRFIDPAGSHSSFSSPWVIT

SEQ ID NO: 48229 - protein, 559 aa, Homo sapiens
  Payload ID: 9757
  Gene Symbol: MFSD7
  Gene Name: major facilitator superfamily domain containing 7
  Uniprot ID: Q6UXD7
  ENSP ID: ENSP00000320234
MAGPTEAETGLAEPRALCAQRGHRTYARRWVFLLAISLLNCSNATLWLSFAPVADVIAEDLVLSMEQINWLSLVYLVVSTPFGVAAIWILDSVGLRAATILGAWLNFAGSVLRMVPCMVVGTQNPFAFLMGGQSLCALAQSLVIFSPAKLAALWFPEHQRATANMLATMSNPLGVLVANVLSPVLVKKGEDIPLMLGVYTIPAGVVCLLSTICLWESVPPTPPSAGAASSTSEKFLDGLKLLMWNKAYVILAVCLGGMIGISASFSALLEQILCASGHSSGFSGLCGALFITFGILGALALGPYVDRTKHFTEATKIGLCLFSLACVPFALVSQLQGQTLALAATCSLLGLFGFSVGPVAMELAVECSFPVGEGAATGMIFVLGQAEGILIMLAMTALTVRRSEPSLSTCQQGEDPLDWTVSLLLMAGLCTFFSCILAVFFHTPYRRLQAESGEPPSTRNAVGGADSGPGVDRGGAGRAGVLGPSTATPECTARGASLEDPRGPGSPHPACHRATPRAQGPAATDAPSRPGRLAGRVQASRFIDPAGSHSSFSSPWVIT

SEQ ID NO: 48230 - protein, 560 aa, Homo sapiens
  Payload ID: 9757
  Gene Symbol: MFSD7
  Gene Name: major facilitator superfamily domain containing 7
  Uniprot ID: Q6UXD7
  ENSP ID: ENSP00000384616
MAGPTEAETGLAEPRALCAQRGHRTYARRWVFLLAISLLNCSNATLWLSFAPVADVIAEDLVLSMEQINWLSLVYLVVSTPFGVAAIWILDSVGLRAATILGAWLNFAGSVLRMVPCMVVGTQNPFAFLMGGQSLCALAQSLVIFSPAKLAALWFPEHQRATANMLATMSNPLGVLVANVLSPVLVKKGEDIPLMLGVYTIPAGVVCLLSTICLWESVPPTPPSAGAASSTSEKFLDGLKLQLMWNKAYVILAVCLGGMIGISASFSALLEQILCASGHSSGFSGLCGALFITFGILGALALGPYVDRTKHFTEATKIGLCLFSLACVPFALVSQLQGQTLALAATCSLLGLFGFSVGPVAMELAVECSFPVGEGAATGMIFVLGQAEGILIMLAMTALTVRRSEPSLSTCQQGEDPLDWTVSLLLMAGLCTFFSCILAVFFHTPYRRLQAESGEPPSTRNAVGGADSGPGVDRGGAGRAGVLGPSTATPECTARGASLEDPRGPGSPHPACHRATPRAQGPAATDAPSRPGRLAGRVQASRFIDPAGSHSSFSSPWVIT

SEQ ID NO: 48231 - protein, 463 aa, Homo sapiens
  Payload ID: 9757
  Gene Symbol: MFSD7
  Gene Name: major facilitator superfamily domain containing 7
  ENSP ID: ENSP00000423204
MAGPTEAETGLAEPRALCAQRGHRTYARRWVFLLAISLLNCSNATLWLSFAPVADVIAEDLVLSMEQINWLSLVYLVVSTPFGVAAIWILDSVGLRAALGVYTIPAGVVCLLSTICLWESVPPTPPSAGAASSTSEKFLDGLKLQLMWNKAYVILAVCLGGMIGISASFSALLEQILCASGHSSGFSGLCGALFITFGILGALALGPYVDRTKHFTEATKIGLCLFSLACVPFALVSQLQGQTLALAATCSLLGLFGFSVGPVAMELAVECSFPVGEGAATGMIFVLGQAEGILIMLAMTALTVRRSEPSLSTCQQGEDPLDWTVSLLLMAGLCTFFSCILAVFFHTPYRRLQAESGEPPSTRNAVGGADSGPGVDRGGAGRAGVLGPSTATPECTARGASLEDPRGPGSPHPACHRATPRAQGPAATDAPSRPGRLAGRVQASRFIDPAGSHSSFSSPWVIT

SEQ ID NO: 48232 - protein, 217 aa, Homo sapiens
  Payload ID: 9757
  Gene Symbol: MFSD7
  Gene Name: major facilitator superfamily domain containing 7
  ENSP ID: ENSP00000424556
MEQINWLSLVYLVVSTPFGVAAIWILDSVGLRAATILGAWLNFAGSVLRMVPCMVVGTQNPFAFLMGGQSLCALAQSLVIFSPAKLAALWFPEHQRATANMLATMSNPLGVLVANVLSPVLVKKGEDIPLMLGVYTIPAGVVCLLSTICLWESVPPTPPSAGAASSTSEKFLDGLKLQLMWNKAYVILAVCLGGMIGISASFSALLEQILCASGHSS

SEQ ID NO: 48233 - protein, 199 aa, Homo sapiens
  Payload ID: 9757
  Gene Symbol: MFSD7
  Gene Name: major facilitator superfamily domain containing 7
  ENSP ID: ENSP00000425038
MAGPTEAETGLAEPRALCAQRGHRTYARRWVFLLAISLLNCSNATLWLSFAPVADVIAEDLVLSMEQINWLSLVYLVVSTPFGVAAIWILDSVGLRAAGFSGLCGALFITFGILGALALGPYVDRTKHFTEATKIGLCLFSLACVPFALVSQLQGQTLALAATCSLLGLFGFSVGPVAMELAVECSFPVGEGAATGMIF

SEQ ID NO: 48234 - protein, 420 aa, Homo sapiens
  Payload ID: 9757
  Gene Symbol: MFSD7
  Gene Name: major facilitator superfamily domain containing 7
  ENSP ID: ENSP00000425753
MEQINWLSLVYLVVSTPFGVAAIWILDSVGLRAATILGAWLNFAGSVLRMVPCMVVGTQNPFAFLMGGQSLCALAQSLVIFSPAKLAALWFPEHQRATANMLATMSNPLGVLVANVLSPVLVKKGEDIPLMLGVYTIPAGVVCLLSTICLWESVPPTPPSAGAASSTSEKFLDGLKLLMWNKAYVILAVCLGGMIGISASFSALLEQILCASGHSSGFSGLCGALFITFGILGALALGPYVDRTKHFTEATKIGLCLFSLACVPFALVSQLQGQTLALAATCSLLGLFGFSVGPVAMELAVECSFPVGEGAATGMIFVLGQAEGILIMLAMTALTVRRSEPSLSTCQQGEDPLDWTAASWRSSSTPHTGACRPSLGSPPPPVTPWAAQTQGRVWTEGEQEGLGSWGPARRLRSARRGGPR

SEQ ID NO: 48235 - protein, 518 aa, Homo sapiens
  Payload ID: 9758
  Gene Symbol: MFSD8
  Gene Name: major facilitator superfamily domain containing 8
  Uniprot ID: Q8NHS3
  ENSP ID: ENSP00000296468
MAGLRNESEQEPLLGDTPGSREWDILETEEHYKSRWRSIRILYLTMFLSSVGFSVVMMSIWPYLQKIDPTADTSFLGWVIASYSLGQMVASPIFGLWSNYRPRKEPLIVSILISVAANCLYAYLHIPASHNKYYMLVARGLLGIGAGNVAVVRSYTAGATSLQERTSSMANISMCQALGFILGPVFQTCFTFLGEKGVTWDVIKLQINMYTTPVLLSAFLGILNIILILAILREHRVDDSGRQCKSINFEEASTDEAQVPQGNIDQVAVVAINVLFFVTLFIFALFETIITPLTMDMYAWTQEQAVLYNGIILAALGVEAVVIFLGVKLLSKKIGERAILLGGLIVVWVGFFILLPWGNQFPKIQWEDLHNNSIPNTTFGEIIIGLWKSPMEDDNERPTGCSIEQAWCLYTPVIHLAQFLTSAVLIGLGYPVCNLMSYTLYSKILGPKPQGVYMGWLTASGSGARILGPMFISQVYAHWGPRWAFSLVCGIIVLTITLLGVVYKRLIALSVRYGRIQE

SEQ ID NO: 48236 - protein, 153 aa, Homo sapiens
  Payload ID: 9758
  Gene Symbol: MFSD8
  Gene Name: major facilitator superfamily domain containing 8
  Uniprot ID: Q8NHS3
  ENSP ID: ENSP00000421176
MFLSSVGFSVVMMSIWPYLQKIDPTADTSFLGWVIASYSLGQMVASPIFGLWSNYRPRKEPLIVSILISVAANCLYAYLHIPASHNKYYMLVARGLLGIGAVFQTCFTFLGEKGVTWDVIKLQINMYTTPVLLSAFLGILNIILILAILSKYR

SEQ ID NO: 48237 - protein, 473 aa, Homo sapiens
  Payload ID: 9758
  Gene Symbol: MFSD8
  Gene Name: major facilitator superfamily domain containing 8
  ENSP ID: ENSP00000425000
MFLSSVGFSVVMMSIWPYLQKIDPTADTSFLGWVIASYSLGQMVASPIFGLWSNYRPRKEPLIVSILISVAANCLYAYLHIPASHNKYYMLVARGLLGIGAGNVAVVRSYTAGATSLQERTSSMANISMCQALGFILGPVFQTCFTFLGEKGVTWDVIKLQINMYTTPVLLSAFLGILNIILILAILREHRVDDSGRQCKSINFEEASTDEAQVPQGNIDQVAVVAINVLFFVTLFIFALFETIITPLTMDMYAWTQEQAVLYNGIILAALGVEAVVIFLGVKLLSKKIGERAILLGGLIVVWVGFFILLPWGNQFPKIQWEDLHNNSIPNTTFGEIIIGLWKSPMEDDNERPTGCSIEQAWCLYTPVIHLAQFLTSAVLIGLGYPVCNLMSYTLYSKILGPKPQGVYMGWLTASGSGARILGPMFISQVYAHWGPRWAFSLVCGIIVLTITLLGVVYKRLIALSVRYGRIQE

SEQ ID NO: 48238 - protein, 474 aa, Homo sapiens
  Payload ID: 9759
  Gene Symbol: MFSD9
  Gene Name: major facilitator superfamily domain containing 9
  Uniprot ID: Q8NBP5
  ENSP ID: ENSP00000258436
MELGGHWDMNSAPRLVSETAERKQEQKTGTEAEAADSGAVGARRFLLCLYLVGFLDLFGVSMVVPLLSLHVKSLGASPTVAGIVGSSYGILQLFSSTLVGCWSDVVGRRSSLLACILLSALGYLLLGAATNVFLFVLARVPAGIFKHTLSISRALLSDVVPEKERPLVIGHFNTASGVGFILGPVVGGYLTELEDGFYLTAFICFLVFILNAGLVWFFPWREAKPGSTEKGLPLRKTHVLLGRSHDTVQEAATSRRARASKKTAQPWVEVVLALRNMKNLLFSEMWDIFLVRLLMAMAVMLYYSNFVLALEERFGVRPKVTGYLISYSSMLGAVAGLALGPILRLYKHNSQALLLHSSILTCTLLLLYSLAPTMGAVVLSSTLLSFSTAIGRTCITDLQLTVGGAQASGTLIGVGQSVTAVGRIIAPLLSGVAQEVSPCGPPSLGAVLALVAIFIMSLNKRHSSGDGNSKLKSE

SEQ ID NO: 48239 - protein, 92 aa, Homo sapiens
  Payload ID: 9759
  Gene Symbol: MFSD9
  Gene Name: major facilitator superfamily domain containing 9
  ENSP ID: ENSP00000392605
MELGGHWDMNSAPRLVSETAERKQEQKTGTEAEAADSGAVGARRFLLCLYLVGFLDLFGVSMVVPLLSLHVKSLGASPTVAGIVDDVCSKRF

SEQ ID NO: 48240 - protein, 66 aa, Homo sapiens
  Payload ID: 9759
  Gene Symbol: MFSD9
  Gene Name: major facilitator superfamily domain containing 9
  ENSP ID: ENSP00000402411
MELGGHWDMNSAPRLVSETAERKQEQKTGTEAEAADSGAVGARRFLLCLYLVGFLVSASVGAGSKC

SEQ ID NO: 48241 - protein, 92 aa, Homo sapiens; identical to SEQ ID NO: 48239
  Payload ID: 9759
  Gene Symbol: MFSD9
  Gene Name: major facilitator superfamily domain containing 9
  ENSP ID: ENSP00000408630

SEQ ID NO: 48242 - protein, 79 aa, Homo sapiens
  Payload ID: 9759
  Gene Symbol: MFSD9
  Gene Name: major facilitator superfamily domain containing 9
  ENSP ID: ENSP00000413641
TVAGIVGSSYGILQLFSSTLVGCWSDVVGRRSSLLACILLSALGYLLLGAATNVFLFVLARVPAGLYFLMWFQRRNGRL

SEQ ID NO: 48243 - protein, 98 aa, Homo sapiens
  Payload ID: 9759
  Gene Symbol: MFSD9
  Gene Name: major facilitator superfamily domain containing 9
  ENSP ID: ENSP00000414870
MELGGHWDMNSAPRLVSETAERKQEQKTGTEAEAADSGAVGARRFLLCLYLVGFLHGCAFIEPSCQVPWSKSNSCWNSRRRMFKEILRFEHYNQVPCH

SEQ ID NO: 48244 - protein, 299 aa, Homo sapiens
  Payload ID: 9760
  Gene Symbol: HLA-A
  Gene Name: major histocompatibility complex, class I, A
  ENSP ID: ENSP00000365998
MAVMAPRTLLLLLSGALALTQTWAGSHSMRYFFTSVSRPGRGEPRFIAVGYVDDTQFVRFDSDAASQRMEPRAPWIEQEGPEYWDQETRNVKAQSQTDRVDLGTLRGYYNQSEAGSHTIQIMYGCDVGSDGRFLRGYRQDAYDGKDYIALNEDLRSWTAADMAAQITKRKWEAAHEAEQLRAYLDGTCVEWLRRYLENGKETLQRTDPPKTHMTHHPISDHEATLRCWALGFYPAEITLTWQRDGEDQTQDTELVETRPAGDGTFQKWAAVVVPSGEEQRYTCHVQHEGLPKPLTLRWV

SEQ ID NO: 48245 - protein, 371 aa, Homo sapiens
  Payload ID: 9760
  Gene Symbol: HLA-A
  Gene Name: major histocompatibility complex, class I, A
  ENSP ID: ENSP00000366002
MAVMAPRTLLLLLSGALALTQTWAGSHSMRYFFTSVSRPGRGEPRFIAVGYVDDTQFVRFDSDAASQRMEPRAPWIEQEGPEYWDQETRNVKAQSQTDRVDLGTLRGYYNQSEAGSHTIQIMYGCDVGSDGRFLRGYRQDAYDGKDYIALNEDLRSWTAADMAAQITKRKWEAAHEAEQLRAYLDGTCVEWLRRYLENGKETLQRTDPPKTHMTHHPISDHEATLRCWALGFYPAEITLTWQRDGEDQTQDTELVETRPAGDGTFQKWAAVVVPSGEEQRYTCHVQHEGLPKPLTLRWELSSQPTIPIVGIIAGLVLLGAVITGAVVAAVMWRRKSSGGEGVKDRKGGSYTQAASSDSAQGSDVSLTACKV

SEQ ID NO: 48246 - protein, 365 aa, Homo sapiens
  Payload ID: 9760
  Gene Symbol: HLA-A
  Gene Name: major histocompatibility complex, class I, A
  Uniprot ID: P04439
  ENSP ID: ENSP00000366005
MAVMAPRTLLLLLSGALALTQTWAGSHSMRYFFTSVSRPGRGEPRFIAVGYVDDTQFVRFDSDAASQRMEPRAPWIEQEGPEYWDQETRNVKAQSQTDRVDLGTLRGYYNQSEAGSHTIQIMYGCDVGSDGRFLRGYRQDAYDGKDYIALNEDLRSWTAADMAAQITKRKWEAAHEAEQLRAYLDGTCVEWLRRYLENGKETLQRTDPPKTHMTHHPISDHEATLRCWALGFYPAEITLTWQRDGEDQTQDTELVETRPAGDGTFQKWAAVVVPSGEEQRYTCHVQHEGLPKPLTLRWELSSQPTIPIVGIIAGLVLLGAVITGAVVAAVMWRRKSSDRKGGSYTQAASSDSAQGSDVSLTACKV

SEQ ID NO: 48247 - protein, 299 aa, Homo sapiens
  Payload ID: 9760
  Gene Symbol: HLA-A
  Gene Name: major histocompatibility complex, class I, A
  ENSP ID: ENSP00000366018
MAVMAPRTLVLLLSGALALTQTWAGSHSMRYFYTSVSRPGRGEPRFIAVGYVDDTQFVRFDSDAASQRMEPRAPWIEQEGPEYWDRNTRNVKAHSQTDRANLGTLRGYYNQSEDGSHTIQRMYGCDVGPDGRFLRGYQQDAYDGKDYIALNEDLRSWTAADMAAQITQRKWETAHEAEQWRAYLEGRCVEWLRRYLENGKETLQRTDAPKTHMTHHAVSDHEATLRCWALSFYPAEITLTWQRDGEDQTQDTELVETRPAGDGTFQKWASVVVPSGQEQRYTCHVQHEGLPKPLTLRWV

SEQ ID NO: 48248 - protein, 365 aa, Homo sapiens
  Payload ID: 9760
  Gene Symbol: HLA-A
  Gene Name: major histocompatibility complex, class I, A
  Uniprot ID: P18462
  ENSP ID: ENSP00000373100
MAVMAPRTLVLLLSGALALTQTWAGSHSMRYFYTSVSRPGRGEPRFIAVGYVDDTQFVRFDSDAASQRMEPRAPWIEQEGPEYWDRNTRNVKAHSQTDRANLGTLRGYYNQSEDGSHTIQRMYGCDVGPDGRFLRGYQQDAYDGKDYIALNEDLRSWTAADMAAQITQRKWETAHEAEQWRAYLEGRCVEWLRRYLENGKETLQRTDAPKTHMTHHAVSDHEATLRCWALSFYPAEITLTWQRDGEDQTQDTELVETRPAGDGTFQKWASVVVPSGQEQRYTCHVQHEGLPKPLTLRWEPSSQPTIPIVGIIAGLVLFGAVIAGAVVAAVMWRRKSSDRKGGSYSQAASSDSAQGSDMSLTACKV

SEQ ID NO: 48249 - protein, 371 aa, Homo sapiens
  Payload ID: 9760
  Gene Symbol: HLA-A
  Gene Name: major histocompatibility complex, class I, A
  ENSP ID: ENSP00000373114
MAVMAPRTLVLLLSGALALTQTWAGSHSMRYFYTSVSRPGRGEPRFIAVGYVDDTQFVRFDSDAASQRMEPRAPWIEQEGPEYWDRNTRNVKAHSQTDRANLGTLRGYYNQSEDGSHTIQRMYGCDVGPDGRFLRGYQQDAYDGKDYIALNEDLRSWTAADMAAQITQRKWETAHEAEQWRAYLEGRCVEWLRRYLENGKETLQRTDAPKTHMTHHAVSDHEATLRCWALSFYPAEITLTWQRDGEDQTQDTELVETRPAGDGTFQKWASVVVPSGQEQRYTCHVQHEGLPKPLTLRWEPSSQPTIPIVGIIAGLVLFGAVIAGAVVAAVMWRRKSSGGEGMKDRKGGSYSQAASSDSAQGSDMSLTACKV

SEQ ID NO: 48250 - protein, 365 aa, Homo sapiens; identical to SEQ ID NO: 48246
  Payload ID: 9760
  Gene Symbol: HLA-A
  Gene Name: major histocompatibility complex, class I, A
  Uniprot ID: P04439
  ENSP ID: ENSP00000379873

SEQ ID NO: 48251 - protein, 371 aa, Homo sapiens
  Payload ID: 9760
  Gene Symbol: HLA-A
  Gene Name: major histocompatibility complex, class I, A
  ENSP ID: ENSP00000388526
MAVMAPRTLVLLLSGALALTQTWAGSHSMRYFFTSVSRPGRGEPRFIAVGYVDDTQFVRFDSDAASQRMEPRAPWIEQEGPEYWDGETRKVKAHSQTHRVDLGTLRGYYNQSEAGSHTVQRMYGCDVGSDWRFLRGYHQYAYDGKDYIALKEDLRSWTAADMAAQTTKHKWEAAHVAEQLRAYLEGTCVEWLRRYLENGKETLQRTDAPKTHMTHHAVSDHEATLRCWALSFYPAEITLTWQRDGEDQTQDTELVETRPAGDGTFQKWAAVVVPSGQEQRYTCHVQHEGLPKPLTLRWEPSSQPTIPIVGIIAGLVLFGAVITGAVVAAVMWRRKSSGGEGVKDRKGGSYSQAASSDSAQGSDVSLTACKV

SEQ ID NO: 48252 - protein, 371 aa, Homo sapiens
  Payload ID: 9760
  Gene Symbol: HLA-A
  Gene Name: major histocompatibility complex, class I, A
  ENSP ID: ENSP00000388724
MAVMAPRTLLLLLSGALALTQTWAGSHSMRYFFTSVSRPGRGEPRFIAVGYVDDTQFVRFDSDAASQKMEPRAPWIEQEGPEYWDQETRNMKAHSQTDRANLGTLRGYYNQSEDGSHTIQIMYGCDVGPDGRFLRGYRQDAYDGKDYIALNEDLRSWTAADMAAQITKRKWEAVHAAEQRRVYLEGRCVDGLRRYLENGKETLQRTDPPKTHMTHHPISDHEATLRCWALGFYPAEITLTWQRDGEDQTQDTELVETRPAGDGTFQKWAAVVVPSGEEQRYTCHVQHEGLPKPLTLRWELSSQPTIPIVGIIAGLVLLGAVITGAVVAAVMWRRKSSGGEGVKDRKGGSYTQAASSDSAQGSDVSLTACKV

SEQ ID NO: 48253 - protein, 299 aa, Homo sapiens
  Payload ID: 9760
  Gene Symbol: HLA-A
  Gene Name: major histocompatibility complex, class I, A
  ENSP ID: ENSP00000390225
  MOD_RES (1)..(1): Any amino acid
XAVMAPRTLVLLLSGALALTQTWAGSHSMRYFFTSVSRPGRGEPRFIAVGYVDDTQFVRFDSDAASQRMEPRAPWIEQEGPEYWDGETRKVKAHSQTHRVDLGTLRGYYNQSEAGSHTVQRMYGCDVGSDWRFLRGYHQYAYDGKDYIALKEDLRSWTAADMAAQTTKHKWEAAHVAEQLRAYLEGTCVEWLRRYLENGKETLQRTDAPKTHMTHHAVSDHEATLRCWALSFYPAEITLTWQRDGEDQTQDTELVETRPAGDGTFQKWAAVVVPSGQEQRYTCHVQHEGLPKPLTLRWV

SEQ ID NO: 48254 - protein, 299 aa, Homo sapiens
  Payload ID: 9760
  Gene Symbol: HLA-A
  Gene Name: major histocompatibility complex, class I, A
  ENSP ID: ENSP00000391738
MAVMAPRTLLLLLLGALALTQTWAGSHSMRYFTTSVSRPGRGEPRFIAVGYVDDTQFVRFDSDAASQRMEPRAPWIEQEGPEYWDLQTRNVKAQSQTDRANLGTLRGYYNQSEAGSHTIQMMYGCDVGSDGRFLRGYRQDAYDGKDYIALNEDLRSWTAADMAAQITQRKWEAARVAEQLRAYLEGTCVEWLRRYLENGKETLQRTDAPKTHMTHHAVSDHEATLRCWALSFYPAEITLTWQRDGEDQTQDTELVETRPAGDGTFQKWASVVVPSGQEQRYTCHVQHEGLPKPLTLRWV

SEQ ID NO: 48255 - protein, 299 aa, Homo sapiens
  Payload ID: 9760
  Gene Symbol: HLA-A
  Gene Name: major histocompatibility complex, class I, A
  ENSP ID: ENSP00000392547
MAVMAPRTLVLLLSGALALTQTWAGSHSMRYFFTSVSRPGRGEPRFIAVGYVDDTQFVRFDSDAASQRMEPRAPWIEQEGPEYWDGETRKVKAHSQTHRVDLGTLRGYYNQSEAGSHTVQRMYGCDVGSDWRFLRGYHQYAYDGKDYIALKEDLRSWTAADMAAQTTKHKWEAAHVAEQLRAYLEGTCVEWLRRYLENGKETLQRTDAPKTHMTHHAVSDHEATLRCWALSFYPAEITLTWQRDGEDQTQDTELVETRPAGDGTFQKWAAVVVPSGQEQRYTCHVQHEGLPKPLTLRWV

SEQ ID NO: 48256 - protein, 299 aa, Homo sapiens
  Payload ID: 9760
  Gene Symbol: HLA-A
  Gene Name: major histocompatibility complex, class I, A
  ENSP ID: ENSP00000394582
MAVMAPRTLLLLLLGALALTQTWAGSHSMRYFFTSVSRPGRGEPRFIAVGYVDDTQFVRFDSDAASQRMEPRAPWIEQEGPEYWDQETRNVKAHSQTDRESLRIALRYYNQSEAGSHTIQMMYGCDVGPDGRLLRGYQQDAYDGKDYIALNEDLRSWTAADMAAQITQRKWEAARVAEQLRAYLEGTCVEWLRRYLENGKETLQRTDAPKTHMTHHAVSDHEATLRCWALSFYPAEITLTWQRDGEDQTQDTELVETRPAGDGTFQKWASVVVPSGQEQRYTCHVQHEGLPKPLTLRWV

SEQ ID NO: 48257 - protein, 299 aa, Homo sapiens
  Payload ID: 9760
  Gene Symbol: HLA-A
  Gene Name: major histocompatibility complex, class I, A
  ENSP ID: ENSP00000394889
MAVMAPRTLLLLLSGALALTQTWAGSHSMRYFFTSVSRPGRGEPRFIAVGYVDDTQFVRFDSDAASQKMEPRAPWIEQEGPEYWDQETRNMKAHSQTDRANLGTLRGYYNQSEDGSHTIQIMYGCDVGPDGRFLRGYRQDAYDGKDYIALNEDLRSWTAADMAAQITKRKWEAVHAAEQRRVYLEGRCVDGLRRYLENGKETLQRTDPPKTHMTHHPISDHEATLRCWALGFYPAEITLTWQRDGEDQTQDTELVETRPAGDGTFQKWAAVVVPSGEEQRYTCHVQHEGLPKPLTLRWV

SEQ ID NO: 48258 - protein, 299 aa, Homo sapiens; identical to SEQ ID NO: 48257
  Payload ID: 9760
  Gene Symbol: HLA-A
  Gene Name: major histocompatibility complex, class I, A
  ENSP ID: ENSP00000397962

SEQ ID NO: 48259 - protein, 371 aa, Homo sapiens; identical to SEQ ID NO: 48252
  Payload ID: 9760
  Gene Symbol: HLA-A
  Gene Name: major histocompatibility complex, class I, A
  ENSP ID: ENSP00000398188

SEQ ID NO: 48260 - protein, 365 aa, Homo sapiens [sequence omitted]

SEQ ID NO: 48261 - protein, 365 aa, Homo sapiens
  Payload ID: 9760
  Gene Symbol: HLA-A
  Gene Name: major histocompatibility complex, class I, A
  ENSP ID: ENSP00000403922
  MOD_RES (1)..(1): Any amino acid
XAVMAPRTLVLLLSGALALTQTWAGSHSMRYFFTSVSRPGRGEPRFIAVGYVDDTQFVRFDSDAASQRMEPRAPWIEQEGPEYWDGETRKVKAHSQTHRVDLGTLRGYYNQSEAGSHTVQRMYGCDVGSDWRFLRGYHQYAYDGKDYIALKEDLRSWTAADMAAQTTKHKWEAAHVAEQLRAYLEGTCVEWLRRYLENGKETLQRTDAPKTHMTHHAVSDHEATLRCWALSFYPAEITLTWQRDGEDQTQDTELVETRPAGDGTFQKWAAVVVPSGQEQRYTCHVQHEGLPKPLTLRWEPSSQPTIPIVGIIAGLVLFGAVITGAVVAAVMWRRKSSDRKGGSYSQAASSDSAQGSDVSLTACKV

SEQ ID NO: 48262 - protein, 365 aa, Homo sapiens
  Payload ID: 9760
  Gene Symbol: HLA-A
  Gene Name: major histocompatibility complex, class I, A
  Uniprot ID: P30443
  ENSP ID: ENSP00000404678
MAVMAPRTLLLLLSGALALTQTWAGSHSMRYFFTSVSRPGRGEPRFIAVGYVDDTQFVRFDSDAASQKMEPRAPWIEQEGPEYWDQETRNMKAHSQTDRANLGTLRGYYNQSEDGSHTIQIMYGCDVGPDGRFLRGYRQDAYDGKDYIALNEDLRSWTAADMAAQITKRKWEAVHAAEQRRVYLEGRCVDGLRRYLENGKETLQRTDPPKTHMTHHPISDHEATLRCWALGFYPAEITLTWQRDGEDQTQDTELVETRPAGDGTFQKWAAVVVPSGEEQRYTCHVQHEGLPKPLTLRWELSSQPTIPIVGIIAGLVLLGAVITGAVVAAVMWRRKSSDRKGGSYTQAASSDSAQGSDVSLTACKV

SEQ ID NO: 48263 - protein, 365 aa, Homo sapiens; identical to SEQ ID NO: 48262
  Payload ID: 9760
  Gene Symbol: HLA-A
  Gene Name: major histocompatibility complex, class I, A
  Uniprot ID: P30443
  ENSP ID: ENSP00000406366

SEQ ID NO: 48264 - protein, 365 aa, Homo sapiens
  Payload ID: 9760
  Gene Symbol: HLA-A
  Gene Name: major histocompatibility complex, class I, A
  Uniprot ID: P30512
  ENSP ID: ENSP00000408986
MAVMAPRTLLLLLLGALALTQTWAGSHSMRYFTTSVSRPGRGEPRFIAVGYVDDTQFVRFDSDAASQRMEPRAPWIEQEGPEYWDLQTRNVKAQSQTDRANLGTLRGYYNQSEAGSHTIQMMYGCDVGSDGRFLRGYRQDAYDGKDYIALNEDLRSWTAADMAAQITQRKWEAARVAEQLRAYLEGTCVEWLRRYLENGKETLQRTDAPKTHMTHHAVSDHEATLRCWALSFYPAEITLTWQRDGEDQTQDTELVETRPAGDGTFQKWASVVVPSGQEQRYTCHVQHEGLPKPLTLRWEPSSQPTIPIVGIIAGLVLFGAVFAGAVVAAVRWRRKSSDRKGGSYSQAASSDSAQGSDMSLTACKV

SEQ ID NO: 48265 - protein, 365 aa, Homo sapiens
  Payload ID: 9760
  Gene Symbol: HLA-A
  Gene Name: major histocompatibility complex, class I, A
  Uniprot ID: P30447
  ENSP ID: ENSP00000410645
MAVMAPRTLLLLLLGALALTQTWAGSHSMRYFFTSVSRPGRGEPRFIAVGYVDDTQFVRFDSDAASQRMEPRAPWIEQEGPEYWDQETRNVKAHSQTDRESLRIALRYYNQSEAGSHTIQMMYGCDVGPDGRLLRGYQQDAYDGKDYIALNEDLRSWTAADMAAQITQRKWEAARVAEQLRAYLEGTCVEWLRRYLENGKETLQRTDAPKTHMTHHAVSDHEATLRCWALSFYPAEITLTWQRDGEDQTQDTELVETRPAGDGTFQKWASVVVPSGQEQRYTCHVQHEGLPKPLTLRWEPSSQPTIPIVGIIAGLVLFGAMFAGAVVAAVRWRRKSSDRKGGSYSQAASSDSAQGSDMSLTACKV

SEQ ID NO: 48266 - protein, 371 aa, Homo sapiens
  Payload ID: 9760
  Gene Symbol: HLA-A
  Gene Name: major histocompatibility complex, class I, A
  ENSP ID: ENSP00000416233
  MOD_RES (1)..(1): Any amino acid
XAVMAPRTLVLLLSGALALTQTWAGSHSMRYFFTSVSRPGRGEPRFIAVGYVDDTQFVRFDSDAASQRMEPRAPWIEQEGPEYWDGETRKVKAHSQTHRVDLGTLRGYYNQSEAGSHTVQRMYGCDVGSDWRFLRGYHQYAYDGKDYIALKEDLRSWTAADMAAQTTKHKWEAAHVAEQLRAYLEGTCVEWLRRYLENGKETLQRTDAPKTHMTHHAVSDHEATLRCWALSFYPAEITLTWQRDGEDQTQDTELVETRPAGDGTFQKWAAVVVPSGQEQRYTCHVQHEGLPKPLTLRWEPSSQPTIPIVGIIAGLVLFGAVITGAVVAAVMWRRKSSGGEGVKDRKGGSYSQAASSDSAQGSDVSLTACKV

SEQ ID NO: 48267 - protein, 342 aa, Homo sapiens
  Payload ID: 9760
  Gene Symbol: HLA-A
  Gene Name: major histocompatibility complex, class I, A
  ENSP ID: ENSP00000432736
MAVMAPRTLLLLLLGALALTQTWAGSHSMRYFTTSVSRPGRGEPRFIAVGYVDDTQFVRFDSDAASQRMEPRAPWIEQEGPEYWDLQTRNVKAQSQTDRANLGTLRGYYNQSEAGSHTIQMMYGCDVGSDGRFLRGYRQDAYDGKDYIALNEDLRSWTAADMAAQITQRKWEAARVAEQLRAYLEGTCVEWLRRYLENGKETLQRTDAPKTHMTHHAVSDHEATLRCWALSFYPAEITLTWQRDGEDQTQDTELVETRPAGDGTFQKWASVVVPSGQEQRYTCHVQHEGLPKPLTLRWEPSSQPTIPIVGIIAGLVLFGAVFAGAVVAAVRWRRKSSGGVKG

SEQ ID NO: 48268 - protein, 365 aa, Homo sapiens; identical to SEQ ID NO: 48262
  Payload ID: 9760
  Gene Symbol: HLA-A
  Gene Name: major histocompatibility complex, class I, A
  Uniprot ID: P30443
  ENSP ID: ENSP00000447614

SEQ ID NO: 48269 - protein, 365 aa, Homo sapiens; identical to SEQ ID NO: 48262
  Payload ID: 9760
  Gene Symbol: HLA-A
  Gene Name: major histocompatibility complex, class I, A
  Uniprot ID: P30443
  ENSP ID: ENSP00000447635

SEQ ID NO: 48270 - protein, 365 aa, Homo sapiens [sequence omitted]

SEQ ID NO: 48271 - protein, 365 aa, Homo sapiens; identical to SEQ ID NO: 48248
  Payload ID: 9760
  Gene Symbol: HLA-A
  Gene Name: major histocompatibility complex, class I, A
  Uniprot ID: P30450
  ENSP ID: ENSP00000447990

SEQ ID NO: 48272 - protein, 365 aa, Homo sapiens [sequence omitted]

SEQ ID NO: 48273 - protein, 394 aa, Homo sapiens
  Payload ID: 9760
  Gene Symbol: HLA-A
  Gene Name: major histocompatibility complex, class I, A
  ENSP ID: ENSP00000448516
MAVMAPRTLLLLLSGALALTQTWAGSHSMRYFFTSVSRPGRGEPRFIAVGYVDDTQFVRFDSDAASQKMEPRAPWIEQEGPEYWDQETRNMKAHSQTDRANLGTLRGYYNQSEDGSHTIQIMYGCDVGPDGRFLRGYRQDAYDGKDYIALNEDLRSWTAADMAAQITKRKWEAVHAAEQRRVYLEGRCVDGLRRYLENGKETLQRTDPPKTHMTHHPISDHEATLRCWALGFYPAEITLTWQRDGEDQTQDTELVETRPAGDGTFQKWAAVVVPSGEEQRYTCHVQHEGLPKPLTLRWELSSQPTIPIVGIIAGLVLLGAVITGAVVAAVMWRRKSSDRKGGSYTQAASSDSAQGSDVSLTACKGESLEGLMCVGCWVEQWTQLCYGVSLRWMY

SEQ ID NO: 48274 - protein, 365 aa, Homo sapiens; identical to SEQ ID NO: 48265
  Payload ID: 9760
  Gene Symbol: HLA-A
  Gene Name: major histocompatibility complex, class I, A
  Uniprot ID: P10314
  ENSP ID: ENSP00000448992

SEQ ID NO: 48275 - protein, 394 aa, Homo sapiens; identical to SEQ ID NO: 48273
  Payload ID: 9760
  Gene Symbol: HLA-A
  Gene Name: major histocompatibility complex, class I, A
  ENSP ID: ENSP00000449453

SEQ ID NO: 48276 - protein, 365 aa, Homo sapiens; identical to SEQ ID NO: 48264
  Payload ID: 9760
  Gene Symbol: HLA-A
  Gene Name: major histocompatibility complex, class I, A
  ENSP ID: ENSP00000450169

SEQ ID NO: 48277 - protein, 326 aa, Homo sapiens
  Payload ID: 9760
  Gene Symbol: HLA-A
  Gene Name: major histocompatibility complex, class I, A
  ENSP ID: ENSP00000480039
MAVMAPRTLLLLLLGALALTQTWAGSHSMRYFFTSVSRPGRGEPRFIAVGYVDDTQFVRFDSDAASQRMEPRAPWIEQEGPEYWDQETRNVKAHSQTDRESLRIALRYYNQSEAGSHTIQMMYGCDVGPDGRLLRGYQQDAYDGKDYIALNEDLRSWTAADMAAQITQRKWEAARVAEQLRAYLEGTCVEWLRRYLENGKETLQRTDAPKTHMTHHAVSDHEATLRCWALSFYPAEITLTWQRDGEDQTQDTELVETRPAGDGTFQKWASVVVPSGQEQRYTCHVQHEGLPKPLTLRWDRKGGSYSQAASSDSAQGSDMSLTACKV

SEQ ID NO: 48278 - protein, 339 aa, Homo sapiens
  Payload ID: 9760
  Gene Symbol: HLA-A
  Gene Name: major histocompatibility complex, class I, A
  ENSP ID: ENSP00000482354
MVLMAPRTLLLLLSGALALTQTWARSHSMRYFFTSVSRPGRGEPRFIAVGYVDDTQFVRFDSDAASQRMEPRAPWIEQEGPEYWDGETRKVKAHSQTHRVDLGTLRGYYNQSEAGSHTVQRMYGCDVGSDWRFLRGYHQYAYDGKDYIALKEDLRSWTAADMAAQTTKHKWEAAHVAEQLRAYLEGTCVEWLRRYLENGKETLQRTDAPKTHMTHHAVSDHEATLRCWALSFYPAEITLTWQRDGEDQTQDTELVETRPAGDGTFQKWAAVVVPSGQEQRYTCHVQHEGLPKPLTLRWEPSSQPTIPIVGIIAGLVLFGAVITGAVVAAVMWRRKSSDR

SEQ ID NO: 48279 - protein, 394 aa, Homo sapiens
  Payload ID: 9760
  Gene Symbol: HLA-A
  Gene Name: major histocompatibility complex, class I, A
  ENSP ID: ENSP00000483385
MAVMAPRTLVLLLSGALALTQTWAGSHSMRYFYTSVSRPGRGEPRFIAVGYVDDTQFVRFDSDAASQRMEPRAPWIEQEGPEYWDRNTRNVKAHSQTDRANLGTLRGYYNQSEDGSHTIQRMYGCDVGPDGRFLRGYQQDAYDGKDYIALNEDLRSWTAADMAAQITQRKWETAHEAEQWRAYLEGRCVEWLRRYLENGKETLQRTDAPKTHMTHHAVSDHEATLRCWALSFYPAEITLTWQRDGEDQTQDTELVETRPAGDGTFQKWASVVVPSGQEQRYTCHVQHEGLPKPLTLRWEPSSQPTIPIVGIIAGLVLFGAVIAGAVVAAVMWRRKSSDRKGGSYSQAASSDSAQGSDMSLTACKGESLEGLMCVGCWAEQWTQLCYGVSLHWMY

SEQ ID NO: 48280 - protein, 362 aa, Homo sapiens
  Payload ID: 9761
  Gene Symbol: HLA-B
  Gene Name: major histocompatibility complex, class I, B
  Uniprot ID: P30466
  ENSP ID: ENSP00000352656
MRVTAPRTLLLLLWGAVALTETWAGSHSMRYFHTSVSRPGRGEPRFISVGYVDGTQFVRFDSDAASPRTEPRAPWIEQEGPEYWDRNTQISKTNTQTYRESLRNLRGYYNQSEAGSHTLQRMYGCDVGPDGRLLRGHDQSAYDGKDYIALNEDLSSWTAADTAAQITQRKWEAARVAEQLRAYLEGTCVEWLRRHLENGKETLQRADPPKTHVTHHPISDHEATLRCWALGFYPAEITLTWQRDGEDQTQDTELVETRPAGDRTFQKWAAVVVPSGEEQRYTCHVQHEGLPKPLTLRWEPSSQSTIPIVGIVAGLAVLAVVVIGAVVATVMCRRKSSGGKGGSYSQAASSDSAQGSDVSLTA

SEQ ID NO: 48281 - protein, 362 aa, Homo sapiens
  Payload ID: 9761
  Gene Symbol: HLA-B
  Gene Name: major histocompatibility complex, class I, B
  Uniprot ID: P30464
  ENSP ID: ENSP00000388208
MRVTAPRTVLLLLSGALALTETWAGSHSMRYFYTAMSRPGRGEPRFIAVGYVDDTQFVRFDSDAASPRMAPRAPWIEQEGPEYWDRETQISKTNTQTYRESLRNLRGYYNQSEAGSHTLQRMYGCDVGPDGRLLRGHDQSAYDGKDYIALNEDLSSWTAADTAAQITQRKWEAAREAEQWRAYLEGLCVEWLRRYLENGKETLQRADPPKTHVTHHPISDHEATLRCWALGFYPAEITLTWQRDGEDQTQDTELVETRPAGDRTFQKWAAVVVPSGEEQRYTCHVQHEGLPKPLTLRWEPSSQSTIPIVGIVAGLAVLAVVVIGAVVATVMCRRKSSGGKGGSYSQAASSDSAQGSDVSLTA

SEQ ID NO: 48282 - protein, 241 aa, Homo sapiens
  Payload ID: 9761
  Gene Symbol: HLA-B
  Gene Name: major histocompatibility complex, class I, B
  ENSP ID: ENSP00000392099
  MOD_RES (1)..(1): Any amino acid
XPDGRLLRGHNQYAYDGKDYIALNEDLRSWTAADTAAQITQRKWEAARVAEQDRAYLEGTCVEWLRRYLENGKDTLERADPPKTHVTHHPISDHEATLRCWALGFYPAEITLTWQRDGEDQTQDTELVETRPAGDRTFQKWAAVVVPSGEEQRYTCHVQHEGLPKPLTLRWEPSSQSTVPIVGIVAGLAVLAVVVIGAVVAAVMCRRKSSGHFLPTGGKGGSYSQAACSDSAQGSDVSLTA

SEQ ID NO: 48283 - protein, 246 aa, Homo sapiens
  Payload ID: 9761
  Gene Symbol: HLA-B
  Gene Name: major histocompatibility complex, class I, B
  ENSP ID: ENSP00000392235
MASVGRSEGTAGGGAGPGEPRREEGRAGLSPSSPPGSHSMRYFYTAMSRPGRGEPRFIAVGYVDDTQFVRFDSDAASPRMAPRAPWIEQEGPEYWDRETQISKTNTQTYRESLRNLRGYYNQSEAGSHTLQRMYGCDVGPDGRLLRGHDQSAYDGKDYIALNEDLSSWTAADTAAQITQRKWEAAREAEQWRAYLEGLCVEWLRRYLENGKETLQRADPPKTHVTHHPISDHEATLRCWALGFYPA

SEQ ID NO: 48284 - protein, 246 aa, Homo sapiens
  Payload ID: 9761
  Gene Symbol: HLA-B
  Gene Name: major histocompatibility complex, class I, B
  ENSP ID: ENSP00000396397
MASVGRREGTAGGGAGPGEPRREEGRAGLSPSSPPGSHSMRYFYTAMSRPGRGEPRFITVGYVDDTLFVRFDSDATSPRKEPRAPWIEQEGPEYWDRETQISKTNTQTYRENLRTALRYYNQSEAGSHIIQRMYGCDVGPDGRLLRGYDQDAYDGKDYIALNEDLSSWTAADTAAQITQRKWEAARVAEQDRAYLEGLCVESLRRYLENGKETLQRADPPKTHVTHHPISDHEVTLRCWALGFYPA

SEQ ID NO: 48285 - protein, 241 aa, Homo sapiens
  Payload ID: 9761
  Gene Symbol: HLA-B
  Gene Name: major histocompatibility complex, class I, B
  ENSP ID: ENSP00000398100
  MOD_RES (1)..(1): Any amino acid
XPDGRLLRGYDQDAYDGKDYIALNEDLSSWTAADTAAQITQRKWEAARVAEQDRAYLEGLCVESLRRYLENGKETLQRADPPKTHVTHHPISDHEVTLRCWALGFYPAEITLTWQRDGEDQTQDTELVETRPAGDRTFQKWAAVVVPSGEEQRYTCHVQHEGLPKPLTLRWEPSSQSTVPIVGIVAGLAVLAVVVIGAVVAAVMCRRKSSGHFLPTGGKGGSYSQAACSDSAQGSDVSLTA

SEQ ID NO: 48286 - protein, 362 aa, Homo sapiens
  Payload ID: 9761
  Gene Symbol: HLA-B
  Gene Name: major histocompatibility complex, class I, B
  Uniprot ID: P01889
  ENSP ID: ENSP00000399168
MLVMAPRTVLLLLSAALALTETWAGSHSMRYFYTSVSRPGRGEPRFISVGYVDDTQFVRFDSDAASPREEPRAPWIEQEGPEYWDRNTQIYKAQAQTDRESLRNLRGYYNQSEAGSHTLQSMYGCDVGPDGRLLRGHDQYAYDGKDYIALNEDLRSWTAADTAAQITQRKWEAAREAEQRRAYLEGECVEWLRRYLENGKDKLERADPPKTHVTHHPISDHEATLRCWALGFYPAEITLTWQRDGEDQTQDTELVETRPAGDRTFQKWAAVVVPSGEEQRYTCHVQHEGLPKPLTLRWEPSSQSTVPIVGIVAGLAVLAVVVIGAVVAAVMCRRKSSGGKGGSYSQAACSDSAQGSDVSLTA

SEQ ID NO: 48287 - protein, 246 aa, Homo sapiens
  Payload ID: 9761
  Gene Symbol: HLA-B
  Gene Name: major histocompatibility complex, class I, B
  ENSP ID: ENSP00000399675
MASAGRSEGTAGGGAGPEEPRREEGRAGLSPSSPPGSHSMRYFDTAMSRPGRGEPRFISVGYVDDTQFVRFDSDAASPREEPRAPWIEQEGPEYWDRNTQIFKTNTQTDRESLRNLRGYYNQSEAGSHTLQSMYGCDVGPDGRLLRGHNQYAYDGKDYIALNEDLRSWTAADTAAQITQRKWEAARVAEQDRAYLEGTCVEWLRRYLENGKDTLERADPPKTHVTHHPISDHEATLRCWALGFYPA

SEQ ID NO: 48288 - protein, 362 aa, Homo sapiens
  Payload ID: 9761
  Gene Symbol: HLA-B
  Gene Name: major histocompatibility complex, class I, B
  Uniprot ID: P30460
  ENSP ID: ENSP00000400842
MLVMAPRTVLLLLSAALALTETWAGSHSMRYFDTAMSRPGRGEPRFISVGYVDDTQFVRFDSDAASPREEPRAPWIEQEGPEYWDRNTQIFKTNTQTDRESLRNLRGYYNQSEAGSHTLQSMYGCDVGPDGRLLRGHNQYAYDGKDYIALNEDLRSWTAADTAAQITQRKWEAARVAEQDRAYLEGTCVEWLRRYLENGKDTLERADPPKTHVTHHPISDHEATLRCWALGFYPAEITLTWQRDGEDQTQDTELVETRPAGDRTFQKWAAVVVPSGEEQRYTCHVQHEGLPKPLTLRWEPSSQSTVPIVGIVAGLAVLAVVVIGAVVAAVMCRRKSSGGKGGSYSQAACSDSAQGSDVSLTA

SEQ ID NO: 48289 - protein, 241 aa, Homo sapiens
  Payload ID: 9761
  Gene Symbol: HLA-B
  Gene Name: major histocompatibility complex, class I, B
  ENSP ID: ENSP00000401443
  MOD_RES (1)..(1): Any amino acid
XPDGRLLRGHDQSAYDGKDYIALNEDLSSWTAADTAAQITQRKWEAAREAEQWRAYLEGLCVEWLRRYLENGKETLQRADPPKTHVTHHPISDHEATLRCWALGFYPAEITLTWQRDGEDQTQDTELVETRPAGDRTFQKWAAVVVPSGEEQRYTCHVQHEGLPKPLTLRWEPSSQSTIPIVGIVAGLAVLAVVVIGAVVATVMCRRKSSGHFLPTGGKGGSYSQAASSDSAQGSDVSLTA

SEQ ID NO: 48290 - protein, 241 aa, Homo sapiens
  Payload ID: 9761
  Gene Symbol: HLA-B
  Gene Name: major histocompatibility complex, class I, B
  ENSP ID: ENSP00000403471
  MOD_RES (1)..(1): Any amino acid
XPDGRLLRGYDQDAYDGKDYIALNEDLSSWTAADTAAQITQRKWEAARVAEQLRAYLEGLCVESLRRYLENGKETLQRADPPKTHVTHHPISDHEVTLRCWALGFYPAEITLTWQRDGEDQTQDTELVETRPAGDRTFQKWAAVVVPSGEEQRYTCHVQHEGLPKPLTLRWEPSSQSTVPIVGIVAGLAVLAVVVIGAVVAAVMCRRKSSGHFLPTGGKGGSYSQAACSDSAQGSDVSLTA

SEQ ID NO: 48291 - protein, 362 aa, Homo sapiens
  Payload ID: 9761
  Gene Symbol: HLA-B
  Gene Name: major histocompatibility complex, class I, B
  Uniprot ID: P30461
  ENSP ID: ENSP00000405178
MRVTAPRTLLLLLWGAVALTETWAGSHSMRYFYTAMSRPGRGEPRFITVGYVDDTLFVRFDSDATSPRKEPRAPWIEQEGPEYWDRETQISKTNTQTYRENLRTALRYYNQSEAGSHIIQRMYGCDVGPDGRLLRGYDQDAYDGKDYIALNEDLSSWTAADTAAQITQRKWEAARVAEQLRAYLEGLCVESLRRYLENGKETLQRADPPKTHVTHHPISDHEVTLRCWALGFYPAEITLTWQRDGEDQTQDTELVETRPAGDRTFQKWAAVVVPSGEEQRYTCHVQHEGLPKPLTLRWEPSSQSTVPIVGIVAGLAVLAVVVIGAVVAAVMCRRKSSGGKGGSYSQAACSDSAQGSDVSLTA

SEQ ID NO: 48292 - protein, 362 aa, Homo sapiens
  Payload ID: 9761
  Gene Symbol: HLA-B
  Gene Name: major histocompatibility complex, class I, B
  Uniprot ID: P30481
  ENSP ID: ENSP00000405365
MRVTAPRTLLLLLWGAVALTETWAGSHSMRYFYTAMSRPGRGEPRFITVGYVDDTLFVRFDSDATSPRKEPRAPWIEQEGPEYWDRETQISKTNTQTYRENLRTALRYYNQSEAGSHIIQRMYGCDVGPDGRLLRGYDQDAYDGKDYIALNEDLSSWTAADTAAQITQRKWEAARVAEQDRAYLEGLCVESLRRYLENGKETLQRADPPKTHVTHHPISDHEVTLRCWALGFYPAEITLTWQRDGEDQTQDTELVETRPAGDRTFQKWAAVVVPSGEEQRYTCHVQHEGLPKPLTLRWEPSSQSTVPIVGIVAGLAVLAVVVIGAVVAAVMCRRKSSGGKGGSYSQAACSDSAQGSDVSLTA

SEQ ID NO: 48293 - protein, 246 aa, Homo sapiens
  Payload ID: 9761
  Gene Symbol: HLA-B
  Gene Name: major histocompatibility complex, class I, B
  ENSP ID: ENSP00000405931
MASAGRSEGTAGGGAGPEEPRREEGRAGLSPSSPPGSHSMRYFYTSVSRPGRGEPRFISVGYVDDTQFVRFDSDAASPREEPRAPWIEQEGPEYWDRNTQIYKAQAQTDRESLRNLRGYYNQSEAGSHTLQSMYGCDVGPDGRLLRGHDQYAYDGKDYIALNEDLRSWTAADTAAQITQRKWEAAREAEQRRAYLEGECVEWLRRYLENGKDKLERADPPKTHVTHHPISDHEATLRCWALGFYPA

SEQ ID NO: 48294 - protein, 241 aa, Homo sapiens
  Payload ID: 9761
  Gene Symbol: HLA-B
  Gene Name: major histocompatibility complex, class I, B
  ENSP ID: ENSP00000411954
  MOD_RES (1)..(1): Any amino acid
XPDGRLLRGHDQSAYDGKDYIALNEDLSSWTAADTAAQITQRKWEAARVAEQLRAYLEGTCVEWLRRHLENGKETLQRADPPKTHVTHHPISDHEATLRCWALGFYPAEITLTWQRDGEDQTQDTELVETRPAGDRTFQKWAAVVVPSGEEQRYTCHVQHEGLPKPLTLRWEPSSQSTIPIVGIVAGLAVLAVVVIGAVVATVMCRRKSSGHFLPTGGKGGSYSQAASSDSAQGSDVSLTA

SEQ ID NO: 48295 - protein, 246 aa, Homo sapiens
  Payload ID: 9761
  Gene Symbol: HLA-B
  Gene Name: major histocompatibility complex, class I, B
  ENSP ID: ENSP00000416672
MASVGRREGTAGGGAGPGEPRREEGRAGLSPSSPPGSHSMRYFYTAMSRPGRGEPRFITVGYVDDTLFVRFDSDATSPRKEPRAPWIEQEGPEYWDRETQISKTNTQTYRENLRTALRYYNQSEAGSHIIQRMYGCDVGPDGRLLRGYDQDAYDGKDYIALNEDLSSWTAADTAAQITQRKWEAARVAEQLRAYLEGLCVESLRRYLENGKETLQRADPPKTHVTHHPISDHEVTLRCWALGFYPA

SEQ ID NO: 48296 - protein, 224 aa, Homo sapiens
  Payload ID: 9761
  Gene Symbol: HLA-B
  Gene Name: major histocompatibility complex, class I, B
  ENSP ID: ENSP00000433363
MRVTAPRTLLLLLWGAVALTETWAGSHSMRYFHTSVSRPGRGEPRFISVGYVDGTQFVRFDSDAASPRTEPRAPWIEQEGPEYWDRNTQISKTNTQTYRESLRNLRGYYNQSEAGSHTLQRMYGCDVGPDGRLLRGHDQSAYDGKDYIALNEDLSSWTAADTAAQITQRKWEAARVAEQLRAYLEGTCVEWLRRHLENGKETLQRADQEQKSLFPAQRLELSNE

SEQ ID NO: 48297 - protein, 224 aa, Homo sapiens
  Payload ID: 9761
  Gene Symbol: HLA-B
  Gene Name: major histocompatibility complex, class I, B
  ENSP ID: ENSP00000435083
MRVTAPRTLLLLLWGAVALTETWAGSHSMRYFYTAMSRPGRGEPRFITVGYVDDTLFVRFDSDATSPRKEPRAPWIEQEGPEYWDRETQISKTNTQTYRENLRTALRYYNQSEAGSHIIQRMYGCDVGPDGRLLRGYDQDAYDGKDYIALNEDLSSWTAADTAAQITQRKWEAARVAEQDRAYLEGLCVESLRRYLENGKETLQRADQEQKSLFPAQRLELSNE

SEQ ID NO: 48298 - protein, 224 aa, Homo sapiens
  Payload ID: 9761
  Gene Symbol: HLA-B
  Gene Name: major histocompatibility complex, class I, B
  ENSP ID: ENSP00000435221
MRVTAPRTVLLLLSGALALTETWAGSHSMRYFYTAMSRPGRGEPRFIAVGYVDDTQFVRFDSDAASPRMAPRAPWIEQEGPEYWDRETQISKTNTQTYRESLRNLRGYYNQSEAGSHTLQRMYGCDVGPDGRLLRGHDQSAYDGKDYIALNEDLSSWTAADTAAQITQRKWEAAREAEQWRAYLEGLCVEWLRRYLENGKETLQRADQEQKSLFPAQRLELSNE

SEQ ID NO: 48299 - protein, 224 aa, Homo sapiens
  Payload ID: 9761
  Gene Symbol: HLA-B
  Gene Name: major histocompatibility complex, class I, B
  ENSP ID: ENSP00000435817
MRVTAPRTLLLLLWGAVALTETWAGSHSMRYFYTAMSRPGRGEPRFITVGYVDDTLFVRFDSDATSPRKEPRAPWIEQEGPEYWDRETQISKTNTQTYRENLRTALRYYNQSEAGSHIIQRMYGCDVGPDGRLLRGYDQDAYDGKDYIALNEDLSSWTAADTAAQITQRKWEAARVAEQLRAYLEGLCVESLRRYLENGKETLQRADQEQKSLFPAQRLELSNE

SEQ ID NO: 48300 - protein, 224 aa, Homo sapiens
  Payload ID: 9761
  Gene Symbol: HLA-B
  Gene Name: major histocompatibility complex, class I, B
  ENSP ID: ENSP00000436637
MLVMAPRTVLLLLSAALALTETWAGSHSMRYFDTAMSRPGRGEPRFISVGYVDDTQFVRFDSDAASPREEPRAPWIEQEGPEYWDRNTQIFKTNTQTDRESLRNLRGYYNQSEAGSHTLQSMYGCDVGPDGRLLRGHNQYAYDGKDYIALNEDLRSWTAADTAAQITQRKWEAARVAEQDRAYLEGTCVEWLRRYLENGKDTLERADQEQKSLFPAQRLELSNE

SEQ ID NO: 48301 - protein, 366 aa, Homo sapiens
  Payload ID: 9762
  Gene Symbol: HLA-C
  Gene Name: major histocompatibility complex, class I, C
  Uniprot ID: P10321
  ENSP ID: ENSP00000365402
MRVMAPRALLLLLSGGLALTETWACSHSMRYFDTAVSRPGRGEPRFISVGYVDDTQFVRFDSDAASPRGEPRAPWVEQEGPEYWDRETQKYKRQAQADRVSLRNLRGYYNQSEDGSHTLQRMSGCDLGPDGRLLRGYDQSAYDGKDYIALNEDLRSWTAADTAAQITQRKLEAARAAEQLRAYLEGTCVEWLRRYLENGKETLQRAEPPKTHVTHHPLSDHEATLRCWALGFYPAEITLTWQRDGEDQTQDTELVETRPAGDGTFQKWAAVVVPSGQEQRYTCHMQHEGLQEPLTLSWEPSSQPTIPIMGIVAGLAVLVVLAVLGAVVTAMMCRRKSSGGKGGSCSQAACSNSAQGSDESLITCKA

SEQ ID NO: 48302 - protein, 131 aa, Homo sapiens
  Payload ID: 9762
  Gene Symbol: HLA-C
  Gene Name: major histocompatibility complex, class I, C
  ENSP ID: ENSP00000365412
MRVMAPRALLLLLSGGLALTETWACSHSMRYFDTAVSRPGRGEPRFISVGYVDDTQFVRFDSDAASPRGEPRAPWVEQEGPEYWDRETQKYKRQAQADRVSLRNLRGYYNQSEDEDVWLRPGARRAPPPRV

SEQ ID NO: 48303 - protein, 372 aa, Homo sapiens
  Payload ID: 9762
  Gene Symbol: HLA-C
  Gene Name: major histocompatibility complex, class I, C
  ENSP ID: ENSP00000372813
MRVMAPRTLILLLSGALALTETWACSHSMRYFYTAVSRPGRGEPRFIAVGYVDDTQFVQFDSDAASPRGEPRAPWVEQEGPEYWDRETQKYKRQAQTDRVNLRKLRGYYNQSEAGSHTLQRMYGCDLGPDGRLLRGYNQFAYDGKDYIALNEDLRSWTAADKAAQITQRKWEAAREAEQRRAYLEGTCVEWLRRYLENGKKTLQRAEHPKTHVTHHPVSDHEATLRCWALGFYPAEITLTWQRDGEDQTQDTELVETRPAGDGTFQKWAAVVVPSGEEQRYTCHVQHEGLPEPLTLRWGPSSQPTIPIVGIVAGLAVLAVLAVLGAVMAVVMCRRKSSGHFLPTGGKGGSCSQAASSNSAQGSDESLIACKA

SEQ ID NO: 48304 - protein, 372 aa, Homo sapiens
  Payload ID: 9762
  Gene Symbol: HLA-C
  Gene Name: major histocompatibility complex, class I, C
  ENSP ID: ENSP00000372819
MRVMAPRALLLLLSGGLALTETWACSHSMRYFDTAVSRPGRGEPRFISVGYVDDTQFVRFDSDAASPRGEPRAPWVEQEGPEYWDRETQKYKRQAQADRVSLRNLRGYYNQSEDGSHTLQRMSGCDLGPDGRLLRGYDQSAYDGKDYIALNEDLRSWTAADTAAQITQRKLEAARAAEQLRAYLEGTCVEWLRRYLENGKETLQRAEPPKTHVTHHPLSDHEATLRCWALGFYPAEITLTWQRDGEDQTQDTELVETRPAGDGTFQKWAAVVVPSGQEQRYTCHMQHEGLQEPLTLSWEPSSQPTIPIMGIVAGLAVLVVLAVLGAVVTAMMCRRKSSGHFLPTGGKGGSCSQAACSNSAQGSDESLITCKA

SEQ ID NO: 48305 - protein, 397 aa, Homo sapiens
  Payload ID: 9762
  Gene Symbol: HLA-C
  Gene Name: major histocompatibility complex, class I, C
  ENSP ID: ENSP00000372975
MRVMAPRTLILLLSGALALTETWACSHSMRYFYTAVSRPGRGEPRFIAVGYVDDTQFVQFDSDAASPRGEPRAPWVEQEGPEYWDRETQKYKRQAQTDRVNLRKLRGYYNQSEAGSHTLQRMYGCDLGPDGRLLRGYNQFAYDGKDYIALNEDLRSWTAADKAAQITQRKWEAAREAEQRRAYLEGTCVEWLRRYLENGKKTLQRAEHPKTHVTHHPVSDHEATLRCWALGFYPAEITLTWQRDGEDQTQDTELVETRPAGDGTFQKWAAVVVPSGEEQRYTCHVQHEGLPEPLTLRWGPSSQPTIPIVGIVAGLAVLAVLAVLGAVMAVVMCRRKSSGREGVRSGVWPATVPRALMSLSSLVKPETAACVGLRCRISSHLSFVTSRASGISFCKGI

SEQ ID NO: 48306 - protein, 372 aa, Homo sapiens; identical to SEQ ID NO: 48303
  Payload ID: 9762
  Gene Symbol: HLA-C
  Gene Name: major histocompatibility complex, class I, C
  ENSP ID: ENSP00000372979

SEQ ID NO: 48307 - protein, 366 aa, Homo sapiens
  Payload ID: 9762
  Gene Symbol: HLA-C
  Gene Name: major histocompatibility complex, class I, C
  Uniprot ID: P30504
  ENSP ID: ENSP00000383195
MRVMAPRTLILLLSGALALTETWACSHSMRYFYTAVSRPGRGEPRFIAVGYVDDTQFVQFDSDAASPRGEPRAPWVEQEGPEYWDRETQKYKRQAQTDRVNLRKLRGYYNQSEAGSHTLQRMYGCDLGPDGRLLRGYNQFAYDGKDYIALNEDLRSWTAADKAAQITQRKWEAAREAEQRRAYLEGTCVEWLRRYLENGKKTLQRAEHPKTHVTHHPVSDHEATLRCWALGFYPAEITLTWQRDGEDQTQDTELVETRPAGDGTFQKWAAVVVPSGEEQRYTCHVQHEGLPEPLTLRWGPSSQPTIPIVGIVAGLAVLAVLAVLGAVMAVVMCRRKSSGGKGGSCSQAASSNSAQGSDESLIACKA

SEQ ID NO: 48308 - protein, 366 aa, Homo sapiens; identical to SEQ ID NO: 48307
  Payload ID: 9762
  Gene Symbol: HLA-C
  Gene Name: major histocompatibility complex, class I, C
  Uniprot ID: P30504
  ENSP ID: ENSP00000383244

SEQ ID NO: 48309 - protein, 397 aa, Homo sapiens; identical to SEQ ID NO: 48305
  Payload ID: 9762
  Gene Symbol: HLA-C
  Gene Name: major histocompatibility complex, class I, C
  ENSP ID: ENSP00000383245

SEQ ID NO: 48310 - protein, 372 aa, Homo sapiens
  Payload ID: 9762
  Gene Symbol: HLA-C
  Gene Name: major histocompatibility complex, class I, C
  ENSP ID: ENSP00000388708
MRVMAPRTLILLLSGALALTETWACSHSMRYFYTAVSRPGRGEPRFIAVGYVDDTQFVRFDSDAASPRGEPRAPWVEQEGPEYWDRETQKYKRQAQTDRVSLRNLRGYYNQSEAGSHTLQWMYGCDLGPDGRLLRGYDQSAYDGKDYIALNEDLRSWTAADTAAQITQRKWEAARAAEQQRAYLEGTCVEWLRRYLENGKETLQRAEHPKTHVTHHLVSDHEATLRCWALGFYPAEITLTWQRDGEDQTQDTELVETRPAGDGTFQKWAAVVVPSGEEQRYTCHVQHEGLPEPLTLRWEPSSQPTIPIVGIVAGLAVLAVLAVLGAVVAVVMCRRKSSGHFLPTGGKGGSCSQAASSNSAQGSDESLIACKA

SEQ ID NO: 48311 - protein, 368 aa, Homo sapiens
  Payload ID: 9762
  Gene Symbol: HLA-C
  Gene Name: major histocompatibility complex, class I, C
  ENSP ID: ENSP00000389248
MRVMAPRALLLLLSGGLALTETWACSHSMRYFDTAVSRPGRGEPRFISVGYVDDTQFVRFDSDAASPRGEPRAPWVEQEGPEYWDRETQNYKRQAQADRVSLRNLRGYYNQSEDGSHTLQRMYGCDLGPDGRLLRGYDQSAYDGKDYIALNEDLRSWTAADTAAQITQRKLEAARAAEQLRAYLEGTCVEWLRRYLENGKETLQRAEPPKTHVTHHPLSDHEATLRCWALGFYPAEITLTWQRDGEDQTQDTELVETRPAGDGTFQKWAAVVVPSGQEQRYTCHMQHEGLQEPLTLSWEPSSQPTIPIMGIVAGLAVLVVLAVLGAVVTAMMCRRKSSAACVGLRCRISSHLSFVTSRASGISFCKGV

SEQ ID NO: 48312 - protein, 397 aa, Homo sapiens
  Payload ID: 9762
  Gene Symbol: HLA-C
  Gene Name: major histocompatibility complex, class I, C
  ENSP ID: ENSP00000390282
MRVMAPRTLILLLSGALALTETWACSHSMRYFYTAVSRPGRGEPRFIAVGYVDDTQFVRFDSDAASPRGEPRAPWVEQEGPEYWDRETQKYKRQAQTDRVSLRNLRGYYNQSEAGSHTLQWMYGCDLGPDGRLLRGYDQSAYDGKDYIALNEDLRSWTAADTAAQITQRKWEAARAAEQQRAYLEGTCVEWLRRYLENGKETLQRAEHPKTHVTHHLVSDHEATLRCWALGFYPAEITLTWQRDGEDQTQDTELVETRPAGDGTFQKWAAVVVPSGEEQRYTCHVQHEGLPEPLTLRWEPSSQPTIPIVGIVAGLAVLAVLAVLGAVVAVVMCRRKSSGREGVRSGVWPATVPRALMSLSSLVKPETAACVGLRCRISSHLSFVTSRASGISFCKGI

SEQ ID NO: 48313 - protein, 366 aa, Homo sapiens
  Payload ID: 9762
  Gene Symbol: HLA-C
  Gene Name: major histocompatibility complex, class I, C
  Uniprot ID: P04222
  ENSP ID: ENSP00000390851
MRVMAPRTLILLLSGALALTETWAGSHSMRYFYTAVSRPGRGEPHFIAVGYVDDTQFVRFDSDAASPRGEPRAPWVEQEGPEYWDRETQKYKRQAQTDRVSLRNLRGYYNQSEAGSHIIQRMYGCDVGPDGRLLRGYDQYAYDGKDYIALNEDLRSWTAADTAAQITQRKWEAAREAEQLRAYLEGLCVEWLRRYLKNGKETLQRAEHPKTHVTHHPVSDHEATLRCWALGFYPAEITLTWQWDGEDQTQDTELVETRPAGDGTFQKWAAVVVPSGEEQRYTCHVQHEGLPEPLTLRWEPSSQPTIPIVGIVAGLAVLAVLAVLGAVVAVVMCRRKSSGGKGGSCSQAASSNSAQGSDESLIACKA

SEQ ID NO: 48314 - protein, 339 aa, Homo sapiens
  Payload ID: 9762
  Gene Symbol: HLA-C
  Gene Name: major histocompatibility complex, class I, C
  ENSP ID: ENSP00000390860
MRVMAPRTLILLLSGALALTETWACSHSMRYFYTAVSRPGRGEPRFIAVGYVDDTQFVRFDSDAASPRGEPRAPWVEQEGPEYWDRETQKYKRQAQTDRVSLRNLRGYYNQSEAGSHTLQWMYGCDLGPDGRLLRGYDQSAYDGKDYIALNEDLRSWTAADTAAQITQRKWEAARAAEQQRAYLEGTCVEWLRRYLENGKETLQRAEHPKTHVTHHLVSDHEATLRCWALGFYPAEITLTWQRDGEDQTQDTELVETRPAGDGTFQKWAAVVVPSGEEQRYTCHVQHEGLPEPLTLRWEPSSQPTIPIVGIVAGLAVLAVLAVLGAVVAVVMCRRKSSA

SEQ ID NO: 48315 - protein, 261 aa, Homo sapiens
  Payload ID: 9762
  Gene Symbol: HLA-C
  Gene Name: major histocompatibility complex, class I, C
  ENSP ID: ENSP00000391250
  MOD_RES (1)..(1): Any amino acid
XRVMAPRTLILLLSGALALTETWACSHSMRYFDTAVSRPGRGEPRFISVGYVDDTQFVRFDSDAASPRGEPRAPWVEQEGPEYWDRETQKYKRQAQADRVNLRKLRGYYNQSEDGSHTLQWMYGCDLGPDGRLLRGYDQSAYDGKDYIALNEDLRSWTAADTAAQITQRKWEAAREAEQWRAYLEGTCVEWLRRYLENGKETLQRAEHPKTHVTHHPVSDHEASRRWNLPEVGSCGGAFWRRAEIHVPCAARGAARAPHPE

SEQ ID NO: 48316 - protein, 366 aa, Homo sapiens
  Payload ID: 9762
  Gene Symbol: HLA-C
  Gene Name: major histocompatibility complex, class I, C
  Uniprot ID: P30499
  ENSP ID: ENSP00000393374
MRVMAPRTLILLLSGALALTETWACSHSMRYFYTAVSRPGRGEPRFIAVGYVDDTQFVRFDSDAASPRGEPRAPWVEQEGPEYWDRETQKYKRQAQTDRVSLRNLRGYYNQSEAGSHTLQWMYGCDLGPDGRLLRGYDQSAYDGKDYIALNEDLRSWTAADTAAQITQRKWEAARAAEQQRAYLEGTCVEWLRRYLENGKETLQRAEHPKTHVTHHLVSDHEATLRCWALGFYPAEITLTWQRDGEDQTQDTELVETRPAGDGTFQKWAAVVVPSGEEQRYTCHVQHEGLPEPLTLRWEPSSQPTIPIVGIVAGLAVLAVLAVLGAVVAVVMCRRKSSGGKGGSCSQAASSNSAQGSDESLIACKA

SEQ ID NO: 48317 - protein, 368 aa, Homo sapiens
  Payload ID: 9762
  Gene Symbol: HLA-C
  Gene Name: major histocompatibility complex, class I, C
  ENSP ID: ENSP00000393458
MRVMAPRTLILLLSGALALTETWACSHSMRYFDTAVSRPGRGEPRFISVGYVDDTQFVRFDSDAASPRGEPRAPWVEQEGPEYWDRETQKYKRQAQADRVNLRKLRGYYNQSEDGSHTLQWMYGCDLGPDGRLLRGYDQSAYDGKDYIALNEDLRSWTAADTAAQITQRKWEAAREAEQWRAYLEGTCVEWLRRYLENGKETLQRAEHPKTHVTHHPVSDHEATLRCWALGFYPAEITLTWQRDGEDQTQDTELVETRPAGDGTFQKWAAVVVPSGEEQRYTCHVQHEGLPEPLTLRWEPSSQPTIPIVGIVAGLAVLAVLAVLGAVMAVVMCRRKSSAACVGLRCRISSHLSFVTSRASGISFCKGI

SEQ ID NO: 48318 - protein, 397 aa, Homo sapiens
  Payload ID: 9762
  Gene Symbol: HLA-C
  Gene Name: major histocompatibility complex, class I, C
  ENSP ID: ENSP00000397867
MRVMAPRTLILLLSGALALTETWACSHSMRYFDTAVSRPGRGEPRFISVGYVDDTQFVRFDSDAASPRGEPRAPWVEQEGPEYWDRETQKYKRQAQADRVNLRKLRGYYNQSEDGSHTLQWMYGCDLGPDGRLLRGYDQSAYDGKDYIALNEDLRSWTAADTAAQITQRKWEAAREAEQWRAYLEGTCVEWLRRYLENGKETLQRAEHPKTHVTHHPVSDHEATLRCWALGFYPAEITLTWQRDGEDQTQDTELVETRPAGDGTFQKWAAVVVPSGEEQRYTCHVQHEGLPEPLTLRWEPSSQPTIPIVGIVAGLAVLAVLAVLGAVMAVVMCRRKSSGREGVRSGVWPATVPRALMSLSSLVKPETAACVGLRCRISSHLSFVTSRASGISFCKGI

SEQ ID NO: 48319 - protein, 368 aa, Homo sapiens
  Payload ID: 9762
  Gene Symbol: HLA-C
  Gene Name: major histocompatibility complex, class I, C
  ENSP ID: ENSP00000398169
MRVMAPRTLILLLSGALALTETWACSHSMRYFYTAVSRPGRGEPRFIAVGYVDDTQFVQFDSDAASPRGEPRAPWVEQEGPEYWDRETQKYKRQAQTDRVNLRKLRGYYNQSEAGSHTLQRMYGCDLGPDGRLLRGYNQFAYDGKDYIALNEDLRSWTAADKAAQITQRKWEAAREAEQRRAYLEGTCVEWLRRYLENGKKTLQRAEHPKTHVTHHPVSDHEATLRCWALGFYPAEITLTWQRDGEDQTQDTELVETRPAGDGTFQKWAAVVVPSGEEQRYTCHVQHEGLPEPLTLRWGPSSQPTIPIVGIVAGLAVLAVLAVLGAVMAVVMCRRKSSAACVGLRCRISSHLSFVTSRASGISFCKGI

SEQ ID NO: 48320 - protein, 261 aa, Homo sapiens
  Payload ID: 9762
  Gene Symbol: HLA-C
  Gene Name: major histocompatibility complex, class I, C
  ENSP ID: ENSP00000400410
  MOD_RES (1)..(1): Any amino acid
XRVMAPRALLLLLSGGLALTETWACSHSMRYFDTAVSRPGRGEPRFISVGYVDDTQFVRFDSDAASPRGEPRAPWVEQEGPEYWDRETQKYKRQAQADRVSLRNLRGYYNQSEDGSHTLQRMSGCDLGPDGRLLRGYDQSAYDGKDYIALNEDLRSWTAADTAAQITQRKLEAARAAEQLRAYLEGTCVEWLRRYLENGKETLQRAEPPKTHVTHHPLSDHEASRRWNLPEVGSCGGAFWTRAEIHVPYAARGAARAPHPE

SEQ ID NO: 48321 - protein, 368 aa, Homo sapiens; identical to SEQ ID NO: 48319
  Payload ID: 9762
  Gene Symbol: HLA-C
  Gene Name: major histocompatibility complex, class I, C
  ENSP ID: ENSP00000403541

SEQ ID NO: 48322 - protein, 372 aa, Homo sapiens
  Payload ID: 9762
  Gene Symbol: HLA-C
  Gene Name: major histocompatibility complex, class I, C
  ENSP ID: ENSP00000403624
MRVMAPRALLLLLSGGLALTETWACSHSMRYFDTAVSRPGRGEPRFISVGYVDDTQFVRFDSDAASPRGEPRAPWVEQEGPEYWDRETQNYKRQAQADRVSLRNLRGYYNQSEDGSHTLQRMYGCDLGPDGRLLRGYDQSAYDGKDYIALNEDLRSWTAADTAAQITQRKLEAARAAEQLRAYLEGTCVEWLRRYLENGKETLQRAEPPKTHVTHHPLSDHEATLRCWALGFYPAEITLTWQRDGEDQTQDTELVETRPAGDGTFQKWAAVVVPSGQEQRYTCHMQHEGLQEPLTLSWEPSSQPTIPIMGIVAGLAVLVVLAVLGAVVTAMMCRRKSSGHFLPTGGKGGSCSQAACSNSAQGSDESLITCKA

SEQ ID NO: 48323 - protein, 372 aa, Homo sapiens
  Payload ID: 9762
  Gene Symbol: HLA-C
  Gene Name: major histocompatibility complex, class I, C
  ENSP ID: ENSP00000404526
MRVMAPRTLILLLSGALALTETWACSHSMRYFDTAVSRPGRGEPRFISVGYVDDTQFVRFDSDAASPRGEPRAPWVEQEGPEYWDRETQKYKRQAQADRVNLRKLRGYYNQSEDGSHTLQWMYGCDLGPDGRLLRGYDQSAYDGKDYIALNEDLRSWTAADTAAQITQRKWEAAREAEQWRAYLEGTCVEWLRRYLENGKETLQRAEHPKTHVTHHPVSDHEATLRCWALGFYPAEITLTWQRDGEDQTQDTELVETRPAGDGTFQKWAAVVVPSGEEQRYTCHVQHEGLPEPLTLRWEPSSQPTIPIVGIVAGLAVLAVLAVLGAVMAVVMCRRKSSGHFLPTGGKGGSCSQAASSNSAQGSDESLIACKA

SEQ ID NO: 48324 - protein, 261 aa, Homo sapiens
  Payload ID: 9762
  Gene Symbol: HLA-C
  Gene Name: major histocompatibility complex, class I, C
  ENSP ID: ENSP00000407051
  MOD_RES (1)..(1): Any amino acid
XRVMAPRALLLLLSGGLALTETWACSHSMRYFDTAVSRPGRGEPRFISVGYVDDTQFVRFDSDAASPRGEPRAPWVEQEGPEYWDRETQNYKRQAQADRVSLRNLRGYYNQSEDGSHTLQRMYGCDLGPDGRLLRGYDQSAYDGKDYIALNEDLRSWTAADTAAQITQRKLEAARAAEQLRAYLEGTCVEWLRRYLENGKETLQRAEPPKTHVTHHPLSDHEASRRWNLPEVGSCGGAFWTRAEIHVPYAARGAARAPHPE

SEQ ID NO: 48325 - protein, 372 aa, Homo sapiens
  Payload ID: 9762
  Gene Symbol: HLA-C
  Gene Name: major histocompatibility complex, class I, C
  ENSP ID: ENSP00000407431
MRVMAPRTLILLLSGALALTETWAGSHSMRYFYTAVSRPGRGEPHFIAVGYVDDTQFVRFDSDAASPRGEPRAPWVEQEGPEYWDRETQKYKRQAQTDRVSLRNLRGYYNQSEAGSHIIQRMYGCDVGPDGRLLRGYDQYAYDGKDYIALNEDLRSWTAADTAAQITQRKWEAAREAEQLRAYLEGLCVEWLRRYLKNGKETLQRAEHPKTHVTHHPVSDHEATLRCWALGFYPAEITLTWQWDGEDQTQDTELVETRPAGDGTFQKWAAVVVPSGEEQRYTCHVQHEGLPEPLTLRWEPSSQPTIPIVGIVAGLAVLAVLAVLGAVVAVVMCRRKSSGHFLPTGGKGGSCSQAASSNSAQGSDESLIACKA

SEQ ID NO: 48326 - protein, 261 aa, Homo sapiens
  Payload ID: 9762
  Gene Symbol: HLA-C
  Gene Name: major histocompatibility complex, class I, C
  ENSP ID: ENSP00000407494
  MOD_RES (1)..(1): Any amino acid
XRVMAPRTLILLLSGALALTETWACSHSMRYFYTAVSRPGRGEPRFIAVGYVDDTQFVRFDSDAASPRGEPRAPWVEQEGPEYWDRETQKYKRQAQTDRVSLRNLRGYYNQSEAGSHTLQWMYGCDLGPDGRLLRGYDQSAYDGKDYIALNEDLRSWTAADTAAQITQRKWEAARAAEQQRAYLEGTCVEWLRRYLENGKETLQRAEHPKTHVTHHLVSDHEASRRWNLPEVGSCGGAFWRRAEIHVPCAARGAAGAPHPE

SEQ ID NO: 48327 - protein, 366 aa, Homo sapiens
  Payload ID: 9762
  Gene Symbol: HLA-C
  Gene Name: major histocompatibility complex, class I, C
  Uniprot ID: P30501
  ENSP ID: ENSP00000410214
MRVMAPRTLILLLSGALALTETWACSHSMRYFDTAVSRPGRGEPRFISVGYVDDTQFVRFDSDAASPRGEPRAPWVEQEGPEYWDRETQKYKRQAQADRVNLRKLRGYYNQSEDGSHTLQWMYGCDLGPDGRLLRGYDQSAYDGKDYIALNEDLRSWTAADTAAQITQRKWEAAREAEQWRAYLEGTCVEWLRRYLENGKETLQRAEHPKTHVTHHPVSDHEATLRCWALGFYPAEITLTWQRDGEDQTQDTELVETRPAGDGTFQKWAAVVVPSGEEQRYTCHVQHEGLPEPLTLRWEPSSQPTIPIVGIVAGLAVLAVLAVLGAVMAVVMCRRKSSGGKGGSCSQAASSNSAQGSDESLIACKA

SEQ ID NO: 48328 - protein, 261 aa, Homo sapiens
  Payload ID: 9762
  Gene Symbol: HLA-C
  Gene Name: major histocompatibility complex, class I, C
  ENSP ID: ENSP00000410661
  MOD_RES (1)..(1): Any amino acid
XRVMAPRTLILLLSGALALTETWACSHSMRYFYTAVSRPGRGEPRFIAVGYVDDTQFVQFDSDAASPRGEPRAPWVEQEGPEYWDRETQKYKRQAQTDRVNLRKLRGYYNQSEAGSHTLQRMYGCDLGPDGRLLRGYNQFAYDGKDYIALNEDLRSWTAADKAAQITQRKWEAAREAEQRRAYLEGTCVEWLRRYLENGKKTLQRAEHPKTHVTHHPVSDHEASRRWNLPEVGSCGGAFWRRAEIHVPCAARGAARAPHPE

SEQ ID NO: 48329 - protein, 261 aa, Homo sapiens; identical to SEQ ID NO: 48328
  Payload ID: 9762
  Gene Symbol: HLA-C
  Gene Name: major histocompatibility complex, class I, C
  ENSP ID: ENSP00000411867
  MOD_RES (1)..(1): Any amino acid

SEQ ID NO: 48330 - protein, 261 aa, Homo sapiens
  Payload ID: 9762
  Gene Symbol: HLA-C
  Gene Name: major histocompatibility complex, class I, C
  ENSP ID: ENSP00000412426
  MOD_RES (1)..(1): Any amino acid
XRVMAPRTLILLLSGALALTETWAGSHSMRYFYTAVSRPGRGEPHFIAVGYVDDTQFVRFDSDAASPRGEPRAPWVEQEGPEYWDRETQKYKRQAQTDRVSLRNLRGYYNQSEAGSHIIQRMYGCDVGPDGRLLRGYDQYAYDGKDYIALNEDLRSWTAADTAAQITQRKWEAAREAEQLRAYLEGLCVEWLRRYLKNGKETLQRAEHPKTHVTHHPVSDHEASRRWNLPEVGSCGGAFWRRAEIHVPCAARGAAGAPHPE

SEQ ID NO: 48331 - protein, 368 aa, Homo sapiens
  Payload ID: 9762
  Gene Symbol: HLA-C
  Gene Name: major histocompatibility complex, class I, C
  ENSP ID: ENSP00000413189
MRVMAPRTLILLLSGALALTETWAGSHSMRYFYTAVSRPGRGEPHFIAVGYVDDTQFVRFDSDAASPRGEPRAPWVEQEGPEYWDRETQKYKRQAQTDRVSLRNLRGYYNQSEAGSHIIQRMYGCDVGPDGRLLRGYDQYAYDGKDYIALNEDLRSWTAADTAAQITQRKWEAAREAEQLRAYLEGLCVEWLRRYLKNGKETLQRAEHPKTHVTHHPVSDHEATLRCWALGFYPAEITLTWQWDGEDQTQDTELVETRPAGDGTFQKWAAVVVPSGEEQRYTCHVQHEGLPEPLTLRWEPSSQPTIPIVGIVAGLAVLAVLAVLGAVVAVVMCRRKSSAACVGLRCRISSHLSFVTSRASGISFCKGI

SEQ ID NO: 48332 - protein, 397 aa, Homo sapiens
  Payload ID: 9762
  Gene Symbol: HLA-C
  Gene Name: major histocompatibility complex, class I, C
  ENSP ID: ENSP00000413992
MRVMAPRALLLLLSGGLALTETWACSHSMRYFDTAVSRPGRGEPRFISVGYVDDTQFVRFDSDAASPRGEPRAPWVEQEGPEYWDRETQNYKRQAQADRVSLRNLRGYYNQSEDGSHTLQRMYGCDLGPDGRLLRGYDQSAYDGKDYIALNEDLRSWTAADTAAQITQRKLEAARAAEQLRAYLEGTCVEWLRRYLENGKETLQRAEPPKTHVTHHPLSDHEATLRCWALGFYPAEITLTWQRDGEDQTQDTELVETRPAGDGTFQKWAAVVVPSGQEQRYTCHMQHEGLQEPLTLSWEPSSQPTIPIMGIVAGLAVLVVLAVLGAVVTAMMCRRKSSGREGVKSGVWAATVPRALMSLSSLVKPETAACVGLRCRISSHLSFVTSRASGISFCKGV

SEQ ID NO: 48333 - protein, 366 aa, Homo sapiens
  Payload ID: 9762
  Gene Symbol: HLA-C
  Gene Name: major histocompatibility complex, class I, C
  ENSP ID: ENSP00000414063
MRVMAPRALLLLLSGGLALTETWACSHSMRYFDTAVSRPGRGEPRFISVGYVDDTQFVRFDSDAASPRGEPRAPWVEQEGPEYWDRETQNYKRQAQADRVSLRNLRGYYNQSEDGSHTLQRMYGCDLGPDGRLLRGYDQSAYDGKDYIALNEDLRSWTAADTAAQITQRKLEAARAAEQLRAYLEGTCVEWLRRYLENGKETLQRAEPPKTHVTHHPLSDHEATLRCWALGFYPAEITLTWQRDGEDQTQDTELVETRPAGDGTFQKWAAVVVPSGQEQRYTCHMQHEGLQEPLTLSWEPSSQPTIPIMGIVAGLAVLVVLAVLGAVVTAMMCRRKSSGGKGGSCSQAACSNSAQGSDESLITCKA

SEQ ID NO: 48334 - protein, 355 aa, Homo sapiens
  Payload ID: 9762
  Gene Symbol: HLA-C
  Gene Name: major histocompatibility complex, class I, C
  ENSP ID: ENSP00000415025
MRVMAPRTLILLLSGALALTETWAGSHSMRYFYTAVSRPGRGEPHFIAVGYVDDTQFVRFDSDAASPRGEPRAPWVEQEGPEYWDRETQKYKRQAQTDRVSLRNLRGYYNQSEAGSHIIQRMYGCDVGPDGRLLRGYDQYAYDGKDYIALNEDLRSWTAADTAAQITQRKWEAAREAEQLRAYLEGLCVEWLRRYLKNGKETLQRAEHPKTHVTHHPVSDHEATLRCWALGFYPAEITLTWQWDGEDQTQDTELVETRPAGDGTFQKWAAVVVPSGEEQRYTCHVQHEGLPEPLTLRWEPSSQPTIPIVGIVAGLAVLAVLAVLGAVVAVVMCRRKSSASNSAQGSDESLIACKA

SEQ ID NO: 48335 - protein, 131 aa, Homo sapiens
  Payload ID: 9762
  Gene Symbol: HLA-C
  Gene Name: major histocompatibility complex, class I, C
  ENSP ID: ENSP00000431141
MRVMAPRTLILLLSGALALTETWACSHSMRYFYTAVSRPGRGEPRFIAVGYVDDTQFVQFDSDAASPRGEPRAPWVEQEGPEYWDRETQKYKRQAQTDRVNLRKLRGYYNQSEAEDVWLRPGARRAPPPRV

SEQ ID NO: 48336 - protein, 131 aa, Homo sapiens
  Payload ID: 9762
  Gene Symbol: HLA-C
  Gene Name: major histocompatibility complex, class I, C
  ENSP ID: ENSP00000431347
MRVMAPRTLILLLSGALALTETWACSHSMRYFYTAVSRPGRGEPRFIAVGYVDDTQFVRFDSDAASPRGEPRAPWVEQEGPEYWDRETQKYKRQAQTDRVSLRNLRGYYNQSEAVDVWLRPGARRAPPPRV

SEQ ID NO: 48337 - protein, 131 aa, Homo sapiens
  Payload ID: 9762
  Gene Symbol: HLA-C
  Gene Name: major histocompatibility complex, class I, C
  ENSP ID: ENSP00000433088
MRVMAPRTLILLLSGALALTETWACSHSMRYFDTAVSRPGRGEPRFISVGYVDDTQFVRFDSDAASPRGEPRAPWVEQEGPEYWDRETQKYKRQAQADRVNLRKLRGYYNQSEDVDVWLRPGARRAPPPRV

SEQ ID NO: 48338 - protein, 131 aa, Homo sapiens
  Payload ID: 9762
  Gene Symbol: HLA-C
  Gene Name: major histocompatibility complex, class I, C
  ENSP ID: ENSP00000433409
MRVMAPRTLILLLSGALALTETWAGSHSMRYFYTAVSRPGRGEPHFIAVGYVDDTQFVRFDSDAASPRGEPRAPWVEQEGPEYWDRETQKYKRQAQTDRVSLRNLRGYYNQSEAEDVWLRRGARRAPPPRV

SEQ ID NO: 48339 - protein, 224 aa, Homo sapiens
  Payload ID: 9762
  Gene Symbol: HLA-C
  Gene Name: major histocompatibility complex, class I, C
  ENSP ID: ENSP00000433897
MRVMAPRALLLLLSGGLALTETWACSHSMRYFDTAVSRPGRGEPRFISVGYVDDTQFVRFDSDAASPRGEPRAPWVEQEGPEYWDRETQNYKRQAQADRVSLRNLRGYYNQSEDGSHTLQRMYGCDLGPDGRLLRGYDQSAYDGKDYIALNEDLRSWTAADTAAQITQRKLEAARAAEQLRAYLEGTCVEWLRRYLENGKETLQRAGQDQKSLFLPQRLELSNE

SEQ ID NO: 48340 - protein, 131 aa, Homo sapiens
  Payload ID: 9762
  Gene Symbol: HLA-C
  Gene Name: major histocompatibility complex, class I, C
  ENSP ID: ENSP00000435957
MRVMAPRALLLLLSGGLALTETWACSHSMRYFDTAVSRPGRGEPRFISVGYVDDTQFVRFDSDAASPRGEPRAPWVEQEGPEYWDRETQNYKRQAQADRVSLRNLRGYYNQSEDEDVWLRPGARRAPPPRV

SEQ ID NO: 48341 - protein, 224 aa, Homo sapiens
  Payload ID: 9762
  Gene Symbol: HLA-C
  Gene Name: major histocompatibility complex, class I, C
  ENSP ID: ENSP00000436842
MRVMAPRTLILLLSGALALTETWACSHSMRYFYTAVSRPGRGEPRFIAVGYVDDTQFVQFDSDAASPRGEPRAPWVEQEGPEYWDRETQKYKRQAQTDRVNLRKLRGYYNQSEAGSHTLQRMYGCDLGPDGRLLRGYNQFAYDGKDYIALNEDLRSWTAADKAAQITQRKWEAAREAEQRRAYLEGTCVEWLRRYLENGKKTLQRAGQDQKSLFLPQRLELSNE

SEQ ID NO: 48342 - protein, 131 aa, Homo sapiens; identical to SEQ ID NO: 48335
  Payload ID: 9762
  Gene Symbol: HLA-C
  Gene Name: major histocompatibility complex, class I, C
  ENSP ID: ENSP00000436915

SEQ ID NO: 48343 - protein, 49 aa, Homo sapiens
  Payload ID: 9762
  Gene Symbol: HLA-C
  Gene Name: major histocompatibility complex, class I, C
  ENSP ID: ENSP00000483304
AVVVPSGQEQRYTCHMQHEGLQEPLTLSWGGKGGSCSQAACSNSAQGSD

SEQ ID NO: 48344 - protein, 49 aa, Homo sapiens
  Payload ID: 9762
  Gene Symbol: HLA-C
  Gene Name: major histocompatibility complex, class I, C
  ENSP ID: ENSP00000484208
AVVVPSGEEQRYTCHVQHEGLPEPLTLRWGGKGGSCSQAASSNSAQGSD

SEQ ID NO: 48345 - protein, 49 aa, Homo sapiens; identical to SEQ ID NO: 48344
  Payload ID: 9762
  Gene Symbol: HLA-C
  Gene Name: major histocompatibility complex, class I, C
  ENSP ID: ENSP00000484270

SEQ ID NO: 48346 - protein, 358 aa, Homo sapiens
  Payload ID: 9763
  Gene Symbol: HLA-E
  Gene Name: major histocompatibility complex, class I, E
  ENSP ID: ENSP00000365817
MVDGTLLLLLSEALALTQTWAGSHSLKYFHTSVSRPGRGEPRFISVGYVDDTQFVRFDNDAASPRMVPRAPWMEQEGSEYWDRETRSARDTAQIFRVNLRTLRGYYNQSEAGSHTLQWMHGCELGPDGRFLRGYEQFAYDGKDYLTLNEDLRSWTAVDTAAQISEQKSNDASEAEHQRAYLEDTCVEWLHKYLEKGKETLLHLEPPKTHVTHHPISDHEATLRCWALGFYPAEITLTWQQDGEGHTQDTELVETRPAGDGTFQKWAAVVVPSGEEQRYTCHVQHEGLPEPVTLRWKPASQPTIPIVGIIAGLVLLGSVVSGAVVAAVIWRKKSSGGKGGSYSKAEWSDSAQGSESHSL

SEQ ID NO: 48347 - protein, 358 aa, Homo sapiens [sequence omitted]

SEQ ID NO: 48348 - protein, 358 aa, Homo sapiens [sequence omitted]

SEQ ID NO: 48349 - protein, 358 aa, Homo sapiens [sequence omitted]

SEQ ID NO: 48350 - protein, 358 aa, Homo sapiens; identical to SEQ ID NO: 48346
  Payload ID: 9763
  Gene Symbol: HLA-E
  Gene Name: major histocompatibility complex, class I, E
  ENSP ID: ENSP00000400458

SEQ ID NO: 48351 - protein, 358 aa, Homo sapiens; identical to SEQ ID NO: 48346
  Payload ID: 9763
  Gene Symbol: HLA-E
  Gene Name: major histocompatibility complex, class I, E
  ENSP ID: ENSP00000402694

SEQ ID NO: 48352 - protein, 358 aa, Homo sapiens [sequence omitted]

SEQ ID NO: 48353 - protein, 442 aa, Homo sapiens
  Payload ID: 9764
  Gene Symbol: HLA-F
  Gene Name: major histocompatibility complex, class I, F
  Uniprot ID: P30511
  ENSP ID: ENSP00000259951
MAPRSLLLLLSGALALTDTWAGSHSLRYFSTAVSRPGRGEPRYIAVEYVDDTQFLRFDSDAAIPRMEPREPWVEQEGPQYWEWTTGYAKANAQTDRVALRNLLRRYNQSEAGSHTLQGMNGCDMGPDGRLLRGYHQHAYDGKDYISLNEDLRSWTAADTVAQITQRFYEAEEYAEEFRTYLEGECLELLRRYLENGKETLQRADPPKAHVAHHPISDHEATLRCWALGFYPAEITLTWQRDGEEQTQDTELVETRPAGDGTFQKWAAVVVPPGEEQRYTCHVQHEGLPQPLILRWEQSPQPTIPIVGIVAGLVVLGAVVTGAVVAAVMWRKKSSDRNRGSYSQAAAYSVVSGNLMITWWSSLFLLGVLFQGYLGCLRSHSVLGRRKVGDMWILFFLWLWTSFNTAFLALQSLRFGFGFRRGRSFLLRSWHHLMKRVQIKIFD

SEQ ID NO: 48354 - protein, 346 aa, Homo sapiens
  Payload ID: 9764
  Gene Symbol: HLA-F
  Gene Name: major histocompatibility complex, class I, F
  Uniprot ID: P30511
  ENSP ID: ENSP00000334263
MAPRSLLLLLSGALALTDTWAGSHSLRYFSTAVSRPGRGEPRYIAVEYVDDTQFLRFDSDAAIPRMEPREPWVEQEGPQYWEWTTGYAKANAQTDRVALRNLLRRYNQSEAGSHTLQGMNGCDMGPDGRLLRGYHQHAYDGKDYISLNEDLRSWTAADTVAQITQRFYEAEEYAEEFRTYLEGECLELLRRYLENGKETLQRADPPKAHVAHHPISDHEATLRCWALGFYPAEITLTWQRDGEEQTQDTELVETRPAGDGTFQKWAAVVVPPGEEQRYTCHVQHEGLPQPLILRWEQSPQPTIPIVGIVAGLVVLGAVVTGAVVAAVMWRKKSSDRNRGSYSQAAV

SEQ ID NO: 48355 - protein, 346 aa, Homo sapiens
  Payload ID: 9764
  Gene Symbol: HLA-F
  Gene Name: major histocompatibility complex, class I, F
  ENSP ID: ENSP00000345828
MAPRSLLLLLSGALALTDTWAGSHSLRYFSTAVSRPGRGEPRYIAVEYVDDTQFLRFDSDAAIPRMEPREPWVEQEGPQYWEWTTGYAKANAQTDRVALRNLLRRYNQSEAGSHTLQGMNGCDMGPDGRLLRGYHQHAYDGKDYISLNEDLRSWTAADTVAQITQRFYEAEEYAEEFRTYLEGECLELLRRYLENGKETLQRADPPKAHVAHHPISDHEATLRCWALGFYPAEITLTWQRDGEEQTQDTELVETRPAGDGTFQKWAAVVVPSGEEQRYTCHVQHEGLPQPLILRWEQSPQPTIPIVGIVAGLVVLGAVVTGAVVAAVMWRKKSSDRNRGSYSQAAV

SEQ ID NO: 48356 - protein, 254 aa, Homo sapiens
  Payload ID: 9764
  Gene Symbol: HLA-F
  Gene Name: major histocompatibility complex, class I, F
  Uniprot ID: P30511
  ENSP ID: ENSP00000351977
MAPRSLLLLLSGALALTDTWAGSHSLRYFSTAVSRPGRGEPRYIAVEYVDDTQFLRFDSDAAIPRMEPREPWVEQEGPQYWEWTTGYAKANAQTDRVALRNLLRRYNQSEAGSHTLQGMNGCDMGPDGRLLRGYHQHAYDGKDYISLNEDLRSWTAADTVAQITQRFYEAEEYAEEFRTYLEGECLELLRRYLENGKETLQRAEQSPQPTIPIVGIVAGLVVLGAVVTGAVVAAVMWRKKSSDRNRGSYSQAAV

SEQ ID NO: 48357 - protein, 334 aa, Homo sapiens
  Payload ID: 9764
  Gene Symbol: HLA-F
  Gene Name: major histocompatibility complex, class I, F
  ENSP ID: ENSP00000366040
MAPRSLLLLLSGALALTDTWAGSHSLRYFSTAVSRPGRGEPRYIAVEYVDDTQFLRFDSDAAIPRMEPREPWVEQEGPQYWEWTTGYAKANAQTDRVALRNLLRRYNQSEAGSHTLQGMNGCDMGPDGRLLRGYHQHAYDGKDYISLNEDLRSWTAADTVAQITQRFYEAEEYAEEFRTYLEGECLELLRRYLENGKETLQRADPPKAHVAHHPISDHEATLRCWALGFYPAEITLTWQRDGEEQTQDTELVETRPAGDGTFQKWAAVVVPSGEEQRYTCHVQHEGLPQPLILRWEQSPQPTIPIVGIVAGLVVLGAVVTGAVVAAVMWRKKSS

SEQ ID NO: 48358 - protein, 254 aa, Homo sapiens; identical to SEQ ID NO: 48356
  Payload ID: 9764
  Gene Symbol: HLA-F
  Gene Name: major histocompatibility complex, class I, F
  Uniprot ID: P30511
  ENSP ID: ENSP00000366044

SEQ ID NO: 48359 - protein, 346 aa, Homo sapiens; identical to SEQ ID NO: 48354
  Payload ID: 9764
  Gene Symbol: HLA-F
  Gene Name: major histocompatibility complex, class I, F
  Uniprot ID: P30511
  ENSP ID: ENSP00000366057

SEQ ID NO: 48360 - protein, 254 aa, Homo sapiens; identical to SEQ ID NO: 48356
  Payload ID: 9764
  Gene Symbol: HLA-F
  Gene Name: major histocompatibility complex, class I, F
  Uniprot ID: P30511
  ENSP ID: ENSP00000373007

SEQ ID NO: 48361 - protein, 442 aa, Homo sapiens
  Payload ID: 9764
  Gene Symbol: HLA-F
  Gene Name: major histocompatibility complex, class I, F
  ENSP ID: ENSP00000373008
MAPRSLLLLLSGALALTDTWAGSHSLRYFSTAVSRPGRGEPRYIAVEYVDDTQFLRFDSDAAIPRMEPREPWVEQEGPQYWEWTTGYAKANAQTDRVALRNLLRRYNQSEAGSHTLQGMNGCDMGPDGRLLRGYHQHAYDGKDYISLNEDLRSWTAADTVAQITQRFYEAEEYAEEFRTYLEGECLELLRRYLENGKETLQRADPPKAHVAHHPISDHEATLRCWALGFYPAEITLTWQRDGEEQTQDTELVETRPAGDGTFQKWAAVVVPSGEEQRYTCHVQHEGLPQPLILRWEQSPQPTIPIVGIVAGLVVLGAVVTGAVVAAVMWRKKSSDRNRGSYSQAAAYSVVSGNLMITWWSSLFLLGVLFQGYLGCLRSHSVLGRRKVGDMWILFFLWLWTSFNTAFLALQSLRFGFGFRRGRSFLLRSWHHLMKRVQIKIFD

SEQ ID NO: 48362 - protein, 346 aa, Homo sapiens; identical to SEQ ID NO: 48355
  Payload ID: 9764
  Gene Symbol: HLA-F
  Gene Name: major histocompatibility complex, class I, F
  ENSP ID: ENSP00000373121

SEQ ID NO: 48363 - protein, 442 aa, Homo sapiens; identical to SEQ ID NO: 48361
  Payload ID: 9764
  Gene Symbol: HLA-F
  Gene Name: major histocompatibility complex, class I, F
  ENSP ID: ENSP00000373123

SEQ ID NO: 48364 - protein, 442 aa, Homo sapiens; identical to SEQ ID NO: 48361
  Payload ID: 9764
  Gene Symbol: HLA-F
  Gene Name: major histocompatibility complex, class I, F
  ENSP ID: ENSP00000387786

SEQ ID NO: 48365 - protein, 131 aa, Homo sapiens
  Payload ID: 9764
  Gene Symbol: HLA-F
  Gene Name: major histocompatibility complex, class I, F
  ENSP ID: ENSP00000388133
MAPRSLLLLLSGALALTDTWAGSHSLRYFSTAVSRPGRGEPRYIAVEYVDDTQFLRFDSDAAIPRMEPREPWVEQEGPQYWEWTTGYAKANAQTDRVALRNLLRRYNQSEAGSHTLQGMNGCDMGPDGRLL

SEQ ID NO: 48366 - protein, 131 aa, Homo sapiens; identical to SEQ ID NO: 48365
  Payload ID: 9764
  Gene Symbol: HLA-F
  Gene Name: major histocompatibility complex, class I, F
  ENSP ID: ENSP00000389555

SEQ ID NO: 48367 - protein, 225 aa, Homo sapiens
  Payload ID: 9764
  Gene Symbol: HLA-F
  Gene Name: major histocompatibility complex, class I, F
  ENSP ID: ENSP00000390887
  MOD_RES (1)..(1): Any amino acid
XPDPPPGRVPGAFTQHAYDGKDYISLNEDLRSWTAADTVAQITQRFYEAEEYAEEFRTYLEGECLELLRRYLENGKETLQRADPPKAHVAHHPISDHEATLRCWALGFYPAEITLTWQRDGEEQTQDTELVETRPAGDGTFQKWAAVVVPSGEEQRYTCHVQHEGLPQPLILRWEQSPQPTIPIVGIVAGLVVLGAVVTGAVVAAVMWRKKSSDRNRGSYSQAAV

SEQ ID NO: 48368 - protein, 124 aa, Homo sapiens
  Payload ID: 9764
  Gene Symbol: HLA-F
  Gene Name: major histocompatibility complex, class I, F
  ENSP ID: ENSP00000392251
  MOD_RES (1)..(1): Any amino acid
XAVMWRKKSSGHFLPIDRNRGSYSQAAAYSVVSGNLMITWWSSLFLLGVLFQGYLGCLRSHSVLGRRKVGDMWILFFLWLWTSFNTAFLALQSLRFGFGFRRGRSFLLRSWHHLMKRVQIKIFD

SEQ ID NO: 48369 - protein, 254 aa, Homo sapiens; identical to SEQ ID NO: 48356
  Payload ID: 9764
  Gene Symbol: HLA-F
  Gene Name: major histocompatibility complex, class I, F
  Uniprot ID: P30511
  ENSP ID: ENSP00000393535

SEQ ID NO: 48370 - protein, 346 aa, Homo sapiens; identical to SEQ ID NO: 48355
  Payload ID: 9764
  Gene Symbol: HLA-F
  Gene Name: major histocompatibility complex, class I, F
  ENSP ID: ENSP00000395853

SEQ ID NO: 48371 - protein, 131 aa, Homo sapiens; identical to SEQ ID NO: 48365
  Payload ID: 9764
  Gene Symbol: HLA-F
  Gene Name: major histocompatibility complex, class I, F
  ENSP ID: ENSP00000396776

SEQ ID NO: 48372 - protein, 254 aa, Homo sapiens; identical to SEQ ID NO: 48356
  Payload ID: 9764
  Gene Symbol: HLA-F
  Gene Name: major histocompatibility complex, class I, F
  Uniprot ID: P30511
  ENSP ID: ENSP00000397376

SEQ ID NO: 48373 - protein, 442 aa, Homo sapiens
  Payload ID: 9764
  Gene Symbol: HLA-F
  Gene Name: major histocompatibility complex, class I, F
  ENSP ID: ENSP00000397705
MAPRSLLLLLSGALALTDTWAGSHSLRYFSTAVSRPGRGEPRYIAVEYVDDTQFLRFDSDAAIPRMEPREPWVEQEGPQYWEWTTGYAKANAQTDRVALRNLLRRYNQSEAGSHTLQGMNGCDMGPDGRLLRGYHQHAYDGKDYISLNEDLRSWTAADTVAQITQRFYEAEEYAEEFRTYLEGECLELLRRYLENGKETLQRADPPKAHVAHHPISDHEATLRCWALGFYPAEITLTWQRDGEEQTQDTELVETRPAGDGTFQKWAAVVVPSGEEQRYTCHVQHEGLPQPLILRWEQSPQPTIPIVGIVAGLVVLGAVVTGAVVAAVMWRKKSSDRNRGSYSQAAAYSVVSGLLMITWWSSLFLLGVLFQGYLGCLRSHSVLGRRKVGDMWILFFLWLWTSFNTAFLALQSLRFGFGFRRGRSFLLRSWHHLMKRVQIKIFD

SEQ ID NO: 48374 - protein, 225 aa, Homo sapiens
  Payload ID: 9764
  Gene Symbol: HLA-F
  Gene Name: major histocompatibility complex, class I, F
  ENSP ID: ENSP00000398913
  MOD_RES (1)..(1): Any amino acid
XPDPPPGRVPGAFTEHAYDGKDYISLNEDLRSWTAADTVAQITQRFYEAEEYAEEFRTYLEGECLELLRRYLENGKETLQRADPPKAHVAHHPISDHEATLRCWALGFYPAEITLTWQRDGEEQTQDTELVETRPAGDGTFQKWAAVVVPSGEEQRYTCHVQHEGLPQPLILRWEQSPQPTIPIVGIVAGLVVLGAVVTGAVVAAVMWRKKSSDRNRGSYSQAAV

SEQ ID NO: 48375 - protein, 124 aa, Homo sapiens; identical to SEQ ID NO: 48368
  Payload ID: 9764
  Gene Symbol: HLA-F
  Gene Name: major histocompatibility complex, class I, F
  ENSP ID: ENSP00000399043
  MOD_RES (1)..(1): Any amino acid

SEQ ID NO: 48376 - protein, 124 aa, Homo sapiens
  Payload ID: 9764
  Gene Symbol: HLA-F
  Gene Name: major histocompatibility complex, class I, F
  ENSP ID: ENSP00000399120
  MOD_RES (1)..(1): Any amino acid
XAVMWRKKSSGHFLPIDRNRGSYSQAAAYSVVSGLLMITWWSSLFLLGVLFQGYLGCLRSHSVLGRRKVGDMWILFFLWLWTSFNTAFLALQSLRFGFGFRRGRSFLLRSWHHLMKRVQIKIFD

SEQ ID NO: 48377 - protein, 254 aa, Homo sapiens; identical to SEQ ID NO: 48356
  Payload ID: 9764
  Gene Symbol: HLA-F
  Gene Name: major histocompatibility complex, class I, F
  Uniprot ID: P30511
  ENSP ID: ENSP00000399835

SEQ ID NO: 48378 - protein, 225 aa, Homo sapiens; identical to SEQ ID NO: 48374
  Payload ID: 9764
  Gene Symbol: HLA-F
  Gene Name: major histocompatibility complex, class I, F
  ENSP ID: ENSP00000400112
  MOD_RES (1)..(1): Any amino acid

SEQ ID NO: 48379 - protein, 10 aa, Homo sapiens
  Payload ID: 9764
  Gene Symbol: HLA-F
  Gene Name: major histocompatibility complex, class I, F
  ENSP ID: ENSP00000400299
  MOD_RES (1)..(1): Any amino acid
XAVMWRKKSS

SEQ ID NO: 48380 - protein, 346 aa, Homo sapiens; identical to SEQ ID NO: 48355
  Payload ID: 9764
  Gene Symbol: HLA-F
  Gene Name: major histocompatibility complex, class I, F
  ENSP ID: ENSP00000402853

SEQ ID NO: 48381 - protein, 124 aa, Homo sapiens; identical to SEQ ID NO: 48368
  Payload ID: 9764
  Gene Symbol: HLA-F
  Gene Name: major histocompatibility complex, class I, F
  ENSP ID: ENSP00000404395
  MOD_RES (1)..(1): Any amino acid

SEQ ID NO: 48382 - protein, 131 aa, Homo sapiens; identical to SEQ ID NO: 48365
  Payload ID: 9764
  Gene Symbol: HLA-F
  Gene Name: major histocompatibility complex, class I, F
  ENSP ID: ENSP00000405190

SEQ ID NO: 48383 - protein, 242 aa, Homo sapiens
  Payload ID: 9764
  Gene Symbol: HLA-F
  Gene Name: major histocompatibility complex, class I, F
  ENSP ID: ENSP00000405198
MAPRSLLLLLSGALALTDTWAGSHSLRYFSTAVSRPGRGEPRYIAVEYVDDTQFLRFDSDAAIPRMEPREPWVEQEGPQYWEWTTGYAKANAQTDRVALRNLLRRYNQSEAGSHTLQGMNGCDMGPDGRLLRGYHQHAYDGKDYISLNEDLRSWTAADTVAQITQRFYEAEEYAEEFRTYLEGECLELLRRYLENGKETLQRAEQSPQPTIPIVGIVAGLVVLGAVVTGAVVAAVMWRKKSS

SEQ ID NO: 48384 - protein, 131 aa, Homo sapiens; identical to SEQ ID NO: 48365
  Payload ID: 9764
  Gene Symbol: HLA-F
  Gene Name: major histocompatibility complex, class I, F
  ENSP ID: ENSP00000407836

SEQ ID NO: 48385 - protein, 346 aa, Homo sapiens; identical to SEQ ID NO: 48355
  Payload ID: 9764
  Gene Symbol: HLA-F
  Gene Name: major histocompatibility complex, class I, F
  ENSP ID: ENSP00000408540

SEQ ID NO: 48386 - protein, 131 aa, Homo sapiens; identical to SEQ ID NO: 48365
  Payload ID: 9764
  Gene Symbol: HLA-F
  Gene Name: major histocompatibility complex, class I, F
  ENSP ID: ENSP00000409934

SEQ ID NO: 48387 - protein, 124 aa, Homo sapiens; identical to SEQ ID NO: 48368
  Payload ID: 9764
  Gene Symbol: HLA-F
  Gene Name: major histocompatibility complex, class I, F
  ENSP ID: ENSP00000412140
  MOD_RES (1)..(1): Any amino acid

SEQ ID NO: 48388 - protein, 334 aa, Homo sapiens; identical to SEQ ID NO: 48357
  Payload ID: 9764
  Gene Symbol: HLA-F
  Gene Name: major histocompatibility complex, class I, F
  ENSP ID: ENSP00000414318

SEQ ID NO: 48389 - protein, 225 aa, Homo sapiens; identical to SEQ ID NO: 48367
  Payload ID: 9764
  Gene Symbol: HLA-F
  Gene Name: major histocompatibility complex, class I, F
  ENSP ID: ENSP00000414500
  MOD_RES (1)..(1): Any amino acid

SEQ ID NO: 48390 - protein, 442 aa, Homo sapiens; identical to SEQ ID NO: 48361
  Payload ID: 9764
  Gene Symbol: HLA-F
  Gene Name: major histocompatibility complex, class I, F
  ENSP ID: ENSP00000414905

SEQ ID NO: 48391 - protein, 124 aa, Homo sapiens; identical to SEQ ID NO: 48368
  Payload ID: 9764
  Gene Symbol: HLA-F
  Gene Name: major histocompatibility complex, class I, F
  ENSP ID: ENSP00000415017
  MOD_RES (1)..(1): Any amino acid

SEQ ID NO: 48392 - protein, 225 aa, Homo sapiens; identical to SEQ ID NO: 48374
  Payload ID: 9764
  Gene Symbol: HLA-F
  Gene Name: major histocompatibility complex, class I, F
  ENSP ID: ENSP00000415401
  MOD_RES (1)..(1): Any amino acid

SEQ ID NO: 48393 - protein, 213 aa, Homo sapiens
  Payload ID: 9764
  Gene Symbol: HLA-F
  Gene Name: major histocompatibility complex, class I, F
  ENSP ID: ENSP00000416426
  MOD_RES (1)..(1): Any amino acid
XPDPPPGRVPGAFTEHAYDGKDYISLNEDLRSWTAADTVAQITQRFYEAEEYAEEFRTYLEGECLELLRRYLENGKETLQRADPPKAHVAHHPISDHEATLRCWALGFYPAEITLTWQRDGEEQTQDTELVETRPAGDGTFQKWAAVVVPSGEEQRYTCHVQHEGLPQPLILRWEQSPQPTIPIVGIVAGLVVLGAVVTGAVVAAVMWRKKSS

SEQ ID NO: 48394 - protein, 346 aa, Homo sapiens; identical to SEQ ID NO: 48355
  Payload ID: 9764
  Gene Symbol: HLA-F
  Gene Name: major histocompatibility complex, class I, F
  ENSP ID: ENSP00000447228

SEQ ID NO: 48395 - protein, 346 aa, Homo sapiens; identical to SEQ ID NO: 48355
  Payload ID: 9764
  Gene Symbol: HLA-F
  Gene Name: major histocompatibility complex, class I, F
  ENSP ID: ENSP00000447401

SEQ ID NO: 48396 - protein, 346 aa, Homo sapiens; identical to SEQ ID NO: 48355
  Payload ID: 9764
  Gene Symbol: HLA-F
  Gene Name: major histocompatibility complex, class I, F
  ENSP ID: ENSP00000448260

SEQ ID NO: 48397 - protein, 346 aa, Homo sapiens; identical to SEQ ID NO: 48355
  Payload ID: 9764
  Gene Symbol: HLA-F
  Gene Name: major histocompatibility complex, class I, F
  ENSP ID: ENSP00000450119

SEQ ID NO: 48398 - protein, 346 aa, Homo sapiens; identical to SEQ ID NO: 48355
  Payload ID: 9764
  Gene Symbol: HLA-F
  Gene Name: major histocompatibility complex, class I, F
  ENSP ID: ENSP00000450300

SEQ ID NO: 48399 - protein, 339 aa, Homo sapiens
  Payload ID: 9764
  Gene Symbol: HLA-F
  Gene Name: major histocompatibility complex, class I, F
  ENSP ID: ENSP00000481264
GSHSLRYFSTAVSRPGRGEPRYIAVEYVDDTQFLRFDSDAAIPRMEPREPWVEQEGPQYWEWTTGYAKANAQTDRVALRNLLRRYNQSEAGSHTLQGMNGCDMGPDGRLLRGYHQHAYDGKDYISLNEDLRSWTAADTVAQITQRFYEAEEYAEEFRTYLEGECLELLRRYLENGKETLQRADPPKAHVAHHPISDHEATLRCWALGFYPAEITLTWQRDGEEQTQDTELVETRPAGDGTFQKWAAVVVPSGEEQRYTCHVQHEGLPQPLILRWEQSPQPTIPIVGIVAGLVVLGVAVITVAVVAAVMWRNKIPGRKGVSSEFPSSRNSTQGSDVSLKA

SEQ ID NO: 48400 - protein, 254 aa, Homo sapiens
  Payload ID: 9764
  Gene Symbol: HLA-F
  Gene Name: major histocompatibility complex, class I, F
  ENSP ID: ENSP00000482177
MAPRSLLLLLSGALALTDTWAGSHSLRYFSTAVSRPGRGEPRYIAVEYVDDTQFLRFDSDAAIPRMEPREPWVEQEGPQYWEWTTGYAKANAQTDRVALRNLLRRYNQSEAGSHTLQGMNGCDMGPDGRLLRGYHQHAYDGKDYISLNEDLRSWTAADTVAQITQRFYEAEEYAEEFRTYLEGECLELLRRYLENGKETLQRAEQSPQPTIPIVGIVAGLVVLGAVVTGAVVAAVMWRKKSSGRKGSHKSQGKV

SEQ ID NO: 48401 - protein, 346 aa, Homo sapiens
  Payload ID: 9764
  Gene Symbol: HLA-F
  Gene Name: major histocompatibility complex, class I, F
  ENSP ID: ENSP00000483269
MAPRSLLLLLSGALALTDTWAGSHSLRYFSTAVSRPGRGEPRYIAVEYVDDTQFLRFDSDAAIPRMEPREPWVEQEGPQYWEWTTGYAKANAQTDRVALRNLLRRYNQSEAGSHTLQGMNGCDMGPDGRLLRGYHQHAYDGKDYISLNEDLRSWTAADTVAQITQRFYEAEEYAEEFRTYLEGECLELLRRYLENGKETLQRADPPKAHVAHHPISDHEATLRCWALGFYPAEITLTWQRDGEEQTQDTELVETRPAGDGTFQKWAAVVVPSGEEQRYTCHVQHEGLPQPLILRWEQSPQPTIPIVGIVAGLVVLGAVVTGAVVAAVMWRKKSSGRKGSHKSQGKV

SEQ ID NO: 48402 - protein, 72 aa, Homo sapiens
  Payload ID: 9764
  Gene Symbol: HLA-F
  Gene Name: major histocompatibility complex, class I, F
  ENSP ID: ENSP00000486309
  MOD_RES (1)..(1): Any amino acid
XPQPTIPIVGIVAGLVVLGAVVTGAVVAAVMWRKKSSGPAPECLYLSNKYSHPGAIFPPEDISYVWKNVLLP

SEQ ID NO: 48403 - protein, 143 aa, Homo sapiens
  Payload ID: 9764
  Gene Symbol: HLA-F
  Gene Name: major histocompatibility complex, class I, F
  ENSP ID: ENSP00000486947
HHPISDHEATLRCWALGFYPAEITLTWQRDGEEQTQDTELVETRPAGDGTFQKWAAVVVPPGEEQRYTCHVQHEGLPQPLILRWEQSPQPTIPIVGIVAGLVVLGAVVTGAVVAAVMWRKKSSDRNRGSYSQAAGKLTHTGVQ

SEQ ID NO: 48404 - protein, 338 aa, Homo sapiens
  Payload ID: 9765
  Gene Symbol: HLA-G
  Gene Name: major histocompatibility complex, class I, G
  Uniprot ID: P17693
  ENSP ID: ENSP00000353472
MVVMAPRTLFLLLSGALTLTETWAGSHSMRYFSAAVSRPGRGEPRFIAMGYVDDTQFVRFDSDSACPRMEPRAPWVEQEGPEYWEEETRNTKAHAQTDRMNLQTLRGYYNQSEASSHTLQWMIGCDLGSDGRLLRGYEQYAYDGKDYLALNEDLRSWTAADTAAQISKRKCEAANVAEQRRAYLEGTCVEWLHRYLENGKEMLQRADPPKTHVTHHPVFDYEATLRCWALGFYPAEIILTWQRDGEDQTQDVELVETRPAGDGTFQKWAAVVVPSGEEQRYTCHVQHEGLPEPLMLRWKQSSLPTIPIMGIVAGLVVLAAVVTGAAVAAVLWRKKSSD

SEQ ID NO: 48405 - protein, 154 aa, Homo sapiens
  Payload ID: 9765
  Gene Symbol: HLA-G
  Gene Name: major histocompatibility complex, class I, G
  ENSP ID: ENSP00000366011
MVVMAPRTLFLLLSGALTLTETWAGSHSMRYFSAAVSRPGRGEPRFIAMGYVDDTQFVRFDSDSACPRMEPRAPWVEQEGPEYWEEETRNTKAHAQTDRMNLQTLRGYYNQSEAKQSSLPTIPIMGIVAGLVVLAAVVTGAAVAAVLWRKKSSD

SEQ ID NO: 48406 - protein, 246 aa, Homo sapiens
  Payload ID: 9765
  Gene Symbol: HLA-G
  Gene Name: major histocompatibility complex, class I, G
  ENSP ID: ENSP00000366014
MVVMAPRTLFLLLSGALTLTETWAGSHSMRYFSAAVSRPGRGEPRFIAMGYVDDTQFVRFDSDSACPRMEPRAPWVEQEGPEYWEEETRNTKAHAQTDRMNLQTLRGYYNQSEANPPKTHVTHHPVFDYEATLRCWALGFYPAEIILTWQRDGEDQTQDVELVETRPAGDGTFQKWAAVVVPSGEEQRYTCHVQHEGLPEPLMLRWKQSSLPTIPIMGIVAGLVVLAAVVTGAAVAAVLWRKKSSD

SEQ ID NO: 48407 - protein, 343 aa, Homo sapiens
  Payload ID: 9765
  Gene Symbol: HLA-G
  Gene Name: major histocompatibility complex, class I, G
  ENSP ID: ENSP00000366024
MKTPRMVVMAPRTLFLLLSGALTLTETWAGSHSMRYFSAAVSRPGRGEPRFIAMGYVDDTQFVRFDSDSACPRMEPRAPWVEQEGPEYWEEETRNTKAHAQTDRMNLQTLRGYYNQSEASSHTLQWMIGCDLGSDGRLLRGYEQYAYDGKDYLALNEDLRSWTAADTAAQISKRKCEAANVAEQRRAYLEGTCVEWLHRYLENGKEMLQRADPPKTHVTHHPVFDYEATLRCWALGFYPAEIILTWQRDGEDQTQDVELVETRPAGDGTFQKWAAVVVPSGEEQRYTCHVQHEGLPEPLMLRWKQSSLPTIPIMGIVAGLVVLAAVVTGAAVAAVLWRKKSSD

SEQ ID NO: 48408 - protein, 338 aa, Homo sapiens; identical to SEQ ID NO: 48404
  Payload ID: 9765
  Gene Symbol: HLA-G
  Gene Name: major histocompatibility complex, class I, G
  Uniprot ID: P17693
  ENSP ID: ENSP00000373116

SEQ ID NO: 48409 - protein, 154 aa, Homo sapiens; identical to SEQ ID NO: 48405
  Payload ID: 9765
  Gene Symbol: HLA-G
  Gene Name: major histocompatibility complex, class I, G
  ENSP ID: ENSP00000373117

SEQ ID NO: 48410 - protein, 246 aa, Homo sapiens; identical to SEQ ID NO: 48406
  Payload ID: 9765
  Gene Symbol: HLA-G
  Gene Name: major histocompatibility complex, class I, G
  ENSP ID: ENSP00000373118

SEQ ID NO: 48411 - protein, 343 aa, Homo sapiens; identical to SEQ ID NO: 48407
  Payload ID: 9765
  Gene Symbol: HLA-G
  Gene Name: major histocompatibility complex, class I, G
  ENSP ID: ENSP00000383506

SEQ ID NO: 48412 - protein, 343 aa, Homo sapiens; identical to SEQ ID NO: 48407
  Payload ID: 9765
  Gene Symbol: HLA-G
  Gene Name: major histocompatibility complex, class I, G
  ENSP ID: ENSP00000383521

SEQ ID NO: 48413 - protein, 343 aa, Homo sapiens; identical to SEQ ID NO: 48407
  Payload ID: 9765
  Gene Symbol: HLA-G
  Gene Name: major histocompatibility complex, class I, G
  ENSP ID: ENSP00000387624

SEQ ID NO: 48414 - protein, 338 aa, Homo sapiens; identical to SEQ ID NO: 48404
  Payload ID: 9765
  Gene Symbol: HLA-G
  Gene Name: major histocompatibility complex, class I, G
  Uniprot ID: P17693
  ENSP ID: ENSP00000388176

SEQ ID NO: 48415 - protein, 338 aa, Homo sapiens; identical to SEQ ID NO: 48404
  Payload ID: 9765
  Gene Symbol: HLA-G
  Gene Name: major histocompatibility complex, class I, G
  Uniprot ID: P17693
  ENSP ID: ENSP00000389522

SEQ ID NO: 48416 - protein, 154 aa, Homo sapiens; identical to SEQ ID NO: 48405
  Payload ID: 9765
  Gene Symbol: HLA-G
  Gene Name: major histocompatibility complex, class I, G
  ENSP ID: ENSP00000389969

SEQ ID NO: 48417 - protein, 246 aa, Homo sapiens; identical to SEQ ID NO: 48406
  Payload ID: 9765
  Gene Symbol: HLA-G
  Gene Name: major histocompatibility complex, class I, G
  ENSP ID: ENSP00000390678

SEQ ID NO: 48418 - protein, 246 aa, Homo sapiens; identical to SEQ ID NO: 48406
  Payload ID: 9765
  Gene Symbol: HLA-G
  Gene Name: major histocompatibility complex, class I, G
  ENSP ID: ENSP00000392075

SEQ ID NO: 48419 - protein, 343 aa, Homo sapiens; identical to SEQ ID NO: 48407
  Payload ID: 9765
  Gene Symbol: HLA-G
  Gene Name: major histocompatibility complex, class I, G
  ENSP ID: ENSP00000392347

SEQ ID NO: 48420 - protein, 246 aa, Homo sapiens; identical to SEQ ID NO: 48406
  Payload ID: 9765
  Gene Symbol: HLA-G
  Gene Name: major histocompatibility complex, class I, G
  ENSP ID: ENSP00000396594

SEQ ID NO: 48421 - protein, 343 aa, Homo sapiens; identical to SEQ ID NO: 48407
  Payload ID: 9765
  Gene Symbol: HLA-G
  Gene Name: major histocompatibility complex, class I, G
  ENSP ID: ENSP00000397331

SEQ ID NO: 48422 - protein, 246 aa, Homo sapiens; identical to SEQ ID NO: 48406
  Payload ID: 9765
  Gene Symbol: HLA-G
  Gene Name: major histocompatibility complex, class I, G
  ENSP ID: ENSP00000397733

SEQ ID NO: 48423 - protein, 338 aa, Homo sapiens; identical to SEQ ID NO: 48404
  Payload ID: 9765
  Gene Symbol: HLA-G
  Gene Name: major histocompatibility complex, class I, G
  Uniprot ID: P17693
  ENSP ID: ENSP00000398200

SEQ ID NO: 48424 - protein, 154 aa, Homo sapiens; identical to SEQ ID NO: 48405
  Payload ID: 9765
  Gene Symbol: HLA-G
  Gene Name: major histocompatibility complex, class I, G
  ENSP ID: ENSP00000401326

SEQ ID NO: 48425 - protein, 338 aa, Homo sapiens; identical to SEQ ID NO: 48404
  Payload ID: 9765
  Gene Symbol: HLA-G
  Gene Name: major histocompatibility complex, class I, G
  Uniprot ID: P17693
  ENSP ID: ENSP00000405238

SEQ ID NO: 48426 - protein, 246 aa, Homo sapiens; identical to SEQ ID NO: 48406
  Payload ID: 9765
  Gene Symbol: HLA-G
  Gene Name: major histocompatibility complex, class I, G
  ENSP ID: ENSP00000408461

SEQ ID NO: 48427 - protein, 338 aa, Homo sapiens; identical to SEQ ID NO: 48404
  Payload ID: 9765
  Gene Symbol: HLA-G
  Gene Name: major histocompatibility complex, class I, G
  Uniprot ID: P17693
  ENSP ID: ENSP00000408773

SEQ ID NO: 48428 - protein, 343 aa, Homo sapiens; identical to SEQ ID NO: 48407
  Payload ID: 9765
  Gene Symbol: HLA-G
  Gene Name: major histocompatibility complex, class I, G
  ENSP ID: ENSP00000409132

SEQ ID NO: 48429 - protein, 154 aa, Homo sapiens; identical to SEQ ID NO: 48405
  Payload ID: 9765
  Gene Symbol: HLA-G
  Gene Name: major histocompatibility complex, class I, G
  ENSP ID: ENSP00000410247

SEQ ID NO: 48430 - protein, 338 aa, Homo sapiens; identical to SEQ ID NO: 48404
  Payload ID: 9765
  Gene Symbol: HLA-G
  Gene Name: major histocompatibility complex, class I, G
  Uniprot ID: P17693
  ENSP ID: ENSP00000412927

SEQ ID NO: 48431 - protein, 154 aa, Homo sapiens; identical to SEQ ID NO: 48405
  Payload ID: 9765
  Gene Symbol: HLA-G
  Gene Name: major histocompatibility complex, class I, G
  ENSP ID: ENSP00000413926

SEQ ID NO: 48432 - protein, 246 aa, Homo sapiens; identical to SEQ ID NO: 48406
  Payload ID: 9765
  Gene Symbol: HLA-G
  Gene Name: major histocompatibility complex, class I, G
  ENSP ID: ENSP00000415905

SEQ ID NO: 48433 - protein, 154 aa, Homo sapiens; identical to SEQ ID NO: 48405
  Payload ID: 9765
  Gene Symbol: HLA-G
  Gene Name: major histocompatibility complex, class I, G
  ENSP ID: ENSP00000416408

SEQ ID NO: 48434 - protein, 246 aa, Homo sapiens; identical to SEQ ID NO: 48406
  Payload ID: 9765
  Gene Symbol: HLA-G
  Gene Name: major histocompatibility complex, class I, G
  ENSP ID: ENSP00000432220

SEQ ID NO: 48435 - protein, 246 aa, Homo sapiens; identical to SEQ ID NO: 48406
  Payload ID: 9765
  Gene Symbol: HLA-G
  Gene Name: major histocompatibility complex, class I, G
  ENSP ID: ENSP00000432239

SEQ ID NO: 48436 - protein, 246 aa, Homo sapiens; identical to SEQ ID NO: 48406
  Payload ID: 9765
  Gene Symbol: HLA-G
  Gene Name: major histocompatibility complex, class I, G
  ENSP ID: ENSP00000433426

SEQ ID NO: 48437 - protein, 246 aa, Homo sapiens; identical to SEQ ID NO: 48406
  Payload ID: 9765
  Gene Symbol: HLA-G
  Gene Name: major histocompatibility complex, class I, G
  ENSP ID: ENSP00000434622

SEQ ID NO: 48438 - protein, 246 aa, Homo sapiens; identical to SEQ ID NO: 48406
  Payload ID: 9765
  Gene Symbol: HLA-G
  Gene Name: major histocompatibility complex, class I, G
  ENSP ID: ENSP00000436375

SEQ ID NO: 48439 - protein, 246 aa, Homo sapiens; identical to SEQ ID NO: 48406
  Payload ID: 9765
  Gene Symbol: HLA-G
  Gene Name: major histocompatibility complex, class I, G
  ENSP ID: ENSP00000437036

SEQ ID NO: 48440 - protein, 338 aa, Homo sapiens; identical to SEQ ID NO: 48404
  Payload ID: 9765
  Gene Symbol: HLA-G
  Gene Name: major histocompatibility complex, class I, G
  Uniprot ID: P17693
  ENSP ID: ENSP00000447762

SEQ ID NO: 48441 - protein, 338 aa, Homo sapiens; identical to SEQ ID NO: 48404
  Payload ID: 9765
  Gene Symbol: HLA-G
  Gene Name: major histocompatibility complex, class I, G
  Uniprot ID: P17693
  ENSP ID: ENSP00000447780

SEQ ID NO: 48442 - protein, 338 aa, Homo sapiens; identical to SEQ ID NO: 48404
  Payload ID: 9765
  Gene Symbol: HLA-G
  Gene Name: major histocompatibility complex, class I, G
  Uniprot ID: P17693
  ENSP ID: ENSP00000448085

SEQ ID NO: 48443 - protein, 338 aa, Homo sapiens; identical to SEQ ID NO: 48404
  Payload ID: 9765
  Gene Symbol: HLA-G
  Gene Name: major histocompatibility complex, class I, G
  Uniprot ID: P17693
  ENSP ID: ENSP00000448363

SEQ ID NO: 48444 - protein, 338 aa, Homo sapiens; identical to SEQ ID NO: 48404
  Payload ID: 9765
  Gene Symbol: HLA-G
  Gene Name: major histocompatibility complex, class I, G
  Uniprot ID: P17693
  ENSP ID: ENSP00000449291

SEQ ID NO: 48445 - protein, 338 aa, Homo sapiens; identical to SEQ ID NO: 48404
  Payload ID: 9765
  Gene Symbol: HLA-G
  Gene Name: major histocompatibility complex, class I, G
  Uniprot ID: P17693
  ENSP ID: ENSP00000449903

SEQ ID NO: 48446 - protein, 246 aa, Homo sapiens
  Payload ID: 9765
  Gene Symbol: HLA-G
  Gene Name: major histocompatibility complex, class I, G
  ENSP ID: ENSP00000479043
MVVMAPRTLFLLLSGALTLTETWAGSHSMRYFSAAVSRPGRGEPRFIAMGYVDDTQFVRFDSDSACPRMEPRAPWVEQEGPEYWEEETRNTKAHAQTDRMNLQTLRGYYNQSEANPPKTHVTHHPVFDYEATLRCWALGFYPAEIILTWQRDGEDQTQDVELVETRPAGDGTFQKWAAVVVPSGEEQRYMCHVQHEGLPEPLMLRWKQSSLPTIPIMGIVAGLVVLAAVVTGAAVAAVLWRKKSSD

SEQ ID NO: 48447 - protein, 338 aa, Homo sapiens
  Payload ID: 9765
  Gene Symbol: HLA-G
  Gene Name: major histocompatibility complex, class I, G
  ENSP ID: ENSP00000479303
MVVMAPRTLFLLLSGALTLTETWAGSHSMRYFSAAVSRPGRGEPRFIAMGYVDDTQFVRFDSDSACPRMEPRAPWVEQEGPEYWEEETRNTKAHAQTDRMNLQTLRGYYNQSEASSHTLQWMIGCDLGSDGRLLRGYEQYAYDGKDYLALNEDLRSWTAADTAAQISKRKCEAANVAEQRRAYLEGTCVEWLHRYLENGKEMLQRADPPKTHVTHHPVFDYEATLRCWALGFYPAEIILTWQRDGEDQTQDVELVETRPAGDGTFQKWAAVVVPSGEEQRYMCHVQHEGLPEPLMLRWKQSSLPTIPIMGIVAGLVVLAAVVTGAAVAAVLWRKKSSD

SEQ ID NO: 48448 - protein, 154 aa, Homo sapiens; identical to SEQ ID NO: 48405
  Payload ID: 9765
  Gene Symbol: HLA-G
  Gene Name: major histocompatibility complex, class I, G
  ENSP ID: ENSP00000479399

SEQ ID NO: 48449 - protein, 338 aa, Homo sapiens; identical to SEQ ID NO: 48447
  Payload ID: 9765
  Gene Symbol: HLA-G
  Gene Name: major histocompatibility complex, class I, G
  ENSP ID: ENSP00000482111

SEQ ID NO: 48450 - protein, 246 aa, Homo sapiens; identical to SEQ ID NO: 48446
  Payload ID: 9765
  Gene Symbol: HLA-G
  Gene Name: major histocompatibility complex, class I, G
  ENSP ID: ENSP00000482272

SEQ ID NO: 48451 - protein, 343 aa, Homo sapiens
  Payload ID: 9765
  Gene Symbol: HLA-G
  Gene Name: major histocompatibility complex, class I, G
  ENSP ID: ENSP00000484084
MKTPRMVVMAPRTLFLLLSGALTLTETWAGSHSMRYFSAAVSRPGRGEPRFIAMGYVDDTQFVRFDSDSACPRMEPRAPWVEQEGPEYWEEETRNTKAHAQTDRMNLQTLRGYYNQSEASSHTLQWMIGCDLGSDGRLLRGYEQYAYDGKDYLALNEDLRSWTAADTAAQISKRKCEAANVAEQRRAYLEGTCVEWLHRYLENGKEMLQRADPPKTHVTHHPVFDYEATLRCWALGFYPAEIILTWQRDGEDQTQDVELVETRPAGDGTFQKWAAVVVPSGEEQRYMCHVQHEGLPEPLMLRWKQSSLPTIPIMGIVAGLVVLAAVVTGAAVAAVLWRKKSSD

SEQ ID NO: 48452 - protein, 261 aa, Homo sapiens
  Payload ID: 9766
  Gene Symbol: HLA-DMA
  Gene Name: major histocompatibility complex, class II, DM alpha
  Uniprot ID: P28067
  ENSP ID: ENSP00000363976
MGHEQNQGAALLQMLPLLWLLPHSWAVPEAPTPMWPDDLQNHTFLHTVYCQDGSPSVGLSEAYDEDQLFFFDFSQNTRVPRLPEFADWAQEQGDAPAILFDKEFCEWMIQQIGPKLDGKIPVSRGFPIAEVFTLKPLEFGKPNTLVCFVSNLFPPMLTVNWQHHSVPVEGFGPTFVSAVDGLSFQAFSYLNFTPEPSDIFSCIVTHEIDRYTAIAYWVPRNALPSDLLENVLCGVAFGLGVLGIIVGIVLIIYFRKPCSGD

SEQ ID NO: 48453 - protein, 227 aa, Homo sapiens
  Payload ID: 9766
  Gene Symbol: HLA-DMA
  Gene Name: major histocompatibility complex, class II, DM alpha
  ENSP ID: ENSP00000372714
MGHEQNQGAALLQMLPLLWLLPHSWAVPEAPTPMWPDDLQNHTFLHTVYCQDGSPSVGLSEAYDEDQLFFFDFSQNTRVPRLPEFADWAQEQGDAPAILFDKEFCEWMIQQIGPKLDGKIPVSRVNWQHHSVPVEGFGPTFVSAVDGLSFQAFSYLNFTPEPSDIFSCIVTHEIDRYTAIAYWVPRNALPSDLLENVLCGVAFGLGVLGIIVGIVLIIYFRKPCSGD

SEQ ID NO: 48454 - protein, 166 aa, Homo sapiens
  Payload ID: 9766
  Gene Symbol: HLA-DMA
  Gene Name: major histocompatibility complex, class II, DM alpha
  ENSP ID: ENSP00000372715
MGHEQNQGAALLQMLPLLWLLPHSWAVPEGFPIAEVFTLKPLEFGKPNTLVCFVSNLFPPMLTVNWQHHSVPVEGFGPTFVSAVDGLSFQAFSYLNFTPEPSDIFSCIVTHEIDRYTAIAYWVPRNALPSDLLENVLCGVAFGLGVLGIIVGIVLIIYFRKPCSGD

SEQ ID NO: 48455 - protein, 261 aa, Homo sapiens; identical to SEQ ID NO: 48452
  Payload ID: 9766
  Gene Symbol: HLA-DMA
  Gene Name: major histocompatibility complex, class II, DM alpha
  Uniprot ID: P28067
  ENSP ID: ENSP00000372717

SEQ ID NO: 48456 - protein, 227 aa, Homo sapiens; identical to SEQ ID NO: 48453
  Payload ID: 9766
  Gene Symbol: HLA-DMA
  Gene Name: major histocompatibility complex, class II, DM alpha
  ENSP ID: ENSP00000378714

SEQ ID NO: 48457 - protein, 166 aa, Homo sapiens; identical to SEQ ID NO: 48454
  Payload ID: 9766
  Gene Symbol: HLA-DMA
  Gene Name: major histocompatibility complex, class II, DM alpha
  ENSP ID: ENSP00000378716

SEQ ID NO: 48458 - protein, 227 aa, Homo sapiens; identical to SEQ ID NO: 48453
  Payload ID: 9766
  Gene Symbol: HLA-DMA
  Gene Name: major histocompatibility complex, class II, DM alpha
  ENSP ID: ENSP00000389962

SEQ ID NO: 48459 - protein, 166 aa, Homo sapiens; identical to SEQ ID NO: 48454
  Payload ID: 9766
  Gene Symbol: HLA-DMA
  Gene Name: major histocompatibility complex, class II, DM alpha
  ENSP ID: ENSP00000390001

SEQ ID NO: 48460 - protein, 261 aa, Homo sapiens; identical to SEQ ID NO: 48452
  Payload ID: 9766
  Gene Symbol: HLA-DMA
  Gene Name: major histocompatibility complex, class II, DM alpha
  Uniprot ID: P28067
  ENSP ID: ENSP00000392842

SEQ ID NO: 48461 - protein, 227 aa, Homo sapiens; identical to SEQ ID NO: 48453
  Payload ID: 9766
  Gene Symbol: HLA-DMA
  Gene Name: major histocompatibility complex, class II, DM alpha
  ENSP ID: ENSP00000394366

SEQ ID NO: 48462 - protein, 169 aa, Homo sapiens
  Payload ID: 9766
  Gene Symbol: HLA-DMA
  Gene Name: major histocompatibility complex, class II, DM alpha
  ENSP ID: ENSP00000395056
MWPDDLQNHTFLHTVYCQDGSPSVGLSEAYDEDQLFFFDFSQNTRVPRLPEFADWAQEQGDAPAILFDKEFCEWMIQQIGPKLDGKIPVSRGFPIAEVFTLKPLEFGKPNTLVCFVSNLFPPMLTVNWQHHSVPVEGFGPTFVSAVDGLSFQAFSYLNFTPEPSDIFSC

SEQ ID NO: 48463 - protein, 261 aa, Homo sapiens; identical to SEQ ID NO: 48452
  Payload ID: 9766
  Gene Symbol: HLA-DMA
  Gene Name: major histocompatibility complex, class II, DM alpha
  Uniprot ID: P28067
  ENSP ID: ENSP00000395349

SEQ ID NO: 48464 - protein, 169 aa, Homo sapiens; identical to SEQ ID NO: 48462
  Payload ID: 9766
  Gene Symbol: HLA-DMA
  Gene Name: major histocompatibility complex, class II, DM alpha
  ENSP ID: ENSP00000395579

SEQ ID NO: 48465 - protein, 169 aa, Homo sapiens; identical to SEQ ID NO: 48462
  Payload ID: 9766
  Gene Symbol: HLA-DMA
  Gene Name: major histocompatibility complex, class II, DM alpha
  ENSP ID: ENSP00000398728

SEQ ID NO: 48466 - protein, 227 aa, Homo sapiens; identical to SEQ ID NO: 48453
  Payload ID: 9766
  Gene Symbol: HLA-DMA
  Gene Name: major histocompatibility complex, class II, DM alpha
  ENSP ID: ENSP00000398742

SEQ ID NO: 48467 - protein, 166 aa, Homo sapiens
  Payload ID: 9766
  Gene Symbol: HLA-DMA
  Gene Name: major histocompatibility complex, class II, DM alpha
  ENSP ID: ENSP00000398951
MGHEQNQGAALLQMLPLLWLLPHSWAVPEGFPIAEVFTLKPLEFGKPNTLVCFVSNLFPPMLTVNWQHHSIPVEGFGPTFVSAVDGLSFQAFSYLNFTPEPSDIFSCIVTHEIDRYTAIAYWVPRNALPSDLLENVLCGVAFGLGVLGIIVGIVLIIYFRKPCSGD

SEQ ID NO: 48468 - protein, 166 aa, Homo sapiens; identical to SEQ ID NO: 48454
  Payload ID: 9766
  Gene Symbol: HLA-DMA
  Gene Name: major histocompatibility complex, class II, DM alpha
  ENSP ID: ENSP00000399032

SEQ ID NO: 48469 - protein, 169 aa, Homo sapiens; identical to SEQ ID NO: 48462
  Payload ID: 9766
  Gene Symbol: HLA-DMA
  Gene Name: major histocompatibility complex, class II, DM alpha
  ENSP ID: ENSP00000399386

SEQ ID NO: 48470 - protein, 169 aa, Homo sapiens
  Payload ID: 9766
  Gene Symbol: HLA-DMA
  Gene Name: major histocompatibility complex, class II, DM alpha
  ENSP ID: ENSP00000400783
MWPDDLQNHTFLHTVYCQDGSPSVGLSEAYDEDQLFFFDFSQNTRVPRLPEFADWAQEQGDAPAILFDKEFCEWMIQQIGPKLDGKIPVSRGFPIAEVFTLKPLEFGKPNTLVCFVSNLFPPMLTVNWQHHSIPVEGFGPTFVSAVDGLSFQAFSYLNFTPEPSDIFSC

SEQ ID NO: 48471 - protein, 227 aa, Homo sapiens
  Payload ID: 9766
  Gene Symbol: HLA-DMA
  Gene Name: major histocompatibility complex, class II, DM alpha
  ENSP ID: ENSP00000402739
MGHEQNQGAALLQMLPLLWLLPHSWAVPEAPTPMWPDDLQNHTFLHTVYCQDGSPSVGLSEAYDEDQLFFFDFSQNTRVPRLPEFADWAQEQGDAPAILFDKEFCEWMIQQIGPKLDGKIPVSRVNWQHHSIPVEGFGPTFVSAVDGLSFQAFSYLNFTPEPSDIFSCIVTHEIDRYTAIAYWVPRNALPSDLLENVLCGVAFGLGVLGIIVGIVLIIYFRKPCSGD

SEQ ID NO: 48472 - protein, 169 aa, Homo sapiens; identical to SEQ ID NO: 48462
  Payload ID: 9766
  Gene Symbol: HLA-DMA
  Gene Name: major histocompatibility complex, class II, DM alpha
  ENSP ID: ENSP00000403122

SEQ ID NO: 48473 - protein, 261 aa, Homo sapiens
  Payload ID: 9766
  Gene Symbol: HLA-DMA
  Gene Name: major histocompatibility complex, class II, DM alpha
  ENSP ID: ENSP00000403906
MGHEQNQGAALLQMLPLLWLLPHSWAVPEAPTPMWPDDLQNHTFLHTVYCQDGSPSVGLSEAYDEDQLFFFDFSQNTRVPRLPEFADWAQEQGDAPAILFDKEFCEWMIQQIGPKLDGKIPVSRGFPIAEVFTLKPLEFGKPNTLVCFVSNLFPPMLTVNWQHHSIPVEGFGPTFVSAVDGLSFQAFSYLNFTPEPSDIFSCIVTHEIDRYTAIAYWVPRNALPSDLLENVLCGVAFGLGVLGIIVGIVLIIYFRKPCSGD

SEQ ID NO: 48474 - protein, 261 aa, Homo sapiens; identical to SEQ ID NO: 48452
  Payload ID: 9766
  Gene Symbol: HLA-DMA
  Gene Name: major histocompatibility complex, class II, DM alpha
  Uniprot ID: P28067
  ENSP ID: ENSP00000404018

SEQ ID NO: 48475 - protein, 166 aa, Homo sapiens; identical to SEQ ID NO: 48454
  Payload ID: 9766
  Gene Symbol: HLA-DMA
  Gene Name: major histocompatibility complex, class II, DM alpha
  ENSP ID: ENSP00000405208

SEQ ID NO: 48476 - protein, 290 aa, Homo sapiens
  Payload ID: 9766
  Gene Symbol: HLA-DMA
  Gene Name: major histocompatibility complex, class II, DM alpha
  ENSP ID: ENSP00000405637
VSCWLSDSCQELQRRGIILCSYGVTSPIAVFGRPGRLRNRRHFERRLVPMKWLKKCLDTAPTPMWPDDLQNHTFLHTVYCQDGSPSVGLSEAYDEDQLFFFDFSQNTRVPRLPEFADWAQEQGDAPAILFDKEFCEWMIQQIGPKLDGKIPVSRGFPIAEVFTLKPLEFGKPNTLVCFVSNLFPPMLTVNWQHHSVPVEGFGPTFVSAVDGLSFQAFSYLNFTPEPSDIFSCIVTHEIDRYTAIAYWVPRNALPSDLLENVLCGVAFGLGVLGIIVGIVLIIYFRKPCSG

SEQ ID NO: 48477 - protein, 261 aa, Homo sapiens; identical to SEQ ID NO: 48452
  Payload ID: 9766
  Gene Symbol: HLA-DMA
  Gene Name: major histocompatibility complex, class II, DM alpha
  Uniprot ID: P28067
  ENSP ID: ENSP00000407198

SEQ ID NO: 48478 - protein, 169 aa, Homo sapiens; identical to SEQ ID NO: 48462
  Payload ID: 9766
  Gene Symbol: HLA-DMA
  Gene Name: major histocompatibility complex, class II, DM alpha
  ENSP ID: ENSP00000407671

SEQ ID NO: 48479 - protein, 169 aa, Homo sapiens; identical to SEQ ID NO: 48462
  Payload ID: 9766
  Gene Symbol: HLA-DMA
  Gene Name: major histocompatibility complex, class II, DM alpha
  ENSP ID: ENSP00000408141

SEQ ID NO: 48480 - protein, 290 aa, Homo sapiens
  Payload ID: 9766
  Gene Symbol: HLA-DMA
  Gene Name: major histocompatibility complex, class II, DM alpha
  ENSP ID: ENSP00000408520
VSCWLSDSCQELQRRGIILCSYGVTSPIAVFGRPGRLRNRRHFERRLVPMKWLKKCLDTAPTPMWPDDLQNHTFLHTVYCQDGSPSVGLSEAYDEDQLFFFDFSQNTRVPRLPEFADWAQEQGDAPAILFDKEFCEWMIQQIGPKLDGKIPVSRGFPIAEVFTLKPLEFGKPNTLVCFVSNLFPPMLTVNWQHHSIPVEGFGPTFVSAVDGLSFQAFSYLNFTPEPSDIFSCIVTHEIDRYTAIAYWVPRNALPSDLLENVLCGVAFGLGVLGIIVGIVLIIYFRKPCSG

SEQ ID NO: 48481 - protein, 290 aa, Homo sapiens; identical to SEQ ID NO: 48476
  Payload ID: 9766
  Gene Symbol: HLA-DMA
  Gene Name: major histocompatibility complex, class II, DM alpha
  ENSP ID: ENSP00000409144

SEQ ID NO: 48482 - protein, 290 aa, Homo sapiens; identical to SEQ ID NO: 48476
  Payload ID: 9766
  Gene Symbol: HLA-DMA
  Gene Name: major histocompatibility complex, class II, DM alpha
  ENSP ID: ENSP00000409668

SEQ ID NO: 48483 - protein, 166 aa, Homo sapiens; identical to SEQ ID NO: 48454
  Payload ID: 9766
  Gene Symbol: HLA-DMA
  Gene Name: major histocompatibility complex, class II, DM alpha
  ENSP ID: ENSP00000409734

SEQ ID NO: 48484 - protein, 261 aa, Homo sapiens; identical to SEQ ID NO: 48452
  Payload ID: 9766
  Gene Symbol: HLA-DMA
  Gene Name: major histocompatibility complex, class II, DM alpha
  Uniprot ID: P28067
  ENSP ID: ENSP00000410591

SEQ ID NO: 48485 - protein, 290 aa, Homo sapiens; identical to SEQ ID NO: 48476
  Payload ID: 9766
  Gene Symbol: HLA-DMA
  Gene Name: major histocompatibility complex, class II, DM alpha
  ENSP ID: ENSP00000411774

SEQ ID NO: 48486 - protein, 227 aa, Homo sapiens; identical to SEQ ID NO: 48453
  Payload ID: 9766
  Gene Symbol: HLA-DMA
  Gene Name: major histocompatibility complex, class II, DM alpha
  ENSP ID: ENSP00000412100

SEQ ID NO: 48487 - protein, 241 aa, Homo sapiens
  Payload ID: 9766
  Gene Symbol: HLA-DMA
  Gene Name: major histocompatibility complex, class II, DM alpha
  ENSP ID: ENSP00000412550
MKWLKKCLDTAPTPMWPDDLQNHTFLHTVYCQDGSPSVGLSEAYDEDQLFFFDFSQNTRVPRLPEFADWAQEQGDAPAILFDKEFCEWMIQQIGPKLDGKIPVSRGFPIAEVFTLKPLEFGKPNTLVCFVSNLFPPMLTVNWQHHSVPVEGFGPTFVSAVDGLSFQAFSYLNFTPEPSDIFSCIVTHEIDRYTAIAYWVPRNALPSDLLENVLCGVAFGLGVLGIIVGIVLIIYFRKPCSG

SEQ ID NO: 48488 - protein, 227 aa, Homo sapiens; identical to SEQ ID NO: 48453
  Payload ID: 9766
  Gene Symbol: HLA-DMA
  Gene Name: major histocompatibility complex, class II, DM alpha
  ENSP ID: ENSP00000414016

SEQ ID NO: 48489 - protein, 290 aa, Homo sapiens; identical to SEQ ID NO: 48476
  Payload ID: 9766
  Gene Symbol: HLA-DMA
  Gene Name: major histocompatibility complex, class II, DM alpha
  ENSP ID: ENSP00000414631

SEQ ID NO: 48490 - protein, 166 aa, Homo sapiens; identical to SEQ ID NO: 48454
  Payload ID: 9766
  Gene Symbol: HLA-DMA
  Gene Name: major histocompatibility complex, class II, DM alpha
  ENSP ID: ENSP00000414945

SEQ ID NO: 48491 - protein, 290 aa, Homo sapiens; identical to SEQ ID NO: 48476
  Payload ID: 9766
  Gene Symbol: HLA-DMA
  Gene Name: major histocompatibility complex, class II, DM alpha
  ENSP ID: ENSP00000415844

SEQ ID NO: 48492 - protein, 263 aa, Homo sapiens
  Payload ID: 9767
  Gene Symbol: HLA-DMB
  Gene Name: major histocompatibility complex, class II, DM beta
  Uniprot ID: P28068
  ENSP ID: ENSP00000372718
MITFLPLLLGLSLGCTGAGGFVAHVESTCLLDDAGTPKDFTYCISFNKDLLTCWDPEENKMAPCEFGVLNSLANVLSQHLNQKDTLMQRLRNGLQNCATHTQPFWGSLTNRTRPPSVQVAKTTPFNTREPVMLACYVWGFYPAEVTITWRKNGKLVMPHSSAHKTAQPNGDWTYQTLSHLALTPSYGDTYTCVVEHIGAPEPILRDWTPGLSPMQTLKVSVSAVTLGLGLIIFSLGVISWRRAGHSSYTPLPGSNYSEGWHIS

SEQ ID NO: 48493 - protein, 263 aa, Homo sapiens; identical to SEQ ID NO: 48492
  Payload ID: 9767
  Gene Symbol: HLA-DMB
  Gene Name: major histocompatibility complex, class II, DM beta
  Uniprot ID: P28068
  ENSP ID: ENSP00000378723

SEQ ID NO: 48494 - protein, 175 aa, Homo sapiens
  Payload ID: 9767
  Gene Symbol: HLA-DMB
  Gene Name: major histocompatibility complex, class II, DM beta
  ENSP ID: ENSP00000389736
MGHEQNQGAALLQMLPLLWLLPHSWAVPEEQSMITFLPLLLGLSLGCTGAGGFVAHVESTCLLDDAGTPKDFTYCISFNKDLLTCWDPEENKMAPCEFGVLNSLANVLSQHLNQKDTLMQRLRNGLQNCATHTQPFWGSLTNRTRPPSVQVAKTTPFNTREPVMLACYVWGFYPA

SEQ ID NO: 48495 - protein, 106 aa, Homo sapiens
  Payload ID: 9767
  Gene Symbol: HLA-DMB
  Gene Name: major histocompatibility complex, class II, DM beta
  ENSP ID: ENSP00000390848
VAKTTPFNTREPVMLACYVWGFYPAEVTITWRKNGKLVMPHSSAHKTAQPNGDWTYQTLSHLALTPSYGDTYTCVVEHTGAPEPILRDWSYTPLPGSNYSEGWHIS

SEQ ID NO: 48496 - protein, 106 aa, Homo sapiens
  Payload ID: 9767
  Gene Symbol: HLA-DMB
  Gene Name: major histocompatibility complex, class II, DM beta
  ENSP ID: ENSP00000391352
VAKTTPFNTREPVMLACYVWGFYPAEVTITWRKNGKLVMPHSSAHKTAQPNGDWTYQTLSHLALTPSYGDTYTCVVEHIGAPEPILRDWSYTPLPGSNYSEGWHIS

SEQ ID NO: 48497 - protein, 106 aa, Homo sapiens; identical to SEQ ID NO: 48495
  Payload ID: 9767
  Gene Symbol: HLA-DMB
  Gene Name: major histocompatibility complex, class II, DM beta
  ENSP ID: ENSP00000391679

SEQ ID NO: 48498 - protein, 141 aa, Homo sapiens
  Payload ID: 9767
  Gene Symbol: HLA-DMB
  Gene Name: major histocompatibility complex, class II, DM beta
  ENSP ID: ENSP00000393285
  MOD_RES (1)..(1): Any amino acid
XTRPPSVQVAKTTPFNTREPVMLACYVWGFYPAEVTITWRKNGKLVMPHSSAHKTAQPNGDWTYQTLSHLALTPSYGDTYTCVVEHTGAPEPILRDWTPGLSPMQTLKVSVSAVTLGLGLIIFSLGVISWRRAGHSRWHIS

SEQ ID NO: 48499 - protein, 263 aa, Homo sapiens; identical to SEQ ID NO: 48492
  Payload ID: 9767
  Gene Symbol: HLA-DMB
  Gene Name: major histocompatibility complex, class II, DM beta
  Uniprot ID: P28068
  ENSP ID: ENSP00000393646

SEQ ID NO: 48500 - protein, 141 aa, Homo sapiens; identical to SEQ ID NO: 48498
  Payload ID: 9767
  Gene Symbol: HLA-DMB
  Gene Name: major histocompatibility complex, class II, DM beta
  ENSP ID: ENSP00000394737
  MOD_RES (1)..(1): Any amino acid

SEQ ID NO: 48501 - protein, 257 aa, Homo sapiens
  Payload ID: 9767
  Gene Symbol: HLA-DMB
  Gene Name: major histocompatibility complex, class II, DM beta
  ENSP ID: ENSP00000394789
MITFLPLLLGLSLGCTGAGGFVAHVESTCLLDDAGTPKDFTYCISFNKDLLTCWDPEENKMAPCEFGVLNSLANVLSQHLNQKDTLMQRLRNGLQNCATHTQPFWGSLTNRTRPPSVQVAKTTPFNTREPVMLACYVWGFYPAEVTITWRKNGKLVMPHSSAHKTAQPNGDWTYQTLSHLALTPSYGDTYTCVVEHIGAPEPILRDWTPGLSPMQTLKVSVSAVTLGLGLIIFSLGVISWRRAGHSSDLIISLLFIL

SEQ ID NO: 48502 - protein, 257 aa, Homo sapiens
  Payload ID: 9767
  Gene Symbol: HLA-DMB
  Gene Name: major histocompatibility complex, class II, DM beta
  ENSP ID: ENSP00000394997
MITFLPLLLGLSLGCTGAGGFVAHVESTCLLDDAGTPKDFTYCISFNKDLLTCWDPEENKMAPCEFGVLNSLANVLSQHLNQKDTLMQRLRNGLQNCATHTQPFWGSLTNRTRPPSVQVAKTTPFNTREPVMLACYVWGFYPAEVTITWRKNGKLVMPHSSAHKTAQPNGDWTYQTLSHLALTPSYGDTYTCVVEHTGAPEPILRDWTPGLSPMQTLKVSVSAVTLGLGLIIFSLGVISWRRAGHSSDLIISLLFIL

SEQ ID NO: 48503 - protein, 257 aa, Homo sapiens; identical to SEQ ID NO: 48501
  Payload ID: 9767
  Gene Symbol: HLA-DMB
  Gene Name: major histocompatibility complex, class II, DM beta
  ENSP ID: ENSP00000396075

SEQ ID NO: 48504 - protein, 141 aa, Homo sapiens
  Payload ID: 9767
  Gene Symbol: HLA-DMB
  Gene Name: major histocompatibility complex, class II, DM beta
  ENSP ID: ENSP00000398332
  MOD_RES (1)..(1): Any amino acid
XTRPPSVQVAKTTPFNTREPVMLACYVWGFYPAEVTITWRKNGKLVMPHSSAHKTAQPNGDWTYQTLSHLALTPSYGDTYTCVVEHIGAPEPILRDWTPGLSPMQTLKVSVSAVTLGLGLIIFSLGVISWRRAGHSRWHIS

SEQ ID NO: 48505 - protein, 175 aa, Homo sapiens; identical to SEQ ID NO: 48494
  Payload ID: 9767
  Gene Symbol: HLA-DMB
  Gene Name: major histocompatibility complex, class II, DM beta
  ENSP ID: ENSP00000398843

SEQ ID NO: 48506 - protein, 263 aa, Homo sapiens
  Payload ID: 9767
  Gene Symbol: HLA-DMB
  Gene Name: major histocompatibility complex, class II, DM beta
  Uniprot ID: P28068
  ENSP ID: ENSP00000398890
MITFLPLLLGLSLGCTGAGGFVAHVESTCLLDDAGTPKDFTYCISFNKDLLTCWDPEENKMAPCEFGVLNSLANVLSQHLNQKDTLMQRLRNGLQNCATHTQPFWGSLTNRTRPPSVQVAKTTPFNTREPVMLACYVWGFYPAEVTITWRKNGKLVMPHSSAHKTAQPNGDWTYQTLSHLALTPSYGDTYTCVVEHTGAPEPILRDWTPGLSPMQTLKVSVSAVTLGLGLIIFSLGVISWRRAGHSSYTPLPGSNYSEGWHIS

SEQ ID NO: 48507 - protein, 257 aa, Homo sapiens; identical to SEQ ID NO: 48501
  Payload ID: 9767
  Gene Symbol: HLA-DMB
  Gene Name: major histocompatibility complex, class II, DM beta
  ENSP ID: ENSP00000399130

SEQ ID NO: 48508 - protein, 141 aa, Homo sapiens; identical to SEQ ID NO: 48504
  Payload ID: 9767
  Gene Symbol: HLA-DMB
  Gene Name: major histocompatibility complex, class II, DM beta
  ENSP ID: ENSP00000399634
  MOD_RES (1)..(1): Any amino acid

SEQ ID NO: 48509 - protein, 141 aa, Homo sapiens; identical to SEQ ID NO: 48504
  Payload ID: 9767
  Gene Symbol: HLA-DMB
  Gene Name: major histocompatibility complex, class II, DM beta
  ENSP ID: ENSP00000399759
  MOD_RES (1)..(1): Any amino acid

SEQ ID NO: 48510 - protein, 141 aa, Homo sapiens; identical to SEQ ID NO: 48498
  Payload ID: 9767
  Gene Symbol: HLA-DMB
  Gene Name: major histocompatibility complex, class II, DM beta
  ENSP ID: ENSP00000401238
  MOD_RES (1)..(1): Any amino acid

SEQ ID NO: 48511 - protein, 106 aa, Homo sapiens; identical to SEQ ID NO: 48496
  Payload ID: 9767
  Gene Symbol: HLA-DMB
  Gene Name: major histocompatibility complex, class II, DM beta
  ENSP ID: ENSP00000401587

SEQ ID NO: 48512 - protein, 257 aa, Homo sapiens; identical to SEQ ID NO: 48501
  Payload ID: 9767
  Gene Symbol: HLA-DMB
  Gene Name: major histocompatibility complex, class II, DM beta
  ENSP ID: ENSP00000402800

SEQ ID NO: 48513 - protein, 175 aa, Homo sapiens; identical to SEQ ID NO: 48494
  Payload ID: 9767
  Gene Symbol: HLA-DMB
  Gene Name: major histocompatibility complex, class II, DM beta
  ENSP ID: ENSP00000404072

SEQ ID NO: 48514 - protein, 106 aa, Homo sapiens; identical to SEQ ID NO: 48496
  Payload ID: 9767
  Gene Symbol: HLA-DMB
  Gene Name: major histocompatibility complex, class II, DM beta
  ENSP ID: ENSP00000405746

SEQ ID NO: 48515 - protein, 106 aa, Homo sapiens; identical to SEQ ID NO: 48495
  Payload ID: 9767
  Gene Symbol: HLA-DMB
  Gene Name: major histocompatibility complex, class II, DM beta
  ENSP ID: ENSP00000405790

SEQ ID NO: 48516 - protein, 106 aa, Homo sapiens; identical to SEQ ID NO: 48495
  Payload ID: 9767
  Gene Symbol: HLA-DMB
  Gene Name: major histocompatibility complex, class II, DM beta
  ENSP ID: ENSP00000406776

SEQ ID NO: 48517 - protein, 263 aa, Homo sapiens; identical to SEQ ID NO: 48506
  Payload ID: 9767
  Gene Symbol: HLA-DMB
  Gene Name: major histocompatibility complex, class II, DM beta
  Uniprot ID: P28068
  ENSP ID: ENSP00000408453

SEQ ID NO: 48518 - protein, 141 aa, Homo sapiens; identical to SEQ ID NO: 48504
  Payload ID: 9767
  Gene Symbol: HLA-DMB
  Gene Name: major histocompatibility complex, class II, DM beta
  ENSP ID: ENSP00000410077
  MOD_RES (1)..(1): Any amino acid

SEQ ID NO: 48519 - protein, 175 aa, Homo sapiens; identical to SEQ ID NO: 48494
  Payload ID: 9767
  Gene Symbol: HLA-DMB
  Gene Name: major histocompatibility complex, class II, DM beta
  ENSP ID: ENSP00000410329

SEQ ID NO: 48520 - protein, 106 aa, Homo sapiens; identical to SEQ ID NO: 48496
  Payload ID: 9767
  Gene Symbol: HLA-DMB
  Gene Name: major histocompatibility complex, class II, DM beta
  ENSP ID: ENSP00000410609

SEQ ID NO: 48521 - protein, 175 aa, Homo sapiens; identical to SEQ ID NO: 48494
  Payload ID: 9767
  Gene Symbol: HLA-DMB
  Gene Name: major histocompatibility complex, class II, DM beta
  ENSP ID: ENSP00000410908

SEQ ID NO: 48522 - protein, 141 aa, Homo sapiens; identical to SEQ ID NO: 48498
  Payload ID: 9767
  Gene Symbol: HLA-DMB
  Gene Name: major histocompatibility complex, class II, DM beta
  ENSP ID: ENSP00000411276
  MOD_RES (1)..(1): Any amino acid

SEQ ID NO: 48523 - protein, 263 aa, Homo sapiens; identical to SEQ ID NO: 48492
  Payload ID: 9767
  Gene Symbol: HLA-DMB
  Gene Name: major histocompatibility complex, class II, DM beta
  Uniprot ID: P28068
  ENSP ID: ENSP00000411321

SEQ ID NO: 48524 - protein, 175 aa, Homo sapiens; identical to SEQ ID NO: 48494
  Payload ID: 9767
  Gene Symbol: HLA-DMB
  Gene Name: major histocompatibility complex, class II, DM beta
  ENSP ID: ENSP00000412415

SEQ ID NO: 48525 - protein, 257 aa, Homo sapiens; identical to SEQ ID NO: 48502
  Payload ID: 9767
  Gene Symbol: HLA-DMB
  Gene Name: major histocompatibility complex, class II, DM beta
  ENSP ID: ENSP00000413062

SEQ ID NO: 48526 - protein, 263 aa, Homo sapiens; identical to SEQ ID NO: 48506
  Payload ID: 9767
  Gene Symbol: HLA-DMB
  Gene Name: major histocompatibility complex, class II, DM beta
  Uniprot ID: P28068
  ENSP ID: ENSP00000413471

SEQ ID NO: 48527 - protein, 175 aa, Homo sapiens; identical to SEQ ID NO: 48494
  Payload ID: 9767
  Gene Symbol: HLA-DMB
  Gene Name: major histocompatibility complex, class II, DM beta
  ENSP ID: ENSP00000414153

SEQ ID NO: 48528 - protein, 263 aa, Homo sapiens; identical to SEQ ID NO: 48506
  Payload ID: 9767
  Gene Symbol: HLA-DMB
  Gene Name: major histocompatibility complex, class II, DM beta
  Uniprot ID: P28068
  ENSP ID: ENSP00000414817

SEQ ID NO: 48529 - protein, 257 aa, Homo sapiens; identical to SEQ ID NO: 48502
  Payload ID: 9767
  Gene Symbol: HLA-DMB
  Gene Name: major histocompatibility complex, class II, DM beta
  ENSP ID: ENSP00000416157

SEQ ID NO: 48530 - protein, 250 aa, Homo sapiens
  Payload ID: 9768
  Gene Symbol: HLA-DOA
  Gene Name: major histocompatibility complex, class II, DO alpha
  Uniprot ID: P06340
  ENSP ID: ENSP00000229829
MALRAGLVLGFHTLMTLLSPQEAGATKADHMGSYGPAFYQSYGASGQFTHEFDEEQLFSVDLKKSEAVWRLPEFGDFARFDPQGGLAGIAAIKAHLDILVERSNRSRAINVPPRVTVLPKSRVELGQPNILICIVDNIFPPVINITWLRNGQTVTEGVAQTSFYSQPDHLFRKFHYLPFVPSAEDVYDCQVEHWGLDAPLLRHWELQVPIPPPDAMETLVCALGLAIGLVGFLVGTVLIIMGTYVSSVPR

SEQ ID NO: 48531 - protein, 86 aa, Homo sapiens
  Payload ID: 9768
  Gene Symbol: HLA-DOA
  Gene Name: major histocompatibility complex, class II, DO alpha
  ENSP ID: ENSP00000363946
MALRAGLVLGFHTLMTLLSPQEAGATKGRAGRHRRNQSPSGHPGGALQPQQSHQRASTGDRAPQVSGGAGPAQHPHLHRGQHLPPC

SEQ ID NO: 48532 - protein, 86 aa, Homo sapiens; identical to SEQ ID NO: 48531
  Payload ID: 9768
  Gene Symbol: HLA-DOA
  Gene Name: major histocompatibility complex, class II, DO alpha
  ENSP ID: ENSP00000372712

SEQ ID NO: 48533 - protein, 250 aa, Homo sapiens; identical to SEQ ID NO: 48530
  Payload ID: 9768
  Gene Symbol: HLA-DOA
  Gene Name: major histocompatibility complex, class II, DO alpha
  Uniprot ID: P06340
  ENSP ID: ENSP00000372713

SEQ ID NO: 48534 - protein, 250 aa, Homo sapiens; identical to SEQ ID NO: 48530
  Payload ID: 9768
  Gene Symbol: HLA-DOA
  Gene Name: major histocompatibility complex, class II, DO alpha
  Uniprot ID: P06340
  ENSP ID: ENSP00000395737

SEQ ID NO: 48535 - protein, 250 aa, Homo sapiens; identical to SEQ ID NO: 48530
  Payload ID: 9768
  Gene Symbol: HLA-DOA
  Gene Name: major histocompatibility complex, class II, DO alpha
  Uniprot ID: P06340
  ENSP ID: ENSP00000397945

SEQ ID NO: 48536 - protein, 250 aa, Homo sapiens; identical to SEQ ID NO: 48530
  Payload ID: 9768
  Gene Symbol: HLA-DOA
  Gene Name: major histocompatibility complex, class II, DO alpha
  Uniprot ID: P06340
  ENSP ID: ENSP00000398819

SEQ ID NO: 48537 - protein, 250 aa, Homo sapiens; identical to SEQ ID NO: 48530
  Payload ID: 9768
  Gene Symbol: HLA-DOA
  Gene Name: major histocompatibility complex, class II, DO alpha
  Uniprot ID: P06340
  ENSP ID: ENSP00000401504

SEQ ID NO: 48538 - protein, 86 aa, Homo sapiens
  Payload ID: 9768
  Gene Symbol: HLA-DOA
  Gene Name: major histocompatibility complex, class II, DO alpha
  ENSP ID: ENSP00000402076
MALRAGLVLGFHTLMTLLSPQEAGATKGWAGRHRRNQSPSGHPGGALQPQQSHQRASTGDRAPQVSGGAGPAQHPHLHRGQHLPPC

SEQ ID NO: 48539 - protein, 86 aa, Homo sapiens; identical to SEQ ID NO: 48531
  Payload ID: 9768
  Gene Symbol: HLA-DOA
  Gene Name: major histocompatibility complex, class II, DO alpha
  ENSP ID: ENSP00000402347

SEQ ID NO: 48540 - protein, 86 aa, Homo sapiens; identical to SEQ ID NO: 48538
  Payload ID: 9768
  Gene Symbol: HLA-DOA
  Gene Name: major histocompatibility complex, class II, DO alpha
  ENSP ID: ENSP00000402487

SEQ ID NO: 48541 - protein, 61 aa, Homo sapiens
  Payload ID: 9768
  Gene Symbol: HLA-DOA
  Gene Name: major histocompatibility complex, class II, DO alpha
  ENSP ID: ENSP00000403896
MALRAGLVLGFHTLMTLLSPQEAGATKADHMGSYGPPSTSLTAPRASSPMNLMRNSCSLWT

SEQ ID NO: 48542 - protein, 86 aa, Homo sapiens; identical to SEQ ID NO: 48531
  Payload ID: 9768
  Gene Symbol: HLA-DOA
  Gene Name: major histocompatibility complex, class II, DO alpha
  ENSP ID: ENSP00000405153

SEQ ID NO: 48543 - protein, 86 aa, Homo sapiens; identical to SEQ ID NO: 48531
  Payload ID: 9768
  Gene Symbol: HLA-DOA
  Gene Name: major histocompatibility complex, class II, DO alpha
  ENSP ID: ENSP00000409491

SEQ ID NO: 48544 - protein, 250 aa, Homo sapiens; identical to SEQ ID NO: 48530
  Payload ID: 9768
  Gene Symbol: HLA-DOA
  Gene Name: major histocompatibility complex, class II, DO alpha
  Uniprot ID: P06340
  ENSP ID: ENSP00000416448

SEQ ID NO: 48545 - protein, 61 aa, Homo sapiens; identical to SEQ ID NO: 48541
  Payload ID: 9768
  Gene Symbol: HLA-DOA
  Gene Name: major histocompatibility complex, class II, DO alpha
  ENSP ID: ENSP00000446500

SEQ ID NO: 48546 - protein, 61 aa, Homo sapiens; identical to SEQ ID NO: 48541
  Payload ID: 9768
  Gene Symbol: HLA-DOA
  Gene Name: major histocompatibility complex, class II, DO alpha
  ENSP ID: ENSP00000446715

SEQ ID NO: 48547 - protein, 61 aa, Homo sapiens; identical to SEQ ID NO: 48541
  Payload ID: 9768
  Gene Symbol: HLA-DOA
  Gene Name: major histocompatibility complex, class II, DO alpha
  ENSP ID: ENSP00000447202

SEQ ID NO: 48548 - protein, 61 aa, Homo sapiens; identical to SEQ ID NO: 48541
  Payload ID: 9768
  Gene Symbol: HLA-DOA
  Gene Name: major histocompatibility complex, class II, DO alpha
  ENSP ID: ENSP00000449183

SEQ ID NO: 48549 - protein, 61 aa, Homo sapiens; identical to SEQ ID NO: 48541
  Payload ID: 9768
  Gene Symbol: HLA-DOA
  Gene Name: major histocompatibility complex, class II, DO alpha
  ENSP ID: ENSP00000449395

SEQ ID NO: 48550 - protein, 61 aa, Homo sapiens; identical to SEQ ID NO: 48541
  Payload ID: 9768
  Gene Symbol: HLA-DOA
  Gene Name: major histocompatibility complex, class II, DO alpha
  ENSP ID: ENSP00000449656

SEQ ID NO: 48551 - protein, 273 aa, Homo sapiens
  Payload ID: 9769
  Gene Symbol: HLA-DOB
  Gene Name: major histocompatibility complex, class II, DO beta
  Uniprot ID: P13765
  ENSP ID: ENSP00000390020
MGSGWVPWVVALLVNLTRLDSSMTQGTDSPEDFVIQAKADCYFTNGTEKVQFVVRFIFNLEEYVRFDSDVGMFVALTKLGQPDAEQWNSRLDLLERSRQAVDGVCRHNYRLGAPFTVGRKVQPEVTVYPERTPLLHQHNLLHCSVTGFYPGDIKIKWFLNGQEERAGVMSTGPIRNGDWTFQTVVMLEMTPELGHVYTCLVDHSSLLSPVSVEWRAQSEYSWRKMLSGIAAFLLGLIFLLVGIVIQLRAQKGYVRTQMSGNEVSRAVLLPQSC

SEQ ID NO: 48552 - protein, 181 aa, Homo sapiens
  Payload ID: 9769
  Gene Symbol: HLA-DOB
  Gene Name: major histocompatibility complex, class II, DO beta
  ENSP ID: ENSP00000390574
  MOD_RES (1)..(1): Any amino acid
XNLTRLDSSMTQGTDSPEDFVIQAKADCYFTNGTEKVQFVVRFIFNLEEYVRFDSDVGMFVALTKLGQPDAEQWNSRLDLLERSRQAVDGVCRHNYRLGAPFTVGRKEVTVYPERTPLLHQHNLLHCSVTGFYPGDIKIKWFLNGQEERAGVMSTGPIRNGDWTFQTVVMLEMTPELGHVY

SEQ ID NO: 48553 - protein, 181 aa, Homo sapiens; identical to SEQ ID NO: 48552
  Payload ID: 9769
  Gene Symbol: HLA-DOB
  Gene Name: major histocompatibility complex, class II, DO beta
  ENSP ID: ENSP00000391708
  MOD_RES (1)..(1): Any amino acid

SEQ ID NO: 48554 - protein, 273 aa, Homo sapiens; identical to SEQ ID NO: 48551
  Payload ID: 9769
  Gene Symbol: HLA-DOB
  Gene Name: major histocompatibility complex, class II, DO beta
  Uniprot ID: P13765
  ENSP ID: ENSP00000394783

SEQ ID NO: 48555 - protein, 181 aa, Homo sapiens; identical to SEQ ID NO: 48552
  Payload ID: 9769
  Gene Symbol: HLA-DOB
  Gene Name: major histocompatibility complex, class II, DO beta
  ENSP ID: ENSP00000394860
  MOD_RES (1)..(1): Any amino acid

SEQ ID NO: 48556 - protein, 273 aa, Homo sapiens; identical to SEQ ID NO: 48551
  Payload ID: 9769
  Gene Symbol: HLA-DOB
  Gene Name: major histocompatibility complex, class II, DO beta
  Uniprot ID: P13765
  ENSP ID: ENSP00000395780

SEQ ID NO: 48557 - protein, 273 aa, Homo sapiens
  Payload ID: 9769
  Gene Symbol: HLA-DOB
  Gene Name: major histocompatibility complex, class II, DO beta
  Uniprot ID: P13765
  ENSP ID: ENSP00000397268
MGSGWVPWVVALLVNLTRLDSSMTQGTDSPEDFVIQAKADCYFTNGTEKVQFVVRFIFNLEEYVRFDSDVGMFVALTKLGQPDAEQWNSRLDLLERSRQAVDGVCRHNYRLGAPFTVGRKVQPEVTVYPERTPLLHQHNLLHCSVTGFYPGDIKIKWFLNGQEERAGVMSTGPIRNGDWTFQTVVMLEMTPELGHVYTCLVDHSSLLSPISVEWRAQSEYSWRKMLSGIAAFLLGLIFLLVGIVIQLRAQKGYVRTQMSGNEVSRAVLLPQSC

SEQ ID NO: 48558 - protein, 181 aa, Homo sapiens; identical to SEQ ID NO: 48552
  Payload ID: 9769
  Gene Symbol: HLA-DOB
  Gene Name: major histocompatibility complex, class II, DO beta
  ENSP ID: ENSP00000401290
  MOD_RES (1)..(1): Any amino acid

SEQ ID NO: 48559 - protein, 273 aa, Homo sapiens; identical to SEQ ID NO: 48551
  Payload ID: 9769
  Gene Symbol: HLA-DOB
  Gene Name: major histocompatibility complex, class II, DO beta
  Uniprot ID: P13765
  ENSP ID: ENSP00000405108

SEQ ID NO: 48560 - protein, 181 aa, Homo sapiens; identical to SEQ ID NO: 48552
  Payload ID: 9769
  Gene Symbol: HLA-DOB
  Gene Name: major histocompatibility complex, class II, DO beta
  ENSP ID: ENSP00000406128
  MOD_RES (1)..(1): Any amino acid

SEQ ID NO: 48561 - protein, 273 aa, Homo sapiens; identical to SEQ ID NO: 48551
  Payload ID: 9769
  Gene Symbol: HLA-DOB
  Gene Name: major histocompatibility complex, class II, DO beta
  Uniprot ID: P13765
  ENSP ID: ENSP00000410390

SEQ ID NO: 48562 - protein, 181 aa, Homo sapiens; identical to SEQ ID NO: 48552
  Payload ID: 9769
  Gene Symbol: HLA-DOB
  Gene Name: major histocompatibility complex, class II, DO beta
  ENSP ID: ENSP00000413915
  MOD_RES (1)..(1): Any amino acid

SEQ ID NO: 48563 - protein, 244 aa, Homo sapiens
  Payload ID: 9769
  Gene Symbol: HLA-DOB
  Gene Name: major histocompatibility complex, class II, DO beta
  ENSP ID: ENSP00000431178
VSFFSFLQNGFWVGPLGGGSASESDPTGFLHDSRHRLSSDVGMFVALTKLGQPDAEQWNSRLDLLERSRQAVDGVCRHNYRLGAPFTVGRKVQPEVTVYPERTPLLHQHNLLHCSVTGFYPGDIKIKWFLNGQEERAGVMSTGPIRNGDWTFQTVVMLEMTPELGHVYTCLVDHSSLLSPVSVEWRAQSEYSWRKMLSGIAAFLLGLIFLLVGIVIQLRAQKGYVRTQMSGNEVSRAVLLPQSC

SEQ ID NO: 48564 - protein, 38 aa, Homo sapiens
  Payload ID: 9769
  Gene Symbol: HLA-DOB
  Gene Name: major histocompatibility complex, class II, DO beta
  ENSP ID: ENSP00000431358
MGSGWVPWVVALLVNLTRLDSSMTQGTDSPVMWGCLWH

SEQ ID NO: 48565 - protein, 38 aa, Homo sapiens; identical to SEQ ID NO: 48564
  Payload ID: 9769
  Gene Symbol: HLA-DOB
  Gene Name: major histocompatibility complex, class II, DO beta
  ENSP ID: ENSP00000431385

SEQ ID NO: 48566 - protein, 38 aa, Homo sapiens; identical to SEQ ID NO: 48564
  Payload ID: 9769
  Gene Symbol: HLA-DOB
  Gene Name: major histocompatibility complex, class II, DO beta
  ENSP ID: ENSP00000433049

SEQ ID NO: 48567 - protein, 38 aa, Homo sapiens; identical to SEQ ID NO: 48564
  Payload ID: 9769
  Gene Symbol: HLA-DOB
  Gene Name: major histocompatibility complex, class II, DO beta
  ENSP ID: ENSP00000434472

SEQ ID NO: 48568 - protein, 38 aa, Homo sapiens; identical to SEQ ID NO: 48564
  Payload ID: 9769
  Gene Symbol: HLA-DOB
  Gene Name: major histocompatibility complex, class II, DO beta
  ENSP ID: ENSP00000436618

SEQ ID NO: 48569 - protein, 154 aa, Homo sapiens
  Payload ID: 9769
  Gene Symbol: HLA-DOB
  Gene Name: major histocompatibility complex, class II, DO beta
  ENSP ID: ENSP00000437213
MGSGWVPWVVALLVNLTRLDSSMTQGTDSPEDFVIQAKADCYFTNGTEKVQFVVRFIFNLEEYVRFDSDVGMFVALTKLGQPDAEQWNSRLDLLERSRQAVDGVCRHNYRLGAPFTVGRKGFYPGDIKIKWFLNGQEERAGVMSTGPIRNGDWT

SEQ ID NO: 48570 - protein, 260 aa, Homo sapiens
  Payload ID: 9770
  Gene Symbol: HLA-DPA1
  Gene Name: major histocompatibility complex, class II, DP alpha 1
  Uniprot ID: P20036
  ENSP ID: ENSP00000363941
MRPEDRMFHIRAVILRALSLAFLLSLRGAGAIKADHVSTYAAFVQTHRPTGEFMFEFDEDEMFYVDLDKKETVWHLEEFGQAFSFEAQGGLANIAILNNNLNTLIQRSNHTQATNDPPEVTVFPKEPVELGQPNTLICHIDKFFPPVLNVTWLCNGELVTEGVAESLFLPRTDYSFHKFHYLTFVPSAEDFYDCRVEHWGLDQPLLKHWEAQEPIQMPETTETVLCALGLVLGLVGIIVGTVLIIKSLRSGHDPRAQGTL

SEQ ID NO: 48571 - protein, 260 aa, Homo sapiens; identical to SEQ ID NO: 48570
  Payload ID: 9770
  Gene Symbol: HLA-DPA1
  Gene Name: major histocompatibility complex, class II, DP alpha 1
  Uniprot ID: P20036
  ENSP ID: ENSP00000372711

SEQ ID NO: 48572 - protein, 212 aa, Homo sapiens
  Payload ID: 9770
  Gene Symbol: HLA-DPA1
  Gene Name: major histocompatibility complex, class II, DP alpha 1
  ENSP ID: ENSP00000387396
MRPEDRMFHIRAVILRALSLAFLLSLRGAGAIKADHVSTYAAFVQTHRPTGEFMFEFDEDEMFYVDLDKKETVWHLEEFGQAFSFEVTVFPKEPVELGQPNTLICHIDKFFPPVLNVTWLCNGELVTEGVAESLFLPRTDYSFHKFHYLTFVPSAEDFYDCRVEHWGLDQPLLKHWEAQEPIQMPETTETVLCALGLVLGLVGIIVGTVLII

SEQ ID NO: 48573 - protein, 212 aa, Homo sapiens; identical to SEQ ID NO: 48572
  Payload ID: 9770
  Gene Symbol: HLA-DPA1
  Gene Name: major histocompatibility complex, class II, DP alpha 1
  ENSP ID: ENSP00000387623

SEQ ID NO: 48574 - protein, 209 aa, Homo sapiens
  Payload ID: 9770
  Gene Symbol: HLA-DPA1
  Gene Name: major histocompatibility complex, class II, DP alpha 1
  ENSP ID: ENSP00000388308
MRPEDRMFHIRAVILRALSLAFLLSLRGAGAIKADHVSTYAAFVQTHRPTGEFMFEFDEDEMFYVDLDKKETVWHLEEFGQAFSFEAQGGLANIAILNNNLNTLIQRSNHTQATNDPPEVTVFPKEPVELGQPNTLICHIDKFFPPVLNVTWLCNGELVTEGVAESLFLPRTDYSFHKFHYLTFVPSAEDFYDCRVEHWGLDQPLLKHW

SEQ ID NO: 48575 - protein, 212 aa, Homo sapiens; identical to SEQ ID NO: 48572
  Payload ID: 9770
  Gene Symbol: HLA-DPA1
  Gene Name: major histocompatibility complex, class II, DP alpha 1
  ENSP ID: ENSP00000388488

SEQ ID NO: 48576 - protein, 209 aa, Homo sapiens; identical to SEQ ID NO: 48574
  Payload ID: 9770
  Gene Symbol: HLA-DPA1
  Gene Name: major histocompatibility complex, class II, DP alpha 1
  ENSP ID: ENSP00000390929

SEQ ID NO: 48577 - protein, 23 aa, Homo sapiens
  Payload ID: 9770
  Gene Symbol: HLA-DPA1
  Gene Name: major histocompatibility complex, class II, DP alpha 1
  ENSP ID: ENSP00000391411
MRPEDRMFHIRAVILRALSLAFL

SEQ ID NO: 48578 - protein, 128 aa, Homo sapiens
  Payload ID: 9770
  Gene Symbol: HLA-DPA1
  Gene Name: major histocompatibility complex, class II, DP alpha 1
  ENSP ID: ENSP00000393072
  MOD_RES (1)..(1): Any amino acid
XNTLICHIDKFFPPVLNVTWLCNGELVTEGVAESLFLPRTDYSFHKFHYLTFVPSAEDFYDCRVEHWGLDQPLLKHWEAQEPIQMPETTETVLCALGLVLGLVGIIVGTVLIIKSLRSGHDPRAQGTL

SEQ ID NO: 48579 - protein, 128 aa, Homo sapiens; identical to SEQ ID NO: 48578
  Payload ID: 9770
  Gene Symbol: HLA-DPA1
  Gene Name: major histocompatibility complex, class II, DP alpha 1
  ENSP ID: ENSP00000393305
  MOD_RES (1)..(1): Any amino acid

SEQ ID NO: 48580 - protein, 260 aa, Homo sapiens; identical to SEQ ID NO: 48570
  Payload ID: 9770
  Gene Symbol: HLA-DPA1
  Gene Name: major histocompatibility complex, class II, DP alpha 1
  Uniprot ID: P20036
  ENSP ID: ENSP00000393566

SEQ ID NO: 48581 - protein, 128 aa, Homo sapiens; identical to SEQ ID NO: 48578
  Payload ID: 9770
  Gene Symbol: HLA-DPA1
  Gene Name: major histocompatibility complex, class II, DP alpha 1
  ENSP ID: ENSP00000394292
  MOD_RES (1)..(1): Any amino acid

SEQ ID NO: 48582 - protein, 212 aa, Homo sapiens; identical to SEQ ID NO: 48572
  Payload ID: 9770
  Gene Symbol: HLA-DPA1
  Gene Name: major histocompatibility complex, class II, DP alpha 1
  ENSP ID: ENSP00000395011

SEQ ID NO: 48583 - protein, 23 aa, Homo sapiens
  Payload ID: 9770
  Gene Symbol: HLA-DPA1
  Gene Name: major histocompatibility complex, class II, DP alpha 1
  ENSP ID: ENSP00000395508
MRPEDRMFHIRAVILRALSLAFL

SEQ ID NO: 48584 - protein, 128 aa, Homo sapiens; identical to SEQ ID NO: 48578
  Payload ID: 9770
  Gene Symbol: HLA-DPA1
  Gene Name: major histocompatibility complex, class II, DP alpha 1
  ENSP ID: ENSP00000395677
  MOD_RES (1)..(1): Any amino acid

SEQ ID NO: 48585 - protein, 260 aa, Homo sapiens; identical to SEQ ID NO: 48570
  Payload ID: 9770
  Gene Symbol: HLA-DPA1
  Gene Name: major histocompatibility complex, class II, DP alpha 1
  Uniprot ID: P20036
  ENSP ID: ENSP00000397139

SEQ ID NO: 48586 - protein, 128 aa, Homo sapiens; identical to SEQ ID NO: 48578
  Payload ID: 9770
  Gene Symbol: HLA-DPA1
  Gene Name: major histocompatibility complex, class II, DP alpha 1
  ENSP ID: ENSP00000397509
  MOD_RES (1)..(1): Any amino acid

SEQ ID NO: 48587 - protein, 260 aa, Homo sapiens; identical to SEQ ID NO: 48570
  Payload ID: 9770
  Gene Symbol: HLA-DPA1
  Gene Name: major histocompatibility complex, class II, DP alpha 1
  Uniprot ID: P20036
  ENSP ID: ENSP00000397587

SEQ ID NO: 48588 - protein, 23 aa, Homo sapiens
  Payload ID: 9770
  Gene Symbol: HLA-DPA1
  Gene Name: major histocompatibility complex, class II, DP alpha 1
  ENSP ID: ENSP00000398134
MRPEDRMFHIRAVILRALSLAFL

SEQ ID NO: 48589 - protein, 209 aa, Homo sapiens; identical to SEQ ID NO: 48574
  Payload ID: 9770
  Gene Symbol: HLA-DPA1
  Gene Name: major histocompatibility complex, class II, DP alpha 1
  ENSP ID: ENSP00000400133

SEQ ID NO: 48590 - protein, 209 aa, Homo sapiens; identical to SEQ ID NO: 48574
  Payload ID: 9770
  Gene Symbol: HLA-DPA1
  Gene Name: major histocompatibility complex, class II, DP alpha 1
  ENSP ID: ENSP00000402344

SEQ ID NO: 48591 - protein, 209 aa, Homo sapiens; identical to SEQ ID NO: 48574
  Payload ID: 9770
  Gene Symbol: HLA-DPA1
  Gene Name: major histocompatibility complex, class II, DP alpha 1
  ENSP ID: ENSP00000402683

SEQ ID NO: 48592 - protein, 23 aa, Homo sapiens
  Payload ID: 9770
  Gene Symbol: HLA-DPA1
  Gene Name: major histocompatibility complex, class II, DP alpha 1
  ENSP ID: ENSP00000402975
MRPEDRMFHIRAVILRALSLAFL

SEQ ID NO: 48593 - protein, 128 aa, Homo sapiens; identical to SEQ ID NO: 48578
  Payload ID: 9770
  Gene Symbol: HLA-DPA1
  Gene Name: major histocompatibility complex, class II, DP alpha 1
  ENSP ID: ENSP00000403013
  MOD_RES (1)..(1): Any amino acid

SEQ ID NO: 48594 - protein, 128 aa, Homo sapiens; identical to SEQ ID NO: 48578
  Payload ID: 9770
  Gene Symbol: HLA-DPA1
  Gene Name: major histocompatibility complex, class II, DP alpha 1
  ENSP ID: ENSP00000403185
  MOD_RES (1)..(1): Any amino acid

SEQ ID NO: 48595 - protein, 212 aa, Homo sapiens; identical to SEQ ID NO: 48572
  Payload ID: 9770
  Gene Symbol: HLA-DPA1
  Gene Name: major histocompatibility complex, class II, DP alpha 1
  ENSP ID: ENSP00000404940

SEQ ID NO: 48596 - protein, 128 aa, Homo sapiens; identical to SEQ ID NO: 48578
  Payload ID: 9770
  Gene Symbol: HLA-DPA1
  Gene Name: major histocompatibility complex, class II, DP alpha 1
  ENSP ID: ENSP00000405500
  MOD_RES (1)..(1): Any amino acid

SEQ ID NO: 48597 - protein, 260 aa, Homo sapiens; identical to SEQ ID NO: 48570
  Payload ID: 9770
  Gene Symbol: HLA-DPA1
  Gene Name: major histocompatibility complex, class II, DP alpha 1
  Uniprot ID: P20036
  ENSP ID: ENSP00000405838

SEQ ID NO: 48598 - protein, 260 aa, Homo sapiens; identical to SEQ ID NO: 48570
  Payload ID: 9770
  Gene Symbol: HLA-DPA1
  Gene Name: major histocompatibility complex, class II, DP alpha 1
  Uniprot ID: P20036
  ENSP ID: ENSP00000406250

SEQ ID NO: 48599 - protein, 23 aa, Homo sapiens
  Payload ID: 9770
  Gene Symbol: HLA-DPA1
  Gene Name: major histocompatibility complex, class II, DP alpha 1
  ENSP ID: ENSP00000407795
MRPEDRMFHIRAVILRALSLAFL

SEQ ID NO: 48600 - protein, 23 aa, Homo sapiens
  Payload ID: 9770
  Gene Symbol: HLA-DPA1
  Gene Name: major histocompatibility complex, class II, DP alpha 1
  ENSP ID: ENSP00000408416
MRPEDRMFHIRAVILRALSLAFL

SEQ ID NO: 48601 - protein, 209 aa, Homo sapiens; identical to SEQ ID NO: 48574
  Payload ID: 9770
  Gene Symbol: HLA-DPA1
  Gene Name: major histocompatibility complex, class II, DP alpha 1
  ENSP ID: ENSP00000410935

SEQ ID NO: 48602 - protein, 209 aa, Homo sapiens; identical to SEQ ID NO: 48574
  Payload ID: 9770
  Gene Symbol: HLA-DPA1
  Gene Name: major histocompatibility complex, class II, DP alpha 1
  ENSP ID: ENSP00000413481

SEQ ID NO: 48603 - protein, 212 aa, Homo sapiens; identical to SEQ ID NO: 48572
  Payload ID: 9770
  Gene Symbol: HLA-DPA1
  Gene Name: major histocompatibility complex, class II, DP alpha 1
  ENSP ID: ENSP00000413558

SEQ ID NO: 48604 - protein, 23 aa, Homo sapiens
  Payload ID: 9770
  Gene Symbol: HLA-DPA1
  Gene Name: major histocompatibility complex, class II, DP alpha 1
  ENSP ID: ENSP00000415119
MRPEDRMFHIRAVILRALSLAFL

SEQ ID NO: 48605 - protein, 23 aa, Homo sapiens
  Payload ID: 9770
  Gene Symbol: HLA-DPA1
  Gene Name: major histocompatibility complex, class II, DP alpha 1
  ENSP ID: ENSP00000415693
MRPEDRMFHIRAVILRALSLAFL

SEQ ID NO: 48606 - protein, 212 aa, Homo sapiens; identical to SEQ ID NO: 48572
  Payload ID: 9770
  Gene Symbol: HLA-DPA1
  Gene Name: major histocompatibility complex, class II, DP alpha 1
  ENSP ID: ENSP00000423441

SEQ ID NO: 48607 - protein, 209 aa, Homo sapiens; identical to SEQ ID NO: 48574
  Payload ID: 9770
  Gene Symbol: HLA-DPA1
  Gene Name: major histocompatibility complex, class II, DP alpha 1
  ENSP ID: ENSP00000424190

SEQ ID NO: 48608 - protein, 260 aa, Homo sapiens; identical to SEQ ID NO: 48570
  Payload ID: 9770
  Gene Symbol: HLA-DPA1
  Gene Name: major histocompatibility complex, class II, DP alpha 1
  Uniprot ID: P20036
  ENSP ID: ENSP00000427429

SEQ ID NO: 48609 - protein, 260 aa, Homo sapiens; identical to SEQ ID NO: 48570
  Payload ID: 9770
  Gene Symbol: HLA-DPA1
  Gene Name: major histocompatibility complex, class II, DP alpha 1
  Uniprot ID: P20036
  ENSP ID: ENSP00000480187

SEQ ID NO: 48610 - protein, 258 aa, Homo sapiens
  Payload ID: 9771
  Gene Symbol: HLA-DPB1
  Gene Name: major histocompatibility complex, class II, DP beta 1
  ENSP ID: ENSP00000372582
MMVLQVSAAPRTVALTALLMVLLTSVVQGRATPENYVYQLRQECYAFNGTQRFLERYIYNREEFVRFDSDVGEFRAVTELGRPDEDYWNSQKDLLEEKRAVPDRVCRHNYELDEAVTLQRRVQPKVNVSPSKKGPLQHHNLLVCHVTDFYPGSIQVRWFLNGQEETAGVVSTNLIRNGDWTFQILVMLEMTPQQGDVYICQVEHTSLDSPVTVEWKAQSDSARSKTLTGAGGFVLGLIICGVGIFMHRRSKKVQRGSA

SEQ ID NO: 48611 - protein, 228 aa, Homo sapiens
  Payload ID: 9771
  Gene Symbol: HLA-DPB1
  Gene Name: major histocompatibility complex, class II, DP beta 1
  ENSP ID: ENSP00000382414
MMVLQVSAAPRTVALTALLMVLLTSVVQGRATPENYLFQGRQECYAFNGTQRFLERYIYNREELVRFDSDVGEFRAVTELGRPEAEYWNSQKDILEEERAVPDRMCRHNYELGGPMTLQRRGSIQVRWFLNGQEETAGVVSTNLIRNGDWTFQILVMLEMTPQQGDVYTCQVEHTSLDSPVTVEWKAQSDSARSKTLTGAGGFVLGLIICGVGIFMHRRSKKVQRGSA

SEQ ID NO: 48612 - protein, 258 aa, Homo sapiens
  Payload ID: 9771
  Gene Symbol: HLA-DPB1
  Gene Name: major histocompatibility complex, class II, DP beta 1
  Uniprot ID: P04440
  ENSP ID: ENSP00000382422
MMVLQVSAAPRTVALTALLMVLLTSVVQGRATPENYLFQGRQECYAFNGTQRFLERYIYNREELVRFDSDVGEFRAVTELGRPEAEYWNSQKDILEEERAVPDRMCRHNYELGGPMTLQRRVQPRVNVSPSKKGPLQHHNLLVCHVTDFYPGSIQVRWFLNGQEETAGVVSTNLIRNGDWTFQILVMLEMTPQQGDVYTCQVEHTSLDSPVTVEWKAQSDSARSKTLTGAGGFVLGLIICGVGIFMHRRSKKVQRGSA

SEQ ID NO: 48613 - protein, 229 aa, Homo sapiens
  Payload ID: 9771
  Gene Symbol: HLA-DPB1
  Gene Name: major histocompatibility complex, class II, DP beta 1
  ENSP ID: ENSP00000385037
KQAWRGSATRLGPQNSGRQECYAFNGTQRFLERYIYNREELVRFDSDVGEFRAVTELGRPEAEYWNSQKDILEEERAVPDRMCRHNYELGGPMTLQRRVQPRVNVSPSKKGPLQHHNLLVCHVTDFYPGSIQVRWFLNGQEETAGVVSTNLIRNGDWTFQILVMLEMTPQQGDVYTCQVEHTSLDSPVTVEWKAQSDSARSKTLTGAGGFVLGLIICGVGIFMHRRSKK

SEQ ID NO: 48614 - protein, 228 aa, Homo sapiens
  Payload ID: 9771
  Gene Symbol: HLA-DPB1
  Gene Name: major histocompatibility complex, class II, DP beta 1
  ENSP ID: ENSP00000388249
MMVLQVSAAPRTVALTALLMVLLTSVVQGRATPENYLFQGRQECYAFNGTQRFLERYIYNREEFVRFDSDVGEFRAVTELGRPDEEYWNSQKDILEEERAVPDRMCRHNYELGGPMTLQRRGSIQVRWFLNGQEETAGVVSTNLIRNGDWTFQILVMLEMTPQQGDVYTCQVEHTSLDSPVTVEWKAQSDSARSKTLTGAGGFVLGLIICGVGIFMHRRSKKVQRGSA

SEQ ID NO: 48615 - protein, 229 aa, Homo sapiens
  Payload ID: 9771
  Gene Symbol: HLA-DPB1
  Gene Name: major histocompatibility complex, class II, DP beta 1
  ENSP ID: ENSP00000389193
KQAWRGSATRLGPQNSLRQECYAFNGTQRFLERYIYNREEFVRFDSDVGEFRAVTELGRPDEDYWNSQKDLLEEKRAVPDRVCRHNYELDEAVTLQRRVQPKVNVSPSKKGPLQHHNLLVCHVTDFYPGSIQVRWFLNGQEETAGVVSTNLIRNGDWTFQILVMLEMTPQQGDVYICQVEHTSLDSPVTVEWKAQSDSARSKTLTGAGGFVLGLIICGVGIFMHRRSKK

SEQ ID NO: 48616 - protein, 258 aa, Homo sapiens
  Payload ID: 9771
  Gene Symbol: HLA-DPB1
  Gene Name: major histocompatibility complex, class II, DP beta 1
  Uniprot ID: P04440
  ENSP ID: ENSP00000389288
MMVLQVSAAPRTVALTALLMVLLTSVVQGRATPENYLFQGRQECYAFNGTQRFLERYIYNREEFARFDSDVGEFRAVTELGRPAAEYWNSQKDILEEKRAVPDRMCRHNYELGGPMTLQRRVQPRVNVSPSKKGPLQHHNLLVCHVTDFYPGSIQVRWFLNGQEETAGVVSTNLIRNGDWTFQILVMLEMTPQQGDVYTCQVEHTSLDSPVTVEWKAQSDSARSKTLTGAGGFVLGLIICGVGIFMHRRSKKVQRGSA

SEQ ID NO: 48617 - protein, 235 aa, Homo sapiens
  Payload ID: 9771
  Gene Symbol: HLA-DPB1
  Gene Name: major histocompatibility complex, class II, DP beta 1
  ENSP ID: ENSP00000389618
  MOD_RES (1)..(1): Any amino acid
XNYLFQGRQECYAFNGTQRFLERYIYNREEFVRFDSDVGEFRAVTELGRPDEEYWNSQKDILEEERAVPDRMCRHNYELGGPMTLQRRVQPRVNVSPSKKGPLQHHNLLVCHVTDFYPGSIQVRWFLNGQEETAGVVSTNLIRNGDWTFQILVMLEMTPQQGDVYTCQVEHTSLDSPVTVEWKAQSDSARSKTLTGAGGFVLGLIICGVGIFMHRRSKKGEKACRFNEDLHKQGS

SEQ ID NO: 48618 - protein, 235 aa, Homo sapiens
  Payload ID: 9771
  Gene Symbol: HLA-DPB1
  Gene Name: major histocompatibility complex, class II, DP beta 1
  ENSP ID: ENSP00000389923
  MOD_RES (1)..(1): Any amino acid
XNYLFQGRQECYAFNGTQRFLERYIYNREEFVRFDSDVGEFRAVTELGRPDEEYWNSQKDILEEKRAVPDRMCRHNYELGGPMTLQRRVQPRVNVSPSKKGPLQHHNLLVCHVTDFYPGSIQVRWFLNGQEETAGVVSTNLIRNGDWTFQILVMLEMTPQQGDVYTCQVEHTSMDSPVTVEWKAQSDSARSKTLTGAGGFVLGLIICGVGIFMHRRSKKGEKACRFNEDLHKQGS

SEQ ID NO: 48619 - protein, 229 aa, Homo sapiens
  Payload ID: 9771
  Gene Symbol: HLA-DPB1
  Gene Name: major histocompatibility complex, class II, DP beta 1
  ENSP ID: ENSP00000393651
KQAWRGSATRLGPQNSGRQECYAFNGTQRFLERYIYNREEFVRFDSDVGEFRAVTELGRPDEEYWNSQKDILEEKRAVPDRMCRHNYELGGPMTLQRRVQPRVNVSPSKKGPLQHHNLLVCHVTDFYPGSIQVRWFLNGQEETAGVVSTNLIRNGDWTFQILVMLEMTPQQGDVYTCQVEHTSMDSPVTVEWKAQSDSARSKTLTGAGGFVLGLIICGVGIFMHRRSKK

SEQ ID NO: 48620 - protein, 229 aa, Homo sapiens
  Payload ID: 9771
  Gene Symbol: HLA-DPB1
  Gene Name: major histocompatibility complex, class II, DP beta 1
  ENSP ID: ENSP00000393789
KQAWRGSATRLGPQNSGRQECYAFNGTQRFLERYIYNREEFARFDSDVGEFRAVTELGRPAAEYWNSQKDILEEKRAVPDRMCRHNYELGGPMTLQRRVQPRVNVSPSKKGPLQHHNLLVCHVTDFYPGSIQVRWFLNGQEETAGVVSTNLIRNGDWTFQILVMLEMTPQQGDVYTCQVEHTSLDSPVTVEWKAQSDSARSKTLTGAGGFVLGLIICGVGIFMHRRSKK

SEQ ID NO: 48621 - protein, 228 aa, Homo sapiens
  Payload ID: 9771
  Gene Symbol: HLA-DPB1
  Gene Name: major histocompatibility complex, class II, DP beta 1
  ENSP ID: ENSP00000395651
MMVLQVSAAPRTVALTALLMVLLTSVVQGRATPENYLFQGRQECYAFNGTQRFLERYIYNREEFARFDSDVGEFRAVTELGRPAAEYWNSQKDILEEKRAVPDRMCRHNYELGGPMTLQRRGSIQVRWFLNGQEETAGVVSTNLIRNGDWTFQILVMLEMTPQQGDVYTCQVEHTSLDSPVTVEWKAQSDSARSKTLTGAGGFVLGLIICGVGIFMHRRSKKVQRGSA

SEQ ID NO: 48622 - protein, 258 aa, Homo sapiens
  Payload ID: 9771
  Gene Symbol: HLA-DPB1
  Gene Name: major histocompatibility complex, class II, DP beta 1
  Uniprot ID: P04440
  ENSP ID: ENSP00000396095
MMVLQVSAAPRTVALTALLMVLLTSVVQGRATPENYLFQGRQECYAFNGTQRFLERYIYNREEFVRFDSDVGEFRAVTELGRPDEEYWNSQKDILEEKRAVPDRMCRHNYELGGPMTLQRRVQPRVNVSPSKKGPLQHHNLLVCHVTDFYPGSIQVRWFLNGQEETAGVVSTNLIRNGDWTFQILVMLEMTPQQGDVYTCQVEHTSMDSPVTVEWKAQSDSARSKTLTGAGGFVLGLIICGVGIFMHRRSKKVQRGSA

SEQ ID NO: 48623 - protein, 229 aa, Homo sapiens; identical to SEQ ID NO: 48619
  Payload ID: 9771
  Gene Symbol: HLA-DPB1
  Gene Name: major histocompatibility complex, class II, DP beta 1
  ENSP ID: ENSP00000396595

SEQ ID NO: 48624 - protein, 228 aa, Homo sapiens; identical to SEQ ID NO: 48621
  Payload ID: 9771
  Gene Symbol: HLA-DPB1
  Gene Name: major histocompatibility complex, class II, DP beta 1
  ENSP ID: ENSP00000398783

SEQ ID NO: 48625 - protein, 258 aa, Homo sapiens
  Payload ID: 9771
  Gene Symbol: HLA-DPB1
  Gene Name: major histocompatibility complex, class II, DP beta 1
  ENSP ID: ENSP00000399298
MMVLQVSAAPRTVALTALLMVLLTSVVQGRATPENYLFQGRQECYAFNGTQRFLERYIYNREEFVRFDSDVGEFRAVTELGRPDEEYWNSQKDILEEERAVPDRMCRHNYELGGPMTLQRRVQPRVNVSPSKKGPLQHHNLLVCHVTDFYPGSIQVRWFLNGQEETAGVVSTNLIRNGDWTFQILVMLEMTPQQGDVYTCQVEHTSLDSPVTVEWKAQSDSARSKTLTGAGGFVLGLIICGVGIFMHRRSKKVQRGSA

SEQ ID NO: 48626 - protein, 235 aa, Homo sapiens
  Payload ID: 9771
  Gene Symbol: HLA-DPB1
  Gene Name: major histocompatibility complex, class II, DP beta 1
  ENSP ID: ENSP00000399832
  MOD_RES (1)..(1): Any amino acid
XNYLFQGRQECYAFNGTQRFLERYIYNREEFARFDSDVGEFRAVTELGRPAAEYWNSQKDILEEKRAVPDRMCRHNYELGGPMTLQRRVQPRVNVSPSKKGPLQHHNLLVCHVTDFYPGSIQVRWFLNGQEETAGVVSTNLIRNGDWTFQILVMLEMTPQQGDVYTCQVEHTSLDSPVTVEWKAQSDSARSKTLTGAGGFVLGLIICGVGIFMHRRSKKGEKACRFNEDLHKQGS

SEQ ID NO: 48627 - protein, 229 aa, Homo sapiens
  Payload ID: 9771
  Gene Symbol: HLA-DPB1
  Gene Name: major histocompatibility complex, class II, DP beta 1
  ENSP ID: ENSP00000399852
KQAWRGSATRLGPQNSGRQECYAFNGTQRFLERYIYNREEFVRFDSDVGEFRAVTELGRPDEEYWNSQKDILEEERAVPDRMCRHNYELGGPMTLQRRVQPRVNVSPSKKGPLQHHNLLVCHVTDFYPGSIQVRWFLNGQEETAGVVSTNLIRNGDWTFQILVMLEMTPQQGDVYTCQVEHTSLDSPVTVEWKAQSDSARSKTLTGAGGFVLGLIICGVGIFMHRRSKK

SEQ ID NO: 48628 - protein, 228 aa, Homo sapiens
  Payload ID: 9771
  Gene Symbol: HLA-DPB1
  Gene Name: major histocompatibility complex, class II, DP beta 1
  ENSP ID: ENSP00000400149
MMVLQVSAAPRTVALTALLMVLLTSVVQGRATPENYLFQGRQECYAFNGTQRFLERYIYNREEFVRFDSDVGEFRAVTELGRPDEEYWNSQKDILEEKRAVPDRMCRHNYELGGPMTLQRRGSIQVRWFLNGQEETAGVVSTNLIRNGDWTFQILVMLEMTPQQGDVYTCQVEHTSMDSPVTVEWKAQSDSARSKTLTGAGGFVLGLIICGVGIFMHRRSKKVQRGSA

SEQ ID NO: 48629 - protein, 235 aa, Homo sapiens; identical to SEQ ID NO: 48626
  Payload ID: 9771
  Gene Symbol: HLA-DPB1
  Gene Name: major histocompatibility complex, class II, DP beta 1
  ENSP ID: ENSP00000404116
  MOD_RES (1)..(1): Any amino acid

SEQ ID NO: 48630 - protein, 258 aa, Homo sapiens; identical to SEQ ID NO: 48616
  Payload ID: 9771
  Gene Symbol: HLA-DPB1
  Gene Name: major histocompatibility complex, class II, DP beta 1
  Uniprot ID: P04440
  ENSP ID: ENSP00000407674

SEQ ID NO: 48631 - protein, 258 aa, Homo sapiens; identical to SEQ ID NO: 48616
  Payload ID: 9771
  Gene Symbol: HLA-DPB1
  Gene Name: major histocompatibility complex, class II, DP beta 1
  Uniprot ID: P04440
  ENSP ID: ENSP00000408146

SEQ ID NO: 48632 - protein, 235 aa, Homo sapiens
  Payload ID: 9771
  Gene Symbol: HLA-DPB1
  Gene Name: major histocompatibility complex, class II, DP beta 1
  ENSP ID: ENSP00000408879
  MOD_RES (1)..(1): Any amino acid
XNYLFQGRQECYAFNGTQRFLERYIYNREELVRFDSDVGEFRAVTELGRPEAEYWNSQKDILEEERAVPDRMCRHNYELGGPMTLQRRVQPRVNVSPSKKGPLQHHNLLVCHVTDFYPGSIQVRWFLNGQEETAGVVSTNLIRNGDWTFQILVMLEMTPQQGDVYTCQVEHTSLDSPVTVEWKAQSDSARSKTLTGAGGFVLGLIICGVGIFMHRRSKKGEKACRFNEDLHKQGS

SEQ ID NO: 48633 - protein, 229 aa, Homo sapiens; identical to SEQ ID NO: 48620
  Payload ID: 9771
  Gene Symbol: HLA-DPB1
  Gene Name: major histocompatibility complex, class II, DP beta 1
  ENSP ID: ENSP00000408940

SEQ ID NO: 48634 - protein, 235 aa, Homo sapiens; identical to SEQ ID NO: 48618
  Payload ID: 9771
  Gene Symbol: HLA-DPB1
  Gene Name: major histocompatibility complex, class II, DP beta 1
  ENSP ID: ENSP00000409943
  MOD_RES (1)..(1): Any amino acid

SEQ ID NO: 48635 - protein, 228 aa, Homo sapiens; identical to SEQ ID NO: 48628
  Payload ID: 9771
  Gene Symbol: HLA-DPB1
  Gene Name: major histocompatibility complex, class II, DP beta 1
  ENSP ID: ENSP00000411486

SEQ ID NO: 48636 - protein, 229 aa, Homo sapiens; identical to SEQ ID NO: 48620
  Payload ID: 9771
  Gene Symbol: HLA-DPB1
  Gene Name: major histocompatibility complex, class II, DP beta 1
  ENSP ID: ENSP00000412654

SEQ ID NO: 48637 - protein, 228 aa, Homo sapiens
  Payload ID: 9771
  Gene Symbol: HLA-DPB1
  Gene Name: major histocompatibility complex, class II, DP beta 1
  ENSP ID: ENSP00000412855
MMVLQVSAAPRTVALTALLMVLLTSVVQGRATPENYVYQLRQECYAFNGTQRFLERYIYNREEFVRFDSDVGEFRAVTELGRPDEDYWNSQKDLLEEKRAVPDRVCRHNYELDEAVTLQRRGSIQVRWFLNGQEETAGVVSTNLIRNGDWTFQILVMLEMTPQQGDVYICQVEHTSLDSPVTVEWKAQSDSARSKTLTGAGGFVLGLIICGVGIFMHRRSKKVQRGSA

SEQ ID NO: 48638 - protein, 258 aa, Homo sapiens; identical to SEQ ID NO: 48622
  Payload ID: 9771
  Gene Symbol: HLA-DPB1
  Gene Name: major histocompatibility complex, class II, DP beta 1
  Uniprot ID: P04440
  ENSP ID: ENSP00000414196

SEQ ID NO: 48639 - protein, 235 aa, Homo sapiens; identical to SEQ ID NO: 48626
  Payload ID: 9771
  Gene Symbol: HLA-DPB1
  Gene Name: major histocompatibility complex, class II, DP beta 1
  ENSP ID: ENSP00000416774
  MOD_RES (1)..(1): Any amino acid

SEQ ID NO: 48640 - protein, 235 aa, Homo sapiens
  Payload ID: 9771
  Gene Symbol: HLA-DPB1
  Gene Name: major histocompatibility complex, class II, DP beta 1
  ENSP ID: ENSP00000416855
  MOD_RES (1)..(1): Any amino acid
XNYVYQLRQECYAFNGTQRFLERYIYNREEFVRFDSDVGEFRAVTELGRPDEDYWNSQKDLLEEKRAVPDRVCRHNYELDEAVTLQRRVQPKVNVSPSKKGPLQHHNLLVCHVTDFYPGSIQVRWFLNGQEETAGVVSTNLIRNGDWTFQILVMLEMTPQQGDVYICQVEHTSLDSPVTVEWKAQSDSARSKTLTGAGGFVLGLIICGVGIFMHRRSKKGEKACKFNEDLHKQGS

SEQ ID NO: 48641 - protein, 255 aa, Homo sapiens
  Payload ID: 9772
  Gene Symbol: HLA-DQA1
  Gene Name: major histocompatibility complex, class II, DQ alpha 1
  Uniprot ID: P01909
  ENSP ID: ENSP00000339398
MILNKALLLGALALTTVMSPCGGEDIVADHVASCGVNLYQFYGPSGQYTHEFDGDEQFYVDLERKETAWRWPEFSKFGGFDPQGALRNMAVAKHNLNIMIKRYNSTAATNEVPEVTVFSKSPVTLGQPNTLICLVDNIFPPVVNITWLSNGQSVTEGVSETSFLSKSDHSFFKISYLTFLPSADEIYDCKVEHWGLDQPLLKHWEPEIPAPMSELTETVVCALGLSVGLMGIVVGTVFIIQGLRSVGASRHQGPL

SEQ ID NO: 48642 - protein, 255 aa, Homo sapiens; identical to SEQ ID NO: 48641
  Payload ID: 9772
  Gene Symbol: HLA-DQA1
  Gene Name: major histocompatibility complex, class II, DQ alpha 1
  Uniprot ID: P01909
  ENSP ID: ENSP00000364087

SEQ ID NO: 48643 - protein, 254 aa, Homo sapiens
  Payload ID: 9772
  Gene Symbol: HLA-DQA1
  Gene Name: major histocompatibility complex, class II, DQ alpha 1
  Uniprot ID: P01909
  ENSP ID: ENSP00000372738
MILNKALMLGALALTTVMSPCGGEDIVADHVASYGVNLYQSYGPSGQYTHEFDGDEQFYVDLGRKETVWCLPVLRQFRFDPQFALTNIAVLKHNLNSLIKRSNSTAATNEVPEVTVFSKSPVTLGQPNILICLVDNIFPPVVNITWLSNGHSVTEGVSETSFLSKSDHSFFKISYLTLLPSAEESYDCKVEHWGLDKPLLKHWEPEIPAPMSELTETVVCALGLSVGLVGIVVGTVFIIRGLRSVGASRHQGPL

SEQ ID NO: 48644 - protein, 255 aa, Homo sapiens; identical to SEQ ID NO: 48641
  Payload ID: 9772
  Gene Symbol: HLA-DQA1
  Gene Name: major histocompatibility complex, class II, DQ alpha 1
  Uniprot ID: P01909
  ENSP ID: ENSP00000378767

SEQ ID NO: 48645 - protein, 254 aa, Homo sapiens; identical to SEQ ID NO: 48643
  Payload ID: 9772
  Gene Symbol: HLA-DQA1
  Gene Name: major histocompatibility complex, class II, DQ alpha 1
  Uniprot ID: P01909
  ENSP ID: ENSP00000382583

SEQ ID NO: 48646 - protein, 254 aa, Homo sapiens; identical to SEQ ID NO: 48643
  Payload ID: 9772
  Gene Symbol: HLA-DQA1
  Gene Name: major histocompatibility complex, class II, DQ alpha 1
  Uniprot ID: P01909
  ENSP ID: ENSP00000382586

SEQ ID NO: 48647 - protein, 255 aa, Homo sapiens
  Payload ID: 9772
  Gene Symbol: HLA-DQA1
  Gene Name: major histocompatibility complex, class II, DQ alpha 1
  Uniprot ID: P01909
  ENSP ID: ENSP00000387892
MILNKALMLGALALTTVMSPCGGEDIVADHVASYGVNLYQSYGPSGQYSHEFDGDEEFYVDLERKETVWQLPLFRRFRRFDPQFALTNIAVLKHNLNIVIKRSNSTAATNEVPEVTVFSKSPVTLGQPNTLICLVDNIFPPVVNITWLSNGHSVTEGVSETSFLSKSDHSFFKISYLTFLPSADEIYDCKVEHWGLDEPLLKHWEPEIPTPMSELTETVVCALGLSVGLVGIVVGTVLIIRGLRSVGASRHQGPL

SEQ ID NO: 48648 - protein, 255 aa, Homo sapiens
  Payload ID: 9772
  Gene Symbol: HLA-DQA1
  Gene Name: major histocompatibility complex, class II, DQ alpha 1
  ENSP ID: ENSP00000392580
MILNKALMLGALALTTVMSPCGGEDIVADHVASYGVNLYQSYGPSGQYSHEFDGDEEFYVDLERKETVWQLPLFRRFRRFDPQFALTNIAVLKHNLNIVIKRSNSTAATNEVPEVTVFSKSPVTLGQPNTLICLVDNIFPPVVNITWLSNGHSVTEGVSETSFLSKSDHSFFKISYLTFLPSDDEIYDCKVEHWGLDEPLLKHWEPEIPTPMSELTETVVCALGLSVGLVGIVVGTVLIIRGLRSVGASRHQGPL

SEQ ID NO: 48649 - protein, 24 aa, Homo sapiens
  Payload ID: 9772
  Gene Symbol: HLA-DQA1
  Gene Name: major histocompatibility complex, class II, DQ alpha 1
  ENSP ID: ENSP00000394388
MILNKALMLGALALTTVMSPCGGE

SEQ ID NO: 48650 - protein, 255 aa, Homo sapiens; identical to SEQ ID NO: 48648
  Payload ID: 9772
  Gene Symbol: HLA-DQA1
  Gene Name: major histocompatibility complex, class II, DQ alpha 1
  ENSP ID: ENSP00000399068

SEQ ID NO: 48651 - protein, 254 aa, Homo sapiens
  Payload ID: 9772
  Gene Symbol: HLA-DQA1
  Gene Name: major histocompatibility complex, class II, DQ alpha 1
  ENSP ID: ENSP00000401151
MILNKALMLGALALTTVMSPCGGEDIVADHVASYGVNLYQSYGPSGQFTHEFDGDEEFYVDLERKETVWKLPLFHRLRFDPQFALTNIAVLKHNLNILIKRSNSTAATNEVPEVTVFSKSPVTLGQPNTLICLVDNIFPPVVNITWLSNGHSVTEGVSETSFLSKSDHSFFKISYLTFLPSADEIYDCKVEHWGLDEPLLKHWEPEIPAPMSELTETVVCALGLSVGLVGIVVGTVLIIRGLRSVGASRHQGPL

SEQ ID NO: 48652 - protein, 254 aa, Homo sapiens; identical to SEQ ID NO: 48651
  Payload ID: 9772
  Gene Symbol: HLA-DQA1
  Gene Name: major histocompatibility complex, class II, DQ alpha 1
  ENSP ID: ENSP00000401436

SEQ ID NO: 48653 - protein, 254 aa, Homo sapiens; identical to SEQ ID NO: 48651
  Payload ID: 9772
  Gene Symbol: HLA-DQA1
  Gene Name: major histocompatibility complex, class II, DQ alpha 1
  ENSP ID: ENSP00000401760

SEQ ID NO: 48654 - protein, 255 aa, Homo sapiens; identical to SEQ ID NO: 48648
  Payload ID: 9772
  Gene Symbol: HLA-DQA1
  Gene Name: major histocompatibility complex, class II, DQ alpha 1
  ENSP ID: ENSP00000404172

SEQ ID NO: 48655 - protein, 254 aa, Homo sapiens; identical to SEQ ID NO: 48651
  Payload ID: 9772
  Gene Symbol: HLA-DQA1
  Gene Name: major histocompatibility complex, class II, DQ alpha 1
  ENSP ID: ENSP00000405476

SEQ ID NO: 48656 - protein, 24 aa, Homo sapiens
  Payload ID: 9772
  Gene Symbol: HLA-DQA1
  Gene Name: major histocompatibility complex, class II, DQ alpha 1
  ENSP ID: ENSP00000405797
MILNKALLLGALALTTVMSPCGGE

SEQ ID NO: 48657 - protein, 254 aa, Homo sapiens; identical to SEQ ID NO: 48651
  Payload ID: 9772
  Gene Symbol: HLA-DQA1
  Gene Name: major histocompatibility complex, class II, DQ alpha 1
  ENSP ID: ENSP00000409127

SEQ ID NO: 48658 - protein, 254 aa, Homo sapiens; identical to SEQ ID NO: 48651
  Payload ID: 9772
  Gene Symbol: HLA-DQA1
  Gene Name: major histocompatibility complex, class II, DQ alpha 1
  ENSP ID: ENSP00000412055

SEQ ID NO: 48659 - protein, 255 aa, Homo sapiens; identical to SEQ ID NO: 48647
  Payload ID: 9772
  Gene Symbol: HLA-DQA1
  Gene Name: major histocompatibility complex, class II, DQ alpha 1
  Uniprot ID: P01909
  ENSP ID: ENSP00000413237

SEQ ID NO: 48660 - protein, 24 aa, Homo sapiens
  Payload ID: 9772
  Gene Symbol: HLA-DQA1
  Gene Name: major histocompatibility complex, class II, DQ alpha 1
  ENSP ID: ENSP00000413815
MILNKALMLGALALTTVMSPCGGE

SEQ ID NO: 48661 - protein, 24 aa, Homo sapiens
  Payload ID: 9772
  Gene Symbol: HLA-DQA1
  Gene Name: major histocompatibility complex, class II, DQ alpha 1
  ENSP ID: ENSP00000413816
MILNKALMLGALALTTVMSPCGGE

SEQ ID NO: 48662 - protein, 255 aa, Homo sapiens; identical to SEQ ID NO: 48648
  Payload ID: 9772
  Gene Symbol: HLA-DQA1
  Gene Name: major histocompatibility complex, class II, DQ alpha 1
  ENSP ID: ENSP00000414360

SEQ ID NO: 48663 - protein, 254 aa, Homo sapiens; identical to SEQ ID NO: 48651
  Payload ID: 9772
  Gene Symbol: HLA-DQA1
  Gene Name: major histocompatibility complex, class II, DQ alpha 1
  ENSP ID: ENSP00000415001

SEQ ID NO: 48664 - protein, 254 aa, Homo sapiens; identical to SEQ ID NO: 48651
  Payload ID: 9772
  Gene Symbol: HLA-DQA1
  Gene Name: major histocompatibility complex, class II, DQ alpha 1
  ENSP ID: ENSP00000416641

SEQ ID NO: 48665 - protein, 115 aa, Homo sapiens
  Payload ID: 9772
  Gene Symbol: HLA-DQA1
  Gene Name: major histocompatibility complex, class II, DQ alpha 1
  ENSP ID: ENSP00000431277
MILNKALMLGALALTTVMSPCGGEDIVGSISDSLLLYRDGHEFVKQKLKSQIVKRGSKLEGTLNFHNLINRGSSHSDFVQQWKFHPLLQSAWLLCSKFPFFSLTPECPGQAQLIH

SEQ ID NO: 48666 - protein, 115 aa, Homo sapiens; identical to SEQ ID NO: 48665
  Payload ID: 9772
  Gene Symbol: HLA-DQA1
  Gene Name: major histocompatibility complex, class II, DQ alpha 1
  ENSP ID: ENSP00000436314

SEQ ID NO: 48667 - protein, 53 aa, Homo sapiens
  Payload ID: 9772
  Gene Symbol: HLA-DQA1
  Gene Name: major histocompatibility complex, class II, DQ alpha 1
  ENSP ID: ENSP00000436546
MILNKALLLGALALTTVMSPCGGEDIVGSISDSLLLYRDGQWVCKTKVEKSDS

SEQ ID NO: 48668 - protein, 41 aa, Homo sapiens
  Payload ID: 9772
  Gene Symbol: HLA-DQA1
  Gene Name: major histocompatibility complex, class II, DQ alpha 1
  ENSP ID: ENSP00000436724
MILNKALMLGALALTTVMSPCGGEDIVGSISDSLLLYRDGQ

SEQ ID NO: 48669 - protein, 214 aa, Homo sapiens
  Payload ID: 9772
  Gene Symbol: HLA-DQA1
  Gene Name: major histocompatibility complex, class II, DQ alpha 1
  ENSP ID: ENSP00000437302
MILNKALLLGALALTTVMSPCGGEDIVADHVASCGVNLYQFYGPSGQYTHEFDGDEQFYVDLERKETAWRWPEFSKFGGFDPQGALRNMAVAKHNLNIMIKRYNSTAATNEVPEVTVFSKSPVTLGQPNTLICLVDNIFPPVVNITWLSNGQSVTEGVSETSFLSKSDHSFFKISYLTFLPSADEIYDCKVEHWGLDQPLLKHWGASPSTGAEE

SEQ ID NO: 48670 - protein, 254 aa, Homo sapiens; identical to SEQ ID NO: 48643
  Payload ID: 9772
  Gene Symbol: HLA-DQA1
  Gene Name: major histocompatibility complex, class II, DQ alpha 1
  Uniprot ID: P01909
  ENSP ID: ENSP00000447970

SEQ ID NO: 48671 - protein, 255 aa, Homo sapiens
  Payload ID: 9772
  Gene Symbol: HLA-DQA1
  Gene Name: major histocompatibility complex, class II, DQ alpha 1
  ENSP ID: ENSP00000449970
MILNKALMLGALALTTVMSPCGGEDIVADHVASYGVNLYQSYGPSGQYSHEFDGDEEFYVDLERKETVWQLPLFRRFRRFDPQFALTNIAVLKHNLNIVIKRSNSTAATNEVPEVTVFSKSPVTLGQPNTLICLVDNIFPPVVNITWLSNGHSVTEGVSETSFLSKSDHSFFKISYLTFLPSADEIYDCKVEHWGLDEPLLKHWEPEIPAPMSELTETLVCALGLSVGLMGIVVGTVFIIQGLRSVGASRHQGLL

SEQ ID NO: 48672 - protein, 255 aa, Homo sapiens
  Payload ID: 9772
  Gene Symbol: HLA-DQA1
  Gene Name: major histocompatibility complex, class II, DQ alpha 1
  ENSP ID: ENSP00000483966
MILNKALMLGALALTTVMSPCGGEDIVADHVASYGVNLYQSYGPSGQYSHEFDGDEEFYVDLERKETVWQLPLFRRFRRFDPQFALTNIAVLKHNLNIVIKRSNSTAATNEVPEVTVFSKSPVTLGQPNTLICLVDNIFPPVVNITWLSNGHSVTEGVSETSFLSKSDHSFFKISYLTFLPSADEIYDCKVEHWGLDEPLLKHWEPEIPAPMSELTETLVCALGLSVGLMGIVVGTVFIIQGLRSVDASRHQGLL

SEQ ID NO: 48673 - protein, 255 aa, Homo sapiens
  Payload ID: 9773
  Gene Symbol: HLA-DQA2
  Gene Name: major histocompatibility complex, class II, DQ alpha 2
  Uniprot ID: P01906
  ENSP ID: ENSP00000241802
MILNKALLLGALALTAVMSPCGGEDIVADHVASYGVNFYQSHGPSGQYTHEFDGDEEFYVDLETKETVWQLPMFSKFISFDPQSALRNMAVGKHTLEFMMRQSNSTAATNEVPEVTVFSKFPVTLGQPNTLICLVDNIFPPVVNITWLSNGHSVTEGVSETSFLSKSDHSFFKISYLTFLPSADEIYDCKVEHWGLDEPLLKHWEPEIPAPMSELTETLVCALGLSVGLMGIVVGTVFIIQGLRSVDASRHQGLL

SEQ ID NO: 48674 - protein, 255 aa, Homo sapiens
  Payload ID: 9773
  Gene Symbol: HLA-DQA2
  Gene Name: major histocompatibility complex, class II, DQ alpha 2
  Uniprot ID: P01906
  ENSP ID: ENSP00000364076
MILNKALLLGALALTAVMSPCGGEDIVADHVASYGVNFYQSHGPSGQYTHEFDGDEEFYVDLETKETVWQLPMFSKFISFDPQSALRNMAVGKHTLEFMMRQSNSTAATNEVPEVTVFSKFPVTLGQPNTLICLVDNIFPPVVNITWLSNGHSVTEGVSETSFLSKSDHSFFKISYLTFLPSADEIYDCKVEHWGLDEPLLKHWEPEIPAPMSELTETLVCALGLSVGLMGIVVGTVFIIQGLRSVGASRHQGLL

SEQ ID NO: 48675 - protein, 255 aa, Homo sapiens [sequence omitted]

SEQ ID NO: 48676 - protein, 255 aa, Homo sapiens [sequence omitted]

SEQ ID NO: 48677 - protein, 255 aa, Homo sapiens; identical to SEQ ID NO: 48674
  Payload ID: 9773
  Gene Symbol: HLA-DQA2
  Gene Name: major histocompatibility complex, class II, DQ alpha 2
  Uniprot ID: P01906
  ENSP ID: ENSP00000393431

SEQ ID NO: 48678 - protein, 255 aa, Homo sapiens [sequence omitted]

SEQ ID NO: 48679 - protein, 255 aa, Homo sapiens; identical to SEQ ID NO: 48674
  Payload ID: 9773
  Gene Symbol: HLA-DQA2
  Gene Name: major histocompatibility complex, class II, DQ alpha 2
  Uniprot ID: P01906
  ENSP ID: ENSP00000401098

SEQ ID NO: 48680 - protein, 255 aa, Homo sapiens; identical to SEQ ID NO: 48674
  Payload ID: 9773
  Gene Symbol: HLA-DQA2
  Gene Name: major histocompatibility complex, class II, DQ alpha 2
  Uniprot ID: P01906
  ENSP ID: ENSP00000405833

SEQ ID NO: 48681 - protein, 255 aa, Homo sapiens; identical to SEQ ID NO: 48673
  Payload ID: 9773
  Gene Symbol: HLA-DQA2
  Gene Name: major histocompatibility complex, class II, DQ alpha 2
  ENSP ID: ENSP00000446860

SEQ ID NO: 48682 - protein, 254 aa, Homo sapiens; identical to SEQ ID NO: 48643
  Payload ID: 9773
  Gene Symbol: HLA-DQA2
  Gene Name: major histocompatibility complex, class II, DQ alpha 2
  ENSP ID: ENSP00000447257

SEQ ID NO: 48683 - protein, 255 aa, Homo sapiens; identical to SEQ ID NO: 48674
  Payload ID: 9773
  Gene Symbol: HLA-DQA2
  Gene Name: major histocompatibility complex, class II, DQ alpha 2
  Uniprot ID: P01906
  ENSP ID: ENSP00000447668

SEQ ID NO: 48684 - protein, 255 aa, Homo sapiens; identical to SEQ ID NO: 48674
  Payload ID: 9773
  Gene Symbol: HLA-DQA2
  Gene Name: major histocompatibility complex, class II, DQ alpha 2
  Uniprot ID: P01906
  ENSP ID: ENSP00000448003

SEQ ID NO: 48685 - protein, 254 aa, Homo sapiens; identical to SEQ ID NO: 48643
  Payload ID: 9773
  Gene Symbol: HLA-DQA2
  Gene Name: major histocompatibility complex, class II, DQ alpha 2
  ENSP ID: ENSP00000449195

SEQ ID NO: 48686 - protein, 269 aa, Homo sapiens
  Payload ID: 9774
  Gene Symbol: HLA-DQB1
  Gene Name: major histocompatibility complex, class II, DQ beta 1
  ENSP ID: ENSP00000364080
MSWKKALRIPGDLRVATVTLMLAMLSSLLAEGRDSPEDFVFQFKGMCYFTNGTERVRLVTRYIYNREEYARFDSDVGVYRAVTPQGRPDAEYWNSQKEVLEGTRAELDTVCRHNYEVAFRGILQRRVEPTVTISPSRTEALNHHNLLVCSVTDFYPGQIKVRWFRNDQEETAGVVSTPLIRNGDWTFQILVMLEMTPQRGDVYTCHVEHPSLQSPITVEWRAQSESAQSKMLSGVGGFVLGLIFLGLGLIIRQRSQKGPQGPPPAGLLH

SEQ ID NO: 48687 - protein, 261 aa, Homo sapiens
  Payload ID: 9774
  Gene Symbol: HLA-DQB1
  Gene Name: major histocompatibility complex, class II, DQ beta 1
  ENSP ID: ENSP00000372602
MSWKKALRIPGGLRAATVTLMLSMLSTPVAEGRDSPEDFVYQFKGMCYFTNGTERVRLVSRSIYNREEIVRFDSDVGEFRAVTLLGLPAAEYWNSQKDILERKRAAVDRVCRHNYQLELRTTLQRRVEPTVTISPSRTEALNHHNLLVCSVTDFYPAQIKVRWFRNDQEETAGVVSTPLIRNGDWTFQILVMLEMTPQRGDVYTCHVEHPSLQSPITVEWRAQSESAQSKMLSGIGGFVLGLIFLGLGLIIHHRSQKGLLH

SEQ ID NO: 48688 - protein, 261 aa, Homo sapiens; identical to SEQ ID NO: 48687
  Payload ID: 9774
  Gene Symbol: HLA-DQB1
  Gene Name: major histocompatibility complex, class II, DQ beta 1
  ENSP ID: ENSP00000372734

SEQ ID NO: 48689 - protein, 269 aa, Homo sapiens
  Payload ID: 9774
  Gene Symbol: HLA-DQB1
  Gene Name: major histocompatibility complex, class II, DQ beta 1
  ENSP ID: ENSP00000382018
MSWKKALRIPGGLRAATVTLMLAMLSTPVAEGRDSPEDFVYQFKAMCYFTNGTERVRYVTRYIYNREEYARFDSDVEVYRAVTPLGPPDAEYWNSQKEVLERTRAELDTVCRHNYQLELRTTLQRRVEPTVTISPSRTEALNHHNLLVCSVTDFYPAQIKVRWFRNDQEETTGVVSTPLIRNGDWTFQILVMLEMTPQHGDVYTCHVEHPSLQNPITVEWRAQSESAQSKMLSGIGGFVLGLIFLGLGLIIHHRSQKGPQGPPPAGLLH

SEQ ID NO: 48690 - protein, 269 aa, Homo sapiens
  Payload ID: 9774
  Gene Symbol: HLA-DQB1
  Gene Name: major histocompatibility complex, class II, DQ beta 1
  ENSP ID: ENSP00000382025
MSWKKALRIPGGLRVATVTLMLAMLSTPVAEGRDSPEDFVYQFKGMCYFTNGTERVRLVTRYIYNREEYARFDSDVGVYRAVTPLGPPDAEYWNSQKEVLERTRAELDTVCRHNYQLELRTTLQRRVEPTVTISPSRTEALNHHNLLVCSVTDFYPAQIKVRWFRNDQEETTGVVSTPLIRNGDWTFQILVMLEMTPQRGDVYTCHVEHPSLQNPIIVEWRAQSESAQSKMLSGIGGFVLGLIFLGLGLIIHHRSQKGPQGPPPAGLLH

SEQ ID NO: 48691 - protein, 224 aa, Homo sapiens
  Payload ID: 9774
  Gene Symbol: HLA-DQB1
  Gene Name: major histocompatibility complex, class II, DQ beta 1
  ENSP ID: ENSP00000382029
MSWKKALRIPGDLRVATVTLMLAMLSSLLAEGRDSPEDFVFQFKGMCYFTNGTERVRLVTRYIYNREEYARFDSDVGVYRAVTPQGRPDAEYWNSQKEVLEGTRAELDTVCRHNYEVAFRGILQRRVEPTVTISPSRTEALNHHNLLVCSVTDFYPGQIKVRWFRNDQEETAGVVSTPLIRNGDWTFQILVMLEMTPQRGDVYTCHVEHPSLQSPITVEWRLLH

SEQ ID NO: 48692 - protein, 134 aa, Homo sapiens
  Payload ID: 9774
  Gene Symbol: HLA-DQB1
  Gene Name: major histocompatibility complex, class II, DQ beta 1
  ENSP ID: ENSP00000382032
MSWKKALRIPGDLRVATVTLMLAMLSSLLAEGRDSPVEPTVTISPSRTEALNHHNLLVCSVTDFYPGQIKVRWFRNDQEETAGVVSTPLIRNGDWTFQILVMLEMTPQRGDVYTCHVEHPSLQSPITVEWRLLH

SEQ ID NO: 48693 - protein, 261 aa, Homo sapiens
  Payload ID: 9774
  Gene Symbol: HLA-DQB1
  Gene Name: major histocompatibility complex, class II, DQ beta 1
  ENSP ID: ENSP00000382034
MSWKKALRIPGDLRVATVTLMLAMLSSLLAEGRDSPEDFVFQFKGMCYFTNGTERVRLVTRYIYNREEYARFDSDVGVYRAVTPQGRPDAEYWNSQKEVLEGTRAELDTVCRHNYEVAFRGILQRRVEPTVTISPSRTEALNHHNLLVCSVTDFYPGQIKVRWFRNDQEETAGVVSTPLIRNGDWTFQILVMLEMTPQRGDVYTCHVEHPSLQSPITVEWRAQSESAQSKMLSGVGGFVLGLIFLGLGLIIRQRSQKGLLH

SEQ ID NO: 48694 - protein, 261 aa, Homo sapiens
  Payload ID: 9774
  Gene Symbol: HLA-DQB1
  Gene Name: major histocompatibility complex, class II, DQ beta 1
  Uniprot ID: P01920
  ENSP ID: ENSP00000382038
MSWKKALRIPGGLRAATVTLMLAMLSTPVAEGRDSPEDFVYQFKAMCYFTNGTERVRYVTRYIYNREEYARFDSDVEVYRAVTPLGPPDAEYWNSQKEVLERTRAELDTVCRHNYQLELRTTLQRRVEPTVTISPSRTEALNHHNLLVCSVTDFYPAQIKVRWFRNDQEETTGVVSTPLIRNGDWTFQILVMLEMTPQHGDVYTCHVEHPSLQNPITVEWRAQSESAQSKMLSGIGGFVLGLIFLGLGLIIHHRSQKGLLH

SEQ ID NO: 48695 - protein, 224 aa, Homo sapiens
  Payload ID: 9774
  Gene Symbol: HLA-DQB1
  Gene Name: major histocompatibility complex, class II, DQ beta 1
  ENSP ID: ENSP00000382578
MSWKKALRIPGGLRAATVTLMLSMLSTPVAEGRDSPEDFVYQFKGMCYFTNGTERVRLVSRSIYNREEIVRFDSDVGEFRAVTLLGLPAAEYWNSQKDILERKRAAVDRVCRHNYQLELRTTLQRRVEPTVTISPSRTEALNHHNLLVCSVTDFYPAQIKVRWFRNDQEETAGVVSTPLIRNGDWTFQILVMLEMTPQRGDVYTCHVEHPSLQSPITVEWRLLH

SEQ ID NO: 48696 - protein, 134 aa, Homo sapiens
  Payload ID: 9774
  Gene Symbol: HLA-DQB1
  Gene Name: major histocompatibility complex, class II, DQ beta 1
  ENSP ID: ENSP00000388447
MSWKKALRIPGGLRVATVTLMLAMLSTPVAEGRDSPVEPTVTISPSRTEALNHHNLLVCSVTDFYPAQIKVRWFRNDQEETTGVVSTPLIRNGDWTFQILVMLEMTPQRGDVYTCHVEHPSLQNPIIVEWRLLH

SEQ ID NO: 48697 - protein, 261 aa, Homo sapiens
  Payload ID: 9774
  Gene Symbol: HLA-DQB1
  Gene Name: major histocompatibility complex, class II, DQ beta 1
  ENSP ID: ENSP00000388763
MSWKKALRIPGGLRVATVTLMLAMLSTPVAEGRDSPEDFVYQFKGMCYFTNGTERVRGVTRYIYNREEYARFDSDVGVYRAVTPLGPPAAEYWNSQKEVLERTRAELDTVCRHNYQLELRTTLQRRVEPTVTISPSRTEALNHHNLLVCSVTDFYPAQIKVRWFRNDQEETTGVVSTPLIRNGDWTFQILVMLEMTPQRGDVYTCHVEHPSLQNPIIVEWRAQSESAQSKMLSGIGGFVLGLIFLGLGLIIHHRSQKGLLH

SEQ ID NO: 48698 - protein, 224 aa, Homo sapiens
  Payload ID: 9774
  Gene Symbol: HLA-DQB1
  Gene Name: major histocompatibility complex, class II, DQ beta 1
  ENSP ID: ENSP00000393979
MSWKKALRIPGGLRVATVTLMLAMLSTPVAEGRDSPEDFVYQFKGMCYFTNGTERVRLVTRYIYNREEYARFDSDVGVYRAVTPLGPPDAEYWNSQKEVLERTRAELDTVCRHNYQLELRTTLQRRVEPTVTISPSRTEALNHHNLLVCSVTDFYPAQIKVRWFRNDQEETTGVVSTPLIRNGDWTFQILVMLEMTPQRGDVYTCHVEHPSLQNPIIVEWRLLH

SEQ ID NO: 48699 - protein, 144 aa, Homo sapiens
  Payload ID: 9774
  Gene Symbol: HLA-DQB1
  Gene Name: major histocompatibility complex, class II, DQ beta 1
  ENSP ID: ENSP00000394159
MSWKKALRIPGGLRVATVTPLGPPDAEYWNSQKEVLERTRAELDTVCRHNYQLELRTTLQRRVEPTVTISPSRTEALNHHNLLVCSVTDFYPAQIKVRWFRNDQEETTGVVSTPLIRNGDWTFQILVMLEMTPQRGDVYTCHVE

SEQ ID NO: 48700 - protein, 261 aa, Homo sapiens; identical to SEQ ID NO: 48694
  Payload ID: 9774
  Gene Symbol: HLA-DQB1
  Gene Name: major histocompatibility complex, class II, DQ beta 1
  Uniprot ID: P01920
  ENSP ID: ENSP00000396539

SEQ ID NO: 48701 - protein, 261 aa, Homo sapiens
  Payload ID: 9774
  Gene Symbol: HLA-DQB1
  Gene Name: major histocompatibility complex, class II, DQ beta 1
  Uniprot ID: P01920
  ENSP ID: ENSP00000402865
MSWKKALRIPGGLRAATVTLMLSMLSTPVAEGRDSPEDFVYQFKGMCYFTNGTERVRLVSRSIYNREEIVRFDSDVGEFRAVTLLGLPAAEYWNSQKDILERKRAAVDRVCRHNYQLELRTTLQRRVEPTVTISPSRTEALNHHNLLVCSVTDFYPAQIKVRWFRNGQEETAGVVSTPLIRNGDWTFQILVMLEMTPQRGDVYTCHVEHPSLQSPITVEWRAQSESAQSKMLSGIGGFVLGLIFLGLGLIIHHRSQKGLLH

SEQ ID NO: 48702 - protein, 144 aa, Homo sapiens
  Payload ID: 9774
  Gene Symbol: HLA-DQB1
  Gene Name: major histocompatibility complex, class II, DQ beta 1
  ENSP ID: ENSP00000403786
MSWKKALRIPGGLRAATVTLLGLPAAEYWNSQKDILERKRAAVDRVCRHNYQLELRTTLQRRVEPTVTISPSRTEALNHHNLLVCSVTDFYPAQIKVRWFRNGQEETAGVVSTPLIRNGDWTFQILVMLEMTPQRGDVYTCHVE

SEQ ID NO: 48703 - protein, 134 aa, Homo sapiens
  Payload ID: 9774
  Gene Symbol: HLA-DQB1
  Gene Name: major histocompatibility complex, class II, DQ beta 1
  ENSP ID: ENSP00000406962
MSWKKALRIPGGLRAATVTLMLSMLSTPVAEGRDSPVEPTVTISPSRTEALNHHNLLVCSVTDFYPAQIKVRWFRNGQEETAGVVSTPLIRNGDWTFQILVMLEMTPQRGDVYTCHVEHPSLQSPITVEWRLLH

SEQ ID NO: 48704 - protein, 261 aa, Homo sapiens; identical to SEQ ID NO: 48693
  Payload ID: 9774
  Gene Symbol: HLA-DQB1
  Gene Name: major histocompatibility complex, class II, DQ beta 1
  ENSP ID: ENSP00000407332

SEQ ID NO: 48705 - protein, 261 aa, Homo sapiens [sequence omitted]

SEQ ID NO: 48706 - protein, 261 aa, Homo sapiens; identical to SEQ ID NO: 48701
  Payload ID: 9774
  Gene Symbol: HLA-DQB1
  Gene Name: major histocompatibility complex, class II, DQ beta 1
  Uniprot ID: P01920
  ENSP ID: ENSP00000410330

SEQ ID NO: 48707 - protein, 269 aa, Homo sapiens
  Payload ID: 9774
  Gene Symbol: HLA-DQB1
  Gene Name: major histocompatibility complex, class II, DQ beta 1
  ENSP ID: ENSP00000411427
MSWKKALRIPGGLRAATVTLMLSMLSTPVAEGRDSPEDFVYQFKGMCYFTNGTERVRLVSRSIYNREEIVRFDSDVGEFRAVTLLGLPAAEYWNSQKDILERKRAAVDRVCRHNYQLELRTTLQRRVEPTVTISPSRTEALNHHNLLVCSVTDFYPAQIKVRWFRNGQEETAGVVSTPLIRNGDWTFQILVMLEMTPQRGDVYTCHVEHPSLQSPITVEWRAQSESAQSKMLSGIGGFVLGLIFLGLGLIIHHRSQKGPQGPPPAGLLH

SEQ ID NO: 48708 - protein, 224 aa, Homo sapiens
  Payload ID: 9774
  Gene Symbol: HLA-DQB1
  Gene Name: major histocompatibility complex, class II, DQ beta 1
  ENSP ID: ENSP00000411566
MSWKKALRIPGGLRAATVTLMLAMLSTPVAEGRDSPEDFVYQFKAMCYFTNGTERVRYVTRYIYNREEYARFDSDVEVYRAVTPLGPPDAEYWNSQKEVLERTRAELDTVCRHNYQLELRTTLQRRVEPTVTISPSRTEALNHHNLLVCSVTDFYPAQIKVRWFRNDQEETTGVVSTPLIRNGDWTFQILVMLEMTPQHGDVYTCHVEHPSLQNPITVEWRLLH

SEQ ID NO: 48709 - protein, 224 aa, Homo sapiens
  Payload ID: 9774
  Gene Symbol: HLA-DQB1
  Gene Name: major histocompatibility complex, class II, DQ beta 1
  ENSP ID: ENSP00000412380
MSWKKALRIPGGLRAATVTLMLSMLSTPVAEGRDSPEDFVYQFKGMCYFTNGTERVRLVSRSIYNREEIVRFDSDVGEFRAVTLLGLPAAEYWNSQKDILERKRAAVDRVCRHNYQLELRTTLQRRVEPTVTISPSRTEALNHHNLLVCSVTDFYPAQIKVRWFRNGQEETAGVVSTPLIRNGDWTFQILVMLEMTPQRGDVYTCHVEHPSLQSPITVEWRLLH

SEQ ID NO: 48710 - protein, 261 aa, Homo sapiens [sequence omitted]

SEQ ID NO: 48711 - protein, 134 aa, Homo sapiens
  Payload ID: 9774
  Gene Symbol: HLA-DQB1
  Gene Name: major histocompatibility complex, class II, DQ beta 1
  ENSP ID: ENSP00000414555
MSWKKALRIPGGLRAATVTLMLAMLSTPVAEGRDSPVEPTVTISPSRTEALNHHNLLVCSVTDFYPAQIKVRWFRNDQEETTGVVSTPLIRNGDWTFQILVMLEMTPQHGDVYTCHVEHPSLQNPITVEWRLLH

SEQ ID NO: 48712 - protein, 144 aa, Homo sapiens
  Payload ID: 9774
  Gene Symbol: HLA-DQB1
  Gene Name: major histocompatibility complex, class II, DQ beta 1
  ENSP ID: ENSP00000416744
MSWKKALRIPGGLRAATVTPLGPPDAEYWNSQKEVLERTRAELDTVCRHNYQLELRTTLQRRVEPTVTISPSRTEALNHHNLLVCSVTDFYPAQIKVRWFRNDQEETTGVVSTPLIRNGDWTFQILVMLEMTPQHGDVYTCHVE

SEQ ID NO: 48713 - protein, 136 aa, Homo sapiens
  Payload ID: 9774
  Gene Symbol: HLA-DQB1
  Gene Name: major histocompatibility complex, class II, DQ beta 1
  ENSP ID: ENSP00000433300
MSWKKALRIPGGLRVATVTLMLAMLSTPVAEGRDSPEDFVYQFKGMCYFTNGTERVRLVTRYIYNREEYARFDSDVGVYRAVTPLGPPDAEYWNSQKEVLERTRAELDTVCRHNYQLELRTTLQRRGTVTGPSRSW

SEQ ID NO: 48714 - protein, 136 aa, Homo sapiens
  Payload ID: 9774
  Gene Symbol: HLA-DQB1
  Gene Name: major histocompatibility complex, class II, DQ beta 1
  ENSP ID: ENSP00000435178
MSWKKALRIPGGLRAATVTLMLSMLSTPVAEGRDSPEDFVYQFKGMCYFTNGTERVRLVSRSIYNREEIVRFDSDVGEFRAVTLLGLPAAEYWNSQKDILERKRAAVDRVCRHNYQLELRTTLQRRGMVTGPSRSW

SEQ ID NO: 48715 - protein, 136 aa, Homo sapiens
  Payload ID: 9774
  Gene Symbol: HLA-DQB1
  Gene Name: major histocompatibility complex, class II, DQ beta 1
  ENSP ID: ENSP00000435701
MSWKKALRIPGGLRAATVTLMLAMLSTPVAEGRDSPEDFVYQFKAMCYFTNGTERVRYVTRYIYNREEYARFDSDVEVYRAVTPLGPPDAEYWNSQKEVLERTRAELDTVCRHNYQLELRTTLQRRGTVTGPSRSW

SEQ ID NO: 48716 - protein, 136 aa, Homo sapiens
  Payload ID: 9774
  Gene Symbol: HLA-DQB1
  Gene Name: major histocompatibility complex, class II, DQ beta 1
  ENSP ID: ENSP00000436686
MSWKKALRIPGDLRVATVTLMLAMLSSLLAEGRDSPEDFVFQFKGMCYFTNGTERVRLVTRYIYNREEYARFDSDVGVYRAVTPQGRPDAEYWNSQKEVLEGTRAELDTVCRHNYEVAFRGILQRRGMVTGLSRSW

SEQ ID NO: 48717 - protein, 279 aa, Homo sapiens
  Payload ID: 9775
  Gene Symbol: HLA-DQB2
  Gene Name: major histocompatibility complex, class II, DQ beta 2
  ENSP ID: ENSP00000322293
MSWKMALQIPGGFWAAAVTVMLVMLSTPVAEARDFPKDFLVQFKGMCYFTNGTERVRGVARYIYNREEYGRFDSDVGEFQAVTELGRSIEDWNNYKDFLEQERAAVDKVCRHNYEAELRTTLQRQVEPTVTISPSRTEALNHHNLLVCSVTDFYPAQIKVQWFRNDQEETAGVVSTSLIRNGDWTFQILVMLEITPQRGDIYTCQVEHPSLQSPITVEWRAQSESAQSKMLGGVGGFVLGLIFLGLGLIIRHRGQKGPRGPPPAGNISAMIQSGERAQA

SEQ ID NO: 48718 - protein, 231 aa, Homo sapiens
  Payload ID: 9775
  Gene Symbol: HLA-DQB2
  Gene Name: major histocompatibility complex, class II, DQ beta 2
  ENSP ID: ENSP00000382566
MSWKMALQIPGGFWAAAVTVMLVMLSTPVAEARDFPKDFLVQFKGMCYFTNGTERVRGVARYIYNREEYGRFDSDVGEFQAVTELGRSIEDWNNYKDFLEQERAAVDKVCRHNYEAELRTTLQRQVEPTVTISPSRTEALNHHNLLVCSVTDFYPAQIKVQWFRNDQEETAGVVSTSLIRNGDWTFQILVMLEITPQRGDIYTCQVEHPSLQSPITVEWRPRGPPPAGLLH

SEQ ID NO: 48719 - protein, 268 aa, Homo sapiens
  Payload ID: 9775
  Gene Symbol: HLA-DQB2
  Gene Name: major histocompatibility complex, class II, DQ beta 2
  Uniprot ID: P05538
  ENSP ID: ENSP00000382569
MSWKMALQIPGGFWAAAVTVMLVMLSTPVAEARDFPKDFLVQFKGMCYFTNGTERVRGVARYIYNREEYGRFDSDVGEFQAVTELGRSIEDWNNYKDFLEQERAAVDKVCRHNYEAELRTTLQRQVEPTVTISPSRTEALNHHNLLVCSVTDFYPAQIKVQWFRNDQEETAGVVSTSLIRNGDWTFQILVMLEITPQRGDIYTCQVEHPSLQSPITVEWRAQSESAQSKMLGGVGGFVLGLIFLGLGLIIRHRGQKGPRGPPPAGLLH

SEQ ID NO: 48720 - protein, 275 aa, Homo sapiens
  Payload ID: 9775
  Gene Symbol: HLA-DQB2
  Gene Name: major histocompatibility complex, class II, DQ beta 2
  ENSP ID: ENSP00000387578
MALQIPGGFWAAAVTVMLVMLSTPVAEARDFPKDFLVQFKGMCYFTNGTERVRGVARYIYNREEYGRFDSDVGEFQAVTELGRSIEDWNNYKDFLEQERAAVDKVCRHNYEAELRTTLQRQVEPTVTISPSRTEALNHHNLLVCSVTDFYPAQIKVRWFRNDQEETAGVVSTSLIRNGDWTFQILVMLEITPQRGDIYTCQVEHPSLQSPITVEWRAQSESAQSKMLSGIGGFVLGLIFLGLGLIIRHRGQKGPRGPPPAGNISAMIQSGERAQA

SEQ ID NO: 48721 - protein, 264 aa, Homo sapiens
  Payload ID: 9775
  Gene Symbol: HLA-DQB2
  Gene Name: major histocompatibility complex, class II, DQ beta 2
  ENSP ID: ENSP00000388849
MALQIPGGFWAAAVTVMLVMLSTPVAEARDFPKDFLVQFKGMCYFTNGTERVRGVARYIYNREEYGRFDSDVGEFQAVTELGRSIEDWNNYKDFLEQERAAVDKVCRHNYEAELRTTLQRQVEPTVTISPSRTEALNHHNLLVCSVTDFYPAQIKVRWFRNDQEETAGVVSTSLIRNGDWTFQILVMLEITPQRGDIYTCQVEHPSLQSPITVEWRAQSESAQSKMLSGIGGFVLGLIFLGLGLIIRHRGQKGPRGPPPAGLLH

SEQ ID NO: 48722 - protein, 268 aa, Homo sapiens; identical to SEQ ID NO: 48719
  Payload ID: 9775
  Gene Symbol: HLA-DQB2
  Gene Name: major histocompatibility complex, class II, DQ beta 2
  Uniprot ID: P05538
  ENSP ID: ENSP00000389067

SEQ ID NO: 48723 - protein, 227 aa, Homo sapiens
  Payload ID: 9775
  Gene Symbol: HLA-DQB2
  Gene Name: major histocompatibility complex, class II, DQ beta 2
  Uniprot ID: P05538
  ENSP ID: ENSP00000390431
MALQIPGGFWAAAVTVMLVMLSTPVAEARDFPKDFLVQFKGMCYFTNGTERVRGVARYIYNREEYGRFDSDVGEFQAVTELGRSIEDWNNYKDFLEQERAAVDKVCRHNYEAELRTTLQRQVEPTVTISPSRTEALNHHNLLVCSVTDFYPAQIKVRWFRNDQEETAGVVSTSLIRNGDWTFQILVMLEITPQRGDIYTCQVEHPSLQSPITVEWRPRGPPPAGLLH

SEQ ID NO: 48724 - protein, 279 aa, Homo sapiens; identical to SEQ ID NO: 48717
  Payload ID: 9775
  Gene Symbol: HLA-DQB2
  Gene Name: major histocompatibility complex, class II, DQ beta 2
  ENSP ID: ENSP00000391938

SEQ ID NO: 48725 - protein, 264 aa, Homo sapiens; identical to SEQ ID NO: 48721
  Payload ID: 9775
  Gene Symbol: HLA-DQB2
  Gene Name: major histocompatibility complex, class II, DQ beta 2
  ENSP ID: ENSP00000392299

SEQ ID NO: 48726 - protein, 227 aa, Homo sapiens; identical to SEQ ID NO: 48723
  Payload ID: 9775
  Gene Symbol: HLA-DQB2
  Gene Name: major histocompatibility complex, class II, DQ beta 2
  Uniprot ID: P05538
  ENSP ID: ENSP00000393969

SEQ ID NO: 48727 - protein, 231 aa, Homo sapiens; identical to SEQ ID NO: 48718
  Payload ID: 9775
  Gene Symbol: HLA-DQB2
  Gene Name: major histocompatibility complex, class II, DQ beta 2
  ENSP ID: ENSP00000394016

SEQ ID NO: 48728 - protein, 279 aa, Homo sapiens; identical to SEQ ID NO: 48717
  Payload ID: 9775
  Gene Symbol: HLA-DQB2
  Gene Name: major histocompatibility complex, class II, DQ beta 2
  ENSP ID: ENSP00000394272

SEQ ID NO: 48729 - protein, 275 aa, Homo sapiens; identical to SEQ ID NO: 48720
  Payload ID: 9775
  Gene Symbol: HLA-DQB2
  Gene Name: major histocompatibility complex, class II, DQ beta 2
  ENSP ID: ENSP00000394759

SEQ ID NO: 48730 - protein, 218 aa, Homo sapiens
  Payload ID: 9775
  Gene Symbol: HLA-DQB2
  Gene Name: major histocompatibility complex, class II, DQ beta 2
  ENSP ID: ENSP00000396323
  MOD_RES (1)..(1): Any amino acid
XLQIPGGFWAAAVTVMLVMLSTPVAEARDFPKDFLVQFKGMCYFTNGTERVRGVARYIYNREEYGRFDSDVGEFQAVTELGRSIEDWNNYKDFLEQERAAVDKVCRHNYEAELRTTLQRQVEPTVTISPSRTEALNHHNLLVCSVTDFYPAQIKVQWFRNDQEETAGVVSTSLIRNGDWTFQILVMLEITPQRGDIYTCQVEHPSLQSPITVEWRLLH

SEQ ID NO: 48731 - protein, 264 aa, Homo sapiens; identical to SEQ ID NO: 48721
  Payload ID: 9775
  Gene Symbol: HLA-DQB2
  Gene Name: major histocompatibility complex, class II, DQ beta 2
  ENSP ID: ENSP00000396330

SEQ ID NO: 48732 - protein, 268 aa, Homo sapiens; identical to SEQ ID NO: 48719
  Payload ID: 9775
  Gene Symbol: HLA-DQB2
  Gene Name: major histocompatibility complex, class II, DQ beta 2
  Uniprot ID: P05538
  ENSP ID: ENSP00000396502

SEQ ID NO: 48733 - protein, 218 aa, Homo sapiens; identical to SEQ ID NO: 48730
  Payload ID: 9775
  Gene Symbol: HLA-DQB2
  Gene Name: major histocompatibility complex, class II, DQ beta 2
  ENSP ID: ENSP00000397883
  MOD_RES (1)..(1): Any amino acid

SEQ ID NO: 48734 - protein, 227 aa, Homo sapiens; identical to SEQ ID NO: 48723
  Payload ID: 9775
  Gene Symbol: HLA-DQB2
  Gene Name: major histocompatibility complex, class II, DQ beta 2
  Uniprot ID: P05538
  ENSP ID: ENSP00000399594

SEQ ID NO: 48735 - protein, 231 aa, Homo sapiens; identical to SEQ ID NO: 48718
  Payload ID: 9775
  Gene Symbol: HLA-DQB2
  Gene Name: major histocompatibility complex, class II, DQ beta 2
  ENSP ID: ENSP00000400295

SEQ ID NO: 48736 - protein, 218 aa, Homo sapiens; identical to SEQ ID NO: 48730
  Payload ID: 9775
  Gene Symbol: HLA-DQB2
  Gene Name: major histocompatibility complex, class II, DQ beta 2
  ENSP ID: ENSP00000401270
  MOD_RES (1)..(1): Any amino acid

SEQ ID NO: 48737 - protein, 218 aa, Homo sapiens
  Payload ID: 9775
  Gene Symbol: HLA-DQB2
  Gene Name: major histocompatibility complex, class II, DQ beta 2
  ENSP ID: ENSP00000403201
  MOD_RES (1)..(1): Any amino acid
XLQIPGGFWAAAVTVMLVMLSTPVAEARDFPKDFLVQFKGMCYFTNGTERVRGVARYIYNREEYGRFDSDVGEFQAVTELGRSIEDWNNYKDFLEQERAAVDKVCRHNYEAELRTTLQRQVEPTVTISPSRTEALNHHNLLVCSVTDFYPAQIKVRWFRNDQEETAGVVSTSLIRNGDWTFQILVMLEITPQRGDIYTCQVEHPSLQSPITVEWRLLH

SEQ ID NO: 48738 - protein, 218 aa, Homo sapiens; identical to SEQ ID NO: 48737
  Payload ID: 9775
  Gene Symbol: HLA-DQB2
  Gene Name: major histocompatibility complex, class II, DQ beta 2
  ENSP ID: ENSP00000403893
  MOD_RES (1)..(1): Any amino acid

SEQ ID NO: 48739 - protein, 279 aa, Homo sapiens; identical to SEQ ID NO: 48717
  Payload ID: 9775
  Gene Symbol: HLA-DQB2
  Gene Name: major histocompatibility complex, class II, DQ beta 2
  ENSP ID: ENSP00000406872

SEQ ID NO: 48740 - protein, 231 aa, Homo sapiens; identical to SEQ ID NO: 48718
  Payload ID: 9775
  Gene Symbol: HLA-DQB2
  Gene Name: major histocompatibility complex, class II, DQ beta 2
  ENSP ID: ENSP00000407691

SEQ ID NO: 48741 - protein, 227 aa, Homo sapiens; identical to SEQ ID NO: 48723
  Payload ID: 9775
  Gene Symbol: HLA-DQB2
  Gene Name: major histocompatibility complex, class II, DQ beta 2
  Uniprot ID: P05538
  ENSP ID: ENSP00000408884

SEQ ID NO: 48742 - protein, 275 aa, Homo sapiens; identical to SEQ ID NO: 48720
  Payload ID: 9775
  Gene Symbol: HLA-DQB2
  Gene Name: major histocompatibility complex, class II, DQ beta 2
  ENSP ID: ENSP00000409159

SEQ ID NO: 48743 - protein, 268 aa, Homo sapiens; identical to SEQ ID NO: 48719
  Payload ID: 9775
  Gene Symbol: HLA-DQB2
  Gene Name: major histocompatibility complex, class II, DQ beta 2
  Uniprot ID: P05538
  ENSP ID: ENSP00000410132

SEQ ID NO: 48744 - protein, 275 aa, Homo sapiens; identical to SEQ ID NO: 48720
  Payload ID: 9775
  Gene Symbol: HLA-DQB2
  Gene Name: major histocompatibility complex, class II, DQ beta 2
  ENSP ID: ENSP00000410512

SEQ ID NO: 48745 - protein, 218 aa, Homo sapiens; identical to SEQ ID NO: 48737
  Payload ID: 9775
  Gene Symbol: HLA-DQB2
  Gene Name: major histocompatibility complex, class II, DQ beta 2
  ENSP ID: ENSP00000411739
  MOD_RES (1)..(1): Any amino acid

SEQ ID NO: 48746 - protein, 218 aa, Homo sapiens; identical to SEQ ID NO: 48730
  Payload ID: 9775
  Gene Symbol: HLA-DQB2
  Gene Name: major histocompatibility complex, class II, DQ beta 2
  ENSP ID: ENSP00000414496
  MOD_RES (1)..(1): Any amino acid

SEQ ID NO: 48747 - protein, 218 aa, Homo sapiens; identical to SEQ ID NO: 48737
  Payload ID: 9775
  Gene Symbol: HLA-DQB2
  Gene Name: major histocompatibility complex, class II, DQ beta 2
  ENSP ID: ENSP00000415997
  MOD_RES (1)..(1): Any amino acid

SEQ ID NO: 48748 - protein, 264 aa, Homo sapiens; identical to SEQ ID NO: 48721
  Payload ID: 9775
  Gene Symbol: HLA-DQB2
  Gene Name: major histocompatibility complex, class II, DQ beta 2
  ENSP ID: ENSP00000416466

SEQ ID NO: 48749 - protein, 229 aa, Homo sapiens
  Payload ID: 9776
  Gene Symbol: HLA-DRA
  Gene Name: major histocompatibility complex, class II, DR alpha
  ENSP ID: ENSP00000364121
MAISGVPVLGFFIIAVLMSAQESWAIKEEHVIIQAEFYLNPDQSGEFMFDFDGDEIFHVDMAKKETVWRLEEFGRFASFEAQGALANIAVDKANLEIMTKRSNYTPITNDKFTPPVVNVTWLRNGKPVTTGVSETVFLPREDHLFRKFHYLPFLPSTEDVYDCRVEHWGLDEPLLKHWEFDAPSPLPETTENVVCALGLTVGLVGIIIGTIFIIKGLRKSNAAERRGPL

SEQ ID NO: 48750 - protein, 254 aa, Homo sapiens
  Payload ID: 9776
  Gene Symbol: HLA-DRA
  Gene Name: major histocompatibility complex, class II, DR alpha
  Uniprot ID: P01903
  ENSP ID: ENSP00000372608
MAISGVPVLGFFIIAVLMSAQESWAIKEEHVIIQAEFYLNPDQSGEFMFDFDGDEIFHVDMAKKETVWRLEEFGRFASFEAQGALANIAVDKANLEIMTKRSNYTPITNVPPEVTVLTNSPVELREPNVLICFIDKFTPPVVNVTWLRNGKPVTTGVSETVFLPREDHLFRKFHYLPFLPSTEDVYDCRVEHWGLDEPLLKHWEFDAPSPLPETTENVVCALGLTVGLVGIIIGTIFIIKGLRKSNAAERRGPL

SEQ ID NO: 48751 - protein, 229 aa, Homo sapiens
  Payload ID: 9776
  Gene Symbol: HLA-DRA
  Gene Name: major histocompatibility complex, class II, DR alpha
  ENSP ID: ENSP00000372745
MAISGVPVLGFFIIAVLMSAQESWAIKEEHVIIQAEFYLNPDQSGEFMFDFDGDEIFHVDMAKKETVWRLEEFGRFASFEAQGALANIAVDKANLEIMTKRSNYTPITNDKFTPPVVNVTWLRNGKPVTTGVSETVFLPREDHLFRKFHYLPFLPSTEDVYDCRVEHWGLDEPLLKHWEFDAPSPLPETTENVVCALGLTVGLVGIIIGTIFIIKGVRKSNAAERRGPL

SEQ ID NO: 48752 - protein, 254 aa, Homo sapiens
  Payload ID: 9776
  Gene Symbol: HLA-DRA
  Gene Name: major histocompatibility complex, class II, DR alpha
  Uniprot ID: P01903
  ENSP ID: ENSP00000372746
MAISGVPVLGFFIIAVLMSAQESWAIKEEHVIIQAEFYLNPDQSGEFMFDFDGDEIFHVDMAKKETVWRLEEFGRFASFEAQGALANIAVDKANLEIMTKRSNYTPITNVPPEVTVLTNSPVELREPNVLICFIDKFTPPVVNVTWLRNGKPVTTGVSETVFLPREDHLFRKFHYLPFLPSTEDVYDCRVEHWGLDEPLLKHWEFDAPSPLPETTENVVCALGLTVGLVGIIIGTIFIIKGVRKSNAAERRGPL

SEQ ID NO: 48753 - protein, 254 aa, Homo sapiens; identical to SEQ ID NO: 48750
  Payload ID: 9776
  Gene Symbol: HLA-DRA
  Gene Name: major histocompatibility complex, class II, DR alpha
  Uniprot ID: P01903
  ENSP ID: ENSP00000378786

SEQ ID NO: 48754 - protein, 229 aa, Homo sapiens; identical to SEQ ID NO: 48751
  Payload ID: 9776
  Gene Symbol: HLA-DRA
  Gene Name: major histocompatibility complex, class II, DR alpha
  ENSP ID: ENSP00000392789

SEQ ID NO: 48755 - protein, 229 aa, Homo sapiens; identical to SEQ ID NO: 48751
  Payload ID: 9776
  Gene Symbol: HLA-DRA
  Gene Name: major histocompatibility complex, class II, DR alpha
  ENSP ID: ENSP00000398838

SEQ ID NO: 48756 - protein, 254 aa, Homo sapiens; identical to SEQ ID NO: 48752
  Payload ID: 9776
  Gene Symbol: HLA-DRA
  Gene Name: major histocompatibility complex, class II, DR alpha
  Uniprot ID: P01903
  ENSP ID: ENSP00000402951

SEQ ID NO: 48757 - protein, 229 aa, Homo sapiens; identical to SEQ ID NO: 48749
  Payload ID: 9776
  Gene Symbol: HLA-DRA
  Gene Name: major histocompatibility complex, class II, DR alpha
  ENSP ID: ENSP00000403385

SEQ ID NO: 48758 - protein, 254 aa, Homo sapiens; identical to SEQ ID NO: 48752
  Payload ID: 9776
  Gene Symbol: HLA-DRA
  Gene Name: major histocompatibility complex, class II, DR alpha
  Uniprot ID: P01903
  ENSP ID: ENSP00000404533

SEQ ID NO: 48759 - protein, 254 aa, Homo sapiens; identical to SEQ ID NO: 48752
  Payload ID: 9776
  Gene Symbol: HLA-DRA
  Gene Name: major histocompatibility complex, class II, DR alpha
  Uniprot ID: P01903
  ENSP ID: ENSP00000405295

SEQ ID NO: 48760 - protein, 254 aa, Homo sapiens; identical to SEQ ID NO: 48752
  Payload ID: 9776
  Gene Symbol: HLA-DRA
  Gene Name: major histocompatibility complex, class II, DR alpha
  Uniprot ID: P01903
  ENSP ID: ENSP00000410443

SEQ ID NO: 48761 - protein, 229 aa, Homo sapiens; identical to SEQ ID NO: 48751
  Payload ID: 9776
  Gene Symbol: HLA-DRA
  Gene Name: major histocompatibility complex, class II, DR alpha
  ENSP ID: ENSP00000411610

SEQ ID NO: 48762 - protein, 229 aa, Homo sapiens; identical to SEQ ID NO: 48751
  Payload ID: 9776
  Gene Symbol: HLA-DRA
  Gene Name: major histocompatibility complex, class II, DR alpha
  ENSP ID: ENSP00000412562

SEQ ID NO: 48763 - protein, 254 aa, Homo sapiens; identical to SEQ ID NO: 48750
  Payload ID: 9776
  Gene Symbol: HLA-DRA
  Gene Name: major histocompatibility complex, class II, DR alpha
  ENSP ID: ENSP00000479287

SEQ ID NO: 48764 - protein, 266 aa, Homo sapiens
  Payload ID: 9777
  Gene Symbol: HLA-DRB1
  Gene Name: major histocompatibility complex, class II, DR beta 1
  Uniprot ID: P01912
  ENSP ID: ENSP00000331343
MVCLRLPGGSCMAVLTVTLMVLSSPLALAGDTRPRFLEYSTSECHFFNGTERVRYLDRYFHNQEENVRFDSDVGEFRAVTELGRPDAEYWNSQKDLLEQKRGRVDNYCRHNYGVVESFTVQRRVHPKVTVYPSKTQPLQHHNLLVCSVSGFYPGSIEVRWFRNGQEEKTGVVSTGLIHNGDWTFQTLVMLETVPRSGEVYTCQVEHPSVTSPLTVEWRARSESAQSKMLSGVGGFVLGLLFLGAGLFIYFRNQKGHSGLQPRGFLS

SEQ ID NO: 48765 - protein, 266 aa, Homo sapiens
  Payload ID: 9777
  Gene Symbol: HLA-DRB1
  Gene Name: major histocompatibility complex, class II, DR beta 1
  Uniprot ID: P04229
  ENSP ID: ENSP00000353099
MVCLKLPGGSCMTALTVTLMVLSSPLALSGDTRPRFLWQPKRECHFFNGTERVRFLDRYFYNQEESVRFDSDVGEFRAVTELGRPDAEYWNSQKDILEQARAAVDTYCRHNYGVVESFTVQRRVQPKVTVYPSKTQPLQHHNLLVCSVSGFYPGSIEVRWFLNGQEEKAGMVSTGLIQNGDWTFQTLVMLETVPRSGEVYTCQVEHPSVTSPLTVEWRARSESAQSKMLSGVGGFVLGLLFLGAGLFIYFRNQKGHSGLQPTGFLS

SEQ ID NO: 48766 - protein, 266 aa, Homo sapiens; identical to SEQ ID NO: 48764
  Payload ID: 9777
  Gene Symbol: HLA-DRB1
  Gene Name: major histocompatibility complex, class II, DR beta 1
  Uniprot ID: P01912
  ENSP ID: ENSP00000382378

SEQ ID NO: 48767 - protein, 251 aa, Homo sapiens
  Payload ID: 9777
  Gene Symbol: HLA-DRB1
  Gene Name: major histocompatibility complex, class II, DR beta 1
  Uniprot ID: Q95IE3
  ENSP ID: ENSP00000392280
  MOD_RES (1)..(1): Any amino acid
XLLKLTRDFPQRHEKYQSWAGTFHLCLKKNKYPDSRSTFIKHAGSYLKRGEFLAIHTAITCFFRQISARFLEYSTSECHFFNGTERVRYLDRYFHNQEENVRFDSDVGEFRAVTELGRPDAEYWNSQKDLLEQKRGRVDNYCRHNYGVVESFTVQRRVHPKVTVYPSKTQPLQHHNLLVCSVSGFYPGSIEVRWFRNGQEEKTGVVSTGLIHNGDWTFQTLVMLETVPRSGEVYTCQVEHPSVTSPLTVEW

SEQ ID NO: 48768 - protein, 250 aa, Homo sapiens
  Payload ID: 9777
  Gene Symbol: HLA-DRB1
  Gene Name: major histocompatibility complex, class II, DR beta 1
  ENSP ID: ENSP00000392880
  MOD_RES (1)..(1): Any amino acid
XLLKLTRDFPQRHEKYQSWAGTFHLCLKKNKYPDSRSTFIKHAGSYLKRGEFLSIHTAITCFFLQISARFLWQGKYKCHFFNGTERVQFLERLFYNQEEFVRFDSDVGEYRAVTELGRPVAESWNSQKDILEDRRGQVDTVCRHNYGVGESFTVQRRVHPEVTVYPAKTQPLQHHNLLVCSVSGFYPGSIEVRWFRNGQEEKAGVVSTGLIQNGDWTFQTLVMLETVPRSGEVYTCQVEHPSVMSPLTVE

SEQ ID NO: 48769 - protein, 266 aa, Homo sapiens
  Payload ID: 9777
  Gene Symbol: HLA-DRB1
  Gene Name: major histocompatibility complex, class II, DR beta 1
  Uniprot ID: P13760
  ENSP ID: ENSP00000403458
MVCLKFPGGSCMAALTVTLMVLSSPLALAGDTRPRFLEQVKHECHFFNGTERVRFLDRYFYHQEEYVRFDSDVGEYRAVTELGRPDAEYWNSQKDLLEQRRAEVDTYCRHNYGVVESFTVQRRVYPEVTVYPAKTQPLQHHNLLVCSVNGFYPGSIEVRWFRNGQEEKTGVVSTGLIQNGDWTFQTLVMLETVPRSGEVYTCQVEHPSLTSPLTVEWRARSESAQSKMLSGVGGFVLGLLFLGAGLFIYFRNQKGHSGLQPTGFLS

SEQ ID NO: 48770 - protein, 266 aa, Homo sapiens
  Payload ID: 9777
  Gene Symbol: HLA-DRB1
  Gene Name: major histocompatibility complex, class II, DR beta 1
  Uniprot ID: P13761
  ENSP ID: ENSP00000405960
MVCLKLPGGSCMAALTVTLMVLSSPLALAGDTQPRFLWQGKYKCHFFNGTERVQFLERLFYNQEEFVRFDSDVGEYRAVTELGRPVAESWNSQKDILEDRRGQVDTVCRHNYGVGESFTVQRRVHPEVTVYPAKTQPLQHHNLLVCSVSGFYPGSIEVRWFRNGQEEKAGVVSTGLIQNGDWTFQTLVMLETVPRSGEVYTCQVEHPSVMSPLTVEWRARSESAQSKMLSGVGGFVLGLLFLGAGLFIYFRNQKGHSGLQPTGFLS

SEQ ID NO: 48771 - protein, 250 aa, Homo sapiens
  Payload ID: 9777
  Gene Symbol: HLA-DRB1
  Gene Name: major histocompatibility complex, class II, DR beta 1
  Uniprot ID: Q95IE3
  ENSP ID: ENSP00000408795
LLKLTRDFPQRHEKYQSWAGTFHLCLKKNKYPDSRSTFIKHAGSYLKRGEFLSIHTAITCFFLQISARFLEQVKHECHFFNGTERVRFLDRYFYHQEEYVRFDSDVGEYRAVTELGRPDAEYWNSQKDLLEQRRAEVDTYCRHNYGVVESFTVQRRVYPEVTVYPAKTQPLQHHNLLVCSVNGFYPGSIEVRWFRNGQEEKTGVVSTGLIQNGDWTFQTLVMLETVPRSGEVYTCQVEHPSLTSPLTVEW

SEQ ID NO: 48772 - protein, 266 aa, Homo sapiens; identical to SEQ ID NO: 48770
  Payload ID: 9777
  Gene Symbol: HLA-DRB1
  Gene Name: major histocompatibility complex, class II, DR beta 1
  Uniprot ID: P13761
  ENSP ID: ENSP00000409322

SEQ ID NO: 48773 - protein, 251 aa, Homo sapiens; identical to SEQ ID NO: 48767
  Payload ID: 9777
  Gene Symbol: HLA-DRB1
  Gene Name: major histocompatibility complex, class II, DR beta 1
  Uniprot ID: Q95IE3
  ENSP ID: ENSP00000412168
  MOD_RES (1)..(1): Any amino acid

SEQ ID NO: 48774 - protein, 266 aa, Homo sapiens
  Payload ID: 9777
  Gene Symbol: HLA-DRB1
  Gene Name: major histocompatibility complex, class II, DR beta 1
  ENSP ID: ENSP00000446833
MVCLKFPGGSCMAALTVTLMVLSSPLALAGDTRPRFLEQVKHECHFFNGTERVRFLDRYFYHQEEYVRFDSDVGEYRAVTELGRPDAEYWNSQKDLLEQRRAEVDTYCRHNYGVVESFTVQRRVYPEVTVYPAKTQPLQHHNLLVCSVNGFYPGSIEVRWFRNGQEEKTGVVSTGLIQNGDWTFQTLVMLETVPRSGEVYTCQVEHPSLTSPLTVEWRARSESAQSKMLSGVGGFVLGLLFLGAGLFIYFRNQKGHSGLQPTGLLS

SEQ ID NO: 48775 - protein, 269 aa, Homo sapiens
  Payload ID: 9777
  Gene Symbol: HLA-DRB1
  Gene Name: major histocompatibility complex, class II, DR beta 1
  ENSP ID: ENSP00000447061
MSWKKALRIPGGLRAATVTLMLSMLSTPVAEGRDSPEDFVYQFKGMCYFTNGTERVRLVSRSIYNREEIVRFDSDVGEFRAVTLLGLPAAEYWNSQKDILERKRAAVDRVCRHNYQLELRTTLQRRGEPKVTVYPSKTQPLQHHNLLVCSVSGFYPGSIEVRWFRNGQEEKTGVVSTGLIHNGDWTFQTLVMLETVPRSGEVYTCQVEHPSVTSPLTVEWRARSESAQSKMLSGVGGFVLGLLFLGAGLFIYFRNQKGHSGLQPTGFLS

SEQ ID NO: 48776 - protein, 269 aa, Homo sapiens; identical to SEQ ID NO: 48775
  Payload ID: 9777
  Gene Symbol: HLA-DRB1
  Gene Name: major histocompatibility complex, class II, DR beta 1
  ENSP ID: ENSP00000448427

SEQ ID NO: 48777 - protein, 269 aa, Homo sapiens
  Payload ID: 9777
  Gene Symbol: HLA-DRB1
  Gene Name: major histocompatibility complex, class II, DR beta 1
  ENSP ID: ENSP00000449692
MSWKKALRIPGGLRAATVTLMLSMLSTPVAEGRDSPEDFVYQFKGMCYFTNGTERVRLVSRSIYNREEIVRFDSDVGEFRAVTLLGLPAAEYWNSQKDILERKRAAVDRVCRHNYQLELRTTLQRRGEPEVTVYPAKTQPLQHHNLLVCSVSGFYPGSIEVRWFRNGQEEKAGVVSTGLIQNGDWTFQTLVMLETVPRSGEVYTCQVEHPSVMSPLTVEWRARSESAQSKMLSGVGGFVLGLLFLGAGLFIYFRNQKGHSGLQPTGFLS

SEQ ID NO: 48778 - protein, 269 aa, Homo sapiens
  Payload ID: 9777
  Gene Symbol: HLA-DRB1
  Gene Name: major histocompatibility complex, class II, DR beta 1
  ENSP ID: ENSP00000449952
MSWKKALRIPGGLRVATVTLMLAMLSTPVAEGRDSPEDFVYQFKGMCYFTNGTERVRGVTRYIYNREEYARFDSDVGVYRAVTPLGPPAAEYWNSQKEVLERTRAELDTVCRHNYQLELRTTLQRRGEPEVTVYPAKTQPLQHHNLLVCSVNGFYPGSIEVRWFRNGQEEKTGVVSTGLIQNGDWTFQTLVMLETVPRSGEVYTCQVEHPSLTSPLTVEWRARSESAQSKMLSGVGGFVLGLLFLGAGLFIYFRNQKGHSGLQPTGFLS

SEQ ID NO: 48779 - protein, 266 aa, Homo sapiens; identical to SEQ ID NO: 48764
  Payload ID: 9777
  Gene Symbol: HLA-DRB1
  Gene Name: major histocompatibility complex, class II, DR beta 1
  Uniprot ID: P01912
  ENSP ID: ENSP00000479406

SEQ ID NO: 48780 - protein, 266 aa, Homo sapiens; identical to SEQ ID NO: 48769
  Payload ID: 9777
  Gene Symbol: HLA-DRB1
  Gene Name: major histocompatibility complex, class II, DR beta 1
  ENSP ID: ENSP00000479426

SEQ ID NO: 48781 - protein, 266 aa, Homo sapiens
  Payload ID: 9777
  Gene Symbol: HLA-DRB1
  Gene Name: major histocompatibility complex, class II, DR beta 1
  ENSP ID: ENSP00000479900
MVCLRLPGGSCMAVLTVTLMVLSSPLALAGDTRPRFLEYSTSECHFFNGTERVRYLDRYFHNQEENVRFDSDVGEFRAVTELGRPDAEYWNSQKDLLEQKRGRVDNYCRHNYGVVESFTVQRRVHPKVTVYPSKTQPLQHHNLLVCSVSGFYPGSIEVRWFRNGQEEKTGVVSTGLIHNGDWTFQTLVMLETVPRSGEVYTCQVEHPSVTSPLTVEWRARSESAQSKMLSGVGGFVLGLLFLGAGLFIYFRNQKGHSGLQPTGFLS

SEQ ID NO: 48782 - protein, 266 aa, Homo sapiens
  Payload ID: 9777
  Gene Symbol: HLA-DRB1
  Gene Name: major histocompatibility complex, class II, DR beta 1
  ENSP ID: ENSP00000480667
MVCLKLPGGSCMTALTVTLMVLSSPLALSGDTRPRFLWQPKRECHFFNGTERVRFLDRYFYNQEESVRFDSDVGEFRAVTELGRPDAEYWNSQKDILEQARAAVDTYCRHNYGVVESFTVQRRGEPKVTVYPSKTQPLQHHNLLVCSVSGFYPGSIEVRWFLNGQEEKAGMVSTGLIQNGDWTFQTLVMLETVPRSGEVYTCQVEHPSVTSPLTVEWRARSESAQSKMLSGVGGFVLGLLFLGAGLFIYFRNQKGHSGLQPTGLLS

SEQ ID NO: 48783 - protein, 266 aa, Homo sapiens
  Payload ID: 9777
  Gene Symbol: HLA-DRB1
  Gene Name: major histocompatibility complex, class II, DR beta 1
  ENSP ID: ENSP00000481487
MVCLRLPGGSCMAVLTVTLMVLSSPLALAGDTRPRFLEYSTSECHFFNGTERVRYLDRYFHNQEENVRFDSDVGEFRAVTELGRPDAEYWNSQKDLLEQKRGRVDNYCRHNYGVVESFTVQRRVHPKVTVYPSKTQPLQHHNLLVCSVSGFYPGSIEVRWFRNGQEEKTGVVSTGLIHNGDWTFQTLVMLETVPRSGEVYTCQVEHPSVTSPLTVEWSARSESAQSKMLSGVGGFVLGLLFLGAGLFIYFRNQKGHSGLQPTGFLS

SEQ ID NO: 48784 - protein, 266 aa, Homo sapiens; identical to SEQ ID NO: 48770
  Payload ID: 9777
  Gene Symbol: HLA-DRB1
  Gene Name: major histocompatibility complex, class II, DR beta 1
  Uniprot ID: P13761
  ENSP ID: ENSP00000481636

SEQ ID NO: 48785 - protein, 266 aa, Homo sapiens; identical to SEQ ID NO: 48770
  Payload ID: 9777
  Gene Symbol: HLA-DRB1
  Gene Name: major histocompatibility complex, class II, DR beta 1
  Uniprot ID: P13761
  ENSP ID: ENSP00000482190

SEQ ID NO: 48786 - protein, 266 aa, Homo sapiens
  Payload ID: 9777
  Gene Symbol: HLA-DRB1
  Gene Name: major histocompatibility complex, class II, DR beta 1
  ENSP ID: ENSP00000482266
MVCLKLPGGSCMAALTVTLMVLSSPLALAGDTQPRFLWQGKYKCHFFNGTERVQFLERLFYNQEEFVRFDSDVGEYRAVTELGRPVAESWNSQKDILEDRRGQVDTVCRHNYGVGESFTVQRRVHPEVTVYPAKTQPLQHHNLLVCSVSGFYPGSIEVRWFRNGQEEKAGVVSTGLIQNGDWTFQTLVMLETVPRSGEVYTCQVEHPSVMSPLTVEWRARSESAQSKMLSGVGGFVLGLLFLGAGLFIYFRNQKGHSGLQPTGLLS

SEQ ID NO: 48787 - protein, 266 aa, Homo sapiens; identical to SEQ ID NO: 48786
  Payload ID: 9777
  Gene Symbol: HLA-DRB1
  Gene Name: major histocompatibility complex, class II, DR beta 1
  ENSP ID: ENSP00000482905

SEQ ID NO: 48788 - protein, 269 aa, Homo sapiens
  Payload ID: 9777
  Gene Symbol: HLA-DRB1
  Gene Name: major histocompatibility complex, class II, DR beta 1
  ENSP ID: ENSP00000484131
MSWKKALRIPGGLRVATVTLMLAMLSTPVAEGRDSPEDFVYQFKGMCYFTNGTERVRLVTRYIYNREEYARFDSDVGVYRAVTPLGPPDAEYWNSQKEVLERTRAELDTVCRHNYQLELRTTLQRRGEPEVTVYPAKTQPLQHHNLLVCSVSGFYPGSIEVRWFRNGQEEKAGVVSTGLIQNGDWTFQTLVMLETVPRSGEVYTCQVEHPSVMSPLTVEWRARSESAQSKMLSGVGGFVLGLLFLGAGLFIYFRNQKGHSGLQPTGFLS

SEQ ID NO: 48789 - protein, 266 aa, Homo sapiens; identical to SEQ ID NO: 48769
  Payload ID: 9777
  Gene Symbol: HLA-DRB1
  Gene Name: major histocompatibility complex, class II, DR beta 1
  ENSP ID: ENSP00000484448

SEQ ID NO: 48790 - protein, 266 aa, Homo sapiens; identical to SEQ ID NO: 48764
  Payload ID: 9777
  Gene Symbol: HLA-DRB1
  Gene Name: major histocompatibility complex, class II, DR beta 1
  Uniprot ID: P01912
  ENSP ID: ENSP00000484489

SEQ ID NO: 48791 - protein, 266 aa, Homo sapiens; identical to SEQ ID NO: 48783
  Payload ID: 9777
  Gene Symbol: HLA-DRB1
  Gene Name: major histocompatibility complex, class II, DR beta 1
  ENSP ID: ENSP00000484527

SEQ ID NO: 48792 - protein, 266 aa, Homo sapiens
  Payload ID: 9777
  Gene Symbol: HLA-DRB1
  Gene Name: major histocompatibility complex, class II, DR beta 1
  ENSP ID: ENSP00000484667
MVCLKFPGGSCMAALTVTLMVLSSPLALAGDTRPRFLEQVKHECHFFNGTERVRFLDRYFYHQEEYVRFDSDVGEYRAVTELGRPDAEYWNSQKDLLEQRRAEVDTYCRHNYGVVESFTVQRRGEPEVTVYPAKTQPLQHHNLLVCSVNGFYPGSIEVRWFRNGQEEKTGVVSTGLIQNGDWTFQTLVMLETVPRSGEVYTCQVEHPSLTSPLTVEWRARSESAQSKMLSGVGGFVLGLLFLGAGLFIYFRNQKGHSGLQPTGLLS

SEQ ID NO: 48793 - protein, 266 aa, Homo sapiens
  Payload ID: 9778
  Gene Symbol: HLA-DRB3
  Gene Name: major histocompatibility complex, class II, DR beta 3
  Uniprot ID: P79483
  ENSP ID: ENSP00000302517
MVCLKLPGGSSLAALTVTLMVLSSRLAFAGDTRPRFLELLKSECHFFNGTERVRFLERHFHNQEEYARFDSDVGEYRAVRELGRPDAEYWNSQKDLLEQKRGQVDNYCRHNYGVGESFTVQRRVHPQVTVYPAKTQPLQHHNLLVCSVSGFYPGSIEVRWFRNGQEEKAGVVSTGLIQNGDWTFQTLVMLETVPRSGEVYTCQVEHPSVTSPLTVEWSARSESAQSKMLSGVGGFVLGLLFLGAGLFIYFRNQKGHSGLQPTGFLS

SEQ ID NO: 48794 - protein, 266 aa, Homo sapiens
  Payload ID: 9778
  Gene Symbol: HLA-DRB3
  Gene Name: major histocompatibility complex, class II, DR beta 3
  ENSP ID: ENSP00000372607
MVCLKLPGGSSLAALTVTLMVLSSRLAFAGDTRPRFLELRKSECHFFNGTERVRYLDRYFHNQEEFLRFDSDVGEYRAVTELGRPVAESWNSQKDLLEQKRGRVDNYCRHNYGVGESFTVQRRVHPQVTVYPAKTQPLQHHNLLVCSVSGFYPGSIEVRWFRNGQEEKAGVVSTGLIQNGDWTFQTLVMLETVPRSGEVYTCQVEHPSVTSALTVEWRARSESAQSKMLSGVGGFVLGLLFLGAGLFIYFRNQKGHSGLQPTGFLS

SEQ ID NO: 48795 - protein, 266 aa, Homo sapiens; identical to SEQ ID NO: 48793
  Payload ID: 9778
  Gene Symbol: HLA-DRB3
  Gene Name: major histocompatibility complex, class II, DR beta 3
  ENSP ID: ENSP00000416022

SEQ ID NO: 48796 - protein, 266 aa, Homo sapiens
  Payload ID: 9778
  Gene Symbol: HLA-DRB3
  Gene Name: major histocompatibility complex, class II, DR beta 3
  ENSP ID: ENSP00000478579
MVCLRLPGGSCMAVLTVTLMVLSSPLALAGDTRPRFLELLKSECHFFNGTERVRFLERHFHNQEEYARFDSDVGEYRAVRELGRPDAEYWNSQKDLLEQKRGQVDNYCRHNYGVGESFTVQRRVHPQVTVYPAKTQPLQHHNLLVCSVSGFYPGSIEVRWFRNGQEEKAGVVSTGLIQNGDWTFQTLVMLETVPRSGEVYTCQVEHPSVTSPLTVEWSARSESAQSKMLSGVGGFVLGLLFLGAGLFIYFRNQKGHSGLQPTGFLS

SEQ ID NO: 48797 - protein, 266 aa, Homo sapiens
  Payload ID: 9778
  Gene Symbol: HLA-DRB3
  Gene Name: major histocompatibility complex, class II, DR beta 3
  ENSP ID: ENSP00000479795
MVCLRLPGGSCMAVLTVTLMVLSSPLALAGDTRPRFLEYSTSECHFFNGTERVRYLDRYFHNQEENVRFDSDVGEFRAVTELGRPDAEYWNSQKDLLEQKRGRVDNYCRHNYGVVESFTVQRRVHPQVTVYPAKTQPLQHHNLLVCSVSGFYPGSIEVRWFRNGQEEKAGVVSTGLIQNGDWTFQTLVMLETVPRSGEVYTCQVEHPSVTSPLTVEWSARSESAQSKMLSGVGGFVLGLLFLGAGLFIYFRNQKGHSGLQPTGFLS

SEQ ID NO: 48798 - protein, 266 aa, Homo sapiens
  Payload ID: 9778
  Gene Symbol: HLA-DRB3
  Gene Name: major histocompatibility complex, class II, DR beta 3
  ENSP ID: ENSP00000480138
MVCLRLPGGSCMAVLTVTLMVLSSPLALAGDTRPRFLEYSTSECHFFNGTERVRYLDRYFHNQEENVRFDSDVGEFRAVTELGRPDAEYWNSQKDLLEQKRGRVDNYCRHNYGVVESFTVQRRVHPQVTVYPAKTQPLQHHNLLVCSVSGFYPGSIEVRWFRNGQEEKAGVVSTGLIQNGDWTFQTLVMLETVPRSGEVYTCQVEHPSVTSALTVEWRARSESAQSKMLSGVGGFVLGLLFLGAGLFIYFRNQKGHSGLQPTGFLS

SEQ ID NO: 48799 - protein, 266 aa, Homo sapiens
  Payload ID: 9778
  Gene Symbol: HLA-DRB3
  Gene Name: major histocompatibility complex, class II, DR beta 3
  ENSP ID: ENSP00000482007
MVCLRLPGGSCMAVLTVTLMVLSSPLALAGDTRPRFLEYSTSECHFFNGTERVRYLDRYFHNQEENVRFDSDVGEYRAVRELGRPDAEYWNSQKDLLEQKRGQVDNYCRHNYGVGESFTVQRRVHPQVTVYPAKTQPLQHHNLLVCSVSGFYPGSIEVRWFRNGQEEKAGVVSTGLIQNGDWTFQTLVMLETVPRSGEVYTCQVEHPSVTSPLTVEWSARSESAQSKMLSGVGGFVLGLLFLGAGLFIYFRNQKGHSGLQPTGFLS

SEQ ID NO: 48800 - protein, 266 aa, Homo sapiens
  Payload ID: 9778
  Gene Symbol: HLA-DRB3
  Gene Name: major histocompatibility complex, class II, DR beta 3
  ENSP ID: ENSP00000483060
MVCLRLPGGSCMAVLTVTLMVLSSPLALAGDTRPRFLELRKSECHFFNGTERVRYLDRYFHNQEEFLRFDSDVGEYRAVTELGRPVAESWNSQKDLLEQKRGRVDNYCRHNYGVGESFTVQRRVHPQVTVYPAKTQPLQHHNLLVCSVSGFYPGSIEVRWFRNGQEEKAGVVSTGLIQNGDWTFQTLVMLETVPRSGEVYTCQVEHPSVTSALTVEWRARSESAQSKMLSGVGGFVLGLLFLGAGLFIYFRNQKGHSGLQPTGFLS

SEQ ID NO: 48801 - protein, 266 aa, Homo sapiens
  Payload ID: 9779
  Gene Symbol: HLA-DRB4
  Gene Name: major histocompatibility complex, class II, DR beta 4
  ENSP ID: ENSP00000410046
MVCLKLPGGSCMAALTVTLTVLSSPLALAGDTQPRFLEQAKCECHFLNGTERVWNLIRYIYNQEEYARYNSDLGEYQAVTELGRPDAEYWNSQKDLLERRRAEVDTYCRYNYGVVESFTVQRRVQPKVTVYPSKTQPLQHHNLLVCSVNGFYPGSIEVRWFRNSQEEKAGVVSTGLIQNGDWTFQTLVMLETVPRSGEVYTCQVEHPSMMSPLTVQWSARSESAQSKMLSGVGGFVLGLLFLGTGLFIYFRNQKGHSGLQPTGLLS

SEQ ID NO: 48802 - protein, 266 aa, Homo sapiens; identical to SEQ ID NO: 38711
  Payload ID: 9779
  Gene Symbol: HLA-DRB4
  Gene Name: major histocompatibility complex, class II, DR beta 4
  Uniprot ID: P13762
  ENSP ID: ENSP00000410857

SEQ ID NO: 48803 - protein, 263 aa, Homo sapiens
  Payload ID: 9779
  Gene Symbol: HLA-DRB4
  Gene Name: major histocompatibility complex, class II, DR beta 4
  ENSP ID: ENSP00000477914
MVCLKLPGGSCMAALTVTLMVLSSPLALAGDTQPRFLEQAKSECHFFNGTERYLRYFYNQEEYVRFNSDMGEFRAVTELGRPDAEYWNSQKDLLERRRAEVDTYCRYNYGVVESFTVQRRVQPKVTVYPSKTQPLQHHNLLVCSVNGFYPGSIEVRWFRNSQEEKAGVVSTGLIQNGDWTFQTLVMLETVPRSGEVYTCQVEHPSMMSPLTVQWSARSESAQSKMLSGVGGFVLGLLFLGTGLFIYFRNQKGHSGLQPTGLLS

SEQ ID NO: 48804 - protein, 266 aa, Homo sapiens
  Payload ID: 9779
  Gene Symbol: HLA-DRB4
  Gene Name: major histocompatibility complex, class II, DR beta 4
  ENSP ID: ENSP00000478963
MVCLKLPGGSCMAALTVTLMVLSSPLALAGDTQPRFLWQGKYKCHFFNGTERVQFLERLFYNQEEFVRFDSDVGEYRAVTELGRPDAEYWNSQKDLLERRRAEVDTYCRYNYGVVESFTVQRRGEPKVTVYPSKTQPLQHHNLLVCSVNGFYPGSIEVRWFRNSQEEKAGVVSTGLIQNGDWTFQTLVMLETVPRSGEVYTCQVEHPSMMSPLTVQWSARSESAQSKMLSGVGGFVLGLLFLGTGLFIYFRNQKGHSGLQPTGLLS

SEQ ID NO: 48805 - protein, 266 aa, Homo sapiens
  Payload ID: 9780
  Gene Symbol: HLA-DRB5
  Gene Name: major histocompatibility complex, class II, DR beta 5
  Uniprot ID: Q30154
  ENSP ID: ENSP00000364114
MVCLKLPGGSYMAKLTVTLMVLSSPLALAGDTRPRFLQQDKYECHFFNGTERVRFLHRDIYNQEEDLRFDSDVGEYRAVTELGRPDAEYWNSQKDFLEDRRAAVDTYCRHNYGVGESFTVQRRVEPKVTVYPARTQTLQHHNLLVCSVNGFYPGSIEVRWFRNSQEEKAGVVSTGLIQNGDWTFQTLVMLETVPRSGEVYTCQVEHPSVTSPLTVEWRAQSESAQSKMLSGVGGFVLGLLFLGAGLFIYFKNQKGHSGLHPTGLVS

SEQ ID NO: 48806 - protein, 249 aa, Homo sapiens
  Payload ID: 9781
  Gene Symbol: MR1
  Gene Name: major histocompatibility complex, class I-related
  Uniprot ID: Q95460
  ENSP ID: ENSP00000282990
MGELMAFLLPLIIVLMVKHSDSRTHSLRYFRLGVSDPIHGVPEFISVGYVDSHPITTYDSVTRQKEPRAPWMAENLAPDHWERYTQLLRGWQQMFKVELKRLQRHYNHSGSHTYQRMIGCELLEDGSTTGFLQYAYDGQDFLIFNKDTLSWLAVDNVAHTIKQAWEANQHELLYQKNWLEEECIAWLKRFLEYGKDTLQRTESETIPLVMKAVSGSIVLVIVLAGVGVLVWRRRPREQNGAIYLPTPDR

SEQ ID NO: 48807 - protein, 296 aa, Homo sapiens
  Payload ID: 9781
  Gene Symbol: MR1
  Gene Name: major histocompatibility complex, class I-related
  Uniprot ID: Q95460
  ENSP ID: ENSP00000356551
MGELMAFLLPLIIVLMVKHSDSRTHSLRYFRLGVSDPIHGVPEFISVGYVDSHPITTYDSVTRQKEPRAPWMAENLAPDHWERYTQLLRGWQQMFKVELKRLQRHYNHSDNVAHTIKQAWEANQHELLYQKNWLEEECIAWLKRFLEYGKDTLQRTEPPLVRVNRKETFPGVTALFCKAHGFYPPEIYMTWMKNGEEIVQEIDYGDILPSGDGTYQAWASIELDPQSSNLYSCHVEHCGVHMVLQVPQESETIPLVMKAVSGSIVLVIVLAGVGVLVWRRRPREQNGAIYLPTPDR

SEQ ID NO: 48808 - protein, 341 aa, Homo sapiens
  Payload ID: 9781
  Gene Symbol: MR1
  Gene Name: major histocompatibility complex, class I-related
  Uniprot ID: Q95460
  ENSP ID: ENSP00000356552
MGELMAFLLPLIIVLMVKHSDSRTHSLRYFRLGVSDPIHGVPEFISVGYVDSHPITTYDSVTRQKEPRAPWMAENLAPDHWERYTQLLRGWQQMFKVELKRLQRHYNHSGSHTYQRMIGCELLEDGSTTGFLQYAYDGQDFLIFNKDTLSWLAVDNVAHTIKQAWEANQHELLYQKNWLEEECIAWLKRFLEYGKDTLQRTEPPLVRVNRKETFPGVTALFCKAHGFYPPEIYMTWMKNGEEIVQEIDYGDILPSGDGTYQAWASIELDPQSSNLYSCHVEHCGVHMVLQVPQESETIPLVMKAVSGSIVLVIVLAGVGVLVWRRRPREQNGAIYLPTPDR

SEQ ID NO: 48809 - protein, 214 aa, Homo sapiens
  Payload ID: 9781
  Gene Symbol: MR1
  Gene Name: major histocompatibility complex, class I-related
  Uniprot ID: Q95460
  ENSP ID: ENSP00000388504
MGELMAFLLPLIIVLMVKHSDSRTHSLRYFRLGVSDPIHGVPEFISVGYVDSHPITTYDSVTRQKEPRAPWMAENLAPDHWERYTQLLRGWQQMFKVELKRLQRHYNHSGSHTYQRMIGCELLEDGSTTGFLQYAYDGQDFLIFNKDTLSWLAVDNVAHTIKQAWEANQHELLYQKNWLEEECIAWLKRFLEYGKDTLQRTEQNGAIYLPTPDR

SEQ ID NO: 48810 - protein, 341 aa, Homo sapiens; identical to SEQ ID NO: 48808
  Payload ID: 9781
  Gene Symbol: MR1
  Gene Name: major histocompatibility complex, class I-related
  Uniprot ID: Q95460
  ENSP ID: ENSP00000477563

SEQ ID NO: 48811 - protein, 249 aa, Homo sapiens; identical to SEQ ID NO: 48806
  Payload ID: 9781
  Gene Symbol: MR1
  Gene Name: major histocompatibility complex, class I-related
  Uniprot ID: Q95460
  ENSP ID: ENSP00000478976

SEQ ID NO: 48812 - protein, 263 aa, Homo sapiens
  Payload ID: 9782
  Gene Symbol: MIP
  Gene Name: major intrinsic protein of lens fiber
  Uniprot ID: P30301
  ENSP ID: ENSP00000257979
MWELRSASFWRAIFAEFFATLFYVFFGLGSSLRWAPGPLHVLQVAMAFGLALATLVQSVGHISGAHVNPAVTFAFLVGSQMSLLRAFCYMAAQLLGAVAGAAVLYSVTPPAVRGNLALNTLHPAVSVGQATTVEIFLTLQFVLCIFATYDERRNGQLGSVALAVGFSLALGHLFGMYYTGAGMNPARSFAPAILTGNFTNHWVYWVGPIIGGGLGSLLYDFLLFPRLKSISERLSVLKGAKPDVSNGQPEVTGEPVELNTQAL

SEQ ID NO: 48813 - protein, 893 aa, Homo sapiens
  Payload ID: 9783
  Gene Symbol: MVP
  Gene Name: major vault protein
  Uniprot ID: Q14764
  ENSP ID: ENSP00000349977
MATEEFIIRIPPYHYIHVLDQNSNVSRVEVGPKTYIRQDNERVLFAPMRMVTVPPRHYCTVANPVSRDAQGLVLFDVTGQVRLRHADLEIRLAQDPFPLYPGEVLEKDITPLQVVLPNTALHLKALLDFEDKDGDKVVAGDEWLFEGPGTYIPRKEVEVVEIIQATIIRQNQALRLRARKECWDRDGKERVTGEEWLVTTVGAYLPAVFEEVLDLVDAVILTEKTALHLRARRNFRDFRGVSRRTGEEWLVTVQDTEAHVPDVHEEVLGVVPITTLGPHNYCVILDPVGPDGKNQLGQKRVVKGEKSFFLQPGEQLEQGIQDVYVLSEQQGLLLRALQPLEEGEDEEKVSHQAGDHWLIRGPLEYVPSAKVEVVEERQAIPLDENEGIYVQDVKTGKVRAVIGSTYMLTQDEVLWEKELPPGVEELLNKGQDPLADRGEKDTAKSLQPLAPRNKTRVVSYRVPHNAAVQVYDYREKRARVVFGPELVSLGPEEQFTVLSLSAGRPKRPHARRALCLLLGPDFFTDVITIETADHARLQLQLAYNWHFEVNDRKDPQETAKLFSVPDFVGDACKAIASRVRGAVASVTFDDFHKNSARIIRTAVFGFETSEAKGPDGMALPRPRDQAVFPQNGLVVSSVDVQSVEPVDQRTRDALQRSVQLAIEITTNSQEAAAKHEAQRLEQEARGRLERQKILDQSEAEKARKELLELEALSMAVESTGTAKAEAESRAEAARIEGEGSVLQAKLKAQALAIETEAELQRVQKVRELELVYARAQLELEVSKAQQLAEVEVKKFKQMTEAIGPSTIRDLAVAGPEMQVKLLQSLGLKSTLITDGSTPINLFNTAFGLLGMGPEGQPLGRRVASGPSPGEGISPQSAQAPQAPGDNHVVPVLR

SEQ ID NO: 48814 - protein, 893 aa, Homo sapiens; identical to SEQ ID NO: 48813
  Payload ID: 9783
  Gene Symbol: MVP
  Gene Name: major vault protein
  Uniprot ID: Q14764
  ENSP ID: ENSP00000378760

SEQ ID NO: 48815 - protein, 42 aa, Homo sapiens
  Payload ID: 9783
  Gene Symbol: MVP
  Gene Name: major vault protein
  ENSP ID: ENSP00000454819
MATEEFIIRIPPYHYIHVLDQNSNVSRVEVGPKTYIRQDNER

SEQ ID NO: 48816 - protein, 144 aa, Homo sapiens
  Payload ID: 9783
  Gene Symbol: MVP
  Gene Name: major vault protein
  ENSP ID: ENSP00000454825
MATEEFIIRIPPYHYIHVLDQNSNVSRVEVGPKTYIRQDNERVLFAPMRMVTVPPRHYCTVANPVSRDAQGLVLFDVTGQVRLRHADLEIRLAQDPFPLYPGEVLEKAIPLDENEGIYVQDVKTGKVRAVIGSTYMLTQDEVLW

SEQ ID NO: 48817 - protein, 94 aa, Homo sapiens
  Payload ID: 9783
  Gene Symbol: MVP
  Gene Name: major vault protein
  ENSP ID: ENSP00000455186
MATEEFIIRIPPYHYIHVLDQNSNVSRVEVGPKTYIRQDNERVLFAPMRMVTVPPRHYCTVANPVSRDAQGLVLFDVTGQVRLRHADLEIRLAQ

SEQ ID NO: 48818 - protein, 39 aa, Homo sapiens
  Payload ID: 9783
  Gene Symbol: MVP
  Gene Name: major vault protein
  ENSP ID: ENSP00000455532
MATEEFIIRIPPYHYIHVLDQNSNVSRVECPAALGRSGW

SEQ ID NO: 48819 - protein, 81 aa, Homo sapiens
  Payload ID: 9783
  Gene Symbol: MVP
  Gene Name: major vault protein
  ENSP ID: ENSP00000455741
MATEEFIIRIPPYHYIHVLDQNSNVSRVEVGPKTYIRQDNERFWIWWTPSSLRKRQPCTSGLGGTSGTSGECPAALGRSGW

SEQ ID NO: 48820 - protein, 220 aa, Homo sapiens
  Payload ID: 9783
  Gene Symbol: MVP
  Gene Name: major vault protein
  ENSP ID: ENSP00000455819
MATEEFIIRIPPYHYIHVLDQNSNVSRVEVGPKTYIRQDNERVLFAPMRMVTVPPRHYCTVANPVSRDAQGLVLFDVTGQVRLRHADLEIRLAQDPFPLYPGEVLEKDITPLQVVLPNTALHLKALLDFEDKDGDKVVAGDEWLFEGPGTYIPRKEVEVVEIIQATIIRQNQALRLRARKECWDRDGKERVTGEEWLVTTVGAYLPAVFEEVLDLVDAVI

SEQ ID NO: 48821 - protein, 148 aa, Homo sapiens
  Payload ID: 9783
  Gene Symbol: MVP
  Gene Name: major vault protein
  ENSP ID: ENSP00000456291
MATEEFIIRIPPYHYIHVLDQNSNVSRVEVGPKTYIRQDNERVLFAPMRMVTVPPRHYCTVANPVSRDAQGLVLFDVTGQVRLRHADLEIRLAQDPFPLYPGEVLEKDITPLQVVLPNTALHLKALLDFEDKDGDKVVAGDEWLFEGP

SEQ ID NO: 48822 - protein, 107 aa, Homo sapiens
  Payload ID: 9783
  Gene Symbol: MVP
  Gene Name: major vault protein
  ENSP ID: ENSP00000457685
MATEEFIIRIPPYHYIHVLDQNSNVSRVEVGPKTYIRQDNERVLFAPMRMVTVPPRHYCTVANPVSRDAQGLVLFDVTGQVRLRHADLEIRLAQDPFPLYPGEVLEK

SEQ ID NO: 48823 - protein, 57 aa, Homo sapiens
  Payload ID: 9783
  Gene Symbol: MVP
  Gene Name: major vault protein
  ENSP ID: ENSP00000457734
MATEEFIIRIPPYHYIHVLDQNSNVSRVEVGPKTYIRQDNERTSHPCRWFCPTLPSI

SEQ ID NO: 48824 - protein, 61 aa, Homo sapiens
  Payload ID: 9783
  Gene Symbol: MVP
  Gene Name: major vault protein
  ENSP ID: ENSP00000458583
  MOD_RES (1)..(1): Any amino acid
XGDEWLFEGPGTYIPRKEVEVVEIIQATIIRQNQALRLRARKECWDRDGKERVTGGVTKGR

SEQ ID NO: 48825 - protein, 39 aa, Homo sapiens; identical to SEQ ID NO: 48818
  Payload ID: 9783
  Gene Symbol: MVP
  Gene Name: major vault protein
  ENSP ID: ENSP00000486166

SEQ ID NO: 48826 - protein, 300 aa, Homo sapiens
  Payload ID: 9784
  Gene Symbol: MAK16
  Gene Name: MAK16 homolog
  Uniprot ID: Q9BXY0
  ENSP ID: ENSP00000353246
MQSDDVIWDTLGNKQFCSFKIRTKTQSFCRNEYSLTGLCNRSSCPLANSQYATIKEEKGQCYLYMKVIERAAFPRRLWERVRLSKNYEKALEQIDENLIYWPRFIRHKCKQRFTKITQYLIRIRKLTLKRQRKLVPLSKKVERREKRREEKALIAAQLDNAIEKELLERLKQDTYGDIYNFPIHAFDKALEQQEAESDSSDTEEKDDDDDDEEDVGKREFVEDGEVDESDISDFEDMDKLDASSDEDQDGKSSSEEEEEKALSAKHKGKMPLRGPLQRKRAYVEIEYEQETEPVAKAKTT

SEQ ID NO: 48827 - protein, 137 aa, Homo sapiens
  Payload ID: 9784
  Gene Symbol: MAK16
  Gene Name: MAK16 homolog
  ENSP ID: ENSP00000430403
  MOD_RES (1)..(1): Any amino acid
XDTMQSDDVIWDTLGNKQFCSFKIRTKTQSFCRNEYSLTGLCNRSSCPLANSQYATIKEEKGQCYLYMKVIERAAFPRRLWERVRLSKNYEKALEQIDENLIYWPRFIRHKCKQRFTKITQYLIRIRKLTLKRQKRH

SEQ ID NO: 48828 - protein, 482 aa, Homo sapiens
  Payload ID: 9785
  Gene Symbol: MKRN1
  Gene Name: makorin ring finger protein 1
  Uniprot ID: Q9UHC7
  ENSP ID: ENSP00000255977
MAEAATPGTTATTSGAGAAAATAAAASPTPIPTVTAPSLGAGGGGGGSDGSGGGWTKQVTCRYFMHGVCKEGDNCRYSHDLSDSPYSVVCKYFQRGYCIYGDRCRYEHSKPLKQEEATATELTTKSSLAASSSLSSIVGPLVEMNTGEAESRNSNFATVGAGSEDWVNAIEFVPGQPYCGRTAPSCTEAPLQGSVTKEESEKEQTAVETKKQLCPYAAVGECRYGENCVYLHGDSCDMCGLQVLHPMDAAQRSQHIKSCIEAHEKDMELSFAVQRSKDMVCGICMEVVYEKANPSERRFGILSNCNHTYCLKCIRKWRSAKQFESKIIKSCPECRITSNFVIPSEYWVEEKEEKQKLILKYKEAMSNKACRYFDEGRGSCPFGGNCFYKHAYPDGRREEPQRQKVGTSSRYRAQRRNHFWELIEERENSNPFDNDEEEVVTFELGEMLLMLLAAGGDDELTDSEDEWDLFHDELEDFYDLDL

SEQ ID NO: 48829 - protein, 329 aa, Homo sapiens
  Payload ID: 9785
  Gene Symbol: MKRN1
  Gene Name: makorin ring finger protein 1
  Uniprot ID: Q9UHC7
  ENSP ID: ENSP00000416369
MAEAATPGTTATTSGAGAAAATAAAASPTPIPTVTAPSLGAGGGGGGSDGSGGGWTKQVTCRYFMHGVCKEGDNCRYSHDLSDSPYSVVCKYFQRGYCIYGDRCRYEHSKPLKQEEATATELTTKSSLAASSSLSSIVGPLVEMNTGEAESRNSNFATVGAGSEDWVNAIEFVPGQPYCGRTAPSCTEAPLQGSVTKEESEKEQTAVETKKQLCPYAAVGECRYGENCVYLHGDSCDMCGLQVLHPMDAAQRSQHIKSCIEAHEKDMELSFAVQRSKDMVCGICMEVVYEKANPSERRFGILSNCNHTYCLKCIRKWRSAKQFESKIIK

SEQ ID NO: 48830 - protein, 112 aa, Homo sapiens
  Payload ID: 9785
  Gene Symbol: MKRN1
  Gene Name: makorin ring finger protein 1
  ENSP ID: ENSP00000417346
LFPRSCPECRITSNFVIPTTRRAGILMKDVGAAHLEGTVFTSMRTLMAVERSHRDRKWEHQADTGPNEGTTSGNSLRKERTATPLTTMKKRLSPLSWARCCLCFWLQVGTTN

SEQ ID NO: 48831 - protein, 175 aa, Homo sapiens
  Payload ID: 9785
  Gene Symbol: MKRN1
  Gene Name: makorin ring finger protein 1
  ENSP ID: ENSP00000417640
MAEAATPGTTATTSGAGAAAATAAAASPTPIPTVTAPSLGAGGGGGGSDGSGGGWTKQVTCRYFMHGVCKEGDNCRYSHDLSDSPYSVVCKYFQRGYCIYGDRCSRALRPMRRTWSSHLPCSAARTWCVGSAWRWSMRKPTPVSAASGSSPTATTPTVSSAFASGGVLSNLRARS

SEQ ID NO: 48832 - protein, 418 aa, Homo sapiens
  Payload ID: 9785
  Gene Symbol: MKRN1
  Gene Name: makorin ring finger protein 1
  Uniprot ID: Q9UHC7
  ENSP ID: ENSP00000417863
MHGVCKEGDNCRYSHDLSDSPYSVVCKYFQRGYCIYGDRCRYEHSKPLKQEEATATELTTKSSLAASSSLSSIVGPLVEMNTGEAESRNSNFATVGAGSEDWVNAIEFVPGQPYCGRTAPSCTEAPLQGSVTKEESEKEQTAVETKKQLCPYAAVGECRYGENCVYLHGDSCDMCGLQVLHPMDAAQRSQHIKSCIEAHEKDMELSFAVQRSKDMVCGICMEVVYEKANPSERRFGILSNCNHTYCLKCIRKWRSAKQFESKIIKSCPECRITSNFVIPSEYWVEEKEEKQKLILKYKEAMSNKACRYFDEGRGSCPFGGNCFYKHAYPDGRREEPQRQKVGTSSRYRAQRRNHFWELIEERENSNPFDNDEEEVVTFELGEMLLMLLAAGGDDELTDSEDEWDLFHDELEDFYDLDL

SEQ ID NO: 48833 - protein, 93 aa, Homo sapiens
  Payload ID: 9785
  Gene Symbol: MKRN1
  Gene Name: makorin ring finger protein 1
  ENSP ID: ENSP00000417907
MAEAATPGTTATTSGAGAAAATAAAASPTPIPTVTAPSLGAGGGGGGSDGSGGGWTKQVTCRRSLSGVILVHCNLWAPPNPLRVQAILPQPPK

SEQ ID NO: 48834 - protein, 165 aa, Homo sapiens
  Payload ID: 9785
  Gene Symbol: MKRN1
  Gene Name: makorin ring finger protein 1
  ENSP ID: ENSP00000418588
MHGVCKEGDNCRYSHDLSDSPYSVVCKYFQRGYCIYGDRCRYEHSKPLKQEEATATELTTKSSLAASSSLSSIVGPLVEMNTGEAESRNSNFATVGAGSEDWVNAIEFVPGQPYCGRTAPSCTEAPLQGSVTKEESEKEQTAVETKKQLCPYAAVGECRYGENCV

SEQ ID NO: 48835 - protein, 102 aa, Homo sapiens
  Payload ID: 9785
  Gene Symbol: MKRN1
  Gene Name: makorin ring finger protein 1
  ENSP ID: ENSP00000418620
MAQVFTEGKLNLGYFMHGVCKEGDNCRYSHDLSDSPYSVVCKYFQRGYCIYGDRCRYEHSKPLKQEEATATELTTKSSLAASSSLSSIVGPLVEMNTGEAES

SEQ ID NO: 48836 - protein, 193 aa, Homo sapiens
  Payload ID: 9785
  Gene Symbol: MKRN1
  Gene Name: makorin ring finger protein 1
  ENSP ID: ENSP00000418864
MHGVCKEGDNCRYSHDLSDSPYSVVCKYFQRGYCIYGDRCRYEHSKPLKQEEATATELTTKSSLAASSSLSSIVGPLVEMNTGEAESRNSNFATVGAGSEDWVNAIEFVPGQPYCGRTAPSCTEAPLQGSVTKEESEKEQTAVETKKQLCPYAAVGECRYGENCVYLHGDSCDMCGLQVLHPMDAAQRSQHIK

SEQ ID NO: 48837 - protein, 39 aa, Homo sapiens
  Payload ID: 9785
  Gene Symbol: MKRN1
  Gene Name: makorin ring finger protein 1
  ENSP ID: ENSP00000419259
WTKQVTCRRSLSGVILVHCNLWAPPNPLRVQAILPQPPK

SEQ ID NO: 48838 - protein, 108 aa, Homo sapiens
  Payload ID: 9785
  Gene Symbol: MKRN1
  Gene Name: makorin ring finger protein 1
  ENSP ID: ENSP00000419695
MAEAATPGTTATTSGAGAAAATAAAASPTPIPTVTAPSLGAGGGGGGSDGSGGGWTKQVTCRWSLCRPSWSAVARSRLTTTSASWVQGILVPQPSEKLGLQVFYAWGL

SEQ ID NO: 48839 - protein, 136 aa, Homo sapiens
  Payload ID: 9785
  Gene Symbol: MKRN1
  Gene Name: makorin ring finger protein 1
  ENSP ID: ENSP00000419843
MHGVCKEGDNCRYSHDLSDSPYSVVCKYFQRGYCIYGDRCRYEHSKPLKQEEATATELTTKSSLAASSSLSSIVGPLVEMNTGEAESRNSNFATVGAGSEDWVNAIEFVPGQPYCGRTAPSCTEAPLQGSVTKEES

SEQ ID NO: 48840 - protein, 111 aa, Homo sapiens
  Payload ID: 9785
  Gene Symbol: MKRN1
  Gene Name: makorin ring finger protein 1
  ENSP ID: ENSP00000419894
MHGVCKEGDNCRYSHDLSDSPYSVVCKYFQRGYCIYGDRCSRALRPMRRTWSSHLPCSAARTWCVGSAWRWSMRKPTPVSAASGSSPTATTPTVSSAFASGGVLSNLRARS

SEQ ID NO: 48841 - protein, 416 aa, Homo sapiens
  Payload ID: 9786
  Gene Symbol: MKRN2
  Gene Name: makorin ring finger protein 2
  Uniprot ID: Q9H000
  ENSP ID: ENSP00000170447
MSTKQITCRYFMHGVCREGSQCLFSHDLANSKPSTICKYYQKGYCAYGTRCRYDHTRPSAAAGGAVGTMAHSVPSPAFHSPHPPSEVTASIVKTNSHEPGKREKRTLVLRDRNLSGMAERKTQPSMVSNPGSCSDPQPSPEMKPHSYLDAIRSGLDDVEASSSYSNEQQLCPYAAAGECRFGDACVYLHGEVCEICRLQVLHPFDPEQRKAHEKICMLTFEHEMEKAFAFQASQDKVCSICMEVILEKASASERRFGILSNCNHTYCLSCIRQWRCAKQFENPIIKSCPECRVISEFVIPSVYWVEDQNKKNELIEAFKQGMGKKACKYFEQGKGTCPFGSKCLYRHAYPDGRLAEPEKPRKQLSSQGTVRFFNSVRLWDFIENRESRHVPNNEDVDMTELGDLFMHLSGVESSEP

SEQ ID NO: 48842 - protein, 373 aa, Homo sapiens
  Payload ID: 9786
  Gene Symbol: MKRN2
  Gene Name: makorin ring finger protein 2
  Uniprot ID: Q9H000
  ENSP ID: ENSP00000396340
MSTKQITCRYDHTRPSAAAGGAVGTMAHSVPSPAFHSPHPPSEVTASIVKTNSHEPGKREKRTLVLRDRNLSGMAERKTQPSMVSNPGSCSDPQPSPEMKPHSYLDAIRSGLDDVEASSSYSNEQQLCPYAAAGECRFGDACVYLHGEVCEICRLQVLHPFDPEQRKAHEKICMLTFEHEMEKAFAFQASQDKVCSICMEVILEKASASERRFGILSNCNHTYCLSCIRQWRCAKQFENPIIKSCPECRVISEFVIPSVYWVEDQNKKNELIEAFKQGMGKKACKYFEQGKGTCPFGSKCLYRHAYPDGRLAEPEKPRKQLSSQGTVRFFNSVRLWDFIENRESRHVPNNEDVDMTELGDLFMHLSGVESSEP

SEQ ID NO: 48843 - protein, 414 aa, Homo sapiens
  Payload ID: 9786
  Gene Symbol: MKRN2
  Gene Name: makorin ring finger protein 2
  ENSP ID: ENSP00000397983
MSTKQITCRYFMHGVCREGSQCLFSHDLANSKPSTICKYYQKGYCAYGTRYDHTRPSAAAGGAVGTMAHSVPSPAFHSPHPPSEVTASIVKTNSHEPGKREKRTLVLRDRNLSGMAERKTQPSMVSNPGSCSDPQPSPEMKPHSYLDAIRSGLDDVEASSSYSNEQQLCPYAAAGECRFGDACVYLHGEVCEICRLQVLHPFDPEQRKAHEKICMLTFEHEMEKAFAFQASQDKVCSICMEVILEKASASERRFGILSNCNHTYCLSCIRQWRCAKQFENPIIKSCPECRVISEFVIPSVYWVEDQNKKNELIEAFKQGMGKKACKYFEQGKGTCPFGSKCLYRHAYPDGRLAEPEKPRKQLSSQGTVRFFNSVRLWDFIENRESRHVPNNEDVDMTELGDLFMHLSGVESSEP

SEQ ID NO: 48844 - protein, 507 aa, Homo sapiens
  Payload ID: 9787
  Gene Symbol: MKRN3
  Gene Name: makorin ring finger protein 3
  Uniprot ID: Q13064
  ENSP ID: ENSP00000313881
MEEPAAPSEAHEAAGAQAGAEAAREGVSGPDLPVCEPSGESAAPDSALPHAARGWAPFPVAPVPAHLRRGGLRPAPASGGGAWPSPLPSRSSGIWTKQIICRYYIHGQCKEGENCRYSHDLSGRKMATEGGVSPPGASAGGGPSTAAHIEPPTQEVAEAPPAASSLSLPVIGSAAERGFFEAERDNADRGAAGGAGVESWADAIEFVPGQPYRGRWVASAPEAPLQSSETERKQMAVGSGLRFCYYASRGVCFRGESCMYLHGDICDMCGLQTLHPMDAAQREEHMRACIEAHEKDMELSFAVQRGMDKVCGICMEVVYEKANPNDRRFGILSNCNHSFCIRCIRRWRSARQFENRIVKSCPQCRVTSELVIPSEFWVEEEEEKQKLIQQYKEAMSNKACRYFAEGRGNCPFGDTCFYKHEYPEGWGDEPPGPGGGSFSAYWHQLVEPVRMGEGNMLYKSIKKELVVLRLASLLFKRFLSLRDELPFSEDQWDLLHYELEEYFNLIL

SEQ ID NO: 48845 - protein, 182 aa, Homo sapiens
  Payload ID: 9787
  Gene Symbol: MKRN3
  Gene Name: makorin ring finger protein 3
  ENSP ID: ENSP00000455368
MEEPAAPSEAHEAAGAQAGAEAAREGVSGPDLPVCEPSGESAAPDSALPHAARGWAPFPVAPVPAHLRRGGLRPAPASGGGAWPSPLPSRSSGIWTKQIICRCIRRWRSARQFENRIVKSCPQCRVTSELVIPSEFWVEEEEEKQKLIQQYKEAMSNKACRFTAVKNLPGVSDETLDFGLLS

SEQ ID NO: 48846 - protein, 105 aa, Homo sapiens
  Payload ID: 9787
  Gene Symbol: MKRN3
  Gene Name: makorin ring finger protein 3
  ENSP ID: ENSP00000456779
MEEPAAPSEAHEAAGAQAGAEAAREGVSGPDLPVCEPSGESAAPDSALPHAARGWAPFPVAPVPAHLRRGGLRPAPASGGGAWPSPLPSRSSGIWTKQIICRDIC

SEQ ID NO: 48847 - protein, 28 aa, Homo sapiens
  Payload ID: 9787
  Gene Symbol: MKRN3
  Gene Name: makorin ring finger protein 3
  ENSP ID: ENSP00000457884
MEEPAAPSEAHEAAGAQVYPQVEKCQTV

SEQ ID NO: 48848 - protein, 97 aa, Homo sapiens
  Payload ID: 9788
  Gene Symbol: MAL
  Gene Name: mal, T-cell differentiation protein
  Uniprot ID: P21145
  ENSP ID: ENSP00000304924
MAPAAATGGSTLPSGFSVFTTLPDLLFIFEFDAAYHCTAALFYLSASVLEALATITMQDGFTYRHYHENIAAVVFSYIATLLYVVHAVFSLIRWKSS

SEQ ID NO: 48849 - protein, 111 aa, Homo sapiens
  Payload ID: 9788
  Gene Symbol: MAL
  Gene Name: mal, T-cell differentiation protein
  Uniprot ID: P21145
  ENSP ID: ENSP00000306568
MAPAAATGGSTLPSGFSVFTTLPDLLFIFEFIFGGLVWILVASSLVPWPLVQGWVMFVSVFCFVATTTLIILYIIGAHGGETSWVTLVFSYIATLLYVVHAVFSLIRWKSS

SEQ ID NO: 48850 - protein, 153 aa, Homo sapiens
  Payload ID: 9788
  Gene Symbol: MAL
  Gene Name: mal, T-cell differentiation protein
  Uniprot ID: P21145
  ENSP ID: ENSP00000310880
MAPAAATGGSTLPSGFSVFTTLPDLLFIFEFIFGGLVWILVASSLVPWPLVQGWVMFVSVFCFVATTTLIILYIIGAHGGETSWVTLDAAYHCTAALFYLSASVLEALATITMQDGFTYRHYHENIAAVVFSYIATLLYVVHAVFSLIRWKSS

SEQ ID NO: 48851 - protein, 55 aa, Homo sapiens
  Payload ID: 9788
  Gene Symbol: MAL
  Gene Name: mal, T-cell differentiation protein
  Uniprot ID: P21145
  ENSP ID: ENSP00000322860
MAPAAATGGSTLPSGFSVFTTLPDLLFIFEFVFSYIATLLYVVHAVFSLIRWKSS

SEQ ID NO: 48852 - protein, 176 aa, Homo sapiens
  Payload ID: 9789
  Gene Symbol: MAL2
  Gene Name: mal, T-cell differentiation protein 2 (gene/pseudogene)
  Uniprot ID: Q969L2
  ENSP ID: ENSP00000479708
MSAGGASVPPPPNPAVSFPPPRVTLPAGPDILRTYSGAFVCLEILFGGLVWILVASSNVPLPLLQGWVMFVSVTAFFFSLLFLGMFLSGMVAQIDANWNFLDFAYHFTVFVFYFGAFLLEAAATSLHDLHCNTTITGQPLLSDNQYNINVAASIFAFMTTACYGCSLGLALRRWRP

SEQ ID NO: 48853 - protein, 108 aa, Homo sapiens
  Payload ID: 9789
  Gene Symbol: MAL2
  Gene Name: mal, T-cell differentiation protein 2 (gene/pseudogene)
  ENSP ID: ENSP00000482729
MFVSVTAFFFSLLFLGMFLSGMVAQIDANWNFLDFAYHFTVFVFYFGAFLLEAAATSLHDLHCNTTITGQPLLSDNQYNINVAASIFAFMTTACYGCSLGLALRRWRP

SEQ ID NO: 48854 - protein, 108 aa, Homo sapiens; identical to SEQ ID NO: 48853
  Payload ID: 9789
  Gene Symbol: MAL2
  Gene Name: mal, T-cell differentiation protein 2 (gene/pseudogene)
  ENSP ID: ENSP00000483044

SEQ ID NO: 48855 - protein, 108 aa, Homo sapiens; identical to SEQ ID NO: 48853
  Payload ID: 9789
  Gene Symbol: MAL2
  Gene Name: mal, T-cell differentiation protein 2 (gene/pseudogene)
  ENSP ID: ENSP00000484544

SEQ ID NO: 48856 - protein, 153 aa, Homo sapiens
  Payload ID: 9790
  Gene Symbol: MALL
  Gene Name: mal, T-cell differentiation protein-like
  Uniprot ID: Q13021
  ENSP ID: ENSP00000272462
MASPDPPATSYAPSDVPSGVALFLTIPFAFFLPELIFGFLVWTMVAATHIVYPLLQGWVMYVSLTSFLISLMFLLSYLFGFYKRFESWRVLDSLYHGTTGILYMSAAVLQVHATIVSEKLLDPRIYYINSAASFFAFIATLLYILHAFSIYYH

SEQ ID NO: 48857 - protein, 120 aa, Homo sapiens
  Payload ID: 9790
  Gene Symbol: MALL
  Gene Name: mal, T-cell differentiation protein-like
  ENSP ID: ENSP00000394792
MASPDPPATSYAPSDVPSGVALFLTIPFAFFLPELGIITQAASVSEPQCVIPAPAAAPLPPMRGFQLLCADIWVLGLDHGSRHPHSIPLAARMGDVCLAHLVSHLLDVPVVLLVWILQKI

SEQ ID NO: 48858 - protein, 55 aa, Homo sapiens
  Payload ID: 9790
  Gene Symbol: MALL
  Gene Name: mal, T-cell differentiation protein-like
  ENSP ID: ENSP00000400518
MASPDPPATSYAPSDVPSGVALFLTIPFAFFLPELFFAFIATLLYILHAFSIYYH

SEQ ID NO: 48859 - protein, 334 aa, Homo sapiens
  Payload ID: 9791
  Gene Symbol: MDH1
  Gene Name: malate dehydrogenase 1, NAD (soluble)
  Uniprot ID: P40925
  ENSP ID: ENSP00000233114
MSEPIRVLVTGAAGQIAYSLLYSIGNGSVFGKDQPIILVLLDITPMMGVLDGVLMELQDCALPLLKDVIATDKEDVAFKDLDVAILVGSMPRREGMERKDLLKANVKIFKSQGAALDKYAKKSVKVIVVGNPANTNCLTASKSAPSIPKENFSCLTRLDHNRAKAQIALKLGVTANDVKNVIIWGNHSSTQYPDVNHAKVKLQGKEVGVYEALKDDSWLKGEFVTTVQQRGAAVIKARKLSSAMSAAKAICDHVRDIWFGTPEGEFVSMGVISDGNSYGVPDDLLYSFPVVIKNKTWKFVEGLPINDFSREKMDLTAKELTEEKESAFEFLSSA

SEQ ID NO: 48860 - protein, 210 aa, Homo sapiens
  Payload ID: 9791
  Gene Symbol: MDH1
  Gene Name: malate dehydrogenase 1, NAD (soluble)
  ENSP ID: ENSP00000386719
MVIVVGNPANTNCLTASKSAPSIPKENFSCLTRLDHNRAKAQIALKLGVTANDVKNVIIWGNHSSTQYPDVNHAKVKLQGKEVGVYEALKDDSWLKGEFVTTVQQRGAAVIKARKLSSAMSAAKAICDHVRDIWFGTPEGEFVSMGVISDGNSYGVPDDLLYSFPVVIKNKTWKFVEGLPINDFSREKMDLTAKELTEEKESAFEFLSSA

SEQ ID NO: 48861 - protein, 169 aa, Homo sapiens
  Payload ID: 9791
  Gene Symbol: MDH1
  Gene Name: malate dehydrogenase 1, NAD (soluble)
  ENSP ID: ENSP00000386743
MIALKLGVTANDVKNVIIWGNHSSTQYPDVNHAKVKLQGKEVGVYEALKDDSWLKGEFVTTVQQRGAAVIKARKLSSAMSAAKAICDHVRDIWFGTPEGEFVSMGVISDGNSYGVPDDLLYSFPVVIKNKTWKFVEGLPINDFSREKMDLTAKELTEEKESAFEFLSSA

SEQ ID NO: 48862 - protein, 119 aa, Homo sapiens
  Payload ID: 9791
  Gene Symbol: MDH1
  Gene Name: malate dehydrogenase 1, NAD (soluble)
  ENSP ID: ENSP00000394504
MMGVLDGVLMELQDCALPLLKDVIATDKEDVAFKDLDVAILVGSMPRREGMERKDLLKANVKIFKSQGAALDKYAKKSVKVIVVGNPANTNCLTASKSAPSIPKENFSCLTRLDHNRAK

SEQ ID NO: 48863 - protein, 67 aa, Homo sapiens
  Payload ID: 9791
  Gene Symbol: MDH1
  Gene Name: malate dehydrogenase 1, NAD (soluble)
  ENSP ID: ENSP00000399004
MQSEPIRVLVTGAAGQIAYSLLYSIGNGSVFGKDQPIILVLLDITPMMGVLDGVLMELQDCALPLLK

SEQ ID NO: 48864 - protein, 87 aa, Homo sapiens
  Payload ID: 9791
  Gene Symbol: MDH1
  Gene Name: malate dehydrogenase 1, NAD (soluble)
  ENSP ID: ENSP00000400937
MRRCSYFPKDVTVFDKDDKSEPIRVLVTGAAGQIAYSLLYSIGNGSVFGKDQMSSQQIKKTLPSKTWMWPFLWAPCQEGKAWREKIY

SEQ ID NO: 48865 - protein, 114 aa, Homo sapiens
  Payload ID: 9791
  Gene Symbol: MDH1
  Gene Name: malate dehydrogenase 1, NAD (soluble)
  ENSP ID: ENSP00000409027
MQSEPIRVLVTGAAGQIAYSLLYSIGNGSVFGKDQPIILVLLDITPMMGVLDGVLMELQDCALPLLKDVIATDKEDVAFKDLDVAILVGSMPRREGMERKDLLKANVKIFKSQG

SEQ ID NO: 48866 - protein, 222 aa, Homo sapiens
  Payload ID: 9791
  Gene Symbol: MDH1
  Gene Name: malate dehydrogenase 1, NAD (soluble)
  ENSP ID: ENSP00000410073
MRRCSYFPKDVTVFDKDDKSEPIRVLVTGAAGQIAYSLLYSIGNGSVFGKDQPIILVLLDITPMMGVLDGVLMELQDCALPLLKDVIATDKEDVAFKDLDVAILVGSMPRREGMERKDLLKANVKIFKSQGAALDKYAKKSVKVIVVGNPANTNCLTASKSAPSIPKENFSCLTRLDHNRAKAQIALKLGVTANDVKNVIIWGNHSSTQYPDVNHAKVKLQG

SEQ ID NO: 48867 - protein, 352 aa, Homo sapiens
  Payload ID: 9791
  Gene Symbol: MDH1
  Gene Name: malate dehydrogenase 1, NAD (soluble)
  Uniprot ID: P40925
  ENSP ID: ENSP00000438144
MRRCSYFPKDVTVFDKDDKSEPIRVLVTGAAGQIAYSLLYSIGNGSVFGKDQPIILVLLDITPMMGVLDGVLMELQDCALPLLKDVIATDKEDVAFKDLDVAILVGSMPRREGMERKDLLKANVKIFKSQGAALDKYAKKSVKVIVVGNPANTNCLTASKSAPSIPKENFSCLTRLDHNRAKAQIALKLGVTANDVKNVIIWGNHSSTQYPDVNHAKVKLQGKEVGVYEALKDDSWLKGEFVTTVQQRGAAVIKARKLSSAMSAAKAICDHVRDIWFGTPEGEFVSMGVISDGNSYGVPDDLLYSFPVVIKNKTWKFVEGLPINDFSREKMDLTAKELTEEKESAFEFLSSA

SEQ ID NO: 48868 - protein, 245 aa, Homo sapiens
  Payload ID: 9791
  Gene Symbol: MDH1
  Gene Name: malate dehydrogenase 1, NAD (soluble)
  Uniprot ID: P40925
  ENSP ID: ENSP00000446395
MPRREGMERKDLLKANVKIFKSQGAALDKYAKKSVKVIVVGNPANTNCLTASKSAPSIPKENFSCLTRLDHNRAKAQIALKLGVTANDVKNVIIWGNHSSTQYPDVNHAKVKLQGKEVGVYEALKDDSWLKGEFVTTVQQRGAAVIKARKLSSAMSAAKAICDHVRDIWFGTPEGEFVSMGVISDGNSYGVPDDLLYSFPVVIKNKTWKFVEGLPINDFSREKMDLTAKELTEEKESAFEFLSSA

SEQ ID NO: 48869 - protein, 518 aa, Homo sapiens
  Payload ID: 9792
  Gene Symbol: MDH1B
  Gene Name: malate dehydrogenase 1B, NAD (soluble)
  Uniprot ID: Q5I0G3
  ENSP ID: ENSP00000363533
MAKFVIAGRADCPYYAKTELVADYLQKNLPDFRIHKITQRPEVWEDWLKDVCEKNKWSHKNSPIIWRELLDRGGKGLLLGGYNEFLEHAQLYYDVTSSMTTELMMVIAQENLGAHIEKEQEEEALKTCINPLQVWITSASAPACYNLIPILTSGEVFGMHTEISITLFDNKQAEEHLKSLVVETQDLASPVLRSVSICTKVEEAFRQAHVIVVLDDSTNKEVFTLEDCLRSRVPLCRLYGYLIEKNAHESVRVIVGGRTFVNLKTVLLMRYAPRIAHNIIAVALGVEGEAKAILARKLKTAPSYIKDVIIWGNISGNNYVDLRKTRVYRYESAIWGPLHYSRPVLNLIFDSEWVKREFVAILKNLTTTGRQFGGILAAHSIATTLKYWYHGSPPGEIVSLGILSEGQFGIPKGIVFSMPVKFENGTWVVLTDLKDVEISEQIMTRMTSDLIQEKLVALGDKIHFQPYQSGHKDLVPDEEKNLAMSDAAEFPNQIPQTTFEKPQSLEFLNEFEGKTVES

SEQ ID NO: 48870 - protein, 517 aa, Homo sapiens
  Payload ID: 9792
  Gene Symbol: MDH1B
  Gene Name: malate dehydrogenase 1B, NAD (soluble)
  Uniprot ID: Q5I0G3
  ENSP ID: ENSP00000389916
MAKFVIAGRADCPYYAKTELVADYLQKNLPDFRIHKITQRPEVWEDWLKDVCEKNKWSHKNSPIIWRELLDRGGKGLLLGGYNEFLEHAQLYYDVTSSMTTELMMVIAQENLGAHIEKEQEEEALKTCINPLQVWITSASAPACYNLIPILTSGEVFGMHTEISITLFDNKQAEEHLKSLVVETQDLASPVLRSVSICTKVEEAFRQAHVIVVLDDSTNKEVFTLEDCLRSRVPLCRLYGYLIEKNAHESVRVIVGGRTFVNLKTVLLMRYAPRIAHNIIAVALGVEGEAKAILARKLKTAPSYIKDVIIWGNISGNNYVDLRKTRVYRYESAIWGPLHYSRPVLNLIFDSEWVKREFVAILKNLTTTGRQFGGILAAHSIATTLKYWYHGSPPGEIVSLGILSEGQFGIPKGIVFSMPVKFENGTWVVLTDLKDVEISEQIMTRMTSDLIQEKLVALGDKIHFQPYQSGHKDLVPDEEKNLAMSDAEFPNQIPQTTFEKPQSLEFLNEFEGKTVES

SEQ ID NO: 48871 - protein, 283 aa, Homo sapiens
  Payload ID: 9792
  Gene Symbol: MDH1B
  Gene Name: malate dehydrogenase 1B, NAD (soluble)
  Uniprot ID: Q5I0G3
  ENSP ID: ENSP00000392464
MAKFVIAGRADCPYYAKTELVADYLQKNLPDFRIHKITQRPEVWEDWLKDVCEKNKWSHKNSPIIWRELLDRGGKGLLLGGYNEFLEHAQLYYDVTSSMTTELMMVIAQENLGAHIEKEQEEEALKTCINPLQVWITSEWVKREFVAILKNLTTTGRQFGGILAAHSIATTLKYWYHGSPPGEIVSLGILSEGQFGIPKGIVFSMPVKFENGTWVVLTDLKDVEISEQIMTRMTSDLIQEKLVALGDKIHFQPYQSDTPRINTLHPSIQSSWHSVLTITIRKR

SEQ ID NO: 48872 - protein, 133 aa, Homo sapiens
  Payload ID: 9792
  Gene Symbol: MDH1B
  Gene Name: malate dehydrogenase 1B, NAD (soluble)
  ENSP ID: ENSP00000403810
MAKFVIAGRADCPYYAKTELVADYLQKNLPDFRIHKITQRPEVWEDWLKDVCEKNKWSHKNSPIIWRELLDRGGKGLLLGGYNEFLEHAQLYYDVTSSMTTELMMVIAQENLGAHIEKEQEEEALKTCINPLQ

SEQ ID NO: 48873 - protein, 420 aa, Homo sapiens
  Payload ID: 9792
  Gene Symbol: MDH1B
  Gene Name: malate dehydrogenase 1B, NAD (soluble)
  ENSP ID: ENSP00000416577
MTTELMMVIAQENLGAHIEKEQEEEALKTCINPLQVWITSASAPACYNLIPILTSGEVFGMHTEISITLFDNKQAEEHLKSLVVETQDLASPVLRSVSICTKVEEAFRQAHVIVVLDDSTNKEVFTLEDCLRSRVPLCRLYGYLIEKNAHESVRVIVGGRTFVNLKTVLLMRYAPRIAHNIIAVALGVEGEAKAILARKLKTAPSYIKDVIIWGNISGNNYVDLRKTRVYRYESAIWGPLHYSRPVLNLIFDSEWVKREFVAILKNLTTTGRQFGGILAAHSIATTLKYWYHGSPPGEIVSLGILSEGQFGIPKGIVFSMPVKFENGTWVVLTDLKDVEISEQIMTRMTSDLIQEKLVALGDKIHFQPYQSGHKDLVPDEEKNLAMSDAAEFPNQIPQTTFEKPQSLEFLNEFEGKTVES

SEQ ID NO: 48874 - protein, 338 aa, Homo sapiens
  Payload ID: 9793
  Gene Symbol: MDH2
  Gene Name: malate dehydrogenase 2, NAD (mitochondrial)
  Uniprot ID: P40926
  ENSP ID: ENSP00000327070
MLSALARPASAALRRSFSTSAQNNAKVAVLGASGGIGQPLSLLLKNSPLVSRLTLYDIAHTPGVAADLSHIETKAAVKGYLGPEQLPDCLKGCDVVVIPAGVPRKPGMTRDDLFNTNATIVATLTAACAQHCPEAMICVIANPVNSTIPITAEVFKKHGVYNPNKIFGVTTLDIVRANTFVAELKGLDPARVNVPVIGGHAGKTIIPLISQCTPKVDFPQDQLTALTGRIQEAGTEVVKAKAGAGSATLSMAYAGARFVFSLVDAMNGKEGVVECSFVKSQETECTYFSTPLLLGKKGIEKNLGIGKVSSFEEKMISDAIPELKASIKKGEDFVKTLK

SEQ ID NO: 48875 - protein, 296 aa, Homo sapiens
  Payload ID: 9793
  Gene Symbol: MDH2
  Gene Name: malate dehydrogenase 2, NAD (mitochondrial)
  Uniprot ID: P40926
  ENSP ID: ENSP00000408649
MLSALARPASAALRRSFSTSAQNNAKVAVLGASGGIGQPLSLLLKNSPLVSRLTLYDIAHTPGVAADLSHIETKAAVKGYLGPEQLPDCLKGCDVVVIPAGVPRKPGMTRDDLFNTNATIVATLTAACAQHCPEAMICVIANPGLDPARVNVPVIGGHAGKTIIPLISQCTPKVDFPQDQLTALTGRIQEAGTEVVKAKAGAGSATLSMAYAGARFVFSLVDAMNGKEGVVECSFVKSQETECTYFSTPLLLGKKGIEKNLGIGKVSSFEEKMISDAIPELKASIKKGEDFVKTLK

SEQ ID NO: 48876 - protein, 231 aa, Homo sapiens
  Payload ID: 9793
  Gene Symbol: MDH2
  Gene Name: malate dehydrogenase 2, NAD (mitochondrial)
  ENSP ID: ENSP00000416929
MTRDDLFNTNATIVATLTAACAQHCPEAMICVIANPVNSTIPITAEVFKKHGVYNPNKIFGVTTLDIVRANTFVAELKGLDPARVNVPVIGGHAGKTIIPLISQCTPKVDFPQDQLTALTGRIQEAGTEVVKAKAGAGSATLSMAYAGARFVFSLVDAMNGKEGVVECSFVKSQETECTYFSTPLLLGKKGIEKNLGIGKVSSFEEKMISDAIPELKASIKKGEDFVKTLK

SEQ ID NO: 48877 - protein, 28 aa, Homo sapiens
  Payload ID: 9793
  Gene Symbol: MDH2
  Gene Name: malate dehydrogenase 2, NAD (mitochondrial)
  ENSP ID: ENSP00000475583
MLSALARPASAALRRSFSTSAQRSIALT

SEQ ID NO: 48878 - protein, 623 aa, Homo sapiens
  Payload ID: 9794
  Gene Symbol: MAK
  Gene Name: male germ cell-associated kinase
  Uniprot ID: P20794
  ENSP ID: ENSP00000313021
MNRYTTMRQLGDGTYGSVLMGKSNESGELVAIKRMKRKFYSWDECMNLREVKSLKKLNHANVIKLKEVIRENDHLYFIFEYMKENLYQLMKDRNKLFPESVIRNIMYQILQGLAFIHKHGFFHRDMKPENLLCMGPELVKIADFGLARELRSQPPYTDYVSTRWYRAPEVLLRSSVYSSPIDVWAVGSIMAELYMLRPLFPGTSEVDEIFKICQVLGTPKKSDWPEGYQLASSMNFRFPQCVPINLKTLIPNASNEAIQLMTEMLNWDPKKRPTASQALKHPYFQVGQVLGPSSNHLESKQSLNKQLQPLESKPSLVEVEPKPLPDIIDQVVGQPQPKTSQQPLQPIQPPQNLSVQQPPKQQSQEKPPQTLFPSIVKNMPTKPNGTLSHKSGRRRWGQTIFKSGDSWEELEDYDFGASHSKKPSMGVFKEKRKKDSPFRLPEPVPSGSNHSTGENKSLPAVTSLKSDSELSTAPTSKQYYLKQSRYLPGVNPKKVSLIASGKEINPHTWSNQLFPKSLGPVGAELAFKRSNAGNLGSYATYNQSGYIPSFLKKEVQSAGQRIHLAPLNATASEYTWNTKTGRGQFSGRTYNPTAKNLNIVNRAQPIPSVHGRTDWVAKYGGHR

SEQ ID NO: 48879 - protein, 648 aa, Homo sapiens
  Payload ID: 9794
  Gene Symbol: MAK
  Gene Name: male germ cell-associated kinase
  Uniprot ID: P20794
  ENSP ID: ENSP00000346484
MNRYTTMRQLGDGTYGSVLMGKSNESGELVAIKRMKRKFYSWDECMNLREVKSLKKLNHANVIKLKEVIRENDHLYFIFEYMKENLYQLMKDRNKLFPESVIRNIMYQILQGLAFIHKHGFFHRDMKPENLLCMGPELVKIADFGLARELRSQPPYTDYVSTRWYRAPEVLLRSSVYSSPIDVWAVGSIMAELYMLRPLFPGTSEVDEIFKICQVLGTPKKSDWPEGYQLASSMNFRFPQCVPINLKTLIPNASNEAIQLMTEMLNWDPKKRPTASQALKHPYFQVGQVLGPSSNHLESKQSLNKQLQPLESKPSLVEVEPKPLPDIIDQVVGQPQPKTSQQPLQPIQPPQNLSVQQPPKQQSQEKPPQTLFPSIVKNMPTKPNGTLSHKSGRRRWGQTIFKSGDSWEELEDYDFGASHSKKPSMGVFKEKRKKDSPFRLPEPVPSGSNHSTGENKSLPAVTSLKSDSELSTAPTSKQYYLKQSRYLPGVNPKKVSLIASGKEINPHTWSNQLFPKSLGPVGAELAFKRSNAEESIIKPIEKLSCNETFPEKLEDPQGNLGSYATYNQSGYIPSFLKKEVQSAGQRIHLAPLNATASEYTWNTKTGRGQFSGRTYNPTAKNLNIVNRAQPIPSVHGRTDWVAKYGGHR

SEQ ID NO: 48880 - protein, 583 aa, Homo sapiens
  Payload ID: 9794
  Gene Symbol: MAK
  Gene Name: male germ cell-associated kinase
  Uniprot ID: P20794
  ENSP ID: ENSP00000442221
MNRYTTMRQLGDGTYGSVLMGKSNESGELVAIKRMKRKFYSWDECMNLREVKSLKKLNHANVIKLKEVIRENDHLYFIFEYMKENLYQLMKDRNKLFPESVIRNIMYQILQGLAFIHKHGFFHRDMKPENLLCMGPELVKIADFGLARELRSQPPYTDYVSTRWYRAPEVLLRSSVYSSPIDVWAVGSIMAELYMLRPLFPGTSEVDEIFKICQVLGTPKKSDWPEGYQLASSMNFRFPQCVPINLKTLIPNASNEAIQLMTEMLNWDPKKRPTASQALKHPYFQVGQVLGPSSNHLESKQSLNKQLQPLESKPSLVEVEPKPLPDIIDQVVGQPQPKTSQQPLQPIQPPQNLSVQQPPKQQSQEKPPQTLFPSIVKNMPTKPNGTLSHKSGRRRWGQTIFKSGDSWEELEDYDFGASHSKKPSMGVFKEKRKKDSPFRLPEPVPSGSNHSTGENKSLPAVTSLKSDSELSTAPTSKQYYLKQSRYLPGVNPKKVSLIASGKEINPHTWSNQLFPKSLGPVGAELAFKRSNAEYTWNTKTGRGQFSGRTYNPTAKNLNIVNRAQPIPSVHGRTDWVAKYGGHR

SEQ ID NO: 48881 - protein, 457 aa, Homo sapiens
  Payload ID: 9794
  Gene Symbol: MAK
  Gene Name: male germ cell-associated kinase
  ENSP ID: ENSP00000442250
MNRYTTMRQLGDGTYGSVLMGKSNESGELVAIKRMKRKFYSWDECMNLREVKSLKKLNHANVIKLKEVIRENDHLYFIFEYMKENLYQLMKDRNKLFPESVIRNIMYQILQGLAFIHKHGFFHRDMKPENLLCMGPELVKIADFGLARELRSQPPYTDYVSTRWYRAPEVLLRSSVYSSPIDVWAVGSIMAELYMLRPLFPGTSEVDEIFKICQVLGTPKKSDWPEGYQLASSMNFRFPQCVPINLKTLIPNASNEAIQLMTEMLNWDPKKRPTASQALKHPYFQVGQVLGPSSNHLESKQSLNKQLQPLESKPSLVEVEPKPLPDIIDQVVGQPQPKTSQQPLQPIQPPQNLSVQQPPKQQSQEKPPQTLFPSIVKNMPTKPNGTLSHKSGRRRWGQTIFKSGDSWEELEDYDFGASHSKKPSMGVFKEKRKKDSPFRQQVKMAVISLSAHQFPTL

SEQ ID NO: 48882 - protein, 623 aa, Homo sapiens; identical to SEQ ID NO: 48878
  Payload ID: 9794
  Gene Symbol: MAK
  Gene Name: male germ cell-associated kinase
  Uniprot ID: P20794
  ENSP ID: ENSP00000476067

SEQ ID NO: 48883 - protein, 292 aa, Homo sapiens
  Payload ID: 9795
  Gene Symbol: MLEC
  Gene Name: malectin
  Uniprot ID: Q14165
  ENSP ID: ENSP00000228506
MLGAWAVEGTAVALLRLLLLLLPPAIRGPGLGVAGVAGAAGAGLPESVIWAVNAGGEAHVDVHGIHFRKDPLEGRVGRASDYGMKLPILRSNPEDQILYQTERYNEETFGYEVPIKEEGDYVLVLKFAEVYFAQSQQKVFDVRLNGHVVVKDLDIFDRVGHSTAHDEIIPMSIRKGKLSVQGEVSTFTGKLYIEFVKGYYDNPKVCALYIMAGTVDDVPKLQPHPGLEKKEEEEEEEEYDEGSNLKKQTNKNRVQSGPRTPNPYASDNSSLMFPILVAFGVFIPTLFCLCRL

SEQ ID NO: 48884 - protein, 146 aa, Homo sapiens
  Payload ID: 9795
  Gene Symbol: MLEC
  Gene Name: malectin
  ENSP ID: ENSP00000438950
MKLPILRSNPEDQILYQTERYNEETFGYEVPIKEEGDYVLVLKFAEVYFAQSQQKVFDVRLNGHVVVKDLDIFDRVGHSTAHDEIIPMSIRKGKLSVQGEVSTFTGKLYIEFVKGYYDNPKVCALYIMAGTVDDVPKLQPHPGLEK

SEQ ID NO: 48885 - protein, 217 aa, Homo sapiens
  Payload ID: 9795
  Gene Symbol: MLEC
  Gene Name: malectin
  ENSP ID: ENSP00000440746
MLGAWAVEGTAVALLRLLLLLLPPAIRGPGLGVAGVAGAAGAGLPESVIWAVNAGGEAHVDVHGIHFRKDPLEGRVGRASDYGMKLPILRSNPEDQILYQTERYNEETFGYEVPIKEEGDYVLVLKFAEVYFAQSQQKMYQSFSLIRDWRRKKRKKKKKNMMKGLISKNRPIRTGCSQAPAHPTPMPRTTAASCFPSWWPSESSFQPSSASAGCENK

SEQ ID NO: 48886 - protein, 173 aa, Homo sapiens
  Payload ID: 9795
  Gene Symbol: MLEC
  Gene Name: malectin
  ENSP ID: ENSP00000441247
  MOD_RES (1)..(1): Any amino acid
XNEETFGYEVPIKEEGDYVLVLKFAEVYFAQSQQKVFDVRLNGHVVVKDLDIFDRVGHSTAHDEIIPMSIRKGKLSVQGEVSTFTGKLYIEFVKMYQSFSLIRDWRRKKRKKKKKNMMKGLISKNRPIRTGCSQAPAHPTPMPRTTAASCFPSWWPSESSFQPSSASAGCENK

SEQ ID NO: 48887 - protein, 185 aa, Homo sapiens
  Payload ID: 9796
  Gene Symbol: MEA1
  Gene Name: male-enhanced antigen 1
  Uniprot ID: Q16626
  ENSP ID: ENSP00000244711
MGPERHLSGAPARMATVVLGGDTMGPERIFPNQTEELGHQGPSEGTGDWSSEEPEEEQEETGSGPAGYSYQPLNQDPEQEEVELAPVGDGDVVADIQDRIQALGLHLPDPPLESEDEDEEGATALNNHSSIPMDPEHVELVKRTMAGVSLPAPGVPAWAREISDAQWEDVVQKALQARQASPAWK

SEQ ID NO: 48888 - protein, 614 aa, Homo sapiens
  Payload ID: 9797
  Gene Symbol: MSL1
  Gene Name: male-specific lethal 1 homolog (Drosophila)
  Uniprot ID: Q68DK7
  ENSP ID: ENSP00000381543
MTMRSAVFKAAAAPAGGNPEQRLDYERAAALGGPEDEPGAAEAHFLPRHRKLKEPGPPLASSQGGSPAPSPAGCGGKGRGLLLPAGAAPGQQEESWGGSVPLPCPPPATKQAGIGGEPAAAGAGCSPRPKYQAVLPIQTGSLVAAAKEPTPWAGDKGGAASPAATASDPAGPPPLPLPGPPPLAPTATAGTLAASEGRWKSMRKSPLGGGGGSGASSQAACLKQILLLQLDLIEQQQQQLQAKEKEIEELKSERDTLLARIERMERRMQLVKKDNEKERHKLFQGYETEEREETELSEKIKLECQPELSETSQTLPPKPFSCGRSGKGHKRKSPFGSTERKTPVKKLAPEFSKVKTKTPKHSPIKEEPCGSLSETVCKRELRSQETPEKPRSSVDTPPRLSTPQKGPSTHPKEKAFSSEIEDLPYLSTTEMYLCRWHQPPPSPLPLRESSPKKEETVARCLMPSSVAGETSVLAVPSWRDHSVEPLRDPNPSDLLENLDDSVFSKRHAKLELDEKRRKRWDIQRIREQRILQRLQLRMYKKKGIQESEPEVTSFFPEPDDVESLMITPFLPVVAFGRPLPKLTPQNFELPWLDERSRCRLEIQKKQTPHRTCRK

SEQ ID NO: 48889 - protein, 116 aa, Homo sapiens
  Payload ID: 9797
  Gene Symbol: MSL1
  Gene Name: male-specific lethal 1 homolog (Drosophila)
  ENSP ID: ENSP00000462114
MVVKGCESKHIQGDEMRVWLIGGFSADCGGFCSVPELLARIERMERRMQLVKKDNEKERHKLFQGYETEEREETELSEKIKLECQPELSETSQTLPPKPFSCGRSGKGHKRKSPFG

SEQ ID NO: 48890 - protein, 598 aa, Homo sapiens
  Payload ID: 9797
  Gene Symbol: MSL1
  Gene Name: male-specific lethal 1 homolog (Drosophila)
  ENSP ID: ENSP00000462731
MTMRSAVFKAAAAPAGGNPEQRLDYERAAALGGPEDEPGAAEAHFLPRHRKLKEPGPPLASSQGGSPAPSPAGCGGKGRGLLLPAGAAPGQQEESWGGSVPLPCPPPATKQAGIGGEPAAAGAGCSPRPKYQAVLPIQTGSLVAAAKEPTPWAGDKGGAASPAATASDPAGPPPLPLPGPPPLAPTATAGTLAASEGRWKSMRKSPLGGGGGSGASSQAACLKQILLLQLDLIEQQQQQLQAKEKEIEELKSERDTLLARIERMERRMQLVKKDNEKERHKLFQGYETEEREETELSEKIKLECQPELSETSQTLPPKPFSCGRSGKGHKRKSPFGSTERKTPVKKLAPEFSKVKTKTPKHSPIKEEPCGSLSETVCKRELRSQETPEKPRSSVDTPPRLSTPQKGPSTHPKEKAFSSEIEDLPYLSTTEMYLCRWHQPPPSPLPLRESSPKKEETVAIPSWRDHSVEPLRDPNPSDLLENLDDSVFSKRHAKLELDEKRRKRWDIQRIREQRILQRLQLRMYKKKGIQESEPEVTSFFPEPDDVESLMITPFLPVVAFGRPLPKLTPQNFELPWLDERSRCRLEIQKKQTPHRTCRK

SEQ ID NO: 48891 - protein, 146 aa, Homo sapiens
  Payload ID: 9797
  Gene Symbol: MSL1
  Gene Name: male-specific lethal 1 homolog (Drosophila)
  ENSP ID: ENSP00000462915
KGHKRKSPFGSTERKTPVKKLAPEFSKVKTKTPKHSPIKEEPCGSLSETVCKRELRSQETPEKPRSSVDTPPRLSTPQKGPSTHPKEKAFSSEIEDLPYLSTTEMYLCRWHQPPPSPLPLRESSPKKEETVARSTFTHLPCSEFKV

SEQ ID NO: 48892 - protein, 351 aa, Homo sapiens
  Payload ID: 9797
  Gene Symbol: MSL1
  Gene Name: male-specific lethal 1 homolog (Drosophila)
  Uniprot ID: Q68DK7
  ENSP ID: ENSP00000462945
MERRMQLVKKDNEKERHKLFQGYETEEREETELSEKIKLECQPELSETSQTLPPKPFSCGRSGKGHKRKSPFGSTERKTPVKKLAPEFSKVKTKTPKHSPIKEEPCGSLSETVCKRELRSQETPEKPRSSVDTPPRLSTPQKGPSTHPKEKAFSSEIEDLPYLSTTEMYLCRWHQPPPSPLPLRESSPKKEETVARCLMPSSVAGETSVLAVPSWRDHSVEPLRDPNPSDLLENLDDSVFSKRHAKLELDEKRRKRWDIQRIREQRILQRLQLRMYKKKGIQESEPEVTSFFPEPDDVESLMITPFLPVVAFGRPLPKLTPQNFELPWLDERSRCRLEIQKKQTPHRTCRK

SEQ ID NO: 48893 - protein, 461 aa, Homo sapiens
  Payload ID: 9797
  Gene Symbol: MSL1
  Gene Name: male-specific lethal 1 homolog (Drosophila)
  ENSP ID: ENSP00000463949
MTMRSAVFKAAAAPAGGNPEQRLDYERAAALGGPEDEPGAAEAHFLPRHRKLKEPGPPLASSQGGSPAPSPAGCGGKGRGLLLPAGAAPGQQEESWGGSVPLPCPPPATKQAGIGGEPAAAGAGCSPRPKYQAVLPIQTGSLVAAAKEPTPWAGDKGGAASPAATASDPAGPPPLPLPGPPPLAPTATAGTLAASEGRWKSMRKSPLGGGGGSGASSQAACLKQILLLQLDLIEQQQQQLQAKEKEIEELKSERDTLLARIERMERRMQLVKKDNEKERHKLFQGYETEEREETELSEKIKLECQPELSETSQTLPPKPFSCGRSGKGHKRKSPFGSTERKTPVKKLAPEFSKVKTKTPKHSPIKEEPCGSLSETVCKRELRSQETPEKPRSSVDTPPRLSTPQKGPSTHPKEKAFSSEIEDLPYLSTTEMYLCRWHQPPPSPLPLRESSPKKEETVASKA

SEQ ID NO: 48894 - protein, 577 aa, Homo sapiens
  Payload ID: 9798
  Gene Symbol: MSL2
  Gene Name: male-specific lethal 2 homolog (Drosophila)
  Uniprot ID: Q9HCI7
  ENSP ID: ENSP00000311827
MNPVNATALYISASRLVLNYDPGDPKAFTEINRLLPYFRQSLSCCVCGHLLQDPIAPTNSTCQHYVCKTCKGKKMMMKPSCSWCKDYEQFEENKQLSILVNCYKKLCEYITQTTLARDIIEAVDCSSDILALLNDGSLFCEETEKPSDSSFTLCLTHSPLPSTSEPTTDPQASLSPMSESTLSIAIGSSVINGLPTYNGLSIDRFGINIPSPEHSNTIDVCNTVDIKTEDLSDSLPPVCDTVATDLCSTGIDICSFSEDIKPGDSLLLSVEEVLRSLETVSNTEVCCPNLQPNLEATVSNGPFLQLSSQSLSHNVFMSTSPALHGLSCTAATPKIAKLNRKRSRSESDSEKVQPLPISTIIRGPTLGASAPVTVKRESKISLQPIATVPNGGTTPKISKTVLLSTKSMKKSHEHGSKKSHSKTKPGILKKDKAVKEKIPSHHFMPGSPTKTVYKKPQEKKGCKCGRATQNPSVLTCRGQRCPCYSNRKACLDCICRGCQNSYMANGEKKLEAFAVPEKALEQTRLTLGINVTSIAVRNASTSTSVINVTGSPVTTFLAASTHDDKSLDEAIDMRFDC

SEQ ID NO: 48895 - protein, 503 aa, Homo sapiens
  Payload ID: 9798
  Gene Symbol: MSL2
  Gene Name: male-specific lethal 2 homolog (Drosophila)
  Uniprot ID: Q9HCI7
  ENSP ID: ENSP00000387948
MMMKPSCSWCKDYEQFEENKQLSILVNCYKKLCEYITQTTLARDIIEAVDCSSDILALLNDGSLFCEETEKPSDSSFTLCLTHSPLPSTSEPTTDPQASLSPMSESTLSIAIGSSVINGLPTYNGLSIDRFGINIPSPEHSNTIDVCNTVDIKTEDLSDSLPPVCDTVATDLCSTGIDICSFSEDIKPGDSLLLSVEEVLRSLETVSNTEVCCPNLQPNLEATVSNGPFLQLSSQSLSHNVFMSTSPALHGLSCTAATPKIAKLNRKRSRSESDSEKVQPLPISTIIRGPTLGASAPVTVKRESKISLQPIATVPNGGTTPKISKTVLLSTKSMKKSHEHGSKKSHSKTKPGILKKDKAVKEKIPSHHFMPGSPTKTVYKKPQEKKGCKCGRATQNPSVLTCRGQRCPCYSNRKACLDCICRGCQNSYMANGEKKLEAFAVPEKALEQTRLTLGINVTSIAVRNASTSTSVINVTGSPVTTFLAASTHDDKSLDEAIDMRFDC

SEQ ID NO: 48896 - protein, 149 aa, Homo sapiens
  Payload ID: 9798
  Gene Symbol: MSL2
  Gene Name: male-specific lethal 2 homolog (Drosophila)
  ENSP ID: ENSP00000417956
MMMKPSCSWCKDYEQFEENKQLSILVNCYKKLCEYITQTTLARDIIEAVDCSSDILALLNDGSLFCEETEKPSDSSFTLCLTHSPLPSTSEPTTDPQASLSPMSESTLSIAIGSSVINGLPTYNGLSIDRFGINIPSPEHSNTIDVCNT

SEQ ID NO: 48897 - protein, 95 aa, Homo sapiens
  Payload ID: 9798
  Gene Symbol: MSL2
  Gene Name: male-specific lethal 2 homolog (Drosophila)
  ENSP ID: ENSP00000418655
MMMKPSCSWCKDYEQFEENKQLSILVNCYKKLCEYITQTTLARDIIEAVDCSSDILALLNDGSLFCEETEKPSDSSFTLCLTHSPLPSTSEPTTD

SEQ ID NO: 48898 - protein, 154 aa, Homo sapiens
  Payload ID: 9798
  Gene Symbol: MSL2
  Gene Name: male-specific lethal 2 homolog (Drosophila)
  ENSP ID: ENSP00000418752
MMMKPSCSWCKDYEQFEENKQLSILVNCYKKLCEYITQTTLARDIIEAVDCSSDILALLNDGSLFCEETEKPSDSSFTLCLTHSPLPSTSEPTTDPQASLSPMSESTLSIAIGSSVINGLPTYNGLSIDRFGINIPSPEHSNTIDVCNTVDIKT

SEQ ID NO: 48899 - protein, 521 aa, Homo sapiens
  Payload ID: 9799
  Gene Symbol: MSL3
  Gene Name: male-specific lethal 3 homolog (Drosophila)
  Uniprot ID: Q8N5Y2
  ENSP ID: ENSP00000312244
MSASEGMKFKFHSGEKVLCFEPDPTKARVLYDAKIVDVIVGKDEKGRKIPEYLIHFNGWNRSWDRWAAEDHVLRDTDENRRLQRKLARKAVARLRSTGRKKKRCRLPGVDSVLKGLPTEEKDENDENSLSSSSDCSENKDEEISEESDIEEKTEVKEEPELQTRREMEERTITIEIPEVLKKQLEDDCYYINRRKRLVKLPCQTNIITILESYVKHFAINAAFSANERPRHHHVMPHANMNVHYIPAEKNVDLCKEMVDGLRITFDYTLPLVLLYPYEQAQYKKVTSSKFFLPIKESATSTNRSQEELSPSPPLLNPSTPQSTESQPTTGEPATPKRRKAEPEALQSLRRSTRHSANCDRLSESSASPQPKRRQQDTSASMPKLFLHLEKKTPVHSRSSSPIPLTPSKEGSAVFAGFEGRRTNEINEVLSWKLVPDNYPPGDQPPPPSYIYGAQHLLRLFVKLPEILGKMSFSEKNLKALLKHFDLFLRFLAEYHDDFFPESAYVAACEAHYSTKNPRAIY

SEQ ID NO: 48900 - protein, 416 aa, Homo sapiens
  Payload ID: 9799
  Gene Symbol: MSL3
  Gene Name: male-specific lethal 3 homolog (Drosophila)
  Uniprot ID: Q8N5Y2
  ENSP ID: ENSP00000338078
MSASEGMKFKFHSGEKVLCFEPDPTKARVLYDAKIVDVIVGKDEKGRKIPEYLIHFNGWNRSWDRWAAEDHVLRDTDENRRLQRKLARKAVARLRSTGRKKKRCRLPGVDSVLKGLPTEEKDENDENSLSSSSDCSENKDEEISEESDIEEKTEVKEEPELQTRREMEERTITIEIPEVLKKQLEDDCYYINRRKRLVKLPCQTNIITILESYVKHFAINAAFSANERPRHHHVMPHANMNVHYIPAEKNVDLCKEMVDGLRITFDYTLPLVLLYPYEQAQYKKVTSSKFFLPIKESATSTNRSQEELSPSPPLLNPSTPQSTESQPTTGEPATPKRRKAEPEALQSLRRSTRHSANCDRLSESSASPQPKRRQQDTSASMPKLFLHLEKSRFILGCPRPGRASVYFVFSQCQAWC

SEQ ID NO: 48901 - protein, 372 aa, Homo sapiens
  Payload ID: 9799
  Gene Symbol: MSL3
  Gene Name: male-specific lethal 3 homolog (Drosophila)
  Uniprot ID: Q8N5Y2
  ENSP ID: ENSP00000354562
MKMMKTKEEPELQTRREMEERTITIEIPEVLKKQLEDDCYYINRRKRLVKLPCQTNIITILESYVKHFAINAAFSANERPRHHHVMPHANMNVHYIPAEKNVDLCKEMVDGLRITFDYTLPLVLLYPYEQAQYKKVTSSKFFLPIKESATSTNRSQEELSPSPPLLNPSTPQSTESQPTTGEPATPKRRKAEPEALQSLRRSTRHSANCDRLSESSASPQPKRRQQDTSASMPKLFLHLEKKTPVHSRSSSPIPLTPSKEGSAVFAGFEGRRTNEINEVLSWKLVPDNYPPGDQPPPPSYIYGAQHLLRLFVKLPEILGKMSFSEKNLKALLKHFDLFLRFLAEYHDDFFPESAYVAACEAHYSTKNPRAIY

SEQ ID NO: 48902 - protein, 116 aa, Homo sapiens
  Payload ID: 9799
  Gene Symbol: MSL3
  Gene Name: male-specific lethal 3 homolog (Drosophila)
  ENSP ID: ENSP00000370067
VKHFAINAAFSANERPRHHHVMPHANMNVHYIPAEKNVDLCKEMVDGLRITFDYTLPLVLLYPYEQAQYKKVTSSKFFLPIKESATSTNSPQRVSRPPVNQPPPKGAKLSQKHCSL

SEQ ID NO: 48903 - protein, 196 aa, Homo sapiens
  Payload ID: 9799
  Gene Symbol: MSL3
  Gene Name: male-specific lethal 3 homolog (Drosophila)
  ENSP ID: ENSP00000370068
MEERTITIEIPEVLKKQLEDDCYYINRRKRLVKLPCQTNIITILESYVKHFAINAAFSANERPRHHHVMPHANMNVHYIPAEKNVDLCKEMVDGLRITFDYTLPLVLLYPYEQAQYKKVTSSKFFLPIKESATSTNRSQEELSPSPPLLNPSTPQSTESQPTTGEPATPKRRKAEPEALQSLRRSTRHSANCDRLS

SEQ ID NO: 48904 - protein, 355 aa, Homo sapiens
  Payload ID: 9799
  Gene Symbol: MSL3
  Gene Name: male-specific lethal 3 homolog (Drosophila)
  Uniprot ID: Q8N5Y2
  ENSP ID: ENSP00000370069
MEERTITIEIPEVLKKQLEDDCYYINRRKRLVKLPCQTNIITILESYVKHFAINAAFSANERPRHHHVMPHANMNVHYIPAEKNVDLCKEMVDGLRITFDYTLPLVLLYPYEQAQYKKVTSSKFFLPIKESATSTNRSQEELSPSPPLLNPSTPQSTESQPTTGEPATPKRRKAEPEALQSLRRSTRHSANCDRLSESSASPQPKRRQQDTSASMPKLFLHLEKKTPVHSRSSSPIPLTPSKEGSAVFAGFEGRRTNEINEVLSWKLVPDNYPPGDQPPPPSYIYGAQHLLRLFVKLPEILGKMSFSEKNLKALLKHFDLFLRFLAEYHDDFFPESAYVAACEAHYSTKNPRAIY

SEQ ID NO: 48905 - protein, 509 aa, Homo sapiens
  Payload ID: 9799
  Gene Symbol: MSL3
  Gene Name: male-specific lethal 3 homolog (Drosophila)
  Uniprot ID: Q8N5Y2
  ENSP ID: ENSP00000381538
MSPSVRPGAGWAPVGRPGRPIQIVDVIVGKDEKGRKIPEYLIHFNGWNRSWDRWAAEDHVLRDTDENRRLQRKLARKAVARLRSTGRKKKRCRLPGVDSVLKGLPTEEKDENDENSLSSSSDCSENKDEEISEESDIEEKTEVKEEPELQTRREMEERTITIEIPEVLKKQLEDDCYYINRRKRLVKLPCQTNIITILESYVKHFAINAAFSANERPRHHHVMPHANMNVHYIPAEKNVDLCKEMVDGLRITFDYTLPLVLLYPYEQAQYKKVTSSKFFLPIKESATSTNRSQEELSPSPPLLNPSTPQSTESQPTTGEPATPKRRKAEPEALQSLRRSTRHSANCDRLSESSASPQPKRRQQDTSASMPKLFLHLEKKTPVHSRSSSPIPLTPSKEGSAVFAGFEGRRTNEINEVLSWKLVPDNYPPGDQPPPPSYIYGAQHLLRLFVKLPEILGKMSFSEKNLKALLKHFDLFLRFLAEYHDDFFPESAYVAACEAHYSTKNPRAIY

SEQ ID NO: 48906 - protein, 224 aa, Homo sapiens
  Payload ID: 9799
  Gene Symbol: MSL3
  Gene Name: male-specific lethal 3 homolog (Drosophila)
  ENSP ID: ENSP00000401809
MSPSVRPGAGWAPVGRPGRPIQIVDVIVGKDEKGRKIPEYLIHFNGWNRSWDRWAAEDHVLRDTDENRRLQRKLARKAVARLRSTGRKKKRCRLPGVDSVLKGLPTEEKDENDENSLSSSSDCSENKDEEISEESDIEEKTEVKEEPELQTRREMEERTITIEIPEVLKKQLEDDCYYINRRKRLVKLPCQTNIITILESYVKHFAINAAFSANERPRHHHVMP

SEQ ID NO: 48907 - protein, 127 aa, Homo sapiens
  Payload ID: 9799
  Gene Symbol: MSL3
  Gene Name: male-specific lethal 3 homolog (Drosophila)
  ENSP ID: ENSP00000418673
MSASEGMKFKFHSGEKVLCFEPDPTKARVLYDAKIVDVIVGKDEKGRKIPEYLIHFNGWNRSWDRWAAEDHVLRDTDENRRLQRKLARKAVARLRSTGRKKKRCRLPGVDSVLKGLPTEEKDENDEN

SEQ ID NO: 48908 - protein, 19 aa, Homo sapiens
  Payload ID: 9799
  Gene Symbol: MSL3
  Gene Name: male-specific lethal 3 homolog (Drosophila)
  ENSP ID: ENSP00000419976
MEERTITIEIPEVLKKQLE

SEQ ID NO: 48909 - protein, 572 aa, Homo sapiens
  Payload ID: 9800
  Gene Symbol: ME1
  Gene Name: malic enzyme 1, NADP(+)-dependent, cytosolic
  Uniprot ID: P48163
  ENSP ID: ENSP00000358719
MEPEAPRRRHTHQRGYLLTRNPHLNKDLAFTLEERQQLNIHGLLPPSFNSQEIQVLRVVKNFEHLNSDFDRYLLLMDLQDRNEKLFYRVLTSDIEKFMPIVYTPTVGLACQQYSLVFRKPRGLFITIHDRGHIASVLNAWPEDVIKAIVVTDGERILGLGDLGCNGMGIPVGKLALYTACGGMNPQECLPVILDVGTENEELLKDPLYIGLRQRRVRGSEYDDFLDEFMEAVSSKYGMNCLIQFEDFANVNAFRLLNKYRNQYCTFNDDIQGTASVAVAGLLAALRITKNKLSDQTILFQGAGEAALGIAHLIVMALEKEGLPKEKAIKKIWLVDSKGLIVKGRASLTQEKEKFAHEHEEMKNLEAIVQEIKPTALIGVAAIGGAFSEQILKDMAAFNERPIIFALSNPTSKAECSAEQCYKITKGRAIFASGSPFDPVTLPNGQTLYPGQGNNSYVFPGVALGVVACGLRQITDNIFLTTAEVIAQQVSDKHLEEGRLYPPLNTIRDVSLKIAEKIVKDAYQEKTATVYPEPQNKEAFVRSQMYSTDYDQILPDCYSWPEEVQKIQTKVDQ

SEQ ID NO: 48910 - protein, 584 aa, Homo sapiens
  Payload ID: 9801
  Gene Symbol: ME2
  Gene Name: malic enzyme 2, NAD(+)-dependent, mitochondrial
  Uniprot ID: P23368
  ENSP ID: ENSP00000321070
MLSRLRVVSTTCTLACRHLHIKEKGKPLMLNPRTNKGMAFTLQERQMLGLQGLLPPKIETQDIQALRFHRNLKKMTSPLEKYIYIMGIQERNEKLFYRILQDDIESLMPIVYTPTVGLACSQYGHIFRRPKGLFISISDRGHVRSIVDNWPENHVKAVVVTDGERILGLGDLGVYGMGIPVGKLCLYTACAGIRPDRCLPVCIDVGTDNIALLKDPFYMGLYQKRDRTQQYDDLIDEFMKAITDRYGRNTLIQFEDFGNHNAFRFLRKYREKYCTFNDDIQGTAAVALAGLLAAQKVISKPISEHKILFLGAGEAALGIANLIVMSMVENGLSEQEAQKKIWMFDKYGLLVKGRKAKIDSYQEPFTHSAPESIPDTFEDAVNILKPSTIIGVAGAGRLFTPDVIRAMASINERPVIFALSNPTAQAECTAEEAYTLTEGRCLFASGSPFGPVKLTDGRVFTPGQGNNVYIFPGVALAVILCNTRHISDSVFLEAAKALTSQLTDEELAQGRLYPPLANIQEVSINIAIKVTEYLYANKMAFRYPEPEDKAKYVKERTWRSEYDSLLPDVYEWPESASSPPVITE

SEQ ID NO: 48911 - protein, 479 aa, Homo sapiens
  Payload ID: 9801
  Gene Symbol: ME2
  Gene Name: malic enzyme 2, NAD(+)-dependent, mitochondrial
  Uniprot ID: P23368
  ENSP ID: ENSP00000372384
MLSRLRVVSTTCTLACRHLHIKEKGKPLMLNPRTNKGMAFTLQERQMLGLQGLLPPKIETQDIQALRFHRNLKKMTSPLEKYIYIMGIQERNEKLFYRILQDDIESLMPIVYTPTVGLACSQYGHIFRRPKGLFISISDRGHVRSIVDNWPENHVKAVVVTDGERILGLGDLGVYGMGIPVGKLCLYTACAGIRPDRCLPVCIDVGTDNIALLKDPFYMGLYQKRDRTQQYDDLIDEFMKAITDRYGRNTLIQFEDFGNHNAFRFLRKYREKYCTFNDDIQGTAAVALAGLLAAQKVISKPISEHKILFLGAGEAALGIANLIVMSMVENGLSEQEAQKKIWMFDKYGLLVKGRKAKIDSYQEPFTHSAPESIPDTFEDAVNILKPSTIIGVAGAGRLFTPDVIRAMASINERPVIFALSNPTAQAECTAEEAYTLTEGRCLFASGSPFGPVKLTDGRVFTPGQGNNVYIFPGYRIPIC

SEQ ID NO: 48912 - protein, 259 aa, Homo sapiens
  Payload ID: 9802
  Gene Symbol: ME3
  Gene Name: malic enzyme 3, NADP(+)-dependent, mitochondrial
  ENSP ID: ENSP00000315255
MAFTLEERLQLGIHGLIPPCFLSQDVQLLRIMRYYERQQSDLDKYIILMTLQDRNEKLFYRVLTSDVEKFMPIVYTPTVGLACQHYGLTFRRPRGLFITIHDKGHLATMLNSWPEDNIKAVVVTDGERILGLGDLGCYGMGIPVGKLALYTACGGVNPQQCLPVLLDVGTNNEELLRDPLYIGLKHQRVHGKAYDDLLDEFMQAVTDKFGINCLIQFEDFANANAFRLLNKYRNKYCMFNDDIQDDFSRGPKRSQLFFK

SEQ ID NO: 48913 - protein, 604 aa, Homo sapiens
  Payload ID: 9802
  Gene Symbol: ME3
  Gene Name: malic enzyme 3, NADP(+)-dependent, mitochondrial
  Uniprot ID: Q16798
  ENSP ID: ENSP00000376998
MGAALGTGTRLAPWPGRACGALPRWTPTAPAQGCHSKPGPARPVPLKKRGYDVTRNPHLNKGMAFTLEERLQLGIHGLIPPCFLSQDVQLLRIMRYYERQQSDLDKYIILMTLQDRNEKLFYRVLTSDVEKFMPIVYTPTVGLACQHYGLTFRRPRGLFITIHDKGHLATMLNSWPEDNIKAVVVTDGERILGLGDLGCYGMGIPVGKLALYTACGGVNPQQCLPVLLDVGTNNEELLRDPLYIGLKHQRVHGKAYDDLLDEFMQAVTDKFGINCLIQFEDFANANAFRLLNKYRNKYCMFNDDIQGTASVAVAGILAALRITKNKLSNHVFVFQGAGEAAMGIAHLLVMALEKEGVPKAEATRKIWMVDSKGLIVKGRSHLNHEKEMFAQDHPEVNSLEEVVRLVKPTAIIGVAAIAGAFTEQILRDMASFHERPIIFALSNPTSKAECTAEKCYRVTEGRGIFASGSPFKSVTLEDGKTFIPGQGNNAYVFPGVALGVIAGGIRHIPDEIFLLTAEQIAQEVSEQHLSQGRLYPPLSTIRDVSLRIAIKVLDYAYKHNLASYYPEPKDKEAFVRSLVYTPDYDSFTLDSYTWPKEAMNVQTV

SEQ ID NO: 48914 - protein, 580 aa, Homo sapiens
  Payload ID: 9802
  Gene Symbol: ME3
  Gene Name: malic enzyme 3, NADP(+)-dependent, mitochondrial
  ENSP ID: ENSP00000431182
MGAALGTGTRLAPWPGRACGALPRWTPTAPAQGCHSKPGPARPVPLKKRGYDVTRNPHLNKGMAFTLEERLQLGIHGLIPPCFLSQDVQLLRIMRYYERQQSDLDKYIILMTLQDRNEKLFYRVLTSDVEKFMPIVYTPTVGLACQHYGLTFRRPRGLFITIHDKGHLATMLNSWPEDNIKAVVVTDGERILGLGDLGCYGMGIPVGKLALYTACGGVNPQQCLPVLLDVGTNNEELLRDPLYIGLKHQRVHGKAYDDLLDEFMQAVTDKFGINCLIQFEDFANANAFRLLNKYRNKYCMFNDDIQGTASVAVAGILAALRITKNKLSNHVFVFQGAGEAAMGIAHLLVMALEKEGVPKAEATRKIWMVDSKGLIVKGRSHLNHEKEMFAQDHPEVNSLEEVVRLVKPTAIIGVAAIAGAFTEQILRDMASFHERPIIFALSNPTSKAECTAEKCYRVTEGRGIFASGSPFKSVTLEDGKTFIPGQGNNAYVFPGVALGVIAGGIRHIPDEIFLLTAEQIAQEVSEQHLSQGRLYPPLSTIRDVSLRIAIKVLDYAYKHNLASYYPEPKDKEAFVRSLVY

SEQ ID NO: 48915 - protein, 342 aa, Homo sapiens
  Payload ID: 9802
  Gene Symbol: ME3
  Gene Name: malic enzyme 3, NADP(+)-dependent, mitochondrial
  Uniprot ID: Q16798
  ENSP ID: ENSP00000433636
MGAALGTGTRLAPWPGRACGALPRWTPTAPAQGCHSKPGPARPVPLKKRGYDVTRNPHLNKGMAFTLEERLQLGIHGLIPPCFLSQDVQLLRIMRYYERQQSDLDKYIILMTLQDRNEKLFYRVLTSDVEKFMPIVYTPTVGLACQHYGLTFRRPRGLFITIHDKGHLATMLNSWPEDNIKAVVVTDGERILGLGDLGCYGMGIPVGKLALYTACGGVNPQQCLPVLLDVGTNNEELLRDPLYIGLKHQRVHGKAYDDLLDEFMQAVTDKFGINCLIQFEDFANANAFRLLNKYRNKYCMFNDDIQGTTCHTFSCPWHLWAQVMFQHIPGPMGFSEWLPRNS

SEQ ID NO: 48916 - protein, 61 aa, Homo sapiens
  Payload ID: 9802
  Gene Symbol: ME3
  Gene Name: malic enzyme 3, NADP(+)-dependent, mitochondrial
  ENSP ID: ENSP00000434431
MGAALGTGTRLAPWPGRACGALPRWTPTAPAQGCHSKPGPARPVPLKKRGYDVTRNPHLNK

SEQ ID NO: 48917 - protein, 151 aa, Homo sapiens
  Payload ID: 9802
  Gene Symbol: ME3
  Gene Name: malic enzyme 3, NADP(+)-dependent, mitochondrial
  ENSP ID: ENSP00000434690
MGAALGTGTRLAPWPGRACGALPRWTPTAPAQGCHSKPGPARPVPLKKRGYDVTRNPHLNKGMAFTLEERLQLGIHGLIPPCFLSQDVQLLRIMRYYERQQSDLDKYIILMTLQDRNEKLFYRVLTSDVEKFMPIVYTPTVGLACQHYGLT

SEQ ID NO: 48918 - protein, 79 aa, Homo sapiens
  Payload ID: 9802
  Gene Symbol: ME3
  Gene Name: malic enzyme 3, NADP(+)-dependent, mitochondrial
  ENSP ID: ENSP00000435427
MGAALGTGTRLAPWPGRACGALPRWTPTAPAQGCHSKPGPARPVPLKKRGYDVTRNPHLNKVMGQRAGRPALRSRGCRK

SEQ ID NO: 48919 - protein, 61 aa, Homo sapiens; identical to SEQ ID NO: 48916
  Payload ID: 9802
  Gene Symbol: ME3
  Gene Name: malic enzyme 3, NADP(+)-dependent, mitochondrial
  ENSP ID: ENSP00000437204

SEQ ID NO: 48920 - protein, 604 aa, Homo sapiens; identical to SEQ ID NO: 48913
  Payload ID: 9802
  Gene Symbol: ME3
  Gene Name: malic enzyme 3, NADP(+)-dependent, mitochondrial
  Uniprot ID: Q16798
  ENSP ID: ENSP00000440246

SEQ ID NO: 48921 - protein, 1052 aa, Homo sapiens
  Payload ID: 9803
  Gene Symbol: MFHAS1
  Gene Name: malignant fibrous histiocytoma amplified sequence 1
  Uniprot ID: Q9Y4C4
  ENSP ID: ENSP00000276282
MAGMDSGNLKTARLWRDAALRARKLRSNLRQLTLTAAGACPGAGADALESPASPQLVLPANLGDIEALNLGNNGLEEVPEGLGSALGSLRVLVLRRNRFARLPPAVAELGHHLTELDVSHNRLTALGAEVVSALRELRKLNLSHNQLPALPAQLGALAHLEELDVSFNRLAHLPDSLSCLSRLRTLDVDHNQLTAFPRQLLQLVALEELDVSSNRLRGLPEDISALRALKILWLSGAELGTLPAGFCELASLESLMLDNNGLQALPAQFSCLQRLKMLNLSSNLFEEFPAALLPLAGLEELYLSRNQLTSVPSLISGLGRLLTLWLDNNRIRYLPDSIVELTGLEELVLQGNQIAVLPDHFGQLSRVGLWKIKDNPLIQPPYEVCMKGIPYIAAYQKELAHSQPAVQPRLKLLLMGHKAAGKTLLRHCLTEERVEGCPGGGDKEKCYPPSPPPVSKGIEVTSWTADASRGLRFIVYDLAGDESYEVIQPFFLSPGALYVLVVNLATYEPRHFPTTVGSFLHRVGARVPHAVVCIVGTHADLCGERELEEKCLDIHRQIALQEKHDAEGLSRLAKVVDEALARDFELRSASPHAAYYGVSDKNLRRRKAHFQYLLNHRLQILSPVLPVSCRDPRHLRRLRDKLLSVAEHREIFPNLHRVLPRSWQVLEELHFQPPQAQRLWLSWWDSARLGLQAGLTEDRLQSALSYLHESGKLLYFEDSPALKEHVFHNLTRLIDILNVFFQRDPSLLLHKLLLGTSGEGKAEGESSPPMARSTPSQELLRATQLHQYVEGFLLHGLLPAHVIRLLLKPHVQAQQDLQLLLELLEKMGLCYCLNKPKGKPLNGSTAWYKFPCYVQNEVPHAEAWINGTNLAGQSFVAEQLQIEYSFPFTFPLGLFARYSVQINSHVVHRSDGKFQIFAYRGKVPVVVSYRPARGVLQPDTLSIASHASLPNIWTAWQAITPLVEELNVLLQEWPGLHYTVHILCSKCLKRGSPNPHAFPGELLSQPRPEGVAEIICPKNGSERVNVALVYPPTPTVISPCSKKNVGEKHRNQ

SEQ ID NO: 48922 - protein, 182 aa, Homo sapiens
  Payload ID: 9804
  Gene Symbol: MCTS1
  Gene Name: malignant T cell amplified sequence 1
  Uniprot ID: Q9ULC4
  ENSP ID: ENSP00000360365
MGKGRFDEKENVSNCIQLKTSVIKGIKNQLIEQFPGIEPWLNQIMPKKDPVKIVRCHEHIEILTVNGELLFFRQREGPFYPTLRLLHKYPFILPHQQVDKGAIKFVLSGANIMCPGLTSPGAKLYPAAVDTIVAIMAEGKQHALCVGVMKMSAEDIEKVNKGIGIENIHYLNDGLWHMKTYK

SEQ ID NO: 48923 - protein, 181 aa, Homo sapiens
  Payload ID: 9804
  Gene Symbol: MCTS1
  Gene Name: malignant T cell amplified sequence 1
  Uniprot ID: Q9ULC4
  ENSP ID: ENSP00000360367
MFKKFDEKENVSNCIQLKTSVIKGIKNQLIEQFPGIEPWLNQIMPKKDPVKIVRCHEHIEILTVNGELLFFRQREGPFYPTLRLLHKYPFILPHQQVDKGAIKFVLSGANIMCPGLTSPGAKLYPAAVDTIVAIMAEGKQHALCVGVMKMSAEDIEKVNKGIGIENIHYLNDGLWHMKTYK

SEQ ID NO: 48924 - protein, 390 aa, Homo sapiens
  Payload ID: 9805
  Gene Symbol: MCAT
  Gene Name: malonyl CoA:ACP acyltransferase (mitochondrial)
  Uniprot ID: Q8IVS2
  ENSP ID: ENSP00000290429
MSVRVARVAWVRGLGASYRRGASSFPVPPPGAQGVAELLRDATGAEEEAPWAATERRMPGQCSVLLFPGQGSQVVGMGRGLLNYPRVRELYAAARRVLGYDLLELSLHGPQETLDRTVHCQPAIFVASLAAVEKLHHLQPSVIENCVAAAGFSVGEFAALVFAGAMEFAEGLYAVKIRAEAMQEASEAVPSGMLSVLGQPQSKFNFACLEAREHCKSLGIENPVCEVSNYLFPDCRVISGHQEALRFLQKNSSKFHFRRTRMLPVSGAFHTRLMEPAVEPLTQALKAVDIKKPLVSVYSNVHAHRYRHPGHIHKLLAQQLVSPVKWEQTMHAIYERKKGRGFPQTFEVGPGRQLGAILKSCNMQAWKSYSAVDVLQTLEHVDLDPQEPPR

SEQ ID NO: 48925 - protein, 180 aa, Homo sapiens
  Payload ID: 9805
  Gene Symbol: MCAT
  Gene Name: malonyl CoA:ACP acyltransferase (mitochondrial)
  Uniprot ID: Q8IVS2
  ENSP ID: ENSP00000331306
MSVRVARVAWVRGLGASYRRGASSFPVPPPGAQGVAELLRDATGAEEEAPWAATERRMPGQCSVLLFPGQGSQVVGMGRGLLNYPRVRELYAAARRVLGYDLLELSLHGPQETLDRTVHCQPAIFVASLAAVEKLHHLQPSVIENCVAAAGFSVGEFAALVFAGAMEFAEGSTVSPEEFL

SEQ ID NO: 48926 - protein, 87 aa, Homo sapiens
  Payload ID: 9805
  Gene Symbol: MCAT
  Gene Name: malonyl CoA:ACP acyltransferase (mitochondrial)
  ENSP ID: ENSP00000477216
LAAVEKLHHLQPSVIENCVAAAGFSVGEFAALVFAGAMEFAEGTGRSLVLCKAVVLGSLGVRDTAKNDTGPTQVMGREHMDRGDIGT

SEQ ID NO: 48927 - protein, 493 aa, Homo sapiens
  Payload ID: 9806
  Gene Symbol: MLYCD
  Gene Name: malonyl-CoA decarboxylase
  Uniprot ID: O95822
  ENSP ID: ENSP00000262430
MRGFGPGLTARRLLPLRLPPRPPGPRLASGQAAGALERAMDELLRRAVPPTPAYELREKTPAPAEGQCADFVSFYGGLAETAQRAELLGRLARGFGVDHGQVAEQSAGVLHLRQQQREAAVLLQAEDRLRYALVPRYRGLFHHISKLDGGVRFLVQLRADLLEAQALKLVEGPDVREMNGVLKGMLSEWFSSGFLNLERVTWHSPCEVLQKISEAEAVHPVKNWMDMKRRVGPYRRCYFFSHCSTPGEPLVVLHVALTGDISSNIQAIVKEHPPSETEEKNKITAAIFYSISLTQQGLQGVELGTFLIKRVVKELQREFPHLGVFSSLSPIPGFTKWLLGLLNSQTKEHGRNELFTDSECKEISEITGGPINETLKLLLSSSEWVQSEKLVRALQTPLMRLCAWYLYGEKHRGYALNPVANFHLQNGAVLWRINWMADVSLRGITGSCGLMANYRYFLEETGPNSTSYLGSKIIKASEQVLSLVAQFQKNSKL

SEQ ID NO: 48928 - protein, 813 aa, Homo sapiens
  Payload ID: 9807
  Gene Symbol: MALT1
  Gene Name: MALT1 paracaspase
  Uniprot ID: Q9UDY8
  ENSP ID: ENSP00000304161
MSLLGDPLQALPPSAAPTGPLLAPPAGATLNRLREPLLRRLSELLDQAPEGRGWRRLAELAGSRGRLRLSCLDLEQCSLKVLEPEGSPSLCLLKLMGEKGCTVTELSDFLQAMEHTEVLQLLSPPGIKITVNPESKAVLAGQFVKLCCRATGHPFVQYQWFKMNKEIPNGNTSELIFNAVHVKDAGFYVCRVNNNFTFEFSQWSQLDVCDIPESFQRSVDGVSESKLQICVEPTSQKLMPGSTLVLQCVAVGSPIPHYQWFKNELPLTHETKKLYMVPYVDLEHQGTYWCHVYNDRDSQDSKKVEIIIDELNNLGHPDNKEQTTDQPLAKDKVALLIGNMNYREHPKLKAPLVDVYELTNLLRQLDFKVVSLLDLTEYEMRNAVDEFLLLLDKGVYGLLYYAGHGYENFGNSFMVPVDAPNPYRSENCLCVQNILKLMQEKETGLNVFLLDMCRKRNDYDDTIPILDALKVTANIVFGYATCQGAEAFEIQHSGLANGIFMKFLKDRLLEDKKITVLLDEVAEDMGKCHLTKGKQALEIRSSLSEKRALTDPIQGTEYSAESLVRNLQWAKAHELPESMCLKFDCGVQIQLGFAAEFSNVMIIYTSIVYKPPEIIMCDAYVTDFPLDLDIDPKDANKGTPEETGSYLVSKDLPKHCLYTRLSSLQKLKEHLVFTVCLSYQYSGLEDTVEDKQEVNVGKPLIAKLDMHRGLGRKTCFQTCLMSNGPYQSSAATSGGAGHYHSLQDPFHGVYHSHPGNPSNVTPADSCHCSRTPDAFISSFAHHASCHFSRSNVPVETTDEIPFSFSDRLRISEK

SEQ ID NO: 48929 - protein, 824 aa, Homo sapiens
  Payload ID: 9807
  Gene Symbol: MALT1
  Gene Name: MALT1 paracaspase
  Uniprot ID: Q9UDY8
  ENSP ID: ENSP00000319279
MSLLGDPLQALPPSAAPTGPLLAPPAGATLNRLREPLLRRLSELLDQAPEGRGWRRLAELAGSRGRLRLSCLDLEQCSLKVLEPEGSPSLCLLKLMGEKGCTVTELSDFLQAMEHTEVLQLLSPPGIKITVNPESKAVLAGQFVKLCCRATGHPFVQYQWFKMNKEIPNGNTSELIFNAVHVKDAGFYVCRVNNNFTFEFSQWSQLDVCDIPESFQRSVDGVSESKLQICVEPTSQKLMPGSTLVLQCVAVGSPIPHYQWFKNELPLTHETKKLYMVPYVDLEHQGTYWCHVYNDRDSQDSKKVEIIIGRTDEAVECTEDELNNLGHPDNKEQTTDQPLAKDKVALLIGNMNYREHPKLKAPLVDVYELTNLLRQLDFKVVSLLDLTEYEMRNAVDEFLLLLDKGVYGLLYYAGHGYENFGNSFMVPVDAPNPYRSENCLCVQNILKLMQEKETGLNVFLLDMCRKRNDYDDTIPILDALKVTANIVFGYATCQGAEAFEIQHSGLANGIFMKFLKDRLLEDKKITVLLDEVAEDMGKCHLTKGKQALEIRSSLSEKRALTDPIQGTEYSAESLVRNLQWAKAHELPESMCLKFDCGVQIQLGFAAEFSNVMIIYTSIVYKPPEIIMCDAYVTDFPLDLDIDPKDANKGTPEETGSYLVSKDLPKHCLYTRLSSLQKLKEHLVFTVCLSYQYSGLEDTVEDKQEVNVGKPLIAKLDMHRGLGRKTCFQTCLMSNGPYQSSAATSGGAGHYHSLQDPFHGVYHSHPGNPSNVTPADSCHCSRTPDAFISSFAHHASCHFSRSNVPVETTDEIPFSFSDRLRISEK

SEQ ID NO: 48930 - protein, 119 aa, Homo sapiens
  Payload ID: 9807
  Gene Symbol: MALT1
  Gene Name: MALT1 paracaspase
  ENSP ID: ENSP00000467222
MGEKGCTVTELSDFLQAMEHTEVLQLLSPPGIKITVNPESKAVLAGQFVKLCCRATGHPFVQYQWFKMNKEIPNGNTSELIFNAVHVKDAGFYVCRVNNNFTFEFSQWSQLDVCDIPES

SEQ ID NO: 48931 - protein, 143 aa, Homo sapiens
  Payload ID: 9808
  Gene Symbol: MGAM
  Gene Name: maltase-glucoamylase
  ENSP ID: ENSP00000417103
MARKKLKKFTTLEIVLSVLLLVLFIISIVLIVLLAKESLKSTAPDPGTTGTPDPGTTGTPDPGTTGTTHARTTGPPDPGTTGTTPVSAECPVVNELERINCIPDQPPTKATCDQRGCCWNPQGAVSVPWCYYSKNHSYHVEGN

SEQ ID NO: 48932 - protein, 2753 aa, Homo sapiens
  Payload ID: 9808
  Gene Symbol: MGAM
  Gene Name: maltase-glucoamylase
  ENSP ID: ENSP00000417515
MARKKLKKFTTLEIVLSVLLLVLFIISIVLIVLLAKESLKSTAPDPGTTGTPDPGTTGTPDPGTTGTTHARTTGPPDPGTTGTTPVSAECPVVNELERINCIPDQPPTKATCDQRGCCWNPQGAVSVPWCYYSKNHSYHVEGNLVNTNAGFTARLKNLPSSPVFGSNVDNVLLTAEYQTSNRFHFKLTDQTNNRFEVPHEHVQSFSGNAAASLTYQVEISRQPFSIKVTRRSNNRVLFDSSIGPLLFADQFLQLSTRLPSTNVYGLGEHVHQQYRHDMNWKTWPIFNRDTTPNGNGTNLYGAQTFFLCLEDASGLSFGVFLMNSNAMEVVLQPAPAITYRTIGGILDFYVFLGNTPEQVVQEYLELIGRPALPSYWALGFHLSRYEYGTLDNMREVVERNRAAQLPYDVQHADIDYMDERRDFTYDSVDFKGFPEFVNELHNNGQKLVIIVDPAISNNSSSSKPYGPYDRGSDMKIWVNSSDGVTPLIGEVWPGQTVFPDYTNPNCAVWWTKEFELFHNQVEFDGIWIDMNEVSNFVDGSVSGCSTNNLNNPPFTPRILDGYLFCKTLCMDAVQHWGKQYDIHNLYGYSMAVATAEAAKTVFPNKRSFILTRSTFAGSGKFAAHWLGDNTATWDDLRWSIPGVLEFNLFGIPMVGPDICGFALDTPEELCRRWMQLGAFYPFSRNHNGQGYKDQDPASFGADSLLLNSSRHYLNIRYTLLPYLYTLFFRAHSRGDTVARPLLHEFYEDNSTWDVHQQFLWGPGLLITPVLDEGAEKVMAYVPDAVWYDYETGSQVRWRKQKVEMELPGDKIGLHLRGGYIFPTQQPNTTTLASRKNPLGLIIALDENKEAKGELFWDNGETKDTVANKVYLLCEFSVTQNRLEVNISQSTYKDPNNLAFNEIKILGTEEPSNVTVKHNGVPSQTSPTVTYDSNLKVAIITDIDLLLGEAYTVEWSIKIRDEEKIDCYPDENGASAENCTARGCIWEASNSSGVPFCYFVNDLYSVSDVQYNSHGATADISLKSSVYANAFPSTPVNPLRLDVTYHKNEMLQFKIYDPNKNRYEVPVPLNIPSMPSSTPEGQLYDVLIKKNPFGIEIRRKSTGTIIWDSQLLGFTFSDMFIRISTRLPSKYLYGFGETEHRSYRRDLEWHTWGMFSRDQPPGYKKNSYGVHPYYMGLEEDGSAHGVLLLNSNAMDVTFQPLPALTYRTTGGVLDFYVFLGPTPELVTQQYTELIGRPVMVPYWSLGFQLCRYGYQNDSEIASLYDEMVAAQIPYDVQYSDIDYMERQLDFTLSPKFAGFPALINRMKADGMRVILILDPAISGNETQPYPAFTRGVEDDVFIKYPNDGDIVWGKVWPDFPDVVVNGSLDWDSQVELYRAYVAFPDFFRNSTAKWWKREIEELYNNPQNPERSLKFDGMWIDMNEPSSFVNGAVSPGCRDASLNHPPYMPHLESRDRGLSSKTLCMESQQILPDGSLVQHYNVHNLYGWSQTRPTYEAVQEVTGQRGVVITRSTFPSSGRWAGHWLGDNTAAWDQLKKSIIGMMEFSLFGISYTGADICGFFQDAEYEMCVRWMQLGAFYPFSRNHNTIGTRRQDPVSWDAAFVNISRNVLQTRYTLLPYLYTLMQKAHTEGVTVVRPLLHEFVSDQVTWDIDSQFLLGPAFLVSPVLERNARNVTAYFPRARWYDYYTGVDINARGEWKTLPAPLDHINLHVRGGYILPWQEPALNTHLSRKNPLGLIIALDENKEAKGELFWDDGQTKDTVAKKVYLLCEFSVTQNHLEVTISQSTYKDPNNLAFNEIKILGMEEPSNVTVKHNGVPSQTSPTVTYDSNLKVAIITDINLFLGEAYTVEWSIKIRDEEKIDCYPDENGDSAENCTARGCIWEASNSSGVPFCYFVNDLYSVSDVQYNSHGATADISLKSSVHANAFPSTPVNPLRLDVTYHKNEMLQFKIYDPNNNRYEVPVPLNIPSVPSSTPEGQLYDVLIKKNPFGIEIRRKSTGTIIWDSQLLGFTFNDMFIRISTRLPSKYLYGFGETEHTSYRRDLEWHTWGMFSRDQPPGYKKNSYGVHPYYMGLEEDGSAHGVLLLNSNAMDVTFQPLPALTYRTTGGVLDFYVFLGPTPELVTQQYTELIGRPVMVPYWSLGFQLCRYGYQNDSEISSLYDEMVAAQIPYDVQYSDIDYMERQLDFTLSPKFAGFPALINRMKADGMRVILILDPAISGNETQPYPAFTRGVEDDVFIKYPNDGDIVWGKVWPDFPDVVVNGSLDWDSQVELYRAYVAFPDFFRNSTAKWWKREIEELYNNPQNPERSLKFDGMWIDMNEPSSFVNGAVSPGCRDASLNHPPYMPYLESRDRGLSSKTLCMESQQILPDGSPVQHYNVHNLYGWSQTRPTYEAVQEVTGQRGVVITRSTFPSSGRWAGHWLGDNTAAWDQLKKSIIGMMEFSLFGISYTGADICGFFQDAEYEMCVRWMQLGAFYPFSRNHNTIGTRRQDPVSWDVAFVNISRTVLQTRYTLLPYLYTLMHKAHTEGVTVVRPLLHEFVSDQVTWDIDSQFLLGPAFLVSPVLERNARNVTAYFPRARWYDYYTGVDINARGEWKTLPAPLDHINLHVRGGYILPWQEPALNTHLSRQKFMGFKIALDDEGTAGGWLFWDDGQSIDTYGKGLYYLASFSASQNTMQSHIIFNNYITGTNPLKLGYIEIWGVGSVPVTSVSISVSGMVITPSFNNDPTTQVLSIDVTDRNISLHNFTSLTWISTL

SEQ ID NO: 48933 - protein, 185 aa, Homo sapiens
  Payload ID: 9808
  Gene Symbol: MGAM
  Gene Name: maltase-glucoamylase
  ENSP ID: ENSP00000419372
MARKKLKKFTTLEIVLSVLLLVLFIISIVLIVLLAKESLKSTAPDPGTTGTPDPGTTGTPDPGTTGTTHARTTGPPDPGTTGTTPVSAECPVVNELERINCIPDQPPTKATCDQRGCCWNPQGAVSVPWCYYSKNHSYHVEGNLVNTNAGFTARLKNLPSSPVFGSNVDNVLLTAEYQTSNRFHF

SEQ ID NO: 48934 - protein, 1857 aa, Homo sapiens
  Payload ID: 9808
  Gene Symbol: MGAM
  Gene Name: maltase-glucoamylase
  Uniprot ID: O43451
  ENSP ID: ENSP00000447378
MARKKLKKFTTLEIVLSVLLLVLFIISIVLIVLLAKESLKSTAPDPGTTGTPDPGTTGTPDPGTTGTTHARTTGPPDPGTTGTTPVSAECPVVNELERINCIPDQPPTKATCDQRGCCWNPQGAVSVPWCYYSKNHSYHVEGNLVNTNAGFTARLKNLPSSPVFGSNVDNVLLTAEYQTSNRFHFKLTDQTNNRFEVPHEHVQSFSGNAAASLTYQVEISRQPFSIKVTRRSNNRVLFDSSIGPLLFADQFLQLSTRLPSTNVYGLGEHVHQQYRHDMNWKTWPIFNRDTTPNGNGTNLYGAQTFFLCLEDASGLSFGVFLMNSNAMEVVLQPAPAITYRTIGGILDFYVFLGNTPEQVVQEYLELIGRPALPSYWALGFHLSRYEYGTLDNMREVVERNRAAQLPYDVQHADIDYMDERRDFTYDSVDFKGFPEFVNELHNNGQKLVIIVDPAISNNSSSSKPYGPYDRGSDMKIWVNSSDGVTPLIGEVWPGQTVFPDYTNPNCAVWWTKEFELFHNQVEFDGIWIDMNEVSNFVDGSVSGCSTNNLNNPPFTPRILDGYLFCKTLCMDAVQHWGKQYDIHNLYGYSMAVATAEAAKTVFPNKRSFILTRSTFAGSGKFAAHWLGDNTATWDDLRWSIPGVLEFNLFGIPMVGPDICGFALDTPEELCRRWMQLGAFYPFSRNHNGQGYKDQDPASFGADSLLLNSSRHYLNIRYTLLPYLYTLFFRAHSRGDTVARPLLHEFYEDNSTWDVHQQFLWGPGLLITPVLDEGAEKVMAYVPDAVWYDYETGSQVRWRKQKVEMELPGDKIGLHLRGGYIFPTQQPNTTTLASRKNPLGLIIALDENKEAKGELFWDNGETKDTVANKVYLLCEFSVTQNRLEVNISQSTYKDPNNLAFNEIKILGTEEPSNVTVKHNGVPSQTSPTVTYDSNLKVAIITDIDLLLGEAYTVEWSIKIRDEEKIDCYPDENGASAENCTARGCIWEASNSSGVPFCYFVNDLYSVSDVQYNSHGATADISLKSSVYANAFPSTPVNPLRLDVTYHKNEMLQFKIYDPNKNRYEVPVPLNIPSMPSSTPEGQLYDVLIKKNPFGIEIRRKSTGTIIWDSQLLGFTFSDMFIRISTRLPSKYLYGFGETEHRSYRRDLEWHTWGMFSRDQPPGYKKNSYGVHPYYMGLEEDGSAHGVLLLNSNAMDVTFQPLPALTYRTTGGVLDFYVFLGPTPELVTQQYTELIGRPVMVPYWSLGFQLCRYGYQNDSEIASLYDEMVAAQIPYDVQYSDIDYMERQLDFTLSPKFAGFPALINRMKADGMRVILILDPAISGNETQPYPAFTRGVEDDVFIKYPNDGDIVWGKVWPDFPDVVVNGSLDWDSQVELYRAYVAFPDFFRNSTAKWWKREIEELYNNPQNPERSLKFDGMWIDMNEPSSFVNGAVSPGCRDASLNHPPYMPHLESRDRGLSSKTLCMESQQILPDGSLVQHYNVHNLYGWSQTRPTYEAVQEVTGQRGVVITRSTFPSSGRWAGHWLGDNTAAWDQLKKSIIGMMEFSLFGISYTGADICGFFQDAEYEMCVRWMQLGAFYPFSRNHNTIGTRRQDPVSWDVAFVNISRTVLQTRYTLLPYLYTLMHKAHTEGVTVVRPLLHEFVSDQVTWDIDSQFLLGPAFLVSPVLERNARNVTAYFPRARWYDYYTGVDINARGEWKTLPAPLDHINLHVRGGYILPWQEPALNTHLSRQKFMGFKIALDDEGTAGGWLFWDDGQSIDTYGKGLYYLASFSASQNTMQSHIIFNNYITGTNPLKLGYIEIWGVGSVPVTSVSISVSGMVITPSFNNDPTTQVLSIDVTDRNISLHNFTSLTWISTL

SEQ ID NO: 48935 - protein, 1857 aa, Homo sapiens; identical to SEQ ID NO: 48934
  Payload ID: 9808
  Gene Symbol: MGAM
  Gene Name: maltase-glucoamylase
  Uniprot ID: O43451
  ENSP ID: ENSP00000482292

SEQ ID NO: 48936 - protein, 2012 aa, Homo sapiens
  Payload ID: 9808
  Gene Symbol: MGAM
  Gene Name: maltase-glucoamylase
  ENSP ID: ENSP00000487740
  MOD_RES (1)..(1): Any amino acid
XFRFYEDNSTWDVHQQFLWGPGLLITPVLDEGAEKVMAYVPDAVWYDYETGSQVRWRKQKVEMELPGDKIGLHLRGGYIFPTQQPNTTTLASRKNPLGLIIALDENKEAKGELFWDNGETKDTVANKVYLLCEFSVTQNRLEVNISQSTYKDPNNLAFNEIKILGTEEPSNVTVKHNGVPSQTSPTVTYDSNLKVAIITDIDLLLGEAYTVEWSIKIRDEEKIDCYPDENGASAENCTARGCIWEASNSSGVPFCYFVNDLYSVSDVQYNSHGATADISLKSSVYANAFPSTPVNPLRLDVTYHKNEMLQFKIYDPNKNRYEVPVPLNIPSMPSSTPEGQLYDVLIKKNPFGIEIRRKSTGTIIWDSQLLGFTFSDMFIRISTRLPSKYLYGFGETEHRSYRRDLEWHTWGMFSRDQPPGYKKNSYGVHPYYMGLEEDGSAHGVLLLNSNAMDVTFQPLPALTYRTTGGVLDFYVFLGPTPELVTQQYTELIGRPVMVPYWSLGFQLCRYGYQNDSEIASLYDEMVAAQIPYDVQYSDIDYMERQLDFTLSPKFAGFPALINRMKADGMRVILILDPAISGNETQPYPAFTRGVEDDVFIKYPNDGDIVWGKVWPDFPDVVVNGSLDWDSQVELYRAYVAFPDFFRNSTAKWWKREIEELYNNPQNPERSLKFDGMWIDMNEPSSFVNGAVSPGCRDASLNHPPYMPHLESRDRGLSSKTLCMESQQILPDGSLVQHYNVHNLYGWSQTRPTYEAVQEVTGQRGVVITRSTFPSSGRWAGHWLGDNTAAWDQLKKSIIGMMEFSLFGISYTGADICGFFQDAEYEMCVRWMQLGAFYPFSRNHNTIGTRRQDPVSWDAAFVNISRNVLQTRYTLLPYLYTLMQKAHTEGVTVVRPLLHEFVSDQVTWDIDSQFLLGPAFLVSPVLERNARNVTAYFPRARWYDYYTGVDINARGEWKTLPAPLDHINLHVRGGYILPWQEPALNTHLSRKNPLGLIIALDENKEAKGELFWDDGQTKDTVAKKVYLLCEFSVTQNHLEVTISQSTYKDPNNLAFNEIKILGMEEPSNVTVKHNGVPSQTSPTVTYDSNLKVAIITDINLFLGEAYTVEWSIKIRDEEKIDCYPDENGDSAENCTARGCIWEASNSSGVPFCYFVNDLYSVSDVQYNSHGATADISLKSSVHANAFPSTPVNPLRLDVTYHKNEMLQFKIYDPNNNRYEVPVPLNIPSVPSSTPEGQLYDVLIKKNPFGIEIRRKSTGTIIWDSQLLGFTFNDMFIRISTRLPSKYLYGFGETEHTSYRRDLEWHTWGMFSRDQPPGYKKNSYGVHPYYMGLEEDGSAHGVLLLNSNAMDVTFQPLPALTYRTTGGVLDFYVFLGPTPELVTQQYTELIGRPVMVPYWSLGFQLCRYGYQNDSEISSLYDEMVAAQIPYDVQYSDIDYMERQLDFTLSPKFAGFPALINRMKADGMRVILILDPAISGNETQPYPAFTRGVEDDVFIKYPNDGDIVWGKVWPDFPDVVVNGSLDWDSQVELYRAYVAFPDFFRNSTAKWWKREIEELYNNPQNPERSLKFDGMWIDMNEPSSFVNGAVSPGCRDASLNHPPYMPYLESRDRGLSSKTLCMESQQILPDGSPVQHYNVHNLYGWSQTRPTYEAVQEVTGQRGVVITRSTFPSSGRWAGHWLGDNTAAWDQLKKSIIGMMEFSLFGISYTGADICGFFQDAEYEMCVRWMQLGAFYPFSRNHNTIGTRRQDPVSWDVAFVNISRTVLQTRYTLLPYLYTLMHKAHTEGVTVVRPLLHEFVSDQVTWDIDSQFLLGPAFLVSPVLERNARNVTAYFPRARWYDYYTGVDINARGEWKTLPAPLDHINLHVRGGYILPWQEPALNTHLSRQKFMGFKIALDDEGTAGGWLFWDDGQSIDTYGKGLYYLASFSASQNTMQSHIIFNNYITGTNPLKLGYIEIWGVGSVPVTSVSISVSGMVITPSFNNDPTTQVLSIDVTDRNISLHNFTSLTWISTL

SEQ ID NO: 48937 - protein, 1114 aa, Homo sapiens
  Payload ID: 9808
  Gene Symbol: MGAM
  Gene Name: maltase-glucoamylase
  ENSP ID: ENSP00000488282
  MOD_RES (1)..(1): Any amino acid
XFYEDNSTWDVHQQFLWGPGLLITPVLDEGAEKVMAYVPDAVWYDYETGSQVRWRKQKVEMELPGDKIGLHLRGGYIFPTQQPNTTTLASRKNPLGLIIALDENKEAKGELFWDNGETKDTVANKVYLLCEFSVTQNRLEVNISQSTYKDPNNLAFNEIKILGTEEPSNVTVKHNGVPSQTSPTVTYDSNLKVAIITDIDLLLGEAYTVEWSIKIRDEEKIDCYPDENGASAENCTARGCIWEASNSSGVPFCYFVNDLYSVSDVQYNSHGATADISLKSSVYANAFPSTPVNPLRLDVTYHKNEMLQFKIYDPNKNRYEVPVPLNIPSMPSSTPEGQLYDVLIKKNPFGIEIRRKSTGTIIWDSQLLGFTFSDMFIRISTRLPSKYLYGFGETEHRSYRRDLEWHTWGMFSRDQPPGYKKNSYGVHPYYMGLEEDGSAHGVLLLNSNAMDVTFQPLPALTYRTTGGVLDFYVFLGPTPELVTQQYTELIGRPVMVPYWSLGFQLCRYGYQNDSEIASLYDEMVAAQIPYDVQYSDIDYMERQLDFTLSPKFAGFPALINRMKADGMRVILILDPAISGNETQPYPAFTRGVEDDVFIKYPNDGDIVWGKVWPDFPDVVVNGSLDWDSQVELYRAYVAFPDFFRNSTAKWWKREIEELYNNPQNPERSLKFDGMWIDMNEPSSFVNGAVSPGCRDASLNHPPYMPHLESRDRGLSSKTLCMESQQILPDGSLVQHYNVHNLYGWSQTRPTYEAVQEVTGQRGVVITRSTFPSSGRWAGHWLGDNTAAWDQLKKSIIGMMEFSLFGISYTGADICGFFQDAEYEMCVRWMQLGAFYPFSRNHNTIGTRRQDPVSWDVAFVNISRTVLQTRYTLLPYLYTLMHKAHTEGVTVVRPLLHEFVSDQVTWDIDSQFLLGPAFLVSPVLERNARNVTAYFPRARWYDYYTGVDINARGEWKTLPAPLDHINLHVRGGYILPWQEPALNTHLSRQKFMGFKIALDDEGTAGGWLFWDDGQSIDTYGKGLYYLASFSASQNTMQSHIIFNNYITGTNPLKLGYIEIWGVGSVPVTSVSISVSGMVITPSFNNDPTTQVLSIDVTDRNISLHNFTSLTWISTL

SEQ ID NO: 48938 - protein, 2515 aa, Homo sapiens
  Payload ID: 9809
  Gene Symbol: MGAM2
  Gene Name: maltase-glucoamylase 2 (putative)
  Uniprot ID: Q2M2H8
  ENSP ID: ENSP00000420449
MARKLSVLEVLLIIFCLIVVTIDILLLLLVLEETSDTSFTPECPEIPQSERIDCTPDQEVTEDICRWQYKCCWSPVADANVPRCFFPWNWGYEASNGHTNTSTGFTAQLKRLPSPSLFGNDVATTLFTAEYQTSNRFHFKITDFNNIRYEVSHENINLVDGIADASNLSYYVEVTDKPFSIKIMRTSNRRVLLDTSIGPLQFAQQYLQLSFRLPSANVYGLGEHVHQQYRHNMTWKTWPIFTRDATPTEGMINLYGAHTFFLCLEDARGSSFGVFLMNSNAMEVTLQPAPAITYRTIGGILDFYVFLGNTPEQVVQEYLELVGRPFFPPYWSLGFQLSRRDYGGINKLKEVVSRNRLAEIPYDVQYSDIDYMDGKKDFTVDEVAYSGLPDFVKELHDNGQKYLIIMNPGISKNSNYEPYNNGSLKRVWILGSNGFAVGEGYPGPTVFPDYTNPVCTEWWTDQVAKFHDHLEFDGVWIEMNEVSSLLQASNNQCESNNLNFPPFLPRVLDHLLFARTLCMDTEFHGGLHYDIHSLYGHSMARTTNLALETIFMNNRSFILSRSTFAGSGKFAAHWLGDNAATWDDLRWSIPTILEFNLFGIPMVGANICGYNNNVTEELCRRWMQLGAFYPLPRNHNGPGFRDQDPAAFGVDSLLLKSSRHYLNIRYTLLPYLYTLFYHAHTRGETVARPLVHEFYQDSATWDVHEQFLWGPGLLITPVLYEGVDEVKAYIPDATWYDYETGVAISWRKQLVNMLLPGDKIGLHLRGGYIFPTQKPNTTTEASRRNSLGLIIALDYKREAKGELYWDDGVSKDAVTEKKYILYDFSVTSNHLQAKIINNNYMDTDNLMFTDITILGMDKQPANFIVLLNNVATSSPSVVYNASTKVVTITDLQGLVLGQEFSIRWNLPVSDLEKFNCYPDDPTASEESCRQRGCLWEDTSTPGVPTCYYDTIPNYVASDIQYLNTSITADLSLPMAPESAAAAASDSLSAKISFLHLKVIYHTATMLQVKIYDPTNKRYEVPVPLNTPPQPVGDPENRLYDVRIQNNPFGIQIQRKNSSTVIWDSQLPGFIFNDMFLSISTRLPSQYIYGFGETEHTTFRRNMNWNTWGMFAHDEPPAYKKNSYGVHPYYMALEEDGSAHGVLLLNSNAMDVTLQPTPALTYRTTGGILDFYIVLGPTPELVTQQYTELIGRPAMIPYWALGFHLSRYGYQNDAEISSLYDAMVAAQIPYDVQHVDIDYMNRKLDFTLSANFQNLSLLIEQMKKNGMRFILILDPAISGNETQYLPFIRGQENNVFIKWPDTNDIVWGKVWPDLPNVIVDGSLDHETQVKLYRAYVAFPDFFRNSTAAWWKKEIEELYANPREPEKSLKFDGLWIDMNEPSNFVDGSVRGCSNEMLNNPPYMPYLESRDKGLSSKTLCMESQQILPDSSPVEHYNVHNLYGWSQTRPTYEAVQEVTGQRGVIITRSTFPSSGRWGGHRLGNNTAAWDQLGKSIIGMMEFSLFGIPYTGADICGFFGDAEYEMCVRWMQLGAFYPFSRNHNNIGTRRQDPVAWNSTFEMLSRKVLETRYTLLPYLYTLMHKAHVEGSTVVRPLLHEFTDDRTTWDIDRQFMLGPAILISPVLETSTFEISAYFPRARWYDYSTGTSSTSTGQRKILKAPLDHINLHVRGGYILPWQEPAMNTHSSRQNFMGLIVALDDNGTAEGQVFWDDGQSIDTYENGNYFLANFIAAQNILQIQTIHNKYLSDSNPLKVGYIRIWGVNTYVTQVSFTYDNRQFMETNFKSEPYNQILTIQLTDKTINLEKLTEVTWIDGGPVLPTPTKTSTIPMSSHPSPSTTNATSSETITSSASANTTTGTTDTVPITTTSFPSTTSVTTNTTVPDTTSPFPTSTTNASTNATVPITTTPFPTSTIGVTTNATVPNTTAPFPTNASTASTNATVPITTTCFATSTIGVTTNATVPDTTAPFPTNTTTASTNATIPITTTPFATSTISVTTSTTVPDTTAPFPTSTTSASTNATPVPITTTLFATSTIGVTTGTTVPDTTAPFPTSTTSTSTSATVPITTTPSPTNTADANTSNTVPNTTMPSPTSSTTVSTIATVPISVTPSLTSTADATISTTVLIATTSSLTGTTDVSTSTTINNISTPVQTNTTNASTSTNVANITATSHTSTDDTVPNNTVPVTAIPSLANTGVDTTSNSFSIMTTSFSESTNAMNTTVIMATTSPTSTDVASTNNDASMTNFLLATMSAGNITSNSISITTTSFGNSVPFVTTPSPSTDATTTSNNTNPGMTTYYQTSPTIPTHTLTSIPSSITSILSMFPTSNTFTTDKITNFTTPTNANTIIFNTLDTKSTMVIDATVTTTSTKDNTMSPDTTVTSIDKFTTHITQFATPHSATTTTLALSHTSLAPTNLSNLGTMDITDADNSSSVTGNTTHISVSNLTTASVTITATGLDSQTPHMVINSVATYLPITATSATTDTTNITKYALNTTTPDSTVHTSATAPTYIANAINATQVP

SEQ ID NO: 48939 - protein, 482 aa, Homo sapiens
  Payload ID: 9809
  Gene Symbol: MGAM2
  Gene Name: maltase-glucoamylase 2 (putative)
  Uniprot ID: Q2M2H8
  ENSP ID: ENSP00000447431
MARKLSVLEVLLIIFCLIVVTIDILLLLLVLEETSDTSFTPECPEIPQSERIDCTPDQEVTEDICRWQYKCCWSPVADANVPRCFFPWNWGYEASNGHTNTSTGFTAQLKRLPSPSLFGNDVATTLFTAEYQTSNRFHFKITDFNNIRYEVSHENINLVDGIADASNLSYYVEVTDKPFSIKIMRTSNRRVLLDTSIGPLQFAQQYLQLSFRLPSANVYGLGEHVHQQYRHNMTWKTWPIFTRDATPTEGMINLYGAHTFFLCLEDARGSSFGVFLMNSNAMEVTLQPAPAITYRTIGGILDFYVFLGNTPEQVVQEYLELVGRPFFPPYWSLGFQLSRRDYGGINKLKEVVSRNRLAEIPYDVQYSDIDYMDGKKDFTVDEVAYSGLPDFVKELHDNGQKYLIIMNPGISKNSNYEPYNNGSLKRVWILGSNGFAVGEGYPGPTVFPDYTNPVCTEWWTDQVAKFHDHLEFDGVWIVSYYS

SEQ ID NO: 48940 - protein, 482 aa, Homo sapiens; identical to SEQ ID NO: 48939
  Payload ID: 9809
  Gene Symbol: MGAM2
  Gene Name: maltase-glucoamylase 2 (putative)
  Uniprot ID: Q2M2H8
  ENSP ID: ENSP00000484330

SEQ ID NO: 48941 - protein, 2515 aa, Homo sapiens; identical to SEQ ID NO: 48938
  Payload ID: 9809
  Gene Symbol: MGAM2
  Gene Name: maltase-glucoamylase 2 (putative)
  Uniprot ID: Q2M2H8
  ENSP ID: ENSP00000488423

SEQ ID NO: 48942 - protein, 507 aa, Homo sapiens
  Payload ID: 9810
  Gene Symbol: MALRD1
  Gene Name: MAM and LDL receptor class A domain containing 1
  ENSP ID: ENSP00000366476
  MOD_RES (1)..(1): Any amino acid
XECPRGRSALLKGPPQEKPNRRSALLSVGEISELCPEITDFLCRDKKCIASHLLCDYKPDCSDRSDEAHCAHYTSTTGSCNFETSSGNWTTACSLTQDSEDDLDWAIGSRIPAKALIPDSDHTPGSGQHFLYVNSSGSKEGSVARITTSKSFPASLGMCTVRFWFYMIDPRSMGILKVYTIEESGLNILVWSVIGNKRTGWTYGSVPLSSNSPFKVAFEADLDGNEDIFIALDDISFTPECVTGGPVPVQPSPCEADQFSCIYTLQCVPLSGKCDGHEDCIDGSDEMDCPLSPTPPLCSNMEFPCSTDECIPSLLLCDGVPDCHFNEDELICSNKSCSNGALVCASSNSCIPAHQRCDGFADCMDFQLDESSCSECPLNYCRNGGTCVVEKNGPMCRCRQGWKGNRCHIKFNPPATDFTYAQNNTWTLLGIGLAFLMTHITVAVLCFLANRKVPIRKTEGSGNCAFVNPVYGNWSNPEKTESSVYSFSNPLYGTTSGSLETLSHHLK

SEQ ID NO: 48943 - protein, 1486 aa, Homo sapiens
  Payload ID: 9810
  Gene Symbol: MALRD1
  Gene Name: MAM and LDL receptor class A domain containing 1
  ENSP ID: ENSP00000366477
PRDHSLNASQGHFMFILKKSSSLWQVAKLQSPTFSQTGPGCILSFWFYNYGLSVGAAELQLHMENSHDSTVIWRVLYNQGKQWLEATIQLGRLSQPFHLSLDKVSLGIYDGVSAIDDIRFENCTLPLPAESCEGLDHFWCRHTRACIEKLRLCDLVDDCGDRTDEVNCAPELQCNFETGICNWEQDAKDDFDWTRSQGPTPTLNTGPMKDNTLGTAKGHYLYIESSEPQAFQDSAALLSPILNATDTKGCTFRFYYHMFGKRIYRLAIYQRIWSDSRGQLLWQIFGNQGNRWIRKHLNISSRQPFQILVEASVGDGFTGDIAIDDLSFMDCTLYPGNLPADLPTPPETSVPVTLPPHNCTDNEFICRSDGHCIEKMQKCDFKYDCPDKSDEASCVMEVCSFEKRSLCKWYQPIPVHLLQDSNTFRWGLGNGISIHHGEENHRPSVDHTQNTTDGWYLYADSSNGKFGDTADILTPIISLTGPKCTLVFWTHMNGATVGSLQVLIKKDNVTSKLWAQTGQQGAQWKRAEVFLGIRSHTQIVFRAKRGISYIGDVAVDDISFQDCSPLLSPERKCTDHEFMCANKHCIAKDKLCDFVNDCADNSDETTFICRTSSGRCDFEFDLCSWKQEKDEDFDWNLKASSIPAAGTEPAADHTLGNSSGHYIFIKSLFPQQPMRAARISSPVISKRSKNCKIIFHYHMYGNGIGALTLMQVSVTNQTKVLLNLTVEQGNFWRREELSLFGDEDFQLKFEGRVGKGQRGDIALDDIVLTENCLSLHDSVQEELAVPLPTGFCPLGYRECHNGKCYRLEQSCNFVDNCGDNTDENECGSSCTFEKGWCGWQNSQADNFDWVLGVGSHQSLRPPKDHTLGNENAILLMRRHKYPIRSVNLHTVKHVLKAQTVGNCSVSKLEARLLDFLSVPNENTFGSSDHTNWHFMYLEATAVGLRGDKAHFRSTMWRESSAACTMSFWYFVSAKATGSIQILIKRGRRRRRAPNPVLSGSPTIPRQGSQQLGGWRGGSARHRARAFPEPECPRGRSALLKGPPQEKPNRRSALLSVGEISELCPEITDFLCRDKKCIASHLLCDYKPDCSDRSDEAHCAHYTSTTGSCNFETSSGNWTTACSLTQDSEDDLDWAIGSRIPAKALIPDSDHTPGSGQHFLYVNSSGSKEGSVARITTSKSFPASLGMCTVRFWFYMIDPRSMGILKVYTIEESGLNILVWSVIGNKRTGWTYGSVPLSSNSPFKVAFEADLDGNEDIFIALDDISFTPECVTGGPVPVQPSPCEADQFSCIYTLQCVPLSGKCDGHEDCIDGSDEMDCPLSPTPPLCSNMEFPCSTDECIPSLLLCDGVPDCHFNEDELICSNKSCSNGALVCASSNSCIPAHQRCDGFADCMDFQLDESSCSDTWTLLGIGLAFLMTHITVAVLCFLANRKVPIRKTEGSGNCAFVNPVYGNWSNPEKTESSVYSFSNPLYGTTSGSLETLSHHLK

SEQ ID NO: 48944 - protein, 66 aa, Homo sapiens
  Payload ID: 9810
  Gene Symbol: MALRD1
  Gene Name: MAM and LDL receptor class A domain containing 1
  ENSP ID: ENSP00000403218
NTFMKISVLARQHVSQKFLTNNNLKMYYEFCLFLLKPIIWHNIRKPGDPVTSSQIAASRPSLIQHV

SEQ ID NO: 48945 - protein, 258 aa, Homo sapiens
  Payload ID: 9810
  Gene Symbol: MALRD1
  Gene Name: MAM and LDL receptor class A domain containing 1
  ENSP ID: ENSP00000404330
LKFEGRVGKGQRGDIALDDIVLTENCLSLHDSVQEELAVPLPTGFCPLGYRECHNGKCYRLEQSCNFVDNCGDNTDENECGSSCTFEKGWCGWQNSQADNFDWVLGVGSHQSLRPPKDHTLGNENGHFMYLEATAVGLRGDKAHFRSTMWRESSAACTMSFWYFVSAKATGSIQILIKTEKGLSKVWQESKQNPGNHWQKADILLGKLRNFEVIFQGIRTRDLGGGAAIDDIEFKNCTTVGEISELCPEITDFLCRDK

SEQ ID NO: 48946 - protein, 2156 aa, Homo sapiens
  Payload ID: 9810
  Gene Symbol: MALRD1
  Gene Name: MAM and LDL receptor class A domain containing 1
  Uniprot ID: Q5VYJ5
  ENSP ID: ENSP00000412763
MLFFLDRMLAFPMNETFCCLWIACVFNSTLAQQGTESFQCDNGVSLPPDSICDFTDQCGDSSDERHCLNYERCDFEDGLCHMTQDQSLQPSWTKRSGMIGLSPPFYDHNGDVSAHFLSLVSRVDSISSSLRSRVFLPTNDQHDCQITFYYFSCQVSGKLMVGLQTACGGPIQHLWQNTAALPNQWERNVIKIQSSQRFQVVFEGQMASTYEQDEVIAIDDISFSSGCLPANDGILLCQEALNAERELCHPDTDLCRFDATDEELRLCQACGFEFDMCEWTSEASAGQISWMRTKAREIPAFESTPQQDQGGDDEGYYVWVGAKHGFTLNHLDSRAYLNSSVCHCLGKSCHLQFYYAMESSVLRVRLYNNKEEEIFWTYNISTHSQWVKADVLIPEDLKTFKIIFEGTLLSQRSFIALDHLWVYACGQTQSRKLCSADEFPCTSGQCIAKESVCDSRQDCSDESDEDPATCSKHLTCDFESGFCGWEPFLTEDSHWKLMKGLNNGEHHFPAADHTANINHGSFIYLEAQRSPGVAKLGSPVLTKLLTASTPCQVQFWYHLSQHSNLSVFTRTSLDGNLQKQGKIIRFSESQWSHAKIDLIAEAGESTLPFQLILEATVLSSNATVALDDISVSQECEISYKSLPRTSTQSKFSKCDFEANSCDWFEAISGDHFDWIRSSQSELSADFEHQAPPRDHSLNASQGHFMFILKKSSSLWQVAKLQSPTFSQTGPGCILSFWFYNYGLSVGAAELQLHMENSHDSTVIWRVLYNQGKQWLEATIQLGRLSQPFHLSLDKVSLGIYDGVSAIDDIRFENCTLPLPAESCEGLDHFWCRHTRACIEKLRLCDLVDDCGDRTDEVNCAPELQCNFETGICNWEQDAKDDFDWTRSQGPTPTLNTGPMKDNTLGTAKGHYLYIESSEPQAFQDSAALLSPILNATDTKGCTFRFYYHMFGKRIYRLAIYQRIWSDSRGQLLWQIFGNQGNRWIRKHLNISSRQPFQILVEASVGDGFTGDIAIDDLSFMDCTLYPGNLPADLPTPPETSVPVTLPPHNCTDNEFICRSDGHCIEKMQKCDFKYDCPDKSDEASCVMEVCSFEKRSLCKWYQPIPVHLLQDSNTFRWGLGNGISIHHGEENHRPSVDHTQNTTDGWYLYADSSNGKFGDTADILTPIISLTGPKCTLVFWTHMNGATVGSLQVLIKKDNVTSKLWAQTGQQGAQWKRAEVFLGIRSHTQIVFRAKRGISYIGDVAVDDISFQDCSPLLSPERKCTDHEFMCANKHCIAKDKLCDFVNDCADNSDETTFICRTSSGRCDFEFDLCSWKQEKDEDFDWNLKASSIPAAGTEPAADHTLGNSSGHYIFIKSLFPQQPMRAARISSPVISKRSKNCKIIFHYHMYGNGIGALTLMQVSVTNQTKVLLNLTVEQGNFWRREELSLFGDEDFQLKFEGRVGKGQRGDIALDDIVLTENCLSLHDSVQEELAVPLPTGFCPLGYRECHNGKCYRLEQSCNFVDNCGDNTDENECGSSCTFEKGWCGWQNSQADNFDWVLGVGSHQSLRPPKDHTLGNENGHFMYLEATAVGLRGDKAHFRSTMWRESSAACTMSFWYFVSAKATGSIQILIKTEKGLSKVWQESKQNPGNHWQKADILLGKLRNFEVIFQGIRTRDLGGGAAIDDIEFKNCTTVGEISELCPEITDFLCRDKKCIASHLLCDYKPDCSDRSDEAHCAHYTSTTGSCNFETSSGNWTTACSLTQDSEDDLDWAIGSRIPAKALIPDSDHTPGSGQHFLYVNSSGSKEGSVARITTSKSFPASLGMCTVRFWFYMIDPRSMGILKVYTIEESGLNILVWSVIGNKRTGWTYGSVPLSSNSPFKVAFEADLDGNEDIFIALDDISFTPECVTGGPVPVQPSPCEADQFSCIYTLQCVPLSGKCDGHEDCIDGSDEMDCPLSPTPPLCSNMEFPCSTDECIPSLLLCDGVPDCHFNEDELICSNKSCSNGALVCASSNSCIPAHQRCDGFADCMDFQLDESSCSECPLNYCRNGGTCVVEKNGPMCRCRQGWKGNRCHIKFNPPATDFTYAQNNTWTLLGIGLAFLMTHITVAVLCFLANRKVPIRKTEGSGNCAFVNPVYGNWSNPEKTESSVYSFSNPLYGTTSGSLETLSHHLK

SEQ ID NO: 48947 - protein, 686 aa, Homo sapiens
  Payload ID: 9811
  Gene Symbol: MAMDC2
  Gene Name: MAM domain containing 2
  Uniprot ID: Q7Z304
  ENSP ID: ENSP00000366387
MLLRGVLLALQALQLAGALDLPAGSCAFEESTCGFDSVLASLPWILNEEGHYIYVDTSFGKQGEKAVLLSPDLQAEEWSCLRLVYQITTSSESLSDPSQLNLYMRFEDESFDRLLWSAKEPSDSWLIASLDLQNSSKKFKILIEGVLGQGNTASIALFEIKMTTGYCIECDFEENHLCGFVNRWNPNVNWFVGGGSIRNVHSILPQDHTFKSELGHYMYVDSVYVKHFQEVAQLISPLTTAPMAGCLSFYYQIQQGNDNVFSLYTRDVAGLYEEIWKADRPGNAAWNLAEVEFSAPYPMEVIFEVAFNGPKGGYVALDDISFSPVHCQNQTELLFSAVEASCNFEQDLCNFYQDKEGPGWTRVKVKPNMYRAGDHTTGLGYYLLANTKFTSQPGYIGRLYGPSLPGNLQYCLRFHYAIYGFLKMSDTLAVYIFEENHVVQEKIWSVLESPRGVWMQAEITFKKPMPTKVVFMSLCKSFWDCGLVALDDITIQLGSCSSSEKLPPPPGECTFEQDECTFTQEKRNRSSWHRRRGETPTSYTGPKGDHTTGVGYYMYIEASHMVYGQKARLLSRPLRGVSGKHCLTFFYHMYGGGTGLLSVYLKKEEDSEESLLWRRRGEQSISWLRALIEYSCERQHQIIFEAIRGVSIRSDIAIDDVKFQAGPCGEMEDTTQQSSGYSEDLNEIEY

SEQ ID NO: 48948 - protein, 549 aa, Homo sapiens
  Payload ID: 9811
  Gene Symbol: MAMDC2
  Gene Name: MAM domain containing 2
  ENSP ID: ENSP00000485495
MLLRGVLLALQALQLAGALDLPAGSCAFEESTCGFDSVLASLPWILNEEGHYIYVDTSFGKQGEKAVLLSPDLQAEEWSCLRLVYQITTSSESLSDPSQLNLYMRFEDESFDRLLWSAKEPSDSWLIASLDLQNSSKKFKILIEGVLGQGNTASIALFEIKMTTGYCIECDFEENHLCGFVNRWNPNVNWFVGGGSIRNVHSILPQDHTFKSELGHYMYVDSVYVKHFQEVAQLISPLTTAPMAGCLSFYYQIQQGNDNVFSLYTRDVAGLYEEIWKADRPGNAAWNLAEVEFSAPYPMEVIFEVAFNGPKGGYVALDDISFSPVHCQNQTELLFSAVEASCNFEQDLCNFYQDEGPGWTRVKVKPNMYRAGDHTTGLGYYLLANTKFTSQPGYIGRLYGPSLPGNLQYCLRFHYAIYGFLKMSDTLAVYIFEENHVVQEKIWSVLESPRGVWMQAEITFKKPMPTKVVFMSLCKSFWDCGLVALDDITIQLGSCSSSEKLPPPPGECTFEQDECTFTQEKRNRSSWHRRRGETPTSYTGPKGDHTTGV

SEQ ID NO: 48949 - protein, 1137 aa, Homo sapiens
  Payload ID: 9812
  Gene Symbol: MAMDC4
  Gene Name: MAM domain containing 4
  Uniprot ID: Q6UXC1
  ENSP ID: ENSP00000319388
MPLSSHLLPALVLFLAGSSGWAWVPNHCRSPGQAVCNFVCDCRDCSDEAQCGYHGASPTLGAPFACDFEQDPCGWRDISTSGYSWLRDRAGAALEGPGPHSDHTLGTDLGWYMAVGTHRGKEASTAALRSPTLREAASSCKLRLWYHAASGDVAELRVELTHGAETLTLWQSTGPWGPGWQELAVTTGRIRGDFRVTFSATRNATHRGAVALDDLEFWDCGLPTPQANCPPGHHHCQNKVCVEPQQLCDGEDNCGDLSDENPLTCGRHIATDFETGLGPWNRSEGWSRNHRAGGPERPSWPRRDHSRNSAQGSFLVSVAEPGTPAILSSPEFQASGTSNCSLVFYQYLSGSEAGCLQLFLQTLGPGAPRAPVLLRRRRGELGTAWVRDRVDIQSAYPFQILLAGQTGPGGVVGLDDLILSDHCRPVSEVSTLQPLPPGPRAPAPQPLPPSSRLQDSCKQGHLACGDLCVPPEQLCDFEEQCAGGEDEQACGTTDFESPEAGGWEDASVGRLQWRRVSAQESQGSSAAAAGHFLSLQRAWGQLGAEARVLTPLLGPSGPSCELHLAYYLQSQPREVSCNFERDTCSWYPGHLSDTHWRWVESRGPDHDHTTGQGHFVLLDPTDPLAWGHSAHLLSRPQVPAAPTECLSFWYHLHGPQIGTLRLAMRREGEETHLWSRSGTQGNRWHEAWATLSHQPGSHAQYQLLFEGLRDGYHGTMALDDVAVRPGPCWAPNYCSFEDSDCGFSPGGQGLWRRQANASGHAAWGPPTDHTTETAQGHYMVVDTSPDALPRGQTASLTSKEHRPLAQPACLTFWYHGSLRSPGTLRVYLEERGRHQVLSLSAHGGLAWRLGSMDVQAERAWRVVFEAVAAGVAHSYVALDDLLLQDGPCPQPGSCDFESGLCGWSHLAWPGLGGYSWDWGGGATPSRYPQPPVDHTLGTEAGHFAFFETGVLGPGGRAAWLRSEPLPATPASCLRFWYHMGFPEHFYKGELKVLLHSAQGQLAVWGAGGHRRHQWLEAQVEVASAKEFQIVFEATLGGQPALGPIALDDVEYLAGQHCQQPAPSPGNTAAPGSVPAVVGSALLLLMLLVLLGLGGRRWLQKKGSCPFQSNTEATAPGFDNILFNADGVTLPASVTSDP

SEQ ID NO: 48950 - protein, 1216 aa, Homo sapiens
  Payload ID: 9812
  Gene Symbol: MAMDC4
  Gene Name: MAM domain containing 4
  Uniprot ID: Q6UXC1
  ENSP ID: ENSP00000411339
MPLSSHLLPALVLFLAGSSGWAWVPNHCRSPGQAVCNFVCDCRDCSDEAQCGYHGASPTLGAPFACDFEQDPCGWRDISTSGYSWLRDRAGAALEGPGPHSDHTLGTDLGWYMAVGTHRGKEASTAALRSPTLREAASSCKLRLWYHAASGDVAELRVELTHGAETLTLWQSTGPWGPGWQELAVTTGRIRGDFRVTFSATRNATHRGAVALDDLEFWDCGLPTPQANCPPGHHHCQNKVCVEPQQLCDGEDNCGDLSDENPLTCGRHIATDFETGLGPWNRSEGWSRNHRAGGPERPSWPRRDHSRNSAQGSFLVSVAEPGTPAILSSPEFQASGTSNCSLVFYQYLSGSEAGCLQLFLQTLGPGAPRAPVLLRRRRGELGTAWVRDRVDIQSAYPFQILLAGQTGPGGVVGLDDLILSDHCRPVSEVSTLQPLPPGPRAPAPQPLPPSSRLQDSCKQGHLACGDLCVPPEQLCDFEEQCAGGEDEQACGTTDFESPEAGGWEDASVGRLQWRRVSAQESQGSSAAAAGHFLSLQRAWGQLGAEARVLTPLLGPSGPSCELHLAYYLQSQPRGFLALVVVDNGSRELAWQALSSSAGIWKVDKVLLGARRRPFRLEFVGLVDLDGPDQQGAGVDNVTLRDCSPTVTTERDREVSCNFERDTCSWYPGHLSDTHWRWVESRGPDHDHTTGQGHFVLLDPTDPLAWGHSAHLLSRPQVPAAPTECLSFWYHLHGPQIGTLRLAMRREGEETHLWSRSGTQGNRWHEAWATLSHQPGSHAQYQLLFEGLRDGYHGTMALDDVAVRPGPCWAPNYCSFEDSDCGFSPGGQGLWRRQANASGHAAWGPPTDHTTETAQGHYMVVDTSPDALPRGQTASLTSKEHRPLAQPACLTFWYHGSLRSPGTLRVYLEERGRHQVLSLSAHGGLAWRLGSMDVQAERAWRVVFEAVAAGVAHSYVALDDLLLQDGPCPQPGSCDFESGLCGWSHLAWPGLGGYSWDWGGGATPSRYPQPPVDHTLGTEAGHFAFFETGVLGPGGRAAWLRSEPLPATPASCLRFWYHMGFPEHFYKGELKVLLHSAQGQLAVWGAGGHRRHQWLEAQVEVASAKEFQIVFEATLGGQPALGPIALDDVEYLAGQHCQQPAPSPGNTAAPGSVPAVVGSALLLLMLLVLLGLGGRRWLQKKGSCPFQSNTEATAPGFDNILFNADGVTLPASVTSDP

SEQ ID NO: 48951 - protein, 236 aa, Homo sapiens
  Payload ID: 9812
  Gene Symbol: MAMDC4
  Gene Name: MAM domain containing 4
  ENSP ID: ENSP00000435513
LSFWYHLHGPQIGTLRLAMRREGEETHLWSRSGTQGNRWHEAWATLSHQPGSHAQYQLLFEGLRDGYHGTMALDDVAVRPGPCWAPNYCSFEDSDCGFSPGGQGLWRRQANASGHAAWGPPTDHTTETAQGHYMVVDTSPDALPRGQTASLTSKEHRPLAQPACLTFWYHGSLRSPGTLRVYLEERGRHQVLSLSAHGGLAWRLGSMDVQAERAWRVSAGWGAPPPPPPPRAAWTR

SEQ ID NO: 48952 - protein, 159 aa, Homo sapiens
  Payload ID: 9813
  Gene Symbol: MDGA1
  Gene Name: MAM domain containing glycosylphosphatidylinositol anchor 1
  ENSP ID: ENSP00000393330
  MOD_RES (1)..(1): Any amino acid
XNQHNAVVKAIPVRRVEKGQLLEYILTDLRVPHSYEVRLTPYTTFGAGDMASRIIHYTEHNTCHFEDEKICGYTQDLTDNFDWTRQNALTQNPKRSPNTGPPTDISGTPEGYYMFIETSRPRELGDRARLVSPLYNASAKFYCVSFFYHMYGKHIGSLN

SEQ ID NO: 48953 - protein, 955 aa, Homo sapiens
  Payload ID: 9813
  Gene Symbol: MDGA1
  Gene Name: MAM domain containing glycosylphosphatidylinositol anchor 1
  Uniprot ID: Q8NFP4
  ENSP ID: ENSP00000402584
MEVTCLLLLALIPFHCRGQGVYAPAQAQIVHAGQACVVKEDNISERVYTIREGDTLMLQCLVTGHPRPQVRWTKTAGSASDKFQETSVFNETLRIERIARTQGGRYYCKAENGVGVPAIKSIRVDVQYLDEPMLTVHQTVSDVRGNFYQEKTVFLRCTVNSNPPARFIWKRGSDTLSHSQDNGVDIYEPLYTQGETKVLKLKNLRPQDYASYTCQVSVRNVCGIPDKAITFRLTNTTAPPALKLSVNETLVVNPGENVTVQCLLTGGDPLPQLQWSHGPGPLPLGALAQGGTLSIPSVQARDSGYYNCTATNNVGNPAKKTVNLLVRSMKNATFQITPDVIKESENIQLGQDLKLSCHVDAVPQEKVTYQWFKNGKPARMSKRLLVTRNDPELPAVTSSLELIDLHFSDYGTYLCMASFPGAPVPDLSVEVNISSETVPPTISVPKGRAVVTVREGSPAELQCEVRGKPRPPVLWSRVDKEAALLPSGLPLEETPDGKLRLERVSRDMSGTYRCQTARYNGFNVRPREAQVQLNVQFPPEVEPSSQDVRQALGRPVLLRCSLLRGSPQRIASAVWRFKGQLLPPPPVVPAAAEAPDHAELRLDAVTRDSSGSYECSVSNDVGSAACLFQVSAKAYSPEFYFDTPNPTRSHKLSKNYSYVLQWTQREPDAVDPVLNYRLSIRQLNQHNAVVKAIPVRRVEKGQLLEYILTDLRVPHSYEVRLTPYTTFGAGDMASRIIHYTEPINSPNLSDNTCHFEDEKICGYTQDLTDNFDWTRQNALTQNPKRSPNTGPPTDISGTPEGYYMFIETSRPRELGDRARLVSPLYNASAKFYCVSFFYHMYGKHIGSLNLLVRSRNKGALDTHAWSLSGNKGNVWQQAHVPISPSGPFQIIFEGVRGPGYLGDIAIDDVTLKKGECPRKQTDPNKVVVMPGSGAPCQSSPQLWGPMAIFLLALQR

SEQ ID NO: 48954 - protein, 129 aa, Homo sapiens
  Payload ID: 9813
  Gene Symbol: MDGA1
  Gene Name: MAM domain containing glycosylphosphatidylinositol anchor 1
  ENSP ID: ENSP00000421510
MLQCLVTGHPRPQVRWTKTAGSASDKFQETSVFNETLRIERIARTQGGRYYCKAENGVGVPAIKSIRVDVQYLDEPMLTVHQTVSDVRGNFYQEKTVFLRCTVNSNPPARFIWKRGSDTLSHSQDNGVD

SEQ ID NO: 48955 - protein, 973 aa, Homo sapiens
  Payload ID: 9813
  Gene Symbol: MDGA1
  Gene Name: MAM domain containing glycosylphosphatidylinositol anchor 1
  Uniprot ID: Q8NFP4
  ENSP ID: ENSP00000422042
MEVTCLLLLALIPFHCRGQGVYAPAQAQIVHAGQACVVKEDNISERVYTIREGDTLMLQCLVTGHPRPQVRWTKTAGSASDKFQETSVFNETLRIERIARTQGGRYYCKAENGVGVPAIKSIRVDVQYLDEPMLTVHQTVSDVRGNFYQEKTVFLRCTVNSNPPARFIWKRGSDTLSHSQDNGVDIYEPLYTQGETKVLKLKNLRPQDYASYTCQVSVRNVCGIPDKAITFRLTNTTAPPALKLSVNETLVVNPGENVTVQCLLTGGDPLPQLQWSHGPGPLPLGALAQGGTLSIPSVQARDSGYYNCTATNNVGNPAKKTVNLLVRSMKNATFQITPDVIKESENIQLGQDLKLSCHVDAVPQEKVTYQWFKNGKPARMSKRLLVTRNDPELPAVTSSLELIDLHFSDYGTYLCMASFPGAPVPDLSVEVNISSETVPPTISVPKGRAVVTVREGSPAELQCEVRGKPRPPVLWSRVDKEAALLPSGLPLEETPDGKLRLERVSRDMSGTYRCQTARYNGFNVRPREAQVQLNVQFPPEVEPSSQDVRQALGRPVLLRCSLLRGSPQRIASAVWRFKGQLLPPPPVVPAAAEAPDHAELRLDAVTRDSSGSYECSVSNDVGSAACLFQVSAKAYSPEFYFDTPNPTRSHKLSKNYSYVLQWTQREPDAVDPVLNYRLSIRQLNQHNAVVKAIPVRRVEKGQLLEYILTDLRVPHSYEVRLTPYTTFGAGDMASRIIHYTEPINSPNLSDNTCHFEDEKICGYTQDLTDNFDWTRQNALTQNPKRSPNTGPPTDISGTPEGYYMFIETSRPRELGDRARLVSPLYNASAKFYCVSFFYHMYGKHIGSLNLLVRSRNKGALDTHAWSLSGNKGNVWQQAHVPISPSGPFQIIFEGVRGPGYLGDIAIDDVTLKKGECPRKQTDPNKGARREGGGGAESGGSCAWRGFLSVEGGCLGLNRGSECLSDGNHVALTV

SEQ ID NO: 48956 - protein, 87 aa, Homo sapiens
  Payload ID: 9813
  Gene Symbol: MDGA1
  Gene Name: MAM domain containing glycosylphosphatidylinositol anchor 1
  ENSP ID: ENSP00000425911
  MOD_RES (1)..(1): Any amino acid
XHKLSKNYSYVLQWTQREPDAVDPVLNYRLSIRQLNQHNAVVKAIPVRRVEKGQLLEYILTDLRVPHSYETTPATLRMRRSVAIPRT

SEQ ID NO: 48957 - protein, 77 aa, Homo sapiens
  Payload ID: 9813
  Gene Symbol: MDGA1
  Gene Name: MAM domain containing glycosylphosphatidylinositol anchor 1
  ENSP ID: ENSP00000427645
MLQCLVTGHPRPQVRWTKTAGSASDKFQETSVFNETLRIERIARTQGGRYYCKAENGVGVPAIKSIRVDVQYLDEPM

SEQ ID NO: 48958 - protein, 727 aa, Homo sapiens
  Payload ID: 9814
  Gene Symbol: MDGA2
  Gene Name: MAM domain containing glycosylphosphatidylinositol anchor 2
  Uniprot ID: Q7Z553
  ENSP ID: ENSP00000349925
MVSFRLSNKTASPSIKLLVDDPIVVNPGEAITLVCVTTGGEPAPSLTWVRSFGTLPEKTVLNGGTLTIPAITSDDAGTYSCIANNNVGNPAKKSTNIIVRALKKGRFWITPDPYHKDDNIQIGREVKISCQVEAVPSEELTFSWFKNGRPLRSSERMVITQTDPDVSPGTTNLDIIDLKFTDFGTYTCVASLKGGGISDISIDVNISSSTVPPNLTVPQEKSPLVTREGDTIELQCQVTGKPKPIILWSRADKEVAMPDGSMQMESYDGTLRIVNVSREMSGMYRCQTSQYNGFNVKPREALVQLIVQYPPAVEPAFLEIRQGQDRSVTMSCRVLRAYPIRVLTYEWRLGNKLLRTGQFDSQEYTEYAVKSLSNENYGVYNCSIINEAGAGRCSFLVTGKAYAPEFYYDTYNPVWQNRHRVYSYSLQWTQMNPDAVDRIVAYRLGIRQAGQQRWWEQEIKINGNIQKGELITYNLTELIKPEAYEVRLTPLTKFGEGDSTIRVIKYSAPVNPHLREFHCGFEDGNICLFTQDDTDNFDWTKQSTATRNTKYTPNTGPNADRSGSKEGFYMYIETSRPRLEGEKARLLSPVFSIAPKNPYGPTNTAYCFSFFYHMYGQHIGVLNVYLRLKGQTTIENPLWSSSGNKGQRWNEAHVNIYPITSFQLIFEGIRGPGIEGDIAIDDVSIAEGECAKQDLATKNSVDGAVGILVHIWLFPIIVLISILSPRR

SEQ ID NO: 48959 - protein, 956 aa, Homo sapiens
  Payload ID: 9814
  Gene Symbol: MDGA2
  Gene Name: MAM domain containing glycosylphosphatidylinositol anchor 2
  Uniprot ID: Q7Z553
  ENSP ID: ENSP00000382178
MDLLYGLVWLLTVLLEGISGQGVYAPPTVRIVHSGLACNIEEERYSERVYTIREGETLELTCLVTGHPRPQIRWTKTAGSASDRFQDSSVFNETLRITNIQRHQGGRYYCKAENGLGSPAIKSIRVDVYYLDDPVVTVHQSIGEAKEQFYYERTVFLRCVANSNPPVRYSWRRGQEVLLQGSDKGVEIYEPFFTQGETKILKLKNLRPQDYANYSCIASVRNVCNIPDKMVSFRLSNKTASPSIKLLVDDPIVVNPGEAITLVCVTTGGEPAPSLTWVRSFGTLPEKTVLNGGTLTIPAITSDDAGTYSCIANNNVGNPAKKSTNIIVRALKKGRFWITPDPYHKDDNIQIGREVKISCQVEAVPSEELTFSWFKNGRPLRSSERMVITQTDPDVSPGTTNLDIIDLKFTDFGTYTCVASLKGGGISDISIDVNISSSTVPPNLTVPQEKSPLVTREGDTIELQCQVTGKPKPIILWSRADKEVAMPDGSMQMESYDGTLRIVNVSREMSGMYRCQTSQYNGFNVKPREALVQLIVQYPPAVEPAFLEIRQGQDRSVTMSCRVLRAYPIRVLTYEWRLGNKLLRTGQFDSQEYTEYAVKSLSNENYGVYNCSIINEAGAGRCSFLVTGKAYAPEFYYDTYNPVWQNRHRVYSYSLQWTQMNPDAVDRIVAYRLGIRQAGQQRWWEQEIKINGNIQKGELITYNLTELIKPEAYEVRLTPLTKFGEGDSTIRVIKYSAPVNPHLREFHCGFEDGNICLFTQDDTDNFDWTKQSTATRNTKYTPNTGPNADRSGSKEGFYMYIETSRPRLEGEKARLLSPVFSIAPKNPYGPTNTAYCFSFFYHMYGQHIGVLNVYLRLKGQTTIENPLWSSSGNKGQRWNEAHVNIYPITSFQLIFEGIRGPGIEGDIAIDDVSIAEGECAKQDLATKNSVDGAVGILVHIWLFPIIVLISILSPRR

SEQ ID NO: 48960 - protein, 826 aa, Homo sapiens
  Payload ID: 9814
  Gene Symbol: MDGA2
  Gene Name: MAM domain containing glycosylphosphatidylinositol anchor 2
  ENSP ID: ENSP00000405456
LDDPVVTVHQSIGEAKEQFYYERTVFLRCVANSNPPVRYSWRRGQEVLLQGSDKGVEIYEPFFTQGETKILKLKNLRPQDYANYSCIASVRNVCNIPDKMVSFRLSNKTASPSIKLLVDDPIVVNPGEAITLVCVTTGGEPAPSLTWVRSFGTLPEKTVLNGGTLTIPAITSDDAGTYSCIANNNVGNPAKKSTNIIVRALKKGRFWITPDPYHKDDNIQIGREVKISCQVEAVPSEELTFSWFKNGRPLRSSERMVITQTDPDVSPGTTNLDIIDLKFTDFGTYTCVASLKGGGISDISIDVNISSSTVPPNLTVPQEKSPLVTREGDTIELQCQVTGKPKPIILWSRADKEVAMPDGSMQMESYDGTLRIVNVSREMSGMYRCQTSQYNGFNVKPREALVQLIVQYPPAVEPAFLEIRQGQDRSVTMSCRVLRAYPIRVLTYEWRLGNKLLRTGQFDSQEYTEYAVKSLSNENYGVYNCSIINEAGAGRCSFLVTGKAYAPEFYYDTYNPVWQNRHRVYSYSLQWTQMNPDAVDRIVAYRLGIRQAGQQRWWEQEIKINGNIQKGELITYNLTELIKPEAYEVRLTPLTKFGEGDSTIRVIKYSAPVNPHLREFHCGFEDGNICLFTQDDTDNFDWTKQSTATRNTKYTPNTGPNADRSGSKEGFYMYIETSRPRLEGEKARLLSPVFSIAPKNPYGPTNTAYCFSFFYHMYGQHIGVLNVYLRLKGQTTIENPLWSSSGNKGQRWNEAHVNIYPITSFQLIFEGIRGPGIEGDIAIDDVSIAEGECAKQDLATKNSVDGAVGILVHIWLFPIIVLISILSPRR

SEQ ID NO: 48961 - protein, 250 aa, Homo sapiens
  Payload ID: 9814
  Gene Symbol: MDGA2
  Gene Name: MAM domain containing glycosylphosphatidylinositol anchor 2
  ENSP ID: ENSP00000434991
MVSFRLSNKTASPSIKLLVDDPIVVNPGEAITLVCVTTGGEPAPSLTWVRSFGTLPEKTVLNGGTLTIPAITSDDAGTYSCIANNNVGNPAKKSTNIIVRALKKGRFWITPDPYHKDDNIQIGREVKISCQVEAVPSEELTFSWFKNGRPLRSSERMVITQTDPDVSPGTTNLDIIDLKFTDFGTYTCVASLKGGGISDISIDVNISSSTGNTIGDKRNILTSSKTLPLESTHLTTDRCGFSIEWKLYKV

SEQ ID NO: 48962 - protein, 253 aa, Homo sapiens
  Payload ID: 9814
  Gene Symbol: MDGA2
  Gene Name: MAM domain containing glycosylphosphatidylinositol anchor 2
  ENSP ID: ENSP00000450827
  MOD_RES (1)..(1): Any amino acid
XKILKLKNLRPQDYANYSCIASVRNVCNIPDKMVSFRLSNKTGGEPAPSLTWVRSFGTLPEKTVLNGGTLTIPAITSDDAGTYSCIANNNVGNPAKKSTNIIVRALKKGRFWITPDPYHKDDNIQIGREVKISCQVEAVPSEELTFSWFKNGRPLRSSERMVITQTDPDVSPGTTNLDIIDLKFTDFGTYTCVASLKGGGISDISIDVNISSSTVPPNLTVPQEKSPLVTREGDTIELQCQVTGKPKPIILWS

SEQ ID NO: 48963 - protein, 142 aa, Homo sapiens
  Payload ID: 9814
  Gene Symbol: MDGA2
  Gene Name: MAM domain containing glycosylphosphatidylinositol anchor 2
  ENSP ID: ENSP00000452515
MFKYESLGICRRTHGSAACFSHSVADSPEVAFCQAKLPFLPPTTVTSEAPPTVRIVHSGLACNIEEERYSERVYTIREGETLELTCLVTGHPRPQIRWTKTAGSASDRFQDSSVFNETLRITNIQRHQGGRYYCKAENGLGS

SEQ ID NO: 48964 - protein, 233 aa, Homo sapiens
  Payload ID: 9814
  Gene Symbol: MDGA2
  Gene Name: MAM domain containing glycosylphosphatidylinositol anchor 2
  ENSP ID: ENSP00000452593
MVSFRLSNKTASPSIKLLVDDPIVVNPGEAITLVCVTTGGEPAPSLTWVRSFGTLPEKTVLNGGTLTIPAITSDDAGTYSCIANNNVGNPAKKSTNIIVRALKKGRFWITPDPYHKDDNIQIGREVKISCQVEAVPSEELTFSWFKNGRPLRSSERMVITQTDPDVSPGTTNLDIIDLKFTDFGTYTCVASLKGGGISDISIDVNISSSTGKITIGHQRRRHNRTAMSSNWQT

SEQ ID NO: 48965 - protein, 380 aa, Homo sapiens
  Payload ID: 9815
  Gene Symbol: MASP1
  Gene Name: mannan-binding lectin serine peptidase 1 (C4/C2 activating component of Ra-reactive factor)
  Uniprot ID: P48740
  ENSP ID: ENSP00000169293
MRWLLLYYALCFSLSKASAHTVELNNMFGQIQSPGYPDSYPSDSEVTWNITVPDGFRIKLYFMHFNLESSYLCEYDYVKVETEDQVLATFCGRETTDTEQTPGQEVVLSPGSFMSITFRSDFSNEERFTGFDAHYMAVDVDECKEREDEELSCDHYCHNYIGGYYCSCRFGYILHTDNRTCRVECSDNLFTQRTGVITSPDFPNPYPKSSECLYTIELEEGFMVNLQFEDIFDIEDHPEVPCPYDYIKIKVGPKVLGPFCGEKAPEPISTQSHSVLILFHSDNSGENRGWRLSYRAAGNECPELQPPVHGKIEPSQAKYFFKDQVLVSCDTGYKVLKDNVEMDTFQIECLKDGTWSNKIPTCKKNEIDLESELKSEQVTE

SEQ ID NO: 48966 - protein, 728 aa, Homo sapiens
  Payload ID: 9815
  Gene Symbol: MASP1
  Gene Name: mannan-binding lectin serine peptidase 1 (C4/C2 activating component of Ra-reactive factor)
  Uniprot ID: P48740
  ENSP ID: ENSP00000296280
MRWLLLYYALCFSLSKASAHTVELNNMFGQIQSPGYPDSYPSDSEVTWNITVPDGFRIKLYFMHFNLESSYLCEYDYVKVETEDQVLATFCGRETTDTEQTPGQEVVLSPGSFMSITFRSDFSNEERFTGFDAHYMAVDVDECKEREDEELSCDHYCHNYIGGYYCSCRFGYILHTDNRTCRVECSDNLFTQRTGVITSPDFPNPYPKSSECLYTIELEEGFMVNLQFEDIFDIEDHPEVPCPYDYIKIKVGPKVLGPFCGEKAPEPISTQSHSVLILFHSDNSGENRGWRLSYRAAGNECPELQPPVHGKIEPSQAKYFFKDQVLVSCDTGYKVLKDNVEMDTFQIECLKDGTWSNKIPTCKIVDCRAPGELEHGLITFSTRNNLTTYKSEIKYSCQEPYYKMLNNNTGIYTCSAQGVWMNKVLGRSLPTCLPECGQPSRSLPSLVKRIIGGRNAEPGLFPWQALIVVEDTSRVPNDKWFGSGALLSASWILTAAHVLRSQRRDTTVIPVSKEHVTVYLGLHDVRDKSGAVNSSAARVVLHPDFNIQNYNHDIALVQLQEPVPLGPHVMPVCLPRLEPEGPAPHMLGLVAGWGISNPNVTVDEIISSGTRTLSDVLQYVKLPVVPHAECKTSYESRSGNYSVTENMFCAGYYEGGKDTCLGDSGGAFVIFDDLSQRWVVQGLVSWGGPEECGSKQVYGVYTKVSNYVDWVWEQMGLPQSVVEPQVER

SEQ ID NO: 48967 - protein, 699 aa, Homo sapiens
  Payload ID: 9815
  Gene Symbol: MASP1
  Gene Name: mannan-binding lectin serine peptidase 1 (C4/C2 activating component of Ra-reactive factor)
  Uniprot ID: P48740
  ENSP ID: ENSP00000336792
MRWLLLYYALCFSLSKASAHTVELNNMFGQIQSPGYPDSYPSDSEVTWNITVPDGFRIKLYFMHFNLESSYLCEYDYVKVETEDQVLATFCGRETTDTEQTPGQEVVLSPGSFMSITFRSDFSNEERFTGFDAHYMAVDVDECKEREDEELSCDHYCHNYIGGYYCSCRFGYILHTDNRTCRVECSDNLFTQRTGVITSPDFPNPYPKSSECLYTIELEEGFMVNLQFEDIFDIEDHPEVPCPYDYIKIKVGPKVLGPFCGEKAPEPISTQSHSVLILFHSDNSGENRGWRLSYRAAGNECPELQPPVHGKIEPSQAKYFFKDQVLVSCDTGYKVLKDNVEMDTFQIECLKDGTWSNKIPTCKIVDCRAPGELEHGLITFSTRNNLTTYKSEIKYSCQEPYYKMLNNNTGIYTCSAQGVWMNKVLGRSLPTCLPVCGLPKFSRKLMARIFNGRPAQKGTTPWIAMLSHLNGQPFCGGSLLGSSWIVTAAHCLHQSLDPEDPTLRDSDLLSPSDFKIILGKHWRLRSDENEQHLGVKHTTLHPQYDPNTFENDVALVELLESPVLNAFVMPICLPEGPQQEGAMVIVSGWGKQFLQRFPETLMEIEIPIVDHSTCQKAYAPLKKKVTRDMICAGEKEGGKDACAGDSGGPMVTLNRERGQWYLVGTVSWGDDCGKKDRYGVYSYIHHNKDWIQRVTGVRN

SEQ ID NO: 48968 - protein, 354 aa, Homo sapiens
  Payload ID: 9815
  Gene Symbol: MASP1
  Gene Name: mannan-binding lectin serine peptidase 1 (C4/C2 activating component of Ra-reactive factor)
  ENSP ID: ENSP00000376262
MFGQIQSPGYPDSYPSDSEVTWNITVPDGFRIKLYFMHFNLESSYLCEYDYVKVETEDQVLATFCGRETTDTEQTPGQEVVLSPGSFMSITFRSDFSNEERFTGFDAHYMAVDVDECKEREDEELSCDHYCHNYIGGYYCSCRFGYILHTDNRTCRVECSDNLFTQRTGVITSPDFPNPYPKSSECLYTIELEEGFMVNLQFEDIFDIEDHPEVPCPYDYIKIKVGPKVLGPFCGEKAPEPISTQSHSVLILFHSDNSGENRGWRLSYRAAGNECPELQPPVHGKIEPSQAKYFFKDQVLVSCDTGYKVLKDNVEMDTFQIECLKDGTWSNKIPTCKKNEIDLESELKSEQVTE

SEQ ID NO: 48969 - protein, 615 aa, Homo sapiens
  Payload ID: 9815
  Gene Symbol: MASP1
  Gene Name: mannan-binding lectin serine peptidase 1 (C4/C2 activating component of Ra-reactive factor)
  Uniprot ID: P48740
  ENSP ID: ENSP00000376264
MSITFRSDFSNEERFTGFDAHYMAVDVDECKEREDEELSCDHYCHNYIGGYYCSCRFGYILHTDNRTCRVECSDNLFTQRTGVITSPDFPNPYPKSSECLYTIELEEGFMVNLQFEDIFDIEDHPEVPCPYDYIKIKVGPKVLGPFCGEKAPEPISTQSHSVLILFHSDNSGENRGWRLSYRAAGNECPELQPPVHGKIEPSQAKYFFKDQVLVSCDTGYKVLKDNVEMDTFQIECLKDGTWSNKIPTCKIVDCRAPGELEHGLITFSTRNNLTTYKSEIKYSCQEPYYKMLNNNTGIYTCSAQGVWMNKVLGRSLPTCLPECGQPSRSLPSLVKRIIGGRNAEPGLFPWQALIVVEDTSRVPNDKWFGSGALLSASWILTAAHVLRSQRRDTTVIPVSKEHVTVYLGLHDVRDKSGAVNSSAARVVLHPDFNIQNYNHDIALVQLQEPVPLGPHVMPVCLPRLEPEGPAPHMLGLVAGWGISNPNVTVDEIISSGTRTLSDVLQYVKLPVVPHAECKTSYESRSGNYSVTENMFCAGYYEGGKDTCLGDSGGAFVIFDDLSQRWVVQGLVSWGGPEECGSKQVYGVYTKVSNYVDWVWEQMGLPQSVVEPQVER

SEQ ID NO: 48970 - protein, 204 aa, Homo sapiens
  Payload ID: 9815
  Gene Symbol: MASP1
  Gene Name: mannan-binding lectin serine peptidase 1 (C4/C2 activating component of Ra-reactive factor)
  ENSP ID: ENSP00000376267
MRPTFMSFRWLLLYYALCFSLSKASAHTVELNNMFGQIQSPGYPDSYPSDSEVTWNITVPDGFRIKLYFMHFNLESSYLCEYDYVKVETEDQVLATFCGRETTDTEQTPGQEVVLSPGSFMSITFRSDFSNEERFTGFDAHYMAVDVDECKEREDEELSCDHYCHNYIGGYYCSCRFGYILHTDNRTCRVECSDNLFTQRTGVI

SEQ ID NO: 48971 - protein, 55 aa, Homo sapiens
  Payload ID: 9815
  Gene Symbol: MASP1
  Gene Name: mannan-binding lectin serine peptidase 1 (C4/C2 activating component of Ra-reactive factor)
  ENSP ID: ENSP00000409047
MFGQIQSPGYPDSYPSDSEVTWNITVPDGFRIKLYFMHFNLESSYLCEYDYVKVE

SEQ ID NO: 48972 - protein, 118 aa, Homo sapiens
  Payload ID: 9815
  Gene Symbol: MASP1
  Gene Name: mannan-binding lectin serine peptidase 1 (C4/C2 activating component of Ra-reactive factor)
  ENSP ID: ENSP00000412021
MPANSRDTQGPQNKDKASRTPHRARAHRWLLLYYALCFSLSKASAHTVELNNMFGQIQSPGYPDSYPSDSEVTWNITVPDGFRIKLYFMHFNLESSYLCEYDYVKVETEDQVLATFCG

SEQ ID NO: 48973 - protein, 686 aa, Homo sapiens
  Payload ID: 9816
  Gene Symbol: MASP2
  Gene Name: mannan-binding lectin serine peptidase 2
  Uniprot ID: O00187
  ENSP ID: ENSP00000383690
MRLLTLLGLLCGSVATPLGPKWPEPVFGRLASPGFPGEYANDQERRWTLTAPPGYRLRLYFTHFDLELSHLCEYDFVKLSSGAKVLATLCGQESTDTERAPGKDTFYSLGSSLDITFRSDYSNEKPFTGFEAFYAAEDIDECQVAPGEAPTCDHHCHNHLGGFYCSCRAGYVLHRNKRTCSALCSGQVFTQRSGELSSPEYPRPYPKLSSCTYSISLEEGFSVILDFVESFDVETHPETLCPYDFLKIQTDREEHGPFCGKTLPHRIETKSNTVTITFVTDESGDHTGWKIHYTSTAQPCPYPMAPPNGHVSPVQAKYILKDSFSIFCETGYELLQGHLPLKSFTAVCQKDGSWDRPMPACSIVDCGPPDDLPSGRVEYITGPGVTTYKAVIQYSCEETFYTMKVNDGKYVCEADGFWTSSKGEKSLPVCEPVCGLSARTTGGRIYGGQKAKPGDFPWQVLILGGTTAAGALLYDNWVLTAAHAVYEQKHDASALDIRMGTLKRLSPHYTQAWSEAVFIHEGYTHDAGFDNDIALIKLNNKVVINSNITPICLPRKEAESFMRTDDIGTASGWGLTQRGFLARNLMYVDIPIVDHQKCTAAYEKPPYPRGSVTANMLCAGLESGGKDSCRGDSGGALVFLDSETERWFVGGIVSWGSMNCGEAGQYGVYTKVINYIPWIENIISDF

SEQ ID NO: 48974 - protein, 185 aa, Homo sapiens
  Payload ID: 9816
  Gene Symbol: MASP2
  Gene Name: mannan-binding lectin serine peptidase 2
  Uniprot ID: O00187
  ENSP ID: ENSP00000383691
MRLLTLLGLLCGSVATPLGPKWPEPVFGRLASPGFPGEYANDQERRWTLTAPPGYRLRLYFTHFDLELSHLCEYDFVKLSSGAKVLATLCGQESTDTERAPGKDTFYSLGSSLDITFRSDYSNEKPFTGFEAFYAAEDIDECQVAPGEAPTCDHHCHNHLGGFYCSCRAGYVLHRNKRTCSEQSL

SEQ ID NO: 48975 - protein, 362 aa, Homo sapiens
  Payload ID: 9817
  Gene Symbol: MPI
  Gene Name: mannose phosphate isomerase
  Uniprot ID: P34949
  ENSP ID: ENSP00000318192
MAAPRVFPLSCAVQQYAWGKMGSNSEVARLLASSDPLAQIAEDKPYAELWMGTHPRGDAKILDNRISQKTLSQWIAENQDSLGSKVKDTFNGNLPFLFKVLSVETPLSIQAHPNKELAEKLHLQAPQHYPDANHKPEMAIALTPFQGLCGFRPVEEIVTFLKTAAGNNMEDIFGELLLQLHQQYPGDIGCFAIYFLNLLTLKPGEAMFLEANVPHAYLKGDCVECMACSDNTVRAGLTPKFIDVPTLCEMLSYTPSSSKDRLFLPTRSQEDPYLSIYDPPVPDFTIMKTEVPGSVTEYKVLALDSASILLMVQGTVIASTPTTQTPIPLQRGGVLFIGANESVSLKLTEPKDLLIFRACCLL

SEQ ID NO: 48976 - protein, 423 aa, Homo sapiens
  Payload ID: 9817
  Gene Symbol: MPI
  Gene Name: mannose phosphate isomerase
  Uniprot ID: P34949
  ENSP ID: ENSP00000318318
MAAPRVFPLSCAVQQYAWGKMGSNSEVARLLASSDPLAQIAEDKPYAELWMGTHPRGDAKILDNRISQKTLSQWIAENQDSLGSKVKDTFNGNLPFLFKVLSVETPLSIQAHPNKELAEKLHLQAPQHYPDANHKPEMAIALTPFQGLCGFRPVEEIVTFLKKVPEFQFLIGDEAATHLKQTMSHDSQAVASSLQSCFSHLMKSEKKVVVEQLNLLVKRISQQAAAGNNMEDIFGELLLQLHQQYPGDIGCFAIYFLNLLTLKPGEAMFLEANVPHAYLKGDCVECMACSDNTVRAGLTPKFIDVPTLCEMLSYTPSSSKDRLFLPTRSQEDPYLSIYDPPVPDFTIMKTEVPGSVTEYKVLALDSASILLMVQGTVIASTPTTQTPIPLQRGGVLFIGANESVSLKLTEPKDLLIFRACCLL

SEQ ID NO: 48977 - protein, 373 aa, Homo sapiens
  Payload ID: 9817
  Gene Symbol: MPI
  Gene Name: mannose phosphate isomerase
  ENSP ID: ENSP00000440447
MGTHPRGDAKILDNRISQKTLSQWIAENQDSLGSKVKDTFNGNLPFLFKVLSVETPLSIQAHPNKELAEKLHLQAPQHYPDANHKPEMAIALTPFQGLCGFRPVEEIVTFLKKVPEFQFLIGDEAATHLKQTMSHDSQAVASSLQSCFSHLMKSEKKVVVEQLNLLVKRISQQAAAGNNMEDIFGELLLQLHQQYPGDIGCFAIYFLNLLTLKPGEAMFLEANVPHAYLKGDCVECMACSDNTVRAGLTPKFIDVPTLCEMLSYTPSSSKDRLFLPTRSQEDPYLSIYDPPVPDFTIMKTEVPGSVTEYKVLALDSASILLMVQGTVIASTPTTQTPIPLQRGGVLFIGANESVSLKLTEPKDLLIFRACCLL

SEQ ID NO: 48978 - protein, 71 aa, Homo sapiens
  Payload ID: 9817
  Gene Symbol: MPI
  Gene Name: mannose phosphate isomerase
  ENSP ID: ENSP00000454267
MAAPRGEPLAGVSASVFVERVLGTTPGIIGQVESAPGIPRKDGIPTFLCGAAVCLGEDGFQQRSGAAVGQQ

SEQ ID NO: 48979 - protein, 228 aa, Homo sapiens
  Payload ID: 9817
  Gene Symbol: MPI
  Gene Name: mannose phosphate isomerase
  ENSP ID: ENSP00000454312
MGTHPRGDAKILDNRISQKTLSQWIAENQDSLGSKVKDTFNGNLPFLFKVLSVETPLSIQAHPNKELAEKLHLQAPQHYPDANHKPEMAIALTPFQGLCGFRPVEEIVTFLKTAAGNNMEDIFGELLLQLHQQYPGDIGCFAIYFLNLLTLKPGEAMFLEANVPHAYLKGGEPHFSSEPHCHPCWALFPYLDKGRRRVVKETPKDLAALTSEGSWAQQATAGRDDECI

SEQ ID NO: 48980 - protein, 264 aa, Homo sapiens
  Payload ID: 9817
  Gene Symbol: MPI
  Gene Name: mannose phosphate isomerase
  ENSP ID: ENSP00000454619
MAAPRVFPLSCAVQQYAWGKMGSNSEVARLLASSDPLAQIAEDKPYAELWMGTHPRGDAKILDNRISQKTLSQWIAENQDSLGSKVKDTFNGNLPFLFKVLSVETPLSIQAHPNKELAEKLHLQAPQHYPDANHKPEMAIALTPFQGLCGFRPVEEIVTFLKKVPEFQFLIGDEAATHLKQTMSHDSQAVASSLQSCFSHLMKSEKKVVVEQLNLLVKRISQQGGHSYIPGWVQCSGLGFPADTRLWGQFSTPLPKWNTKRGPT

SEQ ID NO: 48981 - protein, 174 aa, Homo sapiens
  Payload ID: 9817
  Gene Symbol: MPI
  Gene Name: mannose phosphate isomerase
  ENSP ID: ENSP00000454622
MAAPRVFPLSCAVQQYAWGKMGSNSEVARLLASSDPLAQIAEDKPYAEWRKSQSIGRLSPLLLKLEDLWMGTHPRGDAKILDNRISQKTLSQWIAENQDSLGSKVKDTFNGNLPFLFKVLSVETPLSIQAHPNKELAEKLHLQAPQHYPDANHKPEMAIALTPFQGLCGFRPVE

SEQ ID NO: 48982 - protein, 185 aa, Homo sapiens
  Payload ID: 9817
  Gene Symbol: MPI
  Gene Name: mannose phosphate isomerase
  ENSP ID: ENSP00000455065
MAAPRVFPLSCAVQQYAWGKMGSNSEVARLLASSDPLAQIAEDKPYAEILDNRISQKTLSQWIAENQDSLGSKVKDTFNGNLPFLFKVLSVETPLSIQAHPNKELAEKLHLQAPQHYPDANHKPEMAIALTPFQGLCGFRPVEEIVTFLKKVPEFQFLIGDEAATHLKQTMSHDSQAVASSLQSC

SEQ ID NO: 48983 - protein, 288 aa, Homo sapiens
  Payload ID: 9817
  Gene Symbol: MPI
  Gene Name: mannose phosphate isomerase
  ENSP ID: ENSP00000455161
MGSNSEVARLLASSDPLAQIAEDKPYAELWMGTHPRGDAKILDNRISQKTLSQWIAENQDSLGSKVKDTFNGNLPFLFKVLSVETPLSIQAHPNKELAEKLHLQAPQHYPDANHKPEMAIALTPFQGLCGFRPVEEIVTFLKKVPEFQFLIGDEAATHLKQTMSHDSQAVASSLQSCFSHLMKSEKKVVVEQLNLLVKRISQQAAAGNNMEDIFGELLLQLHQQYPGDIGCFAIYFLNLLTLKPGEAMFLEANVPHAYLKGDCVECMACSDNTVRAGLTPKFIDVPTL

SEQ ID NO: 48984 - protein, 403 aa, Homo sapiens
  Payload ID: 9817
  Gene Symbol: MPI
  Gene Name: mannose phosphate isomerase
  ENSP ID: ENSP00000455241
MGSNSEVARLLASSDPLAQIAEDKPYAELWMGTHPRGDAKILDNRISQKTLSQWIAENQDSLGSKVKDTFNGNLPFLFKVLSVETPLSIQAHPNKELAEKLHLQAPQHYPDANHKPEMAIALTPFQGLCGFRPVEEIVTFLKKVPEFQFLIGDEAATHLKQTMSHDSQAVASSLQSCFSHLMKSEKKVVVEQLNLLVKRISQQAAAGNNMEDIFGELLLQLHQQYPGDIGCFAIYFLNLLTLKPGEAMFLEANVPHAYLKGDCVECMACSDNTVRAGLTPKFIDVPTLCEMLSYTPSSSKDRLFLPTRSQEDPYLSIYDPPVPDFTIMKTEVPGSVTEYKVLALDSASILLMVQGTVIASTPTTQTPIPLQRGGVLFIGANESVSLKLTEPKDLLIFRACCLL

SEQ ID NO: 48985 - protein, 173 aa, Homo sapiens
  Payload ID: 9817
  Gene Symbol: MPI
  Gene Name: mannose phosphate isomerase
  ENSP ID: ENSP00000455383
MGSNSEVARLLASSDPLAQIAEDKPYAELWMGTHPRGDAKILDNRISQKTLSQWIAENQDSLGSKVKDTFNGNLPFLFKVLSVETPLSIQAHPNKELAEKLHLQAPQHYPDANHKPEMAIALTPFQGLCGFRPVEEIVTFLKKVPEFQFLIGDEAATHLKQTMSHDSQAVASS

SEQ ID NO: 48986 - protein, 287 aa, Homo sapiens
  Payload ID: 9817
  Gene Symbol: MPI
  Gene Name: mannose phosphate isomerase
  ENSP ID: ENSP00000455405
MAAPRVFPLSCAVQQYAWGKMGSNSEVARLLASSDPLAQIAEDKPYAELWMGTHPRGDAKILDNRISQKTLSQWIAENQDSLGSKVKDTFNGNLPFLFKVLSVETPLSIQAHPNKELAEKLHLQAPQHYPDANHKPEMAIALTPFQGLCGFRPVEEIVTFLKKVPEFQFLIGDEAATHLKQTMSHDSQAVASSLQSCFSHLMKSEKKVVVEQLNLLVKRISQQAAAGNNMEDIFGELLLQLHQQYPGDIGCFAIYFLNLLTLKPGEAMFLEANVPHAYLKGGPWLCH

SEQ ID NO: 48987 - protein, 119 aa, Homo sapiens
  Payload ID: 9817
  Gene Symbol: MPI
  Gene Name: mannose phosphate isomerase
  ENSP ID: ENSP00000455477
MGSNSEVARLLASSDPLAQIAEDKPYAELWMGTHPRGDAKILDNRISQKTLSQWIAENQDSLGSKVKDTFNGNLPFLFKVLSVETPLSIQAHPNKELAEKLHLQAPQHYPDANHKPEMA

SEQ ID NO: 48988 - protein, 175 aa, Homo sapiens
  Payload ID: 9817
  Gene Symbol: MPI
  Gene Name: mannose phosphate isomerase
  ENSP ID: ENSP00000455972
MAAPRVFPLSCAVQQYAWGKMGSNSEVARLLASSDPLAQIAEDKPYAELWMGTHPRGDAKILDNRISQKTLSQWIAENQDSLGSKVKDTFNGNLPFLFKVLSVETPLSIQAPQHYPDANHKPEMAIALTPFQGLCGFRPVEEIVTFLKKVPEFQFLIGDEAATHLKQTMSHDSQA

SEQ ID NO: 48989 - protein, 213 aa, Homo sapiens
  Payload ID: 9817
  Gene Symbol: MPI
  Gene Name: mannose phosphate isomerase
  ENSP ID: ENSP00000457013
QQYAWGKMGSNSEVARLLASSDPLAQIAEDKPYAELWMGTHPRGDAKILDNRISQKTLSQWIAENQDSLGSKVKDTFNGNLPFLFKVLSVETPLSIQAHPNKELAEKLHLQAPQHYPDANHKPEMAIALTPFQGLCGFRPVEEIVTFLKTAAGNNMEDIFGELLLQLHQQYPGDIGCFAIYFLNLLTLKPGEAMFLEANVPHAYLKGGPWLCH

SEQ ID NO: 48990 - protein, 319 aa, Homo sapiens
  Payload ID: 9817
  Gene Symbol: MPI
  Gene Name: mannose phosphate isomerase
  ENSP ID: ENSP00000457020
MGSNSEVARLLASSDPLAQIAEDKPYAELWMGTHPRGDAKILDNRISQKTLSQWIAENQDSLGSKVKDTFNGNLPFLFKVLSVETPLSIQAHPNKELAEKLHLQAPQHYPDANHKPEMAIALTPFQGLCGFRPVEEIVTFLKKVPEFQFLIGDEAATHLKQTMSHDSQAVASSLQSCFSHLMKSEKKVVVEQLNLLVKRISQQAAAGNNMEDIFGELLLQLHQQYPGDIGCFAIYFLNLLTLKPGEAMFLEANVPHAYLKGGEPHFSSEPHCHPCWALFPYLDKGRRRVVKETPKDLAALTSEGSWAQQATAGRDDECI

SEQ ID NO: 48991 - protein, 168 aa, Homo sapiens
  Payload ID: 9817
  Gene Symbol: MPI
  Gene Name: mannose phosphate isomerase
  ENSP ID: ENSP00000457494
MAAPRVFPLSCAVQQYAWGKMGSNSEVARLLASSDPLAQIAEDKPYAELWMGTHPRGDAKILDNRISQKTLSQWIAENQDSLGSKELAEKLHLQAPQHYPDANHKPEMAIALTPFQGLCGFRPVEEIVTFLKKVPEFQFLIGDEAATHLKQTMSHDSQAVASSLQSCF

SEQ ID NO: 48992 - protein, 125 aa, Homo sapiens
  Payload ID: 9817
  Gene Symbol: MPI
  Gene Name: mannose phosphate isomerase
  ENSP ID: ENSP00000457619
MAAPRVFPLSCAVQQYAWGKMGSNSEVARLLASSDPLAQIAEDKPYAELWMGTHPRGDAKILDNRISQKTLSQWIAENQDSLGSKVLALDSASILLMVQGTVIASTPTTQTPIPLQRGGVLFIGA

SEQ ID NO: 48993 - protein, 339 aa, Homo sapiens
  Payload ID: 9817
  Gene Symbol: MPI
  Gene Name: mannose phosphate isomerase
  ENSP ID: ENSP00000457885
MAAPRVFPLSCAVQQYAWGKMGSNSEVARLLASSDPLAQIAEDKPYAELWMGTHPRGDAKILDNRISQKTLSQWIAENQDSLGSKVKDTFNGNLPFLFKVLSVETPLSIQAHPNKELAEKLHLQAPQHYPDANHKPEMAIALTPFQGLCGFRPVEEIVTFLKKVPEFQFLIGDEAATHLKQTMSHDSQAVASSLQSCFSHLMKSEKKVVVEQLNLLVKRISQQAAAGNNMEDIFGELLLQLHQQYPGDIGCFAIYFLNLLTLKPGEAMFLEANVPHAYLKGGEPHFSSEPHCHPCWALFPYLDKGRRRVVKETPKDLAALTSEGSWAQQATAGRDDECI

SEQ ID NO: 48994 - protein, 1456 aa, Homo sapiens [sequence omitted]

SEQ ID NO: 48995 - protein, 1479 aa, Homo sapiens
  Payload ID: 9819
  Gene Symbol: MRC2
  Gene Name: mannose receptor, C type 2
  Uniprot ID: Q9UBG0
  ENSP ID: ENSP00000307513
MGPGRPAPAPWPRHLLRCVLLLGCLHLGRPGAPGDAALPEPNVFLIFSHGLQGCLEAQGGQVRVTPACNTSLPAQRWKWVSRNRLFNLGTMQCLGTGWPGTNTTASLGMYECDREALNLRWHCRTLGDQLSLLLGARTSNISKPGTLERGDQTRSGQWRIYGSEEDLCALPYHEVYTIQGNSHGKPCTIPFKYDNQWFHGCTSTGREDGHLWCATTQDYGKDERWGFCPIKSNDCETFWDKDQLTDSCYQFNFQSTLSWREAWASCEQQGADLLSITEIHEQTYINGLLTGYSSTLWIGLNDLDTSGGWQWSDNSPLKYLNWESDQPDNPSEENCGVIRTESSGGWQNRDCSIALPYVCKKKPNATAEPTPPDRWANVKVECEPSWQPFQGHCYRLQAEKRSWQESKKACLRGGGDLVSIHSMAELEFITKQIKQEVEELWIGLNDLKLQMNFEWSDGSLVSFTHWHPFEPNNFRDSLEDCVTIWGPEGRWNDSPCNQSLPSICKKAGQLSQGAAEEDHGCRKGWTWHSPSCYWLGEDQVTYSEARRLCTDHGSQLVTITNRFEQAFVSSLIYNWEGEYFWTALQDLNSTGSFFWLSGDEVMYTHWNRDQPGYSRGGCVALATGSAMGLWEVKNCTSFRARYICRQSLGTPVTPELPGPDPTPSLTGSCPQGWASDTKLRYCYKVFSSERLQDKKSWVQAQGACQELGAQLLSLASYEEEHFVANMLNKIFGESEPEIHEQHWFWIGLNRRDPRGGQSWRWSDGVGFSYHNFDRSRHDDDDIRGCAVLDLASLQWVAMQCDTQLDWICKIPRGTDVREPDDSPQGRREWLRFQEAEYKFFEHHSTWAQAQRICTWFQAELTSVHSQAELDFLSHNLQKFSRAQEQHWWIGLHTSESDGRFRWTDGSIINFISWAPGKPRPVGKDKKCVYMTASREDWGDQRCLTALPYICKRSNVTKETQPPDLPTTALGGCPSDWIQFLNKCFQVQGQEPQSRVKWSEAQFSCEQQEAQLVTITNPLEQAFITASLPNVTFDLWIGLHASQRDFQWVEQEPLMYANWAPGEPSGPSPAPSGNKPTSCAVVLHSPSAHFTGRWDDRSCTEETHGFICQKGTDPSLSPSPAALPPAPGTELSYLNGTFRLLQKPLRWHDALLLCESRNASLAYVPDPYTQAFLTQAARGLRTPLWIGLAGEEGSRRYSWVSEEPLNYVGWQDGEPQQPGGCTYVDVDGAWRTTSCDTKLQGAVCGVSSGPPPPRRISYHGSCPQGLADSAWIPFREHCYSFHMELLLGHKEARQRCQRAGGAVLSILDEMENVFVWEHLQSYEGQSRGAWLGMNFNPKGGTLVWQDNTAVNYSNWGPPGLGPSMLSHNSCYWIQSNSGLWRPGACTNITMGVVCKLPRAEQSSFSPSALPENPAALVVVLMAVLLLLALLTAALILYRRRQSIERGAFEGARYSRSSSSPTEATEKNILVSDMEMNEQQE

SEQ ID NO: 48996 - protein, 345 aa, Homo sapiens
  Payload ID: 9819
  Gene Symbol: MRC2
  Gene Name: mannose receptor, C type 2
  ENSP ID: ENSP00000400445
MPTGHLGSPLALALLPVATNRPAVQWSCTAPQPTSLAAGTIGAARRRPMASSARRARGSRRYSWVSEEPLNYVGWQDGEPQQPGGCTYVDVDGAWRTTSCDTKLQGAVCGVSSGPPPPRRISYHGSCPQGLADSAWIPFREHCYSFHMELLLGHKEARQRCQRAGGAVLSILDEMENVFVWEHLQSYEGQSRGAWLGMNFNPKGGTLVWQDNTAVNYSNWGPPGLGPSMLSHNSCYWIQSNSGLWRPGACTNITMGVVCKLPRAEQSSFSPSALPENPAALVVVLMAVLLLLALLTAALILYRRRQSIERGAFEGARYSRSSSSPTEATEKNILVSDMEMNEQQE

SEQ ID NO: 48997 - protein, 157 aa, Homo sapiens
  Payload ID: 9819
  Gene Symbol: MRC2
  Gene Name: mannose receptor, C type 2
  ENSP ID: ENSP00000461968
  MOD_RES (1)..(1): Any amino acid
XFVSSLIYNWEGEYFWTALQDLNSTGSFFWLSGDEVMYTHWNRDQPGYSRGGCVALATGSAMGLWEVKNCTSFRARYICRQSLGTPVTPELPGPDPTPSLTGSCPQGWASDTKLRYCYKVFSSERLQDKKSWVQAQGACQELGAQLLSLASYEEEHF

SEQ ID NO: 48998 - protein, 35 aa, Homo sapiens
  Payload ID: 9819
  Gene Symbol: MRC2
  Gene Name: mannose receptor, C type 2
  ENSP ID: ENSP00000463968
MTASREDWGDQRCLTALPYICKRSNVTKETQPPDL

SEQ ID NO: 48999 - protein, 277 aa, Homo sapiens
  Payload ID: 9820
  Gene Symbol: M6PR
  Gene Name: mannose-6-phosphate receptor (cation dependent)
  Uniprot ID: P20645
  ENSP ID: ENSP00000000412
MFPFYSCWRTGLLLLLLAVAVRESWQTEEKTCDLVGEKGKESEKELALVKRLKPLFNKSFESTVGQGSDTYIYIFRVCREAGNHTSGAGLVQINKSNGKETVVGRLNETHIFNGSNWIMLIYKGGDEYDNHCGKEQRRAVVMISCNRHTLADNFNPVSEERGKVQDCFYLFEMDSSLACSPEISHLSVGSILLVTFASLVAVYVVGGFLYQRLVVGAKGMEQFPHLAFWQDLGNLVADGCDFVCRSKPRNVPAAYRGVGDDQLGEESEERDDHLLPM

SEQ ID NO: 49000 - protein, 148 aa, Homo sapiens
  Payload ID: 9820
  Gene Symbol: M6PR
  Gene Name: mannose-6-phosphate receptor (cation dependent)
  ENSP ID: ENSP00000437595
LLLLLAVAVRESWQTEEKTCDLDNFNPVSEERGKVQDCFYLFEMDSSLACSPEISHLSVGSILLVTFASLVAVYVVGGFLYQRLVVGAKGMEQFPHLAFWQDLGNLVADGCDFVCRSKPRNVPAAYRGVGDDQLGEESEERDDHLLPM

SEQ ID NO: 49001 - protein, 96 aa, Homo sapiens
  Payload ID: 9820
  Gene Symbol: M6PR
  Gene Name: mannose-6-phosphate receptor (cation dependent)
  ENSP ID: ENSP00000439070
  MOD_RES (1)..(1): Any amino acid
XILLVTFASLVAVYVVGGFLYQRLVVGAKGMEQFPHLAFWQDLGNLVAKGNGSRSGTSRALLSSALGVECCCTCPFCWLREVSSCPHFCGERFLIL

SEQ ID NO: 49002 - protein, 25 aa, Homo sapiens
  Payload ID: 9820
  Gene Symbol: M6PR
  Gene Name: mannose-6-phosphate receptor (cation dependent)
  ENSP ID: ENSP00000439968
MLIYKGGDEYDNHCGKEQRRAVVMI

SEQ ID NO: 49003 - protein, 191 aa, Homo sapiens
  Payload ID: 9820
  Gene Symbol: M6PR
  Gene Name: mannose-6-phosphate receptor (cation dependent)
  ENSP ID: ENSP00000440488
MFPFYSCWRTGLLLLLLAVAVRESWQTEEKTCDLVGEKGKESEKELALVKRLKPLFNKSFESTVGQGSDTYIYIFRVCREAGNHTSGAGLVQINKSNGKETVVGRLNETHIFNGSNWIMLIYKGGDEYDNHCGKEQRRAVVMISCNRHTLADGCDFVCRSKPRNVPAAYRGVGDDQLGEESEERDDHLLPM

SEQ ID NO: 49004 - protein, 109 aa, Homo sapiens
  Payload ID: 9820
  Gene Symbol: M6PR
  Gene Name: mannose-6-phosphate receptor (cation dependent)
  ENSP ID: ENSP00000440962
MFPFYSCWRTGLLLLLLAVAVRESWQTEEKTCDLVGEKGKESEKELALVKRLKPLFNKSFESTVGQGSDTYIYIFRVCREAGNHTSGAGLVQINKSNGKETVVGRLNET

SEQ ID NO: 49005 - protein, 92 aa, Homo sapiens
  Payload ID: 9820
  Gene Symbol: M6PR
  Gene Name: mannose-6-phosphate receptor (cation dependent)
  ENSP ID: ENSP00000441030
MFPFYSCWRTGLLLLLLAVAVRESWQTEEKTCDLVGEKGKESEKELALVKRLKPLFNKSFESTVGQGSDTYIYIFRVCREAGNHTSGAGLVQ

SEQ ID NO: 49006 - protein, 85 aa, Homo sapiens
  Payload ID: 9820
  Gene Symbol: M6PR
  Gene Name: mannose-6-phosphate receptor (cation dependent)
  ENSP ID: ENSP00000441040
VVGGFLYQRLVVGAKGMEQFPHLAFWQDLGNLVAACGFDLFFNLLERERKQKWDIEGSAVLCAGCGMLLHLSLLLAQGSVFLPTF

SEQ ID NO: 49007 - protein, 133 aa, Homo sapiens
  Payload ID: 9820
  Gene Symbol: M6PR
  Gene Name: mannose-6-phosphate receptor (cation dependent)
  ENSP ID: ENSP00000442100
MFPFYSCWRTGLLLLLLAVAVRESWQTEEKTCDLVGEKGKESEKELALVKRLKPLFNKSFESTVGQGSDTYIYIFRVCREAGNHTSGAGLVQINKSNGKETVVGRLNETHIFNGSLHHWLLFMLLGGSYTSDW

SEQ ID NO: 49008 - protein, 104 aa, Homo sapiens
  Payload ID: 9820
  Gene Symbol: M6PR
  Gene Name: mannose-6-phosphate receptor (cation dependent)
  ENSP ID: ENSP00000442983
  MOD_RES (1)..(1): Any amino acid
XFNKSFESTVGQGSDTYIYIFRVCREAGNHTSGAGLVQINKSNGKETVVGRLNETHIFNGSNWIMLIYKGGDEYDNHCGKEQRRAVVMISCNRHTLAESKHLTT

SEQ ID NO: 49009 - protein, 122 aa, Homo sapiens
  Payload ID: 9820
  Gene Symbol: M6PR
  Gene Name: mannose-6-phosphate receptor (cation dependent)
  ENSP ID: ENSP00000444684
  MOD_RES (1)..(1): Any amino acid
XGGDEYDNHCGKEQRRAVVMISCNRHTLADNFNPVSEERGKVQDCFYLFEMDSSLACSPEISHLSVGSILLVTFASLVAVYVVGGFLYQRLVVGAKGMEQFPHLAFWQDLGNLVAVSNRAAG

SEQ ID NO: 49010 - protein, 248 aa, Homo sapiens
  Payload ID: 9821
  Gene Symbol: MBL2
  Gene Name: mannose-binding lectin (protein C) 2, soluble
  Uniprot ID: P11226
  ENSP ID: ENSP00000363079
MSLFPSLPLLLLSMVAASYSETVTCEDAQKTCPAVIACSSPGINGFPGKDGRDGTKGEKGEPGQGLRGLQGPPGKLGPPGNPGPSGSPGPKGQKGDPGKSPDGDSSLAASERKALQTEMARIKKWLTFSLGKQVGNKFFLTNGEIMTFEKVKALCVKFQASVATPRNAAENGAIQNLIKEEAFLGITDEKTEGQFVDLTGNRLTYTNWNEGEPNNAGSDEDCVLLLKNGQWNDVPCSTSHLAVCEFPI

SEQ ID NO: 49011 - protein, 247 aa, Homo sapiens
  Payload ID: 9822
  Gene Symbol: MPDU1
  Gene Name: mannose-P-dolichol utilization defect 1
  Uniprot ID: O75352
  ENSP ID: ENSP00000250124
MAAEADGPLKRLLVPILLPEKCYDQLFVQWDLLHVPCLKILLSKGLGLGIVAGSLLVKLPQVFKILGAKSAEGLSLQSVMLELVALTGTMVYSITNNFPFSSWGEALFLMLQTITICFLVMHYRGQTVKGVAFLACYGLVLLVLLSPLTPLTVVTLLQASNVPAVVVGRLLQAATNYHNGHTGQLSAITVFLLFGGSLARIFTSIQETGDPLMAGTFVVSSLCNGLIAAQLLFYWNAKPPHKQKKAQ

SEQ ID NO: 49012 - protein, 61 aa, Homo sapiens
  Payload ID: 9822
  Gene Symbol: MPDU1
  Gene Name: mannose-P-dolichol utilization defect 1
  ENSP ID: ENSP00000352876
MAAEADGPLKRLLVPILLPEKCYDQLFVQWDLLHVPCLKILLSKGLGLGIVAGSLLAAPGV

SEQ ID NO: 49013 - protein, 192 aa, Homo sapiens
  Payload ID: 9822
  Gene Symbol: MPDU1
  Gene Name: mannose-P-dolichol utilization defect 1
  ENSP ID: ENSP00000379758
MAAEADGPLKRLLVPILLPEKCYDQLFVQWDLLHVPCLKILLSKGLGLGIVAGSLLVKLPQVFKILGAKSAEGLSLQSVMLELVALTGTMVYSITNNFPFSSWGEALFLMLQTITICFLVMHYRGQTVKGAGDLPKSRLCGSWEPCWELSFSRQPPTTTTGTQASSQPSQSSCCLGAPWPESSLPFRKPEIP

SEQ ID NO: 49014 - protein, 186 aa, Homo sapiens
  Payload ID: 9822
  Gene Symbol: MPDU1
  Gene Name: mannose-P-dolichol utilization defect 1
  Uniprot ID: O75352
  ENSP ID: ENSP00000414071
MAAEADGPLKRLLVPILLPEKCYDQLFVQWDLLHVPCLKILLSKGLGLGIVAGSLLVKLPQVFKILGAKSAEGLSLQSVMLELVALTGTMVYSITNNFPFRCRFPRLLRPGPAGASLTSDALDCSHPAPGLQCACCGGGEASPGSHQLPQRAHRPALSHHSLPAVWGLPGPNLHFHSGVSIPFSQL

SEQ ID NO: 49015 - protein, 61 aa, Homo sapiens; identical to SEQ ID NO: 49012
  Payload ID: 9822
  Gene Symbol: MPDU1
  Gene Name: mannose-P-dolichol utilization defect 1
  ENSP ID: ENSP00000458741

SEQ ID NO: 49016 - protein, 61 aa, Homo sapiens; identical to SEQ ID NO: 49012
  Payload ID: 9822
  Gene Symbol: MPDU1
  Gene Name: mannose-P-dolichol utilization defect 1
  ENSP ID: ENSP00000459306

SEQ ID NO: 49017 - protein, 61 aa, Homo sapiens
  Payload ID: 9822
  Gene Symbol: MPDU1
  Gene Name: mannose-P-dolichol utilization defect 1
  ENSP ID: ENSP00000459409
  MOD_RES (1)..(1): Any amino acid
XADGPLKRLLVPILLPEKCYDQLFVQWDLLHVPCLKILLSKGLGLGIVAGSLLALGVKPYS

SEQ ID NO: 49018 - protein, 109 aa, Homo sapiens
  Payload ID: 9822
  Gene Symbol: MPDU1
  Gene Name: mannose-P-dolichol utilization defect 1
  ENSP ID: ENSP00000459498
MAAEADGPLKRLLVPILLPEKCYDQLFVQWDLLHVPCLKILLSKGLGLGIVAGSLLVKLPQVFKILGAKSAEGLSLQSVMLELVALTGTMVYSITNNFPFRPAFLPPNS

SEQ ID NO: 49019 - protein, 54 aa, Homo sapiens
  Payload ID: 9822
  Gene Symbol: MPDU1
  Gene Name: mannose-P-dolichol utilization defect 1
  ENSP ID: ENSP00000460864
  MOD_RES (1)..(1): Any amino acid
XLKRLLVPILLPEKCYDQLFVQWDLLHVPCLKILLSKGLGLGIVAGSLLAAPGV

SEQ ID NO: 49020 - protein, 75 aa, Homo sapiens
  Payload ID: 9822
  Gene Symbol: MPDU1
  Gene Name: mannose-P-dolichol utilization defect 1
  ENSP ID: ENSP00000461183
MAAEADGPLKRLLVPILLPEKCYDQLFVQWDLLHDISCLLTLFSLLSPLPQDSPQQRPGAGHCGWLTSSKAAPGV

SEQ ID NO: 49021 - protein, 32 aa, Homo sapiens
  Payload ID: 9822
  Gene Symbol: MPDU1
  Gene Name: mannose-P-dolichol utilization defect 1
  ENSP ID: ENSP00000461499
  MOD_RES (1)..(1): Any amino acid
XLLVPILLPEKCYDQLFVQWDLLHALGVKPYS

SEQ ID NO: 49022 - protein, 109 aa, Homo sapiens; identical to SEQ ID NO: 49018
  Payload ID: 9822
  Gene Symbol: MPDU1
  Gene Name: mannose-P-dolichol utilization defect 1
  ENSP ID: ENSP00000462229

SEQ ID NO: 49023 - protein, 52 aa, Homo sapiens
  Payload ID: 9822
  Gene Symbol: MPDU1
  Gene Name: mannose-P-dolichol utilization defect 1
  ENSP ID: ENSP00000462500
MAAEADGPLKRLLVPILLPEKCYDQLFVQWDLLHGEFYSASDPSPTRVTVGP

SEQ ID NO: 49024 - protein, 154 aa, Homo sapiens
  Payload ID: 9822
  Gene Symbol: MPDU1
  Gene Name: mannose-P-dolichol utilization defect 1
  ENSP ID: ENSP00000462839
MAAEADGPLKRLLVPILLPEKCYDQLFVQWDLLHVPCLKILLSKGLGLGIVAGSLLVKLPQVFKILGAKSAEGLSLQSVMLELVALTGTMVYSITNNFPFSFSRQPPTTTTGTQASSQPSQSSCCLGAPWPESSLPFRGEHPILSALRKDSGVQ

SEQ ID NO: 49025 - protein, 116 aa, Homo sapiens
  Payload ID: 9822
  Gene Symbol: MPDU1
  Gene Name: mannose-P-dolichol utilization defect 1
  ENSP ID: ENSP00000463037
ADGPLKRLLVPILLPEKCYDQLFVQWDLLHVPCLKILLSKGLGLGIVAGSLLVKLPQVFKILGAKSAEGLSLQSVMLELVALTGTMVYSITNNFPFSSWGEALFLMLQTITICFLV

SEQ ID NO: 49026 - protein, 109 aa, Homo sapiens; identical to SEQ ID NO: 49018
  Payload ID: 9822
  Gene Symbol: MPDU1
  Gene Name: mannose-P-dolichol utilization defect 1
  ENSP ID: ENSP00000463056

SEQ ID NO: 49027 - protein, 152 aa, Homo sapiens
  Payload ID: 9822
  Gene Symbol: MPDU1
  Gene Name: mannose-P-dolichol utilization defect 1
  ENSP ID: ENSP00000463966
RLLVPILLPEKCYDQLFVQWDLLHVPCLKILLSKGLGLGIVAGSLLVKLPQVFKILGAKSAEGLSLQSVMLELVALTGTMVYSITNNFPFSSWGEALFLMLQTITICFLVMHYRGQTVKASPGSHQLPQRAHRPALSHHSLPAVWGLPGPNL

SEQ ID NO: 49028 - protein, 193 aa, Homo sapiens
  Payload ID: 9822
  Gene Symbol: MPDU1
  Gene Name: mannose-P-dolichol utilization defect 1
  ENSP ID: ENSP00000464158
MAAEADGPLKRLLVPILLPEKCYDQLFVQWDLLHVPCLKILLSKGLGLGIVAGSLLVKLPQVFKILGAKSAEGLSLQSVMLELVALTGTMVYSITNNFPFSSWGEALFLMLQTITICFLVMHYRGQTVKGVAFLACYGLVLLVLLSPLTPLTVVTLLQASNVPAVVVGRAATNYHNGHTGQLSAITVFLLFGG

SEQ ID NO: 49029 - protein, 101 aa, Homo sapiens
  Payload ID: 9822
  Gene Symbol: MPDU1
  Gene Name: mannose-P-dolichol utilization defect 1
  ENSP ID: ENSP00000464524
MAAEADGPLKRLLVPILLPEKCYDQLFVQWDLLHVPCLKILLSKGLGLGIVAGSLLVKLPQVFKILGAKSAEGLSLQSVMLELVALTGTMVYSITNNFPFR

SEQ ID NO: 49030 - protein, 299 aa, Homo sapiens
  Payload ID: 9822
  Gene Symbol: MPDU1
  Gene Name: mannose-P-dolichol utilization defect 1
  ENSP ID: ENSP00000479257
MAAEADGPLKRLLVPILLPEKCYDQLFVQWDLLHVPCLKILLSKGLGLGIVAGSLLVKLPQVFKILGAKSAEGLSLQSVMLELVALTGTMVYSITNNFPFSSWGEALFLMLQTITICFLVMHYRGQTVKGVAFLACYGLVLLVLLSPLTPLTVVPAPGLQCACCGGGEASPGSHQLPQRAHRPALSHHSLPAVWGLPGPNLHFHSGNRRSPDGWDLCGLLSLQRPHRRPAALLLECKASPQAEKGAVEPATGVIPFPLIHPTSGFSPSEPACWCDLLILHSSALADFLSQGFLLVETNG

SEQ ID NO: 49031 - protein, 211 aa, Homo sapiens
  Payload ID: 9822
  Gene Symbol: MPDU1
  Gene Name: mannose-P-dolichol utilization defect 1
  ENSP ID: ENSP00000483915
MAAEADGPLKRLLVPILLPEKCYDQLFVQWDLLHVPCLKILLSKGLGLGIVAGSLLVKLPQVFKILGAKSAEGLSLQSVMLELVALTGTMVYSITNNFPFSSWGEALFLMLQTITICFLVMHYRGQTVKGVAFLACYGLVLLVLLSPLTPLTVVTLLQASNVPAVVVGRLLQAATNTTTGTQASSQPSQSSCCLGAPWPESSLPFRKPEIP

SEQ ID NO: 49032 - protein, 299 aa, Homo sapiens [sequence omitted]

SEQ ID NO: 49033 - protein, 653 aa, Homo sapiens
  Payload ID: 9823
  Gene Symbol: MAN1A1
  Gene Name: mannosidase, alpha, class 1A, member 1
  Uniprot ID: P33908
  ENSP ID: ENSP00000357453
MPVGGLLPLFSSPAGGVLGGGLGGGGGRKGSGPAALRLTEKFVLLLVFSAFITLCFGAIFFLPDSSKLLSGVLFHSSPALQPAADHKPGPGARAEDAAEGRARRREEGAPGDPEAALEDNLARIRENHERALREAKETLQKLPEEIQRDILLEKKKVAQDQLRDKAPFRGLPPVDFVPPIGVESREPADAAIREKRAKIKEMMKHAWNNYKGYAWGLNELKPISKGGHSSSLFGNIKGATIVDALDTLFIMEMKHEFEEAKSWVEENLDFNVNAEISVFEVNIRFVGGLLSAYYLSGEEIFRKKAVELGVKLLPAFHTPSGIPWALLNMKSGIGRNWPWASGGSSILAEFGTLHLEFMHLSHLSGNPIFAEKVMNIRTVLNKLEKPQGLYPNYLNPSSGQWGQHHVSVGGLGDSFYEYLLKAWLMSDKTDLEAKKMYFDAVQAIETHLIRKSSSGLTYIAEWKGGLLEHKMGHLTCFAGGMFALGADAAPEGMAQHYLELGAEIARTCHESYNRTFMKLGPEAFRFDGGVEAIATRQNEKYYILRPEVMETYMYMWRLTHDPKYRKWAWEAVEALENHCRVNGGYSGLRDVYLLHESYDDVQQSFFLAETLKYLYLIFSDDDLLPLEHWIFNSEAHLLPILPKDKKEVEIREE

SEQ ID NO: 49034 - protein, 641 aa, Homo sapiens
  Payload ID: 9824
  Gene Symbol: MAN1A2
  Gene Name: mannosidase, alpha, class 1A, member 2
  Uniprot ID: O60476
  ENSP ID: ENSP00000348959
MTTPALLPLSGRRIPPLNLGPPSFPHHRATLRLSEKFILLLILSAFITLCFGAFFFLPDSSKHKRFDLGLEDVLIPHVDAGKGAKNPGVFLIHGPDEHRHREEEERLRNKIRADHEKALEEAKEKLRKSREEIRAEIQTEKNKVVQEMKIKENKPLPPVPIPNLVGIRGGDPEDNDIREKREKIKEMMKHAWDNYRTYGWGHNELRPIARKGHSPNIFGSSQMGATIVDALDTLYIMGLHDEFLDGQRWIEDNLDFSVNSEVSVFEVNIRFIGGLLAAYYLSGEEIFKIKAVQLAEKLLPAFNTPTGIPWAMVNLKSGVGRNWGWASAGSSILAEFGTLHMEFIHLSYLTGDLTYYKKVMHIRKLLQKMDRPNGLYPNYLNPRTGRWGQYHTSVGGLGDSFYEYLLKAWLMSDKTDHEARKMYDDAIEAIEKHLIKKSRGGLTFIGEWKNGHLEKKMGHLACFAGGMFALGADGSRADKAGHYLELGAEIARTCHESYDRTALKLGPESFKFDGAVEAVAVRQAEKYYILRPEVIETYWYLWRFTHDPRYRQWGWEAALAIEKYCRVNGGFSGVKDVYSSTPTHDDVQQSFFLAETLKYLYLLFSGDDLLPLDHWVFNTEAHPLPVLHLANTTLSGNPAVR

SEQ ID NO: 49035 - protein, 204 aa, Homo sapiens
  Payload ID: 9824
  Gene Symbol: MAN1A2
  Gene Name: mannosidase, alpha, class 1A, member 2
  ENSP ID: ENSP00000396362
  MOD_RES (1)..(1): Any amino acid
XIKKSRGGLTFIGEWKNGHLEKKMGHLACFAGGMFALGADGSRADKAGHYLELGAEIARTCHESYDRTALKLGPESFKFDGAVEAVAVRQAEKYYILRPEVIETYWYLWRFTHDPRYRQWGWEAALAIEKYCRVNGGFSGVKDVYSSTPTHDDVQQSFFLAETLKYLYLLFSGDDLLPLDHWVFNTEAHPLPVLHLANTTLSES

SEQ ID NO: 49036 - protein, 97 aa, Homo sapiens
  Payload ID: 9824
  Gene Symbol: MAN1A2
  Gene Name: mannosidase, alpha, class 1A, member 2
  ENSP ID: ENSP00000402416
EKYCRVNGGFSGVKDVYSSTPTHDDVQQSFFLAETLKYLYLLFSGDDLLPLDHWVFNTEAHPLPVLHLANTTLSGTSQGMRRQNPYFQVLYLYYPDD

SEQ ID NO: 49037 - protein, 331 aa, Homo sapiens
  Payload ID: 9824
  Gene Symbol: MAN1A2
  Gene Name: mannosidase, alpha, class 1A, member 2
  ENSP ID: ENSP00000412706
  MOD_RES (1)..(1): Any amino acid
XIRFIGGLLAAYYLSGEEIFKIKAVQLAEKLLPAFNTPTGIPWAMVNLKSGVGRNWGWASAGSSILAEFGTLHMEFIHLSYLTGDLTYYKKVMHIRKLLQKMDRPNGLYPNYLNPRTGRWGQYHTSVGGLGDSFYEYLLKAWLMSDKTDHEARKMYDDAIEAIEKHLIKKSRGGLTFIGEWKNGHLEKKMGHLACFAGGMFALGADGSRADKAGHYLELGAEIARTCHESYDRTALKLGPESFKFDGAVEAVAVRQAEKYYILRPEVIETYWYLWRFTHDPRYRQWGWEAALAIEKYCRVNGGFSGVKDVYSSTPTHDDVQQSFFLAETLN

SEQ ID NO: 49038 - protein, 699 aa, Homo sapiens
  Payload ID: 9825
  Gene Symbol: MAN1B1
  Gene Name: mannosidase, alpha, class 1B, member 1
  Uniprot ID: Q9UKM7
  ENSP ID: ENSP00000360645
MAACEGRRSGALGSSQSDFLTPPVGGAPWAVATTVVMYPPPPPPPHRDFISVTLSFGENYDNSKSWRRRSCWRKWKQLSRLQRNMILFLLAFLLFCGLLFYINLADHWKALAFRLEEEQKMRPEIAGLKPANPPVLPAPQKADTDPENLPEISSQKTQRHIQRGPPHLQIRPPSQDLKDGTQEEATKRQEAPVDPRPEGDPQRTVISWRGAVIEPEQGTELPSRRAEVPTKPPLPPARTQGTPVHLNYRQKGVIDVFLHAWKGYRKFAWGHDELKPVSRSFSEWFGLGLTLIDALDTMWILGLRKEFEEARKWVSKKLHFEKDVDVNLFESTIRILGGLLSAYHLSGDSLFLRKAEDFGNRLMPAFRTPSKIPYSDVNIGTGVAHPPRWTSDSTVAEVTSIQLEFRELSRLTGDKKFQEAVEKVTQHIHGLSGKKDGLVPMFINTHSGLFTHLGVFTLGARADSYYEYLLKQWIQGGKQETQLLEDYVEAIEGVRTHLLRHSEPSKLTFVGELAHGRFSAKMDHLVCFLPGTLALGVYHGLPASHMELAQELMETCYQMNRQMETGLSPEIVHFNLYPQPGRRDVEVKPADRHNLLRPETVESLFYLYRVTGDRKYQDWGWEILQSFSRFTRVPSGGYSSINNVQDPQKPEPRDKMESFFLGETLKYLFLLFSDDPNLLSLDAYVFNTEAHPLPIWTPA

SEQ ID NO: 49039 - protein, 52 aa, Homo sapiens
  Payload ID: 9825
  Gene Symbol: MAN1B1
  Gene Name: mannosidase, alpha, class 1B, member 1
  ENSP ID: ENSP00000440314
PWAVATTVVMYPPPPPPPHRDFISVTLSFGENYDNSKSWRRRSCWRVRVAPG

SEQ ID NO: 49040 - protein, 695 aa, Homo sapiens
  Payload ID: 9825
  Gene Symbol: MAN1B1
  Gene Name: mannosidase, alpha, class 1B, member 1
  ENSP ID: ENSP00000441398
MYPPPPPPPHRDFISVTLSFGENYDNSKSWRRRSCWRKWKQLSRLQRNMILFLLAFLLFCGLLFYINLADHWKALAFRLEEEQKMRPEIAGLKPANPPVLPAPQKADTDPENLPEISSQKTQRHIQRGPPHLQIRPPSQDLKDGTQEEATKRQEAPVDPRPEGDPQRTVISWRGAVIEPEQGTELPSRRAEVPTKPPLPPARTQGTPVHLNYRQKGVIDVFLHAWKGYRKFAWGHDELKPVSRSFSEWFGLGLTLIDALDTMWILGLRKEFEEARKWVSKKLHFEKDVDVNLFESTIRILGGLLSAYHLSGDSLFLRKAEDFGNRLMPAFRTPSKIPYSDVNIGTGVAHPPRWTSDSTVAEVTSIQLEFRELSRLTGDKKFQEAVEKVTQHIHGLSGKKDGLVPMFINTHSGLFTHLGVFTLGARADSYYEYLLKQWIQGGKQETQLLEDYVEAIEGVRTHLLRHSEPSKLTFVGELAHGRFSAKMDHLVCFLPGTLALGVYHGLPASHMELAQELMETCYQMNRQMETGLSPEIVHFNLYPQPGRRDVEVKPADRHNLLRPETVESLFYLYRVTGDRKYQDWGWEILQSFSRFTRVSTCPRPAWSRPPGHRHGWAVGLRLAPLLVVAVTWIREGRACRSLGVATLQLGGPGIPIPTELHGCGTQSTWRGWAPLIFISQGLSREGLCCGPSIPPV

SEQ ID NO: 49041 - protein, 182 aa, Homo sapiens
  Payload ID: 9825
  Gene Symbol: MAN1B1
  Gene Name: mannosidase, alpha, class 1B, member 1
  ENSP ID: ENSP00000444189
  MOD_RES (1)..(1): Any amino acid
XWAVATTVVMYPPPPPPPHRDFISVTLSFGENYDNSKSWRRRSCWRKWKQLSRLQRNMILFLLAFLLFCGLLFYINLADHWKAPQKADTDPENLPEISSQKTQRHIQRGPPHLQIRPPSQDLKDGTQEEATKRQEAPVDPRPEGDPQRTVISWRGAVIEPEQGTELPSRRAEVPTKPPLPPA

SEQ ID NO: 49042 - protein, 550 aa, Homo sapiens
  Payload ID: 9825
  Gene Symbol: MAN1B1
  Gene Name: mannosidase, alpha, class 1B, member 1
  ENSP ID: ENSP00000444966
MAACEGRRSGALGSSQSDFLTPPVGGAPWAVATTVVMYPPPPPPPHRDFISVTLSFGENYDNSKSWRRRSCWRKWKQLSRLQRNMILFLLAFLLFCGLLFYINLADHWKALAFRLEEEQKMRPEIAGLKPANPPVLPAPQKADTDPENLPEISSQKTQRHIQRGPPHLQIRPPSQDLKDGTQEEATKRQEAPVDPRPEGDPQRTVISWRGAVIEPEQGTELPSRRAEVPTKPPLPPARTQGTPVHLNYRQKGVIDVFLHAWKGYRKFAWGHDELKPVSRSFSEWFGLGLTLIDALDTMWILGLRKEFEEARKWVSKKLHFEKDVDVNLFESTIRILGGLLSAYHLSGDSLFLRKAEDFGNRLMPAFRTPSKIPYSDVNIGTGVAHPPRWTSDSTVAEVTSIQLEFRELSRLTGDKKFQEAVEKVTQHIHGLSGKKDGLVPMFINTHSGLFTHLGVFTLGARADSYYEYLLKQWIQGGKQETQLLEDYVEAIEGVRTHLLRHSEPSKLTFVGELAHGRFSAKMGRWLWASTTACPPATWSWPRSSWRLVTR

SEQ ID NO: 49043 - protein, 270 aa, Homo sapiens
  Payload ID: 9825
  Gene Symbol: MAN1B1
  Gene Name: mannosidase, alpha, class 1B, member 1
  ENSP ID: ENSP00000448658
  MOD_RES (1)..(1): Any amino acid
XFLPGTLALGVYHGLPASHMELAQELMETCYQMNRQMETGLSPEIVHFNLYPQPGRRDVEVKPADRHNLLRPETVESLFYLYRVTGDRKYQDWGWEILQSFSRFTRPGCLRVQHRSPPSAYLDPCLGWMAAGVGTSGGQRHLAGSVAFSKGPRSTGNRQVAQALNWLWAPPRLCFNQDTVRTSEAVSLGVMRGGLGRWSLRLLPPEDTNHDSRLLKPEQVSVGRPEGGFEVVPGTGVTEWTAQGAALPGLVKPQMSPIQGSGGAAVTPEA

SEQ ID NO: 49044 - protein, 124 aa, Homo sapiens
  Payload ID: 9825
  Gene Symbol: MAN1B1
  Gene Name: mannosidase, alpha, class 1B, member 1
  ENSP ID: ENSP00000450147
  MOD_RES (1)..(1): Any amino acid
XETGLSPEIVHFNLYPQPGRRDVEVKPADRHNLLRPETVESLFYLYRVTGDRKYQDWGWEILQSFSRFTRDPQKPEPRDKMESFFLGETLKYLFLLFSDDPNLLSLDAYVFNTEAHPLPIWTPA

SEQ ID NO: 49045 - protein, 115 aa, Homo sapiens
  Payload ID: 9825
  Gene Symbol: MAN1B1
  Gene Name: mannosidase, alpha, class 1B, member 1
  ENSP ID: ENSP00000483132
PWAVATTVVMYPPPPPPPHRDFISVTLSFGENYDNSKSWRRRSCWRKWKQLSRLQRNMILFLLAFLLFCGLLFYINLADHWKAPGGIYGNELARNQDKEKGRAVCNHLARTQMLI

SEQ ID NO: 49046 - protein, 450 aa, Homo sapiens
  Payload ID: 9826
  Gene Symbol: MAN1C1
  Gene Name: mannosidase, alpha, class 1C, member 1
  ENSP ID: ENSP00000263979
MMQFAWQSYKRYAMGKNELRPLTKDGYEGNMFGGLSGATVIDSLDTLYLMELKEEFQEAKAWVGESFHLNVSGEASLFEVNIRYIGGLLSAFYLTGEEVFRIKAIRLGEKLLPAFNTPTGIPKGVVSFKSGNWGWATAGSSSILAEFGSLHLEFLHLTELSGNQVFAEKVRNIRKVLRKIEKPFGLYPNFLSPVSGNWVQHHVSVGGLGDSFYEYLIKSWLMSGKTDMEAKNMYYEALEAIETYLLNVSPGGLTYIAEWRGGILDHKMGHLACFSGGMIALGAEDAKEEKRAHYRELAAQITKTCHESYARSDTKLGPEAFWFNSGREAVATQLSESYYILRPEVVESYMYLWRQTHNPIYREWGWEVVLALEKYCRTEAGFSGIQDVYSSTPNHDNKQQSFFLAETLKYLYLLFSEDDLLSLEDWVFNTEAHPLPVNHSDSSGRAWGRH

SEQ ID NO: 49047 - protein, 401 aa, Homo sapiens
  Payload ID: 9826
  Gene Symbol: MAN1C1
  Gene Name: mannosidase, alpha, class 1C, member 1
  ENSP ID: ENSP00000363449
MELKEEFQEAKAWVGESFHLNVSGEASLFEVNIRYIGGLLSAFYLTGEEVFRIKAIRLGEKLLPAFNTPTGIPKGVVSFKSGNWGWATAGSSSILAEFGSLHLEFLHLTELSGNQVFAEKVRNIRKVLRKIEKPFGLYPNFLSPVSGNWVQHHVSVGGLGDSFYEYLIKSWLMSGKTDMEAKNMYYEALEAIETYLLNVSPGGLTYIAEWRGGILDHKMGHLACFSGGMIALGAEDAKEEKRAHYRELAAQITKTCHESYARSDTKLGPEAFWFNSGREAVATQLSESYYILRPEVVESYMYLWRQTHNPIYREWGWEVVLALEKYCRTEAGFSGIQDVYSSTPNHDNKQQSFFLAETLKYLYLLFSEDDLLSLEDWVFNTEAHPLPVNHSDSSGRAWGRH

SEQ ID NO: 49048 - protein, 630 aa, Homo sapiens
  Payload ID: 9826
  Gene Symbol: MAN1C1
  Gene Name: mannosidase, alpha, class 1C, member 1
  Uniprot ID: Q9NR34
  ENSP ID: ENSP00000363452
MLMRKVPGFVPASPWGLRLPQKFLFLLFLSGLVTLCFGALFLLPHSSRLKRLFLAPRTQQPGLEVVAEIAGHAPAREQEPPPNPAPAAPAPGEDDPSSWASPRRRKGGLRRTRPTGPREEATAARGNSIPASRPGDEGVPFRFDFNAFRSRLRHPVLGTRADESQEPQSQVRAQREKIKEMMQFAWQSYKRYAMGKNELRPLTKDGYEGNMFGGLSGATVIDSLDTLYLMELKEEFQEAKAWVGESFHLNVSGEASLFEVNIRYIGGLLSAFYLTGEEVFRIKAIRLGEKLLPAFNTPTGIPKGVVSFKSGNWGWATAGSSSILAEFGSLHLEFLHLTELSGNQVFAEKVRNIRKVLRKIEKPFGLYPNFLSPVSGNWVQHHVSVGGLGDSFYEYLIKSWLMSGKTDMEAKNMYYEALEAIETYLLNVSPGGLTYIAEWRGGILDHKMGHLACFSGGMIALGAEDAKEEKRAHYRELAAQITKTCHESYARSDTKLGPEAFWFNSGREAVATQLSESYYILRPEVVESYMYLWRQTHNPIYREWGWEVVLALEKYCRTEAGFSGIQDVYSSTPNHDNKQQSFFLAETLKYLYLLFSEDDLLSLEDWVFNTEAHPLPVNHSDSSGRAWGRH

SEQ ID NO: 49049 - protein, 362 aa, Homo sapiens [sequence omitted]

SEQ ID NO: 49050 - protein, 1144 aa, Homo sapiens
  Payload ID: 9827
  Gene Symbol: MAN2A1
  Gene Name: mannosidase, alpha, class 2A, member 1
  Uniprot ID: Q16706
  ENSP ID: ENSP00000261483
MKLSRQFTVFGSAIFCVVIFSLYLMLDRGHLDYPRNPRREGSFPQGQLSMLQEKIDHLERLLAENNEIISNIRDSVINLSESVEDGPKSSQSNFSQGAGSHLLPSQLSLSVDTADCLFASQSGSHNSDVQMLDVYSLISFDNPDGGVWKQGFDITYESNEWDTEPLQVFVVPHSHNDPGWLKTFNDYFRDKTQYIFNNMVLKLKEDSRRKFIWSEISYLSKWWDIIDIQKKDAVKSLIENGQLEIVTGGWVMPDEATPHYFALIDQLIEGHQWLENNIGVKPRSGWAIDPFGHSPTMAYLLNRAGLSHMLIQRVHYAVKKHFALHKTLEFFWRQNWDLGSVTDILCHMMPFYSYDIPHTCGPDPKICCQFDFKRLPGGRFGCPWGVPPETIHPGNVQSRARMLLDQYRKKSKLFRTKVLLAPLGDDFRYCEYTEWDLQFKNYQQLFDYMNSQSKFKVKIQFGTLSDFFDALDKADETQRDKGQSMFPVLSGDFFTYADRDDHYWSGYFTSRPFYKRMDRIMESHLRAAEILYYFALRQAHKYKINKFLSSSLYTALTEARRNLGLFQHHDAITGTAKDWVVVDYGTRLFHSLMVLEKIIGNSAFLLILKDKLTYDSYSPDTFLEMDLKQKSQDSLPQKNIIRLSAEPRYLVVYNPLEQDRISLVSVYVSSPTVQVFSASGKPVEVQVSAVWDTANTISETAYEISFRAHIPPLGLKVYKILESASSNSHLADYVLYKNKVEDSGIFTIKNMINTEEGITLENSFVLLRFDQTGLMKQMMTKEDGKHHEVNVQFSWYGTTIKRDKSGAYLFLPDGNAKPYVYTTPPFVRVTHGRIYSEVTCFFDHVTHRVRLYHIQGIEGQSVEVSNIVDIRKVYNREIAMKISSDIKSQNRFYTDLNGYQIQPRMTLSKLPLQANVYPMTTMAYIQDAKHRLTLLSAQSLGVSSLNSGQIEVIMDRRLMQDDNRGLEQGIQDNKITANLFRILLEKRSAVNTEEEKKSVSYPSLLSHITSSLMNHPVIPMANKFSSPTLELQGEFSPLQSSLPCDIHLVNLRTIQSKVGNGHSNEAALILHRKGFDCRFSSKGTGLFCSTTQGKILVQKLLNKFIVESLTPSSLSLMHSPPGTQNISEINLSPMEISTFRIQLR

SEQ ID NO: 49051 - protein, 1150 aa, Homo sapiens
  Payload ID: 9828
  Gene Symbol: MAN2A2
  Gene Name: mannosidase, alpha, class 2A, member 2
  Uniprot ID: P49641
  ENSP ID: ENSP00000353655
MKLKKQVTVCGAAIFCVAVFSLYLMLDRVQHDPTRHQNGGNFPRSQISVLQNRIEQLEQLLEENHEIISHIKDSVLELTANAEGPPAMLPYYTVNGSWVVPPEPRPSFFSISPQDCQFALGGRGQKPELQMLTVSEELPFDNVDGGVWRQGFDISYDPHDWDAEDLQVFVVPHSHNDPGWIKTFDKYYTEQTQHILNSMVSKLQEDPRRRFLWAEVSFFAKWWDNINVQKRAAVRRLVGNGQLEIATGGWVMPDEANSHYFALIDQLIEGHQWLERNLGATPRSGWAVDPFGYSSTMPYLLRRANLTSMLIQRVHYAIKKHFAATHSLEFMWRQTWDSDSSTDIFCHMMPFYSYDVPHTCGPDPKICCQFDFKRLPGGRINCPWKVPPRAITEANVAERAALLLDQYRKKSQLFRSNVLLVPLGDDFRYDKPQEWDAQFFNYQRLFDFFNSRPNLHVQAQFGTLSDYFDALYKRTGVEPGARPPGFPVLSGDFFSYADREDHYWTGYYTSRPFYKSLDRVLEAHLRGAEVLYSLAAAHARRSGLAGRYPLSDFTLLTEARRTLGLFQHHDAITGTAKEAVVVDYGVRLLRSLVNLKQVIIHAAHYLVLGDKETYHFDPEAPFLQVDDTRLSHDALPERTVIQLDSSPRFVVLFNPLEQERFSMVSLLVNSPRVRVLSEEGQPLAVQISAHWSSATEAVPDVYQVSVPVRLPALGLGVLQLQLGLDGHRTLPSSVRIYLHGRQLSVSRHEAFPLRVIDSGTSDFALSNRYMQVWFSGLTGLLKSIRRVDEEHEQQVDMQVLVYGTRTSKDKSGAYLFLPDGEAKPYVPKEPPVLRVTEGPFFSEVVAYYEHIHQAVRLYNLPGVEGLSLDISSLVDIRDYVNKELALHIHTDIDSQGIFFTDLNGFQVQPRRYLKKLPLQANFYPMPVMAYIQDAQKRLTLHTAQALGVSSLKDGQLEVILDRRLMQDDNRGLGQGLKDNKRTCNRFRLLLERRTVGSEVQDSHSTSYPSLLSHLTSMYLNAPALALPVARMQLPGPGLRSFHPLASSLPCDFHLLNLRTLQAEEDTLPSAETALILHRKGFDCGLEAKNLGFNCTTSQGKVALGSLFHGLDVVFLQPTSLTLLYPLASPSNSTDVYLEPMEIATFRLRLG

SEQ ID NO: 49052 - protein, 796 aa, Homo sapiens
  Payload ID: 9828
  Gene Symbol: MAN2A2
  Gene Name: mannosidase, alpha, class 2A, member 2
  ENSP ID: ENSP00000452631
MKLKKQVTVCGAAIFCVAVFSLYLMLDRVQHDPTRHQNGGNFPRSQISVLQNRIEQLEQLLEENHEIISHIKDSVLELTANAEGPPAMLPYYTVNGSWVVPPEPRPSFFSISPQDCQFALGGRGQKPELQMLTVSEELPFDNVDGGVWRQGFDISYDPHDWDAEDLQVFVVPHSHNDPGWIKTFDKYYTEQTQHILNSMVSKLQEDPRRRFLWAEVSFFAKWWDNINVQKRAAVRRLVGNGQLEIATGGWVMPDEANSHYFALIDQLIEGHQWLERNLGATPRSGWAVDPFGYSSTMPYLLRRANLTSMLIQRVHYAIKKHFAATHSLEFMWRQTWDSDSSTDIFCHMMPFYSYDVPHTCGPDPKICCQFDFKRLPGGRINCPWKVPPRAITEANVAERAALLLDQYRKKSQLFRSNVLLVPLGDDFRYDKPQEWDAQFFNYQRLFDFFNSRPNLHVQAQFGTLSDYFDALYKRTGVEPGARPPGFPVLSGDFFSYADREDHYWTGYYTSRPFYKSLDRVLEAHLRGAEVLYSLAAAHARRSGLAGRYPLSDFTLLTEARRTLGLFQHHDAITGTAKEAVVVDYGVRLLRSLVNLKQVIIHAAHYLVLGDKETYHFDPEAPFLQVDDTRLSHDALPERTVIQLDSSPRFVVLFNPLEQERFSMVSLLVNSPRVRVLSEEGQPLAVQISAHWSSATEAVPDVYQVSVPVRLPALGLGVLQLQLGLDGHRTLPSSVRIYLHGRQLSVSRHEAFPLRVIDSGTSDFALSNRYMQVWFSGLTGLLKGSGLCFLAEHPKGG

SEQ ID NO: 49053 - protein, 50 aa, Homo sapiens
  Payload ID: 9828
  Gene Symbol: MAN2A2
  Gene Name: mannosidase, alpha, class 2A, member 2
  ENSP ID: ENSP00000452691
MKLKKQVTVCGAAIFCVAVFSLYLMLDRVQHDPTRHQNGGNFPRSQISVL

SEQ ID NO: 49054 - protein, 360 aa, Homo sapiens
  Payload ID: 9828
  Gene Symbol: MAN2A2
  Gene Name: mannosidase, alpha, class 2A, member 2
  ENSP ID: ENSP00000452813
  MOD_RES (1)..(1): Any amino acid
XFPLRVIDSGTSDFALSNRYMQVWFSGLTGLLKPYVPKEPPVLRVTEGPFFSEVVAYYEHIHQAVRLYNLPGVEGLSLDISSLVDIRDYVNKELALHIHTDIDSQGIFFTDLNGFQVQPRRYLKKLPLQANFYPMPVMAYIQDAQKRLTLHTAQALGVSSLKDGQLEVILDRRLMQDDNRGLGQGLKDNKRTCNRFRLLLERRTVGSEVQDSHSTSYPSLLSHLTSMYLNAPALALPVARMQLPGPGLRSFHPLASSLPCDFHLLNLRTLQAEEDTLPSAETALILHRKGFDCGLEAKNLGFNCTTSQGKVALGSLFHGLDVVFLQPTSLTLLYPLASPSNSTDVYLEPMEIATFRLRLG

SEQ ID NO: 49055 - protein, 329 aa, Homo sapiens
  Payload ID: 9828
  Gene Symbol: MAN2A2
  Gene Name: mannosidase, alpha, class 2A, member 2
  ENSP ID: ENSP00000452866
  MOD_RES (1)..(1): Any amino acid
XPRSAANLISNACLVGASTALGRCHPGPSQRPTWQRGQPCFWTNTGRSPSCSEATSSWCLLEMTSDMTSPRSGMPSSSTTNGSLTSSTAGLTSMCRGAEVLYSLAAAHARRSGLAGRYPLSDFTLLTEARRTLGLFQHHDAITGTAKEAVVVDYGVRLLRSLVNLKQVIIHAAHYLVLGDKETYHFDPEAPFLQVDDTRLSHDALPERTVIQLDSSPRFVVLFNPLEQERFSMVSLLVNSPRVRVLSEEGQPLAVQISAHWSSATEAVPDVYQVSVPVRLPALGLGVLQLQLGLDGHRTLPSSVRIYLHGRQLSVSRHEAFPLRVIDSG

SEQ ID NO: 49056 - protein, 195 aa, Homo sapiens
  Payload ID: 9828
  Gene Symbol: MAN2A2
  Gene Name: mannosidase, alpha, class 2A, member 2
  ENSP ID: ENSP00000452897
  MOD_RES (1)..(1): Any amino acid
XMLPYYTVNGSWVVPPEPRPSFFSISPQDCQFALGGRGQKPELQMLTVSEELPFDNVDGGVWRQGFDISYDPHDWDAEDLQEDPRRRFLWAEVSFFAKWWDNINVQKRAAVRRLVGNGQLEIATGGWVMPDEANSHYFALIDQLIEGHQWLERNLGATPRSGWAVDPFGYSSTMPYLLRRANLTSMLIQRVHYAI

SEQ ID NO: 49057 - protein, 264 aa, Homo sapiens
  Payload ID: 9828
  Gene Symbol: MAN2A2
  Gene Name: mannosidase, alpha, class 2A, member 2
  ENSP ID: ENSP00000452928
  MOD_RES (1)..(1): Any amino acid
XARPPGFPVLSGDFFSYADREDHYWTGYYTSRPFYKSLDRVLEAHLRGAEVLYSLAAAHARRSGLAGRYPLSDFTLLTEARRTLGLFQHHDAITGTAKEAVVVDYGVRLLRSLVNLKQVIIHAAHYLVLGDKETYHFDPEAPFLQVDDTRLSHDALPERTVIQLDSSPSPPSTHRFVVLFNPLEQERFSMVSLLVNSPRVRVLSEEGQPLAVQISAHWSSATEAVPDVYQVSVPVRLPALGLGVLQLQLGLDGHRTLPSSVRIY

SEQ ID NO: 49058 - protein, 1150 aa, Homo sapiens; identical to SEQ ID NO: 49051
  Payload ID: 9828
  Gene Symbol: MAN2A2
  Gene Name: mannosidase, alpha, class 2A, member 2
  Uniprot ID: P49641
  ENSP ID: ENSP00000452948

SEQ ID NO: 49059 - protein, 120 aa, Homo sapiens
  Payload ID: 9828
  Gene Symbol: MAN2A2
  Gene Name: mannosidase, alpha, class 2A, member 2
  ENSP ID: ENSP00000453078
MKLKKQVTVCGAAIFCVAVFSLYLMLDRVQHDPTRHQNGGNFPRSQISVLQNRIEQLEQLLEENHEIISHIKDSVLELTANAEGPPAMLPYYTVNGSWVVPPEPRPSFFSISPQDCQFAL

SEQ ID NO: 49060 - protein, 793 aa, Homo sapiens
  Payload ID: 9828
  Gene Symbol: MAN2A2
  Gene Name: mannosidase, alpha, class 2A, member 2
  ENSP ID: ENSP00000453140
YAIKKHFAATHSLEFMWRQTWDSDSSTDIFCHMMPFYSYDVPHTCGPDPKICCQFDFKRLPGGRINCPWKVPPRAITEANVAERAALLLDQYRKKSQLFRSNVLLVPLGDDFRYDKPQEWDAQFFNYQRLFDFFNSRPNLHVQDHYWTGYYTSRPFYKSLDRVLEAHLRGAEVLYSLAAAHARRSGLAGRYPLSDFTLLTEARRTLGLFQHHDAITGTAKEAVVVDYGVRLLRSLVNLKQVIIHAAHYLVLGDKETYHFDPEAPFLQVDDTRLSHDALPERTVIQLDSSPRFVVLFNPLEQERFSMVSLLVNSPRVRVLSEEGQPLAVQISAHWSSATEAVPDVYQVSVPVRLPALGLGVLQLQLGLDGHRTLPSSVRIYLHGRQLSVSRHEAFPLRVIDSGTSDFALSNRYMQVWFSGLTGLLKSIRRVDEEHEQQVDMQVLVYGTRTSKDKSGAYLFLPDGEAKPYVPKEPPVLRVTEGPFFSEVVAYYEHIHQAVRLYNLPGVEGLSLDISSLVDIRDYVNKELALHIHTDIDSQGIFFTDLNGFQVQPRRYLKKLPLQANFYPMPVMAYIQDAQKRLTLHTAQALGVSSLKDGQLEVILDRRLMQDDNRGLGQGLKDNKRTCNRFRLLLERRTVGSEVQDSHSTSYPSLLSHLTSMYLNAPALALPVARMQLPGPGLRSFHPLASSLPCDFHLLNLRTLQAEEDTLPSAETALILHRKGFDCGLEAKNLGFNCTTSQGKVALGSLFHGLDVVFLQPTSLTLLYPLASPSNSTDVYLEPMEIATFRLRLG

SEQ ID NO: 49061 - protein, 164 aa, Homo sapiens
  Payload ID: 9828
  Gene Symbol: MAN2A2
  Gene Name: mannosidase, alpha, class 2A, member 2
  ENSP ID: ENSP00000453253
  MOD_RES (1)..(1): Any amino acid
XTSPRSPPCCVSLKALSSQRWLRTMSTFTRRSGFTICQVQPRRYLKKLPLQANFYPMPVMAYIQDAQKRLTLHTAQALGVSSLKDGQLEVILDRRLMQDDNRGLGQGLKDNKRTCNRFRLLLERRTVGSEVQDSHSTSYPSLLSHLTSMYLNAPALALPVARMQ

SEQ ID NO: 49062 - protein, 319 aa, Homo sapiens
  Payload ID: 9828
  Gene Symbol: MAN2A2
  Gene Name: mannosidase, alpha, class 2A, member 2
  ENSP ID: ENSP00000453341
  MOD_RES (1)..(1): Any amino acid
XKEPPVLRVTEGPFFSEVVAYYEHIHQAVRLYNLPGVEGLSLDISSLVDIRDYVNKELALHIHTDIDSQGIFFTDLNGFQVQPRRYLKKLPLQANFYPMPVMAYIQDAQKRLTLHTAQALGVSSLKDGQLEVILDRRLMQDDNRGLGQGLKDNKRTCNRFRLLLERRTVGSEPDFFSKLAAMFRGLIFHSSRSGNREVQDSHSTSYPSLLSHLTSMYLNAPALALPVARMQLPGPGLRSFHPLASSLPCDFHLLNLRTLQAEEDTLPSAETALILHRKGFDCGLEAKNLGFNCTTSQGKVALGSLFHGLDVVFLQPTSL

SEQ ID NO: 49063 - protein, 58 aa, Homo sapiens
  Payload ID: 9828
  Gene Symbol: MAN2A2
  Gene Name: mannosidase, alpha, class 2A, member 2
  ENSP ID: ENSP00000453659
  MOD_RES (1)..(1): Any amino acid
XCTTSQGKVALGSLFHGLDVVFLQPTSLTLLYPLASPSNSTDVYLEPMEIATFRLRLG

SEQ ID NO: 49064 - protein, 72 aa, Homo sapiens
  Payload ID: 9828
  Gene Symbol: MAN2A2
  Gene Name: mannosidase, alpha, class 2A, member 2
  ENSP ID: ENSP00000453740
MKLKKQVTVCGAAIFCVAVFSLYLMLDRVQHDPTRHQNGGNFPRSQISVLQNRIEQLEQLLEENHEIISHIK

SEQ ID NO: 49065 - protein, 76 aa, Homo sapiens
  Payload ID: 9828
  Gene Symbol: MAN2A2
  Gene Name: mannosidase, alpha, class 2A, member 2
  ENSP ID: ENSP00000453956
MKLKKQVTVCGAAIFCVAVFSLYLMLDRVQHDPTRHQNGGNFPRSQISVLQNRIEQLEQLLEENHEIISHIKDSVL

SEQ ID NO: 49066 - protein, 938 aa, Homo sapiens
  Payload ID: 9828
  Gene Symbol: MAN2A2
  Gene Name: mannosidase, alpha, class 2A, member 2
  ENSP ID: ENSP00000453999
MKLKKQVTVCGAAIFCVAVFSLYLMLDRVQHDPTRHQNGGNFPRSQISVLQNRIEQLEQLLEENHEIISHIKDSVLELTANAEGPPAMLPYYTVNGSWVVPPEPRPSFFSISPQDCQFALGGRGQKPELQMLTVSEELPFDNVDGGVWRQGFDISYDPHDWDAEDLQVFVVPHSHNDPGWIKTFDKYYTEQTQHILNSMVSKLQEDPRRRFLWAEVSFFAKWWDNINVQKRAAVRRLVGNGQLEIATGGWVMPDEANSHYFALIDQLIEGHQWLERNLGATPRSGWAVDPFGYSSTMPYLLRRANLTSMLIQRVHYAIKKHFAATHSLEFMWRQTWDSDSSTDIFCHMMPFYSYDVPHTCGPDPKICCQFDFKRLPGGRINCPWKVPPRAITEANVAERAALLLDQYRKKSQLFRSNVLLVPLGDDFRYDKPQEWDAQFFNYQRLFDFFNSRPNLHVQAQFGTLSDYFDALYKRTGVEPGARPPGFPVLSGDFFSYADREDHYWTGYYTSRPFYKSLDRVLEAHLRGAEVLYSLAAAHARRSGLAGRYPLSDFTLLTEARRTLGLFQHHDAITGTAKEAVVVDYGVRLLRSLVNLKQVIIHAAHYLVLGDKETYHFDPEAPFLQVDDTRLSHDALPERTVIQLDSSPRFVVLFNPLEQERFSMVSLLVNSPRVRVLSEEGQPLAVQISAHWSSATEAVPDVYQVSVPVRLPALGLGVLQLQLGLDGHRTLPSSVRIYLHGRQLSVSRHEAFPLRVIDSGTSDFALSNRYMQVWFSGLTGLLKSIRRVDEEHEQQVDMQVLVYGTRTSKDKSGAYLFLPDGEAKPYVPKEPPVLRVTEGPFFSEVVAYYEHIHQAVRLYNLPGVEGLSLDISSLVDIRDYVNKELALHIHTDIDSQGAAPTVSEEAPPPGQLLPHASHGLYPGRTEAPHAAHCPGPGCL

SEQ ID NO: 49067 - protein, 1010 aa, Homo sapiens
  Payload ID: 9829
  Gene Symbol: MAN2B1
  Gene Name: mannosidase, alpha, class 2B, member 1
  Uniprot ID: O00754
  ENSP ID: ENSP00000221363
MGAYARASGVCARGCLDSAGPWTMSRALRPPLPPLCFFLLLLAAAGARAGGYETCPTVQPNMLNVHLLPHTHDDVGWLKTVDQYFYGIKNDIQHAGVQYILDSVISALLADPTRRFIYVEIAFFSRWWHQQTNATQEVVRDLVRQGRLEFANGGWVMNDEAATHYGAIVDQMTLGLRFLEDTFGNDGRPRVAWHIDPFGHSREQASLFAQMGFDGFFFGRLDYQDKWVRMQKLEMEQVWRASTSLKPPTADLFTGVLPNGYNPPRNLCWDVLCVDQPLVEDPRSPEYNAKELVDYFLNVATAQGRYYRTNHTVMTMGSDFQYENANMWFKNLDKLIRLVNAQAKGSSVHVLYSTPACYLWELNKANLTWSVKHDDFFPYADGPHQFWTGYFSSRPALKRYERLSYNFLQVCNQLEALVGLAANVGPYGSGDSAPLNEAMAVLQHHDAVSGTSRQHVANDYARQLAAGWGPCEVLLSNALARLRGFKDHFTFCQQLNISICPLSQTAARFQVIVYNPLGRKVNWMVRLPVSEGVFVVKDPNGRTVPSDVVIFPSSDSQAHPPELLFSASLPALGFSTYSVAQVPRWKPQARAPQPIPRRSWSPALTIENEHIRATFDPDTGLLMEIMNMNQQLLLPVRQTFFWYNASIGDNESDQASGAYIFRPNQQKPLPVSRWAQIHLVKTPLVQEVHQNFSAWCSQVVRLYPGQRHLELEWSVGPIPVGDTWGKEVISRFDTPLETKGRFYTDSNGREILERRRDYRPTWKLNQTEPVAGNYYPVNTRIYITDGNMQLTVLTDRSQGGSSLRDGSLELMVHRRLLKDDGRGVSEPLMENGSGAWVRGRHLVLLDTAQAAAAGHRLLAEQEVLAPQVVLAPGGGAAYNLGAPPRTQFSGLRRDLPPSVHLLTLASWGPEMVLLRLEHQFAVGEDSGRNLSAPVTLNLRDLFSTFTITRLQETTLVANQLREAASRLKWTTNTGPTPHQTPYQLDPANITLEPMEIRTFLASVQWKEVDG

SEQ ID NO: 49068 - protein, 1011 aa, Homo sapiens
  Payload ID: 9829
  Gene Symbol: MAN2B1
  Gene Name: mannosidase, alpha, class 2B, member 1
  Uniprot ID: O00754
  ENSP ID: ENSP00000395473
MGAYARASGVCARGCLDSAGPWTMSRALRPPLPPLCFFLLLLAAAGARAGGYETCPTVQPNMLNVHLLPHTHDDVGWLKTVDQYFYGIKNDIQHAGVQYILDSVISALLADPTRRFIYVEIAFFSRWWHQQTNATQEVVRDLVRQGRLEFANGGWVMNDEAATHYGAIVDQMTLGLRFLEDTFGNDGRPRVAWHIDPFGHSREQASLFAQMGFDGFFFGRLDYQDKWVRMQKLEMEQVWRASTSLKPPTADLFTGVLPNGYNPPRNLCWDVLCVDQPLVEDPRSPEYNAKELVDYFLNVATAQGRYYRTNHTVMTMGSDFQYENANMWFKNLDKLIRLVNAQQAKGSSVHVLYSTPACYLWELNKANLTWSVKHDDFFPYADGPHQFWTGYFSSRPALKRYERLSYNFLQVCNQLEALVGLAANVGPYGSGDSAPLNEAMAVLQHHDAVSGTSRQHVANDYARQLAAGWGPCEVLLSNALARLRGFKDHFTFCQQLNISICPLSQTAARFQVIVYNPLGRKVNWMVRLPVSEGVFVVKDPNGRTVPSDVVIFPSSDSQAHPPELLFSASLPALGFSTYSVAQVPRWKPQARAPQPIPRRSWSPALTIENEHIRATFDPDTGLLMEIMNMNQQLLLPVRQTFFWYNASIGDNESDQASGAYIFRPNQQKPLPVSRWAQIHLVKTPLVQEVHQNFSAWCSQVVRLYPGQRHLELEWSVGPIPVGDTWGKEVISRFDTPLETKGRFYTDSNGREILERRRDYRPTWKLNQTEPVAGNYYPVNTRIYITDGNMQLTVLTDRSQGGSSLRDGSLELMVHRRLLKDDGRGVSEPLMENGSGAWVRGRHLVLLDTAQAAAAGHRLLAEQEVLAPQVVLAPGGGAAYNLGAPPRTQFSGLRRDLPPSVHLLTLASWGPEMVLLRLEHQFAVGEDSGRNLSAPVTLNLRDLFSTFTITRLQETTLVANQLREAASRLKWTTNTGPTPHQTPYQLDPANITLEPMEIRTFLASVQWKEVDG

SEQ ID NO: 49069 - protein, 67 aa, Homo sapiens
  Payload ID: 9829
  Gene Symbol: MAN2B1
  Gene Name: mannosidase, alpha, class 2B, member 1
  ENSP ID: ENSP00000469456
  MOD_RES (1)..(1): Any amino acid
XSDVVIFPSSDSQAHPPELLFSASLPALGFSTYSVAQVPRWKPQARAPQPIPRRSWSPALTIENEGC

SEQ ID NO: 49070 - protein, 164 aa, Homo sapiens
  Payload ID: 9829
  Gene Symbol: MAN2B1
  Gene Name: mannosidase, alpha, class 2B, member 1
  ENSP ID: ENSP00000470174
MGAYARASGVCARGCLDSAGPWTMSRALRPPLPPLCFFLLLLAAAGARAGGYESRMTSSTPVCSTSWTRSSLPCWQIPPVASFTWRLPSSPVGGTSRQMPHRKSCETLCARMGFDGFFFGRLDYQDKWVRMQKLEMEQVWRASTSLKPPTADLFTGVLPNGYNP
